(19) United States
(12) Patent Application Publication
(10) Pub. No.: US 2022/0281922 A1
(43) Pub. Date: Sep. 8, 2022

(54) AAV VARIANTS WITH ENHANCED TROPISM

(71) Applicants: Voyager Therapeutics, Inc., Cambridge, MA (US); California Institute of Technology, Pasadena, CA (US)

(72) Inventors: Dinah Wen-Yee SAH, Hopkinton, MA (US); Jinzhao HOU, Cambridge, MA (US); Kei ADACHI, Portland, OR (US); Wei WANG, Arlington, MA (US); Qingmin CHEN, Belmont, MA (US); Jenna CARROLL SOPER, Winchester, MA (US); Amy REN, Cambridge, MA (US); Xiao-Qin REN, Cambridge, MA (US); Benjamin E. DEVERMAN, Somerville, MA (US); Viviana GRADINARU, Pasadena, CA (US); Qin HUANG, Arlington, MA (US); Sripriya RAVINDRA KUMAR, Seirra Madre, CA (US)

(21) Appl. No.: 17/631,737

(22) PCT Filed: Jul. 31, 2020
(86) PCT No.: PCT/US2020/044487

§ 371 Date: Jan. 31, 2022

Related U.S. Application Data
(60) Provisional application No. 62/882,025, filed on Aug. 2, 2019.

(51) Int. Cl. C07K 14/005; C12N 15/86

(52) U.S. Cl. CPC C07K 14/005; C12N 15/86; C12N 2750/14122; C12N 2750/14123; C12N 2750/14145; C12N 2750/14171

(57) ABSTRACT

The disclosure relates to compositions, methods, and processes for the preparation, use, and/or formulation of adeno-associated virus capsid proteins, wherein the capsid proteins comprise targeting peptide inserts for enhanced tropism to a target tissue.

### CROSS REFERENCE TO RELATED APPLICATIONS

[0001] This application claims the benefit of U.S. Provisional Patent Application No. 62/882,025 filed Aug. 2, 2019, entitled “AAV VARIANTS WITH ENHANCED TROPISM”, the contents of which are herein incorporated by reference in their entirety.

### SEQUENCE LISTING

[0002] The instant application contains a Sequence Listing which has been filed electronically in ASCII format and is hereby incorporated by reference in its entirety. Said ASCII copy, created on Jul. 31, 2020 named 2057_1089PCT_SL.txt and is 11,127,739 bytes in size.

### FIELD OF THE DISCLOSURE

[0003] The disclosure relates to compositions, methods, and processes for the preparation, use, and/or formulation of adeno-associated virus capsid proteins, wherein the capsid proteins comprise targeting peptide inserts for enhanced tropism to a target tissue.

### BACKGROUND OF THE DISCLOSURE

[0004] Recombinant adeno-associated viral vectors (AAV) have proven to be a useful biological tool and are increasingly showing promise in the field of gene therapy for the treatment of human disease.

[0005] AAV-based therapies are currently being tested for the treatment of a wide-range of human disease. In some cases, the AAV-based therapy may be brought easily into contact with the system in need, such as for treating diseases of the blood (e.g., lipoprotein lipase deficiency or hemophilias), the eye (e.g., Leber's congenital amaurosis or inherited retinal diseases), or muscle (e.g., Duchenne muscular dystrophy). In other cases, such as, for example, in treating disorders of the central nervous systems (CNS; i.e., brain and spinal cord), delivery of the AAV-based therapy becomes more complicated. Direct administration generally involves invasive surgeries, while the blood brain barrier impedes access of the AAV-based therapy to the CNS if administered systemically. Further, high doses of AAV-based therapies are necessary to yield sufficient transduction of target CNS tissue, giving rise to enhanced risk of side effects and/or production difficulties given the high volumes needed.

[0006] Though the peripheral nervous system (PNS; i.e., nervous tissue outside the brain and spinal cord) may be thought of as more accessible for therapeutic intervention, some PNS tissues, such as dorsal root ganglia remain difficult to target.

[0007] To identify AAV capsid proteins with desired tropism profiles, libraries of novel capsids have been created and screened. A variety of capsid engineering methods have been used, including DNA barcoding, directed evolution, random peptide insertions, and capsid shuffling and/or chimeras. In one such method known as CREATE, a series of targeting peptides was identified that enhanced the AAV capsid protein tropism for CNS tissues. The majority of this work has been carried out in mouse models, meaning that there still remains an issue of translatability to human subjects and conditions.

[0008] Even though such ongoing efforts to generate AAV capsids with enhanced tropism to CNS tissues and/or blood brain barrier permeability have yielded improvements, a need still exists for AAV particles with enhanced tropism for CNS or PNS tissue for the use of treating human disease. Even more so, a need exists for AAV particles with enhanced tropism for CNS or PNS tissues, which may be delivered intravenously to a subject in need, at a low dose, and yet still provide sufficient transduction of the target cell-type, tissue and/or organ.

[0009] The present disclosure addresses this need by providing novel targeting peptides and associated AAV capsid proteins and AAV particles for enhanced tropism to the human CNS or PNS following intravenous delivery. In addition, the viral genomes of these AAV particles may be manipulated to suit the needs of a wide variety of CNS or PNS-associated disorders, or neurological disease.

### SUMMARY OF THE DISCLOSURE

[0010] In one aspect, the disclosure provides targeting peptides that include at least 4 contiguous amino acids of any member of a group of sequences that include but are not limited to SEQ ID NO: 43073-43341. In some embodiments, the targeting peptide may include at least 7 contiguous amino acids of any member of the group of sequences that include but are not limited to SEQ ID NO: 43073-43341.

[0011] In one aspect, targeting peptide sequences may be inserted into a parent sequence, for example, a targeting peptide may be inserted into a parent AAV capsid protein comprising a parent VP1 amino acid sequence set forth as SEQ ID NO: 2 or SEQ ID NO: 3. The parent VP1 amino acid sequence may include a VP2 region and/or a VP3 region. Targeting peptides may be inserted into the parent sequence in any of the VP1, VP2, or VP3 regions.

[0012] In one aspect, a targeting peptide may be inserted at any amino acid position between amino acids 586-592, inclusive, of the parent VP1 amino acid sequence.

[0013] In one aspect, a targeting peptide may be inserted between amino acids 588-589 of the parent amino acid sequence.

[0014] In one aspect, the disclosure provides AAV particles comprising an AAV capsid protein with a targeting sequence insert and a viral genome. The viral genome comprises a nucleic acid sequence encoding a payload, wherein the payload may be an RNAi agent or a polypeptide.

[0015] In one aspect, the AAV particles of the disclosure comprise a viral genome encoding an RNAi agent payload. The RNAi agent may be, but is not limited to, a dsRNA, siRNA, shRNA, pre-miRNA, pri-miRNA, miRNA, stRNA, lncRNA, piRNA, or snoRNA. When the RNAi agent is expressed, it inhibits or suppresses the expression of a gene of interest in a cell, wherein the gene of interest may be, but is not limited to, SOD1, MAPT, APOE, HTT, C9ORF72, TDP-43, APP, BACE, SNCA, ATXN1, ATXN2, ATXN3, ATXN7, SCN1A-SCN5A, or SCN8A-SCN11A.

[0016] In one aspect, the AAV particles of the disclosure comprise a viral genome encoding a polypeptide payload. The polypeptide may be, but is not limited to, an antibody, aromatic L-amino acid decarboxylase (AADC), survival motor neuron 1 (SMNI1), frataxin (FXN), ApoE2, GBA1, GRN, ASPA, CLN2, GLB1, SGSH, NAGLU, IDS, NPC1, or GAN.

[0017] In one aspect, the AAV particles of the disclosure may be formulated with a pharmaceutically acceptable excipient to prepare a pharmaceutical composition. The pharmaceutical composition may be administered to a subject in need in order to treat a disease in said subject. The disease may be, but is not limited to, Huntington's Disease, Amyotrophic Lateral Sclerosis, Friedreich's Ataxia, Parkinson's Disease, Alzheimer's Disease, a tauopathy or neuropathic pain.

### BRIEF DESCRIPTION OF THE FIGURES

[0018] The foregoing and other objects, features and advantages will be apparent from the following description of particular embodiments of the present disclosure, as illustrated in the accompanying figures. The figures are not necessarily to scale or comprehensive, with emphasis instead being placed upon illustrating the principles of various embodiments of the present disclosure.

[0019] FIG. 1 shows a schematic for a non-limiting example of the CREATE method in non-human primate.

### DETAILED DESCRIPTION

[0020] The details of one or more embodiments of the disclosure are set forth in the accompanying description below. Although any materials and methods similar or equivalent to those described herein can be used in the practice or testing of the present disclosure, the preferred materials and methods are now described. Other features, objects and advantages of the disclosure will be apparent from the description. In the description, the singular forms also include the plural unless the context clearly dictates otherwise. Unless defined otherwise, all technical and scientific terms used herein have the same meaning as commonly understood by one of ordinary skill in the art to which this disclosure belongs. In the case of conflict, the present description will control.

### I. Introduction

[0021] According to the present disclosure. AAV particles with enhanced tropism for a target tissue (e.g., CNS) are provided, as well as associated processes for their targeting, preparation, formulation and use. Targeting peptides and nucleic acid sequences encoding the targeting peptides are provided. These targeting peptides may be inserted into an AAV capsid protein sequence to alter tropism to a particular cell-type, tissue, organ or organism, in vivo, ex vivo or in vitro.

[0022] As used herein, an “AAV particle” or “AAV vector” comprises a capsid protein and a viral genome, wherein the viral genome comprises at least one payload region and at least one inverted terminal repeat (ITR). The AAV particle and/or its component capsid and viral genome may be engineered to alter tropism to a particular cell-type, tissue, organ or organism.

[0023] As used herein, “viral genome” or “vector genome” refers to the nucleic acid sequence(s) encapsulated in an AAV particle. A viral genome comprises a nucleic acid sequence with at least one payload region encoding a payload and at least one ITR.

[0024] As used herein, a “payload region” is any nucleic acid molecule which encodes one or more “payloads” of the disclosure. As non-limiting examples, a payload region may be a nucleic acid sequence encoding a payload comprising an RNAi agent or a polypeptide.

[0025] As used herein, a “targeting peptide” refers to a peptide of 3-20 amino acids in length. These targeting peptides may be inserted into, or attached to, a parent amino acid sequence to alter the characteristics (e.g., tropism) of the parent protein. As a non-limiting example, the targeting peptide can be inserted into an AAV capsid sequence for enhanced targeting to a desired cell-type, tissue, organ or organism.

[0026] The AAV particles and payloads of the disclosure may be delivered to one or more target cells, tissues, organs, or organisms. In a preferred embodiment, the AAV particles of the disclosure demonstrate enhanced tropism for a target cell type, tissue or organ. As a non-limiting example, the AAV particle may have enhanced tropism for cells and tissues of the central or peripheral nervous systems (CNS and PNS, respectively). The AAV particles of the disclosure may, in addition, or alternatively, have decreased tropism for an undesired target cell-type, tissue or organ.

### II. Compositions of the Disclosure

[0027] Adeno-associated viruses (AAV) are small non-enveloped icosahedral capsid viruses of the Parvoviridae family characterized by a single stranded DNA viral genome. Parvoviridae family viruses consist of two subfamilies: Parvovirinae, which infect vertebrates, and Densovirinae, which infect invertebrates. The Parvoviridae family comprises the Dependovirus genus which includes AAV, capable of replication in vertebrate hosts including, but not limited to, human, primate, bovine, canine, equine, and ovine species.

[0028] The parvoviruses and other members of the Parvoviridae family are generally described in Kenneth I. Berns, “Parvoviridae: The Viruses and Their Replication,” Chapter 69 in FIELDS VIROLOGY (3d Ed. 1996), the contents of which are incorporated by reference in their entirety.

[0029] AAV have proven to be useful as a biological tool due to their relatively simple structure, their ability to infect a wide range of cells (including quiescent and dividing cells) without integration into the host genome and without replicating, and their relatively benign immunogenic profile. The genome of the virus may be manipulated to contain a minimum of components for the assembly of a functional recombinant virus, or viral particle, which is loaded with or engineered to target a particular tissue and express or deliver a desired payload.

[0030] The wild-type AAV vector genome is a linear, single-stranded DNA (ssDNA) molecule approximately 5,000 nucleotides (nt) in length. Inverted terminal repeats (ITRs) traditionally cap the viral genome at both the 5′ and the 3′ end, providing origins of replication for the viral genome. While not wishing to be bound by theory, an AAV viral genome typically comprises two ITR sequences. These ITRs have a characteristic T-shaped hairpin structure defined by a self-complementary region (145 nt in wild-type AAV) at the 5′ and 3′ ends of the ssDNA which form an energetically stable double stranded region. The double stranded hairpin structures comprise multiple functions including, but not limited to, acting as an origin for DNA replication by functioning as primers for the endogenous DNA polymerase complex of the host viral replication cell.

[0031] The wild-type AAV viral genome further comprises nucleotide sequences for two open reading frames, one for the four non-structural Rep proteins (Rep78, Rep68, Rep52, Rep40, encoded by Rep genes) and one for the three capsid, or structural, proteins (VP1, VP2, VP3, encoded by capsid genes or Cap genes). The Rep proteins are important for replication and packaging, while the capsid proteins are assembled to create the protein shell of the AAV, or AAV capsid. Alternative splicing and alternate initiation codons and promoters result in the generation of four different Rep proteins from a single open reading frame and the generation of three capsid proteins from a single open reading frame. Though it varies by AAV serotype, as a non-limiting example, for AAV9/hu.14 (SEQ ID NO: 123 of U.S. Pat. No. 7,906,111, the contents of which are herein incorporated by reference in their entirety) VP1 refers to amino acids 1-736, VP2 refers to amino acids 138-736, and VP3 refers to amino acids 203-736. In other words, VP1 is the full length capsid sequence, while VP2 and VP3 are shorter components of the whole. As a result, changes in the sequence in the VP3 region, are also changes to VP1 and VP2, however, the percent difference as compared to the parent sequence will be greatest for VP3 since it is the shortest sequence of the three. Though described here in relation to the amino acid sequence, the nucleic acid sequence encoding these proteins can be similarly described. Together, the three capsid proteins assemble to create the AAV capsid protein. While not wishing to be bound by theory, the AAV capsid protein typically comprises a molar ratio of 1:1:10 of VP1:VP2:VP3. As used herein, an “AAV serotype” is defined primarily by the AAV capsid. In some instances, the ITRs are also specifically described by the AAV serotype (e.g., AAV2/9).

[0032] For use as a biological tool, the wild-type AAV viral genome can be modified to replace the rep/cap sequences with a nucleic acid sequence comprising a payload region with at least one ITR region. Typically, in recombinant AAV viral genomes there are two ITR regions. The rep/cap sequences can be provided in trans during production to generate AAV particles.

[0033] In addition to the encoded heterologous payload, AAV vectors may comprise the viral genome, in whole or in part, of any naturally occurring and/or recombinant AAV serotype nucleotide sequence or variant. AAV variants may have sequences of significant homology at the nucleic acid (genome or capsid) and amino acid levels (capsids), to produce constructs which are generally physical and functional equivalents, replicate by similar mechanisms, and assemble by similar mechanisms. Chiorini et al., J. Vir. 71: 6823-33(1997); Srivastava et al., J. Vir. 45:555-64 (1983); Chiorini et al., J. Vir. 73:1309-1319 (1999); Rutledge et al., J. Vir. 72:309-319 (1998); and Wu et al., J. Vir. 74: 8635-47 (2000), the contents of each of which are incorporated herein by reference in their entirety.

[0034] In certain embodiments, AAV particles of the present disclosure are recombinant AAV viral vectors which are replication defective and lacking sequences encoding functional Rep and Cap proteins within their viral genome. These defective AAV vectors may lack most or all parental coding sequences and essentially carry only one or two AAV ITR sequences and the nucleic acid of interest for delivery to a cell, a tissue, an organ, or an organism.

[0035] In certain embodiments, the viral genome of the AAV particles of the present disclosure comprises at least one control element which provides for the replication, transcription, and translation of a coding sequence encoded therein. Not all of the control elements need always be present as long as the coding sequence is capable of being replicated, transcribed, and/or translated in an appropriate host cell. Non-limiting examples of expression control elements include sequences for transcription initiation and/or termination, promoter and/or enhancer sequences, efficient RNA processing signals such as splicing and polyadenylation signals, sequences that stabilize cytoplasmic mRNA, sequences that enhance translation efficacy (e.g., Kozak consensus sequence), sequences that enhance protein stability, and/or sequences that enhance protein processing and/or secretion.

[0036] According to the present disclosure, AAV particles for use in therapeutics and/or diagnostics comprise a virus that has been distilled or reduced to the minimum components necessary for transduction of a nucleic acid payload or cargo of interest. In this manner, AAV particles are engineered as vehicles for specific delivery while lacking the deleterious replication and/or integration features found in wild-type viruses.

[0037] AAV vectors of the present disclosure may be produced recombinantly and may be based on adeno-associated virus (AAV) parent or reference sequences. As used herein, a “vector” is any molecule or moiety which transports, transduces, or otherwise acts as a carrier of a heterologous molecule such as the nucleic acids described herein.

[0038] In addition to single stranded AAV viral genomes (e.g., ssAAVs), the present disclosure also provides for self-complementary AAV (scAAVs) viral genomes. scAAV vector genomes contain DNA strands which anneal together to form double stranded DNA. By skipping second strand synthesis, scAAVs allow for rapid expression in the transduced cell.

[0039] In certain embodiments, the AAV particle of the present disclosure is an scAAV.

[0040] In certain embodiments, the AAV particle of the present disclosure is an ssAAV.

[0041] Methods for producing and/or modifying AAV particles are disclosed in the art such as pseudotyped AAV vectors (PCT Patent Publication Nos. WO200028004; WO200123001: WO2004112727; WO2005005610; and WO2005072364, the content of each of which is incorporated herein by reference in its entirety).

[0042] AAV particles may be modified to enhance the efficiency of delivery. Such modified AAV particles can be packaged efficiently and be used to successfully infect the target cells at high frequency and with minimal toxicity. In some embodiments, the capsids of the AAV particles are engineered according to the methods described in US Publication Number US20130195801, the contents of which are incorporated herein by reference in their entirety.

[0043] In certain embodiments, the AAV particles of the disclosure comprising a capsid with an inserted targeting peptide and a viral genome, may have enhanced tropism for a cell-type or tissue of the human CNS.

### AAV Capsids

[0044] AAV particles of the present disclosure may comprise or be derived from any natural or recombinant AAV serotype. AAV serotypes may differ in characteristics such as, but not limited to, packaging, tropism, transduction and immunogenic profiles. While not wishing to be bound by theory, the AAV capsid protein is often considered to be the driver of AAV particle tropism to a particular tissue.

[0045] In certain embodiments, an AAV particle may have a capsid protein and ITR sequences derived from the same parent serotype (e.g., AAV2 capsid and AAV2 ITRs). In another embodiment, the AAV particle may be a pseudo-typed AAV particle, wherein the capsid protein and ITR sequences are derived from different parent serotypes (e.g., AAV9 capsid and AAV2 ITRs; AAV2/9).

[0046] The AAV particles of the present disclosure may comprise an AAV capsid protein with a targeting peptide inserted into the parent sequence. The parent capsid or serotype may comprise or be derived from any natural or recombinant AAV serotype. As used herein, a “parent” sequence is a nucleotide or amino acid sequence into which a targeting sequence is inserted (i.e., nucleotide insertion into nucleic acid sequence or amino acid sequence insertion into amino acid sequence).

[0047] In a preferred embodiment, the parent AAV capsid nucleotide sequence is as set forth in SEQ ID NO: 1.

[0048] In another embodiment, the parent AAV capsid nucleotide sequence is a K449R variant of SEQ ID NO: 1, wherein the codon encoding a lysine (e.g., AAA or AAG) at position 449 in the amino acid sequence (nucleotides 1345-1347) is exchanged for one encoding an arginine (CGT, CGC, CGA, CGG, AGA, AGG). The K449R variant has the same function as wild-type AAV9.

[0049] In a preferred embodiment, the parent AAV capsid amino acid sequence is as set forth in SEQ ID NO: 2.

[0050] In another embodiment, the parent AAV capsid amino acid sequence is as set forth in SEQ ID NO: 3.

[0051] In certain embodiments the parent AAV capsid sequence is any of those shown in Table 1.

TABLE 1
AAV Capsid Sequences

| | SEQ ID | |
|---|---|---|
| Serotype | NO | Reference Information |
| AAV9/hu.14 (nt) | 1 | US7906111 SEQ ID NO: 3; WO2015038958 SEQ ID NO: 11 |
| AAV9/hu.14 (aa) | 2 | US7906111 SEQ ID NO: 123; WO2015038958 SEQ ID NO: 2 |
| AAV9/hu.14 K449R (aa) | 3 | WO2017100671 SEQ ID NO: 45 |

[0052] Each of the patents, applications and or publications listed in Table 1 are hereby incorporated by reference in their entirety.

[0053] The parent AAV serotype and associated capsid sequence may be any of those known in the art. Non-limiting examples of such AAV serotypes include, AAV9, AAV9 K449R (or K449R AAV9), AAV1, AAVrh10. AAV-DJ, AAV-DJ8, AAV5, AAVPHP.B (PHP.B), AAVPHP.A (PHP.A). AAVG2B-26, AAVG2B-13, AAVTH1.1-32. AAVTH1.1-35, AAVPHP.B2 (PHP.B2), AAVPHP.B3 (PHP.B3), AAVPHP.N/PHP.B-DGT, AAVPHP.B-EST, AAVPHP.B-GGT, AAVPHP.B-ATP, AAVPHP.B-ATT-T, AAVPHP.B-DGT-T, AAVPHP.B-GGT-T, AAVPHP.B-SGS, AAVPHP.B-AQP, AAVPHP.B-QQP, AAVPHP.B-SNP(3), AAVPHP.B-SNP. AAVPHP.B-QGT, AAVPHP.B-NQT, AAVPHP.B-EGS, AAVPHP.B-SGN, AAVPHP.B-EGT, AAVPHP.B-DST, AAVPHP.B-DST, AAVPHP.B-STP, AAVPHP.B-PQP, AAVPHP.B-SQP, AAVPHP.B-QLP, AAVPHP.B-TMP, AAVPHP.B-TTP, AAVPHP.S/G2A12, AAVG2A15/G2A3 (G2A3), AAVG2B4 (G2B4), AAVG2B5 (G2B5), PHP.S, AAV2, AAV2G9, AAV3, AAV3a, AAV3b, AAV3-3, AAV4, AAV4-4, AAV6, AAV6.1, AAV6.2, AAV6.1.2, AAV7, AAV7.2, AAV8, AAV9.11. AAV9.13, AAV9.16, AAV9.24, AAV9.45, AAV9.47, AAV9.61, AAV9.68, AAV9.84, AAV9.9. AAV10, AAV11, AAV12, AAV16.3. AAV24.1, AAV27.3, AAV42.12, AAV42-1b, AAV42-2, AAV42-3a, AAV42-3b, AAV42-4, AAV42-5a, AAV42-5b, AAV42-6b, AAV42-8, AAV42-10, AAV42-11, AAV42-12, AAV42-13, AAV42-15, AAV42-aa, AAV43-1, AAV43-12, AAV43-20, AAV43-21, AAV43-23, AAV43-25, AAV43-5, AAV44.1, AAV44.2, AAV44.5, AAV223.1. AAV223.2. AAV223.4. AAV223.5, AAV223.6, AAV223.7, AAV1-7/rh.48, AAV1-8/rh.49, AAV2-15/rh.62, AAV2-3/rh.61, AAV2-4/rh.50, AAV2-5/rh.51, AAV3.1/hu.6, AAV3.1/hu.9, AAV3-9/rh.52, AAV3-11/rh.53, AAV4-8/r11.64, AAV4-9/rh.54. AAV4-19/rh.55, AAV5-3/rh.57, AAV5-22/rh.58, AAV7.3/hu.7, AAV16.8/hu.10, AAV16.12/hu.11. AAV29.3/bb.1, AAV29.5/bb.2, AAV106.1/hu.37, AAV114.3/hu.40, AAV127.2/hu.41, AAV127.5/hu.42, AAV128.3/hu.44, AAV130.4/hu.48, AAV145.1/hu.53, AAV145.5/hu.54, AAV145.6/hu.55, AAV161.10/hu.60, AAV161.6/hu.61, AAV33.12/hu.17, AAV33.4/hu.15. AAV33.8/hu.16, AAV52/hu.19, AAV52.1/hu.20, AAV58.2/hu.25, AAVA3.3, AAVA3.4, AAVA3.5, AAVA3.7, AAVC1, AAVC2. AAVC5. AAVF3, AAVF5, AAVH2, AAVrh.72, AAVhu.8, AAVrh.68, AAVrh.70, AAVpi.1, AAVpi.3, AAVpi.2, AAVrh.60, AAVrh.44, AAVrh.65, AAVrh.55, AAVrh.47, AAVrh.69, AAVrh.45, AAVrh.59, AAVhu.12, AAVH6, AAVH-1/hu.1, AAVH-5/hu.3, AAVLG-10/rh.40, AAVLG-4/rh.38, AAVLG-9/hu.39, AAVN721-8/rh.43, AAVCh.5, AAVCh.5R1, AAVcy.2, AAVcy.3, AAVcy.4, AAVcy.5, AAVCy.5R1, AAVCy.5R2, AAVCy.5R3, AAVCy.5R4, AAVcy.6, AAVhu.1, AAVhu.2, AAVhu.3, AAVhu.4, AAVhu.5, AAVhu.6, AAVhu.7, AAVhu.9, AAVhu.10, AAVhu.11, AAVhu.13, AAVhu.15, AAVhu.16, AAVhu.17, AAVhu.18, AAVhu.20, AAVhu.21. AAVhu.22, AAVhu.23.2, AAVhu.24, AAVhu.25, AAVhu.27, AAVhu.28, AAVhu.29, AAVhu.29R, AAVhu.31, AAVhu.32, AAVhu.34, AAVhu.35, AAVhu.37, AAVhu.39, AAVhu.40, AAVhu.41, AAVhu.42, AAVhu.43, AAVhu.44, AAVhu.44R1, AAVhu.44R2, AAVhu.44R3, AAVhu.45, AAVhu.46, AAVhu.47, AAVhu.48, AAVhu.48R1, AAVhu.48R2, AAVhu.48R3, AAVhu.49, AAVhu.51. AAVhu.52, AAVhu.54, AAVhu.55, AAVhu.56, AAVhu.57, AAVhu.58, AAVhu.60, AAVhu.61, AAVhu.63, AAVhu.64, AAVhu.66, AAVhu.67, AAVhu.14/9, AAVhu.t 19, AAVrh.2, AAVrh.2R, AAVrh.8. AAVrh.8R, AAVrh.10, AAVrh.12, AAVrh.13, AAVrh.13R, AAVrh.14, AAVrh.17, AAVrh.18, AAVrh.19, AAVrh.20, AAVrh.21, AAVrh.22, AAVrh.23, AAVrh.24, AAVrh.25, AAVrh.31, AAVrh.32, AAVrh.33, AAVrh.34, AAVrh.35, AAVrh.36, AAVrh.37. AAVrh.37R2, AAVrh.38, AAVrh.39, AAVrh.40, AAVrh.46, AAVrh.48, AAVrh.48.1, AAVrh.48.1.2, AAVrh.48.2, AAVrh.49, AAVrh.51, AAVrh.52, AAVrh.53, AAVrh.54, AAVrh.56, AAVrh.57, AAVrh.58, AAVrh.61, AAVrh.64, AAVrh.64R1, AAVrh.64R2, AAVrh.67, AAVrh.73, AAVrh.74. AAVrh8R, AAVrh8R A586R mutant, AAVrh8R R533A mutant, AAAV, BAAV, caprine AAV, bovine AAV, AAVhE1.1, AAVhEr1.5, AAVhER1.14, AAVhEr1.8, AAVhEr1.16, AAVhEr1.18, AAVhEr1.35, AAVhEr1.7, AAVhEr1.36, AAVhEr2.29, AAVhEr2.4, AAVhEr2.16, AAVhEr2.30, AAVhEr2.31. AAVhEr2.36, AAVhER1.23, AAVhEr3.1, AAV2.5T, AAV-PAEC, AAV-LK01, AAV-LK02, AAV-LK03, AAV-LK04, AAV-LK05, AAV-LK06, AAV-LK07, AAV-LK08, AAV-LK09, AAV-LK10, AAV-LK11, AAV-LK12, AAV-LK13, AAV-LK14, AAV-LK15, AAV-LK16, AAV-LK17, AAV-LK18, AAV-LK19, AAV-PAEC2, AAV-PAEC4, AAV-PAEC6, AAV-PAEC7, AAV-PAEC8, AAV-PAEC11, AAV-PAEC12, AAV-2-pre-miRNA-101, AAV-8h, AAV-8b, AAV-h, AAV-b, AAV SM 10-2. AAV Shuffle 100-1, AAV Shuffle 100-3. AAV Shuffle 100-7, AAV Shuffle 10-2, AAV Shuffle 10-6, AAV Shuffle 10-8, AAV Shuffle 100-2, AAV SM 10-1, AAV SM 10-8, AAV SM 100-3, AAV SM 100-10, BNP61 AAV, BNP62 AAV, BNP63 AAV, AAVrh.50, AAVrh.43, AAVrh.62, AAVrh.48, AAVhu.19. AAVhu.11, AAVhu.53, AAV4-8/rh.64, AAVLG-9/hu.39, AAV54.5/hu.23, AAV54.2/hu.22, AAV54.7/hu.24, AAV54.1/hu.21, AAV54.4R/hu.27, AAV46.2/hu.28, AAV46.6/hu.29, AAV128.1/hu.43, true type AAV (ttAAV), UPENN AAV 10, Japanese AAV 10 serotypes, AAV CBr-7.1, AAV CBr-7.10, AAV CBr-7.2, AAV CBr-7.3, AAV CBr-7.4, AAV CBr-7.5, AAV CBr-7.7, AAV CBr-7.8, AAV CBr-B7.3, AAV CBr-B7.4, AAV CBr-E1, AAV CBr-E2, AAV CBr-E3, AAV CBr-E4, AAV CBr-E5, AAV CBr-e5, AAV CBr-E6, AAV CBr-E7, AAV CBr-E8, AAV CHt-1, AAV CHt-2, AAV CHt-3, AAV CHt-6.1, AAV CHt-6.10, AAV CHt-6.5. AAV CHt-6.6, AAV CHt-6.7, AAV CHt-6.8, AAV CHt-P1, AAV CHt-P2. AAV CHt-P5, AAV CHt-P6, AAV CHt-P8, AAV CHt-P9, AAV CKd-1, AAV CKd-10, AAV CKd-2, AAV CKd-3, AAV CKd-4. AAV CKd-6, AAV CKd-7, AAV CKd-8, AAV CKd-B1, AAV CKd-B2, AAV CKd-B3, AAV CKd-B4, AAV CKd-B5, AAV CKd-B6, AAV CKd-B7, AAV CKd-B8, AAV CKd-H1, AAV CKd-H2, AAV CKd-H3, AAV CKd-H4, AAV CKd-H5, AAV CKd-H6, AAV CKd-N3, AAV CKd-N4, AAV CKd-N9, AAV CLg-F1, AAV CLg-F2, AAV CLg-F3, AAV CLg-F4, AAV CLg-F5, AAV CLg-F6, AAV CLg-F7, AAV CLg-F8, AAV CLv-1, AAV CLv-1, AAV Clv1-10. AAV CLv1-2, AAV CLv-12, AAV CLv1-3, AAV CLv-13, AAV CLv1-4, AAV Clv1-7, AAV Clv1-8, AAV Clv1-9, AAV CLv-2, AAV CLv-3, AAV CLv-4, AAV CLv-6, AAV CLv-8, AAV CLv-D1, AAV CLv-D2, AAV CLv-D3, AAV CLv-D4, AAV CLv-D5, AAV CLv-D6. AAV CLv-D7, AAV CLv-D8, AAV CLv-E1, AAV CLv-K1, AAV CLv-K3, AAV CLv-K6, AAV CLv-L4, AAV CLv-L5, AAV CLv-L6, AAV CLv-M1, AAV CLv-M11, AAV CLv-M2, AAV CLv-M5, AAV CLv-M6, AAV CLv-M7, AAV CLv-M8, AAV CLv-M9, AAV CLv-R1, AAV CLv-R2, AAV CLv-R3, AAV CLv-R4, AAV CLv-R5. AAV CLv-R6, AAV CLv-R7, AAV CLv-R8, AAV CLv-R9, AAV CSp-1, AAV CSp-10, AAV CSp-11, AAV CSp-2, AAV CSp-3, AAV CSp-4, AAV CSp-6, AAV CSp-7, AAV CSp-8, AAV CSp-8.10, AAV CSp-8.2, AAV CSp-8.4, AAV CSp-8.5, AAV CSp-8.6, AAV CSp-8.7, AAV CSp-8.8, AAV CSp-8.9, AAV CSp-9, AAV.hu.48R3, AAV.VR-355, AAV3B, AAV4, AAV5, AAVF1/HSC1, AAVF11/HSC11. AAVF12/HSC12, AAVF13/HSC13, AAVF14/HSC14, AAVF15/HSC15, AAVF16/HSC16, AAVF17/HSC17, AAVF2/HSC2, AAVF3/HSC3, AAVF4/HSC4, AAVF5/HSC5, AAVF6/HSC6, AAVF7/HSC7, AAVF8/HSC8, and/or AAVF9/HSC9 and variants thereof.

[0054] In some embodiments, the serotype may be AAVDJ or a variant thereof, such as AAVDJ8 (or AAV-DJ8), as described by Grimm et al. (Journal of Virology 82(12): 5887-5911 (2008), US Publication US20140359799 and U.S. Pat. No. 7,588,772, each of which is herein incorporated by reference in its entirety). The amino acid sequence of AAVDJ8 may comprise two or more mutations in order to remove the heparin binding domain (HBD). As a non-limiting example, the AAV-DJ sequence is as described by SEQ ID NO: 1 in U.S. Pat. No. 7,588,772, the contents of which are herein incorporated by reference in their entirety, and the AAVDJ8 sequence may comprise two mutations: (1) R587Q where arginine (R; Arg) at amino acid 587 is changed to glutamine (Q; Gln) and (2) R590T where arginine (R; Arg) at amino acid 590 is changed to threonine (T; Thr). As another non-limiting example, the AAVDJ8 sequence may comprise three mutations: (1) K406R where lysine (K; Lys) at amino acid 406 is changed to arginine (R; Arg), (2) R587Q where arginine (R; Arg) at amino acid 587 is changed to glutamine (Q; Gln) and (3) R590T where arginine (R; Arg) at amino acid 590 is changed to threonine (T; Thr).

[0055] In certain embodiments, the parent AAV capsid sequence comprises an AAV9 sequence.

[0056] In certain embodiments, the parent AAV capsid sequence comprises an K449R AAV9 sequence.

[0057] In certain embodiments, the parent AAV capsid sequence comprises an AAVDJ sequence.

[0058] In certain embodiments, the parent AAV capsid sequence comprises an AAVDJ8 sequence.

[0059] In certain embodiments, the parent AAV capsid sequence comprises an AAVrh10 sequence.

[0060] In certain embodiments, the parent AAV capsid sequence comprises an AAV1 sequence.

[0061] In certain embodiments, the parent AAV capsid sequence comprises an AAV5 sequence.

[0062] While not wishing to be bound by theory, it is understood that a parent AAV capsid sequence comprises a VP1 region. In certain embodiments, a parent AAV capsid sequence comprises a VP1, VP2 and/or VP3 region, or any combination thereof. A parent VP1 sequence may be considered synonymous with a parent AAV capsid sequence.

[0063] In certain embodiments, the initiation codon for translation of the AAV VP1 capsid protein may be CTG, TTG, or GTG as described in U.S. Pat. No. 8,163,543, the contents of which are herein incorporated by reference in their entirety.

[0064] The present disclosure refers to structural capsid proteins (including VP1, VP2 and VP3) which are encoded by capsid (Cap) genes. These capsid proteins form an outer protein structural shell (i.e. capsid) of a viral vector such as AAV. VP capsid proteins synthesized from Cap polynucleotides generally include a methionine as the first amino acid in the peptide sequence (Met1), which is associated with the start codon (AUG or ATG) in the corresponding Cap nucleotide sequence. However, it is common for a first-methionine (Met1) residue or generally any first amino acid (AA1) to be cleaved off after or during polypeptide synthesis by protein processing enzymes such as Met-aminopeptidases. This “Met/AA-clipping” process often correlates with a corresponding acetylation of the second amino acid in the polypeptide sequence (e.g., alanine, valine, serine, threonine, etc.). Met-clipping commonly occurs with VP1 and VP3 capsid proteins but can also occur with VP2 capsid proteins.

[0065] Where the Met/AA-clipping is incomplete, a mixture of one or more (one, two or three) VP capsid proteins comprising the viral capsid may be produced, some of which may include a Met1/AA1 amino acid (Met+/AA+) and some of which may lack a Met1/AA1 amino acid as a result of Met/AA-clipping (Met−/AA−). For further discussion regarding Met/AA-clipping in capsid proteins, see Jin, et al. Direct Liquid Chromatography/Mass Spectrometry Analysis for Complete Characterization of Recombinant Adeno-Associated Virus Capsid Proteins. Hum Gene Ther Methods. 2017 Oct. 28(5):255-267; Hwang, et al. N-Terminal Acetylation of Cellular Proteins Creates Specific Degradation Signals. Science. 2010 Feb. 19. 327(5968): 973-977; the contents of which are each incorporated herein by reference in its entirety.

[0066] According to the present disclosure, references to capsid proteins is not limited to either clipped (Met−/AA−) or unclipped (Met+/AA+) and may, in context, refer to independent capsid proteins, viral capsids comprised of a mixture of capsid proteins, and/or polynucleotide sequences (or fragments thereof) which encode, describe, produce or result in capsid proteins of the present disclosure. A direct reference to a “capsid protein” or “capsid polypeptide” (such as VP1, VP2 or VP2) may also comprise VP capsid proteins which include a Met1/AA1 amino acid (Met+/AA+) as well as corresponding VP capsid proteins which lack the Met1/AA1 amino acid as a result of Met/AA-clipping (Met−/AA−).

[0067] Further according to the present disclosure, a reference to a specific SEQ ID NO: (whether a protein or nucleic acid) which comprises or encodes, respectively, one or more capsid proteins which include a Met1/AA1 amino acid (Met+/AA+) should be understood to teach the VP capsid proteins which lack the Met1/AA1 amino acid as upon review of the sequence, it is readily apparent any sequence which merely lacks the first listed amino acid (whether or not Met1/AA1).

[0068] As anon-limiting example, reference to a VP1 polypeptide sequence which is 736 amino acids in length and which includes a “Met1” amino acid (Met+) encoded by the AUG/ATG start codon may also be understood to teach a VP1 polypeptide sequence which is 735 amino acids in length and which does not include the “Met1” amino acid (Met−) of the 736 amino acid Met+ sequence.

[0069] As a second non-limiting example, reference to a VP1 polypeptide sequence which is 736 amino acids in length and which includes an “AA1” amino acid (AA1+) encoded by any NNN initiator codon may also be understood to teach a VP1 polypeptide sequence which is 735 amino acids in length and which does not include the “AA1” amino acid (AA1−) of the 736 amino acid AA1+ sequence.

[0070] References to viral capsids formed from VP capsid proteins (such as reference to specific AAV capsid serotypes), can incorporate VP capsid proteins which include a Met1/AA1 amino acid (Met+/AA1+), corresponding VP capsid proteins which lack the Met1/AA1 amino acid as a result of Met/AA1-clipping (Met−/AA1−), and combinations thereof (Met+/AA1+ and Met−/AA1−).

[0071] As a non-limiting example, an AAV capsid serotype can include VP1 (Met+/AA1+), VP1 (Met−/AA1-), or a combination of VP1 (Met+/AA1+) and VP1 (Met−/AA1−). An AAV capsid serotype can also include VP3 (Met+/AA1+), VP3 (Met−/AA1−), or a combination of VP3 (Met+/AA1+) and VP3 (Met−/AA1−); and can also include similar optional combinations of VP2 (Met+/AA1) and VP2 (Met−/AA1-).

[0072] In certain embodiments, the parent AAV capsid sequence may comprise an amino acid sequence with 50%, 51%, 52%, 53%, 54%, 55%, 56%, 57%, 58%, 59%, 60%, 61%, 62%, 63%, 64%, 65%, 66%, 67%, 68%, 69%, 70%, 71%, 72%, 73%, 74%, 75%, 76%, 77%, 78%, 79%, 80%, 81%, 82%, 83%, 84%, 85%, 86%, 87%, 88%, 89%, 90%, 91%, 92%, 93%, 94%, 95%, 96%, 97%, 98%, 99%, or 100% identity to any of the those described above.

[0073] In certain embodiments, the parent AAV capsid sequence may be encoded by a nucleotide sequence with 50%, 51%, 52%, 53%, 54%, 55%, 56%, 57%, 58%, 590%, 60%, 61%, 62%, 63%, 64%, 65%, 66%, 67%, 68%, 69%, 70%, 71%, 72%, 73%, 74%, 75%, 76%, 77%, 78%, 79%, 80%, 81%, 82%, 83%, 84%, 85%, 86%, 87%, 88%, 89%, 90%, 91%, 92%, 93%, 94%, 95%, 96%, 97%, 98%, 99%, or 100% identity to any of those described above.

[0074] In certain embodiments, the parent sequence is not an AAV capsid sequence and is instead a different vector (e.g., lentivirus, plasmid, etc.). In another embodiment, the parent sequence is a delivery vehicle (e.g., a nanoparticle) and the targeting peptide is attached thereto.

### Capsid Engineering

[0075] Recombinant or engineered AAV vectors have shown promise for use in therapy for the treatment of human disease. However, a need still exists for AAV particles with more specific and/or enhanced tropism for target tissues. Capsid engineering methods have been used to try to identify capsids with enhanced transduction of target tissues (e.g., brain, spinal cord, DRG). A variety of methods have been used, including mutational methods, DNA barcoding, directed evolution, random peptide insertions, and capsid shuffling and/or chimeras.

[0076] Rational engineering and mutational methods have been used to direct AAV to a target tissue. In rational design, structure-function relationships are used to determine regions in which changes to the capsid sequence may be made. As non-limiting examples, surface loop structures, receptor binding sites, and/or heparin binding sites may be mutated, or otherwise altered, for rational design of recombinant AAV capsids for enhanced targeting to a target tissue. In one example of rational design, AAV capsids were modified by mutation of surface exposed tyrosines to phenylalanine, in order to evade ubiquitination, reduce proteasomal degradation and allow for increased AAV particle and viral genome expression (Lochrie M A, et al, J Virol. 2006 January; 80(2):821-34; Santiago-Ortiz J L and Schaffer D V, J Control Release. 2016 Oct. 28; 240:287-301, the contents of each of which are incorporated by reference in their entirety). Rational design also encompasses the addition of targeting peptides to a parent AAV capsid sequence, wherein the targeting peptide may have an affinity for a receptor of interest within a target tissue.

[0077] In certain embodiments, rational engineering and/or mutational methods are used to identify AAV capsids and/or targeting peptides having enhanced transduction of a target tissue (e.g., CNS or PNS).

[0078] Capsid shuffling, and/or chimeras describe a method in which fragments of at least two parent AAV capsids are combined to generate a new recombinant capsid protein. The number of parent AAV capsids used may be 2-20, or more than 20.

[0079] In certain embodiments, capsid shuffling is used to identify AAV capsids and/or targeting peptides having enhanced transduction of a target tissue (e.g., CNS or PNS).

[0080] Directed evolution involves the generation of AAV capsid libraries (˜10⁴-10⁸) by any of a variety of mutagenesis techniques and selection of lead candidates based on response to selective pressure by properties of interest (e.g., tropism). Directed evolution of AAV capsids allows for positive selection from a pool of diverse mutants without necessitating extensive prior characterization of the mutant library. Directed evolution libraries may be generated by any molecular biology technique known in the art, and may include, DNA shuffling, random point mutagenesis, insertional mutagenesis (e.g., targeting peptides), random peptide insertions, or ancestral reconstructions. AAV capsid libraries may be subjected to more than one round of selection using directed evolution for further optimization. Directed evolution methods are most commonly used to identify AAV capsid proteins with enhanced transduction of a target tissue. Capsids with enhanced transduction of a target tissue have been identified for the targeting of human airway epithelium, neural stem cells, human pluripotent stem cells, retinal cells, and other in vitro and in vivo cells.

[0081] In certain embodiments directed evolution methods are used to identify AAV capsids and/or targeting peptides having enhanced transduction of a target tissue (e.g., CNS or PNS).

[0082] One method described for high-throughput characterization of the phenotypes of a large number of AAV serotypes is known as AAV Barcode-Seq (Adachi K et al, Nature Communications 5:3075 (2014), the contents of which are herein incorporated by reference in their entirety). In this next-generation sequence (NGS) based method. AAV libraries are created comprising DNA barcode tags, which can be assessed by multi-plexed Illumina barcode sequencing. This method can be used to identify AAV variants with altered receptor binding, tropism, neutralization and or blood clearance as compared to wild-type or non-variant sequences. Amino acids of the AAV capsid that are important to these functions can also be identified in this manner.

[0083] As described in Adachi et al 2014, AAV capsid libraries were generated, wherein each mutant carried a wild-type AAV2 rep gene and an AAV cap gene derived from a series of variants or mutants, and a pair of left and right 12-nucleotide long DNA bar-codes downstream of an AAV2 polyadenylation signal (pA). In this manner, 7 different DNA barcode AAV capsid libraries were generated. Capsid libraries were then provided to mice. At a pre-set timepoint, samples were collected, DNA extracted and PCR-amplified using AAV-clone specific virus bar codes and sample-specific bar code attached PCR primers. All the virus barcode PCR amplicons were Illumina sequenced and converted to raw sequence read number data by a computational algorithm. The core of the Barcode-Seq approach is a 96-nucleotide cassette comprising the DNA bar-codes (left and right) described above, three PCR primer binding sites and two restriction enzyme sites. As an exemplar, an AAV rep-cap genome was used, but the system can be applied to any AAV viral genome, including one devoid of rep and cap genes. The advantage of the Barcode Seq method is the collection of a large data set and correlation to desirable phenotype with few replicates and in a short period of time.

[0084] The DNA Barcode Seq method can be similarly applied to RNA.

[0085] In certain embodiments, the Barcode Seq method is used to identify AAV capsids and/or targeting peptides having enhanced transduction of a target tissue (e.g., CNS or PNS).

[0086] One method used to generate AAV particles with desirable transduction profiles, with enhanced targeting to CNS or PNS tissues after intravenous administration, is through the use of insertion of targeting peptides into a parent AAV capsid sequence.

### Targeting Peptides

[0087] Disclosed herein are targeting peptides and associated AAV particles comprising a capsid protein with one or more targeting peptide inserts, for enhanced or improved transduction of a target tissue (e.g., cells of the CNS or PNS).

[0088] In certain embodiments, the targeting peptide may direct an AAV particle to a cell or tissue of the CNS. The cell of the CNS may be, but is not limited to, neurons (e.g., excitatory, inhibitory, motor, sensory, autonomic, sympathetic, parasympathetic, Purkinje, Betz, etc.), glial cells (e.g., microglia, astrocytes, oligodendrocytes) and/or supporting cells of the brain such as immune cells (e.g., T cells). The tissue of the CNS may be, but is not limited to, the cortex (e.g., frontal, parietal, occipital, temporal), thalamus, hypothalamus, striatum, putamen, caudate nucleus, hippocampus, entorhinal cortex, basal ganglia, or deep cerebellar nuclei.

[0089] In certain embodiments, the targeting peptide may direct an AAV particle to a cell or tissue of the PNS. The cell or tissue of the PNS may be, but is not limited to, a dorsal root ganglion (DRG).

[0090] The targeting peptide may direct an AAV particle to the CNS (e.g., the cortex) after intravenous administration.

[0091] The targeting peptide may direct an AAV particle to the PNS (e.g., DRG) after intravenous administration.

[0092] A targeting peptide may vary in length. In certain embodiments, the targeting peptide is 3-20 amino acids in length. As non-limiting examples, the targeting peptide may be 3, 4, 5, 6, 7, 8, 9, 10, 11, 12, 13, 14, 15, 16, 17, 18, 19, 20 or 3-5, 3-8, 3-10, 3-12, 3-15, 3-18, 3-20, 5-10, 5-15, 5-20, 10-12, 10-15, 10-20, 12-20, or 15-20 amino acids in length.

[0093] Targeting peptides of the present disclosure may be identified and/or designed by any method known in the art. As a non-limiting example, the CREATE system as described in Deverman et al., (Nature Biotechnology 34(2):204-209 (2016)) and in International Patent Application Publication Nos. WO2015038958 and WO2017100671, the contents of each of which are herein incorporated by reference in their entirety, may be used as a means of identifying targeting peptides, in either mice or other research animals, such as, but not limited to, non-human primates (NHP).

[0094] Targeting peptides and associated AAV particles may be identified from libraries of AAV capsids comprised of targeting peptide variants. In certain embodiments, the targeting peptides may be 7 amino acid sequences (7-mers). In another embodiment, the targeting peptides may be 9 amino acid sequences (9-mers). The targeting peptides may also differ in their method of creation or design, with non-limiting examples including, random peptide selection, site saturation mutagenesis, and/or optimization of a particular region of the peptide (e.g., flanking regions or central core).

[0095] In certain embodiments, a targeting peptide library comprises targeting peptides of 7 amino acids (7-mer) in length randomly generated by PCR.

[0096] In certain embodiments, a targeting peptide library comprises targeting peptides with 3 mutated amino acids. In certain embodiments, these 3 mutated amino acids are consecutive amino acids. In another embodiment, these 3 mutated amino acids are not consecutive amino acids. In certain embodiments, the parent targeting peptide is a 7-mer. In another embodiment, the parent peptide is a 9-mer.

[0097] In certain embodiments, a targeting peptide library comprises 7-mer targeting peptides, wherein the amino acids of the targeting peptide and/or the flanking sequences are evolved through site saturation mutagenesis of 3 consecutive amino acids. In certain embodiments, NNK (N=any base; K=G or T) codons are used to generate the site saturated mutation sequences.

### CREATE System in Mice

[0098] In some embodiments, the AAV particles of the present disclosure are prepared via the CREATE system, as described in Deverman et al., (Nature Biotechnology 34(2):204-209 (2016)) and in International Patent Application Publication Nos. WO2015038958 and WO2017100671, the contents of each of which are herein incorporated by reference in their entirety. “CREATE” or “Cre-recombinant-based AAV targeted evolution” refers to an AAV capsid selection strategy that selects for capsids that transduce target tissues (e.g., CNS or PNS) following intravenous injection. The method has been demonstrated in a mouse model.

[0099] Libraries of AAV capsids with one or more targeting peptide inserts are developed and administered intravenously to transgenic mice. These transgenic cre-expressing mice may be developed for specific targeting, for example, GFAP-Cre mice may be used for targeting to astrocytes.

[0100] Variation of the targeting sequence as well as the transgenic animal model enables the selection of AAV variants with desired transduction profiles, for example, tropism to neurons or astrocytes, as compared to other AAV serotypes, including the parent AAV particle and capsid.

[0101] The CREATE method involves the generation of a library of targeting peptides which are then assembled into a viral genome backbone comprising a parent AAV capsid sequence. An AAV capsid library (AAV particles) is then generated, purified and administered to a transgenic animal (e.g., mouse). Target tissue is collected and AAV sequences selectively recovered from Cre expressing cells. These sequences are assessed and characterized for the identification of targeting peptides that lead to enrichment in a target tissue (i.e., enhanced transduction or tropism). Targeting peptides and associated AAV particles can then be generated for further testing and characterization. This process is considered one round of evolution or selection. In some embodiments, more than one round of evolution is conducted. As many as 15 rounds of selection may be conducted.

[0102] In more detail, the CREATE system uses a rAAV-Cap-in-cis-lox viral genome comprising AAV cap and regulator elements of the AAV rep genes and a Cre-invertible switch. Since this viral genome lacks a fully function rep gene necessary for AAV particle production, the rep is provided in trans. A modified AAV2/9 Rep-Cap plasmid may be provided, wherein stop-codons are provided in-frame to prevent the expression of VP1-VP3 proteins.

[0103] Capsid libraries are generated using the rAAV-Cap-in-cis-lox viral genome as a backbone. Targeting peptides are inserted into the parent AAV capsid protein (e.g., AAV9) at any position that results in the generation of a fully functional AAV capsid protein and AAV particle. As an exemplar, targeting peptides comprising 7 random amino acids were inserted between amino acids 588 and 589 of the VP1 sequence of K449 AAV9. Targeting peptides may be designed by any method known in the art. In certain embodiments, targeting peptides are generated using polymerase chain reaction (PCR).

[0104] AAV particles comprising capsid proteins with targeting peptide inserts are generated and viral genomes encoding a reporter (e.g., GFP) encapsulated within. These AAV particles (or AAV capsid library) are then administered to a transgenic mouse by intravenous delivery to the tail vein. Administration of these capsid libraries to cre-expressing mice results in expression of the reporter payload in the target tissue, due to the expression of Cre.

[0105] AAV particles and/or viral genomes may be recovered from the target tissue for identification of targeting peptides and associated AAV particles that are enriched, indicating enhanced transduction of target tissue. Standard methods in the art, such as, but not limited to next generation sequencing (NGS), viral genome quantification, biochemical assays, immunohistochemistry and/or imaging of target tissue samples may be used to determine enrichment. Total DNA may be extracted prior to the selective recovery of viral genomes using methods known in the art such as but not limited to Trizol based recovery extraction methods.

[0106] A target tissue may be any cell, tissue or organ of a subject. As non-limiting examples, samples may be collected from brain, spinal cord, dorsal root ganglia and associated roots, liver, heart, gastrocnemius muscle, soleus muscle, pancreas, kidney, spleen, lung, adrenal glands, stomach, sciatic nerve, saphenous nerve, thyroid gland, eyes (with or without optic nerve), pituitary gland, skeletal muscle (rectus femoris), colon, duodenum, ileum, jejunum, skin of the leg, superior cervical ganglia, urinary bladder, ovaries, uterus, prostate gland, testes, and/or any sites identified as having a lesion, or being of interest.

[0107] Targeting peptides and associated AAV capsid proteins and AAV particles identified using a CREATE system include AAVPHP.B (PHP.B), AAVPHP.A (PHP.A), AAVG2B-26, AAVG2B-13, AAVTH1.1-32, AAVTH1.1-35, AAVPHP.B2 (PHP.B2), AAVPHP.B3 (PHP.B3), AAVPHP.N/PHP.B-DGT, AAVPHP.B-EST, AAVPHP.B-GGT, AAVPHP.B-ATP, AAVPHP.B-ATT-T, AAVPHP.B-DGT-T, AAVPHP.B-GGT-T, AAVPHP.B-SGS, AAVPHP.B-AQP, AAVPHP.B-QQP, AAVPHP.B-SNP(3), AAVPHP.B-SNP, AAVPHP.B-QGT, AAVPHP.B-NQT, AAVPHP.B-EGS, AAVPHP.B-SGN, AAVPHP.B-EGT, AAVPHP.B-DST, AAVPHP.B-DST, AAVPHP.B-STP, AAVPHP.B-PQP, AAVPHP.B-SQP, AAVPHP.B-QLP, AAVPHP.B-TMP, AAVPHP.B-TTP, AAVPHP.S/G2A12, AAVG2A15/G2A3 (G2A3), AAVG2B4 (G2B4). AAVG2B5 (G2B5), and AAVPHP.S.

[0108] In certain embodiments, CREATE in mice is used to identify AAV capsids and/or targeting peptides having enhanced transduction of a target tissue (e.g., CNS or PNS).

### CREATE System in NHP

[0109] The CREATE system has proven efficacious in identifying targeting peptides for enhanced transduction to the CNS of mice after intravenous administration. However, translation of findings from mouse to human is not always straightforward. Modifying the CREATE system for non-transgenic animals or model systems that more closely resemble humans may help identify targeting peptides and associated AAV capsids and particles useful for the treatment of human disease.

[0110] For adaptation of the CREATE method to non-transgenic animals, another mechanism needs to be used to alter target tissues and/or cells to express Cre. In certain embodiments, AAV Cre-vectors may be used to transduce cells and induce subsequent Cre expression. In certain embodiments, these AAV Cre-vectors may be AAV1-Cre vectors.

[0111] These AAV Cre-vectors may comprise viral genomes with a cell-type specific promoter. These cell-type specific promoters may be, but are not limited to, CAG, UBC, EF1α, synapsin, GFAP, MBP, VGLUT, VGAT, Nav1.8 (SCN10A), parvalbumin, TH, ChaT, and/or any promoter known in the art.

[0112] In certain embodiments, these AAV-Cre vectors are delivered to a target tissue by intraparenchymal administration. In certain embodiments, the intraparenchymal administration is directly to the putamen of the subject. In certain embodiments, the intraparenchymal administration is directly to the thalamus of a subject. In certain embodiments, the intraparenchymal administration is directly to the cortex of a subject. In certain embodiments, the intraparenchymal administration is indirectly to the cortex of a subject. In certain embodiments, the intraparenchymal administration is simultaneously to one or more of the putamen, the thalamus and or the cortex of a subject, and may be bi-lateral administrations.

[0113] In certain embodiments, the subject is a non-human primate.

[0114] As for the CREATE method developed in mice, the AAV capsid libraries may be administered intravenously. In another embodiment, the AAV capsid libraries may be administered by intraparenchymal delivery. In certain embodiments, the AAV capsid library is administered prior to the delivery of the AAV-Cre vectors. In another embodiment, the AAV capsid library is administered after the delivery of the AAV-Cre vectors. The length of time between the administration of the AAV-Cre vectors and the AAV capsid libraries may be seconds, minutes, hours, days, weeks, or years.

[0115] The AAV capsid library may comprise AAV particles comprising a viral genome encoding a reporter (e.g., GFP). Only those cells of the target tissue (e.g., CNS or DRG) also expressing Cre (co-transduced by a Cre-vector administered intraparenchymally) will express the reporter.

[0116] Target tissues may be collected and analyzed for the identification of AAV particles and targeting peptides that lead to enrichment in the target tissue, i.e., enhanced transduction. Standard methods in the art may be used to assess, analyze, or characterize sample tissues and AAV sequences, including but not limited to, next generation sequencing, viral genome quantification, biochemical assays, immunohistochemistry and/or imaging.

[0117] In certain embodiments, CREATE in NHP is used to identify AAV capsids and/or targeting peptides having enhanced transduction of a target tissue (e.g., CNS or PNS).

[0118] A non-limiting example of CREATE in NHP may be summarized as follows and is shown in FIG. 1. First, an AAV plasmid library is prepared and an AAV particle library is produced using triple transfection methods (other AAV library production methods may be used). The AAV particle library is administered to one or more NHP by intravenous administration at Day 0. Around Day 7, the NHP is administered AAV-Cre vectors by intracranial infusion. Around Day 20, necropsy is performed and tissues collected from brain, spinal cord, dorsal root ganglia, liver, heart, muscle, kidney, pancreas, spleen, lung, etc. Capsid DNA is captured by Cre-dependent DNA recovery from transduced tissues, using an rAAV-Cap-in-cis-lox rAAV genome wherein Cre inverts the polyadenylation sequence flanked by the lox71 and lox66 sites. PCR primers selectively amplify the Cre-recombined sequences. Recovered DNA can then be processed for and analyzed by next-generation sequencing (NGS) to identify AAV variants. Two to three rounds of this process may be conducted to identify enriched variants.

### Targeting Peptide Sequences

[0119] In certain embodiments the targeting peptide may comprise a sequence as set forth in SEQ ID NO: 4-14326, SEQ ID NO: 42973-42999, and SEQ ID NO: 43073-43341. These targeting peptides may be encoded by a sequence as set forth in SEQ ID NO: 14327-42972, SEQ ID NO: 43027-43053, and SEQ ID NO: 43342-43691. These sequences are shown in Tables 2, 3 and Table 4.

[0120] In certain embodiments, the targeting peptide may comprise an amino acid sequence with 50%, 51%, 52%, 53%, 54%, 55%, 56%, 57%, 58%, 59%, 60%, 61%, 62%, 63%, 64%, 65%, 66%, 67%, 68%, 69%, 70%, 71%, 72%, 73%, 74%, 75%, 76%, 77%, 78%, 79%, 80%, 81%, 82%, 83%, 84%, 85%, 86%, 87%, 88%, 89%, 90%, 91%, 92%, 93%, 94%, 95%, 96%, 97%, 98%, 99%, or 100% identity to any of the sequences shown in Table 2-4.

[0121] In certain embodiments, the targeting peptide may be encoded by a nucleic acid sequence with 50%, 51%, 52%, 53%, 54%, 55%, 56%, 57%, 58%, 59%, 60%, 61%, 62%, 63%, 64%, 65%, 66%, 67%, 68%, 69%, 70%, 71%, 72%, 73%, 74%, 75%, 76%, 77%, 78%, 79%, 80%, 81%, 82%, 83%, 84%, 85%, 86%, 87%, 88%, 89%, 90%, 91%, 92%, 93%, 94%, 95%, 96%, 97%, 98%, 99%, or 100% identity to any of the sequences shown in Table 2-4.

[0122] In certain embodiments, a targeting peptide may comprise 4 or more contiguous amino acids of any of the targeting peptides disclosed herein. In certain embodiments the targeting peptide may comprise 4 contiguous amino acids of any of the sequences as set forth in SEQ ID NO: 4-14326, SEQ ID NO: 42973-42999, and SEQ ID NO: 43073-43341. In certain embodiments the targeting peptide may comprise 5 contiguous amino acids of any of the sequences as set forth in SEQ ID NO: 4-14326, SEQ ID NO: 42973-42999, and SEQ ID NO: 43073-43341. In certain embodiments the targeting peptide may comprise 6 contiguous amino acids of any of the sequences as set forth in SEQ ID NO: 4-14326, SEQ ID NO: 42973-42999, and SEQ ID NO: 43073-43341. In certain embodiments, the targeting peptide may comprise 7 contiguous amino acids of any of the sequences set forth in SEQ ID NO: 42973-42999, and SEQ ID NO: 43073-43341. In certain embodiments, the targeting peptide may comprise 8 contiguous amino acids of any of the sequences set forth in SEQ ID NO: 42973-42999, and SEQ ID NO: 43073-43341. In certain embodiments, the targeting peptide may comprise 9 contiguous amino acids of any of the sequences set forth in SEQ ID NO: 43073-43341. In certain embodiments, the targeting peptide may comprise 10 contiguous amino acids of any of the sequences set forth in SEQ ID NO: 43073-43341.

[0123] In certain embodiments, the AAV particle of the disclosure comprises an AAV capsid with a targeting peptide insert, wherein the targeting peptide has an amino acid sequence as set forth in any of SEQ ID NO: 4-14326. SEQ ID NO: 42973-42999, and SEQ ID NO: 43073-43341.

[0124] In certain embodiments, the AAV particle of the disclosure comprises an AAV capsid polynucleotide with a targeting nucleic acid insert, wherein the targeting nucleic acid insert has a nucleotide sequence as set forth in any of SEQ ID NO: 14327-42972, SEQ ID NO: 43027-43053, and SEQ ID NO: 43342-43691.

[0125] In certain embodiments, the AAV particle of the disclosure comprises an AAV capsid with a targeting peptide insert, wherein the targeting peptide has an amino acid sequence comprising at least 4 contiguous amino acids of any of the sequences as set forth in any of SEQ ID NO: 4-14326, SEQ ID NO: 42973-42999, and SEQ ID NO: 43073-43341.

[0126] In certain embodiments, the AAV particle of the disclosure comprises an AAV capsid with a targeting peptide insert, wherein the targeting peptide has an amino acid sequence substantially comprising any of the sequences as set forth in any of SEQ ID NO: 4-14326, SEQ ID NO: 42973-42999, and SEQ ID NO: 43073-43341.

[0127] In certain embodiments, the AAV particle of the disclosure comprises an AAV capsid polynucleotide with a targeting nucleic acid insert, wherein the targeting nucleic acid insert has a nucleotide sequence substantially comprising any of those set forth as SEQ ID NO: 14327-42972, SEQ ID NO: 43027-43053, and SEQ ID NO: 43342-43691.

[0128] The AAV particle of the disclosure comprising a targeting nucleic acid insert, may have a polynucleotide sequence with 50%, 51%, 52%, 53%, 54%, 55%, 56%, 57%, 58%, 59%, 60%, 61%, 62%, 63%, 64%, 65%, 66%, 67%, 68%, 69%, 70%, 71%, 72%, 73%, 74%, 75%, 76%, 77%, 78%, 79%, 80%, 81%, 82%, 83%, 84%, 85%, 86%, 87%, 88%, 89%, 90%, 91%, 92%, 93%, 94%, 95%, 96%, 97%, 98%, 99% or more, identity to the parent capsid sequence.

[0129] The AAV particle of the disclosure comprising a targeting peptide insert, may have an amino acid sequence with 50%, 51%, 52%, 53%, 54%, 55%, 56%, 57%, 58%, 59%, 60%, 61%, 62%, 63%, 64%, 65%, 66%, 67%, 68%, 69%, 70%, 71%, 72%, 73%, 74%, 75%, 76%, 77%, 78%, 79%, 80%, 81%, 82%, 83%, 84%, 85%, 86%, 87%, 88%, 89%, 90%, 91%, 92%, 93%, 94%, 95%, 96%, 97%, 98%, 99% or more, identity to the parent capsid sequence.

[0130] In one aspect, the disclosure provides peptides (targeting peptides) with amino acid sequences set forth as any of SEQ ID NO: 4-14326, SEQ ID NO: 42973-42999 or SEQ ID NO: 43073-43341. Nucleic acid sequences encoding these peptides are also provided and are set forth as any of SEQ ID NO: 14327-42972, SEQ ID NO: 4300-43053 or SEQ ID NO: 43342-43691.

Lengthy table referenced here
US20220281922A1-20220908-T00001
Please refer to the end of the specification for access instructions.

Lengthy table referenced here
US20220281922A1-20220908-T00002
Please refer to the end of the specification for access instructions.

[0131] The targeting peptide may direct an AAV particle to a cell or tissue of the nervous system such as but not limited to the dorsal root ganglia (DRG) and/or the trigeminal ganglia (TRG). Such targeting peptides may include but are not limited to the peptides listed in Table 4.

TABLE 4
DRG and TRG targeting peptides

| SEQ | Peptide | SEQ ID | |
|---|---|---|---|
| ID NO | Sequence | NO: | Nucleotide Sequence(s) |
| 43073 | PSSAVRTSLAQ | 43342 | CCCTCATCAGCCGTCCGAACGTCACTTGCCCAA |
| | | 43343 | CTTTCGTCTGCGGTTAGGACGTCTTTGGCACAG |
| 43074 | EPAAVRTSLAQ | — | |
| 43075 | DPAAVRTSLAQ | — | — |
| 43076 | AQQAPNHSLAQ | — | — |
| 43077 | AQQASSSSLAQ | — | — |
| 43078 | AQQASTKSLAQ | — | — |
| 43079 | AQQAGPTSLAQ | — | — |
| 43080 | AQQAVRESNAQ | — | — |
| 43081 | AQQAVRNSTAQ | — | — |
| 43082 | AQQAVRTSAGV | — | — |
| 43083 | AQAGQIHHNAQ | 43344 | GCTCAGGCTGGTCAGATTCATCATAATGCTCAG |
| | | 43345 | GCCCAAGCTGGTCAGATTCATCATAATGCACAG |
| 43084 | AQAGSDKAKAQ | 43346 | GCCCAAGCCGGCTCAGACAAGGCCAAGGCCCAA |
| | | 43347 | GCTCAGGCTGGTAGTGATAAGGCTAAGGCTCAG |
| | | 43348 | GCCCAAGCGGGTAGTGATAAGGCTAAGGCACAG |
| 43085 | AQALNGARLAQ | 43349 | GCCCAAQQCCTTAACGGCGCCCGACTTGCCCAA |
| | | 43350 | GCGCAAGCCCTTAACGGCGCCCGACTTGCCCAA |
| | | 43351 | GCGCAGGCGTTGAATGGGGCGAGGTTGGCGCAG |
| 43086 | AQASQRALPAQ | 43352 | GCCCAAGCTTCGGATCGTGCGCTGCCTGCACAG |
| | | 43353 | GCGCAGGCGTCGGATAGGGCGTTGCCGGCGCAG |
| 43087 | AQASVLAHPAQ | 43354 | GCCCAAGCGTCTGTCCTTGCTCATCCTGCACAG |
| | | 43355 | GCTCAGGCTAGTGTTCTTGCTCATCCTGCTCAG |
| 43088 | AQAVKGLDLAQ | 43356 | GCACAAGCAGTAAAGGGATTAGACTTAGCACAA |
| | | 43357 | GCTCAGCCTGTTAAGGGTCTTGATCTIGCTCAG |
| | | 43358 | GCGCAGGCGGTGAAGGGGTTGGATTTGGCGCAG |
| | | 43359 | GCCCAAGCCGTCAAGGGCCTTGACCTTGCCCAA |
| | | 43360 | GCCCAAGCGGTGAAGQGGTTGGATTTGGCACAG |
| 43089 | AQDATRALAAQ | 43361 | GCGCAGGATGCGACGAGGGCGTTGGCGGCGCAG |
| | | 43362 | GCACAAGACGCAACTAGGGCATTAGCAGCACAA |
| 43090 | AQDTQVARSAQ | 43363 | GCTCAGGATACTCAGGTTGCTCGTAGTGCTCAG |
| | | 43364 | GCGCAGGATACGCAGGTGGCGAGGTCGGCGCAG |
| 43091 | AQDTRGIMAAQ | 43365 | GCCCAAGACACGCGAGGCATCATGGCCGCCCAA |
| | | 43366 | GCTCAGGATACTCGTGGTATTATGGCTGCTCAG |
| 43092 | AQEMRGLAIAQ | 43367 | GCACAAGAAATGAGGGGATTAGCAATAGCACAA |
| | | 43368 | GCTCAGGAGATGCGTGGTCTTGCTATTGCTCAG |
| 43093 | AQFAGSNAAAQ | 43369 | GCGCACTTTGCGGGGTCGAATGCGGCGGCGCAG |
| | | 43370 | GCACAATTCGCAGGAAGCAACGCAGCAGCACAA |
| | | 43371 | GCCCAATTTGCGGGGTCTAATGCTGCTGCACAG |
| 43094 | AQGADLRNPAQ | 43372 | GCGCAGGGTGCTGATCTTCGTAATCCTGCTCAG |
| | | 43373 | GCGCAGGGGGCGGATTTGAGGAATCCGGCGCAG |
| 43095 | AQGFSNHDPAQ | 43374 | GCCCAAGGCTTTTCAAACCATGACCCCGCCCAA |
| | | 43375 | GCCCAAGGGTTTTCGAATCATGATCCTGCACAG |
| 43096 | AQGLTATVPAQ | 43376 | GCCCAAGGTCTGACTGCTACTGTTCCGGCACAG |
| | | 43377 | GCTCAGGGTCTTACTGCTACTGTTCCTGCTCAG |
| 43097 | AQGPTSDRQAQ | 43378 | GCCCAAGGTCCGACGTCGGATCGGCAGGCACAG |
| | | 43379 | GCCCAAGGGCCGACGTCGGATCGGCAGGCACAG |
| 43098 | AQGRMDSRPAQ | 43380 | GCGCAGCGGAGGATGGATTCGAGGCCGGCGCAG |
| | | 47381 | GCCCAAGGTCCTATGGATAGTCGGCCTGCACAG |
| 43099 | AQGSSPQATAQ | 43382 | GCTCAGGGTAGTAGTCCTCAGGCTACTGCTCAG |
| | | 43383 | GCGCAGGGGTCGTCGCCGCAGGCGACGGCGCAG |
| 43100 | AQHAKITYDAQ | 43384 | GCCCAACATGCCAAGATCACGTATGACGCCCAA |
| | | 43385 | GCTCAGCATGCTAAGATTACTTATGATGCTCAG |
| 43101 | AQIADSRNSAQ | 43386 | GCGCAGATTGCGGATTCGAGGAATTCGGCGCAG |
| | | 43387 | GCCCAAATCGCCGACTCACGAAACTCAGCCCAA |
| 43102 | AQINVANRSAQ | 43388 | GCCCAAATCAACGTCGCCAACCGATCAGCCCAA |
| | | 43389 | GCCCAAATTAATGTTGCTAATAGGTCTGCACAG |
| | | 43390 | GCGCAGATTAATGTGGCGAATAGGTCGGCGCAG |
| 43103 | AQIRSTNNSAQ | 43391 | GCTCAGATTCGTAGTACTAATAATAGTGCTCAG |
| | | 43392 | GCACAAATAAGGAGCACTAACAACAGCGCACAA |
| 43104 | AQKNGIVDSAQ | 43393 | GCTCAGAAGAATGGGATTGTGGATTCGGCGCAG |
| | | 43394 | GCACAAAAGAACGGAATAGTAGACAGCGCACAA |
| | | 43395 | GCCCAAAAGAATGGTATTGTGGATTCGGCACAG |
| 43105 | AQKSGTPALAQ | 43396 | GCGCAGAAGTCGGGGACTCCGGCGTTGGCGCAG |
| | | 43397 | GCCCAAAAGTCAGGCACGCCCGCCCTTGCCCAA |
| 43106 | AQKSTQSPDAQ | 43398 | GCCCAAAAGTCGACGCAGAGTCCTGATGCACAG |
| | | 43399 | GCTCAGAAGAGTACTCAGAGTCCTGATGCTCAG |
| 43107 | AQKVATHPVAQ | 43400 | GCACAAAAGGTAGCAACTCACCCAGTAGCACAA |
| | | 43401 | GCCCAAAAGGTGGCGACGCATCCTGTGGCACAG |
| 43108 | AQLAGVSHAAQ | 43402 | GCCCAACTTGCCGGCGTCTCACATGCCGCCCAA |
| | | 43403 | GCACAATTAGCAGGAGTAAGCCACGCAGCACAA |
| | | 43404 | GCGCAGTTGGCGGGGGTGTCGCATGCGGCGCAG |
| 43109 | AQLKNSDSYAQ | 43405 | GCGCAGTTGAAGAATTCGGATTCGTATGCGCAG |
| | | 43406 | GCCCAACTTAAGAACTCAGACTCATATGCCCAA |
| 43110 | AQLLGGSDRAQ | 43407 | GCACAATTATTAGGAGGAAGCGACAGGGCACAA |
| | | 43408 | GCGCAGTTGTTGGGGGGGTCGGATAGGGCGCAG |
| 43111 | AQLMGSGEGAQ | 43409 | GCCCAACTTATGGGGTCTGGGGAGGGGGCACAG |
| | | 43410 | GCACAATTAATGGGAAGCGGAGAAGGAGCACAA |
| 43112 | AQLQGAALPAQ | 43411 | GCCCAATTACAAGGAGCAGCATTACCACCACAA |
| | | 43412 | GCGCAATTACAAGGAGCAGCATTACCAGCACAA |
| | | 43413 | GCACAATTACAAGGAGCAGCATTACCAGCACAA |
| 43113 | AQMQVNGNGAQ | 43414 | GCGCAGATGCAGGTGAATGGGAATGGGGCGCAG |
| | | 43415 | GCTCAGATGCAGGTTAATGGTAATGGTGCTCAG |
| 43114 | AQMSMSVGKAQ | 43416 | GCGCAGATGTCGATGTCGGTGGGGAAGGCGCAG |
| | | 43417 | GCCCAAATGAGTATGTCTGTGGGTAAGGCACAG |
| 43115 | AQNAVNGRPAQ | 43418 | GCCCAAAATGCGGTTAATGGTCGTCCTGCACAG |
| | | 43419 | GCGCAGAATGCGGTGAATGGGAGGCCGGCGCAG |
| 43116 | AQNEGHSAKAQ | 43420 | GCACAAAACGAAGGACACAGCGCAAAGGCACAA |
| | | 43421 | GCCCAAAACGAAGGCCATTCAGCCAAGGCCCAA |
| 43117 | AQNGFNRSAAQ | 43422 | GCGCAGAATGGGTTTAATAGGTCGGCGGCGCAG |
| | | 43423 | GCCCAAAATGGGTTTAATCGTAGTGCGGCACAG |
| 43118 | AQNNGVHLRAQ | 43424 | GCACAAAACAACGGAGTACACTTAAGGGCACAA |
| | | 43425 | GCCCAAAACAACGGCGTCCATCTTCGAGCCCAA |
| 43119 | AQNPKSIPGAQ | 43426 | GCACAAAACCCAAAGAGCATACCAGGAGCACAA |
| | | 43427 | GCTCAGAATCCTAAGAGTATTCCTGGTGCTCAG |
| 43120 | AQNTLSHAKAQ | 43428 | GCACAAAACACTTTAAGCCACGCAAAGGCACAA |
| | | 43429 | GCCCAAAACACGCTTTCACATGCCAAGGCCCAA |
| 43121 | ACPAVSGGLAQ | 43430 | GCTCAGCCTGCTGTTAGTGGTGGTCTTGCTCAG |
| | | 43431 | GCGCAGCCGGCGGTGTCGGGGGGGTTGGCGCAG |
| 43122 | AQPEHAVRTAQ | 43432 | GCACAACCAGAACACGCAGTAAGGACTGCACAA |
| | | 43433 | GCCCAACCGGAGCATGCGGTTCGTACTGCACAG |
| 43123 | AQPGLDTTRAQ | 43434 | GCGCAGCCTGGGTTGGATACGACGAGGGCGCAG |
| | | 43435 | GCCCAACCCGGCCTTGACACGACGCGAGCCCAA |
| | | 43436 | GCGCAGCCGGGGTTGGATACGACGAGGGCGCAG |
| 43124 | AQPISTAAYAQ | 43437 | GCGCAGCCGATTTCGACGGCGGCGTATGCGCAG |
| | | 43438 | GCCCAACCCATCTCAACGGCCGCCTATGCCCAA |
| 43125 | AQPRPESPSAQ | 43439 | GCGCAACCAAGGCCAGAAAGCCCAAGCGCACAA |
| | | 13440 | GCTCAGCCTCGTCCTGAGAGTCCTAGTGCTCAG |
| 43126 | AQPTRSVTEAQ | 43441 | GCGCAGCCGACGAGGTCGGTGACGGAGGCGCAC |
| | | 43442 | GCTCAGCCTACTCGTAGTGTTACTGAGGCTCAG |
| 43127 | AQQHKTAQVAQ | 43443 | GCCCAACAACATAAGACGGCCCAAGTCGCCCAA |
| | | 43444 | GCGCAGCAGCATAAGACGGCGCAGGTGGCGCAG |
| 43128 | AQQTGVLAAAQ | 43445 | GCGCAGCAGACGGGGGTGTTGGCGGCGGCACAG |
| | | 43446 | GCACAACAAACTGGAGTATTAGCAGCAGCACAA |
| 43129 | AQQTVSMMSAQ | 43447 | GCTCAGCAGACTGTTAGTATGATGAGTGCTCAG |
| | | 43448 | GCGCAGCAGACGGTGTCGATGATGTCGGCGCAG |
| 43130 | AQSASSNQPAQ | 43449 | GCGCAGTCGGCGTCGTCGAATCAGCCGGCGCAG |
| | | 43450 | GCACAAAGCGCAAGCAGCAACCAACCAGCACAA |
| 43131 | AQSGGGPVRAQ | 43451 | GCTCAGAGTGGTGGTGGTCCTGTTCGTGCTCAG |
| | | 43452 | GCACAAAGCGGAGGAGGACCAGTAAGGGCACAA |
| 43132 | AQSGLQPKMAQ | 43453 | GCGCAGTCGGGGTTGCAGCCGAAGATGGCGCAG |
| | | 43454 | GCCCAATCAGGCCTTCAACCCAAGATGGCCCAA |
| 43133 | AQSGTLQRAAQ | 43455 | GCACAAAGCGGAACTTTACAAAGGGCAGCACAA |
| | | 43456 | GCCCAATCTGGGACGTTGCAGAGGGCTGCACAG |
| 43134 | AQSTNVSSAAQ | 43457 | GCACAAAGCATAAACGTAAGCAGCGCAGCACAA |
| | | 43458 | GCGCAGTCGATTAATGTGTCGTCGGCGGCGCAG |
| 43135 | AQSKSANLPAQ | 43459 | GCACAAAGCAAGAGCGCAAACTTACCAGCACAA |
| | | 43460 | GCCCAATCAAAGTCACCCAACCTTCCCGCCCAA |
| 43136 | AQSSGDSTKAQ | 43461 | GCGCAGTCGTCGGGGGATTCGACGAAGGCGCAG |
| | | 43462 | GCTCAGAGTAGTGGTGATAGTACTAAGGCTCAG |
| | | 43463 | GCCCAATCATCAGGCGACTCAACGAAGGCCCAA |
| | | 43464 | GCACAAAGCAGCGGAGACAGCACTAAGGCACAA |
| 13137 | AQSSGQGQVAQ | 43465 | GCCCAATCATCAGGCCAAGGCCAAGTCGCCCAA |
| | | 13466 | GCACAAAGCAGCGGACAAGGACAAGTAGCACAA |
| 43138 | AQSTTLQNVAQ | 43467 | GCCCAATCAACGACGCTTCAAAACGTCGCCCAA |
| | | 43468 | GCACAAAGCACTACTTTACAAAACGTAGCACAA |
| 43139 | AQTETPVSRAQ | 43469 | GCCCAAACGGAAACTCCCGTCTCACGAGCCCAA |
| | | 43470 | GCCCAAACGGAAACGCCCGTCTCACGAGCCCAA |
| 43110 | AQTGAASPIAQ | 43471 | GCCCAAACGGGCGCCGCCTCACGACTTGCCCAA |
| | | 43472 | GCACAAACTGGAGCAGCAAGCAGGTTAGCACAA |
| 43141 | AQTINPAVRAQ | 43473 | GCACAGACGATTAATCCGGCGGTGAGGGCGCAG |
| | | 43474 | GCTCAGACTATTAATCCTGCTGTTCGTGCTCAG |
| | | 43475 | GCGCAGACGATTAATCCGGCGGTGAGGGCGCAG |
| 43142 | AQTPSSASSAQ | 43476 | GCGCAGACGCCGTCGTCGGCGTCGTCGGCGCAG |
| | | 43477 | GCACAAACTCCAAGCAGCGCAAGCAGCGCACAA |
| 43143 | AQTSHTMSTAQ | 43478 | GCCCAAACGTCTCATACTATGAGTTTTGCACAG |
| | | 43479 | GCTCAGACTAGTCATACTATGAGTTTTGCTCAG |
| 43144 | AQTSTQSVNAQ | 43480 | GCCCAAACGTCGACTCAGAGTGTGAATGCACAG |
| | | 43481 | GCGCAGACGTCGACGCAGTCGGTGAATGCGCAG |
| 43145 | AQVHAGAEVAQ | 43482 | GCGCAGGTGCATGCGGGGGCGGAGGTTGCGCAG |
| | | 43483 | GCGCAGGTTCATGCGGGGGCGGAGGTGGCGCAG |
| | | 43484 | GCACAGGTGCATGCGGGGGCGGAGTTGGCGCAG |
| | | 43485 | GCGCAGGTGCATGCGGGGGCGGAGGTGGCGCAG |
| 43146 | AQVKDGLTSAQ | 43486 | GCGCAGGTGAAGGATGGGTTGACGTCGGCGCAG |
| | | 43487 | GCACAAGTAAAGGACGGATTAACTAGCGCACAA |
| | | 43488 | GCTCAGGTTAAGGATGGTCTTACTAGTGCTCAG |
| | | 43489 | GCGCAGGTTAAGGATGGTCTTACTAGTGCTCAG |
| 43147 | AQVNNQSAKAQ | 43490 | GCCCAAGTGAATAATCAGTCGGCTAAGGCACAG |
| | | 43491 | GCCCAAGTAAACAACCAAAGCGCAAAGGCACAA |
| | | 43492 | GCACAAGTAAACAACCAAAGCGCAAAGGCACAA |
| | | 43493 | GCGCAGGTGAATAATCAGTCGGCGAAGGCGCAG |
| 43148 | AQVRDGIPPAQ | 43494 | GCTCAGGTTCGTGATGGTATTCCTCCTGCTCAG |
| | | 43495 | GCACAAGTAAGGGACGGAATACAACCAGCACAA |
| 43149 | AQVSPGMAGAQ | 43496 | GCTCAAGTAAGCCCAGGAATGGCAGGAGCACAA |
| | | 43497 | GCCCAAGTTAGTCCTGGGATGGCTGGTGCACAG |
| 43150 | AQVVNELRGAQ | 43498 | GCACAAGTAGTAAACGAATTAAGGGGAGCACAA |
| | | 43499 | GCCCAAGTGGTTAATGAGTTGCGGGGTGCACAG |
| 43151 | AQVVPHNGLAQ | 43500 | GCCCAAGTCGTCCCCCATAACGGCCTTGCCCAA |
| | | 43501 | GCACAAGTAGTACCACACAACGGATTAGCACAA |
| 43152 | AQHAKIMYDAQ | 43502 | GCCCAACATGCCAAGATCATGTATGACGCCCAA |
| 43153 | AQAVSSQVSAQ | 43503 | GCGCAGGCGGTGTCGTCGCAGGTGTCGGCGCAG |
| 43154 | AQGLSVVNMAQ | 43504 | GCCCAAGGTCTTAGTGTTGTTAATATGGCACAG |
| 43155 | AQRSMPTLSAQ | 43505 | GCCCAACGATCAATGCCCACGCTTTCAGCCCAA |
| 43156 | AQPVNTQPVAQ | 43506 | GCTCAGCCTGTTAATACTCAGCGTGTTGCTCAG |
| 43157 | AQVSGDGSRAQ | 43507 | GCGCAGGTGTCGGGGGATGGGTCGAGGGCGCAG |
| 43158 | AQDLNNRPYAQ | 43508 | GCCCAAGATCTGAATAATCGGCCTTATGCACAG |
| 43159 | AQLSESSHGAQ | 43509 | GCCCAATTGTCTGAGTCGAGTCATGGTGCACAG |
| 43169 | AQVSNNSTLAQ | 43510 | GCACAACTAAGCAACAACAGCACTTTAGCACAA |
| 43160 | AQLQGAALQAQ | 43511 | GCACAATTACAAGGAGCAGCATTACAAGCACAA |
| 43162 | AQLRMPSNVAQ | 43512 | GCCCAACTTCGAATGCCCTCAAACGTCGCCCAA |
| 43163 | AQMPTSQPVAQ | 43513 | GCGCAGATGCCGACGTCGCAGCCGGTGGCGCAG |
| 43164 | AQYETQLSHAQ | 43514 | GCGCAGTATGAGACGCAGTTGTCGCATGCGCAG |
| 43165 | AQTRIQPLPAQ | 43515 | GCGCAGACGAGGATTCAGCCGTTGCCGGCGCAG |
| 43166 | AQPAPSGNTAQ | 43516 | GCGCAGCCGGCGCCGTCGGGGAATACGGCGCAG |
| 43167 | AQIHRMYSAAQ | 43517 | GCCCAAGAGCTTCGGATGTATAGTGCTGCACAG |
| 43168 | AQKESVPISAQ | 43518 | GCCCAAAAGGAATCAGTCCCCATCTCAGCCCAA |
| 43169 | AQVREVTLVAQ | 43519 | GCGCAGGTGAGGGAGGTGACGTTGGTGGCGCAG |
| 43170 | AQISSQLALAQ | 43520 | GCCCAAATCTCATCACAACTTGCCCTTGCCCAA |
| 43171 | AQSLGLTQHAQ | 43521 | GCTCAGAGTCTTGGTCTTACTCAGCATGCTCAG |
| 43172 | AQDLRMYSAAQ | 43522 | GCCCAAGATCTTCGGATGTATAGTGCTGCACAG |
| 43173 | AQTVAASRLAQ | 43523 | GCACAAACTGTAGCAGCAAGCAGGTTAGCACAA |
| 43174 | AQEVSVNVSAQ | 43524 | GCCCAAGAAGTCTCAGTCAACGTCTCCGCCCAA |
| 43175 | AQLNALATTAQ | 43525 | GCGCAGTTGAATGCGTTGGCGACGACGGCGCAG |
| 43176 | AQGTSLKGPAQ | 43526 | GCGCAAGGAACTAGCTTAAAGGGACCAGCACAA |
| 43177 | AQFPSTGVRAQ | 43527 | GCCCAATTTCCATCAACGGGCGTCCGAGCCCAA |
| 43178 | AQDHASESLAQ | 43528 | GCGCAGGATCATGCGTCGGAGTCGTTGGCGCAG |
| 43179 | AQSELSRHLAQ | 43529 | GCACAAAGCGAATTAAGCAGGCACTTAGCACAA |
| 43180 | AQNVFNRSAAQ | 43530 | GCGCAGAATGTGTTTAATAGGTCGGCGGCGCAG |
| 43181 | AQAQIATRMAQ | 43531 | GCGCAGGCGCAGATTGCGACGAGGATGGCGCAG |
| 43182 | AQTQMVTPAAQ | 43532 | GCACAAACTCAAATGGTAACTCCAGCAGCACAA |
| 43183 | AQRSSDSNCAQ | 43533 | GCCCAACGATCATCAGACTCAAACTGCGCCCAA |
| 43184 | AQTYGSEGSAQ | 43534 | GCCCAAACTTATGGTAGTGAGGGGTCGGCACAG |
| 43185 | AQINVANRSSQ | 43535 | GCCCAAATCAACGTCGCCAACCGATCATCCCAA |
| 43186 | AQLPTSPLDAQ | 43536 | GCGCAGTTGCCCACGTCGCCGTTGGATGCGCAG |
| 43187 | AQAKGGINGAQ | 43537 | GCCCAAGCGAAGGGTGGTATTAATGGGGCACAG |
| 43188 | AQQTVSMMLAQ | 43538 | GCTCAGCAGACTGTTAGTATGATGATTGCTCAG |
| 43189 | AQVHVGAEVAQ | 43539 | GCCCACGTGCATGTGGCGGCGGAGGTGGCGCAG |
| 43190 | AQESNLAALAQ | 43540 | GCTCAGGAGAGTAATCTTGCTGCTCTTGCTCAG |
| 43191 | AHVHAGAEVAQ | 43541 | GCGCATGTGCATGCGGGGGCGGAGGTGGCGCAG |
| 43192 | AQPALKTDPAQ | 43542 | GCACAACCCGCCCTTAAGACGGACCCCGCCCAA |
| 43193 | AQSLTTVGRAQ | 43543 | GCCCAATCTCTGACTACGGTGGGTCGGGCACAG |
| 43194 | AQDSRSNITAQ | 43544 | GCCCAAGATAGTAGGTCGAATATTACTGCACAG |
| 43195 | AQPRGQDGYAQ | 43545 | GCCCAACCCCGAGGCCAAGACGGCTATGCCCAA |
| 43196 | AQELNTSKDAQ | 43546 | GCGCAGGAGTTGAATACGTCGAAGGATGCGCAG |
| 43197 | AQYLGASQLAQ | 43547 | GCCCAATATCTTGGCGCCTCACAACTTGCCCAA |
| 43198 | AQYESRMPNAQ | 43548 | GCCCAATATGAGAGTCGTATGCCTAATGCACAG |
| 43199 | AQRGTQNHLAQ | 43549 | GCACAAAGGGGAACTCAAAACCACTTAGCACAA |
| 43200 | AQLTASH1LAQ | 43550 | GCCCAATTGACTGCGTCGCATATTCTGGCACAG |
| 43201 | AQYLSDKRTAQ | 43551 | GCGCAGTATTTGTCGGATAAGAGGACGGCGCAG |
| 43202 | AKELNTSKDAQ | 43552 | GCCAAAGAACTTAACACGTCAAAGGACGCCCAA |
| 43203 | AQFSTPSTTAQ | 43553 | GCACAATTCAGCACTCCAAGCACTACTGCACAA |
| 43204 | AQNYNSHMGAQ | 43554 | GCCCAAAATGTTAATTCTCATATGGGGGCACAG |
| 43205 | AQMPVST1SAQ | 43555 | GCGCAGATGCCGGTGTCGACGATTTCGGCGCAG |
| 43206 | AQSIGQGQVAQ | 43556 | GCACAAAGCATCGGACAAGGACAAGTAGCACAA |
| 43207 | AQVLREQSLAQ | 43557 | GCGCAGGTGTTGAGGGAGCAGTCGTTGGCGCAG |
| 43208 | AQRLAANNVAQ | 43558 | GCACAAAGGTTAGCAGCAAACAACGTAGCACAA |
| 43209 | AQNRVSESVAQ | 43559 | GCACAAAACAGGGTAAGCGAAAGCGTAGCACAA |
| 43210 | AQQHNGAQLAQ | 43560 | GCACAACAACACAACGGAGCACAATTAGCACAA |
| 43211 | AQASRSLSTAQ | 43561 | GCTCAGGCTAGTCGTAGTCTTAGTACTGCTCAG |
| 43212 | AQPTSGNLTAQ | 43562 | GCGCAGTTTACGTCGGGGAATTTGACGGCGCAG |
| 43213 | AQTVSNR7LAQ | 43563 | GCACAAACTGTAAGCAACAGGACTTTAGCACAA |
| 43214 | AQYDHSGTKAQ | 43564 | GCACAATATGACCACAGCGGAACTAAGGCACAA |
| 43215 | AQNVTSVTAAQ | 41565 | GCACAAAACGTAACTAGCGTAACTGCAGCACAA |
| 43216 | AQSQLAGAAAQ | 43566 | GCCCAATCGCAGCTTGCTGGTGCGGCGGCACAG |
| 43217 | AQSLRTPMLAQ | 43567 | GCTCAGAGTCTTCGTACTCCTATGCTTGCTCAG |
| 43218 | AQTMRSSVTAQ | 41568 | GCCCAAACGATGCGATCATCAGTCACGGCCCAA |
| 43219 | AQMISSSLAAQ | 43569 | GCCCAAATGATCTCATCATCACTTGCCGCCCAA |
| 43220 | AQSRMPLPEAQ | 43570 | GCCCAATCACGAATGCCCCTTCCCGAAGCCCAA |
| 43221 | AQARQSSALAQ | 41571 | GCCCAAGCCCGACAATCATCAGCCCTTGCCCAA |
| 43222 | AQAITGSTYAQ | 43572 | GCTCAGGCTATTACTGGTAGTACTTATGCTCAG |
| 43223 | AQPVLDTTRAQ | 41573 | GCGCAGCCGGTGTTGGATACGACGAGGGCGCAG |
| 43224 | AQPNGLSQPAQ | 43574 | GCACAACCAAACGGATTAAGCCAACCAGCACAA |
| 43225 | AQYSALMLSAQ | 43575 | GCGCAGTATTCGGCGTTGAATTTGTCGGCGCAG |
| 43226 | AQEHASRNPAQ | 41576 | GCGCAGGAGCATGCGTCGAGGAATCCGGCGCAG |
| 43227 | AQGITHQTVAQ | 43577 | GCCCAAGGGATTACGCATCAGACGGTGGCACAG |
| 43228 | AQAYGLPQDAQ | 41578 | GCACAAGCATATGGATTACCACAAGACGCACAA |
| 43229 | AQSTPTPSLAQ | 43579 | GCACAAAGCACTCCAACTCCAAGCTTAGCACAA |
| 43230 | AQSSHLVSSAQ | 43580 | GCCCAATCATCACATCTTGTCTCATCAGCCCAA |
| 43231 | AQIFQGMPNAQ | 41581 | GCGCAGATTTTTCAGGGGATGCCGAATGCGCAG |
| 43232 | AQMQTARTLAQ | 43582 | GCTCAGATGCAGACTGCTCGTACTCTTGCTCAG |
| 43233 | AQYTPRNAPAQ | 43583 | GCACAATATACTCCAAGGAACGCACCAGCACAA |
| 43234 | AQGFSTGTNAQ | 43584 | GCCCAAGGCTTTTCAACGGGCACGAACGCCCAA |
| 43215 | AQLQYTPSRAQ | 43585 | GCTCAGCTTCAGTATACTCCTAGTCGTGCTCAG |
| 43236 | AQAVRSTSAAQ | 43586 | GCGCAGGCGGTGAGGTCGACGTCGGCGGCGCAG |
| 43237 | AQTEVSIRQAQ | 43587 | GCTCAGACTGAGGTTAGTATTCGTCAGGCTCAG |
| 43218 | AQYGVQSATAQ | 43588 | GCCCAATATGGTGTTCAGTCGGCGACTGCACAG |
| 43239 | AQASTGSTYAQ | 43589 | GCTCAGGCTACTACTGGTAGTACTTATGCTCAG |
| 43240 | AQNTSSKDPAQ | 43590 | GCCCAAAATACTAGTAGTAAGGATCCGGCACAG |
| 43241 | AQAGSQGALAQ | 43591 | GCTCAGGCTGGTAGTCAGGGTGCTCTTGCTCAG |
| 45242 | AQLTRSELSAQ | 43592 | GCGCAGTTGACGAGGTCGGAGTTGTCGGCGCAG |
| 43243 | AQFVSGSNAAQ | 43593 | GCCCAATTTGTGAGTGGTTCGAATGCGGCACAG |
| 43244 | AQLITSYPSAQ | 41594 | GCCCAACTTACGACGTCATATCCCTCAGCCCAA |
| 43245 | AQSSVAiQLAQ | 43595 | GCGCAGTCGTCGGTGGCGATTCAGTTGGCGCAG |
| 43246 | AQFSTSLSLAQ | 43596 | GCTCAGTTTAGTACTAGTCTTAGTCTTGCACAG |
| 43247 | AQKNLHD7TAQ | 41597 | GCACAAAAGAACTTACACGACACTACTGCACAA |
| 43248 | AQASISAG1AQ | 43598 | GCTCAGGCTAGTATTAGTGCTGGTATTGCTCAG |
| 43249 | AQRVSNHDGAQ | 43599 | GCCCAACGAGTCTCAAACCATGACGGCGCCCAA |
| 43250 | AQESNLAARAQ | 43600 | GCTCAGGAGAGTAATCTTGCTGCTCGTGCTCAG |
| 43251 | AQLNAPQ5SAQ | 43601 | GCGCAGTTGAATGCGCCGCAGTCGTCGGCGCAG |
| 43252 | AQSVGMHGDAQ | 43602 | GCTCAGAGTGTTGGTATGCATGGTGATGCTCAG |
| 43253 | AQMTTRPTPAQ | 43603 | GCTCAGAATACTACTCGTCCTACTCCTCCTCAG |
| 43254 | AQIRQAQGAAQ | 43604 | GCCCAAATCCGACAAGCCCAAGGCGCCGCCCAA |
| 43255 | AQPTNFGTAAQ | 43605 | GCCCAACCTACGAATTTTGGTACGGCTGCACAG |
| 43256 | AQADFPRQSAQ | 43606 | GCGCAGGCGGATTTTCCGAGGCAGTCGGCGCAG |
| 43257 | AQNGNSHMGAQ | 43607 | GCCCAAAATGGTAATTCTCATATGGGGGCACAG |
| 43258 | AQPREQSSPAQ | 43608 | GCGCAGCCGAGGGAGCAGTCGTCGCCGGCGCAG |
| 43259 | AQEASGNARAQ | 43609 | GCCCAAGAGGCGTCTGGGAATGCTCGGGCACAG |
| 43260 | AQEAQSKRPAQ | 43610 | GCACAAGAAGCACAAAGCAAGAGGCCAGCACAA |
| 43261 | AQSSSNNVRAQ | 43611 | GCTCAGAGTAGTAGTAATAATGTTCGTGCTCAG |
| 43262 | AQSPSKGAVAQ | 43612 | GCACAAAGCCCAAGCAAGGGAGCAGTAGCACAA |
| 43263 | AQMLTTSKCAQ | 43613 | GCCCAAATGCTTACGACGTCAAAGGGCGCCCAA |
| 43264 | AQLEPSSPRAQ | 43614 | GCTCAGCTTGAGCCTAGTAGTCCTCGTGCTCAG |
| 43265 | AQMTGPITNAQ | 43615 | GCCCAAATGACTGGTCCGATTACTAATGCACAG |
| 43266 | AQSPNNTTGAQ | 43616 | GCGCAGTCGCCGAATAATACGACGGGGGCGCAG |
| 43267 | AQSSGGRTVAQ | 43617 | GCGCAGTCGTCGGGGGGGAGGACGGTGGCGCAG |
| 43268 | AQVNVTNQSAQ | 43618 | GCCCAAGTCAACGTCACGAACCAATCAGCCCAA |
| 43269 | AQTSGTAMAAQ | 43619 | GCCCAAACGTCAGGCACGGCCATGGCCGCCCAA |
| 43270 | AQSSMALSEAQ | 43620 | GCTCAGAGTAGTATGGCTCTTAGTGAGGCTCAG |
| 43271 | AQPVNTQRVAE | 43621 | GCGCAGCCGGTGAATACGCAGAGGGTGGCGGAG |
| 43272 | AQFVSGSHAAQ | 43622 | GCTCAGTTTGTTAGTGGTAGTCATGCTGCTCAG |
| 43273 | AQHKSMSRLAQ | 43623 | GCGCAGCATGAGTCGATGTCGAGGTTGGCGCAG |
| 43274 | AQSLGLTQQAQ | 43624 | GCTCAGAGTCTTGGTCTTACTCAGCAGGCTCAG |
| 43275 | AQHFDYSAPAQ | 43625 | GCGCAGCATTTTGATTATTCGGCGCCGGCGCAG |
| 43276 | AQDLSTSSRAQ | 43626 | GCACAAGACTTAAGCACTAGCAGCAGGGCACAA |
| 43277 | AQKNAITGPAQ | 43627 | GCCCAAAAGAACGCCCTTACGCGCCCCGCCCAA |
| 43278 | AQITQMAAQAQ | 43628 | GCCCAAATTACTCAGATGGCTGCGCAGGCACAG |
| 43279 | AQMNAPLMTAQ | 43629 | GCGCAGATGAATGCGCCGTTGATGACGGCGCAG |
| 43280 | AQYGKSNSLAQ | 43630 | GCACAATATGGAAAGAGCAACAGCTTAGCACAA |
| 43281 | AQHSTPGRAAQ | 43631 | GCCCAACATTCAACGCCCGGCCGAGCCGCCCAA |
| 43282 | AQLENARGTAQ | 43632 | GCCCAACTTGAGAATGCTCGGGGGACGGCACAG |
| 43283 | AQQTSTSNAAQ | 43633 | GCACAACAAACTAGCACTAGTAACGCAGCACAA |
| 43284 | AQSVLSVNAAQ | 43634 | GCCCAATCTGTGCTTTCGGTTAATGCTGCACAG |
| 43285 | AQAAVSSIPAQ | 43635 | GCTCAGGCTGCTGTTAGTAGTATTCCTGCTCAG |
| 43286 | AQVEDVRQLAQ | 43636 | GGCCAAGTCGAAGACGTCCGACAACTTGCCCAA |
| 43287 | AQVISGRDAAQ | 43637 | GCGCAGGTTATTAGTGGTCGTGATGCTGCTCAG |
| 43288 | AQTKSQEVSAQ | 43638 | GCCCAAACGAAGTCGCAGGAGGTTAGTGCACAG |
| 43289 | AQKPASIPNAQ | 43639 | GCCCAAAAGCCTGCGTCGATTCCTAATGCACAG |
| 43290 | AQYAVQSTHAQ | 43640 | GCGCAGTATGCGGTGCAGTCGACGCATGCGCAG |
| 43291 | AQSTRTVJPAQ | 43641 | GCACAAAGCACTAGGACTGTAATACCAGCACAA |
| 43292 | AQKATGLTSAQ | 43642 | GCTCAGAAGGCTACTGGTCTTACTAGTGCTCAG |
| 43293 | AQLTMQRSSAQ | 43643 | GCACAATTAACTAACCAAAGGAGCAGCGCACAA |
| 43294 | AQDHGKSGGAQ | 43644 | GCACAAGACCACGGAAAGAGCGGAGGAGCACAA |
| 43295 | AQVSMNSRGAQ | 43645 | GCCCAAGTTTCGATGAATTCTCGTGGGGCACAG |
| 43296 | AQQPSLRRDAQ | 43646 | GCCCAACAGCCTTCGCTTAGGCGGGATGCACAG |
| 43297 | AQRSNQNANAQ | 43647 | GCGCAGAGGTCGAATCAGAATGCGAATGCGCAG |
| 43298 | AQPGAGVREAQ | 43648 | GCCCAACCCGGCGCCGGCGTCCGAGAAGCCCAA |
| 43299 | aqtgrsdsnao | 43649 | GCCCAAACTGGGCGTTCTGATAGTAATGCACAG |
| 43300 | AQSNSALIAAQ | 43650 | GCGCAGTCGAATTCGGCGTTGATTGCGGCGCAG |
| 43301 | AQPIASVSPAQ | 43651 | GCGCAGCCGATTGCGTCGGTGTCGCCGGCGCAG |
| 43302 | AQHTFMTEVAQ | 43652 | GCTCAGCATACTACTAATACTGAGGTTGCTCAG |
| 43303 | AQQKSTYSPAQ | 43653 | GCCCAACAGAAGAGTACTTATAGTCCTGCACAG |
| 43304 | AQQTQHTGPAQ | 43654 | GCTCAGCAGACTCAGCATACTGGTCCTGCTCAG |
| 43305 | AQMERISIHAQ | 43655 | GCGCAGATGGAGAGGATTTCGATTCATGCGCAG |
| 43306 | AQDSGNKMNAQ | 43656 | GCTCAGGATAGTGGTAATAAGATGAATGCTCAG |
| 43307 | AQSAVHNGVAQ | 43657 | GCGCAGTCGGCGGTGCATAATGGGGTGGCGCAG |
| 43308 | AQSASLPMAAQ | 43658 | GCCCAATCAGCCTCACTTCCCATGGCCGCCCAA |
| 43309 | AQNLASTSPAQ | 43659 | GCCCAAAACCTTGCCTCAACGTCACCCGCCCAA |
| 43310 | AQVMHTLDAAQ | 43660 | GCTCAGGTTATGCATACTCTTGATGCTGCTCAG |
| 43311 | AQSQSGGDRAQ | 43661 | GCCCAAAGTCAGAGTGGGGGTGATAGGGCACAG |
| 43312 | AQVATIVRSAQ | 43662 | GCCCAAGTTGCGACTATTGTTCGTTCTGCACAG |
| 43313 | AQSPQRNSTAQ | 43663 | GCCCAATCGCCTCAGCGGAATTCTACGGCACAG |
| 43314 | AQEVSVNVAAQ | 43664 | GCCCAAGAAGTCTCAGTCAACGrCGCCGCCCAA |
| 43315 | AQ7GTPRNDAQ | 43665 | GCCCAAACGGGTACTCCGCGGAATGATGCACAG |
| 43316 | AQYTDNYGVAQ | 43666 | GCACAATATACTGACAACTATGGACTAGCACAA |
| 43317 | AQLDGSPARAQ | 43667 | GCGCAGTTGGATGGGTCGCCGGCGAGGGCGCAG |
| 43318 | AQNGSDASLAQ | 43668 | GCACAAAACGGAAGCGACGCAAGCTTAGCACAA |
| 43319 | AQNVGREQPAQ | 43669 | GCTCAGAATGTTGGTCGTGAGCAGCCTGCTCAG |
| 43320 | AQPPAGNTQAQ | 43670 | GCCCAACCGCCTGCGGGTAATACTCAGGCACAG |
| 43321 | AQVTPHFPSAQ | 43671 | GCTCAGGTTACTCCTCATTTTCCTAGTGCTCAG |
| 43322 | AQATHAASPAQ | 43672 | GCCCAAGGTACTCATGCTGCGAGTCCGGCACAG |
| 43323 | AQSNVKVLAAQ | 43673 | GCGCAATCAAACGTCAAGGTCCTTGCCGCCCAA |
| 43324 | AQNAAKAVLAQ | 43674 | GCCCAAAACGCCGCCAAGGCCGTCCTTGCCCAA |
| 43325 | AQTDKPHSQAQ | 43675 | GCACAAACTGACAAGGCACACAGCCAAGCACAA |
| 43326 | AQSATSNFLAQ | 43676 | GCCCAATCAGCCACGTCAAACTTTCTTCCCCAA |
| 43327 | AQNLRAEVVAQ | 43677 | GCGCAGAATTTGAGGGCGGAGGTGGTGGCGCAG |
| 43328 | AQNERSiESAQ | 43678 | GCCCAAAACGAACGATCAATCGAATCAGCCCAA |
| 43329 | AQYPNDANPAQ | 43679 | GCACAATATCCAAACGACGCAAACCCAGCACAA |
| 43330 | AQASLLSQPAQ | 43680 | GCCCAAGCCTCACTTCTTTCACAACCCGCCCAA |
| 43331 | AQEFNTRDAAQ | 43681 | GCACAAGAATTCAACACTAGGGACGCAGCACAA |
| 43332 | AQELVSSLGAQ | 43682 | GCCCAAGAGCTTGTGAGTAGTCTGGGGGCACAG |
| 43333 | AQSAQAYTEAQ | 43683 | GCCCAAAGTGCGCAGGCTTATACTGAGGCACAG |
| 43334 | AQMSTESHGAQ | 43684 | GCCCAAATGTCAACGGAATCACATGGCGCCCAA |
| 43335 | AQSQNMSNIAQ | 43685 | GCCCAATCACAAAACATGTCAAACATCGCCCAA |
| 43336 | AQVGNDNRSAQ | 43686 | GCCCAAGTGGGTAATGATAATCGGTCGGCACAG |
| 43337 | AQLQSSNNPAQ | 43687 | GCGCAGTTGCAGTCGTCGAATAATCCGGCGCAG |
| 43338 | AQDSAPLRSAQ | 43688 | GCTCAGGATAGTGCTCCTCTTCGTAGTGCTCAG |
| 43339 | AQMGGTIMSAQ | 43689 | GCCCAAATGGGCGGCACGATCATGTCAGCCCAA |
| 43340 | AQHYTSGAEAQ | 43690 | GCGCAGCATTATACGTCGGGGGCGGAGGCGCAG |
| 43341 | AQSVGMNYKAQ | 43691 | GCCCAATCAGTCGGCATGAACTATAAGGCCCAA |

[0132] In some embodiments, the targeting peptide may include amino acid at position 1 to amino acid at position 2 of SEQ ID NO: 43073-43341. In some embodiments, the targeting peptide may include amino acid at position 1 to amino acid at position 3 of SEQ ID NO: 43073-43341. In some embodiments, the targeting peptide may include amino acid at position 2 to amino acid at position 3 of SEQ ID NO: 43073-43341. In some embodiments, the targeting peptide may include amino acid at position 1 to amino acid at position 4 of SEQ ID NO: 43073-43341. In some embodiments, the targeting peptide may include amino acid at position 2 to amino acid at position 4 of SEQ ID NO: 43073-43341. In some embodiments, the targeting peptide may include amino acid at position 3 to amino acid at position 4 of SEQ ID NO: 43073-43341. In some embodiments, the targeting peptide may include amino acid at position 1 to amino acid at position 5 of SEQ ID NO: 43073-43341. In some embodiments, the targeting peptide may include amino acid at position 2 to amino acid at position 5 of SEQ ID NO: 43073-43341. In some embodiments, the targeting peptide may include amino acid at position 3 to amino acid at position 5 of SEQ ID NO: 43073-43341. In some embodiments, the targeting peptide may include amino acid at position 4 to amino acid at position 5 of SEQ ID NO: 43073-43341. In some embodiments, the targeting peptide may include amino acid at position 1 to amino acid at position 6 of SEQ ID NO: 43073-43341. In some embodiments, the targeting peptide may include amino acid at position 2 to amino acid at position 6 of SEQ ID NO: 43073-43341. In some embodiments, the targeting peptide may include amino acid at position 3 to amino acid at position 6 of SEQ ID NO: 43073-43341. In some embodiments, the targeting peptide may include amino acid at position 4 to amino acid at position 6 of SEQ ID NO: 43073-43341. In some embodiments, the targeting peptide may include amino acid at position 5 to amino acid at position 6 of SEQ ID NO: 43073-43341. In some embodiments, the targeting peptide may include amino acid at position 1 to amino acid at position 7 of SEQ ID NO: 43073-43341. In some embodiments, the targeting peptide may include amino acid at position 2 to amino acid at position 7 of SEQ ID NO: 43073-43341. In some embodiments, the targeting peptide may include amino acid at position 3 to amino acid at position 7 of SEQ ID NO: 43073-43341. In some embodiments, the targeting peptide may include amino acid at position 4 to amino acid at position 7 of SEQ ID NO: 43073-43341. In some embodiments, the targeting peptide may include amino acid at position 5 to amino acid at position 7 of SEQ ID NO: 43073-43341. In some embodiments, the targeting peptide may include amino acid at position 6 to amino acid at position 7 of SEQ ID NO: 43073-43341. In some embodiments, the targeting peptide may include amino acid at position 1 to amino acid at position 8 of SEQ ID NO: 43073-43341. In some embodiments, the targeting peptide may include amino acid at position 2 to amino acid at position 8 of SEQ ID NO: 43073-43341. In some embodiments, the targeting peptide may include amino acid at position 3 to amino acid at position 8 of SEQ ID NO: 43073-43341. In some embodiments, the targeting peptide may include amino acid at position 4 to amino acid at position 8 of SEQ ID NO: 43073-43341. In some embodiments, the targeting peptide may include amino acid at position 5 to amino acid at position 8 of SEQ ID NO: 43073-43341. In some embodiments, the targeting peptide may include amino acid at position 6 to amino acid at position 8 of SEQ ID NO: 43073-43341. In some embodiments, the targeting peptide may include amino acid at position 7 to amino acid at position 8 of SEQ ID NO: 43073-43341. In some embodiments, the targeting peptide may include amino acid at position 1 to amino acid at position 9 of SEQ ID NO: 43073-43341. In some embodiments, the targeting peptide may include amino acid at position 2 to amino acid at position 9 of SEQ ID NO: 43073-43341. In some embodiments, the targeting peptide may include amino acid at position 3 to amino acid at position 9 of SEQ ID NO: 43073-43341. In some embodiments, the targeting peptide may include amino acid at position 4 to amino acid at position 9 of SEQ ID NO: 43073-43341. In some embodiments, the targeting peptide may include amino acid at position 5 to amino acid at position 9 of SEQ ID NO: 43073-43341. In some embodiments, the targeting peptide may include amino acid at position 6 to amino acid at position 9 of SEQ ID NO: 43073-43341. In some embodiments, the targeting peptide may include amino acid at position 7 to amino acid at position 9 of SEQ ID NO: 43073-43341. In some embodiments, the targeting peptide may include amino acid at position 8 to amino acid at position 9 of SEQ ID NO: 43073-43341. In some embodiments, the targeting peptide may include amino acid at position 1 to amino acid at position 10 of SEQ ID NO: 43073-43341. In some embodiments, the targeting peptide may include amino acid at position 2 to amino acid at position 10 of SEQ ID NO: 43073-43341. In some embodiments, the targeting peptide may include amino acid at position 3 to amino acid at position 10 of SEQ ID NO: 43073-43341. In some embodiments, the targeting peptide may include amino acid at position 4 to amino acid at position 10 of SEQ ID NO: 43073-43341. In some embodiments, the targeting peptide may include amino acid at position 5 to amino acid at position 10 of SEQ ID NO: 43073-43341. In some embodiments, the targeting peptide may include amino acid at position 6 to amino acid at position 10 of SEQ ID NO: 43073-43341. In some embodiments, the targeting peptide may include amino acid at position 7 to amino acid at position 10 of SEQ ID NO: 43073-43341. In some embodiments, the targeting peptide may include amino acid at position 8 to amino acid at position 10 of SEQ ID NO: 43073-43341. In some embodiments, the targeting peptide may include amino acid at position 9 to amino acid at position 10 of SEQ ID NO: 43073-43341. In some embodiments, the targeting peptide may include amino acid at position 1 to amino acid at position 11 of SEQ ID NO: 43073-43341. In some embodiments, the targeting peptide may include amino acid at position 2 to amino acid at position 11 of SEQ ID NO: 43073-43341. In some embodiments, the targeting peptide may include amino acid at position 3 to amino acid at position 11 of SEQ ID NO: 43073-43341. In some embodiments, the targeting peptide may include amino acid at position 4 to amino acid at position 11 of SEQ ID NO: 43073-43341. In some embodiments, the targeting peptide may include amino acid at position 5 to amino acid at position 11 of SEQ ID NO: 43073-43341. In some embodiments, the targeting peptide may include amino acid at position 6 to amino acid at position 11 of SEQ ID NO: 43073-43341. In some embodiments, the targeting peptide may include amino acid at position 7 to amino acid at position 11 of SEQ ID NO: 43073-43341. In some embodiments, the targeting peptide may include amino acid at position 8 to amino acid at position 11 of SEQ ID NO: 43073-43341. In some embodiments, the targeting peptide may include amino acid at position 9 to amino acid at position 11 of SEQ ID NO: 43073-43341. In some embodiments, the targeting peptide may include amino acid at position 10 to amino acid at position 11 of SEQ ID NO: 43073-43341.

[0133] In any of the DNA and RNA sequences referenced and/or described herein, the single letter symbol has the following description: A for adenine; C for cytosine; G for guanine; T for thymine; U for Uracil; W for weak bases such as adenine or thymine; S for strong nucleotides such as cytosine and guanine; M for amino nucleotides such as adenine and cytosine; K for keto nucleotides such as guanine and thymine; R for purines adenine and guanine; Y for pyrimidine cytosine and thymine; B for any base that is not A (e.g., cytosine, guanine, and thymine); D for any base that is not C (e.g., adenine, guanine, and thymine); H for any base that is not G (e.g., adenine, cytosine, and thymine); V for any base that is not T (e.g., adenine, cytosine, and guanine); N for any nucleotide (which is not a gap); and Z is for zero.

[0134] In any of the amino acid sequences referenced and/or described herein, the single letter symbol has the following description: G (Gly) for Glycine; A (Ala) for Alanine; L (Leu) for Leucine; M (Met) for Methionine; F (Phe) for Phenylalanine; W (Trp) for Tryptophan; K (Lys) for Lysine; Q (Gln) for Glutamine; E (Glu) for Glutamic Acid; S (Ser) for Serine; P (Pro) for Proline; V (Val) for Valine; I (Ile) for Isoleucine; C (Cys) for Cysteine; Y (Tyr) for Tyrosine; H (His) for Histidine; R (Arg) for Arginine; N (Asn) for Asparagine; D (Asp) for Aspartic Acid; T (Thr) for Threonine; B (Asx) for Aspartic acid or Asparagine; J (Xle) for Leucine or Isoleucine; O (Pyl) for Pyrrolysine; U (Sec) for Selenocysteine; X (Xaa) for any amino acid; and Z (Glx) for Glutamine or Glutamic acid.

### Use of Targeting Peptides in AAV Particles

[0135] Targeting peptides may be stand-alone peptides or may be inserted into or conjugated to a parent sequence. In certain embodiments, the targeting peptides are inserted into the capsid protein of an AAV particle.

[0136] One or more targeting peptides may be inserted into a parent AAV capsid sequence to generate the AAV particles of the disclosure.

[0137] Targeting peptides may be inserted into a parent AAV capsid sequence in any location that results in fully functional AAV particles. The targeting peptide may be inserted in VP1, VP2 and/or VP3. Numbering of the amino acid residues differs across AAV serotypes, and so the exact amino acid position of the targeting peptide insertion may not be critical. As used herein, amino acid positions of the parent AAV capsid sequence are described using AAV9 (SEQ ID NO: 2) as reference.

[0138] In certain embodiments, the targeting peptides are inserted in a hypervariable region of the AAV capsid sequence. Non-limiting examples of such hypervariable regions include Loop IV and Loop VIII of the parent AAV capsid. While not wishing to be bound by theory, these surface exposed loops are unstructured and poorly conserved, making them ideal regions for insertion of targeting peptides.

[0139] In certain embodiments, the targeting peptide is inserted into Loop IV. In another embodiment, the targeting peptide is used to replace a portion, or all of Loop IV. As a non-limiting example, addition of the targeting peptide to the parent AAV capsid sequence may result in the replacement or mutation of at least one amino acid of the parent AAV capsid.

[0140] In certain embodiments, the targeting peptide is inserted into Loop VIII. In another embodiment, the targeting peptide is used to replace a portion, or all of Loop VIII. As a non-limiting example, addition of the targeting peptide to the parent AAV capsid sequence may result in the replacement or mutation of at least one amino acid of the parent AAV capsid.

[0141] In certain embodiments, more than one targeting peptide is inserted into a parent AAV capsid sequence. As a non-limiting example, targeting peptides may be inserted at both Loop IV and Loop VIII in the same parent AAV capsid sequence.

[0142] Targeting peptides may be inserted at any amino acid position of the parent AAV capsid sequence, such as, but not limited to, between amino acids at positions 586-592, 588-589, 586-589, 452-458, 262-269, 464-473, 491-495, 546-557 and/or 659-668.

[0143] In a preferred embodiment, the targeting peptides are inserted into a parent AAV capsid sequence between amino acids at positions 588 and 589 (Loop VIII). In certain embodiments, the parent AAV capsid is AAV9 (SEQ ID NO: 2). In a second embodiment, the parent AAV capsid is K449R AAV9 (SEQ ID NO: 3).

[0144] The targeting peptides described herein may increase the transduction of the AAV particles of the disclosure to a target tissue as compared to the parent AAV particle lacking a targeting peptide insert. In certain embodiments, the targeting peptide increases the transduction of an AAV particle to a target tissue by at least about 5%, 10%, 15%, 20%, 25%, 30%, 35%, 40%, 45%, 50%, 55%, 60%, 65%, 70%, 75%, 80%, 85%, 90%, 95%, 100%, 125%, 150%, 200%, 300%, 400%, 500%, or more as compared to a parent AAV particle lacking a targeting peptide insert.

[0145] In certain embodiments, the targeting peptide increases the transduction of an AAV particle to a cell or tissue of the CNS by at least about 5%, 10%, 15%, 20%, 25%, 30%, 35%, 40%, 45%, 50%, 55%, 60%, 65%, 70%, 75%, 80%, 85%, 90%, 95%, 100%, 125%, 150%, 200%, 300%, 400%, 500%, or more as compared to a parent AAV particle lacking a targeting peptide insert.

[0146] In certain embodiments, the targeting peptide increases the transduction of an AAV particle to a cell or tissue of the PNS by at least about 5%, 10%, 15%, 20%, 25%, 30%, 35%, 40%, 45%, 50%, 55%, 60%, 65%, 70%, 75%, 80%, 85%, 90%, 95%, 100%, 125%, 150%, 200%, 300%, 400%, 500%, or more as compared to a parent AAV particle lacking a targeting peptide insert.

[0147] In certain embodiments, the targeting peptide increases the transduction of an AAV particle to a cell or tissue of the DRG by at least about 5%, 10%, 15%, 20%, 25%, 30%, 35%, 40%, 45%, 50%, 55%, 60%, 65%, 70%, 75%, 80%, 85%, 90%, 95%, 100%, 125%, 150%, 200%, 300%, 400%, 500%, or more as compared to a parent AAV particle lacking a targeting peptide insert.

### Viral Genome of the AAV Particle

[0148] AAV particles of the disclosure, comprising targeting peptides, may be used for the delivery of any viral genome to a target tissue (e.g., CNS and/or DRG). The viral genome may encode any payload, such as but not limited to a polypeptide, an antibody, an enzyme, an RNAi agent and/or components of a gene editing system. In certain embodiments, the AAV particles of the disclosure are used to deliver a payload to cells of the CNS, after intravenous delivery. In another embodiment, the AAV particles of the disclosure are used to deliver a payload to cells of the DRG, after intravenous delivery.

[0149] A viral genome of an AAV particle of the disclosure, comprises a nucleic acid sequence with at least one payload region encoding a payload, and at least one ITR. A viral genome typically comprises two ITR sequences, one at each of the 5′ and 3′ ends. Further, a viral genome of the AAV particles of the disclosure may comprise nucleic acid sequences for additional components, such as, but not limited to, a regulatory element (e.g., promoter), untranslated regions (UTR), a polyadenylation sequence (polyA), a filler or stuffer sequence, an intron, and/or a linker sequence for enhanced expression.

[0150] These viral genome components can be selected and/or engineered to further tailor the specificity and efficiency of expression of a given payload in a target tissue (e.g., CNS or DRG).

### Viral Genome Component: Inverted Terminal Repeats (ITRs)

[0151] The AAV particles of the present disclosure comprise a viral genome with at least one ITR and a payload region. In certain embodiments, the viral genome has two ITRs. These two ITRs flank the payload region at the 5′ and 3′ ends. The ITRs function as origins of replication comprising recognition sites for replication. ITRs comprise sequence regions which can be complementary and symmetrically arranged. ITRs incorporated into viral genomes of the disclosure may be comprised of naturally occurring polynucleotide sequences or recombinantly derived polynucleotide sequences.

[0152] The ITRs may be derived from the same serotype as the capsid, selected from any of the known serotypes, or a derivative thereof. The ITR may be of a different serotype than the capsid. In certain embodiments, the AAV particle has more than one ITR. In a non-limiting example, the AAV particle has a viral genome comprising two ITRs. In certain embodiments, the ITRs are of the same serotype as one another. In another embodiment, the ITRs are of different serotypes. Non-limiting examples include zero, one or both of the ITRs having the same serotype as the capsid. In certain embodiments both ITRs of the viral genome of the AAV particle are AAV2 ITRs.

[0153] Independently, each ITR may be about 100 to about 150 nucleotides in length. An ITR may be about 100-105 nucleotides in length, 106-110 nucleotides in length, 111-115 nucleotides in length, 116-120 nucleotides in length, 121-125 nucleotides in length, 126-130 nucleotides in length, 131-135 nucleotides in length, 136-140 nucleotides in length, 141-145 nucleotides in length or 146-150 nucleotides in length. In certain embodiments, the ITRs are 140-142 nucleotides in length. Non-limiting examples of ITR length are 102, 105, 130, 140, 141, 142, 145 nucleotides in length. ITRs encompassed by the present disclosure include those with at least 90% identity, at least 95% identity, at least 98% identity, or at least 99% identity to a known AAV serotype ITR sequence.

### Viral Genome Component: Promoters

[0154] In certain embodiments, the payload region of the viral genome comprises at least one element to enhance the payload target specificity and expression (See e.g., Powell et al. Viral Expression Cassette Elements to Enhance Transgene Target Specificity and Expression in Gene Therapy, 2015; the contents of which are herein incorporated by reference in their entirety). Non-limiting examples of elements to enhance payload target specificity and expression include promoters, endogenous miRNAs, post-transcriptional regulatory elements (PREs), polyadenylation (PolyA) signal sequences and upstream enhancers (USEs), CMV enhancers and introns.

[0155] A person skilled in the art may recognize that expression of a payload in a target cell may require a specific promoter, including but not limited to, a promoter that is species specific, inducible, tissue-specific, or cell cycle-specific (Parr et al., Nat. Med. 3:1145-9 (1997); the contents of which are herein incorporated by reference in their entirety).

[0156] In certain embodiments, the promoter is deemed to be efficient when it drives expression of the payload encoded by the viral genome of the AAV particle.

[0157] In certain embodiments, the promoter is a promoter deemed to be efficient when it drives expression in a cell being targeted.

[0158] In certain embodiments, the promoter is a promoter having a tropism for a cell being targeted.

[0159] In certain embodiments, the promoter drives expression of the payload for a period of time in targeted tissues. Expression driven by a promoter may be for a period of 1 hour, 2, hours, 3 hours, 4 hours, 5 hours, 6 hours, 7 hours, 8 hours, 9 hours, 10 hours, 11 hours, 12 hours, 13 hours, 14 hours, 15 hours, 16 hours, 17 hours, 18 hours, 19 hours, 20 hours, 21 hours, 22 hours, 23 hours, 1 day, 2 days, 3 days, 4 days, 5 days, 6 days, 1 week, 8 days, 9 days, 10 days, 11 days, 12 days, 13 days, 2 weeks, 15 days, 16 days, 17 days, 18 days, 19 days, 20 days, 3 weeks, 22 days, 23 days, 24 days, 25 days, 26 days, 27 days, 28 days, 29 days, 30 days, 31 days, 1 month, 2 months, 3 months, 4 months, 5 months, 6 months, 7 months, 8 months, 9 months, 10 months, 11 months, 1 year, 13 months, 14 months, 15 months, 16 months, 17 months, 18 months, 19 months, 20 months, 21 months, 22 months, 23 months, 2 years, 3 years, 4 years, 5 years, 6 years, 7 years, 8 years, 9 years, 10 years or more than 10 years. Expression may be for 1-5 hours, 1-12 hours, 1-2 days, 1-5 days, 1-2 weeks, 1-3 weeks, 1-4 weeks, 1-2 months, 1-4 months, 1-6 months, 2-6 months, 3-6 months, 3-9 months, 4-8 months, 6-12 months, 1-2 years, 1-5 years, 2-5 years, 3-6 years, 3-8 years, 4-8 years or 5-10 years. As a non-limiting example, the promoter is a selected for sustained expression of a payload in tissues and/or cells of the central or peripheral nervous system.

[0160] Promoters may be naturally occurring or non-naturally occurring. Non-limiting examples of promoters include those derived from viruses, plants, mammals, or humans. In some embodiments, the promoters may be those derived from human cells or systems. In some embodiments, the promoter may be truncated or mutated.

[0161] Promoters which drive or promote expression in most tissues include, but are not limited to, the human elongation factor 1α-subunit (EF1α) promoter, the cytomegalovirus (CMV) immediate-early enhancer and/or promoter, the chicken β-actin (CBA) promoter and its derivative CAG, β glucuronidase (GUSB) promoter, or ubiquitin C (UBC) promoter. Tissue-specific promoters can be used to restrict expression to certain cell types such as, but not limited to, cells of the central or peripheral nervous systems, targeted regions within (e.g., frontal cortex), and/or sub-sets of cells therein (e.g., excitatory neurons). As non-limiting examples, cell-type specific promoters may be used to restrict expression of a payload to excitatory neurons (e.g., glutamatergic), inhibitory neurons (e.g., GABA-ergic), neurons of the sympathetic or parasympathetic nervous system, sensory neurons, neurons of the dorsal root ganglia, motor neurons, or supportive cells of the nervous systems such as microglia, astrocytes, oligodendrocytes, and/or Schwann cells.

[0162] Cell-type specific promoters also exist for other tissues of the body, with non-limiting examples including, liver promoters (e.g., hAAT, TBG), skeletal muscle specific promoters (e.g., desmin, MCK, C512), B cell promoters, monocyte promoters, leukocyte promoters, macrophage promoters, pancreatic acinar cell promoters, endothelial cell promoters, lung tissue promoters, and/or cardiac or cardiovascular promoters (e.g., αMHC, cTnT, and CMV-MLC2k).

[0163] Non-limiting examples of tissue-specific promoters for targeting payload expression to central nervous system tissues and cells include synapsin (Syn), glutamate vesicular transporter (VGLUT), vesicular GABA transporter (VGAT), parvalbumin (PV), sodium channel Naᵥ 1.8 (SCN10A), tyrosine hydroxylase (TH), choline acetyltransferase (ChaT), methyl-CpG binding protein 2 (MeCP2), Ca²⁺/calmodulin-dependent protein kinase II (CaMKII), metabotropic glutamate receptor 2 (mGluR2), neurofilament light (NFL) or heavy (NFH), neuron-specific enolase (NSE). β-globin minigene nβ2, preproenkephalin (PPE), enkephalin (Enk) and excitatory amino acid transporter 2 (EAAT2) promoters. Non-limiting examples of tissue-specific expression elements for astrocytes include glial fibrillary acidic protein (GFAP) and EAAT2 promoters. A non-limiting example of a tissue-specific expression element for oligodendrocytes includes the myelin basic protein (MBP) promoter.

[0164] In certain embodiments, the promoter may be less than 1 kb. The promoter may have a length of 200, 210, 220, 230, 240, 250, 260, 270, 280, 290, 300, 310, 320, 330, 340, 350, 360, 370, 380, 390, 400, 410, 420, 430, 440, 450, 460, 470, 480, 490, 500, 510, 520, 530, 540, 550, 560, 570, 580, 590, 600, 610, 620, 630, 640, 650, 660, 670, 680, 690, 700, 710, 720, 730, 740, 750, 760, 770, 780, 790, 800 or more than 800 nucleotides. The promoter may have a length between 200-300, 200-400, 200-500, 200-600, 200-700, 200-800, 300-400, 300-500, 300-600, 300-700, 300-800, 400-500, 400-600, 400-700, 400-800, 500-600, 500-700, 500-800, 600-700, 600-800 or 700-800 nucleotides.

[0165] In certain embodiments, the promoter may be a combination of two or more components of the same or different starting or parental promoters such as, but not limited to, CMV and CBA. Each component may have a length of 200, 210, 220, 230, 240, 250, 260, 270, 280, 290, 300, 310, 320, 330, 340, 350, 360, 370, 380, 381, 382, 383, 384, 385, 386, 387, 388, 389, 390, 400, 410, 420, 430, 440, 450, 460, 470, 480, 490, 500, 510, 520, 530, 540, 550, 560, 570, 580, 590, 600, 610, 620, 630, 640, 650, 660, 670, 680, 690, 700, 710, 720, 730, 740, 750, 760, 770, 780, 790, 800 or more than 800 nucleotides. Each component may have a length between 200-300, 200-400, 200-500, 200-600, 200-700, 200-800, 300-400, 300-500, 300-600, 300-700, 300-800, 400-500, 400-600, 400-700, 400-800, 500-600, 500-700, 500-800, 600-700, 600-800 or 700-800 nucleotides. In certain embodiments, the promoter is a combination of a 382 nucleotide CMV-enhancer sequence and a 260 nucleotide CBA-promoter sequence.

[0166] In certain embodiments, the viral genome comprises a ubiquitous promoter. Non-limiting examples of ubiquitous promoters include CMV, CBA (including derivatives CAG, CBh, etc.), EF-1α, PGK, UBC, GUSB (hGBp), and UCOE (promoter of HNRPA2B1-CBX3).

[0167] Yu et al. (Molecular Pain 2011, 7:63; the contents of which are herein incorporated by reference in their entirety) evaluated the expression of eGFP under the CAG, EFIα, PGK and UBC promoters in rat DRG cells and primary DRG cells using lentiviral vectors and found that UBC showed weaker expression than the other 3 promoters and only 10-12% glial expression was seen for all promoters. Soderblom et al. (E. Neuro 2015, 2(2): ENEURO.0001-15; the contents of which are herein incorporated by reference in their entirety) evaluated the expression of eGFP in AAV8 with CMV and UBC promoters and AAV2 with the CMV promoter after injection in the motor cortex. Intranasal administration of a plasmid containing a UBC or EFIα promoter showed a sustained airway expression greater than the expression with the CMV promoter (See e.g., Gill et al., Gene Therapy 2001, Vol. 8, 1539-1546; the contents of which are herein incorporated by reference in their entirety). Husain et al. (Gene Therapy 2009, 16(7): 927-932; the contents of which are herein incorporated by reference in their entirety) evaluated an HOH construct with a hGUSB promoter, a HSV-1LAT promoter and an NSE promoter and found that the HpH construct showed weaker expression than NSE in mouse brain. Passini and Wolfe (J. Virol. 2001, 12382-12392, the contents of which are herein incorporated by reference in their entirety) evaluated the long term effects of the HpH vector following an intraventricular injection in neonatal mice and found that there was sustained expression for at least 1 year. Low expression in all brain regions was found by Xu et al. (Gene Therapy 2001, 8, 1323-1332; the contents of which are herein incorporated by reference in their entirety) when NFL and NFH promoters were used as compared to the CMV-lacZ, CMV-luc, EF, GFAP, hENK, nAChR, PPE, PPE+wpre, NSE (0.3 kb), NSE (1.8 kb) and NSE (1.8 kb+wpre). Xu et al. found that the promoter activity in descending order was NSE (1.8 kb), EF, NSE (0.3 kb), GFAP, CMV, hENK, PPE, NFL and NFH. NFL is a 650-nucleotide promoter and NFH is a 920 nucleotide promoter which are both absent in the liver but NFH is abundant in the sensory proprioceptive neurons, brain and spinal cord and NFH is present in the heart. SCN8A (Nav 1.6) is a 470 nucleotide promoter which expresses throughout the DRG, spinal cord and brain with particularly high expression seen in the hippocampal neurons and cerebellar Purkinje cells, cortex, thalamus and hypothalamus (See e.g., Drews et al. Identification of evolutionary conserved, functional noncoding elements in the promoter region of the sodium channel gene SCN8A. Mamm Genome (2007) 18:723-731; and Raymond et al. Expression of Alternatively Spliced Sodium Channel α-subunit genes. Journal of Biological Chemistry (2004) 279(44) 46234-46241; the contents of each of which are herein incorporated by reference in their entireties).

[0168] Any of the promoters taught by the aforementioned Yu, Soderblom, Gill, Husain, Passini, Xu, Drews or Raymond may be used in the present disclosures.

[0169] In certain embodiments, the promoter is not cell specific.

[0170] In certain embodiments, the promoter is a RNA pol 111 promoter. As a non-limiting example, the RNA pol III promoter is U6. As a non-limiting example, the RNA pol III promoter is H1.

[0171] In certain embodiments, the viral genome comprises an enhancer element.

[0172] In certain embodiments, the viral genome comprises an engineered promoter.

[0173] In another embodiment, the viral genome comprises a promoter from a naturally expressed protein.

### Viral Genome Component: Untranslated Regions (UTRs)

[0174] By definition, wild type untranslated regions (UTRs) of a gene are transcribed but not translated. Generally, the 5′ UTR starts at the transcription start site and ends at the start codon and the 3′ UTR starts immediately following the stop codon and continues until the termination signal for transcription.

[0175] Features typically found in abundantly expressed genes of specific target organs (e.g., CNS tissue or DRG) may be engineered into UTRs to enhance stability and protein production. As a non-limiting example, a 5′ UTR from mRNA normally expressed in the brain (e.g., huntingtin) may be used in the viral genomes of the AAV particles of the disclosure to enhance expression in neuronal cells or other cells of the central nervous system.

[0176] While not wishing to be bound by theory, wild-type 5′ untranslated regions (UTRs) include features which play roles in translation initiation. Kozak sequences, which are commonly known to be involved in the process by which the ribosome initiates translation of many genes, are usually included in 5′ UTRs. Kozak sequences have the consensus CCR(A/G)CCAUGG, where R is a purine (adenine or guanine) three bases upstream of the start codon (ATG), which is followed by another ‘G’.

[0177] In certain embodiments, the 5′UTR in the viral genome includes a Kozak sequence.

[0178] In certain embodiments, the 5′UTR in the viral genome does not include a Kozak sequence.

[0179] While not wishing to be bound by theory, wild-type 3′ UTRs are known to have stretches of Adenosines and Uridines embedded therein. These AU rich signatures are particularly prevalent in genes with high rates of turnover. Based on their sequence features and functional properties, the AU rich elements (AREs) can be separated into three classes (Chen et al, 1995, the contents of which are herein incorporated by reference in its entirety): Class I AREs, such as, but not limited to, c-Myc and MyoD, contain several dispersed copies of an AUUUA motif within U-rich regions. Class 11 AREs, such as, but not limited to, GM-CSF and TNF-a, possess two or more overlapping UUAUUUA(U/A)(U/A) nonamers. Class III ARES, such as, but not limited to, c-Jun and Myogenin, are less well defined. These U rich regions do not contain an AUUUA motif. Most proteins binding to the AREs are known to destabilize the messenger, whereas members of the ELAV family, most notably HuR, have been documented to increase the stability of mRNA. HuR binds to AREs of all the three classes. Engineering the HuR specific binding sites into the 3′ UTR of nucleic acid molecules will lead to HuR binding and thus, stabilization of the message in vivo.

[0180] Introduction, removal or modification of 3′ UTR AU rich elements (AREs) can be used to modulate the stability of a polynucleotide. When engineering specific polynucleotides, e.g., payload regions of viral genomes, one or more copies of an ARE can be introduced to make polynucleotides less stable and thereby curtail translation and decrease production of the resultant protein. Likewise. AREs can be identified and removed or mutated to increase the intracellular stability and thus increase translation and production of the resultant protein.

[0181] In certain embodiments, the 3′ UTR of the viral genome may include an oligo(dT) sequence for templated addition of a poly-A tail.

[0182] In certain embodiments, the viral genome may include at least one miRNA seed, binding site or full sequence. microRNAs (or miRNA or miR) are 19-25 nucleotide noncoding RNAs that bind to the sites of nucleic acid targets and down-regulate gene expression either by reducing nucleic acid molecule stability or by inhibiting translation. A microRNA sequence comprises a “seed” region, i.e., a sequence in the region of positions 2-8 of the mature microRNA, which has perfect Watson-Crick sequence complementarity to the miRNA target sequence of the nucleic acid.

[0183] In certain embodiments, the viral genome may be engineered to include, alter or remove at least one miRNA binding site, full sequence or seed region.

[0184] Any UTR from any gene known in the art may be incorporated into the viral genome of the AAV particle. These UTRs, or portions thereof, may be placed in the same orientation as in the gene from which they were selected or they may be altered in orientation or location. In certain embodiments, the UTR used in the viral genome of the AAV particle may be inverted, shortened, lengthened, made with one or more other 5′ UTRs or 3′ UTRs known in the art. As used herein, the term “altered” as it relates to a UTR, means that the UTR has been changed in some way in relation to a reference sequence. For example, a 3′ or 5′ UTR may be altered relative to a wild type or native UTR by the change in orientation or location as taught above or may be altered by the inclusion of additional nucleotides, deletion of nucleotides, swapping or transposition of nucleotides.

[0185] In certain embodiments, the viral genome of the AAV particle comprises at least one artificial UTR which is not a variant of a wild type UTR.

[0186] In certain embodiments, the viral genome of the AAV particle comprises UTRs which have been selected from a family of transcripts whose proteins share a common function, structure, feature or property.

### Viral Genome Component: Polyadenylation Sequence

[0187] The viral genome of the AAV particles of the present disclosure may comprise at least one polyadenylation sequence. In certain embodiments, the viral genome of the AAV particle comprises a polyadenylation sequence between the 3′ end of the payload encoding region and the 5′ end of the 3′ITR.

[0188] In certain embodiments, the polyadenylation sequence or “polyA sequence” may range from absent to about 500 nucleotides in length. The polyadenylation sequence may be, but is not limited to, 1, 2, 3, 4, 5, 6, 7, 8, 9, 10, 11, 12, 13, 14, 15, 16, 17, 18, 19, 20, 21, 22, 23, 24, 25, 26, 27, 28, 29, 30, 31, 32, 33, 34, 35, 36, 37, 38, 39, 40, 41, 42, 43, 44, 45, 46, 47, 48, 49, 50, 51, 52, 53, 54, 55, 56, 57, 58, 59, 60, 61, 62, 63, 64, 65, 66, 67, 68, 69, 70, 71, 72, 73, 74, 75, 76, 77, 78, 79, 80, 81, 82, 83, 84, 85, 86, 87, 88, 89, 90, 91, 92, 93, 94, 95, 96, 97, 98, 99, 100, 101, 102, 103, 104, 105, 106, 107, 108, 109, 110, 111, 112, 113, 114, 115, 116, 117, 118, 119, 120, 121, 122, 123, 124, 125, 126, 127, 128, 129, 130, 131, 132, 133, 134, 135, 136, 137, 138, 139, 140, 141, 142, 143, 144, 145, 146, 147, 148, 149, 150, 151, 152, 153, 154, 155, 156, 157, 158, 159, 160, 161, 162, 163, 164, 165, 166, 167, 168, 169, 170, 171, 172, 173, 174, 175, 176, 177, 178, 179, 180, 181, 182, 183, 184, 185, 186, 187, 188, 189, 190, 191, 192, 193, 194, 195, 196, 197, 198, 199, 200, 201, 202, 203, 204, 205, 206, 207, 208, 209, 210, 211, 212, 213, 214, 215, 216, 217, 218, 219, 220, 221, 222, 223, 224, 225, 226, 227, 228, 229, 230, 231, 232, 233, 234, 235, 236, 237, 238, 239, 240, 241, 242, 243, 244, 245, 246, 247, 248, 249, 250, 251, 252, 253, 254, 255, 256, 257, 258, 259, 260, 261, 262, 263, 264, 265, 266, 267, 268, 269, 270, 271, 272, 273, 274, 275, 276, 277, 278, 279, 280, 281, 282, 283, 284, 285, 286, 287, 288, 289, 290, 291, 292, 293, 294, 295, 296, 297, 298, 299, 300, 301, 302, 303, 304, 305, 306, 307, 308, 309, 310, 311, 312, 313, 314, 315, 316, 317, 318, 319, 320, 321, 322, 323, 324, 325, 326, 327, 328, 329, 330, 331, 332, 333, 334, 335, 336, 337, 338, 339, 340, 341, 342, 343, 344, 345, 346, 347, 348, 349, 350, 351, 352, 353, 354, 355, 356, 357, 358, 359, 360, 361, 362, 363, 364, 365, 366, 367, 368, 369, 370, 371, 372, 373, 374, 375, 376, 377, 378, 379, 380, 381, 382, 383, 384, 385, 386, 387, 388, 389, 390, 391, 392, 393, 394, 395, 396, 397, 398, 399, 400, 401, 402, 403, 404, 405, 406, 407, 408, 409, 410, 411, 412, 413, 414, 415, 416, 417, 418, 419, 420, 421, 422, 423, 424, 425, 426, 427, 428, 429, 430, 431, 432, 433, 434, 435, 436, 437, 438, 439, 440, 441,442, 443, 444, 445, 446, 447, 448, 449, 450,451, 452, 453, 454, 455, 456, 457,458, 459, 460, 461, 462, 463, 464, 465, 466, 467, 468, 469, 470, 471, 472, 473, 474, 475, 476, 477, 478, 479, 480, 481, 482, 483, 484, 485, 486, 487, 488, 489, 490, 491, 492, 493, 494, 495, 496, 497, 498, 499, and 500 nucleotides in length.

[0189] In certain embodiments, the polyadenylation sequence is 50-100 nucleotides in length.

[0190] In certain embodiments, the polyadenylation sequence is 50-150 nucleotides in length.

[0191] In certain embodiments, the polyadenylation sequence is 50-160 nucleotides in length.

[0192] In certain embodiments, the polyadenylation sequence is 50-200 nucleotides in length.

[0193] In certain embodiments, the polyadenylation sequence is 60-100 nucleotides in length.

[0194] In certain embodiments, the polyadenylation sequence is 60-150 nucleotides in length.

[0195] In certain embodiments, the polyadenylation sequence is 60-160 nucleotides in length.

[0196] In certain embodiments, the polyadenylation sequence is 60-200 nucleotides in length.

[0197] In certain embodiments, the polyadenylation sequence is 70-100 nucleotides in length.

[0198] In certain embodiments, the polyadenylation sequence is 70-150 nucleotides in length.

[0199] In certain embodiments, the polyadenylation sequence is 70-160 nucleotides in length.

[0200] In certain embodiments, the polyadenylation sequence is 70-200 nucleotides in length.

[0201] In certain embodiments, the polyadenylation sequence is 80-100 nucleotides in length.

[0202] In certain embodiments, the polyadenylation sequence is 80-150 nucleotides in length.

[0203] In certain embodiments, the polyadenylation sequence is 80-160 nucleotides in length.

[0204] In certain embodiments, the polyadenylation sequence is 80-200 nucleotides in length.

[0205] In certain embodiments, the polyadenylation sequence is 90-100 nucleotides in length.

[0206] In certain embodiments, the polyadenylation sequence is 90-150 nucleotides in length.

[0207] In certain embodiments, the polyadenylation sequence is 90-160 nucleotides in length.

[0208] In certain embodiments, the polyadenylation sequence is 90-200 nucleotides in length.

### Viral Genome Component: Introns

[0209] In certain embodiments, the viral genome of the AAV particles of the present disclosure comprises at least one element to enhance the payload target specificity and expression (See e.g., Powell et al. Viral Expression Cassette Elements to Enhance Transgene Target Specificity and Expression in Gene Therapy, Discov. Med, 2015, 19(102): 49-57; the contents of which are herein incorporated by reference in their entirety) such as an intron. Non-limiting examples of introns include, MVM (67-97 bps), FIX truncated intron 1 (300 bps), f-globin SD/immunoglobulin heavy chain splice acceptor (250 bps), adenovirus splice donor/immunoglobin splice acceptor (500 bps), SV40 late splice donor/splice acceptor (19S/16S) (180 bps) and hybrid adenovirus splice donor/IgG splice acceptor (230 bps).

[0210] In certain embodiments, the intron or intron portion may be 100-500 nucleotides in length. The intron may have a length of 80, 90, 100, 110, 120, 130, 140, 150, 160, 170, 171, 172, 173, 174, 175, 176, 177, 178, 179, 180, 190, 200, 210, 220, 230, 240, 250, 260, 270, 280, 290, 300, 310, 320, 330, 340, 350, 360, 370, 380, 390, 400, 410, 420, 430, 440, 450, 460, 470, 480, 490 or 500 nucleotides. The intron may have a length between 80-100, 80-120, 80-140, 80-160, 80-180, 80-200, 80-250, 80-300, 80-350, 80-400, 80-450, 80-500, 200-300, 200-400, 200-500, 300-400, 300-500, or 400-500 nucleotides.

### Viral Genome Component: Stuffer Sequences

[0211] In certain embodiments, the viral genome of the AAV particles of the present disclosure comprises at least one element to improve packaging efficiency and expression, such as a stuffer or filler sequence. Non-limiting examples of stuffer sequences include albumin and/or alpha-1 antitrypsin. Any known viral, mammalian, or plant sequence may be manipulated for use as a stuffer sequence.

[0212] In certain embodiments, the stuffer or filler sequence may be from about 100-3500 nucleotides in length. The stuffer sequence may have a length of about 100, 200, 300, 400, 500, 600, 700, 800, 900, 1000, 1100, 1200, 1300, 1400, 1500, 1600, 1700, 1800, 1900, 2000, 2100, 2200, 2300, 2400, 2500, 2600, 2700, 2800, 2900 or 3000 nucleotides.

Viral Genome Component: miRNA

[0213] In certain embodiments, the viral genome comprises at least one sequence encoding a miRNA to reduce the expression of the payload in an “off-target” tissue. As used herein, “off-target” indicates a tissue or cell-type unintentionally targeted by the AAV particles of the disclosure. As an example, an “off-target” tissue or cell when targeting the DRG, may be neurons of other ganglia, such as those of the sympathetic or parasympathetic nervous system, miRNAs and their targeted tissues are well known in the art. As a non-limiting example, a miR-122 miRNA may be encoded in the viral genome to reduce the expression of the viral genome in the liver.

### Viral Genome Component: Selectable Marker

[0214] In some embodiments, the viral genome of the AAV particles of the disclosure optionally encodes a selectable marker. The selectable marker may comprise a cell-surface marker, such as any protein expressed on the surface of the cell including, but not limited to receptors, CD markers, lectins, integrins, or truncated versions thereof.

[0215] In some embodiments, selectable marker reporter genes are described in International Publication Nos. WO 1996023810 and WO 1996030540; Heim et al., Current Biology 2:178-182 (1996); Heim et al., Proc. Natl. Acad. Sci. USA (1995); or Heim et al., Science 373:663-664 (1995), the contents of each of which are incorporated herein by reference in their entirety.

### Genome Size

[0216] In certain embodiments, the AAV particles of the disclosure may comprise a single-stranded or double-stranded viral genome. The size of the viral genome may be small, medium, large or the maximum size. As described above, the viral genome may comprise a promoter and a polyA tail.

[0217] In certain embodiments, the viral genome may be a small single stranded viral genome. A small single stranded viral genome may be 2.1 to 3.5 kb in size such as, but not limited to, about 2.1, 2.2, 2.3, 2.4, 2.5, 2.6, 2.7, 2.8, 2.9, 3.0, 3.1, 3.2, 3.3, 3.4, and 3.5 kb in size.

[0218] In certain embodiments, the viral genome may be a small double stranded viral genome. A small double stranded viral genome may be 1.3 to 1.7 kb in size such as, but not limited to, about 1.3, 1.4, 1.5, 1.6, and 1.7 kb in size.

[0219] In certain embodiments, the viral genome may be a medium single stranded viral genome. A medium single stranded viral genome may be 3.6 to 4.3 kb in size such as, but not limited to, about 3.6, 3.7, 3.8, 3.9, 4.0, 4.1, 4.2 and 4.3 kb in size.

[0220] In certain embodiments, the viral genome may be a medium double stranded viral genome. A medium double stranded viral genome may be 1.8 to 2.1 kb in size such as, but not limited to, about 1.8, 1.9, 2.0, and 2.1 kb in size.

[0221] In certain embodiments, the viral genome may be a large single stranded viral genome. A large single stranded viral genome may be 4.4 to 6.0 kb in size such as, but not limited to, about 4.4, 4.5, 4.6, 4.7, 4.8, 4.9, 5.0, 5.1, 5.2, 5.3, 5.4, 5.5, 5.6, 5.7, 5.8, 5.9 and 6.0 kb in size.

[0222] In certain embodiments, the viral genome may be a large double stranded viral genome. A large double stranded viral genome may be 2.2 to 3.0 kb in size such as, but not limited to, about 2.2, 2.3, 2.4, 2.5, 2.6, 2.7, 2.8, 2.9 and 3.0 kb in size.

### Payloads

[0223] The AAV particles of the present disclosure comprise a viral genome with at least one payload region. As used herein, a “payload region” is any nucleic acid sequence (e.g., within the viral genome) which encodes one or more “payloads” of the disclosure. As non-limiting examples, a payload region may be a nucleic acid sequence within the viral genome of an AAV particle, which encodes a payload, wherein the payload is an RNAi agent or a polypeptide. Payloads of the present disclosure may be, but are not limited to, peptides, polypeptides, proteins, antibodies, RNAi agents, etc.

[0224] The payload region may comprise a combination of coding and non-coding nucleic acid sequences.

[0225] In some embodiments, the payload region may encode a coding or non-coding RNA.

[0226] In certain embodiments, the AAV particle comprises a viral genome with a payload region encoding more than one payload of interest. In such an embodiment, a viral genome encoding more than one payload may be replicated and packaged into a viral particle. A target cell transduced with a viral particle comprising more than one payload may express each of the payloads in a single cell.

### Polypeptides

[0227] Where the payload region encodes a polypeptide, the polypeptide may be a peptide or protein. As a non-limiting example, the payload region may encode at least one allele of apolipoprotein E (APOE) such as, but not limited to ApoE2. ApoE3 and/or ApoE4. In certain embodiments, the payload region encodes ApoE2 (cys112, cys158). In certain embodiments, the payload region encodes ApoE3 (cys112, arg158). In certain embodiments, the payload region of the encodes ApoE4 (arg112, arg158). As a second non-limiting example, the payload region may encode a human or a primate frataxin protein, or fragment or variant thereof. As another non-limiting example, the payload region may encode an antibody, or a fragment thereof. As another non-limiting example, the payload region may encode human aromatic L-amino acid decarboxylase (AADC), or a fragment or variant thereof. As another non-limiting example, the payload region may encode human survival of motor neuron (SMN) 1 or SMN2, or fragments or variants thereof. As another non-limiting example, the payload region may encode frataxin (FXN). As another non-limiting example, the payload region may encode APOE (APOE2, APOE3, APOE4), or fragments or variants thereof. As another non-limiting example, the payload region may encode glucocerebrosidase (GBA1), or a fragment or variant thereof. As another non-limiting example, the payload region may encode granulin precursor or progranulin (GRN), or a fragment or variant thereof. As another non-limiting example, the payload region may encode aspartoacylase (ASPA), or a fragment or variant thereof. As another non-limiting example, the payload region may encode tripeptidyl peptidase I (CLN2), or a fragment or variant thereof. As another non-limiting example, the payload region may encode beta-galactosidase (GLB1), or a fragment or variant thereof. As another non-limiting example, the payload region may encode N-sulphoglucosamine sulphohydrolase (SGSH), or a fragment or variant thereof. As another non-limiting example, the payload region may encode N-acetyl-alpha-glucosaminidase (NAGLU), or a fragment or variant thereof. As another non-limiting example, the payload region may encode iduronate 2-sulfatase (IDS), or a fragment or variant thereof. As another non-limiting example, the payload region may encode Intracellular cholesterol transporter (NPC1), or a fragment or variant thereof. As another non-limiting example, the payload region may encode gigaxonin (GAN), or a fragment or variant thereof. The AAV viral genomes encoding polypeptides described herein may be useful in the fields of human disease, viruses, infections veterinary applications and a variety of in vivo and in vitro settings.

[0228] Amino acid sequences encoded by payload regions of the viral genomes of the disclosure may be translated as a whole polypeptide, a plurality of polypeptides or fragments of polypeptides, which independently may be encoded by one or more nucleic acids, fragments of nucleic acids or variants of any of the aforementioned. As used herein, “polypeptide” means a polymer of amino acid residues (natural or unnatural) linked together most often by peptide bonds. The term, as used herein, refers to proteins, polypeptides, and peptides of any size, structure, or function. In some instances, the polypeptide encoded is smaller than about 50 amino acids and the polypeptide is then termed a peptide. If the polypeptide is a peptide, it will be at least about 2, 3, 4, or at least 5 amino acid residues long. Thus, polypeptides include gene products, naturally occurring polypeptides, synthetic polypeptides, homologs, orthologs, paralogs, fragments and other equivalents, variants, and analogs of the foregoing. A polypeptide may be a single molecule or may be a multi-molecular complex such as a dimer, trimer or tetramer. They may also comprise single chain or multichain polypeptides and may be associated or linked. The term polypeptide may also apply to amino acid polymers in which one or more amino acid residues are an artificial chemical analogue of a corresponding naturally occurring amino acid.

[0229] The term “polypeptide variant” refers to molecules which differ in their amino acid sequence from a native or reference sequence. The amino acid sequence variants may possess substitutions, deletions, and/or insertions at certain positions within the amino acid sequence, as compared to a native or reference sequence. Ordinarily, variants will possess at least about 50% identity (homology) to a native or reference sequence, and preferably, they will be at least about 80%, more preferably at least about 90% identical (homologous) to a native or reference sequence.

### Antibodies

[0230] Where the payload region encodes an antibody, the “antibody” may be an antibody, a fragment, or any derivative thereof, which may contribute to the formation of a “functional antibody”, exhibiting the desired biological activity. As non-limiting examples, an antibody may be a native antibody (e.g., with two heavy and two light chains), a heavy chain variable region, a light chain variable region, a heavy chain constant region, a light chain constant region, Fab, Fab′, F(ab′)₂, Fv, or scFv fragments, a diabody, a linear antibody, a single-chain antibody, a multi-specific antibody, an intrabody, one or more heavy chain complementarity determining regions (CDR), one or more light chain CDRs, a bi-specific antibody, a monoclonal antibody, a polyclonal antibody, a humanized antibody, an antibody mimetic, an antibody variant, a miniaturized antibody, a unibody, a maxibody, and/or a chimeric antigen receptor.

[0231] As used herein, “antibody-based” or “antibody-derived” compositions are monomeric or multi-meric polypeptides which comprise at least one amino-acid region derived from a known or parental antibody sequence and at least one amino acid region derived from a non-antibody sequence, e.g., mammalian protein.

[0232] Payload regions may encode polypeptides that form or function as any antibody, including antibodies that are known in the art and/or antibodies that are commercially available. The encoded antibodies may be therapeutic, diagnostic, or for research purposes. The encoded antibodies may be useful in the treatment of neurological disease or any disorders associated with the central and/or peripheral nervous systems.

[0233] In certain embodiments, the viral genome of the AAV particle may comprise nucleic acids which have been engineered to enable or enhance the expression of antibodies, antibody fragments, or components thereof.

[0234] Antibodies encoded in payload regions of the AAV particles of the present disclosure may be, but are not limited to, antibodies targeting β-amyloid, APOE, tau, SOD1. TDP43, huntingtin, and/or synuclein.

### RNAi Agents

[0235] RNAi (also known as post-transcriptional gene silencing (PTGS), quelling, or co-suppression) is a post-transcriptional gene silencing process in which RNA molecules, in a sequence specific manner, inhibit gene expression, typically by causing the destruction of specific mRNA molecules. RNAi mediated gene silencing can specifically inhibit targeted gene expression. Where the payload region of the viral genome of the AAV particles of the present disclosure encodes an RNAi agent, the RNAi agent may be, but is not limited to, dsRNA, siRNA, shRNA, pre-miRNA, pri-miRNA, miRNA, stRNA, lncRNA, piRNA, or snoRNA. Non-limiting examples of a target gene of an RNAi agent include, SOD1, MAPT. APOE, HTT, C9ORF72, TDP-43, APP, BACE, SNCA, ATXN1, ATXN2, ATXN3, ATXN7, SCN1A-SCN5A, or SCN8A-SCN11A.

[0236] The AAV particles of the present disclosure may comprise viral genomes encoding RNAi agents, wherein the RNAi agent targets the mRNA of a gene of interest to interfere with gene expression and/or protein production. Such AAV particles may be used as a therapeutic, a diagnostic, or for research purposes.

[0237] In certain embodiments, the RNAi agent may target the gene of interest along any segment of their respective nucleotide sequence.

[0238] In certain embodiments, the RNAi agent may target the gene of interest at the location of a single-nucleotide polymorphism (SNP) or variant within the nucleotide sequence.

[0239] In some embodiments, a nucleic acid sequence encoding an RNAi agent, or a single strand of an RNAi agent, is inserted into the viral genome of the AAV particle and introduced into cells, specifically cells in the central nervous system or cells of the DRG.

[0240] The RNAi agent may be an siRNA duplex, wherein the siRNA duplex contains an antisense strand (guide strand) and a sense strand (passenger strand) hybridized together forming a duplex structure, wherein the antisense strand is complementary to the nucleic acid sequence of the targeted gene, and wherein the sense strand is homologous to the nucleic acid sequence of the targeted gene. In some aspects, the 5′ end of the antisense strand has a 5′ phosphate group and the 3′ end of the sense strand contains a 3′ hydroxyl group. In other aspects, there are none, one or 2 nucleotide overhangs at the 3′ end of each strand.

[0241] Each strand of an siRNA duplex targeting a gene of interest may be about 19 to 25, 19 to 24 or 19 to 21 nucleotides in length, preferably about 19 nucleotides, 20 nucleotides, 21 nucleotides, 22 nucleotides, 23 nucleotides, 24 nucleotides, or 25 nucleotides in length.

[0242] In certain embodiments, an siRNA or dsRNA includes at least two sequences that are complementary to each other. The dsRNA includes a sense strand having a first sequence and an antisense strand having a second sequence. The antisense strand includes a nucleotide sequence that is substantially complementary to at least part of an mRNA encoding the target gene, and the region of complementarity is 30 nucleotides or less, and at least 15 nucleotides in length. Generally, the dsRNA is 19 to 25, 19 to 24 or 19 to 21 nucleotides in length. In some embodiments, the dsRNA is from about 15 to about 25 nucleotides in length, and in other embodiments the dsRNA is from about 25 to about 30 nucleotides in length. In some embodiments, the dsRNA is about 15 nucleotides in length, 16 nucleotides in length, 17 nucleotides in length, 18 nucleotides in length, 19 nucleotides, 20 nucleotides, 21 nucleotides, 22 nucleotides, 23 nucleotides, 24 nucleotides, 25 nucleotides in length, 26 nucleotides in length, 27 nucleotides in length, 28 nucleotides in length, 29 nucleotides in length, or 30 nucleotides in length.

[0243] The dsRNA, whether directly administered or encoded in a viral genome in an AAV particle, upon contacting with a cell expressing the target protein, inhibits the expression of the protein by at least 10%, at least 20%, at least 25%, at least 30%, at least 35% or at least 40% or more, such as when assayed by a method known in the art.

[0244] In certain embodiments, the RNAi agent may be used to reduce the expression of target protein by at least about 30%, 40%, 50%, 60%, 70%, 80%, 85%, 90%, 95% and 100%, or at least 20-30%, 20-40%, 20-50%, 20-60%, 20-70%, 20-80%, 20-90%, 20-95%, 20-100%, 30-40%, 30-50%, 30-60%, 30-70%, 30-80%, 30-90%, 30-95%, 30-100%, 40-50%, 40-60%, 40-70%, 40-80%, 40-90%, 40-95%, 40-100%, 50-60%, 50-70%, 50-80%, 50-90%, 50-95%, 50-100%, 60-70%, 60-80%, 60-90%, 60-95%, 60-100%, 70-80%, 70-90%, 70-95%, 70-100%, 80-90%, 80-95%, 80-100%, 90-95%, 90-100% or 95-100%. As a non-limiting example, the expression of target protein expression may be reduced 50-90%.

[0245] In certain embodiments, the RNAi agent may be used to reduce the expression of target mRNA by at least about 30%, 40%, 50%, 60%, 70%, 80%, 85%, 90%, 95% and 100%, or at least 20-30%, 20-40%, 20-50%, 20-60%, 20-70%, 20-80%, 20-90%, 20-95%, 20-100%, 30-40%, 30-50%, 30-60%, 30-70%, 30-80%, 30-90%, 30-95%, 30-100%, 40-50%, 40-60%, 40-70%, 40-80%, 40-90%, 40-95%, 40-100%, 50-60%, 50-70%, 50-80%, 50-90%, 50-95%, 50-100%, 60-70%, 60-80%, 60-90%, 60-95%, 60-100%, 70-80%, 70-90%, 70-95%, 70-100%, 80-90%, 80-95%, 80-100%, 90-95%, 90-100% or 95-100%. As a non-limiting example, the expression of target mRNA expression may be reduced 50-90%.

[0246] In certain embodiments, RNAi agent may be used to reduce the expression of target protein and/or mRNA in at least one region of the CNS. The expression of target protein and/or mRNA is reduced by at least about 30%, 40%, 50%, 60%, 70%, 80%, 85%, 90%, 95% and 100%, or at least 20-30%, 20-40%, 20-50%, 20-60%, 20-70%, 20-80%, 20-90%, 20-95%, 20-100%, 30-40%, 30-50%, 30-60%, 30-70%, 30-80%, 30-90%, 30-95%, 30-100%, 40-50%, 40-60%, 40-70%, 40-80%, 40-90%, 40-95%, 40-100%, 50-60%, 50-70%, 50-80%, 50-90%, 50-95%, 50-100%, 60-70%, 60-80%, 60-90%, 60-95%, 60-100%, 70-80%, 70-90%, 70-95%, 70-100%, 80-90%, 80-95%, 80-100%, 90-95%, 90-100% or 95-100% in at least one region of the CNS. As a non-limiting example, the expression of target protein and mRNA in neurons (e.g., cortical neurons) is reduced by 50-90%. As a non-limiting example, the expression of target protein and mRNA in neurons (e.g., cortical neurons) is reduced by 40-50%.

[0247] In some embodiments, the AAV particle of the present disclosure comprising a viral genome encoding at least one RNAi agent targeting a gene of interest is administered to a subject in need for treating and/or ameliorating a disease, e.g., a neurological disorder of any disease associated with the central or peripheral nervous systems.

[0248] In certain embodiments, the RNAi agent is an siRNA.

Design of siRNA

[0249] AAV particles of the present disclosure may comprise a viral genome encoding one or more siRNA molecules (e.g., siRNA duplexes or encoded dsRNA) that are specifically designed to target a gene of interest and suppress target gene expression and protein production. In some aspects, the siRNA molecules are designed and used to selectively “knock out” target gene variants in cells, i.e., transcripts that are identified in neurological disease. In some aspects, the siRNA molecules are designed and used to selectively “knock down” target gene variants in cells.

[0250] In some embodiments, siRNA molecules targeting a gene of interest may be designed using any available design tools.

[0251] Some guidelines for designing siRNAs (for insertion into a viral genome of the AAV particles of the disclosure) have been proposed in the art. These guidelines generally recommend generating a 19-nucleotide duplexed region, symmetric 2-3 nucleotide 3′ overhangs, 5-phosphate and 3-hydroxyl groups targeting a region in the gene to be silenced. Other rules that may govern siRNA sequence preference include, but are not limited to, (i) A/U at the 5′ end of the antisense strand; (ii) G/C at the 5′ end of the sense strand; (iii) at least five A/U residues in the 5′ terminal one-third of the antisense strand; and (iv) the absence of any GC stretch of more than 9 nucleotides in length. In accordance with such considerations, together with the specific sequence of a target gene, highly effective siRNA molecules essential for suppressing mammalian target gene expression may be readily designed.

[0252] In certain embodiments, the sense and/or antisense strand is designed based on the method and rules outlined in European Patent Publication No. EP1752536, the contents of which are herein incorporated by reference in their entirety. As a non-limiting example, the 3′-terminal base of the sequence is adenine, thymine or uracil. As a non-limiting example, the 5′-terminal base of the sequence is guanine or cytosine. As a non-limiting example, the 3′-terminal sequence comprises seven bases rich in one or more bases of adenine, thymine and uracil.

[0253] In certain embodiments, an siRNA molecule comprises a sense strand and a complementary antisense strand in which both strands are hybridized together to form a duplex structure. The antisense strand has sufficient complementarity to the target mRNA sequence to direct target-specific RNAi, i.e., the siRNA molecule has a sequence sufficient to trigger the destruction of the target mRNA by the RNAi machinery or process.

[0254] In some embodiments, the antisense strand and target mRNA sequences have 100% complementarity. The antisense strand may be complementary to any part of the target mRNA sequence. Neither the identity of the sense sequence nor the homology of the antisense sequence need be 100% complementary to the target.

[0255] In other embodiments, the antisense strand and target mRNA sequences comprise at least one mismatch. As a non-limiting example, the antisense strand and the target mRNA sequence have at least 30%, 40%, 50%, 60%, 70%, 80%, 81%, 82%, 83%, 84%, 85%, 86%, 87%, 88%, 89%, 90%, 91%, 92%, 93%, 94%, 95%, 96%, 97%, 98% or 99% or at least 20-30%, 20-40%, 20-50%, 20-60%, 20-70%, 20-80%, 20-90%, 20-95%, 20-99%, 30-40%, 30-50%, 30-60%, 30-70%, 30-80%, 30-90%, 30-95%, 30-99%, 40-50%, 40-60%, 40-70%, 40-80%, 40-90%, 40-95%, 40-99%, 50-60%, 50-70%, 50-80%, 50-90%, 50-95%, 50-99%, 60-70%, 60-80%, 60-90%, 60-95%, 60-99%, 70-80%, 70-90%, 70-95%, 70-99%, 80-90%, 80-95%, 80-99%, 90-95%, 90-99% or 95-99% complementary.

[0256] The siRNA molecule may have a length from about 10-50 or more nucleotides, i.e., each strand comprising 10-50 nucleotides (or nucleotide analogs). Preferably, the siRNA molecule has a length from about 15-30, e.g., 15, 16, 17, 18, 19, 20, 21, 22, 23, 24, 25, 26, 27, 28, 29, or 30 nucleotides in each strand, wherein one of the strands is sufficiently complementary to a target region. In certain embodiments, the siRNA molecule has a length from about 19 to 25, 19 to 24 or 19 to 21 nucleotides.

[0257] In some embodiments, the siRNA molecule can be a synthetic RNA duplex comprising about 19 nucleotides to about 25 nucleotides, and two overhanging nucleotides at the 3′-end.

[0258] The siRNA molecule may comprise an antisense sequence and a sense sequence, or a fragment or variant thereof. As a non-limiting example, the antisense sequence and the sense sequence have at least 30%, 40%, 50%, 60%, 70%, 80%, 81%, 82%, 83%, 84%, 85%, 86%, 87%, 88%, 89%, 90%, 91%, 92%, 93%, 94%, 95%, 96%, 97%, 98% or 99% or at least 20-30%, 20-40%, 20-50%, 20-60%, 20-70%, 20-80%, 20-90%, 20-95%, 20-99%, 30-40%, 30-50%, 30-60%, 30-70%, 30-80%, 30-90%, 30-95%, 30-99%, 40-50%, 40-60%, 40-70%, 40-80%, 40-90%, 40-95%, 40-99%, 50-60%, 50-70%, 50-80%, 50-90%, 50-95%, 50-99%, 60-70%, 60-80%, 60-90%, 60-95%, 60-99%, 70-80%, 70-90%, 70-95%, 70-99%, 80-90%, 80-95%, 80-99%, 90-95%, 90-99% or 95-99% complementary.

[0259] The sense and antisense sequences may be completely complementary across a substantial portion of their length. In other embodiments, the sense sequence and antisense sequence may be at least 70, 80, 90, 95 or 99% complementary across independently at least 50, 60, 70, 80, 85, 90, 95, or 99% of the length of the strands.

[0260] In some embodiments, the sense and antisense strands of a siRNA duplex are linked by a short spacer sequence leading to the expression of a stem-loop structure termed short hairpin RNA (shRNA). The hairpin is recognized and cleaved by Dicer, thus generating mature siRNA molecules.

[0261] In some embodiments, the siRNA molecules, as well as associated spacer and/or flanking regions once designed, can be encoded by the viral genome of the AAV particles of the present disclosure, for delivery to a cell.

### Molecular Scaffold

[0262] In certain embodiments, the siRNA molecules may be encoded in a modulatory polynucleotide which also comprises a molecular scaffold. As used herein a “molecular scaffold” is a framework or starting molecule that forms the sequence or structural basis against which to design or make a subsequent molecule.

[0263] In certain embodiments, the modulatory polynucleotide which comprises the payload (e.g., siRNA, miRNA or other RNAi agent described herein) includes a molecular scaffold which comprises at least one 5′ flanking sequence which may be of any length and may be derived in whole or in part from wild type microRNA sequence or be completely artificial. A 3′ flanking sequence may mirror the 5′ flanking sequence in size and origin. Either flanking sequence may be absent. In certain embodiments, both the 5′ and 3′ flanking sequences are absent. The 3′ flanking sequence may optionally contain one or more CNNC motifs, where “N” represents any nucleotide.

[0264] In some embodiments the 5′ and 3′ flanking sequences are the same length.

[0265] In some embodiments the 5′ flanking sequence is from 1-10 nucleotides in length, from 5-15 nucleotides in length, from 10-30 nucleotides in length, from 20-50 nucleotides in length, greater than 40 nucleotides in length, greater than 50 nucleotides in length, greater than 100 nucleotides in length or greater than 200 nucleotides in length.

[0266] In some embodiments, the 5′ flanking sequence may be 1, 2, 3, 4, 5, 6, 7, 8, 9, 10, 11, 12, 13, 14, 15, 16, 17, 18, 19, 20, 21, 22, 23, 24, 25, 26, 27, 28, 29, 30, 31, 32, 33, 34, 35, 36, 37, 38, 39, 40, 41, 42, 43, 44, 45, 46, 47, 48, 49, 50, 51, 52, 53, 54, 55, 56, 57, 58, 59, 60, 61, 62, 63, 64, 65, 66, 67, 68, 69, 70, 71, 72, 73, 74, 75, 76, 77, 78, 79, 80, 81, 82, 83, 84, 85, 86, 87, 88, 89, 90, 91, 92, 93, 94, 95, 96, 97, 98, 99, 100, 101, 102, 103, 104, 105, 106, 107, 108, 109, 110, 111, 112, 113, 114, 115, 116, 117, 118, 119, 120, 121, 122, 123, 124, 125, 126, 127, 128, 129, 130, 131, 132, 133, 134, 135, 136, 137, 138, 139, 140, 141, 142, 143, 144, 145, 146, 147, 148, 149, 150, 151, 152, 153, 154, 155, 156, 157, 158, 159, 160, 161, 162, 163, 164, 165, 166, 167, 168, 169, 170, 171, 172, 173, 174, 175, 176, 177, 178, 179, 180, 181, 182, 183, 184, 185, 186, 187, 188, 189, 190, 191, 192, 193, 194, 195, 196, 197, 198, 199, 200, 201, 202, 203, 204, 205, 206, 207, 208, 209, 210, 211, 212, 213, 214, 215, 216, 217, 218, 219, 220, 221, 222, 223, 224, 225, 226, 227, 228, 229, 230, 231, 232, 233, 234, 235, 236, 237, 238, 239, 240, 241, 242, 243, 244, 245, 246, 247, 248, 249, 250, 251, 252, 253, 254, 255, 256, 257, 258, 259, 260, 261, 262, 263, 264, 265, 266, 267, 268, 269, 270, 271, 272, 273, 274, 275, 276, 277, 278, 279, 280, 281, 282, 283, 284, 285, 286, 287, 288, 289, 290, 291, 292, 293, 294, 295, 296, 297, 298, 299, 300, 301, 302, 303, 304, 305, 306, 307, 308, 309, 310, 311, 312, 313, 314, 315, 316, 317, 318, 319, 320, 321, 322, 323, 324, 325, 326, 327, 328, 329, 330, 331, 332, 333, 334, 335, 336, 337, 338, 339, 340, 341, 342, 343, 344, 345, 346, 347, 348, 349, 350, 351, 352, 353, 354, 355, 356, 357, 358, 359, 360, 361, 362, 363, 364, 365, 366, 367, 368, 369, 370, 371, 372, 373, 374, 375, 376, 377, 378, 379, 380, 381, 382, 383, 384, 385, 386, 387, 388, 389, 390, 391, 392, 393, 394, 395, 396, 397, 398, 399, 400, 401, 402, 403, 404, 405, 406, 407, 408, 409, 410, 411, 412, 413, 414, 415, 416, 417, 418, 419, 420, 421, 422, 423, 424, 425, 426, 427, 428, 429, 430, 431, 432, 433, 434, 435, 436, 437, 438, 439, 440, 441, 442, 443, 444, 445, 446, 447, 448, 449, 450, 451, 452, 453, 454, 455, 456, 457, 458, 459, 460, 461, 462, 463, 464, 465, 466, 467, 468, 469, 470, 471, 472, 473, 474, 475, 476, 477, 478, 479, 480, 481, 482, 483, 484, 485, 486, 487, 488, 489, 490, 491, 492, 493, 494, 495, 496, 497, 498, 499, or 500 nucleotides in length.

[0267] In certain embodiments, the molecular scaffold comprises at least one 3′ flanking region. As a non-limiting example, the 3′ flanking region may comprise a 3′ flanking sequence which may be of any length and may be derived in whole or in part from wild type microRNA sequence or be a completely artificial sequence.

[0268] In some embodiments the 3′ flanking sequence is from 1-10 nucleotides in length, from 5-15 nucleotides in length, from 10-30 nucleotides in length, from 20-50 nucleotides in length, greater than 40 nucleotides in length, greater than 50 nucleotides in length, greater than 100 nucleotides in length or greater than 200 nucleotides in length.

[0269] In some embodiments, the 3′ flanking sequence may be 1, 2, 3, 4, 5, 6, 7, 8, 9, 10, 11, 12, 13, 14, 15, 16, 17, 18, 19, 20, 21, 22, 23, 24, 25, 26, 27, 28, 29, 30, 31, 32, 33, 34, 35, 36, 37, 38, 39, 40, 41, 42, 43, 44, 45, 46, 47, 48, 49, 50, 51, 52, 53, 54, 55, 56, 57, 58, 59, 60, 61, 62, 63, 64, 65, 66, 67, 68, 69, 70, 71, 72, 73, 74, 75, 76, 77, 78, 79, 80, 81, 82, 83, 84, 85, 86, 87, 88, 89, 90, 91, 92, 93, 94, 95, 96, 97, 98, 99, 100, 101, 102, 103, 104, 105, 106, 107, 108, 109, 110, 111, 112, 113, 114, 115, 116, 117, 118, 119, 120, 121, 122, 123, 124, 125, 126, 127, 128, 129, 130, 131, 132, 133, 134, 135, 136, 137, 138, 139, 140, 141, 142, 143, 144, 145, 146, 147, 148, 149, 150, 151, 152, 153, 154, 155, 156, 157, 158, 159, 160, 161, 162, 163, 164, 165, 166, 167, 168, 169, 170, 171, 172, 173, 174, 175, 176, 177, 178, 179, 180, 181, 182, 183, 184, 185, 186, 187, 188, 189, 190, 191, 192, 193, 194, 195, 196, 197, 198, 199, 200, 201, 202, 203, 204, 205, 206, 207, 208, 209, 210, 211, 212, 213, 214, 215, 216, 217, 218, 219, 220, 221, 222, 223, 224, 225, 226, 227, 228, 229, 230, 231, 232, 233, 234, 235, 236, 237, 238, 239, 240, 241, 242, 243, 244, 245, 246, 247, 248, 249, 250, 251, 252, 253, 254, 255, 256, 257, 258, 259, 260, 261, 262, 263, 264, 265, 266, 267, 268, 269, 270, 271, 272, 273, 274, 275, 276, 277, 278, 279, 280, 281, 282, 283, 284, 285, 286, 287, 288, 289, 290, 291, 292, 293, 294, 295, 296, 297, 298, 299, 300, 301, 302, 303, 304, 305, 306, 307, 308, 309, 310, 311, 312, 313, 314, 315, 316, 317, 318, 319, 320, 321, 322, 323, 324, 325, 326, 327, 328, 329, 330, 331, 332, 333, 334, 335, 336, 337, 338, 339, 340, 341, 342, 343, 344, 345, 346, 347, 348, 349, 350, 351, 352, 353, 354, 355, 356, 357, 358, 359, 360, 361, 362, 363, 364, 365, 366, 367, 368, 369, 370, 371, 372, 373, 374, 375, 376, 377, 378, 379, 380, 381, 382, 383, 384, 385, 386, 387, 388, 389, 390, 391, 392, 393, 394, 395, 396, 397, 398, 399, 400, 401, 402, 403, 404, 405, 406, 407, 408, 409, 410, 411, 412, 413, 414, 415, 416, 417, 418, 419, 420, 421, 422, 423, 424, 425, 426, 427, 428, 429, 430, 431, 432, 433, 434, 435, 436, 437, 438, 439, 440, 441, 442, 443, 444, 445, 446, 447, 448, 449, 450, 451, 452, 453, 454, 455, 456, 457, 458, 459, 460, 461, 462, 463, 464, 465, 466, 467, 468, 469, 470, 471, 472, 473, 474, 475, 476, 477, 478, 479, 480, 481, 482, 483, 484, 485, 486, 487, 488, 489, 490, 491, 492, 493, 494, 495, 496, 497, 498, 499, or 500 nucleotides in length.

[0270] In some embodiments the 5′ and 3′ flanking sequences are the same sequence. In some embodiments they differ by 2%, 3%, 4%, 5%, 10%, 20% or more than 30% when aligned to each other.

[0271] Forming the stem of a stem loop structure is a minimum of at least one payload sequence. In some embodiments, the payload sequence comprises at least one nucleic acid sequence which is in part complementary or will hybridize to the target sequence. In some embodiments, the payload is an siRNA molecule or fragment of an siRNA molecule.

[0272] In some embodiments, the 5′ arm of the stem loop comprises a sense sequence.

[0273] In some embodiments, the 3′ arm of the stem loop comprises an antisense sequence. The antisense sequence, in some instances, comprises a “G” nucleotide at the 5′ most end.

[0274] In other embodiments, the sense sequence may reside on the 3′ arm while the antisense sequence resides on the 5′ arm of the stem of the stem loop structure.

[0275] Separating the sense and antisense sequence of the stem loop structure is a loop (also known as a loop motif). The loop may be of any length, between 4-30 nucleotides, between 4-20 nucleotides, between 4-15 nucleotides, between 5-15 nucleotides, between 6-12 nucleotides, 6 nucleotides, 7, nucleotides, 8 nucleotides, 9 nucleotides, 10 nucleotides, 11 nucleotides, and/or 12 nucleotides.

[0276] In some embodiments, the loop comprises at least one UGUG motif. In some embodiments, the UGUG motif is located at the 5′ terminus of the loop.

[0277] Spacer regions may be present in the modulatory polynucleotide to separate one or more modules from one another. There may be one or more such spacer regions present.

[0278] In certain embodiments, a spacer region of between 8-20, i.e., 8, 9, 10, 11, 12, 13, 14, 15, 16, 17, 18, 19, or 20 nucleotides may be present between the sense sequence and a flanking sequence.

[0279] In certain embodiments, the spacer is 13 nucleotides and is located between the 5′ terminus of the sense sequence and a flanking sequence. In certain embodiments, a spacer is of sufficient length to form approximately one helical turn of the sequence.

[0280] In certain embodiments, a spacer region of between 8-20. i.e., 8, 9, 10, 11, 12, 13, 14, 15, 16, 17, 18, 19, or 20 nucleotides may be present between the antisense sequence and a flanking sequence.

[0281] In certain embodiments, the spacer sequence is between 10-13, i.e., 10, 11, 12 or 13 nucleotides and is located between the 3′ terminus of the antisense sequence and a flanking sequence. In certain embodiments, a spacer is of sufficient length to form approximately one helical turn of the sequence.

[0282] In certain embodiments, the modulatory polynucleotide comprises in the 5′ to 3′ direction, a 5′ flanking sequence, a 5′ arm, a loop motif, a 3′ arm and a 3′ flanking sequence. As a non-limiting example, the 5′ arm may comprise a sense sequence and the 3′ arm comprises the antisense sequence. In another non-limiting example, the 5′ arm comprises the antisense sequence and the 3′ arm comprises the sense sequence.

[0283] In certain embodiments, the 5′ arm, payload (e.g., sense and/or antisense sequence), loop motif and/or 3′ arm sequence may be altered (e.g., substituting 1 or more nucleotides, adding nucleotides and/or deleting nucleotides). The alteration may cause a beneficial change in the function of the construct (e.g., increase knock-down of the target sequence, reduce degradation of the construct, reduce off target effect, increase efficiency of the payload, and reduce degradation of the payload).

[0284] In certain embodiments, the molecular scaffold of the modulatory polynucleotides is aligned in order to have the rate of excision of the guide or antisense strand be greater than the rate of excision of the passenger or sense strand. The rate of excision of the guide or passenger strand may be, independently, 1%, 2%, 3%, 4%, 5%, 10%, 15%, 20%, 25%, 30%, 35%, 40%, 45%, 50%, 55%, 60%, 65%, 70%, 75%, 80%, 85%, 90%, 95%, 99% or more than 99%. As a non-limiting example, the rate of excision of the guide strand is at least 80%. As another non-limiting example, the rate of excision of the guide strand is at least 90%.

[0285] In certain embodiments, the rate of excision of the guide strand is greater than the rate of excision of the passenger strand. In one aspect, the rate of excision of the guide strand may be at least 1%, 2%, 3%, 4%, 5%, 10%, 15%, 20%, 25%, 30%, 35%, 40%, 45%, 50%, 55%, 60%, 65%, 70%, 75%, 80%, 85%, 90%, 95%, 99% or more than 99% greater than the passenger strand.

[0286] In certain embodiments, the efficiency of excision of the guide strand is at least 60%, 65%, 70%, 75%, 80%, 85%, 90%, 95%, 99% or more than 99%. As a non-limiting example, the efficiency of the excision of the guide strand is greater than 80%.

[0287] In certain embodiments, the efficiency of the excision of the guide strand is greater than the excision of the passenger strand from the molecular scaffold. The excision of the guide strand may be 2, 3, 4, 5, 6, 7, 8, 9, 10 or more than 10 times more efficient than the excision of the passenger strand from the molecular scaffold.

[0288] In certain embodiments, the molecular scaffold comprises a dual-function targeting modulatory polynucleotide. As used herein, a “dual-function targeting” modulatory polynucleotide is a polynucleotide where both the guide and passenger strands knock down the same target or the guide and passenger strands knock down different targets.

[0289] In certain embodiments, the molecular scaffold may comprise one or more linkers known in the art. The linkers may separate regions or one molecular scaffold from another. As a non-limiting example, the molecular scaffold may be polycistronic.

[0290] In certain embodiments, the modulatory polynucleotide is designed using at least one of the following properties: loop variant, seed mismatch/bulge/wobble variant, stem mismatch, loop variant and basal stem mismatch variant, seed mismatch and basal stem mismatch variant, stem mismatch and basal stem mismatch variant, seed wobble and basal stem wobble variant, or a stem sequence variant.

### AAV Production

[0291] Viral production disclosed herein describes processes and methods for producing AAV particles (with enhanced, improved and/or increased tropism for a target tissue) that may be used to contact a target cell to deliver a payload.

[0292] The present disclosure provides methods for the generation of AAV particles comprising targeting peptides. In certain embodiments, the AAV particles are prepared by viral genome replication in a viral replication cell. Any method known in the art may be used for the preparation of AAV particles. In certain embodiments, AAV particles are produced in mammalian cells (e.g., HEK293). In another embodiment, AAV particles are produced in insect cells (e.g., Sf9)

[0293] Methods of making AAV particles are well known in the art and are described in e.g., U.S. Pat. Nos. 6,204,059, 5,756,283, 6,258,595, 6,261,551, 6,270,996, 6,281,010, 6,365,394, 6,475,769, 6,482,634, 6,485,966, 6,943,019, 6,953,690, 7,022,519, 7,238,526, 7,291,498 and 7,491,508, 5,064,764, 6,194,191, 6,566,118, 8,137,948; or International Publication Nos. WO1996039530, WO1998010088, WO1999014354, WO1999015685, WO1999047691, WO2000055342, WO2000075353 and WO2001023597; Methods In Molecular Biology, ed. Richard, Humana Press, NJ (1995); O'Reilly et al., Baculovirus Expression Vectors, A Laboratory Manual, Oxford Univ. Press (1994); Samulski et al., J. Vir. 63:3822-8 (1989); Kajigaya et al., Proc. Nat'l. Acad. Sci. USA 88: 4646-50 (1991); Ruffing et al., J. Vir. 66:6922-30 (1992); Kimbauer et al., Vir., 219:37-44 (1996); Zhao et al., Vir. 272:382-93 (2000); the contents of each of which are herein incorporated by reference in their entirety. In certain embodiments, the AAV particles are made using the methods described in International Patent Publication WO2015191508, the contents of which are herein incorporated by reference in their entirety.

[0294] The viral replication cell may be selected from any biological organism, including prokaryotic (e.g., bacterial) cells, and eukaryotic cells, including, insect cells, yeast cells and mammalian cells. Viral replication cells commonly used for production of recombinant AAV viral particles include, but are not limited to, HEK293 cells, COS cells, HeLa cells, KB cells, and other mammalian cell lines as described in U.S. Pat. Nos. 6,156,303, 5,387,484, 5,741,683, 5,691,176, and U.S. Pat. No. 5,688,676; U.S. Patent Application Publication No. 2002/0081721, and International Patent Publication Nos. WO 2000047757, WO 2000024916, and WO 1996017947, the contents of each of which are herein incorporated by reference in their entirety. Viral replication cells may comprise other mammalian cells such as A549, WEH1, 3T3, 10T1/2, BHK, MDCK, COS 1, COS 7, BSC 1, BSC 40, BMT 10, VERO, W138, Saos, C2C12, L cells, HT1080, HepG2 and primary fibroblast, hepatocyte and myoblast cells derived from mammals. Viral replication cells may comprise cells derived from mammalian species including, but not limited to, human, monkey, mouse, rat, rabbit, and hamster. Viral replication cells may comprise cells derived from a cell type, including but not limited to fibroblast, hepatocyte, tumor cell, cell line transformed cell, etc.

[0295] In some embodiments, the present disclosure provides a method for producing an AAV particle in mammalian cells, comprising the steps of 1) simultaneously co-transfecting mammalian cells, such as, but not limited to HEK293 cells, with a viral genome comprising a payload region (payload construct), a viral genome comprising polynucleotide sequences for rep and cap genes (rep/cap construct) and a viral genome comprising polynucleotide sequences encoding helper components (helper construct), 2) harvesting and purifying the AAV particles comprising a viral genome. This triple transfection method of AAV particle production may be utilized to produce small lots of virus.

[0296] In certain embodiments, the AAV particles may be produced in a viral replication cell that comprises an insect cell.

[0297] Growing conditions for insect cells in culture, and production of heterologous products in insect cells in culture are well-known in the art, see U.S. Pat. No. 6,204,059, the contents of which are herein incorporated by reference in their entirety.

[0298] Any insect cell which allows for replication of parvovirus and which can be maintained in culture can be used in accordance with the present disclosure. Cell lines may be used from Spodoptera frugiperda, including, but not limited to the Sf9 or Sf21 cell lines, Drosophila cell lines, or mosquito cell lines, such as Aedes albopictus derived cell lines. Use of insect cells for expression of heterologous proteins is well documented, as are methods of introducing nucleic acids, such as vectors, e.g., insect-cell compatible vectors, into such cells and methods of maintaining such cells in culture. See, for example, Methods in Molecular Biology, ed. Richard, Humana Press, NJ (1995); O'Reilly et al., Baculovirus Expression Vectors, A Laboratory Manual, Oxford Univ. Press (1994); Samulski et al., J. Vir. 63:3822-8 (1989); Kajigaya et al., Proc. Nat'l. Acad. Sci. USA 88: 4646-50 (1991); Ruffing et al., J. Vir. 66:6922-30 (1992); Kimbauer et al., Vir. 219:37-44 (1996); Zhao et al., Vir. 272:382-93 (2000); and Samulski et al., U.S. Pat. No. 6,204,059, the contents of each of which is herein incorporated by reference in its entirety.

[0299] In some embodiments, the present disclosure provides a method for producing an AAV particle in a baculovirus/Sf9 system, comprising the steps of: 1) co-transfecting competent bacterial cells with a bacmid vector and either a viral construct vector and/or AAV payload construct vector, 2) isolating the resultant viral construct expression vector and AAV payload construct expression vector and separately transfecting viral replication cells, 3) isolating and purifying resultant payload and viral construct particles comprising viral construct expression vector or AAV payload construct expression vector, 4) co-infecting a viral replication cell with both the AAV payload and viral construct particles comprising viral construct expression vector or AAV payload construct expression vector, and 5) harvesting and purifying AAV particles comprising a viral genome.

[0300] Briefly, the viral construct vector and the AAV payload construct vector are each incorporated by a transposon donor/acceptor system into a bacmid, also known as a baculovirus plasmid, by standard molecular biology techniques known and performed by a person skilled in the art. Transfection of separate viral replication cell populations produces two baculoviruses, one that comprises the viral construct expression vector, and another that comprises the AAV payload construct expression vector. The two baculoviruses may be used to infect a single viral replication cell population for production of AAV particles.

[0301] Baculovirus expression vectors for producing viral particles in insect cells, including but not limited to Spodoptera frugiperda (Sf9) cells, provide high titers of viral particle product. Recombinant baculovirus encoding the viral construct expression vector and AAV payload construct expression vector initiates a productive infection of viral replicating cells. Infectious baculovirus particles released from the primary infection secondarily infect additional cells in the culture, exponentially infecting the entire cell culture population in a number of infection cycles that is a function of the initial multiplicity of infection, see Urabe, M. et al., J Virol. 2006 February; 80 (4):1874-85, the contents of which are herein incorporated by reference in their entirety.

[0302] Production of AAV particles with baculovirus in an insect cell system may address known baculovirus genetic and physical instability. In certain embodiments, the production system addresses baculovirus instability over multiple passages by utilizing a titerless infected-cells preservation and scale-up system. Small scale seed cultures of viral producing cells are transfected with viral expression constructs encoding the structural, non-structural, components of the viral particle. Baculovirus-infected viral producing cells are harvested into aliquots that may be cryopreserved in liquid nitrogen; the aliquots retain viability and infectivity for infection of large scale viral producing cell culture Wasilko D J et al., Protein Expr Purif. 2009 June; 65(2):122-32, the contents of which are herein incorporated by reference in their entirety.

[0303] A genetically stable baculovirus may be used as the source of one or more of the components for producing AAV particles in invertebrate cells. In certain embodiments, defective baculovirus expression vectors may be maintained episomally in insect cells. In such an embodiment the bacmid vector is engineered with replication control elements, including but not limited to promoters, enhancers, and/or cell-cycle regulated replication elements.

[0304] In certain embodiments, stable viral replication cells permissive for baculovirus infection are engineered with at least one stable integrated copy of any of the elements necessary for AAV replication and viral particle production including, but not limited to, the entire AAV genome, Rep and Cap genes, Rep genes, Cap genes, each Rep protein as a separate transcription cassette, each VP protein as a separate transcription cassette, the AAP (assembly activation protein), or at least one of the baculovirus helper genes with native or non-native promoters.

[0305] AAV particles described herein may be produced by triple transfection or baculovirus mediated virus production, or any other method known in the art. Any suitable permissive or packaging cell known in the art may be employed to produce the particles. Mammalian cells are often preferred. Also preferred are trans-complementing packaging cell lines that provide functions deleted from a replication-defective helper virus, e.g., 293 cells or other E1a trans-complementing cells. A packaging cell line may be used that is stably transformed to express cap and/or rep genes. Alternatively, a packaging cell line may be used that is stably transformed to express helper constructs necessary for AAV particle assembly.

[0306] Recombinant AAV virus particles are, in some cases, produced and purified from culture supernatants according to the procedure as described in US20160032254, the contents of which are incorporated by reference.

[0307] In certain embodiments, AAV particles are produced wherein all three VP proteins are expressed at a stoichiometry around 1:1:10 (VP1:VP2:VP3). While not wishing to be bound by theory, the regulatory mechanisms that allow this controlled level of expression include the production of two mRNAs, one for VP1, and the other for VP2 and VP3, produced by differential splicing.

[0308] In certain embodiments, the viral construct vector(s) used for AAV production may contain a nucleotide sequence encoding the AAV capsid proteins where the initiation codon of the AAV VP1 capsid protein is a non-ATG, i.e., a suboptimal initiation codon, allowing the expression of a modified ratio of the viral capsid proteins in the production system, to provide improved infectivity of the host cell. In a non-limiting example, a viral construct vector may contain a nucleic acid construct comprising a nucleotide sequence encoding AAV VP1. VP2, and VP3 capsid proteins, wherein the initiation codon for translation of the AAV VP1 capsid protein is CTG, TTG, or GTG, as described in U.S. Pat. No. 8,163,543, the contents of which are herein incorporated by reference in its entirety.

[0309] In certain embodiments, the viral construct vector(s) used for AAV production may contain a nucleotide sequence encoding the AAV rep proteins where the initiation codon of the AAV rep protein or proteins is a non-ATG. In certain embodiments, a single coding sequence is used for the Rep78 and Rep52 proteins, wherein initiation codon for translation of the Rep78 protein is a suboptimal initiation codon, selected from the group consisting of ACG, TTG, CTG and GTG, that effects partial exon skipping upon expression in insect cells, as described in U.S. Pat. No. 8,512,981, the contents of which is herein incorporated by reference in its entirety, for example to promote less abundant expression of Rep78 as compared to Rep52, which may be advantageous in that it promotes high vector yields.

### Small-Scale Production

[0310] In some cases, 293T cells (adhesion/suspension) are transfected with polyethylenimine (PEI) with plasmids required for production of AAV, i.e., AAV2 rep, an adenoviral helper construct and a ITR flanked payload cassette. The AAV2 rep plasmid also contains the cap sequence of the particular virus being studied. Twenty-four hours after transfection (no medium changes for suspension), which occurs in DMEM/F17 with/without serum, the medium is replaced with fresh medium with or without serum. Three (3) days after transfection, a sample is taken from the culture medium of the 293 adherent cells. Subsequently cells are scraped, or suspension cells are pelleted, and transferred into a receptacle. For adhesion cells, after centrifugation to remove cellular pellet, a second sample is taken from the supernatant after scraping. Next, cell lysis is achieved by three consecutive freeze-thaw cycles (−80 C to 37 C) or adding detergent triton. Cellular debris is removed by centrifugation or depth filtration and sample 3 is taken from the medium. The samples are quantified for AAV particles by DNase resistant genome titration by DNA qPCR. The total production yield from such a transfection is equal to the particle concentration from sample 3.

[0311] AAV particle titers are measured according to genome copy number (genome particles per milliliter). Genome particle concentrations are based on DNA qPCR of the vector DNA as previously reported (Clark et al. (1999) Hum. Gene Ther., 10:1031-1039; Veldwijk et al. (2002) Mol. Ther., 6:272-278).

### Large-Scale Production

[0312] In some embodiments, AAV particle production may be modified to increase the scale of production. Large scale viral production methods according to the present disclosure may include any of those taught in U.S. Pat. Nos. 5,756,283, 6,258,595, 6,261,551, 6,270,996, 6,281,010, 6,365,394, 6,475,769, 6,482,634, 6,485,966, 6,943,019, 6,953,690, 7,022,519, 7,238,526, 7,291,498 and 7,491,508 or International Publication Nos. WO1996039530, WO1998010088, WO1999014354, WO1999015685, WO1999047691, WO2000055342, WO2000075353 and WO2001023597, the contents of each of which are herein incorporated by reference in their entirety. Methods of increasing viral particle production scale typically comprise increasing the number of viral replication cells. In some embodiments, viral replication cells comprise adherent cells. To increase the scale of viral particle production by adherent viral replication cells, larger cell culture surfaces are required. In some cases, large-scale production methods comprise the use of roller bottles to increase cell culture surfaces. Other cell culture substrates with increased surface areas are known in the art. Examples of additional adherent cell culture products with increased surface areas include, but are not limited to CELLSTACK®, CELLCUBE® (Corning Corp., Corning, N.Y.) and NUNC™ CELL FACTORY™ (Thermo Scientific, Waltham, Mass.). In some cases, large-scale adherent cell surfaces may comprise from about 1,000 cm² to about 100,000 cm². In some cases, large-scale adherent cell cultures may comprise from about 10⁷ to about 10⁹ cells, from about 10⁸ to about 10¹⁰ cells, from about 10⁹ to about 10¹² cells or at least 10¹² cells. In some cases, large-scale adherent cultures may produce from about 10⁹ to about 10¹², from about 101¹⁰ to about 10¹³, from about 10¹¹ to about 10¹⁴, from about 10¹² to about 10¹⁵ or at least 10¹⁵ viral particles.

[0313] In some embodiments, large-scale viral production methods of the present disclosure may comprise the use of suspension cell cultures. Suspension cell culture allows for significantly increased numbers of cells. Typically, the number of adherent cells that can be grown on about 10-50 cm² of surface area can be grown in about 1 cm³ volume in suspension.

[0314] Transfection of replication cells in large-scale culture formats may be carried out according to any methods known in the art. For large-scale adherent cell cultures, transfection methods may include, but are not limited to the use of inorganic compounds (e.g. calcium phosphate), organic compounds [e.g. polyethyleneimine (PEI)] or the use of non-chemical methods (e.g. electroporation.) With cells grown in suspension, transfection methods may include, but are not limited to the use of calcium phosphate and the use of PEI. In some cases, transfection of large scale suspension cultures may be carried out according to the section entitled “Transfection Procedure” described in Feng, L. et al., 2008. Biotechnol Appl. Biochem. 50:121-32, the contents of which are herein incorporated by reference in their entirety. According to such embodiments, PEI-DNA complexes may be formed for introduction of plasmids to be transfected. In some cases, cells being transfected with PEI-DNA complexes may be ‘shocked’ prior to transfection. This comprises lowering cell culture temperatures to 4° C. for a period of about 1 hour. In some cases, cell cultures may be shocked for a period of from about 10 minutes to about 5 hours. In some cases, cell cultures may be shocked at a temperature of from about 0° C. to about 20° C.

[0315] In some cases, transfections may include one or more vectors for expression of an RNA effector molecule to reduce expression of nucleic acids from one or more AAV payload constructs. Such methods may enhance the production of viral particles by reducing cellular resources wasted on expressing payload constructs. In some cases, such methods may be carried out according to those methods taught in US Publication No. US2014/0099666, the contents of which are herein incorporated by reference in their entirety.

### III. Methods and Uses of the Compositions of the Disclosure

[0316] The AAV particles of the present disclosure, having enhanced tropism for a desired target tissue, may be used for the delivery of a payload to the target tissue. In certain embodiments the payload is a polypeptide. In a second embodiment, the payload is an antibody. In a third embodiment, the payload is an RNAi agent and/or modulatory polynucleotide. The AAV particles of the present disclosure may be delivered by intravenous injection or infusion for the targeting of CNS and/or PNS tissues (e.g., neurons, DRG).

[0317] The AAV particles of the present disclosure may be used for regulating expression of a gene of interest (or its protein product) in a cell, tissue, organ or subject.

[0318] In accordance with the present disclosure, methods for increasing expression of a target protein in a cell, tissue, organ or subject are provided; the method comprising administering to the cell, tissue, organ or subject an effective amount of the AAV particles of the disclosure comprising a viral genome with a payload region encoding the target protein.

[0319] Accordingly, the target protein may be increased by at least about 10%, preferably by at least about 10%, 30%, 40%, 50%, 60%, 70%, 80%, 85%, 90%, 95% and 100%, or at least 20-30%, 20-40%, 20-50%, 20-60%, 20-70%, 20-80%, 20-90%, 20-95%, 20-100%, 30-40%, 30-50%, 30-60%, 30-70%, 30-80%, 30-90%, 30-95%, 30-100%, 40-50%, 40-60%, 40-70%, 40-80%, 40-90%, 40-95%, 40-100%, 50-60%, 50-70%, 50-80%, 50-90%, 50-95%, 50-100%, 60-70%, 60-80%, 60-90%, 60-95%, 60-100%, 70-80%, 70-90%, 70-95%, 70-100%, 80-90%, 80-95%, 80-100%, 90-95%, 90-100% or 95-100%.

[0320] In certain embodiments, the AAV particles of the present disclosure may be used to increase the expression of a target protein in a cell of the CNS, such as a neuron, astrocyte, microglial cell, and/or oligodendrocyte. In some embodiments, the gene may encode a protein including, but not limited to, an antibody, aromatic L-amino acid decarboxylase (AADC), survival motor neuron 1 (SMN1), frataxin (FXN), APOE (APOE2, APOE3, or APOE4), GBA1, GRN, ASPA, CLN2, GLB1, SGSH, NAGLU, IDS, NPC1, or GAN.

[0321] In accordance with the present disclosure, methods for decreasing, inhibiting or suppressing the expression of a target gene or protein in a cell, tissue, organ or subject are also provided; the method comprising administering to the cell, tissue, organ or subject an effective amount of the AAV particles of the disclosure comprising a viral genome with a payload region encoding an RNAi agent and/or modulatory polynucleotide.

[0322] Accordingly, the RNAi agent may be, but is not limited to, dsRNA, siRNA, shRNA, pre-miRNA, pri-miRNA, miRNA, stRNA, lncRNA, piRNA, or snoRNA specific for a target gene of interest. Non-limiting examples of a target gene of interest include, SOD1, MAPT, APOE, HTT, C9ORF72, TDP-43, APP, BACE, SNCA, ATXN1, ATXN2, ATXN3, ATXN7, SCN1A-SCN5A, or SCN8A-SCN11A.

[0323] In some embodiments, the present disclosure provides methods for inhibiting/silencing target gene expression in a cell. Accordingly, the RNAi agent can be used to substantially inhibit target gene expression in a cell, such as but not limited to, in astrocytes, microglia, or cortical, hippocampal, entorhinal, thalamic, motor or sensory neurons. In some aspects, the inhibition of target gene expression refers to an inhibition by at least about 20%, such as by at least about 30%, 40%, 50%, 60%, 70%, 80%, 85%, 90%, 95% and 100%, or at least 20-30%, 20-40%, 20-50%, 20-60%, 20-70%, 20-80%, 20-90%, 20-95%, 20-100%, 30-40%, 30-50%, 30-60%, 30-70%, 30-80%, 30-90%, 30-95%, 30-100%, 40-50%, 40-60%, 40-70%, 40-80%, 40-90%, 40-95%, 40-100%, 50-60%, 50-70%, 50-80%, 50-90%, 50-95%, 50-100%, 60-70%, 60-80%, 60-90%, 60-95%, 60-100%, 70-80%, 70-90%, 70-95%, 70-100%, 80-90%, 80-95%, 80-100%, 90-95%, 90-100% or 95-100%. Accordingly, the protein product of the targeted gene may be inhibited by at least about 20%, preferably by at least about 30%, 40%, 50%, 60%, 70%, 80%, 85%, 90%, 95% and 100%, or at least 20-30%, 20-40%, 20-50%, 20-60%, 20-70%, 20-80%, 20-90%, 20-95%, 20-100%, 30-40%, 30-50%, 30-60%, 30-70%, 30-80%, 30-90%, 30-95%, 30-100%, 40-50%, 40-60%, 40-70%, 40-80%, 40-90%, 40-95%, 40-100%, 50-60%, 50-70%, 50-80%, 50-90%, 50-95%, 50-100%, 60-70%, 60-80%, 60-90%, 60-95%, 60-100%, 70-80%, 70-90%, 70-95%, 70-100%, 80-90%, 80-95%, 80-100%, 90-95%, 90-100% or 95-100%.

[0324] In some embodiments, the gene to be inhibited may include but is not limited to SOD1, MAPT, APOE, HTT, C9ORF72, TDP43, APP, BACE, SNCA, ATXN1, ATXN2, ATXN3, ATXN7, SCN1A-SCN5A, or SCN8A-SCN11A.

### Therapeutic Applications

[0325] The present disclosure provides a method for treating a disease, disorder and/or condition in a mammalian subject, including a human subject, comprising administering to the subject any of the AAV particles described herein or administering to the subject any of the described compositions, including pharmaceutical compositions, described herein.

[0326] In certain embodiments, the AAV particles of the present disclosure are administered to a subject prophylactically, to prevent on-set of disease. In another embodiment, the AAV particles of the present disclosure are administered to treat (lessen the effects of) a disease or symptoms thereof. In yet another embodiment, the AAV particles of the present disclosure are administered to cure (eliminate) a disease. In another embodiment, the AAV particles of the present disclosure are administered to prevent or slow progression of disease. In yet another embodiment, the AAV particles of the present disclosure are used to reverse the deleterious effects of a disease. Disease status and/or progression may be determined or monitored by standard methods known in the art.

[0327] In some embodiments, the AAV particles of the disclosure are useful in the field of medicine for the treatment, prophylaxis, palliation or amelioration of neurological diseases and/or disorders.

[0328] In some embodiments, the AAV particles of the disclosure are useful in the field of medicine for the treatment, prophylaxis, palliation or amelioration of tauopathy.

[0329] In some embodiments, the AAV particles of the disclosure are useful in the field of medicine for the treatment, prophylaxis, palliation or amelioration of Alzheimer's Disease.

[0330] In some embodiments, the AAV particles of the disclosure are useful in the field of medicine for the treatment, prophylaxis, palliation or amelioration of Friedreich's ataxia, or any disease stemming from a loss or partial loss of frataxin protein.

[0331] In some embodiments, the AAV particles of the disclosure are useful in the field of medicine for the treatment, prophylaxis, palliation or amelioration of Parkinson's Disease.

[0332] In some embodiments, the AAV particles of the disclosure are useful in the field of medicine for the treatment, prophylaxis, palliation or amelioration of Amyotrophic lateral sclerosis.

[0333] In some embodiments, the AAV particles of the disclosure are useful in the field of medicine for the treatment, prophylaxis, palliation or amelioration of Huntington's Disease.

[0334] In some embodiments, the AAV particles of the disclosure are useful in the field of medicine for the treatment, prophylaxis, palliation or amelioration of chronic or neuropathic pain.

[0335] In some embodiments, the AAV particles of the disclosure are useful in the field of medicine for treatment, prophylaxis, palliation or amelioration of a disease associated with the central nervous system.

[0336] In some embodiments, the AAV particles of the disclosure are useful in the field of medicine for treatment, prophylaxis, palliation or amelioration of a disease associated with the peripheral nervous system.

[0337] In certain embodiments, the AAV particles of the present disclosure are administered to a subject having at least one of the diseases or symptoms described herein.

[0338] As used herein, any disease associated with the central or peripheral nervous system and components thereof (e.g., neurons) may be considered a “neurological disease”.

[0339] Any neurological disease may be treated with the AAV particles of the disclosure, or pharmaceutical compositions thereof, including but not limited to, Absence of the Septum Pellucidum, Acid Lipase Disease, Acid Maltase Deficiency, Acquired Epileptiform Aphasia, Acute Disseminated Encephalomyelitis, Attention Deficit-Hyperactivity Disorder (ADHD), Adie's Pupil, Adie's Syndrome, Adrenoleukodystrophy, Agenesis of the Corpus Callosum, Agnosia, Aicardi Syndrome, Aicardi-Goutieres Syndrome Disorder, AIDS—Neurological Complications, Alexander Disease, Alpers' Disease, Alternating Hemiplegia, Alzheimcer's Disease, Amyotrophic Lateral Sclerosis (ALS), Anencephaly, Aneurysm, Angelman Syndrome, Angiomatosis, Anoxia, Antiphospholipid Syndrome, Aphasia, Apraxia, Arachnoid Cysts, Arachnoiditis, Amold-Chiari Malformation, Arteriovenous Malformation, Asperger Syndrome, Ataxia, Ataxia Telangiectasia, Ataxias and Cerebellar or Spinocerebellar Degeneration, Atrial Fibrillation and Stroke, Attention Deficit-Hyperactivity Disorder, Autism Spectrum Disorder, Autonomic Dysfunction, Back Pain, Barth Syndrome, Batten Disease, Becker's Myotonia, Bechet's Disease, Bell's Palsy, Benign Essential Blepharospasm, Benign Focal Amyotrophy, Benign Intracranial Hypertension, Bernhardt-Roth Syndrome, Binswanger's Disease, Blepharospasm, Bloch-Sulzberger Syndrome, Brachial Plexus Birth Injuries, Brachial Plexus Injuries, Bradbury-Eggleston Syndrome, Brain and Spinal Tumors, Brain Aneurysm, Brain Injury, Brown-Sequard Syndrome, Bulbar palsy, Bulbospinal Muscular Atrophy, Cerebral Autosomal Dominant Arteriopathy with Subcortical Infarcts and Leukoencephalopathy (CADASIL), Canavan Disease, Carpal Tunnel Syndrome, Causalgia, Cavemomas, Cavernous Angioma, Cavernous Malformation, Central Cervical Cord Syndrome, Central Cord Syndrome, Central Pain Syndrome, Central Pontine Myelinolysis, Cephalic Disorders, Ceramidase Deficiency, Cerebellar Degeneration, Cerebellar Hypoplasia, Cerebral Aneurysms, Cerebral Arteriosclerosis, Cerebral Atrophy, Cerebral Beriberi, Cerebral Cavernous Malformation, Cerebral Gigantism, Cerebral Hypoxia, Cerebral Palsy, Cerebro-Oculo-Facio-Skeletal Syndrome (COFS), Chareot-Marie-Tooth Disease, Chiari Malformation, Cholesterol Ester Storage Disease, Chorea, Choreoacanthocytosis, Chronic Inflammatory Demyclinating Polyneuropathy (CIDP), Chronic Orthostatic Intolerance, Chronic Pain, Cockayne Syndrome Type II, Coffin Lowry Syndrome, Colpocephaly, Coma, Complex Regional Pain Syndrome, Concentric sclerosis (Balo's sclerosis), Congenital Facial Diplegia, Congenital Myasthenia, Congenital Myopathy, Congenital Vascular Cavernous Malformations, Corticobasal Degeneration, Cranial Arteritis, Craniosynostosis, Cree encephalitis, Creutzfeldt-Jakob Disease, Chronic progressive external ophtalmoplegia, Cumulative Trauma Disorders, Cushing's Syndrome, Cytomegalic Inclusion Body Disease, Cytomegalovirus Infection, Dancing Eyes-Dancing Feet Syndrome, Dandy-Walker Syndrome, Dawson Disease, De Morsier's Syndrome, Dejerine-Klumpke Palsy, Dementia, Dementia—Multi-Infarct, Dementia—Semantic, Dementia—Subcortical, Dementia With Lewy Bodies, Demyelination diseases, Dentate Cerebellar Ataxia, Dentatorubral Atrophy, Dermatomyositis, Developmental Dyspraxia, Devic's Syndrome, Diabetic Neuropathy, Diffuse Sclerosis, Distal hereditary motor neuronopathies, Dravet Syndrome, Dysautonomia, Dysgraphia, Dyslexia, Dysphagia, Dyspraxia, Dyssynergia Cerebellaris Myoclonica, Dyssynergia Cerebellaris Progressiva, Dystonias, Early Infantile Epileptic Encephalopathy, Empty Sella Syndrome, Encephalitis, Encephalitis Lethargica, Encephaloccles, Encephalomyelitis, Encephalopathy, Encephalopathy (familial infantile), Encephalotrigeminal Angiomatosis, Epilepsy, Epileptic Hemiplegia, Episodic ataxia, Erb's Palsy, Erb-Duchenne and Dejerine-Klumpke Palsies, Essential Tremor, Extrapontine Myelinolysis, Faber's disease, Fabry Disease, Fahr's Syndrome, Fainting, Familial Dysautonomia, Familial Hemangioma, Familial Idiopathic Basal Ganglia Calcification, Familial Periodic Paralyses, Familial Spastic Paralysis, Farber's Disease, Febrile Seizures, Fibromuscular Dysplasia, Fisher Syndrome, Floppy Infant Syndrome, Foot Drop, Friedreich's Ataxia, Frontotemporal Dementia, Gaucher Disease, Generalized Gangliosidoses (GM1, GM2), Gerstmann's Syndrome, Gerstmann-Straussler-Scheinker Disease, Giant Axonal Neuropathy, Giant Cell Arteritis, Giant Cell Inclusion Disease, Globoid Cell Leukodystrophy, Glossopharyngeal Neuralgia, Glycogen Storage Disease, Guillain-Barre Syndrome, Hallervorden-Spatz Disease, Head Injury, Headache, Hemicrania Continua, Hemifacial Spasm, Hemiplegia Alterans, Hereditary Neuropathies, Hereditary Spastic Paraplegia, Heredopathia Atactica Polyneuritifonmis, Herpes Zoster, Herpes Zoster Oticus, Hirayama Syndrome, Holmes-Adie syndrome, Holoprosencephaly, HTLV-1 Associated Myelopathy, Hughes Syndrome, Huntington's Disease, Hurler syndrome, Hydranencephaly, Hydrocephalus, Hydrocephalus—Normal Pressure, Hydromyelia, Hypercortisolism, Hypersomnia, Hypertonia, Hypotonia, Hypoxia, Immune-Mediated Encephalomyelitis, Inclusion Body Myositis, Incontinentia Pigmenti, Infantile Hypotonia, Infantile Neuroaxonal Dystrophy, Infantile Phytanic Acid Storage Disease, Infantile Refsum Disease, Infantile Spasms, Inflammatory Myopathies, Iniencephaly, Intestinal Lipodystrophy, Intracranial Cysts, Intracranial Hypertension, Isaacs' Syndrome, Joubert Syndrome, Kearns-Sayre Syndrome, Kennedy's Disease, Kinsboume syndrome, Kleine-Levin Syndrome, Klippel-Feil Syndrome, Klippel-Trenaunay Syndrome (KTS), Kluver-Bucy Syndrome, Korsakoff's Amnesic Syndrome, Krabbe Disease, Kugelberg-Welander Disease, Kuru, Lambert-Eaton Myasthenic Syndrome, Landau-Kleffner Syndrome, Lateral Femoral Cutaneous Nerve Entrapment, Lateral Medullary Syndrome, Learning Disabilities, Leigh's Disease, Lennox-Gastaut Syndrome, Lesch-Nyhan Syndrome, Leukodystrophy, Levine-Critchley Syndrome, Lewy Body Dementia, Lichtheim's disease, Lipid Storage Diseases, Lipoid Proteinosis, Lissencephaly, Locked-In Syndrome, Lou Gehrig's Disease, Lupus—Neurological Sequelae, Lyme Disease—Neurological Complications, Lysosomal storage disorders, Machado-Joseph Disease, Macrencephaly, Megalencephaly, Melkersson-Rosenthal Syndrome, Meningitis, Meningitis and Encephalitis, Menkes Disease, Meralgia Paresthetica, Metachromatic Leukodystrophy, Microcephaly, Migraine, Miller Fisher Syndrome, Mini Stroke, Mitochondrial Myopathy, Mitochondrial DNA depletion syndromes, Moebius Syndrome, Monomelic Amyotrophy, Morvan Syndrome, Motor Neuron Diseases, Moyamova Disease, Mucolipidoses, Mucopolysaccharidoses, Multi-Infarct Dementia, Multifocal Motor Neuropathy, Multiple Sclerosis, Multiple System Atrophy, Multiple System Atrophy with Orthostatic Hypotension, Muscular Dystrophy, Myasthenia—Congenital, Myasthenia Gravis, Myelinoclastic Diffuse Sclerosis, Myelitis, Myoclonic Encephalopathy of Infants, Myoclonus, Myoclonus epilepsy, Myopathy, Myopathy—Congenital, Myopathy—Thyrotoxic, Myotonia, Myotonia Congenita, Narcolepsy, NARP (neuropathy, ataxia and retinitis pigmentosa), Neuroacanthocytosis, Neurodegeneration with Brain Iron Accumulation, Neurodegenerative disease, Neurofibromatosis, Neuroleptic Malignant Syndrome, Neurological Complications of AIDS, Neurological Complications of Lyme Disease, Neurological Consequences of Cytomegalovirus Infection, Neurological Manifestations of Pompe Disease, Neurological Sequelae Of Lupus, Neuromyelitis Optica, Neuromvotonia, Neuronal Ceroid Lipofuscinosis, Neuronal Migration Disorders, Neuropathic pain, Neuropathy—Hereditary, Neuropathy, Neurosarcoidosis, Neurosyphilis, Neurotoxicity, Nevus Cavemosus, Niemann-Pick Disease, O'Sullivan-McLeod Syndrome, Occipital Neuralgia, Ohtahara Syndrome, Olivopontocerebellar Atrophy, Opsoclonus Myoclonus, Orthostatic Hypotension, Overuse Syndrome, Pain—Chronic, Pantothenate Kinase-Associated Neurodegeneration, Paraneoplastic Syndromes, Paresthesia, Parkinson's Disease, Paroxysmal Choreoathetosis, Paroxysmal Hemicrania, Parry-Romberg, Pelizaeus-Merzbacher Disease, Pena Shokeir II Syndrome, Perineural Cysts, Peroneal muscular atrophy, Periodic Paralyses, Peripheral Neuropathy, Periventricular Leukomalacia, Persistent Vegetative State, Pervasive Developmental Disorders, Phytanic Acid Storage Disease, Pick's Disease, Pinched Nerve, Piriformis Syndrome, Pituitary Tumors, Polymyositis, Pompe Disease, Porencephaly, Post-Polio Syndrome, Postherpetic Neuralgia, Postinfectious Encephalomyelitis, Postural Hypotension, Postural Orthostatic Tachycardia Syndrome, Postural Tachycardia Syndrome, Primary Dentatum Atrophy, Primary Lateral Sclerosis, Primary Progressive Aphasia, Prion Diseases, Progressive bulbar palsy, Progressive Hemifacial Atrophy, Progressive Locomotor Ataxia, Progressive Multifocal Leukoencephalopathy, Progressive Muscular Atrophy, Progressive Sclerosing Poliodystrophy, Progressive Supranuclear Palsy, Prosopagnosia, Pseudobulbar palsy, Pseudo-Torch syndrome, Pseudotoxoplasmosis syndrome, Pseudotumor Cerebri, Psychogenic Movement, Ramsay Hunt Syndrome I, Ramsay Hunt Syndrome II, Rasmussen's Encephalitis, Reflex Sympathetic Dystrophy Syndrome, Refsum Disease, Refsum Disease—Infantile, Repetitive Motion Disorders, Repetitive Stress Injuries, Restless Legs Syndrome, Retrovirus-Associated Myclopathy, Rett Syndrome, Reye's Syndrome, Rheumatic Encephalitis, Riley-Day Syndrome, Sacral Nerve Root Cysts, Saint Vitus Dance, Salivary Gland Disease, Sandhoff Disease, Schilder's Disease, Schizencephaly, Seitelberger Disease, Seizure Disorder, Semantic Dementia, Septo-Optic Dysplasia, Severe Myoclonic Epilepsy of Infancy (SMEI), Shaken Baby Syndrome, Shingles, Shy-Drager Syndrome, Sjögren's Syndrome, Sleep Apnea, Sleeping Sickness, Sotos Syndrome, Spasticity, Spina Bifida, Spinal Cord Infarction, Spinal Cord Injury, Spinal Cord Tumors, Spinal Muscular Atrophy, Spinocerebellar Ataxia, Spinocerebellar Atrophy, Spinocerebellar Degeneration, Sporadic ataxia, Steele-Richardson-Olszewski Syndrome, Stiff-Person Syndrome, Striatonigral Degeneration, Stroke, Sturge-Weber Syndrome, Subacute Sclerosing Panencephalitis, Subcortical Arteriosclerotic Encephalopathy, Short-lasting, Unilateral, Neuralgiform (SUNCT) Headache, Swallowing Disorders, Sydenham Chorca, Syncope, Syphilitic Spinal Sclerosis, Syringohydromyelia, Syringomyelia, Systemic Lupus Erythematosus, Tabes Dorsalis, Tardive Dyskinesia, Tarlov Cysts, Tay-Sachs Disease, Temporal Arteritis, Tethered Spinal Cord Syndrome, Thomsen's Myotonia, Thoracic Outlet Syndrome, Thyrotoxic Myopathy, Tic Douloureux, Todd's Paralysis, Tourette Syndrome, Transient Ischemic Attack, Transmissible Spongiform Encephalopathies, Transverse Myelitis, Traumatic Brain Injury, Tremor, Trigeminal Neuralgia, Tropical Spastic Paraparesis, Troyer Syndrome, Tuberous Sclerosis, Vascular Erectile Tumor, Vasculitis Syndromes of the Central and Peripheral Nervous Systems, Vitamin B12 deficiency, Von Economo's Disease, Von Hippel-Lindau Disease (VHL), Von Recklinghausen's Disease, Wallenberg's Syndrome, Werdnig-Hoffman Disease, Wernicke-Korsakoff Syndrome, West Syndrome, Whiplash, Whipple's Disease, Williams Syndrome, Wilson Disease, Wolman's Disease, X-Linked Spinal and Bulbar Muscular Atrophy.

### Methods of Treatment of Neurological Disease

[0340] AAV Particles Encoding protein payloads

[0341] Provided in the present disclosure are methods for introducing the AAV particles of the present disclosure into cells, the method comprising introducing into said cells any of the vectors in an amount sufficient for an increase in the production of target mRNA and protein to occur. In some aspects, the cells may be neurons such as but not limited to, motor, hippocampal, entorhinal, thalamic, cortical, sensory, sympathetic, or parasympathetic neurons, and glial cells such as astrocytes, microglia, and/or oligodendrocytes.

[0342] Disclosed herein are methods for treating neurological disease associated with insufficient function/presence of a target protein (e.g., ApoE, FXN) in a subject in need of treatment. The method optionally comprises administering to the subject a therapeutically effective amount of a composition comprising AAV particles of the present disclosure. As a non-limiting example, the AAV particles can increase target gene expression, increase target protein production, and thus reduce one or more symptoms of neurological disease in the subject such that the subject is therapeutically treated.

[0343] In certain embodiments, the composition comprising the AAV particles of the present disclosure is administered to the central nervous system of the subject via systemic administration. In certain embodiments, the systemic administration is intravenous injection.

[0344] In some embodiments, the composition comprising the AAV particles of the present disclosure is administered to the central nervous system of the subject. In other embodiments, the composition comprising the AAV particles of the present disclosure is administered to a CNS tissue of a subject (e.g., putamen, thalamus or cortex of the subject).

[0345] In certain embodiments, the composition comprising the AAV particles of the present disclosure is administered to the central nervous system of the subject via intraparenchymal injection. Non-limiting examples of intraparenchymal injections include intraputamenal, intracortical, intrathalamic, intrastriatal, intrahippocampal or into the entorhinal cortex.

[0346] In certain embodiments, the composition comprising the AAV particles of the present disclosure is administered to the central nervous system of the subject via intraparenchymal injection and intravenous injection.

[0347] In certain embodiments, the AAV particles of the present disclosure may be delivered into specific types of targeted cells, including, but not limited to, thalamic, hippocampal, entorhinal, cortical, motor, sensory, excitatory, inhibitory, sympathetic, or parasympathetic neurons; glial cells including oligodendrocytes, astrocytes and microglia; and/or other cells surrounding neurons such as T cells.

[0348] In certain embodiments, the AAV particles of the present disclosure may be delivered to neurons in the putamen, thalamus and/or cortex.

[0349] In some embodiments, the AAV particles of the present disclosure may be used as a therapy for neurological disease.

[0350] In some embodiments, the AAV particles of the present disclosure may be used as a therapy for tauopathies.

[0351] In some embodiments, the AAV particles of the present disclosure may be used as a therapy for Alzheimer's Disease.

[0352] In some embodiments, the AAV particles of the present disclosure may be used as a therapy for Amyotrophic Lateral Sclerosis.

[0353] In some embodiments, the AAV particles of the present disclosure may be used as a therapy for Huntington's Disease.

[0354] In some embodiments, the AAV particles of the present disclosure may be used as a therapy for Parkinson's Disease.

[0355] In some embodiments, the AAV particles of the present disclosure may be used as a therapy for Friedreich's Ataxia.

[0356] In some embodiments, the AAV particles of the present disclosure may be used as a therapy for chronic or neuropathic pain.

[0357] In certain embodiments, administration of the AAV particles described herein to a subject may increase target protein levels in a subject. The target protein levels may be increased by about 30%, 40%, 50%, 60%, 70%, 80%, 85%, 90%, 95% and 100%, or at least 20-30%, 20-40%, 20-50%, 20-60%, 20-70%, 20-80%, 20-90%, 20-95%, 20-100%, 30-40%, 30-50%, 30-60%, 30-70%, 30-80%, 30-90%, 30-95%, 30-100%, 40-50%, 40-60%, 40-70%, 40-80%, 40-90%, 40-95%, 40-100%, 50-60%, 50-70%, 50-80%, 50-90%, 50-95%, 50-100%, 60-70%, 60-80%, 60-90%, 60-95%, 60-100%, 70-80%, 70-90%, 70-95%, 70-100%, 80-90%, 80-95%, 80-100%, 90-95%, 90-100% or 95-100% in a subject such as, but not limited to, the CNS, a region of the CNS, or a specific cell of the CNS of a subject. As a non-limiting example, the AAV particles may increase the protein levels of a target protein by at least 50%. As a non-limiting example, the AAV particles may increase the proteins levels of a target protein by at least 40%. As a non-limiting example, a subject may have an increase of 10% of target protein. As anon-limiting example, the AAV particles may increase the protein levels of a target protein by fold increases over baseline. In certain embodiments, AAV particles lead to 5-6 times higher levels of a target protein.

[0358] In certain embodiments, administration of the AAV particles described herein to a subject may increase the expression of a target protein in a subject. The expression of the target protein may be increased by about 30%, 40%, 50%, 60%, 70%, 80%, 85%, 90%, 95% and 100%, or at least 20-30%, 20-40%, 20-50%, 20-60%, 20-70%, 20-80%, 20-90%, 20-95%, 20-100%, 30-40%, 30-50%, 30-60%, 30-70%, 30-80%, 30-90%, 30-95%, 30-100%, 40-50%, 40-60%, 40-70%, 40-80%, 40-90%, 40-95%, 40-100%, 50-60%, 50-70%, 50-80%, 50-90%, 50-95%, 50-100%, 60-70%, 60-80%, 60-90%, 60-95%, 60-100%, 70-80%, 70-90%, 70-95%, 70-100%, 80-90%, 80-95%, 80-100%, 90-95%, 90-100% or 95-100% in a subject such as, but not limited to, the CNS, a region of the CNS, or a specific cell of the CNS of a subject. As a non-limiting example, the AAV particles may increase the expression of a target protein by at least 50%. As a non-limiting example, the AAV particles may increase the expression of a target protein by at least 40%.

[0359] In certain embodiments, intravenous administration of the AAV particles described herein to a subject may increase the CNS expression of a target protein in a subject. The expression of the target protein may be increased by about 30%, 40%, 50%, 60%, 70%, 80%, 85%, 90%, 95% and 100%, or at least 20-30%, 20-40%, 20-50%, 20-60%, 20-70%, 20-80%, 20-90%, 20-95%, 20-100%, 30-40%, 30-50%, 30-60%, 30-70%, 30-80%, 30-90%, 30-95%, 30-100%, 40-50%, 40-60%, 40-70%, 40-80%, 40-90%, 40-95%, 40-100%, 50-60%, 50-70%, 50-80%, 50-90%, 50-95%, 50-100%, 60-70%, 60-80%, 60-90%, 60-95%, 60-100%, 70-80%, 70-90%, 70-95%, 70-100%, 80-90%, 80-95%, 80-100%, 90-95%, 90-100% or 95-100% in a subject such as, but not limited to, the CNS, a region of the CNS, or a specific cell of the CNS of a subject. As a non-limiting example, the AAV particles may increase the expression of a target protein in the CNS by at least 50%. As a non-limiting example, the AAV particles may increase the expression of a target protein in the CNS by at least 40%.

[0360] In some embodiments, the AAV particles of the present disclosure may be used to increase target protein expression in astrocytes in order to treat a neurological disease. Target protein in astrocytes may be increased by 5%, 10%, 15%, 20%, 25%, 30%, 35%, 40%, 45%, 50%, 55%, 60%, 65%, 70%, 75%, 80%, 85%, 90%, 95%, or more than 95%, 5-15%, 5-20%, 5-25%, 5-30%, 5-35%, 5-40%, 5-45%, 5-50%, 5-55%, 5-60%, 5-65%, 5-70%, 5-75%, 5-80%, 5-85%, 5-90%, 5-95%, 10-20%, 10-25%, 10-30%, 10-35%, 10-40%, 10-45%, 10-50%, 10-55%, 10-60%, 10-65%, 10-70%, 10-75%, 10-80%, 10-85%, 10-90%, 10-95%, 15-25%, 15-30%, 15-35%, 15-40%, 15-45%, 15-50%, 15-55%, 15-60%, 15-65%, 15-70%, 15-75%, 15-80%, 15-85%, 15-90%, 15-95%, 20-30%, 20-35%, 20-40%, 20-45%, 20-50%, 20-55%, 20-60%, 20-65%, 20-70%, 20-75%, 20-80%, 20-85%, 20-90%, 20-95%, 25-35%, 25-40%, 25-45%, 25-50%, 25-55%, 25-60%, 25-65%, 25-70%, 25-75%, 25-80%, 25-85%, 25-90%, 25-95%, 30-40%, 30-45%, 30-50%, 30-55%, 30-60%, 30-65%, 30-70%, 30-75%, 30-80%, 30-85%, 30-90%, 30-95%, 35-45%, 35-50%, 35-55%, 35-60%, 35-65%, 35-70%, 35-75%, 35-80%, 35-85%, 35-90%, 35-95%, 40-50%, 40-55%, 40-60%, 40-65%, 40-70%, 40-75%, 40-80%, 40-85%, 40-90%, 40-95%, 45-55%, 45-60%, 45-65%, 45-70%, 45-75%, 45-80%, 45-85%, 45-90%, 45-95%, 50-60%, 50-65%, 50-70%, 50-75%, 50-80%, 50-85%, 50-90%, 50-95%, 55-65%, 55-70%, 55-75%, 55-80%, 55-85%, 55-90%, 55-95%, 60-70%, 60-75%, 60-80%, 60-85%, 60-90%, 60-95%, 65-75%, 65-80%, 65-85%, 65-90%, 65-95%, 70-80%, 70-85%, 70-90%, 70-95%, 75-85%, 75-90%, 75-9500, 80-90%, 80-95%, or 90-95%.

[0361] In some embodiments, the AAV particles may be used to increase target protein in microglia. The increase of target protein in microglia may be, independently, increased by 5%, 10%, 15%, 20%, 25%, 30%, 35%, 40%, 45%, 50%, 55%, 60%, 65%, 70%, 75%, 80%, 85%, 90%, 95%, or more than 95%, 5-15%, 5-20%, 5-25%, 5-30%, 5-35%, 5-40%, 5-45%, 5-50%, 5-55% 5-60%, 5-65%, 5-70%, 5-75%, 5-80%, 5-85%, 5-90%, 5-95%, 10-20%, 10-25%, 10-30%, 10-35%, 10-40%, 10-45%, 10-50%, 10-55%, 10-60%, 10-65%, 10-70%, 10-75%, 10-80%, 10-85%, 10-90%, 10-95%, 15-25%, 15-30%, 15-35%, 15-40%, 15-45%, 15-50%, 15-55%, 15-60%, 15-65%, 15-70%, 15-75%, 15-80%, 15-85%, 15-90%, 15-95%, 20-30%, 20-35%, 20-40%, 20-45%, 20-.50%, 20-.55%, 20-60%, 20-65%, 20-70%, 20-75%, 20-80%, 20-85%, 20-90%, 20-95%, 25-35%, 25-40%, 25-45%, 25-50%, 25-55%, 25-60%, 25-65%, 25-70%, 25-75%, 25-80%, 25-85%, 25-90%, 25-95%, 30-40%, 30-45%, 30-50%, 30-55%, 30-60%, 30-65%, 30-70%, 30-75%, 30-80%, 30-85%, 30-90%, 30-95%, 35-45%, 35-50%, 35-55%, 35-60%, 35-65%, 35-70%, 35-75%, 35-80%, 35-85%, 35-90%, 35-95%, 40-50%, 40-55%, 40-60%, 40-65%, 40-70%, 40-75%, 40-80%, 40-85%, 40-90%, 40-95%, 45-55%, 45-60%, 45-65%, 45-70%, 45-75%, 45-80%, 45-85%, 45-90%, 45-95%, 50-60%, 50-65%, 50-70%, 50-7500, 50-80%, 50-85%, 50-90%, 50-95%, 55-65%, 55-70%, 55-75%, 55-80%, 55-85%, 55-90%, 55-95%, 60-70%, 60-75%, 60-80%, 60-85%, 60-90%, 60-95%, 65-75%, 65-80%, 65-85%, 65-90%, 65-95%, 70-80%, 70-85%, 70-90%, 70-95%, 75-85%, 75-90%, 75-95%, 80-90%, 80-95%, or 90-95%.

[0362] In some embodiments, the AAV particles may be used to increase target protein in cortical neurons. The increase of target protein in the cortical neurons may be, independently, increased by, 5%, 10%, 15%, 20%, 25%, 30%, 35%, 40%, 45%, 50%, 55%, 60%, 65%, 70%, 75%, 80%, 85%, 90%, 95%, or more than 95%, 5-15%, 5-20%, 5-25%, 5-30%, 5-35%, 5-40%, 5-45%, 5-50%, 5-55%, 5-60%, 5-65%, 5-70%, 5-75%, 5-80%, 5-85%, 5-90%, 5-95%, 10-20%, 10-25%, 10-30%, 10-35%, 10-40%, 10-45%, 10-50%, 10-55%, 10-60%, 10-65%, 10-70%, 10-75%, 10-80%, 10-85%, 10-90%, 10-95%, 15-25%, 15-30%, 15-35%, 15-40%, 15-45%, 15-50%, 15-55%, 15-60%, 15-65%, 15-70%, 15-75%, 15-80%, 15-85%, 15-90%, 15-95%, 20-30%, 20-35%, 20-40%, 20-45%, 20-50%, 20-55%, 20-60%, 20-65%, 20-70%, 20-75%, 20-80%, 20-85%, 20-90%, 20-95%, 25-35%, 25-40%, 25-45%, 25-50%, 25-55%, 25-60%, 25-65%, 25-70%, 25-75%, 25-80%, 25-85%, 25-90%, 25-95%, 30-40%, 30-45%, 30-50%, 30-55%, 30-60%, 30-65%, 30-70%, 30-75%, 30-80%, 30-85%, 30-90%, 30-95%, 35-45%, 35-50%, 35-55%, 35-60%, 35-65%, 35-70%, 35-75%, 35-80%, 35-85%, 35-90%, 35-95%, 40-50%, 40-55%, 40-60% 40-65%, 40-70%, 40-75%, 40-80%, 40-85%, 40-90%, 40-95%, 45-55%, 45-60%, 45-65%, 45-70%, 45-75%, 45-80%, 45-85%, 45-90%, 45-95%, 50-60%, 50-65%, 50-70%, 50-75%, 50-80%, 50-85%, 50-90%, 50-95%, 55-65%, 55-70%, 55-75%, 55-80%, 55-85%, 55-90%, 55-95%, 60-70%, 60-75%, 60-80%, 60-85%, 60-90%, 60-95%, 65-75%, 65-80%, 65-85%, 65-90%, 65-95%, 70-80%, 70-85%, 70-90%, 70-95%, 75-85%, 75-90%, 75-95%, 80-90%, 80-95%, or 90-95%.

[0363] In some embodiments, the AAV particles may be used to increase target protein in hippocampal neurons. The increase of target protein in the hippocampal neurons may be, independently, increased by 5%, 10%, 15%, 20%, 25%, 30%, 35%, 40%, 45%, 50%, 55%, 60%, 65%, 70%, 75%, 80%, 85%, 90%, 95%, or more than 95%, 5-15%, 5-20%, 5-25%, 5-30%, 5-35%, 5-40%, 5-45%, 5-50%, 5-55%, 5-60%, 5-65%, 5-70%, 5-75%, 5-80%, 5-85%, 5-90%, 5-95%, 10-20%, 10-25%, 10-30%, 10-35%, 10-40%, 10-45%, 10-50%, 10-55%, 10-60%, 10-65%, 10-70%, 10-75%, 10-80%, 10-85%, 10-90%, 10-95%, 15-25%, 15-30%, 15-35%, 15-40%, 15-45%, 15-50%, 15-55%, 15-60%, 15-65%, 15-70%, 15-75%, 15-80%, 15-85%, 15-90%, 15-95%, 20-30%, 20-35%, 20-40%, 20-45%, 20-50%, 20-55%, 20-60%, 20-65%, 20-70%, 20-75%, 20-80%, 20-85%, 20-90%, 20-95%, 25-35%, 25-40%, 25-45%, 25-50%, 25-55%, 25-60%, 25-65%, 25-70%, 25-75%, 25-80%, 25-85%, 25-90%, 25-95%, 30-40%, 30-45%, 30-50%, 30-55%, 30-60%, 30-65%, 30-70%, 30-75%, 30-80%, 30-85%, 30-90%, 30-95%, 35-45%, 35-50%, 35-55%, 35-60%, 35-65%, 35-70%, 35-75%, 35-80%, 35-85%, 35-90%, 35-95%, 40-50%, 40-55%, 40-60%, 40-65%, 40-70%, 40-75%, 40-80%, 40-85%, 40-90%, 40-95%, 45-55%, 45-60%, 45-65%, 45-70%, 45-75%, 45-80%, 45-85%, 45-90%, 45-95%, 50-60%, 50-65%, 50-70%, 50-75%, 50-80%, 50-85%, 50-90%, 50-95%, 55-65%, 55-70%, 55-75%, 55-80%, 55-85%, 55-90%, 55-95%, 60-70%, 60-75%, 60-80%, 60-85%, 60-90%, 60-95%, 65-75%, 65-80%, 65-85%, 65-90%, 65-95%, 70-80%, 70-85%, 70-90%, 70-95%, 75-85%, 75-90%, 75-95%, 80-90%, 80-95%, or 90-95%.

[0364] In some embodiments, the AAV particles may be used to increase target protein in DRG and/or sympathetic neurons. The increase of target protein in the DRG and/or sympathetic neurons may be, independently, increased by 5%, 10%, 15%, 20%, 25%, 30%, 35%, 40%, 45%, 50%, 55%, 60%, 65%, 70%, 75%, 80%, 85%, 90%, 95%, or more than 95%, 5-15%, 5-20%, 5-25%, 5-30%, 5-35%, 5-40%, 5-45%, 5-50%, 5-55%, 5-60%, 5-65%, 5-70%, 5-75%, 5-80%, 5-85%, 5-90%, 5-95%, 10-20%, 10-25%, 10-30%, 10-35%, 10-40%, 10-45%, 10-50%, 10-55%, 10-60%, 10-65%, 10-70%, 10-75%, 10-80%, 10-85%, 10-90%, 10-95%, 15-25%, 15-30%, 15-35%, 15-40%, 15-45%, 15-50%, 15-55%, 15-60%, 15-65%, 15-70%, 15-75%, 15-80%, 15-85%, 15-90%, 15-95%, 20-30%, 20-35%, 20-40%, 20-45%, 20-50%, 20-55%, 20-60%, 20-65%, 20-70%, 20-75%, 20-80%, 20-85%, 20-90%, 20-95%, 25-35%, 25-40%, 25-45%, 25-50%, 25-55%, 25-60%, 25-65%, 25-70%, 25-75%, 25-80%, 25-85%, 25-90%, 25-95%, 30-40%, 30-45%, 30-50%, 30-55%, 30-60%, 30-65%, 30-70%, 30-75%, 30-80%, 30-85%, 30-90%, 30-95%, 35-45%, 35-50%, 35-55%, 35-60%, 35-65%, 35-70%, 35-75%, 35-80%, 35-85%, 35-90%, 35-95%, 40-50%, 40-55%, 40-60%, 40-65%, 40-70%, 40-75%, 40-80%, 40-85%, 40-90%, 40-95%, 45-55%, 45-60%, 45-65%, 45-70%, 45-75%, 45-80%, 45-85%, 45-90%, 45-95%, 50-60%, 50-65%, 50-70%, 50-75%, 50-80%, 50-85%, 50-90%, 50-95%, 55-65%, 55-70%, 55-75%, 55-80%, 55-85%, 55-90%, 55-95%, 60-70%, 60-75%, 60-80%, 60-85%, 60-90%, 60-95%, 65-75%, 65-80%, 65-85%, 65-90%, 65-95%, 70-80%, 70-85%, 70-90%, 70-95%, 75-85%, 75-90%, 75-95%, 80-90%, 80-95%, or 90-95%.

[0365] In some embodiments, the AAV particles of the present disclosure may be used to increase target protein in sensory neurons in order to treat neurological disease. Target protein in sensory neurons may be increased by 5%, 10%, 15%, 20%, 25%, 30%, 35%, 40%, 45%, 50%, 55%, 60%, 65%, 70%, 75%, 80%, 85%, 90%, 95%, or more than 95%, 5-15%, 5-20%, 5-25%, 5-30%, 5-35%, 5-40%, 5-45%, 5-50%, 5-55%, 5-60%, 5-65%, 5-70%, 5-75%, 5-80%, 5-85%, 5-90%, 5-95%, 10-20%, 10-25%, 10-30%, 10-35%, 10-40%, 10-45%, 10-50%, 10-55%, 10-60%, 10-65%, 10-70%, 10-75%, 10-80%, 10-85%, 10-90%, 10-95%, 15-25%, 15-30%, 15-35%, 15-40%, 15-45%, 15-50%, 15-55%, 15-60%, 15-65%, 15-70%, 15-75%, 15-80%, 15-85%, 15-90%, 15-95%, 20-30%, 20-35%, 20-40%, 20-45%, 20-50%, 20-55%, 20-60%, 20-65%, 20-70%, 20-75%, 20-80%, 20-85%, 20-90%, 20-95%, 25-35%, 25-40%, 25-45%, 25-50%, 25-55%, 25-60%, 25-65%, 25-70%, 25-75%, 25-80%, 25-85%, 25-90%, 25-95%, 30-40%, 30-45%, 30-50%, 30-55%, 30-60%, 30-65%, 30-70%, 30-75%, 30-80%, 30-85%, 30-90%, 30-95%, 35-45%, 35-50%, 35-55%, 35-60%, 35-65%, 35-70%, 35-75%, 35-80%, 35-85%, 35-90%, 35-95%, 40-50%, 40-55%, 40-60%, 40-65%, 40-70%, 40-75%, 40-80%, 40-85%, 40-90%, 40-95%, 45-55%, 45-60%, 45-65%, 45-70%, 45-75%, 45-80%, 45-85%, 45-90%, 45-95%, 50-60%, 50-65%, 50-70%, 50-75%, 50-80%, 50-85%, 50-90%, 50-95%, 55-65%, 55-70%, 55-75%, 55-80%, 55-85%, 55-90%, 55-95%, 60-70%, 60-75%, 60-80%, 60-85%, 60-90%, 60-95%, 65-75%, 65-80%, 65-85%, 65-90%, 65-95%, 70-80%, 70-85%, 70-90%, 70-95%, 75-85%, 75-90%, 75-95%, 80-90%, 80-95%, or 90-95%.

[0366] In some embodiments, the AAV particles of the present disclosure may be used to increase target protein and reduce symptoms of neurological disease in a subject. The increase of target protein and/or the reduction of symptoms of neurological disease may be, independently, altered (increased for the production of target protein and reduced for the symptoms of neurological disease) by 5%, 10%, 15%, 20%, 25%, 30%, 35%, 40%, 45%, 50%, 55%, 60%, 65%, 70%, 75%, 80%, 85%, 90%, 95%, or more than 95%, 5-15%, 5-20%, 5-25%, 5-30%, 5-35%, 5-40%, 5-45%, 5-50%, 5-55%, 5-60%, 5-65%, 5-70%, 5-75%, 5-80%, 5-85%, 5-90%, 5-95%, 10-20%, 10-255%, 10-30%, 10-35%, 10-40%, 10-45%, 10-50%, 10-55%, 10-60%, 10-65%, 10-70%, 10-75%, 10-80%, 10-85%, 10-90%, 10-95%, 15-25%, 15-30%, 15-35%, 15-40%, 15-45%, 15-50%, 15-55%, 15-60%, 15-65%, 15-70%, 15-75%, 15-80%, 15-85%, 15-90%, 15-95%, 20-30%, 20-35%, 20-40%, 20-45%, 20-50%, 20-55%, 20-60%, 20-65%, 20-70%, 20-75%, 20-80%, 20-85%, 20-90%, 20-95%, 25-35%, 25-40%, 25-45%, 25-50%, 25-55%, 25-60%, 25-65%, 25-70%, 25-75%, 25-80%, 25-85%, 25-90%, 25-95%, 30-40%, 30-45%, 30-50%, 30-55%, 30-60%, 30-65%, 30-70%, 30-75%, 30-80%, 30-85%, 30-90%, 30-95%, 35-45%, 35-50%, 35-55%, 35-60%, 35-65%, 35-70%, 35-75%, 35-80%, 35-85%, 35-90%, 35-95%, 40-50%, 40-55%, 40-60%, 40-65%, 40-70%, 40-75%, 40-80%, 40-85%, 40-90%, 40-95%, 45-55%, 45-60%, 45-65%, 45-70%, 45-75%, 45-80%, 45-85%, 45-90%, 45-95%, 50-60%, 50-65%, 50-70%, 50-75%, 50-80%, 50-85%, 50-90%, 50-95%, 55-65%, 55-70%, 55-75%, 55-80%, 55-85%, 55-90%, 55-95%, 60-70%, 60-75%, 60-80%, 60-85%, 60-90%, 60-95%, 65-75%, 65-80%, 65-85%, 65-90%, 65-95%, 70-80%, 70-85%, 70-90%, 70-95%, 75-85%, 75-90%, 75-95%, 80-90%, 80-95%, or 90-95%.

[0367] In certain embodiments, the AAV particles of the present disclosure may be used to reduce the decline of functional capacity and activities of daily living as measured by a standard evaluation system such as, but not limited to, the total functional capacity (TFC) scale.

[0368] In certain embodiments, the AAV particles of the present disclosure may be used to improve performance on any assessment used to measure symptoms of neurological disease. Such assessments include, but are not limited to ADAS-cog (Alzheimer Disease Assessment Scale—cognitive), MMSE (Mini-Mental State Examination), GDS (Geriatric Depression Scale), FAQ (Functional Activities Questionnaire). ADL (Activities of Daily Living), GPCOG (General Practitioner Assessment of Cognition), Mini-Cog, AMTS (Abbreviated Mental Test Score), Clock-drawing test, 6-CIT (6-item Cognitive Impairment Test), TYM (Test Your Memory), MoCa (Montreal Cognitive Assessment). ACE-R (Addenbrookes Cognitive Assessment), MIS (Memory Impairment Screen), BADLS (Bristol Activities of Daily Living Scale), Barthel Index, Functional Independence Measure, Instrumental Activities of Daily Living, IQCODE (informant Questionnaire on Cognitive Decline in the Elderly), Neuropsychiatric Inventory. The Cohen-Mansfield Agitation Inventory, BEHAVE-AD, EuroQol, Short Form-36 and/or MBR Caregiver Strain Instrument, or any of the other tests as described in Sheehan B (Ther Adv Neurol Disord. 5(6):349-358 (2012)), the contents of which are herein incorporated by reference in their entirety.

[0369] In some embodiments, the present composition is administered as a solo therapeutic or as combination therapeutic for the treatment of neurological disease.

[0370] The AAV particles encoding the target protein may be used in combination with one or more other therapeutic agents. By “in combination with,” it is not intended to imply that the agents must be administered at the same time and/or formulated for delivery together, although these methods of delivery are within the scope of the present disclosure. Compositions can be administered concurrently with, prior to, or subsequent to, one or more other desired therapeutics or medical procedures. In general, each agent will be administered at a dose and/or on a time schedule determined for that agent.

[0371] Therapeutic agents that may be used in combination with the AAV particles of the present disclosure can be small molecule compounds which are antioxidants, anti-inflammatory agents, anti-apoptosis agents, calcium regulators, antiglutamatergic agents, structural protein inhibitors, compounds involved in muscle function, and compounds involved in metal ion regulation. As a non-limiting example, the combination therapy may be in combination with one or more neuroprotective agents such as small molecule compounds, growth factors and hormones which have been tested for their neuroprotective effect on motor neuron degeneration.

[0372] Compounds tested for treating neurological disease which may be used in combination with the AAV particles described herein include, but are not limited to, cholinesterase inhibitors (donepezil, rivastigmine, galantamine), NMDA receptor antagonists such as memantine, anti-psychotics, anti-depressants, anti-convulsants (e.g., sodium valproate and levetiracetam for myoclonus), secretase inhibitors, amyloid aggregation inhibitors, copper or zinc modulators, BACE inhibitors, inhibitors of tau aggregation, such as Methylene blue, phenothiazines, anthraquinones, n-phenylamines or rhodamines, microtubule stabilizers such as NAP, taxol or paclitaxel, kinase or phosphatase inhibitors such as those targeting GSK3β (lithium) or PP2A, immunization with Aβ peptides or tau phospho-epitopes, anti-tau or anti-amyloid antibodies, dopamine-depleting agents (e.g., tetrabenazine for chorea), benzodiazepines (e.g., clonazepam for myoclonus, chorea, dystonia, rigidity, and/or spasticity), amino acid precursors of dopamine (e.g., levodopa for rigidity), skeletal muscle relaxants (e.g., baclofen, tizanidine for rigidity and/or spasticity), inhibitors for acetycholine release at the neuromuscular junction to cause muscle paralysis (e.g., botulinum toxin for bruxism and/or dystonia), atypical neuroleptics (e.g., olanzapine and quetiapine for psychosis and/or irritability, risperidone, sulpiride and haloperidol for psychosis, chora and/or irritability, clozapine for treatment-resistant psychosis, aripiprazole for psychosis with prominent negative symptoms), selective serotonin reuptake inhibitors (SSRIs) (e.g., citalopram, fluoxetine, paroxetine, sertraline, mirtazapine, venlafaxine for depression, anxiety, obsessive compulsive behavior and/or irritability), hypnotics (e.g., xopiclone and/or zolpidem for altered sleep-wake cycle), anticonvulsants (e.g., sodium valproate and carbamazepine for mania or hypomania) and mood stabilizers (e.g., lithium for mania or hypomania).

[0373] Neurotrophic factors may be used in combination therapy with the AAV particles of the present disclosure for treating neurological disease. Generally, a neurotrophic factor is defined as a substance that promotes survival, growth, differentiation, proliferation and/or maturation of a neuron, or stimulates increased activity of a neuron. In some embodiments, the present methods further comprise delivery of one or more trophic factors into the subject in need of treatment. Trophic factors may include, but are not limited to, IGF-I, GDNF, BDNF, CTNF, VEGF, Colivelin, Xaliproden, Thyrotrophin-releasing hormone and ADNF, and variants thereof.

[0374] In one aspect, the AAV particle described herein may be co-administered with AAV particles expressing neurotrophic factors such as AAV-IGF-I (See e.g., Vincent et al., Neuromolecular medicine, 2004, 6, 79-85; the contents of which are incorporated herein by reference in their entirety) and AAV-GDNF (See e.g., Wang et al., J Neurosci., 2002, 22, 6920-6928; the contents of which are incorporated herein by reference in their entirety).

[0375] In certain embodiments, administration of the AAV particles to a subject will increase the expression of a target protein in a subject and the increase of the expression of the target protein will reduce the effects and/or symptoms of neurological disease in a subject.

[0376] As a non-limiting example, the target protein may be an antibody, or fragment thereof.

AAV Particles Comprising RNAi agents or Modulatory Polynucleotides

[0377] Provided in the present disclosure are methods for introducing the AAV particles of the disclosure, comprising a viral genome with a nucleic acid sequence encoding one or more siRNA molecules into cells, the method comprising introducing into said cells any of the vectors in an amount sufficient for degradation of a target mRNA to occur, thereby activating target-specific RNAi in the cells. In some aspects, the cells may be neurons such as but not limited to, motor, hippocampal, entorhinal, thalamic, cortical, sensory, sympathetic, or parasympathetic neurons, and glial cells such as astrocytes, microglia, and/or oligodendrocytes.

[0378] Disclosed herein are methods for treating neurological diseases associated with dysfunction of a target protein in a subject in need of treatment. The method optionally comprises administering to the subject a therapeutically effective amount of a composition comprising AAV particles comprising a viral genome with a nucleic acid sequence encoding one or more siRNA molecules. As a non-limiting example, the siRNA molecules can silence target gene expression, inhibit target protein production, and reduce one or more symptoms of neurological disease in the subject such that the subject is therapeutically treated.

[0379] In some embodiments, the composition comprising the AAV particles of the present disclosure comprising a viral genome encoding one or more siRNA molecules comprise an AAV capsid that allows for enhanced transduction of CNS and/or PNS cells after intravenous administration.

[0380] In some embodiments, the composition comprising the AAV particles of the present disclosure with a viral genome encoding at least one siRNA molecule is administered to the central nervous system of the subject. In other embodiments, the composition comprising the AAV particles of the present disclosure is administered to a tissue of a subject (e.g., putamen, thalamus or cortex of the subject).

[0381] In certain embodiments, the composition comprising the AAV particles of the disclosure, comprising a viral genome with a nucleic acid sequence encoding one or more siRNA molecules is administered to the central nervous system of the subject via systemic administration. In certain embodiments, the systemic administration is intravenous injection.

[0382] In certain embodiments, the composition comprising the AAV particles of the disclosure comprising a viral genome with a nucleic acid sequence encoding one or more siRNA molecules is administered to the central nervous system of the subject via intraparenchymal injection. Non-limiting examples of intraparenchymal injections include intraputamenal, intracortical, intrathalamic, intrastriatal, intrahippocampal or into the entorhinal cortex.

[0383] In certain embodiments, the composition comprising the AAV particles comprising a viral genome with a nucleic acid sequence encoding one or more siRNA molecules is administered to the central nervous system of the subject via intraparenchymal injection and intravenous injection.

[0384] In certain embodiments, the AAV particles comprising a viral genome with a nucleic acid sequence encoding one or more siRNA molecules may be delivered into specific types or targeted cells, including, but not limited to, thalamic, hippocampal, entorhinal, cortical, motor, sensory, excitatory, inhibitory, sympathetic, or parasympathetic neurons; glial cells including oligodendrocytes, astrocytes and microglia; and/or other cells surrounding neurons such as T cells.

[0385] In certain embodiments, the AAV particles comprising a viral genome with a nucleic acid sequence encoding one or more siRNA molecules may be delivered to neurons in the putamen, thalamus, and/or cortex.

[0386] In certain embodiments, the AAV particles comprising a viral genome with a nucleic acid sequence encoding one or more siRNA molecules may be used as a therapy for neurological disease.

[0387] In certain embodiments, the AAV particles comprising a viral genome with a nucleic acid sequence encoding one or more siRNA molecules may be used as a therapy for tauopathies.

[0388] In certain embodiments, the AAV particles comprising a viral genome with a nucleic acid sequence encoding one or more siRNA molecules may be used as a therapy for Alzheimer's Disease.

[0389] In certain embodiments, the AAV particles comprising a viral genome with a nucleic acid sequence encoding one or more siRNA molecules may be used as a therapy for Amyotrophic Lateral Sclerosis.

[0390] In certain embodiments, the AAV particles comprising a viral genome with a nucleic acid sequence encoding one or more siRNA molecules may be used as a therapy for Huntington's Disease.

[0391] In certain embodiments, the AAV particles comprising a viral genome with a nucleic acid sequence encoding one or more siRNA molecules may be used as a therapy for Parkinson's Disease.

[0392] In certain embodiments, the AAV particles comprising a viral genome with a nucleic acid sequence encoding one or more siRNA molecules may be used as a therapy for Friedreich's Ataxia.

[0393] In certain embodiments, the administration of AAV particles comprising a viral genome with a nucleic acid sequence encoding one or more siRNA molecules to a subject may lower target protein levels in a subject. The target protein levels may be lowered by about 30%, 40%, 50%, 60%, 70%, 80%, 85%, 90%, 95% and 100%, or at least 20-30%, 20-40%, 20-50%, 20-60%, 20-70%, 20-80%, 20-90%, 20-95%, 20-100%, 30-40%, 30-50%, 30-60%, 30-70%, 30-80%, 30-90%, 30-95%, 30-100%, 40-50%, 40-60%, 40-70%, 40-80%, 40-90%, 40-95%, 40-100%, 50-60%, 50-70%, 50-80%, 50-90%, 50-95%, 50-100%, 60-70%, 60-80%, 60-90%, 60-95%, 60-100%, 70-80%, 70-90%, 70-95%, 70-100%, 80-90%, 80-95%, 80-100%, 90-95%, 90-100% or 95-100% in a subject such as, but not limited to, the CNS, a region of the CNS, or a specific cell of the CNS of a subject. As a non-limiting example, the AAV particles may lower the protein levels of a target protein by at least 50%. As a non-limiting example, the AAV particles may lower the protein levels of a target protein by at least 40%.

[0394] In certain embodiments, the administration of AAV particles comprising a viral genome with a nucleic acid sequence encoding one or more siRNA molecules to a subject may lower the expression of a target protein in a subject. The expression of a target protein may be lowered by about 30%, 40%, 50%, 60%, 70%, 80%, 85%, 90%, 95% and 100%, or at least 20-30%, 20-40%, 20-50%, 20-60%, 20-70%, 20-80%, 20-90%, 20-95%, 20-100%, 30-40%, 30-50%, 30-60%, 30-70%, 30-80%, 30-90%, 30-95%, 30-100%, 40-50%, 40-60%, 40-70%, 40-80%, 40-90%, 40-95%, 40-100%, 50-60%, 50-70%, 50-80%, 50-90%, 50-95%, 50-100%, 60-70%, 60-80%, 60-90%, 60-95%, 60-100%, 70-80%, 70-90%, 70-95%, 70-100%, 80-90%, 80-95%, 80-100%, 90-950%, 90-100% or 95-100% in a subject such as, but not limited to, the CNS, a region of the CNS, or a specific cell of the CNS of a subject. As a non-limiting example, the AAV particles may lower the expression of a target protein by at least 50%. As a non-limiting example, the AAV particles may lower the expression of a target protein by at least 40%.

[0395] In certain embodiments, the administration of AAV particles comprising a viral genome with a nucleic acid sequence encoding one or more siRNA molecules to a subject may lower the expression of a target protein in the CNS of a subject. The expression of a target protein may be lowered by about 300%, 40%, 50%, 60%, 70%, 80%, 85%, 90%, 95% and 100%, or at least 20-30%, 20-40%, 20-50%, 20-60%, 20-70%, 20-80%, 20-90%, 20-95%, 20-100%, 30-40%, 30-50%, 30-60%, 30-70%, 30-80%, 30-90%, 30-95%, 30-100%, 40-50%, 40-60%, 40-70%, 40-80%, 40-90%, 40-95%, 40-100%, 50-60%, 50-70%, 50-80%, 50-90%, 50-95%, 50-100%, 60-70%, 60-80%, 60-90%, 60-95%, 60-100%, 70-80%, 70-90%, 70-95%, 70-100%, 80-90%, 80-95%, 80-100%, 90-95%, 90-100% or 95-100% in a subject such as, but not limited to, the CNS, a region of the CNS, or a specific cell of the CNS of a subject. As a non-limiting example, the AAV particles may lower the expression of a target protein by at least 50%. As a non-limiting example, the AAV particles may lower expression of a target protein by at least 40%.

[0396] In certain embodiments, the AAV particles comprising a viral genome with a nucleic acid sequence encoding one or more siRNA molecules may be used to suppress a target protein in astrocytes in order to treat neurological disease. Target protein in astrocytes may be suppressed by 5%, 10%, 15%, 20%, 25%, 30%, 35%, 40%, 45%, 50%, 55%, 60%, 65%, 70%, 75%, 80%, 85%, 90%, 95%, or more than 95%, 5-15%, 5-20%, 5-25%, 5-30%, 5-35%, 5-40%, 5-45%, 5-50%, 5-55%, 5-60%, 5-65%, 5-70%, 5-75%, 5-80%, 5-85%, 5-90%, 5-95%, 10-20%, 10-25%, 10-30%, 10-35%, 10-40%, 10-45%, 10-50%, 10-55%, 10-60%, 10-65%, 10-70%, 10-75%, 10-80%, 10-85%, 10-90%, 10-95%, 15-25%, 15-30%, 15-35%, 15-40%, 15-45%, 15-50%, 15-55%, 15-60%, 15-65%, 15-70%, 15-75%, 15-80%, 15-85%, 15-90%, 15-95%, 20-30%, 20-35%, 20-40%, 20-45%, 20-50%, 20-55%, 20-60%, 20-65%, 20-70%, 20-75%, 20-80%, 20-85%, 20-90%, 20-95%, 25-35%, 25-40%, 25-45%, 25-50%, 25-55%, 25-60%, 25-65%, 25-70%, 25-75%, 25-80%, 25-85%, 25-90%, 75-95%, 30-40%, 30-45%, 30-50%, 30-55%, 30-60%, 30-65%, 30-70%, 30-75%, 30-80%, 30-85%, 30-90%, 30-95%, 35-45%, 35-50%, 35-55%, 35-60%, 35-65%, 35-70%, 35-75%, 35-80%, 35-85%, 35-90%, 35-95%, 40-50%, 40-55%, 40-60%, 40-65%, 40-70%, 40-75%, 40-80%, 40-85%, 40-90%, 40-95%, 45-55%, 45-60%, 45-65%, 45-70%, 45-75%, 45-80%, 45-85%, 45-90%, 45-95%, 50-60%, 50-65%, 50-70%, 50-75%, 50-80%, 50-85%, 50-90%, 50-95%, 55-65%, 55-70%, 55-75%, 55-80%, 55-85%, 55-90%, 55-95%, 60-70%, 60-75%, 60-80%, 60-85%, 60-90%, 60-95%, 65-75%, 65-80%, 65-85%, 65-90%, 65-95%, 70-80%, 70-85%, 70-90%, 70-95%, 75-85%, 75-90%, 75-95%, 80-90%, 80-95%, or 90-95%. Target protein in astrocytes may be reduced by 5%, 10%, 15%, 20%, 25%, 30%, 35%, 40%, 45%, 50%, 55%, 60%, 65%, 70%, 75%, 80%, 85%, 90%, 95%, or more than 95%, 5-15%, 5-20%, 5-25%, 5-30%, 5-35%, 5-40%, 5-45%, 5-50%, 5-55%, 5-60%, 5-65%, 5-70%, 5-75%, 5-80%, 5-85%, 5-90%, 5-95%, 10-20%, 10-25%, 10-30%, 10-35%, 10-40%, 10-45%, 10-50%, 10-55%, 10-60%, 10-65%, 10-70%, 10-75%, 10-80%, 10-85%, 10-90%, 10-95%, 15-25%, 15-30%, 15-35%, 15-40%, 15-45%, 15-50%, 15-55%, 15-60%, 15-65%, 15-70%, 15-75%, 15-80%, 15-85%, 15-90%, 15-95%, 20-30%, 20-35%, 20-40%, 20-45%, 20-50%, 20-55%, 70-60%, 20-65%, 20-70%, 20-75%, 20-80%, 20-85%, 20-90%, 20-95%, 25-35%, 25-40%, 25-45%, 25-50%, 25-55%, 25-60%, 25-65%, 25-70%, 25-75%, 25-80%, 25-85%, 25-90%, 25-95%, 30-40%, 30-45%, 30-50%, 30-55%, 30-60%, 30-65%, 30-70%, 30-75%, 30-80%, 30-85%, 30-90%, 30-95%, 35-45%, 35-50%, 35-55%, 35-60%, 35-65%, 35-70%, 35-75%, 35-80%, 35-85%, 35-90%, 35-95%, 40-50%, 40-55%, 40-60%, 40-65%, 40-70%, 40-75%, 40-80%, 40-85%, 40-90%, 40-95%, 45-55%, 45-60%, 45-65%, 45-70%, 45-75%, 45-80%, 45-85%, 45-90%, 45-95%, 50-60%, 50-65%, 50-70%, 50-75%, 50-80%, 50-85%, 50-90%, 50-95%, 55-65%, 55-70%, 55-75%, 55-80%, 55-85%, 55-90%, 55-95%, 60-70%, 60-75%, 60-80%, 60-85%, 60-90%, 60-95%, 65-75%, 65-80%, 65-85%, 65-90%, 65-95%, 70-80%, 70-85%, 70-90%, 70-95%, 75-85%, 75-90%, 75-95%, 80-90%, 80-95%, or 90-95%.

[0397] In certain embodiments, the AAV particles comprising a viral genome with a nucleic acid sequence encoding one or more siRNA molecules may be used to suppress a target protein in microglia. The suppression of the target protein in microglia may be, independently, suppressed by 5%, 10%, 15%, 20%, 25%, 30%, 35%, 40%, 45%, 50%, 55%, 60%, 65%, 70%, 75%, 80%, 85%, 90%, 95%, or more than 95%, 5-15%, 5-20%, 5-25%, 5-30%, 5-35%, 5-40%, 5-45%, 5-50%, 5-55%, 5-60%, 5-65%, 5-70%, 5-75%, 5-80%, 5-85%, 5-90%, 5-95%, 10-20%, 10-25%, 10-30%, 10-35%, 10-40%, 10-45%, 10-50%, 10-55%, 10-60%, 10-65%, 10-70%, 10-75%, 10-80%, 10-85%, 10-90%, 10-95%, 15-25%, 15-30%, 15-35%, 15-40%, 15-45%, 15-50%, 15-55%, 15-60%, 15-65%, 15-70%, 15-75%, 15-80%, 15-85%, 15-90%, 15-95%, 20-30%, 20-35%, 20-40%, 20-45%, 20-50%, 20-55%, 20-60%, 20-65%, 20-70%, 20-75%, 20-80%, 20-85%, 20-90%, 20-95%, 25-35%, 25-40%, 25-45%, 25-50%, 25-55%, 25-60%, 25-65%, 25-70%, 25-75%, 25-80%, 25-85%, 25-90%, 25-95%, 30-40%, 30-45%, 30-50%, 30-55%, 30-60%, 30-65%, 30-70%, 30-75%, 30-80%, 30-85%, 30-90%, 30-95%, 35-45%, 35-50%, 35-55%, 35-60%, 35-65%, 35-70%, 35-75%, 35-80%, 35-85%, 35-90%, 35-95%, 40-50%, 40-55%, 40-60%, 40-65%, 40-70%, 40-75%, 40-80%, 40-85%, 40-90%, 40-95%, 45-55%, 45-60%, 45-65%, 45-70%, 45-75%, 45-80%, 45-85%, 45-90%, 45-95%, 50-60%, 50-65%, 50-70%, 50-75%, 50-80%, 50-85%, 50-90%, 50-95%, 55-65%, 55-70%, 55-75%, 55-80%, 55-85%, 55-90%, 55-95%, 60-70%, 60-75%, 60-80%, 60-85%, 60-90%, 60-95%, 65-75%, 65-80%, 65-85%, 65-90%, 65-95%, 70-80%, 70-85%, 70-90%, 70-95%, 75-85%, 75-90%, 75-95%, 80-90%, 80-95%, or 90-95%. The reduction may be 5%, 10%, 15%, 20%, 25%, 30%, 35%, 40%, 45%, 50%, 55%, 60%, 65%, 70%, 75%, 80%, 85%, 90%, 95%, or more than 95%, 5-15%, 5-20%, 5-25%, 5-30%, 5-35%, 5-40%, 5-45%, 5-50%, 5-55%, 5-60%, 5-65%, 5-70%, 5-75%, 5-80%, 5-85%, 5-90%, 5-95%, 10-20%, 10-25%, 10-30%, 10-35%, 10-40%, 10-45%, 10-50%, 10-55%, 10-60%, 10-65%, 10-70%, 10-75%, 10-80%, 10-85%, 10-90%, 10-95%, 15-25%, 15-30%, 15-35%, 15-40%, 15-45%, 15-50%, 15-55%, 15-60%, 15-65%, 15-70%, 15-75%, 15-80%, 15-85%, 15-90%, 15-95%, 20-30%, 20-35%, 20-40%, 20-45%, 20-50%, 20-55%, 20-60%, 20-65%, 20-70%, 20-75%, 20-80%, 20-85%, 20-90%, 20-95%, 25-35%, 25-40%, 25-45%, 25-50%, 25-55%, 25-60%, 25-65%, 25-70%, 25-75%, 25-80%, 25-85%, 25-90%, 25-95%, 30-40%, 30-45%, 30-50%, 30-55%, 30-60%, 30-65%, 30-70%, 30-75%, 30-80%, 30-85%, 30-90%, 30-95%, 35-45%, 35-50%, 35-55%, 35-60%, 35-65%, 35-70%, 35-75%, 35-80%, 35-85%, 35-90%, 35-95%, 40-50%, 40-55%, 40-60%, 40-65%, 40-70%, 40-75%, 40-80%, 40-85%, 40-90%, 40-95%, 45-55%, 45-60%, 45-65%, 45-70%, 45-75%, 45-80%, 45-85%, 45-90%, 45-95%, 50-60%, 50-65%, 50-70%, 50-75%, 50-80%, 50-85%, 50-90%, 50-95%, 55-65%, 55-70%, 55-75%, 55-80%, 55-85%, 55-90%, 55-95%, 60-70%, 60-75%, 60-80%, 60-85%, 60-90%, 60-95%, 65-75%, 65-80%, 65-85%, 65-90%, 65-95%, 70-80%, 70-85%, 70-90%, 70-95%, 75-85%, 75-90%, 75-95%, 80-90%, 80-95%, or 90-95%.

[0398] In certain embodiments, the AAV particles comprising a viral genome with a nucleic acid sequence encoding one or more siRNA molecules may be used to suppress target protein in cortical neurons. The suppression of a target protein in cortical neurons may be, independently, suppressed by 5%, 10%, 15%, 20%, 25%, 30%, 35%, 40%, 45%, 50%, 55%, 60%, 65%, 70%, 75%, 80%, 85%, 90%, 95%, or more than 95%, 5-15%, 5-20%, 5-25%, 5-30%, 5-35%, 5-40%, 5-45%, 5-50%, 5-55%, 5-60%, 5-65%, 5-70%, 5-75%, 5-80%, 5-85%, 5-90%, 5-95%, 10-20%, 10-25%, 10-30%, 10-35%, 10-40%, 10-45%, 10-50%, 10-55%, 10-60%, 10-65%, 10-70%, 10-75%, 10-80%, 10-85%, 10-90%, 10-95%, 15-25%, 15-30%, 15-35%, 15-40%, 15-45%, 15-50%, 15-55%, 15-60%, 15-65%, 15-70%, 15-75%, 15-80%, 15-85%, 15-90%, 15-95%, 20-30%, 20-35%, 20-40%, 20-45%, 20-50%, 20-55%, 20-60%, 20-65%, 20-70%, 20-75%, 20-80%, 20-85%, 20-90%, 20-95%, 25-35%, 25-40%, 25-45%, 25-50%, 25-55%, 25-60%, 25-65%, 25-70%, 25-75%, 25-80%, 25-85%, 25-90%, 25-95%, 30-40%, 30-45%, 30-50%, 30-55%, 30-60%, 30-65%, 30-70%, 30-75%, 30-80%, 30-85%, 30-90%, 30-95%, 35-45%, 35-50%, 35-55%, 35-60%, 35-65%, 35-70%, 35-75%, 35-80%, 35-85%, 35-90%, 35-95%, 40-50%, 40-55%, 40-60%, 40-65%, 40-70%, 40-75%, 40-80%, 40-85%, 40-90%, 40-95%, 45-55%, 45-60%, 45-65%, 45-70%, 45-75%, 45-80%, 45-85%, 45-90%, 45-95%, 50-60%, 50-65%, 50-70%, 50-75%, 50-80%, 50-85%, 50-90%, 50-95%, 55-65%, 55-70%, 55-75%, 55-80%, 55-85%, 55-90%, 55-95%, 60-70%, 60-75%, 60-80%, 60-85%, 60-90%, 60-95%, 65-75%, 65-80%, 65-85%, 65-90%, 65-95%, 70-80%, 70-85%, 70-90%, 70-95%, 75-85%, 75-90%, 75-95%, 80-90%, 80-95%, or 90-95%. The reduction may be 5%, 10%, 15%, 20%, 25%, 30%, 35%, 40%, 45%, 50%, 55%, 60%, 65%, 70%, 75%, 80%, 85%, 90%, 95%, or more than 95%, 5-15%, 5-20%, 5-25%, 5-30%, 5-35%, 5-40%, 5-45%, 5-50%, 5-55%, 5-60%, 5-65%, 5-70%, 5-75%, 5-80%, 5-85%, 5-90%, 5-95%, 10-20%, 10-25%, 10-30%, 10-35%, 10-40%, 10-45%, 10-50%, 10-55%, 10-60%, 10-65%, 10-70%, 10-75%, 10-80%, 10-85%, 10-90%, 10-95%, 15-25%, 15-30%, 15-35%, 15-40%, 15-45%, 15-50%, 15-55%, 15-60%, 15-65%, 15-70%, 15-75%, 15-80%, 15-85%, 15-90%, 15-95%, 20-30%, 20-35%, 20-40%, 20-45%, 20-50%, 20-55%, 20-60%, 20-65%, 20-70%, 20-75%, 20-80%, 20-85%, 20-90%, 20-95%, 25-35%, 25-40%, 25-45%, 25-50%, 25-55%, 25-60%, 25-65%, 25-70%, 25-75%, 25-80%, 25-85%, 25-90%, 25-95%, 30-40%, 30-45%, 30-50%, 30-55%, 30-60%, 30-65%, 30-70%, 30-75%, 30-80%, 30-85%, 30-90%, 30-95%, 35-45%, 35-50%, 35-55%, 35-60%, 35-65%, 35-70%, 35-75%, 35-80%, 35-85%, 35-90%, 35-95%, 40-50%, 40-55%, 40-60%, 40-65%, 40-70%, 40-75%, 40-80%, 40-85%, 40-90%, 40-95%, 45-55%, 45-60%, 45-65%, 45-70%, 45-75%, 45-80%, 45-85%, 45-90%, 45-95%, 50-60%, 50-65%, 50-70%, 50-75%, 50-80%, 50-85%, 50-90%, 50-95%, 55-65%, 55-70%, 55-75%, 55-80%, 55-85%, 55-90%, 55-95%, 60-70%, 60-75%, 60-80%, 60-85%, 60-90%, 60-95%, 65-75%, 65-80%, 65-85%, 65-90%, 65-95%, 70-80%, 70-85%, 70-90%, 70-95%, 75-85%, 75-90%, 75-95%, 80-90%, 80-95%, or 90-95%.

[0399] In certain embodiments, the AAV particles comprising a viral genome with a nucleic acid sequence encoding one or more siRNA molecules may be used to suppress a target protein in hippocampal neurons. The suppression of a target protein in the hippocampal neurons may be, independently, suppressed by 5%, 10%, 15%, 20%, 25%, 30%, 35%, 40%, 45%, 50%, 55%, 60%, 65%, 70%, 75%, 80%, 85%, 90%, 95%, or more than 95%, 5-15%, 5-20%, 5-25%, 5-30%, 5-35%, 5-40%, 5-45%, 5-50%, 5-55%, 5-60%, 5-65%, 5-70%, 5-75%, 5-80%, 5-85%, 5-90%, 5-95%, 10-20%, 10-25%, 10-30%, 10-35%, 10-40%, 10-45%, 10-50%, 10-55%, 10-60%, 10-65%, 10-70%, 10-75%, 10-80%, 10-85%, 10-90%, 10-95%, 15-25%, 15-30%, 15-35%, 15-40%, 15-45%, 15-50%, 15-55%, 15-60%, 15-65%, 15-70%, 15-75%, 15-80%, 15-85%, 15-90%, 15-95%, 20-30%, 20-35%, 20-40%, 20-45%, 20-50%, 20-55%, 20-60%, 20-65%, 20-70%, 20-75%, 20-80%, 20-85%, 20-90%, 20-95%, 25-35%, 25-40%, 25-45%, 25-50%, 25-55%, 25-60%, 25-65%, 25-70%, 25-75%, 25-80%, 25-85%, 25-90%, 25-95%, 30-40%, 30-45%, 30-50%, 30-55%, 30-60%, 30-65%, 30-70%, 30-75%, 30-80%, 30-85%, 30-90%, 30-95%, 35-45%, 35-50%, 35-55%, 35-60%, 35-65%, 35-70%, 35-75%, 35-80%, 35-85%, 35-90%, 35-95%, 40-50%, 40-55%, 40-60%, 40-65%, 40-70%, 40-75%, 40-80%, 40-85%, 40-90%, 40-95%, 45-55%, 45-60%, 45-65%, 45-70%, 45-75%, 45-80%, 45-85%, 45-90%, 45-95%, 50-60%, 50-65%, 50-70%, 50-75%, 50-80%, 50-85%, 50-90%, 50-95%, 55-65%, 55-70%, 55-75%, 55-80%, 55-85%, 55-90%, 55-95%, 60-70%, 60-75%, 60-80%, 60-85%, 60-90%, 60-95%, 65-75%, 65-80%, 65-85%, 65-90%, 65-95%, 70-80%, 70-85%, 70-90%, 70-95%, 75-85%, 75-90%, 75-95%, 80-90%, 80-95%, or 90-95%. The reduction may be 5%, 10%, 15%, 20%, 25%, 30%, 35%, 40%, 45%, 50%, 55%, 60%, 65%, 70%, 75%, 80%, 85%, 90%, 95%, or more than 95%, 5-15%, 5-20%, 5-25%, 5-30%, 5-35%, 5-40%, 5-45%, 5-50%, 5-55%, 5-60%, 5-65%, 5-70%, 5-75%, 5-80%, 5-85%, 5-90%, 5-95%, 10-20%, 10-25%, 10-30%, 10-35%, 10-40%, 10-45%, 10-50%, 10-55%, 10-60%, 10-65%, 10-70%, 10-75%, 10-80% 10-85% 10-90%, 10-95%, 15-25%, 15-30%, 15-35%, 15-40%, 15-45%, 15-50%, 15-55%, 15-60%, 15-65%, 15-70%, 15-75%, 15-80%, 15-85%, 15-90%, 15-95%, 20-30%, 20-35%, 20-40%, 20-45%, 20-50%, 20-55%, 20-60%, 20-65%, 20-70%, 20-75%, 20-80%, 20-85%, 20-90%, 20-95%, 25-35%, 25-40%, 25-45%, 25-50%, 25-55%, 25-60%, 25-65%, 25-70%, 25-75%, 25-80%, 25-85%, 25-90%, 25-95%, 30-40%, 30-45%, 30-50%, 30-55%, 30-60%, 30-65%, 30-70%, 30-75%, 30-80%, 30-85%, 30-90%, 30-95%, 35-45%, 35-50%, 35-55%, 35-60%, 35-65%, 35-70%, 35-75%, 35-80%, 35-85%, 35-90%, 35-95%, 40-50%, 40-55% 40-60% 40-65%, 40-70%, 40-75%, 40-80%, 40-85%, 40-90%, 40-95%, 45-55%, 45-60%, 45-65%, 45-70%, 45-75%, 45-80%, 45-85%, 45-90%, 45-95%, 50-60%, 50-65%, 50-70%, 50-75%, 50-80%, 50-85%, 50-90%, 50-95%, 55-65%, 55-70%, 55-75%, 55-80%, 55-85%, 55-90%, 55-95%, 60-70%, 60-75%, 60-80%, 60-85%, 60-90%, 60-95%, 65-75%, 65-80%, 65-85%, 65-90%, 65-95%, 70-80%, 70-85%, 70-90%, 70-95%, 75-85%, 75-90%, 75-95%, 80-90%, 80-95%, or 90-95%.

[0400] In certain embodiments, the AAV particles comprising a viral genome with a nucleic acid sequence encoding one or more siRNA molecules may be used to suppress a target protein in DRG and/or sympathetic neurons. The suppression of a target protein in the DRG and/or sympathetic neurons may be, independently, suppressed by 5%, 10%, 15%, 20%, 25%, 30%, 35%, 40%, 45%, 50%, 55%, 60%, 65%, 70%, 75%, 80%, 85%, 90%, 95%, or more than 95%, 5-15%, 5-20%, 5-25%, 5-30%, 5-35%, 5-40%, 5-45% 5-50%, 5-55%, 5-60%, 5-65%, 5-70%, 5-75%, 5-80%, 5-85%, 5-90%, 5-95%, 10-20%, 10-25%, 10-30%, 10-35%, 10-40%, 10-45%, 10-50%, 10-55%, 10-60%, 10-65%, 10-70%, 10-75%, 10-80%, 10-85%, 10-90%, 10-95%, 15-25%, 15-30%, 15-35%, 15-40%, 15-45%, 15-50%, 15-55%, 15-60%, 15-65%, 15-70%, 15-75%, 15-80%, 15-85%, 15-90%, 15-95%, 20-30%, 20-35%, 20-40%, 20-45%, 20-50%, 20-55%, 20-60%, 20-65%, 20-70%, 20-75%, 20-80%, 20-85%, 20-90%, 20-95%, 25-35%, 25-40%, 25-45%, 25-50%, 25-55%, 25-60%, 25-65%, 25-70%, 25-75%, 25-80%, 25-85%, 25-90%, 25-95%, 30-40%, 30-45%, 30-50%, 30-55%, 30-60%, 30-65%, 30-70%, 30-75%, 30-80%, 30-85%, 30-90%, 30-95%, 35-45%, 35-50%, 35-55%, 35-60%, 35-65%, 35-70%, 35-75%, 35-80%, 35-85%, 35-90%, 35-95%, 40-50%, 40-55%, 40-60%, 40-65%, 40-70%, 40-75%, 40-80%, 40-85%, 40-90%, 40-95%, 45-55%, 45-60%, 45-65%, 45-70%, 45-75%, 45-80%, 45-85%, 45-90%, 45-95%, 50-60%, 50-65%, 50-70%, 50-75%, 50-80%, 50-85%, 50-90%, 50-95%, 55-65%, 55-70%, 55-75%, 55-80%, 55-85%, 55-90%, 55-95%, 60-70%, 60-75%, 60-80%, 60-85%, 60-90%, 60-95%, 65-75%, 65-80%, 65-85%, 65-90%, 65-95%, 70-80%, 70-85%, 70-90%, 70-95%, 75-85%, 75-90%, 75-95%, 80-90%, 80-95%, or 90-95%. The reduction may be 5%, 10%, 15%, 20%, 25%, 30%, 35%, 40%, 45%, 50%, 55%, 60%, 65%, 70%, 75%, 80%, 85%, 90%, 95%, or more than 95%, 5-15%, 5-20%, 5-25%, 5-30%, 5-35%, 5-40%, 5-45%, 5-50%, 5-55%, 5-60%, 5-65%, 5-70%, 5-75%, 5-80%, 5-85%, 5-90%, 5-95%, 10-20%, 10-25%, 10-30%, 10-35%, 10-40%, 10-45%, 10-50%, 10-55%, 10-60%, 10-65%, 10-70%, 10-75%, 10-80%, 10-85%, 10-90%, 10-95%, 15-25%, 15-30%, 15-35%, 15-40%, 15-45%, 15-50%, 15-55%, 15-60%, 15-65%, 15-70%, 15-75%, 15-80%, 15-85%, 15-90%, 15-95%, 20-30%, 20-35%, 20-40%, 20-45%, 20-50%, 20-55%, 20-60%, 20-65%, 20-70%, 20-75%, 20-80%, 20-85%, 20-90%, 20-95%, 25-35%, 25-40%, 25-45%, 25-50%, 25-55%, 25-60%, 25-65%, 25-70%, 25-75%, 25-80%, 25-85%, 25-90%, 25-95%, 30-40%, 30-45%, 30-50%, 30-55%, 30-60%, 30-65%, 30-70%, 30-75%, 30-80%, 30-85%, 30-90%, 30-95%, 35-45%, 35-50%, 35-55%, 35-60%, 35-65%, 35-70%, 35-75%, 35-80%, 35-85%, 35-90%, 35-95%, 40-50%, 40-55%, 40-60%, 40-65%, 40-70%, 40-75%, 40-80%, 40-85%, 40-90%, 40-95%, 45-55%, 45-60%, 45-65%, 45-70%, 45-75%, 45-80%, 45-85%, 45-90%, 45-95%, 50-60%, 50-65%, 50-70%, 50-75%, 50-80%, 50-85%, 50-90%, 50-95%, 55-65%, 55-70%, 55-75%, 55-80%, 55-85%, 55-90%, 55-95%, 60-70%, 60-75%, 60-80%, 60-85%, 60-90%, 60-95%, 65-75%, 65-80%, 65-85%, 65-90%, 65-95%, 70-80%, 70-85%, 70-90%, 70-95%, 75-85%, 75-90%, 75-95%, 80-90%, 80-95%, or 90-95%.

[0401] In certain embodiments, the AAV particles comprising a viral genome with a nucleic acid sequence encoding one or more siRNA molecules may be used to suppress a target protein in sensory neurons in order to treat neurological disease. Target protein in sensory neurons may be suppressed by 5%, 10%, 15%, 20%, 25%, 30%, 35%, 40%, 45%, 50%, 55%, 60%, 65%, 70%, 75%, 80%, 85%, 90%, 95%, or more than 95%, 5-15%, 5-20%, 5-25%, 5-30%, 5-35%, 5-40%, 5-45%, 5-50%, 5-55%, 5-60%, 5-65%, 5-70%, 5-75%, 5-80%, 5-85%, 5-90%, 5-95%, 10-20%, 10-25%, 10-30%, 10-35%, 10-40%, 10-45%, 10-50%, 10-55%, 10-60%, 10-65%, 10-70%0, 10-75%, 10-80%, 10-85%, 10-90%, 10-95%, 15-25%, 15-30%, 15-35%, 15-40%, 15-45%, 15-50%, 15-55%, 15-60%, 15-65%, 15-70%, 15-75%, 15-80%, 15-85%, 15-90%, 15-95%, 20-30%, 20-35%, 20-40%, 20-45%, 20-50%, 20-55%, 20-60%, 20-65%, 20-70%, 20-75%, 20-80%, 20-85%, 20-90%, 20-95%, 25-35%, 25-40%, 25-45%, 25-50%, 25-55%, 25-60%, 25-65%, 25-70%, 25-75%, 25-80%, 25-85%, 25-90%, 25-95%, 30-40%, 30-45%, 30-50%, 30-55%, 30-60%, 30-65%, 30-70%, 30-75%, 30-80%, 30-85%, 30-90%, 30-95%, 35-45%, 35-50%, 35-55%, 35-60%, 35-65%, 35-70%, 35-75%, 35-80%, 35-85%, 35-90%, 35-95%, 40-50%, 40-55%, 40-60%, 40-65%, 40-70%, 40-75%, 40-80%, 40-85%, 40-90%, 40-95%, 45-55%, 45-60%, 45-65%, 45-70%, 45-75%, 45-80%, 45-85%, 45-90%, 45-95%, 50-60%, 50-65%, 50-70%, 50-75%, 50-80%, 50-85%, 50-90%, 50-95%, 55-65%, 55-70%, 55-75%, 55-80%, 55-85%, 55-90%, 55-95%, 60-70%, 60-75%, 60-80%, 60-85%, 60-90%, 60-95%, 65-75%, 65-80%, 65-85%, 65-90%, 65-95%, 70-80%, 70-85%, 70-90%, 70-95%, 75-85%, 75-90%, 75-95%, 80-90%, 80-95%, or 90-95%. Target protein in the sensory neurons may be reduced by 5%, 10%, 15%, 20%, 25%, 30%, 35%, 40%, 45% 50%, 55%, 60% 65%, 70%, 75%, 80%, 85%, 90%, 95%, or more than 95%, 5-15%, 5-20%, 5-25%, 5-30%, 5-35%, 5-40%, 5-45%, 5-50%, 5-55%, 5-60%, 5-65%, 5-70%, 5-75%, 5-80%, 5-85%, 5-90%, 5-95%, 10-20%, 10-25%, 10-30%, 10-35%, 10-40%, 10-45%, 10-50%, 10-55%, 10-60%, 10-65%, 10-70%, 10-75%, 10-80%, 10-85%, 10-90%, 10-95%, 15-25%, 15-30%, 15-35%, 15-40%, 15-45%, 15-50%, 15-55%, 15-60%, 15-65%, 15-70%, 15-75%, 15-80%, 15-85%, 15-90%, 15-95%, 20-30%, 20-35%, 20-40%, 20-45%, 20-50%, 20-55%, 20-60%, 20-65%, 20-70%, 20-75%, 20-80%, 20-85%, 20-90%, 20-95%, 25-35%, 25-40%, 25-45%, 25-50%, 25-55%, 25-60%, 25-65%, 25-70%, 25-75%, 25-80%, 25-85%, 25-90%, 25-95%, 30-40%, 30-45%, 30-50%, 30-55%, 30-60%, 30-65%, 30-70%, 30-75%, 30-80%, 30-85%, 30-90%, 30-95%, 35-45%, 35-50%, 35-55%, 35-60%, 35-65%, 35-70%, 35-75%, 35-80%, 35-85%, 35-90%, 35-95%, 40-50%, 40-55%, 40-60%, 40-65%, 40-70%, 40-75%, 40-80%, 40-85%, 40-90%, 40-95%, 45-55%, 45-60%, 45-65%, 45-70%, 45-75%, 45-80%, 45-85%, 45-90%, 45-95%, 50-60%, 50-65%, 50-70%, 50-75%, 50-80%, 50-85%, 50-90%, 50-95%, 55-65%, 55-70%, 55-75%, 55-80%, 55-85%, 55-90%, 55-95%, 60-70%, 60-75%, 60-80%, 60-85%, 60-90%, 60-95%, 65-75%, 65-80%, 65-85%, 65-90%, 65-95%, 70-80%, 70-85%, 70-90%, 70-95%, 75-85%, 75-90%, 75-95%, 80-90%, 80-95%, or 90-95%.

[0402] In certain embodiments, the AAV particles comprising a viral genome with a nucleic acid sequence encoding one or more siRNA molecules may be used to suppress a target protein and reduce symptoms of neurological disease in a subject. The suppression of target protein and/or the reduction of symptoms of neurological disease may be, independently, reduced or suppressed by 5%, 10%, 15%, 20%, 25%, 30%, 35%, 40%, 45%, 50%, 55%, 60%, 65%, 70%, 75%, 80%, 85% 90%, 95%, or more than 95%, 5-15%, 5-20%, 5-25%, 5-30%, 5-35%, 5-40%, 5-45%, 5-50%, 5-55%, 5-60%, 5-65%, 5-70%, 5-75%, 5-80%, 5-85%, 0.5-90%, 0.5-95%, 10-20%, 10-25%, 10-30%, 10-35%, 10-40%, 10-45%, 10-50%, 10-55%, 10-60%, 10-65%, 10-70%, 10-75%, 10-80%, 10-85%, 10-90%, 10-95%, 15-25%, 15-30%, 15-35%, 15-40%, 15-45%, 15-50%, 15-55%, 15-60%, 15-65%, 15-70%, 15-75%, 15-80%, 15-85%, 15-90%, 15-95%, 20-30%, 20-35%, 20-40%, 20-45%, 20-50%, 20-55%, 20-60%, 20-65%, 20-70%, 20-75%, 20-80%, 20-85%, 20-90%, 20-95%, 25-35%, 25-40%, 25-45%, 25-50%, 25-55%, 25-60%, 25-65%, 25-70%, 25-75%, 25-80%, 25-85%, 25-90%, 25-95%, 30-40%, 30-45%, 30-50%, 30-55%, 30-60%, 30-65%, 30-70%, 30-75%, 30-80%, 30-85%, 30-90%, 30-95%, 35-45%, 35-50%, 35-55%, 35-60%, 35-65%, 35-70%, 35-75%, 35-80%, 35-85%, 35-90%, 35-95%, 40-50%, 40-55%, 40-60%, 40-65%, 40-70%, 40-75%, 40-80%, 40-85%, 40-90%, 40-95%, 45-55%, 45-60%, 45-65%, 45-70%, 45-75%, 45-80%, 45-85%, 45-90%, 45-95%, 50-60%, 50-65%, 50-70%, 50-75%, 50-80%, 50-85%, 50-90%, 50-95%, 55-65%, 55-70%, 55-75%, 55-80%, 55-85%, 55-90%, 55-95%, 60-70%, 60-75%, 60-80%, 60-85%, 60-90%, 60-95%, 65-75%, 65-80%, 65-85%, 65-90%, 65-95%, 70-80%, 70-85%, 70-90%, 70-95%, 75-85%, 75-90%, 75-95%, 80-90%, 80-95%, or 90-95%.

[0403] In certain embodiments, the AAV particles comprising a viral genome with a nucleic acid sequence encoding one or more siRNA molecules may be used to reduce the decline of functional capacity and activities of daily living as measured by a standard evaluation system such as, but not limited to, the total functional capacity (TFC) scale.

[0404] In some embodiments, the present composition is administered as a solo therapeutic or as combination therapeutic for the treatment of neurological disease.

[0405] The AAV particles comprising a viral genome with a nucleic acid sequence encoding one or more siRNA molecules may be used in combination with one or more other therapeutic agents. By “in combination with,” it is not intended to imply that the agents must be administered at the same time and/or formulated for delivery together, although these methods of delivery are within the scope of the present disclosure. Compositions can be administered concurrently with, prior to, or subsequent to, one or more other desired therapeutics or medical procedures. In general, each agent will be administered at a dose and/or on a time schedule determined for that agent.

[0406] Therapeutic agents that may be used in combination with the AAV particles comprising a viral genome with a nucleic acid sequence encoding one or more siRNA molecules can be small molecule compounds which are antioxidants, anti-inflammatory agents, anti-apoptosis agents, calcium regulators, antiglutamatergic agents, structural protein inhibitors, compounds involved in muscle function, and compounds involved in metal ion regulation.

[0407] Compounds tested for treating neurological disease which may be used in combination with the AAV particles comprising a viral genome with a nucleic acid sequence encoding one or more siRNA molecules include, but are not limited to, cholinesterase inhibitors (donepezil, rivastigmine, galantamine), NMDA receptor antagonists such as memantine, anti-psychotics, anti-depressants, anti-convulsants (e.g., sodium valproate and levetiracetam for myoclonus), secretase inhibitors, amyloid aggregation inhibitors, copper or zinc modulators, BACE inhibitors, inhibitors of tau aggregation, such as Methylene blue, phenothiazines, anthraquinones, n-phenylamines or rhodamines, microtubule stabilizers such as NAP, taxol or paclitaxel, kinase or phosphatase inhibitors such as those targeting GSK30 (lithium) or PP2A, immunization with Aβ peptides or tau phospho-epitopes, anti-tau or anti-amyloid antibodies, dopamine-depleting agents (e.g., tetrabenazine for chorea), benzodiazepines (e.g., clonazepam for myoclonus, chorea, dystonia, rigidity, and/or spasticity), amino acid precursors of dopamine (e.g., levodopa for rigidity), skeletal muscle relaxants (e.g., baclofen, tizanidine for rigidity and/or spasticity), inhibitors for acetycholine release at the neuromuscular junction to cause muscle paralysis (e.g., botulinum toxin for bruxism and/or dystonia), atypical neuroleptics (e.g., olanzapine and quetiapine for psychosis and/or irritability, risperidone, sulpiride and haloperidol for psychosis, chora and/or irritability, clozapine for treatment-resistant psychosis, aripiprazole for psychosis with prominent negative symptoms), selective serotonin reuptake inhibitors (SSRIs) (e.g., citalopram, fluoxetine, paroxetine, sertraline, mirtazapine, venlafaxine for depression, anxiety, obsessive compulsive behavior and/or irritability), hypnotics (e.g., xopiclone and/or zolpidem for altered sleep-wake cycle), anticonvulsants (e.g., sodium valproate and carbamazepine for mania or hypomania) and mood stabilizers (e.g., lithium for mania or hypomania).

[0408] Neurotrophic factors may be used in combination therapy with the AAV particles comprising a viral genome with a nucleic acid sequence encoding one or more siRNA molecules for treating neurological disease. Generally, a neurotrophic factor is defined as a substance that promotes survival, growth, differentiation, proliferation and/or maturation of a neuron, or stimulates increased activity of a neuron. In some embodiments, the present methods further comprise delivery of one or more trophic factors into the subject in need of treatment. Trophic factors may include, but are not limited to, IGF-I, GDNF, BDNF, CTNF, VEGF, Colivelin, Xaliproden, Thyrotrophin-releasing hormone and ADNF, and variants thereof.

[0409] In one aspect, the AAV particle encoding the nucleic acid sequence for the at least one siRNA duplex targeting the gene of interest may be co-administered with AAV particles expressing neurotrophic factors such as AAV-IGF-I (See e.g., Vincent et al., Neuromolecular medicine, 2004, 6, 79-85; the content of which is incorporated herein by reference in its entirety) and AAV-GDNF (See e.g., Wang et al., J Neurosci., 2002, 22, 6920-6928; the contents of which are incorporated herein by reference in their entirety).

[0410] In certain embodiments, administration of the AAV particles to a subject will reduce the expression of a target protein in a subject and the reduction of expression of the target protein will reduce the effects and/or symptoms of neurological disease in a subject.

### IV. Formulation

### Pharmaceutical Compositions

[0411] According to the present disclosure the AAV particles may be prepared as pharmaceutical compositions. As used herein the term “pharmaceutical composition” refers to compositions comprising at least one active ingredient and optionally, one or more pharmaceutically acceptable excipients.

[0412] Relative amounts of the active ingredient (e.g. AAV particle), a pharmaceutically acceptable excipient, and/or any additional ingredients in a pharmaceutical composition in accordance with the present disclosure may vary. Differences in the constitution of a pharmaceutical composition may depend upon the identity, size, and/or condition of the subject being treated, the route by which the composition is to be administered, the nature of the AAV particle composition or the excipient, and/or any other factor. The composition may comprise between 0.0001% and 99% (w/w) of the active ingredient. By way of example, the composition may comprise between 0.00010% and 100%, e.g., between 0.5 and 50%, between 1-30%, between 5-80%, or at least 80% (w/w) active ingredient.

[0413] In certain embodiments, the pharmaceutical composition comprises AAV particles having one type of AAV capsid protein. In another embodiment, the pharmaceutical composition comprises a mixture of AAV particles, having different AAV capsid proteins.

[0414] In some embodiments, the pharmaceutical compositions described herein may comprise AAV particles comprising a viral genome encoding at least one payload. As a non-limiting example, the pharmaceutical compositions may contain an AAV particle with 1, 2, 3, 4, 5, or more payloads.

[0415] Although the descriptions of pharmaceutical compositions provided herein are principally directed to pharmaceutical compositions which are suitable for administration to humans, it will be understood by the skilled artisan that such compositions are generally suitable for administration to any other animal, e.g., to non-human animals, e.g. non-human mammals. Modification of pharmaceutical compositions suitable for administration to humans in order to render the compositions suitable for administration to various animals is well understood, and the ordinarily skilled veterinary pharmacologist can design and/or perform such modification with merely ordinary, if any, experimentation. Subjects to which administration of the pharmaceutical compositions is contemplated include, but are not limited to, humans and/or other primates; mammals, including commercially relevant mammals such as cattle, pigs, horses, sheep, cats, dogs, mice, rats, birds, including commercially relevant birds such as poultry, chickens, ducks, geese, and/or turkeys.

[0416] In some embodiments, pharmaceutical compositions are administered to humans, human patients or subjects.

[0417] In certain embodiments, the pharmaceutical composition is administered to the human, human patient, and/or subject by intravenous delivery. The pharmaceutical composition may be prepared in a manner optimized for administration by intravenous delivery.

### Formulation

[0418] Formulations of the present disclosure can include, without limitation, one or more AAV particles, saline, liposomes, lipid nanoparticles, polymers, peptides, proteins, cells transfected with viral vectors (e.g., for transfer or transplantation into a subject) and combinations thereof.

[0419] Formulations of the pharmaceutical compositions described herein may be prepared by any method known or hereafter developed in the art of pharmacology.

[0420] In general, such preparatory methods include the step of associating the active ingredient with an excipient and/or one or more other accessory ingredients. As used herein, the phrase “active ingredient” generally refers either to an AAV particle with a viral genome encoding a payload or to the end product, or payload itself.

[0421] A pharmaceutical composition in accordance with the present disclosure may be prepared, packaged, and/or sold in bulk, as a single unit dose, and/or as a plurality of single unit doses. As used herein, a “unit dose” refers to a discrete amount of the pharmaceutical composition comprising a predetermined amount of the active ingredient. The amount of the active ingredient is generally equal to the dosage of the active ingredient which would be administered to a subject and/or a convenient fraction of such a dosage such as, for example, one-half or one-third of such a dosage.

[0422] In some embodiments, the AAV formulations described herein may contain sufficient AAV particles for expression of at least one expressed functional payload. As a non-limiting example, the AAV particles may contain viral genomes encoding 1, 2, 3, 4 or 5 functional payloads.

[0423] In some embodiments, the formulations described herein may contain at least one AAV particle comprising a viral genome with a nucleic acid sequence encoding a protein of interest. The protein of interest may include but is not limited to an antibody, aromatic L-amino acid decarboxylase (AADC), survival motor neuron 1 (SMN1), frataxin (FXN), APOE (APOE2, APOE3, or APOE4), GBA1, GRN, ASPA, CLN2, GLB1, SGSH, NAGLU, IDS, NPC1, or GAN.

[0424] In some embodiments, the formulations described herein may contain at least one AAV particle comprising a viral genome with a nucleic acid sequence encoding the siRNA molecules described herein. In certain embodiments, the siRNA molecules may target a gene of interest at one target site. In another embodiment, the formulation comprises a plurality of AAV particles, each AAV particle comprising a viral genome with a nucleic acid sequence encoding a siRNA molecule targeting the gene of interest at a different target site. The target gene may be targeted at 1, 2, 3, 4, 5 or more than 5 sites. In certain embodiments, the target gene may include, but is not limited to, SOD1, MAPT, APOE, HTT, C9ORF72, TDP-43, APP. BACE, SNCA, ATXN1, ATXN2, ATXN3, ATXN7, SCN1A-SCN5A, or SCN8A-SCN11A.

[0425] According to the present disclosure AAV particles may be formulated for systemic delivery. In another embodiment. AAV particles may be formulated for CNS delivery. The formulation of AAV particles may be optimized for delivery to any target tissue by any administration route described herein. As a non-limiting example, the formulation of AAV particles may be optimized for CNS as the target tissue and intravenous administration as the method of delivery. Alternatively, the formulation of AAV particles may be optimized for DRG as the target tissue and intravenous administration as the method of delivery.

[0426] The AAV particles of the disclosure can be formulated using one or more excipients to: (1) increase stability; (2) increase cell transfection or transduction; (3) permit the sustained or delayed expression of the payload; (4) alter the biodistribution (e.g., target the viral particle to specific tissues or cell types); (5) increase the translation of encoded protein; (6) alter the release profile of encoded protein; and/or (7) allow for regulatable expression of the payload.

[0427] In some embodiments, a pharmaceutically acceptable excipient may be at least 95%, at least 96%, at least 97%, at least 98%, at least 99%, or 100% pure. In some embodiments, an excipient is approved for use for humans and for veterinary use. In some embodiments, an excipient may be approved by United States Food and Drug Administration. In some embodiments, an excipient may be of pharmaceutical grade. In some embodiments, an excipient may meet the standards of the United States Pharmacopoeia (USP), the European Pharmacopoeia (EP), the British Pharmacopoeia, and/or the International Pharmacopoeia.

[0428] Excipients, as used herein, include, but are not limited to, any and all solvents, dispersion media, diluents, or other liquid vehicles, dispersion or suspension aids, surface active agents, isotonic agents, thickening or emulsifying agents, preservatives, and the like, as suited to the particular dosage form desired. Various excipients for formulating pharmaceutical compositions and techniques for preparing the composition are known in the art (see Remington: The Science and Practice of Pharmacy, 21st Edition, A. R. Gennaro, Lippincott. Williams & Wilkins, Baltimore, Md., 2006; incorporated herein by reference in its entirety). The use of a conventional excipient medium may be contemplated within the scope of the present disclosure, except insofar as any conventional excipient medium may be incompatible with a substance or its derivatives, such as by producing any undesirable biological effect or otherwise interacting in a deleterious manner with any other component(s) of the pharmaceutical composition.

[0429] Exemplary diluents include, but are not limited to, calcium carbonate, sodium carbonate, calcium phosphate, dicalcium phosphate, calcium sulfate, calcium hydrogen phosphate, sodium phosphate lactose, sucrose, cellulose, microcrystalline cellulose, kaolin, mannitol, sorbitol, inositol, sodium chloride, dry starch, cornstarch, powdered sugar, etc., and/or combinations thereof.

[0430] In some embodiments, AAV particle formulations may comprise at least one inactive ingredient. As used herein, the term “inactive ingredient” refers to one or more agents that do not contribute to the activity of the active ingredient of the pharmaceutical composition included in formulations. In some embodiments, all, none or some of the inactive ingredients which may be used in the formulations of the present disclosure may be approved by the US Food and Drug Administration (FDA). Inactive ingredients and their use are well known in the art.

[0431] Pharmaceutical composition formulations of AAV particles disclosed herein may include cations or anions. In certain embodiments, the formulations include metal cations such as, but not limited to, Zn2+, Ca2+, Cu2+, Mn2+, Mg+ and combinations thereof. As a non-limiting example, formulations may include polymers and complexes with a metal cation (See e.g., U.S. Pat. Nos. 6,265,389 and 6,555,525, each of which is herein incorporated by reference in its entirety).

[0432] Formulations of the disclosure may also include one or more pharmaceutically acceptable salts. As used herein, “pharmaceutically acceptable salts” refers to derivatives of the disclosed compounds wherein the parent compound is modified by converting an existing acid or base moiety to its salt form (e.g., by reacting the free base group with a suitable organic acid). Examples of pharmaceutically acceptable salts include, but are not limited to, mineral or organic acid salts of basic residues such as amines; alkali or organic salts of acidic residues such as carboxylic acids; and the like. Representative acid addition salts include acetate, acetic acid, adipate, alginate, ascorbate, aspartate, benzenesulfonate, benzene sulfonic acid, benzoate, bisulfate, borate, butyrate, camphorate, camphorsulfonate, citrate, cyclopentanepropionate, digluconate, dodecylsulfate, ethanesulfonate, fumarate, glucoheptonate, glycerophosphate, hemisulfate, heptonate, hexanoate, hydrobromide, hydrochloride, hydroiodide, 2-hydroxy-ethanesulfonate, lactobionate, lactate, laurate, lauryl sulfate, malate, maleate, malonate, methanesulfonate, 2-naphthalenesulfonate, nicotinate, nitrate, oleate, oxalate, palmitate, pamoate, pectinate, persulfate, 3-phenylpropionate, phosphate, picrate, pivalate, propionate, stearate, succinate, sulfate, tartrate, thiocyanate, toluenesulfonate, undecanoate, valerate salts, and the like. Representative alkali or alkaline earth metal salts include sodium, lithium, potassium, calcium, magnesium, and the like, as well as nontoxic ammonium, quaternary ammonium, and amine cations, including, but not limited to ammonium, tetramethylammonium, tetraethylammonium, methylamine, dimethylamine, trimethylamine, triethylamine, ethylamine, and the like. The pharmaceutically acceptable salts of the present disclosure include the conventional non-toxic salts of the parent compound formed, for example, from non-toxic inorganic or organic acids.

[0433] Solvates may be prepared by crystallization, recrystallization, or precipitation from a solution that includes organic solvents, water, or a mixture thereof. Examples of suitable solvents are ethanol, water (for example, mono-, di-, and tri-hydrates), N-methylpyrrolidinone (NMP), dimethyl sulfoxide (DMSO), N,N′-dimethylformamide (DMF), N,N′-dimethylacetamide (DMAC), 1,3-dimethyl-2-imidazolidinone (DMEU), 1,3-dimethyl-3,4,5,6-tetrahydro-2-(1H)-pyrimidinone (DMPU), acetonitrile (ACN), propylene glycol, ethyl acetate, benzyl alcohol, 2-pyrrolidone, benzyl benzoate, and the like. When water is the solvent, the solvate is referred to as a “hydrate.”

[0434] In certain embodiments, the AAV particles of the disclosure may be formulated in phosphate buffered saline (PBS), in combination with an ethylene oxide/propylene oxide copolymer (also known as pluronic or poloxamer).

[0435] In certain embodiments, the AAV particles of the disclosure may be formulated in PBS with 0.001% pluronic acid (F-68) (poloxamer 188) at a pH of about 7.0.

[0436] In certain embodiments, the AAV particles of the disclosure may be formulated in PBS with 0.001% pluronic acid (F-68) (poloxamer 188) at a pH of about 7.3.

[0437] In certain embodiments, the AAV particles of the disclosure may be formulated in PBS with 0.001% pluronic acid (F-68) (poloxamer 188) at a pH of about 7.4.

[0438] In certain embodiments, the AAV particles of the disclosure may be formulated in a solution comprising sodium chloride, sodium phosphate and an ethylene oxide/propylene oxide copolymer.

[0439] In certain embodiments, the AAV particles of the disclosure may be formulated in a solution comprising sodium chloride, sodium phosphate dibasic, sodium phosphate monobasic and poloxamer 188/pluronic acid (F-68).

[0440] In certain embodiments, the AAV particles of the disclosure may be formulated in a solution comprising sodium chloride, potassium phosphate monobasic, sodium phosphate dibasic, and poloxamer 188/pluronic acid (F-68).

[0441] In certain embodiments, AAV particles are formulated in a solution comprising about 200 mM sodium chloride (NaCl), about 1 mM potassium phosphate monobasic (KH₂PO₄), about 3 mM sodium phosphate dibasic (Na₂HPO₄), and about 0.001% Pluronic F-68/poloxamer 188 at a pH of about 7.4. The concentration of sodium chloride in the final solution may be 150 mM-250 mM. As non-limiting examples, the concentration of sodium chloride in the final solution may be 150 mM, 160 mM, 170 mM, 180 mM, 190 mM, 200 mM, 210 mM, 220 mM, 230 mM, 240 mM, 250 mM, or any concentration in between. The concentration of potassium phosphate monobasic in the final solution may be 0.01 mM-3 mM. As non-limiting examples, the concentration of potassium phosphate monobasic in the final solution may be 0.01 mM, 0.5 mM, 1 mM, 2 mM, 3 mM, or any concentration in between. The concentration of sodium phosphate dibasic in the final solution may be 1 mM-10 mM. As non-limiting examples, the concentration of sodium phosphate dibasic in the final solution may be 1 mM, 2 mM, 3 mM, 4 mM, 5 mM, 6 mM, 7 mM, 8 mM, 9 mM, 10 mM or any concentration in between. The concentration of pluronic F-68 (poloxamer 188) may be 0.0001%-1%. As non-limiting examples, the concentration of pluronic F-68 (poloxamer 188) may be 0.0001%, 0.0005%, 0.001%, 0.005%, 0.01%, 0.05%, 0.1%, 0.5%, or 1%. The final solution may have a pH of 6.8-7.7. Non-limiting examples for the pH of the final solution include a pH of 6.8, 6.9, 7.0, 7.1, 7.2, 7.3, 7.4, 7.5, 7.6, or 7.7.

### V. Dosing and Administration

[0442] In certain embodiments, the AAV particles may be administered to a subject in a therapeutically effective amount to reduce the symptoms of disease, such as a neurological disease (affecting either the CNS or PNS), of a subject (e.g., determined using a known evaluation method). In some embodiments the subject is a mammal. A mammal may include, a mouse, a non-human primate, and/or a human.

### Administration

[0443] The AAV particles of the present disclosure may be administered by any delivery route which results in a therapeutically effective outcome. These include, but are not limited to, intravenous (into a vein), intraparenchymal (into the substance of e.g., CNS), intraparenchymal (brain), intraparenchymal (spinal cord), intraparenchymal (DRG), intracranial, intrastriatal, intrathalamic, enteral (into the intestine), gastroenteral, epidural (into the dura mater), oral (by way of the mouth), transdermal, intracerebral (into the cerebrum), intracerebroventricular (into the cerebral ventricles), sub-pial (between pia and CNS parenchyma), intracarotid arterial (into the intracarotid artery), epicutaneous (application onto the skin), intradermal, (into the skin itself), subcutaneous (under the skin), nasal administration (through the nose), intravenous bolus, intravenous drip, intra-arterial (into an artery), systemic, intramuscular (into a muscle), intracardiac (into the heart), intraosseous infusion (into the bone marrow), intrathecal (into the spinal canal), intraperitoneal, (infusion or injection into the peritoneum), intravesical infusion, intravitreal, (through the eye), intracavernous injection (into a pathologic cavity) intracavitary (into the base of the penis), intravaginal administration, intrauterine, extra-amniotic administration, transdermal (diffusion through the intact skin for systemic distribution), transmucosal (diffusion through a mucous membrane), transvaginal, insufflation (snorting), sublingual, sublabial, enema, eye drops (onto the conjunctiva), or in ear drops, auricular (in or by way of the ear), buccal (directed toward the cheek), conjunctival, cutaneous, dental (to a tooth or teeth), electro-osmosis, endocervical, endosinusial, endotracheal, extracorporeal, hemodialysis, infiltration, interstitial, intra-abdominal, intra-amniotic, intra-articular, intrabiliary, intrabronchial, intrabursal, intracartilaginous (within a cartilage), intracaudal (within the cauda equine), intracistemal (within the cisterna magna cerebellomedularis), intracomeal (within the comea), dental intracoronal, intracoronary (within the coronary arteries), intracorporus cavemosum (within the dilatable spaces of the corporus cavemosa of the penis), intradiscal (within a disc), intraductal (within a duct of a gland), intraduodenal (within the duodenum), intradural (within or beneath the dura), intraepidermal (to the epidermis), intraesophageal (to the esophagus), intragastric (within the stomach), intragingival (within the gingivae), intraileal (within the distal portion of the small intestine), intralesional (within or introduced directly to a localized lesion), intraluminal (within a lumen of a tube), intralymphatic (within the lymph), intramedullary (within the marrow cavity of a bone), intrameningeal (within the meninges), intramyocardial (within the myocardium), intraocular (within the eye), intraovarian (within the ovary), intrapericardial (within the pericardium), intrapleural (within the pleura), intraprostatic (within the prostate gland), intrapulmonary (within the lungs or its bronchi), intrasinal (within the nasal or periorbital sinuses), intraspinal (within the vertebral column), intrasynovial (within the synovial cavity of a joint), intratendinous (within a tendon), intratesticular (within the testicle), intrathecal (within the cerebrospinal fluid at any level of the cerebrospinal axis), intrathoracic (within the thorax), intratubular (within the tubules of an organ), intratumor (within a tumor), intratympanic (within the aurus media), intravascular (within a vessel or vessels), intraventricular (within a ventricle), iontophoresis (by means of electric current where ions of soluble salts migrate into the tissues of the body), irrigation (to bathe or flush open wounds or body cavities), larvngeal (directly upon the larynx), nasogastric (through the nose and into the stomach), occlusive dressing technique (topical route administration which is then covered by a dressing which occludes the area), ophthalmic (to the external eye), oropharyngeal (directly to the mouth and pharynx), parenteral, percutaneous, periarticular, peridural, perineural, periodontal, rectal, respiratory (within the respiratory tract by inhaling orally or nasally for local or systemic effect), retrobulbar (behind the pons or behind the eyeball), soft tissue, subarachnoid, subconjunctival, submucosal, topical, transplacental (through or across the placenta), transtracheal (through the wall of the trachea), transtympanic (across or through the tympanic cavity), ureteral (to the ureter), urethral (to the urethra), vaginal, caudal block, diagnostic, nerve block, biliary perfusion, cardiac perfusion, photopheresis and spinal.

[0444] In certain embodiments, the AAV particles of the disclosure are administered by intraparenchymal injection. In other words, the AAV particles are delivered directly to the target tissue. AAV particles of the disclosure may be administered by intraparenchymal delivery to central nervous system tissue, such as but not limited to, the putamen, the thalamus, and/or the cortex. AAV particles of the disclosure may be administered by intraparenchymal delivery to the peripheral nervous system tissue, such as, but not limited to, the dorsal root ganglia.

[0445] In some embodiments, the AAV particles that may be administered to a subject by peripheral injections. AAV particles may be administered systemically. In certain embodiments, AAV particles are administered intravenously.

[0446] Intravenous administration encompasses the use of any vein of the subject for the delivery of the AAV particles of the disclosure. Non-limiting examples of target veins include, median cubital vein, orbital veins (superior or inferior ophthalmic, saphenous veins (greater or lesser), internal jugular, and/or femoral vein. When the subject is a mouse, the target vein may be the tail vein or the orbital veins.

[0447] In certain embodiments, the AAV particles of the present disclosure may be administered via intravenous delivery to cells of the central nervous system (CNS), such as, but not limited to, neurons, astrocytes, microglia and/or oligodendrocytes.

[0448] In certain embodiments, the AAV particles of the present disclosure may be administered via intravenous delivery to cells of the peripheral nervous system (PNS), such as, but not limited to, neurons and/or Schwann cells.

[0449] In certain embodiments, the AAV particles of the present disclosure may be administered via intravenous delivery to DRG neurons.

[0450] In certain embodiments, the AAV particles may be delivered by injection into a CSF pathway (e.g., intrathecal or intraventricular).

[0451] In certain embodiments, the AAV particles of the present disclosure may be administered to a subject by intracranial delivery (See, e.g., U.S. Pat. No. 8,119,611; the content of which are incorporated herein by reference in their entirety).

[0452] In certain embodiments, the AAV particle may be administered to the CNS or PNS in a therapeutically effective amount to improve function and/or survival for a subject with a neurological disease. As a non-limiting example, the vector may be administered intravenously.

[0453] The AAV particles of the present disclosure may be administered in any suitable form, either as a liquid solution or suspension, as a solid form suitable for liquid solution or suspension in a liquid solution. The AAV particles may be formulated with any appropriate and pharmaceutically acceptable excipient.

[0454] In some embodiments, the AAV particles of the present disclosure may be delivered to a subject via a single route of administration. In other embodiments, the AAV particles may be delivered to a subject via more than one route of administration.

[0455] In some embodiments, the AAV particles of the present disclosure may be delivered to a subject via a multi-site route of administration. AAV particles may be administered at 2, 3, 4, 5 or more than 5 sites.

[0456] In some embodiments, two or more compositions comprising AAV particles may be administered to the same subject. In some embodiments, the two or more AAV particle compositions may be administered via the same route. In some embodiments, the two or more AAV particle compositions may be administered via different routes. Two or more compositions comprising AAV particles may be administered simultaneously, or at different times. In some embodiments, one composition comprising AAV particles may be administered by an intraparenchymal route, while another composition comprising AAV particles may be administered by an intravenous route.

[0457] In some embodiments. AAV particles may be administered by injection. In some embodiments, AAV particles are administered by infusion. In some embodiments, AAVs may be administered as a bolus.

[0458] Injection sites for AAV particle administration may include, but are not limited to, the putamen, thalamus, cortex, hippocampus, dorsal root ganglia, and deep cerebellar nuclei.

[0459] In certain embodiments, administration of the AAV particles of the present disclosure occurs only once, and serves as a one-time treatment. In other embodiments, administration of the AAV particles of the present disclosure occurs more than once.

### Dosing

[0460] The present disclosure provides methods of administering AAV particles in accordance with the disclosure to a subject in need thereof. The pharmaceutical, diagnostic, or prophylactic AAV particles and compositions of the present disclosure may be administered to a subject using any amount and any route of administration effective for preventing, treating, managing, or diagnosing diseases, disorders and/or conditions. The exact amount required will vary from subject to subject, depending on the species, age, and general condition of the subject, the severity of the disease, the particular composition, its mode of administration, its mode of activity, and the like. The subject may be a human, a mammal, or an animal.

[0461] Compositions in accordance with the disclosure are typically formulated in unit dosage form for ease of administration and uniformity of dosage. It will be understood, however, that the total daily usage of the compositions of the present disclosure may be decided by the attending physician within the scope of sound medical judgment. The specific therapeutically effective, prophylactically effective, or appropriate diagnostic dose level for any particular individual will depend upon a variety of factors including the disorder being treated and the severity of the disorder; the activity of the specific payload employed; the specific composition employed; the age, body weight, general health, sex and diet of the patient; the time of administration, route of administration, and rate of excretion of the specific AAV particle employed; the duration of the treatment; drugs used in combination or coincidental with the specific AAV particle employed; and like factors well known in the medical arts.

[0462] In certain embodiments. AAV particle pharmaceutical compositions in accordance with the present disclosure may be administered at dosage levels sufficient to deliver from about 0.0001 mg/kg to about 100 mg/kg, from about 0.001 mg/kg to about 0.05 mg/kg, from about 0.005 mg/kg to about 0.05 mg/kg, from about 0.001 mg/kg to about 0.005 mg/kg, from about 0.05 mg/kg to about 0.5 mg/kg, from about 0.01 mg/kg to about 50 mg/kg, from about 0.1 mg/kg to about 40 mg/kg, from about 0.5 mg/kg to about 30 mg/kg, from about 0.01 mg/kg to about 10 mg/kg, from about 0.1 mg/kg to about 10 mg/kg, or from about 1 mg/kg to about 25 mg/kg, of subject body weight to obtain the desired therapeutic, diagnostic, or prophylactic effect. It will be understood that the above dosing concentrations may be converted to vg or viral genomes per kg or into total viral genomes administered by one of skill in the art.

[0463] In certain embodiments, AAV particle pharmaceutical compositions in accordance with the present disclosure may be administered at about 0.1-600 μl/site, or about 0.1 to about 0.5 μl/site, about 0.5 to about 1 μl/site, about 1 to about 10 μl/site, about 10 to about 600 μl/site, about 50 to about 500 μl/site, about 100 to about 400 μl/site, about 120 to about 300 μl/site, about 140 to about 200 μl/site, about 160 μl/site. As non-limiting examples, AAV particles may be administered at 0.5 μl/site, 50 μl/site, 150 μl/site, 160 μl/site or 250 μl/site.

[0464] In certain embodiments, delivery of the compositions in accordance with the present disclosure to cells comprises a rate of delivery defined by [VG/hour=mL/hour*VG/mL] wherein VG is viral genomes, VG/mL is composition concentration, and mL/hour is rate of delivery.

[0465] In certain embodiments, delivery of AAV particle compositions to cells may comprise a total concentration per subject between about 1×10⁶ VG (viral genome) and about 1×10⁶ VG. In some embodiments, delivery may comprise a composition concentration of about 1×10⁶, 2×10⁶, 3×10⁶, 4×10⁶, 5×10⁶, 6×10⁶, 7×10⁶, 8×10⁶, 9×10⁶, 1×10⁷, 2×10⁷, 3×10⁷, 4×10⁷, 5×10⁷. 6×10⁷, 7×10⁷, 8×10⁷, 9×10⁷, 1×10⁸. 2×10⁸, 3×10⁸, 4×10⁸, 5×10⁸, 6×10⁸. 7×10⁸, 8×10⁸, 9×10⁸, 1×10⁹, 2×10⁹, 3×10⁹, 4×10⁹, 5×10⁹, 6×10⁹, 7×10⁹, 8×10⁹, 9×10⁹, 1×10¹⁰, 1.5×10¹⁰, 2×10¹⁰, 2.5×10¹⁰, 3×10¹⁰, 4×10¹⁰, 5×10¹⁰, 6×10¹⁰, 7×10¹⁰, 7.5×10¹⁰, 8×10¹⁰, 9×10¹⁰, 1×10¹¹, 1.25×10¹¹, 2×10¹¹, 2.1×10¹¹, 2.2×10¹¹, 2.3×10¹¹, 2.4×10¹¹, 2.5×10¹¹, 2.6×10¹¹, 2.7×10¹¹, 2.8×10¹¹, 2.9×10¹¹, 3×10¹¹, 3.75×10¹¹, 4×10¹¹, 5×10¹¹, 6×10¹¹, 6.25×10¹¹, 6.75×10¹¹, 7×10¹¹, 7.1×10¹¹, 7.2×10¹¹, 7.3×10¹¹, 7.4×10¹¹, 7.5×10¹¹, 7.6×10¹¹, 7.7×10¹¹, 7.8×10¹¹, 7.9×10¹¹, 8×10¹¹, 9×10¹¹, 1×10¹², 1.1×10², 1.2×10², 1.3×10¹², 1.4×10¹², 1.5×10¹², 1.6×10¹², 1.7×10¹², 1.8×10¹², 1.9×10¹², 2×10¹², 3×1⁰². 4×10¹², 4.1×10¹², 4.2×10¹², 4.3×10¹², 4.4×10¹², 4.5×10¹², 4.6×10¹², 4.7×10¹², 4.8×10¹², 4.9×10¹², 5×10¹², 6×10¹², 6.1×10¹², 6.2×10¹², 6.3×10¹², 6.4×10¹², 6.5×10¹², 6.6×10¹², 6.7×10¹², 6.8×10¹², 6.9×10¹², 7×10¹², 8×10¹², 8.1×10¹², 8.2×10¹², 8.3×10¹², 8.4×10¹², 8.5×10¹², 8.6×10¹², 8.7×10¹², 8.8×10¹², 8.9×10¹², 9×10¹², 1×10¹³, 2×10¹³, 3×10¹³, 4×10¹³, 5×10¹³, 6×10¹³, 6.7×10¹³, 7×10¹³, 8×10¹³, 9×10¹³, 1×10¹⁴, 2×10¹⁴, 3×10¹⁴, 4×10¹⁴, 5×10¹⁴, 6×10¹⁴, 7×10¹⁴. 8×10¹⁴, 9×10¹⁴, 1×10¹⁵, 2×10¹⁵, 3×10¹⁵, 4×10¹⁵, 5×10¹⁵, 6×10¹⁵, 7×10¹⁵, 8×10¹⁵, 9×10¹⁵, or 1×10¹⁶ VG/subject.

[0466] In certain embodiments, delivery of AAV particle compositions to cells may comprise a total concentration per subject between about 1×10⁶ VG/kg and about 1×10¹⁶ VG/kg. In some embodiments, delivery may comprise a composition concentration of about 1×10⁶, 2×10⁶, 3×10⁶, 4×10⁶. 5×10⁶, 6×10⁶, 7×10⁶, 8×10⁶, 9×10⁶, 1×10⁷, 2×10⁷, 3×10⁷, 4×10⁷, 5×10⁷, 6×10⁷, 7×10⁷, 8×10⁷, 9×10⁷, 1×10⁸, 2×10⁸, 3×10⁸, 4×10⁸, 5×10⁸, 6×10⁸, 7×10⁸, 8×10⁸, 9×10⁸, 1×10⁹, 2×10⁹, 3×10⁹, 4×10⁹, 5×10⁹, 6×10⁹, 7×10⁹, 8×10⁹, 9×10⁹, 1×10¹⁰, 2×10¹⁰, 3×10¹⁰, 4×10¹⁰, 5×10¹⁰, 6×10¹⁰, 7×10¹⁰, 8×10¹⁰, 9×10¹⁰, 1×10¹¹, 2×10¹¹, 2.1×10¹¹, 2.2×10¹¹, 2.3×10¹¹, 2.4×10¹¹, 2.5×10¹¹, 2.6×10¹¹, 2.7×10¹¹, 2.8×10¹¹, 2.9×10¹¹, 3×10¹¹, 4×10¹¹, 5×10¹¹, 6×10¹¹, 7×10¹¹, 7.1×10¹¹, 7.2×10¹¹, 7.3×10¹¹, 7.4×10¹¹, 7.5×10¹¹, 7.6×10¹¹, 7.7×10¹¹, 7.8×10¹¹, 7.9×10¹¹, 8×10¹¹, 9×10¹¹, 1×10¹², 1.1×10¹², 1.2×10¹², 1.3×10², 1.4×10¹², 1.5×10¹², 1.6×10¹², 1.7×10¹², 1.8×10¹², 1.9×10¹², 2×10¹², 3×10¹², 4×10¹², 4.1×10¹², 4.2×10¹², 4.3×10¹², 4.4×10¹², 4.5×10¹², 4.6×10¹², 4.7×10¹², 4.8×10¹², 4.9×10¹², 5×10¹², 6×10¹², 6.1×10¹², 6.2×10¹², 6.3×10¹², 6.4×10¹², 6.5×10¹², 6.6×10¹², 6.7×10¹², 6.8×10¹², 6.9×10¹², 7×10¹², 8×10¹², 8.1×10², 8.2×10¹², 8.3×10¹². 8.4×10¹², 8.5×10¹², 8.6×10¹², 8.7×10¹², 8.8×10¹², 8.9×10¹², 9×10¹², 1×10¹³. 2×10¹³, 3×10¹³, 4×10¹³, 5×10¹³, 6×10¹³, 6.7×10¹³, 7×10¹³, 8×10¹³, 9×10¹³, 1×10¹⁴, 2×10¹⁴, 3×10¹⁴, 4×10¹⁴, 5×10¹⁴, 6×10¹⁴, 7×10¹⁴, 8×10¹⁴, 9×10¹⁴, 1×10¹⁵, 2×10¹⁵, 3×10¹⁵, 4×10¹⁵, 5×10¹⁵, 6×10¹⁵, 7×10¹⁵, 8×10¹⁵, 9×10¹⁵, or 1×10¹⁶ VG/kg. In certain embodiments, the delivery comprises a composition concentration of 1×10¹³ VG/kg. In certain embodiments, the delivery comprises a composition concentration of 2.1×10¹² VG/kg. In certain embodiments, the delivery comprises a composition concentration of 1×10¹³ VG/kg. In certain embodiments, the delivery comprises a composition concentration of 6.7×10¹² VG/kg. In certain embodiments, the delivery comprises a composition concentration of 7×10¹² VG/kg. In certain embodiments, the delivery comprises a composition concentration of 2×10¹³ VG/kg. In certain embodiments, the delivery comprises a composition concentration of 3×10¹¹ VG/kg. In certain embodiments, the delivery comprises a composition concentration of 3×10¹² VG/kg. In certain embodiments, the delivery comprises a composition concentration of 3×10¹³ VG/kg. In certain embodiments, the delivery comprises a composition concentration of 6.3×10¹² VG/kg.

[0467] In certain embodiments, delivery of AAV particle compositions to cells may comprise a total concentration per site between about 1×10⁶ VG/site and about 1×10¹⁶ VG/site. In some embodiments, delivery may comprise a composition concentration of about 1×10⁶, 2×10⁶. 3×10⁶, 4×10⁶, 5×10⁶, 6×10⁶, 7×10⁶, 8×10⁶, 9×10⁶, 1×10⁷, 2×10⁷, 3×10⁷, 4×10⁷, 5×10⁷, 6×10⁷, 7×10⁷, 8×10⁷, 9×10⁷, 1×10⁸, 2×10⁸, 3×10⁸, 4×10⁸, 5×10⁸, 6×10⁸, 7×10⁸, 8×10⁸, 9×10⁸, 1×10⁹, 2×10⁹, 3×10⁹, 4×10⁹, 5×10⁹, 6×10⁹, 7×10⁹, 8×10⁹, 9×10⁹, 1×10¹⁰, 2×10¹⁰, 3×10¹⁰, 4×10¹⁰, 5×10¹⁰, 6×10¹⁰, 7×10¹⁰, 8×10¹⁰, 9×10¹⁰, 1×10¹¹, 2×10¹¹, 2.1×10¹¹, 2.2×10¹¹, 2.3×10¹¹, 2.4×10¹¹, 2.5×10¹¹, 2.6×10¹¹, 2.7×10¹¹, 2.8×10¹¹, 2.9×10¹¹, 3×10¹¹, 4×10¹¹, 5×10¹¹, 6×10¹¹, 7×10¹¹, 7.1×10¹¹, 7.2×10¹¹, 7.3×10¹¹, 7.4×10¹¹, 7.5×10¹¹, 7.6×10¹¹, 7.7×10¹¹, 7.8×10¹¹, 7.9×10¹¹, 8×10¹¹, 9×10¹¹, 1×10¹², 1.1×10¹², 1.2×10¹², 1.3×10¹², 1.4×10¹², 1.5×10¹², 1.6×10¹², 1.7×10¹², 1.8×10¹², 1.9×10¹², 2×10¹², 3×10¹², 4×10¹², 4.1×10¹², 4.2×10¹², 4.3×10¹², 4.4×10¹², 4.5×10¹², 4.6×10¹², 4.7×10¹², 4.8×10¹², 4.9×10¹², 5×10¹², 6×10¹², 6.1×10¹², 6.2×10¹², 6.3×10¹², 6.4×10¹², 6.5×10¹², 6.6×10¹², 6.7×10¹², 6.8×10¹², 6.9×10¹², 7×10¹², 8×10¹², 8.1×10¹², 8.2×10¹², 8.3×10¹², 8.4×10¹², 8.5×10¹², 8.6×10¹², 8.7×10¹², 8.8×10¹², 8.9×10¹², 9×10¹², 1×10¹³, 2×10¹³, 3×10¹³, 4×10¹³, 5×10¹³, 6×10¹³, 6.7×10¹³, 7×10¹³, 8×10¹³, 9×10¹³, 1×10¹⁴, 2×10¹⁴, 3×10¹⁴, 4×10¹⁴, 5×10¹⁴, 6×10¹⁴, 7×10¹⁴, 8×10¹⁴, 9×10¹⁴, 1×10¹⁵, 2×10¹⁵, 3×10¹⁵, 4×10¹⁵, 5×10¹⁵, 6×10¹⁵, 7×10¹⁵, 8×10¹⁵, 9×10¹⁵, or 1×10¹⁶ VG/site.

[0468] In certain embodiments, delivery of AAV particles to cells of the central nervous system may comprise a total dose between about 1×10⁶ VG and about 1×10¹⁶ VG. In some embodiments, delivery may comprise a total dose of about 1×10⁶, 2×10⁶, 3×10⁶, 4×10⁶, 5×10⁶, 6×10⁶, 7×10⁶, 8×10⁶, 9×10⁶, 1×10⁷, 2×10⁷, 3×10⁷, 4×10⁷, 5×10⁷, 6×10⁷, 7×10⁷, 8×10⁷, 9×10⁷, 1×10⁸, 2×10⁸, 3×10⁸, 4×10⁸, 5×10⁸, 6×10⁸, 7×10⁸, 8×10⁸, 9×10⁸, I×10⁹, 2×10⁹, 3×10⁹, 4×10⁹, 5×10⁹, 6×10⁹, 7×10⁹, 8×10⁹, 9×10⁹, 1×10¹⁰, 1.9×10¹⁰, 2×10¹⁰, 3×10¹⁰, 3.73×10¹⁰, 4×10¹⁰, 5×10¹⁰, 6×10¹⁰, 7×10¹⁰, 8×10¹⁰, 9×10¹⁰, 1×10¹¹, 2×10¹¹, 2.5×10¹¹, 3×10¹¹, 4×10¹¹, 5×10¹¹, 6×10¹¹, 7×10¹¹, 8×10¹¹, 9×10¹¹, 1×10¹², 2×10¹², 3×10¹², 4×10¹², 5×10¹², 6×10¹², 6.1×10¹², 6.2×10¹², 6.3×10¹², 6.4×10¹², 6.5×10¹², 6.6×10¹², 6.7×10¹². 6.8×10¹², 6.9×10¹², 7×10¹², 8×10¹², 9×10¹², 1×10¹³, 2×10¹³, 3×10¹³, 4×10¹³, 5×10¹³, 6×10¹³, 7×10¹³, 8×10¹³, 9×10¹³, 1×10¹⁴, 2×10¹⁴, 3×10¹⁴, 4×10¹⁴, 5×10¹⁴, 6×10¹⁴, 7×10¹⁴, 8×10¹⁴, 9×10¹⁴, 1×10¹⁵, 2×10¹⁵, 3×10¹⁵, 4×10¹⁵, 5×10¹⁵, 6×10¹⁵, 7×10¹⁵, 8×10¹⁵, 9×10¹⁵, or 1×10¹⁶ VG. As anon-limiting example, the total dose is 1×10¹³ VG. As another non-limiting example, the total dose is 2.1×10¹² VG. As another non-limiting example, the total dose is 6.3×10¹² VG.

[0469] In certain embodiments, about 10⁵ to 10⁶ viral genome (unit) may be administered per dose.

[0470] In certain embodiments, delivery of the compositions comprising the AAV particles in accordance with the present disclosure to cells may comprise a total concentration between about 1×10⁶ VG/mL and about 1×10¹⁶ VG/mL. In some embodiments, delivery may comprise a composition concentration of about 1×10⁶, 2×10⁶, 3×10⁶, 4×10⁶, 5×10⁶, 6×10⁶, 7×10⁶, 8×10⁶, 9×10⁶, 1×10⁷, 2×10⁷, 3×10⁷, 4×10⁷, 5×10⁷, 6×10⁷, 7×10⁷, 8×10⁷, 9×10⁷, 1×10⁸, 2×10⁸, 3×10⁸, 4×10⁸, 5×10⁸, 6×10⁸, 7×10⁸, 8×10⁸, 9×10⁸, 1×10⁹, 2×10⁹, 3×10⁹, 4×10⁹, 5×10⁹, 6×10⁹, 7×10⁹, 8×10⁹, 9×10⁹, 1×10¹⁰, 2×10¹⁰, 3×10¹⁰, 4×10¹⁰, 5×10¹⁰, 6×10¹⁰, 7×10¹⁰, 8×10¹⁰, 9×10¹⁰, 1×10¹¹, 2×10¹¹, 3×10¹¹, 4×10¹¹, 5×10¹¹, 6×10¹¹, 7×10¹¹, 8×10¹¹, 9×10¹¹, 1×10¹², 1.1×1¹², 1.2×10¹², 1.3×10¹², 1.4×10¹², 1.5×10¹², 1.6×10¹², 1.7×10¹², 1.8×10¹², 1.9×10¹², 2×10¹², 2.1×10¹², 2.2×10¹², 2.3×10¹². 2.4×10¹², 2.5×10¹², 2.6×10¹², 2.7×10¹², 2.8×10¹², 2.9×10¹², 3×10¹², 3.1×10¹², 3.2×10¹², 3.3×10¹², 3.4×10¹², 3.5×10¹², 3.6×10¹², 3.7×10¹², 3.8×10¹², 3.9×10¹², 4×10¹², 4.1×10¹², 4.2×10¹², 4.3×10¹², 4.4×10¹². 4.5×10¹², 4.6×10¹², 4.7×10¹², 4.8×10¹², 4.9×10¹², 5×10¹², 6×10¹², 6.1×10¹², 6.2×10¹², 6.3×10¹², 6.4×10¹², 6.5×10¹², 6.6×10¹², 6.7×10¹², 6.8×10¹², 6.9×10¹², 7×10¹², 8×10¹², 9×10¹², 1×10¹³, 2×10¹³, 3×10¹³, 4×10¹³, 5×10¹³, 6×10¹³, 6.7×10¹³, 7×10¹³, 8×10¹³, 9×10¹³, 1×10¹⁴, 2×10¹⁴, 3×10¹⁴, 4×10¹⁴, 5×10¹⁴, 6×10¹⁴, 7×10¹⁴, 8×10¹⁴, 9×10¹⁴, 1×10¹⁵, 2×10¹⁵, 3×10¹⁵, 4×10¹⁵, 5×10¹⁵, 6×10¹⁵, 7×10¹⁵, 8×10¹⁵, 9×10¹⁵, or 1×10¹⁶ VG/mL.

[0471] In certain embodiments, delivery of AAV particles to cells of the central nervous system may comprise a composition concentration between about 1×10⁶ VG/mL and about 1×10¹⁶ VG/mL. In some embodiments, delivery may comprise a composition concentration of about 1×10⁶, 2×10⁶, 3×10⁶, 4×10⁶, 5×10⁶, 6×10⁶, 7×10⁶, 8×10⁶, 9×10⁶, 1×10⁷, 2×10⁷, 3×10⁷. 4×10⁷, 5×10⁷, 6×10⁷, 7×10⁷, 8×10⁷, 9×10⁷, 1×10⁸, 2×10⁸, 3×10⁸, 4×10⁸, 5×10⁸, 6×10⁸, 7×10⁸, 8×10⁸, 9×10⁸, 1×10⁹, 2×10⁹, 3×10⁹, 4×10⁹, 5×10⁹, 6×10⁹, 7×10⁹, 8×10⁹, 9×10⁹, 1×10¹⁰, 2×10¹⁰, 3×10¹⁰, 4×10¹⁰, 5×10¹⁰, 6×10¹⁰, 7×10¹⁰, 8×10¹⁰, 9×10¹⁰, 1×10¹¹, 2×10¹¹, 3×10¹¹, 4×10¹¹, 5×10¹¹, 6×10¹¹, 7×10¹¹, 8×10¹¹, 9×10¹¹, 1×10¹², 2×10¹², 3×10¹², 4×10¹², 5×10¹², 6×10¹², 6.1×10¹², 6.2×10¹², 6.3×10¹², 6.4×10¹², 6.5×10¹², 6.6×10¹², 6.7×10¹², 6.8×10¹², 6.9×10¹², 7×10¹², 8×10¹², 9×10¹², 1×10¹³, 2×10¹³, 3×10¹³, 4×10¹³, 5×10¹³, 6×10¹³, 7×10¹³, 8×10¹³, 9×10¹³, 1×10¹⁴, 2×10¹⁴, 3×10¹⁴, 4×10¹⁴, 5×10¹⁴, 6×10¹⁴, 7×10¹⁴, 8×10¹⁴, 9×10¹⁴, 1×10¹⁵, 2×10¹⁵, 3×10¹⁵, 4×10¹⁵, 5×10¹⁵, 6×10¹⁵, 7×10¹⁵, 8×10¹⁵, 9×10¹⁵, or 1×10¹⁶ VG/mL. In certain embodiments, the delivery comprises a composition concentration of 1×10¹³ VG/mL. In certain embodiments, the delivery comprises a composition concentration of 2.1×10¹² VG/mL. In certain embodiments, the delivery comprises a composition concentration of 1×10¹³ VG/mL. In certain embodiments, the delivery comprises a composition concentration of 2×10¹³ VG/mL. In certain embodiments, the delivery comprises a composition concentration of 3×10¹¹ VG/mL. In certain embodiments, the delivery comprises a composition concentration of 3×10¹² VG/mL. In certain embodiments, the delivery comprises a composition concentration of 6.3×10¹² VG/mL. In certain embodiments, the delivery comprises a composition concentration of 3×10³ VG/mL.

[0472] In certain embodiments, the desired dosage may be delivered using multiple administrations (e.g., two, three, four, five, six, seven, eight, nine, ten, eleven, twelve, thirteen, fourteen, or more administrations). When multiple administrations are employed, split dosing regimens such as those described herein may be used. As used herein, a “split dose” is the division of “single unit dose” or total daily dose into two or more doses, e.g., two or more administrations of the “single unit dose”. As used herein, a “single unit dose” is a dose of any therapeutic administered in one dose/at one time/single route/single point of contact. i.e., single administration event.

[0473] The desired dosage of the AAV particles of the present disclosure may be administered as a “pulse dose” or as a “continuous flow”. As used herein, a “pulse dose” is a series of single unit doses of any therapeutic administered with a set frequency over a period of time. As used herein, a “continuous flow” is a dose of therapeutic administered continuously for a period of time in a single route/single point of contact, i.e., continuous administration event. A total daily dose, an amount given or prescribed in 24 hour period, may be administered by any of these methods, or as a combination of these methods, or by any other methods suitable for a pharmaceutical administration.

[0474] In certain embodiments, delivery of the AAV particles of the present disclosure to a subject provides regulating activity of a target gene in a subject. The regulating activity may be an increase in the production of the target protein in a subject or the decrease of the production of target protein in a subject. The regulating activity can be for at least 1 month, 2 months, 3 months, 4 months, 5 months, 6 months, 7 months, 8 months, 9 months, 10 months, 11 months, 1 year, 13 months, 14 months, 15 months, 16 months, 17 months, 18 months, 19 months, 20 months, 20 months, 21 months, 22 months, 23 months, 2 years, 3 years, 4 years, 5 years, 6 years, 7 years, 8 years, 9 years, 10 years or more than 10 years.

[0475] In some embodiments, the AAV particle of the present disclosure may be administered to a subject using a single dose, one-time treatment. The dose of the one-time treatment may be administered by any methods known in the art and/or described herein. As used herein, a “one-time treatment” refers to a composition which is only administered one time. If needed, a booster dose may be administered to the subject to ensure the appropriate efficacy is reached. A booster may be administered 1 month, 2 months, 3 months, 4 months, 5 months, 6 months, 7 months, 8 months, 9 months, 10 months, 11 months, 12 months, 1 year, 13 months, 14 months, 15 months, 16 months, 17 months, 18 months, 19 months, 20 months, 21 months, 22 months, 23 months, 24 months, 2 years, 3 years, 4 years, 5 years, 6 years, 7 years, 8 years, 9 years, 10 years, or more than 10 years after the one-time treatment.

### Delivery

[0476] In certain embodiments, the AAV particles or pharmaceutical compositions of the disclosure are delivered by intravenous injection.

[0477] In certain embodiments, the AAV particles or pharmaceutical compositions of the present disclosure may be administered or delivered using the methods for treatment of disease described in U.S. Pat. No. 8,999,948, or International Publication No. WO2014178863, the contents of each of which are herein incorporated by reference in their entirety.

[0478] In certain embodiments, the AAV particles or pharmaceutical compositions of the present disclosure may be administered or delivered using the methods for delivering gene therapy in Alzheimer's Disease or other neurodegenerative conditions as described in US Application No. 20150126590, the contents of which are herein incorporated by reference in their entirety.

[0479] In certain embodiments, the AAV particles or pharmaceutical compositions of the present disclosure may be administered or delivered using the methods for delivery of a CNS gene therapy as described in U.S. Pat. Nos. 6,436,708, and 8,946,152, and International Publication No. WO2015168666, the contents of each of which are herein incorporated by reference in their entirety.

[0480] In certain embodiments, the AAV particle or pharmaceutical compositions of the present disclosure may be administered or delivered using the methods for delivering proteins using AAV vectors described in European Patent Application No. EP2678433, the contents of which are herein incorporated by reference in their entirety.

[0481] In certain embodiments, the AAV particle or pharmaceutical compositions of the present disclosure may be administered or delivered using the methods for delivering DNA to the bloodstream described in U.S. Pat. No. 6,211,163, the contents of which are herein incorporated by reference in their entirety.

[0482] In certain embodiments, the AAV particle or pharmaceutical compositions of the present disclosure may be administered or delivered using the methods for delivering a payload to the central nervous system described in U.S. Pat. No. 7,588,757, the contents of which are herein incorporated by reference in their entirety.

[0483] In certain embodiments, the AAV particle or pharmaceutical compositions of the present disclosure may be administered or delivered using the methods for delivering a payload described in U.S. Pat. No. 8,283,151, the contents of which are herein incorporated by reference in their entirety.

[0484] In certain embodiments, the AAV particle or pharmaceutical compositions of the present disclosure may be administered or delivered using the methods for delivering a payload using a glutamic acid decarboxylase (GAD) delivery vector described in International Patent Publication No. WO2001089583, the contents of which are herein incorporated by reference in their entirety.

[0485] In certain embodiments, the AAV particle or pharmaceutical compositions of the present disclosure may be administered or delivered using the methods for delivering a payload to neural cells described in International Patent Publication No. WO2012057363, the contents of which are herein incorporated by reference in their entirety.

### Delivery to Cells

[0486] The present disclosure provides a method of delivering to a cell or tissue any of the above-described AAV particles, comprising contacting the cell or tissue with said AAV particle or contacting the cell or tissue with a formulation comprising said AAV particle, or contacting the cell or tissue with any of the described compositions, including pharmaceutical compositions. The method of delivering the AAV particle to a cell or tissue can be accomplished in vitro, ex vivo, or in vivo.

### Delivery to Subjects

[0487] The present disclosure additionally provides a method of delivering to a subject, including a mammalian subject, any of the above-described AAV particles comprising administering to the subject said AAV particle, or administering to the subject a formulation comprising said AAV particle, or administering to the subject any of the described compositions, including pharmaceutical compositions.

[0488] In certain embodiments, the subject is a human. In some aspects, the human subject is a patient with a disease, for example, a neurological disease, or a disease associated with the central or peripheral nervous system or components thereof.

### Combinations

[0489] The AAV particles may be used in combination with one or more other therapeutic, prophylactic, research or diagnostic agents. By “in combination with,” it is not intended to imply that the agents must be administered at the same time and/or formulated for delivery together, although these methods of delivery are within the scope of the present disclosure. Compositions can be administered concurrently with, prior to, or subsequent to, one or more other desired therapeutics or medical procedures. In general, each agent will be administered at a dose and/or on a time schedule determined for that agent. In some embodiments, the present disclosure encompasses the delivery of pharmaceutical, prophylactic, research, or diagnostic compositions in combination with agents that may improve their bioavailability, reduce and/or modify their metabolism, inhibit their excretion, and/or modify their distribution within the body.

### VI. Kits and Devices

### Kits

[0490] In certain embodiments, the disclosure provides a variety of kits for conveniently and/or effectively carrying out the methods described herein. Typically, kits will comprise sufficient amounts and/or numbers of components to allow a user to perform multiple treatments of a subject(s) and/or to perform multiple experiments.

[0491] Any of the targeting peptides and/or associated AAV particles of the present disclosure may be comprised in a kit. In some embodiments, kits may further include reagents and/or instructions for creating and/or synthesizing compounds and/or compositions of the present disclosure. In some embodiments, kits may also include one or more buffers. In some embodiments, kits of the disclosure may include components for making protein or nucleic acid arrays or libraries and thus, may include, for example, solid supports.

[0492] In some embodiments, kit components may be packaged either in aqueous media or in lyophilized form. The container means of the kits will generally include at least one vial, test tube, flask, bottle, syringe or other container means, into which a component may be placed, and preferably, suitably aliquoted. Where there is more than one kit component, (labeling reagent and label may be packaged together), kits may also generally contain second, third or other additional containers into which additional components may be separately placed. In some embodiments, kits may also comprise second container means for containing sterile, pharmaceutically acceptable buffers and/or other diluents. In some embodiments, various combinations of components may be comprised in one or more vial. Kits of the present disclosure may also typically include means for containing compounds and/or compositions of the present disclosure, e.g., proteins, nucleic acids, and any other reagent containers in close confinement for commercial sale. Such containers may include injection or blow-molded plastic containers into which desired vials are retained.

[0493] In some embodiments, kit components are provided in one and/or more liquid solutions. In some embodiments, liquid solutions are aqueous solutions, with sterile aqueous solutions being particularly preferred. In some embodiments, kit components may be provided as dried powder(s). When reagents and/or components are provided as dry powders, such powders may be reconstituted by the addition of suitable volumes of solvent. In some embodiments, it is envisioned that solvents may also be provided in another container means. In some embodiments, labeling dyes are provided as dried powders. In some embodiments, it is contemplated that 10, 20, 30, 40, 50, 60, 70, 80, 90, 100, 120, 120, 130, 140, 150, 160, 170, 180, 190, 200, 300, 400, 500, 600, 700, 800, 900, 1000 micrograms or at least or at most those amounts of dried dye are provided in kits of the disclosure. In such embodiments, dye may then be resuspended in any suitable solvent, such as DMSO.

[0494] In some embodiments, kits may include instructions for employing kit components as well the use of any other reagent not included in the kit. Instructions may include variations that may be implemented.

### Devices

[0495] In certain embodiments, the AAV particles of the disclosure are delivered by catheter.

[0496] In certain embodiments, the AAV particles of the disclosure are delivered by syringe and/or syringe pump.

[0497] In certain embodiments, the AAV particles of the disclosure are delivered by cannula.

[0498] In certain embodiments, the AAV particles of the disclosure are delivered by a device, wherein the device is further placed in a mechanism to direct or target the trajectory.

[0499] In certain embodiments, the AAV particles may be delivered to a subject using a device to deliver the AAV particles and a head fixation assembly. The head fixation assembly may be, but is not limited to, any of the head fixation assemblies sold by MRI interventions. As a non-limiting example, the head fixation assembly may be any of the assemblies described in U.S. Pat. Nos. 8,099,150, 8,548,569, and 9,031,636 and International Patent Publication Nos. WO201108495 and WO2014014585, the contents of each of which are incorporated by reference in their entireties. A head fixation assembly may be used in combination with an MRI compatible drill such as, but not limited to, the MRI compatible drills described in International Patent Publication No. WO2013181008 and US Patent Publication No. US20130325012, the contents of which are herein incorporated by reference in its entirety.

[0500] In certain embodiments, the AAV particles may be delivered using a method, system and/or computer program for positioning of an apparatus to a target point on a subject to deliver the AAV particles. As a non-limiting example, the method, system and/or computer program may be the methods, systems and/or computer programs described in U.S. Pat. No. 8,340,743, the contents of which are herein incorporated by reference in their entirety. The method may include: determining a target point in the body and a reference point, wherein the target point and the reference point define a planned trajectory line (PTL) extending through each; determining a visualization plane, wherein the PTL intersects the visualization plane at a sighting point; mounting the guide device relative to the body to move with respect to the PTL, wherein the guide device does not intersect the visualization plane; determining a point of intersection (GPP) between the guide axis and the visualization plane; and aligning the GPP with the sighting point in the visualization plane.

[0501] In certain embodiments, the AAV particles may be delivered to a subject using a convention-enhanced delivery device. Non-limiting examples of targeted delivery of drugs using convection are described in US Patent Publication Nos. US20100217228, US20130035574, and US 20130035660 and International Patent Publication No. WO2013019830 and WO2008144585, the contents of each of which are herein incorporated by reference in their entireties.

[0502] In certain embodiments, a subject may be imaged prior to, during and/or after delivery of the AAV particles. The imaging method may be a method known in the art and/or described herein, such as but not limited to, magnetic resonance imaging (MRI). As a non-limiting example, imaging may be used to assess therapeutic effect. As another non-limiting example, imaging may be used for assisted delivery of AAV particles.

[0503] In certain embodiments, the AAV particles may be delivered using an MRI-guided device. Non-limiting examples of MRI-guided devices are described in U.S. Pat. Nos. 9,055,884, 9,042,958, 8,886,288, 8,768,433, 8,396,532, 8,369,930, 8,374,677, and 8,175,677 and US Patent Application No. US20140024927 the contents of each of which are herein incorporated by reference in their entireties. As a non-limiting example, the MRI-guided device may be able to provide data in real time such as those described in U.S. Pat. Nos. 8,886,288 and 8,768,433, the contents of each of which is herein incorporated by reference in its entirety. As another non-limiting example, the MRI-guided device or system may be used with a targeting cannula such as the systems described in U.S. Pat. Nos. 8,175,677 and 8,374,677, the contents of each of which are herein incorporated by reference in their entireties. As yet another non-limiting example, the MRI-guided device includes a trajectory guide frame for guiding an interventional device as described, for example, in U.S. Pat. No. 9,055,884 and US Patent Application No. US20140024927, the contents of each of which are herein incorporated by reference in their entireties.

[0504] In certain embodiments, the AAV particles may be delivered using an MRI-compatible tip assembly. Non-limiting examples of MRI-compatible tip assemblies are described in US Patent Publication No. US20140275980, the contents of which is herein incorporated by reference in its entirety.

[0505] In certain embodiments, the AAV particles may be delivered using a cannula which is MRI-compatible. Non-limiting examples of MRI-compatible cannulas include those taught in International Patent Publication No. WO2011130107, the contents of which are herein incorporated by reference in its entirety.

[0506] In certain embodiments, the AAV particles may be delivered using a catheter which is MRI-compatible. Non-limiting examples of MRI-compatible catheters include those taught in International Patent Publication No. WO2012116265, U.S. Pat. No. 8,825,133 and US Patent Publication No. US20140024909, the contents of each of which are herein incorporated by reference in their entireties.

[0507] In certain embodiments, the AAV particles may be delivered using a device with an elongated tubular body and a diaphragm as described in US Patent Publication Nos. US20140276582 and US20140276614, the contents of each of which are herein incorporated by reference in their entireties.

[0508] In certain embodiments, the AAV particles may be delivered using an MRI compatible localization and/or guidance system such as, but not limited to, those described in US Patent Publication Nos. US20150223905 and US20150230871, the contents of each of which are herein incorporated by reference in their entireties. As a non-limiting example, the MRI compatible localization and/or guidance systems may comprise a mount adapted for fixation to a patient, a targeting cannula with a lumen configured to attach to the mount so as to be able to controllably translate in at least three dimensions, and an elongate probe configured to snugly advance via slide and retract in the targeting cannula lumen, the elongate probe comprising at least one of a stimulation or recording electrode.

[0509] In certain embodiments, the AAV particles may be delivered to a subject using a trajectory frame as described in US Patent Publication Nos. US20150031982 and US20140066750 and International Patent Publication Nos. WO2015057807 and WO2014039481, the contents of each of which are herein incorporated by reference in their entireties.

[0510] In certain embodiments, the AAV particles may be delivered to a subject using a gene gun.

### VII. Definitions

[0511] Adeno-associated virus: As used herein, the term “adeno-associated virus” or “AAV” refers to members of the dependovirus genus comprising any particle, sequence, gene, protein, or component derived therefrom.

[0512] AAV Particle: As used herein, an “AAV particle” is a virus which comprises a capsid and a viral genome with at least one payload region and at least one ITR. As used herein “AAV particles of the disclosure” are AAV particles comprising a parent capsid sequence with at least one targeting peptide insert. AAV particles of the present disclosure may be produced recombinantly and may be based on adeno-associated virus (AAV) parent or reference sequences. AAV particles may be derived from any serotype, described herein or known in the art, including combinations of serotypes (i.e., “pseudotyped” AAV) or from various genomes (e.g., single stranded or self-complementary). In addition, the AAV particle may be replication defective and/or targeted. In certain embodiments, the AAV particle may have a targeting peptide inserted into the capsid to enhance tropism for a desired target tissue. It is to be understood that reference to the AAV particles of the disclosure also includes pharmaceutical compositions thereof, even if not explicitly recited.

[0513] Administering: As used herein, the term “administering” refers to providing a pharmaceutical agent or composition to a subject.

[0514] Amelioration: As used herein, the term “amelioration” or “ameliorating” refers to a lessening of severity of at least one indicator of a condition or disease. For example, in the context of neurodegeneration disorder, amelioration includes the reduction of neuron loss.

[0515] Animal: As used herein, the term “animal” refers to any member of the animal kingdom. In some embodiments, “animal” refers to humans at any stage of development. In some embodiments, “animal” refers to non-human animals at any stage of development. In certain embodiments, the non-human animal is a mammal (e.g., a rodent, a mouse, a rat, a rabbit, a monkey, a dog, a cat, a sheep, cattle, a primate, or a pig). In some embodiments, animals include, but are not limited to, mammals, birds, reptiles, amphibians, fish, and worms. In some embodiments, the animal is a transgenic animal, genetically-engineered animal, or a clone.

[0516] Antisense strand: As used herein, the term “the antisense strand” or “the first strand” or “the guide strand” of a siRNA molecule refers to a strand that is substantially complementary to a section of about 10-50 nucleotides, e.g., about 15-30, 16-25, 18-23 or 19-22 nucleotides of the mRNA of a gene targeted for silencing. The antisense strand or first strand has sequence sufficiently complementary to the desired target mRNA sequence to direct target-specific silencing, e.g., complementarity sufficient to trigger the destruction of the desired target mRNA by the RNAi machinery or process.

[0517] Approximately: As used herein, the term “approximately” or “about,” as applied to one or more values of interest, refers to a value that is similar to a stated reference value. In certain embodiments, the term “approximately” or “about” refers to a range of values that fall within 25%, 20%, 19%, 18%, 17%, 16%, 15%, 14%, 13%, 12%, 11%, 10%, 9%, 8%, 7%, 6%, 5%, 4%, 3%, 2%, 1%, or less in either direction (greater than or less than) of the stated reference value unless otherwise stated or otherwise evident from the context (except where such number would exceed 100% of a possible value).

[0518] Capsid: As used herein, the term “capsid” refers to the protein shell of a virus particle.

[0519] Complementary and substantially complementary: As used herein, the term “complementary” refers to the ability of polynucleotides to form base pairs with one another. Base pairs are typically formed by hydrogen bonds between nucleotide units in antiparallel polynucleotide strands. Complementary polynucleotide strands can form base pairs in the Watson-Crick manner (e.g., A to T, A to U, C to G), or in any other manner that allows for the formation of duplexes. As persons skilled in the art are aware, when using RNA as opposed to DNA, uracil rather than thymine is the base that is considered to be complementary to adenine. However, when a U is denoted in the context of the present disclosure, the ability to substitute a T is implied, unless otherwise stated. Perfect complementarity or 100% complementarity refers to the situation in which each nucleotide unit of one polynucleotide strand can form a hydrogen bond with a nucleotide unit of a second polynucleotide strand. Less than perfect complementarity refers to the situation in which some, but not all, nucleotide units of two strands can form hydrogen bond with each other. For example, for two 20-mers, if only two base pairs on each strand can form a hydrogen bond with each other, the polynucleotide strands exhibit 10% complementarity. In the same example, if 18 base pairs on each strand can form hydrogen bonds with each other, the polynucleotide strands exhibit 90% complementarity. As used herein, the term “substantially complementary” means that the siRNA has a sequence (e.g., in the antisense strand) which is sufficient to bind the desired target mRNA, and to trigger the RNA silencing of the target mRNA.

[0520] Control Elements: As used herein, “control elements”, “regulatory control elements” or “regulatory sequences” refers to promoter regions, polyadenylation signals, transcription termination sequences, upstream regulatory domains, origins of replication, internal ribosome entry sites (“IRES”), enhancers, and the like, which provide for the replication, transcription and translation of a coding sequence in a recipient cell. Not all of these control elements need always be present as long as the selected coding sequence is capable of being replicated, transcribed and/or translated in an appropriate host cell.

[0521] Delivery: As used herein, “delivery” refers to the act or manner of delivering an AAV particle, a compound, substance, entity, moiety, cargo or payload.

[0522] Element: As used herein, the term “element” refers to a distinct portion of an entity. In some embodiments, an element may be a polynucleotide sequence with a specific purpose, incorporated into a longer polynucleotide sequence.

[0523] Encapsulate: As used herein, the term “encapsulate” means to enclose, surround or encase. As an example, a capsid protein often encapsulates a viral genome.

[0524] Engineered: As used herein, embodiments of the disclosure are “engineered” when they are designed to have a feature or property, whether structural or chemical, that varies from a starting point, wild type or native molecule.

[0525] Effective Amount: As used herein, the term “effective amount” of an agent is that amount sufficient to effect beneficial or desired results, for example, clinical results, and, as such, an “effective amount” depends upon the context in which it is being applied. For example, in the context of administering an agent that treats cancer, an effective amount of an agent is, for example, an amount sufficient to achieve treatment, as defined herein, of cancer, as compared to the response obtained without administration of the agent.

[0526] Expression: As used herein, “expression” of a nucleic acid sequence refers to one or more of the following events: (1) production of an RNA template from a DNA sequence (e.g., by transcription); (2) processing of an RNA transcript (e.g., by splicing, editing, 5′ cap formation, and/or 3′ end processing); (3) translation of an RNA into a polypeptide or protein; and (4) post-translational modification of a polypeptide or protein.

[0527] Feature: As used herein, a “feature” refers to a characteristic, a property, or a distinctive element.

[0528] Formulation: As used herein, a “formulation” includes at least one AAV particle (active ingredient) and an excipient, and/or an inactive ingredient.

[0529] Fragment: A “fragment,” as used herein, refers to a portion. For example, an antibody fragment may comprise a CDR, or a heavy chain variable region, or a scFv, etc.

[0530] Functional: As used herein, a “functional” biological molecule is a biological molecule in a form in which it exhibits a property and/or activity by which it is characterized.

[0531] Gene expression: The term “gene expression” refers to the process by which a nucleic acid sequence undergoes successful transcription and in most instances translation to produce a protein or peptide. For clarity, when reference is made to measurement of “gene expression”, this should be understood to mean that measurements may be of the nucleic acid product of transcription, e.g., RNA or mRNA or of the amino acid product of translation, e.g., polypeptides or peptides. Methods of measuring the amount or levels of RNA, mRNA, polypeptides and peptides are well known in the art.

[0532] Homology: As used herein, the term “homology” refers to the overall relatedness between polymeric molecules, e.g. between polynucleotide molecules (e.g. DNA molecules and/or RNA molecules) and/or between polypeptide molecules. In some embodiments, polymeric molecules are considered to be “homologous” to one another if their sequences are at least 25%, 30%, 35%, 40%, 45%, 50%, 55%, 60%, 65%, 70%, 75%, 80%, 85%, 90%, 95%, or 99% identical or similar. The term “homologous” necessarily refers to a comparison between at least two sequences (polynucleotide or polypeptide sequences). In accordance with the disclosure, two polynucleotide sequences are considered to be homologous if the polypeptides they encode are at least about 50%, 60%, 70%, 80%, 90%, 95%, or even 99% for at least one stretch of at least about 20 amino acids. In some embodiments, homologous polynucleotide sequences are characterized by the ability to encode a stretch of at least 4-5 uniquely specified amino acids. For polynucleotide sequences less than 60 nucleotides in length, homology is determined by the ability to encode a stretch of at least 4-5 uniquely specified amino acids. In accordance with the disclosure, two protein sequences are considered to be homologous if the proteins are at least about 50%, 60%, 70%, 80%, or 90% identical for at least one stretch of at least about 20 amino acids.

[0533] Identity: As used herein, the term “identity” refers to the overall relatedness between polymeric molecules, e.g., between polynucleotide molecules (e.g. DNA molecules and/or RNA molecules) and/or between polypeptide molecules. Calculation of the percent identity of two polynucleotide sequences, for example, can be performed by aligning the two sequences for optimal comparison purposes (e.g., gaps can be introduced in one or both of a first and a second nucleic acid sequences for optimal alignment and non-identical sequences can be disregarded for comparison purposes). In certain embodiments, the length of a sequence aligned for comparison purposes is at least 30%, at least 40%, at least 50%, at least 60%, at least 70%, at least 80%, at least 90%, at least 95%, or 100% of the length of the reference sequence. The nucleotides at corresponding nucleotide positions are then compared. When a position in the first sequence is occupied by the same nucleotide as the corresponding position in the second sequence, then the molecules are identical at that position. The percent identity between the two sequences is a function of the number of identical positions shared by the sequences, taking into account the number of gaps, and the length of each gap, which needs to be introduced for optimal alignment of the two sequences. The comparison of sequences and determination of percent identity between two sequences can be accomplished using a mathematical algorithm. For example, the percent identity between two nucleotide sequences can be determined using methods such as those described in Computational Molecular Biology. Lesk, A. M., ed., Oxford University Press, New York, 1988; Biocomputing: Informatics and Genome Projects, Smith, D. W., ed., Academic Press, New York, 1993; Sequence Analysis in Molecular Biology, von Heinje, G., Academic Press, 1987; Computer Analysis of Sequence Data, Part I, Griffin, A. M., and Griffin, H. G., eds., Humana Press, New Jersey, 1994; and Sequence Analysis Primer, Gribskov, M. and Devereux, J., eds., M Stockton Press, New York, 1991; the contents of each of which are incorporated herein by reference in their entirety. For example, the percent identity between two nucleotide sequences can be determined using the algorithm of Meyers and Miller (CABIOS, 1989, 4:11-17), which has been incorporated into the ALIGN program (version 2.0) using a PAM120 weight residue table, a gap length penalty of 12 and a gap penalty of 4. The percent identity between two nucleotide sequences can, alternatively, be determined using the GAP program in the GCG software package using an NWSgapdna.CMP matrix. Methods commonly employed to determine percent identity between sequences include, but are not limited to those disclosed in Carillo, H., and Lipman, D., SIAM J Applied Math., 48:1073 (1988); incorporated herein by reference. Techniques for determining identity are codified in publicly available computer programs. Exemplary computer software to determine homology between two sequences include, but are not limited to, GCG program package, Devereux, J., et al., Nucleic Acids Research, 12(1), 387 (1984)), BLASTP, BLASTN, and FASTA Altschul, S. F. et al., J. Molec. Biol., 215, 403 (1990)).

[0534] Inhibit expression of a gene: As used herein, the phrase “inhibit expression of a gene” means to cause a reduction in the amount of an expression product of the gene. The expression product can be an RNA transcribed from the gene (e.g., an mRNA) or a polypeptide translated from an mRNA transcribed from the gene. Typically, a reduction in the level of an mRNA results in a reduction in the level of a polypeptide translated therefrom. The level of expression may be determined using standard techniques for measuring mRNA or protein.

[0535] Insert: As used herein the term “insert” may refer to the addition of a targeting peptide sequence to a parent AAV capsid sequence. An “insertion” may result in the replacement of one or more amino acids of the parent AAV capsid sequence. Alternatively, an insertion may result in no changes to the parent AAV capsid sequence beyond the addition of the targeting peptide sequence.

[0536] Inverted terminal repeat: As used herein, the term “inverted terminal repeat” or “ITR” refers to a cis-regulatory element for the packaging of polynucleotide sequences into viral capsids.

[0537] Library: As used herein, the term “library” refers to a diverse collection of linear polypeptides, polynucleotides, viral particles, or viral vectors. As examples, a library may be a DNA library or an AAV capsid library.

[0538] Neurological disease: As used herein, a “neurological disease” is any disease associated with the central or peripheral nervous system and components thereof (e.g., neurons).

[0539] Naturally Occurring: As used herein, “naturally occurring” or “wild-type” means existing in nature without artificial aid, or involvement of the hand of man.

[0540] Open reading frame: As used herein, “open reading frame” or “ORF” refers to a sequence which does not contain a stop codon in a given reading frame.

[0541] Parent sequence: As used herein, a “parent sequence” is a nucleic acid or amino acid sequence from which a variant is derived. In certain embodiments, a parent sequence is a sequence into which a heterologous sequence is inserted. In other words, a parent sequence may be considered an acceptor or recipient sequence. In certain embodiments, a parent sequence is an AAV capsid sequence into which a targeting sequence is inserted.

[0542] Particle: As used herein, a “particle” is a virus comprised of at least two components, a protein capsid and a polynucleotide sequence enclosed within the capsid.

[0543] Patient: As used herein, “patient” refers to a subject who may seek or be in need of treatment, requires treatment, is receiving treatment, will receive treatment, or a subject who is under care by a trained professional for a particular disease or condition.

[0544] Payload region: As used herein, a “payload region” is any nucleic acid sequence (e.g., within the viral genome) which encodes one or more “payloads” of the disclosure. As non-limiting examples, a payload region may be a nucleic acid sequence within the viral genome of an AAV particle, which encodes a payload, wherein the payload is an RNAi agent or a polypeptide. Payloads of the present disclosure may be, but are not limited to, peptides, polypeptides, proteins, antibodies, RNAi agents, etc.

[0545] Peptide: As used herein, “peptide” is less than or equal to 50 amino acids long, e.g., about 5, 10, 15, 20, 25, 30, 35, 40, 45, or 50 amino acids long.

[0546] Pharmaceutically acceptable: The phrase “pharmaceutically acceptable” is employed herein to refer to those compounds, materials, compositions, and/or dosage forms which are, within the scope of sound medical judgment, suitable for use in contact with the tissues of human beings and animals without excessive toxicity, irritation, allergic response, or other problem or complication, commensurate with a reasonable benefit/risk ratio.

[0547] Preventing: As used herein, the term “preventing” or “prevention” refers to partially or completely delaying onset of an infection, disease, disorder and/or condition; partially or completely delaying onset of one or more symptoms, features, or clinical manifestations of a particular infection, disease, disorder, and/or condition; partially or completely delaying onset of one or more symptoms, features, or manifestations of a particular infection, disease, disorder, and/or condition; partially or completely delaying progression from an infection, a particular disease, disorder and/or condition; and/or decreasing the risk of developing pathology associated with the infection, the disease, disorder, and/or condition.

[0548] Prophylactic: As used herein, “prophylactic” refers to a therapeutic or course of action used to prevent the spread of disease.

[0549] Prophylaxis: As used herein, a “prophylaxis” refers to a measure taken to maintain health and prevent the spread of disease.

[0550] Region: As used herein, the term “region” refers to a zone or general area. In some embodiments, when referring to a protein or protein module, a region may comprise a linear sequence of amino acids along the protein or protein module or may comprise a three-dimensional area, an epitope and/or a cluster of epitopes. In some embodiments, regions comprise terminal regions. As used herein, the term “terminal region” refers to regions located at the ends or termini of a given agent. When referring to proteins, terminal regions may comprise N- and/or C-termini.

[0551] In some embodiments, when referring to a polynucleotide, a region may comprise a linear sequence of nucleic acids along the polynucleotide or may comprise a three-dimensional area, secondary structure, or tertiary structure. In some embodiments, regions comprise terminal regions. As used herein, the term “terminal region” refers to regions located at the ends or termini of a given agent. When referring to polynucleotides, terminal regions may comprise 5′ and/or 3′ termini.

[0552] RNA or RNA molecule: As used herein, the term “RNA” or “RNA molecule” or “ribonucleic acid molecule” refers to a polymer of ribonucleotides; the term “DNA” or “DNA molecule” or “deoxyribonucleic acid molecule” refers to a polymer of deoxyribonucleotides. DNA and RNA can be synthesized naturally, e.g., by DNA replication and transcription of DNA, respectively; or be chemically synthesized. DNA and RNA can be single-stranded (i.e., ssRNA or ssDNA, respectively) or multi-stranded (e.g., double stranded, i.e., dsRNA and dsDNA, respectively). The term “mRNA” or “messenger RNA”, as used herein, refers to a single stranded RNA that encodes the amino acid sequence of one or more polypeptide chains.

[0553] RNA interfering or RNAi: As used herein, the term “RNA interfering” or “RNAi” refers to a sequence specific regulatory mechanism mediated by RNA molecules which results in the inhibition or interfering or “silencing” of the expression of a corresponding protein-coding gene. RNAi has been observed in many types of organisms, including plants, animals and fungi. RNAi occurs in cells naturally to remove foreign RNAs (e.g., viral RNAs). Natural RNAi proceeds via fragments cleaved from free dsRNA which direct the degradative mechanism to other similar RNA sequences. RNAi is controlled by the RNA-induced silencing complex (RISC) and is initiated by short/small dsRNA molecules in cell cytoplasm, where they interact with the catalytic RISC component argonaute. The dsRNA molecules can be introduced into cells exogenously. Exogenous dsRNA initiates RNAi by activating the ribonuclease protein Dicer, which binds and cleaves dsRNAs to produce double-stranded fragments of 21-25 base pairs with a few unpaired overhang bases on each end. These short double stranded fragments are called small interfering RNAs (siRNAs).

[0554] RNAi agent: As used herein, the term “RNAi agent” refers to an RNA molecule, or its derivative, that can induce inhibition, interfering, or “silencing” of the expression of a target gene and/or its protein product. An RNAi agent may knock-out (virtually eliminate or eliminate) expression, or knock-down (lessen or decrease) expression. The RNAi agent may be, but is not limited to, dsRNA, siRNA, shRNA, pre-miRNA, pri-miRNA, miRNA, stRNA, lncRNA, piRNA, or snoRNA.

[0555] Sample: As used herein, the term “sample” or “biological sample” refers to a subset of its tissues, cells or component parts (e.g. body fluids, including but not limited to blood, serum, mucus, lymphatic fluid, synovial fluid, cerebrospinal fluid, saliva, amniotic fluid, amniotic cord blood, urine, vaginal fluid and semen). A sample further may include a homogenate, lysate or extract prepared from a whole organism or a subset of its tissues, cells or component parts, or a fraction or portion thereof, including but not limited to, for example, plasma, serum, spinal fluid, lymph fluid, the external sections of the skin, respiratory, intestinal, and genitourinary tracts, tears, saliva, milk, blood cells, tumors, organs. A sample further refers to a medium, such as a nutrient broth or gel, which may contain cellular components, such as proteins or nucleic acid molecule.

[0556] Self-complementary viral particle: As used herein, a “self-complementary viral particle” is a particle comprised of at least two components, a protein capsid and a self-complementary viral genome enclosed within the capsid.

[0557] Sense Strand: As used herein, the term “the sense strand” or “the second strand” or “the passenger strand” of a siRNA molecule refers to a strand that is complementary to the antisense strand or first strand. The antisense and sense strands of a siRNA molecule are hybridized to form a duplex structure. As used herein, a “siRNA duplex” includes a siRNA strand having sufficient complementarity to a section of about 10-50 nucleotides of the mRNA of the gene targeted for silencing and a siRNA strand having sufficient complementarity to form a duplex with the other siRNA strand.

[0558] Similarity: As used herein, the term “similarity” refers to the overall relatedness between polymeric molecules, e.g. between polynucleotide molecules (e.g. DNA molecules and/or RNA molecules) and/or between polypeptide molecules. Calculation of percent similarity of polymeric molecules to one another can be performed in the same manner as a calculation of percent identity, except that calculation of percent similarity takes into account conservative substitutions as is understood in the art.

[0559] Short interfering RNA or siRNA: As used herein, the terms “short interfering RNA,” “small interfering RNA” or “siRNA” refer to an RNA molecule (or RNA analog) comprising between about 5-60 nucleotides (or nucleotide analogs) which is capable of directing or mediating RNAi. Preferably, a siRNA molecule comprises between about 15-30 nucleotides or nucleotide analogs, such as between about 16-25 nucleotides (or nucleotide analogs), between about 18-23 nucleotides (or nucleotide analogs), between about 19-22 nucleotides (or nucleotide analogs) (e.g., 19, 20, 21 or 22 nucleotides or nucleotide analogs), between about 19-25 nucleotides (or nucleotide analogs), and between about 19-24 nucleotides (or nucleotide analogs). The term “short” siRNA refers to a siRNA comprising 5-23 nucleotides, preferably 21 nucleotides (or nucleotide analogs), for example, 19, 20, 21 or 22 nucleotides. The term “long” siRNA refers to a siRNA comprising 24-60 nucleotides, preferably about 24-25 nucleotides, for example, 23, 24, 25 or 26 nucleotides. Short siRNAs may, in some instances, include fewer than 19 nucleotides. e.g., 16, 17 or 18 nucleotides, or as few as 5 nucleotides, provided that the shorter siRNA retains the ability to mediate RNAi. Likewise, long siRNAs may, in some instances, include more than 26 nucleotides, e.g., 27, 28, 29, 30, 35, 40, 45, 50, 55, or even 60 nucleotides, provided that the longer siRNA retains the ability to mediate RNAi or translational repression absent further processing, e.g., enzymatic processing, to a short siRNA. siRNAs can be single stranded RNA molecules (ss-siRNAs) or double stranded RNA molecules (ds-siRNAs) comprising a sense strand and an antisense strand which hybridized to form a duplex structure called an siRNA duplex.

[0560] Subject: As used herein, the term “subject” or “patient” refers to any organism to which a composition in accordance with the disclosure may be administered, e.g., for experimental, diagnostic, prophylactic, and/or therapeutic purposes. Typical subjects include animals (e.g., mammals such as mice, rats, rabbits, non-human primates, and humans) and/or plants.

[0561] Substantially: As used herein, the term “substantially” refers to the qualitative condition of exhibiting total or near-total extent or degree of a characteristic or property of interest. One of ordinary skill in the biological arts will understand that biological and chemical phenomena rarely, if ever, go to completion and/or proceed to completeness or achieve or avoid an absolute result. The term “substantially” is therefore used herein to capture the potential lack of completeness inherent in many biological and chemical phenomena.

[0562] Targeting peptide: As used herein, a “targeting peptide” refers to a peptide of 3-20 amino acids in length. These targeting peptides may be inserted into, or attached to, a parent amino acid sequence to alter the characteristics (e.g., tropism) of the parent protein. As a non-limiting example, the targeting peptide can be inserted into an AAV capsid sequence for enhanced targeting to a desired cell-type, tissue, organ or organism. It is to be understood that a targeting peptide is encoded by a targeting polynucleotide which may similarly be inserted into a parent polynucleotide sequence. Therefore, a “targeting sequence” refers to a peptide or polynucleotide sequence for insertion into an appropriate parent sequence (amino acid or polynucleotide, respectively).

[0563] Target Cells: As used herein, “target cells” or “target tissue” refers to any one or more cells of interest. The cells may be found in vitro, in vivo, in situ or in the tissue or organ of an organism. The organism may be an animal, preferably a mammal, more preferably a human and most preferably a patient.

[0564] Therapeutic Agent: The term “therapeutic agent” refers to any agent that, when administered to a subject, has a therapeutic, diagnostic, and/or prophylactic effect and/or elicits a desired biological and/or pharmacological effect.

[0565] Therapeutically effective amount: As used herein, the term “therapeutically effective amount” means an amount of an agent to be delivered (e.g., nucleic acid, drug, therapeutic agent, diagnostic agent, prophylactic agent, etc.) that is sufficient, when administered to a subject suffering from or susceptible to an infection, disease, disorder, and/or condition, to treat, improve symptoms of, diagnose, prevent, and/or delay the onset of the infection, disease, disorder, and/or condition. In some embodiments, a therapeutically effective amount is provided in a single dose.

[0566] Therapeutically effective outcome: As used herein, the term “therapeutically effective outcome” means an outcome that is sufficient in a subject suffering from or susceptible to an infection, disease, disorder, and/or condition, to treat, improve symptoms of, diagnose, prevent, and/or delay the onset of the infection, disease, disorder, and/or condition.

[0567] Treating: As used herein, the term “treating” refers to partially or completely alleviating, ameliorating, improving, relieving, delaying onset of, inhibiting progression of, reducing severity of, and/or reducing incidence of one or more symptoms or features of a particular infection, disease, disorder, and/or condition. For example, “treating” cancer may refer to inhibiting survival, growth, and/or spread of a tumor. Treatment may be administered to a subject who does not exhibit signs of a disease, disorder, and/or condition and/or to a subject who exhibits only early signs of a disease, disorder, and/or condition for the purpose of decreasing the risk of developing pathology associated with the disease, disorder, and/or condition.

[0568] Vector: As used herein, the term “vector” refers to any molecule or moiety which transports, transduces or otherwise acts as a carrier of a heterologous molecule. In some embodiments, vectors may be plasmids. In some embodiments, vectors may be viruses. An AAV particle is an example of a vector. Vectors of the present disclosure may be produced recombinantly and may be based on and/or may comprise adeno-associated virus (AAV) parent or reference sequences. The heterologous molecule may be a polynucleotide and/or a polypeptide.

[0569] Viral Genome: As used herein, the terms “viral genome” or “vector genome” refer to the nucleic acid sequence(s) encapsulated in an AAV particle. A viral genome comprises a nucleic acid sequence with at least one payload region encoding a payload and at least one ITR

[0570] The present disclosure is further illustrated by the following non-limiting examples.

### EXAMPLES

### Example 1. Targeting Peptides Identified Using CREATE in Mice

[0571] The CREATE method for generating libraries of targeting peptides has previously been described in Deverman et al (Nature Biotechnology 34(2):204-209 (2016), the contents of which are herein incorporated in their entirety. This method was used to identify targeting peptides for enhancing AAV tropism to desired tissues (e.g., CNS). In short, random 7-amino acid peptides were inserted between amino acids 588 and 589 of K449R AAV9 (SEQ ID NO: 3), by inserting, at the DNA level, the nucleotides coding for random 7 amino acids into the corresponding region of the K449R AAV9 nucleotide sequence, to generate a DNA library. The K449R variant of AAV9 has the same function as wild-type AAV9. The DNA library was then used to create an AAV particle library which was intravenously administered to adult GFAP-Cre mice. DNAs packaged in AAV particles transducing the Cre-expressing cells were recovered in a Cre-dependent manner a week after administration. The recovered DNAs were cloned into the K449R AAV9 backbone to create a 2^{nd} round DNA library. A second round of in-vivo selection yielded a series of AAV variants comprising targeting peptides that enhanced tropism for CNS tissues. Examples of targeting peptides isolated in such a manner include targeting peptides PHP.B (TLAVPFK; SEQ ID NO: 43054), PHP.A (YTLSQGW; SEQ ID NO: 43055), PHP.B2 (SVSKPFL; SEQ ID NO: 43056), PHP.B3 (FTLTTPK; SEQ ID NO: 43057), PHP.S (QAVRTSL; SEQ ID NO: 43058), G2B-A7 (MNSTKNV; SEQ ID NO: 43060), and G2B5-G9 (VSGGHHS; SEQ ID NO: 43061) shown in Table 5 below.

TABLE 5
Exemplar Targeting Peptides

| Targeting | | | SEQ ID |
|---|---|---|---|
| Peptide | Sequence | Reference Information | NO: |
| PHP.B | TLAVPFK | WO2015038958 SEQ ID NO: 1 | 43054 |
| PHP.A | YTLSQGW | WO2015038958 SEQ ID NO: 60 | 43055 |
| PHP.B2 | SVSKPFL | WO2015038958 SEQ ID NO: 28 | 43056 |
| PHP.B3 | FTLTTPK | WO2015038958 SEQ ID NO: 29 | 43057 |
| PHP.S | QAVRTSL | WO2017100671 SEQ ID NO: 37 | 43058 |
| PRP.N | DGTLAVPFKAQ | WO2017100671 SEQ ID NO: 4 | 43059 |
| G2B4 (G2B-A7) | MNSTKNV | WO2017100671 SEQ ID NO: 43 | 43060 |
| G2B5 (G2B5-G9) | VSGGHHS | WO2017100671 SEQ ID NO: 44 | 43061 |
| PHP.B-EST | ESTLAVPFKAQ | WO2017100671 SEQ ID NO: 5 | 43062 |
| PHP.B-GGT | GGTLAVPFKAQ | WO2017100671 SEQ ID NO: 6 | 43063 |
| PHR.B-ATP | AQTLATPFKAQ | WO2017100671 SEQ ID NO: 7 | 43064 |
| PHP.B-ATT-T | ATTLATPFKAQ | WO2017100671 SEQ ID NO: 8 | 43065 |
| PHP.B-DGT-T | DGTLATPFKAQ | WO2017100671 SEQ ID NO: 9 | 43066 |
| PHP.B-GGT-T | GGTLATPFKAQ | WO2017100671 SEQ ID NO: 10 | 43067 |
| PHP.B-SGS | SGSLAVPFKAQ | WO2017100671 SEQ ID NO: 11 | 43068 |
| PHP.B-AQP | AQTLAQPFKAQ | WO2017100671 SEQ ID NO: 12 | 43069 |
| PHP.B-QQP | AQTLQQPFKAQ | WO2017100671 SEQ ID NO: 13 | 43070 |
| PHP.B-SNP(3) | AQTLSNPFKAQ | WO2017100671 SEQ ID NO: 14 | 43071 |
| PHPVB-SNP | AQTLAVPFSNP | WO2017100671 SEQ ID NO: 15 | 43072 |

[0572] The PHP.B 7-mer and flanking sequences were further evolved through site saturation mutagenesis of sets of three consecutive amino acids, using NNK codons, wherein N=any base and K is a G or T. DNA libraries of these site saturation mutagenesis sequences were generated to then create AAV particle libraries. CREATE was used for AAV particle selection in three different CNS cell populations, 1) astrocytes (GFAP-Cre), 2) GABA-ergic (inhibitory) neurons (VGAT-IRES-Cre), and 3) a subset of glutamatergic (excitatory) neurons (Vglut2-IRES-CRE). AAV particles transducing Cre-expressing cells were subjected to two rounds of selection and were then recovered and assessed by clonal and/or next generation sequencing (NGS). An example of a targeting peptide isolated in such a manner include PHP.N (DGTLAVPFKAQ; SEQ ID NO: 43059), PHP.B-EST (ESTLAVPFKAQ; SEQ ID NO: 43062), PHP.B-GGT (GGTLAVPFKAQ; SEQ ID NO: 43063), PHP.B-ATP (AQTLATPFKAQ; SEQ ID NO: 43064), PHP.B-ATT-T (ATTLATPFKAQ; SEQ ID NO: 43065), PHP.B-DGT-T (DGTLATPFKAQ; SEQ ID NO: 43066). PHP.B-GGT-T (GGTLATPFKAQ; SEQ ID NO: 43067), PHP.B-SGS (SGSLAVPFKAQ; SEQ ID NO: 43068), PHP.B-AQP (AQTLAQPFKAQ; SEQ ID NO: 43069), PHP.B-QQP (AQTLQQPFKAQ; SEQ ID NO: 43070). PHP.B-SNP(3) (AQTLSNPFKAQ; SEQ ID NO: 43071), and PHP.B-SNP (AQTLAVPFSNP; SEQ ID NO: 43072) as shown in Table 5 above.

### Example 2. Identification of Improved CNS Targeting Peptides and AAV Particles

[0573] Using CREATE in mice to isolate novel targeting peptides for enhancing tropism of AAV particles to the CNS after intravenous delivery has proven useful in identifying targeting peptides and associated AAV variants such as PHP.B and PHPN. These vectors have shown broad CNS distribution following intravenous administration when tested in mice, however, whether these vectors will show similar efficacy in NHP or humans remains to be determined. Even if efficacy is the same, the dose necessary for CNS distribution after IV administration in a large mammal may be prohibitive. Continuing to evolve targeting peptides in systems more closely matched to humans (e.g., NHP) can help generate targeting peptides and AAV particles with more desirable CNS transduction profiles, for use in humans using intravenous delivery.

### Pilot Study to Test Co-Transduction of AAV-Cre Vectors and PHP.N Reporter

[0574] To use CREATE in non-transgenic NHP lacking Cre expression, AAV-Cre vectors need to be delivered intraparenchymally to the target CNS tissues of the NHP. To evaluate co-transduction of intraparenchymally (IPa) administered Cre-expressing AAV particles and an intravenously administered Cre-dependent reporter packaged in an AAV particle, the system will first be tested in mice.

[0575] Four Cre-vectors will be created, 1) for ubiquitous expression using a CAG, UBC or EF1α promoter (CAG- UBC- or EF1α-Cre), 2) for neuronal expression using a human synapsin promoter (hSyn1-Cre), 3) for astrocytic expression using a truncated GFAP promoter (GfAB₁D-Cre, and 4) for oligodendrocyte expression using a myelin basic promoter (MBP-Cre), then packaged into an AAV capsid (AAV1, AAV9, AAVrh10 or AAVPHP.B) to generate AAV particles. A vector expressing a fluorescent protein can be used to mark vector spread at the injection site (e.g., CAG-mRuby2/tdTomato).

[0576] Two reporter AAV particles will be created for testing, 1) AAVPHP.N:CAG-DIO-mTurquoise2 (forward)/GFP(reverse) and 2) AAV1/9/rh10-CAG-DIO-mTurquoise2(f)/GFP(r). These reporter AAV particles will be delivered either by intravenous administration or by co-intraparenchymal administration with the Cre-vectors. Only those cells of the CNS also expressing Cre (co-transduced by a cre-vector administered intraparenchymally) will express the reporter.

[0577] Each cre-vector will be injected into two mice and each mouse will also be administered one of the two reporter AAV particles (16 mice). The reporter AAV particles may be administered intravenously or intraparenchymally. Four mice will serve as non-Cre mRuby2/tdTomato controls. Using an intracranial surgical approach, Cre-vectors (and/or a reporter AAV) will be intraparenchymally administered to the striatum, thalamus and/or cortex at a volume of 0.5 μL and a concentration of 3×10¹⁰ to 3×10¹⁰ vg/site. The reporter AAV particles administered intravenously will be given at a concentration of 3×10¹¹ vg.

[0578] Mice will be evaluated three weeks after AAV particle administration. Co-transduction efficiency will be evaluated based on imaging of the coincidence of green and red fluorescent signals.

[0579] It is anticipated that the IV-administered reporter AAV particles will deliver the reporter to CNS tissues expressing Cre and mRuby2/tdTomato (e.g., striatum, thalamus and/or cortex). To be considered successful, the results of this pilot experiment will show a high yield of GFP (reporter) transduced neurons in the mRuby/tdTomato transduced brain region (delivered by IPa). As an example, >50% of neurons and astrocytes and 10-30% of oligodendrocytes in the mRuby/tdTomato transduced brain region may also express GFP.

[0580] It is possible that off-target cell-types will be transduced by the Cre-vectors and reporter AAV particles. In this case, miRNA binding sites complementary to miRNAs expressed in these off-target cell types, but not in the target cell type, may be introduced into the viral genomes of the AAV particles for enhanced targeting and specificity.

### Pilot Mouse AAV-Cre Based AAV-PHP.B/N Library Selection

[0581] In order to test whether expected and/or novel capsid sequences comprising targeting peptides can be recovered from the brain following intraparenchymal delivery to the striatum, thalamus and/or cortex of the Cre-vectors and intravenous delivery of an AAV capsid library, a pilot study will first be performed in mice. This study can also be used to test library diversification/randomization strategies.

[0582] Four DNA libraries based on PHP.B/PHP.N will be generated by PCR, with mixed bases at the desired positions. PCR fragments will be cloned into the library acceptor AAV genome (e.g., AAV9) by Gibson assembly and processed to remove unassembled DNA. The AAV DNA libraries will then be transfected directly into HEK293 cells for AAV particle production. The libraries will be built into an AAV vector with rep/cap in cis and a floxed element. Libraries of AAV particles will be generated based on these DNA libraries.

[0583] Library 1 will extend the targeting peptide sequence to include the 2-3 amino acids immediately upstream and/or downstream of the 7-mer peptide insert. These amino acids will be replaced with random amino acids generated by NNK-containing primers. This library will comprise site saturation mutagenesis at 5-6 amino acids of the targeting peptide sequence and produce a library diversity of 3.2×10⁶ to 6.4×10⁷ sequences.

[0584] Library 2 will be a mixed library of PHP.B/N. PHP.B2 and PHP.B3 targeting peptides mutated 3-amino acids at a time, creating 21 combined libraries with approximately 1.6×10⁵ variants. This library is based on the same strategy as was used for generation of PHP.N from PHP.B, described above.

[0585] Library 3 will be a mixture of two novel 7-mer peptide libraries inserted between amino acids 588 and 589 of AAV9 (SEQ ID NO: 2), K449R AAV9 (SEQ ID NO: 3) and/or AAV-DJ8 and/or AAV5.

[0586] Library 4 will include capsid sequences modified at a distinct surface site (e.g., loop IV and/or VIII).

[0587] Cell-type specific Cre-vectors (as described above) and AAV particle libraries will be injected into mice (2 mice per Cre-vector, per library and 2 Cre-control mice; 18 mice total). Cre-vectors will be delivered to the striatum and cortex via intraparenchymal administration, whereas the AAV particle libraries will be administered intravenously.

[0588] Libraries may optionally be spiked with a small amount of AAV9 or AAVPHP.B to serve as a normalization control.

[0589] Tissue samples (e.g., brain) will be collected 3 weeks after administration of Cre-vectors and AAV libraries. The total DNA will be isolated and capsid sequences recovered. For recovery. Cre-dependent amplification strategies may be used. Capsid sequences will be prepared for NGS using standard methods known in the art.

[0590] DNA libraries will be sequenced by NGS at a depth of 50M, 100 bp reads. Virus libraries will be sequenced at a depth of 20M, 100 bp reads. Samples recovered from one CNS region and one liver sample per mouse will be sequenced at a depth of 5M reads.

[0591] Capsid sequences comprising targeting peptides that show evidence of enrichment across CNS cell-types will be isolated and cloned. If no clearly enriched variants arise from the first round library, a second-round capsid library may be generated. Capsid sequences comprising targeting peptides that show evidence of enrichment across CNS cell-types from a second round library will be isolated and cloned.

[0592] Isolated variants will be screened in adult mice. Each capsid variant will be used to package a ubiquitous reporter vector (e.g., ssAAV-CAG-GFP) and transduction efficiency to CNS tissues (brain and spinal cord) subsequent to intravenous administration will be evaluated by immunofluorescence imaging, as compared to parental capsids PHP.B, PHP.N and/or AAV9. Vector genome quantification in target tissues (e.g., brain, spinal cord, liver, heart, spleen, skeletal muscle) will be determined by qPCR.

[0593] It is anticipated that intraparenchymal delivery of AAV-Cre vectors will allow for the adaptation of the CREATE method to non-transgenic animals. A successful outcome of this pilot study would be the identification of one or more capsid variants (and targeting peptides) with enhanced tropism for CNS tissue after intravenous administration. As a positive control, it is anticipated that PHP.B, PHP.N, PHP.B2, and PHP.B3 or other AAV variants (see Table 5) will be identified again in Library 2.

### Pilot Testing of NHP Injection Strategy

[0594] AAV-Cre vectors will need to be delivered directly to the CNS tissue of the non-transgenic NHP. The injection strategy will be validated with a pilot study in NHP. The pilot study will assess spacing of injection sites for separation between areas of vector spread based on differing promoters (promoters described above). Further, the pilot study will address toxicity or immune responses to the modified CREATE system, by assessing markers of cell death, glial reactivity (Iba1 and GFAP immunostaining), T cell infiltration, and/or H&E staining. Simultaneously, expression of IV administered AAV-PHP.B delivered at a concentration of about 2×10¹³ vg/kg can be assessed for transduction efficiency based on the Cre-dependent reporter. Transduction efficiency of AAV particles comprising reporter constructs delivered by co-intraparenchymal administration may also be determined.

Selection of AAV capsid variants in NHP

[0595] AAVPHP.B/N based capsid libraries are generated as described above, however prior to injection into NHP, the libraries will be titred and assessed by NGS. Cell-type specific Cre-vectors will be stereotactically delivered to the CNS tissue of three NHP, while the AAV capsid libraries will be injected intravenously, one week prior to injection of Cre vector. Stereotactic delivery to CNS tissue, may include intraparenchymal delivery to the putamen, thalamus, cortex, hippocampus and/or deep cerebellar nuclei.

[0596] Two-three weeks post-Cre-vectors stereotactical administration, tissue samples (e.g., brain, spinal cord, peripheral organs) are collected for analysis. Total vector DNA is isolated from the desired tissue sample(s) and a Cre-dependent amplification strategy is used to recover capsid sequences from each animal and each tissue region of interest. Samples are then prepared for NGS and sequenced as described previously.

[0597] AAV capsid variants showing enrichment across CNS cell types will be cloned for further examination and tested in adult mice/NHP for transduction efficiency to tissues of interest.

[0598] It is anticipated that AAV capsid sequences comprising targeting peptides with enhanced tropism to CNS tissues after IV administration, as compared to AAV9, PHP.B or PHP.A will be identified through these NHP experiments.

[0599] The methods for selection of AAV capsid variants in NHP as described above can be repeated, and a second round library generated to further narrow the number of lead AAV capsid sequence candidates with enhanced tropism to the CNS and/or to enhance reliability. AAV capsid variants showing enrichment across CNS cell types in the second round library will also be cloned for further examination and testing in mice/NHP.

[0600] A second evolution step may optionally be included for the AAV capsid candidates generated in the aforementioned NHP selection process. AAV capsid variant sequences with targeting peptides inserted at amino acid position 588-589 of the parent capsid sequence, are further modified at a second surface site. Modifications at more than one surface site may increase CNS tropism of the AAV capsid variants.

[0601] The top ten AAV capsid variants identified in these experiments will be cloned for further testing, and a viral genome encoding a reporter construct will be packaged inside. Variants will be identified based on total read number recovered from each sample, enrichment over the previous round or the starting library, and predicted high level of virus production. AAV particles will be titred and injected IV into adult mice at a dose of 1×10¹¹ vg/mouse. Three weeks after injection, the mouse is perfused and tissues collected and processed for assessment of fluorescence by confocal microscopy. The top three candidates after further examination in mice will be tested individually in NHP to identify an AAV variant capsid with the best NHP CNS transduction profile following IV administration. Alternatively, AAV particles may be tested immediately in NHP and/or in parallel with the mouse studies described above.

### Example 3. Identification of Dorsal Root Ganglion Targeting Peptides and AAV Particles

[0602] The dorsal root ganglia are clusters of neuronal cell bodies that lie just outside the spinal cord along the dorsal roots. Neurons of the dorsal root, with cell bodies in the DRG, convey sensory information from the periphery back to the spinal cord and central nervous system. Neurons of the DRG can be difficult to target with efficiency and selectivity for delivery of, for example, a therapeutic agent. Pathological conditions associated with DRG and their component neurons (e.g., neuropathic pain) could potentially be more easily treated if targeting peptides and associated AAV particles are identified for specific and efficient transduction of DRG following intravenous administration of AAV particles.

### Mouse Sensory Neuron Selection, First Round of Evolution

[0603] One of the targeting peptides (PHP.S; SEQ ID NO: 43058) identified using CREATE in mice (as described above), has previously demonstrated efficient transduction of peripheral neurons of the dorsal root, nodose, sympathetic, parasympathetic and cardiac ganglia. To identify targeting peptides and associated AAV particles with enhanced specificity for neurons of the DRG and subpopulations thereof, libraries based on this PHP.S targeting peptide will be generated and screened in transgenic mice.

[0604] Tree AAV capsid libraries will be created and screened. Each library will be generated by site-saturation mutagenesis of different subsets of amino acids of the parent PHP.S amino acid sequence or flanking sequences of the parent AAV capsid.

[0605] Library 1 will involve site-saturation mutagenesis of the amino acids flanking the PHP.S 7-mer on both the 5′ and 3′ end in the parent AAV capsid sequence. This mutagenesis may include 4 or 5 amino acids flanking the 7-mer, yielding approximately 1.6×10⁵ to 3.2×10⁶ unique sequences.

[0606] For Library 2, sets of three amino acids of the PHP.S 7-mer and/or flanking regions will be evolved together, to generate six, 3 amino acid libraries with approximately 4.8×10⁴ unique amino acid sequences.

[0607] Library 3 will be a mixture of two novel 7-mer peptide libraries inserted between amino acids 588 and 589 of AAV9 (SEQ ID NO: 2), K449R AAV9 (SEQ ID NO: 3) and/or AAV-DJ8, giving approximately 1.3×10⁹ unique amino acid sequences each.

[0608] The three DNA libraries will be used to generate AAV particle libraries. Both DNA and AAV particle libraries will be titered by qPCR and assessed by NGS. AAV particle libraries will be given to transgenic mice via intravenous administration at a dose of approximately 1×10¹¹ vg/mouse.

[0609] Five transgenic mouse lines will be used, as follows; 1) Vglut-Cre for selection of targeting peptides for total sensory neuron transduction, 2) Nav1.8 (Scn10a)-Cre for selection of targeting peptides for nociceptive neuron transduction, 3) Parvalbumin (PV)-Cre for selection of targeting peptides for parvalbumin neuron transduction, 4) TH-Cre for selection of targeting peptides for sympathetic/adrenergic neuron transduction and 5) Chat-Cre for selection of targeting peptides for parasympathetic/cholinergic neuron transduction.

[0610] One to two weeks after intravenous delivery, AAV particles will be recovered from neurons of the dorsal root, nodose, and cardiac ganglia, sympathetic and parasympathetic neurons including those of the myenteric ganglia and submucosal plexus of the intestines, and olfactory sensory neurons. DNA and AAV particle libraries associated with a desired transduction profile (e.g., transduction of a particular neuronal subset) will be sequenced and further characterized.

[0611] Fluorescence imaging will be used to determine transgene expression in the DRG and other peripheral ganglia. Immunostaining can be used to co-localize transgene expression to particular neuronal subtypes of the DRG. Transgene/reporter expression can be driven by either ubiquitous or neuron-specific promoter(s).

[0612] It is anticipated that several rounds of evolution may be necessary in order to identify a targeting peptide and associated AAV particle with a transduction profile for a specific neuronal subset, such as nociceptive neurons of the DRG. Negative selection may also be applied, wherein targeting peptides and associated AAV particles are eliminated from consideration if the transduction profile is considered undesirable.

### Mouse Sensory Neuron Selection, Second Round of Evolution

[0613] One or more of the targeting peptides with enhanced specificity and efficiency of transduction of neurons of the DRG will be further evolved to increase specificity. Evolution strategies may include site-saturation mutagenesis of loop IV (e.g., amino acids 452-458) or mutation of known receptor binding sites.

[0614] Fluorescence imaging will be used to determine transgene expression in the DRG and other peripheral ganglia. Immunostaining can be used to co-localize transgene expression to particular neuronal subtypes of the DRG. Biodistribution of vector genomes can be determined by qPCR.

### Example 4. Targeting of AAVPHP.B and AAVPHP.A to the CNS and DRG

[0615] To determine the tropism of AAV particles comprising the PHP.B or PHP.A targeting peptide to CNS and to the dorsal root ganglia after intravenous administration, the following study design was executed in adult (6-7 weeks) male C57BL/6 mice.

TABLE 6
Study design for PHP.B/PHP.A targeting to DRG

| | | Route | Volume | N | End of |
|---|---|---|---|---|---|
| Test Article | Dose (vg) | (Tail vein) | (μL) | (IHC) | Study |
| Vehicle | 0 | IV | 160 | 2 | D28 |
| AAV9-ssGFP | 5 × 10¹¹ | IV | 160 | 4 | D28 |
| PHP.B-ssGFP | 5 × 10¹¹ | IV | 160 | 4 | D28 |
| PHP.A-ssGFP | 5 × 10¹¹ | IV | 160 | 4 | D28 |

[0616] Targeting peptides PHP.B (TLAVPFK; SEQ ID NO: 43054) or PHP.A (YTLSQGW; SEQ ID NO: 43055) were inserted into an AAV9 (SEQ ID NO: 2) capsid sequence between amino acid positions 588 and 589. AAV9 without a targeting insert was used as a comparison vector, and PBS used as a control. A single stranded viral genome encoding GFP was used, yielding AAV particles AAV9-ssGFP, PHP.B-ssGFP and PHP.A-ssGFP. AAV particles (or PBS) were administered intravenously via the tail vein at a dose of 5×10¹¹ and volume of 160 μL.

[0617] Twenty eight days after intravenous delivery of the AAV particles, the animals were sacrificed and tissues collected for immunohistochemical and immunofluorescent analyses. Tissues from the dorsal root ganglion, brain (striatum, cortex, hippocampus), spinal cord (ventral horn), liver, heart and muscle were collected for processing by standard methods known in the art.

[0618] Analysis of tissue sections of brain, striatum, cortex, hippocampus and ventral horn showed that vectors comprising PHP.B or PHP.A targeting peptides mediate greater gene delivery throughout the CNS than AAV9 following intravenous injection in adult mice.

[0619] Similar analysis of tissue sections of the DRG demonstrated that after intravenous administration of the AAV particles, the greatest transduction of sensory neurons (most GFP signal) was seen with the use of targeting peptide PHP.B. Both AAV9 and PHP.A yielded transduced sensory neurons in the DRG following intravenous delivery, though to a lesser extent to that seen with PHP.B. As expected, intravenous delivery of PBS showed no transduction of sensory neurons of the DRG. These results demonstrate that targeting peptide PHP.B can be used for enhanced targeting to the CNS and of the sensory neurons of the dorsal root ganglia.

### Example 5. Seven-Mer Targeting Peptide Libraries for Selection in NHP

[0620] DNA libraries and associated AAV capsid libraries of 7-mer targeting peptides were generated and tested in mice and NHP. Targeting peptides were inserted into an AAV9 (SEQ ID NO: 2) parent capsid sequence between amino acid positions 588 and 589 (loop VIII).

[0621] AAV1-Cre vectors were administered intraparenchymally to the striatum and thalamus of three adult (2-11 yr, 4-8 kg) non-human primates (Macaca mulatta or rhesus macaque), while the AAV capsid library was administered intravenously as shown in the study design of Table 7, below. The AAV particles were delivered in an excipient comprising 200 mM NaCl, 1 mM KH₂PO₄, 3 mM Na₂HPO₄, 0.001% Pluronic F-68 at pH 7.4.

TABLE 7
Study design for AAV9-7mer library in NHP

| | | | | Day 11 ± 1 Dosing (MRI-CED) | | | | |
|---|---|---|---|---|---|---|---|---|
| | | Day 1 Dosing (IV) | | | Dose & Volume | | | |
| | | | Dose & | | Putamen | | Thalamus | |
| Group | N | Material | Volume | Material | Left | Right | Left | Right |
| 1A | 1 | AAV9-7mer | 5.0 × 10¹² vg/kg | AAV1-Cre | 3.75 × 10¹¹ vg | 7.5 × 10¹⁰ vg | 6.25 × 10¹¹ vg | 1.25 × 10¹¹ vg |
| | | | (1 mL/kg) | | (150 μL) | (150 μL) | (250 μL) | (250 μL) |
| 1B | 1 | AAV9-7mer | 5.0 × 10¹² vg/kg | AAV1-Cre | 7.5 × 10¹⁰ vg | 1.5 × 10¹⁰ vg | 1.25 × 10¹¹ vg | 2.5 × 10¹⁰ vg |
| | | | (1 mL/kg) | | (150 μL) | (150 μL) | (250 μL) | (250 μL) |
| 1C | 1 | AAV9-7mer | 5.0 × 10¹² vg/kg | AAV1-Cre | 3.75 × 10¹¹ vg | 1.5 × 10¹⁰ vg | 6.75 × 10¹¹ vg | 2.5 × 10¹⁰ vg |
| | | | (1 mL/kg) | | (150 μL) | (150 μL) | (250 μL) | (250 μL) |

[0622] Five animals were selected based on results of neutralizing antibody assays for anti-AAV antibodies to AAV1 and AAV9. Minimal or no detectable capsid specific antibodies was required for selection. Two of these five animals served as alternate study animals. Study subjects underwent a pre-project physical examination.

[0623] On Day 1 of the study, each animal received intravenous infusion of the AAV9-7mer library. On Day 7±1, animals had bilateral intracranial infusion of AAV1-Cre vectors to the putamen and thalamus, using MRI-guided convection enhanced delivery.

[0624] On the day of dosing, AAV9-7mer libraries or AAV1-Cre containing compositions were thawed at 2-8 C. The excipient detailed above was used as a vehicle control. Dosing solutions were gently centrifuged to collect material from the vial cap then transferred to the syringe/needle for delivery. Dosing solutions were kept at room temperature until administration, but not longer than for 2 hours. On Day 7±1, for the MRI-CED dosing, Gadoteridol (ProHance, Bracco Diagnostics Inc) was added at a 1:250 ratio and mixed carefully by tube inversion prior to loading into dosing syringes.

[0625] For intravenous administration of the AAV9-7mer libraries on Day 1, animals were immobilized with ketamine (10 mg/kg, administered intramuscularly (IM)) and dexamedetomidine (15 μg/kg, IM) and given a single intravenous infusion (dose volume of 1 mL/kg) via the saphenous vein, using a syringe pump. After dosing, a 0.2 mL flush of vehicle/excipient was administered. Animals were allowed to recover and returned to home cages.

[0626] On Day 7±1, for the MRI-CED of AAV1-Cre vectors, animals were anesthetized with ketamine (10 mg/kg) and dexmedetomidine (15 μg/kg) via intramuscular injection, weighed, shaved on the head and neck, intubated and maintained on 1-5% isoflurane. The head was secured in a sterotaxic frame and the overlying skin cleaned and prepared for implantation procedures. Aseptic techniques were used to expose the skull by opening the wound site by anatomical layers. Bilateral craniotomies were performed at entry sites located above the frontal/parietal and occipital lobes. A skull mounted cannula guide ball array was temporarily secured to the skull with titanium screws over each burr hole. After implantation of the cannula guides, animals were transferred to the MRI suite. MRI was used to align the cannula guides with putamen and thalamus targets ipsilateral (same side of the brain/body) to each cannula guide. Repeat MRI was used to visually monitor infusions.

[0627] Dosing solutions were delivered via an adjustable tip 16 G cannula (MRI Interventions Inc) primed with the dosing solution then guided into each target site through the skull mounted cannula arrays. Cannula were connected via microbore extension lines (Smiths Medical) to a syringe mounted on a syringe pump (Harvard apparatus). Ascending infusion rates (up to 10 μL/min) were used to deliver dose volumes (150 μL/putamen; 250 μL/thalamus) to the putamen and thalamus. Serial MRI scans were used to monitor infusate distribution.

[0628] Immediately after MRI-CED dosing, animals were transferred back to the operating room where the cannula guide system was removed and the wound site closed, using a vicryl suture. Animals were provided pre- and post-operative medications, allowed to recover from anesthesia and returned to their home cages.

[0629] Fourteen days after MRI-CED dosing to the putamen and thalamus (Day 212) animals were euthanized and tissue samples collected. Euthanasia was performed using intravenous delivery of a pentobarbital sodium solution (100 mg/kg), followed by a bilateral thoracotomy. A transcardial perfusion using ice-cold saline was performed via left cardiac ventricle, with approximately 2.5 L of ice-cold saline with heparin (100 U/mL) using a perfusion pump set to 200-400 mL/min over about 10 min. Samples were collected from brain, spinal cord, 12 dorsal root ganglia and associated roots (4 each from cervical, thoracic and lumbar spinal cord), liver, heart (left ventricle and right atrium), gastrocnemius muscle, soleus muscle, pancreas, kidney, spleen, lung, adrenal glands, stomach, sciatic nerve, saphenous nerve, thyroid gland, eyes (with optic nerve), pituitary gland, skeletal muscle (rectus femoris), colon, duodenum, ileum, jejunum, skin of the leg, superior cervical ganglia, urinary bladder, ovaries, uterus, prostate gland, testes, and/or any sites identified as having a lesion, and fresh frozen for biochemical analysis.

[0630] At the time of collection, all samples were photographed alongside a ruler for scale. The brain was cut coronally in a matrix at 3 mm slice thickness, then alphabetically annotated rostral (nose) to caudal (tail). A small punch (1 mm diameter) was created in the white matter of the right cortex for orientation purposes. Brain samples were frozen on dry ice. The spinal cord was cut into segments corresponding to each vertebral level, then transferred to a chilled cryovial tube and snap frozen on dry ice. DRG and associated roots were collected from C1, C3, C5, C7, T3, T5, T7, T9, L1, L3, L5 and L7. These were transferred into a chilled cryovial and frozen on dry ice. For the other organ samples collected, two samples per organ, approximately 1.0×1.0×0.5 cm (or the entire organ if smaller) were collected, transferred to a chilled cryovial tube and snap-frozen on dry ice. All samples were stored frozen at −60 C or below.

[0631] Blood and cerebrospinal fluid (CSF) samples were collected on Day 1, prior to IV dosing, on Day 7±1, prior to MRI-CED dosing, and on Day 21±2 prior to termination. Time points and descriptions of sample collection are shown below in Table 8. Whole blood samples were collected in tubes containing EDTA, mixed by inversion and aliquoted into 2 sub-samples, then stored at −60 C or below. Sample volumes listed in the Serum column, refer to the volume of whole blood which was then processed to serum and split to 2 aliquots and stored at −60 C or below. CSF samples were collected after animals were immobilized with ketamine (10 mg/kg; IM) and dexmedetomidine (15 ug/kg; IM). The neck was shaved and flexed and skin prepared. A 23 G needle was manually advanced through the skin and the atlanto-occipital membrane into the cerebellomedullary cistern space. Once CSF flow was confirmed in the needle hub, CSF collection began. Collected CSF was centrifuged (4,500 g for 5 min at 4 C), the supernatant filtered through a 0.8 μm low protein binding syringe filter, and the filtrate split into 4 aliquots for analysis. At necropsy, all available CSF was collected, processed, and aliquoted to approximately 1.0 mL samples. CSF samples were stored at −60 C or below.

TABLE 8
Time points for sample collection

| | | | Sample Volume (mL) | | |
|---|---|---|---|---|---|
| | | | | Whole | |
| Time point | Fasted | N | Serum | blood | CSF |
| Pre-screening | Yes | 18 | 2.0 | N/A | N/A |
| Day 1: prior to | Yes | 3 | 2.0 | 0.5 | 1.5 |
| IV dosing | | | | | |
| Day 7 ± 1: prior | Yes | 3 | 2.0 | 0.5 | 1.5 |
| to intraparenchymal | | | | | |
| MRI-CED dosing | | | | | |
| Day 21 ± 2: prior | Yes | 3 | 2.0 | 0.5 | All |
| to necropsy | | | | | available |

[0632] Animals were monitored throughout the study with twice daily clinical observations assessing mortality, neurological signs or other abnormalities and/or signs of pain or distress. Food consumption was also monitored daily. Body weights were measured once weekly, beginning prior to IV dosing on Day 1.

[0633] After this first round of selection in NHP, targeting peptides with amino acid sequences as represented by SEQ ID NO: 4-14326 (shown in Table 2) were recovered from CNS tissues. DNA libraries comprising SEQ ID NO: 14327-42972 have been prepared for second round selection in NHP.

### Example 6. Three-Mer Targeting Peptide Library for Selection in NHP

[0634] A DNA library and associated AAV capsid library was generated based on a 9-mer of the PHP.N targeting peptide. The 9-mer PHP.N amino acid sequence was further evolved through site saturation mutagenesis of sets of three consecutive amino acids, to generate the targeting peptides represented by SEQ ID NO: 42973-42999, as shown in Table 3. Amino acids at positions 1, 2, and 6-9 of the parent PHP.N 9-mer remained the same, with site saturation mutagenesis of only amino acids at positions 3, 4, and 5, yielding 27 targeting peptide sequences for screening and characterization.

### Example 7. Selection of Targeting Peptides Using in Mice

[0635] Experiments were performed using methods described in Example 1 where AAV9 7-mer libraries were injected at 3×10¹¹ vg/animal into hSyn1-Cre or GFAP-Cre mice (3 mice per group). Two weeks after the injection, brains were harvested and DNA was extracted by whole genomic DNA isolation method or Trizol method. Capsid sequences were recovered and prepared for NGS using standard methods known in the art. Approximately 460 high read count sequences were recovered from the hSyn1-Cre mice and around 240 high read count sequences were recovered from the GFAP-Cre mice. The whole genomic DNA and Trizol methods both resulted in similar average number of recovered sequences overall, however, the Trizol method resulted is more sequences recovered with a small number of individual PCR reactions.

### Example 8. Murine Co-Transduction of AAV-Cre and PHP Studies

[0636] To evaluate the efficacy of co-transduction of intrastriatally (IS) administered Cre-expressing AAV particles and an intravenously administered Cre-dependent reporter packaged in an AAV particle for use in NHP studies, the system was tested in mice. Four Cre-vectors were created, 1) for ubiquitous expression using a CAG, UBC or EF1α promoter (CAG- UBC- or EF1α-Cre), 2) for neuronal expression using a human synapsin promoter (hSyn1-Cre), 3) for astrocytic expression using a truncated GFAP promoter (GfAB₁D-Cre, and 4) for oligodendrocyte expression using a myelin basic promoter (MBP-Cre), then packaged into an AAV capsid (AAV1, AAV9, AAVrh10 or AAVPHP.B) to generate AAV particles. A vector expressing a fluorescent protein was used to mark vector spread at the injection site (e.g., CAG-mRuby2/tdTomato). The AAV-PHP.N:BG switch reporter was used as the reporter AAV.

[0637] On day 1, the reporter AAV particles (AAV-PHP.N:Bgswitch) were injected intravenously into the mice at a dose of 5×10¹² vg/kg body weight (1×10¹¹ vg per 20 g mouse). On day 6, a mix consisting of Cre-vector and reporter AAV particles were intrastriatally (IS) injected into mice at anteroposterior (AP) +0.5 from Bregma, mediolateral (ML) +2.0, dorsoventral (DV) −3.8. Three microliters of the virus mix was injected at a rate of 0.5 μl/minute at three different doses namely 1×10¹⁰, 2×10⁹ or 4×10⁸/site, respectively. Following deliver the needle was raised −2.8 mm and 5 minutes later, the needle was raised slowly and removed.

[0638] On day 20, mice were euthanized and a trans-cardiac perfusion was performed using 4% PFA (paraformaldehyde) in 1×PBS. CNS tissue was harvested and tissue sections were analyzed by immunofluorescence for the localization of green and red fluorescent signals. Expression of the reporter indicates co-transduction of the CNS cells by the reporter and the Cre. GFAP-Cre appeared to more efficiently turn off the expression of the blue-green switch vector when compared to the hSyn1-Cre. High dose Cre (1×10¹⁰ vg/site) caused local reduction of reporter expression around injection site which was not observed with the mid (2×10⁹ vg/site) or low dose (4×10⁸ vg/site). Therefore mid to low doses of Cre may be more suited for reducing localized toxicity. The spread of reporter expression beyond the injection was also found to be dose dependent with the high dose Cre injection demonstrating the largest spread of reporter expression.

### AAV-Cre Based AAV1-PHP.N Library in Mice

[0639] A pilot study was performed to test whether expected and/or novel capsid sequences containing targeting peptides could be recovered from the brain following intraparenchymal delivery to the striatum, thalamus and/or cortex of the Cre-vectors and intravenous delivery of an AAV capsid library.

[0640] A mixture of two different libraries was injected intravenously into mice. The mixture included an AAV9 7-mer library (1×10¹¹ vg/animal), like that described in Table 2 and Example 5, and a library of PHP.N (PHP.eB) targeting peptides mutated 3-amino acids at a time (1×10⁹ vg/animal), like that described in Table 3 and Example 6 above. Cell-type specific Cre-vectors namely AAV1-GfAB₁D-Cre and AAV1-hSyn1-Cre were injected at a dose of 4×10⁸ vg/site and 2×10⁹ vg/site respectively to 2 mice per group via intraparenchymal administration.

[0641] Tissue samples from the brain, such as, but not limited to, striatum, cortex, and thalamus were collected 3 weeks after administration of Cre-vectors and AAV libraries. The total DNA was isolated and capsid sequences recovered and sequenced using NGS.

[0642] 34 unique AAV-PHP.N-based sequences were recovered from the NGS analysis. All recovered PHP.N sequences were unique at the nucleotide level. Several amino acid sequences (encoded by different nucleic acid sequences) were represented more than once in the sequence results, indicating their enrichment. As predicted, targeting peptides with T or S at position 1 within the 3-mer were strongly selected. 70 unique AAV9-7mer sequences were also recovered Fewer unique amino acid sequences were recovered with the Cre co-transduction as compared to the studies with the Cre transgenic mice. The parent AAV-PHP.N sequence was not reselected.

### Example 9. Identification of Targeting Peptides Directed to Dorsal Root Ganglia and Trigeminal Ganglia

[0643] The first round of evolution of peptides targeting the DRGs was performed as described in Example 3. The three libraries described in Example 3 were injected at the following dose: PHP.S: 1.6×10⁹ and 6×10⁸; AAV9 7-mer and AAV-DJ/8 7-mer: 1.9×10¹¹. One to two weeks after intravenous delivery, AAV particles were recovered and DNA from the Cre lines in Table 9 were sequenced. Table 9 also provides the number of sequences recovered from AAV9, AAV-DJ8 7-mer, and AAV-PHP.S variants.

TABLE 9
No. of unique sequences retrieved

| Cre line | AAV9 | AAV-DJ8 | PHP.S |
|---|---|---|---|
| Vglut2 | 267 | 88 | 3 |
| Nav1.8 | 122 | 41 | 1 |
| TH | 243 | 96 | 6 |
| Vglut1 | 37 | 23 | 0 |
| Total | 669 | 248 | 10 |

[0644] AAV-PHP.S variants recovered from the first round of evolution included SEQ ID NO: 43073-43082. AAV9 and AAV-DJ8 based libraries were selected for a second round of evolution due to the higher number of unique sequences retrieved from these libraries. For the second round, 8 copies of each variant recovered from round 1 were synthesized. The second round of selection was performed in 5 mice Cre lines, namely. PV-Cre, Nav1.8 (Scn10a), TH-Cre, Vglut1 and Vglut2, using wild-type C57BL6/J mice as a control. Each group included two mice which were given an intravenous viral dose of 2×10¹¹ vg/mice (1×10¹¹ vg/library). 10 days after the IV injection, tissues from 3 Cre lines (PV-Cre, Nav1.8 Cre, and TH-Cre) as well as wild-type C57BL6/J were harvested. Dorsal root ganglia (DRG) and terminal ganglia (TG) were processed and AAV9-7-mer viral DNA and its flanking sequence were recovered by PCR and assessed by next-generation sequencing. The sequencing data were analyzed and SEQ ID NO: 43342-43691 were recovered. Variants that showed high enrichment score and those that were represented in more than one library or tissue were selected for further analysis. The following variants were cloned into pUC57mini-iCap-PHP.B1.2 backbone for further analysis: Variant #1:

(SEQ ID NO: 43635)
(GCTCAGGCTGCTGTTAGTAGTATTCCTGCTCAG;
Amino acid sequence:
(SEQ ID NO: 43285)
AQAAVSSIPAQ;
Variant #2:
(SEQ ID NO: 43373)
(GCGCAGGGGGCGGATTTGAGGAATCCGGCGCAG;
Amino acid sequence
(SEQ ID NO: 43094)
AQGADLRNPAQ;
Variant #3
(SEQ ID NO: 43609)
(GCCCAAGAGGCGTCRIGGAATGCTCGGGCACAG;
Amino acid sequence:
(SEQ ID NO: 43259)
AQEASGNARAQ
Variant #4:
(SEQ ID NO: 43506)
(GCTCAGCCTGTTAATACTCAGCGTGTTGCTCAG;
Amino acid sequence:
(SEQ ID NO: 43156)
AQPVNTQRVAQ,
#5
(SEQ ID NO: 43104)
AQKNGIVDSAQ,
#6
(SEQ ID NO: 43176)
AQGTSLKGPAQ,
(SEQ ID NO: 43089)
AQDATRALAAQ,
and
(SEQ ID NO: 43302)
AQHTTNTEVAQ.

### EQUIVALENTS AND SCOPE

[0645] Those skilled in the art will recognize, or be able to ascertain using no more than routine experimentation, many equivalents to the specific embodiments in accordance with the disclosure described herein. The scope of the present disclosure is not intended to be limited to the above Description, but rather is as set forth in the appended claims.

[0646] In the claims, articles such as “a,” “an,” and “the” may mean one or more than one unless indicated to the contrary or otherwise evident from the context. Claims or descriptions that include “or” between one or more members of a group are considered satisfied if one, more than one, or all of the group members are present in, employed in, or otherwise relevant to a given product or process unless indicated to the contrary or otherwise evident from the context. The disclosure includes embodiments in which exactly one member of the group is present in, employed in, or otherwise relevant to a given product or process. The disclosure includes embodiments in which more than one, or the entire group members are present in, employed in, or otherwise relevant to a given product or process.

[0647] It is also noted that the term “comprising” is intended to be open and permits but does not require the inclusion of additional elements or steps. When the term “comprising” is used herein, the term “consisting of” is thus also encompassed and disclosed.

[0648] Where ranges are given, endpoints are included. Furthermore, it is to be understood that unless otherwise indicated or otherwise evident from the context and understanding of one of ordinary skill in the art, values that are expressed as ranges can assume any specific value or subrange within the stated ranges in different embodiments of the disclosure, to the tenth of the unit of the lower limit of the range, unless the context clearly dictates otherwise.

[0649] In addition, it is to be understood that any particular embodiment of the present disclosure that falls within the prior art may be explicitly excluded from any one or more of the claims. Since such embodiments are deemed to be known to one of ordinary skill in the art, they may be excluded even if the exclusion is not set forth explicitly herein. Any particular embodiment of the compositions of the disclosure (e.g., any antibiotic, therapeutic or active ingredient; any method of production; any method of use; etc.) can be excluded from any one or more claims, for any reason, whether or not related to the existence of prior art.

[0650] It is to be understood that the words which have been used are words of description rather than limitation, and that changes may be made within the purview of the appended claims without departing from the true scope and spirit of the disclosure in its broader aspects.

[0651] While the present disclosure has been described at some length and with some particularity with respect to the several described embodiments, it is not intended that it should be limited to any such particulars or embodiments or any particular embodiment, but it is to be construed with references to the appended claims so as to provide the broadest possible interpretation of such claims in view of the prior art and, therefore, to effectively encompass the intended scope of the disclosure.

LENGTHY TABLES
The patent application contains a lengthy table section. A copy of the table is available in electronic form from the USPTO web site (https://seqdata.uspto.gov/?pageRequest=docDetail&DocID=US20220281922A1). An electronic copy of the table will also be available from the USPTO upon request and payment of the fee set forth in 37 CFR 1.19(b)(3).

1. An AAV capsid protein comprising
(i) a parent VP1 amino acid sequence selected from the group consisting of SEQ ID NO: 2 or SEQ ID NO: 3, and (ii) at least one targeting peptide inserted into the parent VP1 amino acid sequence of (i),
wherein the targeting peptide comprises at least 4 contiguous amino acids of any member of a group consisting of SEQ ID NO: 43073-43341.

2. The AAV capsid protein of claim 1, wherein the parent VP1 amino acid sequence comprises at least one of a VP2 region and a VP3 region.

3. The AAV capsid protein of claim 2, wherein the targeting peptide is inserted within the VP2 region of the parent VP1 amino acid sequence.

4. The AAV capsid protein of claim 2, wherein the targeting peptide is inserted within the VP3 region of the parent VP1 amino acid sequence.

5. The AAV capsid protein of claim 1, wherein the targeting peptide is inserted at any amino acid position between amino acids 586-592, inclusive, of the parent VP1 amino acid sequence.

6. The AAV capsid protein of claim 5, wherein the targeting peptide is inserted between amino acids 588-589 of the parent VP1 amino acid sequence.

7. The AAV capsid protein of claim 1, wherein the targeting peptide comprises at least 7 contiguous amino acids of any member of the group consisting of SEQ ID NO: 43073-43341.

8. The AAV capsid protein of claim 7, wherein the at least 7 contiguous amino acids comprise amino acids at positions 3 through 9, inclusive, of any member of the group consisting of SEQ ID NO: 43073-43341.

9. A peptide comprising an amino acid sequence selected from the group consisting of SEQ ID NO: 43073-43341.

10. A peptide comprising an amino acid sequence, said amino sequence comprising at least 4 contiguous amino acids of any member of a group consisting of SEQ ID NO: 43073-43341.

11. The peptide of claim 10, wherein the amino acid sequence comprises at least 7 contiguous amino acids of any member of a group consisting of SEQ ID NO: 43073-43341.

12. The peptide of claim 11, wherein the at least 7 contiguous amino acids comprise amino acids at positions 3 through 9, inclusive, of any member of the group consisting of SEQ ID NO: 43073-43341.

13. A nucleic acid sequence encoding the peptide of any of claims 9-12, selected from the group consisting of SEQ ID NO: 43342-43691.

14. An AAV particle comprising an AAV capsid protein of any of claims 1-8 and a viral genome.

15. The AAV particle of claim 14, wherein the viral genome comprises a nucleic acid sequence encoding a payload.

16. The AAV particle of claim 15, wherein the payload is an RNAi agent.

17. The AAV particle of claim 16, wherein the RNAi agent is selected from the group consisting of dsRNA, siRNA, shRNA, pre-miRNA, pri-miRNA, miRNA, stRNA, lncRNA, piRNA, or snoRNA.

18. The AAV particle of claim 17, wherein the RNAi agent, when expressed, inhibits or suppresses the expression of a gene of interest in a cell, wherein the gene of interest is selected from the group consisting of SOD1, MAPT, APOE, HTT, C9ORF72, TDP-43, APP, BACE, SNCA, ATXN1, ATXN2, ATXN3, ATXN7, SCN1A-SCN5A, or SCN8A-SCN11A.

19. The AAV particle of claim 15, wherein the payload is a polypeptide.

20. The AAV particle of claim 19, wherein the polypeptide is selected from the group consisting of an antibody, aromatic L-amino acid decarboxylase (AADC), survival motor neuron 1 (SMN1), frataxin (FXN), ApoE2, GBA1, GRN, ASPA, CLN2, GLB1, SGSH, NAGLU, IDS, NPC1, or GAN.

21. A pharmaceutical composition comprising the AAV particle of any of claims 14-20 and a pharmaceutically acceptable excipient.

22. A method of treating a disease in a subject by administering the pharmaceutical composition of claim 21 to said subject.

23. The method of claim 22, wherein the disease is selected from the group comprising Huntington's Disease, Amyotrophic Lateral Sclerosis, Friedreich's Ataxia, Parkinson's Disease, Alzheimer's Disease, a tauopathy, or neuropathic pain.

The application's sequence listing, which the Patent Office published only in electronic form, follows.

SEQUENCE LISTING (43691 sequences)

SEQ ID NO: 1 - DNA, 2211 bp, Unknown
  source: /note="Description of Unknown: Adeno-associated virus, human clone 9 sequence"
atggctgccgatggttatcttccagattggctcgaggacaaccttagtgaaggaattcgcgagtggtgggctttgaaacctggagcccctcaacccaaggcaaatcaacaacatcaagacaacgctcgaggtcttgtgcttccgggttacaaataccttggacccggcaacggactcgacaagggggagccggtcaacgcagcagacgcggcggccctcgagcacgacaaggcctacgaccagcagctcaaggccggagacaacccgtacctcaagtacaaccacgccgacgccgagttccaggagcggctcaaagaagatacgtcttttgggggcaacctcgggcgagcagtcttccaggccaaaaagaggcttcttgaacctcttggtctggttgaggaagcggctaagacggctcctggaaagaagaggcctgtagagcagtctcctcaggaaccggactcctccgcgggtattggcaaatcgggtgcacagcccgctaaaaagagactcaatttcggtcagactggcgacacagagtcagtcccagaccctcaaccaatcggagaacctcccgcagccccctcaggtgtgggatctcttacaatggcttcaggtggtggcgcaccagtggcagacaataacgaaggtgccgatggagtgggtagttcctcgggaaattggcattgcgattcccaatggctgggggacagagtcatcaccaccagcacccgaacctgggccctgcccacctacaacaatcacctctacaagcaaatctccaacagcacatctggaggatcttcaaatgacaacgcctacttcggctacagcaccccctgggggtattttgacttcaacagattccactgccacttctcaccacgtgactggcagcgactcatcaacaacaactggggattccggcctaagcgactcaacttcaagctcttcaacattcaggtcaaagaggttacggacaacaatggagtcaagaccatcgccaataaccttaccagcacggtccaggtcttcacggactcagactatcagctcccgtacgtgctcgggtcggctcacgagggctgcctcccgccgttcccagcggacgttttcatgattcctcagtacgggtatctgacgcttaatgatggaagccaggccgtgggtcgttcgtccttttactgcctggaatatttcccgtcgcaaatgctaagaacgggtaacaacttccagttcagctacgagtttgagaacgtacctttccatagcagctacgctcacagccaaagcctggaccgactaatgaatccactcatcgaccaatacttgtactatctctcaaagactattaacggttctggacagaatcaacaaacgctaaaattcagtgtggccggacccagcaacatggctgtccagggaagaaactacatacctggacccagctaccgacaacaacgtgtctcaaccactgtgactcaaaacaacaacagcgaatttgcttggcctggagcttcttcttgggctctcaatggacgtaatagcttgatgaatcctggacctgctatggccagccacaaagaaggagaggaccgtttctttcctttgtctggatctttaatttttggcaaacaaggaactggaagagacaacgtggatgcggacaaagtcatgataaccaacgaagaagaaattaaaactactaacccggtagcaacggagtcctatggacaagtggccacaaaccaccagagtgcccaagcacaggcgcagaccggctgggttcaaaaccaaggaatacttccgggtatggtttggcaggacagagatgtgtacctgcaaggacccatttgggccaaaattcctcacacggacggcaactttcacccttctccgctgatgggagggtttggaatgaagcacccgcctcctcagatcctcatcaaaaacacacctgtacctgcggatcctccaacggccttcaacaaggacaagctgaactctttcatcacccagtattctactggccaagtcagcgtggagatcgagtgggagctgcagaaggaaaacagcaagcgctggaacccggagatccagtacacttccaactattacaagtctaataatgttgaatttgctgttaatactgaaggtgtatatagtgaaccccgccccattggcaccagatacctgactcgtaatctgtaa

SEQ ID NO: 2 - protein, 736 aa, Unknown
  source: /note="Description of Unknown: Capsid of AAV9/hu.14 sequence"
MAADGYLPDWLEDNLSEGIREWWALKPGAPQPKANQQHQDNARGLVLPGYKYLGPGNGLDKGEPVNAADAAALEHDKAYDQQLKAGDNPYLKYNHADAEFQERLKEDTSFGGNLGRAVFQAKKRLLEPLGLVEEAAKTAPGKKRPVEQSPQEPDSSAGIGKSGAQPAKKRLNFGQTGDTESVPDPQPIGEPPAAPSGVGSLTMASGGGAPVADNNEGADGVGSSSGNWHCDSQWLGDRVITTSTRTWALPTYNNHLYKQISNSTSGGSSNDNAYFGYSTPWGYFDFNRFHCHFSPRDWQRLINNNWGFRPKRLNFKLFNIQVKEVTDNNGVKTIANNLTSTVQVFTDSDYQLPYVLGSAHEGCLPPFPADVFMIPQYGYLTLNDGSQAVGRSSFYCLEYFPSQMLRTGNNFQFSYEFENVPFHSSYAHSQSLDRLMNPLIDQYLYYLSKTINGSGQNQQTLKFSVAGPSNMAVQGRNYIPGPSYRQQRVSTTVTQNNNSEFAWPGASSWALNGRNSLMNPGPAMASHKEGEDRFFPLSGSLIFGKQGTGRDNVDADKVMITNEEEIKTTNPVATESYGQVATNHQSAQAQAQTGWVQNQGILPGMVWQDRDVYLQGPIWAKIPHTDGNFHPSPLMGGFGMKHPPPQILIKNTPVPADPPTAFNKDKLNSFITQYSTGQVSVEIEWELQKENSKRWNPEIQYTSNYYKSNNVEFAVNTEGVYSEPRPIGTRYLTRNL

SEQ ID NO: 3 - protein, 736 aa, Artificial Sequence
  source: /note="Description of Artificial Sequence: Synthetic polypeptide"
MAADGYLPDWLEDNLSEGIREWWALKPGAPQPKANQQHQDNARGLVLPGYKYLGPGNGLDKGEPVNAADAAALEHDKAYDQQLKAGDNPYLKYNHADAEFQERLKEDTSFGGNLGRAVFQAKKRLLEPLGLVEEAAKTAPGKKRPVEQSPQEPDSSAGIGKSGAQPAKKRLNFGQTGDTESVPDPQPIGEPPAAPSGVGSLTMASGGGAPVADNNEGADGVGSSSGNWHCDSQWLGDRVITTSTRTWALPTYNNHLYKQISNSTSGGSSNDNAYFGYSTPWGYFDFNRFHCHFSPRDWQRLINNNWGFRPKRLNFKLFNIQVKEVTDNNGVKTIANNLTSTVQVFTDSDYQLPYVLGSAHEGCLPPFPADVFMIPQYGYLTLNDGSQAVGRSSFYCLEYFPSQMLRTGNNFQFSYEFENVPFHSSYAHSQSLDRLMNPLIDQYLYYLSRTINGSGQNQQTLKFSVAGPSNMAVQGRNYIPGPSYRQQRVSTTVTQNNNSEFAWPGASSWALNGRNSLMNPGPAMASHKEGEDRFFPLSGSLIFGKQGTGRDNVDADKVMITNEEEIKTTNPVATESYGQVATNHQSAQAQAQTGWVQNQGILPGMVWQDRDVYLQGPIWAKIPHTDGNFHPSPLMGGFGMKHPPPQILIKNTPVPADPPTAFNKDKLNSFITQYSTGQVSVEIEWELQKENSKRWNPEIQYTSNYYKSNNVEFAVNTEGVYSEPRPIGTRYLTRNL

SEQ ID NO: 4 - protein, 7 aa, Artificial Sequence
  source: /note="Description of Artificial Sequence: Synthetic peptide"
AAAASNT

SEQ ID NO: 5 - protein, 7 aa, Artificial Sequence
  source: /note="Description of Artificial Sequence: Synthetic peptide"
AAAIDGD

SEQ ID NO: 6 - protein, 7 aa, Artificial Sequence
  source: /note="Description of Artificial Sequence: Synthetic peptide"
AAALSTK

SEQ ID NO: 7 - protein, 7 aa, Artificial Sequence
  source: /note="Description of Artificial Sequence: Synthetic peptide"
AADANVN

SEQ ID NO: 8 - protein, 7 aa, Artificial Sequence
  source: /note="Description of Artificial Sequence: Synthetic peptide"
AADFKRD

SEQ ID NO: 9 - protein, 7 aa, Artificial Sequence
  source: /note="Description of Artificial Sequence: Synthetic peptide"
AADKTSR

SEQ ID NO: 10 - protein, 7 aa, Artificial Sequence
  source: /note="Description of Artificial Sequence: Synthetic peptide"
AADPGSR

SEQ ID NO: 11 - protein, 7 aa, Artificial Sequence
  source: /note="Description of Artificial Sequence: Synthetic peptide"
AADRVRP

SEQ ID NO: 12 - protein, 7 aa, Artificial Sequence
  source: /note="Description of Artificial Sequence: Synthetic peptide"
AAFMVER

SEQ ID NO: 13 - protein, 7 aa, Artificial Sequence
  source: /note="Description of Artificial Sequence: Synthetic peptide"
AAGFATD

SEQ ID NO: 14 - protein, 7 aa, Artificial Sequence
  source: /note="Description of Artificial Sequence: Synthetic peptide"
AAGFHLS

SEQ ID NO: 15 - protein, 7 aa, Artificial Sequence
  source: /note="Description of Artificial Sequence: Synthetic peptide"
AAGMIAS

SEQ ID NO: 16 - protein, 7 aa, Artificial Sequence
  source: /note="Description of Artificial Sequence: Synthetic peptide"
AAGSTHI

SEQ ID NO: 17 - protein, 7 aa, Artificial Sequence
  source: /note="Description of Artificial Sequence: Synthetic peptide"
AAHANTV

SEQ ID NO: 18 - protein, 7 aa, Artificial Sequence
  source: /note="Description of Artificial Sequence: Synthetic peptide"
AAHPQLF

SEQ ID NO: 19 - protein, 7 aa, Artificial Sequence
  source: /note="Description of Artificial Sequence: Synthetic peptide"
AAHRTAH

SEQ ID NO: 20 - protein, 7 aa, Artificial Sequence
  source: /note="Description of Artificial Sequence: Synthetic peptide"
AAIGKDE

SEQ ID NO: 21 - protein, 7 aa, Artificial Sequence
  source: /note="Description of Artificial Sequence: Synthetic peptide"
AAIRSSY

SEQ ID NO: 22 - protein, 7 aa, Artificial Sequence
  source: /note="Description of Artificial Sequence: Synthetic peptide"
AAKTSQL

SEQ ID NO: 23 - protein, 7 aa, Artificial Sequence
  source: /note="Description of Artificial Sequence: Synthetic peptide"
AALPTLL

SEQ ID NO: 24 - protein, 7 aa, Artificial Sequence
  source: /note="Description of Artificial Sequence: Synthetic peptide"
AALSHLH

SEQ ID NO: 25 - protein, 7 aa, Artificial Sequence
  source: /note="Description of Artificial Sequence: Synthetic peptide"
AALSRVD

SEQ ID NO: 26 - protein, 7 aa, Artificial Sequence
  source: /note="Description of Artificial Sequence: Synthetic peptide"
AALTKVL

SEQ ID NO: 27 - protein, 7 aa, Artificial Sequence
  source: /note="Description of Artificial Sequence: Synthetic peptide"
AALTRLT

SEQ ID NO: 28 - protein, 7 aa, Artificial Sequence
  source: /note="Description of Artificial Sequence: Synthetic peptide"
AAMIKRQ

SEQ ID NO: 29 - protein, 7 aa, Artificial Sequence
  source: /note="Description of Artificial Sequence: Synthetic peptide"
AAMMKTV

SEQ ID NO: 30 - protein, 7 aa, Artificial Sequence
  source: /note="Description of Artificial Sequence: Synthetic peptide"
AAMVSTP

SEQ ID NO: 31 - protein, 7 aa, Artificial Sequence
  source: /note="Description of Artificial Sequence: Synthetic peptide"
AANLRTG

SEQ ID NO: 32 - protein, 7 aa, Artificial Sequence
  source: /note="Description of Artificial Sequence: Synthetic peptide"
AANLVLQ

SEQ ID NO: 33 - protein, 7 aa, Artificial Sequence
  source: /note="Description of Artificial Sequence: Synthetic peptide"
AANSTQS

SEQ ID NO: 34 - protein, 7 aa, Artificial Sequence
  source: /note="Description of Artificial Sequence: Synthetic peptide"
AAPIAAA

SEQ ID NO: 35 - protein, 7 aa, Artificial Sequence
  source: /note="Description of Artificial Sequence: Synthetic peptide"
AAPPFGH

SEQ ID NO: 36 - protein, 7 aa, Artificial Sequence
  source: /note="Description of Artificial Sequence: Synthetic peptide"
AAPSSSI

SEQ ID NO: 37 - protein, 7 aa, Artificial Sequence
  source: /note="Description of Artificial Sequence: Synthetic peptide"
AAPSYRG

SEQ ID NO: 38 - protein, 7 aa, Artificial Sequence
  source: /note="Description of Artificial Sequence: Synthetic peptide"
AAPTITP

SEQ ID NO: 39 - protein, 7 aa, Artificial Sequence
  source: /note="Description of Artificial Sequence: Synthetic peptide"
AAQLGER

SEQ ID NO: 40 - protein, 7 aa, Artificial Sequence
  source: /note="Description of Artificial Sequence: Synthetic peptide"
AAQPYTH

SEQ ID NO: 41 - protein, 7 aa, Artificial Sequence
  source: /note="Description of Artificial Sequence: Synthetic peptide"
AARPPNA

SEQ ID NO: 42 - protein, 7 aa, Artificial Sequence
  source: /note="Description of Artificial Sequence: Synthetic peptide"
AARSTVV

SEQ ID NO: 43 - protein, 7 aa, Artificial Sequence
  source: /note="Description of Artificial Sequence: Synthetic peptide"
AARTSFN

SEQ ID NO: 44 - protein, 7 aa, Artificial Sequence
  source: /note="Description of Artificial Sequence: Synthetic peptide"
AARTTYT

SEQ ID NO: 45 - protein, 7 aa, Artificial Sequence
  source: /note="Description of Artificial Sequence: Synthetic peptide"
AASASRY

SEQ ID NO: 46 - protein, 7 aa, Artificial Sequence
  source: /note="Description of Artificial Sequence: Synthetic peptide"
AASSDSY

SEQ ID NO: 47 - protein, 7 aa, Artificial Sequence
  source: /note="Description of Artificial Sequence: Synthetic peptide"
AASYVGI

SEQ ID NO: 48 - protein, 7 aa, Artificial Sequence
  source: /note="Description of Artificial Sequence: Synthetic peptide"
AATCGQN

SEQ ID NO: 49 - protein, 7 aa, Artificial Sequence
  source: /note="Description of Artificial Sequence: Synthetic peptide"
AATLATA

SEQ ID NO: 50 - protein, 7 aa, Artificial Sequence
  source: /note="Description of Artificial Sequence: Synthetic peptide"
AATPSKH

SEQ ID NO: 51 - protein, 7 aa, Artificial Sequence
  source: /note="Description of Artificial Sequence: Synthetic peptide"
AATSLNS

SEQ ID NO: 52 - protein, 7 aa, Artificial Sequence
  source: /note="Description of Artificial Sequence: Synthetic peptide"
AAVGASS

SEQ ID NO: 53 - protein, 7 aa, Artificial Sequence
  source: /note="Description of Artificial Sequence: Synthetic peptide"
AAVGGLG

SEQ ID NO: 54 - protein, 7 aa, Artificial Sequence
  source: /note="Description of Artificial Sequence: Synthetic peptide"
AAWADES

SEQ ID NO: 55 - protein, 7 aa, Artificial Sequence
  source: /note="Description of Artificial Sequence: Synthetic peptide"
AAYSFSP

SEQ ID NO: 56 - protein, 7 aa, Artificial Sequence
  source: /note="Description of Artificial Sequence: Synthetic peptide"
ADAHMNR

SEQ ID NO: 57 - protein, 7 aa, Artificial Sequence
  source: /note="Description of Artificial Sequence: Synthetic peptide"
ADDHHSH

SEQ ID NO: 58 - protein, 7 aa, Artificial Sequence
  source: /note="Description of Artificial Sequence: Synthetic peptide"
ADEEDSC

SEQ ID NO: 59 - protein, 7 aa, Artificial Sequence
  source: /note="Description of Artificial Sequence: Synthetic peptide"
ADGDVPR

SEQ ID NO: 60 - protein, 7 aa, Artificial Sequence
  source: /note="Description of Artificial Sequence: Synthetic peptide"
ADGKSSD

SEQ ID NO: 61 - protein, 7 aa, Artificial Sequence
  source: /note="Description of Artificial Sequence: Synthetic peptide"
ADGSTTL

SEQ ID NO: 62 - protein, 7 aa, Artificial Sequence
  source: /note="Description of Artificial Sequence: Synthetic peptide"
ADHVPYI

SEQ ID NO: 63 - protein, 7 aa, Artificial Sequence
  source: /note="Description of Artificial Sequence: Synthetic peptide"
ADKLGHT

SEQ ID NO: 64 - protein, 7 aa, Artificial Sequence
  source: /note="Description of Artificial Sequence: Synthetic peptide"
ADKPSDR

SEQ ID NO: 65 - protein, 7 aa, Artificial Sequence
  source: /note="Description of Artificial Sequence: Synthetic peptide"
ADKSRVG

SEQ ID NO: 66 - protein, 7 aa, Artificial Sequence
  source: /note="Description of Artificial Sequence: Synthetic peptide"
ADKVRLV

SEQ ID NO: 67 - protein, 7 aa, Artificial Sequence
  source: /note="Description of Artificial Sequence: Synthetic peptide"
ADLAISV

SEQ ID NO: 68 - protein, 7 aa, Artificial Sequence
  source: /note="Description of Artificial Sequence: Synthetic peptide"
ADLLPST

SEQ ID NO: 69 - protein, 7 aa, Artificial Sequence
  source: /note="Description of Artificial Sequence: Synthetic peptide"
ADLSPTE

SEQ ID NO: 70 - protein, 7 aa, Artificial Sequence
  source: /note="Description of Artificial Sequence: Synthetic peptide"
ADLYTRP

SEQ ID NO: 71 - protein, 7 aa, Artificial Sequence
  source: /note="Description of Artificial Sequence: Synthetic peptide"
ADMRSSA

SEQ ID NO: 72 - protein, 7 aa, Artificial Sequence
  source: /note="Description of Artificial Sequence: Synthetic peptide"
ADNQVPL

SEQ ID NO: 73 - protein, 7 aa, Artificial Sequence
  source: /note="Description of Artificial Sequence: Synthetic peptide"
ADPEGAS

SEQ ID NO: 74 - protein, 7 aa, Artificial Sequence
  source: /note="Description of Artificial Sequence: Synthetic peptide"
ADPERVR

SEQ ID NO: 75 - protein, 7 aa, Artificial Sequence
  source: /note="Description of Artificial Sequence: Synthetic peptide"
ADPHMPK

SEQ ID NO: 76 - protein, 7 aa, Artificial Sequence
  source: /note="Description of Artificial Sequence: Synthetic peptide"
ADPHRNQ

SEQ ID NO: 77 - protein, 7 aa, Artificial Sequence
  source: /note="Description of Artificial Sequence: Synthetic peptide"
ADPMHRA

SEQ ID NO: 78 - protein, 7 aa, Artificial Sequence
  source: /note="Description of Artificial Sequence: Synthetic peptide"
ADPPKFW

SEQ ID NO: 79 - protein, 7 aa, Artificial Sequence
  source: /note="Description of Artificial Sequence: Synthetic peptide"
ADPRQKS

SEQ ID NO: 80 - protein, 7 aa, Artificial Sequence
  source: /note="Description of Artificial Sequence: Synthetic peptide"
ADRAHAV

SEQ ID NO: 81 - protein, 7 aa, Artificial Sequence
  source: /note="Description of Artificial Sequence: Synthetic peptide"
ADRGSHS

SEQ ID NO: 82 - protein, 7 aa, Artificial Sequence
  source: /note="Description of Artificial Sequence: Synthetic peptide"
ADRLPFL

SEQ ID NO: 83 - protein, 7 aa, Artificial Sequence
  source: /note="Description of Artificial Sequence: Synthetic peptide"
ADRSPIT

SEQ ID NO: 84 - protein, 7 aa, Artificial Sequence
  source: /note="Description of Artificial Sequence: Synthetic peptide"
ADRYGRV

SEQ ID NO: 85 - protein, 7 aa, Artificial Sequence
  source: /note="Description of Artificial Sequence: Synthetic peptide"
ADSGRTI

SEQ ID NO: 86 - protein, 7 aa, Artificial Sequence
  source: /note="Description of Artificial Sequence: Synthetic peptide"
ADSTHAA

SEQ ID NO: 87 - protein, 7 aa, Artificial Sequence
  source: /note="Description of Artificial Sequence: Synthetic peptide"
ADTMTSS

SEQ ID NO: 88 - protein, 7 aa, Artificial Sequence
  source: /note="Description of Artificial Sequence: Synthetic peptide"
ADTMTTV

SEQ ID NO: 89 - protein, 7 aa, Artificial Sequence
  source: /note="Description of Artificial Sequence: Synthetic peptide"
ADTRLHS

SEQ ID NO: 90 - protein, 7 aa, Artificial Sequence
  source: /note="Description of Artificial Sequence: Synthetic peptide"
ADTRLQT

SEQ ID NO: 91 - protein, 7 aa, Artificial Sequence
  source: /note="Description of Artificial Sequence: Synthetic peptide"
ADVRTLS

SEQ ID NO: 92 - protein, 7 aa, Artificial Sequence
  source: /note="Description of Artificial Sequence: Synthetic peptide"
AEAGMFD

SEQ ID NO: 93 - protein, 7 aa, Artificial Sequence
  source: /note="Description of Artificial Sequence: Synthetic peptide"
AEAKNTR

SEQ ID NO: 94 - protein, 7 aa, Artificial Sequence
  source: /note="Description of Artificial Sequence: Synthetic peptide"
AEAPTRD

SEQ ID NO: 95 - protein, 7 aa, Artificial Sequence
  source: /note="Description of Artificial Sequence: Synthetic peptide"
AEATSVE

SEQ ID NO: 96 - protein, 7 aa, Artificial Sequence
  source: /note="Description of Artificial Sequence: Synthetic peptide"
AEGNPKI

SEQ ID NO: 97 - protein, 7 aa, Artificial Sequence
  source: /note="Description of Artificial Sequence: Synthetic peptide"
AEGPEWR

SEQ ID NO: 98 - protein, 7 aa, Artificial Sequence
  source: /note="Description of Artificial Sequence: Synthetic peptide"
AEHPNSL

SEQ ID NO: 99 - protein, 7 aa, Artificial Sequence
  source: /note="Description of Artificial Sequence: Synthetic peptide"
AEHSPSL

SEQ ID NO: 100 - protein, 7 aa, Artificial Sequence
  source: /note="Description of Artificial Sequence: Synthetic peptide"
AEIVRHV

SEQ ID NO: 101 - protein, 7 aa, Artificial Sequence
  source: /note="Description of Artificial Sequence: Synthetic peptide"
AELASPI

SEQ ID NO: 102 - protein, 7 aa, Artificial Sequence
  source: /note="Description of Artificial Sequence: Synthetic peptide"
AELKRGP

SEQ ID NO: 103 - protein, 7 aa, Artificial Sequence
  source: /note="Description of Artificial Sequence: Synthetic peptide"
AELPPRQ

SEQ ID NO: 104 - protein, 7 aa, Artificial Sequence
  source: /note="Description of Artificial Sequence: Synthetic peptide"
AELQPHL

SEQ ID NO: 105 - protein, 7 aa, Artificial Sequence
  source: /note="Description of Artificial Sequence: Synthetic peptide"
AEPRSWS

SEQ ID NO: 106 - protein, 7 aa, Artificial Sequence
  source: /note="Description of Artificial Sequence: Synthetic peptide"
AEPTDFL

SEQ ID NO: 107 - protein, 7 aa, Artificial Sequence
  source: /note="Description of Artificial Sequence: Synthetic peptide"
AERATWS

SEQ ID NO: 108 - protein, 7 aa, Artificial Sequence
  source: /note="Description of Artificial Sequence: Synthetic peptide"
AERNMAP

SEQ ID NO: 109 - protein, 7 aa, Artificial Sequence
  source: /note="Description of Artificial Sequence: Synthetic peptide"
AERQQYL

SEQ ID NO: 110 - protein, 7 aa, Artificial Sequence
  source: /note="Description of Artificial Sequence: Synthetic peptide"
AESAYVP

SEQ ID NO: 111 - protein, 7 aa, Artificial Sequence
  source: /note="Description of Artificial Sequence: Synthetic peptide"
AETSSSS

SEQ ID NO: 112 - protein, 7 aa, Artificial Sequence
  source: /note="Description of Artificial Sequence: Synthetic peptide"
AFAGVRG

SEQ ID NO: 113 - protein, 7 aa, Artificial Sequence
  source: /note="Description of Artificial Sequence: Synthetic peptide"
AFARSAP

SEQ ID NO: 114 - protein, 7 aa, Artificial Sequence
  source: /note="Description of Artificial Sequence: Synthetic peptide"
AFDTRGG

SEQ ID NO: 115 - protein, 7 aa, Artificial Sequence
  source: /note="Description of Artificial Sequence: Synthetic peptide"
AFEGRSP

SEQ ID NO: 116 - protein, 7 aa, Artificial Sequence
  source: /note="Description of Artificial Sequence: Synthetic peptide"
AFESPRA

SEQ ID NO: 117 - protein, 7 aa, Artificial Sequence
  source: /note="Description of Artificial Sequence: Synthetic peptide"
AFGASMS

SEQ ID NO: 118 - protein, 7 aa, Artificial Sequence
  source: /note="Description of Artificial Sequence: Synthetic peptide"
AFGKGHT

SEQ ID NO: 119 - protein, 7 aa, Artificial Sequence
  source: /note="Description of Artificial Sequence: Synthetic peptide"
AFGKNTV

SEQ ID NO: 120 - protein, 7 aa, Artificial Sequence
  source: /note="Description of Artificial Sequence: Synthetic peptide"
AFGTLKM

SEQ ID NO: 121 - protein, 7 aa, Artificial Sequence
  source: /note="Description of Artificial Sequence: Synthetic peptide"
AFLAANA

SEQ ID NO: 122 - protein, 7 aa, Artificial Sequence
  source: /note="Description of Artificial Sequence: Synthetic peptide"
AFLNQLS

SEQ ID NO: 123 - protein, 7 aa, Artificial Sequence
  source: /note="Description of Artificial Sequence: Synthetic peptide"
AFLSSAP

SEQ ID NO: 124 - protein, 7 aa, Artificial Sequence
  source: /note="Description of Artificial Sequence: Synthetic peptide"
AFMSKLE

SEQ ID NO: 125 - protein, 7 aa, Artificial Sequence
  source: /note="Description of Artificial Sequence: Synthetic peptide"
AFNGTDS

SEQ ID NO: 126 - protein, 7 aa, Artificial Sequence
  source: /note="Description of Artificial Sequence: Synthetic peptide"
AFNHELS

SEQ ID NO: 127 - protein, 7 aa, Artificial Sequence
  source: /note="Description of Artificial Sequence: Synthetic peptide"
AFNTSHD

SEQ ID NO: 128 - protein, 7 aa, Artificial Sequence
  source: /note="Description of Artificial Sequence: Synthetic peptide"
AFPLPPH

SEQ ID NO: 129 - protein, 7 aa, Artificial Sequence
  source: /note="Description of Artificial Sequence: Synthetic peptide"
AFPQSGN

SEQ ID NO: 130 - protein, 7 aa, Artificial Sequence
  source: /note="Description of Artificial Sequence: Synthetic peptide"
AFQDKQT

SEQ ID NO: 131 - protein, 7 aa, Artificial Sequence
  source: /note="Description of Artificial Sequence: Synthetic peptide"
AFQHQPP

SEQ ID NO: 132 - protein, 7 aa, Artificial Sequence
  source: /note="Description of Artificial Sequence: Synthetic peptide"
AFQSARA

SEQ ID NO: 133 - protein, 7 aa, Artificial Sequence
  source: /note="Description of Artificial Sequence: Synthetic peptide"
AFSNAGP

SEQ ID NO: 134 - protein, 7 aa, Artificial Sequence
  source: /note="Description of Artificial Sequence: Synthetic peptide"
AFSTTVM

SEQ ID NO: 135 - protein, 7 aa, Artificial Sequence
  source: /note="Description of Artificial Sequence: Synthetic peptide"
AFTGKSS

SEQ ID NO: 136 - protein, 7 aa, Artificial Sequence
  source: /note="Description of Artificial Sequence: Synthetic peptide"
AFVASSP

SEQ ID NO: 137 - protein, 7 aa, Artificial Sequence
  source: /note="Description of Artificial Sequence: Synthetic peptide"
AFVGKVT

SEQ ID NO: 138 - protein, 7 aa, Artificial Sequence
  source: /note="Description of Artificial Sequence: Synthetic peptide"
AFVPKSM

SEQ ID NO: 139 - protein, 7 aa, Artificial Sequence
  source: /note="Description of Artificial Sequence: Synthetic peptide"
AGAEEHM

SEQ ID NO: 140 - protein, 7 aa, Artificial Sequence
  source: /note="Description of Artificial Sequence: Synthetic peptide"
AGALMHL

SEQ ID NO: 141 - protein, 7 aa, Artificial Sequence
  source: /note="Description of Artificial Sequence: Synthetic peptide"
AGAPTGL

SEQ ID NO: 142 - protein, 7 aa, Artificial Sequence
  source: /note="Description of Artificial Sequence: Synthetic peptide"
AGATSFY

SEQ ID NO: 143 - protein, 7 aa, Artificial Sequence
  source: /note="Description of Artificial Sequence: Synthetic peptide"
AGGAGQM

SEQ ID NO: 144 - protein, 7 aa, Artificial Sequence
  source: /note="Description of Artificial Sequence: Synthetic peptide"
AGGQPSL

SEQ ID NO: 145 - protein, 7 aa, Artificial Sequence
  source: /note="Description of Artificial Sequence: Synthetic peptide"
AGGSWPA

SEQ ID NO: 146 - protein, 7 aa, Artificial Sequence
  source: /note="Description of Artificial Sequence: Synthetic peptide"
AGGTSMP

SEQ ID NO: 147 - protein, 7 aa, Artificial Sequence
  source: /note="Description of Artificial Sequence: Synthetic peptide"
AGGYLVP

SEQ ID NO: 148 - protein, 7 aa, Artificial Sequence
  source: /note="Description of Artificial Sequence: Synthetic peptide"
AGHRADS

SEQ ID NO: 149 - protein, 7 aa, Artificial Sequence
  source: /note="Description of Artificial Sequence: Synthetic peptide"
AGHTNLP

SEQ ID NO: 150 - protein, 7 aa, Artificial Sequence
  source: /note="Description of Artificial Sequence: Synthetic peptide"
AGHVVSM

SEQ ID NO: 151 - protein, 7 aa, Artificial Sequence
  source: /note="Description of Artificial Sequence: Synthetic peptide"
AGITTAV

SEQ ID NO: 152 - protein, 7 aa, Artificial Sequence
  source: /note="Description of Artificial Sequence: Synthetic peptide"
AGKATYI

SEQ ID NO: 153 - protein, 7 aa, Artificial Sequence
  source: /note="Description of Artificial Sequence: Synthetic peptide"
AGKLVSS

SEQ ID NO: 154 - protein, 7 aa, Artificial Sequence
  source: /note="Description of Artificial Sequence: Synthetic peptide"
AGLAVKP

SEQ ID NO: 155 - protein, 7 aa, Artificial Sequence
  source: /note="Description of Artificial Sequence: Synthetic peptide"
AGLDFYP

SEQ ID NO: 156 - protein, 7 aa, Artificial Sequence
  source: /note="Description of Artificial Sequence: Synthetic peptide"
AGLKDVT

SEQ ID NO: 157 - protein, 7 aa, Artificial Sequence
  source: /note="Description of Artificial Sequence: Synthetic peptide"
AGLLTQI

SEQ ID NO: 158 - protein, 7 aa, Artificial Sequence
  source: /note="Description of Artificial Sequence: Synthetic peptide"
AGLNGQG

SEQ ID NO: 159 - protein, 7 aa, Artificial Sequence
  source: /note="Description of Artificial Sequence: Synthetic peptide"
AGLNHSV

SEQ ID NO: 160 - protein, 7 aa, Artificial Sequence
  source: /note="Description of Artificial Sequence: Synthetic peptide"
AGLQQLS

SEQ ID NO: 161 - protein, 7 aa, Artificial Sequence
  source: /note="Description of Artificial Sequence: Synthetic peptide"
AGMDSND

SEQ ID NO: 162 - protein, 7 aa, Artificial Sequence
  source: /note="Description of Artificial Sequence: Synthetic peptide"
AGMHSMT

SEQ ID NO: 163 - protein, 7 aa, Artificial Sequence
  source: /note="Description of Artificial Sequence: Synthetic peptide"
AGMPPAP

SEQ ID NO: 164 - protein, 7 aa, Artificial Sequence
  source: /note="Description of Artificial Sequence: Synthetic peptide"
AGNHAVQ

SEQ ID NO: 165 - protein, 7 aa, Artificial Sequence
  source: /note="Description of Artificial Sequence: Synthetic peptide"
AGNSKTS

SEQ ID NO: 166 - protein, 7 aa, Artificial Sequence
  source: /note="Description of Artificial Sequence: Synthetic peptide"
AGNSLSS

SEQ ID NO: 167 - protein, 7 aa, Artificial Sequence
  source: /note="Description of Artificial Sequence: Synthetic peptide"
AGPHVLA

SEQ ID NO: 168 - protein, 7 aa, Artificial Sequence
  source: /note="Description of Artificial Sequence: Synthetic peptide"
AGPSNFD

SEQ ID NO: 169 - protein, 7 aa, Artificial Sequence
  source: /note="Description of Artificial Sequence: Synthetic peptide"
AGPTNPF

SEQ ID NO: 170 - protein, 7 aa, Artificial Sequence
  source: /note="Description of Artificial Sequence: Synthetic peptide"
AGQFTKS

SEQ ID NO: 171 - protein, 7 aa, Artificial Sequence
  source: /note="Description of Artificial Sequence: Synthetic peptide"
AGQGSQS

SEQ ID NO: 172 - protein, 7 aa, Artificial Sequence
  source: /note="Description of Artificial Sequence: Synthetic peptide"
AGQNSLV

SEQ ID NO: 173 - protein, 7 aa, Artificial Sequence
  source: /note="Description of Artificial Sequence: Synthetic peptide"
AGQSAPR

SEQ ID NO: 174 - protein, 7 aa, Artificial Sequence
  source: /note="Description of Artificial Sequence: Synthetic peptide"
AGRDSAW

SEQ ID NO: 175 - protein, 7 aa, Artificial Sequence
  source: /note="Description of Artificial Sequence: Synthetic peptide"
AGRNMHP

SEQ ID NO: 176 - protein, 7 aa, Artificial Sequence
  source: /note="Description of Artificial Sequence: Synthetic peptide"
AGRPPQS

SEQ ID NO: 177 - protein, 7 aa, Artificial Sequence
  source: /note="Description of Artificial Sequence: Synthetic peptide"
AGRVLTM

SEQ ID NO: 178 - protein, 7 aa, Artificial Sequence
  source: /note="Description of Artificial Sequence: Synthetic peptide"
AGSGGSP

SEQ ID NO: 179 - protein, 7 aa, Artificial Sequence
  source: /note="Description of Artificial Sequence: Synthetic peptide"
AGSGVLN

SEQ ID NO: 180 - protein, 7 aa, Artificial Sequence
  source: /note="Description of Artificial Sequence: Synthetic peptide"
AGSHQSE

SEQ ID NO: 181 - protein, 7 aa, Artificial Sequence
  source: /note="Description of Artificial Sequence: Synthetic peptide"
AGSIISR

SEQ ID NO: 182 - protein, 7 aa, Artificial Sequence
  source: /note="Description of Artificial Sequence: Synthetic peptide"
AGSLSVD

SEQ ID NO: 183 - protein, 7 aa, Artificial Sequence
  source: /note="Description of Artificial Sequence: Synthetic peptide"
AGSQHPA

SEQ ID NO: 184 - protein, 7 aa, Artificial Sequence
  source: /note="Description of Artificial Sequence: Synthetic peptide"
AGSQTPP

SEQ ID NO: 185 - protein, 7 aa, Artificial Sequence
  source: /note="Description of Artificial Sequence: Synthetic peptide"
AGSSRTF

SEQ ID NO: 186 - protein, 7 aa, Artificial Sequence
  source: /note="Description of Artificial Sequence: Synthetic peptide"
AGTGLGM

SEQ ID NO: 187 - protein, 7 aa, Artificial Sequence
  source: /note="Description of Artificial Sequence: Synthetic peptide"
AGTGPFA

SEQ ID NO: 188 - protein, 7 aa, Artificial Sequence
  source: /note="Description of Artificial Sequence: Synthetic peptide"
AGTIRIS

SEQ ID NO: 189 - protein, 7 aa, Artificial Sequence
  source: /note="Description of Artificial Sequence: Synthetic peptide"
AGTLVIM

SEQ ID NO: 190 - protein, 7 aa, Artificial Sequence
  source: /note="Description of Artificial Sequence: Synthetic peptide"
AGTNQRN

SEQ ID NO: 191 - protein, 7 aa, Artificial Sequence
  source: /note="Description of Artificial Sequence: Synthetic peptide"
AGTQPMT

SEQ ID NO: 192 - protein, 7 aa, Artificial Sequence
  source: /note="Description of Artificial Sequence: Synthetic peptide"
AGTQRAY

SEQ ID NO: 193 - protein, 7 aa, Artificial Sequence
  source: /note="Description of Artificial Sequence: Synthetic peptide"
AGTSHSH

SEQ ID NO: 194 - protein, 7 aa, Artificial Sequence
  source: /note="Description of Artificial Sequence: Synthetic peptide"
AGTVEHL

SEQ ID NO: 195 - protein, 7 aa, Artificial Sequence
  source: /note="Description of Artificial Sequence: Synthetic peptide"
AGVGKAQ

SEQ ID NO: 196 - protein, 7 aa, Artificial Sequence
  source: /note="Description of Artificial Sequence: Synthetic peptide"
AGVLKMS

SEQ ID NO: 197 - protein, 7 aa, Artificial Sequence
  source: /note="Description of Artificial Sequence: Synthetic peptide"
AGVPRME

SEQ ID NO: 198 - protein, 7 aa, Artificial Sequence
  source: /note="Description of Artificial Sequence: Synthetic peptide"
AGVPSPA

SEQ ID NO: 199 - protein, 7 aa, Artificial Sequence
  source: /note="Description of Artificial Sequence: Synthetic peptide"
AGVQPGQ

SEQ ID NO: 200 - protein, 7 aa, Artificial Sequence
  source: /note="Description of Artificial Sequence: Synthetic peptide"
AGVSEAI

SEQ ID NO: 201 - protein, 7 aa, Artificial Sequence
  source: /note="Description of Artificial Sequence: Synthetic peptide"
AHAVSLQ

SEQ ID NO: 202 - protein, 7 aa, Artificial Sequence
  source: /note="Description of Artificial Sequence: Synthetic peptide"
AHDEVPY

SEQ ID NO: 203 - protein, 7 aa, Artificial Sequence
  source: /note="Description of Artificial Sequence: Synthetic peptide"
AHDIPMS

SEQ ID NO: 204 - protein, 7 aa, Artificial Sequence
  source: /note="Description of Artificial Sequence: Synthetic peptide"
AHDNKSM

SEQ ID NO: 205 - protein, 7 aa, Artificial Sequence
  source: /note="Description of Artificial Sequence: Synthetic peptide"
AHEVLSF

SEQ ID NO: 206 - protein, 7 aa, Artificial Sequence
  source: /note="Description of Artificial Sequence: Synthetic peptide"
AHGESKP

SEQ ID NO: 207 - protein, 7 aa, Artificial Sequence
  source: /note="Description of Artificial Sequence: Synthetic peptide"
AHGNAPS

SEQ ID NO: 208 - protein, 7 aa, Artificial Sequence
  source: /note="Description of Artificial Sequence: Synthetic peptide"
AHGNSSL

SEQ ID NO: 209 - protein, 7 aa, Artificial Sequence
  source: /note="Description of Artificial Sequence: Synthetic peptide"
AHGSLQV

SEQ ID NO: 210 - protein, 7 aa, Artificial Sequence
  source: /note="Description of Artificial Sequence: Synthetic peptide"
AHGVAYI

SEQ ID NO: 211 - protein, 7 aa, Artificial Sequence
  source: /note="Description of Artificial Sequence: Synthetic peptide"
AHGVKTS

SEQ ID NO: 212 - protein, 7 aa, Artificial Sequence
  source: /note="Description of Artificial Sequence: Synthetic peptide"
AHHSVPP

SEQ ID NO: 213 - protein, 7 aa, Artificial Sequence
  source: /note="Description of Artificial Sequence: Synthetic peptide"
AHIARHG

SEQ ID NO: 214 - protein, 7 aa, Artificial Sequence
  source: /note="Description of Artificial Sequence: Synthetic peptide"
AHKSLPL

SEQ ID NO: 215 - protein, 7 aa, Artificial Sequence
  source: /note="Description of Artificial Sequence: Synthetic peptide"
AHLKYGS

SEQ ID NO: 216 - protein, 7 aa, Artificial Sequence
  source: /note="Description of Artificial Sequence: Synthetic peptide"
AHMDRTS

SEQ ID NO: 217 - protein, 7 aa, Artificial Sequence
  source: /note="Description of Artificial Sequence: Synthetic peptide"
AHMTDGE

SEQ ID NO: 218 - protein, 7 aa, Artificial Sequence
  source: /note="Description of Artificial Sequence: Synthetic peptide"
AHNVQGA

SEQ ID NO: 219 - protein, 7 aa, Artificial Sequence
  source: /note="Description of Artificial Sequence: Synthetic peptide"
AHPPQPG

SEQ ID NO: 220 - protein, 7 aa, Artificial Sequence
  source: /note="Description of Artificial Sequence: Synthetic peptide"
AHPSLPL

SEQ ID NO: 221 - protein, 7 aa, Artificial Sequence
  source: /note="Description of Artificial Sequence: Synthetic peptide"
AHPSRGI

SEQ ID NO: 222 - protein, 7 aa, Artificial Sequence
  source: /note="Description of Artificial Sequence: Synthetic peptide"
AHPSSHG

SEQ ID NO: 223 - protein, 7 aa, Artificial Sequence
  source: /note="Description of Artificial Sequence: Synthetic peptide"
AHQVGLA

SEQ ID NO: 224 - protein, 7 aa, Artificial Sequence
  source: /note="Description of Artificial Sequence: Synthetic peptide"
AHSHVPP

SEQ ID NO: 225 - protein, 7 aa, Artificial Sequence
  source: /note="Description of Artificial Sequence: Synthetic peptide"
AHSLKQV

SEQ ID NO: 226 - protein, 7 aa, Artificial Sequence
  source: /note="Description of Artificial Sequence: Synthetic peptide"
AHSPALV

SEQ ID NO: 227 - protein, 7 aa, Artificial Sequence
  source: /note="Description of Artificial Sequence: Synthetic peptide"
AHSRSGP

SEQ ID NO: 228 - protein, 7 aa, Artificial Sequence
  source: /note="Description of Artificial Sequence: Synthetic peptide"
AHTLTEP

SEQ ID NO: 229 - protein, 7 aa, Artificial Sequence
  source: /note="Description of Artificial Sequence: Synthetic peptide"
AHTNLTS

SEQ ID NO: 230 - protein, 7 aa, Artificial Sequence
  source: /note="Description of Artificial Sequence: Synthetic peptide"
AHTRIMP

SEQ ID NO: 231 - protein, 7 aa, Artificial Sequence
  source: /note="Description of Artificial Sequence: Synthetic peptide"
AHVNSFS

SEQ ID NO: 232 - protein, 7 aa, Artificial Sequence
  source: /note="Description of Artificial Sequence: Synthetic peptide"
AHVPAAD

SEQ ID NO: 233 - protein, 7 aa, Artificial Sequence
  source: /note="Description of Artificial Sequence: Synthetic peptide"
AHVSQSG

SEQ ID NO: 234 - protein, 7 aa, Artificial Sequence
  source: /note="Description of Artificial Sequence: Synthetic peptide"
AIAFRRE

SEQ ID NO: 235 - protein, 7 aa, Artificial Sequence
  source: /note="Description of Artificial Sequence: Synthetic peptide"
AIAPPYT

SEQ ID NO: 236 - protein, 7 aa, Artificial Sequence
  source: /note="Description of Artificial Sequence: Synthetic peptide"
AIAVSAG

SEQ ID NO: 237 - protein, 7 aa, Artificial Sequence
  source: /note="Description of Artificial Sequence: Synthetic peptide"
AIDSGYH

SEQ ID NO: 238 - protein, 7 aa, Artificial Sequence
  source: /note="Description of Artificial Sequence: Synthetic peptide"
AIGAIGS

SEQ ID NO: 239 - protein, 7 aa, Artificial Sequence
  source: /note="Description of Artificial Sequence: Synthetic peptide"
AIGPRGG

SEQ ID NO: 240 - protein, 7 aa, Artificial Sequence
  source: /note="Description of Artificial Sequence: Synthetic peptide"
AIGSTTS

SEQ ID NO: 241 - protein, 7 aa, Artificial Sequence
  source: /note="Description of Artificial Sequence: Synthetic peptide"
AIHAVSP

SEQ ID NO: 242 - protein, 7 aa, Artificial Sequence
  source: /note="Description of Artificial Sequence: Synthetic peptide"
AIHSTKS

SEQ ID NO: 243 - protein, 7 aa, Artificial Sequence
  source: /note="Description of Artificial Sequence: Synthetic peptide"
AIKGQDL

SEQ ID NO: 244 - protein, 7 aa, Artificial Sequence
  source: /note="Description of Artificial Sequence: Synthetic peptide"
AINFQAG

SEQ ID NO: 245 - protein, 7 aa, Artificial Sequence
  source: /note="Description of Artificial Sequence: Synthetic peptide"
AINHAMT

SEQ ID NO: 246 - protein, 7 aa, Artificial Sequence
  source: /note="Description of Artificial Sequence: Synthetic peptide"
AIPGHIM

SEQ ID NO: 247 - protein, 7 aa, Artificial Sequence
  source: /note="Description of Artificial Sequence: Synthetic peptide"
AIPGSSR

SEQ ID NO: 248 - protein, 7 aa, Artificial Sequence
  source: /note="Description of Artificial Sequence: Synthetic peptide"
AIPMTHD

SEQ ID NO: 249 - protein, 7 aa, Artificial Sequence
  source: /note="Description of Artificial Sequence: Synthetic peptide"
AIPNPLD

SEQ ID NO: 250 - protein, 7 aa, Artificial Sequence
  source: /note="Description of Artificial Sequence: Synthetic peptide"
AIRNVLA

SEQ ID NO: 251 - protein, 7 aa, Artificial Sequence
  source: /note="Description of Artificial Sequence: Synthetic peptide"
AIRSAND

SEQ ID NO: 252 - protein, 7 aa, Artificial Sequence
  source: /note="Description of Artificial Sequence: Synthetic peptide"
AIRSPSP

SEQ ID NO: 253 - protein, 7 aa, Artificial Sequence
  source: /note="Description of Artificial Sequence: Synthetic peptide"
AIRYTDP

SEQ ID NO: 254 - protein, 7 aa, Artificial Sequence
  source: /note="Description of Artificial Sequence: Synthetic peptide"
AISVGGS

SEQ ID NO: 255 - protein, 7 aa, Artificial Sequence
  source: /note="Description of Artificial Sequence: Synthetic peptide"
AITTARN

SEQ ID NO: 256 - protein, 7 aa, Artificial Sequence
  source: /note="Description of Artificial Sequence: Synthetic peptide"
AIYGGLT

SEQ ID NO: 257 - protein, 7 aa, Artificial Sequence
  source: /note="Description of Artificial Sequence: Synthetic peptide"
AIYMQQP

SEQ ID NO: 258 - protein, 7 aa, Artificial Sequence
  source: /note="Description of Artificial Sequence: Synthetic peptide"
AIYQGVD

SEQ ID NO: 259 - protein, 7 aa, Artificial Sequence
  source: /note="Description of Artificial Sequence: Synthetic peptide"
AKASNQD

SEQ ID NO: 260 - protein, 7 aa, Artificial Sequence
  source: /note="Description of Artificial Sequence: Synthetic peptide"
AKATALE

SEQ ID NO: 261 - protein, 7 aa, Artificial Sequence
  source: /note="Description of Artificial Sequence: Synthetic peptide"
AKDIGQI

SEQ ID NO: 262 - protein, 7 aa, Artificial Sequence
  source: /note="Description of Artificial Sequence: Synthetic peptide"
AKDIPPR

SEQ ID NO: 263 - protein, 7 aa, Artificial Sequence
  source: /note="Description of Artificial Sequence: Synthetic peptide"
AKFAPSE

SEQ ID NO: 264 - protein, 7 aa, Artificial Sequence
  source: /note="Description of Artificial Sequence: Synthetic peptide"
AKGDPRM

SEQ ID NO: 265 - protein, 7 aa, Artificial Sequence
  source: /note="Description of Artificial Sequence: Synthetic peptide"
AKGQIHV

SEQ ID NO: 266 - protein, 7 aa, Artificial Sequence
  source: /note="Description of Artificial Sequence: Synthetic peptide"
AKHTEFS

SEQ ID NO: 267 - protein, 7 aa, Artificial Sequence
  source: /note="Description of Artificial Sequence: Synthetic peptide"
AKISSAS

SEQ ID NO: 268 - protein, 7 aa, Artificial Sequence
  source: /note="Description of Artificial Sequence: Synthetic peptide"
AKLEAIP

SEQ ID NO: 269 - protein, 7 aa, Artificial Sequence
  source: /note="Description of Artificial Sequence: Synthetic peptide"
AKNRDSC

SEQ ID NO: 270 - protein, 7 aa, Artificial Sequence
  source: /note="Description of Artificial Sequence: Synthetic peptide"
AKNSPHP

SEQ ID NO: 271 - protein, 7 aa, Artificial Sequence
  source: /note="Description of Artificial Sequence: Synthetic peptide"
AKNSTFS

SEQ ID NO: 272 - protein, 7 aa, Artificial Sequence
  source: /note="Description of Artificial Sequence: Synthetic peptide"
AKPALLV

SEQ ID NO: 273 - protein, 7 aa, Artificial Sequence
  source: /note="Description of Artificial Sequence: Synthetic peptide"
AKPHLQF

SEQ ID NO: 274 - protein, 7 aa, Artificial Sequence
  source: /note="Description of Artificial Sequence: Synthetic peptide"
AKPIRPP

SEQ ID NO: 275 - protein, 7 aa, Artificial Sequence
  source: /note="Description of Artificial Sequence: Synthetic peptide"
AKPSEEK

SEQ ID NO: 276 - protein, 7 aa, Artificial Sequence
  source: /note="Description of Artificial Sequence: Synthetic peptide"
AKPTYQP

SEQ ID NO: 277 - protein, 7 aa, Artificial Sequence
  source: /note="Description of Artificial Sequence: Synthetic peptide"
AKRLDDA

SEQ ID NO: 278 - protein, 7 aa, Artificial Sequence
  source: /note="Description of Artificial Sequence: Synthetic peptide"
AKSIKLS

SEQ ID NO: 279 - protein, 7 aa, Artificial Sequence
  source: /note="Description of Artificial Sequence: Synthetic peptide"
AKSNVGL

SEQ ID NO: 280 - protein, 7 aa, Artificial Sequence
  source: /note="Description of Artificial Sequence: Synthetic peptide"
AKSSYPI

SEQ ID NO: 281 - protein, 7 aa, Artificial Sequence
  source: /note="Description of Artificial Sequence: Synthetic peptide"
AKSVALS

SEQ ID NO: 282 - protein, 7 aa, Artificial Sequence
  source: /note="Description of Artificial Sequence: Synthetic peptide"
AKTIEIS

SEQ ID NO: 283 - protein, 7 aa, Artificial Sequence
  source: /note="Description of Artificial Sequence: Synthetic peptide"
AKTLRDD

SEQ ID NO: 284 - protein, 7 aa, Artificial Sequence
  source: /note="Description of Artificial Sequence: Synthetic peptide"
AKTMGTM

SEQ ID NO: 285 - protein, 7 aa, Artificial Sequence
  source: /note="Description of Artificial Sequence: Synthetic peptide"
AKTTLSA

SEQ ID NO: 286 - protein, 7 aa, Artificial Sequence
  source: /note="Description of Artificial Sequence: Synthetic peptide"
AKYSPSA

SEQ ID NO: 287 - protein, 7 aa, Artificial Sequence
  source: /note="Description of Artificial Sequence: Synthetic peptide"
AKYSSMP

SEQ ID NO: 288 - protein, 7 aa, Artificial Sequence
  source: /note="Description of Artificial Sequence: Synthetic peptide"
ALAIGRD

SEQ ID NO: 289 - protein, 7 aa, Artificial Sequence
  source: /note="Description of Artificial Sequence: Synthetic peptide"
ALALKTS

SEQ ID NO: 290 - protein, 7 aa, Artificial Sequence
  source: /note="Description of Artificial Sequence: Synthetic peptide"
ALATKVI

SEQ ID NO: 291 - protein, 7 aa, Artificial Sequence
  source: /note="Description of Artificial Sequence: Synthetic peptide"
ALDARRV

SEQ ID NO: 292 - protein, 7 aa, Artificial Sequence
  source: /note="Description of Artificial Sequence: Synthetic peptide"
ALDQMTI

SEQ ID NO: 293 - protein, 7 aa, Artificial Sequence
  source: /note="Description of Artificial Sequence: Synthetic peptide"
ALECPRA

SEQ ID NO: 294 - protein, 7 aa, Artificial Sequence
  source: /note="Description of Artificial Sequence: Synthetic peptide"
ALEGLRP

SEQ ID NO: 295 - protein, 7 aa, Artificial Sequence
  source: /note="Description of Artificial Sequence: Synthetic peptide"
ALELGSE

SEQ ID NO: 296 - protein, 7 aa, Artificial Sequence
  source: /note="Description of Artificial Sequence: Synthetic peptide"
ALERTSL

SEQ ID NO: 297 - protein, 7 aa, Artificial Sequence
  source: /note="Description of Artificial Sequence: Synthetic peptide"
ALFPGMS

SEQ ID NO: 298 - protein, 7 aa, Artificial Sequence
  source: /note="Description of Artificial Sequence: Synthetic peptide"
ALGDFPS

SEQ ID NO: 299 - protein, 7 aa, Artificial Sequence
  source: /note="Description of Artificial Sequence: Synthetic peptide"
ALGHQAM

SEQ ID NO: 300 - protein, 7 aa, Artificial Sequence
  source: /note="Description of Artificial Sequence: Synthetic peptide"
ALGNNKS

SEQ ID NO: 301 - protein, 7 aa, Artificial Sequence
  source: /note="Description of Artificial Sequence: Synthetic peptide"
ALGRNEG

SEQ ID NO: 302 - protein, 7 aa, Artificial Sequence
  source: /note="Description of Artificial Sequence: Synthetic peptide"
ALGVPPS

SEQ ID NO: 303 - protein, 7 aa, Artificial Sequence
  source: /note="Description of Artificial Sequence: Synthetic peptide"
ALGVSAL

SEQ ID NO: 304 - protein, 7 aa, Artificial Sequence
  source: /note="Description of Artificial Sequence: Synthetic peptide"
ALGYHNT

SEQ ID NO: 305 - protein, 7 aa, Artificial Sequence
  source: /note="Description of Artificial Sequence: Synthetic peptide"
ALHPSAP

SEQ ID NO: 306 - protein, 7 aa, Artificial Sequence
  source: /note="Description of Artificial Sequence: Synthetic peptide"
ALIERVN

SEQ ID NO: 307 - protein, 7 aa, Artificial Sequence
  source: /note="Description of Artificial Sequence: Synthetic peptide"
ALIKVHN

SEQ ID NO: 308 - protein, 7 aa, Artificial Sequence
  source: /note="Description of Artificial Sequence: Synthetic peptide"
ALIPSPP

SEQ ID NO: 309 - protein, 7 aa, Artificial Sequence
  source: /note="Description of Artificial Sequence: Synthetic peptide"
ALLDSKL

SEQ ID NO: 310 - protein, 7 aa, Artificial Sequence
  source: /note="Description of Artificial Sequence: Synthetic peptide"
ALLEQRP

SEQ ID NO: 311 - protein, 7 aa, Artificial Sequence
  source: /note="Description of Artificial Sequence: Synthetic peptide"
ALLGVNR

SEQ ID NO: 312 - protein, 7 aa, Artificial Sequence
  source: /note="Description of Artificial Sequence: Synthetic peptide"
ALLHSIG

SEQ ID NO: 313 - protein, 7 aa, Artificial Sequence
  source: /note="Description of Artificial Sequence: Synthetic peptide"
ALLQNAS

SEQ ID NO: 314 - protein, 7 aa, Artificial Sequence
  source: /note="Description of Artificial Sequence: Synthetic peptide"
ALLSSGN

SEQ ID NO: 315 - protein, 7 aa, Artificial Sequence
  source: /note="Description of Artificial Sequence: Synthetic peptide"
ALMRGTI

SEQ ID NO: 316 - protein, 7 aa, Artificial Sequence
  source: /note="Description of Artificial Sequence: Synthetic peptide"
ALNDAAG

SEQ ID NO: 317 - protein, 7 aa, Artificial Sequence
  source: /note="Description of Artificial Sequence: Synthetic peptide"
ALNHDKP

SEQ ID NO: 318 - protein, 7 aa, Artificial Sequence
  source: /note="Description of Artificial Sequence: Synthetic peptide"
ALNIPEL

SEQ ID NO: 319 - protein, 7 aa, Artificial Sequence
  source: /note="Description of Artificial Sequence: Synthetic peptide"
ALNTHTV

SEQ ID NO: 320 - protein, 7 aa, Artificial Sequence
  source: /note="Description of Artificial Sequence: Synthetic peptide"
ALPAKSY

SEQ ID NO: 321 - protein, 7 aa, Artificial Sequence
  source: /note="Description of Artificial Sequence: Synthetic peptide"
ALPASVD

SEQ ID NO: 322 - protein, 7 aa, Artificial Sequence
  source: /note="Description of Artificial Sequence: Synthetic peptide"
ALPGTPN

SEQ ID NO: 323 - protein, 7 aa, Artificial Sequence
  source: /note="Description of Artificial Sequence: Synthetic peptide"
ALPLSRA

SEQ ID NO: 324 - protein, 7 aa, Artificial Sequence
  source: /note="Description of Artificial Sequence: Synthetic peptide"
ALPQLAV

SEQ ID NO: 325 - protein, 7 aa, Artificial Sequence
  source: /note="Description of Artificial Sequence: Synthetic peptide"
ALPQRRD

SEQ ID NO: 326 - protein, 7 aa, Artificial Sequence
  source: /note="Description of Artificial Sequence: Synthetic peptide"
ALPSSDH

SEQ ID NO: 327 - protein, 7 aa, Artificial Sequence
  source: /note="Description of Artificial Sequence: Synthetic peptide"
ALPSTLV

SEQ ID NO: 328 - protein, 7 aa, Artificial Sequence
  source: /note="Description of Artificial Sequence: Synthetic peptide"
ALPTTKA

SEQ ID NO: 329 - protein, 7 aa, Artificial Sequence
  source: /note="Description of Artificial Sequence: Synthetic peptide"
ALQAPHT

SEQ ID NO: 330 - protein, 7 aa, Artificial Sequence
  source: /note="Description of Artificial Sequence: Synthetic peptide"
ALQGYSV

SEQ ID NO: 331 - protein, 7 aa, Artificial Sequence
  source: /note="Description of Artificial Sequence: Synthetic peptide"
ALQRDWS

SEQ ID NO: 332 - protein, 7 aa, Artificial Sequence
  source: /note="Description of Artificial Sequence: Synthetic peptide"
ALQSDTV

SEQ ID NO: 333 - protein, 7 aa, Artificial Sequence
  source: /note="Description of Artificial Sequence: Synthetic peptide"
ALQSSVR

SEQ ID NO: 334 - protein, 7 aa, Artificial Sequence
  source: /note="Description of Artificial Sequence: Synthetic peptide"
ALRMGMT

SEQ ID NO: 335 - protein, 7 aa, Artificial Sequence
  source: /note="Description of Artificial Sequence: Synthetic peptide"
ALRNPIN

SEQ ID NO: 336 - protein, 7 aa, Artificial Sequence
  source: /note="Description of Artificial Sequence: Synthetic peptide"
ALRTSLT

SEQ ID NO: 337 - protein, 7 aa, Artificial Sequence
  source: /note="Description of Artificial Sequence: Synthetic peptide"
ALRVAAM

SEQ ID NO: 338 - protein, 7 aa, Artificial Sequence
  source: /note="Description of Artificial Sequence: Synthetic peptide"
ALSAGRV

SEQ ID NO: 339 - protein, 7 aa, Artificial Sequence
  source: /note="Description of Artificial Sequence: Synthetic peptide"
ALSELQI

SEQ ID NO: 340 - protein, 7 aa, Artificial Sequence
  source: /note="Description of Artificial Sequence: Synthetic peptide"
ALSGTFG

SEQ ID NO: 341 - protein, 7 aa, Artificial Sequence
  source: /note="Description of Artificial Sequence: Synthetic peptide"
ALSHDGN

SEQ ID NO: 342 - protein, 7 aa, Artificial Sequence
  source: /note="Description of Artificial Sequence: Synthetic peptide"
ALSHESN

SEQ ID NO: 343 - protein, 7 aa, Artificial Sequence
  source: /note="Description of Artificial Sequence: Synthetic peptide"
ALSKWAM

SEQ ID NO: 344 - protein, 7 aa, Artificial Sequence
  source: /note="Description of Artificial Sequence: Synthetic peptide"
ALSLNTI

SEQ ID NO: 345 - protein, 7 aa, Artificial Sequence
  source: /note="Description of Artificial Sequence: Synthetic peptide"
ALSPMPC

SEQ ID NO: 346 - protein, 7 aa, Artificial Sequence
  source: /note="Description of Artificial Sequence: Synthetic peptide"
ALSQAER

SEQ ID NO: 347 - protein, 7 aa, Artificial Sequence
  source: /note="Description of Artificial Sequence: Synthetic peptide"
ALSRDRP

SEQ ID NO: 348 - protein, 7 aa, Artificial Sequence
  source: /note="Description of Artificial Sequence: Synthetic peptide"
ALSSIHV

SEQ ID NO: 349 - protein, 7 aa, Artificial Sequence
  source: /note="Description of Artificial Sequence: Synthetic peptide"
ALSSSAL

SEQ ID NO: 350 - protein, 7 aa, Artificial Sequence
  source: /note="Description of Artificial Sequence: Synthetic peptide"
ALSTGMP

SEQ ID NO: 351 - protein, 7 aa, Artificial Sequence
  source: /note="Description of Artificial Sequence: Synthetic peptide"
ALSTPVP

SEQ ID NO: 352 - protein, 7 aa, Artificial Sequence
  source: /note="Description of Artificial Sequence: Synthetic peptide"
ALTHYDP

SEQ ID NO: 353 - protein, 7 aa, Artificial Sequence
  source: /note="Description of Artificial Sequence: Synthetic peptide"
ALTKNVA

SEQ ID NO: 354 - protein, 7 aa, Artificial Sequence
  source: /note="Description of Artificial Sequence: Synthetic peptide"
ALTRSAV

SEQ ID NO: 355 - protein, 7 aa, Artificial Sequence
  source: /note="Description of Artificial Sequence: Synthetic peptide"
ALTSTHV

SEQ ID NO: 356 - protein, 7 aa, Artificial Sequence
  source: /note="Description of Artificial Sequence: Synthetic peptide"
ALTTLAE

SEQ ID NO: 357 - protein, 7 aa, Artificial Sequence
  source: /note="Description of Artificial Sequence: Synthetic peptide"
ALTTLGP

SEQ ID NO: 358 - protein, 7 aa, Artificial Sequence
  source: /note="Description of Artificial Sequence: Synthetic peptide"
ALTVLLE

SEQ ID NO: 359 - protein, 7 aa, Artificial Sequence
  source: /note="Description of Artificial Sequence: Synthetic peptide"
ALVSSNL

SEQ ID NO: 360 - protein, 7 aa, Artificial Sequence
  source: /note="Description of Artificial Sequence: Synthetic peptide"
ALYDNAP

SEQ ID NO: 361 - protein, 7 aa, Artificial Sequence
  source: /note="Description of Artificial Sequence: Synthetic peptide"
ALYNTPP

SEQ ID NO: 362 - protein, 7 aa, Artificial Sequence
  source: /note="Description of Artificial Sequence: Synthetic peptide"
ALYTHLD

SEQ ID NO: 363 - protein, 7 aa, Artificial Sequence
  source: /note="Description of Artificial Sequence: Synthetic peptide"
AMAASPA

SEQ ID NO: 364 - protein, 7 aa, Artificial Sequence
  source: /note="Description of Artificial Sequence: Synthetic peptide"
AMAPKLS

SEQ ID NO: 365 - protein, 7 aa, Artificial Sequence
  source: /note="Description of Artificial Sequence: Synthetic peptide"
AMARPSG

SEQ ID NO: 366 - protein, 7 aa, Artificial Sequence
  source: /note="Description of Artificial Sequence: Synthetic peptide"
AMEHSVK

SEQ ID NO: 367 - protein, 7 aa, Artificial Sequence
  source: /note="Description of Artificial Sequence: Synthetic peptide"
AMETCDL

SEQ ID NO: 368 - protein, 7 aa, Artificial Sequence
  source: /note="Description of Artificial Sequence: Synthetic peptide"
AMGPSAS

SEQ ID NO: 369 - protein, 7 aa, Artificial Sequence
  source: /note="Description of Artificial Sequence: Synthetic peptide"
AMIQMRE

SEQ ID NO: 370 - protein, 7 aa, Artificial Sequence
  source: /note="Description of Artificial Sequence: Synthetic peptide"
AMKAQNT

SEQ ID NO: 371 - protein, 7 aa, Artificial Sequence
  source: /note="Description of Artificial Sequence: Synthetic peptide"
AMKDNRS

SEQ ID NO: 372 - protein, 7 aa, Artificial Sequence
  source: /note="Description of Artificial Sequence: Synthetic peptide"
AMKLNMP

SEQ ID NO: 373 - protein, 7 aa, Artificial Sequence
  source: /note="Description of Artificial Sequence: Synthetic peptide"
AMMQHVA

SEQ ID NO: 374 - protein, 7 aa, Artificial Sequence
  source: /note="Description of Artificial Sequence: Synthetic peptide"
AMMSAES

SEQ ID NO: 375 - protein, 7 aa, Artificial Sequence
  source: /note="Description of Artificial Sequence: Synthetic peptide"
AMPGLGV

SEQ ID NO: 376 - protein, 7 aa, Artificial Sequence
  source: /note="Description of Artificial Sequence: Synthetic peptide"
AMPGLQS

SEQ ID NO: 377 - protein, 7 aa, Artificial Sequence
  source: /note="Description of Artificial Sequence: Synthetic peptide"
AMPRLTP

SEQ ID NO: 378 - protein, 7 aa, Artificial Sequence
  source: /note="Description of Artificial Sequence: Synthetic peptide"
AMPRQVS

SEQ ID NO: 379 - protein, 7 aa, Artificial Sequence
  source: /note="Description of Artificial Sequence: Synthetic peptide"
AMPTVVA

SEQ ID NO: 380 - protein, 7 aa, Artificial Sequence
  source: /note="Description of Artificial Sequence: Synthetic peptide"
AMQTDRV

SEQ ID NO: 381 - protein, 7 aa, Artificial Sequence
  source: /note="Description of Artificial Sequence: Synthetic peptide"
AMRPSHE

SEQ ID NO: 382 - protein, 7 aa, Artificial Sequence
  source: /note="Description of Artificial Sequence: Synthetic peptide"
AMSLIHA

SEQ ID NO: 383 - protein, 7 aa, Artificial Sequence
  source: /note="Description of Artificial Sequence: Synthetic peptide"
AMSSASY

SEQ ID NO: 384 - protein, 7 aa, Artificial Sequence
  source: /note="Description of Artificial Sequence: Synthetic peptide"
AMSSIAG

SEQ ID NO: 385 - protein, 7 aa, Artificial Sequence
  source: /note="Description of Artificial Sequence: Synthetic peptide"
AMSTQLS

SEQ ID NO: 386 - protein, 7 aa, Artificial Sequence
  source: /note="Description of Artificial Sequence: Synthetic peptide"
AMTDKVQ

SEQ ID NO: 387 - protein, 7 aa, Artificial Sequence
  source: /note="Description of Artificial Sequence: Synthetic peptide"
AMTDVRG

SEQ ID NO: 388 - protein, 7 aa, Artificial Sequence
  source: /note="Description of Artificial Sequence: Synthetic peptide"
AMTHMPS

SEQ ID NO: 389 - protein, 7 aa, Artificial Sequence
  source: /note="Description of Artificial Sequence: Synthetic peptide"
AMTLRSD

SEQ ID NO: 390 - protein, 7 aa, Artificial Sequence
  source: /note="Description of Artificial Sequence: Synthetic peptide"
AMTSPKL

SEQ ID NO: 391 - protein, 7 aa, Artificial Sequence
  source: /note="Description of Artificial Sequence: Synthetic peptide"
AMWGADA

SEQ ID NO: 392 - protein, 7 aa, Artificial Sequence
  source: /note="Description of Artificial Sequence: Synthetic peptide"
ANAGGSP

SEQ ID NO: 393 - protein, 7 aa, Artificial Sequence
  source: /note="Description of Artificial Sequence: Synthetic peptide"
ANDSRAV

SEQ ID NO: 394 - protein, 7 aa, Artificial Sequence
  source: /note="Description of Artificial Sequence: Synthetic peptide"
ANEDFRK

SEQ ID NO: 395 - protein, 7 aa, Artificial Sequence
  source: /note="Description of Artificial Sequence: Synthetic peptide"
ANEPDVL

SEQ ID NO: 396 - protein, 7 aa, Artificial Sequence
  source: /note="Description of Artificial Sequence: Synthetic peptide"
ANGASSP

SEQ ID NO: 397 - protein, 7 aa, Artificial Sequence
  source: /note="Description of Artificial Sequence: Synthetic peptide"
ANHGATF

SEQ ID NO: 398 - protein, 7 aa, Artificial Sequence
  source: /note="Description of Artificial Sequence: Synthetic peptide"
ANHTTRS

SEQ ID NO: 399 - protein, 7 aa, Artificial Sequence
  source: /note="Description of Artificial Sequence: Synthetic peptide"
ANKPQVT

SEQ ID NO: 400 - protein, 7 aa, Artificial Sequence
  source: /note="Description of Artificial Sequence: Synthetic peptide"
ANLGLPP

SEQ ID NO: 401 - protein, 7 aa, Artificial Sequence
  source: /note="Description of Artificial Sequence: Synthetic peptide"
ANLGSAR

SEQ ID NO: 402 - protein, 7 aa, Artificial Sequence
  source: /note="Description of Artificial Sequence: Synthetic peptide"
ANLPGHL

SEQ ID NO: 403 - protein, 7 aa, Artificial Sequence
  source: /note="Description of Artificial Sequence: Synthetic peptide"
ANMTRVE

SEQ ID NO: 404 - protein, 7 aa, Artificial Sequence
  source: /note="Description of Artificial Sequence: Synthetic peptide"
ANMTVHC

SEQ ID NO: 405 - protein, 7 aa, Artificial Sequence
  source: /note="Description of Artificial Sequence: Synthetic peptide"
ANPAKTV

SEQ ID NO: 406 - protein, 7 aa, Artificial Sequence
  source: /note="Description of Artificial Sequence: Synthetic peptide"
ANPGKIY

SEQ ID NO: 407 - protein, 7 aa, Artificial Sequence
  source: /note="Description of Artificial Sequence: Synthetic peptide"
ANPGTAP

SEQ ID NO: 408 - protein, 7 aa, Artificial Sequence
  source: /note="Description of Artificial Sequence: Synthetic peptide"
ANPLLSS

SEQ ID NO: 409 - protein, 7 aa, Artificial Sequence
  source: /note="Description of Artificial Sequence: Synthetic peptide"
ANQGIDS

SEQ ID NO: 410 - protein, 7 aa, Artificial Sequence
  source: /note="Description of Artificial Sequence: Synthetic peptide"
ANQNNKN

SEQ ID NO: 411 - protein, 7 aa, Artificial Sequence
  source: /note="Description of Artificial Sequence: Synthetic peptide"
ANQSLPS

SEQ ID NO: 412 - protein, 7 aa, Artificial Sequence
  source: /note="Description of Artificial Sequence: Synthetic peptide"
ANRSGHG

SEQ ID NO: 413 - protein, 7 aa, Artificial Sequence
  source: /note="Description of Artificial Sequence: Synthetic peptide"
ANSDWGP

SEQ ID NO: 414 - protein, 7 aa, Artificial Sequence
  source: /note="Description of Artificial Sequence: Synthetic peptide"
ANSEEFV

SEQ ID NO: 415 - protein, 7 aa, Artificial Sequence
  source: /note="Description of Artificial Sequence: Synthetic peptide"
ANSGPPP

SEQ ID NO: 416 - protein, 7 aa, Artificial Sequence
  source: /note="Description of Artificial Sequence: Synthetic peptide"
ANSHEQM

SEQ ID NO: 417 - protein, 7 aa, Artificial Sequence
  source: /note="Description of Artificial Sequence: Synthetic peptide"
ANSHMLK

SEQ ID NO: 418 - protein, 7 aa, Artificial Sequence
  source: /note="Description of Artificial Sequence: Synthetic peptide"
ANSMMHP

SEQ ID NO: 419 - protein, 7 aa, Artificial Sequence
  source: /note="Description of Artificial Sequence: Synthetic peptide"
ANSNSVY

SEQ ID NO: 420 - protein, 7 aa, Artificial Sequence
  source: /note="Description of Artificial Sequence: Synthetic peptide"
ANSRLGG

SEQ ID NO: 421 - protein, 7 aa, Artificial Sequence
  source: /note="Description of Artificial Sequence: Synthetic peptide"
ANSRPTQ

SEQ ID NO: 422 - protein, 7 aa, Artificial Sequence
  source: /note="Description of Artificial Sequence: Synthetic peptide"
ANSRSMV

SEQ ID NO: 423 - protein, 7 aa, Artificial Sequence
  source: /note="Description of Artificial Sequence: Synthetic peptide"
ANSSSPG

SEQ ID NO: 424 - protein, 7 aa, Artificial Sequence
  source: /note="Description of Artificial Sequence: Synthetic peptide"
ANSTKGL

SEQ ID NO: 425 - protein, 7 aa, Artificial Sequence
  source: /note="Description of Artificial Sequence: Synthetic peptide"
ANTDPRN

SEQ ID NO: 426 - protein, 7 aa, Artificial Sequence
  source: /note="Description of Artificial Sequence: Synthetic peptide"
ANTETIW

SEQ ID NO: 427 - protein, 7 aa, Artificial Sequence
  source: /note="Description of Artificial Sequence: Synthetic peptide"
ANTLLHV

SEQ ID NO: 428 - protein, 7 aa, Artificial Sequence
  source: /note="Description of Artificial Sequence: Synthetic peptide"
ANVASSG

SEQ ID NO: 429 - protein, 7 aa, Artificial Sequence
  source: /note="Description of Artificial Sequence: Synthetic peptide"
ANVSSTH

SEQ ID NO: 430 - protein, 7 aa, Artificial Sequence
  source: /note="Description of Artificial Sequence: Synthetic peptide"
ANVSVQV

SEQ ID NO: 431 - protein, 7 aa, Artificial Sequence
  source: /note="Description of Artificial Sequence: Synthetic peptide"
APADHRM

SEQ ID NO: 432 - protein, 7 aa, Artificial Sequence
  source: /note="Description of Artificial Sequence: Synthetic peptide"
APADMTS

SEQ ID NO: 433 - protein, 7 aa, Artificial Sequence
  source: /note="Description of Artificial Sequence: Synthetic peptide"
APADWPV

SEQ ID NO: 434 - protein, 7 aa, Artificial Sequence
  source: /note="Description of Artificial Sequence: Synthetic peptide"
APAGRPS

SEQ ID NO: 435 - protein, 7 aa, Artificial Sequence
  source: /note="Description of Artificial Sequence: Synthetic peptide"
APALGLA

SEQ ID NO: 436 - protein, 7 aa, Artificial Sequence
  source: /note="Description of Artificial Sequence: Synthetic peptide"
APANDEG

SEQ ID NO: 437 - protein, 7 aa, Artificial Sequence
  source: /note="Description of Artificial Sequence: Synthetic peptide"
APAQRLY

SEQ ID NO: 438 - protein, 7 aa, Artificial Sequence
  source: /note="Description of Artificial Sequence: Synthetic peptide"
APARMVN

SEQ ID NO: 439 - protein, 7 aa, Artificial Sequence
  source: /note="Description of Artificial Sequence: Synthetic peptide"
APDGTYL

SEQ ID NO: 440 - protein, 7 aa, Artificial Sequence
  source: /note="Description of Artificial Sequence: Synthetic peptide"
APDPSSL

SEQ ID NO: 441 - protein, 7 aa, Artificial Sequence
  source: /note="Description of Artificial Sequence: Synthetic peptide"
APEDAGS

SEQ ID NO: 442 - protein, 7 aa, Artificial Sequence
  source: /note="Description of Artificial Sequence: Synthetic peptide"
APETNDS

SEQ ID NO: 443 - protein, 7 aa, Artificial Sequence
  source: /note="Description of Artificial Sequence: Synthetic peptide"
APFNTQG

SEQ ID NO: 444 - protein, 7 aa, Artificial Sequence
  source: /note="Description of Artificial Sequence: Synthetic peptide"
APFPEKW

SEQ ID NO: 445 - protein, 7 aa, Artificial Sequence
  source: /note="Description of Artificial Sequence: Synthetic peptide"
APFPEQP

SEQ ID NO: 446 - protein, 7 aa, Artificial Sequence
  source: /note="Description of Artificial Sequence: Synthetic peptide"
APGITNY

SEQ ID NO: 447 - protein, 7 aa, Artificial Sequence
  source: /note="Description of Artificial Sequence: Synthetic peptide"
APGLRHS

SEQ ID NO: 448 - protein, 7 aa, Artificial Sequence
  source: /note="Description of Artificial Sequence: Synthetic peptide"
APGRLSL

SEQ ID NO: 449 - protein, 7 aa, Artificial Sequence
  source: /note="Description of Artificial Sequence: Synthetic peptide"
APHFPST

SEQ ID NO: 450 - protein, 7 aa, Artificial Sequence
  source: /note="Description of Artificial Sequence: Synthetic peptide"
APHLPTH

SEQ ID NO: 451 - protein, 7 aa, Artificial Sequence
  source: /note="Description of Artificial Sequence: Synthetic peptide"
APILRTP

SEQ ID NO: 452 - protein, 7 aa, Artificial Sequence
  source: /note="Description of Artificial Sequence: Synthetic peptide"
APISHQM

SEQ ID NO: 453 - protein, 7 aa, Artificial Sequence
  source: /note="Description of Artificial Sequence: Synthetic peptide"
APLAVRP

SEQ ID NO: 454 - protein, 7 aa, Artificial Sequence
  source: /note="Description of Artificial Sequence: Synthetic peptide"
APLKSVQ

SEQ ID NO: 455 - protein, 7 aa, Artificial Sequence
  source: /note="Description of Artificial Sequence: Synthetic peptide"
APNLLIG

SEQ ID NO: 456 - protein, 7 aa, Artificial Sequence
  source: /note="Description of Artificial Sequence: Synthetic peptide"
APNSGVK

SEQ ID NO: 457 - protein, 7 aa, Artificial Sequence
  source: /note="Description of Artificial Sequence: Synthetic peptide"
APNTSVR

SEQ ID NO: 458 - protein, 7 aa, Artificial Sequence
  source: /note="Description of Artificial Sequence: Synthetic peptide"
APPNLES

SEQ ID NO: 459 - protein, 7 aa, Artificial Sequence
  source: /note="Description of Artificial Sequence: Synthetic peptide"
APPNVRT

SEQ ID NO: 460 - protein, 7 aa, Artificial Sequence
  source: /note="Description of Artificial Sequence: Synthetic peptide"
APPSLRT

SEQ ID NO: 461 - protein, 7 aa, Artificial Sequence
  source: /note="Description of Artificial Sequence: Synthetic peptide"
APQAKTP

SEQ ID NO: 462 - protein, 7 aa, Artificial Sequence
  source: /note="Description of Artificial Sequence: Synthetic peptide"
APQGRQI

SEQ ID NO: 463 - protein, 7 aa, Artificial Sequence
  source: /note="Description of Artificial Sequence: Synthetic peptide"
APQLQPA

SEQ ID NO: 464 - protein, 7 aa, Artificial Sequence
  source: /note="Description of Artificial Sequence: Synthetic peptide"
APQPKDP

SEQ ID NO: 465 - protein, 7 aa, Artificial Sequence
  source: /note="Description of Artificial Sequence: Synthetic peptide"
APRAVNY

SEQ ID NO: 466 - protein, 7 aa, Artificial Sequence
  source: /note="Description of Artificial Sequence: Synthetic peptide"
APRLTVS

SEQ ID NO: 467 - protein, 7 aa, Artificial Sequence
  source: /note="Description of Artificial Sequence: Synthetic peptide"
APRPPLV

SEQ ID NO: 468 - protein, 7 aa, Artificial Sequence
  source: /note="Description of Artificial Sequence: Synthetic peptide"
APRQTHN

SEQ ID NO: 469 - protein, 7 aa, Artificial Sequence
  source: /note="Description of Artificial Sequence: Synthetic peptide"
APRTHST

SEQ ID NO: 470 - protein, 7 aa, Artificial Sequence
  source: /note="Description of Artificial Sequence: Synthetic peptide"
APRVLQT

SEQ ID NO: 471 - protein, 7 aa, Artificial Sequence
  source: /note="Description of Artificial Sequence: Synthetic peptide"
APRYELR

SEQ ID NO: 472 - protein, 7 aa, Artificial Sequence
  source: /note="Description of Artificial Sequence: Synthetic peptide"
APSGSTS

SEQ ID NO: 473 - protein, 7 aa, Artificial Sequence
  source: /note="Description of Artificial Sequence: Synthetic peptide"
APSGVKP

SEQ ID NO: 474 - protein, 7 aa, Artificial Sequence
  source: /note="Description of Artificial Sequence: Synthetic peptide"
APSKMAI

SEQ ID NO: 475 - protein, 7 aa, Artificial Sequence
  source: /note="Description of Artificial Sequence: Synthetic peptide"
APSRCAL

SEQ ID NO: 476 - protein, 7 aa, Artificial Sequence
  source: /note="Description of Artificial Sequence: Synthetic peptide"
APSSAEN

SEQ ID NO: 477 - protein, 7 aa, Artificial Sequence
  source: /note="Description of Artificial Sequence: Synthetic peptide"
APSTLNN

SEQ ID NO: 478 - protein, 7 aa, Artificial Sequence
  source: /note="Description of Artificial Sequence: Synthetic peptide"
APSVRPI

SEQ ID NO: 479 - protein, 7 aa, Artificial Sequence
  source: /note="Description of Artificial Sequence: Synthetic peptide"
APSVVTT

SEQ ID NO: 480 - protein, 7 aa, Artificial Sequence
  source: /note="Description of Artificial Sequence: Synthetic peptide"
APTAGSM

SEQ ID NO: 481 - protein, 7 aa, Artificial Sequence
  source: /note="Description of Artificial Sequence: Synthetic peptide"
APTPHPS

SEQ ID NO: 482 - protein, 7 aa, Artificial Sequence
  source: /note="Description of Artificial Sequence: Synthetic peptide"
APTPKGI

SEQ ID NO: 483 - protein, 7 aa, Artificial Sequence
  source: /note="Description of Artificial Sequence: Synthetic peptide"
APTRNPQ

SEQ ID NO: 484 - protein, 7 aa, Artificial Sequence
  source: /note="Description of Artificial Sequence: Synthetic peptide"
APTTPSL

SEQ ID NO: 485 - protein, 7 aa, Artificial Sequence
  source: /note="Description of Artificial Sequence: Synthetic peptide"
APTVSNI

SEQ ID NO: 486 - protein, 7 aa, Artificial Sequence
  source: /note="Description of Artificial Sequence: Synthetic peptide"
APVPDQT

SEQ ID NO: 487 - protein, 7 aa, Artificial Sequence
  source: /note="Description of Artificial Sequence: Synthetic peptide"
APVTDNF

SEQ ID NO: 488 - protein, 7 aa, Artificial Sequence
  source: /note="Description of Artificial Sequence: Synthetic peptide"
AQALRGH

SEQ ID NO: 489 - protein, 7 aa, Artificial Sequence
  source: /note="Description of Artificial Sequence: Synthetic peptide"
AQAPRTE

SEQ ID NO: 490 - protein, 7 aa, Artificial Sequence
  source: /note="Description of Artificial Sequence: Synthetic peptide"
AQATSSL

SEQ ID NO: 491 - protein, 7 aa, Artificial Sequence
  source: /note="Description of Artificial Sequence: Synthetic peptide"
AQCSTHL

SEQ ID NO: 492 - protein, 7 aa, Artificial Sequence
  source: /note="Description of Artificial Sequence: Synthetic peptide"
AQDRATR

SEQ ID NO: 493 - protein, 7 aa, Artificial Sequence
  source: /note="Description of Artificial Sequence: Synthetic peptide"
AQFSTKD

SEQ ID NO: 494 - protein, 7 aa, Artificial Sequence
  source: /note="Description of Artificial Sequence: Synthetic peptide"
AQGQTML

SEQ ID NO: 495 - protein, 7 aa, Artificial Sequence
  source: /note="Description of Artificial Sequence: Synthetic peptide"
AQGQVTP

SEQ ID NO: 496 - protein, 7 aa, Artificial Sequence
  source: /note="Description of Artificial Sequence: Synthetic peptide"
AQGWTSG

SEQ ID NO: 497 - protein, 7 aa, Artificial Sequence
  source: /note="Description of Artificial Sequence: Synthetic peptide"
AQHKLGL

SEQ ID NO: 498 - protein, 7 aa, Artificial Sequence
  source: /note="Description of Artificial Sequence: Synthetic peptide"
AQHRGET

SEQ ID NO: 499 - protein, 7 aa, Artificial Sequence
  source: /note="Description of Artificial Sequence: Synthetic peptide"
AQIHMEM

SEQ ID NO: 500 - protein, 7 aa, Artificial Sequence
  source: /note="Description of Artificial Sequence: Synthetic peptide"
AQKPTTM

SEQ ID NO: 501 - protein, 7 aa, Artificial Sequence
  source: /note="Description of Artificial Sequence: Synthetic peptide"
AQKPVVI

SEQ ID NO: 502 - protein, 7 aa, Artificial Sequence
  source: /note="Description of Artificial Sequence: Synthetic peptide"
AQKQKAP

SEQ ID NO: 503 - protein, 7 aa, Artificial Sequence
  source: /note="Description of Artificial Sequence: Synthetic peptide"
AQNMRNN

SEQ ID NO: 504 - protein, 7 aa, Artificial Sequence
  source: /note="Description of Artificial Sequence: Synthetic peptide"
AQPGTVF

SEQ ID NO: 505 - protein, 7 aa, Artificial Sequence
  source: /note="Description of Artificial Sequence: Synthetic peptide"
AQPSLYA

SEQ ID NO: 506 - protein, 7 aa, Artificial Sequence
  source: /note="Description of Artificial Sequence: Synthetic peptide"
AQPTRAD

SEQ ID NO: 507 - protein, 7 aa, Artificial Sequence
  source: /note="Description of Artificial Sequence: Synthetic peptide"
AQPVSRL

SEQ ID NO: 508 - protein, 7 aa, Artificial Sequence
  source: /note="Description of Artificial Sequence: Synthetic peptide"
AQRLSGG

SEQ ID NO: 509 - protein, 7 aa, Artificial Sequence
  source: /note="Description of Artificial Sequence: Synthetic peptide"
AQRNTSP

SEQ ID NO: 510 - protein, 7 aa, Artificial Sequence
  source: /note="Description of Artificial Sequence: Synthetic peptide"
AQRPTSV

SEQ ID NO: 511 - protein, 7 aa, Artificial Sequence
  source: /note="Description of Artificial Sequence: Synthetic peptide"
AQSGAIS

SEQ ID NO: 512 - protein, 7 aa, Artificial Sequence
  source: /note="Description of Artificial Sequence: Synthetic peptide"
AQSRSPL

SEQ ID NO: 513 - protein, 7 aa, Artificial Sequence
  source: /note="Description of Artificial Sequence: Synthetic peptide"
AQTSLRL

SEQ ID NO: 514 - protein, 7 aa, Artificial Sequence
  source: /note="Description of Artificial Sequence: Synthetic peptide"
AQTSMHT

SEQ ID NO: 515 - protein, 7 aa, Artificial Sequence
  source: /note="Description of Artificial Sequence: Synthetic peptide"
AQYIPST

SEQ ID NO: 516 - protein, 7 aa, Artificial Sequence
  source: /note="Description of Artificial Sequence: Synthetic peptide"
AQYPKPN

SEQ ID NO: 517 - protein, 7 aa, Artificial Sequence
  source: /note="Description of Artificial Sequence: Synthetic peptide"
ARAGDLV

SEQ ID NO: 518 - protein, 7 aa, Artificial Sequence
  source: /note="Description of Artificial Sequence: Synthetic peptide"
ARAHDST

SEQ ID NO: 519 - protein, 7 aa, Artificial Sequence
  source: /note="Description of Artificial Sequence: Synthetic peptide"
ARAHLTA

SEQ ID NO: 520 - protein, 7 aa, Artificial Sequence
  source: /note="Description of Artificial Sequence: Synthetic peptide"
ARALSPN

SEQ ID NO: 521 - protein, 7 aa, Artificial Sequence
  source: /note="Description of Artificial Sequence: Synthetic peptide"
ARAPGEL

SEQ ID NO: 522 - protein, 7 aa, Artificial Sequence
  source: /note="Description of Artificial Sequence: Synthetic peptide"
ARAPGPI

SEQ ID NO: 523 - protein, 7 aa, Artificial Sequence
  source: /note="Description of Artificial Sequence: Synthetic peptide"
ARAPTLM

SEQ ID NO: 524 - protein, 7 aa, Artificial Sequence
  source: /note="Description of Artificial Sequence: Synthetic peptide"
ARASPMT

SEQ ID NO: 525 - protein, 7 aa, Artificial Sequence
  source: /note="Description of Artificial Sequence: Synthetic peptide"
ARDFNAS

SEQ ID NO: 526 - protein, 7 aa, Artificial Sequence
  source: /note="Description of Artificial Sequence: Synthetic peptide"
ARDGVSL

SEQ ID NO: 527 - protein, 7 aa, Artificial Sequence
  source: /note="Description of Artificial Sequence: Synthetic peptide"
ARDLPAY

SEQ ID NO: 528 - protein, 7 aa, Artificial Sequence
  source: /note="Description of Artificial Sequence: Synthetic peptide"
ARDMVPH

SEQ ID NO: 529 - protein, 7 aa, Artificial Sequence
  source: /note="Description of Artificial Sequence: Synthetic peptide"
ARDQRSP

SEQ ID NO: 530 - protein, 7 aa, Artificial Sequence
  source: /note="Description of Artificial Sequence: Synthetic peptide"
AREHSQL

SEQ ID NO: 531 - protein, 7 aa, Artificial Sequence
  source: /note="Description of Artificial Sequence: Synthetic peptide"
ARELGRS

SEQ ID NO: 532 - protein, 7 aa, Artificial Sequence
  source: /note="Description of Artificial Sequence: Synthetic peptide"
ARFDVGS

SEQ ID NO: 533 - protein, 7 aa, Artificial Sequence
  source: /note="Description of Artificial Sequence: Synthetic peptide"
ARFETGH

SEQ ID NO: 534 - protein, 7 aa, Artificial Sequence
  source: /note="Description of Artificial Sequence: Synthetic peptide"
ARGLAAH

SEQ ID NO: 535 - protein, 7 aa, Artificial Sequence
  source: /note="Description of Artificial Sequence: Synthetic peptide"
ARGNAQA

SEQ ID NO: 536 - protein, 7 aa, Artificial Sequence
  source: /note="Description of Artificial Sequence: Synthetic peptide"
ARGNVMI

SEQ ID NO: 537 - protein, 7 aa, Artificial Sequence
  source: /note="Description of Artificial Sequence: Synthetic peptide"
ARGSDAS

SEQ ID NO: 538 - protein, 7 aa, Artificial Sequence
  source: /note="Description of Artificial Sequence: Synthetic peptide"
ARGSMTL

SEQ ID NO: 539 - protein, 7 aa, Artificial Sequence
  source: /note="Description of Artificial Sequence: Synthetic peptide"
ARGVASP

SEQ ID NO: 540 - protein, 7 aa, Artificial Sequence
  source: /note="Description of Artificial Sequence: Synthetic peptide"
ARHASVA

SEQ ID NO: 541 - protein, 7 aa, Artificial Sequence
  source: /note="Description of Artificial Sequence: Synthetic peptide"
ARHMPIE

SEQ ID NO: 542 - protein, 7 aa, Artificial Sequence
  source: /note="Description of Artificial Sequence: Synthetic peptide"
ARIYESP

SEQ ID NO: 543 - protein, 7 aa, Artificial Sequence
  source: /note="Description of Artificial Sequence: Synthetic peptide"
ARLATSE

SEQ ID NO: 544 - protein, 7 aa, Artificial Sequence
  source: /note="Description of Artificial Sequence: Synthetic peptide"
ARLGYDG

SEQ ID NO: 545 - protein, 7 aa, Artificial Sequence
  source: /note="Description of Artificial Sequence: Synthetic peptide"
ARLNFAA

SEQ ID NO: 546 - protein, 7 aa, Artificial Sequence
  source: /note="Description of Artificial Sequence: Synthetic peptide"
ARLQTAV

SEQ ID NO: 547 - protein, 7 aa, Artificial Sequence
  source: /note="Description of Artificial Sequence: Synthetic peptide"
ARMGLGL

SEQ ID NO: 548 - protein, 7 aa, Artificial Sequence
  source: /note="Description of Artificial Sequence: Synthetic peptide"
ARMPMLE

SEQ ID NO: 549 - protein, 7 aa, Artificial Sequence
  source: /note="Description of Artificial Sequence: Synthetic peptide"
ARMPSPP

SEQ ID NO: 550 - protein, 7 aa, Artificial Sequence
  source: /note="Description of Artificial Sequence: Synthetic peptide"
ARMVDPI

SEQ ID NO: 551 - protein, 7 aa, Artificial Sequence
  source: /note="Description of Artificial Sequence: Synthetic peptide"
ARMVGEP

SEQ ID NO: 552 - protein, 7 aa, Artificial Sequence
  source: /note="Description of Artificial Sequence: Synthetic peptide"
ARNPGPD

SEQ ID NO: 553 - protein, 7 aa, Artificial Sequence
  source: /note="Description of Artificial Sequence: Synthetic peptide"
ARNQAAQ

SEQ ID NO: 554 - protein, 7 aa, Artificial Sequence
  source: /note="Description of Artificial Sequence: Synthetic peptide"
ARNSLSD

SEQ ID NO: 555 - protein, 7 aa, Artificial Sequence
  source: /note="Description of Artificial Sequence: Synthetic peptide"
ARPEIKY

SEQ ID NO: 556 - protein, 7 aa, Artificial Sequence
  source: /note="Description of Artificial Sequence: Synthetic peptide"
ARPEYRV

SEQ ID NO: 557 - protein, 7 aa, Artificial Sequence
  source: /note="Description of Artificial Sequence: Synthetic peptide"
ARPPNSY

SEQ ID NO: 558 - protein, 7 aa, Artificial Sequence
  source: /note="Description of Artificial Sequence: Synthetic peptide"
ARPTEHE

SEQ ID NO: 559 - protein, 7 aa, Artificial Sequence
  source: /note="Description of Artificial Sequence: Synthetic peptide"
ARQHFAP

SEQ ID NO: 560 - protein, 7 aa, Artificial Sequence
  source: /note="Description of Artificial Sequence: Synthetic peptide"
ARQHVGP

SEQ ID NO: 561 - protein, 7 aa, Artificial Sequence
  source: /note="Description of Artificial Sequence: Synthetic peptide"
ARQTMNE

SEQ ID NO: 562 - protein, 7 aa, Artificial Sequence
  source: /note="Description of Artificial Sequence: Synthetic peptide"
ARRDPPL

SEQ ID NO: 563 - protein, 7 aa, Artificial Sequence
  source: /note="Description of Artificial Sequence: Synthetic peptide"
ARSAALA

SEQ ID NO: 564 - protein, 7 aa, Artificial Sequence
  source: /note="Description of Artificial Sequence: Synthetic peptide"
ARSAQTN

SEQ ID NO: 565 - protein, 7 aa, Artificial Sequence
  source: /note="Description of Artificial Sequence: Synthetic peptide"
ARSDRVS

SEQ ID NO: 566 - protein, 7 aa, Artificial Sequence
  source: /note="Description of Artificial Sequence: Synthetic peptide"
ARSEPTP

SEQ ID NO: 567 - protein, 7 aa, Artificial Sequence
  source: /note="Description of Artificial Sequence: Synthetic peptide"
ARSGEGF

SEQ ID NO: 568 - protein, 7 aa, Artificial Sequence
  source: /note="Description of Artificial Sequence: Synthetic peptide"
ARSHIVS

SEQ ID NO: 569 - protein, 7 aa, Artificial Sequence
  source: /note="Description of Artificial Sequence: Synthetic peptide"
ARSISVV

SEQ ID NO: 570 - protein, 7 aa, Artificial Sequence
  source: /note="Description of Artificial Sequence: Synthetic peptide"
ARSIVGP

SEQ ID NO: 571 - protein, 7 aa, Artificial Sequence
  source: /note="Description of Artificial Sequence: Synthetic peptide"
ARSNELH

SEQ ID NO: 572 - protein, 7 aa, Artificial Sequence
  source: /note="Description of Artificial Sequence: Synthetic peptide"
ARSPDVL

SEQ ID NO: 573 - protein, 7 aa, Artificial Sequence
  source: /note="Description of Artificial Sequence: Synthetic peptide"
ARSPHVY

SEQ ID NO: 574 - protein, 7 aa, Artificial Sequence
  source: /note="Description of Artificial Sequence: Synthetic peptide"
ARSRPLE

SEQ ID NO: 575 - protein, 7 aa, Artificial Sequence
  source: /note="Description of Artificial Sequence: Synthetic peptide"
ARSSDLE

SEQ ID NO: 576 - protein, 7 aa, Artificial Sequence
  source: /note="Description of Artificial Sequence: Synthetic peptide"
ARSSPPL

SEQ ID NO: 577 - protein, 7 aa, Artificial Sequence
  source: /note="Description of Artificial Sequence: Synthetic peptide"
ARSTVLG

SEQ ID NO: 578 - protein, 7 aa, Artificial Sequence
  source: /note="Description of Artificial Sequence: Synthetic peptide"
ARSVATS

SEQ ID NO: 579 - protein, 7 aa, Artificial Sequence
  source: /note="Description of Artificial Sequence: Synthetic peptide"
ARSVQDS

SEQ ID NO: 580 - protein, 7 aa, Artificial Sequence
  source: /note="Description of Artificial Sequence: Synthetic peptide"
ARTASLP

SEQ ID NO: 581 - protein, 7 aa, Artificial Sequence
  source: /note="Description of Artificial Sequence: Synthetic peptide"
ARTGAYS

SEQ ID NO: 582 - protein, 7 aa, Artificial Sequence
  source: /note="Description of Artificial Sequence: Synthetic peptide"
ARTLPQL

SEQ ID NO: 583 - protein, 7 aa, Artificial Sequence
  source: /note="Description of Artificial Sequence: Synthetic peptide"
ARTLSTH

SEQ ID NO: 584 - protein, 7 aa, Artificial Sequence
  source: /note="Description of Artificial Sequence: Synthetic peptide"
ARTPVLY

SEQ ID NO: 585 - protein, 7 aa, Artificial Sequence
  source: /note="Description of Artificial Sequence: Synthetic peptide"
ARTSEEP

SEQ ID NO: 586 - protein, 7 aa, Artificial Sequence
  source: /note="Description of Artificial Sequence: Synthetic peptide"
ARTTVGL

SEQ ID NO: 587 - protein, 7 aa, Artificial Sequence
  source: /note="Description of Artificial Sequence: Synthetic peptide"
ARTVPSM

SEQ ID NO: 588 - protein, 7 aa, Artificial Sequence
  source: /note="Description of Artificial Sequence: Synthetic peptide"
ARVDVSM

SEQ ID NO: 589 - protein, 7 aa, Artificial Sequence
  source: /note="Description of Artificial Sequence: Synthetic peptide"
ARVNREP

SEQ ID NO: 590 - protein, 7 aa, Artificial Sequence
  source: /note="Description of Artificial Sequence: Synthetic peptide"
ARVSLEA

SEQ ID NO: 591 - protein, 7 aa, Artificial Sequence
  source: /note="Description of Artificial Sequence: Synthetic peptide"
ARVVAPE

SEQ ID NO: 592 - protein, 7 aa, Artificial Sequence
  source: /note="Description of Artificial Sequence: Synthetic peptide"
ARYGGMV

SEQ ID NO: 593 - protein, 7 aa, Artificial Sequence
  source: /note="Description of Artificial Sequence: Synthetic peptide"
ASAFKQP

SEQ ID NO: 594 - protein, 7 aa, Artificial Sequence
  source: /note="Description of Artificial Sequence: Synthetic peptide"
ASAGGQP

SEQ ID NO: 595 - protein, 7 aa, Artificial Sequence
  source: /note="Description of Artificial Sequence: Synthetic peptide"
ASAGPPP

SEQ ID NO: 596 - protein, 7 aa, Artificial Sequence
  source: /note="Description of Artificial Sequence: Synthetic peptide"
ASAQQVS

SEQ ID NO: 597 - protein, 7 aa, Artificial Sequence
  source: /note="Description of Artificial Sequence: Synthetic peptide"
ASASNRG

SEQ ID NO: 598 - protein, 7 aa, Artificial Sequence
  source: /note="Description of Artificial Sequence: Synthetic peptide"
ASCSSTT

SEQ ID NO: 599 - protein, 7 aa, Artificial Sequence
  source: /note="Description of Artificial Sequence: Synthetic peptide"
ASDASCS

SEQ ID NO: 600 - protein, 7 aa, Artificial Sequence
  source: /note="Description of Artificial Sequence: Synthetic peptide"
ASDLSLR

SEQ ID NO: 601 - protein, 7 aa, Artificial Sequence
  source: /note="Description of Artificial Sequence: Synthetic peptide"
ASDMLKS

SEQ ID NO: 602 - protein, 7 aa, Artificial Sequence
  source: /note="Description of Artificial Sequence: Synthetic peptide"
ASDNIRA

SEQ ID NO: 603 - protein, 7 aa, Artificial Sequence
  source: /note="Description of Artificial Sequence: Synthetic peptide"
ASDPMKG

SEQ ID NO: 604 - protein, 7 aa, Artificial Sequence
  source: /note="Description of Artificial Sequence: Synthetic peptide"
ASDTTTM

SEQ ID NO: 605 - protein, 7 aa, Artificial Sequence
  source: /note="Description of Artificial Sequence: Synthetic peptide"
ASDVSRP

SEQ ID NO: 606 - protein, 7 aa, Artificial Sequence
  source: /note="Description of Artificial Sequence: Synthetic peptide"
ASEERAN

SEQ ID NO: 607 - protein, 7 aa, Artificial Sequence
  source: /note="Description of Artificial Sequence: Synthetic peptide"
ASENSQN

SEQ ID NO: 608 - protein, 7 aa, Artificial Sequence
  source: /note="Description of Artificial Sequence: Synthetic peptide"
ASERNRL

SEQ ID NO: 609 - protein, 7 aa, Artificial Sequence
  source: /note="Description of Artificial Sequence: Synthetic peptide"
ASEVSNA

SEQ ID NO: 610 - protein, 7 aa, Artificial Sequence
  source: /note="Description of Artificial Sequence: Synthetic peptide"
ASFCTSW

SEQ ID NO: 611 - protein, 7 aa, Artificial Sequence
  source: /note="Description of Artificial Sequence: Synthetic peptide"
ASFHGGV

SEQ ID NO: 612 - protein, 7 aa, Artificial Sequence
  source: /note="Description of Artificial Sequence: Synthetic peptide"
ASFMEAA

SEQ ID NO: 613 - protein, 7 aa, Artificial Sequence
  source: /note="Description of Artificial Sequence: Synthetic peptide"
ASFPATS

SEQ ID NO: 614 - protein, 7 aa, Artificial Sequence
  source: /note="Description of Artificial Sequence: Synthetic peptide"
ASFRLMA

SEQ ID NO: 615 - protein, 7 aa, Artificial Sequence
  source: /note="Description of Artificial Sequence: Synthetic peptide"
ASGRAVG

SEQ ID NO: 616 - protein, 7 aa, Artificial Sequence
  source: /note="Description of Artificial Sequence: Synthetic peptide"
ASGRQDL

SEQ ID NO: 617 - protein, 7 aa, Artificial Sequence
  source: /note="Description of Artificial Sequence: Synthetic peptide"
ASGSDDS

SEQ ID NO: 618 - protein, 7 aa, Artificial Sequence
  source: /note="Description of Artificial Sequence: Synthetic peptide"
ASGSTSG

SEQ ID NO: 619 - protein, 7 aa, Artificial Sequence
  source: /note="Description of Artificial Sequence: Synthetic peptide"
ASGTRAA

SEQ ID NO: 620 - protein, 7 aa, Artificial Sequence
  source: /note="Description of Artificial Sequence: Synthetic peptide"
ASGTYTS

SEQ ID NO: 621 - protein, 7 aa, Artificial Sequence
  source: /note="Description of Artificial Sequence: Synthetic peptide"
ASGYLPQ

SEQ ID NO: 622 - protein, 7 aa, Artificial Sequence
  source: /note="Description of Artificial Sequence: Synthetic peptide"
ASHERDF

SEQ ID NO: 623 - protein, 7 aa, Artificial Sequence
  source: /note="Description of Artificial Sequence: Synthetic peptide"
ASHHLTE

SEQ ID NO: 624 - protein, 7 aa, Artificial Sequence
  source: /note="Description of Artificial Sequence: Synthetic peptide"
ASHRSGD

SEQ ID NO: 625 - protein, 7 aa, Artificial Sequence
  source: /note="Description of Artificial Sequence: Synthetic peptide"
ASIHTTS

SEQ ID NO: 626 - protein, 7 aa, Artificial Sequence
  source: /note="Description of Artificial Sequence: Synthetic peptide"
ASISGSA

SEQ ID NO: 627 - protein, 7 aa, Artificial Sequence
  source: /note="Description of Artificial Sequence: Synthetic peptide"
ASISIGA

SEQ ID NO: 628 - protein, 7 aa, Artificial Sequence
  source: /note="Description of Artificial Sequence: Synthetic peptide"
ASLPSPR

SEQ ID NO: 629 - protein, 7 aa, Artificial Sequence
  source: /note="Description of Artificial Sequence: Synthetic peptide"
ASLRATG

SEQ ID NO: 630 - protein, 7 aa, Artificial Sequence
  source: /note="Description of Artificial Sequence: Synthetic peptide"
ASLSAAM

SEQ ID NO: 631 - protein, 7 aa, Artificial Sequence
  source: /note="Description of Artificial Sequence: Synthetic peptide"
ASLSGSM

SEQ ID NO: 632 - protein, 7 aa, Artificial Sequence
  source: /note="Description of Artificial Sequence: Synthetic peptide"
ASLSNLP

SEQ ID NO: 633 - protein, 7 aa, Artificial Sequence
  source: /note="Description of Artificial Sequence: Synthetic peptide"
ASLSPLL

SEQ ID NO: 634 - protein, 7 aa, Artificial Sequence
  source: /note="Description of Artificial Sequence: Synthetic peptide"
ASMKPTI

SEQ ID NO: 635 - protein, 7 aa, Artificial Sequence
  source: /note="Description of Artificial Sequence: Synthetic peptide"
ASMNGLP

SEQ ID NO: 636 - protein, 7 aa, Artificial Sequence
  source: /note="Description of Artificial Sequence: Synthetic peptide"
ASMNMNA

SEQ ID NO: 637 - protein, 7 aa, Artificial Sequence
  source: /note="Description of Artificial Sequence: Synthetic peptide"
ASNKSSL

SEQ ID NO: 638 - protein, 7 aa, Artificial Sequence
  source: /note="Description of Artificial Sequence: Synthetic peptide"
ASNRVSY

SEQ ID NO: 639 - protein, 7 aa, Artificial Sequence
  source: /note="Description of Artificial Sequence: Synthetic peptide"
ASNSALR

SEQ ID NO: 640 - protein, 7 aa, Artificial Sequence
  source: /note="Description of Artificial Sequence: Synthetic peptide"
ASPAAVH

SEQ ID NO: 641 - protein, 7 aa, Artificial Sequence
  source: /note="Description of Artificial Sequence: Synthetic peptide"
ASPLNSS

SEQ ID NO: 642 - protein, 7 aa, Artificial Sequence
  source: /note="Description of Artificial Sequence: Synthetic peptide"
ASPPQTT

SEQ ID NO: 643 - protein, 7 aa, Artificial Sequence
  source: /note="Description of Artificial Sequence: Synthetic peptide"
ASPQFNS

SEQ ID NO: 644 - protein, 7 aa, Artificial Sequence
  source: /note="Description of Artificial Sequence: Synthetic peptide"
ASPRGRE

SEQ ID NO: 645 - protein, 7 aa, Artificial Sequence
  source: /note="Description of Artificial Sequence: Synthetic peptide"
ASQAACL

SEQ ID NO: 646 - protein, 7 aa, Artificial Sequence
  source: /note="Description of Artificial Sequence: Synthetic peptide"
ASQIEPT

SEQ ID NO: 647 - protein, 7 aa, Artificial Sequence
  source: /note="Description of Artificial Sequence: Synthetic peptide"
ASQIRTT

SEQ ID NO: 648 - protein, 7 aa, Artificial Sequence
  source: /note="Description of Artificial Sequence: Synthetic peptide"
ASQPSRV

SEQ ID NO: 649 - protein, 7 aa, Artificial Sequence
  source: /note="Description of Artificial Sequence: Synthetic peptide"
ASQQPRS

SEQ ID NO: 650 - protein, 7 aa, Artificial Sequence
  source: /note="Description of Artificial Sequence: Synthetic peptide"
ASQRLGG

SEQ ID NO: 651 - protein, 7 aa, Artificial Sequence
  source: /note="Description of Artificial Sequence: Synthetic peptide"
ASQSRDA

SEQ ID NO: 652 - protein, 7 aa, Artificial Sequence
  source: /note="Description of Artificial Sequence: Synthetic peptide"
ASQYRES

SEQ ID NO: 653 - protein, 7 aa, Artificial Sequence
  source: /note="Description of Artificial Sequence: Synthetic peptide"
ASRAPAG

SEQ ID NO: 654 - protein, 7 aa, Artificial Sequence
  source: /note="Description of Artificial Sequence: Synthetic peptide"
ASRAPSN

SEQ ID NO: 655 - protein, 7 aa, Artificial Sequence
  source: /note="Description of Artificial Sequence: Synthetic peptide"
ASRDNVD

SEQ ID NO: 656 - protein, 7 aa, Artificial Sequence
  source: /note="Description of Artificial Sequence: Synthetic peptide"
ASRGMST

SEQ ID NO: 657 - protein, 7 aa, Artificial Sequence
  source: /note="Description of Artificial Sequence: Synthetic peptide"
ASRPYLV

SEQ ID NO: 658 - protein, 7 aa, Artificial Sequence
  source: /note="Description of Artificial Sequence: Synthetic peptide"
ASRSTTS

SEQ ID NO: 659 - protein, 7 aa, Artificial Sequence
  source: /note="Description of Artificial Sequence: Synthetic peptide"
ASRTIAP

SEQ ID NO: 660 - protein, 7 aa, Artificial Sequence
  source: /note="Description of Artificial Sequence: Synthetic peptide"
ASRTTPL

SEQ ID NO: 661 - protein, 7 aa, Artificial Sequence
  source: /note="Description of Artificial Sequence: Synthetic peptide"
ASSARPI

SEQ ID NO: 662 - protein, 7 aa, Artificial Sequence
  source: /note="Description of Artificial Sequence: Synthetic peptide"
ASSAVLT

SEQ ID NO: 663 - protein, 7 aa, Artificial Sequence
  source: /note="Description of Artificial Sequence: Synthetic peptide"
ASSERGE

SEQ ID NO: 664 - protein, 7 aa, Artificial Sequence
  source: /note="Description of Artificial Sequence: Synthetic peptide"
ASSGDVL

SEQ ID NO: 665 - protein, 7 aa, Artificial Sequence
  source: /note="Description of Artificial Sequence: Synthetic peptide"
ASSGPDK

SEQ ID NO: 666 - protein, 7 aa, Artificial Sequence
  source: /note="Description of Artificial Sequence: Synthetic peptide"
ASSGRSA

SEQ ID NO: 667 - protein, 7 aa, Artificial Sequence
  source: /note="Description of Artificial Sequence: Synthetic peptide"
ASSGSGT

SEQ ID NO: 668 - protein, 7 aa, Artificial Sequence
  source: /note="Description of Artificial Sequence: Synthetic peptide"
ASSKGSN

SEQ ID NO: 669 - protein, 7 aa, Artificial Sequence
  source: /note="Description of Artificial Sequence: Synthetic peptide"
ASSKPAN

SEQ ID NO: 670 - protein, 7 aa, Artificial Sequence
  source: /note="Description of Artificial Sequence: Synthetic peptide"
ASSKPLG

SEQ ID NO: 671 - protein, 7 aa, Artificial Sequence
  source: /note="Description of Artificial Sequence: Synthetic peptide"
ASSPKIY

SEQ ID NO: 672 - protein, 7 aa, Artificial Sequence
  source: /note="Description of Artificial Sequence: Synthetic peptide"
ASSPVLS

SEQ ID NO: 673 - protein, 7 aa, Artificial Sequence
  source: /note="Description of Artificial Sequence: Synthetic peptide"
ASSQHGL

SEQ ID NO: 674 - protein, 7 aa, Artificial Sequence
  source: /note="Description of Artificial Sequence: Synthetic peptide"
ASSRTVN

SEQ ID NO: 675 - protein, 7 aa, Artificial Sequence
  source: /note="Description of Artificial Sequence: Synthetic peptide"
ASSSDSR

SEQ ID NO: 676 - protein, 7 aa, Artificial Sequence
  source: /note="Description of Artificial Sequence: Synthetic peptide"
ASSSLSF

SEQ ID NO: 677 - protein, 7 aa, Artificial Sequence
  source: /note="Description of Artificial Sequence: Synthetic peptide"
ASSTSLE

SEQ ID NO: 678 - protein, 7 aa, Artificial Sequence
  source: /note="Description of Artificial Sequence: Synthetic peptide"
ASSVNPS

SEQ ID NO: 679 - protein, 7 aa, Artificial Sequence
  source: /note="Description of Artificial Sequence: Synthetic peptide"
ASTALLL

SEQ ID NO: 680 - protein, 7 aa, Artificial Sequence
  source: /note="Description of Artificial Sequence: Synthetic peptide"
ASTGIVL

SEQ ID NO: 681 - protein, 7 aa, Artificial Sequence
  source: /note="Description of Artificial Sequence: Synthetic peptide"
ASTGSFG

SEQ ID NO: 682 - protein, 7 aa, Artificial Sequence
  source: /note="Description of Artificial Sequence: Synthetic peptide"
ASTGSQE

SEQ ID NO: 683 - protein, 7 aa, Artificial Sequence
  source: /note="Description of Artificial Sequence: Synthetic peptide"
ASTLQVG

SEQ ID NO: 684 - protein, 7 aa, Artificial Sequence
  source: /note="Description of Artificial Sequence: Synthetic peptide"
ASTPNLL

SEQ ID NO: 685 - protein, 7 aa, Artificial Sequence
  source: /note="Description of Artificial Sequence: Synthetic peptide"
ASTQKQA

SEQ ID NO: 686 - protein, 7 aa, Artificial Sequence
  source: /note="Description of Artificial Sequence: Synthetic peptide"
ASTRMLF

SEQ ID NO: 687 - protein, 7 aa, Artificial Sequence
  source: /note="Description of Artificial Sequence: Synthetic peptide"
ASTTFRP

SEQ ID NO: 688 - protein, 7 aa, Artificial Sequence
  source: /note="Description of Artificial Sequence: Synthetic peptide"
ASTTRML

SEQ ID NO: 689 - protein, 7 aa, Artificial Sequence
  source: /note="Description of Artificial Sequence: Synthetic peptide"
ASVLQEA

SEQ ID NO: 690 - protein, 7 aa, Artificial Sequence
  source: /note="Description of Artificial Sequence: Synthetic peptide"
ASVPLIP

SEQ ID NO: 691 - protein, 7 aa, Artificial Sequence
  source: /note="Description of Artificial Sequence: Synthetic peptide"
ASVRMGD

SEQ ID NO: 692 - protein, 7 aa, Artificial Sequence
  source: /note="Description of Artificial Sequence: Synthetic peptide"
ASVSMVA

SEQ ID NO: 693 - protein, 7 aa, Artificial Sequence
  source: /note="Description of Artificial Sequence: Synthetic peptide"
ASVSTEG

SEQ ID NO: 694 - protein, 7 aa, Artificial Sequence
  source: /note="Description of Artificial Sequence: Synthetic peptide"
ASWDINI

SEQ ID NO: 695 - protein, 7 aa, Artificial Sequence
  source: /note="Description of Artificial Sequence: Synthetic peptide"
ASWDSNI

SEQ ID NO: 696 - protein, 7 aa, Artificial Sequence
  source: /note="Description of Artificial Sequence: Synthetic peptide"
ASYDTSR

SEQ ID NO: 697 - protein, 7 aa, Artificial Sequence
  source: /note="Description of Artificial Sequence: Synthetic peptide"
ASYDVSS

SEQ ID NO: 698 - protein, 7 aa, Artificial Sequence
  source: /note="Description of Artificial Sequence: Synthetic peptide"
ATAATAY

SEQ ID NO: 699 - protein, 7 aa, Artificial Sequence
  source: /note="Description of Artificial Sequence: Synthetic peptide"
ATAATTS

SEQ ID NO: 700 - protein, 7 aa, Artificial Sequence
  source: /note="Description of Artificial Sequence: Synthetic peptide"
ATAGLYQ

SEQ ID NO: 701 - protein, 7 aa, Artificial Sequence
  source: /note="Description of Artificial Sequence: Synthetic peptide"
ATAKILD

SEQ ID NO: 702 - protein, 7 aa, Artificial Sequence
  source: /note="Description of Artificial Sequence: Synthetic peptide"
ATAKLLP

SEQ ID NO: 703 - protein, 7 aa, Artificial Sequence
  source: /note="Description of Artificial Sequence: Synthetic peptide"
ATAKPLI

SEQ ID NO: 704 - protein, 7 aa, Artificial Sequence
  source: /note="Description of Artificial Sequence: Synthetic peptide"
ATARQVQ

SEQ ID NO: 705 - protein, 7 aa, Artificial Sequence
  source: /note="Description of Artificial Sequence: Synthetic peptide"
ATASTSS

SEQ ID NO: 706 - protein, 7 aa, Artificial Sequence
  source: /note="Description of Artificial Sequence: Synthetic peptide"
ATASYNG

SEQ ID NO: 707 - protein, 7 aa, Artificial Sequence
  source: /note="Description of Artificial Sequence: Synthetic peptide"
ATAVHDY

SEQ ID NO: 708 - protein, 7 aa, Artificial Sequence
  source: /note="Description of Artificial Sequence: Synthetic peptide"
ATDHMSP

SEQ ID NO: 709 - protein, 7 aa, Artificial Sequence
  source: /note="Description of Artificial Sequence: Synthetic peptide"
ATDYQSM

SEQ ID NO: 710 - protein, 7 aa, Artificial Sequence
  source: /note="Description of Artificial Sequence: Synthetic peptide"
ATEAPLK

SEQ ID NO: 711 - protein, 7 aa, Artificial Sequence
  source: /note="Description of Artificial Sequence: Synthetic peptide"
ATEGHPW

SEQ ID NO: 712 - protein, 7 aa, Artificial Sequence
  source: /note="Description of Artificial Sequence: Synthetic peptide"
ATFVTSK

SEQ ID NO: 713 - protein, 7 aa, Artificial Sequence
  source: /note="Description of Artificial Sequence: Synthetic peptide"
ATGGHSP

SEQ ID NO: 714 - protein, 7 aa, Artificial Sequence
  source: /note="Description of Artificial Sequence: Synthetic peptide"
ATGTSAG

SEQ ID NO: 715 - protein, 7 aa, Artificial Sequence
  source: /note="Description of Artificial Sequence: Synthetic peptide"
ATGVLMS

SEQ ID NO: 716 - protein, 7 aa, Artificial Sequence
  source: /note="Description of Artificial Sequence: Synthetic peptide"
ATGVQNY

SEQ ID NO: 717 - protein, 7 aa, Artificial Sequence
  source: /note="Description of Artificial Sequence: Synthetic peptide"
ATHILKL

SEQ ID NO: 718 - protein, 7 aa, Artificial Sequence
  source: /note="Description of Artificial Sequence: Synthetic peptide"
ATHSLLS

SEQ ID NO: 719 - protein, 7 aa, Artificial Sequence
  source: /note="Description of Artificial Sequence: Synthetic peptide"
ATHVCVS

SEQ ID NO: 720 - protein, 7 aa, Artificial Sequence
  source: /note="Description of Artificial Sequence: Synthetic peptide"
ATIPRTP

SEQ ID NO: 721 - protein, 7 aa, Artificial Sequence
  source: /note="Description of Artificial Sequence: Synthetic peptide"
ATKFQGM

SEQ ID NO: 722 - protein, 7 aa, Artificial Sequence
  source: /note="Description of Artificial Sequence: Synthetic peptide"
ATKGISF

SEQ ID NO: 723 - protein, 7 aa, Artificial Sequence
  source: /note="Description of Artificial Sequence: Synthetic peptide"
ATKHDCK

SEQ ID NO: 724 - protein, 7 aa, Artificial Sequence
  source: /note="Description of Artificial Sequence: Synthetic peptide"
ATLHREL

SEQ ID NO: 725 - protein, 7 aa, Artificial Sequence
  source: /note="Description of Artificial Sequence: Synthetic peptide"
ATLKIPV

SEQ ID NO: 726 - protein, 7 aa, Artificial Sequence
  source: /note="Description of Artificial Sequence: Synthetic peptide"
ATLRIVE

SEQ ID NO: 727 - protein, 7 aa, Artificial Sequence
  source: /note="Description of Artificial Sequence: Synthetic peptide"
ATLRPND

SEQ ID NO: 728 - protein, 7 aa, Artificial Sequence
  source: /note="Description of Artificial Sequence: Synthetic peptide"
ATLRTAT

SEQ ID NO: 729 - protein, 7 aa, Artificial Sequence
  source: /note="Description of Artificial Sequence: Synthetic peptide"
ATLSTNA

SEQ ID NO: 730 - protein, 7 aa, Artificial Sequence
  source: /note="Description of Artificial Sequence: Synthetic peptide"
ATLTLSA

SEQ ID NO: 731 - protein, 7 aa, Artificial Sequence
  source: /note="Description of Artificial Sequence: Synthetic peptide"
ATLVSAE

SEQ ID NO: 732 - protein, 7 aa, Artificial Sequence
  source: /note="Description of Artificial Sequence: Synthetic peptide"
ATMPSTM

SEQ ID NO: 733 - protein, 7 aa, Artificial Sequence
  source: /note="Description of Artificial Sequence: Synthetic peptide"
ATMRPRD

SEQ ID NO: 734 - protein, 7 aa, Artificial Sequence
  source: /note="Description of Artificial Sequence: Synthetic peptide"
ATMSLSS

SEQ ID NO: 735 - protein, 7 aa, Artificial Sequence
  source: /note="Description of Artificial Sequence: Synthetic peptide"
ATMSMRG

SEQ ID NO: 736 - protein, 7 aa, Artificial Sequence
  source: /note="Description of Artificial Sequence: Synthetic peptide"
ATMVTTS

SEQ ID NO: 737 - protein, 7 aa, Artificial Sequence
  source: /note="Description of Artificial Sequence: Synthetic peptide"
ATNAHQS

SEQ ID NO: 738 - protein, 7 aa, Artificial Sequence
  source: /note="Description of Artificial Sequence: Synthetic peptide"
ATNRFPS

SEQ ID NO: 739 - protein, 7 aa, Artificial Sequence
  source: /note="Description of Artificial Sequence: Synthetic peptide"
ATNSSAT

SEQ ID NO: 740 - protein, 7 aa, Artificial Sequence
  source: /note="Description of Artificial Sequence: Synthetic peptide"
ATNTRIA

SEQ ID NO: 741 - protein, 7 aa, Artificial Sequence
  source: /note="Description of Artificial Sequence: Synthetic peptide"
ATPLRTS

SEQ ID NO: 742 - protein, 7 aa, Artificial Sequence
  source: /note="Description of Artificial Sequence: Synthetic peptide"
ATPPMQN

SEQ ID NO: 743 - protein, 7 aa, Artificial Sequence
  source: /note="Description of Artificial Sequence: Synthetic peptide"
ATPSAAI

SEQ ID NO: 744 - protein, 7 aa, Artificial Sequence
  source: /note="Description of Artificial Sequence: Synthetic peptide"
ATPTLSA

SEQ ID NO: 745 - protein, 7 aa, Artificial Sequence
  source: /note="Description of Artificial Sequence: Synthetic peptide"
ATPVPHP

SEQ ID NO: 746 - protein, 7 aa, Artificial Sequence
  source: /note="Description of Artificial Sequence: Synthetic peptide"
ATQNLPP

SEQ ID NO: 747 - protein, 7 aa, Artificial Sequence
  source: /note="Description of Artificial Sequence: Synthetic peptide"
ATQRIVY

SEQ ID NO: 748 - protein, 7 aa, Artificial Sequence
  source: /note="Description of Artificial Sequence: Synthetic peptide"
ATQYGMN

SEQ ID NO: 749 - protein, 7 aa, Artificial Sequence
  source: /note="Description of Artificial Sequence: Synthetic peptide"
ATRAESS

SEQ ID NO: 750 - protein, 7 aa, Artificial Sequence
  source: /note="Description of Artificial Sequence: Synthetic peptide"
ATRLPDS

SEQ ID NO: 751 - protein, 7 aa, Artificial Sequence
  source: /note="Description of Artificial Sequence: Synthetic peptide"
ATRLTEK

SEQ ID NO: 752 - protein, 7 aa, Artificial Sequence
  source: /note="Description of Artificial Sequence: Synthetic peptide"
ATRPQAD

SEQ ID NO: 753 - protein, 7 aa, Artificial Sequence
  source: /note="Description of Artificial Sequence: Synthetic peptide"
ATRTSLE

SEQ ID NO: 754 - protein, 7 aa, Artificial Sequence
  source: /note="Description of Artificial Sequence: Synthetic peptide"
ATSITKS

SEQ ID NO: 755 - protein, 7 aa, Artificial Sequence
  source: /note="Description of Artificial Sequence: Synthetic peptide"
ATSQMNF

SEQ ID NO: 756 - protein, 7 aa, Artificial Sequence
  source: /note="Description of Artificial Sequence: Synthetic peptide"
ATSTLNL

SEQ ID NO: 757 - protein, 7 aa, Artificial Sequence
  source: /note="Description of Artificial Sequence: Synthetic peptide"
ATSTMTT

SEQ ID NO: 758 - protein, 7 aa, Artificial Sequence
  source: /note="Description of Artificial Sequence: Synthetic peptide"
ATSTVFR

SEQ ID NO: 759 - protein, 7 aa, Artificial Sequence
  source: /note="Description of Artificial Sequence: Synthetic peptide"
ATTAGSN

SEQ ID NO: 760 - protein, 7 aa, Artificial Sequence
  source: /note="Description of Artificial Sequence: Synthetic peptide"
ATTAMGE

SEQ ID NO: 761 - protein, 7 aa, Artificial Sequence
  source: /note="Description of Artificial Sequence: Synthetic peptide"
ATTGPPC

SEQ ID NO: 762 - protein, 7 aa, Artificial Sequence
  source: /note="Description of Artificial Sequence: Synthetic peptide"
ATTKDTT

SEQ ID NO: 763 - protein, 7 aa, Artificial Sequence
  source: /note="Description of Artificial Sequence: Synthetic peptide"
ATTLIRP

SEQ ID NO: 764 - protein, 7 aa, Artificial Sequence
  source: /note="Description of Artificial Sequence: Synthetic peptide"
ATTSRSS

SEQ ID NO: 765 - protein, 7 aa, Artificial Sequence
  source: /note="Description of Artificial Sequence: Synthetic peptide"
ATTVASR

SEQ ID NO: 766 - protein, 7 aa, Artificial Sequence
  source: /note="Description of Artificial Sequence: Synthetic peptide"
ATVMPTA

SEQ ID NO: 767 - protein, 7 aa, Artificial Sequence
  source: /note="Description of Artificial Sequence: Synthetic peptide"
ATVMTLP

SEQ ID NO: 768 - protein, 7 aa, Artificial Sequence
  source: /note="Description of Artificial Sequence: Synthetic peptide"
ATVNPAV

SEQ ID NO: 769 - protein, 7 aa, Artificial Sequence
  source: /note="Description of Artificial Sequence: Synthetic peptide"
ATVPQRT

SEQ ID NO: 770 - protein, 7 aa, Artificial Sequence
  source: /note="Description of Artificial Sequence: Synthetic peptide"
ATVRTML

SEQ ID NO: 771 - protein, 7 aa, Artificial Sequence
  source: /note="Description of Artificial Sequence: Synthetic peptide"
ATVSDTL

SEQ ID NO: 772 - protein, 7 aa, Artificial Sequence
  source: /note="Description of Artificial Sequence: Synthetic peptide"
ATVSSLT

SEQ ID NO: 773 - protein, 7 aa, Artificial Sequence
  source: /note="Description of Artificial Sequence: Synthetic peptide"
ATWPYKE

SEQ ID NO: 774 - protein, 7 aa, Artificial Sequence
  source: /note="Description of Artificial Sequence: Synthetic peptide"
ATYARNE

SEQ ID NO: 775 - protein, 7 aa, Artificial Sequence
  source: /note="Description of Artificial Sequence: Synthetic peptide"
ATYTATA

SEQ ID NO: 776 - protein, 7 aa, Artificial Sequence
  source: /note="Description of Artificial Sequence: Synthetic peptide"
AVAGTLR

SEQ ID NO: 777 - protein, 7 aa, Artificial Sequence
  source: /note="Description of Artificial Sequence: Synthetic peptide"
AVALNTT

SEQ ID NO: 778 - protein, 7 aa, Artificial Sequence
  source: /note="Description of Artificial Sequence: Synthetic peptide"
AVAQMGI

SEQ ID NO: 779 - protein, 7 aa, Artificial Sequence
  source: /note="Description of Artificial Sequence: Synthetic peptide"
AVAVDFV

SEQ ID NO: 780 - protein, 7 aa, Artificial Sequence
  source: /note="Description of Artificial Sequence: Synthetic peptide"
AVDHEGL

SEQ ID NO: 781 - protein, 7 aa, Artificial Sequence
  source: /note="Description of Artificial Sequence: Synthetic peptide"
AVDPGNP

SEQ ID NO: 782 - protein, 7 aa, Artificial Sequence
  source: /note="Description of Artificial Sequence: Synthetic peptide"
AVDRSEI

SEQ ID NO: 783 - protein, 7 aa, Artificial Sequence
  source: /note="Description of Artificial Sequence: Synthetic peptide"
AVECMPP

SEQ ID NO: 784 - protein, 7 aa, Artificial Sequence
  source: /note="Description of Artificial Sequence: Synthetic peptide"
AVEPMWE

SEQ ID NO: 785 - protein, 7 aa, Artificial Sequence
  source: /note="Description of Artificial Sequence: Synthetic peptide"
AVETGYT

SEQ ID NO: 786 - protein, 7 aa, Artificial Sequence
  source: /note="Description of Artificial Sequence: Synthetic peptide"
AVFARLP

SEQ ID NO: 787 - protein, 7 aa, Artificial Sequence
  source: /note="Description of Artificial Sequence: Synthetic peptide"
AVGESEV

SEQ ID NO: 788 - protein, 7 aa, Artificial Sequence
  source: /note="Description of Artificial Sequence: Synthetic peptide"
AVGNSLY

SEQ ID NO: 789 - protein, 7 aa, Artificial Sequence
  source: /note="Description of Artificial Sequence: Synthetic peptide"
AVGQNMR

SEQ ID NO: 790 - protein, 7 aa, Artificial Sequence
  source: /note="Description of Artificial Sequence: Synthetic peptide"
AVHKMDM

SEQ ID NO: 791 - protein, 7 aa, Artificial Sequence
  source: /note="Description of Artificial Sequence: Synthetic peptide"
AVHQLTL

SEQ ID NO: 792 - protein, 7 aa, Artificial Sequence
  source: /note="Description of Artificial Sequence: Synthetic peptide"
AVHRENV

SEQ ID NO: 793 - protein, 7 aa, Artificial Sequence
  source: /note="Description of Artificial Sequence: Synthetic peptide"
AVIGGMT

SEQ ID NO: 794 - protein, 7 aa, Artificial Sequence
  source: /note="Description of Artificial Sequence: Synthetic peptide"
AVKGMPL

SEQ ID NO: 795 - protein, 7 aa, Artificial Sequence
  source: /note="Description of Artificial Sequence: Synthetic peptide"
AVKQLIV

SEQ ID NO: 796 - protein, 7 aa, Artificial Sequence
  source: /note="Description of Artificial Sequence: Synthetic peptide"
AVLHTLG

SEQ ID NO: 797 - protein, 7 aa, Artificial Sequence
  source: /note="Description of Artificial Sequence: Synthetic peptide"
AVLKNRD

SEQ ID NO: 798 - protein, 7 aa, Artificial Sequence
  source: /note="Description of Artificial Sequence: Synthetic peptide"
AVLNKED

SEQ ID NO: 799 - protein, 7 aa, Artificial Sequence
  source: /note="Description of Artificial Sequence: Synthetic peptide"
AVLNSAD

SEQ ID NO: 800 - protein, 7 aa, Artificial Sequence
  source: /note="Description of Artificial Sequence: Synthetic peptide"
AVLVPHA

SEQ ID NO: 801 - protein, 7 aa, Artificial Sequence
  source: /note="Description of Artificial Sequence: Synthetic peptide"
AVLVRED

SEQ ID NO: 802 - protein, 7 aa, Artificial Sequence
  source: /note="Description of Artificial Sequence: Synthetic peptide"
AVMGRSE

SEQ ID NO: 803 - protein, 7 aa, Artificial Sequence
  source: /note="Description of Artificial Sequence: Synthetic peptide"
AVMPRTP

SEQ ID NO: 804 - protein, 7 aa, Artificial Sequence
  source: /note="Description of Artificial Sequence: Synthetic peptide"
AVMRIAP

SEQ ID NO: 805 - protein, 7 aa, Artificial Sequence
  source: /note="Description of Artificial Sequence: Synthetic peptide"
AVNAAQA

SEQ ID NO: 806 - protein, 7 aa, Artificial Sequence
  source: /note="Description of Artificial Sequence: Synthetic peptide"
AVNFDVI

SEQ ID NO: 807 - protein, 7 aa, Artificial Sequence
  source: /note="Description of Artificial Sequence: Synthetic peptide"
AVNPPEL

SEQ ID NO: 808 - protein, 7 aa, Artificial Sequence
  source: /note="Description of Artificial Sequence: Synthetic peptide"
AVNRVPL

SEQ ID NO: 809 - protein, 7 aa, Artificial Sequence
  source: /note="Description of Artificial Sequence: Synthetic peptide"
AVPGPKS

SEQ ID NO: 810 - protein, 7 aa, Artificial Sequence
  source: /note="Description of Artificial Sequence: Synthetic peptide"
AVPLLLT

SEQ ID NO: 811 - protein, 7 aa, Artificial Sequence
  source: /note="Description of Artificial Sequence: Synthetic peptide"
AVPMRFP

SEQ ID NO: 812 - protein, 7 aa, Artificial Sequence
  source: /note="Description of Artificial Sequence: Synthetic peptide"
AVPSHAQ

SEQ ID NO: 813 - protein, 7 aa, Artificial Sequence
  source: /note="Description of Artificial Sequence: Synthetic peptide"
AVPVSHA

SEQ ID NO: 814 - protein, 7 aa, Artificial Sequence
  source: /note="Description of Artificial Sequence: Synthetic peptide"
AVQTHGF

SEQ ID NO: 815 - protein, 7 aa, Artificial Sequence
  source: /note="Description of Artificial Sequence: Synthetic peptide"
AVQTTDH

SEQ ID NO: 816 - protein, 7 aa, Artificial Sequence
  source: /note="Description of Artificial Sequence: Synthetic peptide"
AVRASQQ

SEQ ID NO: 817 - protein, 7 aa, Artificial Sequence
  source: /note="Description of Artificial Sequence: Synthetic peptide"
AVRASTP

SEQ ID NO: 818 - protein, 7 aa, Artificial Sequence
  source: /note="Description of Artificial Sequence: Synthetic peptide"
AVRDSVL

SEQ ID NO: 819 - protein, 7 aa, Artificial Sequence
  source: /note="Description of Artificial Sequence: Synthetic peptide"
AVRHQGD

SEQ ID NO: 820 - protein, 7 aa, Artificial Sequence
  source: /note="Description of Artificial Sequence: Synthetic peptide"
AVRLKME

SEQ ID NO: 821 - protein, 7 aa, Artificial Sequence
  source: /note="Description of Artificial Sequence: Synthetic peptide"
AVRPPPP

SEQ ID NO: 822 - protein, 7 aa, Artificial Sequence
  source: /note="Description of Artificial Sequence: Synthetic peptide"
AVRRDDA

SEQ ID NO: 823 - protein, 7 aa, Artificial Sequence
  source: /note="Description of Artificial Sequence: Synthetic peptide"
AVRSLTV

SEQ ID NO: 824 - protein, 7 aa, Artificial Sequence
  source: /note="Description of Artificial Sequence: Synthetic peptide"
AVRTNPL

SEQ ID NO: 825 - protein, 7 aa, Artificial Sequence
  source: /note="Description of Artificial Sequence: Synthetic peptide"
AVSGHSL

SEQ ID NO: 826 - protein, 7 aa, Artificial Sequence
  source: /note="Description of Artificial Sequence: Synthetic peptide"
AVSHASD

SEQ ID NO: 827 - protein, 7 aa, Artificial Sequence
  source: /note="Description of Artificial Sequence: Synthetic peptide"
AVSPYSL

SEQ ID NO: 828 - protein, 7 aa, Artificial Sequence
  source: /note="Description of Artificial Sequence: Synthetic peptide"
AVSRAGG

SEQ ID NO: 829 - protein, 7 aa, Artificial Sequence
  source: /note="Description of Artificial Sequence: Synthetic peptide"
AVSRPNS

SEQ ID NO: 830 - protein, 7 aa, Artificial Sequence
  source: /note="Description of Artificial Sequence: Synthetic peptide"
AVTNSMI

SEQ ID NO: 831 - protein, 7 aa, Artificial Sequence
  source: /note="Description of Artificial Sequence: Synthetic peptide"
AVTPLPL

SEQ ID NO: 832 - protein, 7 aa, Artificial Sequence
  source: /note="Description of Artificial Sequence: Synthetic peptide"
AVTSGFR

SEQ ID NO: 833 - protein, 7 aa, Artificial Sequence
  source: /note="Description of Artificial Sequence: Synthetic peptide"
AVTVNAY

SEQ ID NO: 834 - protein, 7 aa, Artificial Sequence
  source: /note="Description of Artificial Sequence: Synthetic peptide"
AVVGAIL

SEQ ID NO: 835 - protein, 7 aa, Artificial Sequence
  source: /note="Description of Artificial Sequence: Synthetic peptide"
AVVRNQS

SEQ ID NO: 836 - protein, 7 aa, Artificial Sequence
  source: /note="Description of Artificial Sequence: Synthetic peptide"
AVYNDVC

SEQ ID NO: 837 - protein, 7 aa, Artificial Sequence
  source: /note="Description of Artificial Sequence: Synthetic peptide"
AVYSSEP

SEQ ID NO: 838 - protein, 7 aa, Artificial Sequence
  source: /note="Description of Artificial Sequence: Synthetic peptide"
AWNPNEK

SEQ ID NO: 839 - protein, 7 aa, Artificial Sequence
  source: /note="Description of Artificial Sequence: Synthetic peptide"
AWPNSLK

SEQ ID NO: 840 - protein, 7 aa, Artificial Sequence
  source: /note="Description of Artificial Sequence: Synthetic peptide"
AWTQQGP

SEQ ID NO: 841 - protein, 7 aa, Artificial Sequence
  source: /note="Description of Artificial Sequence: Synthetic peptide"
AYAILEA

SEQ ID NO: 842 - protein, 7 aa, Artificial Sequence
  source: /note="Description of Artificial Sequence: Synthetic peptide"
AYAKAIA

SEQ ID NO: 843 - protein, 7 aa, Artificial Sequence
  source: /note="Description of Artificial Sequence: Synthetic peptide"
AYDKSLV

SEQ ID NO: 844 - protein, 7 aa, Artificial Sequence
  source: /note="Description of Artificial Sequence: Synthetic peptide"
AYDRAFS

SEQ ID NO: 845 - protein, 7 aa, Artificial Sequence
  source: /note="Description of Artificial Sequence: Synthetic peptide"
AYDSAPY

SEQ ID NO: 846 - protein, 7 aa, Artificial Sequence
  source: /note="Description of Artificial Sequence: Synthetic peptide"
AYDSRAA

SEQ ID NO: 847 - protein, 7 aa, Artificial Sequence
  source: /note="Description of Artificial Sequence: Synthetic peptide"
AYEARTH

SEQ ID NO: 848 - protein, 7 aa, Artificial Sequence
  source: /note="Description of Artificial Sequence: Synthetic peptide"
AYEGTLS

SEQ ID NO: 849 - protein, 7 aa, Artificial Sequence
  source: /note="Description of Artificial Sequence: Synthetic peptide"
AYEPISK

SEQ ID NO: 850 - protein, 7 aa, Artificial Sequence
  source: /note="Description of Artificial Sequence: Synthetic peptide"
AYFEVQP

SEQ ID NO: 851 - protein, 7 aa, Artificial Sequence
  source: /note="Description of Artificial Sequence: Synthetic peptide"
AYGGPSA

SEQ ID NO: 852 - protein, 7 aa, Artificial Sequence
  source: /note="Description of Artificial Sequence: Synthetic peptide"
AYGVTEK

SEQ ID NO: 853 - protein, 7 aa, Artificial Sequence
  source: /note="Description of Artificial Sequence: Synthetic peptide"
AYHEKGA

SEQ ID NO: 854 - protein, 7 aa, Artificial Sequence
  source: /note="Description of Artificial Sequence: Synthetic peptide"
AYHRADA

SEQ ID NO: 855 - protein, 7 aa, Artificial Sequence
  source: /note="Description of Artificial Sequence: Synthetic peptide"
AYHVRVD

SEQ ID NO: 856 - protein, 7 aa, Artificial Sequence
  source: /note="Description of Artificial Sequence: Synthetic peptide"
AYIQGSL

SEQ ID NO: 857 - protein, 7 aa, Artificial Sequence
  source: /note="Description of Artificial Sequence: Synthetic peptide"
AYKQQMS

SEQ ID NO: 858 - protein, 7 aa, Artificial Sequence
  source: /note="Description of Artificial Sequence: Synthetic peptide"
AYMPSAY

SEQ ID NO: 859 - protein, 7 aa, Artificial Sequence
  source: /note="Description of Artificial Sequence: Synthetic peptide"
AYNGTRP

SEQ ID NO: 860 - protein, 7 aa, Artificial Sequence
  source: /note="Description of Artificial Sequence: Synthetic peptide"
AYNQPGA

SEQ ID NO: 861 - protein, 7 aa, Artificial Sequence
  source: /note="Description of Artificial Sequence: Synthetic peptide"
AYNTTKQ

SEQ ID NO: 862 - protein, 7 aa, Artificial Sequence
  source: /note="Description of Artificial Sequence: Synthetic peptide"
AYPFKEH

SEQ ID NO: 863 - protein, 7 aa, Artificial Sequence
  source: /note="Description of Artificial Sequence: Synthetic peptide"
AYPRESG

SEQ ID NO: 864 - protein, 7 aa, Artificial Sequence
  source: /note="Description of Artificial Sequence: Synthetic peptide"
AYPSNAS

SEQ ID NO: 865 - protein, 7 aa, Artificial Sequence
  source: /note="Description of Artificial Sequence: Synthetic peptide"
AYPSSQF

SEQ ID NO: 866 - protein, 7 aa, Artificial Sequence
  source: /note="Description of Artificial Sequence: Synthetic peptide"
AYPTSFA

SEQ ID NO: 867 - protein, 7 aa, Artificial Sequence
  source: /note="Description of Artificial Sequence: Synthetic peptide"
AYRASSE

SEQ ID NO: 868 - protein, 7 aa, Artificial Sequence
  source: /note="Description of Artificial Sequence: Synthetic peptide"
AYRDSTT

SEQ ID NO: 869 - protein, 7 aa, Artificial Sequence
  source: /note="Description of Artificial Sequence: Synthetic peptide"
AYRGSTT

SEQ ID NO: 870 - protein, 7 aa, Artificial Sequence
  source: /note="Description of Artificial Sequence: Synthetic peptide"
AYSDSQR

SEQ ID NO: 871 - protein, 7 aa, Artificial Sequence
  source: /note="Description of Artificial Sequence: Synthetic peptide"
AYSKSAD

SEQ ID NO: 872 - protein, 7 aa, Artificial Sequence
  source: /note="Description of Artificial Sequence: Synthetic peptide"
AYSNRTM

SEQ ID NO: 873 - protein, 7 aa, Artificial Sequence
  source: /note="Description of Artificial Sequence: Synthetic peptide"
AYSPTRN

SEQ ID NO: 874 - protein, 7 aa, Artificial Sequence
  source: /note="Description of Artificial Sequence: Synthetic peptide"
AYVGTTP

SEQ ID NO: 875 - protein, 7 aa, Artificial Sequence
  source: /note="Description of Artificial Sequence: Synthetic peptide"
AYVNTPP

SEQ ID NO: 876 - protein, 7 aa, Artificial Sequence
  source: /note="Description of Artificial Sequence: Synthetic peptide"
AYVTPSS

SEQ ID NO: 877 - protein, 7 aa, Artificial Sequence
  source: /note="Description of Artificial Sequence: Synthetic peptide"
CAARSTA

SEQ ID NO: 878 - protein, 7 aa, Artificial Sequence
  source: /note="Description of Artificial Sequence: Synthetic peptide"
CAASQSE

SEQ ID NO: 879 - protein, 7 aa, Artificial Sequence
  source: /note="Description of Artificial Sequence: Synthetic peptide"
CAKTTAN

SEQ ID NO: 880 - protein, 7 aa, Artificial Sequence
  source: /note="Description of Artificial Sequence: Synthetic peptide"
CALGASY

SEQ ID NO: 881 - protein, 7 aa, Artificial Sequence
  source: /note="Description of Artificial Sequence: Synthetic peptide"
CAPLRPL

SEQ ID NO: 882 - protein, 7 aa, Artificial Sequence
  source: /note="Description of Artificial Sequence: Synthetic peptide"
CARDTHP

SEQ ID NO: 883 - protein, 7 aa, Artificial Sequence
  source: /note="Description of Artificial Sequence: Synthetic peptide"
CARMKEV

SEQ ID NO: 884 - protein, 7 aa, Artificial Sequence
  source: /note="Description of Artificial Sequence: Synthetic peptide"
CARSFEV

SEQ ID NO: 885 - protein, 7 aa, Artificial Sequence
  source: /note="Description of Artificial Sequence: Synthetic peptide"
CAVFQTG

SEQ ID NO: 886 - protein, 7 aa, Artificial Sequence
  source: /note="Description of Artificial Sequence: Synthetic peptide"
CAVGVRS

SEQ ID NO: 887 - protein, 7 aa, Artificial Sequence
  source: /note="Description of Artificial Sequence: Synthetic peptide"
CCAPGLS

SEQ ID NO: 888 - protein, 7 aa, Artificial Sequence
  source: /note="Description of Artificial Sequence: Synthetic peptide"
CDALNLA

SEQ ID NO: 889 - protein, 7 aa, Artificial Sequence
  source: /note="Description of Artificial Sequence: Synthetic peptide"
CDSSNSS

SEQ ID NO: 890 - protein, 7 aa, Artificial Sequence
  source: /note="Description of Artificial Sequence: Synthetic peptide"
CEASSKV

SEQ ID NO: 891 - protein, 7 aa, Artificial Sequence
  source: /note="Description of Artificial Sequence: Synthetic peptide"
CEKLVRV

SEQ ID NO: 892 - protein, 7 aa, Artificial Sequence
  source: /note="Description of Artificial Sequence: Synthetic peptide"
CEMEATL

SEQ ID NO: 893 - protein, 7 aa, Artificial Sequence
  source: /note="Description of Artificial Sequence: Synthetic peptide"
CEPCQEL

SEQ ID NO: 894 - protein, 7 aa, Artificial Sequence
  source: /note="Description of Artificial Sequence: Synthetic peptide"
CEPYERS

SEQ ID NO: 895 - protein, 7 aa, Artificial Sequence
  source: /note="Description of Artificial Sequence: Synthetic peptide"
CETITLA

SEQ ID NO: 896 - protein, 7 aa, Artificial Sequence
  source: /note="Description of Artificial Sequence: Synthetic peptide"
CETWQMH

SEQ ID NO: 897 - protein, 7 aa, Artificial Sequence
  source: /note="Description of Artificial Sequence: Synthetic peptide"
CEVEKKE

SEQ ID NO: 898 - protein, 7 aa, Artificial Sequence
  source: /note="Description of Artificial Sequence: Synthetic peptide"
CEVGAPS

SEQ ID NO: 899 - protein, 7 aa, Artificial Sequence
  source: /note="Description of Artificial Sequence: Synthetic peptide"
CFPKTVS

SEQ ID NO: 900 - protein, 7 aa, Artificial Sequence
  source: /note="Description of Artificial Sequence: Synthetic peptide"
CFTSERG

SEQ ID NO: 901 - protein, 7 aa, Artificial Sequence
  source: /note="Description of Artificial Sequence: Synthetic peptide"
CGLVICD

SEQ ID NO: 902 - protein, 7 aa, Artificial Sequence
  source: /note="Description of Artificial Sequence: Synthetic peptide"
CGMRQSS

SEQ ID NO: 903 - protein, 7 aa, Artificial Sequence
  source: /note="Description of Artificial Sequence: Synthetic peptide"
CGNHEAS

SEQ ID NO: 904 - protein, 7 aa, Artificial Sequence
  source: /note="Description of Artificial Sequence: Synthetic peptide"
CGSFITH

SEQ ID NO: 905 - protein, 7 aa, Artificial Sequence
  source: /note="Description of Artificial Sequence: Synthetic peptide"
CHPKMEF

SEQ ID NO: 906 - protein, 7 aa, Artificial Sequence
  source: /note="Description of Artificial Sequence: Synthetic peptide"
CHTASCS

SEQ ID NO: 907 - protein, 7 aa, Artificial Sequence
  source: /note="Description of Artificial Sequence: Synthetic peptide"
CIARPEC

SEQ ID NO: 908 - protein, 7 aa, Artificial Sequence
  source: /note="Description of Artificial Sequence: Synthetic peptide"
CIQSSLH

SEQ ID NO: 909 - protein, 7 aa, Artificial Sequence
  source: /note="Description of Artificial Sequence: Synthetic peptide"
CIVVETV

SEQ ID NO: 910 - protein, 7 aa, Artificial Sequence
  source: /note="Description of Artificial Sequence: Synthetic peptide"
CKEVPRA

SEQ ID NO: 911 - protein, 7 aa, Artificial Sequence
  source: /note="Description of Artificial Sequence: Synthetic peptide"
CKGTHNY

SEQ ID NO: 912 - protein, 7 aa, Artificial Sequence
  source: /note="Description of Artificial Sequence: Synthetic peptide"
CKHGTPM

SEQ ID NO: 913 - protein, 7 aa, Artificial Sequence
  source: /note="Description of Artificial Sequence: Synthetic peptide"
CKSNSTC

SEQ ID NO: 914 - protein, 7 aa, Artificial Sequence
  source: /note="Description of Artificial Sequence: Synthetic peptide"
CKSSIGS

SEQ ID NO: 915 - protein, 7 aa, Artificial Sequence
  source: /note="Description of Artificial Sequence: Synthetic peptide"
CLEDCMR

SEQ ID NO: 916 - protein, 7 aa, Artificial Sequence
  source: /note="Description of Artificial Sequence: Synthetic peptide"
CLEIPIS

SEQ ID NO: 917 - protein, 7 aa, Artificial Sequence
  source: /note="Description of Artificial Sequence: Synthetic peptide"
CLESDRP

SEQ ID NO: 918 - protein, 7 aa, Artificial Sequence
  source: /note="Description of Artificial Sequence: Synthetic peptide"
CLGTHML

SEQ ID NO: 919 - protein, 7 aa, Artificial Sequence
  source: /note="Description of Artificial Sequence: Synthetic peptide"
CLPADSE

SEQ ID NO: 920 - protein, 7 aa, Artificial Sequence
  source: /note="Description of Artificial Sequence: Synthetic peptide"
CLQTGLT

SEQ ID NO: 921 - protein, 7 aa, Artificial Sequence
  source: /note="Description of Artificial Sequence: Synthetic peptide"
CLRTSVP

SEQ ID NO: 922 - protein, 7 aa, Artificial Sequence
  source: /note="Description of Artificial Sequence: Synthetic peptide"
CLSSGSV

SEQ ID NO: 923 - protein, 7 aa, Artificial Sequence
  source: /note="Description of Artificial Sequence: Synthetic peptide"
CMAELMD

SEQ ID NO: 924 - protein, 7 aa, Artificial Sequence
  source: /note="Description of Artificial Sequence: Synthetic peptide"
CMAELRD

SEQ ID NO: 925 - protein, 7 aa, Artificial Sequence
  source: /note="Description of Artificial Sequence: Synthetic peptide"
CMPRTCE

SEQ ID NO: 926 - protein, 7 aa, Artificial Sequence
  source: /note="Description of Artificial Sequence: Synthetic peptide"
CMTIPNA

SEQ ID NO: 927 - protein, 7 aa, Artificial Sequence
  source: /note="Description of Artificial Sequence: Synthetic peptide"
CNASCGR

SEQ ID NO: 928 - protein, 7 aa, Artificial Sequence
  source: /note="Description of Artificial Sequence: Synthetic peptide"
CNEITEP

SEQ ID NO: 929 - protein, 7 aa, Artificial Sequence
  source: /note="Description of Artificial Sequence: Synthetic peptide"
CNPKTSS

SEQ ID NO: 930 - protein, 7 aa, Artificial Sequence
  source: /note="Description of Artificial Sequence: Synthetic peptide"
CNSSSCT

SEQ ID NO: 931 - protein, 7 aa, Artificial Sequence
  source: /note="Description of Artificial Sequence: Synthetic peptide"
CPAENQL

SEQ ID NO: 932 - protein, 7 aa, Artificial Sequence
  source: /note="Description of Artificial Sequence: Synthetic peptide"
CPAKSCG

SEQ ID NO: 933 - protein, 7 aa, Artificial Sequence
  source: /note="Description of Artificial Sequence: Synthetic peptide"
CPDRYQC

SEQ ID NO: 934 - protein, 7 aa, Artificial Sequence
  source: /note="Description of Artificial Sequence: Synthetic peptide"
CPLAPYS

SEQ ID NO: 935 - protein, 7 aa, Artificial Sequence
  source: /note="Description of Artificial Sequence: Synthetic peptide"
CPLDSTI

SEQ ID NO: 936 - protein, 7 aa, Artificial Sequence
  source: /note="Description of Artificial Sequence: Synthetic peptide"
CPLGDRH

SEQ ID NO: 937 - protein, 7 aa, Artificial Sequence
  source: /note="Description of Artificial Sequence: Synthetic peptide"
CPMVCSA

SEQ ID NO: 938 - protein, 7 aa, Artificial Sequence
  source: /note="Description of Artificial Sequence: Synthetic peptide"
CPPQPLP

SEQ ID NO: 939 - protein, 7 aa, Artificial Sequence
  source: /note="Description of Artificial Sequence: Synthetic peptide"
CPRTGLN

SEQ ID NO: 940 - protein, 7 aa, Artificial Sequence
  source: /note="Description of Artificial Sequence: Synthetic peptide"
CPSERMG

SEQ ID NO: 941 - protein, 7 aa, Artificial Sequence
  source: /note="Description of Artificial Sequence: Synthetic peptide"
CPSILHC

SEQ ID NO: 942 - protein, 7 aa, Artificial Sequence
  source: /note="Description of Artificial Sequence: Synthetic peptide"
CPSRAPC

SEQ ID NO: 943 - protein, 7 aa, Artificial Sequence
  source: /note="Description of Artificial Sequence: Synthetic peptide"
CPTPSSC

SEQ ID NO: 944 - protein, 7 aa, Artificial Sequence
  source: /note="Description of Artificial Sequence: Synthetic peptide"
CPTTKSA

SEQ ID NO: 945 - protein, 7 aa, Artificial Sequence
  source: /note="Description of Artificial Sequence: Synthetic peptide"
CQARSCI

SEQ ID NO: 946 - protein, 7 aa, Artificial Sequence
  source: /note="Description of Artificial Sequence: Synthetic peptide"
CRASSSP

SEQ ID NO: 947 - protein, 7 aa, Artificial Sequence
  source: /note="Description of Artificial Sequence: Synthetic peptide"
CRAVERP

SEQ ID NO: 948 - protein, 7 aa, Artificial Sequence
  source: /note="Description of Artificial Sequence: Synthetic peptide"
CRMMNRP

SEQ ID NO: 949 - protein, 7 aa, Artificial Sequence
  source: /note="Description of Artificial Sequence: Synthetic peptide"
CRMNDLV

SEQ ID NO: 950 - protein, 7 aa, Artificial Sequence
  source: /note="Description of Artificial Sequence: Synthetic peptide"
CRRTMDM

SEQ ID NO: 951 - protein, 7 aa, Artificial Sequence
  source: /note="Description of Artificial Sequence: Synthetic peptide"
CRSENKL

SEQ ID NO: 952 - protein, 7 aa, Artificial Sequence
  source: /note="Description of Artificial Sequence: Synthetic peptide"
CRSGGEA

SEQ ID NO: 953 - protein, 7 aa, Artificial Sequence
  source: /note="Description of Artificial Sequence: Synthetic peptide"
CSALHKC

SEQ ID NO: 954 - protein, 7 aa, Artificial Sequence
  source: /note="Description of Artificial Sequence: Synthetic peptide"
CSANFTG

SEQ ID NO: 955 - protein, 7 aa, Artificial Sequence
  source: /note="Description of Artificial Sequence: Synthetic peptide"
CSESLMA

SEQ ID NO: 956 - protein, 7 aa, Artificial Sequence
  source: /note="Description of Artificial Sequence: Synthetic peptide"
CSESSIF

SEQ ID NO: 957 - protein, 7 aa, Artificial Sequence
  source: /note="Description of Artificial Sequence: Synthetic peptide"
CSGTTNC

SEQ ID NO: 958 - protein, 7 aa, Artificial Sequence
  source: /note="Description of Artificial Sequence: Synthetic peptide"
CSPPHFP

SEQ ID NO: 959 - protein, 7 aa, Artificial Sequence
  source: /note="Description of Artificial Sequence: Synthetic peptide"
CSPSGVI

SEQ ID NO: 960 - protein, 7 aa, Artificial Sequence
  source: /note="Description of Artificial Sequence: Synthetic peptide"
CSSRPFA

SEQ ID NO: 961 - protein, 7 aa, Artificial Sequence
  source: /note="Description of Artificial Sequence: Synthetic peptide"
CSSTTKC

SEQ ID NO: 962 - protein, 7 aa, Artificial Sequence
  source: /note="Description of Artificial Sequence: Synthetic peptide"
CTAELPF

SEQ ID NO: 963 - protein, 7 aa, Artificial Sequence
  source: /note="Description of Artificial Sequence: Synthetic peptide"
CTDHPAC

SEQ ID NO: 964 - protein, 7 aa, Artificial Sequence
  source: /note="Description of Artificial Sequence: Synthetic peptide"
CTDSTCL

SEQ ID NO: 965 - protein, 7 aa, Artificial Sequence
  source: /note="Description of Artificial Sequence: Synthetic peptide"
CTGPLCS

SEQ ID NO: 966 - protein, 7 aa, Artificial Sequence
  source: /note="Description of Artificial Sequence: Synthetic peptide"
CTKSICT

SEQ ID NO: 967 - protein, 7 aa, Artificial Sequence
  source: /note="Description of Artificial Sequence: Synthetic peptide"
CTSTKIY

SEQ ID NO: 968 - protein, 7 aa, Artificial Sequence
  source: /note="Description of Artificial Sequence: Synthetic peptide"
CTTDALS

SEQ ID NO: 969 - protein, 7 aa, Artificial Sequence
  source: /note="Description of Artificial Sequence: Synthetic peptide"
CTYTLID

SEQ ID NO: 970 - protein, 7 aa, Artificial Sequence
  source: /note="Description of Artificial Sequence: Synthetic peptide"
CVPDSSK

SEQ ID NO: 971 - protein, 7 aa, Artificial Sequence
  source: /note="Description of Artificial Sequence: Synthetic peptide"
CVRLTTP

SEQ ID NO: 972 - protein, 7 aa, Artificial Sequence
  source: /note="Description of Artificial Sequence: Synthetic peptide"
CVTPEKV

SEQ ID NO: 973 - protein, 7 aa, Artificial Sequence
  source: /note="Description of Artificial Sequence: Synthetic peptide"
CVVNQQG

SEQ ID NO: 974 - protein, 7 aa, Artificial Sequence
  source: /note="Description of Artificial Sequence: Synthetic peptide"
CVVSRQD

SEQ ID NO: 975 - protein, 7 aa, Artificial Sequence
  source: /note="Description of Artificial Sequence: Synthetic peptide"
CYIGTQC

SEQ ID NO: 976 - protein, 7 aa, Artificial Sequence
  source: /note="Description of Artificial Sequence: Synthetic peptide"
CYLSTCT

SEQ ID NO: 977 - protein, 7 aa, Artificial Sequence
  source: /note="Description of Artificial Sequence: Synthetic peptide"
CYNRTEC

SEQ ID NO: 978 - protein, 7 aa, Artificial Sequence
  source: /note="Description of Artificial Sequence: Synthetic peptide"
CYPPENA

SEQ ID NO: 979 - protein, 7 aa, Artificial Sequence
  source: /note="Description of Artificial Sequence: Synthetic peptide"
DAAGTSK

SEQ ID NO: 980 - protein, 7 aa, Artificial Sequence
  source: /note="Description of Artificial Sequence: Synthetic peptide"
DAAKSAY

SEQ ID NO: 981 - protein, 7 aa, Artificial Sequence
  source: /note="Description of Artificial Sequence: Synthetic peptide"
DAATKAT

SEQ ID NO: 982 - protein, 7 aa, Artificial Sequence
  source: /note="Description of Artificial Sequence: Synthetic peptide"
DAERAKP

SEQ ID NO: 983 - protein, 7 aa, Artificial Sequence
  source: /note="Description of Artificial Sequence: Synthetic peptide"
DAEWPMY

SEQ ID NO: 984 - protein, 7 aa, Artificial Sequence
  source: /note="Description of Artificial Sequence: Synthetic peptide"
DAGIGGP

SEQ ID NO: 985 - protein, 7 aa, Artificial Sequence
  source: /note="Description of Artificial Sequence: Synthetic peptide"
DAGNWQP

SEQ ID NO: 986 - protein, 7 aa, Artificial Sequence
  source: /note="Description of Artificial Sequence: Synthetic peptide"
DAGPRAQ

SEQ ID NO: 987 - protein, 7 aa, Artificial Sequence
  source: /note="Description of Artificial Sequence: Synthetic peptide"
DAHNAPR

SEQ ID NO: 988 - protein, 7 aa, Artificial Sequence
  source: /note="Description of Artificial Sequence: Synthetic peptide"
DAHRLVT

SEQ ID NO: 989 - protein, 7 aa, Artificial Sequence
  source: /note="Description of Artificial Sequence: Synthetic peptide"
DAIKAMS

SEQ ID NO: 990 - protein, 7 aa, Artificial Sequence
  source: /note="Description of Artificial Sequence: Synthetic peptide"
DAINMGG

SEQ ID NO: 991 - protein, 7 aa, Artificial Sequence
  source: /note="Description of Artificial Sequence: Synthetic peptide"
DAIPLAS

SEQ ID NO: 992 - protein, 7 aa, Artificial Sequence
  source: /note="Description of Artificial Sequence: Synthetic peptide"
DAKVMVP

SEQ ID NO: 993 - protein, 7 aa, Artificial Sequence
  source: /note="Description of Artificial Sequence: Synthetic peptide"
DALKGAK

SEQ ID NO: 994 - protein, 7 aa, Artificial Sequence
  source: /note="Description of Artificial Sequence: Synthetic peptide"
DAPNSVM

SEQ ID NO: 995 - protein, 7 aa, Artificial Sequence
  source: /note="Description of Artificial Sequence: Synthetic peptide"
DAPPLRT

SEQ ID NO: 996 - protein, 7 aa, Artificial Sequence
  source: /note="Description of Artificial Sequence: Synthetic peptide"
DAPRESL

SEQ ID NO: 997 - protein, 7 aa, Artificial Sequence
  source: /note="Description of Artificial Sequence: Synthetic peptide"
DAPRNAE

SEQ ID NO: 998 - protein, 7 aa, Artificial Sequence
  source: /note="Description of Artificial Sequence: Synthetic peptide"
DAQPSQM

SEQ ID NO: 999 - protein, 7 aa, Artificial Sequence
  source: /note="Description of Artificial Sequence: Synthetic peptide"
DAQYSQR

SEQ ID NO: 1000 - protein, 7 aa, Artificial Sequence
  source: /note="Description of Artificial Sequence: Synthetic peptide"
DARAHPL

SEQ ID NO: 1001 - protein, 7 aa, Artificial Sequence
  source: /note="Description of Artificial Sequence: Synthetic peptide"
DARFSMQ

SEQ ID NO: 1002 - protein, 7 aa, Artificial Sequence
  source: /note="Description of Artificial Sequence: Synthetic peptide"
DARLAPE

SEQ ID NO: 1003 - protein, 7 aa, Artificial Sequence
  source: /note="Description of Artificial Sequence: Synthetic peptide"
DARMLIS

SEQ ID NO: 1004 - protein, 7 aa, Artificial Sequence
  source: /note="Description of Artificial Sequence: Synthetic peptide"
DARRDIV

SEQ ID NO: 1005 - protein, 7 aa, Artificial Sequence
  source: /note="Description of Artificial Sequence: Synthetic peptide"
DARTATF

SEQ ID NO: 1006 - protein, 7 aa, Artificial Sequence
  source: /note="Description of Artificial Sequence: Synthetic peptide"
DARVTRF

SEQ ID NO: 1007 - protein, 7 aa, Artificial Sequence
  source: /note="Description of Artificial Sequence: Synthetic peptide"
DASLMKM

SEQ ID NO: 1008 - protein, 7 aa, Artificial Sequence
  source: /note="Description of Artificial Sequence: Synthetic peptide"
DASPNRE

SEQ ID NO: 1009 - protein, 7 aa, Artificial Sequence
  source: /note="Description of Artificial Sequence: Synthetic peptide"
DASTIKD

SEQ ID NO: 1010 - protein, 7 aa, Artificial Sequence
  source: /note="Description of Artificial Sequence: Synthetic peptide"
DAVADDP

SEQ ID NO: 1011 - protein, 7 aa, Artificial Sequence
  source: /note="Description of Artificial Sequence: Synthetic peptide"
DAVERVS

SEQ ID NO: 1012 - protein, 7 aa, Artificial Sequence
  source: /note="Description of Artificial Sequence: Synthetic peptide"
DAVVERS

SEQ ID NO: 1013 - protein, 7 aa, Artificial Sequence
  source: /note="Description of Artificial Sequence: Synthetic peptide"
DCDTQKT

SEQ ID NO: 1014 - protein, 7 aa, Artificial Sequence
  source: /note="Description of Artificial Sequence: Synthetic peptide"
DCLLSGP

SEQ ID NO: 1015 - protein, 7 aa, Artificial Sequence
  source: /note="Description of Artificial Sequence: Synthetic peptide"
DCPFQKG

SEQ ID NO: 1016 - protein, 7 aa, Artificial Sequence
  source: /note="Description of Artificial Sequence: Synthetic peptide"
DCSFKCS

SEQ ID NO: 1017 - protein, 7 aa, Artificial Sequence
  source: /note="Description of Artificial Sequence: Synthetic peptide"
DDEHRST

SEQ ID NO: 1018 - protein, 7 aa, Artificial Sequence
  source: /note="Description of Artificial Sequence: Synthetic peptide"
DDGHPHL

SEQ ID NO: 1019 - protein, 7 aa, Artificial Sequence
  source: /note="Description of Artificial Sequence: Synthetic peptide"
DDIACDA

SEQ ID NO: 1020 - protein, 7 aa, Artificial Sequence
  source: /note="Description of Artificial Sequence: Synthetic peptide"
DDKERRE

SEQ ID NO: 1021 - protein, 7 aa, Artificial Sequence
  source: /note="Description of Artificial Sequence: Synthetic peptide"
DDMARGR

SEQ ID NO: 1022 - protein, 7 aa, Artificial Sequence
  source: /note="Description of Artificial Sequence: Synthetic peptide"
DDPHSSS

SEQ ID NO: 1023 - protein, 7 aa, Artificial Sequence
  source: /note="Description of Artificial Sequence: Synthetic peptide"
DDPRDGR

SEQ ID NO: 1024 - protein, 7 aa, Artificial Sequence
  source: /note="Description of Artificial Sequence: Synthetic peptide"
DDRRHFV

SEQ ID NO: 1025 - protein, 7 aa, Artificial Sequence
  source: /note="Description of Artificial Sequence: Synthetic peptide"
DDRSFPM

SEQ ID NO: 1026 - protein, 7 aa, Artificial Sequence
  source: /note="Description of Artificial Sequence: Synthetic peptide"
DDSLCQL

SEQ ID NO: 1027 - protein, 7 aa, Artificial Sequence
  source: /note="Description of Artificial Sequence: Synthetic peptide"
DDTRFDD

SEQ ID NO: 1028 - protein, 7 aa, Artificial Sequence
  source: /note="Description of Artificial Sequence: Synthetic peptide"
DDWPKVS

SEQ ID NO: 1029 - protein, 7 aa, Artificial Sequence
  source: /note="Description of Artificial Sequence: Synthetic peptide"
DDYHAPA

SEQ ID NO: 1030 - protein, 7 aa, Artificial Sequence
  source: /note="Description of Artificial Sequence: Synthetic peptide"
DEAKKHH

SEQ ID NO: 1031 - protein, 7 aa, Artificial Sequence
  source: /note="Description of Artificial Sequence: Synthetic peptide"
DEAPHPA

SEQ ID NO: 1032 - protein, 7 aa, Artificial Sequence
  source: /note="Description of Artificial Sequence: Synthetic peptide"
DEDIKRL

SEQ ID NO: 1033 - protein, 7 aa, Artificial Sequence
  source: /note="Description of Artificial Sequence: Synthetic peptide"
DEGKVKR

SEQ ID NO: 1034 - protein, 7 aa, Artificial Sequence
  source: /note="Description of Artificial Sequence: Synthetic peptide"
DEGRHQR

SEQ ID NO: 1035 - protein, 7 aa, Artificial Sequence
  source: /note="Description of Artificial Sequence: Synthetic peptide"
DENETGP

SEQ ID NO: 1036 - protein, 7 aa, Artificial Sequence
  source: /note="Description of Artificial Sequence: Synthetic peptide"
DENVALP

SEQ ID NO: 1037 - protein, 7 aa, Artificial Sequence
  source: /note="Description of Artificial Sequence: Synthetic peptide"
DEPFKKA

SEQ ID NO: 1038 - protein, 7 aa, Artificial Sequence
  source: /note="Description of Artificial Sequence: Synthetic peptide"
DEPGMTS

SEQ ID NO: 1039 - protein, 7 aa, Artificial Sequence
  source: /note="Description of Artificial Sequence: Synthetic peptide"
DEPRHQM

SEQ ID NO: 1040 - protein, 7 aa, Artificial Sequence
  source: /note="Description of Artificial Sequence: Synthetic peptide"
DERGFRS

SEQ ID NO: 1041 - protein, 7 aa, Artificial Sequence
  source: /note="Description of Artificial Sequence: Synthetic peptide"
DERRLDP

SEQ ID NO: 1042 - protein, 7 aa, Artificial Sequence
  source: /note="Description of Artificial Sequence: Synthetic peptide"
DESTMSR

SEQ ID NO: 1043 - protein, 7 aa, Artificial Sequence
  source: /note="Description of Artificial Sequence: Synthetic peptide"
DESYDRN

SEQ ID NO: 1044 - protein, 7 aa, Artificial Sequence
  source: /note="Description of Artificial Sequence: Synthetic peptide"
DEVKKEG

SEQ ID NO: 1045 - protein, 7 aa, Artificial Sequence
  source: /note="Description of Artificial Sequence: Synthetic peptide"
DEWAHAR

SEQ ID NO: 1046 - protein, 7 aa, Artificial Sequence
  source: /note="Description of Artificial Sequence: Synthetic peptide"
DFAGNSD

SEQ ID NO: 1047 - protein, 7 aa, Artificial Sequence
  source: /note="Description of Artificial Sequence: Synthetic peptide"
DFALASP

SEQ ID NO: 1048 - protein, 7 aa, Artificial Sequence
  source: /note="Description of Artificial Sequence: Synthetic peptide"
DFARQHD

SEQ ID NO: 1049 - protein, 7 aa, Artificial Sequence
  source: /note="Description of Artificial Sequence: Synthetic peptide"
DFECIGV

SEQ ID NO: 1050 - protein, 7 aa, Artificial Sequence
  source: /note="Description of Artificial Sequence: Synthetic peptide"
DFENPME

SEQ ID NO: 1051 - protein, 7 aa, Artificial Sequence
  source: /note="Description of Artificial Sequence: Synthetic peptide"
DFGGLAV

SEQ ID NO: 1052 - protein, 7 aa, Artificial Sequence
  source: /note="Description of Artificial Sequence: Synthetic peptide"
DFKAVCC

SEQ ID NO: 1053 - protein, 7 aa, Artificial Sequence
  source: /note="Description of Artificial Sequence: Synthetic peptide"
DFKVVSG

SEQ ID NO: 1054 - protein, 7 aa, Artificial Sequence
  source: /note="Description of Artificial Sequence: Synthetic peptide"
DFPLKPG

SEQ ID NO: 1055 - protein, 7 aa, Artificial Sequence
  source: /note="Description of Artificial Sequence: Synthetic peptide"
DFRKPEQ

SEQ ID NO: 1056 - protein, 7 aa, Artificial Sequence
  source: /note="Description of Artificial Sequence: Synthetic peptide"
DFSLGLL

SEQ ID NO: 1057 - protein, 7 aa, Artificial Sequence
  source: /note="Description of Artificial Sequence: Synthetic peptide"
DFSLNNS

SEQ ID NO: 1058 - protein, 7 aa, Artificial Sequence
  source: /note="Description of Artificial Sequence: Synthetic peptide"
DFSLQDA

SEQ ID NO: 1059 - protein, 7 aa, Artificial Sequence
  source: /note="Description of Artificial Sequence: Synthetic peptide"
DFSRRAD

SEQ ID NO: 1060 - protein, 7 aa, Artificial Sequence
  source: /note="Description of Artificial Sequence: Synthetic peptide"
DFTRADG

SEQ ID NO: 1061 - protein, 7 aa, Artificial Sequence
  source: /note="Description of Artificial Sequence: Synthetic peptide"
DFTVPAG

SEQ ID NO: 1062 - protein, 7 aa, Artificial Sequence
  source: /note="Description of Artificial Sequence: Synthetic peptide"
DFVPLKS

SEQ ID NO: 1063 - protein, 7 aa, Artificial Sequence
  source: /note="Description of Artificial Sequence: Synthetic peptide"
DFVTIPN

SEQ ID NO: 1064 - protein, 7 aa, Artificial Sequence
  source: /note="Description of Artificial Sequence: Synthetic peptide"
DGASGVP

SEQ ID NO: 1065 - protein, 7 aa, Artificial Sequence
  source: /note="Description of Artificial Sequence: Synthetic peptide"
DGGHSVR

SEQ ID NO: 1066 - protein, 7 aa, Artificial Sequence
  source: /note="Description of Artificial Sequence: Synthetic peptide"
DGIRDPR

SEQ ID NO: 1067 - protein, 7 aa, Artificial Sequence
  source: /note="Description of Artificial Sequence: Synthetic peptide"
DGKAKVS

SEQ ID NO: 1068 - protein, 7 aa, Artificial Sequence
  source: /note="Description of Artificial Sequence: Synthetic peptide"
DGKHTDY

SEQ ID NO: 1069 - protein, 7 aa, Artificial Sequence
  source: /note="Description of Artificial Sequence: Synthetic peptide"
DGLRTES

SEQ ID NO: 1070 - protein, 7 aa, Artificial Sequence
  source: /note="Description of Artificial Sequence: Synthetic peptide"
DGLSRLP

SEQ ID NO: 1071 - protein, 7 aa, Artificial Sequence
  source: /note="Description of Artificial Sequence: Synthetic peptide"
DGMLRDR

SEQ ID NO: 1072 - protein, 7 aa, Artificial Sequence
  source: /note="Description of Artificial Sequence: Synthetic peptide"
DGNSYHP

SEQ ID NO: 1073 - protein, 7 aa, Artificial Sequence
  source: /note="Description of Artificial Sequence: Synthetic peptide"
DGNTARG

SEQ ID NO: 1074 - protein, 7 aa, Artificial Sequence
  source: /note="Description of Artificial Sequence: Synthetic peptide"
DGPEEER

SEQ ID NO: 1075 - protein, 7 aa, Artificial Sequence
  source: /note="Description of Artificial Sequence: Synthetic peptide"
DGPGSPN

SEQ ID NO: 1076 - protein, 7 aa, Artificial Sequence
  source: /note="Description of Artificial Sequence: Synthetic peptide"
DGRHLSP

SEQ ID NO: 1077 - protein, 7 aa, Artificial Sequence
  source: /note="Description of Artificial Sequence: Synthetic peptide"
DGRTVAA

SEQ ID NO: 1078 - protein, 7 aa, Artificial Sequence
  source: /note="Description of Artificial Sequence: Synthetic peptide"
DGSFEPY

SEQ ID NO: 1079 - protein, 7 aa, Artificial Sequence
  source: /note="Description of Artificial Sequence: Synthetic peptide"
DGSGTLN

SEQ ID NO: 1080 - protein, 7 aa, Artificial Sequence
  source: /note="Description of Artificial Sequence: Synthetic peptide"
DGSPSWA

SEQ ID NO: 1081 - protein, 7 aa, Artificial Sequence
  source: /note="Description of Artificial Sequence: Synthetic peptide"
DGTDQSQ

SEQ ID NO: 1082 - protein, 7 aa, Artificial Sequence
  source: /note="Description of Artificial Sequence: Synthetic peptide"
DGTRAQW

SEQ ID NO: 1083 - protein, 7 aa, Artificial Sequence
  source: /note="Description of Artificial Sequence: Synthetic peptide"
DGTSLKH

SEQ ID NO: 1084 - protein, 7 aa, Artificial Sequence
  source: /note="Description of Artificial Sequence: Synthetic peptide"
DGTYRNM

SEQ ID NO: 1085 - protein, 7 aa, Artificial Sequence
  source: /note="Description of Artificial Sequence: Synthetic peptide"
DGVTTLS

SEQ ID NO: 1086 - protein, 7 aa, Artificial Sequence
  source: /note="Description of Artificial Sequence: Synthetic peptide"
DHAHRST

SEQ ID NO: 1087 - protein, 7 aa, Artificial Sequence
  source: /note="Description of Artificial Sequence: Synthetic peptide"
DHKSNSR

SEQ ID NO: 1088 - protein, 7 aa, Artificial Sequence
  source: /note="Description of Artificial Sequence: Synthetic peptide"
DHLAQEC

SEQ ID NO: 1089 - protein, 7 aa, Artificial Sequence
  source: /note="Description of Artificial Sequence: Synthetic peptide"
DHLDVNA

SEQ ID NO: 1090 - protein, 7 aa, Artificial Sequence
  source: /note="Description of Artificial Sequence: Synthetic peptide"
DHNHMGS

SEQ ID NO: 1091 - protein, 7 aa, Artificial Sequence
  source: /note="Description of Artificial Sequence: Synthetic peptide"
DHNLRQN

SEQ ID NO: 1092 - protein, 7 aa, Artificial Sequence
  source: /note="Description of Artificial Sequence: Synthetic peptide"
DHPYLSP

SEQ ID NO: 1093 - protein, 7 aa, Artificial Sequence
  source: /note="Description of Artificial Sequence: Synthetic peptide"
DHRTLES

SEQ ID NO: 1094 - protein, 7 aa, Artificial Sequence
  source: /note="Description of Artificial Sequence: Synthetic peptide"
DHSALSS

SEQ ID NO: 1095 - protein, 7 aa, Artificial Sequence
  source: /note="Description of Artificial Sequence: Synthetic peptide"
DHSGKKD

SEQ ID NO: 1096 - protein, 7 aa, Artificial Sequence
  source: /note="Description of Artificial Sequence: Synthetic peptide"
DHSMALR

SEQ ID NO: 1097 - protein, 7 aa, Artificial Sequence
  source: /note="Description of Artificial Sequence: Synthetic peptide"
DHSVPGT

SEQ ID NO: 1098 - protein, 7 aa, Artificial Sequence
  source: /note="Description of Artificial Sequence: Synthetic peptide"
DHTDRDG

SEQ ID NO: 1099 - protein, 7 aa, Artificial Sequence
  source: /note="Description of Artificial Sequence: Synthetic peptide"
DHTPLLS

SEQ ID NO: 1100 - protein, 7 aa, Artificial Sequence
  source: /note="Description of Artificial Sequence: Synthetic peptide"
DHWNGDS

SEQ ID NO: 1101 - protein, 7 aa, Artificial Sequence
  source: /note="Description of Artificial Sequence: Synthetic peptide"
DHYARLP

SEQ ID NO: 1102 - protein, 7 aa, Artificial Sequence
  source: /note="Description of Artificial Sequence: Synthetic peptide"
DIAHPRN

SEQ ID NO: 1103 - protein, 7 aa, Artificial Sequence
  source: /note="Description of Artificial Sequence: Synthetic peptide"
DIAQHET

SEQ ID NO: 1104 - protein, 7 aa, Artificial Sequence
  source: /note="Description of Artificial Sequence: Synthetic peptide"
DIEDTPV

SEQ ID NO: 1105 - protein, 7 aa, Artificial Sequence
  source: /note="Description of Artificial Sequence: Synthetic peptide"
DIHRSSY

SEQ ID NO: 1106 - protein, 7 aa, Artificial Sequence
  source: /note="Description of Artificial Sequence: Synthetic peptide"
DIHSHLY

SEQ ID NO: 1107 - protein, 7 aa, Artificial Sequence
  source: /note="Description of Artificial Sequence: Synthetic peptide"
DINFKAP

SEQ ID NO: 1108 - protein, 7 aa, Artificial Sequence
  source: /note="Description of Artificial Sequence: Synthetic peptide"
DINPTTL

SEQ ID NO: 1109 - protein, 7 aa, Artificial Sequence
  source: /note="Description of Artificial Sequence: Synthetic peptide"
DIPVASK

SEQ ID NO: 1110 - protein, 7 aa, Artificial Sequence
  source: /note="Description of Artificial Sequence: Synthetic peptide"
DIPVTSA

SEQ ID NO: 1111 - protein, 7 aa, Artificial Sequence
  source: /note="Description of Artificial Sequence: Synthetic peptide"
DIRHRLS

SEQ ID NO: 1112 - protein, 7 aa, Artificial Sequence
  source: /note="Description of Artificial Sequence: Synthetic peptide"
DIRRPTP

SEQ ID NO: 1113 - protein, 7 aa, Artificial Sequence
  source: /note="Description of Artificial Sequence: Synthetic peptide"
DIRTGSV

SEQ ID NO: 1114 - protein, 7 aa, Artificial Sequence
  source: /note="Description of Artificial Sequence: Synthetic peptide"
DISLPEA

SEQ ID NO: 1115 - protein, 7 aa, Artificial Sequence
  source: /note="Description of Artificial Sequence: Synthetic peptide"
DISNDQY

SEQ ID NO: 1116 - protein, 7 aa, Artificial Sequence
  source: /note="Description of Artificial Sequence: Synthetic peptide"
DISRPVR

SEQ ID NO: 1117 - protein, 7 aa, Artificial Sequence
  source: /note="Description of Artificial Sequence: Synthetic peptide"
DISRQNS

SEQ ID NO: 1118 - protein, 7 aa, Artificial Sequence
  source: /note="Description of Artificial Sequence: Synthetic peptide"
DITATTA

SEQ ID NO: 1119 - protein, 7 aa, Artificial Sequence
  source: /note="Description of Artificial Sequence: Synthetic peptide"
DITGRVP

SEQ ID NO: 1120 - protein, 7 aa, Artificial Sequence
  source: /note="Description of Artificial Sequence: Synthetic peptide"
DKAVGMI

SEQ ID NO: 1121 - protein, 7 aa, Artificial Sequence
  source: /note="Description of Artificial Sequence: Synthetic peptide"
DKDELMM

SEQ ID NO: 1122 - protein, 7 aa, Artificial Sequence
  source: /note="Description of Artificial Sequence: Synthetic peptide"
DKEVPPM

SEQ ID NO: 1123 - protein, 7 aa, Artificial Sequence
  source: /note="Description of Artificial Sequence: Synthetic peptide"
DKEYAGL

SEQ ID NO: 1124 - protein, 7 aa, Artificial Sequence
  source: /note="Description of Artificial Sequence: Synthetic peptide"
DKGKASP

SEQ ID NO: 1125 - protein, 7 aa, Artificial Sequence
  source: /note="Description of Artificial Sequence: Synthetic peptide"
DKGSLTM

SEQ ID NO: 1126 - protein, 7 aa, Artificial Sequence
  source: /note="Description of Artificial Sequence: Synthetic peptide"
DKIPNFS

SEQ ID NO: 1127 - protein, 7 aa, Artificial Sequence
  source: /note="Description of Artificial Sequence: Synthetic peptide"
DKLHGQA

SEQ ID NO: 1128 - protein, 7 aa, Artificial Sequence
  source: /note="Description of Artificial Sequence: Synthetic peptide"
DKLPGDR

SEQ ID NO: 1129 - protein, 7 aa, Artificial Sequence
  source: /note="Description of Artificial Sequence: Synthetic peptide"
DKLRANN

SEQ ID NO: 1130 - protein, 7 aa, Artificial Sequence
  source: /note="Description of Artificial Sequence: Synthetic peptide"
DKLTPRL

SEQ ID NO: 1131 - protein, 7 aa, Artificial Sequence
  source: /note="Description of Artificial Sequence: Synthetic peptide"
DKMNMPP

SEQ ID NO: 1132 - protein, 7 aa, Artificial Sequence
  source: /note="Description of Artificial Sequence: Synthetic peptide"
DKRDGRL

SEQ ID NO: 1133 - protein, 7 aa, Artificial Sequence
  source: /note="Description of Artificial Sequence: Synthetic peptide"
DKRSGTC

SEQ ID NO: 1134 - protein, 7 aa, Artificial Sequence
  source: /note="Description of Artificial Sequence: Synthetic peptide"
DKSIATN

SEQ ID NO: 1135 - protein, 7 aa, Artificial Sequence
  source: /note="Description of Artificial Sequence: Synthetic peptide"
DKSPMMR

SEQ ID NO: 1136 - protein, 7 aa, Artificial Sequence
  source: /note="Description of Artificial Sequence: Synthetic peptide"
DKSRLYA

SEQ ID NO: 1137 - protein, 7 aa, Artificial Sequence
  source: /note="Description of Artificial Sequence: Synthetic peptide"
DKSRNQM

SEQ ID NO: 1138 - protein, 7 aa, Artificial Sequence
  source: /note="Description of Artificial Sequence: Synthetic peptide"
DKTAVIS

SEQ ID NO: 1139 - protein, 7 aa, Artificial Sequence
  source: /note="Description of Artificial Sequence: Synthetic peptide"
DLALSRG

SEQ ID NO: 1140 - protein, 7 aa, Artificial Sequence
  source: /note="Description of Artificial Sequence: Synthetic peptide"
DLASVPR

SEQ ID NO: 1141 - protein, 7 aa, Artificial Sequence
  source: /note="Description of Artificial Sequence: Synthetic peptide"
DLDPICT

SEQ ID NO: 1142 - protein, 7 aa, Artificial Sequence
  source: /note="Description of Artificial Sequence: Synthetic peptide"
DLDSPHS

SEQ ID NO: 1143 - protein, 7 aa, Artificial Sequence
  source: /note="Description of Artificial Sequence: Synthetic peptide"
DLEHQCP

SEQ ID NO: 1144 - protein, 7 aa, Artificial Sequence
  source: /note="Description of Artificial Sequence: Synthetic peptide"
DLFKIER

SEQ ID NO: 1145 - protein, 7 aa, Artificial Sequence
  source: /note="Description of Artificial Sequence: Synthetic peptide"
DLGGLVH

SEQ ID NO: 1146 - protein, 7 aa, Artificial Sequence
  source: /note="Description of Artificial Sequence: Synthetic peptide"
DLGPDKG

SEQ ID NO: 1147 - protein, 7 aa, Artificial Sequence
  source: /note="Description of Artificial Sequence: Synthetic peptide"
DLHGAMR

SEQ ID NO: 1148 - protein, 7 aa, Artificial Sequence
  source: /note="Description of Artificial Sequence: Synthetic peptide"
DLHIQDP

SEQ ID NO: 1149 - protein, 7 aa, Artificial Sequence
  source: /note="Description of Artificial Sequence: Synthetic peptide"
DLIENRE

SEQ ID NO: 1150 - protein, 7 aa, Artificial Sequence
  source: /note="Description of Artificial Sequence: Synthetic peptide"
DLIERGS

SEQ ID NO: 1151 - protein, 7 aa, Artificial Sequence
  source: /note="Description of Artificial Sequence: Synthetic peptide"
DLIPSRP

SEQ ID NO: 1152 - protein, 7 aa, Artificial Sequence
  source: /note="Description of Artificial Sequence: Synthetic peptide"
DLIVRGL

SEQ ID NO: 1153 - protein, 7 aa, Artificial Sequence
  source: /note="Description of Artificial Sequence: Synthetic peptide"
DLKGGGF

SEQ ID NO: 1154 - protein, 7 aa, Artificial Sequence
  source: /note="Description of Artificial Sequence: Synthetic peptide"
DLKKPDF

SEQ ID NO: 1155 - protein, 7 aa, Artificial Sequence
  source: /note="Description of Artificial Sequence: Synthetic peptide"
DLKLHGP

SEQ ID NO: 1156 - protein, 7 aa, Artificial Sequence
  source: /note="Description of Artificial Sequence: Synthetic peptide"
DLKPSLL

SEQ ID NO: 1157 - protein, 7 aa, Artificial Sequence
  source: /note="Description of Artificial Sequence: Synthetic peptide"
DLKSSER

SEQ ID NO: 1158 - protein, 7 aa, Artificial Sequence
  source: /note="Description of Artificial Sequence: Synthetic peptide"
DLLERPS

SEQ ID NO: 1159 - protein, 7 aa, Artificial Sequence
  source: /note="Description of Artificial Sequence: Synthetic peptide"
DLLETRL

SEQ ID NO: 1160 - protein, 7 aa, Artificial Sequence
  source: /note="Description of Artificial Sequence: Synthetic peptide"
DLLTALA

SEQ ID NO: 1161 - protein, 7 aa, Artificial Sequence
  source: /note="Description of Artificial Sequence: Synthetic peptide"
DLMHTDA

SEQ ID NO: 1162 - protein, 7 aa, Artificial Sequence
  source: /note="Description of Artificial Sequence: Synthetic peptide"
DLMHVSG

SEQ ID NO: 1163 - protein, 7 aa, Artificial Sequence
  source: /note="Description of Artificial Sequence: Synthetic peptide"
DLMIHGL

SEQ ID NO: 1164 - protein, 7 aa, Artificial Sequence
  source: /note="Description of Artificial Sequence: Synthetic peptide"
DLNRGPR

SEQ ID NO: 1165 - protein, 7 aa, Artificial Sequence
  source: /note="Description of Artificial Sequence: Synthetic peptide"
DLNRIEC

SEQ ID NO: 1166 - protein, 7 aa, Artificial Sequence
  source: /note="Description of Artificial Sequence: Synthetic peptide"
DLNTTQH

SEQ ID NO: 1167 - protein, 7 aa, Artificial Sequence
  source: /note="Description of Artificial Sequence: Synthetic peptide"
DLPAVSH

SEQ ID NO: 1168 - protein, 7 aa, Artificial Sequence
  source: /note="Description of Artificial Sequence: Synthetic peptide"
DLPLGNS

SEQ ID NO: 1169 - protein, 7 aa, Artificial Sequence
  source: /note="Description of Artificial Sequence: Synthetic peptide"
DLPLRTT

SEQ ID NO: 1170 - protein, 7 aa, Artificial Sequence
  source: /note="Description of Artificial Sequence: Synthetic peptide"
DLPLTSL

SEQ ID NO: 1171 - protein, 7 aa, Artificial Sequence
  source: /note="Description of Artificial Sequence: Synthetic peptide"
DLPRQSV

SEQ ID NO: 1172 - protein, 7 aa, Artificial Sequence
  source: /note="Description of Artificial Sequence: Synthetic peptide"
DLPYSHP

SEQ ID NO: 1173 - protein, 7 aa, Artificial Sequence
  source: /note="Description of Artificial Sequence: Synthetic peptide"
DLQTGPQ

SEQ ID NO: 1174 - protein, 7 aa, Artificial Sequence
  source: /note="Description of Artificial Sequence: Synthetic peptide"
DLRCAEG

SEQ ID NO: 1175 - protein, 7 aa, Artificial Sequence
  source: /note="Description of Artificial Sequence: Synthetic peptide"
DLREAPR

SEQ ID NO: 1176 - protein, 7 aa, Artificial Sequence
  source: /note="Description of Artificial Sequence: Synthetic peptide"
DLRHASS

SEQ ID NO: 1177 - protein, 7 aa, Artificial Sequence
  source: /note="Description of Artificial Sequence: Synthetic peptide"
DLRHPPS

SEQ ID NO: 1178 - protein, 7 aa, Artificial Sequence
  source: /note="Description of Artificial Sequence: Synthetic peptide"
DLRPGGL

SEQ ID NO: 1179 - protein, 7 aa, Artificial Sequence
  source: /note="Description of Artificial Sequence: Synthetic peptide"
DLRRSML

SEQ ID NO: 1180 - protein, 7 aa, Artificial Sequence
  source: /note="Description of Artificial Sequence: Synthetic peptide"
DLRRTPF

SEQ ID NO: 1181 - protein, 7 aa, Artificial Sequence
  source: /note="Description of Artificial Sequence: Synthetic peptide"
DLSALRG

SEQ ID NO: 1182 - protein, 7 aa, Artificial Sequence
  source: /note="Description of Artificial Sequence: Synthetic peptide"
DLSGLTR

SEQ ID NO: 1183 - protein, 7 aa, Artificial Sequence
  source: /note="Description of Artificial Sequence: Synthetic peptide"
DLTHVGS

SEQ ID NO: 1184 - protein, 7 aa, Artificial Sequence
  source: /note="Description of Artificial Sequence: Synthetic peptide"
DLTRWPS

SEQ ID NO: 1185 - protein, 7 aa, Artificial Sequence
  source: /note="Description of Artificial Sequence: Synthetic peptide"
DLTTAPT

SEQ ID NO: 1186 - protein, 7 aa, Artificial Sequence
  source: /note="Description of Artificial Sequence: Synthetic peptide"
DLTVSYA

SEQ ID NO: 1187 - protein, 7 aa, Artificial Sequence
  source: /note="Description of Artificial Sequence: Synthetic peptide"
DLVETAS

SEQ ID NO: 1188 - protein, 7 aa, Artificial Sequence
  source: /note="Description of Artificial Sequence: Synthetic peptide"
DLVIPTR

SEQ ID NO: 1189 - protein, 7 aa, Artificial Sequence
  source: /note="Description of Artificial Sequence: Synthetic peptide"
DMDMQMA

SEQ ID NO: 1190 - protein, 7 aa, Artificial Sequence
  source: /note="Description of Artificial Sequence: Synthetic peptide"
DMGARQY

SEQ ID NO: 1191 - protein, 7 aa, Artificial Sequence
  source: /note="Description of Artificial Sequence: Synthetic peptide"
DMKPAVS

SEQ ID NO: 1192 - protein, 7 aa, Artificial Sequence
  source: /note="Description of Artificial Sequence: Synthetic peptide"
DMLKKFN

SEQ ID NO: 1193 - protein, 7 aa, Artificial Sequence
  source: /note="Description of Artificial Sequence: Synthetic peptide"
DMPFGPL

SEQ ID NO: 1194 - protein, 7 aa, Artificial Sequence
  source: /note="Description of Artificial Sequence: Synthetic peptide"
DMSARPS

SEQ ID NO: 1195 - protein, 7 aa, Artificial Sequence
  source: /note="Description of Artificial Sequence: Synthetic peptide"
DMSTRGM

SEQ ID NO: 1196 - protein, 7 aa, Artificial Sequence
  source: /note="Description of Artificial Sequence: Synthetic peptide"
DMTTGAV

SEQ ID NO: 1197 - protein, 7 aa, Artificial Sequence
  source: /note="Description of Artificial Sequence: Synthetic peptide"
DMVVPSD

SEQ ID NO: 1198 - protein, 7 aa, Artificial Sequence
  source: /note="Description of Artificial Sequence: Synthetic peptide"
DMYPTNR

SEQ ID NO: 1199 - protein, 7 aa, Artificial Sequence
  source: /note="Description of Artificial Sequence: Synthetic peptide"
DNASKLM

SEQ ID NO: 1200 - protein, 7 aa, Artificial Sequence
  source: /note="Description of Artificial Sequence: Synthetic peptide"
DNELLMS

SEQ ID NO: 1201 - protein, 7 aa, Artificial Sequence
  source: /note="Description of Artificial Sequence: Synthetic peptide"
DNESIPT

SEQ ID NO: 1202 - protein, 7 aa, Artificial Sequence
  source: /note="Description of Artificial Sequence: Synthetic peptide"
DNGSADN

SEQ ID NO: 1203 - protein, 7 aa, Artificial Sequence
  source: /note="Description of Artificial Sequence: Synthetic peptide"
DNLDGLC

SEQ ID NO: 1204 - protein, 7 aa, Artificial Sequence
  source: /note="Description of Artificial Sequence: Synthetic peptide"
DNLLGSR

SEQ ID NO: 1205 - protein, 7 aa, Artificial Sequence
  source: /note="Description of Artificial Sequence: Synthetic peptide"
DNLPTLA

SEQ ID NO: 1206 - protein, 7 aa, Artificial Sequence
  source: /note="Description of Artificial Sequence: Synthetic peptide"
DNLRPRP

SEQ ID NO: 1207 - protein, 7 aa, Artificial Sequence
  source: /note="Description of Artificial Sequence: Synthetic peptide"
DNLSHRM

SEQ ID NO: 1208 - protein, 7 aa, Artificial Sequence
  source: /note="Description of Artificial Sequence: Synthetic peptide"
DNPAMDR

SEQ ID NO: 1209 - protein, 7 aa, Artificial Sequence
  source: /note="Description of Artificial Sequence: Synthetic peptide"
DNPPTGV

SEQ ID NO: 1210 - protein, 7 aa, Artificial Sequence
  source: /note="Description of Artificial Sequence: Synthetic peptide"
DNQAAVP

SEQ ID NO: 1211 - protein, 7 aa, Artificial Sequence
  source: /note="Description of Artificial Sequence: Synthetic peptide"
DNRLNVV

SEQ ID NO: 1212 - protein, 7 aa, Artificial Sequence
  source: /note="Description of Artificial Sequence: Synthetic peptide"
DNRPRLM

SEQ ID NO: 1213 - protein, 7 aa, Artificial Sequence
  source: /note="Description of Artificial Sequence: Synthetic peptide"
DNRVSIP

SEQ ID NO: 1214 - protein, 7 aa, Artificial Sequence
  source: /note="Description of Artificial Sequence: Synthetic peptide"
DNSAFAV

SEQ ID NO: 1215 - protein, 7 aa, Artificial Sequence
  source: /note="Description of Artificial Sequence: Synthetic peptide"
DNTNWAK

SEQ ID NO: 1216 - protein, 7 aa, Artificial Sequence
  source: /note="Description of Artificial Sequence: Synthetic peptide"
DNTTRTA

SEQ ID NO: 1217 - protein, 7 aa, Artificial Sequence
  source: /note="Description of Artificial Sequence: Synthetic peptide"
DNVGIKS

SEQ ID NO: 1218 - protein, 7 aa, Artificial Sequence
  source: /note="Description of Artificial Sequence: Synthetic peptide"
DNYDPRP

SEQ ID NO: 1219 - protein, 7 aa, Artificial Sequence
  source: /note="Description of Artificial Sequence: Synthetic peptide"
DPAATLP

SEQ ID NO: 1220 - protein, 7 aa, Artificial Sequence
  source: /note="Description of Artificial Sequence: Synthetic peptide"
DPALQRA

SEQ ID NO: 1221 - protein, 7 aa, Artificial Sequence
  source: /note="Description of Artificial Sequence: Synthetic peptide"
DPAPTLP

SEQ ID NO: 1222 - protein, 7 aa, Artificial Sequence
  source: /note="Description of Artificial Sequence: Synthetic peptide"
DPCHRSL

SEQ ID NO: 1223 - protein, 7 aa, Artificial Sequence
  source: /note="Description of Artificial Sequence: Synthetic peptide"
DPDPASN

SEQ ID NO: 1224 - protein, 7 aa, Artificial Sequence
  source: /note="Description of Artificial Sequence: Synthetic peptide"
DPDPSLS

SEQ ID NO: 1225 - protein, 7 aa, Artificial Sequence
  source: /note="Description of Artificial Sequence: Synthetic peptide"
DPEVDPD

SEQ ID NO: 1226 - protein, 7 aa, Artificial Sequence
  source: /note="Description of Artificial Sequence: Synthetic peptide"
DPFTHNG

SEQ ID NO: 1227 - protein, 7 aa, Artificial Sequence
  source: /note="Description of Artificial Sequence: Synthetic peptide"
DPGHQRT

SEQ ID NO: 1228 - protein, 7 aa, Artificial Sequence
  source: /note="Description of Artificial Sequence: Synthetic peptide"
DPGLRTD

SEQ ID NO: 1229 - protein, 7 aa, Artificial Sequence
  source: /note="Description of Artificial Sequence: Synthetic peptide"
DPGMVPG

SEQ ID NO: 1230 - protein, 7 aa, Artificial Sequence
  source: /note="Description of Artificial Sequence: Synthetic peptide"
DPHGKYP

SEQ ID NO: 1231 - protein, 7 aa, Artificial Sequence
  source: /note="Description of Artificial Sequence: Synthetic peptide"
DPHLSSP

SEQ ID NO: 1232 - protein, 7 aa, Artificial Sequence
  source: /note="Description of Artificial Sequence: Synthetic peptide"
DPIAAPT

SEQ ID NO: 1233 - protein, 7 aa, Artificial Sequence
  source: /note="Description of Artificial Sequence: Synthetic peptide"
DPLAPMA

SEQ ID NO: 1234 - protein, 7 aa, Artificial Sequence
  source: /note="Description of Artificial Sequence: Synthetic peptide"
DPLYSSR

SEQ ID NO: 1235 - protein, 7 aa, Artificial Sequence
  source: /note="Description of Artificial Sequence: Synthetic peptide"
DPMARVG

SEQ ID NO: 1236 - protein, 7 aa, Artificial Sequence
  source: /note="Description of Artificial Sequence: Synthetic peptide"
DPNLNLA

SEQ ID NO: 1237 - protein, 7 aa, Artificial Sequence
  source: /note="Description of Artificial Sequence: Synthetic peptide"
DPPLMAN

SEQ ID NO: 1238 - protein, 7 aa, Artificial Sequence
  source: /note="Description of Artificial Sequence: Synthetic peptide"
DPPYAVS

SEQ ID NO: 1239 - protein, 7 aa, Artificial Sequence
  source: /note="Description of Artificial Sequence: Synthetic peptide"
DPPYDQR

SEQ ID NO: 1240 - protein, 7 aa, Artificial Sequence
  source: /note="Description of Artificial Sequence: Synthetic peptide"
DPQENHA

SEQ ID NO: 1241 - protein, 7 aa, Artificial Sequence
  source: /note="Description of Artificial Sequence: Synthetic peptide"
DPQRLVI

SEQ ID NO: 1242 - protein, 7 aa, Artificial Sequence
  source: /note="Description of Artificial Sequence: Synthetic peptide"
DPRFTLP

SEQ ID NO: 1243 - protein, 7 aa, Artificial Sequence
  source: /note="Description of Artificial Sequence: Synthetic peptide"
DPRKSSA

SEQ ID NO: 1244 - protein, 7 aa, Artificial Sequence
  source: /note="Description of Artificial Sequence: Synthetic peptide"
DPRLPSY

SEQ ID NO: 1245 - protein, 7 aa, Artificial Sequence
  source: /note="Description of Artificial Sequence: Synthetic peptide"
DPRPLAS

SEQ ID NO: 1246 - protein, 7 aa, Artificial Sequence
  source: /note="Description of Artificial Sequence: Synthetic peptide"
DPRSAVQ

SEQ ID NO: 1247 - protein, 7 aa, Artificial Sequence
  source: /note="Description of Artificial Sequence: Synthetic peptide"
DPRSSLT

SEQ ID NO: 1248 - protein, 7 aa, Artificial Sequence
  source: /note="Description of Artificial Sequence: Synthetic peptide"
DPRTEMV

SEQ ID NO: 1249 - protein, 7 aa, Artificial Sequence
  source: /note="Description of Artificial Sequence: Synthetic peptide"
DPSDDYV

SEQ ID NO: 1250 - protein, 7 aa, Artificial Sequence
  source: /note="Description of Artificial Sequence: Synthetic peptide"
DPSRRPS

SEQ ID NO: 1251 - protein, 7 aa, Artificial Sequence
  source: /note="Description of Artificial Sequence: Synthetic peptide"
DPSSLRL

SEQ ID NO: 1252 - protein, 7 aa, Artificial Sequence
  source: /note="Description of Artificial Sequence: Synthetic peptide"
DPSYDQH

SEQ ID NO: 1253 - protein, 7 aa, Artificial Sequence
  source: /note="Description of Artificial Sequence: Synthetic peptide"
DPTFSSE

SEQ ID NO: 1254 - protein, 7 aa, Artificial Sequence
  source: /note="Description of Artificial Sequence: Synthetic peptide"
DPTHRIV

SEQ ID NO: 1255 - protein, 7 aa, Artificial Sequence
  source: /note="Description of Artificial Sequence: Synthetic peptide"
DPTLHRP

SEQ ID NO: 1256 - protein, 7 aa, Artificial Sequence
  source: /note="Description of Artificial Sequence: Synthetic peptide"
DPTYRGG

SEQ ID NO: 1257 - protein, 7 aa, Artificial Sequence
  source: /note="Description of Artificial Sequence: Synthetic peptide"
DPVGRSL

SEQ ID NO: 1258 - protein, 7 aa, Artificial Sequence
  source: /note="Description of Artificial Sequence: Synthetic peptide"
DPVIRAA

SEQ ID NO: 1259 - protein, 7 aa, Artificial Sequence
  source: /note="Description of Artificial Sequence: Synthetic peptide"
DPVMPRR

SEQ ID NO: 1260 - protein, 7 aa, Artificial Sequence
  source: /note="Description of Artificial Sequence: Synthetic peptide"
DPVSSRA

SEQ ID NO: 1261 - protein, 7 aa, Artificial Sequence
  source: /note="Description of Artificial Sequence: Synthetic peptide"
DQAMSRN

SEQ ID NO: 1262 - protein, 7 aa, Artificial Sequence
  source: /note="Description of Artificial Sequence: Synthetic peptide"
DQDKSAS

SEQ ID NO: 1263 - protein, 7 aa, Artificial Sequence
  source: /note="Description of Artificial Sequence: Synthetic peptide"
DQDQGRA

SEQ ID NO: 1264 - protein, 7 aa, Artificial Sequence
  source: /note="Description of Artificial Sequence: Synthetic peptide"
DQFHPRP

SEQ ID NO: 1265 - protein, 7 aa, Artificial Sequence
  source: /note="Description of Artificial Sequence: Synthetic peptide"
DQLNPRG

SEQ ID NO: 1266 - protein, 7 aa, Artificial Sequence
  source: /note="Description of Artificial Sequence: Synthetic peptide"
DQLRSAT

SEQ ID NO: 1267 - protein, 7 aa, Artificial Sequence
  source: /note="Description of Artificial Sequence: Synthetic peptide"
DQPAYNA

SEQ ID NO: 1268 - protein, 7 aa, Artificial Sequence
  source: /note="Description of Artificial Sequence: Synthetic peptide"
DQQFEMG

SEQ ID NO: 1269 - protein, 7 aa, Artificial Sequence
  source: /note="Description of Artificial Sequence: Synthetic peptide"
DQQSFTR

SEQ ID NO: 1270 - protein, 7 aa, Artificial Sequence
  source: /note="Description of Artificial Sequence: Synthetic peptide"
DQRASSP

SEQ ID NO: 1271 - protein, 7 aa, Artificial Sequence
  source: /note="Description of Artificial Sequence: Synthetic peptide"
DQRLQMI

SEQ ID NO: 1272 - protein, 7 aa, Artificial Sequence
  source: /note="Description of Artificial Sequence: Synthetic peptide"
DQSGTVS

SEQ ID NO: 1273 - protein, 7 aa, Artificial Sequence
  source: /note="Description of Artificial Sequence: Synthetic peptide"
DQSPGMK

SEQ ID NO: 1274 - protein, 7 aa, Artificial Sequence
  source: /note="Description of Artificial Sequence: Synthetic peptide"
DRALSMG

SEQ ID NO: 1275 - protein, 7 aa, Artificial Sequence
  source: /note="Description of Artificial Sequence: Synthetic peptide"
DRDTSSF

SEQ ID NO: 1276 - protein, 7 aa, Artificial Sequence
  source: /note="Description of Artificial Sequence: Synthetic peptide"
DRERPYS

SEQ ID NO: 1277 - protein, 7 aa, Artificial Sequence
  source: /note="Description of Artificial Sequence: Synthetic peptide"
DRFNSYA

SEQ ID NO: 1278 - protein, 7 aa, Artificial Sequence
  source: /note="Description of Artificial Sequence: Synthetic peptide"
DRGCKDT

SEQ ID NO: 1279 - protein, 7 aa, Artificial Sequence
  source: /note="Description of Artificial Sequence: Synthetic peptide"
DRGGFND

SEQ ID NO: 1280 - protein, 7 aa, Artificial Sequence
  source: /note="Description of Artificial Sequence: Synthetic peptide"
DRGLRTA

SEQ ID NO: 1281 - protein, 7 aa, Artificial Sequence
  source: /note="Description of Artificial Sequence: Synthetic peptide"
DRGNGPR

SEQ ID NO: 1282 - protein, 7 aa, Artificial Sequence
  source: /note="Description of Artificial Sequence: Synthetic peptide"
DRGSDLS

SEQ ID NO: 1283 - protein, 7 aa, Artificial Sequence
  source: /note="Description of Artificial Sequence: Synthetic peptide"
DRGSLAR

SEQ ID NO: 1284 - protein, 7 aa, Artificial Sequence
  source: /note="Description of Artificial Sequence: Synthetic peptide"
DRIETQP

SEQ ID NO: 1285 - protein, 7 aa, Artificial Sequence
  source: /note="Description of Artificial Sequence: Synthetic peptide"
DRIMQEH

SEQ ID NO: 1286 - protein, 7 aa, Artificial Sequence
  source: /note="Description of Artificial Sequence: Synthetic peptide"
DRIQTAP

SEQ ID NO: 1287 - protein, 7 aa, Artificial Sequence
  source: /note="Description of Artificial Sequence: Synthetic peptide"
DRKKLNE

SEQ ID NO: 1288 - protein, 7 aa, Artificial Sequence
  source: /note="Description of Artificial Sequence: Synthetic peptide"
DRKLVTP

SEQ ID NO: 1289 - protein, 7 aa, Artificial Sequence
  source: /note="Description of Artificial Sequence: Synthetic peptide"
DRLATMS

SEQ ID NO: 1290 - protein, 7 aa, Artificial Sequence
  source: /note="Description of Artificial Sequence: Synthetic peptide"
DRLNQRG

SEQ ID NO: 1291 - protein, 7 aa, Artificial Sequence
  source: /note="Description of Artificial Sequence: Synthetic peptide"
DRMTNAV

SEQ ID NO: 1292 - protein, 7 aa, Artificial Sequence
  source: /note="Description of Artificial Sequence: Synthetic peptide"
DRNLVTR

SEQ ID NO: 1293 - protein, 7 aa, Artificial Sequence
  source: /note="Description of Artificial Sequence: Synthetic peptide"
DRNVKHV

SEQ ID NO: 1294 - protein, 7 aa, Artificial Sequence
  source: /note="Description of Artificial Sequence: Synthetic peptide"
DRPFEAP

SEQ ID NO: 1295 - protein, 7 aa, Artificial Sequence
  source: /note="Description of Artificial Sequence: Synthetic peptide"
DRPGGKP

SEQ ID NO: 1296 - protein, 7 aa, Artificial Sequence
  source: /note="Description of Artificial Sequence: Synthetic peptide"
DRPLHVV

SEQ ID NO: 1297 - protein, 7 aa, Artificial Sequence
  source: /note="Description of Artificial Sequence: Synthetic peptide"
DRPPCSR

SEQ ID NO: 1298 - protein, 7 aa, Artificial Sequence
  source: /note="Description of Artificial Sequence: Synthetic peptide"
DRPSSPL

SEQ ID NO: 1299 - protein, 7 aa, Artificial Sequence
  source: /note="Description of Artificial Sequence: Synthetic peptide"
DRQRPLS

SEQ ID NO: 1300 - protein, 7 aa, Artificial Sequence
  source: /note="Description of Artificial Sequence: Synthetic peptide"
DRQTLTR

SEQ ID NO: 1301 - protein, 7 aa, Artificial Sequence
  source: /note="Description of Artificial Sequence: Synthetic peptide"
DRRMGVA

SEQ ID NO: 1302 - protein, 7 aa, Artificial Sequence
  source: /note="Description of Artificial Sequence: Synthetic peptide"
DRRPAHD

SEQ ID NO: 1303 - protein, 7 aa, Artificial Sequence
  source: /note="Description of Artificial Sequence: Synthetic peptide"
DRRSEER

SEQ ID NO: 1304 - protein, 7 aa, Artificial Sequence
  source: /note="Description of Artificial Sequence: Synthetic peptide"
DRSAAII

SEQ ID NO: 1305 - protein, 7 aa, Artificial Sequence
  source: /note="Description of Artificial Sequence: Synthetic peptide"
DRSGPNE

SEQ ID NO: 1306 - protein, 7 aa, Artificial Sequence
  source: /note="Description of Artificial Sequence: Synthetic peptide"
DRSIALR

SEQ ID NO: 1307 - protein, 7 aa, Artificial Sequence
  source: /note="Description of Artificial Sequence: Synthetic peptide"
DRSLAFA

SEQ ID NO: 1308 - protein, 7 aa, Artificial Sequence
  source: /note="Description of Artificial Sequence: Synthetic peptide"
DRSLRSL

SEQ ID NO: 1309 - protein, 7 aa, Artificial Sequence
  source: /note="Description of Artificial Sequence: Synthetic peptide"
DRSNAGH

SEQ ID NO: 1310 - protein, 7 aa, Artificial Sequence
  source: /note="Description of Artificial Sequence: Synthetic peptide"
DRSQLTA

SEQ ID NO: 1311 - protein, 7 aa, Artificial Sequence
  source: /note="Description of Artificial Sequence: Synthetic peptide"
DRSQVLH

SEQ ID NO: 1312 - protein, 7 aa, Artificial Sequence
  source: /note="Description of Artificial Sequence: Synthetic peptide"
DRSVVLN

SEQ ID NO: 1313 - protein, 7 aa, Artificial Sequence
  source: /note="Description of Artificial Sequence: Synthetic peptide"
DRTARAP

SEQ ID NO: 1314 - protein, 7 aa, Artificial Sequence
  source: /note="Description of Artificial Sequence: Synthetic peptide"
DRTKSST

SEQ ID NO: 1315 - protein, 7 aa, Artificial Sequence
  source: /note="Description of Artificial Sequence: Synthetic peptide"
DRTTVPP

SEQ ID NO: 1316 - protein, 7 aa, Artificial Sequence
  source: /note="Description of Artificial Sequence: Synthetic peptide"
DRTVSLL

SEQ ID NO: 1317 - protein, 7 aa, Artificial Sequence
  source: /note="Description of Artificial Sequence: Synthetic peptide"
DRVHSSS

SEQ ID NO: 1318 - protein, 7 aa, Artificial Sequence
  source: /note="Description of Artificial Sequence: Synthetic peptide"
DRVSTSK

SEQ ID NO: 1319 - protein, 7 aa, Artificial Sequence
  source: /note="Description of Artificial Sequence: Synthetic peptide"
DRVTPEP

SEQ ID NO: 1320 - protein, 7 aa, Artificial Sequence
  source: /note="Description of Artificial Sequence: Synthetic peptide"
DRWTSSS

SEQ ID NO: 1321 - protein, 7 aa, Artificial Sequence
  source: /note="Description of Artificial Sequence: Synthetic peptide"
DSAPVAH

SEQ ID NO: 1322 - protein, 7 aa, Artificial Sequence
  source: /note="Description of Artificial Sequence: Synthetic peptide"
DSARSAI

SEQ ID NO: 1323 - protein, 7 aa, Artificial Sequence
  source: /note="Description of Artificial Sequence: Synthetic peptide"
DSDMMGE

SEQ ID NO: 1324 - protein, 7 aa, Artificial Sequence
  source: /note="Description of Artificial Sequence: Synthetic peptide"
DSDRDSK

SEQ ID NO: 1325 - protein, 7 aa, Artificial Sequence
  source: /note="Description of Artificial Sequence: Synthetic peptide"
DSDRLSA

SEQ ID NO: 1326 - protein, 7 aa, Artificial Sequence
  source: /note="Description of Artificial Sequence: Synthetic peptide"
DSEKTIP

SEQ ID NO: 1327 - protein, 7 aa, Artificial Sequence
  source: /note="Description of Artificial Sequence: Synthetic peptide"
DSEVPMY

SEQ ID NO: 1328 - protein, 7 aa, Artificial Sequence
  source: /note="Description of Artificial Sequence: Synthetic peptide"
DSEVSHP

SEQ ID NO: 1329 - protein, 7 aa, Artificial Sequence
  source: /note="Description of Artificial Sequence: Synthetic peptide"
DSFGRPQ

SEQ ID NO: 1330 - protein, 7 aa, Artificial Sequence
  source: /note="Description of Artificial Sequence: Synthetic peptide"
DSGASLG

SEQ ID NO: 1331 - protein, 7 aa, Artificial Sequence
  source: /note="Description of Artificial Sequence: Synthetic peptide"
DSGDPAR

SEQ ID NO: 1332 - protein, 7 aa, Artificial Sequence
  source: /note="Description of Artificial Sequence: Synthetic peptide"
DSGIGYP

SEQ ID NO: 1333 - protein, 7 aa, Artificial Sequence
  source: /note="Description of Artificial Sequence: Synthetic peptide"
DSGSNGL

SEQ ID NO: 1334 - protein, 7 aa, Artificial Sequence
  source: /note="Description of Artificial Sequence: Synthetic peptide"
DSHYRVP

SEQ ID NO: 1335 - protein, 7 aa, Artificial Sequence
  source: /note="Description of Artificial Sequence: Synthetic peptide"
DSIDPKF

SEQ ID NO: 1336 - protein, 7 aa, Artificial Sequence
  source: /note="Description of Artificial Sequence: Synthetic peptide"
DSIGPGT

SEQ ID NO: 1337 - protein, 7 aa, Artificial Sequence
  source: /note="Description of Artificial Sequence: Synthetic peptide"
DSIHIMA

SEQ ID NO: 1338 - protein, 7 aa, Artificial Sequence
  source: /note="Description of Artificial Sequence: Synthetic peptide"
DSISSRA

SEQ ID NO: 1339 - protein, 7 aa, Artificial Sequence
  source: /note="Description of Artificial Sequence: Synthetic peptide"
DSITRAS

SEQ ID NO: 1340 - protein, 7 aa, Artificial Sequence
  source: /note="Description of Artificial Sequence: Synthetic peptide"
DSITTRI

SEQ ID NO: 1341 - protein, 7 aa, Artificial Sequence
  source: /note="Description of Artificial Sequence: Synthetic peptide"
DSKRTIT

SEQ ID NO: 1342 - protein, 7 aa, Artificial Sequence
  source: /note="Description of Artificial Sequence: Synthetic peptide"
DSLASRP

SEQ ID NO: 1343 - protein, 7 aa, Artificial Sequence
  source: /note="Description of Artificial Sequence: Synthetic peptide"
DSLGKRS

SEQ ID NO: 1344 - protein, 7 aa, Artificial Sequence
  source: /note="Description of Artificial Sequence: Synthetic peptide"
DSLKLSS

SEQ ID NO: 1345 - protein, 7 aa, Artificial Sequence
  source: /note="Description of Artificial Sequence: Synthetic peptide"
DSMELYS

SEQ ID NO: 1346 - protein, 7 aa, Artificial Sequence
  source: /note="Description of Artificial Sequence: Synthetic peptide"
DSMGASG

SEQ ID NO: 1347 - protein, 7 aa, Artificial Sequence
  source: /note="Description of Artificial Sequence: Synthetic peptide"
DSNIPPR

SEQ ID NO: 1348 - protein, 7 aa, Artificial Sequence
  source: /note="Description of Artificial Sequence: Synthetic peptide"
DSNNEKS

SEQ ID NO: 1349 - protein, 7 aa, Artificial Sequence
  source: /note="Description of Artificial Sequence: Synthetic peptide"
DSNPSLS

SEQ ID NO: 1350 - protein, 7 aa, Artificial Sequence
  source: /note="Description of Artificial Sequence: Synthetic peptide"
DSNRLVD

SEQ ID NO: 1351 - protein, 7 aa, Artificial Sequence
  source: /note="Description of Artificial Sequence: Synthetic peptide"
DSPKYSH

SEQ ID NO: 1352 - protein, 7 aa, Artificial Sequence
  source: /note="Description of Artificial Sequence: Synthetic peptide"
DSPSFVL

SEQ ID NO: 1353 - protein, 7 aa, Artificial Sequence
  source: /note="Description of Artificial Sequence: Synthetic peptide"
DSQIYVS

SEQ ID NO: 1354 - protein, 7 aa, Artificial Sequence
  source: /note="Description of Artificial Sequence: Synthetic peptide"
DSQLNAP

SEQ ID NO: 1355 - protein, 7 aa, Artificial Sequence
  source: /note="Description of Artificial Sequence: Synthetic peptide"
DSQMRTM

SEQ ID NO: 1356 - protein, 7 aa, Artificial Sequence
  source: /note="Description of Artificial Sequence: Synthetic peptide"
DSRIAAL

SEQ ID NO: 1357 - protein, 7 aa, Artificial Sequence
  source: /note="Description of Artificial Sequence: Synthetic peptide"
DSRLLSG

SEQ ID NO: 1358 - protein, 7 aa, Artificial Sequence
  source: /note="Description of Artificial Sequence: Synthetic peptide"
DSRMAAS

SEQ ID NO: 1359 - protein, 7 aa, Artificial Sequence
  source: /note="Description of Artificial Sequence: Synthetic peptide"
DSRNAVT

SEQ ID NO: 1360 - protein, 7 aa, Artificial Sequence
  source: /note="Description of Artificial Sequence: Synthetic peptide"
DSRPLSV

SEQ ID NO: 1361 - protein, 7 aa, Artificial Sequence
  source: /note="Description of Artificial Sequence: Synthetic peptide"
DSRQGRV

SEQ ID NO: 1362 - protein, 7 aa, Artificial Sequence
  source: /note="Description of Artificial Sequence: Synthetic peptide"
DSRSLRA

SEQ ID NO: 1363 - protein, 7 aa, Artificial Sequence
  source: /note="Description of Artificial Sequence: Synthetic peptide"
DSSAKES

SEQ ID NO: 1364 - protein, 7 aa, Artificial Sequence
  source: /note="Description of Artificial Sequence: Synthetic peptide"
DSSEYSP

SEQ ID NO: 1365 - protein, 7 aa, Artificial Sequence
  source: /note="Description of Artificial Sequence: Synthetic peptide"
DSSHTLQ

SEQ ID NO: 1366 - protein, 7 aa, Artificial Sequence
  source: /note="Description of Artificial Sequence: Synthetic peptide"
DSSHTMM

SEQ ID NO: 1367 - protein, 7 aa, Artificial Sequence
  source: /note="Description of Artificial Sequence: Synthetic peptide"
DSSHYPG

SEQ ID NO: 1368 - protein, 7 aa, Artificial Sequence
  source: /note="Description of Artificial Sequence: Synthetic peptide"
DSSPLVR

SEQ ID NO: 1369 - protein, 7 aa, Artificial Sequence
  source: /note="Description of Artificial Sequence: Synthetic peptide"
DSTPEEG

SEQ ID NO: 1370 - protein, 7 aa, Artificial Sequence
  source: /note="Description of Artificial Sequence: Synthetic peptide"
DSTQFPR

SEQ ID NO: 1371 - protein, 7 aa, Artificial Sequence
  source: /note="Description of Artificial Sequence: Synthetic peptide"
DSVHLGR

SEQ ID NO: 1372 - protein, 7 aa, Artificial Sequence
  source: /note="Description of Artificial Sequence: Synthetic peptide"
DSVKASQ

SEQ ID NO: 1373 - protein, 7 aa, Artificial Sequence
  source: /note="Description of Artificial Sequence: Synthetic peptide"
DTAAKDS

SEQ ID NO: 1374 - protein, 7 aa, Artificial Sequence
  source: /note="Description of Artificial Sequence: Synthetic peptide"
DTASRLA

SEQ ID NO: 1375 - protein, 7 aa, Artificial Sequence
  source: /note="Description of Artificial Sequence: Synthetic peptide"
DTDGQRA

SEQ ID NO: 1376 - protein, 7 aa, Artificial Sequence
  source: /note="Description of Artificial Sequence: Synthetic peptide"
DTHAYDG

SEQ ID NO: 1377 - protein, 7 aa, Artificial Sequence
  source: /note="Description of Artificial Sequence: Synthetic peptide"
DTHIIAS

SEQ ID NO: 1378 - protein, 7 aa, Artificial Sequence
  source: /note="Description of Artificial Sequence: Synthetic peptide"
DTHRSER

SEQ ID NO: 1379 - protein, 7 aa, Artificial Sequence
  source: /note="Description of Artificial Sequence: Synthetic peptide"
DTHVIAS

SEQ ID NO: 1380 - protein, 7 aa, Artificial Sequence
  source: /note="Description of Artificial Sequence: Synthetic peptide"
DTIAHAP

SEQ ID NO: 1381 - protein, 7 aa, Artificial Sequence
  source: /note="Description of Artificial Sequence: Synthetic peptide"
DTLALSC

SEQ ID NO: 1382 - protein, 7 aa, Artificial Sequence
  source: /note="Description of Artificial Sequence: Synthetic peptide"
DTLANSA

SEQ ID NO: 1383 - protein, 7 aa, Artificial Sequence
  source: /note="Description of Artificial Sequence: Synthetic peptide"
DTLGLEP

SEQ ID NO: 1384 - protein, 7 aa, Artificial Sequence
  source: /note="Description of Artificial Sequence: Synthetic peptide"
DTLMIRG

SEQ ID NO: 1385 - protein, 7 aa, Artificial Sequence
  source: /note="Description of Artificial Sequence: Synthetic peptide"
DTLSTTR

SEQ ID NO: 1386 - protein, 7 aa, Artificial Sequence
  source: /note="Description of Artificial Sequence: Synthetic peptide"
DTNMLHV

SEQ ID NO: 1387 - protein, 7 aa, Artificial Sequence
  source: /note="Description of Artificial Sequence: Synthetic peptide"
DTPDALR

SEQ ID NO: 1388 - protein, 7 aa, Artificial Sequence
  source: /note="Description of Artificial Sequence: Synthetic peptide"
DTPHLSL

SEQ ID NO: 1389 - protein, 7 aa, Artificial Sequence
  source: /note="Description of Artificial Sequence: Synthetic peptide"
DTPLELA

SEQ ID NO: 1390 - protein, 7 aa, Artificial Sequence
  source: /note="Description of Artificial Sequence: Synthetic peptide"
DTPMPKI

SEQ ID NO: 1391 - protein, 7 aa, Artificial Sequence
  source: /note="Description of Artificial Sequence: Synthetic peptide"
DTPNDTA

SEQ ID NO: 1392 - protein, 7 aa, Artificial Sequence
  source: /note="Description of Artificial Sequence: Synthetic peptide"
DTQHLKP

SEQ ID NO: 1393 - protein, 7 aa, Artificial Sequence
  source: /note="Description of Artificial Sequence: Synthetic peptide"
DTQLPNP

SEQ ID NO: 1394 - protein, 7 aa, Artificial Sequence
  source: /note="Description of Artificial Sequence: Synthetic peptide"
DTQLTLA

SEQ ID NO: 1395 - protein, 7 aa, Artificial Sequence
  source: /note="Description of Artificial Sequence: Synthetic peptide"
DTQSVSL

SEQ ID NO: 1396 - protein, 7 aa, Artificial Sequence
  source: /note="Description of Artificial Sequence: Synthetic peptide"
DTRAFTG

SEQ ID NO: 1397 - protein, 7 aa, Artificial Sequence
  source: /note="Description of Artificial Sequence: Synthetic peptide"
DTRHSDL

SEQ ID NO: 1398 - protein, 7 aa, Artificial Sequence
  source: /note="Description of Artificial Sequence: Synthetic peptide"
DTRRECD

SEQ ID NO: 1399 - protein, 7 aa, Artificial Sequence
  source: /note="Description of Artificial Sequence: Synthetic peptide"
DTSRTSL

SEQ ID NO: 1400 - protein, 7 aa, Artificial Sequence
  source: /note="Description of Artificial Sequence: Synthetic peptide"
DTSSRMT

SEQ ID NO: 1401 - protein, 7 aa, Artificial Sequence
  source: /note="Description of Artificial Sequence: Synthetic peptide"
DTSWKST

SEQ ID NO: 1402 - protein, 7 aa, Artificial Sequence
  source: /note="Description of Artificial Sequence: Synthetic peptide"
DTTERPW

SEQ ID NO: 1403 - protein, 7 aa, Artificial Sequence
  source: /note="Description of Artificial Sequence: Synthetic peptide"
DTTGRYL

SEQ ID NO: 1404 - protein, 7 aa, Artificial Sequence
  source: /note="Description of Artificial Sequence: Synthetic peptide"
DTTLLRG

SEQ ID NO: 1405 - protein, 7 aa, Artificial Sequence
  source: /note="Description of Artificial Sequence: Synthetic peptide"
DTTPIVR

SEQ ID NO: 1406 - protein, 7 aa, Artificial Sequence
  source: /note="Description of Artificial Sequence: Synthetic peptide"
DTYAIAI

SEQ ID NO: 1407 - protein, 7 aa, Artificial Sequence
  source: /note="Description of Artificial Sequence: Synthetic peptide"
DTYNTPA

SEQ ID NO: 1408 - protein, 7 aa, Artificial Sequence
  source: /note="Description of Artificial Sequence: Synthetic peptide"
DVASRSL

SEQ ID NO: 1409 - protein, 7 aa, Artificial Sequence
  source: /note="Description of Artificial Sequence: Synthetic peptide"
DVASSRL

SEQ ID NO: 1410 - protein, 7 aa, Artificial Sequence
  source: /note="Description of Artificial Sequence: Synthetic peptide"
DVDDTMW

SEQ ID NO: 1411 - protein, 7 aa, Artificial Sequence
  source: /note="Description of Artificial Sequence: Synthetic peptide"
DVDLLPT

SEQ ID NO: 1412 - protein, 7 aa, Artificial Sequence
  source: /note="Description of Artificial Sequence: Synthetic peptide"
DVDRLNT

SEQ ID NO: 1413 - protein, 7 aa, Artificial Sequence
  source: /note="Description of Artificial Sequence: Synthetic peptide"
DVDSHHT

SEQ ID NO: 1414 - protein, 7 aa, Artificial Sequence
  source: /note="Description of Artificial Sequence: Synthetic peptide"
DVDVRHG

SEQ ID NO: 1415 - protein, 7 aa, Artificial Sequence
  source: /note="Description of Artificial Sequence: Synthetic peptide"
DVEPLQM

SEQ ID NO: 1416 - protein, 7 aa, Artificial Sequence
  source: /note="Description of Artificial Sequence: Synthetic peptide"
DVFRTQP

SEQ ID NO: 1417 - protein, 7 aa, Artificial Sequence
  source: /note="Description of Artificial Sequence: Synthetic peptide"
DVGTYGR

SEQ ID NO: 1418 - protein, 7 aa, Artificial Sequence
  source: /note="Description of Artificial Sequence: Synthetic peptide"
DVKTNVY

SEQ ID NO: 1419 - protein, 7 aa, Artificial Sequence
  source: /note="Description of Artificial Sequence: Synthetic peptide"
DVLFSKN

SEQ ID NO: 1420 - protein, 7 aa, Artificial Sequence
  source: /note="Description of Artificial Sequence: Synthetic peptide"
DVLGKHA

SEQ ID NO: 1421 - protein, 7 aa, Artificial Sequence
  source: /note="Description of Artificial Sequence: Synthetic peptide"
DVLKTDF

SEQ ID NO: 1422 - protein, 7 aa, Artificial Sequence
  source: /note="Description of Artificial Sequence: Synthetic peptide"
DVLNSTD

SEQ ID NO: 1423 - protein, 7 aa, Artificial Sequence
  source: /note="Description of Artificial Sequence: Synthetic peptide"
DVMSQLL

SEQ ID NO: 1424 - protein, 7 aa, Artificial Sequence
  source: /note="Description of Artificial Sequence: Synthetic peptide"
DVPNAPC

SEQ ID NO: 1425 - protein, 7 aa, Artificial Sequence
  source: /note="Description of Artificial Sequence: Synthetic peptide"
DVPNPTG

SEQ ID NO: 1426 - protein, 7 aa, Artificial Sequence
  source: /note="Description of Artificial Sequence: Synthetic peptide"
DVPNTMT

SEQ ID NO: 1427 - protein, 7 aa, Artificial Sequence
  source: /note="Description of Artificial Sequence: Synthetic peptide"
DVPYSLE

SEQ ID NO: 1428 - protein, 7 aa, Artificial Sequence
  source: /note="Description of Artificial Sequence: Synthetic peptide"
DVQMHKH

SEQ ID NO: 1429 - protein, 7 aa, Artificial Sequence
  source: /note="Description of Artificial Sequence: Synthetic peptide"
DVRNTRL

SEQ ID NO: 1430 - protein, 7 aa, Artificial Sequence
  source: /note="Description of Artificial Sequence: Synthetic peptide"
DVRQAYF

SEQ ID NO: 1431 - protein, 7 aa, Artificial Sequence
  source: /note="Description of Artificial Sequence: Synthetic peptide"
DVRVGHI

SEQ ID NO: 1432 - protein, 7 aa, Artificial Sequence
  source: /note="Description of Artificial Sequence: Synthetic peptide"
DVSGTIG

SEQ ID NO: 1433 - protein, 7 aa, Artificial Sequence
  source: /note="Description of Artificial Sequence: Synthetic peptide"
DVSLRVT

SEQ ID NO: 1434 - protein, 7 aa, Artificial Sequence
  source: /note="Description of Artificial Sequence: Synthetic peptide"
DVSSPLI

SEQ ID NO: 1435 - protein, 7 aa, Artificial Sequence
  source: /note="Description of Artificial Sequence: Synthetic peptide"
DVSVSDV

SEQ ID NO: 1436 - protein, 7 aa, Artificial Sequence
  source: /note="Description of Artificial Sequence: Synthetic peptide"
DVTVGSS

SEQ ID NO: 1437 - protein, 7 aa, Artificial Sequence
  source: /note="Description of Artificial Sequence: Synthetic peptide"
DVVAGPP

SEQ ID NO: 1438 - protein, 7 aa, Artificial Sequence
  source: /note="Description of Artificial Sequence: Synthetic peptide"
DVVNSLN

SEQ ID NO: 1439 - protein, 7 aa, Artificial Sequence
  source: /note="Description of Artificial Sequence: Synthetic peptide"
DVVPRSA

SEQ ID NO: 1440 - protein, 7 aa, Artificial Sequence
  source: /note="Description of Artificial Sequence: Synthetic peptide"
DWGPKQR

SEQ ID NO: 1441 - protein, 7 aa, Artificial Sequence
  source: /note="Description of Artificial Sequence: Synthetic peptide"
DWKPNHE

SEQ ID NO: 1442 - protein, 7 aa, Artificial Sequence
  source: /note="Description of Artificial Sequence: Synthetic peptide"
DWKQTTA

SEQ ID NO: 1443 - protein, 7 aa, Artificial Sequence
  source: /note="Description of Artificial Sequence: Synthetic peptide"
DWQRHGP

SEQ ID NO: 1444 - protein, 7 aa, Artificial Sequence
  source: /note="Description of Artificial Sequence: Synthetic peptide"
DWTHIDK

SEQ ID NO: 1445 - protein, 7 aa, Artificial Sequence
  source: /note="Description of Artificial Sequence: Synthetic peptide"
DWTPRTT

SEQ ID NO: 1446 - protein, 7 aa, Artificial Sequence
  source: /note="Description of Artificial Sequence: Synthetic peptide"
DYAIGKT

SEQ ID NO: 1447 - protein, 7 aa, Artificial Sequence
  source: /note="Description of Artificial Sequence: Synthetic peptide"
DYESFSR

SEQ ID NO: 1448 - protein, 7 aa, Artificial Sequence
  source: /note="Description of Artificial Sequence: Synthetic peptide"
DYGPEII

SEQ ID NO: 1449 - protein, 7 aa, Artificial Sequence
  source: /note="Description of Artificial Sequence: Synthetic peptide"
DYGQLSN

SEQ ID NO: 1450 - protein, 7 aa, Artificial Sequence
  source: /note="Description of Artificial Sequence: Synthetic peptide"
DYHQMHS

SEQ ID NO: 1451 - protein, 7 aa, Artificial Sequence
  source: /note="Description of Artificial Sequence: Synthetic peptide"
DYHRAPG

SEQ ID NO: 1452 - protein, 7 aa, Artificial Sequence
  source: /note="Description of Artificial Sequence: Synthetic peptide"
DYPPEVL

SEQ ID NO: 1453 - protein, 7 aa, Artificial Sequence
  source: /note="Description of Artificial Sequence: Synthetic peptide"
DYREYTR

SEQ ID NO: 1454 - protein, 7 aa, Artificial Sequence
  source: /note="Description of Artificial Sequence: Synthetic peptide"
DYRFADS

SEQ ID NO: 1455 - protein, 7 aa, Artificial Sequence
  source: /note="Description of Artificial Sequence: Synthetic peptide"
DYRITNS

SEQ ID NO: 1456 - protein, 7 aa, Artificial Sequence
  source: /note="Description of Artificial Sequence: Synthetic peptide"
DYRLLPE

SEQ ID NO: 1457 - protein, 7 aa, Artificial Sequence
  source: /note="Description of Artificial Sequence: Synthetic peptide"
DYRQIDQ

SEQ ID NO: 1458 - protein, 7 aa, Artificial Sequence
  source: /note="Description of Artificial Sequence: Synthetic peptide"
DYSEMSK

SEQ ID NO: 1459 - protein, 7 aa, Artificial Sequence
  source: /note="Description of Artificial Sequence: Synthetic peptide"
DYSSARA

SEQ ID NO: 1460 - protein, 7 aa, Artificial Sequence
  source: /note="Description of Artificial Sequence: Synthetic peptide"
DYSSSMR

SEQ ID NO: 1461 - protein, 7 aa, Artificial Sequence
  source: /note="Description of Artificial Sequence: Synthetic peptide"
DYTLTPS

SEQ ID NO: 1462 - protein, 7 aa, Artificial Sequence
  source: /note="Description of Artificial Sequence: Synthetic peptide"
DYVPVEL

SEQ ID NO: 1463 - protein, 7 aa, Artificial Sequence
  source: /note="Description of Artificial Sequence: Synthetic peptide"
EAAHPGM

SEQ ID NO: 1464 - protein, 7 aa, Artificial Sequence
  source: /note="Description of Artificial Sequence: Synthetic peptide"
EAAMTRE

SEQ ID NO: 1465 - protein, 7 aa, Artificial Sequence
  source: /note="Description of Artificial Sequence: Synthetic peptide"
EAAPIPR

SEQ ID NO: 1466 - protein, 7 aa, Artificial Sequence
  source: /note="Description of Artificial Sequence: Synthetic peptide"
EAASRHD

SEQ ID NO: 1467 - protein, 7 aa, Artificial Sequence
  source: /note="Description of Artificial Sequence: Synthetic peptide"
EAASSPK

SEQ ID NO: 1468 - protein, 7 aa, Artificial Sequence
  source: /note="Description of Artificial Sequence: Synthetic peptide"
EAATLTT

SEQ ID NO: 1469 - protein, 7 aa, Artificial Sequence
  source: /note="Description of Artificial Sequence: Synthetic peptide"
EAFHTSS

SEQ ID NO: 1470 - protein, 7 aa, Artificial Sequence
  source: /note="Description of Artificial Sequence: Synthetic peptide"
EAFSGRI

SEQ ID NO: 1471 - protein, 7 aa, Artificial Sequence
  source: /note="Description of Artificial Sequence: Synthetic peptide"
EAKTNRT

SEQ ID NO: 1472 - protein, 7 aa, Artificial Sequence
  source: /note="Description of Artificial Sequence: Synthetic peptide"
EALAVRP

SEQ ID NO: 1473 - protein, 7 aa, Artificial Sequence
  source: /note="Description of Artificial Sequence: Synthetic peptide"
EALRGPI

SEQ ID NO: 1474 - protein, 7 aa, Artificial Sequence
  source: /note="Description of Artificial Sequence: Synthetic peptide"
EAMHSRA

SEQ ID NO: 1475 - protein, 7 aa, Artificial Sequence
  source: /note="Description of Artificial Sequence: Synthetic peptide"
EANDETK

SEQ ID NO: 1476 - protein, 7 aa, Artificial Sequence
  source: /note="Description of Artificial Sequence: Synthetic peptide"
EANRSPM

SEQ ID NO: 1477 - protein, 7 aa, Artificial Sequence
  source: /note="Description of Artificial Sequence: Synthetic peptide"
EAQRAAP

SEQ ID NO: 1478 - protein, 7 aa, Artificial Sequence
  source: /note="Description of Artificial Sequence: Synthetic peptide"
EARHVYA

SEQ ID NO: 1479 - protein, 7 aa, Artificial Sequence
  source: /note="Description of Artificial Sequence: Synthetic peptide"
EARYESG

SEQ ID NO: 1480 - protein, 7 aa, Artificial Sequence
  source: /note="Description of Artificial Sequence: Synthetic peptide"
EARYVHV

SEQ ID NO: 1481 - protein, 7 aa, Artificial Sequence
  source: /note="Description of Artificial Sequence: Synthetic peptide"
EASHFTM

SEQ ID NO: 1482 - protein, 7 aa, Artificial Sequence
  source: /note="Description of Artificial Sequence: Synthetic peptide"
EASLAAK

SEQ ID NO: 1483 - protein, 7 aa, Artificial Sequence
  source: /note="Description of Artificial Sequence: Synthetic peptide"
EASNAIA

SEQ ID NO: 1484 - protein, 7 aa, Artificial Sequence
  source: /note="Description of Artificial Sequence: Synthetic peptide"
EASRVTV

SEQ ID NO: 1485 - protein, 7 aa, Artificial Sequence
  source: /note="Description of Artificial Sequence: Synthetic peptide"
EASSMHS

SEQ ID NO: 1486 - protein, 7 aa, Artificial Sequence
  source: /note="Description of Artificial Sequence: Synthetic peptide"
EASVLTR

SEQ ID NO: 1487 - protein, 7 aa, Artificial Sequence
  source: /note="Description of Artificial Sequence: Synthetic peptide"
EASYMPP

SEQ ID NO: 1488 - protein, 7 aa, Artificial Sequence
  source: /note="Description of Artificial Sequence: Synthetic peptide"
EATMVKD

SEQ ID NO: 1489 - protein, 7 aa, Artificial Sequence
  source: /note="Description of Artificial Sequence: Synthetic peptide"
EATNRHP

SEQ ID NO: 1490 - protein, 7 aa, Artificial Sequence
  source: /note="Description of Artificial Sequence: Synthetic peptide"
EATPPTI

SEQ ID NO: 1491 - protein, 7 aa, Artificial Sequence
  source: /note="Description of Artificial Sequence: Synthetic peptide"
EATTNFL

SEQ ID NO: 1492 - protein, 7 aa, Artificial Sequence
  source: /note="Description of Artificial Sequence: Synthetic peptide"
EATTPMP

SEQ ID NO: 1493 - protein, 7 aa, Artificial Sequence
  source: /note="Description of Artificial Sequence: Synthetic peptide"
EAVTPRH

SEQ ID NO: 1494 - protein, 7 aa, Artificial Sequence
  source: /note="Description of Artificial Sequence: Synthetic peptide"
EAVTVKM

SEQ ID NO: 1495 - protein, 7 aa, Artificial Sequence
  source: /note="Description of Artificial Sequence: Synthetic peptide"
EDAEREY

SEQ ID NO: 1496 - protein, 7 aa, Artificial Sequence
  source: /note="Description of Artificial Sequence: Synthetic peptide"
EDAPPSR

SEQ ID NO: 1497 - protein, 7 aa, Artificial Sequence
  source: /note="Description of Artificial Sequence: Synthetic peptide"
EDIRMPS

SEQ ID NO: 1498 - protein, 7 aa, Artificial Sequence
  source: /note="Description of Artificial Sequence: Synthetic peptide"
EDKQHLS

SEQ ID NO: 1499 - protein, 7 aa, Artificial Sequence
  source: /note="Description of Artificial Sequence: Synthetic peptide"
EDLPGKM

SEQ ID NO: 1500 - protein, 7 aa, Artificial Sequence
  source: /note="Description of Artificial Sequence: Synthetic peptide"
EDMPQLG

SEQ ID NO: 1501 - protein, 7 aa, Artificial Sequence
  source: /note="Description of Artificial Sequence: Synthetic peptide"
EDPLGQM

SEQ ID NO: 1502 - protein, 7 aa, Artificial Sequence
  source: /note="Description of Artificial Sequence: Synthetic peptide"
EDSHFAP

SEQ ID NO: 1503 - protein, 7 aa, Artificial Sequence
  source: /note="Description of Artificial Sequence: Synthetic peptide"
EEAMYPF

SEQ ID NO: 1504 - protein, 7 aa, Artificial Sequence
  source: /note="Description of Artificial Sequence: Synthetic peptide"
EEASLSL

SEQ ID NO: 1505 - protein, 7 aa, Artificial Sequence
  source: /note="Description of Artificial Sequence: Synthetic peptide"
EELAKAD

SEQ ID NO: 1506 - protein, 7 aa, Artificial Sequence
  source: /note="Description of Artificial Sequence: Synthetic peptide"
EELRRHV

SEQ ID NO: 1507 - protein, 7 aa, Artificial Sequence
  source: /note="Description of Artificial Sequence: Synthetic peptide"
EENLQRT

SEQ ID NO: 1508 - protein, 7 aa, Artificial Sequence
  source: /note="Description of Artificial Sequence: Synthetic peptide"
EESGRVA

SEQ ID NO: 1509 - protein, 7 aa, Artificial Sequence
  source: /note="Description of Artificial Sequence: Synthetic peptide"
EESKRSA

SEQ ID NO: 1510 - protein, 7 aa, Artificial Sequence
  source: /note="Description of Artificial Sequence: Synthetic peptide"
EESPESI

SEQ ID NO: 1511 - protein, 7 aa, Artificial Sequence
  source: /note="Description of Artificial Sequence: Synthetic peptide"
EETRKPL

SEQ ID NO: 1512 - protein, 7 aa, Artificial Sequence
  source: /note="Description of Artificial Sequence: Synthetic peptide"
EETWHRL

SEQ ID NO: 1513 - protein, 7 aa, Artificial Sequence
  source: /note="Description of Artificial Sequence: Synthetic peptide"
EEYVERI

SEQ ID NO: 1514 - protein, 7 aa, Artificial Sequence
  source: /note="Description of Artificial Sequence: Synthetic peptide"
EFDQRNI

SEQ ID NO: 1515 - protein, 7 aa, Artificial Sequence
  source: /note="Description of Artificial Sequence: Synthetic peptide"
EFERRTT

SEQ ID NO: 1516 - protein, 7 aa, Artificial Sequence
  source: /note="Description of Artificial Sequence: Synthetic peptide"
EFEVCCA

SEQ ID NO: 1517 - protein, 7 aa, Artificial Sequence
  source: /note="Description of Artificial Sequence: Synthetic peptide"
EFGMTVP

SEQ ID NO: 1518 - protein, 7 aa, Artificial Sequence
  source: /note="Description of Artificial Sequence: Synthetic peptide"
EFIEMRP

SEQ ID NO: 1519 - protein, 7 aa, Artificial Sequence
  source: /note="Description of Artificial Sequence: Synthetic peptide"
EFNGKND

SEQ ID NO: 1520 - protein, 7 aa, Artificial Sequence
  source: /note="Description of Artificial Sequence: Synthetic peptide"
EFNKSGA

SEQ ID NO: 1521 - protein, 7 aa, Artificial Sequence
  source: /note="Description of Artificial Sequence: Synthetic peptide"
EFNPALS

SEQ ID NO: 1522 - protein, 7 aa, Artificial Sequence
  source: /note="Description of Artificial Sequence: Synthetic peptide"
EFPSLDD

SEQ ID NO: 1523 - protein, 7 aa, Artificial Sequence
  source: /note="Description of Artificial Sequence: Synthetic peptide"
EFPTSLP

SEQ ID NO: 1524 - protein, 7 aa, Artificial Sequence
  source: /note="Description of Artificial Sequence: Synthetic peptide"
EFQKKSS

SEQ ID NO: 1525 - protein, 7 aa, Artificial Sequence
  source: /note="Description of Artificial Sequence: Synthetic peptide"
EFQSLHV

SEQ ID NO: 1526 - protein, 7 aa, Artificial Sequence
  source: /note="Description of Artificial Sequence: Synthetic peptide"
EFRLSAV

SEQ ID NO: 1527 - protein, 7 aa, Artificial Sequence
  source: /note="Description of Artificial Sequence: Synthetic peptide"
EFRSTGT

SEQ ID NO: 1528 - protein, 7 aa, Artificial Sequence
  source: /note="Description of Artificial Sequence: Synthetic peptide"
EFSQMTE

SEQ ID NO: 1529 - protein, 7 aa, Artificial Sequence
  source: /note="Description of Artificial Sequence: Synthetic peptide"
EFSRMNT

SEQ ID NO: 1530 - protein, 7 aa, Artificial Sequence
  source: /note="Description of Artificial Sequence: Synthetic peptide"
EFSTSLS

SEQ ID NO: 1531 - protein, 7 aa, Artificial Sequence
  source: /note="Description of Artificial Sequence: Synthetic peptide"
EFTHNKA

SEQ ID NO: 1532 - protein, 7 aa, Artificial Sequence
  source: /note="Description of Artificial Sequence: Synthetic peptide"
EFTSEDL

SEQ ID NO: 1533 - protein, 7 aa, Artificial Sequence
  source: /note="Description of Artificial Sequence: Synthetic peptide"
EFVLSLS

SEQ ID NO: 1534 - protein, 7 aa, Artificial Sequence
  source: /note="Description of Artificial Sequence: Synthetic peptide"
EFYKDWD

SEQ ID NO: 1535 - protein, 7 aa, Artificial Sequence
  source: /note="Description of Artificial Sequence: Synthetic peptide"
EGANAAT

SEQ ID NO: 1536 - protein, 7 aa, Artificial Sequence
  source: /note="Description of Artificial Sequence: Synthetic peptide"
EGDFVRA

SEQ ID NO: 1537 - protein, 7 aa, Artificial Sequence
  source: /note="Description of Artificial Sequence: Synthetic peptide"
EGDNRLF

SEQ ID NO: 1538 - protein, 7 aa, Artificial Sequence
  source: /note="Description of Artificial Sequence: Synthetic peptide"
EGENQTT

SEQ ID NO: 1539 - protein, 7 aa, Artificial Sequence
  source: /note="Description of Artificial Sequence: Synthetic peptide"
EGFVGPE

SEQ ID NO: 1540 - protein, 7 aa, Artificial Sequence
  source: /note="Description of Artificial Sequence: Synthetic peptide"
EGGHRLI

SEQ ID NO: 1541 - protein, 7 aa, Artificial Sequence
  source: /note="Description of Artificial Sequence: Synthetic peptide"
EGHDTLM

SEQ ID NO: 1542 - protein, 7 aa, Artificial Sequence
  source: /note="Description of Artificial Sequence: Synthetic peptide"
EGILKSL

SEQ ID NO: 1543 - protein, 7 aa, Artificial Sequence
  source: /note="Description of Artificial Sequence: Synthetic peptide"
EGIPPFS

SEQ ID NO: 1544 - protein, 7 aa, Artificial Sequence
  source: /note="Description of Artificial Sequence: Synthetic peptide"
EGISASV

SEQ ID NO: 1545 - protein, 7 aa, Artificial Sequence
  source: /note="Description of Artificial Sequence: Synthetic peptide"
EGKVRLP

SEQ ID NO: 1546 - protein, 7 aa, Artificial Sequence
  source: /note="Description of Artificial Sequence: Synthetic peptide"
EGLGLRV

SEQ ID NO: 1547 - protein, 7 aa, Artificial Sequence
  source: /note="Description of Artificial Sequence: Synthetic peptide"
EGMPLNH

SEQ ID NO: 1548 - protein, 7 aa, Artificial Sequence
  source: /note="Description of Artificial Sequence: Synthetic peptide"
EGPVLLA

SEQ ID NO: 1549 - protein, 7 aa, Artificial Sequence
  source: /note="Description of Artificial Sequence: Synthetic peptide"
EGRREPY

SEQ ID NO: 1550 - protein, 7 aa, Artificial Sequence
  source: /note="Description of Artificial Sequence: Synthetic peptide"
EGRVVPA

SEQ ID NO: 1551 - protein, 7 aa, Artificial Sequence
  source: /note="Description of Artificial Sequence: Synthetic peptide"
EGSFPLH

SEQ ID NO: 1552 - protein, 7 aa, Artificial Sequence
  source: /note="Description of Artificial Sequence: Synthetic peptide"
EGSGMLR

SEQ ID NO: 1553 - protein, 7 aa, Artificial Sequence
  source: /note="Description of Artificial Sequence: Synthetic peptide"
EGSKMMV

SEQ ID NO: 1554 - protein, 7 aa, Artificial Sequence
  source: /note="Description of Artificial Sequence: Synthetic peptide"
EGSPDLR

SEQ ID NO: 1555 - protein, 7 aa, Artificial Sequence
  source: /note="Description of Artificial Sequence: Synthetic peptide"
EGSPRAM

SEQ ID NO: 1556 - protein, 7 aa, Artificial Sequence
  source: /note="Description of Artificial Sequence: Synthetic peptide"
EGSQNDF

SEQ ID NO: 1557 - protein, 7 aa, Artificial Sequence
  source: /note="Description of Artificial Sequence: Synthetic peptide"
EGTARLY

SEQ ID NO: 1558 - protein, 7 aa, Artificial Sequence
  source: /note="Description of Artificial Sequence: Synthetic peptide"
EGVVTLQ

SEQ ID NO: 1559 - protein, 7 aa, Artificial Sequence
  source: /note="Description of Artificial Sequence: Synthetic peptide"
EGYDSTT

SEQ ID NO: 1560 - protein, 7 aa, Artificial Sequence
  source: /note="Description of Artificial Sequence: Synthetic peptide"
EGYENGA

SEQ ID NO: 1561 - protein, 7 aa, Artificial Sequence
  source: /note="Description of Artificial Sequence: Synthetic peptide"
EHCTNTC

SEQ ID NO: 1562 - protein, 7 aa, Artificial Sequence
  source: /note="Description of Artificial Sequence: Synthetic peptide"
EHGIAMD

SEQ ID NO: 1563 - protein, 7 aa, Artificial Sequence
  source: /note="Description of Artificial Sequence: Synthetic peptide"
EHGLNTL

SEQ ID NO: 1564 - protein, 7 aa, Artificial Sequence
  source: /note="Description of Artificial Sequence: Synthetic peptide"
EHGPALL

SEQ ID NO: 1565 - protein, 7 aa, Artificial Sequence
  source: /note="Description of Artificial Sequence: Synthetic peptide"
EHGSAMK

SEQ ID NO: 1566 - protein, 7 aa, Artificial Sequence
  source: /note="Description of Artificial Sequence: Synthetic peptide"
EHHVHSP

SEQ ID NO: 1567 - protein, 7 aa, Artificial Sequence
  source: /note="Description of Artificial Sequence: Synthetic peptide"
EHIPQAM

SEQ ID NO: 1568 - protein, 7 aa, Artificial Sequence
  source: /note="Description of Artificial Sequence: Synthetic peptide"
EHKGAHF

SEQ ID NO: 1569 - protein, 7 aa, Artificial Sequence
  source: /note="Description of Artificial Sequence: Synthetic peptide"
EHKLLVM

SEQ ID NO: 1570 - protein, 7 aa, Artificial Sequence
  source: /note="Description of Artificial Sequence: Synthetic peptide"
EHMPSLR

SEQ ID NO: 1571 - protein, 7 aa, Artificial Sequence
  source: /note="Description of Artificial Sequence: Synthetic peptide"
EHNVGQS

SEQ ID NO: 1572 - protein, 7 aa, Artificial Sequence
  source: /note="Description of Artificial Sequence: Synthetic peptide"
EHQGTTI

SEQ ID NO: 1573 - protein, 7 aa, Artificial Sequence
  source: /note="Description of Artificial Sequence: Synthetic peptide"
EHSDYQV

SEQ ID NO: 1574 - protein, 7 aa, Artificial Sequence
  source: /note="Description of Artificial Sequence: Synthetic peptide"
EHSELTP

SEQ ID NO: 1575 - protein, 7 aa, Artificial Sequence
  source: /note="Description of Artificial Sequence: Synthetic peptide"
EHSFKSA

SEQ ID NO: 1576 - protein, 7 aa, Artificial Sequence
  source: /note="Description of Artificial Sequence: Synthetic peptide"
EHSGTAI

SEQ ID NO: 1577 - protein, 7 aa, Artificial Sequence
  source: /note="Description of Artificial Sequence: Synthetic peptide"
EHSSGML

SEQ ID NO: 1578 - protein, 7 aa, Artificial Sequence
  source: /note="Description of Artificial Sequence: Synthetic peptide"
EIARGSF

SEQ ID NO: 1579 - protein, 7 aa, Artificial Sequence
  source: /note="Description of Artificial Sequence: Synthetic peptide"
EIGYMSA

SEQ ID NO: 1580 - protein, 7 aa, Artificial Sequence
  source: /note="Description of Artificial Sequence: Synthetic peptide"
EIHYPLE

SEQ ID NO: 1581 - protein, 7 aa, Artificial Sequence
  source: /note="Description of Artificial Sequence: Synthetic peptide"
EIKAQMS

SEQ ID NO: 1582 - protein, 7 aa, Artificial Sequence
  source: /note="Description of Artificial Sequence: Synthetic peptide"
EIKDEKL

SEQ ID NO: 1583 - protein, 7 aa, Artificial Sequence
  source: /note="Description of Artificial Sequence: Synthetic peptide"
EIKHSMH

SEQ ID NO: 1584 - protein, 7 aa, Artificial Sequence
  source: /note="Description of Artificial Sequence: Synthetic peptide"
EINSQTN

SEQ ID NO: 1585 - protein, 7 aa, Artificial Sequence
  source: /note="Description of Artificial Sequence: Synthetic peptide"
EIQHYHG

SEQ ID NO: 1586 - protein, 7 aa, Artificial Sequence
  source: /note="Description of Artificial Sequence: Synthetic peptide"
EIRKSII

SEQ ID NO: 1587 - protein, 7 aa, Artificial Sequence
  source: /note="Description of Artificial Sequence: Synthetic peptide"
EISTQRY

SEQ ID NO: 1588 - protein, 7 aa, Artificial Sequence
  source: /note="Description of Artificial Sequence: Synthetic peptide"
EKARAAS

SEQ ID NO: 1589 - protein, 7 aa, Artificial Sequence
  source: /note="Description of Artificial Sequence: Synthetic peptide"
EKERPML

SEQ ID NO: 1590 - protein, 7 aa, Artificial Sequence
  source: /note="Description of Artificial Sequence: Synthetic peptide"
EKGFLHS

SEQ ID NO: 1591 - protein, 7 aa, Artificial Sequence
  source: /note="Description of Artificial Sequence: Synthetic peptide"
EKGLSTQ

SEQ ID NO: 1592 - protein, 7 aa, Artificial Sequence
  source: /note="Description of Artificial Sequence: Synthetic peptide"
EKGSIMP

SEQ ID NO: 1593 - protein, 7 aa, Artificial Sequence
  source: /note="Description of Artificial Sequence: Synthetic peptide"
EKGSLGH

SEQ ID NO: 1594 - protein, 7 aa, Artificial Sequence
  source: /note="Description of Artificial Sequence: Synthetic peptide"
EKIDRLG

SEQ ID NO: 1595 - protein, 7 aa, Artificial Sequence
  source: /note="Description of Artificial Sequence: Synthetic peptide"
EKIKIYS

SEQ ID NO: 1596 - protein, 7 aa, Artificial Sequence
  source: /note="Description of Artificial Sequence: Synthetic peptide"
EKIPHSS

SEQ ID NO: 1597 - protein, 7 aa, Artificial Sequence
  source: /note="Description of Artificial Sequence: Synthetic peptide"
EKKLSAE

SEQ ID NO: 1598 - protein, 7 aa, Artificial Sequence
  source: /note="Description of Artificial Sequence: Synthetic peptide"
EKLARTG

SEQ ID NO: 1599 - protein, 7 aa, Artificial Sequence
  source: /note="Description of Artificial Sequence: Synthetic peptide"
EKMHANP

SEQ ID NO: 1600 - protein, 7 aa, Artificial Sequence
  source: /note="Description of Artificial Sequence: Synthetic peptide"
EKPYITM

SEQ ID NO: 1601 - protein, 7 aa, Artificial Sequence
  source: /note="Description of Artificial Sequence: Synthetic peptide"
EKQNLPL

SEQ ID NO: 1602 - protein, 7 aa, Artificial Sequence
  source: /note="Description of Artificial Sequence: Synthetic peptide"
EKVIRPV

SEQ ID NO: 1603 - protein, 7 aa, Artificial Sequence
  source: /note="Description of Artificial Sequence: Synthetic peptide"
EKVPKLL

SEQ ID NO: 1604 - protein, 7 aa, Artificial Sequence
  source: /note="Description of Artificial Sequence: Synthetic peptide"
ELAAEAR

SEQ ID NO: 1605 - protein, 7 aa, Artificial Sequence
  source: /note="Description of Artificial Sequence: Synthetic peptide"
ELESAEI

SEQ ID NO: 1606 - protein, 7 aa, Artificial Sequence
  source: /note="Description of Artificial Sequence: Synthetic peptide"
ELETAKL

SEQ ID NO: 1607 - protein, 7 aa, Artificial Sequence
  source: /note="Description of Artificial Sequence: Synthetic peptide"
ELFSDKF

SEQ ID NO: 1608 - protein, 7 aa, Artificial Sequence
  source: /note="Description of Artificial Sequence: Synthetic peptide"
ELGPPRA

SEQ ID NO: 1609 - protein, 7 aa, Artificial Sequence
  source: /note="Description of Artificial Sequence: Synthetic peptide"
ELGPRTS

SEQ ID NO: 1610 - protein, 7 aa, Artificial Sequence
  source: /note="Description of Artificial Sequence: Synthetic peptide"
ELILNSS

SEQ ID NO: 1611 - protein, 7 aa, Artificial Sequence
  source: /note="Description of Artificial Sequence: Synthetic peptide"
ELKAVAR

SEQ ID NO: 1612 - protein, 7 aa, Artificial Sequence
  source: /note="Description of Artificial Sequence: Synthetic peptide"
ELKFPDK

SEQ ID NO: 1613 - protein, 7 aa, Artificial Sequence
  source: /note="Description of Artificial Sequence: Synthetic peptide"
ELKQASG

SEQ ID NO: 1614 - protein, 7 aa, Artificial Sequence
  source: /note="Description of Artificial Sequence: Synthetic peptide"
ELKRYVG

SEQ ID NO: 1615 - protein, 7 aa, Artificial Sequence
  source: /note="Description of Artificial Sequence: Synthetic peptide"
ELLEPDD

SEQ ID NO: 1616 - protein, 7 aa, Artificial Sequence
  source: /note="Description of Artificial Sequence: Synthetic peptide"
ELMVNGG

SEQ ID NO: 1617 - protein, 7 aa, Artificial Sequence
  source: /note="Description of Artificial Sequence: Synthetic peptide"
ELNNLLR

SEQ ID NO: 1618 - protein, 7 aa, Artificial Sequence
  source: /note="Description of Artificial Sequence: Synthetic peptide"
ELNVHRG

SEQ ID NO: 1619 - protein, 7 aa, Artificial Sequence
  source: /note="Description of Artificial Sequence: Synthetic peptide"
ELPAKSM

SEQ ID NO: 1620 - protein, 7 aa, Artificial Sequence
  source: /note="Description of Artificial Sequence: Synthetic peptide"
ELPATYG

SEQ ID NO: 1621 - protein, 7 aa, Artificial Sequence
  source: /note="Description of Artificial Sequence: Synthetic peptide"
ELPGTPC

SEQ ID NO: 1622 - protein, 7 aa, Artificial Sequence
  source: /note="Description of Artificial Sequence: Synthetic peptide"
ELPLDWD

SEQ ID NO: 1623 - protein, 7 aa, Artificial Sequence
  source: /note="Description of Artificial Sequence: Synthetic peptide"
ELPSKQG

SEQ ID NO: 1624 - protein, 7 aa, Artificial Sequence
  source: /note="Description of Artificial Sequence: Synthetic peptide"
ELQGRIN

SEQ ID NO: 1625 - protein, 7 aa, Artificial Sequence
  source: /note="Description of Artificial Sequence: Synthetic peptide"
ELQLPKS

SEQ ID NO: 1626 - protein, 7 aa, Artificial Sequence
  source: /note="Description of Artificial Sequence: Synthetic peptide"
ELQVQMA

SEQ ID NO: 1627 - protein, 7 aa, Artificial Sequence
  source: /note="Description of Artificial Sequence: Synthetic peptide"
ELRGSVN

SEQ ID NO: 1628 - protein, 7 aa, Artificial Sequence
  source: /note="Description of Artificial Sequence: Synthetic peptide"
ELRVVHS

SEQ ID NO: 1629 - protein, 7 aa, Artificial Sequence
  source: /note="Description of Artificial Sequence: Synthetic peptide"
ELSARAT

SEQ ID NO: 1630 - protein, 7 aa, Artificial Sequence
  source: /note="Description of Artificial Sequence: Synthetic peptide"
ELSDGSG

SEQ ID NO: 1631 - protein, 7 aa, Artificial Sequence
  source: /note="Description of Artificial Sequence: Synthetic peptide"
ELSFQFD

SEQ ID NO: 1632 - protein, 7 aa, Artificial Sequence
  source: /note="Description of Artificial Sequence: Synthetic peptide"
ELSMGSY

SEQ ID NO: 1633 - protein, 7 aa, Artificial Sequence
  source: /note="Description of Artificial Sequence: Synthetic peptide"
ELSRNNV

SEQ ID NO: 1634 - protein, 7 aa, Artificial Sequence
  source: /note="Description of Artificial Sequence: Synthetic peptide"
ELSVNGL

SEQ ID NO: 1635 - protein, 7 aa, Artificial Sequence
  source: /note="Description of Artificial Sequence: Synthetic peptide"
ELSYRPT

SEQ ID NO: 1636 - protein, 7 aa, Artificial Sequence
  source: /note="Description of Artificial Sequence: Synthetic peptide"
ELTTGKS

SEQ ID NO: 1637 - protein, 7 aa, Artificial Sequence
  source: /note="Description of Artificial Sequence: Synthetic peptide"
ELTVRLA

SEQ ID NO: 1638 - protein, 7 aa, Artificial Sequence
  source: /note="Description of Artificial Sequence: Synthetic peptide"
ELTYPGR

SEQ ID NO: 1639 - protein, 7 aa, Artificial Sequence
  source: /note="Description of Artificial Sequence: Synthetic peptide"
ELVMSVR

SEQ ID NO: 1640 - protein, 7 aa, Artificial Sequence
  source: /note="Description of Artificial Sequence: Synthetic peptide"
ELYSRPA

SEQ ID NO: 1641 - protein, 7 aa, Artificial Sequence
  source: /note="Description of Artificial Sequence: Synthetic peptide"
EMAAHLE

SEQ ID NO: 1642 - protein, 7 aa, Artificial Sequence
  source: /note="Description of Artificial Sequence: Synthetic peptide"
EMAPYSK

SEQ ID NO: 1643 - protein, 7 aa, Artificial Sequence
  source: /note="Description of Artificial Sequence: Synthetic peptide"
EMDGNAY

SEQ ID NO: 1644 - protein, 7 aa, Artificial Sequence
  source: /note="Description of Artificial Sequence: Synthetic peptide"
EMEMLSD

SEQ ID NO: 1645 - protein, 7 aa, Artificial Sequence
  source: /note="Description of Artificial Sequence: Synthetic peptide"
EMGQLPD

SEQ ID NO: 1646 - protein, 7 aa, Artificial Sequence
  source: /note="Description of Artificial Sequence: Synthetic peptide"
EMGQTLE

SEQ ID NO: 1647 - protein, 7 aa, Artificial Sequence
  source: /note="Description of Artificial Sequence: Synthetic peptide"
EMHEDEK

SEQ ID NO: 1648 - protein, 7 aa, Artificial Sequence
  source: /note="Description of Artificial Sequence: Synthetic peptide"
EMLERFD

SEQ ID NO: 1649 - protein, 7 aa, Artificial Sequence
  source: /note="Description of Artificial Sequence: Synthetic peptide"
EMLRAGF

SEQ ID NO: 1650 - protein, 7 aa, Artificial Sequence
  source: /note="Description of Artificial Sequence: Synthetic peptide"
EMMANST

SEQ ID NO: 1651 - protein, 7 aa, Artificial Sequence
  source: /note="Description of Artificial Sequence: Synthetic peptide"
EMPKTPK

SEQ ID NO: 1652 - protein, 7 aa, Artificial Sequence
  source: /note="Description of Artificial Sequence: Synthetic peptide"
EMPTRQP

SEQ ID NO: 1653 - protein, 7 aa, Artificial Sequence
  source: /note="Description of Artificial Sequence: Synthetic peptide"
EMPTYND

SEQ ID NO: 1654 - protein, 7 aa, Artificial Sequence
  source: /note="Description of Artificial Sequence: Synthetic peptide"
EMRQQSI

SEQ ID NO: 1655 - protein, 7 aa, Artificial Sequence
  source: /note="Description of Artificial Sequence: Synthetic peptide"
EMRSSTS

SEQ ID NO: 1656 - protein, 7 aa, Artificial Sequence
  source: /note="Description of Artificial Sequence: Synthetic peptide"
EMTQLPA

SEQ ID NO: 1657 - protein, 7 aa, Artificial Sequence
  source: /note="Description of Artificial Sequence: Synthetic peptide"
EMYLTRV

SEQ ID NO: 1658 - protein, 7 aa, Artificial Sequence
  source: /note="Description of Artificial Sequence: Synthetic peptide"
ENAVPGV

SEQ ID NO: 1659 - protein, 7 aa, Artificial Sequence
  source: /note="Description of Artificial Sequence: Synthetic peptide"
ENDRSST

SEQ ID NO: 1660 - protein, 7 aa, Artificial Sequence
  source: /note="Description of Artificial Sequence: Synthetic peptide"
ENEGTGT

SEQ ID NO: 1661 - protein, 7 aa, Artificial Sequence
  source: /note="Description of Artificial Sequence: Synthetic peptide"
ENESHHL

SEQ ID NO: 1662 - protein, 7 aa, Artificial Sequence
  source: /note="Description of Artificial Sequence: Synthetic peptide"
ENGHSFT

SEQ ID NO: 1663 - protein, 7 aa, Artificial Sequence
  source: /note="Description of Artificial Sequence: Synthetic peptide"
ENGRTEI

SEQ ID NO: 1664 - protein, 7 aa, Artificial Sequence
  source: /note="Description of Artificial Sequence: Synthetic peptide"
ENKPGSP

SEQ ID NO: 1665 - protein, 7 aa, Artificial Sequence
  source: /note="Description of Artificial Sequence: Synthetic peptide"
ENMAYLS

SEQ ID NO: 1666 - protein, 7 aa, Artificial Sequence
  source: /note="Description of Artificial Sequence: Synthetic peptide"
ENPGSAS

SEQ ID NO: 1667 - protein, 7 aa, Artificial Sequence
  source: /note="Description of Artificial Sequence: Synthetic peptide"
ENPPREP

SEQ ID NO: 1668 - protein, 7 aa, Artificial Sequence
  source: /note="Description of Artificial Sequence: Synthetic peptide"
ENPRGSV

SEQ ID NO: 1669 - protein, 7 aa, Artificial Sequence
  source: /note="Description of Artificial Sequence: Synthetic peptide"
ENPTMYS

SEQ ID NO: 1670 - protein, 7 aa, Artificial Sequence
  source: /note="Description of Artificial Sequence: Synthetic peptide"
ENQYQDS

SEQ ID NO: 1671 - protein, 7 aa, Artificial Sequence
  source: /note="Description of Artificial Sequence: Synthetic peptide"
ENRLKNF

SEQ ID NO: 1672 - protein, 7 aa, Artificial Sequence
  source: /note="Description of Artificial Sequence: Synthetic peptide"
ENRSGED

SEQ ID NO: 1673 - protein, 7 aa, Artificial Sequence
  source: /note="Description of Artificial Sequence: Synthetic peptide"
ENSSLVD

SEQ ID NO: 1674 - protein, 7 aa, Artificial Sequence
  source: /note="Description of Artificial Sequence: Synthetic peptide"
ENTFSSR

SEQ ID NO: 1675 - protein, 7 aa, Artificial Sequence
  source: /note="Description of Artificial Sequence: Synthetic peptide"
ENTITSL

SEQ ID NO: 1676 - protein, 7 aa, Artificial Sequence
  source: /note="Description of Artificial Sequence: Synthetic peptide"
ENTLRLD

SEQ ID NO: 1677 - protein, 7 aa, Artificial Sequence
  source: /note="Description of Artificial Sequence: Synthetic peptide"
ENVKPGW

SEQ ID NO: 1678 - protein, 7 aa, Artificial Sequence
  source: /note="Description of Artificial Sequence: Synthetic peptide"
EPAARAV

SEQ ID NO: 1679 - protein, 7 aa, Artificial Sequence
  source: /note="Description of Artificial Sequence: Synthetic peptide"
EPADRTQ

SEQ ID NO: 1680 - protein, 7 aa, Artificial Sequence
  source: /note="Description of Artificial Sequence: Synthetic peptide"
EPAGPRL

SEQ ID NO: 1681 - protein, 7 aa, Artificial Sequence
  source: /note="Description of Artificial Sequence: Synthetic peptide"
EPALPYA

SEQ ID NO: 1682 - protein, 7 aa, Artificial Sequence
  source: /note="Description of Artificial Sequence: Synthetic peptide"
EPATGSS

SEQ ID NO: 1683 - protein, 7 aa, Artificial Sequence
  source: /note="Description of Artificial Sequence: Synthetic peptide"
EPDSAYS

SEQ ID NO: 1684 - protein, 7 aa, Artificial Sequence
  source: /note="Description of Artificial Sequence: Synthetic peptide"
EPFDAKT

SEQ ID NO: 1685 - protein, 7 aa, Artificial Sequence
  source: /note="Description of Artificial Sequence: Synthetic peptide"
EPFSNSP

SEQ ID NO: 1686 - protein, 7 aa, Artificial Sequence
  source: /note="Description of Artificial Sequence: Synthetic peptide"
EPGGNHL

SEQ ID NO: 1687 - protein, 7 aa, Artificial Sequence
  source: /note="Description of Artificial Sequence: Synthetic peptide"
EPGHARA

SEQ ID NO: 1688 - protein, 7 aa, Artificial Sequence
  source: /note="Description of Artificial Sequence: Synthetic peptide"
EPGRTGF

SEQ ID NO: 1689 - protein, 7 aa, Artificial Sequence
  source: /note="Description of Artificial Sequence: Synthetic peptide"
EPGVVGC

SEQ ID NO: 1690 - protein, 7 aa, Artificial Sequence
  source: /note="Description of Artificial Sequence: Synthetic peptide"
EPHAPER

SEQ ID NO: 1691 - protein, 7 aa, Artificial Sequence
  source: /note="Description of Artificial Sequence: Synthetic peptide"
EPHVPGA

SEQ ID NO: 1692 - protein, 7 aa, Artificial Sequence
  source: /note="Description of Artificial Sequence: Synthetic peptide"
EPKHQFS

SEQ ID NO: 1693 - protein, 7 aa, Artificial Sequence
  source: /note="Description of Artificial Sequence: Synthetic peptide"
EPKRGWS

SEQ ID NO: 1694 - protein, 7 aa, Artificial Sequence
  source: /note="Description of Artificial Sequence: Synthetic peptide"
EPKSASI

SEQ ID NO: 1695 - protein, 7 aa, Artificial Sequence
  source: /note="Description of Artificial Sequence: Synthetic peptide"
EPLNSSG

SEQ ID NO: 1696 - protein, 7 aa, Artificial Sequence
  source: /note="Description of Artificial Sequence: Synthetic peptide"
EPLSANR

SEQ ID NO: 1697 - protein, 7 aa, Artificial Sequence
  source: /note="Description of Artificial Sequence: Synthetic peptide"
EPNATSV

SEQ ID NO: 1698 - protein, 7 aa, Artificial Sequence
  source: /note="Description of Artificial Sequence: Synthetic peptide"
EPNHPVS

SEQ ID NO: 1699 - protein, 7 aa, Artificial Sequence
  source: /note="Description of Artificial Sequence: Synthetic peptide"
EPPSSLK

SEQ ID NO: 1700 - protein, 7 aa, Artificial Sequence
  source: /note="Description of Artificial Sequence: Synthetic peptide"
EPQRPLR

SEQ ID NO: 1701 - protein, 7 aa, Artificial Sequence
  source: /note="Description of Artificial Sequence: Synthetic peptide"
EPSNESA

SEQ ID NO: 1702 - protein, 7 aa, Artificial Sequence
  source: /note="Description of Artificial Sequence: Synthetic peptide"
EPSNSHA

SEQ ID NO: 1703 - protein, 7 aa, Artificial Sequence
  source: /note="Description of Artificial Sequence: Synthetic peptide"
EPSYLPS

SEQ ID NO: 1704 - protein, 7 aa, Artificial Sequence
  source: /note="Description of Artificial Sequence: Synthetic peptide"
EPTERIS

SEQ ID NO: 1705 - protein, 7 aa, Artificial Sequence
  source: /note="Description of Artificial Sequence: Synthetic peptide"
EPTIYLT

SEQ ID NO: 1706 - protein, 7 aa, Artificial Sequence
  source: /note="Description of Artificial Sequence: Synthetic peptide"
EPTMRSI

SEQ ID NO: 1707 - protein, 7 aa, Artificial Sequence
  source: /note="Description of Artificial Sequence: Synthetic peptide"
EPTRPAT

SEQ ID NO: 1708 - protein, 7 aa, Artificial Sequence
  source: /note="Description of Artificial Sequence: Synthetic peptide"
EPTRSSS

SEQ ID NO: 1709 - protein, 7 aa, Artificial Sequence
  source: /note="Description of Artificial Sequence: Synthetic peptide"
EPTRTKM

SEQ ID NO: 1710 - protein, 7 aa, Artificial Sequence
  source: /note="Description of Artificial Sequence: Synthetic peptide"
EPVIGFP

SEQ ID NO: 1711 - protein, 7 aa, Artificial Sequence
  source: /note="Description of Artificial Sequence: Synthetic peptide"
EPVSTAA

SEQ ID NO: 1712 - protein, 7 aa, Artificial Sequence
  source: /note="Description of Artificial Sequence: Synthetic peptide"
EPYLSAK

SEQ ID NO: 1713 - protein, 7 aa, Artificial Sequence
  source: /note="Description of Artificial Sequence: Synthetic peptide"
EPYSPAI

SEQ ID NO: 1714 - protein, 7 aa, Artificial Sequence
  source: /note="Description of Artificial Sequence: Synthetic peptide"
EQAALSF

SEQ ID NO: 1715 - protein, 7 aa, Artificial Sequence
  source: /note="Description of Artificial Sequence: Synthetic peptide"
EQALKPE

SEQ ID NO: 1716 - protein, 7 aa, Artificial Sequence
  source: /note="Description of Artificial Sequence: Synthetic peptide"
EQARLDV

SEQ ID NO: 1717 - protein, 7 aa, Artificial Sequence
  source: /note="Description of Artificial Sequence: Synthetic peptide"
EQASFKI

SEQ ID NO: 1718 - protein, 7 aa, Artificial Sequence
  source: /note="Description of Artificial Sequence: Synthetic peptide"
EQFAAPV

SEQ ID NO: 1719 - protein, 7 aa, Artificial Sequence
  source: /note="Description of Artificial Sequence: Synthetic peptide"
EQGTPSA

SEQ ID NO: 1720 - protein, 7 aa, Artificial Sequence
  source: /note="Description of Artificial Sequence: Synthetic peptide"
EQKPLTR

SEQ ID NO: 1721 - protein, 7 aa, Artificial Sequence
  source: /note="Description of Artificial Sequence: Synthetic peptide"
EQLKDYE

SEQ ID NO: 1722 - protein, 7 aa, Artificial Sequence
  source: /note="Description of Artificial Sequence: Synthetic peptide"
EQNSRGL

SEQ ID NO: 1723 - protein, 7 aa, Artificial Sequence
  source: /note="Description of Artificial Sequence: Synthetic peptide"
EQPKYSK

SEQ ID NO: 1724 - protein, 7 aa, Artificial Sequence
  source: /note="Description of Artificial Sequence: Synthetic peptide"
EQQCPRS

SEQ ID NO: 1725 - protein, 7 aa, Artificial Sequence
  source: /note="Description of Artificial Sequence: Synthetic peptide"
EQRDRNG

SEQ ID NO: 1726 - protein, 7 aa, Artificial Sequence
  source: /note="Description of Artificial Sequence: Synthetic peptide"
EQRGTIL

SEQ ID NO: 1727 - protein, 7 aa, Artificial Sequence
  source: /note="Description of Artificial Sequence: Synthetic peptide"
EQRLSQS

SEQ ID NO: 1728 - protein, 7 aa, Artificial Sequence
  source: /note="Description of Artificial Sequence: Synthetic peptide"
EQRRSET

SEQ ID NO: 1729 - protein, 7 aa, Artificial Sequence
  source: /note="Description of Artificial Sequence: Synthetic peptide"
EQSYRDS

SEQ ID NO: 1730 - protein, 7 aa, Artificial Sequence
  source: /note="Description of Artificial Sequence: Synthetic peptide"
EQTGHRA

SEQ ID NO: 1731 - protein, 7 aa, Artificial Sequence
  source: /note="Description of Artificial Sequence: Synthetic peptide"
EQYRDNS

SEQ ID NO: 1732 - protein, 7 aa, Artificial Sequence
  source: /note="Description of Artificial Sequence: Synthetic peptide"
ERAAGLR

SEQ ID NO: 1733 - protein, 7 aa, Artificial Sequence
  source: /note="Description of Artificial Sequence: Synthetic peptide"
ERAGPHD

SEQ ID NO: 1734 - protein, 7 aa, Artificial Sequence
  source: /note="Description of Artificial Sequence: Synthetic peptide"
ERAPPGL

SEQ ID NO: 1735 - protein, 7 aa, Artificial Sequence
  source: /note="Description of Artificial Sequence: Synthetic peptide"
ERDSRKA

SEQ ID NO: 1736 - protein, 7 aa, Artificial Sequence
  source: /note="Description of Artificial Sequence: Synthetic peptide"
ERFEGLR

SEQ ID NO: 1737 - protein, 7 aa, Artificial Sequence
  source: /note="Description of Artificial Sequence: Synthetic peptide"
ERFLPEL

SEQ ID NO: 1738 - protein, 7 aa, Artificial Sequence
  source: /note="Description of Artificial Sequence: Synthetic peptide"
ERFTSVP

SEQ ID NO: 1739 - protein, 7 aa, Artificial Sequence
  source: /note="Description of Artificial Sequence: Synthetic peptide"
ERGMTTP

SEQ ID NO: 1740 - protein, 7 aa, Artificial Sequence
  source: /note="Description of Artificial Sequence: Synthetic peptide"
ERGVIHP

SEQ ID NO: 1741 - protein, 7 aa, Artificial Sequence
  source: /note="Description of Artificial Sequence: Synthetic peptide"
ERHADMT

SEQ ID NO: 1742 - protein, 7 aa, Artificial Sequence
  source: /note="Description of Artificial Sequence: Synthetic peptide"
ERHDLPR

SEQ ID NO: 1743 - protein, 7 aa, Artificial Sequence
  source: /note="Description of Artificial Sequence: Synthetic peptide"
ERHDVGP

SEQ ID NO: 1744 - protein, 7 aa, Artificial Sequence
  source: /note="Description of Artificial Sequence: Synthetic peptide"
ERHIRME

SEQ ID NO: 1745 - protein, 7 aa, Artificial Sequence
  source: /note="Description of Artificial Sequence: Synthetic peptide"
ERHRVID

SEQ ID NO: 1746 - protein, 7 aa, Artificial Sequence
  source: /note="Description of Artificial Sequence: Synthetic peptide"
ERIRTPE

SEQ ID NO: 1747 - protein, 7 aa, Artificial Sequence
  source: /note="Description of Artificial Sequence: Synthetic peptide"
ERISPSI

SEQ ID NO: 1748 - protein, 7 aa, Artificial Sequence
  source: /note="Description of Artificial Sequence: Synthetic peptide"
ERKGLGL

SEQ ID NO: 1749 - protein, 7 aa, Artificial Sequence
  source: /note="Description of Artificial Sequence: Synthetic peptide"
ERKNQSP

SEQ ID NO: 1750 - protein, 7 aa, Artificial Sequence
  source: /note="Description of Artificial Sequence: Synthetic peptide"
ERKTPSD

SEQ ID NO: 1751 - protein, 7 aa, Artificial Sequence
  source: /note="Description of Artificial Sequence: Synthetic peptide"
ERLESSL

SEQ ID NO: 1752 - protein, 7 aa, Artificial Sequence
  source: /note="Description of Artificial Sequence: Synthetic peptide"
ERLSPVA

SEQ ID NO: 1753 - protein, 7 aa, Artificial Sequence
  source: /note="Description of Artificial Sequence: Synthetic peptide"
ERLSSEP

SEQ ID NO: 1754 - protein, 7 aa, Artificial Sequence
  source: /note="Description of Artificial Sequence: Synthetic peptide"
ERMAAPF

SEQ ID NO: 1755 - protein, 7 aa, Artificial Sequence
  source: /note="Description of Artificial Sequence: Synthetic peptide"
ERNFESG

SEQ ID NO: 1756 - protein, 7 aa, Artificial Sequence
  source: /note="Description of Artificial Sequence: Synthetic peptide"
ERNGLPA

SEQ ID NO: 1757 - protein, 7 aa, Artificial Sequence
  source: /note="Description of Artificial Sequence: Synthetic peptide"
ERNRVDS

SEQ ID NO: 1758 - protein, 7 aa, Artificial Sequence
  source: /note="Description of Artificial Sequence: Synthetic peptide"
ERNSPVA

SEQ ID NO: 1759 - protein, 7 aa, Artificial Sequence
  source: /note="Description of Artificial Sequence: Synthetic peptide"
ERPDGPS

SEQ ID NO: 1760 - protein, 7 aa, Artificial Sequence
  source: /note="Description of Artificial Sequence: Synthetic peptide"
ERPPLVM

SEQ ID NO: 1761 - protein, 7 aa, Artificial Sequence
  source: /note="Description of Artificial Sequence: Synthetic peptide"
ERPYATV

SEQ ID NO: 1762 - protein, 7 aa, Artificial Sequence
  source: /note="Description of Artificial Sequence: Synthetic peptide"
ERQAFHE

SEQ ID NO: 1763 - protein, 7 aa, Artificial Sequence
  source: /note="Description of Artificial Sequence: Synthetic peptide"
ERQPMIK

SEQ ID NO: 1764 - protein, 7 aa, Artificial Sequence
  source: /note="Description of Artificial Sequence: Synthetic peptide"
ERQRDSA

SEQ ID NO: 1765 - protein, 7 aa, Artificial Sequence
  source: /note="Description of Artificial Sequence: Synthetic peptide"
ERQTTLA

SEQ ID NO: 1766 - protein, 7 aa, Artificial Sequence
  source: /note="Description of Artificial Sequence: Synthetic peptide"
ERRIGAS

SEQ ID NO: 1767 - protein, 7 aa, Artificial Sequence
  source: /note="Description of Artificial Sequence: Synthetic peptide"
ERRPGTS

SEQ ID NO: 1768 - protein, 7 aa, Artificial Sequence
  source: /note="Description of Artificial Sequence: Synthetic peptide"
ERSKPVA

SEQ ID NO: 1769 - protein, 7 aa, Artificial Sequence
  source: /note="Description of Artificial Sequence: Synthetic peptide"
ERSRGQQ

SEQ ID NO: 1770 - protein, 7 aa, Artificial Sequence
  source: /note="Description of Artificial Sequence: Synthetic peptide"
ERSSPQP

SEQ ID NO: 1771 - protein, 7 aa, Artificial Sequence
  source: /note="Description of Artificial Sequence: Synthetic peptide"
ERSSRET

SEQ ID NO: 1772 - protein, 7 aa, Artificial Sequence
  source: /note="Description of Artificial Sequence: Synthetic peptide"
ERTAVGV

SEQ ID NO: 1773 - protein, 7 aa, Artificial Sequence
  source: /note="Description of Artificial Sequence: Synthetic peptide"
ERTKPPT

SEQ ID NO: 1774 - protein, 7 aa, Artificial Sequence
  source: /note="Description of Artificial Sequence: Synthetic peptide"
ERYPSIS

SEQ ID NO: 1775 - protein, 7 aa, Artificial Sequence
  source: /note="Description of Artificial Sequence: Synthetic peptide"
ESAFKRC

SEQ ID NO: 1776 - protein, 7 aa, Artificial Sequence
  source: /note="Description of Artificial Sequence: Synthetic peptide"
ESAWMQD

SEQ ID NO: 1777 - protein, 7 aa, Artificial Sequence
  source: /note="Description of Artificial Sequence: Synthetic peptide"
ESFTGVH

SEQ ID NO: 1778 - protein, 7 aa, Artificial Sequence
  source: /note="Description of Artificial Sequence: Synthetic peptide"
ESGDKLR

SEQ ID NO: 1779 - protein, 7 aa, Artificial Sequence
  source: /note="Description of Artificial Sequence: Synthetic peptide"
ESGILQL

SEQ ID NO: 1780 - protein, 7 aa, Artificial Sequence
  source: /note="Description of Artificial Sequence: Synthetic peptide"
ESGLTQT

SEQ ID NO: 1781 - protein, 7 aa, Artificial Sequence
  source: /note="Description of Artificial Sequence: Synthetic peptide"
ESGRPMV

SEQ ID NO: 1782 - protein, 7 aa, Artificial Sequence
  source: /note="Description of Artificial Sequence: Synthetic peptide"
ESITRSV

SEQ ID NO: 1783 - protein, 7 aa, Artificial Sequence
  source: /note="Description of Artificial Sequence: Synthetic peptide"
ESIVGRR

SEQ ID NO: 1784 - protein, 7 aa, Artificial Sequence
  source: /note="Description of Artificial Sequence: Synthetic peptide"
ESKELTS

SEQ ID NO: 1785 - protein, 7 aa, Artificial Sequence
  source: /note="Description of Artificial Sequence: Synthetic peptide"
ESKGAHA

SEQ ID NO: 1786 - protein, 7 aa, Artificial Sequence
  source: /note="Description of Artificial Sequence: Synthetic peptide"
ESKHFSP

SEQ ID NO: 1787 - protein, 7 aa, Artificial Sequence
  source: /note="Description of Artificial Sequence: Synthetic peptide"
ESKIGRP

SEQ ID NO: 1788 - protein, 7 aa, Artificial Sequence
  source: /note="Description of Artificial Sequence: Synthetic peptide"
ESKPNSR

SEQ ID NO: 1789 - protein, 7 aa, Artificial Sequence
  source: /note="Description of Artificial Sequence: Synthetic peptide"
ESPDRST

SEQ ID NO: 1790 - protein, 7 aa, Artificial Sequence
  source: /note="Description of Artificial Sequence: Synthetic peptide"
ESPFSVP

SEQ ID NO: 1791 - protein, 7 aa, Artificial Sequence
  source: /note="Description of Artificial Sequence: Synthetic peptide"
ESPKADP

SEQ ID NO: 1792 - protein, 7 aa, Artificial Sequence
  source: /note="Description of Artificial Sequence: Synthetic peptide"
ESPMVSP

SEQ ID NO: 1793 - protein, 7 aa, Artificial Sequence
  source: /note="Description of Artificial Sequence: Synthetic peptide"
ESQVLVY

SEQ ID NO: 1794 - protein, 7 aa, Artificial Sequence
  source: /note="Description of Artificial Sequence: Synthetic peptide"
ESRQAFP

SEQ ID NO: 1795 - protein, 7 aa, Artificial Sequence
  source: /note="Description of Artificial Sequence: Synthetic peptide"
ESRSAAY

SEQ ID NO: 1796 - protein, 7 aa, Artificial Sequence
  source: /note="Description of Artificial Sequence: Synthetic peptide"
ESRSALP

SEQ ID NO: 1797 - protein, 7 aa, Artificial Sequence
  source: /note="Description of Artificial Sequence: Synthetic peptide"
ESRVGYI

SEQ ID NO: 1798 - protein, 7 aa, Artificial Sequence
  source: /note="Description of Artificial Sequence: Synthetic peptide"
ESRVSLG

SEQ ID NO: 1799 - protein, 7 aa, Artificial Sequence
  source: /note="Description of Artificial Sequence: Synthetic peptide"
ESSQHLD

SEQ ID NO: 1800 - protein, 7 aa, Artificial Sequence
  source: /note="Description of Artificial Sequence: Synthetic peptide"
ESSREFH

SEQ ID NO: 1801 - protein, 7 aa, Artificial Sequence
  source: /note="Description of Artificial Sequence: Synthetic peptide"
ESSRELH

SEQ ID NO: 1802 - protein, 7 aa, Artificial Sequence
  source: /note="Description of Artificial Sequence: Synthetic peptide"
ESSSELH

SEQ ID NO: 1803 - protein, 7 aa, Artificial Sequence
  source: /note="Description of Artificial Sequence: Synthetic peptide"
ESSSRML

SEQ ID NO: 1804 - protein, 7 aa, Artificial Sequence
  source: /note="Description of Artificial Sequence: Synthetic peptide"
ESTALKR

SEQ ID NO: 1805 - protein, 7 aa, Artificial Sequence
  source: /note="Description of Artificial Sequence: Synthetic peptide"
ESTSSRS

SEQ ID NO: 1806 - protein, 7 aa, Artificial Sequence
  source: /note="Description of Artificial Sequence: Synthetic peptide"
ESVENDS

SEQ ID NO: 1807 - protein, 7 aa, Artificial Sequence
  source: /note="Description of Artificial Sequence: Synthetic peptide"
ESVFKAA

SEQ ID NO: 1808 - protein, 7 aa, Artificial Sequence
  source: /note="Description of Artificial Sequence: Synthetic peptide"
ESVGYAD

SEQ ID NO: 1809 - protein, 7 aa, Artificial Sequence
  source: /note="Description of Artificial Sequence: Synthetic peptide"
ESVRLQN

SEQ ID NO: 1810 - protein, 7 aa, Artificial Sequence
  source: /note="Description of Artificial Sequence: Synthetic peptide"
ESYTESL

SEQ ID NO: 1811 - protein, 7 aa, Artificial Sequence
  source: /note="Description of Artificial Sequence: Synthetic peptide"
ETAKSGQ

SEQ ID NO: 1812 - protein, 7 aa, Artificial Sequence
  source: /note="Description of Artificial Sequence: Synthetic peptide"
ETDRKLS

SEQ ID NO: 1813 - protein, 7 aa, Artificial Sequence
  source: /note="Description of Artificial Sequence: Synthetic peptide"
ETDRNAS

SEQ ID NO: 1814 - protein, 7 aa, Artificial Sequence
  source: /note="Description of Artificial Sequence: Synthetic peptide"
ETEHTVV

SEQ ID NO: 1815 - protein, 7 aa, Artificial Sequence
  source: /note="Description of Artificial Sequence: Synthetic peptide"
ETFTRSV

SEQ ID NO: 1816 - protein, 7 aa, Artificial Sequence
  source: /note="Description of Artificial Sequence: Synthetic peptide"
ETGKDRM

SEQ ID NO: 1817 - protein, 7 aa, Artificial Sequence
  source: /note="Description of Artificial Sequence: Synthetic peptide"
ETGSHTT

SEQ ID NO: 1818 - protein, 7 aa, Artificial Sequence
  source: /note="Description of Artificial Sequence: Synthetic peptide"
ETGSRAV

SEQ ID NO: 1819 - protein, 7 aa, Artificial Sequence
  source: /note="Description of Artificial Sequence: Synthetic peptide"
ETKFSMG

SEQ ID NO: 1820 - protein, 7 aa, Artificial Sequence
  source: /note="Description of Artificial Sequence: Synthetic peptide"
ETKGSVA

SEQ ID NO: 1821 - protein, 7 aa, Artificial Sequence
  source: /note="Description of Artificial Sequence: Synthetic peptide"
ETKKDYS

SEQ ID NO: 1822 - protein, 7 aa, Artificial Sequence
  source: /note="Description of Artificial Sequence: Synthetic peptide"
ETLEVSL

SEQ ID NO: 1823 - protein, 7 aa, Artificial Sequence
  source: /note="Description of Artificial Sequence: Synthetic peptide"
ETLSGNE

SEQ ID NO: 1824 - protein, 7 aa, Artificial Sequence
  source: /note="Description of Artificial Sequence: Synthetic peptide"
ETMRKDP

SEQ ID NO: 1825 - protein, 7 aa, Artificial Sequence
  source: /note="Description of Artificial Sequence: Synthetic peptide"
ETNFSGA

SEQ ID NO: 1826 - protein, 7 aa, Artificial Sequence
  source: /note="Description of Artificial Sequence: Synthetic peptide"
ETNPRCS

SEQ ID NO: 1827 - protein, 7 aa, Artificial Sequence
  source: /note="Description of Artificial Sequence: Synthetic peptide"
ETPFKPS

SEQ ID NO: 1828 - protein, 7 aa, Artificial Sequence
  source: /note="Description of Artificial Sequence: Synthetic peptide"
ETPIDSD

SEQ ID NO: 1829 - protein, 7 aa, Artificial Sequence
  source: /note="Description of Artificial Sequence: Synthetic peptide"
ETPNHSR

SEQ ID NO: 1830 - protein, 7 aa, Artificial Sequence
  source: /note="Description of Artificial Sequence: Synthetic peptide"
ETRGHLI

SEQ ID NO: 1831 - protein, 7 aa, Artificial Sequence
  source: /note="Description of Artificial Sequence: Synthetic peptide"
ETRLVPT

SEQ ID NO: 1832 - protein, 7 aa, Artificial Sequence
  source: /note="Description of Artificial Sequence: Synthetic peptide"
ETRNLHG

SEQ ID NO: 1833 - protein, 7 aa, Artificial Sequence
  source: /note="Description of Artificial Sequence: Synthetic peptide"
ETRNQFG

SEQ ID NO: 1834 - protein, 7 aa, Artificial Sequence
  source: /note="Description of Artificial Sequence: Synthetic peptide"
ETRSTRE

SEQ ID NO: 1835 - protein, 7 aa, Artificial Sequence
  source: /note="Description of Artificial Sequence: Synthetic peptide"
ETRYPDM

SEQ ID NO: 1836 - protein, 7 aa, Artificial Sequence
  source: /note="Description of Artificial Sequence: Synthetic peptide"
ETSHSVS

SEQ ID NO: 1837 - protein, 7 aa, Artificial Sequence
  source: /note="Description of Artificial Sequence: Synthetic peptide"
ETSRAST

SEQ ID NO: 1838 - protein, 7 aa, Artificial Sequence
  source: /note="Description of Artificial Sequence: Synthetic peptide"
ETSRPTV

SEQ ID NO: 1839 - protein, 7 aa, Artificial Sequence
  source: /note="Description of Artificial Sequence: Synthetic peptide"
ETSSAYL

SEQ ID NO: 1840 - protein, 7 aa, Artificial Sequence
  source: /note="Description of Artificial Sequence: Synthetic peptide"
ETTQNYI

SEQ ID NO: 1841 - protein, 7 aa, Artificial Sequence
  source: /note="Description of Artificial Sequence: Synthetic peptide"
ETTSLPR

SEQ ID NO: 1842 - protein, 7 aa, Artificial Sequence
  source: /note="Description of Artificial Sequence: Synthetic peptide"
ETTVQAS

SEQ ID NO: 1843 - protein, 7 aa, Artificial Sequence
  source: /note="Description of Artificial Sequence: Synthetic peptide"
ETVFHVA

SEQ ID NO: 1844 - protein, 7 aa, Artificial Sequence
  source: /note="Description of Artificial Sequence: Synthetic peptide"
EVAVQPM

SEQ ID NO: 1845 - protein, 7 aa, Artificial Sequence
  source: /note="Description of Artificial Sequence: Synthetic peptide"
EVGRNST

SEQ ID NO: 1846 - protein, 7 aa, Artificial Sequence
  source: /note="Description of Artificial Sequence: Synthetic peptide"
EVHPGQA

SEQ ID NO: 1847 - protein, 7 aa, Artificial Sequence
  source: /note="Description of Artificial Sequence: Synthetic peptide"
EVKEQTV

SEQ ID NO: 1848 - protein, 7 aa, Artificial Sequence
  source: /note="Description of Artificial Sequence: Synthetic peptide"
EVKSFSS

SEQ ID NO: 1849 - protein, 7 aa, Artificial Sequence
  source: /note="Description of Artificial Sequence: Synthetic peptide"
EVPAARS

SEQ ID NO: 1850 - protein, 7 aa, Artificial Sequence
  source: /note="Description of Artificial Sequence: Synthetic peptide"
EVPNSSA

SEQ ID NO: 1851 - protein, 7 aa, Artificial Sequence
  source: /note="Description of Artificial Sequence: Synthetic peptide"
EVQLPAR

SEQ ID NO: 1852 - protein, 7 aa, Artificial Sequence
  source: /note="Description of Artificial Sequence: Synthetic peptide"
EVRKGAQ

SEQ ID NO: 1853 - protein, 7 aa, Artificial Sequence
  source: /note="Description of Artificial Sequence: Synthetic peptide"
EVRLSNA

SEQ ID NO: 1854 - protein, 7 aa, Artificial Sequence
  source: /note="Description of Artificial Sequence: Synthetic peptide"
EVSFLPP

SEQ ID NO: 1855 - protein, 7 aa, Artificial Sequence
  source: /note="Description of Artificial Sequence: Synthetic peptide"
EVSLSTR

SEQ ID NO: 1856 - protein, 7 aa, Artificial Sequence
  source: /note="Description of Artificial Sequence: Synthetic peptide"
EVSMLSK

SEQ ID NO: 1857 - protein, 7 aa, Artificial Sequence
  source: /note="Description of Artificial Sequence: Synthetic peptide"
EVTGRAG

SEQ ID NO: 1858 - protein, 7 aa, Artificial Sequence
  source: /note="Description of Artificial Sequence: Synthetic peptide"
EVTMKHT

SEQ ID NO: 1859 - protein, 7 aa, Artificial Sequence
  source: /note="Description of Artificial Sequence: Synthetic peptide"
EVTNPSA

SEQ ID NO: 1860 - protein, 7 aa, Artificial Sequence
  source: /note="Description of Artificial Sequence: Synthetic peptide"
EVTVGLP

SEQ ID NO: 1861 - protein, 7 aa, Artificial Sequence
  source: /note="Description of Artificial Sequence: Synthetic peptide"
EWADSSG

SEQ ID NO: 1862 - protein, 7 aa, Artificial Sequence
  source: /note="Description of Artificial Sequence: Synthetic peptide"
EWNRQAN

SEQ ID NO: 1863 - protein, 7 aa, Artificial Sequence
  source: /note="Description of Artificial Sequence: Synthetic peptide"
EYASLGL

SEQ ID NO: 1864 - protein, 7 aa, Artificial Sequence
  source: /note="Description of Artificial Sequence: Synthetic peptide"
EYDHSML

SEQ ID NO: 1865 - protein, 7 aa, Artificial Sequence
  source: /note="Description of Artificial Sequence: Synthetic peptide"
EYIRGKE

SEQ ID NO: 1866 - protein, 7 aa, Artificial Sequence
  source: /note="Description of Artificial Sequence: Synthetic peptide"
EYLDESG

SEQ ID NO: 1867 - protein, 7 aa, Artificial Sequence
  source: /note="Description of Artificial Sequence: Synthetic peptide"
EYLPNSA

SEQ ID NO: 1868 - protein, 7 aa, Artificial Sequence
  source: /note="Description of Artificial Sequence: Synthetic peptide"
EYPAHLT

SEQ ID NO: 1869 - protein, 7 aa, Artificial Sequence
  source: /note="Description of Artificial Sequence: Synthetic peptide"
EYPLNTG

SEQ ID NO: 1870 - protein, 7 aa, Artificial Sequence
  source: /note="Description of Artificial Sequence: Synthetic peptide"
EYQRPDP

SEQ ID NO: 1871 - protein, 7 aa, Artificial Sequence
  source: /note="Description of Artificial Sequence: Synthetic peptide"
EYSFPKE

SEQ ID NO: 1872 - protein, 7 aa, Artificial Sequence
  source: /note="Description of Artificial Sequence: Synthetic peptide"
EYTPISG

SEQ ID NO: 1873 - protein, 7 aa, Artificial Sequence
  source: /note="Description of Artificial Sequence: Synthetic peptide"
EYVGVQR

SEQ ID NO: 1874 - protein, 7 aa, Artificial Sequence
  source: /note="Description of Artificial Sequence: Synthetic peptide"
FAAKDVT

SEQ ID NO: 1875 - protein, 7 aa, Artificial Sequence
  source: /note="Description of Artificial Sequence: Synthetic peptide"
FAAKMPS

SEQ ID NO: 1876 - protein, 7 aa, Artificial Sequence
  source: /note="Description of Artificial Sequence: Synthetic peptide"
FAALRVD

SEQ ID NO: 1877 - protein, 7 aa, Artificial Sequence
  source: /note="Description of Artificial Sequence: Synthetic peptide"
FAAQVED

SEQ ID NO: 1878 - protein, 7 aa, Artificial Sequence
  source: /note="Description of Artificial Sequence: Synthetic peptide"
FAASSQD

SEQ ID NO: 1879 - protein, 7 aa, Artificial Sequence
  source: /note="Description of Artificial Sequence: Synthetic peptide"
FADAMVM

SEQ ID NO: 1880 - protein, 7 aa, Artificial Sequence
  source: /note="Description of Artificial Sequence: Synthetic peptide"
FAEKSRG

SEQ ID NO: 1881 - protein, 7 aa, Artificial Sequence
  source: /note="Description of Artificial Sequence: Synthetic peptide"
FAGIAQY

SEQ ID NO: 1882 - protein, 7 aa, Artificial Sequence
  source: /note="Description of Artificial Sequence: Synthetic peptide"
FAGKHQN

SEQ ID NO: 1883 - protein, 7 aa, Artificial Sequence
  source: /note="Description of Artificial Sequence: Synthetic peptide"
FAGLTPV

SEQ ID NO: 1884 - protein, 7 aa, Artificial Sequence
  source: /note="Description of Artificial Sequence: Synthetic peptide"
FAGNSPS

SEQ ID NO: 1885 - protein, 7 aa, Artificial Sequence
  source: /note="Description of Artificial Sequence: Synthetic peptide"
FAHTARP

SEQ ID NO: 1886 - protein, 7 aa, Artificial Sequence
  source: /note="Description of Artificial Sequence: Synthetic peptide"
FAKHGGP

SEQ ID NO: 1887 - protein, 7 aa, Artificial Sequence
  source: /note="Description of Artificial Sequence: Synthetic peptide"
FAKPASL

SEQ ID NO: 1888 - protein, 7 aa, Artificial Sequence
  source: /note="Description of Artificial Sequence: Synthetic peptide"
FALEGRS

SEQ ID NO: 1889 - protein, 7 aa, Artificial Sequence
  source: /note="Description of Artificial Sequence: Synthetic peptide"
FALSASL

SEQ ID NO: 1890 - protein, 7 aa, Artificial Sequence
  source: /note="Description of Artificial Sequence: Synthetic peptide"
FAMANDK

SEQ ID NO: 1891 - protein, 7 aa, Artificial Sequence
  source: /note="Description of Artificial Sequence: Synthetic peptide"
FANRATI

SEQ ID NO: 1892 - protein, 7 aa, Artificial Sequence
  source: /note="Description of Artificial Sequence: Synthetic peptide"
FANSAVE

SEQ ID NO: 1893 - protein, 7 aa, Artificial Sequence
  source: /note="Description of Artificial Sequence: Synthetic peptide"
FAPGHAI

SEQ ID NO: 1894 - protein, 7 aa, Artificial Sequence
  source: /note="Description of Artificial Sequence: Synthetic peptide"
FAPLSPH

SEQ ID NO: 1895 - protein, 7 aa, Artificial Sequence
  source: /note="Description of Artificial Sequence: Synthetic peptide"
FAPPPAF

SEQ ID NO: 1896 - protein, 7 aa, Artificial Sequence
  source: /note="Description of Artificial Sequence: Synthetic peptide"
FAPSRND

SEQ ID NO: 1897 - protein, 7 aa, Artificial Sequence
  source: /note="Description of Artificial Sequence: Synthetic peptide"
FAQKLSP

SEQ ID NO: 1898 - protein, 7 aa, Artificial Sequence
  source: /note="Description of Artificial Sequence: Synthetic peptide"
FAQKNLS

SEQ ID NO: 1899 - protein, 7 aa, Artificial Sequence
  source: /note="Description of Artificial Sequence: Synthetic peptide"
FARNPDA

SEQ ID NO: 1900 - protein, 7 aa, Artificial Sequence
  source: /note="Description of Artificial Sequence: Synthetic peptide"
FARPDSM

SEQ ID NO: 1901 - protein, 7 aa, Artificial Sequence
  source: /note="Description of Artificial Sequence: Synthetic peptide"
FARSSIP

SEQ ID NO: 1902 - protein, 7 aa, Artificial Sequence
  source: /note="Description of Artificial Sequence: Synthetic peptide"
FASAAPR

SEQ ID NO: 1903 - protein, 7 aa, Artificial Sequence
  source: /note="Description of Artificial Sequence: Synthetic peptide"
FASARAQ

SEQ ID NO: 1904 - protein, 7 aa, Artificial Sequence
  source: /note="Description of Artificial Sequence: Synthetic peptide"
FASGHFN

SEQ ID NO: 1905 - protein, 7 aa, Artificial Sequence
  source: /note="Description of Artificial Sequence: Synthetic peptide"
FASLVTN

SEQ ID NO: 1906 - protein, 7 aa, Artificial Sequence
  source: /note="Description of Artificial Sequence: Synthetic peptide"
FASSRNN

SEQ ID NO: 1907 - protein, 7 aa, Artificial Sequence
  source: /note="Description of Artificial Sequence: Synthetic peptide"
FASSSSH

SEQ ID NO: 1908 - protein, 7 aa, Artificial Sequence
  source: /note="Description of Artificial Sequence: Synthetic peptide"
FASVRTV

SEQ ID NO: 1909 - protein, 7 aa, Artificial Sequence
  source: /note="Description of Artificial Sequence: Synthetic peptide"
FASYGSP

SEQ ID NO: 1910 - protein, 7 aa, Artificial Sequence
  source: /note="Description of Artificial Sequence: Synthetic peptide"
FATSGYA

SEQ ID NO: 1911 - protein, 7 aa, Artificial Sequence
  source: /note="Description of Artificial Sequence: Synthetic peptide"
FATSTTP

SEQ ID NO: 1912 - protein, 7 aa, Artificial Sequence
  source: /note="Description of Artificial Sequence: Synthetic peptide"
FATTKLD

SEQ ID NO: 1913 - protein, 7 aa, Artificial Sequence
  source: /note="Description of Artificial Sequence: Synthetic peptide"
FCSEQHS

SEQ ID NO: 1914 - protein, 7 aa, Artificial Sequence
  source: /note="Description of Artificial Sequence: Synthetic peptide"
FDAPQTR

SEQ ID NO: 1915 - protein, 7 aa, Artificial Sequence
  source: /note="Description of Artificial Sequence: Synthetic peptide"
FDAYHRL

SEQ ID NO: 1916 - protein, 7 aa, Artificial Sequence
  source: /note="Description of Artificial Sequence: Synthetic peptide"
FDDFALD

SEQ ID NO: 1917 - protein, 7 aa, Artificial Sequence
  source: /note="Description of Artificial Sequence: Synthetic peptide"
FDEAHAP

SEQ ID NO: 1918 - protein, 7 aa, Artificial Sequence
  source: /note="Description of Artificial Sequence: Synthetic peptide"
FDEDDLA

SEQ ID NO: 1919 - protein, 7 aa, Artificial Sequence
  source: /note="Description of Artificial Sequence: Synthetic peptide"
FDGARSE

SEQ ID NO: 1920 - protein, 7 aa, Artificial Sequence
  source: /note="Description of Artificial Sequence: Synthetic peptide"
FDGIRPT

SEQ ID NO: 1921 - protein, 7 aa, Artificial Sequence
  source: /note="Description of Artificial Sequence: Synthetic peptide"
FDHPSFP

SEQ ID NO: 1922 - protein, 7 aa, Artificial Sequence
  source: /note="Description of Artificial Sequence: Synthetic peptide"
FDHPVRM

SEQ ID NO: 1923 - protein, 7 aa, Artificial Sequence
  source: /note="Description of Artificial Sequence: Synthetic peptide"
FDHTKAW

SEQ ID NO: 1924 - protein, 7 aa, Artificial Sequence
  source: /note="Description of Artificial Sequence: Synthetic peptide"
FDKSTKY

SEQ ID NO: 1925 - protein, 7 aa, Artificial Sequence
  source: /note="Description of Artificial Sequence: Synthetic peptide"
FDQHTRS

SEQ ID NO: 1926 - protein, 7 aa, Artificial Sequence
  source: /note="Description of Artificial Sequence: Synthetic peptide"
FDRAMQR

SEQ ID NO: 1927 - protein, 7 aa, Artificial Sequence
  source: /note="Description of Artificial Sequence: Synthetic peptide"
FDRQTQI

SEQ ID NO: 1928 - protein, 7 aa, Artificial Sequence
  source: /note="Description of Artificial Sequence: Synthetic peptide"
FDSVRLS

SEQ ID NO: 1929 - protein, 7 aa, Artificial Sequence
  source: /note="Description of Artificial Sequence: Synthetic peptide"
FDTAVNA

SEQ ID NO: 1930 - protein, 7 aa, Artificial Sequence
  source: /note="Description of Artificial Sequence: Synthetic peptide"
FDTGKFA

SEQ ID NO: 1931 - protein, 7 aa, Artificial Sequence
  source: /note="Description of Artificial Sequence: Synthetic peptide"
FDYGPMD

SEQ ID NO: 1932 - protein, 7 aa, Artificial Sequence
  source: /note="Description of Artificial Sequence: Synthetic peptide"
FEAKSSL

SEQ ID NO: 1933 - protein, 7 aa, Artificial Sequence
  source: /note="Description of Artificial Sequence: Synthetic peptide"
FEAKVTR

SEQ ID NO: 1934 - protein, 7 aa, Artificial Sequence
  source: /note="Description of Artificial Sequence: Synthetic peptide"
FEARLGT

SEQ ID NO: 1935 - protein, 7 aa, Artificial Sequence
  source: /note="Description of Artificial Sequence: Synthetic peptide"
FEDGSLA

SEQ ID NO: 1936 - protein, 7 aa, Artificial Sequence
  source: /note="Description of Artificial Sequence: Synthetic peptide"
FEGSQPP

SEQ ID NO: 1937 - protein, 7 aa, Artificial Sequence
  source: /note="Description of Artificial Sequence: Synthetic peptide"
FEGVQSS

SEQ ID NO: 1938 - protein, 7 aa, Artificial Sequence
  source: /note="Description of Artificial Sequence: Synthetic peptide"
FEHHYTP

SEQ ID NO: 1939 - protein, 7 aa, Artificial Sequence
  source: /note="Description of Artificial Sequence: Synthetic peptide"
FEKRLTI

SEQ ID NO: 1940 - protein, 7 aa, Artificial Sequence
  source: /note="Description of Artificial Sequence: Synthetic peptide"
FEKSLPD

SEQ ID NO: 1941 - protein, 7 aa, Artificial Sequence
  source: /note="Description of Artificial Sequence: Synthetic peptide"
FEMVSSL

SEQ ID NO: 1942 - protein, 7 aa, Artificial Sequence
  source: /note="Description of Artificial Sequence: Synthetic peptide"
FENKYHV

SEQ ID NO: 1943 - protein, 7 aa, Artificial Sequence
  source: /note="Description of Artificial Sequence: Synthetic peptide"
FEPAHAS

SEQ ID NO: 1944 - protein, 7 aa, Artificial Sequence
  source: /note="Description of Artificial Sequence: Synthetic peptide"
FEPSQLR

SEQ ID NO: 1945 - protein, 7 aa, Artificial Sequence
  source: /note="Description of Artificial Sequence: Synthetic peptide"
FEPVQNT

SEQ ID NO: 1946 - protein, 7 aa, Artificial Sequence
  source: /note="Description of Artificial Sequence: Synthetic peptide"
FEQLLDF

SEQ ID NO: 1947 - protein, 7 aa, Artificial Sequence
  source: /note="Description of Artificial Sequence: Synthetic peptide"
FERNRTS

SEQ ID NO: 1948 - protein, 7 aa, Artificial Sequence
  source: /note="Description of Artificial Sequence: Synthetic peptide"
FERPTVI

SEQ ID NO: 1949 - protein, 7 aa, Artificial Sequence
  source: /note="Description of Artificial Sequence: Synthetic peptide"
FERSSGT

SEQ ID NO: 1950 - protein, 7 aa, Artificial Sequence
  source: /note="Description of Artificial Sequence: Synthetic peptide"
FERVPLD

SEQ ID NO: 1951 - protein, 7 aa, Artificial Sequence
  source: /note="Description of Artificial Sequence: Synthetic peptide"
FESNSVL

SEQ ID NO: 1952 - protein, 7 aa, Artificial Sequence
  source: /note="Description of Artificial Sequence: Synthetic peptide"
FESTTSV

SEQ ID NO: 1953 - protein, 7 aa, Artificial Sequence
  source: /note="Description of Artificial Sequence: Synthetic peptide"
FETRYEA

SEQ ID NO: 1954 - protein, 7 aa, Artificial Sequence
  source: /note="Description of Artificial Sequence: Synthetic peptide"
FETTIRL

SEQ ID NO: 1955 - protein, 7 aa, Artificial Sequence
  source: /note="Description of Artificial Sequence: Synthetic peptide"
FEVPSTR

SEQ ID NO: 1956 - protein, 7 aa, Artificial Sequence
  source: /note="Description of Artificial Sequence: Synthetic peptide"
FEYHASG

SEQ ID NO: 1957 - protein, 7 aa, Artificial Sequence
  source: /note="Description of Artificial Sequence: Synthetic peptide"
FFGPGPT

SEQ ID NO: 1958 - protein, 7 aa, Artificial Sequence
  source: /note="Description of Artificial Sequence: Synthetic peptide"
FFPITSA

SEQ ID NO: 1959 - protein, 7 aa, Artificial Sequence
  source: /note="Description of Artificial Sequence: Synthetic peptide"
FFSDGRV

SEQ ID NO: 1960 - protein, 7 aa, Artificial Sequence
  source: /note="Description of Artificial Sequence: Synthetic peptide"
FGACRVS

SEQ ID NO: 1961 - protein, 7 aa, Artificial Sequence
  source: /note="Description of Artificial Sequence: Synthetic peptide"
FGAEPDA

SEQ ID NO: 1962 - protein, 7 aa, Artificial Sequence
  source: /note="Description of Artificial Sequence: Synthetic peptide"
FGDRPFP

SEQ ID NO: 1963 - protein, 7 aa, Artificial Sequence
  source: /note="Description of Artificial Sequence: Synthetic peptide"
FGGGRPE

SEQ ID NO: 1964 - protein, 7 aa, Artificial Sequence
  source: /note="Description of Artificial Sequence: Synthetic peptide"
FGGQGGQ

SEQ ID NO: 1965 - protein, 7 aa, Artificial Sequence
  source: /note="Description of Artificial Sequence: Synthetic peptide"
FGGTGQF

SEQ ID NO: 1966 - protein, 7 aa, Artificial Sequence
  source: /note="Description of Artificial Sequence: Synthetic peptide"
FGHMKTP

SEQ ID NO: 1967 - protein, 7 aa, Artificial Sequence
  source: /note="Description of Artificial Sequence: Synthetic peptide"
FGHPIAS

SEQ ID NO: 1968 - protein, 7 aa, Artificial Sequence
  source: /note="Description of Artificial Sequence: Synthetic peptide"
FGHVHLN

SEQ ID NO: 1969 - protein, 7 aa, Artificial Sequence
  source: /note="Description of Artificial Sequence: Synthetic peptide"
FGIAGSP

SEQ ID NO: 1970 - protein, 7 aa, Artificial Sequence
  source: /note="Description of Artificial Sequence: Synthetic peptide"
FGKISMT

SEQ ID NO: 1971 - protein, 7 aa, Artificial Sequence
  source: /note="Description of Artificial Sequence: Synthetic peptide"
FGLSPLP

SEQ ID NO: 1972 - protein, 7 aa, Artificial Sequence
  source: /note="Description of Artificial Sequence: Synthetic peptide"
FGLSSAA

SEQ ID NO: 1973 - protein, 7 aa, Artificial Sequence
  source: /note="Description of Artificial Sequence: Synthetic peptide"
FGLTRPE

SEQ ID NO: 1974 - protein, 7 aa, Artificial Sequence
  source: /note="Description of Artificial Sequence: Synthetic peptide"
FGNRLSN

SEQ ID NO: 1975 - protein, 7 aa, Artificial Sequence
  source: /note="Description of Artificial Sequence: Synthetic peptide"
FGPMLLG

SEQ ID NO: 1976 - protein, 7 aa, Artificial Sequence
  source: /note="Description of Artificial Sequence: Synthetic peptide"
FGPNKAD

SEQ ID NO: 1977 - protein, 7 aa, Artificial Sequence
  source: /note="Description of Artificial Sequence: Synthetic peptide"
FGPPSGF

SEQ ID NO: 1978 - protein, 7 aa, Artificial Sequence
  source: /note="Description of Artificial Sequence: Synthetic peptide"
FGQHAVL

SEQ ID NO: 1979 - protein, 7 aa, Artificial Sequence
  source: /note="Description of Artificial Sequence: Synthetic peptide"
FGQKHTE

SEQ ID NO: 1980 - protein, 7 aa, Artificial Sequence
  source: /note="Description of Artificial Sequence: Synthetic peptide"
FGQNRVT

SEQ ID NO: 1981 - protein, 7 aa, Artificial Sequence
  source: /note="Description of Artificial Sequence: Synthetic peptide"
FGQTALG

SEQ ID NO: 1982 - protein, 7 aa, Artificial Sequence
  source: /note="Description of Artificial Sequence: Synthetic peptide"
FGRFPTE

SEQ ID NO: 1983 - protein, 7 aa, Artificial Sequence
  source: /note="Description of Artificial Sequence: Synthetic peptide"
FGRTPYS

SEQ ID NO: 1984 - protein, 7 aa, Artificial Sequence
  source: /note="Description of Artificial Sequence: Synthetic peptide"
FGSDTLI

SEQ ID NO: 1985 - protein, 7 aa, Artificial Sequence
  source: /note="Description of Artificial Sequence: Synthetic peptide"
FGSHGER

SEQ ID NO: 1986 - protein, 7 aa, Artificial Sequence
  source: /note="Description of Artificial Sequence: Synthetic peptide"
FGTGYAG

SEQ ID NO: 1987 - protein, 7 aa, Artificial Sequence
  source: /note="Description of Artificial Sequence: Synthetic peptide"
FGTRMEP

SEQ ID NO: 1988 - protein, 7 aa, Artificial Sequence
  source: /note="Description of Artificial Sequence: Synthetic peptide"
FGTSEDV

SEQ ID NO: 1989 - protein, 7 aa, Artificial Sequence
  source: /note="Description of Artificial Sequence: Synthetic peptide"
FGTTRMA

SEQ ID NO: 1990 - protein, 7 aa, Artificial Sequence
  source: /note="Description of Artificial Sequence: Synthetic peptide"
FGTVRPS

SEQ ID NO: 1991 - protein, 7 aa, Artificial Sequence
  source: /note="Description of Artificial Sequence: Synthetic peptide"
FGVQKIT

SEQ ID NO: 1992 - protein, 7 aa, Artificial Sequence
  source: /note="Description of Artificial Sequence: Synthetic peptide"
FHASHLG

SEQ ID NO: 1993 - protein, 7 aa, Artificial Sequence
  source: /note="Description of Artificial Sequence: Synthetic peptide"
FHDPYIW

SEQ ID NO: 1994 - protein, 7 aa, Artificial Sequence
  source: /note="Description of Artificial Sequence: Synthetic peptide"
FHGLTVA

SEQ ID NO: 1995 - protein, 7 aa, Artificial Sequence
  source: /note="Description of Artificial Sequence: Synthetic peptide"
FHGTSLG

SEQ ID NO: 1996 - protein, 7 aa, Artificial Sequence
  source: /note="Description of Artificial Sequence: Synthetic peptide"
FHLPPEL

SEQ ID NO: 1997 - protein, 7 aa, Artificial Sequence
  source: /note="Description of Artificial Sequence: Synthetic peptide"
FHLSSAS

SEQ ID NO: 1998 - protein, 7 aa, Artificial Sequence
  source: /note="Description of Artificial Sequence: Synthetic peptide"
FHPASVN

SEQ ID NO: 1999 - protein, 7 aa, Artificial Sequence
  source: /note="Description of Artificial Sequence: Synthetic peptide"
FHPHSPP

SEQ ID NO: 2000 - protein, 7 aa, Artificial Sequence
  source: /note="Description of Artificial Sequence: Synthetic peptide"
FHQRSQS

SEQ ID NO: 2001 - protein, 7 aa, Artificial Sequence
  source: /note="Description of Artificial Sequence: Synthetic peptide"
FHRNVAN

SEQ ID NO: 2002 - protein, 7 aa, Artificial Sequence
  source: /note="Description of Artificial Sequence: Synthetic peptide"
FHTANTE

SEQ ID NO: 2003 - protein, 7 aa, Artificial Sequence
  source: /note="Description of Artificial Sequence: Synthetic peptide"
FIDHSIA

SEQ ID NO: 2004 - protein, 7 aa, Artificial Sequence
  source: /note="Description of Artificial Sequence: Synthetic peptide"
FIGNATQ

SEQ ID NO: 2005 - protein, 7 aa, Artificial Sequence
  source: /note="Description of Artificial Sequence: Synthetic peptide"
FIGTASQ

SEQ ID NO: 2006 - protein, 7 aa, Artificial Sequence
  source: /note="Description of Artificial Sequence: Synthetic peptide"
FIGYPQG

SEQ ID NO: 2007 - protein, 7 aa, Artificial Sequence
  source: /note="Description of Artificial Sequence: Synthetic peptide"
FIPSVSV

SEQ ID NO: 2008 - protein, 7 aa, Artificial Sequence
  source: /note="Description of Artificial Sequence: Synthetic peptide"
FIQDKHV

SEQ ID NO: 2009 - protein, 7 aa, Artificial Sequence
  source: /note="Description of Artificial Sequence: Synthetic peptide"
FIRHESV

SEQ ID NO: 2010 - protein, 7 aa, Artificial Sequence
  source: /note="Description of Artificial Sequence: Synthetic peptide"
FIRPDLD

SEQ ID NO: 2011 - protein, 7 aa, Artificial Sequence
  source: /note="Description of Artificial Sequence: Synthetic peptide"
FITGALG

SEQ ID NO: 2012 - protein, 7 aa, Artificial Sequence
  source: /note="Description of Artificial Sequence: Synthetic peptide"
FKAYDNI

SEQ ID NO: 2013 - protein, 7 aa, Artificial Sequence
  source: /note="Description of Artificial Sequence: Synthetic peptide"
FKDWFED

SEQ ID NO: 2014 - protein, 7 aa, Artificial Sequence
  source: /note="Description of Artificial Sequence: Synthetic peptide"
FKESWPA

SEQ ID NO: 2015 - protein, 7 aa, Artificial Sequence
  source: /note="Description of Artificial Sequence: Synthetic peptide"
FKETSNH

SEQ ID NO: 2016 - protein, 7 aa, Artificial Sequence
  source: /note="Description of Artificial Sequence: Synthetic peptide"
FKGMGVG

SEQ ID NO: 2017 - protein, 7 aa, Artificial Sequence
  source: /note="Description of Artificial Sequence: Synthetic peptide"
FKHPMDG

SEQ ID NO: 2018 - protein, 7 aa, Artificial Sequence
  source: /note="Description of Artificial Sequence: Synthetic peptide"
FKLGPPE

SEQ ID NO: 2019 - protein, 7 aa, Artificial Sequence
  source: /note="Description of Artificial Sequence: Synthetic peptide"
FKLVTRE

SEQ ID NO: 2020 - protein, 7 aa, Artificial Sequence
  source: /note="Description of Artificial Sequence: Synthetic peptide"
FKNGTPP

SEQ ID NO: 2021 - protein, 7 aa, Artificial Sequence
  source: /note="Description of Artificial Sequence: Synthetic peptide"
FKNVLGT

SEQ ID NO: 2022 - protein, 7 aa, Artificial Sequence
  source: /note="Description of Artificial Sequence: Synthetic peptide"
FKPANNV

SEQ ID NO: 2023 - protein, 7 aa, Artificial Sequence
  source: /note="Description of Artificial Sequence: Synthetic peptide"
FKPPPMS

SEQ ID NO: 2024 - protein, 7 aa, Artificial Sequence
  source: /note="Description of Artificial Sequence: Synthetic peptide"
FKQPPYV

SEQ ID NO: 2025 - protein, 7 aa, Artificial Sequence
  source: /note="Description of Artificial Sequence: Synthetic peptide"
FKQPYAR

SEQ ID NO: 2026 - protein, 7 aa, Artificial Sequence
  source: /note="Description of Artificial Sequence: Synthetic peptide"
FKSVGTI

SEQ ID NO: 2027 - protein, 7 aa, Artificial Sequence
  source: /note="Description of Artificial Sequence: Synthetic peptide"
FKTMERL

SEQ ID NO: 2028 - protein, 7 aa, Artificial Sequence
  source: /note="Description of Artificial Sequence: Synthetic peptide"
FKVHASS

SEQ ID NO: 2029 - protein, 7 aa, Artificial Sequence
  source: /note="Description of Artificial Sequence: Synthetic peptide"
FLAKLQP

SEQ ID NO: 2030 - protein, 7 aa, Artificial Sequence
  source: /note="Description of Artificial Sequence: Synthetic peptide"
FLALERQ

SEQ ID NO: 2031 - protein, 7 aa, Artificial Sequence
  source: /note="Description of Artificial Sequence: Synthetic peptide"
FLASLND

SEQ ID NO: 2032 - protein, 7 aa, Artificial Sequence
  source: /note="Description of Artificial Sequence: Synthetic peptide"
FLDNRAV

SEQ ID NO: 2033 - protein, 7 aa, Artificial Sequence
  source: /note="Description of Artificial Sequence: Synthetic peptide"
FLGAAGQ

SEQ ID NO: 2034 - protein, 7 aa, Artificial Sequence
  source: /note="Description of Artificial Sequence: Synthetic peptide"
FLGAHSA

SEQ ID NO: 2035 - protein, 7 aa, Artificial Sequence
  source: /note="Description of Artificial Sequence: Synthetic peptide"
FLHAMDL

SEQ ID NO: 2036 - protein, 7 aa, Artificial Sequence
  source: /note="Description of Artificial Sequence: Synthetic peptide"
FLHGETG

SEQ ID NO: 2037 - protein, 7 aa, Artificial Sequence
  source: /note="Description of Artificial Sequence: Synthetic peptide"
FLKSNIA

SEQ ID NO: 2038 - protein, 7 aa, Artificial Sequence
  source: /note="Description of Artificial Sequence: Synthetic peptide"
FLKTAVP

SEQ ID NO: 2039 - protein, 7 aa, Artificial Sequence
  source: /note="Description of Artificial Sequence: Synthetic peptide"
FLKTDTG

SEQ ID NO: 2040 - protein, 7 aa, Artificial Sequence
  source: /note="Description of Artificial Sequence: Synthetic peptide"
FLPERGS

SEQ ID NO: 2041 - protein, 7 aa, Artificial Sequence
  source: /note="Description of Artificial Sequence: Synthetic peptide"
FLPQHSP

SEQ ID NO: 2042 - protein, 7 aa, Artificial Sequence
  source: /note="Description of Artificial Sequence: Synthetic peptide"
FLPSGGA

SEQ ID NO: 2043 - protein, 7 aa, Artificial Sequence
  source: /note="Description of Artificial Sequence: Synthetic peptide"
FLRENAS

SEQ ID NO: 2044 - protein, 7 aa, Artificial Sequence
  source: /note="Description of Artificial Sequence: Synthetic peptide"
FLRIPDD

SEQ ID NO: 2045 - protein, 7 aa, Artificial Sequence
  source: /note="Description of Artificial Sequence: Synthetic peptide"
FLSKPLS

SEQ ID NO: 2046 - protein, 7 aa, Artificial Sequence
  source: /note="Description of Artificial Sequence: Synthetic peptide"
FLSNSNA

SEQ ID NO: 2047 - protein, 7 aa, Artificial Sequence
  source: /note="Description of Artificial Sequence: Synthetic peptide"
FLSPNLI

SEQ ID NO: 2048 - protein, 7 aa, Artificial Sequence
  source: /note="Description of Artificial Sequence: Synthetic peptide"
FLSSDGR

SEQ ID NO: 2049 - protein, 7 aa, Artificial Sequence
  source: /note="Description of Artificial Sequence: Synthetic peptide"
FLSVPET

SEQ ID NO: 2050 - protein, 7 aa, Artificial Sequence
  source: /note="Description of Artificial Sequence: Synthetic peptide"
FLTAGMP

SEQ ID NO: 2051 - protein, 7 aa, Artificial Sequence
  source: /note="Description of Artificial Sequence: Synthetic peptide"
FLTSAKS

SEQ ID NO: 2052 - protein, 7 aa, Artificial Sequence
  source: /note="Description of Artificial Sequence: Synthetic peptide"
FLTTGVD

SEQ ID NO: 2053 - protein, 7 aa, Artificial Sequence
  source: /note="Description of Artificial Sequence: Synthetic peptide"
FMFNDSP

SEQ ID NO: 2054 - protein, 7 aa, Artificial Sequence
  source: /note="Description of Artificial Sequence: Synthetic peptide"
FMGTVVN

SEQ ID NO: 2055 - protein, 7 aa, Artificial Sequence
  source: /note="Description of Artificial Sequence: Synthetic peptide"
FMHQQGL

SEQ ID NO: 2056 - protein, 7 aa, Artificial Sequence
  source: /note="Description of Artificial Sequence: Synthetic peptide"
FMLRDAT

SEQ ID NO: 2057 - protein, 7 aa, Artificial Sequence
  source: /note="Description of Artificial Sequence: Synthetic peptide"
FMMTGTA

SEQ ID NO: 2058 - protein, 7 aa, Artificial Sequence
  source: /note="Description of Artificial Sequence: Synthetic peptide"
FMPKTSP

SEQ ID NO: 2059 - protein, 7 aa, Artificial Sequence
  source: /note="Description of Artificial Sequence: Synthetic peptide"
FMRSTQS

SEQ ID NO: 2060 - protein, 7 aa, Artificial Sequence
  source: /note="Description of Artificial Sequence: Synthetic peptide"
FMSRGLA

SEQ ID NO: 2061 - protein, 7 aa, Artificial Sequence
  source: /note="Description of Artificial Sequence: Synthetic peptide"
FMTERAA

SEQ ID NO: 2062 - protein, 7 aa, Artificial Sequence
  source: /note="Description of Artificial Sequence: Synthetic peptide"
FMTNLSG

SEQ ID NO: 2063 - protein, 7 aa, Artificial Sequence
  source: /note="Description of Artificial Sequence: Synthetic peptide"
FMTSGDL

SEQ ID NO: 2064 - protein, 7 aa, Artificial Sequence
  source: /note="Description of Artificial Sequence: Synthetic peptide"
FMVDPVN

SEQ ID NO: 2065 - protein, 7 aa, Artificial Sequence
  source: /note="Description of Artificial Sequence: Synthetic peptide"
FMVSAPL

SEQ ID NO: 2066 - protein, 7 aa, Artificial Sequence
  source: /note="Description of Artificial Sequence: Synthetic peptide"
FMYGNGV

SEQ ID NO: 2067 - protein, 7 aa, Artificial Sequence
  source: /note="Description of Artificial Sequence: Synthetic peptide"
FNAIHVS

SEQ ID NO: 2068 - protein, 7 aa, Artificial Sequence
  source: /note="Description of Artificial Sequence: Synthetic peptide"
FNELSGL

SEQ ID NO: 2069 - protein, 7 aa, Artificial Sequence
  source: /note="Description of Artificial Sequence: Synthetic peptide"
FNFNKMD

SEQ ID NO: 2070 - protein, 7 aa, Artificial Sequence
  source: /note="Description of Artificial Sequence: Synthetic peptide"
FNGDSPA

SEQ ID NO: 2071 - protein, 7 aa, Artificial Sequence
  source: /note="Description of Artificial Sequence: Synthetic peptide"
FNGPYEL

SEQ ID NO: 2072 - protein, 7 aa, Artificial Sequence
  source: /note="Description of Artificial Sequence: Synthetic peptide"
FNLSTSA

SEQ ID NO: 2073 - protein, 7 aa, Artificial Sequence
  source: /note="Description of Artificial Sequence: Synthetic peptide"
FNPTVRE

SEQ ID NO: 2074 - protein, 7 aa, Artificial Sequence
  source: /note="Description of Artificial Sequence: Synthetic peptide"
FNRPVTT

SEQ ID NO: 2075 - protein, 7 aa, Artificial Sequence
  source: /note="Description of Artificial Sequence: Synthetic peptide"
FNSDSNS

SEQ ID NO: 2076 - protein, 7 aa, Artificial Sequence
  source: /note="Description of Artificial Sequence: Synthetic peptide"
FNSSPDL

SEQ ID NO: 2077 - protein, 7 aa, Artificial Sequence
  source: /note="Description of Artificial Sequence: Synthetic peptide"
FNTPTKV

SEQ ID NO: 2078 - protein, 7 aa, Artificial Sequence
  source: /note="Description of Artificial Sequence: Synthetic peptide"
FNVMQER

SEQ ID NO: 2079 - protein, 7 aa, Artificial Sequence
  source: /note="Description of Artificial Sequence: Synthetic peptide"
FPALSGG

SEQ ID NO: 2080 - protein, 7 aa, Artificial Sequence
  source: /note="Description of Artificial Sequence: Synthetic peptide"
FPAVNVP

SEQ ID NO: 2081 - protein, 7 aa, Artificial Sequence
  source: /note="Description of Artificial Sequence: Synthetic peptide"
FPERGMV

SEQ ID NO: 2082 - protein, 7 aa, Artificial Sequence
  source: /note="Description of Artificial Sequence: Synthetic peptide"
FPFNSGS

SEQ ID NO: 2083 - protein, 7 aa, Artificial Sequence
  source: /note="Description of Artificial Sequence: Synthetic peptide"
FPGFPSK

SEQ ID NO: 2084 - protein, 7 aa, Artificial Sequence
  source: /note="Description of Artificial Sequence: Synthetic peptide"
FPGSDSL

SEQ ID NO: 2085 - protein, 7 aa, Artificial Sequence
  source: /note="Description of Artificial Sequence: Synthetic peptide"
FPHTLSE

SEQ ID NO: 2086 - protein, 7 aa, Artificial Sequence
  source: /note="Description of Artificial Sequence: Synthetic peptide"
FPKGSTP

SEQ ID NO: 2087 - protein, 7 aa, Artificial Sequence
  source: /note="Description of Artificial Sequence: Synthetic peptide"
FPKTDDT

SEQ ID NO: 2088 - protein, 7 aa, Artificial Sequence
  source: /note="Description of Artificial Sequence: Synthetic peptide"
FPKYAIA

SEQ ID NO: 2089 - protein, 7 aa, Artificial Sequence
  source: /note="Description of Artificial Sequence: Synthetic peptide"
FPLMSSN

SEQ ID NO: 2090 - protein, 7 aa, Artificial Sequence
  source: /note="Description of Artificial Sequence: Synthetic peptide"
FPLSDPY

SEQ ID NO: 2091 - protein, 7 aa, Artificial Sequence
  source: /note="Description of Artificial Sequence: Synthetic peptide"
FPLSQQA

SEQ ID NO: 2092 - protein, 7 aa, Artificial Sequence
  source: /note="Description of Artificial Sequence: Synthetic peptide"
FPMAKPY

SEQ ID NO: 2093 - protein, 7 aa, Artificial Sequence
  source: /note="Description of Artificial Sequence: Synthetic peptide"
FPMRGAP

SEQ ID NO: 2094 - protein, 7 aa, Artificial Sequence
  source: /note="Description of Artificial Sequence: Synthetic peptide"
FPMTNPA

SEQ ID NO: 2095 - protein, 7 aa, Artificial Sequence
  source: /note="Description of Artificial Sequence: Synthetic peptide"
FPNAQLV

SEQ ID NO: 2096 - protein, 7 aa, Artificial Sequence
  source: /note="Description of Artificial Sequence: Synthetic peptide"
FPNDLPL

SEQ ID NO: 2097 - protein, 7 aa, Artificial Sequence
  source: /note="Description of Artificial Sequence: Synthetic peptide"
FPNMSSV

SEQ ID NO: 2098 - protein, 7 aa, Artificial Sequence
  source: /note="Description of Artificial Sequence: Synthetic peptide"
FPNRFEA

SEQ ID NO: 2099 - protein, 7 aa, Artificial Sequence
  source: /note="Description of Artificial Sequence: Synthetic peptide"
FPPGVRP

SEQ ID NO: 2100 - protein, 7 aa, Artificial Sequence
  source: /note="Description of Artificial Sequence: Synthetic peptide"
FPPRDTP

SEQ ID NO: 2101 - protein, 7 aa, Artificial Sequence
  source: /note="Description of Artificial Sequence: Synthetic peptide"
FPPSCAN

SEQ ID NO: 2102 - protein, 7 aa, Artificial Sequence
  source: /note="Description of Artificial Sequence: Synthetic peptide"
FPPSLSA

SEQ ID NO: 2103 - protein, 7 aa, Artificial Sequence
  source: /note="Description of Artificial Sequence: Synthetic peptide"
FPPSSLP

SEQ ID NO: 2104 - protein, 7 aa, Artificial Sequence
  source: /note="Description of Artificial Sequence: Synthetic peptide"
FPPTNSF

SEQ ID NO: 2105 - protein, 7 aa, Artificial Sequence
  source: /note="Description of Artificial Sequence: Synthetic peptide"
FPQITLN

SEQ ID NO: 2106 - protein, 7 aa, Artificial Sequence
  source: /note="Description of Artificial Sequence: Synthetic peptide"
FPQKEGT

SEQ ID NO: 2107 - protein, 7 aa, Artificial Sequence
  source: /note="Description of Artificial Sequence: Synthetic peptide"
FPQPADM

SEQ ID NO: 2108 - protein, 7 aa, Artificial Sequence
  source: /note="Description of Artificial Sequence: Synthetic peptide"
FPRAIDA

SEQ ID NO: 2109 - protein, 7 aa, Artificial Sequence
  source: /note="Description of Artificial Sequence: Synthetic peptide"
FPRGAVL

SEQ ID NO: 2110 - protein, 7 aa, Artificial Sequence
  source: /note="Description of Artificial Sequence: Synthetic peptide"
FPRPQLG

SEQ ID NO: 2111 - protein, 7 aa, Artificial Sequence
  source: /note="Description of Artificial Sequence: Synthetic peptide"
FPSNPAH

SEQ ID NO: 2112 - protein, 7 aa, Artificial Sequence
  source: /note="Description of Artificial Sequence: Synthetic peptide"
FPSSQQT

SEQ ID NO: 2113 - protein, 7 aa, Artificial Sequence
  source: /note="Description of Artificial Sequence: Synthetic peptide"
FPSSRLS

SEQ ID NO: 2114 - protein, 7 aa, Artificial Sequence
  source: /note="Description of Artificial Sequence: Synthetic peptide"
FPSTTLP

SEQ ID NO: 2115 - protein, 7 aa, Artificial Sequence
  source: /note="Description of Artificial Sequence: Synthetic peptide"
FPTDYVP

SEQ ID NO: 2116 - protein, 7 aa, Artificial Sequence
  source: /note="Description of Artificial Sequence: Synthetic peptide"
FPTKGFV

SEQ ID NO: 2117 - protein, 7 aa, Artificial Sequence
  source: /note="Description of Artificial Sequence: Synthetic peptide"
FPTSTSS

SEQ ID NO: 2118 - protein, 7 aa, Artificial Sequence
  source: /note="Description of Artificial Sequence: Synthetic peptide"
FPTSTTP

SEQ ID NO: 2119 - protein, 7 aa, Artificial Sequence
  source: /note="Description of Artificial Sequence: Synthetic peptide"
FPVAQHD

SEQ ID NO: 2120 - protein, 7 aa, Artificial Sequence
  source: /note="Description of Artificial Sequence: Synthetic peptide"
FPVDGRQ

SEQ ID NO: 2121 - protein, 7 aa, Artificial Sequence
  source: /note="Description of Artificial Sequence: Synthetic peptide"
FPVGNRL

SEQ ID NO: 2122 - protein, 7 aa, Artificial Sequence
  source: /note="Description of Artificial Sequence: Synthetic peptide"
FPVGQLA

SEQ ID NO: 2123 - protein, 7 aa, Artificial Sequence
  source: /note="Description of Artificial Sequence: Synthetic peptide"
FPVKTMV

SEQ ID NO: 2124 - protein, 7 aa, Artificial Sequence
  source: /note="Description of Artificial Sequence: Synthetic peptide"
FPVSARD

SEQ ID NO: 2125 - protein, 7 aa, Artificial Sequence
  source: /note="Description of Artificial Sequence: Synthetic peptide"
FQAAPDH

SEQ ID NO: 2126 - protein, 7 aa, Artificial Sequence
  source: /note="Description of Artificial Sequence: Synthetic peptide"
FQAGKAV

SEQ ID NO: 2127 - protein, 7 aa, Artificial Sequence
  source: /note="Description of Artificial Sequence: Synthetic peptide"
FQGAISR

SEQ ID NO: 2128 - protein, 7 aa, Artificial Sequence
  source: /note="Description of Artificial Sequence: Synthetic peptide"
FQGLRLG

SEQ ID NO: 2129 - protein, 7 aa, Artificial Sequence
  source: /note="Description of Artificial Sequence: Synthetic peptide"
FQGSVPE

SEQ ID NO: 2130 - protein, 7 aa, Artificial Sequence
  source: /note="Description of Artificial Sequence: Synthetic peptide"
FQITAQG

SEQ ID NO: 2131 - protein, 7 aa, Artificial Sequence
  source: /note="Description of Artificial Sequence: Synthetic peptide"
FQKSHAG

SEQ ID NO: 2132 - protein, 7 aa, Artificial Sequence
  source: /note="Description of Artificial Sequence: Synthetic peptide"
FQNPQSS

SEQ ID NO: 2133 - protein, 7 aa, Artificial Sequence
  source: /note="Description of Artificial Sequence: Synthetic peptide"
FQNQGPL

SEQ ID NO: 2134 - protein, 7 aa, Artificial Sequence
  source: /note="Description of Artificial Sequence: Synthetic peptide"
FQQTGPR

SEQ ID NO: 2135 - protein, 7 aa, Artificial Sequence
  source: /note="Description of Artificial Sequence: Synthetic peptide"
FQRATLQ

SEQ ID NO: 2136 - protein, 7 aa, Artificial Sequence
  source: /note="Description of Artificial Sequence: Synthetic peptide"
FQSATVA

SEQ ID NO: 2137 - protein, 7 aa, Artificial Sequence
  source: /note="Description of Artificial Sequence: Synthetic peptide"
FQTPSGD

SEQ ID NO: 2138 - protein, 7 aa, Artificial Sequence
  source: /note="Description of Artificial Sequence: Synthetic peptide"
FQVVGSP

SEQ ID NO: 2139 - protein, 7 aa, Artificial Sequence
  source: /note="Description of Artificial Sequence: Synthetic peptide"
FQYEPAI

SEQ ID NO: 2140 - protein, 7 aa, Artificial Sequence
  source: /note="Description of Artificial Sequence: Synthetic peptide"
FRADLLN

SEQ ID NO: 2141 - protein, 7 aa, Artificial Sequence
  source: /note="Description of Artificial Sequence: Synthetic peptide"
FRAIGSG

SEQ ID NO: 2142 - protein, 7 aa, Artificial Sequence
  source: /note="Description of Artificial Sequence: Synthetic peptide"
FRALVEP

SEQ ID NO: 2143 - protein, 7 aa, Artificial Sequence
  source: /note="Description of Artificial Sequence: Synthetic peptide"
FRDEQPS

SEQ ID NO: 2144 - protein, 7 aa, Artificial Sequence
  source: /note="Description of Artificial Sequence: Synthetic peptide"
FRDQADG

SEQ ID NO: 2145 - protein, 7 aa, Artificial Sequence
  source: /note="Description of Artificial Sequence: Synthetic peptide"
FRDSPPS

SEQ ID NO: 2146 - protein, 7 aa, Artificial Sequence
  source: /note="Description of Artificial Sequence: Synthetic peptide"
FREEPQT

SEQ ID NO: 2147 - protein, 7 aa, Artificial Sequence
  source: /note="Description of Artificial Sequence: Synthetic peptide"
FRGPSSS

SEQ ID NO: 2148 - protein, 7 aa, Artificial Sequence
  source: /note="Description of Artificial Sequence: Synthetic peptide"
FRHADAV

SEQ ID NO: 2149 - protein, 7 aa, Artificial Sequence
  source: /note="Description of Artificial Sequence: Synthetic peptide"
FRHDHSV

SEQ ID NO: 2150 - protein, 7 aa, Artificial Sequence
  source: /note="Description of Artificial Sequence: Synthetic peptide"
FRLHSTS

SEQ ID NO: 2151 - protein, 7 aa, Artificial Sequence
  source: /note="Description of Artificial Sequence: Synthetic peptide"
FRLPHET

SEQ ID NO: 2152 - protein, 7 aa, Artificial Sequence
  source: /note="Description of Artificial Sequence: Synthetic peptide"
FRMGEAP

SEQ ID NO: 2153 - protein, 7 aa, Artificial Sequence
  source: /note="Description of Artificial Sequence: Synthetic peptide"
FRMQNAA

SEQ ID NO: 2154 - protein, 7 aa, Artificial Sequence
  source: /note="Description of Artificial Sequence: Synthetic peptide"
FRNGPEP

SEQ ID NO: 2155 - protein, 7 aa, Artificial Sequence
  source: /note="Description of Artificial Sequence: Synthetic peptide"
FRNNVSL

SEQ ID NO: 2156 - protein, 7 aa, Artificial Sequence
  source: /note="Description of Artificial Sequence: Synthetic peptide"
FRPLALE

SEQ ID NO: 2157 - protein, 7 aa, Artificial Sequence
  source: /note="Description of Artificial Sequence: Synthetic peptide"
FRPLSTP

SEQ ID NO: 2158 - protein, 7 aa, Artificial Sequence
  source: /note="Description of Artificial Sequence: Synthetic peptide"
FRPPALS

SEQ ID NO: 2159 - protein, 7 aa, Artificial Sequence
  source: /note="Description of Artificial Sequence: Synthetic peptide"
FRPQDTM

SEQ ID NO: 2160 - protein, 7 aa, Artificial Sequence
  source: /note="Description of Artificial Sequence: Synthetic peptide"
FRQTPNH

SEQ ID NO: 2161 - protein, 7 aa, Artificial Sequence
  source: /note="Description of Artificial Sequence: Synthetic peptide"
FRSDSHN

SEQ ID NO: 2162 - protein, 7 aa, Artificial Sequence
  source: /note="Description of Artificial Sequence: Synthetic peptide"
FRSGLAI

SEQ ID NO: 2163 - protein, 7 aa, Artificial Sequence
  source: /note="Description of Artificial Sequence: Synthetic peptide"
FRSGLEY

SEQ ID NO: 2164 - protein, 7 aa, Artificial Sequence
  source: /note="Description of Artificial Sequence: Synthetic peptide"
FRSGMVA

SEQ ID NO: 2165 - protein, 7 aa, Artificial Sequence
  source: /note="Description of Artificial Sequence: Synthetic peptide"
FRSKIDA

SEQ ID NO: 2166 - protein, 7 aa, Artificial Sequence
  source: /note="Description of Artificial Sequence: Synthetic peptide"
FRSPAGL

SEQ ID NO: 2167 - protein, 7 aa, Artificial Sequence
  source: /note="Description of Artificial Sequence: Synthetic peptide"
FRSTENN

SEQ ID NO: 2168 - protein, 7 aa, Artificial Sequence
  source: /note="Description of Artificial Sequence: Synthetic peptide"
FRTPHSE

SEQ ID NO: 2169 - protein, 7 aa, Artificial Sequence
  source: /note="Description of Artificial Sequence: Synthetic peptide"
FRTSTEG

SEQ ID NO: 2170 - protein, 7 aa, Artificial Sequence
  source: /note="Description of Artificial Sequence: Synthetic peptide"
FRVPDAD

SEQ ID NO: 2171 - protein, 7 aa, Artificial Sequence
  source: /note="Description of Artificial Sequence: Synthetic peptide"
FSADVDG

SEQ ID NO: 2172 - protein, 7 aa, Artificial Sequence
  source: /note="Description of Artificial Sequence: Synthetic peptide"
FSARGSG

SEQ ID NO: 2173 - protein, 7 aa, Artificial Sequence
  source: /note="Description of Artificial Sequence: Synthetic peptide"
FSDGESL

SEQ ID NO: 2174 - protein, 7 aa, Artificial Sequence
  source: /note="Description of Artificial Sequence: Synthetic peptide"
FSDHTAH

SEQ ID NO: 2175 - protein, 7 aa, Artificial Sequence
  source: /note="Description of Artificial Sequence: Synthetic peptide"
FSDNALD

SEQ ID NO: 2176 - protein, 7 aa, Artificial Sequence
  source: /note="Description of Artificial Sequence: Synthetic peptide"
FSDRPGD

SEQ ID NO: 2177 - protein, 7 aa, Artificial Sequence
  source: /note="Description of Artificial Sequence: Synthetic peptide"
FSEHVSK

SEQ ID NO: 2178 - protein, 7 aa, Artificial Sequence
  source: /note="Description of Artificial Sequence: Synthetic peptide"
FSERHSE

SEQ ID NO: 2179 - protein, 7 aa, Artificial Sequence
  source: /note="Description of Artificial Sequence: Synthetic peptide"
FSESKTP

SEQ ID NO: 2180 - protein, 7 aa, Artificial Sequence
  source: /note="Description of Artificial Sequence: Synthetic peptide"
FSETSNM

SEQ ID NO: 2181 - protein, 7 aa, Artificial Sequence
  source: /note="Description of Artificial Sequence: Synthetic peptide"
FSGEPLS

SEQ ID NO: 2182 - protein, 7 aa, Artificial Sequence
  source: /note="Description of Artificial Sequence: Synthetic peptide"
FSGHNTI

SEQ ID NO: 2183 - protein, 7 aa, Artificial Sequence
  source: /note="Description of Artificial Sequence: Synthetic peptide"
FSHPGAA

SEQ ID NO: 2184 - protein, 7 aa, Artificial Sequence
  source: /note="Description of Artificial Sequence: Synthetic peptide"
FSHPHPA

SEQ ID NO: 2185 - protein, 7 aa, Artificial Sequence
  source: /note="Description of Artificial Sequence: Synthetic peptide"
FSHSQST

SEQ ID NO: 2186 - protein, 7 aa, Artificial Sequence
  source: /note="Description of Artificial Sequence: Synthetic peptide"
FSHSSGK

SEQ ID NO: 2187 - protein, 7 aa, Artificial Sequence
  source: /note="Description of Artificial Sequence: Synthetic peptide"
FSITPIK

SEQ ID NO: 2188 - protein, 7 aa, Artificial Sequence
  source: /note="Description of Artificial Sequence: Synthetic peptide"
FSLMPRE

SEQ ID NO: 2189 - protein, 7 aa, Artificial Sequence
  source: /note="Description of Artificial Sequence: Synthetic peptide"
FSLTADK

SEQ ID NO: 2190 - protein, 7 aa, Artificial Sequence
  source: /note="Description of Artificial Sequence: Synthetic peptide"
FSMTAQD

SEQ ID NO: 2191 - protein, 7 aa, Artificial Sequence
  source: /note="Description of Artificial Sequence: Synthetic peptide"
FSMTVHH

SEQ ID NO: 2192 - protein, 7 aa, Artificial Sequence
  source: /note="Description of Artificial Sequence: Synthetic peptide"
FSNQMPI

SEQ ID NO: 2193 - protein, 7 aa, Artificial Sequence
  source: /note="Description of Artificial Sequence: Synthetic peptide"
FSNSGPF

SEQ ID NO: 2194 - protein, 7 aa, Artificial Sequence
  source: /note="Description of Artificial Sequence: Synthetic peptide"
FSNTTSL

SEQ ID NO: 2195 - protein, 7 aa, Artificial Sequence
  source: /note="Description of Artificial Sequence: Synthetic peptide"
FSNTTTT

SEQ ID NO: 2196 - protein, 7 aa, Artificial Sequence
  source: /note="Description of Artificial Sequence: Synthetic peptide"
FSPGSLA

SEQ ID NO: 2197 - protein, 7 aa, Artificial Sequence
  source: /note="Description of Artificial Sequence: Synthetic peptide"
FSPHTLP

SEQ ID NO: 2198 - protein, 7 aa, Artificial Sequence
  source: /note="Description of Artificial Sequence: Synthetic peptide"
FSPMEAS

SEQ ID NO: 2199 - protein, 7 aa, Artificial Sequence
  source: /note="Description of Artificial Sequence: Synthetic peptide"
FSPNIMR

SEQ ID NO: 2200 - protein, 7 aa, Artificial Sequence
  source: /note="Description of Artificial Sequence: Synthetic peptide"
FSPRSIG

SEQ ID NO: 2201 - protein, 7 aa, Artificial Sequence
  source: /note="Description of Artificial Sequence: Synthetic peptide"
FSPYADE

SEQ ID NO: 2202 - protein, 7 aa, Artificial Sequence
  source: /note="Description of Artificial Sequence: Synthetic peptide"
FSQPLRN

SEQ ID NO: 2203 - protein, 7 aa, Artificial Sequence
  source: /note="Description of Artificial Sequence: Synthetic peptide"
FSQSLPT

SEQ ID NO: 2204 - protein, 7 aa, Artificial Sequence
  source: /note="Description of Artificial Sequence: Synthetic peptide"
FSRGSGP

SEQ ID NO: 2205 - protein, 7 aa, Artificial Sequence
  source: /note="Description of Artificial Sequence: Synthetic peptide"
FSRLNPS

SEQ ID NO: 2206 - protein, 7 aa, Artificial Sequence
  source: /note="Description of Artificial Sequence: Synthetic peptide"
FSRSHIP

SEQ ID NO: 2207 - protein, 7 aa, Artificial Sequence
  source: /note="Description of Artificial Sequence: Synthetic peptide"
FSRTLTS

SEQ ID NO: 2208 - protein, 7 aa, Artificial Sequence
  source: /note="Description of Artificial Sequence: Synthetic peptide"
FSSHESS

SEQ ID NO: 2209 - protein, 7 aa, Artificial Sequence
  source: /note="Description of Artificial Sequence: Synthetic peptide"
FSSHGES

SEQ ID NO: 2210 - protein, 7 aa, Artificial Sequence
  source: /note="Description of Artificial Sequence: Synthetic peptide"
FSSNTEL

SEQ ID NO: 2211 - protein, 7 aa, Artificial Sequence
  source: /note="Description of Artificial Sequence: Synthetic peptide"
FSSNTFD

SEQ ID NO: 2212 - protein, 7 aa, Artificial Sequence
  source: /note="Description of Artificial Sequence: Synthetic peptide"
FSSNTSA

SEQ ID NO: 2213 - protein, 7 aa, Artificial Sequence
  source: /note="Description of Artificial Sequence: Synthetic peptide"
FSSNTSE

SEQ ID NO: 2214 - protein, 7 aa, Artificial Sequence
  source: /note="Description of Artificial Sequence: Synthetic peptide"
FSSPSGY

SEQ ID NO: 2215 - protein, 7 aa, Artificial Sequence
  source: /note="Description of Artificial Sequence: Synthetic peptide"
FSSRTQA

SEQ ID NO: 2216 - protein, 7 aa, Artificial Sequence
  source: /note="Description of Artificial Sequence: Synthetic peptide"
FSSSMAA

SEQ ID NO: 2217 - protein, 7 aa, Artificial Sequence
  source: /note="Description of Artificial Sequence: Synthetic peptide"
FSSSTLK

SEQ ID NO: 2218 - protein, 7 aa, Artificial Sequence
  source: /note="Description of Artificial Sequence: Synthetic peptide"
FSSSVTS

SEQ ID NO: 2219 - protein, 7 aa, Artificial Sequence
  source: /note="Description of Artificial Sequence: Synthetic peptide"
FSSTNLA

SEQ ID NO: 2220 - protein, 7 aa, Artificial Sequence
  source: /note="Description of Artificial Sequence: Synthetic peptide"
FSSTPGH

SEQ ID NO: 2221 - protein, 7 aa, Artificial Sequence
  source: /note="Description of Artificial Sequence: Synthetic peptide"
FSSTSPD

SEQ ID NO: 2222 - protein, 7 aa, Artificial Sequence
  source: /note="Description of Artificial Sequence: Synthetic peptide"
FSSTSPM

SEQ ID NO: 2223 - protein, 7 aa, Artificial Sequence
  source: /note="Description of Artificial Sequence: Synthetic peptide"
FSSTSSA

SEQ ID NO: 2224 - protein, 7 aa, Artificial Sequence
  source: /note="Description of Artificial Sequence: Synthetic peptide"
FSSVIPS

SEQ ID NO: 2225 - protein, 7 aa, Artificial Sequence
  source: /note="Description of Artificial Sequence: Synthetic peptide"
FSSVRNE

SEQ ID NO: 2226 - protein, 7 aa, Artificial Sequence
  source: /note="Description of Artificial Sequence: Synthetic peptide"
FSSVSTT

SEQ ID NO: 2227 - protein, 7 aa, Artificial Sequence
  source: /note="Description of Artificial Sequence: Synthetic peptide"
FSSYASM

SEQ ID NO: 2228 - protein, 7 aa, Artificial Sequence
  source: /note="Description of Artificial Sequence: Synthetic peptide"
FSSYNNA

SEQ ID NO: 2229 - protein, 7 aa, Artificial Sequence
  source: /note="Description of Artificial Sequence: Synthetic peptide"
FSTLSIP

SEQ ID NO: 2230 - protein, 7 aa, Artificial Sequence
  source: /note="Description of Artificial Sequence: Synthetic peptide"
FSTMPAK

SEQ ID NO: 2231 - protein, 7 aa, Artificial Sequence
  source: /note="Description of Artificial Sequence: Synthetic peptide"
FSTMPRD

SEQ ID NO: 2232 - protein, 7 aa, Artificial Sequence
  source: /note="Description of Artificial Sequence: Synthetic peptide"
FSTRTQP

SEQ ID NO: 2233 - protein, 7 aa, Artificial Sequence
  source: /note="Description of Artificial Sequence: Synthetic peptide"
FSTSGQE

SEQ ID NO: 2234 - protein, 7 aa, Artificial Sequence
  source: /note="Description of Artificial Sequence: Synthetic peptide"
FSTVHQA

SEQ ID NO: 2235 - protein, 7 aa, Artificial Sequence
  source: /note="Description of Artificial Sequence: Synthetic peptide"
FSTVKAD

SEQ ID NO: 2236 - protein, 7 aa, Artificial Sequence
  source: /note="Description of Artificial Sequence: Synthetic peptide"
FSTYSHH

SEQ ID NO: 2237 - protein, 7 aa, Artificial Sequence
  source: /note="Description of Artificial Sequence: Synthetic peptide"
FSVARIG

SEQ ID NO: 2238 - protein, 7 aa, Artificial Sequence
  source: /note="Description of Artificial Sequence: Synthetic peptide"
FSVPSAG

SEQ ID NO: 2239 - protein, 7 aa, Artificial Sequence
  source: /note="Description of Artificial Sequence: Synthetic peptide"
FTAKGIT

SEQ ID NO: 2240 - protein, 7 aa, Artificial Sequence
  source: /note="Description of Artificial Sequence: Synthetic peptide"
FTARTTA

SEQ ID NO: 2241 - protein, 7 aa, Artificial Sequence
  source: /note="Description of Artificial Sequence: Synthetic peptide"
FTASGVS

SEQ ID NO: 2242 - protein, 7 aa, Artificial Sequence
  source: /note="Description of Artificial Sequence: Synthetic peptide"
FTATVAI

SEQ ID NO: 2243 - protein, 7 aa, Artificial Sequence
  source: /note="Description of Artificial Sequence: Synthetic peptide"
FTCPAVS

SEQ ID NO: 2244 - protein, 7 aa, Artificial Sequence
  source: /note="Description of Artificial Sequence: Synthetic peptide"
FTDIDDR

SEQ ID NO: 2245 - protein, 7 aa, Artificial Sequence
  source: /note="Description of Artificial Sequence: Synthetic peptide"
FTDRQGY

SEQ ID NO: 2246 - protein, 7 aa, Artificial Sequence
  source: /note="Description of Artificial Sequence: Synthetic peptide"
FTDSSPY

SEQ ID NO: 2247 - protein, 7 aa, Artificial Sequence
  source: /note="Description of Artificial Sequence: Synthetic peptide"
FTEHGYS

SEQ ID NO: 2248 - protein, 7 aa, Artificial Sequence
  source: /note="Description of Artificial Sequence: Synthetic peptide"
FTEPSTS

SEQ ID NO: 2249 - protein, 7 aa, Artificial Sequence
  source: /note="Description of Artificial Sequence: Synthetic peptide"
FTGKGDV

SEQ ID NO: 2250 - protein, 7 aa, Artificial Sequence
  source: /note="Description of Artificial Sequence: Synthetic peptide"
FTGTHSA

SEQ ID NO: 2251 - protein, 7 aa, Artificial Sequence
  source: /note="Description of Artificial Sequence: Synthetic peptide"
FTHRVPD

SEQ ID NO: 2252 - protein, 7 aa, Artificial Sequence
  source: /note="Description of Artificial Sequence: Synthetic peptide"
FTIKTIL

SEQ ID NO: 2253 - protein, 7 aa, Artificial Sequence
  source: /note="Description of Artificial Sequence: Synthetic peptide"
FTKMQLS

SEQ ID NO: 2254 - protein, 7 aa, Artificial Sequence
  source: /note="Description of Artificial Sequence: Synthetic peptide"
FTKPSTT

SEQ ID NO: 2255 - protein, 7 aa, Artificial Sequence
  source: /note="Description of Artificial Sequence: Synthetic peptide"
FTKSKAD

SEQ ID NO: 2256 - protein, 7 aa, Artificial Sequence
  source: /note="Description of Artificial Sequence: Synthetic peptide"
FTLESKL

SEQ ID NO: 2257 - protein, 7 aa, Artificial Sequence
  source: /note="Description of Artificial Sequence: Synthetic peptide"
FTLVTLE

SEQ ID NO: 2258 - protein, 7 aa, Artificial Sequence
  source: /note="Description of Artificial Sequence: Synthetic peptide"
FTMAPIV

SEQ ID NO: 2259 - protein, 7 aa, Artificial Sequence
  source: /note="Description of Artificial Sequence: Synthetic peptide"
FTNDPSS

SEQ ID NO: 2260 - protein, 7 aa, Artificial Sequence
  source: /note="Description of Artificial Sequence: Synthetic peptide"
FTNRDVA

SEQ ID NO: 2261 - protein, 7 aa, Artificial Sequence
  source: /note="Description of Artificial Sequence: Synthetic peptide"
FTNSSSP

SEQ ID NO: 2262 - protein, 7 aa, Artificial Sequence
  source: /note="Description of Artificial Sequence: Synthetic peptide"
FTPLISH

SEQ ID NO: 2263 - protein, 7 aa, Artificial Sequence
  source: /note="Description of Artificial Sequence: Synthetic peptide"
FTQALFP

SEQ ID NO: 2264 - protein, 7 aa, Artificial Sequence
  source: /note="Description of Artificial Sequence: Synthetic peptide"
FTQLPSL

SEQ ID NO: 2265 - protein, 7 aa, Artificial Sequence
  source: /note="Description of Artificial Sequence: Synthetic peptide"
FTQMSLS

SEQ ID NO: 2266 - protein, 7 aa, Artificial Sequence
  source: /note="Description of Artificial Sequence: Synthetic peptide"
FTQNKPM

SEQ ID NO: 2267 - protein, 7 aa, Artificial Sequence
  source: /note="Description of Artificial Sequence: Synthetic peptide"
FTQSLPT

SEQ ID NO: 2268 - protein, 7 aa, Artificial Sequence
  source: /note="Description of Artificial Sequence: Synthetic peptide"
FTRLEPQ

SEQ ID NO: 2269 - protein, 7 aa, Artificial Sequence
  source: /note="Description of Artificial Sequence: Synthetic peptide"
FTRPSLA

SEQ ID NO: 2270 - protein, 7 aa, Artificial Sequence
  source: /note="Description of Artificial Sequence: Synthetic peptide"
FTRSVAA

SEQ ID NO: 2271 - protein, 7 aa, Artificial Sequence
  source: /note="Description of Artificial Sequence: Synthetic peptide"
FTSAPLL

SEQ ID NO: 2272 - protein, 7 aa, Artificial Sequence
  source: /note="Description of Artificial Sequence: Synthetic peptide"
FTSAPNM

SEQ ID NO: 2273 - protein, 7 aa, Artificial Sequence
  source: /note="Description of Artificial Sequence: Synthetic peptide"
FTSDGTE

SEQ ID NO: 2274 - protein, 7 aa, Artificial Sequence
  source: /note="Description of Artificial Sequence: Synthetic peptide"
FTSKGPF

SEQ ID NO: 2275 - protein, 7 aa, Artificial Sequence
  source: /note="Description of Artificial Sequence: Synthetic peptide"
FTSKHLG

SEQ ID NO: 2276 - protein, 7 aa, Artificial Sequence
  source: /note="Description of Artificial Sequence: Synthetic peptide"
FTSREDA

SEQ ID NO: 2277 - protein, 7 aa, Artificial Sequence
  source: /note="Description of Artificial Sequence: Synthetic peptide"
FTSTFPS

SEQ ID NO: 2278 - protein, 7 aa, Artificial Sequence
  source: /note="Description of Artificial Sequence: Synthetic peptide"
FTTAPIL

SEQ ID NO: 2279 - protein, 7 aa, Artificial Sequence
  source: /note="Description of Artificial Sequence: Synthetic peptide"
FTTDRVS

SEQ ID NO: 2280 - protein, 7 aa, Artificial Sequence
  source: /note="Description of Artificial Sequence: Synthetic peptide"
FTTKAAF

SEQ ID NO: 2281 - protein, 7 aa, Artificial Sequence
  source: /note="Description of Artificial Sequence: Synthetic peptide"
FTVNLLG

SEQ ID NO: 2282 - protein, 7 aa, Artificial Sequence
  source: /note="Description of Artificial Sequence: Synthetic peptide"
FVANVRP

SEQ ID NO: 2283 - protein, 7 aa, Artificial Sequence
  source: /note="Description of Artificial Sequence: Synthetic peptide"
FVASASH

SEQ ID NO: 2284 - protein, 7 aa, Artificial Sequence
  source: /note="Description of Artificial Sequence: Synthetic peptide"
FVDNNLS

SEQ ID NO: 2285 - protein, 7 aa, Artificial Sequence
  source: /note="Description of Artificial Sequence: Synthetic peptide"
FVDPYYE

SEQ ID NO: 2286 - protein, 7 aa, Artificial Sequence
  source: /note="Description of Artificial Sequence: Synthetic peptide"
FVERSSS

SEQ ID NO: 2287 - protein, 7 aa, Artificial Sequence
  source: /note="Description of Artificial Sequence: Synthetic peptide"
FVGATMS

SEQ ID NO: 2288 - protein, 7 aa, Artificial Sequence
  source: /note="Description of Artificial Sequence: Synthetic peptide"
FVGKPES

SEQ ID NO: 2289 - protein, 7 aa, Artificial Sequence
  source: /note="Description of Artificial Sequence: Synthetic peptide"
FVGNSRL

SEQ ID NO: 2290 - protein, 7 aa, Artificial Sequence
  source: /note="Description of Artificial Sequence: Synthetic peptide"
FVHSGRQ

SEQ ID NO: 2291 - protein, 7 aa, Artificial Sequence
  source: /note="Description of Artificial Sequence: Synthetic peptide"
FVMHTRD

SEQ ID NO: 2292 - protein, 7 aa, Artificial Sequence
  source: /note="Description of Artificial Sequence: Synthetic peptide"
FVNARVP

SEQ ID NO: 2293 - protein, 7 aa, Artificial Sequence
  source: /note="Description of Artificial Sequence: Synthetic peptide"
FVNPHPS

SEQ ID NO: 2294 - protein, 7 aa, Artificial Sequence
  source: /note="Description of Artificial Sequence: Synthetic peptide"
FVNQTTV

SEQ ID NO: 2295 - protein, 7 aa, Artificial Sequence
  source: /note="Description of Artificial Sequence: Synthetic peptide"
FVPHANQ

SEQ ID NO: 2296 - protein, 7 aa, Artificial Sequence
  source: /note="Description of Artificial Sequence: Synthetic peptide"
FVQQSKP

SEQ ID NO: 2297 - protein, 7 aa, Artificial Sequence
  source: /note="Description of Artificial Sequence: Synthetic peptide"
FVSHSQS

SEQ ID NO: 2298 - protein, 7 aa, Artificial Sequence
  source: /note="Description of Artificial Sequence: Synthetic peptide"
FVSRDRA

SEQ ID NO: 2299 - protein, 7 aa, Artificial Sequence
  source: /note="Description of Artificial Sequence: Synthetic peptide"
FVSSIHA

SEQ ID NO: 2300 - protein, 7 aa, Artificial Sequence
  source: /note="Description of Artificial Sequence: Synthetic peptide"
FVSTPGM

SEQ ID NO: 2301 - protein, 7 aa, Artificial Sequence
  source: /note="Description of Artificial Sequence: Synthetic peptide"
FVSTTSP

SEQ ID NO: 2302 - protein, 7 aa, Artificial Sequence
  source: /note="Description of Artificial Sequence: Synthetic peptide"
FVSTVAP

SEQ ID NO: 2303 - protein, 7 aa, Artificial Sequence
  source: /note="Description of Artificial Sequence: Synthetic peptide"
FVTATLP

SEQ ID NO: 2304 - protein, 7 aa, Artificial Sequence
  source: /note="Description of Artificial Sequence: Synthetic peptide"
FVTESML

SEQ ID NO: 2305 - protein, 7 aa, Artificial Sequence
  source: /note="Description of Artificial Sequence: Synthetic peptide"
FVVGSDG

SEQ ID NO: 2306 - protein, 7 aa, Artificial Sequence
  source: /note="Description of Artificial Sequence: Synthetic peptide"
FWKEGSP

SEQ ID NO: 2307 - protein, 7 aa, Artificial Sequence
  source: /note="Description of Artificial Sequence: Synthetic peptide"
FYPGPKI

SEQ ID NO: 2308 - protein, 7 aa, Artificial Sequence
  source: /note="Description of Artificial Sequence: Synthetic peptide"
FYPSMKD

SEQ ID NO: 2309 - protein, 7 aa, Artificial Sequence
  source: /note="Description of Artificial Sequence: Synthetic peptide"
FYPTELK

SEQ ID NO: 2310 - protein, 7 aa, Artificial Sequence
  source: /note="Description of Artificial Sequence: Synthetic peptide"
FYSATMP

SEQ ID NO: 2311 - protein, 7 aa, Artificial Sequence
  source: /note="Description of Artificial Sequence: Synthetic peptide"
GAAAQYT

SEQ ID NO: 2312 - protein, 7 aa, Artificial Sequence
  source: /note="Description of Artificial Sequence: Synthetic peptide"
GAAPQSI

SEQ ID NO: 2313 - protein, 7 aa, Artificial Sequence
  source: /note="Description of Artificial Sequence: Synthetic peptide"
GAASGLG

SEQ ID NO: 2314 - protein, 7 aa, Artificial Sequence
  source: /note="Description of Artificial Sequence: Synthetic peptide"
GAATLIS

SEQ ID NO: 2315 - protein, 7 aa, Artificial Sequence
  source: /note="Description of Artificial Sequence: Synthetic peptide"
GAATRNP

SEQ ID NO: 2316 - protein, 7 aa, Artificial Sequence
  source: /note="Description of Artificial Sequence: Synthetic peptide"
GADEPGG

SEQ ID NO: 2317 - protein, 7 aa, Artificial Sequence
  source: /note="Description of Artificial Sequence: Synthetic peptide"
GADLSGR

SEQ ID NO: 2318 - protein, 7 aa, Artificial Sequence
  source: /note="Description of Artificial Sequence: Synthetic peptide"
GADRNVP

SEQ ID NO: 2319 - protein, 7 aa, Artificial Sequence
  source: /note="Description of Artificial Sequence: Synthetic peptide"
GADSSRY

SEQ ID NO: 2320 - protein, 7 aa, Artificial Sequence
  source: /note="Description of Artificial Sequence: Synthetic peptide"
GAEGGGN

SEQ ID NO: 2321 - protein, 7 aa, Artificial Sequence
  source: /note="Description of Artificial Sequence: Synthetic peptide"
GAEKHLP

SEQ ID NO: 2322 - protein, 7 aa, Artificial Sequence
  source: /note="Description of Artificial Sequence: Synthetic peptide"
GAEPMLA

SEQ ID NO: 2323 - protein, 7 aa, Artificial Sequence
  source: /note="Description of Artificial Sequence: Synthetic peptide"
GAESLSV

SEQ ID NO: 2324 - protein, 7 aa, Artificial Sequence
  source: /note="Description of Artificial Sequence: Synthetic peptide"
GAFALSG

SEQ ID NO: 2325 - protein, 7 aa, Artificial Sequence
  source: /note="Description of Artificial Sequence: Synthetic peptide"
GAFGPTS

SEQ ID NO: 2326 - protein, 7 aa, Artificial Sequence
  source: /note="Description of Artificial Sequence: Synthetic peptide"
GAGAGSR

SEQ ID NO: 2327 - protein, 7 aa, Artificial Sequence
  source: /note="Description of Artificial Sequence: Synthetic peptide"
GAGELPP

SEQ ID NO: 2328 - protein, 7 aa, Artificial Sequence
  source: /note="Description of Artificial Sequence: Synthetic peptide"
GAGLKGS

SEQ ID NO: 2329 - protein, 7 aa, Artificial Sequence
  source: /note="Description of Artificial Sequence: Synthetic peptide"
GAGLPVT

SEQ ID NO: 2330 - protein, 7 aa, Artificial Sequence
  source: /note="Description of Artificial Sequence: Synthetic peptide"
GAGMNTA

SEQ ID NO: 2331 - protein, 7 aa, Artificial Sequence
  source: /note="Description of Artificial Sequence: Synthetic peptide"
GAGTAML

SEQ ID NO: 2332 - protein, 7 aa, Artificial Sequence
  source: /note="Description of Artificial Sequence: Synthetic peptide"
GAHDTVT

SEQ ID NO: 2333 - protein, 7 aa, Artificial Sequence
  source: /note="Description of Artificial Sequence: Synthetic peptide"
GAHECLS

SEQ ID NO: 2334 - protein, 7 aa, Artificial Sequence
  source: /note="Description of Artificial Sequence: Synthetic peptide"
GAHGAYQ

SEQ ID NO: 2335 - protein, 7 aa, Artificial Sequence
  source: /note="Description of Artificial Sequence: Synthetic peptide"
GAHSYNV

SEQ ID NO: 2336 - protein, 7 aa, Artificial Sequence
  source: /note="Description of Artificial Sequence: Synthetic peptide"
GAHTGLS

SEQ ID NO: 2337 - protein, 7 aa, Artificial Sequence
  source: /note="Description of Artificial Sequence: Synthetic peptide"
GAHTVRL

SEQ ID NO: 2338 - protein, 7 aa, Artificial Sequence
  source: /note="Description of Artificial Sequence: Synthetic peptide"
GAHVAPV

SEQ ID NO: 2339 - protein, 7 aa, Artificial Sequence
  source: /note="Description of Artificial Sequence: Synthetic peptide"
GALATAT

SEQ ID NO: 2340 - protein, 7 aa, Artificial Sequence
  source: /note="Description of Artificial Sequence: Synthetic peptide"
GALDGTA

SEQ ID NO: 2341 - protein, 7 aa, Artificial Sequence
  source: /note="Description of Artificial Sequence: Synthetic peptide"
GALGFPQ

SEQ ID NO: 2342 - protein, 7 aa, Artificial Sequence
  source: /note="Description of Artificial Sequence: Synthetic peptide"
GALGVAH

SEQ ID NO: 2343 - protein, 7 aa, Artificial Sequence
  source: /note="Description of Artificial Sequence: Synthetic peptide"
GALMQKN

SEQ ID NO: 2344 - protein, 7 aa, Artificial Sequence
  source: /note="Description of Artificial Sequence: Synthetic peptide"
GALMVSR

SEQ ID NO: 2345 - protein, 7 aa, Artificial Sequence
  source: /note="Description of Artificial Sequence: Synthetic peptide"
GALSANQ

SEQ ID NO: 2346 - protein, 7 aa, Artificial Sequence
  source: /note="Description of Artificial Sequence: Synthetic peptide"
GALVITS

SEQ ID NO: 2347 - protein, 7 aa, Artificial Sequence
  source: /note="Description of Artificial Sequence: Synthetic peptide"
GAMSINA

SEQ ID NO: 2348 - protein, 7 aa, Artificial Sequence
  source: /note="Description of Artificial Sequence: Synthetic peptide"
GANGALR

SEQ ID NO: 2349 - protein, 7 aa, Artificial Sequence
  source: /note="Description of Artificial Sequence: Synthetic peptide"
GANIRIA

SEQ ID NO: 2350 - protein, 7 aa, Artificial Sequence
  source: /note="Description of Artificial Sequence: Synthetic peptide"
GANRLDN

SEQ ID NO: 2351 - protein, 7 aa, Artificial Sequence
  source: /note="Description of Artificial Sequence: Synthetic peptide"
GAPPLPR

SEQ ID NO: 2352 - protein, 7 aa, Artificial Sequence
  source: /note="Description of Artificial Sequence: Synthetic peptide"
GAQLTRM

SEQ ID NO: 2353 - protein, 7 aa, Artificial Sequence
  source: /note="Description of Artificial Sequence: Synthetic peptide"
GAQRQLN

SEQ ID NO: 2354 - protein, 7 aa, Artificial Sequence
  source: /note="Description of Artificial Sequence: Synthetic peptide"
GARALGL

SEQ ID NO: 2355 - protein, 7 aa, Artificial Sequence
  source: /note="Description of Artificial Sequence: Synthetic peptide"
GARANGG

SEQ ID NO: 2356 - protein, 7 aa, Artificial Sequence
  source: /note="Description of Artificial Sequence: Synthetic peptide"
GAREIPS

SEQ ID NO: 2357 - protein, 7 aa, Artificial Sequence
  source: /note="Description of Artificial Sequence: Synthetic peptide"
GARPDLG

SEQ ID NO: 2358 - protein, 7 aa, Artificial Sequence
  source: /note="Description of Artificial Sequence: Synthetic peptide"
GARVLGS

SEQ ID NO: 2359 - protein, 7 aa, Artificial Sequence
  source: /note="Description of Artificial Sequence: Synthetic peptide"
GASDTDW

SEQ ID NO: 2360 - protein, 7 aa, Artificial Sequence
  source: /note="Description of Artificial Sequence: Synthetic peptide"
GASGTST

SEQ ID NO: 2361 - protein, 7 aa, Artificial Sequence
  source: /note="Description of Artificial Sequence: Synthetic peptide"
GASIKSS

SEQ ID NO: 2362 - protein, 7 aa, Artificial Sequence
  source: /note="Description of Artificial Sequence: Synthetic peptide"
GASKNPT

SEQ ID NO: 2363 - protein, 7 aa, Artificial Sequence
  source: /note="Description of Artificial Sequence: Synthetic peptide"
GASLADD

SEQ ID NO: 2364 - protein, 7 aa, Artificial Sequence
  source: /note="Description of Artificial Sequence: Synthetic peptide"
GASLKPV

SEQ ID NO: 2365 - protein, 7 aa, Artificial Sequence
  source: /note="Description of Artificial Sequence: Synthetic peptide"
GASSASG

SEQ ID NO: 2366 - protein, 7 aa, Artificial Sequence
  source: /note="Description of Artificial Sequence: Synthetic peptide"
GASSLKP

SEQ ID NO: 2367 - protein, 7 aa, Artificial Sequence
  source: /note="Description of Artificial Sequence: Synthetic peptide"
GASSRPV

SEQ ID NO: 2368 - protein, 7 aa, Artificial Sequence
  source: /note="Description of Artificial Sequence: Synthetic peptide"
GASTRNI

SEQ ID NO: 2369 - protein, 7 aa, Artificial Sequence
  source: /note="Description of Artificial Sequence: Synthetic peptide"
GASVNPT

SEQ ID NO: 2370 - protein, 7 aa, Artificial Sequence
  source: /note="Description of Artificial Sequence: Synthetic peptide"
GATPKTL

SEQ ID NO: 2371 - protein, 7 aa, Artificial Sequence
  source: /note="Description of Artificial Sequence: Synthetic peptide"
GATPPST

SEQ ID NO: 2372 - protein, 7 aa, Artificial Sequence
  source: /note="Description of Artificial Sequence: Synthetic peptide"
GATQFRE

SEQ ID NO: 2373 - protein, 7 aa, Artificial Sequence
  source: /note="Description of Artificial Sequence: Synthetic peptide"
GATSQIM

SEQ ID NO: 2374 - protein, 7 aa, Artificial Sequence
  source: /note="Description of Artificial Sequence: Synthetic peptide"
GAVRPLM

SEQ ID NO: 2375 - protein, 7 aa, Artificial Sequence
  source: /note="Description of Artificial Sequence: Synthetic peptide"
GAWKAET

SEQ ID NO: 2376 - protein, 7 aa, Artificial Sequence
  source: /note="Description of Artificial Sequence: Synthetic peptide"
GAWLPNA

SEQ ID NO: 2377 - protein, 7 aa, Artificial Sequence
  source: /note="Description of Artificial Sequence: Synthetic peptide"
GAWSLPD

SEQ ID NO: 2378 - protein, 7 aa, Artificial Sequence
  source: /note="Description of Artificial Sequence: Synthetic peptide"
GAYARAT

SEQ ID NO: 2379 - protein, 7 aa, Artificial Sequence
  source: /note="Description of Artificial Sequence: Synthetic peptide"
GAYAYNG

SEQ ID NO: 2380 - protein, 7 aa, Artificial Sequence
  source: /note="Description of Artificial Sequence: Synthetic peptide"
GAYGMSE

SEQ ID NO: 2381 - protein, 7 aa, Artificial Sequence
  source: /note="Description of Artificial Sequence: Synthetic peptide"
GAYRPDL

SEQ ID NO: 2382 - protein, 7 aa, Artificial Sequence
  source: /note="Description of Artificial Sequence: Synthetic peptide"
GCSGQQS

SEQ ID NO: 2383 - protein, 7 aa, Artificial Sequence
  source: /note="Description of Artificial Sequence: Synthetic peptide"
GCSSLPE

SEQ ID NO: 2384 - protein, 7 aa, Artificial Sequence
  source: /note="Description of Artificial Sequence: Synthetic peptide"
GCTGYQA

SEQ ID NO: 2385 - protein, 7 aa, Artificial Sequence
  source: /note="Description of Artificial Sequence: Synthetic peptide"
GCVGPFS

SEQ ID NO: 2386 - protein, 7 aa, Artificial Sequence
  source: /note="Description of Artificial Sequence: Synthetic peptide"
GDAAYKN

SEQ ID NO: 2387 - protein, 7 aa, Artificial Sequence
  source: /note="Description of Artificial Sequence: Synthetic peptide"
GDAFVVG

SEQ ID NO: 2388 - protein, 7 aa, Artificial Sequence
  source: /note="Description of Artificial Sequence: Synthetic peptide"
GDATDRM

SEQ ID NO: 2389 - protein, 7 aa, Artificial Sequence
  source: /note="Description of Artificial Sequence: Synthetic peptide"
GDFGMKL

SEQ ID NO: 2390 - protein, 7 aa, Artificial Sequence
  source: /note="Description of Artificial Sequence: Synthetic peptide"
GDGTRGA

SEQ ID NO: 2391 - protein, 7 aa, Artificial Sequence
  source: /note="Description of Artificial Sequence: Synthetic peptide"
GDGVYPA

SEQ ID NO: 2392 - protein, 7 aa, Artificial Sequence
  source: /note="Description of Artificial Sequence: Synthetic peptide"
GDHKSGA

SEQ ID NO: 2393 - protein, 7 aa, Artificial Sequence
  source: /note="Description of Artificial Sequence: Synthetic peptide"
GDKVRTL

SEQ ID NO: 2394 - protein, 7 aa, Artificial Sequence
  source: /note="Description of Artificial Sequence: Synthetic peptide"
GDLHIPV

SEQ ID NO: 2395 - protein, 7 aa, Artificial Sequence
  source: /note="Description of Artificial Sequence: Synthetic peptide"
GDLNPVP

SEQ ID NO: 2396 - protein, 7 aa, Artificial Sequence
  source: /note="Description of Artificial Sequence: Synthetic peptide"
GDLYYKA

SEQ ID NO: 2397 - protein, 7 aa, Artificial Sequence
  source: /note="Description of Artificial Sequence: Synthetic peptide"
GDMLNVI

SEQ ID NO: 2398 - protein, 7 aa, Artificial Sequence
  source: /note="Description of Artificial Sequence: Synthetic peptide"
GDPNPAE

SEQ ID NO: 2399 - protein, 7 aa, Artificial Sequence
  source: /note="Description of Artificial Sequence: Synthetic peptide"
GDPVHQS

SEQ ID NO: 2400 - protein, 7 aa, Artificial Sequence
  source: /note="Description of Artificial Sequence: Synthetic peptide"
GDRDGSW

SEQ ID NO: 2401 - protein, 7 aa, Artificial Sequence
  source: /note="Description of Artificial Sequence: Synthetic peptide"
GDRMPRS

SEQ ID NO: 2402 - protein, 7 aa, Artificial Sequence
  source: /note="Description of Artificial Sequence: Synthetic peptide"
GDRSTSH

SEQ ID NO: 2403 - protein, 7 aa, Artificial Sequence
  source: /note="Description of Artificial Sequence: Synthetic peptide"
GDRTSLR

SEQ ID NO: 2404 - protein, 7 aa, Artificial Sequence
  source: /note="Description of Artificial Sequence: Synthetic peptide"
GDRVVGV

SEQ ID NO: 2405 - protein, 7 aa, Artificial Sequence
  source: /note="Description of Artificial Sequence: Synthetic peptide"
GDSFPMS

SEQ ID NO: 2406 - protein, 7 aa, Artificial Sequence
  source: /note="Description of Artificial Sequence: Synthetic peptide"
GDSQLYY

SEQ ID NO: 2407 - protein, 7 aa, Artificial Sequence
  source: /note="Description of Artificial Sequence: Synthetic peptide"
GDSSLHS

SEQ ID NO: 2408 - protein, 7 aa, Artificial Sequence
  source: /note="Description of Artificial Sequence: Synthetic peptide"
GDTHLIG

SEQ ID NO: 2409 - protein, 7 aa, Artificial Sequence
  source: /note="Description of Artificial Sequence: Synthetic peptide"
GDTLKAP

SEQ ID NO: 2410 - protein, 7 aa, Artificial Sequence
  source: /note="Description of Artificial Sequence: Synthetic peptide"
GDTRPSL

SEQ ID NO: 2411 - protein, 7 aa, Artificial Sequence
  source: /note="Description of Artificial Sequence: Synthetic peptide"
GDVITTH

SEQ ID NO: 2412 - protein, 7 aa, Artificial Sequence
  source: /note="Description of Artificial Sequence: Synthetic peptide"
GDVSVYD

SEQ ID NO: 2413 - protein, 7 aa, Artificial Sequence
  source: /note="Description of Artificial Sequence: Synthetic peptide"
GEDAFLR

SEQ ID NO: 2414 - protein, 7 aa, Artificial Sequence
  source: /note="Description of Artificial Sequence: Synthetic peptide"
GEDGFSY

SEQ ID NO: 2415 - protein, 7 aa, Artificial Sequence
  source: /note="Description of Artificial Sequence: Synthetic peptide"
GEDHSPH

SEQ ID NO: 2416 - protein, 7 aa, Artificial Sequence
  source: /note="Description of Artificial Sequence: Synthetic peptide"
GEGSYPR

SEQ ID NO: 2417 - protein, 7 aa, Artificial Sequence
  source: /note="Description of Artificial Sequence: Synthetic peptide"
GEGTYQA

SEQ ID NO: 2418 - protein, 7 aa, Artificial Sequence
  source: /note="Description of Artificial Sequence: Synthetic peptide"
GEHKANS

SEQ ID NO: 2419 - protein, 7 aa, Artificial Sequence
  source: /note="Description of Artificial Sequence: Synthetic peptide"
GEKLRAY

SEQ ID NO: 2420 - protein, 7 aa, Artificial Sequence
  source: /note="Description of Artificial Sequence: Synthetic peptide"
GEKSIPP

SEQ ID NO: 2421 - protein, 7 aa, Artificial Sequence
  source: /note="Description of Artificial Sequence: Synthetic peptide"
GEKSLVV

SEQ ID NO: 2422 - protein, 7 aa, Artificial Sequence
  source: /note="Description of Artificial Sequence: Synthetic peptide"
GELFLSS

SEQ ID NO: 2423 - protein, 7 aa, Artificial Sequence
  source: /note="Description of Artificial Sequence: Synthetic peptide"
GENPLPV

SEQ ID NO: 2424 - protein, 7 aa, Artificial Sequence
  source: /note="Description of Artificial Sequence: Synthetic peptide"
GEPFMRA

SEQ ID NO: 2425 - protein, 7 aa, Artificial Sequence
  source: /note="Description of Artificial Sequence: Synthetic peptide"
GEPKHHS

SEQ ID NO: 2426 - protein, 7 aa, Artificial Sequence
  source: /note="Description of Artificial Sequence: Synthetic peptide"
GEPVDTW

SEQ ID NO: 2427 - protein, 7 aa, Artificial Sequence
  source: /note="Description of Artificial Sequence: Synthetic peptide"
GEPVLGA

SEQ ID NO: 2428 - protein, 7 aa, Artificial Sequence
  source: /note="Description of Artificial Sequence: Synthetic peptide"
GERFREW

SEQ ID NO: 2429 - protein, 7 aa, Artificial Sequence
  source: /note="Description of Artificial Sequence: Synthetic peptide"
GERMKID

SEQ ID NO: 2430 - protein, 7 aa, Artificial Sequence
  source: /note="Description of Artificial Sequence: Synthetic peptide"
GERSLNM

SEQ ID NO: 2431 - protein, 7 aa, Artificial Sequence
  source: /note="Description of Artificial Sequence: Synthetic peptide"
GERSPPE

SEQ ID NO: 2432 - protein, 7 aa, Artificial Sequence
  source: /note="Description of Artificial Sequence: Synthetic peptide"
GESPANL

SEQ ID NO: 2433 - protein, 7 aa, Artificial Sequence
  source: /note="Description of Artificial Sequence: Synthetic peptide"
GETPAHA

SEQ ID NO: 2434 - protein, 7 aa, Artificial Sequence
  source: /note="Description of Artificial Sequence: Synthetic peptide"
GETRHVG

SEQ ID NO: 2435 - protein, 7 aa, Artificial Sequence
  source: /note="Description of Artificial Sequence: Synthetic peptide"
GETSAMQ

SEQ ID NO: 2436 - protein, 7 aa, Artificial Sequence
  source: /note="Description of Artificial Sequence: Synthetic peptide"
GETTKMR

SEQ ID NO: 2437 - protein, 7 aa, Artificial Sequence
  source: /note="Description of Artificial Sequence: Synthetic peptide"
GEVAMLY

SEQ ID NO: 2438 - protein, 7 aa, Artificial Sequence
  source: /note="Description of Artificial Sequence: Synthetic peptide"
GEVTIMS

SEQ ID NO: 2439 - protein, 7 aa, Artificial Sequence
  source: /note="Description of Artificial Sequence: Synthetic peptide"
GEVVNTM

SEQ ID NO: 2440 - protein, 7 aa, Artificial Sequence
  source: /note="Description of Artificial Sequence: Synthetic peptide"
GFDAGKS

SEQ ID NO: 2441 - protein, 7 aa, Artificial Sequence
  source: /note="Description of Artificial Sequence: Synthetic peptide"
GFDIASG

SEQ ID NO: 2442 - protein, 7 aa, Artificial Sequence
  source: /note="Description of Artificial Sequence: Synthetic peptide"
GFDVKMS

SEQ ID NO: 2443 - protein, 7 aa, Artificial Sequence
  source: /note="Description of Artificial Sequence: Synthetic peptide"
GFEVQLI

SEQ ID NO: 2444 - protein, 7 aa, Artificial Sequence
  source: /note="Description of Artificial Sequence: Synthetic peptide"
GFFAQVP

SEQ ID NO: 2445 - protein, 7 aa, Artificial Sequence
  source: /note="Description of Artificial Sequence: Synthetic peptide"
GFHNAAP

SEQ ID NO: 2446 - protein, 7 aa, Artificial Sequence
  source: /note="Description of Artificial Sequence: Synthetic peptide"
GFISPSA

SEQ ID NO: 2447 - protein, 7 aa, Artificial Sequence
  source: /note="Description of Artificial Sequence: Synthetic peptide"
GFKNALP

SEQ ID NO: 2448 - protein, 7 aa, Artificial Sequence
  source: /note="Description of Artificial Sequence: Synthetic peptide"
GFNALTG

SEQ ID NO: 2449 - protein, 7 aa, Artificial Sequence
  source: /note="Description of Artificial Sequence: Synthetic peptide"
GFNPSLV

SEQ ID NO: 2450 - protein, 7 aa, Artificial Sequence
  source: /note="Description of Artificial Sequence: Synthetic peptide"
GFNVASG

SEQ ID NO: 2451 - protein, 7 aa, Artificial Sequence
  source: /note="Description of Artificial Sequence: Synthetic peptide"
GFNVGGP

SEQ ID NO: 2452 - protein, 7 aa, Artificial Sequence
  source: /note="Description of Artificial Sequence: Synthetic peptide"
GFPGPQF

SEQ ID NO: 2453 - protein, 7 aa, Artificial Sequence
  source: /note="Description of Artificial Sequence: Synthetic peptide"
GFSGTPY

SEQ ID NO: 2454 - protein, 7 aa, Artificial Sequence
  source: /note="Description of Artificial Sequence: Synthetic peptide"
GFSHISL

SEQ ID NO: 2455 - protein, 7 aa, Artificial Sequence
  source: /note="Description of Artificial Sequence: Synthetic peptide"
GFSIRST

SEQ ID NO: 2456 - protein, 7 aa, Artificial Sequence
  source: /note="Description of Artificial Sequence: Synthetic peptide"
GFSSLSS

SEQ ID NO: 2457 - protein, 7 aa, Artificial Sequence
  source: /note="Description of Artificial Sequence: Synthetic peptide"
GFTQSQM

SEQ ID NO: 2458 - protein, 7 aa, Artificial Sequence
  source: /note="Description of Artificial Sequence: Synthetic peptide"
GGAAREL

SEQ ID NO: 2459 - protein, 7 aa, Artificial Sequence
  source: /note="Description of Artificial Sequence: Synthetic peptide"
GGAATSV

SEQ ID NO: 2460 - protein, 7 aa, Artificial Sequence
  source: /note="Description of Artificial Sequence: Synthetic peptide"
GGAGART

SEQ ID NO: 2461 - protein, 7 aa, Artificial Sequence
  source: /note="Description of Artificial Sequence: Synthetic peptide"
GGARSSM

SEQ ID NO: 2462 - protein, 7 aa, Artificial Sequence
  source: /note="Description of Artificial Sequence: Synthetic peptide"
GGAVHTV

SEQ ID NO: 2463 - protein, 7 aa, Artificial Sequence
  source: /note="Description of Artificial Sequence: Synthetic peptide"
GGDSGAE

SEQ ID NO: 2464 - protein, 7 aa, Artificial Sequence
  source: /note="Description of Artificial Sequence: Synthetic peptide"
GGENVYI

SEQ ID NO: 2465 - protein, 7 aa, Artificial Sequence
  source: /note="Description of Artificial Sequence: Synthetic peptide"
GGFAHQS

SEQ ID NO: 2466 - protein, 7 aa, Artificial Sequence
  source: /note="Description of Artificial Sequence: Synthetic peptide"
GGFNGAN

SEQ ID NO: 2467 - protein, 7 aa, Artificial Sequence
  source: /note="Description of Artificial Sequence: Synthetic peptide"
GGGLTMT

SEQ ID NO: 2468 - protein, 7 aa, Artificial Sequence
  source: /note="Description of Artificial Sequence: Synthetic peptide"
GGGPALP

SEQ ID NO: 2469 - protein, 7 aa, Artificial Sequence
  source: /note="Description of Artificial Sequence: Synthetic peptide"
GGGVNKP

SEQ ID NO: 2470 - protein, 7 aa, Artificial Sequence
  source: /note="Description of Artificial Sequence: Synthetic peptide"
GGHMRDG

SEQ ID NO: 2471 - protein, 7 aa, Artificial Sequence
  source: /note="Description of Artificial Sequence: Synthetic peptide"
GGIESAV

SEQ ID NO: 2472 - protein, 7 aa, Artificial Sequence
  source: /note="Description of Artificial Sequence: Synthetic peptide"
GGIQSTG

SEQ ID NO: 2473 - protein, 7 aa, Artificial Sequence
  source: /note="Description of Artificial Sequence: Synthetic peptide"
GGKDRPE

SEQ ID NO: 2474 - protein, 7 aa, Artificial Sequence
  source: /note="Description of Artificial Sequence: Synthetic peptide"
GGKQPQA

SEQ ID NO: 2475 - protein, 7 aa, Artificial Sequence
  source: /note="Description of Artificial Sequence: Synthetic peptide"
GGKVATG

SEQ ID NO: 2476 - protein, 7 aa, Artificial Sequence
  source: /note="Description of Artificial Sequence: Synthetic peptide"
GGLNRNP

SEQ ID NO: 2477 - protein, 7 aa, Artificial Sequence
  source: /note="Description of Artificial Sequence: Synthetic peptide"
GGLPSPA

SEQ ID NO: 2478 - protein, 7 aa, Artificial Sequence
  source: /note="Description of Artificial Sequence: Synthetic peptide"
GGLSKSL

SEQ ID NO: 2479 - protein, 7 aa, Artificial Sequence
  source: /note="Description of Artificial Sequence: Synthetic peptide"
GGMAPGP

SEQ ID NO: 2480 - protein, 7 aa, Artificial Sequence
  source: /note="Description of Artificial Sequence: Synthetic peptide"
GGPAYVG

SEQ ID NO: 2481 - protein, 7 aa, Artificial Sequence
  source: /note="Description of Artificial Sequence: Synthetic peptide"
GGPGNNP

SEQ ID NO: 2482 - protein, 7 aa, Artificial Sequence
  source: /note="Description of Artificial Sequence: Synthetic peptide"
GGPLPKS

SEQ ID NO: 2483 - protein, 7 aa, Artificial Sequence
  source: /note="Description of Artificial Sequence: Synthetic peptide"
GGPLTGP

SEQ ID NO: 2484 - protein, 7 aa, Artificial Sequence
  source: /note="Description of Artificial Sequence: Synthetic peptide"
GGPRVAP

SEQ ID NO: 2485 - protein, 7 aa, Artificial Sequence
  source: /note="Description of Artificial Sequence: Synthetic peptide"
GGPYGPA

SEQ ID NO: 2486 - protein, 7 aa, Artificial Sequence
  source: /note="Description of Artificial Sequence: Synthetic peptide"
GGQAGKT

SEQ ID NO: 2487 - protein, 7 aa, Artificial Sequence
  source: /note="Description of Artificial Sequence: Synthetic peptide"
GGQHLAP

SEQ ID NO: 2488 - protein, 7 aa, Artificial Sequence
  source: /note="Description of Artificial Sequence: Synthetic peptide"
GGQSCRE

SEQ ID NO: 2489 - protein, 7 aa, Artificial Sequence
  source: /note="Description of Artificial Sequence: Synthetic peptide"
GGRLAVE

SEQ ID NO: 2490 - protein, 7 aa, Artificial Sequence
  source: /note="Description of Artificial Sequence: Synthetic peptide"
GGRLQQG

SEQ ID NO: 2491 - protein, 7 aa, Artificial Sequence
  source: /note="Description of Artificial Sequence: Synthetic peptide"
GGRPDPE

SEQ ID NO: 2492 - protein, 7 aa, Artificial Sequence
  source: /note="Description of Artificial Sequence: Synthetic peptide"
GGRPTIT

SEQ ID NO: 2493 - protein, 7 aa, Artificial Sequence
  source: /note="Description of Artificial Sequence: Synthetic peptide"
GGRVVYS

SEQ ID NO: 2494 - protein, 7 aa, Artificial Sequence
  source: /note="Description of Artificial Sequence: Synthetic peptide"
GGRYSEL

SEQ ID NO: 2495 - protein, 7 aa, Artificial Sequence
  source: /note="Description of Artificial Sequence: Synthetic peptide"
GGSGLAG

SEQ ID NO: 2496 - protein, 7 aa, Artificial Sequence
  source: /note="Description of Artificial Sequence: Synthetic peptide"
GGSMDSL

SEQ ID NO: 2497 - protein, 7 aa, Artificial Sequence
  source: /note="Description of Artificial Sequence: Synthetic peptide"
GGSVRTL

SEQ ID NO: 2498 - protein, 7 aa, Artificial Sequence
  source: /note="Description of Artificial Sequence: Synthetic peptide"
GGTSRSP

SEQ ID NO: 2499 - protein, 7 aa, Artificial Sequence
  source: /note="Description of Artificial Sequence: Synthetic peptide"
GGTTNLF

SEQ ID NO: 2500 - protein, 7 aa, Artificial Sequence
  source: /note="Description of Artificial Sequence: Synthetic peptide"
GGVAYIA

SEQ ID NO: 2501 - protein, 7 aa, Artificial Sequence
  source: /note="Description of Artificial Sequence: Synthetic peptide"
GGVGKPA

SEQ ID NO: 2502 - protein, 7 aa, Artificial Sequence
  source: /note="Description of Artificial Sequence: Synthetic peptide"
GGVNAMR

SEQ ID NO: 2503 - protein, 7 aa, Artificial Sequence
  source: /note="Description of Artificial Sequence: Synthetic peptide"
GGWSSAP

SEQ ID NO: 2504 - protein, 7 aa, Artificial Sequence
  source: /note="Description of Artificial Sequence: Synthetic peptide"
GGYESNN

SEQ ID NO: 2505 - protein, 7 aa, Artificial Sequence
  source: /note="Description of Artificial Sequence: Synthetic peptide"
GGYSMGH

SEQ ID NO: 2506 - protein, 7 aa, Artificial Sequence
  source: /note="Description of Artificial Sequence: Synthetic peptide"
GHAIQLL

SEQ ID NO: 2507 - protein, 7 aa, Artificial Sequence
  source: /note="Description of Artificial Sequence: Synthetic peptide"
GHAKHNV

SEQ ID NO: 2508 - protein, 7 aa, Artificial Sequence
  source: /note="Description of Artificial Sequence: Synthetic peptide"
GHAPHMI

SEQ ID NO: 2509 - protein, 7 aa, Artificial Sequence
  source: /note="Description of Artificial Sequence: Synthetic peptide"
GHCTSKN

SEQ ID NO: 2510 - protein, 7 aa, Artificial Sequence
  source: /note="Description of Artificial Sequence: Synthetic peptide"
GHDLKPV

SEQ ID NO: 2511 - protein, 7 aa, Artificial Sequence
  source: /note="Description of Artificial Sequence: Synthetic peptide"
GHETRQE

SEQ ID NO: 2512 - protein, 7 aa, Artificial Sequence
  source: /note="Description of Artificial Sequence: Synthetic peptide"
GHGLPRL

SEQ ID NO: 2513 - protein, 7 aa, Artificial Sequence
  source: /note="Description of Artificial Sequence: Synthetic peptide"
GHGPFVG

SEQ ID NO: 2514 - protein, 7 aa, Artificial Sequence
  source: /note="Description of Artificial Sequence: Synthetic peptide"
GHGQNPG

SEQ ID NO: 2515 - protein, 7 aa, Artificial Sequence
  source: /note="Description of Artificial Sequence: Synthetic peptide"
GHHQPDQ

SEQ ID NO: 2516 - protein, 7 aa, Artificial Sequence
  source: /note="Description of Artificial Sequence: Synthetic peptide"
GHKARPD

SEQ ID NO: 2517 - protein, 7 aa, Artificial Sequence
  source: /note="Description of Artificial Sequence: Synthetic peptide"
GHKDESL

SEQ ID NO: 2518 - protein, 7 aa, Artificial Sequence
  source: /note="Description of Artificial Sequence: Synthetic peptide"
GHLALHS

SEQ ID NO: 2519 - protein, 7 aa, Artificial Sequence
  source: /note="Description of Artificial Sequence: Synthetic peptide"
GHLQVNT

SEQ ID NO: 2520 - protein, 7 aa, Artificial Sequence
  source: /note="Description of Artificial Sequence: Synthetic peptide"
GHLSPSM

SEQ ID NO: 2521 - protein, 7 aa, Artificial Sequence
  source: /note="Description of Artificial Sequence: Synthetic peptide"
GHMAPVH

SEQ ID NO: 2522 - protein, 7 aa, Artificial Sequence
  source: /note="Description of Artificial Sequence: Synthetic peptide"
GHMSKTA

SEQ ID NO: 2523 - protein, 7 aa, Artificial Sequence
  source: /note="Description of Artificial Sequence: Synthetic peptide"
GHQGSDH

SEQ ID NO: 2524 - protein, 7 aa, Artificial Sequence
  source: /note="Description of Artificial Sequence: Synthetic peptide"
GHQGVLL

SEQ ID NO: 2525 - protein, 7 aa, Artificial Sequence
  source: /note="Description of Artificial Sequence: Synthetic peptide"
GHQTYPS

SEQ ID NO: 2526 - protein, 7 aa, Artificial Sequence
  source: /note="Description of Artificial Sequence: Synthetic peptide"
GHRSDQS

SEQ ID NO: 2527 - protein, 7 aa, Artificial Sequence
  source: /note="Description of Artificial Sequence: Synthetic peptide"
GHSAGAS

SEQ ID NO: 2528 - protein, 7 aa, Artificial Sequence
  source: /note="Description of Artificial Sequence: Synthetic peptide"
GHSGDRA

SEQ ID NO: 2529 - protein, 7 aa, Artificial Sequence
  source: /note="Description of Artificial Sequence: Synthetic peptide"
GHSHNAY

SEQ ID NO: 2530 - protein, 7 aa, Artificial Sequence
  source: /note="Description of Artificial Sequence: Synthetic peptide"
GHSSASN

SEQ ID NO: 2531 - protein, 7 aa, Artificial Sequence
  source: /note="Description of Artificial Sequence: Synthetic peptide"
GHSVTHP

SEQ ID NO: 2532 - protein, 7 aa, Artificial Sequence
  source: /note="Description of Artificial Sequence: Synthetic peptide"
GHSVVKS

SEQ ID NO: 2533 - protein, 7 aa, Artificial Sequence
  source: /note="Description of Artificial Sequence: Synthetic peptide"
GHSYPQA

SEQ ID NO: 2534 - protein, 7 aa, Artificial Sequence
  source: /note="Description of Artificial Sequence: Synthetic peptide"
GHTLKPP

SEQ ID NO: 2535 - protein, 7 aa, Artificial Sequence
  source: /note="Description of Artificial Sequence: Synthetic peptide"
GHVEPRY

SEQ ID NO: 2536 - protein, 7 aa, Artificial Sequence
  source: /note="Description of Artificial Sequence: Synthetic peptide"
GHVGSRV

SEQ ID NO: 2537 - protein, 7 aa, Artificial Sequence
  source: /note="Description of Artificial Sequence: Synthetic peptide"
GHVLVTP

SEQ ID NO: 2538 - protein, 7 aa, Artificial Sequence
  source: /note="Description of Artificial Sequence: Synthetic peptide"
GHVSVNT

SEQ ID NO: 2539 - protein, 7 aa, Artificial Sequence
  source: /note="Description of Artificial Sequence: Synthetic peptide"
GIADLAV

SEQ ID NO: 2540 - protein, 7 aa, Artificial Sequence
  source: /note="Description of Artificial Sequence: Synthetic peptide"
GIAGGRP

SEQ ID NO: 2541 - protein, 7 aa, Artificial Sequence
  source: /note="Description of Artificial Sequence: Synthetic peptide"
GIAGRAT

SEQ ID NO: 2542 - protein, 7 aa, Artificial Sequence
  source: /note="Description of Artificial Sequence: Synthetic peptide"
GIASELP

SEQ ID NO: 2543 - protein, 7 aa, Artificial Sequence
  source: /note="Description of Artificial Sequence: Synthetic peptide"
GIAYMTP

SEQ ID NO: 2544 - protein, 7 aa, Artificial Sequence
  source: /note="Description of Artificial Sequence: Synthetic peptide"
GIDLHTA

SEQ ID NO: 2545 - protein, 7 aa, Artificial Sequence
  source: /note="Description of Artificial Sequence: Synthetic peptide"
GIDNGTV

SEQ ID NO: 2546 - protein, 7 aa, Artificial Sequence
  source: /note="Description of Artificial Sequence: Synthetic peptide"
GIEIDTQ

SEQ ID NO: 2547 - protein, 7 aa, Artificial Sequence
  source: /note="Description of Artificial Sequence: Synthetic peptide"
GIERNSI

SEQ ID NO: 2548 - protein, 7 aa, Artificial Sequence
  source: /note="Description of Artificial Sequence: Synthetic peptide"
GIFAATS

SEQ ID NO: 2549 - protein, 7 aa, Artificial Sequence
  source: /note="Description of Artificial Sequence: Synthetic peptide"
GIGSDRD

SEQ ID NO: 2550 - protein, 7 aa, Artificial Sequence
  source: /note="Description of Artificial Sequence: Synthetic peptide"
GIGTHNP

SEQ ID NO: 2551 - protein, 7 aa, Artificial Sequence
  source: /note="Description of Artificial Sequence: Synthetic peptide"
GIHIKYA

SEQ ID NO: 2552 - protein, 7 aa, Artificial Sequence
  source: /note="Description of Artificial Sequence: Synthetic peptide"
GIKMTIS

SEQ ID NO: 2553 - protein, 7 aa, Artificial Sequence
  source: /note="Description of Artificial Sequence: Synthetic peptide"
GINWQSP

SEQ ID NO: 2554 - protein, 7 aa, Artificial Sequence
  source: /note="Description of Artificial Sequence: Synthetic peptide"
GIPRGAT

SEQ ID NO: 2555 - protein, 7 aa, Artificial Sequence
  source: /note="Description of Artificial Sequence: Synthetic peptide"
GIPSNSR

SEQ ID NO: 2556 - protein, 7 aa, Artificial Sequence
  source: /note="Description of Artificial Sequence: Synthetic peptide"
GIPVRGE

SEQ ID NO: 2557 - protein, 7 aa, Artificial Sequence
  source: /note="Description of Artificial Sequence: Synthetic peptide"
GIQTFAP

SEQ ID NO: 2558 - protein, 7 aa, Artificial Sequence
  source: /note="Description of Artificial Sequence: Synthetic peptide"
GIQTVMS

SEQ ID NO: 2559 - protein, 7 aa, Artificial Sequence
  source: /note="Description of Artificial Sequence: Synthetic peptide"
GIREHPY

SEQ ID NO: 2560 - protein, 7 aa, Artificial Sequence
  source: /note="Description of Artificial Sequence: Synthetic peptide"
GIRILEA

SEQ ID NO: 2561 - protein, 7 aa, Artificial Sequence
  source: /note="Description of Artificial Sequence: Synthetic peptide"
GIRMPAN

SEQ ID NO: 2562 - protein, 7 aa, Artificial Sequence
  source: /note="Description of Artificial Sequence: Synthetic peptide"
GISAGIL

SEQ ID NO: 2563 - protein, 7 aa, Artificial Sequence
  source: /note="Description of Artificial Sequence: Synthetic peptide"
GISGSTV

SEQ ID NO: 2564 - protein, 7 aa, Artificial Sequence
  source: /note="Description of Artificial Sequence: Synthetic peptide"
GISLSSA

SEQ ID NO: 2565 - protein, 7 aa, Artificial Sequence
  source: /note="Description of Artificial Sequence: Synthetic peptide"
GISRTVD

SEQ ID NO: 2566 - protein, 7 aa, Artificial Sequence
  source: /note="Description of Artificial Sequence: Synthetic peptide"
GISVDAL

SEQ ID NO: 2567 - protein, 7 aa, Artificial Sequence
  source: /note="Description of Artificial Sequence: Synthetic peptide"
GITTSQR

SEQ ID NO: 2568 - protein, 7 aa, Artificial Sequence
  source: /note="Description of Artificial Sequence: Synthetic peptide"
GIVTNNT

SEQ ID NO: 2569 - protein, 7 aa, Artificial Sequence
  source: /note="Description of Artificial Sequence: Synthetic peptide"
GIVVTGP

SEQ ID NO: 2570 - protein, 7 aa, Artificial Sequence
  source: /note="Description of Artificial Sequence: Synthetic peptide"
GKDRLLA

SEQ ID NO: 2571 - protein, 7 aa, Artificial Sequence
  source: /note="Description of Artificial Sequence: Synthetic peptide"
GKEFSYT

SEQ ID NO: 2572 - protein, 7 aa, Artificial Sequence
  source: /note="Description of Artificial Sequence: Synthetic peptide"
GKFLPQT

SEQ ID NO: 2573 - protein, 7 aa, Artificial Sequence
  source: /note="Description of Artificial Sequence: Synthetic peptide"
GKGFDSP

SEQ ID NO: 2574 - protein, 7 aa, Artificial Sequence
  source: /note="Description of Artificial Sequence: Synthetic peptide"
GKGLTAT

SEQ ID NO: 2575 - protein, 7 aa, Artificial Sequence
  source: /note="Description of Artificial Sequence: Synthetic peptide"
GKHVKEM

SEQ ID NO: 2576 - protein, 7 aa, Artificial Sequence
  source: /note="Description of Artificial Sequence: Synthetic peptide"
GKISSSL

SEQ ID NO: 2577 - protein, 7 aa, Artificial Sequence
  source: /note="Description of Artificial Sequence: Synthetic peptide"
GKLELAP

SEQ ID NO: 2578 - protein, 7 aa, Artificial Sequence
  source: /note="Description of Artificial Sequence: Synthetic peptide"
GKLLMPQ

SEQ ID NO: 2579 - protein, 7 aa, Artificial Sequence
  source: /note="Description of Artificial Sequence: Synthetic peptide"
GKLTSTL

SEQ ID NO: 2580 - protein, 7 aa, Artificial Sequence
  source: /note="Description of Artificial Sequence: Synthetic peptide"
GKLVSYD

SEQ ID NO: 2581 - protein, 7 aa, Artificial Sequence
  source: /note="Description of Artificial Sequence: Synthetic peptide"
GKMSVGN

SEQ ID NO: 2582 - protein, 7 aa, Artificial Sequence
  source: /note="Description of Artificial Sequence: Synthetic peptide"
GKNATFP

SEQ ID NO: 2583 - protein, 7 aa, Artificial Sequence
  source: /note="Description of Artificial Sequence: Synthetic peptide"
GKNGDRT

SEQ ID NO: 2584 - protein, 7 aa, Artificial Sequence
  source: /note="Description of Artificial Sequence: Synthetic peptide"
GKPAGAI

SEQ ID NO: 2585 - protein, 7 aa, Artificial Sequence
  source: /note="Description of Artificial Sequence: Synthetic peptide"
GKPASPY

SEQ ID NO: 2586 - protein, 7 aa, Artificial Sequence
  source: /note="Description of Artificial Sequence: Synthetic peptide"
GKQNQYT

SEQ ID NO: 2587 - protein, 7 aa, Artificial Sequence
  source: /note="Description of Artificial Sequence: Synthetic peptide"
GKQTPPS

SEQ ID NO: 2588 - protein, 7 aa, Artificial Sequence
  source: /note="Description of Artificial Sequence: Synthetic peptide"
GKRAPVD

SEQ ID NO: 2589 - protein, 7 aa, Artificial Sequence
  source: /note="Description of Artificial Sequence: Synthetic peptide"
GKSPGPL

SEQ ID NO: 2590 - protein, 7 aa, Artificial Sequence
  source: /note="Description of Artificial Sequence: Synthetic peptide"
GKSQSGL

SEQ ID NO: 2591 - protein, 7 aa, Artificial Sequence
  source: /note="Description of Artificial Sequence: Synthetic peptide"
GKSVTVS

SEQ ID NO: 2592 - protein, 7 aa, Artificial Sequence
  source: /note="Description of Artificial Sequence: Synthetic peptide"
GKTEERP

SEQ ID NO: 2593 - protein, 7 aa, Artificial Sequence
  source: /note="Description of Artificial Sequence: Synthetic peptide"
GKTKPDY

SEQ ID NO: 2594 - protein, 7 aa, Artificial Sequence
  source: /note="Description of Artificial Sequence: Synthetic peptide"
GKTVDWG

SEQ ID NO: 2595 - protein, 7 aa, Artificial Sequence
  source: /note="Description of Artificial Sequence: Synthetic peptide"
GKTVNIV

SEQ ID NO: 2596 - protein, 7 aa, Artificial Sequence
  source: /note="Description of Artificial Sequence: Synthetic peptide"
GKTVVSV

SEQ ID NO: 2597 - protein, 7 aa, Artificial Sequence
  source: /note="Description of Artificial Sequence: Synthetic peptide"
GKVEFAI

SEQ ID NO: 2598 - protein, 7 aa, Artificial Sequence
  source: /note="Description of Artificial Sequence: Synthetic peptide"
GKVHEGM

SEQ ID NO: 2599 - protein, 7 aa, Artificial Sequence
  source: /note="Description of Artificial Sequence: Synthetic peptide"
GKVPTIS

SEQ ID NO: 2600 - protein, 7 aa, Artificial Sequence
  source: /note="Description of Artificial Sequence: Synthetic peptide"
GKVVQTP

SEQ ID NO: 2601 - protein, 7 aa, Artificial Sequence
  source: /note="Description of Artificial Sequence: Synthetic peptide"
GLAAKAD

SEQ ID NO: 2602 - protein, 7 aa, Artificial Sequence
  source: /note="Description of Artificial Sequence: Synthetic peptide"
GLAATVP

SEQ ID NO: 2603 - protein, 7 aa, Artificial Sequence
  source: /note="Description of Artificial Sequence: Synthetic peptide"
GLAHQGT

SEQ ID NO: 2604 - protein, 7 aa, Artificial Sequence
  source: /note="Description of Artificial Sequence: Synthetic peptide"
GLAKYAE

SEQ ID NO: 2605 - protein, 7 aa, Artificial Sequence
  source: /note="Description of Artificial Sequence: Synthetic peptide"
GLALSSP

SEQ ID NO: 2606 - protein, 7 aa, Artificial Sequence
  source: /note="Description of Artificial Sequence: Synthetic peptide"
GLANSPS

SEQ ID NO: 2607 - protein, 7 aa, Artificial Sequence
  source: /note="Description of Artificial Sequence: Synthetic peptide"
GLAVGTR

SEQ ID NO: 2608 - protein, 7 aa, Artificial Sequence
  source: /note="Description of Artificial Sequence: Synthetic peptide"
GLEHHVT

SEQ ID NO: 2609 - protein, 7 aa, Artificial Sequence
  source: /note="Description of Artificial Sequence: Synthetic peptide"
GLGAPER

SEQ ID NO: 2610 - protein, 7 aa, Artificial Sequence
  source: /note="Description of Artificial Sequence: Synthetic peptide"
GLGLVTG

SEQ ID NO: 2611 - protein, 7 aa, Artificial Sequence
  source: /note="Description of Artificial Sequence: Synthetic peptide"
GLGMPQS

SEQ ID NO: 2612 - protein, 7 aa, Artificial Sequence
  source: /note="Description of Artificial Sequence: Synthetic peptide"
GLGSTLG

SEQ ID NO: 2613 - protein, 7 aa, Artificial Sequence
  source: /note="Description of Artificial Sequence: Synthetic peptide"
GLGTASA

SEQ ID NO: 2614 - protein, 7 aa, Artificial Sequence
  source: /note="Description of Artificial Sequence: Synthetic peptide"
GLGTMVI

SEQ ID NO: 2615 - protein, 7 aa, Artificial Sequence
  source: /note="Description of Artificial Sequence: Synthetic peptide"
GLGTPSP

SEQ ID NO: 2616 - protein, 7 aa, Artificial Sequence
  source: /note="Description of Artificial Sequence: Synthetic peptide"
GLGTTGR

SEQ ID NO: 2617 - protein, 7 aa, Artificial Sequence
  source: /note="Description of Artificial Sequence: Synthetic peptide"
GLHDPPV

SEQ ID NO: 2618 - protein, 7 aa, Artificial Sequence
  source: /note="Description of Artificial Sequence: Synthetic peptide"
GLHLMDV

SEQ ID NO: 2619 - protein, 7 aa, Artificial Sequence
  source: /note="Description of Artificial Sequence: Synthetic peptide"
GLISQTD

SEQ ID NO: 2620 - protein, 7 aa, Artificial Sequence
  source: /note="Description of Artificial Sequence: Synthetic peptide"
GLKAVDG

SEQ ID NO: 2621 - protein, 7 aa, Artificial Sequence
  source: /note="Description of Artificial Sequence: Synthetic peptide"
GLKITTE

SEQ ID NO: 2622 - protein, 7 aa, Artificial Sequence
  source: /note="Description of Artificial Sequence: Synthetic peptide"
GLKNPQM

SEQ ID NO: 2623 - protein, 7 aa, Artificial Sequence
  source: /note="Description of Artificial Sequence: Synthetic peptide"
GLKSTIN

SEQ ID NO: 2624 - protein, 7 aa, Artificial Sequence
  source: /note="Description of Artificial Sequence: Synthetic peptide"
GLLGEKS

SEQ ID NO: 2625 - protein, 7 aa, Artificial Sequence
  source: /note="Description of Artificial Sequence: Synthetic peptide"
GLLGRYE

SEQ ID NO: 2626 - protein, 7 aa, Artificial Sequence
  source: /note="Description of Artificial Sequence: Synthetic peptide"
GLLGTKL

SEQ ID NO: 2627 - protein, 7 aa, Artificial Sequence
  source: /note="Description of Artificial Sequence: Synthetic peptide"
GLLSRAE

SEQ ID NO: 2628 - protein, 7 aa, Artificial Sequence
  source: /note="Description of Artificial Sequence: Synthetic peptide"
GLLVLYP

SEQ ID NO: 2629 - protein, 7 aa, Artificial Sequence
  source: /note="Description of Artificial Sequence: Synthetic peptide"
GLMAHRN

SEQ ID NO: 2630 - protein, 7 aa, Artificial Sequence
  source: /note="Description of Artificial Sequence: Synthetic peptide"
GLMLMNG

SEQ ID NO: 2631 - protein, 7 aa, Artificial Sequence
  source: /note="Description of Artificial Sequence: Synthetic peptide"
GLNPGTH

SEQ ID NO: 2632 - protein, 7 aa, Artificial Sequence
  source: /note="Description of Artificial Sequence: Synthetic peptide"
GLNRFSG

SEQ ID NO: 2633 - protein, 7 aa, Artificial Sequence
  source: /note="Description of Artificial Sequence: Synthetic peptide"
GLNVTKF

SEQ ID NO: 2634 - protein, 7 aa, Artificial Sequence
  source: /note="Description of Artificial Sequence: Synthetic peptide"
GLPGELA

SEQ ID NO: 2635 - protein, 7 aa, Artificial Sequence
  source: /note="Description of Artificial Sequence: Synthetic peptide"
GLPGGRS

SEQ ID NO: 2636 - protein, 7 aa, Artificial Sequence
  source: /note="Description of Artificial Sequence: Synthetic peptide"
GLPGRHA

SEQ ID NO: 2637 - protein, 7 aa, Artificial Sequence
  source: /note="Description of Artificial Sequence: Synthetic peptide"
GLPHRYE

SEQ ID NO: 2638 - protein, 7 aa, Artificial Sequence
  source: /note="Description of Artificial Sequence: Synthetic peptide"
GLPIPSL

SEQ ID NO: 2639 - protein, 7 aa, Artificial Sequence
  source: /note="Description of Artificial Sequence: Synthetic peptide"
GLPKHPP

SEQ ID NO: 2640 - protein, 7 aa, Artificial Sequence
  source: /note="Description of Artificial Sequence: Synthetic peptide"
GLPMATA

SEQ ID NO: 2641 - protein, 7 aa, Artificial Sequence
  source: /note="Description of Artificial Sequence: Synthetic peptide"
GLPNREP

SEQ ID NO: 2642 - protein, 7 aa, Artificial Sequence
  source: /note="Description of Artificial Sequence: Synthetic peptide"
GLPPASK

SEQ ID NO: 2643 - protein, 7 aa, Artificial Sequence
  source: /note="Description of Artificial Sequence: Synthetic peptide"
GLPQASH

SEQ ID NO: 2644 - protein, 7 aa, Artificial Sequence
  source: /note="Description of Artificial Sequence: Synthetic peptide"
GLPQHKQ

SEQ ID NO: 2645 - protein, 7 aa, Artificial Sequence
  source: /note="Description of Artificial Sequence: Synthetic peptide"
GLPSNLT

SEQ ID NO: 2646 - protein, 7 aa, Artificial Sequence
  source: /note="Description of Artificial Sequence: Synthetic peptide"
GLPTEDR

SEQ ID NO: 2647 - protein, 7 aa, Artificial Sequence
  source: /note="Description of Artificial Sequence: Synthetic peptide"
GLPYGNS

SEQ ID NO: 2648 - protein, 7 aa, Artificial Sequence
  source: /note="Description of Artificial Sequence: Synthetic peptide"
GLQQEVR

SEQ ID NO: 2649 - protein, 7 aa, Artificial Sequence
  source: /note="Description of Artificial Sequence: Synthetic peptide"
GLQSTGL

SEQ ID NO: 2650 - protein, 7 aa, Artificial Sequence
  source: /note="Description of Artificial Sequence: Synthetic peptide"
GLREPVA

SEQ ID NO: 2651 - protein, 7 aa, Artificial Sequence
  source: /note="Description of Artificial Sequence: Synthetic peptide"
GLRFTVE

SEQ ID NO: 2652 - protein, 7 aa, Artificial Sequence
  source: /note="Description of Artificial Sequence: Synthetic peptide"
GLRNLGS

SEQ ID NO: 2653 - protein, 7 aa, Artificial Sequence
  source: /note="Description of Artificial Sequence: Synthetic peptide"
GLRNQEL

SEQ ID NO: 2654 - protein, 7 aa, Artificial Sequence
  source: /note="Description of Artificial Sequence: Synthetic peptide"
GLRPGQD

SEQ ID NO: 2655 - protein, 7 aa, Artificial Sequence
  source: /note="Description of Artificial Sequence: Synthetic peptide"
GLRSLSA

SEQ ID NO: 2656 - protein, 7 aa, Artificial Sequence
  source: /note="Description of Artificial Sequence: Synthetic peptide"
GLRSMPE

SEQ ID NO: 2657 - protein, 7 aa, Artificial Sequence
  source: /note="Description of Artificial Sequence: Synthetic peptide"
GLRSSYA

SEQ ID NO: 2658 - protein, 7 aa, Artificial Sequence
  source: /note="Description of Artificial Sequence: Synthetic peptide"
GLRTASN

SEQ ID NO: 2659 - protein, 7 aa, Artificial Sequence
  source: /note="Description of Artificial Sequence: Synthetic peptide"
GLRTDML

SEQ ID NO: 2660 - protein, 7 aa, Artificial Sequence
  source: /note="Description of Artificial Sequence: Synthetic peptide"
GLSAAAT

SEQ ID NO: 2661 - protein, 7 aa, Artificial Sequence
  source: /note="Description of Artificial Sequence: Synthetic peptide"
GLSALAS

SEQ ID NO: 2662 - protein, 7 aa, Artificial Sequence
  source: /note="Description of Artificial Sequence: Synthetic peptide"
GLSAYIP

SEQ ID NO: 2663 - protein, 7 aa, Artificial Sequence
  source: /note="Description of Artificial Sequence: Synthetic peptide"
GLSHSAL

SEQ ID NO: 2664 - protein, 7 aa, Artificial Sequence
  source: /note="Description of Artificial Sequence: Synthetic peptide"
GLSLDDY

SEQ ID NO: 2665 - protein, 7 aa, Artificial Sequence
  source: /note="Description of Artificial Sequence: Synthetic peptide"
GLSLKYG

SEQ ID NO: 2666 - protein, 7 aa, Artificial Sequence
  source: /note="Description of Artificial Sequence: Synthetic peptide"
GLSLLRN

SEQ ID NO: 2667 - protein, 7 aa, Artificial Sequence
  source: /note="Description of Artificial Sequence: Synthetic peptide"
GLSMPLP

SEQ ID NO: 2668 - protein, 7 aa, Artificial Sequence
  source: /note="Description of Artificial Sequence: Synthetic peptide"
GLSPRQT

SEQ ID NO: 2669 - protein, 7 aa, Artificial Sequence
  source: /note="Description of Artificial Sequence: Synthetic peptide"
GLSRAPP

SEQ ID NO: 2670 - protein, 7 aa, Artificial Sequence
  source: /note="Description of Artificial Sequence: Synthetic peptide"
GLSSHHP

SEQ ID NO: 2671 - protein, 7 aa, Artificial Sequence
  source: /note="Description of Artificial Sequence: Synthetic peptide"
GLSTKTS

SEQ ID NO: 2672 - protein, 7 aa, Artificial Sequence
  source: /note="Description of Artificial Sequence: Synthetic peptide"
GLSTVLM

SEQ ID NO: 2673 - protein, 7 aa, Artificial Sequence
  source: /note="Description of Artificial Sequence: Synthetic peptide"
GLSVTRV

SEQ ID NO: 2674 - protein, 7 aa, Artificial Sequence
  source: /note="Description of Artificial Sequence: Synthetic peptide"
GLTHVVQ

SEQ ID NO: 2675 - protein, 7 aa, Artificial Sequence
  source: /note="Description of Artificial Sequence: Synthetic peptide"
GLTLDLR

SEQ ID NO: 2676 - protein, 7 aa, Artificial Sequence
  source: /note="Description of Artificial Sequence: Synthetic peptide"
GLTLVPA

SEQ ID NO: 2677 - protein, 7 aa, Artificial Sequence
  source: /note="Description of Artificial Sequence: Synthetic peptide"
GLTNTGS

SEQ ID NO: 2678 - protein, 7 aa, Artificial Sequence
  source: /note="Description of Artificial Sequence: Synthetic peptide"
GLTPDHG

SEQ ID NO: 2679 - protein, 7 aa, Artificial Sequence
  source: /note="Description of Artificial Sequence: Synthetic peptide"
GLTQPGP

SEQ ID NO: 2680 - protein, 7 aa, Artificial Sequence
  source: /note="Description of Artificial Sequence: Synthetic peptide"
GLTSHPI

SEQ ID NO: 2681 - protein, 7 aa, Artificial Sequence
  source: /note="Description of Artificial Sequence: Synthetic peptide"
GLTYALT

SEQ ID NO: 2682 - protein, 7 aa, Artificial Sequence
  source: /note="Description of Artificial Sequence: Synthetic peptide"
GLVAHTI

SEQ ID NO: 2683 - protein, 7 aa, Artificial Sequence
  source: /note="Description of Artificial Sequence: Synthetic peptide"
GLVGRVQ

SEQ ID NO: 2684 - protein, 7 aa, Artificial Sequence
  source: /note="Description of Artificial Sequence: Synthetic peptide"
GLVIGVA

SEQ ID NO: 2685 - protein, 7 aa, Artificial Sequence
  source: /note="Description of Artificial Sequence: Synthetic peptide"
GLVPTDA

SEQ ID NO: 2686 - protein, 7 aa, Artificial Sequence
  source: /note="Description of Artificial Sequence: Synthetic peptide"
GLVSTHD

SEQ ID NO: 2687 - protein, 7 aa, Artificial Sequence
  source: /note="Description of Artificial Sequence: Synthetic peptide"
GLYDTRS

SEQ ID NO: 2688 - protein, 7 aa, Artificial Sequence
  source: /note="Description of Artificial Sequence: Synthetic peptide"
GLYHLNA

SEQ ID NO: 2689 - protein, 7 aa, Artificial Sequence
  source: /note="Description of Artificial Sequence: Synthetic peptide"
GLYNTST

SEQ ID NO: 2690 - protein, 7 aa, Artificial Sequence
  source: /note="Description of Artificial Sequence: Synthetic peptide"
GLYPNFT

SEQ ID NO: 2691 - protein, 7 aa, Artificial Sequence
  source: /note="Description of Artificial Sequence: Synthetic peptide"
GMAAGHS

SEQ ID NO: 2692 - protein, 7 aa, Artificial Sequence
  source: /note="Description of Artificial Sequence: Synthetic peptide"
GMAATAS

SEQ ID NO: 2693 - protein, 7 aa, Artificial Sequence
  source: /note="Description of Artificial Sequence: Synthetic peptide"
GMAGIRD

SEQ ID NO: 2694 - protein, 7 aa, Artificial Sequence
  source: /note="Description of Artificial Sequence: Synthetic peptide"
GMAMTLS

SEQ ID NO: 2695 - protein, 7 aa, Artificial Sequence
  source: /note="Description of Artificial Sequence: Synthetic peptide"
GMATGVD

SEQ ID NO: 2696 - protein, 7 aa, Artificial Sequence
  source: /note="Description of Artificial Sequence: Synthetic peptide"
GMDQVLR

SEQ ID NO: 2697 - protein, 7 aa, Artificial Sequence
  source: /note="Description of Artificial Sequence: Synthetic peptide"
GMGTAYG

SEQ ID NO: 2698 - protein, 7 aa, Artificial Sequence
  source: /note="Description of Artificial Sequence: Synthetic peptide"
GMKPPVD

SEQ ID NO: 2699 - protein, 7 aa, Artificial Sequence
  source: /note="Description of Artificial Sequence: Synthetic peptide"
GMLRAVS

SEQ ID NO: 2700 - protein, 7 aa, Artificial Sequence
  source: /note="Description of Artificial Sequence: Synthetic peptide"
GMNNTVR

SEQ ID NO: 2701 - protein, 7 aa, Artificial Sequence
  source: /note="Description of Artificial Sequence: Synthetic peptide"
GMNSSLV

SEQ ID NO: 2702 - protein, 7 aa, Artificial Sequence
  source: /note="Description of Artificial Sequence: Synthetic peptide"
GMPHLPP

SEQ ID NO: 2703 - protein, 7 aa, Artificial Sequence
  source: /note="Description of Artificial Sequence: Synthetic peptide"
GMPIPSN

SEQ ID NO: 2704 - protein, 7 aa, Artificial Sequence
  source: /note="Description of Artificial Sequence: Synthetic peptide"
GMRDLQP

SEQ ID NO: 2705 - protein, 7 aa, Artificial Sequence
  source: /note="Description of Artificial Sequence: Synthetic peptide"
GMRQTQA

SEQ ID NO: 2706 - protein, 7 aa, Artificial Sequence
  source: /note="Description of Artificial Sequence: Synthetic peptide"
GMSMITR

SEQ ID NO: 2707 - protein, 7 aa, Artificial Sequence
  source: /note="Description of Artificial Sequence: Synthetic peptide"
GMSQGSY

SEQ ID NO: 2708 - protein, 7 aa, Artificial Sequence
  source: /note="Description of Artificial Sequence: Synthetic peptide"
GMSRSFS

SEQ ID NO: 2709 - protein, 7 aa, Artificial Sequence
  source: /note="Description of Artificial Sequence: Synthetic peptide"
GMSSALS

SEQ ID NO: 2710 - protein, 7 aa, Artificial Sequence
  source: /note="Description of Artificial Sequence: Synthetic peptide"
GMSVPMD

SEQ ID NO: 2711 - protein, 7 aa, Artificial Sequence
  source: /note="Description of Artificial Sequence: Synthetic peptide"
GMTRPQV

SEQ ID NO: 2712 - protein, 7 aa, Artificial Sequence
  source: /note="Description of Artificial Sequence: Synthetic peptide"
GNAATLR

SEQ ID NO: 2713 - protein, 7 aa, Artificial Sequence
  source: /note="Description of Artificial Sequence: Synthetic peptide"
GNARPIT

SEQ ID NO: 2714 - protein, 7 aa, Artificial Sequence
  source: /note="Description of Artificial Sequence: Synthetic peptide"
GNASPQM

SEQ ID NO: 2715 - protein, 7 aa, Artificial Sequence
  source: /note="Description of Artificial Sequence: Synthetic peptide"
GNAVGGD

SEQ ID NO: 2716 - protein, 7 aa, Artificial Sequence
  source: /note="Description of Artificial Sequence: Synthetic peptide"
GNDDSKY

SEQ ID NO: 2717 - protein, 7 aa, Artificial Sequence
  source: /note="Description of Artificial Sequence: Synthetic peptide"
GNFQKNA

SEQ ID NO: 2718 - protein, 7 aa, Artificial Sequence
  source: /note="Description of Artificial Sequence: Synthetic peptide"
GNGRGFQ

SEQ ID NO: 2719 - protein, 7 aa, Artificial Sequence
  source: /note="Description of Artificial Sequence: Synthetic peptide"
GNGTPEH

SEQ ID NO: 2720 - protein, 7 aa, Artificial Sequence
  source: /note="Description of Artificial Sequence: Synthetic peptide"
GNHAFHA

SEQ ID NO: 2721 - protein, 7 aa, Artificial Sequence
  source: /note="Description of Artificial Sequence: Synthetic peptide"
GNHLHLC

SEQ ID NO: 2722 - protein, 7 aa, Artificial Sequence
  source: /note="Description of Artificial Sequence: Synthetic peptide"
GNHVLQP

SEQ ID NO: 2723 - protein, 7 aa, Artificial Sequence
  source: /note="Description of Artificial Sequence: Synthetic peptide"
GNLLTIS

SEQ ID NO: 2724 - protein, 7 aa, Artificial Sequence
  source: /note="Description of Artificial Sequence: Synthetic peptide"
GNLSQRF

SEQ ID NO: 2725 - protein, 7 aa, Artificial Sequence
  source: /note="Description of Artificial Sequence: Synthetic peptide"
GNMHTLT

SEQ ID NO: 2726 - protein, 7 aa, Artificial Sequence
  source: /note="Description of Artificial Sequence: Synthetic peptide"
GNPLKPQ

SEQ ID NO: 2727 - protein, 7 aa, Artificial Sequence
  source: /note="Description of Artificial Sequence: Synthetic peptide"
GNREALA

SEQ ID NO: 2728 - protein, 7 aa, Artificial Sequence
  source: /note="Description of Artificial Sequence: Synthetic peptide"
GNRNSNV

SEQ ID NO: 2729 - protein, 7 aa, Artificial Sequence
  source: /note="Description of Artificial Sequence: Synthetic peptide"
GNSAMNS

SEQ ID NO: 2730 - protein, 7 aa, Artificial Sequence
  source: /note="Description of Artificial Sequence: Synthetic peptide"
GNSDQTR

SEQ ID NO: 2731 - protein, 7 aa, Artificial Sequence
  source: /note="Description of Artificial Sequence: Synthetic peptide"
GNSLAPQ

SEQ ID NO: 2732 - protein, 7 aa, Artificial Sequence
  source: /note="Description of Artificial Sequence: Synthetic peptide"
GNSSAGN

SEQ ID NO: 2733 - protein, 7 aa, Artificial Sequence
  source: /note="Description of Artificial Sequence: Synthetic peptide"
GNSSHSD

SEQ ID NO: 2734 - protein, 7 aa, Artificial Sequence
  source: /note="Description of Artificial Sequence: Synthetic peptide"
GNSTVDP

SEQ ID NO: 2735 - protein, 7 aa, Artificial Sequence
  source: /note="Description of Artificial Sequence: Synthetic peptide"
GNSVPHN

SEQ ID NO: 2736 - protein, 7 aa, Artificial Sequence
  source: /note="Description of Artificial Sequence: Synthetic peptide"
GNSVQHR

SEQ ID NO: 2737 - protein, 7 aa, Artificial Sequence
  source: /note="Description of Artificial Sequence: Synthetic peptide"
GNTAPQS

SEQ ID NO: 2738 - protein, 7 aa, Artificial Sequence
  source: /note="Description of Artificial Sequence: Synthetic peptide"
GNTHNMQ

SEQ ID NO: 2739 - protein, 7 aa, Artificial Sequence
  source: /note="Description of Artificial Sequence: Synthetic peptide"
GNTKSPG

SEQ ID NO: 2740 - protein, 7 aa, Artificial Sequence
  source: /note="Description of Artificial Sequence: Synthetic peptide"
GNTNRNG

SEQ ID NO: 2741 - protein, 7 aa, Artificial Sequence
  source: /note="Description of Artificial Sequence: Synthetic peptide"
GNTSSRA

SEQ ID NO: 2742 - protein, 7 aa, Artificial Sequence
  source: /note="Description of Artificial Sequence: Synthetic peptide"
GNTVRIP

SEQ ID NO: 2743 - protein, 7 aa, Artificial Sequence
  source: /note="Description of Artificial Sequence: Synthetic peptide"
GNVLRVV

SEQ ID NO: 2744 - protein, 7 aa, Artificial Sequence
  source: /note="Description of Artificial Sequence: Synthetic peptide"
GNVTKGL

SEQ ID NO: 2745 - protein, 7 aa, Artificial Sequence
  source: /note="Description of Artificial Sequence: Synthetic peptide"
GNYILKP

SEQ ID NO: 2746 - protein, 7 aa, Artificial Sequence
  source: /note="Description of Artificial Sequence: Synthetic peptide"
GNYISAS

SEQ ID NO: 2747 - protein, 7 aa, Artificial Sequence
  source: /note="Description of Artificial Sequence: Synthetic peptide"
GNYNLDL

SEQ ID NO: 2748 - protein, 7 aa, Artificial Sequence
  source: /note="Description of Artificial Sequence: Synthetic peptide"
GNYSSEV

SEQ ID NO: 2749 - protein, 7 aa, Artificial Sequence
  source: /note="Description of Artificial Sequence: Synthetic peptide"
GPAADVR

SEQ ID NO: 2750 - protein, 7 aa, Artificial Sequence
  source: /note="Description of Artificial Sequence: Synthetic peptide"
GPALLMD

SEQ ID NO: 2751 - protein, 7 aa, Artificial Sequence
  source: /note="Description of Artificial Sequence: Synthetic peptide"
GPALPIA

SEQ ID NO: 2752 - protein, 7 aa, Artificial Sequence
  source: /note="Description of Artificial Sequence: Synthetic peptide"
GPAMGSL

SEQ ID NO: 2753 - protein, 7 aa, Artificial Sequence
  source: /note="Description of Artificial Sequence: Synthetic peptide"
GPAPSIS

SEQ ID NO: 2754 - protein, 7 aa, Artificial Sequence
  source: /note="Description of Artificial Sequence: Synthetic peptide"
GPAQRLQ

SEQ ID NO: 2755 - protein, 7 aa, Artificial Sequence
  source: /note="Description of Artificial Sequence: Synthetic peptide"
GPASIVS

SEQ ID NO: 2756 - protein, 7 aa, Artificial Sequence
  source: /note="Description of Artificial Sequence: Synthetic peptide"
GPATHLT

SEQ ID NO: 2757 - protein, 7 aa, Artificial Sequence
  source: /note="Description of Artificial Sequence: Synthetic peptide"
GPDLTTG

SEQ ID NO: 2758 - protein, 7 aa, Artificial Sequence
  source: /note="Description of Artificial Sequence: Synthetic peptide"
GPDQEEH

SEQ ID NO: 2759 - protein, 7 aa, Artificial Sequence
  source: /note="Description of Artificial Sequence: Synthetic peptide"
GPEAMYK

SEQ ID NO: 2760 - protein, 7 aa, Artificial Sequence
  source: /note="Description of Artificial Sequence: Synthetic peptide"
GPEQDIM

SEQ ID NO: 2761 - protein, 7 aa, Artificial Sequence
  source: /note="Description of Artificial Sequence: Synthetic peptide"
GPEWVTG

SEQ ID NO: 2762 - protein, 7 aa, Artificial Sequence
  source: /note="Description of Artificial Sequence: Synthetic peptide"
GPFEQTD

SEQ ID NO: 2763 - protein, 7 aa, Artificial Sequence
  source: /note="Description of Artificial Sequence: Synthetic peptide"
GPGAIHY

SEQ ID NO: 2764 - protein, 7 aa, Artificial Sequence
  source: /note="Description of Artificial Sequence: Synthetic peptide"
GPGIASF

SEQ ID NO: 2765 - protein, 7 aa, Artificial Sequence
  source: /note="Description of Artificial Sequence: Synthetic peptide"
GPGKETR

SEQ ID NO: 2766 - protein, 7 aa, Artificial Sequence
  source: /note="Description of Artificial Sequence: Synthetic peptide"
GPGMLCA

SEQ ID NO: 2767 - protein, 7 aa, Artificial Sequence
  source: /note="Description of Artificial Sequence: Synthetic peptide"
GPGPIGS

SEQ ID NO: 2768 - protein, 7 aa, Artificial Sequence
  source: /note="Description of Artificial Sequence: Synthetic peptide"
GPGSFRP

SEQ ID NO: 2769 - protein, 7 aa, Artificial Sequence
  source: /note="Description of Artificial Sequence: Synthetic peptide"
GPGSSSM

SEQ ID NO: 2770 - protein, 7 aa, Artificial Sequence
  source: /note="Description of Artificial Sequence: Synthetic peptide"
GPHIRIA

SEQ ID NO: 2771 - protein, 7 aa, Artificial Sequence
  source: /note="Description of Artificial Sequence: Synthetic peptide"
GPHLVQH

SEQ ID NO: 2772 - protein, 7 aa, Artificial Sequence
  source: /note="Description of Artificial Sequence: Synthetic peptide"
GPHTSMI

SEQ ID NO: 2773 - protein, 7 aa, Artificial Sequence
  source: /note="Description of Artificial Sequence: Synthetic peptide"
GPHYNDP

SEQ ID NO: 2774 - protein, 7 aa, Artificial Sequence
  source: /note="Description of Artificial Sequence: Synthetic peptide"
GPIELTL

SEQ ID NO: 2775 - protein, 7 aa, Artificial Sequence
  source: /note="Description of Artificial Sequence: Synthetic peptide"
GPKLTPV

SEQ ID NO: 2776 - protein, 7 aa, Artificial Sequence
  source: /note="Description of Artificial Sequence: Synthetic peptide"
GPKMEPH

SEQ ID NO: 2777 - protein, 7 aa, Artificial Sequence
  source: /note="Description of Artificial Sequence: Synthetic peptide"
GPLLVRG

SEQ ID NO: 2778 - protein, 7 aa, Artificial Sequence
  source: /note="Description of Artificial Sequence: Synthetic peptide"
GPLNSVM

SEQ ID NO: 2779 - protein, 7 aa, Artificial Sequence
  source: /note="Description of Artificial Sequence: Synthetic peptide"
GPLPEGH

SEQ ID NO: 2780 - protein, 7 aa, Artificial Sequence
  source: /note="Description of Artificial Sequence: Synthetic peptide"
GPLPPTT

SEQ ID NO: 2781 - protein, 7 aa, Artificial Sequence
  source: /note="Description of Artificial Sequence: Synthetic peptide"
GPLPVAT

SEQ ID NO: 2782 - protein, 7 aa, Artificial Sequence
  source: /note="Description of Artificial Sequence: Synthetic peptide"
GPLSAMP

SEQ ID NO: 2783 - protein, 7 aa, Artificial Sequence
  source: /note="Description of Artificial Sequence: Synthetic peptide"
GPLSNVK

SEQ ID NO: 2784 - protein, 7 aa, Artificial Sequence
  source: /note="Description of Artificial Sequence: Synthetic peptide"
GPLVYAD

SEQ ID NO: 2785 - protein, 7 aa, Artificial Sequence
  source: /note="Description of Artificial Sequence: Synthetic peptide"
GPMQMPS

SEQ ID NO: 2786 - protein, 7 aa, Artificial Sequence
  source: /note="Description of Artificial Sequence: Synthetic peptide"
GPMREME

SEQ ID NO: 2787 - protein, 7 aa, Artificial Sequence
  source: /note="Description of Artificial Sequence: Synthetic peptide"
GPMYANP

SEQ ID NO: 2788 - protein, 7 aa, Artificial Sequence
  source: /note="Description of Artificial Sequence: Synthetic peptide"
GPNDVQK

SEQ ID NO: 2789 - protein, 7 aa, Artificial Sequence
  source: /note="Description of Artificial Sequence: Synthetic peptide"
GPNFLLP

SEQ ID NO: 2790 - protein, 7 aa, Artificial Sequence
  source: /note="Description of Artificial Sequence: Synthetic peptide"
GPNGAVG

SEQ ID NO: 2791 - protein, 7 aa, Artificial Sequence
  source: /note="Description of Artificial Sequence: Synthetic peptide"
GPNMRNG

SEQ ID NO: 2792 - protein, 7 aa, Artificial Sequence
  source: /note="Description of Artificial Sequence: Synthetic peptide"
GPNRGSL

SEQ ID NO: 2793 - protein, 7 aa, Artificial Sequence
  source: /note="Description of Artificial Sequence: Synthetic peptide"
GPNRLTV

SEQ ID NO: 2794 - protein, 7 aa, Artificial Sequence
  source: /note="Description of Artificial Sequence: Synthetic peptide"
GPNVLSP

SEQ ID NO: 2795 - protein, 7 aa, Artificial Sequence
  source: /note="Description of Artificial Sequence: Synthetic peptide"
GPPAVKV

SEQ ID NO: 2796 - protein, 7 aa, Artificial Sequence
  source: /note="Description of Artificial Sequence: Synthetic peptide"
GPPHGHS

SEQ ID NO: 2797 - protein, 7 aa, Artificial Sequence
  source: /note="Description of Artificial Sequence: Synthetic peptide"
GPPKANP

SEQ ID NO: 2798 - protein, 7 aa, Artificial Sequence
  source: /note="Description of Artificial Sequence: Synthetic peptide"
GPPLLAP

SEQ ID NO: 2799 - protein, 7 aa, Artificial Sequence
  source: /note="Description of Artificial Sequence: Synthetic peptide"
GPPMRPS

SEQ ID NO: 2800 - protein, 7 aa, Artificial Sequence
  source: /note="Description of Artificial Sequence: Synthetic peptide"
GPPPQPS

SEQ ID NO: 2801 - protein, 7 aa, Artificial Sequence
  source: /note="Description of Artificial Sequence: Synthetic peptide"
GPPPTNW

SEQ ID NO: 2802 - protein, 7 aa, Artificial Sequence
  source: /note="Description of Artificial Sequence: Synthetic peptide"
GPQTVTG

SEQ ID NO: 2803 - protein, 7 aa, Artificial Sequence
  source: /note="Description of Artificial Sequence: Synthetic peptide"
GPRDPRN

SEQ ID NO: 2804 - protein, 7 aa, Artificial Sequence
  source: /note="Description of Artificial Sequence: Synthetic peptide"
GPRGFLN

SEQ ID NO: 2805 - protein, 7 aa, Artificial Sequence
  source: /note="Description of Artificial Sequence: Synthetic peptide"
GPRPQHL

SEQ ID NO: 2806 - protein, 7 aa, Artificial Sequence
  source: /note="Description of Artificial Sequence: Synthetic peptide"
GPRVTND

SEQ ID NO: 2807 - protein, 7 aa, Artificial Sequence
  source: /note="Description of Artificial Sequence: Synthetic peptide"
GPSDHGS

SEQ ID NO: 2808 - protein, 7 aa, Artificial Sequence
  source: /note="Description of Artificial Sequence: Synthetic peptide"
GPSKALA

SEQ ID NO: 2809 - protein, 7 aa, Artificial Sequence
  source: /note="Description of Artificial Sequence: Synthetic peptide"
GPSLNTT

SEQ ID NO: 2810 - protein, 7 aa, Artificial Sequence
  source: /note="Description of Artificial Sequence: Synthetic peptide"
GPSPESS

SEQ ID NO: 2811 - protein, 7 aa, Artificial Sequence
  source: /note="Description of Artificial Sequence: Synthetic peptide"
GPSRNAP

SEQ ID NO: 2812 - protein, 7 aa, Artificial Sequence
  source: /note="Description of Artificial Sequence: Synthetic peptide"
GPSSAKL

SEQ ID NO: 2813 - protein, 7 aa, Artificial Sequence
  source: /note="Description of Artificial Sequence: Synthetic peptide"
GPSSSAY

SEQ ID NO: 2814 - protein, 7 aa, Artificial Sequence
  source: /note="Description of Artificial Sequence: Synthetic peptide"
GPSSVPD

SEQ ID NO: 2815 - protein, 7 aa, Artificial Sequence
  source: /note="Description of Artificial Sequence: Synthetic peptide"
GPSTSLI

SEQ ID NO: 2816 - protein, 7 aa, Artificial Sequence
  source: /note="Description of Artificial Sequence: Synthetic peptide"
GPSVHPA

SEQ ID NO: 2817 - protein, 7 aa, Artificial Sequence
  source: /note="Description of Artificial Sequence: Synthetic peptide"
GPSVHTD

SEQ ID NO: 2818 - protein, 7 aa, Artificial Sequence
  source: /note="Description of Artificial Sequence: Synthetic peptide"
GPSYIDS

SEQ ID NO: 2819 - protein, 7 aa, Artificial Sequence
  source: /note="Description of Artificial Sequence: Synthetic peptide"
GPTETPL

SEQ ID NO: 2820 - protein, 7 aa, Artificial Sequence
  source: /note="Description of Artificial Sequence: Synthetic peptide"
GPTGDLV

SEQ ID NO: 2821 - protein, 7 aa, Artificial Sequence
  source: /note="Description of Artificial Sequence: Synthetic peptide"
GPTGSSE

SEQ ID NO: 2822 - protein, 7 aa, Artificial Sequence
  source: /note="Description of Artificial Sequence: Synthetic peptide"
GPTHPRI

SEQ ID NO: 2823 - protein, 7 aa, Artificial Sequence
  source: /note="Description of Artificial Sequence: Synthetic peptide"
GPTMSMT

SEQ ID NO: 2824 - protein, 7 aa, Artificial Sequence
  source: /note="Description of Artificial Sequence: Synthetic peptide"
GPTSLAI

SEQ ID NO: 2825 - protein, 7 aa, Artificial Sequence
  source: /note="Description of Artificial Sequence: Synthetic peptide"
GPTYPHA

SEQ ID NO: 2826 - protein, 7 aa, Artificial Sequence
  source: /note="Description of Artificial Sequence: Synthetic peptide"
GPVKPRD

SEQ ID NO: 2827 - protein, 7 aa, Artificial Sequence
  source: /note="Description of Artificial Sequence: Synthetic peptide"
GPVNAPD

SEQ ID NO: 2828 - protein, 7 aa, Artificial Sequence
  source: /note="Description of Artificial Sequence: Synthetic peptide"
GPVSGVS

SEQ ID NO: 2829 - protein, 7 aa, Artificial Sequence
  source: /note="Description of Artificial Sequence: Synthetic peptide"
GPYNVDV

SEQ ID NO: 2830 - protein, 7 aa, Artificial Sequence
  source: /note="Description of Artificial Sequence: Synthetic peptide"
GPYSAPG

SEQ ID NO: 2831 - protein, 7 aa, Artificial Sequence
  source: /note="Description of Artificial Sequence: Synthetic peptide"
GQAIGHP

SEQ ID NO: 2832 - protein, 7 aa, Artificial Sequence
  source: /note="Description of Artificial Sequence: Synthetic peptide"
GQARNET

SEQ ID NO: 2833 - protein, 7 aa, Artificial Sequence
  source: /note="Description of Artificial Sequence: Synthetic peptide"
GQASAPF

SEQ ID NO: 2834 - protein, 7 aa, Artificial Sequence
  source: /note="Description of Artificial Sequence: Synthetic peptide"
GQASISS

SEQ ID NO: 2835 - protein, 7 aa, Artificial Sequence
  source: /note="Description of Artificial Sequence: Synthetic peptide"
GQASRQS

SEQ ID NO: 2836 - protein, 7 aa, Artificial Sequence
  source: /note="Description of Artificial Sequence: Synthetic peptide"
GQAVKVN

SEQ ID NO: 2837 - protein, 7 aa, Artificial Sequence
  source: /note="Description of Artificial Sequence: Synthetic peptide"
GQDDVNI

SEQ ID NO: 2838 - protein, 7 aa, Artificial Sequence
  source: /note="Description of Artificial Sequence: Synthetic peptide"
GQDMHDS

SEQ ID NO: 2839 - protein, 7 aa, Artificial Sequence
  source: /note="Description of Artificial Sequence: Synthetic peptide"
GQEWQAG

SEQ ID NO: 2840 - protein, 7 aa, Artificial Sequence
  source: /note="Description of Artificial Sequence: Synthetic peptide"
GQFVVRQ

SEQ ID NO: 2841 - protein, 7 aa, Artificial Sequence
  source: /note="Description of Artificial Sequence: Synthetic peptide"
GQGHPPN

SEQ ID NO: 2842 - protein, 7 aa, Artificial Sequence
  source: /note="Description of Artificial Sequence: Synthetic peptide"
GQGSTPL

SEQ ID NO: 2843 - protein, 7 aa, Artificial Sequence
  source: /note="Description of Artificial Sequence: Synthetic peptide"
GQHARLQ

SEQ ID NO: 2844 - protein, 7 aa, Artificial Sequence
  source: /note="Description of Artificial Sequence: Synthetic peptide"
GQHGKPA

SEQ ID NO: 2845 - protein, 7 aa, Artificial Sequence
  source: /note="Description of Artificial Sequence: Synthetic peptide"
GQHLSPN

SEQ ID NO: 2846 - protein, 7 aa, Artificial Sequence
  source: /note="Description of Artificial Sequence: Synthetic peptide"
GQIVAPT

SEQ ID NO: 2847 - protein, 7 aa, Artificial Sequence
  source: /note="Description of Artificial Sequence: Synthetic peptide"
GQIVTSG

SEQ ID NO: 2848 - protein, 7 aa, Artificial Sequence
  source: /note="Description of Artificial Sequence: Synthetic peptide"
GQLDMTT

SEQ ID NO: 2849 - protein, 7 aa, Artificial Sequence
  source: /note="Description of Artificial Sequence: Synthetic peptide"
GQLNLRP

SEQ ID NO: 2850 - protein, 7 aa, Artificial Sequence
  source: /note="Description of Artificial Sequence: Synthetic peptide"
GQLQSGS

SEQ ID NO: 2851 - protein, 7 aa, Artificial Sequence
  source: /note="Description of Artificial Sequence: Synthetic peptide"
GQMARPD

SEQ ID NO: 2852 - protein, 7 aa, Artificial Sequence
  source: /note="Description of Artificial Sequence: Synthetic peptide"
GQMISAQ

SEQ ID NO: 2853 - protein, 7 aa, Artificial Sequence
  source: /note="Description of Artificial Sequence: Synthetic peptide"
GQPSPWP

SEQ ID NO: 2854 - protein, 7 aa, Artificial Sequence
  source: /note="Description of Artificial Sequence: Synthetic peptide"
GQQDNRD

SEQ ID NO: 2855 - protein, 7 aa, Artificial Sequence
  source: /note="Description of Artificial Sequence: Synthetic peptide"
GQQQGFI

SEQ ID NO: 2856 - protein, 7 aa, Artificial Sequence
  source: /note="Description of Artificial Sequence: Synthetic peptide"
GQRKLEG

SEQ ID NO: 2857 - protein, 7 aa, Artificial Sequence
  source: /note="Description of Artificial Sequence: Synthetic peptide"
GQRMSMT

SEQ ID NO: 2858 - protein, 7 aa, Artificial Sequence
  source: /note="Description of Artificial Sequence: Synthetic peptide"
GQRTTYV

SEQ ID NO: 2859 - protein, 7 aa, Artificial Sequence
  source: /note="Description of Artificial Sequence: Synthetic peptide"
GQSFERT

SEQ ID NO: 2860 - protein, 7 aa, Artificial Sequence
  source: /note="Description of Artificial Sequence: Synthetic peptide"
GQSLAIR

SEQ ID NO: 2861 - protein, 7 aa, Artificial Sequence
  source: /note="Description of Artificial Sequence: Synthetic peptide"
GQSLTHP

SEQ ID NO: 2862 - protein, 7 aa, Artificial Sequence
  source: /note="Description of Artificial Sequence: Synthetic peptide"
GQSTRQD

SEQ ID NO: 2863 - protein, 7 aa, Artificial Sequence
  source: /note="Description of Artificial Sequence: Synthetic peptide"
GQTCTSL

SEQ ID NO: 2864 - protein, 7 aa, Artificial Sequence
  source: /note="Description of Artificial Sequence: Synthetic peptide"
GQTLALD

SEQ ID NO: 2865 - protein, 7 aa, Artificial Sequence
  source: /note="Description of Artificial Sequence: Synthetic peptide"
GQTYPTL

SEQ ID NO: 2866 - protein, 7 aa, Artificial Sequence
  source: /note="Description of Artificial Sequence: Synthetic peptide"
GQVHLNP

SEQ ID NO: 2867 - protein, 7 aa, Artificial Sequence
  source: /note="Description of Artificial Sequence: Synthetic peptide"
GQYGRQP

SEQ ID NO: 2868 - protein, 7 aa, Artificial Sequence
  source: /note="Description of Artificial Sequence: Synthetic peptide"
GQYHRDT

SEQ ID NO: 2869 - protein, 7 aa, Artificial Sequence
  source: /note="Description of Artificial Sequence: Synthetic peptide"
GQYSAST

SEQ ID NO: 2870 - protein, 7 aa, Artificial Sequence
  source: /note="Description of Artificial Sequence: Synthetic peptide"
GRAAPIS

SEQ ID NO: 2871 - protein, 7 aa, Artificial Sequence
  source: /note="Description of Artificial Sequence: Synthetic peptide"
GRANTGF

SEQ ID NO: 2872 - protein, 7 aa, Artificial Sequence
  source: /note="Description of Artificial Sequence: Synthetic peptide"
GRARPLP

SEQ ID NO: 2873 - protein, 7 aa, Artificial Sequence
  source: /note="Description of Artificial Sequence: Synthetic peptide"
GRASTYV

SEQ ID NO: 2874 - protein, 7 aa, Artificial Sequence
  source: /note="Description of Artificial Sequence: Synthetic peptide"
GRDEVPL

SEQ ID NO: 2875 - protein, 7 aa, Artificial Sequence
  source: /note="Description of Artificial Sequence: Synthetic peptide"
GRDGMPS

SEQ ID NO: 2876 - protein, 7 aa, Artificial Sequence
  source: /note="Description of Artificial Sequence: Synthetic peptide"
GRDPTPV

SEQ ID NO: 2877 - protein, 7 aa, Artificial Sequence
  source: /note="Description of Artificial Sequence: Synthetic peptide"
GRDPVRH

SEQ ID NO: 2878 - protein, 7 aa, Artificial Sequence
  source: /note="Description of Artificial Sequence: Synthetic peptide"
GREHMHT

SEQ ID NO: 2879 - protein, 7 aa, Artificial Sequence
  source: /note="Description of Artificial Sequence: Synthetic peptide"
GRELLHS

SEQ ID NO: 2880 - protein, 7 aa, Artificial Sequence
  source: /note="Description of Artificial Sequence: Synthetic peptide"
GRESQIP

SEQ ID NO: 2881 - protein, 7 aa, Artificial Sequence
  source: /note="Description of Artificial Sequence: Synthetic peptide"
GRESVTS

SEQ ID NO: 2882 - protein, 7 aa, Artificial Sequence
  source: /note="Description of Artificial Sequence: Synthetic peptide"
GREYVGN

SEQ ID NO: 2883 - protein, 7 aa, Artificial Sequence
  source: /note="Description of Artificial Sequence: Synthetic peptide"
GRFGTSD

SEQ ID NO: 2884 - protein, 7 aa, Artificial Sequence
  source: /note="Description of Artificial Sequence: Synthetic peptide"
GRGAQPG

SEQ ID NO: 2885 - protein, 7 aa, Artificial Sequence
  source: /note="Description of Artificial Sequence: Synthetic peptide"
GRGDNPA

SEQ ID NO: 2886 - protein, 7 aa, Artificial Sequence
  source: /note="Description of Artificial Sequence: Synthetic peptide"
GRGEAGL

SEQ ID NO: 2887 - protein, 7 aa, Artificial Sequence
  source: /note="Description of Artificial Sequence: Synthetic peptide"
GRGGESV

SEQ ID NO: 2888 - protein, 7 aa, Artificial Sequence
  source: /note="Description of Artificial Sequence: Synthetic peptide"
GRGLPMS

SEQ ID NO: 2889 - protein, 7 aa, Artificial Sequence
  source: /note="Description of Artificial Sequence: Synthetic peptide"
GRGPPPP

SEQ ID NO: 2890 - protein, 7 aa, Artificial Sequence
  source: /note="Description of Artificial Sequence: Synthetic peptide"
GRGQSAS

SEQ ID NO: 2891 - protein, 7 aa, Artificial Sequence
  source: /note="Description of Artificial Sequence: Synthetic peptide"
GRGTPPD

SEQ ID NO: 2892 - protein, 7 aa, Artificial Sequence
  source: /note="Description of Artificial Sequence: Synthetic peptide"
GRIAPVP

SEQ ID NO: 2893 - protein, 7 aa, Artificial Sequence
  source: /note="Description of Artificial Sequence: Synthetic peptide"
GRIYTAE

SEQ ID NO: 2894 - protein, 7 aa, Artificial Sequence
  source: /note="Description of Artificial Sequence: Synthetic peptide"
GRLLPEV

SEQ ID NO: 2895 - protein, 7 aa, Artificial Sequence
  source: /note="Description of Artificial Sequence: Synthetic peptide"
GRLPASL

SEQ ID NO: 2896 - protein, 7 aa, Artificial Sequence
  source: /note="Description of Artificial Sequence: Synthetic peptide"
GRMEGGG

SEQ ID NO: 2897 - protein, 7 aa, Artificial Sequence
  source: /note="Description of Artificial Sequence: Synthetic peptide"
GRMENTV

SEQ ID NO: 2898 - protein, 7 aa, Artificial Sequence
  source: /note="Description of Artificial Sequence: Synthetic peptide"
GRMMNSS

SEQ ID NO: 2899 - protein, 7 aa, Artificial Sequence
  source: /note="Description of Artificial Sequence: Synthetic peptide"
GRMVTGE

SEQ ID NO: 2900 - protein, 7 aa, Artificial Sequence
  source: /note="Description of Artificial Sequence: Synthetic peptide"
GRNDAYA

SEQ ID NO: 2901 - protein, 7 aa, Artificial Sequence
  source: /note="Description of Artificial Sequence: Synthetic peptide"
GRNEPWS

SEQ ID NO: 2902 - protein, 7 aa, Artificial Sequence
  source: /note="Description of Artificial Sequence: Synthetic peptide"
GRNPPLY

SEQ ID NO: 2903 - protein, 7 aa, Artificial Sequence
  source: /note="Description of Artificial Sequence: Synthetic peptide"
GRNPPSA

SEQ ID NO: 2904 - protein, 7 aa, Artificial Sequence
  source: /note="Description of Artificial Sequence: Synthetic peptide"
GRNSNYD

SEQ ID NO: 2905 - protein, 7 aa, Artificial Sequence
  source: /note="Description of Artificial Sequence: Synthetic peptide"
GRNVAGL

SEQ ID NO: 2906 - protein, 7 aa, Artificial Sequence
  source: /note="Description of Artificial Sequence: Synthetic peptide"
GRPDTEH

SEQ ID NO: 2907 - protein, 7 aa, Artificial Sequence
  source: /note="Description of Artificial Sequence: Synthetic peptide"
GRPLPTS

SEQ ID NO: 2908 - protein, 7 aa, Artificial Sequence
  source: /note="Description of Artificial Sequence: Synthetic peptide"
GRPLQAP

SEQ ID NO: 2909 - protein, 7 aa, Artificial Sequence
  source: /note="Description of Artificial Sequence: Synthetic peptide"
GRPPLLP

SEQ ID NO: 2910 - protein, 7 aa, Artificial Sequence
  source: /note="Description of Artificial Sequence: Synthetic peptide"
GRPPSMS

SEQ ID NO: 2911 - protein, 7 aa, Artificial Sequence
  source: /note="Description of Artificial Sequence: Synthetic peptide"
GRPPTDK

SEQ ID NO: 2912 - protein, 7 aa, Artificial Sequence
  source: /note="Description of Artificial Sequence: Synthetic peptide"
GRQDHPG

SEQ ID NO: 2913 - protein, 7 aa, Artificial Sequence
  source: /note="Description of Artificial Sequence: Synthetic peptide"
GRQLACN

SEQ ID NO: 2914 - protein, 7 aa, Artificial Sequence
  source: /note="Description of Artificial Sequence: Synthetic peptide"
GRQMGIT

SEQ ID NO: 2915 - protein, 7 aa, Artificial Sequence
  source: /note="Description of Artificial Sequence: Synthetic peptide"
GRQPSGE

SEQ ID NO: 2916 - protein, 7 aa, Artificial Sequence
  source: /note="Description of Artificial Sequence: Synthetic peptide"
GRQSVSN

SEQ ID NO: 2917 - protein, 7 aa, Artificial Sequence
  source: /note="Description of Artificial Sequence: Synthetic peptide"
GRQVDFV

SEQ ID NO: 2918 - protein, 7 aa, Artificial Sequence
  source: /note="Description of Artificial Sequence: Synthetic peptide"
GRSDLSN

SEQ ID NO: 2919 - protein, 7 aa, Artificial Sequence
  source: /note="Description of Artificial Sequence: Synthetic peptide"
GRSEYNQ

SEQ ID NO: 2920 - protein, 7 aa, Artificial Sequence
  source: /note="Description of Artificial Sequence: Synthetic peptide"
GRSIMSE

SEQ ID NO: 2921 - protein, 7 aa, Artificial Sequence
  source: /note="Description of Artificial Sequence: Synthetic peptide"
GRSLLRE

SEQ ID NO: 2922 - protein, 7 aa, Artificial Sequence
  source: /note="Description of Artificial Sequence: Synthetic peptide"
GRSPIQS

SEQ ID NO: 2923 - protein, 7 aa, Artificial Sequence
  source: /note="Description of Artificial Sequence: Synthetic peptide"
GRSSVAT

SEQ ID NO: 2924 - protein, 7 aa, Artificial Sequence
  source: /note="Description of Artificial Sequence: Synthetic peptide"
GRSVQHL

SEQ ID NO: 2925 - protein, 7 aa, Artificial Sequence
  source: /note="Description of Artificial Sequence: Synthetic peptide"
GRTGSPG

SEQ ID NO: 2926 - protein, 7 aa, Artificial Sequence
  source: /note="Description of Artificial Sequence: Synthetic peptide"
GRTSGSS

SEQ ID NO: 2927 - protein, 7 aa, Artificial Sequence
  source: /note="Description of Artificial Sequence: Synthetic peptide"
GRTSMAT

SEQ ID NO: 2928 - protein, 7 aa, Artificial Sequence
  source: /note="Description of Artificial Sequence: Synthetic peptide"
GRTSRAE

SEQ ID NO: 2929 - protein, 7 aa, Artificial Sequence
  source: /note="Description of Artificial Sequence: Synthetic peptide"
GRTYQIP

SEQ ID NO: 2930 - protein, 7 aa, Artificial Sequence
  source: /note="Description of Artificial Sequence: Synthetic peptide"
GRVLLLD

SEQ ID NO: 2931 - protein, 7 aa, Artificial Sequence
  source: /note="Description of Artificial Sequence: Synthetic peptide"
GRVQVPP

SEQ ID NO: 2932 - protein, 7 aa, Artificial Sequence
  source: /note="Description of Artificial Sequence: Synthetic peptide"
GRVVYID

SEQ ID NO: 2933 - protein, 7 aa, Artificial Sequence
  source: /note="Description of Artificial Sequence: Synthetic peptide"
GRYMAPL

SEQ ID NO: 2934 - protein, 7 aa, Artificial Sequence
  source: /note="Description of Artificial Sequence: Synthetic peptide"
GRYRAGQ

SEQ ID NO: 2935 - protein, 7 aa, Artificial Sequence
  source: /note="Description of Artificial Sequence: Synthetic peptide"
GSAISEL

SEQ ID NO: 2936 - protein, 7 aa, Artificial Sequence
  source: /note="Description of Artificial Sequence: Synthetic peptide"
GSALPTR

SEQ ID NO: 2937 - protein, 7 aa, Artificial Sequence
  source: /note="Description of Artificial Sequence: Synthetic peptide"
GSAPVVL

SEQ ID NO: 2938 - protein, 7 aa, Artificial Sequence
  source: /note="Description of Artificial Sequence: Synthetic peptide"
GSAQGAR

SEQ ID NO: 2939 - protein, 7 aa, Artificial Sequence
  source: /note="Description of Artificial Sequence: Synthetic peptide"
GSARTHP

SEQ ID NO: 2940 - protein, 7 aa, Artificial Sequence
  source: /note="Description of Artificial Sequence: Synthetic peptide"
GSASPMM

SEQ ID NO: 2941 - protein, 7 aa, Artificial Sequence
  source: /note="Description of Artificial Sequence: Synthetic peptide"
GSASSGF

SEQ ID NO: 2942 - protein, 7 aa, Artificial Sequence
  source: /note="Description of Artificial Sequence: Synthetic peptide"
GSDGFSN

SEQ ID NO: 2943 - protein, 7 aa, Artificial Sequence
  source: /note="Description of Artificial Sequence: Synthetic peptide"
GSDGQKG

SEQ ID NO: 2944 - protein, 7 aa, Artificial Sequence
  source: /note="Description of Artificial Sequence: Synthetic peptide"
GSDRIVS

SEQ ID NO: 2945 - protein, 7 aa, Artificial Sequence
  source: /note="Description of Artificial Sequence: Synthetic peptide"
GSDTPSP

SEQ ID NO: 2946 - protein, 7 aa, Artificial Sequence
  source: /note="Description of Artificial Sequence: Synthetic peptide"
GSDTTEI

SEQ ID NO: 2947 - protein, 7 aa, Artificial Sequence
  source: /note="Description of Artificial Sequence: Synthetic peptide"
GSDVIHE

SEQ ID NO: 2948 - protein, 7 aa, Artificial Sequence
  source: /note="Description of Artificial Sequence: Synthetic peptide"
GSEVVAC

SEQ ID NO: 2949 - protein, 7 aa, Artificial Sequence
  source: /note="Description of Artificial Sequence: Synthetic peptide"
GSFTSQI

SEQ ID NO: 2950 - protein, 7 aa, Artificial Sequence
  source: /note="Description of Artificial Sequence: Synthetic peptide"
GSGLIRG

SEQ ID NO: 2951 - protein, 7 aa, Artificial Sequence
  source: /note="Description of Artificial Sequence: Synthetic peptide"
GSGNDVL

SEQ ID NO: 2952 - protein, 7 aa, Artificial Sequence
  source: /note="Description of Artificial Sequence: Synthetic peptide"
GSGPNKS

SEQ ID NO: 2953 - protein, 7 aa, Artificial Sequence
  source: /note="Description of Artificial Sequence: Synthetic peptide"
GSGPTIR

SEQ ID NO: 2954 - protein, 7 aa, Artificial Sequence
  source: /note="Description of Artificial Sequence: Synthetic peptide"
GSGPVEH

SEQ ID NO: 2955 - protein, 7 aa, Artificial Sequence
  source: /note="Description of Artificial Sequence: Synthetic peptide"
GSGSSQT

SEQ ID NO: 2956 - protein, 7 aa, Artificial Sequence
  source: /note="Description of Artificial Sequence: Synthetic peptide"
GSGSTSG

SEQ ID NO: 2957 - protein, 7 aa, Artificial Sequence
  source: /note="Description of Artificial Sequence: Synthetic peptide"
GSGTYTV

SEQ ID NO: 2958 - protein, 7 aa, Artificial Sequence
  source: /note="Description of Artificial Sequence: Synthetic peptide"
GSHAVTS

SEQ ID NO: 2959 - protein, 7 aa, Artificial Sequence
  source: /note="Description of Artificial Sequence: Synthetic peptide"
GSHHSPH

SEQ ID NO: 2960 - protein, 7 aa, Artificial Sequence
  source: /note="Description of Artificial Sequence: Synthetic peptide"
GSHITPL

SEQ ID NO: 2961 - protein, 7 aa, Artificial Sequence
  source: /note="Description of Artificial Sequence: Synthetic peptide"
GSHPIVR

SEQ ID NO: 2962 - protein, 7 aa, Artificial Sequence
  source: /note="Description of Artificial Sequence: Synthetic peptide"
GSHPRGE

SEQ ID NO: 2963 - protein, 7 aa, Artificial Sequence
  source: /note="Description of Artificial Sequence: Synthetic peptide"
GSHQGQS

SEQ ID NO: 2964 - protein, 7 aa, Artificial Sequence
  source: /note="Description of Artificial Sequence: Synthetic peptide"
GSHSGGP

SEQ ID NO: 2965 - protein, 7 aa, Artificial Sequence
  source: /note="Description of Artificial Sequence: Synthetic peptide"
GSHSPAM

SEQ ID NO: 2966 - protein, 7 aa, Artificial Sequence
  source: /note="Description of Artificial Sequence: Synthetic peptide"
GSHTWTE

SEQ ID NO: 2967 - protein, 7 aa, Artificial Sequence
  source: /note="Description of Artificial Sequence: Synthetic peptide"
GSIGEQV

SEQ ID NO: 2968 - protein, 7 aa, Artificial Sequence
  source: /note="Description of Artificial Sequence: Synthetic peptide"
GSIQVTA

SEQ ID NO: 2969 - protein, 7 aa, Artificial Sequence
  source: /note="Description of Artificial Sequence: Synthetic peptide"
GSIVLHE

SEQ ID NO: 2970 - protein, 7 aa, Artificial Sequence
  source: /note="Description of Artificial Sequence: Synthetic peptide"
GSKNQEK

SEQ ID NO: 2971 - protein, 7 aa, Artificial Sequence
  source: /note="Description of Artificial Sequence: Synthetic peptide"
GSKPFLS

SEQ ID NO: 2972 - protein, 7 aa, Artificial Sequence
  source: /note="Description of Artificial Sequence: Synthetic peptide"
GSKRQDQ

SEQ ID NO: 2973 - protein, 7 aa, Artificial Sequence
  source: /note="Description of Artificial Sequence: Synthetic peptide"
GSKSFGS

SEQ ID NO: 2974 - protein, 7 aa, Artificial Sequence
  source: /note="Description of Artificial Sequence: Synthetic peptide"
GSKTFLS

SEQ ID NO: 2975 - protein, 7 aa, Artificial Sequence
  source: /note="Description of Artificial Sequence: Synthetic peptide"
GSKVAGL

SEQ ID NO: 2976 - protein, 7 aa, Artificial Sequence
  source: /note="Description of Artificial Sequence: Synthetic peptide"
GSKVGPL

SEQ ID NO: 2977 - protein, 7 aa, Artificial Sequence
  source: /note="Description of Artificial Sequence: Synthetic peptide"
GSLEQRY

SEQ ID NO: 2978 - protein, 7 aa, Artificial Sequence
  source: /note="Description of Artificial Sequence: Synthetic peptide"
GSLGHMR

SEQ ID NO: 2979 - protein, 7 aa, Artificial Sequence
  source: /note="Description of Artificial Sequence: Synthetic peptide"
GSLGTHS

SEQ ID NO: 2980 - protein, 7 aa, Artificial Sequence
  source: /note="Description of Artificial Sequence: Synthetic peptide"
GSLIAAQ

SEQ ID NO: 2981 - protein, 7 aa, Artificial Sequence
  source: /note="Description of Artificial Sequence: Synthetic peptide"
GSLNPVP

SEQ ID NO: 2982 - protein, 7 aa, Artificial Sequence
  source: /note="Description of Artificial Sequence: Synthetic peptide"
GSLPYSS

SEQ ID NO: 2983 - protein, 7 aa, Artificial Sequence
  source: /note="Description of Artificial Sequence: Synthetic peptide"
GSLYRTE

SEQ ID NO: 2984 - protein, 7 aa, Artificial Sequence
  source: /note="Description of Artificial Sequence: Synthetic peptide"
GSMAYLG

SEQ ID NO: 2985 - protein, 7 aa, Artificial Sequence
  source: /note="Description of Artificial Sequence: Synthetic peptide"
GSMLAHP

SEQ ID NO: 2986 - protein, 7 aa, Artificial Sequence
  source: /note="Description of Artificial Sequence: Synthetic peptide"
GSMNPPS

SEQ ID NO: 2987 - protein, 7 aa, Artificial Sequence
  source: /note="Description of Artificial Sequence: Synthetic peptide"
GSMPVIV

SEQ ID NO: 2988 - protein, 7 aa, Artificial Sequence
  source: /note="Description of Artificial Sequence: Synthetic peptide"
GSMRPGE

SEQ ID NO: 2989 - protein, 7 aa, Artificial Sequence
  source: /note="Description of Artificial Sequence: Synthetic peptide"
GSMSSAN

SEQ ID NO: 2990 - protein, 7 aa, Artificial Sequence
  source: /note="Description of Artificial Sequence: Synthetic peptide"
GSMTSLI

SEQ ID NO: 2991 - protein, 7 aa, Artificial Sequence
  source: /note="Description of Artificial Sequence: Synthetic peptide"
GSMYAVP

SEQ ID NO: 2992 - protein, 7 aa, Artificial Sequence
  source: /note="Description of Artificial Sequence: Synthetic peptide"
GSNGGIS

SEQ ID NO: 2993 - protein, 7 aa, Artificial Sequence
  source: /note="Description of Artificial Sequence: Synthetic peptide"
GSNPMSL

SEQ ID NO: 2994 - protein, 7 aa, Artificial Sequence
  source: /note="Description of Artificial Sequence: Synthetic peptide"
GSPAMAH

SEQ ID NO: 2995 - protein, 7 aa, Artificial Sequence
  source: /note="Description of Artificial Sequence: Synthetic peptide"
GSPGRVA

SEQ ID NO: 2996 - protein, 7 aa, Artificial Sequence
  source: /note="Description of Artificial Sequence: Synthetic peptide"
GSPIGGM

SEQ ID NO: 2997 - protein, 7 aa, Artificial Sequence
  source: /note="Description of Artificial Sequence: Synthetic peptide"
GSPKPHV

SEQ ID NO: 2998 - protein, 7 aa, Artificial Sequence
  source: /note="Description of Artificial Sequence: Synthetic peptide"
GSPMGYT

SEQ ID NO: 2999 - protein, 7 aa, Artificial Sequence
  source: /note="Description of Artificial Sequence: Synthetic peptide"
GSPMPII

SEQ ID NO: 3000 - protein, 7 aa, Artificial Sequence
  source: /note="Description of Artificial Sequence: Synthetic peptide"
GSPNSCM

SEQ ID NO: 3001 - protein, 7 aa, Artificial Sequence
  source: /note="Description of Artificial Sequence: Synthetic peptide"
GSPPTLR

SEQ ID NO: 3002 - protein, 7 aa, Artificial Sequence
  source: /note="Description of Artificial Sequence: Synthetic peptide"
GSPRSLS

SEQ ID NO: 3003 - protein, 7 aa, Artificial Sequence
  source: /note="Description of Artificial Sequence: Synthetic peptide"
GSPRVGT

SEQ ID NO: 3004 - protein, 7 aa, Artificial Sequence
  source: /note="Description of Artificial Sequence: Synthetic peptide"
GSPSPMR

SEQ ID NO: 3005 - protein, 7 aa, Artificial Sequence
  source: /note="Description of Artificial Sequence: Synthetic peptide"
GSPTTGS

SEQ ID NO: 3006 - protein, 7 aa, Artificial Sequence
  source: /note="Description of Artificial Sequence: Synthetic peptide"
GSPYSQA

SEQ ID NO: 3007 - protein, 7 aa, Artificial Sequence
  source: /note="Description of Artificial Sequence: Synthetic peptide"
GSQLHPV

SEQ ID NO: 3008 - protein, 7 aa, Artificial Sequence
  source: /note="Description of Artificial Sequence: Synthetic peptide"
GSQPIRT

SEQ ID NO: 3009 - protein, 7 aa, Artificial Sequence
  source: /note="Description of Artificial Sequence: Synthetic peptide"
GSQQLAA

SEQ ID NO: 3010 - protein, 7 aa, Artificial Sequence
  source: /note="Description of Artificial Sequence: Synthetic peptide"
GSRASDP

SEQ ID NO: 3011 - protein, 7 aa, Artificial Sequence
  source: /note="Description of Artificial Sequence: Synthetic peptide"
GSRLQHD

SEQ ID NO: 3012 - protein, 7 aa, Artificial Sequence
  source: /note="Description of Artificial Sequence: Synthetic peptide"
GSRNFPT

SEQ ID NO: 3013 - protein, 7 aa, Artificial Sequence
  source: /note="Description of Artificial Sequence: Synthetic peptide"
GSRNYIA

SEQ ID NO: 3014 - protein, 7 aa, Artificial Sequence
  source: /note="Description of Artificial Sequence: Synthetic peptide"
GSRPGSL

SEQ ID NO: 3015 - protein, 7 aa, Artificial Sequence
  source: /note="Description of Artificial Sequence: Synthetic peptide"
GSRQPAD

SEQ ID NO: 3016 - protein, 7 aa, Artificial Sequence
  source: /note="Description of Artificial Sequence: Synthetic peptide"
GSRTFTG

SEQ ID NO: 3017 - protein, 7 aa, Artificial Sequence
  source: /note="Description of Artificial Sequence: Synthetic peptide"
GSRTGPT

SEQ ID NO: 3018 - protein, 7 aa, Artificial Sequence
  source: /note="Description of Artificial Sequence: Synthetic peptide"
GSRVSGE

SEQ ID NO: 3019 - protein, 7 aa, Artificial Sequence
  source: /note="Description of Artificial Sequence: Synthetic peptide"
GSSATVF

SEQ ID NO: 3020 - protein, 7 aa, Artificial Sequence
  source: /note="Description of Artificial Sequence: Synthetic peptide"
GSSDTCV

SEQ ID NO: 3021 - protein, 7 aa, Artificial Sequence
  source: /note="Description of Artificial Sequence: Synthetic peptide"
GSSGIAR

SEQ ID NO: 3022 - protein, 7 aa, Artificial Sequence
  source: /note="Description of Artificial Sequence: Synthetic peptide"
GSSHGIL

SEQ ID NO: 3023 - protein, 7 aa, Artificial Sequence
  source: /note="Description of Artificial Sequence: Synthetic peptide"
GSSMPPP

SEQ ID NO: 3024 - protein, 7 aa, Artificial Sequence
  source: /note="Description of Artificial Sequence: Synthetic peptide"
GSSPART

SEQ ID NO: 3025 - protein, 7 aa, Artificial Sequence
  source: /note="Description of Artificial Sequence: Synthetic peptide"
GSSPLHK

SEQ ID NO: 3026 - protein, 7 aa, Artificial Sequence
  source: /note="Description of Artificial Sequence: Synthetic peptide"
GSSPVGA

SEQ ID NO: 3027 - protein, 7 aa, Artificial Sequence
  source: /note="Description of Artificial Sequence: Synthetic peptide"
GSSQLFL

SEQ ID NO: 3028 - protein, 7 aa, Artificial Sequence
  source: /note="Description of Artificial Sequence: Synthetic peptide"
GSSRADA

SEQ ID NO: 3029 - protein, 7 aa, Artificial Sequence
  source: /note="Description of Artificial Sequence: Synthetic peptide"
GSSSHVS

SEQ ID NO: 3030 - protein, 7 aa, Artificial Sequence
  source: /note="Description of Artificial Sequence: Synthetic peptide"
GSSSIAS

SEQ ID NO: 3031 - protein, 7 aa, Artificial Sequence
  source: /note="Description of Artificial Sequence: Synthetic peptide"
GSSSLHS

SEQ ID NO: 3032 - protein, 7 aa, Artificial Sequence
  source: /note="Description of Artificial Sequence: Synthetic peptide"
GSSSNAR

SEQ ID NO: 3033 - protein, 7 aa, Artificial Sequence
  source: /note="Description of Artificial Sequence: Synthetic peptide"
GSSYHSP

SEQ ID NO: 3034 - protein, 7 aa, Artificial Sequence
  source: /note="Description of Artificial Sequence: Synthetic peptide"
GSTGDRQ

SEQ ID NO: 3035 - protein, 7 aa, Artificial Sequence
  source: /note="Description of Artificial Sequence: Synthetic peptide"
GSTGNTV

SEQ ID NO: 3036 - protein, 7 aa, Artificial Sequence
  source: /note="Description of Artificial Sequence: Synthetic peptide"
GSTGSAA

SEQ ID NO: 3037 - protein, 7 aa, Artificial Sequence
  source: /note="Description of Artificial Sequence: Synthetic peptide"
GSTGSGH

SEQ ID NO: 3038 - protein, 7 aa, Artificial Sequence
  source: /note="Description of Artificial Sequence: Synthetic peptide"
GSTMTIA

SEQ ID NO: 3039 - protein, 7 aa, Artificial Sequence
  source: /note="Description of Artificial Sequence: Synthetic peptide"
GSTNELV

SEQ ID NO: 3040 - protein, 7 aa, Artificial Sequence
  source: /note="Description of Artificial Sequence: Synthetic peptide"
GSTNPLA

SEQ ID NO: 3041 - protein, 7 aa, Artificial Sequence
  source: /note="Description of Artificial Sequence: Synthetic peptide"
GSTNRLA

SEQ ID NO: 3042 - protein, 7 aa, Artificial Sequence
  source: /note="Description of Artificial Sequence: Synthetic peptide"
GSTNSPA

SEQ ID NO: 3043 - protein, 7 aa, Artificial Sequence
  source: /note="Description of Artificial Sequence: Synthetic peptide"
GSTPLPL

SEQ ID NO: 3044 - protein, 7 aa, Artificial Sequence
  source: /note="Description of Artificial Sequence: Synthetic peptide"
GSTQGSG

SEQ ID NO: 3045 - protein, 7 aa, Artificial Sequence
  source: /note="Description of Artificial Sequence: Synthetic peptide"
GSTSKDR

SEQ ID NO: 3046 - protein, 7 aa, Artificial Sequence
  source: /note="Description of Artificial Sequence: Synthetic peptide"
GSTSSRT

SEQ ID NO: 3047 - protein, 7 aa, Artificial Sequence
  source: /note="Description of Artificial Sequence: Synthetic peptide"
GSTTRPQ

SEQ ID NO: 3048 - protein, 7 aa, Artificial Sequence
  source: /note="Description of Artificial Sequence: Synthetic peptide"
GSTWSSP

SEQ ID NO: 3049 - protein, 7 aa, Artificial Sequence
  source: /note="Description of Artificial Sequence: Synthetic peptide"
GSTYASM

SEQ ID NO: 3050 - protein, 7 aa, Artificial Sequence
  source: /note="Description of Artificial Sequence: Synthetic peptide"
GSVADRV

SEQ ID NO: 3051 - protein, 7 aa, Artificial Sequence
  source: /note="Description of Artificial Sequence: Synthetic peptide"
GSVATNP

SEQ ID NO: 3052 - protein, 7 aa, Artificial Sequence
  source: /note="Description of Artificial Sequence: Synthetic peptide"
GSVEESR

SEQ ID NO: 3053 - protein, 7 aa, Artificial Sequence
  source: /note="Description of Artificial Sequence: Synthetic peptide"
GSVNPRS

SEQ ID NO: 3054 - protein, 7 aa, Artificial Sequence
  source: /note="Description of Artificial Sequence: Synthetic peptide"
GSVPDSR

SEQ ID NO: 3055 - protein, 7 aa, Artificial Sequence
  source: /note="Description of Artificial Sequence: Synthetic peptide"
GSVPNVI

SEQ ID NO: 3056 - protein, 7 aa, Artificial Sequence
  source: /note="Description of Artificial Sequence: Synthetic peptide"
GSVQIRP

SEQ ID NO: 3057 - protein, 7 aa, Artificial Sequence
  source: /note="Description of Artificial Sequence: Synthetic peptide"
GSYANAA

SEQ ID NO: 3058 - protein, 7 aa, Artificial Sequence
  source: /note="Description of Artificial Sequence: Synthetic peptide"
GTADLVP

SEQ ID NO: 3059 - protein, 7 aa, Artificial Sequence
  source: /note="Description of Artificial Sequence: Synthetic peptide"
GTAHLKP

SEQ ID NO: 3060 - protein, 7 aa, Artificial Sequence
  source: /note="Description of Artificial Sequence: Synthetic peptide"
GTANRNA

SEQ ID NO: 3061 - protein, 7 aa, Artificial Sequence
  source: /note="Description of Artificial Sequence: Synthetic peptide"
GTAPSVM

SEQ ID NO: 3062 - protein, 7 aa, Artificial Sequence
  source: /note="Description of Artificial Sequence: Synthetic peptide"
GTAVQRL

SEQ ID NO: 3063 - protein, 7 aa, Artificial Sequence
  source: /note="Description of Artificial Sequence: Synthetic peptide"
GTDFVPS

SEQ ID NO: 3064 - protein, 7 aa, Artificial Sequence
  source: /note="Description of Artificial Sequence: Synthetic peptide"
GTDIRMP

SEQ ID NO: 3065 - protein, 7 aa, Artificial Sequence
  source: /note="Description of Artificial Sequence: Synthetic peptide"
GTEEFGY

SEQ ID NO: 3066 - protein, 7 aa, Artificial Sequence
  source: /note="Description of Artificial Sequence: Synthetic peptide"
GTEHTTA

SEQ ID NO: 3067 - protein, 7 aa, Artificial Sequence
  source: /note="Description of Artificial Sequence: Synthetic peptide"
GTESNGR

SEQ ID NO: 3068 - protein, 7 aa, Artificial Sequence
  source: /note="Description of Artificial Sequence: Synthetic peptide"
GTEYNTC

SEQ ID NO: 3069 - protein, 7 aa, Artificial Sequence
  source: /note="Description of Artificial Sequence: Synthetic peptide"
GTFGTTA

SEQ ID NO: 3070 - protein, 7 aa, Artificial Sequence
  source: /note="Description of Artificial Sequence: Synthetic peptide"
GTFKASH

SEQ ID NO: 3071 - protein, 7 aa, Artificial Sequence
  source: /note="Description of Artificial Sequence: Synthetic peptide"
GTGGVKI

SEQ ID NO: 3072 - protein, 7 aa, Artificial Sequence
  source: /note="Description of Artificial Sequence: Synthetic peptide"
GTGINHL

SEQ ID NO: 3073 - protein, 7 aa, Artificial Sequence
  source: /note="Description of Artificial Sequence: Synthetic peptide"
GTGKPMG

SEQ ID NO: 3074 - protein, 7 aa, Artificial Sequence
  source: /note="Description of Artificial Sequence: Synthetic peptide"
GTGNVGA

SEQ ID NO: 3075 - protein, 7 aa, Artificial Sequence
  source: /note="Description of Artificial Sequence: Synthetic peptide"
GTGPSVP

SEQ ID NO: 3076 - protein, 7 aa, Artificial Sequence
  source: /note="Description of Artificial Sequence: Synthetic peptide"
GTGRDGS

SEQ ID NO: 3077 - protein, 7 aa, Artificial Sequence
  source: /note="Description of Artificial Sequence: Synthetic peptide"
GTGSRVV

SEQ ID NO: 3078 - protein, 7 aa, Artificial Sequence
  source: /note="Description of Artificial Sequence: Synthetic peptide"
GTIYGPV

SEQ ID NO: 3079 - protein, 7 aa, Artificial Sequence
  source: /note="Description of Artificial Sequence: Synthetic peptide"
GTKLYTT

SEQ ID NO: 3080 - protein, 7 aa, Artificial Sequence
  source: /note="Description of Artificial Sequence: Synthetic peptide"
GTKYAAS

SEQ ID NO: 3081 - protein, 7 aa, Artificial Sequence
  source: /note="Description of Artificial Sequence: Synthetic peptide"
GTLDTVI

SEQ ID NO: 3082 - protein, 7 aa, Artificial Sequence
  source: /note="Description of Artificial Sequence: Synthetic peptide"
GTLEYSM

SEQ ID NO: 3083 - protein, 7 aa, Artificial Sequence
  source: /note="Description of Artificial Sequence: Synthetic peptide"
GTLGCRE

SEQ ID NO: 3084 - protein, 7 aa, Artificial Sequence
  source: /note="Description of Artificial Sequence: Synthetic peptide"
GTLGLRQ

SEQ ID NO: 3085 - protein, 7 aa, Artificial Sequence
  source: /note="Description of Artificial Sequence: Synthetic peptide"
GTLHGSE

SEQ ID NO: 3086 - protein, 7 aa, Artificial Sequence
  source: /note="Description of Artificial Sequence: Synthetic peptide"
GTLNYAS

SEQ ID NO: 3087 - protein, 7 aa, Artificial Sequence
  source: /note="Description of Artificial Sequence: Synthetic peptide"
GTLSGLE

SEQ ID NO: 3088 - protein, 7 aa, Artificial Sequence
  source: /note="Description of Artificial Sequence: Synthetic peptide"
GTLTPTM

SEQ ID NO: 3089 - protein, 7 aa, Artificial Sequence
  source: /note="Description of Artificial Sequence: Synthetic peptide"
GTMNVVI

SEQ ID NO: 3090 - protein, 7 aa, Artificial Sequence
  source: /note="Description of Artificial Sequence: Synthetic peptide"
GTMSLGP

SEQ ID NO: 3091 - protein, 7 aa, Artificial Sequence
  source: /note="Description of Artificial Sequence: Synthetic peptide"
GTMTNSA

SEQ ID NO: 3092 - protein, 7 aa, Artificial Sequence
  source: /note="Description of Artificial Sequence: Synthetic peptide"
GTNGLML

SEQ ID NO: 3093 - protein, 7 aa, Artificial Sequence
  source: /note="Description of Artificial Sequence: Synthetic peptide"
GTNGLPA

SEQ ID NO: 3094 - protein, 7 aa, Artificial Sequence
  source: /note="Description of Artificial Sequence: Synthetic peptide"
GTNHAQK

SEQ ID NO: 3095 - protein, 7 aa, Artificial Sequence
  source: /note="Description of Artificial Sequence: Synthetic peptide"
GTNPVLT

SEQ ID NO: 3096 - protein, 7 aa, Artificial Sequence
  source: /note="Description of Artificial Sequence: Synthetic peptide"
GTPAHAA

SEQ ID NO: 3097 - protein, 7 aa, Artificial Sequence
  source: /note="Description of Artificial Sequence: Synthetic peptide"
GTPERLP

SEQ ID NO: 3098 - protein, 7 aa, Artificial Sequence
  source: /note="Description of Artificial Sequence: Synthetic peptide"
GTPMTQG

SEQ ID NO: 3099 - protein, 7 aa, Artificial Sequence
  source: /note="Description of Artificial Sequence: Synthetic peptide"
GTPNNRN

SEQ ID NO: 3100 - protein, 7 aa, Artificial Sequence
  source: /note="Description of Artificial Sequence: Synthetic peptide"
GTPNVHG

SEQ ID NO: 3101 - protein, 7 aa, Artificial Sequence
  source: /note="Description of Artificial Sequence: Synthetic peptide"
GTPPGPS

SEQ ID NO: 3102 - protein, 7 aa, Artificial Sequence
  source: /note="Description of Artificial Sequence: Synthetic peptide"
GTPPTRL

SEQ ID NO: 3103 - protein, 7 aa, Artificial Sequence
  source: /note="Description of Artificial Sequence: Synthetic peptide"
GTPVVDC

SEQ ID NO: 3104 - protein, 7 aa, Artificial Sequence
  source: /note="Description of Artificial Sequence: Synthetic peptide"
GTQAERQ

SEQ ID NO: 3105 - protein, 7 aa, Artificial Sequence
  source: /note="Description of Artificial Sequence: Synthetic peptide"
GTQARIC

SEQ ID NO: 3106 - protein, 7 aa, Artificial Sequence
  source: /note="Description of Artificial Sequence: Synthetic peptide"
GTQMARA

SEQ ID NO: 3107 - protein, 7 aa, Artificial Sequence
  source: /note="Description of Artificial Sequence: Synthetic peptide"
GTQSTYD

SEQ ID NO: 3108 - protein, 7 aa, Artificial Sequence
  source: /note="Description of Artificial Sequence: Synthetic peptide"
GTRPAHV

SEQ ID NO: 3109 - protein, 7 aa, Artificial Sequence
  source: /note="Description of Artificial Sequence: Synthetic peptide"
GTRSTFA

SEQ ID NO: 3110 - protein, 7 aa, Artificial Sequence
  source: /note="Description of Artificial Sequence: Synthetic peptide"
GTRTVVL

SEQ ID NO: 3111 - protein, 7 aa, Artificial Sequence
  source: /note="Description of Artificial Sequence: Synthetic peptide"
GTRVLSY

SEQ ID NO: 3112 - protein, 7 aa, Artificial Sequence
  source: /note="Description of Artificial Sequence: Synthetic peptide"
GTSGYSP

SEQ ID NO: 3113 - protein, 7 aa, Artificial Sequence
  source: /note="Description of Artificial Sequence: Synthetic peptide"
GTSNLSP

SEQ ID NO: 3114 - protein, 7 aa, Artificial Sequence
  source: /note="Description of Artificial Sequence: Synthetic peptide"
GTSPDQK

SEQ ID NO: 3115 - protein, 7 aa, Artificial Sequence
  source: /note="Description of Artificial Sequence: Synthetic peptide"
GTSPVMC

SEQ ID NO: 3116 - protein, 7 aa, Artificial Sequence
  source: /note="Description of Artificial Sequence: Synthetic peptide"
GTSQKLP

SEQ ID NO: 3117 - protein, 7 aa, Artificial Sequence
  source: /note="Description of Artificial Sequence: Synthetic peptide"
GTSQKTS

SEQ ID NO: 3118 - protein, 7 aa, Artificial Sequence
  source: /note="Description of Artificial Sequence: Synthetic peptide"
GTSSRAP

SEQ ID NO: 3119 - protein, 7 aa, Artificial Sequence
  source: /note="Description of Artificial Sequence: Synthetic peptide"
GTSSSGL

SEQ ID NO: 3120 - protein, 7 aa, Artificial Sequence
  source: /note="Description of Artificial Sequence: Synthetic peptide"
GTTEIHS

SEQ ID NO: 3121 - protein, 7 aa, Artificial Sequence
  source: /note="Description of Artificial Sequence: Synthetic peptide"
GTTHTNI

SEQ ID NO: 3122 - protein, 7 aa, Artificial Sequence
  source: /note="Description of Artificial Sequence: Synthetic peptide"
GTTKLGP

SEQ ID NO: 3123 - protein, 7 aa, Artificial Sequence
  source: /note="Description of Artificial Sequence: Synthetic peptide"
GTTMVPA

SEQ ID NO: 3124 - protein, 7 aa, Artificial Sequence
  source: /note="Description of Artificial Sequence: Synthetic peptide"
GTTNLAG

SEQ ID NO: 3125 - protein, 7 aa, Artificial Sequence
  source: /note="Description of Artificial Sequence: Synthetic peptide"
GTTNNMF

SEQ ID NO: 3126 - protein, 7 aa, Artificial Sequence
  source: /note="Description of Artificial Sequence: Synthetic peptide"
GTTNNNA

SEQ ID NO: 3127 - protein, 7 aa, Artificial Sequence
  source: /note="Description of Artificial Sequence: Synthetic peptide"
GTTSAES

SEQ ID NO: 3128 - protein, 7 aa, Artificial Sequence
  source: /note="Description of Artificial Sequence: Synthetic peptide"
GTTSPKS

SEQ ID NO: 3129 - protein, 7 aa, Artificial Sequence
  source: /note="Description of Artificial Sequence: Synthetic peptide"
GTTSSHE

SEQ ID NO: 3130 - protein, 7 aa, Artificial Sequence
  source: /note="Description of Artificial Sequence: Synthetic peptide"
GTTTGHS

SEQ ID NO: 3131 - protein, 7 aa, Artificial Sequence
  source: /note="Description of Artificial Sequence: Synthetic peptide"
GTVDRGQ

SEQ ID NO: 3132 - protein, 7 aa, Artificial Sequence
  source: /note="Description of Artificial Sequence: Synthetic peptide"
GTVGLNV

SEQ ID NO: 3133 - protein, 7 aa, Artificial Sequence
  source: /note="Description of Artificial Sequence: Synthetic peptide"
GTVGSDR

SEQ ID NO: 3134 - protein, 7 aa, Artificial Sequence
  source: /note="Description of Artificial Sequence: Synthetic peptide"
GTVHNNL

SEQ ID NO: 3135 - protein, 7 aa, Artificial Sequence
  source: /note="Description of Artificial Sequence: Synthetic peptide"
GTVHTNA

SEQ ID NO: 3136 - protein, 7 aa, Artificial Sequence
  source: /note="Description of Artificial Sequence: Synthetic peptide"
GTVPEGP

SEQ ID NO: 3137 - protein, 7 aa, Artificial Sequence
  source: /note="Description of Artificial Sequence: Synthetic peptide"
GTVQKSD

SEQ ID NO: 3138 - protein, 7 aa, Artificial Sequence
  source: /note="Description of Artificial Sequence: Synthetic peptide"
GTVRSAV

SEQ ID NO: 3139 - protein, 7 aa, Artificial Sequence
  source: /note="Description of Artificial Sequence: Synthetic peptide"
GTYANAV

SEQ ID NO: 3140 - protein, 7 aa, Artificial Sequence
  source: /note="Description of Artificial Sequence: Synthetic peptide"
GTYVEST

SEQ ID NO: 3141 - protein, 7 aa, Artificial Sequence
  source: /note="Description of Artificial Sequence: Synthetic peptide"
GVAHEKN

SEQ ID NO: 3142 - protein, 7 aa, Artificial Sequence
  source: /note="Description of Artificial Sequence: Synthetic peptide"
GVAKLLA

SEQ ID NO: 3143 - protein, 7 aa, Artificial Sequence
  source: /note="Description of Artificial Sequence: Synthetic peptide"
GVASSPG

SEQ ID NO: 3144 - protein, 7 aa, Artificial Sequence
  source: /note="Description of Artificial Sequence: Synthetic peptide"
GVASTRA

SEQ ID NO: 3145 - protein, 7 aa, Artificial Sequence
  source: /note="Description of Artificial Sequence: Synthetic peptide"
GVATLTL

SEQ ID NO: 3146 - protein, 7 aa, Artificial Sequence
  source: /note="Description of Artificial Sequence: Synthetic peptide"
GVAVTER

SEQ ID NO: 3147 - protein, 7 aa, Artificial Sequence
  source: /note="Description of Artificial Sequence: Synthetic peptide"
GVCAESW

SEQ ID NO: 3148 - protein, 7 aa, Artificial Sequence
  source: /note="Description of Artificial Sequence: Synthetic peptide"
GVDVKWS

SEQ ID NO: 3149 - protein, 7 aa, Artificial Sequence
  source: /note="Description of Artificial Sequence: Synthetic peptide"
GVEAMRA

SEQ ID NO: 3150 - protein, 7 aa, Artificial Sequence
  source: /note="Description of Artificial Sequence: Synthetic peptide"
GVEHNDS

SEQ ID NO: 3151 - protein, 7 aa, Artificial Sequence
  source: /note="Description of Artificial Sequence: Synthetic peptide"
GVFKETG

SEQ ID NO: 3152 - protein, 7 aa, Artificial Sequence
  source: /note="Description of Artificial Sequence: Synthetic peptide"
GVGASHI

SEQ ID NO: 3153 - protein, 7 aa, Artificial Sequence
  source: /note="Description of Artificial Sequence: Synthetic peptide"
GVGASRS

SEQ ID NO: 3154 - protein, 7 aa, Artificial Sequence
  source: /note="Description of Artificial Sequence: Synthetic peptide"
GVGNMPD

SEQ ID NO: 3155 - protein, 7 aa, Artificial Sequence
  source: /note="Description of Artificial Sequence: Synthetic peptide"
GVGQVRS

SEQ ID NO: 3156 - protein, 7 aa, Artificial Sequence
  source: /note="Description of Artificial Sequence: Synthetic peptide"
GVHLSSP

SEQ ID NO: 3157 - protein, 7 aa, Artificial Sequence
  source: /note="Description of Artificial Sequence: Synthetic peptide"
GVHSMVE

SEQ ID NO: 3158 - protein, 7 aa, Artificial Sequence
  source: /note="Description of Artificial Sequence: Synthetic peptide"
GVHVKPE

SEQ ID NO: 3159 - protein, 7 aa, Artificial Sequence
  source: /note="Description of Artificial Sequence: Synthetic peptide"
GVIAHHS

SEQ ID NO: 3160 - protein, 7 aa, Artificial Sequence
  source: /note="Description of Artificial Sequence: Synthetic peptide"
GVILARM

SEQ ID NO: 3161 - protein, 7 aa, Artificial Sequence
  source: /note="Description of Artificial Sequence: Synthetic peptide"
GVINPTL

SEQ ID NO: 3162 - protein, 7 aa, Artificial Sequence
  source: /note="Description of Artificial Sequence: Synthetic peptide"
GVKASIL

SEQ ID NO: 3163 - protein, 7 aa, Artificial Sequence
  source: /note="Description of Artificial Sequence: Synthetic peptide"
GVKFGGS

SEQ ID NO: 3164 - protein, 7 aa, Artificial Sequence
  source: /note="Description of Artificial Sequence: Synthetic peptide"
GVKHGHY

SEQ ID NO: 3165 - protein, 7 aa, Artificial Sequence
  source: /note="Description of Artificial Sequence: Synthetic peptide"
GVKLSPS

SEQ ID NO: 3166 - protein, 7 aa, Artificial Sequence
  source: /note="Description of Artificial Sequence: Synthetic peptide"
GVKPDPV

SEQ ID NO: 3167 - protein, 7 aa, Artificial Sequence
  source: /note="Description of Artificial Sequence: Synthetic peptide"
GVLGPPL

SEQ ID NO: 3168 - protein, 7 aa, Artificial Sequence
  source: /note="Description of Artificial Sequence: Synthetic peptide"
GVLRMSS

SEQ ID NO: 3169 - protein, 7 aa, Artificial Sequence
  source: /note="Description of Artificial Sequence: Synthetic peptide"
GVLTNIL

SEQ ID NO: 3170 - protein, 7 aa, Artificial Sequence
  source: /note="Description of Artificial Sequence: Synthetic peptide"
GVNERNV

SEQ ID NO: 3171 - protein, 7 aa, Artificial Sequence
  source: /note="Description of Artificial Sequence: Synthetic peptide"
GVNITSL

SEQ ID NO: 3172 - protein, 7 aa, Artificial Sequence
  source: /note="Description of Artificial Sequence: Synthetic peptide"
GVNPSRL

SEQ ID NO: 3173 - protein, 7 aa, Artificial Sequence
  source: /note="Description of Artificial Sequence: Synthetic peptide"
GVPATSY

SEQ ID NO: 3174 - protein, 7 aa, Artificial Sequence
  source: /note="Description of Artificial Sequence: Synthetic peptide"
GVPGISA

SEQ ID NO: 3175 - protein, 7 aa, Artificial Sequence
  source: /note="Description of Artificial Sequence: Synthetic peptide"
GVPIQTP

SEQ ID NO: 3176 - protein, 7 aa, Artificial Sequence
  source: /note="Description of Artificial Sequence: Synthetic peptide"
GVRDMGL

SEQ ID NO: 3177 - protein, 7 aa, Artificial Sequence
  source: /note="Description of Artificial Sequence: Synthetic peptide"
GVRGAPL

SEQ ID NO: 3178 - protein, 7 aa, Artificial Sequence
  source: /note="Description of Artificial Sequence: Synthetic peptide"
GVRLDAT

SEQ ID NO: 3179 - protein, 7 aa, Artificial Sequence
  source: /note="Description of Artificial Sequence: Synthetic peptide"
GVRLNET

SEQ ID NO: 3180 - protein, 7 aa, Artificial Sequence
  source: /note="Description of Artificial Sequence: Synthetic peptide"
GVRLQNA

SEQ ID NO: 3181 - protein, 7 aa, Artificial Sequence
  source: /note="Description of Artificial Sequence: Synthetic peptide"
GVRSHTM

SEQ ID NO: 3182 - protein, 7 aa, Artificial Sequence
  source: /note="Description of Artificial Sequence: Synthetic peptide"
GVSFQSM

SEQ ID NO: 3183 - protein, 7 aa, Artificial Sequence
  source: /note="Description of Artificial Sequence: Synthetic peptide"
GVSKIDS

SEQ ID NO: 3184 - protein, 7 aa, Artificial Sequence
  source: /note="Description of Artificial Sequence: Synthetic peptide"
GVSRSAN

SEQ ID NO: 3185 - protein, 7 aa, Artificial Sequence
  source: /note="Description of Artificial Sequence: Synthetic peptide"
GVSSSQR

SEQ ID NO: 3186 - protein, 7 aa, Artificial Sequence
  source: /note="Description of Artificial Sequence: Synthetic peptide"
GVSSVQS

SEQ ID NO: 3187 - protein, 7 aa, Artificial Sequence
  source: /note="Description of Artificial Sequence: Synthetic peptide"
GVSTARI

SEQ ID NO: 3188 - protein, 7 aa, Artificial Sequence
  source: /note="Description of Artificial Sequence: Synthetic peptide"
GVSVSRP

SEQ ID NO: 3189 - protein, 7 aa, Artificial Sequence
  source: /note="Description of Artificial Sequence: Synthetic peptide"
GVTKAVS

SEQ ID NO: 3190 - protein, 7 aa, Artificial Sequence
  source: /note="Description of Artificial Sequence: Synthetic peptide"
GVTPSYS

SEQ ID NO: 3191 - protein, 7 aa, Artificial Sequence
  source: /note="Description of Artificial Sequence: Synthetic peptide"
GVTQATA

SEQ ID NO: 3192 - protein, 7 aa, Artificial Sequence
  source: /note="Description of Artificial Sequence: Synthetic peptide"
GVTSGGG

SEQ ID NO: 3193 - protein, 7 aa, Artificial Sequence
  source: /note="Description of Artificial Sequence: Synthetic peptide"
GVTSTSS

SEQ ID NO: 3194 - protein, 7 aa, Artificial Sequence
  source: /note="Description of Artificial Sequence: Synthetic peptide"
GVTTSIH

SEQ ID NO: 3195 - protein, 7 aa, Artificial Sequence
  source: /note="Description of Artificial Sequence: Synthetic peptide"
GVTTYSA

SEQ ID NO: 3196 - protein, 7 aa, Artificial Sequence
  source: /note="Description of Artificial Sequence: Synthetic peptide"
GVVGSHH

SEQ ID NO: 3197 - protein, 7 aa, Artificial Sequence
  source: /note="Description of Artificial Sequence: Synthetic peptide"
GVVHTRT

SEQ ID NO: 3198 - protein, 7 aa, Artificial Sequence
  source: /note="Description of Artificial Sequence: Synthetic peptide"
GWALTNG

SEQ ID NO: 3199 - protein, 7 aa, Artificial Sequence
  source: /note="Description of Artificial Sequence: Synthetic peptide"
GWEPTSD

SEQ ID NO: 3200 - protein, 7 aa, Artificial Sequence
  source: /note="Description of Artificial Sequence: Synthetic peptide"
GWGAETI

SEQ ID NO: 3201 - protein, 7 aa, Artificial Sequence
  source: /note="Description of Artificial Sequence: Synthetic peptide"
GWGLVND

SEQ ID NO: 3202 - protein, 7 aa, Artificial Sequence
  source: /note="Description of Artificial Sequence: Synthetic peptide"
GWHPALP

SEQ ID NO: 3203 - protein, 7 aa, Artificial Sequence
  source: /note="Description of Artificial Sequence: Synthetic peptide"
GWKGHAD

SEQ ID NO: 3204 - protein, 7 aa, Artificial Sequence
  source: /note="Description of Artificial Sequence: Synthetic peptide"
GWNADAS

SEQ ID NO: 3205 - protein, 7 aa, Artificial Sequence
  source: /note="Description of Artificial Sequence: Synthetic peptide"
GWNVDGL

SEQ ID NO: 3206 - protein, 7 aa, Artificial Sequence
  source: /note="Description of Artificial Sequence: Synthetic peptide"
GWPPKYE

SEQ ID NO: 3207 - protein, 7 aa, Artificial Sequence
  source: /note="Description of Artificial Sequence: Synthetic peptide"
GWQGHNL

SEQ ID NO: 3208 - protein, 7 aa, Artificial Sequence
  source: /note="Description of Artificial Sequence: Synthetic peptide"
GWREVVD

SEQ ID NO: 3209 - protein, 7 aa, Artificial Sequence
  source: /note="Description of Artificial Sequence: Synthetic peptide"
GWRSELE

SEQ ID NO: 3210 - protein, 7 aa, Artificial Sequence
  source: /note="Description of Artificial Sequence: Synthetic peptide"
GWSSAGH

SEQ ID NO: 3211 - protein, 7 aa, Artificial Sequence
  source: /note="Description of Artificial Sequence: Synthetic peptide"
GYAMPVP

SEQ ID NO: 3212 - protein, 7 aa, Artificial Sequence
  source: /note="Description of Artificial Sequence: Synthetic peptide"
GYAMSSS

SEQ ID NO: 3213 - protein, 7 aa, Artificial Sequence
  source: /note="Description of Artificial Sequence: Synthetic peptide"
GYATTVH

SEQ ID NO: 3214 - protein, 7 aa, Artificial Sequence
  source: /note="Description of Artificial Sequence: Synthetic peptide"
GYDFNPG

SEQ ID NO: 3215 - protein, 7 aa, Artificial Sequence
  source: /note="Description of Artificial Sequence: Synthetic peptide"
GYGPMRQ

SEQ ID NO: 3216 - protein, 7 aa, Artificial Sequence
  source: /note="Description of Artificial Sequence: Synthetic peptide"
GYGQAYT

SEQ ID NO: 3217 - protein, 7 aa, Artificial Sequence
  source: /note="Description of Artificial Sequence: Synthetic peptide"
GYIHVSG

SEQ ID NO: 3218 - protein, 7 aa, Artificial Sequence
  source: /note="Description of Artificial Sequence: Synthetic peptide"
GYKTATQ

SEQ ID NO: 3219 - protein, 7 aa, Artificial Sequence
  source: /note="Description of Artificial Sequence: Synthetic peptide"
GYLPVDH

SEQ ID NO: 3220 - protein, 7 aa, Artificial Sequence
  source: /note="Description of Artificial Sequence: Synthetic peptide"
GYLSETH

SEQ ID NO: 3221 - protein, 7 aa, Artificial Sequence
  source: /note="Description of Artificial Sequence: Synthetic peptide"
GYLSKMP

SEQ ID NO: 3222 - protein, 7 aa, Artificial Sequence
  source: /note="Description of Artificial Sequence: Synthetic peptide"
GYLTERL

SEQ ID NO: 3223 - protein, 7 aa, Artificial Sequence
  source: /note="Description of Artificial Sequence: Synthetic peptide"
GYMIKMP

SEQ ID NO: 3224 - protein, 7 aa, Artificial Sequence
  source: /note="Description of Artificial Sequence: Synthetic peptide"
GYPSHAA

SEQ ID NO: 3225 - protein, 7 aa, Artificial Sequence
  source: /note="Description of Artificial Sequence: Synthetic peptide"
GYPSKGP

SEQ ID NO: 3226 - protein, 7 aa, Artificial Sequence
  source: /note="Description of Artificial Sequence: Synthetic peptide"
GYPTASA

SEQ ID NO: 3227 - protein, 7 aa, Artificial Sequence
  source: /note="Description of Artificial Sequence: Synthetic peptide"
GYPVGPA

SEQ ID NO: 3228 - protein, 7 aa, Artificial Sequence
  source: /note="Description of Artificial Sequence: Synthetic peptide"
GYQSRCA

SEQ ID NO: 3229 - protein, 7 aa, Artificial Sequence
  source: /note="Description of Artificial Sequence: Synthetic peptide"
GYRATET

SEQ ID NO: 3230 - protein, 7 aa, Artificial Sequence
  source: /note="Description of Artificial Sequence: Synthetic peptide"
GYRLMPE

SEQ ID NO: 3231 - protein, 7 aa, Artificial Sequence
  source: /note="Description of Artificial Sequence: Synthetic peptide"
GYRSNET

SEQ ID NO: 3232 - protein, 7 aa, Artificial Sequence
  source: /note="Description of Artificial Sequence: Synthetic peptide"
GYSLPVT

SEQ ID NO: 3233 - protein, 7 aa, Artificial Sequence
  source: /note="Description of Artificial Sequence: Synthetic peptide"
GYSNNKP

SEQ ID NO: 3234 - protein, 7 aa, Artificial Sequence
  source: /note="Description of Artificial Sequence: Synthetic peptide"
GYTSGQP

SEQ ID NO: 3235 - protein, 7 aa, Artificial Sequence
  source: /note="Description of Artificial Sequence: Synthetic peptide"
GYVPVSQ

SEQ ID NO: 3236 - protein, 7 aa, Artificial Sequence
  source: /note="Description of Artificial Sequence: Synthetic peptide"
GYWASSN

SEQ ID NO: 3237 - protein, 7 aa, Artificial Sequence
  source: /note="Description of Artificial Sequence: Synthetic peptide"
HAAAQPS

SEQ ID NO: 3238 - protein, 7 aa, Artificial Sequence
  source: /note="Description of Artificial Sequence: Synthetic peptide"
HAAHQSL

SEQ ID NO: 3239 - protein, 7 aa, Artificial Sequence
  source: /note="Description of Artificial Sequence: Synthetic peptide"
HAASPMV

SEQ ID NO: 3240 - protein, 7 aa, Artificial Sequence
  source: /note="Description of Artificial Sequence: Synthetic peptide"
HAASSVP

SEQ ID NO: 3241 - protein, 7 aa, Artificial Sequence
  source: /note="Description of Artificial Sequence: Synthetic peptide"
HAESAHP

SEQ ID NO: 3242 - protein, 7 aa, Artificial Sequence
  source: /note="Description of Artificial Sequence: Synthetic peptide"
HAGTVKM

SEQ ID NO: 3243 - protein, 7 aa, Artificial Sequence
  source: /note="Description of Artificial Sequence: Synthetic peptide"
HAHLTPS

SEQ ID NO: 3244 - protein, 7 aa, Artificial Sequence
  source: /note="Description of Artificial Sequence: Synthetic peptide"
HAIPTLL

SEQ ID NO: 3245 - protein, 7 aa, Artificial Sequence
  source: /note="Description of Artificial Sequence: Synthetic peptide"
HAKSRNE

SEQ ID NO: 3246 - protein, 7 aa, Artificial Sequence
  source: /note="Description of Artificial Sequence: Synthetic peptide"
HAKSVSA

SEQ ID NO: 3247 - protein, 7 aa, Artificial Sequence
  source: /note="Description of Artificial Sequence: Synthetic peptide"
HAKTALT

SEQ ID NO: 3248 - protein, 7 aa, Artificial Sequence
  source: /note="Description of Artificial Sequence: Synthetic peptide"
HAKVMRD

SEQ ID NO: 3249 - protein, 7 aa, Artificial Sequence
  source: /note="Description of Artificial Sequence: Synthetic peptide"
HALEHFP

SEQ ID NO: 3250 - protein, 7 aa, Artificial Sequence
  source: /note="Description of Artificial Sequence: Synthetic peptide"
HALRNTM

SEQ ID NO: 3251 - protein, 7 aa, Artificial Sequence
  source: /note="Description of Artificial Sequence: Synthetic peptide"
HALSDSP

SEQ ID NO: 3252 - protein, 7 aa, Artificial Sequence
  source: /note="Description of Artificial Sequence: Synthetic peptide"
HAMSSNV

SEQ ID NO: 3253 - protein, 7 aa, Artificial Sequence
  source: /note="Description of Artificial Sequence: Synthetic peptide"
HANKHTQ

SEQ ID NO: 3254 - protein, 7 aa, Artificial Sequence
  source: /note="Description of Artificial Sequence: Synthetic peptide"
HANNDPH

SEQ ID NO: 3255 - protein, 7 aa, Artificial Sequence
  source: /note="Description of Artificial Sequence: Synthetic peptide"
HANPLNG

SEQ ID NO: 3256 - protein, 7 aa, Artificial Sequence
  source: /note="Description of Artificial Sequence: Synthetic peptide"
HANPVVG

SEQ ID NO: 3257 - protein, 7 aa, Artificial Sequence
  source: /note="Description of Artificial Sequence: Synthetic peptide"
HANSTTR

SEQ ID NO: 3258 - protein, 7 aa, Artificial Sequence
  source: /note="Description of Artificial Sequence: Synthetic peptide"
HANTTNT

SEQ ID NO: 3259 - protein, 7 aa, Artificial Sequence
  source: /note="Description of Artificial Sequence: Synthetic peptide"
HAPPNYA

SEQ ID NO: 3260 - protein, 7 aa, Artificial Sequence
  source: /note="Description of Artificial Sequence: Synthetic peptide"
HAQLSGT

SEQ ID NO: 3261 - protein, 7 aa, Artificial Sequence
  source: /note="Description of Artificial Sequence: Synthetic peptide"
HAQQGGL

SEQ ID NO: 3262 - protein, 7 aa, Artificial Sequence
  source: /note="Description of Artificial Sequence: Synthetic peptide"
HAQVETL

SEQ ID NO: 3263 - protein, 7 aa, Artificial Sequence
  source: /note="Description of Artificial Sequence: Synthetic peptide"
HARDSSP

SEQ ID NO: 3264 - protein, 7 aa, Artificial Sequence
  source: /note="Description of Artificial Sequence: Synthetic peptide"
HARDTFP

SEQ ID NO: 3265 - protein, 7 aa, Artificial Sequence
  source: /note="Description of Artificial Sequence: Synthetic peptide"
HARIDSS

SEQ ID NO: 3266 - protein, 7 aa, Artificial Sequence
  source: /note="Description of Artificial Sequence: Synthetic peptide"
HARPGGL

SEQ ID NO: 3267 - protein, 7 aa, Artificial Sequence
  source: /note="Description of Artificial Sequence: Synthetic peptide"
HARVEAT

SEQ ID NO: 3268 - protein, 7 aa, Artificial Sequence
  source: /note="Description of Artificial Sequence: Synthetic peptide"
HASGPDH

SEQ ID NO: 3269 - protein, 7 aa, Artificial Sequence
  source: /note="Description of Artificial Sequence: Synthetic peptide"
HASLSLS

SEQ ID NO: 3270 - protein, 7 aa, Artificial Sequence
  source: /note="Description of Artificial Sequence: Synthetic peptide"
HASNSQH

SEQ ID NO: 3271 - protein, 7 aa, Artificial Sequence
  source: /note="Description of Artificial Sequence: Synthetic peptide"
HASPGQT

SEQ ID NO: 3272 - protein, 7 aa, Artificial Sequence
  source: /note="Description of Artificial Sequence: Synthetic peptide"
HASRIGV

SEQ ID NO: 3273 - protein, 7 aa, Artificial Sequence
  source: /note="Description of Artificial Sequence: Synthetic peptide"
HASSKPD

SEQ ID NO: 3274 - protein, 7 aa, Artificial Sequence
  source: /note="Description of Artificial Sequence: Synthetic peptide"
HASSTRQ

SEQ ID NO: 3275 - protein, 7 aa, Artificial Sequence
  source: /note="Description of Artificial Sequence: Synthetic peptide"
HASTVRT

SEQ ID NO: 3276 - protein, 7 aa, Artificial Sequence
  source: /note="Description of Artificial Sequence: Synthetic peptide"
HATDQPH

SEQ ID NO: 3277 - protein, 7 aa, Artificial Sequence
  source: /note="Description of Artificial Sequence: Synthetic peptide"
HATEMVR

SEQ ID NO: 3278 - protein, 7 aa, Artificial Sequence
  source: /note="Description of Artificial Sequence: Synthetic peptide"
HATIRTH

SEQ ID NO: 3279 - protein, 7 aa, Artificial Sequence
  source: /note="Description of Artificial Sequence: Synthetic peptide"
HATSKLT

SEQ ID NO: 3280 - protein, 7 aa, Artificial Sequence
  source: /note="Description of Artificial Sequence: Synthetic peptide"
HAVDHKS

SEQ ID NO: 3281 - protein, 7 aa, Artificial Sequence
  source: /note="Description of Artificial Sequence: Synthetic peptide"
HAVELAD

SEQ ID NO: 3282 - protein, 7 aa, Artificial Sequence
  source: /note="Description of Artificial Sequence: Synthetic peptide"
HAYTLDG

SEQ ID NO: 3283 - protein, 7 aa, Artificial Sequence
  source: /note="Description of Artificial Sequence: Synthetic peptide"
HDASVHR

SEQ ID NO: 3284 - protein, 7 aa, Artificial Sequence
  source: /note="Description of Artificial Sequence: Synthetic peptide"
HDDAWTA

SEQ ID NO: 3285 - protein, 7 aa, Artificial Sequence
  source: /note="Description of Artificial Sequence: Synthetic peptide"
HDGRVNL

SEQ ID NO: 3286 - protein, 7 aa, Artificial Sequence
  source: /note="Description of Artificial Sequence: Synthetic peptide"
HDGSRST

SEQ ID NO: 3287 - protein, 7 aa, Artificial Sequence
  source: /note="Description of Artificial Sequence: Synthetic peptide"
HDHLGTP

SEQ ID NO: 3288 - protein, 7 aa, Artificial Sequence
  source: /note="Description of Artificial Sequence: Synthetic peptide"
HDIAKTN

SEQ ID NO: 3289 - protein, 7 aa, Artificial Sequence
  source: /note="Description of Artificial Sequence: Synthetic peptide"
HDIEFNT

SEQ ID NO: 3290 - protein, 7 aa, Artificial Sequence
  source: /note="Description of Artificial Sequence: Synthetic peptide"
HDLAYRP

SEQ ID NO: 3291 - protein, 7 aa, Artificial Sequence
  source: /note="Description of Artificial Sequence: Synthetic peptide"
HDLNPEN

SEQ ID NO: 3292 - protein, 7 aa, Artificial Sequence
  source: /note="Description of Artificial Sequence: Synthetic peptide"
HDNRIND

SEQ ID NO: 3293 - protein, 7 aa, Artificial Sequence
  source: /note="Description of Artificial Sequence: Synthetic peptide"
HDPHAVT

SEQ ID NO: 3294 - protein, 7 aa, Artificial Sequence
  source: /note="Description of Artificial Sequence: Synthetic peptide"
HDPIRLG

SEQ ID NO: 3295 - protein, 7 aa, Artificial Sequence
  source: /note="Description of Artificial Sequence: Synthetic peptide"
HDPMMLL

SEQ ID NO: 3296 - protein, 7 aa, Artificial Sequence
  source: /note="Description of Artificial Sequence: Synthetic peptide"
HDPSDGA

SEQ ID NO: 3297 - protein, 7 aa, Artificial Sequence
  source: /note="Description of Artificial Sequence: Synthetic peptide"
HDRIAGL

SEQ ID NO: 3298 - protein, 7 aa, Artificial Sequence
  source: /note="Description of Artificial Sequence: Synthetic peptide"
HDRVSSG

SEQ ID NO: 3299 - protein, 7 aa, Artificial Sequence
  source: /note="Description of Artificial Sequence: Synthetic peptide"
HDSARHP

SEQ ID NO: 3300 - protein, 7 aa, Artificial Sequence
  source: /note="Description of Artificial Sequence: Synthetic peptide"
HDSLSEK

SEQ ID NO: 3301 - protein, 7 aa, Artificial Sequence
  source: /note="Description of Artificial Sequence: Synthetic peptide"
HDSRFAN

SEQ ID NO: 3302 - protein, 7 aa, Artificial Sequence
  source: /note="Description of Artificial Sequence: Synthetic peptide"
HDSTLGS

SEQ ID NO: 3303 - protein, 7 aa, Artificial Sequence
  source: /note="Description of Artificial Sequence: Synthetic peptide"
HDTIHGI

SEQ ID NO: 3304 - protein, 7 aa, Artificial Sequence
  source: /note="Description of Artificial Sequence: Synthetic peptide"
HDVPKNP

SEQ ID NO: 3305 - protein, 7 aa, Artificial Sequence
  source: /note="Description of Artificial Sequence: Synthetic peptide"
HDYPRQL

SEQ ID NO: 3306 - protein, 7 aa, Artificial Sequence
  source: /note="Description of Artificial Sequence: Synthetic peptide"
HEALLPN

SEQ ID NO: 3307 - protein, 7 aa, Artificial Sequence
  source: /note="Description of Artificial Sequence: Synthetic peptide"
HEALTGL

SEQ ID NO: 3308 - protein, 7 aa, Artificial Sequence
  source: /note="Description of Artificial Sequence: Synthetic peptide"
HEDGSAM

SEQ ID NO: 3309 - protein, 7 aa, Artificial Sequence
  source: /note="Description of Artificial Sequence: Synthetic peptide"
HEFGVAF

SEQ ID NO: 3310 - protein, 7 aa, Artificial Sequence
  source: /note="Description of Artificial Sequence: Synthetic peptide"
HEGGHPY

SEQ ID NO: 3311 - protein, 7 aa, Artificial Sequence
  source: /note="Description of Artificial Sequence: Synthetic peptide"
HEGHRGV

SEQ ID NO: 3312 - protein, 7 aa, Artificial Sequence
  source: /note="Description of Artificial Sequence: Synthetic peptide"
HEKVRVH

SEQ ID NO: 3313 - protein, 7 aa, Artificial Sequence
  source: /note="Description of Artificial Sequence: Synthetic peptide"
HEQARSI

SEQ ID NO: 3314 - protein, 7 aa, Artificial Sequence
  source: /note="Description of Artificial Sequence: Synthetic peptide"
HEQCEAY

SEQ ID NO: 3315 - protein, 7 aa, Artificial Sequence
  source: /note="Description of Artificial Sequence: Synthetic peptide"
HEQVERP

SEQ ID NO: 3316 - protein, 7 aa, Artificial Sequence
  source: /note="Description of Artificial Sequence: Synthetic peptide"
HESDQFP

SEQ ID NO: 3317 - protein, 7 aa, Artificial Sequence
  source: /note="Description of Artificial Sequence: Synthetic peptide"
HETRVMS

SEQ ID NO: 3318 - protein, 7 aa, Artificial Sequence
  source: /note="Description of Artificial Sequence: Synthetic peptide"
HEVGFMG

SEQ ID NO: 3319 - protein, 7 aa, Artificial Sequence
  source: /note="Description of Artificial Sequence: Synthetic peptide"
HEVNHNT

SEQ ID NO: 3320 - protein, 7 aa, Artificial Sequence
  source: /note="Description of Artificial Sequence: Synthetic peptide"
HEVRFSQ

SEQ ID NO: 3321 - protein, 7 aa, Artificial Sequence
  source: /note="Description of Artificial Sequence: Synthetic peptide"
HEVSVKC

SEQ ID NO: 3322 - protein, 7 aa, Artificial Sequence
  source: /note="Description of Artificial Sequence: Synthetic peptide"
HEVYRNM

SEQ ID NO: 3323 - protein, 7 aa, Artificial Sequence
  source: /note="Description of Artificial Sequence: Synthetic peptide"
HFAQAPS

SEQ ID NO: 3324 - protein, 7 aa, Artificial Sequence
  source: /note="Description of Artificial Sequence: Synthetic peptide"
HFGSSIP

SEQ ID NO: 3325 - protein, 7 aa, Artificial Sequence
  source: /note="Description of Artificial Sequence: Synthetic peptide"
HFGTNGD

SEQ ID NO: 3326 - protein, 7 aa, Artificial Sequence
  source: /note="Description of Artificial Sequence: Synthetic peptide"
HFNDATV

SEQ ID NO: 3327 - protein, 7 aa, Artificial Sequence
  source: /note="Description of Artificial Sequence: Synthetic peptide"
HFNSSSR

SEQ ID NO: 3328 - protein, 7 aa, Artificial Sequence
  source: /note="Description of Artificial Sequence: Synthetic peptide"
HFRGAML

SEQ ID NO: 3329 - protein, 7 aa, Artificial Sequence
  source: /note="Description of Artificial Sequence: Synthetic peptide"
HFSHERS

SEQ ID NO: 3330 - protein, 7 aa, Artificial Sequence
  source: /note="Description of Artificial Sequence: Synthetic peptide"
HFSPKGT

SEQ ID NO: 3331 - protein, 7 aa, Artificial Sequence
  source: /note="Description of Artificial Sequence: Synthetic peptide"
HFSSTTI

SEQ ID NO: 3332 - protein, 7 aa, Artificial Sequence
  source: /note="Description of Artificial Sequence: Synthetic peptide"
HFTSREL

SEQ ID NO: 3333 - protein, 7 aa, Artificial Sequence
  source: /note="Description of Artificial Sequence: Synthetic peptide"
HFTSTPS

SEQ ID NO: 3334 - protein, 7 aa, Artificial Sequence
  source: /note="Description of Artificial Sequence: Synthetic peptide"
HFVPSSA

SEQ ID NO: 3335 - protein, 7 aa, Artificial Sequence
  source: /note="Description of Artificial Sequence: Synthetic peptide"
HGAAALV

SEQ ID NO: 3336 - protein, 7 aa, Artificial Sequence
  source: /note="Description of Artificial Sequence: Synthetic peptide"
HGAKLLS

SEQ ID NO: 3337 - protein, 7 aa, Artificial Sequence
  source: /note="Description of Artificial Sequence: Synthetic peptide"
HGALSEA

SEQ ID NO: 3338 - protein, 7 aa, Artificial Sequence
  source: /note="Description of Artificial Sequence: Synthetic peptide"
HGANRLT

SEQ ID NO: 3339 - protein, 7 aa, Artificial Sequence
  source: /note="Description of Artificial Sequence: Synthetic peptide"
HGDGHST

SEQ ID NO: 3340 - protein, 7 aa, Artificial Sequence
  source: /note="Description of Artificial Sequence: Synthetic peptide"
HGDRALM

SEQ ID NO: 3341 - protein, 7 aa, Artificial Sequence
  source: /note="Description of Artificial Sequence: Synthetic peptide"
HGDVNRT

SEQ ID NO: 3342 - protein, 7 aa, Artificial Sequence
  source: /note="Description of Artificial Sequence: Synthetic peptide"
HGEMMES

SEQ ID NO: 3343 - protein, 7 aa, Artificial Sequence
  source: /note="Description of Artificial Sequence: Synthetic peptide"
HGFHTGS

SEQ ID NO: 3344 - protein, 7 aa, Artificial Sequence
  source: /note="Description of Artificial Sequence: Synthetic peptide"
HGFQNVD

SEQ ID NO: 3345 - protein, 7 aa, Artificial Sequence
  source: /note="Description of Artificial Sequence: Synthetic peptide"
HGGEVTF

SEQ ID NO: 3346 - protein, 7 aa, Artificial Sequence
  source: /note="Description of Artificial Sequence: Synthetic peptide"
HGGFRGE

SEQ ID NO: 3347 - protein, 7 aa, Artificial Sequence
  source: /note="Description of Artificial Sequence: Synthetic peptide"
HGHFSMA

SEQ ID NO: 3348 - protein, 7 aa, Artificial Sequence
  source: /note="Description of Artificial Sequence: Synthetic peptide"
HGKHVFV

SEQ ID NO: 3349 - protein, 7 aa, Artificial Sequence
  source: /note="Description of Artificial Sequence: Synthetic peptide"
HGLIAVA

SEQ ID NO: 3350 - protein, 7 aa, Artificial Sequence
  source: /note="Description of Artificial Sequence: Synthetic peptide"
HGLNSMP

SEQ ID NO: 3351 - protein, 7 aa, Artificial Sequence
  source: /note="Description of Artificial Sequence: Synthetic peptide"
HGLSEDY

SEQ ID NO: 3352 - protein, 7 aa, Artificial Sequence
  source: /note="Description of Artificial Sequence: Synthetic peptide"
HGLSLKD

SEQ ID NO: 3353 - protein, 7 aa, Artificial Sequence
  source: /note="Description of Artificial Sequence: Synthetic peptide"
HGMEDGL

SEQ ID NO: 3354 - protein, 7 aa, Artificial Sequence
  source: /note="Description of Artificial Sequence: Synthetic peptide"
HGNLNYH

SEQ ID NO: 3355 - protein, 7 aa, Artificial Sequence
  source: /note="Description of Artificial Sequence: Synthetic peptide"
HGPNASD

SEQ ID NO: 3356 - protein, 7 aa, Artificial Sequence
  source: /note="Description of Artificial Sequence: Synthetic peptide"
HGREVHQ

SEQ ID NO: 3357 - protein, 7 aa, Artificial Sequence
  source: /note="Description of Artificial Sequence: Synthetic peptide"
HGSGSCC

SEQ ID NO: 3358 - protein, 7 aa, Artificial Sequence
  source: /note="Description of Artificial Sequence: Synthetic peptide"
HGSIESQ

SEQ ID NO: 3359 - protein, 7 aa, Artificial Sequence
  source: /note="Description of Artificial Sequence: Synthetic peptide"
HGSKTMS

SEQ ID NO: 3360 - protein, 7 aa, Artificial Sequence
  source: /note="Description of Artificial Sequence: Synthetic peptide"
HGSMWPE

SEQ ID NO: 3361 - protein, 7 aa, Artificial Sequence
  source: /note="Description of Artificial Sequence: Synthetic peptide"
HGSSTRN

SEQ ID NO: 3362 - protein, 7 aa, Artificial Sequence
  source: /note="Description of Artificial Sequence: Synthetic peptide"
HGSTENS

SEQ ID NO: 3363 - protein, 7 aa, Artificial Sequence
  source: /note="Description of Artificial Sequence: Synthetic peptide"
HGSTKLP

SEQ ID NO: 3364 - protein, 7 aa, Artificial Sequence
  source: /note="Description of Artificial Sequence: Synthetic peptide"
HGTGVFG

SEQ ID NO: 3365 - protein, 7 aa, Artificial Sequence
  source: /note="Description of Artificial Sequence: Synthetic peptide"
HGTNRTH

SEQ ID NO: 3366 - protein, 7 aa, Artificial Sequence
  source: /note="Description of Artificial Sequence: Synthetic peptide"
HGTSKHS

SEQ ID NO: 3367 - protein, 7 aa, Artificial Sequence
  source: /note="Description of Artificial Sequence: Synthetic peptide"
HGTSSRP

SEQ ID NO: 3368 - protein, 7 aa, Artificial Sequence
  source: /note="Description of Artificial Sequence: Synthetic peptide"
HGVHHQV

SEQ ID NO: 3369 - protein, 7 aa, Artificial Sequence
  source: /note="Description of Artificial Sequence: Synthetic peptide"
HGVYPHL

SEQ ID NO: 3370 - protein, 7 aa, Artificial Sequence
  source: /note="Description of Artificial Sequence: Synthetic peptide"
HHAAGAV

SEQ ID NO: 3371 - protein, 7 aa, Artificial Sequence
  source: /note="Description of Artificial Sequence: Synthetic peptide"
HHAKANL

SEQ ID NO: 3372 - protein, 7 aa, Artificial Sequence
  source: /note="Description of Artificial Sequence: Synthetic peptide"
HHALPPD

SEQ ID NO: 3373 - protein, 7 aa, Artificial Sequence
  source: /note="Description of Artificial Sequence: Synthetic peptide"
HHAPNTP

SEQ ID NO: 3374 - protein, 7 aa, Artificial Sequence
  source: /note="Description of Artificial Sequence: Synthetic peptide"
HHAQGEA

SEQ ID NO: 3375 - protein, 7 aa, Artificial Sequence
  source: /note="Description of Artificial Sequence: Synthetic peptide"
HHDDRLQ

SEQ ID NO: 3376 - protein, 7 aa, Artificial Sequence
  source: /note="Description of Artificial Sequence: Synthetic peptide"
HHDLSIP

SEQ ID NO: 3377 - protein, 7 aa, Artificial Sequence
  source: /note="Description of Artificial Sequence: Synthetic peptide"
HHDPTTR

SEQ ID NO: 3378 - protein, 7 aa, Artificial Sequence
  source: /note="Description of Artificial Sequence: Synthetic peptide"
HHGTDRP

SEQ ID NO: 3379 - protein, 7 aa, Artificial Sequence
  source: /note="Description of Artificial Sequence: Synthetic peptide"
HHLAFLD

SEQ ID NO: 3380 - protein, 7 aa, Artificial Sequence
  source: /note="Description of Artificial Sequence: Synthetic peptide"
HHMSTAS

SEQ ID NO: 3381 - protein, 7 aa, Artificial Sequence
  source: /note="Description of Artificial Sequence: Synthetic peptide"
HHNVNSL

SEQ ID NO: 3382 - protein, 7 aa, Artificial Sequence
  source: /note="Description of Artificial Sequence: Synthetic peptide"
HHPRLDT

SEQ ID NO: 3383 - protein, 7 aa, Artificial Sequence
  source: /note="Description of Artificial Sequence: Synthetic peptide"
HHRVETG

SEQ ID NO: 3384 - protein, 7 aa, Artificial Sequence
  source: /note="Description of Artificial Sequence: Synthetic peptide"
HHSPAIT

SEQ ID NO: 3385 - protein, 7 aa, Artificial Sequence
  source: /note="Description of Artificial Sequence: Synthetic peptide"
HHTNPDP

SEQ ID NO: 3386 - protein, 7 aa, Artificial Sequence
  source: /note="Description of Artificial Sequence: Synthetic peptide"
HIALTSP

SEQ ID NO: 3387 - protein, 7 aa, Artificial Sequence
  source: /note="Description of Artificial Sequence: Synthetic peptide"
HILTSAP

SEQ ID NO: 3388 - protein, 7 aa, Artificial Sequence
  source: /note="Description of Artificial Sequence: Synthetic peptide"
HIPLKQA

SEQ ID NO: 3389 - protein, 7 aa, Artificial Sequence
  source: /note="Description of Artificial Sequence: Synthetic peptide"
HIPSSSG

SEQ ID NO: 3390 - protein, 7 aa, Artificial Sequence
  source: /note="Description of Artificial Sequence: Synthetic peptide"
HIPVMTP

SEQ ID NO: 3391 - protein, 7 aa, Artificial Sequence
  source: /note="Description of Artificial Sequence: Synthetic peptide"
HIRHDPK

SEQ ID NO: 3392 - protein, 7 aa, Artificial Sequence
  source: /note="Description of Artificial Sequence: Synthetic peptide"
HIRTGMP

SEQ ID NO: 3393 - protein, 7 aa, Artificial Sequence
  source: /note="Description of Artificial Sequence: Synthetic peptide"
HISPMPV

SEQ ID NO: 3394 - protein, 7 aa, Artificial Sequence
  source: /note="Description of Artificial Sequence: Synthetic peptide"
HISSSTV

SEQ ID NO: 3395 - protein, 7 aa, Artificial Sequence
  source: /note="Description of Artificial Sequence: Synthetic peptide"
HITQQLT

SEQ ID NO: 3396 - protein, 7 aa, Artificial Sequence
  source: /note="Description of Artificial Sequence: Synthetic peptide"
HKADSVS

SEQ ID NO: 3397 - protein, 7 aa, Artificial Sequence
  source: /note="Description of Artificial Sequence: Synthetic peptide"
HKFSSPL

SEQ ID NO: 3398 - protein, 7 aa, Artificial Sequence
  source: /note="Description of Artificial Sequence: Synthetic peptide"
HKGLSPL

SEQ ID NO: 3399 - protein, 7 aa, Artificial Sequence
  source: /note="Description of Artificial Sequence: Synthetic peptide"
HKLGGSF

SEQ ID NO: 3400 - protein, 7 aa, Artificial Sequence
  source: /note="Description of Artificial Sequence: Synthetic peptide"
HKLPGHH

SEQ ID NO: 3401 - protein, 7 aa, Artificial Sequence
  source: /note="Description of Artificial Sequence: Synthetic peptide"
HKLTSNG

SEQ ID NO: 3402 - protein, 7 aa, Artificial Sequence
  source: /note="Description of Artificial Sequence: Synthetic peptide"
HKNIGVV

SEQ ID NO: 3403 - protein, 7 aa, Artificial Sequence
  source: /note="Description of Artificial Sequence: Synthetic peptide"
HKPPIVP

SEQ ID NO: 3404 - protein, 7 aa, Artificial Sequence
  source: /note="Description of Artificial Sequence: Synthetic peptide"
HKPQVGV

SEQ ID NO: 3405 - protein, 7 aa, Artificial Sequence
  source: /note="Description of Artificial Sequence: Synthetic peptide"
HKPRPEV

SEQ ID NO: 3406 - protein, 7 aa, Artificial Sequence
  source: /note="Description of Artificial Sequence: Synthetic peptide"
HKQSQAG

SEQ ID NO: 3407 - protein, 7 aa, Artificial Sequence
  source: /note="Description of Artificial Sequence: Synthetic peptide"
HKQTMER

SEQ ID NO: 3408 - protein, 7 aa, Artificial Sequence
  source: /note="Description of Artificial Sequence: Synthetic peptide"
HKSSDRL

SEQ ID NO: 3409 - protein, 7 aa, Artificial Sequence
  source: /note="Description of Artificial Sequence: Synthetic peptide"
HKSVLVP

SEQ ID NO: 3410 - protein, 7 aa, Artificial Sequence
  source: /note="Description of Artificial Sequence: Synthetic peptide"
HKTSVPI

SEQ ID NO: 3411 - protein, 7 aa, Artificial Sequence
  source: /note="Description of Artificial Sequence: Synthetic peptide"
HKVPAQN

SEQ ID NO: 3412 - protein, 7 aa, Artificial Sequence
  source: /note="Description of Artificial Sequence: Synthetic peptide"
HKVPGLG

SEQ ID NO: 3413 - protein, 7 aa, Artificial Sequence
  source: /note="Description of Artificial Sequence: Synthetic peptide"
HKYNLGA

SEQ ID NO: 3414 - protein, 7 aa, Artificial Sequence
  source: /note="Description of Artificial Sequence: Synthetic peptide"
HLAALSH

SEQ ID NO: 3415 - protein, 7 aa, Artificial Sequence
  source: /note="Description of Artificial Sequence: Synthetic peptide"
HLAEVRE

SEQ ID NO: 3416 - protein, 7 aa, Artificial Sequence
  source: /note="Description of Artificial Sequence: Synthetic peptide"
HLAGTGA

SEQ ID NO: 3417 - protein, 7 aa, Artificial Sequence
  source: /note="Description of Artificial Sequence: Synthetic peptide"
HLALAPS

SEQ ID NO: 3418 - protein, 7 aa, Artificial Sequence
  source: /note="Description of Artificial Sequence: Synthetic peptide"
HLAPAIN

SEQ ID NO: 3419 - protein, 7 aa, Artificial Sequence
  source: /note="Description of Artificial Sequence: Synthetic peptide"
HLELGTR

SEQ ID NO: 3420 - protein, 7 aa, Artificial Sequence
  source: /note="Description of Artificial Sequence: Synthetic peptide"
HLERPLS

SEQ ID NO: 3421 - protein, 7 aa, Artificial Sequence
  source: /note="Description of Artificial Sequence: Synthetic peptide"
HLGPDAI

SEQ ID NO: 3422 - protein, 7 aa, Artificial Sequence
  source: /note="Description of Artificial Sequence: Synthetic peptide"
HLGSSNW

SEQ ID NO: 3423 - protein, 7 aa, Artificial Sequence
  source: /note="Description of Artificial Sequence: Synthetic peptide"
HLHSDSG

SEQ ID NO: 3424 - protein, 7 aa, Artificial Sequence
  source: /note="Description of Artificial Sequence: Synthetic peptide"
HLHSHES

SEQ ID NO: 3425 - protein, 7 aa, Artificial Sequence
  source: /note="Description of Artificial Sequence: Synthetic peptide"
HLHYPVA

SEQ ID NO: 3426 - protein, 7 aa, Artificial Sequence
  source: /note="Description of Artificial Sequence: Synthetic peptide"
HLNAKFA

SEQ ID NO: 3427 - protein, 7 aa, Artificial Sequence
  source: /note="Description of Artificial Sequence: Synthetic peptide"
HLNAPAT

SEQ ID NO: 3428 - protein, 7 aa, Artificial Sequence
  source: /note="Description of Artificial Sequence: Synthetic peptide"
HLNLEGR

SEQ ID NO: 3429 - protein, 7 aa, Artificial Sequence
  source: /note="Description of Artificial Sequence: Synthetic peptide"
HLPAHPL

SEQ ID NO: 3430 - protein, 7 aa, Artificial Sequence
  source: /note="Description of Artificial Sequence: Synthetic peptide"
HLPKNPS

SEQ ID NO: 3431 - protein, 7 aa, Artificial Sequence
  source: /note="Description of Artificial Sequence: Synthetic peptide"
HLPSGLT

SEQ ID NO: 3432 - protein, 7 aa, Artificial Sequence
  source: /note="Description of Artificial Sequence: Synthetic peptide"
HLPTSDA

SEQ ID NO: 3433 - protein, 7 aa, Artificial Sequence
  source: /note="Description of Artificial Sequence: Synthetic peptide"
HLPYNVP

SEQ ID NO: 3434 - protein, 7 aa, Artificial Sequence
  source: /note="Description of Artificial Sequence: Synthetic peptide"
HLQILEA

SEQ ID NO: 3435 - protein, 7 aa, Artificial Sequence
  source: /note="Description of Artificial Sequence: Synthetic peptide"
HLRELIS

SEQ ID NO: 3436 - protein, 7 aa, Artificial Sequence
  source: /note="Description of Artificial Sequence: Synthetic peptide"
HLRSGVG

SEQ ID NO: 3437 - protein, 7 aa, Artificial Sequence
  source: /note="Description of Artificial Sequence: Synthetic peptide"
HLSDWPI

SEQ ID NO: 3438 - protein, 7 aa, Artificial Sequence
  source: /note="Description of Artificial Sequence: Synthetic peptide"
HLSGMHA

SEQ ID NO: 3439 - protein, 7 aa, Artificial Sequence
  source: /note="Description of Artificial Sequence: Synthetic peptide"
HLSIAAS

SEQ ID NO: 3440 - protein, 7 aa, Artificial Sequence
  source: /note="Description of Artificial Sequence: Synthetic peptide"
HLSPFTD

SEQ ID NO: 3441 - protein, 7 aa, Artificial Sequence
  source: /note="Description of Artificial Sequence: Synthetic peptide"
HLSPLVR

SEQ ID NO: 3442 - protein, 7 aa, Artificial Sequence
  source: /note="Description of Artificial Sequence: Synthetic peptide"
HLSPRPP

SEQ ID NO: 3443 - protein, 7 aa, Artificial Sequence
  source: /note="Description of Artificial Sequence: Synthetic peptide"
HLSVRLS

SEQ ID NO: 3444 - protein, 7 aa, Artificial Sequence
  source: /note="Description of Artificial Sequence: Synthetic peptide"
HLSVSGS

SEQ ID NO: 3445 - protein, 7 aa, Artificial Sequence
  source: /note="Description of Artificial Sequence: Synthetic peptide"
HLTALTG

SEQ ID NO: 3446 - protein, 7 aa, Artificial Sequence
  source: /note="Description of Artificial Sequence: Synthetic peptide"
HLTDTRR

SEQ ID NO: 3447 - protein, 7 aa, Artificial Sequence
  source: /note="Description of Artificial Sequence: Synthetic peptide"
HLTSGAA

SEQ ID NO: 3448 - protein, 7 aa, Artificial Sequence
  source: /note="Description of Artificial Sequence: Synthetic peptide"
HLTSNSL

SEQ ID NO: 3449 - protein, 7 aa, Artificial Sequence
  source: /note="Description of Artificial Sequence: Synthetic peptide"
HLTSRAG

SEQ ID NO: 3450 - protein, 7 aa, Artificial Sequence
  source: /note="Description of Artificial Sequence: Synthetic peptide"
HLVRGEP

SEQ ID NO: 3451 - protein, 7 aa, Artificial Sequence
  source: /note="Description of Artificial Sequence: Synthetic peptide"
HLVSNRS

SEQ ID NO: 3452 - protein, 7 aa, Artificial Sequence
  source: /note="Description of Artificial Sequence: Synthetic peptide"
HLVSTTS

SEQ ID NO: 3453 - protein, 7 aa, Artificial Sequence
  source: /note="Description of Artificial Sequence: Synthetic peptide"
HLVSTVA

SEQ ID NO: 3454 - protein, 7 aa, Artificial Sequence
  source: /note="Description of Artificial Sequence: Synthetic peptide"
HMAGGDY

SEQ ID NO: 3455 - protein, 7 aa, Artificial Sequence
  source: /note="Description of Artificial Sequence: Synthetic peptide"
HMDSTIS

SEQ ID NO: 3456 - protein, 7 aa, Artificial Sequence
  source: /note="Description of Artificial Sequence: Synthetic peptide"
HMGDMNR

SEQ ID NO: 3457 - protein, 7 aa, Artificial Sequence
  source: /note="Description of Artificial Sequence: Synthetic peptide"
HMIIVDS

SEQ ID NO: 3458 - protein, 7 aa, Artificial Sequence
  source: /note="Description of Artificial Sequence: Synthetic peptide"
HMKPQSD

SEQ ID NO: 3459 - protein, 7 aa, Artificial Sequence
  source: /note="Description of Artificial Sequence: Synthetic peptide"
HMLTHTH

SEQ ID NO: 3460 - protein, 7 aa, Artificial Sequence
  source: /note="Description of Artificial Sequence: Synthetic peptide"
HMMKLGS

SEQ ID NO: 3461 - protein, 7 aa, Artificial Sequence
  source: /note="Description of Artificial Sequence: Synthetic peptide"
HMMSHGP

SEQ ID NO: 3462 - protein, 7 aa, Artificial Sequence
  source: /note="Description of Artificial Sequence: Synthetic peptide"
HMNADHK

SEQ ID NO: 3463 - protein, 7 aa, Artificial Sequence
  source: /note="Description of Artificial Sequence: Synthetic peptide"
HMNLKDA

SEQ ID NO: 3464 - protein, 7 aa, Artificial Sequence
  source: /note="Description of Artificial Sequence: Synthetic peptide"
HMPDDPS

SEQ ID NO: 3465 - protein, 7 aa, Artificial Sequence
  source: /note="Description of Artificial Sequence: Synthetic peptide"
HMPNMYS

SEQ ID NO: 3466 - protein, 7 aa, Artificial Sequence
  source: /note="Description of Artificial Sequence: Synthetic peptide"
HMSNPSF

SEQ ID NO: 3467 - protein, 7 aa, Artificial Sequence
  source: /note="Description of Artificial Sequence: Synthetic peptide"
HMSVLQK

SEQ ID NO: 3468 - protein, 7 aa, Artificial Sequence
  source: /note="Description of Artificial Sequence: Synthetic peptide"
HMSVRDP

SEQ ID NO: 3469 - protein, 7 aa, Artificial Sequence
  source: /note="Description of Artificial Sequence: Synthetic peptide"
HMTGTNL

SEQ ID NO: 3470 - protein, 7 aa, Artificial Sequence
  source: /note="Description of Artificial Sequence: Synthetic peptide"
HMVANPA

SEQ ID NO: 3471 - protein, 7 aa, Artificial Sequence
  source: /note="Description of Artificial Sequence: Synthetic peptide"
HNAAQNQ

SEQ ID NO: 3472 - protein, 7 aa, Artificial Sequence
  source: /note="Description of Artificial Sequence: Synthetic peptide"
HNAGYMP

SEQ ID NO: 3473 - protein, 7 aa, Artificial Sequence
  source: /note="Description of Artificial Sequence: Synthetic peptide"
HNASAVN

SEQ ID NO: 3474 - protein, 7 aa, Artificial Sequence
  source: /note="Description of Artificial Sequence: Synthetic peptide"
HNELPPP

SEQ ID NO: 3475 - protein, 7 aa, Artificial Sequence
  source: /note="Description of Artificial Sequence: Synthetic peptide"
HNEPDKG

SEQ ID NO: 3476 - protein, 7 aa, Artificial Sequence
  source: /note="Description of Artificial Sequence: Synthetic peptide"
HNHDTVL

SEQ ID NO: 3477 - protein, 7 aa, Artificial Sequence
  source: /note="Description of Artificial Sequence: Synthetic peptide"
HNHIVHA

SEQ ID NO: 3478 - protein, 7 aa, Artificial Sequence
  source: /note="Description of Artificial Sequence: Synthetic peptide"
HNKSSYV

SEQ ID NO: 3479 - protein, 7 aa, Artificial Sequence
  source: /note="Description of Artificial Sequence: Synthetic peptide"
HNMRIPS

SEQ ID NO: 3480 - protein, 7 aa, Artificial Sequence
  source: /note="Description of Artificial Sequence: Synthetic peptide"
HNNTVNQ

SEQ ID NO: 3481 - protein, 7 aa, Artificial Sequence
  source: /note="Description of Artificial Sequence: Synthetic peptide"
HNPPKLT

SEQ ID NO: 3482 - protein, 7 aa, Artificial Sequence
  source: /note="Description of Artificial Sequence: Synthetic peptide"
HNPRELG

SEQ ID NO: 3483 - protein, 7 aa, Artificial Sequence
  source: /note="Description of Artificial Sequence: Synthetic peptide"
HNPSLRT

SEQ ID NO: 3484 - protein, 7 aa, Artificial Sequence
  source: /note="Description of Artificial Sequence: Synthetic peptide"
HNQTLGS

SEQ ID NO: 3485 - protein, 7 aa, Artificial Sequence
  source: /note="Description of Artificial Sequence: Synthetic peptide"
HNRNDGF

SEQ ID NO: 3486 - protein, 7 aa, Artificial Sequence
  source: /note="Description of Artificial Sequence: Synthetic peptide"
HNSHHYA

SEQ ID NO: 3487 - protein, 7 aa, Artificial Sequence
  source: /note="Description of Artificial Sequence: Synthetic peptide"
HNSHSMR

SEQ ID NO: 3488 - protein, 7 aa, Artificial Sequence
  source: /note="Description of Artificial Sequence: Synthetic peptide"
HNSPGVG

SEQ ID NO: 3489 - protein, 7 aa, Artificial Sequence
  source: /note="Description of Artificial Sequence: Synthetic peptide"
HNSSFDM

SEQ ID NO: 3490 - protein, 7 aa, Artificial Sequence
  source: /note="Description of Artificial Sequence: Synthetic peptide"
HPAILQL

SEQ ID NO: 3491 - protein, 7 aa, Artificial Sequence
  source: /note="Description of Artificial Sequence: Synthetic peptide"
HPATKLG

SEQ ID NO: 3492 - protein, 7 aa, Artificial Sequence
  source: /note="Description of Artificial Sequence: Synthetic peptide"
HPDPHST

SEQ ID NO: 3493 - protein, 7 aa, Artificial Sequence
  source: /note="Description of Artificial Sequence: Synthetic peptide"
HPEKRNP

SEQ ID NO: 3494 - protein, 7 aa, Artificial Sequence
  source: /note="Description of Artificial Sequence: Synthetic peptide"
HPELPLH

SEQ ID NO: 3495 - protein, 7 aa, Artificial Sequence
  source: /note="Description of Artificial Sequence: Synthetic peptide"
HPEMLVT

SEQ ID NO: 3496 - protein, 7 aa, Artificial Sequence
  source: /note="Description of Artificial Sequence: Synthetic peptide"
HPFGTAS

SEQ ID NO: 3497 - protein, 7 aa, Artificial Sequence
  source: /note="Description of Artificial Sequence: Synthetic peptide"
HPGFNHD

SEQ ID NO: 3498 - protein, 7 aa, Artificial Sequence
  source: /note="Description of Artificial Sequence: Synthetic peptide"
HPGPLVA

SEQ ID NO: 3499 - protein, 7 aa, Artificial Sequence
  source: /note="Description of Artificial Sequence: Synthetic peptide"
HPGQSPV

SEQ ID NO: 3500 - protein, 7 aa, Artificial Sequence
  source: /note="Description of Artificial Sequence: Synthetic peptide"
HPGYSSN

SEQ ID NO: 3501 - protein, 7 aa, Artificial Sequence
  source: /note="Description of Artificial Sequence: Synthetic peptide"
HPIIPIS

SEQ ID NO: 3502 - protein, 7 aa, Artificial Sequence
  source: /note="Description of Artificial Sequence: Synthetic peptide"
HPINTRS

SEQ ID NO: 3503 - protein, 7 aa, Artificial Sequence
  source: /note="Description of Artificial Sequence: Synthetic peptide"
HPIPFPG

SEQ ID NO: 3504 - protein, 7 aa, Artificial Sequence
  source: /note="Description of Artificial Sequence: Synthetic peptide"
HPKGEPP

SEQ ID NO: 3505 - protein, 7 aa, Artificial Sequence
  source: /note="Description of Artificial Sequence: Synthetic peptide"
HPKLVSV

SEQ ID NO: 3506 - protein, 7 aa, Artificial Sequence
  source: /note="Description of Artificial Sequence: Synthetic peptide"
HPLEDQL

SEQ ID NO: 3507 - protein, 7 aa, Artificial Sequence
  source: /note="Description of Artificial Sequence: Synthetic peptide"
HPLNARP

SEQ ID NO: 3508 - protein, 7 aa, Artificial Sequence
  source: /note="Description of Artificial Sequence: Synthetic peptide"
HPMTSNS

SEQ ID NO: 3509 - protein, 7 aa, Artificial Sequence
  source: /note="Description of Artificial Sequence: Synthetic peptide"
HPPKYVT

SEQ ID NO: 3510 - protein, 7 aa, Artificial Sequence
  source: /note="Description of Artificial Sequence: Synthetic peptide"
HPPPSHM

SEQ ID NO: 3511 - protein, 7 aa, Artificial Sequence
  source: /note="Description of Artificial Sequence: Synthetic peptide"
HPPPTDS

SEQ ID NO: 3512 - protein, 7 aa, Artificial Sequence
  source: /note="Description of Artificial Sequence: Synthetic peptide"
HPPRTPA

SEQ ID NO: 3513 - protein, 7 aa, Artificial Sequence
  source: /note="Description of Artificial Sequence: Synthetic peptide"
HPQRQAS

SEQ ID NO: 3514 - protein, 7 aa, Artificial Sequence
  source: /note="Description of Artificial Sequence: Synthetic peptide"
HPQSSHW

SEQ ID NO: 3515 - protein, 7 aa, Artificial Sequence
  source: /note="Description of Artificial Sequence: Synthetic peptide"
HPSFSPL

SEQ ID NO: 3516 - protein, 7 aa, Artificial Sequence
  source: /note="Description of Artificial Sequence: Synthetic peptide"
HPSGYSN

SEQ ID NO: 3517 - protein, 7 aa, Artificial Sequence
  source: /note="Description of Artificial Sequence: Synthetic peptide"
HPSIAGM

SEQ ID NO: 3518 - protein, 7 aa, Artificial Sequence
  source: /note="Description of Artificial Sequence: Synthetic peptide"
HPSIVRD

SEQ ID NO: 3519 - protein, 7 aa, Artificial Sequence
  source: /note="Description of Artificial Sequence: Synthetic peptide"
HPSLAIG

SEQ ID NO: 3520 - protein, 7 aa, Artificial Sequence
  source: /note="Description of Artificial Sequence: Synthetic peptide"
HPSRVIM

SEQ ID NO: 3521 - protein, 7 aa, Artificial Sequence
  source: /note="Description of Artificial Sequence: Synthetic peptide"
HPSSQLH

SEQ ID NO: 3522 - protein, 7 aa, Artificial Sequence
  source: /note="Description of Artificial Sequence: Synthetic peptide"
HPSYSSG

SEQ ID NO: 3523 - protein, 7 aa, Artificial Sequence
  source: /note="Description of Artificial Sequence: Synthetic peptide"
HPTAKLP

SEQ ID NO: 3524 - protein, 7 aa, Artificial Sequence
  source: /note="Description of Artificial Sequence: Synthetic peptide"
HPTETTE

SEQ ID NO: 3525 - protein, 7 aa, Artificial Sequence
  source: /note="Description of Artificial Sequence: Synthetic peptide"
HPTGTKD

SEQ ID NO: 3526 - protein, 7 aa, Artificial Sequence
  source: /note="Description of Artificial Sequence: Synthetic peptide"
HPTLSHY

SEQ ID NO: 3527 - protein, 7 aa, Artificial Sequence
  source: /note="Description of Artificial Sequence: Synthetic peptide"
HPTNNSN

SEQ ID NO: 3528 - protein, 7 aa, Artificial Sequence
  source: /note="Description of Artificial Sequence: Synthetic peptide"
HPTSIIL

SEQ ID NO: 3529 - protein, 7 aa, Artificial Sequence
  source: /note="Description of Artificial Sequence: Synthetic peptide"
HPTTRFG

SEQ ID NO: 3530 - protein, 7 aa, Artificial Sequence
  source: /note="Description of Artificial Sequence: Synthetic peptide"
HPVSSRQ

SEQ ID NO: 3531 - protein, 7 aa, Artificial Sequence
  source: /note="Description of Artificial Sequence: Synthetic peptide"
HPYQNSL

SEQ ID NO: 3532 - protein, 7 aa, Artificial Sequence
  source: /note="Description of Artificial Sequence: Synthetic peptide"
HQAEAYS

SEQ ID NO: 3533 - protein, 7 aa, Artificial Sequence
  source: /note="Description of Artificial Sequence: Synthetic peptide"
HQAPGLQ

SEQ ID NO: 3534 - protein, 7 aa, Artificial Sequence
  source: /note="Description of Artificial Sequence: Synthetic peptide"
HQDIAHL

SEQ ID NO: 3535 - protein, 7 aa, Artificial Sequence
  source: /note="Description of Artificial Sequence: Synthetic peptide"
HQFNREP

SEQ ID NO: 3536 - protein, 7 aa, Artificial Sequence
  source: /note="Description of Artificial Sequence: Synthetic peptide"
HQGDQNI

SEQ ID NO: 3537 - protein, 7 aa, Artificial Sequence
  source: /note="Description of Artificial Sequence: Synthetic peptide"
HQGHPRD

SEQ ID NO: 3538 - protein, 7 aa, Artificial Sequence
  source: /note="Description of Artificial Sequence: Synthetic peptide"
HQGSPTF

SEQ ID NO: 3539 - protein, 7 aa, Artificial Sequence
  source: /note="Description of Artificial Sequence: Synthetic peptide"
HQLGSQM

SEQ ID NO: 3540 - protein, 7 aa, Artificial Sequence
  source: /note="Description of Artificial Sequence: Synthetic peptide"
HQPHIVQ

SEQ ID NO: 3541 - protein, 7 aa, Artificial Sequence
  source: /note="Description of Artificial Sequence: Synthetic peptide"
HQPHSSL

SEQ ID NO: 3542 - protein, 7 aa, Artificial Sequence
  source: /note="Description of Artificial Sequence: Synthetic peptide"
HQQSTNN

SEQ ID NO: 3543 - protein, 7 aa, Artificial Sequence
  source: /note="Description of Artificial Sequence: Synthetic peptide"
HQRTVGV

SEQ ID NO: 3544 - protein, 7 aa, Artificial Sequence
  source: /note="Description of Artificial Sequence: Synthetic peptide"
HQSPSDR

SEQ ID NO: 3545 - protein, 7 aa, Artificial Sequence
  source: /note="Description of Artificial Sequence: Synthetic peptide"
HQTASVL

SEQ ID NO: 3546 - protein, 7 aa, Artificial Sequence
  source: /note="Description of Artificial Sequence: Synthetic peptide"
HQTVGQN

SEQ ID NO: 3547 - protein, 7 aa, Artificial Sequence
  source: /note="Description of Artificial Sequence: Synthetic peptide"
HRASYVD

SEQ ID NO: 3548 - protein, 7 aa, Artificial Sequence
  source: /note="Description of Artificial Sequence: Synthetic peptide"
HRDALQQ

SEQ ID NO: 3549 - protein, 7 aa, Artificial Sequence
  source: /note="Description of Artificial Sequence: Synthetic peptide"
HRDISTG

SEQ ID NO: 3550 - protein, 7 aa, Artificial Sequence
  source: /note="Description of Artificial Sequence: Synthetic peptide"
HREEKAS

SEQ ID NO: 3551 - protein, 7 aa, Artificial Sequence
  source: /note="Description of Artificial Sequence: Synthetic peptide"
HREGLEH

SEQ ID NO: 3552 - protein, 7 aa, Artificial Sequence
  source: /note="Description of Artificial Sequence: Synthetic peptide"
HREHGYP

SEQ ID NO: 3553 - protein, 7 aa, Artificial Sequence
  source: /note="Description of Artificial Sequence: Synthetic peptide"
HRENKVA

SEQ ID NO: 3554 - protein, 7 aa, Artificial Sequence
  source: /note="Description of Artificial Sequence: Synthetic peptide"
HRIGDVP

SEQ ID NO: 3555 - protein, 7 aa, Artificial Sequence
  source: /note="Description of Artificial Sequence: Synthetic peptide"
HRLPNVA

SEQ ID NO: 3556 - protein, 7 aa, Artificial Sequence
  source: /note="Description of Artificial Sequence: Synthetic peptide"
HRPEMLS

SEQ ID NO: 3557 - protein, 7 aa, Artificial Sequence
  source: /note="Description of Artificial Sequence: Synthetic peptide"
HRPIATY

SEQ ID NO: 3558 - protein, 7 aa, Artificial Sequence
  source: /note="Description of Artificial Sequence: Synthetic peptide"
HRTGLPE

SEQ ID NO: 3559 - protein, 7 aa, Artificial Sequence
  source: /note="Description of Artificial Sequence: Synthetic peptide"
HRTSMPL

SEQ ID NO: 3560 - protein, 7 aa, Artificial Sequence
  source: /note="Description of Artificial Sequence: Synthetic peptide"
HRTTNNF

SEQ ID NO: 3561 - protein, 7 aa, Artificial Sequence
  source: /note="Description of Artificial Sequence: Synthetic peptide"
HRVGGLS

SEQ ID NO: 3562 - protein, 7 aa, Artificial Sequence
  source: /note="Description of Artificial Sequence: Synthetic peptide"
HRVVAIP

SEQ ID NO: 3563 - protein, 7 aa, Artificial Sequence
  source: /note="Description of Artificial Sequence: Synthetic peptide"
HSAALCM

SEQ ID NO: 3564 - protein, 7 aa, Artificial Sequence
  source: /note="Description of Artificial Sequence: Synthetic peptide"
HSAAMPS

SEQ ID NO: 3565 - protein, 7 aa, Artificial Sequence
  source: /note="Description of Artificial Sequence: Synthetic peptide"
HSAGTET

SEQ ID NO: 3566 - protein, 7 aa, Artificial Sequence
  source: /note="Description of Artificial Sequence: Synthetic peptide"
HSAKMSG

SEQ ID NO: 3567 - protein, 7 aa, Artificial Sequence
  source: /note="Description of Artificial Sequence: Synthetic peptide"
HSAKSMH

SEQ ID NO: 3568 - protein, 7 aa, Artificial Sequence
  source: /note="Description of Artificial Sequence: Synthetic peptide"
HSALLHM

SEQ ID NO: 3569 - protein, 7 aa, Artificial Sequence
  source: /note="Description of Artificial Sequence: Synthetic peptide"
HSAQITI

SEQ ID NO: 3570 - protein, 7 aa, Artificial Sequence
  source: /note="Description of Artificial Sequence: Synthetic peptide"
HSATMCS

SEQ ID NO: 3571 - protein, 7 aa, Artificial Sequence
  source: /note="Description of Artificial Sequence: Synthetic peptide"
HSDRSSA

SEQ ID NO: 3572 - protein, 7 aa, Artificial Sequence
  source: /note="Description of Artificial Sequence: Synthetic peptide"
HSEKSGF

SEQ ID NO: 3573 - protein, 7 aa, Artificial Sequence
  source: /note="Description of Artificial Sequence: Synthetic peptide"
HSEYPTK

SEQ ID NO: 3574 - protein, 7 aa, Artificial Sequence
  source: /note="Description of Artificial Sequence: Synthetic peptide"
HSFLDLE

SEQ ID NO: 3575 - protein, 7 aa, Artificial Sequence
  source: /note="Description of Artificial Sequence: Synthetic peptide"
HSFSMME

SEQ ID NO: 3576 - protein, 7 aa, Artificial Sequence
  source: /note="Description of Artificial Sequence: Synthetic peptide"
HSGHSQG

SEQ ID NO: 3577 - protein, 7 aa, Artificial Sequence
  source: /note="Description of Artificial Sequence: Synthetic peptide"
HSGKILH

SEQ ID NO: 3578 - protein, 7 aa, Artificial Sequence
  source: /note="Description of Artificial Sequence: Synthetic peptide"
HSGRAYS

SEQ ID NO: 3579 - protein, 7 aa, Artificial Sequence
  source: /note="Description of Artificial Sequence: Synthetic peptide"
HSGSSET

SEQ ID NO: 3580 - protein, 7 aa, Artificial Sequence
  source: /note="Description of Artificial Sequence: Synthetic peptide"
HSHGVPS

SEQ ID NO: 3581 - protein, 7 aa, Artificial Sequence
  source: /note="Description of Artificial Sequence: Synthetic peptide"
HSHVNSS

SEQ ID NO: 3582 - protein, 7 aa, Artificial Sequence
  source: /note="Description of Artificial Sequence: Synthetic peptide"
HSIHSRE

SEQ ID NO: 3583 - protein, 7 aa, Artificial Sequence
  source: /note="Description of Artificial Sequence: Synthetic peptide"
HSIQHIP

SEQ ID NO: 3584 - protein, 7 aa, Artificial Sequence
  source: /note="Description of Artificial Sequence: Synthetic peptide"
HSKASVI

SEQ ID NO: 3585 - protein, 7 aa, Artificial Sequence
  source: /note="Description of Artificial Sequence: Synthetic peptide"
HSKPAQI

SEQ ID NO: 3586 - protein, 7 aa, Artificial Sequence
  source: /note="Description of Artificial Sequence: Synthetic peptide"
HSKSVVT

SEQ ID NO: 3587 - protein, 7 aa, Artificial Sequence
  source: /note="Description of Artificial Sequence: Synthetic peptide"
HSLGAIP

SEQ ID NO: 3588 - protein, 7 aa, Artificial Sequence
  source: /note="Description of Artificial Sequence: Synthetic peptide"
HSLGTSG

SEQ ID NO: 3589 - protein, 7 aa, Artificial Sequence
  source: /note="Description of Artificial Sequence: Synthetic peptide"
HSLLNST

SEQ ID NO: 3590 - protein, 7 aa, Artificial Sequence
  source: /note="Description of Artificial Sequence: Synthetic peptide"
HSLPGLK

SEQ ID NO: 3591 - protein, 7 aa, Artificial Sequence
  source: /note="Description of Artificial Sequence: Synthetic peptide"
HSLRTPQ

SEQ ID NO: 3592 - protein, 7 aa, Artificial Sequence
  source: /note="Description of Artificial Sequence: Synthetic peptide"
HSMEEAL

SEQ ID NO: 3593 - protein, 7 aa, Artificial Sequence
  source: /note="Description of Artificial Sequence: Synthetic peptide"
HSMPDQI

SEQ ID NO: 3594 - protein, 7 aa, Artificial Sequence
  source: /note="Description of Artificial Sequence: Synthetic peptide"
HSMSEAK

SEQ ID NO: 3595 - protein, 7 aa, Artificial Sequence
  source: /note="Description of Artificial Sequence: Synthetic peptide"
HSNKQPN

SEQ ID NO: 3596 - protein, 7 aa, Artificial Sequence
  source: /note="Description of Artificial Sequence: Synthetic peptide"
HSNKTSL

SEQ ID NO: 3597 - protein, 7 aa, Artificial Sequence
  source: /note="Description of Artificial Sequence: Synthetic peptide"
HSNLRAM

SEQ ID NO: 3598 - protein, 7 aa, Artificial Sequence
  source: /note="Description of Artificial Sequence: Synthetic peptide"
HSNTISS

SEQ ID NO: 3599 - protein, 7 aa, Artificial Sequence
  source: /note="Description of Artificial Sequence: Synthetic peptide"
HSPARTA

SEQ ID NO: 3600 - protein, 7 aa, Artificial Sequence
  source: /note="Description of Artificial Sequence: Synthetic peptide"
HSPASPP

SEQ ID NO: 3601 - protein, 7 aa, Artificial Sequence
  source: /note="Description of Artificial Sequence: Synthetic peptide"
HSPGQIS

SEQ ID NO: 3602 - protein, 7 aa, Artificial Sequence
  source: /note="Description of Artificial Sequence: Synthetic peptide"
HSPMAVP

SEQ ID NO: 3603 - protein, 7 aa, Artificial Sequence
  source: /note="Description of Artificial Sequence: Synthetic peptide"
HSPNGYA

SEQ ID NO: 3604 - protein, 7 aa, Artificial Sequence
  source: /note="Description of Artificial Sequence: Synthetic peptide"
HSQAQMS

SEQ ID NO: 3605 - protein, 7 aa, Artificial Sequence
  source: /note="Description of Artificial Sequence: Synthetic peptide"
HSQNQYS

SEQ ID NO: 3606 - protein, 7 aa, Artificial Sequence
  source: /note="Description of Artificial Sequence: Synthetic peptide"
HSQRAVP

SEQ ID NO: 3607 - protein, 7 aa, Artificial Sequence
  source: /note="Description of Artificial Sequence: Synthetic peptide"
HSRASPE

SEQ ID NO: 3608 - protein, 7 aa, Artificial Sequence
  source: /note="Description of Artificial Sequence: Synthetic peptide"
HSRDNRN

SEQ ID NO: 3609 - protein, 7 aa, Artificial Sequence
  source: /note="Description of Artificial Sequence: Synthetic peptide"
HSRELSP

SEQ ID NO: 3610 - protein, 7 aa, Artificial Sequence
  source: /note="Description of Artificial Sequence: Synthetic peptide"
HSRGTML

SEQ ID NO: 3611 - protein, 7 aa, Artificial Sequence
  source: /note="Description of Artificial Sequence: Synthetic peptide"
HSRHDML

SEQ ID NO: 3612 - protein, 7 aa, Artificial Sequence
  source: /note="Description of Artificial Sequence: Synthetic peptide"
HSRPQPQ

SEQ ID NO: 3613 - protein, 7 aa, Artificial Sequence
  source: /note="Description of Artificial Sequence: Synthetic peptide"
HSRPSGC

SEQ ID NO: 3614 - protein, 7 aa, Artificial Sequence
  source: /note="Description of Artificial Sequence: Synthetic peptide"
HSRSTFA

SEQ ID NO: 3615 - protein, 7 aa, Artificial Sequence
  source: /note="Description of Artificial Sequence: Synthetic peptide"
HSSIPGP

SEQ ID NO: 3616 - protein, 7 aa, Artificial Sequence
  source: /note="Description of Artificial Sequence: Synthetic peptide"
HSSMATM

SEQ ID NO: 3617 - protein, 7 aa, Artificial Sequence
  source: /note="Description of Artificial Sequence: Synthetic peptide"
HSSNLGV

SEQ ID NO: 3618 - protein, 7 aa, Artificial Sequence
  source: /note="Description of Artificial Sequence: Synthetic peptide"
HSSSVNP

SEQ ID NO: 3619 - protein, 7 aa, Artificial Sequence
  source: /note="Description of Artificial Sequence: Synthetic peptide"
HSSTGAN

SEQ ID NO: 3620 - protein, 7 aa, Artificial Sequence
  source: /note="Description of Artificial Sequence: Synthetic peptide"
HSSVPGA

SEQ ID NO: 3621 - protein, 7 aa, Artificial Sequence
  source: /note="Description of Artificial Sequence: Synthetic peptide"
HSTDSLP

SEQ ID NO: 3622 - protein, 7 aa, Artificial Sequence
  source: /note="Description of Artificial Sequence: Synthetic peptide"
HSTHREL

SEQ ID NO: 3623 - protein, 7 aa, Artificial Sequence
  source: /note="Description of Artificial Sequence: Synthetic peptide"
HSTLISH

SEQ ID NO: 3624 - protein, 7 aa, Artificial Sequence
  source: /note="Description of Artificial Sequence: Synthetic peptide"
HSTPLNS

SEQ ID NO: 3625 - protein, 7 aa, Artificial Sequence
  source: /note="Description of Artificial Sequence: Synthetic peptide"
HSTREGF

SEQ ID NO: 3626 - protein, 7 aa, Artificial Sequence
  source: /note="Description of Artificial Sequence: Synthetic peptide"
HSTTDPL

SEQ ID NO: 3627 - protein, 7 aa, Artificial Sequence
  source: /note="Description of Artificial Sequence: Synthetic peptide"
HSVASVT

SEQ ID NO: 3628 - protein, 7 aa, Artificial Sequence
  source: /note="Description of Artificial Sequence: Synthetic peptide"
HSVDSRG

SEQ ID NO: 3629 - protein, 7 aa, Artificial Sequence
  source: /note="Description of Artificial Sequence: Synthetic peptide"
HSVERDH

SEQ ID NO: 3630 - protein, 7 aa, Artificial Sequence
  source: /note="Description of Artificial Sequence: Synthetic peptide"
HSYVDSF

SEQ ID NO: 3631 - protein, 7 aa, Artificial Sequence
  source: /note="Description of Artificial Sequence: Synthetic peptide"
HTAGDAE

SEQ ID NO: 3632 - protein, 7 aa, Artificial Sequence
  source: /note="Description of Artificial Sequence: Synthetic peptide"
HTALLSN

SEQ ID NO: 3633 - protein, 7 aa, Artificial Sequence
  source: /note="Description of Artificial Sequence: Synthetic peptide"
HTARTTP

SEQ ID NO: 3634 - protein, 7 aa, Artificial Sequence
  source: /note="Description of Artificial Sequence: Synthetic peptide"
HTASLPA

SEQ ID NO: 3635 - protein, 7 aa, Artificial Sequence
  source: /note="Description of Artificial Sequence: Synthetic peptide"
HTDRYAV

SEQ ID NO: 3636 - protein, 7 aa, Artificial Sequence
  source: /note="Description of Artificial Sequence: Synthetic peptide"
HTEAGRV

SEQ ID NO: 3637 - protein, 7 aa, Artificial Sequence
  source: /note="Description of Artificial Sequence: Synthetic peptide"
HTETFGE

SEQ ID NO: 3638 - protein, 7 aa, Artificial Sequence
  source: /note="Description of Artificial Sequence: Synthetic peptide"
HTGLVRG

SEQ ID NO: 3639 - protein, 7 aa, Artificial Sequence
  source: /note="Description of Artificial Sequence: Synthetic peptide"
HTGSLSS

SEQ ID NO: 3640 - protein, 7 aa, Artificial Sequence
  source: /note="Description of Artificial Sequence: Synthetic peptide"
HTHLASL

SEQ ID NO: 3641 - protein, 7 aa, Artificial Sequence
  source: /note="Description of Artificial Sequence: Synthetic peptide"
HTIKDAY

SEQ ID NO: 3642 - protein, 7 aa, Artificial Sequence
  source: /note="Description of Artificial Sequence: Synthetic peptide"
HTKSPHP

SEQ ID NO: 3643 - protein, 7 aa, Artificial Sequence
  source: /note="Description of Artificial Sequence: Synthetic peptide"
HTLKPDV

SEQ ID NO: 3644 - protein, 7 aa, Artificial Sequence
  source: /note="Description of Artificial Sequence: Synthetic peptide"
HTLPSTS

SEQ ID NO: 3645 - protein, 7 aa, Artificial Sequence
  source: /note="Description of Artificial Sequence: Synthetic peptide"
HTLPTTA

SEQ ID NO: 3646 - protein, 7 aa, Artificial Sequence
  source: /note="Description of Artificial Sequence: Synthetic peptide"
HTMASGS

SEQ ID NO: 3647 - protein, 7 aa, Artificial Sequence
  source: /note="Description of Artificial Sequence: Synthetic peptide"
HTNSNTG

SEQ ID NO: 3648 - protein, 7 aa, Artificial Sequence
  source: /note="Description of Artificial Sequence: Synthetic peptide"
HTPAVNF

SEQ ID NO: 3649 - protein, 7 aa, Artificial Sequence
  source: /note="Description of Artificial Sequence: Synthetic peptide"
HTPGLHT

SEQ ID NO: 3650 - protein, 7 aa, Artificial Sequence
  source: /note="Description of Artificial Sequence: Synthetic peptide"
HTPLTSH

SEQ ID NO: 3651 - protein, 7 aa, Artificial Sequence
  source: /note="Description of Artificial Sequence: Synthetic peptide"
HTPNILY

SEQ ID NO: 3652 - protein, 7 aa, Artificial Sequence
  source: /note="Description of Artificial Sequence: Synthetic peptide"
HTPQPNA

SEQ ID NO: 3653 - protein, 7 aa, Artificial Sequence
  source: /note="Description of Artificial Sequence: Synthetic peptide"
HTQLRTP

SEQ ID NO: 3654 - protein, 7 aa, Artificial Sequence
  source: /note="Description of Artificial Sequence: Synthetic peptide"
HTQRLSS

SEQ ID NO: 3655 - protein, 7 aa, Artificial Sequence
  source: /note="Description of Artificial Sequence: Synthetic peptide"
HTQVTRC

SEQ ID NO: 3656 - protein, 7 aa, Artificial Sequence
  source: /note="Description of Artificial Sequence: Synthetic peptide"
HTRDSDP

SEQ ID NO: 3657 - protein, 7 aa, Artificial Sequence
  source: /note="Description of Artificial Sequence: Synthetic peptide"
HTRGKAE

SEQ ID NO: 3658 - protein, 7 aa, Artificial Sequence
  source: /note="Description of Artificial Sequence: Synthetic peptide"
HTSGESY

SEQ ID NO: 3659 - protein, 7 aa, Artificial Sequence
  source: /note="Description of Artificial Sequence: Synthetic peptide"
HTSHQLP

SEQ ID NO: 3660 - protein, 7 aa, Artificial Sequence
  source: /note="Description of Artificial Sequence: Synthetic peptide"
HTSIDYV

SEQ ID NO: 3661 - protein, 7 aa, Artificial Sequence
  source: /note="Description of Artificial Sequence: Synthetic peptide"
HTSKSAL

SEQ ID NO: 3662 - protein, 7 aa, Artificial Sequence
  source: /note="Description of Artificial Sequence: Synthetic peptide"
HTSPPIS

SEQ ID NO: 3663 - protein, 7 aa, Artificial Sequence
  source: /note="Description of Artificial Sequence: Synthetic peptide"
HTSPVYD

SEQ ID NO: 3664 - protein, 7 aa, Artificial Sequence
  source: /note="Description of Artificial Sequence: Synthetic peptide"
HTSQQRQ

SEQ ID NO: 3665 - protein, 7 aa, Artificial Sequence
  source: /note="Description of Artificial Sequence: Synthetic peptide"
HTSTTKW

SEQ ID NO: 3666 - protein, 7 aa, Artificial Sequence
  source: /note="Description of Artificial Sequence: Synthetic peptide"
HTSWDGL

SEQ ID NO: 3667 - protein, 7 aa, Artificial Sequence
  source: /note="Description of Artificial Sequence: Synthetic peptide"
HTTAAPP

SEQ ID NO: 3668 - protein, 7 aa, Artificial Sequence
  source: /note="Description of Artificial Sequence: Synthetic peptide"
HTTKVDP

SEQ ID NO: 3669 - protein, 7 aa, Artificial Sequence
  source: /note="Description of Artificial Sequence: Synthetic peptide"
HTTPTHT

SEQ ID NO: 3670 - protein, 7 aa, Artificial Sequence
  source: /note="Description of Artificial Sequence: Synthetic peptide"
HTTQCTM

SEQ ID NO: 3671 - protein, 7 aa, Artificial Sequence
  source: /note="Description of Artificial Sequence: Synthetic peptide"
HTTTIHG

SEQ ID NO: 3672 - protein, 7 aa, Artificial Sequence
  source: /note="Description of Artificial Sequence: Synthetic peptide"
HTVRSGL

SEQ ID NO: 3673 - protein, 7 aa, Artificial Sequence
  source: /note="Description of Artificial Sequence: Synthetic peptide"
HTVTSAG

SEQ ID NO: 3674 - protein, 7 aa, Artificial Sequence
  source: /note="Description of Artificial Sequence: Synthetic peptide"
HTVVQSS

SEQ ID NO: 3675 - protein, 7 aa, Artificial Sequence
  source: /note="Description of Artificial Sequence: Synthetic peptide"
HTYSSED

SEQ ID NO: 3676 - protein, 7 aa, Artificial Sequence
  source: /note="Description of Artificial Sequence: Synthetic peptide"
HVDRSGA

SEQ ID NO: 3677 - protein, 7 aa, Artificial Sequence
  source: /note="Description of Artificial Sequence: Synthetic peptide"
HVDRTQF

SEQ ID NO: 3678 - protein, 7 aa, Artificial Sequence
  source: /note="Description of Artificial Sequence: Synthetic peptide"
HVGITSA

SEQ ID NO: 3679 - protein, 7 aa, Artificial Sequence
  source: /note="Description of Artificial Sequence: Synthetic peptide"
HVGYGPS

SEQ ID NO: 3680 - protein, 7 aa, Artificial Sequence
  source: /note="Description of Artificial Sequence: Synthetic peptide"
HVGYKAD

SEQ ID NO: 3681 - protein, 7 aa, Artificial Sequence
  source: /note="Description of Artificial Sequence: Synthetic peptide"
HVHTNSS

SEQ ID NO: 3682 - protein, 7 aa, Artificial Sequence
  source: /note="Description of Artificial Sequence: Synthetic peptide"
HVIDSAG

SEQ ID NO: 3683 - protein, 7 aa, Artificial Sequence
  source: /note="Description of Artificial Sequence: Synthetic peptide"
HVKALGS

SEQ ID NO: 3684 - protein, 7 aa, Artificial Sequence
  source: /note="Description of Artificial Sequence: Synthetic peptide"
HVKLSSN

SEQ ID NO: 3685 - protein, 7 aa, Artificial Sequence
  source: /note="Description of Artificial Sequence: Synthetic peptide"
HVLKNPT

SEQ ID NO: 3686 - protein, 7 aa, Artificial Sequence
  source: /note="Description of Artificial Sequence: Synthetic peptide"
HVLPTRP

SEQ ID NO: 3687 - protein, 7 aa, Artificial Sequence
  source: /note="Description of Artificial Sequence: Synthetic peptide"
HVLSPTR

SEQ ID NO: 3688 - protein, 7 aa, Artificial Sequence
  source: /note="Description of Artificial Sequence: Synthetic peptide"
HVMEASS

SEQ ID NO: 3689 - protein, 7 aa, Artificial Sequence
  source: /note="Description of Artificial Sequence: Synthetic peptide"
HVPMSMP

SEQ ID NO: 3690 - protein, 7 aa, Artificial Sequence
  source: /note="Description of Artificial Sequence: Synthetic peptide"
HVQNSQT

SEQ ID NO: 3691 - protein, 7 aa, Artificial Sequence
  source: /note="Description of Artificial Sequence: Synthetic peptide"
HVRGTGS

SEQ ID NO: 3692 - protein, 7 aa, Artificial Sequence
  source: /note="Description of Artificial Sequence: Synthetic peptide"
HVRPGFT

SEQ ID NO: 3693 - protein, 7 aa, Artificial Sequence
  source: /note="Description of Artificial Sequence: Synthetic peptide"
HVSEHTY

SEQ ID NO: 3694 - protein, 7 aa, Artificial Sequence
  source: /note="Description of Artificial Sequence: Synthetic peptide"
HVSGPRA

SEQ ID NO: 3695 - protein, 7 aa, Artificial Sequence
  source: /note="Description of Artificial Sequence: Synthetic peptide"
HVSHAMQ

SEQ ID NO: 3696 - protein, 7 aa, Artificial Sequence
  source: /note="Description of Artificial Sequence: Synthetic peptide"
HVSHSVI

SEQ ID NO: 3697 - protein, 7 aa, Artificial Sequence
  source: /note="Description of Artificial Sequence: Synthetic peptide"
HVSKLDT

SEQ ID NO: 3698 - protein, 7 aa, Artificial Sequence
  source: /note="Description of Artificial Sequence: Synthetic peptide"
HVSMSVP

SEQ ID NO: 3699 - protein, 7 aa, Artificial Sequence
  source: /note="Description of Artificial Sequence: Synthetic peptide"
HVSNIIS

SEQ ID NO: 3700 - protein, 7 aa, Artificial Sequence
  source: /note="Description of Artificial Sequence: Synthetic peptide"
HVSNQLN

SEQ ID NO: 3701 - protein, 7 aa, Artificial Sequence
  source: /note="Description of Artificial Sequence: Synthetic peptide"
HVSPPAN

SEQ ID NO: 3702 - protein, 7 aa, Artificial Sequence
  source: /note="Description of Artificial Sequence: Synthetic peptide"
HVSSASL

SEQ ID NO: 3703 - protein, 7 aa, Artificial Sequence
  source: /note="Description of Artificial Sequence: Synthetic peptide"
HVSSDSR

SEQ ID NO: 3704 - protein, 7 aa, Artificial Sequence
  source: /note="Description of Artificial Sequence: Synthetic peptide"
HVSSPSL

SEQ ID NO: 3705 - protein, 7 aa, Artificial Sequence
  source: /note="Description of Artificial Sequence: Synthetic peptide"
HVSTEPS

SEQ ID NO: 3706 - protein, 7 aa, Artificial Sequence
  source: /note="Description of Artificial Sequence: Synthetic peptide"
HVSYDLT

SEQ ID NO: 3707 - protein, 7 aa, Artificial Sequence
  source: /note="Description of Artificial Sequence: Synthetic peptide"
HVTPGFE

SEQ ID NO: 3708 - protein, 7 aa, Artificial Sequence
  source: /note="Description of Artificial Sequence: Synthetic peptide"
HVTSPYL

SEQ ID NO: 3709 - protein, 7 aa, Artificial Sequence
  source: /note="Description of Artificial Sequence: Synthetic peptide"
HVVGGSS

SEQ ID NO: 3710 - protein, 7 aa, Artificial Sequence
  source: /note="Description of Artificial Sequence: Synthetic peptide"
HVVSRFV

SEQ ID NO: 3711 - protein, 7 aa, Artificial Sequence
  source: /note="Description of Artificial Sequence: Synthetic peptide"
HYAPICE

SEQ ID NO: 3712 - protein, 7 aa, Artificial Sequence
  source: /note="Description of Artificial Sequence: Synthetic peptide"
HYDSNAP

SEQ ID NO: 3713 - protein, 7 aa, Artificial Sequence
  source: /note="Description of Artificial Sequence: Synthetic peptide"
HYEFVDK

SEQ ID NO: 3714 - protein, 7 aa, Artificial Sequence
  source: /note="Description of Artificial Sequence: Synthetic peptide"
HYESCNP

SEQ ID NO: 3715 - protein, 7 aa, Artificial Sequence
  source: /note="Description of Artificial Sequence: Synthetic peptide"
HYESNDV

SEQ ID NO: 3716 - protein, 7 aa, Artificial Sequence
  source: /note="Description of Artificial Sequence: Synthetic peptide"
HYFDMGP

SEQ ID NO: 3717 - protein, 7 aa, Artificial Sequence
  source: /note="Description of Artificial Sequence: Synthetic peptide"
HYGMVSA

SEQ ID NO: 3718 - protein, 7 aa, Artificial Sequence
  source: /note="Description of Artificial Sequence: Synthetic peptide"
HYGSTRE

SEQ ID NO: 3719 - protein, 7 aa, Artificial Sequence
  source: /note="Description of Artificial Sequence: Synthetic peptide"
HYINPTN

SEQ ID NO: 3720 - protein, 7 aa, Artificial Sequence
  source: /note="Description of Artificial Sequence: Synthetic peptide"
HYPPTYD

SEQ ID NO: 3721 - protein, 7 aa, Artificial Sequence
  source: /note="Description of Artificial Sequence: Synthetic peptide"
HYPSTSS

SEQ ID NO: 3722 - protein, 7 aa, Artificial Sequence
  source: /note="Description of Artificial Sequence: Synthetic peptide"
HYQISTT

SEQ ID NO: 3723 - protein, 7 aa, Artificial Sequence
  source: /note="Description of Artificial Sequence: Synthetic peptide"
HYSISGA

SEQ ID NO: 3724 - protein, 7 aa, Artificial Sequence
  source: /note="Description of Artificial Sequence: Synthetic peptide"
HYSPKPS

SEQ ID NO: 3725 - protein, 7 aa, Artificial Sequence
  source: /note="Description of Artificial Sequence: Synthetic peptide"
HYVEHRQ

SEQ ID NO: 3726 - protein, 7 aa, Artificial Sequence
  source: /note="Description of Artificial Sequence: Synthetic peptide"
IAAAAMT

SEQ ID NO: 3727 - protein, 7 aa, Artificial Sequence
  source: /note="Description of Artificial Sequence: Synthetic peptide"
IAANMHN

SEQ ID NO: 3728 - protein, 7 aa, Artificial Sequence
  source: /note="Description of Artificial Sequence: Synthetic peptide"
IAATPEQ

SEQ ID NO: 3729 - protein, 7 aa, Artificial Sequence
  source: /note="Description of Artificial Sequence: Synthetic peptide"
IACSSEL

SEQ ID NO: 3730 - protein, 7 aa, Artificial Sequence
  source: /note="Description of Artificial Sequence: Synthetic peptide"
IADVLGY

SEQ ID NO: 3731 - protein, 7 aa, Artificial Sequence
  source: /note="Description of Artificial Sequence: Synthetic peptide"
IAGISDI

SEQ ID NO: 3732 - protein, 7 aa, Artificial Sequence
  source: /note="Description of Artificial Sequence: Synthetic peptide"
IAHERSD

SEQ ID NO: 3733 - protein, 7 aa, Artificial Sequence
  source: /note="Description of Artificial Sequence: Synthetic peptide"
IAHRASA

SEQ ID NO: 3734 - protein, 7 aa, Artificial Sequence
  source: /note="Description of Artificial Sequence: Synthetic peptide"
IALPKVA

SEQ ID NO: 3735 - protein, 7 aa, Artificial Sequence
  source: /note="Description of Artificial Sequence: Synthetic peptide"
IANLTQS

SEQ ID NO: 3736 - protein, 7 aa, Artificial Sequence
  source: /note="Description of Artificial Sequence: Synthetic peptide"
IAPGVSS

SEQ ID NO: 3737 - protein, 7 aa, Artificial Sequence
  source: /note="Description of Artificial Sequence: Synthetic peptide"
IAPLTVS

SEQ ID NO: 3738 - protein, 7 aa, Artificial Sequence
  source: /note="Description of Artificial Sequence: Synthetic peptide"
IAPNKLT

SEQ ID NO: 3739 - protein, 7 aa, Artificial Sequence
  source: /note="Description of Artificial Sequence: Synthetic peptide"
IAQQHQI

SEQ ID NO: 3740 - protein, 7 aa, Artificial Sequence
  source: /note="Description of Artificial Sequence: Synthetic peptide"
IARAANF

SEQ ID NO: 3741 - protein, 7 aa, Artificial Sequence
  source: /note="Description of Artificial Sequence: Synthetic peptide"
IARGQPF

SEQ ID NO: 3742 - protein, 7 aa, Artificial Sequence
  source: /note="Description of Artificial Sequence: Synthetic peptide"
IARGYDN

SEQ ID NO: 3743 - protein, 7 aa, Artificial Sequence
  source: /note="Description of Artificial Sequence: Synthetic peptide"
IARHPTQ

SEQ ID NO: 3744 - protein, 7 aa, Artificial Sequence
  source: /note="Description of Artificial Sequence: Synthetic peptide"
IASEYRQ

SEQ ID NO: 3745 - protein, 7 aa, Artificial Sequence
  source: /note="Description of Artificial Sequence: Synthetic peptide"
IASSQLR

SEQ ID NO: 3746 - protein, 7 aa, Artificial Sequence
  source: /note="Description of Artificial Sequence: Synthetic peptide"
IATPESL

SEQ ID NO: 3747 - protein, 7 aa, Artificial Sequence
  source: /note="Description of Artificial Sequence: Synthetic peptide"
IAVHGRG

SEQ ID NO: 3748 - protein, 7 aa, Artificial Sequence
  source: /note="Description of Artificial Sequence: Synthetic peptide"
IDASKRF

SEQ ID NO: 3749 - protein, 7 aa, Artificial Sequence
  source: /note="Description of Artificial Sequence: Synthetic peptide"
IDGGSSD

SEQ ID NO: 3750 - protein, 7 aa, Artificial Sequence
  source: /note="Description of Artificial Sequence: Synthetic peptide"
IDGRVIG

SEQ ID NO: 3751 - protein, 7 aa, Artificial Sequence
  source: /note="Description of Artificial Sequence: Synthetic peptide"
IDKLLTF

SEQ ID NO: 3752 - protein, 7 aa, Artificial Sequence
  source: /note="Description of Artificial Sequence: Synthetic peptide"
IDLLVRS

SEQ ID NO: 3753 - protein, 7 aa, Artificial Sequence
  source: /note="Description of Artificial Sequence: Synthetic peptide"
IDNLHAG

SEQ ID NO: 3754 - protein, 7 aa, Artificial Sequence
  source: /note="Description of Artificial Sequence: Synthetic peptide"
IDNPVRP

SEQ ID NO: 3755 - protein, 7 aa, Artificial Sequence
  source: /note="Description of Artificial Sequence: Synthetic peptide"
IDNVKPV

SEQ ID NO: 3756 - protein, 7 aa, Artificial Sequence
  source: /note="Description of Artificial Sequence: Synthetic peptide"
IDSATTD

SEQ ID NO: 3757 - protein, 7 aa, Artificial Sequence
  source: /note="Description of Artificial Sequence: Synthetic peptide"
IDSHPSS

SEQ ID NO: 3758 - protein, 7 aa, Artificial Sequence
  source: /note="Description of Artificial Sequence: Synthetic peptide"
IDSSTNC

SEQ ID NO: 3759 - protein, 7 aa, Artificial Sequence
  source: /note="Description of Artificial Sequence: Synthetic peptide"
IDSYTPP

SEQ ID NO: 3760 - protein, 7 aa, Artificial Sequence
  source: /note="Description of Artificial Sequence: Synthetic peptide"
IDTISTS

SEQ ID NO: 3761 - protein, 7 aa, Artificial Sequence
  source: /note="Description of Artificial Sequence: Synthetic peptide"
IDTPRGT

SEQ ID NO: 3762 - protein, 7 aa, Artificial Sequence
  source: /note="Description of Artificial Sequence: Synthetic peptide"
IDTVPSR

SEQ ID NO: 3763 - protein, 7 aa, Artificial Sequence
  source: /note="Description of Artificial Sequence: Synthetic peptide"
IDVFTNA

SEQ ID NO: 3764 - protein, 7 aa, Artificial Sequence
  source: /note="Description of Artificial Sequence: Synthetic peptide"
IDYKSSS

SEQ ID NO: 3765 - protein, 7 aa, Artificial Sequence
  source: /note="Description of Artificial Sequence: Synthetic peptide"
IDYRAAA

SEQ ID NO: 3766 - protein, 7 aa, Artificial Sequence
  source: /note="Description of Artificial Sequence: Synthetic peptide"
IEASRVQ

SEQ ID NO: 3767 - protein, 7 aa, Artificial Sequence
  source: /note="Description of Artificial Sequence: Synthetic peptide"
IEKNLTL

SEQ ID NO: 3768 - protein, 7 aa, Artificial Sequence
  source: /note="Description of Artificial Sequence: Synthetic peptide"
IEKVNRV

SEQ ID NO: 3769 - protein, 7 aa, Artificial Sequence
  source: /note="Description of Artificial Sequence: Synthetic peptide"
IELASSC

SEQ ID NO: 3770 - protein, 7 aa, Artificial Sequence
  source: /note="Description of Artificial Sequence: Synthetic peptide"
IELKMTS

SEQ ID NO: 3771 - protein, 7 aa, Artificial Sequence
  source: /note="Description of Artificial Sequence: Synthetic peptide"
IEMLKTA

SEQ ID NO: 3772 - protein, 7 aa, Artificial Sequence
  source: /note="Description of Artificial Sequence: Synthetic peptide"
IEPKTHL

SEQ ID NO: 3773 - protein, 7 aa, Artificial Sequence
  source: /note="Description of Artificial Sequence: Synthetic peptide"
IEPSHYP

SEQ ID NO: 3774 - protein, 7 aa, Artificial Sequence
  source: /note="Description of Artificial Sequence: Synthetic peptide"
IERPTSP

SEQ ID NO: 3775 - protein, 7 aa, Artificial Sequence
  source: /note="Description of Artificial Sequence: Synthetic peptide"
IERTSSM

SEQ ID NO: 3776 - protein, 7 aa, Artificial Sequence
  source: /note="Description of Artificial Sequence: Synthetic peptide"
IESANLN

SEQ ID NO: 3777 - protein, 7 aa, Artificial Sequence
  source: /note="Description of Artificial Sequence: Synthetic peptide"
IESHLPR

SEQ ID NO: 3778 - protein, 7 aa, Artificial Sequence
  source: /note="Description of Artificial Sequence: Synthetic peptide"
IETAPDH

SEQ ID NO: 3779 - protein, 7 aa, Artificial Sequence
  source: /note="Description of Artificial Sequence: Synthetic peptide"
IETVNKT

SEQ ID NO: 3780 - protein, 7 aa, Artificial Sequence
  source: /note="Description of Artificial Sequence: Synthetic peptide"
IEVRTSI

SEQ ID NO: 3781 - protein, 7 aa, Artificial Sequence
  source: /note="Description of Artificial Sequence: Synthetic peptide"
IEWGWED

SEQ ID NO: 3782 - protein, 7 aa, Artificial Sequence
  source: /note="Description of Artificial Sequence: Synthetic peptide"
IFAGTGE

SEQ ID NO: 3783 - protein, 7 aa, Artificial Sequence
  source: /note="Description of Artificial Sequence: Synthetic peptide"
IFAGVLH

SEQ ID NO: 3784 - protein, 7 aa, Artificial Sequence
  source: /note="Description of Artificial Sequence: Synthetic peptide"
IFAVAAE

SEQ ID NO: 3785 - protein, 7 aa, Artificial Sequence
  source: /note="Description of Artificial Sequence: Synthetic peptide"
IFKPAMT

SEQ ID NO: 3786 - protein, 7 aa, Artificial Sequence
  source: /note="Description of Artificial Sequence: Synthetic peptide"
IFNNAAP

SEQ ID NO: 3787 - protein, 7 aa, Artificial Sequence
  source: /note="Description of Artificial Sequence: Synthetic peptide"
IFPLTGS

SEQ ID NO: 3788 - protein, 7 aa, Artificial Sequence
  source: /note="Description of Artificial Sequence: Synthetic peptide"
IFRDGVS

SEQ ID NO: 3789 - protein, 7 aa, Artificial Sequence
  source: /note="Description of Artificial Sequence: Synthetic peptide"
IFSAGPL

SEQ ID NO: 3790 - protein, 7 aa, Artificial Sequence
  source: /note="Description of Artificial Sequence: Synthetic peptide"
IFSHVGS

SEQ ID NO: 3791 - protein, 7 aa, Artificial Sequence
  source: /note="Description of Artificial Sequence: Synthetic peptide"
IFVPEPG

SEQ ID NO: 3792 - protein, 7 aa, Artificial Sequence
  source: /note="Description of Artificial Sequence: Synthetic peptide"
IGAGASM

SEQ ID NO: 3793 - protein, 7 aa, Artificial Sequence
  source: /note="Description of Artificial Sequence: Synthetic peptide"
IGAIADV

SEQ ID NO: 3794 - protein, 7 aa, Artificial Sequence
  source: /note="Description of Artificial Sequence: Synthetic peptide"
IGALVSP

SEQ ID NO: 3795 - protein, 7 aa, Artificial Sequence
  source: /note="Description of Artificial Sequence: Synthetic peptide"
IGAMSSA

SEQ ID NO: 3796 - protein, 7 aa, Artificial Sequence
  source: /note="Description of Artificial Sequence: Synthetic peptide"
IGAPYNS

SEQ ID NO: 3797 - protein, 7 aa, Artificial Sequence
  source: /note="Description of Artificial Sequence: Synthetic peptide"
IGASLLG

SEQ ID NO: 3798 - protein, 7 aa, Artificial Sequence
  source: /note="Description of Artificial Sequence: Synthetic peptide"
IGERRPV

SEQ ID NO: 3799 - protein, 7 aa, Artificial Sequence
  source: /note="Description of Artificial Sequence: Synthetic peptide"
IGGFVKA

SEQ ID NO: 3800 - protein, 7 aa, Artificial Sequence
  source: /note="Description of Artificial Sequence: Synthetic peptide"
IGGTMTH

SEQ ID NO: 3801 - protein, 7 aa, Artificial Sequence
  source: /note="Description of Artificial Sequence: Synthetic peptide"
IGHGHPN

SEQ ID NO: 3802 - protein, 7 aa, Artificial Sequence
  source: /note="Description of Artificial Sequence: Synthetic peptide"
IGHSDNT

SEQ ID NO: 3803 - protein, 7 aa, Artificial Sequence
  source: /note="Description of Artificial Sequence: Synthetic peptide"
IGKLLNT

SEQ ID NO: 3804 - protein, 7 aa, Artificial Sequence
  source: /note="Description of Artificial Sequence: Synthetic peptide"
IGKNHSS

SEQ ID NO: 3805 - protein, 7 aa, Artificial Sequence
  source: /note="Description of Artificial Sequence: Synthetic peptide"
IGKPGYL

SEQ ID NO: 3806 - protein, 7 aa, Artificial Sequence
  source: /note="Description of Artificial Sequence: Synthetic peptide"
IGLAKTL

SEQ ID NO: 3807 - protein, 7 aa, Artificial Sequence
  source: /note="Description of Artificial Sequence: Synthetic peptide"
IGLTSQV

SEQ ID NO: 3808 - protein, 7 aa, Artificial Sequence
  source: /note="Description of Artificial Sequence: Synthetic peptide"
IGMHSQS

SEQ ID NO: 3809 - protein, 7 aa, Artificial Sequence
  source: /note="Description of Artificial Sequence: Synthetic peptide"
IGNSRLG

SEQ ID NO: 3810 - protein, 7 aa, Artificial Sequence
  source: /note="Description of Artificial Sequence: Synthetic peptide"
IGQFSRV

SEQ ID NO: 3811 - protein, 7 aa, Artificial Sequence
  source: /note="Description of Artificial Sequence: Synthetic peptide"
IGRDMHA

SEQ ID NO: 3812 - protein, 7 aa, Artificial Sequence
  source: /note="Description of Artificial Sequence: Synthetic peptide"
IGRPSYE

SEQ ID NO: 3813 - protein, 7 aa, Artificial Sequence
  source: /note="Description of Artificial Sequence: Synthetic peptide"
IGRQTGI

SEQ ID NO: 3814 - protein, 7 aa, Artificial Sequence
  source: /note="Description of Artificial Sequence: Synthetic peptide"
IGRSEGT

SEQ ID NO: 3815 - protein, 7 aa, Artificial Sequence
  source: /note="Description of Artificial Sequence: Synthetic peptide"
IGRSPSP

SEQ ID NO: 3816 - protein, 7 aa, Artificial Sequence
  source: /note="Description of Artificial Sequence: Synthetic peptide"
IGSHHSN

SEQ ID NO: 3817 - protein, 7 aa, Artificial Sequence
  source: /note="Description of Artificial Sequence: Synthetic peptide"
IGSNALS

SEQ ID NO: 3818 - protein, 7 aa, Artificial Sequence
  source: /note="Description of Artificial Sequence: Synthetic peptide"
IGSTMYQ

SEQ ID NO: 3819 - protein, 7 aa, Artificial Sequence
  source: /note="Description of Artificial Sequence: Synthetic peptide"
IGTSTYV

SEQ ID NO: 3820 - protein, 7 aa, Artificial Sequence
  source: /note="Description of Artificial Sequence: Synthetic peptide"
IGTTMKG

SEQ ID NO: 3821 - protein, 7 aa, Artificial Sequence
  source: /note="Description of Artificial Sequence: Synthetic peptide"
IGVKTLP

SEQ ID NO: 3822 - protein, 7 aa, Artificial Sequence
  source: /note="Description of Artificial Sequence: Synthetic peptide"
IGVLHLP

SEQ ID NO: 3823 - protein, 7 aa, Artificial Sequence
  source: /note="Description of Artificial Sequence: Synthetic peptide"
IHAASTD

SEQ ID NO: 3824 - protein, 7 aa, Artificial Sequence
  source: /note="Description of Artificial Sequence: Synthetic peptide"
IHANWID

SEQ ID NO: 3825 - protein, 7 aa, Artificial Sequence
  source: /note="Description of Artificial Sequence: Synthetic peptide"
IHDFTSV

SEQ ID NO: 3826 - protein, 7 aa, Artificial Sequence
  source: /note="Description of Artificial Sequence: Synthetic peptide"
IHELSGL

SEQ ID NO: 3827 - protein, 7 aa, Artificial Sequence
  source: /note="Description of Artificial Sequence: Synthetic peptide"
IHFQSSQ

SEQ ID NO: 3828 - protein, 7 aa, Artificial Sequence
  source: /note="Description of Artificial Sequence: Synthetic peptide"
IHGGSYT

SEQ ID NO: 3829 - protein, 7 aa, Artificial Sequence
  source: /note="Description of Artificial Sequence: Synthetic peptide"
IHGSTDR

SEQ ID NO: 3830 - protein, 7 aa, Artificial Sequence
  source: /note="Description of Artificial Sequence: Synthetic peptide"
IHHDPAS

SEQ ID NO: 3831 - protein, 7 aa, Artificial Sequence
  source: /note="Description of Artificial Sequence: Synthetic peptide"
IHLPTSL

SEQ ID NO: 3832 - protein, 7 aa, Artificial Sequence
  source: /note="Description of Artificial Sequence: Synthetic peptide"
IHNRPLM

SEQ ID NO: 3833 - protein, 7 aa, Artificial Sequence
  source: /note="Description of Artificial Sequence: Synthetic peptide"
IHNTLAA

SEQ ID NO: 3834 - protein, 7 aa, Artificial Sequence
  source: /note="Description of Artificial Sequence: Synthetic peptide"
IHNVVVQ

SEQ ID NO: 3835 - protein, 7 aa, Artificial Sequence
  source: /note="Description of Artificial Sequence: Synthetic peptide"
IHPGRVA

SEQ ID NO: 3836 - protein, 7 aa, Artificial Sequence
  source: /note="Description of Artificial Sequence: Synthetic peptide"
IHPTRQG

SEQ ID NO: 3837 - protein, 7 aa, Artificial Sequence
  source: /note="Description of Artificial Sequence: Synthetic peptide"
IHQAGQP

SEQ ID NO: 3838 - protein, 7 aa, Artificial Sequence
  source: /note="Description of Artificial Sequence: Synthetic peptide"
IHQSSES

SEQ ID NO: 3839 - protein, 7 aa, Artificial Sequence
  source: /note="Description of Artificial Sequence: Synthetic peptide"
IHRVITS

SEQ ID NO: 3840 - protein, 7 aa, Artificial Sequence
  source: /note="Description of Artificial Sequence: Synthetic peptide"
IHSEGSL

SEQ ID NO: 3841 - protein, 7 aa, Artificial Sequence
  source: /note="Description of Artificial Sequence: Synthetic peptide"
IHSLQQE

SEQ ID NO: 3842 - protein, 7 aa, Artificial Sequence
  source: /note="Description of Artificial Sequence: Synthetic peptide"
IHSSIDF

SEQ ID NO: 3843 - protein, 7 aa, Artificial Sequence
  source: /note="Description of Artificial Sequence: Synthetic peptide"
IHSSPAA

SEQ ID NO: 3844 - protein, 7 aa, Artificial Sequence
  source: /note="Description of Artificial Sequence: Synthetic peptide"
IHSYDRS

SEQ ID NO: 3845 - protein, 7 aa, Artificial Sequence
  source: /note="Description of Artificial Sequence: Synthetic peptide"
IHTAVEL

SEQ ID NO: 3846 - protein, 7 aa, Artificial Sequence
  source: /note="Description of Artificial Sequence: Synthetic peptide"
IHTGNYM

SEQ ID NO: 3847 - protein, 7 aa, Artificial Sequence
  source: /note="Description of Artificial Sequence: Synthetic peptide"
IHTNAPP

SEQ ID NO: 3848 - protein, 7 aa, Artificial Sequence
  source: /note="Description of Artificial Sequence: Synthetic peptide"
IHTTQRT

SEQ ID NO: 3849 - protein, 7 aa, Artificial Sequence
  source: /note="Description of Artificial Sequence: Synthetic peptide"
IIAEHPA

SEQ ID NO: 3850 - protein, 7 aa, Artificial Sequence
  source: /note="Description of Artificial Sequence: Synthetic peptide"
IIARLPP

SEQ ID NO: 3851 - protein, 7 aa, Artificial Sequence
  source: /note="Description of Artificial Sequence: Synthetic peptide"
IIDNHIR

SEQ ID NO: 3852 - protein, 7 aa, Artificial Sequence
  source: /note="Description of Artificial Sequence: Synthetic peptide"
IIFQDMP

SEQ ID NO: 3853 - protein, 7 aa, Artificial Sequence
  source: /note="Description of Artificial Sequence: Synthetic peptide"
IIGANEP

SEQ ID NO: 3854 - protein, 7 aa, Artificial Sequence
  source: /note="Description of Artificial Sequence: Synthetic peptide"
IIGKGTG

SEQ ID NO: 3855 - protein, 7 aa, Artificial Sequence
  source: /note="Description of Artificial Sequence: Synthetic peptide"
IIHDTHN

SEQ ID NO: 3856 - protein, 7 aa, Artificial Sequence
  source: /note="Description of Artificial Sequence: Synthetic peptide"
IIHEARP

SEQ ID NO: 3857 - protein, 7 aa, Artificial Sequence
  source: /note="Description of Artificial Sequence: Synthetic peptide"
IIRDSQL

SEQ ID NO: 3858 - protein, 7 aa, Artificial Sequence
  source: /note="Description of Artificial Sequence: Synthetic peptide"
IISLTTS

SEQ ID NO: 3859 - protein, 7 aa, Artificial Sequence
  source: /note="Description of Artificial Sequence: Synthetic peptide"
IKDAGSP

SEQ ID NO: 3860 - protein, 7 aa, Artificial Sequence
  source: /note="Description of Artificial Sequence: Synthetic peptide"
IKDAQPW

SEQ ID NO: 3861 - protein, 7 aa, Artificial Sequence
  source: /note="Description of Artificial Sequence: Synthetic peptide"
IKDQWNM

SEQ ID NO: 3862 - protein, 7 aa, Artificial Sequence
  source: /note="Description of Artificial Sequence: Synthetic peptide"
IKFPTAD

SEQ ID NO: 3863 - protein, 7 aa, Artificial Sequence
  source: /note="Description of Artificial Sequence: Synthetic peptide"
IKIEDPR

SEQ ID NO: 3864 - protein, 7 aa, Artificial Sequence
  source: /note="Description of Artificial Sequence: Synthetic peptide"
IKMAQGF

SEQ ID NO: 3865 - protein, 7 aa, Artificial Sequence
  source: /note="Description of Artificial Sequence: Synthetic peptide"
IKNLASH

SEQ ID NO: 3866 - protein, 7 aa, Artificial Sequence
  source: /note="Description of Artificial Sequence: Synthetic peptide"
IKPIGGV

SEQ ID NO: 3867 - protein, 7 aa, Artificial Sequence
  source: /note="Description of Artificial Sequence: Synthetic peptide"
IKPMSGT

SEQ ID NO: 3868 - protein, 7 aa, Artificial Sequence
  source: /note="Description of Artificial Sequence: Synthetic peptide"
IKQPLHN

SEQ ID NO: 3869 - protein, 7 aa, Artificial Sequence
  source: /note="Description of Artificial Sequence: Synthetic peptide"
IKRTLSD

SEQ ID NO: 3870 - protein, 7 aa, Artificial Sequence
  source: /note="Description of Artificial Sequence: Synthetic peptide"
IKSDDGS

SEQ ID NO: 3871 - protein, 7 aa, Artificial Sequence
  source: /note="Description of Artificial Sequence: Synthetic peptide"
IKSEGSL

SEQ ID NO: 3872 - protein, 7 aa, Artificial Sequence
  source: /note="Description of Artificial Sequence: Synthetic peptide"
IKTEWSH

SEQ ID NO: 3873 - protein, 7 aa, Artificial Sequence
  source: /note="Description of Artificial Sequence: Synthetic peptide"
IKTFTSS

SEQ ID NO: 3874 - protein, 7 aa, Artificial Sequence
  source: /note="Description of Artificial Sequence: Synthetic peptide"
ILDFLPD

SEQ ID NO: 3875 - protein, 7 aa, Artificial Sequence
  source: /note="Description of Artificial Sequence: Synthetic peptide"
ILGGLDR

SEQ ID NO: 3876 - protein, 7 aa, Artificial Sequence
  source: /note="Description of Artificial Sequence: Synthetic peptide"
ILGNTRE

SEQ ID NO: 3877 - protein, 7 aa, Artificial Sequence
  source: /note="Description of Artificial Sequence: Synthetic peptide"
ILGRSAA

SEQ ID NO: 3878 - protein, 7 aa, Artificial Sequence
  source: /note="Description of Artificial Sequence: Synthetic peptide"
ILGTRPL

SEQ ID NO: 3879 - protein, 7 aa, Artificial Sequence
  source: /note="Description of Artificial Sequence: Synthetic peptide"
ILGTSVQ

SEQ ID NO: 3880 - protein, 7 aa, Artificial Sequence
  source: /note="Description of Artificial Sequence: Synthetic peptide"
ILHGRGA

SEQ ID NO: 3881 - protein, 7 aa, Artificial Sequence
  source: /note="Description of Artificial Sequence: Synthetic peptide"
ILHLVRL

SEQ ID NO: 3882 - protein, 7 aa, Artificial Sequence
  source: /note="Description of Artificial Sequence: Synthetic peptide"
ILHSPTV

SEQ ID NO: 3883 - protein, 7 aa, Artificial Sequence
  source: /note="Description of Artificial Sequence: Synthetic peptide"
ILHVEMR

SEQ ID NO: 3884 - protein, 7 aa, Artificial Sequence
  source: /note="Description of Artificial Sequence: Synthetic peptide"
ILKHIGL

SEQ ID NO: 3885 - protein, 7 aa, Artificial Sequence
  source: /note="Description of Artificial Sequence: Synthetic peptide"
ILKQQAN

SEQ ID NO: 3886 - protein, 7 aa, Artificial Sequence
  source: /note="Description of Artificial Sequence: Synthetic peptide"
ILLDDES

SEQ ID NO: 3887 - protein, 7 aa, Artificial Sequence
  source: /note="Description of Artificial Sequence: Synthetic peptide"
ILLHPRG

SEQ ID NO: 3888 - protein, 7 aa, Artificial Sequence
  source: /note="Description of Artificial Sequence: Synthetic peptide"
ILLMGTS

SEQ ID NO: 3889 - protein, 7 aa, Artificial Sequence
  source: /note="Description of Artificial Sequence: Synthetic peptide"
ILLRKDP

SEQ ID NO: 3890 - protein, 7 aa, Artificial Sequence
  source: /note="Description of Artificial Sequence: Synthetic peptide"
ILLSEGH

SEQ ID NO: 3891 - protein, 7 aa, Artificial Sequence
  source: /note="Description of Artificial Sequence: Synthetic peptide"
ILLSIRD

SEQ ID NO: 3892 - protein, 7 aa, Artificial Sequence
  source: /note="Description of Artificial Sequence: Synthetic peptide"
ILMSAQS

SEQ ID NO: 3893 - protein, 7 aa, Artificial Sequence
  source: /note="Description of Artificial Sequence: Synthetic peptide"
ILMVDDT

SEQ ID NO: 3894 - protein, 7 aa, Artificial Sequence
  source: /note="Description of Artificial Sequence: Synthetic peptide"
ILNDRSA

SEQ ID NO: 3895 - protein, 7 aa, Artificial Sequence
  source: /note="Description of Artificial Sequence: Synthetic peptide"
ILNHGKG

SEQ ID NO: 3896 - protein, 7 aa, Artificial Sequence
  source: /note="Description of Artificial Sequence: Synthetic peptide"
ILNKPLS

SEQ ID NO: 3897 - protein, 7 aa, Artificial Sequence
  source: /note="Description of Artificial Sequence: Synthetic peptide"
ILPHTTT

SEQ ID NO: 3898 - protein, 7 aa, Artificial Sequence
  source: /note="Description of Artificial Sequence: Synthetic peptide"
ILPNSMP

SEQ ID NO: 3899 - protein, 7 aa, Artificial Sequence
  source: /note="Description of Artificial Sequence: Synthetic peptide"
ILPNTGP

SEQ ID NO: 3900 - protein, 7 aa, Artificial Sequence
  source: /note="Description of Artificial Sequence: Synthetic peptide"
ILPPITD

SEQ ID NO: 3901 - protein, 7 aa, Artificial Sequence
  source: /note="Description of Artificial Sequence: Synthetic peptide"
ILPSLTA

SEQ ID NO: 3902 - protein, 7 aa, Artificial Sequence
  source: /note="Description of Artificial Sequence: Synthetic peptide"
ILPSSFS

SEQ ID NO: 3903 - protein, 7 aa, Artificial Sequence
  source: /note="Description of Artificial Sequence: Synthetic peptide"
ILPYSSP

SEQ ID NO: 3904 - protein, 7 aa, Artificial Sequence
  source: /note="Description of Artificial Sequence: Synthetic peptide"
ILQAHQT

SEQ ID NO: 3905 - protein, 7 aa, Artificial Sequence
  source: /note="Description of Artificial Sequence: Synthetic peptide"
ILQSEFT

SEQ ID NO: 3906 - protein, 7 aa, Artificial Sequence
  source: /note="Description of Artificial Sequence: Synthetic peptide"
ILRGDGP

SEQ ID NO: 3907 - protein, 7 aa, Artificial Sequence
  source: /note="Description of Artificial Sequence: Synthetic peptide"
ILRGNGS

SEQ ID NO: 3908 - protein, 7 aa, Artificial Sequence
  source: /note="Description of Artificial Sequence: Synthetic peptide"
ILRTEYK

SEQ ID NO: 3909 - protein, 7 aa, Artificial Sequence
  source: /note="Description of Artificial Sequence: Synthetic peptide"
ILRVHTP

SEQ ID NO: 3910 - protein, 7 aa, Artificial Sequence
  source: /note="Description of Artificial Sequence: Synthetic peptide"
ILSERTP

SEQ ID NO: 3911 - protein, 7 aa, Artificial Sequence
  source: /note="Description of Artificial Sequence: Synthetic peptide"
ILSMDTA

SEQ ID NO: 3912 - protein, 7 aa, Artificial Sequence
  source: /note="Description of Artificial Sequence: Synthetic peptide"
ILTGSHA

SEQ ID NO: 3913 - protein, 7 aa, Artificial Sequence
  source: /note="Description of Artificial Sequence: Synthetic peptide"
ILTKDVS

SEQ ID NO: 3914 - protein, 7 aa, Artificial Sequence
  source: /note="Description of Artificial Sequence: Synthetic peptide"
ILTKSPT

SEQ ID NO: 3915 - protein, 7 aa, Artificial Sequence
  source: /note="Description of Artificial Sequence: Synthetic peptide"
ILTRVSP

SEQ ID NO: 3916 - protein, 7 aa, Artificial Sequence
  source: /note="Description of Artificial Sequence: Synthetic peptide"
ILTSVTK

SEQ ID NO: 3917 - protein, 7 aa, Artificial Sequence
  source: /note="Description of Artificial Sequence: Synthetic peptide"
ILVSELR

SEQ ID NO: 3918 - protein, 7 aa, Artificial Sequence
  source: /note="Description of Artificial Sequence: Synthetic peptide"
IMAPTTQ

SEQ ID NO: 3919 - protein, 7 aa, Artificial Sequence
  source: /note="Description of Artificial Sequence: Synthetic peptide"
IMDAHIA

SEQ ID NO: 3920 - protein, 7 aa, Artificial Sequence
  source: /note="Description of Artificial Sequence: Synthetic peptide"
IMDVKFH

SEQ ID NO: 3921 - protein, 7 aa, Artificial Sequence
  source: /note="Description of Artificial Sequence: Synthetic peptide"
IMEVRGP

SEQ ID NO: 3922 - protein, 7 aa, Artificial Sequence
  source: /note="Description of Artificial Sequence: Synthetic peptide"
IMGEPRK

SEQ ID NO: 3923 - protein, 7 aa, Artificial Sequence
  source: /note="Description of Artificial Sequence: Synthetic peptide"
IMGSAPS

SEQ ID NO: 3924 - protein, 7 aa, Artificial Sequence
  source: /note="Description of Artificial Sequence: Synthetic peptide"
IMGSAPY

SEQ ID NO: 3925 - protein, 7 aa, Artificial Sequence
  source: /note="Description of Artificial Sequence: Synthetic peptide"
IMLPDAD

SEQ ID NO: 3926 - protein, 7 aa, Artificial Sequence
  source: /note="Description of Artificial Sequence: Synthetic peptide"
IMNANRA

SEQ ID NO: 3927 - protein, 7 aa, Artificial Sequence
  source: /note="Description of Artificial Sequence: Synthetic peptide"
IMNRISA

SEQ ID NO: 3928 - protein, 7 aa, Artificial Sequence
  source: /note="Description of Artificial Sequence: Synthetic peptide"
IMPNSSD

SEQ ID NO: 3929 - protein, 7 aa, Artificial Sequence
  source: /note="Description of Artificial Sequence: Synthetic peptide"
IMPSSTN

SEQ ID NO: 3930 - protein, 7 aa, Artificial Sequence
  source: /note="Description of Artificial Sequence: Synthetic peptide"
IMRPSDP

SEQ ID NO: 3931 - protein, 7 aa, Artificial Sequence
  source: /note="Description of Artificial Sequence: Synthetic peptide"
IMSTTTL

SEQ ID NO: 3932 - protein, 7 aa, Artificial Sequence
  source: /note="Description of Artificial Sequence: Synthetic peptide"
IMTMTPS

SEQ ID NO: 3933 - protein, 7 aa, Artificial Sequence
  source: /note="Description of Artificial Sequence: Synthetic peptide"
INAQTHL

SEQ ID NO: 3934 - protein, 7 aa, Artificial Sequence
  source: /note="Description of Artificial Sequence: Synthetic peptide"
INAYHVP

SEQ ID NO: 3935 - protein, 7 aa, Artificial Sequence
  source: /note="Description of Artificial Sequence: Synthetic peptide"
INEHVRL

SEQ ID NO: 3936 - protein, 7 aa, Artificial Sequence
  source: /note="Description of Artificial Sequence: Synthetic peptide"
INESNRG

SEQ ID NO: 3937 - protein, 7 aa, Artificial Sequence
  source: /note="Description of Artificial Sequence: Synthetic peptide"
INGSDRQ

SEQ ID NO: 3938 - protein, 7 aa, Artificial Sequence
  source: /note="Description of Artificial Sequence: Synthetic peptide"
INGTAKH

SEQ ID NO: 3939 - protein, 7 aa, Artificial Sequence
  source: /note="Description of Artificial Sequence: Synthetic peptide"
INHSSMG

SEQ ID NO: 3940 - protein, 7 aa, Artificial Sequence
  source: /note="Description of Artificial Sequence: Synthetic peptide"
INIASAG

SEQ ID NO: 3941 - protein, 7 aa, Artificial Sequence
  source: /note="Description of Artificial Sequence: Synthetic peptide"
INKPSNG

SEQ ID NO: 3942 - protein, 7 aa, Artificial Sequence
  source: /note="Description of Artificial Sequence: Synthetic peptide"
INLHVKS

SEQ ID NO: 3943 - protein, 7 aa, Artificial Sequence
  source: /note="Description of Artificial Sequence: Synthetic peptide"
INLRPAA

SEQ ID NO: 3944 - protein, 7 aa, Artificial Sequence
  source: /note="Description of Artificial Sequence: Synthetic peptide"
INLTPRF

SEQ ID NO: 3945 - protein, 7 aa, Artificial Sequence
  source: /note="Description of Artificial Sequence: Synthetic peptide"
INMAGVH

SEQ ID NO: 3946 - protein, 7 aa, Artificial Sequence
  source: /note="Description of Artificial Sequence: Synthetic peptide"
INMSTGS

SEQ ID NO: 3947 - protein, 7 aa, Artificial Sequence
  source: /note="Description of Artificial Sequence: Synthetic peptide"
INPQNRT

SEQ ID NO: 3948 - protein, 7 aa, Artificial Sequence
  source: /note="Description of Artificial Sequence: Synthetic peptide"
INRGVNS

SEQ ID NO: 3949 - protein, 7 aa, Artificial Sequence
  source: /note="Description of Artificial Sequence: Synthetic peptide"
INRTTME

SEQ ID NO: 3950 - protein, 7 aa, Artificial Sequence
  source: /note="Description of Artificial Sequence: Synthetic peptide"
INRVTAE

SEQ ID NO: 3951 - protein, 7 aa, Artificial Sequence
  source: /note="Description of Artificial Sequence: Synthetic peptide"
INSAAVL

SEQ ID NO: 3952 - protein, 7 aa, Artificial Sequence
  source: /note="Description of Artificial Sequence: Synthetic peptide"
INSGRSN

SEQ ID NO: 3953 - protein, 7 aa, Artificial Sequence
  source: /note="Description of Artificial Sequence: Synthetic peptide"
INSHTLQ

SEQ ID NO: 3954 - protein, 7 aa, Artificial Sequence
  source: /note="Description of Artificial Sequence: Synthetic peptide"
INSQKPP

SEQ ID NO: 3955 - protein, 7 aa, Artificial Sequence
  source: /note="Description of Artificial Sequence: Synthetic peptide"
INSRNGV

SEQ ID NO: 3956 - protein, 7 aa, Artificial Sequence
  source: /note="Description of Artificial Sequence: Synthetic peptide"
INTLGNS

SEQ ID NO: 3957 - protein, 7 aa, Artificial Sequence
  source: /note="Description of Artificial Sequence: Synthetic peptide"
INTPGYT

SEQ ID NO: 3958 - protein, 7 aa, Artificial Sequence
  source: /note="Description of Artificial Sequence: Synthetic peptide"
INVLRSA

SEQ ID NO: 3959 - protein, 7 aa, Artificial Sequence
  source: /note="Description of Artificial Sequence: Synthetic peptide"
IPANSQV

SEQ ID NO: 3960 - protein, 7 aa, Artificial Sequence
  source: /note="Description of Artificial Sequence: Synthetic peptide"
IPASSSW

SEQ ID NO: 3961 - protein, 7 aa, Artificial Sequence
  source: /note="Description of Artificial Sequence: Synthetic peptide"
IPDLKRT

SEQ ID NO: 3962 - protein, 7 aa, Artificial Sequence
  source: /note="Description of Artificial Sequence: Synthetic peptide"
IPEGLPL

SEQ ID NO: 3963 - protein, 7 aa, Artificial Sequence
  source: /note="Description of Artificial Sequence: Synthetic peptide"
IPGFPKS

SEQ ID NO: 3964 - protein, 7 aa, Artificial Sequence
  source: /note="Description of Artificial Sequence: Synthetic peptide"
IPGTELQ

SEQ ID NO: 3965 - protein, 7 aa, Artificial Sequence
  source: /note="Description of Artificial Sequence: Synthetic peptide"
IPHNQAY

SEQ ID NO: 3966 - protein, 7 aa, Artificial Sequence
  source: /note="Description of Artificial Sequence: Synthetic peptide"
IPHPANS

SEQ ID NO: 3967 - protein, 7 aa, Artificial Sequence
  source: /note="Description of Artificial Sequence: Synthetic peptide"
IPHTQTQ

SEQ ID NO: 3968 - protein, 7 aa, Artificial Sequence
  source: /note="Description of Artificial Sequence: Synthetic peptide"
IPIGYKT

SEQ ID NO: 3969 - protein, 7 aa, Artificial Sequence
  source: /note="Description of Artificial Sequence: Synthetic peptide"
IPIKNGM

SEQ ID NO: 3970 - protein, 7 aa, Artificial Sequence
  source: /note="Description of Artificial Sequence: Synthetic peptide"
IPIPVAM

SEQ ID NO: 3971 - protein, 7 aa, Artificial Sequence
  source: /note="Description of Artificial Sequence: Synthetic peptide"
IPKTRPE

SEQ ID NO: 3972 - protein, 7 aa, Artificial Sequence
  source: /note="Description of Artificial Sequence: Synthetic peptide"
IPLKAYG

SEQ ID NO: 3973 - protein, 7 aa, Artificial Sequence
  source: /note="Description of Artificial Sequence: Synthetic peptide"
IPLPNDG

SEQ ID NO: 3974 - protein, 7 aa, Artificial Sequence
  source: /note="Description of Artificial Sequence: Synthetic peptide"
IPLTSHT

SEQ ID NO: 3975 - protein, 7 aa, Artificial Sequence
  source: /note="Description of Artificial Sequence: Synthetic peptide"
IPMSAAK

SEQ ID NO: 3976 - protein, 7 aa, Artificial Sequence
  source: /note="Description of Artificial Sequence: Synthetic peptide"
IPNFVHS

SEQ ID NO: 3977 - protein, 7 aa, Artificial Sequence
  source: /note="Description of Artificial Sequence: Synthetic peptide"
IPNHKSI

SEQ ID NO: 3978 - protein, 7 aa, Artificial Sequence
  source: /note="Description of Artificial Sequence: Synthetic peptide"
IPNKTPF

SEQ ID NO: 3979 - protein, 7 aa, Artificial Sequence
  source: /note="Description of Artificial Sequence: Synthetic peptide"
IPNLKIS

SEQ ID NO: 3980 - protein, 7 aa, Artificial Sequence
  source: /note="Description of Artificial Sequence: Synthetic peptide"
IPNPPMA

SEQ ID NO: 3981 - protein, 7 aa, Artificial Sequence
  source: /note="Description of Artificial Sequence: Synthetic peptide"
IPNRHLS

SEQ ID NO: 3982 - protein, 7 aa, Artificial Sequence
  source: /note="Description of Artificial Sequence: Synthetic peptide"
IPNVSHQ

SEQ ID NO: 3983 - protein, 7 aa, Artificial Sequence
  source: /note="Description of Artificial Sequence: Synthetic peptide"
IPNYAVS

SEQ ID NO: 3984 - protein, 7 aa, Artificial Sequence
  source: /note="Description of Artificial Sequence: Synthetic peptide"
IPPRSNS

SEQ ID NO: 3985 - protein, 7 aa, Artificial Sequence
  source: /note="Description of Artificial Sequence: Synthetic peptide"
IPQASLM

SEQ ID NO: 3986 - protein, 7 aa, Artificial Sequence
  source: /note="Description of Artificial Sequence: Synthetic peptide"
IPQNRIL

SEQ ID NO: 3987 - protein, 7 aa, Artificial Sequence
  source: /note="Description of Artificial Sequence: Synthetic peptide"
IPQPVHL

SEQ ID NO: 3988 - protein, 7 aa, Artificial Sequence
  source: /note="Description of Artificial Sequence: Synthetic peptide"
IPRADAR

SEQ ID NO: 3989 - protein, 7 aa, Artificial Sequence
  source: /note="Description of Artificial Sequence: Synthetic peptide"
IPRFSTM

SEQ ID NO: 3990 - protein, 7 aa, Artificial Sequence
  source: /note="Description of Artificial Sequence: Synthetic peptide"
IPRPSVH

SEQ ID NO: 3991 - protein, 7 aa, Artificial Sequence
  source: /note="Description of Artificial Sequence: Synthetic peptide"
IPRSNIS

SEQ ID NO: 3992 - protein, 7 aa, Artificial Sequence
  source: /note="Description of Artificial Sequence: Synthetic peptide"
IPRTALQ

SEQ ID NO: 3993 - protein, 7 aa, Artificial Sequence
  source: /note="Description of Artificial Sequence: Synthetic peptide"
IPSFKRE

SEQ ID NO: 3994 - protein, 7 aa, Artificial Sequence
  source: /note="Description of Artificial Sequence: Synthetic peptide"
IPSFSKP

SEQ ID NO: 3995 - protein, 7 aa, Artificial Sequence
  source: /note="Description of Artificial Sequence: Synthetic peptide"
IPSNCKP

SEQ ID NO: 3996 - protein, 7 aa, Artificial Sequence
  source: /note="Description of Artificial Sequence: Synthetic peptide"
IPSPSHE

SEQ ID NO: 3997 - protein, 7 aa, Artificial Sequence
  source: /note="Description of Artificial Sequence: Synthetic peptide"
IPSRYAM

SEQ ID NO: 3998 - protein, 7 aa, Artificial Sequence
  source: /note="Description of Artificial Sequence: Synthetic peptide"
IPSVPVS

SEQ ID NO: 3999 - protein, 7 aa, Artificial Sequence
  source: /note="Description of Artificial Sequence: Synthetic peptide"
IPTISHG

SEQ ID NO: 4000 - protein, 7 aa, Artificial Sequence
  source: /note="Description of Artificial Sequence: Synthetic peptide"
IPTLPAM

SEQ ID NO: 4001 - protein, 7 aa, Artificial Sequence
  source: /note="Description of Artificial Sequence: Synthetic peptide"
IPTPNNV

SEQ ID NO: 4002 - protein, 7 aa, Artificial Sequence
  source: /note="Description of Artificial Sequence: Synthetic peptide"
IPTTALG

SEQ ID NO: 4003 - protein, 7 aa, Artificial Sequence
  source: /note="Description of Artificial Sequence: Synthetic peptide"
IPVFRSE

SEQ ID NO: 4004 - protein, 7 aa, Artificial Sequence
  source: /note="Description of Artificial Sequence: Synthetic peptide"
IPVGQYN

SEQ ID NO: 4005 - protein, 7 aa, Artificial Sequence
  source: /note="Description of Artificial Sequence: Synthetic peptide"
IPVRLTQ

SEQ ID NO: 4006 - protein, 7 aa, Artificial Sequence
  source: /note="Description of Artificial Sequence: Synthetic peptide"
IPYMLDP

SEQ ID NO: 4007 - protein, 7 aa, Artificial Sequence
  source: /note="Description of Artificial Sequence: Synthetic peptide"
IQAVSSL

SEQ ID NO: 4008 - protein, 7 aa, Artificial Sequence
  source: /note="Description of Artificial Sequence: Synthetic peptide"
IQDETVS

SEQ ID NO: 4009 - protein, 7 aa, Artificial Sequence
  source: /note="Description of Artificial Sequence: Synthetic peptide"
IQESARM

SEQ ID NO: 4010 - protein, 7 aa, Artificial Sequence
  source: /note="Description of Artificial Sequence: Synthetic peptide"
IQFRSAT

SEQ ID NO: 4011 - protein, 7 aa, Artificial Sequence
  source: /note="Description of Artificial Sequence: Synthetic peptide"
IQFVPVD

SEQ ID NO: 4012 - protein, 7 aa, Artificial Sequence
  source: /note="Description of Artificial Sequence: Synthetic peptide"
IQGLSAL

SEQ ID NO: 4013 - protein, 7 aa, Artificial Sequence
  source: /note="Description of Artificial Sequence: Synthetic peptide"
IQGRLTT

SEQ ID NO: 4014 - protein, 7 aa, Artificial Sequence
  source: /note="Description of Artificial Sequence: Synthetic peptide"
IQHQPLT

SEQ ID NO: 4015 - protein, 7 aa, Artificial Sequence
  source: /note="Description of Artificial Sequence: Synthetic peptide"
IQIKSLN

SEQ ID NO: 4016 - protein, 7 aa, Artificial Sequence
  source: /note="Description of Artificial Sequence: Synthetic peptide"
IQIQERR

SEQ ID NO: 4017 - protein, 7 aa, Artificial Sequence
  source: /note="Description of Artificial Sequence: Synthetic peptide"
IQLKSTV

SEQ ID NO: 4018 - protein, 7 aa, Artificial Sequence
  source: /note="Description of Artificial Sequence: Synthetic peptide"
IQLRINA

SEQ ID NO: 4019 - protein, 7 aa, Artificial Sequence
  source: /note="Description of Artificial Sequence: Synthetic peptide"
IQLSAAS

SEQ ID NO: 4020 - protein, 7 aa, Artificial Sequence
  source: /note="Description of Artificial Sequence: Synthetic peptide"
IQNGYQF

SEQ ID NO: 4021 - protein, 7 aa, Artificial Sequence
  source: /note="Description of Artificial Sequence: Synthetic peptide"
IQNHHQL

SEQ ID NO: 4022 - protein, 7 aa, Artificial Sequence
  source: /note="Description of Artificial Sequence: Synthetic peptide"
IQNTPPT

SEQ ID NO: 4023 - protein, 7 aa, Artificial Sequence
  source: /note="Description of Artificial Sequence: Synthetic peptide"
IQNVPLH

SEQ ID NO: 4024 - protein, 7 aa, Artificial Sequence
  source: /note="Description of Artificial Sequence: Synthetic peptide"
IQRPSDI

SEQ ID NO: 4025 - protein, 7 aa, Artificial Sequence
  source: /note="Description of Artificial Sequence: Synthetic peptide"
IQRSVEA

SEQ ID NO: 4026 - protein, 7 aa, Artificial Sequence
  source: /note="Description of Artificial Sequence: Synthetic peptide"
IQRVAQG

SEQ ID NO: 4027 - protein, 7 aa, Artificial Sequence
  source: /note="Description of Artificial Sequence: Synthetic peptide"
IQSINLP

SEQ ID NO: 4028 - protein, 7 aa, Artificial Sequence
  source: /note="Description of Artificial Sequence: Synthetic peptide"
IQSPLLA

SEQ ID NO: 4029 - protein, 7 aa, Artificial Sequence
  source: /note="Description of Artificial Sequence: Synthetic peptide"
IQSTRLV

SEQ ID NO: 4030 - protein, 7 aa, Artificial Sequence
  source: /note="Description of Artificial Sequence: Synthetic peptide"
IQSYNTL

SEQ ID NO: 4031 - protein, 7 aa, Artificial Sequence
  source: /note="Description of Artificial Sequence: Synthetic peptide"
IQTRSDM

SEQ ID NO: 4032 - protein, 7 aa, Artificial Sequence
  source: /note="Description of Artificial Sequence: Synthetic peptide"
IQTVSAV

SEQ ID NO: 4033 - protein, 7 aa, Artificial Sequence
  source: /note="Description of Artificial Sequence: Synthetic peptide"
IRALAGH

SEQ ID NO: 4034 - protein, 7 aa, Artificial Sequence
  source: /note="Description of Artificial Sequence: Synthetic peptide"
IRASQTI

SEQ ID NO: 4035 - protein, 7 aa, Artificial Sequence
  source: /note="Description of Artificial Sequence: Synthetic peptide"
IRATSSE

SEQ ID NO: 4036 - protein, 7 aa, Artificial Sequence
  source: /note="Description of Artificial Sequence: Synthetic peptide"
IRDVHVV

SEQ ID NO: 4037 - protein, 7 aa, Artificial Sequence
  source: /note="Description of Artificial Sequence: Synthetic peptide"
IREPTAM

SEQ ID NO: 4038 - protein, 7 aa, Artificial Sequence
  source: /note="Description of Artificial Sequence: Synthetic peptide"
IRGALGI

SEQ ID NO: 4039 - protein, 7 aa, Artificial Sequence
  source: /note="Description of Artificial Sequence: Synthetic peptide"
IRGNFLS

SEQ ID NO: 4040 - protein, 7 aa, Artificial Sequence
  source: /note="Description of Artificial Sequence: Synthetic peptide"
IRGTPAF

SEQ ID NO: 4041 - protein, 7 aa, Artificial Sequence
  source: /note="Description of Artificial Sequence: Synthetic peptide"
IRHGIAA

SEQ ID NO: 4042 - protein, 7 aa, Artificial Sequence
  source: /note="Description of Artificial Sequence: Synthetic peptide"
IRIPELP

SEQ ID NO: 4043 - protein, 7 aa, Artificial Sequence
  source: /note="Description of Artificial Sequence: Synthetic peptide"
IRIPMTP

SEQ ID NO: 4044 - protein, 7 aa, Artificial Sequence
  source: /note="Description of Artificial Sequence: Synthetic peptide"
IRKSPNE

SEQ ID NO: 4045 - protein, 7 aa, Artificial Sequence
  source: /note="Description of Artificial Sequence: Synthetic peptide"
IRLEYSA

SEQ ID NO: 4046 - protein, 7 aa, Artificial Sequence
  source: /note="Description of Artificial Sequence: Synthetic peptide"
IRLGSFA

SEQ ID NO: 4047 - protein, 7 aa, Artificial Sequence
  source: /note="Description of Artificial Sequence: Synthetic peptide"
IRLQNSI

SEQ ID NO: 4048 - protein, 7 aa, Artificial Sequence
  source: /note="Description of Artificial Sequence: Synthetic peptide"
IRLSDKA

SEQ ID NO: 4049 - protein, 7 aa, Artificial Sequence
  source: /note="Description of Artificial Sequence: Synthetic peptide"
IRMSTQL

SEQ ID NO: 4050 - protein, 7 aa, Artificial Sequence
  source: /note="Description of Artificial Sequence: Synthetic peptide"
IRNGSDD

SEQ ID NO: 4051 - protein, 7 aa, Artificial Sequence
  source: /note="Description of Artificial Sequence: Synthetic peptide"
IRNIIDF

SEQ ID NO: 4052 - protein, 7 aa, Artificial Sequence
  source: /note="Description of Artificial Sequence: Synthetic peptide"
IRPLNMP

SEQ ID NO: 4053 - protein, 7 aa, Artificial Sequence
  source: /note="Description of Artificial Sequence: Synthetic peptide"
IRPTEGM

SEQ ID NO: 4054 - protein, 7 aa, Artificial Sequence
  source: /note="Description of Artificial Sequence: Synthetic peptide"
IRQECRI

SEQ ID NO: 4055 - protein, 7 aa, Artificial Sequence
  source: /note="Description of Artificial Sequence: Synthetic peptide"
IRQIPYA

SEQ ID NO: 4056 - protein, 7 aa, Artificial Sequence
  source: /note="Description of Artificial Sequence: Synthetic peptide"
IRQSSVN

SEQ ID NO: 4057 - protein, 7 aa, Artificial Sequence
  source: /note="Description of Artificial Sequence: Synthetic peptide"
IRSGQPL

SEQ ID NO: 4058 - protein, 7 aa, Artificial Sequence
  source: /note="Description of Artificial Sequence: Synthetic peptide"
IRSITDT

SEQ ID NO: 4059 - protein, 7 aa, Artificial Sequence
  source: /note="Description of Artificial Sequence: Synthetic peptide"
IRSLATA

SEQ ID NO: 4060 - protein, 7 aa, Artificial Sequence
  source: /note="Description of Artificial Sequence: Synthetic peptide"
IRSPLPS

SEQ ID NO: 4061 - protein, 7 aa, Artificial Sequence
  source: /note="Description of Artificial Sequence: Synthetic peptide"
IRSSGMM

SEQ ID NO: 4062 - protein, 7 aa, Artificial Sequence
  source: /note="Description of Artificial Sequence: Synthetic peptide"
IRSSPPT

SEQ ID NO: 4063 - protein, 7 aa, Artificial Sequence
  source: /note="Description of Artificial Sequence: Synthetic peptide"
IRSVSEV

SEQ ID NO: 4064 - protein, 7 aa, Artificial Sequence
  source: /note="Description of Artificial Sequence: Synthetic peptide"
IRTLGST

SEQ ID NO: 4065 - protein, 7 aa, Artificial Sequence
  source: /note="Description of Artificial Sequence: Synthetic peptide"
IRTTAAF

SEQ ID NO: 4066 - protein, 7 aa, Artificial Sequence
  source: /note="Description of Artificial Sequence: Synthetic peptide"
IRVENEL

SEQ ID NO: 4067 - protein, 7 aa, Artificial Sequence
  source: /note="Description of Artificial Sequence: Synthetic peptide"
IRVNDTG

SEQ ID NO: 4068 - protein, 7 aa, Artificial Sequence
  source: /note="Description of Artificial Sequence: Synthetic peptide"
IRVPTSS

SEQ ID NO: 4069 - protein, 7 aa, Artificial Sequence
  source: /note="Description of Artificial Sequence: Synthetic peptide"
IRVSAIH

SEQ ID NO: 4070 - protein, 7 aa, Artificial Sequence
  source: /note="Description of Artificial Sequence: Synthetic peptide"
ISAASRA

SEQ ID NO: 4071 - protein, 7 aa, Artificial Sequence
  source: /note="Description of Artificial Sequence: Synthetic peptide"
ISAAVMA

SEQ ID NO: 4072 - protein, 7 aa, Artificial Sequence
  source: /note="Description of Artificial Sequence: Synthetic peptide"
ISAGPMP

SEQ ID NO: 4073 - protein, 7 aa, Artificial Sequence
  source: /note="Description of Artificial Sequence: Synthetic peptide"
ISAISAQ

SEQ ID NO: 4074 - protein, 7 aa, Artificial Sequence
  source: /note="Description of Artificial Sequence: Synthetic peptide"
ISANMFS

SEQ ID NO: 4075 - protein, 7 aa, Artificial Sequence
  source: /note="Description of Artificial Sequence: Synthetic peptide"
ISARPTI

SEQ ID NO: 4076 - protein, 7 aa, Artificial Sequence
  source: /note="Description of Artificial Sequence: Synthetic peptide"
ISASHSS

SEQ ID NO: 4077 - protein, 7 aa, Artificial Sequence
  source: /note="Description of Artificial Sequence: Synthetic peptide"
ISATTSS

SEQ ID NO: 4078 - protein, 7 aa, Artificial Sequence
  source: /note="Description of Artificial Sequence: Synthetic peptide"
ISDQQYT

SEQ ID NO: 4079 - protein, 7 aa, Artificial Sequence
  source: /note="Description of Artificial Sequence: Synthetic peptide"
ISECVGG

SEQ ID NO: 4080 - protein, 7 aa, Artificial Sequence
  source: /note="Description of Artificial Sequence: Synthetic peptide"
ISEHIMS

SEQ ID NO: 4081 - protein, 7 aa, Artificial Sequence
  source: /note="Description of Artificial Sequence: Synthetic peptide"
ISEPTSV

SEQ ID NO: 4082 - protein, 7 aa, Artificial Sequence
  source: /note="Description of Artificial Sequence: Synthetic peptide"
ISESSRY

SEQ ID NO: 4083 - protein, 7 aa, Artificial Sequence
  source: /note="Description of Artificial Sequence: Synthetic peptide"
ISFRIEN

SEQ ID NO: 4084 - protein, 7 aa, Artificial Sequence
  source: /note="Description of Artificial Sequence: Synthetic peptide"
ISGAVDR

SEQ ID NO: 4085 - protein, 7 aa, Artificial Sequence
  source: /note="Description of Artificial Sequence: Synthetic peptide"
ISGKLAT

SEQ ID NO: 4086 - protein, 7 aa, Artificial Sequence
  source: /note="Description of Artificial Sequence: Synthetic peptide"
ISGNPNA

SEQ ID NO: 4087 - protein, 7 aa, Artificial Sequence
  source: /note="Description of Artificial Sequence: Synthetic peptide"
ISGPPTP

SEQ ID NO: 4088 - protein, 7 aa, Artificial Sequence
  source: /note="Description of Artificial Sequence: Synthetic peptide"
ISGRNAT

SEQ ID NO: 4089 - protein, 7 aa, Artificial Sequence
  source: /note="Description of Artificial Sequence: Synthetic peptide"
ISHSDNA

SEQ ID NO: 4090 - protein, 7 aa, Artificial Sequence
  source: /note="Description of Artificial Sequence: Synthetic peptide"
ISIQLRD

SEQ ID NO: 4091 - protein, 7 aa, Artificial Sequence
  source: /note="Description of Artificial Sequence: Synthetic peptide"
ISIRTGP

SEQ ID NO: 4092 - protein, 7 aa, Artificial Sequence
  source: /note="Description of Artificial Sequence: Synthetic peptide"
ISKAEAI

SEQ ID NO: 4093 - protein, 7 aa, Artificial Sequence
  source: /note="Description of Artificial Sequence: Synthetic peptide"
ISKAYPN

SEQ ID NO: 4094 - protein, 7 aa, Artificial Sequence
  source: /note="Description of Artificial Sequence: Synthetic peptide"
ISKDGAV

SEQ ID NO: 4095 - protein, 7 aa, Artificial Sequence
  source: /note="Description of Artificial Sequence: Synthetic peptide"
ISKDNAL

SEQ ID NO: 4096 - protein, 7 aa, Artificial Sequence
  source: /note="Description of Artificial Sequence: Synthetic peptide"
ISKLNGP

SEQ ID NO: 4097 - protein, 7 aa, Artificial Sequence
  source: /note="Description of Artificial Sequence: Synthetic peptide"
ISKSYNG

SEQ ID NO: 4098 - protein, 7 aa, Artificial Sequence
  source: /note="Description of Artificial Sequence: Synthetic peptide"
ISLDRHS

SEQ ID NO: 4099 - protein, 7 aa, Artificial Sequence
  source: /note="Description of Artificial Sequence: Synthetic peptide"
ISLLRNT

SEQ ID NO: 4100 - protein, 7 aa, Artificial Sequence
  source: /note="Description of Artificial Sequence: Synthetic peptide"
ISLQTSL

SEQ ID NO: 4101 - protein, 7 aa, Artificial Sequence
  source: /note="Description of Artificial Sequence: Synthetic peptide"
ISLRFND

SEQ ID NO: 4102 - protein, 7 aa, Artificial Sequence
  source: /note="Description of Artificial Sequence: Synthetic peptide"
ISLSALA

SEQ ID NO: 4103 - protein, 7 aa, Artificial Sequence
  source: /note="Description of Artificial Sequence: Synthetic peptide"
ISMKPIS

SEQ ID NO: 4104 - protein, 7 aa, Artificial Sequence
  source: /note="Description of Artificial Sequence: Synthetic peptide"
ISMLRPT

SEQ ID NO: 4105 - protein, 7 aa, Artificial Sequence
  source: /note="Description of Artificial Sequence: Synthetic peptide"
ISMTVHS

SEQ ID NO: 4106 - protein, 7 aa, Artificial Sequence
  source: /note="Description of Artificial Sequence: Synthetic peptide"
ISMVRQG

SEQ ID NO: 4107 - protein, 7 aa, Artificial Sequence
  source: /note="Description of Artificial Sequence: Synthetic peptide"
ISNAMTQ

SEQ ID NO: 4108 - protein, 7 aa, Artificial Sequence
  source: /note="Description of Artificial Sequence: Synthetic peptide"
ISNGRAV

SEQ ID NO: 4109 - protein, 7 aa, Artificial Sequence
  source: /note="Description of Artificial Sequence: Synthetic peptide"
ISNSRST

SEQ ID NO: 4110 - protein, 7 aa, Artificial Sequence
  source: /note="Description of Artificial Sequence: Synthetic peptide"
ISNSSPS

SEQ ID NO: 4111 - protein, 7 aa, Artificial Sequence
  source: /note="Description of Artificial Sequence: Synthetic peptide"
ISNVQLA

SEQ ID NO: 4112 - protein, 7 aa, Artificial Sequence
  source: /note="Description of Artificial Sequence: Synthetic peptide"
ISPAPFP

SEQ ID NO: 4113 - protein, 7 aa, Artificial Sequence
  source: /note="Description of Artificial Sequence: Synthetic peptide"
ISPDPML

SEQ ID NO: 4114 - protein, 7 aa, Artificial Sequence
  source: /note="Description of Artificial Sequence: Synthetic peptide"
ISPFTVE

SEQ ID NO: 4115 - protein, 7 aa, Artificial Sequence
  source: /note="Description of Artificial Sequence: Synthetic peptide"
ISPRDVS

SEQ ID NO: 4116 - protein, 7 aa, Artificial Sequence
  source: /note="Description of Artificial Sequence: Synthetic peptide"
ISPRKAT

SEQ ID NO: 4117 - protein, 7 aa, Artificial Sequence
  source: /note="Description of Artificial Sequence: Synthetic peptide"
ISPRNNS

SEQ ID NO: 4118 - protein, 7 aa, Artificial Sequence
  source: /note="Description of Artificial Sequence: Synthetic peptide"
ISPRYPH

SEQ ID NO: 4119 - protein, 7 aa, Artificial Sequence
  source: /note="Description of Artificial Sequence: Synthetic peptide"
ISPSGPA

SEQ ID NO: 4120 - protein, 7 aa, Artificial Sequence
  source: /note="Description of Artificial Sequence: Synthetic peptide"
ISPVRNV

SEQ ID NO: 4121 - protein, 7 aa, Artificial Sequence
  source: /note="Description of Artificial Sequence: Synthetic peptide"
ISPYENA

SEQ ID NO: 4122 - protein, 7 aa, Artificial Sequence
  source: /note="Description of Artificial Sequence: Synthetic peptide"
ISPYRVS

SEQ ID NO: 4123 - protein, 7 aa, Artificial Sequence
  source: /note="Description of Artificial Sequence: Synthetic peptide"
ISQQRLK

SEQ ID NO: 4124 - protein, 7 aa, Artificial Sequence
  source: /note="Description of Artificial Sequence: Synthetic peptide"
ISQRWPD

SEQ ID NO: 4125 - protein, 7 aa, Artificial Sequence
  source: /note="Description of Artificial Sequence: Synthetic peptide"
ISQTRYD

SEQ ID NO: 4126 - protein, 7 aa, Artificial Sequence
  source: /note="Description of Artificial Sequence: Synthetic peptide"
ISRDTVM

SEQ ID NO: 4127 - protein, 7 aa, Artificial Sequence
  source: /note="Description of Artificial Sequence: Synthetic peptide"
ISRLVSS

SEQ ID NO: 4128 - protein, 7 aa, Artificial Sequence
  source: /note="Description of Artificial Sequence: Synthetic peptide"
ISRSNII

SEQ ID NO: 4129 - protein, 7 aa, Artificial Sequence
  source: /note="Description of Artificial Sequence: Synthetic peptide"
ISRVVTM

SEQ ID NO: 4130 - protein, 7 aa, Artificial Sequence
  source: /note="Description of Artificial Sequence: Synthetic peptide"
ISSAFAP

SEQ ID NO: 4131 - protein, 7 aa, Artificial Sequence
  source: /note="Description of Artificial Sequence: Synthetic peptide"
ISSHCMA

SEQ ID NO: 4132 - protein, 7 aa, Artificial Sequence
  source: /note="Description of Artificial Sequence: Synthetic peptide"
ISSKLVS

SEQ ID NO: 4133 - protein, 7 aa, Artificial Sequence
  source: /note="Description of Artificial Sequence: Synthetic peptide"
ISSNPTV

SEQ ID NO: 4134 - protein, 7 aa, Artificial Sequence
  source: /note="Description of Artificial Sequence: Synthetic peptide"
ISSSATL

SEQ ID NO: 4135 - protein, 7 aa, Artificial Sequence
  source: /note="Description of Artificial Sequence: Synthetic peptide"
ISSTNTA

SEQ ID NO: 4136 - protein, 7 aa, Artificial Sequence
  source: /note="Description of Artificial Sequence: Synthetic peptide"
ISSTVEI

SEQ ID NO: 4137 - protein, 7 aa, Artificial Sequence
  source: /note="Description of Artificial Sequence: Synthetic peptide"
ISSVQNP

SEQ ID NO: 4138 - protein, 7 aa, Artificial Sequence
  source: /note="Description of Artificial Sequence: Synthetic peptide"
ISTHLKS

SEQ ID NO: 4139 - protein, 7 aa, Artificial Sequence
  source: /note="Description of Artificial Sequence: Synthetic peptide"
ISTHTKS

SEQ ID NO: 4140 - protein, 7 aa, Artificial Sequence
  source: /note="Description of Artificial Sequence: Synthetic peptide"
ISTNVRS

SEQ ID NO: 4141 - protein, 7 aa, Artificial Sequence
  source: /note="Description of Artificial Sequence: Synthetic peptide"
ISTRNPE

SEQ ID NO: 4142 - protein, 7 aa, Artificial Sequence
  source: /note="Description of Artificial Sequence: Synthetic peptide"
ISTSQQH

SEQ ID NO: 4143 - protein, 7 aa, Artificial Sequence
  source: /note="Description of Artificial Sequence: Synthetic peptide"
ISTTTVP

SEQ ID NO: 4144 - protein, 7 aa, Artificial Sequence
  source: /note="Description of Artificial Sequence: Synthetic peptide"
ISTVLVD

SEQ ID NO: 4145 - protein, 7 aa, Artificial Sequence
  source: /note="Description of Artificial Sequence: Synthetic peptide"
ISTWEYE

SEQ ID NO: 4146 - protein, 7 aa, Artificial Sequence
  source: /note="Description of Artificial Sequence: Synthetic peptide"
ISTWRPT

SEQ ID NO: 4147 - protein, 7 aa, Artificial Sequence
  source: /note="Description of Artificial Sequence: Synthetic peptide"
ISVKGQP

SEQ ID NO: 4148 - protein, 7 aa, Artificial Sequence
  source: /note="Description of Artificial Sequence: Synthetic peptide"
ISVSQTD

SEQ ID NO: 4149 - protein, 7 aa, Artificial Sequence
  source: /note="Description of Artificial Sequence: Synthetic peptide"
ISVTSSS

SEQ ID NO: 4150 - protein, 7 aa, Artificial Sequence
  source: /note="Description of Artificial Sequence: Synthetic peptide"
ISYGTRS

SEQ ID NO: 4151 - protein, 7 aa, Artificial Sequence
  source: /note="Description of Artificial Sequence: Synthetic peptide"
ISYNAKV

SEQ ID NO: 4152 - protein, 7 aa, Artificial Sequence
  source: /note="Description of Artificial Sequence: Synthetic peptide"
ISYPKPV

SEQ ID NO: 4153 - protein, 7 aa, Artificial Sequence
  source: /note="Description of Artificial Sequence: Synthetic peptide"
ITAPHSM

SEQ ID NO: 4154 - protein, 7 aa, Artificial Sequence
  source: /note="Description of Artificial Sequence: Synthetic peptide"
ITARVNA

SEQ ID NO: 4155 - protein, 7 aa, Artificial Sequence
  source: /note="Description of Artificial Sequence: Synthetic peptide"
ITARYPT

SEQ ID NO: 4156 - protein, 7 aa, Artificial Sequence
  source: /note="Description of Artificial Sequence: Synthetic peptide"
ITASGLV

SEQ ID NO: 4157 - protein, 7 aa, Artificial Sequence
  source: /note="Description of Artificial Sequence: Synthetic peptide"
ITATQRM

SEQ ID NO: 4158 - protein, 7 aa, Artificial Sequence
  source: /note="Description of Artificial Sequence: Synthetic peptide"
ITDAANP

SEQ ID NO: 4159 - protein, 7 aa, Artificial Sequence
  source: /note="Description of Artificial Sequence: Synthetic peptide"
ITDRVAI

SEQ ID NO: 4160 - protein, 7 aa, Artificial Sequence
  source: /note="Description of Artificial Sequence: Synthetic peptide"
ITERSCT

SEQ ID NO: 4161 - protein, 7 aa, Artificial Sequence
  source: /note="Description of Artificial Sequence: Synthetic peptide"
ITEVKRG

SEQ ID NO: 4162 - protein, 7 aa, Artificial Sequence
  source: /note="Description of Artificial Sequence: Synthetic peptide"
ITFDHVT

SEQ ID NO: 4163 - protein, 7 aa, Artificial Sequence
  source: /note="Description of Artificial Sequence: Synthetic peptide"
ITFSGSS

SEQ ID NO: 4164 - protein, 7 aa, Artificial Sequence
  source: /note="Description of Artificial Sequence: Synthetic peptide"
ITGDLNG

SEQ ID NO: 4165 - protein, 7 aa, Artificial Sequence
  source: /note="Description of Artificial Sequence: Synthetic peptide"
ITGGRPG

SEQ ID NO: 4166 - protein, 7 aa, Artificial Sequence
  source: /note="Description of Artificial Sequence: Synthetic peptide"
ITGNRTP

SEQ ID NO: 4167 - protein, 7 aa, Artificial Sequence
  source: /note="Description of Artificial Sequence: Synthetic peptide"
ITGSNRD

SEQ ID NO: 4168 - protein, 7 aa, Artificial Sequence
  source: /note="Description of Artificial Sequence: Synthetic peptide"
ITHASSD

SEQ ID NO: 4169 - protein, 7 aa, Artificial Sequence
  source: /note="Description of Artificial Sequence: Synthetic peptide"
ITHIRLD

SEQ ID NO: 4170 - protein, 7 aa, Artificial Sequence
  source: /note="Description of Artificial Sequence: Synthetic peptide"
ITHSIQR

SEQ ID NO: 4171 - protein, 7 aa, Artificial Sequence
  source: /note="Description of Artificial Sequence: Synthetic peptide"
ITLGSTG

SEQ ID NO: 4172 - protein, 7 aa, Artificial Sequence
  source: /note="Description of Artificial Sequence: Synthetic peptide"
ITLSSQG

SEQ ID NO: 4173 - protein, 7 aa, Artificial Sequence
  source: /note="Description of Artificial Sequence: Synthetic peptide"
ITLYPNS

SEQ ID NO: 4174 - protein, 7 aa, Artificial Sequence
  source: /note="Description of Artificial Sequence: Synthetic peptide"
ITMLAGD

SEQ ID NO: 4175 - protein, 7 aa, Artificial Sequence
  source: /note="Description of Artificial Sequence: Synthetic peptide"
ITNDRTV

SEQ ID NO: 4176 - protein, 7 aa, Artificial Sequence
  source: /note="Description of Artificial Sequence: Synthetic peptide"
ITNEPPR

SEQ ID NO: 4177 - protein, 7 aa, Artificial Sequence
  source: /note="Description of Artificial Sequence: Synthetic peptide"
ITPLTAG

SEQ ID NO: 4178 - protein, 7 aa, Artificial Sequence
  source: /note="Description of Artificial Sequence: Synthetic peptide"
ITPMSIV

SEQ ID NO: 4179 - protein, 7 aa, Artificial Sequence
  source: /note="Description of Artificial Sequence: Synthetic peptide"
ITPSHGS

SEQ ID NO: 4180 - protein, 7 aa, Artificial Sequence
  source: /note="Description of Artificial Sequence: Synthetic peptide"
ITPVHAE

SEQ ID NO: 4181 - protein, 7 aa, Artificial Sequence
  source: /note="Description of Artificial Sequence: Synthetic peptide"
ITPYVRG

SEQ ID NO: 4182 - protein, 7 aa, Artificial Sequence
  source: /note="Description of Artificial Sequence: Synthetic peptide"
ITQPHAK

SEQ ID NO: 4183 - protein, 7 aa, Artificial Sequence
  source: /note="Description of Artificial Sequence: Synthetic peptide"
ITRLKLD

SEQ ID NO: 4184 - protein, 7 aa, Artificial Sequence
  source: /note="Description of Artificial Sequence: Synthetic peptide"
ITRSVAP

SEQ ID NO: 4185 - protein, 7 aa, Artificial Sequence
  source: /note="Description of Artificial Sequence: Synthetic peptide"
ITSADPQ

SEQ ID NO: 4186 - protein, 7 aa, Artificial Sequence
  source: /note="Description of Artificial Sequence: Synthetic peptide"
ITSKTQA

SEQ ID NO: 4187 - protein, 7 aa, Artificial Sequence
  source: /note="Description of Artificial Sequence: Synthetic peptide"
ITSPRLQ

SEQ ID NO: 4188 - protein, 7 aa, Artificial Sequence
  source: /note="Description of Artificial Sequence: Synthetic peptide"
ITSTLPP

SEQ ID NO: 4189 - protein, 7 aa, Artificial Sequence
  source: /note="Description of Artificial Sequence: Synthetic peptide"
ITSTRAS

SEQ ID NO: 4190 - protein, 7 aa, Artificial Sequence
  source: /note="Description of Artificial Sequence: Synthetic peptide"
ITSVDRL

SEQ ID NO: 4191 - protein, 7 aa, Artificial Sequence
  source: /note="Description of Artificial Sequence: Synthetic peptide"
ITSVPVS

SEQ ID NO: 4192 - protein, 7 aa, Artificial Sequence
  source: /note="Description of Artificial Sequence: Synthetic peptide"
ITTKYSQ

SEQ ID NO: 4193 - protein, 7 aa, Artificial Sequence
  source: /note="Description of Artificial Sequence: Synthetic peptide"
ITTLGPT

SEQ ID NO: 4194 - protein, 7 aa, Artificial Sequence
  source: /note="Description of Artificial Sequence: Synthetic peptide"
ITTNSGR

SEQ ID NO: 4195 - protein, 7 aa, Artificial Sequence
  source: /note="Description of Artificial Sequence: Synthetic peptide"
ITTPAEQ

SEQ ID NO: 4196 - protein, 7 aa, Artificial Sequence
  source: /note="Description of Artificial Sequence: Synthetic peptide"
ITTRETT

SEQ ID NO: 4197 - protein, 7 aa, Artificial Sequence
  source: /note="Description of Artificial Sequence: Synthetic peptide"
ITTSDRA

SEQ ID NO: 4198 - protein, 7 aa, Artificial Sequence
  source: /note="Description of Artificial Sequence: Synthetic peptide"
ITTYNEN

SEQ ID NO: 4199 - protein, 7 aa, Artificial Sequence
  source: /note="Description of Artificial Sequence: Synthetic peptide"
ITVPHHY

SEQ ID NO: 4200 - protein, 7 aa, Artificial Sequence
  source: /note="Description of Artificial Sequence: Synthetic peptide"
ITVSRAD

SEQ ID NO: 4201 - protein, 7 aa, Artificial Sequence
  source: /note="Description of Artificial Sequence: Synthetic peptide"
ITYQNAE

SEQ ID NO: 4202 - protein, 7 aa, Artificial Sequence
  source: /note="Description of Artificial Sequence: Synthetic peptide"
IVATCTA

SEQ ID NO: 4203 - protein, 7 aa, Artificial Sequence
  source: /note="Description of Artificial Sequence: Synthetic peptide"
IVEASII

SEQ ID NO: 4204 - protein, 7 aa, Artificial Sequence
  source: /note="Description of Artificial Sequence: Synthetic peptide"
IVEGLGD

SEQ ID NO: 4205 - protein, 7 aa, Artificial Sequence
  source: /note="Description of Artificial Sequence: Synthetic peptide"
IVETYLT

SEQ ID NO: 4206 - protein, 7 aa, Artificial Sequence
  source: /note="Description of Artificial Sequence: Synthetic peptide"
IVGSKLD

SEQ ID NO: 4207 - protein, 7 aa, Artificial Sequence
  source: /note="Description of Artificial Sequence: Synthetic peptide"
IVKGIPM

SEQ ID NO: 4208 - protein, 7 aa, Artificial Sequence
  source: /note="Description of Artificial Sequence: Synthetic peptide"
IVLESMS

SEQ ID NO: 4209 - protein, 7 aa, Artificial Sequence
  source: /note="Description of Artificial Sequence: Synthetic peptide"
IVLHLDG

SEQ ID NO: 4210 - protein, 7 aa, Artificial Sequence
  source: /note="Description of Artificial Sequence: Synthetic peptide"
IVNLSTY

SEQ ID NO: 4211 - protein, 7 aa, Artificial Sequence
  source: /note="Description of Artificial Sequence: Synthetic peptide"
IVQVATS

SEQ ID NO: 4212 - protein, 7 aa, Artificial Sequence
  source: /note="Description of Artificial Sequence: Synthetic peptide"
IVRQTIS

SEQ ID NO: 4213 - protein, 7 aa, Artificial Sequence
  source: /note="Description of Artificial Sequence: Synthetic peptide"
IVRSRPE

SEQ ID NO: 4214 - protein, 7 aa, Artificial Sequence
  source: /note="Description of Artificial Sequence: Synthetic peptide"
IVSHDFE

SEQ ID NO: 4215 - protein, 7 aa, Artificial Sequence
  source: /note="Description of Artificial Sequence: Synthetic peptide"
IVSRINS

SEQ ID NO: 4216 - protein, 7 aa, Artificial Sequence
  source: /note="Description of Artificial Sequence: Synthetic peptide"
IVSSYTD

SEQ ID NO: 4217 - protein, 7 aa, Artificial Sequence
  source: /note="Description of Artificial Sequence: Synthetic peptide"
IVTGSGG

SEQ ID NO: 4218 - protein, 7 aa, Artificial Sequence
  source: /note="Description of Artificial Sequence: Synthetic peptide"
IVTGSRE

SEQ ID NO: 4219 - protein, 7 aa, Artificial Sequence
  source: /note="Description of Artificial Sequence: Synthetic peptide"
IVTKCPG

SEQ ID NO: 4220 - protein, 7 aa, Artificial Sequence
  source: /note="Description of Artificial Sequence: Synthetic peptide"
IVTSNVT

SEQ ID NO: 4221 - protein, 7 aa, Artificial Sequence
  source: /note="Description of Artificial Sequence: Synthetic peptide"
IVTSTQP

SEQ ID NO: 4222 - protein, 7 aa, Artificial Sequence
  source: /note="Description of Artificial Sequence: Synthetic peptide"
IWDSCRD

SEQ ID NO: 4223 - protein, 7 aa, Artificial Sequence
  source: /note="Description of Artificial Sequence: Synthetic peptide"
IYKVDSS

SEQ ID NO: 4224 - protein, 7 aa, Artificial Sequence
  source: /note="Description of Artificial Sequence: Synthetic peptide"
IYLRNDQ

SEQ ID NO: 4225 - protein, 7 aa, Artificial Sequence
  source: /note="Description of Artificial Sequence: Synthetic peptide"
IYQSESH

SEQ ID NO: 4226 - protein, 7 aa, Artificial Sequence
  source: /note="Description of Artificial Sequence: Synthetic peptide"
IYQSQHH

SEQ ID NO: 4227 - protein, 7 aa, Artificial Sequence
  source: /note="Description of Artificial Sequence: Synthetic peptide"
IYSAKQP

SEQ ID NO: 4228 - protein, 7 aa, Artificial Sequence
  source: /note="Description of Artificial Sequence: Synthetic peptide"
IYSVGAT

SEQ ID NO: 4229 - protein, 7 aa, Artificial Sequence
  source: /note="Description of Artificial Sequence: Synthetic peptide"
IYTGQVH

SEQ ID NO: 4230 - protein, 7 aa, Artificial Sequence
  source: /note="Description of Artificial Sequence: Synthetic peptide"
KAAKLLD

SEQ ID NO: 4231 - protein, 7 aa, Artificial Sequence
  source: /note="Description of Artificial Sequence: Synthetic peptide"
KAANQSS

SEQ ID NO: 4232 - protein, 7 aa, Artificial Sequence
  source: /note="Description of Artificial Sequence: Synthetic peptide"
KADHSKE

SEQ ID NO: 4233 - protein, 7 aa, Artificial Sequence
  source: /note="Description of Artificial Sequence: Synthetic peptide"
KADIQVR

SEQ ID NO: 4234 - protein, 7 aa, Artificial Sequence
  source: /note="Description of Artificial Sequence: Synthetic peptide"
KAETVAP

SEQ ID NO: 4235 - protein, 7 aa, Artificial Sequence
  source: /note="Description of Artificial Sequence: Synthetic peptide"
KAFIGID

SEQ ID NO: 4236 - protein, 7 aa, Artificial Sequence
  source: /note="Description of Artificial Sequence: Synthetic peptide"
KAFSPAL

SEQ ID NO: 4237 - protein, 7 aa, Artificial Sequence
  source: /note="Description of Artificial Sequence: Synthetic peptide"
KAGCSIS

SEQ ID NO: 4238 - protein, 7 aa, Artificial Sequence
  source: /note="Description of Artificial Sequence: Synthetic peptide"
KAGVPVP

SEQ ID NO: 4239 - protein, 7 aa, Artificial Sequence
  source: /note="Description of Artificial Sequence: Synthetic peptide"
KAHSTQT

SEQ ID NO: 4240 - protein, 7 aa, Artificial Sequence
  source: /note="Description of Artificial Sequence: Synthetic peptide"
KAISQPF

SEQ ID NO: 4241 - protein, 7 aa, Artificial Sequence
  source: /note="Description of Artificial Sequence: Synthetic peptide"
KALPNYS

SEQ ID NO: 4242 - protein, 7 aa, Artificial Sequence
  source: /note="Description of Artificial Sequence: Synthetic peptide"
KALQRYD

SEQ ID NO: 4243 - protein, 7 aa, Artificial Sequence
  source: /note="Description of Artificial Sequence: Synthetic peptide"
KAMSMDS

SEQ ID NO: 4244 - protein, 7 aa, Artificial Sequence
  source: /note="Description of Artificial Sequence: Synthetic peptide"
KANQLDT

SEQ ID NO: 4245 - protein, 7 aa, Artificial Sequence
  source: /note="Description of Artificial Sequence: Synthetic peptide"
KAPLPDF

SEQ ID NO: 4246 - protein, 7 aa, Artificial Sequence
  source: /note="Description of Artificial Sequence: Synthetic peptide"
KAPTPSV

SEQ ID NO: 4247 - protein, 7 aa, Artificial Sequence
  source: /note="Description of Artificial Sequence: Synthetic peptide"
KAQERAT

SEQ ID NO: 4248 - protein, 7 aa, Artificial Sequence
  source: /note="Description of Artificial Sequence: Synthetic peptide"
KAQSANF

SEQ ID NO: 4249 - protein, 7 aa, Artificial Sequence
  source: /note="Description of Artificial Sequence: Synthetic peptide"
KASASIA

SEQ ID NO: 4250 - protein, 7 aa, Artificial Sequence
  source: /note="Description of Artificial Sequence: Synthetic peptide"
KASFSPD

SEQ ID NO: 4251 - protein, 7 aa, Artificial Sequence
  source: /note="Description of Artificial Sequence: Synthetic peptide"
KASQACM

SEQ ID NO: 4252 - protein, 7 aa, Artificial Sequence
  source: /note="Description of Artificial Sequence: Synthetic peptide"
KASQFSP

SEQ ID NO: 4253 - protein, 7 aa, Artificial Sequence
  source: /note="Description of Artificial Sequence: Synthetic peptide"
KASQSGT

SEQ ID NO: 4254 - protein, 7 aa, Artificial Sequence
  source: /note="Description of Artificial Sequence: Synthetic peptide"
KATPGVH

SEQ ID NO: 4255 - protein, 7 aa, Artificial Sequence
  source: /note="Description of Artificial Sequence: Synthetic peptide"
KATPNVG

SEQ ID NO: 4256 - protein, 7 aa, Artificial Sequence
  source: /note="Description of Artificial Sequence: Synthetic peptide"
KAVASTF

SEQ ID NO: 4257 - protein, 7 aa, Artificial Sequence
  source: /note="Description of Artificial Sequence: Synthetic peptide"
KAVISPT

SEQ ID NO: 4258 - protein, 7 aa, Artificial Sequence
  source: /note="Description of Artificial Sequence: Synthetic peptide"
KAVNGLS

SEQ ID NO: 4259 - protein, 7 aa, Artificial Sequence
  source: /note="Description of Artificial Sequence: Synthetic peptide"
KAVSWGP

SEQ ID NO: 4260 - protein, 7 aa, Artificial Sequence
  source: /note="Description of Artificial Sequence: Synthetic peptide"
KCRTCSV

SEQ ID NO: 4261 - protein, 7 aa, Artificial Sequence
  source: /note="Description of Artificial Sequence: Synthetic peptide"
KDEPNYG

SEQ ID NO: 4262 - protein, 7 aa, Artificial Sequence
  source: /note="Description of Artificial Sequence: Synthetic peptide"
KDFSNTL

SEQ ID NO: 4263 - protein, 7 aa, Artificial Sequence
  source: /note="Description of Artificial Sequence: Synthetic peptide"
KDGPFPM

SEQ ID NO: 4264 - protein, 7 aa, Artificial Sequence
  source: /note="Description of Artificial Sequence: Synthetic peptide"
KDKNPSD

SEQ ID NO: 4265 - protein, 7 aa, Artificial Sequence
  source: /note="Description of Artificial Sequence: Synthetic peptide"
KDKVEMN

SEQ ID NO: 4266 - protein, 7 aa, Artificial Sequence
  source: /note="Description of Artificial Sequence: Synthetic peptide"
KDLTRHA

SEQ ID NO: 4267 - protein, 7 aa, Artificial Sequence
  source: /note="Description of Artificial Sequence: Synthetic peptide"
KDMRSKD

SEQ ID NO: 4268 - protein, 7 aa, Artificial Sequence
  source: /note="Description of Artificial Sequence: Synthetic peptide"
KDNKIQS

SEQ ID NO: 4269 - protein, 7 aa, Artificial Sequence
  source: /note="Description of Artificial Sequence: Synthetic peptide"
KDPGRIS

SEQ ID NO: 4270 - protein, 7 aa, Artificial Sequence
  source: /note="Description of Artificial Sequence: Synthetic peptide"
KDPISSV

SEQ ID NO: 4271 - protein, 7 aa, Artificial Sequence
  source: /note="Description of Artificial Sequence: Synthetic peptide"
KDPLNCA

SEQ ID NO: 4272 - protein, 7 aa, Artificial Sequence
  source: /note="Description of Artificial Sequence: Synthetic peptide"
KDPPQLH

SEQ ID NO: 4273 - protein, 7 aa, Artificial Sequence
  source: /note="Description of Artificial Sequence: Synthetic peptide"
KDPQTTD

SEQ ID NO: 4274 - protein, 7 aa, Artificial Sequence
  source: /note="Description of Artificial Sequence: Synthetic peptide"
KDRSAPP

SEQ ID NO: 4275 - protein, 7 aa, Artificial Sequence
  source: /note="Description of Artificial Sequence: Synthetic peptide"
KDRSLDP

SEQ ID NO: 4276 - protein, 7 aa, Artificial Sequence
  source: /note="Description of Artificial Sequence: Synthetic peptide"
KDSAANF

SEQ ID NO: 4277 - protein, 7 aa, Artificial Sequence
  source: /note="Description of Artificial Sequence: Synthetic peptide"
KDSTLLS

SEQ ID NO: 4278 - protein, 7 aa, Artificial Sequence
  source: /note="Description of Artificial Sequence: Synthetic peptide"
KDTDPLS

SEQ ID NO: 4279 - protein, 7 aa, Artificial Sequence
  source: /note="Description of Artificial Sequence: Synthetic peptide"
KDTIHVS

SEQ ID NO: 4280 - protein, 7 aa, Artificial Sequence
  source: /note="Description of Artificial Sequence: Synthetic peptide"
KDTLTFR

SEQ ID NO: 4281 - protein, 7 aa, Artificial Sequence
  source: /note="Description of Artificial Sequence: Synthetic peptide"
KDTPNTV

SEQ ID NO: 4282 - protein, 7 aa, Artificial Sequence
  source: /note="Description of Artificial Sequence: Synthetic peptide"
KDTVFYP

SEQ ID NO: 4283 - protein, 7 aa, Artificial Sequence
  source: /note="Description of Artificial Sequence: Synthetic peptide"
KEDSYHP

SEQ ID NO: 4284 - protein, 7 aa, Artificial Sequence
  source: /note="Description of Artificial Sequence: Synthetic peptide"
KEDTNRT

SEQ ID NO: 4285 - protein, 7 aa, Artificial Sequence
  source: /note="Description of Artificial Sequence: Synthetic peptide"
KEGGEPR

SEQ ID NO: 4286 - protein, 7 aa, Artificial Sequence
  source: /note="Description of Artificial Sequence: Synthetic peptide"
KEGSNRG

SEQ ID NO: 4287 - protein, 7 aa, Artificial Sequence
  source: /note="Description of Artificial Sequence: Synthetic peptide"
KEHGVIF

SEQ ID NO: 4288 - protein, 7 aa, Artificial Sequence
  source: /note="Description of Artificial Sequence: Synthetic peptide"
KEIGFAT

SEQ ID NO: 4289 - protein, 7 aa, Artificial Sequence
  source: /note="Description of Artificial Sequence: Synthetic peptide"
KEKPLNS

SEQ ID NO: 4290 - protein, 7 aa, Artificial Sequence
  source: /note="Description of Artificial Sequence: Synthetic peptide"
KELAVGL

SEQ ID NO: 4291 - protein, 7 aa, Artificial Sequence
  source: /note="Description of Artificial Sequence: Synthetic peptide"
KELELHP

SEQ ID NO: 4292 - protein, 7 aa, Artificial Sequence
  source: /note="Description of Artificial Sequence: Synthetic peptide"
KEMDIHW

SEQ ID NO: 4293 - protein, 7 aa, Artificial Sequence
  source: /note="Description of Artificial Sequence: Synthetic peptide"
KEMSPTR

SEQ ID NO: 4294 - protein, 7 aa, Artificial Sequence
  source: /note="Description of Artificial Sequence: Synthetic peptide"
KENPAIV

SEQ ID NO: 4295 - protein, 7 aa, Artificial Sequence
  source: /note="Description of Artificial Sequence: Synthetic peptide"
KEPKVWL

SEQ ID NO: 4296 - protein, 7 aa, Artificial Sequence
  source: /note="Description of Artificial Sequence: Synthetic peptide"
KEPSTTS

SEQ ID NO: 4297 - protein, 7 aa, Artificial Sequence
  source: /note="Description of Artificial Sequence: Synthetic peptide"
KESIRQS

SEQ ID NO: 4298 - protein, 7 aa, Artificial Sequence
  source: /note="Description of Artificial Sequence: Synthetic peptide"
KESSSYL

SEQ ID NO: 4299 - protein, 7 aa, Artificial Sequence
  source: /note="Description of Artificial Sequence: Synthetic peptide"
KETQNMP

SEQ ID NO: 4300 - protein, 7 aa, Artificial Sequence
  source: /note="Description of Artificial Sequence: Synthetic peptide"
KEVKTSG

SEQ ID NO: 4301 - protein, 7 aa, Artificial Sequence
  source: /note="Description of Artificial Sequence: Synthetic peptide"
KEWTNSG

SEQ ID NO: 4302 - protein, 7 aa, Artificial Sequence
  source: /note="Description of Artificial Sequence: Synthetic peptide"
KFAAMLN

SEQ ID NO: 4303 - protein, 7 aa, Artificial Sequence
  source: /note="Description of Artificial Sequence: Synthetic peptide"
KFDLASD

SEQ ID NO: 4304 - protein, 7 aa, Artificial Sequence
  source: /note="Description of Artificial Sequence: Synthetic peptide"
KFDSELS

SEQ ID NO: 4305 - protein, 7 aa, Artificial Sequence
  source: /note="Description of Artificial Sequence: Synthetic peptide"
KFGDNVL

SEQ ID NO: 4306 - protein, 7 aa, Artificial Sequence
  source: /note="Description of Artificial Sequence: Synthetic peptide"
KFNSASD

SEQ ID NO: 4307 - protein, 7 aa, Artificial Sequence
  source: /note="Description of Artificial Sequence: Synthetic peptide"
KFPEAQG

SEQ ID NO: 4308 - protein, 7 aa, Artificial Sequence
  source: /note="Description of Artificial Sequence: Synthetic peptide"
KFPHPPA

SEQ ID NO: 4309 - protein, 7 aa, Artificial Sequence
  source: /note="Description of Artificial Sequence: Synthetic peptide"
KFQRDQV

SEQ ID NO: 4310 - protein, 7 aa, Artificial Sequence
  source: /note="Description of Artificial Sequence: Synthetic peptide"
KFQSVGI

SEQ ID NO: 4311 - protein, 7 aa, Artificial Sequence
  source: /note="Description of Artificial Sequence: Synthetic peptide"
KFSQTVP

SEQ ID NO: 4312 - protein, 7 aa, Artificial Sequence
  source: /note="Description of Artificial Sequence: Synthetic peptide"
KFSSNID

SEQ ID NO: 4313 - protein, 7 aa, Artificial Sequence
  source: /note="Description of Artificial Sequence: Synthetic peptide"
KGALGVP

SEQ ID NO: 4314 - protein, 7 aa, Artificial Sequence
  source: /note="Description of Artificial Sequence: Synthetic peptide"
KGDHVTD

SEQ ID NO: 4315 - protein, 7 aa, Artificial Sequence
  source: /note="Description of Artificial Sequence: Synthetic peptide"
KGDIISE

SEQ ID NO: 4316 - protein, 7 aa, Artificial Sequence
  source: /note="Description of Artificial Sequence: Synthetic peptide"
KGDIQVS

SEQ ID NO: 4317 - protein, 7 aa, Artificial Sequence
  source: /note="Description of Artificial Sequence: Synthetic peptide"
KGEIPIE

SEQ ID NO: 4318 - protein, 7 aa, Artificial Sequence
  source: /note="Description of Artificial Sequence: Synthetic peptide"
KGEVQSM

SEQ ID NO: 4319 - protein, 7 aa, Artificial Sequence
  source: /note="Description of Artificial Sequence: Synthetic peptide"
KGEWPRE

SEQ ID NO: 4320 - protein, 7 aa, Artificial Sequence
  source: /note="Description of Artificial Sequence: Synthetic peptide"
KGFDERS

SEQ ID NO: 4321 - protein, 7 aa, Artificial Sequence
  source: /note="Description of Artificial Sequence: Synthetic peptide"
KGGVAQY

SEQ ID NO: 4322 - protein, 7 aa, Artificial Sequence
  source: /note="Description of Artificial Sequence: Synthetic peptide"
KGLGVVP

SEQ ID NO: 4323 - protein, 7 aa, Artificial Sequence
  source: /note="Description of Artificial Sequence: Synthetic peptide"
KGPSIAW

SEQ ID NO: 4324 - protein, 7 aa, Artificial Sequence
  source: /note="Description of Artificial Sequence: Synthetic peptide"
KGPSPGL

SEQ ID NO: 4325 - protein, 7 aa, Artificial Sequence
  source: /note="Description of Artificial Sequence: Synthetic peptide"
KGQGQLN

SEQ ID NO: 4326 - protein, 7 aa, Artificial Sequence
  source: /note="Description of Artificial Sequence: Synthetic peptide"
KGQSSNS

SEQ ID NO: 4327 - protein, 7 aa, Artificial Sequence
  source: /note="Description of Artificial Sequence: Synthetic peptide"
KGRDATS

SEQ ID NO: 4328 - protein, 7 aa, Artificial Sequence
  source: /note="Description of Artificial Sequence: Synthetic peptide"
KGSGVIV

SEQ ID NO: 4329 - protein, 7 aa, Artificial Sequence
  source: /note="Description of Artificial Sequence: Synthetic peptide"
KGSSSMH

SEQ ID NO: 4330 - protein, 7 aa, Artificial Sequence
  source: /note="Description of Artificial Sequence: Synthetic peptide"
KGTDLLA

SEQ ID NO: 4331 - protein, 7 aa, Artificial Sequence
  source: /note="Description of Artificial Sequence: Synthetic peptide"
KGTTVSN

SEQ ID NO: 4332 - protein, 7 aa, Artificial Sequence
  source: /note="Description of Artificial Sequence: Synthetic peptide"
KGTTVVV

SEQ ID NO: 4333 - protein, 7 aa, Artificial Sequence
  source: /note="Description of Artificial Sequence: Synthetic peptide"
KGTYANT

SEQ ID NO: 4334 - protein, 7 aa, Artificial Sequence
  source: /note="Description of Artificial Sequence: Synthetic peptide"
KGTYNAH

SEQ ID NO: 4335 - protein, 7 aa, Artificial Sequence
  source: /note="Description of Artificial Sequence: Synthetic peptide"
KGVIPEK

SEQ ID NO: 4336 - protein, 7 aa, Artificial Sequence
  source: /note="Description of Artificial Sequence: Synthetic peptide"
KGVLTAV

SEQ ID NO: 4337 - protein, 7 aa, Artificial Sequence
  source: /note="Description of Artificial Sequence: Synthetic peptide"
KGVNFLD

SEQ ID NO: 4338 - protein, 7 aa, Artificial Sequence
  source: /note="Description of Artificial Sequence: Synthetic peptide"
KHAQTIP

SEQ ID NO: 4339 - protein, 7 aa, Artificial Sequence
  source: /note="Description of Artificial Sequence: Synthetic peptide"
KHDDSGM

SEQ ID NO: 4340 - protein, 7 aa, Artificial Sequence
  source: /note="Description of Artificial Sequence: Synthetic peptide"
KHENWMT

SEQ ID NO: 4341 - protein, 7 aa, Artificial Sequence
  source: /note="Description of Artificial Sequence: Synthetic peptide"
KHEPHGS

SEQ ID NO: 4342 - protein, 7 aa, Artificial Sequence
  source: /note="Description of Artificial Sequence: Synthetic peptide"
KHGVEIL

SEQ ID NO: 4343 - protein, 7 aa, Artificial Sequence
  source: /note="Description of Artificial Sequence: Synthetic peptide"
KHHTVEM

SEQ ID NO: 4344 - protein, 7 aa, Artificial Sequence
  source: /note="Description of Artificial Sequence: Synthetic peptide"
KHIPGPD

SEQ ID NO: 4345 - protein, 7 aa, Artificial Sequence
  source: /note="Description of Artificial Sequence: Synthetic peptide"
KHIPSDR

SEQ ID NO: 4346 - protein, 7 aa, Artificial Sequence
  source: /note="Description of Artificial Sequence: Synthetic peptide"
KHPNVPT

SEQ ID NO: 4347 - protein, 7 aa, Artificial Sequence
  source: /note="Description of Artificial Sequence: Synthetic peptide"
KHPPALT

SEQ ID NO: 4348 - protein, 7 aa, Artificial Sequence
  source: /note="Description of Artificial Sequence: Synthetic peptide"
KHPPAVL

SEQ ID NO: 4349 - protein, 7 aa, Artificial Sequence
  source: /note="Description of Artificial Sequence: Synthetic peptide"
KHQSTII

SEQ ID NO: 4350 - protein, 7 aa, Artificial Sequence
  source: /note="Description of Artificial Sequence: Synthetic peptide"
KHSAELG

SEQ ID NO: 4351 - protein, 7 aa, Artificial Sequence
  source: /note="Description of Artificial Sequence: Synthetic peptide"
KHSMATN

SEQ ID NO: 4352 - protein, 7 aa, Artificial Sequence
  source: /note="Description of Artificial Sequence: Synthetic peptide"
KHSNTPN

SEQ ID NO: 4353 - protein, 7 aa, Artificial Sequence
  source: /note="Description of Artificial Sequence: Synthetic peptide"
KHSYMET

SEQ ID NO: 4354 - protein, 7 aa, Artificial Sequence
  source: /note="Description of Artificial Sequence: Synthetic peptide"
KHTALVP

SEQ ID NO: 4355 - protein, 7 aa, Artificial Sequence
  source: /note="Description of Artificial Sequence: Synthetic peptide"
KHTASMA

SEQ ID NO: 4356 - protein, 7 aa, Artificial Sequence
  source: /note="Description of Artificial Sequence: Synthetic peptide"
KHTQNDG

SEQ ID NO: 4357 - protein, 7 aa, Artificial Sequence
  source: /note="Description of Artificial Sequence: Synthetic peptide"
KHTSFAQ

SEQ ID NO: 4358 - protein, 7 aa, Artificial Sequence
  source: /note="Description of Artificial Sequence: Synthetic peptide"
KHTTTMF

SEQ ID NO: 4359 - protein, 7 aa, Artificial Sequence
  source: /note="Description of Artificial Sequence: Synthetic peptide"
KIAPMPH

SEQ ID NO: 4360 - protein, 7 aa, Artificial Sequence
  source: /note="Description of Artificial Sequence: Synthetic peptide"
KIARSEG

SEQ ID NO: 4361 - protein, 7 aa, Artificial Sequence
  source: /note="Description of Artificial Sequence: Synthetic peptide"
KIASSLG

SEQ ID NO: 4362 - protein, 7 aa, Artificial Sequence
  source: /note="Description of Artificial Sequence: Synthetic peptide"
KIATTPL

SEQ ID NO: 4363 - protein, 7 aa, Artificial Sequence
  source: /note="Description of Artificial Sequence: Synthetic peptide"
KIHNLNS

SEQ ID NO: 4364 - protein, 7 aa, Artificial Sequence
  source: /note="Description of Artificial Sequence: Synthetic peptide"
KINTALT

SEQ ID NO: 4365 - protein, 7 aa, Artificial Sequence
  source: /note="Description of Artificial Sequence: Synthetic peptide"
KIPMQSA

SEQ ID NO: 4366 - protein, 7 aa, Artificial Sequence
  source: /note="Description of Artificial Sequence: Synthetic peptide"
KITATVT

SEQ ID NO: 4367 - protein, 7 aa, Artificial Sequence
  source: /note="Description of Artificial Sequence: Synthetic peptide"
KKDLSMY

SEQ ID NO: 4368 - protein, 7 aa, Artificial Sequence
  source: /note="Description of Artificial Sequence: Synthetic peptide"
KKDTGIN

SEQ ID NO: 4369 - protein, 7 aa, Artificial Sequence
  source: /note="Description of Artificial Sequence: Synthetic peptide"
KKPEDWR

SEQ ID NO: 4370 - protein, 7 aa, Artificial Sequence
  source: /note="Description of Artificial Sequence: Synthetic peptide"
KKQSVEP

SEQ ID NO: 4371 - protein, 7 aa, Artificial Sequence
  source: /note="Description of Artificial Sequence: Synthetic peptide"
KKVSDAL

SEQ ID NO: 4372 - protein, 7 aa, Artificial Sequence
  source: /note="Description of Artificial Sequence: Synthetic peptide"
KLAGKSD

SEQ ID NO: 4373 - protein, 7 aa, Artificial Sequence
  source: /note="Description of Artificial Sequence: Synthetic peptide"
KLAPSVT

SEQ ID NO: 4374 - protein, 7 aa, Artificial Sequence
  source: /note="Description of Artificial Sequence: Synthetic peptide"
KLASGLP

SEQ ID NO: 4375 - protein, 7 aa, Artificial Sequence
  source: /note="Description of Artificial Sequence: Synthetic peptide"
KLASPSP

SEQ ID NO: 4376 - protein, 7 aa, Artificial Sequence
  source: /note="Description of Artificial Sequence: Synthetic peptide"
KLASVSV

SEQ ID NO: 4377 - protein, 7 aa, Artificial Sequence
  source: /note="Description of Artificial Sequence: Synthetic peptide"
KLATTRD

SEQ ID NO: 4378 - protein, 7 aa, Artificial Sequence
  source: /note="Description of Artificial Sequence: Synthetic peptide"
KLDINYP

SEQ ID NO: 4379 - protein, 7 aa, Artificial Sequence
  source: /note="Description of Artificial Sequence: Synthetic peptide"
KLENGSW

SEQ ID NO: 4380 - protein, 7 aa, Artificial Sequence
  source: /note="Description of Artificial Sequence: Synthetic peptide"
KLGAVSL

SEQ ID NO: 4381 - protein, 7 aa, Artificial Sequence
  source: /note="Description of Artificial Sequence: Synthetic peptide"
KLGENTD

SEQ ID NO: 4382 - protein, 7 aa, Artificial Sequence
  source: /note="Description of Artificial Sequence: Synthetic peptide"
KLGHLHS

SEQ ID NO: 4383 - protein, 7 aa, Artificial Sequence
  source: /note="Description of Artificial Sequence: Synthetic peptide"
KLGTTSS

SEQ ID NO: 4384 - protein, 7 aa, Artificial Sequence
  source: /note="Description of Artificial Sequence: Synthetic peptide"
KLHVNTP

SEQ ID NO: 4385 - protein, 7 aa, Artificial Sequence
  source: /note="Description of Artificial Sequence: Synthetic peptide"
KLLGAVG

SEQ ID NO: 4386 - protein, 7 aa, Artificial Sequence
  source: /note="Description of Artificial Sequence: Synthetic peptide"
KLLKAPL

SEQ ID NO: 4387 - protein, 7 aa, Artificial Sequence
  source: /note="Description of Artificial Sequence: Synthetic peptide"
KLLPEPG

SEQ ID NO: 4388 - protein, 7 aa, Artificial Sequence
  source: /note="Description of Artificial Sequence: Synthetic peptide"
KLLPGQP

SEQ ID NO: 4389 - protein, 7 aa, Artificial Sequence
  source: /note="Description of Artificial Sequence: Synthetic peptide"
KLLPNPP

SEQ ID NO: 4390 - protein, 7 aa, Artificial Sequence
  source: /note="Description of Artificial Sequence: Synthetic peptide"
KLLSIMG

SEQ ID NO: 4391 - protein, 7 aa, Artificial Sequence
  source: /note="Description of Artificial Sequence: Synthetic peptide"
KLLSTGT

SEQ ID NO: 4392 - protein, 7 aa, Artificial Sequence
  source: /note="Description of Artificial Sequence: Synthetic peptide"
KLNSPDD

SEQ ID NO: 4393 - protein, 7 aa, Artificial Sequence
  source: /note="Description of Artificial Sequence: Synthetic peptide"
KLPNVTP

SEQ ID NO: 4394 - protein, 7 aa, Artificial Sequence
  source: /note="Description of Artificial Sequence: Synthetic peptide"
KLPSELI

SEQ ID NO: 4395 - protein, 7 aa, Artificial Sequence
  source: /note="Description of Artificial Sequence: Synthetic peptide"
KLQVPFS

SEQ ID NO: 4396 - protein, 7 aa, Artificial Sequence
  source: /note="Description of Artificial Sequence: Synthetic peptide"
KLRDIYP

SEQ ID NO: 4397 - protein, 7 aa, Artificial Sequence
  source: /note="Description of Artificial Sequence: Synthetic peptide"
KLSGEIV

SEQ ID NO: 4398 - protein, 7 aa, Artificial Sequence
  source: /note="Description of Artificial Sequence: Synthetic peptide"
KLSHQQF

SEQ ID NO: 4399 - protein, 7 aa, Artificial Sequence
  source: /note="Description of Artificial Sequence: Synthetic peptide"
KLSPTLS

SEQ ID NO: 4400 - protein, 7 aa, Artificial Sequence
  source: /note="Description of Artificial Sequence: Synthetic peptide"
KLSSPAL

SEQ ID NO: 4401 - protein, 7 aa, Artificial Sequence
  source: /note="Description of Artificial Sequence: Synthetic peptide"
KLSSSSW

SEQ ID NO: 4402 - protein, 7 aa, Artificial Sequence
  source: /note="Description of Artificial Sequence: Synthetic peptide"
KLSTESW

SEQ ID NO: 4403 - protein, 7 aa, Artificial Sequence
  source: /note="Description of Artificial Sequence: Synthetic peptide"
KLSYSTL

SEQ ID NO: 4404 - protein, 7 aa, Artificial Sequence
  source: /note="Description of Artificial Sequence: Synthetic peptide"
KLTEIVA

SEQ ID NO: 4405 - protein, 7 aa, Artificial Sequence
  source: /note="Description of Artificial Sequence: Synthetic peptide"
KLTGCND

SEQ ID NO: 4406 - protein, 7 aa, Artificial Sequence
  source: /note="Description of Artificial Sequence: Synthetic peptide"
KLTMTAP

SEQ ID NO: 4407 - protein, 7 aa, Artificial Sequence
  source: /note="Description of Artificial Sequence: Synthetic peptide"
KLTSPYA

SEQ ID NO: 4408 - protein, 7 aa, Artificial Sequence
  source: /note="Description of Artificial Sequence: Synthetic peptide"
KLTSSPT

SEQ ID NO: 4409 - protein, 7 aa, Artificial Sequence
  source: /note="Description of Artificial Sequence: Synthetic peptide"
KLTSSTV

SEQ ID NO: 4410 - protein, 7 aa, Artificial Sequence
  source: /note="Description of Artificial Sequence: Synthetic peptide"
KMAEDKV

SEQ ID NO: 4411 - protein, 7 aa, Artificial Sequence
  source: /note="Description of Artificial Sequence: Synthetic peptide"
KMDSVLP

SEQ ID NO: 4412 - protein, 7 aa, Artificial Sequence
  source: /note="Description of Artificial Sequence: Synthetic peptide"
KMEHRML

SEQ ID NO: 4413 - protein, 7 aa, Artificial Sequence
  source: /note="Description of Artificial Sequence: Synthetic peptide"
KMGTTLG

SEQ ID NO: 4414 - protein, 7 aa, Artificial Sequence
  source: /note="Description of Artificial Sequence: Synthetic peptide"
KMLSPQV

SEQ ID NO: 4415 - protein, 7 aa, Artificial Sequence
  source: /note="Description of Artificial Sequence: Synthetic peptide"
KMNSAAG

SEQ ID NO: 4416 - protein, 7 aa, Artificial Sequence
  source: /note="Description of Artificial Sequence: Synthetic peptide"
KMPEALR

SEQ ID NO: 4417 - protein, 7 aa, Artificial Sequence
  source: /note="Description of Artificial Sequence: Synthetic peptide"
KMPIPVP

SEQ ID NO: 4418 - protein, 7 aa, Artificial Sequence
  source: /note="Description of Artificial Sequence: Synthetic peptide"
KMSHSLD

SEQ ID NO: 4419 - protein, 7 aa, Artificial Sequence
  source: /note="Description of Artificial Sequence: Synthetic peptide"
KNAINMI

SEQ ID NO: 4420 - protein, 7 aa, Artificial Sequence
  source: /note="Description of Artificial Sequence: Synthetic peptide"
KNAKTIP

SEQ ID NO: 4421 - protein, 7 aa, Artificial Sequence
  source: /note="Description of Artificial Sequence: Synthetic peptide"
KNALPTS

SEQ ID NO: 4422 - protein, 7 aa, Artificial Sequence
  source: /note="Description of Artificial Sequence: Synthetic peptide"
KNAVSGS

SEQ ID NO: 4423 - protein, 7 aa, Artificial Sequence
  source: /note="Description of Artificial Sequence: Synthetic peptide"
KNAVTSV

SEQ ID NO: 4424 - protein, 7 aa, Artificial Sequence
  source: /note="Description of Artificial Sequence: Synthetic peptide"
KNERLPM

SEQ ID NO: 4425 - protein, 7 aa, Artificial Sequence
  source: /note="Description of Artificial Sequence: Synthetic peptide"
KNETSSP

SEQ ID NO: 4426 - protein, 7 aa, Artificial Sequence
  source: /note="Description of Artificial Sequence: Synthetic peptide"
KNGDIHC

SEQ ID NO: 4427 - protein, 7 aa, Artificial Sequence
  source: /note="Description of Artificial Sequence: Synthetic peptide"
KNGITPN

SEQ ID NO: 4428 - protein, 7 aa, Artificial Sequence
  source: /note="Description of Artificial Sequence: Synthetic peptide"
KNGLSPA

SEQ ID NO: 4429 - protein, 7 aa, Artificial Sequence
  source: /note="Description of Artificial Sequence: Synthetic peptide"
KNGTAQS

SEQ ID NO: 4430 - protein, 7 aa, Artificial Sequence
  source: /note="Description of Artificial Sequence: Synthetic peptide"
KNHQYAA

SEQ ID NO: 4431 - protein, 7 aa, Artificial Sequence
  source: /note="Description of Artificial Sequence: Synthetic peptide"
KNLPLVS

SEQ ID NO: 4432 - protein, 7 aa, Artificial Sequence
  source: /note="Description of Artificial Sequence: Synthetic peptide"
KNLSLGG

SEQ ID NO: 4433 - protein, 7 aa, Artificial Sequence
  source: /note="Description of Artificial Sequence: Synthetic peptide"
KNPLLSP

SEQ ID NO: 4434 - protein, 7 aa, Artificial Sequence
  source: /note="Description of Artificial Sequence: Synthetic peptide"
KNPMTAP

SEQ ID NO: 4435 - protein, 7 aa, Artificial Sequence
  source: /note="Description of Artificial Sequence: Synthetic peptide"
KNPQEPT

SEQ ID NO: 4436 - protein, 7 aa, Artificial Sequence
  source: /note="Description of Artificial Sequence: Synthetic peptide"
KNPRDLG

SEQ ID NO: 4437 - protein, 7 aa, Artificial Sequence
  source: /note="Description of Artificial Sequence: Synthetic peptide"
KNQPLGY

SEQ ID NO: 4438 - protein, 7 aa, Artificial Sequence
  source: /note="Description of Artificial Sequence: Synthetic peptide"
KNSTSQL

SEQ ID NO: 4439 - protein, 7 aa, Artificial Sequence
  source: /note="Description of Artificial Sequence: Synthetic peptide"
KNVMSGA

SEQ ID NO: 4440 - protein, 7 aa, Artificial Sequence
  source: /note="Description of Artificial Sequence: Synthetic peptide"
KNYSAAV

SEQ ID NO: 4441 - protein, 7 aa, Artificial Sequence
  source: /note="Description of Artificial Sequence: Synthetic peptide"
KPAGTDS

SEQ ID NO: 4442 - protein, 7 aa, Artificial Sequence
  source: /note="Description of Artificial Sequence: Synthetic peptide"
KPASNYD

SEQ ID NO: 4443 - protein, 7 aa, Artificial Sequence
  source: /note="Description of Artificial Sequence: Synthetic peptide"
KPATSPG

SEQ ID NO: 4444 - protein, 7 aa, Artificial Sequence
  source: /note="Description of Artificial Sequence: Synthetic peptide"
KPAVPVY

SEQ ID NO: 4445 - protein, 7 aa, Artificial Sequence
  source: /note="Description of Artificial Sequence: Synthetic peptide"
KPDRPPD

SEQ ID NO: 4446 - protein, 7 aa, Artificial Sequence
  source: /note="Description of Artificial Sequence: Synthetic peptide"
KPENSHS

SEQ ID NO: 4447 - protein, 7 aa, Artificial Sequence
  source: /note="Description of Artificial Sequence: Synthetic peptide"
KPFETGR

SEQ ID NO: 4448 - protein, 7 aa, Artificial Sequence
  source: /note="Description of Artificial Sequence: Synthetic peptide"
KPHPPSF

SEQ ID NO: 4449 - protein, 7 aa, Artificial Sequence
  source: /note="Description of Artificial Sequence: Synthetic peptide"
KPILQSS

SEQ ID NO: 4450 - protein, 7 aa, Artificial Sequence
  source: /note="Description of Artificial Sequence: Synthetic peptide"
KPLAQLS

SEQ ID NO: 4451 - protein, 7 aa, Artificial Sequence
  source: /note="Description of Artificial Sequence: Synthetic peptide"
KPLDHLT

SEQ ID NO: 4452 - protein, 7 aa, Artificial Sequence
  source: /note="Description of Artificial Sequence: Synthetic peptide"
KPLEVEG

SEQ ID NO: 4453 - protein, 7 aa, Artificial Sequence
  source: /note="Description of Artificial Sequence: Synthetic peptide"
KPLQVDP

SEQ ID NO: 4454 - protein, 7 aa, Artificial Sequence
  source: /note="Description of Artificial Sequence: Synthetic peptide"
KPMAHLE

SEQ ID NO: 4455 - protein, 7 aa, Artificial Sequence
  source: /note="Description of Artificial Sequence: Synthetic peptide"
KPMDPTL

SEQ ID NO: 4456 - protein, 7 aa, Artificial Sequence
  source: /note="Description of Artificial Sequence: Synthetic peptide"
KPMSITP

SEQ ID NO: 4457 - protein, 7 aa, Artificial Sequence
  source: /note="Description of Artificial Sequence: Synthetic peptide"
KPNAVSM

SEQ ID NO: 4458 - protein, 7 aa, Artificial Sequence
  source: /note="Description of Artificial Sequence: Synthetic peptide"
KPPILTS

SEQ ID NO: 4459 - protein, 7 aa, Artificial Sequence
  source: /note="Description of Artificial Sequence: Synthetic peptide"
KPPLAQD

SEQ ID NO: 4460 - protein, 7 aa, Artificial Sequence
  source: /note="Description of Artificial Sequence: Synthetic peptide"
KPPREAD

SEQ ID NO: 4461 - protein, 7 aa, Artificial Sequence
  source: /note="Description of Artificial Sequence: Synthetic peptide"
KPRAPSD

SEQ ID NO: 4462 - protein, 7 aa, Artificial Sequence
  source: /note="Description of Artificial Sequence: Synthetic peptide"
KPSGHSS

SEQ ID NO: 4463 - protein, 7 aa, Artificial Sequence
  source: /note="Description of Artificial Sequence: Synthetic peptide"
KPSGPPT

SEQ ID NO: 4464 - protein, 7 aa, Artificial Sequence
  source: /note="Description of Artificial Sequence: Synthetic peptide"
KPSVPTV

SEQ ID NO: 4465 - protein, 7 aa, Artificial Sequence
  source: /note="Description of Artificial Sequence: Synthetic peptide"
KPTGMHL

SEQ ID NO: 4466 - protein, 7 aa, Artificial Sequence
  source: /note="Description of Artificial Sequence: Synthetic peptide"
KPTPTLM

SEQ ID NO: 4467 - protein, 7 aa, Artificial Sequence
  source: /note="Description of Artificial Sequence: Synthetic peptide"
KPTVIPA

SEQ ID NO: 4468 - protein, 7 aa, Artificial Sequence
  source: /note="Description of Artificial Sequence: Synthetic peptide"
KPVGEFT

SEQ ID NO: 4469 - protein, 7 aa, Artificial Sequence
  source: /note="Description of Artificial Sequence: Synthetic peptide"
KPVPQPD

SEQ ID NO: 4470 - protein, 7 aa, Artificial Sequence
  source: /note="Description of Artificial Sequence: Synthetic peptide"
KPVTLDN

SEQ ID NO: 4471 - protein, 7 aa, Artificial Sequence
  source: /note="Description of Artificial Sequence: Synthetic peptide"
KPVTPHS

SEQ ID NO: 4472 - protein, 7 aa, Artificial Sequence
  source: /note="Description of Artificial Sequence: Synthetic peptide"
KPYLPEN

SEQ ID NO: 4473 - protein, 7 aa, Artificial Sequence
  source: /note="Description of Artificial Sequence: Synthetic peptide"
KQADIPR

SEQ ID NO: 4474 - protein, 7 aa, Artificial Sequence
  source: /note="Description of Artificial Sequence: Synthetic peptide"
KQALTMT

SEQ ID NO: 4475 - protein, 7 aa, Artificial Sequence
  source: /note="Description of Artificial Sequence: Synthetic peptide"
KQDRDRL

SEQ ID NO: 4476 - protein, 7 aa, Artificial Sequence
  source: /note="Description of Artificial Sequence: Synthetic peptide"
KQGLTPS

SEQ ID NO: 4477 - protein, 7 aa, Artificial Sequence
  source: /note="Description of Artificial Sequence: Synthetic peptide"
KQGVWPN

SEQ ID NO: 4478 - protein, 7 aa, Artificial Sequence
  source: /note="Description of Artificial Sequence: Synthetic peptide"
KQIQPKN

SEQ ID NO: 4479 - protein, 7 aa, Artificial Sequence
  source: /note="Description of Artificial Sequence: Synthetic peptide"
KQKHQFE

SEQ ID NO: 4480 - protein, 7 aa, Artificial Sequence
  source: /note="Description of Artificial Sequence: Synthetic peptide"
KQLPINV

SEQ ID NO: 4481 - protein, 7 aa, Artificial Sequence
  source: /note="Description of Artificial Sequence: Synthetic peptide"
KQMLDPT

SEQ ID NO: 4482 - protein, 7 aa, Artificial Sequence
  source: /note="Description of Artificial Sequence: Synthetic peptide"
KQMNDLA

SEQ ID NO: 4483 - protein, 7 aa, Artificial Sequence
  source: /note="Description of Artificial Sequence: Synthetic peptide"
KQNVINT

SEQ ID NO: 4484 - protein, 7 aa, Artificial Sequence
  source: /note="Description of Artificial Sequence: Synthetic peptide"
KQPPQPP

SEQ ID NO: 4485 - protein, 7 aa, Artificial Sequence
  source: /note="Description of Artificial Sequence: Synthetic peptide"
KQREQPM

SEQ ID NO: 4486 - protein, 7 aa, Artificial Sequence
  source: /note="Description of Artificial Sequence: Synthetic peptide"
KQSSHTT

SEQ ID NO: 4487 - protein, 7 aa, Artificial Sequence
  source: /note="Description of Artificial Sequence: Synthetic peptide"
KQSSTSI

SEQ ID NO: 4488 - protein, 7 aa, Artificial Sequence
  source: /note="Description of Artificial Sequence: Synthetic peptide"
KQTSVTG

SEQ ID NO: 4489 - protein, 7 aa, Artificial Sequence
  source: /note="Description of Artificial Sequence: Synthetic peptide"
KQTTPVL

SEQ ID NO: 4490 - protein, 7 aa, Artificial Sequence
  source: /note="Description of Artificial Sequence: Synthetic peptide"
KQVGSMP

SEQ ID NO: 4491 - protein, 7 aa, Artificial Sequence
  source: /note="Description of Artificial Sequence: Synthetic peptide"
KQVSSER

SEQ ID NO: 4492 - protein, 7 aa, Artificial Sequence
  source: /note="Description of Artificial Sequence: Synthetic peptide"
KQVVSVT

SEQ ID NO: 4493 - protein, 7 aa, Artificial Sequence
  source: /note="Description of Artificial Sequence: Synthetic peptide"
KQYSSSV

SEQ ID NO: 4494 - protein, 7 aa, Artificial Sequence
  source: /note="Description of Artificial Sequence: Synthetic peptide"
KRANAIP

SEQ ID NO: 4495 - protein, 7 aa, Artificial Sequence
  source: /note="Description of Artificial Sequence: Synthetic peptide"
KRAVAAE

SEQ ID NO: 4496 - protein, 7 aa, Artificial Sequence
  source: /note="Description of Artificial Sequence: Synthetic peptide"
KRDAAMP

SEQ ID NO: 4497 - protein, 7 aa, Artificial Sequence
  source: /note="Description of Artificial Sequence: Synthetic peptide"
KRDDMNV

SEQ ID NO: 4498 - protein, 7 aa, Artificial Sequence
  source: /note="Description of Artificial Sequence: Synthetic peptide"
KRDMGAG

SEQ ID NO: 4499 - protein, 7 aa, Artificial Sequence
  source: /note="Description of Artificial Sequence: Synthetic peptide"
KRDSTSP

SEQ ID NO: 4500 - protein, 7 aa, Artificial Sequence
  source: /note="Description of Artificial Sequence: Synthetic peptide"
KREFENI

SEQ ID NO: 4501 - protein, 7 aa, Artificial Sequence
  source: /note="Description of Artificial Sequence: Synthetic peptide"
KRESMPI

SEQ ID NO: 4502 - protein, 7 aa, Artificial Sequence
  source: /note="Description of Artificial Sequence: Synthetic peptide"
KREVLPT

SEQ ID NO: 4503 - protein, 7 aa, Artificial Sequence
  source: /note="Description of Artificial Sequence: Synthetic peptide"
KRFSGVE

SEQ ID NO: 4504 - protein, 7 aa, Artificial Sequence
  source: /note="Description of Artificial Sequence: Synthetic peptide"
KRHESMS

SEQ ID NO: 4505 - protein, 7 aa, Artificial Sequence
  source: /note="Description of Artificial Sequence: Synthetic peptide"
KRNSLNE

SEQ ID NO: 4506 - protein, 7 aa, Artificial Sequence
  source: /note="Description of Artificial Sequence: Synthetic peptide"
KRPAEHD

SEQ ID NO: 4507 - protein, 7 aa, Artificial Sequence
  source: /note="Description of Artificial Sequence: Synthetic peptide"
KRQHPEI

SEQ ID NO: 4508 - protein, 7 aa, Artificial Sequence
  source: /note="Description of Artificial Sequence: Synthetic peptide"
KRSLDSP

SEQ ID NO: 4509 - protein, 7 aa, Artificial Sequence
  source: /note="Description of Artificial Sequence: Synthetic peptide"
KRSLTET

SEQ ID NO: 4510 - protein, 7 aa, Artificial Sequence
  source: /note="Description of Artificial Sequence: Synthetic peptide"
KRTDGLG

SEQ ID NO: 4511 - protein, 7 aa, Artificial Sequence
  source: /note="Description of Artificial Sequence: Synthetic peptide"
KRTSEGV

SEQ ID NO: 4512 - protein, 7 aa, Artificial Sequence
  source: /note="Description of Artificial Sequence: Synthetic peptide"
KSAAIAY

SEQ ID NO: 4513 - protein, 7 aa, Artificial Sequence
  source: /note="Description of Artificial Sequence: Synthetic peptide"
KSAEETS

SEQ ID NO: 4514 - protein, 7 aa, Artificial Sequence
  source: /note="Description of Artificial Sequence: Synthetic peptide"
KSALMGP

SEQ ID NO: 4515 - protein, 7 aa, Artificial Sequence
  source: /note="Description of Artificial Sequence: Synthetic peptide"
KSASLSM

SEQ ID NO: 4516 - protein, 7 aa, Artificial Sequence
  source: /note="Description of Artificial Sequence: Synthetic peptide"
KSASWSE

SEQ ID NO: 4517 - protein, 7 aa, Artificial Sequence
  source: /note="Description of Artificial Sequence: Synthetic peptide"
KSDMPFN

SEQ ID NO: 4518 - protein, 7 aa, Artificial Sequence
  source: /note="Description of Artificial Sequence: Synthetic peptide"
KSDPEWP

SEQ ID NO: 4519 - protein, 7 aa, Artificial Sequence
  source: /note="Description of Artificial Sequence: Synthetic peptide"
KSDVMFQ

SEQ ID NO: 4520 - protein, 7 aa, Artificial Sequence
  source: /note="Description of Artificial Sequence: Synthetic peptide"
KSERYAV

SEQ ID NO: 4521 - protein, 7 aa, Artificial Sequence
  source: /note="Description of Artificial Sequence: Synthetic peptide"
KSFPVVQ

SEQ ID NO: 4522 - protein, 7 aa, Artificial Sequence
  source: /note="Description of Artificial Sequence: Synthetic peptide"
KSFQSTP

SEQ ID NO: 4523 - protein, 7 aa, Artificial Sequence
  source: /note="Description of Artificial Sequence: Synthetic peptide"
KSGPVTL

SEQ ID NO: 4524 - protein, 7 aa, Artificial Sequence
  source: /note="Description of Artificial Sequence: Synthetic peptide"
KSGTAFS

SEQ ID NO: 4525 - protein, 7 aa, Artificial Sequence
  source: /note="Description of Artificial Sequence: Synthetic peptide"
KSGVQSP

SEQ ID NO: 4526 - protein, 7 aa, Artificial Sequence
  source: /note="Description of Artificial Sequence: Synthetic peptide"
KSIATSG

SEQ ID NO: 4527 - protein, 7 aa, Artificial Sequence
  source: /note="Description of Artificial Sequence: Synthetic peptide"
KSIEFFA

SEQ ID NO: 4528 - protein, 7 aa, Artificial Sequence
  source: /note="Description of Artificial Sequence: Synthetic peptide"
KSIREDP

SEQ ID NO: 4529 - protein, 7 aa, Artificial Sequence
  source: /note="Description of Artificial Sequence: Synthetic peptide"
KSKDVRY

SEQ ID NO: 4530 - protein, 7 aa, Artificial Sequence
  source: /note="Description of Artificial Sequence: Synthetic peptide"
KSMDTTG

SEQ ID NO: 4531 - protein, 7 aa, Artificial Sequence
  source: /note="Description of Artificial Sequence: Synthetic peptide"
KSNACLH

SEQ ID NO: 4532 - protein, 7 aa, Artificial Sequence
  source: /note="Description of Artificial Sequence: Synthetic peptide"
KSNDRTD

SEQ ID NO: 4533 - protein, 7 aa, Artificial Sequence
  source: /note="Description of Artificial Sequence: Synthetic peptide"
KSNTPAA

SEQ ID NO: 4534 - protein, 7 aa, Artificial Sequence
  source: /note="Description of Artificial Sequence: Synthetic peptide"
KSNTTAD

SEQ ID NO: 4535 - protein, 7 aa, Artificial Sequence
  source: /note="Description of Artificial Sequence: Synthetic peptide"
KSPAEIA

SEQ ID NO: 4536 - protein, 7 aa, Artificial Sequence
  source: /note="Description of Artificial Sequence: Synthetic peptide"
KSPDGMV

SEQ ID NO: 4537 - protein, 7 aa, Artificial Sequence
  source: /note="Description of Artificial Sequence: Synthetic peptide"
KSPDRYH

SEQ ID NO: 4538 - protein, 7 aa, Artificial Sequence
  source: /note="Description of Artificial Sequence: Synthetic peptide"
KSPGVMV

SEQ ID NO: 4539 - protein, 7 aa, Artificial Sequence
  source: /note="Description of Artificial Sequence: Synthetic peptide"
KSPRTPE

SEQ ID NO: 4540 - protein, 7 aa, Artificial Sequence
  source: /note="Description of Artificial Sequence: Synthetic peptide"
KSPSHAA

SEQ ID NO: 4541 - protein, 7 aa, Artificial Sequence
  source: /note="Description of Artificial Sequence: Synthetic peptide"
KSPSTFH

SEQ ID NO: 4542 - protein, 7 aa, Artificial Sequence
  source: /note="Description of Artificial Sequence: Synthetic peptide"
KSPTLAS

SEQ ID NO: 4543 - protein, 7 aa, Artificial Sequence
  source: /note="Description of Artificial Sequence: Synthetic peptide"
KSPVRDT

SEQ ID NO: 4544 - protein, 7 aa, Artificial Sequence
  source: /note="Description of Artificial Sequence: Synthetic peptide"
KSPVSGN

SEQ ID NO: 4545 - protein, 7 aa, Artificial Sequence
  source: /note="Description of Artificial Sequence: Synthetic peptide"
KSPVSSY

SEQ ID NO: 4546 - protein, 7 aa, Artificial Sequence
  source: /note="Description of Artificial Sequence: Synthetic peptide"
KSQAEFG

SEQ ID NO: 4547 - protein, 7 aa, Artificial Sequence
  source: /note="Description of Artificial Sequence: Synthetic peptide"
KSQALTD

SEQ ID NO: 4548 - protein, 7 aa, Artificial Sequence
  source: /note="Description of Artificial Sequence: Synthetic peptide"
KSQGSHY

SEQ ID NO: 4549 - protein, 7 aa, Artificial Sequence
  source: /note="Description of Artificial Sequence: Synthetic peptide"
KSQHYPS

SEQ ID NO: 4550 - protein, 7 aa, Artificial Sequence
  source: /note="Description of Artificial Sequence: Synthetic peptide"
KSQSDKV

SEQ ID NO: 4551 - protein, 7 aa, Artificial Sequence
  source: /note="Description of Artificial Sequence: Synthetic peptide"
KSQSGNM

SEQ ID NO: 4552 - protein, 7 aa, Artificial Sequence
  source: /note="Description of Artificial Sequence: Synthetic peptide"
KSRDNLN

SEQ ID NO: 4553 - protein, 7 aa, Artificial Sequence
  source: /note="Description of Artificial Sequence: Synthetic peptide"
KSRNLEP

SEQ ID NO: 4554 - protein, 7 aa, Artificial Sequence
  source: /note="Description of Artificial Sequence: Synthetic peptide"
KSRTGTE

SEQ ID NO: 4555 - protein, 7 aa, Artificial Sequence
  source: /note="Description of Artificial Sequence: Synthetic peptide"
KSSAHAW

SEQ ID NO: 4556 - protein, 7 aa, Artificial Sequence
  source: /note="Description of Artificial Sequence: Synthetic peptide"
KSSDMVV

SEQ ID NO: 4557 - protein, 7 aa, Artificial Sequence
  source: /note="Description of Artificial Sequence: Synthetic peptide"
KSSHPPV

SEQ ID NO: 4558 - protein, 7 aa, Artificial Sequence
  source: /note="Description of Artificial Sequence: Synthetic peptide"
KSSPLTS

SEQ ID NO: 4559 - protein, 7 aa, Artificial Sequence
  source: /note="Description of Artificial Sequence: Synthetic peptide"
KSSQQSI

SEQ ID NO: 4560 - protein, 7 aa, Artificial Sequence
  source: /note="Description of Artificial Sequence: Synthetic peptide"
KSSSGDK

SEQ ID NO: 4561 - protein, 7 aa, Artificial Sequence
  source: /note="Description of Artificial Sequence: Synthetic peptide"
KSSSGLE

SEQ ID NO: 4562 - protein, 7 aa, Artificial Sequence
  source: /note="Description of Artificial Sequence: Synthetic peptide"
KSSTAGV

SEQ ID NO: 4563 - protein, 7 aa, Artificial Sequence
  source: /note="Description of Artificial Sequence: Synthetic peptide"
KSSTSGN

SEQ ID NO: 4564 - protein, 7 aa, Artificial Sequence
  source: /note="Description of Artificial Sequence: Synthetic peptide"
KSSYYPA

SEQ ID NO: 4565 - protein, 7 aa, Artificial Sequence
  source: /note="Description of Artificial Sequence: Synthetic peptide"
KSTHDVP

SEQ ID NO: 4566 - protein, 7 aa, Artificial Sequence
  source: /note="Description of Artificial Sequence: Synthetic peptide"
KSTPREG

SEQ ID NO: 4567 - protein, 7 aa, Artificial Sequence
  source: /note="Description of Artificial Sequence: Synthetic peptide"
KSTSGMP

SEQ ID NO: 4568 - protein, 7 aa, Artificial Sequence
  source: /note="Description of Artificial Sequence: Synthetic peptide"
KSTVPDL

SEQ ID NO: 4569 - protein, 7 aa, Artificial Sequence
  source: /note="Description of Artificial Sequence: Synthetic peptide"
KSTVTHF

SEQ ID NO: 4570 - protein, 7 aa, Artificial Sequence
  source: /note="Description of Artificial Sequence: Synthetic peptide"
KSVAISV

SEQ ID NO: 4571 - protein, 7 aa, Artificial Sequence
  source: /note="Description of Artificial Sequence: Synthetic peptide"
KSVGLSS

SEQ ID NO: 4572 - protein, 7 aa, Artificial Sequence
  source: /note="Description of Artificial Sequence: Synthetic peptide"
KSVLVES

SEQ ID NO: 4573 - protein, 7 aa, Artificial Sequence
  source: /note="Description of Artificial Sequence: Synthetic peptide"
KSYNSPY

SEQ ID NO: 4574 - protein, 7 aa, Artificial Sequence
  source: /note="Description of Artificial Sequence: Synthetic peptide"
KSYPNDH

SEQ ID NO: 4575 - protein, 7 aa, Artificial Sequence
  source: /note="Description of Artificial Sequence: Synthetic peptide"
KSYPPAL

SEQ ID NO: 4576 - protein, 7 aa, Artificial Sequence
  source: /note="Description of Artificial Sequence: Synthetic peptide"
KTADAPR

SEQ ID NO: 4577 - protein, 7 aa, Artificial Sequence
  source: /note="Description of Artificial Sequence: Synthetic peptide"
KTASLGP

SEQ ID NO: 4578 - protein, 7 aa, Artificial Sequence
  source: /note="Description of Artificial Sequence: Synthetic peptide"
KTASMPT

SEQ ID NO: 4579 - protein, 7 aa, Artificial Sequence
  source: /note="Description of Artificial Sequence: Synthetic peptide"
KTDRTLQ

SEQ ID NO: 4580 - protein, 7 aa, Artificial Sequence
  source: /note="Description of Artificial Sequence: Synthetic peptide"
KTDSRVP

SEQ ID NO: 4581 - protein, 7 aa, Artificial Sequence
  source: /note="Description of Artificial Sequence: Synthetic peptide"
KTEFRNP

SEQ ID NO: 4582 - protein, 7 aa, Artificial Sequence
  source: /note="Description of Artificial Sequence: Synthetic peptide"
KTEGSGW

SEQ ID NO: 4583 - protein, 7 aa, Artificial Sequence
  source: /note="Description of Artificial Sequence: Synthetic peptide"
KTERTLI

SEQ ID NO: 4584 - protein, 7 aa, Artificial Sequence
  source: /note="Description of Artificial Sequence: Synthetic peptide"
KTFTEKT

SEQ ID NO: 4585 - protein, 7 aa, Artificial Sequence
  source: /note="Description of Artificial Sequence: Synthetic peptide"
KTGPPPV

SEQ ID NO: 4586 - protein, 7 aa, Artificial Sequence
  source: /note="Description of Artificial Sequence: Synthetic peptide"
KTGVSSD

SEQ ID NO: 4587 - protein, 7 aa, Artificial Sequence
  source: /note="Description of Artificial Sequence: Synthetic peptide"
KTHGLCL

SEQ ID NO: 4588 - protein, 7 aa, Artificial Sequence
  source: /note="Description of Artificial Sequence: Synthetic peptide"
KTIITDL

SEQ ID NO: 4589 - protein, 7 aa, Artificial Sequence
  source: /note="Description of Artificial Sequence: Synthetic peptide"
KTLPLPE

SEQ ID NO: 4590 - protein, 7 aa, Artificial Sequence
  source: /note="Description of Artificial Sequence: Synthetic peptide"
KTMTTVP

SEQ ID NO: 4591 - protein, 7 aa, Artificial Sequence
  source: /note="Description of Artificial Sequence: Synthetic peptide"
KTMVPVV

SEQ ID NO: 4592 - protein, 7 aa, Artificial Sequence
  source: /note="Description of Artificial Sequence: Synthetic peptide"
KTNGHNY

SEQ ID NO: 4593 - protein, 7 aa, Artificial Sequence
  source: /note="Description of Artificial Sequence: Synthetic peptide"
KTNPLAQ

SEQ ID NO: 4594 - protein, 7 aa, Artificial Sequence
  source: /note="Description of Artificial Sequence: Synthetic peptide"
KTNSEII

SEQ ID NO: 4595 - protein, 7 aa, Artificial Sequence
  source: /note="Description of Artificial Sequence: Synthetic peptide"
KTPDPKK

SEQ ID NO: 4596 - protein, 7 aa, Artificial Sequence
  source: /note="Description of Artificial Sequence: Synthetic peptide"
KTPMVEL

SEQ ID NO: 4597 - protein, 7 aa, Artificial Sequence
  source: /note="Description of Artificial Sequence: Synthetic peptide"
KTQLMTS

SEQ ID NO: 4598 - protein, 7 aa, Artificial Sequence
  source: /note="Description of Artificial Sequence: Synthetic peptide"
KTQPGSV

SEQ ID NO: 4599 - protein, 7 aa, Artificial Sequence
  source: /note="Description of Artificial Sequence: Synthetic peptide"
KTQSILS

SEQ ID NO: 4600 - protein, 7 aa, Artificial Sequence
  source: /note="Description of Artificial Sequence: Synthetic peptide"
KTSEVRW

SEQ ID NO: 4601 - protein, 7 aa, Artificial Sequence
  source: /note="Description of Artificial Sequence: Synthetic peptide"
KTSQSHT

SEQ ID NO: 4602 - protein, 7 aa, Artificial Sequence
  source: /note="Description of Artificial Sequence: Synthetic peptide"
KTSVTRD

SEQ ID NO: 4603 - protein, 7 aa, Artificial Sequence
  source: /note="Description of Artificial Sequence: Synthetic peptide"
KTTAPHI

SEQ ID NO: 4604 - protein, 7 aa, Artificial Sequence
  source: /note="Description of Artificial Sequence: Synthetic peptide"
KTTDRIP

SEQ ID NO: 4605 - protein, 7 aa, Artificial Sequence
  source: /note="Description of Artificial Sequence: Synthetic peptide"
KTTLMTS

SEQ ID NO: 4606 - protein, 7 aa, Artificial Sequence
  source: /note="Description of Artificial Sequence: Synthetic peptide"
KTTPVLV

SEQ ID NO: 4607 - protein, 7 aa, Artificial Sequence
  source: /note="Description of Artificial Sequence: Synthetic peptide"
KTTQNSN

SEQ ID NO: 4608 - protein, 7 aa, Artificial Sequence
  source: /note="Description of Artificial Sequence: Synthetic peptide"
KTTSKPP

SEQ ID NO: 4609 - protein, 7 aa, Artificial Sequence
  source: /note="Description of Artificial Sequence: Synthetic peptide"
KTVAMER

SEQ ID NO: 4610 - protein, 7 aa, Artificial Sequence
  source: /note="Description of Artificial Sequence: Synthetic peptide"
KTVRETS

SEQ ID NO: 4611 - protein, 7 aa, Artificial Sequence
  source: /note="Description of Artificial Sequence: Synthetic peptide"
KTVTNVL

SEQ ID NO: 4612 - protein, 7 aa, Artificial Sequence
  source: /note="Description of Artificial Sequence: Synthetic peptide"
KTVVANP

SEQ ID NO: 4613 - protein, 7 aa, Artificial Sequence
  source: /note="Description of Artificial Sequence: Synthetic peptide"
KTYGTHA

SEQ ID NO: 4614 - protein, 7 aa, Artificial Sequence
  source: /note="Description of Artificial Sequence: Synthetic peptide"
KVALATL

SEQ ID NO: 4615 - protein, 7 aa, Artificial Sequence
  source: /note="Description of Artificial Sequence: Synthetic peptide"
KVAMPVL

SEQ ID NO: 4616 - protein, 7 aa, Artificial Sequence
  source: /note="Description of Artificial Sequence: Synthetic peptide"
KVATSTI

SEQ ID NO: 4617 - protein, 7 aa, Artificial Sequence
  source: /note="Description of Artificial Sequence: Synthetic peptide"
KVDSREP

SEQ ID NO: 4618 - protein, 7 aa, Artificial Sequence
  source: /note="Description of Artificial Sequence: Synthetic peptide"
KVDVLYN

SEQ ID NO: 4619 - protein, 7 aa, Artificial Sequence
  source: /note="Description of Artificial Sequence: Synthetic peptide"
KVESMDS

SEQ ID NO: 4620 - protein, 7 aa, Artificial Sequence
  source: /note="Description of Artificial Sequence: Synthetic peptide"
KVGAGNT

SEQ ID NO: 4621 - protein, 7 aa, Artificial Sequence
  source: /note="Description of Artificial Sequence: Synthetic peptide"
KVGNNAY

SEQ ID NO: 4622 - protein, 7 aa, Artificial Sequence
  source: /note="Description of Artificial Sequence: Synthetic peptide"
KVGSVYT

SEQ ID NO: 4623 - protein, 7 aa, Artificial Sequence
  source: /note="Description of Artificial Sequence: Synthetic peptide"
KVLQPHP

SEQ ID NO: 4624 - protein, 7 aa, Artificial Sequence
  source: /note="Description of Artificial Sequence: Synthetic peptide"
KVNITAF

SEQ ID NO: 4625 - protein, 7 aa, Artificial Sequence
  source: /note="Description of Artificial Sequence: Synthetic peptide"
KVNLFAG

SEQ ID NO: 4626 - protein, 7 aa, Artificial Sequence
  source: /note="Description of Artificial Sequence: Synthetic peptide"
KVNSVAF

SEQ ID NO: 4627 - protein, 7 aa, Artificial Sequence
  source: /note="Description of Artificial Sequence: Synthetic peptide"
KVQERSQ

SEQ ID NO: 4628 - protein, 7 aa, Artificial Sequence
  source: /note="Description of Artificial Sequence: Synthetic peptide"
KVSAALS

SEQ ID NO: 4629 - protein, 7 aa, Artificial Sequence
  source: /note="Description of Artificial Sequence: Synthetic peptide"
KVSGLSM

SEQ ID NO: 4630 - protein, 7 aa, Artificial Sequence
  source: /note="Description of Artificial Sequence: Synthetic peptide"
KVSRISD

SEQ ID NO: 4631 - protein, 7 aa, Artificial Sequence
  source: /note="Description of Artificial Sequence: Synthetic peptide"
KVSSTVE

SEQ ID NO: 4632 - protein, 7 aa, Artificial Sequence
  source: /note="Description of Artificial Sequence: Synthetic peptide"
KVTAPNA

SEQ ID NO: 4633 - protein, 7 aa, Artificial Sequence
  source: /note="Description of Artificial Sequence: Synthetic peptide"
KVTGMPV

SEQ ID NO: 4634 - protein, 7 aa, Artificial Sequence
  source: /note="Description of Artificial Sequence: Synthetic peptide"
KVTGYSE

SEQ ID NO: 4635 - protein, 7 aa, Artificial Sequence
  source: /note="Description of Artificial Sequence: Synthetic peptide"
KVTTPLP

SEQ ID NO: 4636 - protein, 7 aa, Artificial Sequence
  source: /note="Description of Artificial Sequence: Synthetic peptide"
KVVAPAL

SEQ ID NO: 4637 - protein, 7 aa, Artificial Sequence
  source: /note="Description of Artificial Sequence: Synthetic peptide"
KVVLREG

SEQ ID NO: 4638 - protein, 7 aa, Artificial Sequence
  source: /note="Description of Artificial Sequence: Synthetic peptide"
KVVTAPE

SEQ ID NO: 4639 - protein, 7 aa, Artificial Sequence
  source: /note="Description of Artificial Sequence: Synthetic peptide"
KWTDGPA

SEQ ID NO: 4640 - protein, 7 aa, Artificial Sequence
  source: /note="Description of Artificial Sequence: Synthetic peptide"
KWVPESP

SEQ ID NO: 4641 - protein, 7 aa, Artificial Sequence
  source: /note="Description of Artificial Sequence: Synthetic peptide"
KYAHSPT

SEQ ID NO: 4642 - protein, 7 aa, Artificial Sequence
  source: /note="Description of Artificial Sequence: Synthetic peptide"
KYATNAA

SEQ ID NO: 4643 - protein, 7 aa, Artificial Sequence
  source: /note="Description of Artificial Sequence: Synthetic peptide"
KYDGGQH

SEQ ID NO: 4644 - protein, 7 aa, Artificial Sequence
  source: /note="Description of Artificial Sequence: Synthetic peptide"
KYGSTVV

SEQ ID NO: 4645 - protein, 7 aa, Artificial Sequence
  source: /note="Description of Artificial Sequence: Synthetic peptide"
KYKDLPA

SEQ ID NO: 4646 - protein, 7 aa, Artificial Sequence
  source: /note="Description of Artificial Sequence: Synthetic peptide"
KYPALSA

SEQ ID NO: 4647 - protein, 7 aa, Artificial Sequence
  source: /note="Description of Artificial Sequence: Synthetic peptide"
KYRENNV

SEQ ID NO: 4648 - protein, 7 aa, Artificial Sequence
  source: /note="Description of Artificial Sequence: Synthetic peptide"
KYSKPDT

SEQ ID NO: 4649 - protein, 7 aa, Artificial Sequence
  source: /note="Description of Artificial Sequence: Synthetic peptide"
KYTGRQE

SEQ ID NO: 4650 - protein, 7 aa, Artificial Sequence
  source: /note="Description of Artificial Sequence: Synthetic peptide"
KYTLTPN

SEQ ID NO: 4651 - protein, 7 aa, Artificial Sequence
  source: /note="Description of Artificial Sequence: Synthetic peptide"
KYVCGPN

SEQ ID NO: 4652 - protein, 7 aa, Artificial Sequence
  source: /note="Description of Artificial Sequence: Synthetic peptide"
KYVGGPN

SEQ ID NO: 4653 - protein, 7 aa, Artificial Sequence
  source: /note="Description of Artificial Sequence: Synthetic peptide"
KYVNGVD

SEQ ID NO: 4654 - protein, 7 aa, Artificial Sequence
  source: /note="Description of Artificial Sequence: Synthetic peptide"
KYVTTSP

SEQ ID NO: 4655 - protein, 7 aa, Artificial Sequence
  source: /note="Description of Artificial Sequence: Synthetic peptide"
LAADVRF

SEQ ID NO: 4656 - protein, 7 aa, Artificial Sequence
  source: /note="Description of Artificial Sequence: Synthetic peptide"
LAAGCPV

SEQ ID NO: 4657 - protein, 7 aa, Artificial Sequence
  source: /note="Description of Artificial Sequence: Synthetic peptide"
LAAGIRF

SEQ ID NO: 4658 - protein, 7 aa, Artificial Sequence
  source: /note="Description of Artificial Sequence: Synthetic peptide"
LAAKPLI

SEQ ID NO: 4659 - protein, 7 aa, Artificial Sequence
  source: /note="Description of Artificial Sequence: Synthetic peptide"
LAANGAH

SEQ ID NO: 4660 - protein, 7 aa, Artificial Sequence
  source: /note="Description of Artificial Sequence: Synthetic peptide"
LAAPTSS

SEQ ID NO: 4661 - protein, 7 aa, Artificial Sequence
  source: /note="Description of Artificial Sequence: Synthetic peptide"
LAAQDKE

SEQ ID NO: 4662 - protein, 7 aa, Artificial Sequence
  source: /note="Description of Artificial Sequence: Synthetic peptide"
LAARMQP

SEQ ID NO: 4663 - protein, 7 aa, Artificial Sequence
  source: /note="Description of Artificial Sequence: Synthetic peptide"
LAARRPD

SEQ ID NO: 4664 - protein, 7 aa, Artificial Sequence
  source: /note="Description of Artificial Sequence: Synthetic peptide"
LAASSRP

SEQ ID NO: 4665 - protein, 7 aa, Artificial Sequence
  source: /note="Description of Artificial Sequence: Synthetic peptide"
LADKPAM

SEQ ID NO: 4666 - protein, 7 aa, Artificial Sequence
  source: /note="Description of Artificial Sequence: Synthetic peptide"
LADMLKS

SEQ ID NO: 4667 - protein, 7 aa, Artificial Sequence
  source: /note="Description of Artificial Sequence: Synthetic peptide"
LADRENT

SEQ ID NO: 4668 - protein, 7 aa, Artificial Sequence
  source: /note="Description of Artificial Sequence: Synthetic peptide"
LADRRIE

SEQ ID NO: 4669 - protein, 7 aa, Artificial Sequence
  source: /note="Description of Artificial Sequence: Synthetic peptide"
LAEAVTS

SEQ ID NO: 4670 - protein, 7 aa, Artificial Sequence
  source: /note="Description of Artificial Sequence: Synthetic peptide"
LAEELGR

SEQ ID NO: 4671 - protein, 7 aa, Artificial Sequence
  source: /note="Description of Artificial Sequence: Synthetic peptide"
LAENSRT

SEQ ID NO: 4672 - protein, 7 aa, Artificial Sequence
  source: /note="Description of Artificial Sequence: Synthetic peptide"
LAESRGY

SEQ ID NO: 4673 - protein, 7 aa, Artificial Sequence
  source: /note="Description of Artificial Sequence: Synthetic peptide"
LAEVIYD

SEQ ID NO: 4674 - protein, 7 aa, Artificial Sequence
  source: /note="Description of Artificial Sequence: Synthetic peptide"
LAGALQE

SEQ ID NO: 4675 - protein, 7 aa, Artificial Sequence
  source: /note="Description of Artificial Sequence: Synthetic peptide"
LAGDRQW

SEQ ID NO: 4676 - protein, 7 aa, Artificial Sequence
  source: /note="Description of Artificial Sequence: Synthetic peptide"
LAGHLMP

SEQ ID NO: 4677 - protein, 7 aa, Artificial Sequence
  source: /note="Description of Artificial Sequence: Synthetic peptide"
LAGKGLL

SEQ ID NO: 4678 - protein, 7 aa, Artificial Sequence
  source: /note="Description of Artificial Sequence: Synthetic peptide"
LAGKNIA

SEQ ID NO: 4679 - protein, 7 aa, Artificial Sequence
  source: /note="Description of Artificial Sequence: Synthetic peptide"
LAGLGHL

SEQ ID NO: 4680 - protein, 7 aa, Artificial Sequence
  source: /note="Description of Artificial Sequence: Synthetic peptide"
LAGLVRN

SEQ ID NO: 4681 - protein, 7 aa, Artificial Sequence
  source: /note="Description of Artificial Sequence: Synthetic peptide"
LAHGTGL

SEQ ID NO: 4682 - protein, 7 aa, Artificial Sequence
  source: /note="Description of Artificial Sequence: Synthetic peptide"
LAHKANS

SEQ ID NO: 4683 - protein, 7 aa, Artificial Sequence
  source: /note="Description of Artificial Sequence: Synthetic peptide"
LAHKGIV

SEQ ID NO: 4684 - protein, 7 aa, Artificial Sequence
  source: /note="Description of Artificial Sequence: Synthetic peptide"
LAHPVQF

SEQ ID NO: 4685 - protein, 7 aa, Artificial Sequence
  source: /note="Description of Artificial Sequence: Synthetic peptide"
LAHSTSV

SEQ ID NO: 4686 - protein, 7 aa, Artificial Sequence
  source: /note="Description of Artificial Sequence: Synthetic peptide"
LAIDPAD

SEQ ID NO: 4687 - protein, 7 aa, Artificial Sequence
  source: /note="Description of Artificial Sequence: Synthetic peptide"
LAIGPLR

SEQ ID NO: 4688 - protein, 7 aa, Artificial Sequence
  source: /note="Description of Artificial Sequence: Synthetic peptide"
LAKFAPD

SEQ ID NO: 4689 - protein, 7 aa, Artificial Sequence
  source: /note="Description of Artificial Sequence: Synthetic peptide"
LAKSLQA

SEQ ID NO: 4690 - protein, 7 aa, Artificial Sequence
  source: /note="Description of Artificial Sequence: Synthetic peptide"
LALAGSD

SEQ ID NO: 4691 - protein, 7 aa, Artificial Sequence
  source: /note="Description of Artificial Sequence: Synthetic peptide"
LALGVLR

SEQ ID NO: 4692 - protein, 7 aa, Artificial Sequence
  source: /note="Description of Artificial Sequence: Synthetic peptide"
LALGVPY

SEQ ID NO: 4693 - protein, 7 aa, Artificial Sequence
  source: /note="Description of Artificial Sequence: Synthetic peptide"
LALKISS

SEQ ID NO: 4694 - protein, 7 aa, Artificial Sequence
  source: /note="Description of Artificial Sequence: Synthetic peptide"
LALKSHP

SEQ ID NO: 4695 - protein, 7 aa, Artificial Sequence
  source: /note="Description of Artificial Sequence: Synthetic peptide"
LALKSRD

SEQ ID NO: 4696 - protein, 7 aa, Artificial Sequence
  source: /note="Description of Artificial Sequence: Synthetic peptide"
LALPAHA

SEQ ID NO: 4697 - protein, 7 aa, Artificial Sequence
  source: /note="Description of Artificial Sequence: Synthetic peptide"
LALRGPG

SEQ ID NO: 4698 - protein, 7 aa, Artificial Sequence
  source: /note="Description of Artificial Sequence: Synthetic peptide"
LALSGNT

SEQ ID NO: 4699 - protein, 7 aa, Artificial Sequence
  source: /note="Description of Artificial Sequence: Synthetic peptide"
LALVTDR

SEQ ID NO: 4700 - protein, 7 aa, Artificial Sequence
  source: /note="Description of Artificial Sequence: Synthetic peptide"
LAMGGIR

SEQ ID NO: 4701 - protein, 7 aa, Artificial Sequence
  source: /note="Description of Artificial Sequence: Synthetic peptide"
LAMQSRN

SEQ ID NO: 4702 - protein, 7 aa, Artificial Sequence
  source: /note="Description of Artificial Sequence: Synthetic peptide"
LANGNPA

SEQ ID NO: 4703 - protein, 7 aa, Artificial Sequence
  source: /note="Description of Artificial Sequence: Synthetic peptide"
LANIATK

SEQ ID NO: 4704 - protein, 7 aa, Artificial Sequence
  source: /note="Description of Artificial Sequence: Synthetic peptide"
LANKIPP

SEQ ID NO: 4705 - protein, 7 aa, Artificial Sequence
  source: /note="Description of Artificial Sequence: Synthetic peptide"
LANKSMS

SEQ ID NO: 4706 - protein, 7 aa, Artificial Sequence
  source: /note="Description of Artificial Sequence: Synthetic peptide"
LANPANG

SEQ ID NO: 4707 - protein, 7 aa, Artificial Sequence
  source: /note="Description of Artificial Sequence: Synthetic peptide"
LANPLGR

SEQ ID NO: 4708 - protein, 7 aa, Artificial Sequence
  source: /note="Description of Artificial Sequence: Synthetic peptide"
LANPMSA

SEQ ID NO: 4709 - protein, 7 aa, Artificial Sequence
  source: /note="Description of Artificial Sequence: Synthetic peptide"
LANSFVA

SEQ ID NO: 4710 - protein, 7 aa, Artificial Sequence
  source: /note="Description of Artificial Sequence: Synthetic peptide"
LANSKSL

SEQ ID NO: 4711 - protein, 7 aa, Artificial Sequence
  source: /note="Description of Artificial Sequence: Synthetic peptide"
LANVRAS

SEQ ID NO: 4712 - protein, 7 aa, Artificial Sequence
  source: /note="Description of Artificial Sequence: Synthetic peptide"
LAPGLAM

SEQ ID NO: 4713 - protein, 7 aa, Artificial Sequence
  source: /note="Description of Artificial Sequence: Synthetic peptide"
LAPHTSS

SEQ ID NO: 4714 - protein, 7 aa, Artificial Sequence
  source: /note="Description of Artificial Sequence: Synthetic peptide"
LAPLSKV

SEQ ID NO: 4715 - protein, 7 aa, Artificial Sequence
  source: /note="Description of Artificial Sequence: Synthetic peptide"
LAPPLRQ

SEQ ID NO: 4716 - protein, 7 aa, Artificial Sequence
  source: /note="Description of Artificial Sequence: Synthetic peptide"
LAPSYLP

SEQ ID NO: 4717 - protein, 7 aa, Artificial Sequence
  source: /note="Description of Artificial Sequence: Synthetic peptide"
LAPTLTP

SEQ ID NO: 4718 - protein, 7 aa, Artificial Sequence
  source: /note="Description of Artificial Sequence: Synthetic peptide"
LAQGSIS

SEQ ID NO: 4719 - protein, 7 aa, Artificial Sequence
  source: /note="Description of Artificial Sequence: Synthetic peptide"
LAQQKDT

SEQ ID NO: 4720 - protein, 7 aa, Artificial Sequence
  source: /note="Description of Artificial Sequence: Synthetic peptide"
LAQRPHQ

SEQ ID NO: 4721 - protein, 7 aa, Artificial Sequence
  source: /note="Description of Artificial Sequence: Synthetic peptide"
LAQSSSR

SEQ ID NO: 4722 - protein, 7 aa, Artificial Sequence
  source: /note="Description of Artificial Sequence: Synthetic peptide"
LAQVSAS

SEQ ID NO: 4723 - protein, 7 aa, Artificial Sequence
  source: /note="Description of Artificial Sequence: Synthetic peptide"
LARGPGD

SEQ ID NO: 4724 - protein, 7 aa, Artificial Sequence
  source: /note="Description of Artificial Sequence: Synthetic peptide"
LARLSPT

SEQ ID NO: 4725 - protein, 7 aa, Artificial Sequence
  source: /note="Description of Artificial Sequence: Synthetic peptide"
LARQSPE

SEQ ID NO: 4726 - protein, 7 aa, Artificial Sequence
  source: /note="Description of Artificial Sequence: Synthetic peptide"
LARQTSS

SEQ ID NO: 4727 - protein, 7 aa, Artificial Sequence
  source: /note="Description of Artificial Sequence: Synthetic peptide"
LARSPTL

SEQ ID NO: 4728 - protein, 7 aa, Artificial Sequence
  source: /note="Description of Artificial Sequence: Synthetic peptide"
LARVNSS

SEQ ID NO: 4729 - protein, 7 aa, Artificial Sequence
  source: /note="Description of Artificial Sequence: Synthetic peptide"
LARVSQT

SEQ ID NO: 4730 - protein, 7 aa, Artificial Sequence
  source: /note="Description of Artificial Sequence: Synthetic peptide"
LASAMKT

SEQ ID NO: 4731 - protein, 7 aa, Artificial Sequence
  source: /note="Description of Artificial Sequence: Synthetic peptide"
LASAVQS

SEQ ID NO: 4732 - protein, 7 aa, Artificial Sequence
  source: /note="Description of Artificial Sequence: Synthetic peptide"
LASDSRA

SEQ ID NO: 4733 - protein, 7 aa, Artificial Sequence
  source: /note="Description of Artificial Sequence: Synthetic peptide"
LASEFIA

SEQ ID NO: 4734 - protein, 7 aa, Artificial Sequence
  source: /note="Description of Artificial Sequence: Synthetic peptide"
LASEKVS

SEQ ID NO: 4735 - protein, 7 aa, Artificial Sequence
  source: /note="Description of Artificial Sequence: Synthetic peptide"
LASLVSV

SEQ ID NO: 4736 - protein, 7 aa, Artificial Sequence
  source: /note="Description of Artificial Sequence: Synthetic peptide"
LASPTDY

SEQ ID NO: 4737 - protein, 7 aa, Artificial Sequence
  source: /note="Description of Artificial Sequence: Synthetic peptide"
LASQGFN

SEQ ID NO: 4738 - protein, 7 aa, Artificial Sequence
  source: /note="Description of Artificial Sequence: Synthetic peptide"
LASQGPG

SEQ ID NO: 4739 - protein, 7 aa, Artificial Sequence
  source: /note="Description of Artificial Sequence: Synthetic peptide"
LASRPAH

SEQ ID NO: 4740 - protein, 7 aa, Artificial Sequence
  source: /note="Description of Artificial Sequence: Synthetic peptide"
LASVNTS

SEQ ID NO: 4741 - protein, 7 aa, Artificial Sequence
  source: /note="Description of Artificial Sequence: Synthetic peptide"
LATAHRP

SEQ ID NO: 4742 - protein, 7 aa, Artificial Sequence
  source: /note="Description of Artificial Sequence: Synthetic peptide"
LATAVVD

SEQ ID NO: 4743 - protein, 7 aa, Artificial Sequence
  source: /note="Description of Artificial Sequence: Synthetic peptide"
LATKSYT

SEQ ID NO: 4744 - protein, 7 aa, Artificial Sequence
  source: /note="Description of Artificial Sequence: Synthetic peptide"
LATPPII

SEQ ID NO: 4745 - protein, 7 aa, Artificial Sequence
  source: /note="Description of Artificial Sequence: Synthetic peptide"
LATRQVG

SEQ ID NO: 4746 - protein, 7 aa, Artificial Sequence
  source: /note="Description of Artificial Sequence: Synthetic peptide"
LATRVRE

SEQ ID NO: 4747 - protein, 7 aa, Artificial Sequence
  source: /note="Description of Artificial Sequence: Synthetic peptide"
LATSPLH

SEQ ID NO: 4748 - protein, 7 aa, Artificial Sequence
  source: /note="Description of Artificial Sequence: Synthetic peptide"
LATSPNH

SEQ ID NO: 4749 - protein, 7 aa, Artificial Sequence
  source: /note="Description of Artificial Sequence: Synthetic peptide"
LATSRSL

SEQ ID NO: 4750 - protein, 7 aa, Artificial Sequence
  source: /note="Description of Artificial Sequence: Synthetic peptide"
LATTSGA

SEQ ID NO: 4751 - protein, 7 aa, Artificial Sequence
  source: /note="Description of Artificial Sequence: Synthetic peptide"
LAVEKLP

SEQ ID NO: 4752 - protein, 7 aa, Artificial Sequence
  source: /note="Description of Artificial Sequence: Synthetic peptide"
LAVGTKG

SEQ ID NO: 4753 - protein, 7 aa, Artificial Sequence
  source: /note="Description of Artificial Sequence: Synthetic peptide"
LAVSPMP

SEQ ID NO: 4754 - protein, 7 aa, Artificial Sequence
  source: /note="Description of Artificial Sequence: Synthetic peptide"
LAVVESL

SEQ ID NO: 4755 - protein, 7 aa, Artificial Sequence
  source: /note="Description of Artificial Sequence: Synthetic peptide"
LCRNSHS

SEQ ID NO: 4756 - protein, 7 aa, Artificial Sequence
  source: /note="Description of Artificial Sequence: Synthetic peptide"
LDARRFF

SEQ ID NO: 4757 - protein, 7 aa, Artificial Sequence
  source: /note="Description of Artificial Sequence: Synthetic peptide"
LDDPGGC

SEQ ID NO: 4758 - protein, 7 aa, Artificial Sequence
  source: /note="Description of Artificial Sequence: Synthetic peptide"
LDDSSLL

SEQ ID NO: 4759 - protein, 7 aa, Artificial Sequence
  source: /note="Description of Artificial Sequence: Synthetic peptide"
LDDVMPG

SEQ ID NO: 4760 - protein, 7 aa, Artificial Sequence
  source: /note="Description of Artificial Sequence: Synthetic peptide"
LDERWPT

SEQ ID NO: 4761 - protein, 7 aa, Artificial Sequence
  source: /note="Description of Artificial Sequence: Synthetic peptide"
LDFPASS

SEQ ID NO: 4762 - protein, 7 aa, Artificial Sequence
  source: /note="Description of Artificial Sequence: Synthetic peptide"
LDFREDS

SEQ ID NO: 4763 - protein, 7 aa, Artificial Sequence
  source: /note="Description of Artificial Sequence: Synthetic peptide"
LDGGSTR

SEQ ID NO: 4764 - protein, 7 aa, Artificial Sequence
  source: /note="Description of Artificial Sequence: Synthetic peptide"
LDGQMLA

SEQ ID NO: 4765 - protein, 7 aa, Artificial Sequence
  source: /note="Description of Artificial Sequence: Synthetic peptide"
LDGRPLV

SEQ ID NO: 4766 - protein, 7 aa, Artificial Sequence
  source: /note="Description of Artificial Sequence: Synthetic peptide"
LDIERHS

SEQ ID NO: 4767 - protein, 7 aa, Artificial Sequence
  source: /note="Description of Artificial Sequence: Synthetic peptide"
LDITNVK

SEQ ID NO: 4768 - protein, 7 aa, Artificial Sequence
  source: /note="Description of Artificial Sequence: Synthetic peptide"
LDKFNSK

SEQ ID NO: 4769 - protein, 7 aa, Artificial Sequence
  source: /note="Description of Artificial Sequence: Synthetic peptide"
LDKKHQS

SEQ ID NO: 4770 - protein, 7 aa, Artificial Sequence
  source: /note="Description of Artificial Sequence: Synthetic peptide"
LDKMRTT

SEQ ID NO: 4771 - protein, 7 aa, Artificial Sequence
  source: /note="Description of Artificial Sequence: Synthetic peptide"
LDKRDIL

SEQ ID NO: 4772 - protein, 7 aa, Artificial Sequence
  source: /note="Description of Artificial Sequence: Synthetic peptide"
LDKTSRL

SEQ ID NO: 4773 - protein, 7 aa, Artificial Sequence
  source: /note="Description of Artificial Sequence: Synthetic peptide"
LDLANSM

SEQ ID NO: 4774 - protein, 7 aa, Artificial Sequence
  source: /note="Description of Artificial Sequence: Synthetic peptide"
LDLHLQA

SEQ ID NO: 4775 - protein, 7 aa, Artificial Sequence
  source: /note="Description of Artificial Sequence: Synthetic peptide"
LDLKSVM

SEQ ID NO: 4776 - protein, 7 aa, Artificial Sequence
  source: /note="Description of Artificial Sequence: Synthetic peptide"
LDLQTTK

SEQ ID NO: 4777 - protein, 7 aa, Artificial Sequence
  source: /note="Description of Artificial Sequence: Synthetic peptide"
LDLVAFE

SEQ ID NO: 4778 - protein, 7 aa, Artificial Sequence
  source: /note="Description of Artificial Sequence: Synthetic peptide"
LDMRDSG

SEQ ID NO: 4779 - protein, 7 aa, Artificial Sequence
  source: /note="Description of Artificial Sequence: Synthetic peptide"
LDMRTQG

SEQ ID NO: 4780 - protein, 7 aa, Artificial Sequence
  source: /note="Description of Artificial Sequence: Synthetic peptide"
LDNPHHV

SEQ ID NO: 4781 - protein, 7 aa, Artificial Sequence
  source: /note="Description of Artificial Sequence: Synthetic peptide"
LDNPVSA

SEQ ID NO: 4782 - protein, 7 aa, Artificial Sequence
  source: /note="Description of Artificial Sequence: Synthetic peptide"
LDPDARR

SEQ ID NO: 4783 - protein, 7 aa, Artificial Sequence
  source: /note="Description of Artificial Sequence: Synthetic peptide"
LDPGLKS

SEQ ID NO: 4784 - protein, 7 aa, Artificial Sequence
  source: /note="Description of Artificial Sequence: Synthetic peptide"
LDRLSSI

SEQ ID NO: 4785 - protein, 7 aa, Artificial Sequence
  source: /note="Description of Artificial Sequence: Synthetic peptide"
LDRLVTG

SEQ ID NO: 4786 - protein, 7 aa, Artificial Sequence
  source: /note="Description of Artificial Sequence: Synthetic peptide"
LDRMVVG

SEQ ID NO: 4787 - protein, 7 aa, Artificial Sequence
  source: /note="Description of Artificial Sequence: Synthetic peptide"
LDRPSAW

SEQ ID NO: 4788 - protein, 7 aa, Artificial Sequence
  source: /note="Description of Artificial Sequence: Synthetic peptide"
LDRRPIQ

SEQ ID NO: 4789 - protein, 7 aa, Artificial Sequence
  source: /note="Description of Artificial Sequence: Synthetic peptide"
LDRRPML

SEQ ID NO: 4790 - protein, 7 aa, Artificial Sequence
  source: /note="Description of Artificial Sequence: Synthetic peptide"
LDRYTPP

SEQ ID NO: 4791 - protein, 7 aa, Artificial Sequence
  source: /note="Description of Artificial Sequence: Synthetic peptide"
LDSGRPS

SEQ ID NO: 4792 - protein, 7 aa, Artificial Sequence
  source: /note="Description of Artificial Sequence: Synthetic peptide"
LDSLHIP

SEQ ID NO: 4793 - protein, 7 aa, Artificial Sequence
  source: /note="Description of Artificial Sequence: Synthetic peptide"
LDSNVTS

SEQ ID NO: 4794 - protein, 7 aa, Artificial Sequence
  source: /note="Description of Artificial Sequence: Synthetic peptide"
LDSPAMA

SEQ ID NO: 4795 - protein, 7 aa, Artificial Sequence
  source: /note="Description of Artificial Sequence: Synthetic peptide"
LDSPPNN

SEQ ID NO: 4796 - protein, 7 aa, Artificial Sequence
  source: /note="Description of Artificial Sequence: Synthetic peptide"
LDSSHGH

SEQ ID NO: 4797 - protein, 7 aa, Artificial Sequence
  source: /note="Description of Artificial Sequence: Synthetic peptide"
LDSSRSS

SEQ ID NO: 4798 - protein, 7 aa, Artificial Sequence
  source: /note="Description of Artificial Sequence: Synthetic peptide"
LDSSWTP

SEQ ID NO: 4799 - protein, 7 aa, Artificial Sequence
  source: /note="Description of Artificial Sequence: Synthetic peptide"
LDSTPRP

SEQ ID NO: 4800 - protein, 7 aa, Artificial Sequence
  source: /note="Description of Artificial Sequence: Synthetic peptide"
LDTQAGR

SEQ ID NO: 4801 - protein, 7 aa, Artificial Sequence
  source: /note="Description of Artificial Sequence: Synthetic peptide"
LDTQSRL

SEQ ID NO: 4802 - protein, 7 aa, Artificial Sequence
  source: /note="Description of Artificial Sequence: Synthetic peptide"
LDTRGIS

SEQ ID NO: 4803 - protein, 7 aa, Artificial Sequence
  source: /note="Description of Artificial Sequence: Synthetic peptide"
LDTRYRY

SEQ ID NO: 4804 - protein, 7 aa, Artificial Sequence
  source: /note="Description of Artificial Sequence: Synthetic peptide"
LDTVQSK

SEQ ID NO: 4805 - protein, 7 aa, Artificial Sequence
  source: /note="Description of Artificial Sequence: Synthetic peptide"
LDVATSR

SEQ ID NO: 4806 - protein, 7 aa, Artificial Sequence
  source: /note="Description of Artificial Sequence: Synthetic peptide"
LDVKCDP

SEQ ID NO: 4807 - protein, 7 aa, Artificial Sequence
  source: /note="Description of Artificial Sequence: Synthetic peptide"
LDVLDCK

SEQ ID NO: 4808 - protein, 7 aa, Artificial Sequence
  source: /note="Description of Artificial Sequence: Synthetic peptide"
LDVNGLR

SEQ ID NO: 4809 - protein, 7 aa, Artificial Sequence
  source: /note="Description of Artificial Sequence: Synthetic peptide"
LDVSQRL

SEQ ID NO: 4810 - protein, 7 aa, Artificial Sequence
  source: /note="Description of Artificial Sequence: Synthetic peptide"
LDVVTRV

SEQ ID NO: 4811 - protein, 7 aa, Artificial Sequence
  source: /note="Description of Artificial Sequence: Synthetic peptide"
LDVYSRE

SEQ ID NO: 4812 - protein, 7 aa, Artificial Sequence
  source: /note="Description of Artificial Sequence: Synthetic peptide"
LEANLKV

SEQ ID NO: 4813 - protein, 7 aa, Artificial Sequence
  source: /note="Description of Artificial Sequence: Synthetic peptide"
LEAPRAT

SEQ ID NO: 4814 - protein, 7 aa, Artificial Sequence
  source: /note="Description of Artificial Sequence: Synthetic peptide"
LEEDKVK

SEQ ID NO: 4815 - protein, 7 aa, Artificial Sequence
  source: /note="Description of Artificial Sequence: Synthetic peptide"
LEFDSKE

SEQ ID NO: 4816 - protein, 7 aa, Artificial Sequence
  source: /note="Description of Artificial Sequence: Synthetic peptide"
LEFGSDQ

SEQ ID NO: 4817 - protein, 7 aa, Artificial Sequence
  source: /note="Description of Artificial Sequence: Synthetic peptide"
LEFTRIG

SEQ ID NO: 4818 - protein, 7 aa, Artificial Sequence
  source: /note="Description of Artificial Sequence: Synthetic peptide"
LEGTRRD

SEQ ID NO: 4819 - protein, 7 aa, Artificial Sequence
  source: /note="Description of Artificial Sequence: Synthetic peptide"
LEGVRGS

SEQ ID NO: 4820 - protein, 7 aa, Artificial Sequence
  source: /note="Description of Artificial Sequence: Synthetic peptide"
LEHLRSA

SEQ ID NO: 4821 - protein, 7 aa, Artificial Sequence
  source: /note="Description of Artificial Sequence: Synthetic peptide"
LEHSAHV

SEQ ID NO: 4822 - protein, 7 aa, Artificial Sequence
  source: /note="Description of Artificial Sequence: Synthetic peptide"
LEHSVSL

SEQ ID NO: 4823 - protein, 7 aa, Artificial Sequence
  source: /note="Description of Artificial Sequence: Synthetic peptide"
LEITGPG

SEQ ID NO: 4824 - protein, 7 aa, Artificial Sequence
  source: /note="Description of Artificial Sequence: Synthetic peptide"
LEKMGLY

SEQ ID NO: 4825 - protein, 7 aa, Artificial Sequence
  source: /note="Description of Artificial Sequence: Synthetic peptide"
LEKQTGD

SEQ ID NO: 4826 - protein, 7 aa, Artificial Sequence
  source: /note="Description of Artificial Sequence: Synthetic peptide"
LELKPAN

SEQ ID NO: 4827 - protein, 7 aa, Artificial Sequence
  source: /note="Description of Artificial Sequence: Synthetic peptide"
LEMRGLA

SEQ ID NO: 4828 - protein, 7 aa, Artificial Sequence
  source: /note="Description of Artificial Sequence: Synthetic peptide"
LENAQTP

SEQ ID NO: 4829 - protein, 7 aa, Artificial Sequence
  source: /note="Description of Artificial Sequence: Synthetic peptide"
LENDWRV

SEQ ID NO: 4830 - protein, 7 aa, Artificial Sequence
  source: /note="Description of Artificial Sequence: Synthetic peptide"
LENHPDR

SEQ ID NO: 4831 - protein, 7 aa, Artificial Sequence
  source: /note="Description of Artificial Sequence: Synthetic peptide"
LENNPAL

SEQ ID NO: 4832 - protein, 7 aa, Artificial Sequence
  source: /note="Description of Artificial Sequence: Synthetic peptide"
LENSHLV

SEQ ID NO: 4833 - protein, 7 aa, Artificial Sequence
  source: /note="Description of Artificial Sequence: Synthetic peptide"
LEPIVRN

SEQ ID NO: 4834 - protein, 7 aa, Artificial Sequence
  source: /note="Description of Artificial Sequence: Synthetic peptide"
LEPQTHS

SEQ ID NO: 4835 - protein, 7 aa, Artificial Sequence
  source: /note="Description of Artificial Sequence: Synthetic peptide"
LEPSHTI

SEQ ID NO: 4836 - protein, 7 aa, Artificial Sequence
  source: /note="Description of Artificial Sequence: Synthetic peptide"
LEPYKHF

SEQ ID NO: 4837 - protein, 7 aa, Artificial Sequence
  source: /note="Description of Artificial Sequence: Synthetic peptide"
LEQFSTA

SEQ ID NO: 4838 - protein, 7 aa, Artificial Sequence
  source: /note="Description of Artificial Sequence: Synthetic peptide"
LEQPPEH

SEQ ID NO: 4839 - protein, 7 aa, Artificial Sequence
  source: /note="Description of Artificial Sequence: Synthetic peptide"
LEQYNKE

SEQ ID NO: 4840 - protein, 7 aa, Artificial Sequence
  source: /note="Description of Artificial Sequence: Synthetic peptide"
LERGSSE

SEQ ID NO: 4841 - protein, 7 aa, Artificial Sequence
  source: /note="Description of Artificial Sequence: Synthetic peptide"
LERISSV

SEQ ID NO: 4842 - protein, 7 aa, Artificial Sequence
  source: /note="Description of Artificial Sequence: Synthetic peptide"
LESALSS

SEQ ID NO: 4843 - protein, 7 aa, Artificial Sequence
  source: /note="Description of Artificial Sequence: Synthetic peptide"
LESAWIG

SEQ ID NO: 4844 - protein, 7 aa, Artificial Sequence
  source: /note="Description of Artificial Sequence: Synthetic peptide"
LESKPSP

SEQ ID NO: 4845 - protein, 7 aa, Artificial Sequence
  source: /note="Description of Artificial Sequence: Synthetic peptide"
LESNNYL

SEQ ID NO: 4846 - protein, 7 aa, Artificial Sequence
  source: /note="Description of Artificial Sequence: Synthetic peptide"
LESQTRN

SEQ ID NO: 4847 - protein, 7 aa, Artificial Sequence
  source: /note="Description of Artificial Sequence: Synthetic peptide"
LESRSGM

SEQ ID NO: 4848 - protein, 7 aa, Artificial Sequence
  source: /note="Description of Artificial Sequence: Synthetic peptide"
LESSHTR

SEQ ID NO: 4849 - protein, 7 aa, Artificial Sequence
  source: /note="Description of Artificial Sequence: Synthetic peptide"
LESSVRV

SEQ ID NO: 4850 - protein, 7 aa, Artificial Sequence
  source: /note="Description of Artificial Sequence: Synthetic peptide"
LETASTK

SEQ ID NO: 4851 - protein, 7 aa, Artificial Sequence
  source: /note="Description of Artificial Sequence: Synthetic peptide"
LETRQIG

SEQ ID NO: 4852 - protein, 7 aa, Artificial Sequence
  source: /note="Description of Artificial Sequence: Synthetic peptide"
LETSDSV

SEQ ID NO: 4853 - protein, 7 aa, Artificial Sequence
  source: /note="Description of Artificial Sequence: Synthetic peptide"
LEVALRT

SEQ ID NO: 4854 - protein, 7 aa, Artificial Sequence
  source: /note="Description of Artificial Sequence: Synthetic peptide"
LEVASNP

SEQ ID NO: 4855 - protein, 7 aa, Artificial Sequence
  source: /note="Description of Artificial Sequence: Synthetic peptide"
LEVTEPW

SEQ ID NO: 4856 - protein, 7 aa, Artificial Sequence
  source: /note="Description of Artificial Sequence: Synthetic peptide"
LFAISVP

SEQ ID NO: 4857 - protein, 7 aa, Artificial Sequence
  source: /note="Description of Artificial Sequence: Synthetic peptide"
LFANTIS

SEQ ID NO: 4858 - protein, 7 aa, Artificial Sequence
  source: /note="Description of Artificial Sequence: Synthetic peptide"
LFDAALP

SEQ ID NO: 4859 - protein, 7 aa, Artificial Sequence
  source: /note="Description of Artificial Sequence: Synthetic peptide"
LFDFTKE

SEQ ID NO: 4860 - protein, 7 aa, Artificial Sequence
  source: /note="Description of Artificial Sequence: Synthetic peptide"
LFDPNRG

SEQ ID NO: 4861 - protein, 7 aa, Artificial Sequence
  source: /note="Description of Artificial Sequence: Synthetic peptide"
LFDRTAL

SEQ ID NO: 4862 - protein, 7 aa, Artificial Sequence
  source: /note="Description of Artificial Sequence: Synthetic peptide"
LFDSSTT

SEQ ID NO: 4863 - protein, 7 aa, Artificial Sequence
  source: /note="Description of Artificial Sequence: Synthetic peptide"
LFELQHR

SEQ ID NO: 4864 - protein, 7 aa, Artificial Sequence
  source: /note="Description of Artificial Sequence: Synthetic peptide"
LFFTAAP

SEQ ID NO: 4865 - protein, 7 aa, Artificial Sequence
  source: /note="Description of Artificial Sequence: Synthetic peptide"
LFGKVSG

SEQ ID NO: 4866 - protein, 7 aa, Artificial Sequence
  source: /note="Description of Artificial Sequence: Synthetic peptide"
LFGSRPT

SEQ ID NO: 4867 - protein, 7 aa, Artificial Sequence
  source: /note="Description of Artificial Sequence: Synthetic peptide"
LFGTNRS

SEQ ID NO: 4868 - protein, 7 aa, Artificial Sequence
  source: /note="Description of Artificial Sequence: Synthetic peptide"
LFHESTY

SEQ ID NO: 4869 - protein, 7 aa, Artificial Sequence
  source: /note="Description of Artificial Sequence: Synthetic peptide"
LFHSNDD

SEQ ID NO: 4870 - protein, 7 aa, Artificial Sequence
  source: /note="Description of Artificial Sequence: Synthetic peptide"
LFINHGS

SEQ ID NO: 4871 - protein, 7 aa, Artificial Sequence
  source: /note="Description of Artificial Sequence: Synthetic peptide"
LFITTTS

SEQ ID NO: 4872 - protein, 7 aa, Artificial Sequence
  source: /note="Description of Artificial Sequence: Synthetic peptide"
LFKHSRE

SEQ ID NO: 4873 - protein, 7 aa, Artificial Sequence
  source: /note="Description of Artificial Sequence: Synthetic peptide"
LFLSQVP

SEQ ID NO: 4874 - protein, 7 aa, Artificial Sequence
  source: /note="Description of Artificial Sequence: Synthetic peptide"
LFNQQVL

SEQ ID NO: 4875 - protein, 7 aa, Artificial Sequence
  source: /note="Description of Artificial Sequence: Synthetic peptide"
LFNSSPE

SEQ ID NO: 4876 - protein, 7 aa, Artificial Sequence
  source: /note="Description of Artificial Sequence: Synthetic peptide"
LFPGSID

SEQ ID NO: 4877 - protein, 7 aa, Artificial Sequence
  source: /note="Description of Artificial Sequence: Synthetic peptide"
LFPTGSL

SEQ ID NO: 4878 - protein, 7 aa, Artificial Sequence
  source: /note="Description of Artificial Sequence: Synthetic peptide"
LFRASDR

SEQ ID NO: 4879 - protein, 7 aa, Artificial Sequence
  source: /note="Description of Artificial Sequence: Synthetic peptide"
LFSESRS

SEQ ID NO: 4880 - protein, 7 aa, Artificial Sequence
  source: /note="Description of Artificial Sequence: Synthetic peptide"
LFSGAES

SEQ ID NO: 4881 - protein, 7 aa, Artificial Sequence
  source: /note="Description of Artificial Sequence: Synthetic peptide"
LFSMPVS

SEQ ID NO: 4882 - protein, 7 aa, Artificial Sequence
  source: /note="Description of Artificial Sequence: Synthetic peptide"
LFTSADL

SEQ ID NO: 4883 - protein, 7 aa, Artificial Sequence
  source: /note="Description of Artificial Sequence: Synthetic peptide"
LFTSESI

SEQ ID NO: 4884 - protein, 7 aa, Artificial Sequence
  source: /note="Description of Artificial Sequence: Synthetic peptide"
LFTSPSM

SEQ ID NO: 4885 - protein, 7 aa, Artificial Sequence
  source: /note="Description of Artificial Sequence: Synthetic peptide"
LFTTMVP

SEQ ID NO: 4886 - protein, 7 aa, Artificial Sequence
  source: /note="Description of Artificial Sequence: Synthetic peptide"
LGAAVNL

SEQ ID NO: 4887 - protein, 7 aa, Artificial Sequence
  source: /note="Description of Artificial Sequence: Synthetic peptide"
LGAGSSV

SEQ ID NO: 4888 - protein, 7 aa, Artificial Sequence
  source: /note="Description of Artificial Sequence: Synthetic peptide"
LGALSGP

SEQ ID NO: 4889 - protein, 7 aa, Artificial Sequence
  source: /note="Description of Artificial Sequence: Synthetic peptide"
LGALTHA

SEQ ID NO: 4890 - protein, 7 aa, Artificial Sequence
  source: /note="Description of Artificial Sequence: Synthetic peptide"
LGARIQL

SEQ ID NO: 4891 - protein, 7 aa, Artificial Sequence
  source: /note="Description of Artificial Sequence: Synthetic peptide"
LGARTAA

SEQ ID NO: 4892 - protein, 7 aa, Artificial Sequence
  source: /note="Description of Artificial Sequence: Synthetic peptide"
LGASSSL

SEQ ID NO: 4893 - protein, 7 aa, Artificial Sequence
  source: /note="Description of Artificial Sequence: Synthetic peptide"
LGAYLGP

SEQ ID NO: 4894 - protein, 7 aa, Artificial Sequence
  source: /note="Description of Artificial Sequence: Synthetic peptide"
LGAYNAQ

SEQ ID NO: 4895 - protein, 7 aa, Artificial Sequence
  source: /note="Description of Artificial Sequence: Synthetic peptide"
LGDAGFS

SEQ ID NO: 4896 - protein, 7 aa, Artificial Sequence
  source: /note="Description of Artificial Sequence: Synthetic peptide"
LGDHYRH

SEQ ID NO: 4897 - protein, 7 aa, Artificial Sequence
  source: /note="Description of Artificial Sequence: Synthetic peptide"
LGDPFPP

SEQ ID NO: 4898 - protein, 7 aa, Artificial Sequence
  source: /note="Description of Artificial Sequence: Synthetic peptide"
LGDRTDF

SEQ ID NO: 4899 - protein, 7 aa, Artificial Sequence
  source: /note="Description of Artificial Sequence: Synthetic peptide"
LGDRTHI

SEQ ID NO: 4900 - protein, 7 aa, Artificial Sequence
  source: /note="Description of Artificial Sequence: Synthetic peptide"
LGDTAHH

SEQ ID NO: 4901 - protein, 7 aa, Artificial Sequence
  source: /note="Description of Artificial Sequence: Synthetic peptide"
LGFGATQ

SEQ ID NO: 4902 - protein, 7 aa, Artificial Sequence
  source: /note="Description of Artificial Sequence: Synthetic peptide"
LGFNVVV

SEQ ID NO: 4903 - protein, 7 aa, Artificial Sequence
  source: /note="Description of Artificial Sequence: Synthetic peptide"
LGFNYQD

SEQ ID NO: 4904 - protein, 7 aa, Artificial Sequence
  source: /note="Description of Artificial Sequence: Synthetic peptide"
LGFPSTE

SEQ ID NO: 4905 - protein, 7 aa, Artificial Sequence
  source: /note="Description of Artificial Sequence: Synthetic peptide"
LGGDAQI

SEQ ID NO: 4906 - protein, 7 aa, Artificial Sequence
  source: /note="Description of Artificial Sequence: Synthetic peptide"
LGGGRSL

SEQ ID NO: 4907 - protein, 7 aa, Artificial Sequence
  source: /note="Description of Artificial Sequence: Synthetic peptide"
LGGSLSM

SEQ ID NO: 4908 - protein, 7 aa, Artificial Sequence
  source: /note="Description of Artificial Sequence: Synthetic peptide"
LGGSYPL

SEQ ID NO: 4909 - protein, 7 aa, Artificial Sequence
  source: /note="Description of Artificial Sequence: Synthetic peptide"
LGHATSA

SEQ ID NO: 4910 - protein, 7 aa, Artificial Sequence
  source: /note="Description of Artificial Sequence: Synthetic peptide"
LGHGPGH

SEQ ID NO: 4911 - protein, 7 aa, Artificial Sequence
  source: /note="Description of Artificial Sequence: Synthetic peptide"
LGHSKPP

SEQ ID NO: 4912 - protein, 7 aa, Artificial Sequence
  source: /note="Description of Artificial Sequence: Synthetic peptide"
LGIITHA

SEQ ID NO: 4913 - protein, 7 aa, Artificial Sequence
  source: /note="Description of Artificial Sequence: Synthetic peptide"
LGIMKTA

SEQ ID NO: 4914 - protein, 7 aa, Artificial Sequence
  source: /note="Description of Artificial Sequence: Synthetic peptide"
LGKLTTV

SEQ ID NO: 4915 - protein, 7 aa, Artificial Sequence
  source: /note="Description of Artificial Sequence: Synthetic peptide"
LGKSLLT

SEQ ID NO: 4916 - protein, 7 aa, Artificial Sequence
  source: /note="Description of Artificial Sequence: Synthetic peptide"
LGKYGIV

SEQ ID NO: 4917 - protein, 7 aa, Artificial Sequence
  source: /note="Description of Artificial Sequence: Synthetic peptide"
LGLNHQT

SEQ ID NO: 4918 - protein, 7 aa, Artificial Sequence
  source: /note="Description of Artificial Sequence: Synthetic peptide"
LGLPSKG

SEQ ID NO: 4919 - protein, 7 aa, Artificial Sequence
  source: /note="Description of Artificial Sequence: Synthetic peptide"
LGLRDKD

SEQ ID NO: 4920 - protein, 7 aa, Artificial Sequence
  source: /note="Description of Artificial Sequence: Synthetic peptide"
LGLRESS

SEQ ID NO: 4921 - protein, 7 aa, Artificial Sequence
  source: /note="Description of Artificial Sequence: Synthetic peptide"
LGLSTVH

SEQ ID NO: 4922 - protein, 7 aa, Artificial Sequence
  source: /note="Description of Artificial Sequence: Synthetic peptide"
LGLVLNQ

SEQ ID NO: 4923 - protein, 7 aa, Artificial Sequence
  source: /note="Description of Artificial Sequence: Synthetic peptide"
LGMLKTE

SEQ ID NO: 4924 - protein, 7 aa, Artificial Sequence
  source: /note="Description of Artificial Sequence: Synthetic peptide"
LGMMPAS

SEQ ID NO: 4925 - protein, 7 aa, Artificial Sequence
  source: /note="Description of Artificial Sequence: Synthetic peptide"
LGNHPSV

SEQ ID NO: 4926 - protein, 7 aa, Artificial Sequence
  source: /note="Description of Artificial Sequence: Synthetic peptide"
LGNPDKM

SEQ ID NO: 4927 - protein, 7 aa, Artificial Sequence
  source: /note="Description of Artificial Sequence: Synthetic peptide"
LGNPSPC

SEQ ID NO: 4928 - protein, 7 aa, Artificial Sequence
  source: /note="Description of Artificial Sequence: Synthetic peptide"
LGNPVTV

SEQ ID NO: 4929 - protein, 7 aa, Artificial Sequence
  source: /note="Description of Artificial Sequence: Synthetic peptide"
LGNQRSD

SEQ ID NO: 4930 - protein, 7 aa, Artificial Sequence
  source: /note="Description of Artificial Sequence: Synthetic peptide"
LGPAGMP

SEQ ID NO: 4931 - protein, 7 aa, Artificial Sequence
  source: /note="Description of Artificial Sequence: Synthetic peptide"
LGPAGPY

SEQ ID NO: 4932 - protein, 7 aa, Artificial Sequence
  source: /note="Description of Artificial Sequence: Synthetic peptide"
LGPFHGE

SEQ ID NO: 4933 - protein, 7 aa, Artificial Sequence
  source: /note="Description of Artificial Sequence: Synthetic peptide"
LGPGSYP

SEQ ID NO: 4934 - protein, 7 aa, Artificial Sequence
  source: /note="Description of Artificial Sequence: Synthetic peptide"
LGPSSKV

SEQ ID NO: 4935 - protein, 7 aa, Artificial Sequence
  source: /note="Description of Artificial Sequence: Synthetic peptide"
LGPSYTN

SEQ ID NO: 4936 - protein, 7 aa, Artificial Sequence
  source: /note="Description of Artificial Sequence: Synthetic peptide"
LGPTIRS

SEQ ID NO: 4937 - protein, 7 aa, Artificial Sequence
  source: /note="Description of Artificial Sequence: Synthetic peptide"
LGPTKLP

SEQ ID NO: 4938 - protein, 7 aa, Artificial Sequence
  source: /note="Description of Artificial Sequence: Synthetic peptide"
LGQALRV

SEQ ID NO: 4939 - protein, 7 aa, Artificial Sequence
  source: /note="Description of Artificial Sequence: Synthetic peptide"
LGQKPNE

SEQ ID NO: 4940 - protein, 7 aa, Artificial Sequence
  source: /note="Description of Artificial Sequence: Synthetic peptide"
LGQSGCR

SEQ ID NO: 4941 - protein, 7 aa, Artificial Sequence
  source: /note="Description of Artificial Sequence: Synthetic peptide"
LGQSGTK

SEQ ID NO: 4942 - protein, 7 aa, Artificial Sequence
  source: /note="Description of Artificial Sequence: Synthetic peptide"
LGRALEH

SEQ ID NO: 4943 - protein, 7 aa, Artificial Sequence
  source: /note="Description of Artificial Sequence: Synthetic peptide"
LGRAYSQ

SEQ ID NO: 4944 - protein, 7 aa, Artificial Sequence
  source: /note="Description of Artificial Sequence: Synthetic peptide"
LGRERPT

SEQ ID NO: 4945 - protein, 7 aa, Artificial Sequence
  source: /note="Description of Artificial Sequence: Synthetic peptide"
LGRIAVN

SEQ ID NO: 4946 - protein, 7 aa, Artificial Sequence
  source: /note="Description of Artificial Sequence: Synthetic peptide"
LGRLNSG

SEQ ID NO: 4947 - protein, 7 aa, Artificial Sequence
  source: /note="Description of Artificial Sequence: Synthetic peptide"
LGRPQMD

SEQ ID NO: 4948 - protein, 7 aa, Artificial Sequence
  source: /note="Description of Artificial Sequence: Synthetic peptide"
LGRSGAL

SEQ ID NO: 4949 - protein, 7 aa, Artificial Sequence
  source: /note="Description of Artificial Sequence: Synthetic peptide"
LGSAGPP

SEQ ID NO: 4950 - protein, 7 aa, Artificial Sequence
  source: /note="Description of Artificial Sequence: Synthetic peptide"
LGSAGYS

SEQ ID NO: 4951 - protein, 7 aa, Artificial Sequence
  source: /note="Description of Artificial Sequence: Synthetic peptide"
LGSAHSP

SEQ ID NO: 4952 - protein, 7 aa, Artificial Sequence
  source: /note="Description of Artificial Sequence: Synthetic peptide"
LGSATSG

SEQ ID NO: 4953 - protein, 7 aa, Artificial Sequence
  source: /note="Description of Artificial Sequence: Synthetic peptide"
LGSHYSN

SEQ ID NO: 4954 - protein, 7 aa, Artificial Sequence
  source: /note="Description of Artificial Sequence: Synthetic peptide"
LGSLTVA

SEQ ID NO: 4955 - protein, 7 aa, Artificial Sequence
  source: /note="Description of Artificial Sequence: Synthetic peptide"
LGSMPLL

SEQ ID NO: 4956 - protein, 7 aa, Artificial Sequence
  source: /note="Description of Artificial Sequence: Synthetic peptide"
LGSNHKP

SEQ ID NO: 4957 - protein, 7 aa, Artificial Sequence
  source: /note="Description of Artificial Sequence: Synthetic peptide"
LGSPSPD

SEQ ID NO: 4958 - protein, 7 aa, Artificial Sequence
  source: /note="Description of Artificial Sequence: Synthetic peptide"
LGSQVIA

SEQ ID NO: 4959 - protein, 7 aa, Artificial Sequence
  source: /note="Description of Artificial Sequence: Synthetic peptide"
LGSQYAV

SEQ ID NO: 4960 - protein, 7 aa, Artificial Sequence
  source: /note="Description of Artificial Sequence: Synthetic peptide"
LGSRSDL

SEQ ID NO: 4961 - protein, 7 aa, Artificial Sequence
  source: /note="Description of Artificial Sequence: Synthetic peptide"
LGSSLRA

SEQ ID NO: 4962 - protein, 7 aa, Artificial Sequence
  source: /note="Description of Artificial Sequence: Synthetic peptide"
LGSSLRN

SEQ ID NO: 4963 - protein, 7 aa, Artificial Sequence
  source: /note="Description of Artificial Sequence: Synthetic peptide"
LGSSQSR

SEQ ID NO: 4964 - protein, 7 aa, Artificial Sequence
  source: /note="Description of Artificial Sequence: Synthetic peptide"
LGSTSAV

SEQ ID NO: 4965 - protein, 7 aa, Artificial Sequence
  source: /note="Description of Artificial Sequence: Synthetic peptide"
LGSVKFS

SEQ ID NO: 4966 - protein, 7 aa, Artificial Sequence
  source: /note="Description of Artificial Sequence: Synthetic peptide"
LGTALHL

SEQ ID NO: 4967 - protein, 7 aa, Artificial Sequence
  source: /note="Description of Artificial Sequence: Synthetic peptide"
LGTGRLY

SEQ ID NO: 4968 - protein, 7 aa, Artificial Sequence
  source: /note="Description of Artificial Sequence: Synthetic peptide"
LGTLNTV

SEQ ID NO: 4969 - protein, 7 aa, Artificial Sequence
  source: /note="Description of Artificial Sequence: Synthetic peptide"
LGTRASG

SEQ ID NO: 4970 - protein, 7 aa, Artificial Sequence
  source: /note="Description of Artificial Sequence: Synthetic peptide"
LGTRPML

SEQ ID NO: 4971 - protein, 7 aa, Artificial Sequence
  source: /note="Description of Artificial Sequence: Synthetic peptide"
LGTSDVL

SEQ ID NO: 4972 - protein, 7 aa, Artificial Sequence
  source: /note="Description of Artificial Sequence: Synthetic peptide"
LGTSHVA

SEQ ID NO: 4973 - protein, 7 aa, Artificial Sequence
  source: /note="Description of Artificial Sequence: Synthetic peptide"
LGTSQTG

SEQ ID NO: 4974 - protein, 7 aa, Artificial Sequence
  source: /note="Description of Artificial Sequence: Synthetic peptide"
LGTVRVY

SEQ ID NO: 4975 - protein, 7 aa, Artificial Sequence
  source: /note="Description of Artificial Sequence: Synthetic peptide"
LGVAKPA

SEQ ID NO: 4976 - protein, 7 aa, Artificial Sequence
  source: /note="Description of Artificial Sequence: Synthetic peptide"
LGVDKNA

SEQ ID NO: 4977 - protein, 7 aa, Artificial Sequence
  source: /note="Description of Artificial Sequence: Synthetic peptide"
LGVEVLK

SEQ ID NO: 4978 - protein, 7 aa, Artificial Sequence
  source: /note="Description of Artificial Sequence: Synthetic peptide"
LGVKAAG

SEQ ID NO: 4979 - protein, 7 aa, Artificial Sequence
  source: /note="Description of Artificial Sequence: Synthetic peptide"
LGVKSVD

SEQ ID NO: 4980 - protein, 7 aa, Artificial Sequence
  source: /note="Description of Artificial Sequence: Synthetic peptide"
LGVLRSS

SEQ ID NO: 4981 - protein, 7 aa, Artificial Sequence
  source: /note="Description of Artificial Sequence: Synthetic peptide"
LGVNTSQ

SEQ ID NO: 4982 - protein, 7 aa, Artificial Sequence
  source: /note="Description of Artificial Sequence: Synthetic peptide"
LGVPPQS

SEQ ID NO: 4983 - protein, 7 aa, Artificial Sequence
  source: /note="Description of Artificial Sequence: Synthetic peptide"
LGVSREL

SEQ ID NO: 4984 - protein, 7 aa, Artificial Sequence
  source: /note="Description of Artificial Sequence: Synthetic peptide"
LGVSTHM

SEQ ID NO: 4985 - protein, 7 aa, Artificial Sequence
  source: /note="Description of Artificial Sequence: Synthetic peptide"
LGYNLGE

SEQ ID NO: 4986 - protein, 7 aa, Artificial Sequence
  source: /note="Description of Artificial Sequence: Synthetic peptide"
LGYPPRE

SEQ ID NO: 4987 - protein, 7 aa, Artificial Sequence
  source: /note="Description of Artificial Sequence: Synthetic peptide"
LGYSTGA

SEQ ID NO: 4988 - protein, 7 aa, Artificial Sequence
  source: /note="Description of Artificial Sequence: Synthetic peptide"
LHAAPAS

SEQ ID NO: 4989 - protein, 7 aa, Artificial Sequence
  source: /note="Description of Artificial Sequence: Synthetic peptide"
LHANRTE

SEQ ID NO: 4990 - protein, 7 aa, Artificial Sequence
  source: /note="Description of Artificial Sequence: Synthetic peptide"
LHAPEVA

SEQ ID NO: 4991 - protein, 7 aa, Artificial Sequence
  source: /note="Description of Artificial Sequence: Synthetic peptide"
LHATSST

SEQ ID NO: 4992 - protein, 7 aa, Artificial Sequence
  source: /note="Description of Artificial Sequence: Synthetic peptide"
LHATTGP

SEQ ID NO: 4993 - protein, 7 aa, Artificial Sequence
  source: /note="Description of Artificial Sequence: Synthetic peptide"
LHEYRSP

SEQ ID NO: 4994 - protein, 7 aa, Artificial Sequence
  source: /note="Description of Artificial Sequence: Synthetic peptide"
LHFGPEG

SEQ ID NO: 4995 - protein, 7 aa, Artificial Sequence
  source: /note="Description of Artificial Sequence: Synthetic peptide"
LHGLGSG

SEQ ID NO: 4996 - protein, 7 aa, Artificial Sequence
  source: /note="Description of Artificial Sequence: Synthetic peptide"
LHGMPER

SEQ ID NO: 4997 - protein, 7 aa, Artificial Sequence
  source: /note="Description of Artificial Sequence: Synthetic peptide"
LHIREMA

SEQ ID NO: 4998 - protein, 7 aa, Artificial Sequence
  source: /note="Description of Artificial Sequence: Synthetic peptide"
LHKSGFN

SEQ ID NO: 4999 - protein, 7 aa, Artificial Sequence
  source: /note="Description of Artificial Sequence: Synthetic peptide"
LHLQGNS

SEQ ID NO: 5000 - protein, 7 aa, Artificial Sequence
  source: /note="Description of Artificial Sequence: Synthetic peptide"
LHLSRPL

SEQ ID NO: 5001 - protein, 7 aa, Artificial Sequence
  source: /note="Description of Artificial Sequence: Synthetic peptide"
LHLSTAP

SEQ ID NO: 5002 - protein, 7 aa, Artificial Sequence
  source: /note="Description of Artificial Sequence: Synthetic peptide"
LHMTTTR

SEQ ID NO: 5003 - protein, 7 aa, Artificial Sequence
  source: /note="Description of Artificial Sequence: Synthetic peptide"
LHNDLIR

SEQ ID NO: 5004 - protein, 7 aa, Artificial Sequence
  source: /note="Description of Artificial Sequence: Synthetic peptide"
LHNIRQQ

SEQ ID NO: 5005 - protein, 7 aa, Artificial Sequence
  source: /note="Description of Artificial Sequence: Synthetic peptide"
LHNKMYD

SEQ ID NO: 5006 - protein, 7 aa, Artificial Sequence
  source: /note="Description of Artificial Sequence: Synthetic peptide"
LHNQAAR

SEQ ID NO: 5007 - protein, 7 aa, Artificial Sequence
  source: /note="Description of Artificial Sequence: Synthetic peptide"
LHNTAAA

SEQ ID NO: 5008 - protein, 7 aa, Artificial Sequence
  source: /note="Description of Artificial Sequence: Synthetic peptide"
LHNTRNM

SEQ ID NO: 5009 - protein, 7 aa, Artificial Sequence
  source: /note="Description of Artificial Sequence: Synthetic peptide"
LHNTRTV

SEQ ID NO: 5010 - protein, 7 aa, Artificial Sequence
  source: /note="Description of Artificial Sequence: Synthetic peptide"
LHPGSTA

SEQ ID NO: 5011 - protein, 7 aa, Artificial Sequence
  source: /note="Description of Artificial Sequence: Synthetic peptide"
LHPLSPR

SEQ ID NO: 5012 - protein, 7 aa, Artificial Sequence
  source: /note="Description of Artificial Sequence: Synthetic peptide"
LHPVHAP

SEQ ID NO: 5013 - protein, 7 aa, Artificial Sequence
  source: /note="Description of Artificial Sequence: Synthetic peptide"
LHQDRLA

SEQ ID NO: 5014 - protein, 7 aa, Artificial Sequence
  source: /note="Description of Artificial Sequence: Synthetic peptide"
LHQMGNS

SEQ ID NO: 5015 - protein, 7 aa, Artificial Sequence
  source: /note="Description of Artificial Sequence: Synthetic peptide"
LHQSYNQ

SEQ ID NO: 5016 - protein, 7 aa, Artificial Sequence
  source: /note="Description of Artificial Sequence: Synthetic peptide"
LHRDLPV

SEQ ID NO: 5017 - protein, 7 aa, Artificial Sequence
  source: /note="Description of Artificial Sequence: Synthetic peptide"
LHRRPSE

SEQ ID NO: 5018 - protein, 7 aa, Artificial Sequence
  source: /note="Description of Artificial Sequence: Synthetic peptide"
LHSALTR

SEQ ID NO: 5019 - protein, 7 aa, Artificial Sequence
  source: /note="Description of Artificial Sequence: Synthetic peptide"
LHSASPQ

SEQ ID NO: 5020 - protein, 7 aa, Artificial Sequence
  source: /note="Description of Artificial Sequence: Synthetic peptide"
LHSDTRG

SEQ ID NO: 5021 - protein, 7 aa, Artificial Sequence
  source: /note="Description of Artificial Sequence: Synthetic peptide"
LHSELTS

SEQ ID NO: 5022 - protein, 7 aa, Artificial Sequence
  source: /note="Description of Artificial Sequence: Synthetic peptide"
LHSGERQ

SEQ ID NO: 5023 - protein, 7 aa, Artificial Sequence
  source: /note="Description of Artificial Sequence: Synthetic peptide"
LHSNVTK

SEQ ID NO: 5024 - protein, 7 aa, Artificial Sequence
  source: /note="Description of Artificial Sequence: Synthetic peptide"
LHSRADS

SEQ ID NO: 5025 - protein, 7 aa, Artificial Sequence
  source: /note="Description of Artificial Sequence: Synthetic peptide"
LHSRAIS

SEQ ID NO: 5026 - protein, 7 aa, Artificial Sequence
  source: /note="Description of Artificial Sequence: Synthetic peptide"
LHSRGTA

SEQ ID NO: 5027 - protein, 7 aa, Artificial Sequence
  source: /note="Description of Artificial Sequence: Synthetic peptide"
LHSSPQD

SEQ ID NO: 5028 - protein, 7 aa, Artificial Sequence
  source: /note="Description of Artificial Sequence: Synthetic peptide"
LHTAKAG

SEQ ID NO: 5029 - protein, 7 aa, Artificial Sequence
  source: /note="Description of Artificial Sequence: Synthetic peptide"
LHTDWLR

SEQ ID NO: 5030 - protein, 7 aa, Artificial Sequence
  source: /note="Description of Artificial Sequence: Synthetic peptide"
LHTPQLS

SEQ ID NO: 5031 - protein, 7 aa, Artificial Sequence
  source: /note="Description of Artificial Sequence: Synthetic peptide"
LHTSARP

SEQ ID NO: 5032 - protein, 7 aa, Artificial Sequence
  source: /note="Description of Artificial Sequence: Synthetic peptide"
LHVPQPP

SEQ ID NO: 5033 - protein, 7 aa, Artificial Sequence
  source: /note="Description of Artificial Sequence: Synthetic peptide"
LIASHRL

SEQ ID NO: 5034 - protein, 7 aa, Artificial Sequence
  source: /note="Description of Artificial Sequence: Synthetic peptide"
LIASSGV

SEQ ID NO: 5035 - protein, 7 aa, Artificial Sequence
  source: /note="Description of Artificial Sequence: Synthetic peptide"
LIASTTS

SEQ ID NO: 5036 - protein, 7 aa, Artificial Sequence
  source: /note="Description of Artificial Sequence: Synthetic peptide"
LIGNVVM

SEQ ID NO: 5037 - protein, 7 aa, Artificial Sequence
  source: /note="Description of Artificial Sequence: Synthetic peptide"
LIGRPME

SEQ ID NO: 5038 - protein, 7 aa, Artificial Sequence
  source: /note="Description of Artificial Sequence: Synthetic peptide"
LIGRTIS

SEQ ID NO: 5039 - protein, 7 aa, Artificial Sequence
  source: /note="Description of Artificial Sequence: Synthetic peptide"
LIGTASL

SEQ ID NO: 5040 - protein, 7 aa, Artificial Sequence
  source: /note="Description of Artificial Sequence: Synthetic peptide"
LIGTPVV

SEQ ID NO: 5041 - protein, 7 aa, Artificial Sequence
  source: /note="Description of Artificial Sequence: Synthetic peptide"
LIHASGG

SEQ ID NO: 5042 - protein, 7 aa, Artificial Sequence
  source: /note="Description of Artificial Sequence: Synthetic peptide"
LIHLSGA

SEQ ID NO: 5043 - protein, 7 aa, Artificial Sequence
  source: /note="Description of Artificial Sequence: Synthetic peptide"
LIKENVL

SEQ ID NO: 5044 - protein, 7 aa, Artificial Sequence
  source: /note="Description of Artificial Sequence: Synthetic peptide"
LIKGAAS

SEQ ID NO: 5045 - protein, 7 aa, Artificial Sequence
  source: /note="Description of Artificial Sequence: Synthetic peptide"
LIKGSLD

SEQ ID NO: 5046 - protein, 7 aa, Artificial Sequence
  source: /note="Description of Artificial Sequence: Synthetic peptide"
LIKPSVP

SEQ ID NO: 5047 - protein, 7 aa, Artificial Sequence
  source: /note="Description of Artificial Sequence: Synthetic peptide"
LIKSSEP

SEQ ID NO: 5048 - protein, 7 aa, Artificial Sequence
  source: /note="Description of Artificial Sequence: Synthetic peptide"
LIKSTLV

SEQ ID NO: 5049 - protein, 7 aa, Artificial Sequence
  source: /note="Description of Artificial Sequence: Synthetic peptide"
LIKTTHG

SEQ ID NO: 5050 - protein, 7 aa, Artificial Sequence
  source: /note="Description of Artificial Sequence: Synthetic peptide"
LILPNHS

SEQ ID NO: 5051 - protein, 7 aa, Artificial Sequence
  source: /note="Description of Artificial Sequence: Synthetic peptide"
LIMRHDC

SEQ ID NO: 5052 - protein, 7 aa, Artificial Sequence
  source: /note="Description of Artificial Sequence: Synthetic peptide"
LINENPH

SEQ ID NO: 5053 - protein, 7 aa, Artificial Sequence
  source: /note="Description of Artificial Sequence: Synthetic peptide"
LINKISP

SEQ ID NO: 5054 - protein, 7 aa, Artificial Sequence
  source: /note="Description of Artificial Sequence: Synthetic peptide"
LINPEMY

SEQ ID NO: 5055 - protein, 7 aa, Artificial Sequence
  source: /note="Description of Artificial Sequence: Synthetic peptide"
LIPPHHD

SEQ ID NO: 5056 - protein, 7 aa, Artificial Sequence
  source: /note="Description of Artificial Sequence: Synthetic peptide"
LIPTVMN

SEQ ID NO: 5057 - protein, 7 aa, Artificial Sequence
  source: /note="Description of Artificial Sequence: Synthetic peptide"
LIQEVLQ

SEQ ID NO: 5058 - protein, 7 aa, Artificial Sequence
  source: /note="Description of Artificial Sequence: Synthetic peptide"
LIQISQQ

SEQ ID NO: 5059 - protein, 7 aa, Artificial Sequence
  source: /note="Description of Artificial Sequence: Synthetic peptide"
LIQNQGT

SEQ ID NO: 5060 - protein, 7 aa, Artificial Sequence
  source: /note="Description of Artificial Sequence: Synthetic peptide"
LIREQNP

SEQ ID NO: 5061 - protein, 7 aa, Artificial Sequence
  source: /note="Description of Artificial Sequence: Synthetic peptide"
LIRLSDN

SEQ ID NO: 5062 - protein, 7 aa, Artificial Sequence
  source: /note="Description of Artificial Sequence: Synthetic peptide"
LIRSDTI

SEQ ID NO: 5063 - protein, 7 aa, Artificial Sequence
  source: /note="Description of Artificial Sequence: Synthetic peptide"
LIRSIPP

SEQ ID NO: 5064 - protein, 7 aa, Artificial Sequence
  source: /note="Description of Artificial Sequence: Synthetic peptide"
LISASHI

SEQ ID NO: 5065 - protein, 7 aa, Artificial Sequence
  source: /note="Description of Artificial Sequence: Synthetic peptide"
LISDASS

SEQ ID NO: 5066 - protein, 7 aa, Artificial Sequence
  source: /note="Description of Artificial Sequence: Synthetic peptide"
LISPTVT

SEQ ID NO: 5067 - protein, 7 aa, Artificial Sequence
  source: /note="Description of Artificial Sequence: Synthetic peptide"
LISREVT

SEQ ID NO: 5068 - protein, 7 aa, Artificial Sequence
  source: /note="Description of Artificial Sequence: Synthetic peptide"
LISRVPD

SEQ ID NO: 5069 - protein, 7 aa, Artificial Sequence
  source: /note="Description of Artificial Sequence: Synthetic peptide"
LITAALA

SEQ ID NO: 5070 - protein, 7 aa, Artificial Sequence
  source: /note="Description of Artificial Sequence: Synthetic peptide"
LITGHST

SEQ ID NO: 5071 - protein, 7 aa, Artificial Sequence
  source: /note="Description of Artificial Sequence: Synthetic peptide"
LITPGAS

SEQ ID NO: 5072 - protein, 7 aa, Artificial Sequence
  source: /note="Description of Artificial Sequence: Synthetic peptide"
LITPLPS

SEQ ID NO: 5073 - protein, 7 aa, Artificial Sequence
  source: /note="Description of Artificial Sequence: Synthetic peptide"
LITSAAG

SEQ ID NO: 5074 - protein, 7 aa, Artificial Sequence
  source: /note="Description of Artificial Sequence: Synthetic peptide"
LIVALKG

SEQ ID NO: 5075 - protein, 7 aa, Artificial Sequence
  source: /note="Description of Artificial Sequence: Synthetic peptide"
LIVEQAR

SEQ ID NO: 5076 - protein, 7 aa, Artificial Sequence
  source: /note="Description of Artificial Sequence: Synthetic peptide"
LIVTENK

SEQ ID NO: 5077 - protein, 7 aa, Artificial Sequence
  source: /note="Description of Artificial Sequence: Synthetic peptide"
LKAGSSS

SEQ ID NO: 5078 - protein, 7 aa, Artificial Sequence
  source: /note="Description of Artificial Sequence: Synthetic peptide"
LKAGTYG

SEQ ID NO: 5079 - protein, 7 aa, Artificial Sequence
  source: /note="Description of Artificial Sequence: Synthetic peptide"
LKAIPYG

SEQ ID NO: 5080 - protein, 7 aa, Artificial Sequence
  source: /note="Description of Artificial Sequence: Synthetic peptide"
LKAQVEL

SEQ ID NO: 5081 - protein, 7 aa, Artificial Sequence
  source: /note="Description of Artificial Sequence: Synthetic peptide"
LKATITS

SEQ ID NO: 5082 - protein, 7 aa, Artificial Sequence
  source: /note="Description of Artificial Sequence: Synthetic peptide"
LKDGRAS

SEQ ID NO: 5083 - protein, 7 aa, Artificial Sequence
  source: /note="Description of Artificial Sequence: Synthetic peptide"
LKDMRLT

SEQ ID NO: 5084 - protein, 7 aa, Artificial Sequence
  source: /note="Description of Artificial Sequence: Synthetic peptide"
LKDPARL

SEQ ID NO: 5085 - protein, 7 aa, Artificial Sequence
  source: /note="Description of Artificial Sequence: Synthetic peptide"
LKDPTAW

SEQ ID NO: 5086 - protein, 7 aa, Artificial Sequence
  source: /note="Description of Artificial Sequence: Synthetic peptide"
LKDSLTC

SEQ ID NO: 5087 - protein, 7 aa, Artificial Sequence
  source: /note="Description of Artificial Sequence: Synthetic peptide"
LKDYGGA

SEQ ID NO: 5088 - protein, 7 aa, Artificial Sequence
  source: /note="Description of Artificial Sequence: Synthetic peptide"
LKEIAGL

SEQ ID NO: 5089 - protein, 7 aa, Artificial Sequence
  source: /note="Description of Artificial Sequence: Synthetic peptide"
LKFSESK

SEQ ID NO: 5090 - protein, 7 aa, Artificial Sequence
  source: /note="Description of Artificial Sequence: Synthetic peptide"
LKGAVVV

SEQ ID NO: 5091 - protein, 7 aa, Artificial Sequence
  source: /note="Description of Artificial Sequence: Synthetic peptide"
LKGDAGY

SEQ ID NO: 5092 - protein, 7 aa, Artificial Sequence
  source: /note="Description of Artificial Sequence: Synthetic peptide"
LKGGADT

SEQ ID NO: 5093 - protein, 7 aa, Artificial Sequence
  source: /note="Description of Artificial Sequence: Synthetic peptide"
LKGMTGL

SEQ ID NO: 5094 - protein, 7 aa, Artificial Sequence
  source: /note="Description of Artificial Sequence: Synthetic peptide"
LKGPNAV

SEQ ID NO: 5095 - protein, 7 aa, Artificial Sequence
  source: /note="Description of Artificial Sequence: Synthetic peptide"
LKGYIDS

SEQ ID NO: 5096 - protein, 7 aa, Artificial Sequence
  source: /note="Description of Artificial Sequence: Synthetic peptide"
LKHQLLA

SEQ ID NO: 5097 - protein, 7 aa, Artificial Sequence
  source: /note="Description of Artificial Sequence: Synthetic peptide"
LKHSLPD

SEQ ID NO: 5098 - protein, 7 aa, Artificial Sequence
  source: /note="Description of Artificial Sequence: Synthetic peptide"
LKIGTVT

SEQ ID NO: 5099 - protein, 7 aa, Artificial Sequence
  source: /note="Description of Artificial Sequence: Synthetic peptide"
LKLAPNV

SEQ ID NO: 5100 - protein, 7 aa, Artificial Sequence
  source: /note="Description of Artificial Sequence: Synthetic peptide"
LKLDEGL

SEQ ID NO: 5101 - protein, 7 aa, Artificial Sequence
  source: /note="Description of Artificial Sequence: Synthetic peptide"
LKLRASE

SEQ ID NO: 5102 - protein, 7 aa, Artificial Sequence
  source: /note="Description of Artificial Sequence: Synthetic peptide"
LKMSSTP

SEQ ID NO: 5103 - protein, 7 aa, Artificial Sequence
  source: /note="Description of Artificial Sequence: Synthetic peptide"
LKMVDNV

SEQ ID NO: 5104 - protein, 7 aa, Artificial Sequence
  source: /note="Description of Artificial Sequence: Synthetic peptide"
LKNGSMV

SEQ ID NO: 5105 - protein, 7 aa, Artificial Sequence
  source: /note="Description of Artificial Sequence: Synthetic peptide"
LKNPLPS

SEQ ID NO: 5106 - protein, 7 aa, Artificial Sequence
  source: /note="Description of Artificial Sequence: Synthetic peptide"
LKNPSNV

SEQ ID NO: 5107 - protein, 7 aa, Artificial Sequence
  source: /note="Description of Artificial Sequence: Synthetic peptide"
LKPDMTR

SEQ ID NO: 5108 - protein, 7 aa, Artificial Sequence
  source: /note="Description of Artificial Sequence: Synthetic peptide"
LKPDRPD

SEQ ID NO: 5109 - protein, 7 aa, Artificial Sequence
  source: /note="Description of Artificial Sequence: Synthetic peptide"
LKPNEIS

SEQ ID NO: 5110 - protein, 7 aa, Artificial Sequence
  source: /note="Description of Artificial Sequence: Synthetic peptide"
LKPSPIP

SEQ ID NO: 5111 - protein, 7 aa, Artificial Sequence
  source: /note="Description of Artificial Sequence: Synthetic peptide"
LKPSSYV

SEQ ID NO: 5112 - protein, 7 aa, Artificial Sequence
  source: /note="Description of Artificial Sequence: Synthetic peptide"
LKPVPSL

SEQ ID NO: 5113 - protein, 7 aa, Artificial Sequence
  source: /note="Description of Artificial Sequence: Synthetic peptide"
LKQIDLG

SEQ ID NO: 5114 - protein, 7 aa, Artificial Sequence
  source: /note="Description of Artificial Sequence: Synthetic peptide"
LKQPTQC

SEQ ID NO: 5115 - protein, 7 aa, Artificial Sequence
  source: /note="Description of Artificial Sequence: Synthetic peptide"
LKREFDY

SEQ ID NO: 5116 - protein, 7 aa, Artificial Sequence
  source: /note="Description of Artificial Sequence: Synthetic peptide"
LKSATTI

SEQ ID NO: 5117 - protein, 7 aa, Artificial Sequence
  source: /note="Description of Artificial Sequence: Synthetic peptide"
LKSGVSP

SEQ ID NO: 5118 - protein, 7 aa, Artificial Sequence
  source: /note="Description of Artificial Sequence: Synthetic peptide"
LKSPSTP

SEQ ID NO: 5119 - protein, 7 aa, Artificial Sequence
  source: /note="Description of Artificial Sequence: Synthetic peptide"
LKSQLSD

SEQ ID NO: 5120 - protein, 7 aa, Artificial Sequence
  source: /note="Description of Artificial Sequence: Synthetic peptide"
LKSQSFT

SEQ ID NO: 5121 - protein, 7 aa, Artificial Sequence
  source: /note="Description of Artificial Sequence: Synthetic peptide"
LKSTLMP

SEQ ID NO: 5122 - protein, 7 aa, Artificial Sequence
  source: /note="Description of Artificial Sequence: Synthetic peptide"
LKSTPPG

SEQ ID NO: 5123 - protein, 7 aa, Artificial Sequence
  source: /note="Description of Artificial Sequence: Synthetic peptide"
LKSTSQV

SEQ ID NO: 5124 - protein, 7 aa, Artificial Sequence
  source: /note="Description of Artificial Sequence: Synthetic peptide"
LKTGRDS

SEQ ID NO: 5125 - protein, 7 aa, Artificial Sequence
  source: /note="Description of Artificial Sequence: Synthetic peptide"
LKTGYMP

SEQ ID NO: 5126 - protein, 7 aa, Artificial Sequence
  source: /note="Description of Artificial Sequence: Synthetic peptide"
LKTLLKT

SEQ ID NO: 5127 - protein, 7 aa, Artificial Sequence
  source: /note="Description of Artificial Sequence: Synthetic peptide"
LKTNERV

SEQ ID NO: 5128 - protein, 7 aa, Artificial Sequence
  source: /note="Description of Artificial Sequence: Synthetic peptide"
LKTSGVI

SEQ ID NO: 5129 - protein, 7 aa, Artificial Sequence
  source: /note="Description of Artificial Sequence: Synthetic peptide"
LKTSNRD

SEQ ID NO: 5130 - protein, 7 aa, Artificial Sequence
  source: /note="Description of Artificial Sequence: Synthetic peptide"
LKTTNPP

SEQ ID NO: 5131 - protein, 7 aa, Artificial Sequence
  source: /note="Description of Artificial Sequence: Synthetic peptide"
LKTVHSD

SEQ ID NO: 5132 - protein, 7 aa, Artificial Sequence
  source: /note="Description of Artificial Sequence: Synthetic peptide"
LKVEMSP

SEQ ID NO: 5133 - protein, 7 aa, Artificial Sequence
  source: /note="Description of Artificial Sequence: Synthetic peptide"
LKWEHTS

SEQ ID NO: 5134 - protein, 7 aa, Artificial Sequence
  source: /note="Description of Artificial Sequence: Synthetic peptide"
LKWGPPD

SEQ ID NO: 5135 - protein, 7 aa, Artificial Sequence
  source: /note="Description of Artificial Sequence: Synthetic peptide"
LKYNIPV

SEQ ID NO: 5136 - protein, 7 aa, Artificial Sequence
  source: /note="Description of Artificial Sequence: Synthetic peptide"
LLAAMGP

SEQ ID NO: 5137 - protein, 7 aa, Artificial Sequence
  source: /note="Description of Artificial Sequence: Synthetic peptide"
LLAFEKQ

SEQ ID NO: 5138 - protein, 7 aa, Artificial Sequence
  source: /note="Description of Artificial Sequence: Synthetic peptide"
LLAGHHG

SEQ ID NO: 5139 - protein, 7 aa, Artificial Sequence
  source: /note="Description of Artificial Sequence: Synthetic peptide"
LLARGVN

SEQ ID NO: 5140 - protein, 7 aa, Artificial Sequence
  source: /note="Description of Artificial Sequence: Synthetic peptide"
LLATSLT

SEQ ID NO: 5141 - protein, 7 aa, Artificial Sequence
  source: /note="Description of Artificial Sequence: Synthetic peptide"
LLDGRAR

SEQ ID NO: 5142 - protein, 7 aa, Artificial Sequence
  source: /note="Description of Artificial Sequence: Synthetic peptide"
LLDKERE

SEQ ID NO: 5143 - protein, 7 aa, Artificial Sequence
  source: /note="Description of Artificial Sequence: Synthetic peptide"
LLDQDFF

SEQ ID NO: 5144 - protein, 7 aa, Artificial Sequence
  source: /note="Description of Artificial Sequence: Synthetic peptide"
LLDTGVP

SEQ ID NO: 5145 - protein, 7 aa, Artificial Sequence
  source: /note="Description of Artificial Sequence: Synthetic peptide"
LLEKGQS

SEQ ID NO: 5146 - protein, 7 aa, Artificial Sequence
  source: /note="Description of Artificial Sequence: Synthetic peptide"
LLERSYP

SEQ ID NO: 5147 - protein, 7 aa, Artificial Sequence
  source: /note="Description of Artificial Sequence: Synthetic peptide"
LLEVPIR

SEQ ID NO: 5148 - protein, 7 aa, Artificial Sequence
  source: /note="Description of Artificial Sequence: Synthetic peptide"
LLFKSSS

SEQ ID NO: 5149 - protein, 7 aa, Artificial Sequence
  source: /note="Description of Artificial Sequence: Synthetic peptide"
LLGARHL

SEQ ID NO: 5150 - protein, 7 aa, Artificial Sequence
  source: /note="Description of Artificial Sequence: Synthetic peptide"
LLGASSA

SEQ ID NO: 5151 - protein, 7 aa, Artificial Sequence
  source: /note="Description of Artificial Sequence: Synthetic peptide"
LLGHAAS

SEQ ID NO: 5152 - protein, 7 aa, Artificial Sequence
  source: /note="Description of Artificial Sequence: Synthetic peptide"
LLGPDPS

SEQ ID NO: 5153 - protein, 7 aa, Artificial Sequence
  source: /note="Description of Artificial Sequence: Synthetic peptide"
LLGPLQG

SEQ ID NO: 5154 - protein, 7 aa, Artificial Sequence
  source: /note="Description of Artificial Sequence: Synthetic peptide"
LLGRLQP

SEQ ID NO: 5155 - protein, 7 aa, Artificial Sequence
  source: /note="Description of Artificial Sequence: Synthetic peptide"
LLGRSTG

SEQ ID NO: 5156 - protein, 7 aa, Artificial Sequence
  source: /note="Description of Artificial Sequence: Synthetic peptide"
LLGSRPS

SEQ ID NO: 5157 - protein, 7 aa, Artificial Sequence
  source: /note="Description of Artificial Sequence: Synthetic peptide"
LLGVLHP

SEQ ID NO: 5158 - protein, 7 aa, Artificial Sequence
  source: /note="Description of Artificial Sequence: Synthetic peptide"
LLGVTNP

SEQ ID NO: 5159 - protein, 7 aa, Artificial Sequence
  source: /note="Description of Artificial Sequence: Synthetic peptide"
LLHLGQT

SEQ ID NO: 5160 - protein, 7 aa, Artificial Sequence
  source: /note="Description of Artificial Sequence: Synthetic peptide"
LLHPAPR

SEQ ID NO: 5161 - protein, 7 aa, Artificial Sequence
  source: /note="Description of Artificial Sequence: Synthetic peptide"
LLHPEAI

SEQ ID NO: 5162 - protein, 7 aa, Artificial Sequence
  source: /note="Description of Artificial Sequence: Synthetic peptide"
LLHSSSQ

SEQ ID NO: 5163 - protein, 7 aa, Artificial Sequence
  source: /note="Description of Artificial Sequence: Synthetic peptide"
LLHTQGN

SEQ ID NO: 5164 - protein, 7 aa, Artificial Sequence
  source: /note="Description of Artificial Sequence: Synthetic peptide"
LLHTVSE

SEQ ID NO: 5165 - protein, 7 aa, Artificial Sequence
  source: /note="Description of Artificial Sequence: Synthetic peptide"
LLHVPRE

SEQ ID NO: 5166 - protein, 7 aa, Artificial Sequence
  source: /note="Description of Artificial Sequence: Synthetic peptide"
LLICGEH

SEQ ID NO: 5167 - protein, 7 aa, Artificial Sequence
  source: /note="Description of Artificial Sequence: Synthetic peptide"
LLKGFSV

SEQ ID NO: 5168 - protein, 7 aa, Artificial Sequence
  source: /note="Description of Artificial Sequence: Synthetic peptide"
LLKPAAP

SEQ ID NO: 5169 - protein, 7 aa, Artificial Sequence
  source: /note="Description of Artificial Sequence: Synthetic peptide"
LLKSPVP

SEQ ID NO: 5170 - protein, 7 aa, Artificial Sequence
  source: /note="Description of Artificial Sequence: Synthetic peptide"
LLLAPTS

SEQ ID NO: 5171 - protein, 7 aa, Artificial Sequence
  source: /note="Description of Artificial Sequence: Synthetic peptide"
LLLARTV

SEQ ID NO: 5172 - protein, 7 aa, Artificial Sequence
  source: /note="Description of Artificial Sequence: Synthetic peptide"
LLLDDHT

SEQ ID NO: 5173 - protein, 7 aa, Artificial Sequence
  source: /note="Description of Artificial Sequence: Synthetic peptide"
LLLPARG

SEQ ID NO: 5174 - protein, 7 aa, Artificial Sequence
  source: /note="Description of Artificial Sequence: Synthetic peptide"
LLLQARA

SEQ ID NO: 5175 - protein, 7 aa, Artificial Sequence
  source: /note="Description of Artificial Sequence: Synthetic peptide"
LLLQKGP

SEQ ID NO: 5176 - protein, 7 aa, Artificial Sequence
  source: /note="Description of Artificial Sequence: Synthetic peptide"
LLLRADG

SEQ ID NO: 5177 - protein, 7 aa, Artificial Sequence
  source: /note="Description of Artificial Sequence: Synthetic peptide"
LLLSVGT

SEQ ID NO: 5178 - protein, 7 aa, Artificial Sequence
  source: /note="Description of Artificial Sequence: Synthetic peptide"
LLLTGVA

SEQ ID NO: 5179 - protein, 7 aa, Artificial Sequence
  source: /note="Description of Artificial Sequence: Synthetic peptide"
LLMPSGL

SEQ ID NO: 5180 - protein, 7 aa, Artificial Sequence
  source: /note="Description of Artificial Sequence: Synthetic peptide"
LLNDAYV

SEQ ID NO: 5181 - protein, 7 aa, Artificial Sequence
  source: /note="Description of Artificial Sequence: Synthetic peptide"
LLNGHEA

SEQ ID NO: 5182 - protein, 7 aa, Artificial Sequence
  source: /note="Description of Artificial Sequence: Synthetic peptide"
LLNMART

SEQ ID NO: 5183 - protein, 7 aa, Artificial Sequence
  source: /note="Description of Artificial Sequence: Synthetic peptide"
LLNTSSA

SEQ ID NO: 5184 - protein, 7 aa, Artificial Sequence
  source: /note="Description of Artificial Sequence: Synthetic peptide"
LLPAERA

SEQ ID NO: 5185 - protein, 7 aa, Artificial Sequence
  source: /note="Description of Artificial Sequence: Synthetic peptide"
LLPEYSR

SEQ ID NO: 5186 - protein, 7 aa, Artificial Sequence
  source: /note="Description of Artificial Sequence: Synthetic peptide"
LLPGRTD

SEQ ID NO: 5187 - protein, 7 aa, Artificial Sequence
  source: /note="Description of Artificial Sequence: Synthetic peptide"
LLPHEGT

SEQ ID NO: 5188 - protein, 7 aa, Artificial Sequence
  source: /note="Description of Artificial Sequence: Synthetic peptide"
LLPKASS

SEQ ID NO: 5189 - protein, 7 aa, Artificial Sequence
  source: /note="Description of Artificial Sequence: Synthetic peptide"
LLPLAPR

SEQ ID NO: 5190 - protein, 7 aa, Artificial Sequence
  source: /note="Description of Artificial Sequence: Synthetic peptide"
LLPNPPT

SEQ ID NO: 5191 - protein, 7 aa, Artificial Sequence
  source: /note="Description of Artificial Sequence: Synthetic peptide"
LLPNQSF

SEQ ID NO: 5192 - protein, 7 aa, Artificial Sequence
  source: /note="Description of Artificial Sequence: Synthetic peptide"
LLPNTPP

SEQ ID NO: 5193 - protein, 7 aa, Artificial Sequence
  source: /note="Description of Artificial Sequence: Synthetic peptide"
LLPPRDP

SEQ ID NO: 5194 - protein, 7 aa, Artificial Sequence
  source: /note="Description of Artificial Sequence: Synthetic peptide"
LLPPSSS

SEQ ID NO: 5195 - protein, 7 aa, Artificial Sequence
  source: /note="Description of Artificial Sequence: Synthetic peptide"
LLPQFRS

SEQ ID NO: 5196 - protein, 7 aa, Artificial Sequence
  source: /note="Description of Artificial Sequence: Synthetic peptide"
LLPRTHY

SEQ ID NO: 5197 - protein, 7 aa, Artificial Sequence
  source: /note="Description of Artificial Sequence: Synthetic peptide"
LLPSLAS

SEQ ID NO: 5198 - protein, 7 aa, Artificial Sequence
  source: /note="Description of Artificial Sequence: Synthetic peptide"
LLPSRGA

SEQ ID NO: 5199 - protein, 7 aa, Artificial Sequence
  source: /note="Description of Artificial Sequence: Synthetic peptide"
LLPTSKL

SEQ ID NO: 5200 - protein, 7 aa, Artificial Sequence
  source: /note="Description of Artificial Sequence: Synthetic peptide"
LLPVLSE

SEQ ID NO: 5201 - protein, 7 aa, Artificial Sequence
  source: /note="Description of Artificial Sequence: Synthetic peptide"
LLQPSVP

SEQ ID NO: 5202 - protein, 7 aa, Artificial Sequence
  source: /note="Description of Artificial Sequence: Synthetic peptide"
LLQQPEW

SEQ ID NO: 5203 - protein, 7 aa, Artificial Sequence
  source: /note="Description of Artificial Sequence: Synthetic peptide"
LLQRSLS

SEQ ID NO: 5204 - protein, 7 aa, Artificial Sequence
  source: /note="Description of Artificial Sequence: Synthetic peptide"
LLQTLKP

SEQ ID NO: 5205 - protein, 7 aa, Artificial Sequence
  source: /note="Description of Artificial Sequence: Synthetic peptide"
LLRGAVA

SEQ ID NO: 5206 - protein, 7 aa, Artificial Sequence
  source: /note="Description of Artificial Sequence: Synthetic peptide"
LLRGDAA

SEQ ID NO: 5207 - protein, 7 aa, Artificial Sequence
  source: /note="Description of Artificial Sequence: Synthetic peptide"
LLRKDEA

SEQ ID NO: 5208 - protein, 7 aa, Artificial Sequence
  source: /note="Description of Artificial Sequence: Synthetic peptide"
LLRNNPH

SEQ ID NO: 5209 - protein, 7 aa, Artificial Sequence
  source: /note="Description of Artificial Sequence: Synthetic peptide"
LLRNVLP

SEQ ID NO: 5210 - protein, 7 aa, Artificial Sequence
  source: /note="Description of Artificial Sequence: Synthetic peptide"
LLRSQSA

SEQ ID NO: 5211 - protein, 7 aa, Artificial Sequence
  source: /note="Description of Artificial Sequence: Synthetic peptide"
LLRTPSS

SEQ ID NO: 5212 - protein, 7 aa, Artificial Sequence
  source: /note="Description of Artificial Sequence: Synthetic peptide"
LLRVPNP

SEQ ID NO: 5213 - protein, 7 aa, Artificial Sequence
  source: /note="Description of Artificial Sequence: Synthetic peptide"
LLSAADR

SEQ ID NO: 5214 - protein, 7 aa, Artificial Sequence
  source: /note="Description of Artificial Sequence: Synthetic peptide"
LLSAPYT

SEQ ID NO: 5215 - protein, 7 aa, Artificial Sequence
  source: /note="Description of Artificial Sequence: Synthetic peptide"
LLSASTS

SEQ ID NO: 5216 - protein, 7 aa, Artificial Sequence
  source: /note="Description of Artificial Sequence: Synthetic peptide"
LLSDSAR

SEQ ID NO: 5217 - protein, 7 aa, Artificial Sequence
  source: /note="Description of Artificial Sequence: Synthetic peptide"
LLSFTTD

SEQ ID NO: 5218 - protein, 7 aa, Artificial Sequence
  source: /note="Description of Artificial Sequence: Synthetic peptide"
LLSGALQ

SEQ ID NO: 5219 - protein, 7 aa, Artificial Sequence
  source: /note="Description of Artificial Sequence: Synthetic peptide"
LLSGRVT

SEQ ID NO: 5220 - protein, 7 aa, Artificial Sequence
  source: /note="Description of Artificial Sequence: Synthetic peptide"
LLSKGHS

SEQ ID NO: 5221 - protein, 7 aa, Artificial Sequence
  source: /note="Description of Artificial Sequence: Synthetic peptide"
LLSMRTP

SEQ ID NO: 5222 - protein, 7 aa, Artificial Sequence
  source: /note="Description of Artificial Sequence: Synthetic peptide"
LLSPDEY

SEQ ID NO: 5223 - protein, 7 aa, Artificial Sequence
  source: /note="Description of Artificial Sequence: Synthetic peptide"
LLSPGPL

SEQ ID NO: 5224 - protein, 7 aa, Artificial Sequence
  source: /note="Description of Artificial Sequence: Synthetic peptide"
LLSRVHD

SEQ ID NO: 5225 - protein, 7 aa, Artificial Sequence
  source: /note="Description of Artificial Sequence: Synthetic peptide"
LLSTAVS

SEQ ID NO: 5226 - protein, 7 aa, Artificial Sequence
  source: /note="Description of Artificial Sequence: Synthetic peptide"
LLSTDGS

SEQ ID NO: 5227 - protein, 7 aa, Artificial Sequence
  source: /note="Description of Artificial Sequence: Synthetic peptide"
LLSVHEM

SEQ ID NO: 5228 - protein, 7 aa, Artificial Sequence
  source: /note="Description of Artificial Sequence: Synthetic peptide"
LLTDECT

SEQ ID NO: 5229 - protein, 7 aa, Artificial Sequence
  source: /note="Description of Artificial Sequence: Synthetic peptide"
LLTDRRL

SEQ ID NO: 5230 - protein, 7 aa, Artificial Sequence
  source: /note="Description of Artificial Sequence: Synthetic peptide"
LLTHFSS

SEQ ID NO: 5231 - protein, 7 aa, Artificial Sequence
  source: /note="Description of Artificial Sequence: Synthetic peptide"
LLTIGKP

SEQ ID NO: 5232 - protein, 7 aa, Artificial Sequence
  source: /note="Description of Artificial Sequence: Synthetic peptide"
LLTLSEV

SEQ ID NO: 5233 - protein, 7 aa, Artificial Sequence
  source: /note="Description of Artificial Sequence: Synthetic peptide"
LLTLSTP

SEQ ID NO: 5234 - protein, 7 aa, Artificial Sequence
  source: /note="Description of Artificial Sequence: Synthetic peptide"
LLTNAIP

SEQ ID NO: 5235 - protein, 7 aa, Artificial Sequence
  source: /note="Description of Artificial Sequence: Synthetic peptide"
LLTPYNP

SEQ ID NO: 5236 - protein, 7 aa, Artificial Sequence
  source: /note="Description of Artificial Sequence: Synthetic peptide"
LLTRSTE

SEQ ID NO: 5237 - protein, 7 aa, Artificial Sequence
  source: /note="Description of Artificial Sequence: Synthetic peptide"
LLVHKVV

SEQ ID NO: 5238 - protein, 7 aa, Artificial Sequence
  source: /note="Description of Artificial Sequence: Synthetic peptide"
LLVRHRD

SEQ ID NO: 5239 - protein, 7 aa, Artificial Sequence
  source: /note="Description of Artificial Sequence: Synthetic peptide"
LLVRNTD

SEQ ID NO: 5240 - protein, 7 aa, Artificial Sequence
  source: /note="Description of Artificial Sequence: Synthetic peptide"
LLVSENS

SEQ ID NO: 5241 - protein, 7 aa, Artificial Sequence
  source: /note="Description of Artificial Sequence: Synthetic peptide"
LLVTDKM

SEQ ID NO: 5242 - protein, 7 aa, Artificial Sequence
  source: /note="Description of Artificial Sequence: Synthetic peptide"
LLVVPSR

SEQ ID NO: 5243 - protein, 7 aa, Artificial Sequence
  source: /note="Description of Artificial Sequence: Synthetic peptide"
LLYAERP

SEQ ID NO: 5244 - protein, 7 aa, Artificial Sequence
  source: /note="Description of Artificial Sequence: Synthetic peptide"
LLYQNSS

SEQ ID NO: 5245 - protein, 7 aa, Artificial Sequence
  source: /note="Description of Artificial Sequence: Synthetic peptide"
LLYSTDK

SEQ ID NO: 5246 - protein, 7 aa, Artificial Sequence
  source: /note="Description of Artificial Sequence: Synthetic peptide"
LMAHSQL

SEQ ID NO: 5247 - protein, 7 aa, Artificial Sequence
  source: /note="Description of Artificial Sequence: Synthetic peptide"
LMAIHKP

SEQ ID NO: 5248 - protein, 7 aa, Artificial Sequence
  source: /note="Description of Artificial Sequence: Synthetic peptide"
LMATRVP

SEQ ID NO: 5249 - protein, 7 aa, Artificial Sequence
  source: /note="Description of Artificial Sequence: Synthetic peptide"
LMDSRKY

SEQ ID NO: 5250 - protein, 7 aa, Artificial Sequence
  source: /note="Description of Artificial Sequence: Synthetic peptide"
LMEATFK

SEQ ID NO: 5251 - protein, 7 aa, Artificial Sequence
  source: /note="Description of Artificial Sequence: Synthetic peptide"
LMEHIIE

SEQ ID NO: 5252 - protein, 7 aa, Artificial Sequence
  source: /note="Description of Artificial Sequence: Synthetic peptide"
LMENHMA

SEQ ID NO: 5253 - protein, 7 aa, Artificial Sequence
  source: /note="Description of Artificial Sequence: Synthetic peptide"
LMGQGRT

SEQ ID NO: 5254 - protein, 7 aa, Artificial Sequence
  source: /note="Description of Artificial Sequence: Synthetic peptide"
LMGQVAG

SEQ ID NO: 5255 - protein, 7 aa, Artificial Sequence
  source: /note="Description of Artificial Sequence: Synthetic peptide"
LMKPSAG

SEQ ID NO: 5256 - protein, 7 aa, Artificial Sequence
  source: /note="Description of Artificial Sequence: Synthetic peptide"
LMKRVET

SEQ ID NO: 5257 - protein, 7 aa, Artificial Sequence
  source: /note="Description of Artificial Sequence: Synthetic peptide"
LMLARND

SEQ ID NO: 5258 - protein, 7 aa, Artificial Sequence
  source: /note="Description of Artificial Sequence: Synthetic peptide"
LMLRSSQ

SEQ ID NO: 5259 - protein, 7 aa, Artificial Sequence
  source: /note="Description of Artificial Sequence: Synthetic peptide"
LMNGGST

SEQ ID NO: 5260 - protein, 7 aa, Artificial Sequence
  source: /note="Description of Artificial Sequence: Synthetic peptide"
LMNSAIA

SEQ ID NO: 5261 - protein, 7 aa, Artificial Sequence
  source: /note="Description of Artificial Sequence: Synthetic peptide"
LMPSMRP

SEQ ID NO: 5262 - protein, 7 aa, Artificial Sequence
  source: /note="Description of Artificial Sequence: Synthetic peptide"
LMQPKSA

SEQ ID NO: 5263 - protein, 7 aa, Artificial Sequence
  source: /note="Description of Artificial Sequence: Synthetic peptide"
LMRISTA

SEQ ID NO: 5264 - protein, 7 aa, Artificial Sequence
  source: /note="Description of Artificial Sequence: Synthetic peptide"
LMRPAEL

SEQ ID NO: 5265 - protein, 7 aa, Artificial Sequence
  source: /note="Description of Artificial Sequence: Synthetic peptide"
LMRTNPD

SEQ ID NO: 5266 - protein, 7 aa, Artificial Sequence
  source: /note="Description of Artificial Sequence: Synthetic peptide"
LMSLTTV

SEQ ID NO: 5267 - protein, 7 aa, Artificial Sequence
  source: /note="Description of Artificial Sequence: Synthetic peptide"
LMSPQSP

SEQ ID NO: 5268 - protein, 7 aa, Artificial Sequence
  source: /note="Description of Artificial Sequence: Synthetic peptide"
LMSQELR

SEQ ID NO: 5269 - protein, 7 aa, Artificial Sequence
  source: /note="Description of Artificial Sequence: Synthetic peptide"
LMSQTQR

SEQ ID NO: 5270 - protein, 7 aa, Artificial Sequence
  source: /note="Description of Artificial Sequence: Synthetic peptide"
LMSSKPP

SEQ ID NO: 5271 - protein, 7 aa, Artificial Sequence
  source: /note="Description of Artificial Sequence: Synthetic peptide"
LMSTAEP

SEQ ID NO: 5272 - protein, 7 aa, Artificial Sequence
  source: /note="Description of Artificial Sequence: Synthetic peptide"
LMSTASP

SEQ ID NO: 5273 - protein, 7 aa, Artificial Sequence
  source: /note="Description of Artificial Sequence: Synthetic peptide"
LMTGITI

SEQ ID NO: 5274 - protein, 7 aa, Artificial Sequence
  source: /note="Description of Artificial Sequence: Synthetic peptide"
LMTGVPL

SEQ ID NO: 5275 - protein, 7 aa, Artificial Sequence
  source: /note="Description of Artificial Sequence: Synthetic peptide"
LMTNAQL

SEQ ID NO: 5276 - protein, 7 aa, Artificial Sequence
  source: /note="Description of Artificial Sequence: Synthetic peptide"
LMTNPVP

SEQ ID NO: 5277 - protein, 7 aa, Artificial Sequence
  source: /note="Description of Artificial Sequence: Synthetic peptide"
LMTSGHK

SEQ ID NO: 5278 - protein, 7 aa, Artificial Sequence
  source: /note="Description of Artificial Sequence: Synthetic peptide"
LMTSNGA

SEQ ID NO: 5279 - protein, 7 aa, Artificial Sequence
  source: /note="Description of Artificial Sequence: Synthetic peptide"
LMTTHVD

SEQ ID NO: 5280 - protein, 7 aa, Artificial Sequence
  source: /note="Description of Artificial Sequence: Synthetic peptide"
LMVESHV

SEQ ID NO: 5281 - protein, 7 aa, Artificial Sequence
  source: /note="Description of Artificial Sequence: Synthetic peptide"
LMVGRKL

SEQ ID NO: 5282 - protein, 7 aa, Artificial Sequence
  source: /note="Description of Artificial Sequence: Synthetic peptide"
LNANALA

SEQ ID NO: 5283 - protein, 7 aa, Artificial Sequence
  source: /note="Description of Artificial Sequence: Synthetic peptide"
LNAPGRT

SEQ ID NO: 5284 - protein, 7 aa, Artificial Sequence
  source: /note="Description of Artificial Sequence: Synthetic peptide"
LNAPNPM

SEQ ID NO: 5285 - protein, 7 aa, Artificial Sequence
  source: /note="Description of Artificial Sequence: Synthetic peptide"
LNAQVST

SEQ ID NO: 5286 - protein, 7 aa, Artificial Sequence
  source: /note="Description of Artificial Sequence: Synthetic peptide"
LNASTKT

SEQ ID NO: 5287 - protein, 7 aa, Artificial Sequence
  source: /note="Description of Artificial Sequence: Synthetic peptide"
LNATDGK

SEQ ID NO: 5288 - protein, 7 aa, Artificial Sequence
  source: /note="Description of Artificial Sequence: Synthetic peptide"
LNDDAWS

SEQ ID NO: 5289 - protein, 7 aa, Artificial Sequence
  source: /note="Description of Artificial Sequence: Synthetic peptide"
LNDVLTQ

SEQ ID NO: 5290 - protein, 7 aa, Artificial Sequence
  source: /note="Description of Artificial Sequence: Synthetic peptide"
LNEITRS

SEQ ID NO: 5291 - protein, 7 aa, Artificial Sequence
  source: /note="Description of Artificial Sequence: Synthetic peptide"
LNELQFQ

SEQ ID NO: 5292 - protein, 7 aa, Artificial Sequence
  source: /note="Description of Artificial Sequence: Synthetic peptide"
LNERPRS

SEQ ID NO: 5293 - protein, 7 aa, Artificial Sequence
  source: /note="Description of Artificial Sequence: Synthetic peptide"
LNGEYLK

SEQ ID NO: 5294 - protein, 7 aa, Artificial Sequence
  source: /note="Description of Artificial Sequence: Synthetic peptide"
LNGFTAT

SEQ ID NO: 5295 - protein, 7 aa, Artificial Sequence
  source: /note="Description of Artificial Sequence: Synthetic peptide"
LNGRRAE

SEQ ID NO: 5296 - protein, 7 aa, Artificial Sequence
  source: /note="Description of Artificial Sequence: Synthetic peptide"
LNGSYIQ

SEQ ID NO: 5297 - protein, 7 aa, Artificial Sequence
  source: /note="Description of Artificial Sequence: Synthetic peptide"
LNHEKDG

SEQ ID NO: 5298 - protein, 7 aa, Artificial Sequence
  source: /note="Description of Artificial Sequence: Synthetic peptide"
LNHNPGL

SEQ ID NO: 5299 - protein, 7 aa, Artificial Sequence
  source: /note="Description of Artificial Sequence: Synthetic peptide"
LNHNSLR

SEQ ID NO: 5300 - protein, 7 aa, Artificial Sequence
  source: /note="Description of Artificial Sequence: Synthetic peptide"
LNHTRPL

SEQ ID NO: 5301 - protein, 7 aa, Artificial Sequence
  source: /note="Description of Artificial Sequence: Synthetic peptide"
LNIPSDP

SEQ ID NO: 5302 - protein, 7 aa, Artificial Sequence
  source: /note="Description of Artificial Sequence: Synthetic peptide"
LNITTSG

SEQ ID NO: 5303 - protein, 7 aa, Artificial Sequence
  source: /note="Description of Artificial Sequence: Synthetic peptide"
LNKEFAS

SEQ ID NO: 5304 - protein, 7 aa, Artificial Sequence
  source: /note="Description of Artificial Sequence: Synthetic peptide"
LNKNSPV

SEQ ID NO: 5305 - protein, 7 aa, Artificial Sequence
  source: /note="Description of Artificial Sequence: Synthetic peptide"
LNKQPFV

SEQ ID NO: 5306 - protein, 7 aa, Artificial Sequence
  source: /note="Description of Artificial Sequence: Synthetic peptide"
LNKRAPD

SEQ ID NO: 5307 - protein, 7 aa, Artificial Sequence
  source: /note="Description of Artificial Sequence: Synthetic peptide"
LNKSSTG

SEQ ID NO: 5308 - protein, 7 aa, Artificial Sequence
  source: /note="Description of Artificial Sequence: Synthetic peptide"
LNLARPA

SEQ ID NO: 5309 - protein, 7 aa, Artificial Sequence
  source: /note="Description of Artificial Sequence: Synthetic peptide"
LNLELYD

SEQ ID NO: 5310 - protein, 7 aa, Artificial Sequence
  source: /note="Description of Artificial Sequence: Synthetic peptide"
LNLGRPD

SEQ ID NO: 5311 - protein, 7 aa, Artificial Sequence
  source: /note="Description of Artificial Sequence: Synthetic peptide"
LNLHAPT

SEQ ID NO: 5312 - protein, 7 aa, Artificial Sequence
  source: /note="Description of Artificial Sequence: Synthetic peptide"
LNLPNHG

SEQ ID NO: 5313 - protein, 7 aa, Artificial Sequence
  source: /note="Description of Artificial Sequence: Synthetic peptide"
LNLQSQS

SEQ ID NO: 5314 - protein, 7 aa, Artificial Sequence
  source: /note="Description of Artificial Sequence: Synthetic peptide"
LNLSGLV

SEQ ID NO: 5315 - protein, 7 aa, Artificial Sequence
  source: /note="Description of Artificial Sequence: Synthetic peptide"
LNLTSVS

SEQ ID NO: 5316 - protein, 7 aa, Artificial Sequence
  source: /note="Description of Artificial Sequence: Synthetic peptide"
LNMSEPR

SEQ ID NO: 5317 - protein, 7 aa, Artificial Sequence
  source: /note="Description of Artificial Sequence: Synthetic peptide"
LNMSPTG

SEQ ID NO: 5318 - protein, 7 aa, Artificial Sequence
  source: /note="Description of Artificial Sequence: Synthetic peptide"
LNNHQFS

SEQ ID NO: 5319 - protein, 7 aa, Artificial Sequence
  source: /note="Description of Artificial Sequence: Synthetic peptide"
LNNLPSR

SEQ ID NO: 5320 - protein, 7 aa, Artificial Sequence
  source: /note="Description of Artificial Sequence: Synthetic peptide"
LNPAARI

SEQ ID NO: 5321 - protein, 7 aa, Artificial Sequence
  source: /note="Description of Artificial Sequence: Synthetic peptide"
LNPAKAS

SEQ ID NO: 5322 - protein, 7 aa, Artificial Sequence
  source: /note="Description of Artificial Sequence: Synthetic peptide"
LNPHENG

SEQ ID NO: 5323 - protein, 7 aa, Artificial Sequence
  source: /note="Description of Artificial Sequence: Synthetic peptide"
LNPSRVP

SEQ ID NO: 5324 - protein, 7 aa, Artificial Sequence
  source: /note="Description of Artificial Sequence: Synthetic peptide"
LNPVNVM

SEQ ID NO: 5325 - protein, 7 aa, Artificial Sequence
  source: /note="Description of Artificial Sequence: Synthetic peptide"
LNQGNMT

SEQ ID NO: 5326 - protein, 7 aa, Artificial Sequence
  source: /note="Description of Artificial Sequence: Synthetic peptide"
LNQHVPV

SEQ ID NO: 5327 - protein, 7 aa, Artificial Sequence
  source: /note="Description of Artificial Sequence: Synthetic peptide"
LNQSRST

SEQ ID NO: 5328 - protein, 7 aa, Artificial Sequence
  source: /note="Description of Artificial Sequence: Synthetic peptide"
LNQSVRV

SEQ ID NO: 5329 - protein, 7 aa, Artificial Sequence
  source: /note="Description of Artificial Sequence: Synthetic peptide"
LNRADVD

SEQ ID NO: 5330 - protein, 7 aa, Artificial Sequence
  source: /note="Description of Artificial Sequence: Synthetic peptide"
LNRDMSY

SEQ ID NO: 5331 - protein, 7 aa, Artificial Sequence
  source: /note="Description of Artificial Sequence: Synthetic peptide"
LNREQAS

SEQ ID NO: 5332 - protein, 7 aa, Artificial Sequence
  source: /note="Description of Artificial Sequence: Synthetic peptide"
LNRSSMP

SEQ ID NO: 5333 - protein, 7 aa, Artificial Sequence
  source: /note="Description of Artificial Sequence: Synthetic peptide"
LNRTNPD

SEQ ID NO: 5334 - protein, 7 aa, Artificial Sequence
  source: /note="Description of Artificial Sequence: Synthetic peptide"
LNRVTPS

SEQ ID NO: 5335 - protein, 7 aa, Artificial Sequence
  source: /note="Description of Artificial Sequence: Synthetic peptide"
LNSDAPY

SEQ ID NO: 5336 - protein, 7 aa, Artificial Sequence
  source: /note="Description of Artificial Sequence: Synthetic peptide"
LNSLGTF

SEQ ID NO: 5337 - protein, 7 aa, Artificial Sequence
  source: /note="Description of Artificial Sequence: Synthetic peptide"
LNSPLIA

SEQ ID NO: 5338 - protein, 7 aa, Artificial Sequence
  source: /note="Description of Artificial Sequence: Synthetic peptide"
LNSQPGL

SEQ ID NO: 5339 - protein, 7 aa, Artificial Sequence
  source: /note="Description of Artificial Sequence: Synthetic peptide"
LNSQRFG

SEQ ID NO: 5340 - protein, 7 aa, Artificial Sequence
  source: /note="Description of Artificial Sequence: Synthetic peptide"
LNSSHDA

SEQ ID NO: 5341 - protein, 7 aa, Artificial Sequence
  source: /note="Description of Artificial Sequence: Synthetic peptide"
LNSSRSA

SEQ ID NO: 5342 - protein, 7 aa, Artificial Sequence
  source: /note="Description of Artificial Sequence: Synthetic peptide"
LNSSSHG

SEQ ID NO: 5343 - protein, 7 aa, Artificial Sequence
  source: /note="Description of Artificial Sequence: Synthetic peptide"
LNSTNPH

SEQ ID NO: 5344 - protein, 7 aa, Artificial Sequence
  source: /note="Description of Artificial Sequence: Synthetic peptide"
LNSVRNN

SEQ ID NO: 5345 - protein, 7 aa, Artificial Sequence
  source: /note="Description of Artificial Sequence: Synthetic peptide"
LNTAALP

SEQ ID NO: 5346 - protein, 7 aa, Artificial Sequence
  source: /note="Description of Artificial Sequence: Synthetic peptide"
LNTHSYV

SEQ ID NO: 5347 - protein, 7 aa, Artificial Sequence
  source: /note="Description of Artificial Sequence: Synthetic peptide"
LNTKPFS

SEQ ID NO: 5348 - protein, 7 aa, Artificial Sequence
  source: /note="Description of Artificial Sequence: Synthetic peptide"
LNTRQQT

SEQ ID NO: 5349 - protein, 7 aa, Artificial Sequence
  source: /note="Description of Artificial Sequence: Synthetic peptide"
LNTRSLS

SEQ ID NO: 5350 - protein, 7 aa, Artificial Sequence
  source: /note="Description of Artificial Sequence: Synthetic peptide"
LNVEVER

SEQ ID NO: 5351 - protein, 7 aa, Artificial Sequence
  source: /note="Description of Artificial Sequence: Synthetic peptide"
LNVKSGL

SEQ ID NO: 5352 - protein, 7 aa, Artificial Sequence
  source: /note="Description of Artificial Sequence: Synthetic peptide"
LNVNIAP

SEQ ID NO: 5353 - protein, 7 aa, Artificial Sequence
  source: /note="Description of Artificial Sequence: Synthetic peptide"
LNVRESV

SEQ ID NO: 5354 - protein, 7 aa, Artificial Sequence
  source: /note="Description of Artificial Sequence: Synthetic peptide"
LNVRRVA

SEQ ID NO: 5355 - protein, 7 aa, Artificial Sequence
  source: /note="Description of Artificial Sequence: Synthetic peptide"
LNVRTDR

SEQ ID NO: 5356 - protein, 7 aa, Artificial Sequence
  source: /note="Description of Artificial Sequence: Synthetic peptide"
LNVSGNA

SEQ ID NO: 5357 - protein, 7 aa, Artificial Sequence
  source: /note="Description of Artificial Sequence: Synthetic peptide"
LNVSSTG

SEQ ID NO: 5358 - protein, 7 aa, Artificial Sequence
  source: /note="Description of Artificial Sequence: Synthetic peptide"
LNVVSTY

SEQ ID NO: 5359 - protein, 7 aa, Artificial Sequence
  source: /note="Description of Artificial Sequence: Synthetic peptide"
LNYDPMT

SEQ ID NO: 5360 - protein, 7 aa, Artificial Sequence
  source: /note="Description of Artificial Sequence: Synthetic peptide"
LNYGPAL

SEQ ID NO: 5361 - protein, 7 aa, Artificial Sequence
  source: /note="Description of Artificial Sequence: Synthetic peptide"
LNYHASV

SEQ ID NO: 5362 - protein, 7 aa, Artificial Sequence
  source: /note="Description of Artificial Sequence: Synthetic peptide"
LPAGNTS

SEQ ID NO: 5363 - protein, 7 aa, Artificial Sequence
  source: /note="Description of Artificial Sequence: Synthetic peptide"
LPAGNYH

SEQ ID NO: 5364 - protein, 7 aa, Artificial Sequence
  source: /note="Description of Artificial Sequence: Synthetic peptide"
LPANNSI

SEQ ID NO: 5365 - protein, 7 aa, Artificial Sequence
  source: /note="Description of Artificial Sequence: Synthetic peptide"
LPAPKPA

SEQ ID NO: 5366 - protein, 7 aa, Artificial Sequence
  source: /note="Description of Artificial Sequence: Synthetic peptide"
LPARLAT

SEQ ID NO: 5367 - protein, 7 aa, Artificial Sequence
  source: /note="Description of Artificial Sequence: Synthetic peptide"
LPASGAA

SEQ ID NO: 5368 - protein, 7 aa, Artificial Sequence
  source: /note="Description of Artificial Sequence: Synthetic peptide"
LPATRSI

SEQ ID NO: 5369 - protein, 7 aa, Artificial Sequence
  source: /note="Description of Artificial Sequence: Synthetic peptide"
LPAVCGP

SEQ ID NO: 5370 - protein, 7 aa, Artificial Sequence
  source: /note="Description of Artificial Sequence: Synthetic peptide"
LPDKSLM

SEQ ID NO: 5371 - protein, 7 aa, Artificial Sequence
  source: /note="Description of Artificial Sequence: Synthetic peptide"
LPDMSRE

SEQ ID NO: 5372 - protein, 7 aa, Artificial Sequence
  source: /note="Description of Artificial Sequence: Synthetic peptide"
LPDPRPD

SEQ ID NO: 5373 - protein, 7 aa, Artificial Sequence
  source: /note="Description of Artificial Sequence: Synthetic peptide"
LPDTIRS

SEQ ID NO: 5374 - protein, 7 aa, Artificial Sequence
  source: /note="Description of Artificial Sequence: Synthetic peptide"
LPDTRTL

SEQ ID NO: 5375 - protein, 7 aa, Artificial Sequence
  source: /note="Description of Artificial Sequence: Synthetic peptide"
LPDVARY

SEQ ID NO: 5376 - protein, 7 aa, Artificial Sequence
  source: /note="Description of Artificial Sequence: Synthetic peptide"
LPEAGVP

SEQ ID NO: 5377 - protein, 7 aa, Artificial Sequence
  source: /note="Description of Artificial Sequence: Synthetic peptide"
LPEISPH

SEQ ID NO: 5378 - protein, 7 aa, Artificial Sequence
  source: /note="Description of Artificial Sequence: Synthetic peptide"
LPENTPY

SEQ ID NO: 5379 - protein, 7 aa, Artificial Sequence
  source: /note="Description of Artificial Sequence: Synthetic peptide"
LPEQTVI

SEQ ID NO: 5380 - protein, 7 aa, Artificial Sequence
  source: /note="Description of Artificial Sequence: Synthetic peptide"
LPERVGL

SEQ ID NO: 5381 - protein, 7 aa, Artificial Sequence
  source: /note="Description of Artificial Sequence: Synthetic peptide"
LPETGMS

SEQ ID NO: 5382 - protein, 7 aa, Artificial Sequence
  source: /note="Description of Artificial Sequence: Synthetic peptide"
LPFATSP

SEQ ID NO: 5383 - protein, 7 aa, Artificial Sequence
  source: /note="Description of Artificial Sequence: Synthetic peptide"
LPGATIE

SEQ ID NO: 5384 - protein, 7 aa, Artificial Sequence
  source: /note="Description of Artificial Sequence: Synthetic peptide"
LPGKVTT

SEQ ID NO: 5385 - protein, 7 aa, Artificial Sequence
  source: /note="Description of Artificial Sequence: Synthetic peptide"
LPGRAAP

SEQ ID NO: 5386 - protein, 7 aa, Artificial Sequence
  source: /note="Description of Artificial Sequence: Synthetic peptide"
LPGTPRG

SEQ ID NO: 5387 - protein, 7 aa, Artificial Sequence
  source: /note="Description of Artificial Sequence: Synthetic peptide"
LPGTVGV

SEQ ID NO: 5388 - protein, 7 aa, Artificial Sequence
  source: /note="Description of Artificial Sequence: Synthetic peptide"
LPGWPLD

SEQ ID NO: 5389 - protein, 7 aa, Artificial Sequence
  source: /note="Description of Artificial Sequence: Synthetic peptide"
LPHPSQN

SEQ ID NO: 5390 - protein, 7 aa, Artificial Sequence
  source: /note="Description of Artificial Sequence: Synthetic peptide"
LPHRPNS

SEQ ID NO: 5391 - protein, 7 aa, Artificial Sequence
  source: /note="Description of Artificial Sequence: Synthetic peptide"
LPHSTPM

SEQ ID NO: 5392 - protein, 7 aa, Artificial Sequence
  source: /note="Description of Artificial Sequence: Synthetic peptide"
LPIATSK

SEQ ID NO: 5393 - protein, 7 aa, Artificial Sequence
  source: /note="Description of Artificial Sequence: Synthetic peptide"
LPIGKQV

SEQ ID NO: 5394 - protein, 7 aa, Artificial Sequence
  source: /note="Description of Artificial Sequence: Synthetic peptide"
LPILTSH

SEQ ID NO: 5395 - protein, 7 aa, Artificial Sequence
  source: /note="Description of Artificial Sequence: Synthetic peptide"
LPILTSS

SEQ ID NO: 5396 - protein, 7 aa, Artificial Sequence
  source: /note="Description of Artificial Sequence: Synthetic peptide"
LPINHKF

SEQ ID NO: 5397 - protein, 7 aa, Artificial Sequence
  source: /note="Description of Artificial Sequence: Synthetic peptide"
LPIPVDA

SEQ ID NO: 5398 - protein, 7 aa, Artificial Sequence
  source: /note="Description of Artificial Sequence: Synthetic peptide"
LPISLQP

SEQ ID NO: 5399 - protein, 7 aa, Artificial Sequence
  source: /note="Description of Artificial Sequence: Synthetic peptide"
LPITYAD

SEQ ID NO: 5400 - protein, 7 aa, Artificial Sequence
  source: /note="Description of Artificial Sequence: Synthetic peptide"
LPKASTS

SEQ ID NO: 5401 - protein, 7 aa, Artificial Sequence
  source: /note="Description of Artificial Sequence: Synthetic peptide"
LPKFRDQ

SEQ ID NO: 5402 - protein, 7 aa, Artificial Sequence
  source: /note="Description of Artificial Sequence: Synthetic peptide"
LPKIDNT

SEQ ID NO: 5403 - protein, 7 aa, Artificial Sequence
  source: /note="Description of Artificial Sequence: Synthetic peptide"
LPKNYDA

SEQ ID NO: 5404 - protein, 7 aa, Artificial Sequence
  source: /note="Description of Artificial Sequence: Synthetic peptide"
LPKSSDA

SEQ ID NO: 5405 - protein, 7 aa, Artificial Sequence
  source: /note="Description of Artificial Sequence: Synthetic peptide"
LPKVVAT

SEQ ID NO: 5406 - protein, 7 aa, Artificial Sequence
  source: /note="Description of Artificial Sequence: Synthetic peptide"
LPLAQQP

SEQ ID NO: 5407 - protein, 7 aa, Artificial Sequence
  source: /note="Description of Artificial Sequence: Synthetic peptide"
LPLAVYD

SEQ ID NO: 5408 - protein, 7 aa, Artificial Sequence
  source: /note="Description of Artificial Sequence: Synthetic peptide"
LPLGNRM

SEQ ID NO: 5409 - protein, 7 aa, Artificial Sequence
  source: /note="Description of Artificial Sequence: Synthetic peptide"
LPLHRSS

SEQ ID NO: 5410 - protein, 7 aa, Artificial Sequence
  source: /note="Description of Artificial Sequence: Synthetic peptide"
LPLHSPR

SEQ ID NO: 5411 - protein, 7 aa, Artificial Sequence
  source: /note="Description of Artificial Sequence: Synthetic peptide"
LPLIFTE

SEQ ID NO: 5412 - protein, 7 aa, Artificial Sequence
  source: /note="Description of Artificial Sequence: Synthetic peptide"
LPLKGAD

SEQ ID NO: 5413 - protein, 7 aa, Artificial Sequence
  source: /note="Description of Artificial Sequence: Synthetic peptide"
LPLMKPG

SEQ ID NO: 5414 - protein, 7 aa, Artificial Sequence
  source: /note="Description of Artificial Sequence: Synthetic peptide"
LPLNFDR

SEQ ID NO: 5415 - protein, 7 aa, Artificial Sequence
  source: /note="Description of Artificial Sequence: Synthetic peptide"
LPLNKSH

SEQ ID NO: 5416 - protein, 7 aa, Artificial Sequence
  source: /note="Description of Artificial Sequence: Synthetic peptide"
LPLNTYT

SEQ ID NO: 5417 - protein, 7 aa, Artificial Sequence
  source: /note="Description of Artificial Sequence: Synthetic peptide"
LPLPPYV

SEQ ID NO: 5418 - protein, 7 aa, Artificial Sequence
  source: /note="Description of Artificial Sequence: Synthetic peptide"
LPLPTSG

SEQ ID NO: 5419 - protein, 7 aa, Artificial Sequence
  source: /note="Description of Artificial Sequence: Synthetic peptide"
LPLREPK

SEQ ID NO: 5420 - protein, 7 aa, Artificial Sequence
  source: /note="Description of Artificial Sequence: Synthetic peptide"
LPLRMSD

SEQ ID NO: 5421 - protein, 7 aa, Artificial Sequence
  source: /note="Description of Artificial Sequence: Synthetic peptide"
LPLSPMH

SEQ ID NO: 5422 - protein, 7 aa, Artificial Sequence
  source: /note="Description of Artificial Sequence: Synthetic peptide"
LPMDLVA

SEQ ID NO: 5423 - protein, 7 aa, Artificial Sequence
  source: /note="Description of Artificial Sequence: Synthetic peptide"
LPMMAHL

SEQ ID NO: 5424 - protein, 7 aa, Artificial Sequence
  source: /note="Description of Artificial Sequence: Synthetic peptide"
LPMSHLP

SEQ ID NO: 5425 - protein, 7 aa, Artificial Sequence
  source: /note="Description of Artificial Sequence: Synthetic peptide"
LPNAYMH

SEQ ID NO: 5426 - protein, 7 aa, Artificial Sequence
  source: /note="Description of Artificial Sequence: Synthetic peptide"
LPNEPSD

SEQ ID NO: 5427 - protein, 7 aa, Artificial Sequence
  source: /note="Description of Artificial Sequence: Synthetic peptide"
LPNHISP

SEQ ID NO: 5428 - protein, 7 aa, Artificial Sequence
  source: /note="Description of Artificial Sequence: Synthetic peptide"
LPNLRDQ

SEQ ID NO: 5429 - protein, 7 aa, Artificial Sequence
  source: /note="Description of Artificial Sequence: Synthetic peptide"
LPNNSRD

SEQ ID NO: 5430 - protein, 7 aa, Artificial Sequence
  source: /note="Description of Artificial Sequence: Synthetic peptide"
LPNPRSD

SEQ ID NO: 5431 - protein, 7 aa, Artificial Sequence
  source: /note="Description of Artificial Sequence: Synthetic peptide"
LPNSVFT

SEQ ID NO: 5432 - protein, 7 aa, Artificial Sequence
  source: /note="Description of Artificial Sequence: Synthetic peptide"
LPPAAHR

SEQ ID NO: 5433 - protein, 7 aa, Artificial Sequence
  source: /note="Description of Artificial Sequence: Synthetic peptide"
LPPAHAH

SEQ ID NO: 5434 - protein, 7 aa, Artificial Sequence
  source: /note="Description of Artificial Sequence: Synthetic peptide"
LPPCLTN

SEQ ID NO: 5435 - protein, 7 aa, Artificial Sequence
  source: /note="Description of Artificial Sequence: Synthetic peptide"
LPPEHRG

SEQ ID NO: 5436 - protein, 7 aa, Artificial Sequence
  source: /note="Description of Artificial Sequence: Synthetic peptide"
LPPETFP

SEQ ID NO: 5437 - protein, 7 aa, Artificial Sequence
  source: /note="Description of Artificial Sequence: Synthetic peptide"
LPPGPAT

SEQ ID NO: 5438 - protein, 7 aa, Artificial Sequence
  source: /note="Description of Artificial Sequence: Synthetic peptide"
LPPHGNV

SEQ ID NO: 5439 - protein, 7 aa, Artificial Sequence
  source: /note="Description of Artificial Sequence: Synthetic peptide"
LPPHGSA

SEQ ID NO: 5440 - protein, 7 aa, Artificial Sequence
  source: /note="Description of Artificial Sequence: Synthetic peptide"
LPPHGYA

SEQ ID NO: 5441 - protein, 7 aa, Artificial Sequence
  source: /note="Description of Artificial Sequence: Synthetic peptide"
LPPLVQY

SEQ ID NO: 5442 - protein, 7 aa, Artificial Sequence
  source: /note="Description of Artificial Sequence: Synthetic peptide"
LPPNGHR

SEQ ID NO: 5443 - protein, 7 aa, Artificial Sequence
  source: /note="Description of Artificial Sequence: Synthetic peptide"
LPPNKFM

SEQ ID NO: 5444 - protein, 7 aa, Artificial Sequence
  source: /note="Description of Artificial Sequence: Synthetic peptide"
LPPRDDR

SEQ ID NO: 5445 - protein, 7 aa, Artificial Sequence
  source: /note="Description of Artificial Sequence: Synthetic peptide"
LPPRSSY

SEQ ID NO: 5446 - protein, 7 aa, Artificial Sequence
  source: /note="Description of Artificial Sequence: Synthetic peptide"
LPPSHAM

SEQ ID NO: 5447 - protein, 7 aa, Artificial Sequence
  source: /note="Description of Artificial Sequence: Synthetic peptide"
LPPSIDN

SEQ ID NO: 5448 - protein, 7 aa, Artificial Sequence
  source: /note="Description of Artificial Sequence: Synthetic peptide"
LPPYRGP

SEQ ID NO: 5449 - protein, 7 aa, Artificial Sequence
  source: /note="Description of Artificial Sequence: Synthetic peptide"
LPPYSPA

SEQ ID NO: 5450 - protein, 7 aa, Artificial Sequence
  source: /note="Description of Artificial Sequence: Synthetic peptide"
LPQPGAA

SEQ ID NO: 5451 - protein, 7 aa, Artificial Sequence
  source: /note="Description of Artificial Sequence: Synthetic peptide"
LPQRTSH

SEQ ID NO: 5452 - protein, 7 aa, Artificial Sequence
  source: /note="Description of Artificial Sequence: Synthetic peptide"
LPREPLT

SEQ ID NO: 5453 - protein, 7 aa, Artificial Sequence
  source: /note="Description of Artificial Sequence: Synthetic peptide"
LPRFPVD

SEQ ID NO: 5454 - protein, 7 aa, Artificial Sequence
  source: /note="Description of Artificial Sequence: Synthetic peptide"
LPRGMTS

SEQ ID NO: 5455 - protein, 7 aa, Artificial Sequence
  source: /note="Description of Artificial Sequence: Synthetic peptide"
LPRHQQT

SEQ ID NO: 5456 - protein, 7 aa, Artificial Sequence
  source: /note="Description of Artificial Sequence: Synthetic peptide"
LPRIPTG

SEQ ID NO: 5457 - protein, 7 aa, Artificial Sequence
  source: /note="Description of Artificial Sequence: Synthetic peptide"
LPRLMAP

SEQ ID NO: 5458 - protein, 7 aa, Artificial Sequence
  source: /note="Description of Artificial Sequence: Synthetic peptide"
LPRQAAL

SEQ ID NO: 5459 - protein, 7 aa, Artificial Sequence
  source: /note="Description of Artificial Sequence: Synthetic peptide"
LPRSQFI

SEQ ID NO: 5460 - protein, 7 aa, Artificial Sequence
  source: /note="Description of Artificial Sequence: Synthetic peptide"
LPRVNAG

SEQ ID NO: 5461 - protein, 7 aa, Artificial Sequence
  source: /note="Description of Artificial Sequence: Synthetic peptide"
LPSADRV

SEQ ID NO: 5462 - protein, 7 aa, Artificial Sequence
  source: /note="Description of Artificial Sequence: Synthetic peptide"
LPSCIGP

SEQ ID NO: 5463 - protein, 7 aa, Artificial Sequence
  source: /note="Description of Artificial Sequence: Synthetic peptide"
LPSFNGS

SEQ ID NO: 5464 - protein, 7 aa, Artificial Sequence
  source: /note="Description of Artificial Sequence: Synthetic peptide"
LPSILLP

SEQ ID NO: 5465 - protein, 7 aa, Artificial Sequence
  source: /note="Description of Artificial Sequence: Synthetic peptide"
LPSIPRT

SEQ ID NO: 5466 - protein, 7 aa, Artificial Sequence
  source: /note="Description of Artificial Sequence: Synthetic peptide"
LPSMSLS

SEQ ID NO: 5467 - protein, 7 aa, Artificial Sequence
  source: /note="Description of Artificial Sequence: Synthetic peptide"
LPSNAVS

SEQ ID NO: 5468 - protein, 7 aa, Artificial Sequence
  source: /note="Description of Artificial Sequence: Synthetic peptide"
LPSNTRL

SEQ ID NO: 5469 - protein, 7 aa, Artificial Sequence
  source: /note="Description of Artificial Sequence: Synthetic peptide"
LPSPPGV

SEQ ID NO: 5470 - protein, 7 aa, Artificial Sequence
  source: /note="Description of Artificial Sequence: Synthetic peptide"
LPSPPIS

SEQ ID NO: 5471 - protein, 7 aa, Artificial Sequence
  source: /note="Description of Artificial Sequence: Synthetic peptide"
LPSQLIG

SEQ ID NO: 5472 - protein, 7 aa, Artificial Sequence
  source: /note="Description of Artificial Sequence: Synthetic peptide"
LPSRAFS

SEQ ID NO: 5473 - protein, 7 aa, Artificial Sequence
  source: /note="Description of Artificial Sequence: Synthetic peptide"
LPSSTPN

SEQ ID NO: 5474 - protein, 7 aa, Artificial Sequence
  source: /note="Description of Artificial Sequence: Synthetic peptide"
LPSSVYT

SEQ ID NO: 5475 - protein, 7 aa, Artificial Sequence
  source: /note="Description of Artificial Sequence: Synthetic peptide"
LPSTCGK

SEQ ID NO: 5476 - protein, 7 aa, Artificial Sequence
  source: /note="Description of Artificial Sequence: Synthetic peptide"
LPSTGGL

SEQ ID NO: 5477 - protein, 7 aa, Artificial Sequence
  source: /note="Description of Artificial Sequence: Synthetic peptide"
LPSTPPR

SEQ ID NO: 5478 - protein, 7 aa, Artificial Sequence
  source: /note="Description of Artificial Sequence: Synthetic peptide"
LPSYNAS

SEQ ID NO: 5479 - protein, 7 aa, Artificial Sequence
  source: /note="Description of Artificial Sequence: Synthetic peptide"
LPTHLEA

SEQ ID NO: 5480 - protein, 7 aa, Artificial Sequence
  source: /note="Description of Artificial Sequence: Synthetic peptide"
LPTINAV

SEQ ID NO: 5481 - protein, 7 aa, Artificial Sequence
  source: /note="Description of Artificial Sequence: Synthetic peptide"
LPTKEAV

SEQ ID NO: 5482 - protein, 7 aa, Artificial Sequence
  source: /note="Description of Artificial Sequence: Synthetic peptide"
LPTLRIP

SEQ ID NO: 5483 - protein, 7 aa, Artificial Sequence
  source: /note="Description of Artificial Sequence: Synthetic peptide"
LPTLSYV

SEQ ID NO: 5484 - protein, 7 aa, Artificial Sequence
  source: /note="Description of Artificial Sequence: Synthetic peptide"
LPTMHNT

SEQ ID NO: 5485 - protein, 7 aa, Artificial Sequence
  source: /note="Description of Artificial Sequence: Synthetic peptide"
LPTNKGI

SEQ ID NO: 5486 - protein, 7 aa, Artificial Sequence
  source: /note="Description of Artificial Sequence: Synthetic peptide"
LPTNYAA

SEQ ID NO: 5487 - protein, 7 aa, Artificial Sequence
  source: /note="Description of Artificial Sequence: Synthetic peptide"
LPTPFSS

SEQ ID NO: 5488 - protein, 7 aa, Artificial Sequence
  source: /note="Description of Artificial Sequence: Synthetic peptide"
LPTPLTS

SEQ ID NO: 5489 - protein, 7 aa, Artificial Sequence
  source: /note="Description of Artificial Sequence: Synthetic peptide"
LPTSPSA

SEQ ID NO: 5490 - protein, 7 aa, Artificial Sequence
  source: /note="Description of Artificial Sequence: Synthetic peptide"
LPTSTSI

SEQ ID NO: 5491 - protein, 7 aa, Artificial Sequence
  source: /note="Description of Artificial Sequence: Synthetic peptide"
LPTSVVL

SEQ ID NO: 5492 - protein, 7 aa, Artificial Sequence
  source: /note="Description of Artificial Sequence: Synthetic peptide"
LPVGDPL

SEQ ID NO: 5493 - protein, 7 aa, Artificial Sequence
  source: /note="Description of Artificial Sequence: Synthetic peptide"
LPVNIVG

SEQ ID NO: 5494 - protein, 7 aa, Artificial Sequence
  source: /note="Description of Artificial Sequence: Synthetic peptide"
LPVSDRY

SEQ ID NO: 5495 - protein, 7 aa, Artificial Sequence
  source: /note="Description of Artificial Sequence: Synthetic peptide"
LPVSSRH

SEQ ID NO: 5496 - protein, 7 aa, Artificial Sequence
  source: /note="Description of Artificial Sequence: Synthetic peptide"
LPVSTRH

SEQ ID NO: 5497 - protein, 7 aa, Artificial Sequence
  source: /note="Description of Artificial Sequence: Synthetic peptide"
LPVVNAS

SEQ ID NO: 5498 - protein, 7 aa, Artificial Sequence
  source: /note="Description of Artificial Sequence: Synthetic peptide"
LPYTVGT

SEQ ID NO: 5499 - protein, 7 aa, Artificial Sequence
  source: /note="Description of Artificial Sequence: Synthetic peptide"
LQARTLN

SEQ ID NO: 5500 - protein, 7 aa, Artificial Sequence
  source: /note="Description of Artificial Sequence: Synthetic peptide"
LQASKAD

SEQ ID NO: 5501 - protein, 7 aa, Artificial Sequence
  source: /note="Description of Artificial Sequence: Synthetic peptide"
LQASNDI

SEQ ID NO: 5502 - protein, 7 aa, Artificial Sequence
  source: /note="Description of Artificial Sequence: Synthetic peptide"
LQATRGA

SEQ ID NO: 5503 - protein, 7 aa, Artificial Sequence
  source: /note="Description of Artificial Sequence: Synthetic peptide"
LQDAVCN

SEQ ID NO: 5504 - protein, 7 aa, Artificial Sequence
  source: /note="Description of Artificial Sequence: Synthetic peptide"
LQDPRSP

SEQ ID NO: 5505 - protein, 7 aa, Artificial Sequence
  source: /note="Description of Artificial Sequence: Synthetic peptide"
LQDVSMG

SEQ ID NO: 5506 - protein, 7 aa, Artificial Sequence
  source: /note="Description of Artificial Sequence: Synthetic peptide"
LQEKSWE

SEQ ID NO: 5507 - protein, 7 aa, Artificial Sequence
  source: /note="Description of Artificial Sequence: Synthetic peptide"
LQEPGNL

SEQ ID NO: 5508 - protein, 7 aa, Artificial Sequence
  source: /note="Description of Artificial Sequence: Synthetic peptide"
LQFSPPS

SEQ ID NO: 5509 - protein, 7 aa, Artificial Sequence
  source: /note="Description of Artificial Sequence: Synthetic peptide"
LQGAFAS

SEQ ID NO: 5510 - protein, 7 aa, Artificial Sequence
  source: /note="Description of Artificial Sequence: Synthetic peptide"
LQGSRQI

SEQ ID NO: 5511 - protein, 7 aa, Artificial Sequence
  source: /note="Description of Artificial Sequence: Synthetic peptide"
LQGWHAQ

SEQ ID NO: 5512 - protein, 7 aa, Artificial Sequence
  source: /note="Description of Artificial Sequence: Synthetic peptide"
LQHHSNG

SEQ ID NO: 5513 - protein, 7 aa, Artificial Sequence
  source: /note="Description of Artificial Sequence: Synthetic peptide"
LQHLQPS

SEQ ID NO: 5514 - protein, 7 aa, Artificial Sequence
  source: /note="Description of Artificial Sequence: Synthetic peptide"
LQKMVPL

SEQ ID NO: 5515 - protein, 7 aa, Artificial Sequence
  source: /note="Description of Artificial Sequence: Synthetic peptide"
LQKPTMS

SEQ ID NO: 5516 - protein, 7 aa, Artificial Sequence
  source: /note="Description of Artificial Sequence: Synthetic peptide"
LQKPTSA

SEQ ID NO: 5517 - protein, 7 aa, Artificial Sequence
  source: /note="Description of Artificial Sequence: Synthetic peptide"
LQLNQQK

SEQ ID NO: 5518 - protein, 7 aa, Artificial Sequence
  source: /note="Description of Artificial Sequence: Synthetic peptide"
LQLRQTS

SEQ ID NO: 5519 - protein, 7 aa, Artificial Sequence
  source: /note="Description of Artificial Sequence: Synthetic peptide"
LQLTRGE

SEQ ID NO: 5520 - protein, 7 aa, Artificial Sequence
  source: /note="Description of Artificial Sequence: Synthetic peptide"
LQMARGG

SEQ ID NO: 5521 - protein, 7 aa, Artificial Sequence
  source: /note="Description of Artificial Sequence: Synthetic peptide"
LQMRPMT

SEQ ID NO: 5522 - protein, 7 aa, Artificial Sequence
  source: /note="Description of Artificial Sequence: Synthetic peptide"
LQNGCKS

SEQ ID NO: 5523 - protein, 7 aa, Artificial Sequence
  source: /note="Description of Artificial Sequence: Synthetic peptide"
LQNTSSS

SEQ ID NO: 5524 - protein, 7 aa, Artificial Sequence
  source: /note="Description of Artificial Sequence: Synthetic peptide"
LQPFKHQ

SEQ ID NO: 5525 - protein, 7 aa, Artificial Sequence
  source: /note="Description of Artificial Sequence: Synthetic peptide"
LQPREPV

SEQ ID NO: 5526 - protein, 7 aa, Artificial Sequence
  source: /note="Description of Artificial Sequence: Synthetic peptide"
LQPSSRT

SEQ ID NO: 5527 - protein, 7 aa, Artificial Sequence
  source: /note="Description of Artificial Sequence: Synthetic peptide"
LQPTGEA

SEQ ID NO: 5528 - protein, 7 aa, Artificial Sequence
  source: /note="Description of Artificial Sequence: Synthetic peptide"
LQQTGLR

SEQ ID NO: 5529 - protein, 7 aa, Artificial Sequence
  source: /note="Description of Artificial Sequence: Synthetic peptide"
LQRANMV

SEQ ID NO: 5530 - protein, 7 aa, Artificial Sequence
  source: /note="Description of Artificial Sequence: Synthetic peptide"
LQREAHT

SEQ ID NO: 5531 - protein, 7 aa, Artificial Sequence
  source: /note="Description of Artificial Sequence: Synthetic peptide"
LQRSRGP

SEQ ID NO: 5532 - protein, 7 aa, Artificial Sequence
  source: /note="Description of Artificial Sequence: Synthetic peptide"
LQSARAP

SEQ ID NO: 5533 - protein, 7 aa, Artificial Sequence
  source: /note="Description of Artificial Sequence: Synthetic peptide"
LQSFSSP

SEQ ID NO: 5534 - protein, 7 aa, Artificial Sequence
  source: /note="Description of Artificial Sequence: Synthetic peptide"
LQSGPQP

SEQ ID NO: 5535 - protein, 7 aa, Artificial Sequence
  source: /note="Description of Artificial Sequence: Synthetic peptide"
LQSPENE

SEQ ID NO: 5536 - protein, 7 aa, Artificial Sequence
  source: /note="Description of Artificial Sequence: Synthetic peptide"
LQSYTPP

SEQ ID NO: 5537 - protein, 7 aa, Artificial Sequence
  source: /note="Description of Artificial Sequence: Synthetic peptide"
LQTGRFS

SEQ ID NO: 5538 - protein, 7 aa, Artificial Sequence
  source: /note="Description of Artificial Sequence: Synthetic peptide"
LQTKSSS

SEQ ID NO: 5539 - protein, 7 aa, Artificial Sequence
  source: /note="Description of Artificial Sequence: Synthetic peptide"
LQTVDID

SEQ ID NO: 5540 - protein, 7 aa, Artificial Sequence
  source: /note="Description of Artificial Sequence: Synthetic peptide"
LQVDSNV

SEQ ID NO: 5541 - protein, 7 aa, Artificial Sequence
  source: /note="Description of Artificial Sequence: Synthetic peptide"
LQVPSSL

SEQ ID NO: 5542 - protein, 7 aa, Artificial Sequence
  source: /note="Description of Artificial Sequence: Synthetic peptide"
LQVSGLD

SEQ ID NO: 5543 - protein, 7 aa, Artificial Sequence
  source: /note="Description of Artificial Sequence: Synthetic peptide"
LQYATSD

SEQ ID NO: 5544 - protein, 7 aa, Artificial Sequence
  source: /note="Description of Artificial Sequence: Synthetic peptide"
LRAAEIS

SEQ ID NO: 5545 - protein, 7 aa, Artificial Sequence
  source: /note="Description of Artificial Sequence: Synthetic peptide"
LRAANAL

SEQ ID NO: 5546 - protein, 7 aa, Artificial Sequence
  source: /note="Description of Artificial Sequence: Synthetic peptide"
LRADGKA

SEQ ID NO: 5547 - protein, 7 aa, Artificial Sequence
  source: /note="Description of Artificial Sequence: Synthetic peptide"
LRAGTAQ

SEQ ID NO: 5548 - protein, 7 aa, Artificial Sequence
  source: /note="Description of Artificial Sequence: Synthetic peptide"
LRAGTSS

SEQ ID NO: 5549 - protein, 7 aa, Artificial Sequence
  source: /note="Description of Artificial Sequence: Synthetic peptide"
LRAILEE

SEQ ID NO: 5550 - protein, 7 aa, Artificial Sequence
  source: /note="Description of Artificial Sequence: Synthetic peptide"
LRALTGS

SEQ ID NO: 5551 - protein, 7 aa, Artificial Sequence
  source: /note="Description of Artificial Sequence: Synthetic peptide"
LRAQNDA

SEQ ID NO: 5552 - protein, 7 aa, Artificial Sequence
  source: /note="Description of Artificial Sequence: Synthetic peptide"
LRATNSL

SEQ ID NO: 5553 - protein, 7 aa, Artificial Sequence
  source: /note="Description of Artificial Sequence: Synthetic peptide"
LRDGQRP

SEQ ID NO: 5554 - protein, 7 aa, Artificial Sequence
  source: /note="Description of Artificial Sequence: Synthetic peptide"
LRDGRAS

SEQ ID NO: 5555 - protein, 7 aa, Artificial Sequence
  source: /note="Description of Artificial Sequence: Synthetic peptide"
LRDHGGH

SEQ ID NO: 5556 - protein, 7 aa, Artificial Sequence
  source: /note="Description of Artificial Sequence: Synthetic peptide"
LRDRDFK

SEQ ID NO: 5557 - protein, 7 aa, Artificial Sequence
  source: /note="Description of Artificial Sequence: Synthetic peptide"
LRDRDVL

SEQ ID NO: 5558 - protein, 7 aa, Artificial Sequence
  source: /note="Description of Artificial Sequence: Synthetic peptide"
LRDSNKN

SEQ ID NO: 5559 - protein, 7 aa, Artificial Sequence
  source: /note="Description of Artificial Sequence: Synthetic peptide"
LRDSVQV

SEQ ID NO: 5560 - protein, 7 aa, Artificial Sequence
  source: /note="Description of Artificial Sequence: Synthetic peptide"
LREHGPV

SEQ ID NO: 5561 - protein, 7 aa, Artificial Sequence
  source: /note="Description of Artificial Sequence: Synthetic peptide"
LREMPLP

SEQ ID NO: 5562 - protein, 7 aa, Artificial Sequence
  source: /note="Description of Artificial Sequence: Synthetic peptide"
LRENMSN

SEQ ID NO: 5563 - protein, 7 aa, Artificial Sequence
  source: /note="Description of Artificial Sequence: Synthetic peptide"
LREPTGF

SEQ ID NO: 5564 - protein, 7 aa, Artificial Sequence
  source: /note="Description of Artificial Sequence: Synthetic peptide"
LREPVIQ

SEQ ID NO: 5565 - protein, 7 aa, Artificial Sequence
  source: /note="Description of Artificial Sequence: Synthetic peptide"
LRESQRI

SEQ ID NO: 5566 - protein, 7 aa, Artificial Sequence
  source: /note="Description of Artificial Sequence: Synthetic peptide"
LRFPGTP

SEQ ID NO: 5567 - protein, 7 aa, Artificial Sequence
  source: /note="Description of Artificial Sequence: Synthetic peptide"
LRFQSTP

SEQ ID NO: 5568 - protein, 7 aa, Artificial Sequence
  source: /note="Description of Artificial Sequence: Synthetic peptide"
LRGAIAP

SEQ ID NO: 5569 - protein, 7 aa, Artificial Sequence
  source: /note="Description of Artificial Sequence: Synthetic peptide"
LRGDASE

SEQ ID NO: 5570 - protein, 7 aa, Artificial Sequence
  source: /note="Description of Artificial Sequence: Synthetic peptide"
LRGESSP

SEQ ID NO: 5571 - protein, 7 aa, Artificial Sequence
  source: /note="Description of Artificial Sequence: Synthetic peptide"
LRGGMDP

SEQ ID NO: 5572 - protein, 7 aa, Artificial Sequence
  source: /note="Description of Artificial Sequence: Synthetic peptide"
LRGNVEA

SEQ ID NO: 5573 - protein, 7 aa, Artificial Sequence
  source: /note="Description of Artificial Sequence: Synthetic peptide"
LRGPTTV

SEQ ID NO: 5574 - protein, 7 aa, Artificial Sequence
  source: /note="Description of Artificial Sequence: Synthetic peptide"
LRGQLSN

SEQ ID NO: 5575 - protein, 7 aa, Artificial Sequence
  source: /note="Description of Artificial Sequence: Synthetic peptide"
LRGRSSE

SEQ ID NO: 5576 - protein, 7 aa, Artificial Sequence
  source: /note="Description of Artificial Sequence: Synthetic peptide"
LRGSLEH

SEQ ID NO: 5577 - protein, 7 aa, Artificial Sequence
  source: /note="Description of Artificial Sequence: Synthetic peptide"
LRGTMES

SEQ ID NO: 5578 - protein, 7 aa, Artificial Sequence
  source: /note="Description of Artificial Sequence: Synthetic peptide"
LRHDSNA

SEQ ID NO: 5579 - protein, 7 aa, Artificial Sequence
  source: /note="Description of Artificial Sequence: Synthetic peptide"
LRISTSD

SEQ ID NO: 5580 - protein, 7 aa, Artificial Sequence
  source: /note="Description of Artificial Sequence: Synthetic peptide"
LRKEYLG

SEQ ID NO: 5581 - protein, 7 aa, Artificial Sequence
  source: /note="Description of Artificial Sequence: Synthetic peptide"
LRLDDQA

SEQ ID NO: 5582 - protein, 7 aa, Artificial Sequence
  source: /note="Description of Artificial Sequence: Synthetic peptide"
LRLHQES

SEQ ID NO: 5583 - protein, 7 aa, Artificial Sequence
  source: /note="Description of Artificial Sequence: Synthetic peptide"
LRLKNDA

SEQ ID NO: 5584 - protein, 7 aa, Artificial Sequence
  source: /note="Description of Artificial Sequence: Synthetic peptide"
LRLPPAE

SEQ ID NO: 5585 - protein, 7 aa, Artificial Sequence
  source: /note="Description of Artificial Sequence: Synthetic peptide"
LRLSDNR

SEQ ID NO: 5586 - protein, 7 aa, Artificial Sequence
  source: /note="Description of Artificial Sequence: Synthetic peptide"
LRLTGRP

SEQ ID NO: 5587 - protein, 7 aa, Artificial Sequence
  source: /note="Description of Artificial Sequence: Synthetic peptide"
LRLVREP

SEQ ID NO: 5588 - protein, 7 aa, Artificial Sequence
  source: /note="Description of Artificial Sequence: Synthetic peptide"
LRNAASV

SEQ ID NO: 5589 - protein, 7 aa, Artificial Sequence
  source: /note="Description of Artificial Sequence: Synthetic peptide"
LRNADGA

SEQ ID NO: 5590 - protein, 7 aa, Artificial Sequence
  source: /note="Description of Artificial Sequence: Synthetic peptide"
LRNLNSY

SEQ ID NO: 5591 - protein, 7 aa, Artificial Sequence
  source: /note="Description of Artificial Sequence: Synthetic peptide"
LRNNPLA

SEQ ID NO: 5592 - protein, 7 aa, Artificial Sequence
  source: /note="Description of Artificial Sequence: Synthetic peptide"
LRNRPSE

SEQ ID NO: 5593 - protein, 7 aa, Artificial Sequence
  source: /note="Description of Artificial Sequence: Synthetic peptide"
LRNSSVV

SEQ ID NO: 5594 - protein, 7 aa, Artificial Sequence
  source: /note="Description of Artificial Sequence: Synthetic peptide"
LRNTPMS

SEQ ID NO: 5595 - protein, 7 aa, Artificial Sequence
  source: /note="Description of Artificial Sequence: Synthetic peptide"
LRNTVLG

SEQ ID NO: 5596 - protein, 7 aa, Artificial Sequence
  source: /note="Description of Artificial Sequence: Synthetic peptide"
LRNVAEH

SEQ ID NO: 5597 - protein, 7 aa, Artificial Sequence
  source: /note="Description of Artificial Sequence: Synthetic peptide"
LRPNGYT

SEQ ID NO: 5598 - protein, 7 aa, Artificial Sequence
  source: /note="Description of Artificial Sequence: Synthetic peptide"
LRPPAFP

SEQ ID NO: 5599 - protein, 7 aa, Artificial Sequence
  source: /note="Description of Artificial Sequence: Synthetic peptide"
LRPPAGL

SEQ ID NO: 5600 - protein, 7 aa, Artificial Sequence
  source: /note="Description of Artificial Sequence: Synthetic peptide"
LRPPQNN

SEQ ID NO: 5601 - protein, 7 aa, Artificial Sequence
  source: /note="Description of Artificial Sequence: Synthetic peptide"
LRPRPSD

SEQ ID NO: 5602 - protein, 7 aa, Artificial Sequence
  source: /note="Description of Artificial Sequence: Synthetic peptide"
LRPSFSP

SEQ ID NO: 5603 - protein, 7 aa, Artificial Sequence
  source: /note="Description of Artificial Sequence: Synthetic peptide"
LRPSSIS

SEQ ID NO: 5604 - protein, 7 aa, Artificial Sequence
  source: /note="Description of Artificial Sequence: Synthetic peptide"
LRPSSQT

SEQ ID NO: 5605 - protein, 7 aa, Artificial Sequence
  source: /note="Description of Artificial Sequence: Synthetic peptide"
LRPSVRE

SEQ ID NO: 5606 - protein, 7 aa, Artificial Sequence
  source: /note="Description of Artificial Sequence: Synthetic peptide"
LRPTTMP

SEQ ID NO: 5607 - protein, 7 aa, Artificial Sequence
  source: /note="Description of Artificial Sequence: Synthetic peptide"
LRQGYSQ

SEQ ID NO: 5608 - protein, 7 aa, Artificial Sequence
  source: /note="Description of Artificial Sequence: Synthetic peptide"
LRQSTPP

SEQ ID NO: 5609 - protein, 7 aa, Artificial Sequence
  source: /note="Description of Artificial Sequence: Synthetic peptide"
LRRPEEL

SEQ ID NO: 5610 - protein, 7 aa, Artificial Sequence
  source: /note="Description of Artificial Sequence: Synthetic peptide"
LRSDTKY

SEQ ID NO: 5611 - protein, 7 aa, Artificial Sequence
  source: /note="Description of Artificial Sequence: Synthetic peptide"
LRSDVQF

SEQ ID NO: 5612 - protein, 7 aa, Artificial Sequence
  source: /note="Description of Artificial Sequence: Synthetic peptide"
LRSDWVE

SEQ ID NO: 5613 - protein, 7 aa, Artificial Sequence
  source: /note="Description of Artificial Sequence: Synthetic peptide"
LRSESCA

SEQ ID NO: 5614 - protein, 7 aa, Artificial Sequence
  source: /note="Description of Artificial Sequence: Synthetic peptide"
LRSGAIQ

SEQ ID NO: 5615 - protein, 7 aa, Artificial Sequence
  source: /note="Description of Artificial Sequence: Synthetic peptide"
LRSGTLA

SEQ ID NO: 5616 - protein, 7 aa, Artificial Sequence
  source: /note="Description of Artificial Sequence: Synthetic peptide"
LRSLTDA

SEQ ID NO: 5617 - protein, 7 aa, Artificial Sequence
  source: /note="Description of Artificial Sequence: Synthetic peptide"
LRSMQTP

SEQ ID NO: 5618 - protein, 7 aa, Artificial Sequence
  source: /note="Description of Artificial Sequence: Synthetic peptide"
LRSPHFD

SEQ ID NO: 5619 - protein, 7 aa, Artificial Sequence
  source: /note="Description of Artificial Sequence: Synthetic peptide"
LRSPLSP

SEQ ID NO: 5620 - protein, 7 aa, Artificial Sequence
  source: /note="Description of Artificial Sequence: Synthetic peptide"
LRSPPTA

SEQ ID NO: 5621 - protein, 7 aa, Artificial Sequence
  source: /note="Description of Artificial Sequence: Synthetic peptide"
LRSQERH

SEQ ID NO: 5622 - protein, 7 aa, Artificial Sequence
  source: /note="Description of Artificial Sequence: Synthetic peptide"
LRSQGPL

SEQ ID NO: 5623 - protein, 7 aa, Artificial Sequence
  source: /note="Description of Artificial Sequence: Synthetic peptide"
LRSSLDW

SEQ ID NO: 5624 - protein, 7 aa, Artificial Sequence
  source: /note="Description of Artificial Sequence: Synthetic peptide"
LRSSSPG

SEQ ID NO: 5625 - protein, 7 aa, Artificial Sequence
  source: /note="Description of Artificial Sequence: Synthetic peptide"
LRSSTTP

SEQ ID NO: 5626 - protein, 7 aa, Artificial Sequence
  source: /note="Description of Artificial Sequence: Synthetic peptide"
LRSTSAY

SEQ ID NO: 5627 - protein, 7 aa, Artificial Sequence
  source: /note="Description of Artificial Sequence: Synthetic peptide"
LRSVNDS

SEQ ID NO: 5628 - protein, 7 aa, Artificial Sequence
  source: /note="Description of Artificial Sequence: Synthetic peptide"
LRTADVA

SEQ ID NO: 5629 - protein, 7 aa, Artificial Sequence
  source: /note="Description of Artificial Sequence: Synthetic peptide"
LRTASPP

SEQ ID NO: 5630 - protein, 7 aa, Artificial Sequence
  source: /note="Description of Artificial Sequence: Synthetic peptide"
LRTASST

SEQ ID NO: 5631 - protein, 7 aa, Artificial Sequence
  source: /note="Description of Artificial Sequence: Synthetic peptide"
LRTDILS

SEQ ID NO: 5632 - protein, 7 aa, Artificial Sequence
  source: /note="Description of Artificial Sequence: Synthetic peptide"
LRTGYLD

SEQ ID NO: 5633 - protein, 7 aa, Artificial Sequence
  source: /note="Description of Artificial Sequence: Synthetic peptide"
LRTLNAA

SEQ ID NO: 5634 - protein, 7 aa, Artificial Sequence
  source: /note="Description of Artificial Sequence: Synthetic peptide"
LRTNDSQ

SEQ ID NO: 5635 - protein, 7 aa, Artificial Sequence
  source: /note="Description of Artificial Sequence: Synthetic peptide"
LRTPERL

SEQ ID NO: 5636 - protein, 7 aa, Artificial Sequence
  source: /note="Description of Artificial Sequence: Synthetic peptide"
LRTPNGP

SEQ ID NO: 5637 - protein, 7 aa, Artificial Sequence
  source: /note="Description of Artificial Sequence: Synthetic peptide"
LRTREAG

SEQ ID NO: 5638 - protein, 7 aa, Artificial Sequence
  source: /note="Description of Artificial Sequence: Synthetic peptide"
LRTSQDR

SEQ ID NO: 5639 - protein, 7 aa, Artificial Sequence
  source: /note="Description of Artificial Sequence: Synthetic peptide"
LRTTLPL

SEQ ID NO: 5640 - protein, 7 aa, Artificial Sequence
  source: /note="Description of Artificial Sequence: Synthetic peptide"
LRTVNSA

SEQ ID NO: 5641 - protein, 7 aa, Artificial Sequence
  source: /note="Description of Artificial Sequence: Synthetic peptide"
LRVDLLQ

SEQ ID NO: 5642 - protein, 7 aa, Artificial Sequence
  source: /note="Description of Artificial Sequence: Synthetic peptide"
LRVDSPV

SEQ ID NO: 5643 - protein, 7 aa, Artificial Sequence
  source: /note="Description of Artificial Sequence: Synthetic peptide"
LRVDVAT

SEQ ID NO: 5644 - protein, 7 aa, Artificial Sequence
  source: /note="Description of Artificial Sequence: Synthetic peptide"
LRVGGSY

SEQ ID NO: 5645 - protein, 7 aa, Artificial Sequence
  source: /note="Description of Artificial Sequence: Synthetic peptide"
LRVGTEQ

SEQ ID NO: 5646 - protein, 7 aa, Artificial Sequence
  source: /note="Description of Artificial Sequence: Synthetic peptide"
LRVLDAS

SEQ ID NO: 5647 - protein, 7 aa, Artificial Sequence
  source: /note="Description of Artificial Sequence: Synthetic peptide"
LRVNPMV

SEQ ID NO: 5648 - protein, 7 aa, Artificial Sequence
  source: /note="Description of Artificial Sequence: Synthetic peptide"
LRVNVEV

SEQ ID NO: 5649 - protein, 7 aa, Artificial Sequence
  source: /note="Description of Artificial Sequence: Synthetic peptide"
LRVPPMS

SEQ ID NO: 5650 - protein, 7 aa, Artificial Sequence
  source: /note="Description of Artificial Sequence: Synthetic peptide"
LRVPPNN

SEQ ID NO: 5651 - protein, 7 aa, Artificial Sequence
  source: /note="Description of Artificial Sequence: Synthetic peptide"
LRVTSHP

SEQ ID NO: 5652 - protein, 7 aa, Artificial Sequence
  source: /note="Description of Artificial Sequence: Synthetic peptide"
LSAAPSN

SEQ ID NO: 5653 - protein, 7 aa, Artificial Sequence
  source: /note="Description of Artificial Sequence: Synthetic peptide"
LSAATTK

SEQ ID NO: 5654 - protein, 7 aa, Artificial Sequence
  source: /note="Description of Artificial Sequence: Synthetic peptide"
LSAFVKE

SEQ ID NO: 5655 - protein, 7 aa, Artificial Sequence
  source: /note="Description of Artificial Sequence: Synthetic peptide"
LSAGARA

SEQ ID NO: 5656 - protein, 7 aa, Artificial Sequence
  source: /note="Description of Artificial Sequence: Synthetic peptide"
LSALNVK

SEQ ID NO: 5657 - protein, 7 aa, Artificial Sequence
  source: /note="Description of Artificial Sequence: Synthetic peptide"
LSAQRGA

SEQ ID NO: 5658 - protein, 7 aa, Artificial Sequence
  source: /note="Description of Artificial Sequence: Synthetic peptide"
LSARHMP

SEQ ID NO: 5659 - protein, 7 aa, Artificial Sequence
  source: /note="Description of Artificial Sequence: Synthetic peptide"
LSARPDL

SEQ ID NO: 5660 - protein, 7 aa, Artificial Sequence
  source: /note="Description of Artificial Sequence: Synthetic peptide"
LSARPHL

SEQ ID NO: 5661 - protein, 7 aa, Artificial Sequence
  source: /note="Description of Artificial Sequence: Synthetic peptide"
LSASANS

SEQ ID NO: 5662 - protein, 7 aa, Artificial Sequence
  source: /note="Description of Artificial Sequence: Synthetic peptide"
LSASHVV

SEQ ID NO: 5663 - protein, 7 aa, Artificial Sequence
  source: /note="Description of Artificial Sequence: Synthetic peptide"
LSASWTS

SEQ ID NO: 5664 - protein, 7 aa, Artificial Sequence
  source: /note="Description of Artificial Sequence: Synthetic peptide"
LSAYAQG

SEQ ID NO: 5665 - protein, 7 aa, Artificial Sequence
  source: /note="Description of Artificial Sequence: Synthetic peptide"
LSCGSME

SEQ ID NO: 5666 - protein, 7 aa, Artificial Sequence
  source: /note="Description of Artificial Sequence: Synthetic peptide"
LSDAHSW

SEQ ID NO: 5667 - protein, 7 aa, Artificial Sequence
  source: /note="Description of Artificial Sequence: Synthetic peptide"
LSDAVAE

SEQ ID NO: 5668 - protein, 7 aa, Artificial Sequence
  source: /note="Description of Artificial Sequence: Synthetic peptide"
LSDERTH

SEQ ID NO: 5669 - protein, 7 aa, Artificial Sequence
  source: /note="Description of Artificial Sequence: Synthetic peptide"
LSDFQNP

SEQ ID NO: 5670 - protein, 7 aa, Artificial Sequence
  source: /note="Description of Artificial Sequence: Synthetic peptide"
LSDHHGL

SEQ ID NO: 5671 - protein, 7 aa, Artificial Sequence
  source: /note="Description of Artificial Sequence: Synthetic peptide"
LSDKGHP

SEQ ID NO: 5672 - protein, 7 aa, Artificial Sequence
  source: /note="Description of Artificial Sequence: Synthetic peptide"
LSDLQGN

SEQ ID NO: 5673 - protein, 7 aa, Artificial Sequence
  source: /note="Description of Artificial Sequence: Synthetic peptide"
LSDLTSW

SEQ ID NO: 5674 - protein, 7 aa, Artificial Sequence
  source: /note="Description of Artificial Sequence: Synthetic peptide"
LSDPTEI

SEQ ID NO: 5675 - protein, 7 aa, Artificial Sequence
  source: /note="Description of Artificial Sequence: Synthetic peptide"
LSDRSVL

SEQ ID NO: 5676 - protein, 7 aa, Artificial Sequence
  source: /note="Description of Artificial Sequence: Synthetic peptide"
LSEAPVH

SEQ ID NO: 5677 - protein, 7 aa, Artificial Sequence
  source: /note="Description of Artificial Sequence: Synthetic peptide"
LSEFSRA

SEQ ID NO: 5678 - protein, 7 aa, Artificial Sequence
  source: /note="Description of Artificial Sequence: Synthetic peptide"
LSEGCIL

SEQ ID NO: 5679 - protein, 7 aa, Artificial Sequence
  source: /note="Description of Artificial Sequence: Synthetic peptide"
LSEGLQK

SEQ ID NO: 5680 - protein, 7 aa, Artificial Sequence
  source: /note="Description of Artificial Sequence: Synthetic peptide"
LSEPMPF

SEQ ID NO: 5681 - protein, 7 aa, Artificial Sequence
  source: /note="Description of Artificial Sequence: Synthetic peptide"
LSEQTRY

SEQ ID NO: 5682 - protein, 7 aa, Artificial Sequence
  source: /note="Description of Artificial Sequence: Synthetic peptide"
LSERGDM

SEQ ID NO: 5683 - protein, 7 aa, Artificial Sequence
  source: /note="Description of Artificial Sequence: Synthetic peptide"
LSERPVL

SEQ ID NO: 5684 - protein, 7 aa, Artificial Sequence
  source: /note="Description of Artificial Sequence: Synthetic peptide"
LSESNQV

SEQ ID NO: 5685 - protein, 7 aa, Artificial Sequence
  source: /note="Description of Artificial Sequence: Synthetic peptide"
LSESYVV

SEQ ID NO: 5686 - protein, 7 aa, Artificial Sequence
  source: /note="Description of Artificial Sequence: Synthetic peptide"
LSFGTTT

SEQ ID NO: 5687 - protein, 7 aa, Artificial Sequence
  source: /note="Description of Artificial Sequence: Synthetic peptide"
LSFKTQL

SEQ ID NO: 5688 - protein, 7 aa, Artificial Sequence
  source: /note="Description of Artificial Sequence: Synthetic peptide"
LSFSAES

SEQ ID NO: 5689 - protein, 7 aa, Artificial Sequence
  source: /note="Description of Artificial Sequence: Synthetic peptide"
LSFSTSG

SEQ ID NO: 5690 - protein, 7 aa, Artificial Sequence
  source: /note="Description of Artificial Sequence: Synthetic peptide"
LSGAAGL

SEQ ID NO: 5691 - protein, 7 aa, Artificial Sequence
  source: /note="Description of Artificial Sequence: Synthetic peptide"
LSGAIPP

SEQ ID NO: 5692 - protein, 7 aa, Artificial Sequence
  source: /note="Description of Artificial Sequence: Synthetic peptide"
LSGANSG

SEQ ID NO: 5693 - protein, 7 aa, Artificial Sequence
  source: /note="Description of Artificial Sequence: Synthetic peptide"
LSGEQAL

SEQ ID NO: 5694 - protein, 7 aa, Artificial Sequence
  source: /note="Description of Artificial Sequence: Synthetic peptide"
LSGGEPP

SEQ ID NO: 5695 - protein, 7 aa, Artificial Sequence
  source: /note="Description of Artificial Sequence: Synthetic peptide"
LSGGQIS

SEQ ID NO: 5696 - protein, 7 aa, Artificial Sequence
  source: /note="Description of Artificial Sequence: Synthetic peptide"
LSGHHIV

SEQ ID NO: 5697 - protein, 7 aa, Artificial Sequence
  source: /note="Description of Artificial Sequence: Synthetic peptide"
LSGIAGI

SEQ ID NO: 5698 - protein, 7 aa, Artificial Sequence
  source: /note="Description of Artificial Sequence: Synthetic peptide"
LSGPSSL

SEQ ID NO: 5699 - protein, 7 aa, Artificial Sequence
  source: /note="Description of Artificial Sequence: Synthetic peptide"
LSGTPGI

SEQ ID NO: 5700 - protein, 7 aa, Artificial Sequence
  source: /note="Description of Artificial Sequence: Synthetic peptide"
LSGVAIQ

SEQ ID NO: 5701 - protein, 7 aa, Artificial Sequence
  source: /note="Description of Artificial Sequence: Synthetic peptide"
LSHDVLT

SEQ ID NO: 5702 - protein, 7 aa, Artificial Sequence
  source: /note="Description of Artificial Sequence: Synthetic peptide"
LSHGMLG

SEQ ID NO: 5703 - protein, 7 aa, Artificial Sequence
  source: /note="Description of Artificial Sequence: Synthetic peptide"
LSHKLTE

SEQ ID NO: 5704 - protein, 7 aa, Artificial Sequence
  source: /note="Description of Artificial Sequence: Synthetic peptide"
LSHLGFP

SEQ ID NO: 5705 - protein, 7 aa, Artificial Sequence
  source: /note="Description of Artificial Sequence: Synthetic peptide"
LSHPMGY

SEQ ID NO: 5706 - protein, 7 aa, Artificial Sequence
  source: /note="Description of Artificial Sequence: Synthetic peptide"
LSHSIPR

SEQ ID NO: 5707 - protein, 7 aa, Artificial Sequence
  source: /note="Description of Artificial Sequence: Synthetic peptide"
LSHTTNG

SEQ ID NO: 5708 - protein, 7 aa, Artificial Sequence
  source: /note="Description of Artificial Sequence: Synthetic peptide"
LSHVTTA

SEQ ID NO: 5709 - protein, 7 aa, Artificial Sequence
  source: /note="Description of Artificial Sequence: Synthetic peptide"
LSILSGI

SEQ ID NO: 5710 - protein, 7 aa, Artificial Sequence
  source: /note="Description of Artificial Sequence: Synthetic peptide"
LSIPSGP

SEQ ID NO: 5711 - protein, 7 aa, Artificial Sequence
  source: /note="Description of Artificial Sequence: Synthetic peptide"
LSKEPFM

SEQ ID NO: 5712 - protein, 7 aa, Artificial Sequence
  source: /note="Description of Artificial Sequence: Synthetic peptide"
LSKGFMG

SEQ ID NO: 5713 - protein, 7 aa, Artificial Sequence
  source: /note="Description of Artificial Sequence: Synthetic peptide"
LSKGNAA

SEQ ID NO: 5714 - protein, 7 aa, Artificial Sequence
  source: /note="Description of Artificial Sequence: Synthetic peptide"
LSKTLEE

SEQ ID NO: 5715 - protein, 7 aa, Artificial Sequence
  source: /note="Description of Artificial Sequence: Synthetic peptide"
LSLGASA

SEQ ID NO: 5716 - protein, 7 aa, Artificial Sequence
  source: /note="Description of Artificial Sequence: Synthetic peptide"
LSLGPHS

SEQ ID NO: 5717 - protein, 7 aa, Artificial Sequence
  source: /note="Description of Artificial Sequence: Synthetic peptide"
LSLGVDS

SEQ ID NO: 5718 - protein, 7 aa, Artificial Sequence
  source: /note="Description of Artificial Sequence: Synthetic peptide"
LSLHPAP

SEQ ID NO: 5719 - protein, 7 aa, Artificial Sequence
  source: /note="Description of Artificial Sequence: Synthetic peptide"
LSLKHLK

SEQ ID NO: 5720 - protein, 7 aa, Artificial Sequence
  source: /note="Description of Artificial Sequence: Synthetic peptide"
LSLPQSM

SEQ ID NO: 5721 - protein, 7 aa, Artificial Sequence
  source: /note="Description of Artificial Sequence: Synthetic peptide"
LSLPRSD

SEQ ID NO: 5722 - protein, 7 aa, Artificial Sequence
  source: /note="Description of Artificial Sequence: Synthetic peptide"
LSLPYNR

SEQ ID NO: 5723 - protein, 7 aa, Artificial Sequence
  source: /note="Description of Artificial Sequence: Synthetic peptide"
LSLQTVP

SEQ ID NO: 5724 - protein, 7 aa, Artificial Sequence
  source: /note="Description of Artificial Sequence: Synthetic peptide"
LSLSKGS

SEQ ID NO: 5725 - protein, 7 aa, Artificial Sequence
  source: /note="Description of Artificial Sequence: Synthetic peptide"
LSLSPVV

SEQ ID NO: 5726 - protein, 7 aa, Artificial Sequence
  source: /note="Description of Artificial Sequence: Synthetic peptide"
LSLVKHD

SEQ ID NO: 5727 - protein, 7 aa, Artificial Sequence
  source: /note="Description of Artificial Sequence: Synthetic peptide"
LSMARTP

SEQ ID NO: 5728 - protein, 7 aa, Artificial Sequence
  source: /note="Description of Artificial Sequence: Synthetic peptide"
LSMNPNG

SEQ ID NO: 5729 - protein, 7 aa, Artificial Sequence
  source: /note="Description of Artificial Sequence: Synthetic peptide"
LSMNVQY

SEQ ID NO: 5730 - protein, 7 aa, Artificial Sequence
  source: /note="Description of Artificial Sequence: Synthetic peptide"
LSMQRTV

SEQ ID NO: 5731 - protein, 7 aa, Artificial Sequence
  source: /note="Description of Artificial Sequence: Synthetic peptide"
LSMRSET

SEQ ID NO: 5732 - protein, 7 aa, Artificial Sequence
  source: /note="Description of Artificial Sequence: Synthetic peptide"
LSMSKTP

SEQ ID NO: 5733 - protein, 7 aa, Artificial Sequence
  source: /note="Description of Artificial Sequence: Synthetic peptide"
LSNEGSY

SEQ ID NO: 5734 - protein, 7 aa, Artificial Sequence
  source: /note="Description of Artificial Sequence: Synthetic peptide"
LSNGRYS

SEQ ID NO: 5735 - protein, 7 aa, Artificial Sequence
  source: /note="Description of Artificial Sequence: Synthetic peptide"
LSNHPFS

SEQ ID NO: 5736 - protein, 7 aa, Artificial Sequence
  source: /note="Description of Artificial Sequence: Synthetic peptide"
LSNHVIT

SEQ ID NO: 5737 - protein, 7 aa, Artificial Sequence
  source: /note="Description of Artificial Sequence: Synthetic peptide"
LSNMQQK

SEQ ID NO: 5738 - protein, 7 aa, Artificial Sequence
  source: /note="Description of Artificial Sequence: Synthetic peptide"
LSNPAKT

SEQ ID NO: 5739 - protein, 7 aa, Artificial Sequence
  source: /note="Description of Artificial Sequence: Synthetic peptide"
LSNPTRS

SEQ ID NO: 5740 - protein, 7 aa, Artificial Sequence
  source: /note="Description of Artificial Sequence: Synthetic peptide"
LSNRKGE

SEQ ID NO: 5741 - protein, 7 aa, Artificial Sequence
  source: /note="Description of Artificial Sequence: Synthetic peptide"
LSNRQIT

SEQ ID NO: 5742 - protein, 7 aa, Artificial Sequence
  source: /note="Description of Artificial Sequence: Synthetic peptide"
LSNSAIL

SEQ ID NO: 5743 - protein, 7 aa, Artificial Sequence
  source: /note="Description of Artificial Sequence: Synthetic peptide"
LSNSKGP

SEQ ID NO: 5744 - protein, 7 aa, Artificial Sequence
  source: /note="Description of Artificial Sequence: Synthetic peptide"
LSNSRHD

SEQ ID NO: 5745 - protein, 7 aa, Artificial Sequence
  source: /note="Description of Artificial Sequence: Synthetic peptide"
LSNSSRM

SEQ ID NO: 5746 - protein, 7 aa, Artificial Sequence
  source: /note="Description of Artificial Sequence: Synthetic peptide"
LSPAVTR

SEQ ID NO: 5747 - protein, 7 aa, Artificial Sequence
  source: /note="Description of Artificial Sequence: Synthetic peptide"
LSPCPSN

SEQ ID NO: 5748 - protein, 7 aa, Artificial Sequence
  source: /note="Description of Artificial Sequence: Synthetic peptide"
LSPFSVV

SEQ ID NO: 5749 - protein, 7 aa, Artificial Sequence
  source: /note="Description of Artificial Sequence: Synthetic peptide"
LSPGIAQ

SEQ ID NO: 5750 - protein, 7 aa, Artificial Sequence
  source: /note="Description of Artificial Sequence: Synthetic peptide"
LSPHRTS

SEQ ID NO: 5751 - protein, 7 aa, Artificial Sequence
  source: /note="Description of Artificial Sequence: Synthetic peptide"
LSPKFVL

SEQ ID NO: 5752 - protein, 7 aa, Artificial Sequence
  source: /note="Description of Artificial Sequence: Synthetic peptide"
LSPNGPN

SEQ ID NO: 5753 - protein, 7 aa, Artificial Sequence
  source: /note="Description of Artificial Sequence: Synthetic peptide"
LSPPDRL

SEQ ID NO: 5754 - protein, 7 aa, Artificial Sequence
  source: /note="Description of Artificial Sequence: Synthetic peptide"
LSPPPVD

SEQ ID NO: 5755 - protein, 7 aa, Artificial Sequence
  source: /note="Description of Artificial Sequence: Synthetic peptide"
LSPPTPH

SEQ ID NO: 5756 - protein, 7 aa, Artificial Sequence
  source: /note="Description of Artificial Sequence: Synthetic peptide"
LSPRTVH

SEQ ID NO: 5757 - protein, 7 aa, Artificial Sequence
  source: /note="Description of Artificial Sequence: Synthetic peptide"
LSPSFTS

SEQ ID NO: 5758 - protein, 7 aa, Artificial Sequence
  source: /note="Description of Artificial Sequence: Synthetic peptide"
LSPSSLF

SEQ ID NO: 5759 - protein, 7 aa, Artificial Sequence
  source: /note="Description of Artificial Sequence: Synthetic peptide"
LSPSSLG

SEQ ID NO: 5760 - protein, 7 aa, Artificial Sequence
  source: /note="Description of Artificial Sequence: Synthetic peptide"
LSPSSRG

SEQ ID NO: 5761 - protein, 7 aa, Artificial Sequence
  source: /note="Description of Artificial Sequence: Synthetic peptide"
LSPSTDF

SEQ ID NO: 5762 - protein, 7 aa, Artificial Sequence
  source: /note="Description of Artificial Sequence: Synthetic peptide"
LSPSVTK

SEQ ID NO: 5763 - protein, 7 aa, Artificial Sequence
  source: /note="Description of Artificial Sequence: Synthetic peptide"
LSPTRTQ

SEQ ID NO: 5764 - protein, 7 aa, Artificial Sequence
  source: /note="Description of Artificial Sequence: Synthetic peptide"
LSPTVAY

SEQ ID NO: 5765 - protein, 7 aa, Artificial Sequence
  source: /note="Description of Artificial Sequence: Synthetic peptide"
LSPVPVA

SEQ ID NO: 5766 - protein, 7 aa, Artificial Sequence
  source: /note="Description of Artificial Sequence: Synthetic peptide"
LSPVQAA

SEQ ID NO: 5767 - protein, 7 aa, Artificial Sequence
  source: /note="Description of Artificial Sequence: Synthetic peptide"
LSQAIQS

SEQ ID NO: 5768 - protein, 7 aa, Artificial Sequence
  source: /note="Description of Artificial Sequence: Synthetic peptide"
LSQAKNV

SEQ ID NO: 5769 - protein, 7 aa, Artificial Sequence
  source: /note="Description of Artificial Sequence: Synthetic peptide"
LSQALLD

SEQ ID NO: 5770 - protein, 7 aa, Artificial Sequence
  source: /note="Description of Artificial Sequence: Synthetic peptide"
LSQANER

SEQ ID NO: 5771 - protein, 7 aa, Artificial Sequence
  source: /note="Description of Artificial Sequence: Synthetic peptide"
LSQDLTV

SEQ ID NO: 5772 - protein, 7 aa, Artificial Sequence
  source: /note="Description of Artificial Sequence: Synthetic peptide"
LSQGSAP

SEQ ID NO: 5773 - protein, 7 aa, Artificial Sequence
  source: /note="Description of Artificial Sequence: Synthetic peptide"
LSQHAST

SEQ ID NO: 5774 - protein, 7 aa, Artificial Sequence
  source: /note="Description of Artificial Sequence: Synthetic peptide"
LSQHMRP

SEQ ID NO: 5775 - protein, 7 aa, Artificial Sequence
  source: /note="Description of Artificial Sequence: Synthetic peptide"
LSQKTGI

SEQ ID NO: 5776 - protein, 7 aa, Artificial Sequence
  source: /note="Description of Artificial Sequence: Synthetic peptide"
LSQLIQG

SEQ ID NO: 5777 - protein, 7 aa, Artificial Sequence
  source: /note="Description of Artificial Sequence: Synthetic peptide"
LSQLTPS

SEQ ID NO: 5778 - protein, 7 aa, Artificial Sequence
  source: /note="Description of Artificial Sequence: Synthetic peptide"
LSQLTSQ

SEQ ID NO: 5779 - protein, 7 aa, Artificial Sequence
  source: /note="Description of Artificial Sequence: Synthetic peptide"
LSQLVSS

SEQ ID NO: 5780 - protein, 7 aa, Artificial Sequence
  source: /note="Description of Artificial Sequence: Synthetic peptide"
LSQPLNM

SEQ ID NO: 5781 - protein, 7 aa, Artificial Sequence
  source: /note="Description of Artificial Sequence: Synthetic peptide"
LSQSFAS

SEQ ID NO: 5782 - protein, 7 aa, Artificial Sequence
  source: /note="Description of Artificial Sequence: Synthetic peptide"
LSQTARA

SEQ ID NO: 5783 - protein, 7 aa, Artificial Sequence
  source: /note="Description of Artificial Sequence: Synthetic peptide"
LSQVHKF

SEQ ID NO: 5784 - protein, 7 aa, Artificial Sequence
  source: /note="Description of Artificial Sequence: Synthetic peptide"
LSQVQAG

SEQ ID NO: 5785 - protein, 7 aa, Artificial Sequence
  source: /note="Description of Artificial Sequence: Synthetic peptide"
LSRDLEL

SEQ ID NO: 5786 - protein, 7 aa, Artificial Sequence
  source: /note="Description of Artificial Sequence: Synthetic peptide"
LSRGPTP

SEQ ID NO: 5787 - protein, 7 aa, Artificial Sequence
  source: /note="Description of Artificial Sequence: Synthetic peptide"
LSRGQVP

SEQ ID NO: 5788 - protein, 7 aa, Artificial Sequence
  source: /note="Description of Artificial Sequence: Synthetic peptide"
LSRLGPS

SEQ ID NO: 5789 - protein, 7 aa, Artificial Sequence
  source: /note="Description of Artificial Sequence: Synthetic peptide"
LSRLPSS

SEQ ID NO: 5790 - protein, 7 aa, Artificial Sequence
  source: /note="Description of Artificial Sequence: Synthetic peptide"
LSRLSTD

SEQ ID NO: 5791 - protein, 7 aa, Artificial Sequence
  source: /note="Description of Artificial Sequence: Synthetic peptide"
LSRNVTE

SEQ ID NO: 5792 - protein, 7 aa, Artificial Sequence
  source: /note="Description of Artificial Sequence: Synthetic peptide"
LSRQTGY

SEQ ID NO: 5793 - protein, 7 aa, Artificial Sequence
  source: /note="Description of Artificial Sequence: Synthetic peptide"
LSRSSAA

SEQ ID NO: 5794 - protein, 7 aa, Artificial Sequence
  source: /note="Description of Artificial Sequence: Synthetic peptide"
LSRSVST

SEQ ID NO: 5795 - protein, 7 aa, Artificial Sequence
  source: /note="Description of Artificial Sequence: Synthetic peptide"
LSRTTAD

SEQ ID NO: 5796 - protein, 7 aa, Artificial Sequence
  source: /note="Description of Artificial Sequence: Synthetic peptide"
LSRVAVL

SEQ ID NO: 5797 - protein, 7 aa, Artificial Sequence
  source: /note="Description of Artificial Sequence: Synthetic peptide"
LSSANST

SEQ ID NO: 5798 - protein, 7 aa, Artificial Sequence
  source: /note="Description of Artificial Sequence: Synthetic peptide"
LSSAQRA

SEQ ID NO: 5799 - protein, 7 aa, Artificial Sequence
  source: /note="Description of Artificial Sequence: Synthetic peptide"
LSSDSPV

SEQ ID NO: 5800 - protein, 7 aa, Artificial Sequence
  source: /note="Description of Artificial Sequence: Synthetic peptide"
LSSECAP

SEQ ID NO: 5801 - protein, 7 aa, Artificial Sequence
  source: /note="Description of Artificial Sequence: Synthetic peptide"
LSSGMSR

SEQ ID NO: 5802 - protein, 7 aa, Artificial Sequence
  source: /note="Description of Artificial Sequence: Synthetic peptide"
LSSGRPP

SEQ ID NO: 5803 - protein, 7 aa, Artificial Sequence
  source: /note="Description of Artificial Sequence: Synthetic peptide"
LSSHSTS

SEQ ID NO: 5804 - protein, 7 aa, Artificial Sequence
  source: /note="Description of Artificial Sequence: Synthetic peptide"
LSSIQTY

SEQ ID NO: 5805 - protein, 7 aa, Artificial Sequence
  source: /note="Description of Artificial Sequence: Synthetic peptide"
LSSISHN

SEQ ID NO: 5806 - protein, 7 aa, Artificial Sequence
  source: /note="Description of Artificial Sequence: Synthetic peptide"
LSSKPYA

SEQ ID NO: 5807 - protein, 7 aa, Artificial Sequence
  source: /note="Description of Artificial Sequence: Synthetic peptide"
LSSLAMV

SEQ ID NO: 5808 - protein, 7 aa, Artificial Sequence
  source: /note="Description of Artificial Sequence: Synthetic peptide"
LSSLKGN

SEQ ID NO: 5809 - protein, 7 aa, Artificial Sequence
  source: /note="Description of Artificial Sequence: Synthetic peptide"
LSSLKLA

SEQ ID NO: 5810 - protein, 7 aa, Artificial Sequence
  source: /note="Description of Artificial Sequence: Synthetic peptide"
LSSLMHS

SEQ ID NO: 5811 - protein, 7 aa, Artificial Sequence
  source: /note="Description of Artificial Sequence: Synthetic peptide"
LSSLNPS

SEQ ID NO: 5812 - protein, 7 aa, Artificial Sequence
  source: /note="Description of Artificial Sequence: Synthetic peptide"
LSSLPKI

SEQ ID NO: 5813 - protein, 7 aa, Artificial Sequence
  source: /note="Description of Artificial Sequence: Synthetic peptide"
LSSMRST

SEQ ID NO: 5814 - protein, 7 aa, Artificial Sequence
  source: /note="Description of Artificial Sequence: Synthetic peptide"
LSSMTND

SEQ ID NO: 5815 - protein, 7 aa, Artificial Sequence
  source: /note="Description of Artificial Sequence: Synthetic peptide"
LSSNSLD

SEQ ID NO: 5816 - protein, 7 aa, Artificial Sequence
  source: /note="Description of Artificial Sequence: Synthetic peptide"
LSSPAGS

SEQ ID NO: 5817 - protein, 7 aa, Artificial Sequence
  source: /note="Description of Artificial Sequence: Synthetic peptide"
LSSPGSM

SEQ ID NO: 5818 - protein, 7 aa, Artificial Sequence
  source: /note="Description of Artificial Sequence: Synthetic peptide"
LSSPMDS

SEQ ID NO: 5819 - protein, 7 aa, Artificial Sequence
  source: /note="Description of Artificial Sequence: Synthetic peptide"
LSSQCIN

SEQ ID NO: 5820 - protein, 7 aa, Artificial Sequence
  source: /note="Description of Artificial Sequence: Synthetic peptide"
LSSQHTS

SEQ ID NO: 5821 - protein, 7 aa, Artificial Sequence
  source: /note="Description of Artificial Sequence: Synthetic peptide"
LSSQPKF

SEQ ID NO: 5822 - protein, 7 aa, Artificial Sequence
  source: /note="Description of Artificial Sequence: Synthetic peptide"
LSSRSTT

SEQ ID NO: 5823 - protein, 7 aa, Artificial Sequence
  source: /note="Description of Artificial Sequence: Synthetic peptide"
LSSSCER

SEQ ID NO: 5824 - protein, 7 aa, Artificial Sequence
  source: /note="Description of Artificial Sequence: Synthetic peptide"
LSSSLEY

SEQ ID NO: 5825 - protein, 7 aa, Artificial Sequence
  source: /note="Description of Artificial Sequence: Synthetic peptide"
LSSSRPS

SEQ ID NO: 5826 - protein, 7 aa, Artificial Sequence
  source: /note="Description of Artificial Sequence: Synthetic peptide"
LSSSVVF

SEQ ID NO: 5827 - protein, 7 aa, Artificial Sequence
  source: /note="Description of Artificial Sequence: Synthetic peptide"
LSSTSKA

SEQ ID NO: 5828 - protein, 7 aa, Artificial Sequence
  source: /note="Description of Artificial Sequence: Synthetic peptide"
LSSVATP

SEQ ID NO: 5829 - protein, 7 aa, Artificial Sequence
  source: /note="Description of Artificial Sequence: Synthetic peptide"
LSSVFRT

SEQ ID NO: 5830 - protein, 7 aa, Artificial Sequence
  source: /note="Description of Artificial Sequence: Synthetic peptide"
LSSVHAV

SEQ ID NO: 5831 - protein, 7 aa, Artificial Sequence
  source: /note="Description of Artificial Sequence: Synthetic peptide"
LSSVRLS

SEQ ID NO: 5832 - protein, 7 aa, Artificial Sequence
  source: /note="Description of Artificial Sequence: Synthetic peptide"
LSTAVTR

SEQ ID NO: 5833 - protein, 7 aa, Artificial Sequence
  source: /note="Description of Artificial Sequence: Synthetic peptide"
LSTEDLL

SEQ ID NO: 5834 - protein, 7 aa, Artificial Sequence
  source: /note="Description of Artificial Sequence: Synthetic peptide"
LSTFPVA

SEQ ID NO: 5835 - protein, 7 aa, Artificial Sequence
  source: /note="Description of Artificial Sequence: Synthetic peptide"
LSTFQGG

SEQ ID NO: 5836 - protein, 7 aa, Artificial Sequence
  source: /note="Description of Artificial Sequence: Synthetic peptide"
LSTGSRQ

SEQ ID NO: 5837 - protein, 7 aa, Artificial Sequence
  source: /note="Description of Artificial Sequence: Synthetic peptide"
LSTGTMD

SEQ ID NO: 5838 - protein, 7 aa, Artificial Sequence
  source: /note="Description of Artificial Sequence: Synthetic peptide"
LSTIHPS

SEQ ID NO: 5839 - protein, 7 aa, Artificial Sequence
  source: /note="Description of Artificial Sequence: Synthetic peptide"
LSTKGTM

SEQ ID NO: 5840 - protein, 7 aa, Artificial Sequence
  source: /note="Description of Artificial Sequence: Synthetic peptide"
LSTLENE

SEQ ID NO: 5841 - protein, 7 aa, Artificial Sequence
  source: /note="Description of Artificial Sequence: Synthetic peptide"
LSTLLTA

SEQ ID NO: 5842 - protein, 7 aa, Artificial Sequence
  source: /note="Description of Artificial Sequence: Synthetic peptide"
LSTLPKD

SEQ ID NO: 5843 - protein, 7 aa, Artificial Sequence
  source: /note="Description of Artificial Sequence: Synthetic peptide"
LSTMSSL

SEQ ID NO: 5844 - protein, 7 aa, Artificial Sequence
  source: /note="Description of Artificial Sequence: Synthetic peptide"
LSTMTAY

SEQ ID NO: 5845 - protein, 7 aa, Artificial Sequence
  source: /note="Description of Artificial Sequence: Synthetic peptide"
LSTNMPP

SEQ ID NO: 5846 - protein, 7 aa, Artificial Sequence
  source: /note="Description of Artificial Sequence: Synthetic peptide"
LSTPHLT

SEQ ID NO: 5847 - protein, 7 aa, Artificial Sequence
  source: /note="Description of Artificial Sequence: Synthetic peptide"
LSTPHMA

SEQ ID NO: 5848 - protein, 7 aa, Artificial Sequence
  source: /note="Description of Artificial Sequence: Synthetic peptide"
LSTPSQP

SEQ ID NO: 5849 - protein, 7 aa, Artificial Sequence
  source: /note="Description of Artificial Sequence: Synthetic peptide"
LSTRSLP

SEQ ID NO: 5850 - protein, 7 aa, Artificial Sequence
  source: /note="Description of Artificial Sequence: Synthetic peptide"
LSTRSPL

SEQ ID NO: 5851 - protein, 7 aa, Artificial Sequence
  source: /note="Description of Artificial Sequence: Synthetic peptide"
LSTSHSV

SEQ ID NO: 5852 - protein, 7 aa, Artificial Sequence
  source: /note="Description of Artificial Sequence: Synthetic peptide"
LSTVRMV

SEQ ID NO: 5853 - protein, 7 aa, Artificial Sequence
  source: /note="Description of Artificial Sequence: Synthetic peptide"
LSVDEMV

SEQ ID NO: 5854 - protein, 7 aa, Artificial Sequence
  source: /note="Description of Artificial Sequence: Synthetic peptide"
LSVGRTE

SEQ ID NO: 5855 - protein, 7 aa, Artificial Sequence
  source: /note="Description of Artificial Sequence: Synthetic peptide"
LSVHGLK

SEQ ID NO: 5856 - protein, 7 aa, Artificial Sequence
  source: /note="Description of Artificial Sequence: Synthetic peptide"
LSVNSSL

SEQ ID NO: 5857 - protein, 7 aa, Artificial Sequence
  source: /note="Description of Artificial Sequence: Synthetic peptide"
LSVPMPD

SEQ ID NO: 5858 - protein, 7 aa, Artificial Sequence
  source: /note="Description of Artificial Sequence: Synthetic peptide"
LSVPRAP

SEQ ID NO: 5859 - protein, 7 aa, Artificial Sequence
  source: /note="Description of Artificial Sequence: Synthetic peptide"
LSVRGHI

SEQ ID NO: 5860 - protein, 7 aa, Artificial Sequence
  source: /note="Description of Artificial Sequence: Synthetic peptide"
LSVRSIG

SEQ ID NO: 5861 - protein, 7 aa, Artificial Sequence
  source: /note="Description of Artificial Sequence: Synthetic peptide"
LSVSLTA

SEQ ID NO: 5862 - protein, 7 aa, Artificial Sequence
  source: /note="Description of Artificial Sequence: Synthetic peptide"
LSVSPLS

SEQ ID NO: 5863 - protein, 7 aa, Artificial Sequence
  source: /note="Description of Artificial Sequence: Synthetic peptide"
LSVYTAD

SEQ ID NO: 5864 - protein, 7 aa, Artificial Sequence
  source: /note="Description of Artificial Sequence: Synthetic peptide"
LSYGRPV

SEQ ID NO: 5865 - protein, 7 aa, Artificial Sequence
  source: /note="Description of Artificial Sequence: Synthetic peptide"
LSYPRND

SEQ ID NO: 5866 - protein, 7 aa, Artificial Sequence
  source: /note="Description of Artificial Sequence: Synthetic peptide"
LTAPRQA

SEQ ID NO: 5867 - protein, 7 aa, Artificial Sequence
  source: /note="Description of Artificial Sequence: Synthetic peptide"
LTAPTSQ

SEQ ID NO: 5868 - protein, 7 aa, Artificial Sequence
  source: /note="Description of Artificial Sequence: Synthetic peptide"
LTASIGN

SEQ ID NO: 5869 - protein, 7 aa, Artificial Sequence
  source: /note="Description of Artificial Sequence: Synthetic peptide"
LTASIKA

SEQ ID NO: 5870 - protein, 7 aa, Artificial Sequence
  source: /note="Description of Artificial Sequence: Synthetic peptide"
LTAVPLS

SEQ ID NO: 5871 - protein, 7 aa, Artificial Sequence
  source: /note="Description of Artificial Sequence: Synthetic peptide"
LTDENVC

SEQ ID NO: 5872 - protein, 7 aa, Artificial Sequence
  source: /note="Description of Artificial Sequence: Synthetic peptide"
LTDITNR

SEQ ID NO: 5873 - protein, 7 aa, Artificial Sequence
  source: /note="Description of Artificial Sequence: Synthetic peptide"
LTDLDQM

SEQ ID NO: 5874 - protein, 7 aa, Artificial Sequence
  source: /note="Description of Artificial Sequence: Synthetic peptide"
LTDLRLV

SEQ ID NO: 5875 - protein, 7 aa, Artificial Sequence
  source: /note="Description of Artificial Sequence: Synthetic peptide"
LTDLSAS

SEQ ID NO: 5876 - protein, 7 aa, Artificial Sequence
  source: /note="Description of Artificial Sequence: Synthetic peptide"
LTDSLRT

SEQ ID NO: 5877 - protein, 7 aa, Artificial Sequence
  source: /note="Description of Artificial Sequence: Synthetic peptide"
LTDTRVT

SEQ ID NO: 5878 - protein, 7 aa, Artificial Sequence
  source: /note="Description of Artificial Sequence: Synthetic peptide"
LTEMRPG

SEQ ID NO: 5879 - protein, 7 aa, Artificial Sequence
  source: /note="Description of Artificial Sequence: Synthetic peptide"
LTETRAG

SEQ ID NO: 5880 - protein, 7 aa, Artificial Sequence
  source: /note="Description of Artificial Sequence: Synthetic peptide"
LTEVRTY

SEQ ID NO: 5881 - protein, 7 aa, Artificial Sequence
  source: /note="Description of Artificial Sequence: Synthetic peptide"
LTEWSKE

SEQ ID NO: 5882 - protein, 7 aa, Artificial Sequence
  source: /note="Description of Artificial Sequence: Synthetic peptide"
LTFGATS

SEQ ID NO: 5883 - protein, 7 aa, Artificial Sequence
  source: /note="Description of Artificial Sequence: Synthetic peptide"
LTFSAGL

SEQ ID NO: 5884 - protein, 7 aa, Artificial Sequence
  source: /note="Description of Artificial Sequence: Synthetic peptide"
LTGAFKS

SEQ ID NO: 5885 - protein, 7 aa, Artificial Sequence
  source: /note="Description of Artificial Sequence: Synthetic peptide"
LTGEFRD

SEQ ID NO: 5886 - protein, 7 aa, Artificial Sequence
  source: /note="Description of Artificial Sequence: Synthetic peptide"
LTGFSNQ

SEQ ID NO: 5887 - protein, 7 aa, Artificial Sequence
  source: /note="Description of Artificial Sequence: Synthetic peptide"
LTGGLYG

SEQ ID NO: 5888 - protein, 7 aa, Artificial Sequence
  source: /note="Description of Artificial Sequence: Synthetic peptide"
LTGGQVA

SEQ ID NO: 5889 - protein, 7 aa, Artificial Sequence
  source: /note="Description of Artificial Sequence: Synthetic peptide"
LTGMIKY

SEQ ID NO: 5890 - protein, 7 aa, Artificial Sequence
  source: /note="Description of Artificial Sequence: Synthetic peptide"
LTGNRPA

SEQ ID NO: 5891 - protein, 7 aa, Artificial Sequence
  source: /note="Description of Artificial Sequence: Synthetic peptide"
LTGPCTS

SEQ ID NO: 5892 - protein, 7 aa, Artificial Sequence
  source: /note="Description of Artificial Sequence: Synthetic peptide"
LTGQIRV

SEQ ID NO: 5893 - protein, 7 aa, Artificial Sequence
  source: /note="Description of Artificial Sequence: Synthetic peptide"
LTGRGGS

SEQ ID NO: 5894 - protein, 7 aa, Artificial Sequence
  source: /note="Description of Artificial Sequence: Synthetic peptide"
LTGSSHV

SEQ ID NO: 5895 - protein, 7 aa, Artificial Sequence
  source: /note="Description of Artificial Sequence: Synthetic peptide"
LTGTLRM

SEQ ID NO: 5896 - protein, 7 aa, Artificial Sequence
  source: /note="Description of Artificial Sequence: Synthetic peptide"
LTHAVPT

SEQ ID NO: 5897 - protein, 7 aa, Artificial Sequence
  source: /note="Description of Artificial Sequence: Synthetic peptide"
LTHKLDA

SEQ ID NO: 5898 - protein, 7 aa, Artificial Sequence
  source: /note="Description of Artificial Sequence: Synthetic peptide"
LTHPAVH

SEQ ID NO: 5899 - protein, 7 aa, Artificial Sequence
  source: /note="Description of Artificial Sequence: Synthetic peptide"
LTHVPTA

SEQ ID NO: 5900 - protein, 7 aa, Artificial Sequence
  source: /note="Description of Artificial Sequence: Synthetic peptide"
LTIGHVP

SEQ ID NO: 5901 - protein, 7 aa, Artificial Sequence
  source: /note="Description of Artificial Sequence: Synthetic peptide"
LTIPSAQ

SEQ ID NO: 5902 - protein, 7 aa, Artificial Sequence
  source: /note="Description of Artificial Sequence: Synthetic peptide"
LTKGSVQ

SEQ ID NO: 5903 - protein, 7 aa, Artificial Sequence
  source: /note="Description of Artificial Sequence: Synthetic peptide"
LTKSSHA

SEQ ID NO: 5904 - protein, 7 aa, Artificial Sequence
  source: /note="Description of Artificial Sequence: Synthetic peptide"
LTKTVGS

SEQ ID NO: 5905 - protein, 7 aa, Artificial Sequence
  source: /note="Description of Artificial Sequence: Synthetic peptide"
LTLAIGA

SEQ ID NO: 5906 - protein, 7 aa, Artificial Sequence
  source: /note="Description of Artificial Sequence: Synthetic peptide"
LTLGPRS

SEQ ID NO: 5907 - protein, 7 aa, Artificial Sequence
  source: /note="Description of Artificial Sequence: Synthetic peptide"
LTLQKGT

SEQ ID NO: 5908 - protein, 7 aa, Artificial Sequence
  source: /note="Description of Artificial Sequence: Synthetic peptide"
LTLQPIA

SEQ ID NO: 5909 - protein, 7 aa, Artificial Sequence
  source: /note="Description of Artificial Sequence: Synthetic peptide"
LTLTGSS

SEQ ID NO: 5910 - protein, 7 aa, Artificial Sequence
  source: /note="Description of Artificial Sequence: Synthetic peptide"
LTLTSAH

SEQ ID NO: 5911 - protein, 7 aa, Artificial Sequence
  source: /note="Description of Artificial Sequence: Synthetic peptide"
LTLVHAE

SEQ ID NO: 5912 - protein, 7 aa, Artificial Sequence
  source: /note="Description of Artificial Sequence: Synthetic peptide"
LTMGSAS

SEQ ID NO: 5913 - protein, 7 aa, Artificial Sequence
  source: /note="Description of Artificial Sequence: Synthetic peptide"
LTMIQRD

SEQ ID NO: 5914 - protein, 7 aa, Artificial Sequence
  source: /note="Description of Artificial Sequence: Synthetic peptide"
LTMRPPS

SEQ ID NO: 5915 - protein, 7 aa, Artificial Sequence
  source: /note="Description of Artificial Sequence: Synthetic peptide"
LTMSRAL

SEQ ID NO: 5916 - protein, 7 aa, Artificial Sequence
  source: /note="Description of Artificial Sequence: Synthetic peptide"
LTNAHHL

SEQ ID NO: 5917 - protein, 7 aa, Artificial Sequence
  source: /note="Description of Artificial Sequence: Synthetic peptide"
LTNARPA

SEQ ID NO: 5918 - protein, 7 aa, Artificial Sequence
  source: /note="Description of Artificial Sequence: Synthetic peptide"
LTNEAHR

SEQ ID NO: 5919 - protein, 7 aa, Artificial Sequence
  source: /note="Description of Artificial Sequence: Synthetic peptide"
LTNKPIC

SEQ ID NO: 5920 - protein, 7 aa, Artificial Sequence
  source: /note="Description of Artificial Sequence: Synthetic peptide"
LTNMRTT

SEQ ID NO: 5921 - protein, 7 aa, Artificial Sequence
  source: /note="Description of Artificial Sequence: Synthetic peptide"
LTNNEQV

SEQ ID NO: 5922 - protein, 7 aa, Artificial Sequence
  source: /note="Description of Artificial Sequence: Synthetic peptide"
LTNRQNQ

SEQ ID NO: 5923 - protein, 7 aa, Artificial Sequence
  source: /note="Description of Artificial Sequence: Synthetic peptide"
LTPALGP

SEQ ID NO: 5924 - protein, 7 aa, Artificial Sequence
  source: /note="Description of Artificial Sequence: Synthetic peptide"
LTPARTY

SEQ ID NO: 5925 - protein, 7 aa, Artificial Sequence
  source: /note="Description of Artificial Sequence: Synthetic peptide"
LTPGRGV

SEQ ID NO: 5926 - protein, 7 aa, Artificial Sequence
  source: /note="Description of Artificial Sequence: Synthetic peptide"
LTPHVMD

SEQ ID NO: 5927 - protein, 7 aa, Artificial Sequence
  source: /note="Description of Artificial Sequence: Synthetic peptide"
LTPINSA

SEQ ID NO: 5928 - protein, 7 aa, Artificial Sequence
  source: /note="Description of Artificial Sequence: Synthetic peptide"
LTPKSIS

SEQ ID NO: 5929 - protein, 7 aa, Artificial Sequence
  source: /note="Description of Artificial Sequence: Synthetic peptide"
LTPLLGS

SEQ ID NO: 5930 - protein, 7 aa, Artificial Sequence
  source: /note="Description of Artificial Sequence: Synthetic peptide"
LTPLMSD

SEQ ID NO: 5931 - protein, 7 aa, Artificial Sequence
  source: /note="Description of Artificial Sequence: Synthetic peptide"
LTPRLPA

SEQ ID NO: 5932 - protein, 7 aa, Artificial Sequence
  source: /note="Description of Artificial Sequence: Synthetic peptide"
LTPSGHW

SEQ ID NO: 5933 - protein, 7 aa, Artificial Sequence
  source: /note="Description of Artificial Sequence: Synthetic peptide"
LTPSGYN

SEQ ID NO: 5934 - protein, 7 aa, Artificial Sequence
  source: /note="Description of Artificial Sequence: Synthetic peptide"
LTPSQPY

SEQ ID NO: 5935 - protein, 7 aa, Artificial Sequence
  source: /note="Description of Artificial Sequence: Synthetic peptide"
LTPSVKG

SEQ ID NO: 5936 - protein, 7 aa, Artificial Sequence
  source: /note="Description of Artificial Sequence: Synthetic peptide"
LTPSVPH

SEQ ID NO: 5937 - protein, 7 aa, Artificial Sequence
  source: /note="Description of Artificial Sequence: Synthetic peptide"
LTPTKME

SEQ ID NO: 5938 - protein, 7 aa, Artificial Sequence
  source: /note="Description of Artificial Sequence: Synthetic peptide"
LTPVSPD

SEQ ID NO: 5939 - protein, 7 aa, Artificial Sequence
  source: /note="Description of Artificial Sequence: Synthetic peptide"
LTQKTPY

SEQ ID NO: 5940 - protein, 7 aa, Artificial Sequence
  source: /note="Description of Artificial Sequence: Synthetic peptide"
LTQLRVT

SEQ ID NO: 5941 - protein, 7 aa, Artificial Sequence
  source: /note="Description of Artificial Sequence: Synthetic peptide"
LTQSHPA

SEQ ID NO: 5942 - protein, 7 aa, Artificial Sequence
  source: /note="Description of Artificial Sequence: Synthetic peptide"
LTRKETD

SEQ ID NO: 5943 - protein, 7 aa, Artificial Sequence
  source: /note="Description of Artificial Sequence: Synthetic peptide"
LTRPDDT

SEQ ID NO: 5944 - protein, 7 aa, Artificial Sequence
  source: /note="Description of Artificial Sequence: Synthetic peptide"
LTRQHSD

SEQ ID NO: 5945 - protein, 7 aa, Artificial Sequence
  source: /note="Description of Artificial Sequence: Synthetic peptide"
LTRSPPA

SEQ ID NO: 5946 - protein, 7 aa, Artificial Sequence
  source: /note="Description of Artificial Sequence: Synthetic peptide"
LTSAPGR

SEQ ID NO: 5947 - protein, 7 aa, Artificial Sequence
  source: /note="Description of Artificial Sequence: Synthetic peptide"
LTSGKSQ

SEQ ID NO: 5948 - protein, 7 aa, Artificial Sequence
  source: /note="Description of Artificial Sequence: Synthetic peptide"
LTSGPLR

SEQ ID NO: 5949 - protein, 7 aa, Artificial Sequence
  source: /note="Description of Artificial Sequence: Synthetic peptide"
LTSHAQY

SEQ ID NO: 5950 - protein, 7 aa, Artificial Sequence
  source: /note="Description of Artificial Sequence: Synthetic peptide"
LTSKHLP

SEQ ID NO: 5951 - protein, 7 aa, Artificial Sequence
  source: /note="Description of Artificial Sequence: Synthetic peptide"
LTSKQGS

SEQ ID NO: 5952 - protein, 7 aa, Artificial Sequence
  source: /note="Description of Artificial Sequence: Synthetic peptide"
LTSLKSA

SEQ ID NO: 5953 - protein, 7 aa, Artificial Sequence
  source: /note="Description of Artificial Sequence: Synthetic peptide"
LTSLRTE

SEQ ID NO: 5954 - protein, 7 aa, Artificial Sequence
  source: /note="Description of Artificial Sequence: Synthetic peptide"
LTSLYGV

SEQ ID NO: 5955 - protein, 7 aa, Artificial Sequence
  source: /note="Description of Artificial Sequence: Synthetic peptide"
LTSNEMS

SEQ ID NO: 5956 - protein, 7 aa, Artificial Sequence
  source: /note="Description of Artificial Sequence: Synthetic peptide"
LTSNRAL

SEQ ID NO: 5957 - protein, 7 aa, Artificial Sequence
  source: /note="Description of Artificial Sequence: Synthetic peptide"
LTSRTVP

SEQ ID NO: 5958 - protein, 7 aa, Artificial Sequence
  source: /note="Description of Artificial Sequence: Synthetic peptide"
LTSTAQS

SEQ ID NO: 5959 - protein, 7 aa, Artificial Sequence
  source: /note="Description of Artificial Sequence: Synthetic peptide"
LTSTNGM

SEQ ID NO: 5960 - protein, 7 aa, Artificial Sequence
  source: /note="Description of Artificial Sequence: Synthetic peptide"
LTSTRLS

SEQ ID NO: 5961 - protein, 7 aa, Artificial Sequence
  source: /note="Description of Artificial Sequence: Synthetic peptide"
LTTARPL

SEQ ID NO: 5962 - protein, 7 aa, Artificial Sequence
  source: /note="Description of Artificial Sequence: Synthetic peptide"
LTTGAYG

SEQ ID NO: 5963 - protein, 7 aa, Artificial Sequence
  source: /note="Description of Artificial Sequence: Synthetic peptide"
LTTIRDV

SEQ ID NO: 5964 - protein, 7 aa, Artificial Sequence
  source: /note="Description of Artificial Sequence: Synthetic peptide"
LTTKAAN

SEQ ID NO: 5965 - protein, 7 aa, Artificial Sequence
  source: /note="Description of Artificial Sequence: Synthetic peptide"
LTTKNMA

SEQ ID NO: 5966 - protein, 7 aa, Artificial Sequence
  source: /note="Description of Artificial Sequence: Synthetic peptide"
LTTKRLD

SEQ ID NO: 5967 - protein, 7 aa, Artificial Sequence
  source: /note="Description of Artificial Sequence: Synthetic peptide"
LTTKSQD

SEQ ID NO: 5968 - protein, 7 aa, Artificial Sequence
  source: /note="Description of Artificial Sequence: Synthetic peptide"
LTTLHSK

SEQ ID NO: 5969 - protein, 7 aa, Artificial Sequence
  source: /note="Description of Artificial Sequence: Synthetic peptide"
LTTMNAF

SEQ ID NO: 5970 - protein, 7 aa, Artificial Sequence
  source: /note="Description of Artificial Sequence: Synthetic peptide"
LTTMRSN

SEQ ID NO: 5971 - protein, 7 aa, Artificial Sequence
  source: /note="Description of Artificial Sequence: Synthetic peptide"
LTTMSKA

SEQ ID NO: 5972 - protein, 7 aa, Artificial Sequence
  source: /note="Description of Artificial Sequence: Synthetic peptide"
LTTPLPH

SEQ ID NO: 5973 - protein, 7 aa, Artificial Sequence
  source: /note="Description of Artificial Sequence: Synthetic peptide"
LTTQEHW

SEQ ID NO: 5974 - protein, 7 aa, Artificial Sequence
  source: /note="Description of Artificial Sequence: Synthetic peptide"
LTTRPAF

SEQ ID NO: 5975 - protein, 7 aa, Artificial Sequence
  source: /note="Description of Artificial Sequence: Synthetic peptide"
LTTRSSP

SEQ ID NO: 5976 - protein, 7 aa, Artificial Sequence
  source: /note="Description of Artificial Sequence: Synthetic peptide"
LTTSLKP

SEQ ID NO: 5977 - protein, 7 aa, Artificial Sequence
  source: /note="Description of Artificial Sequence: Synthetic peptide"
LTTSSFT

SEQ ID NO: 5978 - protein, 7 aa, Artificial Sequence
  source: /note="Description of Artificial Sequence: Synthetic peptide"
LTTTINN

SEQ ID NO: 5979 - protein, 7 aa, Artificial Sequence
  source: /note="Description of Artificial Sequence: Synthetic peptide"
LTTTPAK

SEQ ID NO: 5980 - protein, 7 aa, Artificial Sequence
  source: /note="Description of Artificial Sequence: Synthetic peptide"
LTVGATI

SEQ ID NO: 5981 - protein, 7 aa, Artificial Sequence
  source: /note="Description of Artificial Sequence: Synthetic peptide"
LTVQETQ

SEQ ID NO: 5982 - protein, 7 aa, Artificial Sequence
  source: /note="Description of Artificial Sequence: Synthetic peptide"
LTVSAVK

SEQ ID NO: 5983 - protein, 7 aa, Artificial Sequence
  source: /note="Description of Artificial Sequence: Synthetic peptide"
LTVSNLP

SEQ ID NO: 5984 - protein, 7 aa, Artificial Sequence
  source: /note="Description of Artificial Sequence: Synthetic peptide"
LTVTWAE

SEQ ID NO: 5985 - protein, 7 aa, Artificial Sequence
  source: /note="Description of Artificial Sequence: Synthetic peptide"
LTVVPSG

SEQ ID NO: 5986 - protein, 7 aa, Artificial Sequence
  source: /note="Description of Artificial Sequence: Synthetic peptide"
LTYFVEE

SEQ ID NO: 5987 - protein, 7 aa, Artificial Sequence
  source: /note="Description of Artificial Sequence: Synthetic peptide"
LTYPGSQ

SEQ ID NO: 5988 - protein, 7 aa, Artificial Sequence
  source: /note="Description of Artificial Sequence: Synthetic peptide"
LTYRGGE

SEQ ID NO: 5989 - protein, 7 aa, Artificial Sequence
  source: /note="Description of Artificial Sequence: Synthetic peptide"
LTYSPQT

SEQ ID NO: 5990 - protein, 7 aa, Artificial Sequence
  source: /note="Description of Artificial Sequence: Synthetic peptide"
LTYSRSD

SEQ ID NO: 5991 - protein, 7 aa, Artificial Sequence
  source: /note="Description of Artificial Sequence: Synthetic peptide"
LVAKMTP

SEQ ID NO: 5992 - protein, 7 aa, Artificial Sequence
  source: /note="Description of Artificial Sequence: Synthetic peptide"
LVARGGA

SEQ ID NO: 5993 - protein, 7 aa, Artificial Sequence
  source: /note="Description of Artificial Sequence: Synthetic peptide"
LVATQAP

SEQ ID NO: 5994 - protein, 7 aa, Artificial Sequence
  source: /note="Description of Artificial Sequence: Synthetic peptide"
LVAVSTT

SEQ ID NO: 5995 - protein, 7 aa, Artificial Sequence
  source: /note="Description of Artificial Sequence: Synthetic peptide"
LVDSRTM

SEQ ID NO: 5996 - protein, 7 aa, Artificial Sequence
  source: /note="Description of Artificial Sequence: Synthetic peptide"
LVEGLID

SEQ ID NO: 5997 - protein, 7 aa, Artificial Sequence
  source: /note="Description of Artificial Sequence: Synthetic peptide"
LVENRRE

SEQ ID NO: 5998 - protein, 7 aa, Artificial Sequence
  source: /note="Description of Artificial Sequence: Synthetic peptide"
LVEPMKH

SEQ ID NO: 5999 - protein, 7 aa, Artificial Sequence
  source: /note="Description of Artificial Sequence: Synthetic peptide"
LVETKGS

SEQ ID NO: 6000 - protein, 7 aa, Artificial Sequence
  source: /note="Description of Artificial Sequence: Synthetic peptide"
LVETLTH

SEQ ID NO: 6001 - protein, 7 aa, Artificial Sequence
  source: /note="Description of Artificial Sequence: Synthetic peptide"
LVGESHI

SEQ ID NO: 6002 - protein, 7 aa, Artificial Sequence
  source: /note="Description of Artificial Sequence: Synthetic peptide"
LVGHPTP

SEQ ID NO: 6003 - protein, 7 aa, Artificial Sequence
  source: /note="Description of Artificial Sequence: Synthetic peptide"
LVGHTGS

SEQ ID NO: 6004 - protein, 7 aa, Artificial Sequence
  source: /note="Description of Artificial Sequence: Synthetic peptide"
LVGQVAV

SEQ ID NO: 6005 - protein, 7 aa, Artificial Sequence
  source: /note="Description of Artificial Sequence: Synthetic peptide"
LVGRACC

SEQ ID NO: 6006 - protein, 7 aa, Artificial Sequence
  source: /note="Description of Artificial Sequence: Synthetic peptide"
LVGRLST

SEQ ID NO: 6007 - protein, 7 aa, Artificial Sequence
  source: /note="Description of Artificial Sequence: Synthetic peptide"
LVGSPPS

SEQ ID NO: 6008 - protein, 7 aa, Artificial Sequence
  source: /note="Description of Artificial Sequence: Synthetic peptide"
LVHLMTD

SEQ ID NO: 6009 - protein, 7 aa, Artificial Sequence
  source: /note="Description of Artificial Sequence: Synthetic peptide"
LVHNRTS

SEQ ID NO: 6010 - protein, 7 aa, Artificial Sequence
  source: /note="Description of Artificial Sequence: Synthetic peptide"
LVHYSPD

SEQ ID NO: 6011 - protein, 7 aa, Artificial Sequence
  source: /note="Description of Artificial Sequence: Synthetic peptide"
LVIPGPG

SEQ ID NO: 6012 - protein, 7 aa, Artificial Sequence
  source: /note="Description of Artificial Sequence: Synthetic peptide"
LVKESPT

SEQ ID NO: 6013 - protein, 7 aa, Artificial Sequence
  source: /note="Description of Artificial Sequence: Synthetic peptide"
LVKGGPN

SEQ ID NO: 6014 - protein, 7 aa, Artificial Sequence
  source: /note="Description of Artificial Sequence: Synthetic peptide"
LVKQTTL

SEQ ID NO: 6015 - protein, 7 aa, Artificial Sequence
  source: /note="Description of Artificial Sequence: Synthetic peptide"
LVKSVDQ

SEQ ID NO: 6016 - protein, 7 aa, Artificial Sequence
  source: /note="Description of Artificial Sequence: Synthetic peptide"
LVLGPPA

SEQ ID NO: 6017 - protein, 7 aa, Artificial Sequence
  source: /note="Description of Artificial Sequence: Synthetic peptide"
LVLGSKS

SEQ ID NO: 6018 - protein, 7 aa, Artificial Sequence
  source: /note="Description of Artificial Sequence: Synthetic peptide"
LVLNNDG

SEQ ID NO: 6019 - protein, 7 aa, Artificial Sequence
  source: /note="Description of Artificial Sequence: Synthetic peptide"
LVLPARQ

SEQ ID NO: 6020 - protein, 7 aa, Artificial Sequence
  source: /note="Description of Artificial Sequence: Synthetic peptide"
LVLPQKS

SEQ ID NO: 6021 - protein, 7 aa, Artificial Sequence
  source: /note="Description of Artificial Sequence: Synthetic peptide"
LVLSNAS

SEQ ID NO: 6022 - protein, 7 aa, Artificial Sequence
  source: /note="Description of Artificial Sequence: Synthetic peptide"
LVMSPAP

SEQ ID NO: 6023 - protein, 7 aa, Artificial Sequence
  source: /note="Description of Artificial Sequence: Synthetic peptide"
LVMSTRA

SEQ ID NO: 6024 - protein, 7 aa, Artificial Sequence
  source: /note="Description of Artificial Sequence: Synthetic peptide"
LVMTSGS

SEQ ID NO: 6025 - protein, 7 aa, Artificial Sequence
  source: /note="Description of Artificial Sequence: Synthetic peptide"
LVNDCCT

SEQ ID NO: 6026 - protein, 7 aa, Artificial Sequence
  source: /note="Description of Artificial Sequence: Synthetic peptide"
LVNETTR

SEQ ID NO: 6027 - protein, 7 aa, Artificial Sequence
  source: /note="Description of Artificial Sequence: Synthetic peptide"
LVNKLGP

SEQ ID NO: 6028 - protein, 7 aa, Artificial Sequence
  source: /note="Description of Artificial Sequence: Synthetic peptide"
LVNKSYN

SEQ ID NO: 6029 - protein, 7 aa, Artificial Sequence
  source: /note="Description of Artificial Sequence: Synthetic peptide"
LVNPGTR

SEQ ID NO: 6030 - protein, 7 aa, Artificial Sequence
  source: /note="Description of Artificial Sequence: Synthetic peptide"
LVNSKDS

SEQ ID NO: 6031 - protein, 7 aa, Artificial Sequence
  source: /note="Description of Artificial Sequence: Synthetic peptide"
LVNTPTE

SEQ ID NO: 6032 - protein, 7 aa, Artificial Sequence
  source: /note="Description of Artificial Sequence: Synthetic peptide"
LVPARSG

SEQ ID NO: 6033 - protein, 7 aa, Artificial Sequence
  source: /note="Description of Artificial Sequence: Synthetic peptide"
LVPGLTG

SEQ ID NO: 6034 - protein, 7 aa, Artificial Sequence
  source: /note="Description of Artificial Sequence: Synthetic peptide"
LVPGMIT

SEQ ID NO: 6035 - protein, 7 aa, Artificial Sequence
  source: /note="Description of Artificial Sequence: Synthetic peptide"
LVPGVHS

SEQ ID NO: 6036 - protein, 7 aa, Artificial Sequence
  source: /note="Description of Artificial Sequence: Synthetic peptide"
LVPHSNF

SEQ ID NO: 6037 - protein, 7 aa, Artificial Sequence
  source: /note="Description of Artificial Sequence: Synthetic peptide"
LVPKHMN

SEQ ID NO: 6038 - protein, 7 aa, Artificial Sequence
  source: /note="Description of Artificial Sequence: Synthetic peptide"
LVPLLPA

SEQ ID NO: 6039 - protein, 7 aa, Artificial Sequence
  source: /note="Description of Artificial Sequence: Synthetic peptide"
LVPLPHS

SEQ ID NO: 6040 - protein, 7 aa, Artificial Sequence
  source: /note="Description of Artificial Sequence: Synthetic peptide"
LVPLYTE

SEQ ID NO: 6041 - protein, 7 aa, Artificial Sequence
  source: /note="Description of Artificial Sequence: Synthetic peptide"
LVPNFQP

SEQ ID NO: 6042 - protein, 7 aa, Artificial Sequence
  source: /note="Description of Artificial Sequence: Synthetic peptide"
LVPNSAE

SEQ ID NO: 6043 - protein, 7 aa, Artificial Sequence
  source: /note="Description of Artificial Sequence: Synthetic peptide"
LVPRAAD

SEQ ID NO: 6044 - protein, 7 aa, Artificial Sequence
  source: /note="Description of Artificial Sequence: Synthetic peptide"
LVPRNSL

SEQ ID NO: 6045 - protein, 7 aa, Artificial Sequence
  source: /note="Description of Artificial Sequence: Synthetic peptide"
LVPSIQT

SEQ ID NO: 6046 - protein, 7 aa, Artificial Sequence
  source: /note="Description of Artificial Sequence: Synthetic peptide"
LVPSLEQ

SEQ ID NO: 6047 - protein, 7 aa, Artificial Sequence
  source: /note="Description of Artificial Sequence: Synthetic peptide"
LVPVSLS

SEQ ID NO: 6048 - protein, 7 aa, Artificial Sequence
  source: /note="Description of Artificial Sequence: Synthetic peptide"
LVQLDVA

SEQ ID NO: 6049 - protein, 7 aa, Artificial Sequence
  source: /note="Description of Artificial Sequence: Synthetic peptide"
LVQSLGM

SEQ ID NO: 6050 - protein, 7 aa, Artificial Sequence
  source: /note="Description of Artificial Sequence: Synthetic peptide"
LVRAMDT

SEQ ID NO: 6051 - protein, 7 aa, Artificial Sequence
  source: /note="Description of Artificial Sequence: Synthetic peptide"
LVRGASH

SEQ ID NO: 6052 - protein, 7 aa, Artificial Sequence
  source: /note="Description of Artificial Sequence: Synthetic peptide"
LVRHDNL

SEQ ID NO: 6053 - protein, 7 aa, Artificial Sequence
  source: /note="Description of Artificial Sequence: Synthetic peptide"
LVRNGLS

SEQ ID NO: 6054 - protein, 7 aa, Artificial Sequence
  source: /note="Description of Artificial Sequence: Synthetic peptide"
LVRPSPA

SEQ ID NO: 6055 - protein, 7 aa, Artificial Sequence
  source: /note="Description of Artificial Sequence: Synthetic peptide"
LVSGHHM

SEQ ID NO: 6056 - protein, 7 aa, Artificial Sequence
  source: /note="Description of Artificial Sequence: Synthetic peptide"
LVSGNRV

SEQ ID NO: 6057 - protein, 7 aa, Artificial Sequence
  source: /note="Description of Artificial Sequence: Synthetic peptide"
LVSGTDR

SEQ ID NO: 6058 - protein, 7 aa, Artificial Sequence
  source: /note="Description of Artificial Sequence: Synthetic peptide"
LVSHPRP

SEQ ID NO: 6059 - protein, 7 aa, Artificial Sequence
  source: /note="Description of Artificial Sequence: Synthetic peptide"
LVSHRSA

SEQ ID NO: 6060 - protein, 7 aa, Artificial Sequence
  source: /note="Description of Artificial Sequence: Synthetic peptide"
LVSKDES

SEQ ID NO: 6061 - protein, 7 aa, Artificial Sequence
  source: /note="Description of Artificial Sequence: Synthetic peptide"
LVSPARP

SEQ ID NO: 6062 - protein, 7 aa, Artificial Sequence
  source: /note="Description of Artificial Sequence: Synthetic peptide"
LVSPEEG

SEQ ID NO: 6063 - protein, 7 aa, Artificial Sequence
  source: /note="Description of Artificial Sequence: Synthetic peptide"
LVSPSLT

SEQ ID NO: 6064 - protein, 7 aa, Artificial Sequence
  source: /note="Description of Artificial Sequence: Synthetic peptide"
LVSSKHP

SEQ ID NO: 6065 - protein, 7 aa, Artificial Sequence
  source: /note="Description of Artificial Sequence: Synthetic peptide"
LVSSPRT

SEQ ID NO: 6066 - protein, 7 aa, Artificial Sequence
  source: /note="Description of Artificial Sequence: Synthetic peptide"
LVSTMTE

SEQ ID NO: 6067 - protein, 7 aa, Artificial Sequence
  source: /note="Description of Artificial Sequence: Synthetic peptide"
LVTAGPL

SEQ ID NO: 6068 - protein, 7 aa, Artificial Sequence
  source: /note="Description of Artificial Sequence: Synthetic peptide"
LVTAPTP

SEQ ID NO: 6069 - protein, 7 aa, Artificial Sequence
  source: /note="Description of Artificial Sequence: Synthetic peptide"
LVTAQHP

SEQ ID NO: 6070 - protein, 7 aa, Artificial Sequence
  source: /note="Description of Artificial Sequence: Synthetic peptide"
LVTGDAS

SEQ ID NO: 6071 - protein, 7 aa, Artificial Sequence
  source: /note="Description of Artificial Sequence: Synthetic peptide"
LVTHNYA

SEQ ID NO: 6072 - protein, 7 aa, Artificial Sequence
  source: /note="Description of Artificial Sequence: Synthetic peptide"
LVTMRPV

SEQ ID NO: 6073 - protein, 7 aa, Artificial Sequence
  source: /note="Description of Artificial Sequence: Synthetic peptide"
LVTNAHS

SEQ ID NO: 6074 - protein, 7 aa, Artificial Sequence
  source: /note="Description of Artificial Sequence: Synthetic peptide"
LVTPGDR

SEQ ID NO: 6075 - protein, 7 aa, Artificial Sequence
  source: /note="Description of Artificial Sequence: Synthetic peptide"
LVTQSNE

SEQ ID NO: 6076 - protein, 7 aa, Artificial Sequence
  source: /note="Description of Artificial Sequence: Synthetic peptide"
LVTYTPM

SEQ ID NO: 6077 - protein, 7 aa, Artificial Sequence
  source: /note="Description of Artificial Sequence: Synthetic peptide"
LVVAAHL

SEQ ID NO: 6078 - protein, 7 aa, Artificial Sequence
  source: /note="Description of Artificial Sequence: Synthetic peptide"
LVVAERI

SEQ ID NO: 6079 - protein, 7 aa, Artificial Sequence
  source: /note="Description of Artificial Sequence: Synthetic peptide"
LVVDEMT

SEQ ID NO: 6080 - protein, 7 aa, Artificial Sequence
  source: /note="Description of Artificial Sequence: Synthetic peptide"
LVVNRMD

SEQ ID NO: 6081 - protein, 7 aa, Artificial Sequence
  source: /note="Description of Artificial Sequence: Synthetic peptide"
LVVPGNG

SEQ ID NO: 6082 - protein, 7 aa, Artificial Sequence
  source: /note="Description of Artificial Sequence: Synthetic peptide"
LVYGHDH

SEQ ID NO: 6083 - protein, 7 aa, Artificial Sequence
  source: /note="Description of Artificial Sequence: Synthetic peptide"
LVYTSTS

SEQ ID NO: 6084 - protein, 7 aa, Artificial Sequence
  source: /note="Description of Artificial Sequence: Synthetic peptide"
LWDLGNP

SEQ ID NO: 6085 - protein, 7 aa, Artificial Sequence
  source: /note="Description of Artificial Sequence: Synthetic peptide"
LWETSTD

SEQ ID NO: 6086 - protein, 7 aa, Artificial Sequence
  source: /note="Description of Artificial Sequence: Synthetic peptide"
LWGDGTL

SEQ ID NO: 6087 - protein, 7 aa, Artificial Sequence
  source: /note="Description of Artificial Sequence: Synthetic peptide"
LWNKPDD

SEQ ID NO: 6088 - protein, 7 aa, Artificial Sequence
  source: /note="Description of Artificial Sequence: Synthetic peptide"
LWNSNTA

SEQ ID NO: 6089 - protein, 7 aa, Artificial Sequence
  source: /note="Description of Artificial Sequence: Synthetic peptide"
LWQSEVD

SEQ ID NO: 6090 - protein, 7 aa, Artificial Sequence
  source: /note="Description of Artificial Sequence: Synthetic peptide"
LWRADDA

SEQ ID NO: 6091 - protein, 7 aa, Artificial Sequence
  source: /note="Description of Artificial Sequence: Synthetic peptide"
LWRSSTT

SEQ ID NO: 6092 - protein, 7 aa, Artificial Sequence
  source: /note="Description of Artificial Sequence: Synthetic peptide"
LWTAERD

SEQ ID NO: 6093 - protein, 7 aa, Artificial Sequence
  source: /note="Description of Artificial Sequence: Synthetic peptide"
LWTGSGP

SEQ ID NO: 6094 - protein, 7 aa, Artificial Sequence
  source: /note="Description of Artificial Sequence: Synthetic peptide"
LWTNQPS

SEQ ID NO: 6095 - protein, 7 aa, Artificial Sequence
  source: /note="Description of Artificial Sequence: Synthetic peptide"
LYANSKP

SEQ ID NO: 6096 - protein, 7 aa, Artificial Sequence
  source: /note="Description of Artificial Sequence: Synthetic peptide"
LYDLRGA

SEQ ID NO: 6097 - protein, 7 aa, Artificial Sequence
  source: /note="Description of Artificial Sequence: Synthetic peptide"
LYDSQDT

SEQ ID NO: 6098 - protein, 7 aa, Artificial Sequence
  source: /note="Description of Artificial Sequence: Synthetic peptide"
LYDTSLL

SEQ ID NO: 6099 - protein, 7 aa, Artificial Sequence
  source: /note="Description of Artificial Sequence: Synthetic peptide"
LYEHSSP

SEQ ID NO: 6100 - protein, 7 aa, Artificial Sequence
  source: /note="Description of Artificial Sequence: Synthetic peptide"
LYEYPSG

SEQ ID NO: 6101 - protein, 7 aa, Artificial Sequence
  source: /note="Description of Artificial Sequence: Synthetic peptide"
LYGSLVP

SEQ ID NO: 6102 - protein, 7 aa, Artificial Sequence
  source: /note="Description of Artificial Sequence: Synthetic peptide"
LYGTSAI

SEQ ID NO: 6103 - protein, 7 aa, Artificial Sequence
  source: /note="Description of Artificial Sequence: Synthetic peptide"
LYKSPET

SEQ ID NO: 6104 - protein, 7 aa, Artificial Sequence
  source: /note="Description of Artificial Sequence: Synthetic peptide"
LYLGSKD

SEQ ID NO: 6105 - protein, 7 aa, Artificial Sequence
  source: /note="Description of Artificial Sequence: Synthetic peptide"
LYLQNDK

SEQ ID NO: 6106 - protein, 7 aa, Artificial Sequence
  source: /note="Description of Artificial Sequence: Synthetic peptide"
LYLTSLD

SEQ ID NO: 6107 - protein, 7 aa, Artificial Sequence
  source: /note="Description of Artificial Sequence: Synthetic peptide"
LYNDFSF

SEQ ID NO: 6108 - protein, 7 aa, Artificial Sequence
  source: /note="Description of Artificial Sequence: Synthetic peptide"
LYNSSDS

SEQ ID NO: 6109 - protein, 7 aa, Artificial Sequence
  source: /note="Description of Artificial Sequence: Synthetic peptide"
LYPHAPS

SEQ ID NO: 6110 - protein, 7 aa, Artificial Sequence
  source: /note="Description of Artificial Sequence: Synthetic peptide"
LYPLQTA

SEQ ID NO: 6111 - protein, 7 aa, Artificial Sequence
  source: /note="Description of Artificial Sequence: Synthetic peptide"
LYQGSNS

SEQ ID NO: 6112 - protein, 7 aa, Artificial Sequence
  source: /note="Description of Artificial Sequence: Synthetic peptide"
LYQGYSA

SEQ ID NO: 6113 - protein, 7 aa, Artificial Sequence
  source: /note="Description of Artificial Sequence: Synthetic peptide"
LYSAASK

SEQ ID NO: 6114 - protein, 7 aa, Artificial Sequence
  source: /note="Description of Artificial Sequence: Synthetic peptide"
LYSEVGL

SEQ ID NO: 6115 - protein, 7 aa, Artificial Sequence
  source: /note="Description of Artificial Sequence: Synthetic peptide"
LYSGTIP

SEQ ID NO: 6116 - protein, 7 aa, Artificial Sequence
  source: /note="Description of Artificial Sequence: Synthetic peptide"
LYSNPNV

SEQ ID NO: 6117 - protein, 7 aa, Artificial Sequence
  source: /note="Description of Artificial Sequence: Synthetic peptide"
LYSPLSN

SEQ ID NO: 6118 - protein, 7 aa, Artificial Sequence
  source: /note="Description of Artificial Sequence: Synthetic peptide"
LYTATAK

SEQ ID NO: 6119 - protein, 7 aa, Artificial Sequence
  source: /note="Description of Artificial Sequence: Synthetic peptide"
LYTDSAF

SEQ ID NO: 6120 - protein, 7 aa, Artificial Sequence
  source: /note="Description of Artificial Sequence: Synthetic peptide"
LYTGLGT

SEQ ID NO: 6121 - protein, 7 aa, Artificial Sequence
  source: /note="Description of Artificial Sequence: Synthetic peptide"
LYTKNEG

SEQ ID NO: 6122 - protein, 7 aa, Artificial Sequence
  source: /note="Description of Artificial Sequence: Synthetic peptide"
LYTKSVP

SEQ ID NO: 6123 - protein, 7 aa, Artificial Sequence
  source: /note="Description of Artificial Sequence: Synthetic peptide"
LYTPNGA

SEQ ID NO: 6124 - protein, 7 aa, Artificial Sequence
  source: /note="Description of Artificial Sequence: Synthetic peptide"
LYTSLPQ

SEQ ID NO: 6125 - protein, 7 aa, Artificial Sequence
  source: /note="Description of Artificial Sequence: Synthetic peptide"
LYTSSGS

SEQ ID NO: 6126 - protein, 7 aa, Artificial Sequence
  source: /note="Description of Artificial Sequence: Synthetic peptide"
LYTVTSG

SEQ ID NO: 6127 - protein, 7 aa, Artificial Sequence
  source: /note="Description of Artificial Sequence: Synthetic peptide"
LYVSEKP

SEQ ID NO: 6128 - protein, 7 aa, Artificial Sequence
  source: /note="Description of Artificial Sequence: Synthetic peptide"
LYYPSTE

SEQ ID NO: 6129 - protein, 7 aa, Artificial Sequence
  source: /note="Description of Artificial Sequence: Synthetic peptide"
MAALNDF

SEQ ID NO: 6130 - protein, 7 aa, Artificial Sequence
  source: /note="Description of Artificial Sequence: Synthetic peptide"
MAAQDYA

SEQ ID NO: 6131 - protein, 7 aa, Artificial Sequence
  source: /note="Description of Artificial Sequence: Synthetic peptide"
MAARTSN

SEQ ID NO: 6132 - protein, 7 aa, Artificial Sequence
  source: /note="Description of Artificial Sequence: Synthetic peptide"
MAASKTF

SEQ ID NO: 6133 - protein, 7 aa, Artificial Sequence
  source: /note="Description of Artificial Sequence: Synthetic peptide"
MAEFVHR

SEQ ID NO: 6134 - protein, 7 aa, Artificial Sequence
  source: /note="Description of Artificial Sequence: Synthetic peptide"
MAGKASH

SEQ ID NO: 6135 - protein, 7 aa, Artificial Sequence
  source: /note="Description of Artificial Sequence: Synthetic peptide"
MAGNLVT

SEQ ID NO: 6136 - protein, 7 aa, Artificial Sequence
  source: /note="Description of Artificial Sequence: Synthetic peptide"
MAKLTVS

SEQ ID NO: 6137 - protein, 7 aa, Artificial Sequence
  source: /note="Description of Artificial Sequence: Synthetic peptide"
MALQGSL

SEQ ID NO: 6138 - protein, 7 aa, Artificial Sequence
  source: /note="Description of Artificial Sequence: Synthetic peptide"
MALRLVN

SEQ ID NO: 6139 - protein, 7 aa, Artificial Sequence
  source: /note="Description of Artificial Sequence: Synthetic peptide"
MANMSSP

SEQ ID NO: 6140 - protein, 7 aa, Artificial Sequence
  source: /note="Description of Artificial Sequence: Synthetic peptide"
MAPVRVP

SEQ ID NO: 6141 - protein, 7 aa, Artificial Sequence
  source: /note="Description of Artificial Sequence: Synthetic peptide"
MARALPP

SEQ ID NO: 6142 - protein, 7 aa, Artificial Sequence
  source: /note="Description of Artificial Sequence: Synthetic peptide"
MARDVDR

SEQ ID NO: 6143 - protein, 7 aa, Artificial Sequence
  source: /note="Description of Artificial Sequence: Synthetic peptide"
MARETTY

SEQ ID NO: 6144 - protein, 7 aa, Artificial Sequence
  source: /note="Description of Artificial Sequence: Synthetic peptide"
MASATPV

SEQ ID NO: 6145 - protein, 7 aa, Artificial Sequence
  source: /note="Description of Artificial Sequence: Synthetic peptide"
MASGQSL

SEQ ID NO: 6146 - protein, 7 aa, Artificial Sequence
  source: /note="Description of Artificial Sequence: Synthetic peptide"
MASHVPV

SEQ ID NO: 6147 - protein, 7 aa, Artificial Sequence
  source: /note="Description of Artificial Sequence: Synthetic peptide"
MASPYSS

SEQ ID NO: 6148 - protein, 7 aa, Artificial Sequence
  source: /note="Description of Artificial Sequence: Synthetic peptide"
MASQIRP

SEQ ID NO: 6149 - protein, 7 aa, Artificial Sequence
  source: /note="Description of Artificial Sequence: Synthetic peptide"
MASSYND

SEQ ID NO: 6150 - protein, 7 aa, Artificial Sequence
  source: /note="Description of Artificial Sequence: Synthetic peptide"
MASTESR

SEQ ID NO: 6151 - protein, 7 aa, Artificial Sequence
  source: /note="Description of Artificial Sequence: Synthetic peptide"
MATAPLH

SEQ ID NO: 6152 - protein, 7 aa, Artificial Sequence
  source: /note="Description of Artificial Sequence: Synthetic peptide"
MATDRRY

SEQ ID NO: 6153 - protein, 7 aa, Artificial Sequence
  source: /note="Description of Artificial Sequence: Synthetic peptide"
MATHVMG

SEQ ID NO: 6154 - protein, 7 aa, Artificial Sequence
  source: /note="Description of Artificial Sequence: Synthetic peptide"
MAVKVGE

SEQ ID NO: 6155 - protein, 7 aa, Artificial Sequence
  source: /note="Description of Artificial Sequence: Synthetic peptide"
MAYQPTL

SEQ ID NO: 6156 - protein, 7 aa, Artificial Sequence
  source: /note="Description of Artificial Sequence: Synthetic peptide"
MAYQQIP

SEQ ID NO: 6157 - protein, 7 aa, Artificial Sequence
  source: /note="Description of Artificial Sequence: Synthetic peptide"
MCDSDRP

SEQ ID NO: 6158 - protein, 7 aa, Artificial Sequence
  source: /note="Description of Artificial Sequence: Synthetic peptide"
MDDRAGF

SEQ ID NO: 6159 - protein, 7 aa, Artificial Sequence
  source: /note="Description of Artificial Sequence: Synthetic peptide"
MDEPEPS

SEQ ID NO: 6160 - protein, 7 aa, Artificial Sequence
  source: /note="Description of Artificial Sequence: Synthetic peptide"
MDKILTS

SEQ ID NO: 6161 - protein, 7 aa, Artificial Sequence
  source: /note="Description of Artificial Sequence: Synthetic peptide"
MDLTGPV

SEQ ID NO: 6162 - protein, 7 aa, Artificial Sequence
  source: /note="Description of Artificial Sequence: Synthetic peptide"
MDMGGSP

SEQ ID NO: 6163 - protein, 7 aa, Artificial Sequence
  source: /note="Description of Artificial Sequence: Synthetic peptide"
MDNLRQS

SEQ ID NO: 6164 - protein, 7 aa, Artificial Sequence
  source: /note="Description of Artificial Sequence: Synthetic peptide"
MDRALHG

SEQ ID NO: 6165 - protein, 7 aa, Artificial Sequence
  source: /note="Description of Artificial Sequence: Synthetic peptide"
MDRMTLM

SEQ ID NO: 6166 - protein, 7 aa, Artificial Sequence
  source: /note="Description of Artificial Sequence: Synthetic peptide"
MDRNFVM

SEQ ID NO: 6167 - protein, 7 aa, Artificial Sequence
  source: /note="Description of Artificial Sequence: Synthetic peptide"
MDRPSTS

SEQ ID NO: 6168 - protein, 7 aa, Artificial Sequence
  source: /note="Description of Artificial Sequence: Synthetic peptide"
MDSADYE

SEQ ID NO: 6169 - protein, 7 aa, Artificial Sequence
  source: /note="Description of Artificial Sequence: Synthetic peptide"
MDSLPPP

SEQ ID NO: 6170 - protein, 7 aa, Artificial Sequence
  source: /note="Description of Artificial Sequence: Synthetic peptide"
MDSRTLL

SEQ ID NO: 6171 - protein, 7 aa, Artificial Sequence
  source: /note="Description of Artificial Sequence: Synthetic peptide"
MDSTSPP

SEQ ID NO: 6172 - protein, 7 aa, Artificial Sequence
  source: /note="Description of Artificial Sequence: Synthetic peptide"
MDVSHGS

SEQ ID NO: 6173 - protein, 7 aa, Artificial Sequence
  source: /note="Description of Artificial Sequence: Synthetic peptide"
MEFGTTP

SEQ ID NO: 6174 - protein, 7 aa, Artificial Sequence
  source: /note="Description of Artificial Sequence: Synthetic peptide"
MEFVSTF

SEQ ID NO: 6175 - protein, 7 aa, Artificial Sequence
  source: /note="Description of Artificial Sequence: Synthetic peptide"
MEGSGRN

SEQ ID NO: 6176 - protein, 7 aa, Artificial Sequence
  source: /note="Description of Artificial Sequence: Synthetic peptide"
MEIESLN

SEQ ID NO: 6177 - protein, 7 aa, Artificial Sequence
  source: /note="Description of Artificial Sequence: Synthetic peptide"
MEITRAP

SEQ ID NO: 6178 - protein, 7 aa, Artificial Sequence
  source: /note="Description of Artificial Sequence: Synthetic peptide"
MEKATPS

SEQ ID NO: 6179 - protein, 7 aa, Artificial Sequence
  source: /note="Description of Artificial Sequence: Synthetic peptide"
MEKLKQN

SEQ ID NO: 6180 - protein, 7 aa, Artificial Sequence
  source: /note="Description of Artificial Sequence: Synthetic peptide"
MELIEGP

SEQ ID NO: 6181 - protein, 7 aa, Artificial Sequence
  source: /note="Description of Artificial Sequence: Synthetic peptide"
MENTTRS

SEQ ID NO: 6182 - protein, 7 aa, Artificial Sequence
  source: /note="Description of Artificial Sequence: Synthetic peptide"
MEPKRSY

SEQ ID NO: 6183 - protein, 7 aa, Artificial Sequence
  source: /note="Description of Artificial Sequence: Synthetic peptide"
MEPPINP

SEQ ID NO: 6184 - protein, 7 aa, Artificial Sequence
  source: /note="Description of Artificial Sequence: Synthetic peptide"
MERTLCN

SEQ ID NO: 6185 - protein, 7 aa, Artificial Sequence
  source: /note="Description of Artificial Sequence: Synthetic peptide"
MESLGLA

SEQ ID NO: 6186 - protein, 7 aa, Artificial Sequence
  source: /note="Description of Artificial Sequence: Synthetic peptide"
MESNHSR

SEQ ID NO: 6187 - protein, 7 aa, Artificial Sequence
  source: /note="Description of Artificial Sequence: Synthetic peptide"
MESRPSY

SEQ ID NO: 6188 - protein, 7 aa, Artificial Sequence
  source: /note="Description of Artificial Sequence: Synthetic peptide"
METKSIS

SEQ ID NO: 6189 - protein, 7 aa, Artificial Sequence
  source: /note="Description of Artificial Sequence: Synthetic peptide"
METNWPA

SEQ ID NO: 6190 - protein, 7 aa, Artificial Sequence
  source: /note="Description of Artificial Sequence: Synthetic peptide"
METSHRM

SEQ ID NO: 6191 - protein, 7 aa, Artificial Sequence
  source: /note="Description of Artificial Sequence: Synthetic peptide"
MFGNAEY

SEQ ID NO: 6192 - protein, 7 aa, Artificial Sequence
  source: /note="Description of Artificial Sequence: Synthetic peptide"
MFGTSQD

SEQ ID NO: 6193 - protein, 7 aa, Artificial Sequence
  source: /note="Description of Artificial Sequence: Synthetic peptide"
MFLKVSP

SEQ ID NO: 6194 - protein, 7 aa, Artificial Sequence
  source: /note="Description of Artificial Sequence: Synthetic peptide"
MFRVVSD

SEQ ID NO: 6195 - protein, 7 aa, Artificial Sequence
  source: /note="Description of Artificial Sequence: Synthetic peptide"
MFSSTKP

SEQ ID NO: 6196 - protein, 7 aa, Artificial Sequence
  source: /note="Description of Artificial Sequence: Synthetic peptide"
MFTDSRS

SEQ ID NO: 6197 - protein, 7 aa, Artificial Sequence
  source: /note="Description of Artificial Sequence: Synthetic peptide"
MFVNELK

SEQ ID NO: 6198 - protein, 7 aa, Artificial Sequence
  source: /note="Description of Artificial Sequence: Synthetic peptide"
MGATHPR

SEQ ID NO: 6199 - protein, 7 aa, Artificial Sequence
  source: /note="Description of Artificial Sequence: Synthetic peptide"
MGDRSRN

SEQ ID NO: 6200 - protein, 7 aa, Artificial Sequence
  source: /note="Description of Artificial Sequence: Synthetic peptide"
MGDYTTK

SEQ ID NO: 6201 - protein, 7 aa, Artificial Sequence
  source: /note="Description of Artificial Sequence: Synthetic peptide"
MGERLFS

SEQ ID NO: 6202 - protein, 7 aa, Artificial Sequence
  source: /note="Description of Artificial Sequence: Synthetic peptide"
MGGHGRT

SEQ ID NO: 6203 - protein, 7 aa, Artificial Sequence
  source: /note="Description of Artificial Sequence: Synthetic peptide"
MGGNSPF

SEQ ID NO: 6204 - protein, 7 aa, Artificial Sequence
  source: /note="Description of Artificial Sequence: Synthetic peptide"
MGGTRGT

SEQ ID NO: 6205 - protein, 7 aa, Artificial Sequence
  source: /note="Description of Artificial Sequence: Synthetic peptide"
MGGTYCR

SEQ ID NO: 6206 - protein, 7 aa, Artificial Sequence
  source: /note="Description of Artificial Sequence: Synthetic peptide"
MGHSDTP

SEQ ID NO: 6207 - protein, 7 aa, Artificial Sequence
  source: /note="Description of Artificial Sequence: Synthetic peptide"
MGHTPRE

SEQ ID NO: 6208 - protein, 7 aa, Artificial Sequence
  source: /note="Description of Artificial Sequence: Synthetic peptide"
MGKTAER

SEQ ID NO: 6209 - protein, 7 aa, Artificial Sequence
  source: /note="Description of Artificial Sequence: Synthetic peptide"
MGLGSSN

SEQ ID NO: 6210 - protein, 7 aa, Artificial Sequence
  source: /note="Description of Artificial Sequence: Synthetic peptide"
MGLRPEG

SEQ ID NO: 6211 - protein, 7 aa, Artificial Sequence
  source: /note="Description of Artificial Sequence: Synthetic peptide"
MGMHGTS

SEQ ID NO: 6212 - protein, 7 aa, Artificial Sequence
  source: /note="Description of Artificial Sequence: Synthetic peptide"
MGNHAGS

SEQ ID NO: 6213 - protein, 7 aa, Artificial Sequence
  source: /note="Description of Artificial Sequence: Synthetic peptide"
MGNSLKQ

SEQ ID NO: 6214 - protein, 7 aa, Artificial Sequence
  source: /note="Description of Artificial Sequence: Synthetic peptide"
MGPDGSI

SEQ ID NO: 6215 - protein, 7 aa, Artificial Sequence
  source: /note="Description of Artificial Sequence: Synthetic peptide"
MGPITPQ

SEQ ID NO: 6216 - protein, 7 aa, Artificial Sequence
  source: /note="Description of Artificial Sequence: Synthetic peptide"
MGQNMAL

SEQ ID NO: 6217 - protein, 7 aa, Artificial Sequence
  source: /note="Description of Artificial Sequence: Synthetic peptide"
MGRDEPG

SEQ ID NO: 6218 - protein, 7 aa, Artificial Sequence
  source: /note="Description of Artificial Sequence: Synthetic peptide"
MGSGYTM

SEQ ID NO: 6219 - protein, 7 aa, Artificial Sequence
  source: /note="Description of Artificial Sequence: Synthetic peptide"
MGSTIAL

SEQ ID NO: 6220 - protein, 7 aa, Artificial Sequence
  source: /note="Description of Artificial Sequence: Synthetic peptide"
MGSVHNL

SEQ ID NO: 6221 - protein, 7 aa, Artificial Sequence
  source: /note="Description of Artificial Sequence: Synthetic peptide"
MGSVIGT

SEQ ID NO: 6222 - protein, 7 aa, Artificial Sequence
  source: /note="Description of Artificial Sequence: Synthetic peptide"
MGTTHTS

SEQ ID NO: 6223 - protein, 7 aa, Artificial Sequence
  source: /note="Description of Artificial Sequence: Synthetic peptide"
MGTTPTL

SEQ ID NO: 6224 - protein, 7 aa, Artificial Sequence
  source: /note="Description of Artificial Sequence: Synthetic peptide"
MGVRNAA

SEQ ID NO: 6225 - protein, 7 aa, Artificial Sequence
  source: /note="Description of Artificial Sequence: Synthetic peptide"
MGYLTGE

SEQ ID NO: 6226 - protein, 7 aa, Artificial Sequence
  source: /note="Description of Artificial Sequence: Synthetic peptide"
MHDADKP

SEQ ID NO: 6227 - protein, 7 aa, Artificial Sequence
  source: /note="Description of Artificial Sequence: Synthetic peptide"
MHDFPEL

SEQ ID NO: 6228 - protein, 7 aa, Artificial Sequence
  source: /note="Description of Artificial Sequence: Synthetic peptide"
MHDSPQA

SEQ ID NO: 6229 - protein, 7 aa, Artificial Sequence
  source: /note="Description of Artificial Sequence: Synthetic peptide"
MHESLYP

SEQ ID NO: 6230 - protein, 7 aa, Artificial Sequence
  source: /note="Description of Artificial Sequence: Synthetic peptide"
MHFSAEP

SEQ ID NO: 6231 - protein, 7 aa, Artificial Sequence
  source: /note="Description of Artificial Sequence: Synthetic peptide"
MHHATAP

SEQ ID NO: 6232 - protein, 7 aa, Artificial Sequence
  source: /note="Description of Artificial Sequence: Synthetic peptide"
MHPAPLR

SEQ ID NO: 6233 - protein, 7 aa, Artificial Sequence
  source: /note="Description of Artificial Sequence: Synthetic peptide"
MHPGGGS

SEQ ID NO: 6234 - protein, 7 aa, Artificial Sequence
  source: /note="Description of Artificial Sequence: Synthetic peptide"
MHQRDGA

SEQ ID NO: 6235 - protein, 7 aa, Artificial Sequence
  source: /note="Description of Artificial Sequence: Synthetic peptide"
MHQTSMG

SEQ ID NO: 6236 - protein, 7 aa, Artificial Sequence
  source: /note="Description of Artificial Sequence: Synthetic peptide"
MHSKGAN

SEQ ID NO: 6237 - protein, 7 aa, Artificial Sequence
  source: /note="Description of Artificial Sequence: Synthetic peptide"
MHSPQTH

SEQ ID NO: 6238 - protein, 7 aa, Artificial Sequence
  source: /note="Description of Artificial Sequence: Synthetic peptide"
MHSSPLD

SEQ ID NO: 6239 - protein, 7 aa, Artificial Sequence
  source: /note="Description of Artificial Sequence: Synthetic peptide"
MHSTVPA

SEQ ID NO: 6240 - protein, 7 aa, Artificial Sequence
  source: /note="Description of Artificial Sequence: Synthetic peptide"
MIDRVRT

SEQ ID NO: 6241 - protein, 7 aa, Artificial Sequence
  source: /note="Description of Artificial Sequence: Synthetic peptide"
MIEIKEL

SEQ ID NO: 6242 - protein, 7 aa, Artificial Sequence
  source: /note="Description of Artificial Sequence: Synthetic peptide"
MIEVLPS

SEQ ID NO: 6243 - protein, 7 aa, Artificial Sequence
  source: /note="Description of Artificial Sequence: Synthetic peptide"
MIGDAPA

SEQ ID NO: 6244 - protein, 7 aa, Artificial Sequence
  source: /note="Description of Artificial Sequence: Synthetic peptide"
MIGKSTD

SEQ ID NO: 6245 - protein, 7 aa, Artificial Sequence
  source: /note="Description of Artificial Sequence: Synthetic peptide"
MIKKDYA

SEQ ID NO: 6246 - protein, 7 aa, Artificial Sequence
  source: /note="Description of Artificial Sequence: Synthetic peptide"
MIKTNSV

SEQ ID NO: 6247 - protein, 7 aa, Artificial Sequence
  source: /note="Description of Artificial Sequence: Synthetic peptide"
MINANTN

SEQ ID NO: 6248 - protein, 7 aa, Artificial Sequence
  source: /note="Description of Artificial Sequence: Synthetic peptide"
MIPVRPD

SEQ ID NO: 6249 - protein, 7 aa, Artificial Sequence
  source: /note="Description of Artificial Sequence: Synthetic peptide"
MISEPLT

SEQ ID NO: 6250 - protein, 7 aa, Artificial Sequence
  source: /note="Description of Artificial Sequence: Synthetic peptide"
MISGRTT

SEQ ID NO: 6251 - protein, 7 aa, Artificial Sequence
  source: /note="Description of Artificial Sequence: Synthetic peptide"
MISHQPP

SEQ ID NO: 6252 - protein, 7 aa, Artificial Sequence
  source: /note="Description of Artificial Sequence: Synthetic peptide"
MISIQQT

SEQ ID NO: 6253 - protein, 7 aa, Artificial Sequence
  source: /note="Description of Artificial Sequence: Synthetic peptide"
MISSMLG

SEQ ID NO: 6254 - protein, 7 aa, Artificial Sequence
  source: /note="Description of Artificial Sequence: Synthetic peptide"
MIVTTPE

SEQ ID NO: 6255 - protein, 7 aa, Artificial Sequence
  source: /note="Description of Artificial Sequence: Synthetic peptide"
MKAAVRE

SEQ ID NO: 6256 - protein, 7 aa, Artificial Sequence
  source: /note="Description of Artificial Sequence: Synthetic peptide"
MKADPEW

SEQ ID NO: 6257 - protein, 7 aa, Artificial Sequence
  source: /note="Description of Artificial Sequence: Synthetic peptide"
MKDNNVT

SEQ ID NO: 6258 - protein, 7 aa, Artificial Sequence
  source: /note="Description of Artificial Sequence: Synthetic peptide"
MKHAAQL

SEQ ID NO: 6259 - protein, 7 aa, Artificial Sequence
  source: /note="Description of Artificial Sequence: Synthetic peptide"
MKHPQYN

SEQ ID NO: 6260 - protein, 7 aa, Artificial Sequence
  source: /note="Description of Artificial Sequence: Synthetic peptide"
MKMNRNE

SEQ ID NO: 6261 - protein, 7 aa, Artificial Sequence
  source: /note="Description of Artificial Sequence: Synthetic peptide"
MKPGLPM

SEQ ID NO: 6262 - protein, 7 aa, Artificial Sequence
  source: /note="Description of Artificial Sequence: Synthetic peptide"
MKPLAAS

SEQ ID NO: 6263 - protein, 7 aa, Artificial Sequence
  source: /note="Description of Artificial Sequence: Synthetic peptide"
MKPTSQV

SEQ ID NO: 6264 - protein, 7 aa, Artificial Sequence
  source: /note="Description of Artificial Sequence: Synthetic peptide"
MKSGLTM

SEQ ID NO: 6265 - protein, 7 aa, Artificial Sequence
  source: /note="Description of Artificial Sequence: Synthetic peptide"
MKSIIPS

SEQ ID NO: 6266 - protein, 7 aa, Artificial Sequence
  source: /note="Description of Artificial Sequence: Synthetic peptide"
MKSPYGL

SEQ ID NO: 6267 - protein, 7 aa, Artificial Sequence
  source: /note="Description of Artificial Sequence: Synthetic peptide"
MKSQSDP

SEQ ID NO: 6268 - protein, 7 aa, Artificial Sequence
  source: /note="Description of Artificial Sequence: Synthetic peptide"
MKSSESR

SEQ ID NO: 6269 - protein, 7 aa, Artificial Sequence
  source: /note="Description of Artificial Sequence: Synthetic peptide"
MKTELPA

SEQ ID NO: 6270 - protein, 7 aa, Artificial Sequence
  source: /note="Description of Artificial Sequence: Synthetic peptide"
MKTPPQS

SEQ ID NO: 6271 - protein, 7 aa, Artificial Sequence
  source: /note="Description of Artificial Sequence: Synthetic peptide"
MKWDGKA

SEQ ID NO: 6272 - protein, 7 aa, Artificial Sequence
  source: /note="Description of Artificial Sequence: Synthetic peptide"
MKYSDIG

SEQ ID NO: 6273 - protein, 7 aa, Artificial Sequence
  source: /note="Description of Artificial Sequence: Synthetic peptide"
MLDDINE

SEQ ID NO: 6274 - protein, 7 aa, Artificial Sequence
  source: /note="Description of Artificial Sequence: Synthetic peptide"
MLDTTKR

SEQ ID NO: 6275 - protein, 7 aa, Artificial Sequence
  source: /note="Description of Artificial Sequence: Synthetic peptide"
MLEMNQT

SEQ ID NO: 6276 - protein, 7 aa, Artificial Sequence
  source: /note="Description of Artificial Sequence: Synthetic peptide"
MLGHLTA

SEQ ID NO: 6277 - protein, 7 aa, Artificial Sequence
  source: /note="Description of Artificial Sequence: Synthetic peptide"
MLGLSHT

SEQ ID NO: 6278 - protein, 7 aa, Artificial Sequence
  source: /note="Description of Artificial Sequence: Synthetic peptide"
MLHPTAT

SEQ ID NO: 6279 - protein, 7 aa, Artificial Sequence
  source: /note="Description of Artificial Sequence: Synthetic peptide"
MLHSSGA

SEQ ID NO: 6280 - protein, 7 aa, Artificial Sequence
  source: /note="Description of Artificial Sequence: Synthetic peptide"
MLKYTEH

SEQ ID NO: 6281 - protein, 7 aa, Artificial Sequence
  source: /note="Description of Artificial Sequence: Synthetic peptide"
MLLPTTK

SEQ ID NO: 6282 - protein, 7 aa, Artificial Sequence
  source: /note="Description of Artificial Sequence: Synthetic peptide"
MLPDSNA

SEQ ID NO: 6283 - protein, 7 aa, Artificial Sequence
  source: /note="Description of Artificial Sequence: Synthetic peptide"
MLPFDTD

SEQ ID NO: 6284 - protein, 7 aa, Artificial Sequence
  source: /note="Description of Artificial Sequence: Synthetic peptide"
MLPGDSA

SEQ ID NO: 6285 - protein, 7 aa, Artificial Sequence
  source: /note="Description of Artificial Sequence: Synthetic peptide"
MLPGTPH

SEQ ID NO: 6286 - protein, 7 aa, Artificial Sequence
  source: /note="Description of Artificial Sequence: Synthetic peptide"
MLQGQLS

SEQ ID NO: 6287 - protein, 7 aa, Artificial Sequence
  source: /note="Description of Artificial Sequence: Synthetic peptide"
MLQNGQR

SEQ ID NO: 6288 - protein, 7 aa, Artificial Sequence
  source: /note="Description of Artificial Sequence: Synthetic peptide"
MLRIAGD

SEQ ID NO: 6289 - protein, 7 aa, Artificial Sequence
  source: /note="Description of Artificial Sequence: Synthetic peptide"
MLRQGLQ

SEQ ID NO: 6290 - protein, 7 aa, Artificial Sequence
  source: /note="Description of Artificial Sequence: Synthetic peptide"
MLRTSQD

SEQ ID NO: 6291 - protein, 7 aa, Artificial Sequence
  source: /note="Description of Artificial Sequence: Synthetic peptide"
MLSGEMH

SEQ ID NO: 6292 - protein, 7 aa, Artificial Sequence
  source: /note="Description of Artificial Sequence: Synthetic peptide"
MLSNEVI

SEQ ID NO: 6293 - protein, 7 aa, Artificial Sequence
  source: /note="Description of Artificial Sequence: Synthetic peptide"
MLSRDDQ

SEQ ID NO: 6294 - protein, 7 aa, Artificial Sequence
  source: /note="Description of Artificial Sequence: Synthetic peptide"
MLSRLAQ

SEQ ID NO: 6295 - protein, 7 aa, Artificial Sequence
  source: /note="Description of Artificial Sequence: Synthetic peptide"
MMDRIEG

SEQ ID NO: 6296 - protein, 7 aa, Artificial Sequence
  source: /note="Description of Artificial Sequence: Synthetic peptide"
MMELQLP

SEQ ID NO: 6297 - protein, 7 aa, Artificial Sequence
  source: /note="Description of Artificial Sequence: Synthetic peptide"
MMGNSKG

SEQ ID NO: 6298 - protein, 7 aa, Artificial Sequence
  source: /note="Description of Artificial Sequence: Synthetic peptide"
MMHAGAQ

SEQ ID NO: 6299 - protein, 7 aa, Artificial Sequence
  source: /note="Description of Artificial Sequence: Synthetic peptide"
MMHQEDS

SEQ ID NO: 6300 - protein, 7 aa, Artificial Sequence
  source: /note="Description of Artificial Sequence: Synthetic peptide"
MMNMRGG

SEQ ID NO: 6301 - protein, 7 aa, Artificial Sequence
  source: /note="Description of Artificial Sequence: Synthetic peptide"
MMPQEIV

SEQ ID NO: 6302 - protein, 7 aa, Artificial Sequence
  source: /note="Description of Artificial Sequence: Synthetic peptide"
MMSDNAK

SEQ ID NO: 6303 - protein, 7 aa, Artificial Sequence
  source: /note="Description of Artificial Sequence: Synthetic peptide"
MMTDSQR

SEQ ID NO: 6304 - protein, 7 aa, Artificial Sequence
  source: /note="Description of Artificial Sequence: Synthetic peptide"
MMTGASD

SEQ ID NO: 6305 - protein, 7 aa, Artificial Sequence
  source: /note="Description of Artificial Sequence: Synthetic peptide"
MMTKTGT

SEQ ID NO: 6306 - protein, 7 aa, Artificial Sequence
  source: /note="Description of Artificial Sequence: Synthetic peptide"
MMTSAGP

SEQ ID NO: 6307 - protein, 7 aa, Artificial Sequence
  source: /note="Description of Artificial Sequence: Synthetic peptide"
MNAFKQE

SEQ ID NO: 6308 - protein, 7 aa, Artificial Sequence
  source: /note="Description of Artificial Sequence: Synthetic peptide"
MNAKCCS

SEQ ID NO: 6309 - protein, 7 aa, Artificial Sequence
  source: /note="Description of Artificial Sequence: Synthetic peptide"
MNARLID

SEQ ID NO: 6310 - protein, 7 aa, Artificial Sequence
  source: /note="Description of Artificial Sequence: Synthetic peptide"
MNASANS

SEQ ID NO: 6311 - protein, 7 aa, Artificial Sequence
  source: /note="Description of Artificial Sequence: Synthetic peptide"
MNASTMI

SEQ ID NO: 6312 - protein, 7 aa, Artificial Sequence
  source: /note="Description of Artificial Sequence: Synthetic peptide"
MNGSLPM

SEQ ID NO: 6313 - protein, 7 aa, Artificial Sequence
  source: /note="Description of Artificial Sequence: Synthetic peptide"
MNGSRQM

SEQ ID NO: 6314 - protein, 7 aa, Artificial Sequence
  source: /note="Description of Artificial Sequence: Synthetic peptide"
MNHGANY

SEQ ID NO: 6315 - protein, 7 aa, Artificial Sequence
  source: /note="Description of Artificial Sequence: Synthetic peptide"
MNKASFA

SEQ ID NO: 6316 - protein, 7 aa, Artificial Sequence
  source: /note="Description of Artificial Sequence: Synthetic peptide"
MNKGTVA

SEQ ID NO: 6317 - protein, 7 aa, Artificial Sequence
  source: /note="Description of Artificial Sequence: Synthetic peptide"
MNKLKVE

SEQ ID NO: 6318 - protein, 7 aa, Artificial Sequence
  source: /note="Description of Artificial Sequence: Synthetic peptide"
MNLHNPA

SEQ ID NO: 6319 - protein, 7 aa, Artificial Sequence
  source: /note="Description of Artificial Sequence: Synthetic peptide"
MNLKLSP

SEQ ID NO: 6320 - protein, 7 aa, Artificial Sequence
  source: /note="Description of Artificial Sequence: Synthetic peptide"
MNLRMAP

SEQ ID NO: 6321 - protein, 7 aa, Artificial Sequence
  source: /note="Description of Artificial Sequence: Synthetic peptide"
MNLSTKP

SEQ ID NO: 6322 - protein, 7 aa, Artificial Sequence
  source: /note="Description of Artificial Sequence: Synthetic peptide"
MNNLSGR

SEQ ID NO: 6323 - protein, 7 aa, Artificial Sequence
  source: /note="Description of Artificial Sequence: Synthetic peptide"
MNPISKC

SEQ ID NO: 6324 - protein, 7 aa, Artificial Sequence
  source: /note="Description of Artificial Sequence: Synthetic peptide"
MNPLPYP

SEQ ID NO: 6325 - protein, 7 aa, Artificial Sequence
  source: /note="Description of Artificial Sequence: Synthetic peptide"
MNPSVEL

SEQ ID NO: 6326 - protein, 7 aa, Artificial Sequence
  source: /note="Description of Artificial Sequence: Synthetic peptide"
MNQTKPY

SEQ ID NO: 6327 - protein, 7 aa, Artificial Sequence
  source: /note="Description of Artificial Sequence: Synthetic peptide"
MNQVRSL

SEQ ID NO: 6328 - protein, 7 aa, Artificial Sequence
  source: /note="Description of Artificial Sequence: Synthetic peptide"
MNRIVMS

SEQ ID NO: 6329 - protein, 7 aa, Artificial Sequence
  source: /note="Description of Artificial Sequence: Synthetic peptide"
MNSGCED

SEQ ID NO: 6330 - protein, 7 aa, Artificial Sequence
  source: /note="Description of Artificial Sequence: Synthetic peptide"
MNSGMPF

SEQ ID NO: 6331 - protein, 7 aa, Artificial Sequence
  source: /note="Description of Artificial Sequence: Synthetic peptide"
MNSKGEP

SEQ ID NO: 6332 - protein, 7 aa, Artificial Sequence
  source: /note="Description of Artificial Sequence: Synthetic peptide"
MNSKMYP

SEQ ID NO: 6333 - protein, 7 aa, Artificial Sequence
  source: /note="Description of Artificial Sequence: Synthetic peptide"
MNSLPRS

SEQ ID NO: 6334 - protein, 7 aa, Artificial Sequence
  source: /note="Description of Artificial Sequence: Synthetic peptide"
MNSRNGY

SEQ ID NO: 6335 - protein, 7 aa, Artificial Sequence
  source: /note="Description of Artificial Sequence: Synthetic peptide"
MNSTLAA

SEQ ID NO: 6336 - protein, 7 aa, Artificial Sequence
  source: /note="Description of Artificial Sequence: Synthetic peptide"
MNSTTTP

SEQ ID NO: 6337 - protein, 7 aa, Artificial Sequence
  source: /note="Description of Artificial Sequence: Synthetic peptide"
MNTKTFP

SEQ ID NO: 6338 - protein, 7 aa, Artificial Sequence
  source: /note="Description of Artificial Sequence: Synthetic peptide"
MNTSVVY

SEQ ID NO: 6339 - protein, 7 aa, Artificial Sequence
  source: /note="Description of Artificial Sequence: Synthetic peptide"
MNVVGQS

SEQ ID NO: 6340 - protein, 7 aa, Artificial Sequence
  source: /note="Description of Artificial Sequence: Synthetic peptide"
MPAHVLP

SEQ ID NO: 6341 - protein, 7 aa, Artificial Sequence
  source: /note="Description of Artificial Sequence: Synthetic peptide"
MPASSVS

SEQ ID NO: 6342 - protein, 7 aa, Artificial Sequence
  source: /note="Description of Artificial Sequence: Synthetic peptide"
MPATFTD

SEQ ID NO: 6343 - protein, 7 aa, Artificial Sequence
  source: /note="Description of Artificial Sequence: Synthetic peptide"
MPDAKIS

SEQ ID NO: 6344 - protein, 7 aa, Artificial Sequence
  source: /note="Description of Artificial Sequence: Synthetic peptide"
MPDHPLR

SEQ ID NO: 6345 - protein, 7 aa, Artificial Sequence
  source: /note="Description of Artificial Sequence: Synthetic peptide"
MPESMNT

SEQ ID NO: 6346 - protein, 7 aa, Artificial Sequence
  source: /note="Description of Artificial Sequence: Synthetic peptide"
MPFNDNV

SEQ ID NO: 6347 - protein, 7 aa, Artificial Sequence
  source: /note="Description of Artificial Sequence: Synthetic peptide"
MPHGSFA

SEQ ID NO: 6348 - protein, 7 aa, Artificial Sequence
  source: /note="Description of Artificial Sequence: Synthetic peptide"
MPHLEMN

SEQ ID NO: 6349 - protein, 7 aa, Artificial Sequence
  source: /note="Description of Artificial Sequence: Synthetic peptide"
MPHLITS

SEQ ID NO: 6350 - protein, 7 aa, Artificial Sequence
  source: /note="Description of Artificial Sequence: Synthetic peptide"
MPHMGLT

SEQ ID NO: 6351 - protein, 7 aa, Artificial Sequence
  source: /note="Description of Artificial Sequence: Synthetic peptide"
MPISPLA

SEQ ID NO: 6352 - protein, 7 aa, Artificial Sequence
  source: /note="Description of Artificial Sequence: Synthetic peptide"
MPIVRIS

SEQ ID NO: 6353 - protein, 7 aa, Artificial Sequence
  source: /note="Description of Artificial Sequence: Synthetic peptide"
MPKQELI

SEQ ID NO: 6354 - protein, 7 aa, Artificial Sequence
  source: /note="Description of Artificial Sequence: Synthetic peptide"
MPLDSVA

SEQ ID NO: 6355 - protein, 7 aa, Artificial Sequence
  source: /note="Description of Artificial Sequence: Synthetic peptide"
MPLGGAY

SEQ ID NO: 6356 - protein, 7 aa, Artificial Sequence
  source: /note="Description of Artificial Sequence: Synthetic peptide"
MPLRNTM

SEQ ID NO: 6357 - protein, 7 aa, Artificial Sequence
  source: /note="Description of Artificial Sequence: Synthetic peptide"
MPLSNSS

SEQ ID NO: 6358 - protein, 7 aa, Artificial Sequence
  source: /note="Description of Artificial Sequence: Synthetic peptide"
MPMGDPI

SEQ ID NO: 6359 - protein, 7 aa, Artificial Sequence
  source: /note="Description of Artificial Sequence: Synthetic peptide"
MPMMLRL

SEQ ID NO: 6360 - protein, 7 aa, Artificial Sequence
  source: /note="Description of Artificial Sequence: Synthetic peptide"
MPMNRTP

SEQ ID NO: 6361 - protein, 7 aa, Artificial Sequence
  source: /note="Description of Artificial Sequence: Synthetic peptide"
MPMRANG

SEQ ID NO: 6362 - protein, 7 aa, Artificial Sequence
  source: /note="Description of Artificial Sequence: Synthetic peptide"
MPNVPPT

SEQ ID NO: 6363 - protein, 7 aa, Artificial Sequence
  source: /note="Description of Artificial Sequence: Synthetic peptide"
MPPALLT

SEQ ID NO: 6364 - protein, 7 aa, Artificial Sequence
  source: /note="Description of Artificial Sequence: Synthetic peptide"
MPPEVPV

SEQ ID NO: 6365 - protein, 7 aa, Artificial Sequence
  source: /note="Description of Artificial Sequence: Synthetic peptide"
MPPPNLN

SEQ ID NO: 6366 - protein, 7 aa, Artificial Sequence
  source: /note="Description of Artificial Sequence: Synthetic peptide"
MPPQNAM

SEQ ID NO: 6367 - protein, 7 aa, Artificial Sequence
  source: /note="Description of Artificial Sequence: Synthetic peptide"
MPPSNRP

SEQ ID NO: 6368 - protein, 7 aa, Artificial Sequence
  source: /note="Description of Artificial Sequence: Synthetic peptide"
MPPSTYA

SEQ ID NO: 6369 - protein, 7 aa, Artificial Sequence
  source: /note="Description of Artificial Sequence: Synthetic peptide"
MPQLHET

SEQ ID NO: 6370 - protein, 7 aa, Artificial Sequence
  source: /note="Description of Artificial Sequence: Synthetic peptide"
MPQSRDE

SEQ ID NO: 6371 - protein, 7 aa, Artificial Sequence
  source: /note="Description of Artificial Sequence: Synthetic peptide"
MPRDAYG

SEQ ID NO: 6372 - protein, 7 aa, Artificial Sequence
  source: /note="Description of Artificial Sequence: Synthetic peptide"
MPRGEIP

SEQ ID NO: 6373 - protein, 7 aa, Artificial Sequence
  source: /note="Description of Artificial Sequence: Synthetic peptide"
MPRNGPP

SEQ ID NO: 6374 - protein, 7 aa, Artificial Sequence
  source: /note="Description of Artificial Sequence: Synthetic peptide"
MPRVASN

SEQ ID NO: 6375 - protein, 7 aa, Artificial Sequence
  source: /note="Description of Artificial Sequence: Synthetic peptide"
MPSASEV

SEQ ID NO: 6376 - protein, 7 aa, Artificial Sequence
  source: /note="Description of Artificial Sequence: Synthetic peptide"
MPSGRVH

SEQ ID NO: 6377 - protein, 7 aa, Artificial Sequence
  source: /note="Description of Artificial Sequence: Synthetic peptide"
MPSGRVP

SEQ ID NO: 6378 - protein, 7 aa, Artificial Sequence
  source: /note="Description of Artificial Sequence: Synthetic peptide"
MPSISLP

SEQ ID NO: 6379 - protein, 7 aa, Artificial Sequence
  source: /note="Description of Artificial Sequence: Synthetic peptide"
MPSNSIS

SEQ ID NO: 6380 - protein, 7 aa, Artificial Sequence
  source: /note="Description of Artificial Sequence: Synthetic peptide"
MPSPEVY

SEQ ID NO: 6381 - protein, 7 aa, Artificial Sequence
  source: /note="Description of Artificial Sequence: Synthetic peptide"
MPTDPKM

SEQ ID NO: 6382 - protein, 7 aa, Artificial Sequence
  source: /note="Description of Artificial Sequence: Synthetic peptide"
MPTGTDL

SEQ ID NO: 6383 - protein, 7 aa, Artificial Sequence
  source: /note="Description of Artificial Sequence: Synthetic peptide"
MPTPRTG

SEQ ID NO: 6384 - protein, 7 aa, Artificial Sequence
  source: /note="Description of Artificial Sequence: Synthetic peptide"
MPTSGPP

SEQ ID NO: 6385 - protein, 7 aa, Artificial Sequence
  source: /note="Description of Artificial Sequence: Synthetic peptide"
MPTYDKR

SEQ ID NO: 6386 - protein, 7 aa, Artificial Sequence
  source: /note="Description of Artificial Sequence: Synthetic peptide"
MPVPERP

SEQ ID NO: 6387 - protein, 7 aa, Artificial Sequence
  source: /note="Description of Artificial Sequence: Synthetic peptide"
MPVSGHV

SEQ ID NO: 6388 - protein, 7 aa, Artificial Sequence
  source: /note="Description of Artificial Sequence: Synthetic peptide"
MPVSRLE

SEQ ID NO: 6389 - protein, 7 aa, Artificial Sequence
  source: /note="Description of Artificial Sequence: Synthetic peptide"
MPVSSTR

SEQ ID NO: 6390 - protein, 7 aa, Artificial Sequence
  source: /note="Description of Artificial Sequence: Synthetic peptide"
MPWKDAA

SEQ ID NO: 6391 - protein, 7 aa, Artificial Sequence
  source: /note="Description of Artificial Sequence: Synthetic peptide"
MQAASSP

SEQ ID NO: 6392 - protein, 7 aa, Artificial Sequence
  source: /note="Description of Artificial Sequence: Synthetic peptide"
MQAGSMR

SEQ ID NO: 6393 - protein, 7 aa, Artificial Sequence
  source: /note="Description of Artificial Sequence: Synthetic peptide"
MQASHSP

SEQ ID NO: 6394 - protein, 7 aa, Artificial Sequence
  source: /note="Description of Artificial Sequence: Synthetic peptide"
MQDGYTN

SEQ ID NO: 6395 - protein, 7 aa, Artificial Sequence
  source: /note="Description of Artificial Sequence: Synthetic peptide"
MQGKLLA

SEQ ID NO: 6396 - protein, 7 aa, Artificial Sequence
  source: /note="Description of Artificial Sequence: Synthetic peptide"
MQHGAHP

SEQ ID NO: 6397 - protein, 7 aa, Artificial Sequence
  source: /note="Description of Artificial Sequence: Synthetic peptide"
MQLEHSP

SEQ ID NO: 6398 - protein, 7 aa, Artificial Sequence
  source: /note="Description of Artificial Sequence: Synthetic peptide"
MQLGNVS

SEQ ID NO: 6399 - protein, 7 aa, Artificial Sequence
  source: /note="Description of Artificial Sequence: Synthetic peptide"
MQLGPVM

SEQ ID NO: 6400 - protein, 7 aa, Artificial Sequence
  source: /note="Description of Artificial Sequence: Synthetic peptide"
MQNMPPP

SEQ ID NO: 6401 - protein, 7 aa, Artificial Sequence
  source: /note="Description of Artificial Sequence: Synthetic peptide"
MQPNTSF

SEQ ID NO: 6402 - protein, 7 aa, Artificial Sequence
  source: /note="Description of Artificial Sequence: Synthetic peptide"
MQRRLDI

SEQ ID NO: 6403 - protein, 7 aa, Artificial Sequence
  source: /note="Description of Artificial Sequence: Synthetic peptide"
MQRTTHV

SEQ ID NO: 6404 - protein, 7 aa, Artificial Sequence
  source: /note="Description of Artificial Sequence: Synthetic peptide"
MQSRVPL

SEQ ID NO: 6405 - protein, 7 aa, Artificial Sequence
  source: /note="Description of Artificial Sequence: Synthetic peptide"
MQSSPDG

SEQ ID NO: 6406 - protein, 7 aa, Artificial Sequence
  source: /note="Description of Artificial Sequence: Synthetic peptide"
MQTATQG

SEQ ID NO: 6407 - protein, 7 aa, Artificial Sequence
  source: /note="Description of Artificial Sequence: Synthetic peptide"
MQTQSLP

SEQ ID NO: 6408 - protein, 7 aa, Artificial Sequence
  source: /note="Description of Artificial Sequence: Synthetic peptide"
MQVSERP

SEQ ID NO: 6409 - protein, 7 aa, Artificial Sequence
  source: /note="Description of Artificial Sequence: Synthetic peptide"
MQVSGPP

SEQ ID NO: 6410 - protein, 7 aa, Artificial Sequence
  source: /note="Description of Artificial Sequence: Synthetic peptide"
MQVTEGL

SEQ ID NO: 6411 - protein, 7 aa, Artificial Sequence
  source: /note="Description of Artificial Sequence: Synthetic peptide"
MRAGAAG

SEQ ID NO: 6412 - protein, 7 aa, Artificial Sequence
  source: /note="Description of Artificial Sequence: Synthetic peptide"
MRASAGM

SEQ ID NO: 6413 - protein, 7 aa, Artificial Sequence
  source: /note="Description of Artificial Sequence: Synthetic peptide"
MRDDAAV

SEQ ID NO: 6414 - protein, 7 aa, Artificial Sequence
  source: /note="Description of Artificial Sequence: Synthetic peptide"
MRDGPPN

SEQ ID NO: 6415 - protein, 7 aa, Artificial Sequence
  source: /note="Description of Artificial Sequence: Synthetic peptide"
MRERSSA

SEQ ID NO: 6416 - protein, 7 aa, Artificial Sequence
  source: /note="Description of Artificial Sequence: Synthetic peptide"
MRGDSAP

SEQ ID NO: 6417 - protein, 7 aa, Artificial Sequence
  source: /note="Description of Artificial Sequence: Synthetic peptide"
MRGFDEL

SEQ ID NO: 6418 - protein, 7 aa, Artificial Sequence
  source: /note="Description of Artificial Sequence: Synthetic peptide"
MRGTPVG

SEQ ID NO: 6419 - protein, 7 aa, Artificial Sequence
  source: /note="Description of Artificial Sequence: Synthetic peptide"
MRHGNPA

SEQ ID NO: 6420 - protein, 7 aa, Artificial Sequence
  source: /note="Description of Artificial Sequence: Synthetic peptide"
MRHVNTP

SEQ ID NO: 6421 - protein, 7 aa, Artificial Sequence
  source: /note="Description of Artificial Sequence: Synthetic peptide"
MRIGDRH

SEQ ID NO: 6422 - protein, 7 aa, Artificial Sequence
  source: /note="Description of Artificial Sequence: Synthetic peptide"
MRLSTPE

SEQ ID NO: 6423 - protein, 7 aa, Artificial Sequence
  source: /note="Description of Artificial Sequence: Synthetic peptide"
MRLVSAE

SEQ ID NO: 6424 - protein, 7 aa, Artificial Sequence
  source: /note="Description of Artificial Sequence: Synthetic peptide"
MRMAVSA

SEQ ID NO: 6425 - protein, 7 aa, Artificial Sequence
  source: /note="Description of Artificial Sequence: Synthetic peptide"
MRMGGVP

SEQ ID NO: 6426 - protein, 7 aa, Artificial Sequence
  source: /note="Description of Artificial Sequence: Synthetic peptide"
MRNAAKR

SEQ ID NO: 6427 - protein, 7 aa, Artificial Sequence
  source: /note="Description of Artificial Sequence: Synthetic peptide"
MRNSVYP

SEQ ID NO: 6428 - protein, 7 aa, Artificial Sequence
  source: /note="Description of Artificial Sequence: Synthetic peptide"
MRNTTFE

SEQ ID NO: 6429 - protein, 7 aa, Artificial Sequence
  source: /note="Description of Artificial Sequence: Synthetic peptide"
MRPANES

SEQ ID NO: 6430 - protein, 7 aa, Artificial Sequence
  source: /note="Description of Artificial Sequence: Synthetic peptide"
MRPAVGV

SEQ ID NO: 6431 - protein, 7 aa, Artificial Sequence
  source: /note="Description of Artificial Sequence: Synthetic peptide"
MRPGLEG

SEQ ID NO: 6432 - protein, 7 aa, Artificial Sequence
  source: /note="Description of Artificial Sequence: Synthetic peptide"
MRPTHAC

SEQ ID NO: 6433 - protein, 7 aa, Artificial Sequence
  source: /note="Description of Artificial Sequence: Synthetic peptide"
MRPTNAT

SEQ ID NO: 6434 - protein, 7 aa, Artificial Sequence
  source: /note="Description of Artificial Sequence: Synthetic peptide"
MRQIGYH

SEQ ID NO: 6435 - protein, 7 aa, Artificial Sequence
  source: /note="Description of Artificial Sequence: Synthetic peptide"
MRQVGRE

SEQ ID NO: 6436 - protein, 7 aa, Artificial Sequence
  source: /note="Description of Artificial Sequence: Synthetic peptide"
MRSFSYE

SEQ ID NO: 6437 - protein, 7 aa, Artificial Sequence
  source: /note="Description of Artificial Sequence: Synthetic peptide"
MRSNDVV

SEQ ID NO: 6438 - protein, 7 aa, Artificial Sequence
  source: /note="Description of Artificial Sequence: Synthetic peptide"
MRSPPLY

SEQ ID NO: 6439 - protein, 7 aa, Artificial Sequence
  source: /note="Description of Artificial Sequence: Synthetic peptide"
MRSQSFS

SEQ ID NO: 6440 - protein, 7 aa, Artificial Sequence
  source: /note="Description of Artificial Sequence: Synthetic peptide"
MRSRVDT

SEQ ID NO: 6441 - protein, 7 aa, Artificial Sequence
  source: /note="Description of Artificial Sequence: Synthetic peptide"
MRSVIAQ

SEQ ID NO: 6442 - protein, 7 aa, Artificial Sequence
  source: /note="Description of Artificial Sequence: Synthetic peptide"
MRTESTL

SEQ ID NO: 6443 - protein, 7 aa, Artificial Sequence
  source: /note="Description of Artificial Sequence: Synthetic peptide"
MRTNSST

SEQ ID NO: 6444 - protein, 7 aa, Artificial Sequence
  source: /note="Description of Artificial Sequence: Synthetic peptide"
MRTSNTA

SEQ ID NO: 6445 - protein, 7 aa, Artificial Sequence
  source: /note="Description of Artificial Sequence: Synthetic peptide"
MRVNTDP

SEQ ID NO: 6446 - protein, 7 aa, Artificial Sequence
  source: /note="Description of Artificial Sequence: Synthetic peptide"
MRVSTAA

SEQ ID NO: 6447 - protein, 7 aa, Artificial Sequence
  source: /note="Description of Artificial Sequence: Synthetic peptide"
MRYAPGT

SEQ ID NO: 6448 - protein, 7 aa, Artificial Sequence
  source: /note="Description of Artificial Sequence: Synthetic peptide"
MSADRFS

SEQ ID NO: 6449 - protein, 7 aa, Artificial Sequence
  source: /note="Description of Artificial Sequence: Synthetic peptide"
MSAKTYL

SEQ ID NO: 6450 - protein, 7 aa, Artificial Sequence
  source: /note="Description of Artificial Sequence: Synthetic peptide"
MSASIGS

SEQ ID NO: 6451 - protein, 7 aa, Artificial Sequence
  source: /note="Description of Artificial Sequence: Synthetic peptide"
MSAVLPH

SEQ ID NO: 6452 - protein, 7 aa, Artificial Sequence
  source: /note="Description of Artificial Sequence: Synthetic peptide"
MSDQLRF

SEQ ID NO: 6453 - protein, 7 aa, Artificial Sequence
  source: /note="Description of Artificial Sequence: Synthetic peptide"
MSDSHSR

SEQ ID NO: 6454 - protein, 7 aa, Artificial Sequence
  source: /note="Description of Artificial Sequence: Synthetic peptide"
MSDWNGI

SEQ ID NO: 6455 - protein, 7 aa, Artificial Sequence
  source: /note="Description of Artificial Sequence: Synthetic peptide"
MSEMSTH

SEQ ID NO: 6456 - protein, 7 aa, Artificial Sequence
  source: /note="Description of Artificial Sequence: Synthetic peptide"
MSGGSSY

SEQ ID NO: 6457 - protein, 7 aa, Artificial Sequence
  source: /note="Description of Artificial Sequence: Synthetic peptide"
MSGNHAT

SEQ ID NO: 6458 - protein, 7 aa, Artificial Sequence
  source: /note="Description of Artificial Sequence: Synthetic peptide"
MSGPQLS

SEQ ID NO: 6459 - protein, 7 aa, Artificial Sequence
  source: /note="Description of Artificial Sequence: Synthetic peptide"
MSGRGQI

SEQ ID NO: 6460 - protein, 7 aa, Artificial Sequence
  source: /note="Description of Artificial Sequence: Synthetic peptide"
MSHHSTT

SEQ ID NO: 6461 - protein, 7 aa, Artificial Sequence
  source: /note="Description of Artificial Sequence: Synthetic peptide"
MSHPYKP

SEQ ID NO: 6462 - protein, 7 aa, Artificial Sequence
  source: /note="Description of Artificial Sequence: Synthetic peptide"
MSHYLKA

SEQ ID NO: 6463 - protein, 7 aa, Artificial Sequence
  source: /note="Description of Artificial Sequence: Synthetic peptide"
MSIDEAE

SEQ ID NO: 6464 - protein, 7 aa, Artificial Sequence
  source: /note="Description of Artificial Sequence: Synthetic peptide"
MSIGTSE

SEQ ID NO: 6465 - protein, 7 aa, Artificial Sequence
  source: /note="Description of Artificial Sequence: Synthetic peptide"
MSIIGGV

SEQ ID NO: 6466 - protein, 7 aa, Artificial Sequence
  source: /note="Description of Artificial Sequence: Synthetic peptide"
MSISHTT

SEQ ID NO: 6467 - protein, 7 aa, Artificial Sequence
  source: /note="Description of Artificial Sequence: Synthetic peptide"
MSITHHS

SEQ ID NO: 6468 - protein, 7 aa, Artificial Sequence
  source: /note="Description of Artificial Sequence: Synthetic peptide"
MSKIWPS

SEQ ID NO: 6469 - protein, 7 aa, Artificial Sequence
  source: /note="Description of Artificial Sequence: Synthetic peptide"
MSKNLSA

SEQ ID NO: 6470 - protein, 7 aa, Artificial Sequence
  source: /note="Description of Artificial Sequence: Synthetic peptide"
MSKRTDS

SEQ ID NO: 6471 - protein, 7 aa, Artificial Sequence
  source: /note="Description of Artificial Sequence: Synthetic peptide"
MSKTIAQ

SEQ ID NO: 6472 - protein, 7 aa, Artificial Sequence
  source: /note="Description of Artificial Sequence: Synthetic peptide"
MSKVPFN

SEQ ID NO: 6473 - protein, 7 aa, Artificial Sequence
  source: /note="Description of Artificial Sequence: Synthetic peptide"
MSLANKS

SEQ ID NO: 6474 - protein, 7 aa, Artificial Sequence
  source: /note="Description of Artificial Sequence: Synthetic peptide"
MSLKLSG

SEQ ID NO: 6475 - protein, 7 aa, Artificial Sequence
  source: /note="Description of Artificial Sequence: Synthetic peptide"
MSLPSTQ

SEQ ID NO: 6476 - protein, 7 aa, Artificial Sequence
  source: /note="Description of Artificial Sequence: Synthetic peptide"
MSLTVTA

SEQ ID NO: 6477 - protein, 7 aa, Artificial Sequence
  source: /note="Description of Artificial Sequence: Synthetic peptide"
MSMHGGS

SEQ ID NO: 6478 - protein, 7 aa, Artificial Sequence
  source: /note="Description of Artificial Sequence: Synthetic peptide"
MSNGWQD

SEQ ID NO: 6479 - protein, 7 aa, Artificial Sequence
  source: /note="Description of Artificial Sequence: Synthetic peptide"
MSNIGLG

SEQ ID NO: 6480 - protein, 7 aa, Artificial Sequence
  source: /note="Description of Artificial Sequence: Synthetic peptide"
MSNNHGL

SEQ ID NO: 6481 - protein, 7 aa, Artificial Sequence
  source: /note="Description of Artificial Sequence: Synthetic peptide"
MSNSEFG

SEQ ID NO: 6482 - protein, 7 aa, Artificial Sequence
  source: /note="Description of Artificial Sequence: Synthetic peptide"
MSPAMQT

SEQ ID NO: 6483 - protein, 7 aa, Artificial Sequence
  source: /note="Description of Artificial Sequence: Synthetic peptide"
MSPDQRY

SEQ ID NO: 6484 - protein, 7 aa, Artificial Sequence
  source: /note="Description of Artificial Sequence: Synthetic peptide"
MSPGVNA

SEQ ID NO: 6485 - protein, 7 aa, Artificial Sequence
  source: /note="Description of Artificial Sequence: Synthetic peptide"
MSPHFNT

SEQ ID NO: 6486 - protein, 7 aa, Artificial Sequence
  source: /note="Description of Artificial Sequence: Synthetic peptide"
MSPMVTA

SEQ ID NO: 6487 - protein, 7 aa, Artificial Sequence
  source: /note="Description of Artificial Sequence: Synthetic peptide"
MSPSDFG

SEQ ID NO: 6488 - protein, 7 aa, Artificial Sequence
  source: /note="Description of Artificial Sequence: Synthetic peptide"
MSPSSPM

SEQ ID NO: 6489 - protein, 7 aa, Artificial Sequence
  source: /note="Description of Artificial Sequence: Synthetic peptide"
MSQQSSG

SEQ ID NO: 6490 - protein, 7 aa, Artificial Sequence
  source: /note="Description of Artificial Sequence: Synthetic peptide"
MSQRRDP

SEQ ID NO: 6491 - protein, 7 aa, Artificial Sequence
  source: /note="Description of Artificial Sequence: Synthetic peptide"
MSRDVSH

SEQ ID NO: 6492 - protein, 7 aa, Artificial Sequence
  source: /note="Description of Artificial Sequence: Synthetic peptide"
MSRESGG

SEQ ID NO: 6493 - protein, 7 aa, Artificial Sequence
  source: /note="Description of Artificial Sequence: Synthetic peptide"
MSRLDSP

SEQ ID NO: 6494 - protein, 7 aa, Artificial Sequence
  source: /note="Description of Artificial Sequence: Synthetic peptide"
MSRLGAT

SEQ ID NO: 6495 - protein, 7 aa, Artificial Sequence
  source: /note="Description of Artificial Sequence: Synthetic peptide"
MSRNLCC

SEQ ID NO: 6496 - protein, 7 aa, Artificial Sequence
  source: /note="Description of Artificial Sequence: Synthetic peptide"
MSSASSP

SEQ ID NO: 6497 - protein, 7 aa, Artificial Sequence
  source: /note="Description of Artificial Sequence: Synthetic peptide"
MSSEPVK

SEQ ID NO: 6498 - protein, 7 aa, Artificial Sequence
  source: /note="Description of Artificial Sequence: Synthetic peptide"
MSSHGVA

SEQ ID NO: 6499 - protein, 7 aa, Artificial Sequence
  source: /note="Description of Artificial Sequence: Synthetic peptide"
MSSLNSL

SEQ ID NO: 6500 - protein, 7 aa, Artificial Sequence
  source: /note="Description of Artificial Sequence: Synthetic peptide"
MSSLNVH

SEQ ID NO: 6501 - protein, 7 aa, Artificial Sequence
  source: /note="Description of Artificial Sequence: Synthetic peptide"
MSSLRQA

SEQ ID NO: 6502 - protein, 7 aa, Artificial Sequence
  source: /note="Description of Artificial Sequence: Synthetic peptide"
MSSPQLS

SEQ ID NO: 6503 - protein, 7 aa, Artificial Sequence
  source: /note="Description of Artificial Sequence: Synthetic peptide"
MSSQTSK

SEQ ID NO: 6504 - protein, 7 aa, Artificial Sequence
  source: /note="Description of Artificial Sequence: Synthetic peptide"
MSSRWAA

SEQ ID NO: 6505 - protein, 7 aa, Artificial Sequence
  source: /note="Description of Artificial Sequence: Synthetic peptide"
MSSSVHT

SEQ ID NO: 6506 - protein, 7 aa, Artificial Sequence
  source: /note="Description of Artificial Sequence: Synthetic peptide"
MSSTRTD

SEQ ID NO: 6507 - protein, 7 aa, Artificial Sequence
  source: /note="Description of Artificial Sequence: Synthetic peptide"
MSSTSYS

SEQ ID NO: 6508 - protein, 7 aa, Artificial Sequence
  source: /note="Description of Artificial Sequence: Synthetic peptide"
MSTEDHA

SEQ ID NO: 6509 - protein, 7 aa, Artificial Sequence
  source: /note="Description of Artificial Sequence: Synthetic peptide"
MSTERNA

SEQ ID NO: 6510 - protein, 7 aa, Artificial Sequence
  source: /note="Description of Artificial Sequence: Synthetic peptide"
MSTFPPP

SEQ ID NO: 6511 - protein, 7 aa, Artificial Sequence
  source: /note="Description of Artificial Sequence: Synthetic peptide"
MSTGRLI

SEQ ID NO: 6512 - protein, 7 aa, Artificial Sequence
  source: /note="Description of Artificial Sequence: Synthetic peptide"
MSTHVVS

SEQ ID NO: 6513 - protein, 7 aa, Artificial Sequence
  source: /note="Description of Artificial Sequence: Synthetic peptide"
MSTLPHA

SEQ ID NO: 6514 - protein, 7 aa, Artificial Sequence
  source: /note="Description of Artificial Sequence: Synthetic peptide"
MSTMQRS

SEQ ID NO: 6515 - protein, 7 aa, Artificial Sequence
  source: /note="Description of Artificial Sequence: Synthetic peptide"
MSTNFKG

SEQ ID NO: 6516 - protein, 7 aa, Artificial Sequence
  source: /note="Description of Artificial Sequence: Synthetic peptide"
MSTNTHL

SEQ ID NO: 6517 - protein, 7 aa, Artificial Sequence
  source: /note="Description of Artificial Sequence: Synthetic peptide"
MSTRIAN

SEQ ID NO: 6518 - protein, 7 aa, Artificial Sequence
  source: /note="Description of Artificial Sequence: Synthetic peptide"
MSTRPMP

SEQ ID NO: 6519 - protein, 7 aa, Artificial Sequence
  source: /note="Description of Artificial Sequence: Synthetic peptide"
MSTRSPS

SEQ ID NO: 6520 - protein, 7 aa, Artificial Sequence
  source: /note="Description of Artificial Sequence: Synthetic peptide"
MSVPHGD

SEQ ID NO: 6521 - protein, 7 aa, Artificial Sequence
  source: /note="Description of Artificial Sequence: Synthetic peptide"
MSYPYQN

SEQ ID NO: 6522 - protein, 7 aa, Artificial Sequence
  source: /note="Description of Artificial Sequence: Synthetic peptide"
MSYQKPS

SEQ ID NO: 6523 - protein, 7 aa, Artificial Sequence
  source: /note="Description of Artificial Sequence: Synthetic peptide"
MSYTSDS

SEQ ID NO: 6524 - protein, 7 aa, Artificial Sequence
  source: /note="Description of Artificial Sequence: Synthetic peptide"
MTANTAL

SEQ ID NO: 6525 - protein, 7 aa, Artificial Sequence
  source: /note="Description of Artificial Sequence: Synthetic peptide"
MTDITGR

SEQ ID NO: 6526 - protein, 7 aa, Artificial Sequence
  source: /note="Description of Artificial Sequence: Synthetic peptide"
MTDSQPG

SEQ ID NO: 6527 - protein, 7 aa, Artificial Sequence
  source: /note="Description of Artificial Sequence: Synthetic peptide"
MTDTRRL

SEQ ID NO: 6528 - protein, 7 aa, Artificial Sequence
  source: /note="Description of Artificial Sequence: Synthetic peptide"
MTDVGVR

SEQ ID NO: 6529 - protein, 7 aa, Artificial Sequence
  source: /note="Description of Artificial Sequence: Synthetic peptide"
MTDYSKG

SEQ ID NO: 6530 - protein, 7 aa, Artificial Sequence
  source: /note="Description of Artificial Sequence: Synthetic peptide"
MTEPMVD

SEQ ID NO: 6531 - protein, 7 aa, Artificial Sequence
  source: /note="Description of Artificial Sequence: Synthetic peptide"
MTESLTA

SEQ ID NO: 6532 - protein, 7 aa, Artificial Sequence
  source: /note="Description of Artificial Sequence: Synthetic peptide"
MTEVTTF

SEQ ID NO: 6533 - protein, 7 aa, Artificial Sequence
  source: /note="Description of Artificial Sequence: Synthetic peptide"
MTFPKLN

SEQ ID NO: 6534 - protein, 7 aa, Artificial Sequence
  source: /note="Description of Artificial Sequence: Synthetic peptide"
MTGMTSA

SEQ ID NO: 6535 - protein, 7 aa, Artificial Sequence
  source: /note="Description of Artificial Sequence: Synthetic peptide"
MTGNHRI

SEQ ID NO: 6536 - protein, 7 aa, Artificial Sequence
  source: /note="Description of Artificial Sequence: Synthetic peptide"
MTGTSQP

SEQ ID NO: 6537 - protein, 7 aa, Artificial Sequence
  source: /note="Description of Artificial Sequence: Synthetic peptide"
MTHPPSD

SEQ ID NO: 6538 - protein, 7 aa, Artificial Sequence
  source: /note="Description of Artificial Sequence: Synthetic peptide"
MTHTGTL

SEQ ID NO: 6539 - protein, 7 aa, Artificial Sequence
  source: /note="Description of Artificial Sequence: Synthetic peptide"
MTKPHIV

SEQ ID NO: 6540 - protein, 7 aa, Artificial Sequence
  source: /note="Description of Artificial Sequence: Synthetic peptide"
MTLGSVV

SEQ ID NO: 6541 - protein, 7 aa, Artificial Sequence
  source: /note="Description of Artificial Sequence: Synthetic peptide"
MTLHQQF

SEQ ID NO: 6542 - protein, 7 aa, Artificial Sequence
  source: /note="Description of Artificial Sequence: Synthetic peptide"
MTLSTGA

SEQ ID NO: 6543 - protein, 7 aa, Artificial Sequence
  source: /note="Description of Artificial Sequence: Synthetic peptide"
MTLVASP

SEQ ID NO: 6544 - protein, 7 aa, Artificial Sequence
  source: /note="Description of Artificial Sequence: Synthetic peptide"
MTMEAAK

SEQ ID NO: 6545 - protein, 7 aa, Artificial Sequence
  source: /note="Description of Artificial Sequence: Synthetic peptide"
MTMGEFK

SEQ ID NO: 6546 - protein, 7 aa, Artificial Sequence
  source: /note="Description of Artificial Sequence: Synthetic peptide"
MTMTHRG

SEQ ID NO: 6547 - protein, 7 aa, Artificial Sequence
  source: /note="Description of Artificial Sequence: Synthetic peptide"
MTNAVVD

SEQ ID NO: 6548 - protein, 7 aa, Artificial Sequence
  source: /note="Description of Artificial Sequence: Synthetic peptide"
MTNGHGM

SEQ ID NO: 6549 - protein, 7 aa, Artificial Sequence
  source: /note="Description of Artificial Sequence: Synthetic peptide"
MTNLQSL

SEQ ID NO: 6550 - protein, 7 aa, Artificial Sequence
  source: /note="Description of Artificial Sequence: Synthetic peptide"
MTNRATA

SEQ ID NO: 6551 - protein, 7 aa, Artificial Sequence
  source: /note="Description of Artificial Sequence: Synthetic peptide"
MTPHNSR

SEQ ID NO: 6552 - protein, 7 aa, Artificial Sequence
  source: /note="Description of Artificial Sequence: Synthetic peptide"
MTPPHGA

SEQ ID NO: 6553 - protein, 7 aa, Artificial Sequence
  source: /note="Description of Artificial Sequence: Synthetic peptide"
MTPTSYN

SEQ ID NO: 6554 - protein, 7 aa, Artificial Sequence
  source: /note="Description of Artificial Sequence: Synthetic peptide"
MTQTDVT

SEQ ID NO: 6555 - protein, 7 aa, Artificial Sequence
  source: /note="Description of Artificial Sequence: Synthetic peptide"
MTRSEWS

SEQ ID NO: 6556 - protein, 7 aa, Artificial Sequence
  source: /note="Description of Artificial Sequence: Synthetic peptide"
MTSLAAL

SEQ ID NO: 6557 - protein, 7 aa, Artificial Sequence
  source: /note="Description of Artificial Sequence: Synthetic peptide"
MTSNTRM

SEQ ID NO: 6558 - protein, 7 aa, Artificial Sequence
  source: /note="Description of Artificial Sequence: Synthetic peptide"
MTSVRMS

SEQ ID NO: 6559 - protein, 7 aa, Artificial Sequence
  source: /note="Description of Artificial Sequence: Synthetic peptide"
MTTGIDS

SEQ ID NO: 6560 - protein, 7 aa, Artificial Sequence
  source: /note="Description of Artificial Sequence: Synthetic peptide"
MTTSPFA

SEQ ID NO: 6561 - protein, 7 aa, Artificial Sequence
  source: /note="Description of Artificial Sequence: Synthetic peptide"
MTTSSDL

SEQ ID NO: 6562 - protein, 7 aa, Artificial Sequence
  source: /note="Description of Artificial Sequence: Synthetic peptide"
MTVGDSA

SEQ ID NO: 6563 - protein, 7 aa, Artificial Sequence
  source: /note="Description of Artificial Sequence: Synthetic peptide"
MTVGIPA

SEQ ID NO: 6564 - protein, 7 aa, Artificial Sequence
  source: /note="Description of Artificial Sequence: Synthetic peptide"
MTVSNKY

SEQ ID NO: 6565 - protein, 7 aa, Artificial Sequence
  source: /note="Description of Artificial Sequence: Synthetic peptide"
MTVSPGT

SEQ ID NO: 6566 - protein, 7 aa, Artificial Sequence
  source: /note="Description of Artificial Sequence: Synthetic peptide"
MVASDNS

SEQ ID NO: 6567 - protein, 7 aa, Artificial Sequence
  source: /note="Description of Artificial Sequence: Synthetic peptide"
MVDRVLD

SEQ ID NO: 6568 - protein, 7 aa, Artificial Sequence
  source: /note="Description of Artificial Sequence: Synthetic peptide"
MVELTWE

SEQ ID NO: 6569 - protein, 7 aa, Artificial Sequence
  source: /note="Description of Artificial Sequence: Synthetic peptide"
MVGFGAA

SEQ ID NO: 6570 - protein, 7 aa, Artificial Sequence
  source: /note="Description of Artificial Sequence: Synthetic peptide"
MVGQVKN

SEQ ID NO: 6571 - protein, 7 aa, Artificial Sequence
  source: /note="Description of Artificial Sequence: Synthetic peptide"
MVGRPIV

SEQ ID NO: 6572 - protein, 7 aa, Artificial Sequence
  source: /note="Description of Artificial Sequence: Synthetic peptide"
MVGRTGG

SEQ ID NO: 6573 - protein, 7 aa, Artificial Sequence
  source: /note="Description of Artificial Sequence: Synthetic peptide"
MVGRVPS

SEQ ID NO: 6574 - protein, 7 aa, Artificial Sequence
  source: /note="Description of Artificial Sequence: Synthetic peptide"
MVHSSAH

SEQ ID NO: 6575 - protein, 7 aa, Artificial Sequence
  source: /note="Description of Artificial Sequence: Synthetic peptide"
MVHSSES

SEQ ID NO: 6576 - protein, 7 aa, Artificial Sequence
  source: /note="Description of Artificial Sequence: Synthetic peptide"
MVIHPDH

SEQ ID NO: 6577 - protein, 7 aa, Artificial Sequence
  source: /note="Description of Artificial Sequence: Synthetic peptide"
MVLKLAA

SEQ ID NO: 6578 - protein, 7 aa, Artificial Sequence
  source: /note="Description of Artificial Sequence: Synthetic peptide"
MVNVIMP

SEQ ID NO: 6579 - protein, 7 aa, Artificial Sequence
  source: /note="Description of Artificial Sequence: Synthetic peptide"
MVNYLDV

SEQ ID NO: 6580 - protein, 7 aa, Artificial Sequence
  source: /note="Description of Artificial Sequence: Synthetic peptide"
MVPGNSG

SEQ ID NO: 6581 - protein, 7 aa, Artificial Sequence
  source: /note="Description of Artificial Sequence: Synthetic peptide"
MVPRENL

SEQ ID NO: 6582 - protein, 7 aa, Artificial Sequence
  source: /note="Description of Artificial Sequence: Synthetic peptide"
MVPSQHS

SEQ ID NO: 6583 - protein, 7 aa, Artificial Sequence
  source: /note="Description of Artificial Sequence: Synthetic peptide"
MVPSSEM

SEQ ID NO: 6584 - protein, 7 aa, Artificial Sequence
  source: /note="Description of Artificial Sequence: Synthetic peptide"
MVQRTTT

SEQ ID NO: 6585 - protein, 7 aa, Artificial Sequence
  source: /note="Description of Artificial Sequence: Synthetic peptide"
MVRALPC

SEQ ID NO: 6586 - protein, 7 aa, Artificial Sequence
  source: /note="Description of Artificial Sequence: Synthetic peptide"
MVSNRQT

SEQ ID NO: 6587 - protein, 7 aa, Artificial Sequence
  source: /note="Description of Artificial Sequence: Synthetic peptide"
MVSPSPT

SEQ ID NO: 6588 - protein, 7 aa, Artificial Sequence
  source: /note="Description of Artificial Sequence: Synthetic peptide"
MVSVDRD

SEQ ID NO: 6589 - protein, 7 aa, Artificial Sequence
  source: /note="Description of Artificial Sequence: Synthetic peptide"
MVTLTPG

SEQ ID NO: 6590 - protein, 7 aa, Artificial Sequence
  source: /note="Description of Artificial Sequence: Synthetic peptide"
MVTNVTK

SEQ ID NO: 6591 - protein, 7 aa, Artificial Sequence
  source: /note="Description of Artificial Sequence: Synthetic peptide"
MVTRPES

SEQ ID NO: 6592 - protein, 7 aa, Artificial Sequence
  source: /note="Description of Artificial Sequence: Synthetic peptide"
MVTSSTS

SEQ ID NO: 6593 - protein, 7 aa, Artificial Sequence
  source: /note="Description of Artificial Sequence: Synthetic peptide"
MVTYGQQ

SEQ ID NO: 6594 - protein, 7 aa, Artificial Sequence
  source: /note="Description of Artificial Sequence: Synthetic peptide"
MVVHHNN

SEQ ID NO: 6595 - protein, 7 aa, Artificial Sequence
  source: /note="Description of Artificial Sequence: Synthetic peptide"
MVVKMVS

SEQ ID NO: 6596 - protein, 7 aa, Artificial Sequence
  source: /note="Description of Artificial Sequence: Synthetic peptide"
MWNKEHD

SEQ ID NO: 6597 - protein, 7 aa, Artificial Sequence
  source: /note="Description of Artificial Sequence: Synthetic peptide"
MYDNDVW

SEQ ID NO: 6598 - protein, 7 aa, Artificial Sequence
  source: /note="Description of Artificial Sequence: Synthetic peptide"
MYDRSGL

SEQ ID NO: 6599 - protein, 7 aa, Artificial Sequence
  source: /note="Description of Artificial Sequence: Synthetic peptide"
MYESRGV

SEQ ID NO: 6600 - protein, 7 aa, Artificial Sequence
  source: /note="Description of Artificial Sequence: Synthetic peptide"
MYPGMMM

SEQ ID NO: 6601 - protein, 7 aa, Artificial Sequence
  source: /note="Description of Artificial Sequence: Synthetic peptide"
MYPSGIV

SEQ ID NO: 6602 - protein, 7 aa, Artificial Sequence
  source: /note="Description of Artificial Sequence: Synthetic peptide"
MYPTHTG

SEQ ID NO: 6603 - protein, 7 aa, Artificial Sequence
  source: /note="Description of Artificial Sequence: Synthetic peptide"
MYPVRLD

SEQ ID NO: 6604 - protein, 7 aa, Artificial Sequence
  source: /note="Description of Artificial Sequence: Synthetic peptide"
MYQEHTE

SEQ ID NO: 6605 - protein, 7 aa, Artificial Sequence
  source: /note="Description of Artificial Sequence: Synthetic peptide"
MYQQAHS

SEQ ID NO: 6606 - protein, 7 aa, Artificial Sequence
  source: /note="Description of Artificial Sequence: Synthetic peptide"
MYRDELT

SEQ ID NO: 6607 - protein, 7 aa, Artificial Sequence
  source: /note="Description of Artificial Sequence: Synthetic peptide"
MYSMSNV

SEQ ID NO: 6608 - protein, 7 aa, Artificial Sequence
  source: /note="Description of Artificial Sequence: Synthetic peptide"
MYSTQSS

SEQ ID NO: 6609 - protein, 7 aa, Artificial Sequence
  source: /note="Description of Artificial Sequence: Synthetic peptide"
MYTSMAG

SEQ ID NO: 6610 - protein, 7 aa, Artificial Sequence
  source: /note="Description of Artificial Sequence: Synthetic peptide"
MYVAASP

SEQ ID NO: 6611 - protein, 7 aa, Artificial Sequence
  source: /note="Description of Artificial Sequence: Synthetic peptide"
NAAPSTI

SEQ ID NO: 6612 - protein, 7 aa, Artificial Sequence
  source: /note="Description of Artificial Sequence: Synthetic peptide"
NAARLTS

SEQ ID NO: 6613 - protein, 7 aa, Artificial Sequence
  source: /note="Description of Artificial Sequence: Synthetic peptide"
NAASPGF

SEQ ID NO: 6614 - protein, 7 aa, Artificial Sequence
  source: /note="Description of Artificial Sequence: Synthetic peptide"
NAASQSP

SEQ ID NO: 6615 - protein, 7 aa, Artificial Sequence
  source: /note="Description of Artificial Sequence: Synthetic peptide"
NADALGS

SEQ ID NO: 6616 - protein, 7 aa, Artificial Sequence
  source: /note="Description of Artificial Sequence: Synthetic peptide"
NADPRDR

SEQ ID NO: 6617 - protein, 7 aa, Artificial Sequence
  source: /note="Description of Artificial Sequence: Synthetic peptide"
NADRRSE

SEQ ID NO: 6618 - protein, 7 aa, Artificial Sequence
  source: /note="Description of Artificial Sequence: Synthetic peptide"
NAEAFLD

SEQ ID NO: 6619 - protein, 7 aa, Artificial Sequence
  source: /note="Description of Artificial Sequence: Synthetic peptide"
NAEDRTV

SEQ ID NO: 6620 - protein, 7 aa, Artificial Sequence
  source: /note="Description of Artificial Sequence: Synthetic peptide"
NAFSTST

SEQ ID NO: 6621 - protein, 7 aa, Artificial Sequence
  source: /note="Description of Artificial Sequence: Synthetic peptide"
NAGGTWD

SEQ ID NO: 6622 - protein, 7 aa, Artificial Sequence
  source: /note="Description of Artificial Sequence: Synthetic peptide"
NAGTRQA

SEQ ID NO: 6623 - protein, 7 aa, Artificial Sequence
  source: /note="Description of Artificial Sequence: Synthetic peptide"
NAHLSLN

SEQ ID NO: 6624 - protein, 7 aa, Artificial Sequence
  source: /note="Description of Artificial Sequence: Synthetic peptide"
NAHSTLV

SEQ ID NO: 6625 - protein, 7 aa, Artificial Sequence
  source: /note="Description of Artificial Sequence: Synthetic peptide"
NAHTDRQ

SEQ ID NO: 6626 - protein, 7 aa, Artificial Sequence
  source: /note="Description of Artificial Sequence: Synthetic peptide"
NAHTQIQ

SEQ ID NO: 6627 - protein, 7 aa, Artificial Sequence
  source: /note="Description of Artificial Sequence: Synthetic peptide"
NAKALAM

SEQ ID NO: 6628 - protein, 7 aa, Artificial Sequence
  source: /note="Description of Artificial Sequence: Synthetic peptide"
NAKSTIG

SEQ ID NO: 6629 - protein, 7 aa, Artificial Sequence
  source: /note="Description of Artificial Sequence: Synthetic peptide"
NALARSG

SEQ ID NO: 6630 - protein, 7 aa, Artificial Sequence
  source: /note="Description of Artificial Sequence: Synthetic peptide"
NALDDNV

SEQ ID NO: 6631 - protein, 7 aa, Artificial Sequence
  source: /note="Description of Artificial Sequence: Synthetic peptide"
NALDRSM

SEQ ID NO: 6632 - protein, 7 aa, Artificial Sequence
  source: /note="Description of Artificial Sequence: Synthetic peptide"
NALEASG

SEQ ID NO: 6633 - protein, 7 aa, Artificial Sequence
  source: /note="Description of Artificial Sequence: Synthetic peptide"
NALNPNF

SEQ ID NO: 6634 - protein, 7 aa, Artificial Sequence
  source: /note="Description of Artificial Sequence: Synthetic peptide"
NALRSYS

SEQ ID NO: 6635 - protein, 7 aa, Artificial Sequence
  source: /note="Description of Artificial Sequence: Synthetic peptide"
NALSHVT

SEQ ID NO: 6636 - protein, 7 aa, Artificial Sequence
  source: /note="Description of Artificial Sequence: Synthetic peptide"
NALVSES

SEQ ID NO: 6637 - protein, 7 aa, Artificial Sequence
  source: /note="Description of Artificial Sequence: Synthetic peptide"
NANGSRV

SEQ ID NO: 6638 - protein, 7 aa, Artificial Sequence
  source: /note="Description of Artificial Sequence: Synthetic peptide"
NANHQNV

SEQ ID NO: 6639 - protein, 7 aa, Artificial Sequence
  source: /note="Description of Artificial Sequence: Synthetic peptide"
NANLNSA

SEQ ID NO: 6640 - protein, 7 aa, Artificial Sequence
  source: /note="Description of Artificial Sequence: Synthetic peptide"
NANTGRL

SEQ ID NO: 6641 - protein, 7 aa, Artificial Sequence
  source: /note="Description of Artificial Sequence: Synthetic peptide"
NANVPNR

SEQ ID NO: 6642 - protein, 7 aa, Artificial Sequence
  source: /note="Description of Artificial Sequence: Synthetic peptide"
NAPRSAV

SEQ ID NO: 6643 - protein, 7 aa, Artificial Sequence
  source: /note="Description of Artificial Sequence: Synthetic peptide"
NAPSESR

SEQ ID NO: 6644 - protein, 7 aa, Artificial Sequence
  source: /note="Description of Artificial Sequence: Synthetic peptide"
NAQIRPM

SEQ ID NO: 6645 - protein, 7 aa, Artificial Sequence
  source: /note="Description of Artificial Sequence: Synthetic peptide"
NARLSTS

SEQ ID NO: 6646 - protein, 7 aa, Artificial Sequence
  source: /note="Description of Artificial Sequence: Synthetic peptide"
NARMLAS

SEQ ID NO: 6647 - protein, 7 aa, Artificial Sequence
  source: /note="Description of Artificial Sequence: Synthetic peptide"
NARPHDP

SEQ ID NO: 6648 - protein, 7 aa, Artificial Sequence
  source: /note="Description of Artificial Sequence: Synthetic peptide"
NARPSDM

SEQ ID NO: 6649 - protein, 7 aa, Artificial Sequence
  source: /note="Description of Artificial Sequence: Synthetic peptide"
NARSIDY

SEQ ID NO: 6650 - protein, 7 aa, Artificial Sequence
  source: /note="Description of Artificial Sequence: Synthetic peptide"
NARSSSY

SEQ ID NO: 6651 - protein, 7 aa, Artificial Sequence
  source: /note="Description of Artificial Sequence: Synthetic peptide"
NARVEAP

SEQ ID NO: 6652 - protein, 7 aa, Artificial Sequence
  source: /note="Description of Artificial Sequence: Synthetic peptide"
NARYTHS

SEQ ID NO: 6653 - protein, 7 aa, Artificial Sequence
  source: /note="Description of Artificial Sequence: Synthetic peptide"
NASGLPR

SEQ ID NO: 6654 - protein, 7 aa, Artificial Sequence
  source: /note="Description of Artificial Sequence: Synthetic peptide"
NASIHSH

SEQ ID NO: 6655 - protein, 7 aa, Artificial Sequence
  source: /note="Description of Artificial Sequence: Synthetic peptide"
NASLPLS

SEQ ID NO: 6656 - protein, 7 aa, Artificial Sequence
  source: /note="Description of Artificial Sequence: Synthetic peptide"
NASNSEK

SEQ ID NO: 6657 - protein, 7 aa, Artificial Sequence
  source: /note="Description of Artificial Sequence: Synthetic peptide"
NASPIRL

SEQ ID NO: 6658 - protein, 7 aa, Artificial Sequence
  source: /note="Description of Artificial Sequence: Synthetic peptide"
NASSRSL

SEQ ID NO: 6659 - protein, 7 aa, Artificial Sequence
  source: /note="Description of Artificial Sequence: Synthetic peptide"
NASTVPE

SEQ ID NO: 6660 - protein, 7 aa, Artificial Sequence
  source: /note="Description of Artificial Sequence: Synthetic peptide"
NATADGF

SEQ ID NO: 6661 - protein, 7 aa, Artificial Sequence
  source: /note="Description of Artificial Sequence: Synthetic peptide"
NATHPNF

SEQ ID NO: 6662 - protein, 7 aa, Artificial Sequence
  source: /note="Description of Artificial Sequence: Synthetic peptide"
NATHTST

SEQ ID NO: 6663 - protein, 7 aa, Artificial Sequence
  source: /note="Description of Artificial Sequence: Synthetic peptide"
NATPVAV

SEQ ID NO: 6664 - protein, 7 aa, Artificial Sequence
  source: /note="Description of Artificial Sequence: Synthetic peptide"
NATSGSH

SEQ ID NO: 6665 - protein, 7 aa, Artificial Sequence
  source: /note="Description of Artificial Sequence: Synthetic peptide"
NATSTLC

SEQ ID NO: 6666 - protein, 7 aa, Artificial Sequence
  source: /note="Description of Artificial Sequence: Synthetic peptide"
NATSYTM

SEQ ID NO: 6667 - protein, 7 aa, Artificial Sequence
  source: /note="Description of Artificial Sequence: Synthetic peptide"
NATVSPR

SEQ ID NO: 6668 - protein, 7 aa, Artificial Sequence
  source: /note="Description of Artificial Sequence: Synthetic peptide"
NAVPGRS

SEQ ID NO: 6669 - protein, 7 aa, Artificial Sequence
  source: /note="Description of Artificial Sequence: Synthetic peptide"
NAVPIPP

SEQ ID NO: 6670 - protein, 7 aa, Artificial Sequence
  source: /note="Description of Artificial Sequence: Synthetic peptide"
NAVQSLM

SEQ ID NO: 6671 - protein, 7 aa, Artificial Sequence
  source: /note="Description of Artificial Sequence: Synthetic peptide"
NAVSVNS

SEQ ID NO: 6672 - protein, 7 aa, Artificial Sequence
  source: /note="Description of Artificial Sequence: Synthetic peptide"
NAWKTPV

SEQ ID NO: 6673 - protein, 7 aa, Artificial Sequence
  source: /note="Description of Artificial Sequence: Synthetic peptide"
NAYTTGP

SEQ ID NO: 6674 - protein, 7 aa, Artificial Sequence
  source: /note="Description of Artificial Sequence: Synthetic peptide"
NCDAVAW

SEQ ID NO: 6675 - protein, 7 aa, Artificial Sequence
  source: /note="Description of Artificial Sequence: Synthetic peptide"
NDDIQRK

SEQ ID NO: 6676 - protein, 7 aa, Artificial Sequence
  source: /note="Description of Artificial Sequence: Synthetic peptide"
NDGHRNF

SEQ ID NO: 6677 - protein, 7 aa, Artificial Sequence
  source: /note="Description of Artificial Sequence: Synthetic peptide"
NDILLLS

SEQ ID NO: 6678 - protein, 7 aa, Artificial Sequence
  source: /note="Description of Artificial Sequence: Synthetic peptide"
NDITEVP

SEQ ID NO: 6679 - protein, 7 aa, Artificial Sequence
  source: /note="Description of Artificial Sequence: Synthetic peptide"
NDKFRLS

SEQ ID NO: 6680 - protein, 7 aa, Artificial Sequence
  source: /note="Description of Artificial Sequence: Synthetic peptide"
NDKMLQR

SEQ ID NO: 6681 - protein, 7 aa, Artificial Sequence
  source: /note="Description of Artificial Sequence: Synthetic peptide"
NDPKVPQ

SEQ ID NO: 6682 - protein, 7 aa, Artificial Sequence
  source: /note="Description of Artificial Sequence: Synthetic peptide"
NDPMTSQ

SEQ ID NO: 6683 - protein, 7 aa, Artificial Sequence
  source: /note="Description of Artificial Sequence: Synthetic peptide"
NDRMKNS

SEQ ID NO: 6684 - protein, 7 aa, Artificial Sequence
  source: /note="Description of Artificial Sequence: Synthetic peptide"
NDRSKYP

SEQ ID NO: 6685 - protein, 7 aa, Artificial Sequence
  source: /note="Description of Artificial Sequence: Synthetic peptide"
NDSSLGA

SEQ ID NO: 6686 - protein, 7 aa, Artificial Sequence
  source: /note="Description of Artificial Sequence: Synthetic peptide"
NDSSSTM

SEQ ID NO: 6687 - protein, 7 aa, Artificial Sequence
  source: /note="Description of Artificial Sequence: Synthetic peptide"
NDTFSSL

SEQ ID NO: 6688 - protein, 7 aa, Artificial Sequence
  source: /note="Description of Artificial Sequence: Synthetic peptide"
NDTGALM

SEQ ID NO: 6689 - protein, 7 aa, Artificial Sequence
  source: /note="Description of Artificial Sequence: Synthetic peptide"
NDTYRTS

SEQ ID NO: 6690 - protein, 7 aa, Artificial Sequence
  source: /note="Description of Artificial Sequence: Synthetic peptide"
NDVPNTP

SEQ ID NO: 6691 - protein, 7 aa, Artificial Sequence
  source: /note="Description of Artificial Sequence: Synthetic peptide"
NDVTTHK

SEQ ID NO: 6692 - protein, 7 aa, Artificial Sequence
  source: /note="Description of Artificial Sequence: Synthetic peptide"
NDWLIAG

SEQ ID NO: 6693 - protein, 7 aa, Artificial Sequence
  source: /note="Description of Artificial Sequence: Synthetic peptide"
NEALSQL

SEQ ID NO: 6694 - protein, 7 aa, Artificial Sequence
  source: /note="Description of Artificial Sequence: Synthetic peptide"
NEAVASM

SEQ ID NO: 6695 - protein, 7 aa, Artificial Sequence
  source: /note="Description of Artificial Sequence: Synthetic peptide"
NECDDLM

SEQ ID NO: 6696 - protein, 7 aa, Artificial Sequence
  source: /note="Description of Artificial Sequence: Synthetic peptide"
NEGFLLG

SEQ ID NO: 6697 - protein, 7 aa, Artificial Sequence
  source: /note="Description of Artificial Sequence: Synthetic peptide"
NEHHKTE

SEQ ID NO: 6698 - protein, 7 aa, Artificial Sequence
  source: /note="Description of Artificial Sequence: Synthetic peptide"
NEIFTPM

SEQ ID NO: 6699 - protein, 7 aa, Artificial Sequence
  source: /note="Description of Artificial Sequence: Synthetic peptide"
NELASRA

SEQ ID NO: 6700 - protein, 7 aa, Artificial Sequence
  source: /note="Description of Artificial Sequence: Synthetic peptide"
NELGGHH

SEQ ID NO: 6701 - protein, 7 aa, Artificial Sequence
  source: /note="Description of Artificial Sequence: Synthetic peptide"
NELVSKT

SEQ ID NO: 6702 - protein, 7 aa, Artificial Sequence
  source: /note="Description of Artificial Sequence: Synthetic peptide"
NEMSGQR

SEQ ID NO: 6703 - protein, 7 aa, Artificial Sequence
  source: /note="Description of Artificial Sequence: Synthetic peptide"
NEPLGMR

SEQ ID NO: 6704 - protein, 7 aa, Artificial Sequence
  source: /note="Description of Artificial Sequence: Synthetic peptide"
NEQHATH

SEQ ID NO: 6705 - protein, 7 aa, Artificial Sequence
  source: /note="Description of Artificial Sequence: Synthetic peptide"
NERGSSW

SEQ ID NO: 6706 - protein, 7 aa, Artificial Sequence
  source: /note="Description of Artificial Sequence: Synthetic peptide"
NERHHQV

SEQ ID NO: 6707 - protein, 7 aa, Artificial Sequence
  source: /note="Description of Artificial Sequence: Synthetic peptide"
NERNVQL

SEQ ID NO: 6708 - protein, 7 aa, Artificial Sequence
  source: /note="Description of Artificial Sequence: Synthetic peptide"
NERRVVL

SEQ ID NO: 6709 - protein, 7 aa, Artificial Sequence
  source: /note="Description of Artificial Sequence: Synthetic peptide"
NESHKNV

SEQ ID NO: 6710 - protein, 7 aa, Artificial Sequence
  source: /note="Description of Artificial Sequence: Synthetic peptide"
NESLRTA

SEQ ID NO: 6711 - protein, 7 aa, Artificial Sequence
  source: /note="Description of Artificial Sequence: Synthetic peptide"
NESLTSA

SEQ ID NO: 6712 - protein, 7 aa, Artificial Sequence
  source: /note="Description of Artificial Sequence: Synthetic peptide"
NESVRSY

SEQ ID NO: 6713 - protein, 7 aa, Artificial Sequence
  source: /note="Description of Artificial Sequence: Synthetic peptide"
NEYVLGL

SEQ ID NO: 6714 - protein, 7 aa, Artificial Sequence
  source: /note="Description of Artificial Sequence: Synthetic peptide"
NFAARSY

SEQ ID NO: 6715 - protein, 7 aa, Artificial Sequence
  source: /note="Description of Artificial Sequence: Synthetic peptide"
NFDRHGA

SEQ ID NO: 6716 - protein, 7 aa, Artificial Sequence
  source: /note="Description of Artificial Sequence: Synthetic peptide"
NFDRPRT

SEQ ID NO: 6717 - protein, 7 aa, Artificial Sequence
  source: /note="Description of Artificial Sequence: Synthetic peptide"
NFNTRVA

SEQ ID NO: 6718 - protein, 7 aa, Artificial Sequence
  source: /note="Description of Artificial Sequence: Synthetic peptide"
NFRVSSG

SEQ ID NO: 6719 - protein, 7 aa, Artificial Sequence
  source: /note="Description of Artificial Sequence: Synthetic peptide"
NFSPTSP

SEQ ID NO: 6720 - protein, 7 aa, Artificial Sequence
  source: /note="Description of Artificial Sequence: Synthetic peptide"
NFTKAGA

SEQ ID NO: 6721 - protein, 7 aa, Artificial Sequence
  source: /note="Description of Artificial Sequence: Synthetic peptide"
NFTKSAG

SEQ ID NO: 6722 - protein, 7 aa, Artificial Sequence
  source: /note="Description of Artificial Sequence: Synthetic peptide"
NFTLKPI

SEQ ID NO: 6723 - protein, 7 aa, Artificial Sequence
  source: /note="Description of Artificial Sequence: Synthetic peptide"
NFVGVPT

SEQ ID NO: 6724 - protein, 7 aa, Artificial Sequence
  source: /note="Description of Artificial Sequence: Synthetic peptide"
NFVVPSD

SEQ ID NO: 6725 - protein, 7 aa, Artificial Sequence
  source: /note="Description of Artificial Sequence: Synthetic peptide"
NGAAEVA

SEQ ID NO: 6726 - protein, 7 aa, Artificial Sequence
  source: /note="Description of Artificial Sequence: Synthetic peptide"
NGADRAS

SEQ ID NO: 6727 - protein, 7 aa, Artificial Sequence
  source: /note="Description of Artificial Sequence: Synthetic peptide"
NGAGLTI

SEQ ID NO: 6728 - protein, 7 aa, Artificial Sequence
  source: /note="Description of Artificial Sequence: Synthetic peptide"
NGALRLP

SEQ ID NO: 6729 - protein, 7 aa, Artificial Sequence
  source: /note="Description of Artificial Sequence: Synthetic peptide"
NGDACPS

SEQ ID NO: 6730 - protein, 7 aa, Artificial Sequence
  source: /note="Description of Artificial Sequence: Synthetic peptide"
NGEAQAR

SEQ ID NO: 6731 - protein, 7 aa, Artificial Sequence
  source: /note="Description of Artificial Sequence: Synthetic peptide"
NGEPFSI

SEQ ID NO: 6732 - protein, 7 aa, Artificial Sequence
  source: /note="Description of Artificial Sequence: Synthetic peptide"
NGGAYTL

SEQ ID NO: 6733 - protein, 7 aa, Artificial Sequence
  source: /note="Description of Artificial Sequence: Synthetic peptide"
NGGISRT

SEQ ID NO: 6734 - protein, 7 aa, Artificial Sequence
  source: /note="Description of Artificial Sequence: Synthetic peptide"
NGGNLLL

SEQ ID NO: 6735 - protein, 7 aa, Artificial Sequence
  source: /note="Description of Artificial Sequence: Synthetic peptide"
NGHFVDA

SEQ ID NO: 6736 - protein, 7 aa, Artificial Sequence
  source: /note="Description of Artificial Sequence: Synthetic peptide"
NGHNHML

SEQ ID NO: 6737 - protein, 7 aa, Artificial Sequence
  source: /note="Description of Artificial Sequence: Synthetic peptide"
NGHSVSE

SEQ ID NO: 6738 - protein, 7 aa, Artificial Sequence
  source: /note="Description of Artificial Sequence: Synthetic peptide"
NGKNGST

SEQ ID NO: 6739 - protein, 7 aa, Artificial Sequence
  source: /note="Description of Artificial Sequence: Synthetic peptide"
NGLQTGV

SEQ ID NO: 6740 - protein, 7 aa, Artificial Sequence
  source: /note="Description of Artificial Sequence: Synthetic peptide"
NGMGAVV

SEQ ID NO: 6741 - protein, 7 aa, Artificial Sequence
  source: /note="Description of Artificial Sequence: Synthetic peptide"
NGMQPLN

SEQ ID NO: 6742 - protein, 7 aa, Artificial Sequence
  source: /note="Description of Artificial Sequence: Synthetic peptide"
NGMYPYP

SEQ ID NO: 6743 - protein, 7 aa, Artificial Sequence
  source: /note="Description of Artificial Sequence: Synthetic peptide"
NGNEVLS

SEQ ID NO: 6744 - protein, 7 aa, Artificial Sequence
  source: /note="Description of Artificial Sequence: Synthetic peptide"
NGPHRMV

SEQ ID NO: 6745 - protein, 7 aa, Artificial Sequence
  source: /note="Description of Artificial Sequence: Synthetic peptide"
NGPPAVG

SEQ ID NO: 6746 - protein, 7 aa, Artificial Sequence
  source: /note="Description of Artificial Sequence: Synthetic peptide"
NGPPKGI

SEQ ID NO: 6747 - protein, 7 aa, Artificial Sequence
  source: /note="Description of Artificial Sequence: Synthetic peptide"
NGPSAQQ

SEQ ID NO: 6748 - protein, 7 aa, Artificial Sequence
  source: /note="Description of Artificial Sequence: Synthetic peptide"
NGQAEPA

SEQ ID NO: 6749 - protein, 7 aa, Artificial Sequence
  source: /note="Description of Artificial Sequence: Synthetic peptide"
NGSHIDR

SEQ ID NO: 6750 - protein, 7 aa, Artificial Sequence
  source: /note="Description of Artificial Sequence: Synthetic peptide"
NGSWVPA

SEQ ID NO: 6751 - protein, 7 aa, Artificial Sequence
  source: /note="Description of Artificial Sequence: Synthetic peptide"
NGSYQPP

SEQ ID NO: 6752 - protein, 7 aa, Artificial Sequence
  source: /note="Description of Artificial Sequence: Synthetic peptide"
NGTQLLS

SEQ ID NO: 6753 - protein, 7 aa, Artificial Sequence
  source: /note="Description of Artificial Sequence: Synthetic peptide"
NGTTALF

SEQ ID NO: 6754 - protein, 7 aa, Artificial Sequence
  source: /note="Description of Artificial Sequence: Synthetic peptide"
NGTYSVE

SEQ ID NO: 6755 - protein, 7 aa, Artificial Sequence
  source: /note="Description of Artificial Sequence: Synthetic peptide"
NGVLLHA

SEQ ID NO: 6756 - protein, 7 aa, Artificial Sequence
  source: /note="Description of Artificial Sequence: Synthetic peptide"
NGVPSLG

SEQ ID NO: 6757 - protein, 7 aa, Artificial Sequence
  source: /note="Description of Artificial Sequence: Synthetic peptide"
NGYAVSA

SEQ ID NO: 6758 - protein, 7 aa, Artificial Sequence
  source: /note="Description of Artificial Sequence: Synthetic peptide"
NGYTRDE

SEQ ID NO: 6759 - protein, 7 aa, Artificial Sequence
  source: /note="Description of Artificial Sequence: Synthetic peptide"
NHASNTT

SEQ ID NO: 6760 - protein, 7 aa, Artificial Sequence
  source: /note="Description of Artificial Sequence: Synthetic peptide"
NHHNAYS

SEQ ID NO: 6761 - protein, 7 aa, Artificial Sequence
  source: /note="Description of Artificial Sequence: Synthetic peptide"
NHITYEN

SEQ ID NO: 6762 - protein, 7 aa, Artificial Sequence
  source: /note="Description of Artificial Sequence: Synthetic peptide"
NHKCADE

SEQ ID NO: 6763 - protein, 7 aa, Artificial Sequence
  source: /note="Description of Artificial Sequence: Synthetic peptide"
NHKGLNL

SEQ ID NO: 6764 - protein, 7 aa, Artificial Sequence
  source: /note="Description of Artificial Sequence: Synthetic peptide"
NHMPSVY

SEQ ID NO: 6765 - protein, 7 aa, Artificial Sequence
  source: /note="Description of Artificial Sequence: Synthetic peptide"
NHNGLQM

SEQ ID NO: 6766 - protein, 7 aa, Artificial Sequence
  source: /note="Description of Artificial Sequence: Synthetic peptide"
NHNRPAN

SEQ ID NO: 6767 - protein, 7 aa, Artificial Sequence
  source: /note="Description of Artificial Sequence: Synthetic peptide"
NHPSAST

SEQ ID NO: 6768 - protein, 7 aa, Artificial Sequence
  source: /note="Description of Artificial Sequence: Synthetic peptide"
NHPVPSS

SEQ ID NO: 6769 - protein, 7 aa, Artificial Sequence
  source: /note="Description of Artificial Sequence: Synthetic peptide"
NHPYPKM

SEQ ID NO: 6770 - protein, 7 aa, Artificial Sequence
  source: /note="Description of Artificial Sequence: Synthetic peptide"
NHQLVSE

SEQ ID NO: 6771 - protein, 7 aa, Artificial Sequence
  source: /note="Description of Artificial Sequence: Synthetic peptide"
NHRASPY

SEQ ID NO: 6772 - protein, 7 aa, Artificial Sequence
  source: /note="Description of Artificial Sequence: Synthetic peptide"
NHRTGNA

SEQ ID NO: 6773 - protein, 7 aa, Artificial Sequence
  source: /note="Description of Artificial Sequence: Synthetic peptide"
NHRTSGS

SEQ ID NO: 6774 - protein, 7 aa, Artificial Sequence
  source: /note="Description of Artificial Sequence: Synthetic peptide"
NHSAEMS

SEQ ID NO: 6775 - protein, 7 aa, Artificial Sequence
  source: /note="Description of Artificial Sequence: Synthetic peptide"
NHSETLM

SEQ ID NO: 6776 - protein, 7 aa, Artificial Sequence
  source: /note="Description of Artificial Sequence: Synthetic peptide"
NHSGTIV

SEQ ID NO: 6777 - protein, 7 aa, Artificial Sequence
  source: /note="Description of Artificial Sequence: Synthetic peptide"
NHSPVPL

SEQ ID NO: 6778 - protein, 7 aa, Artificial Sequence
  source: /note="Description of Artificial Sequence: Synthetic peptide"
NHSSDGA

SEQ ID NO: 6779 - protein, 7 aa, Artificial Sequence
  source: /note="Description of Artificial Sequence: Synthetic peptide"
NHTGSTL

SEQ ID NO: 6780 - protein, 7 aa, Artificial Sequence
  source: /note="Description of Artificial Sequence: Synthetic peptide"
NHTPSIP

SEQ ID NO: 6781 - protein, 7 aa, Artificial Sequence
  source: /note="Description of Artificial Sequence: Synthetic peptide"
NHVAKSW

SEQ ID NO: 6782 - protein, 7 aa, Artificial Sequence
  source: /note="Description of Artificial Sequence: Synthetic peptide"
NHYNVNE

SEQ ID NO: 6783 - protein, 7 aa, Artificial Sequence
  source: /note="Description of Artificial Sequence: Synthetic peptide"
NIANALN

SEQ ID NO: 6784 - protein, 7 aa, Artificial Sequence
  source: /note="Description of Artificial Sequence: Synthetic peptide"
NIFDDAD

SEQ ID NO: 6785 - protein, 7 aa, Artificial Sequence
  source: /note="Description of Artificial Sequence: Synthetic peptide"
NIGATPS

SEQ ID NO: 6786 - protein, 7 aa, Artificial Sequence
  source: /note="Description of Artificial Sequence: Synthetic peptide"
NIGGMMS

SEQ ID NO: 6787 - protein, 7 aa, Artificial Sequence
  source: /note="Description of Artificial Sequence: Synthetic peptide"
NIGMTTG

SEQ ID NO: 6788 - protein, 7 aa, Artificial Sequence
  source: /note="Description of Artificial Sequence: Synthetic peptide"
NIKHGPH

SEQ ID NO: 6789 - protein, 7 aa, Artificial Sequence
  source: /note="Description of Artificial Sequence: Synthetic peptide"
NIKLGHD

SEQ ID NO: 6790 - protein, 7 aa, Artificial Sequence
  source: /note="Description of Artificial Sequence: Synthetic peptide"
NILQYTS

SEQ ID NO: 6791 - protein, 7 aa, Artificial Sequence
  source: /note="Description of Artificial Sequence: Synthetic peptide"
NILRTDE

SEQ ID NO: 6792 - protein, 7 aa, Artificial Sequence
  source: /note="Description of Artificial Sequence: Synthetic peptide"
NIPDRFI

SEQ ID NO: 6793 - protein, 7 aa, Artificial Sequence
  source: /note="Description of Artificial Sequence: Synthetic peptide"
NIPLGAA

SEQ ID NO: 6794 - protein, 7 aa, Artificial Sequence
  source: /note="Description of Artificial Sequence: Synthetic peptide"
NIPPRPL

SEQ ID NO: 6795 - protein, 7 aa, Artificial Sequence
  source: /note="Description of Artificial Sequence: Synthetic peptide"
NIQVRSG

SEQ ID NO: 6796 - protein, 7 aa, Artificial Sequence
  source: /note="Description of Artificial Sequence: Synthetic peptide"
NIRDLVH

SEQ ID NO: 6797 - protein, 7 aa, Artificial Sequence
  source: /note="Description of Artificial Sequence: Synthetic peptide"
NIRTNNI

SEQ ID NO: 6798 - protein, 7 aa, Artificial Sequence
  source: /note="Description of Artificial Sequence: Synthetic peptide"
NISLPLL

SEQ ID NO: 6799 - protein, 7 aa, Artificial Sequence
  source: /note="Description of Artificial Sequence: Synthetic peptide"
NISYTIE

SEQ ID NO: 6800 - protein, 7 aa, Artificial Sequence
  source: /note="Description of Artificial Sequence: Synthetic peptide"
NITLAHL

SEQ ID NO: 6801 - protein, 7 aa, Artificial Sequence
  source: /note="Description of Artificial Sequence: Synthetic peptide"
NITSNES

SEQ ID NO: 6802 - protein, 7 aa, Artificial Sequence
  source: /note="Description of Artificial Sequence: Synthetic peptide"
NITTRGT

SEQ ID NO: 6803 - protein, 7 aa, Artificial Sequence
  source: /note="Description of Artificial Sequence: Synthetic peptide"
NIVERSR

SEQ ID NO: 6804 - protein, 7 aa, Artificial Sequence
  source: /note="Description of Artificial Sequence: Synthetic peptide"
NKALTHM

SEQ ID NO: 6805 - protein, 7 aa, Artificial Sequence
  source: /note="Description of Artificial Sequence: Synthetic peptide"
NKEHVQG

SEQ ID NO: 6806 - protein, 7 aa, Artificial Sequence
  source: /note="Description of Artificial Sequence: Synthetic peptide"
NKEPTDS

SEQ ID NO: 6807 - protein, 7 aa, Artificial Sequence
  source: /note="Description of Artificial Sequence: Synthetic peptide"
NKEVHNS

SEQ ID NO: 6808 - protein, 7 aa, Artificial Sequence
  source: /note="Description of Artificial Sequence: Synthetic peptide"
NKGVYSG

SEQ ID NO: 6809 - protein, 7 aa, Artificial Sequence
  source: /note="Description of Artificial Sequence: Synthetic peptide"
NKHFQAH

SEQ ID NO: 6810 - protein, 7 aa, Artificial Sequence
  source: /note="Description of Artificial Sequence: Synthetic peptide"
NKIDPYT

SEQ ID NO: 6811 - protein, 7 aa, Artificial Sequence
  source: /note="Description of Artificial Sequence: Synthetic peptide"
NKMTTYA

SEQ ID NO: 6812 - protein, 7 aa, Artificial Sequence
  source: /note="Description of Artificial Sequence: Synthetic peptide"
NKQFTPE

SEQ ID NO: 6813 - protein, 7 aa, Artificial Sequence
  source: /note="Description of Artificial Sequence: Synthetic peptide"
NKSINTD

SEQ ID NO: 6814 - protein, 7 aa, Artificial Sequence
  source: /note="Description of Artificial Sequence: Synthetic peptide"
NKSLTTG

SEQ ID NO: 6815 - protein, 7 aa, Artificial Sequence
  source: /note="Description of Artificial Sequence: Synthetic peptide"
NKSMNVP

SEQ ID NO: 6816 - protein, 7 aa, Artificial Sequence
  source: /note="Description of Artificial Sequence: Synthetic peptide"
NKTDNVS

SEQ ID NO: 6817 - protein, 7 aa, Artificial Sequence
  source: /note="Description of Artificial Sequence: Synthetic peptide"
NKTQSRH

SEQ ID NO: 6818 - protein, 7 aa, Artificial Sequence
  source: /note="Description of Artificial Sequence: Synthetic peptide"
NKVLHAP

SEQ ID NO: 6819 - protein, 7 aa, Artificial Sequence
  source: /note="Description of Artificial Sequence: Synthetic peptide"
NKVSGPM

SEQ ID NO: 6820 - protein, 7 aa, Artificial Sequence
  source: /note="Description of Artificial Sequence: Synthetic peptide"
NKYQDLR

SEQ ID NO: 6821 - protein, 7 aa, Artificial Sequence
  source: /note="Description of Artificial Sequence: Synthetic peptide"
NLAHTKF

SEQ ID NO: 6822 - protein, 7 aa, Artificial Sequence
  source: /note="Description of Artificial Sequence: Synthetic peptide"
NLALDAR

SEQ ID NO: 6823 - protein, 7 aa, Artificial Sequence
  source: /note="Description of Artificial Sequence: Synthetic peptide"
NLAPIQR

SEQ ID NO: 6824 - protein, 7 aa, Artificial Sequence
  source: /note="Description of Artificial Sequence: Synthetic peptide"
NLDRPVT

SEQ ID NO: 6825 - protein, 7 aa, Artificial Sequence
  source: /note="Description of Artificial Sequence: Synthetic peptide"
NLETIPR

SEQ ID NO: 6826 - protein, 7 aa, Artificial Sequence
  source: /note="Description of Artificial Sequence: Synthetic peptide"
NLGGSVE

SEQ ID NO: 6827 - protein, 7 aa, Artificial Sequence
  source: /note="Description of Artificial Sequence: Synthetic peptide"
NLGKKEL

SEQ ID NO: 6828 - protein, 7 aa, Artificial Sequence
  source: /note="Description of Artificial Sequence: Synthetic peptide"
NLGPTLP

SEQ ID NO: 6829 - protein, 7 aa, Artificial Sequence
  source: /note="Description of Artificial Sequence: Synthetic peptide"
NLGPYPL

SEQ ID NO: 6830 - protein, 7 aa, Artificial Sequence
  source: /note="Description of Artificial Sequence: Synthetic peptide"
NLHLISA

SEQ ID NO: 6831 - protein, 7 aa, Artificial Sequence
  source: /note="Description of Artificial Sequence: Synthetic peptide"
NLHLPSS

SEQ ID NO: 6832 - protein, 7 aa, Artificial Sequence
  source: /note="Description of Artificial Sequence: Synthetic peptide"
NLHRTPD

SEQ ID NO: 6833 - protein, 7 aa, Artificial Sequence
  source: /note="Description of Artificial Sequence: Synthetic peptide"
NLHSTTA

SEQ ID NO: 6834 - protein, 7 aa, Artificial Sequence
  source: /note="Description of Artificial Sequence: Synthetic peptide"
NLIAMGS

SEQ ID NO: 6835 - protein, 7 aa, Artificial Sequence
  source: /note="Description of Artificial Sequence: Synthetic peptide"
NLIPTKA

SEQ ID NO: 6836 - protein, 7 aa, Artificial Sequence
  source: /note="Description of Artificial Sequence: Synthetic peptide"
NLKLMSG

SEQ ID NO: 6837 - protein, 7 aa, Artificial Sequence
  source: /note="Description of Artificial Sequence: Synthetic peptide"
NLKVLVT

SEQ ID NO: 6838 - protein, 7 aa, Artificial Sequence
  source: /note="Description of Artificial Sequence: Synthetic peptide"
NLKVTRD

SEQ ID NO: 6839 - protein, 7 aa, Artificial Sequence
  source: /note="Description of Artificial Sequence: Synthetic peptide"
NLLDVHL

SEQ ID NO: 6840 - protein, 7 aa, Artificial Sequence
  source: /note="Description of Artificial Sequence: Synthetic peptide"
NLLGHAV

SEQ ID NO: 6841 - protein, 7 aa, Artificial Sequence
  source: /note="Description of Artificial Sequence: Synthetic peptide"
NLLTNAV

SEQ ID NO: 6842 - protein, 7 aa, Artificial Sequence
  source: /note="Description of Artificial Sequence: Synthetic peptide"
NLNATSV

SEQ ID NO: 6843 - protein, 7 aa, Artificial Sequence
  source: /note="Description of Artificial Sequence: Synthetic peptide"
NLPPSSP

SEQ ID NO: 6844 - protein, 7 aa, Artificial Sequence
  source: /note="Description of Artificial Sequence: Synthetic peptide"
NLPRPSL

SEQ ID NO: 6845 - protein, 7 aa, Artificial Sequence
  source: /note="Description of Artificial Sequence: Synthetic peptide"
NLPRRTD

SEQ ID NO: 6846 - protein, 7 aa, Artificial Sequence
  source: /note="Description of Artificial Sequence: Synthetic peptide"
NLPYSLV

SEQ ID NO: 6847 - protein, 7 aa, Artificial Sequence
  source: /note="Description of Artificial Sequence: Synthetic peptide"
NLPYTQA

SEQ ID NO: 6848 - protein, 7 aa, Artificial Sequence
  source: /note="Description of Artificial Sequence: Synthetic peptide"
NLQLTNG

SEQ ID NO: 6849 - protein, 7 aa, Artificial Sequence
  source: /note="Description of Artificial Sequence: Synthetic peptide"
NLRDGGT

SEQ ID NO: 6850 - protein, 7 aa, Artificial Sequence
  source: /note="Description of Artificial Sequence: Synthetic peptide"
NLRGNPA

SEQ ID NO: 6851 - protein, 7 aa, Artificial Sequence
  source: /note="Description of Artificial Sequence: Synthetic peptide"
NLRMQIP

SEQ ID NO: 6852 - protein, 7 aa, Artificial Sequence
  source: /note="Description of Artificial Sequence: Synthetic peptide"
NLRPMSS

SEQ ID NO: 6853 - protein, 7 aa, Artificial Sequence
  source: /note="Description of Artificial Sequence: Synthetic peptide"
NLSDDRE

SEQ ID NO: 6854 - protein, 7 aa, Artificial Sequence
  source: /note="Description of Artificial Sequence: Synthetic peptide"
NLSDSRS

SEQ ID NO: 6855 - protein, 7 aa, Artificial Sequence
  source: /note="Description of Artificial Sequence: Synthetic peptide"
NLSHGVL

SEQ ID NO: 6856 - protein, 7 aa, Artificial Sequence
  source: /note="Description of Artificial Sequence: Synthetic peptide"
NLSHRPM

SEQ ID NO: 6857 - protein, 7 aa, Artificial Sequence
  source: /note="Description of Artificial Sequence: Synthetic peptide"
NLSMGSP

SEQ ID NO: 6858 - protein, 7 aa, Artificial Sequence
  source: /note="Description of Artificial Sequence: Synthetic peptide"
NLSNSVK

SEQ ID NO: 6859 - protein, 7 aa, Artificial Sequence
  source: /note="Description of Artificial Sequence: Synthetic peptide"
NLSPYPM

SEQ ID NO: 6860 - protein, 7 aa, Artificial Sequence
  source: /note="Description of Artificial Sequence: Synthetic peptide"
NLSPYTM

SEQ ID NO: 6861 - protein, 7 aa, Artificial Sequence
  source: /note="Description of Artificial Sequence: Synthetic peptide"
NLSRDST

SEQ ID NO: 6862 - protein, 7 aa, Artificial Sequence
  source: /note="Description of Artificial Sequence: Synthetic peptide"
NLSSGQV

SEQ ID NO: 6863 - protein, 7 aa, Artificial Sequence
  source: /note="Description of Artificial Sequence: Synthetic peptide"
NLSYTQQ

SEQ ID NO: 6864 - protein, 7 aa, Artificial Sequence
  source: /note="Description of Artificial Sequence: Synthetic peptide"
NLTAGPP

SEQ ID NO: 6865 - protein, 7 aa, Artificial Sequence
  source: /note="Description of Artificial Sequence: Synthetic peptide"
NLTGGSS

SEQ ID NO: 6866 - protein, 7 aa, Artificial Sequence
  source: /note="Description of Artificial Sequence: Synthetic peptide"
NLTHTVM

SEQ ID NO: 6867 - protein, 7 aa, Artificial Sequence
  source: /note="Description of Artificial Sequence: Synthetic peptide"
NLTNSSM

SEQ ID NO: 6868 - protein, 7 aa, Artificial Sequence
  source: /note="Description of Artificial Sequence: Synthetic peptide"
NLTRMIH

SEQ ID NO: 6869 - protein, 7 aa, Artificial Sequence
  source: /note="Description of Artificial Sequence: Synthetic peptide"
NLTVKVQ

SEQ ID NO: 6870 - protein, 7 aa, Artificial Sequence
  source: /note="Description of Artificial Sequence: Synthetic peptide"
NLVQFVH

SEQ ID NO: 6871 - protein, 7 aa, Artificial Sequence
  source: /note="Description of Artificial Sequence: Synthetic peptide"
NLVQNKP

SEQ ID NO: 6872 - protein, 7 aa, Artificial Sequence
  source: /note="Description of Artificial Sequence: Synthetic peptide"
NLYAYDP

SEQ ID NO: 6873 - protein, 7 aa, Artificial Sequence
  source: /note="Description of Artificial Sequence: Synthetic peptide"
NLYTPYP

SEQ ID NO: 6874 - protein, 7 aa, Artificial Sequence
  source: /note="Description of Artificial Sequence: Synthetic peptide"
NMAHSPP

SEQ ID NO: 6875 - protein, 7 aa, Artificial Sequence
  source: /note="Description of Artificial Sequence: Synthetic peptide"
NMAHVQY

SEQ ID NO: 6876 - protein, 7 aa, Artificial Sequence
  source: /note="Description of Artificial Sequence: Synthetic peptide"
NMAIVEQ

SEQ ID NO: 6877 - protein, 7 aa, Artificial Sequence
  source: /note="Description of Artificial Sequence: Synthetic peptide"
NMATIRV

SEQ ID NO: 6878 - protein, 7 aa, Artificial Sequence
  source: /note="Description of Artificial Sequence: Synthetic peptide"
NMHIRST

SEQ ID NO: 6879 - protein, 7 aa, Artificial Sequence
  source: /note="Description of Artificial Sequence: Synthetic peptide"
NMHTRTS

SEQ ID NO: 6880 - protein, 7 aa, Artificial Sequence
  source: /note="Description of Artificial Sequence: Synthetic peptide"
NMIALQT

SEQ ID NO: 6881 - protein, 7 aa, Artificial Sequence
  source: /note="Description of Artificial Sequence: Synthetic peptide"
NMKASSV

SEQ ID NO: 6882 - protein, 7 aa, Artificial Sequence
  source: /note="Description of Artificial Sequence: Synthetic peptide"
NMLTDRV

SEQ ID NO: 6883 - protein, 7 aa, Artificial Sequence
  source: /note="Description of Artificial Sequence: Synthetic peptide"
NMPNTSH

SEQ ID NO: 6884 - protein, 7 aa, Artificial Sequence
  source: /note="Description of Artificial Sequence: Synthetic peptide"
NMPRHGL

SEQ ID NO: 6885 - protein, 7 aa, Artificial Sequence
  source: /note="Description of Artificial Sequence: Synthetic peptide"
NMPVGST

SEQ ID NO: 6886 - protein, 7 aa, Artificial Sequence
  source: /note="Description of Artificial Sequence: Synthetic peptide"
NMQGTNP

SEQ ID NO: 6887 - protein, 7 aa, Artificial Sequence
  source: /note="Description of Artificial Sequence: Synthetic peptide"
NMRDTAS

SEQ ID NO: 6888 - protein, 7 aa, Artificial Sequence
  source: /note="Description of Artificial Sequence: Synthetic peptide"
NMRLDQG

SEQ ID NO: 6889 - protein, 7 aa, Artificial Sequence
  source: /note="Description of Artificial Sequence: Synthetic peptide"
NMRPHTG

SEQ ID NO: 6890 - protein, 7 aa, Artificial Sequence
  source: /note="Description of Artificial Sequence: Synthetic peptide"
NMRVTPQ

SEQ ID NO: 6891 - protein, 7 aa, Artificial Sequence
  source: /note="Description of Artificial Sequence: Synthetic peptide"
NMSANIN

SEQ ID NO: 6892 - protein, 7 aa, Artificial Sequence
  source: /note="Description of Artificial Sequence: Synthetic peptide"
NMSKSPG

SEQ ID NO: 6893 - protein, 7 aa, Artificial Sequence
  source: /note="Description of Artificial Sequence: Synthetic peptide"
NMSNVHT

SEQ ID NO: 6894 - protein, 7 aa, Artificial Sequence
  source: /note="Description of Artificial Sequence: Synthetic peptide"
NMSRGAM

SEQ ID NO: 6895 - protein, 7 aa, Artificial Sequence
  source: /note="Description of Artificial Sequence: Synthetic peptide"
NMYPVPP

SEQ ID NO: 6896 - protein, 7 aa, Artificial Sequence
  source: /note="Description of Artificial Sequence: Synthetic peptide"
NNAKAMT

SEQ ID NO: 6897 - protein, 7 aa, Artificial Sequence
  source: /note="Description of Artificial Sequence: Synthetic peptide"
NNASSSD

SEQ ID NO: 6898 - protein, 7 aa, Artificial Sequence
  source: /note="Description of Artificial Sequence: Synthetic peptide"
NNDRLVH

SEQ ID NO: 6899 - protein, 7 aa, Artificial Sequence
  source: /note="Description of Artificial Sequence: Synthetic peptide"
NNELRSS

SEQ ID NO: 6900 - protein, 7 aa, Artificial Sequence
  source: /note="Description of Artificial Sequence: Synthetic peptide"
NNFGNTY

SEQ ID NO: 6901 - protein, 7 aa, Artificial Sequence
  source: /note="Description of Artificial Sequence: Synthetic peptide"
NNGKGPV

SEQ ID NO: 6902 - protein, 7 aa, Artificial Sequence
  source: /note="Description of Artificial Sequence: Synthetic peptide"
NNGLPSR

SEQ ID NO: 6903 - protein, 7 aa, Artificial Sequence
  source: /note="Description of Artificial Sequence: Synthetic peptide"
NNGRAQL

SEQ ID NO: 6904 - protein, 7 aa, Artificial Sequence
  source: /note="Description of Artificial Sequence: Synthetic peptide"
NNGRLPN

SEQ ID NO: 6905 - protein, 7 aa, Artificial Sequence
  source: /note="Description of Artificial Sequence: Synthetic peptide"
NNHKIQS

SEQ ID NO: 6906 - protein, 7 aa, Artificial Sequence
  source: /note="Description of Artificial Sequence: Synthetic peptide"
NNLRLNL

SEQ ID NO: 6907 - protein, 7 aa, Artificial Sequence
  source: /note="Description of Artificial Sequence: Synthetic peptide"
NNLRTSL

SEQ ID NO: 6908 - protein, 7 aa, Artificial Sequence
  source: /note="Description of Artificial Sequence: Synthetic peptide"
NNMNTMP

SEQ ID NO: 6909 - protein, 7 aa, Artificial Sequence
  source: /note="Description of Artificial Sequence: Synthetic peptide"
NNNEHYV

SEQ ID NO: 6910 - protein, 7 aa, Artificial Sequence
  source: /note="Description of Artificial Sequence: Synthetic peptide"
NNNLETM

SEQ ID NO: 6911 - protein, 7 aa, Artificial Sequence
  source: /note="Description of Artificial Sequence: Synthetic peptide"
NNNPKYG

SEQ ID NO: 6912 - protein, 7 aa, Artificial Sequence
  source: /note="Description of Artificial Sequence: Synthetic peptide"
NNNTTPL

SEQ ID NO: 6913 - protein, 7 aa, Artificial Sequence
  source: /note="Description of Artificial Sequence: Synthetic peptide"
NNPAPPS

SEQ ID NO: 6914 - protein, 7 aa, Artificial Sequence
  source: /note="Description of Artificial Sequence: Synthetic peptide"
NNPDAYS

SEQ ID NO: 6915 - protein, 7 aa, Artificial Sequence
  source: /note="Description of Artificial Sequence: Synthetic peptide"
NNRPARE

SEQ ID NO: 6916 - protein, 7 aa, Artificial Sequence
  source: /note="Description of Artificial Sequence: Synthetic peptide"
NNSMALM

SEQ ID NO: 6917 - protein, 7 aa, Artificial Sequence
  source: /note="Description of Artificial Sequence: Synthetic peptide"
NNSRISS

SEQ ID NO: 6918 - protein, 7 aa, Artificial Sequence
  source: /note="Description of Artificial Sequence: Synthetic peptide"
NNSRVGT

SEQ ID NO: 6919 - protein, 7 aa, Artificial Sequence
  source: /note="Description of Artificial Sequence: Synthetic peptide"
NNSSYSE

SEQ ID NO: 6920 - protein, 7 aa, Artificial Sequence
  source: /note="Description of Artificial Sequence: Synthetic peptide"
NNVNPIA

SEQ ID NO: 6921 - protein, 7 aa, Artificial Sequence
  source: /note="Description of Artificial Sequence: Synthetic peptide"
NNVSTII

SEQ ID NO: 6922 - protein, 7 aa, Artificial Sequence
  source: /note="Description of Artificial Sequence: Synthetic peptide"
NNWHNTP

SEQ ID NO: 6923 - protein, 7 aa, Artificial Sequence
  source: /note="Description of Artificial Sequence: Synthetic peptide"
NNYNPPT

SEQ ID NO: 6924 - protein, 7 aa, Artificial Sequence
  source: /note="Description of Artificial Sequence: Synthetic peptide"
NPAASTH

SEQ ID NO: 6925 - protein, 7 aa, Artificial Sequence
  source: /note="Description of Artificial Sequence: Synthetic peptide"
NPALPGH

SEQ ID NO: 6926 - protein, 7 aa, Artificial Sequence
  source: /note="Description of Artificial Sequence: Synthetic peptide"
NPEGWGL

SEQ ID NO: 6927 - protein, 7 aa, Artificial Sequence
  source: /note="Description of Artificial Sequence: Synthetic peptide"
NPETLIR

SEQ ID NO: 6928 - protein, 7 aa, Artificial Sequence
  source: /note="Description of Artificial Sequence: Synthetic peptide"
NPEVSPS

SEQ ID NO: 6929 - protein, 7 aa, Artificial Sequence
  source: /note="Description of Artificial Sequence: Synthetic peptide"
NPGANMS

SEQ ID NO: 6930 - protein, 7 aa, Artificial Sequence
  source: /note="Description of Artificial Sequence: Synthetic peptide"
NPGSQMV

SEQ ID NO: 6931 - protein, 7 aa, Artificial Sequence
  source: /note="Description of Artificial Sequence: Synthetic peptide"
NPGTTTT

SEQ ID NO: 6932 - protein, 7 aa, Artificial Sequence
  source: /note="Description of Artificial Sequence: Synthetic peptide"
NPGVKSA

SEQ ID NO: 6933 - protein, 7 aa, Artificial Sequence
  source: /note="Description of Artificial Sequence: Synthetic peptide"
NPGVTHL

SEQ ID NO: 6934 - protein, 7 aa, Artificial Sequence
  source: /note="Description of Artificial Sequence: Synthetic peptide"
NPHISVS

SEQ ID NO: 6935 - protein, 7 aa, Artificial Sequence
  source: /note="Description of Artificial Sequence: Synthetic peptide"
NPHMQNI

SEQ ID NO: 6936 - protein, 7 aa, Artificial Sequence
  source: /note="Description of Artificial Sequence: Synthetic peptide"
NPHNDTG

SEQ ID NO: 6937 - protein, 7 aa, Artificial Sequence
  source: /note="Description of Artificial Sequence: Synthetic peptide"
NPILKTQ

SEQ ID NO: 6938 - protein, 7 aa, Artificial Sequence
  source: /note="Description of Artificial Sequence: Synthetic peptide"
NPISSGP

SEQ ID NO: 6939 - protein, 7 aa, Artificial Sequence
  source: /note="Description of Artificial Sequence: Synthetic peptide"
NPKLMKE

SEQ ID NO: 6940 - protein, 7 aa, Artificial Sequence
  source: /note="Description of Artificial Sequence: Synthetic peptide"
NPLSNDG

SEQ ID NO: 6941 - protein, 7 aa, Artificial Sequence
  source: /note="Description of Artificial Sequence: Synthetic peptide"
NPLTTHD

SEQ ID NO: 6942 - protein, 7 aa, Artificial Sequence
  source: /note="Description of Artificial Sequence: Synthetic peptide"
NPMMHGS

SEQ ID NO: 6943 - protein, 7 aa, Artificial Sequence
  source: /note="Description of Artificial Sequence: Synthetic peptide"
NPMTPDP

SEQ ID NO: 6944 - protein, 7 aa, Artificial Sequence
  source: /note="Description of Artificial Sequence: Synthetic peptide"
NPNQVAE

SEQ ID NO: 6945 - protein, 7 aa, Artificial Sequence
  source: /note="Description of Artificial Sequence: Synthetic peptide"
NPNTRNC

SEQ ID NO: 6946 - protein, 7 aa, Artificial Sequence
  source: /note="Description of Artificial Sequence: Synthetic peptide"
NPPALLP

SEQ ID NO: 6947 - protein, 7 aa, Artificial Sequence
  source: /note="Description of Artificial Sequence: Synthetic peptide"
NPPPPSP

SEQ ID NO: 6948 - protein, 7 aa, Artificial Sequence
  source: /note="Description of Artificial Sequence: Synthetic peptide"
NPPRYGS

SEQ ID NO: 6949 - protein, 7 aa, Artificial Sequence
  source: /note="Description of Artificial Sequence: Synthetic peptide"
NPPSLSS

SEQ ID NO: 6950 - protein, 7 aa, Artificial Sequence
  source: /note="Description of Artificial Sequence: Synthetic peptide"
NPPSRGN

SEQ ID NO: 6951 - protein, 7 aa, Artificial Sequence
  source: /note="Description of Artificial Sequence: Synthetic peptide"
NPPYALA

SEQ ID NO: 6952 - protein, 7 aa, Artificial Sequence
  source: /note="Description of Artificial Sequence: Synthetic peptide"
NPQMPSP

SEQ ID NO: 6953 - protein, 7 aa, Artificial Sequence
  source: /note="Description of Artificial Sequence: Synthetic peptide"
NPQRLGQ

SEQ ID NO: 6954 - protein, 7 aa, Artificial Sequence
  source: /note="Description of Artificial Sequence: Synthetic peptide"
NPQSVTH

SEQ ID NO: 6955 - protein, 7 aa, Artificial Sequence
  source: /note="Description of Artificial Sequence: Synthetic peptide"
NPRAQMS

SEQ ID NO: 6956 - protein, 7 aa, Artificial Sequence
  source: /note="Description of Artificial Sequence: Synthetic peptide"
NPRASSW

SEQ ID NO: 6957 - protein, 7 aa, Artificial Sequence
  source: /note="Description of Artificial Sequence: Synthetic peptide"
NPRNPTL

SEQ ID NO: 6958 - protein, 7 aa, Artificial Sequence
  source: /note="Description of Artificial Sequence: Synthetic peptide"
NPRPGQV

SEQ ID NO: 6959 - protein, 7 aa, Artificial Sequence
  source: /note="Description of Artificial Sequence: Synthetic peptide"
NPSGKVA

SEQ ID NO: 6960 - protein, 7 aa, Artificial Sequence
  source: /note="Description of Artificial Sequence: Synthetic peptide"
NPSLQTT

SEQ ID NO: 6961 - protein, 7 aa, Artificial Sequence
  source: /note="Description of Artificial Sequence: Synthetic peptide"
NPSLRIG

SEQ ID NO: 6962 - protein, 7 aa, Artificial Sequence
  source: /note="Description of Artificial Sequence: Synthetic peptide"
NPSNHAL

SEQ ID NO: 6963 - protein, 7 aa, Artificial Sequence
  source: /note="Description of Artificial Sequence: Synthetic peptide"
NPSQFDF

SEQ ID NO: 6964 - protein, 7 aa, Artificial Sequence
  source: /note="Description of Artificial Sequence: Synthetic peptide"
NPSRLPQ

SEQ ID NO: 6965 - protein, 7 aa, Artificial Sequence
  source: /note="Description of Artificial Sequence: Synthetic peptide"
NPSRQAP

SEQ ID NO: 6966 - protein, 7 aa, Artificial Sequence
  source: /note="Description of Artificial Sequence: Synthetic peptide"
NPSSSGC

SEQ ID NO: 6967 - protein, 7 aa, Artificial Sequence
  source: /note="Description of Artificial Sequence: Synthetic peptide"
NPSVVTA

SEQ ID NO: 6968 - protein, 7 aa, Artificial Sequence
  source: /note="Description of Artificial Sequence: Synthetic peptide"
NPTASNA

SEQ ID NO: 6969 - protein, 7 aa, Artificial Sequence
  source: /note="Description of Artificial Sequence: Synthetic peptide"
NPTFHGS

SEQ ID NO: 6970 - protein, 7 aa, Artificial Sequence
  source: /note="Description of Artificial Sequence: Synthetic peptide"
NPTQPIK

SEQ ID NO: 6971 - protein, 7 aa, Artificial Sequence
  source: /note="Description of Artificial Sequence: Synthetic peptide"
NPTSLPS

SEQ ID NO: 6972 - protein, 7 aa, Artificial Sequence
  source: /note="Description of Artificial Sequence: Synthetic peptide"
NPTTRYM

SEQ ID NO: 6973 - protein, 7 aa, Artificial Sequence
  source: /note="Description of Artificial Sequence: Synthetic peptide"
NPTVTGS

SEQ ID NO: 6974 - protein, 7 aa, Artificial Sequence
  source: /note="Description of Artificial Sequence: Synthetic peptide"
NPYNTEA

SEQ ID NO: 6975 - protein, 7 aa, Artificial Sequence
  source: /note="Description of Artificial Sequence: Synthetic peptide"
NPYVLRA

SEQ ID NO: 6976 - protein, 7 aa, Artificial Sequence
  source: /note="Description of Artificial Sequence: Synthetic peptide"
NQDKATH

SEQ ID NO: 6977 - protein, 7 aa, Artificial Sequence
  source: /note="Description of Artificial Sequence: Synthetic peptide"
NQDPYMY

SEQ ID NO: 6978 - protein, 7 aa, Artificial Sequence
  source: /note="Description of Artificial Sequence: Synthetic peptide"
NQEGSPI

SEQ ID NO: 6979 - protein, 7 aa, Artificial Sequence
  source: /note="Description of Artificial Sequence: Synthetic peptide"
NQENKIG

SEQ ID NO: 6980 - protein, 7 aa, Artificial Sequence
  source: /note="Description of Artificial Sequence: Synthetic peptide"
NQGQNPV

SEQ ID NO: 6981 - protein, 7 aa, Artificial Sequence
  source: /note="Description of Artificial Sequence: Synthetic peptide"
NQIAVSR

SEQ ID NO: 6982 - protein, 7 aa, Artificial Sequence
  source: /note="Description of Artificial Sequence: Synthetic peptide"
NQLHPVR

SEQ ID NO: 6983 - protein, 7 aa, Artificial Sequence
  source: /note="Description of Artificial Sequence: Synthetic peptide"
NQLVAHA

SEQ ID NO: 6984 - protein, 7 aa, Artificial Sequence
  source: /note="Description of Artificial Sequence: Synthetic peptide"
NQNYQIV

SEQ ID NO: 6985 - protein, 7 aa, Artificial Sequence
  source: /note="Description of Artificial Sequence: Synthetic peptide"
NQQGSMA

SEQ ID NO: 6986 - protein, 7 aa, Artificial Sequence
  source: /note="Description of Artificial Sequence: Synthetic peptide"
NQRDTMT

SEQ ID NO: 6987 - protein, 7 aa, Artificial Sequence
  source: /note="Description of Artificial Sequence: Synthetic peptide"
NQRPVNF

SEQ ID NO: 6988 - protein, 7 aa, Artificial Sequence
  source: /note="Description of Artificial Sequence: Synthetic peptide"
NQRSTSM

SEQ ID NO: 6989 - protein, 7 aa, Artificial Sequence
  source: /note="Description of Artificial Sequence: Synthetic peptide"
NQSIHQT

SEQ ID NO: 6990 - protein, 7 aa, Artificial Sequence
  source: /note="Description of Artificial Sequence: Synthetic peptide"
NQTACEV

SEQ ID NO: 6991 - protein, 7 aa, Artificial Sequence
  source: /note="Description of Artificial Sequence: Synthetic peptide"
NQTLMAS

SEQ ID NO: 6992 - protein, 7 aa, Artificial Sequence
  source: /note="Description of Artificial Sequence: Synthetic peptide"
NQTNGRA

SEQ ID NO: 6993 - protein, 7 aa, Artificial Sequence
  source: /note="Description of Artificial Sequence: Synthetic peptide"
NQTRVVP

SEQ ID NO: 6994 - protein, 7 aa, Artificial Sequence
  source: /note="Description of Artificial Sequence: Synthetic peptide"
NQYPRDP

SEQ ID NO: 6995 - protein, 7 aa, Artificial Sequence
  source: /note="Description of Artificial Sequence: Synthetic peptide"
NRAESLL

SEQ ID NO: 6996 - protein, 7 aa, Artificial Sequence
  source: /note="Description of Artificial Sequence: Synthetic peptide"
NRAPPLS

SEQ ID NO: 6997 - protein, 7 aa, Artificial Sequence
  source: /note="Description of Artificial Sequence: Synthetic peptide"
NRDIAGR

SEQ ID NO: 6998 - protein, 7 aa, Artificial Sequence
  source: /note="Description of Artificial Sequence: Synthetic peptide"
NRDILSS

SEQ ID NO: 6999 - protein, 7 aa, Artificial Sequence
  source: /note="Description of Artificial Sequence: Synthetic peptide"
NRDVPES

SEQ ID NO: 7000 - protein, 7 aa, Artificial Sequence
  source: /note="Description of Artificial Sequence: Synthetic peptide"
NRDYSTA

SEQ ID NO: 7001 - protein, 7 aa, Artificial Sequence
  source: /note="Description of Artificial Sequence: Synthetic peptide"
NRDYSVD

SEQ ID NO: 7002 - protein, 7 aa, Artificial Sequence
  source: /note="Description of Artificial Sequence: Synthetic peptide"
NRDYTSP

SEQ ID NO: 7003 - protein, 7 aa, Artificial Sequence
  source: /note="Description of Artificial Sequence: Synthetic peptide"
NREPGLN

SEQ ID NO: 7004 - protein, 7 aa, Artificial Sequence
  source: /note="Description of Artificial Sequence: Synthetic peptide"
NRERAMT

SEQ ID NO: 7005 - protein, 7 aa, Artificial Sequence
  source: /note="Description of Artificial Sequence: Synthetic peptide"
NRESYSL

SEQ ID NO: 7006 - protein, 7 aa, Artificial Sequence
  source: /note="Description of Artificial Sequence: Synthetic peptide"
NRFPHVD

SEQ ID NO: 7007 - protein, 7 aa, Artificial Sequence
  source: /note="Description of Artificial Sequence: Synthetic peptide"
NRGHLDS

SEQ ID NO: 7008 - protein, 7 aa, Artificial Sequence
  source: /note="Description of Artificial Sequence: Synthetic peptide"
NRGLVAA

SEQ ID NO: 7009 - protein, 7 aa, Artificial Sequence
  source: /note="Description of Artificial Sequence: Synthetic peptide"
NRGNFDR

SEQ ID NO: 7010 - protein, 7 aa, Artificial Sequence
  source: /note="Description of Artificial Sequence: Synthetic peptide"
NRGPSNT

SEQ ID NO: 7011 - protein, 7 aa, Artificial Sequence
  source: /note="Description of Artificial Sequence: Synthetic peptide"
NRGQTAQ

SEQ ID NO: 7012 - protein, 7 aa, Artificial Sequence
  source: /note="Description of Artificial Sequence: Synthetic peptide"
NRGTLLS

SEQ ID NO: 7013 - protein, 7 aa, Artificial Sequence
  source: /note="Description of Artificial Sequence: Synthetic peptide"
NRIAAEA

SEQ ID NO: 7014 - protein, 7 aa, Artificial Sequence
  source: /note="Description of Artificial Sequence: Synthetic peptide"
NRIMPIS

SEQ ID NO: 7015 - protein, 7 aa, Artificial Sequence
  source: /note="Description of Artificial Sequence: Synthetic peptide"
NRISAQH

SEQ ID NO: 7016 - protein, 7 aa, Artificial Sequence
  source: /note="Description of Artificial Sequence: Synthetic peptide"
NRISSFP

SEQ ID NO: 7017 - protein, 7 aa, Artificial Sequence
  source: /note="Description of Artificial Sequence: Synthetic peptide"
NRKALSE

SEQ ID NO: 7018 - protein, 7 aa, Artificial Sequence
  source: /note="Description of Artificial Sequence: Synthetic peptide"
NRKPTMD

SEQ ID NO: 7019 - protein, 7 aa, Artificial Sequence
  source: /note="Description of Artificial Sequence: Synthetic peptide"
NRLLGYG

SEQ ID NO: 7020 - protein, 7 aa, Artificial Sequence
  source: /note="Description of Artificial Sequence: Synthetic peptide"
NRMPSAA

SEQ ID NO: 7021 - protein, 7 aa, Artificial Sequence
  source: /note="Description of Artificial Sequence: Synthetic peptide"
NRMSGSD

SEQ ID NO: 7022 - protein, 7 aa, Artificial Sequence
  source: /note="Description of Artificial Sequence: Synthetic peptide"
NRNLDNG

SEQ ID NO: 7023 - protein, 7 aa, Artificial Sequence
  source: /note="Description of Artificial Sequence: Synthetic peptide"
NRPMELL

SEQ ID NO: 7024 - protein, 7 aa, Artificial Sequence
  source: /note="Description of Artificial Sequence: Synthetic peptide"
NRPQHAV

SEQ ID NO: 7025 - protein, 7 aa, Artificial Sequence
  source: /note="Description of Artificial Sequence: Synthetic peptide"
NRQDVPS

SEQ ID NO: 7026 - protein, 7 aa, Artificial Sequence
  source: /note="Description of Artificial Sequence: Synthetic peptide"
NRQGNEL

SEQ ID NO: 7027 - protein, 7 aa, Artificial Sequence
  source: /note="Description of Artificial Sequence: Synthetic peptide"
NRQPLMT

SEQ ID NO: 7028 - protein, 7 aa, Artificial Sequence
  source: /note="Description of Artificial Sequence: Synthetic peptide"
NRQPPRE

SEQ ID NO: 7029 - protein, 7 aa, Artificial Sequence
  source: /note="Description of Artificial Sequence: Synthetic peptide"
NRQSLPL

SEQ ID NO: 7030 - protein, 7 aa, Artificial Sequence
  source: /note="Description of Artificial Sequence: Synthetic peptide"
NRQTIAL

SEQ ID NO: 7031 - protein, 7 aa, Artificial Sequence
  source: /note="Description of Artificial Sequence: Synthetic peptide"
NRRTNED

SEQ ID NO: 7032 - protein, 7 aa, Artificial Sequence
  source: /note="Description of Artificial Sequence: Synthetic peptide"
NRSAECW

SEQ ID NO: 7033 - protein, 7 aa, Artificial Sequence
  source: /note="Description of Artificial Sequence: Synthetic peptide"
NRSALTP

SEQ ID NO: 7034 - protein, 7 aa, Artificial Sequence
  source: /note="Description of Artificial Sequence: Synthetic peptide"
NRSARDP

SEQ ID NO: 7035 - protein, 7 aa, Artificial Sequence
  source: /note="Description of Artificial Sequence: Synthetic peptide"
NRSEMVE

SEQ ID NO: 7036 - protein, 7 aa, Artificial Sequence
  source: /note="Description of Artificial Sequence: Synthetic peptide"
NRSGLVS

SEQ ID NO: 7037 - protein, 7 aa, Artificial Sequence
  source: /note="Description of Artificial Sequence: Synthetic peptide"
NRSITHD

SEQ ID NO: 7038 - protein, 7 aa, Artificial Sequence
  source: /note="Description of Artificial Sequence: Synthetic peptide"
NRSLATV

SEQ ID NO: 7039 - protein, 7 aa, Artificial Sequence
  source: /note="Description of Artificial Sequence: Synthetic peptide"
NRSVLSD

SEQ ID NO: 7040 - protein, 7 aa, Artificial Sequence
  source: /note="Description of Artificial Sequence: Synthetic peptide"
NRSYDSP

SEQ ID NO: 7041 - protein, 7 aa, Artificial Sequence
  source: /note="Description of Artificial Sequence: Synthetic peptide"
NRTLDMS

SEQ ID NO: 7042 - protein, 7 aa, Artificial Sequence
  source: /note="Description of Artificial Sequence: Synthetic peptide"
NRTLPTS

SEQ ID NO: 7043 - protein, 7 aa, Artificial Sequence
  source: /note="Description of Artificial Sequence: Synthetic peptide"
NRTLYPA

SEQ ID NO: 7044 - protein, 7 aa, Artificial Sequence
  source: /note="Description of Artificial Sequence: Synthetic peptide"
NRTQQSS

SEQ ID NO: 7045 - protein, 7 aa, Artificial Sequence
  source: /note="Description of Artificial Sequence: Synthetic peptide"
NRTQSIS

SEQ ID NO: 7046 - protein, 7 aa, Artificial Sequence
  source: /note="Description of Artificial Sequence: Synthetic peptide"
NRTTLMS

SEQ ID NO: 7047 - protein, 7 aa, Artificial Sequence
  source: /note="Description of Artificial Sequence: Synthetic peptide"
NRVGETR

SEQ ID NO: 7048 - protein, 7 aa, Artificial Sequence
  source: /note="Description of Artificial Sequence: Synthetic peptide"
NRVGIAP

SEQ ID NO: 7049 - protein, 7 aa, Artificial Sequence
  source: /note="Description of Artificial Sequence: Synthetic peptide"
NRVVFEG

SEQ ID NO: 7050 - protein, 7 aa, Artificial Sequence
  source: /note="Description of Artificial Sequence: Synthetic peptide"
NRYDASD

SEQ ID NO: 7051 - protein, 7 aa, Artificial Sequence
  source: /note="Description of Artificial Sequence: Synthetic peptide"
NSAARIH

SEQ ID NO: 7052 - protein, 7 aa, Artificial Sequence
  source: /note="Description of Artificial Sequence: Synthetic peptide"
NSADSSP

SEQ ID NO: 7053 - protein, 7 aa, Artificial Sequence
  source: /note="Description of Artificial Sequence: Synthetic peptide"
NSAMHGT

SEQ ID NO: 7054 - protein, 7 aa, Artificial Sequence
  source: /note="Description of Artificial Sequence: Synthetic peptide"
NSASEFV

SEQ ID NO: 7055 - protein, 7 aa, Artificial Sequence
  source: /note="Description of Artificial Sequence: Synthetic peptide"
NSASEMT

SEQ ID NO: 7056 - protein, 7 aa, Artificial Sequence
  source: /note="Description of Artificial Sequence: Synthetic peptide"
NSASTFQ

SEQ ID NO: 7057 - protein, 7 aa, Artificial Sequence
  source: /note="Description of Artificial Sequence: Synthetic peptide"
NSASTFT

SEQ ID NO: 7058 - protein, 7 aa, Artificial Sequence
  source: /note="Description of Artificial Sequence: Synthetic peptide"
NSAVMTR

SEQ ID NO: 7059 - protein, 7 aa, Artificial Sequence
  source: /note="Description of Artificial Sequence: Synthetic peptide"
NSAYPVH

SEQ ID NO: 7060 - protein, 7 aa, Artificial Sequence
  source: /note="Description of Artificial Sequence: Synthetic peptide"
NSDFSLA

SEQ ID NO: 7061 - protein, 7 aa, Artificial Sequence
  source: /note="Description of Artificial Sequence: Synthetic peptide"
NSDLHKP

SEQ ID NO: 7062 - protein, 7 aa, Artificial Sequence
  source: /note="Description of Artificial Sequence: Synthetic peptide"
NSDSRTP

SEQ ID NO: 7063 - protein, 7 aa, Artificial Sequence
  source: /note="Description of Artificial Sequence: Synthetic peptide"
NSDSSIR

SEQ ID NO: 7064 - protein, 7 aa, Artificial Sequence
  source: /note="Description of Artificial Sequence: Synthetic peptide"
NSGLELL

SEQ ID NO: 7065 - protein, 7 aa, Artificial Sequence
  source: /note="Description of Artificial Sequence: Synthetic peptide"
NSGNSTP

SEQ ID NO: 7066 - protein, 7 aa, Artificial Sequence
  source: /note="Description of Artificial Sequence: Synthetic peptide"
NSGRAHI

SEQ ID NO: 7067 - protein, 7 aa, Artificial Sequence
  source: /note="Description of Artificial Sequence: Synthetic peptide"
NSHAHHD

SEQ ID NO: 7068 - protein, 7 aa, Artificial Sequence
  source: /note="Description of Artificial Sequence: Synthetic peptide"
NSHNLTL

SEQ ID NO: 7069 - protein, 7 aa, Artificial Sequence
  source: /note="Description of Artificial Sequence: Synthetic peptide"
NSHPQTR

SEQ ID NO: 7070 - protein, 7 aa, Artificial Sequence
  source: /note="Description of Artificial Sequence: Synthetic peptide"
NSHSSPA

SEQ ID NO: 7071 - protein, 7 aa, Artificial Sequence
  source: /note="Description of Artificial Sequence: Synthetic peptide"
NSHSVST

SEQ ID NO: 7072 - protein, 7 aa, Artificial Sequence
  source: /note="Description of Artificial Sequence: Synthetic peptide"
NSIPERF

SEQ ID NO: 7073 - protein, 7 aa, Artificial Sequence
  source: /note="Description of Artificial Sequence: Synthetic peptide"
NSIRLSG

SEQ ID NO: 7074 - protein, 7 aa, Artificial Sequence
  source: /note="Description of Artificial Sequence: Synthetic peptide"
NSKMPRA

SEQ ID NO: 7075 - protein, 7 aa, Artificial Sequence
  source: /note="Description of Artificial Sequence: Synthetic peptide"
NSKYTPM

SEQ ID NO: 7076 - protein, 7 aa, Artificial Sequence
  source: /note="Description of Artificial Sequence: Synthetic peptide"
NSLAARN

SEQ ID NO: 7077 - protein, 7 aa, Artificial Sequence
  source: /note="Description of Artificial Sequence: Synthetic peptide"
NSLARKE

SEQ ID NO: 7078 - protein, 7 aa, Artificial Sequence
  source: /note="Description of Artificial Sequence: Synthetic peptide"
NSLNDRA

SEQ ID NO: 7079 - protein, 7 aa, Artificial Sequence
  source: /note="Description of Artificial Sequence: Synthetic peptide"
NSLNPGL

SEQ ID NO: 7080 - protein, 7 aa, Artificial Sequence
  source: /note="Description of Artificial Sequence: Synthetic peptide"
NSLPDSV

SEQ ID NO: 7081 - protein, 7 aa, Artificial Sequence
  source: /note="Description of Artificial Sequence: Synthetic peptide"
NSLPMAS

SEQ ID NO: 7082 - protein, 7 aa, Artificial Sequence
  source: /note="Description of Artificial Sequence: Synthetic peptide"
NSMQYSA

SEQ ID NO: 7083 - protein, 7 aa, Artificial Sequence
  source: /note="Description of Artificial Sequence: Synthetic peptide"
NSNAASG

SEQ ID NO: 7084 - protein, 7 aa, Artificial Sequence
  source: /note="Description of Artificial Sequence: Synthetic peptide"
NSNHERY

SEQ ID NO: 7085 - protein, 7 aa, Artificial Sequence
  source: /note="Description of Artificial Sequence: Synthetic peptide"
NSNTPGM

SEQ ID NO: 7086 - protein, 7 aa, Artificial Sequence
  source: /note="Description of Artificial Sequence: Synthetic peptide"
NSNVSPG

SEQ ID NO: 7087 - protein, 7 aa, Artificial Sequence
  source: /note="Description of Artificial Sequence: Synthetic peptide"
NSPIFVG

SEQ ID NO: 7088 - protein, 7 aa, Artificial Sequence
  source: /note="Description of Artificial Sequence: Synthetic peptide"
NSPNERT

SEQ ID NO: 7089 - protein, 7 aa, Artificial Sequence
  source: /note="Description of Artificial Sequence: Synthetic peptide"
NSPNQLG

SEQ ID NO: 7090 - protein, 7 aa, Artificial Sequence
  source: /note="Description of Artificial Sequence: Synthetic peptide"
NSPRHVA

SEQ ID NO: 7091 - protein, 7 aa, Artificial Sequence
  source: /note="Description of Artificial Sequence: Synthetic peptide"
NSPSHSP

SEQ ID NO: 7092 - protein, 7 aa, Artificial Sequence
  source: /note="Description of Artificial Sequence: Synthetic peptide"
NSPTVQL

SEQ ID NO: 7093 - protein, 7 aa, Artificial Sequence
  source: /note="Description of Artificial Sequence: Synthetic peptide"
NSPVVSR

SEQ ID NO: 7094 - protein, 7 aa, Artificial Sequence
  source: /note="Description of Artificial Sequence: Synthetic peptide"
NSQHSTT

SEQ ID NO: 7095 - protein, 7 aa, Artificial Sequence
  source: /note="Description of Artificial Sequence: Synthetic peptide"
NSQLQSS

SEQ ID NO: 7096 - protein, 7 aa, Artificial Sequence
  source: /note="Description of Artificial Sequence: Synthetic peptide"
NSQRYLS

SEQ ID NO: 7097 - protein, 7 aa, Artificial Sequence
  source: /note="Description of Artificial Sequence: Synthetic peptide"
NSQSATP

SEQ ID NO: 7098 - protein, 7 aa, Artificial Sequence
  source: /note="Description of Artificial Sequence: Synthetic peptide"
NSRAVLV

SEQ ID NO: 7099 - protein, 7 aa, Artificial Sequence
  source: /note="Description of Artificial Sequence: Synthetic peptide"
NSRDLLT

SEQ ID NO: 7100 - protein, 7 aa, Artificial Sequence
  source: /note="Description of Artificial Sequence: Synthetic peptide"
NSRGASL

SEQ ID NO: 7101 - protein, 7 aa, Artificial Sequence
  source: /note="Description of Artificial Sequence: Synthetic peptide"
NSRGLGH

SEQ ID NO: 7102 - protein, 7 aa, Artificial Sequence
  source: /note="Description of Artificial Sequence: Synthetic peptide"
NSRGMPD

SEQ ID NO: 7103 - protein, 7 aa, Artificial Sequence
  source: /note="Description of Artificial Sequence: Synthetic peptide"
NSRGPVA

SEQ ID NO: 7104 - protein, 7 aa, Artificial Sequence
  source: /note="Description of Artificial Sequence: Synthetic peptide"
NSRLVTS

SEQ ID NO: 7105 - protein, 7 aa, Artificial Sequence
  source: /note="Description of Artificial Sequence: Synthetic peptide"
NSRSNES

SEQ ID NO: 7106 - protein, 7 aa, Artificial Sequence
  source: /note="Description of Artificial Sequence: Synthetic peptide"
NSRSTPN

SEQ ID NO: 7107 - protein, 7 aa, Artificial Sequence
  source: /note="Description of Artificial Sequence: Synthetic peptide"
NSRTAHE

SEQ ID NO: 7108 - protein, 7 aa, Artificial Sequence
  source: /note="Description of Artificial Sequence: Synthetic peptide"
NSRTVQI

SEQ ID NO: 7109 - protein, 7 aa, Artificial Sequence
  source: /note="Description of Artificial Sequence: Synthetic peptide"
NSRVVGF

SEQ ID NO: 7110 - protein, 7 aa, Artificial Sequence
  source: /note="Description of Artificial Sequence: Synthetic peptide"
NSSEWPD

SEQ ID NO: 7111 - protein, 7 aa, Artificial Sequence
  source: /note="Description of Artificial Sequence: Synthetic peptide"
NSSGKTP

SEQ ID NO: 7112 - protein, 7 aa, Artificial Sequence
  source: /note="Description of Artificial Sequence: Synthetic peptide"
NSSIRNA

SEQ ID NO: 7113 - protein, 7 aa, Artificial Sequence
  source: /note="Description of Artificial Sequence: Synthetic peptide"
NSSLKLN

SEQ ID NO: 7114 - protein, 7 aa, Artificial Sequence
  source: /note="Description of Artificial Sequence: Synthetic peptide"
NSSMRIN

SEQ ID NO: 7115 - protein, 7 aa, Artificial Sequence
  source: /note="Description of Artificial Sequence: Synthetic peptide"
NSSMSSG

SEQ ID NO: 7116 - protein, 7 aa, Artificial Sequence
  source: /note="Description of Artificial Sequence: Synthetic peptide"
NSSPSLA

SEQ ID NO: 7117 - protein, 7 aa, Artificial Sequence
  source: /note="Description of Artificial Sequence: Synthetic peptide"
NSSQVHL

SEQ ID NO: 7118 - protein, 7 aa, Artificial Sequence
  source: /note="Description of Artificial Sequence: Synthetic peptide"
NSSSTPI

SEQ ID NO: 7119 - protein, 7 aa, Artificial Sequence
  source: /note="Description of Artificial Sequence: Synthetic peptide"
NSTKLLD

SEQ ID NO: 7120 - protein, 7 aa, Artificial Sequence
  source: /note="Description of Artificial Sequence: Synthetic peptide"
NSTLEGR

SEQ ID NO: 7121 - protein, 7 aa, Artificial Sequence
  source: /note="Description of Artificial Sequence: Synthetic peptide"
NSTLTVH

SEQ ID NO: 7122 - protein, 7 aa, Artificial Sequence
  source: /note="Description of Artificial Sequence: Synthetic peptide"
NSTNFRT

SEQ ID NO: 7123 - protein, 7 aa, Artificial Sequence
  source: /note="Description of Artificial Sequence: Synthetic peptide"
NSTPQPQ

SEQ ID NO: 7124 - protein, 7 aa, Artificial Sequence
  source: /note="Description of Artificial Sequence: Synthetic peptide"
NSTSTYG

SEQ ID NO: 7125 - protein, 7 aa, Artificial Sequence
  source: /note="Description of Artificial Sequence: Synthetic peptide"
NSVKGVV

SEQ ID NO: 7126 - protein, 7 aa, Artificial Sequence
  source: /note="Description of Artificial Sequence: Synthetic peptide"
NSVRHNS

SEQ ID NO: 7127 - protein, 7 aa, Artificial Sequence
  source: /note="Description of Artificial Sequence: Synthetic peptide"
NSVSGVT

SEQ ID NO: 7128 - protein, 7 aa, Artificial Sequence
  source: /note="Description of Artificial Sequence: Synthetic peptide"
NSVSQMY

SEQ ID NO: 7129 - protein, 7 aa, Artificial Sequence
  source: /note="Description of Artificial Sequence: Synthetic peptide"
NSVYDRS

SEQ ID NO: 7130 - protein, 7 aa, Artificial Sequence
  source: /note="Description of Artificial Sequence: Synthetic peptide"
NSYQVSR

SEQ ID NO: 7131 - protein, 7 aa, Artificial Sequence
  source: /note="Description of Artificial Sequence: Synthetic peptide"
NTAGKPS

SEQ ID NO: 7132 - protein, 7 aa, Artificial Sequence
  source: /note="Description of Artificial Sequence: Synthetic peptide"
NTARERS

SEQ ID NO: 7133 - protein, 7 aa, Artificial Sequence
  source: /note="Description of Artificial Sequence: Synthetic peptide"
NTARTSL

SEQ ID NO: 7134 - protein, 7 aa, Artificial Sequence
  source: /note="Description of Artificial Sequence: Synthetic peptide"
NTDGDRL

SEQ ID NO: 7135 - protein, 7 aa, Artificial Sequence
  source: /note="Description of Artificial Sequence: Synthetic peptide"
NTEDVHM

SEQ ID NO: 7136 - protein, 7 aa, Artificial Sequence
  source: /note="Description of Artificial Sequence: Synthetic peptide"
NTEHNRS

SEQ ID NO: 7137 - protein, 7 aa, Artificial Sequence
  source: /note="Description of Artificial Sequence: Synthetic peptide"
NTETPLA

SEQ ID NO: 7138 - protein, 7 aa, Artificial Sequence
  source: /note="Description of Artificial Sequence: Synthetic peptide"
NTFSNSS

SEQ ID NO: 7139 - protein, 7 aa, Artificial Sequence
  source: /note="Description of Artificial Sequence: Synthetic peptide"
NTGPGMA

SEQ ID NO: 7140 - protein, 7 aa, Artificial Sequence
  source: /note="Description of Artificial Sequence: Synthetic peptide"
NTHGAAQ

SEQ ID NO: 7141 - protein, 7 aa, Artificial Sequence
  source: /note="Description of Artificial Sequence: Synthetic peptide"
NTHPTPF

SEQ ID NO: 7142 - protein, 7 aa, Artificial Sequence
  source: /note="Description of Artificial Sequence: Synthetic peptide"
NTHTKMS

SEQ ID NO: 7143 - protein, 7 aa, Artificial Sequence
  source: /note="Description of Artificial Sequence: Synthetic peptide"
NTHVEDW

SEQ ID NO: 7144 - protein, 7 aa, Artificial Sequence
  source: /note="Description of Artificial Sequence: Synthetic peptide"
NTIPNVK

SEQ ID NO: 7145 - protein, 7 aa, Artificial Sequence
  source: /note="Description of Artificial Sequence: Synthetic peptide"
NTIRDSI

SEQ ID NO: 7146 - protein, 7 aa, Artificial Sequence
  source: /note="Description of Artificial Sequence: Synthetic peptide"
NTISGSR

SEQ ID NO: 7147 - protein, 7 aa, Artificial Sequence
  source: /note="Description of Artificial Sequence: Synthetic peptide"
NTKLTNN

SEQ ID NO: 7148 - protein, 7 aa, Artificial Sequence
  source: /note="Description of Artificial Sequence: Synthetic peptide"
NTKNNNL

SEQ ID NO: 7149 - protein, 7 aa, Artificial Sequence
  source: /note="Description of Artificial Sequence: Synthetic peptide"
NTKSDPA

SEQ ID NO: 7150 - protein, 7 aa, Artificial Sequence
  source: /note="Description of Artificial Sequence: Synthetic peptide"
NTKSPFS

SEQ ID NO: 7151 - protein, 7 aa, Artificial Sequence
  source: /note="Description of Artificial Sequence: Synthetic peptide"
NTLGETL

SEQ ID NO: 7152 - protein, 7 aa, Artificial Sequence
  source: /note="Description of Artificial Sequence: Synthetic peptide"
NTLKLSQ

SEQ ID NO: 7153 - protein, 7 aa, Artificial Sequence
  source: /note="Description of Artificial Sequence: Synthetic peptide"
NTLQSYP

SEQ ID NO: 7154 - protein, 7 aa, Artificial Sequence
  source: /note="Description of Artificial Sequence: Synthetic peptide"
NTNIPRS

SEQ ID NO: 7155 - protein, 7 aa, Artificial Sequence
  source: /note="Description of Artificial Sequence: Synthetic peptide"
NTNVESR

SEQ ID NO: 7156 - protein, 7 aa, Artificial Sequence
  source: /note="Description of Artificial Sequence: Synthetic peptide"
NTNVSVS

SEQ ID NO: 7157 - protein, 7 aa, Artificial Sequence
  source: /note="Description of Artificial Sequence: Synthetic peptide"
NTPRVLS

SEQ ID NO: 7158 - protein, 7 aa, Artificial Sequence
  source: /note="Description of Artificial Sequence: Synthetic peptide"
NTPSTRQ

SEQ ID NO: 7159 - protein, 7 aa, Artificial Sequence
  source: /note="Description of Artificial Sequence: Synthetic peptide"
NTRGGSS

SEQ ID NO: 7160 - protein, 7 aa, Artificial Sequence
  source: /note="Description of Artificial Sequence: Synthetic peptide"
NTRHDVS

SEQ ID NO: 7161 - protein, 7 aa, Artificial Sequence
  source: /note="Description of Artificial Sequence: Synthetic peptide"
NTRNDPP

SEQ ID NO: 7162 - protein, 7 aa, Artificial Sequence
  source: /note="Description of Artificial Sequence: Synthetic peptide"
NTRQLVS

SEQ ID NO: 7163 - protein, 7 aa, Artificial Sequence
  source: /note="Description of Artificial Sequence: Synthetic peptide"
NTRRTDG

SEQ ID NO: 7164 - protein, 7 aa, Artificial Sequence
  source: /note="Description of Artificial Sequence: Synthetic peptide"
NTRTLSN

SEQ ID NO: 7165 - protein, 7 aa, Artificial Sequence
  source: /note="Description of Artificial Sequence: Synthetic peptide"
NTRTYSS

SEQ ID NO: 7166 - protein, 7 aa, Artificial Sequence
  source: /note="Description of Artificial Sequence: Synthetic peptide"
NTSDNAR

SEQ ID NO: 7167 - protein, 7 aa, Artificial Sequence
  source: /note="Description of Artificial Sequence: Synthetic peptide"
NTSFSSS

SEQ ID NO: 7168 - protein, 7 aa, Artificial Sequence
  source: /note="Description of Artificial Sequence: Synthetic peptide"
NTSKDLP

SEQ ID NO: 7169 - protein, 7 aa, Artificial Sequence
  source: /note="Description of Artificial Sequence: Synthetic peptide"
NTSQFAS

SEQ ID NO: 7170 - protein, 7 aa, Artificial Sequence
  source: /note="Description of Artificial Sequence: Synthetic peptide"
NTSSSDK

SEQ ID NO: 7171 - protein, 7 aa, Artificial Sequence
  source: /note="Description of Artificial Sequence: Synthetic peptide"
NTSVMMV

SEQ ID NO: 7172 - protein, 7 aa, Artificial Sequence
  source: /note="Description of Artificial Sequence: Synthetic peptide"
NTSVRVV

SEQ ID NO: 7173 - protein, 7 aa, Artificial Sequence
  source: /note="Description of Artificial Sequence: Synthetic peptide"
NTSWNGS

SEQ ID NO: 7174 - protein, 7 aa, Artificial Sequence
  source: /note="Description of Artificial Sequence: Synthetic peptide"
NTTNSQL

SEQ ID NO: 7175 - protein, 7 aa, Artificial Sequence
  source: /note="Description of Artificial Sequence: Synthetic peptide"
NTTPITN

SEQ ID NO: 7176 - protein, 7 aa, Artificial Sequence
  source: /note="Description of Artificial Sequence: Synthetic peptide"
NTTVLPK

SEQ ID NO: 7177 - protein, 7 aa, Artificial Sequence
  source: /note="Description of Artificial Sequence: Synthetic peptide"
NTVPIKA

SEQ ID NO: 7178 - protein, 7 aa, Artificial Sequence
  source: /note="Description of Artificial Sequence: Synthetic peptide"
NTYRRDG

SEQ ID NO: 7179 - protein, 7 aa, Artificial Sequence
  source: /note="Description of Artificial Sequence: Synthetic peptide"
NVAARAH

SEQ ID NO: 7180 - protein, 7 aa, Artificial Sequence
  source: /note="Description of Artificial Sequence: Synthetic peptide"
NVAINFS

SEQ ID NO: 7181 - protein, 7 aa, Artificial Sequence
  source: /note="Description of Artificial Sequence: Synthetic peptide"
NVARNFV

SEQ ID NO: 7182 - protein, 7 aa, Artificial Sequence
  source: /note="Description of Artificial Sequence: Synthetic peptide"
NVAVGYQ

SEQ ID NO: 7183 - protein, 7 aa, Artificial Sequence
  source: /note="Description of Artificial Sequence: Synthetic peptide"
NVAVVLS

SEQ ID NO: 7184 - protein, 7 aa, Artificial Sequence
  source: /note="Description of Artificial Sequence: Synthetic peptide"
NVAWVTE

SEQ ID NO: 7185 - protein, 7 aa, Artificial Sequence
  source: /note="Description of Artificial Sequence: Synthetic peptide"
NVDANVL

SEQ ID NO: 7186 - protein, 7 aa, Artificial Sequence
  source: /note="Description of Artificial Sequence: Synthetic peptide"
NVDTSTD

SEQ ID NO: 7187 - protein, 7 aa, Artificial Sequence
  source: /note="Description of Artificial Sequence: Synthetic peptide"
NVEQPSC

SEQ ID NO: 7188 - protein, 7 aa, Artificial Sequence
  source: /note="Description of Artificial Sequence: Synthetic peptide"
NVESNPL

SEQ ID NO: 7189 - protein, 7 aa, Artificial Sequence
  source: /note="Description of Artificial Sequence: Synthetic peptide"
NVFAVCE

SEQ ID NO: 7190 - protein, 7 aa, Artificial Sequence
  source: /note="Description of Artificial Sequence: Synthetic peptide"
NVFSATP

SEQ ID NO: 7191 - protein, 7 aa, Artificial Sequence
  source: /note="Description of Artificial Sequence: Synthetic peptide"
NVFVAVN

SEQ ID NO: 7192 - protein, 7 aa, Artificial Sequence
  source: /note="Description of Artificial Sequence: Synthetic peptide"
NVGATEV

SEQ ID NO: 7193 - protein, 7 aa, Artificial Sequence
  source: /note="Description of Artificial Sequence: Synthetic peptide"
NVHALES

SEQ ID NO: 7194 - protein, 7 aa, Artificial Sequence
  source: /note="Description of Artificial Sequence: Synthetic peptide"
NVHTPSQ

SEQ ID NO: 7195 - protein, 7 aa, Artificial Sequence
  source: /note="Description of Artificial Sequence: Synthetic peptide"
NVINTPQ

SEQ ID NO: 7196 - protein, 7 aa, Artificial Sequence
  source: /note="Description of Artificial Sequence: Synthetic peptide"
NVKLNSF

SEQ ID NO: 7197 - protein, 7 aa, Artificial Sequence
  source: /note="Description of Artificial Sequence: Synthetic peptide"
NVLGAQQ

SEQ ID NO: 7198 - protein, 7 aa, Artificial Sequence
  source: /note="Description of Artificial Sequence: Synthetic peptide"
NVLIKYS

SEQ ID NO: 7199 - protein, 7 aa, Artificial Sequence
  source: /note="Description of Artificial Sequence: Synthetic peptide"
NVLRPQV

SEQ ID NO: 7200 - protein, 7 aa, Artificial Sequence
  source: /note="Description of Artificial Sequence: Synthetic peptide"
NVMMARM

SEQ ID NO: 7201 - protein, 7 aa, Artificial Sequence
  source: /note="Description of Artificial Sequence: Synthetic peptide"
NVMVRLP

SEQ ID NO: 7202 - protein, 7 aa, Artificial Sequence
  source: /note="Description of Artificial Sequence: Synthetic peptide"
NVMVRMG

SEQ ID NO: 7203 - protein, 7 aa, Artificial Sequence
  source: /note="Description of Artificial Sequence: Synthetic peptide"
NVNQPDT

SEQ ID NO: 7204 - protein, 7 aa, Artificial Sequence
  source: /note="Description of Artificial Sequence: Synthetic peptide"
NVNQYSG

SEQ ID NO: 7205 - protein, 7 aa, Artificial Sequence
  source: /note="Description of Artificial Sequence: Synthetic peptide"
NVPAASY

SEQ ID NO: 7206 - protein, 7 aa, Artificial Sequence
  source: /note="Description of Artificial Sequence: Synthetic peptide"
NVPAATF

SEQ ID NO: 7207 - protein, 7 aa, Artificial Sequence
  source: /note="Description of Artificial Sequence: Synthetic peptide"
NVPESSD

SEQ ID NO: 7208 - protein, 7 aa, Artificial Sequence
  source: /note="Description of Artificial Sequence: Synthetic peptide"
NVPSTKE

SEQ ID NO: 7209 - protein, 7 aa, Artificial Sequence
  source: /note="Description of Artificial Sequence: Synthetic peptide"
NVQATGY

SEQ ID NO: 7210 - protein, 7 aa, Artificial Sequence
  source: /note="Description of Artificial Sequence: Synthetic peptide"
NVQFSSG

SEQ ID NO: 7211 - protein, 7 aa, Artificial Sequence
  source: /note="Description of Artificial Sequence: Synthetic peptide"
NVRLQAI

SEQ ID NO: 7212 - protein, 7 aa, Artificial Sequence
  source: /note="Description of Artificial Sequence: Synthetic peptide"
NVRLSID

SEQ ID NO: 7213 - protein, 7 aa, Artificial Sequence
  source: /note="Description of Artificial Sequence: Synthetic peptide"
NVRPQST

SEQ ID NO: 7214 - protein, 7 aa, Artificial Sequence
  source: /note="Description of Artificial Sequence: Synthetic peptide"
NVRPVLS

SEQ ID NO: 7215 - protein, 7 aa, Artificial Sequence
  source: /note="Description of Artificial Sequence: Synthetic peptide"
NVRQQSA

SEQ ID NO: 7216 - protein, 7 aa, Artificial Sequence
  source: /note="Description of Artificial Sequence: Synthetic peptide"
NVRSVTN

SEQ ID NO: 7217 - protein, 7 aa, Artificial Sequence
  source: /note="Description of Artificial Sequence: Synthetic peptide"
NVRSYAA

SEQ ID NO: 7218 - protein, 7 aa, Artificial Sequence
  source: /note="Description of Artificial Sequence: Synthetic peptide"
NVRTVAE

SEQ ID NO: 7219 - protein, 7 aa, Artificial Sequence
  source: /note="Description of Artificial Sequence: Synthetic peptide"
NVSFPSL

SEQ ID NO: 7220 - protein, 7 aa, Artificial Sequence
  source: /note="Description of Artificial Sequence: Synthetic peptide"
NVSNVPS

SEQ ID NO: 7221 - protein, 7 aa, Artificial Sequence
  source: /note="Description of Artificial Sequence: Synthetic peptide"
NVSPLFL

SEQ ID NO: 7222 - protein, 7 aa, Artificial Sequence
  source: /note="Description of Artificial Sequence: Synthetic peptide"
NVSRTTL

SEQ ID NO: 7223 - protein, 7 aa, Artificial Sequence
  source: /note="Description of Artificial Sequence: Synthetic peptide"
NVSRTVS

SEQ ID NO: 7224 - protein, 7 aa, Artificial Sequence
  source: /note="Description of Artificial Sequence: Synthetic peptide"
NVSSAPK

SEQ ID NO: 7225 - protein, 7 aa, Artificial Sequence
  source: /note="Description of Artificial Sequence: Synthetic peptide"
NVSTALS

SEQ ID NO: 7226 - protein, 7 aa, Artificial Sequence
  source: /note="Description of Artificial Sequence: Synthetic peptide"
NVTAIGL

SEQ ID NO: 7227 - protein, 7 aa, Artificial Sequence
  source: /note="Description of Artificial Sequence: Synthetic peptide"
NVTPPDN

SEQ ID NO: 7228 - protein, 7 aa, Artificial Sequence
  source: /note="Description of Artificial Sequence: Synthetic peptide"
NVTTSEA

SEQ ID NO: 7229 - protein, 7 aa, Artificial Sequence
  source: /note="Description of Artificial Sequence: Synthetic peptide"
NVVPPLT

SEQ ID NO: 7230 - protein, 7 aa, Artificial Sequence
  source: /note="Description of Artificial Sequence: Synthetic peptide"
NVVSRSP

SEQ ID NO: 7231 - protein, 7 aa, Artificial Sequence
  source: /note="Description of Artificial Sequence: Synthetic peptide"
NVVTKPM

SEQ ID NO: 7232 - protein, 7 aa, Artificial Sequence
  source: /note="Description of Artificial Sequence: Synthetic peptide"
NVVVPVG

SEQ ID NO: 7233 - protein, 7 aa, Artificial Sequence
  source: /note="Description of Artificial Sequence: Synthetic peptide"
NWASDHV

SEQ ID NO: 7234 - protein, 7 aa, Artificial Sequence
  source: /note="Description of Artificial Sequence: Synthetic peptide"
NWGQEKL

SEQ ID NO: 7235 - protein, 7 aa, Artificial Sequence
  source: /note="Description of Artificial Sequence: Synthetic peptide"
NWPDPES

SEQ ID NO: 7236 - protein, 7 aa, Artificial Sequence
  source: /note="Description of Artificial Sequence: Synthetic peptide"
NWTAATP

SEQ ID NO: 7237 - protein, 7 aa, Artificial Sequence
  source: /note="Description of Artificial Sequence: Synthetic peptide"
NYAGSDG

SEQ ID NO: 7238 - protein, 7 aa, Artificial Sequence
  source: /note="Description of Artificial Sequence: Synthetic peptide"
NYAKVHT

SEQ ID NO: 7239 - protein, 7 aa, Artificial Sequence
  source: /note="Description of Artificial Sequence: Synthetic peptide"
NYASQIV

SEQ ID NO: 7240 - protein, 7 aa, Artificial Sequence
  source: /note="Description of Artificial Sequence: Synthetic peptide"
NYDREQM

SEQ ID NO: 7241 - protein, 7 aa, Artificial Sequence
  source: /note="Description of Artificial Sequence: Synthetic peptide"
NYEPTSD

SEQ ID NO: 7242 - protein, 7 aa, Artificial Sequence
  source: /note="Description of Artificial Sequence: Synthetic peptide"
NYGNSIP

SEQ ID NO: 7243 - protein, 7 aa, Artificial Sequence
  source: /note="Description of Artificial Sequence: Synthetic peptide"
NYHTSLV

SEQ ID NO: 7244 - protein, 7 aa, Artificial Sequence
  source: /note="Description of Artificial Sequence: Synthetic peptide"
NYNTPNP

SEQ ID NO: 7245 - protein, 7 aa, Artificial Sequence
  source: /note="Description of Artificial Sequence: Synthetic peptide"
NYPDTPN

SEQ ID NO: 7246 - protein, 7 aa, Artificial Sequence
  source: /note="Description of Artificial Sequence: Synthetic peptide"
NYPDVRS

SEQ ID NO: 7247 - protein, 7 aa, Artificial Sequence
  source: /note="Description of Artificial Sequence: Synthetic peptide"
NYPPSRL

SEQ ID NO: 7248 - protein, 7 aa, Artificial Sequence
  source: /note="Description of Artificial Sequence: Synthetic peptide"
NYRQTLS

SEQ ID NO: 7249 - protein, 7 aa, Artificial Sequence
  source: /note="Description of Artificial Sequence: Synthetic peptide"
PAADRNL

SEQ ID NO: 7250 - protein, 7 aa, Artificial Sequence
  source: /note="Description of Artificial Sequence: Synthetic peptide"
PAAEFAS

SEQ ID NO: 7251 - protein, 7 aa, Artificial Sequence
  source: /note="Description of Artificial Sequence: Synthetic peptide"
PAARERL

SEQ ID NO: 7252 - protein, 7 aa, Artificial Sequence
  source: /note="Description of Artificial Sequence: Synthetic peptide"
PADLGSM

SEQ ID NO: 7253 - protein, 7 aa, Artificial Sequence
  source: /note="Description of Artificial Sequence: Synthetic peptide"
PADNGPW

SEQ ID NO: 7254 - protein, 7 aa, Artificial Sequence
  source: /note="Description of Artificial Sequence: Synthetic peptide"
PADPPSV

SEQ ID NO: 7255 - protein, 7 aa, Artificial Sequence
  source: /note="Description of Artificial Sequence: Synthetic peptide"
PADRSPT

SEQ ID NO: 7256 - protein, 7 aa, Artificial Sequence
  source: /note="Description of Artificial Sequence: Synthetic peptide"
PADYQKD

SEQ ID NO: 7257 - protein, 7 aa, Artificial Sequence
  source: /note="Description of Artificial Sequence: Synthetic peptide"
PAEKVRT

SEQ ID NO: 7258 - protein, 7 aa, Artificial Sequence
  source: /note="Description of Artificial Sequence: Synthetic peptide"
PAFSGRD

SEQ ID NO: 7259 - protein, 7 aa, Artificial Sequence
  source: /note="Description of Artificial Sequence: Synthetic peptide"
PAFSMSI

SEQ ID NO: 7260 - protein, 7 aa, Artificial Sequence
  source: /note="Description of Artificial Sequence: Synthetic peptide"
PAGLPDR

SEQ ID NO: 7261 - protein, 7 aa, Artificial Sequence
  source: /note="Description of Artificial Sequence: Synthetic peptide"
PAGSQPP

SEQ ID NO: 7262 - protein, 7 aa, Artificial Sequence
  source: /note="Description of Artificial Sequence: Synthetic peptide"
PAGSTMP

SEQ ID NO: 7263 - protein, 7 aa, Artificial Sequence
  source: /note="Description of Artificial Sequence: Synthetic peptide"
PAHALTM

SEQ ID NO: 7264 - protein, 7 aa, Artificial Sequence
  source: /note="Description of Artificial Sequence: Synthetic peptide"
PAHFTTG

SEQ ID NO: 7265 - protein, 7 aa, Artificial Sequence
  source: /note="Description of Artificial Sequence: Synthetic peptide"
PAIGVHR

SEQ ID NO: 7266 - protein, 7 aa, Artificial Sequence
  source: /note="Description of Artificial Sequence: Synthetic peptide"
PAIKSQL

SEQ ID NO: 7267 - protein, 7 aa, Artificial Sequence
  source: /note="Description of Artificial Sequence: Synthetic peptide"
PAILRTS

SEQ ID NO: 7268 - protein, 7 aa, Artificial Sequence
  source: /note="Description of Artificial Sequence: Synthetic peptide"
PAISGTI

SEQ ID NO: 7269 - protein, 7 aa, Artificial Sequence
  source: /note="Description of Artificial Sequence: Synthetic peptide"
PAKPIDF

SEQ ID NO: 7270 - protein, 7 aa, Artificial Sequence
  source: /note="Description of Artificial Sequence: Synthetic peptide"
PALAPIY

SEQ ID NO: 7271 - protein, 7 aa, Artificial Sequence
  source: /note="Description of Artificial Sequence: Synthetic peptide"
PALMAPA

SEQ ID NO: 7272 - protein, 7 aa, Artificial Sequence
  source: /note="Description of Artificial Sequence: Synthetic peptide"
PAMGQSD

SEQ ID NO: 7273 - protein, 7 aa, Artificial Sequence
  source: /note="Description of Artificial Sequence: Synthetic peptide"
PAMSDRS

SEQ ID NO: 7274 - protein, 7 aa, Artificial Sequence
  source: /note="Description of Artificial Sequence: Synthetic peptide"
PAMSNTI

SEQ ID NO: 7275 - protein, 7 aa, Artificial Sequence
  source: /note="Description of Artificial Sequence: Synthetic peptide"
PANDADR

SEQ ID NO: 7276 - protein, 7 aa, Artificial Sequence
  source: /note="Description of Artificial Sequence: Synthetic peptide"
PANLTSP

SEQ ID NO: 7277 - protein, 7 aa, Artificial Sequence
  source: /note="Description of Artificial Sequence: Synthetic peptide"
PANPPDS

SEQ ID NO: 7278 - protein, 7 aa, Artificial Sequence
  source: /note="Description of Artificial Sequence: Synthetic peptide"
PANPPKS

SEQ ID NO: 7279 - protein, 7 aa, Artificial Sequence
  source: /note="Description of Artificial Sequence: Synthetic peptide"
PANRVGT

SEQ ID NO: 7280 - protein, 7 aa, Artificial Sequence
  source: /note="Description of Artificial Sequence: Synthetic peptide"
PANYLSV

SEQ ID NO: 7281 - protein, 7 aa, Artificial Sequence
  source: /note="Description of Artificial Sequence: Synthetic peptide"
PAPMNFQ

SEQ ID NO: 7282 - protein, 7 aa, Artificial Sequence
  source: /note="Description of Artificial Sequence: Synthetic peptide"
PAPSHQS

SEQ ID NO: 7283 - protein, 7 aa, Artificial Sequence
  source: /note="Description of Artificial Sequence: Synthetic peptide"
PAPTSIA

SEQ ID NO: 7284 - protein, 7 aa, Artificial Sequence
  source: /note="Description of Artificial Sequence: Synthetic peptide"
PAQRTMA

SEQ ID NO: 7285 - protein, 7 aa, Artificial Sequence
  source: /note="Description of Artificial Sequence: Synthetic peptide"
PAQSTGP

SEQ ID NO: 7286 - protein, 7 aa, Artificial Sequence
  source: /note="Description of Artificial Sequence: Synthetic peptide"
PARADPA

SEQ ID NO: 7287 - protein, 7 aa, Artificial Sequence
  source: /note="Description of Artificial Sequence: Synthetic peptide"
PARAFDA

SEQ ID NO: 7288 - protein, 7 aa, Artificial Sequence
  source: /note="Description of Artificial Sequence: Synthetic peptide"
PARITGM

SEQ ID NO: 7289 - protein, 7 aa, Artificial Sequence
  source: /note="Description of Artificial Sequence: Synthetic peptide"
PARLATN

SEQ ID NO: 7290 - protein, 7 aa, Artificial Sequence
  source: /note="Description of Artificial Sequence: Synthetic peptide"
PARRPDD

SEQ ID NO: 7291 - protein, 7 aa, Artificial Sequence
  source: /note="Description of Artificial Sequence: Synthetic peptide"
PARTLIH

SEQ ID NO: 7292 - protein, 7 aa, Artificial Sequence
  source: /note="Description of Artificial Sequence: Synthetic peptide"
PARTNPT

SEQ ID NO: 7293 - protein, 7 aa, Artificial Sequence
  source: /note="Description of Artificial Sequence: Synthetic peptide"
PARTQVD

SEQ ID NO: 7294 - protein, 7 aa, Artificial Sequence
  source: /note="Description of Artificial Sequence: Synthetic peptide"
PASERSL

SEQ ID NO: 7295 - protein, 7 aa, Artificial Sequence
  source: /note="Description of Artificial Sequence: Synthetic peptide"
PASFGIN

SEQ ID NO: 7296 - protein, 7 aa, Artificial Sequence
  source: /note="Description of Artificial Sequence: Synthetic peptide"
PASHMNP

SEQ ID NO: 7297 - protein, 7 aa, Artificial Sequence
  source: /note="Description of Artificial Sequence: Synthetic peptide"
PASPLHS

SEQ ID NO: 7298 - protein, 7 aa, Artificial Sequence
  source: /note="Description of Artificial Sequence: Synthetic peptide"
PASPVTS

SEQ ID NO: 7299 - protein, 7 aa, Artificial Sequence
  source: /note="Description of Artificial Sequence: Synthetic peptide"
PASVMAG

SEQ ID NO: 7300 - protein, 7 aa, Artificial Sequence
  source: /note="Description of Artificial Sequence: Synthetic peptide"
PATALSR

SEQ ID NO: 7301 - protein, 7 aa, Artificial Sequence
  source: /note="Description of Artificial Sequence: Synthetic peptide"
PATGLPY

SEQ ID NO: 7302 - protein, 7 aa, Artificial Sequence
  source: /note="Description of Artificial Sequence: Synthetic peptide"
PATMIRH

SEQ ID NO: 7303 - protein, 7 aa, Artificial Sequence
  source: /note="Description of Artificial Sequence: Synthetic peptide"
PATNVRG

SEQ ID NO: 7304 - protein, 7 aa, Artificial Sequence
  source: /note="Description of Artificial Sequence: Synthetic peptide"
PATPSVV

SEQ ID NO: 7305 - protein, 7 aa, Artificial Sequence
  source: /note="Description of Artificial Sequence: Synthetic peptide"
PATSSVS

SEQ ID NO: 7306 - protein, 7 aa, Artificial Sequence
  source: /note="Description of Artificial Sequence: Synthetic peptide"
PAVEADG

SEQ ID NO: 7307 - protein, 7 aa, Artificial Sequence
  source: /note="Description of Artificial Sequence: Synthetic peptide"
PAVKPSF

SEQ ID NO: 7308 - protein, 7 aa, Artificial Sequence
  source: /note="Description of Artificial Sequence: Synthetic peptide"
PAYPHAP

SEQ ID NO: 7309 - protein, 7 aa, Artificial Sequence
  source: /note="Description of Artificial Sequence: Synthetic peptide"
PDAEIRR

SEQ ID NO: 7310 - protein, 7 aa, Artificial Sequence
  source: /note="Description of Artificial Sequence: Synthetic peptide"
PDDFRHH

SEQ ID NO: 7311 - protein, 7 aa, Artificial Sequence
  source: /note="Description of Artificial Sequence: Synthetic peptide"
PDELKVR

SEQ ID NO: 7312 - protein, 7 aa, Artificial Sequence
  source: /note="Description of Artificial Sequence: Synthetic peptide"
PDGDTAL

SEQ ID NO: 7313 - protein, 7 aa, Artificial Sequence
  source: /note="Description of Artificial Sequence: Synthetic peptide"
PDGSSRH

SEQ ID NO: 7314 - protein, 7 aa, Artificial Sequence
  source: /note="Description of Artificial Sequence: Synthetic peptide"
PDHASIS

SEQ ID NO: 7315 - protein, 7 aa, Artificial Sequence
  source: /note="Description of Artificial Sequence: Synthetic peptide"
PDHGGIA

SEQ ID NO: 7316 - protein, 7 aa, Artificial Sequence
  source: /note="Description of Artificial Sequence: Synthetic peptide"
PDHRSPN

SEQ ID NO: 7317 - protein, 7 aa, Artificial Sequence
  source: /note="Description of Artificial Sequence: Synthetic peptide"
PDHSNDQ

SEQ ID NO: 7318 - protein, 7 aa, Artificial Sequence
  source: /note="Description of Artificial Sequence: Synthetic peptide"
PDIAFAE

SEQ ID NO: 7319 - protein, 7 aa, Artificial Sequence
  source: /note="Description of Artificial Sequence: Synthetic peptide"
PDLEVVK

SEQ ID NO: 7320 - protein, 7 aa, Artificial Sequence
  source: /note="Description of Artificial Sequence: Synthetic peptide"
PDLISDA

SEQ ID NO: 7321 - protein, 7 aa, Artificial Sequence
  source: /note="Description of Artificial Sequence: Synthetic peptide"
PDLPGIR

SEQ ID NO: 7322 - protein, 7 aa, Artificial Sequence
  source: /note="Description of Artificial Sequence: Synthetic peptide"
PDNLQVS

SEQ ID NO: 7323 - protein, 7 aa, Artificial Sequence
  source: /note="Description of Artificial Sequence: Synthetic peptide"
PDNVRTF

SEQ ID NO: 7324 - protein, 7 aa, Artificial Sequence
  source: /note="Description of Artificial Sequence: Synthetic peptide"
PDNVYND

SEQ ID NO: 7325 - protein, 7 aa, Artificial Sequence
  source: /note="Description of Artificial Sequence: Synthetic peptide"
PDPAYLH

SEQ ID NO: 7326 - protein, 7 aa, Artificial Sequence
  source: /note="Description of Artificial Sequence: Synthetic peptide"
PDPIDRP

SEQ ID NO: 7327 - protein, 7 aa, Artificial Sequence
  source: /note="Description of Artificial Sequence: Synthetic peptide"
PDPPTSP

SEQ ID NO: 7328 - protein, 7 aa, Artificial Sequence
  source: /note="Description of Artificial Sequence: Synthetic peptide"
PDQASGR

SEQ ID NO: 7329 - protein, 7 aa, Artificial Sequence
  source: /note="Description of Artificial Sequence: Synthetic peptide"
PDQMVRI

SEQ ID NO: 7330 - protein, 7 aa, Artificial Sequence
  source: /note="Description of Artificial Sequence: Synthetic peptide"
PDQRGNH

SEQ ID NO: 7331 - protein, 7 aa, Artificial Sequence
  source: /note="Description of Artificial Sequence: Synthetic peptide"
PDQSLTG

SEQ ID NO: 7332 - protein, 7 aa, Artificial Sequence
  source: /note="Description of Artificial Sequence: Synthetic peptide"
PDRLLDR

SEQ ID NO: 7333 - protein, 7 aa, Artificial Sequence
  source: /note="Description of Artificial Sequence: Synthetic peptide"
PDRLSEF

SEQ ID NO: 7334 - protein, 7 aa, Artificial Sequence
  source: /note="Description of Artificial Sequence: Synthetic peptide"
PDRMQNR

SEQ ID NO: 7335 - protein, 7 aa, Artificial Sequence
  source: /note="Description of Artificial Sequence: Synthetic peptide"
PDRQQQL

SEQ ID NO: 7336 - protein, 7 aa, Artificial Sequence
  source: /note="Description of Artificial Sequence: Synthetic peptide"
PDRVPTV

SEQ ID NO: 7337 - protein, 7 aa, Artificial Sequence
  source: /note="Description of Artificial Sequence: Synthetic peptide"
PDSAPLP

SEQ ID NO: 7338 - protein, 7 aa, Artificial Sequence
  source: /note="Description of Artificial Sequence: Synthetic peptide"
PDSDPPH

SEQ ID NO: 7339 - protein, 7 aa, Artificial Sequence
  source: /note="Description of Artificial Sequence: Synthetic peptide"
PDSMYRS

SEQ ID NO: 7340 - protein, 7 aa, Artificial Sequence
  source: /note="Description of Artificial Sequence: Synthetic peptide"
PDSTLQF

SEQ ID NO: 7341 - protein, 7 aa, Artificial Sequence
  source: /note="Description of Artificial Sequence: Synthetic peptide"
PDTDPPL

SEQ ID NO: 7342 - protein, 7 aa, Artificial Sequence
  source: /note="Description of Artificial Sequence: Synthetic peptide"
PDTKWCH

SEQ ID NO: 7343 - protein, 7 aa, Artificial Sequence
  source: /note="Description of Artificial Sequence: Synthetic peptide"
PDTSHDL

SEQ ID NO: 7344 - protein, 7 aa, Artificial Sequence
  source: /note="Description of Artificial Sequence: Synthetic peptide"
PDVKAGR

SEQ ID NO: 7345 - protein, 7 aa, Artificial Sequence
  source: /note="Description of Artificial Sequence: Synthetic peptide"
PDYAKLS

SEQ ID NO: 7346 - protein, 7 aa, Artificial Sequence
  source: /note="Description of Artificial Sequence: Synthetic peptide"
PDYEKKQ

SEQ ID NO: 7347 - protein, 7 aa, Artificial Sequence
  source: /note="Description of Artificial Sequence: Synthetic peptide"
PDYSAVL

SEQ ID NO: 7348 - protein, 7 aa, Artificial Sequence
  source: /note="Description of Artificial Sequence: Synthetic peptide"
PEAEDDI

SEQ ID NO: 7349 - protein, 7 aa, Artificial Sequence
  source: /note="Description of Artificial Sequence: Synthetic peptide"
PEALRTG

SEQ ID NO: 7350 - protein, 7 aa, Artificial Sequence
  source: /note="Description of Artificial Sequence: Synthetic peptide"
PEEPRLS

SEQ ID NO: 7351 - protein, 7 aa, Artificial Sequence
  source: /note="Description of Artificial Sequence: Synthetic peptide"
PEEVCRI

SEQ ID NO: 7352 - protein, 7 aa, Artificial Sequence
  source: /note="Description of Artificial Sequence: Synthetic peptide"
PEFAIDA

SEQ ID NO: 7353 - protein, 7 aa, Artificial Sequence
  source: /note="Description of Artificial Sequence: Synthetic peptide"
PEFKTRN

SEQ ID NO: 7354 - protein, 7 aa, Artificial Sequence
  source: /note="Description of Artificial Sequence: Synthetic peptide"
PEGRLHA

SEQ ID NO: 7355 - protein, 7 aa, Artificial Sequence
  source: /note="Description of Artificial Sequence: Synthetic peptide"
PEKDTHR

SEQ ID NO: 7356 - protein, 7 aa, Artificial Sequence
  source: /note="Description of Artificial Sequence: Synthetic peptide"
PEKYSQN

SEQ ID NO: 7357 - protein, 7 aa, Artificial Sequence
  source: /note="Description of Artificial Sequence: Synthetic peptide"
PEMGRLG

SEQ ID NO: 7358 - protein, 7 aa, Artificial Sequence
  source: /note="Description of Artificial Sequence: Synthetic peptide"
PEMKPGQ

SEQ ID NO: 7359 - protein, 7 aa, Artificial Sequence
  source: /note="Description of Artificial Sequence: Synthetic peptide"
PENSKVD

SEQ ID NO: 7360 - protein, 7 aa, Artificial Sequence
  source: /note="Description of Artificial Sequence: Synthetic peptide"
PENSQRG

SEQ ID NO: 7361 - protein, 7 aa, Artificial Sequence
  source: /note="Description of Artificial Sequence: Synthetic peptide"
PENTTYA

SEQ ID NO: 7362 - protein, 7 aa, Artificial Sequence
  source: /note="Description of Artificial Sequence: Synthetic peptide"
PEPSNTR

SEQ ID NO: 7363 - protein, 7 aa, Artificial Sequence
  source: /note="Description of Artificial Sequence: Synthetic peptide"
PEPTLNL

SEQ ID NO: 7364 - protein, 7 aa, Artificial Sequence
  source: /note="Description of Artificial Sequence: Synthetic peptide"
PERGLHV

SEQ ID NO: 7365 - protein, 7 aa, Artificial Sequence
  source: /note="Description of Artificial Sequence: Synthetic peptide"
PERKAHT

SEQ ID NO: 7366 - protein, 7 aa, Artificial Sequence
  source: /note="Description of Artificial Sequence: Synthetic peptide"
PERPALS

SEQ ID NO: 7367 - protein, 7 aa, Artificial Sequence
  source: /note="Description of Artificial Sequence: Synthetic peptide"
PERSQAG

SEQ ID NO: 7368 - protein, 7 aa, Artificial Sequence
  source: /note="Description of Artificial Sequence: Synthetic peptide"
PERSTWV

SEQ ID NO: 7369 - protein, 7 aa, Artificial Sequence
  source: /note="Description of Artificial Sequence: Synthetic peptide"
PESKDAH

SEQ ID NO: 7370 - protein, 7 aa, Artificial Sequence
  source: /note="Description of Artificial Sequence: Synthetic peptide"
PESPRTL

SEQ ID NO: 7371 - protein, 7 aa, Artificial Sequence
  source: /note="Description of Artificial Sequence: Synthetic peptide"
PESVLRR

SEQ ID NO: 7372 - protein, 7 aa, Artificial Sequence
  source: /note="Description of Artificial Sequence: Synthetic peptide"
PESWPSP

SEQ ID NO: 7373 - protein, 7 aa, Artificial Sequence
  source: /note="Description of Artificial Sequence: Synthetic peptide"
PETSPRP

SEQ ID NO: 7374 - protein, 7 aa, Artificial Sequence
  source: /note="Description of Artificial Sequence: Synthetic peptide"
PFAEAGI

SEQ ID NO: 7375 - protein, 7 aa, Artificial Sequence
  source: /note="Description of Artificial Sequence: Synthetic peptide"
PFAGHAL

SEQ ID NO: 7376 - protein, 7 aa, Artificial Sequence
  source: /note="Description of Artificial Sequence: Synthetic peptide"
PFAQTLT

SEQ ID NO: 7377 - protein, 7 aa, Artificial Sequence
  source: /note="Description of Artificial Sequence: Synthetic peptide"
PFASSTS

SEQ ID NO: 7378 - protein, 7 aa, Artificial Sequence
  source: /note="Description of Artificial Sequence: Synthetic peptide"
PFDHLTD

SEQ ID NO: 7379 - protein, 7 aa, Artificial Sequence
  source: /note="Description of Artificial Sequence: Synthetic peptide"
PFGVSVD

SEQ ID NO: 7380 - protein, 7 aa, Artificial Sequence
  source: /note="Description of Artificial Sequence: Synthetic peptide"
PFPHDRP

SEQ ID NO: 7381 - protein, 7 aa, Artificial Sequence
  source: /note="Description of Artificial Sequence: Synthetic peptide"
PFQTGSG

SEQ ID NO: 7382 - protein, 7 aa, Artificial Sequence
  source: /note="Description of Artificial Sequence: Synthetic peptide"
PFRIQTD

SEQ ID NO: 7383 - protein, 7 aa, Artificial Sequence
  source: /note="Description of Artificial Sequence: Synthetic peptide"
PFRPVVD

SEQ ID NO: 7384 - protein, 7 aa, Artificial Sequence
  source: /note="Description of Artificial Sequence: Synthetic peptide"
PFSDLRM

SEQ ID NO: 7385 - protein, 7 aa, Artificial Sequence
  source: /note="Description of Artificial Sequence: Synthetic peptide"
PFSGLTG

SEQ ID NO: 7386 - protein, 7 aa, Artificial Sequence
  source: /note="Description of Artificial Sequence: Synthetic peptide"
PFSNIQM

SEQ ID NO: 7387 - protein, 7 aa, Artificial Sequence
  source: /note="Description of Artificial Sequence: Synthetic peptide"
PFSSAVI

SEQ ID NO: 7388 - protein, 7 aa, Artificial Sequence
  source: /note="Description of Artificial Sequence: Synthetic peptide"
PFSSPSP

SEQ ID NO: 7389 - protein, 7 aa, Artificial Sequence
  source: /note="Description of Artificial Sequence: Synthetic peptide"
PFSTPDM

SEQ ID NO: 7390 - protein, 7 aa, Artificial Sequence
  source: /note="Description of Artificial Sequence: Synthetic peptide"
PFTAGFS

SEQ ID NO: 7391 - protein, 7 aa, Artificial Sequence
  source: /note="Description of Artificial Sequence: Synthetic peptide"
PFTATDR

SEQ ID NO: 7392 - protein, 7 aa, Artificial Sequence
  source: /note="Description of Artificial Sequence: Synthetic peptide"
PFTDELM

SEQ ID NO: 7393 - protein, 7 aa, Artificial Sequence
  source: /note="Description of Artificial Sequence: Synthetic peptide"
PFTGAPQ

SEQ ID NO: 7394 - protein, 7 aa, Artificial Sequence
  source: /note="Description of Artificial Sequence: Synthetic peptide"
PGARREL

SEQ ID NO: 7395 - protein, 7 aa, Artificial Sequence
  source: /note="Description of Artificial Sequence: Synthetic peptide"
PGAVPPS

SEQ ID NO: 7396 - protein, 7 aa, Artificial Sequence
  source: /note="Description of Artificial Sequence: Synthetic peptide"
PGCSSVV

SEQ ID NO: 7397 - protein, 7 aa, Artificial Sequence
  source: /note="Description of Artificial Sequence: Synthetic peptide"
PGDAKPR

SEQ ID NO: 7398 - protein, 7 aa, Artificial Sequence
  source: /note="Description of Artificial Sequence: Synthetic peptide"
PGDPTHD

SEQ ID NO: 7399 - protein, 7 aa, Artificial Sequence
  source: /note="Description of Artificial Sequence: Synthetic peptide"
PGEATKL

SEQ ID NO: 7400 - protein, 7 aa, Artificial Sequence
  source: /note="Description of Artificial Sequence: Synthetic peptide"
PGEKLWC

SEQ ID NO: 7401 - protein, 7 aa, Artificial Sequence
  source: /note="Description of Artificial Sequence: Synthetic peptide"
PGETQEV

SEQ ID NO: 7402 - protein, 7 aa, Artificial Sequence
  source: /note="Description of Artificial Sequence: Synthetic peptide"
PGFDPSG

SEQ ID NO: 7403 - protein, 7 aa, Artificial Sequence
  source: /note="Description of Artificial Sequence: Synthetic peptide"
PGGSDHS

SEQ ID NO: 7404 - protein, 7 aa, Artificial Sequence
  source: /note="Description of Artificial Sequence: Synthetic peptide"
PGGSLGE

SEQ ID NO: 7405 - protein, 7 aa, Artificial Sequence
  source: /note="Description of Artificial Sequence: Synthetic peptide"
PGHDVAR

SEQ ID NO: 7406 - protein, 7 aa, Artificial Sequence
  source: /note="Description of Artificial Sequence: Synthetic peptide"
PGHMPAS

SEQ ID NO: 7407 - protein, 7 aa, Artificial Sequence
  source: /note="Description of Artificial Sequence: Synthetic peptide"
PGIDARI

SEQ ID NO: 7408 - protein, 7 aa, Artificial Sequence
  source: /note="Description of Artificial Sequence: Synthetic peptide"
PGIDRKS

SEQ ID NO: 7409 - protein, 7 aa, Artificial Sequence
  source: /note="Description of Artificial Sequence: Synthetic peptide"
PGIQAPI

SEQ ID NO: 7410 - protein, 7 aa, Artificial Sequence
  source: /note="Description of Artificial Sequence: Synthetic peptide"
PGKIHAA

SEQ ID NO: 7411 - protein, 7 aa, Artificial Sequence
  source: /note="Description of Artificial Sequence: Synthetic peptide"
PGKLLNP

SEQ ID NO: 7412 - protein, 7 aa, Artificial Sequence
  source: /note="Description of Artificial Sequence: Synthetic peptide"
PGKSLEA

SEQ ID NO: 7413 - protein, 7 aa, Artificial Sequence
  source: /note="Description of Artificial Sequence: Synthetic peptide"
PGKYSPS

SEQ ID NO: 7414 - protein, 7 aa, Artificial Sequence
  source: /note="Description of Artificial Sequence: Synthetic peptide"
PGLADYG

SEQ ID NO: 7415 - protein, 7 aa, Artificial Sequence
  source: /note="Description of Artificial Sequence: Synthetic peptide"
PGLLDHV

SEQ ID NO: 7416 - protein, 7 aa, Artificial Sequence
  source: /note="Description of Artificial Sequence: Synthetic peptide"
PGLQSMK

SEQ ID NO: 7417 - protein, 7 aa, Artificial Sequence
  source: /note="Description of Artificial Sequence: Synthetic peptide"
PGLRSDS

SEQ ID NO: 7418 - protein, 7 aa, Artificial Sequence
  source: /note="Description of Artificial Sequence: Synthetic peptide"
PGLTANP

SEQ ID NO: 7419 - protein, 7 aa, Artificial Sequence
  source: /note="Description of Artificial Sequence: Synthetic peptide"
PGLTKAI

SEQ ID NO: 7420 - protein, 7 aa, Artificial Sequence
  source: /note="Description of Artificial Sequence: Synthetic peptide"
PGMRMGQ

SEQ ID NO: 7421 - protein, 7 aa, Artificial Sequence
  source: /note="Description of Artificial Sequence: Synthetic peptide"
PGNHVTR

SEQ ID NO: 7422 - protein, 7 aa, Artificial Sequence
  source: /note="Description of Artificial Sequence: Synthetic peptide"
PGNYEYR

SEQ ID NO: 7423 - protein, 7 aa, Artificial Sequence
  source: /note="Description of Artificial Sequence: Synthetic peptide"
PGPGQPR

SEQ ID NO: 7424 - protein, 7 aa, Artificial Sequence
  source: /note="Description of Artificial Sequence: Synthetic peptide"
PGPMNSS

SEQ ID NO: 7425 - protein, 7 aa, Artificial Sequence
  source: /note="Description of Artificial Sequence: Synthetic peptide"
PGPRRDI

SEQ ID NO: 7426 - protein, 7 aa, Artificial Sequence
  source: /note="Description of Artificial Sequence: Synthetic peptide"
PGPTGAY

SEQ ID NO: 7427 - protein, 7 aa, Artificial Sequence
  source: /note="Description of Artificial Sequence: Synthetic peptide"
PGQETSY

SEQ ID NO: 7428 - protein, 7 aa, Artificial Sequence
  source: /note="Description of Artificial Sequence: Synthetic peptide"
PGQQKNM

SEQ ID NO: 7429 - protein, 7 aa, Artificial Sequence
  source: /note="Description of Artificial Sequence: Synthetic peptide"
PGQRGTP

SEQ ID NO: 7430 - protein, 7 aa, Artificial Sequence
  source: /note="Description of Artificial Sequence: Synthetic peptide"
PGQTQHN

SEQ ID NO: 7431 - protein, 7 aa, Artificial Sequence
  source: /note="Description of Artificial Sequence: Synthetic peptide"
PGRDAEG

SEQ ID NO: 7432 - protein, 7 aa, Artificial Sequence
  source: /note="Description of Artificial Sequence: Synthetic peptide"
PGREGVT

SEQ ID NO: 7433 - protein, 7 aa, Artificial Sequence
  source: /note="Description of Artificial Sequence: Synthetic peptide"
PGRPQPS

SEQ ID NO: 7434 - protein, 7 aa, Artificial Sequence
  source: /note="Description of Artificial Sequence: Synthetic peptide"
PGRVGPL

SEQ ID NO: 7435 - protein, 7 aa, Artificial Sequence
  source: /note="Description of Artificial Sequence: Synthetic peptide"
PGSFPRG

SEQ ID NO: 7436 - protein, 7 aa, Artificial Sequence
  source: /note="Description of Artificial Sequence: Synthetic peptide"
PGSNSGH

SEQ ID NO: 7437 - protein, 7 aa, Artificial Sequence
  source: /note="Description of Artificial Sequence: Synthetic peptide"
PGSQAVH

SEQ ID NO: 7438 - protein, 7 aa, Artificial Sequence
  source: /note="Description of Artificial Sequence: Synthetic peptide"
PGSQRNS

SEQ ID NO: 7439 - protein, 7 aa, Artificial Sequence
  source: /note="Description of Artificial Sequence: Synthetic peptide"
PGSRAPG

SEQ ID NO: 7440 - protein, 7 aa, Artificial Sequence
  source: /note="Description of Artificial Sequence: Synthetic peptide"
PGTARTN

SEQ ID NO: 7441 - protein, 7 aa, Artificial Sequence
  source: /note="Description of Artificial Sequence: Synthetic peptide"
PGTGRYV

SEQ ID NO: 7442 - protein, 7 aa, Artificial Sequence
  source: /note="Description of Artificial Sequence: Synthetic peptide"
PGTPLQS

SEQ ID NO: 7443 - protein, 7 aa, Artificial Sequence
  source: /note="Description of Artificial Sequence: Synthetic peptide"
PGTSSTG

SEQ ID NO: 7444 - protein, 7 aa, Artificial Sequence
  source: /note="Description of Artificial Sequence: Synthetic peptide"
PGVNPAI

SEQ ID NO: 7445 - protein, 7 aa, Artificial Sequence
  source: /note="Description of Artificial Sequence: Synthetic peptide"
PGVRGSP

SEQ ID NO: 7446 - protein, 7 aa, Artificial Sequence
  source: /note="Description of Artificial Sequence: Synthetic peptide"
PGVTDRG

SEQ ID NO: 7447 - protein, 7 aa, Artificial Sequence
  source: /note="Description of Artificial Sequence: Synthetic peptide"
PGYPAVT

SEQ ID NO: 7448 - protein, 7 aa, Artificial Sequence
  source: /note="Description of Artificial Sequence: Synthetic peptide"
PHANSSL

SEQ ID NO: 7449 - protein, 7 aa, Artificial Sequence
  source: /note="Description of Artificial Sequence: Synthetic peptide"
PHDSPTP

SEQ ID NO: 7450 - protein, 7 aa, Artificial Sequence
  source: /note="Description of Artificial Sequence: Synthetic peptide"
PHGVGDA

SEQ ID NO: 7451 - protein, 7 aa, Artificial Sequence
  source: /note="Description of Artificial Sequence: Synthetic peptide"
PHHDDEN

SEQ ID NO: 7452 - protein, 7 aa, Artificial Sequence
  source: /note="Description of Artificial Sequence: Synthetic peptide"
PHLECGM

SEQ ID NO: 7453 - protein, 7 aa, Artificial Sequence
  source: /note="Description of Artificial Sequence: Synthetic peptide"
PHLGVST

SEQ ID NO: 7454 - protein, 7 aa, Artificial Sequence
  source: /note="Description of Artificial Sequence: Synthetic peptide"
PHLHNGL

SEQ ID NO: 7455 - protein, 7 aa, Artificial Sequence
  source: /note="Description of Artificial Sequence: Synthetic peptide"
PHLKIAA

SEQ ID NO: 7456 - protein, 7 aa, Artificial Sequence
  source: /note="Description of Artificial Sequence: Synthetic peptide"
PHLPDHA

SEQ ID NO: 7457 - protein, 7 aa, Artificial Sequence
  source: /note="Description of Artificial Sequence: Synthetic peptide"
PHLPPAN

SEQ ID NO: 7458 - protein, 7 aa, Artificial Sequence
  source: /note="Description of Artificial Sequence: Synthetic peptide"
PHLPQNM

SEQ ID NO: 7459 - protein, 7 aa, Artificial Sequence
  source: /note="Description of Artificial Sequence: Synthetic peptide"
PHLSANA

SEQ ID NO: 7460 - protein, 7 aa, Artificial Sequence
  source: /note="Description of Artificial Sequence: Synthetic peptide"
PHMGRAD

SEQ ID NO: 7461 - protein, 7 aa, Artificial Sequence
  source: /note="Description of Artificial Sequence: Synthetic peptide"
PHNSTDT

SEQ ID NO: 7462 - protein, 7 aa, Artificial Sequence
  source: /note="Description of Artificial Sequence: Synthetic peptide"
PHPNSSP

SEQ ID NO: 7463 - protein, 7 aa, Artificial Sequence
  source: /note="Description of Artificial Sequence: Synthetic peptide"
PHPPEQS

SEQ ID NO: 7464 - protein, 7 aa, Artificial Sequence
  source: /note="Description of Artificial Sequence: Synthetic peptide"
PHPPSNR

SEQ ID NO: 7465 - protein, 7 aa, Artificial Sequence
  source: /note="Description of Artificial Sequence: Synthetic peptide"
PHPSAQG

SEQ ID NO: 7466 - protein, 7 aa, Artificial Sequence
  source: /note="Description of Artificial Sequence: Synthetic peptide"
PHPSSIP

SEQ ID NO: 7467 - protein, 7 aa, Artificial Sequence
  source: /note="Description of Artificial Sequence: Synthetic peptide"
PHQSIPP

SEQ ID NO: 7468 - protein, 7 aa, Artificial Sequence
  source: /note="Description of Artificial Sequence: Synthetic peptide"
PHREYVV

SEQ ID NO: 7469 - protein, 7 aa, Artificial Sequence
  source: /note="Description of Artificial Sequence: Synthetic peptide"
PHRPSNS

SEQ ID NO: 7470 - protein, 7 aa, Artificial Sequence
  source: /note="Description of Artificial Sequence: Synthetic peptide"
PHRPTVV

SEQ ID NO: 7471 - protein, 7 aa, Artificial Sequence
  source: /note="Description of Artificial Sequence: Synthetic peptide"
PHRVSVS

SEQ ID NO: 7472 - protein, 7 aa, Artificial Sequence
  source: /note="Description of Artificial Sequence: Synthetic peptide"
PHSNMNS

SEQ ID NO: 7473 - protein, 7 aa, Artificial Sequence
  source: /note="Description of Artificial Sequence: Synthetic peptide"
PHSSKEM

SEQ ID NO: 7474 - protein, 7 aa, Artificial Sequence
  source: /note="Description of Artificial Sequence: Synthetic peptide"
PHSSMLL

SEQ ID NO: 7475 - protein, 7 aa, Artificial Sequence
  source: /note="Description of Artificial Sequence: Synthetic peptide"
PHTGYTD

SEQ ID NO: 7476 - protein, 7 aa, Artificial Sequence
  source: /note="Description of Artificial Sequence: Synthetic peptide"
PHTLVTR

SEQ ID NO: 7477 - protein, 7 aa, Artificial Sequence
  source: /note="Description of Artificial Sequence: Synthetic peptide"
PHTSPPS

SEQ ID NO: 7478 - protein, 7 aa, Artificial Sequence
  source: /note="Description of Artificial Sequence: Synthetic peptide"
PIAREYG

SEQ ID NO: 7479 - protein, 7 aa, Artificial Sequence
  source: /note="Description of Artificial Sequence: Synthetic peptide"
PIARGDF

SEQ ID NO: 7480 - protein, 7 aa, Artificial Sequence
  source: /note="Description of Artificial Sequence: Synthetic peptide"
PIDREYA

SEQ ID NO: 7481 - protein, 7 aa, Artificial Sequence
  source: /note="Description of Artificial Sequence: Synthetic peptide"
PIDTGRE

SEQ ID NO: 7482 - protein, 7 aa, Artificial Sequence
  source: /note="Description of Artificial Sequence: Synthetic peptide"
PIDYGVE

SEQ ID NO: 7483 - protein, 7 aa, Artificial Sequence
  source: /note="Description of Artificial Sequence: Synthetic peptide"
PIEGRRV

SEQ ID NO: 7484 - protein, 7 aa, Artificial Sequence
  source: /note="Description of Artificial Sequence: Synthetic peptide"
PIERTLP

SEQ ID NO: 7485 - protein, 7 aa, Artificial Sequence
  source: /note="Description of Artificial Sequence: Synthetic peptide"
PIGPPNS

SEQ ID NO: 7486 - protein, 7 aa, Artificial Sequence
  source: /note="Description of Artificial Sequence: Synthetic peptide"
PIGSMLS

SEQ ID NO: 7487 - protein, 7 aa, Artificial Sequence
  source: /note="Description of Artificial Sequence: Synthetic peptide"
PIGSNGK

SEQ ID NO: 7488 - protein, 7 aa, Artificial Sequence
  source: /note="Description of Artificial Sequence: Synthetic peptide"
PIGVQEK

SEQ ID NO: 7489 - protein, 7 aa, Artificial Sequence
  source: /note="Description of Artificial Sequence: Synthetic peptide"
PIHISSV

SEQ ID NO: 7490 - protein, 7 aa, Artificial Sequence
  source: /note="Description of Artificial Sequence: Synthetic peptide"
PIHYSQD

SEQ ID NO: 7491 - protein, 7 aa, Artificial Sequence
  source: /note="Description of Artificial Sequence: Synthetic peptide"
PIMGQKS

SEQ ID NO: 7492 - protein, 7 aa, Artificial Sequence
  source: /note="Description of Artificial Sequence: Synthetic peptide"
PINDSSS

SEQ ID NO: 7493 - protein, 7 aa, Artificial Sequence
  source: /note="Description of Artificial Sequence: Synthetic peptide"
PINMRGP

SEQ ID NO: 7494 - protein, 7 aa, Artificial Sequence
  source: /note="Description of Artificial Sequence: Synthetic peptide"
PIPDKSS

SEQ ID NO: 7495 - protein, 7 aa, Artificial Sequence
  source: /note="Description of Artificial Sequence: Synthetic peptide"
PIPGPGK

SEQ ID NO: 7496 - protein, 7 aa, Artificial Sequence
  source: /note="Description of Artificial Sequence: Synthetic peptide"
PIPNKGG

SEQ ID NO: 7497 - protein, 7 aa, Artificial Sequence
  source: /note="Description of Artificial Sequence: Synthetic peptide"
PIQTRTY

SEQ ID NO: 7498 - protein, 7 aa, Artificial Sequence
  source: /note="Description of Artificial Sequence: Synthetic peptide"
PIRAAAS

SEQ ID NO: 7499 - protein, 7 aa, Artificial Sequence
  source: /note="Description of Artificial Sequence: Synthetic peptide"
PIRAEAV

SEQ ID NO: 7500 - protein, 7 aa, Artificial Sequence
  source: /note="Description of Artificial Sequence: Synthetic peptide"
PISEFNA

SEQ ID NO: 7501 - protein, 7 aa, Artificial Sequence
  source: /note="Description of Artificial Sequence: Synthetic peptide"
PISLSMP

SEQ ID NO: 7502 - protein, 7 aa, Artificial Sequence
  source: /note="Description of Artificial Sequence: Synthetic peptide"
PISPLSY

SEQ ID NO: 7503 - protein, 7 aa, Artificial Sequence
  source: /note="Description of Artificial Sequence: Synthetic peptide"
PISQGRL

SEQ ID NO: 7504 - protein, 7 aa, Artificial Sequence
  source: /note="Description of Artificial Sequence: Synthetic peptide"
PISSKSS

SEQ ID NO: 7505 - protein, 7 aa, Artificial Sequence
  source: /note="Description of Artificial Sequence: Synthetic peptide"
PISTLLA

SEQ ID NO: 7506 - protein, 7 aa, Artificial Sequence
  source: /note="Description of Artificial Sequence: Synthetic peptide"
PITNPRI

SEQ ID NO: 7507 - protein, 7 aa, Artificial Sequence
  source: /note="Description of Artificial Sequence: Synthetic peptide"
PITNSNI

SEQ ID NO: 7508 - protein, 7 aa, Artificial Sequence
  source: /note="Description of Artificial Sequence: Synthetic peptide"
PITNYSS

SEQ ID NO: 7509 - protein, 7 aa, Artificial Sequence
  source: /note="Description of Artificial Sequence: Synthetic peptide"
PITPGNE

SEQ ID NO: 7510 - protein, 7 aa, Artificial Sequence
  source: /note="Description of Artificial Sequence: Synthetic peptide"
PITTVPA

SEQ ID NO: 7511 - protein, 7 aa, Artificial Sequence
  source: /note="Description of Artificial Sequence: Synthetic peptide"
PIVGSHE

SEQ ID NO: 7512 - protein, 7 aa, Artificial Sequence
  source: /note="Description of Artificial Sequence: Synthetic peptide"
PIVPVSA

SEQ ID NO: 7513 - protein, 7 aa, Artificial Sequence
  source: /note="Description of Artificial Sequence: Synthetic peptide"
PIVTHAL

SEQ ID NO: 7514 - protein, 7 aa, Artificial Sequence
  source: /note="Description of Artificial Sequence: Synthetic peptide"
PIYKGTG

SEQ ID NO: 7515 - protein, 7 aa, Artificial Sequence
  source: /note="Description of Artificial Sequence: Synthetic peptide"
PKAAPNF

SEQ ID NO: 7516 - protein, 7 aa, Artificial Sequence
  source: /note="Description of Artificial Sequence: Synthetic peptide"
PKAILPS

SEQ ID NO: 7517 - protein, 7 aa, Artificial Sequence
  source: /note="Description of Artificial Sequence: Synthetic peptide"
PKASDWH

SEQ ID NO: 7518 - protein, 7 aa, Artificial Sequence
  source: /note="Description of Artificial Sequence: Synthetic peptide"
PKDDGQN

SEQ ID NO: 7519 - protein, 7 aa, Artificial Sequence
  source: /note="Description of Artificial Sequence: Synthetic peptide"
PKDIREF

SEQ ID NO: 7520 - protein, 7 aa, Artificial Sequence
  source: /note="Description of Artificial Sequence: Synthetic peptide"
PKDRNPV

SEQ ID NO: 7521 - protein, 7 aa, Artificial Sequence
  source: /note="Description of Artificial Sequence: Synthetic peptide"
PKDSSRT

SEQ ID NO: 7522 - protein, 7 aa, Artificial Sequence
  source: /note="Description of Artificial Sequence: Synthetic peptide"
PKERTHL

SEQ ID NO: 7523 - protein, 7 aa, Artificial Sequence
  source: /note="Description of Artificial Sequence: Synthetic peptide"
PKFGGVS

SEQ ID NO: 7524 - protein, 7 aa, Artificial Sequence
  source: /note="Description of Artificial Sequence: Synthetic peptide"
PKGAATM

SEQ ID NO: 7525 - protein, 7 aa, Artificial Sequence
  source: /note="Description of Artificial Sequence: Synthetic peptide"
PKGETGR

SEQ ID NO: 7526 - protein, 7 aa, Artificial Sequence
  source: /note="Description of Artificial Sequence: Synthetic peptide"
PKGTHFG

SEQ ID NO: 7527 - protein, 7 aa, Artificial Sequence
  source: /note="Description of Artificial Sequence: Synthetic peptide"
PKGYGAS

SEQ ID NO: 7528 - protein, 7 aa, Artificial Sequence
  source: /note="Description of Artificial Sequence: Synthetic peptide"
PKISTLG

SEQ ID NO: 7529 - protein, 7 aa, Artificial Sequence
  source: /note="Description of Artificial Sequence: Synthetic peptide"
PKKDPVP

SEQ ID NO: 7530 - protein, 7 aa, Artificial Sequence
  source: /note="Description of Artificial Sequence: Synthetic peptide"
PKLKDVT

SEQ ID NO: 7531 - protein, 7 aa, Artificial Sequence
  source: /note="Description of Artificial Sequence: Synthetic peptide"
PKLSSST

SEQ ID NO: 7532 - protein, 7 aa, Artificial Sequence
  source: /note="Description of Artificial Sequence: Synthetic peptide"
PKLYDMM

SEQ ID NO: 7533 - protein, 7 aa, Artificial Sequence
  source: /note="Description of Artificial Sequence: Synthetic peptide"
PKMDDKN

SEQ ID NO: 7534 - protein, 7 aa, Artificial Sequence
  source: /note="Description of Artificial Sequence: Synthetic peptide"
PKMLVTG

SEQ ID NO: 7535 - protein, 7 aa, Artificial Sequence
  source: /note="Description of Artificial Sequence: Synthetic peptide"
PKMTGAR

SEQ ID NO: 7536 - protein, 7 aa, Artificial Sequence
  source: /note="Description of Artificial Sequence: Synthetic peptide"
PKNMVPP

SEQ ID NO: 7537 - protein, 7 aa, Artificial Sequence
  source: /note="Description of Artificial Sequence: Synthetic peptide"
PKPEFAS

SEQ ID NO: 7538 - protein, 7 aa, Artificial Sequence
  source: /note="Description of Artificial Sequence: Synthetic peptide"
PKPEFLA

SEQ ID NO: 7539 - protein, 7 aa, Artificial Sequence
  source: /note="Description of Artificial Sequence: Synthetic peptide"
PKPEPHA

SEQ ID NO: 7540 - protein, 7 aa, Artificial Sequence
  source: /note="Description of Artificial Sequence: Synthetic peptide"
PKPITVT

SEQ ID NO: 7541 - protein, 7 aa, Artificial Sequence
  source: /note="Description of Artificial Sequence: Synthetic peptide"
PKPPNLL

SEQ ID NO: 7542 - protein, 7 aa, Artificial Sequence
  source: /note="Description of Artificial Sequence: Synthetic peptide"
PKPPSLG

SEQ ID NO: 7543 - protein, 7 aa, Artificial Sequence
  source: /note="Description of Artificial Sequence: Synthetic peptide"
PKQESYA

SEQ ID NO: 7544 - protein, 7 aa, Artificial Sequence
  source: /note="Description of Artificial Sequence: Synthetic peptide"
PKSMDGY

SEQ ID NO: 7545 - protein, 7 aa, Artificial Sequence
  source: /note="Description of Artificial Sequence: Synthetic peptide"
PKSNYYP

SEQ ID NO: 7546 - protein, 7 aa, Artificial Sequence
  source: /note="Description of Artificial Sequence: Synthetic peptide"
PKTHVLS

SEQ ID NO: 7547 - protein, 7 aa, Artificial Sequence
  source: /note="Description of Artificial Sequence: Synthetic peptide"
PKTYETV

SEQ ID NO: 7548 - protein, 7 aa, Artificial Sequence
  source: /note="Description of Artificial Sequence: Synthetic peptide"
PLAAGSV

SEQ ID NO: 7549 - protein, 7 aa, Artificial Sequence
  source: /note="Description of Artificial Sequence: Synthetic peptide"
PLAGPLT

SEQ ID NO: 7550 - protein, 7 aa, Artificial Sequence
  source: /note="Description of Artificial Sequence: Synthetic peptide"
PLAHTTS

SEQ ID NO: 7551 - protein, 7 aa, Artificial Sequence
  source: /note="Description of Artificial Sequence: Synthetic peptide"
PLAREEL

SEQ ID NO: 7552 - protein, 7 aa, Artificial Sequence
  source: /note="Description of Artificial Sequence: Synthetic peptide"
PLASPIP

SEQ ID NO: 7553 - protein, 7 aa, Artificial Sequence
  source: /note="Description of Artificial Sequence: Synthetic peptide"
PLASTYP

SEQ ID NO: 7554 - protein, 7 aa, Artificial Sequence
  source: /note="Description of Artificial Sequence: Synthetic peptide"
PLDAKMY

SEQ ID NO: 7555 - protein, 7 aa, Artificial Sequence
  source: /note="Description of Artificial Sequence: Synthetic peptide"
PLDDKPF

SEQ ID NO: 7556 - protein, 7 aa, Artificial Sequence
  source: /note="Description of Artificial Sequence: Synthetic peptide"
PLDPGIL

SEQ ID NO: 7557 - protein, 7 aa, Artificial Sequence
  source: /note="Description of Artificial Sequence: Synthetic peptide"
PLDSNVV

SEQ ID NO: 7558 - protein, 7 aa, Artificial Sequence
  source: /note="Description of Artificial Sequence: Synthetic peptide"
PLDTRFS

SEQ ID NO: 7559 - protein, 7 aa, Artificial Sequence
  source: /note="Description of Artificial Sequence: Synthetic peptide"
PLDYRKG

SEQ ID NO: 7560 - protein, 7 aa, Artificial Sequence
  source: /note="Description of Artificial Sequence: Synthetic peptide"
PLEKSSF

SEQ ID NO: 7561 - protein, 7 aa, Artificial Sequence
  source: /note="Description of Artificial Sequence: Synthetic peptide"
PLESVDI

SEQ ID NO: 7562 - protein, 7 aa, Artificial Sequence
  source: /note="Description of Artificial Sequence: Synthetic peptide"
PLFNGSA

SEQ ID NO: 7563 - protein, 7 aa, Artificial Sequence
  source: /note="Description of Artificial Sequence: Synthetic peptide"
PLGAGKS

SEQ ID NO: 7564 - protein, 7 aa, Artificial Sequence
  source: /note="Description of Artificial Sequence: Synthetic peptide"
PLGAQHL

SEQ ID NO: 7565 - protein, 7 aa, Artificial Sequence
  source: /note="Description of Artificial Sequence: Synthetic peptide"
PLGDAWG

SEQ ID NO: 7566 - protein, 7 aa, Artificial Sequence
  source: /note="Description of Artificial Sequence: Synthetic peptide"
PLGMVHT

SEQ ID NO: 7567 - protein, 7 aa, Artificial Sequence
  source: /note="Description of Artificial Sequence: Synthetic peptide"
PLHMTTM

SEQ ID NO: 7568 - protein, 7 aa, Artificial Sequence
  source: /note="Description of Artificial Sequence: Synthetic peptide"
PLHNRVP

SEQ ID NO: 7569 - protein, 7 aa, Artificial Sequence
  source: /note="Description of Artificial Sequence: Synthetic peptide"
PLHRANT

SEQ ID NO: 7570 - protein, 7 aa, Artificial Sequence
  source: /note="Description of Artificial Sequence: Synthetic peptide"
PLHRTLD

SEQ ID NO: 7571 - protein, 7 aa, Artificial Sequence
  source: /note="Description of Artificial Sequence: Synthetic peptide"
PLIAVPT

SEQ ID NO: 7572 - protein, 7 aa, Artificial Sequence
  source: /note="Description of Artificial Sequence: Synthetic peptide"
PLIGKPN

SEQ ID NO: 7573 - protein, 7 aa, Artificial Sequence
  source: /note="Description of Artificial Sequence: Synthetic peptide"
PLITPDL

SEQ ID NO: 7574 - protein, 7 aa, Artificial Sequence
  source: /note="Description of Artificial Sequence: Synthetic peptide"
PLKAHMM

SEQ ID NO: 7575 - protein, 7 aa, Artificial Sequence
  source: /note="Description of Artificial Sequence: Synthetic peptide"
PLKASGM

SEQ ID NO: 7576 - protein, 7 aa, Artificial Sequence
  source: /note="Description of Artificial Sequence: Synthetic peptide"
PLKLSYG

SEQ ID NO: 7577 - protein, 7 aa, Artificial Sequence
  source: /note="Description of Artificial Sequence: Synthetic peptide"
PLKVSAS

SEQ ID NO: 7578 - protein, 7 aa, Artificial Sequence
  source: /note="Description of Artificial Sequence: Synthetic peptide"
PLLDSHS

SEQ ID NO: 7579 - protein, 7 aa, Artificial Sequence
  source: /note="Description of Artificial Sequence: Synthetic peptide"
PLLEHRG

SEQ ID NO: 7580 - protein, 7 aa, Artificial Sequence
  source: /note="Description of Artificial Sequence: Synthetic peptide"
PLLHDKI

SEQ ID NO: 7581 - protein, 7 aa, Artificial Sequence
  source: /note="Description of Artificial Sequence: Synthetic peptide"
PLNAAPF

SEQ ID NO: 7582 - protein, 7 aa, Artificial Sequence
  source: /note="Description of Artificial Sequence: Synthetic peptide"
PLNGDAP

SEQ ID NO: 7583 - protein, 7 aa, Artificial Sequence
  source: /note="Description of Artificial Sequence: Synthetic peptide"
PLNPSTG

SEQ ID NO: 7584 - protein, 7 aa, Artificial Sequence
  source: /note="Description of Artificial Sequence: Synthetic peptide"
PLNVRTV

SEQ ID NO: 7585 - protein, 7 aa, Artificial Sequence
  source: /note="Description of Artificial Sequence: Synthetic peptide"
PLPDYLV

SEQ ID NO: 7586 - protein, 7 aa, Artificial Sequence
  source: /note="Description of Artificial Sequence: Synthetic peptide"
PLPGNVG

SEQ ID NO: 7587 - protein, 7 aa, Artificial Sequence
  source: /note="Description of Artificial Sequence: Synthetic peptide"
PLPLRTG

SEQ ID NO: 7588 - protein, 7 aa, Artificial Sequence
  source: /note="Description of Artificial Sequence: Synthetic peptide"
PLPPPEA

SEQ ID NO: 7589 - protein, 7 aa, Artificial Sequence
  source: /note="Description of Artificial Sequence: Synthetic peptide"
PLPRLAS

SEQ ID NO: 7590 - protein, 7 aa, Artificial Sequence
  source: /note="Description of Artificial Sequence: Synthetic peptide"
PLPSDGH

SEQ ID NO: 7591 - protein, 7 aa, Artificial Sequence
  source: /note="Description of Artificial Sequence: Synthetic peptide"
PLPVSRS

SEQ ID NO: 7592 - protein, 7 aa, Artificial Sequence
  source: /note="Description of Artificial Sequence: Synthetic peptide"
PLQSQTV

SEQ ID NO: 7593 - protein, 7 aa, Artificial Sequence
  source: /note="Description of Artificial Sequence: Synthetic peptide"
PLQSSQF

SEQ ID NO: 7594 - protein, 7 aa, Artificial Sequence
  source: /note="Description of Artificial Sequence: Synthetic peptide"
PLQTMTL

SEQ ID NO: 7595 - protein, 7 aa, Artificial Sequence
  source: /note="Description of Artificial Sequence: Synthetic peptide"
PLQVRLS

SEQ ID NO: 7596 - protein, 7 aa, Artificial Sequence
  source: /note="Description of Artificial Sequence: Synthetic peptide"
PLRDGLV

SEQ ID NO: 7597 - protein, 7 aa, Artificial Sequence
  source: /note="Description of Artificial Sequence: Synthetic peptide"
PLRLTSD

SEQ ID NO: 7598 - protein, 7 aa, Artificial Sequence
  source: /note="Description of Artificial Sequence: Synthetic peptide"
PLRPGQL

SEQ ID NO: 7599 - protein, 7 aa, Artificial Sequence
  source: /note="Description of Artificial Sequence: Synthetic peptide"
PLRVSTP

SEQ ID NO: 7600 - protein, 7 aa, Artificial Sequence
  source: /note="Description of Artificial Sequence: Synthetic peptide"
PLSAINS

SEQ ID NO: 7601 - protein, 7 aa, Artificial Sequence
  source: /note="Description of Artificial Sequence: Synthetic peptide"
PLSDAMS

SEQ ID NO: 7602 - protein, 7 aa, Artificial Sequence
  source: /note="Description of Artificial Sequence: Synthetic peptide"
PLSDPNI

SEQ ID NO: 7603 - protein, 7 aa, Artificial Sequence
  source: /note="Description of Artificial Sequence: Synthetic peptide"
PLSEDKR

SEQ ID NO: 7604 - protein, 7 aa, Artificial Sequence
  source: /note="Description of Artificial Sequence: Synthetic peptide"
PLSFTVA

SEQ ID NO: 7605 - protein, 7 aa, Artificial Sequence
  source: /note="Description of Artificial Sequence: Synthetic peptide"
PLSMMEP

SEQ ID NO: 7606 - protein, 7 aa, Artificial Sequence
  source: /note="Description of Artificial Sequence: Synthetic peptide"
PLSMRPD

SEQ ID NO: 7607 - protein, 7 aa, Artificial Sequence
  source: /note="Description of Artificial Sequence: Synthetic peptide"
PLSNLQP

SEQ ID NO: 7608 - protein, 7 aa, Artificial Sequence
  source: /note="Description of Artificial Sequence: Synthetic peptide"
PLSPAGA

SEQ ID NO: 7609 - protein, 7 aa, Artificial Sequence
  source: /note="Description of Artificial Sequence: Synthetic peptide"
PLSPIRN

SEQ ID NO: 7610 - protein, 7 aa, Artificial Sequence
  source: /note="Description of Artificial Sequence: Synthetic peptide"
PLSPTWK

SEQ ID NO: 7611 - protein, 7 aa, Artificial Sequence
  source: /note="Description of Artificial Sequence: Synthetic peptide"
PLSRNQI

SEQ ID NO: 7612 - protein, 7 aa, Artificial Sequence
  source: /note="Description of Artificial Sequence: Synthetic peptide"
PLSSAAG

SEQ ID NO: 7613 - protein, 7 aa, Artificial Sequence
  source: /note="Description of Artificial Sequence: Synthetic peptide"
PLSSGGM

SEQ ID NO: 7614 - protein, 7 aa, Artificial Sequence
  source: /note="Description of Artificial Sequence: Synthetic peptide"
PLSSPAR

SEQ ID NO: 7615 - protein, 7 aa, Artificial Sequence
  source: /note="Description of Artificial Sequence: Synthetic peptide"
PLSSPNG

SEQ ID NO: 7616 - protein, 7 aa, Artificial Sequence
  source: /note="Description of Artificial Sequence: Synthetic peptide"
PLSSTLG

SEQ ID NO: 7617 - protein, 7 aa, Artificial Sequence
  source: /note="Description of Artificial Sequence: Synthetic peptide"
PLSTNST

SEQ ID NO: 7618 - protein, 7 aa, Artificial Sequence
  source: /note="Description of Artificial Sequence: Synthetic peptide"
PLSYQKN

SEQ ID NO: 7619 - protein, 7 aa, Artificial Sequence
  source: /note="Description of Artificial Sequence: Synthetic peptide"
PLTAGLA

SEQ ID NO: 7620 - protein, 7 aa, Artificial Sequence
  source: /note="Description of Artificial Sequence: Synthetic peptide"
PLTAHVS

SEQ ID NO: 7621 - protein, 7 aa, Artificial Sequence
  source: /note="Description of Artificial Sequence: Synthetic peptide"
PLTQAVP

SEQ ID NO: 7622 - protein, 7 aa, Artificial Sequence
  source: /note="Description of Artificial Sequence: Synthetic peptide"
PLTSLKL

SEQ ID NO: 7623 - protein, 7 aa, Artificial Sequence
  source: /note="Description of Artificial Sequence: Synthetic peptide"
PLTSVAP

SEQ ID NO: 7624 - protein, 7 aa, Artificial Sequence
  source: /note="Description of Artificial Sequence: Synthetic peptide"
PLTTRNQ

SEQ ID NO: 7625 - protein, 7 aa, Artificial Sequence
  source: /note="Description of Artificial Sequence: Synthetic peptide"
PLVAIST

SEQ ID NO: 7626 - protein, 7 aa, Artificial Sequence
  source: /note="Description of Artificial Sequence: Synthetic peptide"
PLVLSSH

SEQ ID NO: 7627 - protein, 7 aa, Artificial Sequence
  source: /note="Description of Artificial Sequence: Synthetic peptide"
PLVRGDS

SEQ ID NO: 7628 - protein, 7 aa, Artificial Sequence
  source: /note="Description of Artificial Sequence: Synthetic peptide"
PLVSTGI

SEQ ID NO: 7629 - protein, 7 aa, Artificial Sequence
  source: /note="Description of Artificial Sequence: Synthetic peptide"
PLVTMAS

SEQ ID NO: 7630 - protein, 7 aa, Artificial Sequence
  source: /note="Description of Artificial Sequence: Synthetic peptide"
PMAPPVQ

SEQ ID NO: 7631 - protein, 7 aa, Artificial Sequence
  source: /note="Description of Artificial Sequence: Synthetic peptide"
PMAQVAP

SEQ ID NO: 7632 - protein, 7 aa, Artificial Sequence
  source: /note="Description of Artificial Sequence: Synthetic peptide"
PMERTHM

SEQ ID NO: 7633 - protein, 7 aa, Artificial Sequence
  source: /note="Description of Artificial Sequence: Synthetic peptide"
PMGHQSA

SEQ ID NO: 7634 - protein, 7 aa, Artificial Sequence
  source: /note="Description of Artificial Sequence: Synthetic peptide"
PMINSSM

SEQ ID NO: 7635 - protein, 7 aa, Artificial Sequence
  source: /note="Description of Artificial Sequence: Synthetic peptide"
PMKASSP

SEQ ID NO: 7636 - protein, 7 aa, Artificial Sequence
  source: /note="Description of Artificial Sequence: Synthetic peptide"
PMKGSVY

SEQ ID NO: 7637 - protein, 7 aa, Artificial Sequence
  source: /note="Description of Artificial Sequence: Synthetic peptide"
PMKMGPG

SEQ ID NO: 7638 - protein, 7 aa, Artificial Sequence
  source: /note="Description of Artificial Sequence: Synthetic peptide"
PMMQTPK

SEQ ID NO: 7639 - protein, 7 aa, Artificial Sequence
  source: /note="Description of Artificial Sequence: Synthetic peptide"
PMNRGKE

SEQ ID NO: 7640 - protein, 7 aa, Artificial Sequence
  source: /note="Description of Artificial Sequence: Synthetic peptide"
PMNTNVS

SEQ ID NO: 7641 - protein, 7 aa, Artificial Sequence
  source: /note="Description of Artificial Sequence: Synthetic peptide"
PMPASDF

SEQ ID NO: 7642 - protein, 7 aa, Artificial Sequence
  source: /note="Description of Artificial Sequence: Synthetic peptide"
PMPEFNG

SEQ ID NO: 7643 - protein, 7 aa, Artificial Sequence
  source: /note="Description of Artificial Sequence: Synthetic peptide"
PMPEMAG

SEQ ID NO: 7644 - protein, 7 aa, Artificial Sequence
  source: /note="Description of Artificial Sequence: Synthetic peptide"
PMPVRAV

SEQ ID NO: 7645 - protein, 7 aa, Artificial Sequence
  source: /note="Description of Artificial Sequence: Synthetic peptide"
PMRGSTL

SEQ ID NO: 7646 - protein, 7 aa, Artificial Sequence
  source: /note="Description of Artificial Sequence: Synthetic peptide"
PMRNQVD

SEQ ID NO: 7647 - protein, 7 aa, Artificial Sequence
  source: /note="Description of Artificial Sequence: Synthetic peptide"
PMRQIND

SEQ ID NO: 7648 - protein, 7 aa, Artificial Sequence
  source: /note="Description of Artificial Sequence: Synthetic peptide"
PMSELTP

SEQ ID NO: 7649 - protein, 7 aa, Artificial Sequence
  source: /note="Description of Artificial Sequence: Synthetic peptide"
PMSGPSM

SEQ ID NO: 7650 - protein, 7 aa, Artificial Sequence
  source: /note="Description of Artificial Sequence: Synthetic peptide"
PMSGSNA

SEQ ID NO: 7651 - protein, 7 aa, Artificial Sequence
  source: /note="Description of Artificial Sequence: Synthetic peptide"
PMSHMAP

SEQ ID NO: 7652 - protein, 7 aa, Artificial Sequence
  source: /note="Description of Artificial Sequence: Synthetic peptide"
PMSLPLS

SEQ ID NO: 7653 - protein, 7 aa, Artificial Sequence
  source: /note="Description of Artificial Sequence: Synthetic peptide"
PMSMKEP

SEQ ID NO: 7654 - protein, 7 aa, Artificial Sequence
  source: /note="Description of Artificial Sequence: Synthetic peptide"
PMSQTPG

SEQ ID NO: 7655 - protein, 7 aa, Artificial Sequence
  source: /note="Description of Artificial Sequence: Synthetic peptide"
PMSQTTS

SEQ ID NO: 7656 - protein, 7 aa, Artificial Sequence
  source: /note="Description of Artificial Sequence: Synthetic peptide"
PMSSPLK

SEQ ID NO: 7657 - protein, 7 aa, Artificial Sequence
  source: /note="Description of Artificial Sequence: Synthetic peptide"
PMSSRVV

SEQ ID NO: 7658 - protein, 7 aa, Artificial Sequence
  source: /note="Description of Artificial Sequence: Synthetic peptide"
PMSTSTP

SEQ ID NO: 7659 - protein, 7 aa, Artificial Sequence
  source: /note="Description of Artificial Sequence: Synthetic peptide"
PMVKGTS

SEQ ID NO: 7660 - protein, 7 aa, Artificial Sequence
  source: /note="Description of Artificial Sequence: Synthetic peptide"
PMVTVRT

SEQ ID NO: 7661 - protein, 7 aa, Artificial Sequence
  source: /note="Description of Artificial Sequence: Synthetic peptide"
PNAKTIP

SEQ ID NO: 7662 - protein, 7 aa, Artificial Sequence
  source: /note="Description of Artificial Sequence: Synthetic peptide"
PNAQTVY

SEQ ID NO: 7663 - protein, 7 aa, Artificial Sequence
  source: /note="Description of Artificial Sequence: Synthetic peptide"
PNARMLV

SEQ ID NO: 7664 - protein, 7 aa, Artificial Sequence
  source: /note="Description of Artificial Sequence: Synthetic peptide"
PNDGALP

SEQ ID NO: 7665 - protein, 7 aa, Artificial Sequence
  source: /note="Description of Artificial Sequence: Synthetic peptide"
PNDRAVV

SEQ ID NO: 7666 - protein, 7 aa, Artificial Sequence
  source: /note="Description of Artificial Sequence: Synthetic peptide"
PNDRTRI

SEQ ID NO: 7667 - protein, 7 aa, Artificial Sequence
  source: /note="Description of Artificial Sequence: Synthetic peptide"
PNEQALG

SEQ ID NO: 7668 - protein, 7 aa, Artificial Sequence
  source: /note="Description of Artificial Sequence: Synthetic peptide"
PNESLVT

SEQ ID NO: 7669 - protein, 7 aa, Artificial Sequence
  source: /note="Description of Artificial Sequence: Synthetic peptide"
PNFHRAE

SEQ ID NO: 7670 - protein, 7 aa, Artificial Sequence
  source: /note="Description of Artificial Sequence: Synthetic peptide"
PNGPYNA

SEQ ID NO: 7671 - protein, 7 aa, Artificial Sequence
  source: /note="Description of Artificial Sequence: Synthetic peptide"
PNGSAKS

SEQ ID NO: 7672 - protein, 7 aa, Artificial Sequence
  source: /note="Description of Artificial Sequence: Synthetic peptide"
PNHDVPP

SEQ ID NO: 7673 - protein, 7 aa, Artificial Sequence
  source: /note="Description of Artificial Sequence: Synthetic peptide"
PNHKGFG

SEQ ID NO: 7674 - protein, 7 aa, Artificial Sequence
  source: /note="Description of Artificial Sequence: Synthetic peptide"
PNHNSDK

SEQ ID NO: 7675 - protein, 7 aa, Artificial Sequence
  source: /note="Description of Artificial Sequence: Synthetic peptide"
PNHSQLL

SEQ ID NO: 7676 - protein, 7 aa, Artificial Sequence
  source: /note="Description of Artificial Sequence: Synthetic peptide"
PNIKNPS

SEQ ID NO: 7677 - protein, 7 aa, Artificial Sequence
  source: /note="Description of Artificial Sequence: Synthetic peptide"
PNIPMRG

SEQ ID NO: 7678 - protein, 7 aa, Artificial Sequence
  source: /note="Description of Artificial Sequence: Synthetic peptide"
PNITSTL

SEQ ID NO: 7679 - protein, 7 aa, Artificial Sequence
  source: /note="Description of Artificial Sequence: Synthetic peptide"
PNLILGP

SEQ ID NO: 7680 - protein, 7 aa, Artificial Sequence
  source: /note="Description of Artificial Sequence: Synthetic peptide"
PNLQRSP

SEQ ID NO: 7681 - protein, 7 aa, Artificial Sequence
  source: /note="Description of Artificial Sequence: Synthetic peptide"
PNLSDES

SEQ ID NO: 7682 - protein, 7 aa, Artificial Sequence
  source: /note="Description of Artificial Sequence: Synthetic peptide"
PNLTMAS

SEQ ID NO: 7683 - protein, 7 aa, Artificial Sequence
  source: /note="Description of Artificial Sequence: Synthetic peptide"
PNLVTAA

SEQ ID NO: 7684 - protein, 7 aa, Artificial Sequence
  source: /note="Description of Artificial Sequence: Synthetic peptide"
PNNNVPS

SEQ ID NO: 7685 - protein, 7 aa, Artificial Sequence
  source: /note="Description of Artificial Sequence: Synthetic peptide"
PNNRDST

SEQ ID NO: 7686 - protein, 7 aa, Artificial Sequence
  source: /note="Description of Artificial Sequence: Synthetic peptide"
PNNVISE

SEQ ID NO: 7687 - protein, 7 aa, Artificial Sequence
  source: /note="Description of Artificial Sequence: Synthetic peptide"
PNNVPLA

SEQ ID NO: 7688 - protein, 7 aa, Artificial Sequence
  source: /note="Description of Artificial Sequence: Synthetic peptide"
PNPAAAA

SEQ ID NO: 7689 - protein, 7 aa, Artificial Sequence
  source: /note="Description of Artificial Sequence: Synthetic peptide"
PNPARLT

SEQ ID NO: 7690 - protein, 7 aa, Artificial Sequence
  source: /note="Description of Artificial Sequence: Synthetic peptide"
PNPIFSS

SEQ ID NO: 7691 - protein, 7 aa, Artificial Sequence
  source: /note="Description of Artificial Sequence: Synthetic peptide"
PNPTWSS

SEQ ID NO: 7692 - protein, 7 aa, Artificial Sequence
  source: /note="Description of Artificial Sequence: Synthetic peptide"
PNPVTRG

SEQ ID NO: 7693 - protein, 7 aa, Artificial Sequence
  source: /note="Description of Artificial Sequence: Synthetic peptide"
PNQDTLD

SEQ ID NO: 7694 - protein, 7 aa, Artificial Sequence
  source: /note="Description of Artificial Sequence: Synthetic peptide"
PNQSVKP

SEQ ID NO: 7695 - protein, 7 aa, Artificial Sequence
  source: /note="Description of Artificial Sequence: Synthetic peptide"
PNRGHPS

SEQ ID NO: 7696 - protein, 7 aa, Artificial Sequence
  source: /note="Description of Artificial Sequence: Synthetic peptide"
PNRIAPI

SEQ ID NO: 7697 - protein, 7 aa, Artificial Sequence
  source: /note="Description of Artificial Sequence: Synthetic peptide"
PNSGVVT

SEQ ID NO: 7698 - protein, 7 aa, Artificial Sequence
  source: /note="Description of Artificial Sequence: Synthetic peptide"
PNSLNAA

SEQ ID NO: 7699 - protein, 7 aa, Artificial Sequence
  source: /note="Description of Artificial Sequence: Synthetic peptide"
PNSRTPY

SEQ ID NO: 7700 - protein, 7 aa, Artificial Sequence
  source: /note="Description of Artificial Sequence: Synthetic peptide"
PNSSPRL

SEQ ID NO: 7701 - protein, 7 aa, Artificial Sequence
  source: /note="Description of Artificial Sequence: Synthetic peptide"
PNSTRVV

SEQ ID NO: 7702 - protein, 7 aa, Artificial Sequence
  source: /note="Description of Artificial Sequence: Synthetic peptide"
PNTMTRL

SEQ ID NO: 7703 - protein, 7 aa, Artificial Sequence
  source: /note="Description of Artificial Sequence: Synthetic peptide"
PNVHPNI

SEQ ID NO: 7704 - protein, 7 aa, Artificial Sequence
  source: /note="Description of Artificial Sequence: Synthetic peptide"
PNVNVST

SEQ ID NO: 7705 - protein, 7 aa, Artificial Sequence
  source: /note="Description of Artificial Sequence: Synthetic peptide"
PNVVDMS

SEQ ID NO: 7706 - protein, 7 aa, Artificial Sequence
  source: /note="Description of Artificial Sequence: Synthetic peptide"
PPADLRT

SEQ ID NO: 7707 - protein, 7 aa, Artificial Sequence
  source: /note="Description of Artificial Sequence: Synthetic peptide"
PPALSPV

SEQ ID NO: 7708 - protein, 7 aa, Artificial Sequence
  source: /note="Description of Artificial Sequence: Synthetic peptide"
PPANSSS

SEQ ID NO: 7709 - protein, 7 aa, Artificial Sequence
  source: /note="Description of Artificial Sequence: Synthetic peptide"
PPDARSS

SEQ ID NO: 7710 - protein, 7 aa, Artificial Sequence
  source: /note="Description of Artificial Sequence: Synthetic peptide"
PPDGASR

SEQ ID NO: 7711 - protein, 7 aa, Artificial Sequence
  source: /note="Description of Artificial Sequence: Synthetic peptide"
PPDKMHS

SEQ ID NO: 7712 - protein, 7 aa, Artificial Sequence
  source: /note="Description of Artificial Sequence: Synthetic peptide"
PPDNLHK

SEQ ID NO: 7713 - protein, 7 aa, Artificial Sequence
  source: /note="Description of Artificial Sequence: Synthetic peptide"
PPEMILG

SEQ ID NO: 7714 - protein, 7 aa, Artificial Sequence
  source: /note="Description of Artificial Sequence: Synthetic peptide"
PPFNKSD

SEQ ID NO: 7715 - protein, 7 aa, Artificial Sequence
  source: /note="Description of Artificial Sequence: Synthetic peptide"
PPFPERL

SEQ ID NO: 7716 - protein, 7 aa, Artificial Sequence
  source: /note="Description of Artificial Sequence: Synthetic peptide"
PPGHDAS

SEQ ID NO: 7717 - protein, 7 aa, Artificial Sequence
  source: /note="Description of Artificial Sequence: Synthetic peptide"
PPGITTS

SEQ ID NO: 7718 - protein, 7 aa, Artificial Sequence
  source: /note="Description of Artificial Sequence: Synthetic peptide"
PPGQSLT

SEQ ID NO: 7719 - protein, 7 aa, Artificial Sequence
  source: /note="Description of Artificial Sequence: Synthetic peptide"
PPGRVVA

SEQ ID NO: 7720 - protein, 7 aa, Artificial Sequence
  source: /note="Description of Artificial Sequence: Synthetic peptide"
PPGSHSS

SEQ ID NO: 7721 - protein, 7 aa, Artificial Sequence
  source: /note="Description of Artificial Sequence: Synthetic peptide"
PPGSSSR

SEQ ID NO: 7722 - protein, 7 aa, Artificial Sequence
  source: /note="Description of Artificial Sequence: Synthetic peptide"
PPGYRAS

SEQ ID NO: 7723 - protein, 7 aa, Artificial Sequence
  source: /note="Description of Artificial Sequence: Synthetic peptide"
PPHQHLL

SEQ ID NO: 7724 - protein, 7 aa, Artificial Sequence
  source: /note="Description of Artificial Sequence: Synthetic peptide"
PPHRTFP

SEQ ID NO: 7725 - protein, 7 aa, Artificial Sequence
  source: /note="Description of Artificial Sequence: Synthetic peptide"
PPHTTFL

SEQ ID NO: 7726 - protein, 7 aa, Artificial Sequence
  source: /note="Description of Artificial Sequence: Synthetic peptide"
PPIDNRT

SEQ ID NO: 7727 - protein, 7 aa, Artificial Sequence
  source: /note="Description of Artificial Sequence: Synthetic peptide"
PPKAMPT

SEQ ID NO: 7728 - protein, 7 aa, Artificial Sequence
  source: /note="Description of Artificial Sequence: Synthetic peptide"
PPLEVKQ

SEQ ID NO: 7729 - protein, 7 aa, Artificial Sequence
  source: /note="Description of Artificial Sequence: Synthetic peptide"
PPLHTGE

SEQ ID NO: 7730 - protein, 7 aa, Artificial Sequence
  source: /note="Description of Artificial Sequence: Synthetic peptide"
PPLKSPP

SEQ ID NO: 7731 - protein, 7 aa, Artificial Sequence
  source: /note="Description of Artificial Sequence: Synthetic peptide"
PPLPSNA

SEQ ID NO: 7732 - protein, 7 aa, Artificial Sequence
  source: /note="Description of Artificial Sequence: Synthetic peptide"
PPMHGTR

SEQ ID NO: 7733 - protein, 7 aa, Artificial Sequence
  source: /note="Description of Artificial Sequence: Synthetic peptide"
PPMSPHV

SEQ ID NO: 7734 - protein, 7 aa, Artificial Sequence
  source: /note="Description of Artificial Sequence: Synthetic peptide"
PPMVTNN

SEQ ID NO: 7735 - protein, 7 aa, Artificial Sequence
  source: /note="Description of Artificial Sequence: Synthetic peptide"
PPNNHAG

SEQ ID NO: 7736 - protein, 7 aa, Artificial Sequence
  source: /note="Description of Artificial Sequence: Synthetic peptide"
PPNYLNA

SEQ ID NO: 7737 - protein, 7 aa, Artificial Sequence
  source: /note="Description of Artificial Sequence: Synthetic peptide"
PPPAALS

SEQ ID NO: 7738 - protein, 7 aa, Artificial Sequence
  source: /note="Description of Artificial Sequence: Synthetic peptide"
PPPKSQS

SEQ ID NO: 7739 - protein, 7 aa, Artificial Sequence
  source: /note="Description of Artificial Sequence: Synthetic peptide"
PPPNNNL

SEQ ID NO: 7740 - protein, 7 aa, Artificial Sequence
  source: /note="Description of Artificial Sequence: Synthetic peptide"
PPPREVH

SEQ ID NO: 7741 - protein, 7 aa, Artificial Sequence
  source: /note="Description of Artificial Sequence: Synthetic peptide"
PPPSCMV

SEQ ID NO: 7742 - protein, 7 aa, Artificial Sequence
  source: /note="Description of Artificial Sequence: Synthetic peptide"
PPPSRMG

SEQ ID NO: 7743 - protein, 7 aa, Artificial Sequence
  source: /note="Description of Artificial Sequence: Synthetic peptide"
PPQEMRY

SEQ ID NO: 7744 - protein, 7 aa, Artificial Sequence
  source: /note="Description of Artificial Sequence: Synthetic peptide"
PPQSAAV

SEQ ID NO: 7745 - protein, 7 aa, Artificial Sequence
  source: /note="Description of Artificial Sequence: Synthetic peptide"
PPQSNRN

SEQ ID NO: 7746 - protein, 7 aa, Artificial Sequence
  source: /note="Description of Artificial Sequence: Synthetic peptide"
PPRISDA

SEQ ID NO: 7747 - protein, 7 aa, Artificial Sequence
  source: /note="Description of Artificial Sequence: Synthetic peptide"
PPRLPSC

SEQ ID NO: 7748 - protein, 7 aa, Artificial Sequence
  source: /note="Description of Artificial Sequence: Synthetic peptide"
PPRLVST

SEQ ID NO: 7749 - protein, 7 aa, Artificial Sequence
  source: /note="Description of Artificial Sequence: Synthetic peptide"
PPRPNGI

SEQ ID NO: 7750 - protein, 7 aa, Artificial Sequence
  source: /note="Description of Artificial Sequence: Synthetic peptide"
PPRRPME

SEQ ID NO: 7751 - protein, 7 aa, Artificial Sequence
  source: /note="Description of Artificial Sequence: Synthetic peptide"
PPRSNVE

SEQ ID NO: 7752 - protein, 7 aa, Artificial Sequence
  source: /note="Description of Artificial Sequence: Synthetic peptide"
PPRTPSS

SEQ ID NO: 7753 - protein, 7 aa, Artificial Sequence
  source: /note="Description of Artificial Sequence: Synthetic peptide"
PPRVSAV

SEQ ID NO: 7754 - protein, 7 aa, Artificial Sequence
  source: /note="Description of Artificial Sequence: Synthetic peptide"
PPSPSVT

SEQ ID NO: 7755 - protein, 7 aa, Artificial Sequence
  source: /note="Description of Artificial Sequence: Synthetic peptide"
PPSPTYM

SEQ ID NO: 7756 - protein, 7 aa, Artificial Sequence
  source: /note="Description of Artificial Sequence: Synthetic peptide"
PPSTEIS

SEQ ID NO: 7757 - protein, 7 aa, Artificial Sequence
  source: /note="Description of Artificial Sequence: Synthetic peptide"
PPSTKLV

SEQ ID NO: 7758 - protein, 7 aa, Artificial Sequence
  source: /note="Description of Artificial Sequence: Synthetic peptide"
PPSTNPK

SEQ ID NO: 7759 - protein, 7 aa, Artificial Sequence
  source: /note="Description of Artificial Sequence: Synthetic peptide"
PPSVPRE

SEQ ID NO: 7760 - protein, 7 aa, Artificial Sequence
  source: /note="Description of Artificial Sequence: Synthetic peptide"
PPTEPRA

SEQ ID NO: 7761 - protein, 7 aa, Artificial Sequence
  source: /note="Description of Artificial Sequence: Synthetic peptide"
PPTGASF

SEQ ID NO: 7762 - protein, 7 aa, Artificial Sequence
  source: /note="Description of Artificial Sequence: Synthetic peptide"
PPTITSS

SEQ ID NO: 7763 - protein, 7 aa, Artificial Sequence
  source: /note="Description of Artificial Sequence: Synthetic peptide"
PPTKVDM

SEQ ID NO: 7764 - protein, 7 aa, Artificial Sequence
  source: /note="Description of Artificial Sequence: Synthetic peptide"
PPTLQSD

SEQ ID NO: 7765 - protein, 7 aa, Artificial Sequence
  source: /note="Description of Artificial Sequence: Synthetic peptide"
PPTNPTV

SEQ ID NO: 7766 - protein, 7 aa, Artificial Sequence
  source: /note="Description of Artificial Sequence: Synthetic peptide"
PPTPAAH

SEQ ID NO: 7767 - protein, 7 aa, Artificial Sequence
  source: /note="Description of Artificial Sequence: Synthetic peptide"
PPTPVSW

SEQ ID NO: 7768 - protein, 7 aa, Artificial Sequence
  source: /note="Description of Artificial Sequence: Synthetic peptide"
PPTRESP

SEQ ID NO: 7769 - protein, 7 aa, Artificial Sequence
  source: /note="Description of Artificial Sequence: Synthetic peptide"
PPTTNLN

SEQ ID NO: 7770 - protein, 7 aa, Artificial Sequence
  source: /note="Description of Artificial Sequence: Synthetic peptide"
PPVGTVL

SEQ ID NO: 7771 - protein, 7 aa, Artificial Sequence
  source: /note="Description of Artificial Sequence: Synthetic peptide"
PPYGAVT

SEQ ID NO: 7772 - protein, 7 aa, Artificial Sequence
  source: /note="Description of Artificial Sequence: Synthetic peptide"
PPYTVSP

SEQ ID NO: 7773 - protein, 7 aa, Artificial Sequence
  source: /note="Description of Artificial Sequence: Synthetic peptide"
PQARQPF

SEQ ID NO: 7774 - protein, 7 aa, Artificial Sequence
  source: /note="Description of Artificial Sequence: Synthetic peptide"
PQEPGFD

SEQ ID NO: 7775 - protein, 7 aa, Artificial Sequence
  source: /note="Description of Artificial Sequence: Synthetic peptide"
PQERARS

SEQ ID NO: 7776 - protein, 7 aa, Artificial Sequence
  source: /note="Description of Artificial Sequence: Synthetic peptide"
PQHPSRN

SEQ ID NO: 7777 - protein, 7 aa, Artificial Sequence
  source: /note="Description of Artificial Sequence: Synthetic peptide"
PQIHIMA

SEQ ID NO: 7778 - protein, 7 aa, Artificial Sequence
  source: /note="Description of Artificial Sequence: Synthetic peptide"
PQILPSA

SEQ ID NO: 7779 - protein, 7 aa, Artificial Sequence
  source: /note="Description of Artificial Sequence: Synthetic peptide"
PQLSQNV

SEQ ID NO: 7780 - protein, 7 aa, Artificial Sequence
  source: /note="Description of Artificial Sequence: Synthetic peptide"
PQNASYR

SEQ ID NO: 7781 - protein, 7 aa, Artificial Sequence
  source: /note="Description of Artificial Sequence: Synthetic peptide"
PQNNPPG

SEQ ID NO: 7782 - protein, 7 aa, Artificial Sequence
  source: /note="Description of Artificial Sequence: Synthetic peptide"
PQNRPPV

SEQ ID NO: 7783 - protein, 7 aa, Artificial Sequence
  source: /note="Description of Artificial Sequence: Synthetic peptide"
PQPRNVI

SEQ ID NO: 7784 - protein, 7 aa, Artificial Sequence
  source: /note="Description of Artificial Sequence: Synthetic peptide"
PQPTETP

SEQ ID NO: 7785 - protein, 7 aa, Artificial Sequence
  source: /note="Description of Artificial Sequence: Synthetic peptide"
PQPTYTL

SEQ ID NO: 7786 - protein, 7 aa, Artificial Sequence
  source: /note="Description of Artificial Sequence: Synthetic peptide"
PQRNAGA

SEQ ID NO: 7787 - protein, 7 aa, Artificial Sequence
  source: /note="Description of Artificial Sequence: Synthetic peptide"
PQRQGLL

SEQ ID NO: 7788 - protein, 7 aa, Artificial Sequence
  source: /note="Description of Artificial Sequence: Synthetic peptide"
PQRSAMP

SEQ ID NO: 7789 - protein, 7 aa, Artificial Sequence
  source: /note="Description of Artificial Sequence: Synthetic peptide"
PQRTQQE

SEQ ID NO: 7790 - protein, 7 aa, Artificial Sequence
  source: /note="Description of Artificial Sequence: Synthetic peptide"
PQRVHAA

SEQ ID NO: 7791 - protein, 7 aa, Artificial Sequence
  source: /note="Description of Artificial Sequence: Synthetic peptide"
PQSLHVR

SEQ ID NO: 7792 - protein, 7 aa, Artificial Sequence
  source: /note="Description of Artificial Sequence: Synthetic peptide"
PQSPNHS

SEQ ID NO: 7793 - protein, 7 aa, Artificial Sequence
  source: /note="Description of Artificial Sequence: Synthetic peptide"
PQSRDTY

SEQ ID NO: 7794 - protein, 7 aa, Artificial Sequence
  source: /note="Description of Artificial Sequence: Synthetic peptide"
PQSRNTN

SEQ ID NO: 7795 - protein, 7 aa, Artificial Sequence
  source: /note="Description of Artificial Sequence: Synthetic peptide"
PQTLTSV

SEQ ID NO: 7796 - protein, 7 aa, Artificial Sequence
  source: /note="Description of Artificial Sequence: Synthetic peptide"
PQTRSPS

SEQ ID NO: 7797 - protein, 7 aa, Artificial Sequence
  source: /note="Description of Artificial Sequence: Synthetic peptide"
PQTVTKV

SEQ ID NO: 7798 - protein, 7 aa, Artificial Sequence
  source: /note="Description of Artificial Sequence: Synthetic peptide"
PQVRASQ

SEQ ID NO: 7799 - protein, 7 aa, Artificial Sequence
  source: /note="Description of Artificial Sequence: Synthetic peptide"
PQVRQGP

SEQ ID NO: 7800 - protein, 7 aa, Artificial Sequence
  source: /note="Description of Artificial Sequence: Synthetic peptide"
PQVTTSA

SEQ ID NO: 7801 - protein, 7 aa, Artificial Sequence
  source: /note="Description of Artificial Sequence: Synthetic peptide"
PRANSGM

SEQ ID NO: 7802 - protein, 7 aa, Artificial Sequence
  source: /note="Description of Artificial Sequence: Synthetic peptide"
PRANTFS

SEQ ID NO: 7803 - protein, 7 aa, Artificial Sequence
  source: /note="Description of Artificial Sequence: Synthetic peptide"
PRAPAVS

SEQ ID NO: 7804 - protein, 7 aa, Artificial Sequence
  source: /note="Description of Artificial Sequence: Synthetic peptide"
PRASGPY

SEQ ID NO: 7805 - protein, 7 aa, Artificial Sequence
  source: /note="Description of Artificial Sequence: Synthetic peptide"
PRATTYS

SEQ ID NO: 7806 - protein, 7 aa, Artificial Sequence
  source: /note="Description of Artificial Sequence: Synthetic peptide"
PRDATRL

SEQ ID NO: 7807 - protein, 7 aa, Artificial Sequence
  source: /note="Description of Artificial Sequence: Synthetic peptide"
PRDKNPA

SEQ ID NO: 7808 - protein, 7 aa, Artificial Sequence
  source: /note="Description of Artificial Sequence: Synthetic peptide"
PRDRLVI

SEQ ID NO: 7809 - protein, 7 aa, Artificial Sequence
  source: /note="Description of Artificial Sequence: Synthetic peptide"
PRDYQTS

SEQ ID NO: 7810 - protein, 7 aa, Artificial Sequence
  source: /note="Description of Artificial Sequence: Synthetic peptide"
PREKAAT

SEQ ID NO: 7811 - protein, 7 aa, Artificial Sequence
  source: /note="Description of Artificial Sequence: Synthetic peptide"
PREPYAE

SEQ ID NO: 7812 - protein, 7 aa, Artificial Sequence
  source: /note="Description of Artificial Sequence: Synthetic peptide"
PRGEGTN

SEQ ID NO: 7813 - protein, 7 aa, Artificial Sequence
  source: /note="Description of Artificial Sequence: Synthetic peptide"
PRGFETA

SEQ ID NO: 7814 - protein, 7 aa, Artificial Sequence
  source: /note="Description of Artificial Sequence: Synthetic peptide"
PRGLSSA

SEQ ID NO: 7815 - protein, 7 aa, Artificial Sequence
  source: /note="Description of Artificial Sequence: Synthetic peptide"
PRGQIAS

SEQ ID NO: 7816 - protein, 7 aa, Artificial Sequence
  source: /note="Description of Artificial Sequence: Synthetic peptide"
PRGSGSS

SEQ ID NO: 7817 - protein, 7 aa, Artificial Sequence
  source: /note="Description of Artificial Sequence: Synthetic peptide"
PRGSSDY

SEQ ID NO: 7818 - protein, 7 aa, Artificial Sequence
  source: /note="Description of Artificial Sequence: Synthetic peptide"
PRHTVYA

SEQ ID NO: 7819 - protein, 7 aa, Artificial Sequence
  source: /note="Description of Artificial Sequence: Synthetic peptide"
PRIEARN

SEQ ID NO: 7820 - protein, 7 aa, Artificial Sequence
  source: /note="Description of Artificial Sequence: Synthetic peptide"
PRIINTI

SEQ ID NO: 7821 - protein, 7 aa, Artificial Sequence
  source: /note="Description of Artificial Sequence: Synthetic peptide"
PRIPQTH

SEQ ID NO: 7822 - protein, 7 aa, Artificial Sequence
  source: /note="Description of Artificial Sequence: Synthetic peptide"
PRKLPGD

SEQ ID NO: 7823 - protein, 7 aa, Artificial Sequence
  source: /note="Description of Artificial Sequence: Synthetic peptide"
PRKVGLS

SEQ ID NO: 7824 - protein, 7 aa, Artificial Sequence
  source: /note="Description of Artificial Sequence: Synthetic peptide"
PRLAGGI

SEQ ID NO: 7825 - protein, 7 aa, Artificial Sequence
  source: /note="Description of Artificial Sequence: Synthetic peptide"
PRLGGVV

SEQ ID NO: 7826 - protein, 7 aa, Artificial Sequence
  source: /note="Description of Artificial Sequence: Synthetic peptide"
PRLGLDN

SEQ ID NO: 7827 - protein, 7 aa, Artificial Sequence
  source: /note="Description of Artificial Sequence: Synthetic peptide"
PRLNEMP

SEQ ID NO: 7828 - protein, 7 aa, Artificial Sequence
  source: /note="Description of Artificial Sequence: Synthetic peptide"
PRLTASI

SEQ ID NO: 7829 - protein, 7 aa, Artificial Sequence
  source: /note="Description of Artificial Sequence: Synthetic peptide"
PRMSASV

SEQ ID NO: 7830 - protein, 7 aa, Artificial Sequence
  source: /note="Description of Artificial Sequence: Synthetic peptide"
PRNASTP

SEQ ID NO: 7831 - protein, 7 aa, Artificial Sequence
  source: /note="Description of Artificial Sequence: Synthetic peptide"
PRNPEFG

SEQ ID NO: 7832 - protein, 7 aa, Artificial Sequence
  source: /note="Description of Artificial Sequence: Synthetic peptide"
PRNQYAA

SEQ ID NO: 7833 - protein, 7 aa, Artificial Sequence
  source: /note="Description of Artificial Sequence: Synthetic peptide"
PRNRLSD

SEQ ID NO: 7834 - protein, 7 aa, Artificial Sequence
  source: /note="Description of Artificial Sequence: Synthetic peptide"
PRPAPVH

SEQ ID NO: 7835 - protein, 7 aa, Artificial Sequence
  source: /note="Description of Artificial Sequence: Synthetic peptide"
PRPAVPA

SEQ ID NO: 7836 - protein, 7 aa, Artificial Sequence
  source: /note="Description of Artificial Sequence: Synthetic peptide"
PRPGMDK

SEQ ID NO: 7837 - protein, 7 aa, Artificial Sequence
  source: /note="Description of Artificial Sequence: Synthetic peptide"
PRPQANS

SEQ ID NO: 7838 - protein, 7 aa, Artificial Sequence
  source: /note="Description of Artificial Sequence: Synthetic peptide"
PRPQSLT

SEQ ID NO: 7839 - protein, 7 aa, Artificial Sequence
  source: /note="Description of Artificial Sequence: Synthetic peptide"
PRPSLDL

SEQ ID NO: 7840 - protein, 7 aa, Artificial Sequence
  source: /note="Description of Artificial Sequence: Synthetic peptide"
PRPTHAV

SEQ ID NO: 7841 - protein, 7 aa, Artificial Sequence
  source: /note="Description of Artificial Sequence: Synthetic peptide"
PRQTEGM

SEQ ID NO: 7842 - protein, 7 aa, Artificial Sequence
  source: /note="Description of Artificial Sequence: Synthetic peptide"
PRQTTNG

SEQ ID NO: 7843 - protein, 7 aa, Artificial Sequence
  source: /note="Description of Artificial Sequence: Synthetic peptide"
PRRDQET

SEQ ID NO: 7844 - protein, 7 aa, Artificial Sequence
  source: /note="Description of Artificial Sequence: Synthetic peptide"
PRRIEFP

SEQ ID NO: 7845 - protein, 7 aa, Artificial Sequence
  source: /note="Description of Artificial Sequence: Synthetic peptide"
PRSADLE

SEQ ID NO: 7846 - protein, 7 aa, Artificial Sequence
  source: /note="Description of Artificial Sequence: Synthetic peptide"
PRSGTAS

SEQ ID NO: 7847 - protein, 7 aa, Artificial Sequence
  source: /note="Description of Artificial Sequence: Synthetic peptide"
PRSHPTS

SEQ ID NO: 7848 - protein, 7 aa, Artificial Sequence
  source: /note="Description of Artificial Sequence: Synthetic peptide"
PRSIPGL

SEQ ID NO: 7849 - protein, 7 aa, Artificial Sequence
  source: /note="Description of Artificial Sequence: Synthetic peptide"
PRSLPLT

SEQ ID NO: 7850 - protein, 7 aa, Artificial Sequence
  source: /note="Description of Artificial Sequence: Synthetic peptide"
PRSMNQT

SEQ ID NO: 7851 - protein, 7 aa, Artificial Sequence
  source: /note="Description of Artificial Sequence: Synthetic peptide"
PRSNSDT

SEQ ID NO: 7852 - protein, 7 aa, Artificial Sequence
  source: /note="Description of Artificial Sequence: Synthetic peptide"
PRSPNPP

SEQ ID NO: 7853 - protein, 7 aa, Artificial Sequence
  source: /note="Description of Artificial Sequence: Synthetic peptide"
PRSPSDK

SEQ ID NO: 7854 - protein, 7 aa, Artificial Sequence
  source: /note="Description of Artificial Sequence: Synthetic peptide"
PRSSFTE

SEQ ID NO: 7855 - protein, 7 aa, Artificial Sequence
  source: /note="Description of Artificial Sequence: Synthetic peptide"
PRSSSSL

SEQ ID NO: 7856 - protein, 7 aa, Artificial Sequence
  source: /note="Description of Artificial Sequence: Synthetic peptide"
PRTEPFL

SEQ ID NO: 7857 - protein, 7 aa, Artificial Sequence
  source: /note="Description of Artificial Sequence: Synthetic peptide"
PRTHTDA

SEQ ID NO: 7858 - protein, 7 aa, Artificial Sequence
  source: /note="Description of Artificial Sequence: Synthetic peptide"
PRTSGTM

SEQ ID NO: 7859 - protein, 7 aa, Artificial Sequence
  source: /note="Description of Artificial Sequence: Synthetic peptide"
PRTSSTH

SEQ ID NO: 7860 - protein, 7 aa, Artificial Sequence
  source: /note="Description of Artificial Sequence: Synthetic peptide"
PRTTMTE

SEQ ID NO: 7861 - protein, 7 aa, Artificial Sequence
  source: /note="Description of Artificial Sequence: Synthetic peptide"
PRTTYSD

SEQ ID NO: 7862 - protein, 7 aa, Artificial Sequence
  source: /note="Description of Artificial Sequence: Synthetic peptide"
PRVGSPQ

SEQ ID NO: 7863 - protein, 7 aa, Artificial Sequence
  source: /note="Description of Artificial Sequence: Synthetic peptide"
PRVLSSG

SEQ ID NO: 7864 - protein, 7 aa, Artificial Sequence
  source: /note="Description of Artificial Sequence: Synthetic peptide"
PRVPTHD

SEQ ID NO: 7865 - protein, 7 aa, Artificial Sequence
  source: /note="Description of Artificial Sequence: Synthetic peptide"
PRVSIAN

SEQ ID NO: 7866 - protein, 7 aa, Artificial Sequence
  source: /note="Description of Artificial Sequence: Synthetic peptide"
PRVSVAP

SEQ ID NO: 7867 - protein, 7 aa, Artificial Sequence
  source: /note="Description of Artificial Sequence: Synthetic peptide"
PRYDAAG

SEQ ID NO: 7868 - protein, 7 aa, Artificial Sequence
  source: /note="Description of Artificial Sequence: Synthetic peptide"
PSAAHPP

SEQ ID NO: 7869 - protein, 7 aa, Artificial Sequence
  source: /note="Description of Artificial Sequence: Synthetic peptide"
PSANMRS

SEQ ID NO: 7870 - protein, 7 aa, Artificial Sequence
  source: /note="Description of Artificial Sequence: Synthetic peptide"
PSANRLS

SEQ ID NO: 7871 - protein, 7 aa, Artificial Sequence
  source: /note="Description of Artificial Sequence: Synthetic peptide"
PSAQSHS

SEQ ID NO: 7872 - protein, 7 aa, Artificial Sequence
  source: /note="Description of Artificial Sequence: Synthetic peptide"
PSASNSM

SEQ ID NO: 7873 - protein, 7 aa, Artificial Sequence
  source: /note="Description of Artificial Sequence: Synthetic peptide"
PSATGVK

SEQ ID NO: 7874 - protein, 7 aa, Artificial Sequence
  source: /note="Description of Artificial Sequence: Synthetic peptide"
PSCDNNT

SEQ ID NO: 7875 - protein, 7 aa, Artificial Sequence
  source: /note="Description of Artificial Sequence: Synthetic peptide"
PSDDAGG

SEQ ID NO: 7876 - protein, 7 aa, Artificial Sequence
  source: /note="Description of Artificial Sequence: Synthetic peptide"
PSDKNTG

SEQ ID NO: 7877 - protein, 7 aa, Artificial Sequence
  source: /note="Description of Artificial Sequence: Synthetic peptide"
PSDKSFR

SEQ ID NO: 7878 - protein, 7 aa, Artificial Sequence
  source: /note="Description of Artificial Sequence: Synthetic peptide"
PSDMPSS

SEQ ID NO: 7879 - protein, 7 aa, Artificial Sequence
  source: /note="Description of Artificial Sequence: Synthetic peptide"
PSDPSAG

SEQ ID NO: 7880 - protein, 7 aa, Artificial Sequence
  source: /note="Description of Artificial Sequence: Synthetic peptide"
PSDPVTR

SEQ ID NO: 7881 - protein, 7 aa, Artificial Sequence
  source: /note="Description of Artificial Sequence: Synthetic peptide"
PSDRVHT

SEQ ID NO: 7882 - protein, 7 aa, Artificial Sequence
  source: /note="Description of Artificial Sequence: Synthetic peptide"
PSDSAYP

SEQ ID NO: 7883 - protein, 7 aa, Artificial Sequence
  source: /note="Description of Artificial Sequence: Synthetic peptide"
PSDSVHS

SEQ ID NO: 7884 - protein, 7 aa, Artificial Sequence
  source: /note="Description of Artificial Sequence: Synthetic peptide"
PSDTHRS

SEQ ID NO: 7885 - protein, 7 aa, Artificial Sequence
  source: /note="Description of Artificial Sequence: Synthetic peptide"
PSDTPTR

SEQ ID NO: 7886 - protein, 7 aa, Artificial Sequence
  source: /note="Description of Artificial Sequence: Synthetic peptide"
PSELNSR

SEQ ID NO: 7887 - protein, 7 aa, Artificial Sequence
  source: /note="Description of Artificial Sequence: Synthetic peptide"
PSEQPVR

SEQ ID NO: 7888 - protein, 7 aa, Artificial Sequence
  source: /note="Description of Artificial Sequence: Synthetic peptide"
PSESTIV

SEQ ID NO: 7889 - protein, 7 aa, Artificial Sequence
  source: /note="Description of Artificial Sequence: Synthetic peptide"
PSEYTLD

SEQ ID NO: 7890 - protein, 7 aa, Artificial Sequence
  source: /note="Description of Artificial Sequence: Synthetic peptide"
PSFLEGI

SEQ ID NO: 7891 - protein, 7 aa, Artificial Sequence
  source: /note="Description of Artificial Sequence: Synthetic peptide"
PSFNPMT

SEQ ID NO: 7892 - protein, 7 aa, Artificial Sequence
  source: /note="Description of Artificial Sequence: Synthetic peptide"
PSFPSMT

SEQ ID NO: 7893 - protein, 7 aa, Artificial Sequence
  source: /note="Description of Artificial Sequence: Synthetic peptide"
PSGKSPY

SEQ ID NO: 7894 - protein, 7 aa, Artificial Sequence
  source: /note="Description of Artificial Sequence: Synthetic peptide"
PSGMKPT

SEQ ID NO: 7895 - protein, 7 aa, Artificial Sequence
  source: /note="Description of Artificial Sequence: Synthetic peptide"
PSGMPSS

SEQ ID NO: 7896 - protein, 7 aa, Artificial Sequence
  source: /note="Description of Artificial Sequence: Synthetic peptide"
PSGQVTG

SEQ ID NO: 7897 - protein, 7 aa, Artificial Sequence
  source: /note="Description of Artificial Sequence: Synthetic peptide"
PSGSDNL

SEQ ID NO: 7898 - protein, 7 aa, Artificial Sequence
  source: /note="Description of Artificial Sequence: Synthetic peptide"
PSGTLTM

SEQ ID NO: 7899 - protein, 7 aa, Artificial Sequence
  source: /note="Description of Artificial Sequence: Synthetic peptide"
PSHDSFL

SEQ ID NO: 7900 - protein, 7 aa, Artificial Sequence
  source: /note="Description of Artificial Sequence: Synthetic peptide"
PSHGLDK

SEQ ID NO: 7901 - protein, 7 aa, Artificial Sequence
  source: /note="Description of Artificial Sequence: Synthetic peptide"
PSHKAVF

SEQ ID NO: 7902 - protein, 7 aa, Artificial Sequence
  source: /note="Description of Artificial Sequence: Synthetic peptide"
PSHPHER

SEQ ID NO: 7903 - protein, 7 aa, Artificial Sequence
  source: /note="Description of Artificial Sequence: Synthetic peptide"
PSHRTSL

SEQ ID NO: 7904 - protein, 7 aa, Artificial Sequence
  source: /note="Description of Artificial Sequence: Synthetic peptide"
PSHSGTT

SEQ ID NO: 7905 - protein, 7 aa, Artificial Sequence
  source: /note="Description of Artificial Sequence: Synthetic peptide"
PSHTRPV

SEQ ID NO: 7906 - protein, 7 aa, Artificial Sequence
  source: /note="Description of Artificial Sequence: Synthetic peptide"
PSIAQPP

SEQ ID NO: 7907 - protein, 7 aa, Artificial Sequence
  source: /note="Description of Artificial Sequence: Synthetic peptide"
PSIKLSE

SEQ ID NO: 7908 - protein, 7 aa, Artificial Sequence
  source: /note="Description of Artificial Sequence: Synthetic peptide"
PSISKPM

SEQ ID NO: 7909 - protein, 7 aa, Artificial Sequence
  source: /note="Description of Artificial Sequence: Synthetic peptide"
PSKASTE

SEQ ID NO: 7910 - protein, 7 aa, Artificial Sequence
  source: /note="Description of Artificial Sequence: Synthetic peptide"
PSKSPST

SEQ ID NO: 7911 - protein, 7 aa, Artificial Sequence
  source: /note="Description of Artificial Sequence: Synthetic peptide"
PSKSSAA

SEQ ID NO: 7912 - protein, 7 aa, Artificial Sequence
  source: /note="Description of Artificial Sequence: Synthetic peptide"
PSKVGRE

SEQ ID NO: 7913 - protein, 7 aa, Artificial Sequence
  source: /note="Description of Artificial Sequence: Synthetic peptide"
PSLEGAP

SEQ ID NO: 7914 - protein, 7 aa, Artificial Sequence
  source: /note="Description of Artificial Sequence: Synthetic peptide"
PSLRAAL

SEQ ID NO: 7915 - protein, 7 aa, Artificial Sequence
  source: /note="Description of Artificial Sequence: Synthetic peptide"
PSLSNKV

SEQ ID NO: 7916 - protein, 7 aa, Artificial Sequence
  source: /note="Description of Artificial Sequence: Synthetic peptide"
PSLSSSP

SEQ ID NO: 7917 - protein, 7 aa, Artificial Sequence
  source: /note="Description of Artificial Sequence: Synthetic peptide"
PSMSPHT

SEQ ID NO: 7918 - protein, 7 aa, Artificial Sequence
  source: /note="Description of Artificial Sequence: Synthetic peptide"
PSMTAQE

SEQ ID NO: 7919 - protein, 7 aa, Artificial Sequence
  source: /note="Description of Artificial Sequence: Synthetic peptide"
PSNAGRF

SEQ ID NO: 7920 - protein, 7 aa, Artificial Sequence
  source: /note="Description of Artificial Sequence: Synthetic peptide"
PSNGKSI

SEQ ID NO: 7921 - protein, 7 aa, Artificial Sequence
  source: /note="Description of Artificial Sequence: Synthetic peptide"
PSNHLKS

SEQ ID NO: 7922 - protein, 7 aa, Artificial Sequence
  source: /note="Description of Artificial Sequence: Synthetic peptide"
PSNNTEG

SEQ ID NO: 7923 - protein, 7 aa, Artificial Sequence
  source: /note="Description of Artificial Sequence: Synthetic peptide"
PSNPSFR

SEQ ID NO: 7924 - protein, 7 aa, Artificial Sequence
  source: /note="Description of Artificial Sequence: Synthetic peptide"
PSNQLVR

SEQ ID NO: 7925 - protein, 7 aa, Artificial Sequence
  source: /note="Description of Artificial Sequence: Synthetic peptide"
PSPAVKS

SEQ ID NO: 7926 - protein, 7 aa, Artificial Sequence
  source: /note="Description of Artificial Sequence: Synthetic peptide"
PSPDVRG

SEQ ID NO: 7927 - protein, 7 aa, Artificial Sequence
  source: /note="Description of Artificial Sequence: Synthetic peptide"
PSPKTCP

SEQ ID NO: 7928 - protein, 7 aa, Artificial Sequence
  source: /note="Description of Artificial Sequence: Synthetic peptide"
PSPLRLG

SEQ ID NO: 7929 - protein, 7 aa, Artificial Sequence
  source: /note="Description of Artificial Sequence: Synthetic peptide"
PSPVKGG

SEQ ID NO: 7930 - protein, 7 aa, Artificial Sequence
  source: /note="Description of Artificial Sequence: Synthetic peptide"
PSQDPHL

SEQ ID NO: 7931 - protein, 7 aa, Artificial Sequence
  source: /note="Description of Artificial Sequence: Synthetic peptide"
PSQDRQA

SEQ ID NO: 7932 - protein, 7 aa, Artificial Sequence
  source: /note="Description of Artificial Sequence: Synthetic peptide"
PSQFKEN

SEQ ID NO: 7933 - protein, 7 aa, Artificial Sequence
  source: /note="Description of Artificial Sequence: Synthetic peptide"
PSQGHSM

SEQ ID NO: 7934 - protein, 7 aa, Artificial Sequence
  source: /note="Description of Artificial Sequence: Synthetic peptide"
PSQGPWT

SEQ ID NO: 7935 - protein, 7 aa, Artificial Sequence
  source: /note="Description of Artificial Sequence: Synthetic peptide"
PSQLASN

SEQ ID NO: 7936 - protein, 7 aa, Artificial Sequence
  source: /note="Description of Artificial Sequence: Synthetic peptide"
PSQLVVA

SEQ ID NO: 7937 - protein, 7 aa, Artificial Sequence
  source: /note="Description of Artificial Sequence: Synthetic peptide"
PSQPGAI

SEQ ID NO: 7938 - protein, 7 aa, Artificial Sequence
  source: /note="Description of Artificial Sequence: Synthetic peptide"
PSQREMK

SEQ ID NO: 7939 - protein, 7 aa, Artificial Sequence
  source: /note="Description of Artificial Sequence: Synthetic peptide"
PSQSNLR

SEQ ID NO: 7940 - protein, 7 aa, Artificial Sequence
  source: /note="Description of Artificial Sequence: Synthetic peptide"
PSQSSKL

SEQ ID NO: 7941 - protein, 7 aa, Artificial Sequence
  source: /note="Description of Artificial Sequence: Synthetic peptide"
PSQTATP

SEQ ID NO: 7942 - protein, 7 aa, Artificial Sequence
  source: /note="Description of Artificial Sequence: Synthetic peptide"
PSQTHSP

SEQ ID NO: 7943 - protein, 7 aa, Artificial Sequence
  source: /note="Description of Artificial Sequence: Synthetic peptide"
PSREISL

SEQ ID NO: 7944 - protein, 7 aa, Artificial Sequence
  source: /note="Description of Artificial Sequence: Synthetic peptide"
PSRERSN

SEQ ID NO: 7945 - protein, 7 aa, Artificial Sequence
  source: /note="Description of Artificial Sequence: Synthetic peptide"
PSRFSTP

SEQ ID NO: 7946 - protein, 7 aa, Artificial Sequence
  source: /note="Description of Artificial Sequence: Synthetic peptide"
PSRGDIG

SEQ ID NO: 7947 - protein, 7 aa, Artificial Sequence
  source: /note="Description of Artificial Sequence: Synthetic peptide"
PSRGVLP

SEQ ID NO: 7948 - protein, 7 aa, Artificial Sequence
  source: /note="Description of Artificial Sequence: Synthetic peptide"
PSRLGSA

SEQ ID NO: 7949 - protein, 7 aa, Artificial Sequence
  source: /note="Description of Artificial Sequence: Synthetic peptide"
PSRLTND

SEQ ID NO: 7950 - protein, 7 aa, Artificial Sequence
  source: /note="Description of Artificial Sequence: Synthetic peptide"
PSRLVSE

SEQ ID NO: 7951 - protein, 7 aa, Artificial Sequence
  source: /note="Description of Artificial Sequence: Synthetic peptide"
PSRPMMS

SEQ ID NO: 7952 - protein, 7 aa, Artificial Sequence
  source: /note="Description of Artificial Sequence: Synthetic peptide"
PSRSMSE

SEQ ID NO: 7953 - protein, 7 aa, Artificial Sequence
  source: /note="Description of Artificial Sequence: Synthetic peptide"
PSRTEPP

SEQ ID NO: 7954 - protein, 7 aa, Artificial Sequence
  source: /note="Description of Artificial Sequence: Synthetic peptide"
PSRTHLH

SEQ ID NO: 7955 - protein, 7 aa, Artificial Sequence
  source: /note="Description of Artificial Sequence: Synthetic peptide"
PSRVVEA

SEQ ID NO: 7956 - protein, 7 aa, Artificial Sequence
  source: /note="Description of Artificial Sequence: Synthetic peptide"
PSSESDF

SEQ ID NO: 7957 - protein, 7 aa, Artificial Sequence
  source: /note="Description of Artificial Sequence: Synthetic peptide"
PSSGGLV

SEQ ID NO: 7958 - protein, 7 aa, Artificial Sequence
  source: /note="Description of Artificial Sequence: Synthetic peptide"
PSSGLHL

SEQ ID NO: 7959 - protein, 7 aa, Artificial Sequence
  source: /note="Description of Artificial Sequence: Synthetic peptide"
PSSKGLL

SEQ ID NO: 7960 - protein, 7 aa, Artificial Sequence
  source: /note="Description of Artificial Sequence: Synthetic peptide"
PSSKVGD

SEQ ID NO: 7961 - protein, 7 aa, Artificial Sequence
  source: /note="Description of Artificial Sequence: Synthetic peptide"
PSSLDDG

SEQ ID NO: 7962 - protein, 7 aa, Artificial Sequence
  source: /note="Description of Artificial Sequence: Synthetic peptide"
PSSLNRL

SEQ ID NO: 7963 - protein, 7 aa, Artificial Sequence
  source: /note="Description of Artificial Sequence: Synthetic peptide"
PSSLSAG

SEQ ID NO: 7964 - protein, 7 aa, Artificial Sequence
  source: /note="Description of Artificial Sequence: Synthetic peptide"
PSSMAHP

SEQ ID NO: 7965 - protein, 7 aa, Artificial Sequence
  source: /note="Description of Artificial Sequence: Synthetic peptide"
PSSMIAE

SEQ ID NO: 7966 - protein, 7 aa, Artificial Sequence
  source: /note="Description of Artificial Sequence: Synthetic peptide"
PSSPAVR

SEQ ID NO: 7967 - protein, 7 aa, Artificial Sequence
  source: /note="Description of Artificial Sequence: Synthetic peptide"
PSSPLMT

SEQ ID NO: 7968 - protein, 7 aa, Artificial Sequence
  source: /note="Description of Artificial Sequence: Synthetic peptide"
PSSPPFF

SEQ ID NO: 7969 - protein, 7 aa, Artificial Sequence
  source: /note="Description of Artificial Sequence: Synthetic peptide"
PSSPVFI

SEQ ID NO: 7970 - protein, 7 aa, Artificial Sequence
  source: /note="Description of Artificial Sequence: Synthetic peptide"
PSSRGAL

SEQ ID NO: 7971 - protein, 7 aa, Artificial Sequence
  source: /note="Description of Artificial Sequence: Synthetic peptide"
PSSSINR

SEQ ID NO: 7972 - protein, 7 aa, Artificial Sequence
  source: /note="Description of Artificial Sequence: Synthetic peptide"
PSSSSGN

SEQ ID NO: 7973 - protein, 7 aa, Artificial Sequence
  source: /note="Description of Artificial Sequence: Synthetic peptide"
PSSSYPL

SEQ ID NO: 7974 - protein, 7 aa, Artificial Sequence
  source: /note="Description of Artificial Sequence: Synthetic peptide"
PSSTPGQ

SEQ ID NO: 7975 - protein, 7 aa, Artificial Sequence
  source: /note="Description of Artificial Sequence: Synthetic peptide"
PSTAGSK

SEQ ID NO: 7976 - protein, 7 aa, Artificial Sequence
  source: /note="Description of Artificial Sequence: Synthetic peptide"
PSTAHST

SEQ ID NO: 7977 - protein, 7 aa, Artificial Sequence
  source: /note="Description of Artificial Sequence: Synthetic peptide"
PSTAIKT

SEQ ID NO: 7978 - protein, 7 aa, Artificial Sequence
  source: /note="Description of Artificial Sequence: Synthetic peptide"
PSTARTS

SEQ ID NO: 7979 - protein, 7 aa, Artificial Sequence
  source: /note="Description of Artificial Sequence: Synthetic peptide"
PSTGPFH

SEQ ID NO: 7980 - protein, 7 aa, Artificial Sequence
  source: /note="Description of Artificial Sequence: Synthetic peptide"
PSTGRPL

SEQ ID NO: 7981 - protein, 7 aa, Artificial Sequence
  source: /note="Description of Artificial Sequence: Synthetic peptide"
PSTKEFI

SEQ ID NO: 7982 - protein, 7 aa, Artificial Sequence
  source: /note="Description of Artificial Sequence: Synthetic peptide"
PSTNAYA

SEQ ID NO: 7983 - protein, 7 aa, Artificial Sequence
  source: /note="Description of Artificial Sequence: Synthetic peptide"
PSTNGSH

SEQ ID NO: 7984 - protein, 7 aa, Artificial Sequence
  source: /note="Description of Artificial Sequence: Synthetic peptide"
PSTPAAN

SEQ ID NO: 7985 - protein, 7 aa, Artificial Sequence
  source: /note="Description of Artificial Sequence: Synthetic peptide"
PSTPAAS

SEQ ID NO: 7986 - protein, 7 aa, Artificial Sequence
  source: /note="Description of Artificial Sequence: Synthetic peptide"
PSTSLSE

SEQ ID NO: 7987 - protein, 7 aa, Artificial Sequence
  source: /note="Description of Artificial Sequence: Synthetic peptide"
PSVDSWS

SEQ ID NO: 7988 - protein, 7 aa, Artificial Sequence
  source: /note="Description of Artificial Sequence: Synthetic peptide"
PSVDSYL

SEQ ID NO: 7989 - protein, 7 aa, Artificial Sequence
  source: /note="Description of Artificial Sequence: Synthetic peptide"
PSVEHVP

SEQ ID NO: 7990 - protein, 7 aa, Artificial Sequence
  source: /note="Description of Artificial Sequence: Synthetic peptide"
PSVESWS

SEQ ID NO: 7991 - protein, 7 aa, Artificial Sequence
  source: /note="Description of Artificial Sequence: Synthetic peptide"
PSVLHPS

SEQ ID NO: 7992 - protein, 7 aa, Artificial Sequence
  source: /note="Description of Artificial Sequence: Synthetic peptide"
PSVPLMT

SEQ ID NO: 7993 - protein, 7 aa, Artificial Sequence
  source: /note="Description of Artificial Sequence: Synthetic peptide"
PSVPRGP

SEQ ID NO: 7994 - protein, 7 aa, Artificial Sequence
  source: /note="Description of Artificial Sequence: Synthetic peptide"
PSVQHFP

SEQ ID NO: 7995 - protein, 7 aa, Artificial Sequence
  source: /note="Description of Artificial Sequence: Synthetic peptide"
PSVRDPA

SEQ ID NO: 7996 - protein, 7 aa, Artificial Sequence
  source: /note="Description of Artificial Sequence: Synthetic peptide"
PSVTGTM

SEQ ID NO: 7997 - protein, 7 aa, Artificial Sequence
  source: /note="Description of Artificial Sequence: Synthetic peptide"
PSYDKLK

SEQ ID NO: 7998 - protein, 7 aa, Artificial Sequence
  source: /note="Description of Artificial Sequence: Synthetic peptide"
PSYPGLD

SEQ ID NO: 7999 - protein, 7 aa, Artificial Sequence
  source: /note="Description of Artificial Sequence: Synthetic peptide"
PSYSHME

SEQ ID NO: 8000 - protein, 7 aa, Artificial Sequence
  source: /note="Description of Artificial Sequence: Synthetic peptide"
PSYSVTE

SEQ ID NO: 8001 - protein, 7 aa, Artificial Sequence
  source: /note="Description of Artificial Sequence: Synthetic peptide"
PTAARPP

SEQ ID NO: 8002 - protein, 7 aa, Artificial Sequence
  source: /note="Description of Artificial Sequence: Synthetic peptide"
PTALASF

SEQ ID NO: 8003 - protein, 7 aa, Artificial Sequence
  source: /note="Description of Artificial Sequence: Synthetic peptide"
PTALGKS

SEQ ID NO: 8004 - protein, 7 aa, Artificial Sequence
  source: /note="Description of Artificial Sequence: Synthetic peptide"
PTAPTIP

SEQ ID NO: 8005 - protein, 7 aa, Artificial Sequence
  source: /note="Description of Artificial Sequence: Synthetic peptide"
PTASPNT

SEQ ID NO: 8006 - protein, 7 aa, Artificial Sequence
  source: /note="Description of Artificial Sequence: Synthetic peptide"
PTDNTSP

SEQ ID NO: 8007 - protein, 7 aa, Artificial Sequence
  source: /note="Description of Artificial Sequence: Synthetic peptide"
PTDPRAP

SEQ ID NO: 8008 - protein, 7 aa, Artificial Sequence
  source: /note="Description of Artificial Sequence: Synthetic peptide"
PTDRHSI

SEQ ID NO: 8009 - protein, 7 aa, Artificial Sequence
  source: /note="Description of Artificial Sequence: Synthetic peptide"
PTDRREM

SEQ ID NO: 8010 - protein, 7 aa, Artificial Sequence
  source: /note="Description of Artificial Sequence: Synthetic peptide"
PTDTVPP

SEQ ID NO: 8011 - protein, 7 aa, Artificial Sequence
  source: /note="Description of Artificial Sequence: Synthetic peptide"
PTDVNRG

SEQ ID NO: 8012 - protein, 7 aa, Artificial Sequence
  source: /note="Description of Artificial Sequence: Synthetic peptide"
PTDYARG

SEQ ID NO: 8013 - protein, 7 aa, Artificial Sequence
  source: /note="Description of Artificial Sequence: Synthetic peptide"
PTEAAGV

SEQ ID NO: 8014 - protein, 7 aa, Artificial Sequence
  source: /note="Description of Artificial Sequence: Synthetic peptide"
PTETNGY

SEQ ID NO: 8015 - protein, 7 aa, Artificial Sequence
  source: /note="Description of Artificial Sequence: Synthetic peptide"
PTFLTTN

SEQ ID NO: 8016 - protein, 7 aa, Artificial Sequence
  source: /note="Description of Artificial Sequence: Synthetic peptide"
PTFTRST

SEQ ID NO: 8017 - protein, 7 aa, Artificial Sequence
  source: /note="Description of Artificial Sequence: Synthetic peptide"
PTGATSS

SEQ ID NO: 8018 - protein, 7 aa, Artificial Sequence
  source: /note="Description of Artificial Sequence: Synthetic peptide"
PTGGAHT

SEQ ID NO: 8019 - protein, 7 aa, Artificial Sequence
  source: /note="Description of Artificial Sequence: Synthetic peptide"
PTGPGSP

SEQ ID NO: 8020 - protein, 7 aa, Artificial Sequence
  source: /note="Description of Artificial Sequence: Synthetic peptide"
PTGPHDL

SEQ ID NO: 8021 - protein, 7 aa, Artificial Sequence
  source: /note="Description of Artificial Sequence: Synthetic peptide"
PTGQPRP

SEQ ID NO: 8022 - protein, 7 aa, Artificial Sequence
  source: /note="Description of Artificial Sequence: Synthetic peptide"
PTGRALA

SEQ ID NO: 8023 - protein, 7 aa, Artificial Sequence
  source: /note="Description of Artificial Sequence: Synthetic peptide"
PTGSIQI

SEQ ID NO: 8024 - protein, 7 aa, Artificial Sequence
  source: /note="Description of Artificial Sequence: Synthetic peptide"
PTGTPEI

SEQ ID NO: 8025 - protein, 7 aa, Artificial Sequence
  source: /note="Description of Artificial Sequence: Synthetic peptide"
PTGTSPL

SEQ ID NO: 8026 - protein, 7 aa, Artificial Sequence
  source: /note="Description of Artificial Sequence: Synthetic peptide"
PTGVGSL

SEQ ID NO: 8027 - protein, 7 aa, Artificial Sequence
  source: /note="Description of Artificial Sequence: Synthetic peptide"
PTHPNSF

SEQ ID NO: 8028 - protein, 7 aa, Artificial Sequence
  source: /note="Description of Artificial Sequence: Synthetic peptide"
PTHSGIT

SEQ ID NO: 8029 - protein, 7 aa, Artificial Sequence
  source: /note="Description of Artificial Sequence: Synthetic peptide"
PTHSLIS

SEQ ID NO: 8030 - protein, 7 aa, Artificial Sequence
  source: /note="Description of Artificial Sequence: Synthetic peptide"
PTHSTNK

SEQ ID NO: 8031 - protein, 7 aa, Artificial Sequence
  source: /note="Description of Artificial Sequence: Synthetic peptide"
PTIPKKD

SEQ ID NO: 8032 - protein, 7 aa, Artificial Sequence
  source: /note="Description of Artificial Sequence: Synthetic peptide"
PTIPLDR

SEQ ID NO: 8033 - protein, 7 aa, Artificial Sequence
  source: /note="Description of Artificial Sequence: Synthetic peptide"
PTKPLGD

SEQ ID NO: 8034 - protein, 7 aa, Artificial Sequence
  source: /note="Description of Artificial Sequence: Synthetic peptide"
PTLDDPK

SEQ ID NO: 8035 - protein, 7 aa, Artificial Sequence
  source: /note="Description of Artificial Sequence: Synthetic peptide"
PTLDGKP

SEQ ID NO: 8036 - protein, 7 aa, Artificial Sequence
  source: /note="Description of Artificial Sequence: Synthetic peptide"
PTLKSDM

SEQ ID NO: 8037 - protein, 7 aa, Artificial Sequence
  source: /note="Description of Artificial Sequence: Synthetic peptide"
PTLPSTV

SEQ ID NO: 8038 - protein, 7 aa, Artificial Sequence
  source: /note="Description of Artificial Sequence: Synthetic peptide"
PTLSMAH

SEQ ID NO: 8039 - protein, 7 aa, Artificial Sequence
  source: /note="Description of Artificial Sequence: Synthetic peptide"
PTLSRTH

SEQ ID NO: 8040 - protein, 7 aa, Artificial Sequence
  source: /note="Description of Artificial Sequence: Synthetic peptide"
PTLSTLL

SEQ ID NO: 8041 - protein, 7 aa, Artificial Sequence
  source: /note="Description of Artificial Sequence: Synthetic peptide"
PTMHMLS

SEQ ID NO: 8042 - protein, 7 aa, Artificial Sequence
  source: /note="Description of Artificial Sequence: Synthetic peptide"
PTMNRNE

SEQ ID NO: 8043 - protein, 7 aa, Artificial Sequence
  source: /note="Description of Artificial Sequence: Synthetic peptide"
PTMSDSR

SEQ ID NO: 8044 - protein, 7 aa, Artificial Sequence
  source: /note="Description of Artificial Sequence: Synthetic peptide"
PTNALHL

SEQ ID NO: 8045 - protein, 7 aa, Artificial Sequence
  source: /note="Description of Artificial Sequence: Synthetic peptide"
PTNAVDN

SEQ ID NO: 8046 - protein, 7 aa, Artificial Sequence
  source: /note="Description of Artificial Sequence: Synthetic peptide"
PTNLGRA

SEQ ID NO: 8047 - protein, 7 aa, Artificial Sequence
  source: /note="Description of Artificial Sequence: Synthetic peptide"
PTNPRLM

SEQ ID NO: 8048 - protein, 7 aa, Artificial Sequence
  source: /note="Description of Artificial Sequence: Synthetic peptide"
PTNRPSS

SEQ ID NO: 8049 - protein, 7 aa, Artificial Sequence
  source: /note="Description of Artificial Sequence: Synthetic peptide"
PTPAAHG

SEQ ID NO: 8050 - protein, 7 aa, Artificial Sequence
  source: /note="Description of Artificial Sequence: Synthetic peptide"
PTPPTVT

SEQ ID NO: 8051 - protein, 7 aa, Artificial Sequence
  source: /note="Description of Artificial Sequence: Synthetic peptide"
PTPQGSA

SEQ ID NO: 8052 - protein, 7 aa, Artificial Sequence
  source: /note="Description of Artificial Sequence: Synthetic peptide"
PTPRPSP

SEQ ID NO: 8053 - protein, 7 aa, Artificial Sequence
  source: /note="Description of Artificial Sequence: Synthetic peptide"
PTPRSVP

SEQ ID NO: 8054 - protein, 7 aa, Artificial Sequence
  source: /note="Description of Artificial Sequence: Synthetic peptide"
PTQSGVS

SEQ ID NO: 8055 - protein, 7 aa, Artificial Sequence
  source: /note="Description of Artificial Sequence: Synthetic peptide"
PTRAEFY

SEQ ID NO: 8056 - protein, 7 aa, Artificial Sequence
  source: /note="Description of Artificial Sequence: Synthetic peptide"
PTRQPVL

SEQ ID NO: 8057 - protein, 7 aa, Artificial Sequence
  source: /note="Description of Artificial Sequence: Synthetic peptide"
PTRTINA

SEQ ID NO: 8058 - protein, 7 aa, Artificial Sequence
  source: /note="Description of Artificial Sequence: Synthetic peptide"
PTRTPAS

SEQ ID NO: 8059 - protein, 7 aa, Artificial Sequence
  source: /note="Description of Artificial Sequence: Synthetic peptide"
PTSDFKC

SEQ ID NO: 8060 - protein, 7 aa, Artificial Sequence
  source: /note="Description of Artificial Sequence: Synthetic peptide"
PTSEALR

SEQ ID NO: 8061 - protein, 7 aa, Artificial Sequence
  source: /note="Description of Artificial Sequence: Synthetic peptide"
PTSIHRN

SEQ ID NO: 8062 - protein, 7 aa, Artificial Sequence
  source: /note="Description of Artificial Sequence: Synthetic peptide"
PTSIVRS

SEQ ID NO: 8063 - protein, 7 aa, Artificial Sequence
  source: /note="Description of Artificial Sequence: Synthetic peptide"
PTSKGPL

SEQ ID NO: 8064 - protein, 7 aa, Artificial Sequence
  source: /note="Description of Artificial Sequence: Synthetic peptide"
PTSPTDM

SEQ ID NO: 8065 - protein, 7 aa, Artificial Sequence
  source: /note="Description of Artificial Sequence: Synthetic peptide"
PTSPTTC

SEQ ID NO: 8066 - protein, 7 aa, Artificial Sequence
  source: /note="Description of Artificial Sequence: Synthetic peptide"
PTSRPSL

SEQ ID NO: 8067 - protein, 7 aa, Artificial Sequence
  source: /note="Description of Artificial Sequence: Synthetic peptide"
PTSSIGG

SEQ ID NO: 8068 - protein, 7 aa, Artificial Sequence
  source: /note="Description of Artificial Sequence: Synthetic peptide"
PTSTNPL

SEQ ID NO: 8069 - protein, 7 aa, Artificial Sequence
  source: /note="Description of Artificial Sequence: Synthetic peptide"
PTSVGTG

SEQ ID NO: 8070 - protein, 7 aa, Artificial Sequence
  source: /note="Description of Artificial Sequence: Synthetic peptide"
PTSVPKT

SEQ ID NO: 8071 - protein, 7 aa, Artificial Sequence
  source: /note="Description of Artificial Sequence: Synthetic peptide"
PTTHLSD

SEQ ID NO: 8072 - protein, 7 aa, Artificial Sequence
  source: /note="Description of Artificial Sequence: Synthetic peptide"
PTTHSAR

SEQ ID NO: 8073 - protein, 7 aa, Artificial Sequence
  source: /note="Description of Artificial Sequence: Synthetic peptide"
PTTLAVA

SEQ ID NO: 8074 - protein, 7 aa, Artificial Sequence
  source: /note="Description of Artificial Sequence: Synthetic peptide"
PTTNGST

SEQ ID NO: 8075 - protein, 7 aa, Artificial Sequence
  source: /note="Description of Artificial Sequence: Synthetic peptide"
PTTPVAI

SEQ ID NO: 8076 - protein, 7 aa, Artificial Sequence
  source: /note="Description of Artificial Sequence: Synthetic peptide"
PTTRGPP

SEQ ID NO: 8077 - protein, 7 aa, Artificial Sequence
  source: /note="Description of Artificial Sequence: Synthetic peptide"
PTVKLLG

SEQ ID NO: 8078 - protein, 7 aa, Artificial Sequence
  source: /note="Description of Artificial Sequence: Synthetic peptide"
PTVPDLN

SEQ ID NO: 8079 - protein, 7 aa, Artificial Sequence
  source: /note="Description of Artificial Sequence: Synthetic peptide"
PTVPRPG

SEQ ID NO: 8080 - protein, 7 aa, Artificial Sequence
  source: /note="Description of Artificial Sequence: Synthetic peptide"
PTVPVGL

SEQ ID NO: 8081 - protein, 7 aa, Artificial Sequence
  source: /note="Description of Artificial Sequence: Synthetic peptide"
PTVRGQY

SEQ ID NO: 8082 - protein, 7 aa, Artificial Sequence
  source: /note="Description of Artificial Sequence: Synthetic peptide"
PTYPKAT

SEQ ID NO: 8083 - protein, 7 aa, Artificial Sequence
  source: /note="Description of Artificial Sequence: Synthetic peptide"
PTYRDTA

SEQ ID NO: 8084 - protein, 7 aa, Artificial Sequence
  source: /note="Description of Artificial Sequence: Synthetic peptide"
PVARSMS

SEQ ID NO: 8085 - protein, 7 aa, Artificial Sequence
  source: /note="Description of Artificial Sequence: Synthetic peptide"
PVATCRV

SEQ ID NO: 8086 - protein, 7 aa, Artificial Sequence
  source: /note="Description of Artificial Sequence: Synthetic peptide"
PVATSYD

SEQ ID NO: 8087 - protein, 7 aa, Artificial Sequence
  source: /note="Description of Artificial Sequence: Synthetic peptide"
PVDALPR

SEQ ID NO: 8088 - protein, 7 aa, Artificial Sequence
  source: /note="Description of Artificial Sequence: Synthetic peptide"
PVDHARS

SEQ ID NO: 8089 - protein, 7 aa, Artificial Sequence
  source: /note="Description of Artificial Sequence: Synthetic peptide"
PVDLGRG

SEQ ID NO: 8090 - protein, 7 aa, Artificial Sequence
  source: /note="Description of Artificial Sequence: Synthetic peptide"
PVEATVL

SEQ ID NO: 8091 - protein, 7 aa, Artificial Sequence
  source: /note="Description of Artificial Sequence: Synthetic peptide"
PVEKYDK

SEQ ID NO: 8092 - protein, 7 aa, Artificial Sequence
  source: /note="Description of Artificial Sequence: Synthetic peptide"
PVEPGMS

SEQ ID NO: 8093 - protein, 7 aa, Artificial Sequence
  source: /note="Description of Artificial Sequence: Synthetic peptide"
PVESHRL

SEQ ID NO: 8094 - protein, 7 aa, Artificial Sequence
  source: /note="Description of Artificial Sequence: Synthetic peptide"
PVFHEAS

SEQ ID NO: 8095 - protein, 7 aa, Artificial Sequence
  source: /note="Description of Artificial Sequence: Synthetic peptide"
PVFPQSS

SEQ ID NO: 8096 - protein, 7 aa, Artificial Sequence
  source: /note="Description of Artificial Sequence: Synthetic peptide"
PVGFTEN

SEQ ID NO: 8097 - protein, 7 aa, Artificial Sequence
  source: /note="Description of Artificial Sequence: Synthetic peptide"
PVGSNSA

SEQ ID NO: 8098 - protein, 7 aa, Artificial Sequence
  source: /note="Description of Artificial Sequence: Synthetic peptide"
PVHIHTS

SEQ ID NO: 8099 - protein, 7 aa, Artificial Sequence
  source: /note="Description of Artificial Sequence: Synthetic peptide"
PVHSGRP

SEQ ID NO: 8100 - protein, 7 aa, Artificial Sequence
  source: /note="Description of Artificial Sequence: Synthetic peptide"
PVISTIA

SEQ ID NO: 8101 - protein, 7 aa, Artificial Sequence
  source: /note="Description of Artificial Sequence: Synthetic peptide"
PVKEVGD

SEQ ID NO: 8102 - protein, 7 aa, Artificial Sequence
  source: /note="Description of Artificial Sequence: Synthetic peptide"
PVKSAAP

SEQ ID NO: 8103 - protein, 7 aa, Artificial Sequence
  source: /note="Description of Artificial Sequence: Synthetic peptide"
PVLPSDH

SEQ ID NO: 8104 - protein, 7 aa, Artificial Sequence
  source: /note="Description of Artificial Sequence: Synthetic peptide"
PVMGTSV

SEQ ID NO: 8105 - protein, 7 aa, Artificial Sequence
  source: /note="Description of Artificial Sequence: Synthetic peptide"
PVMSGAS

SEQ ID NO: 8106 - protein, 7 aa, Artificial Sequence
  source: /note="Description of Artificial Sequence: Synthetic peptide"
PVNSERM

SEQ ID NO: 8107 - protein, 7 aa, Artificial Sequence
  source: /note="Description of Artificial Sequence: Synthetic peptide"
PVPGKLA

SEQ ID NO: 8108 - protein, 7 aa, Artificial Sequence
  source: /note="Description of Artificial Sequence: Synthetic peptide"
PVPPPLR

SEQ ID NO: 8109 - protein, 7 aa, Artificial Sequence
  source: /note="Description of Artificial Sequence: Synthetic peptide"
PVPRSVN

SEQ ID NO: 8110 - protein, 7 aa, Artificial Sequence
  source: /note="Description of Artificial Sequence: Synthetic peptide"
PVQMTAS

SEQ ID NO: 8111 - protein, 7 aa, Artificial Sequence
  source: /note="Description of Artificial Sequence: Synthetic peptide"
PVQVSLG

SEQ ID NO: 8112 - protein, 7 aa, Artificial Sequence
  source: /note="Description of Artificial Sequence: Synthetic peptide"
PVRAIEH

SEQ ID NO: 8113 - protein, 7 aa, Artificial Sequence
  source: /note="Description of Artificial Sequence: Synthetic peptide"
PVRAMDG

SEQ ID NO: 8114 - protein, 7 aa, Artificial Sequence
  source: /note="Description of Artificial Sequence: Synthetic peptide"
PVSGNFT

SEQ ID NO: 8115 - protein, 7 aa, Artificial Sequence
  source: /note="Description of Artificial Sequence: Synthetic peptide"
PVSKDRP

SEQ ID NO: 8116 - protein, 7 aa, Artificial Sequence
  source: /note="Description of Artificial Sequence: Synthetic peptide"
PVSMAAR

SEQ ID NO: 8117 - protein, 7 aa, Artificial Sequence
  source: /note="Description of Artificial Sequence: Synthetic peptide"
PVSMPRE

SEQ ID NO: 8118 - protein, 7 aa, Artificial Sequence
  source: /note="Description of Artificial Sequence: Synthetic peptide"
PVSPAIP

SEQ ID NO: 8119 - protein, 7 aa, Artificial Sequence
  source: /note="Description of Artificial Sequence: Synthetic peptide"
PVSPVPA

SEQ ID NO: 8120 - protein, 7 aa, Artificial Sequence
  source: /note="Description of Artificial Sequence: Synthetic peptide"
PVSQHSK

SEQ ID NO: 8121 - protein, 7 aa, Artificial Sequence
  source: /note="Description of Artificial Sequence: Synthetic peptide"
PVSSPTM

SEQ ID NO: 8122 - protein, 7 aa, Artificial Sequence
  source: /note="Description of Artificial Sequence: Synthetic peptide"
PVSTSAD

SEQ ID NO: 8123 - protein, 7 aa, Artificial Sequence
  source: /note="Description of Artificial Sequence: Synthetic peptide"
PVTAGER

SEQ ID NO: 8124 - protein, 7 aa, Artificial Sequence
  source: /note="Description of Artificial Sequence: Synthetic peptide"
PVTGPGQ

SEQ ID NO: 8125 - protein, 7 aa, Artificial Sequence
  source: /note="Description of Artificial Sequence: Synthetic peptide"
PVTKSLL

SEQ ID NO: 8126 - protein, 7 aa, Artificial Sequence
  source: /note="Description of Artificial Sequence: Synthetic peptide"
PVTKSVL

SEQ ID NO: 8127 - protein, 7 aa, Artificial Sequence
  source: /note="Description of Artificial Sequence: Synthetic peptide"
PVTNDRH

SEQ ID NO: 8128 - protein, 7 aa, Artificial Sequence
  source: /note="Description of Artificial Sequence: Synthetic peptide"
PVTTNAG

SEQ ID NO: 8129 - protein, 7 aa, Artificial Sequence
  source: /note="Description of Artificial Sequence: Synthetic peptide"
PVVNVWS

SEQ ID NO: 8130 - protein, 7 aa, Artificial Sequence
  source: /note="Description of Artificial Sequence: Synthetic peptide"
PVVSDTL

SEQ ID NO: 8131 - protein, 7 aa, Artificial Sequence
  source: /note="Description of Artificial Sequence: Synthetic peptide"
PVVTTTL

SEQ ID NO: 8132 - protein, 7 aa, Artificial Sequence
  source: /note="Description of Artificial Sequence: Synthetic peptide"
PVYVGEI

SEQ ID NO: 8133 - protein, 7 aa, Artificial Sequence
  source: /note="Description of Artificial Sequence: Synthetic peptide"
PWATMQG

SEQ ID NO: 8134 - protein, 7 aa, Artificial Sequence
  source: /note="Description of Artificial Sequence: Synthetic peptide"
PWKDNRG

SEQ ID NO: 8135 - protein, 7 aa, Artificial Sequence
  source: /note="Description of Artificial Sequence: Synthetic peptide"
PWSEDGM

SEQ ID NO: 8136 - protein, 7 aa, Artificial Sequence
  source: /note="Description of Artificial Sequence: Synthetic peptide"
PYATALT

SEQ ID NO: 8137 - protein, 7 aa, Artificial Sequence
  source: /note="Description of Artificial Sequence: Synthetic peptide"
PYDRPSA

SEQ ID NO: 8138 - protein, 7 aa, Artificial Sequence
  source: /note="Description of Artificial Sequence: Synthetic peptide"
PYEARAL

SEQ ID NO: 8139 - protein, 7 aa, Artificial Sequence
  source: /note="Description of Artificial Sequence: Synthetic peptide"
PYEMVAM

SEQ ID NO: 8140 - protein, 7 aa, Artificial Sequence
  source: /note="Description of Artificial Sequence: Synthetic peptide"
PYGTRET

SEQ ID NO: 8141 - protein, 7 aa, Artificial Sequence
  source: /note="Description of Artificial Sequence: Synthetic peptide"
PYHNHSA

SEQ ID NO: 8142 - protein, 7 aa, Artificial Sequence
  source: /note="Description of Artificial Sequence: Synthetic peptide"
PYIGGMS

SEQ ID NO: 8143 - protein, 7 aa, Artificial Sequence
  source: /note="Description of Artificial Sequence: Synthetic peptide"
PYLDPLR

SEQ ID NO: 8144 - protein, 7 aa, Artificial Sequence
  source: /note="Description of Artificial Sequence: Synthetic peptide"
PYLSNRP

SEQ ID NO: 8145 - protein, 7 aa, Artificial Sequence
  source: /note="Description of Artificial Sequence: Synthetic peptide"
PYLYPEE

SEQ ID NO: 8146 - protein, 7 aa, Artificial Sequence
  source: /note="Description of Artificial Sequence: Synthetic peptide"
PYPDPSK

SEQ ID NO: 8147 - protein, 7 aa, Artificial Sequence
  source: /note="Description of Artificial Sequence: Synthetic peptide"
PYPETSH

SEQ ID NO: 8148 - protein, 7 aa, Artificial Sequence
  source: /note="Description of Artificial Sequence: Synthetic peptide"
PYPSDKF

SEQ ID NO: 8149 - protein, 7 aa, Artificial Sequence
  source: /note="Description of Artificial Sequence: Synthetic peptide"
PYPTSNE

SEQ ID NO: 8150 - protein, 7 aa, Artificial Sequence
  source: /note="Description of Artificial Sequence: Synthetic peptide"
PYQRNSV

SEQ ID NO: 8151 - protein, 7 aa, Artificial Sequence
  source: /note="Description of Artificial Sequence: Synthetic peptide"
PYREHTV

SEQ ID NO: 8152 - protein, 7 aa, Artificial Sequence
  source: /note="Description of Artificial Sequence: Synthetic peptide"
PYRESSP

SEQ ID NO: 8153 - protein, 7 aa, Artificial Sequence
  source: /note="Description of Artificial Sequence: Synthetic peptide"
PYRSEPA

SEQ ID NO: 8154 - protein, 7 aa, Artificial Sequence
  source: /note="Description of Artificial Sequence: Synthetic peptide"
PYSAGYH

SEQ ID NO: 8155 - protein, 7 aa, Artificial Sequence
  source: /note="Description of Artificial Sequence: Synthetic peptide"
PYSGMTL

SEQ ID NO: 8156 - protein, 7 aa, Artificial Sequence
  source: /note="Description of Artificial Sequence: Synthetic peptide"
PYSVAVS

SEQ ID NO: 8157 - protein, 7 aa, Artificial Sequence
  source: /note="Description of Artificial Sequence: Synthetic peptide"
PYTSALL

SEQ ID NO: 8158 - protein, 7 aa, Artificial Sequence
  source: /note="Description of Artificial Sequence: Synthetic peptide"
PYVTDRV

SEQ ID NO: 8159 - protein, 7 aa, Artificial Sequence
  source: /note="Description of Artificial Sequence: Synthetic peptide"
PYVTEVY

SEQ ID NO: 8160 - protein, 7 aa, Artificial Sequence
  source: /note="Description of Artificial Sequence: Synthetic peptide"
QAASLLA

SEQ ID NO: 8161 - protein, 7 aa, Artificial Sequence
  source: /note="Description of Artificial Sequence: Synthetic peptide"
QAELPYG

SEQ ID NO: 8162 - protein, 7 aa, Artificial Sequence
  source: /note="Description of Artificial Sequence: Synthetic peptide"
QAFDVEM

SEQ ID NO: 8163 - protein, 7 aa, Artificial Sequence
  source: /note="Description of Artificial Sequence: Synthetic peptide"
QAGMQGA

SEQ ID NO: 8164 - protein, 7 aa, Artificial Sequence
  source: /note="Description of Artificial Sequence: Synthetic peptide"
QAGNLRD

SEQ ID NO: 8165 - protein, 7 aa, Artificial Sequence
  source: /note="Description of Artificial Sequence: Synthetic peptide"
QAGNNGA

SEQ ID NO: 8166 - protein, 7 aa, Artificial Sequence
  source: /note="Description of Artificial Sequence: Synthetic peptide"
QAGVTNS

SEQ ID NO: 8167 - protein, 7 aa, Artificial Sequence
  source: /note="Description of Artificial Sequence: Synthetic peptide"
QAHGGAL

SEQ ID NO: 8168 - protein, 7 aa, Artificial Sequence
  source: /note="Description of Artificial Sequence: Synthetic peptide"
QAIQQRQ

SEQ ID NO: 8169 - protein, 7 aa, Artificial Sequence
  source: /note="Description of Artificial Sequence: Synthetic peptide"
QAIRNEP

SEQ ID NO: 8170 - protein, 7 aa, Artificial Sequence
  source: /note="Description of Artificial Sequence: Synthetic peptide"
QAKAYAT

SEQ ID NO: 8171 - protein, 7 aa, Artificial Sequence
  source: /note="Description of Artificial Sequence: Synthetic peptide"
QAKSPSL

SEQ ID NO: 8172 - protein, 7 aa, Artificial Sequence
  source: /note="Description of Artificial Sequence: Synthetic peptide"
QALAPTN

SEQ ID NO: 8173 - protein, 7 aa, Artificial Sequence
  source: /note="Description of Artificial Sequence: Synthetic peptide"
QALPTMH

SEQ ID NO: 8174 - protein, 7 aa, Artificial Sequence
  source: /note="Description of Artificial Sequence: Synthetic peptide"
QANGSVG

SEQ ID NO: 8175 - protein, 7 aa, Artificial Sequence
  source: /note="Description of Artificial Sequence: Synthetic peptide"
QANVSQP

SEQ ID NO: 8176 - protein, 7 aa, Artificial Sequence
  source: /note="Description of Artificial Sequence: Synthetic peptide"
QAPGHRE

SEQ ID NO: 8177 - protein, 7 aa, Artificial Sequence
  source: /note="Description of Artificial Sequence: Synthetic peptide"
QAPGILL

SEQ ID NO: 8178 - protein, 7 aa, Artificial Sequence
  source: /note="Description of Artificial Sequence: Synthetic peptide"
QAPGLLV

SEQ ID NO: 8179 - protein, 7 aa, Artificial Sequence
  source: /note="Description of Artificial Sequence: Synthetic peptide"
QAPLASL

SEQ ID NO: 8180 - protein, 7 aa, Artificial Sequence
  source: /note="Description of Artificial Sequence: Synthetic peptide"
QAPRSDV

SEQ ID NO: 8181 - protein, 7 aa, Artificial Sequence
  source: /note="Description of Artificial Sequence: Synthetic peptide"
QAQLQGR

SEQ ID NO: 8182 - protein, 7 aa, Artificial Sequence
  source: /note="Description of Artificial Sequence: Synthetic peptide"
QAQRALS

SEQ ID NO: 8183 - protein, 7 aa, Artificial Sequence
  source: /note="Description of Artificial Sequence: Synthetic peptide"
QAQYPAM

SEQ ID NO: 8184 - protein, 7 aa, Artificial Sequence
  source: /note="Description of Artificial Sequence: Synthetic peptide"
QARAVTS

SEQ ID NO: 8185 - protein, 7 aa, Artificial Sequence
  source: /note="Description of Artificial Sequence: Synthetic peptide"
QARDPSL

SEQ ID NO: 8186 - protein, 7 aa, Artificial Sequence
  source: /note="Description of Artificial Sequence: Synthetic peptide"
QAREVSP

SEQ ID NO: 8187 - protein, 7 aa, Artificial Sequence
  source: /note="Description of Artificial Sequence: Synthetic peptide"
QARGNVS

SEQ ID NO: 8188 - protein, 7 aa, Artificial Sequence
  source: /note="Description of Artificial Sequence: Synthetic peptide"
QARNTSL

SEQ ID NO: 8189 - protein, 7 aa, Artificial Sequence
  source: /note="Description of Artificial Sequence: Synthetic peptide"
QARPGIL

SEQ ID NO: 8190 - protein, 7 aa, Artificial Sequence
  source: /note="Description of Artificial Sequence: Synthetic peptide"
QARVFDS

SEQ ID NO: 8191 - protein, 7 aa, Artificial Sequence
  source: /note="Description of Artificial Sequence: Synthetic peptide"
QASANRA

SEQ ID NO: 8192 - protein, 7 aa, Artificial Sequence
  source: /note="Description of Artificial Sequence: Synthetic peptide"
QASIIRA

SEQ ID NO: 8193 - protein, 7 aa, Artificial Sequence
  source: /note="Description of Artificial Sequence: Synthetic peptide"
QASKLPS

SEQ ID NO: 8194 - protein, 7 aa, Artificial Sequence
  source: /note="Description of Artificial Sequence: Synthetic peptide"
QASPAYG

SEQ ID NO: 8195 - protein, 7 aa, Artificial Sequence
  source: /note="Description of Artificial Sequence: Synthetic peptide"
QASQSLS

SEQ ID NO: 8196 - protein, 7 aa, Artificial Sequence
  source: /note="Description of Artificial Sequence: Synthetic peptide"
QATANSL

SEQ ID NO: 8197 - protein, 7 aa, Artificial Sequence
  source: /note="Description of Artificial Sequence: Synthetic peptide"
QATFGDD

SEQ ID NO: 8198 - protein, 7 aa, Artificial Sequence
  source: /note="Description of Artificial Sequence: Synthetic peptide"
QATNQSL

SEQ ID NO: 8199 - protein, 7 aa, Artificial Sequence
  source: /note="Description of Artificial Sequence: Synthetic peptide"
QATPLTT

SEQ ID NO: 8200 - protein, 7 aa, Artificial Sequence
  source: /note="Description of Artificial Sequence: Synthetic peptide"
QATQLGH

SEQ ID NO: 8201 - protein, 7 aa, Artificial Sequence
  source: /note="Description of Artificial Sequence: Synthetic peptide"
QAVRDKD

SEQ ID NO: 8202 - protein, 7 aa, Artificial Sequence
  source: /note="Description of Artificial Sequence: Synthetic peptide"
QAVRPDS

SEQ ID NO: 8203 - protein, 7 aa, Artificial Sequence
  source: /note="Description of Artificial Sequence: Synthetic peptide"
QAYHNSL

SEQ ID NO: 8204 - protein, 7 aa, Artificial Sequence
  source: /note="Description of Artificial Sequence: Synthetic peptide"
QAYVNSL

SEQ ID NO: 8205 - protein, 7 aa, Artificial Sequence
  source: /note="Description of Artificial Sequence: Synthetic peptide"
QCSDRRA

SEQ ID NO: 8206 - protein, 7 aa, Artificial Sequence
  source: /note="Description of Artificial Sequence: Synthetic peptide"
QDADPAH

SEQ ID NO: 8207 - protein, 7 aa, Artificial Sequence
  source: /note="Description of Artificial Sequence: Synthetic peptide"
QDDFRSK

SEQ ID NO: 8208 - protein, 7 aa, Artificial Sequence
  source: /note="Description of Artificial Sequence: Synthetic peptide"
QDDVQKL

SEQ ID NO: 8209 - protein, 7 aa, Artificial Sequence
  source: /note="Description of Artificial Sequence: Synthetic peptide"
QDFDDVH

SEQ ID NO: 8210 - protein, 7 aa, Artificial Sequence
  source: /note="Description of Artificial Sequence: Synthetic peptide"
QDGIRIM

SEQ ID NO: 8211 - protein, 7 aa, Artificial Sequence
  source: /note="Description of Artificial Sequence: Synthetic peptide"
QDIRAFA

SEQ ID NO: 8212 - protein, 7 aa, Artificial Sequence
  source: /note="Description of Artificial Sequence: Synthetic peptide"
QDRALQP

SEQ ID NO: 8213 - protein, 7 aa, Artificial Sequence
  source: /note="Description of Artificial Sequence: Synthetic peptide"
QDRLADT

SEQ ID NO: 8214 - protein, 7 aa, Artificial Sequence
  source: /note="Description of Artificial Sequence: Synthetic peptide"
QDRMSLR

SEQ ID NO: 8215 - protein, 7 aa, Artificial Sequence
  source: /note="Description of Artificial Sequence: Synthetic peptide"
QDRSTNF

SEQ ID NO: 8216 - protein, 7 aa, Artificial Sequence
  source: /note="Description of Artificial Sequence: Synthetic peptide"
QDSCLLP

SEQ ID NO: 8217 - protein, 7 aa, Artificial Sequence
  source: /note="Description of Artificial Sequence: Synthetic peptide"
QDSYLGY

SEQ ID NO: 8218 - protein, 7 aa, Artificial Sequence
  source: /note="Description of Artificial Sequence: Synthetic peptide"
QDTLTRF

SEQ ID NO: 8219 - protein, 7 aa, Artificial Sequence
  source: /note="Description of Artificial Sequence: Synthetic peptide"
QDTTSLD

SEQ ID NO: 8220 - protein, 7 aa, Artificial Sequence
  source: /note="Description of Artificial Sequence: Synthetic peptide"
QDTYTHK

SEQ ID NO: 8221 - protein, 7 aa, Artificial Sequence
  source: /note="Description of Artificial Sequence: Synthetic peptide"
QDVGLTV

SEQ ID NO: 8222 - protein, 7 aa, Artificial Sequence
  source: /note="Description of Artificial Sequence: Synthetic peptide"
QDVPSCG

SEQ ID NO: 8223 - protein, 7 aa, Artificial Sequence
  source: /note="Description of Artificial Sequence: Synthetic peptide"
QDYKKPS

SEQ ID NO: 8224 - protein, 7 aa, Artificial Sequence
  source: /note="Description of Artificial Sequence: Synthetic peptide"
QDYRLPE

SEQ ID NO: 8225 - protein, 7 aa, Artificial Sequence
  source: /note="Description of Artificial Sequence: Synthetic peptide"
QEAARVE

SEQ ID NO: 8226 - protein, 7 aa, Artificial Sequence
  source: /note="Description of Artificial Sequence: Synthetic peptide"
QEDTWSG

SEQ ID NO: 8227 - protein, 7 aa, Artificial Sequence
  source: /note="Description of Artificial Sequence: Synthetic peptide"
QEGAVMN

SEQ ID NO: 8228 - protein, 7 aa, Artificial Sequence
  source: /note="Description of Artificial Sequence: Synthetic peptide"
QELLKGY

SEQ ID NO: 8229 - protein, 7 aa, Artificial Sequence
  source: /note="Description of Artificial Sequence: Synthetic peptide"
QELVLTR

SEQ ID NO: 8230 - protein, 7 aa, Artificial Sequence
  source: /note="Description of Artificial Sequence: Synthetic peptide"
QEPAVSI

SEQ ID NO: 8231 - protein, 7 aa, Artificial Sequence
  source: /note="Description of Artificial Sequence: Synthetic peptide"
QEPMSGA

SEQ ID NO: 8232 - protein, 7 aa, Artificial Sequence
  source: /note="Description of Artificial Sequence: Synthetic peptide"
QEPRGMH

SEQ ID NO: 8233 - protein, 7 aa, Artificial Sequence
  source: /note="Description of Artificial Sequence: Synthetic peptide"
QERRMGP

SEQ ID NO: 8234 - protein, 7 aa, Artificial Sequence
  source: /note="Description of Artificial Sequence: Synthetic peptide"
QESSHGP

SEQ ID NO: 8235 - protein, 7 aa, Artificial Sequence
  source: /note="Description of Artificial Sequence: Synthetic peptide"
QESTGVW

SEQ ID NO: 8236 - protein, 7 aa, Artificial Sequence
  source: /note="Description of Artificial Sequence: Synthetic peptide"
QEVANNP

SEQ ID NO: 8237 - protein, 7 aa, Artificial Sequence
  source: /note="Description of Artificial Sequence: Synthetic peptide"
QEVHITG

SEQ ID NO: 8238 - protein, 7 aa, Artificial Sequence
  source: /note="Description of Artificial Sequence: Synthetic peptide"
QEVPGRI

SEQ ID NO: 8239 - protein, 7 aa, Artificial Sequence
  source: /note="Description of Artificial Sequence: Synthetic peptide"
QEWNATA

SEQ ID NO: 8240 - protein, 7 aa, Artificial Sequence
  source: /note="Description of Artificial Sequence: Synthetic peptide"
QEYVSKS

SEQ ID NO: 8241 - protein, 7 aa, Artificial Sequence
  source: /note="Description of Artificial Sequence: Synthetic peptide"
QFDKMMP

SEQ ID NO: 8242 - protein, 7 aa, Artificial Sequence
  source: /note="Description of Artificial Sequence: Synthetic peptide"
QFDLSPA

SEQ ID NO: 8243 - protein, 7 aa, Artificial Sequence
  source: /note="Description of Artificial Sequence: Synthetic peptide"
QFENACV

SEQ ID NO: 8244 - protein, 7 aa, Artificial Sequence
  source: /note="Description of Artificial Sequence: Synthetic peptide"
QFGMPRD

SEQ ID NO: 8245 - protein, 7 aa, Artificial Sequence
  source: /note="Description of Artificial Sequence: Synthetic peptide"
QFLKHEE

SEQ ID NO: 8246 - protein, 7 aa, Artificial Sequence
  source: /note="Description of Artificial Sequence: Synthetic peptide"
QFMGGVN

SEQ ID NO: 8247 - protein, 7 aa, Artificial Sequence
  source: /note="Description of Artificial Sequence: Synthetic peptide"
QFNETLT

SEQ ID NO: 8248 - protein, 7 aa, Artificial Sequence
  source: /note="Description of Artificial Sequence: Synthetic peptide"
QFNPSIR

SEQ ID NO: 8249 - protein, 7 aa, Artificial Sequence
  source: /note="Description of Artificial Sequence: Synthetic peptide"
QFNSPMP

SEQ ID NO: 8250 - protein, 7 aa, Artificial Sequence
  source: /note="Description of Artificial Sequence: Synthetic peptide"
QFPGSMP

SEQ ID NO: 8251 - protein, 7 aa, Artificial Sequence
  source: /note="Description of Artificial Sequence: Synthetic peptide"
QFPPANS

SEQ ID NO: 8252 - protein, 7 aa, Artificial Sequence
  source: /note="Description of Artificial Sequence: Synthetic peptide"
QFQSSQA

SEQ ID NO: 8253 - protein, 7 aa, Artificial Sequence
  source: /note="Description of Artificial Sequence: Synthetic peptide"
QFRAEIT

SEQ ID NO: 8254 - protein, 7 aa, Artificial Sequence
  source: /note="Description of Artificial Sequence: Synthetic peptide"
QFSLNAE

SEQ ID NO: 8255 - protein, 7 aa, Artificial Sequence
  source: /note="Description of Artificial Sequence: Synthetic peptide"
QFSPTSR

SEQ ID NO: 8256 - protein, 7 aa, Artificial Sequence
  source: /note="Description of Artificial Sequence: Synthetic peptide"
QFSSGSP

SEQ ID NO: 8257 - protein, 7 aa, Artificial Sequence
  source: /note="Description of Artificial Sequence: Synthetic peptide"
QGADSRL

SEQ ID NO: 8258 - protein, 7 aa, Artificial Sequence
  source: /note="Description of Artificial Sequence: Synthetic peptide"
QGEHFAV

SEQ ID NO: 8259 - protein, 7 aa, Artificial Sequence
  source: /note="Description of Artificial Sequence: Synthetic peptide"
QGEKPDA

SEQ ID NO: 8260 - protein, 7 aa, Artificial Sequence
  source: /note="Description of Artificial Sequence: Synthetic peptide"
QGGSGPY

SEQ ID NO: 8261 - protein, 7 aa, Artificial Sequence
  source: /note="Description of Artificial Sequence: Synthetic peptide"
QGHDDDI

SEQ ID NO: 8262 - protein, 7 aa, Artificial Sequence
  source: /note="Description of Artificial Sequence: Synthetic peptide"
QGIEHRP

SEQ ID NO: 8263 - protein, 7 aa, Artificial Sequence
  source: /note="Description of Artificial Sequence: Synthetic peptide"
QGITCSP

SEQ ID NO: 8264 - protein, 7 aa, Artificial Sequence
  source: /note="Description of Artificial Sequence: Synthetic peptide"
QGKQLTA

SEQ ID NO: 8265 - protein, 7 aa, Artificial Sequence
  source: /note="Description of Artificial Sequence: Synthetic peptide"
QGKVDQR

SEQ ID NO: 8266 - protein, 7 aa, Artificial Sequence
  source: /note="Description of Artificial Sequence: Synthetic peptide"
QGLVANF

SEQ ID NO: 8267 - protein, 7 aa, Artificial Sequence
  source: /note="Description of Artificial Sequence: Synthetic peptide"
QGMSFGP

SEQ ID NO: 8268 - protein, 7 aa, Artificial Sequence
  source: /note="Description of Artificial Sequence: Synthetic peptide"
QGNRSPH

SEQ ID NO: 8269 - protein, 7 aa, Artificial Sequence
  source: /note="Description of Artificial Sequence: Synthetic peptide"
QGPANVV

SEQ ID NO: 8270 - protein, 7 aa, Artificial Sequence
  source: /note="Description of Artificial Sequence: Synthetic peptide"
QGPPVTN

SEQ ID NO: 8271 - protein, 7 aa, Artificial Sequence
  source: /note="Description of Artificial Sequence: Synthetic peptide"
QGPRAAP

SEQ ID NO: 8272 - protein, 7 aa, Artificial Sequence
  source: /note="Description of Artificial Sequence: Synthetic peptide"
QGPSMLT

SEQ ID NO: 8273 - protein, 7 aa, Artificial Sequence
  source: /note="Description of Artificial Sequence: Synthetic peptide"
QGQHPMT

SEQ ID NO: 8274 - protein, 7 aa, Artificial Sequence
  source: /note="Description of Artificial Sequence: Synthetic peptide"
QGQPIDR

SEQ ID NO: 8275 - protein, 7 aa, Artificial Sequence
  source: /note="Description of Artificial Sequence: Synthetic peptide"
QGREWVQ

SEQ ID NO: 8276 - protein, 7 aa, Artificial Sequence
  source: /note="Description of Artificial Sequence: Synthetic peptide"
QGRSLPA

SEQ ID NO: 8277 - protein, 7 aa, Artificial Sequence
  source: /note="Description of Artificial Sequence: Synthetic peptide"
QGRTPQA

SEQ ID NO: 8278 - protein, 7 aa, Artificial Sequence
  source: /note="Description of Artificial Sequence: Synthetic peptide"
QGSHSST

SEQ ID NO: 8279 - protein, 7 aa, Artificial Sequence
  source: /note="Description of Artificial Sequence: Synthetic peptide"
QGSRTNP

SEQ ID NO: 8280 - protein, 7 aa, Artificial Sequence
  source: /note="Description of Artificial Sequence: Synthetic peptide"
QGSTAVT

SEQ ID NO: 8281 - protein, 7 aa, Artificial Sequence
  source: /note="Description of Artificial Sequence: Synthetic peptide"
QGSTWSP

SEQ ID NO: 8282 - protein, 7 aa, Artificial Sequence
  source: /note="Description of Artificial Sequence: Synthetic peptide"
QGTLKNI

SEQ ID NO: 8283 - protein, 7 aa, Artificial Sequence
  source: /note="Description of Artificial Sequence: Synthetic peptide"
QGVAGHA

SEQ ID NO: 8284 - protein, 7 aa, Artificial Sequence
  source: /note="Description of Artificial Sequence: Synthetic peptide"
QGVLLVT

SEQ ID NO: 8285 - protein, 7 aa, Artificial Sequence
  source: /note="Description of Artificial Sequence: Synthetic peptide"
QGVRQAV

SEQ ID NO: 8286 - protein, 7 aa, Artificial Sequence
  source: /note="Description of Artificial Sequence: Synthetic peptide"
QGVRTTS

SEQ ID NO: 8287 - protein, 7 aa, Artificial Sequence
  source: /note="Description of Artificial Sequence: Synthetic peptide"
QHERMPS

SEQ ID NO: 8288 - protein, 7 aa, Artificial Sequence
  source: /note="Description of Artificial Sequence: Synthetic peptide"
QHFNQAE

SEQ ID NO: 8289 - protein, 7 aa, Artificial Sequence
  source: /note="Description of Artificial Sequence: Synthetic peptide"
QHGAPTW

SEQ ID NO: 8290 - protein, 7 aa, Artificial Sequence
  source: /note="Description of Artificial Sequence: Synthetic peptide"
QHLHTLK

SEQ ID NO: 8291 - protein, 7 aa, Artificial Sequence
  source: /note="Description of Artificial Sequence: Synthetic peptide"
QHLNSYV

SEQ ID NO: 8292 - protein, 7 aa, Artificial Sequence
  source: /note="Description of Artificial Sequence: Synthetic peptide"
QHLPRTT

SEQ ID NO: 8293 - protein, 7 aa, Artificial Sequence
  source: /note="Description of Artificial Sequence: Synthetic peptide"
QHLVHDA

SEQ ID NO: 8294 - protein, 7 aa, Artificial Sequence
  source: /note="Description of Artificial Sequence: Synthetic peptide"
QHSLAVT

SEQ ID NO: 8295 - protein, 7 aa, Artificial Sequence
  source: /note="Description of Artificial Sequence: Synthetic peptide"
QHSSLGI

SEQ ID NO: 8296 - protein, 7 aa, Artificial Sequence
  source: /note="Description of Artificial Sequence: Synthetic peptide"
QHSSMAR

SEQ ID NO: 8297 - protein, 7 aa, Artificial Sequence
  source: /note="Description of Artificial Sequence: Synthetic peptide"
QHTAAAL

SEQ ID NO: 8298 - protein, 7 aa, Artificial Sequence
  source: /note="Description of Artificial Sequence: Synthetic peptide"
QHTLTIS

SEQ ID NO: 8299 - protein, 7 aa, Artificial Sequence
  source: /note="Description of Artificial Sequence: Synthetic peptide"
QHTRVVF

SEQ ID NO: 8300 - protein, 7 aa, Artificial Sequence
  source: /note="Description of Artificial Sequence: Synthetic peptide"
QHTTKQS

SEQ ID NO: 8301 - protein, 7 aa, Artificial Sequence
  source: /note="Description of Artificial Sequence: Synthetic peptide"
QHVSSTG

SEQ ID NO: 8302 - protein, 7 aa, Artificial Sequence
  source: /note="Description of Artificial Sequence: Synthetic peptide"
QIARSSI

SEQ ID NO: 8303 - protein, 7 aa, Artificial Sequence
  source: /note="Description of Artificial Sequence: Synthetic peptide"
QIDYRAP

SEQ ID NO: 8304 - protein, 7 aa, Artificial Sequence
  source: /note="Description of Artificial Sequence: Synthetic peptide"
QIETLAH

SEQ ID NO: 8305 - protein, 7 aa, Artificial Sequence
  source: /note="Description of Artificial Sequence: Synthetic peptide"
QIFGRTP

SEQ ID NO: 8306 - protein, 7 aa, Artificial Sequence
  source: /note="Description of Artificial Sequence: Synthetic peptide"
QIGFGTS

SEQ ID NO: 8307 - protein, 7 aa, Artificial Sequence
  source: /note="Description of Artificial Sequence: Synthetic peptide"
QIGTYLA

SEQ ID NO: 8308 - protein, 7 aa, Artificial Sequence
  source: /note="Description of Artificial Sequence: Synthetic peptide"
QIHESGE

SEQ ID NO: 8309 - protein, 7 aa, Artificial Sequence
  source: /note="Description of Artificial Sequence: Synthetic peptide"
QIMADTR

SEQ ID NO: 8310 - protein, 7 aa, Artificial Sequence
  source: /note="Description of Artificial Sequence: Synthetic peptide"
QINFPMD

SEQ ID NO: 8311 - protein, 7 aa, Artificial Sequence
  source: /note="Description of Artificial Sequence: Synthetic peptide"
QINSNKT

SEQ ID NO: 8312 - protein, 7 aa, Artificial Sequence
  source: /note="Description of Artificial Sequence: Synthetic peptide"
QINSTTG

SEQ ID NO: 8313 - protein, 7 aa, Artificial Sequence
  source: /note="Description of Artificial Sequence: Synthetic peptide"
QIPIIES

SEQ ID NO: 8314 - protein, 7 aa, Artificial Sequence
  source: /note="Description of Artificial Sequence: Synthetic peptide"
QIPKAPG

SEQ ID NO: 8315 - protein, 7 aa, Artificial Sequence
  source: /note="Description of Artificial Sequence: Synthetic peptide"
QIPNSFS

SEQ ID NO: 8316 - protein, 7 aa, Artificial Sequence
  source: /note="Description of Artificial Sequence: Synthetic peptide"
QIPTTLA

SEQ ID NO: 8317 - protein, 7 aa, Artificial Sequence
  source: /note="Description of Artificial Sequence: Synthetic peptide"
QIRNSTE

SEQ ID NO: 8318 - protein, 7 aa, Artificial Sequence
  source: /note="Description of Artificial Sequence: Synthetic peptide"
QISQPKI

SEQ ID NO: 8319 - protein, 7 aa, Artificial Sequence
  source: /note="Description of Artificial Sequence: Synthetic peptide"
QISTLTF

SEQ ID NO: 8320 - protein, 7 aa, Artificial Sequence
  source: /note="Description of Artificial Sequence: Synthetic peptide"
QIVPQGP

SEQ ID NO: 8321 - protein, 7 aa, Artificial Sequence
  source: /note="Description of Artificial Sequence: Synthetic peptide"
QIVTGLS

SEQ ID NO: 8322 - protein, 7 aa, Artificial Sequence
  source: /note="Description of Artificial Sequence: Synthetic peptide"
QIYGSES

SEQ ID NO: 8323 - protein, 7 aa, Artificial Sequence
  source: /note="Description of Artificial Sequence: Synthetic peptide"
QKAASAD

SEQ ID NO: 8324 - protein, 7 aa, Artificial Sequence
  source: /note="Description of Artificial Sequence: Synthetic peptide"
QKAIDSL

SEQ ID NO: 8325 - protein, 7 aa, Artificial Sequence
  source: /note="Description of Artificial Sequence: Synthetic peptide"
QKELIVD

SEQ ID NO: 8326 - protein, 7 aa, Artificial Sequence
  source: /note="Description of Artificial Sequence: Synthetic peptide"
QKEPGPS

SEQ ID NO: 8327 - protein, 7 aa, Artificial Sequence
  source: /note="Description of Artificial Sequence: Synthetic peptide"
QKFADKG

SEQ ID NO: 8328 - protein, 7 aa, Artificial Sequence
  source: /note="Description of Artificial Sequence: Synthetic peptide"
QKHDIRS

SEQ ID NO: 8329 - protein, 7 aa, Artificial Sequence
  source: /note="Description of Artificial Sequence: Synthetic peptide"
QKHNCPV

SEQ ID NO: 8330 - protein, 7 aa, Artificial Sequence
  source: /note="Description of Artificial Sequence: Synthetic peptide"
QKKDPIP

SEQ ID NO: 8331 - protein, 7 aa, Artificial Sequence
  source: /note="Description of Artificial Sequence: Synthetic peptide"
QKMQHYD

SEQ ID NO: 8332 - protein, 7 aa, Artificial Sequence
  source: /note="Description of Artificial Sequence: Synthetic peptide"
QKPATRD

SEQ ID NO: 8333 - protein, 7 aa, Artificial Sequence
  source: /note="Description of Artificial Sequence: Synthetic peptide"
QKSNNAL

SEQ ID NO: 8334 - protein, 7 aa, Artificial Sequence
  source: /note="Description of Artificial Sequence: Synthetic peptide"
QKVIAEV

SEQ ID NO: 8335 - protein, 7 aa, Artificial Sequence
  source: /note="Description of Artificial Sequence: Synthetic peptide"
QKVMQPG

SEQ ID NO: 8336 - protein, 7 aa, Artificial Sequence
  source: /note="Description of Artificial Sequence: Synthetic peptide"
QLANHVG

SEQ ID NO: 8337 - protein, 7 aa, Artificial Sequence
  source: /note="Description of Artificial Sequence: Synthetic peptide"
QLAPPKT

SEQ ID NO: 8338 - protein, 7 aa, Artificial Sequence
  source: /note="Description of Artificial Sequence: Synthetic peptide"
QLASNAF

SEQ ID NO: 8339 - protein, 7 aa, Artificial Sequence
  source: /note="Description of Artificial Sequence: Synthetic peptide"
QLASVRI

SEQ ID NO: 8340 - protein, 7 aa, Artificial Sequence
  source: /note="Description of Artificial Sequence: Synthetic peptide"
QLDFDLV

SEQ ID NO: 8341 - protein, 7 aa, Artificial Sequence
  source: /note="Description of Artificial Sequence: Synthetic peptide"
QLDSLSV

SEQ ID NO: 8342 - protein, 7 aa, Artificial Sequence
  source: /note="Description of Artificial Sequence: Synthetic peptide"
QLGPSVP

SEQ ID NO: 8343 - protein, 7 aa, Artificial Sequence
  source: /note="Description of Artificial Sequence: Synthetic peptide"
QLGSLDG

SEQ ID NO: 8344 - protein, 7 aa, Artificial Sequence
  source: /note="Description of Artificial Sequence: Synthetic peptide"
QLGVRSQ

SEQ ID NO: 8345 - protein, 7 aa, Artificial Sequence
  source: /note="Description of Artificial Sequence: Synthetic peptide"
QLHYANE

SEQ ID NO: 8346 - protein, 7 aa, Artificial Sequence
  source: /note="Description of Artificial Sequence: Synthetic peptide"
QLIKTPG

SEQ ID NO: 8347 - protein, 7 aa, Artificial Sequence
  source: /note="Description of Artificial Sequence: Synthetic peptide"
QLKAVEF

SEQ ID NO: 8348 - protein, 7 aa, Artificial Sequence
  source: /note="Description of Artificial Sequence: Synthetic peptide"
QLKPLYF

SEQ ID NO: 8349 - protein, 7 aa, Artificial Sequence
  source: /note="Description of Artificial Sequence: Synthetic peptide"
QLKTEML

SEQ ID NO: 8350 - protein, 7 aa, Artificial Sequence
  source: /note="Description of Artificial Sequence: Synthetic peptide"
QLKTSLS

SEQ ID NO: 8351 - protein, 7 aa, Artificial Sequence
  source: /note="Description of Artificial Sequence: Synthetic peptide"
QLLRTGD

SEQ ID NO: 8352 - protein, 7 aa, Artificial Sequence
  source: /note="Description of Artificial Sequence: Synthetic peptide"
QLLRVTG

SEQ ID NO: 8353 - protein, 7 aa, Artificial Sequence
  source: /note="Description of Artificial Sequence: Synthetic peptide"
QLMRLGV

SEQ ID NO: 8354 - protein, 7 aa, Artificial Sequence
  source: /note="Description of Artificial Sequence: Synthetic peptide"
QLNDLAR

SEQ ID NO: 8355 - protein, 7 aa, Artificial Sequence
  source: /note="Description of Artificial Sequence: Synthetic peptide"
QLNRPPS

SEQ ID NO: 8356 - protein, 7 aa, Artificial Sequence
  source: /note="Description of Artificial Sequence: Synthetic peptide"
QLPADNA

SEQ ID NO: 8357 - protein, 7 aa, Artificial Sequence
  source: /note="Description of Artificial Sequence: Synthetic peptide"
QLPHDSA

SEQ ID NO: 8358 - protein, 7 aa, Artificial Sequence
  source: /note="Description of Artificial Sequence: Synthetic peptide"
QLPHVKV

SEQ ID NO: 8359 - protein, 7 aa, Artificial Sequence
  source: /note="Description of Artificial Sequence: Synthetic peptide"
QLPHVSM

SEQ ID NO: 8360 - protein, 7 aa, Artificial Sequence
  source: /note="Description of Artificial Sequence: Synthetic peptide"
QLPLTPH

SEQ ID NO: 8361 - protein, 7 aa, Artificial Sequence
  source: /note="Description of Artificial Sequence: Synthetic peptide"
QLPSTRS

SEQ ID NO: 8362 - protein, 7 aa, Artificial Sequence
  source: /note="Description of Artificial Sequence: Synthetic peptide"
QLPTKLD

SEQ ID NO: 8363 - protein, 7 aa, Artificial Sequence
  source: /note="Description of Artificial Sequence: Synthetic peptide"
QLPVNSS

SEQ ID NO: 8364 - protein, 7 aa, Artificial Sequence
  source: /note="Description of Artificial Sequence: Synthetic peptide"
QLQITTG

SEQ ID NO: 8365 - protein, 7 aa, Artificial Sequence
  source: /note="Description of Artificial Sequence: Synthetic peptide"
QLQLKTA

SEQ ID NO: 8366 - protein, 7 aa, Artificial Sequence
  source: /note="Description of Artificial Sequence: Synthetic peptide"
QLQTDKT

SEQ ID NO: 8367 - protein, 7 aa, Artificial Sequence
  source: /note="Description of Artificial Sequence: Synthetic peptide"
QLRGSYP

SEQ ID NO: 8368 - protein, 7 aa, Artificial Sequence
  source: /note="Description of Artificial Sequence: Synthetic peptide"
QLRHTDF

SEQ ID NO: 8369 - protein, 7 aa, Artificial Sequence
  source: /note="Description of Artificial Sequence: Synthetic peptide"
QLRPANS

SEQ ID NO: 8370 - protein, 7 aa, Artificial Sequence
  source: /note="Description of Artificial Sequence: Synthetic peptide"
QLRPEGL

SEQ ID NO: 8371 - protein, 7 aa, Artificial Sequence
  source: /note="Description of Artificial Sequence: Synthetic peptide"
QLSAPAA

SEQ ID NO: 8372 - protein, 7 aa, Artificial Sequence
  source: /note="Description of Artificial Sequence: Synthetic peptide"
QLSASTR

SEQ ID NO: 8373 - protein, 7 aa, Artificial Sequence
  source: /note="Description of Artificial Sequence: Synthetic peptide"
QLSKDVS

SEQ ID NO: 8374 - protein, 7 aa, Artificial Sequence
  source: /note="Description of Artificial Sequence: Synthetic peptide"
QLSLEPF

SEQ ID NO: 8375 - protein, 7 aa, Artificial Sequence
  source: /note="Description of Artificial Sequence: Synthetic peptide"
QLSREEP

SEQ ID NO: 8376 - protein, 7 aa, Artificial Sequence
  source: /note="Description of Artificial Sequence: Synthetic peptide"
QLSRPVP

SEQ ID NO: 8377 - protein, 7 aa, Artificial Sequence
  source: /note="Description of Artificial Sequence: Synthetic peptide"
QLSSAPT

SEQ ID NO: 8378 - protein, 7 aa, Artificial Sequence
  source: /note="Description of Artificial Sequence: Synthetic peptide"
QLSTTQG

SEQ ID NO: 8379 - protein, 7 aa, Artificial Sequence
  source: /note="Description of Artificial Sequence: Synthetic peptide"
QLTAGVP

SEQ ID NO: 8380 - protein, 7 aa, Artificial Sequence
  source: /note="Description of Artificial Sequence: Synthetic peptide"
QLTPVHH

SEQ ID NO: 8381 - protein, 7 aa, Artificial Sequence
  source: /note="Description of Artificial Sequence: Synthetic peptide"
QLTRGNY

SEQ ID NO: 8382 - protein, 7 aa, Artificial Sequence
  source: /note="Description of Artificial Sequence: Synthetic peptide"
QLTVHTL

SEQ ID NO: 8383 - protein, 7 aa, Artificial Sequence
  source: /note="Description of Artificial Sequence: Synthetic peptide"
QLVQQHL

SEQ ID NO: 8384 - protein, 7 aa, Artificial Sequence
  source: /note="Description of Artificial Sequence: Synthetic peptide"
QMAETSR

SEQ ID NO: 8385 - protein, 7 aa, Artificial Sequence
  source: /note="Description of Artificial Sequence: Synthetic peptide"
QMARTMS

SEQ ID NO: 8386 - protein, 7 aa, Artificial Sequence
  source: /note="Description of Artificial Sequence: Synthetic peptide"
QMASIPS

SEQ ID NO: 8387 - protein, 7 aa, Artificial Sequence
  source: /note="Description of Artificial Sequence: Synthetic peptide"
QMDDAPS

SEQ ID NO: 8388 - protein, 7 aa, Artificial Sequence
  source: /note="Description of Artificial Sequence: Synthetic peptide"
QMDNRNP

SEQ ID NO: 8389 - protein, 7 aa, Artificial Sequence
  source: /note="Description of Artificial Sequence: Synthetic peptide"
QMDRSRV

SEQ ID NO: 8390 - protein, 7 aa, Artificial Sequence
  source: /note="Description of Artificial Sequence: Synthetic peptide"
QMEAALY

SEQ ID NO: 8391 - protein, 7 aa, Artificial Sequence
  source: /note="Description of Artificial Sequence: Synthetic peptide"
QMHSSLH

SEQ ID NO: 8392 - protein, 7 aa, Artificial Sequence
  source: /note="Description of Artificial Sequence: Synthetic peptide"
QMKNQAT

SEQ ID NO: 8393 - protein, 7 aa, Artificial Sequence
  source: /note="Description of Artificial Sequence: Synthetic peptide"
QMLDKNH

SEQ ID NO: 8394 - protein, 7 aa, Artificial Sequence
  source: /note="Description of Artificial Sequence: Synthetic peptide"
QMNALPM

SEQ ID NO: 8395 - protein, 7 aa, Artificial Sequence
  source: /note="Description of Artificial Sequence: Synthetic peptide"
QMNMPND

SEQ ID NO: 8396 - protein, 7 aa, Artificial Sequence
  source: /note="Description of Artificial Sequence: Synthetic peptide"
QMPATAK

SEQ ID NO: 8397 - protein, 7 aa, Artificial Sequence
  source: /note="Description of Artificial Sequence: Synthetic peptide"
QMPEGTS

SEQ ID NO: 8398 - protein, 7 aa, Artificial Sequence
  source: /note="Description of Artificial Sequence: Synthetic peptide"
QMPPNSN

SEQ ID NO: 8399 - protein, 7 aa, Artificial Sequence
  source: /note="Description of Artificial Sequence: Synthetic peptide"
QMPSFGE

SEQ ID NO: 8400 - protein, 7 aa, Artificial Sequence
  source: /note="Description of Artificial Sequence: Synthetic peptide"
QMPSMSG

SEQ ID NO: 8401 - protein, 7 aa, Artificial Sequence
  source: /note="Description of Artificial Sequence: Synthetic peptide"
QMPSSRS

SEQ ID NO: 8402 - protein, 7 aa, Artificial Sequence
  source: /note="Description of Artificial Sequence: Synthetic peptide"
QMPTRTT

SEQ ID NO: 8403 - protein, 7 aa, Artificial Sequence
  source: /note="Description of Artificial Sequence: Synthetic peptide"
QMQRPLI

SEQ ID NO: 8404 - protein, 7 aa, Artificial Sequence
  source: /note="Description of Artificial Sequence: Synthetic peptide"
QMSIVVP

SEQ ID NO: 8405 - protein, 7 aa, Artificial Sequence
  source: /note="Description of Artificial Sequence: Synthetic peptide"
QMTILKQ

SEQ ID NO: 8406 - protein, 7 aa, Artificial Sequence
  source: /note="Description of Artificial Sequence: Synthetic peptide"
QNEALVG

SEQ ID NO: 8407 - protein, 7 aa, Artificial Sequence
  source: /note="Description of Artificial Sequence: Synthetic peptide"
QNELFRA

SEQ ID NO: 8408 - protein, 7 aa, Artificial Sequence
  source: /note="Description of Artificial Sequence: Synthetic peptide"
QNGLPQT

SEQ ID NO: 8409 - protein, 7 aa, Artificial Sequence
  source: /note="Description of Artificial Sequence: Synthetic peptide"
QNHPVTK

SEQ ID NO: 8410 - protein, 7 aa, Artificial Sequence
  source: /note="Description of Artificial Sequence: Synthetic peptide"
QNILAHW

SEQ ID NO: 8411 - protein, 7 aa, Artificial Sequence
  source: /note="Description of Artificial Sequence: Synthetic peptide"
QNKSNSY

SEQ ID NO: 8412 - protein, 7 aa, Artificial Sequence
  source: /note="Description of Artificial Sequence: Synthetic peptide"
QNLPSAY

SEQ ID NO: 8413 - protein, 7 aa, Artificial Sequence
  source: /note="Description of Artificial Sequence: Synthetic peptide"
QNLTFGM

SEQ ID NO: 8414 - protein, 7 aa, Artificial Sequence
  source: /note="Description of Artificial Sequence: Synthetic peptide"
QNLTGKS

SEQ ID NO: 8415 - protein, 7 aa, Artificial Sequence
  source: /note="Description of Artificial Sequence: Synthetic peptide"
QNMVCVA

SEQ ID NO: 8416 - protein, 7 aa, Artificial Sequence
  source: /note="Description of Artificial Sequence: Synthetic peptide"
QNPNISG

SEQ ID NO: 8417 - protein, 7 aa, Artificial Sequence
  source: /note="Description of Artificial Sequence: Synthetic peptide"
QNPPHIQ

SEQ ID NO: 8418 - protein, 7 aa, Artificial Sequence
  source: /note="Description of Artificial Sequence: Synthetic peptide"
QNPRLPL

SEQ ID NO: 8419 - protein, 7 aa, Artificial Sequence
  source: /note="Description of Artificial Sequence: Synthetic peptide"
QNPRTGQ

SEQ ID NO: 8420 - protein, 7 aa, Artificial Sequence
  source: /note="Description of Artificial Sequence: Synthetic peptide"
QNPTYKL

SEQ ID NO: 8421 - protein, 7 aa, Artificial Sequence
  source: /note="Description of Artificial Sequence: Synthetic peptide"
QNRIVEP

SEQ ID NO: 8422 - protein, 7 aa, Artificial Sequence
  source: /note="Description of Artificial Sequence: Synthetic peptide"
QNSAPAI

SEQ ID NO: 8423 - protein, 7 aa, Artificial Sequence
  source: /note="Description of Artificial Sequence: Synthetic peptide"
QNTSSGL

SEQ ID NO: 8424 - protein, 7 aa, Artificial Sequence
  source: /note="Description of Artificial Sequence: Synthetic peptide"
QNVMHMS

SEQ ID NO: 8425 - protein, 7 aa, Artificial Sequence
  source: /note="Description of Artificial Sequence: Synthetic peptide"
QNVQRYP

SEQ ID NO: 8426 - protein, 7 aa, Artificial Sequence
  source: /note="Description of Artificial Sequence: Synthetic peptide"
QNVRSQT

SEQ ID NO: 8427 - protein, 7 aa, Artificial Sequence
  source: /note="Description of Artificial Sequence: Synthetic peptide"
QNYLKTE

SEQ ID NO: 8428 - protein, 7 aa, Artificial Sequence
  source: /note="Description of Artificial Sequence: Synthetic peptide"
QPAAGHF

SEQ ID NO: 8429 - protein, 7 aa, Artificial Sequence
  source: /note="Description of Artificial Sequence: Synthetic peptide"
QPAHCSD

SEQ ID NO: 8430 - protein, 7 aa, Artificial Sequence
  source: /note="Description of Artificial Sequence: Synthetic peptide"
QPAKGYP

SEQ ID NO: 8431 - protein, 7 aa, Artificial Sequence
  source: /note="Description of Artificial Sequence: Synthetic peptide"
QPAPTLR

SEQ ID NO: 8432 - protein, 7 aa, Artificial Sequence
  source: /note="Description of Artificial Sequence: Synthetic peptide"
QPATEVL

SEQ ID NO: 8433 - protein, 7 aa, Artificial Sequence
  source: /note="Description of Artificial Sequence: Synthetic peptide"
QPAVMES

SEQ ID NO: 8434 - protein, 7 aa, Artificial Sequence
  source: /note="Description of Artificial Sequence: Synthetic peptide"
QPDPSPP

SEQ ID NO: 8435 - protein, 7 aa, Artificial Sequence
  source: /note="Description of Artificial Sequence: Synthetic peptide"
QPFYSDE

SEQ ID NO: 8436 - protein, 7 aa, Artificial Sequence
  source: /note="Description of Artificial Sequence: Synthetic peptide"
QPGVSHT

SEQ ID NO: 8437 - protein, 7 aa, Artificial Sequence
  source: /note="Description of Artificial Sequence: Synthetic peptide"
QPHGDPM

SEQ ID NO: 8438 - protein, 7 aa, Artificial Sequence
  source: /note="Description of Artificial Sequence: Synthetic peptide"
QPIAHTD

SEQ ID NO: 8439 - protein, 7 aa, Artificial Sequence
  source: /note="Description of Artificial Sequence: Synthetic peptide"
QPIQTRA

SEQ ID NO: 8440 - protein, 7 aa, Artificial Sequence
  source: /note="Description of Artificial Sequence: Synthetic peptide"
QPISATL

SEQ ID NO: 8441 - protein, 7 aa, Artificial Sequence
  source: /note="Description of Artificial Sequence: Synthetic peptide"
QPKFCGA

SEQ ID NO: 8442 - protein, 7 aa, Artificial Sequence
  source: /note="Description of Artificial Sequence: Synthetic peptide"
QPKLSAS

SEQ ID NO: 8443 - protein, 7 aa, Artificial Sequence
  source: /note="Description of Artificial Sequence: Synthetic peptide"
QPKSSGV

SEQ ID NO: 8444 - protein, 7 aa, Artificial Sequence
  source: /note="Description of Artificial Sequence: Synthetic peptide"
QPLARAS

SEQ ID NO: 8445 - protein, 7 aa, Artificial Sequence
  source: /note="Description of Artificial Sequence: Synthetic peptide"
QPLASKT

SEQ ID NO: 8446 - protein, 7 aa, Artificial Sequence
  source: /note="Description of Artificial Sequence: Synthetic peptide"
QPLLSAS

SEQ ID NO: 8447 - protein, 7 aa, Artificial Sequence
  source: /note="Description of Artificial Sequence: Synthetic peptide"
QPLTMRS

SEQ ID NO: 8448 - protein, 7 aa, Artificial Sequence
  source: /note="Description of Artificial Sequence: Synthetic peptide"
QPLTSDT

SEQ ID NO: 8449 - protein, 7 aa, Artificial Sequence
  source: /note="Description of Artificial Sequence: Synthetic peptide"
QPMLVVS

SEQ ID NO: 8450 - protein, 7 aa, Artificial Sequence
  source: /note="Description of Artificial Sequence: Synthetic peptide"
QPNPVAH

SEQ ID NO: 8451 - protein, 7 aa, Artificial Sequence
  source: /note="Description of Artificial Sequence: Synthetic peptide"
QPNYPCA

SEQ ID NO: 8452 - protein, 7 aa, Artificial Sequence
  source: /note="Description of Artificial Sequence: Synthetic peptide"
QPPGMSS

SEQ ID NO: 8453 - protein, 7 aa, Artificial Sequence
  source: /note="Description of Artificial Sequence: Synthetic peptide"
QPPNTED

SEQ ID NO: 8454 - protein, 7 aa, Artificial Sequence
  source: /note="Description of Artificial Sequence: Synthetic peptide"
QPPRSQL

SEQ ID NO: 8455 - protein, 7 aa, Artificial Sequence
  source: /note="Description of Artificial Sequence: Synthetic peptide"
QPPSPIS

SEQ ID NO: 8456 - protein, 7 aa, Artificial Sequence
  source: /note="Description of Artificial Sequence: Synthetic peptide"
QPPYLSG

SEQ ID NO: 8457 - protein, 7 aa, Artificial Sequence
  source: /note="Description of Artificial Sequence: Synthetic peptide"
QPQGREP

SEQ ID NO: 8458 - protein, 7 aa, Artificial Sequence
  source: /note="Description of Artificial Sequence: Synthetic peptide"
QPRAEVP

SEQ ID NO: 8459 - protein, 7 aa, Artificial Sequence
  source: /note="Description of Artificial Sequence: Synthetic peptide"
QPRDAGS

SEQ ID NO: 8460 - protein, 7 aa, Artificial Sequence
  source: /note="Description of Artificial Sequence: Synthetic peptide"
QPRLLDN

SEQ ID NO: 8461 - protein, 7 aa, Artificial Sequence
  source: /note="Description of Artificial Sequence: Synthetic peptide"
QPRTLST

SEQ ID NO: 8462 - protein, 7 aa, Artificial Sequence
  source: /note="Description of Artificial Sequence: Synthetic peptide"
QPSAAAR

SEQ ID NO: 8463 - protein, 7 aa, Artificial Sequence
  source: /note="Description of Artificial Sequence: Synthetic peptide"
QPSHGTP

SEQ ID NO: 8464 - protein, 7 aa, Artificial Sequence
  source: /note="Description of Artificial Sequence: Synthetic peptide"
QPSLVTL

SEQ ID NO: 8465 - protein, 7 aa, Artificial Sequence
  source: /note="Description of Artificial Sequence: Synthetic peptide"
QPSMEPQ

SEQ ID NO: 8466 - protein, 7 aa, Artificial Sequence
  source: /note="Description of Artificial Sequence: Synthetic peptide"
QPSMQSE

SEQ ID NO: 8467 - protein, 7 aa, Artificial Sequence
  source: /note="Description of Artificial Sequence: Synthetic peptide"
QPSNMGH

SEQ ID NO: 8468 - protein, 7 aa, Artificial Sequence
  source: /note="Description of Artificial Sequence: Synthetic peptide"
QPSPGFH

SEQ ID NO: 8469 - protein, 7 aa, Artificial Sequence
  source: /note="Description of Artificial Sequence: Synthetic peptide"
QPSSHPV

SEQ ID NO: 8470 - protein, 7 aa, Artificial Sequence
  source: /note="Description of Artificial Sequence: Synthetic peptide"
QPTDTLS

SEQ ID NO: 8471 - protein, 7 aa, Artificial Sequence
  source: /note="Description of Artificial Sequence: Synthetic peptide"
QPTPTPH

SEQ ID NO: 8472 - protein, 7 aa, Artificial Sequence
  source: /note="Description of Artificial Sequence: Synthetic peptide"
QPVNPMH

SEQ ID NO: 8473 - protein, 7 aa, Artificial Sequence
  source: /note="Description of Artificial Sequence: Synthetic peptide"
QPVNPRV

SEQ ID NO: 8474 - protein, 7 aa, Artificial Sequence
  source: /note="Description of Artificial Sequence: Synthetic peptide"
QPVVTPK

SEQ ID NO: 8475 - protein, 7 aa, Artificial Sequence
  source: /note="Description of Artificial Sequence: Synthetic peptide"
QPYSSSL

SEQ ID NO: 8476 - protein, 7 aa, Artificial Sequence
  source: /note="Description of Artificial Sequence: Synthetic peptide"
QQADATI

SEQ ID NO: 8477 - protein, 7 aa, Artificial Sequence
  source: /note="Description of Artificial Sequence: Synthetic peptide"
QQALSMA

SEQ ID NO: 8478 - protein, 7 aa, Artificial Sequence
  source: /note="Description of Artificial Sequence: Synthetic peptide"
QQAPYRP

SEQ ID NO: 8479 - protein, 7 aa, Artificial Sequence
  source: /note="Description of Artificial Sequence: Synthetic peptide"
QQEVARL

SEQ ID NO: 8480 - protein, 7 aa, Artificial Sequence
  source: /note="Description of Artificial Sequence: Synthetic peptide"
QQGRCPD

SEQ ID NO: 8481 - protein, 7 aa, Artificial Sequence
  source: /note="Description of Artificial Sequence: Synthetic peptide"
QQIIESL

SEQ ID NO: 8482 - protein, 7 aa, Artificial Sequence
  source: /note="Description of Artificial Sequence: Synthetic peptide"
QQKMSYD

SEQ ID NO: 8483 - protein, 7 aa, Artificial Sequence
  source: /note="Description of Artificial Sequence: Synthetic peptide"
QQRLMGE

SEQ ID NO: 8484 - protein, 7 aa, Artificial Sequence
  source: /note="Description of Artificial Sequence: Synthetic peptide"
QQRLQMM

SEQ ID NO: 8485 - protein, 7 aa, Artificial Sequence
  source: /note="Description of Artificial Sequence: Synthetic peptide"
QQRSSLL

SEQ ID NO: 8486 - protein, 7 aa, Artificial Sequence
  source: /note="Description of Artificial Sequence: Synthetic peptide"
QQRVNPE

SEQ ID NO: 8487 - protein, 7 aa, Artificial Sequence
  source: /note="Description of Artificial Sequence: Synthetic peptide"
QQSNQTK

SEQ ID NO: 8488 - protein, 7 aa, Artificial Sequence
  source: /note="Description of Artificial Sequence: Synthetic peptide"
QQTAGSD

SEQ ID NO: 8489 - protein, 7 aa, Artificial Sequence
  source: /note="Description of Artificial Sequence: Synthetic peptide"
QQTGYLP

SEQ ID NO: 8490 - protein, 7 aa, Artificial Sequence
  source: /note="Description of Artificial Sequence: Synthetic peptide"
QQTHMGS

SEQ ID NO: 8491 - protein, 7 aa, Artificial Sequence
  source: /note="Description of Artificial Sequence: Synthetic peptide"
QQTKQLQ

SEQ ID NO: 8492 - protein, 7 aa, Artificial Sequence
  source: /note="Description of Artificial Sequence: Synthetic peptide"
QQTKSTA

SEQ ID NO: 8493 - protein, 7 aa, Artificial Sequence
  source: /note="Description of Artificial Sequence: Synthetic peptide"
QQTNDRN

SEQ ID NO: 8494 - protein, 7 aa, Artificial Sequence
  source: /note="Description of Artificial Sequence: Synthetic peptide"
QQTRTSL

SEQ ID NO: 8495 - protein, 7 aa, Artificial Sequence
  source: /note="Description of Artificial Sequence: Synthetic peptide"
QQTSARE

SEQ ID NO: 8496 - protein, 7 aa, Artificial Sequence
  source: /note="Description of Artificial Sequence: Synthetic peptide"
QQVKSGD

SEQ ID NO: 8497 - protein, 7 aa, Artificial Sequence
  source: /note="Description of Artificial Sequence: Synthetic peptide"
QRAPDGW

SEQ ID NO: 8498 - protein, 7 aa, Artificial Sequence
  source: /note="Description of Artificial Sequence: Synthetic peptide"
QRAPESM

SEQ ID NO: 8499 - protein, 7 aa, Artificial Sequence
  source: /note="Description of Artificial Sequence: Synthetic peptide"
QRAQLNS

SEQ ID NO: 8500 - protein, 7 aa, Artificial Sequence
  source: /note="Description of Artificial Sequence: Synthetic peptide"
QRAVAPT

SEQ ID NO: 8501 - protein, 7 aa, Artificial Sequence
  source: /note="Description of Artificial Sequence: Synthetic peptide"
QRAVQVY

SEQ ID NO: 8502 - protein, 7 aa, Artificial Sequence
  source: /note="Description of Artificial Sequence: Synthetic peptide"
QRDARLD

SEQ ID NO: 8503 - protein, 7 aa, Artificial Sequence
  source: /note="Description of Artificial Sequence: Synthetic peptide"
QRGKEAH

SEQ ID NO: 8504 - protein, 7 aa, Artificial Sequence
  source: /note="Description of Artificial Sequence: Synthetic peptide"
QRGPGNQ

SEQ ID NO: 8505 - protein, 7 aa, Artificial Sequence
  source: /note="Description of Artificial Sequence: Synthetic peptide"
QRGPMEL

SEQ ID NO: 8506 - protein, 7 aa, Artificial Sequence
  source: /note="Description of Artificial Sequence: Synthetic peptide"
QRIGPAL

SEQ ID NO: 8507 - protein, 7 aa, Artificial Sequence
  source: /note="Description of Artificial Sequence: Synthetic peptide"
QRIPVDV

SEQ ID NO: 8508 - protein, 7 aa, Artificial Sequence
  source: /note="Description of Artificial Sequence: Synthetic peptide"
QRLASPS

SEQ ID NO: 8509 - protein, 7 aa, Artificial Sequence
  source: /note="Description of Artificial Sequence: Synthetic peptide"
QRLTAQE

SEQ ID NO: 8510 - protein, 7 aa, Artificial Sequence
  source: /note="Description of Artificial Sequence: Synthetic peptide"
QRMANMS

SEQ ID NO: 8511 - protein, 7 aa, Artificial Sequence
  source: /note="Description of Artificial Sequence: Synthetic peptide"
QRMTQDM

SEQ ID NO: 8512 - protein, 7 aa, Artificial Sequence
  source: /note="Description of Artificial Sequence: Synthetic peptide"
QRNSNTF

SEQ ID NO: 8513 - protein, 7 aa, Artificial Sequence
  source: /note="Description of Artificial Sequence: Synthetic peptide"
QRPGLHM

SEQ ID NO: 8514 - protein, 7 aa, Artificial Sequence
  source: /note="Description of Artificial Sequence: Synthetic peptide"
QRPLGGL

SEQ ID NO: 8515 - protein, 7 aa, Artificial Sequence
  source: /note="Description of Artificial Sequence: Synthetic peptide"
QRPPSVD

SEQ ID NO: 8516 - protein, 7 aa, Artificial Sequence
  source: /note="Description of Artificial Sequence: Synthetic peptide"
QRPTDRT

SEQ ID NO: 8517 - protein, 7 aa, Artificial Sequence
  source: /note="Description of Artificial Sequence: Synthetic peptide"
QRQPVLD

SEQ ID NO: 8518 - protein, 7 aa, Artificial Sequence
  source: /note="Description of Artificial Sequence: Synthetic peptide"
QRQRDLP

SEQ ID NO: 8519 - protein, 7 aa, Artificial Sequence
  source: /note="Description of Artificial Sequence: Synthetic peptide"
QRSANVA

SEQ ID NO: 8520 - protein, 7 aa, Artificial Sequence
  source: /note="Description of Artificial Sequence: Synthetic peptide"
QRSHMNP

SEQ ID NO: 8521 - protein, 7 aa, Artificial Sequence
  source: /note="Description of Artificial Sequence: Synthetic peptide"
QRSSGTP

SEQ ID NO: 8522 - protein, 7 aa, Artificial Sequence
  source: /note="Description of Artificial Sequence: Synthetic peptide"
QRSTNLN

SEQ ID NO: 8523 - protein, 7 aa, Artificial Sequence
  source: /note="Description of Artificial Sequence: Synthetic peptide"
QRTVHQG

SEQ ID NO: 8524 - protein, 7 aa, Artificial Sequence
  source: /note="Description of Artificial Sequence: Synthetic peptide"
QRTVRGE

SEQ ID NO: 8525 - protein, 7 aa, Artificial Sequence
  source: /note="Description of Artificial Sequence: Synthetic peptide"
QRVNSSG

SEQ ID NO: 8526 - protein, 7 aa, Artificial Sequence
  source: /note="Description of Artificial Sequence: Synthetic peptide"
QSADLDY

SEQ ID NO: 8527 - protein, 7 aa, Artificial Sequence
  source: /note="Description of Artificial Sequence: Synthetic peptide"
QSAEAEA

SEQ ID NO: 8528 - protein, 7 aa, Artificial Sequence
  source: /note="Description of Artificial Sequence: Synthetic peptide"
QSAHPAT

SEQ ID NO: 8529 - protein, 7 aa, Artificial Sequence
  source: /note="Description of Artificial Sequence: Synthetic peptide"
QSAPVRV

SEQ ID NO: 8530 - protein, 7 aa, Artificial Sequence
  source: /note="Description of Artificial Sequence: Synthetic peptide"
QSASALQ

SEQ ID NO: 8531 - protein, 7 aa, Artificial Sequence
  source: /note="Description of Artificial Sequence: Synthetic peptide"
QSASVMN

SEQ ID NO: 8532 - protein, 7 aa, Artificial Sequence
  source: /note="Description of Artificial Sequence: Synthetic peptide"
QSAVLEY

SEQ ID NO: 8533 - protein, 7 aa, Artificial Sequence
  source: /note="Description of Artificial Sequence: Synthetic peptide"
QSDDWPV

SEQ ID NO: 8534 - protein, 7 aa, Artificial Sequence
  source: /note="Description of Artificial Sequence: Synthetic peptide"
QSDIRNP

SEQ ID NO: 8535 - protein, 7 aa, Artificial Sequence
  source: /note="Description of Artificial Sequence: Synthetic peptide"
QSDWVPV

SEQ ID NO: 8536 - protein, 7 aa, Artificial Sequence
  source: /note="Description of Artificial Sequence: Synthetic peptide"
QSEKGTY

SEQ ID NO: 8537 - protein, 7 aa, Artificial Sequence
  source: /note="Description of Artificial Sequence: Synthetic peptide"
QSEMMDA

SEQ ID NO: 8538 - protein, 7 aa, Artificial Sequence
  source: /note="Description of Artificial Sequence: Synthetic peptide"
QSERATV

SEQ ID NO: 8539 - protein, 7 aa, Artificial Sequence
  source: /note="Description of Artificial Sequence: Synthetic peptide"
QSFHHER

SEQ ID NO: 8540 - protein, 7 aa, Artificial Sequence
  source: /note="Description of Artificial Sequence: Synthetic peptide"
QSFPLQA

SEQ ID NO: 8541 - protein, 7 aa, Artificial Sequence
  source: /note="Description of Artificial Sequence: Synthetic peptide"
QSGQGMY

SEQ ID NO: 8542 - protein, 7 aa, Artificial Sequence
  source: /note="Description of Artificial Sequence: Synthetic peptide"
QSGRWHW

SEQ ID NO: 8543 - protein, 7 aa, Artificial Sequence
  source: /note="Description of Artificial Sequence: Synthetic peptide"
QSGSSAR

SEQ ID NO: 8544 - protein, 7 aa, Artificial Sequence
  source: /note="Description of Artificial Sequence: Synthetic peptide"
QSHPFND

SEQ ID NO: 8545 - protein, 7 aa, Artificial Sequence
  source: /note="Description of Artificial Sequence: Synthetic peptide"
QSHTQGS

SEQ ID NO: 8546 - protein, 7 aa, Artificial Sequence
  source: /note="Description of Artificial Sequence: Synthetic peptide"
QSIAVTI

SEQ ID NO: 8547 - protein, 7 aa, Artificial Sequence
  source: /note="Description of Artificial Sequence: Synthetic peptide"
QSIVIAH

SEQ ID NO: 8548 - protein, 7 aa, Artificial Sequence
  source: /note="Description of Artificial Sequence: Synthetic peptide"
QSKLASL

SEQ ID NO: 8549 - protein, 7 aa, Artificial Sequence
  source: /note="Description of Artificial Sequence: Synthetic peptide"
QSKLYLE

SEQ ID NO: 8550 - protein, 7 aa, Artificial Sequence
  source: /note="Description of Artificial Sequence: Synthetic peptide"
QSKMPNW

SEQ ID NO: 8551 - protein, 7 aa, Artificial Sequence
  source: /note="Description of Artificial Sequence: Synthetic peptide"
QSLNDLK

SEQ ID NO: 8552 - protein, 7 aa, Artificial Sequence
  source: /note="Description of Artificial Sequence: Synthetic peptide"
QSMSSTL

SEQ ID NO: 8553 - protein, 7 aa, Artificial Sequence
  source: /note="Description of Artificial Sequence: Synthetic peptide"
QSNQDRQ

SEQ ID NO: 8554 - protein, 7 aa, Artificial Sequence
  source: /note="Description of Artificial Sequence: Synthetic peptide"
QSNSSNT

SEQ ID NO: 8555 - protein, 7 aa, Artificial Sequence
  source: /note="Description of Artificial Sequence: Synthetic peptide"
QSPGHPS

SEQ ID NO: 8556 - protein, 7 aa, Artificial Sequence
  source: /note="Description of Artificial Sequence: Synthetic peptide"
QSPKECY

SEQ ID NO: 8557 - protein, 7 aa, Artificial Sequence
  source: /note="Description of Artificial Sequence: Synthetic peptide"
QSPLYAS

SEQ ID NO: 8558 - protein, 7 aa, Artificial Sequence
  source: /note="Description of Artificial Sequence: Synthetic peptide"
QSPNLPL

SEQ ID NO: 8559 - protein, 7 aa, Artificial Sequence
  source: /note="Description of Artificial Sequence: Synthetic peptide"
QSPPSTD

SEQ ID NO: 8560 - protein, 7 aa, Artificial Sequence
  source: /note="Description of Artificial Sequence: Synthetic peptide"
QSPRNYV

SEQ ID NO: 8561 - protein, 7 aa, Artificial Sequence
  source: /note="Description of Artificial Sequence: Synthetic peptide"
QSPTNDM

SEQ ID NO: 8562 - protein, 7 aa, Artificial Sequence
  source: /note="Description of Artificial Sequence: Synthetic peptide"
QSQAPHG

SEQ ID NO: 8563 - protein, 7 aa, Artificial Sequence
  source: /note="Description of Artificial Sequence: Synthetic peptide"
QSRDIPT

SEQ ID NO: 8564 - protein, 7 aa, Artificial Sequence
  source: /note="Description of Artificial Sequence: Synthetic peptide"
QSRGALP

SEQ ID NO: 8565 - protein, 7 aa, Artificial Sequence
  source: /note="Description of Artificial Sequence: Synthetic peptide"
QSRLGSF

SEQ ID NO: 8566 - protein, 7 aa, Artificial Sequence
  source: /note="Description of Artificial Sequence: Synthetic peptide"
QSRTMTP

SEQ ID NO: 8567 - protein, 7 aa, Artificial Sequence
  source: /note="Description of Artificial Sequence: Synthetic peptide"
QSRTPSP

SEQ ID NO: 8568 - protein, 7 aa, Artificial Sequence
  source: /note="Description of Artificial Sequence: Synthetic peptide"
QSSAISY

SEQ ID NO: 8569 - protein, 7 aa, Artificial Sequence
  source: /note="Description of Artificial Sequence: Synthetic peptide"
QSSARGM

SEQ ID NO: 8570 - protein, 7 aa, Artificial Sequence
  source: /note="Description of Artificial Sequence: Synthetic peptide"
QSSATRN

SEQ ID NO: 8571 - protein, 7 aa, Artificial Sequence
  source: /note="Description of Artificial Sequence: Synthetic peptide"
QSSAVLT

SEQ ID NO: 8572 - protein, 7 aa, Artificial Sequence
  source: /note="Description of Artificial Sequence: Synthetic peptide"
QSSDTGE

SEQ ID NO: 8573 - protein, 7 aa, Artificial Sequence
  source: /note="Description of Artificial Sequence: Synthetic peptide"
QSSGQTV

SEQ ID NO: 8574 - protein, 7 aa, Artificial Sequence
  source: /note="Description of Artificial Sequence: Synthetic peptide"
QSSKIVY

SEQ ID NO: 8575 - protein, 7 aa, Artificial Sequence
  source: /note="Description of Artificial Sequence: Synthetic peptide"
QSSLSLS

SEQ ID NO: 8576 - protein, 7 aa, Artificial Sequence
  source: /note="Description of Artificial Sequence: Synthetic peptide"
QSSMPQT

SEQ ID NO: 8577 - protein, 7 aa, Artificial Sequence
  source: /note="Description of Artificial Sequence: Synthetic peptide"
QSSNFQS

SEQ ID NO: 8578 - protein, 7 aa, Artificial Sequence
  source: /note="Description of Artificial Sequence: Synthetic peptide"
QSSRAMG

SEQ ID NO: 8579 - protein, 7 aa, Artificial Sequence
  source: /note="Description of Artificial Sequence: Synthetic peptide"
QSSRPSP

SEQ ID NO: 8580 - protein, 7 aa, Artificial Sequence
  source: /note="Description of Artificial Sequence: Synthetic peptide"
QSSTLQS

SEQ ID NO: 8581 - protein, 7 aa, Artificial Sequence
  source: /note="Description of Artificial Sequence: Synthetic peptide"
QSTDQKD

SEQ ID NO: 8582 - protein, 7 aa, Artificial Sequence
  source: /note="Description of Artificial Sequence: Synthetic peptide"
QSTGALR

SEQ ID NO: 8583 - protein, 7 aa, Artificial Sequence
  source: /note="Description of Artificial Sequence: Synthetic peptide"
QSTNESS

SEQ ID NO: 8584 - protein, 7 aa, Artificial Sequence
  source: /note="Description of Artificial Sequence: Synthetic peptide"
QSTQLDH

SEQ ID NO: 8585 - protein, 7 aa, Artificial Sequence
  source: /note="Description of Artificial Sequence: Synthetic peptide"
QSTQSDK

SEQ ID NO: 8586 - protein, 7 aa, Artificial Sequence
  source: /note="Description of Artificial Sequence: Synthetic peptide"
QSTTRHP

SEQ ID NO: 8587 - protein, 7 aa, Artificial Sequence
  source: /note="Description of Artificial Sequence: Synthetic peptide"
QSTVTVR

SEQ ID NO: 8588 - protein, 7 aa, Artificial Sequence
  source: /note="Description of Artificial Sequence: Synthetic peptide"
QSVHSPL

SEQ ID NO: 8589 - protein, 7 aa, Artificial Sequence
  source: /note="Description of Artificial Sequence: Synthetic peptide"
QSVKYDR

SEQ ID NO: 8590 - protein, 7 aa, Artificial Sequence
  source: /note="Description of Artificial Sequence: Synthetic peptide"
QSVMTAP

SEQ ID NO: 8591 - protein, 7 aa, Artificial Sequence
  source: /note="Description of Artificial Sequence: Synthetic peptide"
QSVNAEL

SEQ ID NO: 8592 - protein, 7 aa, Artificial Sequence
  source: /note="Description of Artificial Sequence: Synthetic peptide"
QSVPLAS

SEQ ID NO: 8593 - protein, 7 aa, Artificial Sequence
  source: /note="Description of Artificial Sequence: Synthetic peptide"
QSYEARG

SEQ ID NO: 8594 - protein, 7 aa, Artificial Sequence
  source: /note="Description of Artificial Sequence: Synthetic peptide"
QSYNGLG

SEQ ID NO: 8595 - protein, 7 aa, Artificial Sequence
  source: /note="Description of Artificial Sequence: Synthetic peptide"
QTAGRLA

SEQ ID NO: 8596 - protein, 7 aa, Artificial Sequence
  source: /note="Description of Artificial Sequence: Synthetic peptide"
QTANKPV

SEQ ID NO: 8597 - protein, 7 aa, Artificial Sequence
  source: /note="Description of Artificial Sequence: Synthetic peptide"
QTDGAKD

SEQ ID NO: 8598 - protein, 7 aa, Artificial Sequence
  source: /note="Description of Artificial Sequence: Synthetic peptide"
QTDRAYV

SEQ ID NO: 8599 - protein, 7 aa, Artificial Sequence
  source: /note="Description of Artificial Sequence: Synthetic peptide"
QTDVDDM

SEQ ID NO: 8600 - protein, 7 aa, Artificial Sequence
  source: /note="Description of Artificial Sequence: Synthetic peptide"
QTFGGPG

SEQ ID NO: 8601 - protein, 7 aa, Artificial Sequence
  source: /note="Description of Artificial Sequence: Synthetic peptide"
QTGGRSP

SEQ ID NO: 8602 - protein, 7 aa, Artificial Sequence
  source: /note="Description of Artificial Sequence: Synthetic peptide"
QTGLNQD

SEQ ID NO: 8603 - protein, 7 aa, Artificial Sequence
  source: /note="Description of Artificial Sequence: Synthetic peptide"
QTGPTRD

SEQ ID NO: 8604 - protein, 7 aa, Artificial Sequence
  source: /note="Description of Artificial Sequence: Synthetic peptide"
QTGREPM

SEQ ID NO: 8605 - protein, 7 aa, Artificial Sequence
  source: /note="Description of Artificial Sequence: Synthetic peptide"
QTGSSYS

SEQ ID NO: 8606 - protein, 7 aa, Artificial Sequence
  source: /note="Description of Artificial Sequence: Synthetic peptide"
QTIRTED

SEQ ID NO: 8607 - protein, 7 aa, Artificial Sequence
  source: /note="Description of Artificial Sequence: Synthetic peptide"
QTISKDP

SEQ ID NO: 8608 - protein, 7 aa, Artificial Sequence
  source: /note="Description of Artificial Sequence: Synthetic peptide"
QTKHGES

SEQ ID NO: 8609 - protein, 7 aa, Artificial Sequence
  source: /note="Description of Artificial Sequence: Synthetic peptide"
QTKNTHP

SEQ ID NO: 8610 - protein, 7 aa, Artificial Sequence
  source: /note="Description of Artificial Sequence: Synthetic peptide"
QTKSLIP

SEQ ID NO: 8611 - protein, 7 aa, Artificial Sequence
  source: /note="Description of Artificial Sequence: Synthetic peptide"
QTLQHAT

SEQ ID NO: 8612 - protein, 7 aa, Artificial Sequence
  source: /note="Description of Artificial Sequence: Synthetic peptide"
QTLSGMR

SEQ ID NO: 8613 - protein, 7 aa, Artificial Sequence
  source: /note="Description of Artificial Sequence: Synthetic peptide"
QTMMPVP

SEQ ID NO: 8614 - protein, 7 aa, Artificial Sequence
  source: /note="Description of Artificial Sequence: Synthetic peptide"
QTMRSAG

SEQ ID NO: 8615 - protein, 7 aa, Artificial Sequence
  source: /note="Description of Artificial Sequence: Synthetic peptide"
QTNMQSP

SEQ ID NO: 8616 - protein, 7 aa, Artificial Sequence
  source: /note="Description of Artificial Sequence: Synthetic peptide"
QTNPNMV

SEQ ID NO: 8617 - protein, 7 aa, Artificial Sequence
  source: /note="Description of Artificial Sequence: Synthetic peptide"
QTNTATK

SEQ ID NO: 8618 - protein, 7 aa, Artificial Sequence
  source: /note="Description of Artificial Sequence: Synthetic peptide"
QTPPSAA

SEQ ID NO: 8619 - protein, 7 aa, Artificial Sequence
  source: /note="Description of Artificial Sequence: Synthetic peptide"
QTPPTNR

SEQ ID NO: 8620 - protein, 7 aa, Artificial Sequence
  source: /note="Description of Artificial Sequence: Synthetic peptide"
QTPRVIQ

SEQ ID NO: 8621 - protein, 7 aa, Artificial Sequence
  source: /note="Description of Artificial Sequence: Synthetic peptide"
QTPSMTR

SEQ ID NO: 8622 - protein, 7 aa, Artificial Sequence
  source: /note="Description of Artificial Sequence: Synthetic peptide"
QTPSYLG

SEQ ID NO: 8623 - protein, 7 aa, Artificial Sequence
  source: /note="Description of Artificial Sequence: Synthetic peptide"
QTQIRVG

SEQ ID NO: 8624 - protein, 7 aa, Artificial Sequence
  source: /note="Description of Artificial Sequence: Synthetic peptide"
QTQPQSS

SEQ ID NO: 8625 - protein, 7 aa, Artificial Sequence
  source: /note="Description of Artificial Sequence: Synthetic peptide"
QTQSLYP

SEQ ID NO: 8626 - protein, 7 aa, Artificial Sequence
  source: /note="Description of Artificial Sequence: Synthetic peptide"
QTQSPVP

SEQ ID NO: 8627 - protein, 7 aa, Artificial Sequence
  source: /note="Description of Artificial Sequence: Synthetic peptide"
QTQVSYG

SEQ ID NO: 8628 - protein, 7 aa, Artificial Sequence
  source: /note="Description of Artificial Sequence: Synthetic peptide"
QTRHDLL

SEQ ID NO: 8629 - protein, 7 aa, Artificial Sequence
  source: /note="Description of Artificial Sequence: Synthetic peptide"
QTRLAQH

SEQ ID NO: 8630 - protein, 7 aa, Artificial Sequence
  source: /note="Description of Artificial Sequence: Synthetic peptide"
QTRLPAS

SEQ ID NO: 8631 - protein, 7 aa, Artificial Sequence
  source: /note="Description of Artificial Sequence: Synthetic peptide"
QTSAARV

SEQ ID NO: 8632 - protein, 7 aa, Artificial Sequence
  source: /note="Description of Artificial Sequence: Synthetic peptide"
QTSPGVM

SEQ ID NO: 8633 - protein, 7 aa, Artificial Sequence
  source: /note="Description of Artificial Sequence: Synthetic peptide"
QTSTDNA

SEQ ID NO: 8634 - protein, 7 aa, Artificial Sequence
  source: /note="Description of Artificial Sequence: Synthetic peptide"
QTSVHLK

SEQ ID NO: 8635 - protein, 7 aa, Artificial Sequence
  source: /note="Description of Artificial Sequence: Synthetic peptide"
QTTARAQ

SEQ ID NO: 8636 - protein, 7 aa, Artificial Sequence
  source: /note="Description of Artificial Sequence: Synthetic peptide"
QTVHAFG

SEQ ID NO: 8637 - protein, 7 aa, Artificial Sequence
  source: /note="Description of Artificial Sequence: Synthetic peptide"
QTVRLTS

SEQ ID NO: 8638 - protein, 7 aa, Artificial Sequence
  source: /note="Description of Artificial Sequence: Synthetic peptide"
QTVSALG

SEQ ID NO: 8639 - protein, 7 aa, Artificial Sequence
  source: /note="Description of Artificial Sequence: Synthetic peptide"
QTYDPAS

SEQ ID NO: 8640 - protein, 7 aa, Artificial Sequence
  source: /note="Description of Artificial Sequence: Synthetic peptide"
QTYHTLE

SEQ ID NO: 8641 - protein, 7 aa, Artificial Sequence
  source: /note="Description of Artificial Sequence: Synthetic peptide"
QTYPTME

SEQ ID NO: 8642 - protein, 7 aa, Artificial Sequence
  source: /note="Description of Artificial Sequence: Synthetic peptide"
QVAGMKF

SEQ ID NO: 8643 - protein, 7 aa, Artificial Sequence
  source: /note="Description of Artificial Sequence: Synthetic peptide"
QVASPYR

SEQ ID NO: 8644 - protein, 7 aa, Artificial Sequence
  source: /note="Description of Artificial Sequence: Synthetic peptide"
QVDRSPH

SEQ ID NO: 8645 - protein, 7 aa, Artificial Sequence
  source: /note="Description of Artificial Sequence: Synthetic peptide"
QVEHGQT

SEQ ID NO: 8646 - protein, 7 aa, Artificial Sequence
  source: /note="Description of Artificial Sequence: Synthetic peptide"
QVEREAW

SEQ ID NO: 8647 - protein, 7 aa, Artificial Sequence
  source: /note="Description of Artificial Sequence: Synthetic peptide"
QVGGRAF

SEQ ID NO: 8648 - protein, 7 aa, Artificial Sequence
  source: /note="Description of Artificial Sequence: Synthetic peptide"
QVGKVTL

SEQ ID NO: 8649 - protein, 7 aa, Artificial Sequence
  source: /note="Description of Artificial Sequence: Synthetic peptide"
QVGVKNG

SEQ ID NO: 8650 - protein, 7 aa, Artificial Sequence
  source: /note="Description of Artificial Sequence: Synthetic peptide"
QVLNGRE

SEQ ID NO: 8651 - protein, 7 aa, Artificial Sequence
  source: /note="Description of Artificial Sequence: Synthetic peptide"
QVMPNVS

SEQ ID NO: 8652 - protein, 7 aa, Artificial Sequence
  source: /note="Description of Artificial Sequence: Synthetic peptide"
QVPFPAD

SEQ ID NO: 8653 - protein, 7 aa, Artificial Sequence
  source: /note="Description of Artificial Sequence: Synthetic peptide"
QVPLSLE

SEQ ID NO: 8654 - protein, 7 aa, Artificial Sequence
  source: /note="Description of Artificial Sequence: Synthetic peptide"
QVPYAPA

SEQ ID NO: 8655 - protein, 7 aa, Artificial Sequence
  source: /note="Description of Artificial Sequence: Synthetic peptide"
QVQPVHI

SEQ ID NO: 8656 - protein, 7 aa, Artificial Sequence
  source: /note="Description of Artificial Sequence: Synthetic peptide"
QVRAAVT

SEQ ID NO: 8657 - protein, 7 aa, Artificial Sequence
  source: /note="Description of Artificial Sequence: Synthetic peptide"
QVRDSYS

SEQ ID NO: 8658 - protein, 7 aa, Artificial Sequence
  source: /note="Description of Artificial Sequence: Synthetic peptide"
QVREPAI

SEQ ID NO: 8659 - protein, 7 aa, Artificial Sequence
  source: /note="Description of Artificial Sequence: Synthetic peptide"
QVRESSS

SEQ ID NO: 8660 - protein, 7 aa, Artificial Sequence
  source: /note="Description of Artificial Sequence: Synthetic peptide"
QVRLEPS

SEQ ID NO: 8661 - protein, 7 aa, Artificial Sequence
  source: /note="Description of Artificial Sequence: Synthetic peptide"
QVRPGLL

SEQ ID NO: 8662 - protein, 7 aa, Artificial Sequence
  source: /note="Description of Artificial Sequence: Synthetic peptide"
QVSHRDS

SEQ ID NO: 8663 - protein, 7 aa, Artificial Sequence
  source: /note="Description of Artificial Sequence: Synthetic peptide"
QVSLGSV

SEQ ID NO: 8664 - protein, 7 aa, Artificial Sequence
  source: /note="Description of Artificial Sequence: Synthetic peptide"
QVSPSLN

SEQ ID NO: 8665 - protein, 7 aa, Artificial Sequence
  source: /note="Description of Artificial Sequence: Synthetic peptide"
QVSSPVP

SEQ ID NO: 8666 - protein, 7 aa, Artificial Sequence
  source: /note="Description of Artificial Sequence: Synthetic peptide"
QVTKSHT

SEQ ID NO: 8667 - protein, 7 aa, Artificial Sequence
  source: /note="Description of Artificial Sequence: Synthetic peptide"
QVVASLG

SEQ ID NO: 8668 - protein, 7 aa, Artificial Sequence
  source: /note="Description of Artificial Sequence: Synthetic peptide"
QVVPHQE

SEQ ID NO: 8669 - protein, 7 aa, Artificial Sequence
  source: /note="Description of Artificial Sequence: Synthetic peptide"
QVVRSSS

SEQ ID NO: 8670 - protein, 7 aa, Artificial Sequence
  source: /note="Description of Artificial Sequence: Synthetic peptide"
QVYTNQY

SEQ ID NO: 8671 - protein, 7 aa, Artificial Sequence
  source: /note="Description of Artificial Sequence: Synthetic peptide"
QWANTGE

SEQ ID NO: 8672 - protein, 7 aa, Artificial Sequence
  source: /note="Description of Artificial Sequence: Synthetic peptide"
QWEDHST

SEQ ID NO: 8673 - protein, 7 aa, Artificial Sequence
  source: /note="Description of Artificial Sequence: Synthetic peptide"
QYGDGPK

SEQ ID NO: 8674 - protein, 7 aa, Artificial Sequence
  source: /note="Description of Artificial Sequence: Synthetic peptide"
QYGQQHS

SEQ ID NO: 8675 - protein, 7 aa, Artificial Sequence
  source: /note="Description of Artificial Sequence: Synthetic peptide"
QYGSVHG

SEQ ID NO: 8676 - protein, 7 aa, Artificial Sequence
  source: /note="Description of Artificial Sequence: Synthetic peptide"
QYHASGK

SEQ ID NO: 8677 - protein, 7 aa, Artificial Sequence
  source: /note="Description of Artificial Sequence: Synthetic peptide"
QYKRAEL

SEQ ID NO: 8678 - protein, 7 aa, Artificial Sequence
  source: /note="Description of Artificial Sequence: Synthetic peptide"
QYKTDMT

SEQ ID NO: 8679 - protein, 7 aa, Artificial Sequence
  source: /note="Description of Artificial Sequence: Synthetic peptide"
QYKTGAQ

SEQ ID NO: 8680 - protein, 7 aa, Artificial Sequence
  source: /note="Description of Artificial Sequence: Synthetic peptide"
QYLATHG

SEQ ID NO: 8681 - protein, 7 aa, Artificial Sequence
  source: /note="Description of Artificial Sequence: Synthetic peptide"
QYPNSDT

SEQ ID NO: 8682 - protein, 7 aa, Artificial Sequence
  source: /note="Description of Artificial Sequence: Synthetic peptide"
QYPVSPS

SEQ ID NO: 8683 - protein, 7 aa, Artificial Sequence
  source: /note="Description of Artificial Sequence: Synthetic peptide"
QYTASNS

SEQ ID NO: 8684 - protein, 7 aa, Artificial Sequence
  source: /note="Description of Artificial Sequence: Synthetic peptide"
QYTGTQK

SEQ ID NO: 8685 - protein, 7 aa, Artificial Sequence
  source: /note="Description of Artificial Sequence: Synthetic peptide"
QYTVLTE

SEQ ID NO: 8686 - protein, 7 aa, Artificial Sequence
  source: /note="Description of Artificial Sequence: Synthetic peptide"
QYVGIGT

SEQ ID NO: 8687 - protein, 7 aa, Artificial Sequence
  source: /note="Description of Artificial Sequence: Synthetic peptide"
RAAAYGA

SEQ ID NO: 8688 - protein, 7 aa, Artificial Sequence
  source: /note="Description of Artificial Sequence: Synthetic peptide"
RAAMMNP

SEQ ID NO: 8689 - protein, 7 aa, Artificial Sequence
  source: /note="Description of Artificial Sequence: Synthetic peptide"
RAAMVAV

SEQ ID NO: 8690 - protein, 7 aa, Artificial Sequence
  source: /note="Description of Artificial Sequence: Synthetic peptide"
RAANDFP

SEQ ID NO: 8691 - protein, 7 aa, Artificial Sequence
  source: /note="Description of Artificial Sequence: Synthetic peptide"
RAAPTSS

SEQ ID NO: 8692 - protein, 7 aa, Artificial Sequence
  source: /note="Description of Artificial Sequence: Synthetic peptide"
RAATVPN

SEQ ID NO: 8693 - protein, 7 aa, Artificial Sequence
  source: /note="Description of Artificial Sequence: Synthetic peptide"
RADKGPS

SEQ ID NO: 8694 - protein, 7 aa, Artificial Sequence
  source: /note="Description of Artificial Sequence: Synthetic peptide"
RADPRPG

SEQ ID NO: 8695 - protein, 7 aa, Artificial Sequence
  source: /note="Description of Artificial Sequence: Synthetic peptide"
RADRATY

SEQ ID NO: 8696 - protein, 7 aa, Artificial Sequence
  source: /note="Description of Artificial Sequence: Synthetic peptide"
RADVPPV

SEQ ID NO: 8697 - protein, 7 aa, Artificial Sequence
  source: /note="Description of Artificial Sequence: Synthetic peptide"
RADYHHN

SEQ ID NO: 8698 - protein, 7 aa, Artificial Sequence
  source: /note="Description of Artificial Sequence: Synthetic peptide"
RAEAVWD

SEQ ID NO: 8699 - protein, 7 aa, Artificial Sequence
  source: /note="Description of Artificial Sequence: Synthetic peptide"
RAENISR

SEQ ID NO: 8700 - protein, 7 aa, Artificial Sequence
  source: /note="Description of Artificial Sequence: Synthetic peptide"
RAESLLG

SEQ ID NO: 8701 - protein, 7 aa, Artificial Sequence
  source: /note="Description of Artificial Sequence: Synthetic peptide"
RAEVLYT

SEQ ID NO: 8702 - protein, 7 aa, Artificial Sequence
  source: /note="Description of Artificial Sequence: Synthetic peptide"
RAEYQSP

SEQ ID NO: 8703 - protein, 7 aa, Artificial Sequence
  source: /note="Description of Artificial Sequence: Synthetic peptide"
RAFGQSP

SEQ ID NO: 8704 - protein, 7 aa, Artificial Sequence
  source: /note="Description of Artificial Sequence: Synthetic peptide"
RAFPNDS

SEQ ID NO: 8705 - protein, 7 aa, Artificial Sequence
  source: /note="Description of Artificial Sequence: Synthetic peptide"
RAFSQAE

SEQ ID NO: 8706 - protein, 7 aa, Artificial Sequence
  source: /note="Description of Artificial Sequence: Synthetic peptide"
RAGLSPN

SEQ ID NO: 8707 - protein, 7 aa, Artificial Sequence
  source: /note="Description of Artificial Sequence: Synthetic peptide"
RAGPVST

SEQ ID NO: 8708 - protein, 7 aa, Artificial Sequence
  source: /note="Description of Artificial Sequence: Synthetic peptide"
RAGSYES

SEQ ID NO: 8709 - protein, 7 aa, Artificial Sequence
  source: /note="Description of Artificial Sequence: Synthetic peptide"
RAGVQCI

SEQ ID NO: 8710 - protein, 7 aa, Artificial Sequence
  source: /note="Description of Artificial Sequence: Synthetic peptide"
RAHGSGA

SEQ ID NO: 8711 - protein, 7 aa, Artificial Sequence
  source: /note="Description of Artificial Sequence: Synthetic peptide"
RAIAQAV

SEQ ID NO: 8712 - protein, 7 aa, Artificial Sequence
  source: /note="Description of Artificial Sequence: Synthetic peptide"
RAIDLPK

SEQ ID NO: 8713 - protein, 7 aa, Artificial Sequence
  source: /note="Description of Artificial Sequence: Synthetic peptide"
RAIDSVP

SEQ ID NO: 8714 - protein, 7 aa, Artificial Sequence
  source: /note="Description of Artificial Sequence: Synthetic peptide"
RAIKSDP

SEQ ID NO: 8715 - protein, 7 aa, Artificial Sequence
  source: /note="Description of Artificial Sequence: Synthetic peptide"
RAIPTPG

SEQ ID NO: 8716 - protein, 7 aa, Artificial Sequence
  source: /note="Description of Artificial Sequence: Synthetic peptide"
RALDVNA

SEQ ID NO: 8717 - protein, 7 aa, Artificial Sequence
  source: /note="Description of Artificial Sequence: Synthetic peptide"
RALLNLQ

SEQ ID NO: 8718 - protein, 7 aa, Artificial Sequence
  source: /note="Description of Artificial Sequence: Synthetic peptide"
RALQTTS

SEQ ID NO: 8719 - protein, 7 aa, Artificial Sequence
  source: /note="Description of Artificial Sequence: Synthetic peptide"
RALSANV

SEQ ID NO: 8720 - protein, 7 aa, Artificial Sequence
  source: /note="Description of Artificial Sequence: Synthetic peptide"
RALSSLP

SEQ ID NO: 8721 - protein, 7 aa, Artificial Sequence
  source: /note="Description of Artificial Sequence: Synthetic peptide"
RALTDLV

SEQ ID NO: 8722 - protein, 7 aa, Artificial Sequence
  source: /note="Description of Artificial Sequence: Synthetic peptide"
RAMGNVL

SEQ ID NO: 8723 - protein, 7 aa, Artificial Sequence
  source: /note="Description of Artificial Sequence: Synthetic peptide"
RAMLDRA

SEQ ID NO: 8724 - protein, 7 aa, Artificial Sequence
  source: /note="Description of Artificial Sequence: Synthetic peptide"
RAMPGEV

SEQ ID NO: 8725 - protein, 7 aa, Artificial Sequence
  source: /note="Description of Artificial Sequence: Synthetic peptide"
RAMPPSS

SEQ ID NO: 8726 - protein, 7 aa, Artificial Sequence
  source: /note="Description of Artificial Sequence: Synthetic peptide"
RANDPPP

SEQ ID NO: 8727 - protein, 7 aa, Artificial Sequence
  source: /note="Description of Artificial Sequence: Synthetic peptide"
RANLNIP

SEQ ID NO: 8728 - protein, 7 aa, Artificial Sequence
  source: /note="Description of Artificial Sequence: Synthetic peptide"
RAPETEL

SEQ ID NO: 8729 - protein, 7 aa, Artificial Sequence
  source: /note="Description of Artificial Sequence: Synthetic peptide"
RAPPSPK

SEQ ID NO: 8730 - protein, 7 aa, Artificial Sequence
  source: /note="Description of Artificial Sequence: Synthetic peptide"
RAPQGST

SEQ ID NO: 8731 - protein, 7 aa, Artificial Sequence
  source: /note="Description of Artificial Sequence: Synthetic peptide"
RAPQGYG

SEQ ID NO: 8732 - protein, 7 aa, Artificial Sequence
  source: /note="Description of Artificial Sequence: Synthetic peptide"
RAPRPIE

SEQ ID NO: 8733 - protein, 7 aa, Artificial Sequence
  source: /note="Description of Artificial Sequence: Synthetic peptide"
RAPVSPM

SEQ ID NO: 8734 - protein, 7 aa, Artificial Sequence
  source: /note="Description of Artificial Sequence: Synthetic peptide"
RAQPSLH

SEQ ID NO: 8735 - protein, 7 aa, Artificial Sequence
  source: /note="Description of Artificial Sequence: Synthetic peptide"
RAQSPLS

SEQ ID NO: 8736 - protein, 7 aa, Artificial Sequence
  source: /note="Description of Artificial Sequence: Synthetic peptide"
RAQTTLS

SEQ ID NO: 8737 - protein, 7 aa, Artificial Sequence
  source: /note="Description of Artificial Sequence: Synthetic peptide"
RAQYSQD

SEQ ID NO: 8738 - protein, 7 aa, Artificial Sequence
  source: /note="Description of Artificial Sequence: Synthetic peptide"
RAQYTGN

SEQ ID NO: 8739 - protein, 7 aa, Artificial Sequence
  source: /note="Description of Artificial Sequence: Synthetic peptide"
RASFPPD

SEQ ID NO: 8740 - protein, 7 aa, Artificial Sequence
  source: /note="Description of Artificial Sequence: Synthetic peptide"
RASHDTN

SEQ ID NO: 8741 - protein, 7 aa, Artificial Sequence
  source: /note="Description of Artificial Sequence: Synthetic peptide"
RASLRVE

SEQ ID NO: 8742 - protein, 7 aa, Artificial Sequence
  source: /note="Description of Artificial Sequence: Synthetic peptide"
RASNRPD

SEQ ID NO: 8743 - protein, 7 aa, Artificial Sequence
  source: /note="Description of Artificial Sequence: Synthetic peptide"
RASPTTS

SEQ ID NO: 8744 - protein, 7 aa, Artificial Sequence
  source: /note="Description of Artificial Sequence: Synthetic peptide"
RASSELP

SEQ ID NO: 8745 - protein, 7 aa, Artificial Sequence
  source: /note="Description of Artificial Sequence: Synthetic peptide"
RASSSED

SEQ ID NO: 8746 - protein, 7 aa, Artificial Sequence
  source: /note="Description of Artificial Sequence: Synthetic peptide"
RASSVDM

SEQ ID NO: 8747 - protein, 7 aa, Artificial Sequence
  source: /note="Description of Artificial Sequence: Synthetic peptide"
RASTGMA

SEQ ID NO: 8748 - protein, 7 aa, Artificial Sequence
  source: /note="Description of Artificial Sequence: Synthetic peptide"
RASTHTL

SEQ ID NO: 8749 - protein, 7 aa, Artificial Sequence
  source: /note="Description of Artificial Sequence: Synthetic peptide"
RATEHSF

SEQ ID NO: 8750 - protein, 7 aa, Artificial Sequence
  source: /note="Description of Artificial Sequence: Synthetic peptide"
RATEPAF

SEQ ID NO: 8751 - protein, 7 aa, Artificial Sequence
  source: /note="Description of Artificial Sequence: Synthetic peptide"
RATLPKT

SEQ ID NO: 8752 - protein, 7 aa, Artificial Sequence
  source: /note="Description of Artificial Sequence: Synthetic peptide"
RATNDRA

SEQ ID NO: 8753 - protein, 7 aa, Artificial Sequence
  source: /note="Description of Artificial Sequence: Synthetic peptide"
RATNDST

SEQ ID NO: 8754 - protein, 7 aa, Artificial Sequence
  source: /note="Description of Artificial Sequence: Synthetic peptide"
RATNTIL

SEQ ID NO: 8755 - protein, 7 aa, Artificial Sequence
  source: /note="Description of Artificial Sequence: Synthetic peptide"
RATTSTF

SEQ ID NO: 8756 - protein, 7 aa, Artificial Sequence
  source: /note="Description of Artificial Sequence: Synthetic peptide"
RAVEDRH

SEQ ID NO: 8757 - protein, 7 aa, Artificial Sequence
  source: /note="Description of Artificial Sequence: Synthetic peptide"
RAVLNIG

SEQ ID NO: 8758 - protein, 7 aa, Artificial Sequence
  source: /note="Description of Artificial Sequence: Synthetic peptide"
RAVQPML

SEQ ID NO: 8759 - protein, 7 aa, Artificial Sequence
  source: /note="Description of Artificial Sequence: Synthetic peptide"
RAVSLQA

SEQ ID NO: 8760 - protein, 7 aa, Artificial Sequence
  source: /note="Description of Artificial Sequence: Synthetic peptide"
RAVYQTQ

SEQ ID NO: 8761 - protein, 7 aa, Artificial Sequence
  source: /note="Description of Artificial Sequence: Synthetic peptide"
RAYGPTN

SEQ ID NO: 8762 - protein, 7 aa, Artificial Sequence
  source: /note="Description of Artificial Sequence: Synthetic peptide"
RAYMTDP

SEQ ID NO: 8763 - protein, 7 aa, Artificial Sequence
  source: /note="Description of Artificial Sequence: Synthetic peptide"
RAYNAVV

SEQ ID NO: 8764 - protein, 7 aa, Artificial Sequence
  source: /note="Description of Artificial Sequence: Synthetic peptide"
RAYPVDD

SEQ ID NO: 8765 - protein, 7 aa, Artificial Sequence
  source: /note="Description of Artificial Sequence: Synthetic peptide"
RDAASSC

SEQ ID NO: 8766 - protein, 7 aa, Artificial Sequence
  source: /note="Description of Artificial Sequence: Synthetic peptide"
RDDSSLL

SEQ ID NO: 8767 - protein, 7 aa, Artificial Sequence
  source: /note="Description of Artificial Sequence: Synthetic peptide"
RDDVRTY

SEQ ID NO: 8768 - protein, 7 aa, Artificial Sequence
  source: /note="Description of Artificial Sequence: Synthetic peptide"
RDGEMDP

SEQ ID NO: 8769 - protein, 7 aa, Artificial Sequence
  source: /note="Description of Artificial Sequence: Synthetic peptide"
RDGKWVA

SEQ ID NO: 8770 - protein, 7 aa, Artificial Sequence
  source: /note="Description of Artificial Sequence: Synthetic peptide"
RDGQHTS

SEQ ID NO: 8771 - protein, 7 aa, Artificial Sequence
  source: /note="Description of Artificial Sequence: Synthetic peptide"
RDHLTVA

SEQ ID NO: 8772 - protein, 7 aa, Artificial Sequence
  source: /note="Description of Artificial Sequence: Synthetic peptide"
RDIAAKT

SEQ ID NO: 8773 - protein, 7 aa, Artificial Sequence
  source: /note="Description of Artificial Sequence: Synthetic peptide"
RDKSDHA

SEQ ID NO: 8774 - protein, 7 aa, Artificial Sequence
  source: /note="Description of Artificial Sequence: Synthetic peptide"
RDLKTQS

SEQ ID NO: 8775 - protein, 7 aa, Artificial Sequence
  source: /note="Description of Artificial Sequence: Synthetic peptide"
RDLQHLS

SEQ ID NO: 8776 - protein, 7 aa, Artificial Sequence
  source: /note="Description of Artificial Sequence: Synthetic peptide"
RDLSSES

SEQ ID NO: 8777 - protein, 7 aa, Artificial Sequence
  source: /note="Description of Artificial Sequence: Synthetic peptide"
RDNKANI

SEQ ID NO: 8778 - protein, 7 aa, Artificial Sequence
  source: /note="Description of Artificial Sequence: Synthetic peptide"
RDNSSVV

SEQ ID NO: 8779 - protein, 7 aa, Artificial Sequence
  source: /note="Description of Artificial Sequence: Synthetic peptide"
RDPNINP

SEQ ID NO: 8780 - protein, 7 aa, Artificial Sequence
  source: /note="Description of Artificial Sequence: Synthetic peptide"
RDPRAGF

SEQ ID NO: 8781 - protein, 7 aa, Artificial Sequence
  source: /note="Description of Artificial Sequence: Synthetic peptide"
RDPRAHL

SEQ ID NO: 8782 - protein, 7 aa, Artificial Sequence
  source: /note="Description of Artificial Sequence: Synthetic peptide"
RDPRGQG

SEQ ID NO: 8783 - protein, 7 aa, Artificial Sequence
  source: /note="Description of Artificial Sequence: Synthetic peptide"
RDQASKN

SEQ ID NO: 8784 - protein, 7 aa, Artificial Sequence
  source: /note="Description of Artificial Sequence: Synthetic peptide"
RDQGLES

SEQ ID NO: 8785 - protein, 7 aa, Artificial Sequence
  source: /note="Description of Artificial Sequence: Synthetic peptide"
RDQVATP

SEQ ID NO: 8786 - protein, 7 aa, Artificial Sequence
  source: /note="Description of Artificial Sequence: Synthetic peptide"
RDRDPTS

SEQ ID NO: 8787 - protein, 7 aa, Artificial Sequence
  source: /note="Description of Artificial Sequence: Synthetic peptide"
RDREPAL

SEQ ID NO: 8788 - protein, 7 aa, Artificial Sequence
  source: /note="Description of Artificial Sequence: Synthetic peptide"
RDREVSW

SEQ ID NO: 8789 - protein, 7 aa, Artificial Sequence
  source: /note="Description of Artificial Sequence: Synthetic peptide"
RDSAFAV

SEQ ID NO: 8790 - protein, 7 aa, Artificial Sequence
  source: /note="Description of Artificial Sequence: Synthetic peptide"
RDSKSNS

SEQ ID NO: 8791 - protein, 7 aa, Artificial Sequence
  source: /note="Description of Artificial Sequence: Synthetic peptide"
RDSKVSH

SEQ ID NO: 8792 - protein, 7 aa, Artificial Sequence
  source: /note="Description of Artificial Sequence: Synthetic peptide"
RDSLETQ

SEQ ID NO: 8793 - protein, 7 aa, Artificial Sequence
  source: /note="Description of Artificial Sequence: Synthetic peptide"
RDSMLVA

SEQ ID NO: 8794 - protein, 7 aa, Artificial Sequence
  source: /note="Description of Artificial Sequence: Synthetic peptide"
RDSMPAA

SEQ ID NO: 8795 - protein, 7 aa, Artificial Sequence
  source: /note="Description of Artificial Sequence: Synthetic peptide"
RDSRMLS

SEQ ID NO: 8796 - protein, 7 aa, Artificial Sequence
  source: /note="Description of Artificial Sequence: Synthetic peptide"
RDSSHFP

SEQ ID NO: 8797 - protein, 7 aa, Artificial Sequence
  source: /note="Description of Artificial Sequence: Synthetic peptide"
RDSSLYL

SEQ ID NO: 8798 - protein, 7 aa, Artificial Sequence
  source: /note="Description of Artificial Sequence: Synthetic peptide"
RDSSYTD

SEQ ID NO: 8799 - protein, 7 aa, Artificial Sequence
  source: /note="Description of Artificial Sequence: Synthetic peptide"
RDTIISA

SEQ ID NO: 8800 - protein, 7 aa, Artificial Sequence
  source: /note="Description of Artificial Sequence: Synthetic peptide"
RDTSLPV

SEQ ID NO: 8801 - protein, 7 aa, Artificial Sequence
  source: /note="Description of Artificial Sequence: Synthetic peptide"
RDTSSIG

SEQ ID NO: 8802 - protein, 7 aa, Artificial Sequence
  source: /note="Description of Artificial Sequence: Synthetic peptide"
RDVAARS

SEQ ID NO: 8803 - protein, 7 aa, Artificial Sequence
  source: /note="Description of Artificial Sequence: Synthetic peptide"
RDVAMQD

SEQ ID NO: 8804 - protein, 7 aa, Artificial Sequence
  source: /note="Description of Artificial Sequence: Synthetic peptide"
RDVPQAV

SEQ ID NO: 8805 - protein, 7 aa, Artificial Sequence
  source: /note="Description of Artificial Sequence: Synthetic peptide"
RDVSGPV

SEQ ID NO: 8806 - protein, 7 aa, Artificial Sequence
  source: /note="Description of Artificial Sequence: Synthetic peptide"
RDVSIPS

SEQ ID NO: 8807 - protein, 7 aa, Artificial Sequence
  source: /note="Description of Artificial Sequence: Synthetic peptide"
RDVSRLP

SEQ ID NO: 8808 - protein, 7 aa, Artificial Sequence
  source: /note="Description of Artificial Sequence: Synthetic peptide"
RDVTRLP

SEQ ID NO: 8809 - protein, 7 aa, Artificial Sequence
  source: /note="Description of Artificial Sequence: Synthetic peptide"
REAAFAD

SEQ ID NO: 8810 - protein, 7 aa, Artificial Sequence
  source: /note="Description of Artificial Sequence: Synthetic peptide"
REAGGAS

SEQ ID NO: 8811 - protein, 7 aa, Artificial Sequence
  source: /note="Description of Artificial Sequence: Synthetic peptide"
REAGGLA

SEQ ID NO: 8812 - protein, 7 aa, Artificial Sequence
  source: /note="Description of Artificial Sequence: Synthetic peptide"
REAKPAW

SEQ ID NO: 8813 - protein, 7 aa, Artificial Sequence
  source: /note="Description of Artificial Sequence: Synthetic peptide"
REAVTKA

SEQ ID NO: 8814 - protein, 7 aa, Artificial Sequence
  source: /note="Description of Artificial Sequence: Synthetic peptide"
REAYETP

SEQ ID NO: 8815 - protein, 7 aa, Artificial Sequence
  source: /note="Description of Artificial Sequence: Synthetic peptide"
REDNSND

SEQ ID NO: 8816 - protein, 7 aa, Artificial Sequence
  source: /note="Description of Artificial Sequence: Synthetic peptide"
REGGQSR

SEQ ID NO: 8817 - protein, 7 aa, Artificial Sequence
  source: /note="Description of Artificial Sequence: Synthetic peptide"
REGLYSH

SEQ ID NO: 8818 - protein, 7 aa, Artificial Sequence
  source: /note="Description of Artificial Sequence: Synthetic peptide"
REIGCTG

SEQ ID NO: 8819 - protein, 7 aa, Artificial Sequence
  source: /note="Description of Artificial Sequence: Synthetic peptide"
REKTDRF

SEQ ID NO: 8820 - protein, 7 aa, Artificial Sequence
  source: /note="Description of Artificial Sequence: Synthetic peptide"
RELEGFT

SEQ ID NO: 8821 - protein, 7 aa, Artificial Sequence
  source: /note="Description of Artificial Sequence: Synthetic peptide"
RELSPMY

SEQ ID NO: 8822 - protein, 7 aa, Artificial Sequence
  source: /note="Description of Artificial Sequence: Synthetic peptide"
RELSYAS

SEQ ID NO: 8823 - protein, 7 aa, Artificial Sequence
  source: /note="Description of Artificial Sequence: Synthetic peptide"
REMLPSS

SEQ ID NO: 8824 - protein, 7 aa, Artificial Sequence
  source: /note="Description of Artificial Sequence: Synthetic peptide"
RENGLSL

SEQ ID NO: 8825 - protein, 7 aa, Artificial Sequence
  source: /note="Description of Artificial Sequence: Synthetic peptide"
RENLAAG

SEQ ID NO: 8826 - protein, 7 aa, Artificial Sequence
  source: /note="Description of Artificial Sequence: Synthetic peptide"
RENNTVK

SEQ ID NO: 8827 - protein, 7 aa, Artificial Sequence
  source: /note="Description of Artificial Sequence: Synthetic peptide"
REPHTSN

SEQ ID NO: 8828 - protein, 7 aa, Artificial Sequence
  source: /note="Description of Artificial Sequence: Synthetic peptide"
REPPTLS

SEQ ID NO: 8829 - protein, 7 aa, Artificial Sequence
  source: /note="Description of Artificial Sequence: Synthetic peptide"
REQFRNL

SEQ ID NO: 8830 - protein, 7 aa, Artificial Sequence
  source: /note="Description of Artificial Sequence: Synthetic peptide"
RERSALT

SEQ ID NO: 8831 - protein, 7 aa, Artificial Sequence
  source: /note="Description of Artificial Sequence: Synthetic peptide"
RERSPMP

SEQ ID NO: 8832 - protein, 7 aa, Artificial Sequence
  source: /note="Description of Artificial Sequence: Synthetic peptide"
RESCPDA

SEQ ID NO: 8833 - protein, 7 aa, Artificial Sequence
  source: /note="Description of Artificial Sequence: Synthetic peptide"
RESHKGP

SEQ ID NO: 8834 - protein, 7 aa, Artificial Sequence
  source: /note="Description of Artificial Sequence: Synthetic peptide"
RESLNNM

SEQ ID NO: 8835 - protein, 7 aa, Artificial Sequence
  source: /note="Description of Artificial Sequence: Synthetic peptide"
RESTTHG

SEQ ID NO: 8836 - protein, 7 aa, Artificial Sequence
  source: /note="Description of Artificial Sequence: Synthetic peptide"
RESVSIN

SEQ ID NO: 8837 - protein, 7 aa, Artificial Sequence
  source: /note="Description of Artificial Sequence: Synthetic peptide"
RESYESG

SEQ ID NO: 8838 - protein, 7 aa, Artificial Sequence
  source: /note="Description of Artificial Sequence: Synthetic peptide"
RETLGSP

SEQ ID NO: 8839 - protein, 7 aa, Artificial Sequence
  source: /note="Description of Artificial Sequence: Synthetic peptide"
RETMAST

SEQ ID NO: 8840 - protein, 7 aa, Artificial Sequence
  source: /note="Description of Artificial Sequence: Synthetic peptide"
RETPNIP

SEQ ID NO: 8841 - protein, 7 aa, Artificial Sequence
  source: /note="Description of Artificial Sequence: Synthetic peptide"
RETSSSQ

SEQ ID NO: 8842 - protein, 7 aa, Artificial Sequence
  source: /note="Description of Artificial Sequence: Synthetic peptide"
RETVRNV

SEQ ID NO: 8843 - protein, 7 aa, Artificial Sequence
  source: /note="Description of Artificial Sequence: Synthetic peptide"
REVLSTC

SEQ ID NO: 8844 - protein, 7 aa, Artificial Sequence
  source: /note="Description of Artificial Sequence: Synthetic peptide"
REVSASP

SEQ ID NO: 8845 - protein, 7 aa, Artificial Sequence
  source: /note="Description of Artificial Sequence: Synthetic peptide"
REVSFDW

SEQ ID NO: 8846 - protein, 7 aa, Artificial Sequence
  source: /note="Description of Artificial Sequence: Synthetic peptide"
REYPSGS

SEQ ID NO: 8847 - protein, 7 aa, Artificial Sequence
  source: /note="Description of Artificial Sequence: Synthetic peptide"
RFAETRP

SEQ ID NO: 8848 - protein, 7 aa, Artificial Sequence
  source: /note="Description of Artificial Sequence: Synthetic peptide"
RFAGAGV

SEQ ID NO: 8849 - protein, 7 aa, Artificial Sequence
  source: /note="Description of Artificial Sequence: Synthetic peptide"
RFAGSLI

SEQ ID NO: 8850 - protein, 7 aa, Artificial Sequence
  source: /note="Description of Artificial Sequence: Synthetic peptide"
RFANSGV

SEQ ID NO: 8851 - protein, 7 aa, Artificial Sequence
  source: /note="Description of Artificial Sequence: Synthetic peptide"
RFELAHN

SEQ ID NO: 8852 - protein, 7 aa, Artificial Sequence
  source: /note="Description of Artificial Sequence: Synthetic peptide"
RFESSVP

SEQ ID NO: 8853 - protein, 7 aa, Artificial Sequence
  source: /note="Description of Artificial Sequence: Synthetic peptide"
RFHAATS

SEQ ID NO: 8854 - protein, 7 aa, Artificial Sequence
  source: /note="Description of Artificial Sequence: Synthetic peptide"
RFKEMPM

SEQ ID NO: 8855 - protein, 7 aa, Artificial Sequence
  source: /note="Description of Artificial Sequence: Synthetic peptide"
RFKTTGE

SEQ ID NO: 8856 - protein, 7 aa, Artificial Sequence
  source: /note="Description of Artificial Sequence: Synthetic peptide"
RFPQPDP

SEQ ID NO: 8857 - protein, 7 aa, Artificial Sequence
  source: /note="Description of Artificial Sequence: Synthetic peptide"
RFPVDGV

SEQ ID NO: 8858 - protein, 7 aa, Artificial Sequence
  source: /note="Description of Artificial Sequence: Synthetic peptide"
RFSDSRM

SEQ ID NO: 8859 - protein, 7 aa, Artificial Sequence
  source: /note="Description of Artificial Sequence: Synthetic peptide"
RFSGMVE

SEQ ID NO: 8860 - protein, 7 aa, Artificial Sequence
  source: /note="Description of Artificial Sequence: Synthetic peptide"
RFSQSPA

SEQ ID NO: 8861 - protein, 7 aa, Artificial Sequence
  source: /note="Description of Artificial Sequence: Synthetic peptide"
RFSTGPS

SEQ ID NO: 8862 - protein, 7 aa, Artificial Sequence
  source: /note="Description of Artificial Sequence: Synthetic peptide"
RFSTQQS

SEQ ID NO: 8863 - protein, 7 aa, Artificial Sequence
  source: /note="Description of Artificial Sequence: Synthetic peptide"
RFVPDRP

SEQ ID NO: 8864 - protein, 7 aa, Artificial Sequence
  source: /note="Description of Artificial Sequence: Synthetic peptide"
RGAAPVT

SEQ ID NO: 8865 - protein, 7 aa, Artificial Sequence
  source: /note="Description of Artificial Sequence: Synthetic peptide"
RGAELGG

SEQ ID NO: 8866 - protein, 7 aa, Artificial Sequence
  source: /note="Description of Artificial Sequence: Synthetic peptide"
RGAGDAH

SEQ ID NO: 8867 - protein, 7 aa, Artificial Sequence
  source: /note="Description of Artificial Sequence: Synthetic peptide"
RGAGPST

SEQ ID NO: 8868 - protein, 7 aa, Artificial Sequence
  source: /note="Description of Artificial Sequence: Synthetic peptide"
RGAIATS

SEQ ID NO: 8869 - protein, 7 aa, Artificial Sequence
  source: /note="Description of Artificial Sequence: Synthetic peptide"
RGAIGNG

SEQ ID NO: 8870 - protein, 7 aa, Artificial Sequence
  source: /note="Description of Artificial Sequence: Synthetic peptide"
RGAIPLP

SEQ ID NO: 8871 - protein, 7 aa, Artificial Sequence
  source: /note="Description of Artificial Sequence: Synthetic peptide"
RGATVAP

SEQ ID NO: 8872 - protein, 7 aa, Artificial Sequence
  source: /note="Description of Artificial Sequence: Synthetic peptide"
RGDGVSL

SEQ ID NO: 8873 - protein, 7 aa, Artificial Sequence
  source: /note="Description of Artificial Sequence: Synthetic peptide"
RGDPGLG

SEQ ID NO: 8874 - protein, 7 aa, Artificial Sequence
  source: /note="Description of Artificial Sequence: Synthetic peptide"
RGENSNP

SEQ ID NO: 8875 - protein, 7 aa, Artificial Sequence
  source: /note="Description of Artificial Sequence: Synthetic peptide"
RGERSVF

SEQ ID NO: 8876 - protein, 7 aa, Artificial Sequence
  source: /note="Description of Artificial Sequence: Synthetic peptide"
RGESAST

SEQ ID NO: 8877 - protein, 7 aa, Artificial Sequence
  source: /note="Description of Artificial Sequence: Synthetic peptide"
RGGGLSM

SEQ ID NO: 8878 - protein, 7 aa, Artificial Sequence
  source: /note="Description of Artificial Sequence: Synthetic peptide"
RGGTMTI

SEQ ID NO: 8879 - protein, 7 aa, Artificial Sequence
  source: /note="Description of Artificial Sequence: Synthetic peptide"
RGGTNVE

SEQ ID NO: 8880 - protein, 7 aa, Artificial Sequence
  source: /note="Description of Artificial Sequence: Synthetic peptide"
RGHHDNE

SEQ ID NO: 8881 - protein, 7 aa, Artificial Sequence
  source: /note="Description of Artificial Sequence: Synthetic peptide"
RGHLSDP

SEQ ID NO: 8882 - protein, 7 aa, Artificial Sequence
  source: /note="Description of Artificial Sequence: Synthetic peptide"
RGIELRG

SEQ ID NO: 8883 - protein, 7 aa, Artificial Sequence
  source: /note="Description of Artificial Sequence: Synthetic peptide"
RGIELTV

SEQ ID NO: 8884 - protein, 7 aa, Artificial Sequence
  source: /note="Description of Artificial Sequence: Synthetic peptide"
RGIPAIA

SEQ ID NO: 8885 - protein, 7 aa, Artificial Sequence
  source: /note="Description of Artificial Sequence: Synthetic peptide"
RGKEPFP

SEQ ID NO: 8886 - protein, 7 aa, Artificial Sequence
  source: /note="Description of Artificial Sequence: Synthetic peptide"
RGLGNGT

SEQ ID NO: 8887 - protein, 7 aa, Artificial Sequence
  source: /note="Description of Artificial Sequence: Synthetic peptide"
RGMAVPG

SEQ ID NO: 8888 - protein, 7 aa, Artificial Sequence
  source: /note="Description of Artificial Sequence: Synthetic peptide"
RGNEWSL

SEQ ID NO: 8889 - protein, 7 aa, Artificial Sequence
  source: /note="Description of Artificial Sequence: Synthetic peptide"
RGPATAS

SEQ ID NO: 8890 - protein, 7 aa, Artificial Sequence
  source: /note="Description of Artificial Sequence: Synthetic peptide"
RGPDTGA

SEQ ID NO: 8891 - protein, 7 aa, Artificial Sequence
  source: /note="Description of Artificial Sequence: Synthetic peptide"
RGPGEPN

SEQ ID NO: 8892 - protein, 7 aa, Artificial Sequence
  source: /note="Description of Artificial Sequence: Synthetic peptide"
RGPLTSE

SEQ ID NO: 8893 - protein, 7 aa, Artificial Sequence
  source: /note="Description of Artificial Sequence: Synthetic peptide"
RGPPPAT

SEQ ID NO: 8894 - protein, 7 aa, Artificial Sequence
  source: /note="Description of Artificial Sequence: Synthetic peptide"
RGPSTSD

SEQ ID NO: 8895 - protein, 7 aa, Artificial Sequence
  source: /note="Description of Artificial Sequence: Synthetic peptide"
RGPVTRD

SEQ ID NO: 8896 - protein, 7 aa, Artificial Sequence
  source: /note="Description of Artificial Sequence: Synthetic peptide"
RGQHNLS

SEQ ID NO: 8897 - protein, 7 aa, Artificial Sequence
  source: /note="Description of Artificial Sequence: Synthetic peptide"
RGQTIRE

SEQ ID NO: 8898 - protein, 7 aa, Artificial Sequence
  source: /note="Description of Artificial Sequence: Synthetic peptide"
RGSAGVA

SEQ ID NO: 8899 - protein, 7 aa, Artificial Sequence
  source: /note="Description of Artificial Sequence: Synthetic peptide"
RGSDASA

SEQ ID NO: 8900 - protein, 7 aa, Artificial Sequence
  source: /note="Description of Artificial Sequence: Synthetic peptide"
RGSGTLT

SEQ ID NO: 8901 - protein, 7 aa, Artificial Sequence
  source: /note="Description of Artificial Sequence: Synthetic peptide"
RGSMLGD

SEQ ID NO: 8902 - protein, 7 aa, Artificial Sequence
  source: /note="Description of Artificial Sequence: Synthetic peptide"
RGSNASG

SEQ ID NO: 8903 - protein, 7 aa, Artificial Sequence
  source: /note="Description of Artificial Sequence: Synthetic peptide"
RGSPAAT

SEQ ID NO: 8904 - protein, 7 aa, Artificial Sequence
  source: /note="Description of Artificial Sequence: Synthetic peptide"
RGSPQSS

SEQ ID NO: 8905 - protein, 7 aa, Artificial Sequence
  source: /note="Description of Artificial Sequence: Synthetic peptide"
RGSQTGN

SEQ ID NO: 8906 - protein, 7 aa, Artificial Sequence
  source: /note="Description of Artificial Sequence: Synthetic peptide"
RGSQTSF

SEQ ID NO: 8907 - protein, 7 aa, Artificial Sequence
  source: /note="Description of Artificial Sequence: Synthetic peptide"
RGSSTIE

SEQ ID NO: 8908 - protein, 7 aa, Artificial Sequence
  source: /note="Description of Artificial Sequence: Synthetic peptide"
RGSTANA

SEQ ID NO: 8909 - protein, 7 aa, Artificial Sequence
  source: /note="Description of Artificial Sequence: Synthetic peptide"
RGSTVMF

SEQ ID NO: 8910 - protein, 7 aa, Artificial Sequence
  source: /note="Description of Artificial Sequence: Synthetic peptide"
RGTAHLL

SEQ ID NO: 8911 - protein, 7 aa, Artificial Sequence
  source: /note="Description of Artificial Sequence: Synthetic peptide"
RGTESPS

SEQ ID NO: 8912 - protein, 7 aa, Artificial Sequence
  source: /note="Description of Artificial Sequence: Synthetic peptide"
RGTGNLN

SEQ ID NO: 8913 - protein, 7 aa, Artificial Sequence
  source: /note="Description of Artificial Sequence: Synthetic peptide"
RGTGTAW

SEQ ID NO: 8914 - protein, 7 aa, Artificial Sequence
  source: /note="Description of Artificial Sequence: Synthetic peptide"
RGTMMAA

SEQ ID NO: 8915 - protein, 7 aa, Artificial Sequence
  source: /note="Description of Artificial Sequence: Synthetic peptide"
RGTNTLQ

SEQ ID NO: 8916 - protein, 7 aa, Artificial Sequence
  source: /note="Description of Artificial Sequence: Synthetic peptide"
RGVAVPP

SEQ ID NO: 8917 - protein, 7 aa, Artificial Sequence
  source: /note="Description of Artificial Sequence: Synthetic peptide"
RGVHSPD

SEQ ID NO: 8918 - protein, 7 aa, Artificial Sequence
  source: /note="Description of Artificial Sequence: Synthetic peptide"
RGVMYGD

SEQ ID NO: 8919 - protein, 7 aa, Artificial Sequence
  source: /note="Description of Artificial Sequence: Synthetic peptide"
RHAGQDN

SEQ ID NO: 8920 - protein, 7 aa, Artificial Sequence
  source: /note="Description of Artificial Sequence: Synthetic peptide"
RHAPVAS

SEQ ID NO: 8921 - protein, 7 aa, Artificial Sequence
  source: /note="Description of Artificial Sequence: Synthetic peptide"
RHAVSNF

SEQ ID NO: 8922 - protein, 7 aa, Artificial Sequence
  source: /note="Description of Artificial Sequence: Synthetic peptide"
RHDRMDN

SEQ ID NO: 8923 - protein, 7 aa, Artificial Sequence
  source: /note="Description of Artificial Sequence: Synthetic peptide"
RHELHST

SEQ ID NO: 8924 - protein, 7 aa, Artificial Sequence
  source: /note="Description of Artificial Sequence: Synthetic peptide"
RHENIRD

SEQ ID NO: 8925 - protein, 7 aa, Artificial Sequence
  source: /note="Description of Artificial Sequence: Synthetic peptide"
RHERPMA

SEQ ID NO: 8926 - protein, 7 aa, Artificial Sequence
  source: /note="Description of Artificial Sequence: Synthetic peptide"
RHGSSMT

SEQ ID NO: 8927 - protein, 7 aa, Artificial Sequence
  source: /note="Description of Artificial Sequence: Synthetic peptide"
RHGTHPS

SEQ ID NO: 8928 - protein, 7 aa, Artificial Sequence
  source: /note="Description of Artificial Sequence: Synthetic peptide"
RHHSAPN

SEQ ID NO: 8929 - protein, 7 aa, Artificial Sequence
  source: /note="Description of Artificial Sequence: Synthetic peptide"
RHLGSLP

SEQ ID NO: 8930 - protein, 7 aa, Artificial Sequence
  source: /note="Description of Artificial Sequence: Synthetic peptide"
RHPAAHA

SEQ ID NO: 8931 - protein, 7 aa, Artificial Sequence
  source: /note="Description of Artificial Sequence: Synthetic peptide"
RHPATIS

SEQ ID NO: 8932 - protein, 7 aa, Artificial Sequence
  source: /note="Description of Artificial Sequence: Synthetic peptide"
RHPMLTG

SEQ ID NO: 8933 - protein, 7 aa, Artificial Sequence
  source: /note="Description of Artificial Sequence: Synthetic peptide"
RHPPNSF

SEQ ID NO: 8934 - protein, 7 aa, Artificial Sequence
  source: /note="Description of Artificial Sequence: Synthetic peptide"
RHPSTPN

SEQ ID NO: 8935 - protein, 7 aa, Artificial Sequence
  source: /note="Description of Artificial Sequence: Synthetic peptide"
RHPVTEP

SEQ ID NO: 8936 - protein, 7 aa, Artificial Sequence
  source: /note="Description of Artificial Sequence: Synthetic peptide"
RHQTIIA

SEQ ID NO: 8937 - protein, 7 aa, Artificial Sequence
  source: /note="Description of Artificial Sequence: Synthetic peptide"
RHRPAPE

SEQ ID NO: 8938 - protein, 7 aa, Artificial Sequence
  source: /note="Description of Artificial Sequence: Synthetic peptide"
RHSEVTF

SEQ ID NO: 8939 - protein, 7 aa, Artificial Sequence
  source: /note="Description of Artificial Sequence: Synthetic peptide"
RHSHTIS

SEQ ID NO: 8940 - protein, 7 aa, Artificial Sequence
  source: /note="Description of Artificial Sequence: Synthetic peptide"
RHSLSLD

SEQ ID NO: 8941 - protein, 7 aa, Artificial Sequence
  source: /note="Description of Artificial Sequence: Synthetic peptide"
RHSNQTL

SEQ ID NO: 8942 - protein, 7 aa, Artificial Sequence
  source: /note="Description of Artificial Sequence: Synthetic peptide"
RHSPLTG

SEQ ID NO: 8943 - protein, 7 aa, Artificial Sequence
  source: /note="Description of Artificial Sequence: Synthetic peptide"
RHSQGPF

SEQ ID NO: 8944 - protein, 7 aa, Artificial Sequence
  source: /note="Description of Artificial Sequence: Synthetic peptide"
RHTMETS

SEQ ID NO: 8945 - protein, 7 aa, Artificial Sequence
  source: /note="Description of Artificial Sequence: Synthetic peptide"
RHTPDQG

SEQ ID NO: 8946 - protein, 7 aa, Artificial Sequence
  source: /note="Description of Artificial Sequence: Synthetic peptide"
RIAPTGN

SEQ ID NO: 8947 - protein, 7 aa, Artificial Sequence
  source: /note="Description of Artificial Sequence: Synthetic peptide"
RIDAELE

SEQ ID NO: 8948 - protein, 7 aa, Artificial Sequence
  source: /note="Description of Artificial Sequence: Synthetic peptide"
RIDGILS

SEQ ID NO: 8949 - protein, 7 aa, Artificial Sequence
  source: /note="Description of Artificial Sequence: Synthetic peptide"
RIENEVV

SEQ ID NO: 8950 - protein, 7 aa, Artificial Sequence
  source: /note="Description of Artificial Sequence: Synthetic peptide"
RIGDHIR

SEQ ID NO: 8951 - protein, 7 aa, Artificial Sequence
  source: /note="Description of Artificial Sequence: Synthetic peptide"
RIGKNDS

SEQ ID NO: 8952 - protein, 7 aa, Artificial Sequence
  source: /note="Description of Artificial Sequence: Synthetic peptide"
RIGQNLA

SEQ ID NO: 8953 - protein, 7 aa, Artificial Sequence
  source: /note="Description of Artificial Sequence: Synthetic peptide"
RIGQTFA

SEQ ID NO: 8954 - protein, 7 aa, Artificial Sequence
  source: /note="Description of Artificial Sequence: Synthetic peptide"
RIGSGTG

SEQ ID NO: 8955 - protein, 7 aa, Artificial Sequence
  source: /note="Description of Artificial Sequence: Synthetic peptide"
RIGWTID

SEQ ID NO: 8956 - protein, 7 aa, Artificial Sequence
  source: /note="Description of Artificial Sequence: Synthetic peptide"
RIHYEGM

SEQ ID NO: 8957 - protein, 7 aa, Artificial Sequence
  source: /note="Description of Artificial Sequence: Synthetic peptide"
RINIAET

SEQ ID NO: 8958 - protein, 7 aa, Artificial Sequence
  source: /note="Description of Artificial Sequence: Synthetic peptide"
RIPALSG

SEQ ID NO: 8959 - protein, 7 aa, Artificial Sequence
  source: /note="Description of Artificial Sequence: Synthetic peptide"
RIPTSPP

SEQ ID NO: 8960 - protein, 7 aa, Artificial Sequence
  source: /note="Description of Artificial Sequence: Synthetic peptide"
RIPVRVD

SEQ ID NO: 8961 - protein, 7 aa, Artificial Sequence
  source: /note="Description of Artificial Sequence: Synthetic peptide"
RIRYPEG

SEQ ID NO: 8962 - protein, 7 aa, Artificial Sequence
  source: /note="Description of Artificial Sequence: Synthetic peptide"
RISALQP

SEQ ID NO: 8963 - protein, 7 aa, Artificial Sequence
  source: /note="Description of Artificial Sequence: Synthetic peptide"
RISDYPP

SEQ ID NO: 8964 - protein, 7 aa, Artificial Sequence
  source: /note="Description of Artificial Sequence: Synthetic peptide"
RISGHAS

SEQ ID NO: 8965 - protein, 7 aa, Artificial Sequence
  source: /note="Description of Artificial Sequence: Synthetic peptide"
RISPTPI

SEQ ID NO: 8966 - protein, 7 aa, Artificial Sequence
  source: /note="Description of Artificial Sequence: Synthetic peptide"
RISSGID

SEQ ID NO: 8967 - protein, 7 aa, Artificial Sequence
  source: /note="Description of Artificial Sequence: Synthetic peptide"
RISSSPD

SEQ ID NO: 8968 - protein, 7 aa, Artificial Sequence
  source: /note="Description of Artificial Sequence: Synthetic peptide"
RIYDQSI

SEQ ID NO: 8969 - protein, 7 aa, Artificial Sequence
  source: /note="Description of Artificial Sequence: Synthetic peptide"
RIYSPDG

SEQ ID NO: 8970 - protein, 7 aa, Artificial Sequence
  source: /note="Description of Artificial Sequence: Synthetic peptide"
RIYTTSP

SEQ ID NO: 8971 - protein, 7 aa, Artificial Sequence
  source: /note="Description of Artificial Sequence: Synthetic peptide"
RKDDTTW

SEQ ID NO: 8972 - protein, 7 aa, Artificial Sequence
  source: /note="Description of Artificial Sequence: Synthetic peptide"
RKDLSWD

SEQ ID NO: 8973 - protein, 7 aa, Artificial Sequence
  source: /note="Description of Artificial Sequence: Synthetic peptide"
RKDRSPE

SEQ ID NO: 8974 - protein, 7 aa, Artificial Sequence
  source: /note="Description of Artificial Sequence: Synthetic peptide"
RKDTPMH

SEQ ID NO: 8975 - protein, 7 aa, Artificial Sequence
  source: /note="Description of Artificial Sequence: Synthetic peptide"
RKDTVPN

SEQ ID NO: 8976 - protein, 7 aa, Artificial Sequence
  source: /note="Description of Artificial Sequence: Synthetic peptide"
RKGLDDA

SEQ ID NO: 8977 - protein, 7 aa, Artificial Sequence
  source: /note="Description of Artificial Sequence: Synthetic peptide"
RKLPLVD

SEQ ID NO: 8978 - protein, 7 aa, Artificial Sequence
  source: /note="Description of Artificial Sequence: Synthetic peptide"
RKMNQDQ

SEQ ID NO: 8979 - protein, 7 aa, Artificial Sequence
  source: /note="Description of Artificial Sequence: Synthetic peptide"
RKNYQLD

SEQ ID NO: 8980 - protein, 7 aa, Artificial Sequence
  source: /note="Description of Artificial Sequence: Synthetic peptide"
RKPLTAP

SEQ ID NO: 8981 - protein, 7 aa, Artificial Sequence
  source: /note="Description of Artificial Sequence: Synthetic peptide"
RKSPQEA

SEQ ID NO: 8982 - protein, 7 aa, Artificial Sequence
  source: /note="Description of Artificial Sequence: Synthetic peptide"
RKSTLDT

SEQ ID NO: 8983 - protein, 7 aa, Artificial Sequence
  source: /note="Description of Artificial Sequence: Synthetic peptide"
RKVESRR

SEQ ID NO: 8984 - protein, 7 aa, Artificial Sequence
  source: /note="Description of Artificial Sequence: Synthetic peptide"
RKVTPDT

SEQ ID NO: 8985 - protein, 7 aa, Artificial Sequence
  source: /note="Description of Artificial Sequence: Synthetic peptide"
RLAAETL

SEQ ID NO: 8986 - protein, 7 aa, Artificial Sequence
  source: /note="Description of Artificial Sequence: Synthetic peptide"
RLAANHL

SEQ ID NO: 8987 - protein, 7 aa, Artificial Sequence
  source: /note="Description of Artificial Sequence: Synthetic peptide"
RLAETSH

SEQ ID NO: 8988 - protein, 7 aa, Artificial Sequence
  source: /note="Description of Artificial Sequence: Synthetic peptide"
RLALESN

SEQ ID NO: 8989 - protein, 7 aa, Artificial Sequence
  source: /note="Description of Artificial Sequence: Synthetic peptide"
RLAMQAA

SEQ ID NO: 8990 - protein, 7 aa, Artificial Sequence
  source: /note="Description of Artificial Sequence: Synthetic peptide"
RLAQINS

SEQ ID NO: 8991 - protein, 7 aa, Artificial Sequence
  source: /note="Description of Artificial Sequence: Synthetic peptide"
RLATEDP

SEQ ID NO: 8992 - protein, 7 aa, Artificial Sequence
  source: /note="Description of Artificial Sequence: Synthetic peptide"
RLDANSR

SEQ ID NO: 8993 - protein, 7 aa, Artificial Sequence
  source: /note="Description of Artificial Sequence: Synthetic peptide"
RLDDVGL

SEQ ID NO: 8994 - protein, 7 aa, Artificial Sequence
  source: /note="Description of Artificial Sequence: Synthetic peptide"
RLDFDTP

SEQ ID NO: 8995 - protein, 7 aa, Artificial Sequence
  source: /note="Description of Artificial Sequence: Synthetic peptide"
RLDMRIE

SEQ ID NO: 8996 - protein, 7 aa, Artificial Sequence
  source: /note="Description of Artificial Sequence: Synthetic peptide"
RLDPGEP

SEQ ID NO: 8997 - protein, 7 aa, Artificial Sequence
  source: /note="Description of Artificial Sequence: Synthetic peptide"
RLDPHSS

SEQ ID NO: 8998 - protein, 7 aa, Artificial Sequence
  source: /note="Description of Artificial Sequence: Synthetic peptide"
RLDSLAL

SEQ ID NO: 8999 - protein, 7 aa, Artificial Sequence
  source: /note="Description of Artificial Sequence: Synthetic peptide"
RLDSMFS

SEQ ID NO: 9000 - protein, 7 aa, Artificial Sequence
  source: /note="Description of Artificial Sequence: Synthetic peptide"
RLDTTMQ

SEQ ID NO: 9001 - protein, 7 aa, Artificial Sequence
  source: /note="Description of Artificial Sequence: Synthetic peptide"
RLDTVSS

SEQ ID NO: 9002 - protein, 7 aa, Artificial Sequence
  source: /note="Description of Artificial Sequence: Synthetic peptide"
RLEAQVA

SEQ ID NO: 9003 - protein, 7 aa, Artificial Sequence
  source: /note="Description of Artificial Sequence: Synthetic peptide"
RLEPMQN

SEQ ID NO: 9004 - protein, 7 aa, Artificial Sequence
  source: /note="Description of Artificial Sequence: Synthetic peptide"
RLESSRP

SEQ ID NO: 9005 - protein, 7 aa, Artificial Sequence
  source: /note="Description of Artificial Sequence: Synthetic peptide"
RLFGDDY

SEQ ID NO: 9006 - protein, 7 aa, Artificial Sequence
  source: /note="Description of Artificial Sequence: Synthetic peptide"
RLGDGAD

SEQ ID NO: 9007 - protein, 7 aa, Artificial Sequence
  source: /note="Description of Artificial Sequence: Synthetic peptide"
RLGDVWA

SEQ ID NO: 9008 - protein, 7 aa, Artificial Sequence
  source: /note="Description of Artificial Sequence: Synthetic peptide"
RLGMVSE

SEQ ID NO: 9009 - protein, 7 aa, Artificial Sequence
  source: /note="Description of Artificial Sequence: Synthetic peptide"
RLGPGYP

SEQ ID NO: 9010 - protein, 7 aa, Artificial Sequence
  source: /note="Description of Artificial Sequence: Synthetic peptide"
RLGPVSG

SEQ ID NO: 9011 - protein, 7 aa, Artificial Sequence
  source: /note="Description of Artificial Sequence: Synthetic peptide"
RLGSQTS

SEQ ID NO: 9012 - protein, 7 aa, Artificial Sequence
  source: /note="Description of Artificial Sequence: Synthetic peptide"
RLGTHSE

SEQ ID NO: 9013 - protein, 7 aa, Artificial Sequence
  source: /note="Description of Artificial Sequence: Synthetic peptide"
RLGTWAE

SEQ ID NO: 9014 - protein, 7 aa, Artificial Sequence
  source: /note="Description of Artificial Sequence: Synthetic peptide"
RLGVCPS

SEQ ID NO: 9015 - protein, 7 aa, Artificial Sequence
  source: /note="Description of Artificial Sequence: Synthetic peptide"
RLHIGSG

SEQ ID NO: 9016 - protein, 7 aa, Artificial Sequence
  source: /note="Description of Artificial Sequence: Synthetic peptide"
RLHINSE

SEQ ID NO: 9017 - protein, 7 aa, Artificial Sequence
  source: /note="Description of Artificial Sequence: Synthetic peptide"
RLHTDLG

SEQ ID NO: 9018 - protein, 7 aa, Artificial Sequence
  source: /note="Description of Artificial Sequence: Synthetic peptide"
RLIHSGF

SEQ ID NO: 9019 - protein, 7 aa, Artificial Sequence
  source: /note="Description of Artificial Sequence: Synthetic peptide"
RLINNSA

SEQ ID NO: 9020 - protein, 7 aa, Artificial Sequence
  source: /note="Description of Artificial Sequence: Synthetic peptide"
RLLKTPS

SEQ ID NO: 9021 - protein, 7 aa, Artificial Sequence
  source: /note="Description of Artificial Sequence: Synthetic peptide"
RLLSATG

SEQ ID NO: 9022 - protein, 7 aa, Artificial Sequence
  source: /note="Description of Artificial Sequence: Synthetic peptide"
RLMDRAG

SEQ ID NO: 9023 - protein, 7 aa, Artificial Sequence
  source: /note="Description of Artificial Sequence: Synthetic peptide"
RLMNPKG

SEQ ID NO: 9024 - protein, 7 aa, Artificial Sequence
  source: /note="Description of Artificial Sequence: Synthetic peptide"
RLNDLTL

SEQ ID NO: 9025 - protein, 7 aa, Artificial Sequence
  source: /note="Description of Artificial Sequence: Synthetic peptide"
RLNLSTT

SEQ ID NO: 9026 - protein, 7 aa, Artificial Sequence
  source: /note="Description of Artificial Sequence: Synthetic peptide"
RLNNNTL

SEQ ID NO: 9027 - protein, 7 aa, Artificial Sequence
  source: /note="Description of Artificial Sequence: Synthetic peptide"
RLNQVPA

SEQ ID NO: 9028 - protein, 7 aa, Artificial Sequence
  source: /note="Description of Artificial Sequence: Synthetic peptide"
RLNTSMM

SEQ ID NO: 9029 - protein, 7 aa, Artificial Sequence
  source: /note="Description of Artificial Sequence: Synthetic peptide"
RLPDPSS

SEQ ID NO: 9030 - protein, 7 aa, Artificial Sequence
  source: /note="Description of Artificial Sequence: Synthetic peptide"
RLPGPER

SEQ ID NO: 9031 - protein, 7 aa, Artificial Sequence
  source: /note="Description of Artificial Sequence: Synthetic peptide"
RLPLENL

SEQ ID NO: 9032 - protein, 7 aa, Artificial Sequence
  source: /note="Description of Artificial Sequence: Synthetic peptide"
RLPLSAH

SEQ ID NO: 9033 - protein, 7 aa, Artificial Sequence
  source: /note="Description of Artificial Sequence: Synthetic peptide"
RLPPSGI

SEQ ID NO: 9034 - protein, 7 aa, Artificial Sequence
  source: /note="Description of Artificial Sequence: Synthetic peptide"
RLPPTDV

SEQ ID NO: 9035 - protein, 7 aa, Artificial Sequence
  source: /note="Description of Artificial Sequence: Synthetic peptide"
RLPQRDI

SEQ ID NO: 9036 - protein, 7 aa, Artificial Sequence
  source: /note="Description of Artificial Sequence: Synthetic peptide"
RLPSEKQ

SEQ ID NO: 9037 - protein, 7 aa, Artificial Sequence
  source: /note="Description of Artificial Sequence: Synthetic peptide"
RLPSLVD

SEQ ID NO: 9038 - protein, 7 aa, Artificial Sequence
  source: /note="Description of Artificial Sequence: Synthetic peptide"
RLPTRLD

SEQ ID NO: 9039 - protein, 7 aa, Artificial Sequence
  source: /note="Description of Artificial Sequence: Synthetic peptide"
RLPTSHF

SEQ ID NO: 9040 - protein, 7 aa, Artificial Sequence
  source: /note="Description of Artificial Sequence: Synthetic peptide"
RLPTVTG

SEQ ID NO: 9041 - protein, 7 aa, Artificial Sequence
  source: /note="Description of Artificial Sequence: Synthetic peptide"
RLPVQPS

SEQ ID NO: 9042 - protein, 7 aa, Artificial Sequence
  source: /note="Description of Artificial Sequence: Synthetic peptide"
RLQDNGS

SEQ ID NO: 9043 - protein, 7 aa, Artificial Sequence
  source: /note="Description of Artificial Sequence: Synthetic peptide"
RLQGFPN

SEQ ID NO: 9044 - protein, 7 aa, Artificial Sequence
  source: /note="Description of Artificial Sequence: Synthetic peptide"
RLQLQDH

SEQ ID NO: 9045 - protein, 7 aa, Artificial Sequence
  source: /note="Description of Artificial Sequence: Synthetic peptide"
RLQNTGT

SEQ ID NO: 9046 - protein, 7 aa, Artificial Sequence
  source: /note="Description of Artificial Sequence: Synthetic peptide"
RLQPAEE

SEQ ID NO: 9047 - protein, 7 aa, Artificial Sequence
  source: /note="Description of Artificial Sequence: Synthetic peptide"
RLQQVGV

SEQ ID NO: 9048 - protein, 7 aa, Artificial Sequence
  source: /note="Description of Artificial Sequence: Synthetic peptide"
RLQSSIE

SEQ ID NO: 9049 - protein, 7 aa, Artificial Sequence
  source: /note="Description of Artificial Sequence: Synthetic peptide"
RLRPGLD

SEQ ID NO: 9050 - protein, 7 aa, Artificial Sequence
  source: /note="Description of Artificial Sequence: Synthetic peptide"
RLSADTH

SEQ ID NO: 9051 - protein, 7 aa, Artificial Sequence
  source: /note="Description of Artificial Sequence: Synthetic peptide"
RLSHAGV

SEQ ID NO: 9052 - protein, 7 aa, Artificial Sequence
  source: /note="Description of Artificial Sequence: Synthetic peptide"
RLSIGSV

SEQ ID NO: 9053 - protein, 7 aa, Artificial Sequence
  source: /note="Description of Artificial Sequence: Synthetic peptide"
RLSLDRF

SEQ ID NO: 9054 - protein, 7 aa, Artificial Sequence
  source: /note="Description of Artificial Sequence: Synthetic peptide"
RLSLPST

SEQ ID NO: 9055 - protein, 7 aa, Artificial Sequence
  source: /note="Description of Artificial Sequence: Synthetic peptide"
RLSNSEP

SEQ ID NO: 9056 - protein, 7 aa, Artificial Sequence
  source: /note="Description of Artificial Sequence: Synthetic peptide"
RLSPPPS

SEQ ID NO: 9057 - protein, 7 aa, Artificial Sequence
  source: /note="Description of Artificial Sequence: Synthetic peptide"
RLSPQPA

SEQ ID NO: 9058 - protein, 7 aa, Artificial Sequence
  source: /note="Description of Artificial Sequence: Synthetic peptide"
RLSQSNN

SEQ ID NO: 9059 - protein, 7 aa, Artificial Sequence
  source: /note="Description of Artificial Sequence: Synthetic peptide"
RLSSGPI

SEQ ID NO: 9060 - protein, 7 aa, Artificial Sequence
  source: /note="Description of Artificial Sequence: Synthetic peptide"
RLSSNLE

SEQ ID NO: 9061 - protein, 7 aa, Artificial Sequence
  source: /note="Description of Artificial Sequence: Synthetic peptide"
RLTATSN

SEQ ID NO: 9062 - protein, 7 aa, Artificial Sequence
  source: /note="Description of Artificial Sequence: Synthetic peptide"
RLTDRST

SEQ ID NO: 9063 - protein, 7 aa, Artificial Sequence
  source: /note="Description of Artificial Sequence: Synthetic peptide"
RLTEPHR

SEQ ID NO: 9064 - protein, 7 aa, Artificial Sequence
  source: /note="Description of Artificial Sequence: Synthetic peptide"
RLTHESP

SEQ ID NO: 9065 - protein, 7 aa, Artificial Sequence
  source: /note="Description of Artificial Sequence: Synthetic peptide"
RLTHTGH

SEQ ID NO: 9066 - protein, 7 aa, Artificial Sequence
  source: /note="Description of Artificial Sequence: Synthetic peptide"
RLTMVRD

SEQ ID NO: 9067 - protein, 7 aa, Artificial Sequence
  source: /note="Description of Artificial Sequence: Synthetic peptide"
RLTPEGQ

SEQ ID NO: 9068 - protein, 7 aa, Artificial Sequence
  source: /note="Description of Artificial Sequence: Synthetic peptide"
RLVDNLP

SEQ ID NO: 9069 - protein, 7 aa, Artificial Sequence
  source: /note="Description of Artificial Sequence: Synthetic peptide"
RLVNQMS

SEQ ID NO: 9070 - protein, 7 aa, Artificial Sequence
  source: /note="Description of Artificial Sequence: Synthetic peptide"
RLVQAFA

SEQ ID NO: 9071 - protein, 7 aa, Artificial Sequence
  source: /note="Description of Artificial Sequence: Synthetic peptide"
RLYSGIE

SEQ ID NO: 9072 - protein, 7 aa, Artificial Sequence
  source: /note="Description of Artificial Sequence: Synthetic peptide"
RLYSNSP

SEQ ID NO: 9073 - protein, 7 aa, Artificial Sequence
  source: /note="Description of Artificial Sequence: Synthetic peptide"
RMAKETS

SEQ ID NO: 9074 - protein, 7 aa, Artificial Sequence
  source: /note="Description of Artificial Sequence: Synthetic peptide"
RMEPPIS

SEQ ID NO: 9075 - protein, 7 aa, Artificial Sequence
  source: /note="Description of Artificial Sequence: Synthetic peptide"
RMEPSAV

SEQ ID NO: 9076 - protein, 7 aa, Artificial Sequence
  source: /note="Description of Artificial Sequence: Synthetic peptide"
RMGAAVY

SEQ ID NO: 9077 - protein, 7 aa, Artificial Sequence
  source: /note="Description of Artificial Sequence: Synthetic peptide"
RMGVHPT

SEQ ID NO: 9078 - protein, 7 aa, Artificial Sequence
  source: /note="Description of Artificial Sequence: Synthetic peptide"
RMGYVEA

SEQ ID NO: 9079 - protein, 7 aa, Artificial Sequence
  source: /note="Description of Artificial Sequence: Synthetic peptide"
RMHVTEA

SEQ ID NO: 9080 - protein, 7 aa, Artificial Sequence
  source: /note="Description of Artificial Sequence: Synthetic peptide"
RMIQSGH

SEQ ID NO: 9081 - protein, 7 aa, Artificial Sequence
  source: /note="Description of Artificial Sequence: Synthetic peptide"
RMLAPSG

SEQ ID NO: 9082 - protein, 7 aa, Artificial Sequence
  source: /note="Description of Artificial Sequence: Synthetic peptide"
RMLDQLN

SEQ ID NO: 9083 - protein, 7 aa, Artificial Sequence
  source: /note="Description of Artificial Sequence: Synthetic peptide"
RMLPDVY

SEQ ID NO: 9084 - protein, 7 aa, Artificial Sequence
  source: /note="Description of Artificial Sequence: Synthetic peptide"
RMMPDLP

SEQ ID NO: 9085 - protein, 7 aa, Artificial Sequence
  source: /note="Description of Artificial Sequence: Synthetic peptide"
RMNEALG

SEQ ID NO: 9086 - protein, 7 aa, Artificial Sequence
  source: /note="Description of Artificial Sequence: Synthetic peptide"
RMNIQVG

SEQ ID NO: 9087 - protein, 7 aa, Artificial Sequence
  source: /note="Description of Artificial Sequence: Synthetic peptide"
RMNYGTE

SEQ ID NO: 9088 - protein, 7 aa, Artificial Sequence
  source: /note="Description of Artificial Sequence: Synthetic peptide"
RMPAMAV

SEQ ID NO: 9089 - protein, 7 aa, Artificial Sequence
  source: /note="Description of Artificial Sequence: Synthetic peptide"
RMPASNA

SEQ ID NO: 9090 - protein, 7 aa, Artificial Sequence
  source: /note="Description of Artificial Sequence: Synthetic peptide"
RMPREQS

SEQ ID NO: 9091 - protein, 7 aa, Artificial Sequence
  source: /note="Description of Artificial Sequence: Synthetic peptide"
RMQSAYV

SEQ ID NO: 9092 - protein, 7 aa, Artificial Sequence
  source: /note="Description of Artificial Sequence: Synthetic peptide"
RMQSQGF

SEQ ID NO: 9093 - protein, 7 aa, Artificial Sequence
  source: /note="Description of Artificial Sequence: Synthetic peptide"
RMSDSFV

SEQ ID NO: 9094 - protein, 7 aa, Artificial Sequence
  source: /note="Description of Artificial Sequence: Synthetic peptide"
RMSEVTI

SEQ ID NO: 9095 - protein, 7 aa, Artificial Sequence
  source: /note="Description of Artificial Sequence: Synthetic peptide"
RMSIPND

SEQ ID NO: 9096 - protein, 7 aa, Artificial Sequence
  source: /note="Description of Artificial Sequence: Synthetic peptide"
RMSLASE

SEQ ID NO: 9097 - protein, 7 aa, Artificial Sequence
  source: /note="Description of Artificial Sequence: Synthetic peptide"
RMSNSPQ

SEQ ID NO: 9098 - protein, 7 aa, Artificial Sequence
  source: /note="Description of Artificial Sequence: Synthetic peptide"
RMSSDLP

SEQ ID NO: 9099 - protein, 7 aa, Artificial Sequence
  source: /note="Description of Artificial Sequence: Synthetic peptide"
RMTAAIC

SEQ ID NO: 9100 - protein, 7 aa, Artificial Sequence
  source: /note="Description of Artificial Sequence: Synthetic peptide"
RMTHTAP

SEQ ID NO: 9101 - protein, 7 aa, Artificial Sequence
  source: /note="Description of Artificial Sequence: Synthetic peptide"
RMTIGTT

SEQ ID NO: 9102 - protein, 7 aa, Artificial Sequence
  source: /note="Description of Artificial Sequence: Synthetic peptide"
RMVGGGD

SEQ ID NO: 9103 - protein, 7 aa, Artificial Sequence
  source: /note="Description of Artificial Sequence: Synthetic peptide"
RMVNLGH

SEQ ID NO: 9104 - protein, 7 aa, Artificial Sequence
  source: /note="Description of Artificial Sequence: Synthetic peptide"
RMVSSSA

SEQ ID NO: 9105 - protein, 7 aa, Artificial Sequence
  source: /note="Description of Artificial Sequence: Synthetic peptide"
RMYGSSS

SEQ ID NO: 9106 - protein, 7 aa, Artificial Sequence
  source: /note="Description of Artificial Sequence: Synthetic peptide"
RNAAVDP

SEQ ID NO: 9107 - protein, 7 aa, Artificial Sequence
  source: /note="Description of Artificial Sequence: Synthetic peptide"
RNAGETH

SEQ ID NO: 9108 - protein, 7 aa, Artificial Sequence
  source: /note="Description of Artificial Sequence: Synthetic peptide"
RNAGTDR

SEQ ID NO: 9109 - protein, 7 aa, Artificial Sequence
  source: /note="Description of Artificial Sequence: Synthetic peptide"
RNANMPT

SEQ ID NO: 9110 - protein, 7 aa, Artificial Sequence
  source: /note="Description of Artificial Sequence: Synthetic peptide"
RNAPSAD

SEQ ID NO: 9111 - protein, 7 aa, Artificial Sequence
  source: /note="Description of Artificial Sequence: Synthetic peptide"
RNATAMV

SEQ ID NO: 9112 - protein, 7 aa, Artificial Sequence
  source: /note="Description of Artificial Sequence: Synthetic peptide"
RNDLTGV

SEQ ID NO: 9113 - protein, 7 aa, Artificial Sequence
  source: /note="Description of Artificial Sequence: Synthetic peptide"
RNDMVQS

SEQ ID NO: 9114 - protein, 7 aa, Artificial Sequence
  source: /note="Description of Artificial Sequence: Synthetic peptide"
RNDNRVT

SEQ ID NO: 9115 - protein, 7 aa, Artificial Sequence
  source: /note="Description of Artificial Sequence: Synthetic peptide"
RNDRSFA

SEQ ID NO: 9116 - protein, 7 aa, Artificial Sequence
  source: /note="Description of Artificial Sequence: Synthetic peptide"
RNDTSDL

SEQ ID NO: 9117 - protein, 7 aa, Artificial Sequence
  source: /note="Description of Artificial Sequence: Synthetic peptide"
RNDVSDI

SEQ ID NO: 9118 - protein, 7 aa, Artificial Sequence
  source: /note="Description of Artificial Sequence: Synthetic peptide"
RNEHHLP

SEQ ID NO: 9119 - protein, 7 aa, Artificial Sequence
  source: /note="Description of Artificial Sequence: Synthetic peptide"
RNEPNGG

SEQ ID NO: 9120 - protein, 7 aa, Artificial Sequence
  source: /note="Description of Artificial Sequence: Synthetic peptide"
RNFADSM

SEQ ID NO: 9121 - protein, 7 aa, Artificial Sequence
  source: /note="Description of Artificial Sequence: Synthetic peptide"
RNFTGPE

SEQ ID NO: 9122 - protein, 7 aa, Artificial Sequence
  source: /note="Description of Artificial Sequence: Synthetic peptide"
RNGAIQA

SEQ ID NO: 9123 - protein, 7 aa, Artificial Sequence
  source: /note="Description of Artificial Sequence: Synthetic peptide"
RNGRDAG

SEQ ID NO: 9124 - protein, 7 aa, Artificial Sequence
  source: /note="Description of Artificial Sequence: Synthetic peptide"
RNGVTAA

SEQ ID NO: 9125 - protein, 7 aa, Artificial Sequence
  source: /note="Description of Artificial Sequence: Synthetic peptide"
RNHGFAE

SEQ ID NO: 9126 - protein, 7 aa, Artificial Sequence
  source: /note="Description of Artificial Sequence: Synthetic peptide"
RNIDDAN

SEQ ID NO: 9127 - protein, 7 aa, Artificial Sequence
  source: /note="Description of Artificial Sequence: Synthetic peptide"
RNKENVG

SEQ ID NO: 9128 - protein, 7 aa, Artificial Sequence
  source: /note="Description of Artificial Sequence: Synthetic peptide"
RNLPPRD

SEQ ID NO: 9129 - protein, 7 aa, Artificial Sequence
  source: /note="Description of Artificial Sequence: Synthetic peptide"
RNLTIPE

SEQ ID NO: 9130 - protein, 7 aa, Artificial Sequence
  source: /note="Description of Artificial Sequence: Synthetic peptide"
RNMALTS

SEQ ID NO: 9131 - protein, 7 aa, Artificial Sequence
  source: /note="Description of Artificial Sequence: Synthetic peptide"
RNNALPD

SEQ ID NO: 9132 - protein, 7 aa, Artificial Sequence
  source: /note="Description of Artificial Sequence: Synthetic peptide"
RNNSHGF

SEQ ID NO: 9133 - protein, 7 aa, Artificial Sequence
  source: /note="Description of Artificial Sequence: Synthetic peptide"
RNPDMHH

SEQ ID NO: 9134 - protein, 7 aa, Artificial Sequence
  source: /note="Description of Artificial Sequence: Synthetic peptide"
RNPLSAQ

SEQ ID NO: 9135 - protein, 7 aa, Artificial Sequence
  source: /note="Description of Artificial Sequence: Synthetic peptide"
RNQGLLA

SEQ ID NO: 9136 - protein, 7 aa, Artificial Sequence
  source: /note="Description of Artificial Sequence: Synthetic peptide"
RNQTSTS

SEQ ID NO: 9137 - protein, 7 aa, Artificial Sequence
  source: /note="Description of Artificial Sequence: Synthetic peptide"
RNRDPQF

SEQ ID NO: 9138 - protein, 7 aa, Artificial Sequence
  source: /note="Description of Artificial Sequence: Synthetic peptide"
RNSAALQ

SEQ ID NO: 9139 - protein, 7 aa, Artificial Sequence
  source: /note="Description of Artificial Sequence: Synthetic peptide"
RNSDYSV

SEQ ID NO: 9140 - protein, 7 aa, Artificial Sequence
  source: /note="Description of Artificial Sequence: Synthetic peptide"
RNSLGFG

SEQ ID NO: 9141 - protein, 7 aa, Artificial Sequence
  source: /note="Description of Artificial Sequence: Synthetic peptide"
RNSQVPI

SEQ ID NO: 9142 - protein, 7 aa, Artificial Sequence
  source: /note="Description of Artificial Sequence: Synthetic peptide"
RNSSSLG

SEQ ID NO: 9143 - protein, 7 aa, Artificial Sequence
  source: /note="Description of Artificial Sequence: Synthetic peptide"
RNSTSMT

SEQ ID NO: 9144 - protein, 7 aa, Artificial Sequence
  source: /note="Description of Artificial Sequence: Synthetic peptide"
RNSVTTP

SEQ ID NO: 9145 - protein, 7 aa, Artificial Sequence
  source: /note="Description of Artificial Sequence: Synthetic peptide"
RNSYPSD

SEQ ID NO: 9146 - protein, 7 aa, Artificial Sequence
  source: /note="Description of Artificial Sequence: Synthetic peptide"
RNTDVDS

SEQ ID NO: 9147 - protein, 7 aa, Artificial Sequence
  source: /note="Description of Artificial Sequence: Synthetic peptide"
RNTLLMD

SEQ ID NO: 9148 - protein, 7 aa, Artificial Sequence
  source: /note="Description of Artificial Sequence: Synthetic peptide"
RNTLVIP

SEQ ID NO: 9149 - protein, 7 aa, Artificial Sequence
  source: /note="Description of Artificial Sequence: Synthetic peptide"
RNTPNRD

SEQ ID NO: 9150 - protein, 7 aa, Artificial Sequence
  source: /note="Description of Artificial Sequence: Synthetic peptide"
RNTSQLD

SEQ ID NO: 9151 - protein, 7 aa, Artificial Sequence
  source: /note="Description of Artificial Sequence: Synthetic peptide"
RNVETAG

SEQ ID NO: 9152 - protein, 7 aa, Artificial Sequence
  source: /note="Description of Artificial Sequence: Synthetic peptide"
RNVGHGD

SEQ ID NO: 9153 - protein, 7 aa, Artificial Sequence
  source: /note="Description of Artificial Sequence: Synthetic peptide"
RNVGPPT

SEQ ID NO: 9154 - protein, 7 aa, Artificial Sequence
  source: /note="Description of Artificial Sequence: Synthetic peptide"
RNVPEHR

SEQ ID NO: 9155 - protein, 7 aa, Artificial Sequence
  source: /note="Description of Artificial Sequence: Synthetic peptide"
RNVQFSP

SEQ ID NO: 9156 - protein, 7 aa, Artificial Sequence
  source: /note="Description of Artificial Sequence: Synthetic peptide"
RNVRDTP

SEQ ID NO: 9157 - protein, 7 aa, Artificial Sequence
  source: /note="Description of Artificial Sequence: Synthetic peptide"
RNVSDSS

SEQ ID NO: 9158 - protein, 7 aa, Artificial Sequence
  source: /note="Description of Artificial Sequence: Synthetic peptide"
RNYAGKD

SEQ ID NO: 9159 - protein, 7 aa, Artificial Sequence
  source: /note="Description of Artificial Sequence: Synthetic peptide"
RPAAVSN

SEQ ID NO: 9160 - protein, 7 aa, Artificial Sequence
  source: /note="Description of Artificial Sequence: Synthetic peptide"
RPADKCT

SEQ ID NO: 9161 - protein, 7 aa, Artificial Sequence
  source: /note="Description of Artificial Sequence: Synthetic peptide"
RPAKLEL

SEQ ID NO: 9162 - protein, 7 aa, Artificial Sequence
  source: /note="Description of Artificial Sequence: Synthetic peptide"
RPAMLAT

SEQ ID NO: 9163 - protein, 7 aa, Artificial Sequence
  source: /note="Description of Artificial Sequence: Synthetic peptide"
RPASGHV

SEQ ID NO: 9164 - protein, 7 aa, Artificial Sequence
  source: /note="Description of Artificial Sequence: Synthetic peptide"
RPATVGA

SEQ ID NO: 9165 - protein, 7 aa, Artificial Sequence
  source: /note="Description of Artificial Sequence: Synthetic peptide"
RPAVMKG

SEQ ID NO: 9166 - protein, 7 aa, Artificial Sequence
  source: /note="Description of Artificial Sequence: Synthetic peptide"
RPDASES

SEQ ID NO: 9167 - protein, 7 aa, Artificial Sequence
  source: /note="Description of Artificial Sequence: Synthetic peptide"
RPDDPAN

SEQ ID NO: 9168 - protein, 7 aa, Artificial Sequence
  source: /note="Description of Artificial Sequence: Synthetic peptide"
RPDGMAS

SEQ ID NO: 9169 - protein, 7 aa, Artificial Sequence
  source: /note="Description of Artificial Sequence: Synthetic peptide"
RPDHSNV

SEQ ID NO: 9170 - protein, 7 aa, Artificial Sequence
  source: /note="Description of Artificial Sequence: Synthetic peptide"
RPDNSKA

SEQ ID NO: 9171 - protein, 7 aa, Artificial Sequence
  source: /note="Description of Artificial Sequence: Synthetic peptide"
RPDSLKL

SEQ ID NO: 9172 - protein, 7 aa, Artificial Sequence
  source: /note="Description of Artificial Sequence: Synthetic peptide"
RPDSPFT

SEQ ID NO: 9173 - protein, 7 aa, Artificial Sequence
  source: /note="Description of Artificial Sequence: Synthetic peptide"
RPDTRAA

SEQ ID NO: 9174 - protein, 7 aa, Artificial Sequence
  source: /note="Description of Artificial Sequence: Synthetic peptide"
RPEEATS

SEQ ID NO: 9175 - protein, 7 aa, Artificial Sequence
  source: /note="Description of Artificial Sequence: Synthetic peptide"
RPEGSMG

SEQ ID NO: 9176 - protein, 7 aa, Artificial Sequence
  source: /note="Description of Artificial Sequence: Synthetic peptide"
RPELGLL

SEQ ID NO: 9177 - protein, 7 aa, Artificial Sequence
  source: /note="Description of Artificial Sequence: Synthetic peptide"
RPELKQS

SEQ ID NO: 9178 - protein, 7 aa, Artificial Sequence
  source: /note="Description of Artificial Sequence: Synthetic peptide"
RPELSSR

SEQ ID NO: 9179 - protein, 7 aa, Artificial Sequence
  source: /note="Description of Artificial Sequence: Synthetic peptide"
RPESVYG

SEQ ID NO: 9180 - protein, 7 aa, Artificial Sequence
  source: /note="Description of Artificial Sequence: Synthetic peptide"
RPFAPQE

SEQ ID NO: 9181 - protein, 7 aa, Artificial Sequence
  source: /note="Description of Artificial Sequence: Synthetic peptide"
RPFSPTP

SEQ ID NO: 9182 - protein, 7 aa, Artificial Sequence
  source: /note="Description of Artificial Sequence: Synthetic peptide"
RPGADAR

SEQ ID NO: 9183 - protein, 7 aa, Artificial Sequence
  source: /note="Description of Artificial Sequence: Synthetic peptide"
RPGGGTE

SEQ ID NO: 9184 - protein, 7 aa, Artificial Sequence
  source: /note="Description of Artificial Sequence: Synthetic peptide"
RPGLSTL

SEQ ID NO: 9185 - protein, 7 aa, Artificial Sequence
  source: /note="Description of Artificial Sequence: Synthetic peptide"
RPGNTLP

SEQ ID NO: 9186 - protein, 7 aa, Artificial Sequence
  source: /note="Description of Artificial Sequence: Synthetic peptide"
RPGREPL

SEQ ID NO: 9187 - protein, 7 aa, Artificial Sequence
  source: /note="Description of Artificial Sequence: Synthetic peptide"
RPGSSTE

SEQ ID NO: 9188 - protein, 7 aa, Artificial Sequence
  source: /note="Description of Artificial Sequence: Synthetic peptide"
RPGTSTV

SEQ ID NO: 9189 - protein, 7 aa, Artificial Sequence
  source: /note="Description of Artificial Sequence: Synthetic peptide"
RPHSDKF

SEQ ID NO: 9190 - protein, 7 aa, Artificial Sequence
  source: /note="Description of Artificial Sequence: Synthetic peptide"
RPIASTN

SEQ ID NO: 9191 - protein, 7 aa, Artificial Sequence
  source: /note="Description of Artificial Sequence: Synthetic peptide"
RPKESSV

SEQ ID NO: 9192 - protein, 7 aa, Artificial Sequence
  source: /note="Description of Artificial Sequence: Synthetic peptide"
RPLDAPD

SEQ ID NO: 9193 - protein, 7 aa, Artificial Sequence
  source: /note="Description of Artificial Sequence: Synthetic peptide"
RPLDQES

SEQ ID NO: 9194 - protein, 7 aa, Artificial Sequence
  source: /note="Description of Artificial Sequence: Synthetic peptide"
RPLESRD

SEQ ID NO: 9195 - protein, 7 aa, Artificial Sequence
  source: /note="Description of Artificial Sequence: Synthetic peptide"
RPLGPHI

SEQ ID NO: 9196 - protein, 7 aa, Artificial Sequence
  source: /note="Description of Artificial Sequence: Synthetic peptide"
RPLGPND

SEQ ID NO: 9197 - protein, 7 aa, Artificial Sequence
  source: /note="Description of Artificial Sequence: Synthetic peptide"
RPLGSDT

SEQ ID NO: 9198 - protein, 7 aa, Artificial Sequence
  source: /note="Description of Artificial Sequence: Synthetic peptide"
RPLIPNN

SEQ ID NO: 9199 - protein, 7 aa, Artificial Sequence
  source: /note="Description of Artificial Sequence: Synthetic peptide"
RPLKHDP

SEQ ID NO: 9200 - protein, 7 aa, Artificial Sequence
  source: /note="Description of Artificial Sequence: Synthetic peptide"
RPLTEYV

SEQ ID NO: 9201 - protein, 7 aa, Artificial Sequence
  source: /note="Description of Artificial Sequence: Synthetic peptide"
RPLVMGV

SEQ ID NO: 9202 - protein, 7 aa, Artificial Sequence
  source: /note="Description of Artificial Sequence: Synthetic peptide"
RPMATLS

SEQ ID NO: 9203 - protein, 7 aa, Artificial Sequence
  source: /note="Description of Artificial Sequence: Synthetic peptide"
RPMITSA

SEQ ID NO: 9204 - protein, 7 aa, Artificial Sequence
  source: /note="Description of Artificial Sequence: Synthetic peptide"
RPMNLKE

SEQ ID NO: 9205 - protein, 7 aa, Artificial Sequence
  source: /note="Description of Artificial Sequence: Synthetic peptide"
RPMPNSP

SEQ ID NO: 9206 - protein, 7 aa, Artificial Sequence
  source: /note="Description of Artificial Sequence: Synthetic peptide"
RPMSLES

SEQ ID NO: 9207 - protein, 7 aa, Artificial Sequence
  source: /note="Description of Artificial Sequence: Synthetic peptide"
RPMTPQL

SEQ ID NO: 9208 - protein, 7 aa, Artificial Sequence
  source: /note="Description of Artificial Sequence: Synthetic peptide"
RPNAVTV

SEQ ID NO: 9209 - protein, 7 aa, Artificial Sequence
  source: /note="Description of Artificial Sequence: Synthetic peptide"
RPPEIHF

SEQ ID NO: 9210 - protein, 7 aa, Artificial Sequence
  source: /note="Description of Artificial Sequence: Synthetic peptide"
RPPGPMS

SEQ ID NO: 9211 - protein, 7 aa, Artificial Sequence
  source: /note="Description of Artificial Sequence: Synthetic peptide"
RPPLGEG

SEQ ID NO: 9212 - protein, 7 aa, Artificial Sequence
  source: /note="Description of Artificial Sequence: Synthetic peptide"
RPPNATP

SEQ ID NO: 9213 - protein, 7 aa, Artificial Sequence
  source: /note="Description of Artificial Sequence: Synthetic peptide"
RPPNGDM

SEQ ID NO: 9214 - protein, 7 aa, Artificial Sequence
  source: /note="Description of Artificial Sequence: Synthetic peptide"
RPPSTVN

SEQ ID NO: 9215 - protein, 7 aa, Artificial Sequence
  source: /note="Description of Artificial Sequence: Synthetic peptide"
RPPSVQP

SEQ ID NO: 9216 - protein, 7 aa, Artificial Sequence
  source: /note="Description of Artificial Sequence: Synthetic peptide"
RPPVQTG

SEQ ID NO: 9217 - protein, 7 aa, Artificial Sequence
  source: /note="Description of Artificial Sequence: Synthetic peptide"
RPQHIMP

SEQ ID NO: 9218 - protein, 7 aa, Artificial Sequence
  source: /note="Description of Artificial Sequence: Synthetic peptide"
RPQKASE

SEQ ID NO: 9219 - protein, 7 aa, Artificial Sequence
  source: /note="Description of Artificial Sequence: Synthetic peptide"
RPQPTPC

SEQ ID NO: 9220 - protein, 7 aa, Artificial Sequence
  source: /note="Description of Artificial Sequence: Synthetic peptide"
RPREISP

SEQ ID NO: 9221 - protein, 7 aa, Artificial Sequence
  source: /note="Description of Artificial Sequence: Synthetic peptide"
RPRFASD

SEQ ID NO: 9222 - protein, 7 aa, Artificial Sequence
  source: /note="Description of Artificial Sequence: Synthetic peptide"
RPSAATP

SEQ ID NO: 9223 - protein, 7 aa, Artificial Sequence
  source: /note="Description of Artificial Sequence: Synthetic peptide"
RPSDLKN

SEQ ID NO: 9224 - protein, 7 aa, Artificial Sequence
  source: /note="Description of Artificial Sequence: Synthetic peptide"
RPSGMAH

SEQ ID NO: 9225 - protein, 7 aa, Artificial Sequence
  source: /note="Description of Artificial Sequence: Synthetic peptide"
RPSLAVG

SEQ ID NO: 9226 - protein, 7 aa, Artificial Sequence
  source: /note="Description of Artificial Sequence: Synthetic peptide"
RPSLPDF

SEQ ID NO: 9227 - protein, 7 aa, Artificial Sequence
  source: /note="Description of Artificial Sequence: Synthetic peptide"
RPSLSGT

SEQ ID NO: 9228 - protein, 7 aa, Artificial Sequence
  source: /note="Description of Artificial Sequence: Synthetic peptide"
RPSLSPT

SEQ ID NO: 9229 - protein, 7 aa, Artificial Sequence
  source: /note="Description of Artificial Sequence: Synthetic peptide"
RPSNAMA

SEQ ID NO: 9230 - protein, 7 aa, Artificial Sequence
  source: /note="Description of Artificial Sequence: Synthetic peptide"
RPSNQSS

SEQ ID NO: 9231 - protein, 7 aa, Artificial Sequence
  source: /note="Description of Artificial Sequence: Synthetic peptide"
RPSTDSY

SEQ ID NO: 9232 - protein, 7 aa, Artificial Sequence
  source: /note="Description of Artificial Sequence: Synthetic peptide"
RPSTYPS

SEQ ID NO: 9233 - protein, 7 aa, Artificial Sequence
  source: /note="Description of Artificial Sequence: Synthetic peptide"
RPSVNEH

SEQ ID NO: 9234 - protein, 7 aa, Artificial Sequence
  source: /note="Description of Artificial Sequence: Synthetic peptide"
RPTLPMA

SEQ ID NO: 9235 - protein, 7 aa, Artificial Sequence
  source: /note="Description of Artificial Sequence: Synthetic peptide"
RPTQILG

SEQ ID NO: 9236 - protein, 7 aa, Artificial Sequence
  source: /note="Description of Artificial Sequence: Synthetic peptide"
RPTSPPA

SEQ ID NO: 9237 - protein, 7 aa, Artificial Sequence
  source: /note="Description of Artificial Sequence: Synthetic peptide"
RPTSTTS

SEQ ID NO: 9238 - protein, 7 aa, Artificial Sequence
  source: /note="Description of Artificial Sequence: Synthetic peptide"
RPTTSNG

SEQ ID NO: 9239 - protein, 7 aa, Artificial Sequence
  source: /note="Description of Artificial Sequence: Synthetic peptide"
RPTTTQE

SEQ ID NO: 9240 - protein, 7 aa, Artificial Sequence
  source: /note="Description of Artificial Sequence: Synthetic peptide"
RPTTTSV

SEQ ID NO: 9241 - protein, 7 aa, Artificial Sequence
  source: /note="Description of Artificial Sequence: Synthetic peptide"
RPVCDGT

SEQ ID NO: 9242 - protein, 7 aa, Artificial Sequence
  source: /note="Description of Artificial Sequence: Synthetic peptide"
RPVDWDL

SEQ ID NO: 9243 - protein, 7 aa, Artificial Sequence
  source: /note="Description of Artificial Sequence: Synthetic peptide"
RPVKEYV

SEQ ID NO: 9244 - protein, 7 aa, Artificial Sequence
  source: /note="Description of Artificial Sequence: Synthetic peptide"
RPVLSTG

SEQ ID NO: 9245 - protein, 7 aa, Artificial Sequence
  source: /note="Description of Artificial Sequence: Synthetic peptide"
RPVPDQI

SEQ ID NO: 9246 - protein, 7 aa, Artificial Sequence
  source: /note="Description of Artificial Sequence: Synthetic peptide"
RPYPPPI

SEQ ID NO: 9247 - protein, 7 aa, Artificial Sequence
  source: /note="Description of Artificial Sequence: Synthetic peptide"
RQALISG

SEQ ID NO: 9248 - protein, 7 aa, Artificial Sequence
  source: /note="Description of Artificial Sequence: Synthetic peptide"
RQDAAIS

SEQ ID NO: 9249 - protein, 7 aa, Artificial Sequence
  source: /note="Description of Artificial Sequence: Synthetic peptide"
RQDDHKI

SEQ ID NO: 9250 - protein, 7 aa, Artificial Sequence
  source: /note="Description of Artificial Sequence: Synthetic peptide"
RQFTENA

SEQ ID NO: 9251 - protein, 7 aa, Artificial Sequence
  source: /note="Description of Artificial Sequence: Synthetic peptide"
RQGVTPT

SEQ ID NO: 9252 - protein, 7 aa, Artificial Sequence
  source: /note="Description of Artificial Sequence: Synthetic peptide"
RQHQLPH

SEQ ID NO: 9253 - protein, 7 aa, Artificial Sequence
  source: /note="Description of Artificial Sequence: Synthetic peptide"
RQIPHTE

SEQ ID NO: 9254 - protein, 7 aa, Artificial Sequence
  source: /note="Description of Artificial Sequence: Synthetic peptide"
RQKEHNL

SEQ ID NO: 9255 - protein, 7 aa, Artificial Sequence
  source: /note="Description of Artificial Sequence: Synthetic peptide"
RQLEADP

SEQ ID NO: 9256 - protein, 7 aa, Artificial Sequence
  source: /note="Description of Artificial Sequence: Synthetic peptide"
RQNDVCS

SEQ ID NO: 9257 - protein, 7 aa, Artificial Sequence
  source: /note="Description of Artificial Sequence: Synthetic peptide"
RQNHMPA

SEQ ID NO: 9258 - protein, 7 aa, Artificial Sequence
  source: /note="Description of Artificial Sequence: Synthetic peptide"
RQNRCID

SEQ ID NO: 9259 - protein, 7 aa, Artificial Sequence
  source: /note="Description of Artificial Sequence: Synthetic peptide"
RQPLYTD

SEQ ID NO: 9260 - protein, 7 aa, Artificial Sequence
  source: /note="Description of Artificial Sequence: Synthetic peptide"
RQPPKLA

SEQ ID NO: 9261 - protein, 7 aa, Artificial Sequence
  source: /note="Description of Artificial Sequence: Synthetic peptide"
RQQAHLV

SEQ ID NO: 9262 - protein, 7 aa, Artificial Sequence
  source: /note="Description of Artificial Sequence: Synthetic peptide"
RQSDLYS

SEQ ID NO: 9263 - protein, 7 aa, Artificial Sequence
  source: /note="Description of Artificial Sequence: Synthetic peptide"
RQSNFAT

SEQ ID NO: 9264 - protein, 7 aa, Artificial Sequence
  source: /note="Description of Artificial Sequence: Synthetic peptide"
RQSNTLN

SEQ ID NO: 9265 - protein, 7 aa, Artificial Sequence
  source: /note="Description of Artificial Sequence: Synthetic peptide"
RQSQCPM

SEQ ID NO: 9266 - protein, 7 aa, Artificial Sequence
  source: /note="Description of Artificial Sequence: Synthetic peptide"
RQSSYDV

SEQ ID NO: 9267 - protein, 7 aa, Artificial Sequence
  source: /note="Description of Artificial Sequence: Synthetic peptide"
RQSTQLL

SEQ ID NO: 9268 - protein, 7 aa, Artificial Sequence
  source: /note="Description of Artificial Sequence: Synthetic peptide"
RQSVPTS

SEQ ID NO: 9269 - protein, 7 aa, Artificial Sequence
  source: /note="Description of Artificial Sequence: Synthetic peptide"
RQSVSNL

SEQ ID NO: 9270 - protein, 7 aa, Artificial Sequence
  source: /note="Description of Artificial Sequence: Synthetic peptide"
RQTHTLQ

SEQ ID NO: 9271 - protein, 7 aa, Artificial Sequence
  source: /note="Description of Artificial Sequence: Synthetic peptide"
RQTQQMY

SEQ ID NO: 9272 - protein, 7 aa, Artificial Sequence
  source: /note="Description of Artificial Sequence: Synthetic peptide"
RQVETMS

SEQ ID NO: 9273 - protein, 7 aa, Artificial Sequence
  source: /note="Description of Artificial Sequence: Synthetic peptide"
RQVGMLS

SEQ ID NO: 9274 - protein, 7 aa, Artificial Sequence
  source: /note="Description of Artificial Sequence: Synthetic peptide"
RQVPSAE

SEQ ID NO: 9275 - protein, 7 aa, Artificial Sequence
  source: /note="Description of Artificial Sequence: Synthetic peptide"
RRDDGSS

SEQ ID NO: 9276 - protein, 7 aa, Artificial Sequence
  source: /note="Description of Artificial Sequence: Synthetic peptide"
RRDELTL

SEQ ID NO: 9277 - protein, 7 aa, Artificial Sequence
  source: /note="Description of Artificial Sequence: Synthetic peptide"
RRDGMLM

SEQ ID NO: 9278 - protein, 7 aa, Artificial Sequence
  source: /note="Description of Artificial Sequence: Synthetic peptide"
RRDHAPI

SEQ ID NO: 9279 - protein, 7 aa, Artificial Sequence
  source: /note="Description of Artificial Sequence: Synthetic peptide"
RRDPSTV

SEQ ID NO: 9280 - protein, 7 aa, Artificial Sequence
  source: /note="Description of Artificial Sequence: Synthetic peptide"
RRDQPVP

SEQ ID NO: 9281 - protein, 7 aa, Artificial Sequence
  source: /note="Description of Artificial Sequence: Synthetic peptide"
RRDVSGP

SEQ ID NO: 9282 - protein, 7 aa, Artificial Sequence
  source: /note="Description of Artificial Sequence: Synthetic peptide"
RRESGIG

SEQ ID NO: 9283 - protein, 7 aa, Artificial Sequence
  source: /note="Description of Artificial Sequence: Synthetic peptide"
RRGTSEP

SEQ ID NO: 9284 - protein, 7 aa, Artificial Sequence
  source: /note="Description of Artificial Sequence: Synthetic peptide"
RRLPGDV

SEQ ID NO: 9285 - protein, 7 aa, Artificial Sequence
  source: /note="Description of Artificial Sequence: Synthetic peptide"
RRNDALP

SEQ ID NO: 9286 - protein, 7 aa, Artificial Sequence
  source: /note="Description of Artificial Sequence: Synthetic peptide"
RRPEIER

SEQ ID NO: 9287 - protein, 7 aa, Artificial Sequence
  source: /note="Description of Artificial Sequence: Synthetic peptide"
RRPSLSD

SEQ ID NO: 9288 - protein, 7 aa, Artificial Sequence
  source: /note="Description of Artificial Sequence: Synthetic peptide"
RRPSPDV

SEQ ID NO: 9289 - protein, 7 aa, Artificial Sequence
  source: /note="Description of Artificial Sequence: Synthetic peptide"
RRSDLYV

SEQ ID NO: 9290 - protein, 7 aa, Artificial Sequence
  source: /note="Description of Artificial Sequence: Synthetic peptide"
RRTDTLY

SEQ ID NO: 9291 - protein, 7 aa, Artificial Sequence
  source: /note="Description of Artificial Sequence: Synthetic peptide"
RRVGTGD

SEQ ID NO: 9292 - protein, 7 aa, Artificial Sequence
  source: /note="Description of Artificial Sequence: Synthetic peptide"
RSAAAVY

SEQ ID NO: 9293 - protein, 7 aa, Artificial Sequence
  source: /note="Description of Artificial Sequence: Synthetic peptide"
RSAAMSE

SEQ ID NO: 9294 - protein, 7 aa, Artificial Sequence
  source: /note="Description of Artificial Sequence: Synthetic peptide"
RSAATST

SEQ ID NO: 9295 - protein, 7 aa, Artificial Sequence
  source: /note="Description of Artificial Sequence: Synthetic peptide"
RSAAVTY

SEQ ID NO: 9296 - protein, 7 aa, Artificial Sequence
  source: /note="Description of Artificial Sequence: Synthetic peptide"
RSAGPNE

SEQ ID NO: 9297 - protein, 7 aa, Artificial Sequence
  source: /note="Description of Artificial Sequence: Synthetic peptide"
RSALNTS

SEQ ID NO: 9298 - protein, 7 aa, Artificial Sequence
  source: /note="Description of Artificial Sequence: Synthetic peptide"
RSALPNL

SEQ ID NO: 9299 - protein, 7 aa, Artificial Sequence
  source: /note="Description of Artificial Sequence: Synthetic peptide"
RSAMAGP

SEQ ID NO: 9300 - protein, 7 aa, Artificial Sequence
  source: /note="Description of Artificial Sequence: Synthetic peptide"
RSANQSV

SEQ ID NO: 9301 - protein, 7 aa, Artificial Sequence
  source: /note="Description of Artificial Sequence: Synthetic peptide"
RSAPAVI

SEQ ID NO: 9302 - protein, 7 aa, Artificial Sequence
  source: /note="Description of Artificial Sequence: Synthetic peptide"
RSAPELT

SEQ ID NO: 9303 - protein, 7 aa, Artificial Sequence
  source: /note="Description of Artificial Sequence: Synthetic peptide"
RSAQLTA

SEQ ID NO: 9304 - protein, 7 aa, Artificial Sequence
  source: /note="Description of Artificial Sequence: Synthetic peptide"
RSAQNSL

SEQ ID NO: 9305 - protein, 7 aa, Artificial Sequence
  source: /note="Description of Artificial Sequence: Synthetic peptide"
RSASLQS

SEQ ID NO: 9306 - protein, 7 aa, Artificial Sequence
  source: /note="Description of Artificial Sequence: Synthetic peptide"
RSAVPDS

SEQ ID NO: 9307 - protein, 7 aa, Artificial Sequence
  source: /note="Description of Artificial Sequence: Synthetic peptide"
RSDELRT

SEQ ID NO: 9308 - protein, 7 aa, Artificial Sequence
  source: /note="Description of Artificial Sequence: Synthetic peptide"
RSDGRSI

SEQ ID NO: 9309 - protein, 7 aa, Artificial Sequence
  source: /note="Description of Artificial Sequence: Synthetic peptide"
RSDPART

SEQ ID NO: 9310 - protein, 7 aa, Artificial Sequence
  source: /note="Description of Artificial Sequence: Synthetic peptide"
RSDSRPL

SEQ ID NO: 9311 - protein, 7 aa, Artificial Sequence
  source: /note="Description of Artificial Sequence: Synthetic peptide"
RSDSVTH

SEQ ID NO: 9312 - protein, 7 aa, Artificial Sequence
  source: /note="Description of Artificial Sequence: Synthetic peptide"
RSDVRLA

SEQ ID NO: 9313 - protein, 7 aa, Artificial Sequence
  source: /note="Description of Artificial Sequence: Synthetic peptide"
RSEEIRD

SEQ ID NO: 9314 - protein, 7 aa, Artificial Sequence
  source: /note="Description of Artificial Sequence: Synthetic peptide"
RSEILVT

SEQ ID NO: 9315 - protein, 7 aa, Artificial Sequence
  source: /note="Description of Artificial Sequence: Synthetic peptide"
RSEKVAP

SEQ ID NO: 9316 - protein, 7 aa, Artificial Sequence
  source: /note="Description of Artificial Sequence: Synthetic peptide"
RSEPDEY

SEQ ID NO: 9317 - protein, 7 aa, Artificial Sequence
  source: /note="Description of Artificial Sequence: Synthetic peptide"
RSEYAPQ

SEQ ID NO: 9318 - protein, 7 aa, Artificial Sequence
  source: /note="Description of Artificial Sequence: Synthetic peptide"
RSGHSGY

SEQ ID NO: 9319 - protein, 7 aa, Artificial Sequence
  source: /note="Description of Artificial Sequence: Synthetic peptide"
RSGLASG

SEQ ID NO: 9320 - protein, 7 aa, Artificial Sequence
  source: /note="Description of Artificial Sequence: Synthetic peptide"
RSGLDKT

SEQ ID NO: 9321 - protein, 7 aa, Artificial Sequence
  source: /note="Description of Artificial Sequence: Synthetic peptide"
RSGLKEL

SEQ ID NO: 9322 - protein, 7 aa, Artificial Sequence
  source: /note="Description of Artificial Sequence: Synthetic peptide"
RSGMVSA

SEQ ID NO: 9323 - protein, 7 aa, Artificial Sequence
  source: /note="Description of Artificial Sequence: Synthetic peptide"
RSGQDAL

SEQ ID NO: 9324 - protein, 7 aa, Artificial Sequence
  source: /note="Description of Artificial Sequence: Synthetic peptide"
RSGSGLE

SEQ ID NO: 9325 - protein, 7 aa, Artificial Sequence
  source: /note="Description of Artificial Sequence: Synthetic peptide"
RSHNEEE

SEQ ID NO: 9326 - protein, 7 aa, Artificial Sequence
  source: /note="Description of Artificial Sequence: Synthetic peptide"
RSHSTDS

SEQ ID NO: 9327 - protein, 7 aa, Artificial Sequence
  source: /note="Description of Artificial Sequence: Synthetic peptide"
RSIAADA

SEQ ID NO: 9328 - protein, 7 aa, Artificial Sequence
  source: /note="Description of Artificial Sequence: Synthetic peptide"
RSIAWSE

SEQ ID NO: 9329 - protein, 7 aa, Artificial Sequence
  source: /note="Description of Artificial Sequence: Synthetic peptide"
RSIENAD

SEQ ID NO: 9330 - protein, 7 aa, Artificial Sequence
  source: /note="Description of Artificial Sequence: Synthetic peptide"
RSIPDPT

SEQ ID NO: 9331 - protein, 7 aa, Artificial Sequence
  source: /note="Description of Artificial Sequence: Synthetic peptide"
RSIQPTN

SEQ ID NO: 9332 - protein, 7 aa, Artificial Sequence
  source: /note="Description of Artificial Sequence: Synthetic peptide"
RSIQTNP

SEQ ID NO: 9333 - protein, 7 aa, Artificial Sequence
  source: /note="Description of Artificial Sequence: Synthetic peptide"
RSKEATS

SEQ ID NO: 9334 - protein, 7 aa, Artificial Sequence
  source: /note="Description of Artificial Sequence: Synthetic peptide"
RSKQASE

SEQ ID NO: 9335 - protein, 7 aa, Artificial Sequence
  source: /note="Description of Artificial Sequence: Synthetic peptide"
RSKSSDP

SEQ ID NO: 9336 - protein, 7 aa, Artificial Sequence
  source: /note="Description of Artificial Sequence: Synthetic peptide"
RSLDFPD

SEQ ID NO: 9337 - protein, 7 aa, Artificial Sequence
  source: /note="Description of Artificial Sequence: Synthetic peptide"
RSLEHSN

SEQ ID NO: 9338 - protein, 7 aa, Artificial Sequence
  source: /note="Description of Artificial Sequence: Synthetic peptide"
RSLHGSQ

SEQ ID NO: 9339 - protein, 7 aa, Artificial Sequence
  source: /note="Description of Artificial Sequence: Synthetic peptide"
RSLNALP

SEQ ID NO: 9340 - protein, 7 aa, Artificial Sequence
  source: /note="Description of Artificial Sequence: Synthetic peptide"
RSLNSTA

SEQ ID NO: 9341 - protein, 7 aa, Artificial Sequence
  source: /note="Description of Artificial Sequence: Synthetic peptide"
RSLPAET

SEQ ID NO: 9342 - protein, 7 aa, Artificial Sequence
  source: /note="Description of Artificial Sequence: Synthetic peptide"
RSLPSPH

SEQ ID NO: 9343 - protein, 7 aa, Artificial Sequence
  source: /note="Description of Artificial Sequence: Synthetic peptide"
RSLQLSD

SEQ ID NO: 9344 - protein, 7 aa, Artificial Sequence
  source: /note="Description of Artificial Sequence: Synthetic peptide"
RSLSFAA

SEQ ID NO: 9345 - protein, 7 aa, Artificial Sequence
  source: /note="Description of Artificial Sequence: Synthetic peptide"
RSLSLLG

SEQ ID NO: 9346 - protein, 7 aa, Artificial Sequence
  source: /note="Description of Artificial Sequence: Synthetic peptide"
RSLSLPP

SEQ ID NO: 9347 - protein, 7 aa, Artificial Sequence
  source: /note="Description of Artificial Sequence: Synthetic peptide"
RSLSPTR

SEQ ID NO: 9348 - protein, 7 aa, Artificial Sequence
  source: /note="Description of Artificial Sequence: Synthetic peptide"
RSLTVTA

SEQ ID NO: 9349 - protein, 7 aa, Artificial Sequence
  source: /note="Description of Artificial Sequence: Synthetic peptide"
RSMAESV

SEQ ID NO: 9350 - protein, 7 aa, Artificial Sequence
  source: /note="Description of Artificial Sequence: Synthetic peptide"
RSMHAGA

SEQ ID NO: 9351 - protein, 7 aa, Artificial Sequence
  source: /note="Description of Artificial Sequence: Synthetic peptide"
RSMMLSP

SEQ ID NO: 9352 - protein, 7 aa, Artificial Sequence
  source: /note="Description of Artificial Sequence: Synthetic peptide"
RSMPSGA

SEQ ID NO: 9353 - protein, 7 aa, Artificial Sequence
  source: /note="Description of Artificial Sequence: Synthetic peptide"
RSMPTTT

SEQ ID NO: 9354 - protein, 7 aa, Artificial Sequence
  source: /note="Description of Artificial Sequence: Synthetic peptide"
RSMTGAL

SEQ ID NO: 9355 - protein, 7 aa, Artificial Sequence
  source: /note="Description of Artificial Sequence: Synthetic peptide"
RSNKETS

SEQ ID NO: 9356 - protein, 7 aa, Artificial Sequence
  source: /note="Description of Artificial Sequence: Synthetic peptide"
RSNLEGL

SEQ ID NO: 9357 - protein, 7 aa, Artificial Sequence
  source: /note="Description of Artificial Sequence: Synthetic peptide"
RSNMPMG

SEQ ID NO: 9358 - protein, 7 aa, Artificial Sequence
  source: /note="Description of Artificial Sequence: Synthetic peptide"
RSNPAPF

SEQ ID NO: 9359 - protein, 7 aa, Artificial Sequence
  source: /note="Description of Artificial Sequence: Synthetic peptide"
RSNPVGT

SEQ ID NO: 9360 - protein, 7 aa, Artificial Sequence
  source: /note="Description of Artificial Sequence: Synthetic peptide"
RSNSDAV

SEQ ID NO: 9361 - protein, 7 aa, Artificial Sequence
  source: /note="Description of Artificial Sequence: Synthetic peptide"
RSNVESK

SEQ ID NO: 9362 - protein, 7 aa, Artificial Sequence
  source: /note="Description of Artificial Sequence: Synthetic peptide"
RSNVLAQ

SEQ ID NO: 9363 - protein, 7 aa, Artificial Sequence
  source: /note="Description of Artificial Sequence: Synthetic peptide"
RSPDTTG

SEQ ID NO: 9364 - protein, 7 aa, Artificial Sequence
  source: /note="Description of Artificial Sequence: Synthetic peptide"
RSPEKAL

SEQ ID NO: 9365 - protein, 7 aa, Artificial Sequence
  source: /note="Description of Artificial Sequence: Synthetic peptide"
RSPFGSA

SEQ ID NO: 9366 - protein, 7 aa, Artificial Sequence
  source: /note="Description of Artificial Sequence: Synthetic peptide"
RSPGNVG

SEQ ID NO: 9367 - protein, 7 aa, Artificial Sequence
  source: /note="Description of Artificial Sequence: Synthetic peptide"
RSPPQDM

SEQ ID NO: 9368 - protein, 7 aa, Artificial Sequence
  source: /note="Description of Artificial Sequence: Synthetic peptide"
RSPPTIA

SEQ ID NO: 9369 - protein, 7 aa, Artificial Sequence
  source: /note="Description of Artificial Sequence: Synthetic peptide"
RSPQLYA

SEQ ID NO: 9370 - protein, 7 aa, Artificial Sequence
  source: /note="Description of Artificial Sequence: Synthetic peptide"
RSPQVML

SEQ ID NO: 9371 - protein, 7 aa, Artificial Sequence
  source: /note="Description of Artificial Sequence: Synthetic peptide"
RSPSGTT

SEQ ID NO: 9372 - protein, 7 aa, Artificial Sequence
  source: /note="Description of Artificial Sequence: Synthetic peptide"
RSPSTSN

SEQ ID NO: 9373 - protein, 7 aa, Artificial Sequence
  source: /note="Description of Artificial Sequence: Synthetic peptide"
RSPSVLP

SEQ ID NO: 9374 - protein, 7 aa, Artificial Sequence
  source: /note="Description of Artificial Sequence: Synthetic peptide"
RSPTFAP

SEQ ID NO: 9375 - protein, 7 aa, Artificial Sequence
  source: /note="Description of Artificial Sequence: Synthetic peptide"
RSPTSVA

SEQ ID NO: 9376 - protein, 7 aa, Artificial Sequence
  source: /note="Description of Artificial Sequence: Synthetic peptide"
RSPVKGL

SEQ ID NO: 9377 - protein, 7 aa, Artificial Sequence
  source: /note="Description of Artificial Sequence: Synthetic peptide"
RSQAQVI

SEQ ID NO: 9378 - protein, 7 aa, Artificial Sequence
  source: /note="Description of Artificial Sequence: Synthetic peptide"
RSQISDS

SEQ ID NO: 9379 - protein, 7 aa, Artificial Sequence
  source: /note="Description of Artificial Sequence: Synthetic peptide"
RSQLMGA

SEQ ID NO: 9380 - protein, 7 aa, Artificial Sequence
  source: /note="Description of Artificial Sequence: Synthetic peptide"
RSQNQGL

SEQ ID NO: 9381 - protein, 7 aa, Artificial Sequence
  source: /note="Description of Artificial Sequence: Synthetic peptide"
RSQPLSL

SEQ ID NO: 9382 - protein, 7 aa, Artificial Sequence
  source: /note="Description of Artificial Sequence: Synthetic peptide"
RSQPSTG

SEQ ID NO: 9383 - protein, 7 aa, Artificial Sequence
  source: /note="Description of Artificial Sequence: Synthetic peptide"
RSQQPYE

SEQ ID NO: 9384 - protein, 7 aa, Artificial Sequence
  source: /note="Description of Artificial Sequence: Synthetic peptide"
RSQSATL

SEQ ID NO: 9385 - protein, 7 aa, Artificial Sequence
  source: /note="Description of Artificial Sequence: Synthetic peptide"
RSQTNMY

SEQ ID NO: 9386 - protein, 7 aa, Artificial Sequence
  source: /note="Description of Artificial Sequence: Synthetic peptide"
RSRDSEH

SEQ ID NO: 9387 - protein, 7 aa, Artificial Sequence
  source: /note="Description of Artificial Sequence: Synthetic peptide"
RSSAFGP

SEQ ID NO: 9388 - protein, 7 aa, Artificial Sequence
  source: /note="Description of Artificial Sequence: Synthetic peptide"
RSSEYGS

SEQ ID NO: 9389 - protein, 7 aa, Artificial Sequence
  source: /note="Description of Artificial Sequence: Synthetic peptide"
RSSFNKD

SEQ ID NO: 9390 - protein, 7 aa, Artificial Sequence
  source: /note="Description of Artificial Sequence: Synthetic peptide"
RSSHGGE

SEQ ID NO: 9391 - protein, 7 aa, Artificial Sequence
  source: /note="Description of Artificial Sequence: Synthetic peptide"
RSSLNLH

SEQ ID NO: 9392 - protein, 7 aa, Artificial Sequence
  source: /note="Description of Artificial Sequence: Synthetic peptide"
RSSNLNA

SEQ ID NO: 9393 - protein, 7 aa, Artificial Sequence
  source: /note="Description of Artificial Sequence: Synthetic peptide"
RSSPNFQ

SEQ ID NO: 9394 - protein, 7 aa, Artificial Sequence
  source: /note="Description of Artificial Sequence: Synthetic peptide"
RSSPNSP

SEQ ID NO: 9395 - protein, 7 aa, Artificial Sequence
  source: /note="Description of Artificial Sequence: Synthetic peptide"
RSSPSDK

SEQ ID NO: 9396 - protein, 7 aa, Artificial Sequence
  source: /note="Description of Artificial Sequence: Synthetic peptide"
RSSPYLE

SEQ ID NO: 9397 - protein, 7 aa, Artificial Sequence
  source: /note="Description of Artificial Sequence: Synthetic peptide"
RSSSAVV

SEQ ID NO: 9398 - protein, 7 aa, Artificial Sequence
  source: /note="Description of Artificial Sequence: Synthetic peptide"
RSSSLTP

SEQ ID NO: 9399 - protein, 7 aa, Artificial Sequence
  source: /note="Description of Artificial Sequence: Synthetic peptide"
RSSSNPL

SEQ ID NO: 9400 - protein, 7 aa, Artificial Sequence
  source: /note="Description of Artificial Sequence: Synthetic peptide"
RSSSPTT

SEQ ID NO: 9401 - protein, 7 aa, Artificial Sequence
  source: /note="Description of Artificial Sequence: Synthetic peptide"
RSSSTQS

SEQ ID NO: 9402 - protein, 7 aa, Artificial Sequence
  source: /note="Description of Artificial Sequence: Synthetic peptide"
RSSTHSG

SEQ ID NO: 9403 - protein, 7 aa, Artificial Sequence
  source: /note="Description of Artificial Sequence: Synthetic peptide"
RSSTQIP

SEQ ID NO: 9404 - protein, 7 aa, Artificial Sequence
  source: /note="Description of Artificial Sequence: Synthetic peptide"
RSSTTLP

SEQ ID NO: 9405 - protein, 7 aa, Artificial Sequence
  source: /note="Description of Artificial Sequence: Synthetic peptide"
RSSYTEH

SEQ ID NO: 9406 - protein, 7 aa, Artificial Sequence
  source: /note="Description of Artificial Sequence: Synthetic peptide"
RSTADRD

SEQ ID NO: 9407 - protein, 7 aa, Artificial Sequence
  source: /note="Description of Artificial Sequence: Synthetic peptide"
RSTAIDF

SEQ ID NO: 9408 - protein, 7 aa, Artificial Sequence
  source: /note="Description of Artificial Sequence: Synthetic peptide"
RSTALPD

SEQ ID NO: 9409 - protein, 7 aa, Artificial Sequence
  source: /note="Description of Artificial Sequence: Synthetic peptide"
RSTGPSV

SEQ ID NO: 9410 - protein, 7 aa, Artificial Sequence
  source: /note="Description of Artificial Sequence: Synthetic peptide"
RSTLNSP

SEQ ID NO: 9411 - protein, 7 aa, Artificial Sequence
  source: /note="Description of Artificial Sequence: Synthetic peptide"
RSTMSNS

SEQ ID NO: 9412 - protein, 7 aa, Artificial Sequence
  source: /note="Description of Artificial Sequence: Synthetic peptide"
RSTNNLT

SEQ ID NO: 9413 - protein, 7 aa, Artificial Sequence
  source: /note="Description of Artificial Sequence: Synthetic peptide"
RSTSPLP

SEQ ID NO: 9414 - protein, 7 aa, Artificial Sequence
  source: /note="Description of Artificial Sequence: Synthetic peptide"
RSTTSHP

SEQ ID NO: 9415 - protein, 7 aa, Artificial Sequence
  source: /note="Description of Artificial Sequence: Synthetic peptide"
RSVATGV

SEQ ID NO: 9416 - protein, 7 aa, Artificial Sequence
  source: /note="Description of Artificial Sequence: Synthetic peptide"
RSVEPLA

SEQ ID NO: 9417 - protein, 7 aa, Artificial Sequence
  source: /note="Description of Artificial Sequence: Synthetic peptide"
RSVKFPM

SEQ ID NO: 9418 - protein, 7 aa, Artificial Sequence
  source: /note="Description of Artificial Sequence: Synthetic peptide"
RSVPESR

SEQ ID NO: 9419 - protein, 7 aa, Artificial Sequence
  source: /note="Description of Artificial Sequence: Synthetic peptide"
RSVQTPS

SEQ ID NO: 9420 - protein, 7 aa, Artificial Sequence
  source: /note="Description of Artificial Sequence: Synthetic peptide"
RSVRQND

SEQ ID NO: 9421 - protein, 7 aa, Artificial Sequence
  source: /note="Description of Artificial Sequence: Synthetic peptide"
RSVTANN

SEQ ID NO: 9422 - protein, 7 aa, Artificial Sequence
  source: /note="Description of Artificial Sequence: Synthetic peptide"
RSVTPGI

SEQ ID NO: 9423 - protein, 7 aa, Artificial Sequence
  source: /note="Description of Artificial Sequence: Synthetic peptide"
RSVVAQT

SEQ ID NO: 9424 - protein, 7 aa, Artificial Sequence
  source: /note="Description of Artificial Sequence: Synthetic peptide"
RSYGLPE

SEQ ID NO: 9425 - protein, 7 aa, Artificial Sequence
  source: /note="Description of Artificial Sequence: Synthetic peptide"
RSYNPES

SEQ ID NO: 9426 - protein, 7 aa, Artificial Sequence
  source: /note="Description of Artificial Sequence: Synthetic peptide"
RSYSPPT

SEQ ID NO: 9427 - protein, 7 aa, Artificial Sequence
  source: /note="Description of Artificial Sequence: Synthetic peptide"
RTAATCA

SEQ ID NO: 9428 - protein, 7 aa, Artificial Sequence
  source: /note="Description of Artificial Sequence: Synthetic peptide"
RTADMSG

SEQ ID NO: 9429 - protein, 7 aa, Artificial Sequence
  source: /note="Description of Artificial Sequence: Synthetic peptide"
RTAIGNL

SEQ ID NO: 9430 - protein, 7 aa, Artificial Sequence
  source: /note="Description of Artificial Sequence: Synthetic peptide"
RTANPTP

SEQ ID NO: 9431 - protein, 7 aa, Artificial Sequence
  source: /note="Description of Artificial Sequence: Synthetic peptide"
RTASLVP

SEQ ID NO: 9432 - protein, 7 aa, Artificial Sequence
  source: /note="Description of Artificial Sequence: Synthetic peptide"
RTASVAA

SEQ ID NO: 9433 - protein, 7 aa, Artificial Sequence
  source: /note="Description of Artificial Sequence: Synthetic peptide"
RTAVTDT

SEQ ID NO: 9434 - protein, 7 aa, Artificial Sequence
  source: /note="Description of Artificial Sequence: Synthetic peptide"
RTDGDVK

SEQ ID NO: 9435 - protein, 7 aa, Artificial Sequence
  source: /note="Description of Artificial Sequence: Synthetic peptide"
RTEFNMP

SEQ ID NO: 9436 - protein, 7 aa, Artificial Sequence
  source: /note="Description of Artificial Sequence: Synthetic peptide"
RTEGCAA

SEQ ID NO: 9437 - protein, 7 aa, Artificial Sequence
  source: /note="Description of Artificial Sequence: Synthetic peptide"
RTEPGPS

SEQ ID NO: 9438 - protein, 7 aa, Artificial Sequence
  source: /note="Description of Artificial Sequence: Synthetic peptide"
RTESPPQ

SEQ ID NO: 9439 - protein, 7 aa, Artificial Sequence
  source: /note="Description of Artificial Sequence: Synthetic peptide"
RTETGKL

SEQ ID NO: 9440 - protein, 7 aa, Artificial Sequence
  source: /note="Description of Artificial Sequence: Synthetic peptide"
RTFSGAD

SEQ ID NO: 9441 - protein, 7 aa, Artificial Sequence
  source: /note="Description of Artificial Sequence: Synthetic peptide"
RTGALSE

SEQ ID NO: 9442 - protein, 7 aa, Artificial Sequence
  source: /note="Description of Artificial Sequence: Synthetic peptide"
RTGEVTF

SEQ ID NO: 9443 - protein, 7 aa, Artificial Sequence
  source: /note="Description of Artificial Sequence: Synthetic peptide"
RTGNAAS

SEQ ID NO: 9444 - protein, 7 aa, Artificial Sequence
  source: /note="Description of Artificial Sequence: Synthetic peptide"
RTGPGSE

SEQ ID NO: 9445 - protein, 7 aa, Artificial Sequence
  source: /note="Description of Artificial Sequence: Synthetic peptide"
RTGPTPS

SEQ ID NO: 9446 - protein, 7 aa, Artificial Sequence
  source: /note="Description of Artificial Sequence: Synthetic peptide"
RTGSYPQ

SEQ ID NO: 9447 - protein, 7 aa, Artificial Sequence
  source: /note="Description of Artificial Sequence: Synthetic peptide"
RTGVCGN

SEQ ID NO: 9448 - protein, 7 aa, Artificial Sequence
  source: /note="Description of Artificial Sequence: Synthetic peptide"
RTHSPAG

SEQ ID NO: 9449 - protein, 7 aa, Artificial Sequence
  source: /note="Description of Artificial Sequence: Synthetic peptide"
RTLGPVG

SEQ ID NO: 9450 - protein, 7 aa, Artificial Sequence
  source: /note="Description of Artificial Sequence: Synthetic peptide"
RTLMPHP

SEQ ID NO: 9451 - protein, 7 aa, Artificial Sequence
  source: /note="Description of Artificial Sequence: Synthetic peptide"
RTLNSVA

SEQ ID NO: 9452 - protein, 7 aa, Artificial Sequence
  source: /note="Description of Artificial Sequence: Synthetic peptide"
RTMDAPV

SEQ ID NO: 9453 - protein, 7 aa, Artificial Sequence
  source: /note="Description of Artificial Sequence: Synthetic peptide"
RTNGDVK

SEQ ID NO: 9454 - protein, 7 aa, Artificial Sequence
  source: /note="Description of Artificial Sequence: Synthetic peptide"
RTNGLSP

SEQ ID NO: 9455 - protein, 7 aa, Artificial Sequence
  source: /note="Description of Artificial Sequence: Synthetic peptide"
RTNNDVT

SEQ ID NO: 9456 - protein, 7 aa, Artificial Sequence
  source: /note="Description of Artificial Sequence: Synthetic peptide"
RTNSQLD

SEQ ID NO: 9457 - protein, 7 aa, Artificial Sequence
  source: /note="Description of Artificial Sequence: Synthetic peptide"
RTNSTSM

SEQ ID NO: 9458 - protein, 7 aa, Artificial Sequence
  source: /note="Description of Artificial Sequence: Synthetic peptide"
RTPALSN

SEQ ID NO: 9459 - protein, 7 aa, Artificial Sequence
  source: /note="Description of Artificial Sequence: Synthetic peptide"
RTPDSLG

SEQ ID NO: 9460 - protein, 7 aa, Artificial Sequence
  source: /note="Description of Artificial Sequence: Synthetic peptide"
RTPEAIS

SEQ ID NO: 9461 - protein, 7 aa, Artificial Sequence
  source: /note="Description of Artificial Sequence: Synthetic peptide"
RTPHSSF

SEQ ID NO: 9462 - protein, 7 aa, Artificial Sequence
  source: /note="Description of Artificial Sequence: Synthetic peptide"
RTPKLPM

SEQ ID NO: 9463 - protein, 7 aa, Artificial Sequence
  source: /note="Description of Artificial Sequence: Synthetic peptide"
RTPMLEP

SEQ ID NO: 9464 - protein, 7 aa, Artificial Sequence
  source: /note="Description of Artificial Sequence: Synthetic peptide"
RTPVSGE

SEQ ID NO: 9465 - protein, 7 aa, Artificial Sequence
  source: /note="Description of Artificial Sequence: Synthetic peptide"
RTQIGVN

SEQ ID NO: 9466 - protein, 7 aa, Artificial Sequence
  source: /note="Description of Artificial Sequence: Synthetic peptide"
RTSAVGL

SEQ ID NO: 9467 - protein, 7 aa, Artificial Sequence
  source: /note="Description of Artificial Sequence: Synthetic peptide"
RTSCSPG

SEQ ID NO: 9468 - protein, 7 aa, Artificial Sequence
  source: /note="Description of Artificial Sequence: Synthetic peptide"
RTSDASF

SEQ ID NO: 9469 - protein, 7 aa, Artificial Sequence
  source: /note="Description of Artificial Sequence: Synthetic peptide"
RTSDLSA

SEQ ID NO: 9470 - protein, 7 aa, Artificial Sequence
  source: /note="Description of Artificial Sequence: Synthetic peptide"
RTSGPTD

SEQ ID NO: 9471 - protein, 7 aa, Artificial Sequence
  source: /note="Description of Artificial Sequence: Synthetic peptide"
RTSMGQA

SEQ ID NO: 9472 - protein, 7 aa, Artificial Sequence
  source: /note="Description of Artificial Sequence: Synthetic peptide"
RTSMVSN

SEQ ID NO: 9473 - protein, 7 aa, Artificial Sequence
  source: /note="Description of Artificial Sequence: Synthetic peptide"
RTSPESR

SEQ ID NO: 9474 - protein, 7 aa, Artificial Sequence
  source: /note="Description of Artificial Sequence: Synthetic peptide"
RTSPLAV

SEQ ID NO: 9475 - protein, 7 aa, Artificial Sequence
  source: /note="Description of Artificial Sequence: Synthetic peptide"
RTSPQSS

SEQ ID NO: 9476 - protein, 7 aa, Artificial Sequence
  source: /note="Description of Artificial Sequence: Synthetic peptide"
RTSPSFH

SEQ ID NO: 9477 - protein, 7 aa, Artificial Sequence
  source: /note="Description of Artificial Sequence: Synthetic peptide"
RTSQTEP

SEQ ID NO: 9478 - protein, 7 aa, Artificial Sequence
  source: /note="Description of Artificial Sequence: Synthetic peptide"
RTSTEGS

SEQ ID NO: 9479 - protein, 7 aa, Artificial Sequence
  source: /note="Description of Artificial Sequence: Synthetic peptide"
RTSTYGG

SEQ ID NO: 9480 - protein, 7 aa, Artificial Sequence
  source: /note="Description of Artificial Sequence: Synthetic peptide"
RTSVAVA

SEQ ID NO: 9481 - protein, 7 aa, Artificial Sequence
  source: /note="Description of Artificial Sequence: Synthetic peptide"
RTTDKQG

SEQ ID NO: 9482 - protein, 7 aa, Artificial Sequence
  source: /note="Description of Artificial Sequence: Synthetic peptide"
RTTEHSM

SEQ ID NO: 9483 - protein, 7 aa, Artificial Sequence
  source: /note="Description of Artificial Sequence: Synthetic peptide"
RTTQSVM

SEQ ID NO: 9484 - protein, 7 aa, Artificial Sequence
  source: /note="Description of Artificial Sequence: Synthetic peptide"
RTTSDTF

SEQ ID NO: 9485 - protein, 7 aa, Artificial Sequence
  source: /note="Description of Artificial Sequence: Synthetic peptide"
RTTYQSS

SEQ ID NO: 9486 - protein, 7 aa, Artificial Sequence
  source: /note="Description of Artificial Sequence: Synthetic peptide"
RTVGSLN

SEQ ID NO: 9487 - protein, 7 aa, Artificial Sequence
  source: /note="Description of Artificial Sequence: Synthetic peptide"
RTVKAEA

SEQ ID NO: 9488 - protein, 7 aa, Artificial Sequence
  source: /note="Description of Artificial Sequence: Synthetic peptide"
RTYHVPD

SEQ ID NO: 9489 - protein, 7 aa, Artificial Sequence
  source: /note="Description of Artificial Sequence: Synthetic peptide"
RVAASSI

SEQ ID NO: 9490 - protein, 7 aa, Artificial Sequence
  source: /note="Description of Artificial Sequence: Synthetic peptide"
RVAGSNG

SEQ ID NO: 9491 - protein, 7 aa, Artificial Sequence
  source: /note="Description of Artificial Sequence: Synthetic peptide"
RVAMGED

SEQ ID NO: 9492 - protein, 7 aa, Artificial Sequence
  source: /note="Description of Artificial Sequence: Synthetic peptide"
RVASPTA

SEQ ID NO: 9493 - protein, 7 aa, Artificial Sequence
  source: /note="Description of Artificial Sequence: Synthetic peptide"
RVDASHR

SEQ ID NO: 9494 - protein, 7 aa, Artificial Sequence
  source: /note="Description of Artificial Sequence: Synthetic peptide"
RVDSVRS

SEQ ID NO: 9495 - protein, 7 aa, Artificial Sequence
  source: /note="Description of Artificial Sequence: Synthetic peptide"
RVDTRMQ

SEQ ID NO: 9496 - protein, 7 aa, Artificial Sequence
  source: /note="Description of Artificial Sequence: Synthetic peptide"
RVEECVI

SEQ ID NO: 9497 - protein, 7 aa, Artificial Sequence
  source: /note="Description of Artificial Sequence: Synthetic peptide"
RVGDGKH

SEQ ID NO: 9498 - protein, 7 aa, Artificial Sequence
  source: /note="Description of Artificial Sequence: Synthetic peptide"
RVGDKLQ

SEQ ID NO: 9499 - protein, 7 aa, Artificial Sequence
  source: /note="Description of Artificial Sequence: Synthetic peptide"
RVGDSAF

SEQ ID NO: 9500 - protein, 7 aa, Artificial Sequence
  source: /note="Description of Artificial Sequence: Synthetic peptide"
RVGGSSS

SEQ ID NO: 9501 - protein, 7 aa, Artificial Sequence
  source: /note="Description of Artificial Sequence: Synthetic peptide"
RVGHCLG

SEQ ID NO: 9502 - protein, 7 aa, Artificial Sequence
  source: /note="Description of Artificial Sequence: Synthetic peptide"
RVGLAST

SEQ ID NO: 9503 - protein, 7 aa, Artificial Sequence
  source: /note="Description of Artificial Sequence: Synthetic peptide"
RVGNVDT

SEQ ID NO: 9504 - protein, 7 aa, Artificial Sequence
  source: /note="Description of Artificial Sequence: Synthetic peptide"
RVGRPSE

SEQ ID NO: 9505 - protein, 7 aa, Artificial Sequence
  source: /note="Description of Artificial Sequence: Synthetic peptide"
RVIPACQ

SEQ ID NO: 9506 - protein, 7 aa, Artificial Sequence
  source: /note="Description of Artificial Sequence: Synthetic peptide"
RVLDLEN

SEQ ID NO: 9507 - protein, 7 aa, Artificial Sequence
  source: /note="Description of Artificial Sequence: Synthetic peptide"
RVLIEPV

SEQ ID NO: 9508 - protein, 7 aa, Artificial Sequence
  source: /note="Description of Artificial Sequence: Synthetic peptide"
RVLNHLG

SEQ ID NO: 9509 - protein, 7 aa, Artificial Sequence
  source: /note="Description of Artificial Sequence: Synthetic peptide"
RVMDRAA

SEQ ID NO: 9510 - protein, 7 aa, Artificial Sequence
  source: /note="Description of Artificial Sequence: Synthetic peptide"
RVNAPGV

SEQ ID NO: 9511 - protein, 7 aa, Artificial Sequence
  source: /note="Description of Artificial Sequence: Synthetic peptide"
RVNHDET

SEQ ID NO: 9512 - protein, 7 aa, Artificial Sequence
  source: /note="Description of Artificial Sequence: Synthetic peptide"
RVNILAE

SEQ ID NO: 9513 - protein, 7 aa, Artificial Sequence
  source: /note="Description of Artificial Sequence: Synthetic peptide"
RVNPDRY

SEQ ID NO: 9514 - protein, 7 aa, Artificial Sequence
  source: /note="Description of Artificial Sequence: Synthetic peptide"
RVNSIAS

SEQ ID NO: 9515 - protein, 7 aa, Artificial Sequence
  source: /note="Description of Artificial Sequence: Synthetic peptide"
RVPDIAR

SEQ ID NO: 9516 - protein, 7 aa, Artificial Sequence
  source: /note="Description of Artificial Sequence: Synthetic peptide"
RVPDSTR

SEQ ID NO: 9517 - protein, 7 aa, Artificial Sequence
  source: /note="Description of Artificial Sequence: Synthetic peptide"
RVPGILH

SEQ ID NO: 9518 - protein, 7 aa, Artificial Sequence
  source: /note="Description of Artificial Sequence: Synthetic peptide"
RVPNTLP

SEQ ID NO: 9519 - protein, 7 aa, Artificial Sequence
  source: /note="Description of Artificial Sequence: Synthetic peptide"
RVPNWPG

SEQ ID NO: 9520 - protein, 7 aa, Artificial Sequence
  source: /note="Description of Artificial Sequence: Synthetic peptide"
RVPSQSS

SEQ ID NO: 9521 - protein, 7 aa, Artificial Sequence
  source: /note="Description of Artificial Sequence: Synthetic peptide"
RVQNGLN

SEQ ID NO: 9522 - protein, 7 aa, Artificial Sequence
  source: /note="Description of Artificial Sequence: Synthetic peptide"
RVQQASL

SEQ ID NO: 9523 - protein, 7 aa, Artificial Sequence
  source: /note="Description of Artificial Sequence: Synthetic peptide"
RVQSNVP

SEQ ID NO: 9524 - protein, 7 aa, Artificial Sequence
  source: /note="Description of Artificial Sequence: Synthetic peptide"
RVQTIPS

SEQ ID NO: 9525 - protein, 7 aa, Artificial Sequence
  source: /note="Description of Artificial Sequence: Synthetic peptide"
RVSQPDM

SEQ ID NO: 9526 - protein, 7 aa, Artificial Sequence
  source: /note="Description of Artificial Sequence: Synthetic peptide"
RVSQVTM

SEQ ID NO: 9527 - protein, 7 aa, Artificial Sequence
  source: /note="Description of Artificial Sequence: Synthetic peptide"
RVSTIST

SEQ ID NO: 9528 - protein, 7 aa, Artificial Sequence
  source: /note="Description of Artificial Sequence: Synthetic peptide"
RVSTTSD

SEQ ID NO: 9529 - protein, 7 aa, Artificial Sequence
  source: /note="Description of Artificial Sequence: Synthetic peptide"
RVSYDTE

SEQ ID NO: 9530 - protein, 7 aa, Artificial Sequence
  source: /note="Description of Artificial Sequence: Synthetic peptide"
RVTIGTS

SEQ ID NO: 9531 - protein, 7 aa, Artificial Sequence
  source: /note="Description of Artificial Sequence: Synthetic peptide"
RVTPELF

SEQ ID NO: 9532 - protein, 7 aa, Artificial Sequence
  source: /note="Description of Artificial Sequence: Synthetic peptide"
RVTSTLS

SEQ ID NO: 9533 - protein, 7 aa, Artificial Sequence
  source: /note="Description of Artificial Sequence: Synthetic peptide"
RVTTAEL

SEQ ID NO: 9534 - protein, 7 aa, Artificial Sequence
  source: /note="Description of Artificial Sequence: Synthetic peptide"
RVTTELP

SEQ ID NO: 9535 - protein, 7 aa, Artificial Sequence
  source: /note="Description of Artificial Sequence: Synthetic peptide"
RVVGGST

SEQ ID NO: 9536 - protein, 7 aa, Artificial Sequence
  source: /note="Description of Artificial Sequence: Synthetic peptide"
RVVGPVN

SEQ ID NO: 9537 - protein, 7 aa, Artificial Sequence
  source: /note="Description of Artificial Sequence: Synthetic peptide"
RVVTVLE

SEQ ID NO: 9538 - protein, 7 aa, Artificial Sequence
  source: /note="Description of Artificial Sequence: Synthetic peptide"
RVYNMDG

SEQ ID NO: 9539 - protein, 7 aa, Artificial Sequence
  source: /note="Description of Artificial Sequence: Synthetic peptide"
RWADTVT

SEQ ID NO: 9540 - protein, 7 aa, Artificial Sequence
  source: /note="Description of Artificial Sequence: Synthetic peptide"
RWDDGAR

SEQ ID NO: 9541 - protein, 7 aa, Artificial Sequence
  source: /note="Description of Artificial Sequence: Synthetic peptide"
RWDVKAD

SEQ ID NO: 9542 - protein, 7 aa, Artificial Sequence
  source: /note="Description of Artificial Sequence: Synthetic peptide"
RWKAEPP

SEQ ID NO: 9543 - protein, 7 aa, Artificial Sequence
  source: /note="Description of Artificial Sequence: Synthetic peptide"
RWSEDGG

SEQ ID NO: 9544 - protein, 7 aa, Artificial Sequence
  source: /note="Description of Artificial Sequence: Synthetic peptide"
RWSPAVP

SEQ ID NO: 9545 - protein, 7 aa, Artificial Sequence
  source: /note="Description of Artificial Sequence: Synthetic peptide"
RYAEPYI

SEQ ID NO: 9546 - protein, 7 aa, Artificial Sequence
  source: /note="Description of Artificial Sequence: Synthetic peptide"
RYDLTAP

SEQ ID NO: 9547 - protein, 7 aa, Artificial Sequence
  source: /note="Description of Artificial Sequence: Synthetic peptide"
RYESNAH

SEQ ID NO: 9548 - protein, 7 aa, Artificial Sequence
  source: /note="Description of Artificial Sequence: Synthetic peptide"
RYGASNP

SEQ ID NO: 9549 - protein, 7 aa, Artificial Sequence
  source: /note="Description of Artificial Sequence: Synthetic peptide"
RYGGSIS

SEQ ID NO: 9550 - protein, 7 aa, Artificial Sequence
  source: /note="Description of Artificial Sequence: Synthetic peptide"
RYHDTGD

SEQ ID NO: 9551 - protein, 7 aa, Artificial Sequence
  source: /note="Description of Artificial Sequence: Synthetic peptide"
RYLDRTE

SEQ ID NO: 9552 - protein, 7 aa, Artificial Sequence
  source: /note="Description of Artificial Sequence: Synthetic peptide"
RYMEPSP

SEQ ID NO: 9553 - protein, 7 aa, Artificial Sequence
  source: /note="Description of Artificial Sequence: Synthetic peptide"
RYNEDEA

SEQ ID NO: 9554 - protein, 7 aa, Artificial Sequence
  source: /note="Description of Artificial Sequence: Synthetic peptide"
RYNETVS

SEQ ID NO: 9555 - protein, 7 aa, Artificial Sequence
  source: /note="Description of Artificial Sequence: Synthetic peptide"
RYNNQVP

SEQ ID NO: 9556 - protein, 7 aa, Artificial Sequence
  source: /note="Description of Artificial Sequence: Synthetic peptide"
RYNTAIS

SEQ ID NO: 9557 - protein, 7 aa, Artificial Sequence
  source: /note="Description of Artificial Sequence: Synthetic peptide"
RYPSQTS

SEQ ID NO: 9558 - protein, 7 aa, Artificial Sequence
  source: /note="Description of Artificial Sequence: Synthetic peptide"
RYSNNLP

SEQ ID NO: 9559 - protein, 7 aa, Artificial Sequence
  source: /note="Description of Artificial Sequence: Synthetic peptide"
RYSPGSP

SEQ ID NO: 9560 - protein, 7 aa, Artificial Sequence
  source: /note="Description of Artificial Sequence: Synthetic peptide"
RYTVADA

SEQ ID NO: 9561 - protein, 7 aa, Artificial Sequence
  source: /note="Description of Artificial Sequence: Synthetic peptide"
RYVDPLM

SEQ ID NO: 9562 - protein, 7 aa, Artificial Sequence
  source: /note="Description of Artificial Sequence: Synthetic peptide"
SAAHIDL

SEQ ID NO: 9563 - protein, 7 aa, Artificial Sequence
  source: /note="Description of Artificial Sequence: Synthetic peptide"
SAALLEP

SEQ ID NO: 9564 - protein, 7 aa, Artificial Sequence
  source: /note="Description of Artificial Sequence: Synthetic peptide"
SAALREG

SEQ ID NO: 9565 - protein, 7 aa, Artificial Sequence
  source: /note="Description of Artificial Sequence: Synthetic peptide"
SAARDTD

SEQ ID NO: 9566 - protein, 7 aa, Artificial Sequence
  source: /note="Description of Artificial Sequence: Synthetic peptide"
SAARMTA

SEQ ID NO: 9567 - protein, 7 aa, Artificial Sequence
  source: /note="Description of Artificial Sequence: Synthetic peptide"
SAASGHH

SEQ ID NO: 9568 - protein, 7 aa, Artificial Sequence
  source: /note="Description of Artificial Sequence: Synthetic peptide"
SAASKLL

SEQ ID NO: 9569 - protein, 7 aa, Artificial Sequence
  source: /note="Description of Artificial Sequence: Synthetic peptide"
SAASSMR

SEQ ID NO: 9570 - protein, 7 aa, Artificial Sequence
  source: /note="Description of Artificial Sequence: Synthetic peptide"
SAASTVF

SEQ ID NO: 9571 - protein, 7 aa, Artificial Sequence
  source: /note="Description of Artificial Sequence: Synthetic peptide"
SAAYDPK

SEQ ID NO: 9572 - protein, 7 aa, Artificial Sequence
  source: /note="Description of Artificial Sequence: Synthetic peptide"
SADFQRG

SEQ ID NO: 9573 - protein, 7 aa, Artificial Sequence
  source: /note="Description of Artificial Sequence: Synthetic peptide"
SADTMLI

SEQ ID NO: 9574 - protein, 7 aa, Artificial Sequence
  source: /note="Description of Artificial Sequence: Synthetic peptide"
SAEAHIT

SEQ ID NO: 9575 - protein, 7 aa, Artificial Sequence
  source: /note="Description of Artificial Sequence: Synthetic peptide"
SAEIEFL

SEQ ID NO: 9576 - protein, 7 aa, Artificial Sequence
  source: /note="Description of Artificial Sequence: Synthetic peptide"
SAESVPH

SEQ ID NO: 9577 - protein, 7 aa, Artificial Sequence
  source: /note="Description of Artificial Sequence: Synthetic peptide"
SAEYRSV

SEQ ID NO: 9578 - protein, 7 aa, Artificial Sequence
  source: /note="Description of Artificial Sequence: Synthetic peptide"
SAFGQHG

SEQ ID NO: 9579 - protein, 7 aa, Artificial Sequence
  source: /note="Description of Artificial Sequence: Synthetic peptide"
SAFLPHA

SEQ ID NO: 9580 - protein, 7 aa, Artificial Sequence
  source: /note="Description of Artificial Sequence: Synthetic peptide"
SAFLPTP

SEQ ID NO: 9581 - protein, 7 aa, Artificial Sequence
  source: /note="Description of Artificial Sequence: Synthetic peptide"
SAFSAGA

SEQ ID NO: 9582 - protein, 7 aa, Artificial Sequence
  source: /note="Description of Artificial Sequence: Synthetic peptide"
SAFTNYP

SEQ ID NO: 9583 - protein, 7 aa, Artificial Sequence
  source: /note="Description of Artificial Sequence: Synthetic peptide"
SAGERSL

SEQ ID NO: 9584 - protein, 7 aa, Artificial Sequence
  source: /note="Description of Artificial Sequence: Synthetic peptide"
SAGGERT

SEQ ID NO: 9585 - protein, 7 aa, Artificial Sequence
  source: /note="Description of Artificial Sequence: Synthetic peptide"
SAGGGMN

SEQ ID NO: 9586 - protein, 7 aa, Artificial Sequence
  source: /note="Description of Artificial Sequence: Synthetic peptide"
SAGKLPM

SEQ ID NO: 9587 - protein, 7 aa, Artificial Sequence
  source: /note="Description of Artificial Sequence: Synthetic peptide"
SAGLHAV

SEQ ID NO: 9588 - protein, 7 aa, Artificial Sequence
  source: /note="Description of Artificial Sequence: Synthetic peptide"
SAGPAPR

SEQ ID NO: 9589 - protein, 7 aa, Artificial Sequence
  source: /note="Description of Artificial Sequence: Synthetic peptide"
SAGQSQR

SEQ ID NO: 9590 - protein, 7 aa, Artificial Sequence
  source: /note="Description of Artificial Sequence: Synthetic peptide"
SAGRFET

SEQ ID NO: 9591 - protein, 7 aa, Artificial Sequence
  source: /note="Description of Artificial Sequence: Synthetic peptide"
SAGTAMI

SEQ ID NO: 9592 - protein, 7 aa, Artificial Sequence
  source: /note="Description of Artificial Sequence: Synthetic peptide"
SAGVHKS

SEQ ID NO: 9593 - protein, 7 aa, Artificial Sequence
  source: /note="Description of Artificial Sequence: Synthetic peptide"
SAHCPTP

SEQ ID NO: 9594 - protein, 7 aa, Artificial Sequence
  source: /note="Description of Artificial Sequence: Synthetic peptide"
SAHHSHM

SEQ ID NO: 9595 - protein, 7 aa, Artificial Sequence
  source: /note="Description of Artificial Sequence: Synthetic peptide"
SAHMSRA

SEQ ID NO: 9596 - protein, 7 aa, Artificial Sequence
  source: /note="Description of Artificial Sequence: Synthetic peptide"
SAHQLQT

SEQ ID NO: 9597 - protein, 7 aa, Artificial Sequence
  source: /note="Description of Artificial Sequence: Synthetic peptide"
SAHSPQM

SEQ ID NO: 9598 - protein, 7 aa, Artificial Sequence
  source: /note="Description of Artificial Sequence: Synthetic peptide"
SAHSTPH

SEQ ID NO: 9599 - protein, 7 aa, Artificial Sequence
  source: /note="Description of Artificial Sequence: Synthetic peptide"
SAICQSV

SEQ ID NO: 9600 - protein, 7 aa, Artificial Sequence
  source: /note="Description of Artificial Sequence: Synthetic peptide"
SAIMPSP

SEQ ID NO: 9601 - protein, 7 aa, Artificial Sequence
  source: /note="Description of Artificial Sequence: Synthetic peptide"
SAIMSRS

SEQ ID NO: 9602 - protein, 7 aa, Artificial Sequence
  source: /note="Description of Artificial Sequence: Synthetic peptide"
SAINRLP

SEQ ID NO: 9603 - protein, 7 aa, Artificial Sequence
  source: /note="Description of Artificial Sequence: Synthetic peptide"
SAISSMS

SEQ ID NO: 9604 - protein, 7 aa, Artificial Sequence
  source: /note="Description of Artificial Sequence: Synthetic peptide"
SAKCVQA

SEQ ID NO: 9605 - protein, 7 aa, Artificial Sequence
  source: /note="Description of Artificial Sequence: Synthetic peptide"
SAKHSAM

SEQ ID NO: 9606 - protein, 7 aa, Artificial Sequence
  source: /note="Description of Artificial Sequence: Synthetic peptide"
SAKSAFS

SEQ ID NO: 9607 - protein, 7 aa, Artificial Sequence
  source: /note="Description of Artificial Sequence: Synthetic peptide"
SAKSMVV

SEQ ID NO: 9608 - protein, 7 aa, Artificial Sequence
  source: /note="Description of Artificial Sequence: Synthetic peptide"
SAKTMIP

SEQ ID NO: 9609 - protein, 7 aa, Artificial Sequence
  source: /note="Description of Artificial Sequence: Synthetic peptide"
SAKTSES

SEQ ID NO: 9610 - protein, 7 aa, Artificial Sequence
  source: /note="Description of Artificial Sequence: Synthetic peptide"
SALAGLS

SEQ ID NO: 9611 - protein, 7 aa, Artificial Sequence
  source: /note="Description of Artificial Sequence: Synthetic peptide"
SALDLNH

SEQ ID NO: 9612 - protein, 7 aa, Artificial Sequence
  source: /note="Description of Artificial Sequence: Synthetic peptide"
SALDNIR

SEQ ID NO: 9613 - protein, 7 aa, Artificial Sequence
  source: /note="Description of Artificial Sequence: Synthetic peptide"
SALGLSV

SEQ ID NO: 9614 - protein, 7 aa, Artificial Sequence
  source: /note="Description of Artificial Sequence: Synthetic peptide"
SALGSRV

SEQ ID NO: 9615 - protein, 7 aa, Artificial Sequence
  source: /note="Description of Artificial Sequence: Synthetic peptide"
SALHLAA

SEQ ID NO: 9616 - protein, 7 aa, Artificial Sequence
  source: /note="Description of Artificial Sequence: Synthetic peptide"
SALKTDS

SEQ ID NO: 9617 - protein, 7 aa, Artificial Sequence
  source: /note="Description of Artificial Sequence: Synthetic peptide"
SALNKRI

SEQ ID NO: 9618 - protein, 7 aa, Artificial Sequence
  source: /note="Description of Artificial Sequence: Synthetic peptide"
SALPKPE

SEQ ID NO: 9619 - protein, 7 aa, Artificial Sequence
  source: /note="Description of Artificial Sequence: Synthetic peptide"
SALRLVS

SEQ ID NO: 9620 - protein, 7 aa, Artificial Sequence
  source: /note="Description of Artificial Sequence: Synthetic peptide"
SALRPDS

SEQ ID NO: 9621 - protein, 7 aa, Artificial Sequence
  source: /note="Description of Artificial Sequence: Synthetic peptide"
SALRSVT

SEQ ID NO: 9622 - protein, 7 aa, Artificial Sequence
  source: /note="Description of Artificial Sequence: Synthetic peptide"
SALRVPA

SEQ ID NO: 9623 - protein, 7 aa, Artificial Sequence
  source: /note="Description of Artificial Sequence: Synthetic peptide"
SALSTTG

SEQ ID NO: 9624 - protein, 7 aa, Artificial Sequence
  source: /note="Description of Artificial Sequence: Synthetic peptide"
SALTDKL

SEQ ID NO: 9625 - protein, 7 aa, Artificial Sequence
  source: /note="Description of Artificial Sequence: Synthetic peptide"
SALTHVS

SEQ ID NO: 9626 - protein, 7 aa, Artificial Sequence
  source: /note="Description of Artificial Sequence: Synthetic peptide"
SALTSSL

SEQ ID NO: 9627 - protein, 7 aa, Artificial Sequence
  source: /note="Description of Artificial Sequence: Synthetic peptide"
SAMHPML

SEQ ID NO: 9628 - protein, 7 aa, Artificial Sequence
  source: /note="Description of Artificial Sequence: Synthetic peptide"
SAMKHPS

SEQ ID NO: 9629 - protein, 7 aa, Artificial Sequence
  source: /note="Description of Artificial Sequence: Synthetic peptide"
SAMRPGS

SEQ ID NO: 9630 - protein, 7 aa, Artificial Sequence
  source: /note="Description of Artificial Sequence: Synthetic peptide"
SAMTKNL

SEQ ID NO: 9631 - protein, 7 aa, Artificial Sequence
  source: /note="Description of Artificial Sequence: Synthetic peptide"
SANGSSS

SEQ ID NO: 9632 - protein, 7 aa, Artificial Sequence
  source: /note="Description of Artificial Sequence: Synthetic peptide"
SANITVK

SEQ ID NO: 9633 - protein, 7 aa, Artificial Sequence
  source: /note="Description of Artificial Sequence: Synthetic peptide"
SANPHIT

SEQ ID NO: 9634 - protein, 7 aa, Artificial Sequence
  source: /note="Description of Artificial Sequence: Synthetic peptide"
SANSLPA

SEQ ID NO: 9635 - protein, 7 aa, Artificial Sequence
  source: /note="Description of Artificial Sequence: Synthetic peptide"
SANTARS

SEQ ID NO: 9636 - protein, 7 aa, Artificial Sequence
  source: /note="Description of Artificial Sequence: Synthetic peptide"
SAPEWMP

SEQ ID NO: 9637 - protein, 7 aa, Artificial Sequence
  source: /note="Description of Artificial Sequence: Synthetic peptide"
SAPFATE

SEQ ID NO: 9638 - protein, 7 aa, Artificial Sequence
  source: /note="Description of Artificial Sequence: Synthetic peptide"
SAPGASF

SEQ ID NO: 9639 - protein, 7 aa, Artificial Sequence
  source: /note="Description of Artificial Sequence: Synthetic peptide"
SAPHTHL

SEQ ID NO: 9640 - protein, 7 aa, Artificial Sequence
  source: /note="Description of Artificial Sequence: Synthetic peptide"
SAPHTIP

SEQ ID NO: 9641 - protein, 7 aa, Artificial Sequence
  source: /note="Description of Artificial Sequence: Synthetic peptide"
SAPLIGS

SEQ ID NO: 9642 - protein, 7 aa, Artificial Sequence
  source: /note="Description of Artificial Sequence: Synthetic peptide"
SAPMTCA

SEQ ID NO: 9643 - protein, 7 aa, Artificial Sequence
  source: /note="Description of Artificial Sequence: Synthetic peptide"
SAPNSSS

SEQ ID NO: 9644 - protein, 7 aa, Artificial Sequence
  source: /note="Description of Artificial Sequence: Synthetic peptide"
SAPVRSP

SEQ ID NO: 9645 - protein, 7 aa, Artificial Sequence
  source: /note="Description of Artificial Sequence: Synthetic peptide"
SAQGARP

SEQ ID NO: 9646 - protein, 7 aa, Artificial Sequence
  source: /note="Description of Artificial Sequence: Synthetic peptide"
SAQLSLP

SEQ ID NO: 9647 - protein, 7 aa, Artificial Sequence
  source: /note="Description of Artificial Sequence: Synthetic peptide"
SARDAHS

SEQ ID NO: 9648 - protein, 7 aa, Artificial Sequence
  source: /note="Description of Artificial Sequence: Synthetic peptide"
SARDHRP

SEQ ID NO: 9649 - protein, 7 aa, Artificial Sequence
  source: /note="Description of Artificial Sequence: Synthetic peptide"
SARGSDP

SEQ ID NO: 9650 - protein, 7 aa, Artificial Sequence
  source: /note="Description of Artificial Sequence: Synthetic peptide"
SARGVAT

SEQ ID NO: 9651 - protein, 7 aa, Artificial Sequence
  source: /note="Description of Artificial Sequence: Synthetic peptide"
SARIFKD

SEQ ID NO: 9652 - protein, 7 aa, Artificial Sequence
  source: /note="Description of Artificial Sequence: Synthetic peptide"
SARMALG

SEQ ID NO: 9653 - protein, 7 aa, Artificial Sequence
  source: /note="Description of Artificial Sequence: Synthetic peptide"
SARQVSG

SEQ ID NO: 9654 - protein, 7 aa, Artificial Sequence
  source: /note="Description of Artificial Sequence: Synthetic peptide"
SARSDPA

SEQ ID NO: 9655 - protein, 7 aa, Artificial Sequence
  source: /note="Description of Artificial Sequence: Synthetic peptide"
SARTAGP

SEQ ID NO: 9656 - protein, 7 aa, Artificial Sequence
  source: /note="Description of Artificial Sequence: Synthetic peptide"
SARTDRT

SEQ ID NO: 9657 - protein, 7 aa, Artificial Sequence
  source: /note="Description of Artificial Sequence: Synthetic peptide"
SARTVDM

SEQ ID NO: 9658 - protein, 7 aa, Artificial Sequence
  source: /note="Description of Artificial Sequence: Synthetic peptide"
SARVFPA

SEQ ID NO: 9659 - protein, 7 aa, Artificial Sequence
  source: /note="Description of Artificial Sequence: Synthetic peptide"
SARVNIG

SEQ ID NO: 9660 - protein, 7 aa, Artificial Sequence
  source: /note="Description of Artificial Sequence: Synthetic peptide"
SARVSNS

SEQ ID NO: 9661 - protein, 7 aa, Artificial Sequence
  source: /note="Description of Artificial Sequence: Synthetic peptide"
SASALVL

SEQ ID NO: 9662 - protein, 7 aa, Artificial Sequence
  source: /note="Description of Artificial Sequence: Synthetic peptide"
SASERFR

SEQ ID NO: 9663 - protein, 7 aa, Artificial Sequence
  source: /note="Description of Artificial Sequence: Synthetic peptide"
SASESSM

SEQ ID NO: 9664 - protein, 7 aa, Artificial Sequence
  source: /note="Description of Artificial Sequence: Synthetic peptide"
SASIQVM

SEQ ID NO: 9665 - protein, 7 aa, Artificial Sequence
  source: /note="Description of Artificial Sequence: Synthetic peptide"
SASKPTS

SEQ ID NO: 9666 - protein, 7 aa, Artificial Sequence
  source: /note="Description of Artificial Sequence: Synthetic peptide"
SASLRLP

SEQ ID NO: 9667 - protein, 7 aa, Artificial Sequence
  source: /note="Description of Artificial Sequence: Synthetic peptide"
SASMRAL

SEQ ID NO: 9668 - protein, 7 aa, Artificial Sequence
  source: /note="Description of Artificial Sequence: Synthetic peptide"
SASNSVG

SEQ ID NO: 9669 - protein, 7 aa, Artificial Sequence
  source: /note="Description of Artificial Sequence: Synthetic peptide"
SASPAGH

SEQ ID NO: 9670 - protein, 7 aa, Artificial Sequence
  source: /note="Description of Artificial Sequence: Synthetic peptide"
SASPQRT

SEQ ID NO: 9671 - protein, 7 aa, Artificial Sequence
  source: /note="Description of Artificial Sequence: Synthetic peptide"
SASRQIP

SEQ ID NO: 9672 - protein, 7 aa, Artificial Sequence
  source: /note="Description of Artificial Sequence: Synthetic peptide"
SASSAAQ

SEQ ID NO: 9673 - protein, 7 aa, Artificial Sequence
  source: /note="Description of Artificial Sequence: Synthetic peptide"
SASSKTG

SEQ ID NO: 9674 - protein, 7 aa, Artificial Sequence
  source: /note="Description of Artificial Sequence: Synthetic peptide"
SASTPKH

SEQ ID NO: 9675 - protein, 7 aa, Artificial Sequence
  source: /note="Description of Artificial Sequence: Synthetic peptide"
SASTQIS

SEQ ID NO: 9676 - protein, 7 aa, Artificial Sequence
  source: /note="Description of Artificial Sequence: Synthetic peptide"
SASVRGN

SEQ ID NO: 9677 - protein, 7 aa, Artificial Sequence
  source: /note="Description of Artificial Sequence: Synthetic peptide"
SASVTYS

SEQ ID NO: 9678 - protein, 7 aa, Artificial Sequence
  source: /note="Description of Artificial Sequence: Synthetic peptide"
SATFDTT

SEQ ID NO: 9679 - protein, 7 aa, Artificial Sequence
  source: /note="Description of Artificial Sequence: Synthetic peptide"
SATLSAL

SEQ ID NO: 9680 - protein, 7 aa, Artificial Sequence
  source: /note="Description of Artificial Sequence: Synthetic peptide"
SATPHRA

SEQ ID NO: 9681 - protein, 7 aa, Artificial Sequence
  source: /note="Description of Artificial Sequence: Synthetic peptide"
SATPISR

SEQ ID NO: 9682 - protein, 7 aa, Artificial Sequence
  source: /note="Description of Artificial Sequence: Synthetic peptide"
SATQHTG

SEQ ID NO: 9683 - protein, 7 aa, Artificial Sequence
  source: /note="Description of Artificial Sequence: Synthetic peptide"
SATQRIV

SEQ ID NO: 9684 - protein, 7 aa, Artificial Sequence
  source: /note="Description of Artificial Sequence: Synthetic peptide"
SATSPDR

SEQ ID NO: 9685 - protein, 7 aa, Artificial Sequence
  source: /note="Description of Artificial Sequence: Synthetic peptide"
SATVPRP

SEQ ID NO: 9686 - protein, 7 aa, Artificial Sequence
  source: /note="Description of Artificial Sequence: Synthetic peptide"
SAVAILT

SEQ ID NO: 9687 - protein, 7 aa, Artificial Sequence
  source: /note="Description of Artificial Sequence: Synthetic peptide"
SAVGAHS

SEQ ID NO: 9688 - protein, 7 aa, Artificial Sequence
  source: /note="Description of Artificial Sequence: Synthetic peptide"
SAVGNAR

SEQ ID NO: 9689 - protein, 7 aa, Artificial Sequence
  source: /note="Description of Artificial Sequence: Synthetic peptide"
SAVGRST

SEQ ID NO: 9690 - protein, 7 aa, Artificial Sequence
  source: /note="Description of Artificial Sequence: Synthetic peptide"
SAVGTSY

SEQ ID NO: 9691 - protein, 7 aa, Artificial Sequence
  source: /note="Description of Artificial Sequence: Synthetic peptide"
SAVHRMD

SEQ ID NO: 9692 - protein, 7 aa, Artificial Sequence
  source: /note="Description of Artificial Sequence: Synthetic peptide"
SAVIRAS

SEQ ID NO: 9693 - protein, 7 aa, Artificial Sequence
  source: /note="Description of Artificial Sequence: Synthetic peptide"
SAVLPQR

SEQ ID NO: 9694 - protein, 7 aa, Artificial Sequence
  source: /note="Description of Artificial Sequence: Synthetic peptide"
SAVNEAR

SEQ ID NO: 9695 - protein, 7 aa, Artificial Sequence
  source: /note="Description of Artificial Sequence: Synthetic peptide"
SAVNSRM

SEQ ID NO: 9696 - protein, 7 aa, Artificial Sequence
  source: /note="Description of Artificial Sequence: Synthetic peptide"
SAVRMAT

SEQ ID NO: 9697 - protein, 7 aa, Artificial Sequence
  source: /note="Description of Artificial Sequence: Synthetic peptide"
SAVRPLP

SEQ ID NO: 9698 - protein, 7 aa, Artificial Sequence
  source: /note="Description of Artificial Sequence: Synthetic peptide"
SAVTGAW

SEQ ID NO: 9699 - protein, 7 aa, Artificial Sequence
  source: /note="Description of Artificial Sequence: Synthetic peptide"
SAVTSHM

SEQ ID NO: 9700 - protein, 7 aa, Artificial Sequence
  source: /note="Description of Artificial Sequence: Synthetic peptide"
SAVYQGH

SEQ ID NO: 9701 - protein, 7 aa, Artificial Sequence
  source: /note="Description of Artificial Sequence: Synthetic peptide"
SAWSSTG

SEQ ID NO: 9702 - protein, 7 aa, Artificial Sequence
  source: /note="Description of Artificial Sequence: Synthetic peptide"
SAYASSS

SEQ ID NO: 9703 - protein, 7 aa, Artificial Sequence
  source: /note="Description of Artificial Sequence: Synthetic peptide"
SAYQNMA

SEQ ID NO: 9704 - protein, 7 aa, Artificial Sequence
  source: /note="Description of Artificial Sequence: Synthetic peptide"
SAYVDTR

SEQ ID NO: 9705 - protein, 7 aa, Artificial Sequence
  source: /note="Description of Artificial Sequence: Synthetic peptide"
SCELLPA

SEQ ID NO: 9706 - protein, 7 aa, Artificial Sequence
  source: /note="Description of Artificial Sequence: Synthetic peptide"
SCLNGVP

SEQ ID NO: 9707 - protein, 7 aa, Artificial Sequence
  source: /note="Description of Artificial Sequence: Synthetic peptide"
SDAMTIA

SEQ ID NO: 9708 - protein, 7 aa, Artificial Sequence
  source: /note="Description of Artificial Sequence: Synthetic peptide"
SDANGSS

SEQ ID NO: 9709 - protein, 7 aa, Artificial Sequence
  source: /note="Description of Artificial Sequence: Synthetic peptide"
SDANVGM

SEQ ID NO: 9710 - protein, 7 aa, Artificial Sequence
  source: /note="Description of Artificial Sequence: Synthetic peptide"
SDAPPYR

SEQ ID NO: 9711 - protein, 7 aa, Artificial Sequence
  source: /note="Description of Artificial Sequence: Synthetic peptide"
SDCITHS

SEQ ID NO: 9712 - protein, 7 aa, Artificial Sequence
  source: /note="Description of Artificial Sequence: Synthetic peptide"
SDDGPSA

SEQ ID NO: 9713 - protein, 7 aa, Artificial Sequence
  source: /note="Description of Artificial Sequence: Synthetic peptide"
SDDLVPK

SEQ ID NO: 9714 - protein, 7 aa, Artificial Sequence
  source: /note="Description of Artificial Sequence: Synthetic peptide"
SDDRENC

SEQ ID NO: 9715 - protein, 7 aa, Artificial Sequence
  source: /note="Description of Artificial Sequence: Synthetic peptide"
SDDSKNT

SEQ ID NO: 9716 - protein, 7 aa, Artificial Sequence
  source: /note="Description of Artificial Sequence: Synthetic peptide"
SDESGMP

SEQ ID NO: 9717 - protein, 7 aa, Artificial Sequence
  source: /note="Description of Artificial Sequence: Synthetic peptide"
SDGPRLS

SEQ ID NO: 9718 - protein, 7 aa, Artificial Sequence
  source: /note="Description of Artificial Sequence: Synthetic peptide"
SDGSSLA

SEQ ID NO: 9719 - protein, 7 aa, Artificial Sequence
  source: /note="Description of Artificial Sequence: Synthetic peptide"
SDHRYLI

SEQ ID NO: 9720 - protein, 7 aa, Artificial Sequence
  source: /note="Description of Artificial Sequence: Synthetic peptide"
SDHSSRT

SEQ ID NO: 9721 - protein, 7 aa, Artificial Sequence
  source: /note="Description of Artificial Sequence: Synthetic peptide"
SDIPRPS

SEQ ID NO: 9722 - protein, 7 aa, Artificial Sequence
  source: /note="Description of Artificial Sequence: Synthetic peptide"
SDIVASP

SEQ ID NO: 9723 - protein, 7 aa, Artificial Sequence
  source: /note="Description of Artificial Sequence: Synthetic peptide"
SDKFFPS

SEQ ID NO: 9724 - protein, 7 aa, Artificial Sequence
  source: /note="Description of Artificial Sequence: Synthetic peptide"
SDLNKLA

SEQ ID NO: 9725 - protein, 7 aa, Artificial Sequence
  source: /note="Description of Artificial Sequence: Synthetic peptide"
SDLPMLV

SEQ ID NO: 9726 - protein, 7 aa, Artificial Sequence
  source: /note="Description of Artificial Sequence: Synthetic peptide"
SDLRMVA

SEQ ID NO: 9727 - protein, 7 aa, Artificial Sequence
  source: /note="Description of Artificial Sequence: Synthetic peptide"
SDLSRPL

SEQ ID NO: 9728 - protein, 7 aa, Artificial Sequence
  source: /note="Description of Artificial Sequence: Synthetic peptide"
SDMATKL

SEQ ID NO: 9729 - protein, 7 aa, Artificial Sequence
  source: /note="Description of Artificial Sequence: Synthetic peptide"
SDMPVPR

SEQ ID NO: 9730 - protein, 7 aa, Artificial Sequence
  source: /note="Description of Artificial Sequence: Synthetic peptide"
SDMTARG

SEQ ID NO: 9731 - protein, 7 aa, Artificial Sequence
  source: /note="Description of Artificial Sequence: Synthetic peptide"
SDNYERT

SEQ ID NO: 9732 - protein, 7 aa, Artificial Sequence
  source: /note="Description of Artificial Sequence: Synthetic peptide"
SDPGRGA

SEQ ID NO: 9733 - protein, 7 aa, Artificial Sequence
  source: /note="Description of Artificial Sequence: Synthetic peptide"
SDPKYSV

SEQ ID NO: 9734 - protein, 7 aa, Artificial Sequence
  source: /note="Description of Artificial Sequence: Synthetic peptide"
SDPNTYI

SEQ ID NO: 9735 - protein, 7 aa, Artificial Sequence
  source: /note="Description of Artificial Sequence: Synthetic peptide"
SDPRRTS

SEQ ID NO: 9736 - protein, 7 aa, Artificial Sequence
  source: /note="Description of Artificial Sequence: Synthetic peptide"
SDPSLPV

SEQ ID NO: 9737 - protein, 7 aa, Artificial Sequence
  source: /note="Description of Artificial Sequence: Synthetic peptide"
SDPVLGA

SEQ ID NO: 9738 - protein, 7 aa, Artificial Sequence
  source: /note="Description of Artificial Sequence: Synthetic peptide"
SDQPTKA

SEQ ID NO: 9739 - protein, 7 aa, Artificial Sequence
  source: /note="Description of Artificial Sequence: Synthetic peptide"
SDQRILP

SEQ ID NO: 9740 - protein, 7 aa, Artificial Sequence
  source: /note="Description of Artificial Sequence: Synthetic peptide"
SDQSLTY

SEQ ID NO: 9741 - protein, 7 aa, Artificial Sequence
  source: /note="Description of Artificial Sequence: Synthetic peptide"
SDQVKSS

SEQ ID NO: 9742 - protein, 7 aa, Artificial Sequence
  source: /note="Description of Artificial Sequence: Synthetic peptide"
SDRESRI

SEQ ID NO: 9743 - protein, 7 aa, Artificial Sequence
  source: /note="Description of Artificial Sequence: Synthetic peptide"
SDREVDP

SEQ ID NO: 9744 - protein, 7 aa, Artificial Sequence
  source: /note="Description of Artificial Sequence: Synthetic peptide"
SDRGIRD

SEQ ID NO: 9745 - protein, 7 aa, Artificial Sequence
  source: /note="Description of Artificial Sequence: Synthetic peptide"
SDRGYPK

SEQ ID NO: 9746 - protein, 7 aa, Artificial Sequence
  source: /note="Description of Artificial Sequence: Synthetic peptide"
SDRLCDE

SEQ ID NO: 9747 - protein, 7 aa, Artificial Sequence
  source: /note="Description of Artificial Sequence: Synthetic peptide"
SDRLQTV

SEQ ID NO: 9748 - protein, 7 aa, Artificial Sequence
  source: /note="Description of Artificial Sequence: Synthetic peptide"
SDRMMTF

SEQ ID NO: 9749 - protein, 7 aa, Artificial Sequence
  source: /note="Description of Artificial Sequence: Synthetic peptide"
SDRMSSP

SEQ ID NO: 9750 - protein, 7 aa, Artificial Sequence
  source: /note="Description of Artificial Sequence: Synthetic peptide"
SDRPALL

SEQ ID NO: 9751 - protein, 7 aa, Artificial Sequence
  source: /note="Description of Artificial Sequence: Synthetic peptide"
SDRPGLY

SEQ ID NO: 9752 - protein, 7 aa, Artificial Sequence
  source: /note="Description of Artificial Sequence: Synthetic peptide"
SDRQPFT

SEQ ID NO: 9753 - protein, 7 aa, Artificial Sequence
  source: /note="Description of Artificial Sequence: Synthetic peptide"
SDRRAMS

SEQ ID NO: 9754 - protein, 7 aa, Artificial Sequence
  source: /note="Description of Artificial Sequence: Synthetic peptide"
SDRRNMA

SEQ ID NO: 9755 - protein, 7 aa, Artificial Sequence
  source: /note="Description of Artificial Sequence: Synthetic peptide"
SDRSATS

SEQ ID NO: 9756 - protein, 7 aa, Artificial Sequence
  source: /note="Description of Artificial Sequence: Synthetic peptide"
SDRSDKP

SEQ ID NO: 9757 - protein, 7 aa, Artificial Sequence
  source: /note="Description of Artificial Sequence: Synthetic peptide"
SDSAHAP

SEQ ID NO: 9758 - protein, 7 aa, Artificial Sequence
  source: /note="Description of Artificial Sequence: Synthetic peptide"
SDSGQSA

SEQ ID NO: 9759 - protein, 7 aa, Artificial Sequence
  source: /note="Description of Artificial Sequence: Synthetic peptide"
SDSKVGP

SEQ ID NO: 9760 - protein, 7 aa, Artificial Sequence
  source: /note="Description of Artificial Sequence: Synthetic peptide"
SDSRLGA

SEQ ID NO: 9761 - protein, 7 aa, Artificial Sequence
  source: /note="Description of Artificial Sequence: Synthetic peptide"
SDSRREY

SEQ ID NO: 9762 - protein, 7 aa, Artificial Sequence
  source: /note="Description of Artificial Sequence: Synthetic peptide"
SDSYGSR

SEQ ID NO: 9763 - protein, 7 aa, Artificial Sequence
  source: /note="Description of Artificial Sequence: Synthetic peptide"
SDSYPRI

SEQ ID NO: 9764 - protein, 7 aa, Artificial Sequence
  source: /note="Description of Artificial Sequence: Synthetic peptide"
SDTKLYP

SEQ ID NO: 9765 - protein, 7 aa, Artificial Sequence
  source: /note="Description of Artificial Sequence: Synthetic peptide"
SDTMRAE

SEQ ID NO: 9766 - protein, 7 aa, Artificial Sequence
  source: /note="Description of Artificial Sequence: Synthetic peptide"
SDTRLTR

SEQ ID NO: 9767 - protein, 7 aa, Artificial Sequence
  source: /note="Description of Artificial Sequence: Synthetic peptide"
SDTRNGA

SEQ ID NO: 9768 - protein, 7 aa, Artificial Sequence
  source: /note="Description of Artificial Sequence: Synthetic peptide"
SDTTLLD

SEQ ID NO: 9769 - protein, 7 aa, Artificial Sequence
  source: /note="Description of Artificial Sequence: Synthetic peptide"
SDTYMRL

SEQ ID NO: 9770 - protein, 7 aa, Artificial Sequence
  source: /note="Description of Artificial Sequence: Synthetic peptide"
SDVAARS

SEQ ID NO: 9771 - protein, 7 aa, Artificial Sequence
  source: /note="Description of Artificial Sequence: Synthetic peptide"
SDVAMRA

SEQ ID NO: 9772 - protein, 7 aa, Artificial Sequence
  source: /note="Description of Artificial Sequence: Synthetic peptide"
SDVNQGL

SEQ ID NO: 9773 - protein, 7 aa, Artificial Sequence
  source: /note="Description of Artificial Sequence: Synthetic peptide"
SEAFRPA

SEQ ID NO: 9774 - protein, 7 aa, Artificial Sequence
  source: /note="Description of Artificial Sequence: Synthetic peptide"
SEAPNDR

SEQ ID NO: 9775 - protein, 7 aa, Artificial Sequence
  source: /note="Description of Artificial Sequence: Synthetic peptide"
SEASASR

SEQ ID NO: 9776 - protein, 7 aa, Artificial Sequence
  source: /note="Description of Artificial Sequence: Synthetic peptide"
SEAWLAS

SEQ ID NO: 9777 - protein, 7 aa, Artificial Sequence
  source: /note="Description of Artificial Sequence: Synthetic peptide"
SEDGDIK

SEQ ID NO: 9778 - protein, 7 aa, Artificial Sequence
  source: /note="Description of Artificial Sequence: Synthetic peptide"
SEDRSRT

SEQ ID NO: 9779 - protein, 7 aa, Artificial Sequence
  source: /note="Description of Artificial Sequence: Synthetic peptide"
SEESWGY

SEQ ID NO: 9780 - protein, 7 aa, Artificial Sequence
  source: /note="Description of Artificial Sequence: Synthetic peptide"
SEFVRMP

SEQ ID NO: 9781 - protein, 7 aa, Artificial Sequence
  source: /note="Description of Artificial Sequence: Synthetic peptide"
SEGDHAL

SEQ ID NO: 9782 - protein, 7 aa, Artificial Sequence
  source: /note="Description of Artificial Sequence: Synthetic peptide"
SEGFNAM

SEQ ID NO: 9783 - protein, 7 aa, Artificial Sequence
  source: /note="Description of Artificial Sequence: Synthetic peptide"
SEGHRGP

SEQ ID NO: 9784 - protein, 7 aa, Artificial Sequence
  source: /note="Description of Artificial Sequence: Synthetic peptide"
SEGTVRE

SEQ ID NO: 9785 - protein, 7 aa, Artificial Sequence
  source: /note="Description of Artificial Sequence: Synthetic peptide"
SEIHRLP

SEQ ID NO: 9786 - protein, 7 aa, Artificial Sequence
  source: /note="Description of Artificial Sequence: Synthetic peptide"
SEINRPE

SEQ ID NO: 9787 - protein, 7 aa, Artificial Sequence
  source: /note="Description of Artificial Sequence: Synthetic peptide"
SEITLPL

SEQ ID NO: 9788 - protein, 7 aa, Artificial Sequence
  source: /note="Description of Artificial Sequence: Synthetic peptide"
SEKSNES

SEQ ID NO: 9789 - protein, 7 aa, Artificial Sequence
  source: /note="Description of Artificial Sequence: Synthetic peptide"
SEKYAAM

SEQ ID NO: 9790 - protein, 7 aa, Artificial Sequence
  source: /note="Description of Artificial Sequence: Synthetic peptide"
SELEART

SEQ ID NO: 9791 - protein, 7 aa, Artificial Sequence
  source: /note="Description of Artificial Sequence: Synthetic peptide"
SELHGLL

SEQ ID NO: 9792 - protein, 7 aa, Artificial Sequence
  source: /note="Description of Artificial Sequence: Synthetic peptide"
SELKTRP

SEQ ID NO: 9793 - protein, 7 aa, Artificial Sequence
  source: /note="Description of Artificial Sequence: Synthetic peptide"
SELRSVG

SEQ ID NO: 9794 - protein, 7 aa, Artificial Sequence
  source: /note="Description of Artificial Sequence: Synthetic peptide"
SEMDLRS

SEQ ID NO: 9795 - protein, 7 aa, Artificial Sequence
  source: /note="Description of Artificial Sequence: Synthetic peptide"
SENQMRS

SEQ ID NO: 9796 - protein, 7 aa, Artificial Sequence
  source: /note="Description of Artificial Sequence: Synthetic peptide"
SENTSDH

SEQ ID NO: 9797 - protein, 7 aa, Artificial Sequence
  source: /note="Description of Artificial Sequence: Synthetic peptide"
SEPIRTV

SEQ ID NO: 9798 - protein, 7 aa, Artificial Sequence
  source: /note="Description of Artificial Sequence: Synthetic peptide"
SEPRRTP

SEQ ID NO: 9799 - protein, 7 aa, Artificial Sequence
  source: /note="Description of Artificial Sequence: Synthetic peptide"
SEPRSHP

SEQ ID NO: 9800 - protein, 7 aa, Artificial Sequence
  source: /note="Description of Artificial Sequence: Synthetic peptide"
SEPSDYV

SEQ ID NO: 9801 - protein, 7 aa, Artificial Sequence
  source: /note="Description of Artificial Sequence: Synthetic peptide"
SEPSLSS

SEQ ID NO: 9802 - protein, 7 aa, Artificial Sequence
  source: /note="Description of Artificial Sequence: Synthetic peptide"
SEPTARN

SEQ ID NO: 9803 - protein, 7 aa, Artificial Sequence
  source: /note="Description of Artificial Sequence: Synthetic peptide"
SEPTMIV

SEQ ID NO: 9804 - protein, 7 aa, Artificial Sequence
  source: /note="Description of Artificial Sequence: Synthetic peptide"
SEPYGRL

SEQ ID NO: 9805 - protein, 7 aa, Artificial Sequence
  source: /note="Description of Artificial Sequence: Synthetic peptide"
SEPYHAA

SEQ ID NO: 9806 - protein, 7 aa, Artificial Sequence
  source: /note="Description of Artificial Sequence: Synthetic peptide"
SEQSRLL

SEQ ID NO: 9807 - protein, 7 aa, Artificial Sequence
  source: /note="Description of Artificial Sequence: Synthetic peptide"
SERFFNG

SEQ ID NO: 9808 - protein, 7 aa, Artificial Sequence
  source: /note="Description of Artificial Sequence: Synthetic peptide"
SERHACS

SEQ ID NO: 9809 - protein, 7 aa, Artificial Sequence
  source: /note="Description of Artificial Sequence: Synthetic peptide"
SERPAAA

SEQ ID NO: 9810 - protein, 7 aa, Artificial Sequence
  source: /note="Description of Artificial Sequence: Synthetic peptide"
SERPMPK

SEQ ID NO: 9811 - protein, 7 aa, Artificial Sequence
  source: /note="Description of Artificial Sequence: Synthetic peptide"
SERTLIM

SEQ ID NO: 9812 - protein, 7 aa, Artificial Sequence
  source: /note="Description of Artificial Sequence: Synthetic peptide"
SERVAAH

SEQ ID NO: 9813 - protein, 7 aa, Artificial Sequence
  source: /note="Description of Artificial Sequence: Synthetic peptide"
SERVEKH

SEQ ID NO: 9814 - protein, 7 aa, Artificial Sequence
  source: /note="Description of Artificial Sequence: Synthetic peptide"
SESSSQN

SEQ ID NO: 9815 - protein, 7 aa, Artificial Sequence
  source: /note="Description of Artificial Sequence: Synthetic peptide"
SETTSRH

SEQ ID NO: 9816 - protein, 7 aa, Artificial Sequence
  source: /note="Description of Artificial Sequence: Synthetic peptide"
SEVGSAT

SEQ ID NO: 9817 - protein, 7 aa, Artificial Sequence
  source: /note="Description of Artificial Sequence: Synthetic peptide"
SEVNLPS

SEQ ID NO: 9818 - protein, 7 aa, Artificial Sequence
  source: /note="Description of Artificial Sequence: Synthetic peptide"
SEVRATA

SEQ ID NO: 9819 - protein, 7 aa, Artificial Sequence
  source: /note="Description of Artificial Sequence: Synthetic peptide"
SEVSPRG

SEQ ID NO: 9820 - protein, 7 aa, Artificial Sequence
  source: /note="Description of Artificial Sequence: Synthetic peptide"
SEWKVEH

SEQ ID NO: 9821 - protein, 7 aa, Artificial Sequence
  source: /note="Description of Artificial Sequence: Synthetic peptide"
SEYYHSA

SEQ ID NO: 9822 - protein, 7 aa, Artificial Sequence
  source: /note="Description of Artificial Sequence: Synthetic peptide"
SFAPAHD

SEQ ID NO: 9823 - protein, 7 aa, Artificial Sequence
  source: /note="Description of Artificial Sequence: Synthetic peptide"
SFASFPG

SEQ ID NO: 9824 - protein, 7 aa, Artificial Sequence
  source: /note="Description of Artificial Sequence: Synthetic peptide"
SFDDGGP

SEQ ID NO: 9825 - protein, 7 aa, Artificial Sequence
  source: /note="Description of Artificial Sequence: Synthetic peptide"
SFDGVPF

SEQ ID NO: 9826 - protein, 7 aa, Artificial Sequence
  source: /note="Description of Artificial Sequence: Synthetic peptide"
SFDHTLG

SEQ ID NO: 9827 - protein, 7 aa, Artificial Sequence
  source: /note="Description of Artificial Sequence: Synthetic peptide"
SFDKFAE

SEQ ID NO: 9828 - protein, 7 aa, Artificial Sequence
  source: /note="Description of Artificial Sequence: Synthetic peptide"
SFDMALK

SEQ ID NO: 9829 - protein, 7 aa, Artificial Sequence
  source: /note="Description of Artificial Sequence: Synthetic peptide"
SFDSNRT

SEQ ID NO: 9830 - protein, 7 aa, Artificial Sequence
  source: /note="Description of Artificial Sequence: Synthetic peptide"
SFESKMH

SEQ ID NO: 9831 - protein, 7 aa, Artificial Sequence
  source: /note="Description of Artificial Sequence: Synthetic peptide"
SFETIGR

SEQ ID NO: 9832 - protein, 7 aa, Artificial Sequence
  source: /note="Description of Artificial Sequence: Synthetic peptide"
SFETWAP

SEQ ID NO: 9833 - protein, 7 aa, Artificial Sequence
  source: /note="Description of Artificial Sequence: Synthetic peptide"
SFGMKPS

SEQ ID NO: 9834 - protein, 7 aa, Artificial Sequence
  source: /note="Description of Artificial Sequence: Synthetic peptide"
SFGNGTV

SEQ ID NO: 9835 - protein, 7 aa, Artificial Sequence
  source: /note="Description of Artificial Sequence: Synthetic peptide"
SFGSGPS

SEQ ID NO: 9836 - protein, 7 aa, Artificial Sequence
  source: /note="Description of Artificial Sequence: Synthetic peptide"
SFHEATN

SEQ ID NO: 9837 - protein, 7 aa, Artificial Sequence
  source: /note="Description of Artificial Sequence: Synthetic peptide"
SFITDAP

SEQ ID NO: 9838 - protein, 7 aa, Artificial Sequence
  source: /note="Description of Artificial Sequence: Synthetic peptide"
SFKDHYA

SEQ ID NO: 9839 - protein, 7 aa, Artificial Sequence
  source: /note="Description of Artificial Sequence: Synthetic peptide"
SFKSTNL

SEQ ID NO: 9840 - protein, 7 aa, Artificial Sequence
  source: /note="Description of Artificial Sequence: Synthetic peptide"
SFKTGSA

SEQ ID NO: 9841 - protein, 7 aa, Artificial Sequence
  source: /note="Description of Artificial Sequence: Synthetic peptide"
SFMPQLE

SEQ ID NO: 9842 - protein, 7 aa, Artificial Sequence
  source: /note="Description of Artificial Sequence: Synthetic peptide"
SFNAGAS

SEQ ID NO: 9843 - protein, 7 aa, Artificial Sequence
  source: /note="Description of Artificial Sequence: Synthetic peptide"
SFPDRPL

SEQ ID NO: 9844 - protein, 7 aa, Artificial Sequence
  source: /note="Description of Artificial Sequence: Synthetic peptide"
SFPGERV

SEQ ID NO: 9845 - protein, 7 aa, Artificial Sequence
  source: /note="Description of Artificial Sequence: Synthetic peptide"
SFQGART

SEQ ID NO: 9846 - protein, 7 aa, Artificial Sequence
  source: /note="Description of Artificial Sequence: Synthetic peptide"
SFQSHGD

SEQ ID NO: 9847 - protein, 7 aa, Artificial Sequence
  source: /note="Description of Artificial Sequence: Synthetic peptide"
SFRGGIS

SEQ ID NO: 9848 - protein, 7 aa, Artificial Sequence
  source: /note="Description of Artificial Sequence: Synthetic peptide"
SFRQASC

SEQ ID NO: 9849 - protein, 7 aa, Artificial Sequence
  source: /note="Description of Artificial Sequence: Synthetic peptide"
SFRQPQS

SEQ ID NO: 9850 - protein, 7 aa, Artificial Sequence
  source: /note="Description of Artificial Sequence: Synthetic peptide"
SFSDPQN

SEQ ID NO: 9851 - protein, 7 aa, Artificial Sequence
  source: /note="Description of Artificial Sequence: Synthetic peptide"
SFSGPKS

SEQ ID NO: 9852 - protein, 7 aa, Artificial Sequence
  source: /note="Description of Artificial Sequence: Synthetic peptide"
SFSNPSQ

SEQ ID NO: 9853 - protein, 7 aa, Artificial Sequence
  source: /note="Description of Artificial Sequence: Synthetic peptide"
SFSRATS

SEQ ID NO: 9854 - protein, 7 aa, Artificial Sequence
  source: /note="Description of Artificial Sequence: Synthetic peptide"
SFSSTAS

SEQ ID NO: 9855 - protein, 7 aa, Artificial Sequence
  source: /note="Description of Artificial Sequence: Synthetic peptide"
SFTGSVA

SEQ ID NO: 9856 - protein, 7 aa, Artificial Sequence
  source: /note="Description of Artificial Sequence: Synthetic peptide"
SFTGSVP

SEQ ID NO: 9857 - protein, 7 aa, Artificial Sequence
  source: /note="Description of Artificial Sequence: Synthetic peptide"
SFTQALE

SEQ ID NO: 9858 - protein, 7 aa, Artificial Sequence
  source: /note="Description of Artificial Sequence: Synthetic peptide"
SFTRQEA

SEQ ID NO: 9859 - protein, 7 aa, Artificial Sequence
  source: /note="Description of Artificial Sequence: Synthetic peptide"
SFTTGGV

SEQ ID NO: 9860 - protein, 7 aa, Artificial Sequence
  source: /note="Description of Artificial Sequence: Synthetic peptide"
SFTTQAT

SEQ ID NO: 9861 - protein, 7 aa, Artificial Sequence
  source: /note="Description of Artificial Sequence: Synthetic peptide"
SFVDRAG

SEQ ID NO: 9862 - protein, 7 aa, Artificial Sequence
  source: /note="Description of Artificial Sequence: Synthetic peptide"
SFVQTTP

SEQ ID NO: 9863 - protein, 7 aa, Artificial Sequence
  source: /note="Description of Artificial Sequence: Synthetic peptide"
SFVRTST

SEQ ID NO: 9864 - protein, 7 aa, Artificial Sequence
  source: /note="Description of Artificial Sequence: Synthetic peptide"
SGAAPTY

SEQ ID NO: 9865 - protein, 7 aa, Artificial Sequence
  source: /note="Description of Artificial Sequence: Synthetic peptide"
SGAFHLS

SEQ ID NO: 9866 - protein, 7 aa, Artificial Sequence
  source: /note="Description of Artificial Sequence: Synthetic peptide"
SGAQPMF

SEQ ID NO: 9867 - protein, 7 aa, Artificial Sequence
  source: /note="Description of Artificial Sequence: Synthetic peptide"
SGAQVPS

SEQ ID NO: 9868 - protein, 7 aa, Artificial Sequence
  source: /note="Description of Artificial Sequence: Synthetic peptide"
SGASVIA

SEQ ID NO: 9869 - protein, 7 aa, Artificial Sequence
  source: /note="Description of Artificial Sequence: Synthetic peptide"
SGATHPY

SEQ ID NO: 9870 - protein, 7 aa, Artificial Sequence
  source: /note="Description of Artificial Sequence: Synthetic peptide"
SGAVSGL

SEQ ID NO: 9871 - protein, 7 aa, Artificial Sequence
  source: /note="Description of Artificial Sequence: Synthetic peptide"
SGAYSSS

SEQ ID NO: 9872 - protein, 7 aa, Artificial Sequence
  source: /note="Description of Artificial Sequence: Synthetic peptide"
SGCSELP

SEQ ID NO: 9873 - protein, 7 aa, Artificial Sequence
  source: /note="Description of Artificial Sequence: Synthetic peptide"
SGDPKDI

SEQ ID NO: 9874 - protein, 7 aa, Artificial Sequence
  source: /note="Description of Artificial Sequence: Synthetic peptide"
SGDQGSR

SEQ ID NO: 9875 - protein, 7 aa, Artificial Sequence
  source: /note="Description of Artificial Sequence: Synthetic peptide"
SGEAKSG

SEQ ID NO: 9876 - protein, 7 aa, Artificial Sequence
  source: /note="Description of Artificial Sequence: Synthetic peptide"
SGELGGL

SEQ ID NO: 9877 - protein, 7 aa, Artificial Sequence
  source: /note="Description of Artificial Sequence: Synthetic peptide"
SGELNPP

SEQ ID NO: 9878 - protein, 7 aa, Artificial Sequence
  source: /note="Description of Artificial Sequence: Synthetic peptide"
SGELRYI

SEQ ID NO: 9879 - protein, 7 aa, Artificial Sequence
  source: /note="Description of Artificial Sequence: Synthetic peptide"
SGERTSG

SEQ ID NO: 9880 - protein, 7 aa, Artificial Sequence
  source: /note="Description of Artificial Sequence: Synthetic peptide"
SGFGAKQ

SEQ ID NO: 9881 - protein, 7 aa, Artificial Sequence
  source: /note="Description of Artificial Sequence: Synthetic peptide"
SGFGPLT

SEQ ID NO: 9882 - protein, 7 aa, Artificial Sequence
  source: /note="Description of Artificial Sequence: Synthetic peptide"
SGGALGY

SEQ ID NO: 9883 - protein, 7 aa, Artificial Sequence
  source: /note="Description of Artificial Sequence: Synthetic peptide"
SGGASTT

SEQ ID NO: 9884 - protein, 7 aa, Artificial Sequence
  source: /note="Description of Artificial Sequence: Synthetic peptide"
SGGGTSL

SEQ ID NO: 9885 - protein, 7 aa, Artificial Sequence
  source: /note="Description of Artificial Sequence: Synthetic peptide"
SGGHLTI

SEQ ID NO: 9886 - protein, 7 aa, Artificial Sequence
  source: /note="Description of Artificial Sequence: Synthetic peptide"
SGGLRAA

SEQ ID NO: 9887 - protein, 7 aa, Artificial Sequence
  source: /note="Description of Artificial Sequence: Synthetic peptide"
SGGQEWT

SEQ ID NO: 9888 - protein, 7 aa, Artificial Sequence
  source: /note="Description of Artificial Sequence: Synthetic peptide"
SGGSFTT

SEQ ID NO: 9889 - protein, 7 aa, Artificial Sequence
  source: /note="Description of Artificial Sequence: Synthetic peptide"
SGIGSRQ

SEQ ID NO: 9890 - protein, 7 aa, Artificial Sequence
  source: /note="Description of Artificial Sequence: Synthetic peptide"
SGILQSS

SEQ ID NO: 9891 - protein, 7 aa, Artificial Sequence
  source: /note="Description of Artificial Sequence: Synthetic peptide"
SGISLRP

SEQ ID NO: 9892 - protein, 7 aa, Artificial Sequence
  source: /note="Description of Artificial Sequence: Synthetic peptide"
SGISRID

SEQ ID NO: 9893 - protein, 7 aa, Artificial Sequence
  source: /note="Description of Artificial Sequence: Synthetic peptide"
SGKASPG

SEQ ID NO: 9894 - protein, 7 aa, Artificial Sequence
  source: /note="Description of Artificial Sequence: Synthetic peptide"
SGKHTMN

SEQ ID NO: 9895 - protein, 7 aa, Artificial Sequence
  source: /note="Description of Artificial Sequence: Synthetic peptide"
SGKLVVS

SEQ ID NO: 9896 - protein, 7 aa, Artificial Sequence
  source: /note="Description of Artificial Sequence: Synthetic peptide"
SGKMGVY

SEQ ID NO: 9897 - protein, 7 aa, Artificial Sequence
  source: /note="Description of Artificial Sequence: Synthetic peptide"
SGKNPGY

SEQ ID NO: 9898 - protein, 7 aa, Artificial Sequence
  source: /note="Description of Artificial Sequence: Synthetic peptide"
SGKPMGT

SEQ ID NO: 9899 - protein, 7 aa, Artificial Sequence
  source: /note="Description of Artificial Sequence: Synthetic peptide"
SGKSGFE

SEQ ID NO: 9900 - protein, 7 aa, Artificial Sequence
  source: /note="Description of Artificial Sequence: Synthetic peptide"
SGLAVHP

SEQ ID NO: 9901 - protein, 7 aa, Artificial Sequence
  source: /note="Description of Artificial Sequence: Synthetic peptide"
SGLEDVV

SEQ ID NO: 9902 - protein, 7 aa, Artificial Sequence
  source: /note="Description of Artificial Sequence: Synthetic peptide"
SGLGIST

SEQ ID NO: 9903 - protein, 7 aa, Artificial Sequence
  source: /note="Description of Artificial Sequence: Synthetic peptide"
SGLHALT

SEQ ID NO: 9904 - protein, 7 aa, Artificial Sequence
  source: /note="Description of Artificial Sequence: Synthetic peptide"
SGLIATG

SEQ ID NO: 9905 - protein, 7 aa, Artificial Sequence
  source: /note="Description of Artificial Sequence: Synthetic peptide"
SGLNPKS

SEQ ID NO: 9906 - protein, 7 aa, Artificial Sequence
  source: /note="Description of Artificial Sequence: Synthetic peptide"
SGLNRTV

SEQ ID NO: 9907 - protein, 7 aa, Artificial Sequence
  source: /note="Description of Artificial Sequence: Synthetic peptide"
SGLSAYL

SEQ ID NO: 9908 - protein, 7 aa, Artificial Sequence
  source: /note="Description of Artificial Sequence: Synthetic peptide"
SGMGHVA

SEQ ID NO: 9909 - protein, 7 aa, Artificial Sequence
  source: /note="Description of Artificial Sequence: Synthetic peptide"
SGMLMRG

SEQ ID NO: 9910 - protein, 7 aa, Artificial Sequence
  source: /note="Description of Artificial Sequence: Synthetic peptide"
SGMTDSP

SEQ ID NO: 9911 - protein, 7 aa, Artificial Sequence
  source: /note="Description of Artificial Sequence: Synthetic peptide"
SGNGVLL

SEQ ID NO: 9912 - protein, 7 aa, Artificial Sequence
  source: /note="Description of Artificial Sequence: Synthetic peptide"
SGNLGYA

SEQ ID NO: 9913 - protein, 7 aa, Artificial Sequence
  source: /note="Description of Artificial Sequence: Synthetic peptide"
SGNMSAG

SEQ ID NO: 9914 - protein, 7 aa, Artificial Sequence
  source: /note="Description of Artificial Sequence: Synthetic peptide"
SGNPSQA

SEQ ID NO: 9915 - protein, 7 aa, Artificial Sequence
  source: /note="Description of Artificial Sequence: Synthetic peptide"
SGNTYSR

SEQ ID NO: 9916 - protein, 7 aa, Artificial Sequence
  source: /note="Description of Artificial Sequence: Synthetic peptide"
SGPDIFL

SEQ ID NO: 9917 - protein, 7 aa, Artificial Sequence
  source: /note="Description of Artificial Sequence: Synthetic peptide"
SGPHGGQ

SEQ ID NO: 9918 - protein, 7 aa, Artificial Sequence
  source: /note="Description of Artificial Sequence: Synthetic peptide"
SGPLNSP

SEQ ID NO: 9919 - protein, 7 aa, Artificial Sequence
  source: /note="Description of Artificial Sequence: Synthetic peptide"
SGPRLGP

SEQ ID NO: 9920 - protein, 7 aa, Artificial Sequence
  source: /note="Description of Artificial Sequence: Synthetic peptide"
SGPSVLR

SEQ ID NO: 9921 - protein, 7 aa, Artificial Sequence
  source: /note="Description of Artificial Sequence: Synthetic peptide"
SGPTHAM

SEQ ID NO: 9922 - protein, 7 aa, Artificial Sequence
  source: /note="Description of Artificial Sequence: Synthetic peptide"
SGPVGRT

SEQ ID NO: 9923 - protein, 7 aa, Artificial Sequence
  source: /note="Description of Artificial Sequence: Synthetic peptide"
SGPYKLE

SEQ ID NO: 9924 - protein, 7 aa, Artificial Sequence
  source: /note="Description of Artificial Sequence: Synthetic peptide"
SGPYPIK

SEQ ID NO: 9925 - protein, 7 aa, Artificial Sequence
  source: /note="Description of Artificial Sequence: Synthetic peptide"
SGQASLT

SEQ ID NO: 9926 - protein, 7 aa, Artificial Sequence
  source: /note="Description of Artificial Sequence: Synthetic peptide"
SGQSISP

SEQ ID NO: 9927 - protein, 7 aa, Artificial Sequence
  source: /note="Description of Artificial Sequence: Synthetic peptide"
SGQVPSA

SEQ ID NO: 9928 - protein, 7 aa, Artificial Sequence
  source: /note="Description of Artificial Sequence: Synthetic peptide"
SGQYPSI

SEQ ID NO: 9929 - protein, 7 aa, Artificial Sequence
  source: /note="Description of Artificial Sequence: Synthetic peptide"
SGRGPPP

SEQ ID NO: 9930 - protein, 7 aa, Artificial Sequence
  source: /note="Description of Artificial Sequence: Synthetic peptide"
SGRHSDD

SEQ ID NO: 9931 - protein, 7 aa, Artificial Sequence
  source: /note="Description of Artificial Sequence: Synthetic peptide"
SGRPSPA

SEQ ID NO: 9932 - protein, 7 aa, Artificial Sequence
  source: /note="Description of Artificial Sequence: Synthetic peptide"
SGRQPTV

SEQ ID NO: 9933 - protein, 7 aa, Artificial Sequence
  source: /note="Description of Artificial Sequence: Synthetic peptide"
SGRTIIT

SEQ ID NO: 9934 - protein, 7 aa, Artificial Sequence
  source: /note="Description of Artificial Sequence: Synthetic peptide"
SGRVTNS

SEQ ID NO: 9935 - protein, 7 aa, Artificial Sequence
  source: /note="Description of Artificial Sequence: Synthetic peptide"
SGSDPRT

SEQ ID NO: 9936 - protein, 7 aa, Artificial Sequence
  source: /note="Description of Artificial Sequence: Synthetic peptide"
SGSGVPQ

SEQ ID NO: 9937 - protein, 7 aa, Artificial Sequence
  source: /note="Description of Artificial Sequence: Synthetic peptide"
SGSKDSH

SEQ ID NO: 9938 - protein, 7 aa, Artificial Sequence
  source: /note="Description of Artificial Sequence: Synthetic peptide"
SGSKGAF

SEQ ID NO: 9939 - protein, 7 aa, Artificial Sequence
  source: /note="Description of Artificial Sequence: Synthetic peptide"
SGSMSQV

SEQ ID NO: 9940 - protein, 7 aa, Artificial Sequence
  source: /note="Description of Artificial Sequence: Synthetic peptide"
SGSNMLK

SEQ ID NO: 9941 - protein, 7 aa, Artificial Sequence
  source: /note="Description of Artificial Sequence: Synthetic peptide"
SGSPRIS

SEQ ID NO: 9942 - protein, 7 aa, Artificial Sequence
  source: /note="Description of Artificial Sequence: Synthetic peptide"
SGSQGTR

SEQ ID NO: 9943 - protein, 7 aa, Artificial Sequence
  source: /note="Description of Artificial Sequence: Synthetic peptide"
SGSRIME

SEQ ID NO: 9944 - protein, 7 aa, Artificial Sequence
  source: /note="Description of Artificial Sequence: Synthetic peptide"
SGSRNLG

SEQ ID NO: 9945 - protein, 7 aa, Artificial Sequence
  source: /note="Description of Artificial Sequence: Synthetic peptide"
SGSRNMV

SEQ ID NO: 9946 - protein, 7 aa, Artificial Sequence
  source: /note="Description of Artificial Sequence: Synthetic peptide"
SGSRSML

SEQ ID NO: 9947 - protein, 7 aa, Artificial Sequence
  source: /note="Description of Artificial Sequence: Synthetic peptide"
SGSRVAP

SEQ ID NO: 9948 - protein, 7 aa, Artificial Sequence
  source: /note="Description of Artificial Sequence: Synthetic peptide"
SGSSASR

SEQ ID NO: 9949 - protein, 7 aa, Artificial Sequence
  source: /note="Description of Artificial Sequence: Synthetic peptide"
SGSSGSA

SEQ ID NO: 9950 - protein, 7 aa, Artificial Sequence
  source: /note="Description of Artificial Sequence: Synthetic peptide"
SGSSKSM

SEQ ID NO: 9951 - protein, 7 aa, Artificial Sequence
  source: /note="Description of Artificial Sequence: Synthetic peptide"
SGSSTCI

SEQ ID NO: 9952 - protein, 7 aa, Artificial Sequence
  source: /note="Description of Artificial Sequence: Synthetic peptide"
SGSSTIN

SEQ ID NO: 9953 - protein, 7 aa, Artificial Sequence
  source: /note="Description of Artificial Sequence: Synthetic peptide"
SGSSTPQ

SEQ ID NO: 9954 - protein, 7 aa, Artificial Sequence
  source: /note="Description of Artificial Sequence: Synthetic peptide"
SGSVWPD

SEQ ID NO: 9955 - protein, 7 aa, Artificial Sequence
  source: /note="Description of Artificial Sequence: Synthetic peptide"
SGSYPRD

SEQ ID NO: 9956 - protein, 7 aa, Artificial Sequence
  source: /note="Description of Artificial Sequence: Synthetic peptide"
SGTALTL

SEQ ID NO: 9957 - protein, 7 aa, Artificial Sequence
  source: /note="Description of Artificial Sequence: Synthetic peptide"
SGTDHLL

SEQ ID NO: 9958 - protein, 7 aa, Artificial Sequence
  source: /note="Description of Artificial Sequence: Synthetic peptide"
SGTGQDG

SEQ ID NO: 9959 - protein, 7 aa, Artificial Sequence
  source: /note="Description of Artificial Sequence: Synthetic peptide"
SGTGRGT

SEQ ID NO: 9960 - protein, 7 aa, Artificial Sequence
  source: /note="Description of Artificial Sequence: Synthetic peptide"
SGTLTQK

SEQ ID NO: 9961 - protein, 7 aa, Artificial Sequence
  source: /note="Description of Artificial Sequence: Synthetic peptide"
SGTPMSR

SEQ ID NO: 9962 - protein, 7 aa, Artificial Sequence
  source: /note="Description of Artificial Sequence: Synthetic peptide"
SGTSVFA

SEQ ID NO: 9963 - protein, 7 aa, Artificial Sequence
  source: /note="Description of Artificial Sequence: Synthetic peptide"
SGTTAWA

SEQ ID NO: 9964 - protein, 7 aa, Artificial Sequence
  source: /note="Description of Artificial Sequence: Synthetic peptide"
SGTTGYR

SEQ ID NO: 9965 - protein, 7 aa, Artificial Sequence
  source: /note="Description of Artificial Sequence: Synthetic peptide"
SGTVYRV

SEQ ID NO: 9966 - protein, 7 aa, Artificial Sequence
  source: /note="Description of Artificial Sequence: Synthetic peptide"
SGVGMIS

SEQ ID NO: 9967 - protein, 7 aa, Artificial Sequence
  source: /note="Description of Artificial Sequence: Synthetic peptide"
SGVHPFP

SEQ ID NO: 9968 - protein, 7 aa, Artificial Sequence
  source: /note="Description of Artificial Sequence: Synthetic peptide"
SGVIKTS

SEQ ID NO: 9969 - protein, 7 aa, Artificial Sequence
  source: /note="Description of Artificial Sequence: Synthetic peptide"
SGVNLSS

SEQ ID NO: 9970 - protein, 7 aa, Artificial Sequence
  source: /note="Description of Artificial Sequence: Synthetic peptide"
SGVQSGP

SEQ ID NO: 9971 - protein, 7 aa, Artificial Sequence
  source: /note="Description of Artificial Sequence: Synthetic peptide"
SGVRQVA

SEQ ID NO: 9972 - protein, 7 aa, Artificial Sequence
  source: /note="Description of Artificial Sequence: Synthetic peptide"
SGVSMLP

SEQ ID NO: 9973 - protein, 7 aa, Artificial Sequence
  source: /note="Description of Artificial Sequence: Synthetic peptide"
SGVSRYA

SEQ ID NO: 9974 - protein, 7 aa, Artificial Sequence
  source: /note="Description of Artificial Sequence: Synthetic peptide"
SGVSYVE

SEQ ID NO: 9975 - protein, 7 aa, Artificial Sequence
  source: /note="Description of Artificial Sequence: Synthetic peptide"
SGYPNLD

SEQ ID NO: 9976 - protein, 7 aa, Artificial Sequence
  source: /note="Description of Artificial Sequence: Synthetic peptide"
SHAAQLP

SEQ ID NO: 9977 - protein, 7 aa, Artificial Sequence
  source: /note="Description of Artificial Sequence: Synthetic peptide"
SHANLHA

SEQ ID NO: 9978 - protein, 7 aa, Artificial Sequence
  source: /note="Description of Artificial Sequence: Synthetic peptide"
SHANTSS

SEQ ID NO: 9979 - protein, 7 aa, Artificial Sequence
  source: /note="Description of Artificial Sequence: Synthetic peptide"
SHASNYP

SEQ ID NO: 9980 - protein, 7 aa, Artificial Sequence
  source: /note="Description of Artificial Sequence: Synthetic peptide"
SHASVRS

SEQ ID NO: 9981 - protein, 7 aa, Artificial Sequence
  source: /note="Description of Artificial Sequence: Synthetic peptide"
SHATTPS

SEQ ID NO: 9982 - protein, 7 aa, Artificial Sequence
  source: /note="Description of Artificial Sequence: Synthetic peptide"
SHAVRMG

SEQ ID NO: 9983 - protein, 7 aa, Artificial Sequence
  source: /note="Description of Artificial Sequence: Synthetic peptide"
SHDNRGV

SEQ ID NO: 9984 - protein, 7 aa, Artificial Sequence
  source: /note="Description of Artificial Sequence: Synthetic peptide"
SHENGST

SEQ ID NO: 9985 - protein, 7 aa, Artificial Sequence
  source: /note="Description of Artificial Sequence: Synthetic peptide"
SHEPHTR

SEQ ID NO: 9986 - protein, 7 aa, Artificial Sequence
  source: /note="Description of Artificial Sequence: Synthetic peptide"
SHESLGM

SEQ ID NO: 9987 - protein, 7 aa, Artificial Sequence
  source: /note="Description of Artificial Sequence: Synthetic peptide"
SHFPMAP

SEQ ID NO: 9988 - protein, 7 aa, Artificial Sequence
  source: /note="Description of Artificial Sequence: Synthetic peptide"
SHFSAAE

SEQ ID NO: 9989 - protein, 7 aa, Artificial Sequence
  source: /note="Description of Artificial Sequence: Synthetic peptide"
SHGPPRS

SEQ ID NO: 9990 - protein, 7 aa, Artificial Sequence
  source: /note="Description of Artificial Sequence: Synthetic peptide"
SHGPYPY

SEQ ID NO: 9991 - protein, 7 aa, Artificial Sequence
  source: /note="Description of Artificial Sequence: Synthetic peptide"
SHGSAVN

SEQ ID NO: 9992 - protein, 7 aa, Artificial Sequence
  source: /note="Description of Artificial Sequence: Synthetic peptide"
SHGSFPS

SEQ ID NO: 9993 - protein, 7 aa, Artificial Sequence
  source: /note="Description of Artificial Sequence: Synthetic peptide"
SHGTKST

SEQ ID NO: 9994 - protein, 7 aa, Artificial Sequence
  source: /note="Description of Artificial Sequence: Synthetic peptide"
SHHGSII

SEQ ID NO: 9995 - protein, 7 aa, Artificial Sequence
  source: /note="Description of Artificial Sequence: Synthetic peptide"
SHIQLAP

SEQ ID NO: 9996 - protein, 7 aa, Artificial Sequence
  source: /note="Description of Artificial Sequence: Synthetic peptide"
SHKRMVD

SEQ ID NO: 9997 - protein, 7 aa, Artificial Sequence
  source: /note="Description of Artificial Sequence: Synthetic peptide"
SHKSPTP

SEQ ID NO: 9998 - protein, 7 aa, Artificial Sequence
  source: /note="Description of Artificial Sequence: Synthetic peptide"
SHLEIDM

SEQ ID NO: 9999 - protein, 7 aa, Artificial Sequence
  source: /note="Description of Artificial Sequence: Synthetic peptide"
SHLNLRP

SEQ ID NO: 10000 - protein, 7 aa, Artificial Sequence
  source: /note="Description of Artificial Sequence: Synthetic peptide"
SHLPVSM

SEQ ID NO: 10001 - protein, 7 aa, Artificial Sequence
  source: /note="Description of Artificial Sequence: Synthetic peptide"
SHLQNRI

SEQ ID NO: 10002 - protein, 7 aa, Artificial Sequence
  source: /note="Description of Artificial Sequence: Synthetic peptide"
SHMTGST

SEQ ID NO: 10003 - protein, 7 aa, Artificial Sequence
  source: /note="Description of Artificial Sequence: Synthetic peptide"
SHNAFPT

SEQ ID NO: 10004 - protein, 7 aa, Artificial Sequence
  source: /note="Description of Artificial Sequence: Synthetic peptide"
SHNALMD

SEQ ID NO: 10005 - protein, 7 aa, Artificial Sequence
  source: /note="Description of Artificial Sequence: Synthetic peptide"
SHNIPAG

SEQ ID NO: 10006 - protein, 7 aa, Artificial Sequence
  source: /note="Description of Artificial Sequence: Synthetic peptide"
SHNKLSS

SEQ ID NO: 10007 - protein, 7 aa, Artificial Sequence
  source: /note="Description of Artificial Sequence: Synthetic peptide"
SHPAISA

SEQ ID NO: 10008 - protein, 7 aa, Artificial Sequence
  source: /note="Description of Artificial Sequence: Synthetic peptide"
SHPALPP

SEQ ID NO: 10009 - protein, 7 aa, Artificial Sequence
  source: /note="Description of Artificial Sequence: Synthetic peptide"
SHPDLSP

SEQ ID NO: 10010 - protein, 7 aa, Artificial Sequence
  source: /note="Description of Artificial Sequence: Synthetic peptide"
SHPMLPT

SEQ ID NO: 10011 - protein, 7 aa, Artificial Sequence
  source: /note="Description of Artificial Sequence: Synthetic peptide"
SHPMMPA

SEQ ID NO: 10012 - protein, 7 aa, Artificial Sequence
  source: /note="Description of Artificial Sequence: Synthetic peptide"
SHPPLRL

SEQ ID NO: 10013 - protein, 7 aa, Artificial Sequence
  source: /note="Description of Artificial Sequence: Synthetic peptide"
SHPSSEP

SEQ ID NO: 10014 - protein, 7 aa, Artificial Sequence
  source: /note="Description of Artificial Sequence: Synthetic peptide"
SHQARAP

SEQ ID NO: 10015 - protein, 7 aa, Artificial Sequence
  source: /note="Description of Artificial Sequence: Synthetic peptide"
SHRGDEH

SEQ ID NO: 10016 - protein, 7 aa, Artificial Sequence
  source: /note="Description of Artificial Sequence: Synthetic peptide"
SHRPSTL

SEQ ID NO: 10017 - protein, 7 aa, Artificial Sequence
  source: /note="Description of Artificial Sequence: Synthetic peptide"
SHRPTSS

SEQ ID NO: 10018 - protein, 7 aa, Artificial Sequence
  source: /note="Description of Artificial Sequence: Synthetic peptide"
SHSALMG

SEQ ID NO: 10019 - protein, 7 aa, Artificial Sequence
  source: /note="Description of Artificial Sequence: Synthetic peptide"
SHSAMQH

SEQ ID NO: 10020 - protein, 7 aa, Artificial Sequence
  source: /note="Description of Artificial Sequence: Synthetic peptide"
SHSHSDA

SEQ ID NO: 10021 - protein, 7 aa, Artificial Sequence
  source: /note="Description of Artificial Sequence: Synthetic peptide"
SHSLGGN

SEQ ID NO: 10022 - protein, 7 aa, Artificial Sequence
  source: /note="Description of Artificial Sequence: Synthetic peptide"
SHSPDIK

SEQ ID NO: 10023 - protein, 7 aa, Artificial Sequence
  source: /note="Description of Artificial Sequence: Synthetic peptide"
SHSPLLP

SEQ ID NO: 10024 - protein, 7 aa, Artificial Sequence
  source: /note="Description of Artificial Sequence: Synthetic peptide"
SHSSIMV

SEQ ID NO: 10025 - protein, 7 aa, Artificial Sequence
  source: /note="Description of Artificial Sequence: Synthetic peptide"
SHSSRLM

SEQ ID NO: 10026 - protein, 7 aa, Artificial Sequence
  source: /note="Description of Artificial Sequence: Synthetic peptide"
SHTHGNP

SEQ ID NO: 10027 - protein, 7 aa, Artificial Sequence
  source: /note="Description of Artificial Sequence: Synthetic peptide"
SHTKVSH

SEQ ID NO: 10028 - protein, 7 aa, Artificial Sequence
  source: /note="Description of Artificial Sequence: Synthetic peptide"
SHTPRAS

SEQ ID NO: 10029 - protein, 7 aa, Artificial Sequence
  source: /note="Description of Artificial Sequence: Synthetic peptide"
SHTRPDA

SEQ ID NO: 10030 - protein, 7 aa, Artificial Sequence
  source: /note="Description of Artificial Sequence: Synthetic peptide"
SHTSLPR

SEQ ID NO: 10031 - protein, 7 aa, Artificial Sequence
  source: /note="Description of Artificial Sequence: Synthetic peptide"
SHTSLVI

SEQ ID NO: 10032 - protein, 7 aa, Artificial Sequence
  source: /note="Description of Artificial Sequence: Synthetic peptide"
SHVAGHA

SEQ ID NO: 10033 - protein, 7 aa, Artificial Sequence
  source: /note="Description of Artificial Sequence: Synthetic peptide"
SHVASKG

SEQ ID NO: 10034 - protein, 7 aa, Artificial Sequence
  source: /note="Description of Artificial Sequence: Synthetic peptide"
SHVVNSL

SEQ ID NO: 10035 - protein, 7 aa, Artificial Sequence
  source: /note="Description of Artificial Sequence: Synthetic peptide"
SHVYPGP

SEQ ID NO: 10036 - protein, 7 aa, Artificial Sequence
  source: /note="Description of Artificial Sequence: Synthetic peptide"
SIAAHQG

SEQ ID NO: 10037 - protein, 7 aa, Artificial Sequence
  source: /note="Description of Artificial Sequence: Synthetic peptide"
SIAQVGA

SEQ ID NO: 10038 - protein, 7 aa, Artificial Sequence
  source: /note="Description of Artificial Sequence: Synthetic peptide"
SIARAVT

SEQ ID NO: 10039 - protein, 7 aa, Artificial Sequence
  source: /note="Description of Artificial Sequence: Synthetic peptide"
SIDSIAV

SEQ ID NO: 10040 - protein, 7 aa, Artificial Sequence
  source: /note="Description of Artificial Sequence: Synthetic peptide"
SIDSSSL

SEQ ID NO: 10041 - protein, 7 aa, Artificial Sequence
  source: /note="Description of Artificial Sequence: Synthetic peptide"
SIDSTYM

SEQ ID NO: 10042 - protein, 7 aa, Artificial Sequence
  source: /note="Description of Artificial Sequence: Synthetic peptide"
SIERELR

SEQ ID NO: 10043 - protein, 7 aa, Artificial Sequence
  source: /note="Description of Artificial Sequence: Synthetic peptide"
SIGGVLY

SEQ ID NO: 10044 - protein, 7 aa, Artificial Sequence
  source: /note="Description of Artificial Sequence: Synthetic peptide"
SIGNFPD

SEQ ID NO: 10045 - protein, 7 aa, Artificial Sequence
  source: /note="Description of Artificial Sequence: Synthetic peptide"
SIGSAPA

SEQ ID NO: 10046 - protein, 7 aa, Artificial Sequence
  source: /note="Description of Artificial Sequence: Synthetic peptide"
SIGTVVG

SEQ ID NO: 10047 - protein, 7 aa, Artificial Sequence
  source: /note="Description of Artificial Sequence: Synthetic peptide"
SIGVHPG

SEQ ID NO: 10048 - protein, 7 aa, Artificial Sequence
  source: /note="Description of Artificial Sequence: Synthetic peptide"
SIHLVTS

SEQ ID NO: 10049 - protein, 7 aa, Artificial Sequence
  source: /note="Description of Artificial Sequence: Synthetic peptide"
SIHNGPQ

SEQ ID NO: 10050 - protein, 7 aa, Artificial Sequence
  source: /note="Description of Artificial Sequence: Synthetic peptide"
SIIESVA

SEQ ID NO: 10051 - protein, 7 aa, Artificial Sequence
  source: /note="Description of Artificial Sequence: Synthetic peptide"
SIIQAKP

SEQ ID NO: 10052 - protein, 7 aa, Artificial Sequence
  source: /note="Description of Artificial Sequence: Synthetic peptide"
SIISERR

SEQ ID NO: 10053 - protein, 7 aa, Artificial Sequence
  source: /note="Description of Artificial Sequence: Synthetic peptide"
SIKVNPP

SEQ ID NO: 10054 - protein, 7 aa, Artificial Sequence
  source: /note="Description of Artificial Sequence: Synthetic peptide"
SILGAIP

SEQ ID NO: 10055 - protein, 7 aa, Artificial Sequence
  source: /note="Description of Artificial Sequence: Synthetic peptide"
SILYGMP

SEQ ID NO: 10056 - protein, 7 aa, Artificial Sequence
  source: /note="Description of Artificial Sequence: Synthetic peptide"
SIMNTGP

SEQ ID NO: 10057 - protein, 7 aa, Artificial Sequence
  source: /note="Description of Artificial Sequence: Synthetic peptide"
SIMRTDC

SEQ ID NO: 10058 - protein, 7 aa, Artificial Sequence
  source: /note="Description of Artificial Sequence: Synthetic peptide"
SINEEPP

SEQ ID NO: 10059 - protein, 7 aa, Artificial Sequence
  source: /note="Description of Artificial Sequence: Synthetic peptide"
SINVTHG

SEQ ID NO: 10060 - protein, 7 aa, Artificial Sequence
  source: /note="Description of Artificial Sequence: Synthetic peptide"
SIPMSGR

SEQ ID NO: 10061 - protein, 7 aa, Artificial Sequence
  source: /note="Description of Artificial Sequence: Synthetic peptide"
SIPNLQA

SEQ ID NO: 10062 - protein, 7 aa, Artificial Sequence
  source: /note="Description of Artificial Sequence: Synthetic peptide"
SIPNLYD

SEQ ID NO: 10063 - protein, 7 aa, Artificial Sequence
  source: /note="Description of Artificial Sequence: Synthetic peptide"
SIPNSRQ

SEQ ID NO: 10064 - protein, 7 aa, Artificial Sequence
  source: /note="Description of Artificial Sequence: Synthetic peptide"
SIQKHLP

SEQ ID NO: 10065 - protein, 7 aa, Artificial Sequence
  source: /note="Description of Artificial Sequence: Synthetic peptide"
SIQWKDS

SEQ ID NO: 10066 - protein, 7 aa, Artificial Sequence
  source: /note="Description of Artificial Sequence: Synthetic peptide"
SISLPYP

SEQ ID NO: 10067 - protein, 7 aa, Artificial Sequence
  source: /note="Description of Artificial Sequence: Synthetic peptide"
SISPSPG

SEQ ID NO: 10068 - protein, 7 aa, Artificial Sequence
  source: /note="Description of Artificial Sequence: Synthetic peptide"
SISSQDL

SEQ ID NO: 10069 - protein, 7 aa, Artificial Sequence
  source: /note="Description of Artificial Sequence: Synthetic peptide"
SISSSSG

SEQ ID NO: 10070 - protein, 7 aa, Artificial Sequence
  source: /note="Description of Artificial Sequence: Synthetic peptide"
SISVMKQ

SEQ ID NO: 10071 - protein, 7 aa, Artificial Sequence
  source: /note="Description of Artificial Sequence: Synthetic peptide"
SITPFNE

SEQ ID NO: 10072 - protein, 7 aa, Artificial Sequence
  source: /note="Description of Artificial Sequence: Synthetic peptide"
SITSEKI

SEQ ID NO: 10073 - protein, 7 aa, Artificial Sequence
  source: /note="Description of Artificial Sequence: Synthetic peptide"
SITTGRG

SEQ ID NO: 10074 - protein, 7 aa, Artificial Sequence
  source: /note="Description of Artificial Sequence: Synthetic peptide"
SITTRTD

SEQ ID NO: 10075 - protein, 7 aa, Artificial Sequence
  source: /note="Description of Artificial Sequence: Synthetic peptide"
SIVHPDS

SEQ ID NO: 10076 - protein, 7 aa, Artificial Sequence
  source: /note="Description of Artificial Sequence: Synthetic peptide"
SIVLKGS

SEQ ID NO: 10077 - protein, 7 aa, Artificial Sequence
  source: /note="Description of Artificial Sequence: Synthetic peptide"
SIVSRVE

SEQ ID NO: 10078 - protein, 7 aa, Artificial Sequence
  source: /note="Description of Artificial Sequence: Synthetic peptide"
SIVTVSG

SEQ ID NO: 10079 - protein, 7 aa, Artificial Sequence
  source: /note="Description of Artificial Sequence: Synthetic peptide"
SKAHENP

SEQ ID NO: 10080 - protein, 7 aa, Artificial Sequence
  source: /note="Description of Artificial Sequence: Synthetic peptide"
SKAPYSA

SEQ ID NO: 10081 - protein, 7 aa, Artificial Sequence
  source: /note="Description of Artificial Sequence: Synthetic peptide"
SKASLNP

SEQ ID NO: 10082 - protein, 7 aa, Artificial Sequence
  source: /note="Description of Artificial Sequence: Synthetic peptide"
SKAYTPL

SEQ ID NO: 10083 - protein, 7 aa, Artificial Sequence
  source: /note="Description of Artificial Sequence: Synthetic peptide"
SKDGSLN

SEQ ID NO: 10084 - protein, 7 aa, Artificial Sequence
  source: /note="Description of Artificial Sequence: Synthetic peptide"
SKDHFPA

SEQ ID NO: 10085 - protein, 7 aa, Artificial Sequence
  source: /note="Description of Artificial Sequence: Synthetic peptide"
SKDILRS

SEQ ID NO: 10086 - protein, 7 aa, Artificial Sequence
  source: /note="Description of Artificial Sequence: Synthetic peptide"
SKDMLET

SEQ ID NO: 10087 - protein, 7 aa, Artificial Sequence
  source: /note="Description of Artificial Sequence: Synthetic peptide"
SKDTLRN

SEQ ID NO: 10088 - protein, 7 aa, Artificial Sequence
  source: /note="Description of Artificial Sequence: Synthetic peptide"
SKDTPLA

SEQ ID NO: 10089 - protein, 7 aa, Artificial Sequence
  source: /note="Description of Artificial Sequence: Synthetic peptide"
SKEIYTQ

SEQ ID NO: 10090 - protein, 7 aa, Artificial Sequence
  source: /note="Description of Artificial Sequence: Synthetic peptide"
SKENYPH

SEQ ID NO: 10091 - protein, 7 aa, Artificial Sequence
  source: /note="Description of Artificial Sequence: Synthetic peptide"
SKERFPY

SEQ ID NO: 10092 - protein, 7 aa, Artificial Sequence
  source: /note="Description of Artificial Sequence: Synthetic peptide"
SKEYPEY

SEQ ID NO: 10093 - protein, 7 aa, Artificial Sequence
  source: /note="Description of Artificial Sequence: Synthetic peptide"
SKFNGHL

SEQ ID NO: 10094 - protein, 7 aa, Artificial Sequence
  source: /note="Description of Artificial Sequence: Synthetic peptide"
SKHEVYL

SEQ ID NO: 10095 - protein, 7 aa, Artificial Sequence
  source: /note="Description of Artificial Sequence: Synthetic peptide"
SKHTAFV

SEQ ID NO: 10096 - protein, 7 aa, Artificial Sequence
  source: /note="Description of Artificial Sequence: Synthetic peptide"
SKIDLYT

SEQ ID NO: 10097 - protein, 7 aa, Artificial Sequence
  source: /note="Description of Artificial Sequence: Synthetic peptide"
SKIDRDD

SEQ ID NO: 10098 - protein, 7 aa, Artificial Sequence
  source: /note="Description of Artificial Sequence: Synthetic peptide"
SKIPHEV

SEQ ID NO: 10099 - protein, 7 aa, Artificial Sequence
  source: /note="Description of Artificial Sequence: Synthetic peptide"
SKLDDGR

SEQ ID NO: 10100 - protein, 7 aa, Artificial Sequence
  source: /note="Description of Artificial Sequence: Synthetic peptide"
SKLGSHL

SEQ ID NO: 10101 - protein, 7 aa, Artificial Sequence
  source: /note="Description of Artificial Sequence: Synthetic peptide"
SKLPPLH

SEQ ID NO: 10102 - protein, 7 aa, Artificial Sequence
  source: /note="Description of Artificial Sequence: Synthetic peptide"
SKLPVAL

SEQ ID NO: 10103 - protein, 7 aa, Artificial Sequence
  source: /note="Description of Artificial Sequence: Synthetic peptide"
SKLTTEP

SEQ ID NO: 10104 - protein, 7 aa, Artificial Sequence
  source: /note="Description of Artificial Sequence: Synthetic peptide"
SKMLEFV

SEQ ID NO: 10105 - protein, 7 aa, Artificial Sequence
  source: /note="Description of Artificial Sequence: Synthetic peptide"
SKMSRLE

SEQ ID NO: 10106 - protein, 7 aa, Artificial Sequence
  source: /note="Description of Artificial Sequence: Synthetic peptide"
SKNNPSL

SEQ ID NO: 10107 - protein, 7 aa, Artificial Sequence
  source: /note="Description of Artificial Sequence: Synthetic peptide"
SKNSQDY

SEQ ID NO: 10108 - protein, 7 aa, Artificial Sequence
  source: /note="Description of Artificial Sequence: Synthetic peptide"
SKNSVLN

SEQ ID NO: 10109 - protein, 7 aa, Artificial Sequence
  source: /note="Description of Artificial Sequence: Synthetic peptide"
SKNVCEP

SEQ ID NO: 10110 - protein, 7 aa, Artificial Sequence
  source: /note="Description of Artificial Sequence: Synthetic peptide"
SKPHREV

SEQ ID NO: 10111 - protein, 7 aa, Artificial Sequence
  source: /note="Description of Artificial Sequence: Synthetic peptide"
SKPLSGF

SEQ ID NO: 10112 - protein, 7 aa, Artificial Sequence
  source: /note="Description of Artificial Sequence: Synthetic peptide"
SKPSGPS

SEQ ID NO: 10113 - protein, 7 aa, Artificial Sequence
  source: /note="Description of Artificial Sequence: Synthetic peptide"
SKPTPTH

SEQ ID NO: 10114 - protein, 7 aa, Artificial Sequence
  source: /note="Description of Artificial Sequence: Synthetic peptide"
SKQAASV

SEQ ID NO: 10115 - protein, 7 aa, Artificial Sequence
  source: /note="Description of Artificial Sequence: Synthetic peptide"
SKQMPMH

SEQ ID NO: 10116 - protein, 7 aa, Artificial Sequence
  source: /note="Description of Artificial Sequence: Synthetic peptide"
SKRTTWD

SEQ ID NO: 10117 - protein, 7 aa, Artificial Sequence
  source: /note="Description of Artificial Sequence: Synthetic peptide"
SKSGTSE

SEQ ID NO: 10118 - protein, 7 aa, Artificial Sequence
  source: /note="Description of Artificial Sequence: Synthetic peptide"
SKSLKLS

SEQ ID NO: 10119 - protein, 7 aa, Artificial Sequence
  source: /note="Description of Artificial Sequence: Synthetic peptide"
SKSPNPY

SEQ ID NO: 10120 - protein, 7 aa, Artificial Sequence
  source: /note="Description of Artificial Sequence: Synthetic peptide"
SKSQFLA

SEQ ID NO: 10121 - protein, 7 aa, Artificial Sequence
  source: /note="Description of Artificial Sequence: Synthetic peptide"
SKSSMLI

SEQ ID NO: 10122 - protein, 7 aa, Artificial Sequence
  source: /note="Description of Artificial Sequence: Synthetic peptide"
SKTDRMN

SEQ ID NO: 10123 - protein, 7 aa, Artificial Sequence
  source: /note="Description of Artificial Sequence: Synthetic peptide"
SKTSDRT

SEQ ID NO: 10124 - protein, 7 aa, Artificial Sequence
  source: /note="Description of Artificial Sequence: Synthetic peptide"
SKTVEQN

SEQ ID NO: 10125 - protein, 7 aa, Artificial Sequence
  source: /note="Description of Artificial Sequence: Synthetic peptide"
SKVPSLA

SEQ ID NO: 10126 - protein, 7 aa, Artificial Sequence
  source: /note="Description of Artificial Sequence: Synthetic peptide"
SKVREPI

SEQ ID NO: 10127 - protein, 7 aa, Artificial Sequence
  source: /note="Description of Artificial Sequence: Synthetic peptide"
SKYATVV

SEQ ID NO: 10128 - protein, 7 aa, Artificial Sequence
  source: /note="Description of Artificial Sequence: Synthetic peptide"
SKYLRMD

SEQ ID NO: 10129 - protein, 7 aa, Artificial Sequence
  source: /note="Description of Artificial Sequence: Synthetic peptide"
SKYTLAY

SEQ ID NO: 10130 - protein, 7 aa, Artificial Sequence
  source: /note="Description of Artificial Sequence: Synthetic peptide"
SLADANA

SEQ ID NO: 10131 - protein, 7 aa, Artificial Sequence
  source: /note="Description of Artificial Sequence: Synthetic peptide"
SLAGNSS

SEQ ID NO: 10132 - protein, 7 aa, Artificial Sequence
  source: /note="Description of Artificial Sequence: Synthetic peptide"
SLAKMPG

SEQ ID NO: 10133 - protein, 7 aa, Artificial Sequence
  source: /note="Description of Artificial Sequence: Synthetic peptide"
SLALVGR

SEQ ID NO: 10134 - protein, 7 aa, Artificial Sequence
  source: /note="Description of Artificial Sequence: Synthetic peptide"
SLAPTVM

SEQ ID NO: 10135 - protein, 7 aa, Artificial Sequence
  source: /note="Description of Artificial Sequence: Synthetic peptide"
SLAQKQP

SEQ ID NO: 10136 - protein, 7 aa, Artificial Sequence
  source: /note="Description of Artificial Sequence: Synthetic peptide"
SLAQLHS

SEQ ID NO: 10137 - protein, 7 aa, Artificial Sequence
  source: /note="Description of Artificial Sequence: Synthetic peptide"
SLASSAM

SEQ ID NO: 10138 - protein, 7 aa, Artificial Sequence
  source: /note="Description of Artificial Sequence: Synthetic peptide"
SLASTGF

SEQ ID NO: 10139 - protein, 7 aa, Artificial Sequence
  source: /note="Description of Artificial Sequence: Synthetic peptide"
SLATRIS

SEQ ID NO: 10140 - protein, 7 aa, Artificial Sequence
  source: /note="Description of Artificial Sequence: Synthetic peptide"
SLATSPY

SEQ ID NO: 10141 - protein, 7 aa, Artificial Sequence
  source: /note="Description of Artificial Sequence: Synthetic peptide"
SLDATKD

SEQ ID NO: 10142 - protein, 7 aa, Artificial Sequence
  source: /note="Description of Artificial Sequence: Synthetic peptide"
SLDFPRP

SEQ ID NO: 10143 - protein, 7 aa, Artificial Sequence
  source: /note="Description of Artificial Sequence: Synthetic peptide"
SLDHHNR

SEQ ID NO: 10144 - protein, 7 aa, Artificial Sequence
  source: /note="Description of Artificial Sequence: Synthetic peptide"
SLDKALR

SEQ ID NO: 10145 - protein, 7 aa, Artificial Sequence
  source: /note="Description of Artificial Sequence: Synthetic peptide"
SLDMQKQ

SEQ ID NO: 10146 - protein, 7 aa, Artificial Sequence
  source: /note="Description of Artificial Sequence: Synthetic peptide"
SLDPKNS

SEQ ID NO: 10147 - protein, 7 aa, Artificial Sequence
  source: /note="Description of Artificial Sequence: Synthetic peptide"
SLEIPKI

SEQ ID NO: 10148 - protein, 7 aa, Artificial Sequence
  source: /note="Description of Artificial Sequence: Synthetic peptide"
SLEKRGE

SEQ ID NO: 10149 - protein, 7 aa, Artificial Sequence
  source: /note="Description of Artificial Sequence: Synthetic peptide"
SLERHVY

SEQ ID NO: 10150 - protein, 7 aa, Artificial Sequence
  source: /note="Description of Artificial Sequence: Synthetic peptide"
SLESEHR

SEQ ID NO: 10151 - protein, 7 aa, Artificial Sequence
  source: /note="Description of Artificial Sequence: Synthetic peptide"
SLESMIH

SEQ ID NO: 10152 - protein, 7 aa, Artificial Sequence
  source: /note="Description of Artificial Sequence: Synthetic peptide"
SLESRHY

SEQ ID NO: 10153 - protein, 7 aa, Artificial Sequence
  source: /note="Description of Artificial Sequence: Synthetic peptide"
SLEVVRK

SEQ ID NO: 10154 - protein, 7 aa, Artificial Sequence
  source: /note="Description of Artificial Sequence: Synthetic peptide"
SLFKDVS

SEQ ID NO: 10155 - protein, 7 aa, Artificial Sequence
  source: /note="Description of Artificial Sequence: Synthetic peptide"
SLFPAGG

SEQ ID NO: 10156 - protein, 7 aa, Artificial Sequence
  source: /note="Description of Artificial Sequence: Synthetic peptide"
SLFSARP

SEQ ID NO: 10157 - protein, 7 aa, Artificial Sequence
  source: /note="Description of Artificial Sequence: Synthetic peptide"
SLGFRAG

SEQ ID NO: 10158 - protein, 7 aa, Artificial Sequence
  source: /note="Description of Artificial Sequence: Synthetic peptide"
SLGISNF

SEQ ID NO: 10159 - protein, 7 aa, Artificial Sequence
  source: /note="Description of Artificial Sequence: Synthetic peptide"
SLGKTSP

SEQ ID NO: 10160 - protein, 7 aa, Artificial Sequence
  source: /note="Description of Artificial Sequence: Synthetic peptide"
SLGMKSA

SEQ ID NO: 10161 - protein, 7 aa, Artificial Sequence
  source: /note="Description of Artificial Sequence: Synthetic peptide"
SLGQSQY

SEQ ID NO: 10162 - protein, 7 aa, Artificial Sequence
  source: /note="Description of Artificial Sequence: Synthetic peptide"
SLGRGSI

SEQ ID NO: 10163 - protein, 7 aa, Artificial Sequence
  source: /note="Description of Artificial Sequence: Synthetic peptide"
SLGTGVG

SEQ ID NO: 10164 - protein, 7 aa, Artificial Sequence
  source: /note="Description of Artificial Sequence: Synthetic peptide"
SLHAIKN

SEQ ID NO: 10165 - protein, 7 aa, Artificial Sequence
  source: /note="Description of Artificial Sequence: Synthetic peptide"
SLHAVVS

SEQ ID NO: 10166 - protein, 7 aa, Artificial Sequence
  source: /note="Description of Artificial Sequence: Synthetic peptide"
SLHDMSG

SEQ ID NO: 10167 - protein, 7 aa, Artificial Sequence
  source: /note="Description of Artificial Sequence: Synthetic peptide"
SLHSSDS

SEQ ID NO: 10168 - protein, 7 aa, Artificial Sequence
  source: /note="Description of Artificial Sequence: Synthetic peptide"
SLIDPYE

SEQ ID NO: 10169 - protein, 7 aa, Artificial Sequence
  source: /note="Description of Artificial Sequence: Synthetic peptide"
SLIDRHP

SEQ ID NO: 10170 - protein, 7 aa, Artificial Sequence
  source: /note="Description of Artificial Sequence: Synthetic peptide"
SLIGGQQ

SEQ ID NO: 10171 - protein, 7 aa, Artificial Sequence
  source: /note="Description of Artificial Sequence: Synthetic peptide"
SLIRSST

SEQ ID NO: 10172 - protein, 7 aa, Artificial Sequence
  source: /note="Description of Artificial Sequence: Synthetic peptide"
SLISEKG

SEQ ID NO: 10173 - protein, 7 aa, Artificial Sequence
  source: /note="Description of Artificial Sequence: Synthetic peptide"
SLKASPP

SEQ ID NO: 10174 - protein, 7 aa, Artificial Sequence
  source: /note="Description of Artificial Sequence: Synthetic peptide"
SLKEAWL

SEQ ID NO: 10175 - protein, 7 aa, Artificial Sequence
  source: /note="Description of Artificial Sequence: Synthetic peptide"
SLKIPTA

SEQ ID NO: 10176 - protein, 7 aa, Artificial Sequence
  source: /note="Description of Artificial Sequence: Synthetic peptide"
SLKNELA

SEQ ID NO: 10177 - protein, 7 aa, Artificial Sequence
  source: /note="Description of Artificial Sequence: Synthetic peptide"
SLKPGGG

SEQ ID NO: 10178 - protein, 7 aa, Artificial Sequence
  source: /note="Description of Artificial Sequence: Synthetic peptide"
SLKPYQS

SEQ ID NO: 10179 - protein, 7 aa, Artificial Sequence
  source: /note="Description of Artificial Sequence: Synthetic peptide"
SLKQSHP

SEQ ID NO: 10180 - protein, 7 aa, Artificial Sequence
  source: /note="Description of Artificial Sequence: Synthetic peptide"
SLKSPQL

SEQ ID NO: 10181 - protein, 7 aa, Artificial Sequence
  source: /note="Description of Artificial Sequence: Synthetic peptide"
SLKTYPE

SEQ ID NO: 10182 - protein, 7 aa, Artificial Sequence
  source: /note="Description of Artificial Sequence: Synthetic peptide"
SLLAKVP

SEQ ID NO: 10183 - protein, 7 aa, Artificial Sequence
  source: /note="Description of Artificial Sequence: Synthetic peptide"
SLLDRPI

SEQ ID NO: 10184 - protein, 7 aa, Artificial Sequence
  source: /note="Description of Artificial Sequence: Synthetic peptide"
SLLGPTQ

SEQ ID NO: 10185 - protein, 7 aa, Artificial Sequence
  source: /note="Description of Artificial Sequence: Synthetic peptide"
SLLKPVQ

SEQ ID NO: 10186 - protein, 7 aa, Artificial Sequence
  source: /note="Description of Artificial Sequence: Synthetic peptide"
SLLLLCA

SEQ ID NO: 10187 - protein, 7 aa, Artificial Sequence
  source: /note="Description of Artificial Sequence: Synthetic peptide"
SLLLNRG

SEQ ID NO: 10188 - protein, 7 aa, Artificial Sequence
  source: /note="Description of Artificial Sequence: Synthetic peptide"
SLLLQNP

SEQ ID NO: 10189 - protein, 7 aa, Artificial Sequence
  source: /note="Description of Artificial Sequence: Synthetic peptide"
SLLNSDT

SEQ ID NO: 10190 - protein, 7 aa, Artificial Sequence
  source: /note="Description of Artificial Sequence: Synthetic peptide"
SLLRQVP

SEQ ID NO: 10191 - protein, 7 aa, Artificial Sequence
  source: /note="Description of Artificial Sequence: Synthetic peptide"
SLLSVSH

SEQ ID NO: 10192 - protein, 7 aa, Artificial Sequence
  source: /note="Description of Artificial Sequence: Synthetic peptide"
SLLTASV

SEQ ID NO: 10193 - protein, 7 aa, Artificial Sequence
  source: /note="Description of Artificial Sequence: Synthetic peptide"
SLLTSAP

SEQ ID NO: 10194 - protein, 7 aa, Artificial Sequence
  source: /note="Description of Artificial Sequence: Synthetic peptide"
SLLVNLS

SEQ ID NO: 10195 - protein, 7 aa, Artificial Sequence
  source: /note="Description of Artificial Sequence: Synthetic peptide"
SLLYPTP

SEQ ID NO: 10196 - protein, 7 aa, Artificial Sequence
  source: /note="Description of Artificial Sequence: Synthetic peptide"
SLMAAGL

SEQ ID NO: 10197 - protein, 7 aa, Artificial Sequence
  source: /note="Description of Artificial Sequence: Synthetic peptide"
SLMASIG

SEQ ID NO: 10198 - protein, 7 aa, Artificial Sequence
  source: /note="Description of Artificial Sequence: Synthetic peptide"
SLMHDVS

SEQ ID NO: 10199 - protein, 7 aa, Artificial Sequence
  source: /note="Description of Artificial Sequence: Synthetic peptide"
SLMSLDT

SEQ ID NO: 10200 - protein, 7 aa, Artificial Sequence
  source: /note="Description of Artificial Sequence: Synthetic peptide"
SLMSPSM

SEQ ID NO: 10201 - protein, 7 aa, Artificial Sequence
  source: /note="Description of Artificial Sequence: Synthetic peptide"
SLNLRGN

SEQ ID NO: 10202 - protein, 7 aa, Artificial Sequence
  source: /note="Description of Artificial Sequence: Synthetic peptide"
SLNNARN

SEQ ID NO: 10203 - protein, 7 aa, Artificial Sequence
  source: /note="Description of Artificial Sequence: Synthetic peptide"
SLNNGLT

SEQ ID NO: 10204 - protein, 7 aa, Artificial Sequence
  source: /note="Description of Artificial Sequence: Synthetic peptide"
SLNNRPS

SEQ ID NO: 10205 - protein, 7 aa, Artificial Sequence
  source: /note="Description of Artificial Sequence: Synthetic peptide"
SLNPKSP

SEQ ID NO: 10206 - protein, 7 aa, Artificial Sequence
  source: /note="Description of Artificial Sequence: Synthetic peptide"
SLNPSGM

SEQ ID NO: 10207 - protein, 7 aa, Artificial Sequence
  source: /note="Description of Artificial Sequence: Synthetic peptide"
SLNRQGN

SEQ ID NO: 10208 - protein, 7 aa, Artificial Sequence
  source: /note="Description of Artificial Sequence: Synthetic peptide"
SLNSYSP

SEQ ID NO: 10209 - protein, 7 aa, Artificial Sequence
  source: /note="Description of Artificial Sequence: Synthetic peptide"
SLNTGTI

SEQ ID NO: 10210 - protein, 7 aa, Artificial Sequence
  source: /note="Description of Artificial Sequence: Synthetic peptide"
SLNTLGT

SEQ ID NO: 10211 - protein, 7 aa, Artificial Sequence
  source: /note="Description of Artificial Sequence: Synthetic peptide"
SLNTMNA

SEQ ID NO: 10212 - protein, 7 aa, Artificial Sequence
  source: /note="Description of Artificial Sequence: Synthetic peptide"
SLNTTPE

SEQ ID NO: 10213 - protein, 7 aa, Artificial Sequence
  source: /note="Description of Artificial Sequence: Synthetic peptide"
SLNVADA

SEQ ID NO: 10214 - protein, 7 aa, Artificial Sequence
  source: /note="Description of Artificial Sequence: Synthetic peptide"
SLPAQQV

SEQ ID NO: 10215 - protein, 7 aa, Artificial Sequence
  source: /note="Description of Artificial Sequence: Synthetic peptide"
SLPASTL

SEQ ID NO: 10216 - protein, 7 aa, Artificial Sequence
  source: /note="Description of Artificial Sequence: Synthetic peptide"
SLPESNS

SEQ ID NO: 10217 - protein, 7 aa, Artificial Sequence
  source: /note="Description of Artificial Sequence: Synthetic peptide"
SLPGSVM

SEQ ID NO: 10218 - protein, 7 aa, Artificial Sequence
  source: /note="Description of Artificial Sequence: Synthetic peptide"
SLPGTVR

SEQ ID NO: 10219 - protein, 7 aa, Artificial Sequence
  source: /note="Description of Artificial Sequence: Synthetic peptide"
SLPHIRH

SEQ ID NO: 10220 - protein, 7 aa, Artificial Sequence
  source: /note="Description of Artificial Sequence: Synthetic peptide"
SLPHSCG

SEQ ID NO: 10221 - protein, 7 aa, Artificial Sequence
  source: /note="Description of Artificial Sequence: Synthetic peptide"
SLPIGGS

SEQ ID NO: 10222 - protein, 7 aa, Artificial Sequence
  source: /note="Description of Artificial Sequence: Synthetic peptide"
SLPKPSH

SEQ ID NO: 10223 - protein, 7 aa, Artificial Sequence
  source: /note="Description of Artificial Sequence: Synthetic peptide"
SLPLKVN

SEQ ID NO: 10224 - protein, 7 aa, Artificial Sequence
  source: /note="Description of Artificial Sequence: Synthetic peptide"
SLPLRDL

SEQ ID NO: 10225 - protein, 7 aa, Artificial Sequence
  source: /note="Description of Artificial Sequence: Synthetic peptide"
SLPNIGT

SEQ ID NO: 10226 - protein, 7 aa, Artificial Sequence
  source: /note="Description of Artificial Sequence: Synthetic peptide"
SLPQPPL

SEQ ID NO: 10227 - protein, 7 aa, Artificial Sequence
  source: /note="Description of Artificial Sequence: Synthetic peptide"
SLPQTLR

SEQ ID NO: 10228 - protein, 7 aa, Artificial Sequence
  source: /note="Description of Artificial Sequence: Synthetic peptide"
SLPRGSN

SEQ ID NO: 10229 - protein, 7 aa, Artificial Sequence
  source: /note="Description of Artificial Sequence: Synthetic peptide"
SLPSLLG

SEQ ID NO: 10230 - protein, 7 aa, Artificial Sequence
  source: /note="Description of Artificial Sequence: Synthetic peptide"
SLPSSPS

SEQ ID NO: 10231 - protein, 7 aa, Artificial Sequence
  source: /note="Description of Artificial Sequence: Synthetic peptide"
SLPSTHV

SEQ ID NO: 10232 - protein, 7 aa, Artificial Sequence
  source: /note="Description of Artificial Sequence: Synthetic peptide"
SLPTGPI

SEQ ID NO: 10233 - protein, 7 aa, Artificial Sequence
  source: /note="Description of Artificial Sequence: Synthetic peptide"
SLPTSTM

SEQ ID NO: 10234 - protein, 7 aa, Artificial Sequence
  source: /note="Description of Artificial Sequence: Synthetic peptide"
SLPVPSR

SEQ ID NO: 10235 - protein, 7 aa, Artificial Sequence
  source: /note="Description of Artificial Sequence: Synthetic peptide"
SLPVRGV

SEQ ID NO: 10236 - protein, 7 aa, Artificial Sequence
  source: /note="Description of Artificial Sequence: Synthetic peptide"
SLPVSPS

SEQ ID NO: 10237 - protein, 7 aa, Artificial Sequence
  source: /note="Description of Artificial Sequence: Synthetic peptide"
SLPVTGR

SEQ ID NO: 10238 - protein, 7 aa, Artificial Sequence
  source: /note="Description of Artificial Sequence: Synthetic peptide"
SLQFTSS

SEQ ID NO: 10239 - protein, 7 aa, Artificial Sequence
  source: /note="Description of Artificial Sequence: Synthetic peptide"
SLQRDLV

SEQ ID NO: 10240 - protein, 7 aa, Artificial Sequence
  source: /note="Description of Artificial Sequence: Synthetic peptide"
SLQRPTI

SEQ ID NO: 10241 - protein, 7 aa, Artificial Sequence
  source: /note="Description of Artificial Sequence: Synthetic peptide"
SLQSSRG

SEQ ID NO: 10242 - protein, 7 aa, Artificial Sequence
  source: /note="Description of Artificial Sequence: Synthetic peptide"
SLQTDNE

SEQ ID NO: 10243 - protein, 7 aa, Artificial Sequence
  source: /note="Description of Artificial Sequence: Synthetic peptide"
SLQTSRV

SEQ ID NO: 10244 - protein, 7 aa, Artificial Sequence
  source: /note="Description of Artificial Sequence: Synthetic peptide"
SLQWTSA

SEQ ID NO: 10245 - protein, 7 aa, Artificial Sequence
  source: /note="Description of Artificial Sequence: Synthetic peptide"
SLRANTY

SEQ ID NO: 10246 - protein, 7 aa, Artificial Sequence
  source: /note="Description of Artificial Sequence: Synthetic peptide"
SLRAVVP

SEQ ID NO: 10247 - protein, 7 aa, Artificial Sequence
  source: /note="Description of Artificial Sequence: Synthetic peptide"
SLRDSYH

SEQ ID NO: 10248 - protein, 7 aa, Artificial Sequence
  source: /note="Description of Artificial Sequence: Synthetic peptide"
SLREDAQ

SEQ ID NO: 10249 - protein, 7 aa, Artificial Sequence
  source: /note="Description of Artificial Sequence: Synthetic peptide"
SLRGSSS

SEQ ID NO: 10250 - protein, 7 aa, Artificial Sequence
  source: /note="Description of Artificial Sequence: Synthetic peptide"
SLRHSET

SEQ ID NO: 10251 - protein, 7 aa, Artificial Sequence
  source: /note="Description of Artificial Sequence: Synthetic peptide"
SLRISAT

SEQ ID NO: 10252 - protein, 7 aa, Artificial Sequence
  source: /note="Description of Artificial Sequence: Synthetic peptide"
SLRPDQH

SEQ ID NO: 10253 - protein, 7 aa, Artificial Sequence
  source: /note="Description of Artificial Sequence: Synthetic peptide"
SLRPNSS

SEQ ID NO: 10254 - protein, 7 aa, Artificial Sequence
  source: /note="Description of Artificial Sequence: Synthetic peptide"
SLRSLNS

SEQ ID NO: 10255 - protein, 7 aa, Artificial Sequence
  source: /note="Description of Artificial Sequence: Synthetic peptide"
SLRTGDY

SEQ ID NO: 10256 - protein, 7 aa, Artificial Sequence
  source: /note="Description of Artificial Sequence: Synthetic peptide"
SLRTIAA

SEQ ID NO: 10257 - protein, 7 aa, Artificial Sequence
  source: /note="Description of Artificial Sequence: Synthetic peptide"
SLRTNVV

SEQ ID NO: 10258 - protein, 7 aa, Artificial Sequence
  source: /note="Description of Artificial Sequence: Synthetic peptide"
SLRTSMV

SEQ ID NO: 10259 - protein, 7 aa, Artificial Sequence
  source: /note="Description of Artificial Sequence: Synthetic peptide"
SLRVAEL

SEQ ID NO: 10260 - protein, 7 aa, Artificial Sequence
  source: /note="Description of Artificial Sequence: Synthetic peptide"
SLRVPVA

SEQ ID NO: 10261 - protein, 7 aa, Artificial Sequence
  source: /note="Description of Artificial Sequence: Synthetic peptide"
SLSAHDR

SEQ ID NO: 10262 - protein, 7 aa, Artificial Sequence
  source: /note="Description of Artificial Sequence: Synthetic peptide"
SLSETFR

SEQ ID NO: 10263 - protein, 7 aa, Artificial Sequence
  source: /note="Description of Artificial Sequence: Synthetic peptide"
SLSGARA

SEQ ID NO: 10264 - protein, 7 aa, Artificial Sequence
  source: /note="Description of Artificial Sequence: Synthetic peptide"
SLSGNTD

SEQ ID NO: 10265 - protein, 7 aa, Artificial Sequence
  source: /note="Description of Artificial Sequence: Synthetic peptide"
SLSGRPS

SEQ ID NO: 10266 - protein, 7 aa, Artificial Sequence
  source: /note="Description of Artificial Sequence: Synthetic peptide"
SLSHFPA

SEQ ID NO: 10267 - protein, 7 aa, Artificial Sequence
  source: /note="Description of Artificial Sequence: Synthetic peptide"
SLSHSDG

SEQ ID NO: 10268 - protein, 7 aa, Artificial Sequence
  source: /note="Description of Artificial Sequence: Synthetic peptide"
SLSIDKA

SEQ ID NO: 10269 - protein, 7 aa, Artificial Sequence
  source: /note="Description of Artificial Sequence: Synthetic peptide"
SLSKMPS

SEQ ID NO: 10270 - protein, 7 aa, Artificial Sequence
  source: /note="Description of Artificial Sequence: Synthetic peptide"
SLSKPVG

SEQ ID NO: 10271 - protein, 7 aa, Artificial Sequence
  source: /note="Description of Artificial Sequence: Synthetic peptide"
SLSPRTF

SEQ ID NO: 10272 - protein, 7 aa, Artificial Sequence
  source: /note="Description of Artificial Sequence: Synthetic peptide"
SLSQGSN

SEQ ID NO: 10273 - protein, 7 aa, Artificial Sequence
  source: /note="Description of Artificial Sequence: Synthetic peptide"
SLSRAGP

SEQ ID NO: 10274 - protein, 7 aa, Artificial Sequence
  source: /note="Description of Artificial Sequence: Synthetic peptide"
SLSSAIG

SEQ ID NO: 10275 - protein, 7 aa, Artificial Sequence
  source: /note="Description of Artificial Sequence: Synthetic peptide"
SLSSRNI

SEQ ID NO: 10276 - protein, 7 aa, Artificial Sequence
  source: /note="Description of Artificial Sequence: Synthetic peptide"
SLSTTSK

SEQ ID NO: 10277 - protein, 7 aa, Artificial Sequence
  source: /note="Description of Artificial Sequence: Synthetic peptide"
SLSVEPT

SEQ ID NO: 10278 - protein, 7 aa, Artificial Sequence
  source: /note="Description of Artificial Sequence: Synthetic peptide"
SLSYANH

SEQ ID NO: 10279 - protein, 7 aa, Artificial Sequence
  source: /note="Description of Artificial Sequence: Synthetic peptide"
SLSYAQE

SEQ ID NO: 10280 - protein, 7 aa, Artificial Sequence
  source: /note="Description of Artificial Sequence: Synthetic peptide"
SLTAGGH

SEQ ID NO: 10281 - protein, 7 aa, Artificial Sequence
  source: /note="Description of Artificial Sequence: Synthetic peptide"
SLTFSTG

SEQ ID NO: 10282 - protein, 7 aa, Artificial Sequence
  source: /note="Description of Artificial Sequence: Synthetic peptide"
SLTGDGV

SEQ ID NO: 10283 - protein, 7 aa, Artificial Sequence
  source: /note="Description of Artificial Sequence: Synthetic peptide"
SLTHINH

SEQ ID NO: 10284 - protein, 7 aa, Artificial Sequence
  source: /note="Description of Artificial Sequence: Synthetic peptide"
SLTHIPM

SEQ ID NO: 10285 - protein, 7 aa, Artificial Sequence
  source: /note="Description of Artificial Sequence: Synthetic peptide"
SLTIAAV

SEQ ID NO: 10286 - protein, 7 aa, Artificial Sequence
  source: /note="Description of Artificial Sequence: Synthetic peptide"
SLTNEAK

SEQ ID NO: 10287 - protein, 7 aa, Artificial Sequence
  source: /note="Description of Artificial Sequence: Synthetic peptide"
SLTNIAQ

SEQ ID NO: 10288 - protein, 7 aa, Artificial Sequence
  source: /note="Description of Artificial Sequence: Synthetic peptide"
SLTPIMR

SEQ ID NO: 10289 - protein, 7 aa, Artificial Sequence
  source: /note="Description of Artificial Sequence: Synthetic peptide"
SLTPRST

SEQ ID NO: 10290 - protein, 7 aa, Artificial Sequence
  source: /note="Description of Artificial Sequence: Synthetic peptide"
SLTPSFA

SEQ ID NO: 10291 - protein, 7 aa, Artificial Sequence
  source: /note="Description of Artificial Sequence: Synthetic peptide"
SLTSATT

SEQ ID NO: 10292 - protein, 7 aa, Artificial Sequence
  source: /note="Description of Artificial Sequence: Synthetic peptide"
SLTSRPM

SEQ ID NO: 10293 - protein, 7 aa, Artificial Sequence
  source: /note="Description of Artificial Sequence: Synthetic peptide"
SLTSTMS

SEQ ID NO: 10294 - protein, 7 aa, Artificial Sequence
  source: /note="Description of Artificial Sequence: Synthetic peptide"
SLTVLRN

SEQ ID NO: 10295 - protein, 7 aa, Artificial Sequence
  source: /note="Description of Artificial Sequence: Synthetic peptide"
SLTYDNS

SEQ ID NO: 10296 - protein, 7 aa, Artificial Sequence
  source: /note="Description of Artificial Sequence: Synthetic peptide"
SLTYERD

SEQ ID NO: 10297 - protein, 7 aa, Artificial Sequence
  source: /note="Description of Artificial Sequence: Synthetic peptide"
SLTYGAL

SEQ ID NO: 10298 - protein, 7 aa, Artificial Sequence
  source: /note="Description of Artificial Sequence: Synthetic peptide"
SLVERTS

SEQ ID NO: 10299 - protein, 7 aa, Artificial Sequence
  source: /note="Description of Artificial Sequence: Synthetic peptide"
SLVGTVD

SEQ ID NO: 10300 - protein, 7 aa, Artificial Sequence
  source: /note="Description of Artificial Sequence: Synthetic peptide"
SLVHRST

SEQ ID NO: 10301 - protein, 7 aa, Artificial Sequence
  source: /note="Description of Artificial Sequence: Synthetic peptide"
SLVNETS

SEQ ID NO: 10302 - protein, 7 aa, Artificial Sequence
  source: /note="Description of Artificial Sequence: Synthetic peptide"
SLVQKLS

SEQ ID NO: 10303 - protein, 7 aa, Artificial Sequence
  source: /note="Description of Artificial Sequence: Synthetic peptide"
SLVRSGD

SEQ ID NO: 10304 - protein, 7 aa, Artificial Sequence
  source: /note="Description of Artificial Sequence: Synthetic peptide"
SLVRSQN

SEQ ID NO: 10305 - protein, 7 aa, Artificial Sequence
  source: /note="Description of Artificial Sequence: Synthetic peptide"
SLVSRIS

SEQ ID NO: 10306 - protein, 7 aa, Artificial Sequence
  source: /note="Description of Artificial Sequence: Synthetic peptide"
SLVTAGS

SEQ ID NO: 10307 - protein, 7 aa, Artificial Sequence
  source: /note="Description of Artificial Sequence: Synthetic peptide"
SLVVQSA

SEQ ID NO: 10308 - protein, 7 aa, Artificial Sequence
  source: /note="Description of Artificial Sequence: Synthetic peptide"
SLVYDPL

SEQ ID NO: 10309 - protein, 7 aa, Artificial Sequence
  source: /note="Description of Artificial Sequence: Synthetic peptide"
SLYSGNV

SEQ ID NO: 10310 - protein, 7 aa, Artificial Sequence
  source: /note="Description of Artificial Sequence: Synthetic peptide"
SLYVPKH

SEQ ID NO: 10311 - protein, 7 aa, Artificial Sequence
  source: /note="Description of Artificial Sequence: Synthetic peptide"
SLYYKEE

SEQ ID NO: 10312 - protein, 7 aa, Artificial Sequence
  source: /note="Description of Artificial Sequence: Synthetic peptide"
SMAATPA

SEQ ID NO: 10313 - protein, 7 aa, Artificial Sequence
  source: /note="Description of Artificial Sequence: Synthetic peptide"
SMALSGI

SEQ ID NO: 10314 - protein, 7 aa, Artificial Sequence
  source: /note="Description of Artificial Sequence: Synthetic peptide"
SMAVSVP

SEQ ID NO: 10315 - protein, 7 aa, Artificial Sequence
  source: /note="Description of Artificial Sequence: Synthetic peptide"
SMDCLSP

SEQ ID NO: 10316 - protein, 7 aa, Artificial Sequence
  source: /note="Description of Artificial Sequence: Synthetic peptide"
SMDPGAR

SEQ ID NO: 10317 - protein, 7 aa, Artificial Sequence
  source: /note="Description of Artificial Sequence: Synthetic peptide"
SMDRKTG

SEQ ID NO: 10318 - protein, 7 aa, Artificial Sequence
  source: /note="Description of Artificial Sequence: Synthetic peptide"
SMDVSDT

SEQ ID NO: 10319 - protein, 7 aa, Artificial Sequence
  source: /note="Description of Artificial Sequence: Synthetic peptide"
SMESRLL

SEQ ID NO: 10320 - protein, 7 aa, Artificial Sequence
  source: /note="Description of Artificial Sequence: Synthetic peptide"
SMGAGPT

SEQ ID NO: 10321 - protein, 7 aa, Artificial Sequence
  source: /note="Description of Artificial Sequence: Synthetic peptide"
SMGDNRR

SEQ ID NO: 10322 - protein, 7 aa, Artificial Sequence
  source: /note="Description of Artificial Sequence: Synthetic peptide"
SMGSSAL

SEQ ID NO: 10323 - protein, 7 aa, Artificial Sequence
  source: /note="Description of Artificial Sequence: Synthetic peptide"
SMHALSV

SEQ ID NO: 10324 - protein, 7 aa, Artificial Sequence
  source: /note="Description of Artificial Sequence: Synthetic peptide"
SMHQTVH

SEQ ID NO: 10325 - protein, 7 aa, Artificial Sequence
  source: /note="Description of Artificial Sequence: Synthetic peptide"
SMHRTSP

SEQ ID NO: 10326 - protein, 7 aa, Artificial Sequence
  source: /note="Description of Artificial Sequence: Synthetic peptide"
SMHTTTT

SEQ ID NO: 10327 - protein, 7 aa, Artificial Sequence
  source: /note="Description of Artificial Sequence: Synthetic peptide"
SMHVPGV

SEQ ID NO: 10328 - protein, 7 aa, Artificial Sequence
  source: /note="Description of Artificial Sequence: Synthetic peptide"
SMKAVLN

SEQ ID NO: 10329 - protein, 7 aa, Artificial Sequence
  source: /note="Description of Artificial Sequence: Synthetic peptide"
SMLDSLL

SEQ ID NO: 10330 - protein, 7 aa, Artificial Sequence
  source: /note="Description of Artificial Sequence: Synthetic peptide"
SMLNVTV

SEQ ID NO: 10331 - protein, 7 aa, Artificial Sequence
  source: /note="Description of Artificial Sequence: Synthetic peptide"
SMLSASL

SEQ ID NO: 10332 - protein, 7 aa, Artificial Sequence
  source: /note="Description of Artificial Sequence: Synthetic peptide"
SMMAVKP

SEQ ID NO: 10333 - protein, 7 aa, Artificial Sequence
  source: /note="Description of Artificial Sequence: Synthetic peptide"
SMMEPFK

SEQ ID NO: 10334 - protein, 7 aa, Artificial Sequence
  source: /note="Description of Artificial Sequence: Synthetic peptide"
SMMNTVG

SEQ ID NO: 10335 - protein, 7 aa, Artificial Sequence
  source: /note="Description of Artificial Sequence: Synthetic peptide"
SMMQKVP

SEQ ID NO: 10336 - protein, 7 aa, Artificial Sequence
  source: /note="Description of Artificial Sequence: Synthetic peptide"
SMMTGLA

SEQ ID NO: 10337 - protein, 7 aa, Artificial Sequence
  source: /note="Description of Artificial Sequence: Synthetic peptide"
SMMYIEP

SEQ ID NO: 10338 - protein, 7 aa, Artificial Sequence
  source: /note="Description of Artificial Sequence: Synthetic peptide"
SMNLGST

SEQ ID NO: 10339 - protein, 7 aa, Artificial Sequence
  source: /note="Description of Artificial Sequence: Synthetic peptide"
SMNPGSA

SEQ ID NO: 10340 - protein, 7 aa, Artificial Sequence
  source: /note="Description of Artificial Sequence: Synthetic peptide"
SMNPMTV

SEQ ID NO: 10341 - protein, 7 aa, Artificial Sequence
  source: /note="Description of Artificial Sequence: Synthetic peptide"
SMNVYDT

SEQ ID NO: 10342 - protein, 7 aa, Artificial Sequence
  source: /note="Description of Artificial Sequence: Synthetic peptide"
SMPFSVA

SEQ ID NO: 10343 - protein, 7 aa, Artificial Sequence
  source: /note="Description of Artificial Sequence: Synthetic peptide"
SMPGVAN

SEQ ID NO: 10344 - protein, 7 aa, Artificial Sequence
  source: /note="Description of Artificial Sequence: Synthetic peptide"
SMPHTLS

SEQ ID NO: 10345 - protein, 7 aa, Artificial Sequence
  source: /note="Description of Artificial Sequence: Synthetic peptide"
SMPMPSP

SEQ ID NO: 10346 - protein, 7 aa, Artificial Sequence
  source: /note="Description of Artificial Sequence: Synthetic peptide"
SMPNAPS

SEQ ID NO: 10347 - protein, 7 aa, Artificial Sequence
  source: /note="Description of Artificial Sequence: Synthetic peptide"
SMPNPYQ

SEQ ID NO: 10348 - protein, 7 aa, Artificial Sequence
  source: /note="Description of Artificial Sequence: Synthetic peptide"
SMPRDLI

SEQ ID NO: 10349 - protein, 7 aa, Artificial Sequence
  source: /note="Description of Artificial Sequence: Synthetic peptide"
SMPREPG

SEQ ID NO: 10350 - protein, 7 aa, Artificial Sequence
  source: /note="Description of Artificial Sequence: Synthetic peptide"
SMPSPRV

SEQ ID NO: 10351 - protein, 7 aa, Artificial Sequence
  source: /note="Description of Artificial Sequence: Synthetic peptide"
SMRAAAF

SEQ ID NO: 10352 - protein, 7 aa, Artificial Sequence
  source: /note="Description of Artificial Sequence: Synthetic peptide"
SMRDTDR

SEQ ID NO: 10353 - protein, 7 aa, Artificial Sequence
  source: /note="Description of Artificial Sequence: Synthetic peptide"
SMRPSDN

SEQ ID NO: 10354 - protein, 7 aa, Artificial Sequence
  source: /note="Description of Artificial Sequence: Synthetic peptide"
SMRSGEP

SEQ ID NO: 10355 - protein, 7 aa, Artificial Sequence
  source: /note="Description of Artificial Sequence: Synthetic peptide"
SMRSRDT

SEQ ID NO: 10356 - protein, 7 aa, Artificial Sequence
  source: /note="Description of Artificial Sequence: Synthetic peptide"
SMRSSPL

SEQ ID NO: 10357 - protein, 7 aa, Artificial Sequence
  source: /note="Description of Artificial Sequence: Synthetic peptide"
SMSGFDV

SEQ ID NO: 10358 - protein, 7 aa, Artificial Sequence
  source: /note="Description of Artificial Sequence: Synthetic peptide"
SMSGRIT

SEQ ID NO: 10359 - protein, 7 aa, Artificial Sequence
  source: /note="Description of Artificial Sequence: Synthetic peptide"
SMSLSGL

SEQ ID NO: 10360 - protein, 7 aa, Artificial Sequence
  source: /note="Description of Artificial Sequence: Synthetic peptide"
SMSPSHP

SEQ ID NO: 10361 - protein, 7 aa, Artificial Sequence
  source: /note="Description of Artificial Sequence: Synthetic peptide"
SMSQPTY

SEQ ID NO: 10362 - protein, 7 aa, Artificial Sequence
  source: /note="Description of Artificial Sequence: Synthetic peptide"
SMSRPQP

SEQ ID NO: 10363 - protein, 7 aa, Artificial Sequence
  source: /note="Description of Artificial Sequence: Synthetic peptide"
SMSSFPP

SEQ ID NO: 10364 - protein, 7 aa, Artificial Sequence
  source: /note="Description of Artificial Sequence: Synthetic peptide"
SMSVEPY

SEQ ID NO: 10365 - protein, 7 aa, Artificial Sequence
  source: /note="Description of Artificial Sequence: Synthetic peptide"
SMTADLI

SEQ ID NO: 10366 - protein, 7 aa, Artificial Sequence
  source: /note="Description of Artificial Sequence: Synthetic peptide"
SMTALTA

SEQ ID NO: 10367 - protein, 7 aa, Artificial Sequence
  source: /note="Description of Artificial Sequence: Synthetic peptide"
SMTGPEL

SEQ ID NO: 10368 - protein, 7 aa, Artificial Sequence
  source: /note="Description of Artificial Sequence: Synthetic peptide"
SMTLGTA

SEQ ID NO: 10369 - protein, 7 aa, Artificial Sequence
  source: /note="Description of Artificial Sequence: Synthetic peptide"
SMTPSVT

SEQ ID NO: 10370 - protein, 7 aa, Artificial Sequence
  source: /note="Description of Artificial Sequence: Synthetic peptide"
SMTTIGP

SEQ ID NO: 10371 - protein, 7 aa, Artificial Sequence
  source: /note="Description of Artificial Sequence: Synthetic peptide"
SMVQGRV

SEQ ID NO: 10372 - protein, 7 aa, Artificial Sequence
  source: /note="Description of Artificial Sequence: Synthetic peptide"
SMYAAGS

SEQ ID NO: 10373 - protein, 7 aa, Artificial Sequence
  source: /note="Description of Artificial Sequence: Synthetic peptide"
SMYDPRA

SEQ ID NO: 10374 - protein, 7 aa, Artificial Sequence
  source: /note="Description of Artificial Sequence: Synthetic peptide"
SNAAIPL

SEQ ID NO: 10375 - protein, 7 aa, Artificial Sequence
  source: /note="Description of Artificial Sequence: Synthetic peptide"
SNALNIG

SEQ ID NO: 10376 - protein, 7 aa, Artificial Sequence
  source: /note="Description of Artificial Sequence: Synthetic peptide"
SNARAPV

SEQ ID NO: 10377 - protein, 7 aa, Artificial Sequence
  source: /note="Description of Artificial Sequence: Synthetic peptide"
SNARPPS

SEQ ID NO: 10378 - protein, 7 aa, Artificial Sequence
  source: /note="Description of Artificial Sequence: Synthetic peptide"
SNASHSV

SEQ ID NO: 10379 - protein, 7 aa, Artificial Sequence
  source: /note="Description of Artificial Sequence: Synthetic peptide"
SNASMMH

SEQ ID NO: 10380 - protein, 7 aa, Artificial Sequence
  source: /note="Description of Artificial Sequence: Synthetic peptide"
SNATTPT

SEQ ID NO: 10381 - protein, 7 aa, Artificial Sequence
  source: /note="Description of Artificial Sequence: Synthetic peptide"
SNCPKDC

SEQ ID NO: 10382 - protein, 7 aa, Artificial Sequence
  source: /note="Description of Artificial Sequence: Synthetic peptide"
SNCSSLK

SEQ ID NO: 10383 - protein, 7 aa, Artificial Sequence
  source: /note="Description of Artificial Sequence: Synthetic peptide"
SNENRSS

SEQ ID NO: 10384 - protein, 7 aa, Artificial Sequence
  source: /note="Description of Artificial Sequence: Synthetic peptide"
SNERTTN

SEQ ID NO: 10385 - protein, 7 aa, Artificial Sequence
  source: /note="Description of Artificial Sequence: Synthetic peptide"
SNFTEAM

SEQ ID NO: 10386 - protein, 7 aa, Artificial Sequence
  source: /note="Description of Artificial Sequence: Synthetic peptide"
SNGHDAS

SEQ ID NO: 10387 - protein, 7 aa, Artificial Sequence
  source: /note="Description of Artificial Sequence: Synthetic peptide"
SNGHPPW

SEQ ID NO: 10388 - protein, 7 aa, Artificial Sequence
  source: /note="Description of Artificial Sequence: Synthetic peptide"
SNGIDSG

SEQ ID NO: 10389 - protein, 7 aa, Artificial Sequence
  source: /note="Description of Artificial Sequence: Synthetic peptide"
SNGLNRL

SEQ ID NO: 10390 - protein, 7 aa, Artificial Sequence
  source: /note="Description of Artificial Sequence: Synthetic peptide"
SNGNRDS

SEQ ID NO: 10391 - protein, 7 aa, Artificial Sequence
  source: /note="Description of Artificial Sequence: Synthetic peptide"
SNGQTSP

SEQ ID NO: 10392 - protein, 7 aa, Artificial Sequence
  source: /note="Description of Artificial Sequence: Synthetic peptide"
SNGSKVV

SEQ ID NO: 10393 - protein, 7 aa, Artificial Sequence
  source: /note="Description of Artificial Sequence: Synthetic peptide"
SNGSPKA

SEQ ID NO: 10394 - protein, 7 aa, Artificial Sequence
  source: /note="Description of Artificial Sequence: Synthetic peptide"
SNGSTYK

SEQ ID NO: 10395 - protein, 7 aa, Artificial Sequence
  source: /note="Description of Artificial Sequence: Synthetic peptide"
SNGTRSY

SEQ ID NO: 10396 - protein, 7 aa, Artificial Sequence
  source: /note="Description of Artificial Sequence: Synthetic peptide"
SNHAHSL

SEQ ID NO: 10397 - protein, 7 aa, Artificial Sequence
  source: /note="Description of Artificial Sequence: Synthetic peptide"
SNHEIDY

SEQ ID NO: 10398 - protein, 7 aa, Artificial Sequence
  source: /note="Description of Artificial Sequence: Synthetic peptide"
SNHGGVS

SEQ ID NO: 10399 - protein, 7 aa, Artificial Sequence
  source: /note="Description of Artificial Sequence: Synthetic peptide"
SNIGGGY

SEQ ID NO: 10400 - protein, 7 aa, Artificial Sequence
  source: /note="Description of Artificial Sequence: Synthetic peptide"
SNILQAT

SEQ ID NO: 10401 - protein, 7 aa, Artificial Sequence
  source: /note="Description of Artificial Sequence: Synthetic peptide"
SNKAAYA

SEQ ID NO: 10402 - protein, 7 aa, Artificial Sequence
  source: /note="Description of Artificial Sequence: Synthetic peptide"
SNKFVTA

SEQ ID NO: 10403 - protein, 7 aa, Artificial Sequence
  source: /note="Description of Artificial Sequence: Synthetic peptide"
SNKGLTG

SEQ ID NO: 10404 - protein, 7 aa, Artificial Sequence
  source: /note="Description of Artificial Sequence: Synthetic peptide"
SNKGPVT

SEQ ID NO: 10405 - protein, 7 aa, Artificial Sequence
  source: /note="Description of Artificial Sequence: Synthetic peptide"
SNKYNEV

SEQ ID NO: 10406 - protein, 7 aa, Artificial Sequence
  source: /note="Description of Artificial Sequence: Synthetic peptide"
SNLETSR

SEQ ID NO: 10407 - protein, 7 aa, Artificial Sequence
  source: /note="Description of Artificial Sequence: Synthetic peptide"
SNLGFPA

SEQ ID NO: 10408 - protein, 7 aa, Artificial Sequence
  source: /note="Description of Artificial Sequence: Synthetic peptide"
SNLGISA

SEQ ID NO: 10409 - protein, 7 aa, Artificial Sequence
  source: /note="Description of Artificial Sequence: Synthetic peptide"
SNLLHAS

SEQ ID NO: 10410 - protein, 7 aa, Artificial Sequence
  source: /note="Description of Artificial Sequence: Synthetic peptide"
SNLSPEQ

SEQ ID NO: 10411 - protein, 7 aa, Artificial Sequence
  source: /note="Description of Artificial Sequence: Synthetic peptide"
SNLTMSN

SEQ ID NO: 10412 - protein, 7 aa, Artificial Sequence
  source: /note="Description of Artificial Sequence: Synthetic peptide"
SNMDTSK

SEQ ID NO: 10413 - protein, 7 aa, Artificial Sequence
  source: /note="Description of Artificial Sequence: Synthetic peptide"
SNMMLSE

SEQ ID NO: 10414 - protein, 7 aa, Artificial Sequence
  source: /note="Description of Artificial Sequence: Synthetic peptide"
SNMSVSG

SEQ ID NO: 10415 - protein, 7 aa, Artificial Sequence
  source: /note="Description of Artificial Sequence: Synthetic peptide"
SNMVPMS

SEQ ID NO: 10416 - protein, 7 aa, Artificial Sequence
  source: /note="Description of Artificial Sequence: Synthetic peptide"
SNNGEHV

SEQ ID NO: 10417 - protein, 7 aa, Artificial Sequence
  source: /note="Description of Artificial Sequence: Synthetic peptide"
SNNQRVV

SEQ ID NO: 10418 - protein, 7 aa, Artificial Sequence
  source: /note="Description of Artificial Sequence: Synthetic peptide"
SNPALSR

SEQ ID NO: 10419 - protein, 7 aa, Artificial Sequence
  source: /note="Description of Artificial Sequence: Synthetic peptide"
SNPASYV

SEQ ID NO: 10420 - protein, 7 aa, Artificial Sequence
  source: /note="Description of Artificial Sequence: Synthetic peptide"
SNPLRTL

SEQ ID NO: 10421 - protein, 7 aa, Artificial Sequence
  source: /note="Description of Artificial Sequence: Synthetic peptide"
SNPMTLT

SEQ ID NO: 10422 - protein, 7 aa, Artificial Sequence
  source: /note="Description of Artificial Sequence: Synthetic peptide"
SNPPPLS

SEQ ID NO: 10423 - protein, 7 aa, Artificial Sequence
  source: /note="Description of Artificial Sequence: Synthetic peptide"
SNPPVQK

SEQ ID NO: 10424 - protein, 7 aa, Artificial Sequence
  source: /note="Description of Artificial Sequence: Synthetic peptide"
SNPSAAP

SEQ ID NO: 10425 - protein, 7 aa, Artificial Sequence
  source: /note="Description of Artificial Sequence: Synthetic peptide"
SNQQGMA

SEQ ID NO: 10426 - protein, 7 aa, Artificial Sequence
  source: /note="Description of Artificial Sequence: Synthetic peptide"
SNQSPPP

SEQ ID NO: 10427 - protein, 7 aa, Artificial Sequence
  source: /note="Description of Artificial Sequence: Synthetic peptide"
SNSGRAP

SEQ ID NO: 10428 - protein, 7 aa, Artificial Sequence
  source: /note="Description of Artificial Sequence: Synthetic peptide"
SNSHSPE

SEQ ID NO: 10429 - protein, 7 aa, Artificial Sequence
  source: /note="Description of Artificial Sequence: Synthetic peptide"
SNSISAA

SEQ ID NO: 10430 - protein, 7 aa, Artificial Sequence
  source: /note="Description of Artificial Sequence: Synthetic peptide"
SNSLPVM

SEQ ID NO: 10431 - protein, 7 aa, Artificial Sequence
  source: /note="Description of Artificial Sequence: Synthetic peptide"
SNSPRGY

SEQ ID NO: 10432 - protein, 7 aa, Artificial Sequence
  source: /note="Description of Artificial Sequence: Synthetic peptide"
SNSQPNV

SEQ ID NO: 10433 - protein, 7 aa, Artificial Sequence
  source: /note="Description of Artificial Sequence: Synthetic peptide"
SNSRVAG

SEQ ID NO: 10434 - protein, 7 aa, Artificial Sequence
  source: /note="Description of Artificial Sequence: Synthetic peptide"
SNSSAVH

SEQ ID NO: 10435 - protein, 7 aa, Artificial Sequence
  source: /note="Description of Artificial Sequence: Synthetic peptide"
SNSTIIY

SEQ ID NO: 10436 - protein, 7 aa, Artificial Sequence
  source: /note="Description of Artificial Sequence: Synthetic peptide"
SNSYMML

SEQ ID NO: 10437 - protein, 7 aa, Artificial Sequence
  source: /note="Description of Artificial Sequence: Synthetic peptide"
SNTLSQL

SEQ ID NO: 10438 - protein, 7 aa, Artificial Sequence
  source: /note="Description of Artificial Sequence: Synthetic peptide"
SNTNLSE

SEQ ID NO: 10439 - protein, 7 aa, Artificial Sequence
  source: /note="Description of Artificial Sequence: Synthetic peptide"
SNTTAAV

SEQ ID NO: 10440 - protein, 7 aa, Artificial Sequence
  source: /note="Description of Artificial Sequence: Synthetic peptide"
SNVAIVQ

SEQ ID NO: 10441 - protein, 7 aa, Artificial Sequence
  source: /note="Description of Artificial Sequence: Synthetic peptide"
SNVEIME

SEQ ID NO: 10442 - protein, 7 aa, Artificial Sequence
  source: /note="Description of Artificial Sequence: Synthetic peptide"
SNVGTHF

SEQ ID NO: 10443 - protein, 7 aa, Artificial Sequence
  source: /note="Description of Artificial Sequence: Synthetic peptide"
SNVHSLH

SEQ ID NO: 10444 - protein, 7 aa, Artificial Sequence
  source: /note="Description of Artificial Sequence: Synthetic peptide"
SNVNGAD

SEQ ID NO: 10445 - protein, 7 aa, Artificial Sequence
  source: /note="Description of Artificial Sequence: Synthetic peptide"
SNVREVA

SEQ ID NO: 10446 - protein, 7 aa, Artificial Sequence
  source: /note="Description of Artificial Sequence: Synthetic peptide"
SNVSPRP

SEQ ID NO: 10447 - protein, 7 aa, Artificial Sequence
  source: /note="Description of Artificial Sequence: Synthetic peptide"
SNVVVLH

SEQ ID NO: 10448 - protein, 7 aa, Artificial Sequence
  source: /note="Description of Artificial Sequence: Synthetic peptide"
SNYSLNH

SEQ ID NO: 10449 - protein, 7 aa, Artificial Sequence
  source: /note="Description of Artificial Sequence: Synthetic peptide"
SPAAEIK

SEQ ID NO: 10450 - protein, 7 aa, Artificial Sequence
  source: /note="Description of Artificial Sequence: Synthetic peptide"
SPALNRS

SEQ ID NO: 10451 - protein, 7 aa, Artificial Sequence
  source: /note="Description of Artificial Sequence: Synthetic peptide"
SPANQYD

SEQ ID NO: 10452 - protein, 7 aa, Artificial Sequence
  source: /note="Description of Artificial Sequence: Synthetic peptide"
SPAPYAL

SEQ ID NO: 10453 - protein, 7 aa, Artificial Sequence
  source: /note="Description of Artificial Sequence: Synthetic peptide"
SPAQSDD

SEQ ID NO: 10454 - protein, 7 aa, Artificial Sequence
  source: /note="Description of Artificial Sequence: Synthetic peptide"
SPARAGY

SEQ ID NO: 10455 - protein, 7 aa, Artificial Sequence
  source: /note="Description of Artificial Sequence: Synthetic peptide"
SPARNLI

SEQ ID NO: 10456 - protein, 7 aa, Artificial Sequence
  source: /note="Description of Artificial Sequence: Synthetic peptide"
SPASHHR

SEQ ID NO: 10457 - protein, 7 aa, Artificial Sequence
  source: /note="Description of Artificial Sequence: Synthetic peptide"
SPAVGCH

SEQ ID NO: 10458 - protein, 7 aa, Artificial Sequence
  source: /note="Description of Artificial Sequence: Synthetic peptide"
SPCPGDA

SEQ ID NO: 10459 - protein, 7 aa, Artificial Sequence
  source: /note="Description of Artificial Sequence: Synthetic peptide"
SPDLPGL

SEQ ID NO: 10460 - protein, 7 aa, Artificial Sequence
  source: /note="Description of Artificial Sequence: Synthetic peptide"
SPDLRTP

SEQ ID NO: 10461 - protein, 7 aa, Artificial Sequence
  source: /note="Description of Artificial Sequence: Synthetic peptide"
SPDRAQL

SEQ ID NO: 10462 - protein, 7 aa, Artificial Sequence
  source: /note="Description of Artificial Sequence: Synthetic peptide"
SPDSNGP

SEQ ID NO: 10463 - protein, 7 aa, Artificial Sequence
  source: /note="Description of Artificial Sequence: Synthetic peptide"
SPDVVVS

SEQ ID NO: 10464 - protein, 7 aa, Artificial Sequence
  source: /note="Description of Artificial Sequence: Synthetic peptide"
SPEFGTG

SEQ ID NO: 10465 - protein, 7 aa, Artificial Sequence
  source: /note="Description of Artificial Sequence: Synthetic peptide"
SPELPKA

SEQ ID NO: 10466 - protein, 7 aa, Artificial Sequence
  source: /note="Description of Artificial Sequence: Synthetic peptide"
SPESRMP

SEQ ID NO: 10467 - protein, 7 aa, Artificial Sequence
  source: /note="Description of Artificial Sequence: Synthetic peptide"
SPFDANV

SEQ ID NO: 10468 - protein, 7 aa, Artificial Sequence
  source: /note="Description of Artificial Sequence: Synthetic peptide"
SPFPPQL

SEQ ID NO: 10469 - protein, 7 aa, Artificial Sequence
  source: /note="Description of Artificial Sequence: Synthetic peptide"
SPFRDQE

SEQ ID NO: 10470 - protein, 7 aa, Artificial Sequence
  source: /note="Description of Artificial Sequence: Synthetic peptide"
SPFTMRP

SEQ ID NO: 10471 - protein, 7 aa, Artificial Sequence
  source: /note="Description of Artificial Sequence: Synthetic peptide"
SPGDPAE

SEQ ID NO: 10472 - protein, 7 aa, Artificial Sequence
  source: /note="Description of Artificial Sequence: Synthetic peptide"
SPGGHVS

SEQ ID NO: 10473 - protein, 7 aa, Artificial Sequence
  source: /note="Description of Artificial Sequence: Synthetic peptide"
SPGHPPS

SEQ ID NO: 10474 - protein, 7 aa, Artificial Sequence
  source: /note="Description of Artificial Sequence: Synthetic peptide"
SPGIRDF

SEQ ID NO: 10475 - protein, 7 aa, Artificial Sequence
  source: /note="Description of Artificial Sequence: Synthetic peptide"
SPGISRL

SEQ ID NO: 10476 - protein, 7 aa, Artificial Sequence
  source: /note="Description of Artificial Sequence: Synthetic peptide"
SPGPHKS

SEQ ID NO: 10477 - protein, 7 aa, Artificial Sequence
  source: /note="Description of Artificial Sequence: Synthetic peptide"
SPGSGKS

SEQ ID NO: 10478 - protein, 7 aa, Artificial Sequence
  source: /note="Description of Artificial Sequence: Synthetic peptide"
SPGSPMS

SEQ ID NO: 10479 - protein, 7 aa, Artificial Sequence
  source: /note="Description of Artificial Sequence: Synthetic peptide"
SPGTLPT

SEQ ID NO: 10480 - protein, 7 aa, Artificial Sequence
  source: /note="Description of Artificial Sequence: Synthetic peptide"
SPGVMPG

SEQ ID NO: 10481 - protein, 7 aa, Artificial Sequence
  source: /note="Description of Artificial Sequence: Synthetic peptide"
SPHDETS

SEQ ID NO: 10482 - protein, 7 aa, Artificial Sequence
  source: /note="Description of Artificial Sequence: Synthetic peptide"
SPHDSPL

SEQ ID NO: 10483 - protein, 7 aa, Artificial Sequence
  source: /note="Description of Artificial Sequence: Synthetic peptide"
SPHITHM

SEQ ID NO: 10484 - protein, 7 aa, Artificial Sequence
  source: /note="Description of Artificial Sequence: Synthetic peptide"
SPHKNAH

SEQ ID NO: 10485 - protein, 7 aa, Artificial Sequence
  source: /note="Description of Artificial Sequence: Synthetic peptide"
SPHLRGA

SEQ ID NO: 10486 - protein, 7 aa, Artificial Sequence
  source: /note="Description of Artificial Sequence: Synthetic peptide"
SPHPENH

SEQ ID NO: 10487 - protein, 7 aa, Artificial Sequence
  source: /note="Description of Artificial Sequence: Synthetic peptide"
SPIERRT

SEQ ID NO: 10488 - protein, 7 aa, Artificial Sequence
  source: /note="Description of Artificial Sequence: Synthetic peptide"
SPIQTNS

SEQ ID NO: 10489 - protein, 7 aa, Artificial Sequence
  source: /note="Description of Artificial Sequence: Synthetic peptide"
SPIQTQG

SEQ ID NO: 10490 - protein, 7 aa, Artificial Sequence
  source: /note="Description of Artificial Sequence: Synthetic peptide"
SPISIKN

SEQ ID NO: 10491 - protein, 7 aa, Artificial Sequence
  source: /note="Description of Artificial Sequence: Synthetic peptide"
SPITPGR

SEQ ID NO: 10492 - protein, 7 aa, Artificial Sequence
  source: /note="Description of Artificial Sequence: Synthetic peptide"
SPITYNT

SEQ ID NO: 10493 - protein, 7 aa, Artificial Sequence
  source: /note="Description of Artificial Sequence: Synthetic peptide"
SPKIPTH

SEQ ID NO: 10494 - protein, 7 aa, Artificial Sequence
  source: /note="Description of Artificial Sequence: Synthetic peptide"
SPKIPWT

SEQ ID NO: 10495 - protein, 7 aa, Artificial Sequence
  source: /note="Description of Artificial Sequence: Synthetic peptide"
SPKMLRS

SEQ ID NO: 10496 - protein, 7 aa, Artificial Sequence
  source: /note="Description of Artificial Sequence: Synthetic peptide"
SPKVAGV

SEQ ID NO: 10497 - protein, 7 aa, Artificial Sequence
  source: /note="Description of Artificial Sequence: Synthetic peptide"
SPLAEAR

SEQ ID NO: 10498 - protein, 7 aa, Artificial Sequence
  source: /note="Description of Artificial Sequence: Synthetic peptide"
SPLATRV

SEQ ID NO: 10499 - protein, 7 aa, Artificial Sequence
  source: /note="Description of Artificial Sequence: Synthetic peptide"
SPLIVNT

SEQ ID NO: 10500 - protein, 7 aa, Artificial Sequence
  source: /note="Description of Artificial Sequence: Synthetic peptide"
SPLLLAS

SEQ ID NO: 10501 - protein, 7 aa, Artificial Sequence
  source: /note="Description of Artificial Sequence: Synthetic peptide"
SPLPPSN

SEQ ID NO: 10502 - protein, 7 aa, Artificial Sequence
  source: /note="Description of Artificial Sequence: Synthetic peptide"
SPLRERV

SEQ ID NO: 10503 - protein, 7 aa, Artificial Sequence
  source: /note="Description of Artificial Sequence: Synthetic peptide"
SPLRSDV

SEQ ID NO: 10504 - protein, 7 aa, Artificial Sequence
  source: /note="Description of Artificial Sequence: Synthetic peptide"
SPLTDLS

SEQ ID NO: 10505 - protein, 7 aa, Artificial Sequence
  source: /note="Description of Artificial Sequence: Synthetic peptide"
SPLTDSY

SEQ ID NO: 10506 - protein, 7 aa, Artificial Sequence
  source: /note="Description of Artificial Sequence: Synthetic peptide"
SPLTTVP

SEQ ID NO: 10507 - protein, 7 aa, Artificial Sequence
  source: /note="Description of Artificial Sequence: Synthetic peptide"
SPLVSTA

SEQ ID NO: 10508 - protein, 7 aa, Artificial Sequence
  source: /note="Description of Artificial Sequence: Synthetic peptide"
SPMKAGT

SEQ ID NO: 10509 - protein, 7 aa, Artificial Sequence
  source: /note="Description of Artificial Sequence: Synthetic peptide"
SPMRIEP

SEQ ID NO: 10510 - protein, 7 aa, Artificial Sequence
  source: /note="Description of Artificial Sequence: Synthetic peptide"
SPMRPQE

SEQ ID NO: 10511 - protein, 7 aa, Artificial Sequence
  source: /note="Description of Artificial Sequence: Synthetic peptide"
SPNALLD

SEQ ID NO: 10512 - protein, 7 aa, Artificial Sequence
  source: /note="Description of Artificial Sequence: Synthetic peptide"
SPNATTD

SEQ ID NO: 10513 - protein, 7 aa, Artificial Sequence
  source: /note="Description of Artificial Sequence: Synthetic peptide"
SPNMDRL

SEQ ID NO: 10514 - protein, 7 aa, Artificial Sequence
  source: /note="Description of Artificial Sequence: Synthetic peptide"
SPNMGQF

SEQ ID NO: 10515 - protein, 7 aa, Artificial Sequence
  source: /note="Description of Artificial Sequence: Synthetic peptide"
SPNRESM

SEQ ID NO: 10516 - protein, 7 aa, Artificial Sequence
  source: /note="Description of Artificial Sequence: Synthetic peptide"
SPNTPTF

SEQ ID NO: 10517 - protein, 7 aa, Artificial Sequence
  source: /note="Description of Artificial Sequence: Synthetic peptide"
SPNTRTA

SEQ ID NO: 10518 - protein, 7 aa, Artificial Sequence
  source: /note="Description of Artificial Sequence: Synthetic peptide"
SPPNFPE

SEQ ID NO: 10519 - protein, 7 aa, Artificial Sequence
  source: /note="Description of Artificial Sequence: Synthetic peptide"
SPPQANA

SEQ ID NO: 10520 - protein, 7 aa, Artificial Sequence
  source: /note="Description of Artificial Sequence: Synthetic peptide"
SPPQVTK

SEQ ID NO: 10521 - protein, 7 aa, Artificial Sequence
  source: /note="Description of Artificial Sequence: Synthetic peptide"
SPPRNME

SEQ ID NO: 10522 - protein, 7 aa, Artificial Sequence
  source: /note="Description of Artificial Sequence: Synthetic peptide"
SPPRVGL

SEQ ID NO: 10523 - protein, 7 aa, Artificial Sequence
  source: /note="Description of Artificial Sequence: Synthetic peptide"
SPPTARD

SEQ ID NO: 10524 - protein, 7 aa, Artificial Sequence
  source: /note="Description of Artificial Sequence: Synthetic peptide"
SPPVSFE

SEQ ID NO: 10525 - protein, 7 aa, Artificial Sequence
  source: /note="Description of Artificial Sequence: Synthetic peptide"
SPQGNGA

SEQ ID NO: 10526 - protein, 7 aa, Artificial Sequence
  source: /note="Description of Artificial Sequence: Synthetic peptide"
SPQGTYV

SEQ ID NO: 10527 - protein, 7 aa, Artificial Sequence
  source: /note="Description of Artificial Sequence: Synthetic peptide"
SPQITRP

SEQ ID NO: 10528 - protein, 7 aa, Artificial Sequence
  source: /note="Description of Artificial Sequence: Synthetic peptide"
SPQRIED

SEQ ID NO: 10529 - protein, 7 aa, Artificial Sequence
  source: /note="Description of Artificial Sequence: Synthetic peptide"
SPQRPMN

SEQ ID NO: 10530 - protein, 7 aa, Artificial Sequence
  source: /note="Description of Artificial Sequence: Synthetic peptide"
SPRARID

SEQ ID NO: 10531 - protein, 7 aa, Artificial Sequence
  source: /note="Description of Artificial Sequence: Synthetic peptide"
SPRDPEI

SEQ ID NO: 10532 - protein, 7 aa, Artificial Sequence
  source: /note="Description of Artificial Sequence: Synthetic peptide"
SPRECGL

SEQ ID NO: 10533 - protein, 7 aa, Artificial Sequence
  source: /note="Description of Artificial Sequence: Synthetic peptide"
SPRGMGL

SEQ ID NO: 10534 - protein, 7 aa, Artificial Sequence
  source: /note="Description of Artificial Sequence: Synthetic peptide"
SPRGMPL

SEQ ID NO: 10535 - protein, 7 aa, Artificial Sequence
  source: /note="Description of Artificial Sequence: Synthetic peptide"
SPRHNLG

SEQ ID NO: 10536 - protein, 7 aa, Artificial Sequence
  source: /note="Description of Artificial Sequence: Synthetic peptide"
SPRIRDD

SEQ ID NO: 10537 - protein, 7 aa, Artificial Sequence
  source: /note="Description of Artificial Sequence: Synthetic peptide"
SPRPSYA

SEQ ID NO: 10538 - protein, 7 aa, Artificial Sequence
  source: /note="Description of Artificial Sequence: Synthetic peptide"
SPRQLSV

SEQ ID NO: 10539 - protein, 7 aa, Artificial Sequence
  source: /note="Description of Artificial Sequence: Synthetic peptide"
SPRQNIP

SEQ ID NO: 10540 - protein, 7 aa, Artificial Sequence
  source: /note="Description of Artificial Sequence: Synthetic peptide"
SPRQSIS

SEQ ID NO: 10541 - protein, 7 aa, Artificial Sequence
  source: /note="Description of Artificial Sequence: Synthetic peptide"
SPRTALP

SEQ ID NO: 10542 - protein, 7 aa, Artificial Sequence
  source: /note="Description of Artificial Sequence: Synthetic peptide"
SPRTGLG

SEQ ID NO: 10543 - protein, 7 aa, Artificial Sequence
  source: /note="Description of Artificial Sequence: Synthetic peptide"
SPRWHED

SEQ ID NO: 10544 - protein, 7 aa, Artificial Sequence
  source: /note="Description of Artificial Sequence: Synthetic peptide"
SPSALLH

SEQ ID NO: 10545 - protein, 7 aa, Artificial Sequence
  source: /note="Description of Artificial Sequence: Synthetic peptide"
SPSAMGI

SEQ ID NO: 10546 - protein, 7 aa, Artificial Sequence
  source: /note="Description of Artificial Sequence: Synthetic peptide"
SPSGNNG

SEQ ID NO: 10547 - protein, 7 aa, Artificial Sequence
  source: /note="Description of Artificial Sequence: Synthetic peptide"
SPSGPVR

SEQ ID NO: 10548 - protein, 7 aa, Artificial Sequence
  source: /note="Description of Artificial Sequence: Synthetic peptide"
SPSGSLA

SEQ ID NO: 10549 - protein, 7 aa, Artificial Sequence
  source: /note="Description of Artificial Sequence: Synthetic peptide"
SPSGVAG

SEQ ID NO: 10550 - protein, 7 aa, Artificial Sequence
  source: /note="Description of Artificial Sequence: Synthetic peptide"
SPSLSRS

SEQ ID NO: 10551 - protein, 7 aa, Artificial Sequence
  source: /note="Description of Artificial Sequence: Synthetic peptide"
SPSLTAG

SEQ ID NO: 10552 - protein, 7 aa, Artificial Sequence
  source: /note="Description of Artificial Sequence: Synthetic peptide"
SPSLTSD

SEQ ID NO: 10553 - protein, 7 aa, Artificial Sequence
  source: /note="Description of Artificial Sequence: Synthetic peptide"
SPSMPAR

SEQ ID NO: 10554 - protein, 7 aa, Artificial Sequence
  source: /note="Description of Artificial Sequence: Synthetic peptide"
SPSRHEI

SEQ ID NO: 10555 - protein, 7 aa, Artificial Sequence
  source: /note="Description of Artificial Sequence: Synthetic peptide"
SPSRMNS

SEQ ID NO: 10556 - protein, 7 aa, Artificial Sequence
  source: /note="Description of Artificial Sequence: Synthetic peptide"
SPSRPST

SEQ ID NO: 10557 - protein, 7 aa, Artificial Sequence
  source: /note="Description of Artificial Sequence: Synthetic peptide"
SPSRTSL

SEQ ID NO: 10558 - protein, 7 aa, Artificial Sequence
  source: /note="Description of Artificial Sequence: Synthetic peptide"
SPSSLKE

SEQ ID NO: 10559 - protein, 7 aa, Artificial Sequence
  source: /note="Description of Artificial Sequence: Synthetic peptide"
SPSTGKL

SEQ ID NO: 10560 - protein, 7 aa, Artificial Sequence
  source: /note="Description of Artificial Sequence: Synthetic peptide"
SPSTLPP

SEQ ID NO: 10561 - protein, 7 aa, Artificial Sequence
  source: /note="Description of Artificial Sequence: Synthetic peptide"
SPSTNNT

SEQ ID NO: 10562 - protein, 7 aa, Artificial Sequence
  source: /note="Description of Artificial Sequence: Synthetic peptide"
SPSTRMG

SEQ ID NO: 10563 - protein, 7 aa, Artificial Sequence
  source: /note="Description of Artificial Sequence: Synthetic peptide"
SPSVAYH

SEQ ID NO: 10564 - protein, 7 aa, Artificial Sequence
  source: /note="Description of Artificial Sequence: Synthetic peptide"
SPSVELF

SEQ ID NO: 10565 - protein, 7 aa, Artificial Sequence
  source: /note="Description of Artificial Sequence: Synthetic peptide"
SPTAKMW

SEQ ID NO: 10566 - protein, 7 aa, Artificial Sequence
  source: /note="Description of Artificial Sequence: Synthetic peptide"
SPTCVAC

SEQ ID NO: 10567 - protein, 7 aa, Artificial Sequence
  source: /note="Description of Artificial Sequence: Synthetic peptide"
SPTDFMN

SEQ ID NO: 10568 - protein, 7 aa, Artificial Sequence
  source: /note="Description of Artificial Sequence: Synthetic peptide"
SPTFVGT

SEQ ID NO: 10569 - protein, 7 aa, Artificial Sequence
  source: /note="Description of Artificial Sequence: Synthetic peptide"
SPTGVQP

SEQ ID NO: 10570 - protein, 7 aa, Artificial Sequence
  source: /note="Description of Artificial Sequence: Synthetic peptide"
SPTITAR

SEQ ID NO: 10571 - protein, 7 aa, Artificial Sequence
  source: /note="Description of Artificial Sequence: Synthetic peptide"
SPTLSPG

SEQ ID NO: 10572 - protein, 7 aa, Artificial Sequence
  source: /note="Description of Artificial Sequence: Synthetic peptide"
SPTRNIV

SEQ ID NO: 10573 - protein, 7 aa, Artificial Sequence
  source: /note="Description of Artificial Sequence: Synthetic peptide"
SPTSSVT

SEQ ID NO: 10574 - protein, 7 aa, Artificial Sequence
  source: /note="Description of Artificial Sequence: Synthetic peptide"
SPTTQRT

SEQ ID NO: 10575 - protein, 7 aa, Artificial Sequence
  source: /note="Description of Artificial Sequence: Synthetic peptide"
SPTVNPI

SEQ ID NO: 10576 - protein, 7 aa, Artificial Sequence
  source: /note="Description of Artificial Sequence: Synthetic peptide"
SPTVVLA

SEQ ID NO: 10577 - protein, 7 aa, Artificial Sequence
  source: /note="Description of Artificial Sequence: Synthetic peptide"
SPTYTID

SEQ ID NO: 10578 - protein, 7 aa, Artificial Sequence
  source: /note="Description of Artificial Sequence: Synthetic peptide"
SPVARNN

SEQ ID NO: 10579 - protein, 7 aa, Artificial Sequence
  source: /note="Description of Artificial Sequence: Synthetic peptide"
SPVGGKD

SEQ ID NO: 10580 - protein, 7 aa, Artificial Sequence
  source: /note="Description of Artificial Sequence: Synthetic peptide"
SPVGSSG

SEQ ID NO: 10581 - protein, 7 aa, Artificial Sequence
  source: /note="Description of Artificial Sequence: Synthetic peptide"
SPVMLQS

SEQ ID NO: 10582 - protein, 7 aa, Artificial Sequence
  source: /note="Description of Artificial Sequence: Synthetic peptide"
SPVRHPS

SEQ ID NO: 10583 - protein, 7 aa, Artificial Sequence
  source: /note="Description of Artificial Sequence: Synthetic peptide"
SPVSDNP

SEQ ID NO: 10584 - protein, 7 aa, Artificial Sequence
  source: /note="Description of Artificial Sequence: Synthetic peptide"
SPVVAQP

SEQ ID NO: 10585 - protein, 7 aa, Artificial Sequence
  source: /note="Description of Artificial Sequence: Synthetic peptide"
SPVVPRA

SEQ ID NO: 10586 - protein, 7 aa, Artificial Sequence
  source: /note="Description of Artificial Sequence: Synthetic peptide"
SPYGHQN

SEQ ID NO: 10587 - protein, 7 aa, Artificial Sequence
  source: /note="Description of Artificial Sequence: Synthetic peptide"
SPYKQNS

SEQ ID NO: 10588 - protein, 7 aa, Artificial Sequence
  source: /note="Description of Artificial Sequence: Synthetic peptide"
SPYNITS

SEQ ID NO: 10589 - protein, 7 aa, Artificial Sequence
  source: /note="Description of Artificial Sequence: Synthetic peptide"
SPYPALL

SEQ ID NO: 10590 - protein, 7 aa, Artificial Sequence
  source: /note="Description of Artificial Sequence: Synthetic peptide"
SQAGAIP

SEQ ID NO: 10591 - protein, 7 aa, Artificial Sequence
  source: /note="Description of Artificial Sequence: Synthetic peptide"
SQAMQTL

SEQ ID NO: 10592 - protein, 7 aa, Artificial Sequence
  source: /note="Description of Artificial Sequence: Synthetic peptide"
SQAPRDP

SEQ ID NO: 10593 - protein, 7 aa, Artificial Sequence
  source: /note="Description of Artificial Sequence: Synthetic peptide"
SQATGRS

SEQ ID NO: 10594 - protein, 7 aa, Artificial Sequence
  source: /note="Description of Artificial Sequence: Synthetic peptide"
SQATQHN

SEQ ID NO: 10595 - protein, 7 aa, Artificial Sequence
  source: /note="Description of Artificial Sequence: Synthetic peptide"
SQAVPPS

SEQ ID NO: 10596 - protein, 7 aa, Artificial Sequence
  source: /note="Description of Artificial Sequence: Synthetic peptide"
SQDMYRG

SEQ ID NO: 10597 - protein, 7 aa, Artificial Sequence
  source: /note="Description of Artificial Sequence: Synthetic peptide"
SQDNVQE

SEQ ID NO: 10598 - protein, 7 aa, Artificial Sequence
  source: /note="Description of Artificial Sequence: Synthetic peptide"
SQDWNLT

SEQ ID NO: 10599 - protein, 7 aa, Artificial Sequence
  source: /note="Description of Artificial Sequence: Synthetic peptide"
SQELPGS

SEQ ID NO: 10600 - protein, 7 aa, Artificial Sequence
  source: /note="Description of Artificial Sequence: Synthetic peptide"
SQESYMD

SEQ ID NO: 10601 - protein, 7 aa, Artificial Sequence
  source: /note="Description of Artificial Sequence: Synthetic peptide"
SQFEARP

SEQ ID NO: 10602 - protein, 7 aa, Artificial Sequence
  source: /note="Description of Artificial Sequence: Synthetic peptide"
SQFKPTF

SEQ ID NO: 10603 - protein, 7 aa, Artificial Sequence
  source: /note="Description of Artificial Sequence: Synthetic peptide"
SQFLADI

SEQ ID NO: 10604 - protein, 7 aa, Artificial Sequence
  source: /note="Description of Artificial Sequence: Synthetic peptide"
SQGARND

SEQ ID NO: 10605 - protein, 7 aa, Artificial Sequence
  source: /note="Description of Artificial Sequence: Synthetic peptide"
SQGFNSS

SEQ ID NO: 10606 - protein, 7 aa, Artificial Sequence
  source: /note="Description of Artificial Sequence: Synthetic peptide"
SQGHALP

SEQ ID NO: 10607 - protein, 7 aa, Artificial Sequence
  source: /note="Description of Artificial Sequence: Synthetic peptide"
SQGSVQG

SEQ ID NO: 10608 - protein, 7 aa, Artificial Sequence
  source: /note="Description of Artificial Sequence: Synthetic peptide"
SQGVRVG

SEQ ID NO: 10609 - protein, 7 aa, Artificial Sequence
  source: /note="Description of Artificial Sequence: Synthetic peptide"
SQHLSVN

SEQ ID NO: 10610 - protein, 7 aa, Artificial Sequence
  source: /note="Description of Artificial Sequence: Synthetic peptide"
SQHPIRE

SEQ ID NO: 10611 - protein, 7 aa, Artificial Sequence
  source: /note="Description of Artificial Sequence: Synthetic peptide"
SQHPPGD

SEQ ID NO: 10612 - protein, 7 aa, Artificial Sequence
  source: /note="Description of Artificial Sequence: Synthetic peptide"
SQHRDHP

SEQ ID NO: 10613 - protein, 7 aa, Artificial Sequence
  source: /note="Description of Artificial Sequence: Synthetic peptide"
SQHVASP

SEQ ID NO: 10614 - protein, 7 aa, Artificial Sequence
  source: /note="Description of Artificial Sequence: Synthetic peptide"
SQISCGL

SEQ ID NO: 10615 - protein, 7 aa, Artificial Sequence
  source: /note="Description of Artificial Sequence: Synthetic peptide"
SQKPMVA

SEQ ID NO: 10616 - protein, 7 aa, Artificial Sequence
  source: /note="Description of Artificial Sequence: Synthetic peptide"
SQKSHGN

SEQ ID NO: 10617 - protein, 7 aa, Artificial Sequence
  source: /note="Description of Artificial Sequence: Synthetic peptide"
SQLDING

SEQ ID NO: 10618 - protein, 7 aa, Artificial Sequence
  source: /note="Description of Artificial Sequence: Synthetic peptide"
SQMDDTL

SEQ ID NO: 10619 - protein, 7 aa, Artificial Sequence
  source: /note="Description of Artificial Sequence: Synthetic peptide"
SQMLPAP

SEQ ID NO: 10620 - protein, 7 aa, Artificial Sequence
  source: /note="Description of Artificial Sequence: Synthetic peptide"
SQMLTGP

SEQ ID NO: 10621 - protein, 7 aa, Artificial Sequence
  source: /note="Description of Artificial Sequence: Synthetic peptide"
SQMREPV

SEQ ID NO: 10622 - protein, 7 aa, Artificial Sequence
  source: /note="Description of Artificial Sequence: Synthetic peptide"
SQNLVIS

SEQ ID NO: 10623 - protein, 7 aa, Artificial Sequence
  source: /note="Description of Artificial Sequence: Synthetic peptide"
SQNSLSE

SEQ ID NO: 10624 - protein, 7 aa, Artificial Sequence
  source: /note="Description of Artificial Sequence: Synthetic peptide"
SQNTGQN

SEQ ID NO: 10625 - protein, 7 aa, Artificial Sequence
  source: /note="Description of Artificial Sequence: Synthetic peptide"
SQPHFAS

SEQ ID NO: 10626 - protein, 7 aa, Artificial Sequence
  source: /note="Description of Artificial Sequence: Synthetic peptide"
SQPMARM

SEQ ID NO: 10627 - protein, 7 aa, Artificial Sequence
  source: /note="Description of Artificial Sequence: Synthetic peptide"
SQPMPPA

SEQ ID NO: 10628 - protein, 7 aa, Artificial Sequence
  source: /note="Description of Artificial Sequence: Synthetic peptide"
SQPNPAV

SEQ ID NO: 10629 - protein, 7 aa, Artificial Sequence
  source: /note="Description of Artificial Sequence: Synthetic peptide"
SQPTTAR

SEQ ID NO: 10630 - protein, 7 aa, Artificial Sequence
  source: /note="Description of Artificial Sequence: Synthetic peptide"
SQPVTAG

SEQ ID NO: 10631 - protein, 7 aa, Artificial Sequence
  source: /note="Description of Artificial Sequence: Synthetic peptide"
SQQDPIL

SEQ ID NO: 10632 - protein, 7 aa, Artificial Sequence
  source: /note="Description of Artificial Sequence: Synthetic peptide"
SQRAPIP

SEQ ID NO: 10633 - protein, 7 aa, Artificial Sequence
  source: /note="Description of Artificial Sequence: Synthetic peptide"
SQRATAL

SEQ ID NO: 10634 - protein, 7 aa, Artificial Sequence
  source: /note="Description of Artificial Sequence: Synthetic peptide"
SQRILDT

SEQ ID NO: 10635 - protein, 7 aa, Artificial Sequence
  source: /note="Description of Artificial Sequence: Synthetic peptide"
SQRSGRE

SEQ ID NO: 10636 - protein, 7 aa, Artificial Sequence
  source: /note="Description of Artificial Sequence: Synthetic peptide"
SQRSTLT

SEQ ID NO: 10637 - protein, 7 aa, Artificial Sequence
  source: /note="Description of Artificial Sequence: Synthetic peptide"
SQRVASE

SEQ ID NO: 10638 - protein, 7 aa, Artificial Sequence
  source: /note="Description of Artificial Sequence: Synthetic peptide"
SQRVSQS

SEQ ID NO: 10639 - protein, 7 aa, Artificial Sequence
  source: /note="Description of Artificial Sequence: Synthetic peptide"
SQSFSVD

SEQ ID NO: 10640 - protein, 7 aa, Artificial Sequence
  source: /note="Description of Artificial Sequence: Synthetic peptide"
SQSGSSN

SEQ ID NO: 10641 - protein, 7 aa, Artificial Sequence
  source: /note="Description of Artificial Sequence: Synthetic peptide"
SQSMRSS

SEQ ID NO: 10642 - protein, 7 aa, Artificial Sequence
  source: /note="Description of Artificial Sequence: Synthetic peptide"
SQSPVLK

SEQ ID NO: 10643 - protein, 7 aa, Artificial Sequence
  source: /note="Description of Artificial Sequence: Synthetic peptide"
SQSQMLP

SEQ ID NO: 10644 - protein, 7 aa, Artificial Sequence
  source: /note="Description of Artificial Sequence: Synthetic peptide"
SQSRFSA

SEQ ID NO: 10645 - protein, 7 aa, Artificial Sequence
  source: /note="Description of Artificial Sequence: Synthetic peptide"
SQSRMQP

SEQ ID NO: 10646 - protein, 7 aa, Artificial Sequence
  source: /note="Description of Artificial Sequence: Synthetic peptide"
SQSSIRL

SEQ ID NO: 10647 - protein, 7 aa, Artificial Sequence
  source: /note="Description of Artificial Sequence: Synthetic peptide"
SQSSNYP

SEQ ID NO: 10648 - protein, 7 aa, Artificial Sequence
  source: /note="Description of Artificial Sequence: Synthetic peptide"
SQSTYNI

SEQ ID NO: 10649 - protein, 7 aa, Artificial Sequence
  source: /note="Description of Artificial Sequence: Synthetic peptide"
SQTGLLT

SEQ ID NO: 10650 - protein, 7 aa, Artificial Sequence
  source: /note="Description of Artificial Sequence: Synthetic peptide"
SQTIPDS

SEQ ID NO: 10651 - protein, 7 aa, Artificial Sequence
  source: /note="Description of Artificial Sequence: Synthetic peptide"
SQTKSQH

SEQ ID NO: 10652 - protein, 7 aa, Artificial Sequence
  source: /note="Description of Artificial Sequence: Synthetic peptide"
SQTPRST

SEQ ID NO: 10653 - protein, 7 aa, Artificial Sequence
  source: /note="Description of Artificial Sequence: Synthetic peptide"
SQTQHRI

SEQ ID NO: 10654 - protein, 7 aa, Artificial Sequence
  source: /note="Description of Artificial Sequence: Synthetic peptide"
SQTVGVS

SEQ ID NO: 10655 - protein, 7 aa, Artificial Sequence
  source: /note="Description of Artificial Sequence: Synthetic peptide"
SQVGAPT

SEQ ID NO: 10656 - protein, 7 aa, Artificial Sequence
  source: /note="Description of Artificial Sequence: Synthetic peptide"
SQVGMYR

SEQ ID NO: 10657 - protein, 7 aa, Artificial Sequence
  source: /note="Description of Artificial Sequence: Synthetic peptide"
SQWVPTN

SEQ ID NO: 10658 - protein, 7 aa, Artificial Sequence
  source: /note="Description of Artificial Sequence: Synthetic peptide"
SQYASLD

SEQ ID NO: 10659 - protein, 7 aa, Artificial Sequence
  source: /note="Description of Artificial Sequence: Synthetic peptide"
SQYTKFQ

SEQ ID NO: 10660 - protein, 7 aa, Artificial Sequence
  source: /note="Description of Artificial Sequence: Synthetic peptide"
SQYVPSS

SEQ ID NO: 10661 - protein, 7 aa, Artificial Sequence
  source: /note="Description of Artificial Sequence: Synthetic peptide"
SRAAMDG

SEQ ID NO: 10662 - protein, 7 aa, Artificial Sequence
  source: /note="Description of Artificial Sequence: Synthetic peptide"
SRADIFL

SEQ ID NO: 10663 - protein, 7 aa, Artificial Sequence
  source: /note="Description of Artificial Sequence: Synthetic peptide"
SRAGRSE

SEQ ID NO: 10664 - protein, 7 aa, Artificial Sequence
  source: /note="Description of Artificial Sequence: Synthetic peptide"
SRAGTTT

SEQ ID NO: 10665 - protein, 7 aa, Artificial Sequence
  source: /note="Description of Artificial Sequence: Synthetic peptide"
SRAILAD

SEQ ID NO: 10666 - protein, 7 aa, Artificial Sequence
  source: /note="Description of Artificial Sequence: Synthetic peptide"
SRALTGP

SEQ ID NO: 10667 - protein, 7 aa, Artificial Sequence
  source: /note="Description of Artificial Sequence: Synthetic peptide"
SRALVSA

SEQ ID NO: 10668 - protein, 7 aa, Artificial Sequence
  source: /note="Description of Artificial Sequence: Synthetic peptide"
SRANLHS

SEQ ID NO: 10669 - protein, 7 aa, Artificial Sequence
  source: /note="Description of Artificial Sequence: Synthetic peptide"
SRAPSLP

SEQ ID NO: 10670 - protein, 7 aa, Artificial Sequence
  source: /note="Description of Artificial Sequence: Synthetic peptide"
SRASMAV

SEQ ID NO: 10671 - protein, 7 aa, Artificial Sequence
  source: /note="Description of Artificial Sequence: Synthetic peptide"
SRAVSDA

SEQ ID NO: 10672 - protein, 7 aa, Artificial Sequence
  source: /note="Description of Artificial Sequence: Synthetic peptide"
SRDAIHD

SEQ ID NO: 10673 - protein, 7 aa, Artificial Sequence
  source: /note="Description of Artificial Sequence: Synthetic peptide"
SRDAKQS

SEQ ID NO: 10674 - protein, 7 aa, Artificial Sequence
  source: /note="Description of Artificial Sequence: Synthetic peptide"
SRDLLSP

SEQ ID NO: 10675 - protein, 7 aa, Artificial Sequence
  source: /note="Description of Artificial Sequence: Synthetic peptide"
SRDMTNF

SEQ ID NO: 10676 - protein, 7 aa, Artificial Sequence
  source: /note="Description of Artificial Sequence: Synthetic peptide"
SRDNQTV

SEQ ID NO: 10677 - protein, 7 aa, Artificial Sequence
  source: /note="Description of Artificial Sequence: Synthetic peptide"
SRDRTLN

SEQ ID NO: 10678 - protein, 7 aa, Artificial Sequence
  source: /note="Description of Artificial Sequence: Synthetic peptide"
SRDSGTS

SEQ ID NO: 10679 - protein, 7 aa, Artificial Sequence
  source: /note="Description of Artificial Sequence: Synthetic peptide"
SRDSQRE

SEQ ID NO: 10680 - protein, 7 aa, Artificial Sequence
  source: /note="Description of Artificial Sequence: Synthetic peptide"
SRDTGHT

SEQ ID NO: 10681 - protein, 7 aa, Artificial Sequence
  source: /note="Description of Artificial Sequence: Synthetic peptide"
SRDTSHH

SEQ ID NO: 10682 - protein, 7 aa, Artificial Sequence
  source: /note="Description of Artificial Sequence: Synthetic peptide"
SRDVPQN

SEQ ID NO: 10683 - protein, 7 aa, Artificial Sequence
  source: /note="Description of Artificial Sequence: Synthetic peptide"
SRDYQLN

SEQ ID NO: 10684 - protein, 7 aa, Artificial Sequence
  source: /note="Description of Artificial Sequence: Synthetic peptide"
SREKVSA

SEQ ID NO: 10685 - protein, 7 aa, Artificial Sequence
  source: /note="Description of Artificial Sequence: Synthetic peptide"
SRELSRL

SEQ ID NO: 10686 - protein, 7 aa, Artificial Sequence
  source: /note="Description of Artificial Sequence: Synthetic peptide"
SREMAPS

SEQ ID NO: 10687 - protein, 7 aa, Artificial Sequence
  source: /note="Description of Artificial Sequence: Synthetic peptide"
SREPANI

SEQ ID NO: 10688 - protein, 7 aa, Artificial Sequence
  source: /note="Description of Artificial Sequence: Synthetic peptide"
SREQLSG

SEQ ID NO: 10689 - protein, 7 aa, Artificial Sequence
  source: /note="Description of Artificial Sequence: Synthetic peptide"
SRESRFD

SEQ ID NO: 10690 - protein, 7 aa, Artificial Sequence
  source: /note="Description of Artificial Sequence: Synthetic peptide"
SRESYQQ

SEQ ID NO: 10691 - protein, 7 aa, Artificial Sequence
  source: /note="Description of Artificial Sequence: Synthetic peptide"
SRETRAV

SEQ ID NO: 10692 - protein, 7 aa, Artificial Sequence
  source: /note="Description of Artificial Sequence: Synthetic peptide"
SREVDKT

SEQ ID NO: 10693 - protein, 7 aa, Artificial Sequence
  source: /note="Description of Artificial Sequence: Synthetic peptide"
SREVVAS

SEQ ID NO: 10694 - protein, 7 aa, Artificial Sequence
  source: /note="Description of Artificial Sequence: Synthetic peptide"
SRFEANT

SEQ ID NO: 10695 - protein, 7 aa, Artificial Sequence
  source: /note="Description of Artificial Sequence: Synthetic peptide"
SRFEQLG

SEQ ID NO: 10696 - protein, 7 aa, Artificial Sequence
  source: /note="Description of Artificial Sequence: Synthetic peptide"
SRFHPTE

SEQ ID NO: 10697 - protein, 7 aa, Artificial Sequence
  source: /note="Description of Artificial Sequence: Synthetic peptide"
SRFQGSG

SEQ ID NO: 10698 - protein, 7 aa, Artificial Sequence
  source: /note="Description of Artificial Sequence: Synthetic peptide"
SRFTTQV

SEQ ID NO: 10699 - protein, 7 aa, Artificial Sequence
  source: /note="Description of Artificial Sequence: Synthetic peptide"
SRGDPLF

SEQ ID NO: 10700 - protein, 7 aa, Artificial Sequence
  source: /note="Description of Artificial Sequence: Synthetic peptide"
SRGDRPM

SEQ ID NO: 10701 - protein, 7 aa, Artificial Sequence
  source: /note="Description of Artificial Sequence: Synthetic peptide"
SRGDTMV

SEQ ID NO: 10702 - protein, 7 aa, Artificial Sequence
  source: /note="Description of Artificial Sequence: Synthetic peptide"
SRGEHYV

SEQ ID NO: 10703 - protein, 7 aa, Artificial Sequence
  source: /note="Description of Artificial Sequence: Synthetic peptide"
SRGHETS

SEQ ID NO: 10704 - protein, 7 aa, Artificial Sequence
  source: /note="Description of Artificial Sequence: Synthetic peptide"
SRGKEVI

SEQ ID NO: 10705 - protein, 7 aa, Artificial Sequence
  source: /note="Description of Artificial Sequence: Synthetic peptide"
SRGSESI

SEQ ID NO: 10706 - protein, 7 aa, Artificial Sequence
  source: /note="Description of Artificial Sequence: Synthetic peptide"
SRGVDNL

SEQ ID NO: 10707 - protein, 7 aa, Artificial Sequence
  source: /note="Description of Artificial Sequence: Synthetic peptide"
SRGVSSP

SEQ ID NO: 10708 - protein, 7 aa, Artificial Sequence
  source: /note="Description of Artificial Sequence: Synthetic peptide"
SRHPVPH

SEQ ID NO: 10709 - protein, 7 aa, Artificial Sequence
  source: /note="Description of Artificial Sequence: Synthetic peptide"
SRHQATS

SEQ ID NO: 10710 - protein, 7 aa, Artificial Sequence
  source: /note="Description of Artificial Sequence: Synthetic peptide"
SRHTSLS

SEQ ID NO: 10711 - protein, 7 aa, Artificial Sequence
  source: /note="Description of Artificial Sequence: Synthetic peptide"
SRHYTTE

SEQ ID NO: 10712 - protein, 7 aa, Artificial Sequence
  source: /note="Description of Artificial Sequence: Synthetic peptide"
SRIAEPK

SEQ ID NO: 10713 - protein, 7 aa, Artificial Sequence
  source: /note="Description of Artificial Sequence: Synthetic peptide"
SRIGISA

SEQ ID NO: 10714 - protein, 7 aa, Artificial Sequence
  source: /note="Description of Artificial Sequence: Synthetic peptide"
SRILRLD

SEQ ID NO: 10715 - protein, 7 aa, Artificial Sequence
  source: /note="Description of Artificial Sequence: Synthetic peptide"
SRLGGHS

SEQ ID NO: 10716 - protein, 7 aa, Artificial Sequence
  source: /note="Description of Artificial Sequence: Synthetic peptide"
SRLPTQD

SEQ ID NO: 10717 - protein, 7 aa, Artificial Sequence
  source: /note="Description of Artificial Sequence: Synthetic peptide"
SRLPYPN

SEQ ID NO: 10718 - protein, 7 aa, Artificial Sequence
  source: /note="Description of Artificial Sequence: Synthetic peptide"
SRLSGAE

SEQ ID NO: 10719 - protein, 7 aa, Artificial Sequence
  source: /note="Description of Artificial Sequence: Synthetic peptide"
SRLSHEL

SEQ ID NO: 10720 - protein, 7 aa, Artificial Sequence
  source: /note="Description of Artificial Sequence: Synthetic peptide"
SRLTPPS

SEQ ID NO: 10721 - protein, 7 aa, Artificial Sequence
  source: /note="Description of Artificial Sequence: Synthetic peptide"
SRLTPYP

SEQ ID NO: 10722 - protein, 7 aa, Artificial Sequence
  source: /note="Description of Artificial Sequence: Synthetic peptide"
SRLVPVA

SEQ ID NO: 10723 - protein, 7 aa, Artificial Sequence
  source: /note="Description of Artificial Sequence: Synthetic peptide"
SRMAISD

SEQ ID NO: 10724 - protein, 7 aa, Artificial Sequence
  source: /note="Description of Artificial Sequence: Synthetic peptide"
SRMGQTS

SEQ ID NO: 10725 - protein, 7 aa, Artificial Sequence
  source: /note="Description of Artificial Sequence: Synthetic peptide"
SRMSFAP

SEQ ID NO: 10726 - protein, 7 aa, Artificial Sequence
  source: /note="Description of Artificial Sequence: Synthetic peptide"
SRMSQGF

SEQ ID NO: 10727 - protein, 7 aa, Artificial Sequence
  source: /note="Description of Artificial Sequence: Synthetic peptide"
SRNSLAL

SEQ ID NO: 10728 - protein, 7 aa, Artificial Sequence
  source: /note="Description of Artificial Sequence: Synthetic peptide"
SRNSLLD

SEQ ID NO: 10729 - protein, 7 aa, Artificial Sequence
  source: /note="Description of Artificial Sequence: Synthetic peptide"
SRNTNTD

SEQ ID NO: 10730 - protein, 7 aa, Artificial Sequence
  source: /note="Description of Artificial Sequence: Synthetic peptide"
SRNTPVD

SEQ ID NO: 10731 - protein, 7 aa, Artificial Sequence
  source: /note="Description of Artificial Sequence: Synthetic peptide"
SRPAIGS

SEQ ID NO: 10732 - protein, 7 aa, Artificial Sequence
  source: /note="Description of Artificial Sequence: Synthetic peptide"
SRPAPVL

SEQ ID NO: 10733 - protein, 7 aa, Artificial Sequence
  source: /note="Description of Artificial Sequence: Synthetic peptide"
SRPATNP

SEQ ID NO: 10734 - protein, 7 aa, Artificial Sequence
  source: /note="Description of Artificial Sequence: Synthetic peptide"
SRPEPPY

SEQ ID NO: 10735 - protein, 7 aa, Artificial Sequence
  source: /note="Description of Artificial Sequence: Synthetic peptide"
SRPGFQN

SEQ ID NO: 10736 - protein, 7 aa, Artificial Sequence
  source: /note="Description of Artificial Sequence: Synthetic peptide"
SRPGLTF

SEQ ID NO: 10737 - protein, 7 aa, Artificial Sequence
  source: /note="Description of Artificial Sequence: Synthetic peptide"
SRPITPL

SEQ ID NO: 10738 - protein, 7 aa, Artificial Sequence
  source: /note="Description of Artificial Sequence: Synthetic peptide"
SRPMSLE

SEQ ID NO: 10739 - protein, 7 aa, Artificial Sequence
  source: /note="Description of Artificial Sequence: Synthetic peptide"
SRPRDTD

SEQ ID NO: 10740 - protein, 7 aa, Artificial Sequence
  source: /note="Description of Artificial Sequence: Synthetic peptide"
SRPSAYQ

SEQ ID NO: 10741 - protein, 7 aa, Artificial Sequence
  source: /note="Description of Artificial Sequence: Synthetic peptide"
SRPSDVW

SEQ ID NO: 10742 - protein, 7 aa, Artificial Sequence
  source: /note="Description of Artificial Sequence: Synthetic peptide"
SRPSNDA

SEQ ID NO: 10743 - protein, 7 aa, Artificial Sequence
  source: /note="Description of Artificial Sequence: Synthetic peptide"
SRPSSES

SEQ ID NO: 10744 - protein, 7 aa, Artificial Sequence
  source: /note="Description of Artificial Sequence: Synthetic peptide"
SRPTAQE

SEQ ID NO: 10745 - protein, 7 aa, Artificial Sequence
  source: /note="Description of Artificial Sequence: Synthetic peptide"
SRPTSAS

SEQ ID NO: 10746 - protein, 7 aa, Artificial Sequence
  source: /note="Description of Artificial Sequence: Synthetic peptide"
SRPVVSS

SEQ ID NO: 10747 - protein, 7 aa, Artificial Sequence
  source: /note="Description of Artificial Sequence: Synthetic peptide"
SRQALSD

SEQ ID NO: 10748 - protein, 7 aa, Artificial Sequence
  source: /note="Description of Artificial Sequence: Synthetic peptide"
SRQDHWP

SEQ ID NO: 10749 - protein, 7 aa, Artificial Sequence
  source: /note="Description of Artificial Sequence: Synthetic peptide"
SRQDPVI

SEQ ID NO: 10750 - protein, 7 aa, Artificial Sequence
  source: /note="Description of Artificial Sequence: Synthetic peptide"
SRQLAPS

SEQ ID NO: 10751 - protein, 7 aa, Artificial Sequence
  source: /note="Description of Artificial Sequence: Synthetic peptide"
SRQMEHV

SEQ ID NO: 10752 - protein, 7 aa, Artificial Sequence
  source: /note="Description of Artificial Sequence: Synthetic peptide"
SRQQERG

SEQ ID NO: 10753 - protein, 7 aa, Artificial Sequence
  source: /note="Description of Artificial Sequence: Synthetic peptide"
SRQQTPD

SEQ ID NO: 10754 - protein, 7 aa, Artificial Sequence
  source: /note="Description of Artificial Sequence: Synthetic peptide"
SRQSPSL

SEQ ID NO: 10755 - protein, 7 aa, Artificial Sequence
  source: /note="Description of Artificial Sequence: Synthetic peptide"
SRQSVHG

SEQ ID NO: 10756 - protein, 7 aa, Artificial Sequence
  source: /note="Description of Artificial Sequence: Synthetic peptide"
SRRPSDI

SEQ ID NO: 10757 - protein, 7 aa, Artificial Sequence
  source: /note="Description of Artificial Sequence: Synthetic peptide"
SRSALTD

SEQ ID NO: 10758 - protein, 7 aa, Artificial Sequence
  source: /note="Description of Artificial Sequence: Synthetic peptide"
SRSERMP

SEQ ID NO: 10759 - protein, 7 aa, Artificial Sequence
  source: /note="Description of Artificial Sequence: Synthetic peptide"
SRSGQGD

SEQ ID NO: 10760 - protein, 7 aa, Artificial Sequence
  source: /note="Description of Artificial Sequence: Synthetic peptide"
SRSGSLP

SEQ ID NO: 10761 - protein, 7 aa, Artificial Sequence
  source: /note="Description of Artificial Sequence: Synthetic peptide"
SRSGTPF

SEQ ID NO: 10762 - protein, 7 aa, Artificial Sequence
  source: /note="Description of Artificial Sequence: Synthetic peptide"
SRSHPSQ

SEQ ID NO: 10763 - protein, 7 aa, Artificial Sequence
  source: /note="Description of Artificial Sequence: Synthetic peptide"
SRSIMQG

SEQ ID NO: 10764 - protein, 7 aa, Artificial Sequence
  source: /note="Description of Artificial Sequence: Synthetic peptide"
SRSISTD

SEQ ID NO: 10765 - protein, 7 aa, Artificial Sequence
  source: /note="Description of Artificial Sequence: Synthetic peptide"
SRSLEST

SEQ ID NO: 10766 - protein, 7 aa, Artificial Sequence
  source: /note="Description of Artificial Sequence: Synthetic peptide"
SRSLGTN

SEQ ID NO: 10767 - protein, 7 aa, Artificial Sequence
  source: /note="Description of Artificial Sequence: Synthetic peptide"
SRSLHLV

SEQ ID NO: 10768 - protein, 7 aa, Artificial Sequence
  source: /note="Description of Artificial Sequence: Synthetic peptide"
SRSLRPD

SEQ ID NO: 10769 - protein, 7 aa, Artificial Sequence
  source: /note="Description of Artificial Sequence: Synthetic peptide"
SRSNANI

SEQ ID NO: 10770 - protein, 7 aa, Artificial Sequence
  source: /note="Description of Artificial Sequence: Synthetic peptide"
SRSNGVI

SEQ ID NO: 10771 - protein, 7 aa, Artificial Sequence
  source: /note="Description of Artificial Sequence: Synthetic peptide"
SRSPGVH

SEQ ID NO: 10772 - protein, 7 aa, Artificial Sequence
  source: /note="Description of Artificial Sequence: Synthetic peptide"
SRSPMQP

SEQ ID NO: 10773 - protein, 7 aa, Artificial Sequence
  source: /note="Description of Artificial Sequence: Synthetic peptide"
SRSPPLP

SEQ ID NO: 10774 - protein, 7 aa, Artificial Sequence
  source: /note="Description of Artificial Sequence: Synthetic peptide"
SRSPPMT

SEQ ID NO: 10775 - protein, 7 aa, Artificial Sequence
  source: /note="Description of Artificial Sequence: Synthetic peptide"
SRSRTET

SEQ ID NO: 10776 - protein, 7 aa, Artificial Sequence
  source: /note="Description of Artificial Sequence: Synthetic peptide"
SRSSGGN

SEQ ID NO: 10777 - protein, 7 aa, Artificial Sequence
  source: /note="Description of Artificial Sequence: Synthetic peptide"
SRSSGGS

SEQ ID NO: 10778 - protein, 7 aa, Artificial Sequence
  source: /note="Description of Artificial Sequence: Synthetic peptide"
SRSVSGT

SEQ ID NO: 10779 - protein, 7 aa, Artificial Sequence
  source: /note="Description of Artificial Sequence: Synthetic peptide"
SRSVSLS

SEQ ID NO: 10780 - protein, 7 aa, Artificial Sequence
  source: /note="Description of Artificial Sequence: Synthetic peptide"
SRTANAA

SEQ ID NO: 10781 - protein, 7 aa, Artificial Sequence
  source: /note="Description of Artificial Sequence: Synthetic peptide"
SRTASFP

SEQ ID NO: 10782 - protein, 7 aa, Artificial Sequence
  source: /note="Description of Artificial Sequence: Synthetic peptide"
SRTASSG

SEQ ID NO: 10783 - protein, 7 aa, Artificial Sequence
  source: /note="Description of Artificial Sequence: Synthetic peptide"
SRTDTIK

SEQ ID NO: 10784 - protein, 7 aa, Artificial Sequence
  source: /note="Description of Artificial Sequence: Synthetic peptide"
SRTEALG

SEQ ID NO: 10785 - protein, 7 aa, Artificial Sequence
  source: /note="Description of Artificial Sequence: Synthetic peptide"
SRTERSA

SEQ ID NO: 10786 - protein, 7 aa, Artificial Sequence
  source: /note="Description of Artificial Sequence: Synthetic peptide"
SRTGAYP

SEQ ID NO: 10787 - protein, 7 aa, Artificial Sequence
  source: /note="Description of Artificial Sequence: Synthetic peptide"
SRTGSTL

SEQ ID NO: 10788 - protein, 7 aa, Artificial Sequence
  source: /note="Description of Artificial Sequence: Synthetic peptide"
SRTHDQA

SEQ ID NO: 10789 - protein, 7 aa, Artificial Sequence
  source: /note="Description of Artificial Sequence: Synthetic peptide"
SRTLVGE

SEQ ID NO: 10790 - protein, 7 aa, Artificial Sequence
  source: /note="Description of Artificial Sequence: Synthetic peptide"
SRTPHID

SEQ ID NO: 10791 - protein, 7 aa, Artificial Sequence
  source: /note="Description of Artificial Sequence: Synthetic peptide"
SRTPMSM

SEQ ID NO: 10792 - protein, 7 aa, Artificial Sequence
  source: /note="Description of Artificial Sequence: Synthetic peptide"
SRTSMPS

SEQ ID NO: 10793 - protein, 7 aa, Artificial Sequence
  source: /note="Description of Artificial Sequence: Synthetic peptide"
SRTSRLD

SEQ ID NO: 10794 - protein, 7 aa, Artificial Sequence
  source: /note="Description of Artificial Sequence: Synthetic peptide"
SRTVASG

SEQ ID NO: 10795 - protein, 7 aa, Artificial Sequence
  source: /note="Description of Artificial Sequence: Synthetic peptide"
SRTVQAM

SEQ ID NO: 10796 - protein, 7 aa, Artificial Sequence
  source: /note="Description of Artificial Sequence: Synthetic peptide"
SRVATTL

SEQ ID NO: 10797 - protein, 7 aa, Artificial Sequence
  source: /note="Description of Artificial Sequence: Synthetic peptide"
SRVIHVS

SEQ ID NO: 10798 - protein, 7 aa, Artificial Sequence
  source: /note="Description of Artificial Sequence: Synthetic peptide"
SRVNAPS

SEQ ID NO: 10799 - protein, 7 aa, Artificial Sequence
  source: /note="Description of Artificial Sequence: Synthetic peptide"
SRVNAQA

SEQ ID NO: 10800 - protein, 7 aa, Artificial Sequence
  source: /note="Description of Artificial Sequence: Synthetic peptide"
SRVPHSD

SEQ ID NO: 10801 - protein, 7 aa, Artificial Sequence
  source: /note="Description of Artificial Sequence: Synthetic peptide"
SRVPNLS

SEQ ID NO: 10802 - protein, 7 aa, Artificial Sequence
  source: /note="Description of Artificial Sequence: Synthetic peptide"
SRVQNGV

SEQ ID NO: 10803 - protein, 7 aa, Artificial Sequence
  source: /note="Description of Artificial Sequence: Synthetic peptide"
SRVSAVM

SEQ ID NO: 10804 - protein, 7 aa, Artificial Sequence
  source: /note="Description of Artificial Sequence: Synthetic peptide"
SRVSGQS

SEQ ID NO: 10805 - protein, 7 aa, Artificial Sequence
  source: /note="Description of Artificial Sequence: Synthetic peptide"
SRVSQVM

SEQ ID NO: 10806 - protein, 7 aa, Artificial Sequence
  source: /note="Description of Artificial Sequence: Synthetic peptide"
SRWVTIE

SEQ ID NO: 10807 - protein, 7 aa, Artificial Sequence
  source: /note="Description of Artificial Sequence: Synthetic peptide"
SRYATSG

SEQ ID NO: 10808 - protein, 7 aa, Artificial Sequence
  source: /note="Description of Artificial Sequence: Synthetic peptide"
SRYEDPE

SEQ ID NO: 10809 - protein, 7 aa, Artificial Sequence
  source: /note="Description of Artificial Sequence: Synthetic peptide"
SRYGSDS

SEQ ID NO: 10810 - protein, 7 aa, Artificial Sequence
  source: /note="Description of Artificial Sequence: Synthetic peptide"
SRYNGMG

SEQ ID NO: 10811 - protein, 7 aa, Artificial Sequence
  source: /note="Description of Artificial Sequence: Synthetic peptide"
SRYPEAT

SEQ ID NO: 10812 - protein, 7 aa, Artificial Sequence
  source: /note="Description of Artificial Sequence: Synthetic peptide"
SSACIKA

SEQ ID NO: 10813 - protein, 7 aa, Artificial Sequence
  source: /note="Description of Artificial Sequence: Synthetic peptide"
SSAEARL

SEQ ID NO: 10814 - protein, 7 aa, Artificial Sequence
  source: /note="Description of Artificial Sequence: Synthetic peptide"
SSAGAPL

SEQ ID NO: 10815 - protein, 7 aa, Artificial Sequence
  source: /note="Description of Artificial Sequence: Synthetic peptide"
SSAGWVG

SEQ ID NO: 10816 - protein, 7 aa, Artificial Sequence
  source: /note="Description of Artificial Sequence: Synthetic peptide"
SSAIPMK

SEQ ID NO: 10817 - protein, 7 aa, Artificial Sequence
  source: /note="Description of Artificial Sequence: Synthetic peptide"
SSANAPR

SEQ ID NO: 10818 - protein, 7 aa, Artificial Sequence
  source: /note="Description of Artificial Sequence: Synthetic peptide"
SSANAST

SEQ ID NO: 10819 - protein, 7 aa, Artificial Sequence
  source: /note="Description of Artificial Sequence: Synthetic peptide"
SSAPVSP

SEQ ID NO: 10820 - protein, 7 aa, Artificial Sequence
  source: /note="Description of Artificial Sequence: Synthetic peptide"
SSAQVSV

SEQ ID NO: 10821 - protein, 7 aa, Artificial Sequence
  source: /note="Description of Artificial Sequence: Synthetic peptide"
SSATMTT

SEQ ID NO: 10822 - protein, 7 aa, Artificial Sequence
  source: /note="Description of Artificial Sequence: Synthetic peptide"
SSDASRR

SEQ ID NO: 10823 - protein, 7 aa, Artificial Sequence
  source: /note="Description of Artificial Sequence: Synthetic peptide"
SSDHGLK

SEQ ID NO: 10824 - protein, 7 aa, Artificial Sequence
  source: /note="Description of Artificial Sequence: Synthetic peptide"
SSDHIGC

SEQ ID NO: 10825 - protein, 7 aa, Artificial Sequence
  source: /note="Description of Artificial Sequence: Synthetic peptide"
SSDIRPS

SEQ ID NO: 10826 - protein, 7 aa, Artificial Sequence
  source: /note="Description of Artificial Sequence: Synthetic peptide"
SSDSVKH

SEQ ID NO: 10827 - protein, 7 aa, Artificial Sequence
  source: /note="Description of Artificial Sequence: Synthetic peptide"
SSDTSPG

SEQ ID NO: 10828 - protein, 7 aa, Artificial Sequence
  source: /note="Description of Artificial Sequence: Synthetic peptide"
SSDTVTE

SEQ ID NO: 10829 - protein, 7 aa, Artificial Sequence
  source: /note="Description of Artificial Sequence: Synthetic peptide"
SSEAARG

SEQ ID NO: 10830 - protein, 7 aa, Artificial Sequence
  source: /note="Description of Artificial Sequence: Synthetic peptide"
SSEDVGF

SEQ ID NO: 10831 - protein, 7 aa, Artificial Sequence
  source: /note="Description of Artificial Sequence: Synthetic peptide"
SSEHGRN

SEQ ID NO: 10832 - protein, 7 aa, Artificial Sequence
  source: /note="Description of Artificial Sequence: Synthetic peptide"
SSEKHSP

SEQ ID NO: 10833 - protein, 7 aa, Artificial Sequence
  source: /note="Description of Artificial Sequence: Synthetic peptide"
SSEKRPG

SEQ ID NO: 10834 - protein, 7 aa, Artificial Sequence
  source: /note="Description of Artificial Sequence: Synthetic peptide"
SSEMSGN

SEQ ID NO: 10835 - protein, 7 aa, Artificial Sequence
  source: /note="Description of Artificial Sequence: Synthetic peptide"
SSERAHG

SEQ ID NO: 10836 - protein, 7 aa, Artificial Sequence
  source: /note="Description of Artificial Sequence: Synthetic peptide"
SSERASS

SEQ ID NO: 10837 - protein, 7 aa, Artificial Sequence
  source: /note="Description of Artificial Sequence: Synthetic peptide"
SSESLGR

SEQ ID NO: 10838 - protein, 7 aa, Artificial Sequence
  source: /note="Description of Artificial Sequence: Synthetic peptide"
SSESRWI

SEQ ID NO: 10839 - protein, 7 aa, Artificial Sequence
  source: /note="Description of Artificial Sequence: Synthetic peptide"
SSFAVGG

SEQ ID NO: 10840 - protein, 7 aa, Artificial Sequence
  source: /note="Description of Artificial Sequence: Synthetic peptide"
SSFDRGA

SEQ ID NO: 10841 - protein, 7 aa, Artificial Sequence
  source: /note="Description of Artificial Sequence: Synthetic peptide"
SSFKGTF

SEQ ID NO: 10842 - protein, 7 aa, Artificial Sequence
  source: /note="Description of Artificial Sequence: Synthetic peptide"
SSFLTPS

SEQ ID NO: 10843 - protein, 7 aa, Artificial Sequence
  source: /note="Description of Artificial Sequence: Synthetic peptide"
SSFPSKA

SEQ ID NO: 10844 - protein, 7 aa, Artificial Sequence
  source: /note="Description of Artificial Sequence: Synthetic peptide"
SSFRTPL

SEQ ID NO: 10845 - protein, 7 aa, Artificial Sequence
  source: /note="Description of Artificial Sequence: Synthetic peptide"
SSGASSP

SEQ ID NO: 10846 - protein, 7 aa, Artificial Sequence
  source: /note="Description of Artificial Sequence: Synthetic peptide"
SSGDRSH

SEQ ID NO: 10847 - protein, 7 aa, Artificial Sequence
  source: /note="Description of Artificial Sequence: Synthetic peptide"
SSGEGYK

SEQ ID NO: 10848 - protein, 7 aa, Artificial Sequence
  source: /note="Description of Artificial Sequence: Synthetic peptide"
SSGFGKP

SEQ ID NO: 10849 - protein, 7 aa, Artificial Sequence
  source: /note="Description of Artificial Sequence: Synthetic peptide"
SSGIGHF

SEQ ID NO: 10850 - protein, 7 aa, Artificial Sequence
  source: /note="Description of Artificial Sequence: Synthetic peptide"
SSGLARA

SEQ ID NO: 10851 - protein, 7 aa, Artificial Sequence
  source: /note="Description of Artificial Sequence: Synthetic peptide"
SSGLISV

SEQ ID NO: 10852 - protein, 7 aa, Artificial Sequence
  source: /note="Description of Artificial Sequence: Synthetic peptide"
SSGNNLH

SEQ ID NO: 10853 - protein, 7 aa, Artificial Sequence
  source: /note="Description of Artificial Sequence: Synthetic peptide"
SSGPSLA

SEQ ID NO: 10854 - protein, 7 aa, Artificial Sequence
  source: /note="Description of Artificial Sequence: Synthetic peptide"
SSGQVRQ

SEQ ID NO: 10855 - protein, 7 aa, Artificial Sequence
  source: /note="Description of Artificial Sequence: Synthetic peptide"
SSGRPVA

SEQ ID NO: 10856 - protein, 7 aa, Artificial Sequence
  source: /note="Description of Artificial Sequence: Synthetic peptide"
SSGTMSY

SEQ ID NO: 10857 - protein, 7 aa, Artificial Sequence
  source: /note="Description of Artificial Sequence: Synthetic peptide"
SSHFRAD

SEQ ID NO: 10858 - protein, 7 aa, Artificial Sequence
  source: /note="Description of Artificial Sequence: Synthetic peptide"
SSHFVVT

SEQ ID NO: 10859 - protein, 7 aa, Artificial Sequence
  source: /note="Description of Artificial Sequence: Synthetic peptide"
SSHHQFP

SEQ ID NO: 10860 - protein, 7 aa, Artificial Sequence
  source: /note="Description of Artificial Sequence: Synthetic peptide"
SSHKVAW

SEQ ID NO: 10861 - protein, 7 aa, Artificial Sequence
  source: /note="Description of Artificial Sequence: Synthetic peptide"
SSHMSPW

SEQ ID NO: 10862 - protein, 7 aa, Artificial Sequence
  source: /note="Description of Artificial Sequence: Synthetic peptide"
SSHPSRI

SEQ ID NO: 10863 - protein, 7 aa, Artificial Sequence
  source: /note="Description of Artificial Sequence: Synthetic peptide"
SSHQEKL

SEQ ID NO: 10864 - protein, 7 aa, Artificial Sequence
  source: /note="Description of Artificial Sequence: Synthetic peptide"
SSHRALV

SEQ ID NO: 10865 - protein, 7 aa, Artificial Sequence
  source: /note="Description of Artificial Sequence: Synthetic peptide"
SSHSLYT

SEQ ID NO: 10866 - protein, 7 aa, Artificial Sequence
  source: /note="Description of Artificial Sequence: Synthetic peptide"
SSHSYVT

SEQ ID NO: 10867 - protein, 7 aa, Artificial Sequence
  source: /note="Description of Artificial Sequence: Synthetic peptide"
SSHVTGY

SEQ ID NO: 10868 - protein, 7 aa, Artificial Sequence
  source: /note="Description of Artificial Sequence: Synthetic peptide"
SSIHNAV

SEQ ID NO: 10869 - protein, 7 aa, Artificial Sequence
  source: /note="Description of Artificial Sequence: Synthetic peptide"
SSIILGD

SEQ ID NO: 10870 - protein, 7 aa, Artificial Sequence
  source: /note="Description of Artificial Sequence: Synthetic peptide"
SSIPRHP

SEQ ID NO: 10871 - protein, 7 aa, Artificial Sequence
  source: /note="Description of Artificial Sequence: Synthetic peptide"
SSIPSNV

SEQ ID NO: 10872 - protein, 7 aa, Artificial Sequence
  source: /note="Description of Artificial Sequence: Synthetic peptide"
SSIQTAQ

SEQ ID NO: 10873 - protein, 7 aa, Artificial Sequence
  source: /note="Description of Artificial Sequence: Synthetic peptide"
SSIRPSP

SEQ ID NO: 10874 - protein, 7 aa, Artificial Sequence
  source: /note="Description of Artificial Sequence: Synthetic peptide"
SSISGSS

SEQ ID NO: 10875 - protein, 7 aa, Artificial Sequence
  source: /note="Description of Artificial Sequence: Synthetic peptide"
SSISPNG

SEQ ID NO: 10876 - protein, 7 aa, Artificial Sequence
  source: /note="Description of Artificial Sequence: Synthetic peptide"
SSKESPL

SEQ ID NO: 10877 - protein, 7 aa, Artificial Sequence
  source: /note="Description of Artificial Sequence: Synthetic peptide"
SSKGYHL

SEQ ID NO: 10878 - protein, 7 aa, Artificial Sequence
  source: /note="Description of Artificial Sequence: Synthetic peptide"
SSKGYLV

SEQ ID NO: 10879 - protein, 7 aa, Artificial Sequence
  source: /note="Description of Artificial Sequence: Synthetic peptide"
SSKLETE

SEQ ID NO: 10880 - protein, 7 aa, Artificial Sequence
  source: /note="Description of Artificial Sequence: Synthetic peptide"
SSKMTGS

SEQ ID NO: 10881 - protein, 7 aa, Artificial Sequence
  source: /note="Description of Artificial Sequence: Synthetic peptide"
SSKQVTN

SEQ ID NO: 10882 - protein, 7 aa, Artificial Sequence
  source: /note="Description of Artificial Sequence: Synthetic peptide"
SSKYAEN

SEQ ID NO: 10883 - protein, 7 aa, Artificial Sequence
  source: /note="Description of Artificial Sequence: Synthetic peptide"
SSLASGA

SEQ ID NO: 10884 - protein, 7 aa, Artificial Sequence
  source: /note="Description of Artificial Sequence: Synthetic peptide"
SSLDREF

SEQ ID NO: 10885 - protein, 7 aa, Artificial Sequence
  source: /note="Description of Artificial Sequence: Synthetic peptide"
SSLGETL

SEQ ID NO: 10886 - protein, 7 aa, Artificial Sequence
  source: /note="Description of Artificial Sequence: Synthetic peptide"
SSLIELL

SEQ ID NO: 10887 - protein, 7 aa, Artificial Sequence
  source: /note="Description of Artificial Sequence: Synthetic peptide"
SSLKIET

SEQ ID NO: 10888 - protein, 7 aa, Artificial Sequence
  source: /note="Description of Artificial Sequence: Synthetic peptide"
SSLKLNG

SEQ ID NO: 10889 - protein, 7 aa, Artificial Sequence
  source: /note="Description of Artificial Sequence: Synthetic peptide"
SSLNTGA

SEQ ID NO: 10890 - protein, 7 aa, Artificial Sequence
  source: /note="Description of Artificial Sequence: Synthetic peptide"
SSLPAGR

SEQ ID NO: 10891 - protein, 7 aa, Artificial Sequence
  source: /note="Description of Artificial Sequence: Synthetic peptide"
SSLRNNI

SEQ ID NO: 10892 - protein, 7 aa, Artificial Sequence
  source: /note="Description of Artificial Sequence: Synthetic peptide"
SSLRPAT

SEQ ID NO: 10893 - protein, 7 aa, Artificial Sequence
  source: /note="Description of Artificial Sequence: Synthetic peptide"
SSLSDRD

SEQ ID NO: 10894 - protein, 7 aa, Artificial Sequence
  source: /note="Description of Artificial Sequence: Synthetic peptide"
SSLSRTG

SEQ ID NO: 10895 - protein, 7 aa, Artificial Sequence
  source: /note="Description of Artificial Sequence: Synthetic peptide"
SSMAKKE

SEQ ID NO: 10896 - protein, 7 aa, Artificial Sequence
  source: /note="Description of Artificial Sequence: Synthetic peptide"
SSMALGT

SEQ ID NO: 10897 - protein, 7 aa, Artificial Sequence
  source: /note="Description of Artificial Sequence: Synthetic peptide"
SSMVDQV

SEQ ID NO: 10898 - protein, 7 aa, Artificial Sequence
  source: /note="Description of Artificial Sequence: Synthetic peptide"
SSNAMLP

SEQ ID NO: 10899 - protein, 7 aa, Artificial Sequence
  source: /note="Description of Artificial Sequence: Synthetic peptide"
SSNEHMR

SEQ ID NO: 10900 - protein, 7 aa, Artificial Sequence
  source: /note="Description of Artificial Sequence: Synthetic peptide"
SSNLKLS

SEQ ID NO: 10901 - protein, 7 aa, Artificial Sequence
  source: /note="Description of Artificial Sequence: Synthetic peptide"
SSNPMLR

SEQ ID NO: 10902 - protein, 7 aa, Artificial Sequence
  source: /note="Description of Artificial Sequence: Synthetic peptide"
SSNPQRV

SEQ ID NO: 10903 - protein, 7 aa, Artificial Sequence
  source: /note="Description of Artificial Sequence: Synthetic peptide"
SSNRASV

SEQ ID NO: 10904 - protein, 7 aa, Artificial Sequence
  source: /note="Description of Artificial Sequence: Synthetic peptide"
SSNRGEL

SEQ ID NO: 10905 - protein, 7 aa, Artificial Sequence
  source: /note="Description of Artificial Sequence: Synthetic peptide"
SSNSFPR

SEQ ID NO: 10906 - protein, 7 aa, Artificial Sequence
  source: /note="Description of Artificial Sequence: Synthetic peptide"
SSNSGVP

SEQ ID NO: 10907 - protein, 7 aa, Artificial Sequence
  source: /note="Description of Artificial Sequence: Synthetic peptide"
SSNSRAI

SEQ ID NO: 10908 - protein, 7 aa, Artificial Sequence
  source: /note="Description of Artificial Sequence: Synthetic peptide"
SSNSSFA

SEQ ID NO: 10909 - protein, 7 aa, Artificial Sequence
  source: /note="Description of Artificial Sequence: Synthetic peptide"
SSNSVIA

SEQ ID NO: 10910 - protein, 7 aa, Artificial Sequence
  source: /note="Description of Artificial Sequence: Synthetic peptide"
SSPALNY

SEQ ID NO: 10911 - protein, 7 aa, Artificial Sequence
  source: /note="Description of Artificial Sequence: Synthetic peptide"
SSPEGLA

SEQ ID NO: 10912 - protein, 7 aa, Artificial Sequence
  source: /note="Description of Artificial Sequence: Synthetic peptide"
SSPMRSE

SEQ ID NO: 10913 - protein, 7 aa, Artificial Sequence
  source: /note="Description of Artificial Sequence: Synthetic peptide"
SSPPGNG

SEQ ID NO: 10914 - protein, 7 aa, Artificial Sequence
  source: /note="Description of Artificial Sequence: Synthetic peptide"
SSPRGFG

SEQ ID NO: 10915 - protein, 7 aa, Artificial Sequence
  source: /note="Description of Artificial Sequence: Synthetic peptide"
SSPRHSE

SEQ ID NO: 10916 - protein, 7 aa, Artificial Sequence
  source: /note="Description of Artificial Sequence: Synthetic peptide"
SSPSLTL

SEQ ID NO: 10917 - protein, 7 aa, Artificial Sequence
  source: /note="Description of Artificial Sequence: Synthetic peptide"
SSPSSNG

SEQ ID NO: 10918 - protein, 7 aa, Artificial Sequence
  source: /note="Description of Artificial Sequence: Synthetic peptide"
SSPTCCP

SEQ ID NO: 10919 - protein, 7 aa, Artificial Sequence
  source: /note="Description of Artificial Sequence: Synthetic peptide"
SSPTMFV

SEQ ID NO: 10920 - protein, 7 aa, Artificial Sequence
  source: /note="Description of Artificial Sequence: Synthetic peptide"
SSPTPLK

SEQ ID NO: 10921 - protein, 7 aa, Artificial Sequence
  source: /note="Description of Artificial Sequence: Synthetic peptide"
SSPVASS

SEQ ID NO: 10922 - protein, 7 aa, Artificial Sequence
  source: /note="Description of Artificial Sequence: Synthetic peptide"
SSPVKTL

SEQ ID NO: 10923 - protein, 7 aa, Artificial Sequence
  source: /note="Description of Artificial Sequence: Synthetic peptide"
SSPYPMM

SEQ ID NO: 10924 - protein, 7 aa, Artificial Sequence
  source: /note="Description of Artificial Sequence: Synthetic peptide"
SSQERNV

SEQ ID NO: 10925 - protein, 7 aa, Artificial Sequence
  source: /note="Description of Artificial Sequence: Synthetic peptide"
SSQGPIR

SEQ ID NO: 10926 - protein, 7 aa, Artificial Sequence
  source: /note="Description of Artificial Sequence: Synthetic peptide"
SSQKPVL

SEQ ID NO: 10927 - protein, 7 aa, Artificial Sequence
  source: /note="Description of Artificial Sequence: Synthetic peptide"
SSQLLLD

SEQ ID NO: 10928 - protein, 7 aa, Artificial Sequence
  source: /note="Description of Artificial Sequence: Synthetic peptide"
SSQMLYP

SEQ ID NO: 10929 - protein, 7 aa, Artificial Sequence
  source: /note="Description of Artificial Sequence: Synthetic peptide"
SSQPLEL

SEQ ID NO: 10930 - protein, 7 aa, Artificial Sequence
  source: /note="Description of Artificial Sequence: Synthetic peptide"
SSQPMSY

SEQ ID NO: 10931 - protein, 7 aa, Artificial Sequence
  source: /note="Description of Artificial Sequence: Synthetic peptide"
SSQRVPS

SEQ ID NO: 10932 - protein, 7 aa, Artificial Sequence
  source: /note="Description of Artificial Sequence: Synthetic peptide"
SSQSMTL

SEQ ID NO: 10933 - protein, 7 aa, Artificial Sequence
  source: /note="Description of Artificial Sequence: Synthetic peptide"
SSQVKTL

SEQ ID NO: 10934 - protein, 7 aa, Artificial Sequence
  source: /note="Description of Artificial Sequence: Synthetic peptide"
SSQWHAG

SEQ ID NO: 10935 - protein, 7 aa, Artificial Sequence
  source: /note="Description of Artificial Sequence: Synthetic peptide"
SSRAGTE

SEQ ID NO: 10936 - protein, 7 aa, Artificial Sequence
  source: /note="Description of Artificial Sequence: Synthetic peptide"
SSRDMTS

SEQ ID NO: 10937 - protein, 7 aa, Artificial Sequence
  source: /note="Description of Artificial Sequence: Synthetic peptide"
SSRDVGR

SEQ ID NO: 10938 - protein, 7 aa, Artificial Sequence
  source: /note="Description of Artificial Sequence: Synthetic peptide"
SSRGPIA

SEQ ID NO: 10939 - protein, 7 aa, Artificial Sequence
  source: /note="Description of Artificial Sequence: Synthetic peptide"
SSRGSPS

SEQ ID NO: 10940 - protein, 7 aa, Artificial Sequence
  source: /note="Description of Artificial Sequence: Synthetic peptide"
SSRGVPG

SEQ ID NO: 10941 - protein, 7 aa, Artificial Sequence
  source: /note="Description of Artificial Sequence: Synthetic peptide"
SSRINPM

SEQ ID NO: 10942 - protein, 7 aa, Artificial Sequence
  source: /note="Description of Artificial Sequence: Synthetic peptide"
SSRIPDT

SEQ ID NO: 10943 - protein, 7 aa, Artificial Sequence
  source: /note="Description of Artificial Sequence: Synthetic peptide"
SSRLNEQ

SEQ ID NO: 10944 - protein, 7 aa, Artificial Sequence
  source: /note="Description of Artificial Sequence: Synthetic peptide"
SSRLSAD

SEQ ID NO: 10945 - protein, 7 aa, Artificial Sequence
  source: /note="Description of Artificial Sequence: Synthetic peptide"
SSRLSES

SEQ ID NO: 10946 - protein, 7 aa, Artificial Sequence
  source: /note="Description of Artificial Sequence: Synthetic peptide"
SSRPGMS

SEQ ID NO: 10947 - protein, 7 aa, Artificial Sequence
  source: /note="Description of Artificial Sequence: Synthetic peptide"
SSRPGQH

SEQ ID NO: 10948 - protein, 7 aa, Artificial Sequence
  source: /note="Description of Artificial Sequence: Synthetic peptide"
SSRPNDD

SEQ ID NO: 10949 - protein, 7 aa, Artificial Sequence
  source: /note="Description of Artificial Sequence: Synthetic peptide"
SSRPSGS

SEQ ID NO: 10950 - protein, 7 aa, Artificial Sequence
  source: /note="Description of Artificial Sequence: Synthetic peptide"
SSRSAQS

SEQ ID NO: 10951 - protein, 7 aa, Artificial Sequence
  source: /note="Description of Artificial Sequence: Synthetic peptide"
SSRSPDL

SEQ ID NO: 10952 - protein, 7 aa, Artificial Sequence
  source: /note="Description of Artificial Sequence: Synthetic peptide"
SSRTNSY

SEQ ID NO: 10953 - protein, 7 aa, Artificial Sequence
  source: /note="Description of Artificial Sequence: Synthetic peptide"
SSRTVEA

SEQ ID NO: 10954 - protein, 7 aa, Artificial Sequence
  source: /note="Description of Artificial Sequence: Synthetic peptide"
SSSALVL

SEQ ID NO: 10955 - protein, 7 aa, Artificial Sequence
  source: /note="Description of Artificial Sequence: Synthetic peptide"
SSSAVAS

SEQ ID NO: 10956 - protein, 7 aa, Artificial Sequence
  source: /note="Description of Artificial Sequence: Synthetic peptide"
SSSESAW

SEQ ID NO: 10957 - protein, 7 aa, Artificial Sequence
  source: /note="Description of Artificial Sequence: Synthetic peptide"
SSSGTHP

SEQ ID NO: 10958 - protein, 7 aa, Artificial Sequence
  source: /note="Description of Artificial Sequence: Synthetic peptide"
SSSIIRT

SEQ ID NO: 10959 - protein, 7 aa, Artificial Sequence
  source: /note="Description of Artificial Sequence: Synthetic peptide"
SSSIRAN

SEQ ID NO: 10960 - protein, 7 aa, Artificial Sequence
  source: /note="Description of Artificial Sequence: Synthetic peptide"
SSSKPHL

SEQ ID NO: 10961 - protein, 7 aa, Artificial Sequence
  source: /note="Description of Artificial Sequence: Synthetic peptide"
SSSLDSR

SEQ ID NO: 10962 - protein, 7 aa, Artificial Sequence
  source: /note="Description of Artificial Sequence: Synthetic peptide"
SSSLQLG

SEQ ID NO: 10963 - protein, 7 aa, Artificial Sequence
  source: /note="Description of Artificial Sequence: Synthetic peptide"
SSSLSHS

SEQ ID NO: 10964 - protein, 7 aa, Artificial Sequence
  source: /note="Description of Artificial Sequence: Synthetic peptide"
SSSMRER

SEQ ID NO: 10965 - protein, 7 aa, Artificial Sequence
  source: /note="Description of Artificial Sequence: Synthetic peptide"
SSSNTLT

SEQ ID NO: 10966 - protein, 7 aa, Artificial Sequence
  source: /note="Description of Artificial Sequence: Synthetic peptide"
SSSRAVE

SEQ ID NO: 10967 - protein, 7 aa, Artificial Sequence
  source: /note="Description of Artificial Sequence: Synthetic peptide"
SSSRPTQ

SEQ ID NO: 10968 - protein, 7 aa, Artificial Sequence
  source: /note="Description of Artificial Sequence: Synthetic peptide"
SSSSKTP

SEQ ID NO: 10969 - protein, 7 aa, Artificial Sequence
  source: /note="Description of Artificial Sequence: Synthetic peptide"
SSSSLYT

SEQ ID NO: 10970 - protein, 7 aa, Artificial Sequence
  source: /note="Description of Artificial Sequence: Synthetic peptide"
SSSSPRA

SEQ ID NO: 10971 - protein, 7 aa, Artificial Sequence
  source: /note="Description of Artificial Sequence: Synthetic peptide"
SSSSSRP

SEQ ID NO: 10972 - protein, 7 aa, Artificial Sequence
  source: /note="Description of Artificial Sequence: Synthetic peptide"
SSSSVRA

SEQ ID NO: 10973 - protein, 7 aa, Artificial Sequence
  source: /note="Description of Artificial Sequence: Synthetic peptide"
SSSTPPL

SEQ ID NO: 10974 - protein, 7 aa, Artificial Sequence
  source: /note="Description of Artificial Sequence: Synthetic peptide"
SSSTPPS

SEQ ID NO: 10975 - protein, 7 aa, Artificial Sequence
  source: /note="Description of Artificial Sequence: Synthetic peptide"
SSSTPPT

SEQ ID NO: 10976 - protein, 7 aa, Artificial Sequence
  source: /note="Description of Artificial Sequence: Synthetic peptide"
SSSTSTG

SEQ ID NO: 10977 - protein, 7 aa, Artificial Sequence
  source: /note="Description of Artificial Sequence: Synthetic peptide"
SSSTVQF

SEQ ID NO: 10978 - protein, 7 aa, Artificial Sequence
  source: /note="Description of Artificial Sequence: Synthetic peptide"
SSSVSNN

SEQ ID NO: 10979 - protein, 7 aa, Artificial Sequence
  source: /note="Description of Artificial Sequence: Synthetic peptide"
SSSYNGK

SEQ ID NO: 10980 - protein, 7 aa, Artificial Sequence
  source: /note="Description of Artificial Sequence: Synthetic peptide"
SSTESIR

SEQ ID NO: 10981 - protein, 7 aa, Artificial Sequence
  source: /note="Description of Artificial Sequence: Synthetic peptide"
SSTHEKP

SEQ ID NO: 10982 - protein, 7 aa, Artificial Sequence
  source: /note="Description of Artificial Sequence: Synthetic peptide"
SSTKSLA

SEQ ID NO: 10983 - protein, 7 aa, Artificial Sequence
  source: /note="Description of Artificial Sequence: Synthetic peptide"
SSTPPKY

SEQ ID NO: 10984 - protein, 7 aa, Artificial Sequence
  source: /note="Description of Artificial Sequence: Synthetic peptide"
SSTPTSH

SEQ ID NO: 10985 - protein, 7 aa, Artificial Sequence
  source: /note="Description of Artificial Sequence: Synthetic peptide"
SSTPTTA

SEQ ID NO: 10986 - protein, 7 aa, Artificial Sequence
  source: /note="Description of Artificial Sequence: Synthetic peptide"
SSTRDAH

SEQ ID NO: 10987 - protein, 7 aa, Artificial Sequence
  source: /note="Description of Artificial Sequence: Synthetic peptide"
SSTRTPP

SEQ ID NO: 10988 - protein, 7 aa, Artificial Sequence
  source: /note="Description of Artificial Sequence: Synthetic peptide"
SSTSSRF

SEQ ID NO: 10989 - protein, 7 aa, Artificial Sequence
  source: /note="Description of Artificial Sequence: Synthetic peptide"
SSTSTLL

SEQ ID NO: 10990 - protein, 7 aa, Artificial Sequence
  source: /note="Description of Artificial Sequence: Synthetic peptide"
SSTTMIE

SEQ ID NO: 10991 - protein, 7 aa, Artificial Sequence
  source: /note="Description of Artificial Sequence: Synthetic peptide"
SSVASTV

SEQ ID NO: 10992 - protein, 7 aa, Artificial Sequence
  source: /note="Description of Artificial Sequence: Synthetic peptide"
SSVGSAG

SEQ ID NO: 10993 - protein, 7 aa, Artificial Sequence
  source: /note="Description of Artificial Sequence: Synthetic peptide"
SSVHLYP

SEQ ID NO: 10994 - protein, 7 aa, Artificial Sequence
  source: /note="Description of Artificial Sequence: Synthetic peptide"
SSVHSRM

SEQ ID NO: 10995 - protein, 7 aa, Artificial Sequence
  source: /note="Description of Artificial Sequence: Synthetic peptide"
SSVNTSG

SEQ ID NO: 10996 - protein, 7 aa, Artificial Sequence
  source: /note="Description of Artificial Sequence: Synthetic peptide"
SSVPRPS

SEQ ID NO: 10997 - protein, 7 aa, Artificial Sequence
  source: /note="Description of Artificial Sequence: Synthetic peptide"
SSVRLLS

SEQ ID NO: 10998 - protein, 7 aa, Artificial Sequence
  source: /note="Description of Artificial Sequence: Synthetic peptide"
SSVSGLS

SEQ ID NO: 10999 - protein, 7 aa, Artificial Sequence
  source: /note="Description of Artificial Sequence: Synthetic peptide"
SSVTRTG

SEQ ID NO: 11000 - protein, 7 aa, Artificial Sequence
  source: /note="Description of Artificial Sequence: Synthetic peptide"
SSVTVSS

SEQ ID NO: 11001 - protein, 7 aa, Artificial Sequence
  source: /note="Description of Artificial Sequence: Synthetic peptide"
SSVVHGV

SEQ ID NO: 11002 - protein, 7 aa, Artificial Sequence
  source: /note="Description of Artificial Sequence: Synthetic peptide"
SSVVPSM

SEQ ID NO: 11003 - protein, 7 aa, Artificial Sequence
  source: /note="Description of Artificial Sequence: Synthetic peptide"
SSWQPFE

SEQ ID NO: 11004 - protein, 7 aa, Artificial Sequence
  source: /note="Description of Artificial Sequence: Synthetic peptide"
SSYAPLH

SEQ ID NO: 11005 - protein, 7 aa, Artificial Sequence
  source: /note="Description of Artificial Sequence: Synthetic peptide"
SSYASGS

SEQ ID NO: 11006 - protein, 7 aa, Artificial Sequence
  source: /note="Description of Artificial Sequence: Synthetic peptide"
SSYDSSK

SEQ ID NO: 11007 - protein, 7 aa, Artificial Sequence
  source: /note="Description of Artificial Sequence: Synthetic peptide"
SSYEKGT

SEQ ID NO: 11008 - protein, 7 aa, Artificial Sequence
  source: /note="Description of Artificial Sequence: Synthetic peptide"
SSYHGLT

SEQ ID NO: 11009 - protein, 7 aa, Artificial Sequence
  source: /note="Description of Artificial Sequence: Synthetic peptide"
SSYHPAE

SEQ ID NO: 11010 - protein, 7 aa, Artificial Sequence
  source: /note="Description of Artificial Sequence: Synthetic peptide"
SSYPGHS

SEQ ID NO: 11011 - protein, 7 aa, Artificial Sequence
  source: /note="Description of Artificial Sequence: Synthetic peptide"
SSYSVPE

SEQ ID NO: 11012 - protein, 7 aa, Artificial Sequence
  source: /note="Description of Artificial Sequence: Synthetic peptide"
STAITIH

SEQ ID NO: 11013 - protein, 7 aa, Artificial Sequence
  source: /note="Description of Artificial Sequence: Synthetic peptide"
STALGIV

SEQ ID NO: 11014 - protein, 7 aa, Artificial Sequence
  source: /note="Description of Artificial Sequence: Synthetic peptide"
STANAQT

SEQ ID NO: 11015 - protein, 7 aa, Artificial Sequence
  source: /note="Description of Artificial Sequence: Synthetic peptide"
STAPGAA

SEQ ID NO: 11016 - protein, 7 aa, Artificial Sequence
  source: /note="Description of Artificial Sequence: Synthetic peptide"
STARAST

SEQ ID NO: 11017 - protein, 7 aa, Artificial Sequence
  source: /note="Description of Artificial Sequence: Synthetic peptide"
STARLRD

SEQ ID NO: 11018 - protein, 7 aa, Artificial Sequence
  source: /note="Description of Artificial Sequence: Synthetic peptide"
STATQLM

SEQ ID NO: 11019 - protein, 7 aa, Artificial Sequence
  source: /note="Description of Artificial Sequence: Synthetic peptide"
STCHPSG

SEQ ID NO: 11020 - protein, 7 aa, Artificial Sequence
  source: /note="Description of Artificial Sequence: Synthetic peptide"
STDEHVM

SEQ ID NO: 11021 - protein, 7 aa, Artificial Sequence
  source: /note="Description of Artificial Sequence: Synthetic peptide"
STDHTAY

SEQ ID NO: 11022 - protein, 7 aa, Artificial Sequence
  source: /note="Description of Artificial Sequence: Synthetic peptide"
STDLRQA

SEQ ID NO: 11023 - protein, 7 aa, Artificial Sequence
  source: /note="Description of Artificial Sequence: Synthetic peptide"
STDMRHI

SEQ ID NO: 11024 - protein, 7 aa, Artificial Sequence
  source: /note="Description of Artificial Sequence: Synthetic peptide"
STDNDLR

SEQ ID NO: 11025 - protein, 7 aa, Artificial Sequence
  source: /note="Description of Artificial Sequence: Synthetic peptide"
STDTNHQ

SEQ ID NO: 11026 - protein, 7 aa, Artificial Sequence
  source: /note="Description of Artificial Sequence: Synthetic peptide"
STDVKTQ

SEQ ID NO: 11027 - protein, 7 aa, Artificial Sequence
  source: /note="Description of Artificial Sequence: Synthetic peptide"
STEFKSA

SEQ ID NO: 11028 - protein, 7 aa, Artificial Sequence
  source: /note="Description of Artificial Sequence: Synthetic peptide"
STERPMP

SEQ ID NO: 11029 - protein, 7 aa, Artificial Sequence
  source: /note="Description of Artificial Sequence: Synthetic peptide"
STETAQS

SEQ ID NO: 11030 - protein, 7 aa, Artificial Sequence
  source: /note="Description of Artificial Sequence: Synthetic peptide"
STFKNVV

SEQ ID NO: 11031 - protein, 7 aa, Artificial Sequence
  source: /note="Description of Artificial Sequence: Synthetic peptide"
STFNSAG

SEQ ID NO: 11032 - protein, 7 aa, Artificial Sequence
  source: /note="Description of Artificial Sequence: Synthetic peptide"
STFSSSM

SEQ ID NO: 11033 - protein, 7 aa, Artificial Sequence
  source: /note="Description of Artificial Sequence: Synthetic peptide"
STFVTAG

SEQ ID NO: 11034 - protein, 7 aa, Artificial Sequence
  source: /note="Description of Artificial Sequence: Synthetic peptide"
STFVTRS

SEQ ID NO: 11035 - protein, 7 aa, Artificial Sequence
  source: /note="Description of Artificial Sequence: Synthetic peptide"
STGALPS

SEQ ID NO: 11036 - protein, 7 aa, Artificial Sequence
  source: /note="Description of Artificial Sequence: Synthetic peptide"
STGAMLH

SEQ ID NO: 11037 - protein, 7 aa, Artificial Sequence
  source: /note="Description of Artificial Sequence: Synthetic peptide"
STGAPPD

SEQ ID NO: 11038 - protein, 7 aa, Artificial Sequence
  source: /note="Description of Artificial Sequence: Synthetic peptide"
STGMGAF

SEQ ID NO: 11039 - protein, 7 aa, Artificial Sequence
  source: /note="Description of Artificial Sequence: Synthetic peptide"
STGPFLP

SEQ ID NO: 11040 - protein, 7 aa, Artificial Sequence
  source: /note="Description of Artificial Sequence: Synthetic peptide"
STGSAQT

SEQ ID NO: 11041 - protein, 7 aa, Artificial Sequence
  source: /note="Description of Artificial Sequence: Synthetic peptide"
STGSTLQ

SEQ ID NO: 11042 - protein, 7 aa, Artificial Sequence
  source: /note="Description of Artificial Sequence: Synthetic peptide"
STGYGGL

SEQ ID NO: 11043 - protein, 7 aa, Artificial Sequence
  source: /note="Description of Artificial Sequence: Synthetic peptide"
STHISPP

SEQ ID NO: 11044 - protein, 7 aa, Artificial Sequence
  source: /note="Description of Artificial Sequence: Synthetic peptide"
STHMRLA

SEQ ID NO: 11045 - protein, 7 aa, Artificial Sequence
  source: /note="Description of Artificial Sequence: Synthetic peptide"
STHNLTS

SEQ ID NO: 11046 - protein, 7 aa, Artificial Sequence
  source: /note="Description of Artificial Sequence: Synthetic peptide"
STHRDSS

SEQ ID NO: 11047 - protein, 7 aa, Artificial Sequence
  source: /note="Description of Artificial Sequence: Synthetic peptide"
STHRSLA

SEQ ID NO: 11048 - protein, 7 aa, Artificial Sequence
  source: /note="Description of Artificial Sequence: Synthetic peptide"
STHSYPV

SEQ ID NO: 11049 - protein, 7 aa, Artificial Sequence
  source: /note="Description of Artificial Sequence: Synthetic peptide"
STHVSST

SEQ ID NO: 11050 - protein, 7 aa, Artificial Sequence
  source: /note="Description of Artificial Sequence: Synthetic peptide"
STIAGTP

SEQ ID NO: 11051 - protein, 7 aa, Artificial Sequence
  source: /note="Description of Artificial Sequence: Synthetic peptide"
STISALA

SEQ ID NO: 11052 - protein, 7 aa, Artificial Sequence
  source: /note="Description of Artificial Sequence: Synthetic peptide"
STKESQL

SEQ ID NO: 11053 - protein, 7 aa, Artificial Sequence
  source: /note="Description of Artificial Sequence: Synthetic peptide"
STKSGTP

SEQ ID NO: 11054 - protein, 7 aa, Artificial Sequence
  source: /note="Description of Artificial Sequence: Synthetic peptide"
STKTPPA

SEQ ID NO: 11055 - protein, 7 aa, Artificial Sequence
  source: /note="Description of Artificial Sequence: Synthetic peptide"
STKYSSV

SEQ ID NO: 11056 - protein, 7 aa, Artificial Sequence
  source: /note="Description of Artificial Sequence: Synthetic peptide"
STLARDN

SEQ ID NO: 11057 - protein, 7 aa, Artificial Sequence
  source: /note="Description of Artificial Sequence: Synthetic peptide"
STLARVP

SEQ ID NO: 11058 - protein, 7 aa, Artificial Sequence
  source: /note="Description of Artificial Sequence: Synthetic peptide"
STLCPVL

SEQ ID NO: 11059 - protein, 7 aa, Artificial Sequence
  source: /note="Description of Artificial Sequence: Synthetic peptide"
STLGGGY

SEQ ID NO: 11060 - protein, 7 aa, Artificial Sequence
  source: /note="Description of Artificial Sequence: Synthetic peptide"
STLNNVP

SEQ ID NO: 11061 - protein, 7 aa, Artificial Sequence
  source: /note="Description of Artificial Sequence: Synthetic peptide"
STLPSPE

SEQ ID NO: 11062 - protein, 7 aa, Artificial Sequence
  source: /note="Description of Artificial Sequence: Synthetic peptide"
STLPSRP

SEQ ID NO: 11063 - protein, 7 aa, Artificial Sequence
  source: /note="Description of Artificial Sequence: Synthetic peptide"
STLRCGE

SEQ ID NO: 11064 - protein, 7 aa, Artificial Sequence
  source: /note="Description of Artificial Sequence: Synthetic peptide"
STLVKNA

SEQ ID NO: 11065 - protein, 7 aa, Artificial Sequence
  source: /note="Description of Artificial Sequence: Synthetic peptide"
STLVRAE

SEQ ID NO: 11066 - protein, 7 aa, Artificial Sequence
  source: /note="Description of Artificial Sequence: Synthetic peptide"
STMAGRH

SEQ ID NO: 11067 - protein, 7 aa, Artificial Sequence
  source: /note="Description of Artificial Sequence: Synthetic peptide"
STMIAHS

SEQ ID NO: 11068 - protein, 7 aa, Artificial Sequence
  source: /note="Description of Artificial Sequence: Synthetic peptide"
STMLLPS

SEQ ID NO: 11069 - protein, 7 aa, Artificial Sequence
  source: /note="Description of Artificial Sequence: Synthetic peptide"
STMNRGL

SEQ ID NO: 11070 - protein, 7 aa, Artificial Sequence
  source: /note="Description of Artificial Sequence: Synthetic peptide"
STMRPQL

SEQ ID NO: 11071 - protein, 7 aa, Artificial Sequence
  source: /note="Description of Artificial Sequence: Synthetic peptide"
STMSVKE

SEQ ID NO: 11072 - protein, 7 aa, Artificial Sequence
  source: /note="Description of Artificial Sequence: Synthetic peptide"
STNATSN

SEQ ID NO: 11073 - protein, 7 aa, Artificial Sequence
  source: /note="Description of Artificial Sequence: Synthetic peptide"
STNIVEY

SEQ ID NO: 11074 - protein, 7 aa, Artificial Sequence
  source: /note="Description of Artificial Sequence: Synthetic peptide"
STNRSTV

SEQ ID NO: 11075 - protein, 7 aa, Artificial Sequence
  source: /note="Description of Artificial Sequence: Synthetic peptide"
STNTALW

SEQ ID NO: 11076 - protein, 7 aa, Artificial Sequence
  source: /note="Description of Artificial Sequence: Synthetic peptide"
STNTPRG

SEQ ID NO: 11077 - protein, 7 aa, Artificial Sequence
  source: /note="Description of Artificial Sequence: Synthetic peptide"
STNTQAY

SEQ ID NO: 11078 - protein, 7 aa, Artificial Sequence
  source: /note="Description of Artificial Sequence: Synthetic peptide"
STNTREE

SEQ ID NO: 11079 - protein, 7 aa, Artificial Sequence
  source: /note="Description of Artificial Sequence: Synthetic peptide"
STNVGLA

SEQ ID NO: 11080 - protein, 7 aa, Artificial Sequence
  source: /note="Description of Artificial Sequence: Synthetic peptide"
STPAKYG

SEQ ID NO: 11081 - protein, 7 aa, Artificial Sequence
  source: /note="Description of Artificial Sequence: Synthetic peptide"
STPASRA

SEQ ID NO: 11082 - protein, 7 aa, Artificial Sequence
  source: /note="Description of Artificial Sequence: Synthetic peptide"
STPDNHT

SEQ ID NO: 11083 - protein, 7 aa, Artificial Sequence
  source: /note="Description of Artificial Sequence: Synthetic peptide"
STPDRQT

SEQ ID NO: 11084 - protein, 7 aa, Artificial Sequence
  source: /note="Description of Artificial Sequence: Synthetic peptide"
STPHTNA

SEQ ID NO: 11085 - protein, 7 aa, Artificial Sequence
  source: /note="Description of Artificial Sequence: Synthetic peptide"
STPKPSP

SEQ ID NO: 11086 - protein, 7 aa, Artificial Sequence
  source: /note="Description of Artificial Sequence: Synthetic peptide"
STPLIAK

SEQ ID NO: 11087 - protein, 7 aa, Artificial Sequence
  source: /note="Description of Artificial Sequence: Synthetic peptide"
STPLPRT

SEQ ID NO: 11088 - protein, 7 aa, Artificial Sequence
  source: /note="Description of Artificial Sequence: Synthetic peptide"
STPLQTP

SEQ ID NO: 11089 - protein, 7 aa, Artificial Sequence
  source: /note="Description of Artificial Sequence: Synthetic peptide"
STPLRTS

SEQ ID NO: 11090 - protein, 7 aa, Artificial Sequence
  source: /note="Description of Artificial Sequence: Synthetic peptide"
STPNARI

SEQ ID NO: 11091 - protein, 7 aa, Artificial Sequence
  source: /note="Description of Artificial Sequence: Synthetic peptide"
STPNMNR

SEQ ID NO: 11092 - protein, 7 aa, Artificial Sequence
  source: /note="Description of Artificial Sequence: Synthetic peptide"
STPPARS

SEQ ID NO: 11093 - protein, 7 aa, Artificial Sequence
  source: /note="Description of Artificial Sequence: Synthetic peptide"
STPPLYE

SEQ ID NO: 11094 - protein, 7 aa, Artificial Sequence
  source: /note="Description of Artificial Sequence: Synthetic peptide"
STPPTTL

SEQ ID NO: 11095 - protein, 7 aa, Artificial Sequence
  source: /note="Description of Artificial Sequence: Synthetic peptide"
STPRPHD

SEQ ID NO: 11096 - protein, 7 aa, Artificial Sequence
  source: /note="Description of Artificial Sequence: Synthetic peptide"
STPTGAL

SEQ ID NO: 11097 - protein, 7 aa, Artificial Sequence
  source: /note="Description of Artificial Sequence: Synthetic peptide"
STQQRSG

SEQ ID NO: 11098 - protein, 7 aa, Artificial Sequence
  source: /note="Description of Artificial Sequence: Synthetic peptide"
STQRAAA

SEQ ID NO: 11099 - protein, 7 aa, Artificial Sequence
  source: /note="Description of Artificial Sequence: Synthetic peptide"
STQVHLL

SEQ ID NO: 11100 - protein, 7 aa, Artificial Sequence
  source: /note="Description of Artificial Sequence: Synthetic peptide"
STQVHMM

SEQ ID NO: 11101 - protein, 7 aa, Artificial Sequence
  source: /note="Description of Artificial Sequence: Synthetic peptide"
STQVPNK

SEQ ID NO: 11102 - protein, 7 aa, Artificial Sequence
  source: /note="Description of Artificial Sequence: Synthetic peptide"
STQWRTE

SEQ ID NO: 11103 - protein, 7 aa, Artificial Sequence
  source: /note="Description of Artificial Sequence: Synthetic peptide"
STQYSPV

SEQ ID NO: 11104 - protein, 7 aa, Artificial Sequence
  source: /note="Description of Artificial Sequence: Synthetic peptide"
STRAPTA

SEQ ID NO: 11105 - protein, 7 aa, Artificial Sequence
  source: /note="Description of Artificial Sequence: Synthetic peptide"
STRDTSN

SEQ ID NO: 11106 - protein, 7 aa, Artificial Sequence
  source: /note="Description of Artificial Sequence: Synthetic peptide"
STREAKP

SEQ ID NO: 11107 - protein, 7 aa, Artificial Sequence
  source: /note="Description of Artificial Sequence: Synthetic peptide"
STREDVL

SEQ ID NO: 11108 - protein, 7 aa, Artificial Sequence
  source: /note="Description of Artificial Sequence: Synthetic peptide"
STRFNST

SEQ ID NO: 11109 - protein, 7 aa, Artificial Sequence
  source: /note="Description of Artificial Sequence: Synthetic peptide"
STRPTVN

SEQ ID NO: 11110 - protein, 7 aa, Artificial Sequence
  source: /note="Description of Artificial Sequence: Synthetic peptide"
STRQLQQ

SEQ ID NO: 11111 - protein, 7 aa, Artificial Sequence
  source: /note="Description of Artificial Sequence: Synthetic peptide"
STRSDMY

SEQ ID NO: 11112 - protein, 7 aa, Artificial Sequence
  source: /note="Description of Artificial Sequence: Synthetic peptide"
STRSIAG

SEQ ID NO: 11113 - protein, 7 aa, Artificial Sequence
  source: /note="Description of Artificial Sequence: Synthetic peptide"
STRSVEH

SEQ ID NO: 11114 - protein, 7 aa, Artificial Sequence
  source: /note="Description of Artificial Sequence: Synthetic peptide"
STRTVSN

SEQ ID NO: 11115 - protein, 7 aa, Artificial Sequence
  source: /note="Description of Artificial Sequence: Synthetic peptide"
STRVLTT

SEQ ID NO: 11116 - protein, 7 aa, Artificial Sequence
  source: /note="Description of Artificial Sequence: Synthetic peptide"
STSANLG

SEQ ID NO: 11117 - protein, 7 aa, Artificial Sequence
  source: /note="Description of Artificial Sequence: Synthetic peptide"
STSDTWK

SEQ ID NO: 11118 - protein, 7 aa, Artificial Sequence
  source: /note="Description of Artificial Sequence: Synthetic peptide"
STSEGLK

SEQ ID NO: 11119 - protein, 7 aa, Artificial Sequence
  source: /note="Description of Artificial Sequence: Synthetic peptide"
STSEIDR

SEQ ID NO: 11120 - protein, 7 aa, Artificial Sequence
  source: /note="Description of Artificial Sequence: Synthetic peptide"
STSFAVG

SEQ ID NO: 11121 - protein, 7 aa, Artificial Sequence
  source: /note="Description of Artificial Sequence: Synthetic peptide"
STSKAQC

SEQ ID NO: 11122 - protein, 7 aa, Artificial Sequence
  source: /note="Description of Artificial Sequence: Synthetic peptide"
STSKAQI

SEQ ID NO: 11123 - protein, 7 aa, Artificial Sequence
  source: /note="Description of Artificial Sequence: Synthetic peptide"
STSKYMH

SEQ ID NO: 11124 - protein, 7 aa, Artificial Sequence
  source: /note="Description of Artificial Sequence: Synthetic peptide"
STSLAVQ

SEQ ID NO: 11125 - protein, 7 aa, Artificial Sequence
  source: /note="Description of Artificial Sequence: Synthetic peptide"
STSLGYQ

SEQ ID NO: 11126 - protein, 7 aa, Artificial Sequence
  source: /note="Description of Artificial Sequence: Synthetic peptide"
STSLPSC

SEQ ID NO: 11127 - protein, 7 aa, Artificial Sequence
  source: /note="Description of Artificial Sequence: Synthetic peptide"
STSMMSA

SEQ ID NO: 11128 - protein, 7 aa, Artificial Sequence
  source: /note="Description of Artificial Sequence: Synthetic peptide"
STSMSRT

SEQ ID NO: 11129 - protein, 7 aa, Artificial Sequence
  source: /note="Description of Artificial Sequence: Synthetic peptide"
STSQPLP

SEQ ID NO: 11130 - protein, 7 aa, Artificial Sequence
  source: /note="Description of Artificial Sequence: Synthetic peptide"
STSRNMS

SEQ ID NO: 11131 - protein, 7 aa, Artificial Sequence
  source: /note="Description of Artificial Sequence: Synthetic peptide"
STSSLSA

SEQ ID NO: 11132 - protein, 7 aa, Artificial Sequence
  source: /note="Description of Artificial Sequence: Synthetic peptide"
STSSPRH

SEQ ID NO: 11133 - protein, 7 aa, Artificial Sequence
  source: /note="Description of Artificial Sequence: Synthetic peptide"
STSSSLY

SEQ ID NO: 11134 - protein, 7 aa, Artificial Sequence
  source: /note="Description of Artificial Sequence: Synthetic peptide"
STSSTLS

SEQ ID NO: 11135 - protein, 7 aa, Artificial Sequence
  source: /note="Description of Artificial Sequence: Synthetic peptide"
STSTGAP

SEQ ID NO: 11136 - protein, 7 aa, Artificial Sequence
  source: /note="Description of Artificial Sequence: Synthetic peptide"
STSTLPL

SEQ ID NO: 11137 - protein, 7 aa, Artificial Sequence
  source: /note="Description of Artificial Sequence: Synthetic peptide"
STSTLVH

SEQ ID NO: 11138 - protein, 7 aa, Artificial Sequence
  source: /note="Description of Artificial Sequence: Synthetic peptide"
STSVPPK

SEQ ID NO: 11139 - protein, 7 aa, Artificial Sequence
  source: /note="Description of Artificial Sequence: Synthetic peptide"
STSVRQT

SEQ ID NO: 11140 - protein, 7 aa, Artificial Sequence
  source: /note="Description of Artificial Sequence: Synthetic peptide"
STTAKAM

SEQ ID NO: 11141 - protein, 7 aa, Artificial Sequence
  source: /note="Description of Artificial Sequence: Synthetic peptide"
STTAQTK

SEQ ID NO: 11142 - protein, 7 aa, Artificial Sequence
  source: /note="Description of Artificial Sequence: Synthetic peptide"
STTARSH

SEQ ID NO: 11143 - protein, 7 aa, Artificial Sequence
  source: /note="Description of Artificial Sequence: Synthetic peptide"
STTDKPS

SEQ ID NO: 11144 - protein, 7 aa, Artificial Sequence
  source: /note="Description of Artificial Sequence: Synthetic peptide"
STTHDGR

SEQ ID NO: 11145 - protein, 7 aa, Artificial Sequence
  source: /note="Description of Artificial Sequence: Synthetic peptide"
STTHGRD

SEQ ID NO: 11146 - protein, 7 aa, Artificial Sequence
  source: /note="Description of Artificial Sequence: Synthetic peptide"
STTLHYV

SEQ ID NO: 11147 - protein, 7 aa, Artificial Sequence
  source: /note="Description of Artificial Sequence: Synthetic peptide"
STTLKMP

SEQ ID NO: 11148 - protein, 7 aa, Artificial Sequence
  source: /note="Description of Artificial Sequence: Synthetic peptide"
STTLNGL

SEQ ID NO: 11149 - protein, 7 aa, Artificial Sequence
  source: /note="Description of Artificial Sequence: Synthetic peptide"
STTLTPL

SEQ ID NO: 11150 - protein, 7 aa, Artificial Sequence
  source: /note="Description of Artificial Sequence: Synthetic peptide"
STTNMLL

SEQ ID NO: 11151 - protein, 7 aa, Artificial Sequence
  source: /note="Description of Artificial Sequence: Synthetic peptide"
STTPSPM

SEQ ID NO: 11152 - protein, 7 aa, Artificial Sequence
  source: /note="Description of Artificial Sequence: Synthetic peptide"
STTRSLL

SEQ ID NO: 11153 - protein, 7 aa, Artificial Sequence
  source: /note="Description of Artificial Sequence: Synthetic peptide"
STTRTGG

SEQ ID NO: 11154 - protein, 7 aa, Artificial Sequence
  source: /note="Description of Artificial Sequence: Synthetic peptide"
STTRTTL

SEQ ID NO: 11155 - protein, 7 aa, Artificial Sequence
  source: /note="Description of Artificial Sequence: Synthetic peptide"
STTSPSR

SEQ ID NO: 11156 - protein, 7 aa, Artificial Sequence
  source: /note="Description of Artificial Sequence: Synthetic peptide"
STTSRVE

SEQ ID NO: 11157 - protein, 7 aa, Artificial Sequence
  source: /note="Description of Artificial Sequence: Synthetic peptide"
STTSTLT

SEQ ID NO: 11158 - protein, 7 aa, Artificial Sequence
  source: /note="Description of Artificial Sequence: Synthetic peptide"
STTVITP

SEQ ID NO: 11159 - protein, 7 aa, Artificial Sequence
  source: /note="Description of Artificial Sequence: Synthetic peptide"
STVIKMN

SEQ ID NO: 11160 - protein, 7 aa, Artificial Sequence
  source: /note="Description of Artificial Sequence: Synthetic peptide"
STVINPT

SEQ ID NO: 11161 - protein, 7 aa, Artificial Sequence
  source: /note="Description of Artificial Sequence: Synthetic peptide"
STVIPTP

SEQ ID NO: 11162 - protein, 7 aa, Artificial Sequence
  source: /note="Description of Artificial Sequence: Synthetic peptide"
STVLLTA

SEQ ID NO: 11163 - protein, 7 aa, Artificial Sequence
  source: /note="Description of Artificial Sequence: Synthetic peptide"
STVMTKV

SEQ ID NO: 11164 - protein, 7 aa, Artificial Sequence
  source: /note="Description of Artificial Sequence: Synthetic peptide"
STYMTHS

SEQ ID NO: 11165 - protein, 7 aa, Artificial Sequence
  source: /note="Description of Artificial Sequence: Synthetic peptide"
STYNSPE

SEQ ID NO: 11166 - protein, 7 aa, Artificial Sequence
  source: /note="Description of Artificial Sequence: Synthetic peptide"
SVAAHQH

SEQ ID NO: 11167 - protein, 7 aa, Artificial Sequence
  source: /note="Description of Artificial Sequence: Synthetic peptide"
SVAAIKP

SEQ ID NO: 11168 - protein, 7 aa, Artificial Sequence
  source: /note="Description of Artificial Sequence: Synthetic peptide"
SVAAVSL

SEQ ID NO: 11169 - protein, 7 aa, Artificial Sequence
  source: /note="Description of Artificial Sequence: Synthetic peptide"
SVAGLIK

SEQ ID NO: 11170 - protein, 7 aa, Artificial Sequence
  source: /note="Description of Artificial Sequence: Synthetic peptide"
SVAHNRA

SEQ ID NO: 11171 - protein, 7 aa, Artificial Sequence
  source: /note="Description of Artificial Sequence: Synthetic peptide"
SVAHYGL

SEQ ID NO: 11172 - protein, 7 aa, Artificial Sequence
  source: /note="Description of Artificial Sequence: Synthetic peptide"
SVAPATL

SEQ ID NO: 11173 - protein, 7 aa, Artificial Sequence
  source: /note="Description of Artificial Sequence: Synthetic peptide"
SVAPVKA

SEQ ID NO: 11174 - protein, 7 aa, Artificial Sequence
  source: /note="Description of Artificial Sequence: Synthetic peptide"
SVARNSP

SEQ ID NO: 11175 - protein, 7 aa, Artificial Sequence
  source: /note="Description of Artificial Sequence: Synthetic peptide"
SVASMSS

SEQ ID NO: 11176 - protein, 7 aa, Artificial Sequence
  source: /note="Description of Artificial Sequence: Synthetic peptide"
SVATAQT

SEQ ID NO: 11177 - protein, 7 aa, Artificial Sequence
  source: /note="Description of Artificial Sequence: Synthetic peptide"
SVDAVTG

SEQ ID NO: 11178 - protein, 7 aa, Artificial Sequence
  source: /note="Description of Artificial Sequence: Synthetic peptide"
SVDEGAR

SEQ ID NO: 11179 - protein, 7 aa, Artificial Sequence
  source: /note="Description of Artificial Sequence: Synthetic peptide"
SVDPHNP

SEQ ID NO: 11180 - protein, 7 aa, Artificial Sequence
  source: /note="Description of Artificial Sequence: Synthetic peptide"
SVDSSII

SEQ ID NO: 11181 - protein, 7 aa, Artificial Sequence
  source: /note="Description of Artificial Sequence: Synthetic peptide"
SVDTGHS

SEQ ID NO: 11182 - protein, 7 aa, Artificial Sequence
  source: /note="Description of Artificial Sequence: Synthetic peptide"
SVDYVGV

SEQ ID NO: 11183 - protein, 7 aa, Artificial Sequence
  source: /note="Description of Artificial Sequence: Synthetic peptide"
SVEFSDA

SEQ ID NO: 11184 - protein, 7 aa, Artificial Sequence
  source: /note="Description of Artificial Sequence: Synthetic peptide"
SVEKDDH

SEQ ID NO: 11185 - protein, 7 aa, Artificial Sequence
  source: /note="Description of Artificial Sequence: Synthetic peptide"
SVETGRV

SEQ ID NO: 11186 - protein, 7 aa, Artificial Sequence
  source: /note="Description of Artificial Sequence: Synthetic peptide"
SVETTNY

SEQ ID NO: 11187 - protein, 7 aa, Artificial Sequence
  source: /note="Description of Artificial Sequence: Synthetic peptide"
SVEVSRA

SEQ ID NO: 11188 - protein, 7 aa, Artificial Sequence
  source: /note="Description of Artificial Sequence: Synthetic peptide"
SVFKCEP

SEQ ID NO: 11189 - protein, 7 aa, Artificial Sequence
  source: /note="Description of Artificial Sequence: Synthetic peptide"
SVFPHSA

SEQ ID NO: 11190 - protein, 7 aa, Artificial Sequence
  source: /note="Description of Artificial Sequence: Synthetic peptide"
SVFPLPH

SEQ ID NO: 11191 - protein, 7 aa, Artificial Sequence
  source: /note="Description of Artificial Sequence: Synthetic peptide"
SVGDNGS

SEQ ID NO: 11192 - protein, 7 aa, Artificial Sequence
  source: /note="Description of Artificial Sequence: Synthetic peptide"
SVGLQLE

SEQ ID NO: 11193 - protein, 7 aa, Artificial Sequence
  source: /note="Description of Artificial Sequence: Synthetic peptide"
SVGSAME

SEQ ID NO: 11194 - protein, 7 aa, Artificial Sequence
  source: /note="Description of Artificial Sequence: Synthetic peptide"
SVGSYSP

SEQ ID NO: 11195 - protein, 7 aa, Artificial Sequence
  source: /note="Description of Artificial Sequence: Synthetic peptide"
SVGSYVD

SEQ ID NO: 11196 - protein, 7 aa, Artificial Sequence
  source: /note="Description of Artificial Sequence: Synthetic peptide"
SVGTKDD

SEQ ID NO: 11197 - protein, 7 aa, Artificial Sequence
  source: /note="Description of Artificial Sequence: Synthetic peptide"
SVHDHRS

SEQ ID NO: 11198 - protein, 7 aa, Artificial Sequence
  source: /note="Description of Artificial Sequence: Synthetic peptide"
SVHEHSM

SEQ ID NO: 11199 - protein, 7 aa, Artificial Sequence
  source: /note="Description of Artificial Sequence: Synthetic peptide"
SVHPNQA

SEQ ID NO: 11200 - protein, 7 aa, Artificial Sequence
  source: /note="Description of Artificial Sequence: Synthetic peptide"
SVILRAT

SEQ ID NO: 11201 - protein, 7 aa, Artificial Sequence
  source: /note="Description of Artificial Sequence: Synthetic peptide"
SVINSRG

SEQ ID NO: 11202 - protein, 7 aa, Artificial Sequence
  source: /note="Description of Artificial Sequence: Synthetic peptide"
SVISRSE

SEQ ID NO: 11203 - protein, 7 aa, Artificial Sequence
  source: /note="Description of Artificial Sequence: Synthetic peptide"
SVITWED

SEQ ID NO: 11204 - protein, 7 aa, Artificial Sequence
  source: /note="Description of Artificial Sequence: Synthetic peptide"
SVKPLNH

SEQ ID NO: 11205 - protein, 7 aa, Artificial Sequence
  source: /note="Description of Artificial Sequence: Synthetic peptide"
SVKVLRP

SEQ ID NO: 11206 - protein, 7 aa, Artificial Sequence
  source: /note="Description of Artificial Sequence: Synthetic peptide"
SVLDGPP

SEQ ID NO: 11207 - protein, 7 aa, Artificial Sequence
  source: /note="Description of Artificial Sequence: Synthetic peptide"
SVLNLPS

SEQ ID NO: 11208 - protein, 7 aa, Artificial Sequence
  source: /note="Description of Artificial Sequence: Synthetic peptide"
SVLPEPS

SEQ ID NO: 11209 - protein, 7 aa, Artificial Sequence
  source: /note="Description of Artificial Sequence: Synthetic peptide"
SVLRHPT

SEQ ID NO: 11210 - protein, 7 aa, Artificial Sequence
  source: /note="Description of Artificial Sequence: Synthetic peptide"
SVLRTTP

SEQ ID NO: 11211 - protein, 7 aa, Artificial Sequence
  source: /note="Description of Artificial Sequence: Synthetic peptide"
SVLSAVP

SEQ ID NO: 11212 - protein, 7 aa, Artificial Sequence
  source: /note="Description of Artificial Sequence: Synthetic peptide"
SVLSIDR

SEQ ID NO: 11213 - protein, 7 aa, Artificial Sequence
  source: /note="Description of Artificial Sequence: Synthetic peptide"
SVLSSSV

SEQ ID NO: 11214 - protein, 7 aa, Artificial Sequence
  source: /note="Description of Artificial Sequence: Synthetic peptide"
SVMANQA

SEQ ID NO: 11215 - protein, 7 aa, Artificial Sequence
  source: /note="Description of Artificial Sequence: Synthetic peptide"
SVMPKPQ

SEQ ID NO: 11216 - protein, 7 aa, Artificial Sequence
  source: /note="Description of Artificial Sequence: Synthetic peptide"
SVNATRG

SEQ ID NO: 11217 - protein, 7 aa, Artificial Sequence
  source: /note="Description of Artificial Sequence: Synthetic peptide"
SVNGNDV

SEQ ID NO: 11218 - protein, 7 aa, Artificial Sequence
  source: /note="Description of Artificial Sequence: Synthetic peptide"
SVNGSWK

SEQ ID NO: 11219 - protein, 7 aa, Artificial Sequence
  source: /note="Description of Artificial Sequence: Synthetic peptide"
SVPEYNG

SEQ ID NO: 11220 - protein, 7 aa, Artificial Sequence
  source: /note="Description of Artificial Sequence: Synthetic peptide"
SVPGTGS

SEQ ID NO: 11221 - protein, 7 aa, Artificial Sequence
  source: /note="Description of Artificial Sequence: Synthetic peptide"
SVPHTST

SEQ ID NO: 11222 - protein, 7 aa, Artificial Sequence
  source: /note="Description of Artificial Sequence: Synthetic peptide"
SVPQMYS

SEQ ID NO: 11223 - protein, 7 aa, Artificial Sequence
  source: /note="Description of Artificial Sequence: Synthetic peptide"
SVPSASK

SEQ ID NO: 11224 - protein, 7 aa, Artificial Sequence
  source: /note="Description of Artificial Sequence: Synthetic peptide"
SVPSSTR

SEQ ID NO: 11225 - protein, 7 aa, Artificial Sequence
  source: /note="Description of Artificial Sequence: Synthetic peptide"
SVPVTPG

SEQ ID NO: 11226 - protein, 7 aa, Artificial Sequence
  source: /note="Description of Artificial Sequence: Synthetic peptide"
SVPYVGT

SEQ ID NO: 11227 - protein, 7 aa, Artificial Sequence
  source: /note="Description of Artificial Sequence: Synthetic peptide"
SVQREER

SEQ ID NO: 11228 - protein, 7 aa, Artificial Sequence
  source: /note="Description of Artificial Sequence: Synthetic peptide"
SVQRGVD

SEQ ID NO: 11229 - protein, 7 aa, Artificial Sequence
  source: /note="Description of Artificial Sequence: Synthetic peptide"
SVQTRPE

SEQ ID NO: 11230 - protein, 7 aa, Artificial Sequence
  source: /note="Description of Artificial Sequence: Synthetic peptide"
SVQVGYH

SEQ ID NO: 11231 - protein, 7 aa, Artificial Sequence
  source: /note="Description of Artificial Sequence: Synthetic peptide"
SVRAESA

SEQ ID NO: 11232 - protein, 7 aa, Artificial Sequence
  source: /note="Description of Artificial Sequence: Synthetic peptide"
SVRHVEP

SEQ ID NO: 11233 - protein, 7 aa, Artificial Sequence
  source: /note="Description of Artificial Sequence: Synthetic peptide"
SVRSASQ

SEQ ID NO: 11234 - protein, 7 aa, Artificial Sequence
  source: /note="Description of Artificial Sequence: Synthetic peptide"
SVRSLSP

SEQ ID NO: 11235 - protein, 7 aa, Artificial Sequence
  source: /note="Description of Artificial Sequence: Synthetic peptide"
SVRSNHA

SEQ ID NO: 11236 - protein, 7 aa, Artificial Sequence
  source: /note="Description of Artificial Sequence: Synthetic peptide"
SVRTKDS

SEQ ID NO: 11237 - protein, 7 aa, Artificial Sequence
  source: /note="Description of Artificial Sequence: Synthetic peptide"
SVSFSSS

SEQ ID NO: 11238 - protein, 7 aa, Artificial Sequence
  source: /note="Description of Artificial Sequence: Synthetic peptide"
SVSGAAA

SEQ ID NO: 11239 - protein, 7 aa, Artificial Sequence
  source: /note="Description of Artificial Sequence: Synthetic peptide"
SVSHNAP

SEQ ID NO: 11240 - protein, 7 aa, Artificial Sequence
  source: /note="Description of Artificial Sequence: Synthetic peptide"
SVSKEGT

SEQ ID NO: 11241 - protein, 7 aa, Artificial Sequence
  source: /note="Description of Artificial Sequence: Synthetic peptide"
SVSLADP

SEQ ID NO: 11242 - protein, 7 aa, Artificial Sequence
  source: /note="Description of Artificial Sequence: Synthetic peptide"
SVSLELY

SEQ ID NO: 11243 - protein, 7 aa, Artificial Sequence
  source: /note="Description of Artificial Sequence: Synthetic peptide"
SVSLGPK

SEQ ID NO: 11244 - protein, 7 aa, Artificial Sequence
  source: /note="Description of Artificial Sequence: Synthetic peptide"
SVSPHQA

SEQ ID NO: 11245 - protein, 7 aa, Artificial Sequence
  source: /note="Description of Artificial Sequence: Synthetic peptide"
SVSRMVA

SEQ ID NO: 11246 - protein, 7 aa, Artificial Sequence
  source: /note="Description of Artificial Sequence: Synthetic peptide"
SVSRPAL

SEQ ID NO: 11247 - protein, 7 aa, Artificial Sequence
  source: /note="Description of Artificial Sequence: Synthetic peptide"
SVSRQQI

SEQ ID NO: 11248 - protein, 7 aa, Artificial Sequence
  source: /note="Description of Artificial Sequence: Synthetic peptide"
SVSSQNT

SEQ ID NO: 11249 - protein, 7 aa, Artificial Sequence
  source: /note="Description of Artificial Sequence: Synthetic peptide"
SVSSSQL

SEQ ID NO: 11250 - protein, 7 aa, Artificial Sequence
  source: /note="Description of Artificial Sequence: Synthetic peptide"
SVSTANP

SEQ ID NO: 11251 - protein, 7 aa, Artificial Sequence
  source: /note="Description of Artificial Sequence: Synthetic peptide"
SVSTLPM

SEQ ID NO: 11252 - protein, 7 aa, Artificial Sequence
  source: /note="Description of Artificial Sequence: Synthetic peptide"
SVSTNKY

SEQ ID NO: 11253 - protein, 7 aa, Artificial Sequence
  source: /note="Description of Artificial Sequence: Synthetic peptide"
SVSVDYM

SEQ ID NO: 11254 - protein, 7 aa, Artificial Sequence
  source: /note="Description of Artificial Sequence: Synthetic peptide"
SVTAKTY

SEQ ID NO: 11255 - protein, 7 aa, Artificial Sequence
  source: /note="Description of Artificial Sequence: Synthetic peptide"
SVTDGVL

SEQ ID NO: 11256 - protein, 7 aa, Artificial Sequence
  source: /note="Description of Artificial Sequence: Synthetic peptide"
SVTEHVI

SEQ ID NO: 11257 - protein, 7 aa, Artificial Sequence
  source: /note="Description of Artificial Sequence: Synthetic peptide"
SVTGANT

SEQ ID NO: 11258 - protein, 7 aa, Artificial Sequence
  source: /note="Description of Artificial Sequence: Synthetic peptide"
SVTHLFK

SEQ ID NO: 11259 - protein, 7 aa, Artificial Sequence
  source: /note="Description of Artificial Sequence: Synthetic peptide"
SVTPTRA

SEQ ID NO: 11260 - protein, 7 aa, Artificial Sequence
  source: /note="Description of Artificial Sequence: Synthetic peptide"
SVTQMFK

SEQ ID NO: 11261 - protein, 7 aa, Artificial Sequence
  source: /note="Description of Artificial Sequence: Synthetic peptide"
SVTRAPY

SEQ ID NO: 11262 - protein, 7 aa, Artificial Sequence
  source: /note="Description of Artificial Sequence: Synthetic peptide"
SVTTRAI

SEQ ID NO: 11263 - protein, 7 aa, Artificial Sequence
  source: /note="Description of Artificial Sequence: Synthetic peptide"
SVVAAVI

SEQ ID NO: 11264 - protein, 7 aa, Artificial Sequence
  source: /note="Description of Artificial Sequence: Synthetic peptide"
SVVGTHA

SEQ ID NO: 11265 - protein, 7 aa, Artificial Sequence
  source: /note="Description of Artificial Sequence: Synthetic peptide"
SVVPHDL

SEQ ID NO: 11266 - protein, 7 aa, Artificial Sequence
  source: /note="Description of Artificial Sequence: Synthetic peptide"
SVVRKEA

SEQ ID NO: 11267 - protein, 7 aa, Artificial Sequence
  source: /note="Description of Artificial Sequence: Synthetic peptide"
SVVSRLG

SEQ ID NO: 11268 - protein, 7 aa, Artificial Sequence
  source: /note="Description of Artificial Sequence: Synthetic peptide"
SVVSSQG

SEQ ID NO: 11269 - protein, 7 aa, Artificial Sequence
  source: /note="Description of Artificial Sequence: Synthetic peptide"
SVYTQAP

SEQ ID NO: 11270 - protein, 7 aa, Artificial Sequence
  source: /note="Description of Artificial Sequence: Synthetic peptide"
SWDASAL

SEQ ID NO: 11271 - protein, 7 aa, Artificial Sequence
  source: /note="Description of Artificial Sequence: Synthetic peptide"
SWGAKEG

SEQ ID NO: 11272 - protein, 7 aa, Artificial Sequence
  source: /note="Description of Artificial Sequence: Synthetic peptide"
SWGETAK

SEQ ID NO: 11273 - protein, 7 aa, Artificial Sequence
  source: /note="Description of Artificial Sequence: Synthetic peptide"
SWHNSQP

SEQ ID NO: 11274 - protein, 7 aa, Artificial Sequence
  source: /note="Description of Artificial Sequence: Synthetic peptide"
SWPSNGV

SEQ ID NO: 11275 - protein, 7 aa, Artificial Sequence
  source: /note="Description of Artificial Sequence: Synthetic peptide"
SWQTSIA

SEQ ID NO: 11276 - protein, 7 aa, Artificial Sequence
  source: /note="Description of Artificial Sequence: Synthetic peptide"
SWRDVPP

SEQ ID NO: 11277 - protein, 7 aa, Artificial Sequence
  source: /note="Description of Artificial Sequence: Synthetic peptide"
SWSHEQE

SEQ ID NO: 11278 - protein, 7 aa, Artificial Sequence
  source: /note="Description of Artificial Sequence: Synthetic peptide"
SYAKSLD

SEQ ID NO: 11279 - protein, 7 aa, Artificial Sequence
  source: /note="Description of Artificial Sequence: Synthetic peptide"
SYARTSL

SEQ ID NO: 11280 - protein, 7 aa, Artificial Sequence
  source: /note="Description of Artificial Sequence: Synthetic peptide"
SYASLTP

SEQ ID NO: 11281 - protein, 7 aa, Artificial Sequence
  source: /note="Description of Artificial Sequence: Synthetic peptide"
SYASRTV

SEQ ID NO: 11282 - protein, 7 aa, Artificial Sequence
  source: /note="Description of Artificial Sequence: Synthetic peptide"
SYATSLT

SEQ ID NO: 11283 - protein, 7 aa, Artificial Sequence
  source: /note="Description of Artificial Sequence: Synthetic peptide"
SYDRSPA

SEQ ID NO: 11284 - protein, 7 aa, Artificial Sequence
  source: /note="Description of Artificial Sequence: Synthetic peptide"
SYEASKY

SEQ ID NO: 11285 - protein, 7 aa, Artificial Sequence
  source: /note="Description of Artificial Sequence: Synthetic peptide"
SYEDDSC

SEQ ID NO: 11286 - protein, 7 aa, Artificial Sequence
  source: /note="Description of Artificial Sequence: Synthetic peptide"
SYEPNKL

SEQ ID NO: 11287 - protein, 7 aa, Artificial Sequence
  source: /note="Description of Artificial Sequence: Synthetic peptide"
SYGGTLL

SEQ ID NO: 11288 - protein, 7 aa, Artificial Sequence
  source: /note="Description of Artificial Sequence: Synthetic peptide"
SYGKEYV

SEQ ID NO: 11289 - protein, 7 aa, Artificial Sequence
  source: /note="Description of Artificial Sequence: Synthetic peptide"
SYGLPAY

SEQ ID NO: 11290 - protein, 7 aa, Artificial Sequence
  source: /note="Description of Artificial Sequence: Synthetic peptide"
SYGPIKT

SEQ ID NO: 11291 - protein, 7 aa, Artificial Sequence
  source: /note="Description of Artificial Sequence: Synthetic peptide"
SYGRGAE

SEQ ID NO: 11292 - protein, 7 aa, Artificial Sequence
  source: /note="Description of Artificial Sequence: Synthetic peptide"
SYGSGQI

SEQ ID NO: 11293 - protein, 7 aa, Artificial Sequence
  source: /note="Description of Artificial Sequence: Synthetic peptide"
SYGSKLP

SEQ ID NO: 11294 - protein, 7 aa, Artificial Sequence
  source: /note="Description of Artificial Sequence: Synthetic peptide"
SYGTAPI

SEQ ID NO: 11295 - protein, 7 aa, Artificial Sequence
  source: /note="Description of Artificial Sequence: Synthetic peptide"
SYGVPRP

SEQ ID NO: 11296 - protein, 7 aa, Artificial Sequence
  source: /note="Description of Artificial Sequence: Synthetic peptide"
SYHPKLN

SEQ ID NO: 11297 - protein, 7 aa, Artificial Sequence
  source: /note="Description of Artificial Sequence: Synthetic peptide"
SYIPSTI

SEQ ID NO: 11298 - protein, 7 aa, Artificial Sequence
  source: /note="Description of Artificial Sequence: Synthetic peptide"
SYIREDP

SEQ ID NO: 11299 - protein, 7 aa, Artificial Sequence
  source: /note="Description of Artificial Sequence: Synthetic peptide"
SYKGSYM

SEQ ID NO: 11300 - protein, 7 aa, Artificial Sequence
  source: /note="Description of Artificial Sequence: Synthetic peptide"
SYKHMPP

SEQ ID NO: 11301 - protein, 7 aa, Artificial Sequence
  source: /note="Description of Artificial Sequence: Synthetic peptide"
SYKSQIA

SEQ ID NO: 11302 - protein, 7 aa, Artificial Sequence
  source: /note="Description of Artificial Sequence: Synthetic peptide"
SYLGIAP

SEQ ID NO: 11303 - protein, 7 aa, Artificial Sequence
  source: /note="Description of Artificial Sequence: Synthetic peptide"
SYLNPMN

SEQ ID NO: 11304 - protein, 7 aa, Artificial Sequence
  source: /note="Description of Artificial Sequence: Synthetic peptide"
SYLPPAP

SEQ ID NO: 11305 - protein, 7 aa, Artificial Sequence
  source: /note="Description of Artificial Sequence: Synthetic peptide"
SYMASLP

SEQ ID NO: 11306 - protein, 7 aa, Artificial Sequence
  source: /note="Description of Artificial Sequence: Synthetic peptide"
SYMPQTV

SEQ ID NO: 11307 - protein, 7 aa, Artificial Sequence
  source: /note="Description of Artificial Sequence: Synthetic peptide"
SYMSPVS

SEQ ID NO: 11308 - protein, 7 aa, Artificial Sequence
  source: /note="Description of Artificial Sequence: Synthetic peptide"
SYMTKDL

SEQ ID NO: 11309 - protein, 7 aa, Artificial Sequence
  source: /note="Description of Artificial Sequence: Synthetic peptide"
SYPAKPS

SEQ ID NO: 11310 - protein, 7 aa, Artificial Sequence
  source: /note="Description of Artificial Sequence: Synthetic peptide"
SYPASSR

SEQ ID NO: 11311 - protein, 7 aa, Artificial Sequence
  source: /note="Description of Artificial Sequence: Synthetic peptide"
SYPKSYE

SEQ ID NO: 11312 - protein, 7 aa, Artificial Sequence
  source: /note="Description of Artificial Sequence: Synthetic peptide"
SYPVSVP

SEQ ID NO: 11313 - protein, 7 aa, Artificial Sequence
  source: /note="Description of Artificial Sequence: Synthetic peptide"
SYQAIST

SEQ ID NO: 11314 - protein, 7 aa, Artificial Sequence
  source: /note="Description of Artificial Sequence: Synthetic peptide"
SYRPESG

SEQ ID NO: 11315 - protein, 7 aa, Artificial Sequence
  source: /note="Description of Artificial Sequence: Synthetic peptide"
SYRPETN

SEQ ID NO: 11316 - protein, 7 aa, Artificial Sequence
  source: /note="Description of Artificial Sequence: Synthetic peptide"
SYRVNTG

SEQ ID NO: 11317 - protein, 7 aa, Artificial Sequence
  source: /note="Description of Artificial Sequence: Synthetic peptide"
SYSASEF

SEQ ID NO: 11318 - protein, 7 aa, Artificial Sequence
  source: /note="Description of Artificial Sequence: Synthetic peptide"
SYSATTV

SEQ ID NO: 11319 - protein, 7 aa, Artificial Sequence
  source: /note="Description of Artificial Sequence: Synthetic peptide"
SYSGGCL

SEQ ID NO: 11320 - protein, 7 aa, Artificial Sequence
  source: /note="Description of Artificial Sequence: Synthetic peptide"
SYSHLSG

SEQ ID NO: 11321 - protein, 7 aa, Artificial Sequence
  source: /note="Description of Artificial Sequence: Synthetic peptide"
SYSMAHP

SEQ ID NO: 11322 - protein, 7 aa, Artificial Sequence
  source: /note="Description of Artificial Sequence: Synthetic peptide"
SYSSDRS

SEQ ID NO: 11323 - protein, 7 aa, Artificial Sequence
  source: /note="Description of Artificial Sequence: Synthetic peptide"
SYTDAAL

SEQ ID NO: 11324 - protein, 7 aa, Artificial Sequence
  source: /note="Description of Artificial Sequence: Synthetic peptide"
SYTHVSG

SEQ ID NO: 11325 - protein, 7 aa, Artificial Sequence
  source: /note="Description of Artificial Sequence: Synthetic peptide"
SYTKDVD

SEQ ID NO: 11326 - protein, 7 aa, Artificial Sequence
  source: /note="Description of Artificial Sequence: Synthetic peptide"
SYTKSAP

SEQ ID NO: 11327 - protein, 7 aa, Artificial Sequence
  source: /note="Description of Artificial Sequence: Synthetic peptide"
SYTSPSS

SEQ ID NO: 11328 - protein, 7 aa, Artificial Sequence
  source: /note="Description of Artificial Sequence: Synthetic peptide"
SYTVDSH

SEQ ID NO: 11329 - protein, 7 aa, Artificial Sequence
  source: /note="Description of Artificial Sequence: Synthetic peptide"
SYVKPAE

SEQ ID NO: 11330 - protein, 7 aa, Artificial Sequence
  source: /note="Description of Artificial Sequence: Synthetic peptide"
SYVNNPG

SEQ ID NO: 11331 - protein, 7 aa, Artificial Sequence
  source: /note="Description of Artificial Sequence: Synthetic peptide"
SYVRPTS

SEQ ID NO: 11332 - protein, 7 aa, Artificial Sequence
  source: /note="Description of Artificial Sequence: Synthetic peptide"
SYVSGAA

SEQ ID NO: 11333 - protein, 7 aa, Artificial Sequence
  source: /note="Description of Artificial Sequence: Synthetic peptide"
TAAADRV

SEQ ID NO: 11334 - protein, 7 aa, Artificial Sequence
  source: /note="Description of Artificial Sequence: Synthetic peptide"
TAAASNR

SEQ ID NO: 11335 - protein, 7 aa, Artificial Sequence
  source: /note="Description of Artificial Sequence: Synthetic peptide"
TAAASVR

SEQ ID NO: 11336 - protein, 7 aa, Artificial Sequence
  source: /note="Description of Artificial Sequence: Synthetic peptide"
TAADNDE

SEQ ID NO: 11337 - protein, 7 aa, Artificial Sequence
  source: /note="Description of Artificial Sequence: Synthetic peptide"
TAAFDRV

SEQ ID NO: 11338 - protein, 7 aa, Artificial Sequence
  source: /note="Description of Artificial Sequence: Synthetic peptide"
TAAHLGN

SEQ ID NO: 11339 - protein, 7 aa, Artificial Sequence
  source: /note="Description of Artificial Sequence: Synthetic peptide"
TAAKSAG

SEQ ID NO: 11340 - protein, 7 aa, Artificial Sequence
  source: /note="Description of Artificial Sequence: Synthetic peptide"
TAALTGH

SEQ ID NO: 11341 - protein, 7 aa, Artificial Sequence
  source: /note="Description of Artificial Sequence: Synthetic peptide"
TAARFAA

SEQ ID NO: 11342 - protein, 7 aa, Artificial Sequence
  source: /note="Description of Artificial Sequence: Synthetic peptide"
TAARSSD

SEQ ID NO: 11343 - protein, 7 aa, Artificial Sequence
  source: /note="Description of Artificial Sequence: Synthetic peptide"
TAASHST

SEQ ID NO: 11344 - protein, 7 aa, Artificial Sequence
  source: /note="Description of Artificial Sequence: Synthetic peptide"
TAATNVN

SEQ ID NO: 11345 - protein, 7 aa, Artificial Sequence
  source: /note="Description of Artificial Sequence: Synthetic peptide"
TAAVTNT

SEQ ID NO: 11346 - protein, 7 aa, Artificial Sequence
  source: /note="Description of Artificial Sequence: Synthetic peptide"
TADRMMS

SEQ ID NO: 11347 - protein, 7 aa, Artificial Sequence
  source: /note="Description of Artificial Sequence: Synthetic peptide"
TAEHTRF

SEQ ID NO: 11348 - protein, 7 aa, Artificial Sequence
  source: /note="Description of Artificial Sequence: Synthetic peptide"
TAENLSP

SEQ ID NO: 11349 - protein, 7 aa, Artificial Sequence
  source: /note="Description of Artificial Sequence: Synthetic peptide"
TAEPVRT

SEQ ID NO: 11350 - protein, 7 aa, Artificial Sequence
  source: /note="Description of Artificial Sequence: Synthetic peptide"
TAFQTIE

SEQ ID NO: 11351 - protein, 7 aa, Artificial Sequence
  source: /note="Description of Artificial Sequence: Synthetic peptide"
TAFRMDY

SEQ ID NO: 11352 - protein, 7 aa, Artificial Sequence
  source: /note="Description of Artificial Sequence: Synthetic peptide"
TAGGQPL

SEQ ID NO: 11353 - protein, 7 aa, Artificial Sequence
  source: /note="Description of Artificial Sequence: Synthetic peptide"
TAGGTTP

SEQ ID NO: 11354 - protein, 7 aa, Artificial Sequence
  source: /note="Description of Artificial Sequence: Synthetic peptide"
TAGLGVP

SEQ ID NO: 11355 - protein, 7 aa, Artificial Sequence
  source: /note="Description of Artificial Sequence: Synthetic peptide"
TAGNLIP

SEQ ID NO: 11356 - protein, 7 aa, Artificial Sequence
  source: /note="Description of Artificial Sequence: Synthetic peptide"
TAGPHRV

SEQ ID NO: 11357 - protein, 7 aa, Artificial Sequence
  source: /note="Description of Artificial Sequence: Synthetic peptide"
TAGVPAI

SEQ ID NO: 11358 - protein, 7 aa, Artificial Sequence
  source: /note="Description of Artificial Sequence: Synthetic peptide"
TAHEERN

SEQ ID NO: 11359 - protein, 7 aa, Artificial Sequence
  source: /note="Description of Artificial Sequence: Synthetic peptide"
TAHFSAT

SEQ ID NO: 11360 - protein, 7 aa, Artificial Sequence
  source: /note="Description of Artificial Sequence: Synthetic peptide"
TAHPFPP

SEQ ID NO: 11361 - protein, 7 aa, Artificial Sequence
  source: /note="Description of Artificial Sequence: Synthetic peptide"
TAHQLIA

SEQ ID NO: 11362 - protein, 7 aa, Artificial Sequence
  source: /note="Description of Artificial Sequence: Synthetic peptide"
TAHSLQS

SEQ ID NO: 11363 - protein, 7 aa, Artificial Sequence
  source: /note="Description of Artificial Sequence: Synthetic peptide"
TAHSYAH

SEQ ID NO: 11364 - protein, 7 aa, Artificial Sequence
  source: /note="Description of Artificial Sequence: Synthetic peptide"
TAHVFPA

SEQ ID NO: 11365 - protein, 7 aa, Artificial Sequence
  source: /note="Description of Artificial Sequence: Synthetic peptide"
TAIGISP

SEQ ID NO: 11366 - protein, 7 aa, Artificial Sequence
  source: /note="Description of Artificial Sequence: Synthetic peptide"
TAIPFPA

SEQ ID NO: 11367 - protein, 7 aa, Artificial Sequence
  source: /note="Description of Artificial Sequence: Synthetic peptide"
TAISSRA

SEQ ID NO: 11368 - protein, 7 aa, Artificial Sequence
  source: /note="Description of Artificial Sequence: Synthetic peptide"
TAKATVE

SEQ ID NO: 11369 - protein, 7 aa, Artificial Sequence
  source: /note="Description of Artificial Sequence: Synthetic peptide"
TAKSSNN

SEQ ID NO: 11370 - protein, 7 aa, Artificial Sequence
  source: /note="Description of Artificial Sequence: Synthetic peptide"
TAKTSAI

SEQ ID NO: 11371 - protein, 7 aa, Artificial Sequence
  source: /note="Description of Artificial Sequence: Synthetic peptide"
TAKYDHL

SEQ ID NO: 11372 - protein, 7 aa, Artificial Sequence
  source: /note="Description of Artificial Sequence: Synthetic peptide"
TALFQDA

SEQ ID NO: 11373 - protein, 7 aa, Artificial Sequence
  source: /note="Description of Artificial Sequence: Synthetic peptide"
TALHADV

SEQ ID NO: 11374 - protein, 7 aa, Artificial Sequence
  source: /note="Description of Artificial Sequence: Synthetic peptide"
TALHYSE

SEQ ID NO: 11375 - protein, 7 aa, Artificial Sequence
  source: /note="Description of Artificial Sequence: Synthetic peptide"
TAMPMKI

SEQ ID NO: 11376 - protein, 7 aa, Artificial Sequence
  source: /note="Description of Artificial Sequence: Synthetic peptide"
TAMQMTP

SEQ ID NO: 11377 - protein, 7 aa, Artificial Sequence
  source: /note="Description of Artificial Sequence: Synthetic peptide"
TAMQTAM

SEQ ID NO: 11378 - protein, 7 aa, Artificial Sequence
  source: /note="Description of Artificial Sequence: Synthetic peptide"
TAMTTMG

SEQ ID NO: 11379 - protein, 7 aa, Artificial Sequence
  source: /note="Description of Artificial Sequence: Synthetic peptide"
TANPLST

SEQ ID NO: 11380 - protein, 7 aa, Artificial Sequence
  source: /note="Description of Artificial Sequence: Synthetic peptide"
TANVPAR

SEQ ID NO: 11381 - protein, 7 aa, Artificial Sequence
  source: /note="Description of Artificial Sequence: Synthetic peptide"
TANVRSM

SEQ ID NO: 11382 - protein, 7 aa, Artificial Sequence
  source: /note="Description of Artificial Sequence: Synthetic peptide"
TAPERTN

SEQ ID NO: 11383 - protein, 7 aa, Artificial Sequence
  source: /note="Description of Artificial Sequence: Synthetic peptide"
TAPGHAS

SEQ ID NO: 11384 - protein, 7 aa, Artificial Sequence
  source: /note="Description of Artificial Sequence: Synthetic peptide"
TAPPTDR

SEQ ID NO: 11385 - protein, 7 aa, Artificial Sequence
  source: /note="Description of Artificial Sequence: Synthetic peptide"
TAPRSSE

SEQ ID NO: 11386 - protein, 7 aa, Artificial Sequence
  source: /note="Description of Artificial Sequence: Synthetic peptide"
TAPSRMG

SEQ ID NO: 11387 - protein, 7 aa, Artificial Sequence
  source: /note="Description of Artificial Sequence: Synthetic peptide"
TAPTGTI

SEQ ID NO: 11388 - protein, 7 aa, Artificial Sequence
  source: /note="Description of Artificial Sequence: Synthetic peptide"
TAPYGDA

SEQ ID NO: 11389 - protein, 7 aa, Artificial Sequence
  source: /note="Description of Artificial Sequence: Synthetic peptide"
TAQEGRT

SEQ ID NO: 11390 - protein, 7 aa, Artificial Sequence
  source: /note="Description of Artificial Sequence: Synthetic peptide"
TAQLTAH

SEQ ID NO: 11391 - protein, 7 aa, Artificial Sequence
  source: /note="Description of Artificial Sequence: Synthetic peptide"
TAQLTSS

SEQ ID NO: 11392 - protein, 7 aa, Artificial Sequence
  source: /note="Description of Artificial Sequence: Synthetic peptide"
TAQRGPA

SEQ ID NO: 11393 - protein, 7 aa, Artificial Sequence
  source: /note="Description of Artificial Sequence: Synthetic peptide"
TARDSSP

SEQ ID NO: 11394 - protein, 7 aa, Artificial Sequence
  source: /note="Description of Artificial Sequence: Synthetic peptide"
TARGLVP

SEQ ID NO: 11395 - protein, 7 aa, Artificial Sequence
  source: /note="Description of Artificial Sequence: Synthetic peptide"
TARGNML

SEQ ID NO: 11396 - protein, 7 aa, Artificial Sequence
  source: /note="Description of Artificial Sequence: Synthetic peptide"
TARGSPL

SEQ ID NO: 11397 - protein, 7 aa, Artificial Sequence
  source: /note="Description of Artificial Sequence: Synthetic peptide"
TARPPGV

SEQ ID NO: 11398 - protein, 7 aa, Artificial Sequence
  source: /note="Description of Artificial Sequence: Synthetic peptide"
TARSSVT

SEQ ID NO: 11399 - protein, 7 aa, Artificial Sequence
  source: /note="Description of Artificial Sequence: Synthetic peptide"
TARTLIS

SEQ ID NO: 11400 - protein, 7 aa, Artificial Sequence
  source: /note="Description of Artificial Sequence: Synthetic peptide"
TASAART

SEQ ID NO: 11401 - protein, 7 aa, Artificial Sequence
  source: /note="Description of Artificial Sequence: Synthetic peptide"
TASATYP

SEQ ID NO: 11402 - protein, 7 aa, Artificial Sequence
  source: /note="Description of Artificial Sequence: Synthetic peptide"
TASFSST

SEQ ID NO: 11403 - protein, 7 aa, Artificial Sequence
  source: /note="Description of Artificial Sequence: Synthetic peptide"
TASGSER

SEQ ID NO: 11404 - protein, 7 aa, Artificial Sequence
  source: /note="Description of Artificial Sequence: Synthetic peptide"
TASKNDY

SEQ ID NO: 11405 - protein, 7 aa, Artificial Sequence
  source: /note="Description of Artificial Sequence: Synthetic peptide"
TASMGER

SEQ ID NO: 11406 - protein, 7 aa, Artificial Sequence
  source: /note="Description of Artificial Sequence: Synthetic peptide"
TASSMGK

SEQ ID NO: 11407 - protein, 7 aa, Artificial Sequence
  source: /note="Description of Artificial Sequence: Synthetic peptide"
TASTVKM

SEQ ID NO: 11408 - protein, 7 aa, Artificial Sequence
  source: /note="Description of Artificial Sequence: Synthetic peptide"
TASVPMK

SEQ ID NO: 11409 - protein, 7 aa, Artificial Sequence
  source: /note="Description of Artificial Sequence: Synthetic peptide"
TASYSPK

SEQ ID NO: 11410 - protein, 7 aa, Artificial Sequence
  source: /note="Description of Artificial Sequence: Synthetic peptide"
TATPHIG

SEQ ID NO: 11411 - protein, 7 aa, Artificial Sequence
  source: /note="Description of Artificial Sequence: Synthetic peptide"
TATRNEV

SEQ ID NO: 11412 - protein, 7 aa, Artificial Sequence
  source: /note="Description of Artificial Sequence: Synthetic peptide"
TATRTGP

SEQ ID NO: 11413 - protein, 7 aa, Artificial Sequence
  source: /note="Description of Artificial Sequence: Synthetic peptide"
TATYPND

SEQ ID NO: 11414 - protein, 7 aa, Artificial Sequence
  source: /note="Description of Artificial Sequence: Synthetic peptide"
TAVAHPA

SEQ ID NO: 11415 - protein, 7 aa, Artificial Sequence
  source: /note="Description of Artificial Sequence: Synthetic peptide"
TAVPEWT

SEQ ID NO: 11416 - protein, 7 aa, Artificial Sequence
  source: /note="Description of Artificial Sequence: Synthetic peptide"
TAVQEHT

SEQ ID NO: 11417 - protein, 7 aa, Artificial Sequence
  source: /note="Description of Artificial Sequence: Synthetic peptide"
TAVRSIS

SEQ ID NO: 11418 - protein, 7 aa, Artificial Sequence
  source: /note="Description of Artificial Sequence: Synthetic peptide"
TAVVKFP

SEQ ID NO: 11419 - protein, 7 aa, Artificial Sequence
  source: /note="Description of Artificial Sequence: Synthetic peptide"
TAVYATA

SEQ ID NO: 11420 - protein, 7 aa, Artificial Sequence
  source: /note="Description of Artificial Sequence: Synthetic peptide"
TAVYSKG

SEQ ID NO: 11421 - protein, 7 aa, Artificial Sequence
  source: /note="Description of Artificial Sequence: Synthetic peptide"
TAWDPES

SEQ ID NO: 11422 - protein, 7 aa, Artificial Sequence
  source: /note="Description of Artificial Sequence: Synthetic peptide"
TAYCQQY

SEQ ID NO: 11423 - protein, 7 aa, Artificial Sequence
  source: /note="Description of Artificial Sequence: Synthetic peptide"
TAYPFEA

SEQ ID NO: 11424 - protein, 7 aa, Artificial Sequence
  source: /note="Description of Artificial Sequence: Synthetic peptide"
TAYPHQI

SEQ ID NO: 11425 - protein, 7 aa, Artificial Sequence
  source: /note="Description of Artificial Sequence: Synthetic peptide"
TDADRSP

SEQ ID NO: 11426 - protein, 7 aa, Artificial Sequence
  source: /note="Description of Artificial Sequence: Synthetic peptide"
TDCRQGG

SEQ ID NO: 11427 - protein, 7 aa, Artificial Sequence
  source: /note="Description of Artificial Sequence: Synthetic peptide"
TDDIKND

SEQ ID NO: 11428 - protein, 7 aa, Artificial Sequence
  source: /note="Description of Artificial Sequence: Synthetic peptide"
TDEYKKA

SEQ ID NO: 11429 - protein, 7 aa, Artificial Sequence
  source: /note="Description of Artificial Sequence: Synthetic peptide"
TDFRRIP

SEQ ID NO: 11430 - protein, 7 aa, Artificial Sequence
  source: /note="Description of Artificial Sequence: Synthetic peptide"
TDGLHKL

SEQ ID NO: 11431 - protein, 7 aa, Artificial Sequence
  source: /note="Description of Artificial Sequence: Synthetic peptide"
TDGPGLT

SEQ ID NO: 11432 - protein, 7 aa, Artificial Sequence
  source: /note="Description of Artificial Sequence: Synthetic peptide"
TDGRLGG

SEQ ID NO: 11433 - protein, 7 aa, Artificial Sequence
  source: /note="Description of Artificial Sequence: Synthetic peptide"
TDGSRVP

SEQ ID NO: 11434 - protein, 7 aa, Artificial Sequence
  source: /note="Description of Artificial Sequence: Synthetic peptide"
TDHVHRG

SEQ ID NO: 11435 - protein, 7 aa, Artificial Sequence
  source: /note="Description of Artificial Sequence: Synthetic peptide"
TDKHGVL

SEQ ID NO: 11436 - protein, 7 aa, Artificial Sequence
  source: /note="Description of Artificial Sequence: Synthetic peptide"
TDKVRSQ

SEQ ID NO: 11437 - protein, 7 aa, Artificial Sequence
  source: /note="Description of Artificial Sequence: Synthetic peptide"
TDLHLEL

SEQ ID NO: 11438 - protein, 7 aa, Artificial Sequence
  source: /note="Description of Artificial Sequence: Synthetic peptide"
TDLSHGH

SEQ ID NO: 11439 - protein, 7 aa, Artificial Sequence
  source: /note="Description of Artificial Sequence: Synthetic peptide"
TDLYSQS

SEQ ID NO: 11440 - protein, 7 aa, Artificial Sequence
  source: /note="Description of Artificial Sequence: Synthetic peptide"
TDMQRLG

SEQ ID NO: 11441 - protein, 7 aa, Artificial Sequence
  source: /note="Description of Artificial Sequence: Synthetic peptide"
TDNRITA

SEQ ID NO: 11442 - protein, 7 aa, Artificial Sequence
  source: /note="Description of Artificial Sequence: Synthetic peptide"
TDPHSDK

SEQ ID NO: 11443 - protein, 7 aa, Artificial Sequence
  source: /note="Description of Artificial Sequence: Synthetic peptide"
TDQSLMS

SEQ ID NO: 11444 - protein, 7 aa, Artificial Sequence
  source: /note="Description of Artificial Sequence: Synthetic peptide"
TDRGGVQ

SEQ ID NO: 11445 - protein, 7 aa, Artificial Sequence
  source: /note="Description of Artificial Sequence: Synthetic peptide"
TDRSALS

SEQ ID NO: 11446 - protein, 7 aa, Artificial Sequence
  source: /note="Description of Artificial Sequence: Synthetic peptide"
TDRSSLS

SEQ ID NO: 11447 - protein, 7 aa, Artificial Sequence
  source: /note="Description of Artificial Sequence: Synthetic peptide"
TDRVPSF

SEQ ID NO: 11448 - protein, 7 aa, Artificial Sequence
  source: /note="Description of Artificial Sequence: Synthetic peptide"
TDSGPTP

SEQ ID NO: 11449 - protein, 7 aa, Artificial Sequence
  source: /note="Description of Artificial Sequence: Synthetic peptide"
TDSHVLY

SEQ ID NO: 11450 - protein, 7 aa, Artificial Sequence
  source: /note="Description of Artificial Sequence: Synthetic peptide"
TDTHSSV

SEQ ID NO: 11451 - protein, 7 aa, Artificial Sequence
  source: /note="Description of Artificial Sequence: Synthetic peptide"
TDTSRGL

SEQ ID NO: 11452 - protein, 7 aa, Artificial Sequence
  source: /note="Description of Artificial Sequence: Synthetic peptide"
TDTTGGP

SEQ ID NO: 11453 - protein, 7 aa, Artificial Sequence
  source: /note="Description of Artificial Sequence: Synthetic peptide"
TDVITVA

SEQ ID NO: 11454 - protein, 7 aa, Artificial Sequence
  source: /note="Description of Artificial Sequence: Synthetic peptide"
TDVPHPN

SEQ ID NO: 11455 - protein, 7 aa, Artificial Sequence
  source: /note="Description of Artificial Sequence: Synthetic peptide"
TDVRPAG

SEQ ID NO: 11456 - protein, 7 aa, Artificial Sequence
  source: /note="Description of Artificial Sequence: Synthetic peptide"
TDVRTKN

SEQ ID NO: 11457 - protein, 7 aa, Artificial Sequence
  source: /note="Description of Artificial Sequence: Synthetic peptide"
TDWEHDP

SEQ ID NO: 11458 - protein, 7 aa, Artificial Sequence
  source: /note="Description of Artificial Sequence: Synthetic peptide"
TDYDLSS

SEQ ID NO: 11459 - protein, 7 aa, Artificial Sequence
  source: /note="Description of Artificial Sequence: Synthetic peptide"
TEAASRQ

SEQ ID NO: 11460 - protein, 7 aa, Artificial Sequence
  source: /note="Description of Artificial Sequence: Synthetic peptide"
TEARNPV

SEQ ID NO: 11461 - protein, 7 aa, Artificial Sequence
  source: /note="Description of Artificial Sequence: Synthetic peptide"
TEDTAPC

SEQ ID NO: 11462 - protein, 7 aa, Artificial Sequence
  source: /note="Description of Artificial Sequence: Synthetic peptide"
TEFYDLE

SEQ ID NO: 11463 - protein, 7 aa, Artificial Sequence
  source: /note="Description of Artificial Sequence: Synthetic peptide"
TEGRAPT

SEQ ID NO: 11464 - protein, 7 aa, Artificial Sequence
  source: /note="Description of Artificial Sequence: Synthetic peptide"
TEHGTKI

SEQ ID NO: 11465 - protein, 7 aa, Artificial Sequence
  source: /note="Description of Artificial Sequence: Synthetic peptide"
TELNRAI

SEQ ID NO: 11466 - protein, 7 aa, Artificial Sequence
  source: /note="Description of Artificial Sequence: Synthetic peptide"
TELSHNR

SEQ ID NO: 11467 - protein, 7 aa, Artificial Sequence
  source: /note="Description of Artificial Sequence: Synthetic peptide"
TELSSPR

SEQ ID NO: 11468 - protein, 7 aa, Artificial Sequence
  source: /note="Description of Artificial Sequence: Synthetic peptide"
TELVIGK

SEQ ID NO: 11469 - protein, 7 aa, Artificial Sequence
  source: /note="Description of Artificial Sequence: Synthetic peptide"
TENAGTG

SEQ ID NO: 11470 - protein, 7 aa, Artificial Sequence
  source: /note="Description of Artificial Sequence: Synthetic peptide"
TEPPHVA

SEQ ID NO: 11471 - protein, 7 aa, Artificial Sequence
  source: /note="Description of Artificial Sequence: Synthetic peptide"
TEPPYRL

SEQ ID NO: 11472 - protein, 7 aa, Artificial Sequence
  source: /note="Description of Artificial Sequence: Synthetic peptide"
TEPQIGR

SEQ ID NO: 11473 - protein, 7 aa, Artificial Sequence
  source: /note="Description of Artificial Sequence: Synthetic peptide"
TEPRMVS

SEQ ID NO: 11474 - protein, 7 aa, Artificial Sequence
  source: /note="Description of Artificial Sequence: Synthetic peptide"
TEPYAPD

SEQ ID NO: 11475 - protein, 7 aa, Artificial Sequence
  source: /note="Description of Artificial Sequence: Synthetic peptide"
TEPYTDF

SEQ ID NO: 11476 - protein, 7 aa, Artificial Sequence
  source: /note="Description of Artificial Sequence: Synthetic peptide"
TERADEH

SEQ ID NO: 11477 - protein, 7 aa, Artificial Sequence
  source: /note="Description of Artificial Sequence: Synthetic peptide"
TERPSPT

SEQ ID NO: 11478 - protein, 7 aa, Artificial Sequence
  source: /note="Description of Artificial Sequence: Synthetic peptide"
TESHHPL

SEQ ID NO: 11479 - protein, 7 aa, Artificial Sequence
  source: /note="Description of Artificial Sequence: Synthetic peptide"
TESTFNM

SEQ ID NO: 11480 - protein, 7 aa, Artificial Sequence
  source: /note="Description of Artificial Sequence: Synthetic peptide"
TESTHQT

SEQ ID NO: 11481 - protein, 7 aa, Artificial Sequence
  source: /note="Description of Artificial Sequence: Synthetic peptide"
TETASSP

SEQ ID NO: 11482 - protein, 7 aa, Artificial Sequence
  source: /note="Description of Artificial Sequence: Synthetic peptide"
TETGNCH

SEQ ID NO: 11483 - protein, 7 aa, Artificial Sequence
  source: /note="Description of Artificial Sequence: Synthetic peptide"
TETLHNR

SEQ ID NO: 11484 - protein, 7 aa, Artificial Sequence
  source: /note="Description of Artificial Sequence: Synthetic peptide"
TETVGDL

SEQ ID NO: 11485 - protein, 7 aa, Artificial Sequence
  source: /note="Description of Artificial Sequence: Synthetic peptide"
TEVKLLP

SEQ ID NO: 11486 - protein, 7 aa, Artificial Sequence
  source: /note="Description of Artificial Sequence: Synthetic peptide"
TEVRPGL

SEQ ID NO: 11487 - protein, 7 aa, Artificial Sequence
  source: /note="Description of Artificial Sequence: Synthetic peptide"
TEVRSPL

SEQ ID NO: 11488 - protein, 7 aa, Artificial Sequence
  source: /note="Description of Artificial Sequence: Synthetic peptide"
TEVSSNK

SEQ ID NO: 11489 - protein, 7 aa, Artificial Sequence
  source: /note="Description of Artificial Sequence: Synthetic peptide"
TEWSSND

SEQ ID NO: 11490 - protein, 7 aa, Artificial Sequence
  source: /note="Description of Artificial Sequence: Synthetic peptide"
TEYATRP

SEQ ID NO: 11491 - protein, 7 aa, Artificial Sequence
  source: /note="Description of Artificial Sequence: Synthetic peptide"
TEYTLHG

SEQ ID NO: 11492 - protein, 7 aa, Artificial Sequence
  source: /note="Description of Artificial Sequence: Synthetic peptide"
TFASGAP

SEQ ID NO: 11493 - protein, 7 aa, Artificial Sequence
  source: /note="Description of Artificial Sequence: Synthetic peptide"
TFASPLL

SEQ ID NO: 11494 - protein, 7 aa, Artificial Sequence
  source: /note="Description of Artificial Sequence: Synthetic peptide"
TFDPQWA

SEQ ID NO: 11495 - protein, 7 aa, Artificial Sequence
  source: /note="Description of Artificial Sequence: Synthetic peptide"
TFDTRGS

SEQ ID NO: 11496 - protein, 7 aa, Artificial Sequence
  source: /note="Description of Artificial Sequence: Synthetic peptide"
TFGAISA

SEQ ID NO: 11497 - protein, 7 aa, Artificial Sequence
  source: /note="Description of Artificial Sequence: Synthetic peptide"
TFGSDGT

SEQ ID NO: 11498 - protein, 7 aa, Artificial Sequence
  source: /note="Description of Artificial Sequence: Synthetic peptide"
TFGTSIK

SEQ ID NO: 11499 - protein, 7 aa, Artificial Sequence
  source: /note="Description of Artificial Sequence: Synthetic peptide"
TFHAPSS

SEQ ID NO: 11500 - protein, 7 aa, Artificial Sequence
  source: /note="Description of Artificial Sequence: Synthetic peptide"
TFHRTDN

SEQ ID NO: 11501 - protein, 7 aa, Artificial Sequence
  source: /note="Description of Artificial Sequence: Synthetic peptide"
TFKDPTV

SEQ ID NO: 11502 - protein, 7 aa, Artificial Sequence
  source: /note="Description of Artificial Sequence: Synthetic peptide"
TFKITGD

SEQ ID NO: 11503 - protein, 7 aa, Artificial Sequence
  source: /note="Description of Artificial Sequence: Synthetic peptide"
TFNGMNE

SEQ ID NO: 11504 - protein, 7 aa, Artificial Sequence
  source: /note="Description of Artificial Sequence: Synthetic peptide"
TFPLPRT

SEQ ID NO: 11505 - protein, 7 aa, Artificial Sequence
  source: /note="Description of Artificial Sequence: Synthetic peptide"
TFPLSDW

SEQ ID NO: 11506 - protein, 7 aa, Artificial Sequence
  source: /note="Description of Artificial Sequence: Synthetic peptide"
TFPTSGM

SEQ ID NO: 11507 - protein, 7 aa, Artificial Sequence
  source: /note="Description of Artificial Sequence: Synthetic peptide"
TFQPTSV

SEQ ID NO: 11508 - protein, 7 aa, Artificial Sequence
  source: /note="Description of Artificial Sequence: Synthetic peptide"
TFRGMKD

SEQ ID NO: 11509 - protein, 7 aa, Artificial Sequence
  source: /note="Description of Artificial Sequence: Synthetic peptide"
TFRTSVA

SEQ ID NO: 11510 - protein, 7 aa, Artificial Sequence
  source: /note="Description of Artificial Sequence: Synthetic peptide"
TFSIVSP

SEQ ID NO: 11511 - protein, 7 aa, Artificial Sequence
  source: /note="Description of Artificial Sequence: Synthetic peptide"
TFSPPNF

SEQ ID NO: 11512 - protein, 7 aa, Artificial Sequence
  source: /note="Description of Artificial Sequence: Synthetic peptide"
TFSPTFS

SEQ ID NO: 11513 - protein, 7 aa, Artificial Sequence
  source: /note="Description of Artificial Sequence: Synthetic peptide"
TFSSTSH

SEQ ID NO: 11514 - protein, 7 aa, Artificial Sequence
  source: /note="Description of Artificial Sequence: Synthetic peptide"
TFSSVAA

SEQ ID NO: 11515 - protein, 7 aa, Artificial Sequence
  source: /note="Description of Artificial Sequence: Synthetic peptide"
TFSSVTG

SEQ ID NO: 11516 - protein, 7 aa, Artificial Sequence
  source: /note="Description of Artificial Sequence: Synthetic peptide"
TFSTGRV

SEQ ID NO: 11517 - protein, 7 aa, Artificial Sequence
  source: /note="Description of Artificial Sequence: Synthetic peptide"
TFSTGSP

SEQ ID NO: 11518 - protein, 7 aa, Artificial Sequence
  source: /note="Description of Artificial Sequence: Synthetic peptide"
TFSTNTS

SEQ ID NO: 11519 - protein, 7 aa, Artificial Sequence
  source: /note="Description of Artificial Sequence: Synthetic peptide"
TFSVSQI

SEQ ID NO: 11520 - protein, 7 aa, Artificial Sequence
  source: /note="Description of Artificial Sequence: Synthetic peptide"
TFTNPTN

SEQ ID NO: 11521 - protein, 7 aa, Artificial Sequence
  source: /note="Description of Artificial Sequence: Synthetic peptide"
TFTQLAS

SEQ ID NO: 11522 - protein, 7 aa, Artificial Sequence
  source: /note="Description of Artificial Sequence: Synthetic peptide"
TFVREVV

SEQ ID NO: 11523 - protein, 7 aa, Artificial Sequence
  source: /note="Description of Artificial Sequence: Synthetic peptide"
TFVSGGD

SEQ ID NO: 11524 - protein, 7 aa, Artificial Sequence
  source: /note="Description of Artificial Sequence: Synthetic peptide"
TGAGQTL

SEQ ID NO: 11525 - protein, 7 aa, Artificial Sequence
  source: /note="Description of Artificial Sequence: Synthetic peptide"
TGAHVGE

SEQ ID NO: 11526 - protein, 7 aa, Artificial Sequence
  source: /note="Description of Artificial Sequence: Synthetic peptide"
TGALATL

SEQ ID NO: 11527 - protein, 7 aa, Artificial Sequence
  source: /note="Description of Artificial Sequence: Synthetic peptide"
TGAPPQI

SEQ ID NO: 11528 - protein, 7 aa, Artificial Sequence
  source: /note="Description of Artificial Sequence: Synthetic peptide"
TGASVLF

SEQ ID NO: 11529 - protein, 7 aa, Artificial Sequence
  source: /note="Description of Artificial Sequence: Synthetic peptide"
TGAVFTP

SEQ ID NO: 11530 - protein, 7 aa, Artificial Sequence
  source: /note="Description of Artificial Sequence: Synthetic peptide"
TGDATPF

SEQ ID NO: 11531 - protein, 7 aa, Artificial Sequence
  source: /note="Description of Artificial Sequence: Synthetic peptide"
TGDQKWH

SEQ ID NO: 11532 - protein, 7 aa, Artificial Sequence
  source: /note="Description of Artificial Sequence: Synthetic peptide"
TGDQNRY

SEQ ID NO: 11533 - protein, 7 aa, Artificial Sequence
  source: /note="Description of Artificial Sequence: Synthetic peptide"
TGDTSRT

SEQ ID NO: 11534 - protein, 7 aa, Artificial Sequence
  source: /note="Description of Artificial Sequence: Synthetic peptide"
TGDVDGW

SEQ ID NO: 11535 - protein, 7 aa, Artificial Sequence
  source: /note="Description of Artificial Sequence: Synthetic peptide"
TGEQPGH

SEQ ID NO: 11536 - protein, 7 aa, Artificial Sequence
  source: /note="Description of Artificial Sequence: Synthetic peptide"
TGFSDQF

SEQ ID NO: 11537 - protein, 7 aa, Artificial Sequence
  source: /note="Description of Artificial Sequence: Synthetic peptide"
TGGAQRG

SEQ ID NO: 11538 - protein, 7 aa, Artificial Sequence
  source: /note="Description of Artificial Sequence: Synthetic peptide"
TGGSPTS

SEQ ID NO: 11539 - protein, 7 aa, Artificial Sequence
  source: /note="Description of Artificial Sequence: Synthetic peptide"
TGGSTRL

SEQ ID NO: 11540 - protein, 7 aa, Artificial Sequence
  source: /note="Description of Artificial Sequence: Synthetic peptide"
TGGYVLA

SEQ ID NO: 11541 - protein, 7 aa, Artificial Sequence
  source: /note="Description of Artificial Sequence: Synthetic peptide"
TGHAQNQ

SEQ ID NO: 11542 - protein, 7 aa, Artificial Sequence
  source: /note="Description of Artificial Sequence: Synthetic peptide"
TGHDTVE

SEQ ID NO: 11543 - protein, 7 aa, Artificial Sequence
  source: /note="Description of Artificial Sequence: Synthetic peptide"
TGHTRLD

SEQ ID NO: 11544 - protein, 7 aa, Artificial Sequence
  source: /note="Description of Artificial Sequence: Synthetic peptide"
TGHTSTL

SEQ ID NO: 11545 - protein, 7 aa, Artificial Sequence
  source: /note="Description of Artificial Sequence: Synthetic peptide"
TGIAPNS

SEQ ID NO: 11546 - protein, 7 aa, Artificial Sequence
  source: /note="Description of Artificial Sequence: Synthetic peptide"
TGISSHM

SEQ ID NO: 11547 - protein, 7 aa, Artificial Sequence
  source: /note="Description of Artificial Sequence: Synthetic peptide"
TGITGAP

SEQ ID NO: 11548 - protein, 7 aa, Artificial Sequence
  source: /note="Description of Artificial Sequence: Synthetic peptide"
TGKVLGF

SEQ ID NO: 11549 - protein, 7 aa, Artificial Sequence
  source: /note="Description of Artificial Sequence: Synthetic peptide"
TGLCPHP

SEQ ID NO: 11550 - protein, 7 aa, Artificial Sequence
  source: /note="Description of Artificial Sequence: Synthetic peptide"
TGLGLLT

SEQ ID NO: 11551 - protein, 7 aa, Artificial Sequence
  source: /note="Description of Artificial Sequence: Synthetic peptide"
TGLMGPV

SEQ ID NO: 11552 - protein, 7 aa, Artificial Sequence
  source: /note="Description of Artificial Sequence: Synthetic peptide"
TGLNHFN

SEQ ID NO: 11553 - protein, 7 aa, Artificial Sequence
  source: /note="Description of Artificial Sequence: Synthetic peptide"
TGLNPAL

SEQ ID NO: 11554 - protein, 7 aa, Artificial Sequence
  source: /note="Description of Artificial Sequence: Synthetic peptide"
TGLPVGF

SEQ ID NO: 11555 - protein, 7 aa, Artificial Sequence
  source: /note="Description of Artificial Sequence: Synthetic peptide"
TGLRGTV

SEQ ID NO: 11556 - protein, 7 aa, Artificial Sequence
  source: /note="Description of Artificial Sequence: Synthetic peptide"
TGLVTDE

SEQ ID NO: 11557 - protein, 7 aa, Artificial Sequence
  source: /note="Description of Artificial Sequence: Synthetic peptide"
TGMNNFS

SEQ ID NO: 11558 - protein, 7 aa, Artificial Sequence
  source: /note="Description of Artificial Sequence: Synthetic peptide"
TGMQAAL

SEQ ID NO: 11559 - protein, 7 aa, Artificial Sequence
  source: /note="Description of Artificial Sequence: Synthetic peptide"
TGNHIRI

SEQ ID NO: 11560 - protein, 7 aa, Artificial Sequence
  source: /note="Description of Artificial Sequence: Synthetic peptide"
TGNHVTF

SEQ ID NO: 11561 - protein, 7 aa, Artificial Sequence
  source: /note="Description of Artificial Sequence: Synthetic peptide"
TGNISPL

SEQ ID NO: 11562 - protein, 7 aa, Artificial Sequence
  source: /note="Description of Artificial Sequence: Synthetic peptide"
TGNSPHA

SEQ ID NO: 11563 - protein, 7 aa, Artificial Sequence
  source: /note="Description of Artificial Sequence: Synthetic peptide"
TGPAPLD

SEQ ID NO: 11564 - protein, 7 aa, Artificial Sequence
  source: /note="Description of Artificial Sequence: Synthetic peptide"
TGPARGS

SEQ ID NO: 11565 - protein, 7 aa, Artificial Sequence
  source: /note="Description of Artificial Sequence: Synthetic peptide"
TGPDYPK

SEQ ID NO: 11566 - protein, 7 aa, Artificial Sequence
  source: /note="Description of Artificial Sequence: Synthetic peptide"
TGPHLKA

SEQ ID NO: 11567 - protein, 7 aa, Artificial Sequence
  source: /note="Description of Artificial Sequence: Synthetic peptide"
TGPINAP

SEQ ID NO: 11568 - protein, 7 aa, Artificial Sequence
  source: /note="Description of Artificial Sequence: Synthetic peptide"
TGPNTST

SEQ ID NO: 11569 - protein, 7 aa, Artificial Sequence
  source: /note="Description of Artificial Sequence: Synthetic peptide"
TGPPTTM

SEQ ID NO: 11570 - protein, 7 aa, Artificial Sequence
  source: /note="Description of Artificial Sequence: Synthetic peptide"
TGPRLST

SEQ ID NO: 11571 - protein, 7 aa, Artificial Sequence
  source: /note="Description of Artificial Sequence: Synthetic peptide"
TGPSARA

SEQ ID NO: 11572 - protein, 7 aa, Artificial Sequence
  source: /note="Description of Artificial Sequence: Synthetic peptide"
TGPSIHT

SEQ ID NO: 11573 - protein, 7 aa, Artificial Sequence
  source: /note="Description of Artificial Sequence: Synthetic peptide"
TGPSLDR

SEQ ID NO: 11574 - protein, 7 aa, Artificial Sequence
  source: /note="Description of Artificial Sequence: Synthetic peptide"
TGPSRTS

SEQ ID NO: 11575 - protein, 7 aa, Artificial Sequence
  source: /note="Description of Artificial Sequence: Synthetic peptide"
TGQGNAD

SEQ ID NO: 11576 - protein, 7 aa, Artificial Sequence
  source: /note="Description of Artificial Sequence: Synthetic peptide"
TGQRAGQ

SEQ ID NO: 11577 - protein, 7 aa, Artificial Sequence
  source: /note="Description of Artificial Sequence: Synthetic peptide"
TGQRMDL

SEQ ID NO: 11578 - protein, 7 aa, Artificial Sequence
  source: /note="Description of Artificial Sequence: Synthetic peptide"
TGQRQNV

SEQ ID NO: 11579 - protein, 7 aa, Artificial Sequence
  source: /note="Description of Artificial Sequence: Synthetic peptide"
TGRPVGN

SEQ ID NO: 11580 - protein, 7 aa, Artificial Sequence
  source: /note="Description of Artificial Sequence: Synthetic peptide"
TGRVAGS

SEQ ID NO: 11581 - protein, 7 aa, Artificial Sequence
  source: /note="Description of Artificial Sequence: Synthetic peptide"
TGSAGEK

SEQ ID NO: 11582 - protein, 7 aa, Artificial Sequence
  source: /note="Description of Artificial Sequence: Synthetic peptide"
TGSAHVS

SEQ ID NO: 11583 - protein, 7 aa, Artificial Sequence
  source: /note="Description of Artificial Sequence: Synthetic peptide"
TGSAMRP

SEQ ID NO: 11584 - protein, 7 aa, Artificial Sequence
  source: /note="Description of Artificial Sequence: Synthetic peptide"
TGSGHGP

SEQ ID NO: 11585 - protein, 7 aa, Artificial Sequence
  source: /note="Description of Artificial Sequence: Synthetic peptide"
TGSKPGS

SEQ ID NO: 11586 - protein, 7 aa, Artificial Sequence
  source: /note="Description of Artificial Sequence: Synthetic peptide"
TGSLQYD

SEQ ID NO: 11587 - protein, 7 aa, Artificial Sequence
  source: /note="Description of Artificial Sequence: Synthetic peptide"
TGSSGFL

SEQ ID NO: 11588 - protein, 7 aa, Artificial Sequence
  source: /note="Description of Artificial Sequence: Synthetic peptide"
TGSSVRA

SEQ ID NO: 11589 - protein, 7 aa, Artificial Sequence
  source: /note="Description of Artificial Sequence: Synthetic peptide"
TGTGRIH

SEQ ID NO: 11590 - protein, 7 aa, Artificial Sequence
  source: /note="Description of Artificial Sequence: Synthetic peptide"
TGTSSWV

SEQ ID NO: 11591 - protein, 7 aa, Artificial Sequence
  source: /note="Description of Artificial Sequence: Synthetic peptide"
TGTTLHP

SEQ ID NO: 11592 - protein, 7 aa, Artificial Sequence
  source: /note="Description of Artificial Sequence: Synthetic peptide"
TGVPRGF

SEQ ID NO: 11593 - protein, 7 aa, Artificial Sequence
  source: /note="Description of Artificial Sequence: Synthetic peptide"
TGVPRPY

SEQ ID NO: 11594 - protein, 7 aa, Artificial Sequence
  source: /note="Description of Artificial Sequence: Synthetic peptide"
TGVPVDA

SEQ ID NO: 11595 - protein, 7 aa, Artificial Sequence
  source: /note="Description of Artificial Sequence: Synthetic peptide"
TGYEFKL

SEQ ID NO: 11596 - protein, 7 aa, Artificial Sequence
  source: /note="Description of Artificial Sequence: Synthetic peptide"
TGYKSPN

SEQ ID NO: 11597 - protein, 7 aa, Artificial Sequence
  source: /note="Description of Artificial Sequence: Synthetic peptide"
THAAADF

SEQ ID NO: 11598 - protein, 7 aa, Artificial Sequence
  source: /note="Description of Artificial Sequence: Synthetic peptide"
THAIIVT

SEQ ID NO: 11599 - protein, 7 aa, Artificial Sequence
  source: /note="Description of Artificial Sequence: Synthetic peptide"
THAQTSV

SEQ ID NO: 11600 - protein, 7 aa, Artificial Sequence
  source: /note="Description of Artificial Sequence: Synthetic peptide"
THDEDRR

SEQ ID NO: 11601 - protein, 7 aa, Artificial Sequence
  source: /note="Description of Artificial Sequence: Synthetic peptide"
THDHADS

SEQ ID NO: 11602 - protein, 7 aa, Artificial Sequence
  source: /note="Description of Artificial Sequence: Synthetic peptide"
THDLSLA

SEQ ID NO: 11603 - protein, 7 aa, Artificial Sequence
  source: /note="Description of Artificial Sequence: Synthetic peptide"
THDPRHG

SEQ ID NO: 11604 - protein, 7 aa, Artificial Sequence
  source: /note="Description of Artificial Sequence: Synthetic peptide"
THEHYSH

SEQ ID NO: 11605 - protein, 7 aa, Artificial Sequence
  source: /note="Description of Artificial Sequence: Synthetic peptide"
THEPRRA

SEQ ID NO: 11606 - protein, 7 aa, Artificial Sequence
  source: /note="Description of Artificial Sequence: Synthetic peptide"
THESAAA

SEQ ID NO: 11607 - protein, 7 aa, Artificial Sequence
  source: /note="Description of Artificial Sequence: Synthetic peptide"
THFPGLP

SEQ ID NO: 11608 - protein, 7 aa, Artificial Sequence
  source: /note="Description of Artificial Sequence: Synthetic peptide"
THGRLPN

SEQ ID NO: 11609 - protein, 7 aa, Artificial Sequence
  source: /note="Description of Artificial Sequence: Synthetic peptide"
THHAALT

SEQ ID NO: 11610 - protein, 7 aa, Artificial Sequence
  source: /note="Description of Artificial Sequence: Synthetic peptide"
THHSGSI

SEQ ID NO: 11611 - protein, 7 aa, Artificial Sequence
  source: /note="Description of Artificial Sequence: Synthetic peptide"
THHVTQT

SEQ ID NO: 11612 - protein, 7 aa, Artificial Sequence
  source: /note="Description of Artificial Sequence: Synthetic peptide"
THIPSRP

SEQ ID NO: 11613 - protein, 7 aa, Artificial Sequence
  source: /note="Description of Artificial Sequence: Synthetic peptide"
THIRSAQ

SEQ ID NO: 11614 - protein, 7 aa, Artificial Sequence
  source: /note="Description of Artificial Sequence: Synthetic peptide"
THKETHM

SEQ ID NO: 11615 - protein, 7 aa, Artificial Sequence
  source: /note="Description of Artificial Sequence: Synthetic peptide"
THKFPTS

SEQ ID NO: 11616 - protein, 7 aa, Artificial Sequence
  source: /note="Description of Artificial Sequence: Synthetic peptide"
THKLTAE

SEQ ID NO: 11617 - protein, 7 aa, Artificial Sequence
  source: /note="Description of Artificial Sequence: Synthetic peptide"
THKSISN

SEQ ID NO: 11618 - protein, 7 aa, Artificial Sequence
  source: /note="Description of Artificial Sequence: Synthetic peptide"
THLASSD

SEQ ID NO: 11619 - protein, 7 aa, Artificial Sequence
  source: /note="Description of Artificial Sequence: Synthetic peptide"
THLGESV

SEQ ID NO: 11620 - protein, 7 aa, Artificial Sequence
  source: /note="Description of Artificial Sequence: Synthetic peptide"
THLSNTL

SEQ ID NO: 11621 - protein, 7 aa, Artificial Sequence
  source: /note="Description of Artificial Sequence: Synthetic peptide"
THLSTAK

SEQ ID NO: 11622 - protein, 7 aa, Artificial Sequence
  source: /note="Description of Artificial Sequence: Synthetic peptide"
THLSTPS

SEQ ID NO: 11623 - protein, 7 aa, Artificial Sequence
  source: /note="Description of Artificial Sequence: Synthetic peptide"
THMIGNT

SEQ ID NO: 11624 - protein, 7 aa, Artificial Sequence
  source: /note="Description of Artificial Sequence: Synthetic peptide"
THNALTV

SEQ ID NO: 11625 - protein, 7 aa, Artificial Sequence
  source: /note="Description of Artificial Sequence: Synthetic peptide"
THNLSIR

SEQ ID NO: 11626 - protein, 7 aa, Artificial Sequence
  source: /note="Description of Artificial Sequence: Synthetic peptide"
THPAVTQ

SEQ ID NO: 11627 - protein, 7 aa, Artificial Sequence
  source: /note="Description of Artificial Sequence: Synthetic peptide"
THPDRGL

SEQ ID NO: 11628 - protein, 7 aa, Artificial Sequence
  source: /note="Description of Artificial Sequence: Synthetic peptide"
THPKPTL

SEQ ID NO: 11629 - protein, 7 aa, Artificial Sequence
  source: /note="Description of Artificial Sequence: Synthetic peptide"
THPQSVD

SEQ ID NO: 11630 - protein, 7 aa, Artificial Sequence
  source: /note="Description of Artificial Sequence: Synthetic peptide"
THPSVPV

SEQ ID NO: 11631 - protein, 7 aa, Artificial Sequence
  source: /note="Description of Artificial Sequence: Synthetic peptide"
THPVGIL

SEQ ID NO: 11632 - protein, 7 aa, Artificial Sequence
  source: /note="Description of Artificial Sequence: Synthetic peptide"
THPVSSV

SEQ ID NO: 11633 - protein, 7 aa, Artificial Sequence
  source: /note="Description of Artificial Sequence: Synthetic peptide"
THQTSVY

SEQ ID NO: 11634 - protein, 7 aa, Artificial Sequence
  source: /note="Description of Artificial Sequence: Synthetic peptide"
THQVPSV

SEQ ID NO: 11635 - protein, 7 aa, Artificial Sequence
  source: /note="Description of Artificial Sequence: Synthetic peptide"
THRDGIM

SEQ ID NO: 11636 - protein, 7 aa, Artificial Sequence
  source: /note="Description of Artificial Sequence: Synthetic peptide"
THRQDTS

SEQ ID NO: 11637 - protein, 7 aa, Artificial Sequence
  source: /note="Description of Artificial Sequence: Synthetic peptide"
THRSLDV

SEQ ID NO: 11638 - protein, 7 aa, Artificial Sequence
  source: /note="Description of Artificial Sequence: Synthetic peptide"
THRSQTV

SEQ ID NO: 11639 - protein, 7 aa, Artificial Sequence
  source: /note="Description of Artificial Sequence: Synthetic peptide"
THSAYNH

SEQ ID NO: 11640 - protein, 7 aa, Artificial Sequence
  source: /note="Description of Artificial Sequence: Synthetic peptide"
THSESSK

SEQ ID NO: 11641 - protein, 7 aa, Artificial Sequence
  source: /note="Description of Artificial Sequence: Synthetic peptide"
THSGANN

SEQ ID NO: 11642 - protein, 7 aa, Artificial Sequence
  source: /note="Description of Artificial Sequence: Synthetic peptide"
THSHVDD

SEQ ID NO: 11643 - protein, 7 aa, Artificial Sequence
  source: /note="Description of Artificial Sequence: Synthetic peptide"
THSMVMP

SEQ ID NO: 11644 - protein, 7 aa, Artificial Sequence
  source: /note="Description of Artificial Sequence: Synthetic peptide"
THSPLTR

SEQ ID NO: 11645 - protein, 7 aa, Artificial Sequence
  source: /note="Description of Artificial Sequence: Synthetic peptide"
THTLNTR

SEQ ID NO: 11646 - protein, 7 aa, Artificial Sequence
  source: /note="Description of Artificial Sequence: Synthetic peptide"
THTPLPA

SEQ ID NO: 11647 - protein, 7 aa, Artificial Sequence
  source: /note="Description of Artificial Sequence: Synthetic peptide"
THTRTLM

SEQ ID NO: 11648 - protein, 7 aa, Artificial Sequence
  source: /note="Description of Artificial Sequence: Synthetic peptide"
THTSAAE

SEQ ID NO: 11649 - protein, 7 aa, Artificial Sequence
  source: /note="Description of Artificial Sequence: Synthetic peptide"
THTVGTQ

SEQ ID NO: 11650 - protein, 7 aa, Artificial Sequence
  source: /note="Description of Artificial Sequence: Synthetic peptide"
THVAEVT

SEQ ID NO: 11651 - protein, 7 aa, Artificial Sequence
  source: /note="Description of Artificial Sequence: Synthetic peptide"
THVPPMR

SEQ ID NO: 11652 - protein, 7 aa, Artificial Sequence
  source: /note="Description of Artificial Sequence: Synthetic peptide"
THYDVVM

SEQ ID NO: 11653 - protein, 7 aa, Artificial Sequence
  source: /note="Description of Artificial Sequence: Synthetic peptide"
TIADDQK

SEQ ID NO: 11654 - protein, 7 aa, Artificial Sequence
  source: /note="Description of Artificial Sequence: Synthetic peptide"
TIADMRT

SEQ ID NO: 11655 - protein, 7 aa, Artificial Sequence
  source: /note="Description of Artificial Sequence: Synthetic peptide"
TICNDGP

SEQ ID NO: 11656 - protein, 7 aa, Artificial Sequence
  source: /note="Description of Artificial Sequence: Synthetic peptide"
TIDPPLT

SEQ ID NO: 11657 - protein, 7 aa, Artificial Sequence
  source: /note="Description of Artificial Sequence: Synthetic peptide"
TIDTTSL

SEQ ID NO: 11658 - protein, 7 aa, Artificial Sequence
  source: /note="Description of Artificial Sequence: Synthetic peptide"
TIEQRER

SEQ ID NO: 11659 - protein, 7 aa, Artificial Sequence
  source: /note="Description of Artificial Sequence: Synthetic peptide"
TIESPGV

SEQ ID NO: 11660 - protein, 7 aa, Artificial Sequence
  source: /note="Description of Artificial Sequence: Synthetic peptide"
TIGHESY

SEQ ID NO: 11661 - protein, 7 aa, Artificial Sequence
  source: /note="Description of Artificial Sequence: Synthetic peptide"
TIGRLMQ

SEQ ID NO: 11662 - protein, 7 aa, Artificial Sequence
  source: /note="Description of Artificial Sequence: Synthetic peptide"
TIGSVRL

SEQ ID NO: 11663 - protein, 7 aa, Artificial Sequence
  source: /note="Description of Artificial Sequence: Synthetic peptide"
TIHRPDM

SEQ ID NO: 11664 - protein, 7 aa, Artificial Sequence
  source: /note="Description of Artificial Sequence: Synthetic peptide"
TIIPSKL

SEQ ID NO: 11665 - protein, 7 aa, Artificial Sequence
  source: /note="Description of Artificial Sequence: Synthetic peptide"
TIIRKDS

SEQ ID NO: 11666 - protein, 7 aa, Artificial Sequence
  source: /note="Description of Artificial Sequence: Synthetic peptide"
TIKAQVS

SEQ ID NO: 11667 - protein, 7 aa, Artificial Sequence
  source: /note="Description of Artificial Sequence: Synthetic peptide"
TIKLNVG

SEQ ID NO: 11668 - protein, 7 aa, Artificial Sequence
  source: /note="Description of Artificial Sequence: Synthetic peptide"
TIKPLSQ

SEQ ID NO: 11669 - protein, 7 aa, Artificial Sequence
  source: /note="Description of Artificial Sequence: Synthetic peptide"
TILNPNN

SEQ ID NO: 11670 - protein, 7 aa, Artificial Sequence
  source: /note="Description of Artificial Sequence: Synthetic peptide"
TILRTEE

SEQ ID NO: 11671 - protein, 7 aa, Artificial Sequence
  source: /note="Description of Artificial Sequence: Synthetic peptide"
TILSSHG

SEQ ID NO: 11672 - protein, 7 aa, Artificial Sequence
  source: /note="Description of Artificial Sequence: Synthetic peptide"
TILSTGS

SEQ ID NO: 11673 - protein, 7 aa, Artificial Sequence
  source: /note="Description of Artificial Sequence: Synthetic peptide"
TINHAEQ

SEQ ID NO: 11674 - protein, 7 aa, Artificial Sequence
  source: /note="Description of Artificial Sequence: Synthetic peptide"
TINWVGD

SEQ ID NO: 11675 - protein, 7 aa, Artificial Sequence
  source: /note="Description of Artificial Sequence: Synthetic peptide"
TIPSQIA

SEQ ID NO: 11676 - protein, 7 aa, Artificial Sequence
  source: /note="Description of Artificial Sequence: Synthetic peptide"
TIQLRSA

SEQ ID NO: 11677 - protein, 7 aa, Artificial Sequence
  source: /note="Description of Artificial Sequence: Synthetic peptide"
TIREAFT

SEQ ID NO: 11678 - protein, 7 aa, Artificial Sequence
  source: /note="Description of Artificial Sequence: Synthetic peptide"
TIRGSFL

SEQ ID NO: 11679 - protein, 7 aa, Artificial Sequence
  source: /note="Description of Artificial Sequence: Synthetic peptide"
TIRGTIS

SEQ ID NO: 11680 - protein, 7 aa, Artificial Sequence
  source: /note="Description of Artificial Sequence: Synthetic peptide"
TIRVNPT

SEQ ID NO: 11681 - protein, 7 aa, Artificial Sequence
  source: /note="Description of Artificial Sequence: Synthetic peptide"
TIRVSLA

SEQ ID NO: 11682 - protein, 7 aa, Artificial Sequence
  source: /note="Description of Artificial Sequence: Synthetic peptide"
TISNASS

SEQ ID NO: 11683 - protein, 7 aa, Artificial Sequence
  source: /note="Description of Artificial Sequence: Synthetic peptide"
TISSSQS

SEQ ID NO: 11684 - protein, 7 aa, Artificial Sequence
  source: /note="Description of Artificial Sequence: Synthetic peptide"
TISTSKH

SEQ ID NO: 11685 - protein, 7 aa, Artificial Sequence
  source: /note="Description of Artificial Sequence: Synthetic peptide"
TITAHDP

SEQ ID NO: 11686 - protein, 7 aa, Artificial Sequence
  source: /note="Description of Artificial Sequence: Synthetic peptide"
TITPRAD

SEQ ID NO: 11687 - protein, 7 aa, Artificial Sequence
  source: /note="Description of Artificial Sequence: Synthetic peptide"
TITSPKM

SEQ ID NO: 11688 - protein, 7 aa, Artificial Sequence
  source: /note="Description of Artificial Sequence: Synthetic peptide"
TITYELT

SEQ ID NO: 11689 - protein, 7 aa, Artificial Sequence
  source: /note="Description of Artificial Sequence: Synthetic peptide"
TIVRELT

SEQ ID NO: 11690 - protein, 7 aa, Artificial Sequence
  source: /note="Description of Artificial Sequence: Synthetic peptide"
TIVSDPR

SEQ ID NO: 11691 - protein, 7 aa, Artificial Sequence
  source: /note="Description of Artificial Sequence: Synthetic peptide"
TIVSGVV

SEQ ID NO: 11692 - protein, 7 aa, Artificial Sequence
  source: /note="Description of Artificial Sequence: Synthetic peptide"
TIVTGAS

SEQ ID NO: 11693 - protein, 7 aa, Artificial Sequence
  source: /note="Description of Artificial Sequence: Synthetic peptide"
TIYYDVT

SEQ ID NO: 11694 - protein, 7 aa, Artificial Sequence
  source: /note="Description of Artificial Sequence: Synthetic peptide"
TKAGSFH

SEQ ID NO: 11695 - protein, 7 aa, Artificial Sequence
  source: /note="Description of Artificial Sequence: Synthetic peptide"
TKAHCCG

SEQ ID NO: 11696 - protein, 7 aa, Artificial Sequence
  source: /note="Description of Artificial Sequence: Synthetic peptide"
TKALVHM

SEQ ID NO: 11697 - protein, 7 aa, Artificial Sequence
  source: /note="Description of Artificial Sequence: Synthetic peptide"
TKDQVRL

SEQ ID NO: 11698 - protein, 7 aa, Artificial Sequence
  source: /note="Description of Artificial Sequence: Synthetic peptide"
TKDRPFL

SEQ ID NO: 11699 - protein, 7 aa, Artificial Sequence
  source: /note="Description of Artificial Sequence: Synthetic peptide"
TKECMLT

SEQ ID NO: 11700 - protein, 7 aa, Artificial Sequence
  source: /note="Description of Artificial Sequence: Synthetic peptide"
TKGGFND

SEQ ID NO: 11701 - protein, 7 aa, Artificial Sequence
  source: /note="Description of Artificial Sequence: Synthetic peptide"
TKGGKQP

SEQ ID NO: 11702 - protein, 7 aa, Artificial Sequence
  source: /note="Description of Artificial Sequence: Synthetic peptide"
TKGREPV

SEQ ID NO: 11703 - protein, 7 aa, Artificial Sequence
  source: /note="Description of Artificial Sequence: Synthetic peptide"
TKGVPGY

SEQ ID NO: 11704 - protein, 7 aa, Artificial Sequence
  source: /note="Description of Artificial Sequence: Synthetic peptide"
TKHLMPA

SEQ ID NO: 11705 - protein, 7 aa, Artificial Sequence
  source: /note="Description of Artificial Sequence: Synthetic peptide"
TKIAGFS

SEQ ID NO: 11706 - protein, 7 aa, Artificial Sequence
  source: /note="Description of Artificial Sequence: Synthetic peptide"
TKIGSAM

SEQ ID NO: 11707 - protein, 7 aa, Artificial Sequence
  source: /note="Description of Artificial Sequence: Synthetic peptide"
TKLNAFD

SEQ ID NO: 11708 - protein, 7 aa, Artificial Sequence
  source: /note="Description of Artificial Sequence: Synthetic peptide"
TKLPNSS

SEQ ID NO: 11709 - protein, 7 aa, Artificial Sequence
  source: /note="Description of Artificial Sequence: Synthetic peptide"
TKLQASL

SEQ ID NO: 11710 - protein, 7 aa, Artificial Sequence
  source: /note="Description of Artificial Sequence: Synthetic peptide"
TKLVTES

SEQ ID NO: 11711 - protein, 7 aa, Artificial Sequence
  source: /note="Description of Artificial Sequence: Synthetic peptide"
TKMNASG

SEQ ID NO: 11712 - protein, 7 aa, Artificial Sequence
  source: /note="Description of Artificial Sequence: Synthetic peptide"
TKNLDHT

SEQ ID NO: 11713 - protein, 7 aa, Artificial Sequence
  source: /note="Description of Artificial Sequence: Synthetic peptide"
TKNLTER

SEQ ID NO: 11714 - protein, 7 aa, Artificial Sequence
  source: /note="Description of Artificial Sequence: Synthetic peptide"
TKNRMDL

SEQ ID NO: 11715 - protein, 7 aa, Artificial Sequence
  source: /note="Description of Artificial Sequence: Synthetic peptide"
TKPGSIF

SEQ ID NO: 11716 - protein, 7 aa, Artificial Sequence
  source: /note="Description of Artificial Sequence: Synthetic peptide"
TKPPVQS

SEQ ID NO: 11717 - protein, 7 aa, Artificial Sequence
  source: /note="Description of Artificial Sequence: Synthetic peptide"
TKPQSSY

SEQ ID NO: 11718 - protein, 7 aa, Artificial Sequence
  source: /note="Description of Artificial Sequence: Synthetic peptide"
TKRESHS

SEQ ID NO: 11719 - protein, 7 aa, Artificial Sequence
  source: /note="Description of Artificial Sequence: Synthetic peptide"
TKSAATA

SEQ ID NO: 11720 - protein, 7 aa, Artificial Sequence
  source: /note="Description of Artificial Sequence: Synthetic peptide"
TKSGLTQ

SEQ ID NO: 11721 - protein, 7 aa, Artificial Sequence
  source: /note="Description of Artificial Sequence: Synthetic peptide"
TKSGNSL

SEQ ID NO: 11722 - protein, 7 aa, Artificial Sequence
  source: /note="Description of Artificial Sequence: Synthetic peptide"
TKSQTHL

SEQ ID NO: 11723 - protein, 7 aa, Artificial Sequence
  source: /note="Description of Artificial Sequence: Synthetic peptide"
TKSSVLP

SEQ ID NO: 11724 - protein, 7 aa, Artificial Sequence
  source: /note="Description of Artificial Sequence: Synthetic peptide"
TKSYSPN

SEQ ID NO: 11725 - protein, 7 aa, Artificial Sequence
  source: /note="Description of Artificial Sequence: Synthetic peptide"
TKTGDGP

SEQ ID NO: 11726 - protein, 7 aa, Artificial Sequence
  source: /note="Description of Artificial Sequence: Synthetic peptide"
TKTSFPN

SEQ ID NO: 11727 - protein, 7 aa, Artificial Sequence
  source: /note="Description of Artificial Sequence: Synthetic peptide"
TKVALDP

SEQ ID NO: 11728 - protein, 7 aa, Artificial Sequence
  source: /note="Description of Artificial Sequence: Synthetic peptide"
TKVAREV

SEQ ID NO: 11729 - protein, 7 aa, Artificial Sequence
  source: /note="Description of Artificial Sequence: Synthetic peptide"
TLALYAS

SEQ ID NO: 11730 - protein, 7 aa, Artificial Sequence
  source: /note="Description of Artificial Sequence: Synthetic peptide"
TLAPTTK

SEQ ID NO: 11731 - protein, 7 aa, Artificial Sequence
  source: /note="Description of Artificial Sequence: Synthetic peptide"
TLASGRA

SEQ ID NO: 11732 - protein, 7 aa, Artificial Sequence
  source: /note="Description of Artificial Sequence: Synthetic peptide"
TLASRSV

SEQ ID NO: 11733 - protein, 7 aa, Artificial Sequence
  source: /note="Description of Artificial Sequence: Synthetic peptide"
TLATSSN

SEQ ID NO: 11734 - protein, 7 aa, Artificial Sequence
  source: /note="Description of Artificial Sequence: Synthetic peptide"
TLAVNSM

SEQ ID NO: 11735 - protein, 7 aa, Artificial Sequence
  source: /note="Description of Artificial Sequence: Synthetic peptide"
TLDMTSV

SEQ ID NO: 11736 - protein, 7 aa, Artificial Sequence
  source: /note="Description of Artificial Sequence: Synthetic peptide"
TLDNSRA

SEQ ID NO: 11737 - protein, 7 aa, Artificial Sequence
  source: /note="Description of Artificial Sequence: Synthetic peptide"
TLDVHYV

SEQ ID NO: 11738 - protein, 7 aa, Artificial Sequence
  source: /note="Description of Artificial Sequence: Synthetic peptide"
TLEAQTD

SEQ ID NO: 11739 - protein, 7 aa, Artificial Sequence
  source: /note="Description of Artificial Sequence: Synthetic peptide"
TLEHTCR

SEQ ID NO: 11740 - protein, 7 aa, Artificial Sequence
  source: /note="Description of Artificial Sequence: Synthetic peptide"
TLEPRKD

SEQ ID NO: 11741 - protein, 7 aa, Artificial Sequence
  source: /note="Description of Artificial Sequence: Synthetic peptide"
TLEQFGS

SEQ ID NO: 11742 - protein, 7 aa, Artificial Sequence
  source: /note="Description of Artificial Sequence: Synthetic peptide"
TLEQYKL

SEQ ID NO: 11743 - protein, 7 aa, Artificial Sequence
  source: /note="Description of Artificial Sequence: Synthetic peptide"
TLERKLD

SEQ ID NO: 11744 - protein, 7 aa, Artificial Sequence
  source: /note="Description of Artificial Sequence: Synthetic peptide"
TLERPFI

SEQ ID NO: 11745 - protein, 7 aa, Artificial Sequence
  source: /note="Description of Artificial Sequence: Synthetic peptide"
TLFNSEK

SEQ ID NO: 11746 - protein, 7 aa, Artificial Sequence
  source: /note="Description of Artificial Sequence: Synthetic peptide"
TLFQQPP

SEQ ID NO: 11747 - protein, 7 aa, Artificial Sequence
  source: /note="Description of Artificial Sequence: Synthetic peptide"
TLFRDGS

SEQ ID NO: 11748 - protein, 7 aa, Artificial Sequence
  source: /note="Description of Artificial Sequence: Synthetic peptide"
TLGGSPV

SEQ ID NO: 11749 - protein, 7 aa, Artificial Sequence
  source: /note="Description of Artificial Sequence: Synthetic peptide"
TLGGSRA

SEQ ID NO: 11750 - protein, 7 aa, Artificial Sequence
  source: /note="Description of Artificial Sequence: Synthetic peptide"
TLGHAFA

SEQ ID NO: 11751 - protein, 7 aa, Artificial Sequence
  source: /note="Description of Artificial Sequence: Synthetic peptide"
TLGHVPP

SEQ ID NO: 11752 - protein, 7 aa, Artificial Sequence
  source: /note="Description of Artificial Sequence: Synthetic peptide"
TLGITAH

SEQ ID NO: 11753 - protein, 7 aa, Artificial Sequence
  source: /note="Description of Artificial Sequence: Synthetic peptide"
TLGIVTQ

SEQ ID NO: 11754 - protein, 7 aa, Artificial Sequence
  source: /note="Description of Artificial Sequence: Synthetic peptide"
TLGLTMP

SEQ ID NO: 11755 - protein, 7 aa, Artificial Sequence
  source: /note="Description of Artificial Sequence: Synthetic peptide"
TLGPNSR

SEQ ID NO: 11756 - protein, 7 aa, Artificial Sequence
  source: /note="Description of Artificial Sequence: Synthetic peptide"
TLGQTTG

SEQ ID NO: 11757 - protein, 7 aa, Artificial Sequence
  source: /note="Description of Artificial Sequence: Synthetic peptide"
TLHQIPA

SEQ ID NO: 11758 - protein, 7 aa, Artificial Sequence
  source: /note="Description of Artificial Sequence: Synthetic peptide"
TLHSSSS

SEQ ID NO: 11759 - protein, 7 aa, Artificial Sequence
  source: /note="Description of Artificial Sequence: Synthetic peptide"
TLIGNDT

SEQ ID NO: 11760 - protein, 7 aa, Artificial Sequence
  source: /note="Description of Artificial Sequence: Synthetic peptide"
TLISSVT

SEQ ID NO: 11761 - protein, 7 aa, Artificial Sequence
  source: /note="Description of Artificial Sequence: Synthetic peptide"
TLKAEDL

SEQ ID NO: 11762 - protein, 7 aa, Artificial Sequence
  source: /note="Description of Artificial Sequence: Synthetic peptide"
TLKGPGQ

SEQ ID NO: 11763 - protein, 7 aa, Artificial Sequence
  source: /note="Description of Artificial Sequence: Synthetic peptide"
TLKRGLD

SEQ ID NO: 11764 - protein, 7 aa, Artificial Sequence
  source: /note="Description of Artificial Sequence: Synthetic peptide"
TLKSNAK

SEQ ID NO: 11765 - protein, 7 aa, Artificial Sequence
  source: /note="Description of Artificial Sequence: Synthetic peptide"
TLLPASP

SEQ ID NO: 11766 - protein, 7 aa, Artificial Sequence
  source: /note="Description of Artificial Sequence: Synthetic peptide"
TLLPGDP

SEQ ID NO: 11767 - protein, 7 aa, Artificial Sequence
  source: /note="Description of Artificial Sequence: Synthetic peptide"
TLLPHPT

SEQ ID NO: 11768 - protein, 7 aa, Artificial Sequence
  source: /note="Description of Artificial Sequence: Synthetic peptide"
TLLTDDL

SEQ ID NO: 11769 - protein, 7 aa, Artificial Sequence
  source: /note="Description of Artificial Sequence: Synthetic peptide"
TLMQVSG

SEQ ID NO: 11770 - protein, 7 aa, Artificial Sequence
  source: /note="Description of Artificial Sequence: Synthetic peptide"
TLMRGAS

SEQ ID NO: 11771 - protein, 7 aa, Artificial Sequence
  source: /note="Description of Artificial Sequence: Synthetic peptide"
TLNSAKK

SEQ ID NO: 11772 - protein, 7 aa, Artificial Sequence
  source: /note="Description of Artificial Sequence: Synthetic peptide"
TLNSERM

SEQ ID NO: 11773 - protein, 7 aa, Artificial Sequence
  source: /note="Description of Artificial Sequence: Synthetic peptide"
TLPHRVA

SEQ ID NO: 11774 - protein, 7 aa, Artificial Sequence
  source: /note="Description of Artificial Sequence: Synthetic peptide"
TLPHSPK

SEQ ID NO: 11775 - protein, 7 aa, Artificial Sequence
  source: /note="Description of Artificial Sequence: Synthetic peptide"
TLPKTNL

SEQ ID NO: 11776 - protein, 7 aa, Artificial Sequence
  source: /note="Description of Artificial Sequence: Synthetic peptide"
TLPLTST

SEQ ID NO: 11777 - protein, 7 aa, Artificial Sequence
  source: /note="Description of Artificial Sequence: Synthetic peptide"
TLPNYLA

SEQ ID NO: 11778 - protein, 7 aa, Artificial Sequence
  source: /note="Description of Artificial Sequence: Synthetic peptide"
TLPPNSP

SEQ ID NO: 11779 - protein, 7 aa, Artificial Sequence
  source: /note="Description of Artificial Sequence: Synthetic peptide"
TLPSERV

SEQ ID NO: 11780 - protein, 7 aa, Artificial Sequence
  source: /note="Description of Artificial Sequence: Synthetic peptide"
TLPTTLV

SEQ ID NO: 11781 - protein, 7 aa, Artificial Sequence
  source: /note="Description of Artificial Sequence: Synthetic peptide"
TLPVNNL

SEQ ID NO: 11782 - protein, 7 aa, Artificial Sequence
  source: /note="Description of Artificial Sequence: Synthetic peptide"
TLQDNRA

SEQ ID NO: 11783 - protein, 7 aa, Artificial Sequence
  source: /note="Description of Artificial Sequence: Synthetic peptide"
TLQEGTG

SEQ ID NO: 11784 - protein, 7 aa, Artificial Sequence
  source: /note="Description of Artificial Sequence: Synthetic peptide"
TLQFGAG

SEQ ID NO: 11785 - protein, 7 aa, Artificial Sequence
  source: /note="Description of Artificial Sequence: Synthetic peptide"
TLQGGSL

SEQ ID NO: 11786 - protein, 7 aa, Artificial Sequence
  source: /note="Description of Artificial Sequence: Synthetic peptide"
TLQPLRI

SEQ ID NO: 11787 - protein, 7 aa, Artificial Sequence
  source: /note="Description of Artificial Sequence: Synthetic peptide"
TLRDTAD

SEQ ID NO: 11788 - protein, 7 aa, Artificial Sequence
  source: /note="Description of Artificial Sequence: Synthetic peptide"
TLRESDT

SEQ ID NO: 11789 - protein, 7 aa, Artificial Sequence
  source: /note="Description of Artificial Sequence: Synthetic peptide"
TLRGAED

SEQ ID NO: 11790 - protein, 7 aa, Artificial Sequence
  source: /note="Description of Artificial Sequence: Synthetic peptide"
TLRLTAG

SEQ ID NO: 11791 - protein, 7 aa, Artificial Sequence
  source: /note="Description of Artificial Sequence: Synthetic peptide"
TLRMQLN

SEQ ID NO: 11792 - protein, 7 aa, Artificial Sequence
  source: /note="Description of Artificial Sequence: Synthetic peptide"
TLRNSPA

SEQ ID NO: 11793 - protein, 7 aa, Artificial Sequence
  source: /note="Description of Artificial Sequence: Synthetic peptide"
TLRPLQA

SEQ ID NO: 11794 - protein, 7 aa, Artificial Sequence
  source: /note="Description of Artificial Sequence: Synthetic peptide"
TLRSAGP

SEQ ID NO: 11795 - protein, 7 aa, Artificial Sequence
  source: /note="Description of Artificial Sequence: Synthetic peptide"
TLRTLAE

SEQ ID NO: 11796 - protein, 7 aa, Artificial Sequence
  source: /note="Description of Artificial Sequence: Synthetic peptide"
TLSALPP

SEQ ID NO: 11797 - protein, 7 aa, Artificial Sequence
  source: /note="Description of Artificial Sequence: Synthetic peptide"
TLSDRPP

SEQ ID NO: 11798 - protein, 7 aa, Artificial Sequence
  source: /note="Description of Artificial Sequence: Synthetic peptide"
TLSDSVD

SEQ ID NO: 11799 - protein, 7 aa, Artificial Sequence
  source: /note="Description of Artificial Sequence: Synthetic peptide"
TLSENLP

SEQ ID NO: 11800 - protein, 7 aa, Artificial Sequence
  source: /note="Description of Artificial Sequence: Synthetic peptide"
TLSHLPY

SEQ ID NO: 11801 - protein, 7 aa, Artificial Sequence
  source: /note="Description of Artificial Sequence: Synthetic peptide"
TLSHNAP

SEQ ID NO: 11802 - protein, 7 aa, Artificial Sequence
  source: /note="Description of Artificial Sequence: Synthetic peptide"
TLSHRLP

SEQ ID NO: 11803 - protein, 7 aa, Artificial Sequence
  source: /note="Description of Artificial Sequence: Synthetic peptide"
TLSKHLL

SEQ ID NO: 11804 - protein, 7 aa, Artificial Sequence
  source: /note="Description of Artificial Sequence: Synthetic peptide"
TLSKPPS

SEQ ID NO: 11805 - protein, 7 aa, Artificial Sequence
  source: /note="Description of Artificial Sequence: Synthetic peptide"
TLSLSAI

SEQ ID NO: 11806 - protein, 7 aa, Artificial Sequence
  source: /note="Description of Artificial Sequence: Synthetic peptide"
TLSLSNN

SEQ ID NO: 11807 - protein, 7 aa, Artificial Sequence
  source: /note="Description of Artificial Sequence: Synthetic peptide"
TLSLSTG

SEQ ID NO: 11808 - protein, 7 aa, Artificial Sequence
  source: /note="Description of Artificial Sequence: Synthetic peptide"
TLSNSVP

SEQ ID NO: 11809 - protein, 7 aa, Artificial Sequence
  source: /note="Description of Artificial Sequence: Synthetic peptide"
TLSPKSV

SEQ ID NO: 11810 - protein, 7 aa, Artificial Sequence
  source: /note="Description of Artificial Sequence: Synthetic peptide"
TLSPSGS

SEQ ID NO: 11811 - protein, 7 aa, Artificial Sequence
  source: /note="Description of Artificial Sequence: Synthetic peptide"
TLSPTTS

SEQ ID NO: 11812 - protein, 7 aa, Artificial Sequence
  source: /note="Description of Artificial Sequence: Synthetic peptide"
TLSQRPP

SEQ ID NO: 11813 - protein, 7 aa, Artificial Sequence
  source: /note="Description of Artificial Sequence: Synthetic peptide"
TLSQSTH

SEQ ID NO: 11814 - protein, 7 aa, Artificial Sequence
  source: /note="Description of Artificial Sequence: Synthetic peptide"
TLSRTLE

SEQ ID NO: 11815 - protein, 7 aa, Artificial Sequence
  source: /note="Description of Artificial Sequence: Synthetic peptide"
TLSSGQT

SEQ ID NO: 11816 - protein, 7 aa, Artificial Sequence
  source: /note="Description of Artificial Sequence: Synthetic peptide"
TLSSRPM

SEQ ID NO: 11817 - protein, 7 aa, Artificial Sequence
  source: /note="Description of Artificial Sequence: Synthetic peptide"
TLSSRQS

SEQ ID NO: 11818 - protein, 7 aa, Artificial Sequence
  source: /note="Description of Artificial Sequence: Synthetic peptide"
TLSTVSL

SEQ ID NO: 11819 - protein, 7 aa, Artificial Sequence
  source: /note="Description of Artificial Sequence: Synthetic peptide"
TLSYTPA

SEQ ID NO: 11820 - protein, 7 aa, Artificial Sequence
  source: /note="Description of Artificial Sequence: Synthetic peptide"
TLTFRGD

SEQ ID NO: 11821 - protein, 7 aa, Artificial Sequence
  source: /note="Description of Artificial Sequence: Synthetic peptide"
TLTKNST

SEQ ID NO: 11822 - protein, 7 aa, Artificial Sequence
  source: /note="Description of Artificial Sequence: Synthetic peptide"
TLTPLYE

SEQ ID NO: 11823 - protein, 7 aa, Artificial Sequence
  source: /note="Description of Artificial Sequence: Synthetic peptide"
TLTPNES

SEQ ID NO: 11824 - protein, 7 aa, Artificial Sequence
  source: /note="Description of Artificial Sequence: Synthetic peptide"
TLTRLSP

SEQ ID NO: 11825 - protein, 7 aa, Artificial Sequence
  source: /note="Description of Artificial Sequence: Synthetic peptide"
TLTRMNV

SEQ ID NO: 11826 - protein, 7 aa, Artificial Sequence
  source: /note="Description of Artificial Sequence: Synthetic peptide"
TLTTNVS

SEQ ID NO: 11827 - protein, 7 aa, Artificial Sequence
  source: /note="Description of Artificial Sequence: Synthetic peptide"
TLTTPMN

SEQ ID NO: 11828 - protein, 7 aa, Artificial Sequence
  source: /note="Description of Artificial Sequence: Synthetic peptide"
TLTVLDP

SEQ ID NO: 11829 - protein, 7 aa, Artificial Sequence
  source: /note="Description of Artificial Sequence: Synthetic peptide"
TLTYHRD

SEQ ID NO: 11830 - protein, 7 aa, Artificial Sequence
  source: /note="Description of Artificial Sequence: Synthetic peptide"
TLVGHYY

SEQ ID NO: 11831 - protein, 7 aa, Artificial Sequence
  source: /note="Description of Artificial Sequence: Synthetic peptide"
TLVGPAS

SEQ ID NO: 11832 - protein, 7 aa, Artificial Sequence
  source: /note="Description of Artificial Sequence: Synthetic peptide"
TLVPRDL

SEQ ID NO: 11833 - protein, 7 aa, Artificial Sequence
  source: /note="Description of Artificial Sequence: Synthetic peptide"
TLVQAEM

SEQ ID NO: 11834 - protein, 7 aa, Artificial Sequence
  source: /note="Description of Artificial Sequence: Synthetic peptide"
TLVTREN

SEQ ID NO: 11835 - protein, 7 aa, Artificial Sequence
  source: /note="Description of Artificial Sequence: Synthetic peptide"
TLVVRSP

SEQ ID NO: 11836 - protein, 7 aa, Artificial Sequence
  source: /note="Description of Artificial Sequence: Synthetic peptide"
TLYGHPS

SEQ ID NO: 11837 - protein, 7 aa, Artificial Sequence
  source: /note="Description of Artificial Sequence: Synthetic peptide"
TLYLHSE

SEQ ID NO: 11838 - protein, 7 aa, Artificial Sequence
  source: /note="Description of Artificial Sequence: Synthetic peptide"
TLYNTTM

SEQ ID NO: 11839 - protein, 7 aa, Artificial Sequence
  source: /note="Description of Artificial Sequence: Synthetic peptide"
TLYRVNP

SEQ ID NO: 11840 - protein, 7 aa, Artificial Sequence
  source: /note="Description of Artificial Sequence: Synthetic peptide"
TLYSQSE

SEQ ID NO: 11841 - protein, 7 aa, Artificial Sequence
  source: /note="Description of Artificial Sequence: Synthetic peptide"
TLYTNSV

SEQ ID NO: 11842 - protein, 7 aa, Artificial Sequence
  source: /note="Description of Artificial Sequence: Synthetic peptide"
TMAMNPR

SEQ ID NO: 11843 - protein, 7 aa, Artificial Sequence
  source: /note="Description of Artificial Sequence: Synthetic peptide"
TMAPRDL

SEQ ID NO: 11844 - protein, 7 aa, Artificial Sequence
  source: /note="Description of Artificial Sequence: Synthetic peptide"
TMDNLRQ

SEQ ID NO: 11845 - protein, 7 aa, Artificial Sequence
  source: /note="Description of Artificial Sequence: Synthetic peptide"
TMDRTPG

SEQ ID NO: 11846 - protein, 7 aa, Artificial Sequence
  source: /note="Description of Artificial Sequence: Synthetic peptide"
TMDVLSF

SEQ ID NO: 11847 - protein, 7 aa, Artificial Sequence
  source: /note="Description of Artificial Sequence: Synthetic peptide"
TMERGDS

SEQ ID NO: 11848 - protein, 7 aa, Artificial Sequence
  source: /note="Description of Artificial Sequence: Synthetic peptide"
TMHAHPL

SEQ ID NO: 11849 - protein, 7 aa, Artificial Sequence
  source: /note="Description of Artificial Sequence: Synthetic peptide"
TMLTRTG

SEQ ID NO: 11850 - protein, 7 aa, Artificial Sequence
  source: /note="Description of Artificial Sequence: Synthetic peptide"
TMMKPLD

SEQ ID NO: 11851 - protein, 7 aa, Artificial Sequence
  source: /note="Description of Artificial Sequence: Synthetic peptide"
TMNKPTL

SEQ ID NO: 11852 - protein, 7 aa, Artificial Sequence
  source: /note="Description of Artificial Sequence: Synthetic peptide"
TMNLGEM

SEQ ID NO: 11853 - protein, 7 aa, Artificial Sequence
  source: /note="Description of Artificial Sequence: Synthetic peptide"
TMNPTQN

SEQ ID NO: 11854 - protein, 7 aa, Artificial Sequence
  source: /note="Description of Artificial Sequence: Synthetic peptide"
TMNTLVT

SEQ ID NO: 11855 - protein, 7 aa, Artificial Sequence
  source: /note="Description of Artificial Sequence: Synthetic peptide"
TMPNHGP

SEQ ID NO: 11856 - protein, 7 aa, Artificial Sequence
  source: /note="Description of Artificial Sequence: Synthetic peptide"
TMPSESV

SEQ ID NO: 11857 - protein, 7 aa, Artificial Sequence
  source: /note="Description of Artificial Sequence: Synthetic peptide"
TMQAPSA

SEQ ID NO: 11858 - protein, 7 aa, Artificial Sequence
  source: /note="Description of Artificial Sequence: Synthetic peptide"
TMQYGST

SEQ ID NO: 11859 - protein, 7 aa, Artificial Sequence
  source: /note="Description of Artificial Sequence: Synthetic peptide"
TMREGPA

SEQ ID NO: 11860 - protein, 7 aa, Artificial Sequence
  source: /note="Description of Artificial Sequence: Synthetic peptide"
TMRIDLP

SEQ ID NO: 11861 - protein, 7 aa, Artificial Sequence
  source: /note="Description of Artificial Sequence: Synthetic peptide"
TMRSSEI

SEQ ID NO: 11862 - protein, 7 aa, Artificial Sequence
  source: /note="Description of Artificial Sequence: Synthetic peptide"
TMRTNPD

SEQ ID NO: 11863 - protein, 7 aa, Artificial Sequence
  source: /note="Description of Artificial Sequence: Synthetic peptide"
TMSGTSR

SEQ ID NO: 11864 - protein, 7 aa, Artificial Sequence
  source: /note="Description of Artificial Sequence: Synthetic peptide"
TMSIALA

SEQ ID NO: 11865 - protein, 7 aa, Artificial Sequence
  source: /note="Description of Artificial Sequence: Synthetic peptide"
TMSKPSY

SEQ ID NO: 11866 - protein, 7 aa, Artificial Sequence
  source: /note="Description of Artificial Sequence: Synthetic peptide"
TMSMSIT

SEQ ID NO: 11867 - protein, 7 aa, Artificial Sequence
  source: /note="Description of Artificial Sequence: Synthetic peptide"
TMSPGNN

SEQ ID NO: 11868 - protein, 7 aa, Artificial Sequence
  source: /note="Description of Artificial Sequence: Synthetic peptide"
TMSPHSP

SEQ ID NO: 11869 - protein, 7 aa, Artificial Sequence
  source: /note="Description of Artificial Sequence: Synthetic peptide"
TMSPLNR

SEQ ID NO: 11870 - protein, 7 aa, Artificial Sequence
  source: /note="Description of Artificial Sequence: Synthetic peptide"
TMTHHQF

SEQ ID NO: 11871 - protein, 7 aa, Artificial Sequence
  source: /note="Description of Artificial Sequence: Synthetic peptide"
TMTRSML

SEQ ID NO: 11872 - protein, 7 aa, Artificial Sequence
  source: /note="Description of Artificial Sequence: Synthetic peptide"
TMTVLTM

SEQ ID NO: 11873 - protein, 7 aa, Artificial Sequence
  source: /note="Description of Artificial Sequence: Synthetic peptide"
TMVASMA

SEQ ID NO: 11874 - protein, 7 aa, Artificial Sequence
  source: /note="Description of Artificial Sequence: Synthetic peptide"
TMVKQGN

SEQ ID NO: 11875 - protein, 7 aa, Artificial Sequence
  source: /note="Description of Artificial Sequence: Synthetic peptide"
TMVSGGH

SEQ ID NO: 11876 - protein, 7 aa, Artificial Sequence
  source: /note="Description of Artificial Sequence: Synthetic peptide"
TMVVVSS

SEQ ID NO: 11877 - protein, 7 aa, Artificial Sequence
  source: /note="Description of Artificial Sequence: Synthetic peptide"
TMVYTDN

SEQ ID NO: 11878 - protein, 7 aa, Artificial Sequence
  source: /note="Description of Artificial Sequence: Synthetic peptide"
TNAALQS

SEQ ID NO: 11879 - protein, 7 aa, Artificial Sequence
  source: /note="Description of Artificial Sequence: Synthetic peptide"
TNAIKSG

SEQ ID NO: 11880 - protein, 7 aa, Artificial Sequence
  source: /note="Description of Artificial Sequence: Synthetic peptide"
TNASWPP

SEQ ID NO: 11881 - protein, 7 aa, Artificial Sequence
  source: /note="Description of Artificial Sequence: Synthetic peptide"
TNDPMMP

SEQ ID NO: 11882 - protein, 7 aa, Artificial Sequence
  source: /note="Description of Artificial Sequence: Synthetic peptide"
TNEHKFS

SEQ ID NO: 11883 - protein, 7 aa, Artificial Sequence
  source: /note="Description of Artificial Sequence: Synthetic peptide"
TNESSGT

SEQ ID NO: 11884 - protein, 7 aa, Artificial Sequence
  source: /note="Description of Artificial Sequence: Synthetic peptide"
TNFLPHG

SEQ ID NO: 11885 - protein, 7 aa, Artificial Sequence
  source: /note="Description of Artificial Sequence: Synthetic peptide"
TNFPQSA

SEQ ID NO: 11886 - protein, 7 aa, Artificial Sequence
  source: /note="Description of Artificial Sequence: Synthetic peptide"
TNFQLTV

SEQ ID NO: 11887 - protein, 7 aa, Artificial Sequence
  source: /note="Description of Artificial Sequence: Synthetic peptide"
TNGRVTA

SEQ ID NO: 11888 - protein, 7 aa, Artificial Sequence
  source: /note="Description of Artificial Sequence: Synthetic peptide"
TNGTKPT

SEQ ID NO: 11889 - protein, 7 aa, Artificial Sequence
  source: /note="Description of Artificial Sequence: Synthetic peptide"
TNGVKLS

SEQ ID NO: 11890 - protein, 7 aa, Artificial Sequence
  source: /note="Description of Artificial Sequence: Synthetic peptide"
TNHIAAL

SEQ ID NO: 11891 - protein, 7 aa, Artificial Sequence
  source: /note="Description of Artificial Sequence: Synthetic peptide"
TNHSSPL

SEQ ID NO: 11892 - protein, 7 aa, Artificial Sequence
  source: /note="Description of Artificial Sequence: Synthetic peptide"
TNKTVGC

SEQ ID NO: 11893 - protein, 7 aa, Artificial Sequence
  source: /note="Description of Artificial Sequence: Synthetic peptide"
TNLAARP

SEQ ID NO: 11894 - protein, 7 aa, Artificial Sequence
  source: /note="Description of Artificial Sequence: Synthetic peptide"
TNLKRMD

SEQ ID NO: 11895 - protein, 7 aa, Artificial Sequence
  source: /note="Description of Artificial Sequence: Synthetic peptide"
TNLNGND

SEQ ID NO: 11896 - protein, 7 aa, Artificial Sequence
  source: /note="Description of Artificial Sequence: Synthetic peptide"
TNLNTRP

SEQ ID NO: 11897 - protein, 7 aa, Artificial Sequence
  source: /note="Description of Artificial Sequence: Synthetic peptide"
TNLRSEL

SEQ ID NO: 11898 - protein, 7 aa, Artificial Sequence
  source: /note="Description of Artificial Sequence: Synthetic peptide"
TNLRTAV

SEQ ID NO: 11899 - protein, 7 aa, Artificial Sequence
  source: /note="Description of Artificial Sequence: Synthetic peptide"
TNMKTDS

SEQ ID NO: 11900 - protein, 7 aa, Artificial Sequence
  source: /note="Description of Artificial Sequence: Synthetic peptide"
TNMPMNP

SEQ ID NO: 11901 - protein, 7 aa, Artificial Sequence
  source: /note="Description of Artificial Sequence: Synthetic peptide"
TNMPPLP

SEQ ID NO: 11902 - protein, 7 aa, Artificial Sequence
  source: /note="Description of Artificial Sequence: Synthetic peptide"
TNMPPLT

SEQ ID NO: 11903 - protein, 7 aa, Artificial Sequence
  source: /note="Description of Artificial Sequence: Synthetic peptide"
TNNGGMY

SEQ ID NO: 11904 - protein, 7 aa, Artificial Sequence
  source: /note="Description of Artificial Sequence: Synthetic peptide"
TNNSTNP

SEQ ID NO: 11905 - protein, 7 aa, Artificial Sequence
  source: /note="Description of Artificial Sequence: Synthetic peptide"
TNPAPNS

SEQ ID NO: 11906 - protein, 7 aa, Artificial Sequence
  source: /note="Description of Artificial Sequence: Synthetic peptide"
TNPGPLD

SEQ ID NO: 11907 - protein, 7 aa, Artificial Sequence
  source: /note="Description of Artificial Sequence: Synthetic peptide"
TNPHRDT

SEQ ID NO: 11908 - protein, 7 aa, Artificial Sequence
  source: /note="Description of Artificial Sequence: Synthetic peptide"
TNPLSTG

SEQ ID NO: 11909 - protein, 7 aa, Artificial Sequence
  source: /note="Description of Artificial Sequence: Synthetic peptide"
TNPNNAN

SEQ ID NO: 11910 - protein, 7 aa, Artificial Sequence
  source: /note="Description of Artificial Sequence: Synthetic peptide"
TNPRSYT

SEQ ID NO: 11911 - protein, 7 aa, Artificial Sequence
  source: /note="Description of Artificial Sequence: Synthetic peptide"
TNPSALG

SEQ ID NO: 11912 - protein, 7 aa, Artificial Sequence
  source: /note="Description of Artificial Sequence: Synthetic peptide"
TNPSMCL

SEQ ID NO: 11913 - protein, 7 aa, Artificial Sequence
  source: /note="Description of Artificial Sequence: Synthetic peptide"
TNPTSMA

SEQ ID NO: 11914 - protein, 7 aa, Artificial Sequence
  source: /note="Description of Artificial Sequence: Synthetic peptide"
TNPVLTE

SEQ ID NO: 11915 - protein, 7 aa, Artificial Sequence
  source: /note="Description of Artificial Sequence: Synthetic peptide"
TNPVRLV

SEQ ID NO: 11916 - protein, 7 aa, Artificial Sequence
  source: /note="Description of Artificial Sequence: Synthetic peptide"
TNPVRTS

SEQ ID NO: 11917 - protein, 7 aa, Artificial Sequence
  source: /note="Description of Artificial Sequence: Synthetic peptide"
TNRGWTD

SEQ ID NO: 11918 - protein, 7 aa, Artificial Sequence
  source: /note="Description of Artificial Sequence: Synthetic peptide"
TNRNSEV

SEQ ID NO: 11919 - protein, 7 aa, Artificial Sequence
  source: /note="Description of Artificial Sequence: Synthetic peptide"
TNRPIDT

SEQ ID NO: 11920 - protein, 7 aa, Artificial Sequence
  source: /note="Description of Artificial Sequence: Synthetic peptide"
TNRQAST

SEQ ID NO: 11921 - protein, 7 aa, Artificial Sequence
  source: /note="Description of Artificial Sequence: Synthetic peptide"
TNRQDTR

SEQ ID NO: 11922 - protein, 7 aa, Artificial Sequence
  source: /note="Description of Artificial Sequence: Synthetic peptide"
TNSAISG

SEQ ID NO: 11923 - protein, 7 aa, Artificial Sequence
  source: /note="Description of Artificial Sequence: Synthetic peptide"
TNSGSDA

SEQ ID NO: 11924 - protein, 7 aa, Artificial Sequence
  source: /note="Description of Artificial Sequence: Synthetic peptide"
TNSHAML

SEQ ID NO: 11925 - protein, 7 aa, Artificial Sequence
  source: /note="Description of Artificial Sequence: Synthetic peptide"
TNSLPAL

SEQ ID NO: 11926 - protein, 7 aa, Artificial Sequence
  source: /note="Description of Artificial Sequence: Synthetic peptide"
TNSMGVP

SEQ ID NO: 11927 - protein, 7 aa, Artificial Sequence
  source: /note="Description of Artificial Sequence: Synthetic peptide"
TNSNHTY

SEQ ID NO: 11928 - protein, 7 aa, Artificial Sequence
  source: /note="Description of Artificial Sequence: Synthetic peptide"
TNSPSRS

SEQ ID NO: 11929 - protein, 7 aa, Artificial Sequence
  source: /note="Description of Artificial Sequence: Synthetic peptide"
TNTDVTK

SEQ ID NO: 11930 - protein, 7 aa, Artificial Sequence
  source: /note="Description of Artificial Sequence: Synthetic peptide"
TNTRTPY

SEQ ID NO: 11931 - protein, 7 aa, Artificial Sequence
  source: /note="Description of Artificial Sequence: Synthetic peptide"
TNTSASR

SEQ ID NO: 11932 - protein, 7 aa, Artificial Sequence
  source: /note="Description of Artificial Sequence: Synthetic peptide"
TNTSSTY

SEQ ID NO: 11933 - protein, 7 aa, Artificial Sequence
  source: /note="Description of Artificial Sequence: Synthetic peptide"
TNTTINL

SEQ ID NO: 11934 - protein, 7 aa, Artificial Sequence
  source: /note="Description of Artificial Sequence: Synthetic peptide"
TNTVRNF

SEQ ID NO: 11935 - protein, 7 aa, Artificial Sequence
  source: /note="Description of Artificial Sequence: Synthetic peptide"
TNVMKAG

SEQ ID NO: 11936 - protein, 7 aa, Artificial Sequence
  source: /note="Description of Artificial Sequence: Synthetic peptide"
TNYNVGS

SEQ ID NO: 11937 - protein, 7 aa, Artificial Sequence
  source: /note="Description of Artificial Sequence: Synthetic peptide"
TNYVLAP

SEQ ID NO: 11938 - protein, 7 aa, Artificial Sequence
  source: /note="Description of Artificial Sequence: Synthetic peptide"
TPAFKIQ

SEQ ID NO: 11939 - protein, 7 aa, Artificial Sequence
  source: /note="Description of Artificial Sequence: Synthetic peptide"
TPAIVPT

SEQ ID NO: 11940 - protein, 7 aa, Artificial Sequence
  source: /note="Description of Artificial Sequence: Synthetic peptide"
TPALNRP

SEQ ID NO: 11941 - protein, 7 aa, Artificial Sequence
  source: /note="Description of Artificial Sequence: Synthetic peptide"
TPANDPR

SEQ ID NO: 11942 - protein, 7 aa, Artificial Sequence
  source: /note="Description of Artificial Sequence: Synthetic peptide"
TPAPNRF

SEQ ID NO: 11943 - protein, 7 aa, Artificial Sequence
  source: /note="Description of Artificial Sequence: Synthetic peptide"
TPASPSD

SEQ ID NO: 11944 - protein, 7 aa, Artificial Sequence
  source: /note="Description of Artificial Sequence: Synthetic peptide"
TPATLPS

SEQ ID NO: 11945 - protein, 7 aa, Artificial Sequence
  source: /note="Description of Artificial Sequence: Synthetic peptide"
TPAVEKL

SEQ ID NO: 11946 - protein, 7 aa, Artificial Sequence
  source: /note="Description of Artificial Sequence: Synthetic peptide"
TPAYGRI

SEQ ID NO: 11947 - protein, 7 aa, Artificial Sequence
  source: /note="Description of Artificial Sequence: Synthetic peptide"
TPDMPFT

SEQ ID NO: 11948 - protein, 7 aa, Artificial Sequence
  source: /note="Description of Artificial Sequence: Synthetic peptide"
TPDQYEF

SEQ ID NO: 11949 - protein, 7 aa, Artificial Sequence
  source: /note="Description of Artificial Sequence: Synthetic peptide"
TPDSMTA

SEQ ID NO: 11950 - protein, 7 aa, Artificial Sequence
  source: /note="Description of Artificial Sequence: Synthetic peptide"
TPEMKSN

SEQ ID NO: 11951 - protein, 7 aa, Artificial Sequence
  source: /note="Description of Artificial Sequence: Synthetic peptide"
TPERAMS

SEQ ID NO: 11952 - protein, 7 aa, Artificial Sequence
  source: /note="Description of Artificial Sequence: Synthetic peptide"
TPETNRP

SEQ ID NO: 11953 - protein, 7 aa, Artificial Sequence
  source: /note="Description of Artificial Sequence: Synthetic peptide"
TPGGARP

SEQ ID NO: 11954 - protein, 7 aa, Artificial Sequence
  source: /note="Description of Artificial Sequence: Synthetic peptide"
TPGHMDS

SEQ ID NO: 11955 - protein, 7 aa, Artificial Sequence
  source: /note="Description of Artificial Sequence: Synthetic peptide"
TPGIPRC

SEQ ID NO: 11956 - protein, 7 aa, Artificial Sequence
  source: /note="Description of Artificial Sequence: Synthetic peptide"
TPGRQFP

SEQ ID NO: 11957 - protein, 7 aa, Artificial Sequence
  source: /note="Description of Artificial Sequence: Synthetic peptide"
TPGTING

SEQ ID NO: 11958 - protein, 7 aa, Artificial Sequence
  source: /note="Description of Artificial Sequence: Synthetic peptide"
TPHGVSP

SEQ ID NO: 11959 - protein, 7 aa, Artificial Sequence
  source: /note="Description of Artificial Sequence: Synthetic peptide"
TPHLDGH

SEQ ID NO: 11960 - protein, 7 aa, Artificial Sequence
  source: /note="Description of Artificial Sequence: Synthetic peptide"
TPHTGNQ

SEQ ID NO: 11961 - protein, 7 aa, Artificial Sequence
  source: /note="Description of Artificial Sequence: Synthetic peptide"
TPHTLEV

SEQ ID NO: 11962 - protein, 7 aa, Artificial Sequence
  source: /note="Description of Artificial Sequence: Synthetic peptide"
TPIGLPS

SEQ ID NO: 11963 - protein, 7 aa, Artificial Sequence
  source: /note="Description of Artificial Sequence: Synthetic peptide"
TPIRNIP

SEQ ID NO: 11964 - protein, 7 aa, Artificial Sequence
  source: /note="Description of Artificial Sequence: Synthetic peptide"
TPISMPS

SEQ ID NO: 11965 - protein, 7 aa, Artificial Sequence
  source: /note="Description of Artificial Sequence: Synthetic peptide"
TPIVHIN

SEQ ID NO: 11966 - protein, 7 aa, Artificial Sequence
  source: /note="Description of Artificial Sequence: Synthetic peptide"
TPIVHPR

SEQ ID NO: 11967 - protein, 7 aa, Artificial Sequence
  source: /note="Description of Artificial Sequence: Synthetic peptide"
TPIVKPD

SEQ ID NO: 11968 - protein, 7 aa, Artificial Sequence
  source: /note="Description of Artificial Sequence: Synthetic peptide"
TPKDAEV

SEQ ID NO: 11969 - protein, 7 aa, Artificial Sequence
  source: /note="Description of Artificial Sequence: Synthetic peptide"
TPKLSEQ

SEQ ID NO: 11970 - protein, 7 aa, Artificial Sequence
  source: /note="Description of Artificial Sequence: Synthetic peptide"
TPKNTLA

SEQ ID NO: 11971 - protein, 7 aa, Artificial Sequence
  source: /note="Description of Artificial Sequence: Synthetic peptide"
TPKSASG

SEQ ID NO: 11972 - protein, 7 aa, Artificial Sequence
  source: /note="Description of Artificial Sequence: Synthetic peptide"
TPLGGSS

SEQ ID NO: 11973 - protein, 7 aa, Artificial Sequence
  source: /note="Description of Artificial Sequence: Synthetic peptide"
TPLHSPG

SEQ ID NO: 11974 - protein, 7 aa, Artificial Sequence
  source: /note="Description of Artificial Sequence: Synthetic peptide"
TPLHSTT

SEQ ID NO: 11975 - protein, 7 aa, Artificial Sequence
  source: /note="Description of Artificial Sequence: Synthetic peptide"
TPLLCGK

SEQ ID NO: 11976 - protein, 7 aa, Artificial Sequence
  source: /note="Description of Artificial Sequence: Synthetic peptide"
TPLLSHS

SEQ ID NO: 11977 - protein, 7 aa, Artificial Sequence
  source: /note="Description of Artificial Sequence: Synthetic peptide"
TPLQTTV

SEQ ID NO: 11978 - protein, 7 aa, Artificial Sequence
  source: /note="Description of Artificial Sequence: Synthetic peptide"
TPLRSSN

SEQ ID NO: 11979 - protein, 7 aa, Artificial Sequence
  source: /note="Description of Artificial Sequence: Synthetic peptide"
TPLSAIQ

SEQ ID NO: 11980 - protein, 7 aa, Artificial Sequence
  source: /note="Description of Artificial Sequence: Synthetic peptide"
TPLTNIA

SEQ ID NO: 11981 - protein, 7 aa, Artificial Sequence
  source: /note="Description of Artificial Sequence: Synthetic peptide"
TPLTTAG

SEQ ID NO: 11982 - protein, 7 aa, Artificial Sequence
  source: /note="Description of Artificial Sequence: Synthetic peptide"
TPMAVES

SEQ ID NO: 11983 - protein, 7 aa, Artificial Sequence
  source: /note="Description of Artificial Sequence: Synthetic peptide"
TPMEMIP

SEQ ID NO: 11984 - protein, 7 aa, Artificial Sequence
  source: /note="Description of Artificial Sequence: Synthetic peptide"
TPMGSGW

SEQ ID NO: 11985 - protein, 7 aa, Artificial Sequence
  source: /note="Description of Artificial Sequence: Synthetic peptide"
TPMQVPA

SEQ ID NO: 11986 - protein, 7 aa, Artificial Sequence
  source: /note="Description of Artificial Sequence: Synthetic peptide"
TPNMLSA

SEQ ID NO: 11987 - protein, 7 aa, Artificial Sequence
  source: /note="Description of Artificial Sequence: Synthetic peptide"
TPNMVTG

SEQ ID NO: 11988 - protein, 7 aa, Artificial Sequence
  source: /note="Description of Artificial Sequence: Synthetic peptide"
TPNSRTV

SEQ ID NO: 11989 - protein, 7 aa, Artificial Sequence
  source: /note="Description of Artificial Sequence: Synthetic peptide"
TPNVTYR

SEQ ID NO: 11990 - protein, 7 aa, Artificial Sequence
  source: /note="Description of Artificial Sequence: Synthetic peptide"
TPNYYHE

SEQ ID NO: 11991 - protein, 7 aa, Artificial Sequence
  source: /note="Description of Artificial Sequence: Synthetic peptide"
TPPDGTR

SEQ ID NO: 11992 - protein, 7 aa, Artificial Sequence
  source: /note="Description of Artificial Sequence: Synthetic peptide"
TPPDQSR

SEQ ID NO: 11993 - protein, 7 aa, Artificial Sequence
  source: /note="Description of Artificial Sequence: Synthetic peptide"
TPPGEMR

SEQ ID NO: 11994 - protein, 7 aa, Artificial Sequence
  source: /note="Description of Artificial Sequence: Synthetic peptide"
TPPLKAS

SEQ ID NO: 11995 - protein, 7 aa, Artificial Sequence
  source: /note="Description of Artificial Sequence: Synthetic peptide"
TPPPPTW

SEQ ID NO: 11996 - protein, 7 aa, Artificial Sequence
  source: /note="Description of Artificial Sequence: Synthetic peptide"
TPPRGIP

SEQ ID NO: 11997 - protein, 7 aa, Artificial Sequence
  source: /note="Description of Artificial Sequence: Synthetic peptide"
TPPRTVV

SEQ ID NO: 11998 - protein, 7 aa, Artificial Sequence
  source: /note="Description of Artificial Sequence: Synthetic peptide"
TPPSSEW

SEQ ID NO: 11999 - protein, 7 aa, Artificial Sequence
  source: /note="Description of Artificial Sequence: Synthetic peptide"
TPPTATR

SEQ ID NO: 12000 - protein, 7 aa, Artificial Sequence
  source: /note="Description of Artificial Sequence: Synthetic peptide"
TPPTLME

SEQ ID NO: 12001 - protein, 7 aa, Artificial Sequence
  source: /note="Description of Artificial Sequence: Synthetic peptide"
TPPYVAQ

SEQ ID NO: 12002 - protein, 7 aa, Artificial Sequence
  source: /note="Description of Artificial Sequence: Synthetic peptide"
TPQGDIA

SEQ ID NO: 12003 - protein, 7 aa, Artificial Sequence
  source: /note="Description of Artificial Sequence: Synthetic peptide"
TPQHMGP

SEQ ID NO: 12004 - protein, 7 aa, Artificial Sequence
  source: /note="Description of Artificial Sequence: Synthetic peptide"
TPQHMRG

SEQ ID NO: 12005 - protein, 7 aa, Artificial Sequence
  source: /note="Description of Artificial Sequence: Synthetic peptide"
TPQMPFP

SEQ ID NO: 12006 - protein, 7 aa, Artificial Sequence
  source: /note="Description of Artificial Sequence: Synthetic peptide"
TPQNIMD

SEQ ID NO: 12007 - protein, 7 aa, Artificial Sequence
  source: /note="Description of Artificial Sequence: Synthetic peptide"
TPQRAGI

SEQ ID NO: 12008 - protein, 7 aa, Artificial Sequence
  source: /note="Description of Artificial Sequence: Synthetic peptide"
TPRAEHT

SEQ ID NO: 12009 - protein, 7 aa, Artificial Sequence
  source: /note="Description of Artificial Sequence: Synthetic peptide"
TPRGQSL

SEQ ID NO: 12010 - protein, 7 aa, Artificial Sequence
  source: /note="Description of Artificial Sequence: Synthetic peptide"
TPRGSLD

SEQ ID NO: 12011 - protein, 7 aa, Artificial Sequence
  source: /note="Description of Artificial Sequence: Synthetic peptide"
TPRLTVE

SEQ ID NO: 12012 - protein, 7 aa, Artificial Sequence
  source: /note="Description of Artificial Sequence: Synthetic peptide"
TPRPTYT

SEQ ID NO: 12013 - protein, 7 aa, Artificial Sequence
  source: /note="Description of Artificial Sequence: Synthetic peptide"
TPRTPSS

SEQ ID NO: 12014 - protein, 7 aa, Artificial Sequence
  source: /note="Description of Artificial Sequence: Synthetic peptide"
TPSAAMI

SEQ ID NO: 12015 - protein, 7 aa, Artificial Sequence
  source: /note="Description of Artificial Sequence: Synthetic peptide"
TPSASRL

SEQ ID NO: 12016 - protein, 7 aa, Artificial Sequence
  source: /note="Description of Artificial Sequence: Synthetic peptide"
TPSHLMS

SEQ ID NO: 12017 - protein, 7 aa, Artificial Sequence
  source: /note="Description of Artificial Sequence: Synthetic peptide"
TPSKGLV

SEQ ID NO: 12018 - protein, 7 aa, Artificial Sequence
  source: /note="Description of Artificial Sequence: Synthetic peptide"
TPSNDIS

SEQ ID NO: 12019 - protein, 7 aa, Artificial Sequence
  source: /note="Description of Artificial Sequence: Synthetic peptide"
TPSNQSS

SEQ ID NO: 12020 - protein, 7 aa, Artificial Sequence
  source: /note="Description of Artificial Sequence: Synthetic peptide"
TPSPGDA

SEQ ID NO: 12021 - protein, 7 aa, Artificial Sequence
  source: /note="Description of Artificial Sequence: Synthetic peptide"
TPSPPGV

SEQ ID NO: 12022 - protein, 7 aa, Artificial Sequence
  source: /note="Description of Artificial Sequence: Synthetic peptide"
TPSSAGI

SEQ ID NO: 12023 - protein, 7 aa, Artificial Sequence
  source: /note="Description of Artificial Sequence: Synthetic peptide"
TPSSGSR

SEQ ID NO: 12024 - protein, 7 aa, Artificial Sequence
  source: /note="Description of Artificial Sequence: Synthetic peptide"
TPSSMHP

SEQ ID NO: 12025 - protein, 7 aa, Artificial Sequence
  source: /note="Description of Artificial Sequence: Synthetic peptide"
TPSSTQL

SEQ ID NO: 12026 - protein, 7 aa, Artificial Sequence
  source: /note="Description of Artificial Sequence: Synthetic peptide"
TPSVDAC

SEQ ID NO: 12027 - protein, 7 aa, Artificial Sequence
  source: /note="Description of Artificial Sequence: Synthetic peptide"
TPSVTLL

SEQ ID NO: 12028 - protein, 7 aa, Artificial Sequence
  source: /note="Description of Artificial Sequence: Synthetic peptide"
TPSYVMA

SEQ ID NO: 12029 - protein, 7 aa, Artificial Sequence
  source: /note="Description of Artificial Sequence: Synthetic peptide"
TPTARNP

SEQ ID NO: 12030 - protein, 7 aa, Artificial Sequence
  source: /note="Description of Artificial Sequence: Synthetic peptide"
TPTETKY

SEQ ID NO: 12031 - protein, 7 aa, Artificial Sequence
  source: /note="Description of Artificial Sequence: Synthetic peptide"
TPTGRDF

SEQ ID NO: 12032 - protein, 7 aa, Artificial Sequence
  source: /note="Description of Artificial Sequence: Synthetic peptide"
TPTLKSN

SEQ ID NO: 12033 - protein, 7 aa, Artificial Sequence
  source: /note="Description of Artificial Sequence: Synthetic peptide"
TPTPAFR

SEQ ID NO: 12034 - protein, 7 aa, Artificial Sequence
  source: /note="Description of Artificial Sequence: Synthetic peptide"
TPTRPSA

SEQ ID NO: 12035 - protein, 7 aa, Artificial Sequence
  source: /note="Description of Artificial Sequence: Synthetic peptide"
TPTSSEW

SEQ ID NO: 12036 - protein, 7 aa, Artificial Sequence
  source: /note="Description of Artificial Sequence: Synthetic peptide"
TPTTSNE

SEQ ID NO: 12037 - protein, 7 aa, Artificial Sequence
  source: /note="Description of Artificial Sequence: Synthetic peptide"
TPTVPRD

SEQ ID NO: 12038 - protein, 7 aa, Artificial Sequence
  source: /note="Description of Artificial Sequence: Synthetic peptide"
TPVLNYG

SEQ ID NO: 12039 - protein, 7 aa, Artificial Sequence
  source: /note="Description of Artificial Sequence: Synthetic peptide"
TPVLSSL

SEQ ID NO: 12040 - protein, 7 aa, Artificial Sequence
  source: /note="Description of Artificial Sequence: Synthetic peptide"
TPVQAVA

SEQ ID NO: 12041 - protein, 7 aa, Artificial Sequence
  source: /note="Description of Artificial Sequence: Synthetic peptide"
TPVTINM

SEQ ID NO: 12042 - protein, 7 aa, Artificial Sequence
  source: /note="Description of Artificial Sequence: Synthetic peptide"
TPYPDTS

SEQ ID NO: 12043 - protein, 7 aa, Artificial Sequence
  source: /note="Description of Artificial Sequence: Synthetic peptide"
TQAAAYR

SEQ ID NO: 12044 - protein, 7 aa, Artificial Sequence
  source: /note="Description of Artificial Sequence: Synthetic peptide"
TQAGFSS

SEQ ID NO: 12045 - protein, 7 aa, Artificial Sequence
  source: /note="Description of Artificial Sequence: Synthetic peptide"
TQAHFAG

SEQ ID NO: 12046 - protein, 7 aa, Artificial Sequence
  source: /note="Description of Artificial Sequence: Synthetic peptide"
TQDSFRH

SEQ ID NO: 12047 - protein, 7 aa, Artificial Sequence
  source: /note="Description of Artificial Sequence: Synthetic peptide"
TQELPRS

SEQ ID NO: 12048 - protein, 7 aa, Artificial Sequence
  source: /note="Description of Artificial Sequence: Synthetic peptide"
TQENVER

SEQ ID NO: 12049 - protein, 7 aa, Artificial Sequence
  source: /note="Description of Artificial Sequence: Synthetic peptide"
TQEVERE

SEQ ID NO: 12050 - protein, 7 aa, Artificial Sequence
  source: /note="Description of Artificial Sequence: Synthetic peptide"
TQFPALG

SEQ ID NO: 12051 - protein, 7 aa, Artificial Sequence
  source: /note="Description of Artificial Sequence: Synthetic peptide"
TQFTHKA

SEQ ID NO: 12052 - protein, 7 aa, Artificial Sequence
  source: /note="Description of Artificial Sequence: Synthetic peptide"
TQGDVSS

SEQ ID NO: 12053 - protein, 7 aa, Artificial Sequence
  source: /note="Description of Artificial Sequence: Synthetic peptide"
TQGLDVE

SEQ ID NO: 12054 - protein, 7 aa, Artificial Sequence
  source: /note="Description of Artificial Sequence: Synthetic peptide"
TQGQANP

SEQ ID NO: 12055 - protein, 7 aa, Artificial Sequence
  source: /note="Description of Artificial Sequence: Synthetic peptide"
TQGRDYV

SEQ ID NO: 12056 - protein, 7 aa, Artificial Sequence
  source: /note="Description of Artificial Sequence: Synthetic peptide"
TQGTRAW

SEQ ID NO: 12057 - protein, 7 aa, Artificial Sequence
  source: /note="Description of Artificial Sequence: Synthetic peptide"
TQHAGGF

SEQ ID NO: 12058 - protein, 7 aa, Artificial Sequence
  source: /note="Description of Artificial Sequence: Synthetic peptide"
TQISSMS

SEQ ID NO: 12059 - protein, 7 aa, Artificial Sequence
  source: /note="Description of Artificial Sequence: Synthetic peptide"
TQITVDE

SEQ ID NO: 12060 - protein, 7 aa, Artificial Sequence
  source: /note="Description of Artificial Sequence: Synthetic peptide"
TQKLSMS

SEQ ID NO: 12061 - protein, 7 aa, Artificial Sequence
  source: /note="Description of Artificial Sequence: Synthetic peptide"
TQKVSDP

SEQ ID NO: 12062 - protein, 7 aa, Artificial Sequence
  source: /note="Description of Artificial Sequence: Synthetic peptide"
TQLNVSR

SEQ ID NO: 12063 - protein, 7 aa, Artificial Sequence
  source: /note="Description of Artificial Sequence: Synthetic peptide"
TQLSVNP

SEQ ID NO: 12064 - protein, 7 aa, Artificial Sequence
  source: /note="Description of Artificial Sequence: Synthetic peptide"
TQMTKAS

SEQ ID NO: 12065 - protein, 7 aa, Artificial Sequence
  source: /note="Description of Artificial Sequence: Synthetic peptide"
TQNEPHL

SEQ ID NO: 12066 - protein, 7 aa, Artificial Sequence
  source: /note="Description of Artificial Sequence: Synthetic peptide"
TQNLCDR

SEQ ID NO: 12067 - protein, 7 aa, Artificial Sequence
  source: /note="Description of Artificial Sequence: Synthetic peptide"
TQPPLSQ

SEQ ID NO: 12068 - protein, 7 aa, Artificial Sequence
  source: /note="Description of Artificial Sequence: Synthetic peptide"
TQPSAAA

SEQ ID NO: 12069 - protein, 7 aa, Artificial Sequence
  source: /note="Description of Artificial Sequence: Synthetic peptide"
TQPSLQA

SEQ ID NO: 12070 - protein, 7 aa, Artificial Sequence
  source: /note="Description of Artificial Sequence: Synthetic peptide"
TQPSRPL

SEQ ID NO: 12071 - protein, 7 aa, Artificial Sequence
  source: /note="Description of Artificial Sequence: Synthetic peptide"
TQPTGCE

SEQ ID NO: 12072 - protein, 7 aa, Artificial Sequence
  source: /note="Description of Artificial Sequence: Synthetic peptide"
TQPYGHA

SEQ ID NO: 12073 - protein, 7 aa, Artificial Sequence
  source: /note="Description of Artificial Sequence: Synthetic peptide"
TQQSTIS

SEQ ID NO: 12074 - protein, 7 aa, Artificial Sequence
  source: /note="Description of Artificial Sequence: Synthetic peptide"
TQQTPRG

SEQ ID NO: 12075 - protein, 7 aa, Artificial Sequence
  source: /note="Description of Artificial Sequence: Synthetic peptide"
TQQTSAY

SEQ ID NO: 12076 - protein, 7 aa, Artificial Sequence
  source: /note="Description of Artificial Sequence: Synthetic peptide"
TQRETNS

SEQ ID NO: 12077 - protein, 7 aa, Artificial Sequence
  source: /note="Description of Artificial Sequence: Synthetic peptide"
TQRGSAE

SEQ ID NO: 12078 - protein, 7 aa, Artificial Sequence
  source: /note="Description of Artificial Sequence: Synthetic peptide"
TQRPITV

SEQ ID NO: 12079 - protein, 7 aa, Artificial Sequence
  source: /note="Description of Artificial Sequence: Synthetic peptide"
TQRVARD

SEQ ID NO: 12080 - protein, 7 aa, Artificial Sequence
  source: /note="Description of Artificial Sequence: Synthetic peptide"
TQSAMSV

SEQ ID NO: 12081 - protein, 7 aa, Artificial Sequence
  source: /note="Description of Artificial Sequence: Synthetic peptide"
TQSETVL

SEQ ID NO: 12082 - protein, 7 aa, Artificial Sequence
  source: /note="Description of Artificial Sequence: Synthetic peptide"
TQSFGSA

SEQ ID NO: 12083 - protein, 7 aa, Artificial Sequence
  source: /note="Description of Artificial Sequence: Synthetic peptide"
TQSLASE

SEQ ID NO: 12084 - protein, 7 aa, Artificial Sequence
  source: /note="Description of Artificial Sequence: Synthetic peptide"
TQSLMDD

SEQ ID NO: 12085 - protein, 7 aa, Artificial Sequence
  source: /note="Description of Artificial Sequence: Synthetic peptide"
TQSRDMS

SEQ ID NO: 12086 - protein, 7 aa, Artificial Sequence
  source: /note="Description of Artificial Sequence: Synthetic peptide"
TQSSALS

SEQ ID NO: 12087 - protein, 7 aa, Artificial Sequence
  source: /note="Description of Artificial Sequence: Synthetic peptide"
TQSSQRI

SEQ ID NO: 12088 - protein, 7 aa, Artificial Sequence
  source: /note="Description of Artificial Sequence: Synthetic peptide"
TQSSTGP

SEQ ID NO: 12089 - protein, 7 aa, Artificial Sequence
  source: /note="Description of Artificial Sequence: Synthetic peptide"
TQSSTQP

SEQ ID NO: 12090 - protein, 7 aa, Artificial Sequence
  source: /note="Description of Artificial Sequence: Synthetic peptide"
TQTRPVG

SEQ ID NO: 12091 - protein, 7 aa, Artificial Sequence
  source: /note="Description of Artificial Sequence: Synthetic peptide"
TQTTIMP

SEQ ID NO: 12092 - protein, 7 aa, Artificial Sequence
  source: /note="Description of Artificial Sequence: Synthetic peptide"
TQTTSLY

SEQ ID NO: 12093 - protein, 7 aa, Artificial Sequence
  source: /note="Description of Artificial Sequence: Synthetic peptide"
TQTTSPV

SEQ ID NO: 12094 - protein, 7 aa, Artificial Sequence
  source: /note="Description of Artificial Sequence: Synthetic peptide"
TQVALRP

SEQ ID NO: 12095 - protein, 7 aa, Artificial Sequence
  source: /note="Description of Artificial Sequence: Synthetic peptide"
TQVATYQ

SEQ ID NO: 12096 - protein, 7 aa, Artificial Sequence
  source: /note="Description of Artificial Sequence: Synthetic peptide"
TQWLAQG

SEQ ID NO: 12097 - protein, 7 aa, Artificial Sequence
  source: /note="Description of Artificial Sequence: Synthetic peptide"
TRAALGT

SEQ ID NO: 12098 - protein, 7 aa, Artificial Sequence
  source: /note="Description of Artificial Sequence: Synthetic peptide"
TRALQAG

SEQ ID NO: 12099 - protein, 7 aa, Artificial Sequence
  source: /note="Description of Artificial Sequence: Synthetic peptide"
TRANATN

SEQ ID NO: 12100 - protein, 7 aa, Artificial Sequence
  source: /note="Description of Artificial Sequence: Synthetic peptide"
TRAPATM

SEQ ID NO: 12101 - protein, 7 aa, Artificial Sequence
  source: /note="Description of Artificial Sequence: Synthetic peptide"
TRASTAN

SEQ ID NO: 12102 - protein, 7 aa, Artificial Sequence
  source: /note="Description of Artificial Sequence: Synthetic peptide"
TRATGDA

SEQ ID NO: 12103 - protein, 7 aa, Artificial Sequence
  source: /note="Description of Artificial Sequence: Synthetic peptide"
TRAVDGR

SEQ ID NO: 12104 - protein, 7 aa, Artificial Sequence
  source: /note="Description of Artificial Sequence: Synthetic peptide"
TRAVGGQ

SEQ ID NO: 12105 - protein, 7 aa, Artificial Sequence
  source: /note="Description of Artificial Sequence: Synthetic peptide"
TRDEWAT

SEQ ID NO: 12106 - protein, 7 aa, Artificial Sequence
  source: /note="Description of Artificial Sequence: Synthetic peptide"
TRDRGPS

SEQ ID NO: 12107 - protein, 7 aa, Artificial Sequence
  source: /note="Description of Artificial Sequence: Synthetic peptide"
TRDTSYT

SEQ ID NO: 12108 - protein, 7 aa, Artificial Sequence
  source: /note="Description of Artificial Sequence: Synthetic peptide"
TREGFMV

SEQ ID NO: 12109 - protein, 7 aa, Artificial Sequence
  source: /note="Description of Artificial Sequence: Synthetic peptide"
TREMGPS

SEQ ID NO: 12110 - protein, 7 aa, Artificial Sequence
  source: /note="Description of Artificial Sequence: Synthetic peptide"
TRETVPA

SEQ ID NO: 12111 - protein, 7 aa, Artificial Sequence
  source: /note="Description of Artificial Sequence: Synthetic peptide"
TRFCSSP

SEQ ID NO: 12112 - protein, 7 aa, Artificial Sequence
  source: /note="Description of Artificial Sequence: Synthetic peptide"
TRFEKYD

SEQ ID NO: 12113 - protein, 7 aa, Artificial Sequence
  source: /note="Description of Artificial Sequence: Synthetic peptide"
TRFQVEV

SEQ ID NO: 12114 - protein, 7 aa, Artificial Sequence
  source: /note="Description of Artificial Sequence: Synthetic peptide"
TRGGDGV

SEQ ID NO: 12115 - protein, 7 aa, Artificial Sequence
  source: /note="Description of Artificial Sequence: Synthetic peptide"
TRGTDLS

SEQ ID NO: 12116 - protein, 7 aa, Artificial Sequence
  source: /note="Description of Artificial Sequence: Synthetic peptide"
TRGTSVS

SEQ ID NO: 12117 - protein, 7 aa, Artificial Sequence
  source: /note="Description of Artificial Sequence: Synthetic peptide"
TRGVINA

SEQ ID NO: 12118 - protein, 7 aa, Artificial Sequence
  source: /note="Description of Artificial Sequence: Synthetic peptide"
TRHDFLN

SEQ ID NO: 12119 - protein, 7 aa, Artificial Sequence
  source: /note="Description of Artificial Sequence: Synthetic peptide"
TRIGPSE

SEQ ID NO: 12120 - protein, 7 aa, Artificial Sequence
  source: /note="Description of Artificial Sequence: Synthetic peptide"
TRIHALP

SEQ ID NO: 12121 - protein, 7 aa, Artificial Sequence
  source: /note="Description of Artificial Sequence: Synthetic peptide"
TRISLSG

SEQ ID NO: 12122 - protein, 7 aa, Artificial Sequence
  source: /note="Description of Artificial Sequence: Synthetic peptide"
TRKLAVD

SEQ ID NO: 12123 - protein, 7 aa, Artificial Sequence
  source: /note="Description of Artificial Sequence: Synthetic peptide"
TRLNSID

SEQ ID NO: 12124 - protein, 7 aa, Artificial Sequence
  source: /note="Description of Artificial Sequence: Synthetic peptide"
TRLPTSL

SEQ ID NO: 12125 - protein, 7 aa, Artificial Sequence
  source: /note="Description of Artificial Sequence: Synthetic peptide"
TRLQTSA

SEQ ID NO: 12126 - protein, 7 aa, Artificial Sequence
  source: /note="Description of Artificial Sequence: Synthetic peptide"
TRLSENT

SEQ ID NO: 12127 - protein, 7 aa, Artificial Sequence
  source: /note="Description of Artificial Sequence: Synthetic peptide"
TRLSSSV

SEQ ID NO: 12128 - protein, 7 aa, Artificial Sequence
  source: /note="Description of Artificial Sequence: Synthetic peptide"
TRMASDG

SEQ ID NO: 12129 - protein, 7 aa, Artificial Sequence
  source: /note="Description of Artificial Sequence: Synthetic peptide"
TRMPSGV

SEQ ID NO: 12130 - protein, 7 aa, Artificial Sequence
  source: /note="Description of Artificial Sequence: Synthetic peptide"
TRMPVIS

SEQ ID NO: 12131 - protein, 7 aa, Artificial Sequence
  source: /note="Description of Artificial Sequence: Synthetic peptide"
TRNEYSF

SEQ ID NO: 12132 - protein, 7 aa, Artificial Sequence
  source: /note="Description of Artificial Sequence: Synthetic peptide"
TRNLDSV

SEQ ID NO: 12133 - protein, 7 aa, Artificial Sequence
  source: /note="Description of Artificial Sequence: Synthetic peptide"
TRNMSDT

SEQ ID NO: 12134 - protein, 7 aa, Artificial Sequence
  source: /note="Description of Artificial Sequence: Synthetic peptide"
TRNNHVT

SEQ ID NO: 12135 - protein, 7 aa, Artificial Sequence
  source: /note="Description of Artificial Sequence: Synthetic peptide"
TRNPEPK

SEQ ID NO: 12136 - protein, 7 aa, Artificial Sequence
  source: /note="Description of Artificial Sequence: Synthetic peptide"
TRNPEST

SEQ ID NO: 12137 - protein, 7 aa, Artificial Sequence
  source: /note="Description of Artificial Sequence: Synthetic peptide"
TRNPGTT

SEQ ID NO: 12138 - protein, 7 aa, Artificial Sequence
  source: /note="Description of Artificial Sequence: Synthetic peptide"
TRNQLRD

SEQ ID NO: 12139 - protein, 7 aa, Artificial Sequence
  source: /note="Description of Artificial Sequence: Synthetic peptide"
TRNSGMA

SEQ ID NO: 12140 - protein, 7 aa, Artificial Sequence
  source: /note="Description of Artificial Sequence: Synthetic peptide"
TRNTTEA

SEQ ID NO: 12141 - protein, 7 aa, Artificial Sequence
  source: /note="Description of Artificial Sequence: Synthetic peptide"
TRPAPMA

SEQ ID NO: 12142 - protein, 7 aa, Artificial Sequence
  source: /note="Description of Artificial Sequence: Synthetic peptide"
TRPDSLP

SEQ ID NO: 12143 - protein, 7 aa, Artificial Sequence
  source: /note="Description of Artificial Sequence: Synthetic peptide"
TRPGVDT

SEQ ID NO: 12144 - protein, 7 aa, Artificial Sequence
  source: /note="Description of Artificial Sequence: Synthetic peptide"
TRPLAIA

SEQ ID NO: 12145 - protein, 7 aa, Artificial Sequence
  source: /note="Description of Artificial Sequence: Synthetic peptide"
TRPLPSN

SEQ ID NO: 12146 - protein, 7 aa, Artificial Sequence
  source: /note="Description of Artificial Sequence: Synthetic peptide"
TRPLSSG

SEQ ID NO: 12147 - protein, 7 aa, Artificial Sequence
  source: /note="Description of Artificial Sequence: Synthetic peptide"
TRPLSSP

SEQ ID NO: 12148 - protein, 7 aa, Artificial Sequence
  source: /note="Description of Artificial Sequence: Synthetic peptide"
TRPMESA

SEQ ID NO: 12149 - protein, 7 aa, Artificial Sequence
  source: /note="Description of Artificial Sequence: Synthetic peptide"
TRPNLPY

SEQ ID NO: 12150 - protein, 7 aa, Artificial Sequence
  source: /note="Description of Artificial Sequence: Synthetic peptide"
TRPSEAQ

SEQ ID NO: 12151 - protein, 7 aa, Artificial Sequence
  source: /note="Description of Artificial Sequence: Synthetic peptide"
TRPSYEM

SEQ ID NO: 12152 - protein, 7 aa, Artificial Sequence
  source: /note="Description of Artificial Sequence: Synthetic peptide"
TRPTADD

SEQ ID NO: 12153 - protein, 7 aa, Artificial Sequence
  source: /note="Description of Artificial Sequence: Synthetic peptide"
TRPTPLL

SEQ ID NO: 12154 - protein, 7 aa, Artificial Sequence
  source: /note="Description of Artificial Sequence: Synthetic peptide"
TRPVGTS

SEQ ID NO: 12155 - protein, 7 aa, Artificial Sequence
  source: /note="Description of Artificial Sequence: Synthetic peptide"
TRPVYAD

SEQ ID NO: 12156 - protein, 7 aa, Artificial Sequence
  source: /note="Description of Artificial Sequence: Synthetic peptide"
TRQATSE

SEQ ID NO: 12157 - protein, 7 aa, Artificial Sequence
  source: /note="Description of Artificial Sequence: Synthetic peptide"
TRQLLTA

SEQ ID NO: 12158 - protein, 7 aa, Artificial Sequence
  source: /note="Description of Artificial Sequence: Synthetic peptide"
TRQYTNS

SEQ ID NO: 12159 - protein, 7 aa, Artificial Sequence
  source: /note="Description of Artificial Sequence: Synthetic peptide"
TRRPDIA

SEQ ID NO: 12160 - protein, 7 aa, Artificial Sequence
  source: /note="Description of Artificial Sequence: Synthetic peptide"
TRRVPSE

SEQ ID NO: 12161 - protein, 7 aa, Artificial Sequence
  source: /note="Description of Artificial Sequence: Synthetic peptide"
TRSALEL

SEQ ID NO: 12162 - protein, 7 aa, Artificial Sequence
  source: /note="Description of Artificial Sequence: Synthetic peptide"
TRSAVGS

SEQ ID NO: 12163 - protein, 7 aa, Artificial Sequence
  source: /note="Description of Artificial Sequence: Synthetic peptide"
TRSFESS

SEQ ID NO: 12164 - protein, 7 aa, Artificial Sequence
  source: /note="Description of Artificial Sequence: Synthetic peptide"
TRSGLIE

SEQ ID NO: 12165 - protein, 7 aa, Artificial Sequence
  source: /note="Description of Artificial Sequence: Synthetic peptide"
TRSGTDL

SEQ ID NO: 12166 - protein, 7 aa, Artificial Sequence
  source: /note="Description of Artificial Sequence: Synthetic peptide"
TRSMVTL

SEQ ID NO: 12167 - protein, 7 aa, Artificial Sequence
  source: /note="Description of Artificial Sequence: Synthetic peptide"
TRSNETV

SEQ ID NO: 12168 - protein, 7 aa, Artificial Sequence
  source: /note="Description of Artificial Sequence: Synthetic peptide"
TRSNGLT

SEQ ID NO: 12169 - protein, 7 aa, Artificial Sequence
  source: /note="Description of Artificial Sequence: Synthetic peptide"
TRSNNST

SEQ ID NO: 12170 - protein, 7 aa, Artificial Sequence
  source: /note="Description of Artificial Sequence: Synthetic peptide"
TRSPSSY

SEQ ID NO: 12171 - protein, 7 aa, Artificial Sequence
  source: /note="Description of Artificial Sequence: Synthetic peptide"
TRSQHES

SEQ ID NO: 12172 - protein, 7 aa, Artificial Sequence
  source: /note="Description of Artificial Sequence: Synthetic peptide"
TRSQSPM

SEQ ID NO: 12173 - protein, 7 aa, Artificial Sequence
  source: /note="Description of Artificial Sequence: Synthetic peptide"
TRSSLTP

SEQ ID NO: 12174 - protein, 7 aa, Artificial Sequence
  source: /note="Description of Artificial Sequence: Synthetic peptide"
TRSSSIL

SEQ ID NO: 12175 - protein, 7 aa, Artificial Sequence
  source: /note="Description of Artificial Sequence: Synthetic peptide"
TRSTASP

SEQ ID NO: 12176 - protein, 7 aa, Artificial Sequence
  source: /note="Description of Artificial Sequence: Synthetic peptide"
TRSTPIY

SEQ ID NO: 12177 - protein, 7 aa, Artificial Sequence
  source: /note="Description of Artificial Sequence: Synthetic peptide"
TRSVELL

SEQ ID NO: 12178 - protein, 7 aa, Artificial Sequence
  source: /note="Description of Artificial Sequence: Synthetic peptide"
TRTITPL

SEQ ID NO: 12179 - protein, 7 aa, Artificial Sequence
  source: /note="Description of Artificial Sequence: Synthetic peptide"
TRTLTSS

SEQ ID NO: 12180 - protein, 7 aa, Artificial Sequence
  source: /note="Description of Artificial Sequence: Synthetic peptide"
TRTMSMS

SEQ ID NO: 12181 - protein, 7 aa, Artificial Sequence
  source: /note="Description of Artificial Sequence: Synthetic peptide"
TRTNSII

SEQ ID NO: 12182 - protein, 7 aa, Artificial Sequence
  source: /note="Description of Artificial Sequence: Synthetic peptide"
TRTRLGD

SEQ ID NO: 12183 - protein, 7 aa, Artificial Sequence
  source: /note="Description of Artificial Sequence: Synthetic peptide"
TRTSDFP

SEQ ID NO: 12184 - protein, 7 aa, Artificial Sequence
  source: /note="Description of Artificial Sequence: Synthetic peptide"
TRTSHAL

SEQ ID NO: 12185 - protein, 7 aa, Artificial Sequence
  source: /note="Description of Artificial Sequence: Synthetic peptide"
TRTSQPS

SEQ ID NO: 12186 - protein, 7 aa, Artificial Sequence
  source: /note="Description of Artificial Sequence: Synthetic peptide"
TRTSTGS

SEQ ID NO: 12187 - protein, 7 aa, Artificial Sequence
  source: /note="Description of Artificial Sequence: Synthetic peptide"
TRTTGSM

SEQ ID NO: 12188 - protein, 7 aa, Artificial Sequence
  source: /note="Description of Artificial Sequence: Synthetic peptide"
TRTTLES

SEQ ID NO: 12189 - protein, 7 aa, Artificial Sequence
  source: /note="Description of Artificial Sequence: Synthetic peptide"
TRTTTVT

SEQ ID NO: 12190 - protein, 7 aa, Artificial Sequence
  source: /note="Description of Artificial Sequence: Synthetic peptide"
TRTVATY

SEQ ID NO: 12191 - protein, 7 aa, Artificial Sequence
  source: /note="Description of Artificial Sequence: Synthetic peptide"
TRTVQLG

SEQ ID NO: 12192 - protein, 7 aa, Artificial Sequence
  source: /note="Description of Artificial Sequence: Synthetic peptide"
TRVHGVS

SEQ ID NO: 12193 - protein, 7 aa, Artificial Sequence
  source: /note="Description of Artificial Sequence: Synthetic peptide"
TRVIMND

SEQ ID NO: 12194 - protein, 7 aa, Artificial Sequence
  source: /note="Description of Artificial Sequence: Synthetic peptide"
TRVSSIP

SEQ ID NO: 12195 - protein, 7 aa, Artificial Sequence
  source: /note="Description of Artificial Sequence: Synthetic peptide"
TRVTAPL

SEQ ID NO: 12196 - protein, 7 aa, Artificial Sequence
  source: /note="Description of Artificial Sequence: Synthetic peptide"
TRVYPAG

SEQ ID NO: 12197 - protein, 7 aa, Artificial Sequence
  source: /note="Description of Artificial Sequence: Synthetic peptide"
TSAGLNY

SEQ ID NO: 12198 - protein, 7 aa, Artificial Sequence
  source: /note="Description of Artificial Sequence: Synthetic peptide"
TSAGVYK

SEQ ID NO: 12199 - protein, 7 aa, Artificial Sequence
  source: /note="Description of Artificial Sequence: Synthetic peptide"
TSAKHTM

SEQ ID NO: 12200 - protein, 7 aa, Artificial Sequence
  source: /note="Description of Artificial Sequence: Synthetic peptide"
TSALIFE

SEQ ID NO: 12201 - protein, 7 aa, Artificial Sequence
  source: /note="Description of Artificial Sequence: Synthetic peptide"
TSAQSGP

SEQ ID NO: 12202 - protein, 7 aa, Artificial Sequence
  source: /note="Description of Artificial Sequence: Synthetic peptide"
TSARPFL

SEQ ID NO: 12203 - protein, 7 aa, Artificial Sequence
  source: /note="Description of Artificial Sequence: Synthetic peptide"
TSARPVG

SEQ ID NO: 12204 - protein, 7 aa, Artificial Sequence
  source: /note="Description of Artificial Sequence: Synthetic peptide"
TSASIPP

SEQ ID NO: 12205 - protein, 7 aa, Artificial Sequence
  source: /note="Description of Artificial Sequence: Synthetic peptide"
TSASSTT

SEQ ID NO: 12206 - protein, 7 aa, Artificial Sequence
  source: /note="Description of Artificial Sequence: Synthetic peptide"
TSDLPLN

SEQ ID NO: 12207 - protein, 7 aa, Artificial Sequence
  source: /note="Description of Artificial Sequence: Synthetic peptide"
TSDLRGR

SEQ ID NO: 12208 - protein, 7 aa, Artificial Sequence
  source: /note="Description of Artificial Sequence: Synthetic peptide"
TSDNMPH

SEQ ID NO: 12209 - protein, 7 aa, Artificial Sequence
  source: /note="Description of Artificial Sequence: Synthetic peptide"
TSDPCMS

SEQ ID NO: 12210 - protein, 7 aa, Artificial Sequence
  source: /note="Description of Artificial Sequence: Synthetic peptide"
TSDSAVT

SEQ ID NO: 12211 - protein, 7 aa, Artificial Sequence
  source: /note="Description of Artificial Sequence: Synthetic peptide"
TSDVLLT

SEQ ID NO: 12212 - protein, 7 aa, Artificial Sequence
  source: /note="Description of Artificial Sequence: Synthetic peptide"
TSESKAH

SEQ ID NO: 12213 - protein, 7 aa, Artificial Sequence
  source: /note="Description of Artificial Sequence: Synthetic peptide"
TSESWPS

SEQ ID NO: 12214 - protein, 7 aa, Artificial Sequence
  source: /note="Description of Artificial Sequence: Synthetic peptide"
TSFGPSS

SEQ ID NO: 12215 - protein, 7 aa, Artificial Sequence
  source: /note="Description of Artificial Sequence: Synthetic peptide"
TSFLKTS

SEQ ID NO: 12216 - protein, 7 aa, Artificial Sequence
  source: /note="Description of Artificial Sequence: Synthetic peptide"
TSFPSSA

SEQ ID NO: 12217 - protein, 7 aa, Artificial Sequence
  source: /note="Description of Artificial Sequence: Synthetic peptide"
TSFRLDE

SEQ ID NO: 12218 - protein, 7 aa, Artificial Sequence
  source: /note="Description of Artificial Sequence: Synthetic peptide"
TSFSQST

SEQ ID NO: 12219 - protein, 7 aa, Artificial Sequence
  source: /note="Description of Artificial Sequence: Synthetic peptide"
TSFSRGL

SEQ ID NO: 12220 - protein, 7 aa, Artificial Sequence
  source: /note="Description of Artificial Sequence: Synthetic peptide"
TSGHHIL

SEQ ID NO: 12221 - protein, 7 aa, Artificial Sequence
  source: /note="Description of Artificial Sequence: Synthetic peptide"
TSGLPEA

SEQ ID NO: 12222 - protein, 7 aa, Artificial Sequence
  source: /note="Description of Artificial Sequence: Synthetic peptide"
TSGLSEV

SEQ ID NO: 12223 - protein, 7 aa, Artificial Sequence
  source: /note="Description of Artificial Sequence: Synthetic peptide"
TSGLTLG

SEQ ID NO: 12224 - protein, 7 aa, Artificial Sequence
  source: /note="Description of Artificial Sequence: Synthetic peptide"
TSGPSHG

SEQ ID NO: 12225 - protein, 7 aa, Artificial Sequence
  source: /note="Description of Artificial Sequence: Synthetic peptide"
TSGRSPT

SEQ ID NO: 12226 - protein, 7 aa, Artificial Sequence
  source: /note="Description of Artificial Sequence: Synthetic peptide"
TSGSLRP

SEQ ID NO: 12227 - protein, 7 aa, Artificial Sequence
  source: /note="Description of Artificial Sequence: Synthetic peptide"
TSGSTSG

SEQ ID NO: 12228 - protein, 7 aa, Artificial Sequence
  source: /note="Description of Artificial Sequence: Synthetic peptide"
TSGTLST

SEQ ID NO: 12229 - protein, 7 aa, Artificial Sequence
  source: /note="Description of Artificial Sequence: Synthetic peptide"
TSGTSTD

SEQ ID NO: 12230 - protein, 7 aa, Artificial Sequence
  source: /note="Description of Artificial Sequence: Synthetic peptide"
TSHGPAT

SEQ ID NO: 12231 - protein, 7 aa, Artificial Sequence
  source: /note="Description of Artificial Sequence: Synthetic peptide"
TSHNGFS

SEQ ID NO: 12232 - protein, 7 aa, Artificial Sequence
  source: /note="Description of Artificial Sequence: Synthetic peptide"
TSHRPQP

SEQ ID NO: 12233 - protein, 7 aa, Artificial Sequence
  source: /note="Description of Artificial Sequence: Synthetic peptide"
TSIGPRI

SEQ ID NO: 12234 - protein, 7 aa, Artificial Sequence
  source: /note="Description of Artificial Sequence: Synthetic peptide"
TSINRLP

SEQ ID NO: 12235 - protein, 7 aa, Artificial Sequence
  source: /note="Description of Artificial Sequence: Synthetic peptide"
TSKDGHP

SEQ ID NO: 12236 - protein, 7 aa, Artificial Sequence
  source: /note="Description of Artificial Sequence: Synthetic peptide"
TSKLSCP

SEQ ID NO: 12237 - protein, 7 aa, Artificial Sequence
  source: /note="Description of Artificial Sequence: Synthetic peptide"
TSKTPSI

SEQ ID NO: 12238 - protein, 7 aa, Artificial Sequence
  source: /note="Description of Artificial Sequence: Synthetic peptide"
TSKVATI

SEQ ID NO: 12239 - protein, 7 aa, Artificial Sequence
  source: /note="Description of Artificial Sequence: Synthetic peptide"
TSKWLTP

SEQ ID NO: 12240 - protein, 7 aa, Artificial Sequence
  source: /note="Description of Artificial Sequence: Synthetic peptide"
TSLDARS

SEQ ID NO: 12241 - protein, 7 aa, Artificial Sequence
  source: /note="Description of Artificial Sequence: Synthetic peptide"
TSLGSVS

SEQ ID NO: 12242 - protein, 7 aa, Artificial Sequence
  source: /note="Description of Artificial Sequence: Synthetic peptide"
TSLHSGD

SEQ ID NO: 12243 - protein, 7 aa, Artificial Sequence
  source: /note="Description of Artificial Sequence: Synthetic peptide"
TSLNNRL

SEQ ID NO: 12244 - protein, 7 aa, Artificial Sequence
  source: /note="Description of Artificial Sequence: Synthetic peptide"
TSLRIMP

SEQ ID NO: 12245 - protein, 7 aa, Artificial Sequence
  source: /note="Description of Artificial Sequence: Synthetic peptide"
TSLRMNG

SEQ ID NO: 12246 - protein, 7 aa, Artificial Sequence
  source: /note="Description of Artificial Sequence: Synthetic peptide"
TSLRSDP

SEQ ID NO: 12247 - protein, 7 aa, Artificial Sequence
  source: /note="Description of Artificial Sequence: Synthetic peptide"
TSLSLAL

SEQ ID NO: 12248 - protein, 7 aa, Artificial Sequence
  source: /note="Description of Artificial Sequence: Synthetic peptide"
TSLTPVS

SEQ ID NO: 12249 - protein, 7 aa, Artificial Sequence
  source: /note="Description of Artificial Sequence: Synthetic peptide"
TSLVFAV

SEQ ID NO: 12250 - protein, 7 aa, Artificial Sequence
  source: /note="Description of Artificial Sequence: Synthetic peptide"
TSMNLPD

SEQ ID NO: 12251 - protein, 7 aa, Artificial Sequence
  source: /note="Description of Artificial Sequence: Synthetic peptide"
TSMRTEL

SEQ ID NO: 12252 - protein, 7 aa, Artificial Sequence
  source: /note="Description of Artificial Sequence: Synthetic peptide"
TSMSPRH

SEQ ID NO: 12253 - protein, 7 aa, Artificial Sequence
  source: /note="Description of Artificial Sequence: Synthetic peptide"
TSMSPTT

SEQ ID NO: 12254 - protein, 7 aa, Artificial Sequence
  source: /note="Description of Artificial Sequence: Synthetic peptide"
TSNAVDY

SEQ ID NO: 12255 - protein, 7 aa, Artificial Sequence
  source: /note="Description of Artificial Sequence: Synthetic peptide"
TSNGLKL

SEQ ID NO: 12256 - protein, 7 aa, Artificial Sequence
  source: /note="Description of Artificial Sequence: Synthetic peptide"
TSNPLPR

SEQ ID NO: 12257 - protein, 7 aa, Artificial Sequence
  source: /note="Description of Artificial Sequence: Synthetic peptide"
TSNQSAM

SEQ ID NO: 12258 - protein, 7 aa, Artificial Sequence
  source: /note="Description of Artificial Sequence: Synthetic peptide"
TSNTSMS

SEQ ID NO: 12259 - protein, 7 aa, Artificial Sequence
  source: /note="Description of Artificial Sequence: Synthetic peptide"
TSNVRPY

SEQ ID NO: 12260 - protein, 7 aa, Artificial Sequence
  source: /note="Description of Artificial Sequence: Synthetic peptide"
TSNYHSL

SEQ ID NO: 12261 - protein, 7 aa, Artificial Sequence
  source: /note="Description of Artificial Sequence: Synthetic peptide"
TSNYLQT

SEQ ID NO: 12262 - protein, 7 aa, Artificial Sequence
  source: /note="Description of Artificial Sequence: Synthetic peptide"
TSPARYS

SEQ ID NO: 12263 - protein, 7 aa, Artificial Sequence
  source: /note="Description of Artificial Sequence: Synthetic peptide"
TSPDFSL

SEQ ID NO: 12264 - protein, 7 aa, Artificial Sequence
  source: /note="Description of Artificial Sequence: Synthetic peptide"
TSPDPNK

SEQ ID NO: 12265 - protein, 7 aa, Artificial Sequence
  source: /note="Description of Artificial Sequence: Synthetic peptide"
TSPMHTI

SEQ ID NO: 12266 - protein, 7 aa, Artificial Sequence
  source: /note="Description of Artificial Sequence: Synthetic peptide"
TSPPLST

SEQ ID NO: 12267 - protein, 7 aa, Artificial Sequence
  source: /note="Description of Artificial Sequence: Synthetic peptide"
TSPTGPT

SEQ ID NO: 12268 - protein, 7 aa, Artificial Sequence
  source: /note="Description of Artificial Sequence: Synthetic peptide"
TSPVSHV

SEQ ID NO: 12269 - protein, 7 aa, Artificial Sequence
  source: /note="Description of Artificial Sequence: Synthetic peptide"
TSQAVHL

SEQ ID NO: 12270 - protein, 7 aa, Artificial Sequence
  source: /note="Description of Artificial Sequence: Synthetic peptide"
TSQHRQA

SEQ ID NO: 12271 - protein, 7 aa, Artificial Sequence
  source: /note="Description of Artificial Sequence: Synthetic peptide"
TSQINRQ

SEQ ID NO: 12272 - protein, 7 aa, Artificial Sequence
  source: /note="Description of Artificial Sequence: Synthetic peptide"
TSQQLPQ

SEQ ID NO: 12273 - protein, 7 aa, Artificial Sequence
  source: /note="Description of Artificial Sequence: Synthetic peptide"
TSQRPML

SEQ ID NO: 12274 - protein, 7 aa, Artificial Sequence
  source: /note="Description of Artificial Sequence: Synthetic peptide"
TSQRYQP

SEQ ID NO: 12275 - protein, 7 aa, Artificial Sequence
  source: /note="Description of Artificial Sequence: Synthetic peptide"
TSQVRTT

SEQ ID NO: 12276 - protein, 7 aa, Artificial Sequence
  source: /note="Description of Artificial Sequence: Synthetic peptide"
TSRAPVL

SEQ ID NO: 12277 - protein, 7 aa, Artificial Sequence
  source: /note="Description of Artificial Sequence: Synthetic peptide"
TSRDHVR

SEQ ID NO: 12278 - protein, 7 aa, Artificial Sequence
  source: /note="Description of Artificial Sequence: Synthetic peptide"
TSRETYT

SEQ ID NO: 12279 - protein, 7 aa, Artificial Sequence
  source: /note="Description of Artificial Sequence: Synthetic peptide"
TSRNEVA

SEQ ID NO: 12280 - protein, 7 aa, Artificial Sequence
  source: /note="Description of Artificial Sequence: Synthetic peptide"
TSRTITT

SEQ ID NO: 12281 - protein, 7 aa, Artificial Sequence
  source: /note="Description of Artificial Sequence: Synthetic peptide"
TSRTNDP

SEQ ID NO: 12282 - protein, 7 aa, Artificial Sequence
  source: /note="Description of Artificial Sequence: Synthetic peptide"
TSRVDTS

SEQ ID NO: 12283 - protein, 7 aa, Artificial Sequence
  source: /note="Description of Artificial Sequence: Synthetic peptide"
TSSASAV

SEQ ID NO: 12284 - protein, 7 aa, Artificial Sequence
  source: /note="Description of Artificial Sequence: Synthetic peptide"
TSSDGLG

SEQ ID NO: 12285 - protein, 7 aa, Artificial Sequence
  source: /note="Description of Artificial Sequence: Synthetic peptide"
TSSGFKV

SEQ ID NO: 12286 - protein, 7 aa, Artificial Sequence
  source: /note="Description of Artificial Sequence: Synthetic peptide"
TSSGLTG

SEQ ID NO: 12287 - protein, 7 aa, Artificial Sequence
  source: /note="Description of Artificial Sequence: Synthetic peptide"
TSSGTNQ

SEQ ID NO: 12288 - protein, 7 aa, Artificial Sequence
  source: /note="Description of Artificial Sequence: Synthetic peptide"
TSSHSDV

SEQ ID NO: 12289 - protein, 7 aa, Artificial Sequence
  source: /note="Description of Artificial Sequence: Synthetic peptide"
TSSHTEH

SEQ ID NO: 12290 - protein, 7 aa, Artificial Sequence
  source: /note="Description of Artificial Sequence: Synthetic peptide"
TSSLAHI

SEQ ID NO: 12291 - protein, 7 aa, Artificial Sequence
  source: /note="Description of Artificial Sequence: Synthetic peptide"
TSSLATH

SEQ ID NO: 12292 - protein, 7 aa, Artificial Sequence
  source: /note="Description of Artificial Sequence: Synthetic peptide"
TSSLRLD

SEQ ID NO: 12293 - protein, 7 aa, Artificial Sequence
  source: /note="Description of Artificial Sequence: Synthetic peptide"
TSSLRPP

SEQ ID NO: 12294 - protein, 7 aa, Artificial Sequence
  source: /note="Description of Artificial Sequence: Synthetic peptide"
TSSNYPS

SEQ ID NO: 12295 - protein, 7 aa, Artificial Sequence
  source: /note="Description of Artificial Sequence: Synthetic peptide"
TSSPALT

SEQ ID NO: 12296 - protein, 7 aa, Artificial Sequence
  source: /note="Description of Artificial Sequence: Synthetic peptide"
TSSPLQG

SEQ ID NO: 12297 - protein, 7 aa, Artificial Sequence
  source: /note="Description of Artificial Sequence: Synthetic peptide"
TSSQHST

SEQ ID NO: 12298 - protein, 7 aa, Artificial Sequence
  source: /note="Description of Artificial Sequence: Synthetic peptide"
TSSRAYS

SEQ ID NO: 12299 - protein, 7 aa, Artificial Sequence
  source: /note="Description of Artificial Sequence: Synthetic peptide"
TSSRLPF

SEQ ID NO: 12300 - protein, 7 aa, Artificial Sequence
  source: /note="Description of Artificial Sequence: Synthetic peptide"
TSSSARD

SEQ ID NO: 12301 - protein, 7 aa, Artificial Sequence
  source: /note="Description of Artificial Sequence: Synthetic peptide"
TSSSGLT

SEQ ID NO: 12302 - protein, 7 aa, Artificial Sequence
  source: /note="Description of Artificial Sequence: Synthetic peptide"
TSSSNSP

SEQ ID NO: 12303 - protein, 7 aa, Artificial Sequence
  source: /note="Description of Artificial Sequence: Synthetic peptide"
TSSTMSP

SEQ ID NO: 12304 - protein, 7 aa, Artificial Sequence
  source: /note="Description of Artificial Sequence: Synthetic peptide"
TSSTYEE

SEQ ID NO: 12305 - protein, 7 aa, Artificial Sequence
  source: /note="Description of Artificial Sequence: Synthetic peptide"
TSSVSSI

SEQ ID NO: 12306 - protein, 7 aa, Artificial Sequence
  source: /note="Description of Artificial Sequence: Synthetic peptide"
TSTAALP

SEQ ID NO: 12307 - protein, 7 aa, Artificial Sequence
  source: /note="Description of Artificial Sequence: Synthetic peptide"
TSTFEGM

SEQ ID NO: 12308 - protein, 7 aa, Artificial Sequence
  source: /note="Description of Artificial Sequence: Synthetic peptide"
TSTGHTV

SEQ ID NO: 12309 - protein, 7 aa, Artificial Sequence
  source: /note="Description of Artificial Sequence: Synthetic peptide"
TSTGVRM

SEQ ID NO: 12310 - protein, 7 aa, Artificial Sequence
  source: /note="Description of Artificial Sequence: Synthetic peptide"
TSTLLSL

SEQ ID NO: 12311 - protein, 7 aa, Artificial Sequence
  source: /note="Description of Artificial Sequence: Synthetic peptide"
TSTNSLA

SEQ ID NO: 12312 - protein, 7 aa, Artificial Sequence
  source: /note="Description of Artificial Sequence: Synthetic peptide"
TSTSMAI

SEQ ID NO: 12313 - protein, 7 aa, Artificial Sequence
  source: /note="Description of Artificial Sequence: Synthetic peptide"
TSTSNRN

SEQ ID NO: 12314 - protein, 7 aa, Artificial Sequence
  source: /note="Description of Artificial Sequence: Synthetic peptide"
TSTTMPL

SEQ ID NO: 12315 - protein, 7 aa, Artificial Sequence
  source: /note="Description of Artificial Sequence: Synthetic peptide"
TSTTVGN

SEQ ID NO: 12316 - protein, 7 aa, Artificial Sequence
  source: /note="Description of Artificial Sequence: Synthetic peptide"
TSTVSPK

SEQ ID NO: 12317 - protein, 7 aa, Artificial Sequence
  source: /note="Description of Artificial Sequence: Synthetic peptide"
TSVERSW

SEQ ID NO: 12318 - protein, 7 aa, Artificial Sequence
  source: /note="Description of Artificial Sequence: Synthetic peptide"
TSVGDHF

SEQ ID NO: 12319 - protein, 7 aa, Artificial Sequence
  source: /note="Description of Artificial Sequence: Synthetic peptide"
TSVGWQP

SEQ ID NO: 12320 - protein, 7 aa, Artificial Sequence
  source: /note="Description of Artificial Sequence: Synthetic peptide"
TSVKSAS

SEQ ID NO: 12321 - protein, 7 aa, Artificial Sequence
  source: /note="Description of Artificial Sequence: Synthetic peptide"
TSVQPPP

SEQ ID NO: 12322 - protein, 7 aa, Artificial Sequence
  source: /note="Description of Artificial Sequence: Synthetic peptide"
TSVSHAG

SEQ ID NO: 12323 - protein, 7 aa, Artificial Sequence
  source: /note="Description of Artificial Sequence: Synthetic peptide"
TSVTMKV

SEQ ID NO: 12324 - protein, 7 aa, Artificial Sequence
  source: /note="Description of Artificial Sequence: Synthetic peptide"
TSVTTHY

SEQ ID NO: 12325 - protein, 7 aa, Artificial Sequence
  source: /note="Description of Artificial Sequence: Synthetic peptide"
TSWQGAV

SEQ ID NO: 12326 - protein, 7 aa, Artificial Sequence
  source: /note="Description of Artificial Sequence: Synthetic peptide"
TSYGPKV

SEQ ID NO: 12327 - protein, 7 aa, Artificial Sequence
  source: /note="Description of Artificial Sequence: Synthetic peptide"
TSYQRIE

SEQ ID NO: 12328 - protein, 7 aa, Artificial Sequence
  source: /note="Description of Artificial Sequence: Synthetic peptide"
TTAAKVG

SEQ ID NO: 12329 - protein, 7 aa, Artificial Sequence
  source: /note="Description of Artificial Sequence: Synthetic peptide"
TTAEYTR

SEQ ID NO: 12330 - protein, 7 aa, Artificial Sequence
  source: /note="Description of Artificial Sequence: Synthetic peptide"
TTALPQF

SEQ ID NO: 12331 - protein, 7 aa, Artificial Sequence
  source: /note="Description of Artificial Sequence: Synthetic peptide"
TTAMRGP

SEQ ID NO: 12332 - protein, 7 aa, Artificial Sequence
  source: /note="Description of Artificial Sequence: Synthetic peptide"
TTARQFQ

SEQ ID NO: 12333 - protein, 7 aa, Artificial Sequence
  source: /note="Description of Artificial Sequence: Synthetic peptide"
TTAVSSK

SEQ ID NO: 12334 - protein, 7 aa, Artificial Sequence
  source: /note="Description of Artificial Sequence: Synthetic peptide"
TTDAARP

SEQ ID NO: 12335 - protein, 7 aa, Artificial Sequence
  source: /note="Description of Artificial Sequence: Synthetic peptide"
TTDCCAA

SEQ ID NO: 12336 - protein, 7 aa, Artificial Sequence
  source: /note="Description of Artificial Sequence: Synthetic peptide"
TTDVYVR

SEQ ID NO: 12337 - protein, 7 aa, Artificial Sequence
  source: /note="Description of Artificial Sequence: Synthetic peptide"
TTDYPLS

SEQ ID NO: 12338 - protein, 7 aa, Artificial Sequence
  source: /note="Description of Artificial Sequence: Synthetic peptide"
TTEHGYV

SEQ ID NO: 12339 - protein, 7 aa, Artificial Sequence
  source: /note="Description of Artificial Sequence: Synthetic peptide"
TTFLQNG

SEQ ID NO: 12340 - protein, 7 aa, Artificial Sequence
  source: /note="Description of Artificial Sequence: Synthetic peptide"
TTGAIDI

SEQ ID NO: 12341 - protein, 7 aa, Artificial Sequence
  source: /note="Description of Artificial Sequence: Synthetic peptide"
TTGHLSV

SEQ ID NO: 12342 - protein, 7 aa, Artificial Sequence
  source: /note="Description of Artificial Sequence: Synthetic peptide"
TTGHTLI

SEQ ID NO: 12343 - protein, 7 aa, Artificial Sequence
  source: /note="Description of Artificial Sequence: Synthetic peptide"
TTGLSLG

SEQ ID NO: 12344 - protein, 7 aa, Artificial Sequence
  source: /note="Description of Artificial Sequence: Synthetic peptide"
TTGNSLP

SEQ ID NO: 12345 - protein, 7 aa, Artificial Sequence
  source: /note="Description of Artificial Sequence: Synthetic peptide"
TTGNTLS

SEQ ID NO: 12346 - protein, 7 aa, Artificial Sequence
  source: /note="Description of Artificial Sequence: Synthetic peptide"
TTGSIPH

SEQ ID NO: 12347 - protein, 7 aa, Artificial Sequence
  source: /note="Description of Artificial Sequence: Synthetic peptide"
TTHAPLS

SEQ ID NO: 12348 - protein, 7 aa, Artificial Sequence
  source: /note="Description of Artificial Sequence: Synthetic peptide"
TTHASCT

SEQ ID NO: 12349 - protein, 7 aa, Artificial Sequence
  source: /note="Description of Artificial Sequence: Synthetic peptide"
TTHDVYR

SEQ ID NO: 12350 - protein, 7 aa, Artificial Sequence
  source: /note="Description of Artificial Sequence: Synthetic peptide"
TTHSTAA

SEQ ID NO: 12351 - protein, 7 aa, Artificial Sequence
  source: /note="Description of Artificial Sequence: Synthetic peptide"
TTHTQYR

SEQ ID NO: 12352 - protein, 7 aa, Artificial Sequence
  source: /note="Description of Artificial Sequence: Synthetic peptide"
TTILGPM

SEQ ID NO: 12353 - protein, 7 aa, Artificial Sequence
  source: /note="Description of Artificial Sequence: Synthetic peptide"
TTKIGDD

SEQ ID NO: 12354 - protein, 7 aa, Artificial Sequence
  source: /note="Description of Artificial Sequence: Synthetic peptide"
TTKSADT

SEQ ID NO: 12355 - protein, 7 aa, Artificial Sequence
  source: /note="Description of Artificial Sequence: Synthetic peptide"
TTKVGSP

SEQ ID NO: 12356 - protein, 7 aa, Artificial Sequence
  source: /note="Description of Artificial Sequence: Synthetic peptide"
TTLDPSL

SEQ ID NO: 12357 - protein, 7 aa, Artificial Sequence
  source: /note="Description of Artificial Sequence: Synthetic peptide"
TTLGPSR

SEQ ID NO: 12358 - protein, 7 aa, Artificial Sequence
  source: /note="Description of Artificial Sequence: Synthetic peptide"
TTLGSAV

SEQ ID NO: 12359 - protein, 7 aa, Artificial Sequence
  source: /note="Description of Artificial Sequence: Synthetic peptide"
TTLSGGT

SEQ ID NO: 12360 - protein, 7 aa, Artificial Sequence
  source: /note="Description of Artificial Sequence: Synthetic peptide"
TTLSPNK

SEQ ID NO: 12361 - protein, 7 aa, Artificial Sequence
  source: /note="Description of Artificial Sequence: Synthetic peptide"
TTLSPRG

SEQ ID NO: 12362 - protein, 7 aa, Artificial Sequence
  source: /note="Description of Artificial Sequence: Synthetic peptide"
TTLSSLA

SEQ ID NO: 12363 - protein, 7 aa, Artificial Sequence
  source: /note="Description of Artificial Sequence: Synthetic peptide"
TTMALGA

SEQ ID NO: 12364 - protein, 7 aa, Artificial Sequence
  source: /note="Description of Artificial Sequence: Synthetic peptide"
TTMKPEA

SEQ ID NO: 12365 - protein, 7 aa, Artificial Sequence
  source: /note="Description of Artificial Sequence: Synthetic peptide"
TTMTLVS

SEQ ID NO: 12366 - protein, 7 aa, Artificial Sequence
  source: /note="Description of Artificial Sequence: Synthetic peptide"
TTMYTTT

SEQ ID NO: 12367 - protein, 7 aa, Artificial Sequence
  source: /note="Description of Artificial Sequence: Synthetic peptide"
TTNAQGG

SEQ ID NO: 12368 - protein, 7 aa, Artificial Sequence
  source: /note="Description of Artificial Sequence: Synthetic peptide"
TTNIVRQ

SEQ ID NO: 12369 - protein, 7 aa, Artificial Sequence
  source: /note="Description of Artificial Sequence: Synthetic peptide"
TTNLAMM

SEQ ID NO: 12370 - protein, 7 aa, Artificial Sequence
  source: /note="Description of Artificial Sequence: Synthetic peptide"
TTPGYAP

SEQ ID NO: 12371 - protein, 7 aa, Artificial Sequence
  source: /note="Description of Artificial Sequence: Synthetic peptide"
TTPIRDG

SEQ ID NO: 12372 - protein, 7 aa, Artificial Sequence
  source: /note="Description of Artificial Sequence: Synthetic peptide"
TTPLTKG

SEQ ID NO: 12373 - protein, 7 aa, Artificial Sequence
  source: /note="Description of Artificial Sequence: Synthetic peptide"
TTPPMHL

SEQ ID NO: 12374 - protein, 7 aa, Artificial Sequence
  source: /note="Description of Artificial Sequence: Synthetic peptide"
TTPQLNL

SEQ ID NO: 12375 - protein, 7 aa, Artificial Sequence
  source: /note="Description of Artificial Sequence: Synthetic peptide"
TTPRLLS

SEQ ID NO: 12376 - protein, 7 aa, Artificial Sequence
  source: /note="Description of Artificial Sequence: Synthetic peptide"
TTPTDGA

SEQ ID NO: 12377 - protein, 7 aa, Artificial Sequence
  source: /note="Description of Artificial Sequence: Synthetic peptide"
TTPTNRP

SEQ ID NO: 12378 - protein, 7 aa, Artificial Sequence
  source: /note="Description of Artificial Sequence: Synthetic peptide"
TTQEHLP

SEQ ID NO: 12379 - protein, 7 aa, Artificial Sequence
  source: /note="Description of Artificial Sequence: Synthetic peptide"
TTQNVNQ

SEQ ID NO: 12380 - protein, 7 aa, Artificial Sequence
  source: /note="Description of Artificial Sequence: Synthetic peptide"
TTQSTYE

SEQ ID NO: 12381 - protein, 7 aa, Artificial Sequence
  source: /note="Description of Artificial Sequence: Synthetic peptide"
TTQTAET

SEQ ID NO: 12382 - protein, 7 aa, Artificial Sequence
  source: /note="Description of Artificial Sequence: Synthetic peptide"
TTRDPPA

SEQ ID NO: 12383 - protein, 7 aa, Artificial Sequence
  source: /note="Description of Artificial Sequence: Synthetic peptide"
TTRGDEP

SEQ ID NO: 12384 - protein, 7 aa, Artificial Sequence
  source: /note="Description of Artificial Sequence: Synthetic peptide"
TTRIAAE

SEQ ID NO: 12385 - protein, 7 aa, Artificial Sequence
  source: /note="Description of Artificial Sequence: Synthetic peptide"
TTRLALA

SEQ ID NO: 12386 - protein, 7 aa, Artificial Sequence
  source: /note="Description of Artificial Sequence: Synthetic peptide"
TTRLVSP

SEQ ID NO: 12387 - protein, 7 aa, Artificial Sequence
  source: /note="Description of Artificial Sequence: Synthetic peptide"
TTRPPHY

SEQ ID NO: 12388 - protein, 7 aa, Artificial Sequence
  source: /note="Description of Artificial Sequence: Synthetic peptide"
TTRPSEP

SEQ ID NO: 12389 - protein, 7 aa, Artificial Sequence
  source: /note="Description of Artificial Sequence: Synthetic peptide"
TTRQSDN

SEQ ID NO: 12390 - protein, 7 aa, Artificial Sequence
  source: /note="Description of Artificial Sequence: Synthetic peptide"
TTRSAAS

SEQ ID NO: 12391 - protein, 7 aa, Artificial Sequence
  source: /note="Description of Artificial Sequence: Synthetic peptide"
TTRSESG

SEQ ID NO: 12392 - protein, 7 aa, Artificial Sequence
  source: /note="Description of Artificial Sequence: Synthetic peptide"
TTRSVLQ

SEQ ID NO: 12393 - protein, 7 aa, Artificial Sequence
  source: /note="Description of Artificial Sequence: Synthetic peptide"
TTRVEMA

SEQ ID NO: 12394 - protein, 7 aa, Artificial Sequence
  source: /note="Description of Artificial Sequence: Synthetic peptide"
TTRVGLV

SEQ ID NO: 12395 - protein, 7 aa, Artificial Sequence
  source: /note="Description of Artificial Sequence: Synthetic peptide"
TTSADHS

SEQ ID NO: 12396 - protein, 7 aa, Artificial Sequence
  source: /note="Description of Artificial Sequence: Synthetic peptide"
TTSAREL

SEQ ID NO: 12397 - protein, 7 aa, Artificial Sequence
  source: /note="Description of Artificial Sequence: Synthetic peptide"
TTSGDRL

SEQ ID NO: 12398 - protein, 7 aa, Artificial Sequence
  source: /note="Description of Artificial Sequence: Synthetic peptide"
TTSGFSP

SEQ ID NO: 12399 - protein, 7 aa, Artificial Sequence
  source: /note="Description of Artificial Sequence: Synthetic peptide"
TTSHAPS

SEQ ID NO: 12400 - protein, 7 aa, Artificial Sequence
  source: /note="Description of Artificial Sequence: Synthetic peptide"
TTSHPLM

SEQ ID NO: 12401 - protein, 7 aa, Artificial Sequence
  source: /note="Description of Artificial Sequence: Synthetic peptide"
TTSIGSA

SEQ ID NO: 12402 - protein, 7 aa, Artificial Sequence
  source: /note="Description of Artificial Sequence: Synthetic peptide"
TTSLGRV

SEQ ID NO: 12403 - protein, 7 aa, Artificial Sequence
  source: /note="Description of Artificial Sequence: Synthetic peptide"
TTSLMEA

SEQ ID NO: 12404 - protein, 7 aa, Artificial Sequence
  source: /note="Description of Artificial Sequence: Synthetic peptide"
TTSNVHT

SEQ ID NO: 12405 - protein, 7 aa, Artificial Sequence
  source: /note="Description of Artificial Sequence: Synthetic peptide"
TTSPLRT

SEQ ID NO: 12406 - protein, 7 aa, Artificial Sequence
  source: /note="Description of Artificial Sequence: Synthetic peptide"
TTSPQRS

SEQ ID NO: 12407 - protein, 7 aa, Artificial Sequence
  source: /note="Description of Artificial Sequence: Synthetic peptide"
TTSRLSA

SEQ ID NO: 12408 - protein, 7 aa, Artificial Sequence
  source: /note="Description of Artificial Sequence: Synthetic peptide"
TTSSSPS

SEQ ID NO: 12409 - protein, 7 aa, Artificial Sequence
  source: /note="Description of Artificial Sequence: Synthetic peptide"
TTTAMIV

SEQ ID NO: 12410 - protein, 7 aa, Artificial Sequence
  source: /note="Description of Artificial Sequence: Synthetic peptide"
TTTASFE

SEQ ID NO: 12411 - protein, 7 aa, Artificial Sequence
  source: /note="Description of Artificial Sequence: Synthetic peptide"
TTTDKPL

SEQ ID NO: 12412 - protein, 7 aa, Artificial Sequence
  source: /note="Description of Artificial Sequence: Synthetic peptide"
TTTDVAR

SEQ ID NO: 12413 - protein, 7 aa, Artificial Sequence
  source: /note="Description of Artificial Sequence: Synthetic peptide"
TTTERTR

SEQ ID NO: 12414 - protein, 7 aa, Artificial Sequence
  source: /note="Description of Artificial Sequence: Synthetic peptide"
TTTKHVY

SEQ ID NO: 12415 - protein, 7 aa, Artificial Sequence
  source: /note="Description of Artificial Sequence: Synthetic peptide"
TTTPITN

SEQ ID NO: 12416 - protein, 7 aa, Artificial Sequence
  source: /note="Description of Artificial Sequence: Synthetic peptide"
TTTRVNA

SEQ ID NO: 12417 - protein, 7 aa, Artificial Sequence
  source: /note="Description of Artificial Sequence: Synthetic peptide"
TTTVPIF

SEQ ID NO: 12418 - protein, 7 aa, Artificial Sequence
  source: /note="Description of Artificial Sequence: Synthetic peptide"
TTTVTYL

SEQ ID NO: 12419 - protein, 7 aa, Artificial Sequence
  source: /note="Description of Artificial Sequence: Synthetic peptide"
TTVDVVH

SEQ ID NO: 12420 - protein, 7 aa, Artificial Sequence
  source: /note="Description of Artificial Sequence: Synthetic peptide"
TTVPDSV

SEQ ID NO: 12421 - protein, 7 aa, Artificial Sequence
  source: /note="Description of Artificial Sequence: Synthetic peptide"
TTVPNTS

SEQ ID NO: 12422 - protein, 7 aa, Artificial Sequence
  source: /note="Description of Artificial Sequence: Synthetic peptide"
TTVRVHP

SEQ ID NO: 12423 - protein, 7 aa, Artificial Sequence
  source: /note="Description of Artificial Sequence: Synthetic peptide"
TTVVSDL

SEQ ID NO: 12424 - protein, 7 aa, Artificial Sequence
  source: /note="Description of Artificial Sequence: Synthetic peptide"
TTVVYTA

SEQ ID NO: 12425 - protein, 7 aa, Artificial Sequence
  source: /note="Description of Artificial Sequence: Synthetic peptide"
TTYPIHA

SEQ ID NO: 12426 - protein, 7 aa, Artificial Sequence
  source: /note="Description of Artificial Sequence: Synthetic peptide"
TTYSNSA

SEQ ID NO: 12427 - protein, 7 aa, Artificial Sequence
  source: /note="Description of Artificial Sequence: Synthetic peptide"
TVAGNIA

SEQ ID NO: 12428 - protein, 7 aa, Artificial Sequence
  source: /note="Description of Artificial Sequence: Synthetic peptide"
TVAHRIP

SEQ ID NO: 12429 - protein, 7 aa, Artificial Sequence
  source: /note="Description of Artificial Sequence: Synthetic peptide"
TVAIHEP

SEQ ID NO: 12430 - protein, 7 aa, Artificial Sequence
  source: /note="Description of Artificial Sequence: Synthetic peptide"
TVAPDLN

SEQ ID NO: 12431 - protein, 7 aa, Artificial Sequence
  source: /note="Description of Artificial Sequence: Synthetic peptide"
TVCVSRT

SEQ ID NO: 12432 - protein, 7 aa, Artificial Sequence
  source: /note="Description of Artificial Sequence: Synthetic peptide"
TVDEWAG

SEQ ID NO: 12433 - protein, 7 aa, Artificial Sequence
  source: /note="Description of Artificial Sequence: Synthetic peptide"
TVDGSHQ

SEQ ID NO: 12434 - protein, 7 aa, Artificial Sequence
  source: /note="Description of Artificial Sequence: Synthetic peptide"
TVDSSGV

SEQ ID NO: 12435 - protein, 7 aa, Artificial Sequence
  source: /note="Description of Artificial Sequence: Synthetic peptide"
TVDTKHS

SEQ ID NO: 12436 - protein, 7 aa, Artificial Sequence
  source: /note="Description of Artificial Sequence: Synthetic peptide"
TVEGDRL

SEQ ID NO: 12437 - protein, 7 aa, Artificial Sequence
  source: /note="Description of Artificial Sequence: Synthetic peptide"
TVFSESE

SEQ ID NO: 12438 - protein, 7 aa, Artificial Sequence
  source: /note="Description of Artificial Sequence: Synthetic peptide"
TVGHLNV

SEQ ID NO: 12439 - protein, 7 aa, Artificial Sequence
  source: /note="Description of Artificial Sequence: Synthetic peptide"
TVGNYRD

SEQ ID NO: 12440 - protein, 7 aa, Artificial Sequence
  source: /note="Description of Artificial Sequence: Synthetic peptide"
TVGSLSD

SEQ ID NO: 12441 - protein, 7 aa, Artificial Sequence
  source: /note="Description of Artificial Sequence: Synthetic peptide"
TVGTLML

SEQ ID NO: 12442 - protein, 7 aa, Artificial Sequence
  source: /note="Description of Artificial Sequence: Synthetic peptide"
TVGTPPT

SEQ ID NO: 12443 - protein, 7 aa, Artificial Sequence
  source: /note="Description of Artificial Sequence: Synthetic peptide"
TVGTRAM

SEQ ID NO: 12444 - protein, 7 aa, Artificial Sequence
  source: /note="Description of Artificial Sequence: Synthetic peptide"
TVGVEGS

SEQ ID NO: 12445 - protein, 7 aa, Artificial Sequence
  source: /note="Description of Artificial Sequence: Synthetic peptide"
TVGVNAS

SEQ ID NO: 12446 - protein, 7 aa, Artificial Sequence
  source: /note="Description of Artificial Sequence: Synthetic peptide"
TVHFSQA

SEQ ID NO: 12447 - protein, 7 aa, Artificial Sequence
  source: /note="Description of Artificial Sequence: Synthetic peptide"
TVHILTP

SEQ ID NO: 12448 - protein, 7 aa, Artificial Sequence
  source: /note="Description of Artificial Sequence: Synthetic peptide"
TVHNVQF

SEQ ID NO: 12449 - protein, 7 aa, Artificial Sequence
  source: /note="Description of Artificial Sequence: Synthetic peptide"
TVHRQVD

SEQ ID NO: 12450 - protein, 7 aa, Artificial Sequence
  source: /note="Description of Artificial Sequence: Synthetic peptide"
TVHTFRE

SEQ ID NO: 12451 - protein, 7 aa, Artificial Sequence
  source: /note="Description of Artificial Sequence: Synthetic peptide"
TVKISEG

SEQ ID NO: 12452 - protein, 7 aa, Artificial Sequence
  source: /note="Description of Artificial Sequence: Synthetic peptide"
TVKQSQV

SEQ ID NO: 12453 - protein, 7 aa, Artificial Sequence
  source: /note="Description of Artificial Sequence: Synthetic peptide"
TVKVSKP

SEQ ID NO: 12454 - protein, 7 aa, Artificial Sequence
  source: /note="Description of Artificial Sequence: Synthetic peptide"
TVLAARG

SEQ ID NO: 12455 - protein, 7 aa, Artificial Sequence
  source: /note="Description of Artificial Sequence: Synthetic peptide"
TVLASPV

SEQ ID NO: 12456 - protein, 7 aa, Artificial Sequence
  source: /note="Description of Artificial Sequence: Synthetic peptide"
TVLESQS

SEQ ID NO: 12457 - protein, 7 aa, Artificial Sequence
  source: /note="Description of Artificial Sequence: Synthetic peptide"
TVLKTSI

SEQ ID NO: 12458 - protein, 7 aa, Artificial Sequence
  source: /note="Description of Artificial Sequence: Synthetic peptide"
TVMRTLA

SEQ ID NO: 12459 - protein, 7 aa, Artificial Sequence
  source: /note="Description of Artificial Sequence: Synthetic peptide"
TVMRVTG

SEQ ID NO: 12460 - protein, 7 aa, Artificial Sequence
  source: /note="Description of Artificial Sequence: Synthetic peptide"
TVNGLRA

SEQ ID NO: 12461 - protein, 7 aa, Artificial Sequence
  source: /note="Description of Artificial Sequence: Synthetic peptide"
TVNHQSL

SEQ ID NO: 12462 - protein, 7 aa, Artificial Sequence
  source: /note="Description of Artificial Sequence: Synthetic peptide"
TVNIETN

SEQ ID NO: 12463 - protein, 7 aa, Artificial Sequence
  source: /note="Description of Artificial Sequence: Synthetic peptide"
TVNKVCL

SEQ ID NO: 12464 - protein, 7 aa, Artificial Sequence
  source: /note="Description of Artificial Sequence: Synthetic peptide"
TVNYNDI

SEQ ID NO: 12465 - protein, 7 aa, Artificial Sequence
  source: /note="Description of Artificial Sequence: Synthetic peptide"
TVPAGHE

SEQ ID NO: 12466 - protein, 7 aa, Artificial Sequence
  source: /note="Description of Artificial Sequence: Synthetic peptide"
TVPARTM

SEQ ID NO: 12467 - protein, 7 aa, Artificial Sequence
  source: /note="Description of Artificial Sequence: Synthetic peptide"
TVPQSVL

SEQ ID NO: 12468 - protein, 7 aa, Artificial Sequence
  source: /note="Description of Artificial Sequence: Synthetic peptide"
TVPTAVA

SEQ ID NO: 12469 - protein, 7 aa, Artificial Sequence
  source: /note="Description of Artificial Sequence: Synthetic peptide"
TVPVAIV

SEQ ID NO: 12470 - protein, 7 aa, Artificial Sequence
  source: /note="Description of Artificial Sequence: Synthetic peptide"
TVQDTFR

SEQ ID NO: 12471 - protein, 7 aa, Artificial Sequence
  source: /note="Description of Artificial Sequence: Synthetic peptide"
TVQGIDR

SEQ ID NO: 12472 - protein, 7 aa, Artificial Sequence
  source: /note="Description of Artificial Sequence: Synthetic peptide"
TVQQQAN

SEQ ID NO: 12473 - protein, 7 aa, Artificial Sequence
  source: /note="Description of Artificial Sequence: Synthetic peptide"
TVQSPLL

SEQ ID NO: 12474 - protein, 7 aa, Artificial Sequence
  source: /note="Description of Artificial Sequence: Synthetic peptide"
TVQSSAT

SEQ ID NO: 12475 - protein, 7 aa, Artificial Sequence
  source: /note="Description of Artificial Sequence: Synthetic peptide"
TVQTTST

SEQ ID NO: 12476 - protein, 7 aa, Artificial Sequence
  source: /note="Description of Artificial Sequence: Synthetic peptide"
TVQVRLP

SEQ ID NO: 12477 - protein, 7 aa, Artificial Sequence
  source: /note="Description of Artificial Sequence: Synthetic peptide"
TVRGISL

SEQ ID NO: 12478 - protein, 7 aa, Artificial Sequence
  source: /note="Description of Artificial Sequence: Synthetic peptide"
TVRGLDT

SEQ ID NO: 12479 - protein, 7 aa, Artificial Sequence
  source: /note="Description of Artificial Sequence: Synthetic peptide"
TVRGSPL

SEQ ID NO: 12480 - protein, 7 aa, Artificial Sequence
  source: /note="Description of Artificial Sequence: Synthetic peptide"
TVRLDGV

SEQ ID NO: 12481 - protein, 7 aa, Artificial Sequence
  source: /note="Description of Artificial Sequence: Synthetic peptide"
TVRPVSS

SEQ ID NO: 12482 - protein, 7 aa, Artificial Sequence
  source: /note="Description of Artificial Sequence: Synthetic peptide"
TVRSPSI

SEQ ID NO: 12483 - protein, 7 aa, Artificial Sequence
  source: /note="Description of Artificial Sequence: Synthetic peptide"
TVSAQPR

SEQ ID NO: 12484 - protein, 7 aa, Artificial Sequence
  source: /note="Description of Artificial Sequence: Synthetic peptide"
TVSDTSF

SEQ ID NO: 12485 - protein, 7 aa, Artificial Sequence
  source: /note="Description of Artificial Sequence: Synthetic peptide"
TVSGKHT

SEQ ID NO: 12486 - protein, 7 aa, Artificial Sequence
  source: /note="Description of Artificial Sequence: Synthetic peptide"
TVSHGQR

SEQ ID NO: 12487 - protein, 7 aa, Artificial Sequence
  source: /note="Description of Artificial Sequence: Synthetic peptide"
TVSKMGG

SEQ ID NO: 12488 - protein, 7 aa, Artificial Sequence
  source: /note="Description of Artificial Sequence: Synthetic peptide"
TVSRNDA

SEQ ID NO: 12489 - protein, 7 aa, Artificial Sequence
  source: /note="Description of Artificial Sequence: Synthetic peptide"
TVSRQVC

SEQ ID NO: 12490 - protein, 7 aa, Artificial Sequence
  source: /note="Description of Artificial Sequence: Synthetic peptide"
TVSTTCA

SEQ ID NO: 12491 - protein, 7 aa, Artificial Sequence
  source: /note="Description of Artificial Sequence: Synthetic peptide"
TVSVTKP

SEQ ID NO: 12492 - protein, 7 aa, Artificial Sequence
  source: /note="Description of Artificial Sequence: Synthetic peptide"
TVSVVDK

SEQ ID NO: 12493 - protein, 7 aa, Artificial Sequence
  source: /note="Description of Artificial Sequence: Synthetic peptide"
TVTEARN

SEQ ID NO: 12494 - protein, 7 aa, Artificial Sequence
  source: /note="Description of Artificial Sequence: Synthetic peptide"
TVTGNGF

SEQ ID NO: 12495 - protein, 7 aa, Artificial Sequence
  source: /note="Description of Artificial Sequence: Synthetic peptide"
TVTHNME

SEQ ID NO: 12496 - protein, 7 aa, Artificial Sequence
  source: /note="Description of Artificial Sequence: Synthetic peptide"
TVTNPRN

SEQ ID NO: 12497 - protein, 7 aa, Artificial Sequence
  source: /note="Description of Artificial Sequence: Synthetic peptide"
TVTPAVN

SEQ ID NO: 12498 - protein, 7 aa, Artificial Sequence
  source: /note="Description of Artificial Sequence: Synthetic peptide"
TVTRHPS

SEQ ID NO: 12499 - protein, 7 aa, Artificial Sequence
  source: /note="Description of Artificial Sequence: Synthetic peptide"
TVTTAER

SEQ ID NO: 12500 - protein, 7 aa, Artificial Sequence
  source: /note="Description of Artificial Sequence: Synthetic peptide"
TVTTGRW

SEQ ID NO: 12501 - protein, 7 aa, Artificial Sequence
  source: /note="Description of Artificial Sequence: Synthetic peptide"
TVTTRQA

SEQ ID NO: 12502 - protein, 7 aa, Artificial Sequence
  source: /note="Description of Artificial Sequence: Synthetic peptide"
TVVKSGD

SEQ ID NO: 12503 - protein, 7 aa, Artificial Sequence
  source: /note="Description of Artificial Sequence: Synthetic peptide"
TVVLTSG

SEQ ID NO: 12504 - protein, 7 aa, Artificial Sequence
  source: /note="Description of Artificial Sequence: Synthetic peptide"
TVVPSGR

SEQ ID NO: 12505 - protein, 7 aa, Artificial Sequence
  source: /note="Description of Artificial Sequence: Synthetic peptide"
TVVPVPG

SEQ ID NO: 12506 - protein, 7 aa, Artificial Sequence
  source: /note="Description of Artificial Sequence: Synthetic peptide"
TVYSGRP

SEQ ID NO: 12507 - protein, 7 aa, Artificial Sequence
  source: /note="Description of Artificial Sequence: Synthetic peptide"
TVYSPNT

SEQ ID NO: 12508 - protein, 7 aa, Artificial Sequence
  source: /note="Description of Artificial Sequence: Synthetic peptide"
TWNATMN

SEQ ID NO: 12509 - protein, 7 aa, Artificial Sequence
  source: /note="Description of Artificial Sequence: Synthetic peptide"
TWQDNRA

SEQ ID NO: 12510 - protein, 7 aa, Artificial Sequence
  source: /note="Description of Artificial Sequence: Synthetic peptide"
TWSATQG

SEQ ID NO: 12511 - protein, 7 aa, Artificial Sequence
  source: /note="Description of Artificial Sequence: Synthetic peptide"
TWSSGTD

SEQ ID NO: 12512 - protein, 7 aa, Artificial Sequence
  source: /note="Description of Artificial Sequence: Synthetic peptide"
TWSTNVS

SEQ ID NO: 12513 - protein, 7 aa, Artificial Sequence
  source: /note="Description of Artificial Sequence: Synthetic peptide"
TYAIIPD

SEQ ID NO: 12514 - protein, 7 aa, Artificial Sequence
  source: /note="Description of Artificial Sequence: Synthetic peptide"
TYANSAF

SEQ ID NO: 12515 - protein, 7 aa, Artificial Sequence
  source: /note="Description of Artificial Sequence: Synthetic peptide"
TYANVSS

SEQ ID NO: 12516 - protein, 7 aa, Artificial Sequence
  source: /note="Description of Artificial Sequence: Synthetic peptide"
TYAPSRG

SEQ ID NO: 12517 - protein, 7 aa, Artificial Sequence
  source: /note="Description of Artificial Sequence: Synthetic peptide"
TYAPVET

SEQ ID NO: 12518 - protein, 7 aa, Artificial Sequence
  source: /note="Description of Artificial Sequence: Synthetic peptide"
TYARSQA

SEQ ID NO: 12519 - protein, 7 aa, Artificial Sequence
  source: /note="Description of Artificial Sequence: Synthetic peptide"
TYEARQL

SEQ ID NO: 12520 - protein, 7 aa, Artificial Sequence
  source: /note="Description of Artificial Sequence: Synthetic peptide"
TYEGRLR

SEQ ID NO: 12521 - protein, 7 aa, Artificial Sequence
  source: /note="Description of Artificial Sequence: Synthetic peptide"
TYELSPP

SEQ ID NO: 12522 - protein, 7 aa, Artificial Sequence
  source: /note="Description of Artificial Sequence: Synthetic peptide"
TYEVRQL

SEQ ID NO: 12523 - protein, 7 aa, Artificial Sequence
  source: /note="Description of Artificial Sequence: Synthetic peptide"
TYGAAVQ

SEQ ID NO: 12524 - protein, 7 aa, Artificial Sequence
  source: /note="Description of Artificial Sequence: Synthetic peptide"
TYGGPMI

SEQ ID NO: 12525 - protein, 7 aa, Artificial Sequence
  source: /note="Description of Artificial Sequence: Synthetic peptide"
TYGIQAP

SEQ ID NO: 12526 - protein, 7 aa, Artificial Sequence
  source: /note="Description of Artificial Sequence: Synthetic peptide"
TYGLSVP

SEQ ID NO: 12527 - protein, 7 aa, Artificial Sequence
  source: /note="Description of Artificial Sequence: Synthetic peptide"
TYGMTGA

SEQ ID NO: 12528 - protein, 7 aa, Artificial Sequence
  source: /note="Description of Artificial Sequence: Synthetic peptide"
TYHTGDG

SEQ ID NO: 12529 - protein, 7 aa, Artificial Sequence
  source: /note="Description of Artificial Sequence: Synthetic peptide"
TYINTNP

SEQ ID NO: 12530 - protein, 7 aa, Artificial Sequence
  source: /note="Description of Artificial Sequence: Synthetic peptide"
TYKDEQP

SEQ ID NO: 12531 - protein, 7 aa, Artificial Sequence
  source: /note="Description of Artificial Sequence: Synthetic peptide"
TYKGAPP

SEQ ID NO: 12532 - protein, 7 aa, Artificial Sequence
  source: /note="Description of Artificial Sequence: Synthetic peptide"
TYKNQTH

SEQ ID NO: 12533 - protein, 7 aa, Artificial Sequence
  source: /note="Description of Artificial Sequence: Synthetic peptide"
TYLIATP

SEQ ID NO: 12534 - protein, 7 aa, Artificial Sequence
  source: /note="Description of Artificial Sequence: Synthetic peptide"
TYLSGAY

SEQ ID NO: 12535 - protein, 7 aa, Artificial Sequence
  source: /note="Description of Artificial Sequence: Synthetic peptide"
TYPLPNE

SEQ ID NO: 12536 - protein, 7 aa, Artificial Sequence
  source: /note="Description of Artificial Sequence: Synthetic peptide"
TYPPAAL

SEQ ID NO: 12537 - protein, 7 aa, Artificial Sequence
  source: /note="Description of Artificial Sequence: Synthetic peptide"
TYPTEPR

SEQ ID NO: 12538 - protein, 7 aa, Artificial Sequence
  source: /note="Description of Artificial Sequence: Synthetic peptide"
TYPTLLD

SEQ ID NO: 12539 - protein, 7 aa, Artificial Sequence
  source: /note="Description of Artificial Sequence: Synthetic peptide"
TYQASLI

SEQ ID NO: 12540 - protein, 7 aa, Artificial Sequence
  source: /note="Description of Artificial Sequence: Synthetic peptide"
TYQSQSG

SEQ ID NO: 12541 - protein, 7 aa, Artificial Sequence
  source: /note="Description of Artificial Sequence: Synthetic peptide"
TYSAETM

SEQ ID NO: 12542 - protein, 7 aa, Artificial Sequence
  source: /note="Description of Artificial Sequence: Synthetic peptide"
TYSAVLA

SEQ ID NO: 12543 - protein, 7 aa, Artificial Sequence
  source: /note="Description of Artificial Sequence: Synthetic peptide"
TYSHARA

SEQ ID NO: 12544 - protein, 7 aa, Artificial Sequence
  source: /note="Description of Artificial Sequence: Synthetic peptide"
TYSPTAT

SEQ ID NO: 12545 - protein, 7 aa, Artificial Sequence
  source: /note="Description of Artificial Sequence: Synthetic peptide"
TYSTAIY

SEQ ID NO: 12546 - protein, 7 aa, Artificial Sequence
  source: /note="Description of Artificial Sequence: Synthetic peptide"
TYSVSLA

SEQ ID NO: 12547 - protein, 7 aa, Artificial Sequence
  source: /note="Description of Artificial Sequence: Synthetic peptide"
TYSYSSA

SEQ ID NO: 12548 - protein, 7 aa, Artificial Sequence
  source: /note="Description of Artificial Sequence: Synthetic peptide"
TYTGLAA

SEQ ID NO: 12549 - protein, 7 aa, Artificial Sequence
  source: /note="Description of Artificial Sequence: Synthetic peptide"
TYTHHSV

SEQ ID NO: 12550 - protein, 7 aa, Artificial Sequence
  source: /note="Description of Artificial Sequence: Synthetic peptide"
TYTSTYA

SEQ ID NO: 12551 - protein, 7 aa, Artificial Sequence
  source: /note="Description of Artificial Sequence: Synthetic peptide"
TYVDVLH

SEQ ID NO: 12552 - protein, 7 aa, Artificial Sequence
  source: /note="Description of Artificial Sequence: Synthetic peptide"
TYVGRGA

SEQ ID NO: 12553 - protein, 7 aa, Artificial Sequence
  source: /note="Description of Artificial Sequence: Synthetic peptide"
TYVMTPK

SEQ ID NO: 12554 - protein, 7 aa, Artificial Sequence
  source: /note="Description of Artificial Sequence: Synthetic peptide"
TYYAAEI

SEQ ID NO: 12555 - protein, 7 aa, Artificial Sequence
  source: /note="Description of Artificial Sequence: Synthetic peptide"
TYYKNTG

SEQ ID NO: 12556 - protein, 7 aa, Artificial Sequence
  source: /note="Description of Artificial Sequence: Synthetic peptide"
VAAGQSP

SEQ ID NO: 12557 - protein, 7 aa, Artificial Sequence
  source: /note="Description of Artificial Sequence: Synthetic peptide"
VAARSAQ

SEQ ID NO: 12558 - protein, 7 aa, Artificial Sequence
  source: /note="Description of Artificial Sequence: Synthetic peptide"
VADATKP

SEQ ID NO: 12559 - protein, 7 aa, Artificial Sequence
  source: /note="Description of Artificial Sequence: Synthetic peptide"
VADFVRC

SEQ ID NO: 12560 - protein, 7 aa, Artificial Sequence
  source: /note="Description of Artificial Sequence: Synthetic peptide"
VADKALV

SEQ ID NO: 12561 - protein, 7 aa, Artificial Sequence
  source: /note="Description of Artificial Sequence: Synthetic peptide"
VADLRPE

SEQ ID NO: 12562 - protein, 7 aa, Artificial Sequence
  source: /note="Description of Artificial Sequence: Synthetic peptide"
VADPPRS

SEQ ID NO: 12563 - protein, 7 aa, Artificial Sequence
  source: /note="Description of Artificial Sequence: Synthetic peptide"
VADRLTT

SEQ ID NO: 12564 - protein, 7 aa, Artificial Sequence
  source: /note="Description of Artificial Sequence: Synthetic peptide"
VAEHPKR

SEQ ID NO: 12565 - protein, 7 aa, Artificial Sequence
  source: /note="Description of Artificial Sequence: Synthetic peptide"
VAEQHSL

SEQ ID NO: 12566 - protein, 7 aa, Artificial Sequence
  source: /note="Description of Artificial Sequence: Synthetic peptide"
VAGAGTT

SEQ ID NO: 12567 - protein, 7 aa, Artificial Sequence
  source: /note="Description of Artificial Sequence: Synthetic peptide"
VAGAHAT

SEQ ID NO: 12568 - protein, 7 aa, Artificial Sequence
  source: /note="Description of Artificial Sequence: Synthetic peptide"
VAGDAKN

SEQ ID NO: 12569 - protein, 7 aa, Artificial Sequence
  source: /note="Description of Artificial Sequence: Synthetic peptide"
VAGIRSQ

SEQ ID NO: 12570 - protein, 7 aa, Artificial Sequence
  source: /note="Description of Artificial Sequence: Synthetic peptide"
VAGLNHR

SEQ ID NO: 12571 - protein, 7 aa, Artificial Sequence
  source: /note="Description of Artificial Sequence: Synthetic peptide"
VAGPTGP

SEQ ID NO: 12572 - protein, 7 aa, Artificial Sequence
  source: /note="Description of Artificial Sequence: Synthetic peptide"
VAGQRSG

SEQ ID NO: 12573 - protein, 7 aa, Artificial Sequence
  source: /note="Description of Artificial Sequence: Synthetic peptide"
VAGQSPP

SEQ ID NO: 12574 - protein, 7 aa, Artificial Sequence
  source: /note="Description of Artificial Sequence: Synthetic peptide"
VAGRDQP

SEQ ID NO: 12575 - protein, 7 aa, Artificial Sequence
  source: /note="Description of Artificial Sequence: Synthetic peptide"
VAGRDVR

SEQ ID NO: 12576 - protein, 7 aa, Artificial Sequence
  source: /note="Description of Artificial Sequence: Synthetic peptide"
VAGRDYQ

SEQ ID NO: 12577 - protein, 7 aa, Artificial Sequence
  source: /note="Description of Artificial Sequence: Synthetic peptide"
VAGSATV

SEQ ID NO: 12578 - protein, 7 aa, Artificial Sequence
  source: /note="Description of Artificial Sequence: Synthetic peptide"
VAGTVER

SEQ ID NO: 12579 - protein, 7 aa, Artificial Sequence
  source: /note="Description of Artificial Sequence: Synthetic peptide"
VAGVRTA

SEQ ID NO: 12580 - protein, 7 aa, Artificial Sequence
  source: /note="Description of Artificial Sequence: Synthetic peptide"
VAGVSEM

SEQ ID NO: 12581 - protein, 7 aa, Artificial Sequence
  source: /note="Description of Artificial Sequence: Synthetic peptide"
VAHLSMS

SEQ ID NO: 12582 - protein, 7 aa, Artificial Sequence
  source: /note="Description of Artificial Sequence: Synthetic peptide"
VAHSLPA

SEQ ID NO: 12583 - protein, 7 aa, Artificial Sequence
  source: /note="Description of Artificial Sequence: Synthetic peptide"
VAHSTNA

SEQ ID NO: 12584 - protein, 7 aa, Artificial Sequence
  source: /note="Description of Artificial Sequence: Synthetic peptide"
VAHTGAR

SEQ ID NO: 12585 - protein, 7 aa, Artificial Sequence
  source: /note="Description of Artificial Sequence: Synthetic peptide"
VAHTVYS

SEQ ID NO: 12586 - protein, 7 aa, Artificial Sequence
  source: /note="Description of Artificial Sequence: Synthetic peptide"
VAHVQSD

SEQ ID NO: 12587 - protein, 7 aa, Artificial Sequence
  source: /note="Description of Artificial Sequence: Synthetic peptide"
VAHYPAS

SEQ ID NO: 12588 - protein, 7 aa, Artificial Sequence
  source: /note="Description of Artificial Sequence: Synthetic peptide"
VAIHGAV

SEQ ID NO: 12589 - protein, 7 aa, Artificial Sequence
  source: /note="Description of Artificial Sequence: Synthetic peptide"
VAIPRGS

SEQ ID NO: 12590 - protein, 7 aa, Artificial Sequence
  source: /note="Description of Artificial Sequence: Synthetic peptide"
VAIRSPA

SEQ ID NO: 12591 - protein, 7 aa, Artificial Sequence
  source: /note="Description of Artificial Sequence: Synthetic peptide"
VALAGQY

SEQ ID NO: 12592 - protein, 7 aa, Artificial Sequence
  source: /note="Description of Artificial Sequence: Synthetic peptide"
VALHPLN

SEQ ID NO: 12593 - protein, 7 aa, Artificial Sequence
  source: /note="Description of Artificial Sequence: Synthetic peptide"
VALIKYS

SEQ ID NO: 12594 - protein, 7 aa, Artificial Sequence
  source: /note="Description of Artificial Sequence: Synthetic peptide"
VALSAAK

SEQ ID NO: 12595 - protein, 7 aa, Artificial Sequence
  source: /note="Description of Artificial Sequence: Synthetic peptide"
VANETHY

SEQ ID NO: 12596 - protein, 7 aa, Artificial Sequence
  source: /note="Description of Artificial Sequence: Synthetic peptide"
VANGKSH

SEQ ID NO: 12597 - protein, 7 aa, Artificial Sequence
  source: /note="Description of Artificial Sequence: Synthetic peptide"
VANHIEV

SEQ ID NO: 12598 - protein, 7 aa, Artificial Sequence
  source: /note="Description of Artificial Sequence: Synthetic peptide"
VANQQGT

SEQ ID NO: 12599 - protein, 7 aa, Artificial Sequence
  source: /note="Description of Artificial Sequence: Synthetic peptide"
VANRDVQ

SEQ ID NO: 12600 - protein, 7 aa, Artificial Sequence
  source: /note="Description of Artificial Sequence: Synthetic peptide"
VANVLTN

SEQ ID NO: 12601 - protein, 7 aa, Artificial Sequence
  source: /note="Description of Artificial Sequence: Synthetic peptide"
VAPAIPG

SEQ ID NO: 12602 - protein, 7 aa, Artificial Sequence
  source: /note="Description of Artificial Sequence: Synthetic peptide"
VAPIGSE

SEQ ID NO: 12603 - protein, 7 aa, Artificial Sequence
  source: /note="Description of Artificial Sequence: Synthetic peptide"
VAPLIPK

SEQ ID NO: 12604 - protein, 7 aa, Artificial Sequence
  source: /note="Description of Artificial Sequence: Synthetic peptide"
VAPPPQK

SEQ ID NO: 12605 - protein, 7 aa, Artificial Sequence
  source: /note="Description of Artificial Sequence: Synthetic peptide"
VAPPPRH

SEQ ID NO: 12606 - protein, 7 aa, Artificial Sequence
  source: /note="Description of Artificial Sequence: Synthetic peptide"
VAPPYSG

SEQ ID NO: 12607 - protein, 7 aa, Artificial Sequence
  source: /note="Description of Artificial Sequence: Synthetic peptide"
VAPSEGS

SEQ ID NO: 12608 - protein, 7 aa, Artificial Sequence
  source: /note="Description of Artificial Sequence: Synthetic peptide"
VAPSQRL

SEQ ID NO: 12609 - protein, 7 aa, Artificial Sequence
  source: /note="Description of Artificial Sequence: Synthetic peptide"
VAQRSGP

SEQ ID NO: 12610 - protein, 7 aa, Artificial Sequence
  source: /note="Description of Artificial Sequence: Synthetic peptide"
VAQSRSI

SEQ ID NO: 12611 - protein, 7 aa, Artificial Sequence
  source: /note="Description of Artificial Sequence: Synthetic peptide"
VARAHIV

SEQ ID NO: 12612 - protein, 7 aa, Artificial Sequence
  source: /note="Description of Artificial Sequence: Synthetic peptide"
VARGPTT

SEQ ID NO: 12613 - protein, 7 aa, Artificial Sequence
  source: /note="Description of Artificial Sequence: Synthetic peptide"
VARHSNE

SEQ ID NO: 12614 - protein, 7 aa, Artificial Sequence
  source: /note="Description of Artificial Sequence: Synthetic peptide"
VARIDGM

SEQ ID NO: 12615 - protein, 7 aa, Artificial Sequence
  source: /note="Description of Artificial Sequence: Synthetic peptide"
VARLPQV

SEQ ID NO: 12616 - protein, 7 aa, Artificial Sequence
  source: /note="Description of Artificial Sequence: Synthetic peptide"
VARPLSM

SEQ ID NO: 12617 - protein, 7 aa, Artificial Sequence
  source: /note="Description of Artificial Sequence: Synthetic peptide"
VARSGTT

SEQ ID NO: 12618 - protein, 7 aa, Artificial Sequence
  source: /note="Description of Artificial Sequence: Synthetic peptide"
VARSLQA

SEQ ID NO: 12619 - protein, 7 aa, Artificial Sequence
  source: /note="Description of Artificial Sequence: Synthetic peptide"
VARSNLD

SEQ ID NO: 12620 - protein, 7 aa, Artificial Sequence
  source: /note="Description of Artificial Sequence: Synthetic peptide"
VASALGG

SEQ ID NO: 12621 - protein, 7 aa, Artificial Sequence
  source: /note="Description of Artificial Sequence: Synthetic peptide"
VASASPA

SEQ ID NO: 12622 - protein, 7 aa, Artificial Sequence
  source: /note="Description of Artificial Sequence: Synthetic peptide"
VASGVVF

SEQ ID NO: 12623 - protein, 7 aa, Artificial Sequence
  source: /note="Description of Artificial Sequence: Synthetic peptide"
VASHITP

SEQ ID NO: 12624 - protein, 7 aa, Artificial Sequence
  source: /note="Description of Artificial Sequence: Synthetic peptide"
VASKIID

SEQ ID NO: 12625 - protein, 7 aa, Artificial Sequence
  source: /note="Description of Artificial Sequence: Synthetic peptide"
VASLQVG

SEQ ID NO: 12626 - protein, 7 aa, Artificial Sequence
  source: /note="Description of Artificial Sequence: Synthetic peptide"
VASLTHD

SEQ ID NO: 12627 - protein, 7 aa, Artificial Sequence
  source: /note="Description of Artificial Sequence: Synthetic peptide"
VASNNKA

SEQ ID NO: 12628 - protein, 7 aa, Artificial Sequence
  source: /note="Description of Artificial Sequence: Synthetic peptide"
VASRAPT

SEQ ID NO: 12629 - protein, 7 aa, Artificial Sequence
  source: /note="Description of Artificial Sequence: Synthetic peptide"
VASSKTP

SEQ ID NO: 12630 - protein, 7 aa, Artificial Sequence
  source: /note="Description of Artificial Sequence: Synthetic peptide"
VASSSGI

SEQ ID NO: 12631 - protein, 7 aa, Artificial Sequence
  source: /note="Description of Artificial Sequence: Synthetic peptide"
VASTGSP

SEQ ID NO: 12632 - protein, 7 aa, Artificial Sequence
  source: /note="Description of Artificial Sequence: Synthetic peptide"
VASVKML

SEQ ID NO: 12633 - protein, 7 aa, Artificial Sequence
  source: /note="Description of Artificial Sequence: Synthetic peptide"
VASVRTN

SEQ ID NO: 12634 - protein, 7 aa, Artificial Sequence
  source: /note="Description of Artificial Sequence: Synthetic peptide"
VASYSGF

SEQ ID NO: 12635 - protein, 7 aa, Artificial Sequence
  source: /note="Description of Artificial Sequence: Synthetic peptide"
VASYSRE

SEQ ID NO: 12636 - protein, 7 aa, Artificial Sequence
  source: /note="Description of Artificial Sequence: Synthetic peptide"
VATASVT

SEQ ID NO: 12637 - protein, 7 aa, Artificial Sequence
  source: /note="Description of Artificial Sequence: Synthetic peptide"
VATELAG

SEQ ID NO: 12638 - protein, 7 aa, Artificial Sequence
  source: /note="Description of Artificial Sequence: Synthetic peptide"
VATLNYV

SEQ ID NO: 12639 - protein, 7 aa, Artificial Sequence
  source: /note="Description of Artificial Sequence: Synthetic peptide"
VATLRGN

SEQ ID NO: 12640 - protein, 7 aa, Artificial Sequence
  source: /note="Description of Artificial Sequence: Synthetic peptide"
VATMVVP

SEQ ID NO: 12641 - protein, 7 aa, Artificial Sequence
  source: /note="Description of Artificial Sequence: Synthetic peptide"
VATNNDV

SEQ ID NO: 12642 - protein, 7 aa, Artificial Sequence
  source: /note="Description of Artificial Sequence: Synthetic peptide"
VATNSIS

SEQ ID NO: 12643 - protein, 7 aa, Artificial Sequence
  source: /note="Description of Artificial Sequence: Synthetic peptide"
VATNTYL

SEQ ID NO: 12644 - protein, 7 aa, Artificial Sequence
  source: /note="Description of Artificial Sequence: Synthetic peptide"
VATPTVL

SEQ ID NO: 12645 - protein, 7 aa, Artificial Sequence
  source: /note="Description of Artificial Sequence: Synthetic peptide"
VATRDSY

SEQ ID NO: 12646 - protein, 7 aa, Artificial Sequence
  source: /note="Description of Artificial Sequence: Synthetic peptide"
VATRVVE

SEQ ID NO: 12647 - protein, 7 aa, Artificial Sequence
  source: /note="Description of Artificial Sequence: Synthetic peptide"
VATSVRP

SEQ ID NO: 12648 - protein, 7 aa, Artificial Sequence
  source: /note="Description of Artificial Sequence: Synthetic peptide"
VAVMMPS

SEQ ID NO: 12649 - protein, 7 aa, Artificial Sequence
  source: /note="Description of Artificial Sequence: Synthetic peptide"
VAVNSRS

SEQ ID NO: 12650 - protein, 7 aa, Artificial Sequence
  source: /note="Description of Artificial Sequence: Synthetic peptide"
VAVRTSD

SEQ ID NO: 12651 - protein, 7 aa, Artificial Sequence
  source: /note="Description of Artificial Sequence: Synthetic peptide"
VAVSAPL

SEQ ID NO: 12652 - protein, 7 aa, Artificial Sequence
  source: /note="Description of Artificial Sequence: Synthetic peptide"
VAVSTVT

SEQ ID NO: 12653 - protein, 7 aa, Artificial Sequence
  source: /note="Description of Artificial Sequence: Synthetic peptide"
VAYDTAV

SEQ ID NO: 12654 - protein, 7 aa, Artificial Sequence
  source: /note="Description of Artificial Sequence: Synthetic peptide"
VAYPARS

SEQ ID NO: 12655 - protein, 7 aa, Artificial Sequence
  source: /note="Description of Artificial Sequence: Synthetic peptide"
VCGPPFH

SEQ ID NO: 12656 - protein, 7 aa, Artificial Sequence
  source: /note="Description of Artificial Sequence: Synthetic peptide"
VCNSVGY

SEQ ID NO: 12657 - protein, 7 aa, Artificial Sequence
  source: /note="Description of Artificial Sequence: Synthetic peptide"
VDAKAND

SEQ ID NO: 12658 - protein, 7 aa, Artificial Sequence
  source: /note="Description of Artificial Sequence: Synthetic peptide"
VDDFPRC

SEQ ID NO: 12659 - protein, 7 aa, Artificial Sequence
  source: /note="Description of Artificial Sequence: Synthetic peptide"
VDDLRAR

SEQ ID NO: 12660 - protein, 7 aa, Artificial Sequence
  source: /note="Description of Artificial Sequence: Synthetic peptide"
VDEIRRP

SEQ ID NO: 12661 - protein, 7 aa, Artificial Sequence
  source: /note="Description of Artificial Sequence: Synthetic peptide"
VDFEHSQ

SEQ ID NO: 12662 - protein, 7 aa, Artificial Sequence
  source: /note="Description of Artificial Sequence: Synthetic peptide"
VDGARQP

SEQ ID NO: 12663 - protein, 7 aa, Artificial Sequence
  source: /note="Description of Artificial Sequence: Synthetic peptide"
VDGLGSK

SEQ ID NO: 12664 - protein, 7 aa, Artificial Sequence
  source: /note="Description of Artificial Sequence: Synthetic peptide"
VDGVRGA

SEQ ID NO: 12665 - protein, 7 aa, Artificial Sequence
  source: /note="Description of Artificial Sequence: Synthetic peptide"
VDKLSHT

SEQ ID NO: 12666 - protein, 7 aa, Artificial Sequence
  source: /note="Description of Artificial Sequence: Synthetic peptide"
VDKPHLA

SEQ ID NO: 12667 - protein, 7 aa, Artificial Sequence
  source: /note="Description of Artificial Sequence: Synthetic peptide"
VDLQCAP

SEQ ID NO: 12668 - protein, 7 aa, Artificial Sequence
  source: /note="Description of Artificial Sequence: Synthetic peptide"
VDLRPYA

SEQ ID NO: 12669 - protein, 7 aa, Artificial Sequence
  source: /note="Description of Artificial Sequence: Synthetic peptide"
VDNAAQS

SEQ ID NO: 12670 - protein, 7 aa, Artificial Sequence
  source: /note="Description of Artificial Sequence: Synthetic peptide"
VDNLARA

SEQ ID NO: 12671 - protein, 7 aa, Artificial Sequence
  source: /note="Description of Artificial Sequence: Synthetic peptide"
VDNTLTD

SEQ ID NO: 12672 - protein, 7 aa, Artificial Sequence
  source: /note="Description of Artificial Sequence: Synthetic peptide"
VDPGRHH

SEQ ID NO: 12673 - protein, 7 aa, Artificial Sequence
  source: /note="Description of Artificial Sequence: Synthetic peptide"
VDPMPAL

SEQ ID NO: 12674 - protein, 7 aa, Artificial Sequence
  source: /note="Description of Artificial Sequence: Synthetic peptide"
VDPRWHP

SEQ ID NO: 12675 - protein, 7 aa, Artificial Sequence
  source: /note="Description of Artificial Sequence: Synthetic peptide"
VDQHTIA

SEQ ID NO: 12676 - protein, 7 aa, Artificial Sequence
  source: /note="Description of Artificial Sequence: Synthetic peptide"
VDQVNNP

SEQ ID NO: 12677 - protein, 7 aa, Artificial Sequence
  source: /note="Description of Artificial Sequence: Synthetic peptide"
VDRHHSP

SEQ ID NO: 12678 - protein, 7 aa, Artificial Sequence
  source: /note="Description of Artificial Sequence: Synthetic peptide"
VDRRPDS

SEQ ID NO: 12679 - protein, 7 aa, Artificial Sequence
  source: /note="Description of Artificial Sequence: Synthetic peptide"
VDRRTTT

SEQ ID NO: 12680 - protein, 7 aa, Artificial Sequence
  source: /note="Description of Artificial Sequence: Synthetic peptide"
VDSLTPY

SEQ ID NO: 12681 - protein, 7 aa, Artificial Sequence
  source: /note="Description of Artificial Sequence: Synthetic peptide"
VDSPSAP

SEQ ID NO: 12682 - protein, 7 aa, Artificial Sequence
  source: /note="Description of Artificial Sequence: Synthetic peptide"
VDSSTNL

SEQ ID NO: 12683 - protein, 7 aa, Artificial Sequence
  source: /note="Description of Artificial Sequence: Synthetic peptide"
VDTLMNR

SEQ ID NO: 12684 - protein, 7 aa, Artificial Sequence
  source: /note="Description of Artificial Sequence: Synthetic peptide"
VDTPGNR

SEQ ID NO: 12685 - protein, 7 aa, Artificial Sequence
  source: /note="Description of Artificial Sequence: Synthetic peptide"
VDTRRES

SEQ ID NO: 12686 - protein, 7 aa, Artificial Sequence
  source: /note="Description of Artificial Sequence: Synthetic peptide"
VDTSLEC

SEQ ID NO: 12687 - protein, 7 aa, Artificial Sequence
  source: /note="Description of Artificial Sequence: Synthetic peptide"
VDTTKFQ

SEQ ID NO: 12688 - protein, 7 aa, Artificial Sequence
  source: /note="Description of Artificial Sequence: Synthetic peptide"
VDVRKHP

SEQ ID NO: 12689 - protein, 7 aa, Artificial Sequence
  source: /note="Description of Artificial Sequence: Synthetic peptide"
VDYAVSM

SEQ ID NO: 12690 - protein, 7 aa, Artificial Sequence
  source: /note="Description of Artificial Sequence: Synthetic peptide"
VEATSRV

SEQ ID NO: 12691 - protein, 7 aa, Artificial Sequence
  source: /note="Description of Artificial Sequence: Synthetic peptide"
VEGVRSA

SEQ ID NO: 12692 - protein, 7 aa, Artificial Sequence
  source: /note="Description of Artificial Sequence: Synthetic peptide"
VEHNSLN

SEQ ID NO: 12693 - protein, 7 aa, Artificial Sequence
  source: /note="Description of Artificial Sequence: Synthetic peptide"
VEHNTPF

SEQ ID NO: 12694 - protein, 7 aa, Artificial Sequence
  source: /note="Description of Artificial Sequence: Synthetic peptide"
VEHRVST

SEQ ID NO: 12695 - protein, 7 aa, Artificial Sequence
  source: /note="Description of Artificial Sequence: Synthetic peptide"
VEHSTNV

SEQ ID NO: 12696 - protein, 7 aa, Artificial Sequence
  source: /note="Description of Artificial Sequence: Synthetic peptide"
VEIKTRS

SEQ ID NO: 12697 - protein, 7 aa, Artificial Sequence
  source: /note="Description of Artificial Sequence: Synthetic peptide"
VEISSVS

SEQ ID NO: 12698 - protein, 7 aa, Artificial Sequence
  source: /note="Description of Artificial Sequence: Synthetic peptide"
VEKEMNS

SEQ ID NO: 12699 - protein, 7 aa, Artificial Sequence
  source: /note="Description of Artificial Sequence: Synthetic peptide"
VEKTPME

SEQ ID NO: 12700 - protein, 7 aa, Artificial Sequence
  source: /note="Description of Artificial Sequence: Synthetic peptide"
VEKVSML

SEQ ID NO: 12701 - protein, 7 aa, Artificial Sequence
  source: /note="Description of Artificial Sequence: Synthetic peptide"
VEKYKNL

SEQ ID NO: 12702 - protein, 7 aa, Artificial Sequence
  source: /note="Description of Artificial Sequence: Synthetic peptide"
VELNQGD

SEQ ID NO: 12703 - protein, 7 aa, Artificial Sequence
  source: /note="Description of Artificial Sequence: Synthetic peptide"
VENARPQ

SEQ ID NO: 12704 - protein, 7 aa, Artificial Sequence
  source: /note="Description of Artificial Sequence: Synthetic peptide"
VEPAFTD

SEQ ID NO: 12705 - protein, 7 aa, Artificial Sequence
  source: /note="Description of Artificial Sequence: Synthetic peptide"
VEPRKSA

SEQ ID NO: 12706 - protein, 7 aa, Artificial Sequence
  source: /note="Description of Artificial Sequence: Synthetic peptide"
VEPRSMY

SEQ ID NO: 12707 - protein, 7 aa, Artificial Sequence
  source: /note="Description of Artificial Sequence: Synthetic peptide"
VEPTLTR

SEQ ID NO: 12708 - protein, 7 aa, Artificial Sequence
  source: /note="Description of Artificial Sequence: Synthetic peptide"
VEPVLHT

SEQ ID NO: 12709 - protein, 7 aa, Artificial Sequence
  source: /note="Description of Artificial Sequence: Synthetic peptide"
VERDDRT

SEQ ID NO: 12710 - protein, 7 aa, Artificial Sequence
  source: /note="Description of Artificial Sequence: Synthetic peptide"
VERDIDS

SEQ ID NO: 12711 - protein, 7 aa, Artificial Sequence
  source: /note="Description of Artificial Sequence: Synthetic peptide"
VERPVNK

SEQ ID NO: 12712 - protein, 7 aa, Artificial Sequence
  source: /note="Description of Artificial Sequence: Synthetic peptide"
VERVRTL

SEQ ID NO: 12713 - protein, 7 aa, Artificial Sequence
  source: /note="Description of Artificial Sequence: Synthetic peptide"
VESDTSW

SEQ ID NO: 12714 - protein, 7 aa, Artificial Sequence
  source: /note="Description of Artificial Sequence: Synthetic peptide"
VESNSPM

SEQ ID NO: 12715 - protein, 7 aa, Artificial Sequence
  source: /note="Description of Artificial Sequence: Synthetic peptide"
VESNSSF

SEQ ID NO: 12716 - protein, 7 aa, Artificial Sequence
  source: /note="Description of Artificial Sequence: Synthetic peptide"
VESSPLP

SEQ ID NO: 12717 - protein, 7 aa, Artificial Sequence
  source: /note="Description of Artificial Sequence: Synthetic peptide"
VETGHNK

SEQ ID NO: 12718 - protein, 7 aa, Artificial Sequence
  source: /note="Description of Artificial Sequence: Synthetic peptide"
VETNRNR

SEQ ID NO: 12719 - protein, 7 aa, Artificial Sequence
  source: /note="Description of Artificial Sequence: Synthetic peptide"
VETNVKL

SEQ ID NO: 12720 - protein, 7 aa, Artificial Sequence
  source: /note="Description of Artificial Sequence: Synthetic peptide"
VETPLRK

SEQ ID NO: 12721 - protein, 7 aa, Artificial Sequence
  source: /note="Description of Artificial Sequence: Synthetic peptide"
VEVNTLH

SEQ ID NO: 12722 - protein, 7 aa, Artificial Sequence
  source: /note="Description of Artificial Sequence: Synthetic peptide"
VFDNTVR

SEQ ID NO: 12723 - protein, 7 aa, Artificial Sequence
  source: /note="Description of Artificial Sequence: Synthetic peptide"
VFGANVA

SEQ ID NO: 12724 - protein, 7 aa, Artificial Sequence
  source: /note="Description of Artificial Sequence: Synthetic peptide"
VFGDTLL

SEQ ID NO: 12725 - protein, 7 aa, Artificial Sequence
  source: /note="Description of Artificial Sequence: Synthetic peptide"
VFGIPSP

SEQ ID NO: 12726 - protein, 7 aa, Artificial Sequence
  source: /note="Description of Artificial Sequence: Synthetic peptide"
VFHKGFD

SEQ ID NO: 12727 - protein, 7 aa, Artificial Sequence
  source: /note="Description of Artificial Sequence: Synthetic peptide"
VFHKSET

SEQ ID NO: 12728 - protein, 7 aa, Artificial Sequence
  source: /note="Description of Artificial Sequence: Synthetic peptide"
VFHTPEP

SEQ ID NO: 12729 - protein, 7 aa, Artificial Sequence
  source: /note="Description of Artificial Sequence: Synthetic peptide"
VFLEPSS

SEQ ID NO: 12730 - protein, 7 aa, Artificial Sequence
  source: /note="Description of Artificial Sequence: Synthetic peptide"
VFPQSTP

SEQ ID NO: 12731 - protein, 7 aa, Artificial Sequence
  source: /note="Description of Artificial Sequence: Synthetic peptide"
VFQDSIP

SEQ ID NO: 12732 - protein, 7 aa, Artificial Sequence
  source: /note="Description of Artificial Sequence: Synthetic peptide"
VFQGQIV

SEQ ID NO: 12733 - protein, 7 aa, Artificial Sequence
  source: /note="Description of Artificial Sequence: Synthetic peptide"
VFQTNNA

SEQ ID NO: 12734 - protein, 7 aa, Artificial Sequence
  source: /note="Description of Artificial Sequence: Synthetic peptide"
VFRTTSP

SEQ ID NO: 12735 - protein, 7 aa, Artificial Sequence
  source: /note="Description of Artificial Sequence: Synthetic peptide"
VFSGRQA

SEQ ID NO: 12736 - protein, 7 aa, Artificial Sequence
  source: /note="Description of Artificial Sequence: Synthetic peptide"
VFSNSAV

SEQ ID NO: 12737 - protein, 7 aa, Artificial Sequence
  source: /note="Description of Artificial Sequence: Synthetic peptide"
VFTHERT

SEQ ID NO: 12738 - protein, 7 aa, Artificial Sequence
  source: /note="Description of Artificial Sequence: Synthetic peptide"
VFTHSDP

SEQ ID NO: 12739 - protein, 7 aa, Artificial Sequence
  source: /note="Description of Artificial Sequence: Synthetic peptide"
VFTNPRL

SEQ ID NO: 12740 - protein, 7 aa, Artificial Sequence
  source: /note="Description of Artificial Sequence: Synthetic peptide"
VFTPEER

SEQ ID NO: 12741 - protein, 7 aa, Artificial Sequence
  source: /note="Description of Artificial Sequence: Synthetic peptide"
VFTSVTT

SEQ ID NO: 12742 - protein, 7 aa, Artificial Sequence
  source: /note="Description of Artificial Sequence: Synthetic peptide"
VFTTGSP

SEQ ID NO: 12743 - protein, 7 aa, Artificial Sequence
  source: /note="Description of Artificial Sequence: Synthetic peptide"
VFVGLKP

SEQ ID NO: 12744 - protein, 7 aa, Artificial Sequence
  source: /note="Description of Artificial Sequence: Synthetic peptide"
VGAASER

SEQ ID NO: 12745 - protein, 7 aa, Artificial Sequence
  source: /note="Description of Artificial Sequence: Synthetic peptide"
VGADTRD

SEQ ID NO: 12746 - protein, 7 aa, Artificial Sequence
  source: /note="Description of Artificial Sequence: Synthetic peptide"
VGAPNRT

SEQ ID NO: 12747 - protein, 7 aa, Artificial Sequence
  source: /note="Description of Artificial Sequence: Synthetic peptide"
VGAPVER

SEQ ID NO: 12748 - protein, 7 aa, Artificial Sequence
  source: /note="Description of Artificial Sequence: Synthetic peptide"
VGARAPA

SEQ ID NO: 12749 - protein, 7 aa, Artificial Sequence
  source: /note="Description of Artificial Sequence: Synthetic peptide"
VGASHAK

SEQ ID NO: 12750 - protein, 7 aa, Artificial Sequence
  source: /note="Description of Artificial Sequence: Synthetic peptide"
VGAVYSQ

SEQ ID NO: 12751 - protein, 7 aa, Artificial Sequence
  source: /note="Description of Artificial Sequence: Synthetic peptide"
VGDDSVL

SEQ ID NO: 12752 - protein, 7 aa, Artificial Sequence
  source: /note="Description of Artificial Sequence: Synthetic peptide"
VGEIMAM

SEQ ID NO: 12753 - protein, 7 aa, Artificial Sequence
  source: /note="Description of Artificial Sequence: Synthetic peptide"
VGERSSR

SEQ ID NO: 12754 - protein, 7 aa, Artificial Sequence
  source: /note="Description of Artificial Sequence: Synthetic peptide"
VGGDDDM

SEQ ID NO: 12755 - protein, 7 aa, Artificial Sequence
  source: /note="Description of Artificial Sequence: Synthetic peptide"
VGGDLCD

SEQ ID NO: 12756 - protein, 7 aa, Artificial Sequence
  source: /note="Description of Artificial Sequence: Synthetic peptide"
VGGDSVP

SEQ ID NO: 12757 - protein, 7 aa, Artificial Sequence
  source: /note="Description of Artificial Sequence: Synthetic peptide"
VGGGHGT

SEQ ID NO: 12758 - protein, 7 aa, Artificial Sequence
  source: /note="Description of Artificial Sequence: Synthetic peptide"
VGGGTGP

SEQ ID NO: 12759 - protein, 7 aa, Artificial Sequence
  source: /note="Description of Artificial Sequence: Synthetic peptide"
VGGMDLT

SEQ ID NO: 12760 - protein, 7 aa, Artificial Sequence
  source: /note="Description of Artificial Sequence: Synthetic peptide"
VGGPIGY

SEQ ID NO: 12761 - protein, 7 aa, Artificial Sequence
  source: /note="Description of Artificial Sequence: Synthetic peptide"
VGHPLKP

SEQ ID NO: 12762 - protein, 7 aa, Artificial Sequence
  source: /note="Description of Artificial Sequence: Synthetic peptide"
VGHSLMP

SEQ ID NO: 12763 - protein, 7 aa, Artificial Sequence
  source: /note="Description of Artificial Sequence: Synthetic peptide"
VGHSMPP

SEQ ID NO: 12764 - protein, 7 aa, Artificial Sequence
  source: /note="Description of Artificial Sequence: Synthetic peptide"
VGHSVTL

SEQ ID NO: 12765 - protein, 7 aa, Artificial Sequence
  source: /note="Description of Artificial Sequence: Synthetic peptide"
VGKDMSV

SEQ ID NO: 12766 - protein, 7 aa, Artificial Sequence
  source: /note="Description of Artificial Sequence: Synthetic peptide"
VGKGEAS

SEQ ID NO: 12767 - protein, 7 aa, Artificial Sequence
  source: /note="Description of Artificial Sequence: Synthetic peptide"
VGKLVNC

SEQ ID NO: 12768 - protein, 7 aa, Artificial Sequence
  source: /note="Description of Artificial Sequence: Synthetic peptide"
VGLPPAP

SEQ ID NO: 12769 - protein, 7 aa, Artificial Sequence
  source: /note="Description of Artificial Sequence: Synthetic peptide"
VGLQHNL

SEQ ID NO: 12770 - protein, 7 aa, Artificial Sequence
  source: /note="Description of Artificial Sequence: Synthetic peptide"
VGLTSTV

SEQ ID NO: 12771 - protein, 7 aa, Artificial Sequence
  source: /note="Description of Artificial Sequence: Synthetic peptide"
VGMRIPA

SEQ ID NO: 12772 - protein, 7 aa, Artificial Sequence
  source: /note="Description of Artificial Sequence: Synthetic peptide"
VGNKGIS

SEQ ID NO: 12773 - protein, 7 aa, Artificial Sequence
  source: /note="Description of Artificial Sequence: Synthetic peptide"
VGNLQAF

SEQ ID NO: 12774 - protein, 7 aa, Artificial Sequence
  source: /note="Description of Artificial Sequence: Synthetic peptide"
VGNRAFI

SEQ ID NO: 12775 - protein, 7 aa, Artificial Sequence
  source: /note="Description of Artificial Sequence: Synthetic peptide"
VGNSLHA

SEQ ID NO: 12776 - protein, 7 aa, Artificial Sequence
  source: /note="Description of Artificial Sequence: Synthetic peptide"
VGNYVGR

SEQ ID NO: 12777 - protein, 7 aa, Artificial Sequence
  source: /note="Description of Artificial Sequence: Synthetic peptide"
VGPTGSA

SEQ ID NO: 12778 - protein, 7 aa, Artificial Sequence
  source: /note="Description of Artificial Sequence: Synthetic peptide"
VGQNAEW

SEQ ID NO: 12779 - protein, 7 aa, Artificial Sequence
  source: /note="Description of Artificial Sequence: Synthetic peptide"
VGRLTMP

SEQ ID NO: 12780 - protein, 7 aa, Artificial Sequence
  source: /note="Description of Artificial Sequence: Synthetic peptide"
VGRSVLD

SEQ ID NO: 12781 - protein, 7 aa, Artificial Sequence
  source: /note="Description of Artificial Sequence: Synthetic peptide"
VGSFIPT

SEQ ID NO: 12782 - protein, 7 aa, Artificial Sequence
  source: /note="Description of Artificial Sequence: Synthetic peptide"
VGSGAPE

SEQ ID NO: 12783 - protein, 7 aa, Artificial Sequence
  source: /note="Description of Artificial Sequence: Synthetic peptide"
VGSGLDN

SEQ ID NO: 12784 - protein, 7 aa, Artificial Sequence
  source: /note="Description of Artificial Sequence: Synthetic peptide"
VGSIDLP

SEQ ID NO: 12785 - protein, 7 aa, Artificial Sequence
  source: /note="Description of Artificial Sequence: Synthetic peptide"
VGSKALL

SEQ ID NO: 12786 - protein, 7 aa, Artificial Sequence
  source: /note="Description of Artificial Sequence: Synthetic peptide"
VGSLWLD

SEQ ID NO: 12787 - protein, 7 aa, Artificial Sequence
  source: /note="Description of Artificial Sequence: Synthetic peptide"
VGSPKPT

SEQ ID NO: 12788 - protein, 7 aa, Artificial Sequence
  source: /note="Description of Artificial Sequence: Synthetic peptide"
VGSQYLP

SEQ ID NO: 12789 - protein, 7 aa, Artificial Sequence
  source: /note="Description of Artificial Sequence: Synthetic peptide"
VGSRATS

SEQ ID NO: 12790 - protein, 7 aa, Artificial Sequence
  source: /note="Description of Artificial Sequence: Synthetic peptide"
VGSSKGA

SEQ ID NO: 12791 - protein, 7 aa, Artificial Sequence
  source: /note="Description of Artificial Sequence: Synthetic peptide"
VGSSVDA

SEQ ID NO: 12792 - protein, 7 aa, Artificial Sequence
  source: /note="Description of Artificial Sequence: Synthetic peptide"
VGSTGRT

SEQ ID NO: 12793 - protein, 7 aa, Artificial Sequence
  source: /note="Description of Artificial Sequence: Synthetic peptide"
VGSTREL

SEQ ID NO: 12794 - protein, 7 aa, Artificial Sequence
  source: /note="Description of Artificial Sequence: Synthetic peptide"
VGSYITV

SEQ ID NO: 12795 - protein, 7 aa, Artificial Sequence
  source: /note="Description of Artificial Sequence: Synthetic peptide"
VGTVTRP

SEQ ID NO: 12796 - protein, 7 aa, Artificial Sequence
  source: /note="Description of Artificial Sequence: Synthetic peptide"
VGVTMPY

SEQ ID NO: 12797 - protein, 7 aa, Artificial Sequence
  source: /note="Description of Artificial Sequence: Synthetic peptide"
VGYEAHA

SEQ ID NO: 12798 - protein, 7 aa, Artificial Sequence
  source: /note="Description of Artificial Sequence: Synthetic peptide"
VGYPANP

SEQ ID NO: 12799 - protein, 7 aa, Artificial Sequence
  source: /note="Description of Artificial Sequence: Synthetic peptide"
VHAELMR

SEQ ID NO: 12800 - protein, 7 aa, Artificial Sequence
  source: /note="Description of Artificial Sequence: Synthetic peptide"
VHASTAV

SEQ ID NO: 12801 - protein, 7 aa, Artificial Sequence
  source: /note="Description of Artificial Sequence: Synthetic peptide"
VHDGGRH

SEQ ID NO: 12802 - protein, 7 aa, Artificial Sequence
  source: /note="Description of Artificial Sequence: Synthetic peptide"
VHDGKIR

SEQ ID NO: 12803 - protein, 7 aa, Artificial Sequence
  source: /note="Description of Artificial Sequence: Synthetic peptide"
VHENGSV

SEQ ID NO: 12804 - protein, 7 aa, Artificial Sequence
  source: /note="Description of Artificial Sequence: Synthetic peptide"
VHGAAQT

SEQ ID NO: 12805 - protein, 7 aa, Artificial Sequence
  source: /note="Description of Artificial Sequence: Synthetic peptide"
VHGPMQH

SEQ ID NO: 12806 - protein, 7 aa, Artificial Sequence
  source: /note="Description of Artificial Sequence: Synthetic peptide"
VHGTDPD

SEQ ID NO: 12807 - protein, 7 aa, Artificial Sequence
  source: /note="Description of Artificial Sequence: Synthetic peptide"
VHHNLTP

SEQ ID NO: 12808 - protein, 7 aa, Artificial Sequence
  source: /note="Description of Artificial Sequence: Synthetic peptide"
VHKSADY

SEQ ID NO: 12809 - protein, 7 aa, Artificial Sequence
  source: /note="Description of Artificial Sequence: Synthetic peptide"
VHLPSMP

SEQ ID NO: 12810 - protein, 7 aa, Artificial Sequence
  source: /note="Description of Artificial Sequence: Synthetic peptide"
VHLPTLA

SEQ ID NO: 12811 - protein, 7 aa, Artificial Sequence
  source: /note="Description of Artificial Sequence: Synthetic peptide"
VHNGGRS

SEQ ID NO: 12812 - protein, 7 aa, Artificial Sequence
  source: /note="Description of Artificial Sequence: Synthetic peptide"
VHNGLTP

SEQ ID NO: 12813 - protein, 7 aa, Artificial Sequence
  source: /note="Description of Artificial Sequence: Synthetic peptide"
VHNMLKA

SEQ ID NO: 12814 - protein, 7 aa, Artificial Sequence
  source: /note="Description of Artificial Sequence: Synthetic peptide"
VHPHSVN

SEQ ID NO: 12815 - protein, 7 aa, Artificial Sequence
  source: /note="Description of Artificial Sequence: Synthetic peptide"
VHPRMLT

SEQ ID NO: 12816 - protein, 7 aa, Artificial Sequence
  source: /note="Description of Artificial Sequence: Synthetic peptide"
VHPSSVT

SEQ ID NO: 12817 - protein, 7 aa, Artificial Sequence
  source: /note="Description of Artificial Sequence: Synthetic peptide"
VHPVLAS

SEQ ID NO: 12818 - protein, 7 aa, Artificial Sequence
  source: /note="Description of Artificial Sequence: Synthetic peptide"
VHQARFA

SEQ ID NO: 12819 - protein, 7 aa, Artificial Sequence
  source: /note="Description of Artificial Sequence: Synthetic peptide"
VHQERSW

SEQ ID NO: 12820 - protein, 7 aa, Artificial Sequence
  source: /note="Description of Artificial Sequence: Synthetic peptide"
VHRQLED

SEQ ID NO: 12821 - protein, 7 aa, Artificial Sequence
  source: /note="Description of Artificial Sequence: Synthetic peptide"
VHRTQDS

SEQ ID NO: 12822 - protein, 7 aa, Artificial Sequence
  source: /note="Description of Artificial Sequence: Synthetic peptide"
VHSFKLG

SEQ ID NO: 12823 - protein, 7 aa, Artificial Sequence
  source: /note="Description of Artificial Sequence: Synthetic peptide"
VHSNSPS

SEQ ID NO: 12824 - protein, 7 aa, Artificial Sequence
  source: /note="Description of Artificial Sequence: Synthetic peptide"
VHSPQQS

SEQ ID NO: 12825 - protein, 7 aa, Artificial Sequence
  source: /note="Description of Artificial Sequence: Synthetic peptide"
VHSSINA

SEQ ID NO: 12826 - protein, 7 aa, Artificial Sequence
  source: /note="Description of Artificial Sequence: Synthetic peptide"
VHTPIGT

SEQ ID NO: 12827 - protein, 7 aa, Artificial Sequence
  source: /note="Description of Artificial Sequence: Synthetic peptide"
VHTSTIS

SEQ ID NO: 12828 - protein, 7 aa, Artificial Sequence
  source: /note="Description of Artificial Sequence: Synthetic peptide"
VHTTGML

SEQ ID NO: 12829 - protein, 7 aa, Artificial Sequence
  source: /note="Description of Artificial Sequence: Synthetic peptide"
VHVSTMP

SEQ ID NO: 12830 - protein, 7 aa, Artificial Sequence
  source: /note="Description of Artificial Sequence: Synthetic peptide"
VHVTGNL

SEQ ID NO: 12831 - protein, 7 aa, Artificial Sequence
  source: /note="Description of Artificial Sequence: Synthetic peptide"
VIASDIS

SEQ ID NO: 12832 - protein, 7 aa, Artificial Sequence
  source: /note="Description of Artificial Sequence: Synthetic peptide"
VIATDRL

SEQ ID NO: 12833 - protein, 7 aa, Artificial Sequence
  source: /note="Description of Artificial Sequence: Synthetic peptide"
VIAVDRM

SEQ ID NO: 12834 - protein, 7 aa, Artificial Sequence
  source: /note="Description of Artificial Sequence: Synthetic peptide"
VIDSELD

SEQ ID NO: 12835 - protein, 7 aa, Artificial Sequence
  source: /note="Description of Artificial Sequence: Synthetic peptide"
VIDSQKK

SEQ ID NO: 12836 - protein, 7 aa, Artificial Sequence
  source: /note="Description of Artificial Sequence: Synthetic peptide"
VIEASRN

SEQ ID NO: 12837 - protein, 7 aa, Artificial Sequence
  source: /note="Description of Artificial Sequence: Synthetic peptide"
VIGKGTH

SEQ ID NO: 12838 - protein, 7 aa, Artificial Sequence
  source: /note="Description of Artificial Sequence: Synthetic peptide"
VIHTMGA

SEQ ID NO: 12839 - protein, 7 aa, Artificial Sequence
  source: /note="Description of Artificial Sequence: Synthetic peptide"
VIIETSA

SEQ ID NO: 12840 - protein, 7 aa, Artificial Sequence
  source: /note="Description of Artificial Sequence: Synthetic peptide"
VILDKAV

SEQ ID NO: 12841 - protein, 7 aa, Artificial Sequence
  source: /note="Description of Artificial Sequence: Synthetic peptide"
VILKGAP

SEQ ID NO: 12842 - protein, 7 aa, Artificial Sequence
  source: /note="Description of Artificial Sequence: Synthetic peptide"
VILTSAV

SEQ ID NO: 12843 - protein, 7 aa, Artificial Sequence
  source: /note="Description of Artificial Sequence: Synthetic peptide"
VINGLAS

SEQ ID NO: 12844 - protein, 7 aa, Artificial Sequence
  source: /note="Description of Artificial Sequence: Synthetic peptide"
VINGLGV

SEQ ID NO: 12845 - protein, 7 aa, Artificial Sequence
  source: /note="Description of Artificial Sequence: Synthetic peptide"
VINNTGN

SEQ ID NO: 12846 - protein, 7 aa, Artificial Sequence
  source: /note="Description of Artificial Sequence: Synthetic peptide"
VIPPMRS

SEQ ID NO: 12847 - protein, 7 aa, Artificial Sequence
  source: /note="Description of Artificial Sequence: Synthetic peptide"
VIPPWDI

SEQ ID NO: 12848 - protein, 7 aa, Artificial Sequence
  source: /note="Description of Artificial Sequence: Synthetic peptide"
VIPRTLQ

SEQ ID NO: 12849 - protein, 7 aa, Artificial Sequence
  source: /note="Description of Artificial Sequence: Synthetic peptide"
VIQLRGA

SEQ ID NO: 12850 - protein, 7 aa, Artificial Sequence
  source: /note="Description of Artificial Sequence: Synthetic peptide"
VIRPSTH

SEQ ID NO: 12851 - protein, 7 aa, Artificial Sequence
  source: /note="Description of Artificial Sequence: Synthetic peptide"
VISGLNM

SEQ ID NO: 12852 - protein, 7 aa, Artificial Sequence
  source: /note="Description of Artificial Sequence: Synthetic peptide"
VISHKTN

SEQ ID NO: 12853 - protein, 7 aa, Artificial Sequence
  source: /note="Description of Artificial Sequence: Synthetic peptide"
VISLSEL

SEQ ID NO: 12854 - protein, 7 aa, Artificial Sequence
  source: /note="Description of Artificial Sequence: Synthetic peptide"
VISNTRD

SEQ ID NO: 12855 - protein, 7 aa, Artificial Sequence
  source: /note="Description of Artificial Sequence: Synthetic peptide"
VISRKGP

SEQ ID NO: 12856 - protein, 7 aa, Artificial Sequence
  source: /note="Description of Artificial Sequence: Synthetic peptide"
VISSADL

SEQ ID NO: 12857 - protein, 7 aa, Artificial Sequence
  source: /note="Description of Artificial Sequence: Synthetic peptide"
VISSFAE

SEQ ID NO: 12858 - protein, 7 aa, Artificial Sequence
  source: /note="Description of Artificial Sequence: Synthetic peptide"
VISTSLP

SEQ ID NO: 12859 - protein, 7 aa, Artificial Sequence
  source: /note="Description of Artificial Sequence: Synthetic peptide"
VISVPAS

SEQ ID NO: 12860 - protein, 7 aa, Artificial Sequence
  source: /note="Description of Artificial Sequence: Synthetic peptide"
VITEKSA

SEQ ID NO: 12861 - protein, 7 aa, Artificial Sequence
  source: /note="Description of Artificial Sequence: Synthetic peptide"
VITRSGT

SEQ ID NO: 12862 - protein, 7 aa, Artificial Sequence
  source: /note="Description of Artificial Sequence: Synthetic peptide"
VITSLGP

SEQ ID NO: 12863 - protein, 7 aa, Artificial Sequence
  source: /note="Description of Artificial Sequence: Synthetic peptide"
VITSTGA

SEQ ID NO: 12864 - protein, 7 aa, Artificial Sequence
  source: /note="Description of Artificial Sequence: Synthetic peptide"
VIVLGPV

SEQ ID NO: 12865 - protein, 7 aa, Artificial Sequence
  source: /note="Description of Artificial Sequence: Synthetic peptide"
VIVPDVW

SEQ ID NO: 12866 - protein, 7 aa, Artificial Sequence
  source: /note="Description of Artificial Sequence: Synthetic peptide"
VKDAFAP

SEQ ID NO: 12867 - protein, 7 aa, Artificial Sequence
  source: /note="Description of Artificial Sequence: Synthetic peptide"
VKDDHRC

SEQ ID NO: 12868 - protein, 7 aa, Artificial Sequence
  source: /note="Description of Artificial Sequence: Synthetic peptide"
VKDLPQA

SEQ ID NO: 12869 - protein, 7 aa, Artificial Sequence
  source: /note="Description of Artificial Sequence: Synthetic peptide"
VKDPRMS

SEQ ID NO: 12870 - protein, 7 aa, Artificial Sequence
  source: /note="Description of Artificial Sequence: Synthetic peptide"
VKDSTIG

SEQ ID NO: 12871 - protein, 7 aa, Artificial Sequence
  source: /note="Description of Artificial Sequence: Synthetic peptide"
VKFQPSL

SEQ ID NO: 12872 - protein, 7 aa, Artificial Sequence
  source: /note="Description of Artificial Sequence: Synthetic peptide"
VKGQLCC

SEQ ID NO: 12873 - protein, 7 aa, Artificial Sequence
  source: /note="Description of Artificial Sequence: Synthetic peptide"
VKGYSNY

SEQ ID NO: 12874 - protein, 7 aa, Artificial Sequence
  source: /note="Description of Artificial Sequence: Synthetic peptide"
VKLAMED

SEQ ID NO: 12875 - protein, 7 aa, Artificial Sequence
  source: /note="Description of Artificial Sequence: Synthetic peptide"
VKLGIQA

SEQ ID NO: 12876 - protein, 7 aa, Artificial Sequence
  source: /note="Description of Artificial Sequence: Synthetic peptide"
VKNAVTP

SEQ ID NO: 12877 - protein, 7 aa, Artificial Sequence
  source: /note="Description of Artificial Sequence: Synthetic peptide"
VKNCMVE

SEQ ID NO: 12878 - protein, 7 aa, Artificial Sequence
  source: /note="Description of Artificial Sequence: Synthetic peptide"
VKNPISY

SEQ ID NO: 12879 - protein, 7 aa, Artificial Sequence
  source: /note="Description of Artificial Sequence: Synthetic peptide"
VKNTNVS

SEQ ID NO: 12880 - protein, 7 aa, Artificial Sequence
  source: /note="Description of Artificial Sequence: Synthetic peptide"
VKNTYPE

SEQ ID NO: 12881 - protein, 7 aa, Artificial Sequence
  source: /note="Description of Artificial Sequence: Synthetic peptide"
VKNYEPQ

SEQ ID NO: 12882 - protein, 7 aa, Artificial Sequence
  source: /note="Description of Artificial Sequence: Synthetic peptide"
VKPDACF

SEQ ID NO: 12883 - protein, 7 aa, Artificial Sequence
  source: /note="Description of Artificial Sequence: Synthetic peptide"
VKPGMMP

SEQ ID NO: 12884 - protein, 7 aa, Artificial Sequence
  source: /note="Description of Artificial Sequence: Synthetic peptide"
VKPLGMP

SEQ ID NO: 12885 - protein, 7 aa, Artificial Sequence
  source: /note="Description of Artificial Sequence: Synthetic peptide"
VKPMASS

SEQ ID NO: 12886 - protein, 7 aa, Artificial Sequence
  source: /note="Description of Artificial Sequence: Synthetic peptide"
VKPSPIL

SEQ ID NO: 12887 - protein, 7 aa, Artificial Sequence
  source: /note="Description of Artificial Sequence: Synthetic peptide"
VKPTPDA

SEQ ID NO: 12888 - protein, 7 aa, Artificial Sequence
  source: /note="Description of Artificial Sequence: Synthetic peptide"
VKPYSLH

SEQ ID NO: 12889 - protein, 7 aa, Artificial Sequence
  source: /note="Description of Artificial Sequence: Synthetic peptide"
VKPYVTM

SEQ ID NO: 12890 - protein, 7 aa, Artificial Sequence
  source: /note="Description of Artificial Sequence: Synthetic peptide"
VKQRAMV

SEQ ID NO: 12891 - protein, 7 aa, Artificial Sequence
  source: /note="Description of Artificial Sequence: Synthetic peptide"
VKSAETI

SEQ ID NO: 12892 - protein, 7 aa, Artificial Sequence
  source: /note="Description of Artificial Sequence: Synthetic peptide"
VKSDILA

SEQ ID NO: 12893 - protein, 7 aa, Artificial Sequence
  source: /note="Description of Artificial Sequence: Synthetic peptide"
VKSEFPK

SEQ ID NO: 12894 - protein, 7 aa, Artificial Sequence
  source: /note="Description of Artificial Sequence: Synthetic peptide"
VKSETGV

SEQ ID NO: 12895 - protein, 7 aa, Artificial Sequence
  source: /note="Description of Artificial Sequence: Synthetic peptide"
VKSRAET

SEQ ID NO: 12896 - protein, 7 aa, Artificial Sequence
  source: /note="Description of Artificial Sequence: Synthetic peptide"
VKSSDST

SEQ ID NO: 12897 - protein, 7 aa, Artificial Sequence
  source: /note="Description of Artificial Sequence: Synthetic peptide"
VKTNATL

SEQ ID NO: 12898 - protein, 7 aa, Artificial Sequence
  source: /note="Description of Artificial Sequence: Synthetic peptide"
VKTPPLT

SEQ ID NO: 12899 - protein, 7 aa, Artificial Sequence
  source: /note="Description of Artificial Sequence: Synthetic peptide"
VKTPSLN

SEQ ID NO: 12900 - protein, 7 aa, Artificial Sequence
  source: /note="Description of Artificial Sequence: Synthetic peptide"
VKTPWGP

SEQ ID NO: 12901 - protein, 7 aa, Artificial Sequence
  source: /note="Description of Artificial Sequence: Synthetic peptide"
VKTQSDL

SEQ ID NO: 12902 - protein, 7 aa, Artificial Sequence
  source: /note="Description of Artificial Sequence: Synthetic peptide"
VKVPGAF

SEQ ID NO: 12903 - protein, 7 aa, Artificial Sequence
  source: /note="Description of Artificial Sequence: Synthetic peptide"
VLAHSDS

SEQ ID NO: 12904 - protein, 7 aa, Artificial Sequence
  source: /note="Description of Artificial Sequence: Synthetic peptide"
VLAHSTY

SEQ ID NO: 12905 - protein, 7 aa, Artificial Sequence
  source: /note="Description of Artificial Sequence: Synthetic peptide"
VLAPLVS

SEQ ID NO: 12906 - protein, 7 aa, Artificial Sequence
  source: /note="Description of Artificial Sequence: Synthetic peptide"
VLARQYP

SEQ ID NO: 12907 - protein, 7 aa, Artificial Sequence
  source: /note="Description of Artificial Sequence: Synthetic peptide"
VLASTVS

SEQ ID NO: 12908 - protein, 7 aa, Artificial Sequence
  source: /note="Description of Artificial Sequence: Synthetic peptide"
VLATTVG

SEQ ID NO: 12909 - protein, 7 aa, Artificial Sequence
  source: /note="Description of Artificial Sequence: Synthetic peptide"
VLATVTK

SEQ ID NO: 12910 - protein, 7 aa, Artificial Sequence
  source: /note="Description of Artificial Sequence: Synthetic peptide"
VLAVRTN

SEQ ID NO: 12911 - protein, 7 aa, Artificial Sequence
  source: /note="Description of Artificial Sequence: Synthetic peptide"
VLDWEGD

SEQ ID NO: 12912 - protein, 7 aa, Artificial Sequence
  source: /note="Description of Artificial Sequence: Synthetic peptide"
VLEHLHP

SEQ ID NO: 12913 - protein, 7 aa, Artificial Sequence
  source: /note="Description of Artificial Sequence: Synthetic peptide"
VLEKLKT

SEQ ID NO: 12914 - protein, 7 aa, Artificial Sequence
  source: /note="Description of Artificial Sequence: Synthetic peptide"
VLELEHR

SEQ ID NO: 12915 - protein, 7 aa, Artificial Sequence
  source: /note="Description of Artificial Sequence: Synthetic peptide"
VLEPLSK

SEQ ID NO: 12916 - protein, 7 aa, Artificial Sequence
  source: /note="Description of Artificial Sequence: Synthetic peptide"
VLETRTL

SEQ ID NO: 12917 - protein, 7 aa, Artificial Sequence
  source: /note="Description of Artificial Sequence: Synthetic peptide"
VLGGLAS

SEQ ID NO: 12918 - protein, 7 aa, Artificial Sequence
  source: /note="Description of Artificial Sequence: Synthetic peptide"
VLGLAPA

SEQ ID NO: 12919 - protein, 7 aa, Artificial Sequence
  source: /note="Description of Artificial Sequence: Synthetic peptide"
VLGLGGP

SEQ ID NO: 12920 - protein, 7 aa, Artificial Sequence
  source: /note="Description of Artificial Sequence: Synthetic peptide"
VLGMGEW

SEQ ID NO: 12921 - protein, 7 aa, Artificial Sequence
  source: /note="Description of Artificial Sequence: Synthetic peptide"
VLGRGYS

SEQ ID NO: 12922 - protein, 7 aa, Artificial Sequence
  source: /note="Description of Artificial Sequence: Synthetic peptide"
VLGSLQH

SEQ ID NO: 12923 - protein, 7 aa, Artificial Sequence
  source: /note="Description of Artificial Sequence: Synthetic peptide"
VLGSVGS

SEQ ID NO: 12924 - protein, 7 aa, Artificial Sequence
  source: /note="Description of Artificial Sequence: Synthetic peptide"
VLGYSKP

SEQ ID NO: 12925 - protein, 7 aa, Artificial Sequence
  source: /note="Description of Artificial Sequence: Synthetic peptide"
VLHAASA

SEQ ID NO: 12926 - protein, 7 aa, Artificial Sequence
  source: /note="Description of Artificial Sequence: Synthetic peptide"
VLHQRGA

SEQ ID NO: 12927 - protein, 7 aa, Artificial Sequence
  source: /note="Description of Artificial Sequence: Synthetic peptide"
VLKAHPD

SEQ ID NO: 12928 - protein, 7 aa, Artificial Sequence
  source: /note="Description of Artificial Sequence: Synthetic peptide"
VLKPGVT

SEQ ID NO: 12929 - protein, 7 aa, Artificial Sequence
  source: /note="Description of Artificial Sequence: Synthetic peptide"
VLKPSVP

SEQ ID NO: 12930 - protein, 7 aa, Artificial Sequence
  source: /note="Description of Artificial Sequence: Synthetic peptide"
VLKPYIN

SEQ ID NO: 12931 - protein, 7 aa, Artificial Sequence
  source: /note="Description of Artificial Sequence: Synthetic peptide"
VLKSHSA

SEQ ID NO: 12932 - protein, 7 aa, Artificial Sequence
  source: /note="Description of Artificial Sequence: Synthetic peptide"
VLKSSAS

SEQ ID NO: 12933 - protein, 7 aa, Artificial Sequence
  source: /note="Description of Artificial Sequence: Synthetic peptide"
VLLPSHP

SEQ ID NO: 12934 - protein, 7 aa, Artificial Sequence
  source: /note="Description of Artificial Sequence: Synthetic peptide"
VLLTKTC

SEQ ID NO: 12935 - protein, 7 aa, Artificial Sequence
  source: /note="Description of Artificial Sequence: Synthetic peptide"
VLMPSTI

SEQ ID NO: 12936 - protein, 7 aa, Artificial Sequence
  source: /note="Description of Artificial Sequence: Synthetic peptide"
VLMPTEA

SEQ ID NO: 12937 - protein, 7 aa, Artificial Sequence
  source: /note="Description of Artificial Sequence: Synthetic peptide"
VLNGRSS

SEQ ID NO: 12938 - protein, 7 aa, Artificial Sequence
  source: /note="Description of Artificial Sequence: Synthetic peptide"
VLNHPTF

SEQ ID NO: 12939 - protein, 7 aa, Artificial Sequence
  source: /note="Description of Artificial Sequence: Synthetic peptide"
VLNHQSS

SEQ ID NO: 12940 - protein, 7 aa, Artificial Sequence
  source: /note="Description of Artificial Sequence: Synthetic peptide"
VLNLTQG

SEQ ID NO: 12941 - protein, 7 aa, Artificial Sequence
  source: /note="Description of Artificial Sequence: Synthetic peptide"
VLNPLNS

SEQ ID NO: 12942 - protein, 7 aa, Artificial Sequence
  source: /note="Description of Artificial Sequence: Synthetic peptide"
VLNTDVT

SEQ ID NO: 12943 - protein, 7 aa, Artificial Sequence
  source: /note="Description of Artificial Sequence: Synthetic peptide"
VLNTGVG

SEQ ID NO: 12944 - protein, 7 aa, Artificial Sequence
  source: /note="Description of Artificial Sequence: Synthetic peptide"
VLPKTSA

SEQ ID NO: 12945 - protein, 7 aa, Artificial Sequence
  source: /note="Description of Artificial Sequence: Synthetic peptide"
VLPNSKN

SEQ ID NO: 12946 - protein, 7 aa, Artificial Sequence
  source: /note="Description of Artificial Sequence: Synthetic peptide"
VLPPLAA

SEQ ID NO: 12947 - protein, 7 aa, Artificial Sequence
  source: /note="Description of Artificial Sequence: Synthetic peptide"
VLPPNNK

SEQ ID NO: 12948 - protein, 7 aa, Artificial Sequence
  source: /note="Description of Artificial Sequence: Synthetic peptide"
VLPVPRA

SEQ ID NO: 12949 - protein, 7 aa, Artificial Sequence
  source: /note="Description of Artificial Sequence: Synthetic peptide"
VLQGSSA

SEQ ID NO: 12950 - protein, 7 aa, Artificial Sequence
  source: /note="Description of Artificial Sequence: Synthetic peptide"
VLQTTRP

SEQ ID NO: 12951 - protein, 7 aa, Artificial Sequence
  source: /note="Description of Artificial Sequence: Synthetic peptide"
VLRGHLA

SEQ ID NO: 12952 - protein, 7 aa, Artificial Sequence
  source: /note="Description of Artificial Sequence: Synthetic peptide"
VLRLGTA

SEQ ID NO: 12953 - protein, 7 aa, Artificial Sequence
  source: /note="Description of Artificial Sequence: Synthetic peptide"
VLRNGAE

SEQ ID NO: 12954 - protein, 7 aa, Artificial Sequence
  source: /note="Description of Artificial Sequence: Synthetic peptide"
VLRQSVP

SEQ ID NO: 12955 - protein, 7 aa, Artificial Sequence
  source: /note="Description of Artificial Sequence: Synthetic peptide"
VLRSDAA

SEQ ID NO: 12956 - protein, 7 aa, Artificial Sequence
  source: /note="Description of Artificial Sequence: Synthetic peptide"
VLRTGEF

SEQ ID NO: 12957 - protein, 7 aa, Artificial Sequence
  source: /note="Description of Artificial Sequence: Synthetic peptide"
VLRTSSG

SEQ ID NO: 12958 - protein, 7 aa, Artificial Sequence
  source: /note="Description of Artificial Sequence: Synthetic peptide"
VLSHDVV

SEQ ID NO: 12959 - protein, 7 aa, Artificial Sequence
  source: /note="Description of Artificial Sequence: Synthetic peptide"
VLSHGGA

SEQ ID NO: 12960 - protein, 7 aa, Artificial Sequence
  source: /note="Description of Artificial Sequence: Synthetic peptide"
VLSPNTA

SEQ ID NO: 12961 - protein, 7 aa, Artificial Sequence
  source: /note="Description of Artificial Sequence: Synthetic peptide"
VLSPTGM

SEQ ID NO: 12962 - protein, 7 aa, Artificial Sequence
  source: /note="Description of Artificial Sequence: Synthetic peptide"
VLSRGNT

SEQ ID NO: 12963 - protein, 7 aa, Artificial Sequence
  source: /note="Description of Artificial Sequence: Synthetic peptide"
VLSSNSY

SEQ ID NO: 12964 - protein, 7 aa, Artificial Sequence
  source: /note="Description of Artificial Sequence: Synthetic peptide"
VLSTISS

SEQ ID NO: 12965 - protein, 7 aa, Artificial Sequence
  source: /note="Description of Artificial Sequence: Synthetic peptide"
VLSTMSP

SEQ ID NO: 12966 - protein, 7 aa, Artificial Sequence
  source: /note="Description of Artificial Sequence: Synthetic peptide"
VLSVSGR

SEQ ID NO: 12967 - protein, 7 aa, Artificial Sequence
  source: /note="Description of Artificial Sequence: Synthetic peptide"
VLSYHTG

SEQ ID NO: 12968 - protein, 7 aa, Artificial Sequence
  source: /note="Description of Artificial Sequence: Synthetic peptide"
VLTATMS

SEQ ID NO: 12969 - protein, 7 aa, Artificial Sequence
  source: /note="Description of Artificial Sequence: Synthetic peptide"
VLTGQRL

SEQ ID NO: 12970 - protein, 7 aa, Artificial Sequence
  source: /note="Description of Artificial Sequence: Synthetic peptide"
VLTQQPV

SEQ ID NO: 12971 - protein, 7 aa, Artificial Sequence
  source: /note="Description of Artificial Sequence: Synthetic peptide"
VLTRAGI

SEQ ID NO: 12972 - protein, 7 aa, Artificial Sequence
  source: /note="Description of Artificial Sequence: Synthetic peptide"
VLTSNTP

SEQ ID NO: 12973 - protein, 7 aa, Artificial Sequence
  source: /note="Description of Artificial Sequence: Synthetic peptide"
VLVAASM

SEQ ID NO: 12974 - protein, 7 aa, Artificial Sequence
  source: /note="Description of Artificial Sequence: Synthetic peptide"
VLVRSGS

SEQ ID NO: 12975 - protein, 7 aa, Artificial Sequence
  source: /note="Description of Artificial Sequence: Synthetic peptide"
VLVVPNH

SEQ ID NO: 12976 - protein, 7 aa, Artificial Sequence
  source: /note="Description of Artificial Sequence: Synthetic peptide"
VLVVRGT

SEQ ID NO: 12977 - protein, 7 aa, Artificial Sequence
  source: /note="Description of Artificial Sequence: Synthetic peptide"
VLYSGLS

SEQ ID NO: 12978 - protein, 7 aa, Artificial Sequence
  source: /note="Description of Artificial Sequence: Synthetic peptide"
VLYTNLE

SEQ ID NO: 12979 - protein, 7 aa, Artificial Sequence
  source: /note="Description of Artificial Sequence: Synthetic peptide"
VMDGLEP

SEQ ID NO: 12980 - protein, 7 aa, Artificial Sequence
  source: /note="Description of Artificial Sequence: Synthetic peptide"
VMDGVRP

SEQ ID NO: 12981 - protein, 7 aa, Artificial Sequence
  source: /note="Description of Artificial Sequence: Synthetic peptide"
VMGAKGL

SEQ ID NO: 12982 - protein, 7 aa, Artificial Sequence
  source: /note="Description of Artificial Sequence: Synthetic peptide"
VMGGNPS

SEQ ID NO: 12983 - protein, 7 aa, Artificial Sequence
  source: /note="Description of Artificial Sequence: Synthetic peptide"
VMHLADD

SEQ ID NO: 12984 - protein, 7 aa, Artificial Sequence
  source: /note="Description of Artificial Sequence: Synthetic peptide"
VMNLLKH

SEQ ID NO: 12985 - protein, 7 aa, Artificial Sequence
  source: /note="Description of Artificial Sequence: Synthetic peptide"
VMNLSTM

SEQ ID NO: 12986 - protein, 7 aa, Artificial Sequence
  source: /note="Description of Artificial Sequence: Synthetic peptide"
VMNSPRS

SEQ ID NO: 12987 - protein, 7 aa, Artificial Sequence
  source: /note="Description of Artificial Sequence: Synthetic peptide"
VMPFTHD

SEQ ID NO: 12988 - protein, 7 aa, Artificial Sequence
  source: /note="Description of Artificial Sequence: Synthetic peptide"
VMPNTPS

SEQ ID NO: 12989 - protein, 7 aa, Artificial Sequence
  source: /note="Description of Artificial Sequence: Synthetic peptide"
VMPQRLS

SEQ ID NO: 12990 - protein, 7 aa, Artificial Sequence
  source: /note="Description of Artificial Sequence: Synthetic peptide"
VMPSASA

SEQ ID NO: 12991 - protein, 7 aa, Artificial Sequence
  source: /note="Description of Artificial Sequence: Synthetic peptide"
VMPSLVS

SEQ ID NO: 12992 - protein, 7 aa, Artificial Sequence
  source: /note="Description of Artificial Sequence: Synthetic peptide"
VMQASNS

SEQ ID NO: 12993 - protein, 7 aa, Artificial Sequence
  source: /note="Description of Artificial Sequence: Synthetic peptide"
VMQENCP

SEQ ID NO: 12994 - protein, 7 aa, Artificial Sequence
  source: /note="Description of Artificial Sequence: Synthetic peptide"
VMQLGES

SEQ ID NO: 12995 - protein, 7 aa, Artificial Sequence
  source: /note="Description of Artificial Sequence: Synthetic peptide"
VMQSILA

SEQ ID NO: 12996 - protein, 7 aa, Artificial Sequence
  source: /note="Description of Artificial Sequence: Synthetic peptide"
VMRLDKQ

SEQ ID NO: 12997 - protein, 7 aa, Artificial Sequence
  source: /note="Description of Artificial Sequence: Synthetic peptide"
VMRPDRS

SEQ ID NO: 12998 - protein, 7 aa, Artificial Sequence
  source: /note="Description of Artificial Sequence: Synthetic peptide"
VMSAVDL

SEQ ID NO: 12999 - protein, 7 aa, Artificial Sequence
  source: /note="Description of Artificial Sequence: Synthetic peptide"
VMSDSKV

SEQ ID NO: 13000 - protein, 7 aa, Artificial Sequence
  source: /note="Description of Artificial Sequence: Synthetic peptide"
VMSMPRL

SEQ ID NO: 13001 - protein, 7 aa, Artificial Sequence
  source: /note="Description of Artificial Sequence: Synthetic peptide"
VMSPDSM

SEQ ID NO: 13002 - protein, 7 aa, Artificial Sequence
  source: /note="Description of Artificial Sequence: Synthetic peptide"
VMSSRTT

SEQ ID NO: 13003 - protein, 7 aa, Artificial Sequence
  source: /note="Description of Artificial Sequence: Synthetic peptide"
VMTDALH

SEQ ID NO: 13004 - protein, 7 aa, Artificial Sequence
  source: /note="Description of Artificial Sequence: Synthetic peptide"
VMTSHPM

SEQ ID NO: 13005 - protein, 7 aa, Artificial Sequence
  source: /note="Description of Artificial Sequence: Synthetic peptide"
VMTSQAM

SEQ ID NO: 13006 - protein, 7 aa, Artificial Sequence
  source: /note="Description of Artificial Sequence: Synthetic peptide"
VMTTTGH

SEQ ID NO: 13007 - protein, 7 aa, Artificial Sequence
  source: /note="Description of Artificial Sequence: Synthetic peptide"
VMTVASL

SEQ ID NO: 13008 - protein, 7 aa, Artificial Sequence
  source: /note="Description of Artificial Sequence: Synthetic peptide"
VMVESGP

SEQ ID NO: 13009 - protein, 7 aa, Artificial Sequence
  source: /note="Description of Artificial Sequence: Synthetic peptide"
VNAKSST

SEQ ID NO: 13010 - protein, 7 aa, Artificial Sequence
  source: /note="Description of Artificial Sequence: Synthetic peptide"
VNALSSA

SEQ ID NO: 13011 - protein, 7 aa, Artificial Sequence
  source: /note="Description of Artificial Sequence: Synthetic peptide"
VNAVGAP

SEQ ID NO: 13012 - protein, 7 aa, Artificial Sequence
  source: /note="Description of Artificial Sequence: Synthetic peptide"
VNDVLPT

SEQ ID NO: 13013 - protein, 7 aa, Artificial Sequence
  source: /note="Description of Artificial Sequence: Synthetic peptide"
VNDYAHS

SEQ ID NO: 13014 - protein, 7 aa, Artificial Sequence
  source: /note="Description of Artificial Sequence: Synthetic peptide"
VNELGRT

SEQ ID NO: 13015 - protein, 7 aa, Artificial Sequence
  source: /note="Description of Artificial Sequence: Synthetic peptide"
VNELVRT

SEQ ID NO: 13016 - protein, 7 aa, Artificial Sequence
  source: /note="Description of Artificial Sequence: Synthetic peptide"
VNFNPIS

SEQ ID NO: 13017 - protein, 7 aa, Artificial Sequence
  source: /note="Description of Artificial Sequence: Synthetic peptide"
VNGHALT

SEQ ID NO: 13018 - protein, 7 aa, Artificial Sequence
  source: /note="Description of Artificial Sequence: Synthetic peptide"
VNGLNVV

SEQ ID NO: 13019 - protein, 7 aa, Artificial Sequence
  source: /note="Description of Artificial Sequence: Synthetic peptide"
VNGNEHG

SEQ ID NO: 13020 - protein, 7 aa, Artificial Sequence
  source: /note="Description of Artificial Sequence: Synthetic peptide"
VNGSAFS

SEQ ID NO: 13021 - protein, 7 aa, Artificial Sequence
  source: /note="Description of Artificial Sequence: Synthetic peptide"
VNHMSSP

SEQ ID NO: 13022 - protein, 7 aa, Artificial Sequence
  source: /note="Description of Artificial Sequence: Synthetic peptide"
VNHRSAP

SEQ ID NO: 13023 - protein, 7 aa, Artificial Sequence
  source: /note="Description of Artificial Sequence: Synthetic peptide"
VNKDPLA

SEQ ID NO: 13024 - protein, 7 aa, Artificial Sequence
  source: /note="Description of Artificial Sequence: Synthetic peptide"
VNKGVSA

SEQ ID NO: 13025 - protein, 7 aa, Artificial Sequence
  source: /note="Description of Artificial Sequence: Synthetic peptide"
VNKSGYP

SEQ ID NO: 13026 - protein, 7 aa, Artificial Sequence
  source: /note="Description of Artificial Sequence: Synthetic peptide"
VNKSTVS

SEQ ID NO: 13027 - protein, 7 aa, Artificial Sequence
  source: /note="Description of Artificial Sequence: Synthetic peptide"
VNKSYSM

SEQ ID NO: 13028 - protein, 7 aa, Artificial Sequence
  source: /note="Description of Artificial Sequence: Synthetic peptide"
VNLASSV

SEQ ID NO: 13029 - protein, 7 aa, Artificial Sequence
  source: /note="Description of Artificial Sequence: Synthetic peptide"
VNLGSNN

SEQ ID NO: 13030 - protein, 7 aa, Artificial Sequence
  source: /note="Description of Artificial Sequence: Synthetic peptide"
VNLRLGS

SEQ ID NO: 13031 - protein, 7 aa, Artificial Sequence
  source: /note="Description of Artificial Sequence: Synthetic peptide"
VNLSSVC

SEQ ID NO: 13032 - protein, 7 aa, Artificial Sequence
  source: /note="Description of Artificial Sequence: Synthetic peptide"
VNLVHGV

SEQ ID NO: 13033 - protein, 7 aa, Artificial Sequence
  source: /note="Description of Artificial Sequence: Synthetic peptide"
VNLYLTE

SEQ ID NO: 13034 - protein, 7 aa, Artificial Sequence
  source: /note="Description of Artificial Sequence: Synthetic peptide"
VNNTRNV

SEQ ID NO: 13035 - protein, 7 aa, Artificial Sequence
  source: /note="Description of Artificial Sequence: Synthetic peptide"
VNPPNVG

SEQ ID NO: 13036 - protein, 7 aa, Artificial Sequence
  source: /note="Description of Artificial Sequence: Synthetic peptide"
VNPPSRP

SEQ ID NO: 13037 - protein, 7 aa, Artificial Sequence
  source: /note="Description of Artificial Sequence: Synthetic peptide"
VNPPTHV

SEQ ID NO: 13038 - protein, 7 aa, Artificial Sequence
  source: /note="Description of Artificial Sequence: Synthetic peptide"
VNPRVVQ

SEQ ID NO: 13039 - protein, 7 aa, Artificial Sequence
  source: /note="Description of Artificial Sequence: Synthetic peptide"
VNPSASS

SEQ ID NO: 13040 - protein, 7 aa, Artificial Sequence
  source: /note="Description of Artificial Sequence: Synthetic peptide"
VNPSSPS

SEQ ID NO: 13041 - protein, 7 aa, Artificial Sequence
  source: /note="Description of Artificial Sequence: Synthetic peptide"
VNRSVSP

SEQ ID NO: 13042 - protein, 7 aa, Artificial Sequence
  source: /note="Description of Artificial Sequence: Synthetic peptide"
VNRTTLY

SEQ ID NO: 13043 - protein, 7 aa, Artificial Sequence
  source: /note="Description of Artificial Sequence: Synthetic peptide"
VNSASKS

SEQ ID NO: 13044 - protein, 7 aa, Artificial Sequence
  source: /note="Description of Artificial Sequence: Synthetic peptide"
VNSFERS

SEQ ID NO: 13045 - protein, 7 aa, Artificial Sequence
  source: /note="Description of Artificial Sequence: Synthetic peptide"
VNSGATT

SEQ ID NO: 13046 - protein, 7 aa, Artificial Sequence
  source: /note="Description of Artificial Sequence: Synthetic peptide"
VNSMERP

SEQ ID NO: 13047 - protein, 7 aa, Artificial Sequence
  source: /note="Description of Artificial Sequence: Synthetic peptide"
VNSRLIA

SEQ ID NO: 13048 - protein, 7 aa, Artificial Sequence
  source: /note="Description of Artificial Sequence: Synthetic peptide"
VNSSLHG

SEQ ID NO: 13049 - protein, 7 aa, Artificial Sequence
  source: /note="Description of Artificial Sequence: Synthetic peptide"
VNSSNSR

SEQ ID NO: 13050 - protein, 7 aa, Artificial Sequence
  source: /note="Description of Artificial Sequence: Synthetic peptide"
VNSSVWA

SEQ ID NO: 13051 - protein, 7 aa, Artificial Sequence
  source: /note="Description of Artificial Sequence: Synthetic peptide"
VNSTAFH

SEQ ID NO: 13052 - protein, 7 aa, Artificial Sequence
  source: /note="Description of Artificial Sequence: Synthetic peptide"
VNTKVGP

SEQ ID NO: 13053 - protein, 7 aa, Artificial Sequence
  source: /note="Description of Artificial Sequence: Synthetic peptide"
VNTLTGD

SEQ ID NO: 13054 - protein, 7 aa, Artificial Sequence
  source: /note="Description of Artificial Sequence: Synthetic peptide"
VNTNLAS

SEQ ID NO: 13055 - protein, 7 aa, Artificial Sequence
  source: /note="Description of Artificial Sequence: Synthetic peptide"
VNTSGWQ

SEQ ID NO: 13056 - protein, 7 aa, Artificial Sequence
  source: /note="Description of Artificial Sequence: Synthetic peptide"
VNTVPYG

SEQ ID NO: 13057 - protein, 7 aa, Artificial Sequence
  source: /note="Description of Artificial Sequence: Synthetic peptide"
VNTVTSS

SEQ ID NO: 13058 - protein, 7 aa, Artificial Sequence
  source: /note="Description of Artificial Sequence: Synthetic peptide"
VNVGTLY

SEQ ID NO: 13059 - protein, 7 aa, Artificial Sequence
  source: /note="Description of Artificial Sequence: Synthetic peptide"
VNVKREV

SEQ ID NO: 13060 - protein, 7 aa, Artificial Sequence
  source: /note="Description of Artificial Sequence: Synthetic peptide"
VNVRETT

SEQ ID NO: 13061 - protein, 7 aa, Artificial Sequence
  source: /note="Description of Artificial Sequence: Synthetic peptide"
VNVSHYS

SEQ ID NO: 13062 - protein, 7 aa, Artificial Sequence
  source: /note="Description of Artificial Sequence: Synthetic peptide"
VNVSQTG

SEQ ID NO: 13063 - protein, 7 aa, Artificial Sequence
  source: /note="Description of Artificial Sequence: Synthetic peptide"
VNYAPAV

SEQ ID NO: 13064 - protein, 7 aa, Artificial Sequence
  source: /note="Description of Artificial Sequence: Synthetic peptide"
VNYPEST

SEQ ID NO: 13065 - protein, 7 aa, Artificial Sequence
  source: /note="Description of Artificial Sequence: Synthetic peptide"
VPAMTQG

SEQ ID NO: 13066 - protein, 7 aa, Artificial Sequence
  source: /note="Description of Artificial Sequence: Synthetic peptide"
VPAPGYN

SEQ ID NO: 13067 - protein, 7 aa, Artificial Sequence
  source: /note="Description of Artificial Sequence: Synthetic peptide"
VPAQSRE

SEQ ID NO: 13068 - protein, 7 aa, Artificial Sequence
  source: /note="Description of Artificial Sequence: Synthetic peptide"
VPARSPG

SEQ ID NO: 13069 - protein, 7 aa, Artificial Sequence
  source: /note="Description of Artificial Sequence: Synthetic peptide"
VPASSTS

SEQ ID NO: 13070 - protein, 7 aa, Artificial Sequence
  source: /note="Description of Artificial Sequence: Synthetic peptide"
VPATDFR

SEQ ID NO: 13071 - protein, 7 aa, Artificial Sequence
  source: /note="Description of Artificial Sequence: Synthetic peptide"
VPAVTSR

SEQ ID NO: 13072 - protein, 7 aa, Artificial Sequence
  source: /note="Description of Artificial Sequence: Synthetic peptide"
VPCPSHT

SEQ ID NO: 13073 - protein, 7 aa, Artificial Sequence
  source: /note="Description of Artificial Sequence: Synthetic peptide"
VPDASDF

SEQ ID NO: 13074 - protein, 7 aa, Artificial Sequence
  source: /note="Description of Artificial Sequence: Synthetic peptide"
VPDSWDR

SEQ ID NO: 13075 - protein, 7 aa, Artificial Sequence
  source: /note="Description of Artificial Sequence: Synthetic peptide"
VPERATI

SEQ ID NO: 13076 - protein, 7 aa, Artificial Sequence
  source: /note="Description of Artificial Sequence: Synthetic peptide"
VPEYIIT

SEQ ID NO: 13077 - protein, 7 aa, Artificial Sequence
  source: /note="Description of Artificial Sequence: Synthetic peptide"
VPFASMT

SEQ ID NO: 13078 - protein, 7 aa, Artificial Sequence
  source: /note="Description of Artificial Sequence: Synthetic peptide"
VPFQFEG

SEQ ID NO: 13079 - protein, 7 aa, Artificial Sequence
  source: /note="Description of Artificial Sequence: Synthetic peptide"
VPGANRI

SEQ ID NO: 13080 - protein, 7 aa, Artificial Sequence
  source: /note="Description of Artificial Sequence: Synthetic peptide"
VPGDLRV

SEQ ID NO: 13081 - protein, 7 aa, Artificial Sequence
  source: /note="Description of Artificial Sequence: Synthetic peptide"
VPGKPGD

SEQ ID NO: 13082 - protein, 7 aa, Artificial Sequence
  source: /note="Description of Artificial Sequence: Synthetic peptide"
VPGMTTL

SEQ ID NO: 13083 - protein, 7 aa, Artificial Sequence
  source: /note="Description of Artificial Sequence: Synthetic peptide"
VPGNPAT

SEQ ID NO: 13084 - protein, 7 aa, Artificial Sequence
  source: /note="Description of Artificial Sequence: Synthetic peptide"
VPGPVVA

SEQ ID NO: 13085 - protein, 7 aa, Artificial Sequence
  source: /note="Description of Artificial Sequence: Synthetic peptide"
VPGRTTP

SEQ ID NO: 13086 - protein, 7 aa, Artificial Sequence
  source: /note="Description of Artificial Sequence: Synthetic peptide"
VPGSRST

SEQ ID NO: 13087 - protein, 7 aa, Artificial Sequence
  source: /note="Description of Artificial Sequence: Synthetic peptide"
VPGSSRL

SEQ ID NO: 13088 - protein, 7 aa, Artificial Sequence
  source: /note="Description of Artificial Sequence: Synthetic peptide"
VPGSSSH

SEQ ID NO: 13089 - protein, 7 aa, Artificial Sequence
  source: /note="Description of Artificial Sequence: Synthetic peptide"
VPHEKTP

SEQ ID NO: 13090 - protein, 7 aa, Artificial Sequence
  source: /note="Description of Artificial Sequence: Synthetic peptide"
VPHIVST

SEQ ID NO: 13091 - protein, 7 aa, Artificial Sequence
  source: /note="Description of Artificial Sequence: Synthetic peptide"
VPHLTST

SEQ ID NO: 13092 - protein, 7 aa, Artificial Sequence
  source: /note="Description of Artificial Sequence: Synthetic peptide"
VPHLTVV

SEQ ID NO: 13093 - protein, 7 aa, Artificial Sequence
  source: /note="Description of Artificial Sequence: Synthetic peptide"
VPHYSSS

SEQ ID NO: 13094 - protein, 7 aa, Artificial Sequence
  source: /note="Description of Artificial Sequence: Synthetic peptide"
VPIISDQ

SEQ ID NO: 13095 - protein, 7 aa, Artificial Sequence
  source: /note="Description of Artificial Sequence: Synthetic peptide"
VPKFPLE

SEQ ID NO: 13096 - protein, 7 aa, Artificial Sequence
  source: /note="Description of Artificial Sequence: Synthetic peptide"
VPKLSYP

SEQ ID NO: 13097 - protein, 7 aa, Artificial Sequence
  source: /note="Description of Artificial Sequence: Synthetic peptide"
VPKNEMG

SEQ ID NO: 13098 - protein, 7 aa, Artificial Sequence
  source: /note="Description of Artificial Sequence: Synthetic peptide"
VPKQSMQ

SEQ ID NO: 13099 - protein, 7 aa, Artificial Sequence
  source: /note="Description of Artificial Sequence: Synthetic peptide"
VPKQSVN

SEQ ID NO: 13100 - protein, 7 aa, Artificial Sequence
  source: /note="Description of Artificial Sequence: Synthetic peptide"
VPKQVSF

SEQ ID NO: 13101 - protein, 7 aa, Artificial Sequence
  source: /note="Description of Artificial Sequence: Synthetic peptide"
VPLDHAD

SEQ ID NO: 13102 - protein, 7 aa, Artificial Sequence
  source: /note="Description of Artificial Sequence: Synthetic peptide"
VPLDRIH

SEQ ID NO: 13103 - protein, 7 aa, Artificial Sequence
  source: /note="Description of Artificial Sequence: Synthetic peptide"
VPLDSES

SEQ ID NO: 13104 - protein, 7 aa, Artificial Sequence
  source: /note="Description of Artificial Sequence: Synthetic peptide"
VPLGTDV

SEQ ID NO: 13105 - protein, 7 aa, Artificial Sequence
  source: /note="Description of Artificial Sequence: Synthetic peptide"
VPLHTSL

SEQ ID NO: 13106 - protein, 7 aa, Artificial Sequence
  source: /note="Description of Artificial Sequence: Synthetic peptide"
VPLISMD

SEQ ID NO: 13107 - protein, 7 aa, Artificial Sequence
  source: /note="Description of Artificial Sequence: Synthetic peptide"
VPLNKAA

SEQ ID NO: 13108 - protein, 7 aa, Artificial Sequence
  source: /note="Description of Artificial Sequence: Synthetic peptide"
VPLQETF

SEQ ID NO: 13109 - protein, 7 aa, Artificial Sequence
  source: /note="Description of Artificial Sequence: Synthetic peptide"
VPLSGGF

SEQ ID NO: 13110 - protein, 7 aa, Artificial Sequence
  source: /note="Description of Artificial Sequence: Synthetic peptide"
VPLSNMS

SEQ ID NO: 13111 - protein, 7 aa, Artificial Sequence
  source: /note="Description of Artificial Sequence: Synthetic peptide"
VPLSQLN

SEQ ID NO: 13112 - protein, 7 aa, Artificial Sequence
  source: /note="Description of Artificial Sequence: Synthetic peptide"
VPLSVTV

SEQ ID NO: 13113 - protein, 7 aa, Artificial Sequence
  source: /note="Description of Artificial Sequence: Synthetic peptide"
VPLYSGS

SEQ ID NO: 13114 - protein, 7 aa, Artificial Sequence
  source: /note="Description of Artificial Sequence: Synthetic peptide"
VPMQTVL

SEQ ID NO: 13115 - protein, 7 aa, Artificial Sequence
  source: /note="Description of Artificial Sequence: Synthetic peptide"
VPMSGAP

SEQ ID NO: 13116 - protein, 7 aa, Artificial Sequence
  source: /note="Description of Artificial Sequence: Synthetic peptide"
VPMSRPS

SEQ ID NO: 13117 - protein, 7 aa, Artificial Sequence
  source: /note="Description of Artificial Sequence: Synthetic peptide"
VPNDRLQ

SEQ ID NO: 13118 - protein, 7 aa, Artificial Sequence
  source: /note="Description of Artificial Sequence: Synthetic peptide"
VPNHSTG

SEQ ID NO: 13119 - protein, 7 aa, Artificial Sequence
  source: /note="Description of Artificial Sequence: Synthetic peptide"
VPNLEDD

SEQ ID NO: 13120 - protein, 7 aa, Artificial Sequence
  source: /note="Description of Artificial Sequence: Synthetic peptide"
VPPAARS

SEQ ID NO: 13121 - protein, 7 aa, Artificial Sequence
  source: /note="Description of Artificial Sequence: Synthetic peptide"
VPPAIHA

SEQ ID NO: 13122 - protein, 7 aa, Artificial Sequence
  source: /note="Description of Artificial Sequence: Synthetic peptide"
VPPISPS

SEQ ID NO: 13123 - protein, 7 aa, Artificial Sequence
  source: /note="Description of Artificial Sequence: Synthetic peptide"
VPPLRQE

SEQ ID NO: 13124 - protein, 7 aa, Artificial Sequence
  source: /note="Description of Artificial Sequence: Synthetic peptide"
VPPLTSS

SEQ ID NO: 13125 - protein, 7 aa, Artificial Sequence
  source: /note="Description of Artificial Sequence: Synthetic peptide"
VPPRHIN

SEQ ID NO: 13126 - protein, 7 aa, Artificial Sequence
  source: /note="Description of Artificial Sequence: Synthetic peptide"
VPPRQTH

SEQ ID NO: 13127 - protein, 7 aa, Artificial Sequence
  source: /note="Description of Artificial Sequence: Synthetic peptide"
VPPSRQS

SEQ ID NO: 13128 - protein, 7 aa, Artificial Sequence
  source: /note="Description of Artificial Sequence: Synthetic peptide"
VPPSVSR

SEQ ID NO: 13129 - protein, 7 aa, Artificial Sequence
  source: /note="Description of Artificial Sequence: Synthetic peptide"
VPPVQTP

SEQ ID NO: 13130 - protein, 7 aa, Artificial Sequence
  source: /note="Description of Artificial Sequence: Synthetic peptide"
VPPYSVP

SEQ ID NO: 13131 - protein, 7 aa, Artificial Sequence
  source: /note="Description of Artificial Sequence: Synthetic peptide"
VPQKVTV

SEQ ID NO: 13132 - protein, 7 aa, Artificial Sequence
  source: /note="Description of Artificial Sequence: Synthetic peptide"
VPRDYRY

SEQ ID NO: 13133 - protein, 7 aa, Artificial Sequence
  source: /note="Description of Artificial Sequence: Synthetic peptide"
VPRERVN

SEQ ID NO: 13134 - protein, 7 aa, Artificial Sequence
  source: /note="Description of Artificial Sequence: Synthetic peptide"
VPRGDAA

SEQ ID NO: 13135 - protein, 7 aa, Artificial Sequence
  source: /note="Description of Artificial Sequence: Synthetic peptide"
VPRNAPD

SEQ ID NO: 13136 - protein, 7 aa, Artificial Sequence
  source: /note="Description of Artificial Sequence: Synthetic peptide"
VPRNVTM

SEQ ID NO: 13137 - protein, 7 aa, Artificial Sequence
  source: /note="Description of Artificial Sequence: Synthetic peptide"
VPRSDTL

SEQ ID NO: 13138 - protein, 7 aa, Artificial Sequence
  source: /note="Description of Artificial Sequence: Synthetic peptide"
VPRSNVS

SEQ ID NO: 13139 - protein, 7 aa, Artificial Sequence
  source: /note="Description of Artificial Sequence: Synthetic peptide"
VPRSQLT

SEQ ID NO: 13140 - protein, 7 aa, Artificial Sequence
  source: /note="Description of Artificial Sequence: Synthetic peptide"
VPRSTNL

SEQ ID NO: 13141 - protein, 7 aa, Artificial Sequence
  source: /note="Description of Artificial Sequence: Synthetic peptide"
VPRTGSN

SEQ ID NO: 13142 - protein, 7 aa, Artificial Sequence
  source: /note="Description of Artificial Sequence: Synthetic peptide"
VPRTLTP

SEQ ID NO: 13143 - protein, 7 aa, Artificial Sequence
  source: /note="Description of Artificial Sequence: Synthetic peptide"
VPSATKI

SEQ ID NO: 13144 - protein, 7 aa, Artificial Sequence
  source: /note="Description of Artificial Sequence: Synthetic peptide"
VPSHIGA

SEQ ID NO: 13145 - protein, 7 aa, Artificial Sequence
  source: /note="Description of Artificial Sequence: Synthetic peptide"
VPSKPSY

SEQ ID NO: 13146 - protein, 7 aa, Artificial Sequence
  source: /note="Description of Artificial Sequence: Synthetic peptide"
VPSKTPF

SEQ ID NO: 13147 - protein, 7 aa, Artificial Sequence
  source: /note="Description of Artificial Sequence: Synthetic peptide"
VPSPSSS

SEQ ID NO: 13148 - protein, 7 aa, Artificial Sequence
  source: /note="Description of Artificial Sequence: Synthetic peptide"
VPSRSQN

SEQ ID NO: 13149 - protein, 7 aa, Artificial Sequence
  source: /note="Description of Artificial Sequence: Synthetic peptide"
VPSSISS

SEQ ID NO: 13150 - protein, 7 aa, Artificial Sequence
  source: /note="Description of Artificial Sequence: Synthetic peptide"
VPSVPGA

SEQ ID NO: 13151 - protein, 7 aa, Artificial Sequence
  source: /note="Description of Artificial Sequence: Synthetic peptide"
VPSVVRS

SEQ ID NO: 13152 - protein, 7 aa, Artificial Sequence
  source: /note="Description of Artificial Sequence: Synthetic peptide"
VPTALMS

SEQ ID NO: 13153 - protein, 7 aa, Artificial Sequence
  source: /note="Description of Artificial Sequence: Synthetic peptide"
VPTDYLS

SEQ ID NO: 13154 - protein, 7 aa, Artificial Sequence
  source: /note="Description of Artificial Sequence: Synthetic peptide"
VPTHYDP

SEQ ID NO: 13155 - protein, 7 aa, Artificial Sequence
  source: /note="Description of Artificial Sequence: Synthetic peptide"
VPTRGEF

SEQ ID NO: 13156 - protein, 7 aa, Artificial Sequence
  source: /note="Description of Artificial Sequence: Synthetic peptide"
VPTSAVK

SEQ ID NO: 13157 - protein, 7 aa, Artificial Sequence
  source: /note="Description of Artificial Sequence: Synthetic peptide"
VPTTSDF

SEQ ID NO: 13158 - protein, 7 aa, Artificial Sequence
  source: /note="Description of Artificial Sequence: Synthetic peptide"
VPTVSNI

SEQ ID NO: 13159 - protein, 7 aa, Artificial Sequence
  source: /note="Description of Artificial Sequence: Synthetic peptide"
VPVDILS

SEQ ID NO: 13160 - protein, 7 aa, Artificial Sequence
  source: /note="Description of Artificial Sequence: Synthetic peptide"
VPVKTSP

SEQ ID NO: 13161 - protein, 7 aa, Artificial Sequence
  source: /note="Description of Artificial Sequence: Synthetic peptide"
VPVKTTY

SEQ ID NO: 13162 - protein, 7 aa, Artificial Sequence
  source: /note="Description of Artificial Sequence: Synthetic peptide"
VPVNPRA

SEQ ID NO: 13163 - protein, 7 aa, Artificial Sequence
  source: /note="Description of Artificial Sequence: Synthetic peptide"
VPVSRAF

SEQ ID NO: 13164 - protein, 7 aa, Artificial Sequence
  source: /note="Description of Artificial Sequence: Synthetic peptide"
VPWDSPV

SEQ ID NO: 13165 - protein, 7 aa, Artificial Sequence
  source: /note="Description of Artificial Sequence: Synthetic peptide"
VPYGQVH

SEQ ID NO: 13166 - protein, 7 aa, Artificial Sequence
  source: /note="Description of Artificial Sequence: Synthetic peptide"
VPYSSLP

SEQ ID NO: 13167 - protein, 7 aa, Artificial Sequence
  source: /note="Description of Artificial Sequence: Synthetic peptide"
VPYTGMT

SEQ ID NO: 13168 - protein, 7 aa, Artificial Sequence
  source: /note="Description of Artificial Sequence: Synthetic peptide"
VPYTSTD

SEQ ID NO: 13169 - protein, 7 aa, Artificial Sequence
  source: /note="Description of Artificial Sequence: Synthetic peptide"
VQAGLRS

SEQ ID NO: 13170 - protein, 7 aa, Artificial Sequence
  source: /note="Description of Artificial Sequence: Synthetic peptide"
VQASSMK

SEQ ID NO: 13171 - protein, 7 aa, Artificial Sequence
  source: /note="Description of Artificial Sequence: Synthetic peptide"
VQDTDST

SEQ ID NO: 13172 - protein, 7 aa, Artificial Sequence
  source: /note="Description of Artificial Sequence: Synthetic peptide"
VQEPVVM

SEQ ID NO: 13173 - protein, 7 aa, Artificial Sequence
  source: /note="Description of Artificial Sequence: Synthetic peptide"
VQGGSNT

SEQ ID NO: 13174 - protein, 7 aa, Artificial Sequence
  source: /note="Description of Artificial Sequence: Synthetic peptide"
VQGRLAG

SEQ ID NO: 13175 - protein, 7 aa, Artificial Sequence
  source: /note="Description of Artificial Sequence: Synthetic peptide"
VQGRSGM

SEQ ID NO: 13176 - protein, 7 aa, Artificial Sequence
  source: /note="Description of Artificial Sequence: Synthetic peptide"
VQGSKPE

SEQ ID NO: 13177 - protein, 7 aa, Artificial Sequence
  source: /note="Description of Artificial Sequence: Synthetic peptide"
VQGTLPS

SEQ ID NO: 13178 - protein, 7 aa, Artificial Sequence
  source: /note="Description of Artificial Sequence: Synthetic peptide"
VQHLRAT

SEQ ID NO: 13179 - protein, 7 aa, Artificial Sequence
  source: /note="Description of Artificial Sequence: Synthetic peptide"
VQHPTRA

SEQ ID NO: 13180 - protein, 7 aa, Artificial Sequence
  source: /note="Description of Artificial Sequence: Synthetic peptide"
VQHRMEV

SEQ ID NO: 13181 - protein, 7 aa, Artificial Sequence
  source: /note="Description of Artificial Sequence: Synthetic peptide"
VQHVAEL

SEQ ID NO: 13182 - protein, 7 aa, Artificial Sequence
  source: /note="Description of Artificial Sequence: Synthetic peptide"
VQLASNS

SEQ ID NO: 13183 - protein, 7 aa, Artificial Sequence
  source: /note="Description of Artificial Sequence: Synthetic peptide"
VQLGGHV

SEQ ID NO: 13184 - protein, 7 aa, Artificial Sequence
  source: /note="Description of Artificial Sequence: Synthetic peptide"
VQMERHS

SEQ ID NO: 13185 - protein, 7 aa, Artificial Sequence
  source: /note="Description of Artificial Sequence: Synthetic peptide"
VQMMRDA

SEQ ID NO: 13186 - protein, 7 aa, Artificial Sequence
  source: /note="Description of Artificial Sequence: Synthetic peptide"
VQNVIGP

SEQ ID NO: 13187 - protein, 7 aa, Artificial Sequence
  source: /note="Description of Artificial Sequence: Synthetic peptide"
VQPEILA

SEQ ID NO: 13188 - protein, 7 aa, Artificial Sequence
  source: /note="Description of Artificial Sequence: Synthetic peptide"
VQPGPLV

SEQ ID NO: 13189 - protein, 7 aa, Artificial Sequence
  source: /note="Description of Artificial Sequence: Synthetic peptide"
VQPINQS

SEQ ID NO: 13190 - protein, 7 aa, Artificial Sequence
  source: /note="Description of Artificial Sequence: Synthetic peptide"
VQPLPAH

SEQ ID NO: 13191 - protein, 7 aa, Artificial Sequence
  source: /note="Description of Artificial Sequence: Synthetic peptide"
VQPMISN

SEQ ID NO: 13192 - protein, 7 aa, Artificial Sequence
  source: /note="Description of Artificial Sequence: Synthetic peptide"
VQPREYV

SEQ ID NO: 13193 - protein, 7 aa, Artificial Sequence
  source: /note="Description of Artificial Sequence: Synthetic peptide"
VQPVQSD

SEQ ID NO: 13194 - protein, 7 aa, Artificial Sequence
  source: /note="Description of Artificial Sequence: Synthetic peptide"
VQQKGLA

SEQ ID NO: 13195 - protein, 7 aa, Artificial Sequence
  source: /note="Description of Artificial Sequence: Synthetic peptide"
VQRMMGP

SEQ ID NO: 13196 - protein, 7 aa, Artificial Sequence
  source: /note="Description of Artificial Sequence: Synthetic peptide"
VQSDSTS

SEQ ID NO: 13197 - protein, 7 aa, Artificial Sequence
  source: /note="Description of Artificial Sequence: Synthetic peptide"
VQSIPSA

SEQ ID NO: 13198 - protein, 7 aa, Artificial Sequence
  source: /note="Description of Artificial Sequence: Synthetic peptide"
VQSLHTG

SEQ ID NO: 13199 - protein, 7 aa, Artificial Sequence
  source: /note="Description of Artificial Sequence: Synthetic peptide"
VQSPTWV

SEQ ID NO: 13200 - protein, 7 aa, Artificial Sequence
  source: /note="Description of Artificial Sequence: Synthetic peptide"
VQSRPDS

SEQ ID NO: 13201 - protein, 7 aa, Artificial Sequence
  source: /note="Description of Artificial Sequence: Synthetic peptide"
VQSSVTL

SEQ ID NO: 13202 - protein, 7 aa, Artificial Sequence
  source: /note="Description of Artificial Sequence: Synthetic peptide"
VQSTLLE

SEQ ID NO: 13203 - protein, 7 aa, Artificial Sequence
  source: /note="Description of Artificial Sequence: Synthetic peptide"
VQSVMPH

SEQ ID NO: 13204 - protein, 7 aa, Artificial Sequence
  source: /note="Description of Artificial Sequence: Synthetic peptide"
VQSVRIS

SEQ ID NO: 13205 - protein, 7 aa, Artificial Sequence
  source: /note="Description of Artificial Sequence: Synthetic peptide"
VQTAPAE

SEQ ID NO: 13206 - protein, 7 aa, Artificial Sequence
  source: /note="Description of Artificial Sequence: Synthetic peptide"
VQTHSAA

SEQ ID NO: 13207 - protein, 7 aa, Artificial Sequence
  source: /note="Description of Artificial Sequence: Synthetic peptide"
VQTQPYR

SEQ ID NO: 13208 - protein, 7 aa, Artificial Sequence
  source: /note="Description of Artificial Sequence: Synthetic peptide"
VQTSGYL

SEQ ID NO: 13209 - protein, 7 aa, Artificial Sequence
  source: /note="Description of Artificial Sequence: Synthetic peptide"
VQYMSKA

SEQ ID NO: 13210 - protein, 7 aa, Artificial Sequence
  source: /note="Description of Artificial Sequence: Synthetic peptide"
VQYPTES

SEQ ID NO: 13211 - protein, 7 aa, Artificial Sequence
  source: /note="Description of Artificial Sequence: Synthetic peptide"
VQYSGTP

SEQ ID NO: 13212 - protein, 7 aa, Artificial Sequence
  source: /note="Description of Artificial Sequence: Synthetic peptide"
VRADAAG

SEQ ID NO: 13213 - protein, 7 aa, Artificial Sequence
  source: /note="Description of Artificial Sequence: Synthetic peptide"
VRALPLS

SEQ ID NO: 13214 - protein, 7 aa, Artificial Sequence
  source: /note="Description of Artificial Sequence: Synthetic peptide"
VRANPST

SEQ ID NO: 13215 - protein, 7 aa, Artificial Sequence
  source: /note="Description of Artificial Sequence: Synthetic peptide"
VRAPPNA

SEQ ID NO: 13216 - protein, 7 aa, Artificial Sequence
  source: /note="Description of Artificial Sequence: Synthetic peptide"
VRAPPSL

SEQ ID NO: 13217 - protein, 7 aa, Artificial Sequence
  source: /note="Description of Artificial Sequence: Synthetic peptide"
VRAPREV

SEQ ID NO: 13218 - protein, 7 aa, Artificial Sequence
  source: /note="Description of Artificial Sequence: Synthetic peptide"
VRASNTL

SEQ ID NO: 13219 - protein, 7 aa, Artificial Sequence
  source: /note="Description of Artificial Sequence: Synthetic peptide"
VRATQTE

SEQ ID NO: 13220 - protein, 7 aa, Artificial Sequence
  source: /note="Description of Artificial Sequence: Synthetic peptide"
VRAVHPV

SEQ ID NO: 13221 - protein, 7 aa, Artificial Sequence
  source: /note="Description of Artificial Sequence: Synthetic peptide"
VRAVQIN

SEQ ID NO: 13222 - protein, 7 aa, Artificial Sequence
  source: /note="Description of Artificial Sequence: Synthetic peptide"
VRDAASC

SEQ ID NO: 13223 - protein, 7 aa, Artificial Sequence
  source: /note="Description of Artificial Sequence: Synthetic peptide"
VRDDVGW

SEQ ID NO: 13224 - protein, 7 aa, Artificial Sequence
  source: /note="Description of Artificial Sequence: Synthetic peptide"
VRDPVTS

SEQ ID NO: 13225 - protein, 7 aa, Artificial Sequence
  source: /note="Description of Artificial Sequence: Synthetic peptide"
VRDSMHS

SEQ ID NO: 13226 - protein, 7 aa, Artificial Sequence
  source: /note="Description of Artificial Sequence: Synthetic peptide"
VRDTMGQ

SEQ ID NO: 13227 - protein, 7 aa, Artificial Sequence
  source: /note="Description of Artificial Sequence: Synthetic peptide"
VRDWQTQ

SEQ ID NO: 13228 - protein, 7 aa, Artificial Sequence
  source: /note="Description of Artificial Sequence: Synthetic peptide"
VREATSL

SEQ ID NO: 13229 - protein, 7 aa, Artificial Sequence
  source: /note="Description of Artificial Sequence: Synthetic peptide"
VREVLGS

SEQ ID NO: 13230 - protein, 7 aa, Artificial Sequence
  source: /note="Description of Artificial Sequence: Synthetic peptide"
VRFNEQA

SEQ ID NO: 13231 - protein, 7 aa, Artificial Sequence
  source: /note="Description of Artificial Sequence: Synthetic peptide"
VRFNGQT

SEQ ID NO: 13232 - protein, 7 aa, Artificial Sequence
  source: /note="Description of Artificial Sequence: Synthetic peptide"
VRGALTP

SEQ ID NO: 13233 - protein, 7 aa, Artificial Sequence
  source: /note="Description of Artificial Sequence: Synthetic peptide"
VRGAVAA

SEQ ID NO: 13234 - protein, 7 aa, Artificial Sequence
  source: /note="Description of Artificial Sequence: Synthetic peptide"
VRGIVAP

SEQ ID NO: 13235 - protein, 7 aa, Artificial Sequence
  source: /note="Description of Artificial Sequence: Synthetic peptide"
VRGPEMT

SEQ ID NO: 13236 - protein, 7 aa, Artificial Sequence
  source: /note="Description of Artificial Sequence: Synthetic peptide"
VRGPGED

SEQ ID NO: 13237 - protein, 7 aa, Artificial Sequence
  source: /note="Description of Artificial Sequence: Synthetic peptide"
VRGPHDT

SEQ ID NO: 13238 - protein, 7 aa, Artificial Sequence
  source: /note="Description of Artificial Sequence: Synthetic peptide"
VRGSLSM

SEQ ID NO: 13239 - protein, 7 aa, Artificial Sequence
  source: /note="Description of Artificial Sequence: Synthetic peptide"
VRGSLTS

SEQ ID NO: 13240 - protein, 7 aa, Artificial Sequence
  source: /note="Description of Artificial Sequence: Synthetic peptide"
VRGSQYA

SEQ ID NO: 13241 - protein, 7 aa, Artificial Sequence
  source: /note="Description of Artificial Sequence: Synthetic peptide"
VRGSTQA

SEQ ID NO: 13242 - protein, 7 aa, Artificial Sequence
  source: /note="Description of Artificial Sequence: Synthetic peptide"
VRGVQLD

SEQ ID NO: 13243 - protein, 7 aa, Artificial Sequence
  source: /note="Description of Artificial Sequence: Synthetic peptide"
VRGVSDS

SEQ ID NO: 13244 - protein, 7 aa, Artificial Sequence
  source: /note="Description of Artificial Sequence: Synthetic peptide"
VRHIKLE

SEQ ID NO: 13245 - protein, 7 aa, Artificial Sequence
  source: /note="Description of Artificial Sequence: Synthetic peptide"
VRHPGPE

SEQ ID NO: 13246 - protein, 7 aa, Artificial Sequence
  source: /note="Description of Artificial Sequence: Synthetic peptide"
VRKDYHL

SEQ ID NO: 13247 - protein, 7 aa, Artificial Sequence
  source: /note="Description of Artificial Sequence: Synthetic peptide"
VRLDASI

SEQ ID NO: 13248 - protein, 7 aa, Artificial Sequence
  source: /note="Description of Artificial Sequence: Synthetic peptide"
VRLDMAA

SEQ ID NO: 13249 - protein, 7 aa, Artificial Sequence
  source: /note="Description of Artificial Sequence: Synthetic peptide"
VRLDREG

SEQ ID NO: 13250 - protein, 7 aa, Artificial Sequence
  source: /note="Description of Artificial Sequence: Synthetic peptide"
VRLPDTS

SEQ ID NO: 13251 - protein, 7 aa, Artificial Sequence
  source: /note="Description of Artificial Sequence: Synthetic peptide"
VRLQGGL

SEQ ID NO: 13252 - protein, 7 aa, Artificial Sequence
  source: /note="Description of Artificial Sequence: Synthetic peptide"
VRLSEVP

SEQ ID NO: 13253 - protein, 7 aa, Artificial Sequence
  source: /note="Description of Artificial Sequence: Synthetic peptide"
VRMLPGD

SEQ ID NO: 13254 - protein, 7 aa, Artificial Sequence
  source: /note="Description of Artificial Sequence: Synthetic peptide"
VRNAPGA

SEQ ID NO: 13255 - protein, 7 aa, Artificial Sequence
  source: /note="Description of Artificial Sequence: Synthetic peptide"
VRNASDL

SEQ ID NO: 13256 - protein, 7 aa, Artificial Sequence
  source: /note="Description of Artificial Sequence: Synthetic peptide"
VRNIPSM

SEQ ID NO: 13257 - protein, 7 aa, Artificial Sequence
  source: /note="Description of Artificial Sequence: Synthetic peptide"
VRNSAMN

SEQ ID NO: 13258 - protein, 7 aa, Artificial Sequence
  source: /note="Description of Artificial Sequence: Synthetic peptide"
VRPADQF

SEQ ID NO: 13259 - protein, 7 aa, Artificial Sequence
  source: /note="Description of Artificial Sequence: Synthetic peptide"
VRPEREN

SEQ ID NO: 13260 - protein, 7 aa, Artificial Sequence
  source: /note="Description of Artificial Sequence: Synthetic peptide"
VRPGKLI

SEQ ID NO: 13261 - protein, 7 aa, Artificial Sequence
  source: /note="Description of Artificial Sequence: Synthetic peptide"
VRPHMTV

SEQ ID NO: 13262 - protein, 7 aa, Artificial Sequence
  source: /note="Description of Artificial Sequence: Synthetic peptide"
VRPIPPN

SEQ ID NO: 13263 - protein, 7 aa, Artificial Sequence
  source: /note="Description of Artificial Sequence: Synthetic peptide"
VRPLSIG

SEQ ID NO: 13264 - protein, 7 aa, Artificial Sequence
  source: /note="Description of Artificial Sequence: Synthetic peptide"
VRPQTAY

SEQ ID NO: 13265 - protein, 7 aa, Artificial Sequence
  source: /note="Description of Artificial Sequence: Synthetic peptide"
VRPRDGM

SEQ ID NO: 13266 - protein, 7 aa, Artificial Sequence
  source: /note="Description of Artificial Sequence: Synthetic peptide"
VRPSILA

SEQ ID NO: 13267 - protein, 7 aa, Artificial Sequence
  source: /note="Description of Artificial Sequence: Synthetic peptide"
VRPSSLE

SEQ ID NO: 13268 - protein, 7 aa, Artificial Sequence
  source: /note="Description of Artificial Sequence: Synthetic peptide"
VRPTNSG

SEQ ID NO: 13269 - protein, 7 aa, Artificial Sequence
  source: /note="Description of Artificial Sequence: Synthetic peptide"
VRPTQNS

SEQ ID NO: 13270 - protein, 7 aa, Artificial Sequence
  source: /note="Description of Artificial Sequence: Synthetic peptide"
VRPVKEV

SEQ ID NO: 13271 - protein, 7 aa, Artificial Sequence
  source: /note="Description of Artificial Sequence: Synthetic peptide"
VRPVNGV

SEQ ID NO: 13272 - protein, 7 aa, Artificial Sequence
  source: /note="Description of Artificial Sequence: Synthetic peptide"
VRQEIIS

SEQ ID NO: 13273 - protein, 7 aa, Artificial Sequence
  source: /note="Description of Artificial Sequence: Synthetic peptide"
VRQMTPG

SEQ ID NO: 13274 - protein, 7 aa, Artificial Sequence
  source: /note="Description of Artificial Sequence: Synthetic peptide"
VRQPGVD

SEQ ID NO: 13275 - protein, 7 aa, Artificial Sequence
  source: /note="Description of Artificial Sequence: Synthetic peptide"
VRQSSNT

SEQ ID NO: 13276 - protein, 7 aa, Artificial Sequence
  source: /note="Description of Artificial Sequence: Synthetic peptide"
VRRVASE

SEQ ID NO: 13277 - protein, 7 aa, Artificial Sequence
  source: /note="Description of Artificial Sequence: Synthetic peptide"
VRSAISD

SEQ ID NO: 13278 - protein, 7 aa, Artificial Sequence
  source: /note="Description of Artificial Sequence: Synthetic peptide"
VRSATFH

SEQ ID NO: 13279 - protein, 7 aa, Artificial Sequence
  source: /note="Description of Artificial Sequence: Synthetic peptide"
VRSLEQS

SEQ ID NO: 13280 - protein, 7 aa, Artificial Sequence
  source: /note="Description of Artificial Sequence: Synthetic peptide"
VRSPSHC

SEQ ID NO: 13281 - protein, 7 aa, Artificial Sequence
  source: /note="Description of Artificial Sequence: Synthetic peptide"
VRSQLPP

SEQ ID NO: 13282 - protein, 7 aa, Artificial Sequence
  source: /note="Description of Artificial Sequence: Synthetic peptide"
VRSSLDR

SEQ ID NO: 13283 - protein, 7 aa, Artificial Sequence
  source: /note="Description of Artificial Sequence: Synthetic peptide"
VRSSTYT

SEQ ID NO: 13284 - protein, 7 aa, Artificial Sequence
  source: /note="Description of Artificial Sequence: Synthetic peptide"
VRSVAPE

SEQ ID NO: 13285 - protein, 7 aa, Artificial Sequence
  source: /note="Description of Artificial Sequence: Synthetic peptide"
VRTLPSP

SEQ ID NO: 13286 - protein, 7 aa, Artificial Sequence
  source: /note="Description of Artificial Sequence: Synthetic peptide"
VRTMPHS

SEQ ID NO: 13287 - protein, 7 aa, Artificial Sequence
  source: /note="Description of Artificial Sequence: Synthetic peptide"
VRTPFEA

SEQ ID NO: 13288 - protein, 7 aa, Artificial Sequence
  source: /note="Description of Artificial Sequence: Synthetic peptide"
VRTQGLS

SEQ ID NO: 13289 - protein, 7 aa, Artificial Sequence
  source: /note="Description of Artificial Sequence: Synthetic peptide"
VRTQGTN

SEQ ID NO: 13290 - protein, 7 aa, Artificial Sequence
  source: /note="Description of Artificial Sequence: Synthetic peptide"
VRTSIGT

SEQ ID NO: 13291 - protein, 7 aa, Artificial Sequence
  source: /note="Description of Artificial Sequence: Synthetic peptide"
VRTSPMS

SEQ ID NO: 13292 - protein, 7 aa, Artificial Sequence
  source: /note="Description of Artificial Sequence: Synthetic peptide"
VRVAVPM

SEQ ID NO: 13293 - protein, 7 aa, Artificial Sequence
  source: /note="Description of Artificial Sequence: Synthetic peptide"
VRVGTIG

SEQ ID NO: 13294 - protein, 7 aa, Artificial Sequence
  source: /note="Description of Artificial Sequence: Synthetic peptide"
VRVGTLN

SEQ ID NO: 13295 - protein, 7 aa, Artificial Sequence
  source: /note="Description of Artificial Sequence: Synthetic peptide"
VRVMGSS

SEQ ID NO: 13296 - protein, 7 aa, Artificial Sequence
  source: /note="Description of Artificial Sequence: Synthetic peptide"
VSAASLT

SEQ ID NO: 13297 - protein, 7 aa, Artificial Sequence
  source: /note="Description of Artificial Sequence: Synthetic peptide"
VSAATSF

SEQ ID NO: 13298 - protein, 7 aa, Artificial Sequence
  source: /note="Description of Artificial Sequence: Synthetic peptide"
VSAHTNS

SEQ ID NO: 13299 - protein, 7 aa, Artificial Sequence
  source: /note="Description of Artificial Sequence: Synthetic peptide"
VSAIMDV

SEQ ID NO: 13300 - protein, 7 aa, Artificial Sequence
  source: /note="Description of Artificial Sequence: Synthetic peptide"
VSAISAT

SEQ ID NO: 13301 - protein, 7 aa, Artificial Sequence
  source: /note="Description of Artificial Sequence: Synthetic peptide"
VSAPEDH

SEQ ID NO: 13302 - protein, 7 aa, Artificial Sequence
  source: /note="Description of Artificial Sequence: Synthetic peptide"
VSAQISI

SEQ ID NO: 13303 - protein, 7 aa, Artificial Sequence
  source: /note="Description of Artificial Sequence: Synthetic peptide"
VSARESV

SEQ ID NO: 13304 - protein, 7 aa, Artificial Sequence
  source: /note="Description of Artificial Sequence: Synthetic peptide"
VSARSFQ

SEQ ID NO: 13305 - protein, 7 aa, Artificial Sequence
  source: /note="Description of Artificial Sequence: Synthetic peptide"
VSASAGR

SEQ ID NO: 13306 - protein, 7 aa, Artificial Sequence
  source: /note="Description of Artificial Sequence: Synthetic peptide"
VSASLAL

SEQ ID NO: 13307 - protein, 7 aa, Artificial Sequence
  source: /note="Description of Artificial Sequence: Synthetic peptide"
VSASSSA

SEQ ID NO: 13308 - protein, 7 aa, Artificial Sequence
  source: /note="Description of Artificial Sequence: Synthetic peptide"
VSATHVQ

SEQ ID NO: 13309 - protein, 7 aa, Artificial Sequence
  source: /note="Description of Artificial Sequence: Synthetic peptide"
VSATTSV

SEQ ID NO: 13310 - protein, 7 aa, Artificial Sequence
  source: /note="Description of Artificial Sequence: Synthetic peptide"
VSDDKSS

SEQ ID NO: 13311 - protein, 7 aa, Artificial Sequence
  source: /note="Description of Artificial Sequence: Synthetic peptide"
VSDGNKL

SEQ ID NO: 13312 - protein, 7 aa, Artificial Sequence
  source: /note="Description of Artificial Sequence: Synthetic peptide"
VSDNLWS

SEQ ID NO: 13313 - protein, 7 aa, Artificial Sequence
  source: /note="Description of Artificial Sequence: Synthetic peptide"
VSDSYQW

SEQ ID NO: 13314 - protein, 7 aa, Artificial Sequence
  source: /note="Description of Artificial Sequence: Synthetic peptide"
VSDVAFY

SEQ ID NO: 13315 - protein, 7 aa, Artificial Sequence
  source: /note="Description of Artificial Sequence: Synthetic peptide"
VSDVTSD

SEQ ID NO: 13316 - protein, 7 aa, Artificial Sequence
  source: /note="Description of Artificial Sequence: Synthetic peptide"
VSDYLTQ

SEQ ID NO: 13317 - protein, 7 aa, Artificial Sequence
  source: /note="Description of Artificial Sequence: Synthetic peptide"
VSFPYEE

SEQ ID NO: 13318 - protein, 7 aa, Artificial Sequence
  source: /note="Description of Artificial Sequence: Synthetic peptide"
VSFQPLG

SEQ ID NO: 13319 - protein, 7 aa, Artificial Sequence
  source: /note="Description of Artificial Sequence: Synthetic peptide"
VSGFNQH

SEQ ID NO: 13320 - protein, 7 aa, Artificial Sequence
  source: /note="Description of Artificial Sequence: Synthetic peptide"
VSGPNHY

SEQ ID NO: 13321 - protein, 7 aa, Artificial Sequence
  source: /note="Description of Artificial Sequence: Synthetic peptide"
VSGSLQY

SEQ ID NO: 13322 - protein, 7 aa, Artificial Sequence
  source: /note="Description of Artificial Sequence: Synthetic peptide"
VSGSTRT

SEQ ID NO: 13323 - protein, 7 aa, Artificial Sequence
  source: /note="Description of Artificial Sequence: Synthetic peptide"
VSHATHQ

SEQ ID NO: 13324 - protein, 7 aa, Artificial Sequence
  source: /note="Description of Artificial Sequence: Synthetic peptide"
VSHGMNM

SEQ ID NO: 13325 - protein, 7 aa, Artificial Sequence
  source: /note="Description of Artificial Sequence: Synthetic peptide"
VSHGMSS

SEQ ID NO: 13326 - protein, 7 aa, Artificial Sequence
  source: /note="Description of Artificial Sequence: Synthetic peptide"
VSHPNAP

SEQ ID NO: 13327 - protein, 7 aa, Artificial Sequence
  source: /note="Description of Artificial Sequence: Synthetic peptide"
VSHTMQE

SEQ ID NO: 13328 - protein, 7 aa, Artificial Sequence
  source: /note="Description of Artificial Sequence: Synthetic peptide"
VSIAGAS

SEQ ID NO: 13329 - protein, 7 aa, Artificial Sequence
  source: /note="Description of Artificial Sequence: Synthetic peptide"
VSISIPS

SEQ ID NO: 13330 - protein, 7 aa, Artificial Sequence
  source: /note="Description of Artificial Sequence: Synthetic peptide"
VSISMPP

SEQ ID NO: 13331 - protein, 7 aa, Artificial Sequence
  source: /note="Description of Artificial Sequence: Synthetic peptide"
VSKEMIL

SEQ ID NO: 13332 - protein, 7 aa, Artificial Sequence
  source: /note="Description of Artificial Sequence: Synthetic peptide"
VSKPTNS

SEQ ID NO: 13333 - protein, 7 aa, Artificial Sequence
  source: /note="Description of Artificial Sequence: Synthetic peptide"
VSKSISS

SEQ ID NO: 13334 - protein, 7 aa, Artificial Sequence
  source: /note="Description of Artificial Sequence: Synthetic peptide"
VSLGYPD

SEQ ID NO: 13335 - protein, 7 aa, Artificial Sequence
  source: /note="Description of Artificial Sequence: Synthetic peptide"
VSLLPTS

SEQ ID NO: 13336 - protein, 7 aa, Artificial Sequence
  source: /note="Description of Artificial Sequence: Synthetic peptide"
VSLLTSK

SEQ ID NO: 13337 - protein, 7 aa, Artificial Sequence
  source: /note="Description of Artificial Sequence: Synthetic peptide"
VSLPQER

SEQ ID NO: 13338 - protein, 7 aa, Artificial Sequence
  source: /note="Description of Artificial Sequence: Synthetic peptide"
VSLQGID

SEQ ID NO: 13339 - protein, 7 aa, Artificial Sequence
  source: /note="Description of Artificial Sequence: Synthetic peptide"
VSLRAPT

SEQ ID NO: 13340 - protein, 7 aa, Artificial Sequence
  source: /note="Description of Artificial Sequence: Synthetic peptide"
VSLRHTA

SEQ ID NO: 13341 - protein, 7 aa, Artificial Sequence
  source: /note="Description of Artificial Sequence: Synthetic peptide"
VSLSPIS

SEQ ID NO: 13342 - protein, 7 aa, Artificial Sequence
  source: /note="Description of Artificial Sequence: Synthetic peptide"
VSLSTTA

SEQ ID NO: 13343 - protein, 7 aa, Artificial Sequence
  source: /note="Description of Artificial Sequence: Synthetic peptide"
VSLTLSS

SEQ ID NO: 13344 - protein, 7 aa, Artificial Sequence
  source: /note="Description of Artificial Sequence: Synthetic peptide"
VSMGRPL

SEQ ID NO: 13345 - protein, 7 aa, Artificial Sequence
  source: /note="Description of Artificial Sequence: Synthetic peptide"
VSMHLEP

SEQ ID NO: 13346 - protein, 7 aa, Artificial Sequence
  source: /note="Description of Artificial Sequence: Synthetic peptide"
VSMKNLH

SEQ ID NO: 13347 - protein, 7 aa, Artificial Sequence
  source: /note="Description of Artificial Sequence: Synthetic peptide"
VSMMEPE

SEQ ID NO: 13348 - protein, 7 aa, Artificial Sequence
  source: /note="Description of Artificial Sequence: Synthetic peptide"
VSMPSRS

SEQ ID NO: 13349 - protein, 7 aa, Artificial Sequence
  source: /note="Description of Artificial Sequence: Synthetic peptide"
VSNAARM

SEQ ID NO: 13350 - protein, 7 aa, Artificial Sequence
  source: /note="Description of Artificial Sequence: Synthetic peptide"
VSNFQNP

SEQ ID NO: 13351 - protein, 7 aa, Artificial Sequence
  source: /note="Description of Artificial Sequence: Synthetic peptide"
VSNISSP

SEQ ID NO: 13352 - protein, 7 aa, Artificial Sequence
  source: /note="Description of Artificial Sequence: Synthetic peptide"
VSNMQFA

SEQ ID NO: 13353 - protein, 7 aa, Artificial Sequence
  source: /note="Description of Artificial Sequence: Synthetic peptide"
VSNPDLM

SEQ ID NO: 13354 - protein, 7 aa, Artificial Sequence
  source: /note="Description of Artificial Sequence: Synthetic peptide"
VSNPQVS

SEQ ID NO: 13355 - protein, 7 aa, Artificial Sequence
  source: /note="Description of Artificial Sequence: Synthetic peptide"
VSNQAGY

SEQ ID NO: 13356 - protein, 7 aa, Artificial Sequence
  source: /note="Description of Artificial Sequence: Synthetic peptide"
VSNQKQV

SEQ ID NO: 13357 - protein, 7 aa, Artificial Sequence
  source: /note="Description of Artificial Sequence: Synthetic peptide"
VSNRSTQ

SEQ ID NO: 13358 - protein, 7 aa, Artificial Sequence
  source: /note="Description of Artificial Sequence: Synthetic peptide"
VSNSMAH

SEQ ID NO: 13359 - protein, 7 aa, Artificial Sequence
  source: /note="Description of Artificial Sequence: Synthetic peptide"
VSNTLLV

SEQ ID NO: 13360 - protein, 7 aa, Artificial Sequence
  source: /note="Description of Artificial Sequence: Synthetic peptide"
VSPAFHK

SEQ ID NO: 13361 - protein, 7 aa, Artificial Sequence
  source: /note="Description of Artificial Sequence: Synthetic peptide"
VSPAWHG

SEQ ID NO: 13362 - protein, 7 aa, Artificial Sequence
  source: /note="Description of Artificial Sequence: Synthetic peptide"
VSPEEDR

SEQ ID NO: 13363 - protein, 7 aa, Artificial Sequence
  source: /note="Description of Artificial Sequence: Synthetic peptide"
VSPEPLR

SEQ ID NO: 13364 - protein, 7 aa, Artificial Sequence
  source: /note="Description of Artificial Sequence: Synthetic peptide"
VSPGNPA

SEQ ID NO: 13365 - protein, 7 aa, Artificial Sequence
  source: /note="Description of Artificial Sequence: Synthetic peptide"
VSPHPVH

SEQ ID NO: 13366 - protein, 7 aa, Artificial Sequence
  source: /note="Description of Artificial Sequence: Synthetic peptide"
VSPLLPS

SEQ ID NO: 13367 - protein, 7 aa, Artificial Sequence
  source: /note="Description of Artificial Sequence: Synthetic peptide"
VSPLNTS

SEQ ID NO: 13368 - protein, 7 aa, Artificial Sequence
  source: /note="Description of Artificial Sequence: Synthetic peptide"
VSPMTEI

SEQ ID NO: 13369 - protein, 7 aa, Artificial Sequence
  source: /note="Description of Artificial Sequence: Synthetic peptide"
VSPRPGQ

SEQ ID NO: 13370 - protein, 7 aa, Artificial Sequence
  source: /note="Description of Artificial Sequence: Synthetic peptide"
VSPSNRG

SEQ ID NO: 13371 - protein, 7 aa, Artificial Sequence
  source: /note="Description of Artificial Sequence: Synthetic peptide"
VSPSSAL

SEQ ID NO: 13372 - protein, 7 aa, Artificial Sequence
  source: /note="Description of Artificial Sequence: Synthetic peptide"
VSPTQHF

SEQ ID NO: 13373 - protein, 7 aa, Artificial Sequence
  source: /note="Description of Artificial Sequence: Synthetic peptide"
VSPTYSL

SEQ ID NO: 13374 - protein, 7 aa, Artificial Sequence
  source: /note="Description of Artificial Sequence: Synthetic peptide"
VSPVYTS

SEQ ID NO: 13375 - protein, 7 aa, Artificial Sequence
  source: /note="Description of Artificial Sequence: Synthetic peptide"
VSPYPRD

SEQ ID NO: 13376 - protein, 7 aa, Artificial Sequence
  source: /note="Description of Artificial Sequence: Synthetic peptide"
VSQLGSP

SEQ ID NO: 13377 - protein, 7 aa, Artificial Sequence
  source: /note="Description of Artificial Sequence: Synthetic peptide"
VSQLTQV

SEQ ID NO: 13378 - protein, 7 aa, Artificial Sequence
  source: /note="Description of Artificial Sequence: Synthetic peptide"
VSQPSYG

SEQ ID NO: 13379 - protein, 7 aa, Artificial Sequence
  source: /note="Description of Artificial Sequence: Synthetic peptide"
VSQSYTN

SEQ ID NO: 13380 - protein, 7 aa, Artificial Sequence
  source: /note="Description of Artificial Sequence: Synthetic peptide"
VSQVKQG

SEQ ID NO: 13381 - protein, 7 aa, Artificial Sequence
  source: /note="Description of Artificial Sequence: Synthetic peptide"
VSRATPN

SEQ ID NO: 13382 - protein, 7 aa, Artificial Sequence
  source: /note="Description of Artificial Sequence: Synthetic peptide"
VSREINS

SEQ ID NO: 13383 - protein, 7 aa, Artificial Sequence
  source: /note="Description of Artificial Sequence: Synthetic peptide"
VSRQDSL

SEQ ID NO: 13384 - protein, 7 aa, Artificial Sequence
  source: /note="Description of Artificial Sequence: Synthetic peptide"
VSRSGNS

SEQ ID NO: 13385 - protein, 7 aa, Artificial Sequence
  source: /note="Description of Artificial Sequence: Synthetic peptide"
VSRTMDT

SEQ ID NO: 13386 - protein, 7 aa, Artificial Sequence
  source: /note="Description of Artificial Sequence: Synthetic peptide"
VSRVELA

SEQ ID NO: 13387 - protein, 7 aa, Artificial Sequence
  source: /note="Description of Artificial Sequence: Synthetic peptide"
VSSAHSI

SEQ ID NO: 13388 - protein, 7 aa, Artificial Sequence
  source: /note="Description of Artificial Sequence: Synthetic peptide"
VSSAHTS

SEQ ID NO: 13389 - protein, 7 aa, Artificial Sequence
  source: /note="Description of Artificial Sequence: Synthetic peptide"
VSSAISY

SEQ ID NO: 13390 - protein, 7 aa, Artificial Sequence
  source: /note="Description of Artificial Sequence: Synthetic peptide"
VSSARGT

SEQ ID NO: 13391 - protein, 7 aa, Artificial Sequence
  source: /note="Description of Artificial Sequence: Synthetic peptide"
VSSASPM

SEQ ID NO: 13392 - protein, 7 aa, Artificial Sequence
  source: /note="Description of Artificial Sequence: Synthetic peptide"
VSSDRLL

SEQ ID NO: 13393 - protein, 7 aa, Artificial Sequence
  source: /note="Description of Artificial Sequence: Synthetic peptide"
VSSDYSN

SEQ ID NO: 13394 - protein, 7 aa, Artificial Sequence
  source: /note="Description of Artificial Sequence: Synthetic peptide"
VSSFLED

SEQ ID NO: 13395 - protein, 7 aa, Artificial Sequence
  source: /note="Description of Artificial Sequence: Synthetic peptide"
VSSLELA

SEQ ID NO: 13396 - protein, 7 aa, Artificial Sequence
  source: /note="Description of Artificial Sequence: Synthetic peptide"
VSSLKTY

SEQ ID NO: 13397 - protein, 7 aa, Artificial Sequence
  source: /note="Description of Artificial Sequence: Synthetic peptide"
VSSLRGP

SEQ ID NO: 13398 - protein, 7 aa, Artificial Sequence
  source: /note="Description of Artificial Sequence: Synthetic peptide"
VSSLSSL

SEQ ID NO: 13399 - protein, 7 aa, Artificial Sequence
  source: /note="Description of Artificial Sequence: Synthetic peptide"
VSSMLDA

SEQ ID NO: 13400 - protein, 7 aa, Artificial Sequence
  source: /note="Description of Artificial Sequence: Synthetic peptide"
VSSMNIV

SEQ ID NO: 13401 - protein, 7 aa, Artificial Sequence
  source: /note="Description of Artificial Sequence: Synthetic peptide"
VSSMPVP

SEQ ID NO: 13402 - protein, 7 aa, Artificial Sequence
  source: /note="Description of Artificial Sequence: Synthetic peptide"
VSSNSFA

SEQ ID NO: 13403 - protein, 7 aa, Artificial Sequence
  source: /note="Description of Artificial Sequence: Synthetic peptide"
VSSPDSN

SEQ ID NO: 13404 - protein, 7 aa, Artificial Sequence
  source: /note="Description of Artificial Sequence: Synthetic peptide"
VSSPLSG

SEQ ID NO: 13405 - protein, 7 aa, Artificial Sequence
  source: /note="Description of Artificial Sequence: Synthetic peptide"
VSSPPDL

SEQ ID NO: 13406 - protein, 7 aa, Artificial Sequence
  source: /note="Description of Artificial Sequence: Synthetic peptide"
VSSPREH

SEQ ID NO: 13407 - protein, 7 aa, Artificial Sequence
  source: /note="Description of Artificial Sequence: Synthetic peptide"
VSSQNVF

SEQ ID NO: 13408 - protein, 7 aa, Artificial Sequence
  source: /note="Description of Artificial Sequence: Synthetic peptide"
VSSQRNG

SEQ ID NO: 13409 - protein, 7 aa, Artificial Sequence
  source: /note="Description of Artificial Sequence: Synthetic peptide"
VSSRYHA

SEQ ID NO: 13410 - protein, 7 aa, Artificial Sequence
  source: /note="Description of Artificial Sequence: Synthetic peptide"
VSSSGMT

SEQ ID NO: 13411 - protein, 7 aa, Artificial Sequence
  source: /note="Description of Artificial Sequence: Synthetic peptide"
VSSSLMS

SEQ ID NO: 13412 - protein, 7 aa, Artificial Sequence
  source: /note="Description of Artificial Sequence: Synthetic peptide"
VSSSQMP

SEQ ID NO: 13413 - protein, 7 aa, Artificial Sequence
  source: /note="Description of Artificial Sequence: Synthetic peptide"
VSSSVLR

SEQ ID NO: 13414 - protein, 7 aa, Artificial Sequence
  source: /note="Description of Artificial Sequence: Synthetic peptide"
VSSTIVM

SEQ ID NO: 13415 - protein, 7 aa, Artificial Sequence
  source: /note="Description of Artificial Sequence: Synthetic peptide"
VSSVVSG

SEQ ID NO: 13416 - protein, 7 aa, Artificial Sequence
  source: /note="Description of Artificial Sequence: Synthetic peptide"
VSTAHQS

SEQ ID NO: 13417 - protein, 7 aa, Artificial Sequence
  source: /note="Description of Artificial Sequence: Synthetic peptide"
VSTFGPT

SEQ ID NO: 13418 - protein, 7 aa, Artificial Sequence
  source: /note="Description of Artificial Sequence: Synthetic peptide"
VSTGLTK

SEQ ID NO: 13419 - protein, 7 aa, Artificial Sequence
  source: /note="Description of Artificial Sequence: Synthetic peptide"
VSTGYAV

SEQ ID NO: 13420 - protein, 7 aa, Artificial Sequence
  source: /note="Description of Artificial Sequence: Synthetic peptide"
VSTIAFE

SEQ ID NO: 13421 - protein, 7 aa, Artificial Sequence
  source: /note="Description of Artificial Sequence: Synthetic peptide"
VSTISSL

SEQ ID NO: 13422 - protein, 7 aa, Artificial Sequence
  source: /note="Description of Artificial Sequence: Synthetic peptide"
VSTLQAG

SEQ ID NO: 13423 - protein, 7 aa, Artificial Sequence
  source: /note="Description of Artificial Sequence: Synthetic peptide"
VSTMRSP

SEQ ID NO: 13424 - protein, 7 aa, Artificial Sequence
  source: /note="Description of Artificial Sequence: Synthetic peptide"
VSTPNNK

SEQ ID NO: 13425 - protein, 7 aa, Artificial Sequence
  source: /note="Description of Artificial Sequence: Synthetic peptide"
VSTQTYK

SEQ ID NO: 13426 - protein, 7 aa, Artificial Sequence
  source: /note="Description of Artificial Sequence: Synthetic peptide"
VSTRQLL

SEQ ID NO: 13427 - protein, 7 aa, Artificial Sequence
  source: /note="Description of Artificial Sequence: Synthetic peptide"
VSTSVLR

SEQ ID NO: 13428 - protein, 7 aa, Artificial Sequence
  source: /note="Description of Artificial Sequence: Synthetic peptide"
VSTTFKV

SEQ ID NO: 13429 - protein, 7 aa, Artificial Sequence
  source: /note="Description of Artificial Sequence: Synthetic peptide"
VSVKVHD

SEQ ID NO: 13430 - protein, 7 aa, Artificial Sequence
  source: /note="Description of Artificial Sequence: Synthetic peptide"
VSVQSSR

SEQ ID NO: 13431 - protein, 7 aa, Artificial Sequence
  source: /note="Description of Artificial Sequence: Synthetic peptide"
VSVSTHH

SEQ ID NO: 13432 - protein, 7 aa, Artificial Sequence
  source: /note="Description of Artificial Sequence: Synthetic peptide"
VSVSVGE

SEQ ID NO: 13433 - protein, 7 aa, Artificial Sequence
  source: /note="Description of Artificial Sequence: Synthetic peptide"
VSVTAGG

SEQ ID NO: 13434 - protein, 7 aa, Artificial Sequence
  source: /note="Description of Artificial Sequence: Synthetic peptide"
VSVTSAG

SEQ ID NO: 13435 - protein, 7 aa, Artificial Sequence
  source: /note="Description of Artificial Sequence: Synthetic peptide"
VSYAMEN

SEQ ID NO: 13436 - protein, 7 aa, Artificial Sequence
  source: /note="Description of Artificial Sequence: Synthetic peptide"
VSYPAQA

SEQ ID NO: 13437 - protein, 7 aa, Artificial Sequence
  source: /note="Description of Artificial Sequence: Synthetic peptide"
VTAGPMR

SEQ ID NO: 13438 - protein, 7 aa, Artificial Sequence
  source: /note="Description of Artificial Sequence: Synthetic peptide"
VTALTIA

SEQ ID NO: 13439 - protein, 7 aa, Artificial Sequence
  source: /note="Description of Artificial Sequence: Synthetic peptide"
VTALVKD

SEQ ID NO: 13440 - protein, 7 aa, Artificial Sequence
  source: /note="Description of Artificial Sequence: Synthetic peptide"
VTANLPQ

SEQ ID NO: 13441 - protein, 7 aa, Artificial Sequence
  source: /note="Description of Artificial Sequence: Synthetic peptide"
VTANVLP

SEQ ID NO: 13442 - protein, 7 aa, Artificial Sequence
  source: /note="Description of Artificial Sequence: Synthetic peptide"
VTAPVTG

SEQ ID NO: 13443 - protein, 7 aa, Artificial Sequence
  source: /note="Description of Artificial Sequence: Synthetic peptide"
VTAQSSV

SEQ ID NO: 13444 - protein, 7 aa, Artificial Sequence
  source: /note="Description of Artificial Sequence: Synthetic peptide"
VTARSLA

SEQ ID NO: 13445 - protein, 7 aa, Artificial Sequence
  source: /note="Description of Artificial Sequence: Synthetic peptide"
VTASHRV

SEQ ID NO: 13446 - protein, 7 aa, Artificial Sequence
  source: /note="Description of Artificial Sequence: Synthetic peptide"
VTDAVTT

SEQ ID NO: 13447 - protein, 7 aa, Artificial Sequence
  source: /note="Description of Artificial Sequence: Synthetic peptide"
VTDNVRN

SEQ ID NO: 13448 - protein, 7 aa, Artificial Sequence
  source: /note="Description of Artificial Sequence: Synthetic peptide"
VTDSTDD

SEQ ID NO: 13449 - protein, 7 aa, Artificial Sequence
  source: /note="Description of Artificial Sequence: Synthetic peptide"
VTDTRER

SEQ ID NO: 13450 - protein, 7 aa, Artificial Sequence
  source: /note="Description of Artificial Sequence: Synthetic peptide"
VTEARSA

SEQ ID NO: 13451 - protein, 7 aa, Artificial Sequence
  source: /note="Description of Artificial Sequence: Synthetic peptide"
VTEESDM

SEQ ID NO: 13452 - protein, 7 aa, Artificial Sequence
  source: /note="Description of Artificial Sequence: Synthetic peptide"
VTEESNT

SEQ ID NO: 13453 - protein, 7 aa, Artificial Sequence
  source: /note="Description of Artificial Sequence: Synthetic peptide"
VTEHLKN

SEQ ID NO: 13454 - protein, 7 aa, Artificial Sequence
  source: /note="Description of Artificial Sequence: Synthetic peptide"
VTERMTL

SEQ ID NO: 13455 - protein, 7 aa, Artificial Sequence
  source: /note="Description of Artificial Sequence: Synthetic peptide"
VTFSSSG

SEQ ID NO: 13456 - protein, 7 aa, Artificial Sequence
  source: /note="Description of Artificial Sequence: Synthetic peptide"
VTGARLA

SEQ ID NO: 13457 - protein, 7 aa, Artificial Sequence
  source: /note="Description of Artificial Sequence: Synthetic peptide"
VTGHAIL

SEQ ID NO: 13458 - protein, 7 aa, Artificial Sequence
  source: /note="Description of Artificial Sequence: Synthetic peptide"
VTGKPSL

SEQ ID NO: 13459 - protein, 7 aa, Artificial Sequence
  source: /note="Description of Artificial Sequence: Synthetic peptide"
VTGPGLR

SEQ ID NO: 13460 - protein, 7 aa, Artificial Sequence
  source: /note="Description of Artificial Sequence: Synthetic peptide"
VTGTRTV

SEQ ID NO: 13461 - protein, 7 aa, Artificial Sequence
  source: /note="Description of Artificial Sequence: Synthetic peptide"
VTHLMQG

SEQ ID NO: 13462 - protein, 7 aa, Artificial Sequence
  source: /note="Description of Artificial Sequence: Synthetic peptide"
VTHPNLS

SEQ ID NO: 13463 - protein, 7 aa, Artificial Sequence
  source: /note="Description of Artificial Sequence: Synthetic peptide"
VTHTEFP

SEQ ID NO: 13464 - protein, 7 aa, Artificial Sequence
  source: /note="Description of Artificial Sequence: Synthetic peptide"
VTHTGHK

SEQ ID NO: 13465 - protein, 7 aa, Artificial Sequence
  source: /note="Description of Artificial Sequence: Synthetic peptide"
VTHYSSV

SEQ ID NO: 13466 - protein, 7 aa, Artificial Sequence
  source: /note="Description of Artificial Sequence: Synthetic peptide"
VTIDDYP

SEQ ID NO: 13467 - protein, 7 aa, Artificial Sequence
  source: /note="Description of Artificial Sequence: Synthetic peptide"
VTKASAP

SEQ ID NO: 13468 - protein, 7 aa, Artificial Sequence
  source: /note="Description of Artificial Sequence: Synthetic peptide"
VTLKPLS

SEQ ID NO: 13469 - protein, 7 aa, Artificial Sequence
  source: /note="Description of Artificial Sequence: Synthetic peptide"
VTLLASR

SEQ ID NO: 13470 - protein, 7 aa, Artificial Sequence
  source: /note="Description of Artificial Sequence: Synthetic peptide"
VTLPLTR

SEQ ID NO: 13471 - protein, 7 aa, Artificial Sequence
  source: /note="Description of Artificial Sequence: Synthetic peptide"
VTLQRPG

SEQ ID NO: 13472 - protein, 7 aa, Artificial Sequence
  source: /note="Description of Artificial Sequence: Synthetic peptide"
VTLSAEG

SEQ ID NO: 13473 - protein, 7 aa, Artificial Sequence
  source: /note="Description of Artificial Sequence: Synthetic peptide"
VTLSDRL

SEQ ID NO: 13474 - protein, 7 aa, Artificial Sequence
  source: /note="Description of Artificial Sequence: Synthetic peptide"
VTMSTIR

SEQ ID NO: 13475 - protein, 7 aa, Artificial Sequence
  source: /note="Description of Artificial Sequence: Synthetic peptide"
VTNRVHP

SEQ ID NO: 13476 - protein, 7 aa, Artificial Sequence
  source: /note="Description of Artificial Sequence: Synthetic peptide"
VTPDLRH

SEQ ID NO: 13477 - protein, 7 aa, Artificial Sequence
  source: /note="Description of Artificial Sequence: Synthetic peptide"
VTPDSLK

SEQ ID NO: 13478 - protein, 7 aa, Artificial Sequence
  source: /note="Description of Artificial Sequence: Synthetic peptide"
VTPDYRN

SEQ ID NO: 13479 - protein, 7 aa, Artificial Sequence
  source: /note="Description of Artificial Sequence: Synthetic peptide"
VTPGLAY

SEQ ID NO: 13480 - protein, 7 aa, Artificial Sequence
  source: /note="Description of Artificial Sequence: Synthetic peptide"
VTPLLTA

SEQ ID NO: 13481 - protein, 7 aa, Artificial Sequence
  source: /note="Description of Artificial Sequence: Synthetic peptide"
VTPQTNF

SEQ ID NO: 13482 - protein, 7 aa, Artificial Sequence
  source: /note="Description of Artificial Sequence: Synthetic peptide"
VTPVGKT

SEQ ID NO: 13483 - protein, 7 aa, Artificial Sequence
  source: /note="Description of Artificial Sequence: Synthetic peptide"
VTQHTST

SEQ ID NO: 13484 - protein, 7 aa, Artificial Sequence
  source: /note="Description of Artificial Sequence: Synthetic peptide"
VTQILRT

SEQ ID NO: 13485 - protein, 7 aa, Artificial Sequence
  source: /note="Description of Artificial Sequence: Synthetic peptide"
VTQPHAS

SEQ ID NO: 13486 - protein, 7 aa, Artificial Sequence
  source: /note="Description of Artificial Sequence: Synthetic peptide"
VTRALHD

SEQ ID NO: 13487 - protein, 7 aa, Artificial Sequence
  source: /note="Description of Artificial Sequence: Synthetic peptide"
VTRMESA

SEQ ID NO: 13488 - protein, 7 aa, Artificial Sequence
  source: /note="Description of Artificial Sequence: Synthetic peptide"
VTSALVR

SEQ ID NO: 13489 - protein, 7 aa, Artificial Sequence
  source: /note="Description of Artificial Sequence: Synthetic peptide"
VTSAMQG

SEQ ID NO: 13490 - protein, 7 aa, Artificial Sequence
  source: /note="Description of Artificial Sequence: Synthetic peptide"
VTSASTH

SEQ ID NO: 13491 - protein, 7 aa, Artificial Sequence
  source: /note="Description of Artificial Sequence: Synthetic peptide"
VTSFVAP

SEQ ID NO: 13492 - protein, 7 aa, Artificial Sequence
  source: /note="Description of Artificial Sequence: Synthetic peptide"
VTSHTGE

SEQ ID NO: 13493 - protein, 7 aa, Artificial Sequence
  source: /note="Description of Artificial Sequence: Synthetic peptide"
VTSPTFE

SEQ ID NO: 13494 - protein, 7 aa, Artificial Sequence
  source: /note="Description of Artificial Sequence: Synthetic peptide"
VTSRSAV

SEQ ID NO: 13495 - protein, 7 aa, Artificial Sequence
  source: /note="Description of Artificial Sequence: Synthetic peptide"
VTSSTQL

SEQ ID NO: 13496 - protein, 7 aa, Artificial Sequence
  source: /note="Description of Artificial Sequence: Synthetic peptide"
VTSTSTN

SEQ ID NO: 13497 - protein, 7 aa, Artificial Sequence
  source: /note="Description of Artificial Sequence: Synthetic peptide"
VTSVSPI

SEQ ID NO: 13498 - protein, 7 aa, Artificial Sequence
  source: /note="Description of Artificial Sequence: Synthetic peptide"
VTTATGI

SEQ ID NO: 13499 - protein, 7 aa, Artificial Sequence
  source: /note="Description of Artificial Sequence: Synthetic peptide"
VTTEPRF

SEQ ID NO: 13500 - protein, 7 aa, Artificial Sequence
  source: /note="Description of Artificial Sequence: Synthetic peptide"
VTTIRAH

SEQ ID NO: 13501 - protein, 7 aa, Artificial Sequence
  source: /note="Description of Artificial Sequence: Synthetic peptide"
VTTKQTC

SEQ ID NO: 13502 - protein, 7 aa, Artificial Sequence
  source: /note="Description of Artificial Sequence: Synthetic peptide"
VTTNGPI

SEQ ID NO: 13503 - protein, 7 aa, Artificial Sequence
  source: /note="Description of Artificial Sequence: Synthetic peptide"
VTTQFES

SEQ ID NO: 13504 - protein, 7 aa, Artificial Sequence
  source: /note="Description of Artificial Sequence: Synthetic peptide"
VTTRPYP

SEQ ID NO: 13505 - protein, 7 aa, Artificial Sequence
  source: /note="Description of Artificial Sequence: Synthetic peptide"
VTTSRYL

SEQ ID NO: 13506 - protein, 7 aa, Artificial Sequence
  source: /note="Description of Artificial Sequence: Synthetic peptide"
VTTSTSR

SEQ ID NO: 13507 - protein, 7 aa, Artificial Sequence
  source: /note="Description of Artificial Sequence: Synthetic peptide"
VTTTQIT

SEQ ID NO: 13508 - protein, 7 aa, Artificial Sequence
  source: /note="Description of Artificial Sequence: Synthetic peptide"
VTTVILD

SEQ ID NO: 13509 - protein, 7 aa, Artificial Sequence
  source: /note="Description of Artificial Sequence: Synthetic peptide"
VTVHSHF

SEQ ID NO: 13510 - protein, 7 aa, Artificial Sequence
  source: /note="Description of Artificial Sequence: Synthetic peptide"
VTVPLPS

SEQ ID NO: 13511 - protein, 7 aa, Artificial Sequence
  source: /note="Description of Artificial Sequence: Synthetic peptide"
VTVQMNV

SEQ ID NO: 13512 - protein, 7 aa, Artificial Sequence
  source: /note="Description of Artificial Sequence: Synthetic peptide"
VTVRGSI

SEQ ID NO: 13513 - protein, 7 aa, Artificial Sequence
  source: /note="Description of Artificial Sequence: Synthetic peptide"
VTVTGTI

SEQ ID NO: 13514 - protein, 7 aa, Artificial Sequence
  source: /note="Description of Artificial Sequence: Synthetic peptide"
VTYSPLG

SEQ ID NO: 13515 - protein, 7 aa, Artificial Sequence
  source: /note="Description of Artificial Sequence: Synthetic peptide"
VVAGRSS

SEQ ID NO: 13516 - protein, 7 aa, Artificial Sequence
  source: /note="Description of Artificial Sequence: Synthetic peptide"
VVAQPGH

SEQ ID NO: 13517 - protein, 7 aa, Artificial Sequence
  source: /note="Description of Artificial Sequence: Synthetic peptide"
VVATTLN

SEQ ID NO: 13518 - protein, 7 aa, Artificial Sequence
  source: /note="Description of Artificial Sequence: Synthetic peptide"
VVDSPRA

SEQ ID NO: 13519 - protein, 7 aa, Artificial Sequence
  source: /note="Description of Artificial Sequence: Synthetic peptide"
VVDVPLR

SEQ ID NO: 13520 - protein, 7 aa, Artificial Sequence
  source: /note="Description of Artificial Sequence: Synthetic peptide"
VVETFEP

SEQ ID NO: 13521 - protein, 7 aa, Artificial Sequence
  source: /note="Description of Artificial Sequence: Synthetic peptide"
VVGDGTI

SEQ ID NO: 13522 - protein, 7 aa, Artificial Sequence
  source: /note="Description of Artificial Sequence: Synthetic peptide"
VVGDQAD

SEQ ID NO: 13523 - protein, 7 aa, Artificial Sequence
  source: /note="Description of Artificial Sequence: Synthetic peptide"
VVGGQLL

SEQ ID NO: 13524 - protein, 7 aa, Artificial Sequence
  source: /note="Description of Artificial Sequence: Synthetic peptide"
VVGIRGE

SEQ ID NO: 13525 - protein, 7 aa, Artificial Sequence
  source: /note="Description of Artificial Sequence: Synthetic peptide"
VVGMGTG

SEQ ID NO: 13526 - protein, 7 aa, Artificial Sequence
  source: /note="Description of Artificial Sequence: Synthetic peptide"
VVGPSLP

SEQ ID NO: 13527 - protein, 7 aa, Artificial Sequence
  source: /note="Description of Artificial Sequence: Synthetic peptide"
VVGRQER

SEQ ID NO: 13528 - protein, 7 aa, Artificial Sequence
  source: /note="Description of Artificial Sequence: Synthetic peptide"
VVGRSNP

SEQ ID NO: 13529 - protein, 7 aa, Artificial Sequence
  source: /note="Description of Artificial Sequence: Synthetic peptide"
VVGSPTR

SEQ ID NO: 13530 - protein, 7 aa, Artificial Sequence
  source: /note="Description of Artificial Sequence: Synthetic peptide"
VVGSSGP

SEQ ID NO: 13531 - protein, 7 aa, Artificial Sequence
  source: /note="Description of Artificial Sequence: Synthetic peptide"
VVHPPGQ

SEQ ID NO: 13532 - protein, 7 aa, Artificial Sequence
  source: /note="Description of Artificial Sequence: Synthetic peptide"
VVHPSPG

SEQ ID NO: 13533 - protein, 7 aa, Artificial Sequence
  source: /note="Description of Artificial Sequence: Synthetic peptide"
VVHSNEP

SEQ ID NO: 13534 - protein, 7 aa, Artificial Sequence
  source: /note="Description of Artificial Sequence: Synthetic peptide"
VVHTMSV

SEQ ID NO: 13535 - protein, 7 aa, Artificial Sequence
  source: /note="Description of Artificial Sequence: Synthetic peptide"
VVHVSHP

SEQ ID NO: 13536 - protein, 7 aa, Artificial Sequence
  source: /note="Description of Artificial Sequence: Synthetic peptide"
VVHVVNS

SEQ ID NO: 13537 - protein, 7 aa, Artificial Sequence
  source: /note="Description of Artificial Sequence: Synthetic peptide"
VVIDQNG

SEQ ID NO: 13538 - protein, 7 aa, Artificial Sequence
  source: /note="Description of Artificial Sequence: Synthetic peptide"
VVLKDNH

SEQ ID NO: 13539 - protein, 7 aa, Artificial Sequence
  source: /note="Description of Artificial Sequence: Synthetic peptide"
VVMRDDP

SEQ ID NO: 13540 - protein, 7 aa, Artificial Sequence
  source: /note="Description of Artificial Sequence: Synthetic peptide"
VVNASAN

SEQ ID NO: 13541 - protein, 7 aa, Artificial Sequence
  source: /note="Description of Artificial Sequence: Synthetic peptide"
VVNNLRI

SEQ ID NO: 13542 - protein, 7 aa, Artificial Sequence
  source: /note="Description of Artificial Sequence: Synthetic peptide"
VVNQAQL

SEQ ID NO: 13543 - protein, 7 aa, Artificial Sequence
  source: /note="Description of Artificial Sequence: Synthetic peptide"
VVNTKAN

SEQ ID NO: 13544 - protein, 7 aa, Artificial Sequence
  source: /note="Description of Artificial Sequence: Synthetic peptide"
VVNTKSG

SEQ ID NO: 13545 - protein, 7 aa, Artificial Sequence
  source: /note="Description of Artificial Sequence: Synthetic peptide"
VVPALKM

SEQ ID NO: 13546 - protein, 7 aa, Artificial Sequence
  source: /note="Description of Artificial Sequence: Synthetic peptide"
VVPHSRQ

SEQ ID NO: 13547 - protein, 7 aa, Artificial Sequence
  source: /note="Description of Artificial Sequence: Synthetic peptide"
VVPLGPV

SEQ ID NO: 13548 - protein, 7 aa, Artificial Sequence
  source: /note="Description of Artificial Sequence: Synthetic peptide"
VVPRDPG

SEQ ID NO: 13549 - protein, 7 aa, Artificial Sequence
  source: /note="Description of Artificial Sequence: Synthetic peptide"
VVPRMTG

SEQ ID NO: 13550 - protein, 7 aa, Artificial Sequence
  source: /note="Description of Artificial Sequence: Synthetic peptide"
VVPRPGM

SEQ ID NO: 13551 - protein, 7 aa, Artificial Sequence
  source: /note="Description of Artificial Sequence: Synthetic peptide"
VVPRSGD

SEQ ID NO: 13552 - protein, 7 aa, Artificial Sequence
  source: /note="Description of Artificial Sequence: Synthetic peptide"
VVPTDDG

SEQ ID NO: 13553 - protein, 7 aa, Artificial Sequence
  source: /note="Description of Artificial Sequence: Synthetic peptide"
VVQPRAG

SEQ ID NO: 13554 - protein, 7 aa, Artificial Sequence
  source: /note="Description of Artificial Sequence: Synthetic peptide"
VVQQSSL

SEQ ID NO: 13555 - protein, 7 aa, Artificial Sequence
  source: /note="Description of Artificial Sequence: Synthetic peptide"
VVRASSV

SEQ ID NO: 13556 - protein, 7 aa, Artificial Sequence
  source: /note="Description of Artificial Sequence: Synthetic peptide"
VVRGSSV

SEQ ID NO: 13557 - protein, 7 aa, Artificial Sequence
  source: /note="Description of Artificial Sequence: Synthetic peptide"
VVRNAGG

SEQ ID NO: 13558 - protein, 7 aa, Artificial Sequence
  source: /note="Description of Artificial Sequence: Synthetic peptide"
VVRNAIN

SEQ ID NO: 13559 - protein, 7 aa, Artificial Sequence
  source: /note="Description of Artificial Sequence: Synthetic peptide"
VVRPSGL

SEQ ID NO: 13560 - protein, 7 aa, Artificial Sequence
  source: /note="Description of Artificial Sequence: Synthetic peptide"
VVSAPLV

SEQ ID NO: 13561 - protein, 7 aa, Artificial Sequence
  source: /note="Description of Artificial Sequence: Synthetic peptide"
VVSFDRA

SEQ ID NO: 13562 - protein, 7 aa, Artificial Sequence
  source: /note="Description of Artificial Sequence: Synthetic peptide"
VVSGSRP

SEQ ID NO: 13563 - protein, 7 aa, Artificial Sequence
  source: /note="Description of Artificial Sequence: Synthetic peptide"
VVSHISV

SEQ ID NO: 13564 - protein, 7 aa, Artificial Sequence
  source: /note="Description of Artificial Sequence: Synthetic peptide"
VVSIARV

SEQ ID NO: 13565 - protein, 7 aa, Artificial Sequence
  source: /note="Description of Artificial Sequence: Synthetic peptide"
VVSQPSP

SEQ ID NO: 13566 - protein, 7 aa, Artificial Sequence
  source: /note="Description of Artificial Sequence: Synthetic peptide"
VVSRPIS

SEQ ID NO: 13567 - protein, 7 aa, Artificial Sequence
  source: /note="Description of Artificial Sequence: Synthetic peptide"
VVSRSYN

SEQ ID NO: 13568 - protein, 7 aa, Artificial Sequence
  source: /note="Description of Artificial Sequence: Synthetic peptide"
VVSRVAS

SEQ ID NO: 13569 - protein, 7 aa, Artificial Sequence
  source: /note="Description of Artificial Sequence: Synthetic peptide"
VVSSGSL

SEQ ID NO: 13570 - protein, 7 aa, Artificial Sequence
  source: /note="Description of Artificial Sequence: Synthetic peptide"
VVSSSLM

SEQ ID NO: 13571 - protein, 7 aa, Artificial Sequence
  source: /note="Description of Artificial Sequence: Synthetic peptide"
VVSTTLP

SEQ ID NO: 13572 - protein, 7 aa, Artificial Sequence
  source: /note="Description of Artificial Sequence: Synthetic peptide"
VVSVATS

SEQ ID NO: 13573 - protein, 7 aa, Artificial Sequence
  source: /note="Description of Artificial Sequence: Synthetic peptide"
VVTDSGG

SEQ ID NO: 13574 - protein, 7 aa, Artificial Sequence
  source: /note="Description of Artificial Sequence: Synthetic peptide"
VVTSASG

SEQ ID NO: 13575 - protein, 7 aa, Artificial Sequence
  source: /note="Description of Artificial Sequence: Synthetic peptide"
VVTTRIT

SEQ ID NO: 13576 - protein, 7 aa, Artificial Sequence
  source: /note="Description of Artificial Sequence: Synthetic peptide"
VVVAGSE

SEQ ID NO: 13577 - protein, 7 aa, Artificial Sequence
  source: /note="Description of Artificial Sequence: Synthetic peptide"
VWADDNV

SEQ ID NO: 13578 - protein, 7 aa, Artificial Sequence
  source: /note="Description of Artificial Sequence: Synthetic peptide"
VWARGSE

SEQ ID NO: 13579 - protein, 7 aa, Artificial Sequence
  source: /note="Description of Artificial Sequence: Synthetic peptide"
VWPASGT

SEQ ID NO: 13580 - protein, 7 aa, Artificial Sequence
  source: /note="Description of Artificial Sequence: Synthetic peptide"
VWQPSND

SEQ ID NO: 13581 - protein, 7 aa, Artificial Sequence
  source: /note="Description of Artificial Sequence: Synthetic peptide"
VWSGSSD

SEQ ID NO: 13582 - protein, 7 aa, Artificial Sequence
  source: /note="Description of Artificial Sequence: Synthetic peptide"
VWTHETS

SEQ ID NO: 13583 - protein, 7 aa, Artificial Sequence
  source: /note="Description of Artificial Sequence: Synthetic peptide"
VYAPEKR

SEQ ID NO: 13584 - protein, 7 aa, Artificial Sequence
  source: /note="Description of Artificial Sequence: Synthetic peptide"
VYATLPE

SEQ ID NO: 13585 - protein, 7 aa, Artificial Sequence
  source: /note="Description of Artificial Sequence: Synthetic peptide"
VYEPSKY

SEQ ID NO: 13586 - protein, 7 aa, Artificial Sequence
  source: /note="Description of Artificial Sequence: Synthetic peptide"
VYESNRF

SEQ ID NO: 13587 - protein, 7 aa, Artificial Sequence
  source: /note="Description of Artificial Sequence: Synthetic peptide"
VYGYSGS

SEQ ID NO: 13588 - protein, 7 aa, Artificial Sequence
  source: /note="Description of Artificial Sequence: Synthetic peptide"
VYHPNEF

SEQ ID NO: 13589 - protein, 7 aa, Artificial Sequence
  source: /note="Description of Artificial Sequence: Synthetic peptide"
VYIGRQE

SEQ ID NO: 13590 - protein, 7 aa, Artificial Sequence
  source: /note="Description of Artificial Sequence: Synthetic peptide"
VYKASNY

SEQ ID NO: 13591 - protein, 7 aa, Artificial Sequence
  source: /note="Description of Artificial Sequence: Synthetic peptide"
VYLKSST

SEQ ID NO: 13592 - protein, 7 aa, Artificial Sequence
  source: /note="Description of Artificial Sequence: Synthetic peptide"
VYNAGVD

SEQ ID NO: 13593 - protein, 7 aa, Artificial Sequence
  source: /note="Description of Artificial Sequence: Synthetic peptide"
VYNTSTA

SEQ ID NO: 13594 - protein, 7 aa, Artificial Sequence
  source: /note="Description of Artificial Sequence: Synthetic peptide"
VYPPSTT

SEQ ID NO: 13595 - protein, 7 aa, Artificial Sequence
  source: /note="Description of Artificial Sequence: Synthetic peptide"
VYPRDLT

SEQ ID NO: 13596 - protein, 7 aa, Artificial Sequence
  source: /note="Description of Artificial Sequence: Synthetic peptide"
VYRDSTP

SEQ ID NO: 13597 - protein, 7 aa, Artificial Sequence
  source: /note="Description of Artificial Sequence: Synthetic peptide"
VYRSHET

SEQ ID NO: 13598 - protein, 7 aa, Artificial Sequence
  source: /note="Description of Artificial Sequence: Synthetic peptide"
VYSLGGL

SEQ ID NO: 13599 - protein, 7 aa, Artificial Sequence
  source: /note="Description of Artificial Sequence: Synthetic peptide"
VYSNMTG

SEQ ID NO: 13600 - protein, 7 aa, Artificial Sequence
  source: /note="Description of Artificial Sequence: Synthetic peptide"
VYSQGAR

SEQ ID NO: 13601 - protein, 7 aa, Artificial Sequence
  source: /note="Description of Artificial Sequence: Synthetic peptide"
VYTAARA

SEQ ID NO: 13602 - protein, 7 aa, Artificial Sequence
  source: /note="Description of Artificial Sequence: Synthetic peptide"
VYTQNSP

SEQ ID NO: 13603 - protein, 7 aa, Artificial Sequence
  source: /note="Description of Artificial Sequence: Synthetic peptide"
VYTSSMH

SEQ ID NO: 13604 - protein, 7 aa, Artificial Sequence
  source: /note="Description of Artificial Sequence: Synthetic peptide"
VYYGKEP

SEQ ID NO: 13605 - protein, 7 aa, Artificial Sequence
  source: /note="Description of Artificial Sequence: Synthetic peptide"
WADKSHP

SEQ ID NO: 13606 - protein, 7 aa, Artificial Sequence
  source: /note="Description of Artificial Sequence: Synthetic peptide"
WADNSVN

SEQ ID NO: 13607 - protein, 7 aa, Artificial Sequence
  source: /note="Description of Artificial Sequence: Synthetic peptide"
WADTTTR

SEQ ID NO: 13608 - protein, 7 aa, Artificial Sequence
  source: /note="Description of Artificial Sequence: Synthetic peptide"
WAGAMPM

SEQ ID NO: 13609 - protein, 7 aa, Artificial Sequence
  source: /note="Description of Artificial Sequence: Synthetic peptide"
WAHKGLP

SEQ ID NO: 13610 - protein, 7 aa, Artificial Sequence
  source: /note="Description of Artificial Sequence: Synthetic peptide"
WAKSQLA

SEQ ID NO: 13611 - protein, 7 aa, Artificial Sequence
  source: /note="Description of Artificial Sequence: Synthetic peptide"
WAPRSPG

SEQ ID NO: 13612 - protein, 7 aa, Artificial Sequence
  source: /note="Description of Artificial Sequence: Synthetic peptide"
WASAERQ

SEQ ID NO: 13613 - protein, 7 aa, Artificial Sequence
  source: /note="Description of Artificial Sequence: Synthetic peptide"
WASGHQA

SEQ ID NO: 13614 - protein, 7 aa, Artificial Sequence
  source: /note="Description of Artificial Sequence: Synthetic peptide"
WASPIRG

SEQ ID NO: 13615 - protein, 7 aa, Artificial Sequence
  source: /note="Description of Artificial Sequence: Synthetic peptide"
WATELRG

SEQ ID NO: 13616 - protein, 7 aa, Artificial Sequence
  source: /note="Description of Artificial Sequence: Synthetic peptide"
WATGSSP

SEQ ID NO: 13617 - protein, 7 aa, Artificial Sequence
  source: /note="Description of Artificial Sequence: Synthetic peptide"
WCQRPGA

SEQ ID NO: 13618 - protein, 7 aa, Artificial Sequence
  source: /note="Description of Artificial Sequence: Synthetic peptide"
WDAAVTL

SEQ ID NO: 13619 - protein, 7 aa, Artificial Sequence
  source: /note="Description of Artificial Sequence: Synthetic peptide"
WDAFSTD

SEQ ID NO: 13620 - protein, 7 aa, Artificial Sequence
  source: /note="Description of Artificial Sequence: Synthetic peptide"
WDALEPV

SEQ ID NO: 13621 - protein, 7 aa, Artificial Sequence
  source: /note="Description of Artificial Sequence: Synthetic peptide"
WDAMTAP

SEQ ID NO: 13622 - protein, 7 aa, Artificial Sequence
  source: /note="Description of Artificial Sequence: Synthetic peptide"
WDATAPT

SEQ ID NO: 13623 - protein, 7 aa, Artificial Sequence
  source: /note="Description of Artificial Sequence: Synthetic peptide"
WDDGGTP

SEQ ID NO: 13624 - protein, 7 aa, Artificial Sequence
  source: /note="Description of Artificial Sequence: Synthetic peptide"
WDITKTF

SEQ ID NO: 13625 - protein, 7 aa, Artificial Sequence
  source: /note="Description of Artificial Sequence: Synthetic peptide"
WDKKPTI

SEQ ID NO: 13626 - protein, 7 aa, Artificial Sequence
  source: /note="Description of Artificial Sequence: Synthetic peptide"
WDPAYGS

SEQ ID NO: 13627 - protein, 7 aa, Artificial Sequence
  source: /note="Description of Artificial Sequence: Synthetic peptide"
WDPRNSQ

SEQ ID NO: 13628 - protein, 7 aa, Artificial Sequence
  source: /note="Description of Artificial Sequence: Synthetic peptide"
WDPSRTT

SEQ ID NO: 13629 - protein, 7 aa, Artificial Sequence
  source: /note="Description of Artificial Sequence: Synthetic peptide"
WDQLERA

SEQ ID NO: 13630 - protein, 7 aa, Artificial Sequence
  source: /note="Description of Artificial Sequence: Synthetic peptide"
WDQPHQA

SEQ ID NO: 13631 - protein, 7 aa, Artificial Sequence
  source: /note="Description of Artificial Sequence: Synthetic peptide"
WDRDAAL

SEQ ID NO: 13632 - protein, 7 aa, Artificial Sequence
  source: /note="Description of Artificial Sequence: Synthetic peptide"
WDSGSLG

SEQ ID NO: 13633 - protein, 7 aa, Artificial Sequence
  source: /note="Description of Artificial Sequence: Synthetic peptide"
WDSRHHV

SEQ ID NO: 13634 - protein, 7 aa, Artificial Sequence
  source: /note="Description of Artificial Sequence: Synthetic peptide"
WDTPGQS

SEQ ID NO: 13635 - protein, 7 aa, Artificial Sequence
  source: /note="Description of Artificial Sequence: Synthetic peptide"
WDTQFSS

SEQ ID NO: 13636 - protein, 7 aa, Artificial Sequence
  source: /note="Description of Artificial Sequence: Synthetic peptide"
WEAHWTP

SEQ ID NO: 13637 - protein, 7 aa, Artificial Sequence
  source: /note="Description of Artificial Sequence: Synthetic peptide"
WEGANPV

SEQ ID NO: 13638 - protein, 7 aa, Artificial Sequence
  source: /note="Description of Artificial Sequence: Synthetic peptide"
WEGSHPY

SEQ ID NO: 13639 - protein, 7 aa, Artificial Sequence
  source: /note="Description of Artificial Sequence: Synthetic peptide"
WEGSKDF

SEQ ID NO: 13640 - protein, 7 aa, Artificial Sequence
  source: /note="Description of Artificial Sequence: Synthetic peptide"
WEMTRVD

SEQ ID NO: 13641 - protein, 7 aa, Artificial Sequence
  source: /note="Description of Artificial Sequence: Synthetic peptide"
WERSRSA

SEQ ID NO: 13642 - protein, 7 aa, Artificial Sequence
  source: /note="Description of Artificial Sequence: Synthetic peptide"
WESGGGF

SEQ ID NO: 13643 - protein, 7 aa, Artificial Sequence
  source: /note="Description of Artificial Sequence: Synthetic peptide"
WFEDRLD

SEQ ID NO: 13644 - protein, 7 aa, Artificial Sequence
  source: /note="Description of Artificial Sequence: Synthetic peptide"
WFEKCKD

SEQ ID NO: 13645 - protein, 7 aa, Artificial Sequence
  source: /note="Description of Artificial Sequence: Synthetic peptide"
WFPSGHA

SEQ ID NO: 13646 - protein, 7 aa, Artificial Sequence
  source: /note="Description of Artificial Sequence: Synthetic peptide"
WGAALTP

SEQ ID NO: 13647 - protein, 7 aa, Artificial Sequence
  source: /note="Description of Artificial Sequence: Synthetic peptide"
WGARLDS

SEQ ID NO: 13648 - protein, 7 aa, Artificial Sequence
  source: /note="Description of Artificial Sequence: Synthetic peptide"
WGASQTS

SEQ ID NO: 13649 - protein, 7 aa, Artificial Sequence
  source: /note="Description of Artificial Sequence: Synthetic peptide"
WGGTSPG

SEQ ID NO: 13650 - protein, 7 aa, Artificial Sequence
  source: /note="Description of Artificial Sequence: Synthetic peptide"
WGHNNSP

SEQ ID NO: 13651 - protein, 7 aa, Artificial Sequence
  source: /note="Description of Artificial Sequence: Synthetic peptide"
WGHSSGV

SEQ ID NO: 13652 - protein, 7 aa, Artificial Sequence
  source: /note="Description of Artificial Sequence: Synthetic peptide"
WGLLHSA

SEQ ID NO: 13653 - protein, 7 aa, Artificial Sequence
  source: /note="Description of Artificial Sequence: Synthetic peptide"
WGLVTSP

SEQ ID NO: 13654 - protein, 7 aa, Artificial Sequence
  source: /note="Description of Artificial Sequence: Synthetic peptide"
WGNQQPR

SEQ ID NO: 13655 - protein, 7 aa, Artificial Sequence
  source: /note="Description of Artificial Sequence: Synthetic peptide"
WGNSHNT

SEQ ID NO: 13656 - protein, 7 aa, Artificial Sequence
  source: /note="Description of Artificial Sequence: Synthetic peptide"
WGPTTSH

SEQ ID NO: 13657 - protein, 7 aa, Artificial Sequence
  source: /note="Description of Artificial Sequence: Synthetic peptide"
WGSGAAG

SEQ ID NO: 13658 - protein, 7 aa, Artificial Sequence
  source: /note="Description of Artificial Sequence: Synthetic peptide"
WGSGAET

SEQ ID NO: 13659 - protein, 7 aa, Artificial Sequence
  source: /note="Description of Artificial Sequence: Synthetic peptide"
WGSSGQG

SEQ ID NO: 13660 - protein, 7 aa, Artificial Sequence
  source: /note="Description of Artificial Sequence: Synthetic peptide"
WGTQLAM

SEQ ID NO: 13661 - protein, 7 aa, Artificial Sequence
  source: /note="Description of Artificial Sequence: Synthetic peptide"
WGTSDKS

SEQ ID NO: 13662 - protein, 7 aa, Artificial Sequence
  source: /note="Description of Artificial Sequence: Synthetic peptide"
WGYLHVA

SEQ ID NO: 13663 - protein, 7 aa, Artificial Sequence
  source: /note="Description of Artificial Sequence: Synthetic peptide"
WHGTGLI

SEQ ID NO: 13664 - protein, 7 aa, Artificial Sequence
  source: /note="Description of Artificial Sequence: Synthetic peptide"
WHKSSSS

SEQ ID NO: 13665 - protein, 7 aa, Artificial Sequence
  source: /note="Description of Artificial Sequence: Synthetic peptide"
WHPSGSR

SEQ ID NO: 13666 - protein, 7 aa, Artificial Sequence
  source: /note="Description of Artificial Sequence: Synthetic peptide"
WHRTAQD

SEQ ID NO: 13667 - protein, 7 aa, Artificial Sequence
  source: /note="Description of Artificial Sequence: Synthetic peptide"
WHSAKLA

SEQ ID NO: 13668 - protein, 7 aa, Artificial Sequence
  source: /note="Description of Artificial Sequence: Synthetic peptide"
WHSLMEP

SEQ ID NO: 13669 - protein, 7 aa, Artificial Sequence
  source: /note="Description of Artificial Sequence: Synthetic peptide"
WHSRMYE

SEQ ID NO: 13670 - protein, 7 aa, Artificial Sequence
  source: /note="Description of Artificial Sequence: Synthetic peptide"
WHSSATQ

SEQ ID NO: 13671 - protein, 7 aa, Artificial Sequence
  source: /note="Description of Artificial Sequence: Synthetic peptide"
WHSSDLV

SEQ ID NO: 13672 - protein, 7 aa, Artificial Sequence
  source: /note="Description of Artificial Sequence: Synthetic peptide"
WIGNGGP

SEQ ID NO: 13673 - protein, 7 aa, Artificial Sequence
  source: /note="Description of Artificial Sequence: Synthetic peptide"
WIGQNTV

SEQ ID NO: 13674 - protein, 7 aa, Artificial Sequence
  source: /note="Description of Artificial Sequence: Synthetic peptide"
WIKEASS

SEQ ID NO: 13675 - protein, 7 aa, Artificial Sequence
  source: /note="Description of Artificial Sequence: Synthetic peptide"
WIPGAPS

SEQ ID NO: 13676 - protein, 7 aa, Artificial Sequence
  source: /note="Description of Artificial Sequence: Synthetic peptide"
WIPQQDV

SEQ ID NO: 13677 - protein, 7 aa, Artificial Sequence
  source: /note="Description of Artificial Sequence: Synthetic peptide"
WIPSGLS

SEQ ID NO: 13678 - protein, 7 aa, Artificial Sequence
  source: /note="Description of Artificial Sequence: Synthetic peptide"
WITTEPL

SEQ ID NO: 13679 - protein, 7 aa, Artificial Sequence
  source: /note="Description of Artificial Sequence: Synthetic peptide"
WKANLPS

SEQ ID NO: 13680 - protein, 7 aa, Artificial Sequence
  source: /note="Description of Artificial Sequence: Synthetic peptide"
WKDECQT

SEQ ID NO: 13681 - protein, 7 aa, Artificial Sequence
  source: /note="Description of Artificial Sequence: Synthetic peptide"
WKDSHYE

SEQ ID NO: 13682 - protein, 7 aa, Artificial Sequence
  source: /note="Description of Artificial Sequence: Synthetic peptide"
WKEHGAA

SEQ ID NO: 13683 - protein, 7 aa, Artificial Sequence
  source: /note="Description of Artificial Sequence: Synthetic peptide"
WKHSTQS

SEQ ID NO: 13684 - protein, 7 aa, Artificial Sequence
  source: /note="Description of Artificial Sequence: Synthetic peptide"
WKIMIAE

SEQ ID NO: 13685 - protein, 7 aa, Artificial Sequence
  source: /note="Description of Artificial Sequence: Synthetic peptide"
WKKNMDF

SEQ ID NO: 13686 - protein, 7 aa, Artificial Sequence
  source: /note="Description of Artificial Sequence: Synthetic peptide"
WKLNRDQ

SEQ ID NO: 13687 - protein, 7 aa, Artificial Sequence
  source: /note="Description of Artificial Sequence: Synthetic peptide"
WKNTSCG

SEQ ID NO: 13688 - protein, 7 aa, Artificial Sequence
  source: /note="Description of Artificial Sequence: Synthetic peptide"
WKPAVPQ

SEQ ID NO: 13689 - protein, 7 aa, Artificial Sequence
  source: /note="Description of Artificial Sequence: Synthetic peptide"
WKPEILP

SEQ ID NO: 13690 - protein, 7 aa, Artificial Sequence
  source: /note="Description of Artificial Sequence: Synthetic peptide"
WKPPLNP

SEQ ID NO: 13691 - protein, 7 aa, Artificial Sequence
  source: /note="Description of Artificial Sequence: Synthetic peptide"
WKQGSTG

SEQ ID NO: 13692 - protein, 7 aa, Artificial Sequence
  source: /note="Description of Artificial Sequence: Synthetic peptide"
WKSDSAS

SEQ ID NO: 13693 - protein, 7 aa, Artificial Sequence
  source: /note="Description of Artificial Sequence: Synthetic peptide"
WKSNTLT

SEQ ID NO: 13694 - protein, 7 aa, Artificial Sequence
  source: /note="Description of Artificial Sequence: Synthetic peptide"
WKSQIPL

SEQ ID NO: 13695 - protein, 7 aa, Artificial Sequence
  source: /note="Description of Artificial Sequence: Synthetic peptide"
WKSQLPN

SEQ ID NO: 13696 - protein, 7 aa, Artificial Sequence
  source: /note="Description of Artificial Sequence: Synthetic peptide"
WKSQMNP

SEQ ID NO: 13697 - protein, 7 aa, Artificial Sequence
  source: /note="Description of Artificial Sequence: Synthetic peptide"
WKSTDLT

SEQ ID NO: 13698 - protein, 7 aa, Artificial Sequence
  source: /note="Description of Artificial Sequence: Synthetic peptide"
WKVSTDT

SEQ ID NO: 13699 - protein, 7 aa, Artificial Sequence
  source: /note="Description of Artificial Sequence: Synthetic peptide"
WLADPSD

SEQ ID NO: 13700 - protein, 7 aa, Artificial Sequence
  source: /note="Description of Artificial Sequence: Synthetic peptide"
WLENSQS

SEQ ID NO: 13701 - protein, 7 aa, Artificial Sequence
  source: /note="Description of Artificial Sequence: Synthetic peptide"
WLESGTG

SEQ ID NO: 13702 - protein, 7 aa, Artificial Sequence
  source: /note="Description of Artificial Sequence: Synthetic peptide"
WLGRADA

SEQ ID NO: 13703 - protein, 7 aa, Artificial Sequence
  source: /note="Description of Artificial Sequence: Synthetic peptide"
WLHDTTS

SEQ ID NO: 13704 - protein, 7 aa, Artificial Sequence
  source: /note="Description of Artificial Sequence: Synthetic peptide"
WLHEQPN

SEQ ID NO: 13705 - protein, 7 aa, Artificial Sequence
  source: /note="Description of Artificial Sequence: Synthetic peptide"
WLHRSNA

SEQ ID NO: 13706 - protein, 7 aa, Artificial Sequence
  source: /note="Description of Artificial Sequence: Synthetic peptide"
WLKQTDN

SEQ ID NO: 13707 - protein, 7 aa, Artificial Sequence
  source: /note="Description of Artificial Sequence: Synthetic peptide"
WLLNQEE

SEQ ID NO: 13708 - protein, 7 aa, Artificial Sequence
  source: /note="Description of Artificial Sequence: Synthetic peptide"
WLNDSSR

SEQ ID NO: 13709 - protein, 7 aa, Artificial Sequence
  source: /note="Description of Artificial Sequence: Synthetic peptide"
WLPKLPH

SEQ ID NO: 13710 - protein, 7 aa, Artificial Sequence
  source: /note="Description of Artificial Sequence: Synthetic peptide"
WLPTQTE

SEQ ID NO: 13711 - protein, 7 aa, Artificial Sequence
  source: /note="Description of Artificial Sequence: Synthetic peptide"
WLRTPDA

SEQ ID NO: 13712 - protein, 7 aa, Artificial Sequence
  source: /note="Description of Artificial Sequence: Synthetic peptide"
WLTSLKM

SEQ ID NO: 13713 - protein, 7 aa, Artificial Sequence
  source: /note="Description of Artificial Sequence: Synthetic peptide"
WLTSPNV

SEQ ID NO: 13714 - protein, 7 aa, Artificial Sequence
  source: /note="Description of Artificial Sequence: Synthetic peptide"
WMAMRQD

SEQ ID NO: 13715 - protein, 7 aa, Artificial Sequence
  source: /note="Description of Artificial Sequence: Synthetic peptide"
WMLQETS

SEQ ID NO: 13716 - protein, 7 aa, Artificial Sequence
  source: /note="Description of Artificial Sequence: Synthetic peptide"
WMMESRP

SEQ ID NO: 13717 - protein, 7 aa, Artificial Sequence
  source: /note="Description of Artificial Sequence: Synthetic peptide"
WMQSANR

SEQ ID NO: 13718 - protein, 7 aa, Artificial Sequence
  source: /note="Description of Artificial Sequence: Synthetic peptide"
WMSRLPA

SEQ ID NO: 13719 - protein, 7 aa, Artificial Sequence
  source: /note="Description of Artificial Sequence: Synthetic peptide"
WNDVTAR

SEQ ID NO: 13720 - protein, 7 aa, Artificial Sequence
  source: /note="Description of Artificial Sequence: Synthetic peptide"
WNKSLLS

SEQ ID NO: 13721 - protein, 7 aa, Artificial Sequence
  source: /note="Description of Artificial Sequence: Synthetic peptide"
WNKTELD

SEQ ID NO: 13722 - protein, 7 aa, Artificial Sequence
  source: /note="Description of Artificial Sequence: Synthetic peptide"
WNLESTT

SEQ ID NO: 13723 - protein, 7 aa, Artificial Sequence
  source: /note="Description of Artificial Sequence: Synthetic peptide"
WNNPDQL

SEQ ID NO: 13724 - protein, 7 aa, Artificial Sequence
  source: /note="Description of Artificial Sequence: Synthetic peptide"
WNPPLPA

SEQ ID NO: 13725 - protein, 7 aa, Artificial Sequence
  source: /note="Description of Artificial Sequence: Synthetic peptide"
WNPRSSE

SEQ ID NO: 13726 - protein, 7 aa, Artificial Sequence
  source: /note="Description of Artificial Sequence: Synthetic peptide"
WNTQQGV

SEQ ID NO: 13727 - protein, 7 aa, Artificial Sequence
  source: /note="Description of Artificial Sequence: Synthetic peptide"
WNTTLPI

SEQ ID NO: 13728 - protein, 7 aa, Artificial Sequence
  source: /note="Description of Artificial Sequence: Synthetic peptide"
WNTVTIR

SEQ ID NO: 13729 - protein, 7 aa, Artificial Sequence
  source: /note="Description of Artificial Sequence: Synthetic peptide"
WPAKTVE

SEQ ID NO: 13730 - protein, 7 aa, Artificial Sequence
  source: /note="Description of Artificial Sequence: Synthetic peptide"
WPAQVSS

SEQ ID NO: 13731 - protein, 7 aa, Artificial Sequence
  source: /note="Description of Artificial Sequence: Synthetic peptide"
WPASVTD

SEQ ID NO: 13732 - protein, 7 aa, Artificial Sequence
  source: /note="Description of Artificial Sequence: Synthetic peptide"
WPEKRLT

SEQ ID NO: 13733 - protein, 7 aa, Artificial Sequence
  source: /note="Description of Artificial Sequence: Synthetic peptide"
WPESYST

SEQ ID NO: 13734 - protein, 7 aa, Artificial Sequence
  source: /note="Description of Artificial Sequence: Synthetic peptide"
WPGMSAG

SEQ ID NO: 13735 - protein, 7 aa, Artificial Sequence
  source: /note="Description of Artificial Sequence: Synthetic peptide"
WPGSSHV

SEQ ID NO: 13736 - protein, 7 aa, Artificial Sequence
  source: /note="Description of Artificial Sequence: Synthetic peptide"
WPNLVSG

SEQ ID NO: 13737 - protein, 7 aa, Artificial Sequence
  source: /note="Description of Artificial Sequence: Synthetic peptide"
WPPASTL

SEQ ID NO: 13738 - protein, 7 aa, Artificial Sequence
  source: /note="Description of Artificial Sequence: Synthetic peptide"
WPPAVSS

SEQ ID NO: 13739 - protein, 7 aa, Artificial Sequence
  source: /note="Description of Artificial Sequence: Synthetic peptide"
WPPSVNG

SEQ ID NO: 13740 - protein, 7 aa, Artificial Sequence
  source: /note="Description of Artificial Sequence: Synthetic peptide"
WPQSSSG

SEQ ID NO: 13741 - protein, 7 aa, Artificial Sequence
  source: /note="Description of Artificial Sequence: Synthetic peptide"
WPSMDGS

SEQ ID NO: 13742 - protein, 7 aa, Artificial Sequence
  source: /note="Description of Artificial Sequence: Synthetic peptide"
WPSSIQI

SEQ ID NO: 13743 - protein, 7 aa, Artificial Sequence
  source: /note="Description of Artificial Sequence: Synthetic peptide"
WPSSTLS

SEQ ID NO: 13744 - protein, 7 aa, Artificial Sequence
  source: /note="Description of Artificial Sequence: Synthetic peptide"
WPTIINR

SEQ ID NO: 13745 - protein, 7 aa, Artificial Sequence
  source: /note="Description of Artificial Sequence: Synthetic peptide"
WPTKSTP

SEQ ID NO: 13746 - protein, 7 aa, Artificial Sequence
  source: /note="Description of Artificial Sequence: Synthetic peptide"
WPTNSRP

SEQ ID NO: 13747 - protein, 7 aa, Artificial Sequence
  source: /note="Description of Artificial Sequence: Synthetic peptide"
WPTNTIP

SEQ ID NO: 13748 - protein, 7 aa, Artificial Sequence
  source: /note="Description of Artificial Sequence: Synthetic peptide"
WPVHHAA

SEQ ID NO: 13749 - protein, 7 aa, Artificial Sequence
  source: /note="Description of Artificial Sequence: Synthetic peptide"
WPVTSYG

SEQ ID NO: 13750 - protein, 7 aa, Artificial Sequence
  source: /note="Description of Artificial Sequence: Synthetic peptide"
WPYDPGR

SEQ ID NO: 13751 - protein, 7 aa, Artificial Sequence
  source: /note="Description of Artificial Sequence: Synthetic peptide"
WQGLTQG

SEQ ID NO: 13752 - protein, 7 aa, Artificial Sequence
  source: /note="Description of Artificial Sequence: Synthetic peptide"
WQLATQP

SEQ ID NO: 13753 - protein, 7 aa, Artificial Sequence
  source: /note="Description of Artificial Sequence: Synthetic peptide"
WQMLLSE

SEQ ID NO: 13754 - protein, 7 aa, Artificial Sequence
  source: /note="Description of Artificial Sequence: Synthetic peptide"
WQQLSAS

SEQ ID NO: 13755 - protein, 7 aa, Artificial Sequence
  source: /note="Description of Artificial Sequence: Synthetic peptide"
WQRSGDV

SEQ ID NO: 13756 - protein, 7 aa, Artificial Sequence
  source: /note="Description of Artificial Sequence: Synthetic peptide"
WQSQATM

SEQ ID NO: 13757 - protein, 7 aa, Artificial Sequence
  source: /note="Description of Artificial Sequence: Synthetic peptide"
WQTQSRS

SEQ ID NO: 13758 - protein, 7 aa, Artificial Sequence
  source: /note="Description of Artificial Sequence: Synthetic peptide"
WQYSHEP

SEQ ID NO: 13759 - protein, 7 aa, Artificial Sequence
  source: /note="Description of Artificial Sequence: Synthetic peptide"
WRAMLEE

SEQ ID NO: 13760 - protein, 7 aa, Artificial Sequence
  source: /note="Description of Artificial Sequence: Synthetic peptide"
WRAPGSA

SEQ ID NO: 13761 - protein, 7 aa, Artificial Sequence
  source: /note="Description of Artificial Sequence: Synthetic peptide"
WRDATCC

SEQ ID NO: 13762 - protein, 7 aa, Artificial Sequence
  source: /note="Description of Artificial Sequence: Synthetic peptide"
WRERYAA

SEQ ID NO: 13763 - protein, 7 aa, Artificial Sequence
  source: /note="Description of Artificial Sequence: Synthetic peptide"
WRGLDIE

SEQ ID NO: 13764 - protein, 7 aa, Artificial Sequence
  source: /note="Description of Artificial Sequence: Synthetic peptide"
WRHDYNL

SEQ ID NO: 13765 - protein, 7 aa, Artificial Sequence
  source: /note="Description of Artificial Sequence: Synthetic peptide"
WRHTEAI

SEQ ID NO: 13766 - protein, 7 aa, Artificial Sequence
  source: /note="Description of Artificial Sequence: Synthetic peptide"
WRITAES

SEQ ID NO: 13767 - protein, 7 aa, Artificial Sequence
  source: /note="Description of Artificial Sequence: Synthetic peptide"
WRPLVET

SEQ ID NO: 13768 - protein, 7 aa, Artificial Sequence
  source: /note="Description of Artificial Sequence: Synthetic peptide"
WRPNMAA

SEQ ID NO: 13769 - protein, 7 aa, Artificial Sequence
  source: /note="Description of Artificial Sequence: Synthetic peptide"
WRPNMSV

SEQ ID NO: 13770 - protein, 7 aa, Artificial Sequence
  source: /note="Description of Artificial Sequence: Synthetic peptide"
WRPQRPV

SEQ ID NO: 13771 - protein, 7 aa, Artificial Sequence
  source: /note="Description of Artificial Sequence: Synthetic peptide"
WRQETSV

SEQ ID NO: 13772 - protein, 7 aa, Artificial Sequence
  source: /note="Description of Artificial Sequence: Synthetic peptide"
WRRDASP

SEQ ID NO: 13773 - protein, 7 aa, Artificial Sequence
  source: /note="Description of Artificial Sequence: Synthetic peptide"
WRSASSA

SEQ ID NO: 13774 - protein, 7 aa, Artificial Sequence
  source: /note="Description of Artificial Sequence: Synthetic peptide"
WRSREIA

SEQ ID NO: 13775 - protein, 7 aa, Artificial Sequence
  source: /note="Description of Artificial Sequence: Synthetic peptide"
WRSSAEA

SEQ ID NO: 13776 - protein, 7 aa, Artificial Sequence
  source: /note="Description of Artificial Sequence: Synthetic peptide"
WSADPDT

SEQ ID NO: 13777 - protein, 7 aa, Artificial Sequence
  source: /note="Description of Artificial Sequence: Synthetic peptide"
WSASSHQ

SEQ ID NO: 13778 - protein, 7 aa, Artificial Sequence
  source: /note="Description of Artificial Sequence: Synthetic peptide"
WSAVGEV

SEQ ID NO: 13779 - protein, 7 aa, Artificial Sequence
  source: /note="Description of Artificial Sequence: Synthetic peptide"
WSDSTAV

SEQ ID NO: 13780 - protein, 7 aa, Artificial Sequence
  source: /note="Description of Artificial Sequence: Synthetic peptide"
WSGHPVA

SEQ ID NO: 13781 - protein, 7 aa, Artificial Sequence
  source: /note="Description of Artificial Sequence: Synthetic peptide"
WSGKANA

SEQ ID NO: 13782 - protein, 7 aa, Artificial Sequence
  source: /note="Description of Artificial Sequence: Synthetic peptide"
WSGPISL

SEQ ID NO: 13783 - protein, 7 aa, Artificial Sequence
  source: /note="Description of Artificial Sequence: Synthetic peptide"
WSHGPMP

SEQ ID NO: 13784 - protein, 7 aa, Artificial Sequence
  source: /note="Description of Artificial Sequence: Synthetic peptide"
WSHGSTT

SEQ ID NO: 13785 - protein, 7 aa, Artificial Sequence
  source: /note="Description of Artificial Sequence: Synthetic peptide"
WSKVPDR

SEQ ID NO: 13786 - protein, 7 aa, Artificial Sequence
  source: /note="Description of Artificial Sequence: Synthetic peptide"
WSLVHRE

SEQ ID NO: 13787 - protein, 7 aa, Artificial Sequence
  source: /note="Description of Artificial Sequence: Synthetic peptide"
WSNHAHA

SEQ ID NO: 13788 - protein, 7 aa, Artificial Sequence
  source: /note="Description of Artificial Sequence: Synthetic peptide"
WSPARET

SEQ ID NO: 13789 - protein, 7 aa, Artificial Sequence
  source: /note="Description of Artificial Sequence: Synthetic peptide"
WSPLYHA

SEQ ID NO: 13790 - protein, 7 aa, Artificial Sequence
  source: /note="Description of Artificial Sequence: Synthetic peptide"
WSPNSTP

SEQ ID NO: 13791 - protein, 7 aa, Artificial Sequence
  source: /note="Description of Artificial Sequence: Synthetic peptide"
WSPNVCP

SEQ ID NO: 13792 - protein, 7 aa, Artificial Sequence
  source: /note="Description of Artificial Sequence: Synthetic peptide"
WSPRNTL

SEQ ID NO: 13793 - protein, 7 aa, Artificial Sequence
  source: /note="Description of Artificial Sequence: Synthetic peptide"
WSPSEGK

SEQ ID NO: 13794 - protein, 7 aa, Artificial Sequence
  source: /note="Description of Artificial Sequence: Synthetic peptide"
WSPSQAY

SEQ ID NO: 13795 - protein, 7 aa, Artificial Sequence
  source: /note="Description of Artificial Sequence: Synthetic peptide"
WSPVVVR

SEQ ID NO: 13796 - protein, 7 aa, Artificial Sequence
  source: /note="Description of Artificial Sequence: Synthetic peptide"
WSRAAVD

SEQ ID NO: 13797 - protein, 7 aa, Artificial Sequence
  source: /note="Description of Artificial Sequence: Synthetic peptide"
WSRPAAD

SEQ ID NO: 13798 - protein, 7 aa, Artificial Sequence
  source: /note="Description of Artificial Sequence: Synthetic peptide"
WSRQDLP

SEQ ID NO: 13799 - protein, 7 aa, Artificial Sequence
  source: /note="Description of Artificial Sequence: Synthetic peptide"
WSSAYVS

SEQ ID NO: 13800 - protein, 7 aa, Artificial Sequence
  source: /note="Description of Artificial Sequence: Synthetic peptide"
WSSDAPE

SEQ ID NO: 13801 - protein, 7 aa, Artificial Sequence
  source: /note="Description of Artificial Sequence: Synthetic peptide"
WSSMSMH

SEQ ID NO: 13802 - protein, 7 aa, Artificial Sequence
  source: /note="Description of Artificial Sequence: Synthetic peptide"
WSTKLEG

SEQ ID NO: 13803 - protein, 7 aa, Artificial Sequence
  source: /note="Description of Artificial Sequence: Synthetic peptide"
WSTNAYQ

SEQ ID NO: 13804 - protein, 7 aa, Artificial Sequence
  source: /note="Description of Artificial Sequence: Synthetic peptide"
WSTSTLH

SEQ ID NO: 13805 - protein, 7 aa, Artificial Sequence
  source: /note="Description of Artificial Sequence: Synthetic peptide"
WTAPSDV

SEQ ID NO: 13806 - protein, 7 aa, Artificial Sequence
  source: /note="Description of Artificial Sequence: Synthetic peptide"
WTAQNVQ

SEQ ID NO: 13807 - protein, 7 aa, Artificial Sequence
  source: /note="Description of Artificial Sequence: Synthetic peptide"
WTASRAS

SEQ ID NO: 13808 - protein, 7 aa, Artificial Sequence
  source: /note="Description of Artificial Sequence: Synthetic peptide"
WTERVGT

SEQ ID NO: 13809 - protein, 7 aa, Artificial Sequence
  source: /note="Description of Artificial Sequence: Synthetic peptide"
WTGSAHQ

SEQ ID NO: 13810 - protein, 7 aa, Artificial Sequence
  source: /note="Description of Artificial Sequence: Synthetic peptide"
WTGYSQQ

SEQ ID NO: 13811 - protein, 7 aa, Artificial Sequence
  source: /note="Description of Artificial Sequence: Synthetic peptide"
WTNSTQP

SEQ ID NO: 13812 - protein, 7 aa, Artificial Sequence
  source: /note="Description of Artificial Sequence: Synthetic peptide"
WTPHSPM

SEQ ID NO: 13813 - protein, 7 aa, Artificial Sequence
  source: /note="Description of Artificial Sequence: Synthetic peptide"
WTPRVMH

SEQ ID NO: 13814 - protein, 7 aa, Artificial Sequence
  source: /note="Description of Artificial Sequence: Synthetic peptide"
WTPSMAP

SEQ ID NO: 13815 - protein, 7 aa, Artificial Sequence
  source: /note="Description of Artificial Sequence: Synthetic peptide"
WTPSNKH

SEQ ID NO: 13816 - protein, 7 aa, Artificial Sequence
  source: /note="Description of Artificial Sequence: Synthetic peptide"
WTRLESL

SEQ ID NO: 13817 - protein, 7 aa, Artificial Sequence
  source: /note="Description of Artificial Sequence: Synthetic peptide"
WTSDGNY

SEQ ID NO: 13818 - protein, 7 aa, Artificial Sequence
  source: /note="Description of Artificial Sequence: Synthetic peptide"
WTSKIGP

SEQ ID NO: 13819 - protein, 7 aa, Artificial Sequence
  source: /note="Description of Artificial Sequence: Synthetic peptide"
WTSRDAS

SEQ ID NO: 13820 - protein, 7 aa, Artificial Sequence
  source: /note="Description of Artificial Sequence: Synthetic peptide"
WTSSGGS

SEQ ID NO: 13821 - protein, 7 aa, Artificial Sequence
  source: /note="Description of Artificial Sequence: Synthetic peptide"
WTTNTGG

SEQ ID NO: 13822 - protein, 7 aa, Artificial Sequence
  source: /note="Description of Artificial Sequence: Synthetic peptide"
WTTSGSI

SEQ ID NO: 13823 - protein, 7 aa, Artificial Sequence
  source: /note="Description of Artificial Sequence: Synthetic peptide"
WTVDLTH

SEQ ID NO: 13824 - protein, 7 aa, Artificial Sequence
  source: /note="Description of Artificial Sequence: Synthetic peptide"
WTVETSH

SEQ ID NO: 13825 - protein, 7 aa, Artificial Sequence
  source: /note="Description of Artificial Sequence: Synthetic peptide"
WVHSSDS

SEQ ID NO: 13826 - protein, 7 aa, Artificial Sequence
  source: /note="Description of Artificial Sequence: Synthetic peptide"
WVIQNCN

SEQ ID NO: 13827 - protein, 7 aa, Artificial Sequence
  source: /note="Description of Artificial Sequence: Synthetic peptide"
WVQSGTP

SEQ ID NO: 13828 - protein, 7 aa, Artificial Sequence
  source: /note="Description of Artificial Sequence: Synthetic peptide"
WVTGLTD

SEQ ID NO: 13829 - protein, 7 aa, Artificial Sequence
  source: /note="Description of Artificial Sequence: Synthetic peptide"
WVTQHPS

SEQ ID NO: 13830 - protein, 7 aa, Artificial Sequence
  source: /note="Description of Artificial Sequence: Synthetic peptide"
YAAAPSR

SEQ ID NO: 13831 - protein, 7 aa, Artificial Sequence
  source: /note="Description of Artificial Sequence: Synthetic peptide"
YAAAYAS

SEQ ID NO: 13832 - protein, 7 aa, Artificial Sequence
  source: /note="Description of Artificial Sequence: Synthetic peptide"
YAAHYKE

SEQ ID NO: 13833 - protein, 7 aa, Artificial Sequence
  source: /note="Description of Artificial Sequence: Synthetic peptide"
YAANRQP

SEQ ID NO: 13834 - protein, 7 aa, Artificial Sequence
  source: /note="Description of Artificial Sequence: Synthetic peptide"
YAAPSSA

SEQ ID NO: 13835 - protein, 7 aa, Artificial Sequence
  source: /note="Description of Artificial Sequence: Synthetic peptide"
YAASHVS

SEQ ID NO: 13836 - protein, 7 aa, Artificial Sequence
  source: /note="Description of Artificial Sequence: Synthetic peptide"
YAASNLT

SEQ ID NO: 13837 - protein, 7 aa, Artificial Sequence
  source: /note="Description of Artificial Sequence: Synthetic peptide"
YAASSAT

SEQ ID NO: 13838 - protein, 7 aa, Artificial Sequence
  source: /note="Description of Artificial Sequence: Synthetic peptide"
YAAVGLN

SEQ ID NO: 13839 - protein, 7 aa, Artificial Sequence
  source: /note="Description of Artificial Sequence: Synthetic peptide"
YAAVRSN

SEQ ID NO: 13840 - protein, 7 aa, Artificial Sequence
  source: /note="Description of Artificial Sequence: Synthetic peptide"
YADLPSR

SEQ ID NO: 13841 - protein, 7 aa, Artificial Sequence
  source: /note="Description of Artificial Sequence: Synthetic peptide"
YADSAPY

SEQ ID NO: 13842 - protein, 7 aa, Artificial Sequence
  source: /note="Description of Artificial Sequence: Synthetic peptide"
YAERQGR

SEQ ID NO: 13843 - protein, 7 aa, Artificial Sequence
  source: /note="Description of Artificial Sequence: Synthetic peptide"
YAEYSRN

SEQ ID NO: 13844 - protein, 7 aa, Artificial Sequence
  source: /note="Description of Artificial Sequence: Synthetic peptide"
YAGAALG

SEQ ID NO: 13845 - protein, 7 aa, Artificial Sequence
  source: /note="Description of Artificial Sequence: Synthetic peptide"
YAGAQRS

SEQ ID NO: 13846 - protein, 7 aa, Artificial Sequence
  source: /note="Description of Artificial Sequence: Synthetic peptide"
YAGGKLI

SEQ ID NO: 13847 - protein, 7 aa, Artificial Sequence
  source: /note="Description of Artificial Sequence: Synthetic peptide"
YAGKEPE

SEQ ID NO: 13848 - protein, 7 aa, Artificial Sequence
  source: /note="Description of Artificial Sequence: Synthetic peptide"
YAGPNSP

SEQ ID NO: 13849 - protein, 7 aa, Artificial Sequence
  source: /note="Description of Artificial Sequence: Synthetic peptide"
YAGSEVM

SEQ ID NO: 13850 - protein, 7 aa, Artificial Sequence
  source: /note="Description of Artificial Sequence: Synthetic peptide"
YAGSVTS

SEQ ID NO: 13851 - protein, 7 aa, Artificial Sequence
  source: /note="Description of Artificial Sequence: Synthetic peptide"
YAHQKPM

SEQ ID NO: 13852 - protein, 7 aa, Artificial Sequence
  source: /note="Description of Artificial Sequence: Synthetic peptide"
YAHTRVV

SEQ ID NO: 13853 - protein, 7 aa, Artificial Sequence
  source: /note="Description of Artificial Sequence: Synthetic peptide"
YAKPLTS

SEQ ID NO: 13854 - protein, 7 aa, Artificial Sequence
  source: /note="Description of Artificial Sequence: Synthetic peptide"
YALDSAE

SEQ ID NO: 13855 - protein, 7 aa, Artificial Sequence
  source: /note="Description of Artificial Sequence: Synthetic peptide"
YALEHRN

SEQ ID NO: 13856 - protein, 7 aa, Artificial Sequence
  source: /note="Description of Artificial Sequence: Synthetic peptide"
YALHQDK

SEQ ID NO: 13857 - protein, 7 aa, Artificial Sequence
  source: /note="Description of Artificial Sequence: Synthetic peptide"
YALQSKE

SEQ ID NO: 13858 - protein, 7 aa, Artificial Sequence
  source: /note="Description of Artificial Sequence: Synthetic peptide"
YALSGST

SEQ ID NO: 13859 - protein, 7 aa, Artificial Sequence
  source: /note="Description of Artificial Sequence: Synthetic peptide"
YANAMTL

SEQ ID NO: 13860 - protein, 7 aa, Artificial Sequence
  source: /note="Description of Artificial Sequence: Synthetic peptide"
YANDSGL

SEQ ID NO: 13861 - protein, 7 aa, Artificial Sequence
  source: /note="Description of Artificial Sequence: Synthetic peptide"
YANNLPH

SEQ ID NO: 13862 - protein, 7 aa, Artificial Sequence
  source: /note="Description of Artificial Sequence: Synthetic peptide"
YANTTSA

SEQ ID NO: 13863 - protein, 7 aa, Artificial Sequence
  source: /note="Description of Artificial Sequence: Synthetic peptide"
YAPGLRS

SEQ ID NO: 13864 - protein, 7 aa, Artificial Sequence
  source: /note="Description of Artificial Sequence: Synthetic peptide"
YAPQSVA

SEQ ID NO: 13865 - protein, 7 aa, Artificial Sequence
  source: /note="Description of Artificial Sequence: Synthetic peptide"
YAQAFRN

SEQ ID NO: 13866 - protein, 7 aa, Artificial Sequence
  source: /note="Description of Artificial Sequence: Synthetic peptide"
YAQYSAV

SEQ ID NO: 13867 - protein, 7 aa, Artificial Sequence
  source: /note="Description of Artificial Sequence: Synthetic peptide"
YAREAHA

SEQ ID NO: 13868 - protein, 7 aa, Artificial Sequence
  source: /note="Description of Artificial Sequence: Synthetic peptide"
YARETLH

SEQ ID NO: 13869 - protein, 7 aa, Artificial Sequence
  source: /note="Description of Artificial Sequence: Synthetic peptide"
YARLTGP

SEQ ID NO: 13870 - protein, 7 aa, Artificial Sequence
  source: /note="Description of Artificial Sequence: Synthetic peptide"
YARQITA

SEQ ID NO: 13871 - protein, 7 aa, Artificial Sequence
  source: /note="Description of Artificial Sequence: Synthetic peptide"
YARQPAV

SEQ ID NO: 13872 - protein, 7 aa, Artificial Sequence
  source: /note="Description of Artificial Sequence: Synthetic peptide"
YASASHP

SEQ ID NO: 13873 - protein, 7 aa, Artificial Sequence
  source: /note="Description of Artificial Sequence: Synthetic peptide"
YASLKGA

SEQ ID NO: 13874 - protein, 7 aa, Artificial Sequence
  source: /note="Description of Artificial Sequence: Synthetic peptide"
YASPGRT

SEQ ID NO: 13875 - protein, 7 aa, Artificial Sequence
  source: /note="Description of Artificial Sequence: Synthetic peptide"
YASSAAL

SEQ ID NO: 13876 - protein, 7 aa, Artificial Sequence
  source: /note="Description of Artificial Sequence: Synthetic peptide"
YASSSTR

SEQ ID NO: 13877 - protein, 7 aa, Artificial Sequence
  source: /note="Description of Artificial Sequence: Synthetic peptide"
YATESGN

SEQ ID NO: 13878 - protein, 7 aa, Artificial Sequence
  source: /note="Description of Artificial Sequence: Synthetic peptide"
YATFAPA

SEQ ID NO: 13879 - protein, 7 aa, Artificial Sequence
  source: /note="Description of Artificial Sequence: Synthetic peptide"
YATHEPD

SEQ ID NO: 13880 - protein, 7 aa, Artificial Sequence
  source: /note="Description of Artificial Sequence: Synthetic peptide"
YATPSHH

SEQ ID NO: 13881 - protein, 7 aa, Artificial Sequence
  source: /note="Description of Artificial Sequence: Synthetic peptide"
YATTVLT

SEQ ID NO: 13882 - protein, 7 aa, Artificial Sequence
  source: /note="Description of Artificial Sequence: Synthetic peptide"
YATVIGL

SEQ ID NO: 13883 - protein, 7 aa, Artificial Sequence
  source: /note="Description of Artificial Sequence: Synthetic peptide"
YAVEASR

SEQ ID NO: 13884 - protein, 7 aa, Artificial Sequence
  source: /note="Description of Artificial Sequence: Synthetic peptide"
YAVEGKN

SEQ ID NO: 13885 - protein, 7 aa, Artificial Sequence
  source: /note="Description of Artificial Sequence: Synthetic peptide"
YAVSRPL

SEQ ID NO: 13886 - protein, 7 aa, Artificial Sequence
  source: /note="Description of Artificial Sequence: Synthetic peptide"
YAYEGFA

SEQ ID NO: 13887 - protein, 7 aa, Artificial Sequence
  source: /note="Description of Artificial Sequence: Synthetic peptide"
YAYERQI

SEQ ID NO: 13888 - protein, 7 aa, Artificial Sequence
  source: /note="Description of Artificial Sequence: Synthetic peptide"
YCESFPD

SEQ ID NO: 13889 - protein, 7 aa, Artificial Sequence
  source: /note="Description of Artificial Sequence: Synthetic peptide"
YCSHQSV

SEQ ID NO: 13890 - protein, 7 aa, Artificial Sequence
  source: /note="Description of Artificial Sequence: Synthetic peptide"
YCTGNDA

SEQ ID NO: 13891 - protein, 7 aa, Artificial Sequence
  source: /note="Description of Artificial Sequence: Synthetic peptide"
YDAISNP

SEQ ID NO: 13892 - protein, 7 aa, Artificial Sequence
  source: /note="Description of Artificial Sequence: Synthetic peptide"
YDHVIAT

SEQ ID NO: 13893 - protein, 7 aa, Artificial Sequence
  source: /note="Description of Artificial Sequence: Synthetic peptide"
YDKAMSP

SEQ ID NO: 13894 - protein, 7 aa, Artificial Sequence
  source: /note="Description of Artificial Sequence: Synthetic peptide"
YDLGVTT

SEQ ID NO: 13895 - protein, 7 aa, Artificial Sequence
  source: /note="Description of Artificial Sequence: Synthetic peptide"
YDMGPVP

SEQ ID NO: 13896 - protein, 7 aa, Artificial Sequence
  source: /note="Description of Artificial Sequence: Synthetic peptide"
YDNKTRL

SEQ ID NO: 13897 - protein, 7 aa, Artificial Sequence
  source: /note="Description of Artificial Sequence: Synthetic peptide"
YDNMHCK

SEQ ID NO: 13898 - protein, 7 aa, Artificial Sequence
  source: /note="Description of Artificial Sequence: Synthetic peptide"
YDNQLNN

SEQ ID NO: 13899 - protein, 7 aa, Artificial Sequence
  source: /note="Description of Artificial Sequence: Synthetic peptide"
YDPYHSP

SEQ ID NO: 13900 - protein, 7 aa, Artificial Sequence
  source: /note="Description of Artificial Sequence: Synthetic peptide"
YDREPLD

SEQ ID NO: 13901 - protein, 7 aa, Artificial Sequence
  source: /note="Description of Artificial Sequence: Synthetic peptide"
YDSNTET

SEQ ID NO: 13902 - protein, 7 aa, Artificial Sequence
  source: /note="Description of Artificial Sequence: Synthetic peptide"
YDSRGPA

SEQ ID NO: 13903 - protein, 7 aa, Artificial Sequence
  source: /note="Description of Artificial Sequence: Synthetic peptide"
YDSSVPN

SEQ ID NO: 13904 - protein, 7 aa, Artificial Sequence
  source: /note="Description of Artificial Sequence: Synthetic peptide"
YDSVATL

SEQ ID NO: 13905 - protein, 7 aa, Artificial Sequence
  source: /note="Description of Artificial Sequence: Synthetic peptide"
YDTHGSP

SEQ ID NO: 13906 - protein, 7 aa, Artificial Sequence
  source: /note="Description of Artificial Sequence: Synthetic peptide"
YDTKLQM

SEQ ID NO: 13907 - protein, 7 aa, Artificial Sequence
  source: /note="Description of Artificial Sequence: Synthetic peptide"
YEAPTRS

SEQ ID NO: 13908 - protein, 7 aa, Artificial Sequence
  source: /note="Description of Artificial Sequence: Synthetic peptide"
YEATSSN

SEQ ID NO: 13909 - protein, 7 aa, Artificial Sequence
  source: /note="Description of Artificial Sequence: Synthetic peptide"
YEGSPRN

SEQ ID NO: 13910 - protein, 7 aa, Artificial Sequence
  source: /note="Description of Artificial Sequence: Synthetic peptide"
YEGYKLP

SEQ ID NO: 13911 - protein, 7 aa, Artificial Sequence
  source: /note="Description of Artificial Sequence: Synthetic peptide"
YEIQGTG

SEQ ID NO: 13912 - protein, 7 aa, Artificial Sequence
  source: /note="Description of Artificial Sequence: Synthetic peptide"
YELAHHA

SEQ ID NO: 13913 - protein, 7 aa, Artificial Sequence
  source: /note="Description of Artificial Sequence: Synthetic peptide"
YELQLFS

SEQ ID NO: 13914 - protein, 7 aa, Artificial Sequence
  source: /note="Description of Artificial Sequence: Synthetic peptide"
YELRRIP

SEQ ID NO: 13915 - protein, 7 aa, Artificial Sequence
  source: /note="Description of Artificial Sequence: Synthetic peptide"
YEPGTDA

SEQ ID NO: 13916 - protein, 7 aa, Artificial Sequence
  source: /note="Description of Artificial Sequence: Synthetic peptide"
YEPKVRV

SEQ ID NO: 13917 - protein, 7 aa, Artificial Sequence
  source: /note="Description of Artificial Sequence: Synthetic peptide"
YESSNDP

SEQ ID NO: 13918 - protein, 7 aa, Artificial Sequence
  source: /note="Description of Artificial Sequence: Synthetic peptide"
YESYIER

SEQ ID NO: 13919 - protein, 7 aa, Artificial Sequence
  source: /note="Description of Artificial Sequence: Synthetic peptide"
YETAFRA

SEQ ID NO: 13920 - protein, 7 aa, Artificial Sequence
  source: /note="Description of Artificial Sequence: Synthetic peptide"
YETDISQ

SEQ ID NO: 13921 - protein, 7 aa, Artificial Sequence
  source: /note="Description of Artificial Sequence: Synthetic peptide"
YETELRA

SEQ ID NO: 13922 - protein, 7 aa, Artificial Sequence
  source: /note="Description of Artificial Sequence: Synthetic peptide"
YFAGRTD

SEQ ID NO: 13923 - protein, 7 aa, Artificial Sequence
  source: /note="Description of Artificial Sequence: Synthetic peptide"
YFASPTS

SEQ ID NO: 13924 - protein, 7 aa, Artificial Sequence
  source: /note="Description of Artificial Sequence: Synthetic peptide"
YFEASSA

SEQ ID NO: 13925 - protein, 7 aa, Artificial Sequence
  source: /note="Description of Artificial Sequence: Synthetic peptide"
YFGSSAT

SEQ ID NO: 13926 - protein, 7 aa, Artificial Sequence
  source: /note="Description of Artificial Sequence: Synthetic peptide"
YFGSSDP

SEQ ID NO: 13927 - protein, 7 aa, Artificial Sequence
  source: /note="Description of Artificial Sequence: Synthetic peptide"
YFHLATS

SEQ ID NO: 13928 - protein, 7 aa, Artificial Sequence
  source: /note="Description of Artificial Sequence: Synthetic peptide"
YFPSMVD

SEQ ID NO: 13929 - protein, 7 aa, Artificial Sequence
  source: /note="Description of Artificial Sequence: Synthetic peptide"
YFSHDET

SEQ ID NO: 13930 - protein, 7 aa, Artificial Sequence
  source: /note="Description of Artificial Sequence: Synthetic peptide"
YFTNDSV

SEQ ID NO: 13931 - protein, 7 aa, Artificial Sequence
  source: /note="Description of Artificial Sequence: Synthetic peptide"
YFTSRSE

SEQ ID NO: 13932 - protein, 7 aa, Artificial Sequence
  source: /note="Description of Artificial Sequence: Synthetic peptide"
YFVANNP

SEQ ID NO: 13933 - protein, 7 aa, Artificial Sequence
  source: /note="Description of Artificial Sequence: Synthetic peptide"
YFVKILI

SEQ ID NO: 13934 - protein, 7 aa, Artificial Sequence
  source: /note="Description of Artificial Sequence: Synthetic peptide"
YGASPDT

SEQ ID NO: 13935 - protein, 7 aa, Artificial Sequence
  source: /note="Description of Artificial Sequence: Synthetic peptide"
YGAVAKH

SEQ ID NO: 13936 - protein, 7 aa, Artificial Sequence
  source: /note="Description of Artificial Sequence: Synthetic peptide"
YGAVRHN

SEQ ID NO: 13937 - protein, 7 aa, Artificial Sequence
  source: /note="Description of Artificial Sequence: Synthetic peptide"
YGAVSPV

SEQ ID NO: 13938 - protein, 7 aa, Artificial Sequence
  source: /note="Description of Artificial Sequence: Synthetic peptide"
YGDPGPP

SEQ ID NO: 13939 - protein, 7 aa, Artificial Sequence
  source: /note="Description of Artificial Sequence: Synthetic peptide"
YGDVADS

SEQ ID NO: 13940 - protein, 7 aa, Artificial Sequence
  source: /note="Description of Artificial Sequence: Synthetic peptide"
YGEPIRP

SEQ ID NO: 13941 - protein, 7 aa, Artificial Sequence
  source: /note="Description of Artificial Sequence: Synthetic peptide"
YGGAGSL

SEQ ID NO: 13942 - protein, 7 aa, Artificial Sequence
  source: /note="Description of Artificial Sequence: Synthetic peptide"
YGGHTVS

SEQ ID NO: 13943 - protein, 7 aa, Artificial Sequence
  source: /note="Description of Artificial Sequence: Synthetic peptide"
YGGPNMT

SEQ ID NO: 13944 - protein, 7 aa, Artificial Sequence
  source: /note="Description of Artificial Sequence: Synthetic peptide"
YGISPKT

SEQ ID NO: 13945 - protein, 7 aa, Artificial Sequence
  source: /note="Description of Artificial Sequence: Synthetic peptide"
YGKMTSD

SEQ ID NO: 13946 - protein, 7 aa, Artificial Sequence
  source: /note="Description of Artificial Sequence: Synthetic peptide"
YGLKSAI

SEQ ID NO: 13947 - protein, 7 aa, Artificial Sequence
  source: /note="Description of Artificial Sequence: Synthetic peptide"
YGLSAHS

SEQ ID NO: 13948 - protein, 7 aa, Artificial Sequence
  source: /note="Description of Artificial Sequence: Synthetic peptide"
YGMKVAQ

SEQ ID NO: 13949 - protein, 7 aa, Artificial Sequence
  source: /note="Description of Artificial Sequence: Synthetic peptide"
YGMSFKE

SEQ ID NO: 13950 - protein, 7 aa, Artificial Sequence
  source: /note="Description of Artificial Sequence: Synthetic peptide"
YGNARAV

SEQ ID NO: 13951 - protein, 7 aa, Artificial Sequence
  source: /note="Description of Artificial Sequence: Synthetic peptide"
YGNGSLG

SEQ ID NO: 13952 - protein, 7 aa, Artificial Sequence
  source: /note="Description of Artificial Sequence: Synthetic peptide"
YGNHLLS

SEQ ID NO: 13953 - protein, 7 aa, Artificial Sequence
  source: /note="Description of Artificial Sequence: Synthetic peptide"
YGPALLS

SEQ ID NO: 13954 - protein, 7 aa, Artificial Sequence
  source: /note="Description of Artificial Sequence: Synthetic peptide"
YGPDLRQ

SEQ ID NO: 13955 - protein, 7 aa, Artificial Sequence
  source: /note="Description of Artificial Sequence: Synthetic peptide"
YGPHAKS

SEQ ID NO: 13956 - protein, 7 aa, Artificial Sequence
  source: /note="Description of Artificial Sequence: Synthetic peptide"
YGQSGAS

SEQ ID NO: 13957 - protein, 7 aa, Artificial Sequence
  source: /note="Description of Artificial Sequence: Synthetic peptide"
YGQSKSS

SEQ ID NO: 13958 - protein, 7 aa, Artificial Sequence
  source: /note="Description of Artificial Sequence: Synthetic peptide"
YGRNMTQ

SEQ ID NO: 13959 - protein, 7 aa, Artificial Sequence
  source: /note="Description of Artificial Sequence: Synthetic peptide"
YGRSQSL

SEQ ID NO: 13960 - protein, 7 aa, Artificial Sequence
  source: /note="Description of Artificial Sequence: Synthetic peptide"
YGSLNIA

SEQ ID NO: 13961 - protein, 7 aa, Artificial Sequence
  source: /note="Description of Artificial Sequence: Synthetic peptide"
YGSPRVT

SEQ ID NO: 13962 - protein, 7 aa, Artificial Sequence
  source: /note="Description of Artificial Sequence: Synthetic peptide"
YGSSCHT

SEQ ID NO: 13963 - protein, 7 aa, Artificial Sequence
  source: /note="Description of Artificial Sequence: Synthetic peptide"
YGSSRTT

SEQ ID NO: 13964 - protein, 7 aa, Artificial Sequence
  source: /note="Description of Artificial Sequence: Synthetic peptide"
YGTATQA

SEQ ID NO: 13965 - protein, 7 aa, Artificial Sequence
  source: /note="Description of Artificial Sequence: Synthetic peptide"
YGTETNY

SEQ ID NO: 13966 - protein, 7 aa, Artificial Sequence
  source: /note="Description of Artificial Sequence: Synthetic peptide"
YGTGGHL

SEQ ID NO: 13967 - protein, 7 aa, Artificial Sequence
  source: /note="Description of Artificial Sequence: Synthetic peptide"
YGTLARH

SEQ ID NO: 13968 - protein, 7 aa, Artificial Sequence
  source: /note="Description of Artificial Sequence: Synthetic peptide"
YGVRPST

SEQ ID NO: 13969 - protein, 7 aa, Artificial Sequence
  source: /note="Description of Artificial Sequence: Synthetic peptide"
YGYAALN

SEQ ID NO: 13970 - protein, 7 aa, Artificial Sequence
  source: /note="Description of Artificial Sequence: Synthetic peptide"
YHAGPPD

SEQ ID NO: 13971 - protein, 7 aa, Artificial Sequence
  source: /note="Description of Artificial Sequence: Synthetic peptide"
YHGRTVV

SEQ ID NO: 13972 - protein, 7 aa, Artificial Sequence
  source: /note="Description of Artificial Sequence: Synthetic peptide"
YHKTGVH

SEQ ID NO: 13973 - protein, 7 aa, Artificial Sequence
  source: /note="Description of Artificial Sequence: Synthetic peptide"
YHMTVKS

SEQ ID NO: 13974 - protein, 7 aa, Artificial Sequence
  source: /note="Description of Artificial Sequence: Synthetic peptide"
YHNHGTS

SEQ ID NO: 13975 - protein, 7 aa, Artificial Sequence
  source: /note="Description of Artificial Sequence: Synthetic peptide"
YHNLQGM

SEQ ID NO: 13976 - protein, 7 aa, Artificial Sequence
  source: /note="Description of Artificial Sequence: Synthetic peptide"
YHNNSSP

SEQ ID NO: 13977 - protein, 7 aa, Artificial Sequence
  source: /note="Description of Artificial Sequence: Synthetic peptide"
YHPPREN

SEQ ID NO: 13978 - protein, 7 aa, Artificial Sequence
  source: /note="Description of Artificial Sequence: Synthetic peptide"
YHPVIAP

SEQ ID NO: 13979 - protein, 7 aa, Artificial Sequence
  source: /note="Description of Artificial Sequence: Synthetic peptide"
YHSEVRA

SEQ ID NO: 13980 - protein, 7 aa, Artificial Sequence
  source: /note="Description of Artificial Sequence: Synthetic peptide"
YHSNTTS

SEQ ID NO: 13981 - protein, 7 aa, Artificial Sequence
  source: /note="Description of Artificial Sequence: Synthetic peptide"
YHSVSTS

SEQ ID NO: 13982 - protein, 7 aa, Artificial Sequence
  source: /note="Description of Artificial Sequence: Synthetic peptide"
YHTASMN

SEQ ID NO: 13983 - protein, 7 aa, Artificial Sequence
  source: /note="Description of Artificial Sequence: Synthetic peptide"
YHTLNKD

SEQ ID NO: 13984 - protein, 7 aa, Artificial Sequence
  source: /note="Description of Artificial Sequence: Synthetic peptide"
YHTVSSN

SEQ ID NO: 13985 - protein, 7 aa, Artificial Sequence
  source: /note="Description of Artificial Sequence: Synthetic peptide"
YHVRAAS

SEQ ID NO: 13986 - protein, 7 aa, Artificial Sequence
  source: /note="Description of Artificial Sequence: Synthetic peptide"
YIETRVT

SEQ ID NO: 13987 - protein, 7 aa, Artificial Sequence
  source: /note="Description of Artificial Sequence: Synthetic peptide"
YIGERDP

SEQ ID NO: 13988 - protein, 7 aa, Artificial Sequence
  source: /note="Description of Artificial Sequence: Synthetic peptide"
YIGPDLA

SEQ ID NO: 13989 - protein, 7 aa, Artificial Sequence
  source: /note="Description of Artificial Sequence: Synthetic peptide"
YIHPEQE

SEQ ID NO: 13990 - protein, 7 aa, Artificial Sequence
  source: /note="Description of Artificial Sequence: Synthetic peptide"
YIIAQEC

SEQ ID NO: 13991 - protein, 7 aa, Artificial Sequence
  source: /note="Description of Artificial Sequence: Synthetic peptide"
YILTSET

SEQ ID NO: 13992 - protein, 7 aa, Artificial Sequence
  source: /note="Description of Artificial Sequence: Synthetic peptide"
YINALIA

SEQ ID NO: 13993 - protein, 7 aa, Artificial Sequence
  source: /note="Description of Artificial Sequence: Synthetic peptide"
YIPSKFT

SEQ ID NO: 13994 - protein, 7 aa, Artificial Sequence
  source: /note="Description of Artificial Sequence: Synthetic peptide"
YIQVPKG

SEQ ID NO: 13995 - protein, 7 aa, Artificial Sequence
  source: /note="Description of Artificial Sequence: Synthetic peptide"
YISAGTS

SEQ ID NO: 13996 - protein, 7 aa, Artificial Sequence
  source: /note="Description of Artificial Sequence: Synthetic peptide"
YISPVSV

SEQ ID NO: 13997 - protein, 7 aa, Artificial Sequence
  source: /note="Description of Artificial Sequence: Synthetic peptide"
YKAASVP

SEQ ID NO: 13998 - protein, 7 aa, Artificial Sequence
  source: /note="Description of Artificial Sequence: Synthetic peptide"
YKGAPVT

SEQ ID NO: 13999 - protein, 7 aa, Artificial Sequence
  source: /note="Description of Artificial Sequence: Synthetic peptide"
YKGASLD

SEQ ID NO: 14000 - protein, 7 aa, Artificial Sequence
  source: /note="Description of Artificial Sequence: Synthetic peptide"
YKGGNSF

SEQ ID NO: 14001 - protein, 7 aa, Artificial Sequence
  source: /note="Description of Artificial Sequence: Synthetic peptide"
YKLNATY

SEQ ID NO: 14002 - protein, 7 aa, Artificial Sequence
  source: /note="Description of Artificial Sequence: Synthetic peptide"
YKLQQVS

SEQ ID NO: 14003 - protein, 7 aa, Artificial Sequence
  source: /note="Description of Artificial Sequence: Synthetic peptide"
YKPANVN

SEQ ID NO: 14004 - protein, 7 aa, Artificial Sequence
  source: /note="Description of Artificial Sequence: Synthetic peptide"
YKPSEGT

SEQ ID NO: 14005 - protein, 7 aa, Artificial Sequence
  source: /note="Description of Artificial Sequence: Synthetic peptide"
YKQHVIS

SEQ ID NO: 14006 - protein, 7 aa, Artificial Sequence
  source: /note="Description of Artificial Sequence: Synthetic peptide"
YKSSAGS

SEQ ID NO: 14007 - protein, 7 aa, Artificial Sequence
  source: /note="Description of Artificial Sequence: Synthetic peptide"
YKTGRLA

SEQ ID NO: 14008 - protein, 7 aa, Artificial Sequence
  source: /note="Description of Artificial Sequence: Synthetic peptide"
YKVLPSA

SEQ ID NO: 14009 - protein, 7 aa, Artificial Sequence
  source: /note="Description of Artificial Sequence: Synthetic peptide"
YLAGERT

SEQ ID NO: 14010 - protein, 7 aa, Artificial Sequence
  source: /note="Description of Artificial Sequence: Synthetic peptide"
YLAHGLQ

SEQ ID NO: 14011 - protein, 7 aa, Artificial Sequence
  source: /note="Description of Artificial Sequence: Synthetic peptide"
YLALQYK

SEQ ID NO: 14012 - protein, 7 aa, Artificial Sequence
  source: /note="Description of Artificial Sequence: Synthetic peptide"
YLDHIWE

SEQ ID NO: 14013 - protein, 7 aa, Artificial Sequence
  source: /note="Description of Artificial Sequence: Synthetic peptide"
YLDTSPV

SEQ ID NO: 14014 - protein, 7 aa, Artificial Sequence
  source: /note="Description of Artificial Sequence: Synthetic peptide"
YLERYGS

SEQ ID NO: 14015 - protein, 7 aa, Artificial Sequence
  source: /note="Description of Artificial Sequence: Synthetic peptide"
YLGDKMA

SEQ ID NO: 14016 - protein, 7 aa, Artificial Sequence
  source: /note="Description of Artificial Sequence: Synthetic peptide"
YLGHSTK

SEQ ID NO: 14017 - protein, 7 aa, Artificial Sequence
  source: /note="Description of Artificial Sequence: Synthetic peptide"
YLGTQVN

SEQ ID NO: 14018 - protein, 7 aa, Artificial Sequence
  source: /note="Description of Artificial Sequence: Synthetic peptide"
YLKFTDS

SEQ ID NO: 14019 - protein, 7 aa, Artificial Sequence
  source: /note="Description of Artificial Sequence: Synthetic peptide"
YLKSNSP

SEQ ID NO: 14020 - protein, 7 aa, Artificial Sequence
  source: /note="Description of Artificial Sequence: Synthetic peptide"
YLLSELS

SEQ ID NO: 14021 - protein, 7 aa, Artificial Sequence
  source: /note="Description of Artificial Sequence: Synthetic peptide"
YLLSHAG

SEQ ID NO: 14022 - protein, 7 aa, Artificial Sequence
  source: /note="Description of Artificial Sequence: Synthetic peptide"
YLMHASA

SEQ ID NO: 14023 - protein, 7 aa, Artificial Sequence
  source: /note="Description of Artificial Sequence: Synthetic peptide"
YLNVTPA

SEQ ID NO: 14024 - protein, 7 aa, Artificial Sequence
  source: /note="Description of Artificial Sequence: Synthetic peptide"
YLPKSNF

SEQ ID NO: 14025 - protein, 7 aa, Artificial Sequence
  source: /note="Description of Artificial Sequence: Synthetic peptide"
YLPLTAV

SEQ ID NO: 14026 - protein, 7 aa, Artificial Sequence
  source: /note="Description of Artificial Sequence: Synthetic peptide"
YLPRGTF

SEQ ID NO: 14027 - protein, 7 aa, Artificial Sequence
  source: /note="Description of Artificial Sequence: Synthetic peptide"
YLPRGTS

SEQ ID NO: 14028 - protein, 7 aa, Artificial Sequence
  source: /note="Description of Artificial Sequence: Synthetic peptide"
YLPTRHE

SEQ ID NO: 14029 - protein, 7 aa, Artificial Sequence
  source: /note="Description of Artificial Sequence: Synthetic peptide"
YLQAHYN

SEQ ID NO: 14030 - protein, 7 aa, Artificial Sequence
  source: /note="Description of Artificial Sequence: Synthetic peptide"
YLQHGHT

SEQ ID NO: 14031 - protein, 7 aa, Artificial Sequence
  source: /note="Description of Artificial Sequence: Synthetic peptide"
YLQTEDP

SEQ ID NO: 14032 - protein, 7 aa, Artificial Sequence
  source: /note="Description of Artificial Sequence: Synthetic peptide"
YLRLQTG

SEQ ID NO: 14033 - protein, 7 aa, Artificial Sequence
  source: /note="Description of Artificial Sequence: Synthetic peptide"
YLRPQSG

SEQ ID NO: 14034 - protein, 7 aa, Artificial Sequence
  source: /note="Description of Artificial Sequence: Synthetic peptide"
YLSDPRM

SEQ ID NO: 14035 - protein, 7 aa, Artificial Sequence
  source: /note="Description of Artificial Sequence: Synthetic peptide"
YLSGMIK

SEQ ID NO: 14036 - protein, 7 aa, Artificial Sequence
  source: /note="Description of Artificial Sequence: Synthetic peptide"
YLSHRSE

SEQ ID NO: 14037 - protein, 7 aa, Artificial Sequence
  source: /note="Description of Artificial Sequence: Synthetic peptide"
YLSNTEM

SEQ ID NO: 14038 - protein, 7 aa, Artificial Sequence
  source: /note="Description of Artificial Sequence: Synthetic peptide"
YLSVDES

SEQ ID NO: 14039 - protein, 7 aa, Artificial Sequence
  source: /note="Description of Artificial Sequence: Synthetic peptide"
YLSVQSN

SEQ ID NO: 14040 - protein, 7 aa, Artificial Sequence
  source: /note="Description of Artificial Sequence: Synthetic peptide"
YLTKHTS

SEQ ID NO: 14041 - protein, 7 aa, Artificial Sequence
  source: /note="Description of Artificial Sequence: Synthetic peptide"
YLTQLST

SEQ ID NO: 14042 - protein, 7 aa, Artificial Sequence
  source: /note="Description of Artificial Sequence: Synthetic peptide"
YLVETTK

SEQ ID NO: 14043 - protein, 7 aa, Artificial Sequence
  source: /note="Description of Artificial Sequence: Synthetic peptide"
YLVGQRV

SEQ ID NO: 14044 - protein, 7 aa, Artificial Sequence
  source: /note="Description of Artificial Sequence: Synthetic peptide"
YMDTDDR

SEQ ID NO: 14045 - protein, 7 aa, Artificial Sequence
  source: /note="Description of Artificial Sequence: Synthetic peptide"
YMGHALS

SEQ ID NO: 14046 - protein, 7 aa, Artificial Sequence
  source: /note="Description of Artificial Sequence: Synthetic peptide"
YMHASNV

SEQ ID NO: 14047 - protein, 7 aa, Artificial Sequence
  source: /note="Description of Artificial Sequence: Synthetic peptide"
YMHGSHA

SEQ ID NO: 14048 - protein, 7 aa, Artificial Sequence
  source: /note="Description of Artificial Sequence: Synthetic peptide"
YMHSPTP

SEQ ID NO: 14049 - protein, 7 aa, Artificial Sequence
  source: /note="Description of Artificial Sequence: Synthetic peptide"
YMHSSRT

SEQ ID NO: 14050 - protein, 7 aa, Artificial Sequence
  source: /note="Description of Artificial Sequence: Synthetic peptide"
YMHYTVT

SEQ ID NO: 14051 - protein, 7 aa, Artificial Sequence
  source: /note="Description of Artificial Sequence: Synthetic peptide"
YMPAPVQ

SEQ ID NO: 14052 - protein, 7 aa, Artificial Sequence
  source: /note="Description of Artificial Sequence: Synthetic peptide"
YMQTRDT

SEQ ID NO: 14053 - protein, 7 aa, Artificial Sequence
  source: /note="Description of Artificial Sequence: Synthetic peptide"
YMQVFSP

SEQ ID NO: 14054 - protein, 7 aa, Artificial Sequence
  source: /note="Description of Artificial Sequence: Synthetic peptide"
YMSAIRM

SEQ ID NO: 14055 - protein, 7 aa, Artificial Sequence
  source: /note="Description of Artificial Sequence: Synthetic peptide"
YMSATTR

SEQ ID NO: 14056 - protein, 7 aa, Artificial Sequence
  source: /note="Description of Artificial Sequence: Synthetic peptide"
YMSRTAS

SEQ ID NO: 14057 - protein, 7 aa, Artificial Sequence
  source: /note="Description of Artificial Sequence: Synthetic peptide"
YMSVTQQ

SEQ ID NO: 14058 - protein, 7 aa, Artificial Sequence
  source: /note="Description of Artificial Sequence: Synthetic peptide"
YMTGRPH

SEQ ID NO: 14059 - protein, 7 aa, Artificial Sequence
  source: /note="Description of Artificial Sequence: Synthetic peptide"
YMTKNFG

SEQ ID NO: 14060 - protein, 7 aa, Artificial Sequence
  source: /note="Description of Artificial Sequence: Synthetic peptide"
YMTNLQP

SEQ ID NO: 14061 - protein, 7 aa, Artificial Sequence
  source: /note="Description of Artificial Sequence: Synthetic peptide"
YMTSQSR

SEQ ID NO: 14062 - protein, 7 aa, Artificial Sequence
  source: /note="Description of Artificial Sequence: Synthetic peptide"
YMYDGSV

SEQ ID NO: 14063 - protein, 7 aa, Artificial Sequence
  source: /note="Description of Artificial Sequence: Synthetic peptide"
YNAASGL

SEQ ID NO: 14064 - protein, 7 aa, Artificial Sequence
  source: /note="Description of Artificial Sequence: Synthetic peptide"
YNAGGPR

SEQ ID NO: 14065 - protein, 7 aa, Artificial Sequence
  source: /note="Description of Artificial Sequence: Synthetic peptide"
YNALLQP

SEQ ID NO: 14066 - protein, 7 aa, Artificial Sequence
  source: /note="Description of Artificial Sequence: Synthetic peptide"
YNDVMSN

SEQ ID NO: 14067 - protein, 7 aa, Artificial Sequence
  source: /note="Description of Artificial Sequence: Synthetic peptide"
YNGNLRL

SEQ ID NO: 14068 - protein, 7 aa, Artificial Sequence
  source: /note="Description of Artificial Sequence: Synthetic peptide"
YNGQHIA

SEQ ID NO: 14069 - protein, 7 aa, Artificial Sequence
  source: /note="Description of Artificial Sequence: Synthetic peptide"
YNIGTSN

SEQ ID NO: 14070 - protein, 7 aa, Artificial Sequence
  source: /note="Description of Artificial Sequence: Synthetic peptide"
YNINQLT

SEQ ID NO: 14071 - protein, 7 aa, Artificial Sequence
  source: /note="Description of Artificial Sequence: Synthetic peptide"
YNLRPLQ

SEQ ID NO: 14072 - protein, 7 aa, Artificial Sequence
  source: /note="Description of Artificial Sequence: Synthetic peptide"
YNLSGPS

SEQ ID NO: 14073 - protein, 7 aa, Artificial Sequence
  source: /note="Description of Artificial Sequence: Synthetic peptide"
YNLSNPA

SEQ ID NO: 14074 - protein, 7 aa, Artificial Sequence
  source: /note="Description of Artificial Sequence: Synthetic peptide"
YNLSVGF

SEQ ID NO: 14075 - protein, 7 aa, Artificial Sequence
  source: /note="Description of Artificial Sequence: Synthetic peptide"
YNNSNTT

SEQ ID NO: 14076 - protein, 7 aa, Artificial Sequence
  source: /note="Description of Artificial Sequence: Synthetic peptide"
YNPLNQR

SEQ ID NO: 14077 - protein, 7 aa, Artificial Sequence
  source: /note="Description of Artificial Sequence: Synthetic peptide"
YNPPEPL

SEQ ID NO: 14078 - protein, 7 aa, Artificial Sequence
  source: /note="Description of Artificial Sequence: Synthetic peptide"
YNPPRSS

SEQ ID NO: 14079 - protein, 7 aa, Artificial Sequence
  source: /note="Description of Artificial Sequence: Synthetic peptide"
YNQHGPP

SEQ ID NO: 14080 - protein, 7 aa, Artificial Sequence
  source: /note="Description of Artificial Sequence: Synthetic peptide"
YNQLARP

SEQ ID NO: 14081 - protein, 7 aa, Artificial Sequence
  source: /note="Description of Artificial Sequence: Synthetic peptide"
YNQRPIV

SEQ ID NO: 14082 - protein, 7 aa, Artificial Sequence
  source: /note="Description of Artificial Sequence: Synthetic peptide"
YNRANLS

SEQ ID NO: 14083 - protein, 7 aa, Artificial Sequence
  source: /note="Description of Artificial Sequence: Synthetic peptide"
YNRGQMQ

SEQ ID NO: 14084 - protein, 7 aa, Artificial Sequence
  source: /note="Description of Artificial Sequence: Synthetic peptide"
YNRVATS

SEQ ID NO: 14085 - protein, 7 aa, Artificial Sequence
  source: /note="Description of Artificial Sequence: Synthetic peptide"
YNSSGVP

SEQ ID NO: 14086 - protein, 7 aa, Artificial Sequence
  source: /note="Description of Artificial Sequence: Synthetic peptide"
YNSSSLG

SEQ ID NO: 14087 - protein, 7 aa, Artificial Sequence
  source: /note="Description of Artificial Sequence: Synthetic peptide"
YNSTGLR

SEQ ID NO: 14088 - protein, 7 aa, Artificial Sequence
  source: /note="Description of Artificial Sequence: Synthetic peptide"
YNTGRIT

SEQ ID NO: 14089 - protein, 7 aa, Artificial Sequence
  source: /note="Description of Artificial Sequence: Synthetic peptide"
YNTIKAV

SEQ ID NO: 14090 - protein, 7 aa, Artificial Sequence
  source: /note="Description of Artificial Sequence: Synthetic peptide"
YNTPRME

SEQ ID NO: 14091 - protein, 7 aa, Artificial Sequence
  source: /note="Description of Artificial Sequence: Synthetic peptide"
YNVETDN

SEQ ID NO: 14092 - protein, 7 aa, Artificial Sequence
  source: /note="Description of Artificial Sequence: Synthetic peptide"
YNVYTVP

SEQ ID NO: 14093 - protein, 7 aa, Artificial Sequence
  source: /note="Description of Artificial Sequence: Synthetic peptide"
YPALDVF

SEQ ID NO: 14094 - protein, 7 aa, Artificial Sequence
  source: /note="Description of Artificial Sequence: Synthetic peptide"
YPANRLL

SEQ ID NO: 14095 - protein, 7 aa, Artificial Sequence
  source: /note="Description of Artificial Sequence: Synthetic peptide"
YPDSDLL

SEQ ID NO: 14096 - protein, 7 aa, Artificial Sequence
  source: /note="Description of Artificial Sequence: Synthetic peptide"
YPFGDMA

SEQ ID NO: 14097 - protein, 7 aa, Artificial Sequence
  source: /note="Description of Artificial Sequence: Synthetic peptide"
YPGATET

SEQ ID NO: 14098 - protein, 7 aa, Artificial Sequence
  source: /note="Description of Artificial Sequence: Synthetic peptide"
YPGTKQM

SEQ ID NO: 14099 - protein, 7 aa, Artificial Sequence
  source: /note="Description of Artificial Sequence: Synthetic peptide"
YPGVTVK

SEQ ID NO: 14100 - protein, 7 aa, Artificial Sequence
  source: /note="Description of Artificial Sequence: Synthetic peptide"
YPHAASW

SEQ ID NO: 14101 - protein, 7 aa, Artificial Sequence
  source: /note="Description of Artificial Sequence: Synthetic peptide"
YPHHSQH

SEQ ID NO: 14102 - protein, 7 aa, Artificial Sequence
  source: /note="Description of Artificial Sequence: Synthetic peptide"
YPHTPAA

SEQ ID NO: 14103 - protein, 7 aa, Artificial Sequence
  source: /note="Description of Artificial Sequence: Synthetic peptide"
YPIATVR

SEQ ID NO: 14104 - protein, 7 aa, Artificial Sequence
  source: /note="Description of Artificial Sequence: Synthetic peptide"
YPIRPLG

SEQ ID NO: 14105 - protein, 7 aa, Artificial Sequence
  source: /note="Description of Artificial Sequence: Synthetic peptide"
YPKVPTF

SEQ ID NO: 14106 - protein, 7 aa, Artificial Sequence
  source: /note="Description of Artificial Sequence: Synthetic peptide"
YPKVYSA

SEQ ID NO: 14107 - protein, 7 aa, Artificial Sequence
  source: /note="Description of Artificial Sequence: Synthetic peptide"
YPLSTSA

SEQ ID NO: 14108 - protein, 7 aa, Artificial Sequence
  source: /note="Description of Artificial Sequence: Synthetic peptide"
YPMPSPP

SEQ ID NO: 14109 - protein, 7 aa, Artificial Sequence
  source: /note="Description of Artificial Sequence: Synthetic peptide"
YPNDSYA

SEQ ID NO: 14110 - protein, 7 aa, Artificial Sequence
  source: /note="Description of Artificial Sequence: Synthetic peptide"
YPNHSRN

SEQ ID NO: 14111 - protein, 7 aa, Artificial Sequence
  source: /note="Description of Artificial Sequence: Synthetic peptide"
YPNSLSL

SEQ ID NO: 14112 - protein, 7 aa, Artificial Sequence
  source: /note="Description of Artificial Sequence: Synthetic peptide"
YPPDSHP

SEQ ID NO: 14113 - protein, 7 aa, Artificial Sequence
  source: /note="Description of Artificial Sequence: Synthetic peptide"
YPPIAQG

SEQ ID NO: 14114 - protein, 7 aa, Artificial Sequence
  source: /note="Description of Artificial Sequence: Synthetic peptide"
YPPKLGS

SEQ ID NO: 14115 - protein, 7 aa, Artificial Sequence
  source: /note="Description of Artificial Sequence: Synthetic peptide"
YPPKYAN

SEQ ID NO: 14116 - protein, 7 aa, Artificial Sequence
  source: /note="Description of Artificial Sequence: Synthetic peptide"
YPPPKAS

SEQ ID NO: 14117 - protein, 7 aa, Artificial Sequence
  source: /note="Description of Artificial Sequence: Synthetic peptide"
YPPSGYN

SEQ ID NO: 14118 - protein, 7 aa, Artificial Sequence
  source: /note="Description of Artificial Sequence: Synthetic peptide"
YPPTARA

SEQ ID NO: 14119 - protein, 7 aa, Artificial Sequence
  source: /note="Description of Artificial Sequence: Synthetic peptide"
YPPTPLP

SEQ ID NO: 14120 - protein, 7 aa, Artificial Sequence
  source: /note="Description of Artificial Sequence: Synthetic peptide"
YPPWHNP

SEQ ID NO: 14121 - protein, 7 aa, Artificial Sequence
  source: /note="Description of Artificial Sequence: Synthetic peptide"
YPRDASS

SEQ ID NO: 14122 - protein, 7 aa, Artificial Sequence
  source: /note="Description of Artificial Sequence: Synthetic peptide"
YPREKSL

SEQ ID NO: 14123 - protein, 7 aa, Artificial Sequence
  source: /note="Description of Artificial Sequence: Synthetic peptide"
YPRHPSF

SEQ ID NO: 14124 - protein, 7 aa, Artificial Sequence
  source: /note="Description of Artificial Sequence: Synthetic peptide"
YPRTLPE

SEQ ID NO: 14125 - protein, 7 aa, Artificial Sequence
  source: /note="Description of Artificial Sequence: Synthetic peptide"
YPSASSM

SEQ ID NO: 14126 - protein, 7 aa, Artificial Sequence
  source: /note="Description of Artificial Sequence: Synthetic peptide"
YPSHLLN

SEQ ID NO: 14127 - protein, 7 aa, Artificial Sequence
  source: /note="Description of Artificial Sequence: Synthetic peptide"
YPSPAGE

SEQ ID NO: 14128 - protein, 7 aa, Artificial Sequence
  source: /note="Description of Artificial Sequence: Synthetic peptide"
YPSPSNL

SEQ ID NO: 14129 - protein, 7 aa, Artificial Sequence
  source: /note="Description of Artificial Sequence: Synthetic peptide"
YPSSSMP

SEQ ID NO: 14130 - protein, 7 aa, Artificial Sequence
  source: /note="Description of Artificial Sequence: Synthetic peptide"
YPTGETP

SEQ ID NO: 14131 - protein, 7 aa, Artificial Sequence
  source: /note="Description of Artificial Sequence: Synthetic peptide"
YPTHSHM

SEQ ID NO: 14132 - protein, 7 aa, Artificial Sequence
  source: /note="Description of Artificial Sequence: Synthetic peptide"
YPTKHLH

SEQ ID NO: 14133 - protein, 7 aa, Artificial Sequence
  source: /note="Description of Artificial Sequence: Synthetic peptide"
YPTTPLM

SEQ ID NO: 14134 - protein, 7 aa, Artificial Sequence
  source: /note="Description of Artificial Sequence: Synthetic peptide"
YPVNAPT

SEQ ID NO: 14135 - protein, 7 aa, Artificial Sequence
  source: /note="Description of Artificial Sequence: Synthetic peptide"
YPVQDAL

SEQ ID NO: 14136 - protein, 7 aa, Artificial Sequence
  source: /note="Description of Artificial Sequence: Synthetic peptide"
YPVSTTQ

SEQ ID NO: 14137 - protein, 7 aa, Artificial Sequence
  source: /note="Description of Artificial Sequence: Synthetic peptide"
YQGIALG

SEQ ID NO: 14138 - protein, 7 aa, Artificial Sequence
  source: /note="Description of Artificial Sequence: Synthetic peptide"
YQGTLPS

SEQ ID NO: 14139 - protein, 7 aa, Artificial Sequence
  source: /note="Description of Artificial Sequence: Synthetic peptide"
YQLDNTP

SEQ ID NO: 14140 - protein, 7 aa, Artificial Sequence
  source: /note="Description of Artificial Sequence: Synthetic peptide"
YQLQRSE

SEQ ID NO: 14141 - protein, 7 aa, Artificial Sequence
  source: /note="Description of Artificial Sequence: Synthetic peptide"
YQLRQSP

SEQ ID NO: 14142 - protein, 7 aa, Artificial Sequence
  source: /note="Description of Artificial Sequence: Synthetic peptide"
YQLVTQP

SEQ ID NO: 14143 - protein, 7 aa, Artificial Sequence
  source: /note="Description of Artificial Sequence: Synthetic peptide"
YQPPDMG

SEQ ID NO: 14144 - protein, 7 aa, Artificial Sequence
  source: /note="Description of Artificial Sequence: Synthetic peptide"
YQQDGRC

SEQ ID NO: 14145 - protein, 7 aa, Artificial Sequence
  source: /note="Description of Artificial Sequence: Synthetic peptide"
YQRVSSS

SEQ ID NO: 14146 - protein, 7 aa, Artificial Sequence
  source: /note="Description of Artificial Sequence: Synthetic peptide"
YQSDGNP

SEQ ID NO: 14147 - protein, 7 aa, Artificial Sequence
  source: /note="Description of Artificial Sequence: Synthetic peptide"
YQTEITR

SEQ ID NO: 14148 - protein, 7 aa, Artificial Sequence
  source: /note="Description of Artificial Sequence: Synthetic peptide"
YQTYTRE

SEQ ID NO: 14149 - protein, 7 aa, Artificial Sequence
  source: /note="Description of Artificial Sequence: Synthetic peptide"
YQVKTGP

SEQ ID NO: 14150 - protein, 7 aa, Artificial Sequence
  source: /note="Description of Artificial Sequence: Synthetic peptide"
YQVNAGM

SEQ ID NO: 14151 - protein, 7 aa, Artificial Sequence
  source: /note="Description of Artificial Sequence: Synthetic peptide"
YRADGEA

SEQ ID NO: 14152 - protein, 7 aa, Artificial Sequence
  source: /note="Description of Artificial Sequence: Synthetic peptide"
YRAMAPP

SEQ ID NO: 14153 - protein, 7 aa, Artificial Sequence
  source: /note="Description of Artificial Sequence: Synthetic peptide"
YRANSPV

SEQ ID NO: 14154 - protein, 7 aa, Artificial Sequence
  source: /note="Description of Artificial Sequence: Synthetic peptide"
YRASGEL

SEQ ID NO: 14155 - protein, 7 aa, Artificial Sequence
  source: /note="Description of Artificial Sequence: Synthetic peptide"
YRDHEVL

SEQ ID NO: 14156 - protein, 7 aa, Artificial Sequence
  source: /note="Description of Artificial Sequence: Synthetic peptide"
YRDIQRG

SEQ ID NO: 14157 - protein, 7 aa, Artificial Sequence
  source: /note="Description of Artificial Sequence: Synthetic peptide"
YRDNRPN

SEQ ID NO: 14158 - protein, 7 aa, Artificial Sequence
  source: /note="Description of Artificial Sequence: Synthetic peptide"
YRDSSNI

SEQ ID NO: 14159 - protein, 7 aa, Artificial Sequence
  source: /note="Description of Artificial Sequence: Synthetic peptide"
YREMANR

SEQ ID NO: 14160 - protein, 7 aa, Artificial Sequence
  source: /note="Description of Artificial Sequence: Synthetic peptide"
YRENARA

SEQ ID NO: 14161 - protein, 7 aa, Artificial Sequence
  source: /note="Description of Artificial Sequence: Synthetic peptide"
YRGITLD

SEQ ID NO: 14162 - protein, 7 aa, Artificial Sequence
  source: /note="Description of Artificial Sequence: Synthetic peptide"
YRGNHAP

SEQ ID NO: 14163 - protein, 7 aa, Artificial Sequence
  source: /note="Description of Artificial Sequence: Synthetic peptide"
YRGYHVE

SEQ ID NO: 14164 - protein, 7 aa, Artificial Sequence
  source: /note="Description of Artificial Sequence: Synthetic peptide"
YRHGSIE

SEQ ID NO: 14165 - protein, 7 aa, Artificial Sequence
  source: /note="Description of Artificial Sequence: Synthetic peptide"
YRLYADD

SEQ ID NO: 14166 - protein, 7 aa, Artificial Sequence
  source: /note="Description of Artificial Sequence: Synthetic peptide"
YRMGTDQ

SEQ ID NO: 14167 - protein, 7 aa, Artificial Sequence
  source: /note="Description of Artificial Sequence: Synthetic peptide"
YRPGASA

SEQ ID NO: 14168 - protein, 7 aa, Artificial Sequence
  source: /note="Description of Artificial Sequence: Synthetic peptide"
YRPLSTP

SEQ ID NO: 14169 - protein, 7 aa, Artificial Sequence
  source: /note="Description of Artificial Sequence: Synthetic peptide"
YRPQEND

SEQ ID NO: 14170 - protein, 7 aa, Artificial Sequence
  source: /note="Description of Artificial Sequence: Synthetic peptide"
YRQALDH

SEQ ID NO: 14171 - protein, 7 aa, Artificial Sequence
  source: /note="Description of Artificial Sequence: Synthetic peptide"
YRQLDFP

SEQ ID NO: 14172 - protein, 7 aa, Artificial Sequence
  source: /note="Description of Artificial Sequence: Synthetic peptide"
YRQTRDP

SEQ ID NO: 14173 - protein, 7 aa, Artificial Sequence
  source: /note="Description of Artificial Sequence: Synthetic peptide"
YRQVTEV

SEQ ID NO: 14174 - protein, 7 aa, Artificial Sequence
  source: /note="Description of Artificial Sequence: Synthetic peptide"
YRSDTLR

SEQ ID NO: 14175 - protein, 7 aa, Artificial Sequence
  source: /note="Description of Artificial Sequence: Synthetic peptide"
YRSHTPP

SEQ ID NO: 14176 - protein, 7 aa, Artificial Sequence
  source: /note="Description of Artificial Sequence: Synthetic peptide"
YRSIVPD

SEQ ID NO: 14177 - protein, 7 aa, Artificial Sequence
  source: /note="Description of Artificial Sequence: Synthetic peptide"
YRSPDEM

SEQ ID NO: 14178 - protein, 7 aa, Artificial Sequence
  source: /note="Description of Artificial Sequence: Synthetic peptide"
YRSSTPD

SEQ ID NO: 14179 - protein, 7 aa, Artificial Sequence
  source: /note="Description of Artificial Sequence: Synthetic peptide"
YRSVVQS

SEQ ID NO: 14180 - protein, 7 aa, Artificial Sequence
  source: /note="Description of Artificial Sequence: Synthetic peptide"
YRTATPP

SEQ ID NO: 14181 - protein, 7 aa, Artificial Sequence
  source: /note="Description of Artificial Sequence: Synthetic peptide"
YRTEQLG

SEQ ID NO: 14182 - protein, 7 aa, Artificial Sequence
  source: /note="Description of Artificial Sequence: Synthetic peptide"
YRTIDSG

SEQ ID NO: 14183 - protein, 7 aa, Artificial Sequence
  source: /note="Description of Artificial Sequence: Synthetic peptide"
YRTLDNP

SEQ ID NO: 14184 - protein, 7 aa, Artificial Sequence
  source: /note="Description of Artificial Sequence: Synthetic peptide"
YRTPASS

SEQ ID NO: 14185 - protein, 7 aa, Artificial Sequence
  source: /note="Description of Artificial Sequence: Synthetic peptide"
YRTQPTQ

SEQ ID NO: 14186 - protein, 7 aa, Artificial Sequence
  source: /note="Description of Artificial Sequence: Synthetic peptide"
YRVDSAN

SEQ ID NO: 14187 - protein, 7 aa, Artificial Sequence
  source: /note="Description of Artificial Sequence: Synthetic peptide"
YRVSMLS

SEQ ID NO: 14188 - protein, 7 aa, Artificial Sequence
  source: /note="Description of Artificial Sequence: Synthetic peptide"
YRVSMSS

SEQ ID NO: 14189 - protein, 7 aa, Artificial Sequence
  source: /note="Description of Artificial Sequence: Synthetic peptide"
YRVVVGP

SEQ ID NO: 14190 - protein, 7 aa, Artificial Sequence
  source: /note="Description of Artificial Sequence: Synthetic peptide"
YSAHSAR

SEQ ID NO: 14191 - protein, 7 aa, Artificial Sequence
  source: /note="Description of Artificial Sequence: Synthetic peptide"
YSASSYL

SEQ ID NO: 14192 - protein, 7 aa, Artificial Sequence
  source: /note="Description of Artificial Sequence: Synthetic peptide"
YSDPARP

SEQ ID NO: 14193 - protein, 7 aa, Artificial Sequence
  source: /note="Description of Artificial Sequence: Synthetic peptide"
YSDSPKQ

SEQ ID NO: 14194 - protein, 7 aa, Artificial Sequence
  source: /note="Description of Artificial Sequence: Synthetic peptide"
YSDTDSS

SEQ ID NO: 14195 - protein, 7 aa, Artificial Sequence
  source: /note="Description of Artificial Sequence: Synthetic peptide"
YSDYGRP

SEQ ID NO: 14196 - protein, 7 aa, Artificial Sequence
  source: /note="Description of Artificial Sequence: Synthetic peptide"
YSEANIR

SEQ ID NO: 14197 - protein, 7 aa, Artificial Sequence
  source: /note="Description of Artificial Sequence: Synthetic peptide"
YSEFTLN

SEQ ID NO: 14198 - protein, 7 aa, Artificial Sequence
  source: /note="Description of Artificial Sequence: Synthetic peptide"
YSFPTSA

SEQ ID NO: 14199 - protein, 7 aa, Artificial Sequence
  source: /note="Description of Artificial Sequence: Synthetic peptide"
YSGHDTS

SEQ ID NO: 14200 - protein, 7 aa, Artificial Sequence
  source: /note="Description of Artificial Sequence: Synthetic peptide"
YSGRIGP

SEQ ID NO: 14201 - protein, 7 aa, Artificial Sequence
  source: /note="Description of Artificial Sequence: Synthetic peptide"
YSGRPAS

SEQ ID NO: 14202 - protein, 7 aa, Artificial Sequence
  source: /note="Description of Artificial Sequence: Synthetic peptide"
YSGSSRN

SEQ ID NO: 14203 - protein, 7 aa, Artificial Sequence
  source: /note="Description of Artificial Sequence: Synthetic peptide"
YSGTGFA

SEQ ID NO: 14204 - protein, 7 aa, Artificial Sequence
  source: /note="Description of Artificial Sequence: Synthetic peptide"
YSHANLP

SEQ ID NO: 14205 - protein, 7 aa, Artificial Sequence
  source: /note="Description of Artificial Sequence: Synthetic peptide"
YSHEAVM

SEQ ID NO: 14206 - protein, 7 aa, Artificial Sequence
  source: /note="Description of Artificial Sequence: Synthetic peptide"
YSHIEGS

SEQ ID NO: 14207 - protein, 7 aa, Artificial Sequence
  source: /note="Description of Artificial Sequence: Synthetic peptide"
YSHTQMS

SEQ ID NO: 14208 - protein, 7 aa, Artificial Sequence
  source: /note="Description of Artificial Sequence: Synthetic peptide"
YSHVTTC

SEQ ID NO: 14209 - protein, 7 aa, Artificial Sequence
  source: /note="Description of Artificial Sequence: Synthetic peptide"
YSIAHQS

SEQ ID NO: 14210 - protein, 7 aa, Artificial Sequence
  source: /note="Description of Artificial Sequence: Synthetic peptide"
YSLAYSP

SEQ ID NO: 14211 - protein, 7 aa, Artificial Sequence
  source: /note="Description of Artificial Sequence: Synthetic peptide"
YSLEDAP

SEQ ID NO: 14212 - protein, 7 aa, Artificial Sequence
  source: /note="Description of Artificial Sequence: Synthetic peptide"
YSLGGPS

SEQ ID NO: 14213 - protein, 7 aa, Artificial Sequence
  source: /note="Description of Artificial Sequence: Synthetic peptide"
YSLPTDL

SEQ ID NO: 14214 - protein, 7 aa, Artificial Sequence
  source: /note="Description of Artificial Sequence: Synthetic peptide"
YSLSHPS

SEQ ID NO: 14215 - protein, 7 aa, Artificial Sequence
  source: /note="Description of Artificial Sequence: Synthetic peptide"
YSLTLHD

SEQ ID NO: 14216 - protein, 7 aa, Artificial Sequence
  source: /note="Description of Artificial Sequence: Synthetic peptide"
YSMHAAI

SEQ ID NO: 14217 - protein, 7 aa, Artificial Sequence
  source: /note="Description of Artificial Sequence: Synthetic peptide"
YSMNKSP

SEQ ID NO: 14218 - protein, 7 aa, Artificial Sequence
  source: /note="Description of Artificial Sequence: Synthetic peptide"
YSMVRTP

SEQ ID NO: 14219 - protein, 7 aa, Artificial Sequence
  source: /note="Description of Artificial Sequence: Synthetic peptide"
YSNEAPR

SEQ ID NO: 14220 - protein, 7 aa, Artificial Sequence
  source: /note="Description of Artificial Sequence: Synthetic peptide"
YSNEKWA

SEQ ID NO: 14221 - protein, 7 aa, Artificial Sequence
  source: /note="Description of Artificial Sequence: Synthetic peptide"
YSNQARG

SEQ ID NO: 14222 - protein, 7 aa, Artificial Sequence
  source: /note="Description of Artificial Sequence: Synthetic peptide"
YSPHFRP

SEQ ID NO: 14223 - protein, 7 aa, Artificial Sequence
  source: /note="Description of Artificial Sequence: Synthetic peptide"
YSPIKTH

SEQ ID NO: 14224 - protein, 7 aa, Artificial Sequence
  source: /note="Description of Artificial Sequence: Synthetic peptide"
YSPISGS

SEQ ID NO: 14225 - protein, 7 aa, Artificial Sequence
  source: /note="Description of Artificial Sequence: Synthetic peptide"
YSPLPSR

SEQ ID NO: 14226 - protein, 7 aa, Artificial Sequence
  source: /note="Description of Artificial Sequence: Synthetic peptide"
YSPLSHH

SEQ ID NO: 14227 - protein, 7 aa, Artificial Sequence
  source: /note="Description of Artificial Sequence: Synthetic peptide"
YSPNLNG

SEQ ID NO: 14228 - protein, 7 aa, Artificial Sequence
  source: /note="Description of Artificial Sequence: Synthetic peptide"
YSPPPSM

SEQ ID NO: 14229 - protein, 7 aa, Artificial Sequence
  source: /note="Description of Artificial Sequence: Synthetic peptide"
YSPRTPT

SEQ ID NO: 14230 - protein, 7 aa, Artificial Sequence
  source: /note="Description of Artificial Sequence: Synthetic peptide"
YSPRTSL

SEQ ID NO: 14231 - protein, 7 aa, Artificial Sequence
  source: /note="Description of Artificial Sequence: Synthetic peptide"
YSPTEAF

SEQ ID NO: 14232 - protein, 7 aa, Artificial Sequence
  source: /note="Description of Artificial Sequence: Synthetic peptide"
YSPTRSS

SEQ ID NO: 14233 - protein, 7 aa, Artificial Sequence
  source: /note="Description of Artificial Sequence: Synthetic peptide"
YSQRGAD

SEQ ID NO: 14234 - protein, 7 aa, Artificial Sequence
  source: /note="Description of Artificial Sequence: Synthetic peptide"
YSQRNDS

SEQ ID NO: 14235 - protein, 7 aa, Artificial Sequence
  source: /note="Description of Artificial Sequence: Synthetic peptide"
YSRPSPL

SEQ ID NO: 14236 - protein, 7 aa, Artificial Sequence
  source: /note="Description of Artificial Sequence: Synthetic peptide"
YSSGGLR

SEQ ID NO: 14237 - protein, 7 aa, Artificial Sequence
  source: /note="Description of Artificial Sequence: Synthetic peptide"
YSSHLRN

SEQ ID NO: 14238 - protein, 7 aa, Artificial Sequence
  source: /note="Description of Artificial Sequence: Synthetic peptide"
YSSHSSS

SEQ ID NO: 14239 - protein, 7 aa, Artificial Sequence
  source: /note="Description of Artificial Sequence: Synthetic peptide"
YSSLAAL

SEQ ID NO: 14240 - protein, 7 aa, Artificial Sequence
  source: /note="Description of Artificial Sequence: Synthetic peptide"
YSSNLAR

SEQ ID NO: 14241 - protein, 7 aa, Artificial Sequence
  source: /note="Description of Artificial Sequence: Synthetic peptide"
YSSPDWS

SEQ ID NO: 14242 - protein, 7 aa, Artificial Sequence
  source: /note="Description of Artificial Sequence: Synthetic peptide"
YSSPPIT

SEQ ID NO: 14243 - protein, 7 aa, Artificial Sequence
  source: /note="Description of Artificial Sequence: Synthetic peptide"
YSSQLSE

SEQ ID NO: 14244 - protein, 7 aa, Artificial Sequence
  source: /note="Description of Artificial Sequence: Synthetic peptide"
YSSRGEA

SEQ ID NO: 14245 - protein, 7 aa, Artificial Sequence
  source: /note="Description of Artificial Sequence: Synthetic peptide"
YSSSVLA

SEQ ID NO: 14246 - protein, 7 aa, Artificial Sequence
  source: /note="Description of Artificial Sequence: Synthetic peptide"
YSTDRYS

SEQ ID NO: 14247 - protein, 7 aa, Artificial Sequence
  source: /note="Description of Artificial Sequence: Synthetic peptide"
YSTFQPE

SEQ ID NO: 14248 - protein, 7 aa, Artificial Sequence
  source: /note="Description of Artificial Sequence: Synthetic peptide"
YSTMRSM

SEQ ID NO: 14249 - protein, 7 aa, Artificial Sequence
  source: /note="Description of Artificial Sequence: Synthetic peptide"
YSTQSLN

SEQ ID NO: 14250 - protein, 7 aa, Artificial Sequence
  source: /note="Description of Artificial Sequence: Synthetic peptide"
YSTRSLS

SEQ ID NO: 14251 - protein, 7 aa, Artificial Sequence
  source: /note="Description of Artificial Sequence: Synthetic peptide"
YSTTGRL

SEQ ID NO: 14252 - protein, 7 aa, Artificial Sequence
  source: /note="Description of Artificial Sequence: Synthetic peptide"
YSTTVHA

SEQ ID NO: 14253 - protein, 7 aa, Artificial Sequence
  source: /note="Description of Artificial Sequence: Synthetic peptide"
YSTVGSS

SEQ ID NO: 14254 - protein, 7 aa, Artificial Sequence
  source: /note="Description of Artificial Sequence: Synthetic peptide"
YSVDAVW

SEQ ID NO: 14255 - protein, 7 aa, Artificial Sequence
  source: /note="Description of Artificial Sequence: Synthetic peptide"
YSVRTMS

SEQ ID NO: 14256 - protein, 7 aa, Artificial Sequence
  source: /note="Description of Artificial Sequence: Synthetic peptide"
YSVVTVD

SEQ ID NO: 14257 - protein, 7 aa, Artificial Sequence
  source: /note="Description of Artificial Sequence: Synthetic peptide"
YSYNSDH

SEQ ID NO: 14258 - protein, 7 aa, Artificial Sequence
  source: /note="Description of Artificial Sequence: Synthetic peptide"
YTAGVSA

SEQ ID NO: 14259 - protein, 7 aa, Artificial Sequence
  source: /note="Description of Artificial Sequence: Synthetic peptide"
YTARAQS

SEQ ID NO: 14260 - protein, 7 aa, Artificial Sequence
  source: /note="Description of Artificial Sequence: Synthetic peptide"
YTASGDI

SEQ ID NO: 14261 - protein, 7 aa, Artificial Sequence
  source: /note="Description of Artificial Sequence: Synthetic peptide"
YTEFAAN

SEQ ID NO: 14262 - protein, 7 aa, Artificial Sequence
  source: /note="Description of Artificial Sequence: Synthetic peptide"
YTGFTLD

SEQ ID NO: 14263 - protein, 7 aa, Artificial Sequence
  source: /note="Description of Artificial Sequence: Synthetic peptide"
YTGGQLH

SEQ ID NO: 14264 - protein, 7 aa, Artificial Sequence
  source: /note="Description of Artificial Sequence: Synthetic peptide"
YTGLEPS

SEQ ID NO: 14265 - protein, 7 aa, Artificial Sequence
  source: /note="Description of Artificial Sequence: Synthetic peptide"
YTGSSVL

SEQ ID NO: 14266 - protein, 7 aa, Artificial Sequence
  source: /note="Description of Artificial Sequence: Synthetic peptide"
YTHLTTA

SEQ ID NO: 14267 - protein, 7 aa, Artificial Sequence
  source: /note="Description of Artificial Sequence: Synthetic peptide"
YTHSIVT

SEQ ID NO: 14268 - protein, 7 aa, Artificial Sequence
  source: /note="Description of Artificial Sequence: Synthetic peptide"
YTHVLTP

SEQ ID NO: 14269 - protein, 7 aa, Artificial Sequence
  source: /note="Description of Artificial Sequence: Synthetic peptide"
YTKMLGP

SEQ ID NO: 14270 - protein, 7 aa, Artificial Sequence
  source: /note="Description of Artificial Sequence: Synthetic peptide"
YTKNSTV

SEQ ID NO: 14271 - protein, 7 aa, Artificial Sequence
  source: /note="Description of Artificial Sequence: Synthetic peptide"
YTLDQLS

SEQ ID NO: 14272 - protein, 7 aa, Artificial Sequence
  source: /note="Description of Artificial Sequence: Synthetic peptide"
YTLSATT

SEQ ID NO: 14273 - protein, 7 aa, Artificial Sequence
  source: /note="Description of Artificial Sequence: Synthetic peptide"
YTMSPRP

SEQ ID NO: 14274 - protein, 7 aa, Artificial Sequence
  source: /note="Description of Artificial Sequence: Synthetic peptide"
YTNDRRS

SEQ ID NO: 14275 - protein, 7 aa, Artificial Sequence
  source: /note="Description of Artificial Sequence: Synthetic peptide"
YTNNFVA

SEQ ID NO: 14276 - protein, 7 aa, Artificial Sequence
  source: /note="Description of Artificial Sequence: Synthetic peptide"
YTPAGLS

SEQ ID NO: 14277 - protein, 7 aa, Artificial Sequence
  source: /note="Description of Artificial Sequence: Synthetic peptide"
YTPHRMS

SEQ ID NO: 14278 - protein, 7 aa, Artificial Sequence
  source: /note="Description of Artificial Sequence: Synthetic peptide"
YTPLMSS

SEQ ID NO: 14279 - protein, 7 aa, Artificial Sequence
  source: /note="Description of Artificial Sequence: Synthetic peptide"
YTQSKTE

SEQ ID NO: 14280 - protein, 7 aa, Artificial Sequence
  source: /note="Description of Artificial Sequence: Synthetic peptide"
YTQTTWK

SEQ ID NO: 14281 - protein, 7 aa, Artificial Sequence
  source: /note="Description of Artificial Sequence: Synthetic peptide"
YTRAPDG

SEQ ID NO: 14282 - protein, 7 aa, Artificial Sequence
  source: /note="Description of Artificial Sequence: Synthetic peptide"
YTSHPTC

SEQ ID NO: 14283 - protein, 7 aa, Artificial Sequence
  source: /note="Description of Artificial Sequence: Synthetic peptide"
YTSISNM

SEQ ID NO: 14284 - protein, 7 aa, Artificial Sequence
  source: /note="Description of Artificial Sequence: Synthetic peptide"
YTSLSMA

SEQ ID NO: 14285 - protein, 7 aa, Artificial Sequence
  source: /note="Description of Artificial Sequence: Synthetic peptide"
YTSMHVS

SEQ ID NO: 14286 - protein, 7 aa, Artificial Sequence
  source: /note="Description of Artificial Sequence: Synthetic peptide"
YTSNIDM

SEQ ID NO: 14287 - protein, 7 aa, Artificial Sequence
  source: /note="Description of Artificial Sequence: Synthetic peptide"
YTSPAHV

SEQ ID NO: 14288 - protein, 7 aa, Artificial Sequence
  source: /note="Description of Artificial Sequence: Synthetic peptide"
YTSRHIA

SEQ ID NO: 14289 - protein, 7 aa, Artificial Sequence
  source: /note="Description of Artificial Sequence: Synthetic peptide"
YTSRVLS

SEQ ID NO: 14290 - protein, 7 aa, Artificial Sequence
  source: /note="Description of Artificial Sequence: Synthetic peptide"
YTSVYAH

SEQ ID NO: 14291 - protein, 7 aa, Artificial Sequence
  source: /note="Description of Artificial Sequence: Synthetic peptide"
YTSYTAP

SEQ ID NO: 14292 - protein, 7 aa, Artificial Sequence
  source: /note="Description of Artificial Sequence: Synthetic peptide"
YTTLPAR

SEQ ID NO: 14293 - protein, 7 aa, Artificial Sequence
  source: /note="Description of Artificial Sequence: Synthetic peptide"
YTTNRQS

SEQ ID NO: 14294 - protein, 7 aa, Artificial Sequence
  source: /note="Description of Artificial Sequence: Synthetic peptide"
YTTSPAL

SEQ ID NO: 14295 - protein, 7 aa, Artificial Sequence
  source: /note="Description of Artificial Sequence: Synthetic peptide"
YTTSPIK

SEQ ID NO: 14296 - protein, 7 aa, Artificial Sequence
  source: /note="Description of Artificial Sequence: Synthetic peptide"
YTVRHVN

SEQ ID NO: 14297 - protein, 7 aa, Artificial Sequence
  source: /note="Description of Artificial Sequence: Synthetic peptide"
YVATEQK

SEQ ID NO: 14298 - protein, 7 aa, Artificial Sequence
  source: /note="Description of Artificial Sequence: Synthetic peptide"
YVDDPSG

SEQ ID NO: 14299 - protein, 7 aa, Artificial Sequence
  source: /note="Description of Artificial Sequence: Synthetic peptide"
YVHLNTT

SEQ ID NO: 14300 - protein, 7 aa, Artificial Sequence
  source: /note="Description of Artificial Sequence: Synthetic peptide"
YVKLYEK

SEQ ID NO: 14301 - protein, 7 aa, Artificial Sequence
  source: /note="Description of Artificial Sequence: Synthetic peptide"
YVKPNGA

SEQ ID NO: 14302 - protein, 7 aa, Artificial Sequence
  source: /note="Description of Artificial Sequence: Synthetic peptide"
YVKSQTA

SEQ ID NO: 14303 - protein, 7 aa, Artificial Sequence
  source: /note="Description of Artificial Sequence: Synthetic peptide"
YVMSQSA

SEQ ID NO: 14304 - protein, 7 aa, Artificial Sequence
  source: /note="Description of Artificial Sequence: Synthetic peptide"
YVPGRNE

SEQ ID NO: 14305 - protein, 7 aa, Artificial Sequence
  source: /note="Description of Artificial Sequence: Synthetic peptide"
YVPMTSP

SEQ ID NO: 14306 - protein, 7 aa, Artificial Sequence
  source: /note="Description of Artificial Sequence: Synthetic peptide"
YVPTSLG

SEQ ID NO: 14307 - protein, 7 aa, Artificial Sequence
  source: /note="Description of Artificial Sequence: Synthetic peptide"
YVQQHVK

SEQ ID NO: 14308 - protein, 7 aa, Artificial Sequence
  source: /note="Description of Artificial Sequence: Synthetic peptide"
YVRGMDA

SEQ ID NO: 14309 - protein, 7 aa, Artificial Sequence
  source: /note="Description of Artificial Sequence: Synthetic peptide"
YVRVSNV

SEQ ID NO: 14310 - protein, 7 aa, Artificial Sequence
  source: /note="Description of Artificial Sequence: Synthetic peptide"
YVSHVDL

SEQ ID NO: 14311 - protein, 7 aa, Artificial Sequence
  source: /note="Description of Artificial Sequence: Synthetic peptide"
YVSMPNG

SEQ ID NO: 14312 - protein, 7 aa, Artificial Sequence
  source: /note="Description of Artificial Sequence: Synthetic peptide"
YVTDRMP

SEQ ID NO: 14313 - protein, 7 aa, Artificial Sequence
  source: /note="Description of Artificial Sequence: Synthetic peptide"
YVTGHHD

SEQ ID NO: 14314 - protein, 7 aa, Artificial Sequence
  source: /note="Description of Artificial Sequence: Synthetic peptide"
YVTKAPL

SEQ ID NO: 14315 - protein, 7 aa, Artificial Sequence
  source: /note="Description of Artificial Sequence: Synthetic peptide"
YVTQIHG

SEQ ID NO: 14316 - protein, 7 aa, Artificial Sequence
  source: /note="Description of Artificial Sequence: Synthetic peptide"
YVVEPEP

SEQ ID NO: 14317 - protein, 7 aa, Artificial Sequence
  source: /note="Description of Artificial Sequence: Synthetic peptide"
YVVNLPR

SEQ ID NO: 14318 - protein, 7 aa, Artificial Sequence
  source: /note="Description of Artificial Sequence: Synthetic peptide"
YVVRADG

SEQ ID NO: 14319 - protein, 7 aa, Artificial Sequence
  source: /note="Description of Artificial Sequence: Synthetic peptide"
YYDRSIG

SEQ ID NO: 14320 - protein, 7 aa, Artificial Sequence
  source: /note="Description of Artificial Sequence: Synthetic peptide"
YYESSKQ

SEQ ID NO: 14321 - protein, 7 aa, Artificial Sequence
  source: /note="Description of Artificial Sequence: Synthetic peptide"
YYGSAPA

SEQ ID NO: 14322 - protein, 7 aa, Artificial Sequence
  source: /note="Description of Artificial Sequence: Synthetic peptide"
YYGVHPN

SEQ ID NO: 14323 - protein, 7 aa, Artificial Sequence
  source: /note="Description of Artificial Sequence: Synthetic peptide"
YYNPSTS

SEQ ID NO: 14324 - protein, 7 aa, Artificial Sequence
  source: /note="Description of Artificial Sequence: Synthetic peptide"
YYPRPGG

SEQ ID NO: 14325 - protein, 7 aa, Artificial Sequence
  source: /note="Description of Artificial Sequence: Synthetic peptide"
YYSAMAD

SEQ ID NO: 14326 - protein, 7 aa, Artificial Sequence
  source: /note="Description of Artificial Sequence: Synthetic peptide"
YYSNTVT

SEQ ID NO: 14327 - DNA, 21 bp, Artificial Sequence
  source: /note="Description of Artificial Sequence: Synthetic oligonucleotide"
gcggctgcggcgtcgaatact

SEQ ID NO: 14328 - DNA, 21 bp, Artificial Sequence
  source: /note="Description of Artificial Sequence: Synthetic oligonucleotide"
gcggcggcgattgatggtgat

SEQ ID NO: 14329 - DNA, 21 bp, Artificial Sequence
  source: /note="Description of Artificial Sequence: Synthetic oligonucleotide"
gctgcggctctgtcgactaag

SEQ ID NO: 14330 - DNA, 21 bp, Artificial Sequence
  source: /note="Description of Artificial Sequence: Synthetic oligonucleotide"
gcggctgatgcgaatgttaat

SEQ ID NO: 14331 - DNA, 21 bp, Artificial Sequence
  source: /note="Description of Artificial Sequence: Synthetic oligonucleotide"
gctgctgattttaagcgtgat

SEQ ID NO: 14332 - DNA, 21 bp, Artificial Sequence
  source: /note="Description of Artificial Sequence: Synthetic oligonucleotide"
gcggctgataagacttctcgt

SEQ ID NO: 14333 - DNA, 21 bp, Artificial Sequence
  source: /note="Description of Artificial Sequence: Synthetic oligonucleotide"
gctgctgatcctgggtcgagg

SEQ ID NO: 14334 - DNA, 21 bp, Artificial Sequence
  source: /note="Description of Artificial Sequence: Synthetic oligonucleotide"
gcggcggatagggttcggccg

SEQ ID NO: 14335 - DNA, 21 bp, Artificial Sequence
  source: /note="Description of Artificial Sequence: Synthetic oligonucleotide"
gctgcttttatggttgagcgt

SEQ ID NO: 14336 - DNA, 21 bp, Artificial Sequence
  source: /note="Description of Artificial Sequence: Synthetic oligonucleotide"
gctgcggggtttgctactgat

SEQ ID NO: 14337 - DNA, 21 bp, Artificial Sequence
  source: /note="Description of Artificial Sequence: Synthetic oligonucleotide"
gcggcgggttttcatctgtcg

SEQ ID NO: 14338 - DNA, 21 bp, Artificial Sequence
  source: /note="Description of Artificial Sequence: Synthetic oligonucleotide"
gctgcggggatgattgcttct

SEQ ID NO: 14339 - DNA, 21 bp, Artificial Sequence
  source: /note="Description of Artificial Sequence: Synthetic oligonucleotide"
gctgctgggtcgacgcatatt

SEQ ID NO: 14340 - DNA, 21 bp, Artificial Sequence
  source: /note="Description of Artificial Sequence: Synthetic oligonucleotide"
gcggctcatgcgaatactgtt

SEQ ID NO: 14341 - DNA, 21 bp, Artificial Sequence
  source: /note="Description of Artificial Sequence: Synthetic oligonucleotide"
gcggctcatcctcagctgttt

SEQ ID NO: 14342 - DNA, 21 bp, Artificial Sequence
  source: /note="Description of Artificial Sequence: Synthetic oligonucleotide"
gcggctcatcgtacggcgcat

SEQ ID NO: 14343 - DNA, 21 bp, Artificial Sequence
  source: /note="Description of Artificial Sequence: Synthetic oligonucleotide"
gctgctattggtaaggatgag

SEQ ID NO: 14344 - DNA, 21 bp, Artificial Sequence
  source: /note="Description of Artificial Sequence: Synthetic oligonucleotide"
gctgcgattcggtctagttat

SEQ ID NO: 14345 - DNA, 21 bp, Artificial Sequence
  source: /note="Description of Artificial Sequence: Synthetic oligonucleotide"
gctgcgaagacgtctcagctg

SEQ ID NO: 14346 - DNA, 21 bp, Artificial Sequence
  source: /note="Description of Artificial Sequence: Synthetic oligonucleotide"
gcggcgttgccgacgttgctt

SEQ ID NO: 14347 - DNA, 21 bp, Artificial Sequence
  source: /note="Description of Artificial Sequence: Synthetic oligonucleotide"
gcggcgttgagtcatttgcat

SEQ ID NO: 14348 - DNA, 21 bp, Artificial Sequence
  source: /note="Description of Artificial Sequence: Synthetic oligonucleotide"
gctgcgttgagtcgggttgat

SEQ ID NO: 14349 - DNA, 21 bp, Artificial Sequence
  source: /note="Description of Artificial Sequence: Synthetic oligonucleotide"
gctgctcttacgaaggttctg

SEQ ID NO: 14350 - DNA, 21 bp, Artificial Sequence
  source: /note="Description of Artificial Sequence: Synthetic oligonucleotide"
gctgcgcttactaggctgact

SEQ ID NO: 14351 - DNA, 21 bp, Artificial Sequence
  source: /note="Description of Artificial Sequence: Synthetic oligonucleotide"
gctgctatgattaagcggcag

SEQ ID NO: 14352 - DNA, 21 bp, Artificial Sequence
  source: /note="Description of Artificial Sequence: Synthetic oligonucleotide"
gctgcgatgatgaagactgtt

SEQ ID NO: 14353 - DNA, 21 bp, Artificial Sequence
  source: /note="Description of Artificial Sequence: Synthetic oligonucleotide"
gctgcgatggtgagtactccg

SEQ ID NO: 14354 - DNA, 21 bp, Artificial Sequence
  source: /note="Description of Artificial Sequence: Synthetic oligonucleotide"
gctgcgaatcttcgtacgggt

SEQ ID NO: 14355 - DNA, 21 bp, Artificial Sequence
  source: /note="Description of Artificial Sequence: Synthetic oligonucleotide"
gctgctaatcttgttctgcag

SEQ ID NO: 14356 - DNA, 21 bp, Artificial Sequence
  source: /note="Description of Artificial Sequence: Synthetic oligonucleotide"
gcggcgaattcgacgcagtct

SEQ ID NO: 14357 - DNA, 21 bp, Artificial Sequence
  source: /note="Description of Artificial Sequence: Synthetic oligonucleotide"
gcggctccgattgcggctgct

SEQ ID NO: 14358 - DNA, 21 bp, Artificial Sequence
  source: /note="Description of Artificial Sequence: Synthetic oligonucleotide"
gcggctccgccttttggtcat

SEQ ID NO: 14359 - DNA, 21 bp, Artificial Sequence
  source: /note="Description of Artificial Sequence: Synthetic oligonucleotide"
gcggctcctagttcgtctatt

SEQ ID NO: 14360 - DNA, 21 bp, Artificial Sequence
  source: /note="Description of Artificial Sequence: Synthetic oligonucleotide"
gctgcgccgagttatcggggt

SEQ ID NO: 14361 - DNA, 21 bp, Artificial Sequence
  source: /note="Description of Artificial Sequence: Synthetic oligonucleotide"
gctgctcctacgattactcct

SEQ ID NO: 14362 - DNA, 21 bp, Artificial Sequence
  source: /note="Description of Artificial Sequence: Synthetic oligonucleotide"
gcggcgcagttgggggagcgg

SEQ ID NO: 14363 - DNA, 21 bp, Artificial Sequence
  source: /note="Description of Artificial Sequence: Synthetic oligonucleotide"
gctgcgcagccttatactcat

SEQ ID NO: 14364 - DNA, 21 bp, Artificial Sequence
  source: /note="Description of Artificial Sequence: Synthetic oligonucleotide"
gcggcgcgtccgccgaatgct

SEQ ID NO: 14365 - DNA, 21 bp, Artificial Sequence
  source: /note="Description of Artificial Sequence: Synthetic oligonucleotide"
gcggcgaggagtacggtggtt

SEQ ID NO: 14366 - DNA, 21 bp, Artificial Sequence
  source: /note="Description of Artificial Sequence: Synthetic oligonucleotide"
gctgctcgtacgtcttttaat

SEQ ID NO: 14367 - DNA, 21 bp, Artificial Sequence
  source: /note="Description of Artificial Sequence: Synthetic oligonucleotide"
gctgctaggactacttatact

SEQ ID NO: 14368 - DNA, 21 bp, Artificial Sequence
  source: /note="Description of Artificial Sequence: Synthetic oligonucleotide"
gctgcttcggctagtaggtat

SEQ ID NO: 14369 - DNA, 21 bp, Artificial Sequence
  source: /note="Description of Artificial Sequence: Synthetic oligonucleotide"
gctgctagttctgattcttat

SEQ ID NO: 14370 - DNA, 21 bp, Artificial Sequence
  source: /note="Description of Artificial Sequence: Synthetic oligonucleotide"
gcggcgtcttatgttgggatt

SEQ ID NO: 14371 - DNA, 21 bp, Artificial Sequence
  source: /note="Description of Artificial Sequence: Synthetic oligonucleotide"
gctgcgacttgtggtcagaat

SEQ ID NO: 14372 - DNA, 21 bp, Artificial Sequence
  source: /note="Description of Artificial Sequence: Synthetic oligonucleotide"
gcggctacgctggctactgct

SEQ ID NO: 14373 - DNA, 21 bp, Artificial Sequence
  source: /note="Description of Artificial Sequence: Synthetic oligonucleotide"
gcggctacgcctagtaagcat

SEQ ID NO: 14374 - DNA, 21 bp, Artificial Sequence
  source: /note="Description of Artificial Sequence: Synthetic oligonucleotide"
gctgctacgagtcttaattcg

SEQ ID NO: 14375 - DNA, 21 bp, Artificial Sequence
  source: /note="Description of Artificial Sequence: Synthetic oligonucleotide"
gcggctgtgggtgcgtcttct

SEQ ID NO: 14376 - DNA, 21 bp, Artificial Sequence
  source: /note="Description of Artificial Sequence: Synthetic oligonucleotide"
gctgctgtgggtgggcttggg

SEQ ID NO: 14377 - DNA, 21 bp, Artificial Sequence
  source: /note="Description of Artificial Sequence: Synthetic oligonucleotide"
gctgcgtgggcggatgagagt

SEQ ID NO: 14378 - DNA, 21 bp, Artificial Sequence
  source: /note="Description of Artificial Sequence: Synthetic oligonucleotide"
gctgcttattctttttcgcct

SEQ ID NO: 14379 - DNA, 21 bp, Artificial Sequence
  source: /note="Description of Artificial Sequence: Synthetic oligonucleotide"
gcggatgctcatatgaatcgt

SEQ ID NO: 14380 - DNA, 21 bp, Artificial Sequence
  source: /note="Description of Artificial Sequence: Synthetic oligonucleotide"
gctgatgatcatcattcgcat

SEQ ID NO: 14381 - DNA, 21 bp, Artificial Sequence
  source: /note="Description of Artificial Sequence: Synthetic oligonucleotide"
gctgatgaggaggattcttgt

SEQ ID NO: 14382 - DNA, 21 bp, Artificial Sequence
  source: /note="Description of Artificial Sequence: Synthetic oligonucleotide"
gcggatggtgatgtgccgcgg

SEQ ID NO: 14383 - DNA, 21 bp, Artificial Sequence
  source: /note="Description of Artificial Sequence: Synthetic oligonucleotide"
gcggatgggaagtcttctgat

SEQ ID NO: 14384 - DNA, 21 bp, Artificial Sequence
  source: /note="Description of Artificial Sequence: Synthetic oligonucleotide"
gcggatggttcgacgactctt

SEQ ID NO: 14385 - DNA, 21 bp, Artificial Sequence
  source: /note="Description of Artificial Sequence: Synthetic oligonucleotide"
gcggatcatgttccttatatt

SEQ ID NO: 14386 - DNA, 21 bp, Artificial Sequence
  source: /note="Description of Artificial Sequence: Synthetic oligonucleotide"
gctgataagttggggcatact

SEQ ID NO: 14387 - DNA, 21 bp, Artificial Sequence
  source: /note="Description of Artificial Sequence: Synthetic oligonucleotide"
gctgataagccgtcggatcgg

SEQ ID NO: 14388 - DNA, 21 bp, Artificial Sequence
  source: /note="Description of Artificial Sequence: Synthetic oligonucleotide"
gcggataagagtcgggtgggg

SEQ ID NO: 14389 - DNA, 21 bp, Artificial Sequence
  source: /note="Description of Artificial Sequence: Synthetic oligonucleotide"
gctgataaggttcggttggtg

SEQ ID NO: 14390 - DNA, 21 bp, Artificial Sequence
  source: /note="Description of Artificial Sequence: Synthetic oligonucleotide"
gctgatcttgctattagtgtt

SEQ ID NO: 14391 - DNA, 21 bp, Artificial Sequence
  source: /note="Description of Artificial Sequence: Synthetic oligonucleotide"
gctgatcttctgccgagtact

SEQ ID NO: 14392 - DNA, 21 bp, Artificial Sequence
  source: /note="Description of Artificial Sequence: Synthetic oligonucleotide"
gctgatctgtcgcctactgag

SEQ ID NO: 14393 - DNA, 21 bp, Artificial Sequence
  source: /note="Description of Artificial Sequence: Synthetic oligonucleotide"
gcggatttgtatacgcggccg

SEQ ID NO: 14394 - DNA, 21 bp, Artificial Sequence
  source: /note="Description of Artificial Sequence: Synthetic oligonucleotide"
gctgatatgaggagtagtgcg

SEQ ID NO: 14395 - DNA, 21 bp, Artificial Sequence
  source: /note="Description of Artificial Sequence: Synthetic oligonucleotide"
gcggataatcaggttcctctg

SEQ ID NO: 14396 - DNA, 21 bp, Artificial Sequence
  source: /note="Description of Artificial Sequence: Synthetic oligonucleotide"
gctgatcctgagggtgcgagt

SEQ ID NO: 14397 - DNA, 21 bp, Artificial Sequence
  source: /note="Description of Artificial Sequence: Synthetic oligonucleotide"
gcggatccggagagggttcgg

SEQ ID NO: 14398 - DNA, 21 bp, Artificial Sequence
  source: /note="Description of Artificial Sequence: Synthetic oligonucleotide"
gcggatccgcatatgccgaag

SEQ ID NO: 14399 - DNA, 21 bp, Artificial Sequence
  source: /note="Description of Artificial Sequence: Synthetic oligonucleotide"
gctgatccgcatcggaatcag

SEQ ID NO: 14400 - DNA, 21 bp, Artificial Sequence
  source: /note="Description of Artificial Sequence: Synthetic oligonucleotide"
gcggatcctatgcatcgtgct

SEQ ID NO: 14401 - DNA, 21 bp, Artificial Sequence
  source: /note="Description of Artificial Sequence: Synthetic oligonucleotide"
gcggatccgcctaagttttgg

SEQ ID NO: 14402 - DNA, 21 bp, Artificial Sequence
  source: /note="Description of Artificial Sequence: Synthetic oligonucleotide"
gctgatcctcggcagaagtcg

SEQ ID NO: 14403 - DNA, 21 bp, Artificial Sequence
  source: /note="Description of Artificial Sequence: Synthetic oligonucleotide"
gctgatcgtgctcatgcggtt

SEQ ID NO: 14404 - DNA, 21 bp, Artificial Sequence
  source: /note="Description of Artificial Sequence: Synthetic oligonucleotide"
gcggatagggggtctcattct

SEQ ID NO: 14405 - DNA, 21 bp, Artificial Sequence
  source: /note="Description of Artificial Sequence: Synthetic oligonucleotide"
gcggataggcttccttttttg

SEQ ID NO: 14406 - DNA, 21 bp, Artificial Sequence
  source: /note="Description of Artificial Sequence: Synthetic oligonucleotide"
gcggatcgttcgcctattact

SEQ ID NO: 14407 - DNA, 21 bp, Artificial Sequence
  source: /note="Description of Artificial Sequence: Synthetic oligonucleotide"
gctgatcgttatgggcgggtg

SEQ ID NO: 14408 - DNA, 21 bp, Artificial Sequence
  source: /note="Description of Artificial Sequence: Synthetic oligonucleotide"
gctgattcgggtcgtacgatt

SEQ ID NO: 14409 - DNA, 21 bp, Artificial Sequence
  source: /note="Description of Artificial Sequence: Synthetic oligonucleotide"
gcggattcgactcatgctgct

SEQ ID NO: 14410 - DNA, 21 bp, Artificial Sequence
  source: /note="Description of Artificial Sequence: Synthetic oligonucleotide"
gctgatactatgacgtcgtcg

SEQ ID NO: 14411 - DNA, 21 bp, Artificial Sequence
  source: /note="Description of Artificial Sequence: Synthetic oligonucleotide"
gctgatacgatgactactgtg

SEQ ID NO: 14412 - DNA, 21 bp, Artificial Sequence
  source: /note="Description of Artificial Sequence: Synthetic oligonucleotide"
gctgatactcgtttgcatagt

SEQ ID NO: 14413 - DNA, 21 bp, Artificial Sequence
  source: /note="Description of Artificial Sequence: Synthetic oligonucleotide"
gctgatactaggcttcagacg

SEQ ID NO: 14414 - DNA, 21 bp, Artificial Sequence
  source: /note="Description of Artificial Sequence: Synthetic oligonucleotide"
gctgatgttaggactttgtct

SEQ ID NO: 14415 - DNA, 21 bp, Artificial Sequence
  source: /note="Description of Artificial Sequence: Synthetic oligonucleotide"
gcggaggctgggatgtttgat

SEQ ID NO: 14416 - DNA, 21 bp, Artificial Sequence
  source: /note="Description of Artificial Sequence: Synthetic oligonucleotide"
gctgaggctaagaatacgagg

SEQ ID NO: 14417 - DNA, 21 bp, Artificial Sequence
  source: /note="Description of Artificial Sequence: Synthetic oligonucleotide"
gctgaggcgcctacgcgggat

SEQ ID NO: 14418 - DNA, 21 bp, Artificial Sequence
  source: /note="Description of Artificial Sequence: Synthetic oligonucleotide"
gctgaggcgacgagtgttgag

SEQ ID NO: 14419 - DNA, 21 bp, Artificial Sequence
  source: /note="Description of Artificial Sequence: Synthetic oligonucleotide"
gcggaggggaatccgaagatt

SEQ ID NO: 14420 - DNA, 21 bp, Artificial Sequence
  source: /note="Description of Artificial Sequence: Synthetic oligonucleotide"
gctgagggtccggagtggcgt

SEQ ID NO: 14421 - DNA, 21 bp, Artificial Sequence
  source: /note="Description of Artificial Sequence: Synthetic oligonucleotide"
gctgagcatcctaattcgctt

SEQ ID NO: 14422 - DNA, 21 bp, Artificial Sequence
  source: /note="Description of Artificial Sequence: Synthetic oligonucleotide"
gctgagcattctccgtcgctg

SEQ ID NO: 14423 - DNA, 21 bp, Artificial Sequence
  source: /note="Description of Artificial Sequence: Synthetic oligonucleotide"
gcggagattgttcggcatgtt

SEQ ID NO: 14424 - DNA, 21 bp, Artificial Sequence
  source: /note="Description of Artificial Sequence: Synthetic oligonucleotide"
gcggagcttgcgtcgccgatt

SEQ ID NO: 14425 - DNA, 21 bp, Artificial Sequence
  source: /note="Description of Artificial Sequence: Synthetic oligonucleotide"
gctgagctgaagagggggccg

SEQ ID NO: 14426 - DNA, 21 bp, Artificial Sequence
  source: /note="Description of Artificial Sequence: Synthetic oligonucleotide"
gcggagcttcctcctcggcag

SEQ ID NO: 14427 - DNA, 21 bp, Artificial Sequence
  source: /note="Description of Artificial Sequence: Synthetic oligonucleotide"
gctgagctgcagcctcatctt

SEQ ID NO: 14428 - DNA, 21 bp, Artificial Sequence
  source: /note="Description of Artificial Sequence: Synthetic oligonucleotide"
gcggagccgaggtcgtggtct

SEQ ID NO: 14429 - DNA, 21 bp, Artificial Sequence
  source: /note="Description of Artificial Sequence: Synthetic oligonucleotide"
gctgagccgactgattttctt

SEQ ID NO: 14430 - DNA, 21 bp, Artificial Sequence
  source: /note="Description of Artificial Sequence: Synthetic oligonucleotide"
gctgagcgggcgacttggagt

SEQ ID NO: 14431 - DNA, 21 bp, Artificial Sequence
  source: /note="Description of Artificial Sequence: Synthetic oligonucleotide"
gcggagcgtaatatggctccg

SEQ ID NO: 14432 - DNA, 21 bp, Artificial Sequence
  source: /note="Description of Artificial Sequence: Synthetic oligonucleotide"
gctgagcggcagcagtatttg

SEQ ID NO: 14433 - DNA, 21 bp, Artificial Sequence
  source: /note="Description of Artificial Sequence: Synthetic oligonucleotide"
gcggagtctgcgtatgttccg

SEQ ID NO: 14434 - DNA, 21 bp, Artificial Sequence
  source: /note="Description of Artificial Sequence: Synthetic oligonucleotide"
gctgagacgagttcgtcttcg

SEQ ID NO: 14435 - DNA, 21 bp, Artificial Sequence
  source: /note="Description of Artificial Sequence: Synthetic oligonucleotide"
gcttttgcgggggttcgtggt

SEQ ID NO: 14436 - DNA, 21 bp, Artificial Sequence
  source: /note="Description of Artificial Sequence: Synthetic oligonucleotide"
gcgtttgcgcggagtgctcct

SEQ ID NO: 14437 - DNA, 21 bp, Artificial Sequence
  source: /note="Description of Artificial Sequence: Synthetic oligonucleotide"
gcgtttgatacgcgtgggggt

SEQ ID NO: 14438 - DNA, 21 bp, Artificial Sequence
  source: /note="Description of Artificial Sequence: Synthetic oligonucleotide"
gcgtttgaggggcggtcgccg

SEQ ID NO: 14439 - DNA, 21 bp, Artificial Sequence
  source: /note="Description of Artificial Sequence: Synthetic oligonucleotide"
gcttttgagtcgcctagggct

SEQ ID NO: 14440 - DNA, 21 bp, Artificial Sequence
  source: /note="Description of Artificial Sequence: Synthetic oligonucleotide"
gcttttggtgcgagtatgtct

SEQ ID NO: 14441 - DNA, 21 bp, Artificial Sequence
  source: /note="Description of Artificial Sequence: Synthetic oligonucleotide"
gcgtttggtaaggggcatacg

SEQ ID NO: 14442 - DNA, 21 bp, Artificial Sequence
  source: /note="Description of Artificial Sequence: Synthetic oligonucleotide"
gcttttgggaagaatactgtt

SEQ ID NO: 14443 - DNA, 21 bp, Artificial Sequence
  source: /note="Description of Artificial Sequence: Synthetic oligonucleotide"
gcgtttggtactttgaagatg

SEQ ID NO: 14444 - DNA, 21 bp, Artificial Sequence
  source: /note="Description of Artificial Sequence: Synthetic oligonucleotide"
gcttttctggctgctaatgcg

SEQ ID NO: 14445 - DNA, 21 bp, Artificial Sequence
  source: /note="Description of Artificial Sequence: Synthetic oligonucleotide"
gcttttcttaatcagcttagt

SEQ ID NO: 14446 - DNA, 21 bp, Artificial Sequence
  source: /note="Description of Artificial Sequence: Synthetic oligonucleotide"
gcgtttctttcgtcggcgcct

SEQ ID NO: 14447 - DNA, 21 bp, Artificial Sequence
  source: /note="Description of Artificial Sequence: Synthetic oligonucleotide"
gcttttatgtctaagctggag

SEQ ID NO: 14448 - DNA, 21 bp, Artificial Sequence
  source: /note="Description of Artificial Sequence: Synthetic oligonucleotide"
gcgtttaatggtacggattcg

SEQ ID NO: 14449 - DNA, 21 bp, Artificial Sequence
  source: /note="Description of Artificial Sequence: Synthetic oligonucleotide"
gcgtttaatcatgagctgtct

SEQ ID NO: 14450 - DNA, 21 bp, Artificial Sequence
  source: /note="Description of Artificial Sequence: Synthetic oligonucleotide"
gcttttaatacgagtcatgat

SEQ ID NO: 14451 - DNA, 21 bp, Artificial Sequence
  source: /note="Description of Artificial Sequence: Synthetic oligonucleotide"
gcttttccgttgccgcctcat

SEQ ID NO: 14452 - DNA, 21 bp, Artificial Sequence
  source: /note="Description of Artificial Sequence: Synthetic oligonucleotide"
gcttttccgcagtctggtaat

SEQ ID NO: 14453 - DNA, 21 bp, Artificial Sequence
  source: /note="Description of Artificial Sequence: Synthetic oligonucleotide"
gcttttcaggataagcagact

SEQ ID NO: 14454 - DNA, 21 bp, Artificial Sequence
  source: /note="Description of Artificial Sequence: Synthetic oligonucleotide"
gcgtttcagcatcagcctccg

SEQ ID NO: 14455 - DNA, 21 bp, Artificial Sequence
  source: /note="Description of Artificial Sequence: Synthetic oligonucleotide"
gcttttcagagtgcgagggct

SEQ ID NO: 14456 - DNA, 21 bp, Artificial Sequence
  source: /note="Description of Artificial Sequence: Synthetic oligonucleotide"
gctttttctaatgcgggtccg

SEQ ID NO: 14457 - DNA, 21 bp, Artificial Sequence
  source: /note="Description of Artificial Sequence: Synthetic oligonucleotide"
gctttttctacgactgttatg

SEQ ID NO: 14458 - DNA, 21 bp, Artificial Sequence
  source: /note="Description of Artificial Sequence: Synthetic oligonucleotide"
gcgtttacggggaagtcttcg

SEQ ID NO: 14459 - DNA, 21 bp, Artificial Sequence
  source: /note="Description of Artificial Sequence: Synthetic oligonucleotide"
gcttttgtggcgagttcgcct

SEQ ID NO: 14460 - DNA, 21 bp, Artificial Sequence
  source: /note="Description of Artificial Sequence: Synthetic oligonucleotide"
gcgtttgtggggaaggtgact

SEQ ID NO: 14461 - DNA, 21 bp, Artificial Sequence
  source: /note="Description of Artificial Sequence: Synthetic oligonucleotide"
gcgtttgtgcctaagagtatg

SEQ ID NO: 14462 - DNA, 21 bp, Artificial Sequence
  source: /note="Description of Artificial Sequence: Synthetic oligonucleotide"
gctggggcggaggagcatatg

SEQ ID NO: 14463 - DNA, 21 bp, Artificial Sequence
  source: /note="Description of Artificial Sequence: Synthetic oligonucleotide"
gctggggcgcttatgcatttg

SEQ ID NO: 14464 - DNA, 21 bp, Artificial Sequence
  source: /note="Description of Artificial Sequence: Synthetic oligonucleotide"
gcgggggcgccgactggtctt

SEQ ID NO: 14465 - DNA, 21 bp, Artificial Sequence
  source: /note="Description of Artificial Sequence: Synthetic oligonucleotide"
gctggtgcgacttcgttttat

SEQ ID NO: 14466 - DNA, 21 bp, Artificial Sequence
  source: /note="Description of Artificial Sequence: Synthetic oligonucleotide"
gctgggggtgctgggcagatg

SEQ ID NO: 14467 - DNA, 21 bp, Artificial Sequence
  source: /note="Description of Artificial Sequence: Synthetic oligonucleotide"
gcgggtggtcagccttcgctg

SEQ ID NO: 14468 - DNA, 21 bp, Artificial Sequence
  source: /note="Description of Artificial Sequence: Synthetic oligonucleotide"
gctggtggtagttggcctgcg

SEQ ID NO: 14469 - DNA, 21 bp, Artificial Sequence
  source: /note="Description of Artificial Sequence: Synthetic oligonucleotide"
gctggggggacgtctatgccg

SEQ ID NO: 14470 - DNA, 21 bp, Artificial Sequence
  source: /note="Description of Artificial Sequence: Synthetic oligonucleotide"
gctggtgggtatcttgttccg

SEQ ID NO: 14471 - DNA, 21 bp, Artificial Sequence
  source: /note="Description of Artificial Sequence: Synthetic oligonucleotide"
gcgggtcatcgggctgattct

SEQ ID NO: 14472 - DNA, 21 bp, Artificial Sequence
  source: /note="Description of Artificial Sequence: Synthetic oligonucleotide"
gctggtcatactaatttgccg

SEQ ID NO: 14473 - DNA, 21 bp, Artificial Sequence
  source: /note="Description of Artificial Sequence: Synthetic oligonucleotide"
gctgggcatgttgtgtctatg

SEQ ID NO: 14474 - DNA, 21 bp, Artificial Sequence
  source: /note="Description of Artificial Sequence: Synthetic oligonucleotide"
gctgggattactactgctgtg

SEQ ID NO: 14475 - DNA, 21 bp, Artificial Sequence
  source: /note="Description of Artificial Sequence: Synthetic oligonucleotide"
gcgggtaaggctacgtatatt

SEQ ID NO: 14476 - DNA, 21 bp, Artificial Sequence
  source: /note="Description of Artificial Sequence: Synthetic oligonucleotide"
gcggggaagctggtgtcttct

SEQ ID NO: 14477 - DNA, 21 bp, Artificial Sequence
  source: /note="Description of Artificial Sequence: Synthetic oligonucleotide"
gcggggttggcggtgaagccg

SEQ ID NO: 14478 - DNA, 21 bp, Artificial Sequence
  source: /note="Description of Artificial Sequence: Synthetic oligonucleotide"
gctgggttggatttttatcct

SEQ ID NO: 14479 - DNA, 21 bp, Artificial Sequence
  source: /note="Description of Artificial Sequence: Synthetic oligonucleotide"
gctggtttgaaggatgttacg

SEQ ID NO: 14480 - DNA, 21 bp, Artificial Sequence
  source: /note="Description of Artificial Sequence: Synthetic oligonucleotide"
gctggtctgttgacgcagatt

SEQ ID NO: 14481 - DNA, 21 bp, Artificial Sequence
  source: /note="Description of Artificial Sequence: Synthetic oligonucleotide"
gctggtcttaatgggcagggt

SEQ ID NO: 14482 - DNA, 21 bp, Artificial Sequence
  source: /note="Description of Artificial Sequence: Synthetic oligonucleotide"
gctggtcttaatcattctgtt

SEQ ID NO: 14483 - DNA, 21 bp, Artificial Sequence
  source: /note="Description of Artificial Sequence: Synthetic oligonucleotide"
gcgggtcttcagcagctgtcg

SEQ ID NO: 14484 - DNA, 21 bp, Artificial Sequence
  source: /note="Description of Artificial Sequence: Synthetic oligonucleotide"
gctggtatggatagtaatgat

SEQ ID NO: 14485 - DNA, 21 bp, Artificial Sequence
  source: /note="Description of Artificial Sequence: Synthetic oligonucleotide"
gcggggatgcattctatgact

SEQ ID NO: 14486 - DNA, 21 bp, Artificial Sequence
  source: /note="Description of Artificial Sequence: Synthetic oligonucleotide"
gctgggatgcctcctgctcct

SEQ ID NO: 14487 - DNA, 21 bp, Artificial Sequence
  source: /note="Description of Artificial Sequence: Synthetic oligonucleotide"
gctgggaatcatgctgtgcag

SEQ ID NO: 14488 - DNA, 21 bp, Artificial Sequence
  source: /note="Description of Artificial Sequence: Synthetic oligonucleotide"
gctgggaattctaagacttct

SEQ ID NO: 14489 - DNA, 21 bp, Artificial Sequence
  source: /note="Description of Artificial Sequence: Synthetic oligonucleotide"
gctggtaattcgcttagttct

SEQ ID NO: 14490 - DNA, 21 bp, Artificial Sequence
  source: /note="Description of Artificial Sequence: Synthetic oligonucleotide"
gctggtccgcatgttctggcg

SEQ ID NO: 14491 - DNA, 21 bp, Artificial Sequence
  source: /note="Description of Artificial Sequence: Synthetic oligonucleotide"
gctgggccttcgaattttgat

SEQ ID NO: 14492 - DNA, 21 bp, Artificial Sequence
  source: /note="Description of Artificial Sequence: Synthetic oligonucleotide"
gctggtccgacgaatccgttt

SEQ ID NO: 14493 - DNA, 21 bp, Artificial Sequence
  source: /note="Description of Artificial Sequence: Synthetic oligonucleotide"
gctgggcagtttactaagtct

SEQ ID NO: 14494 - DNA, 21 bp, Artificial Sequence
  source: /note="Description of Artificial Sequence: Synthetic oligonucleotide"
gcgggtcagggttctcagagt

SEQ ID NO: 14495 - DNA, 21 bp, Artificial Sequence
  source: /note="Description of Artificial Sequence: Synthetic oligonucleotide"
gcggggcagaattcgttggtt

SEQ ID NO: 14496 - DNA, 21 bp, Artificial Sequence
  source: /note="Description of Artificial Sequence: Synthetic oligonucleotide"
gcggggcagtctgctcctcgg

SEQ ID NO: 14497 - DNA, 21 bp, Artificial Sequence
  source: /note="Description of Artificial Sequence: Synthetic oligonucleotide"
gcgggtcgggattcggcgtgg

SEQ ID NO: 14498 - DNA, 21 bp, Artificial Sequence
  source: /note="Description of Artificial Sequence: Synthetic oligonucleotide"
gctggtcggaatatgcatcct

SEQ ID NO: 14499 - DNA, 21 bp, Artificial Sequence
  source: /note="Description of Artificial Sequence: Synthetic oligonucleotide"
gcgggtcggccgccgcagtct

SEQ ID NO: 14500 - DNA, 21 bp, Artificial Sequence
  source: /note="Description of Artificial Sequence: Synthetic oligonucleotide"
gctggtcgggtgcttacgatg

SEQ ID NO: 14501 - DNA, 21 bp, Artificial Sequence
  source: /note="Description of Artificial Sequence: Synthetic oligonucleotide"
gctggttcgggtggttctccg

SEQ ID NO: 14502 - DNA, 21 bp, Artificial Sequence
  source: /note="Description of Artificial Sequence: Synthetic oligonucleotide"
gctggttcgggggttctgaat

SEQ ID NO: 14503 - DNA, 21 bp, Artificial Sequence
  source: /note="Description of Artificial Sequence: Synthetic oligonucleotide"
gcggggtcgcatcagtctgag

SEQ ID NO: 14504 - DNA, 21 bp, Artificial Sequence
  source: /note="Description of Artificial Sequence: Synthetic oligonucleotide"
gcgggttcgattatttcgcgt

SEQ ID NO: 14505 - DNA, 21 bp, Artificial Sequence
  source: /note="Description of Artificial Sequence: Synthetic oligonucleotide"
gctggttctctttcggttgat

SEQ ID NO: 14506 - DNA, 21 bp, Artificial Sequence
  source: /note="Description of Artificial Sequence: Synthetic oligonucleotide"
gctggtagtcagcatccggct

SEQ ID NO: 14507 - DNA, 21 bp, Artificial Sequence
  source: /note="Description of Artificial Sequence: Synthetic oligonucleotide"
gctgggtctcagacgccgccg

SEQ ID NO: 14508 - DNA, 21 bp, Artificial Sequence
  source: /note="Description of Artificial Sequence: Synthetic oligonucleotide"
gcgggttcgagtcggacgttt

SEQ ID NO: 14509 - DNA, 21 bp, Artificial Sequence
  source: /note="Description of Artificial Sequence: Synthetic oligonucleotide"
gctggtacgggtttggggatg

SEQ ID NO: 14510 - DNA, 21 bp, Artificial Sequence
  source: /note="Description of Artificial Sequence: Synthetic oligonucleotide"
gctggtactgggccttttgct

SEQ ID NO: 14511 - DNA, 21 bp, Artificial Sequence
  source: /note="Description of Artificial Sequence: Synthetic oligonucleotide"
gcggggactattcgtatttcg

SEQ ID NO: 14512 - DNA, 21 bp, Artificial Sequence
  source: /note="Description of Artificial Sequence: Synthetic oligonucleotide"
gctggtacgctggtgattatg

SEQ ID NO: 14513 - DNA, 21 bp, Artificial Sequence
  source: /note="Description of Artificial Sequence: Synthetic oligonucleotide"
gctgggacgaatcagcgtaat

SEQ ID NO: 14514 - DNA, 21 bp, Artificial Sequence
  source: /note="Description of Artificial Sequence: Synthetic oligonucleotide"
gcgggtacgcagccgatgacg

SEQ ID NO: 14515 - DNA, 21 bp, Artificial Sequence
  source: /note="Description of Artificial Sequence: Synthetic oligonucleotide"
gctgggactcagagggcttat

SEQ ID NO: 14516 - DNA, 21 bp, Artificial Sequence
  source: /note="Description of Artificial Sequence: Synthetic oligonucleotide"
gcgggtacttctcattctcat

SEQ ID NO: 14517 - DNA, 21 bp, Artificial Sequence
  source: /note="Description of Artificial Sequence: Synthetic oligonucleotide"
gcggggactgtggagcatctt

SEQ ID NO: 14518 - DNA, 21 bp, Artificial Sequence
  source: /note="Description of Artificial Sequence: Synthetic oligonucleotide"
gctggtgtgggtaaggcgcag

SEQ ID NO: 14519 - DNA, 21 bp, Artificial Sequence
  source: /note="Description of Artificial Sequence: Synthetic oligonucleotide"
gctggggtgttgaagatgtcg

SEQ ID NO: 14520 - DNA, 21 bp, Artificial Sequence
  source: /note="Description of Artificial Sequence: Synthetic oligonucleotide"
gctggtgtgcctaggatggag

SEQ ID NO: 14521 - DNA, 21 bp, Artificial Sequence
  source: /note="Description of Artificial Sequence: Synthetic oligonucleotide"
gctggtgttccttctcctgct

SEQ ID NO: 14522 - DNA, 21 bp, Artificial Sequence
  source: /note="Description of Artificial Sequence: Synthetic oligonucleotide"
gctggtgttcagcctgggcag

SEQ ID NO: 14523 - DNA, 21 bp, Artificial Sequence
  source: /note="Description of Artificial Sequence: Synthetic oligonucleotide"
gctggggtgtctgaggctatt

SEQ ID NO: 14524 - DNA, 21 bp, Artificial Sequence
  source: /note="Description of Artificial Sequence: Synthetic oligonucleotide"
gcgcatgctgtgtctttgcag

SEQ ID NO: 14525 - DNA, 21 bp, Artificial Sequence
  source: /note="Description of Artificial Sequence: Synthetic oligonucleotide"
gcgcatgatgaggttccttat

SEQ ID NO: 14526 - DNA, 21 bp, Artificial Sequence
  source: /note="Description of Artificial Sequence: Synthetic oligonucleotide"
gcgcatgatattccgatgtcg

SEQ ID NO: 14527 - DNA, 21 bp, Artificial Sequence
  source: /note="Description of Artificial Sequence: Synthetic oligonucleotide"
gctcatgataataagagtatg

SEQ ID NO: 14528 - DNA, 21 bp, Artificial Sequence
  source: /note="Description of Artificial Sequence: Synthetic oligonucleotide"
gcgcatgaggtgttgagtttt

SEQ ID NO: 14529 - DNA, 21 bp, Artificial Sequence
  source: /note="Description of Artificial Sequence: Synthetic oligonucleotide"
gcgcatggtgagagtaagccg

SEQ ID NO: 14530 - DNA, 21 bp, Artificial Sequence
  source: /note="Description of Artificial Sequence: Synthetic oligonucleotide"
gctcatggtaatgcgccgtcg

SEQ ID NO: 14531 - DNA, 21 bp, Artificial Sequence
  source: /note="Description of Artificial Sequence: Synthetic oligonucleotide"
gctcatgggaatagttctctt

SEQ ID NO: 14532 - DNA, 21 bp, Artificial Sequence
  source: /note="Description of Artificial Sequence: Synthetic oligonucleotide"
gctcatgggagtctgcaggtt

SEQ ID NO: 14533 - DNA, 21 bp, Artificial Sequence
  source: /note="Description of Artificial Sequence: Synthetic oligonucleotide"
gctcatggggttgcttatatt

SEQ ID NO: 14534 - DNA, 21 bp, Artificial Sequence
  source: /note="Description of Artificial Sequence: Synthetic oligonucleotide"
gcgcatggggtgaagacgtcg

SEQ ID NO: 14535 - DNA, 21 bp, Artificial Sequence
  source: /note="Description of Artificial Sequence: Synthetic oligonucleotide"
gctcatcatagtgtgccgccg

SEQ ID NO: 14536 - DNA, 21 bp, Artificial Sequence
  source: /note="Description of Artificial Sequence: Synthetic oligonucleotide"
gctcatattgcgcgtcatggg

SEQ ID NO: 14537 - DNA, 21 bp, Artificial Sequence
  source: /note="Description of Artificial Sequence: Synthetic oligonucleotide"
gcgcataagtcgcttcctctg

SEQ ID NO: 14538 - DNA, 21 bp, Artificial Sequence
  source: /note="Description of Artificial Sequence: Synthetic oligonucleotide"
gctcatcttaagtatgggagt

SEQ ID NO: 14539 - DNA, 21 bp, Artificial Sequence
  source: /note="Description of Artificial Sequence: Synthetic oligonucleotide"
gctcatatggatcgtactagt

SEQ ID NO: 14540 - DNA, 21 bp, Artificial Sequence
  source: /note="Description of Artificial Sequence: Synthetic oligonucleotide"
gctcatatgacggatggtgag

SEQ ID NO: 14541 - DNA, 21 bp, Artificial Sequence
  source: /note="Description of Artificial Sequence: Synthetic oligonucleotide"
gcgcataatgttcagggggcg

SEQ ID NO: 14542 - DNA, 21 bp, Artificial Sequence
  source: /note="Description of Artificial Sequence: Synthetic oligonucleotide"
gctcatccgcctcagccgggg

SEQ ID NO: 14543 - DNA, 21 bp, Artificial Sequence
  source: /note="Description of Artificial Sequence: Synthetic oligonucleotide"
gctcatccgagtcttcctctg

SEQ ID NO: 14544 - DNA, 21 bp, Artificial Sequence
  source: /note="Description of Artificial Sequence: Synthetic oligonucleotide"
gctcatccttcgcggggtatt

SEQ ID NO: 14545 - DNA, 21 bp, Artificial Sequence
  source: /note="Description of Artificial Sequence: Synthetic oligonucleotide"
gcgcatccgtcgtcgcatggt

SEQ ID NO: 14546 - DNA, 21 bp, Artificial Sequence
  source: /note="Description of Artificial Sequence: Synthetic oligonucleotide"
gctcatcaggtggggctggct

SEQ ID NO: 14547 - DNA, 21 bp, Artificial Sequence
  source: /note="Description of Artificial Sequence: Synthetic oligonucleotide"
gctcattcgcatgttccgccg

SEQ ID NO: 14548 - DNA, 21 bp, Artificial Sequence
  source: /note="Description of Artificial Sequence: Synthetic oligonucleotide"
gctcattcgcttaagcaggtt

SEQ ID NO: 14549 - DNA, 21 bp, Artificial Sequence
  source: /note="Description of Artificial Sequence: Synthetic oligonucleotide"
gctcatagtccggctctggtt

SEQ ID NO: 14550 - DNA, 21 bp, Artificial Sequence
  source: /note="Description of Artificial Sequence: Synthetic oligonucleotide"
gctcatagtcgtagtgggcct

SEQ ID NO: 14551 - DNA, 21 bp, Artificial Sequence
  source: /note="Description of Artificial Sequence: Synthetic oligonucleotide"
gctcatactctgacggagcct

SEQ ID NO: 14552 - DNA, 21 bp, Artificial Sequence
  source: /note="Description of Artificial Sequence: Synthetic oligonucleotide"
gcgcatacgaatcttacgtcg

SEQ ID NO: 14553 - DNA, 21 bp, Artificial Sequence
  source: /note="Description of Artificial Sequence: Synthetic oligonucleotide"
gctcatacgcgtattatgccg

SEQ ID NO: 14554 - DNA, 21 bp, Artificial Sequence
  source: /note="Description of Artificial Sequence: Synthetic oligonucleotide"
gctcatgtgaatagttttagt

SEQ ID NO: 14555 - DNA, 21 bp, Artificial Sequence
  source: /note="Description of Artificial Sequence: Synthetic oligonucleotide"
gctcatgttcctgcggcggat

SEQ ID NO: 14556 - DNA, 21 bp, Artificial Sequence
  source: /note="Description of Artificial Sequence: Synthetic oligonucleotide"
gctcatgtgtctcagtctggt

SEQ ID NO: 14557 - DNA, 21 bp, Artificial Sequence
  source: /note="Description of Artificial Sequence: Synthetic oligonucleotide"
gctattgcgtttcggcgggag

SEQ ID NO: 14558 - DNA, 21 bp, Artificial Sequence
  source: /note="Description of Artificial Sequence: Synthetic oligonucleotide"
gcgattgcgccgccgtatacg

SEQ ID NO: 14559 - DNA, 21 bp, Artificial Sequence
  source: /note="Description of Artificial Sequence: Synthetic oligonucleotide"
gctattgctgtgtctgcgggg

SEQ ID NO: 14560 - DNA, 21 bp, Artificial Sequence
  source: /note="Description of Artificial Sequence: Synthetic oligonucleotide"
gctattgattctggttatcat

SEQ ID NO: 14561 - DNA, 21 bp, Artificial Sequence
  source: /note="Description of Artificial Sequence: Synthetic oligonucleotide"
gctattggtgcgattggttcg

SEQ ID NO: 14562 - DNA, 21 bp, Artificial Sequence
  source: /note="Description of Artificial Sequence: Synthetic oligonucleotide"
gctattgggcctagggggggt

SEQ ID NO: 14563 - DNA, 21 bp, Artificial Sequence
  source: /note="Description of Artificial Sequence: Synthetic oligonucleotide"
gcgattgggagtactacgtct

SEQ ID NO: 14564 - DNA, 21 bp, Artificial Sequence
  source: /note="Description of Artificial Sequence: Synthetic oligonucleotide"
gcgattcatgcggtgtcgccg

SEQ ID NO: 14565 - DNA, 21 bp, Artificial Sequence
  source: /note="Description of Artificial Sequence: Synthetic oligonucleotide"
gcgattcattctacgaagtct

SEQ ID NO: 14566 - DNA, 21 bp, Artificial Sequence
  source: /note="Description of Artificial Sequence: Synthetic oligonucleotide"
gctattaagggtcaggatctt

SEQ ID NO: 14567 - DNA, 21 bp, Artificial Sequence
  source: /note="Description of Artificial Sequence: Synthetic oligonucleotide"
gcgattaattttcaggcgggt

SEQ ID NO: 14568 - DNA, 21 bp, Artificial Sequence
  source: /note="Description of Artificial Sequence: Synthetic oligonucleotide"
gctattaatcatgcgatgact

SEQ ID NO: 14569 - DNA, 21 bp, Artificial Sequence
  source: /note="Description of Artificial Sequence: Synthetic oligonucleotide"
gctattcctggtcatattatg

SEQ ID NO: 14570 - DNA, 21 bp, Artificial Sequence
  source: /note="Description of Artificial Sequence: Synthetic oligonucleotide"
gcgattcctggttcgtcgcgt

SEQ ID NO: 14571 - DNA, 21 bp, Artificial Sequence
  source: /note="Description of Artificial Sequence: Synthetic oligonucleotide"
gctattccgatgactcatgat

SEQ ID NO: 14572 - DNA, 21 bp, Artificial Sequence
  source: /note="Description of Artificial Sequence: Synthetic oligonucleotide"
gctattccgaatcctcttgat

SEQ ID NO: 14573 - DNA, 21 bp, Artificial Sequence
  source: /note="Description of Artificial Sequence: Synthetic oligonucleotide"
gctattaggaatgtgttggct

SEQ ID NO: 14574 - DNA, 21 bp, Artificial Sequence
  source: /note="Description of Artificial Sequence: Synthetic oligonucleotide"
gcgattaggtctgctaatgat

SEQ ID NO: 14575 - DNA, 21 bp, Artificial Sequence
  source: /note="Description of Artificial Sequence: Synthetic oligonucleotide"
gcgattcggtcgccgtcgcct

SEQ ID NO: 14576 - DNA, 21 bp, Artificial Sequence
  source: /note="Description of Artificial Sequence: Synthetic oligonucleotide"
gcgattcggtatacggatcct

SEQ ID NO: 14577 - DNA, 21 bp, Artificial Sequence
  source: /note="Description of Artificial Sequence: Synthetic oligonucleotide"
gcgattagtgttggggggtct

SEQ ID NO: 14578 - DNA, 21 bp, Artificial Sequence
  source: /note="Description of Artificial Sequence: Synthetic oligonucleotide"
gcgattacgacggcgcgtaat

SEQ ID NO: 14579 - DNA, 21 bp, Artificial Sequence
  source: /note="Description of Artificial Sequence: Synthetic oligonucleotide"
gcgatttatggtggtcttacg

SEQ ID NO: 14580 - DNA, 21 bp, Artificial Sequence
  source: /note="Description of Artificial Sequence: Synthetic oligonucleotide"
gcgatttatatgcagcagcct

SEQ ID NO: 14581 - DNA, 21 bp, Artificial Sequence
  source: /note="Description of Artificial Sequence: Synthetic oligonucleotide"
gcgatttatcagggggtggat

SEQ ID NO: 14582 - DNA, 21 bp, Artificial Sequence
  source: /note="Description of Artificial Sequence: Synthetic oligonucleotide"
gctaaggctagtaatcaggat

SEQ ID NO: 14583 - DNA, 21 bp, Artificial Sequence
  source: /note="Description of Artificial Sequence: Synthetic oligonucleotide"
gctaaggcgactgctcttgag

SEQ ID NO: 14584 - DNA, 21 bp, Artificial Sequence
  source: /note="Description of Artificial Sequence: Synthetic oligonucleotide"
gcgaaggatattggtcagatt

SEQ ID NO: 14585 - DNA, 21 bp, Artificial Sequence
  source: /note="Description of Artificial Sequence: Synthetic oligonucleotide"
gctaaggatattcctccgcgg

SEQ ID NO: 14586 - DNA, 21 bp, Artificial Sequence
  source: /note="Description of Artificial Sequence: Synthetic oligonucleotide"
gctaagtttgctcctagtgag

SEQ ID NO: 14587 - DNA, 21 bp, Artificial Sequence
  source: /note="Description of Artificial Sequence: Synthetic oligonucleotide"
gctaagggggatccgcgtatg

SEQ ID NO: 14588 - DNA, 21 bp, Artificial Sequence
  source: /note="Description of Artificial Sequence: Synthetic oligonucleotide"
gcgaagggtcagattcatgtt

SEQ ID NO: 14589 - DNA, 21 bp, Artificial Sequence
  source: /note="Description of Artificial Sequence: Synthetic oligonucleotide"
gctaagcatactgagttttct

SEQ ID NO: 14590 - DNA, 21 bp, Artificial Sequence
  source: /note="Description of Artificial Sequence: Synthetic oligonucleotide"
gctaagattagtagtgcttct

SEQ ID NO: 14591 - DNA, 21 bp, Artificial Sequence
  source: /note="Description of Artificial Sequence: Synthetic oligonucleotide"
gcgaagttggaggcgattcct

SEQ ID NO: 14592 - DNA, 21 bp, Artificial Sequence
  source: /note="Description of Artificial Sequence: Synthetic oligonucleotide"
gcgaagaatcgggattcgtgt

SEQ ID NO: 14593 - DNA, 21 bp, Artificial Sequence
  source: /note="Description of Artificial Sequence: Synthetic oligonucleotide"
gctaagaattcgccgcatccg

SEQ ID NO: 14594 - DNA, 21 bp, Artificial Sequence
  source: /note="Description of Artificial Sequence: Synthetic oligonucleotide"
gcgaagaattctactttttct

SEQ ID NO: 14595 - DNA, 21 bp, Artificial Sequence
  source: /note="Description of Artificial Sequence: Synthetic oligonucleotide"
gctaagccggcgttgctggtt

SEQ ID NO: 14596 - DNA, 21 bp, Artificial Sequence
  source: /note="Description of Artificial Sequence: Synthetic oligonucleotide"
gctaagccgcatttgcagttt

SEQ ID NO: 14597 - DNA, 21 bp, Artificial Sequence
  source: /note="Description of Artificial Sequence: Synthetic oligonucleotide"
gcgaagccgattcgtcctcct

SEQ ID NO: 14598 - DNA, 21 bp, Artificial Sequence
  source: /note="Description of Artificial Sequence: Synthetic oligonucleotide"
gctaagccgtctgaggagaag

SEQ ID NO: 14599 - DNA, 21 bp, Artificial Sequence
  source: /note="Description of Artificial Sequence: Synthetic oligonucleotide"
gcgaagccgacttatcagccg

SEQ ID NO: 14600 - DNA, 21 bp, Artificial Sequence
  source: /note="Description of Artificial Sequence: Synthetic oligonucleotide"
gctaagcgtctggatgatgcg

SEQ ID NO: 14601 - DNA, 21 bp, Artificial Sequence
  source: /note="Description of Artificial Sequence: Synthetic oligonucleotide"
gcgaagtctattaagcttagt

SEQ ID NO: 14602 - DNA, 21 bp, Artificial Sequence
  source: /note="Description of Artificial Sequence: Synthetic oligonucleotide"
gctaagagtaatgttggtctt

SEQ ID NO: 14603 - DNA, 21 bp, Artificial Sequence
  source: /note="Description of Artificial Sequence: Synthetic oligonucleotide"
gctaagtctagttatccgatt

SEQ ID NO: 14604 - DNA, 21 bp, Artificial Sequence
  source: /note="Description of Artificial Sequence: Synthetic oligonucleotide"
gctaagtcggtggctctttcg

SEQ ID NO: 14605 - DNA, 21 bp, Artificial Sequence
  source: /note="Description of Artificial Sequence: Synthetic oligonucleotide"
gctaagacgattgagatttct

SEQ ID NO: 14606 - DNA, 21 bp, Artificial Sequence
  source: /note="Description of Artificial Sequence: Synthetic oligonucleotide"
gcgaagactttgagggatgat

SEQ ID NO: 14607 - DNA, 21 bp, Artificial Sequence
  source: /note="Description of Artificial Sequence: Synthetic oligonucleotide"
gctaagacgatggggacgatg

SEQ ID NO: 14608 - DNA, 21 bp, Artificial Sequence
  source: /note="Description of Artificial Sequence: Synthetic oligonucleotide"
gctaagacgactttgagtgcg

SEQ ID NO: 14609 - DNA, 21 bp, Artificial Sequence
  source: /note="Description of Artificial Sequence: Synthetic oligonucleotide"
gctaagtatagtccttctgcg

SEQ ID NO: 14610 - DNA, 21 bp, Artificial Sequence
  source: /note="Description of Artificial Sequence: Synthetic oligonucleotide"
gcgaagtatagtagtatgccg

SEQ ID NO: 14611 - DNA, 21 bp, Artificial Sequence
  source: /note="Description of Artificial Sequence: Synthetic oligonucleotide"
gcgctggctattgggcgggat

SEQ ID NO: 14612 - DNA, 21 bp, Artificial Sequence
  source: /note="Description of Artificial Sequence: Synthetic oligonucleotide"
gcgcttgcgcttaagacttcg

SEQ ID NO: 14613 - DNA, 21 bp, Artificial Sequence
  source: /note="Description of Artificial Sequence: Synthetic oligonucleotide"
gcgttggcgacgaaggttatt

SEQ ID NO: 14614 - DNA, 21 bp, Artificial Sequence
  source: /note="Description of Artificial Sequence: Synthetic oligonucleotide"
gctttggatgctcgtcgggtg

SEQ ID NO: 14615 - DNA, 21 bp, Artificial Sequence
  source: /note="Description of Artificial Sequence: Synthetic oligonucleotide"
gctcttgatcagatgactatt

SEQ ID NO: 14616 - DNA, 21 bp, Artificial Sequence
  source: /note="Description of Artificial Sequence: Synthetic oligonucleotide"
gctctggagtgtcctcgggct

SEQ ID NO: 14617 - DNA, 21 bp, Artificial Sequence
  source: /note="Description of Artificial Sequence: Synthetic oligonucleotide"
gctcttgaggggttgcgtcct

SEQ ID NO: 14618 - DNA, 21 bp, Artificial Sequence
  source: /note="Description of Artificial Sequence: Synthetic oligonucleotide"
gcgctggagcttggttcggag

SEQ ID NO: 14619 - DNA, 21 bp, Artificial Sequence
  source: /note="Description of Artificial Sequence: Synthetic oligonucleotide"
gcgctggagaggacgtctttg

SEQ ID NO: 14620 - DNA, 21 bp, Artificial Sequence
  source: /note="Description of Artificial Sequence: Synthetic oligonucleotide"
gcgctgtttccgggtatgagt

SEQ ID NO: 14621 - DNA, 21 bp, Artificial Sequence
  source: /note="Description of Artificial Sequence: Synthetic oligonucleotide"
gctctgggtgattttccgtct

SEQ ID NO: 14622 - DNA, 21 bp, Artificial Sequence
  source: /note="Description of Artificial Sequence: Synthetic oligonucleotide"
gcgcttgggcatcaggcgatg

SEQ ID NO: 14623 - DNA, 21 bp, Artificial Sequence
  source: /note="Description of Artificial Sequence: Synthetic oligonucleotide"
gcgctggggaataataagtct

SEQ ID NO: 14624 - DNA, 21 bp, Artificial Sequence
  source: /note="Description of Artificial Sequence: Synthetic oligonucleotide"
gctttgggtcgtaatgagggt

SEQ ID NO: 14625 - DNA, 21 bp, Artificial Sequence
  source: /note="Description of Artificial Sequence: Synthetic oligonucleotide"
gcgttgggggtgccgccttct

SEQ ID NO: 14626 - DNA, 21 bp, Artificial Sequence
  source: /note="Description of Artificial Sequence: Synthetic oligonucleotide"
gcgttgggggttagtgctttg

SEQ ID NO: 14627 - DNA, 21 bp, Artificial Sequence
  source: /note="Description of Artificial Sequence: Synthetic oligonucleotide"
gctttggggtatcataatact

SEQ ID NO: 14628 - DNA, 21 bp, Artificial Sequence
  source: /note="Description of Artificial Sequence: Synthetic oligonucleotide"
gctttgcatccgagtgcgccg

SEQ ID NO: 14629 - DNA, 21 bp, Artificial Sequence
  source: /note="Description of Artificial Sequence: Synthetic oligonucleotide"
gcgcttattgagcgtgttaat

SEQ ID NO: 14630 - DNA, 21 bp, Artificial Sequence
  source: /note="Description of Artificial Sequence: Synthetic oligonucleotide"
gcgcttattaaggtgcataat

SEQ ID NO: 14631 - DNA, 21 bp, Artificial Sequence
  source: /note="Description of Artificial Sequence: Synthetic oligonucleotide"
gcgttgattccgagtccgcct

SEQ ID NO: 14632 - DNA, 21 bp, Artificial Sequence
  source: /note="Description of Artificial Sequence: Synthetic oligonucleotide"
gcgctgctggattctaagctg

SEQ ID NO: 14633 - DNA, 21 bp, Artificial Sequence
  source: /note="Description of Artificial Sequence: Synthetic oligonucleotide"
gctctgttggagcagcggccg

SEQ ID NO: 14634 - DNA, 21 bp, Artificial Sequence
  source: /note="Description of Artificial Sequence: Synthetic oligonucleotide"
gctttgctgggggtgaatagg

SEQ ID NO: 14635 - DNA, 21 bp, Artificial Sequence
  source: /note="Description of Artificial Sequence: Synthetic oligonucleotide"
gctttgcttcattctattggg

SEQ ID NO: 14636 - DNA, 21 bp, Artificial Sequence
  source: /note="Description of Artificial Sequence: Synthetic oligonucleotide"
gcgttgttgcagaatgcgtcg

SEQ ID NO: 14637 - DNA, 21 bp, Artificial Sequence
  source: /note="Description of Artificial Sequence: Synthetic oligonucleotide"
gctcttctttcttctgggaat

SEQ ID NO: 14638 - DNA, 21 bp, Artificial Sequence
  source: /note="Description of Artificial Sequence: Synthetic oligonucleotide"
gctcttatgcgggggacgatt

SEQ ID NO: 14639 - DNA, 21 bp, Artificial Sequence
  source: /note="Description of Artificial Sequence: Synthetic oligonucleotide"
gctttgaatgatgcggcgggt

SEQ ID NO: 14640 - DNA, 21 bp, Artificial Sequence
  source: /note="Description of Artificial Sequence: Synthetic oligonucleotide"
gcgctgaatcatgataagcct

SEQ ID NO: 14641 - DNA, 21 bp, Artificial Sequence
  source: /note="Description of Artificial Sequence: Synthetic oligonucleotide"
gcgttgaatattcctgagctt

SEQ ID NO: 14642 - DNA, 21 bp, Artificial Sequence
  source: /note="Description of Artificial Sequence: Synthetic oligonucleotide"
gctttgaatacgcatacggtt

SEQ ID NO: 14643 - DNA, 21 bp, Artificial Sequence
  source: /note="Description of Artificial Sequence: Synthetic oligonucleotide"
gctcttcctgctaagtcgtat

SEQ ID NO: 14644 - DNA, 21 bp, Artificial Sequence
  source: /note="Description of Artificial Sequence: Synthetic oligonucleotide"
gctctgccggcgagtgtggat

SEQ ID NO: 14645 - DNA, 21 bp, Artificial Sequence
  source: /note="Description of Artificial Sequence: Synthetic oligonucleotide"
gctcttcctggtactccgaat

SEQ ID NO: 14646 - DNA, 21 bp, Artificial Sequence
  source: /note="Description of Artificial Sequence: Synthetic oligonucleotide"
gctctgcctttgagtcgggcg

SEQ ID NO: 14647 - DNA, 21 bp, Artificial Sequence
  source: /note="Description of Artificial Sequence: Synthetic oligonucleotide"
gcgttgcctcagttggcggtt

SEQ ID NO: 14648 - DNA, 21 bp, Artificial Sequence
  source: /note="Description of Artificial Sequence: Synthetic oligonucleotide"
gctcttcctcagcgtcgggat

SEQ ID NO: 14649 - DNA, 21 bp, Artificial Sequence
  source: /note="Description of Artificial Sequence: Synthetic oligonucleotide"
gcgttgccgagtagtgatcat

SEQ ID NO: 14650 - DNA, 21 bp, Artificial Sequence
  source: /note="Description of Artificial Sequence: Synthetic oligonucleotide"
gctttgccttcgactttggtg

SEQ ID NO: 14651 - DNA, 21 bp, Artificial Sequence
  source: /note="Description of Artificial Sequence: Synthetic oligonucleotide"
gctttgccgactactaaggcg

SEQ ID NO: 14652 - DNA, 21 bp, Artificial Sequence
  source: /note="Description of Artificial Sequence: Synthetic oligonucleotide"
gcgctgcaggcgccgcatacg

SEQ ID NO: 14653 - DNA, 21 bp, Artificial Sequence
  source: /note="Description of Artificial Sequence: Synthetic oligonucleotide"
gctcttcaggggtattctgtg

SEQ ID NO: 14654 - DNA, 21 bp, Artificial Sequence
  source: /note="Description of Artificial Sequence: Synthetic oligonucleotide"
gctctgcagcgggattggtcg

SEQ ID NO: 14655 - DNA, 21 bp, Artificial Sequence
  source: /note="Description of Artificial Sequence: Synthetic oligonucleotide"
gctcttcagagtgatactgtt

SEQ ID NO: 14656 - DNA, 21 bp, Artificial Sequence
  source: /note="Description of Artificial Sequence: Synthetic oligonucleotide"
gcgttgcagtcttctgtgagg

SEQ ID NO: 14657 - DNA, 21 bp, Artificial Sequence
  source: /note="Description of Artificial Sequence: Synthetic oligonucleotide"
gctcttcggatgggtatgacg

SEQ ID NO: 14658 - DNA, 21 bp, Artificial Sequence
  source: /note="Description of Artificial Sequence: Synthetic oligonucleotide"
gcgctgcggaatccgattaat

SEQ ID NO: 14659 - DNA, 21 bp, Artificial Sequence
  source: /note="Description of Artificial Sequence: Synthetic oligonucleotide"
gcgcttcgtacgtctctgacg

SEQ ID NO: 14660 - DNA, 21 bp, Artificial Sequence
  source: /note="Description of Artificial Sequence: Synthetic oligonucleotide"
gcgttgcgtgttgcggcgatg

SEQ ID NO: 14661 - DNA, 21 bp, Artificial Sequence
  source: /note="Description of Artificial Sequence: Synthetic oligonucleotide"
gctttgagtgctggtcgggtg

SEQ ID NO: 14662 - DNA, 21 bp, Artificial Sequence
  source: /note="Description of Artificial Sequence: Synthetic oligonucleotide"
gcgctgtcggagcttcagatt

SEQ ID NO: 14663 - DNA, 21 bp, Artificial Sequence
  source: /note="Description of Artificial Sequence: Synthetic oligonucleotide"
gctctgtctggtacgtttggt

SEQ ID NO: 14664 - DNA, 21 bp, Artificial Sequence
  source: /note="Description of Artificial Sequence: Synthetic oligonucleotide"
gcgctttcgcatgatgggaat

SEQ ID NO: 14665 - DNA, 21 bp, Artificial Sequence
  source: /note="Description of Artificial Sequence: Synthetic oligonucleotide"
gcgctttcgcatgagtctaat

SEQ ID NO: 14666 - DNA, 21 bp, Artificial Sequence
  source: /note="Description of Artificial Sequence: Synthetic oligonucleotide"
gcgctgtctaagtgggctatg

SEQ ID NO: 14667 - DNA, 21 bp, Artificial Sequence
  source: /note="Description of Artificial Sequence: Synthetic oligonucleotide"
gcgttgagtctgaatactatt

SEQ ID NO: 14668 - DNA, 21 bp, Artificial Sequence
  source: /note="Description of Artificial Sequence: Synthetic oligonucleotide"
gcgttgtctccgatgccttgt

SEQ ID NO: 14669 - DNA, 21 bp, Artificial Sequence
  source: /note="Description of Artificial Sequence: Synthetic oligonucleotide"
gcgttgagtcaggctgagcgt

SEQ ID NO: 14670 - DNA, 21 bp, Artificial Sequence
  source: /note="Description of Artificial Sequence: Synthetic oligonucleotide"
gctttgtctcgtgatcggcct

SEQ ID NO: 14671 - DNA, 21 bp, Artificial Sequence
  source: /note="Description of Artificial Sequence: Synthetic oligonucleotide"
gcgctttcgtcgattcatgtt

SEQ ID NO: 14672 - DNA, 21 bp, Artificial Sequence
  source: /note="Description of Artificial Sequence: Synthetic oligonucleotide"
gcgctttctagttctgctctt

SEQ ID NO: 14673 - DNA, 21 bp, Artificial Sequence
  source: /note="Description of Artificial Sequence: Synthetic oligonucleotide"
gctctttcgacggggatgcct

SEQ ID NO: 14674 - DNA, 21 bp, Artificial Sequence
  source: /note="Description of Artificial Sequence: Synthetic oligonucleotide"
gctctttcgactccggtgcct

SEQ ID NO: 14675 - DNA, 21 bp, Artificial Sequence
  source: /note="Description of Artificial Sequence: Synthetic oligonucleotide"
gctcttacgcattatgatccg

SEQ ID NO: 14676 - DNA, 21 bp, Artificial Sequence
  source: /note="Description of Artificial Sequence: Synthetic oligonucleotide"
gctttgactaagaatgtggct

SEQ ID NO: 14677 - DNA, 21 bp, Artificial Sequence
  source: /note="Description of Artificial Sequence: Synthetic oligonucleotide"
gctttgacgcggtctgcggtt

SEQ ID NO: 14678 - DNA, 21 bp, Artificial Sequence
  source: /note="Description of Artificial Sequence: Synthetic oligonucleotide"
gctcttactagtactcatgtt

SEQ ID NO: 14679 - DNA, 21 bp, Artificial Sequence
  source: /note="Description of Artificial Sequence: Synthetic oligonucleotide"
gctcttacgacgcttgcggag

SEQ ID NO: 14680 - DNA, 21 bp, Artificial Sequence
  source: /note="Description of Artificial Sequence: Synthetic oligonucleotide"
gctctgactacgcttggtccg

SEQ ID NO: 14681 - DNA, 21 bp, Artificial Sequence
  source: /note="Description of Artificial Sequence: Synthetic oligonucleotide"
gcgttgacggttctgttggag

SEQ ID NO: 14682 - DNA, 21 bp, Artificial Sequence
  source: /note="Description of Artificial Sequence: Synthetic oligonucleotide"
gcgctggtgtcgtctaatctt

SEQ ID NO: 14683 - DNA, 21 bp, Artificial Sequence
  source: /note="Description of Artificial Sequence: Synthetic oligonucleotide"
gcgctgtatgataatgcgcct

SEQ ID NO: 14684 - DNA, 21 bp, Artificial Sequence
  source: /note="Description of Artificial Sequence: Synthetic oligonucleotide"
gctctttataatactccgccg

SEQ ID NO: 14685 - DNA, 21 bp, Artificial Sequence
  source: /note="Description of Artificial Sequence: Synthetic oligonucleotide"
gcgttgtatactcatttggat

SEQ ID NO: 14686 - DNA, 21 bp, Artificial Sequence
  source: /note="Description of Artificial Sequence: Synthetic oligonucleotide"
gcgatggcggcttctcctgct

SEQ ID NO: 14687 - DNA, 21 bp, Artificial Sequence
  source: /note="Description of Artificial Sequence: Synthetic oligonucleotide"
gctatggctcctaagctgtct

SEQ ID NO: 14688 - DNA, 21 bp, Artificial Sequence
  source: /note="Description of Artificial Sequence: Synthetic oligonucleotide"
gctatggcgcggccgtcgggg

SEQ ID NO: 14689 - DNA, 21 bp, Artificial Sequence
  source: /note="Description of Artificial Sequence: Synthetic oligonucleotide"
gctatggagcattctgttaag

SEQ ID NO: 14690 - DNA, 21 bp, Artificial Sequence
  source: /note="Description of Artificial Sequence: Synthetic oligonucleotide"
gcgatggagacgtgtgatctg

SEQ ID NO: 14691 - DNA, 21 bp, Artificial Sequence
  source: /note="Description of Artificial Sequence: Synthetic oligonucleotide"
gcgatgggtccgtctgcttcg

SEQ ID NO: 14692 - DNA, 21 bp, Artificial Sequence
  source: /note="Description of Artificial Sequence: Synthetic oligonucleotide"
gcgatgattcagatgcgtgag

SEQ ID NO: 14693 - DNA, 21 bp, Artificial Sequence
  source: /note="Description of Artificial Sequence: Synthetic oligonucleotide"
gcgatgaaggctcagaatact

SEQ ID NO: 14694 - DNA, 21 bp, Artificial Sequence
  source: /note="Description of Artificial Sequence: Synthetic oligonucleotide"
gctatgaaggataatcggagt

SEQ ID NO: 14695 - DNA, 21 bp, Artificial Sequence
  source: /note="Description of Artificial Sequence: Synthetic oligonucleotide"
gcgatgaagcttaatatgcct

SEQ ID NO: 14696 - DNA, 21 bp, Artificial Sequence
  source: /note="Description of Artificial Sequence: Synthetic oligonucleotide"
gctatgatgcagcatgttgct

SEQ ID NO: 14697 - DNA, 21 bp, Artificial Sequence
  source: /note="Description of Artificial Sequence: Synthetic oligonucleotide"
gcgatgatgagtgctgagtct

SEQ ID NO: 14698 - DNA, 21 bp, Artificial Sequence
  source: /note="Description of Artificial Sequence: Synthetic oligonucleotide"
gctatgcctgggcttggggtt

SEQ ID NO: 14699 - DNA, 21 bp, Artificial Sequence
  source: /note="Description of Artificial Sequence: Synthetic oligonucleotide"
gctatgcctgggctgcagtct

SEQ ID NO: 14700 - DNA, 21 bp, Artificial Sequence
  source: /note="Description of Artificial Sequence: Synthetic oligonucleotide"
gcgatgccgcgtctgacgcct

SEQ ID NO: 14701 - DNA, 21 bp, Artificial Sequence
  source: /note="Description of Artificial Sequence: Synthetic oligonucleotide"
gctatgcctaggcaggtgagt

SEQ ID NO: 14702 - DNA, 21 bp, Artificial Sequence
  source: /note="Description of Artificial Sequence: Synthetic oligonucleotide"
gctatgccgacggttgtggcg

SEQ ID NO: 14703 - DNA, 21 bp, Artificial Sequence
  source: /note="Description of Artificial Sequence: Synthetic oligonucleotide"
gctatgcagacggatagggtt

SEQ ID NO: 14704 - DNA, 21 bp, Artificial Sequence
  source: /note="Description of Artificial Sequence: Synthetic oligonucleotide"
gctatgcggccttcgcatgag

SEQ ID NO: 14705 - DNA, 21 bp, Artificial Sequence
  source: /note="Description of Artificial Sequence: Synthetic oligonucleotide"
gcgatgtcgcttattcatgcg

SEQ ID NO: 14706 - DNA, 21 bp, Artificial Sequence
  source: /note="Description of Artificial Sequence: Synthetic oligonucleotide"
gcgatgtcgtcggcttcttat

SEQ ID NO: 14707 - DNA, 21 bp, Artificial Sequence
  source: /note="Description of Artificial Sequence: Synthetic oligonucleotide"
gcgatgtcgtctattgctggg

SEQ ID NO: 14708 - DNA, 21 bp, Artificial Sequence
  source: /note="Description of Artificial Sequence: Synthetic oligonucleotide"
gcgatgagtacgcagctgtct

SEQ ID NO: 14709 - DNA, 21 bp, Artificial Sequence
  source: /note="Description of Artificial Sequence: Synthetic oligonucleotide"
gctatgacggataaggtgcag

SEQ ID NO: 14710 - DNA, 21 bp, Artificial Sequence
  source: /note="Description of Artificial Sequence: Synthetic oligonucleotide"
gcgatgactgatgttcgtggt

SEQ ID NO: 14711 - DNA, 21 bp, Artificial Sequence
  source: /note="Description of Artificial Sequence: Synthetic oligonucleotide"
gctatgactcatatgccttcg

SEQ ID NO: 14712 - DNA, 21 bp, Artificial Sequence
  source: /note="Description of Artificial Sequence: Synthetic oligonucleotide"
gctatgactttgcgtagtgat

SEQ ID NO: 14713 - DNA, 21 bp, Artificial Sequence
  source: /note="Description of Artificial Sequence: Synthetic oligonucleotide"
gcgatgacttctcctaagctt

SEQ ID NO: 14714 - DNA, 21 bp, Artificial Sequence
  source: /note="Description of Artificial Sequence: Synthetic oligonucleotide"
gcgatgtggggggcggatgct

SEQ ID NO: 14715 - DNA, 21 bp, Artificial Sequence
  source: /note="Description of Artificial Sequence: Synthetic oligonucleotide"
gctaatgctggtgggtcgccg

SEQ ID NO: 14716 - DNA, 21 bp, Artificial Sequence
  source: /note="Description of Artificial Sequence: Synthetic oligonucleotide"
gcgaatgatagtcgtgcggtt

SEQ ID NO: 14717 - DNA, 21 bp, Artificial Sequence
  source: /note="Description of Artificial Sequence: Synthetic oligonucleotide"
gctaatgaggattttcggaag

SEQ ID NO: 14718 - DNA, 21 bp, Artificial Sequence
  source: /note="Description of Artificial Sequence: Synthetic oligonucleotide"
gcgaatgagcctgatgtgctt

SEQ ID NO: 14719 - DNA, 21 bp, Artificial Sequence
  source: /note="Description of Artificial Sequence: Synthetic oligonucleotide"
gcgaatggggctagtagtccg

SEQ ID NO: 14720 - DNA, 21 bp, Artificial Sequence
  source: /note="Description of Artificial Sequence: Synthetic oligonucleotide"
gctaatcatggtgctactttt

SEQ ID NO: 14721 - DNA, 21 bp, Artificial Sequence
  source: /note="Description of Artificial Sequence: Synthetic oligonucleotide"
gcgaatcatacgactcggtcg

SEQ ID NO: 14722 - DNA, 21 bp, Artificial Sequence
  source: /note="Description of Artificial Sequence: Synthetic oligonucleotide"
gcgaataagccgcaggttacg

SEQ ID NO: 14723 - DNA, 21 bp, Artificial Sequence
  source: /note="Description of Artificial Sequence: Synthetic oligonucleotide"
gcgaatcttggtttgccgcct

SEQ ID NO: 14724 - DNA, 21 bp, Artificial Sequence
  source: /note="Description of Artificial Sequence: Synthetic oligonucleotide"
gctaatcttggtagtgcgagg

SEQ ID NO: 14725 - DNA, 21 bp, Artificial Sequence
  source: /note="Description of Artificial Sequence: Synthetic oligonucleotide"
gcgaatctgcctggtcatttg

SEQ ID NO: 14726 - DNA, 21 bp, Artificial Sequence
  source: /note="Description of Artificial Sequence: Synthetic oligonucleotide"
gcgaatatgactagggttgag

SEQ ID NO: 14727 - DNA, 21 bp, Artificial Sequence
  source: /note="Description of Artificial Sequence: Synthetic oligonucleotide"
gcgaatatgactgtgcattgt

SEQ ID NO: 14728 - DNA, 21 bp, Artificial Sequence
  source: /note="Description of Artificial Sequence: Synthetic oligonucleotide"
gctaatcctgctaagactgtt

SEQ ID NO: 14729 - DNA, 21 bp, Artificial Sequence
  source: /note="Description of Artificial Sequence: Synthetic oligonucleotide"
gctaatcctggtaagatttat

SEQ ID NO: 14730 - DNA, 21 bp, Artificial Sequence
  source: /note="Description of Artificial Sequence: Synthetic oligonucleotide"
gcgaatccggggactgctccg

SEQ ID NO: 14731 - DNA, 21 bp, Artificial Sequence
  source: /note="Description of Artificial Sequence: Synthetic oligonucleotide"
gcgaatcctctgctgtcgtct

SEQ ID NO: 14732 - DNA, 21 bp, Artificial Sequence
  source: /note="Description of Artificial Sequence: Synthetic oligonucleotide"
gctaatcagggtattgattcg

SEQ ID NO: 14733 - DNA, 21 bp, Artificial Sequence
  source: /note="Description of Artificial Sequence: Synthetic oligonucleotide"
gcgaatcagaataataagaat

SEQ ID NO: 14734 - DNA, 21 bp, Artificial Sequence
  source: /note="Description of Artificial Sequence: Synthetic oligonucleotide"
gctaatcagtctttgccgagt

SEQ ID NO: 14735 - DNA, 21 bp, Artificial Sequence
  source: /note="Description of Artificial Sequence: Synthetic oligonucleotide"
gcgaatcgttctggtcatggt

SEQ ID NO: 14736 - DNA, 21 bp, Artificial Sequence
  source: /note="Description of Artificial Sequence: Synthetic oligonucleotide"
gctaatagtgattggggtccg

SEQ ID NO: 14737 - DNA, 21 bp, Artificial Sequence
  source: /note="Description of Artificial Sequence: Synthetic oligonucleotide"
gctaatagtgaggagtttgtg

SEQ ID NO: 14738 - DNA, 21 bp, Artificial Sequence
  source: /note="Description of Artificial Sequence: Synthetic oligonucleotide"
gctaattctggtccgccgccg

SEQ ID NO: 14739 - DNA, 21 bp, Artificial Sequence
  source: /note="Description of Artificial Sequence: Synthetic oligonucleotide"
gctaattctcatgagcagatg

SEQ ID NO: 14740 - DNA, 21 bp, Artificial Sequence
  source: /note="Description of Artificial Sequence: Synthetic oligonucleotide"
gcgaatagtcatatgcttaag

SEQ ID NO: 14741 - DNA, 21 bp, Artificial Sequence
  source: /note="Description of Artificial Sequence: Synthetic oligonucleotide"
gcgaattcgatgatgcatccg

SEQ ID NO: 14742 - DNA, 21 bp, Artificial Sequence
  source: /note="Description of Artificial Sequence: Synthetic oligonucleotide"
gcgaattcgaattcggtgtat

SEQ ID NO: 14743 - DNA, 21 bp, Artificial Sequence
  source: /note="Description of Artificial Sequence: Synthetic oligonucleotide"
gcgaattctaggttgggtggg

SEQ ID NO: 14744 - DNA, 21 bp, Artificial Sequence
  source: /note="Description of Artificial Sequence: Synthetic oligonucleotide"
gctaattcgaggcctactcag

SEQ ID NO: 14745 - DNA, 21 bp, Artificial Sequence
  source: /note="Description of Artificial Sequence: Synthetic oligonucleotide"
gctaattcgcgttcgatggtg

SEQ ID NO: 14746 - DNA, 21 bp, Artificial Sequence
  source: /note="Description of Artificial Sequence: Synthetic oligonucleotide"
gctaattctagttctcctggg

SEQ ID NO: 14747 - DNA, 21 bp, Artificial Sequence
  source: /note="Description of Artificial Sequence: Synthetic oligonucleotide"
gctaattcgactaagggtctg

SEQ ID NO: 14748 - DNA, 21 bp, Artificial Sequence
  source: /note="Description of Artificial Sequence: Synthetic oligonucleotide"
gctaatactgatccgaggaat

SEQ ID NO: 14749 - DNA, 21 bp, Artificial Sequence
  source: /note="Description of Artificial Sequence: Synthetic oligonucleotide"
gctaatacggagacgatttgg

SEQ ID NO: 14750 - DNA, 21 bp, Artificial Sequence
  source: /note="Description of Artificial Sequence: Synthetic oligonucleotide"
gcgaatactcttttgcatgtt

SEQ ID NO: 14751 - DNA, 21 bp, Artificial Sequence
  source: /note="Description of Artificial Sequence: Synthetic oligonucleotide"
gcgaatgtggcttcttcgggt

SEQ ID NO: 14752 - DNA, 21 bp, Artificial Sequence
  source: /note="Description of Artificial Sequence: Synthetic oligonucleotide"
gcgaatgtttctagtactcat

SEQ ID NO: 14753 - DNA, 21 bp, Artificial Sequence
  source: /note="Description of Artificial Sequence: Synthetic oligonucleotide"
gctaatgtgtctgtgcaggtt

SEQ ID NO: 14754 - DNA, 21 bp, Artificial Sequence
  source: /note="Description of Artificial Sequence: Synthetic oligonucleotide"
gctccggctgatcataggatg

SEQ ID NO: 14755 - DNA, 21 bp, Artificial Sequence
  source: /note="Description of Artificial Sequence: Synthetic oligonucleotide"
gctccggcggatatgacgagt

SEQ ID NO: 14756 - DNA, 21 bp, Artificial Sequence
  source: /note="Description of Artificial Sequence: Synthetic oligonucleotide"
gcgcctgcggattggccggtg

SEQ ID NO: 14757 - DNA, 21 bp, Artificial Sequence
  source: /note="Description of Artificial Sequence: Synthetic oligonucleotide"
gcgccggcggggaggcctagt

SEQ ID NO: 14758 - DNA, 21 bp, Artificial Sequence
  source: /note="Description of Artificial Sequence: Synthetic oligonucleotide"
gctcctgctttggggcttgct

SEQ ID NO: 14759 - DNA, 21 bp, Artificial Sequence
  source: /note="Description of Artificial Sequence: Synthetic oligonucleotide"
gctcctgctaatgatgagggt

SEQ ID NO: 14760 - DNA, 21 bp, Artificial Sequence
  source: /note="Description of Artificial Sequence: Synthetic oligonucleotide"
gctccggctcagaggttgtat

SEQ ID NO: 14761 - DNA, 21 bp, Artificial Sequence
  source: /note="Description of Artificial Sequence: Synthetic oligonucleotide"
gcgccggctcggatggtgaat

SEQ ID NO: 14762 - DNA, 21 bp, Artificial Sequence
  source: /note="Description of Artificial Sequence: Synthetic oligonucleotide"
gcgccggatgggacttatttg

SEQ ID NO: 14763 - DNA, 21 bp, Artificial Sequence
  source: /note="Description of Artificial Sequence: Synthetic oligonucleotide"
gctccggatccttcgtctctg

SEQ ID NO: 14764 - DNA, 21 bp, Artificial Sequence
  source: /note="Description of Artificial Sequence: Synthetic oligonucleotide"
gcgcctgaggatgctggttct

SEQ ID NO: 14765 - DNA, 21 bp, Artificial Sequence
  source: /note="Description of Artificial Sequence: Synthetic oligonucleotide"
gctccggagacgaatgattct

SEQ ID NO: 14766 - DNA, 21 bp, Artificial Sequence
  source: /note="Description of Artificial Sequence: Synthetic oligonucleotide"
gctccgtttaatactcagggg

SEQ ID NO: 14767 - DNA, 21 bp, Artificial Sequence
  source: /note="Description of Artificial Sequence: Synthetic oligonucleotide"
gcgccttttccggagaagtgg

SEQ ID NO: 14768 - DNA, 21 bp, Artificial Sequence
  source: /note="Description of Artificial Sequence: Synthetic oligonucleotide"
gcgccgtttcctgagcagcct

SEQ ID NO: 14769 - DNA, 21 bp, Artificial Sequence
  source: /note="Description of Artificial Sequence: Synthetic oligonucleotide"
gctcctggtattacgaattat

SEQ ID NO: 14770 - DNA, 21 bp, Artificial Sequence
  source: /note="Description of Artificial Sequence: Synthetic oligonucleotide"
gcgcctgggttgcgtcatagt

SEQ ID NO: 14771 - DNA, 21 bp, Artificial Sequence
  source: /note="Description of Artificial Sequence: Synthetic oligonucleotide"
gcgccgggtcgtttgtcgctt

SEQ ID NO: 14772 - DNA, 21 bp, Artificial Sequence
  source: /note="Description of Artificial Sequence: Synthetic oligonucleotide"
gctccgcattttccttcgact

SEQ ID NO: 14773 - DNA, 21 bp, Artificial Sequence
  source: /note="Description of Artificial Sequence: Synthetic oligonucleotide"
gctcctcatctgcctacgcat

SEQ ID NO: 14774 - DNA, 21 bp, Artificial Sequence
  source: /note="Description of Artificial Sequence: Synthetic oligonucleotide"
gctccgattttgcgtactccg

SEQ ID NO: 14775 - DNA, 21 bp, Artificial Sequence
  source: /note="Description of Artificial Sequence: Synthetic oligonucleotide"
gcgcctatttctcatcagatg

SEQ ID NO: 14776 - DNA, 21 bp, Artificial Sequence
  source: /note="Description of Artificial Sequence: Synthetic oligonucleotide"
gctccgttggcggttaggccg

SEQ ID NO: 14777 - DNA, 21 bp, Artificial Sequence
  source: /note="Description of Artificial Sequence: Synthetic oligonucleotide"
gcgcctttgaagtctgtgcag

SEQ ID NO: 14778 - DNA, 21 bp, Artificial Sequence
  source: /note="Description of Artificial Sequence: Synthetic oligonucleotide"
gcgcctaatttgttgattggg

SEQ ID NO: 14779 - DNA, 21 bp, Artificial Sequence
  source: /note="Description of Artificial Sequence: Synthetic oligonucleotide"
gctcctaatagtggtgtgaag

SEQ ID NO: 14780 - DNA, 21 bp, Artificial Sequence
  source: /note="Description of Artificial Sequence: Synthetic oligonucleotide"
gctccgaatacgtctgtgcgt

SEQ ID NO: 14781 - DNA, 21 bp, Artificial Sequence
  source: /note="Description of Artificial Sequence: Synthetic oligonucleotide"
gcgcctcctaatctggagtct

SEQ ID NO: 14782 - DNA, 21 bp, Artificial Sequence
  source: /note="Description of Artificial Sequence: Synthetic oligonucleotide"
gcgcctcctaatgttcggact

SEQ ID NO: 14783 - DNA, 21 bp, Artificial Sequence
  source: /note="Description of Artificial Sequence: Synthetic oligonucleotide"
gctccgccttcgctgcgtacg

SEQ ID NO: 14784 - DNA, 21 bp, Artificial Sequence
  source: /note="Description of Artificial Sequence: Synthetic oligonucleotide"
gcgccgcaggcgaagactccg

SEQ ID NO: 14785 - DNA, 21 bp, Artificial Sequence
  source: /note="Description of Artificial Sequence: Synthetic oligonucleotide"
gctccgcagggtcggcagatt

SEQ ID NO: 14786 - DNA, 21 bp, Artificial Sequence
  source: /note="Description of Artificial Sequence: Synthetic oligonucleotide"
gctccgcagttgcagccggct

SEQ ID NO: 14787 - DNA, 21 bp, Artificial Sequence
  source: /note="Description of Artificial Sequence: Synthetic oligonucleotide"
gcgcctcagcctaaggatccg

SEQ ID NO: 14788 - DNA, 21 bp, Artificial Sequence
  source: /note="Description of Artificial Sequence: Synthetic oligonucleotide"
gctcctagggctgtgaattat

SEQ ID NO: 14789 - DNA, 21 bp, Artificial Sequence
  source: /note="Description of Artificial Sequence: Synthetic oligonucleotide"
gcgccgcggcttactgtgtcg

SEQ ID NO: 14790 - DNA, 21 bp, Artificial Sequence
  source: /note="Description of Artificial Sequence: Synthetic oligonucleotide"
gctcctcggcctcctcttgtg

SEQ ID NO: 14791 - DNA, 21 bp, Artificial Sequence
  source: /note="Description of Artificial Sequence: Synthetic oligonucleotide"
gcgcctcggcagactcataat

SEQ ID NO: 14792 - DNA, 21 bp, Artificial Sequence
  source: /note="Description of Artificial Sequence: Synthetic oligonucleotide"
gctccgcgtacgcattctacg

SEQ ID NO: 14793 - DNA, 21 bp, Artificial Sequence
  source: /note="Description of Artificial Sequence: Synthetic oligonucleotide"
gcgccgagggttcttcagacg

SEQ ID NO: 14794 - DNA, 21 bp, Artificial Sequence
  source: /note="Description of Artificial Sequence: Synthetic oligonucleotide"
gcgcctcgttatgagcttcgg

SEQ ID NO: 14795 - DNA, 21 bp, Artificial Sequence
  source: /note="Description of Artificial Sequence: Synthetic oligonucleotide"
gcgccttctggtagtacgtcg

SEQ ID NO: 14796 - DNA, 21 bp, Artificial Sequence
  source: /note="Description of Artificial Sequence: Synthetic oligonucleotide"
gcgcctagtggggttaagcct

SEQ ID NO: 14797 - DNA, 21 bp, Artificial Sequence
  source: /note="Description of Artificial Sequence: Synthetic oligonucleotide"
gctccgtcgaagatggctatt

SEQ ID NO: 14798 - DNA, 21 bp, Artificial Sequence
  source: /note="Description of Artificial Sequence: Synthetic oligonucleotide"
gctccgagtaggtgtgcgttg

SEQ ID NO: 14799 - DNA, 21 bp, Artificial Sequence
  source: /note="Description of Artificial Sequence: Synthetic oligonucleotide"
gcgccgtcgtcggcggagaat

SEQ ID NO: 14800 - DNA, 21 bp, Artificial Sequence
  source: /note="Description of Artificial Sequence: Synthetic oligonucleotide"
gctccgtcgacgcttaataat

SEQ ID NO: 14801 - DNA, 21 bp, Artificial Sequence
  source: /note="Description of Artificial Sequence: Synthetic oligonucleotide"
gcgccttctgttcggccgatt

SEQ ID NO: 14802 - DNA, 21 bp, Artificial Sequence
  source: /note="Description of Artificial Sequence: Synthetic oligonucleotide"
gcgcctagtgttgttacgact

SEQ ID NO: 14803 - DNA, 21 bp, Artificial Sequence
  source: /note="Description of Artificial Sequence: Synthetic oligonucleotide"
gcgcctactgcgggtagtatg

SEQ ID NO: 14804 - DNA, 21 bp, Artificial Sequence
  source: /note="Description of Artificial Sequence: Synthetic oligonucleotide"
gcgcctactcctcatcctagt

SEQ ID NO: 14805 - DNA, 21 bp, Artificial Sequence
  source: /note="Description of Artificial Sequence: Synthetic oligonucleotide"
gctcctacgcctaagggtatt

SEQ ID NO: 14806 - DNA, 21 bp, Artificial Sequence
  source: /note="Description of Artificial Sequence: Synthetic oligonucleotide"
gcgcctactaggaatccgcag

SEQ ID NO: 14807 - DNA, 21 bp, Artificial Sequence
  source: /note="Description of Artificial Sequence: Synthetic oligonucleotide"
gctccgactactccttcgctt

SEQ ID NO: 14808 - DNA, 21 bp, Artificial Sequence
  source: /note="Description of Artificial Sequence: Synthetic oligonucleotide"
gctcctactgtttctaatatt

SEQ ID NO: 14809 - DNA, 21 bp, Artificial Sequence
  source: /note="Description of Artificial Sequence: Synthetic oligonucleotide"
gctcctgtgccggatcagacg

SEQ ID NO: 14810 - DNA, 21 bp, Artificial Sequence
  source: /note="Description of Artificial Sequence: Synthetic oligonucleotide"
gcgccggtgactgataatttt

SEQ ID NO: 14811 - DNA, 21 bp, Artificial Sequence
  source: /note="Description of Artificial Sequence: Synthetic oligonucleotide"
gctcaggcgctgaggggtcat

SEQ ID NO: 14812 - DNA, 21 bp, Artificial Sequence
  source: /note="Description of Artificial Sequence: Synthetic oligonucleotide"
gcgcaggctcctcggactgag

SEQ ID NO: 14813 - DNA, 21 bp, Artificial Sequence
  source: /note="Description of Artificial Sequence: Synthetic oligonucleotide"
gcgcaggctactagtagtctt

SEQ ID NO: 14814 - DNA, 21 bp, Artificial Sequence
  source: /note="Description of Artificial Sequence: Synthetic oligonucleotide"
gcgcagtgttcgacgcatctt

SEQ ID NO: 14815 - DNA, 21 bp, Artificial Sequence
  source: /note="Description of Artificial Sequence: Synthetic oligonucleotide"
gcgcaggatcgtgcgacgcgg

SEQ ID NO: 14816 - DNA, 21 bp, Artificial Sequence
  source: /note="Description of Artificial Sequence: Synthetic oligonucleotide"
gcgcagttttctactaaggat

SEQ ID NO: 14817 - DNA, 21 bp, Artificial Sequence
  source: /note="Description of Artificial Sequence: Synthetic oligonucleotide"
gctcagggtcagacgatgctt

SEQ ID NO: 14818 - DNA, 21 bp, Artificial Sequence
  source: /note="Description of Artificial Sequence: Synthetic oligonucleotide"
gctcagggtcaggttacgcct

SEQ ID NO: 14819 - DNA, 21 bp, Artificial Sequence
  source: /note="Description of Artificial Sequence: Synthetic oligonucleotide"
gctcagggttggactagtggt

SEQ ID NO: 14820 - DNA, 21 bp, Artificial Sequence
  source: /note="Description of Artificial Sequence: Synthetic oligonucleotide"
gcgcagcataagttgggtttg

SEQ ID NO: 14821 - DNA, 21 bp, Artificial Sequence
  source: /note="Description of Artificial Sequence: Synthetic oligonucleotide"
gcgcagcatcgtggggagacg

SEQ ID NO: 14822 - DNA, 21 bp, Artificial Sequence
  source: /note="Description of Artificial Sequence: Synthetic oligonucleotide"
gcgcagattcatatggagatg

SEQ ID NO: 14823 - DNA, 21 bp, Artificial Sequence
  source: /note="Description of Artificial Sequence: Synthetic oligonucleotide"
gcgcagaagccgacgacgatg

SEQ ID NO: 14824 - DNA, 21 bp, Artificial Sequence
  source: /note="Description of Artificial Sequence: Synthetic oligonucleotide"
gctcagaagcctgtggttatt

SEQ ID NO: 14825 - DNA, 21 bp, Artificial Sequence
  source: /note="Description of Artificial Sequence: Synthetic oligonucleotide"
gctcagaagcagaaggcgccg

SEQ ID NO: 14826 - DNA, 21 bp, Artificial Sequence
  source: /note="Description of Artificial Sequence: Synthetic oligonucleotide"
gcgcagaatatgcggaataat

SEQ ID NO: 14827 - DNA, 21 bp, Artificial Sequence
  source: /note="Description of Artificial Sequence: Synthetic oligonucleotide"
gctcagccgggtactgttttt

SEQ ID NO: 14828 - DNA, 21 bp, Artificial Sequence
  source: /note="Description of Artificial Sequence: Synthetic oligonucleotide"
gcgcagccgtcgctgtatgct

SEQ ID NO: 14829 - DNA, 21 bp, Artificial Sequence
  source: /note="Description of Artificial Sequence: Synthetic oligonucleotide"
gcgcagcctacgcgggctgat

SEQ ID NO: 14830 - DNA, 21 bp, Artificial Sequence
  source: /note="Description of Artificial Sequence: Synthetic oligonucleotide"
gctcagccggtgtctaggttg

SEQ ID NO: 14831 - DNA, 21 bp, Artificial Sequence
  source: /note="Description of Artificial Sequence: Synthetic oligonucleotide"
gctcagcgtcttagtgggggt

SEQ ID NO: 14832 - DNA, 21 bp, Artificial Sequence
  source: /note="Description of Artificial Sequence: Synthetic oligonucleotide"
gctcagcggaatacgtcgccg

SEQ ID NO: 14833 - DNA, 21 bp, Artificial Sequence
  source: /note="Description of Artificial Sequence: Synthetic oligonucleotide"
gcgcagaggcctacgtctgtg

SEQ ID NO: 14834 - DNA, 21 bp, Artificial Sequence
  source: /note="Description of Artificial Sequence: Synthetic oligonucleotide"
gctcagagtggggcgatttcg

SEQ ID NO: 14835 - DNA, 21 bp, Artificial Sequence
  source: /note="Description of Artificial Sequence: Synthetic oligonucleotide"
gcgcagtcgaggtctcctttg

SEQ ID NO: 14836 - DNA, 21 bp, Artificial Sequence
  source: /note="Description of Artificial Sequence: Synthetic oligonucleotide"
gctcagacgagtttgcgtctg

SEQ ID NO: 14837 - DNA, 21 bp, Artificial Sequence
  source: /note="Description of Artificial Sequence: Synthetic oligonucleotide"
gctcagacgtcgatgcatact

SEQ ID NO: 14838 - DNA, 21 bp, Artificial Sequence
  source: /note="Description of Artificial Sequence: Synthetic oligonucleotide"
gctcagtatattccgtctacg

SEQ ID NO: 14839 - DNA, 21 bp, Artificial Sequence
  source: /note="Description of Artificial Sequence: Synthetic oligonucleotide"
gctcagtatcctaagcctaat

SEQ ID NO: 14840 - DNA, 21 bp, Artificial Sequence
  source: /note="Description of Artificial Sequence: Synthetic oligonucleotide"
gctcgggcgggtgatctggtt

SEQ ID NO: 14841 - DNA, 21 bp, Artificial Sequence
  source: /note="Description of Artificial Sequence: Synthetic oligonucleotide"
gctagggcgcatgattctact

SEQ ID NO: 14842 - DNA, 21 bp, Artificial Sequence
  source: /note="Description of Artificial Sequence: Synthetic oligonucleotide"
gcgcgggcgcatctgactgct

SEQ ID NO: 14843 - DNA, 21 bp, Artificial Sequence
  source: /note="Description of Artificial Sequence: Synthetic oligonucleotide"
gcgcgtgctcttagtccgaat

SEQ ID NO: 14844 - DNA, 21 bp, Artificial Sequence
  source: /note="Description of Artificial Sequence: Synthetic oligonucleotide"
gctcgggctccgggtgagctt

SEQ ID NO: 14845 - DNA, 21 bp, Artificial Sequence
  source: /note="Description of Artificial Sequence: Synthetic oligonucleotide"
gctcgtgctcctggtccgatt

SEQ ID NO: 14846 - DNA, 21 bp, Artificial Sequence
  source: /note="Description of Artificial Sequence: Synthetic oligonucleotide"
gcgcgggcgcctacgttgatg

SEQ ID NO: 14847 - DNA, 21 bp, Artificial Sequence
  source: /note="Description of Artificial Sequence: Synthetic oligonucleotide"
gcgagggcttcgccgatgact

SEQ ID NO: 14848 - DNA, 21 bp, Artificial Sequence
  source: /note="Description of Artificial Sequence: Synthetic oligonucleotide"
gctagggattttaatgcgtcg

SEQ ID NO: 14849 - DNA, 21 bp, Artificial Sequence
  source: /note="Description of Artificial Sequence: Synthetic oligonucleotide"
gcgagggatggtgtgagtctt

SEQ ID NO: 14850 - DNA, 21 bp, Artificial Sequence
  source: /note="Description of Artificial Sequence: Synthetic oligonucleotide"
gcgagggatttgccggcttat

SEQ ID NO: 14851 - DNA, 21 bp, Artificial Sequence
  source: /note="Description of Artificial Sequence: Synthetic oligonucleotide"
gctcgtgatatggttcctcat

SEQ ID NO: 14852 - DNA, 21 bp, Artificial Sequence
  source: /note="Description of Artificial Sequence: Synthetic oligonucleotide"
gcgcgtgatcagcgtagtccg

SEQ ID NO: 14853 - DNA, 21 bp, Artificial Sequence
  source: /note="Description of Artificial Sequence: Synthetic oligonucleotide"
gcgcgggagcattctcagctt

SEQ ID NO: 14854 - DNA, 21 bp, Artificial Sequence
  source: /note="Description of Artificial Sequence: Synthetic oligonucleotide"
gctcgtgagttggggcggtcg

SEQ ID NO: 14855 - DNA, 21 bp, Artificial Sequence
  source: /note="Description of Artificial Sequence: Synthetic oligonucleotide"
gcgaggtttgatgttgggtcg

SEQ ID NO: 14856 - DNA, 21 bp, Artificial Sequence
  source: /note="Description of Artificial Sequence: Synthetic oligonucleotide"
gctaggtttgagactggtcat

SEQ ID NO: 14857 - DNA, 21 bp, Artificial Sequence
  source: /note="Description of Artificial Sequence: Synthetic oligonucleotide"
gctcggggtcttgcggcgcat

SEQ ID NO: 14858 - DNA, 21 bp, Artificial Sequence
  source: /note="Description of Artificial Sequence: Synthetic oligonucleotide"
gcgcgggggaatgcgcaggct

SEQ ID NO: 14859 - DNA, 21 bp, Artificial Sequence
  source: /note="Description of Artificial Sequence: Synthetic oligonucleotide"
gcgcgtggtaatgttatgatt

SEQ ID NO: 14860 - DNA, 21 bp, Artificial Sequence
  source: /note="Description of Artificial Sequence: Synthetic oligonucleotide"
gctcgtggttcggatgcttcg

SEQ ID NO: 14861 - DNA, 21 bp, Artificial Sequence
  source: /note="Description of Artificial Sequence: Synthetic oligonucleotide"
gcgcgtggttctatgacgttg

SEQ ID NO: 14862 - DNA, 21 bp, Artificial Sequence
  source: /note="Description of Artificial Sequence: Synthetic oligonucleotide"
gcgaggggtgttgctagtcct

SEQ ID NO: 14863 - DNA, 21 bp, Artificial Sequence
  source: /note="Description of Artificial Sequence: Synthetic oligonucleotide"
gctcggcatgcttctgtggct

SEQ ID NO: 14864 - DNA, 21 bp, Artificial Sequence
  source: /note="Description of Artificial Sequence: Synthetic oligonucleotide"
gctaggcatatgccgattgag

SEQ ID NO: 14865 - DNA, 21 bp, Artificial Sequence
  source: /note="Description of Artificial Sequence: Synthetic oligonucleotide"
gcgcgtatttatgagtcgccg

SEQ ID NO: 14866 - DNA, 21 bp, Artificial Sequence
  source: /note="Description of Artificial Sequence: Synthetic oligonucleotide"
gctcgtttggctacttctgag

SEQ ID NO: 14867 - DNA, 21 bp, Artificial Sequence
  source: /note="Description of Artificial Sequence: Synthetic oligonucleotide"
gctcgtcttggttatgatggt

SEQ ID NO: 14868 - DNA, 21 bp, Artificial Sequence
  source: /note="Description of Artificial Sequence: Synthetic oligonucleotide"
gctaggcttaattttgctgcg

SEQ ID NO: 14869 - DNA, 21 bp, Artificial Sequence
  source: /note="Description of Artificial Sequence: Synthetic oligonucleotide"
gcgcgtctgcagactgctgtg

SEQ ID NO: 14870 - DNA, 21 bp, Artificial Sequence
  source: /note="Description of Artificial Sequence: Synthetic oligonucleotide"
gcgcggatggggctggggttg

SEQ ID NO: 14871 - DNA, 21 bp, Artificial Sequence
  source: /note="Description of Artificial Sequence: Synthetic oligonucleotide"
gcgcgtatgccgatgctggag

SEQ ID NO: 14872 - DNA, 21 bp, Artificial Sequence
  source: /note="Description of Artificial Sequence: Synthetic oligonucleotide"
gctaggatgcctagtccgccg

SEQ ID NO: 14873 - DNA, 21 bp, Artificial Sequence
  source: /note="Description of Artificial Sequence: Synthetic oligonucleotide"
gctaggatggttgatcctatt

SEQ ID NO: 14874 - DNA, 21 bp, Artificial Sequence
  source: /note="Description of Artificial Sequence: Synthetic oligonucleotide"
gcgcgtatggttggtgagcct

SEQ ID NO: 14875 - DNA, 21 bp, Artificial Sequence
  source: /note="Description of Artificial Sequence: Synthetic oligonucleotide"
gcgaggaatcctggtccggat

SEQ ID NO: 14876 - DNA, 21 bp, Artificial Sequence
  source: /note="Description of Artificial Sequence: Synthetic oligonucleotide"
gcgcgtaatcaggcggctcag

SEQ ID NO: 14877 - DNA, 21 bp, Artificial Sequence
  source: /note="Description of Artificial Sequence: Synthetic oligonucleotide"
gctcgtaatagtctgtcggat

SEQ ID NO: 14878 - DNA, 21 bp, Artificial Sequence
  source: /note="Description of Artificial Sequence: Synthetic oligonucleotide"
gctcggccggagattaagtat

SEQ ID NO: 14879 - DNA, 21 bp, Artificial Sequence
  source: /note="Description of Artificial Sequence: Synthetic oligonucleotide"
gcgcggccggagtatcgggtg

SEQ ID NO: 14880 - DNA, 21 bp, Artificial Sequence
  source: /note="Description of Artificial Sequence: Synthetic oligonucleotide"
gcgcgtccgccgaattcgtat

SEQ ID NO: 14881 - DNA, 21 bp, Artificial Sequence
  source: /note="Description of Artificial Sequence: Synthetic oligonucleotide"
gctcggcctactgagcatgag

SEQ ID NO: 14882 - DNA, 21 bp, Artificial Sequence
  source: /note="Description of Artificial Sequence: Synthetic oligonucleotide"
gcgaggcagcattttgcgccg

SEQ ID NO: 14883 - DNA, 21 bp, Artificial Sequence
  source: /note="Description of Artificial Sequence: Synthetic oligonucleotide"
gctcgtcagcatgttggtcct

SEQ ID NO: 14884 - DNA, 21 bp, Artificial Sequence
  source: /note="Description of Artificial Sequence: Synthetic oligonucleotide"
gctcgtcagacgatgaatgag

SEQ ID NO: 14885 - DNA, 21 bp, Artificial Sequence
  source: /note="Description of Artificial Sequence: Synthetic oligonucleotide"
gcgcgtcgtgatcctccgctg

SEQ ID NO: 14886 - DNA, 21 bp, Artificial Sequence
  source: /note="Description of Artificial Sequence: Synthetic oligonucleotide"
gctcggtctgctgctctggcg

SEQ ID NO: 14887 - DNA, 21 bp, Artificial Sequence
  source: /note="Description of Artificial Sequence: Synthetic oligonucleotide"
gcgcggagtgctcagactaat

SEQ ID NO: 14888 - DNA, 21 bp, Artificial Sequence
  source: /note="Description of Artificial Sequence: Synthetic oligonucleotide"
gcgcggtcggatcgtgtgtcg

SEQ ID NO: 14889 - DNA, 21 bp, Artificial Sequence
  source: /note="Description of Artificial Sequence: Synthetic oligonucleotide"
gctcggtctgagcctactcct

SEQ ID NO: 14890 - DNA, 21 bp, Artificial Sequence
  source: /note="Description of Artificial Sequence: Synthetic oligonucleotide"
gctcggtctggggagggtttt

SEQ ID NO: 14891 - DNA, 21 bp, Artificial Sequence
  source: /note="Description of Artificial Sequence: Synthetic oligonucleotide"
gctcgttcgcatattgtgtcg

SEQ ID NO: 14892 - DNA, 21 bp, Artificial Sequence
  source: /note="Description of Artificial Sequence: Synthetic oligonucleotide"
gctaggagtatttcggttgtt

SEQ ID NO: 14893 - DNA, 21 bp, Artificial Sequence
  source: /note="Description of Artificial Sequence: Synthetic oligonucleotide"
gcgcggtctattgttggtccg

SEQ ID NO: 14894 - DNA, 21 bp, Artificial Sequence
  source: /note="Description of Artificial Sequence: Synthetic oligonucleotide"
gcgcggtcgaatgagcttcat

SEQ ID NO: 14895 - DNA, 21 bp, Artificial Sequence
  source: /note="Description of Artificial Sequence: Synthetic oligonucleotide"
gctcgttcgcctgatgttttg

SEQ ID NO: 14896 - DNA, 21 bp, Artificial Sequence
  source: /note="Description of Artificial Sequence: Synthetic oligonucleotide"
gctcggtctccgcatgtttat

SEQ ID NO: 14897 - DNA, 21 bp, Artificial Sequence
  source: /note="Description of Artificial Sequence: Synthetic oligonucleotide"
gcgcggtcgaggcctttggag

SEQ ID NO: 14898 - DNA, 21 bp, Artificial Sequence
  source: /note="Description of Artificial Sequence: Synthetic oligonucleotide"
gctcgtagttctgatctggag

SEQ ID NO: 14899 - DNA, 21 bp, Artificial Sequence
  source: /note="Description of Artificial Sequence: Synthetic oligonucleotide"
gcgcgttctagtcctccgttg

SEQ ID NO: 14900 - DNA, 21 bp, Artificial Sequence
  source: /note="Description of Artificial Sequence: Synthetic oligonucleotide"
gcgaggtctacggtgttgggg

SEQ ID NO: 14901 - DNA, 21 bp, Artificial Sequence
  source: /note="Description of Artificial Sequence: Synthetic oligonucleotide"
gcgaggtctgtggctacttct

SEQ ID NO: 14902 - DNA, 21 bp, Artificial Sequence
  source: /note="Description of Artificial Sequence: Synthetic oligonucleotide"
gcgaggagtgtgcaggattct

SEQ ID NO: 14903 - DNA, 21 bp, Artificial Sequence
  source: /note="Description of Artificial Sequence: Synthetic oligonucleotide"
gctcggactgcgtcgcttcct

SEQ ID NO: 14904 - DNA, 21 bp, Artificial Sequence
  source: /note="Description of Artificial Sequence: Synthetic oligonucleotide"
gctcgtacgggtgcgtatagt

SEQ ID NO: 14905 - DNA, 21 bp, Artificial Sequence
  source: /note="Description of Artificial Sequence: Synthetic oligonucleotide"
gctcggactctgccgcagctt

SEQ ID NO: 14906 - DNA, 21 bp, Artificial Sequence
  source: /note="Description of Artificial Sequence: Synthetic oligonucleotide"
gctaggacgctgagtactcat

SEQ ID NO: 14907 - DNA, 21 bp, Artificial Sequence
  source: /note="Description of Artificial Sequence: Synthetic oligonucleotide"
gcgcgtactcctgttctgtat

SEQ ID NO: 14908 - DNA, 21 bp, Artificial Sequence
  source: /note="Description of Artificial Sequence: Synthetic oligonucleotide"
gctaggactagtgaggagcct

SEQ ID NO: 14909 - DNA, 21 bp, Artificial Sequence
  source: /note="Description of Artificial Sequence: Synthetic oligonucleotide"
gctcgtacgacggtggggttg

SEQ ID NO: 14910 - DNA, 21 bp, Artificial Sequence
  source: /note="Description of Artificial Sequence: Synthetic oligonucleotide"
gctcggactgtgccgtctatg

SEQ ID NO: 14911 - DNA, 21 bp, Artificial Sequence
  source: /note="Description of Artificial Sequence: Synthetic oligonucleotide"
gctcgtgtggatgtgtctatg

SEQ ID NO: 14912 - DNA, 21 bp, Artificial Sequence
  source: /note="Description of Artificial Sequence: Synthetic oligonucleotide"
gctcgggttaatcgtgagccg

SEQ ID NO: 14913 - DNA, 21 bp, Artificial Sequence
  source: /note="Description of Artificial Sequence: Synthetic oligonucleotide"
gctcgtgtgtctcttgaggct

SEQ ID NO: 14914 - DNA, 21 bp, Artificial Sequence
  source: /note="Description of Artificial Sequence: Synthetic oligonucleotide"
gcgagggttgttgctccggag

SEQ ID NO: 14915 - DNA, 21 bp, Artificial Sequence
  source: /note="Description of Artificial Sequence: Synthetic oligonucleotide"
gctaggtatggtggtatggtt

SEQ ID NO: 14916 - DNA, 21 bp, Artificial Sequence
  source: /note="Description of Artificial Sequence: Synthetic oligonucleotide"
gcgtctgcgtttaagcagccg

SEQ ID NO: 14917 - DNA, 21 bp, Artificial Sequence
  source: /note="Description of Artificial Sequence: Synthetic oligonucleotide"
gcgagtgctggtggtcagcct

SEQ ID NO: 14918 - DNA, 21 bp, Artificial Sequence
  source: /note="Description of Artificial Sequence: Synthetic oligonucleotide"
gcttcggcggggcctccgcct

SEQ ID NO: 14919 - DNA, 21 bp, Artificial Sequence
  source: /note="Description of Artificial Sequence: Synthetic oligonucleotide"
gcttcggcgcagcaggtttct

SEQ ID NO: 14920 - DNA, 21 bp, Artificial Sequence
  source: /note="Description of Artificial Sequence: Synthetic oligonucleotide"
gcgtcggcgagtaatcgtggg

SEQ ID NO: 14921 - DNA, 21 bp, Artificial Sequence
  source: /note="Description of Artificial Sequence: Synthetic oligonucleotide"
gcgtcttgttcttctactacg

SEQ ID NO: 14922 - DNA, 21 bp, Artificial Sequence
  source: /note="Description of Artificial Sequence: Synthetic oligonucleotide"
gcgtctgatgcttcgtgtagt

SEQ ID NO: 14923 - DNA, 21 bp, Artificial Sequence
  source: /note="Description of Artificial Sequence: Synthetic oligonucleotide"
gcgtctgatttgagtcttcgt

SEQ ID NO: 14924 - DNA, 21 bp, Artificial Sequence
  source: /note="Description of Artificial Sequence: Synthetic oligonucleotide"
gcgtcggatatgcttaagagt

SEQ ID NO: 14925 - DNA, 21 bp, Artificial Sequence
  source: /note="Description of Artificial Sequence: Synthetic oligonucleotide"
gcgagtgataatattagggct

SEQ ID NO: 14926 - DNA, 21 bp, Artificial Sequence
  source: /note="Description of Artificial Sequence: Synthetic oligonucleotide"
gcttctgatcctatgaagggt

SEQ ID NO: 14927 - DNA, 21 bp, Artificial Sequence
  source: /note="Description of Artificial Sequence: Synthetic oligonucleotide"
gcgtctgatactacgacgatg

SEQ ID NO: 14928 - DNA, 21 bp, Artificial Sequence
  source: /note="Description of Artificial Sequence: Synthetic oligonucleotide"
gctagtgatgtgtctcgtcct

SEQ ID NO: 14929 - DNA, 21 bp, Artificial Sequence
  source: /note="Description of Artificial Sequence: Synthetic oligonucleotide"
gcgtcggaggagcgggcgaat

SEQ ID NO: 14930 - DNA, 21 bp, Artificial Sequence
  source: /note="Description of Artificial Sequence: Synthetic oligonucleotide"
gcgtctgagaattcgcagaat

SEQ ID NO: 14931 - DNA, 21 bp, Artificial Sequence
  source: /note="Description of Artificial Sequence: Synthetic oligonucleotide"
gcttcggagcggaataggttg

SEQ ID NO: 14932 - DNA, 21 bp, Artificial Sequence
  source: /note="Description of Artificial Sequence: Synthetic oligonucleotide"
gcgagtgaggtgtctaatgcg

SEQ ID NO: 14933 - DNA, 21 bp, Artificial Sequence
  source: /note="Description of Artificial Sequence: Synthetic oligonucleotide"
gcttctttttgtacgagttgg

SEQ ID NO: 14934 - DNA, 21 bp, Artificial Sequence
  source: /note="Description of Artificial Sequence: Synthetic oligonucleotide"
gcgtcttttcatgggggtgtg

SEQ ID NO: 14935 - DNA, 21 bp, Artificial Sequence
  source: /note="Description of Artificial Sequence: Synthetic oligonucleotide"
gcttcttttatggaggcggcg

SEQ ID NO: 14936 - DNA, 21 bp, Artificial Sequence
  source: /note="Description of Artificial Sequence: Synthetic oligonucleotide"
gcttcttttcctgctactagt

SEQ ID NO: 14937 - DNA, 21 bp, Artificial Sequence
  source: /note="Description of Artificial Sequence: Synthetic oligonucleotide"
gcgagttttcgtttgatggct

SEQ ID NO: 14938 - DNA, 21 bp, Artificial Sequence
  source: /note="Description of Artificial Sequence: Synthetic oligonucleotide"
gctagtgggagggcggtgggg

SEQ ID NO: 14939 - DNA, 21 bp, Artificial Sequence
  source: /note="Description of Artificial Sequence: Synthetic oligonucleotide"
gcttctgggaggcaggatctt

SEQ ID NO: 14940 - DNA, 21 bp, Artificial Sequence
  source: /note="Description of Artificial Sequence: Synthetic oligonucleotide"
gcgagtgggtctgatgattcg

SEQ ID NO: 14941 - DNA, 21 bp, Artificial Sequence
  source: /note="Description of Artificial Sequence: Synthetic oligonucleotide"
gcttcggggtcgacttctggt

SEQ ID NO: 14942 - DNA, 21 bp, Artificial Sequence
  source: /note="Description of Artificial Sequence: Synthetic oligonucleotide"
gcgtctgggacgcgggcggct

SEQ ID NO: 14943 - DNA, 21 bp, Artificial Sequence
  source: /note="Description of Artificial Sequence: Synthetic oligonucleotide"
gcgagtggtacttatactagt

SEQ ID NO: 14944 - DNA, 21 bp, Artificial Sequence
  source: /note="Description of Artificial Sequence: Synthetic oligonucleotide"
gcttctggttatcttccgcag

SEQ ID NO: 14945 - DNA, 21 bp, Artificial Sequence
  source: /note="Description of Artificial Sequence: Synthetic oligonucleotide"
gcgtctcatgagcgtgatttt

SEQ ID NO: 14946 - DNA, 21 bp, Artificial Sequence
  source: /note="Description of Artificial Sequence: Synthetic oligonucleotide"
gcgtctcatcatcttactgag

SEQ ID NO: 14947 - DNA, 21 bp, Artificial Sequence
  source: /note="Description of Artificial Sequence: Synthetic oligonucleotide"
gcttctcatcgttcgggtgat

SEQ ID NO: 14948 - DNA, 21 bp, Artificial Sequence
  source: /note="Description of Artificial Sequence: Synthetic oligonucleotide"
gcttctattcatacgacgagt

SEQ ID NO: 14949 - DNA, 21 bp, Artificial Sequence
  source: /note="Description of Artificial Sequence: Synthetic oligonucleotide"
gctagtatttctggtagtgct

SEQ ID NO: 14950 - DNA, 21 bp, Artificial Sequence
  source: /note="Description of Artificial Sequence: Synthetic oligonucleotide"
gcgagtatttctattggggcg

SEQ ID NO: 14951 - DNA, 21 bp, Artificial Sequence
  source: /note="Description of Artificial Sequence: Synthetic oligonucleotide"
gcgtctttgccgtctccgagg

SEQ ID NO: 14952 - DNA, 21 bp, Artificial Sequence
  source: /note="Description of Artificial Sequence: Synthetic oligonucleotide"
gcgtctcttcgggcgactggt

SEQ ID NO: 14953 - DNA, 21 bp, Artificial Sequence
  source: /note="Description of Artificial Sequence: Synthetic oligonucleotide"
gcttctttgtctgcggctatg

SEQ ID NO: 14954 - DNA, 21 bp, Artificial Sequence
  source: /note="Description of Artificial Sequence: Synthetic oligonucleotide"
gcgtcgttgagtggtagtatg

SEQ ID NO: 14955 - DNA, 21 bp, Artificial Sequence
  source: /note="Description of Artificial Sequence: Synthetic oligonucleotide"
gcgtcgttgtcgaatttgcct

SEQ ID NO: 14956 - DNA, 21 bp, Artificial Sequence
  source: /note="Description of Artificial Sequence: Synthetic oligonucleotide"
gcttcgctgtctccgcttttg

SEQ ID NO: 14957 - DNA, 21 bp, Artificial Sequence
  source: /note="Description of Artificial Sequence: Synthetic oligonucleotide"
gcgtctatgaagccgactatt

SEQ ID NO: 14958 - DNA, 21 bp, Artificial Sequence
  source: /note="Description of Artificial Sequence: Synthetic oligonucleotide"
gcgagtatgaatgggctgccg

SEQ ID NO: 14959 - DNA, 21 bp, Artificial Sequence
  source: /note="Description of Artificial Sequence: Synthetic oligonucleotide"
gcgtcgatgaatatgaatgct

SEQ ID NO: 14960 - DNA, 21 bp, Artificial Sequence
  source: /note="Description of Artificial Sequence: Synthetic oligonucleotide"
gcgtcgaataagtctagtctg

SEQ ID NO: 14961 - DNA, 21 bp, Artificial Sequence
  source: /note="Description of Artificial Sequence: Synthetic oligonucleotide"
gcttcgaatcgggtttcgtat

SEQ ID NO: 14962 - DNA, 21 bp, Artificial Sequence
  source: /note="Description of Artificial Sequence: Synthetic oligonucleotide"
gcttcgaatagtgctttgcgt

SEQ ID NO: 14963 - DNA, 21 bp, Artificial Sequence
  source: /note="Description of Artificial Sequence: Synthetic oligonucleotide"
gcgagtcctgcggctgttcat

SEQ ID NO: 14964 - DNA, 21 bp, Artificial Sequence
  source: /note="Description of Artificial Sequence: Synthetic oligonucleotide"
gctagtcctcttaatagttct

SEQ ID NO: 14965 - DNA, 21 bp, Artificial Sequence
  source: /note="Description of Artificial Sequence: Synthetic oligonucleotide"
gcgagtcctccgcagactacg

SEQ ID NO: 14966 - DNA, 21 bp, Artificial Sequence
  source: /note="Description of Artificial Sequence: Synthetic oligonucleotide"
gctagtcctcagtttaattcg

SEQ ID NO: 14967 - DNA, 21 bp, Artificial Sequence
  source: /note="Description of Artificial Sequence: Synthetic oligonucleotide"
gcgtcgcctagggggcgggag

SEQ ID NO: 14968 - DNA, 21 bp, Artificial Sequence
  source: /note="Description of Artificial Sequence: Synthetic oligonucleotide"
gcgtcgcaggcggcgtgtttg

SEQ ID NO: 14969 - DNA, 21 bp, Artificial Sequence
  source: /note="Description of Artificial Sequence: Synthetic oligonucleotide"
gcgagtcagattgagcctacg

SEQ ID NO: 14970 - DNA, 21 bp, Artificial Sequence
  source: /note="Description of Artificial Sequence: Synthetic oligonucleotide"
gcttctcagattcggactacg

SEQ ID NO: 14971 - DNA, 21 bp, Artificial Sequence
  source: /note="Description of Artificial Sequence: Synthetic oligonucleotide"
gcttcgcagccgtctcgtgtt

SEQ ID NO: 14972 - DNA, 21 bp, Artificial Sequence
  source: /note="Description of Artificial Sequence: Synthetic oligonucleotide"
gcttctcagcagcctcgttct

SEQ ID NO: 14973 - DNA, 21 bp, Artificial Sequence
  source: /note="Description of Artificial Sequence: Synthetic oligonucleotide"
gcttctcagcggttgggtggt

SEQ ID NO: 14974 - DNA, 21 bp, Artificial Sequence
  source: /note="Description of Artificial Sequence: Synthetic oligonucleotide"
gcgtctcagtcgcgtgatgcg

SEQ ID NO: 14975 - DNA, 21 bp, Artificial Sequence
  source: /note="Description of Artificial Sequence: Synthetic oligonucleotide"
gcgagtcagtatcgggagtct

SEQ ID NO: 14976 - DNA, 21 bp, Artificial Sequence
  source: /note="Description of Artificial Sequence: Synthetic oligonucleotide"
gcttctcgggctccggctggt

SEQ ID NO: 14977 - DNA, 21 bp, Artificial Sequence
  source: /note="Description of Artificial Sequence: Synthetic oligonucleotide"
gcttctcgtgcgcctagtaat

SEQ ID NO: 14978 - DNA, 21 bp, Artificial Sequence
  source: /note="Description of Artificial Sequence: Synthetic oligonucleotide"
gcttctcgtgataatgttgat

SEQ ID NO: 14979 - DNA, 21 bp, Artificial Sequence
  source: /note="Description of Artificial Sequence: Synthetic oligonucleotide"
gctagtcggggtatgtcgacg

SEQ ID NO: 14980 - DNA, 21 bp, Artificial Sequence
  source: /note="Description of Artificial Sequence: Synthetic oligonucleotide"
gcttcgcggccgtatttggtt

SEQ ID NO: 14981 - DNA, 21 bp, Artificial Sequence
  source: /note="Description of Artificial Sequence: Synthetic oligonucleotide"
gcttctcgttctactacttcg

SEQ ID NO: 14982 - DNA, 21 bp, Artificial Sequence
  source: /note="Description of Artificial Sequence: Synthetic oligonucleotide"
gcgtctaggactattgctcct

SEQ ID NO: 14983 - DNA, 21 bp, Artificial Sequence
  source: /note="Description of Artificial Sequence: Synthetic oligonucleotide"
gcgagtcggactactcctttg

SEQ ID NO: 14984 - DNA, 21 bp, Artificial Sequence
  source: /note="Description of Artificial Sequence: Synthetic oligonucleotide"
gctagttcggcgcgtcctatt

SEQ ID NO: 14985 - DNA, 21 bp, Artificial Sequence
  source: /note="Description of Artificial Sequence: Synthetic oligonucleotide"
gctagtagtgctgtgctgacg

SEQ ID NO: 14986 - DNA, 21 bp, Artificial Sequence
  source: /note="Description of Artificial Sequence: Synthetic oligonucleotide"
gcttcgtcggagcgtggtgag

SEQ ID NO: 14987 - DNA, 21 bp, Artificial Sequence
  source: /note="Description of Artificial Sequence: Synthetic oligonucleotide"
gcttcgtctggtgatgttctt

SEQ ID NO: 14988 - DNA, 21 bp, Artificial Sequence
  source: /note="Description of Artificial Sequence: Synthetic oligonucleotide"
gcgtcttctggtccggataag

SEQ ID NO: 14989 - DNA, 21 bp, Artificial Sequence
  source: /note="Description of Artificial Sequence: Synthetic oligonucleotide"
gcttctagtggtcgttcggcg

SEQ ID NO: 14990 - DNA, 21 bp, Artificial Sequence
  source: /note="Description of Artificial Sequence: Synthetic oligonucleotide"
gcttcgtctgggtctgggact

SEQ ID NO: 14991 - DNA, 21 bp, Artificial Sequence
  source: /note="Description of Artificial Sequence: Synthetic oligonucleotide"
gcgtcttcgaaggggtctaat

SEQ ID NO: 14992 - DNA, 21 bp, Artificial Sequence
  source: /note="Description of Artificial Sequence: Synthetic oligonucleotide"
gcgtcgtctaagccggcgaat

SEQ ID NO: 14993 - DNA, 21 bp, Artificial Sequence
  source: /note="Description of Artificial Sequence: Synthetic oligonucleotide"
gcgagttcgaagccgttgggg

SEQ ID NO: 14994 - DNA, 21 bp, Artificial Sequence
  source: /note="Description of Artificial Sequence: Synthetic oligonucleotide"
gcgtcgtctcctaagatttat

SEQ ID NO: 14995 - DNA, 21 bp, Artificial Sequence
  source: /note="Description of Artificial Sequence: Synthetic oligonucleotide"
gctagtagtcctgtgctgtcg

SEQ ID NO: 14996 - DNA, 21 bp, Artificial Sequence
  source: /note="Description of Artificial Sequence: Synthetic oligonucleotide"
gctagtagtcagcatggtctg

SEQ ID NO: 14997 - DNA, 21 bp, Artificial Sequence
  source: /note="Description of Artificial Sequence: Synthetic oligonucleotide"
gcgtctagtcgtacggtgaat

SEQ ID NO: 14998 - DNA, 21 bp, Artificial Sequence
  source: /note="Description of Artificial Sequence: Synthetic oligonucleotide"
gcttcttcgtctgattctcgt

SEQ ID NO: 14999 - DNA, 21 bp, Artificial Sequence
  source: /note="Description of Artificial Sequence: Synthetic oligonucleotide"
gctagtagttcgctgtctttt

SEQ ID NO: 15000 - DNA, 21 bp, Artificial Sequence
  source: /note="Description of Artificial Sequence: Synthetic oligonucleotide"
gcgtcttcgacttctttggag

SEQ ID NO: 15001 - DNA, 21 bp, Artificial Sequence
  source: /note="Description of Artificial Sequence: Synthetic oligonucleotide"
gctagtagtgttaatccgagt

SEQ ID NO: 15002 - DNA, 21 bp, Artificial Sequence
  source: /note="Description of Artificial Sequence: Synthetic oligonucleotide"
gcttcgactgcgcttctgctg

SEQ ID NO: 15003 - DNA, 21 bp, Artificial Sequence
  source: /note="Description of Artificial Sequence: Synthetic oligonucleotide"
gcgtcgactggtattgtgctt

SEQ ID NO: 15004 - DNA, 21 bp, Artificial Sequence
  source: /note="Description of Artificial Sequence: Synthetic oligonucleotide"
gcgagtactgggagttttggt

SEQ ID NO: 15005 - DNA, 21 bp, Artificial Sequence
  source: /note="Description of Artificial Sequence: Synthetic oligonucleotide"
gcttcgactggtagtcaggag

SEQ ID NO: 15006 - DNA, 21 bp, Artificial Sequence
  source: /note="Description of Artificial Sequence: Synthetic oligonucleotide"
gcgtctactttgcaggttggg

SEQ ID NO: 15007 - DNA, 21 bp, Artificial Sequence
  source: /note="Description of Artificial Sequence: Synthetic oligonucleotide"
gcgtcgactcctaatttgctt

SEQ ID NO: 15008 - DNA, 21 bp, Artificial Sequence
  source: /note="Description of Artificial Sequence: Synthetic oligonucleotide"
gctagtacgcagaagcaggct

SEQ ID NO: 15009 - DNA, 21 bp, Artificial Sequence
  source: /note="Description of Artificial Sequence: Synthetic oligonucleotide"
gcgtcgactcggatgttgttt

SEQ ID NO: 15010 - DNA, 21 bp, Artificial Sequence
  source: /note="Description of Artificial Sequence: Synthetic oligonucleotide"
gcgtcgactacgtttcgtccg

SEQ ID NO: 15011 - DNA, 21 bp, Artificial Sequence
  source: /note="Description of Artificial Sequence: Synthetic oligonucleotide"
gcttcgacgactaggatgctt

SEQ ID NO: 15012 - DNA, 21 bp, Artificial Sequence
  source: /note="Description of Artificial Sequence: Synthetic oligonucleotide"
gcgtcggttcttcaggaggct

SEQ ID NO: 15013 - DNA, 21 bp, Artificial Sequence
  source: /note="Description of Artificial Sequence: Synthetic oligonucleotide"
gcgtcggtgcctttgattcct

SEQ ID NO: 15014 - DNA, 21 bp, Artificial Sequence
  source: /note="Description of Artificial Sequence: Synthetic oligonucleotide"
gctagtgtgcggatgggtgat

SEQ ID NO: 15015 - DNA, 21 bp, Artificial Sequence
  source: /note="Description of Artificial Sequence: Synthetic oligonucleotide"
gctagtgtgagtatggttgcg

SEQ ID NO: 15016 - DNA, 21 bp, Artificial Sequence
  source: /note="Description of Artificial Sequence: Synthetic oligonucleotide"
gcttctgttagtacggagggg

SEQ ID NO: 15017 - DNA, 21 bp, Artificial Sequence
  source: /note="Description of Artificial Sequence: Synthetic oligonucleotide"
gctagttgggatattaatatt

SEQ ID NO: 15018 - DNA, 21 bp, Artificial Sequence
  source: /note="Description of Artificial Sequence: Synthetic oligonucleotide"
gctagttgggatagtaatatt

SEQ ID NO: 15019 - DNA, 21 bp, Artificial Sequence
  source: /note="Description of Artificial Sequence: Synthetic oligonucleotide"
gcttcttatgatactagtcgg

SEQ ID NO: 15020 - DNA, 21 bp, Artificial Sequence
  source: /note="Description of Artificial Sequence: Synthetic oligonucleotide"
gcgtcgtatgatgtttcgtcg

SEQ ID NO: 15021 - DNA, 21 bp, Artificial Sequence
  source: /note="Description of Artificial Sequence: Synthetic oligonucleotide"
gctactgctgcgactgcttat

SEQ ID NO: 15022 - DNA, 21 bp, Artificial Sequence
  source: /note="Description of Artificial Sequence: Synthetic oligonucleotide"
gcgactgctgcgactacgagt

SEQ ID NO: 15023 - DNA, 21 bp, Artificial Sequence
  source: /note="Description of Artificial Sequence: Synthetic oligonucleotide"
gctactgcgggtctgtatcag

SEQ ID NO: 15024 - DNA, 21 bp, Artificial Sequence
  source: /note="Description of Artificial Sequence: Synthetic oligonucleotide"
gcgacggctaagattctggat

SEQ ID NO: 15025 - DNA, 21 bp, Artificial Sequence
  source: /note="Description of Artificial Sequence: Synthetic oligonucleotide"
gctacggcgaagcttttgcct

SEQ ID NO: 15026 - DNA, 21 bp, Artificial Sequence
  source: /note="Description of Artificial Sequence: Synthetic oligonucleotide"
gctactgctaagcctcttatt

SEQ ID NO: 15027 - DNA, 21 bp, Artificial Sequence
  source: /note="Description of Artificial Sequence: Synthetic oligonucleotide"
gcgactgcgcggcaggtgcag

SEQ ID NO: 15028 - DNA, 21 bp, Artificial Sequence
  source: /note="Description of Artificial Sequence: Synthetic oligonucleotide"
gctactgcttctacttcttct

SEQ ID NO: 15029 - DNA, 21 bp, Artificial Sequence
  source: /note="Description of Artificial Sequence: Synthetic oligonucleotide"
gcgacggcgtcttataatggt

SEQ ID NO: 15030 - DNA, 21 bp, Artificial Sequence
  source: /note="Description of Artificial Sequence: Synthetic oligonucleotide"
gcgactgcggtgcatgattat

SEQ ID NO: 15031 - DNA, 21 bp, Artificial Sequence
  source: /note="Description of Artificial Sequence: Synthetic oligonucleotide"
gcgactgatcatatgtctcct

SEQ ID NO: 15032 - DNA, 21 bp, Artificial Sequence
  source: /note="Description of Artificial Sequence: Synthetic oligonucleotide"
gcgactgattatcagagtatg

SEQ ID NO: 15033 - DNA, 21 bp, Artificial Sequence
  source: /note="Description of Artificial Sequence: Synthetic oligonucleotide"
gcgacggaggcgccgttgaag

SEQ ID NO: 15034 - DNA, 21 bp, Artificial Sequence
  source: /note="Description of Artificial Sequence: Synthetic oligonucleotide"
gctacggagggtcatccttgg

SEQ ID NO: 15035 - DNA, 21 bp, Artificial Sequence
  source: /note="Description of Artificial Sequence: Synthetic oligonucleotide"
gctacgtttgttacttctaag

SEQ ID NO: 15036 - DNA, 21 bp, Artificial Sequence
  source: /note="Description of Artificial Sequence: Synthetic oligonucleotide"
gctacgggggggcatagtcct

SEQ ID NO: 15037 - DNA, 21 bp, Artificial Sequence
  source: /note="Description of Artificial Sequence: Synthetic oligonucleotide"
gctactggtacgtctgcgggt

SEQ ID NO: 15038 - DNA, 21 bp, Artificial Sequence
  source: /note="Description of Artificial Sequence: Synthetic oligonucleotide"
gctactggggtgctgatgagt

SEQ ID NO: 15039 - DNA, 21 bp, Artificial Sequence
  source: /note="Description of Artificial Sequence: Synthetic oligonucleotide"
gctacgggggttcagaattat

SEQ ID NO: 15040 - DNA, 21 bp, Artificial Sequence
  source: /note="Description of Artificial Sequence: Synthetic oligonucleotide"
gctacgcatattttgaagctt

SEQ ID NO: 15041 - DNA, 21 bp, Artificial Sequence
  source: /note="Description of Artificial Sequence: Synthetic oligonucleotide"
gctactcattctcttctgtct

SEQ ID NO: 15042 - DNA, 21 bp, Artificial Sequence
  source: /note="Description of Artificial Sequence: Synthetic oligonucleotide"
gcgacgcatgtttgtgtgtct

SEQ ID NO: 15043 - DNA, 21 bp, Artificial Sequence
  source: /note="Description of Artificial Sequence: Synthetic oligonucleotide"
gctacgattccgaggacgccg

SEQ ID NO: 15044 - DNA, 21 bp, Artificial Sequence
  source: /note="Description of Artificial Sequence: Synthetic oligonucleotide"
gcgactaagtttcaggggatg

SEQ ID NO: 15045 - DNA, 21 bp, Artificial Sequence
  source: /note="Description of Artificial Sequence: Synthetic oligonucleotide"
gctacgaagggtatttctttt

SEQ ID NO: 15046 - DNA, 21 bp, Artificial Sequence
  source: /note="Description of Artificial Sequence: Synthetic oligonucleotide"
gcgactaagcatgattgtaag

SEQ ID NO: 15047 - DNA, 21 bp, Artificial Sequence
  source: /note="Description of Artificial Sequence: Synthetic oligonucleotide"
gctacgttgcatcgtgagctt

SEQ ID NO: 15048 - DNA, 21 bp, Artificial Sequence
  source: /note="Description of Artificial Sequence: Synthetic oligonucleotide"
gctactttgaagattcctgtt

SEQ ID NO: 15049 - DNA, 21 bp, Artificial Sequence
  source: /note="Description of Artificial Sequence: Synthetic oligonucleotide"
gctactcttcgtattgtggag

SEQ ID NO: 15050 - DNA, 21 bp, Artificial Sequence
  source: /note="Description of Artificial Sequence: Synthetic oligonucleotide"
gcgactcttaggcctaatgat

SEQ ID NO: 15051 - DNA, 21 bp, Artificial Sequence
  source: /note="Description of Artificial Sequence: Synthetic oligonucleotide"
gctactttgcggacggctacg

SEQ ID NO: 15052 - DNA, 21 bp, Artificial Sequence
  source: /note="Description of Artificial Sequence: Synthetic oligonucleotide"
gcgactttgtcgacgaatgct

SEQ ID NO: 15053 - DNA, 21 bp, Artificial Sequence
  source: /note="Description of Artificial Sequence: Synthetic oligonucleotide"
gcgactctgacgttgagtgcg

SEQ ID NO: 15054 - DNA, 21 bp, Artificial Sequence
  source: /note="Description of Artificial Sequence: Synthetic oligonucleotide"
gcgactttggtgagtgcggag

SEQ ID NO: 15055 - DNA, 21 bp, Artificial Sequence
  source: /note="Description of Artificial Sequence: Synthetic oligonucleotide"
gctactatgccttcgactatg

SEQ ID NO: 15056 - DNA, 21 bp, Artificial Sequence
  source: /note="Description of Artificial Sequence: Synthetic oligonucleotide"
gctactatgcgtcctcgtgat

SEQ ID NO: 15057 - DNA, 21 bp, Artificial Sequence
  source: /note="Description of Artificial Sequence: Synthetic oligonucleotide"
gctacgatgtcgttgtcttct

SEQ ID NO: 15058 - DNA, 21 bp, Artificial Sequence
  source: /note="Description of Artificial Sequence: Synthetic oligonucleotide"
gcgacgatgtcgatgaggggg

SEQ ID NO: 15059 - DNA, 21 bp, Artificial Sequence
  source: /note="Description of Artificial Sequence: Synthetic oligonucleotide"
gcgactatggtgacgacgtct

SEQ ID NO: 15060 - DNA, 21 bp, Artificial Sequence
  source: /note="Description of Artificial Sequence: Synthetic oligonucleotide"
gcgacgaatgctcatcagtcg

SEQ ID NO: 15061 - DNA, 21 bp, Artificial Sequence
  source: /note="Description of Artificial Sequence: Synthetic oligonucleotide"
gcgacgaatcggtttccgtct

SEQ ID NO: 15062 - DNA, 21 bp, Artificial Sequence
  source: /note="Description of Artificial Sequence: Synthetic oligonucleotide"
gctactaattcttcggctact

SEQ ID NO: 15063 - DNA, 21 bp, Artificial Sequence
  source: /note="Description of Artificial Sequence: Synthetic oligonucleotide"
gctacgaatacgaggattgct

SEQ ID NO: 15064 - DNA, 21 bp, Artificial Sequence
  source: /note="Description of Artificial Sequence: Synthetic oligonucleotide"
gctacgcctctgcgtactagt

SEQ ID NO: 15065 - DNA, 21 bp, Artificial Sequence
  source: /note="Description of Artificial Sequence: Synthetic oligonucleotide"
gcgacgccgcctatgcagaat

SEQ ID NO: 15066 - DNA, 21 bp, Artificial Sequence
  source: /note="Description of Artificial Sequence: Synthetic oligonucleotide"
gctacgcctagtgctgcgatt

SEQ ID NO: 15067 - DNA, 21 bp, Artificial Sequence
  source: /note="Description of Artificial Sequence: Synthetic oligonucleotide"
gcgactcctactcttagtgct

SEQ ID NO: 15068 - DNA, 21 bp, Artificial Sequence
  source: /note="Description of Artificial Sequence: Synthetic oligonucleotide"
gcgacgcctgttccgcatccg

SEQ ID NO: 15069 - DNA, 21 bp, Artificial Sequence
  source: /note="Description of Artificial Sequence: Synthetic oligonucleotide"
gctactcagaatctgcctcct

SEQ ID NO: 15070 - DNA, 21 bp, Artificial Sequence
  source: /note="Description of Artificial Sequence: Synthetic oligonucleotide"
gcgacgcagcggattgtgtat

SEQ ID NO: 15071 - DNA, 21 bp, Artificial Sequence
  source: /note="Description of Artificial Sequence: Synthetic oligonucleotide"
gcgactcagtatggtatgaat

SEQ ID NO: 15072 - DNA, 21 bp, Artificial Sequence
  source: /note="Description of Artificial Sequence: Synthetic oligonucleotide"
gcgacgcgtgcggagtcgagt

SEQ ID NO: 15073 - DNA, 21 bp, Artificial Sequence
  source: /note="Description of Artificial Sequence: Synthetic oligonucleotide"
gctacgcggcttcctgattct

SEQ ID NO: 15074 - DNA, 21 bp, Artificial Sequence
  source: /note="Description of Artificial Sequence: Synthetic oligonucleotide"
gctactcggcttactgagaag

SEQ ID NO: 15075 - DNA, 21 bp, Artificial Sequence
  source: /note="Description of Artificial Sequence: Synthetic oligonucleotide"
gctactcggccgcaggctgat

SEQ ID NO: 15076 - DNA, 21 bp, Artificial Sequence
  source: /note="Description of Artificial Sequence: Synthetic oligonucleotide"
gctactcgtacttcgcttgag

SEQ ID NO: 15077 - DNA, 21 bp, Artificial Sequence
  source: /note="Description of Artificial Sequence: Synthetic oligonucleotide"
gctactagtattacgaagtcg

SEQ ID NO: 15078 - DNA, 21 bp, Artificial Sequence
  source: /note="Description of Artificial Sequence: Synthetic oligonucleotide"
gctacgtctcagatgaatttt

SEQ ID NO: 15079 - DNA, 21 bp, Artificial Sequence
  source: /note="Description of Artificial Sequence: Synthetic oligonucleotide"
gctacgtcgactttgaatctt

SEQ ID NO: 15080 - DNA, 21 bp, Artificial Sequence
  source: /note="Description of Artificial Sequence: Synthetic oligonucleotide"
gctacttctactatgactact

SEQ ID NO: 15081 - DNA, 21 bp, Artificial Sequence
  source: /note="Description of Artificial Sequence: Synthetic oligonucleotide"
gctacttcgactgtgtttagg

SEQ ID NO: 15082 - DNA, 21 bp, Artificial Sequence
  source: /note="Description of Artificial Sequence: Synthetic oligonucleotide"
gctactacggctggtagtaat

SEQ ID NO: 15083 - DNA, 21 bp, Artificial Sequence
  source: /note="Description of Artificial Sequence: Synthetic oligonucleotide"
gcgacgactgcgatgggtgag

SEQ ID NO: 15084 - DNA, 21 bp, Artificial Sequence
  source: /note="Description of Artificial Sequence: Synthetic oligonucleotide"
gcgacgactggtcctccttgt

SEQ ID NO: 15085 - DNA, 21 bp, Artificial Sequence
  source: /note="Description of Artificial Sequence: Synthetic oligonucleotide"
gctactactaaggatactact

SEQ ID NO: 15086 - DNA, 21 bp, Artificial Sequence
  source: /note="Description of Artificial Sequence: Synthetic oligonucleotide"
gcgacgactttgattcggccg

SEQ ID NO: 15087 - DNA, 21 bp, Artificial Sequence
  source: /note="Description of Artificial Sequence: Synthetic oligonucleotide"
gctacgacttcgcggtcttct

SEQ ID NO: 15088 - DNA, 21 bp, Artificial Sequence
  source: /note="Description of Artificial Sequence: Synthetic oligonucleotide"
gctactactgttgctagtcgt

SEQ ID NO: 15089 - DNA, 21 bp, Artificial Sequence
  source: /note="Description of Artificial Sequence: Synthetic oligonucleotide"
gctactgttatgccgacggct

SEQ ID NO: 15090 - DNA, 21 bp, Artificial Sequence
  source: /note="Description of Artificial Sequence: Synthetic oligonucleotide"
gcgacggtgatgactttgccg

SEQ ID NO: 15091 - DNA, 21 bp, Artificial Sequence
  source: /note="Description of Artificial Sequence: Synthetic oligonucleotide"
gctactgttaatcctgcggtg

SEQ ID NO: 15092 - DNA, 21 bp, Artificial Sequence
  source: /note="Description of Artificial Sequence: Synthetic oligonucleotide"
gctacggtgccgcagcgtact

SEQ ID NO: 15093 - DNA, 21 bp, Artificial Sequence
  source: /note="Description of Artificial Sequence: Synthetic oligonucleotide"
gctactgttcgtactatgttg

SEQ ID NO: 15094 - DNA, 21 bp, Artificial Sequence
  source: /note="Description of Artificial Sequence: Synthetic oligonucleotide"
gcgacggtgtctgatactctt

SEQ ID NO: 15095 - DNA, 21 bp, Artificial Sequence
  source: /note="Description of Artificial Sequence: Synthetic oligonucleotide"
gctacggtttcgtctctgacg

SEQ ID NO: 15096 - DNA, 21 bp, Artificial Sequence
  source: /note="Description of Artificial Sequence: Synthetic oligonucleotide"
gcgacgtggccgtataaggag

SEQ ID NO: 15097 - DNA, 21 bp, Artificial Sequence
  source: /note="Description of Artificial Sequence: Synthetic oligonucleotide"
gcgacttatgcgcgtaatgag

SEQ ID NO: 15098 - DNA, 21 bp, Artificial Sequence
  source: /note="Description of Artificial Sequence: Synthetic oligonucleotide"
gcgacgtatacggctactgct

SEQ ID NO: 15099 - DNA, 21 bp, Artificial Sequence
  source: /note="Description of Artificial Sequence: Synthetic oligonucleotide"
gcggtggcgggtactttgcgt

SEQ ID NO: 15100 - DNA, 21 bp, Artificial Sequence
  source: /note="Description of Artificial Sequence: Synthetic oligonucleotide"
gctgttgcgcttaatacgacg

SEQ ID NO: 15101 - DNA, 21 bp, Artificial Sequence
  source: /note="Description of Artificial Sequence: Synthetic oligonucleotide"
gcggttgcgcagatggggatt

SEQ ID NO: 15102 - DNA, 21 bp, Artificial Sequence
  source: /note="Description of Artificial Sequence: Synthetic oligonucleotide"
gctgttgcggttgattttgtt

SEQ ID NO: 15103 - DNA, 21 bp, Artificial Sequence
  source: /note="Description of Artificial Sequence: Synthetic oligonucleotide"
gctgttgatcatgagggtttg

SEQ ID NO: 15104 - DNA, 21 bp, Artificial Sequence
  source: /note="Description of Artificial Sequence: Synthetic oligonucleotide"
gcggtggatccgggtaatccg

SEQ ID NO: 15105 - DNA, 21 bp, Artificial Sequence
  source: /note="Description of Artificial Sequence: Synthetic oligonucleotide"
gctgtggatcggtcggagatt

SEQ ID NO: 15106 - DNA, 21 bp, Artificial Sequence
  source: /note="Description of Artificial Sequence: Synthetic oligonucleotide"
gctgtggagtgtatgcctccg

SEQ ID NO: 15107 - DNA, 21 bp, Artificial Sequence
  source: /note="Description of Artificial Sequence: Synthetic oligonucleotide"
gcggttgagccgatgtgggag

SEQ ID NO: 15108 - DNA, 21 bp, Artificial Sequence
  source: /note="Description of Artificial Sequence: Synthetic oligonucleotide"
gctgttgagacgggttatacg

SEQ ID NO: 15109 - DNA, 21 bp, Artificial Sequence
  source: /note="Description of Artificial Sequence: Synthetic oligonucleotide"
gctgtgtttgctcggcttccg

SEQ ID NO: 15110 - DNA, 21 bp, Artificial Sequence
  source: /note="Description of Artificial Sequence: Synthetic oligonucleotide"
gctgtgggtgagtctgaggtg

SEQ ID NO: 15111 - DNA, 21 bp, Artificial Sequence
  source: /note="Description of Artificial Sequence: Synthetic oligonucleotide"
gctgttgggaattcgctgtat

SEQ ID NO: 15112 - DNA, 21 bp, Artificial Sequence
  source: /note="Description of Artificial Sequence: Synthetic oligonucleotide"
gctgtggggcagaatatgcgg

SEQ ID NO: 15113 - DNA, 21 bp, Artificial Sequence
  source: /note="Description of Artificial Sequence: Synthetic oligonucleotide"
gctgtgcataagatggatatg

SEQ ID NO: 15114 - DNA, 21 bp, Artificial Sequence
  source: /note="Description of Artificial Sequence: Synthetic oligonucleotide"
gcggtgcatcagctgacgctt

SEQ ID NO: 15115 - DNA, 21 bp, Artificial Sequence
  source: /note="Description of Artificial Sequence: Synthetic oligonucleotide"
gctgtgcatcgtgagaatgtt

SEQ ID NO: 15116 - DNA, 21 bp, Artificial Sequence
  source: /note="Description of Artificial Sequence: Synthetic oligonucleotide"
gctgtgattggggggatgact

SEQ ID NO: 15117 - DNA, 21 bp, Artificial Sequence
  source: /note="Description of Artificial Sequence: Synthetic oligonucleotide"
gctgtgaaggggatgcctctt

SEQ ID NO: 15118 - DNA, 21 bp, Artificial Sequence
  source: /note="Description of Artificial Sequence: Synthetic oligonucleotide"
gcggtgaagcagttgattgtt

SEQ ID NO: 15119 - DNA, 21 bp, Artificial Sequence
  source: /note="Description of Artificial Sequence: Synthetic oligonucleotide"
gctgttcttcatactctgggg

SEQ ID NO: 15120 - DNA, 21 bp, Artificial Sequence
  source: /note="Description of Artificial Sequence: Synthetic oligonucleotide"
gctgtgttgaagaatcgggat

SEQ ID NO: 15121 - DNA, 21 bp, Artificial Sequence
  source: /note="Description of Artificial Sequence: Synthetic oligonucleotide"
gctgtgcttaataaggaggat

SEQ ID NO: 15122 - DNA, 21 bp, Artificial Sequence
  source: /note="Description of Artificial Sequence: Synthetic oligonucleotide"
gctgttcttaattctgcggat

SEQ ID NO: 15123 - DNA, 21 bp, Artificial Sequence
  source: /note="Description of Artificial Sequence: Synthetic oligonucleotide"
gcggtgcttgttcctcatgcg

SEQ ID NO: 15124 - DNA, 21 bp, Artificial Sequence
  source: /note="Description of Artificial Sequence: Synthetic oligonucleotide"
gctgttcttgtgcgtgaggat

SEQ ID NO: 15125 - DNA, 21 bp, Artificial Sequence
  source: /note="Description of Artificial Sequence: Synthetic oligonucleotide"
gctgtgatgggtcgtagtgag

SEQ ID NO: 15126 - DNA, 21 bp, Artificial Sequence
  source: /note="Description of Artificial Sequence: Synthetic oligonucleotide"
gcggttatgcctcggacgcct

SEQ ID NO: 15127 - DNA, 21 bp, Artificial Sequence
  source: /note="Description of Artificial Sequence: Synthetic oligonucleotide"
gctgttatgcgtattgctcct

SEQ ID NO: 15128 - DNA, 21 bp, Artificial Sequence
  source: /note="Description of Artificial Sequence: Synthetic oligonucleotide"
gcggttaatgctgcgcaggct

SEQ ID NO: 15129 - DNA, 21 bp, Artificial Sequence
  source: /note="Description of Artificial Sequence: Synthetic oligonucleotide"
gctgtgaattttgatgtgatt

SEQ ID NO: 15130 - DNA, 21 bp, Artificial Sequence
  source: /note="Description of Artificial Sequence: Synthetic oligonucleotide"
gcggtgaatcctcctgagctt

SEQ ID NO: 15131 - DNA, 21 bp, Artificial Sequence
  source: /note="Description of Artificial Sequence: Synthetic oligonucleotide"
gctgtgaatcgtgtgcctttg

SEQ ID NO: 15132 - DNA, 21 bp, Artificial Sequence
  source: /note="Description of Artificial Sequence: Synthetic oligonucleotide"
gctgtgcctgggcctaagtct

SEQ ID NO: 15133 - DNA, 21 bp, Artificial Sequence
  source: /note="Description of Artificial Sequence: Synthetic oligonucleotide"
gctgttccgttgcttcttact

SEQ ID NO: 15134 - DNA, 21 bp, Artificial Sequence
  source: /note="Description of Artificial Sequence: Synthetic oligonucleotide"
gcggttcctatgcgttttcct

SEQ ID NO: 15135 - DNA, 21 bp, Artificial Sequence
  source: /note="Description of Artificial Sequence: Synthetic oligonucleotide"
gctgtgcctagtcatgcgcag

SEQ ID NO: 15136 - DNA, 21 bp, Artificial Sequence
  source: /note="Description of Artificial Sequence: Synthetic oligonucleotide"
gctgtgccggtgtctcatgcg

SEQ ID NO: 15137 - DNA, 21 bp, Artificial Sequence
  source: /note="Description of Artificial Sequence: Synthetic oligonucleotide"
gcggtgcagacgcatggtttt

SEQ ID NO: 15138 - DNA, 21 bp, Artificial Sequence
  source: /note="Description of Artificial Sequence: Synthetic oligonucleotide"
gctgttcagacgactgatcat

SEQ ID NO: 15139 - DNA, 21 bp, Artificial Sequence
  source: /note="Description of Artificial Sequence: Synthetic oligonucleotide"
gcggtgcgtgcgtctcagcag

SEQ ID NO: 15140 - DNA, 21 bp, Artificial Sequence
  source: /note="Description of Artificial Sequence: Synthetic oligonucleotide"
gctgtgcgtgcgagtactccg

SEQ ID NO: 15141 - DNA, 21 bp, Artificial Sequence
  source: /note="Description of Artificial Sequence: Synthetic oligonucleotide"
gctgttcgtgattctgtgttg

SEQ ID NO: 15142 - DNA, 21 bp, Artificial Sequence
  source: /note="Description of Artificial Sequence: Synthetic oligonucleotide"
gctgttcggcatcagggtgat

SEQ ID NO: 15143 - DNA, 21 bp, Artificial Sequence
  source: /note="Description of Artificial Sequence: Synthetic oligonucleotide"
gctgttcgtttgaagatggag

SEQ ID NO: 15144 - DNA, 21 bp, Artificial Sequence
  source: /note="Description of Artificial Sequence: Synthetic oligonucleotide"
gctgtgcgtccgcctccgcct

SEQ ID NO: 15145 - DNA, 21 bp, Artificial Sequence
  source: /note="Description of Artificial Sequence: Synthetic oligonucleotide"
gctgttcgtcgtgatgatgct

SEQ ID NO: 15146 - DNA, 21 bp, Artificial Sequence
  source: /note="Description of Artificial Sequence: Synthetic oligonucleotide"
gcggttcggtctctgactgtg

SEQ ID NO: 15147 - DNA, 21 bp, Artificial Sequence
  source: /note="Description of Artificial Sequence: Synthetic oligonucleotide"
gctgtgcgtactaatccgttg

SEQ ID NO: 15148 - DNA, 21 bp, Artificial Sequence
  source: /note="Description of Artificial Sequence: Synthetic oligonucleotide"
gctgtttctggtcattcgctg

SEQ ID NO: 15149 - DNA, 21 bp, Artificial Sequence
  source: /note="Description of Artificial Sequence: Synthetic oligonucleotide"
gcggtgtcgcatgcgagtgat

SEQ ID NO: 15150 - DNA, 21 bp, Artificial Sequence
  source: /note="Description of Artificial Sequence: Synthetic oligonucleotide"
gcggtttcgccttattctttg

SEQ ID NO: 15151 - DNA, 21 bp, Artificial Sequence
  source: /note="Description of Artificial Sequence: Synthetic oligonucleotide"
gctgtgagtcgggcggggggt

SEQ ID NO: 15152 - DNA, 21 bp, Artificial Sequence
  source: /note="Description of Artificial Sequence: Synthetic oligonucleotide"
gcggtgtctcgtccgaattcg

SEQ ID NO: 15153 - DNA, 21 bp, Artificial Sequence
  source: /note="Description of Artificial Sequence: Synthetic oligonucleotide"
gctgttacgaattctatgatt

SEQ ID NO: 15154 - DNA, 21 bp, Artificial Sequence
  source: /note="Description of Artificial Sequence: Synthetic oligonucleotide"
gctgttacgcctttgcctctt

SEQ ID NO: 15155 - DNA, 21 bp, Artificial Sequence
  source: /note="Description of Artificial Sequence: Synthetic oligonucleotide"
gcggttactagtggttttcgt

SEQ ID NO: 15156 - DNA, 21 bp, Artificial Sequence
  source: /note="Description of Artificial Sequence: Synthetic oligonucleotide"
gctgtgactgttaatgcgtat

SEQ ID NO: 15157 - DNA, 21 bp, Artificial Sequence
  source: /note="Description of Artificial Sequence: Synthetic oligonucleotide"
gctgttgtgggggcgattctg

SEQ ID NO: 15158 - DNA, 21 bp, Artificial Sequence
  source: /note="Description of Artificial Sequence: Synthetic oligonucleotide"
gcggtggttcggaatcagtct

SEQ ID NO: 15159 - DNA, 21 bp, Artificial Sequence
  source: /note="Description of Artificial Sequence: Synthetic oligonucleotide"
gctgtttataatgatgtttgt

SEQ ID NO: 15160 - DNA, 21 bp, Artificial Sequence
  source: /note="Description of Artificial Sequence: Synthetic oligonucleotide"
gctgtgtatagtagtgagccg

SEQ ID NO: 15161 - DNA, 21 bp, Artificial Sequence
  source: /note="Description of Artificial Sequence: Synthetic oligonucleotide"
gcttggaatccgaatgagaag

SEQ ID NO: 15162 - DNA, 21 bp, Artificial Sequence
  source: /note="Description of Artificial Sequence: Synthetic oligonucleotide"
gcttggccgaatagtcttaag

SEQ ID NO: 15163 - DNA, 21 bp, Artificial Sequence
  source: /note="Description of Artificial Sequence: Synthetic oligonucleotide"
gcgtggacgcagcaggggcct

SEQ ID NO: 15164 - DNA, 21 bp, Artificial Sequence
  source: /note="Description of Artificial Sequence: Synthetic oligonucleotide"
gcttatgctattctggaggcg

SEQ ID NO: 15165 - DNA, 21 bp, Artificial Sequence
  source: /note="Description of Artificial Sequence: Synthetic oligonucleotide"
gcttatgcgaaggctattgct

SEQ ID NO: 15166 - DNA, 21 bp, Artificial Sequence
  source: /note="Description of Artificial Sequence: Synthetic oligonucleotide"
gcttatgataagtcgctggtt

SEQ ID NO: 15167 - DNA, 21 bp, Artificial Sequence
  source: /note="Description of Artificial Sequence: Synthetic oligonucleotide"
gcgtatgatagggctttttcg

SEQ ID NO: 15168 - DNA, 21 bp, Artificial Sequence
  source: /note="Description of Artificial Sequence: Synthetic oligonucleotide"
gcttatgattctgctccttat

SEQ ID NO: 15169 - DNA, 21 bp, Artificial Sequence
  source: /note="Description of Artificial Sequence: Synthetic oligonucleotide"
gcttatgattcgcgggctgct

SEQ ID NO: 15170 - DNA, 21 bp, Artificial Sequence
  source: /note="Description of Artificial Sequence: Synthetic oligonucleotide"
gcgtatgaggcgaggacgcat

SEQ ID NO: 15171 - DNA, 21 bp, Artificial Sequence
  source: /note="Description of Artificial Sequence: Synthetic oligonucleotide"
gcgtatgagggtactctgagt

SEQ ID NO: 15172 - DNA, 21 bp, Artificial Sequence
  source: /note="Description of Artificial Sequence: Synthetic oligonucleotide"
gcttatgagccgatttctaag

SEQ ID NO: 15173 - DNA, 21 bp, Artificial Sequence
  source: /note="Description of Artificial Sequence: Synthetic oligonucleotide"
gcttattttgaggttcagcct

SEQ ID NO: 15174 - DNA, 21 bp, Artificial Sequence
  source: /note="Description of Artificial Sequence: Synthetic oligonucleotide"
gcgtatggggggccgagtgct

SEQ ID NO: 15175 - DNA, 21 bp, Artificial Sequence
  source: /note="Description of Artificial Sequence: Synthetic oligonucleotide"
gcttatggtgttacggagaag

SEQ ID NO: 15176 - DNA, 21 bp, Artificial Sequence
  source: /note="Description of Artificial Sequence: Synthetic oligonucleotide"
gcttatcatgagaagggggct

SEQ ID NO: 15177 - DNA, 21 bp, Artificial Sequence
  source: /note="Description of Artificial Sequence: Synthetic oligonucleotide"
gcttatcatagggcggatgct

SEQ ID NO: 15178 - DNA, 21 bp, Artificial Sequence
  source: /note="Description of Artificial Sequence: Synthetic oligonucleotide"
gcgtatcatgtgcgggttgat

SEQ ID NO: 15179 - DNA, 21 bp, Artificial Sequence
  source: /note="Description of Artificial Sequence: Synthetic oligonucleotide"
gcttatattcagggtagtctt

SEQ ID NO: 15180 - DNA, 21 bp, Artificial Sequence
  source: /note="Description of Artificial Sequence: Synthetic oligonucleotide"
gcgtataagcagcagatgtct

SEQ ID NO: 15181 - DNA, 21 bp, Artificial Sequence
  source: /note="Description of Artificial Sequence: Synthetic oligonucleotide"
gcgtatatgccgagtgcttat

SEQ ID NO: 15182 - DNA, 21 bp, Artificial Sequence
  source: /note="Description of Artificial Sequence: Synthetic oligonucleotide"
gcgtataatgggactaggcct

SEQ ID NO: 15183 - DNA, 21 bp, Artificial Sequence
  source: /note="Description of Artificial Sequence: Synthetic oligonucleotide"
gcttataatcagcctggtgcg

SEQ ID NO: 15184 - DNA, 21 bp, Artificial Sequence
  source: /note="Description of Artificial Sequence: Synthetic oligonucleotide"
gcgtataatacgacgaagcag

SEQ ID NO: 15185 - DNA, 21 bp, Artificial Sequence
  source: /note="Description of Artificial Sequence: Synthetic oligonucleotide"
gcgtatccgtttaaggagcat

SEQ ID NO: 15186 - DNA, 21 bp, Artificial Sequence
  source: /note="Description of Artificial Sequence: Synthetic oligonucleotide"
gcttatccgcgtgagtcgggt

SEQ ID NO: 15187 - DNA, 21 bp, Artificial Sequence
  source: /note="Description of Artificial Sequence: Synthetic oligonucleotide"
gcgtatccttctaatgcgtcg

SEQ ID NO: 15188 - DNA, 21 bp, Artificial Sequence
  source: /note="Description of Artificial Sequence: Synthetic oligonucleotide"
gcgtatccttcgagtcagttt

SEQ ID NO: 15189 - DNA, 21 bp, Artificial Sequence
  source: /note="Description of Artificial Sequence: Synthetic oligonucleotide"
gcgtatccgacttcttttgct

SEQ ID NO: 15190 - DNA, 21 bp, Artificial Sequence
  source: /note="Description of Artificial Sequence: Synthetic oligonucleotide"
gcttatcgggcttcgagtgag

SEQ ID NO: 15191 - DNA, 21 bp, Artificial Sequence
  source: /note="Description of Artificial Sequence: Synthetic oligonucleotide"
gcttatcgggattctacgact

SEQ ID NO: 15192 - DNA, 21 bp, Artificial Sequence
  source: /note="Description of Artificial Sequence: Synthetic oligonucleotide"
gcttatcgtggttcgacgact

SEQ ID NO: 15193 - DNA, 21 bp, Artificial Sequence
  source: /note="Description of Artificial Sequence: Synthetic oligonucleotide"
gcttattctgatagtcagcgg

SEQ ID NO: 15194 - DNA, 21 bp, Artificial Sequence
  source: /note="Description of Artificial Sequence: Synthetic oligonucleotide"
gcttattcgaagtctgctgat

SEQ ID NO: 15195 - DNA, 21 bp, Artificial Sequence
  source: /note="Description of Artificial Sequence: Synthetic oligonucleotide"
gcgtattcgaatcgtacgatg

SEQ ID NO: 15196 - DNA, 21 bp, Artificial Sequence
  source: /note="Description of Artificial Sequence: Synthetic oligonucleotide"
gcgtattctccgactcggaat

SEQ ID NO: 15197 - DNA, 21 bp, Artificial Sequence
  source: /note="Description of Artificial Sequence: Synthetic oligonucleotide"
gcgtatgttggtacgactccg

SEQ ID NO: 15198 - DNA, 21 bp, Artificial Sequence
  source: /note="Description of Artificial Sequence: Synthetic oligonucleotide"
gcttatgttaatacgcctcct

SEQ ID NO: 15199 - DNA, 21 bp, Artificial Sequence
  source: /note="Description of Artificial Sequence: Synthetic oligonucleotide"
gcgtatgttacgccgtcgtcg

SEQ ID NO: 15200 - DNA, 21 bp, Artificial Sequence
  source: /note="Description of Artificial Sequence: Synthetic oligonucleotide"
tgtgcggctaggtctacggct

SEQ ID NO: 15201 - DNA, 21 bp, Artificial Sequence
  source: /note="Description of Artificial Sequence: Synthetic oligonucleotide"
tgtgcggcgtctcagtcggag

SEQ ID NO: 15202 - DNA, 21 bp, Artificial Sequence
  source: /note="Description of Artificial Sequence: Synthetic oligonucleotide"
tgtgctaagacgactgctaat

SEQ ID NO: 15203 - DNA, 21 bp, Artificial Sequence
  source: /note="Description of Artificial Sequence: Synthetic oligonucleotide"
tgtgctttgggggcgtcttat

SEQ ID NO: 15204 - DNA, 21 bp, Artificial Sequence
  source: /note="Description of Artificial Sequence: Synthetic oligonucleotide"
tgtgcgccgcttaggcctttg

SEQ ID NO: 15205 - DNA, 21 bp, Artificial Sequence
  source: /note="Description of Artificial Sequence: Synthetic oligonucleotide"
tgtgctagggatactcatccg

SEQ ID NO: 15206 - DNA, 21 bp, Artificial Sequence
  source: /note="Description of Artificial Sequence: Synthetic oligonucleotide"
tgtgctaggatgaaggaggtt

SEQ ID NO: 15207 - DNA, 21 bp, Artificial Sequence
  source: /note="Description of Artificial Sequence: Synthetic oligonucleotide"
tgtgcgcggagttttgaggtt

SEQ ID NO: 15208 - DNA, 21 bp, Artificial Sequence
  source: /note="Description of Artificial Sequence: Synthetic oligonucleotide"
tgtgctgtgtttcagacgggt

SEQ ID NO: 15209 - DNA, 21 bp, Artificial Sequence
  source: /note="Description of Artificial Sequence: Synthetic oligonucleotide"
tgtgctgtgggtgttaggtcg

SEQ ID NO: 15210 - DNA, 21 bp, Artificial Sequence
  source: /note="Description of Artificial Sequence: Synthetic oligonucleotide"
tgttgtgcgccgggtttgagt

SEQ ID NO: 15211 - DNA, 21 bp, Artificial Sequence
  source: /note="Description of Artificial Sequence: Synthetic oligonucleotide"
tgtgatgcgcttaatcttgcg

SEQ ID NO: 15212 - DNA, 21 bp, Artificial Sequence
  source: /note="Description of Artificial Sequence: Synthetic oligonucleotide"
tgtgattcgagtaattcgtcg

SEQ ID NO: 15213 - DNA, 21 bp, Artificial Sequence
  source: /note="Description of Artificial Sequence: Synthetic oligonucleotide"
tgtgaggcttcttcgaaggtt

SEQ ID NO: 15214 - DNA, 21 bp, Artificial Sequence
  source: /note="Description of Artificial Sequence: Synthetic oligonucleotide"
tgtgagaagctggtgcgtgtg

SEQ ID NO: 15215 - DNA, 21 bp, Artificial Sequence
  source: /note="Description of Artificial Sequence: Synthetic oligonucleotide"
tgtgagatggaggcgacgttg

SEQ ID NO: 15216 - DNA, 21 bp, Artificial Sequence
  source: /note="Description of Artificial Sequence: Synthetic oligonucleotide"
tgtgagccgtgtcaggagctt

SEQ ID NO: 15217 - DNA, 21 bp, Artificial Sequence
  source: /note="Description of Artificial Sequence: Synthetic oligonucleotide"
tgtgagccttatgagaggtct

SEQ ID NO: 15218 - DNA, 21 bp, Artificial Sequence
  source: /note="Description of Artificial Sequence: Synthetic oligonucleotide"
tgtgagactattacgttggcg

SEQ ID NO: 15219 - DNA, 21 bp, Artificial Sequence
  source: /note="Description of Artificial Sequence: Synthetic oligonucleotide"
tgtgagacttggcagatgcat

SEQ ID NO: 15220 - DNA, 21 bp, Artificial Sequence
  source: /note="Description of Artificial Sequence: Synthetic oligonucleotide"
tgtgaggttgagaagaaggag

SEQ ID NO: 15221 - DNA, 21 bp, Artificial Sequence
  source: /note="Description of Artificial Sequence: Synthetic oligonucleotide"
tgtgaggtgggggcgccttct

SEQ ID NO: 15222 - DNA, 21 bp, Artificial Sequence
  source: /note="Description of Artificial Sequence: Synthetic oligonucleotide"
tgttttcctaagacggtgagt

SEQ ID NO: 15223 - DNA, 21 bp, Artificial Sequence
  source: /note="Description of Artificial Sequence: Synthetic oligonucleotide"
tgttttacgtctgagcgtggg

SEQ ID NO: 15224 - DNA, 21 bp, Artificial Sequence
  source: /note="Description of Artificial Sequence: Synthetic oligonucleotide"
tgtggtttggttatttgtgat

SEQ ID NO: 15225 - DNA, 21 bp, Artificial Sequence
  source: /note="Description of Artificial Sequence: Synthetic oligonucleotide"
tgtggtatgcggcagagttct

SEQ ID NO: 15226 - DNA, 21 bp, Artificial Sequence
  source: /note="Description of Artificial Sequence: Synthetic oligonucleotide"
tgtgggaatcatgaggcgtcg

SEQ ID NO: 15227 - DNA, 21 bp, Artificial Sequence
  source: /note="Description of Artificial Sequence: Synthetic oligonucleotide"
tgtgggtcttttattacgcat

SEQ ID NO: 15228 - DNA, 21 bp, Artificial Sequence
  source: /note="Description of Artificial Sequence: Synthetic oligonucleotide"
tgtcatccgaagatggagttt

SEQ ID NO: 15229 - DNA, 21 bp, Artificial Sequence
  source: /note="Description of Artificial Sequence: Synthetic oligonucleotide"
tgtcatacggcgtcttgttcg

SEQ ID NO: 15230 - DNA, 21 bp, Artificial Sequence
  source: /note="Description of Artificial Sequence: Synthetic oligonucleotide"
tgtattgctaggcctgagtgt

SEQ ID NO: 15231 - DNA, 21 bp, Artificial Sequence
  source: /note="Description of Artificial Sequence: Synthetic oligonucleotide"
tgtattcagtcgagtctgcat

SEQ ID NO: 15232 - DNA, 21 bp, Artificial Sequence
  source: /note="Description of Artificial Sequence: Synthetic oligonucleotide"
tgtattgttgttgagactgtg

SEQ ID NO: 15233 - DNA, 21 bp, Artificial Sequence
  source: /note="Description of Artificial Sequence: Synthetic oligonucleotide"
tgtaaggaggttccgcgtgcg

SEQ ID NO: 15234 - DNA, 21 bp, Artificial Sequence
  source: /note="Description of Artificial Sequence: Synthetic oligonucleotide"
tgtaaggggactcataattat

SEQ ID NO: 15235 - DNA, 21 bp, Artificial Sequence
  source: /note="Description of Artificial Sequence: Synthetic oligonucleotide"
tgtaagcatgggactcctatg

SEQ ID NO: 15236 - DNA, 21 bp, Artificial Sequence
  source: /note="Description of Artificial Sequence: Synthetic oligonucleotide"
tgtaagtcgaatagtacttgt

SEQ ID NO: 15237 - DNA, 21 bp, Artificial Sequence
  source: /note="Description of Artificial Sequence: Synthetic oligonucleotide"
tgtaagtcgtcgattgggtct

SEQ ID NO: 15238 - DNA, 21 bp, Artificial Sequence
  source: /note="Description of Artificial Sequence: Synthetic oligonucleotide"
tgtttggaggattgtatgcgg

SEQ ID NO: 15239 - DNA, 21 bp, Artificial Sequence
  source: /note="Description of Artificial Sequence: Synthetic oligonucleotide"
tgtttggagattcctatttcg

SEQ ID NO: 15240 - DNA, 21 bp, Artificial Sequence
  source: /note="Description of Artificial Sequence: Synthetic oligonucleotide"
tgtttggagtcggatcgtccg

SEQ ID NO: 15241 - DNA, 21 bp, Artificial Sequence
  source: /note="Description of Artificial Sequence: Synthetic oligonucleotide"
tgtcttgggactcatatgctt

SEQ ID NO: 15242 - DNA, 21 bp, Artificial Sequence
  source: /note="Description of Artificial Sequence: Synthetic oligonucleotide"
tgtttgcctgctgatagtgag

SEQ ID NO: 15243 - DNA, 21 bp, Artificial Sequence
  source: /note="Description of Artificial Sequence: Synthetic oligonucleotide"
tgtttgcagactgggttgacg

SEQ ID NO: 15244 - DNA, 21 bp, Artificial Sequence
  source: /note="Description of Artificial Sequence: Synthetic oligonucleotide"
tgtttgcgtacttctgttcct

SEQ ID NO: 15245 - DNA, 21 bp, Artificial Sequence
  source: /note="Description of Artificial Sequence: Synthetic oligonucleotide"
tgtctttcgagtggttctgtg

SEQ ID NO: 15246 - DNA, 21 bp, Artificial Sequence
  source: /note="Description of Artificial Sequence: Synthetic oligonucleotide"
tgtatggctgagcttatggat

SEQ ID NO: 15247 - DNA, 21 bp, Artificial Sequence
  source: /note="Description of Artificial Sequence: Synthetic oligonucleotide"
tgtatggctgagcttagggat

SEQ ID NO: 15248 - DNA, 21 bp, Artificial Sequence
  source: /note="Description of Artificial Sequence: Synthetic oligonucleotide"
tgtatgcctaggacgtgtgag

SEQ ID NO: 15249 - DNA, 21 bp, Artificial Sequence
  source: /note="Description of Artificial Sequence: Synthetic oligonucleotide"
tgtatgacgattccgaatgct

SEQ ID NO: 15250 - DNA, 21 bp, Artificial Sequence
  source: /note="Description of Artificial Sequence: Synthetic oligonucleotide"
tgtaatgcgtcttgtgggagg

SEQ ID NO: 15251 - DNA, 21 bp, Artificial Sequence
  source: /note="Description of Artificial Sequence: Synthetic oligonucleotide"
tgtaatgagattactgagcct

SEQ ID NO: 15252 - DNA, 21 bp, Artificial Sequence
  source: /note="Description of Artificial Sequence: Synthetic oligonucleotide"
tgtaatcctaagactagtagt

SEQ ID NO: 15253 - DNA, 21 bp, Artificial Sequence
  source: /note="Description of Artificial Sequence: Synthetic oligonucleotide"
tgtaatagttctagttgtacg

SEQ ID NO: 15254 - DNA, 21 bp, Artificial Sequence
  source: /note="Description of Artificial Sequence: Synthetic oligonucleotide"
tgtccggctgagaatcagttg

SEQ ID NO: 15255 - DNA, 21 bp, Artificial Sequence
  source: /note="Description of Artificial Sequence: Synthetic oligonucleotide"
tgtccggctaagtcgtgtggt

SEQ ID NO: 15256 - DNA, 21 bp, Artificial Sequence
  source: /note="Description of Artificial Sequence: Synthetic oligonucleotide"
tgtcctgatcggtatcagtgt

SEQ ID NO: 15257 - DNA, 21 bp, Artificial Sequence
  source: /note="Description of Artificial Sequence: Synthetic oligonucleotide"
tgtccgctggctccgtatagt

SEQ ID NO: 15258 - DNA, 21 bp, Artificial Sequence
  source: /note="Description of Artificial Sequence: Synthetic oligonucleotide"
tgtccgctggattcgacgatt

SEQ ID NO: 15259 - DNA, 21 bp, Artificial Sequence
  source: /note="Description of Artificial Sequence: Synthetic oligonucleotide"
tgtccgttgggtgatcggcat

SEQ ID NO: 15260 - DNA, 21 bp, Artificial Sequence
  source: /note="Description of Artificial Sequence: Synthetic oligonucleotide"
tgtcctatggtgtgttctgcg

SEQ ID NO: 15261 - DNA, 21 bp, Artificial Sequence
  source: /note="Description of Artificial Sequence: Synthetic oligonucleotide"
tgtccgccgcagcctttgccg

SEQ ID NO: 15262 - DNA, 21 bp, Artificial Sequence
  source: /note="Description of Artificial Sequence: Synthetic oligonucleotide"
tgtccgcgtacggggcttaat

SEQ ID NO: 15263 - DNA, 21 bp, Artificial Sequence
  source: /note="Description of Artificial Sequence: Synthetic oligonucleotide"
tgtccttctgagcggatgggg

SEQ ID NO: 15264 - DNA, 21 bp, Artificial Sequence
  source: /note="Description of Artificial Sequence: Synthetic oligonucleotide"
tgtccgtcgattctgcattgt

SEQ ID NO: 15265 - DNA, 21 bp, Artificial Sequence
  source: /note="Description of Artificial Sequence: Synthetic oligonucleotide"
tgtccttctcgtgcgccgtgt

SEQ ID NO: 15266 - DNA, 21 bp, Artificial Sequence
  source: /note="Description of Artificial Sequence: Synthetic oligonucleotide"
tgtccgacgccttcttcttgt

SEQ ID NO: 15267 - DNA, 21 bp, Artificial Sequence
  source: /note="Description of Artificial Sequence: Synthetic oligonucleotide"
tgtcctacgacgaagtctgcg

SEQ ID NO: 15268 - DNA, 21 bp, Artificial Sequence
  source: /note="Description of Artificial Sequence: Synthetic oligonucleotide"
tgtcaggctcggtcttgtatt

SEQ ID NO: 15269 - DNA, 21 bp, Artificial Sequence
  source: /note="Description of Artificial Sequence: Synthetic oligonucleotide"
tgtagggcgtcttcgtcgccg

SEQ ID NO: 15270 - DNA, 21 bp, Artificial Sequence
  source: /note="Description of Artificial Sequence: Synthetic oligonucleotide"
tgtcgtgcggttgagaggcct

SEQ ID NO: 15271 - DNA, 21 bp, Artificial Sequence
  source: /note="Description of Artificial Sequence: Synthetic oligonucleotide"
tgtcggatgatgaatcggcct

SEQ ID NO: 15272 - DNA, 21 bp, Artificial Sequence
  source: /note="Description of Artificial Sequence: Synthetic oligonucleotide"
tgtcgtatgaatgatctggtg

SEQ ID NO: 15273 - DNA, 21 bp, Artificial Sequence
  source: /note="Description of Artificial Sequence: Synthetic oligonucleotide"
tgtaggaggacgatggatatg

SEQ ID NO: 15274 - DNA, 21 bp, Artificial Sequence
  source: /note="Description of Artificial Sequence: Synthetic oligonucleotide"
tgtcgttcggagaataagctg

SEQ ID NO: 15275 - DNA, 21 bp, Artificial Sequence
  source: /note="Description of Artificial Sequence: Synthetic oligonucleotide"
tgtcgttctgggggtgaggcg

SEQ ID NO: 15276 - DNA, 21 bp, Artificial Sequence
  source: /note="Description of Artificial Sequence: Synthetic oligonucleotide"
tgttctgctttgcataagtgt

SEQ ID NO: 15277 - DNA, 21 bp, Artificial Sequence
  source: /note="Description of Artificial Sequence: Synthetic oligonucleotide"
tgtagtgctaattttacgggt

SEQ ID NO: 15278 - DNA, 21 bp, Artificial Sequence
  source: /note="Description of Artificial Sequence: Synthetic oligonucleotide"
tgtagtgagtcgctgatggct

SEQ ID NO: 15279 - DNA, 21 bp, Artificial Sequence
  source: /note="Description of Artificial Sequence: Synthetic oligonucleotide"
tgttctgagtcttctattttt

SEQ ID NO: 15280 - DNA, 21 bp, Artificial Sequence
  source: /note="Description of Artificial Sequence: Synthetic oligonucleotide"
tgtagtggtacgactaattgt

SEQ ID NO: 15281 - DNA, 21 bp, Artificial Sequence
  source: /note="Description of Artificial Sequence: Synthetic oligonucleotide"
tgttcgccgccgcattttccg

SEQ ID NO: 15282 - DNA, 21 bp, Artificial Sequence
  source: /note="Description of Artificial Sequence: Synthetic oligonucleotide"
tgtagtccttcgggggttatt

SEQ ID NO: 15283 - DNA, 21 bp, Artificial Sequence
  source: /note="Description of Artificial Sequence: Synthetic oligonucleotide"
tgttcttctaggccgtttgct

SEQ ID NO: 15284 - DNA, 21 bp, Artificial Sequence
  source: /note="Description of Artificial Sequence: Synthetic oligonucleotide"
tgtagttctacgacgaagtgt

SEQ ID NO: 15285 - DNA, 21 bp, Artificial Sequence
  source: /note="Description of Artificial Sequence: Synthetic oligonucleotide"
tgtactgcggagttgcctttt

SEQ ID NO: 15286 - DNA, 21 bp, Artificial Sequence
  source: /note="Description of Artificial Sequence: Synthetic oligonucleotide"
tgtacggatcatcctgcgtgt

SEQ ID NO: 15287 - DNA, 21 bp, Artificial Sequence
  source: /note="Description of Artificial Sequence: Synthetic oligonucleotide"
tgtactgattctacgtgtttg

SEQ ID NO: 15288 - DNA, 21 bp, Artificial Sequence
  source: /note="Description of Artificial Sequence: Synthetic oligonucleotide"
tgtacgggtcctttgtgttcg

SEQ ID NO: 15289 - DNA, 21 bp, Artificial Sequence
  source: /note="Description of Artificial Sequence: Synthetic oligonucleotide"
tgtacgaagtcgatttgtact

SEQ ID NO: 15290 - DNA, 21 bp, Artificial Sequence
  source: /note="Description of Artificial Sequence: Synthetic oligonucleotide"
tgtactagtacgaagatttat

SEQ ID NO: 15291 - DNA, 21 bp, Artificial Sequence
  source: /note="Description of Artificial Sequence: Synthetic oligonucleotide"
tgtacgacggatgctttgagt

SEQ ID NO: 15292 - DNA, 21 bp, Artificial Sequence
  source: /note="Description of Artificial Sequence: Synthetic oligonucleotide"
tgtacttatactcttattgat

SEQ ID NO: 15293 - DNA, 21 bp, Artificial Sequence
  source: /note="Description of Artificial Sequence: Synthetic oligonucleotide"
tgtgttcctgattcgtctaag

SEQ ID NO: 15294 - DNA, 21 bp, Artificial Sequence
  source: /note="Description of Artificial Sequence: Synthetic oligonucleotide"
tgtgtgaggctgacgacgcct

SEQ ID NO: 15295 - DNA, 21 bp, Artificial Sequence
  source: /note="Description of Artificial Sequence: Synthetic oligonucleotide"
tgtgttactcctgagaaggtg

SEQ ID NO: 15296 - DNA, 21 bp, Artificial Sequence
  source: /note="Description of Artificial Sequence: Synthetic oligonucleotide"
tgtgttgtgaatcagcagggt

SEQ ID NO: 15297 - DNA, 21 bp, Artificial Sequence
  source: /note="Description of Artificial Sequence: Synthetic oligonucleotide"
tgtgtggtgagtcggcaggat

SEQ ID NO: 15298 - DNA, 21 bp, Artificial Sequence
  source: /note="Description of Artificial Sequence: Synthetic oligonucleotide"
tgttatattgggactcagtgt

SEQ ID NO: 15299 - DNA, 21 bp, Artificial Sequence
  source: /note="Description of Artificial Sequence: Synthetic oligonucleotide"
tgttatcttagtacgtgtacg

SEQ ID NO: 15300 - DNA, 21 bp, Artificial Sequence
  source: /note="Description of Artificial Sequence: Synthetic oligonucleotide"
tgttataatcggacggagtgt

SEQ ID NO: 15301 - DNA, 21 bp, Artificial Sequence
  source: /note="Description of Artificial Sequence: Synthetic oligonucleotide"
tgttatccgcctgagaatgct

SEQ ID NO: 15302 - DNA, 21 bp, Artificial Sequence
  source: /note="Description of Artificial Sequence: Synthetic oligonucleotide"
gatgcggcgggtacgtctaag

SEQ ID NO: 15303 - DNA, 21 bp, Artificial Sequence
  source: /note="Description of Artificial Sequence: Synthetic oligonucleotide"
gatgctgcgaagagtgcttat

SEQ ID NO: 15304 - DNA, 21 bp, Artificial Sequence
  source: /note="Description of Artificial Sequence: Synthetic oligonucleotide"
gatgctgcgactaaggcgact

SEQ ID NO: 15305 - DNA, 21 bp, Artificial Sequence
  source: /note="Description of Artificial Sequence: Synthetic oligonucleotide"
gatgctgagcgtgcgaagccg

SEQ ID NO: 15306 - DNA, 21 bp, Artificial Sequence
  source: /note="Description of Artificial Sequence: Synthetic oligonucleotide"
gatgctgagtggcctatgtat

SEQ ID NO: 15307 - DNA, 21 bp, Artificial Sequence
  source: /note="Description of Artificial Sequence: Synthetic oligonucleotide"
gatgctggtattgggggtcct

SEQ ID NO: 15308 - DNA, 21 bp, Artificial Sequence
  source: /note="Description of Artificial Sequence: Synthetic oligonucleotide"
gatgcggggaattggcagcct

SEQ ID NO: 15309 - DNA, 21 bp, Artificial Sequence
  source: /note="Description of Artificial Sequence: Synthetic oligonucleotide"
gatgcggggcctagggctcag

SEQ ID NO: 15310 - DNA, 21 bp, Artificial Sequence
  source: /note="Description of Artificial Sequence: Synthetic oligonucleotide"
gatgctcataatgctccgcgt

SEQ ID NO: 15311 - DNA, 21 bp, Artificial Sequence
  source: /note="Description of Artificial Sequence: Synthetic oligonucleotide"
gatgctcatcgtttggtgacg

SEQ ID NO: 15312 - DNA, 21 bp, Artificial Sequence
  source: /note="Description of Artificial Sequence: Synthetic oligonucleotide"
gatgctattaaggctatgtcg

SEQ ID NO: 15313 - DNA, 21 bp, Artificial Sequence
  source: /note="Description of Artificial Sequence: Synthetic oligonucleotide"
gatgctattaatatggggggt

SEQ ID NO: 15314 - DNA, 21 bp, Artificial Sequence
  source: /note="Description of Artificial Sequence: Synthetic oligonucleotide"
gatgcgattcctcttgctagt

SEQ ID NO: 15315 - DNA, 21 bp, Artificial Sequence
  source: /note="Description of Artificial Sequence: Synthetic oligonucleotide"
gatgctaaggttatggttccg

SEQ ID NO: 15316 - DNA, 21 bp, Artificial Sequence
  source: /note="Description of Artificial Sequence: Synthetic oligonucleotide"
gatgcgttgaagggggcgaag

SEQ ID NO: 15317 - DNA, 21 bp, Artificial Sequence
  source: /note="Description of Artificial Sequence: Synthetic oligonucleotide"
gatgctcctaatagtgtgatg

SEQ ID NO: 15318 - DNA, 21 bp, Artificial Sequence
  source: /note="Description of Artificial Sequence: Synthetic oligonucleotide"
gatgctcctccgcttcgtact

SEQ ID NO: 15319 - DNA, 21 bp, Artificial Sequence
  source: /note="Description of Artificial Sequence: Synthetic oligonucleotide"
gatgctccgcgtgagtcgctt

SEQ ID NO: 15320 - DNA, 21 bp, Artificial Sequence
  source: /note="Description of Artificial Sequence: Synthetic oligonucleotide"
gatgctcctcggaatgcggag

SEQ ID NO: 15321 - DNA, 21 bp, Artificial Sequence
  source: /note="Description of Artificial Sequence: Synthetic oligonucleotide"
gatgcgcagccgtcgcagatg

SEQ ID NO: 15322 - DNA, 21 bp, Artificial Sequence
  source: /note="Description of Artificial Sequence: Synthetic oligonucleotide"
gatgcgcagtattctcagcgt

SEQ ID NO: 15323 - DNA, 21 bp, Artificial Sequence
  source: /note="Description of Artificial Sequence: Synthetic oligonucleotide"
gatgcgcgtgctcatcctttg

SEQ ID NO: 15324 - DNA, 21 bp, Artificial Sequence
  source: /note="Description of Artificial Sequence: Synthetic oligonucleotide"
gatgcgcggtttagtatgcag

SEQ ID NO: 15325 - DNA, 21 bp, Artificial Sequence
  source: /note="Description of Artificial Sequence: Synthetic oligonucleotide"
gatgcgaggcttgcgccggag

SEQ ID NO: 15326 - DNA, 21 bp, Artificial Sequence
  source: /note="Description of Artificial Sequence: Synthetic oligonucleotide"
gatgcgaggatgcttatttct

SEQ ID NO: 15327 - DNA, 21 bp, Artificial Sequence
  source: /note="Description of Artificial Sequence: Synthetic oligonucleotide"
gatgctcgtagggatattgtt

SEQ ID NO: 15328 - DNA, 21 bp, Artificial Sequence
  source: /note="Description of Artificial Sequence: Synthetic oligonucleotide"
gatgcgaggacggctactttt

SEQ ID NO: 15329 - DNA, 21 bp, Artificial Sequence
  source: /note="Description of Artificial Sequence: Synthetic oligonucleotide"
gatgctcgggttactcgtttt

SEQ ID NO: 15330 - DNA, 21 bp, Artificial Sequence
  source: /note="Description of Artificial Sequence: Synthetic oligonucleotide"
gatgctagtctgatgaagatg

SEQ ID NO: 15331 - DNA, 21 bp, Artificial Sequence
  source: /note="Description of Artificial Sequence: Synthetic oligonucleotide"
gatgcgtcgccgaatcgtgag

SEQ ID NO: 15332 - DNA, 21 bp, Artificial Sequence
  source: /note="Description of Artificial Sequence: Synthetic oligonucleotide"
gatgcgtctactattaaggat

SEQ ID NO: 15333 - DNA, 21 bp, Artificial Sequence
  source: /note="Description of Artificial Sequence: Synthetic oligonucleotide"
gatgctgtggcggatgatcct

SEQ ID NO: 15334 - DNA, 21 bp, Artificial Sequence
  source: /note="Description of Artificial Sequence: Synthetic oligonucleotide"
gatgctgtggagcgggtttct

SEQ ID NO: 15335 - DNA, 21 bp, Artificial Sequence
  source: /note="Description of Artificial Sequence: Synthetic oligonucleotide"
gatgctgttgttgagcggagt

SEQ ID NO: 15336 - DNA, 21 bp, Artificial Sequence
  source: /note="Description of Artificial Sequence: Synthetic oligonucleotide"
gattgtgatacgcagaagact

SEQ ID NO: 15337 - DNA, 21 bp, Artificial Sequence
  source: /note="Description of Artificial Sequence: Synthetic oligonucleotide"
gattgtcttttgagtggtcct

SEQ ID NO: 15338 - DNA, 21 bp, Artificial Sequence
  source: /note="Description of Artificial Sequence: Synthetic oligonucleotide"
gattgtccgtttcagaagggg

SEQ ID NO: 15339 - DNA, 21 bp, Artificial Sequence
  source: /note="Description of Artificial Sequence: Synthetic oligonucleotide"
gattgttcgtttaagtgttct

SEQ ID NO: 15340 - DNA, 21 bp, Artificial Sequence
  source: /note="Description of Artificial Sequence: Synthetic oligonucleotide"
gatgatgagcatcgttcgacg

SEQ ID NO: 15341 - DNA, 21 bp, Artificial Sequence
  source: /note="Description of Artificial Sequence: Synthetic oligonucleotide"
gatgatgggcatccgcatctg

SEQ ID NO: 15342 - DNA, 21 bp, Artificial Sequence
  source: /note="Description of Artificial Sequence: Synthetic oligonucleotide"
gatgatattgcttgtgatgct

SEQ ID NO: 15343 - DNA, 21 bp, Artificial Sequence
  source: /note="Description of Artificial Sequence: Synthetic oligonucleotide"
gatgataaggagaggcgggag

SEQ ID NO: 15344 - DNA, 21 bp, Artificial Sequence
  source: /note="Description of Artificial Sequence: Synthetic oligonucleotide"
gatgatatggctagggggcgg

SEQ ID NO: 15345 - DNA, 21 bp, Artificial Sequence
  source: /note="Description of Artificial Sequence: Synthetic oligonucleotide"
gatgatcctcattcttcgtct

SEQ ID NO: 15346 - DNA, 21 bp, Artificial Sequence
  source: /note="Description of Artificial Sequence: Synthetic oligonucleotide"
gatgatccgagggatgggagg

SEQ ID NO: 15347 - DNA, 21 bp, Artificial Sequence
  source: /note="Description of Artificial Sequence: Synthetic oligonucleotide"
gatgatcggaggcattttgtg

SEQ ID NO: 15348 - DNA, 21 bp, Artificial Sequence
  source: /note="Description of Artificial Sequence: Synthetic oligonucleotide"
gatgatcggagttttccgatg

SEQ ID NO: 15349 - DNA, 21 bp, Artificial Sequence
  source: /note="Description of Artificial Sequence: Synthetic oligonucleotide"
gatgattcgctttgtcagctg

SEQ ID NO: 15350 - DNA, 21 bp, Artificial Sequence
  source: /note="Description of Artificial Sequence: Synthetic oligonucleotide"
gatgatactaggtttgatgat

SEQ ID NO: 15351 - DNA, 21 bp, Artificial Sequence
  source: /note="Description of Artificial Sequence: Synthetic oligonucleotide"
gatgattggcctaaggtgagt

SEQ ID NO: 15352 - DNA, 21 bp, Artificial Sequence
  source: /note="Description of Artificial Sequence: Synthetic oligonucleotide"
gatgattatcatgctccggcg

SEQ ID NO: 15353 - DNA, 21 bp, Artificial Sequence
  source: /note="Description of Artificial Sequence: Synthetic oligonucleotide"
gatgaggctaagaagcatcat

SEQ ID NO: 15354 - DNA, 21 bp, Artificial Sequence
  source: /note="Description of Artificial Sequence: Synthetic oligonucleotide"
gatgaggctcctcatcctgct

SEQ ID NO: 15355 - DNA, 21 bp, Artificial Sequence
  source: /note="Description of Artificial Sequence: Synthetic oligonucleotide"
gatgaggatattaagaggctt

SEQ ID NO: 15356 - DNA, 21 bp, Artificial Sequence
  source: /note="Description of Artificial Sequence: Synthetic oligonucleotide"
gatgagggtaaggttaagcgt

SEQ ID NO: 15357 - DNA, 21 bp, Artificial Sequence
  source: /note="Description of Artificial Sequence: Synthetic oligonucleotide"
gatgaggggcggcatcagcgt

SEQ ID NO: 15358 - DNA, 21 bp, Artificial Sequence
  source: /note="Description of Artificial Sequence: Synthetic oligonucleotide"
gatgagaatgagacgggtcct

SEQ ID NO: 15359 - DNA, 21 bp, Artificial Sequence
  source: /note="Description of Artificial Sequence: Synthetic oligonucleotide"
gatgagaatgttgctttgcct

SEQ ID NO: 15360 - DNA, 21 bp, Artificial Sequence
  source: /note="Description of Artificial Sequence: Synthetic oligonucleotide"
gatgagccttttaagaaggct

SEQ ID NO: 15361 - DNA, 21 bp, Artificial Sequence
  source: /note="Description of Artificial Sequence: Synthetic oligonucleotide"
gatgagccggggatgacgtcg

SEQ ID NO: 15362 - DNA, 21 bp, Artificial Sequence
  source: /note="Description of Artificial Sequence: Synthetic oligonucleotide"
gatgagccgaggcatcagatg

SEQ ID NO: 15363 - DNA, 21 bp, Artificial Sequence
  source: /note="Description of Artificial Sequence: Synthetic oligonucleotide"
gatgagcggggttttaggtct

SEQ ID NO: 15364 - DNA, 21 bp, Artificial Sequence
  source: /note="Description of Artificial Sequence: Synthetic oligonucleotide"
gatgagcgtcggcttgatccg

SEQ ID NO: 15365 - DNA, 21 bp, Artificial Sequence
  source: /note="Description of Artificial Sequence: Synthetic oligonucleotide"
gatgagagtactatgtctagg

SEQ ID NO: 15366 - DNA, 21 bp, Artificial Sequence
  source: /note="Description of Artificial Sequence: Synthetic oligonucleotide"
gatgagtcttatgatcggaat

SEQ ID NO: 15367 - DNA, 21 bp, Artificial Sequence
  source: /note="Description of Artificial Sequence: Synthetic oligonucleotide"
gatgaggttaagaaggagggt

SEQ ID NO: 15368 - DNA, 21 bp, Artificial Sequence
  source: /note="Description of Artificial Sequence: Synthetic oligonucleotide"
gatgagtgggcgcatgcgcgg

SEQ ID NO: 15369 - DNA, 21 bp, Artificial Sequence
  source: /note="Description of Artificial Sequence: Synthetic oligonucleotide"
gattttgcggggaattcggat

SEQ ID NO: 15370 - DNA, 21 bp, Artificial Sequence
  source: /note="Description of Artificial Sequence: Synthetic oligonucleotide"
gattttgcgctggcgagtcct

SEQ ID NO: 15371 - DNA, 21 bp, Artificial Sequence
  source: /note="Description of Artificial Sequence: Synthetic oligonucleotide"
gattttgcgaggcagcatgat

SEQ ID NO: 15372 - DNA, 21 bp, Artificial Sequence
  source: /note="Description of Artificial Sequence: Synthetic oligonucleotide"
gattttgagtgtattggggtt

SEQ ID NO: 15373 - DNA, 21 bp, Artificial Sequence
  source: /note="Description of Artificial Sequence: Synthetic oligonucleotide"
gattttgagaatccgatggag

SEQ ID NO: 15374 - DNA, 21 bp, Artificial Sequence
  source: /note="Description of Artificial Sequence: Synthetic oligonucleotide"
gattttggggggttggctgtg

SEQ ID NO: 15375 - DNA, 21 bp, Artificial Sequence
  source: /note="Description of Artificial Sequence: Synthetic oligonucleotide"
gattttaaggctgtgtgttgt

SEQ ID NO: 15376 - DNA, 21 bp, Artificial Sequence
  source: /note="Description of Artificial Sequence: Synthetic oligonucleotide"
gattttaaggtggtttctggg

SEQ ID NO: 15377 - DNA, 21 bp, Artificial Sequence
  source: /note="Description of Artificial Sequence: Synthetic oligonucleotide"
gattttccgttgaagcctggt

SEQ ID NO: 15378 - DNA, 21 bp, Artificial Sequence
  source: /note="Description of Artificial Sequence: Synthetic oligonucleotide"
gattttcgtaagcctgagcag

SEQ ID NO: 15379 - DNA, 21 bp, Artificial Sequence
  source: /note="Description of Artificial Sequence: Synthetic oligonucleotide"
gattttagtttggggctgttg

SEQ ID NO: 15380 - DNA, 21 bp, Artificial Sequence
  source: /note="Description of Artificial Sequence: Synthetic oligonucleotide"
gattttagtcttaataattct

SEQ ID NO: 15381 - DNA, 21 bp, Artificial Sequence
  source: /note="Description of Artificial Sequence: Synthetic oligonucleotide"
gatttttctttgcaggatgct

SEQ ID NO: 15382 - DNA, 21 bp, Artificial Sequence
  source: /note="Description of Artificial Sequence: Synthetic oligonucleotide"
gattttagtcggcgggctgat

SEQ ID NO: 15383 - DNA, 21 bp, Artificial Sequence
  source: /note="Description of Artificial Sequence: Synthetic oligonucleotide"
gattttacgcgtgcggatggg

SEQ ID NO: 15384 - DNA, 21 bp, Artificial Sequence
  source: /note="Description of Artificial Sequence: Synthetic oligonucleotide"
gattttactgtgcctgctggg

SEQ ID NO: 15385 - DNA, 21 bp, Artificial Sequence
  source: /note="Description of Artificial Sequence: Synthetic oligonucleotide"
gattttgttccgcttaagtct

SEQ ID NO: 15386 - DNA, 21 bp, Artificial Sequence
  source: /note="Description of Artificial Sequence: Synthetic oligonucleotide"
gattttgtgactattcctaat

SEQ ID NO: 15387 - DNA, 21 bp, Artificial Sequence
  source: /note="Description of Artificial Sequence: Synthetic oligonucleotide"
gatggggcttcgggggttcct

SEQ ID NO: 15388 - DNA, 21 bp, Artificial Sequence
  source: /note="Description of Artificial Sequence: Synthetic oligonucleotide"
gatggtggtcattcggtgcgt

SEQ ID NO: 15389 - DNA, 21 bp, Artificial Sequence
  source: /note="Description of Artificial Sequence: Synthetic oligonucleotide"
gatgggattcgggatccgagg

SEQ ID NO: 15390 - DNA, 21 bp, Artificial Sequence
  source: /note="Description of Artificial Sequence: Synthetic oligonucleotide"
gatggtaaggctaaggtttct

SEQ ID NO: 15391 - DNA, 21 bp, Artificial Sequence
  source: /note="Description of Artificial Sequence: Synthetic oligonucleotide"
gatggtaagcatactgattat

SEQ ID NO: 15392 - DNA, 21 bp, Artificial Sequence
  source: /note="Description of Artificial Sequence: Synthetic oligonucleotide"
gatggtcttcgtacggagtcg

SEQ ID NO: 15393 - DNA, 21 bp, Artificial Sequence
  source: /note="Description of Artificial Sequence: Synthetic oligonucleotide"
gatgggctgtctcggttgccg

SEQ ID NO: 15394 - DNA, 21 bp, Artificial Sequence
  source: /note="Description of Artificial Sequence: Synthetic oligonucleotide"
gatgggatgttgagggatagg

SEQ ID NO: 15395 - DNA, 21 bp, Artificial Sequence
  source: /note="Description of Artificial Sequence: Synthetic oligonucleotide"
gatggtaattcttatcatccg

SEQ ID NO: 15396 - DNA, 21 bp, Artificial Sequence
  source: /note="Description of Artificial Sequence: Synthetic oligonucleotide"
gatgggaatacggcgaggggg

SEQ ID NO: 15397 - DNA, 21 bp, Artificial Sequence
  source: /note="Description of Artificial Sequence: Synthetic oligonucleotide"
gatgggccggaggaggagcgt

SEQ ID NO: 15398 - DNA, 21 bp, Artificial Sequence
  source: /note="Description of Artificial Sequence: Synthetic oligonucleotide"
gatgggccgggttcgccgaat

SEQ ID NO: 15399 - DNA, 21 bp, Artificial Sequence
  source: /note="Description of Artificial Sequence: Synthetic oligonucleotide"
gatggtcgtcatctttcgcct

SEQ ID NO: 15400 - DNA, 21 bp, Artificial Sequence
  source: /note="Description of Artificial Sequence: Synthetic oligonucleotide"
gatgggcgtactgttgcggcg

SEQ ID NO: 15401 - DNA, 21 bp, Artificial Sequence
  source: /note="Description of Artificial Sequence: Synthetic oligonucleotide"
gatggttcttttgagccttat

SEQ ID NO: 15402 - DNA, 21 bp, Artificial Sequence
  source: /note="Description of Artificial Sequence: Synthetic oligonucleotide"
gatggttcggggacgctgaat

SEQ ID NO: 15403 - DNA, 21 bp, Artificial Sequence
  source: /note="Description of Artificial Sequence: Synthetic oligonucleotide"
gatggtagtccgagttgggct

SEQ ID NO: 15404 - DNA, 21 bp, Artificial Sequence
  source: /note="Description of Artificial Sequence: Synthetic oligonucleotide"
gatggtacggatcagtctcag

SEQ ID NO: 15405 - DNA, 21 bp, Artificial Sequence
  source: /note="Description of Artificial Sequence: Synthetic oligonucleotide"
gatggtacgagggctcagtgg

SEQ ID NO: 15406 - DNA, 21 bp, Artificial Sequence
  source: /note="Description of Artificial Sequence: Synthetic oligonucleotide"
gatggtacttctcttaagcat

SEQ ID NO: 15407 - DNA, 21 bp, Artificial Sequence
  source: /note="Description of Artificial Sequence: Synthetic oligonucleotide"
gatgggacgtatcggaatatg

SEQ ID NO: 15408 - DNA, 21 bp, Artificial Sequence
  source: /note="Description of Artificial Sequence: Synthetic oligonucleotide"
gatggggttacgactctgtcg

SEQ ID NO: 15409 - DNA, 21 bp, Artificial Sequence
  source: /note="Description of Artificial Sequence: Synthetic oligonucleotide"
gatcatgcgcataggagtact

SEQ ID NO: 15410 - DNA, 21 bp, Artificial Sequence
  source: /note="Description of Artificial Sequence: Synthetic oligonucleotide"
gatcataagtcgaattctcgt

SEQ ID NO: 15411 - DNA, 21 bp, Artificial Sequence
  source: /note="Description of Artificial Sequence: Synthetic oligonucleotide"
gatcatcttgctcaggagtgt

SEQ ID NO: 15412 - DNA, 21 bp, Artificial Sequence
  source: /note="Description of Artificial Sequence: Synthetic oligonucleotide"
gatcatcttgatgtgaatgct

SEQ ID NO: 15413 - DNA, 21 bp, Artificial Sequence
  source: /note="Description of Artificial Sequence: Synthetic oligonucleotide"
gatcataatcatatggggtct

SEQ ID NO: 15414 - DNA, 21 bp, Artificial Sequence
  source: /note="Description of Artificial Sequence: Synthetic oligonucleotide"
gatcataatttgcggcagaat

SEQ ID NO: 15415 - DNA, 21 bp, Artificial Sequence
  source: /note="Description of Artificial Sequence: Synthetic oligonucleotide"
gatcatccgtatctgtctccg

SEQ ID NO: 15416 - DNA, 21 bp, Artificial Sequence
  source: /note="Description of Artificial Sequence: Synthetic oligonucleotide"
gatcatcgtacgcttgagagt

SEQ ID NO: 15417 - DNA, 21 bp, Artificial Sequence
  source: /note="Description of Artificial Sequence: Synthetic oligonucleotide"
gatcattcggctctttcttcg

SEQ ID NO: 15418 - DNA, 21 bp, Artificial Sequence
  source: /note="Description of Artificial Sequence: Synthetic oligonucleotide"
gatcatagtgggaagaaggat

SEQ ID NO: 15419 - DNA, 21 bp, Artificial Sequence
  source: /note="Description of Artificial Sequence: Synthetic oligonucleotide"
gatcattctatggcgctgcgt

SEQ ID NO: 15420 - DNA, 21 bp, Artificial Sequence
  source: /note="Description of Artificial Sequence: Synthetic oligonucleotide"
gatcattctgtgccggggact

SEQ ID NO: 15421 - DNA, 21 bp, Artificial Sequence
  source: /note="Description of Artificial Sequence: Synthetic oligonucleotide"
gatcatactgatcgggatggt

SEQ ID NO: 15422 - DNA, 21 bp, Artificial Sequence
  source: /note="Description of Artificial Sequence: Synthetic oligonucleotide"
gatcatacgccgctgctttcg

SEQ ID NO: 15423 - DNA, 21 bp, Artificial Sequence
  source: /note="Description of Artificial Sequence: Synthetic oligonucleotide"
gatcattggaatggggattcg

SEQ ID NO: 15424 - DNA, 21 bp, Artificial Sequence
  source: /note="Description of Artificial Sequence: Synthetic oligonucleotide"
gatcattatgctcgtttgccg

SEQ ID NO: 15425 - DNA, 21 bp, Artificial Sequence
  source: /note="Description of Artificial Sequence: Synthetic oligonucleotide"
gatattgctcatcctcgtaat

SEQ ID NO: 15426 - DNA, 21 bp, Artificial Sequence
  source: /note="Description of Artificial Sequence: Synthetic oligonucleotide"
gatattgcgcagcatgagact

SEQ ID NO: 15427 - DNA, 21 bp, Artificial Sequence
  source: /note="Description of Artificial Sequence: Synthetic oligonucleotide"
gatattgaggatacgccggtg

SEQ ID NO: 15428 - DNA, 21 bp, Artificial Sequence
  source: /note="Description of Artificial Sequence: Synthetic oligonucleotide"
gatattcatcgttcgtcgtat

SEQ ID NO: 15429 - DNA, 21 bp, Artificial Sequence
  source: /note="Description of Artificial Sequence: Synthetic oligonucleotide"
gatattcatagtcatctttat

SEQ ID NO: 15430 - DNA, 21 bp, Artificial Sequence
  source: /note="Description of Artificial Sequence: Synthetic oligonucleotide"
gatattaattttaaggctcct

SEQ ID NO: 15431 - DNA, 21 bp, Artificial Sequence
  source: /note="Description of Artificial Sequence: Synthetic oligonucleotide"
gatattaatcctactactctg

SEQ ID NO: 15432 - DNA, 21 bp, Artificial Sequence
  source: /note="Description of Artificial Sequence: Synthetic oligonucleotide"
gatattccggtggcttctaag

SEQ ID NO: 15433 - DNA, 21 bp, Artificial Sequence
  source: /note="Description of Artificial Sequence: Synthetic oligonucleotide"
gatattcctgtgacttcggct

SEQ ID NO: 15434 - DNA, 21 bp, Artificial Sequence
  source: /note="Description of Artificial Sequence: Synthetic oligonucleotide"
gatattcggcatcgtcttagt

SEQ ID NO: 15435 - DNA, 21 bp, Artificial Sequence
  source: /note="Description of Artificial Sequence: Synthetic oligonucleotide"
gatattcggcggcctactccg

SEQ ID NO: 15436 - DNA, 21 bp, Artificial Sequence
  source: /note="Description of Artificial Sequence: Synthetic oligonucleotide"
gatattaggactgggtcggtg

SEQ ID NO: 15437 - DNA, 21 bp, Artificial Sequence
  source: /note="Description of Artificial Sequence: Synthetic oligonucleotide"
gatattagtctgcctgaggct

SEQ ID NO: 15438 - DNA, 21 bp, Artificial Sequence
  source: /note="Description of Artificial Sequence: Synthetic oligonucleotide"
gatatttctaatgatcagtat

SEQ ID NO: 15439 - DNA, 21 bp, Artificial Sequence
  source: /note="Description of Artificial Sequence: Synthetic oligonucleotide"
gatatttcgcggcctgtgcgt

SEQ ID NO: 15440 - DNA, 21 bp, Artificial Sequence
  source: /note="Description of Artificial Sequence: Synthetic oligonucleotide"
gatatttcgcgtcagaattct

SEQ ID NO: 15441 - DNA, 21 bp, Artificial Sequence
  source: /note="Description of Artificial Sequence: Synthetic oligonucleotide"
gatattactgctacgacggcg

SEQ ID NO: 15442 - DNA, 21 bp, Artificial Sequence
  source: /note="Description of Artificial Sequence: Synthetic oligonucleotide"
gatattactggtcgggtgccg

SEQ ID NO: 15443 - DNA, 21 bp, Artificial Sequence
  source: /note="Description of Artificial Sequence: Synthetic oligonucleotide"
gataaggcggttgggatgatt

SEQ ID NO: 15444 - DNA, 21 bp, Artificial Sequence
  source: /note="Description of Artificial Sequence: Synthetic oligonucleotide"
gataaggatgagctgatgatg

SEQ ID NO: 15445 - DNA, 21 bp, Artificial Sequence
  source: /note="Description of Artificial Sequence: Synthetic oligonucleotide"
gataaggaggtgcctccgatg

SEQ ID NO: 15446 - DNA, 21 bp, Artificial Sequence
  source: /note="Description of Artificial Sequence: Synthetic oligonucleotide"
gataaggagtatgcggggctt

SEQ ID NO: 15447 - DNA, 21 bp, Artificial Sequence
  source: /note="Description of Artificial Sequence: Synthetic oligonucleotide"
gataaggggaaggcgtctccg

SEQ ID NO: 15448 - DNA, 21 bp, Artificial Sequence
  source: /note="Description of Artificial Sequence: Synthetic oligonucleotide"
gataagggttcgttgactatg

SEQ ID NO: 15449 - DNA, 21 bp, Artificial Sequence
  source: /note="Description of Artificial Sequence: Synthetic oligonucleotide"
gataagattccgaatttttct

SEQ ID NO: 15450 - DNA, 21 bp, Artificial Sequence
  source: /note="Description of Artificial Sequence: Synthetic oligonucleotide"
gataagctgcatgggcaggct

SEQ ID NO: 15451 - DNA, 21 bp, Artificial Sequence
  source: /note="Description of Artificial Sequence: Synthetic oligonucleotide"
gataagcttccgggtgatagg

SEQ ID NO: 15452 - DNA, 21 bp, Artificial Sequence
  source: /note="Description of Artificial Sequence: Synthetic oligonucleotide"
gataagcttagggctaataat

SEQ ID NO: 15453 - DNA, 21 bp, Artificial Sequence
  source: /note="Description of Artificial Sequence: Synthetic oligonucleotide"
gataagctgacgcctaggctt

SEQ ID NO: 15454 - DNA, 21 bp, Artificial Sequence
  source: /note="Description of Artificial Sequence: Synthetic oligonucleotide"
gataagatgaatatgccgccg

SEQ ID NO: 15455 - DNA, 21 bp, Artificial Sequence
  source: /note="Description of Artificial Sequence: Synthetic oligonucleotide"
gataagcgtgatggtcgtttg

SEQ ID NO: 15456 - DNA, 21 bp, Artificial Sequence
  source: /note="Description of Artificial Sequence: Synthetic oligonucleotide"
gataagcggagtgggacgtgt

SEQ ID NO: 15457 - DNA, 21 bp, Artificial Sequence
  source: /note="Description of Artificial Sequence: Synthetic oligonucleotide"
gataagtcgattgcgactaat

SEQ ID NO: 15458 - DNA, 21 bp, Artificial Sequence
  source: /note="Description of Artificial Sequence: Synthetic oligonucleotide"
gataagtcgcctatgatgcgt

SEQ ID NO: 15459 - DNA, 21 bp, Artificial Sequence
  source: /note="Description of Artificial Sequence: Synthetic oligonucleotide"
gataagtctcgtttgtatgct

SEQ ID NO: 15460 - DNA, 21 bp, Artificial Sequence
  source: /note="Description of Artificial Sequence: Synthetic oligonucleotide"
gataagtcgcgtaatcagatg

SEQ ID NO: 15461 - DNA, 21 bp, Artificial Sequence
  source: /note="Description of Artificial Sequence: Synthetic oligonucleotide"
gataagactgcggtgatttcg

SEQ ID NO: 15462 - DNA, 21 bp, Artificial Sequence
  source: /note="Description of Artificial Sequence: Synthetic oligonucleotide"
gatcttgcgctgagtcgtggg

SEQ ID NO: 15463 - DNA, 21 bp, Artificial Sequence
  source: /note="Description of Artificial Sequence: Synthetic oligonucleotide"
gatttggcttctgttcctcgg

SEQ ID NO: 15464 - DNA, 21 bp, Artificial Sequence
  source: /note="Description of Artificial Sequence: Synthetic oligonucleotide"
gatctggatcctatttgtact

SEQ ID NO: 15465 - DNA, 21 bp, Artificial Sequence
  source: /note="Description of Artificial Sequence: Synthetic oligonucleotide"
gatcttgattcgcctcattct

SEQ ID NO: 15466 - DNA, 21 bp, Artificial Sequence
  source: /note="Description of Artificial Sequence: Synthetic oligonucleotide"
gatctggagcatcagtgtccg

SEQ ID NO: 15467 - DNA, 21 bp, Artificial Sequence
  source: /note="Description of Artificial Sequence: Synthetic oligonucleotide"
gatttgtttaagattgagcgt

SEQ ID NO: 15468 - DNA, 21 bp, Artificial Sequence
  source: /note="Description of Artificial Sequence: Synthetic oligonucleotide"
gatctggggggtttggttcat

SEQ ID NO: 15469 - DNA, 21 bp, Artificial Sequence
  source: /note="Description of Artificial Sequence: Synthetic oligonucleotide"
gatcttgggccggataagggg

SEQ ID NO: 15470 - DNA, 21 bp, Artificial Sequence
  source: /note="Description of Artificial Sequence: Synthetic oligonucleotide"
gatctgcatggggctatgcgg

SEQ ID NO: 15471 - DNA, 21 bp, Artificial Sequence
  source: /note="Description of Artificial Sequence: Synthetic oligonucleotide"
gatttgcatattcaggatccg

SEQ ID NO: 15472 - DNA, 21 bp, Artificial Sequence
  source: /note="Description of Artificial Sequence: Synthetic oligonucleotide"
gatcttattgagaatcgggag

SEQ ID NO: 15473 - DNA, 21 bp, Artificial Sequence
  source: /note="Description of Artificial Sequence: Synthetic oligonucleotide"
gatcttattgagcgtgggtct

SEQ ID NO: 15474 - DNA, 21 bp, Artificial Sequence
  source: /note="Description of Artificial Sequence: Synthetic oligonucleotide"
gatctgattcctagtcgtcct

SEQ ID NO: 15475 - DNA, 21 bp, Artificial Sequence
  source: /note="Description of Artificial Sequence: Synthetic oligonucleotide"
gatcttattgttcgtgggctg

SEQ ID NO: 15476 - DNA, 21 bp, Artificial Sequence
  source: /note="Description of Artificial Sequence: Synthetic oligonucleotide"
gatctgaagggtgggggtttt

SEQ ID NO: 15477 - DNA, 21 bp, Artificial Sequence
  source: /note="Description of Artificial Sequence: Synthetic oligonucleotide"
gatcttaagaagcctgatttt

SEQ ID NO: 15478 - DNA, 21 bp, Artificial Sequence
  source: /note="Description of Artificial Sequence: Synthetic oligonucleotide"
gatttgaagctgcatgggcct

SEQ ID NO: 15479 - DNA, 21 bp, Artificial Sequence
  source: /note="Description of Artificial Sequence: Synthetic oligonucleotide"
gatttgaagccttctttgctt

SEQ ID NO: 15480 - DNA, 21 bp, Artificial Sequence
  source: /note="Description of Artificial Sequence: Synthetic oligonucleotide"
gatttgaagtcgtcggagagg

SEQ ID NO: 15481 - DNA, 21 bp, Artificial Sequence
  source: /note="Description of Artificial Sequence: Synthetic oligonucleotide"
gatcttttggagaggccgtcg

SEQ ID NO: 15482 - DNA, 21 bp, Artificial Sequence
  source: /note="Description of Artificial Sequence: Synthetic oligonucleotide"
gatcttcttgagacgcggctt

SEQ ID NO: 15483 - DNA, 21 bp, Artificial Sequence
  source: /note="Description of Artificial Sequence: Synthetic oligonucleotide"
gatctgttgactgctttggct

SEQ ID NO: 15484 - DNA, 21 bp, Artificial Sequence
  source: /note="Description of Artificial Sequence: Synthetic oligonucleotide"
gatttgatgcatacggatgct

SEQ ID NO: 15485 - DNA, 21 bp, Artificial Sequence
  source: /note="Description of Artificial Sequence: Synthetic oligonucleotide"
gatctgatgcatgttagtggt

SEQ ID NO: 15486 - DNA, 21 bp, Artificial Sequence
  source: /note="Description of Artificial Sequence: Synthetic oligonucleotide"
gatttgatgattcatgggctg

SEQ ID NO: 15487 - DNA, 21 bp, Artificial Sequence
  source: /note="Description of Artificial Sequence: Synthetic oligonucleotide"
gatttgaataggggtcctcgt

SEQ ID NO: 15488 - DNA, 21 bp, Artificial Sequence
  source: /note="Description of Artificial Sequence: Synthetic oligonucleotide"
gatttgaataggattgagtgt

SEQ ID NO: 15489 - DNA, 21 bp, Artificial Sequence
  source: /note="Description of Artificial Sequence: Synthetic oligonucleotide"
gatcttaatactactcagcat

SEQ ID NO: 15490 - DNA, 21 bp, Artificial Sequence
  source: /note="Description of Artificial Sequence: Synthetic oligonucleotide"
gatttgcctgcggttagtcat

SEQ ID NO: 15491 - DNA, 21 bp, Artificial Sequence
  source: /note="Description of Artificial Sequence: Synthetic oligonucleotide"
gatcttccgctgggtaattct

SEQ ID NO: 15492 - DNA, 21 bp, Artificial Sequence
  source: /note="Description of Artificial Sequence: Synthetic oligonucleotide"
gatctgccgttgaggactact

SEQ ID NO: 15493 - DNA, 21 bp, Artificial Sequence
  source: /note="Description of Artificial Sequence: Synthetic oligonucleotide"
gatcttccgcttacttctttg

SEQ ID NO: 15494 - DNA, 21 bp, Artificial Sequence
  source: /note="Description of Artificial Sequence: Synthetic oligonucleotide"
gatcttcctcgtcagtcggtg

SEQ ID NO: 15495 - DNA, 21 bp, Artificial Sequence
  source: /note="Description of Artificial Sequence: Synthetic oligonucleotide"
gatcttccgtatagtcatcct

SEQ ID NO: 15496 - DNA, 21 bp, Artificial Sequence
  source: /note="Description of Artificial Sequence: Synthetic oligonucleotide"
gatttgcagacggggcctcag

SEQ ID NO: 15497 - DNA, 21 bp, Artificial Sequence
  source: /note="Description of Artificial Sequence: Synthetic oligonucleotide"
gatttgcgttgtgctgagggg

SEQ ID NO: 15498 - DNA, 21 bp, Artificial Sequence
  source: /note="Description of Artificial Sequence: Synthetic oligonucleotide"
gatcttcgtgaggctccgcgt

SEQ ID NO: 15499 - DNA, 21 bp, Artificial Sequence
  source: /note="Description of Artificial Sequence: Synthetic oligonucleotide"
gatttgcgtcatgcttctagt

SEQ ID NO: 15500 - DNA, 21 bp, Artificial Sequence
  source: /note="Description of Artificial Sequence: Synthetic oligonucleotide"
gatttgaggcatccgcctagt

SEQ ID NO: 15501 - DNA, 21 bp, Artificial Sequence
  source: /note="Description of Artificial Sequence: Synthetic oligonucleotide"
gatcttaggccggggggtctg

SEQ ID NO: 15502 - DNA, 21 bp, Artificial Sequence
  source: /note="Description of Artificial Sequence: Synthetic oligonucleotide"
gatttgaggcgtagtatgttg

SEQ ID NO: 15503 - DNA, 21 bp, Artificial Sequence
  source: /note="Description of Artificial Sequence: Synthetic oligonucleotide"
gatctgcgtcgtacgcctttt

SEQ ID NO: 15504 - DNA, 21 bp, Artificial Sequence
  source: /note="Description of Artificial Sequence: Synthetic oligonucleotide"
gatttgagtgcgttgcgtggg

SEQ ID NO: 15505 - DNA, 21 bp, Artificial Sequence
  source: /note="Description of Artificial Sequence: Synthetic oligonucleotide"
gatctttcggggttgacgcgg

SEQ ID NO: 15506 - DNA, 21 bp, Artificial Sequence
  source: /note="Description of Artificial Sequence: Synthetic oligonucleotide"
gatttgactcatgttgggagt

SEQ ID NO: 15507 - DNA, 21 bp, Artificial Sequence
  source: /note="Description of Artificial Sequence: Synthetic oligonucleotide"
gatctgactcggtggccttcg

SEQ ID NO: 15508 - DNA, 21 bp, Artificial Sequence
  source: /note="Description of Artificial Sequence: Synthetic oligonucleotide"
gatttgactacggctcctact

SEQ ID NO: 15509 - DNA, 21 bp, Artificial Sequence
  source: /note="Description of Artificial Sequence: Synthetic oligonucleotide"
gatttgacggtgtcttatgct

SEQ ID NO: 15510 - DNA, 21 bp, Artificial Sequence
  source: /note="Description of Artificial Sequence: Synthetic oligonucleotide"
gatcttgtggagacggctagt

SEQ ID NO: 15511 - DNA, 21 bp, Artificial Sequence
  source: /note="Description of Artificial Sequence: Synthetic oligonucleotide"
gatttggttattccgactcgg

SEQ ID NO: 15512 - DNA, 21 bp, Artificial Sequence
  source: /note="Description of Artificial Sequence: Synthetic oligonucleotide"
gatatggatatgcagatggct

SEQ ID NO: 15513 - DNA, 21 bp, Artificial Sequence
  source: /note="Description of Artificial Sequence: Synthetic oligonucleotide"
gatatgggggctcgtcagtat

SEQ ID NO: 15514 - DNA, 21 bp, Artificial Sequence
  source: /note="Description of Artificial Sequence: Synthetic oligonucleotide"
gatatgaagcctgcggtgtcg

SEQ ID NO: 15515 - DNA, 21 bp, Artificial Sequence
  source: /note="Description of Artificial Sequence: Synthetic oligonucleotide"
gatatgttgaagaagtttaat

SEQ ID NO: 15516 - DNA, 21 bp, Artificial Sequence
  source: /note="Description of Artificial Sequence: Synthetic oligonucleotide"
gatatgccttttgggccgttg

SEQ ID NO: 15517 - DNA, 21 bp, Artificial Sequence
  source: /note="Description of Artificial Sequence: Synthetic oligonucleotide"
gatatgtcggcgcggccttct

SEQ ID NO: 15518 - DNA, 21 bp, Artificial Sequence
  source: /note="Description of Artificial Sequence: Synthetic oligonucleotide"
gatatgtcgacgcgtggtatg

SEQ ID NO: 15519 - DNA, 21 bp, Artificial Sequence
  source: /note="Description of Artificial Sequence: Synthetic oligonucleotide"
gatatgactacgggtgctgtg

SEQ ID NO: 15520 - DNA, 21 bp, Artificial Sequence
  source: /note="Description of Artificial Sequence: Synthetic oligonucleotide"
gatatggtggtgcctagtgat

SEQ ID NO: 15521 - DNA, 21 bp, Artificial Sequence
  source: /note="Description of Artificial Sequence: Synthetic oligonucleotide"
gatatgtatccgactaatagg

SEQ ID NO: 15522 - DNA, 21 bp, Artificial Sequence
  source: /note="Description of Artificial Sequence: Synthetic oligonucleotide"
gataatgcgagtaagcttatg

SEQ ID NO: 15523 - DNA, 21 bp, Artificial Sequence
  source: /note="Description of Artificial Sequence: Synthetic oligonucleotide"
gataatgagcttctgatgtcg

SEQ ID NO: 15524 - DNA, 21 bp, Artificial Sequence
  source: /note="Description of Artificial Sequence: Synthetic oligonucleotide"
gataatgagtcgattccgacg

SEQ ID NO: 15525 - DNA, 21 bp, Artificial Sequence
  source: /note="Description of Artificial Sequence: Synthetic oligonucleotide"
gataatggttctgctgataat

SEQ ID NO: 15526 - DNA, 21 bp, Artificial Sequence
  source: /note="Description of Artificial Sequence: Synthetic oligonucleotide"
gataatctggatgggctgtgt

SEQ ID NO: 15527 - DNA, 21 bp, Artificial Sequence
  source: /note="Description of Artificial Sequence: Synthetic oligonucleotide"
gataatttgctggggtcgcgt

SEQ ID NO: 15528 - DNA, 21 bp, Artificial Sequence
  source: /note="Description of Artificial Sequence: Synthetic oligonucleotide"
gataatctgccgactttggct

SEQ ID NO: 15529 - DNA, 21 bp, Artificial Sequence
  source: /note="Description of Artificial Sequence: Synthetic oligonucleotide"
gataatctgaggccgcggcct

SEQ ID NO: 15530 - DNA, 21 bp, Artificial Sequence
  source: /note="Description of Artificial Sequence: Synthetic oligonucleotide"
gataatttgtctcataggatg

SEQ ID NO: 15531 - DNA, 21 bp, Artificial Sequence
  source: /note="Description of Artificial Sequence: Synthetic oligonucleotide"
gataatcctgcgatggatcgg

SEQ ID NO: 15532 - DNA, 21 bp, Artificial Sequence
  source: /note="Description of Artificial Sequence: Synthetic oligonucleotide"
gataatccgcctactggggtg

SEQ ID NO: 15533 - DNA, 21 bp, Artificial Sequence
  source: /note="Description of Artificial Sequence: Synthetic oligonucleotide"
gataatcaggctgctgttcct

SEQ ID NO: 15534 - DNA, 21 bp, Artificial Sequence
  source: /note="Description of Artificial Sequence: Synthetic oligonucleotide"
gataatcggttgaatgtggtg

SEQ ID NO: 15535 - DNA, 21 bp, Artificial Sequence
  source: /note="Description of Artificial Sequence: Synthetic oligonucleotide"
gataataggccgcgtttgatg

SEQ ID NO: 15536 - DNA, 21 bp, Artificial Sequence
  source: /note="Description of Artificial Sequence: Synthetic oligonucleotide"
gataatagggtttcgattccg

SEQ ID NO: 15537 - DNA, 21 bp, Artificial Sequence
  source: /note="Description of Artificial Sequence: Synthetic oligonucleotide"
gataattcggcttttgcggtg

SEQ ID NO: 15538 - DNA, 21 bp, Artificial Sequence
  source: /note="Description of Artificial Sequence: Synthetic oligonucleotide"
gataatacgaattgggctaag

SEQ ID NO: 15539 - DNA, 21 bp, Artificial Sequence
  source: /note="Description of Artificial Sequence: Synthetic oligonucleotide"
gataatacgactaggactgcg

SEQ ID NO: 15540 - DNA, 21 bp, Artificial Sequence
  source: /note="Description of Artificial Sequence: Synthetic oligonucleotide"
gataatgtggggattaagtcg

SEQ ID NO: 15541 - DNA, 21 bp, Artificial Sequence
  source: /note="Description of Artificial Sequence: Synthetic oligonucleotide"
gataattatgatccgcgtccg

SEQ ID NO: 15542 - DNA, 21 bp, Artificial Sequence
  source: /note="Description of Artificial Sequence: Synthetic oligonucleotide"
gatccggctgctacgttgcct

SEQ ID NO: 15543 - DNA, 21 bp, Artificial Sequence
  source: /note="Description of Artificial Sequence: Synthetic oligonucleotide"
gatcctgcgctgcagcgggcg

SEQ ID NO: 15544 - DNA, 21 bp, Artificial Sequence
  source: /note="Description of Artificial Sequence: Synthetic oligonucleotide"
gatccggcgccgacgttgcct

SEQ ID NO: 15545 - DNA, 21 bp, Artificial Sequence
  source: /note="Description of Artificial Sequence: Synthetic oligonucleotide"
gatccttgtcataggtcgctg

SEQ ID NO: 15546 - DNA, 21 bp, Artificial Sequence
  source: /note="Description of Artificial Sequence: Synthetic oligonucleotide"
gatcctgatcctgcgtcgaat

SEQ ID NO: 15547 - DNA, 21 bp, Artificial Sequence
  source: /note="Description of Artificial Sequence: Synthetic oligonucleotide"
gatccggatccgtcgcttagt

SEQ ID NO: 15548 - DNA, 21 bp, Artificial Sequence
  source: /note="Description of Artificial Sequence: Synthetic oligonucleotide"
gatcctgaggttgatccggat

SEQ ID NO: 15549 - DNA, 21 bp, Artificial Sequence
  source: /note="Description of Artificial Sequence: Synthetic oligonucleotide"
gatccgtttactcataatggg

SEQ ID NO: 15550 - DNA, 21 bp, Artificial Sequence
  source: /note="Description of Artificial Sequence: Synthetic oligonucleotide"
gatcctggtcatcagcggacg

SEQ ID NO: 15551 - DNA, 21 bp, Artificial Sequence
  source: /note="Description of Artificial Sequence: Synthetic oligonucleotide"
gatccgggtctgcgtactgat

SEQ ID NO: 15552 - DNA, 21 bp, Artificial Sequence
  source: /note="Description of Artificial Sequence: Synthetic oligonucleotide"
gatcctgggatggtgcctggg

SEQ ID NO: 15553 - DNA, 21 bp, Artificial Sequence
  source: /note="Description of Artificial Sequence: Synthetic oligonucleotide"
gatccgcatgggaagtatcct

SEQ ID NO: 15554 - DNA, 21 bp, Artificial Sequence
  source: /note="Description of Artificial Sequence: Synthetic oligonucleotide"
gatccgcatctgtcgtcgccg

SEQ ID NO: 15555 - DNA, 21 bp, Artificial Sequence
  source: /note="Description of Artificial Sequence: Synthetic oligonucleotide"
gatcctattgcggctccgacg

SEQ ID NO: 15556 - DNA, 21 bp, Artificial Sequence
  source: /note="Description of Artificial Sequence: Synthetic oligonucleotide"
gatcctttggcgcctatggct

SEQ ID NO: 15557 - DNA, 21 bp, Artificial Sequence
  source: /note="Description of Artificial Sequence: Synthetic oligonucleotide"
gatccgctttattcgagtcgt

SEQ ID NO: 15558 - DNA, 21 bp, Artificial Sequence
  source: /note="Description of Artificial Sequence: Synthetic oligonucleotide"
gatcctatggcgcgggtgggg

SEQ ID NO: 15559 - DNA, 21 bp, Artificial Sequence
  source: /note="Description of Artificial Sequence: Synthetic oligonucleotide"
gatcctaatcttaatcttgct

SEQ ID NO: 15560 - DNA, 21 bp, Artificial Sequence
  source: /note="Description of Artificial Sequence: Synthetic oligonucleotide"
gatcctcctcttatggctaat

SEQ ID NO: 15561 - DNA, 21 bp, Artificial Sequence
  source: /note="Description of Artificial Sequence: Synthetic oligonucleotide"
gatcctccttatgctgtgagt

SEQ ID NO: 15562 - DNA, 21 bp, Artificial Sequence
  source: /note="Description of Artificial Sequence: Synthetic oligonucleotide"
gatccgccgtatgatcagagg

SEQ ID NO: 15563 - DNA, 21 bp, Artificial Sequence
  source: /note="Description of Artificial Sequence: Synthetic oligonucleotide"
gatcctcaggagaatcatgct

SEQ ID NO: 15564 - DNA, 21 bp, Artificial Sequence
  source: /note="Description of Artificial Sequence: Synthetic oligonucleotide"
gatcctcagaggttggtgatt

SEQ ID NO: 15565 - DNA, 21 bp, Artificial Sequence
  source: /note="Description of Artificial Sequence: Synthetic oligonucleotide"
gatcctcgttttacgctgccg

SEQ ID NO: 15566 - DNA, 21 bp, Artificial Sequence
  source: /note="Description of Artificial Sequence: Synthetic oligonucleotide"
gatcctcgtaagtcttcggct

SEQ ID NO: 15567 - DNA, 21 bp, Artificial Sequence
  source: /note="Description of Artificial Sequence: Synthetic oligonucleotide"
gatccgaggcttccgtcttat

SEQ ID NO: 15568 - DNA, 21 bp, Artificial Sequence
  source: /note="Description of Artificial Sequence: Synthetic oligonucleotide"
gatccgcggccgctggcgtct

SEQ ID NO: 15569 - DNA, 21 bp, Artificial Sequence
  source: /note="Description of Artificial Sequence: Synthetic oligonucleotide"
gatcctaggtcggctgtgcag

SEQ ID NO: 15570 - DNA, 21 bp, Artificial Sequence
  source: /note="Description of Artificial Sequence: Synthetic oligonucleotide"
gatcctaggtctagtttgact

SEQ ID NO: 15571 - DNA, 21 bp, Artificial Sequence
  source: /note="Description of Artificial Sequence: Synthetic oligonucleotide"
gatccgcgtacggagatggtg

SEQ ID NO: 15572 - DNA, 21 bp, Artificial Sequence
  source: /note="Description of Artificial Sequence: Synthetic oligonucleotide"
gatccttctgatgattatgtg

SEQ ID NO: 15573 - DNA, 21 bp, Artificial Sequence
  source: /note="Description of Artificial Sequence: Synthetic oligonucleotide"
gatccgtcgaggaggcctagt

SEQ ID NO: 15574 - DNA, 21 bp, Artificial Sequence
  source: /note="Description of Artificial Sequence: Synthetic oligonucleotide"
gatccttcgagtcttcggttg

SEQ ID NO: 15575 - DNA, 21 bp, Artificial Sequence
  source: /note="Description of Artificial Sequence: Synthetic oligonucleotide"
gatccttcttatgatcagcat

SEQ ID NO: 15576 - DNA, 21 bp, Artificial Sequence
  source: /note="Description of Artificial Sequence: Synthetic oligonucleotide"
gatcctacgttttcgtcggag

SEQ ID NO: 15577 - DNA, 21 bp, Artificial Sequence
  source: /note="Description of Artificial Sequence: Synthetic oligonucleotide"
gatccgacgcataggattgtt

SEQ ID NO: 15578 - DNA, 21 bp, Artificial Sequence
  source: /note="Description of Artificial Sequence: Synthetic oligonucleotide"
gatccgactttgcatcgtcct

SEQ ID NO: 15579 - DNA, 21 bp, Artificial Sequence
  source: /note="Description of Artificial Sequence: Synthetic oligonucleotide"
gatcctacttatcgtggtggg

SEQ ID NO: 15580 - DNA, 21 bp, Artificial Sequence
  source: /note="Description of Artificial Sequence: Synthetic oligonucleotide"
gatcctgtgggtcggagtttg

SEQ ID NO: 15581 - DNA, 21 bp, Artificial Sequence
  source: /note="Description of Artificial Sequence: Synthetic oligonucleotide"
gatcctgtgattcgtgctgct

SEQ ID NO: 15582 - DNA, 21 bp, Artificial Sequence
  source: /note="Description of Artificial Sequence: Synthetic oligonucleotide"
gatccggttatgccgcgtcgt

SEQ ID NO: 15583 - DNA, 21 bp, Artificial Sequence
  source: /note="Description of Artificial Sequence: Synthetic oligonucleotide"
gatccggtttcgtcgagggcg

SEQ ID NO: 15584 - DNA, 21 bp, Artificial Sequence
  source: /note="Description of Artificial Sequence: Synthetic oligonucleotide"
gatcaggcgatgagtcggaat

SEQ ID NO: 15585 - DNA, 21 bp, Artificial Sequence
  source: /note="Description of Artificial Sequence: Synthetic oligonucleotide"
gatcaggataagtctgcgagt

SEQ ID NO: 15586 - DNA, 21 bp, Artificial Sequence
  source: /note="Description of Artificial Sequence: Synthetic oligonucleotide"
gatcaggatcaggggcgtgcg

SEQ ID NO: 15587 - DNA, 21 bp, Artificial Sequence
  source: /note="Description of Artificial Sequence: Synthetic oligonucleotide"
gatcagtttcatcctaggcct

SEQ ID NO: 15588 - DNA, 21 bp, Artificial Sequence
  source: /note="Description of Artificial Sequence: Synthetic oligonucleotide"
gatcagctgaatccgcgtggt

SEQ ID NO: 15589 - DNA, 21 bp, Artificial Sequence
  source: /note="Description of Artificial Sequence: Synthetic oligonucleotide"
gatcagttgcgttcggctacg

SEQ ID NO: 15590 - DNA, 21 bp, Artificial Sequence
  source: /note="Description of Artificial Sequence: Synthetic oligonucleotide"
gatcagcctgcttataatgcg

SEQ ID NO: 15591 - DNA, 21 bp, Artificial Sequence
  source: /note="Description of Artificial Sequence: Synthetic oligonucleotide"
gatcagcagtttgagatgggt

SEQ ID NO: 15592 - DNA, 21 bp, Artificial Sequence
  source: /note="Description of Artificial Sequence: Synthetic oligonucleotide"
gatcagcagagttttacgcgt

SEQ ID NO: 15593 - DNA, 21 bp, Artificial Sequence
  source: /note="Description of Artificial Sequence: Synthetic oligonucleotide"
gatcagcgtgcgtcgtcgcct

SEQ ID NO: 15594 - DNA, 21 bp, Artificial Sequence
  source: /note="Description of Artificial Sequence: Synthetic oligonucleotide"
gatcagaggttgcagatgatt

SEQ ID NO: 15595 - DNA, 21 bp, Artificial Sequence
  source: /note="Description of Artificial Sequence: Synthetic oligonucleotide"
gatcagtctgggactgtgtct

SEQ ID NO: 15596 - DNA, 21 bp, Artificial Sequence
  source: /note="Description of Artificial Sequence: Synthetic oligonucleotide"
gatcagtctccgggtatgaag

SEQ ID NO: 15597 - DNA, 21 bp, Artificial Sequence
  source: /note="Description of Artificial Sequence: Synthetic oligonucleotide"
gatcgggctttgtctatgggg

SEQ ID NO: 15598 - DNA, 21 bp, Artificial Sequence
  source: /note="Description of Artificial Sequence: Synthetic oligonucleotide"
gatcgtgatacttcgtctttt

SEQ ID NO: 15599 - DNA, 21 bp, Artificial Sequence
  source: /note="Description of Artificial Sequence: Synthetic oligonucleotide"
gatcgggagcgtccttatagt

SEQ ID NO: 15600 - DNA, 21 bp, Artificial Sequence
  source: /note="Description of Artificial Sequence: Synthetic oligonucleotide"
gatcgttttaattcttatgcg

SEQ ID NO: 15601 - DNA, 21 bp, Artificial Sequence
  source: /note="Description of Artificial Sequence: Synthetic oligonucleotide"
gatcgggggtgtaaggatacg

SEQ ID NO: 15602 - DNA, 21 bp, Artificial Sequence
  source: /note="Description of Artificial Sequence: Synthetic oligonucleotide"
gataggggtgggtttaatgat

SEQ ID NO: 15603 - DNA, 21 bp, Artificial Sequence
  source: /note="Description of Artificial Sequence: Synthetic oligonucleotide"
gataggggtctgaggacggct

SEQ ID NO: 15604 - DNA, 21 bp, Artificial Sequence
  source: /note="Description of Artificial Sequence: Synthetic oligonucleotide"
gataggggtaatggtcctcgg

SEQ ID NO: 15605 - DNA, 21 bp, Artificial Sequence
  source: /note="Description of Artificial Sequence: Synthetic oligonucleotide"
gatcggggtagtgatttgtcg

SEQ ID NO: 15606 - DNA, 21 bp, Artificial Sequence
  source: /note="Description of Artificial Sequence: Synthetic oligonucleotide"
gatcggggttcgctggctcgg

SEQ ID NO: 15607 - DNA, 21 bp, Artificial Sequence
  source: /note="Description of Artificial Sequence: Synthetic oligonucleotide"
gatcggattgagactcagccg

SEQ ID NO: 15608 - DNA, 21 bp, Artificial Sequence
  source: /note="Description of Artificial Sequence: Synthetic oligonucleotide"
gataggattatgcaggagcat

SEQ ID NO: 15609 - DNA, 21 bp, Artificial Sequence
  source: /note="Description of Artificial Sequence: Synthetic oligonucleotide"
gatcgtattcagactgcgcct

SEQ ID NO: 15610 - DNA, 21 bp, Artificial Sequence
  source: /note="Description of Artificial Sequence: Synthetic oligonucleotide"
gatcggaagaagctgaatgag

SEQ ID NO: 15611 - DNA, 21 bp, Artificial Sequence
  source: /note="Description of Artificial Sequence: Synthetic oligonucleotide"
gatcgtaagctggtgacgcct

SEQ ID NO: 15612 - DNA, 21 bp, Artificial Sequence
  source: /note="Description of Artificial Sequence: Synthetic oligonucleotide"
gataggcttgcgacgatgtct

SEQ ID NO: 15613 - DNA, 21 bp, Artificial Sequence
  source: /note="Description of Artificial Sequence: Synthetic oligonucleotide"
gatcggttgaatcagcggggt

SEQ ID NO: 15614 - DNA, 21 bp, Artificial Sequence
  source: /note="Description of Artificial Sequence: Synthetic oligonucleotide"
gatcggatgactaatgctgtt

SEQ ID NO: 15615 - DNA, 21 bp, Artificial Sequence
  source: /note="Description of Artificial Sequence: Synthetic oligonucleotide"
gatcgtaatttggttacgcgg

SEQ ID NO: 15616 - DNA, 21 bp, Artificial Sequence
  source: /note="Description of Artificial Sequence: Synthetic oligonucleotide"
gatcggaatgtgaagcatgtt

SEQ ID NO: 15617 - DNA, 21 bp, Artificial Sequence
  source: /note="Description of Artificial Sequence: Synthetic oligonucleotide"
gatcgtccgtttgaggcgccg

SEQ ID NO: 15618 - DNA, 21 bp, Artificial Sequence
  source: /note="Description of Artificial Sequence: Synthetic oligonucleotide"
gatcggccgggggggaagcct

SEQ ID NO: 15619 - DNA, 21 bp, Artificial Sequence
  source: /note="Description of Artificial Sequence: Synthetic oligonucleotide"
gatcgtccgttgcatgttgtg

SEQ ID NO: 15620 - DNA, 21 bp, Artificial Sequence
  source: /note="Description of Artificial Sequence: Synthetic oligonucleotide"
gataggcctccttgtagtcgt

SEQ ID NO: 15621 - DNA, 21 bp, Artificial Sequence
  source: /note="Description of Artificial Sequence: Synthetic oligonucleotide"
gatcggccgtcttcgcctctg

SEQ ID NO: 15622 - DNA, 21 bp, Artificial Sequence
  source: /note="Description of Artificial Sequence: Synthetic oligonucleotide"
gatcggcagcggccgttgtcg

SEQ ID NO: 15623 - DNA, 21 bp, Artificial Sequence
  source: /note="Description of Artificial Sequence: Synthetic oligonucleotide"
gataggcagactctgactcgt

SEQ ID NO: 15624 - DNA, 21 bp, Artificial Sequence
  source: /note="Description of Artificial Sequence: Synthetic oligonucleotide"
gataggaggatgggtgtggct

SEQ ID NO: 15625 - DNA, 21 bp, Artificial Sequence
  source: /note="Description of Artificial Sequence: Synthetic oligonucleotide"
gataggcgtcctgctcatgat

SEQ ID NO: 15626 - DNA, 21 bp, Artificial Sequence
  source: /note="Description of Artificial Sequence: Synthetic oligonucleotide"
gataggcgttctgaggagcgg

SEQ ID NO: 15627 - DNA, 21 bp, Artificial Sequence
  source: /note="Description of Artificial Sequence: Synthetic oligonucleotide"
gatcggtctgctgctattatt

SEQ ID NO: 15628 - DNA, 21 bp, Artificial Sequence
  source: /note="Description of Artificial Sequence: Synthetic oligonucleotide"
gatcgttcgggtcctaatgag

SEQ ID NO: 15629 - DNA, 21 bp, Artificial Sequence
  source: /note="Description of Artificial Sequence: Synthetic oligonucleotide"
gatcgttctattgctctgcgg

SEQ ID NO: 15630 - DNA, 21 bp, Artificial Sequence
  source: /note="Description of Artificial Sequence: Synthetic oligonucleotide"
gatcggtctctggcgtttgcg

SEQ ID NO: 15631 - DNA, 21 bp, Artificial Sequence
  source: /note="Description of Artificial Sequence: Synthetic oligonucleotide"
gatcgtagtcttcgtagtctt

SEQ ID NO: 15632 - DNA, 21 bp, Artificial Sequence
  source: /note="Description of Artificial Sequence: Synthetic oligonucleotide"
gatcgttctaatgcgggtcat

SEQ ID NO: 15633 - DNA, 21 bp, Artificial Sequence
  source: /note="Description of Artificial Sequence: Synthetic oligonucleotide"
gatcggtctcagctgactgct

SEQ ID NO: 15634 - DNA, 21 bp, Artificial Sequence
  source: /note="Description of Artificial Sequence: Synthetic oligonucleotide"
gataggtcgcaggttcttcat

SEQ ID NO: 15635 - DNA, 21 bp, Artificial Sequence
  source: /note="Description of Artificial Sequence: Synthetic oligonucleotide"
gataggtcggttgttcttaat

SEQ ID NO: 15636 - DNA, 21 bp, Artificial Sequence
  source: /note="Description of Artificial Sequence: Synthetic oligonucleotide"
gataggactgcgcgggcgcct

SEQ ID NO: 15637 - DNA, 21 bp, Artificial Sequence
  source: /note="Description of Artificial Sequence: Synthetic oligonucleotide"
gataggactaagtcgtcgacg

SEQ ID NO: 15638 - DNA, 21 bp, Artificial Sequence
  source: /note="Description of Artificial Sequence: Synthetic oligonucleotide"
gatcgtactacggttcctcct

SEQ ID NO: 15639 - DNA, 21 bp, Artificial Sequence
  source: /note="Description of Artificial Sequence: Synthetic oligonucleotide"
gatcgtacggtttcgctgctg

SEQ ID NO: 15640 - DNA, 21 bp, Artificial Sequence
  source: /note="Description of Artificial Sequence: Synthetic oligonucleotide"
gatagggtgcattcgtcgagt

SEQ ID NO: 15641 - DNA, 21 bp, Artificial Sequence
  source: /note="Description of Artificial Sequence: Synthetic oligonucleotide"
gatagggtgagtacgagtaag

SEQ ID NO: 15642 - DNA, 21 bp, Artificial Sequence
  source: /note="Description of Artificial Sequence: Synthetic oligonucleotide"
gatcgggtgactccggagcct

SEQ ID NO: 15643 - DNA, 21 bp, Artificial Sequence
  source: /note="Description of Artificial Sequence: Synthetic oligonucleotide"
gatcggtggacgtctagttcg

SEQ ID NO: 15644 - DNA, 21 bp, Artificial Sequence
  source: /note="Description of Artificial Sequence: Synthetic oligonucleotide"
gattctgcgccggtggcgcat

SEQ ID NO: 15645 - DNA, 21 bp, Artificial Sequence
  source: /note="Description of Artificial Sequence: Synthetic oligonucleotide"
gatagtgctaggtcggcgatt

SEQ ID NO: 15646 - DNA, 21 bp, Artificial Sequence
  source: /note="Description of Artificial Sequence: Synthetic oligonucleotide"
gatagtgatatgatgggtgag

SEQ ID NO: 15647 - DNA, 21 bp, Artificial Sequence
  source: /note="Description of Artificial Sequence: Synthetic oligonucleotide"
gattcggatagggatagtaag

SEQ ID NO: 15648 - DNA, 21 bp, Artificial Sequence
  source: /note="Description of Artificial Sequence: Synthetic oligonucleotide"
gattctgatcggctttctgcg

SEQ ID NO: 15649 - DNA, 21 bp, Artificial Sequence
  source: /note="Description of Artificial Sequence: Synthetic oligonucleotide"
gattcggagaagacgattcct

SEQ ID NO: 15650 - DNA, 21 bp, Artificial Sequence
  source: /note="Description of Artificial Sequence: Synthetic oligonucleotide"
gattcggaggtgcctatgtat

SEQ ID NO: 15651 - DNA, 21 bp, Artificial Sequence
  source: /note="Description of Artificial Sequence: Synthetic oligonucleotide"
gattctgaggtgagtcatccg

SEQ ID NO: 15652 - DNA, 21 bp, Artificial Sequence
  source: /note="Description of Artificial Sequence: Synthetic oligonucleotide"
gattcgtttggtaggccgcag

SEQ ID NO: 15653 - DNA, 21 bp, Artificial Sequence
  source: /note="Description of Artificial Sequence: Synthetic oligonucleotide"
gattctggtgctagtctgggt

SEQ ID NO: 15654 - DNA, 21 bp, Artificial Sequence
  source: /note="Description of Artificial Sequence: Synthetic oligonucleotide"
gatagtggtgatcctgcgcgt

SEQ ID NO: 15655 - DNA, 21 bp, Artificial Sequence
  source: /note="Description of Artificial Sequence: Synthetic oligonucleotide"
gattctgggattggttatcct

SEQ ID NO: 15656 - DNA, 21 bp, Artificial Sequence
  source: /note="Description of Artificial Sequence: Synthetic oligonucleotide"
gattctggttcgaatggtctt

SEQ ID NO: 15657 - DNA, 21 bp, Artificial Sequence
  source: /note="Description of Artificial Sequence: Synthetic oligonucleotide"
gattctcattatagggttccg

SEQ ID NO: 15658 - DNA, 21 bp, Artificial Sequence
  source: /note="Description of Artificial Sequence: Synthetic oligonucleotide"
gattcgattgatccgaagttt

SEQ ID NO: 15659 - DNA, 21 bp, Artificial Sequence
  source: /note="Description of Artificial Sequence: Synthetic oligonucleotide"
gattcgattgggccggggact

SEQ ID NO: 15660 - DNA, 21 bp, Artificial Sequence
  source: /note="Description of Artificial Sequence: Synthetic oligonucleotide"
gattcgattcatattatggct

SEQ ID NO: 15661 - DNA, 21 bp, Artificial Sequence
  source: /note="Description of Artificial Sequence: Synthetic oligonucleotide"
gatagtatttcgagtcgggcg

SEQ ID NO: 15662 - DNA, 21 bp, Artificial Sequence
  source: /note="Description of Artificial Sequence: Synthetic oligonucleotide"
gattcgattacgagggcttct

SEQ ID NO: 15663 - DNA, 21 bp, Artificial Sequence
  source: /note="Description of Artificial Sequence: Synthetic oligonucleotide"
gattctattacgactcgtatt

SEQ ID NO: 15664 - DNA, 21 bp, Artificial Sequence
  source: /note="Description of Artificial Sequence: Synthetic oligonucleotide"
gattcgaagcggacgattacg

SEQ ID NO: 15665 - DNA, 21 bp, Artificial Sequence
  source: /note="Description of Artificial Sequence: Synthetic oligonucleotide"
gattcgttggcgtcgaggccg

SEQ ID NO: 15666 - DNA, 21 bp, Artificial Sequence
  source: /note="Description of Artificial Sequence: Synthetic oligonucleotide"
gattcgttggggaagaggtcg

SEQ ID NO: 15667 - DNA, 21 bp, Artificial Sequence
  source: /note="Description of Artificial Sequence: Synthetic oligonucleotide"
gattcgctgaagctgtcttcg

SEQ ID NO: 15668 - DNA, 21 bp, Artificial Sequence
  source: /note="Description of Artificial Sequence: Synthetic oligonucleotide"
gatagtatggagctttattct

SEQ ID NO: 15669 - DNA, 21 bp, Artificial Sequence
  source: /note="Description of Artificial Sequence: Synthetic oligonucleotide"
gattctatgggtgcttcgggt

SEQ ID NO: 15670 - DNA, 21 bp, Artificial Sequence
  source: /note="Description of Artificial Sequence: Synthetic oligonucleotide"
gattcgaatattccgccgcgt

SEQ ID NO: 15671 - DNA, 21 bp, Artificial Sequence
  source: /note="Description of Artificial Sequence: Synthetic oligonucleotide"
gattctaataatgagaagtct

SEQ ID NO: 15672 - DNA, 21 bp, Artificial Sequence
  source: /note="Description of Artificial Sequence: Synthetic oligonucleotide"
gattctaatccgtctttgtcg

SEQ ID NO: 15673 - DNA, 21 bp, Artificial Sequence
  source: /note="Description of Artificial Sequence: Synthetic oligonucleotide"
gatagtaatcggttggtggat

SEQ ID NO: 15674 - DNA, 21 bp, Artificial Sequence
  source: /note="Description of Artificial Sequence: Synthetic oligonucleotide"
gattcgccgaagtattctcat

SEQ ID NO: 15675 - DNA, 21 bp, Artificial Sequence
  source: /note="Description of Artificial Sequence: Synthetic oligonucleotide"
gattctcctagttttgtgttg

SEQ ID NO: 15676 - DNA, 21 bp, Artificial Sequence
  source: /note="Description of Artificial Sequence: Synthetic oligonucleotide"
gattctcagatttatgtgtcg

SEQ ID NO: 15677 - DNA, 21 bp, Artificial Sequence
  source: /note="Description of Artificial Sequence: Synthetic oligonucleotide"
gattcgcagctgaatgcgcct

SEQ ID NO: 15678 - DNA, 21 bp, Artificial Sequence
  source: /note="Description of Artificial Sequence: Synthetic oligonucleotide"
gattctcagatgcgtactatg

SEQ ID NO: 15679 - DNA, 21 bp, Artificial Sequence
  source: /note="Description of Artificial Sequence: Synthetic oligonucleotide"
gattctaggattgcggcgttg

SEQ ID NO: 15680 - DNA, 21 bp, Artificial Sequence
  source: /note="Description of Artificial Sequence: Synthetic oligonucleotide"
gatagtcgtttgctgtctggt

SEQ ID NO: 15681 - DNA, 21 bp, Artificial Sequence
  source: /note="Description of Artificial Sequence: Synthetic oligonucleotide"
gatagtcgtatggctgctagt

SEQ ID NO: 15682 - DNA, 21 bp, Artificial Sequence
  source: /note="Description of Artificial Sequence: Synthetic oligonucleotide"
gattctcggaatgctgtgacg

SEQ ID NO: 15683 - DNA, 21 bp, Artificial Sequence
  source: /note="Description of Artificial Sequence: Synthetic oligonucleotide"
gattcgcgtcctttgagtgtt

SEQ ID NO: 15684 - DNA, 21 bp, Artificial Sequence
  source: /note="Description of Artificial Sequence: Synthetic oligonucleotide"
gattctcgtcaggggcgggtg

SEQ ID NO: 15685 - DNA, 21 bp, Artificial Sequence
  source: /note="Description of Artificial Sequence: Synthetic oligonucleotide"
gattcgaggtcgttgagggcg

SEQ ID NO: 15686 - DNA, 21 bp, Artificial Sequence
  source: /note="Description of Artificial Sequence: Synthetic oligonucleotide"
gattcgtcggctaaggagagt

SEQ ID NO: 15687 - DNA, 21 bp, Artificial Sequence
  source: /note="Description of Artificial Sequence: Synthetic oligonucleotide"
gatagttctgagtatagtcct

SEQ ID NO: 15688 - DNA, 21 bp, Artificial Sequence
  source: /note="Description of Artificial Sequence: Synthetic oligonucleotide"
gatagtagtcatactttgcag

SEQ ID NO: 15689 - DNA, 21 bp, Artificial Sequence
  source: /note="Description of Artificial Sequence: Synthetic oligonucleotide"
gattctagtcatactatgatg

SEQ ID NO: 15690 - DNA, 21 bp, Artificial Sequence
  source: /note="Description of Artificial Sequence: Synthetic oligonucleotide"
gattcgtcgcattatcctggt

SEQ ID NO: 15691 - DNA, 21 bp, Artificial Sequence
  source: /note="Description of Artificial Sequence: Synthetic oligonucleotide"
gattcgtcgcctctggttcgg

SEQ ID NO: 15692 - DNA, 21 bp, Artificial Sequence
  source: /note="Description of Artificial Sequence: Synthetic oligonucleotide"
gatagtacgccggaggagggt

SEQ ID NO: 15693 - DNA, 21 bp, Artificial Sequence
  source: /note="Description of Artificial Sequence: Synthetic oligonucleotide"
gattcgactcagtttcctagg

SEQ ID NO: 15694 - DNA, 21 bp, Artificial Sequence
  source: /note="Description of Artificial Sequence: Synthetic oligonucleotide"
gatagtgttcatttggggcgt

SEQ ID NO: 15695 - DNA, 21 bp, Artificial Sequence
  source: /note="Description of Artificial Sequence: Synthetic oligonucleotide"
gattcggtgaaggctagtcag

SEQ ID NO: 15696 - DNA, 21 bp, Artificial Sequence
  source: /note="Description of Artificial Sequence: Synthetic oligonucleotide"
gatactgctgctaaggattct

SEQ ID NO: 15697 - DNA, 21 bp, Artificial Sequence
  source: /note="Description of Artificial Sequence: Synthetic oligonucleotide"
gatactgcgtcgcgtcttgct

SEQ ID NO: 15698 - DNA, 21 bp, Artificial Sequence
  source: /note="Description of Artificial Sequence: Synthetic oligonucleotide"
gatactgatgggcagcgtgct

SEQ ID NO: 15699 - DNA, 21 bp, Artificial Sequence
  source: /note="Description of Artificial Sequence: Synthetic oligonucleotide"
gatacgcatgcttatgatggg

SEQ ID NO: 15700 - DNA, 21 bp, Artificial Sequence
  source: /note="Description of Artificial Sequence: Synthetic oligonucleotide"
gatactcatattattgcgtcg

SEQ ID NO: 15701 - DNA, 21 bp, Artificial Sequence
  source: /note="Description of Artificial Sequence: Synthetic oligonucleotide"
gatactcataggtcggagagg

SEQ ID NO: 15702 - DNA, 21 bp, Artificial Sequence
  source: /note="Description of Artificial Sequence: Synthetic oligonucleotide"
gatactcatgttattgcgagt

SEQ ID NO: 15703 - DNA, 21 bp, Artificial Sequence
  source: /note="Description of Artificial Sequence: Synthetic oligonucleotide"
gatactattgcgcatgctccg

SEQ ID NO: 15704 - DNA, 21 bp, Artificial Sequence
  source: /note="Description of Artificial Sequence: Synthetic oligonucleotide"
gatactttggctttgtcttgt

SEQ ID NO: 15705 - DNA, 21 bp, Artificial Sequence
  source: /note="Description of Artificial Sequence: Synthetic oligonucleotide"
gatactctggcgaattctgcg

SEQ ID NO: 15706 - DNA, 21 bp, Artificial Sequence
  source: /note="Description of Artificial Sequence: Synthetic oligonucleotide"
gatacgttggggttggagccg

SEQ ID NO: 15707 - DNA, 21 bp, Artificial Sequence
  source: /note="Description of Artificial Sequence: Synthetic oligonucleotide"
gatactttgatgattcgtggg

SEQ ID NO: 15708 - DNA, 21 bp, Artificial Sequence
  source: /note="Description of Artificial Sequence: Synthetic oligonucleotide"
gatactttgagtacgacgcgg

SEQ ID NO: 15709 - DNA, 21 bp, Artificial Sequence
  source: /note="Description of Artificial Sequence: Synthetic oligonucleotide"
gatactaatatgttgcatgtg

SEQ ID NO: 15710 - DNA, 21 bp, Artificial Sequence
  source: /note="Description of Artificial Sequence: Synthetic oligonucleotide"
gatactccggatgctcttcgt

SEQ ID NO: 15711 - DNA, 21 bp, Artificial Sequence
  source: /note="Description of Artificial Sequence: Synthetic oligonucleotide"
gatacgccgcatctttctttg

SEQ ID NO: 15712 - DNA, 21 bp, Artificial Sequence
  source: /note="Description of Artificial Sequence: Synthetic oligonucleotide"
gatactccgcttgagctggct

SEQ ID NO: 15713 - DNA, 21 bp, Artificial Sequence
  source: /note="Description of Artificial Sequence: Synthetic oligonucleotide"
gatactccgatgcctaagatt

SEQ ID NO: 15714 - DNA, 21 bp, Artificial Sequence
  source: /note="Description of Artificial Sequence: Synthetic oligonucleotide"
gatacgccgaatgatactgcg

SEQ ID NO: 15715 - DNA, 21 bp, Artificial Sequence
  source: /note="Description of Artificial Sequence: Synthetic oligonucleotide"
gatacgcagcatcttaagccg

SEQ ID NO: 15716 - DNA, 21 bp, Artificial Sequence
  source: /note="Description of Artificial Sequence: Synthetic oligonucleotide"
gatactcagttgcctaatcct

SEQ ID NO: 15717 - DNA, 21 bp, Artificial Sequence
  source: /note="Description of Artificial Sequence: Synthetic oligonucleotide"
gatacgcagctgacgttggcg

SEQ ID NO: 15718 - DNA, 21 bp, Artificial Sequence
  source: /note="Description of Artificial Sequence: Synthetic oligonucleotide"
gatacgcagagtgtgtcgttg

SEQ ID NO: 15719 - DNA, 21 bp, Artificial Sequence
  source: /note="Description of Artificial Sequence: Synthetic oligonucleotide"
gatacgagggcgtttacgggt

SEQ ID NO: 15720 - DNA, 21 bp, Artificial Sequence
  source: /note="Description of Artificial Sequence: Synthetic oligonucleotide"
gatactcgtcatagtgatttg

SEQ ID NO: 15721 - DNA, 21 bp, Artificial Sequence
  source: /note="Description of Artificial Sequence: Synthetic oligonucleotide"
gatactcggagggagtgtgat

SEQ ID NO: 15722 - DNA, 21 bp, Artificial Sequence
  source: /note="Description of Artificial Sequence: Synthetic oligonucleotide"
gatacttcgaggacgtctttg

SEQ ID NO: 15723 - DNA, 21 bp, Artificial Sequence
  source: /note="Description of Artificial Sequence: Synthetic oligonucleotide"
gatacgagtagtcgtatgacg

SEQ ID NO: 15724 - DNA, 21 bp, Artificial Sequence
  source: /note="Description of Artificial Sequence: Synthetic oligonucleotide"
gatacttcttggaagagtact

SEQ ID NO: 15725 - DNA, 21 bp, Artificial Sequence
  source: /note="Description of Artificial Sequence: Synthetic oligonucleotide"
gatactactgagcgtccgtgg

SEQ ID NO: 15726 - DNA, 21 bp, Artificial Sequence
  source: /note="Description of Artificial Sequence: Synthetic oligonucleotide"
gatactacggggaggtatttg

SEQ ID NO: 15727 - DNA, 21 bp, Artificial Sequence
  source: /note="Description of Artificial Sequence: Synthetic oligonucleotide"
gatactactcttctgcggggt

SEQ ID NO: 15728 - DNA, 21 bp, Artificial Sequence
  source: /note="Description of Artificial Sequence: Synthetic oligonucleotide"
gatactacgcctattgtgcgt

SEQ ID NO: 15729 - DNA, 21 bp, Artificial Sequence
  source: /note="Description of Artificial Sequence: Synthetic oligonucleotide"
gatacttatgcgattgctatt

SEQ ID NO: 15730 - DNA, 21 bp, Artificial Sequence
  source: /note="Description of Artificial Sequence: Synthetic oligonucleotide"
gatacgtataatacgcctgcg

SEQ ID NO: 15731 - DNA, 21 bp, Artificial Sequence
  source: /note="Description of Artificial Sequence: Synthetic oligonucleotide"
gatgtggcgtctcgttctctg

SEQ ID NO: 15732 - DNA, 21 bp, Artificial Sequence
  source: /note="Description of Artificial Sequence: Synthetic oligonucleotide"
gatgttgcttcgtcgcgtctg

SEQ ID NO: 15733 - DNA, 21 bp, Artificial Sequence
  source: /note="Description of Artificial Sequence: Synthetic oligonucleotide"
gatgtggatgatacgatgtgg

SEQ ID NO: 15734 - DNA, 21 bp, Artificial Sequence
  source: /note="Description of Artificial Sequence: Synthetic oligonucleotide"
gatgttgatctgcttcctact

SEQ ID NO: 15735 - DNA, 21 bp, Artificial Sequence
  source: /note="Description of Artificial Sequence: Synthetic oligonucleotide"
gatgttgataggttgaatact

SEQ ID NO: 15736 - DNA, 21 bp, Artificial Sequence
  source: /note="Description of Artificial Sequence: Synthetic oligonucleotide"
gatgtggattcgcatcatact

SEQ ID NO: 15737 - DNA, 21 bp, Artificial Sequence
  source: /note="Description of Artificial Sequence: Synthetic oligonucleotide"
gatgttgatgtgaggcatggt

SEQ ID NO: 15738 - DNA, 21 bp, Artificial Sequence
  source: /note="Description of Artificial Sequence: Synthetic oligonucleotide"
gatgttgagcctcttcagatg

SEQ ID NO: 15739 - DNA, 21 bp, Artificial Sequence
  source: /note="Description of Artificial Sequence: Synthetic oligonucleotide"
gatgtgtttcgtactcagcct

SEQ ID NO: 15740 - DNA, 21 bp, Artificial Sequence
  source: /note="Description of Artificial Sequence: Synthetic oligonucleotide"
gatgttgggacgtatggtcgt

SEQ ID NO: 15741 - DNA, 21 bp, Artificial Sequence
  source: /note="Description of Artificial Sequence: Synthetic oligonucleotide"
gatgttaagacgaatgtttat

SEQ ID NO: 15742 - DNA, 21 bp, Artificial Sequence
  source: /note="Description of Artificial Sequence: Synthetic oligonucleotide"
gatgttttgttttctaagaat

SEQ ID NO: 15743 - DNA, 21 bp, Artificial Sequence
  source: /note="Description of Artificial Sequence: Synthetic oligonucleotide"
gatgttcttggtaagcatgct

SEQ ID NO: 15744 - DNA, 21 bp, Artificial Sequence
  source: /note="Description of Artificial Sequence: Synthetic oligonucleotide"
gatgttttgaagacggatttt

SEQ ID NO: 15745 - DNA, 21 bp, Artificial Sequence
  source: /note="Description of Artificial Sequence: Synthetic oligonucleotide"
gatgttctgaattctactgat

SEQ ID NO: 15746 - DNA, 21 bp, Artificial Sequence
  source: /note="Description of Artificial Sequence: Synthetic oligonucleotide"
gatgtgatgagtcagcttctg

SEQ ID NO: 15747 - DNA, 21 bp, Artificial Sequence
  source: /note="Description of Artificial Sequence: Synthetic oligonucleotide"
gatgttcctaatgcgccgtgt

SEQ ID NO: 15748 - DNA, 21 bp, Artificial Sequence
  source: /note="Description of Artificial Sequence: Synthetic oligonucleotide"
gatgtgccgaatccgacgggg

SEQ ID NO: 15749 - DNA, 21 bp, Artificial Sequence
  source: /note="Description of Artificial Sequence: Synthetic oligonucleotide"
gatgtgccgaatacgatgact

SEQ ID NO: 15750 - DNA, 21 bp, Artificial Sequence
  source: /note="Description of Artificial Sequence: Synthetic oligonucleotide"
gatgtgccgtattcgcttgag

SEQ ID NO: 15751 - DNA, 21 bp, Artificial Sequence
  source: /note="Description of Artificial Sequence: Synthetic oligonucleotide"
gatgttcagatgcataagcat

SEQ ID NO: 15752 - DNA, 21 bp, Artificial Sequence
  source: /note="Description of Artificial Sequence: Synthetic oligonucleotide"
gatgtgaggaatacgcggctg

SEQ ID NO: 15753 - DNA, 21 bp, Artificial Sequence
  source: /note="Description of Artificial Sequence: Synthetic oligonucleotide"
gatgttaggcaggcgtatttt

SEQ ID NO: 15754 - DNA, 21 bp, Artificial Sequence
  source: /note="Description of Artificial Sequence: Synthetic oligonucleotide"
gatgtgcgggttggtcatatt

SEQ ID NO: 15755 - DNA, 21 bp, Artificial Sequence
  source: /note="Description of Artificial Sequence: Synthetic oligonucleotide"
gatgtgagtggtactattggg

SEQ ID NO: 15756 - DNA, 21 bp, Artificial Sequence
  source: /note="Description of Artificial Sequence: Synthetic oligonucleotide"
gatgtttctctgcgtgtgacg

SEQ ID NO: 15757 - DNA, 21 bp, Artificial Sequence
  source: /note="Description of Artificial Sequence: Synthetic oligonucleotide"
gatgtttcttcgcctcttatt

SEQ ID NO: 15758 - DNA, 21 bp, Artificial Sequence
  source: /note="Description of Artificial Sequence: Synthetic oligonucleotide"
gatgttagtgtttctgatgtt

SEQ ID NO: 15759 - DNA, 21 bp, Artificial Sequence
  source: /note="Description of Artificial Sequence: Synthetic oligonucleotide"
gatgtgacggttggtagttct

SEQ ID NO: 15760 - DNA, 21 bp, Artificial Sequence
  source: /note="Description of Artificial Sequence: Synthetic oligonucleotide"
gatgttgttgcggggccgcct

SEQ ID NO: 15761 - DNA, 21 bp, Artificial Sequence
  source: /note="Description of Artificial Sequence: Synthetic oligonucleotide"
gatgttgtgaattcgcttaat

SEQ ID NO: 15762 - DNA, 21 bp, Artificial Sequence
  source: /note="Description of Artificial Sequence: Synthetic oligonucleotide"
gatgtggtgcctaggtcggcg

SEQ ID NO: 15763 - DNA, 21 bp, Artificial Sequence
  source: /note="Description of Artificial Sequence: Synthetic oligonucleotide"
gattggggtcctaagcagcgg

SEQ ID NO: 15764 - DNA, 21 bp, Artificial Sequence
  source: /note="Description of Artificial Sequence: Synthetic oligonucleotide"
gattggaagccgaatcatgag

SEQ ID NO: 15765 - DNA, 21 bp, Artificial Sequence
  source: /note="Description of Artificial Sequence: Synthetic oligonucleotide"
gattggaagcagactactgct

SEQ ID NO: 15766 - DNA, 21 bp, Artificial Sequence
  source: /note="Description of Artificial Sequence: Synthetic oligonucleotide"
gattggcagcgtcatggtcct

SEQ ID NO: 15767 - DNA, 21 bp, Artificial Sequence
  source: /note="Description of Artificial Sequence: Synthetic oligonucleotide"
gattggactcatattgataag

SEQ ID NO: 15768 - DNA, 21 bp, Artificial Sequence
  source: /note="Description of Artificial Sequence: Synthetic oligonucleotide"
gattggactccgcggactacg

SEQ ID NO: 15769 - DNA, 21 bp, Artificial Sequence
  source: /note="Description of Artificial Sequence: Synthetic oligonucleotide"
gattatgcgattgggaagacg

SEQ ID NO: 15770 - DNA, 21 bp, Artificial Sequence
  source: /note="Description of Artificial Sequence: Synthetic oligonucleotide"
gattatgagtctttttcgcgg

SEQ ID NO: 15771 - DNA, 21 bp, Artificial Sequence
  source: /note="Description of Artificial Sequence: Synthetic oligonucleotide"
gattatggtcctgagattatt

SEQ ID NO: 15772 - DNA, 21 bp, Artificial Sequence
  source: /note="Description of Artificial Sequence: Synthetic oligonucleotide"
gattatggtcagctttcgaat

SEQ ID NO: 15773 - DNA, 21 bp, Artificial Sequence
  source: /note="Description of Artificial Sequence: Synthetic oligonucleotide"
gattatcatcagatgcattct

SEQ ID NO: 15774 - DNA, 21 bp, Artificial Sequence
  source: /note="Description of Artificial Sequence: Synthetic oligonucleotide"
gattatcatcgggcgccgggg

SEQ ID NO: 15775 - DNA, 21 bp, Artificial Sequence
  source: /note="Description of Artificial Sequence: Synthetic oligonucleotide"
gattatcctccggaggttctt

SEQ ID NO: 15776 - DNA, 21 bp, Artificial Sequence
  source: /note="Description of Artificial Sequence: Synthetic oligonucleotide"
gattatagggagtatacgcgt

SEQ ID NO: 15777 - DNA, 21 bp, Artificial Sequence
  source: /note="Description of Artificial Sequence: Synthetic oligonucleotide"
gattatcggtttgctgatagt

SEQ ID NO: 15778 - DNA, 21 bp, Artificial Sequence
  source: /note="Description of Artificial Sequence: Synthetic oligonucleotide"
gattatcgtattacgaattct

SEQ ID NO: 15779 - DNA, 21 bp, Artificial Sequence
  source: /note="Description of Artificial Sequence: Synthetic oligonucleotide"
gattataggttgcttcctgag

SEQ ID NO: 15780 - DNA, 21 bp, Artificial Sequence
  source: /note="Description of Artificial Sequence: Synthetic oligonucleotide"
gattatcgtcagattgatcag

SEQ ID NO: 15781 - DNA, 21 bp, Artificial Sequence
  source: /note="Description of Artificial Sequence: Synthetic oligonucleotide"
gattattctgagatgtcgaag

SEQ ID NO: 15782 - DNA, 21 bp, Artificial Sequence
  source: /note="Description of Artificial Sequence: Synthetic oligonucleotide"
gattattcgtctgcgcgggct

SEQ ID NO: 15783 - DNA, 21 bp, Artificial Sequence
  source: /note="Description of Artificial Sequence: Synthetic oligonucleotide"
gattattcgtcgtcgatgcgg

SEQ ID NO: 15784 - DNA, 21 bp, Artificial Sequence
  source: /note="Description of Artificial Sequence: Synthetic oligonucleotide"
gattatactctgactccgtct

SEQ ID NO: 15785 - DNA, 21 bp, Artificial Sequence
  source: /note="Description of Artificial Sequence: Synthetic oligonucleotide"
gattatgttcctgtggagctg

SEQ ID NO: 15786 - DNA, 21 bp, Artificial Sequence
  source: /note="Description of Artificial Sequence: Synthetic oligonucleotide"
gaggctgcgcatccgggtatg

SEQ ID NO: 15787 - DNA, 21 bp, Artificial Sequence
  source: /note="Description of Artificial Sequence: Synthetic oligonucleotide"
gaggctgctatgacgcgggag

SEQ ID NO: 15788 - DNA, 21 bp, Artificial Sequence
  source: /note="Description of Artificial Sequence: Synthetic oligonucleotide"
gaggcggctccgattcctcgg

SEQ ID NO: 15789 - DNA, 21 bp, Artificial Sequence
  source: /note="Description of Artificial Sequence: Synthetic oligonucleotide"
gaggcggcttcgaggcatgat

SEQ ID NO: 15790 - DNA, 21 bp, Artificial Sequence
  source: /note="Description of Artificial Sequence: Synthetic oligonucleotide"
gaggcggctagtagtcctaag

SEQ ID NO: 15791 - DNA, 21 bp, Artificial Sequence
  source: /note="Description of Artificial Sequence: Synthetic oligonucleotide"
gaggcggcgactcttactact

SEQ ID NO: 15792 - DNA, 21 bp, Artificial Sequence
  source: /note="Description of Artificial Sequence: Synthetic oligonucleotide"
gaggcttttcatacgagttcg

SEQ ID NO: 15793 - DNA, 21 bp, Artificial Sequence
  source: /note="Description of Artificial Sequence: Synthetic oligonucleotide"
gaggcgttttctggtcgtatt

SEQ ID NO: 15794 - DNA, 21 bp, Artificial Sequence
  source: /note="Description of Artificial Sequence: Synthetic oligonucleotide"
gaggctaagactaataggact

SEQ ID NO: 15795 - DNA, 21 bp, Artificial Sequence
  source: /note="Description of Artificial Sequence: Synthetic oligonucleotide"
gaggcgctggctgtgaggcct

SEQ ID NO: 15796 - DNA, 21 bp, Artificial Sequence
  source: /note="Description of Artificial Sequence: Synthetic oligonucleotide"
gaggctcttcgtggtccgatt

SEQ ID NO: 15797 - DNA, 21 bp, Artificial Sequence
  source: /note="Description of Artificial Sequence: Synthetic oligonucleotide"
gaggctatgcattctcgtgct

SEQ ID NO: 15798 - DNA, 21 bp, Artificial Sequence
  source: /note="Description of Artificial Sequence: Synthetic oligonucleotide"
gaggcgaatgatgagactaag

SEQ ID NO: 15799 - DNA, 21 bp, Artificial Sequence
  source: /note="Description of Artificial Sequence: Synthetic oligonucleotide"
gaggcgaatcgtagtccgatg

SEQ ID NO: 15800 - DNA, 21 bp, Artificial Sequence
  source: /note="Description of Artificial Sequence: Synthetic oligonucleotide"
gaggctcagagggcggcgccg

SEQ ID NO: 15801 - DNA, 21 bp, Artificial Sequence
  source: /note="Description of Artificial Sequence: Synthetic oligonucleotide"
gaggcgcgtcatgtgtatgct

SEQ ID NO: 15802 - DNA, 21 bp, Artificial Sequence
  source: /note="Description of Artificial Sequence: Synthetic oligonucleotide"
gaggctcgttatgagtcgggg

SEQ ID NO: 15803 - DNA, 21 bp, Artificial Sequence
  source: /note="Description of Artificial Sequence: Synthetic oligonucleotide"
gaggcgcgttatgttcatgtg

SEQ ID NO: 15804 - DNA, 21 bp, Artificial Sequence
  source: /note="Description of Artificial Sequence: Synthetic oligonucleotide"
gaggcgtcgcattttactatg

SEQ ID NO: 15805 - DNA, 21 bp, Artificial Sequence
  source: /note="Description of Artificial Sequence: Synthetic oligonucleotide"
gaggcgtcgttggcggctaag

SEQ ID NO: 15806 - DNA, 21 bp, Artificial Sequence
  source: /note="Description of Artificial Sequence: Synthetic oligonucleotide"
gaggctagtaatgctattgct

SEQ ID NO: 15807 - DNA, 21 bp, Artificial Sequence
  source: /note="Description of Artificial Sequence: Synthetic oligonucleotide"
gaggctagtcgtgtgacggtt

SEQ ID NO: 15808 - DNA, 21 bp, Artificial Sequence
  source: /note="Description of Artificial Sequence: Synthetic oligonucleotide"
gaggcgtcttcgatgcattcg

SEQ ID NO: 15809 - DNA, 21 bp, Artificial Sequence
  source: /note="Description of Artificial Sequence: Synthetic oligonucleotide"
gaggcttcggttcttacgagg

SEQ ID NO: 15810 - DNA, 21 bp, Artificial Sequence
  source: /note="Description of Artificial Sequence: Synthetic oligonucleotide"
gaggcttcgtatatgcctcct

SEQ ID NO: 15811 - DNA, 21 bp, Artificial Sequence
  source: /note="Description of Artificial Sequence: Synthetic oligonucleotide"
gaggctacgatggttaaggat

SEQ ID NO: 15812 - DNA, 21 bp, Artificial Sequence
  source: /note="Description of Artificial Sequence: Synthetic oligonucleotide"
gaggctacgaatcggcatcct

SEQ ID NO: 15813 - DNA, 21 bp, Artificial Sequence
  source: /note="Description of Artificial Sequence: Synthetic oligonucleotide"
gaggctactcctccgactatt

SEQ ID NO: 15814 - DNA, 21 bp, Artificial Sequence
  source: /note="Description of Artificial Sequence: Synthetic oligonucleotide"
gaggctacgactaattttctt

SEQ ID NO: 15815 - DNA, 21 bp, Artificial Sequence
  source: /note="Description of Artificial Sequence: Synthetic oligonucleotide"
gaggcgacgacgccgatgccg

SEQ ID NO: 15816 - DNA, 21 bp, Artificial Sequence
  source: /note="Description of Artificial Sequence: Synthetic oligonucleotide"
gaggctgtgacgccgcgtcat

SEQ ID NO: 15817 - DNA, 21 bp, Artificial Sequence
  source: /note="Description of Artificial Sequence: Synthetic oligonucleotide"
gaggcggttactgtgaagatg

SEQ ID NO: 15818 - DNA, 21 bp, Artificial Sequence
  source: /note="Description of Artificial Sequence: Synthetic oligonucleotide"
gaggatgcggagcgtgagtat

SEQ ID NO: 15819 - DNA, 21 bp, Artificial Sequence
  source: /note="Description of Artificial Sequence: Synthetic oligonucleotide"
gaggatgctcctccgtcgcgg

SEQ ID NO: 15820 - DNA, 21 bp, Artificial Sequence
  source: /note="Description of Artificial Sequence: Synthetic oligonucleotide"
gaggatattcgtatgccttct

SEQ ID NO: 15821 - DNA, 21 bp, Artificial Sequence
  source: /note="Description of Artificial Sequence: Synthetic oligonucleotide"
gaggataagcagcatctttct

SEQ ID NO: 15822 - DNA, 21 bp, Artificial Sequence
  source: /note="Description of Artificial Sequence: Synthetic oligonucleotide"
gaggatctgccggggaagatg

SEQ ID NO: 15823 - DNA, 21 bp, Artificial Sequence
  source: /note="Description of Artificial Sequence: Synthetic oligonucleotide"
gaggatatgcctcagcttggt

SEQ ID NO: 15824 - DNA, 21 bp, Artificial Sequence
  source: /note="Description of Artificial Sequence: Synthetic oligonucleotide"
gaggatcctcttggtcagatg

SEQ ID NO: 15825 - DNA, 21 bp, Artificial Sequence
  source: /note="Description of Artificial Sequence: Synthetic oligonucleotide"
gaggattcgcattttgcgcct

SEQ ID NO: 15826 - DNA, 21 bp, Artificial Sequence
  source: /note="Description of Artificial Sequence: Synthetic oligonucleotide"
gaggaggcgatgtatcctttt

SEQ ID NO: 15827 - DNA, 21 bp, Artificial Sequence
  source: /note="Description of Artificial Sequence: Synthetic oligonucleotide"
gaggaggcttcgcttagtctg

SEQ ID NO: 15828 - DNA, 21 bp, Artificial Sequence
  source: /note="Description of Artificial Sequence: Synthetic oligonucleotide"
gaggagcttgctaaggctgat

SEQ ID NO: 15829 - DNA, 21 bp, Artificial Sequence
  source: /note="Description of Artificial Sequence: Synthetic oligonucleotide"
gaggagttgcggaggcatgtg

SEQ ID NO: 15830 - DNA, 21 bp, Artificial Sequence
  source: /note="Description of Artificial Sequence: Synthetic oligonucleotide"
gaggagaatcttcagcggact

SEQ ID NO: 15831 - DNA, 21 bp, Artificial Sequence
  source: /note="Description of Artificial Sequence: Synthetic oligonucleotide"
gaggagtctggtcgggttgcg

SEQ ID NO: 15832 - DNA, 21 bp, Artificial Sequence
  source: /note="Description of Artificial Sequence: Synthetic oligonucleotide"
gaggagtcgaagcgttcggct

SEQ ID NO: 15833 - DNA, 21 bp, Artificial Sequence
  source: /note="Description of Artificial Sequence: Synthetic oligonucleotide"
gaggagagtccggagtcgatt

SEQ ID NO: 15834 - DNA, 21 bp, Artificial Sequence
  source: /note="Description of Artificial Sequence: Synthetic oligonucleotide"
gaggagacgcggaagccgctt

SEQ ID NO: 15835 - DNA, 21 bp, Artificial Sequence
  source: /note="Description of Artificial Sequence: Synthetic oligonucleotide"
gaggagacttggcataggctt

SEQ ID NO: 15836 - DNA, 21 bp, Artificial Sequence
  source: /note="Description of Artificial Sequence: Synthetic oligonucleotide"
gaggagtatgtggagaggatt

SEQ ID NO: 15837 - DNA, 21 bp, Artificial Sequence
  source: /note="Description of Artificial Sequence: Synthetic oligonucleotide"
gagtttgatcagcgtaatatt

SEQ ID NO: 15838 - DNA, 21 bp, Artificial Sequence
  source: /note="Description of Artificial Sequence: Synthetic oligonucleotide"
gagtttgagcgtcgtacgacg

SEQ ID NO: 15839 - DNA, 21 bp, Artificial Sequence
  source: /note="Description of Artificial Sequence: Synthetic oligonucleotide"
gagtttgaggtttgttgtgct

SEQ ID NO: 15840 - DNA, 21 bp, Artificial Sequence
  source: /note="Description of Artificial Sequence: Synthetic oligonucleotide"
gagtttgggatgacggtgccg

SEQ ID NO: 15841 - DNA, 21 bp, Artificial Sequence
  source: /note="Description of Artificial Sequence: Synthetic oligonucleotide"
gagtttattgagatgaggcct

SEQ ID NO: 15842 - DNA, 21 bp, Artificial Sequence
  source: /note="Description of Artificial Sequence: Synthetic oligonucleotide"
gagtttaatggtaagaatgat

SEQ ID NO: 15843 - DNA, 21 bp, Artificial Sequence
  source: /note="Description of Artificial Sequence: Synthetic oligonucleotide"
gagtttaataagagtggtgct

SEQ ID NO: 15844 - DNA, 21 bp, Artificial Sequence
  source: /note="Description of Artificial Sequence: Synthetic oligonucleotide"
gagtttaatccggctcttagt

SEQ ID NO: 15845 - DNA, 21 bp, Artificial Sequence
  source: /note="Description of Artificial Sequence: Synthetic oligonucleotide"
gagtttccttcgttggatgat

SEQ ID NO: 15846 - DNA, 21 bp, Artificial Sequence
  source: /note="Description of Artificial Sequence: Synthetic oligonucleotide"
gagtttcctacgtctcttccg

SEQ ID NO: 15847 - DNA, 21 bp, Artificial Sequence
  source: /note="Description of Artificial Sequence: Synthetic oligonucleotide"
gagtttcagaagaagtcttct

SEQ ID NO: 15848 - DNA, 21 bp, Artificial Sequence
  source: /note="Description of Artificial Sequence: Synthetic oligonucleotide"
gagtttcagtcgttgcatgtg

SEQ ID NO: 15849 - DNA, 21 bp, Artificial Sequence
  source: /note="Description of Artificial Sequence: Synthetic oligonucleotide"
gagtttcggctgtctgctgtt

SEQ ID NO: 15850 - DNA, 21 bp, Artificial Sequence
  source: /note="Description of Artificial Sequence: Synthetic oligonucleotide"
gagtttaggtctactgggacg

SEQ ID NO: 15851 - DNA, 21 bp, Artificial Sequence
  source: /note="Description of Artificial Sequence: Synthetic oligonucleotide"
gagttttcgcagatgacggag

SEQ ID NO: 15852 - DNA, 21 bp, Artificial Sequence
  source: /note="Description of Artificial Sequence: Synthetic oligonucleotide"
gagttttctcgtatgaatacg

SEQ ID NO: 15853 - DNA, 21 bp, Artificial Sequence
  source: /note="Description of Artificial Sequence: Synthetic oligonucleotide"
gagttttcgacttcgcttagt

SEQ ID NO: 15854 - DNA, 21 bp, Artificial Sequence
  source: /note="Description of Artificial Sequence: Synthetic oligonucleotide"
gagtttacgcataataaggct

SEQ ID NO: 15855 - DNA, 21 bp, Artificial Sequence
  source: /note="Description of Artificial Sequence: Synthetic oligonucleotide"
gagtttacgtctgaggatctt

SEQ ID NO: 15856 - DNA, 21 bp, Artificial Sequence
  source: /note="Description of Artificial Sequence: Synthetic oligonucleotide"
gagtttgttttgtcgttgagt

SEQ ID NO: 15857 - DNA, 21 bp, Artificial Sequence
  source: /note="Description of Artificial Sequence: Synthetic oligonucleotide"
gagttttataaggattgggat

SEQ ID NO: 15858 - DNA, 21 bp, Artificial Sequence
  source: /note="Description of Artificial Sequence: Synthetic oligonucleotide"
gagggtgcgaatgcggctact

SEQ ID NO: 15859 - DNA, 21 bp, Artificial Sequence
  source: /note="Description of Artificial Sequence: Synthetic oligonucleotide"
gagggtgattttgttcgggcg

SEQ ID NO: 15860 - DNA, 21 bp, Artificial Sequence
  source: /note="Description of Artificial Sequence: Synthetic oligonucleotide"
gagggggataatcggttgttt

SEQ ID NO: 15861 - DNA, 21 bp, Artificial Sequence
  source: /note="Description of Artificial Sequence: Synthetic oligonucleotide"
gagggggagaatcagactact

SEQ ID NO: 15862 - DNA, 21 bp, Artificial Sequence
  source: /note="Description of Artificial Sequence: Synthetic oligonucleotide"
gagggttttgtgggtccggag

SEQ ID NO: 15863 - DNA, 21 bp, Artificial Sequence
  source: /note="Description of Artificial Sequence: Synthetic oligonucleotide"
gagggggggcataggcttatt

SEQ ID NO: 15864 - DNA, 21 bp, Artificial Sequence
  source: /note="Description of Artificial Sequence: Synthetic oligonucleotide"
gaggggcatgatactcttatg

SEQ ID NO: 15865 - DNA, 21 bp, Artificial Sequence
  source: /note="Description of Artificial Sequence: Synthetic oligonucleotide"
gaggggattctgaagtcgctt

SEQ ID NO: 15866 - DNA, 21 bp, Artificial Sequence
  source: /note="Description of Artificial Sequence: Synthetic oligonucleotide"
gaggggattccgcctttttct

SEQ ID NO: 15867 - DNA, 21 bp, Artificial Sequence
  source: /note="Description of Artificial Sequence: Synthetic oligonucleotide"
gagggtatttcggcgtcggtg

SEQ ID NO: 15868 - DNA, 21 bp, Artificial Sequence
  source: /note="Description of Artificial Sequence: Synthetic oligonucleotide"
gaggggaaggtgcggcttccg

SEQ ID NO: 15869 - DNA, 21 bp, Artificial Sequence
  source: /note="Description of Artificial Sequence: Synthetic oligonucleotide"
gagggtttggggcttcgtgtg

SEQ ID NO: 15870 - DNA, 21 bp, Artificial Sequence
  source: /note="Description of Artificial Sequence: Synthetic oligonucleotide"
gagggtatgcctcttaatcat

SEQ ID NO: 15871 - DNA, 21 bp, Artificial Sequence
  source: /note="Description of Artificial Sequence: Synthetic oligonucleotide"
gagggtccggttctgctggcg

SEQ ID NO: 15872 - DNA, 21 bp, Artificial Sequence
  source: /note="Description of Artificial Sequence: Synthetic oligonucleotide"
gagggtcgtagggagccttat

SEQ ID NO: 15873 - DNA, 21 bp, Artificial Sequence
  source: /note="Description of Artificial Sequence: Synthetic oligonucleotide"
gaggggagggttgttcctgct

SEQ ID NO: 15874 - DNA, 21 bp, Artificial Sequence
  source: /note="Description of Artificial Sequence: Synthetic oligonucleotide"
gagggtagttttcctctgcat

SEQ ID NO: 15875 - DNA, 21 bp, Artificial Sequence
  source: /note="Description of Artificial Sequence: Synthetic oligonucleotide"
gagggttctgggatgttgagg

SEQ ID NO: 15876 - DNA, 21 bp, Artificial Sequence
  source: /note="Description of Artificial Sequence: Synthetic oligonucleotide"
gagggttctaagatgatggtt

SEQ ID NO: 15877 - DNA, 21 bp, Artificial Sequence
  source: /note="Description of Artificial Sequence: Synthetic oligonucleotide"
gaggggtctccggatttgagg

SEQ ID NO: 15878 - DNA, 21 bp, Artificial Sequence
  source: /note="Description of Artificial Sequence: Synthetic oligonucleotide"
gagggttctcctcgtgcgatg

SEQ ID NO: 15879 - DNA, 21 bp, Artificial Sequence
  source: /note="Description of Artificial Sequence: Synthetic oligonucleotide"
gaggggtcgcagaatgatttt

SEQ ID NO: 15880 - DNA, 21 bp, Artificial Sequence
  source: /note="Description of Artificial Sequence: Synthetic oligonucleotide"
gagggtacggcgaggttgtat

SEQ ID NO: 15881 - DNA, 21 bp, Artificial Sequence
  source: /note="Description of Artificial Sequence: Synthetic oligonucleotide"
gagggggtggtgactttgcag

SEQ ID NO: 15882 - DNA, 21 bp, Artificial Sequence
  source: /note="Description of Artificial Sequence: Synthetic oligonucleotide"
gaggggtatgattctacgact

SEQ ID NO: 15883 - DNA, 21 bp, Artificial Sequence
  source: /note="Description of Artificial Sequence: Synthetic oligonucleotide"
gaggggtatgagaatggtgct

SEQ ID NO: 15884 - DNA, 21 bp, Artificial Sequence
  source: /note="Description of Artificial Sequence: Synthetic oligonucleotide"
gagcattgtactaatacgtgt

SEQ ID NO: 15885 - DNA, 21 bp, Artificial Sequence
  source: /note="Description of Artificial Sequence: Synthetic oligonucleotide"
gagcatggtattgcgatggat

SEQ ID NO: 15886 - DNA, 21 bp, Artificial Sequence
  source: /note="Description of Artificial Sequence: Synthetic oligonucleotide"
gagcatgggcttaatacgctt

SEQ ID NO: 15887 - DNA, 21 bp, Artificial Sequence
  source: /note="Description of Artificial Sequence: Synthetic oligonucleotide"
gagcatgggccggcgctgctt

SEQ ID NO: 15888 - DNA, 21 bp, Artificial Sequence
  source: /note="Description of Artificial Sequence: Synthetic oligonucleotide"
gagcatggttctgctatgaag

SEQ ID NO: 15889 - DNA, 21 bp, Artificial Sequence
  source: /note="Description of Artificial Sequence: Synthetic oligonucleotide"
gagcatcatgtgcattctcct

SEQ ID NO: 15890 - DNA, 21 bp, Artificial Sequence
  source: /note="Description of Artificial Sequence: Synthetic oligonucleotide"
gagcatattccgcaggcgatg

SEQ ID NO: 15891 - DNA, 21 bp, Artificial Sequence
  source: /note="Description of Artificial Sequence: Synthetic oligonucleotide"
gagcataagggggctcatttt

SEQ ID NO: 15892 - DNA, 21 bp, Artificial Sequence
  source: /note="Description of Artificial Sequence: Synthetic oligonucleotide"
gagcataagttgttggtgatg

SEQ ID NO: 15893 - DNA, 21 bp, Artificial Sequence
  source: /note="Description of Artificial Sequence: Synthetic oligonucleotide"
gagcatatgccttcgttgcgg

SEQ ID NO: 15894 - DNA, 21 bp, Artificial Sequence
  source: /note="Description of Artificial Sequence: Synthetic oligonucleotide"
gagcataatgtggggcagtct

SEQ ID NO: 15895 - DNA, 21 bp, Artificial Sequence
  source: /note="Description of Artificial Sequence: Synthetic oligonucleotide"
gagcatcagggtactactatt

SEQ ID NO: 15896 - DNA, 21 bp, Artificial Sequence
  source: /note="Description of Artificial Sequence: Synthetic oligonucleotide"
gagcatagtgattatcaggtt

SEQ ID NO: 15897 - DNA, 21 bp, Artificial Sequence
  source: /note="Description of Artificial Sequence: Synthetic oligonucleotide"
gagcatagtgagttgacgccg

SEQ ID NO: 15898 - DNA, 21 bp, Artificial Sequence
  source: /note="Description of Artificial Sequence: Synthetic oligonucleotide"
gagcatagttttaagtctgct

SEQ ID NO: 15899 - DNA, 21 bp, Artificial Sequence
  source: /note="Description of Artificial Sequence: Synthetic oligonucleotide"
gagcattctgggacggcgatt

SEQ ID NO: 15900 - DNA, 21 bp, Artificial Sequence
  source: /note="Description of Artificial Sequence: Synthetic oligonucleotide"
gagcattcttcgggtatgctt

SEQ ID NO: 15901 - DNA, 21 bp, Artificial Sequence
  source: /note="Description of Artificial Sequence: Synthetic oligonucleotide"
gagattgcgcgtggttctttt

SEQ ID NO: 15902 - DNA, 21 bp, Artificial Sequence
  source: /note="Description of Artificial Sequence: Synthetic oligonucleotide"
gagattggttatatgagtgcg

SEQ ID NO: 15903 - DNA, 21 bp, Artificial Sequence
  source: /note="Description of Artificial Sequence: Synthetic oligonucleotide"
gagattcattatcctctggag

SEQ ID NO: 15904 - DNA, 21 bp, Artificial Sequence
  source: /note="Description of Artificial Sequence: Synthetic oligonucleotide"
gagattaaggcgcagatgtct

SEQ ID NO: 15905 - DNA, 21 bp, Artificial Sequence
  source: /note="Description of Artificial Sequence: Synthetic oligonucleotide"
gagattaaggatgagaagctt

SEQ ID NO: 15906 - DNA, 21 bp, Artificial Sequence
  source: /note="Description of Artificial Sequence: Synthetic oligonucleotide"
gagattaagcattcgatgcat

SEQ ID NO: 15907 - DNA, 21 bp, Artificial Sequence
  source: /note="Description of Artificial Sequence: Synthetic oligonucleotide"
gagattaattctcagacgaat

SEQ ID NO: 15908 - DNA, 21 bp, Artificial Sequence
  source: /note="Description of Artificial Sequence: Synthetic oligonucleotide"
gagattcagcattatcatggt

SEQ ID NO: 15909 - DNA, 21 bp, Artificial Sequence
  source: /note="Description of Artificial Sequence: Synthetic oligonucleotide"
gagattaggaagtctattatt

SEQ ID NO: 15910 - DNA, 21 bp, Artificial Sequence
  source: /note="Description of Artificial Sequence: Synthetic oligonucleotide"
gagatttcgactcagcgttat

SEQ ID NO: 15911 - DNA, 21 bp, Artificial Sequence
  source: /note="Description of Artificial Sequence: Synthetic oligonucleotide"
gagaaggctcgggctgcgtct

SEQ ID NO: 15912 - DNA, 21 bp, Artificial Sequence
  source: /note="Description of Artificial Sequence: Synthetic oligonucleotide"
gagaaggagaggccgatgttg

SEQ ID NO: 15913 - DNA, 21 bp, Artificial Sequence
  source: /note="Description of Artificial Sequence: Synthetic oligonucleotide"
gagaagggttttttgcattcg

SEQ ID NO: 15914 - DNA, 21 bp, Artificial Sequence
  source: /note="Description of Artificial Sequence: Synthetic oligonucleotide"
gagaagggtctgagtactcag

SEQ ID NO: 15915 - DNA, 21 bp, Artificial Sequence
  source: /note="Description of Artificial Sequence: Synthetic oligonucleotide"
gagaagggtagtattatgcct

SEQ ID NO: 15916 - DNA, 21 bp, Artificial Sequence
  source: /note="Description of Artificial Sequence: Synthetic oligonucleotide"
gagaagggttctttgggtcat

SEQ ID NO: 15917 - DNA, 21 bp, Artificial Sequence
  source: /note="Description of Artificial Sequence: Synthetic oligonucleotide"
gagaagattgataggttgggg

SEQ ID NO: 15918 - DNA, 21 bp, Artificial Sequence
  source: /note="Description of Artificial Sequence: Synthetic oligonucleotide"
gagaagattaagatttattct

SEQ ID NO: 15919 - DNA, 21 bp, Artificial Sequence
  source: /note="Description of Artificial Sequence: Synthetic oligonucleotide"
gagaagattccgcatagttct

SEQ ID NO: 15920 - DNA, 21 bp, Artificial Sequence
  source: /note="Description of Artificial Sequence: Synthetic oligonucleotide"
gagaagaagctgtctgctgag

SEQ ID NO: 15921 - DNA, 21 bp, Artificial Sequence
  source: /note="Description of Artificial Sequence: Synthetic oligonucleotide"
gagaagttggcgcgtactggg

SEQ ID NO: 15922 - DNA, 21 bp, Artificial Sequence
  source: /note="Description of Artificial Sequence: Synthetic oligonucleotide"
gagaagatgcatgctaatcct

SEQ ID NO: 15923 - DNA, 21 bp, Artificial Sequence
  source: /note="Description of Artificial Sequence: Synthetic oligonucleotide"
gagaagccttatattactatg

SEQ ID NO: 15924 - DNA, 21 bp, Artificial Sequence
  source: /note="Description of Artificial Sequence: Synthetic oligonucleotide"
gagaagcagaatttgccgctt

SEQ ID NO: 15925 - DNA, 21 bp, Artificial Sequence
  source: /note="Description of Artificial Sequence: Synthetic oligonucleotide"
gagaaggtgattcgtcctgtg

SEQ ID NO: 15926 - DNA, 21 bp, Artificial Sequence
  source: /note="Description of Artificial Sequence: Synthetic oligonucleotide"
gagaaggttccgaagttgctg

SEQ ID NO: 15927 - DNA, 21 bp, Artificial Sequence
  source: /note="Description of Artificial Sequence: Synthetic oligonucleotide"
gagctggctgcggaggctcgt

SEQ ID NO: 15928 - DNA, 21 bp, Artificial Sequence
  source: /note="Description of Artificial Sequence: Synthetic oligonucleotide"
gagctggagagtgctgagatt

SEQ ID NO: 15929 - DNA, 21 bp, Artificial Sequence
  source: /note="Description of Artificial Sequence: Synthetic oligonucleotide"
gagcttgagacggcgaagctg

SEQ ID NO: 15930 - DNA, 21 bp, Artificial Sequence
  source: /note="Description of Artificial Sequence: Synthetic oligonucleotide"
gagctgttttctgataagttt

SEQ ID NO: 15931 - DNA, 21 bp, Artificial Sequence
  source: /note="Description of Artificial Sequence: Synthetic oligonucleotide"
gagctgggtcctccgcgtgcg

SEQ ID NO: 15932 - DNA, 21 bp, Artificial Sequence
  source: /note="Description of Artificial Sequence: Synthetic oligonucleotide"
gagctggggccgcggacttcg

SEQ ID NO: 15933 - DNA, 21 bp, Artificial Sequence
  source: /note="Description of Artificial Sequence: Synthetic oligonucleotide"
gagttgattctgaattcgtcg

SEQ ID NO: 15934 - DNA, 21 bp, Artificial Sequence
  source: /note="Description of Artificial Sequence: Synthetic oligonucleotide"
gagctgaaggctgttgctagg

SEQ ID NO: 15935 - DNA, 21 bp, Artificial Sequence
  source: /note="Description of Artificial Sequence: Synthetic oligonucleotide"
gagcttaagtttccggataag

SEQ ID NO: 15936 - DNA, 21 bp, Artificial Sequence
  source: /note="Description of Artificial Sequence: Synthetic oligonucleotide"
gagttgaagcaggcgagtggt

SEQ ID NO: 15937 - DNA, 21 bp, Artificial Sequence
  source: /note="Description of Artificial Sequence: Synthetic oligonucleotide"
gagttgaagaggtatgttggg

SEQ ID NO: 15938 - DNA, 21 bp, Artificial Sequence
  source: /note="Description of Artificial Sequence: Synthetic oligonucleotide"
gagttgcttgagccggatgat

SEQ ID NO: 15939 - DNA, 21 bp, Artificial Sequence
  source: /note="Description of Artificial Sequence: Synthetic oligonucleotide"
gagcttatggttaatgggggg

SEQ ID NO: 15940 - DNA, 21 bp, Artificial Sequence
  source: /note="Description of Artificial Sequence: Synthetic oligonucleotide"
gagcttaataatctgcttcgg

SEQ ID NO: 15941 - DNA, 21 bp, Artificial Sequence
  source: /note="Description of Artificial Sequence: Synthetic oligonucleotide"
gagttgaatgtgcataggggt

SEQ ID NO: 15942 - DNA, 21 bp, Artificial Sequence
  source: /note="Description of Artificial Sequence: Synthetic oligonucleotide"
gagttgccggctaagagtatg

SEQ ID NO: 15943 - DNA, 21 bp, Artificial Sequence
  source: /note="Description of Artificial Sequence: Synthetic oligonucleotide"
gagcttccggcgacttatggg

SEQ ID NO: 15944 - DNA, 21 bp, Artificial Sequence
  source: /note="Description of Artificial Sequence: Synthetic oligonucleotide"
gagctgcctgggacgccgtgt

SEQ ID NO: 15945 - DNA, 21 bp, Artificial Sequence
  source: /note="Description of Artificial Sequence: Synthetic oligonucleotide"
gagcttccgcttgattgggat

SEQ ID NO: 15946 - DNA, 21 bp, Artificial Sequence
  source: /note="Description of Artificial Sequence: Synthetic oligonucleotide"
gagttgccttctaagcagggt

SEQ ID NO: 15947 - DNA, 21 bp, Artificial Sequence
  source: /note="Description of Artificial Sequence: Synthetic oligonucleotide"
gagctgcaggggcggattaat

SEQ ID NO: 15948 - DNA, 21 bp, Artificial Sequence
  source: /note="Description of Artificial Sequence: Synthetic oligonucleotide"
gagttgcagttgccgaagagt

SEQ ID NO: 15949 - DNA, 21 bp, Artificial Sequence
  source: /note="Description of Artificial Sequence: Synthetic oligonucleotide"
gagcttcaggttcagatggcg

SEQ ID NO: 15950 - DNA, 21 bp, Artificial Sequence
  source: /note="Description of Artificial Sequence: Synthetic oligonucleotide"
gagctgcggggttcggttaat

SEQ ID NO: 15951 - DNA, 21 bp, Artificial Sequence
  source: /note="Description of Artificial Sequence: Synthetic oligonucleotide"
gagcttcgggttgttcattct

SEQ ID NO: 15952 - DNA, 21 bp, Artificial Sequence
  source: /note="Description of Artificial Sequence: Synthetic oligonucleotide"
gagttgtcggcgcgggcgact

SEQ ID NO: 15953 - DNA, 21 bp, Artificial Sequence
  source: /note="Description of Artificial Sequence: Synthetic oligonucleotide"
gagctgagtgatgggagtggg

SEQ ID NO: 15954 - DNA, 21 bp, Artificial Sequence
  source: /note="Description of Artificial Sequence: Synthetic oligonucleotide"
gagcttagttttcagtttgat

SEQ ID NO: 15955 - DNA, 21 bp, Artificial Sequence
  source: /note="Description of Artificial Sequence: Synthetic oligonucleotide"
gagctgtctatgggtagttat

SEQ ID NO: 15956 - DNA, 21 bp, Artificial Sequence
  source: /note="Description of Artificial Sequence: Synthetic oligonucleotide"
gagttgtcgcgtaataatgtt

SEQ ID NO: 15957 - DNA, 21 bp, Artificial Sequence
  source: /note="Description of Artificial Sequence: Synthetic oligonucleotide"
gagctttcggttaatggtttg

SEQ ID NO: 15958 - DNA, 21 bp, Artificial Sequence
  source: /note="Description of Artificial Sequence: Synthetic oligonucleotide"
gagctgagttatcgtcctacg

SEQ ID NO: 15959 - DNA, 21 bp, Artificial Sequence
  source: /note="Description of Artificial Sequence: Synthetic oligonucleotide"
gagcttacgactggtaagtct

SEQ ID NO: 15960 - DNA, 21 bp, Artificial Sequence
  source: /note="Description of Artificial Sequence: Synthetic oligonucleotide"
gagctgactgtgcggcttgct

SEQ ID NO: 15961 - DNA, 21 bp, Artificial Sequence
  source: /note="Description of Artificial Sequence: Synthetic oligonucleotide"
gagctgacttatccgggtcgg

SEQ ID NO: 15962 - DNA, 21 bp, Artificial Sequence
  source: /note="Description of Artificial Sequence: Synthetic oligonucleotide"
gagcttgttatgtcggtgcgt

SEQ ID NO: 15963 - DNA, 21 bp, Artificial Sequence
  source: /note="Description of Artificial Sequence: Synthetic oligonucleotide"
gagttgtattcgcggcctgct

SEQ ID NO: 15964 - DNA, 21 bp, Artificial Sequence
  source: /note="Description of Artificial Sequence: Synthetic oligonucleotide"
gagatggctgcgcatcttgag

SEQ ID NO: 15965 - DNA, 21 bp, Artificial Sequence
  source: /note="Description of Artificial Sequence: Synthetic oligonucleotide"
gagatggcgccgtattcgaag

SEQ ID NO: 15966 - DNA, 21 bp, Artificial Sequence
  source: /note="Description of Artificial Sequence: Synthetic oligonucleotide"
gagatggatgggaatgcttat

SEQ ID NO: 15967 - DNA, 21 bp, Artificial Sequence
  source: /note="Description of Artificial Sequence: Synthetic oligonucleotide"
gagatggagatgcttagtgat

SEQ ID NO: 15968 - DNA, 21 bp, Artificial Sequence
  source: /note="Description of Artificial Sequence: Synthetic oligonucleotide"
gagatgggtcagttgccggat

SEQ ID NO: 15969 - DNA, 21 bp, Artificial Sequence
  source: /note="Description of Artificial Sequence: Synthetic oligonucleotide"
gagatgggtcagacgttggag

SEQ ID NO: 15970 - DNA, 21 bp, Artificial Sequence
  source: /note="Description of Artificial Sequence: Synthetic oligonucleotide"
gagatgcatgaggatgagaag

SEQ ID NO: 15971 - DNA, 21 bp, Artificial Sequence
  source: /note="Description of Artificial Sequence: Synthetic oligonucleotide"
gagatgctggagcgttttgat

SEQ ID NO: 15972 - DNA, 21 bp, Artificial Sequence
  source: /note="Description of Artificial Sequence: Synthetic oligonucleotide"
gagatgcttcgtgctgggttt

SEQ ID NO: 15973 - DNA, 21 bp, Artificial Sequence
  source: /note="Description of Artificial Sequence: Synthetic oligonucleotide"
gagatgatggctaattcgacg

SEQ ID NO: 15974 - DNA, 21 bp, Artificial Sequence
  source: /note="Description of Artificial Sequence: Synthetic oligonucleotide"
gagatgcctaagacgccgaag

SEQ ID NO: 15975 - DNA, 21 bp, Artificial Sequence
  source: /note="Description of Artificial Sequence: Synthetic oligonucleotide"
gagatgcctacgcggcagcct

SEQ ID NO: 15976 - DNA, 21 bp, Artificial Sequence
  source: /note="Description of Artificial Sequence: Synthetic oligonucleotide"
gagatgccgacttataatgat

SEQ ID NO: 15977 - DNA, 21 bp, Artificial Sequence
  source: /note="Description of Artificial Sequence: Synthetic oligonucleotide"
gagatgcggcagcagtcgatt

SEQ ID NO: 15978 - DNA, 21 bp, Artificial Sequence
  source: /note="Description of Artificial Sequence: Synthetic oligonucleotide"
gagatgaggtctagtacttct

SEQ ID NO: 15979 - DNA, 21 bp, Artificial Sequence
  source: /note="Description of Artificial Sequence: Synthetic oligonucleotide"
gagatgacgcagcttccggct

SEQ ID NO: 15980 - DNA, 21 bp, Artificial Sequence
  source: /note="Description of Artificial Sequence: Synthetic oligonucleotide"
gagatgtatttgacgcgtgtg

SEQ ID NO: 15981 - DNA, 21 bp, Artificial Sequence
  source: /note="Description of Artificial Sequence: Synthetic oligonucleotide"
gagaatgcggttcctggtgtg

SEQ ID NO: 15982 - DNA, 21 bp, Artificial Sequence
  source: /note="Description of Artificial Sequence: Synthetic oligonucleotide"
gagaatgatcgtagttctacg

SEQ ID NO: 15983 - DNA, 21 bp, Artificial Sequence
  source: /note="Description of Artificial Sequence: Synthetic oligonucleotide"
gagaatgagggtactggtact

SEQ ID NO: 15984 - DNA, 21 bp, Artificial Sequence
  source: /note="Description of Artificial Sequence: Synthetic oligonucleotide"
gagaatgagtcgcatcatttg

SEQ ID NO: 15985 - DNA, 21 bp, Artificial Sequence
  source: /note="Description of Artificial Sequence: Synthetic oligonucleotide"
gagaatgggcattcttttacg

SEQ ID NO: 15986 - DNA, 21 bp, Artificial Sequence
  source: /note="Description of Artificial Sequence: Synthetic oligonucleotide"
gagaatgggcgtacggagatt

SEQ ID NO: 15987 - DNA, 21 bp, Artificial Sequence
  source: /note="Description of Artificial Sequence: Synthetic oligonucleotide"
gagaataagccggggtctcct

SEQ ID NO: 15988 - DNA, 21 bp, Artificial Sequence
  source: /note="Description of Artificial Sequence: Synthetic oligonucleotide"
gagaatatggcttatctgagt

SEQ ID NO: 15989 - DNA, 21 bp, Artificial Sequence
  source: /note="Description of Artificial Sequence: Synthetic oligonucleotide"
gagaatccgggtagtgcttct

SEQ ID NO: 15990 - DNA, 21 bp, Artificial Sequence
  source: /note="Description of Artificial Sequence: Synthetic oligonucleotide"
gagaatccgcctcgtgagcct

SEQ ID NO: 15991 - DNA, 21 bp, Artificial Sequence
  source: /note="Description of Artificial Sequence: Synthetic oligonucleotide"
gagaatccgcgtggtagtgtt

SEQ ID NO: 15992 - DNA, 21 bp, Artificial Sequence
  source: /note="Description of Artificial Sequence: Synthetic oligonucleotide"
gagaatcctacgatgtatagt

SEQ ID NO: 15993 - DNA, 21 bp, Artificial Sequence
  source: /note="Description of Artificial Sequence: Synthetic oligonucleotide"
gagaatcagtatcaggatagt

SEQ ID NO: 15994 - DNA, 21 bp, Artificial Sequence
  source: /note="Description of Artificial Sequence: Synthetic oligonucleotide"
gagaatcgtctgaagaatttt

SEQ ID NO: 15995 - DNA, 21 bp, Artificial Sequence
  source: /note="Description of Artificial Sequence: Synthetic oligonucleotide"
gagaataggtcgggtgaggat

SEQ ID NO: 15996 - DNA, 21 bp, Artificial Sequence
  source: /note="Description of Artificial Sequence: Synthetic oligonucleotide"
gagaatagttcgctggttgat

SEQ ID NO: 15997 - DNA, 21 bp, Artificial Sequence
  source: /note="Description of Artificial Sequence: Synthetic oligonucleotide"
gagaatacgtttagttctcgg

SEQ ID NO: 15998 - DNA, 21 bp, Artificial Sequence
  source: /note="Description of Artificial Sequence: Synthetic oligonucleotide"
gagaatactattacgagtctt

SEQ ID NO: 15999 - DNA, 21 bp, Artificial Sequence
  source: /note="Description of Artificial Sequence: Synthetic oligonucleotide"
gagaatactttgcgtctggat

SEQ ID NO: 16000 - DNA, 21 bp, Artificial Sequence
  source: /note="Description of Artificial Sequence: Synthetic oligonucleotide"
gagaatgttaagcctgggtgg

SEQ ID NO: 16001 - DNA, 21 bp, Artificial Sequence
  source: /note="Description of Artificial Sequence: Synthetic oligonucleotide"
gagcctgctgcgcgtgctgtt

SEQ ID NO: 16002 - DNA, 21 bp, Artificial Sequence
  source: /note="Description of Artificial Sequence: Synthetic oligonucleotide"
gagccggctgatcgtactcag

SEQ ID NO: 16003 - DNA, 21 bp, Artificial Sequence
  source: /note="Description of Artificial Sequence: Synthetic oligonucleotide"
gagccggcggggcctcggctt

SEQ ID NO: 16004 - DNA, 21 bp, Artificial Sequence
  source: /note="Description of Artificial Sequence: Synthetic oligonucleotide"
gagcctgcgctgccgtatgct

SEQ ID NO: 16005 - DNA, 21 bp, Artificial Sequence
  source: /note="Description of Artificial Sequence: Synthetic oligonucleotide"
gagccggcgacggggtcgtct

SEQ ID NO: 16006 - DNA, 21 bp, Artificial Sequence
  source: /note="Description of Artificial Sequence: Synthetic oligonucleotide"
gagccggattcggcttattcg

SEQ ID NO: 16007 - DNA, 21 bp, Artificial Sequence
  source: /note="Description of Artificial Sequence: Synthetic oligonucleotide"
gagccgtttgatgctaagact

SEQ ID NO: 16008 - DNA, 21 bp, Artificial Sequence
  source: /note="Description of Artificial Sequence: Synthetic oligonucleotide"
gagcctttttcgaatagtcct

SEQ ID NO: 16009 - DNA, 21 bp, Artificial Sequence
  source: /note="Description of Artificial Sequence: Synthetic oligonucleotide"
gagccgggtgggaatcatctt

SEQ ID NO: 16010 - DNA, 21 bp, Artificial Sequence
  source: /note="Description of Artificial Sequence: Synthetic oligonucleotide"
gagcctgggcatgctcgggcg

SEQ ID NO: 16011 - DNA, 21 bp, Artificial Sequence
  source: /note="Description of Artificial Sequence: Synthetic oligonucleotide"
gagcctggtcggactgggttt

SEQ ID NO: 16012 - DNA, 21 bp, Artificial Sequence
  source: /note="Description of Artificial Sequence: Synthetic oligonucleotide"
gagccgggtgtggttgggtgt

SEQ ID NO: 16013 - DNA, 21 bp, Artificial Sequence
  source: /note="Description of Artificial Sequence: Synthetic oligonucleotide"
gagccgcatgctcctgagcgt

SEQ ID NO: 16014 - DNA, 21 bp, Artificial Sequence
  source: /note="Description of Artificial Sequence: Synthetic oligonucleotide"
gagccgcatgttccgggggct

SEQ ID NO: 16015 - DNA, 21 bp, Artificial Sequence
  source: /note="Description of Artificial Sequence: Synthetic oligonucleotide"
gagcctaagcatcagttttcg

SEQ ID NO: 16016 - DNA, 21 bp, Artificial Sequence
  source: /note="Description of Artificial Sequence: Synthetic oligonucleotide"
gagcctaagagggggtggtct

SEQ ID NO: 16017 - DNA, 21 bp, Artificial Sequence
  source: /note="Description of Artificial Sequence: Synthetic oligonucleotide"
gagcctaagtctgcttctatt

SEQ ID NO: 16018 - DNA, 21 bp, Artificial Sequence
  source: /note="Description of Artificial Sequence: Synthetic oligonucleotide"
gagcctcttaatagtagtggt

SEQ ID NO: 16019 - DNA, 21 bp, Artificial Sequence
  source: /note="Description of Artificial Sequence: Synthetic oligonucleotide"
gagccgctgtcggctaatagg

SEQ ID NO: 16020 - DNA, 21 bp, Artificial Sequence
  source: /note="Description of Artificial Sequence: Synthetic oligonucleotide"
gagccgaatgctactagtgtt

SEQ ID NO: 16021 - DNA, 21 bp, Artificial Sequence
  source: /note="Description of Artificial Sequence: Synthetic oligonucleotide"
gagcctaatcatccggtgtcg

SEQ ID NO: 16022 - DNA, 21 bp, Artificial Sequence
  source: /note="Description of Artificial Sequence: Synthetic oligonucleotide"
gagcctccgtcgtctctgaag

SEQ ID NO: 16023 - DNA, 21 bp, Artificial Sequence
  source: /note="Description of Artificial Sequence: Synthetic oligonucleotide"
gagcctcagcgtcctttgcgt

SEQ ID NO: 16024 - DNA, 21 bp, Artificial Sequence
  source: /note="Description of Artificial Sequence: Synthetic oligonucleotide"
gagccttctaatgagtcggct

SEQ ID NO: 16025 - DNA, 21 bp, Artificial Sequence
  source: /note="Description of Artificial Sequence: Synthetic oligonucleotide"
gagccgagtaattcgcatgcg

SEQ ID NO: 16026 - DNA, 21 bp, Artificial Sequence
  source: /note="Description of Artificial Sequence: Synthetic oligonucleotide"
gagccgtcttatctgccgtcg

SEQ ID NO: 16027 - DNA, 21 bp, Artificial Sequence
  source: /note="Description of Artificial Sequence: Synthetic oligonucleotide"
gagcctactgagcggattagt

SEQ ID NO: 16028 - DNA, 21 bp, Artificial Sequence
  source: /note="Description of Artificial Sequence: Synthetic oligonucleotide"
gagcctacgatttatttgact

SEQ ID NO: 16029 - DNA, 21 bp, Artificial Sequence
  source: /note="Description of Artificial Sequence: Synthetic oligonucleotide"
gagccgactatgaggagtatt

SEQ ID NO: 16030 - DNA, 21 bp, Artificial Sequence
  source: /note="Description of Artificial Sequence: Synthetic oligonucleotide"
gagcctactaggccggcgacg

SEQ ID NO: 16031 - DNA, 21 bp, Artificial Sequence
  source: /note="Description of Artificial Sequence: Synthetic oligonucleotide"
gagccgactaggtctagtagt

SEQ ID NO: 16032 - DNA, 21 bp, Artificial Sequence
  source: /note="Description of Artificial Sequence: Synthetic oligonucleotide"
gagcctactcggactaagatg

SEQ ID NO: 16033 - DNA, 21 bp, Artificial Sequence
  source: /note="Description of Artificial Sequence: Synthetic oligonucleotide"
gagccggttattgggtttcct

SEQ ID NO: 16034 - DNA, 21 bp, Artificial Sequence
  source: /note="Description of Artificial Sequence: Synthetic oligonucleotide"
gagcctgtgtcgactgcggcg

SEQ ID NO: 16035 - DNA, 21 bp, Artificial Sequence
  source: /note="Description of Artificial Sequence: Synthetic oligonucleotide"
gagccttatctgagtgcgaag

SEQ ID NO: 16036 - DNA, 21 bp, Artificial Sequence
  source: /note="Description of Artificial Sequence: Synthetic oligonucleotide"
gagccttattcgccggctatt

SEQ ID NO: 16037 - DNA, 21 bp, Artificial Sequence
  source: /note="Description of Artificial Sequence: Synthetic oligonucleotide"
gagcaggctgctctttcgttt

SEQ ID NO: 16038 - DNA, 21 bp, Artificial Sequence
  source: /note="Description of Artificial Sequence: Synthetic oligonucleotide"
gagcaggctctgaagccggag

SEQ ID NO: 16039 - DNA, 21 bp, Artificial Sequence
  source: /note="Description of Artificial Sequence: Synthetic oligonucleotide"
gagcaggcgcgtctggatgtg

SEQ ID NO: 16040 - DNA, 21 bp, Artificial Sequence
  source: /note="Description of Artificial Sequence: Synthetic oligonucleotide"
gagcaggcttcttttaagatt

SEQ ID NO: 16041 - DNA, 21 bp, Artificial Sequence
  source: /note="Description of Artificial Sequence: Synthetic oligonucleotide"
gagcagtttgcggcgccggtg

SEQ ID NO: 16042 - DNA, 21 bp, Artificial Sequence
  source: /note="Description of Artificial Sequence: Synthetic oligonucleotide"
gagcagggtacgcctagtgcg

SEQ ID NO: 16043 - DNA, 21 bp, Artificial Sequence
  source: /note="Description of Artificial Sequence: Synthetic oligonucleotide"
gagcagaagccgctgactcgt

SEQ ID NO: 16044 - DNA, 21 bp, Artificial Sequence
  source: /note="Description of Artificial Sequence: Synthetic oligonucleotide"
gagcagttgaaggattatgag

SEQ ID NO: 16045 - DNA, 21 bp, Artificial Sequence
  source: /note="Description of Artificial Sequence: Synthetic oligonucleotide"
gagcagaattcgaggggtctt

SEQ ID NO: 16046 - DNA, 21 bp, Artificial Sequence
  source: /note="Description of Artificial Sequence: Synthetic oligonucleotide"
gagcagcctaagtatagtaag

SEQ ID NO: 16047 - DNA, 21 bp, Artificial Sequence
  source: /note="Description of Artificial Sequence: Synthetic oligonucleotide"
gagcagcagtgtcctcggtct

SEQ ID NO: 16048 - DNA, 21 bp, Artificial Sequence
  source: /note="Description of Artificial Sequence: Synthetic oligonucleotide"
gagcagagggatcgtaatggt

SEQ ID NO: 16049 - DNA, 21 bp, Artificial Sequence
  source: /note="Description of Artificial Sequence: Synthetic oligonucleotide"
gagcagcgtggtacgattctg

SEQ ID NO: 16050 - DNA, 21 bp, Artificial Sequence
  source: /note="Description of Artificial Sequence: Synthetic oligonucleotide"
gagcagaggttgtctcagtct

SEQ ID NO: 16051 - DNA, 21 bp, Artificial Sequence
  source: /note="Description of Artificial Sequence: Synthetic oligonucleotide"
gagcagaggcgttcggagact

SEQ ID NO: 16052 - DNA, 21 bp, Artificial Sequence
  source: /note="Description of Artificial Sequence: Synthetic oligonucleotide"
gagcagtcttatcgggattct

SEQ ID NO: 16053 - DNA, 21 bp, Artificial Sequence
  source: /note="Description of Artificial Sequence: Synthetic oligonucleotide"
gagcagactggtcatcgtgct

SEQ ID NO: 16054 - DNA, 21 bp, Artificial Sequence
  source: /note="Description of Artificial Sequence: Synthetic oligonucleotide"
gagcagtatcgtgataatagt

SEQ ID NO: 16055 - DNA, 21 bp, Artificial Sequence
  source: /note="Description of Artificial Sequence: Synthetic oligonucleotide"
gagcgtgctgctgggctgcgt

SEQ ID NO: 16056 - DNA, 21 bp, Artificial Sequence
  source: /note="Description of Artificial Sequence: Synthetic oligonucleotide"
gagcgtgcggggcctcatgat

SEQ ID NO: 16057 - DNA, 21 bp, Artificial Sequence
  source: /note="Description of Artificial Sequence: Synthetic oligonucleotide"
gagcgggcgcctccgggtctt

SEQ ID NO: 16058 - DNA, 21 bp, Artificial Sequence
  source: /note="Description of Artificial Sequence: Synthetic oligonucleotide"
gagcgggattcgaggaaggct

SEQ ID NO: 16059 - DNA, 21 bp, Artificial Sequence
  source: /note="Description of Artificial Sequence: Synthetic oligonucleotide"
gagcggtttgagggtttgcgg

SEQ ID NO: 16060 - DNA, 21 bp, Artificial Sequence
  source: /note="Description of Artificial Sequence: Synthetic oligonucleotide"
gagcggtttttgccggagctt

SEQ ID NO: 16061 - DNA, 21 bp, Artificial Sequence
  source: /note="Description of Artificial Sequence: Synthetic oligonucleotide"
gagcgttttacgtctgttcct

SEQ ID NO: 16062 - DNA, 21 bp, Artificial Sequence
  source: /note="Description of Artificial Sequence: Synthetic oligonucleotide"
gagcgtgggatgactactccg

SEQ ID NO: 16063 - DNA, 21 bp, Artificial Sequence
  source: /note="Description of Artificial Sequence: Synthetic oligonucleotide"
gagcgtggtgtgattcatccg

SEQ ID NO: 16064 - DNA, 21 bp, Artificial Sequence
  source: /note="Description of Artificial Sequence: Synthetic oligonucleotide"
gagcgtcatgctgatatgact

SEQ ID NO: 16065 - DNA, 21 bp, Artificial Sequence
  source: /note="Description of Artificial Sequence: Synthetic oligonucleotide"
gagcgtcatgatcttccgcgg

SEQ ID NO: 16066 - DNA, 21 bp, Artificial Sequence
  source: /note="Description of Artificial Sequence: Synthetic oligonucleotide"
gagcggcatgatgtgggtccg

SEQ ID NO: 16067 - DNA, 21 bp, Artificial Sequence
  source: /note="Description of Artificial Sequence: Synthetic oligonucleotide"
gagcggcatattaggatggag

SEQ ID NO: 16068 - DNA, 21 bp, Artificial Sequence
  source: /note="Description of Artificial Sequence: Synthetic oligonucleotide"
gagcggcatagggttattgat

SEQ ID NO: 16069 - DNA, 21 bp, Artificial Sequence
  source: /note="Description of Artificial Sequence: Synthetic oligonucleotide"
gagcggattaggactcctgag

SEQ ID NO: 16070 - DNA, 21 bp, Artificial Sequence
  source: /note="Description of Artificial Sequence: Synthetic oligonucleotide"
gagcggatttcgccttcgatt

SEQ ID NO: 16071 - DNA, 21 bp, Artificial Sequence
  source: /note="Description of Artificial Sequence: Synthetic oligonucleotide"
gagcggaaggggcttgggttg

SEQ ID NO: 16072 - DNA, 21 bp, Artificial Sequence
  source: /note="Description of Artificial Sequence: Synthetic oligonucleotide"
gagcgtaagaatcagagtcct

SEQ ID NO: 16073 - DNA, 21 bp, Artificial Sequence
  source: /note="Description of Artificial Sequence: Synthetic oligonucleotide"
gagaggaagactccgtcggat

SEQ ID NO: 16074 - DNA, 21 bp, Artificial Sequence
  source: /note="Description of Artificial Sequence: Synthetic oligonucleotide"
gagaggcttgagagttctctg

SEQ ID NO: 16075 - DNA, 21 bp, Artificial Sequence
  source: /note="Description of Artificial Sequence: Synthetic oligonucleotide"
gagcgtttgtcgcctgtggcg

SEQ ID NO: 16076 - DNA, 21 bp, Artificial Sequence
  source: /note="Description of Artificial Sequence: Synthetic oligonucleotide"
gagcgtttgagttcggagccg

SEQ ID NO: 16077 - DNA, 21 bp, Artificial Sequence
  source: /note="Description of Artificial Sequence: Synthetic oligonucleotide"
gagcggatggctgcgcctttt

SEQ ID NO: 16078 - DNA, 21 bp, Artificial Sequence
  source: /note="Description of Artificial Sequence: Synthetic oligonucleotide"
gagaggaattttgagtcgggg

SEQ ID NO: 16079 - DNA, 21 bp, Artificial Sequence
  source: /note="Description of Artificial Sequence: Synthetic oligonucleotide"
gagcggaatggtcttccggcg

SEQ ID NO: 16080 - DNA, 21 bp, Artificial Sequence
  source: /note="Description of Artificial Sequence: Synthetic oligonucleotide"
gagaggaatcgggtggattct

SEQ ID NO: 16081 - DNA, 21 bp, Artificial Sequence
  source: /note="Description of Artificial Sequence: Synthetic oligonucleotide"
gagcgtaattctcctgttgcg

SEQ ID NO: 16082 - DNA, 21 bp, Artificial Sequence
  source: /note="Description of Artificial Sequence: Synthetic oligonucleotide"
gagcgtcctgatggtccttcg

SEQ ID NO: 16083 - DNA, 21 bp, Artificial Sequence
  source: /note="Description of Artificial Sequence: Synthetic oligonucleotide"
gagcggcctcctcttgtgatg

SEQ ID NO: 16084 - DNA, 21 bp, Artificial Sequence
  source: /note="Description of Artificial Sequence: Synthetic oligonucleotide"
gagaggccttatgctacggtg

SEQ ID NO: 16085 - DNA, 21 bp, Artificial Sequence
  source: /note="Description of Artificial Sequence: Synthetic oligonucleotide"
gagcggcaggcgtttcatgag

SEQ ID NO: 16086 - DNA, 21 bp, Artificial Sequence
  source: /note="Description of Artificial Sequence: Synthetic oligonucleotide"
gagcggcagccgatgattaag

SEQ ID NO: 16087 - DNA, 21 bp, Artificial Sequence
  source: /note="Description of Artificial Sequence: Synthetic oligonucleotide"
gagcggcagcgtgattctgct

SEQ ID NO: 16088 - DNA, 21 bp, Artificial Sequence
  source: /note="Description of Artificial Sequence: Synthetic oligonucleotide"
gagcggcagactacgttggct

SEQ ID NO: 16089 - DNA, 21 bp, Artificial Sequence
  source: /note="Description of Artificial Sequence: Synthetic oligonucleotide"
gagcgtcgtattggggcgtct

SEQ ID NO: 16090 - DNA, 21 bp, Artificial Sequence
  source: /note="Description of Artificial Sequence: Synthetic oligonucleotide"
gagaggaggccgggtacgtct

SEQ ID NO: 16091 - DNA, 21 bp, Artificial Sequence
  source: /note="Description of Artificial Sequence: Synthetic oligonucleotide"
gagcggtcgaagccggttgcg

SEQ ID NO: 16092 - DNA, 21 bp, Artificial Sequence
  source: /note="Description of Artificial Sequence: Synthetic oligonucleotide"
gagaggtctcgtggtcagcag

SEQ ID NO: 16093 - DNA, 21 bp, Artificial Sequence
  source: /note="Description of Artificial Sequence: Synthetic oligonucleotide"
gagaggtcgtctcctcagcct

SEQ ID NO: 16094 - DNA, 21 bp, Artificial Sequence
  source: /note="Description of Artificial Sequence: Synthetic oligonucleotide"
gagcgttcttctcgggagacg

SEQ ID NO: 16095 - DNA, 21 bp, Artificial Sequence
  source: /note="Description of Artificial Sequence: Synthetic oligonucleotide"
gagcggacggctgtgggtgtg

SEQ ID NO: 16096 - DNA, 21 bp, Artificial Sequence
  source: /note="Description of Artificial Sequence: Synthetic oligonucleotide"
gagaggactaagcctcctact

SEQ ID NO: 16097 - DNA, 21 bp, Artificial Sequence
  source: /note="Description of Artificial Sequence: Synthetic oligonucleotide"
gagcggtatccgtctatttcg

SEQ ID NO: 16098 - DNA, 21 bp, Artificial Sequence
  source: /note="Description of Artificial Sequence: Synthetic oligonucleotide"
gagtctgcttttaagcgttgt

SEQ ID NO: 16099 - DNA, 21 bp, Artificial Sequence
  source: /note="Description of Artificial Sequence: Synthetic oligonucleotide"
gagtcggcgtggatgcaggat

SEQ ID NO: 16100 - DNA, 21 bp, Artificial Sequence
  source: /note="Description of Artificial Sequence: Synthetic oligonucleotide"
gagtcgtttactggggtgcat

SEQ ID NO: 16101 - DNA, 21 bp, Artificial Sequence
  source: /note="Description of Artificial Sequence: Synthetic oligonucleotide"
gagtctggtgataagttgagg

SEQ ID NO: 16102 - DNA, 21 bp, Artificial Sequence
  source: /note="Description of Artificial Sequence: Synthetic oligonucleotide"
gagtctgggattttgcagctt

SEQ ID NO: 16103 - DNA, 21 bp, Artificial Sequence
  source: /note="Description of Artificial Sequence: Synthetic oligonucleotide"
gagtctggtcttactcagact

SEQ ID NO: 16104 - DNA, 21 bp, Artificial Sequence
  source: /note="Description of Artificial Sequence: Synthetic oligonucleotide"
gagagtggtcggcctatggtt

SEQ ID NO: 16105 - DNA, 21 bp, Artificial Sequence
  source: /note="Description of Artificial Sequence: Synthetic oligonucleotide"
gagtcgattacgcggtctgtt

SEQ ID NO: 16106 - DNA, 21 bp, Artificial Sequence
  source: /note="Description of Artificial Sequence: Synthetic oligonucleotide"
gagtcgattgtgggtaggagg

SEQ ID NO: 16107 - DNA, 21 bp, Artificial Sequence
  source: /note="Description of Artificial Sequence: Synthetic oligonucleotide"
gagtcgaaggagctgacttct

SEQ ID NO: 16108 - DNA, 21 bp, Artificial Sequence
  source: /note="Description of Artificial Sequence: Synthetic oligonucleotide"
gagtctaagggtgcgcatgcg

SEQ ID NO: 16109 - DNA, 21 bp, Artificial Sequence
  source: /note="Description of Artificial Sequence: Synthetic oligonucleotide"
gagtcgaagcattttagtccg

SEQ ID NO: 16110 - DNA, 21 bp, Artificial Sequence
  source: /note="Description of Artificial Sequence: Synthetic oligonucleotide"
gagtctaagattggtcggcct

SEQ ID NO: 16111 - DNA, 21 bp, Artificial Sequence
  source: /note="Description of Artificial Sequence: Synthetic oligonucleotide"
gagtcgaagcctaattcgcgt

SEQ ID NO: 16112 - DNA, 21 bp, Artificial Sequence
  source: /note="Description of Artificial Sequence: Synthetic oligonucleotide"
gagtcgcctgatcggtctact

SEQ ID NO: 16113 - DNA, 21 bp, Artificial Sequence
  source: /note="Description of Artificial Sequence: Synthetic oligonucleotide"
gagtcgccgttttctgtgccg

SEQ ID NO: 16114 - DNA, 21 bp, Artificial Sequence
  source: /note="Description of Artificial Sequence: Synthetic oligonucleotide"
gagtctcctaaggcggatccg

SEQ ID NO: 16115 - DNA, 21 bp, Artificial Sequence
  source: /note="Description of Artificial Sequence: Synthetic oligonucleotide"
gagagtccgatggttagtccg

SEQ ID NO: 16116 - DNA, 21 bp, Artificial Sequence
  source: /note="Description of Artificial Sequence: Synthetic oligonucleotide"
gagtctcaggtgctggtttat

SEQ ID NO: 16117 - DNA, 21 bp, Artificial Sequence
  source: /note="Description of Artificial Sequence: Synthetic oligonucleotide"
gagtcgcggcaggcgtttcct

SEQ ID NO: 16118 - DNA, 21 bp, Artificial Sequence
  source: /note="Description of Artificial Sequence: Synthetic oligonucleotide"
gagtctcgttcggcggcttat

SEQ ID NO: 16119 - DNA, 21 bp, Artificial Sequence
  source: /note="Description of Artificial Sequence: Synthetic oligonucleotide"
gagtctcgttcggctttgccg

SEQ ID NO: 16120 - DNA, 21 bp, Artificial Sequence
  source: /note="Description of Artificial Sequence: Synthetic oligonucleotide"
gagagtcgtgttgggtatatt

SEQ ID NO: 16121 - DNA, 21 bp, Artificial Sequence
  source: /note="Description of Artificial Sequence: Synthetic oligonucleotide"
gagtcgcgggtgtcgttgggg

SEQ ID NO: 16122 - DNA, 21 bp, Artificial Sequence
  source: /note="Description of Artificial Sequence: Synthetic oligonucleotide"
gagtcttctcagcatttggat

SEQ ID NO: 16123 - DNA, 21 bp, Artificial Sequence
  source: /note="Description of Artificial Sequence: Synthetic oligonucleotide"
gagtcgtctcgtgagtttcat

SEQ ID NO: 16124 - DNA, 21 bp, Artificial Sequence
  source: /note="Description of Artificial Sequence: Synthetic oligonucleotide"
gagtcgtctcgtgagttgcat

SEQ ID NO: 16125 - DNA, 21 bp, Artificial Sequence
  source: /note="Description of Artificial Sequence: Synthetic oligonucleotide"
gagtcgtctagtgagttgcat

SEQ ID NO: 16126 - DNA, 21 bp, Artificial Sequence
  source: /note="Description of Artificial Sequence: Synthetic oligonucleotide"
gagtctagttcgcggatgttg

SEQ ID NO: 16127 - DNA, 21 bp, Artificial Sequence
  source: /note="Description of Artificial Sequence: Synthetic oligonucleotide"
gagtcgactgctcttaagagg

SEQ ID NO: 16128 - DNA, 21 bp, Artificial Sequence
  source: /note="Description of Artificial Sequence: Synthetic oligonucleotide"
gagtcgacgtcgagtaggtct

SEQ ID NO: 16129 - DNA, 21 bp, Artificial Sequence
  source: /note="Description of Artificial Sequence: Synthetic oligonucleotide"
gagtcggttgagaatgatagt

SEQ ID NO: 16130 - DNA, 21 bp, Artificial Sequence
  source: /note="Description of Artificial Sequence: Synthetic oligonucleotide"
gagtctgtttttaaggcggct

SEQ ID NO: 16131 - DNA, 21 bp, Artificial Sequence
  source: /note="Description of Artificial Sequence: Synthetic oligonucleotide"
gagtcggtgggttatgctgat

SEQ ID NO: 16132 - DNA, 21 bp, Artificial Sequence
  source: /note="Description of Artificial Sequence: Synthetic oligonucleotide"
gagtctgtgaggcttcagaat

SEQ ID NO: 16133 - DNA, 21 bp, Artificial Sequence
  source: /note="Description of Artificial Sequence: Synthetic oligonucleotide"
gagagttatactgagagtctt

SEQ ID NO: 16134 - DNA, 21 bp, Artificial Sequence
  source: /note="Description of Artificial Sequence: Synthetic oligonucleotide"
gagactgctaagtctggtcag

SEQ ID NO: 16135 - DNA, 21 bp, Artificial Sequence
  source: /note="Description of Artificial Sequence: Synthetic oligonucleotide"
gagacggatcggaagttgtcg

SEQ ID NO: 16136 - DNA, 21 bp, Artificial Sequence
  source: /note="Description of Artificial Sequence: Synthetic oligonucleotide"
gagactgatcgtaatgctagt

SEQ ID NO: 16137 - DNA, 21 bp, Artificial Sequence
  source: /note="Description of Artificial Sequence: Synthetic oligonucleotide"
gagacggagcatacggtggtg

SEQ ID NO: 16138 - DNA, 21 bp, Artificial Sequence
  source: /note="Description of Artificial Sequence: Synthetic oligonucleotide"
gagacgtttacgcgttctgtt

SEQ ID NO: 16139 - DNA, 21 bp, Artificial Sequence
  source: /note="Description of Artificial Sequence: Synthetic oligonucleotide"
gagacgggtaaggatcggatg

SEQ ID NO: 16140 - DNA, 21 bp, Artificial Sequence
  source: /note="Description of Artificial Sequence: Synthetic oligonucleotide"
gagacggggtctcatacgact

SEQ ID NO: 16141 - DNA, 21 bp, Artificial Sequence
  source: /note="Description of Artificial Sequence: Synthetic oligonucleotide"
gagactggttcgcgggcggtt

SEQ ID NO: 16142 - DNA, 21 bp, Artificial Sequence
  source: /note="Description of Artificial Sequence: Synthetic oligonucleotide"
gagacgaagttttctatgggg

SEQ ID NO: 16143 - DNA, 21 bp, Artificial Sequence
  source: /note="Description of Artificial Sequence: Synthetic oligonucleotide"
gagactaagggttctgttgcg

SEQ ID NO: 16144 - DNA, 21 bp, Artificial Sequence
  source: /note="Description of Artificial Sequence: Synthetic oligonucleotide"
gagactaagaaggattatagt

SEQ ID NO: 16145 - DNA, 21 bp, Artificial Sequence
  source: /note="Description of Artificial Sequence: Synthetic oligonucleotide"
gagacgcttgaggttagtttg

SEQ ID NO: 16146 - DNA, 21 bp, Artificial Sequence
  source: /note="Description of Artificial Sequence: Synthetic oligonucleotide"
gagacgttgtctggtaatgag

SEQ ID NO: 16147 - DNA, 21 bp, Artificial Sequence
  source: /note="Description of Artificial Sequence: Synthetic oligonucleotide"
gagacgatgcgtaaggatcct

SEQ ID NO: 16148 - DNA, 21 bp, Artificial Sequence
  source: /note="Description of Artificial Sequence: Synthetic oligonucleotide"
gagacgaatttttcgggtgct

SEQ ID NO: 16149 - DNA, 21 bp, Artificial Sequence
  source: /note="Description of Artificial Sequence: Synthetic oligonucleotide"
gagactaatccgcgttgttcg

SEQ ID NO: 16150 - DNA, 21 bp, Artificial Sequence
  source: /note="Description of Artificial Sequence: Synthetic oligonucleotide"
gagacgccttttaagccgtct

SEQ ID NO: 16151 - DNA, 21 bp, Artificial Sequence
  source: /note="Description of Artificial Sequence: Synthetic oligonucleotide"
gagacgcctattgattctgat

SEQ ID NO: 16152 - DNA, 21 bp, Artificial Sequence
  source: /note="Description of Artificial Sequence: Synthetic oligonucleotide"
gagactccgaatcattcgcgg

SEQ ID NO: 16153 - DNA, 21 bp, Artificial Sequence
  source: /note="Description of Artificial Sequence: Synthetic oligonucleotide"
gagactcgtggtcatctgatt

SEQ ID NO: 16154 - DNA, 21 bp, Artificial Sequence
  source: /note="Description of Artificial Sequence: Synthetic oligonucleotide"
gagactcggctggtgcctacg

SEQ ID NO: 16155 - DNA, 21 bp, Artificial Sequence
  source: /note="Description of Artificial Sequence: Synthetic oligonucleotide"
gagacgcgtaatctgcatggg

SEQ ID NO: 16156 - DNA, 21 bp, Artificial Sequence
  source: /note="Description of Artificial Sequence: Synthetic oligonucleotide"
gagactaggaatcagtttggg

SEQ ID NO: 16157 - DNA, 21 bp, Artificial Sequence
  source: /note="Description of Artificial Sequence: Synthetic oligonucleotide"
gagactcgtagtactcgtgag

SEQ ID NO: 16158 - DNA, 21 bp, Artificial Sequence
  source: /note="Description of Artificial Sequence: Synthetic oligonucleotide"
gagacgcggtatccggatatg

SEQ ID NO: 16159 - DNA, 21 bp, Artificial Sequence
  source: /note="Description of Artificial Sequence: Synthetic oligonucleotide"
gagacgtctcattcggtgtct

SEQ ID NO: 16160 - DNA, 21 bp, Artificial Sequence
  source: /note="Description of Artificial Sequence: Synthetic oligonucleotide"
gagactagtcgggcgagtact

SEQ ID NO: 16161 - DNA, 21 bp, Artificial Sequence
  source: /note="Description of Artificial Sequence: Synthetic oligonucleotide"
gagacgtcgaggcctactgtt

SEQ ID NO: 16162 - DNA, 21 bp, Artificial Sequence
  source: /note="Description of Artificial Sequence: Synthetic oligonucleotide"
gagacgtcttcggcttatttg

SEQ ID NO: 16163 - DNA, 21 bp, Artificial Sequence
  source: /note="Description of Artificial Sequence: Synthetic oligonucleotide"
gagacgactcagaattatatt

SEQ ID NO: 16164 - DNA, 21 bp, Artificial Sequence
  source: /note="Description of Artificial Sequence: Synthetic oligonucleotide"
gagacgacgtctcttcctcgg

SEQ ID NO: 16165 - DNA, 21 bp, Artificial Sequence
  source: /note="Description of Artificial Sequence: Synthetic oligonucleotide"
gagactactgttcaggcttct

SEQ ID NO: 16166 - DNA, 21 bp, Artificial Sequence
  source: /note="Description of Artificial Sequence: Synthetic oligonucleotide"
gagacggtgtttcatgtggct

SEQ ID NO: 16167 - DNA, 21 bp, Artificial Sequence
  source: /note="Description of Artificial Sequence: Synthetic oligonucleotide"
gaggtggctgtgcagccgatg

SEQ ID NO: 16168 - DNA, 21 bp, Artificial Sequence
  source: /note="Description of Artificial Sequence: Synthetic oligonucleotide"
gaggtggggaggaattctact

SEQ ID NO: 16169 - DNA, 21 bp, Artificial Sequence
  source: /note="Description of Artificial Sequence: Synthetic oligonucleotide"
gaggttcatccgggtcaggct

SEQ ID NO: 16170 - DNA, 21 bp, Artificial Sequence
  source: /note="Description of Artificial Sequence: Synthetic oligonucleotide"
gaggttaaggagcagactgtg

SEQ ID NO: 16171 - DNA, 21 bp, Artificial Sequence
  source: /note="Description of Artificial Sequence: Synthetic oligonucleotide"
gaggttaagagttttagtagt

SEQ ID NO: 16172 - DNA, 21 bp, Artificial Sequence
  source: /note="Description of Artificial Sequence: Synthetic oligonucleotide"
gaggtgccggcggcgaggtcg

SEQ ID NO: 16173 - DNA, 21 bp, Artificial Sequence
  source: /note="Description of Artificial Sequence: Synthetic oligonucleotide"
gaggttccgaatagtagtgct

SEQ ID NO: 16174 - DNA, 21 bp, Artificial Sequence
  source: /note="Description of Artificial Sequence: Synthetic oligonucleotide"
gaggttcagctgcctgcgcgg

SEQ ID NO: 16175 - DNA, 21 bp, Artificial Sequence
  source: /note="Description of Artificial Sequence: Synthetic oligonucleotide"
gaggttcgtaagggtgcgcag

SEQ ID NO: 16176 - DNA, 21 bp, Artificial Sequence
  source: /note="Description of Artificial Sequence: Synthetic oligonucleotide"
gaggtgcgtctgtctaatgct

SEQ ID NO: 16177 - DNA, 21 bp, Artificial Sequence
  source: /note="Description of Artificial Sequence: Synthetic oligonucleotide"
gaggtttcgtttttgcctcct

SEQ ID NO: 16178 - DNA, 21 bp, Artificial Sequence
  source: /note="Description of Artificial Sequence: Synthetic oligonucleotide"
gaggtgagtctgtcgacgcgt

SEQ ID NO: 16179 - DNA, 21 bp, Artificial Sequence
  source: /note="Description of Artificial Sequence: Synthetic oligonucleotide"
gaggtgagtatgctgagtaag

SEQ ID NO: 16180 - DNA, 21 bp, Artificial Sequence
  source: /note="Description of Artificial Sequence: Synthetic oligonucleotide"
gaggtgactgggagggcgggt

SEQ ID NO: 16181 - DNA, 21 bp, Artificial Sequence
  source: /note="Description of Artificial Sequence: Synthetic oligonucleotide"
gaggtgacgatgaagcatacg

SEQ ID NO: 16182 - DNA, 21 bp, Artificial Sequence
  source: /note="Description of Artificial Sequence: Synthetic oligonucleotide"
gaggtgactaatccttctgct

SEQ ID NO: 16183 - DNA, 21 bp, Artificial Sequence
  source: /note="Description of Artificial Sequence: Synthetic oligonucleotide"
gaggttactgtgggtttgcct

SEQ ID NO: 16184 - DNA, 21 bp, Artificial Sequence
  source: /note="Description of Artificial Sequence: Synthetic oligonucleotide"
gagtgggcggattcttcgggt

SEQ ID NO: 16185 - DNA, 21 bp, Artificial Sequence
  source: /note="Description of Artificial Sequence: Synthetic oligonucleotide"
gagtggaatcgtcaggctaat

SEQ ID NO: 16186 - DNA, 21 bp, Artificial Sequence
  source: /note="Description of Artificial Sequence: Synthetic oligonucleotide"
gagtatgcgtcgctggggctt

SEQ ID NO: 16187 - DNA, 21 bp, Artificial Sequence
  source: /note="Description of Artificial Sequence: Synthetic oligonucleotide"
gagtatgatcattcgatgctg

SEQ ID NO: 16188 - DNA, 21 bp, Artificial Sequence
  source: /note="Description of Artificial Sequence: Synthetic oligonucleotide"
gagtatattcgtggtaaggag

SEQ ID NO: 16189 - DNA, 21 bp, Artificial Sequence
  source: /note="Description of Artificial Sequence: Synthetic oligonucleotide"
gagtatttggatgagtctggt

SEQ ID NO: 16190 - DNA, 21 bp, Artificial Sequence
  source: /note="Description of Artificial Sequence: Synthetic oligonucleotide"
gagtatctgccgaattcggct

SEQ ID NO: 16191 - DNA, 21 bp, Artificial Sequence
  source: /note="Description of Artificial Sequence: Synthetic oligonucleotide"
gagtatccggcgcatctgact

SEQ ID NO: 16192 - DNA, 21 bp, Artificial Sequence
  source: /note="Description of Artificial Sequence: Synthetic oligonucleotide"
gagtatccgcttaatactggg

SEQ ID NO: 16193 - DNA, 21 bp, Artificial Sequence
  source: /note="Description of Artificial Sequence: Synthetic oligonucleotide"
gagtatcagcggccggatccg

SEQ ID NO: 16194 - DNA, 21 bp, Artificial Sequence
  source: /note="Description of Artificial Sequence: Synthetic oligonucleotide"
gagtattcttttccgaaggag

SEQ ID NO: 16195 - DNA, 21 bp, Artificial Sequence
  source: /note="Description of Artificial Sequence: Synthetic oligonucleotide"
gagtatactccgatttctggt

SEQ ID NO: 16196 - DNA, 21 bp, Artificial Sequence
  source: /note="Description of Artificial Sequence: Synthetic oligonucleotide"
gagtatgttggggttcagagg

SEQ ID NO: 16197 - DNA, 21 bp, Artificial Sequence
  source: /note="Description of Artificial Sequence: Synthetic oligonucleotide"
tttgctgcgaaggatgttact

SEQ ID NO: 16198 - DNA, 21 bp, Artificial Sequence
  source: /note="Description of Artificial Sequence: Synthetic oligonucleotide"
tttgctgcgaagatgccttcg

SEQ ID NO: 16199 - DNA, 21 bp, Artificial Sequence
  source: /note="Description of Artificial Sequence: Synthetic oligonucleotide"
tttgctgcgctgcgggttgat

SEQ ID NO: 16200 - DNA, 21 bp, Artificial Sequence
  source: /note="Description of Artificial Sequence: Synthetic oligonucleotide"
tttgcggctcaggttgaggat

SEQ ID NO: 16201 - DNA, 21 bp, Artificial Sequence
  source: /note="Description of Artificial Sequence: Synthetic oligonucleotide"
tttgcggcttcttctcaggat

SEQ ID NO: 16202 - DNA, 21 bp, Artificial Sequence
  source: /note="Description of Artificial Sequence: Synthetic oligonucleotide"
tttgctgatgctatggttatg

SEQ ID NO: 16203 - DNA, 21 bp, Artificial Sequence
  source: /note="Description of Artificial Sequence: Synthetic oligonucleotide"
tttgctgagaagtctcggggg

SEQ ID NO: 16204 - DNA, 21 bp, Artificial Sequence
  source: /note="Description of Artificial Sequence: Synthetic oligonucleotide"
tttgcggggattgcgcagtat

SEQ ID NO: 16205 - DNA, 21 bp, Artificial Sequence
  source: /note="Description of Artificial Sequence: Synthetic oligonucleotide"
tttgcggggaagcatcagaat

SEQ ID NO: 16206 - DNA, 21 bp, Artificial Sequence
  source: /note="Description of Artificial Sequence: Synthetic oligonucleotide"
tttgcggggctgactcctgtt

SEQ ID NO: 16207 - DNA, 21 bp, Artificial Sequence
  source: /note="Description of Artificial Sequence: Synthetic oligonucleotide"
tttgcggggaattctccgtcg

SEQ ID NO: 16208 - DNA, 21 bp, Artificial Sequence
  source: /note="Description of Artificial Sequence: Synthetic oligonucleotide"
tttgctcatactgcgaggccg

SEQ ID NO: 16209 - DNA, 21 bp, Artificial Sequence
  source: /note="Description of Artificial Sequence: Synthetic oligonucleotide"
tttgctaagcatggtgggccg

SEQ ID NO: 16210 - DNA, 21 bp, Artificial Sequence
  source: /note="Description of Artificial Sequence: Synthetic oligonucleotide"
tttgcgaagccggctagtctt

SEQ ID NO: 16211 - DNA, 21 bp, Artificial Sequence
  source: /note="Description of Artificial Sequence: Synthetic oligonucleotide"
tttgctctggagggtcgttct

SEQ ID NO: 16212 - DNA, 21 bp, Artificial Sequence
  source: /note="Description of Artificial Sequence: Synthetic oligonucleotide"
tttgctctgtcggcttctctt

SEQ ID NO: 16213 - DNA, 21 bp, Artificial Sequence
  source: /note="Description of Artificial Sequence: Synthetic oligonucleotide"
tttgcgatggcgaatgataag

SEQ ID NO: 16214 - DNA, 21 bp, Artificial Sequence
  source: /note="Description of Artificial Sequence: Synthetic oligonucleotide"
tttgcgaatcgggctacgatt

SEQ ID NO: 16215 - DNA, 21 bp, Artificial Sequence
  source: /note="Description of Artificial Sequence: Synthetic oligonucleotide"
tttgctaattctgcggttgag

SEQ ID NO: 16216 - DNA, 21 bp, Artificial Sequence
  source: /note="Description of Artificial Sequence: Synthetic oligonucleotide"
tttgcgccgggtcatgcgatt

SEQ ID NO: 16217 - DNA, 21 bp, Artificial Sequence
  source: /note="Description of Artificial Sequence: Synthetic oligonucleotide"
tttgctccgctgagtcctcat

SEQ ID NO: 16218 - DNA, 21 bp, Artificial Sequence
  source: /note="Description of Artificial Sequence: Synthetic oligonucleotide"
tttgctccgccgccggctttt

SEQ ID NO: 16219 - DNA, 21 bp, Artificial Sequence
  source: /note="Description of Artificial Sequence: Synthetic oligonucleotide"
tttgctccgtctcggaatgat

SEQ ID NO: 16220 - DNA, 21 bp, Artificial Sequence
  source: /note="Description of Artificial Sequence: Synthetic oligonucleotide"
tttgcgcagaagttgagtcct

SEQ ID NO: 16221 - DNA, 21 bp, Artificial Sequence
  source: /note="Description of Artificial Sequence: Synthetic oligonucleotide"
tttgcgcagaagaatctgtcg

SEQ ID NO: 16222 - DNA, 21 bp, Artificial Sequence
  source: /note="Description of Artificial Sequence: Synthetic oligonucleotide"
tttgcgaggaatcctgatgct

SEQ ID NO: 16223 - DNA, 21 bp, Artificial Sequence
  source: /note="Description of Artificial Sequence: Synthetic oligonucleotide"
tttgctcgtcctgattcgatg

SEQ ID NO: 16224 - DNA, 21 bp, Artificial Sequence
  source: /note="Description of Artificial Sequence: Synthetic oligonucleotide"
tttgcgcggagtagtattcct

SEQ ID NO: 16225 - DNA, 21 bp, Artificial Sequence
  source: /note="Description of Artificial Sequence: Synthetic oligonucleotide"
tttgcgagtgctgcgccgagg

SEQ ID NO: 16226 - DNA, 21 bp, Artificial Sequence
  source: /note="Description of Artificial Sequence: Synthetic oligonucleotide"
tttgcgagtgcgcgtgctcag

SEQ ID NO: 16227 - DNA, 21 bp, Artificial Sequence
  source: /note="Description of Artificial Sequence: Synthetic oligonucleotide"
tttgcgtcggggcattttaat

SEQ ID NO: 16228 - DNA, 21 bp, Artificial Sequence
  source: /note="Description of Artificial Sequence: Synthetic oligonucleotide"
tttgcgtctcttgttacgaat

SEQ ID NO: 16229 - DNA, 21 bp, Artificial Sequence
  source: /note="Description of Artificial Sequence: Synthetic oligonucleotide"
tttgcgagttcgcgtaataat

SEQ ID NO: 16230 - DNA, 21 bp, Artificial Sequence
  source: /note="Description of Artificial Sequence: Synthetic oligonucleotide"
tttgcttcttcgagttcgcat

SEQ ID NO: 16231 - DNA, 21 bp, Artificial Sequence
  source: /note="Description of Artificial Sequence: Synthetic oligonucleotide"
tttgcttctgttcgtacggtt

SEQ ID NO: 16232 - DNA, 21 bp, Artificial Sequence
  source: /note="Description of Artificial Sequence: Synthetic oligonucleotide"
tttgcgtcgtatggttcgccg

SEQ ID NO: 16233 - DNA, 21 bp, Artificial Sequence
  source: /note="Description of Artificial Sequence: Synthetic oligonucleotide"
tttgcgacgtcggggtatgct

SEQ ID NO: 16234 - DNA, 21 bp, Artificial Sequence
  source: /note="Description of Artificial Sequence: Synthetic oligonucleotide"
tttgctacttcgactactccg

SEQ ID NO: 16235 - DNA, 21 bp, Artificial Sequence
  source: /note="Description of Artificial Sequence: Synthetic oligonucleotide"
tttgctactactaagcttgat

SEQ ID NO: 16236 - DNA, 21 bp, Artificial Sequence
  source: /note="Description of Artificial Sequence: Synthetic oligonucleotide"
ttttgttctgagcagcatagt

SEQ ID NO: 16237 - DNA, 21 bp, Artificial Sequence
  source: /note="Description of Artificial Sequence: Synthetic oligonucleotide"
tttgatgcgccgcagactagg

SEQ ID NO: 16238 - DNA, 21 bp, Artificial Sequence
  source: /note="Description of Artificial Sequence: Synthetic oligonucleotide"
tttgatgcgtatcataggctt

SEQ ID NO: 16239 - DNA, 21 bp, Artificial Sequence
  source: /note="Description of Artificial Sequence: Synthetic oligonucleotide"
tttgatgattttgctcttgat

SEQ ID NO: 16240 - DNA, 21 bp, Artificial Sequence
  source: /note="Description of Artificial Sequence: Synthetic oligonucleotide"
tttgatgaggctcatgcgcct

SEQ ID NO: 16241 - DNA, 21 bp, Artificial Sequence
  source: /note="Description of Artificial Sequence: Synthetic oligonucleotide"
tttgatgaggatgatcttgct

SEQ ID NO: 16242 - DNA, 21 bp, Artificial Sequence
  source: /note="Description of Artificial Sequence: Synthetic oligonucleotide"
tttgatggtgctaggagtgag

SEQ ID NO: 16243 - DNA, 21 bp, Artificial Sequence
  source: /note="Description of Artificial Sequence: Synthetic oligonucleotide"
tttgatgggattcggccgacg

SEQ ID NO: 16244 - DNA, 21 bp, Artificial Sequence
  source: /note="Description of Artificial Sequence: Synthetic oligonucleotide"
tttgatcatccgtcgtttccg

SEQ ID NO: 16245 - DNA, 21 bp, Artificial Sequence
  source: /note="Description of Artificial Sequence: Synthetic oligonucleotide"
tttgatcatcctgttcgtatg

SEQ ID NO: 16246 - DNA, 21 bp, Artificial Sequence
  source: /note="Description of Artificial Sequence: Synthetic oligonucleotide"
tttgatcatacgaaggcgtgg

SEQ ID NO: 16247 - DNA, 21 bp, Artificial Sequence
  source: /note="Description of Artificial Sequence: Synthetic oligonucleotide"
tttgataagagtactaagtat

SEQ ID NO: 16248 - DNA, 21 bp, Artificial Sequence
  source: /note="Description of Artificial Sequence: Synthetic oligonucleotide"
tttgatcagcatacgcggtct

SEQ ID NO: 16249 - DNA, 21 bp, Artificial Sequence
  source: /note="Description of Artificial Sequence: Synthetic oligonucleotide"
tttgatcgggcgatgcagcgt

SEQ ID NO: 16250 - DNA, 21 bp, Artificial Sequence
  source: /note="Description of Artificial Sequence: Synthetic oligonucleotide"
tttgatcgtcagacgcagatt

SEQ ID NO: 16251 - DNA, 21 bp, Artificial Sequence
  source: /note="Description of Artificial Sequence: Synthetic oligonucleotide"
tttgattcggtgaggctgtct

SEQ ID NO: 16252 - DNA, 21 bp, Artificial Sequence
  source: /note="Description of Artificial Sequence: Synthetic oligonucleotide"
tttgatacggctgtgaatgct

SEQ ID NO: 16253 - DNA, 21 bp, Artificial Sequence
  source: /note="Description of Artificial Sequence: Synthetic oligonucleotide"
tttgatacgggtaagtttgcg

SEQ ID NO: 16254 - DNA, 21 bp, Artificial Sequence
  source: /note="Description of Artificial Sequence: Synthetic oligonucleotide"
tttgattatggtcctatggat

SEQ ID NO: 16255 - DNA, 21 bp, Artificial Sequence
  source: /note="Description of Artificial Sequence: Synthetic oligonucleotide"
tttgaggcgaagtcgtcgctt

SEQ ID NO: 16256 - DNA, 21 bp, Artificial Sequence
  source: /note="Description of Artificial Sequence: Synthetic oligonucleotide"
tttgaggcgaaggttacgcgt

SEQ ID NO: 16257 - DNA, 21 bp, Artificial Sequence
  source: /note="Description of Artificial Sequence: Synthetic oligonucleotide"
tttgaggcgcggttgggtacg

SEQ ID NO: 16258 - DNA, 21 bp, Artificial Sequence
  source: /note="Description of Artificial Sequence: Synthetic oligonucleotide"
tttgaggatggttcgctggct

SEQ ID NO: 16259 - DNA, 21 bp, Artificial Sequence
  source: /note="Description of Artificial Sequence: Synthetic oligonucleotide"
tttgaggggtcgcagccgccg

SEQ ID NO: 16260 - DNA, 21 bp, Artificial Sequence
  source: /note="Description of Artificial Sequence: Synthetic oligonucleotide"
tttgagggggtgcagtcgtcg

SEQ ID NO: 16261 - DNA, 21 bp, Artificial Sequence
  source: /note="Description of Artificial Sequence: Synthetic oligonucleotide"
tttgagcatcattatacgcct

SEQ ID NO: 16262 - DNA, 21 bp, Artificial Sequence
  source: /note="Description of Artificial Sequence: Synthetic oligonucleotide"
tttgagaagaggcttacgatt

SEQ ID NO: 16263 - DNA, 21 bp, Artificial Sequence
  source: /note="Description of Artificial Sequence: Synthetic oligonucleotide"
tttgagaagagtcttcctgat

SEQ ID NO: 16264 - DNA, 21 bp, Artificial Sequence
  source: /note="Description of Artificial Sequence: Synthetic oligonucleotide"
tttgagatggtgagttctctt

SEQ ID NO: 16265 - DNA, 21 bp, Artificial Sequence
  source: /note="Description of Artificial Sequence: Synthetic oligonucleotide"
tttgagaataagtatcatgtg

SEQ ID NO: 16266 - DNA, 21 bp, Artificial Sequence
  source: /note="Description of Artificial Sequence: Synthetic oligonucleotide"
tttgagccggctcatgctagt

SEQ ID NO: 16267 - DNA, 21 bp, Artificial Sequence
  source: /note="Description of Artificial Sequence: Synthetic oligonucleotide"
tttgagccttcgcagcttcgg

SEQ ID NO: 16268 - DNA, 21 bp, Artificial Sequence
  source: /note="Description of Artificial Sequence: Synthetic oligonucleotide"
tttgagcctgtgcagaatact

SEQ ID NO: 16269 - DNA, 21 bp, Artificial Sequence
  source: /note="Description of Artificial Sequence: Synthetic oligonucleotide"
tttgagcagctgttggatttt

SEQ ID NO: 16270 - DNA, 21 bp, Artificial Sequence
  source: /note="Description of Artificial Sequence: Synthetic oligonucleotide"
tttgagcggaatcgtacttct

SEQ ID NO: 16271 - DNA, 21 bp, Artificial Sequence
  source: /note="Description of Artificial Sequence: Synthetic oligonucleotide"
tttgagaggccgacggtgatt

SEQ ID NO: 16272 - DNA, 21 bp, Artificial Sequence
  source: /note="Description of Artificial Sequence: Synthetic oligonucleotide"
tttgagcggtcttctggtacg

SEQ ID NO: 16273 - DNA, 21 bp, Artificial Sequence
  source: /note="Description of Artificial Sequence: Synthetic oligonucleotide"
tttgagcgtgtgcctttggat

SEQ ID NO: 16274 - DNA, 21 bp, Artificial Sequence
  source: /note="Description of Artificial Sequence: Synthetic oligonucleotide"
tttgagtctaattcggttttg

SEQ ID NO: 16275 - DNA, 21 bp, Artificial Sequence
  source: /note="Description of Artificial Sequence: Synthetic oligonucleotide"
tttgagtctactacgagtgtg

SEQ ID NO: 16276 - DNA, 21 bp, Artificial Sequence
  source: /note="Description of Artificial Sequence: Synthetic oligonucleotide"
tttgagacgcgttatgaggcg

SEQ ID NO: 16277 - DNA, 21 bp, Artificial Sequence
  source: /note="Description of Artificial Sequence: Synthetic oligonucleotide"
tttgagactactattcgtctg

SEQ ID NO: 16278 - DNA, 21 bp, Artificial Sequence
  source: /note="Description of Artificial Sequence: Synthetic oligonucleotide"
tttgaggttccgtcgactcgg

SEQ ID NO: 16279 - DNA, 21 bp, Artificial Sequence
  source: /note="Description of Artificial Sequence: Synthetic oligonucleotide"
tttgagtatcatgcgtcgggt

SEQ ID NO: 16280 - DNA, 21 bp, Artificial Sequence
  source: /note="Description of Artificial Sequence: Synthetic oligonucleotide"
ttttttgggccggggcctacg

SEQ ID NO: 16281 - DNA, 21 bp, Artificial Sequence
  source: /note="Description of Artificial Sequence: Synthetic oligonucleotide"
ttttttccgattacttctgct

SEQ ID NO: 16282 - DNA, 21 bp, Artificial Sequence
  source: /note="Description of Artificial Sequence: Synthetic oligonucleotide"
tttttttctgatgggcgtgtt

SEQ ID NO: 16283 - DNA, 21 bp, Artificial Sequence
  source: /note="Description of Artificial Sequence: Synthetic oligonucleotide"
tttggtgcttgtcgggtttcg

SEQ ID NO: 16284 - DNA, 21 bp, Artificial Sequence
  source: /note="Description of Artificial Sequence: Synthetic oligonucleotide"
tttggggcggagcctgatgcg

SEQ ID NO: 16285 - DNA, 21 bp, Artificial Sequence
  source: /note="Description of Artificial Sequence: Synthetic oligonucleotide"
tttggtgataggccgtttccg

SEQ ID NO: 16286 - DNA, 21 bp, Artificial Sequence
  source: /note="Description of Artificial Sequence: Synthetic oligonucleotide"
tttggtggggggcgtccggag

SEQ ID NO: 16287 - DNA, 21 bp, Artificial Sequence
  source: /note="Description of Artificial Sequence: Synthetic oligonucleotide"
tttggtgggcagggtggtcag

SEQ ID NO: 16288 - DNA, 21 bp, Artificial Sequence
  source: /note="Description of Artificial Sequence: Synthetic oligonucleotide"
tttggtgggactggtcagttt

SEQ ID NO: 16289 - DNA, 21 bp, Artificial Sequence
  source: /note="Description of Artificial Sequence: Synthetic oligonucleotide"
tttggtcatatgaagactcct

SEQ ID NO: 16290 - DNA, 21 bp, Artificial Sequence
  source: /note="Description of Artificial Sequence: Synthetic oligonucleotide"
tttgggcatcctattgcttcg

SEQ ID NO: 16291 - DNA, 21 bp, Artificial Sequence
  source: /note="Description of Artificial Sequence: Synthetic oligonucleotide"
tttgggcatgtgcatctgaat

SEQ ID NO: 16292 - DNA, 21 bp, Artificial Sequence
  source: /note="Description of Artificial Sequence: Synthetic oligonucleotide"
tttggtattgctggttctcct

SEQ ID NO: 16293 - DNA, 21 bp, Artificial Sequence
  source: /note="Description of Artificial Sequence: Synthetic oligonucleotide"
tttgggaagatttctatgact

SEQ ID NO: 16294 - DNA, 21 bp, Artificial Sequence
  source: /note="Description of Artificial Sequence: Synthetic oligonucleotide"
tttgggctttcgcctcttcct

SEQ ID NO: 16295 - DNA, 21 bp, Artificial Sequence
  source: /note="Description of Artificial Sequence: Synthetic oligonucleotide"
tttgggctgagttcggctgct

SEQ ID NO: 16296 - DNA, 21 bp, Artificial Sequence
  source: /note="Description of Artificial Sequence: Synthetic oligonucleotide"
tttgggctgactcgtcctgag

SEQ ID NO: 16297 - DNA, 21 bp, Artificial Sequence
  source: /note="Description of Artificial Sequence: Synthetic oligonucleotide"
tttgggaataggctgtcgaat

SEQ ID NO: 16298 - DNA, 21 bp, Artificial Sequence
  source: /note="Description of Artificial Sequence: Synthetic oligonucleotide"
tttggtccgatgcttctgggt

SEQ ID NO: 16299 - DNA, 21 bp, Artificial Sequence
  source: /note="Description of Artificial Sequence: Synthetic oligonucleotide"
tttgggcctaataaggcggat

SEQ ID NO: 16300 - DNA, 21 bp, Artificial Sequence
  source: /note="Description of Artificial Sequence: Synthetic oligonucleotide"
tttgggccgccgtcgggtttt

SEQ ID NO: 16301 - DNA, 21 bp, Artificial Sequence
  source: /note="Description of Artificial Sequence: Synthetic oligonucleotide"
tttggtcagcatgctgtgctg

SEQ ID NO: 16302 - DNA, 21 bp, Artificial Sequence
  source: /note="Description of Artificial Sequence: Synthetic oligonucleotide"
tttggtcagaagcatactgag

SEQ ID NO: 16303 - DNA, 21 bp, Artificial Sequence
  source: /note="Description of Artificial Sequence: Synthetic oligonucleotide"
tttgggcagaatcgggtgact

SEQ ID NO: 16304 - DNA, 21 bp, Artificial Sequence
  source: /note="Description of Artificial Sequence: Synthetic oligonucleotide"
tttggtcagacggctcttggg

SEQ ID NO: 16305 - DNA, 21 bp, Artificial Sequence
  source: /note="Description of Artificial Sequence: Synthetic oligonucleotide"
tttgggcgttttccgactgag

SEQ ID NO: 16306 - DNA, 21 bp, Artificial Sequence
  source: /note="Description of Artificial Sequence: Synthetic oligonucleotide"
tttggtcggacgccttatagt

SEQ ID NO: 16307 - DNA, 21 bp, Artificial Sequence
  source: /note="Description of Artificial Sequence: Synthetic oligonucleotide"
tttggttctgatactctgatt

SEQ ID NO: 16308 - DNA, 21 bp, Artificial Sequence
  source: /note="Description of Artificial Sequence: Synthetic oligonucleotide"
tttggttcgcatggtgagagg

SEQ ID NO: 16309 - DNA, 21 bp, Artificial Sequence
  source: /note="Description of Artificial Sequence: Synthetic oligonucleotide"
tttgggacggggtatgcgggt

SEQ ID NO: 16310 - DNA, 21 bp, Artificial Sequence
  source: /note="Description of Artificial Sequence: Synthetic oligonucleotide"
tttggtacgcgtatggagccg

SEQ ID NO: 16311 - DNA, 21 bp, Artificial Sequence
  source: /note="Description of Artificial Sequence: Synthetic oligonucleotide"
tttgggacgtcggaggatgtg

SEQ ID NO: 16312 - DNA, 21 bp, Artificial Sequence
  source: /note="Description of Artificial Sequence: Synthetic oligonucleotide"
tttgggactactaggatggct

SEQ ID NO: 16313 - DNA, 21 bp, Artificial Sequence
  source: /note="Description of Artificial Sequence: Synthetic oligonucleotide"
tttgggacggtgcgtccgtct

SEQ ID NO: 16314 - DNA, 21 bp, Artificial Sequence
  source: /note="Description of Artificial Sequence: Synthetic oligonucleotide"
tttggggtgcagaagattacg

SEQ ID NO: 16315 - DNA, 21 bp, Artificial Sequence
  source: /note="Description of Artificial Sequence: Synthetic oligonucleotide"
tttcatgcttctcatttgggg

SEQ ID NO: 16316 - DNA, 21 bp, Artificial Sequence
  source: /note="Description of Artificial Sequence: Synthetic oligonucleotide"
tttcatgatccttatatttgg

SEQ ID NO: 16317 - DNA, 21 bp, Artificial Sequence
  source: /note="Description of Artificial Sequence: Synthetic oligonucleotide"
tttcatgggttgactgttgcg

SEQ ID NO: 16318 - DNA, 21 bp, Artificial Sequence
  source: /note="Description of Artificial Sequence: Synthetic oligonucleotide"
tttcatgggacttcgctgggg

SEQ ID NO: 16319 - DNA, 21 bp, Artificial Sequence
  source: /note="Description of Artificial Sequence: Synthetic oligonucleotide"
tttcatcttcctcctgagctt

SEQ ID NO: 16320 - DNA, 21 bp, Artificial Sequence
  source: /note="Description of Artificial Sequence: Synthetic oligonucleotide"
tttcatctgtcgagtgcgtct

SEQ ID NO: 16321 - DNA, 21 bp, Artificial Sequence
  source: /note="Description of Artificial Sequence: Synthetic oligonucleotide"
tttcatccggcgtctgtgaat

SEQ ID NO: 16322 - DNA, 21 bp, Artificial Sequence
  source: /note="Description of Artificial Sequence: Synthetic oligonucleotide"
tttcatccgcatagtccgccg

SEQ ID NO: 16323 - DNA, 21 bp, Artificial Sequence
  source: /note="Description of Artificial Sequence: Synthetic oligonucleotide"
tttcatcagaggagtcagtcg

SEQ ID NO: 16324 - DNA, 21 bp, Artificial Sequence
  source: /note="Description of Artificial Sequence: Synthetic oligonucleotide"
tttcatcggaatgtggcgaat

SEQ ID NO: 16325 - DNA, 21 bp, Artificial Sequence
  source: /note="Description of Artificial Sequence: Synthetic oligonucleotide"
tttcatactgcgaatactgag

SEQ ID NO: 16326 - DNA, 21 bp, Artificial Sequence
  source: /note="Description of Artificial Sequence: Synthetic oligonucleotide"
tttattgatcatagtattgct

SEQ ID NO: 16327 - DNA, 21 bp, Artificial Sequence
  source: /note="Description of Artificial Sequence: Synthetic oligonucleotide"
tttattgggaatgcgacgcag

SEQ ID NO: 16328 - DNA, 21 bp, Artificial Sequence
  source: /note="Description of Artificial Sequence: Synthetic oligonucleotide"
tttattggtactgcttctcag

SEQ ID NO: 16329 - DNA, 21 bp, Artificial Sequence
  source: /note="Description of Artificial Sequence: Synthetic oligonucleotide"
tttattggttatcctcagggt

SEQ ID NO: 16330 - DNA, 21 bp, Artificial Sequence
  source: /note="Description of Artificial Sequence: Synthetic oligonucleotide"
tttattccttcggtttctgtt

SEQ ID NO: 16331 - DNA, 21 bp, Artificial Sequence
  source: /note="Description of Artificial Sequence: Synthetic oligonucleotide"
tttattcaggataagcatgtt

SEQ ID NO: 16332 - DNA, 21 bp, Artificial Sequence
  source: /note="Description of Artificial Sequence: Synthetic oligonucleotide"
tttattaggcatgagtctgtt

SEQ ID NO: 16333 - DNA, 21 bp, Artificial Sequence
  source: /note="Description of Artificial Sequence: Synthetic oligonucleotide"
tttattaggccggatcttgat

SEQ ID NO: 16334 - DNA, 21 bp, Artificial Sequence
  source: /note="Description of Artificial Sequence: Synthetic oligonucleotide"
tttattactggggcgctgggg

SEQ ID NO: 16335 - DNA, 21 bp, Artificial Sequence
  source: /note="Description of Artificial Sequence: Synthetic oligonucleotide"
tttaaggcgtatgataatatt

SEQ ID NO: 16336 - DNA, 21 bp, Artificial Sequence
  source: /note="Description of Artificial Sequence: Synthetic oligonucleotide"
tttaaggattggtttgaggat

SEQ ID NO: 16337 - DNA, 21 bp, Artificial Sequence
  source: /note="Description of Artificial Sequence: Synthetic oligonucleotide"
tttaaggagtcttggcctgcg

SEQ ID NO: 16338 - DNA, 21 bp, Artificial Sequence
  source: /note="Description of Artificial Sequence: Synthetic oligonucleotide"
tttaaggagactagtaatcat

SEQ ID NO: 16339 - DNA, 21 bp, Artificial Sequence
  source: /note="Description of Artificial Sequence: Synthetic oligonucleotide"
tttaagggtatgggggtgggt

SEQ ID NO: 16340 - DNA, 21 bp, Artificial Sequence
  source: /note="Description of Artificial Sequence: Synthetic oligonucleotide"
tttaagcatcctatggatggt

SEQ ID NO: 16341 - DNA, 21 bp, Artificial Sequence
  source: /note="Description of Artificial Sequence: Synthetic oligonucleotide"
tttaagcttggtcctcctgag

SEQ ID NO: 16342 - DNA, 21 bp, Artificial Sequence
  source: /note="Description of Artificial Sequence: Synthetic oligonucleotide"
tttaagcttgtgacgcgtgag

SEQ ID NO: 16343 - DNA, 21 bp, Artificial Sequence
  source: /note="Description of Artificial Sequence: Synthetic oligonucleotide"
tttaagaatggtacgccgcct

SEQ ID NO: 16344 - DNA, 21 bp, Artificial Sequence
  source: /note="Description of Artificial Sequence: Synthetic oligonucleotide"
tttaagaatgttctggggact

SEQ ID NO: 16345 - DNA, 21 bp, Artificial Sequence
  source: /note="Description of Artificial Sequence: Synthetic oligonucleotide"
tttaagccggctaataatgtt

SEQ ID NO: 16346 - DNA, 21 bp, Artificial Sequence
  source: /note="Description of Artificial Sequence: Synthetic oligonucleotide"
tttaagccgcctccgatgtcg

SEQ ID NO: 16347 - DNA, 21 bp, Artificial Sequence
  source: /note="Description of Artificial Sequence: Synthetic oligonucleotide"
tttaagcagcctccttatgtg

SEQ ID NO: 16348 - DNA, 21 bp, Artificial Sequence
  source: /note="Description of Artificial Sequence: Synthetic oligonucleotide"
tttaagcagccgtatgctagg

SEQ ID NO: 16349 - DNA, 21 bp, Artificial Sequence
  source: /note="Description of Artificial Sequence: Synthetic oligonucleotide"
tttaagagtgtggggactatt

SEQ ID NO: 16350 - DNA, 21 bp, Artificial Sequence
  source: /note="Description of Artificial Sequence: Synthetic oligonucleotide"
tttaagactatggagcgtctg

SEQ ID NO: 16351 - DNA, 21 bp, Artificial Sequence
  source: /note="Description of Artificial Sequence: Synthetic oligonucleotide"
tttaaggtgcatgcgtctagt

SEQ ID NO: 16352 - DNA, 21 bp, Artificial Sequence
  source: /note="Description of Artificial Sequence: Synthetic oligonucleotide"
tttctggcgaagctgcagccg

SEQ ID NO: 16353 - DNA, 21 bp, Artificial Sequence
  source: /note="Description of Artificial Sequence: Synthetic oligonucleotide"
tttctggcgttggagcggcag

SEQ ID NO: 16354 - DNA, 21 bp, Artificial Sequence
  source: /note="Description of Artificial Sequence: Synthetic oligonucleotide"
tttcttgctagtcttaatgat

SEQ ID NO: 16355 - DNA, 21 bp, Artificial Sequence
  source: /note="Description of Artificial Sequence: Synthetic oligonucleotide"
tttttggataatagggctgtg

SEQ ID NO: 16356 - DNA, 21 bp, Artificial Sequence
  source: /note="Description of Artificial Sequence: Synthetic oligonucleotide"
tttcttggtgctgcggggcag

SEQ ID NO: 16357 - DNA, 21 bp, Artificial Sequence
  source: /note="Description of Artificial Sequence: Synthetic oligonucleotide"
tttcttggtgcgcattcggct

SEQ ID NO: 16358 - DNA, 21 bp, Artificial Sequence
  source: /note="Description of Artificial Sequence: Synthetic oligonucleotide"
tttttgcatgctatggatctg

SEQ ID NO: 16359 - DNA, 21 bp, Artificial Sequence
  source: /note="Description of Artificial Sequence: Synthetic oligonucleotide"
tttcttcatggggagactggg

SEQ ID NO: 16360 - DNA, 21 bp, Artificial Sequence
  source: /note="Description of Artificial Sequence: Synthetic oligonucleotide"
tttctgaagtcgaatattgct

SEQ ID NO: 16361 - DNA, 21 bp, Artificial Sequence
  source: /note="Description of Artificial Sequence: Synthetic oligonucleotide"
tttctgaagactgctgttcct

SEQ ID NO: 16362 - DNA, 21 bp, Artificial Sequence
  source: /note="Description of Artificial Sequence: Synthetic oligonucleotide"
tttctgaagactgatacgggg

SEQ ID NO: 16363 - DNA, 21 bp, Artificial Sequence
  source: /note="Description of Artificial Sequence: Synthetic oligonucleotide"
tttctgcctgagcgtggttct

SEQ ID NO: 16364 - DNA, 21 bp, Artificial Sequence
  source: /note="Description of Artificial Sequence: Synthetic oligonucleotide"
tttcttccgcagcattctcct

SEQ ID NO: 16365 - DNA, 21 bp, Artificial Sequence
  source: /note="Description of Artificial Sequence: Synthetic oligonucleotide"
tttctgccgagtgggggtgcg

SEQ ID NO: 16366 - DNA, 21 bp, Artificial Sequence
  source: /note="Description of Artificial Sequence: Synthetic oligonucleotide"
tttctgcgtgagaatgcttct

SEQ ID NO: 16367 - DNA, 21 bp, Artificial Sequence
  source: /note="Description of Artificial Sequence: Synthetic oligonucleotide"
tttctgcgtattccggatgat

SEQ ID NO: 16368 - DNA, 21 bp, Artificial Sequence
  source: /note="Description of Artificial Sequence: Synthetic oligonucleotide"
tttttgtctaagcctctgtct

SEQ ID NO: 16369 - DNA, 21 bp, Artificial Sequence
  source: /note="Description of Artificial Sequence: Synthetic oligonucleotide"
tttctgtctaattctaatgct

SEQ ID NO: 16370 - DNA, 21 bp, Artificial Sequence
  source: /note="Description of Artificial Sequence: Synthetic oligonucleotide"
tttctttcgccgaatctgatt

SEQ ID NO: 16371 - DNA, 21 bp, Artificial Sequence
  source: /note="Description of Artificial Sequence: Synthetic oligonucleotide"
tttttgagttcggatggtcgt

SEQ ID NO: 16372 - DNA, 21 bp, Artificial Sequence
  source: /note="Description of Artificial Sequence: Synthetic oligonucleotide"
tttctgagtgttccggagact

SEQ ID NO: 16373 - DNA, 21 bp, Artificial Sequence
  source: /note="Description of Artificial Sequence: Synthetic oligonucleotide"
tttctgacggcggggatgcct

SEQ ID NO: 16374 - DNA, 21 bp, Artificial Sequence
  source: /note="Description of Artificial Sequence: Synthetic oligonucleotide"
tttctgacttcggctaagtct

SEQ ID NO: 16375 - DNA, 21 bp, Artificial Sequence
  source: /note="Description of Artificial Sequence: Synthetic oligonucleotide"
tttctgacgactggggtggat

SEQ ID NO: 16376 - DNA, 21 bp, Artificial Sequence
  source: /note="Description of Artificial Sequence: Synthetic oligonucleotide"
tttatgtttaatgatagtccg

SEQ ID NO: 16377 - DNA, 21 bp, Artificial Sequence
  source: /note="Description of Artificial Sequence: Synthetic oligonucleotide"
tttatggggactgtggttaat

SEQ ID NO: 16378 - DNA, 21 bp, Artificial Sequence
  source: /note="Description of Artificial Sequence: Synthetic oligonucleotide"
tttatgcatcagcagggtctg

SEQ ID NO: 16379 - DNA, 21 bp, Artificial Sequence
  source: /note="Description of Artificial Sequence: Synthetic oligonucleotide"
tttatgcttagggatgctact

SEQ ID NO: 16380 - DNA, 21 bp, Artificial Sequence
  source: /note="Description of Artificial Sequence: Synthetic oligonucleotide"
tttatgatgactggtacggct

SEQ ID NO: 16381 - DNA, 21 bp, Artificial Sequence
  source: /note="Description of Artificial Sequence: Synthetic oligonucleotide"
tttatgcctaagacttctccg

SEQ ID NO: 16382 - DNA, 21 bp, Artificial Sequence
  source: /note="Description of Artificial Sequence: Synthetic oligonucleotide"
tttatgcggagtactcagtcg

SEQ ID NO: 16383 - DNA, 21 bp, Artificial Sequence
  source: /note="Description of Artificial Sequence: Synthetic oligonucleotide"
tttatgtctagggggctggcg

SEQ ID NO: 16384 - DNA, 21 bp, Artificial Sequence
  source: /note="Description of Artificial Sequence: Synthetic oligonucleotide"
tttatgactgagcgtgcggct

SEQ ID NO: 16385 - DNA, 21 bp, Artificial Sequence
  source: /note="Description of Artificial Sequence: Synthetic oligonucleotide"
tttatgactaatctttctggg

SEQ ID NO: 16386 - DNA, 21 bp, Artificial Sequence
  source: /note="Description of Artificial Sequence: Synthetic oligonucleotide"
tttatgacgtctggggatttg

SEQ ID NO: 16387 - DNA, 21 bp, Artificial Sequence
  source: /note="Description of Artificial Sequence: Synthetic oligonucleotide"
tttatggttgatccggtgaat

SEQ ID NO: 16388 - DNA, 21 bp, Artificial Sequence
  source: /note="Description of Artificial Sequence: Synthetic oligonucleotide"
tttatggtttctgcgccgctt

SEQ ID NO: 16389 - DNA, 21 bp, Artificial Sequence
  source: /note="Description of Artificial Sequence: Synthetic oligonucleotide"
tttatgtatgggaatggtgtt

SEQ ID NO: 16390 - DNA, 21 bp, Artificial Sequence
  source: /note="Description of Artificial Sequence: Synthetic oligonucleotide"
tttaatgctattcatgtgagt

SEQ ID NO: 16391 - DNA, 21 bp, Artificial Sequence
  source: /note="Description of Artificial Sequence: Synthetic oligonucleotide"
tttaatgagcttagtggtttg

SEQ ID NO: 16392 - DNA, 21 bp, Artificial Sequence
  source: /note="Description of Artificial Sequence: Synthetic oligonucleotide"
tttaattttaataagatggat

SEQ ID NO: 16393 - DNA, 21 bp, Artificial Sequence
  source: /note="Description of Artificial Sequence: Synthetic oligonucleotide"
tttaatggtgatagtcctgct

SEQ ID NO: 16394 - DNA, 21 bp, Artificial Sequence
  source: /note="Description of Artificial Sequence: Synthetic oligonucleotide"
tttaatggtccttatgagctg

SEQ ID NO: 16395 - DNA, 21 bp, Artificial Sequence
  source: /note="Description of Artificial Sequence: Synthetic oligonucleotide"
tttaatttgtctacgtctgcg

SEQ ID NO: 16396 - DNA, 21 bp, Artificial Sequence
  source: /note="Description of Artificial Sequence: Synthetic oligonucleotide"
tttaatccgacggttagggag

SEQ ID NO: 16397 - DNA, 21 bp, Artificial Sequence
  source: /note="Description of Artificial Sequence: Synthetic oligonucleotide"
tttaataggcctgtgactacg

SEQ ID NO: 16398 - DNA, 21 bp, Artificial Sequence
  source: /note="Description of Artificial Sequence: Synthetic oligonucleotide"
tttaattctgattctaatagt

SEQ ID NO: 16399 - DNA, 21 bp, Artificial Sequence
  source: /note="Description of Artificial Sequence: Synthetic oligonucleotide"
tttaattctagtccggatctt

SEQ ID NO: 16400 - DNA, 21 bp, Artificial Sequence
  source: /note="Description of Artificial Sequence: Synthetic oligonucleotide"
tttaatacgcctacgaaggtt

SEQ ID NO: 16401 - DNA, 21 bp, Artificial Sequence
  source: /note="Description of Artificial Sequence: Synthetic oligonucleotide"
tttaatgttatgcaggagagg

SEQ ID NO: 16402 - DNA, 21 bp, Artificial Sequence
  source: /note="Description of Artificial Sequence: Synthetic oligonucleotide"
tttccggctttgtctggtggg

SEQ ID NO: 16403 - DNA, 21 bp, Artificial Sequence
  source: /note="Description of Artificial Sequence: Synthetic oligonucleotide"
tttccggctgttaatgttccg

SEQ ID NO: 16404 - DNA, 21 bp, Artificial Sequence
  source: /note="Description of Artificial Sequence: Synthetic oligonucleotide"
tttcctgagcgtggtatggtt

SEQ ID NO: 16405 - DNA, 21 bp, Artificial Sequence
  source: /note="Description of Artificial Sequence: Synthetic oligonucleotide"
tttccgtttaatagtggttct

SEQ ID NO: 16406 - DNA, 21 bp, Artificial Sequence
  source: /note="Description of Artificial Sequence: Synthetic oligonucleotide"
tttcctggttttccttcgaag

SEQ ID NO: 16407 - DNA, 21 bp, Artificial Sequence
  source: /note="Description of Artificial Sequence: Synthetic oligonucleotide"
tttccgggtagtgattcgctg

SEQ ID NO: 16408 - DNA, 21 bp, Artificial Sequence
  source: /note="Description of Artificial Sequence: Synthetic oligonucleotide"
tttcctcatacgttgtctgag

SEQ ID NO: 16409 - DNA, 21 bp, Artificial Sequence
  source: /note="Description of Artificial Sequence: Synthetic oligonucleotide"
tttcctaaggggtctacgccg

SEQ ID NO: 16410 - DNA, 21 bp, Artificial Sequence
  source: /note="Description of Artificial Sequence: Synthetic oligonucleotide"
tttcctaagactgatgatacg

SEQ ID NO: 16411 - DNA, 21 bp, Artificial Sequence
  source: /note="Description of Artificial Sequence: Synthetic oligonucleotide"
tttccgaagtatgctattgcg

SEQ ID NO: 16412 - DNA, 21 bp, Artificial Sequence
  source: /note="Description of Artificial Sequence: Synthetic oligonucleotide"
tttcctttgatgtcttcgaat

SEQ ID NO: 16413 - DNA, 21 bp, Artificial Sequence
  source: /note="Description of Artificial Sequence: Synthetic oligonucleotide"
tttcctctttcggatccgtat

SEQ ID NO: 16414 - DNA, 21 bp, Artificial Sequence
  source: /note="Description of Artificial Sequence: Synthetic oligonucleotide"
tttccgttgtcgcagcaggct

SEQ ID NO: 16415 - DNA, 21 bp, Artificial Sequence
  source: /note="Description of Artificial Sequence: Synthetic oligonucleotide"
tttccgatggcgaagccgtat

SEQ ID NO: 16416 - DNA, 21 bp, Artificial Sequence
  source: /note="Description of Artificial Sequence: Synthetic oligonucleotide"
tttccgatgcgtggtgctcct

SEQ ID NO: 16417 - DNA, 21 bp, Artificial Sequence
  source: /note="Description of Artificial Sequence: Synthetic oligonucleotide"
tttcctatgacgaatcctgcg

SEQ ID NO: 16418 - DNA, 21 bp, Artificial Sequence
  source: /note="Description of Artificial Sequence: Synthetic oligonucleotide"
tttcctaatgcgcagctggtt

SEQ ID NO: 16419 - DNA, 21 bp, Artificial Sequence
  source: /note="Description of Artificial Sequence: Synthetic oligonucleotide"
tttccgaatgatcttcctctt

SEQ ID NO: 16420 - DNA, 21 bp, Artificial Sequence
  source: /note="Description of Artificial Sequence: Synthetic oligonucleotide"
tttcctaatatgagttcggtt

SEQ ID NO: 16421 - DNA, 21 bp, Artificial Sequence
  source: /note="Description of Artificial Sequence: Synthetic oligonucleotide"
tttcctaatcggtttgaggct

SEQ ID NO: 16422 - DNA, 21 bp, Artificial Sequence
  source: /note="Description of Artificial Sequence: Synthetic oligonucleotide"
tttccgcctggtgttcgtcct

SEQ ID NO: 16423 - DNA, 21 bp, Artificial Sequence
  source: /note="Description of Artificial Sequence: Synthetic oligonucleotide"
tttcctccgagggatacgccg

SEQ ID NO: 16424 - DNA, 21 bp, Artificial Sequence
  source: /note="Description of Artificial Sequence: Synthetic oligonucleotide"
tttccgcctagttgtgcgaat

SEQ ID NO: 16425 - DNA, 21 bp, Artificial Sequence
  source: /note="Description of Artificial Sequence: Synthetic oligonucleotide"
tttccgccttcgctgtctgct

SEQ ID NO: 16426 - DNA, 21 bp, Artificial Sequence
  source: /note="Description of Artificial Sequence: Synthetic oligonucleotide"
tttccgccgagttctttgcct

SEQ ID NO: 16427 - DNA, 21 bp, Artificial Sequence
  source: /note="Description of Artificial Sequence: Synthetic oligonucleotide"
tttccgccgactaattcgttt

SEQ ID NO: 16428 - DNA, 21 bp, Artificial Sequence
  source: /note="Description of Artificial Sequence: Synthetic oligonucleotide"
tttcctcagattactttgaat

SEQ ID NO: 16429 - DNA, 21 bp, Artificial Sequence
  source: /note="Description of Artificial Sequence: Synthetic oligonucleotide"
tttccgcagaaggaggggacg

SEQ ID NO: 16430 - DNA, 21 bp, Artificial Sequence
  source: /note="Description of Artificial Sequence: Synthetic oligonucleotide"
tttcctcagccggctgatatg

SEQ ID NO: 16431 - DNA, 21 bp, Artificial Sequence
  source: /note="Description of Artificial Sequence: Synthetic oligonucleotide"
tttcctagggctattgatgcg

SEQ ID NO: 16432 - DNA, 21 bp, Artificial Sequence
  source: /note="Description of Artificial Sequence: Synthetic oligonucleotide"
tttccgcggggggctgtgctt

SEQ ID NO: 16433 - DNA, 21 bp, Artificial Sequence
  source: /note="Description of Artificial Sequence: Synthetic oligonucleotide"
tttccgaggccgcagcttggt

SEQ ID NO: 16434 - DNA, 21 bp, Artificial Sequence
  source: /note="Description of Artificial Sequence: Synthetic oligonucleotide"
tttccgtcgaatcctgcgcat

SEQ ID NO: 16435 - DNA, 21 bp, Artificial Sequence
  source: /note="Description of Artificial Sequence: Synthetic oligonucleotide"
tttcctagttctcagcagact

SEQ ID NO: 16436 - DNA, 21 bp, Artificial Sequence
  source: /note="Description of Artificial Sequence: Synthetic oligonucleotide"
tttccttcgtctcgtctttcg

SEQ ID NO: 16437 - DNA, 21 bp, Artificial Sequence
  source: /note="Description of Artificial Sequence: Synthetic oligonucleotide"
tttcctagtacgactctgccg

SEQ ID NO: 16438 - DNA, 21 bp, Artificial Sequence
  source: /note="Description of Artificial Sequence: Synthetic oligonucleotide"
tttccgactgattatgtgcct

SEQ ID NO: 16439 - DNA, 21 bp, Artificial Sequence
  source: /note="Description of Artificial Sequence: Synthetic oligonucleotide"
tttccgacgaagggttttgtg

SEQ ID NO: 16440 - DNA, 21 bp, Artificial Sequence
  source: /note="Description of Artificial Sequence: Synthetic oligonucleotide"
tttccgacttcgacgagtagt

SEQ ID NO: 16441 - DNA, 21 bp, Artificial Sequence
  source: /note="Description of Artificial Sequence: Synthetic oligonucleotide"
tttccgacttctactacgccg

SEQ ID NO: 16442 - DNA, 21 bp, Artificial Sequence
  source: /note="Description of Artificial Sequence: Synthetic oligonucleotide"
tttcctgttgcgcagcatgat

SEQ ID NO: 16443 - DNA, 21 bp, Artificial Sequence
  source: /note="Description of Artificial Sequence: Synthetic oligonucleotide"
tttccggtggatgggcggcag

SEQ ID NO: 16444 - DNA, 21 bp, Artificial Sequence
  source: /note="Description of Artificial Sequence: Synthetic oligonucleotide"
tttcctgttggtaatcggctg

SEQ ID NO: 16445 - DNA, 21 bp, Artificial Sequence
  source: /note="Description of Artificial Sequence: Synthetic oligonucleotide"
tttcctgtggggcagcttgct

SEQ ID NO: 16446 - DNA, 21 bp, Artificial Sequence
  source: /note="Description of Artificial Sequence: Synthetic oligonucleotide"
tttccggttaagacgatggtt

SEQ ID NO: 16447 - DNA, 21 bp, Artificial Sequence
  source: /note="Description of Artificial Sequence: Synthetic oligonucleotide"
tttcctgtttcggcgcgggat

SEQ ID NO: 16448 - DNA, 21 bp, Artificial Sequence
  source: /note="Description of Artificial Sequence: Synthetic oligonucleotide"
tttcaggctgctccggatcat

SEQ ID NO: 16449 - DNA, 21 bp, Artificial Sequence
  source: /note="Description of Artificial Sequence: Synthetic oligonucleotide"
tttcaggctgggaaggcggtt

SEQ ID NO: 16450 - DNA, 21 bp, Artificial Sequence
  source: /note="Description of Artificial Sequence: Synthetic oligonucleotide"
tttcagggggcgatttcgcgg

SEQ ID NO: 16451 - DNA, 21 bp, Artificial Sequence
  source: /note="Description of Artificial Sequence: Synthetic oligonucleotide"
tttcaggggttgcggttgggt

SEQ ID NO: 16452 - DNA, 21 bp, Artificial Sequence
  source: /note="Description of Artificial Sequence: Synthetic oligonucleotide"
tttcagggtagtgtgccggag

SEQ ID NO: 16453 - DNA, 21 bp, Artificial Sequence
  source: /note="Description of Artificial Sequence: Synthetic oligonucleotide"
tttcagattactgcgcagggg

SEQ ID NO: 16454 - DNA, 21 bp, Artificial Sequence
  source: /note="Description of Artificial Sequence: Synthetic oligonucleotide"
tttcagaagtcgcatgctggg

SEQ ID NO: 16455 - DNA, 21 bp, Artificial Sequence
  source: /note="Description of Artificial Sequence: Synthetic oligonucleotide"
tttcagaatcctcagtcttct

SEQ ID NO: 16456 - DNA, 21 bp, Artificial Sequence
  source: /note="Description of Artificial Sequence: Synthetic oligonucleotide"
tttcagaatcaggggcctctt

SEQ ID NO: 16457 - DNA, 21 bp, Artificial Sequence
  source: /note="Description of Artificial Sequence: Synthetic oligonucleotide"
tttcagcagactgggcctcgt

SEQ ID NO: 16458 - DNA, 21 bp, Artificial Sequence
  source: /note="Description of Artificial Sequence: Synthetic oligonucleotide"
tttcagagggctacgctgcag

SEQ ID NO: 16459 - DNA, 21 bp, Artificial Sequence
  source: /note="Description of Artificial Sequence: Synthetic oligonucleotide"
tttcagtctgcgacggtggct

SEQ ID NO: 16460 - DNA, 21 bp, Artificial Sequence
  source: /note="Description of Artificial Sequence: Synthetic oligonucleotide"
tttcagactccgagtggggat

SEQ ID NO: 16461 - DNA, 21 bp, Artificial Sequence
  source: /note="Description of Artificial Sequence: Synthetic oligonucleotide"
tttcaggtggttgggtcgcct

SEQ ID NO: 16462 - DNA, 21 bp, Artificial Sequence
  source: /note="Description of Artificial Sequence: Synthetic oligonucleotide"
tttcagtatgagcctgcgatt

SEQ ID NO: 16463 - DNA, 21 bp, Artificial Sequence
  source: /note="Description of Artificial Sequence: Synthetic oligonucleotide"
tttagggcggatcttttgaat

SEQ ID NO: 16464 - DNA, 21 bp, Artificial Sequence
  source: /note="Description of Artificial Sequence: Synthetic oligonucleotide"
tttcgggctattgggtcgggg

SEQ ID NO: 16465 - DNA, 21 bp, Artificial Sequence
  source: /note="Description of Artificial Sequence: Synthetic oligonucleotide"
tttagggctcttgtggagcct

SEQ ID NO: 16466 - DNA, 21 bp, Artificial Sequence
  source: /note="Description of Artificial Sequence: Synthetic oligonucleotide"
tttagggatgagcagccgtcg

SEQ ID NO: 16467 - DNA, 21 bp, Artificial Sequence
  source: /note="Description of Artificial Sequence: Synthetic oligonucleotide"
tttagggatcaggctgatggt

SEQ ID NO: 16468 - DNA, 21 bp, Artificial Sequence
  source: /note="Description of Artificial Sequence: Synthetic oligonucleotide"
tttcgggatagtcctccttcg

SEQ ID NO: 16469 - DNA, 21 bp, Artificial Sequence
  source: /note="Description of Artificial Sequence: Synthetic oligonucleotide"
tttcgggaggagcctcagact

SEQ ID NO: 16470 - DNA, 21 bp, Artificial Sequence
  source: /note="Description of Artificial Sequence: Synthetic oligonucleotide"
tttcggggtccgagttcttcg

SEQ ID NO: 16471 - DNA, 21 bp, Artificial Sequence
  source: /note="Description of Artificial Sequence: Synthetic oligonucleotide"
tttcgtcatgctgatgcggtg

SEQ ID NO: 16472 - DNA, 21 bp, Artificial Sequence
  source: /note="Description of Artificial Sequence: Synthetic oligonucleotide"
tttcggcatgatcattcggtt

SEQ ID NO: 16473 - DNA, 21 bp, Artificial Sequence
  source: /note="Description of Artificial Sequence: Synthetic oligonucleotide"
tttaggctgcattctacgtcg

SEQ ID NO: 16474 - DNA, 21 bp, Artificial Sequence
  source: /note="Description of Artificial Sequence: Synthetic oligonucleotide"
tttaggctgccgcatgagact

SEQ ID NO: 16475 - DNA, 21 bp, Artificial Sequence
  source: /note="Description of Artificial Sequence: Synthetic oligonucleotide"
tttaggatgggggaggctcct

SEQ ID NO: 16476 - DNA, 21 bp, Artificial Sequence
  source: /note="Description of Artificial Sequence: Synthetic oligonucleotide"
tttcggatgcagaatgctgcg

SEQ ID NO: 16477 - DNA, 21 bp, Artificial Sequence
  source: /note="Description of Artificial Sequence: Synthetic oligonucleotide"
tttaggaatgggcctgagccg

SEQ ID NO: 16478 - DNA, 21 bp, Artificial Sequence
  source: /note="Description of Artificial Sequence: Synthetic oligonucleotide"
tttcggaataatgttagtctt

SEQ ID NO: 16479 - DNA, 21 bp, Artificial Sequence
  source: /note="Description of Artificial Sequence: Synthetic oligonucleotide"
tttaggccgttggcgctggag

SEQ ID NO: 16480 - DNA, 21 bp, Artificial Sequence
  source: /note="Description of Artificial Sequence: Synthetic oligonucleotide"
tttcgtccgttgagtacgccg

SEQ ID NO: 16481 - DNA, 21 bp, Artificial Sequence
  source: /note="Description of Artificial Sequence: Synthetic oligonucleotide"
tttcgtcctcctgctctttct

SEQ ID NO: 16482 - DNA, 21 bp, Artificial Sequence
  source: /note="Description of Artificial Sequence: Synthetic oligonucleotide"
tttcgtccgcaggatacgatg

SEQ ID NO: 16483 - DNA, 21 bp, Artificial Sequence
  source: /note="Description of Artificial Sequence: Synthetic oligonucleotide"
tttcggcagacgccgaatcat

SEQ ID NO: 16484 - DNA, 21 bp, Artificial Sequence
  source: /note="Description of Artificial Sequence: Synthetic oligonucleotide"
tttcgttctgattctcataat

SEQ ID NO: 16485 - DNA, 21 bp, Artificial Sequence
  source: /note="Description of Artificial Sequence: Synthetic oligonucleotide"
tttaggtctgggcttgcgatt

SEQ ID NO: 16486 - DNA, 21 bp, Artificial Sequence
  source: /note="Description of Artificial Sequence: Synthetic oligonucleotide"
tttcgttctgggttggagtat

SEQ ID NO: 16487 - DNA, 21 bp, Artificial Sequence
  source: /note="Description of Artificial Sequence: Synthetic oligonucleotide"
tttcggtcgggtatggttgcg

SEQ ID NO: 16488 - DNA, 21 bp, Artificial Sequence
  source: /note="Description of Artificial Sequence: Synthetic oligonucleotide"
tttcgttcgaagattgatgct

SEQ ID NO: 16489 - DNA, 21 bp, Artificial Sequence
  source: /note="Description of Artificial Sequence: Synthetic oligonucleotide"
tttcggtcgcctgcgggtctg

SEQ ID NO: 16490 - DNA, 21 bp, Artificial Sequence
  source: /note="Description of Artificial Sequence: Synthetic oligonucleotide"
tttcggagtacggagaataat

SEQ ID NO: 16491 - DNA, 21 bp, Artificial Sequence
  source: /note="Description of Artificial Sequence: Synthetic oligonucleotide"
tttcggacgcctcattcggag

SEQ ID NO: 16492 - DNA, 21 bp, Artificial Sequence
  source: /note="Description of Artificial Sequence: Synthetic oligonucleotide"
tttaggacgagtacggagggt

SEQ ID NO: 16493 - DNA, 21 bp, Artificial Sequence
  source: /note="Description of Artificial Sequence: Synthetic oligonucleotide"
tttcgggttcctgatgctgat

SEQ ID NO: 16494 - DNA, 21 bp, Artificial Sequence
  source: /note="Description of Artificial Sequence: Synthetic oligonucleotide"
ttttcggcggatgttgatggg

SEQ ID NO: 16495 - DNA, 21 bp, Artificial Sequence
  source: /note="Description of Artificial Sequence: Synthetic oligonucleotide"
tttagtgctcggggttctggg

SEQ ID NO: 16496 - DNA, 21 bp, Artificial Sequence
  source: /note="Description of Artificial Sequence: Synthetic oligonucleotide"
ttttcggatggtgagagtctt

SEQ ID NO: 16497 - DNA, 21 bp, Artificial Sequence
  source: /note="Description of Artificial Sequence: Synthetic oligonucleotide"
ttttcggatcatactgctcat

SEQ ID NO: 16498 - DNA, 21 bp, Artificial Sequence
  source: /note="Description of Artificial Sequence: Synthetic oligonucleotide"
ttttcggataatgcgctggat

SEQ ID NO: 16499 - DNA, 21 bp, Artificial Sequence
  source: /note="Description of Artificial Sequence: Synthetic oligonucleotide"
ttttcggataggcctggtgat

SEQ ID NO: 16500 - DNA, 21 bp, Artificial Sequence
  source: /note="Description of Artificial Sequence: Synthetic oligonucleotide"
ttttcggagcatgtttctaag

SEQ ID NO: 16501 - DNA, 21 bp, Artificial Sequence
  source: /note="Description of Artificial Sequence: Synthetic oligonucleotide"
ttttcggagcgtcattctgag

SEQ ID NO: 16502 - DNA, 21 bp, Artificial Sequence
  source: /note="Description of Artificial Sequence: Synthetic oligonucleotide"
ttttctgagtcgaagacgccg

SEQ ID NO: 16503 - DNA, 21 bp, Artificial Sequence
  source: /note="Description of Artificial Sequence: Synthetic oligonucleotide"
ttttctgagacgagtaatatg

SEQ ID NO: 16504 - DNA, 21 bp, Artificial Sequence
  source: /note="Description of Artificial Sequence: Synthetic oligonucleotide"
ttttctggtgagcctctgagt

SEQ ID NO: 16505 - DNA, 21 bp, Artificial Sequence
  source: /note="Description of Artificial Sequence: Synthetic oligonucleotide"
ttttctggtcataatactatt

SEQ ID NO: 16506 - DNA, 21 bp, Artificial Sequence
  source: /note="Description of Artificial Sequence: Synthetic oligonucleotide"
ttttcgcatcctggggcggct

SEQ ID NO: 16507 - DNA, 21 bp, Artificial Sequence
  source: /note="Description of Artificial Sequence: Synthetic oligonucleotide"
tttagtcatccgcatcctgct

SEQ ID NO: 16508 - DNA, 21 bp, Artificial Sequence
  source: /note="Description of Artificial Sequence: Synthetic oligonucleotide"
ttttctcatagtcagtctacg

SEQ ID NO: 16509 - DNA, 21 bp, Artificial Sequence
  source: /note="Description of Artificial Sequence: Synthetic oligonucleotide"
ttttcgcattcttcgggtaag

SEQ ID NO: 16510 - DNA, 21 bp, Artificial Sequence
  source: /note="Description of Artificial Sequence: Synthetic oligonucleotide"
ttttctattactccgattaag

SEQ ID NO: 16511 - DNA, 21 bp, Artificial Sequence
  source: /note="Description of Artificial Sequence: Synthetic oligonucleotide"
tttagtcttatgcctcgggag

SEQ ID NO: 16512 - DNA, 21 bp, Artificial Sequence
  source: /note="Description of Artificial Sequence: Synthetic oligonucleotide"
ttttctttgactgcggataag

SEQ ID NO: 16513 - DNA, 21 bp, Artificial Sequence
  source: /note="Description of Artificial Sequence: Synthetic oligonucleotide"
ttttctatgactgctcaggat

SEQ ID NO: 16514 - DNA, 21 bp, Artificial Sequence
  source: /note="Description of Artificial Sequence: Synthetic oligonucleotide"
ttttctatgacggtgcatcat

SEQ ID NO: 16515 - DNA, 21 bp, Artificial Sequence
  source: /note="Description of Artificial Sequence: Synthetic oligonucleotide"
tttagtaatcagatgcctatt

SEQ ID NO: 16516 - DNA, 21 bp, Artificial Sequence
  source: /note="Description of Artificial Sequence: Synthetic oligonucleotide"
ttttcgaattctgggcctttt

SEQ ID NO: 16517 - DNA, 21 bp, Artificial Sequence
  source: /note="Description of Artificial Sequence: Synthetic oligonucleotide"
ttttctaatactacgtctctg

SEQ ID NO: 16518 - DNA, 21 bp, Artificial Sequence
  source: /note="Description of Artificial Sequence: Synthetic oligonucleotide"
ttttctaatactactactacg

SEQ ID NO: 16519 - DNA, 21 bp, Artificial Sequence
  source: /note="Description of Artificial Sequence: Synthetic oligonucleotide"
ttttctcctgggtcgttggct

SEQ ID NO: 16520 - DNA, 21 bp, Artificial Sequence
  source: /note="Description of Artificial Sequence: Synthetic oligonucleotide"
tttagtccgcatacgctgcct

SEQ ID NO: 16521 - DNA, 21 bp, Artificial Sequence
  source: /note="Description of Artificial Sequence: Synthetic oligonucleotide"
ttttctcctatggaggcttcg

SEQ ID NO: 16522 - DNA, 21 bp, Artificial Sequence
  source: /note="Description of Artificial Sequence: Synthetic oligonucleotide"
tttagtccgaatattatgcgg

SEQ ID NO: 16523 - DNA, 21 bp, Artificial Sequence
  source: /note="Description of Artificial Sequence: Synthetic oligonucleotide"
tttagtccgaggtcgattggg

SEQ ID NO: 16524 - DNA, 21 bp, Artificial Sequence
  source: /note="Description of Artificial Sequence: Synthetic oligonucleotide"
tttagtccgtatgcggatgag

SEQ ID NO: 16525 - DNA, 21 bp, Artificial Sequence
  source: /note="Description of Artificial Sequence: Synthetic oligonucleotide"
tttagtcagccgctgaggaat

SEQ ID NO: 16526 - DNA, 21 bp, Artificial Sequence
  source: /note="Description of Artificial Sequence: Synthetic oligonucleotide"
ttttcgcagagtcttcctact

SEQ ID NO: 16527 - DNA, 21 bp, Artificial Sequence
  source: /note="Description of Artificial Sequence: Synthetic oligonucleotide"
ttttctcgtggttcgggtccg

SEQ ID NO: 16528 - DNA, 21 bp, Artificial Sequence
  source: /note="Description of Artificial Sequence: Synthetic oligonucleotide"
ttttcgcggttgaatcctagt

SEQ ID NO: 16529 - DNA, 21 bp, Artificial Sequence
  source: /note="Description of Artificial Sequence: Synthetic oligonucleotide"
ttttctcggagtcatattcct

SEQ ID NO: 16530 - DNA, 21 bp, Artificial Sequence
  source: /note="Description of Artificial Sequence: Synthetic oligonucleotide"
ttttctcgtacgctgacttcg

SEQ ID NO: 16531 - DNA, 21 bp, Artificial Sequence
  source: /note="Description of Artificial Sequence: Synthetic oligonucleotide"
ttttcttcgcatgagagttct

SEQ ID NO: 16532 - DNA, 21 bp, Artificial Sequence
  source: /note="Description of Artificial Sequence: Synthetic oligonucleotide"
ttttctagtcatggtgagtct

SEQ ID NO: 16533 - DNA, 21 bp, Artificial Sequence
  source: /note="Description of Artificial Sequence: Synthetic oligonucleotide"
ttttctagtaatacggagttg

SEQ ID NO: 16534 - DNA, 21 bp, Artificial Sequence
  source: /note="Description of Artificial Sequence: Synthetic oligonucleotide"
ttttcgtctaatacttttgat

SEQ ID NO: 16535 - DNA, 21 bp, Artificial Sequence
  source: /note="Description of Artificial Sequence: Synthetic oligonucleotide"
ttttcgtcgaatacgagtgcg

SEQ ID NO: 16536 - DNA, 21 bp, Artificial Sequence
  source: /note="Description of Artificial Sequence: Synthetic oligonucleotide"
ttttcgtcgaatacgagtgag

SEQ ID NO: 16537 - DNA, 21 bp, Artificial Sequence
  source: /note="Description of Artificial Sequence: Synthetic oligonucleotide"
ttttcttctccgagtgggtat

SEQ ID NO: 16538 - DNA, 21 bp, Artificial Sequence
  source: /note="Description of Artificial Sequence: Synthetic oligonucleotide"
ttttcgtcgcggactcaggcg

SEQ ID NO: 16539 - DNA, 21 bp, Artificial Sequence
  source: /note="Description of Artificial Sequence: Synthetic oligonucleotide"
tttagtagttcgatggcggct

SEQ ID NO: 16540 - DNA, 21 bp, Artificial Sequence
  source: /note="Description of Artificial Sequence: Synthetic oligonucleotide"
tttagtagttcgacgcttaag

SEQ ID NO: 16541 - DNA, 21 bp, Artificial Sequence
  source: /note="Description of Artificial Sequence: Synthetic oligonucleotide"
ttttcgagtagtgtgacgtcg

SEQ ID NO: 16542 - DNA, 21 bp, Artificial Sequence
  source: /note="Description of Artificial Sequence: Synthetic oligonucleotide"
tttagttctacgaatcttgcg

SEQ ID NO: 16543 - DNA, 21 bp, Artificial Sequence
  source: /note="Description of Artificial Sequence: Synthetic oligonucleotide"
ttttctagtactccggggcat

SEQ ID NO: 16544 - DNA, 21 bp, Artificial Sequence
  source: /note="Description of Artificial Sequence: Synthetic oligonucleotide"
tttagttcgacgtctccggat

SEQ ID NO: 16545 - DNA, 21 bp, Artificial Sequence
  source: /note="Description of Artificial Sequence: Synthetic oligonucleotide"
ttttcttctacgagtcctatg

SEQ ID NO: 16546 - DNA, 21 bp, Artificial Sequence
  source: /note="Description of Artificial Sequence: Synthetic oligonucleotide"
ttttcgtcgacgtcttcggct

SEQ ID NO: 16547 - DNA, 21 bp, Artificial Sequence
  source: /note="Description of Artificial Sequence: Synthetic oligonucleotide"
ttttcgtcggtgattccgagt

SEQ ID NO: 16548 - DNA, 21 bp, Artificial Sequence
  source: /note="Description of Artificial Sequence: Synthetic oligonucleotide"
ttttcgtcggttcgtaatgag

SEQ ID NO: 16549 - DNA, 21 bp, Artificial Sequence
  source: /note="Description of Artificial Sequence: Synthetic oligonucleotide"
ttttcttcggttagtacgacg

SEQ ID NO: 16550 - DNA, 21 bp, Artificial Sequence
  source: /note="Description of Artificial Sequence: Synthetic oligonucleotide"
ttttcgtcttatgcttctatg

SEQ ID NO: 16551 - DNA, 21 bp, Artificial Sequence
  source: /note="Description of Artificial Sequence: Synthetic oligonucleotide"
tttagttcttataataatgcg

SEQ ID NO: 16552 - DNA, 21 bp, Artificial Sequence
  source: /note="Description of Artificial Sequence: Synthetic oligonucleotide"
ttttctactcttagtattcct

SEQ ID NO: 16553 - DNA, 21 bp, Artificial Sequence
  source: /note="Description of Artificial Sequence: Synthetic oligonucleotide"
tttagtacgatgccggcgaag

SEQ ID NO: 16554 - DNA, 21 bp, Artificial Sequence
  source: /note="Description of Artificial Sequence: Synthetic oligonucleotide"
ttttcgacgatgcctcgtgat

SEQ ID NO: 16555 - DNA, 21 bp, Artificial Sequence
  source: /note="Description of Artificial Sequence: Synthetic oligonucleotide"
ttttcgactcgtacgcagccg

SEQ ID NO: 16556 - DNA, 21 bp, Artificial Sequence
  source: /note="Description of Artificial Sequence: Synthetic oligonucleotide"
ttttcgactagtggtcaggag

SEQ ID NO: 16557 - DNA, 21 bp, Artificial Sequence
  source: /note="Description of Artificial Sequence: Synthetic oligonucleotide"
ttttctacggttcatcaggct

SEQ ID NO: 16558 - DNA, 21 bp, Artificial Sequence
  source: /note="Description of Artificial Sequence: Synthetic oligonucleotide"
ttttctactgttaaggctgat

SEQ ID NO: 16559 - DNA, 21 bp, Artificial Sequence
  source: /note="Description of Artificial Sequence: Synthetic oligonucleotide"
ttttctacgtatagtcatcat

SEQ ID NO: 16560 - DNA, 21 bp, Artificial Sequence
  source: /note="Description of Artificial Sequence: Synthetic oligonucleotide"
ttttcggttgcgcgtattggt

SEQ ID NO: 16561 - DNA, 21 bp, Artificial Sequence
  source: /note="Description of Artificial Sequence: Synthetic oligonucleotide"
ttttcggtgccttcggcgggt

SEQ ID NO: 16562 - DNA, 21 bp, Artificial Sequence
  source: /note="Description of Artificial Sequence: Synthetic oligonucleotide"
tttactgcgaagggtattact

SEQ ID NO: 16563 - DNA, 21 bp, Artificial Sequence
  source: /note="Description of Artificial Sequence: Synthetic oligonucleotide"
tttacggctcgtactacggct

SEQ ID NO: 16564 - DNA, 21 bp, Artificial Sequence
  source: /note="Description of Artificial Sequence: Synthetic oligonucleotide"
tttactgcgtcgggtgtttcg

SEQ ID NO: 16565 - DNA, 21 bp, Artificial Sequence
  source: /note="Description of Artificial Sequence: Synthetic oligonucleotide"
tttacggcgactgtggctatt

SEQ ID NO: 16566 - DNA, 21 bp, Artificial Sequence
  source: /note="Description of Artificial Sequence: Synthetic oligonucleotide"
tttacgtgtccggcggtgtct

SEQ ID NO: 16567 - DNA, 21 bp, Artificial Sequence
  source: /note="Description of Artificial Sequence: Synthetic oligonucleotide"
tttactgatattgatgatcgg

SEQ ID NO: 16568 - DNA, 21 bp, Artificial Sequence
  source: /note="Description of Artificial Sequence: Synthetic oligonucleotide"
tttactgatcggcagggttat

SEQ ID NO: 16569 - DNA, 21 bp, Artificial Sequence
  source: /note="Description of Artificial Sequence: Synthetic oligonucleotide"
tttacggattcgtcgccttat

SEQ ID NO: 16570 - DNA, 21 bp, Artificial Sequence
  source: /note="Description of Artificial Sequence: Synthetic oligonucleotide"
tttactgagcatgggtatagt

SEQ ID NO: 16571 - DNA, 21 bp, Artificial Sequence
  source: /note="Description of Artificial Sequence: Synthetic oligonucleotide"
tttacggagccttctacgtct

SEQ ID NO: 16572 - DNA, 21 bp, Artificial Sequence
  source: /note="Description of Artificial Sequence: Synthetic oligonucleotide"
tttactgggaagggggatgtt

SEQ ID NO: 16573 - DNA, 21 bp, Artificial Sequence
  source: /note="Description of Artificial Sequence: Synthetic oligonucleotide"
tttacgggtactcatagtgcg

SEQ ID NO: 16574 - DNA, 21 bp, Artificial Sequence
  source: /note="Description of Artificial Sequence: Synthetic oligonucleotide"
tttactcatcgtgtgcctgat

SEQ ID NO: 16575 - DNA, 21 bp, Artificial Sequence
  source: /note="Description of Artificial Sequence: Synthetic oligonucleotide"
tttactattaagacgattctt

SEQ ID NO: 16576 - DNA, 21 bp, Artificial Sequence
  source: /note="Description of Artificial Sequence: Synthetic oligonucleotide"
tttactaagatgcagctttct

SEQ ID NO: 16577 - DNA, 21 bp, Artificial Sequence
  source: /note="Description of Artificial Sequence: Synthetic oligonucleotide"
tttacgaagccgagtacgacg

SEQ ID NO: 16578 - DNA, 21 bp, Artificial Sequence
  source: /note="Description of Artificial Sequence: Synthetic oligonucleotide"
tttactaagtctaaggctgat

SEQ ID NO: 16579 - DNA, 21 bp, Artificial Sequence
  source: /note="Description of Artificial Sequence: Synthetic oligonucleotide"
tttactttggagtctaagctt

SEQ ID NO: 16580 - DNA, 21 bp, Artificial Sequence
  source: /note="Description of Artificial Sequence: Synthetic oligonucleotide"
tttactcttgttactctggag

SEQ ID NO: 16581 - DNA, 21 bp, Artificial Sequence
  source: /note="Description of Artificial Sequence: Synthetic oligonucleotide"
tttactatggctcctattgtg

SEQ ID NO: 16582 - DNA, 21 bp, Artificial Sequence
  source: /note="Description of Artificial Sequence: Synthetic oligonucleotide"
tttacgaatgatccgtcttct

SEQ ID NO: 16583 - DNA, 21 bp, Artificial Sequence
  source: /note="Description of Artificial Sequence: Synthetic oligonucleotide"
tttactaatcgtgatgtggct

SEQ ID NO: 16584 - DNA, 21 bp, Artificial Sequence
  source: /note="Description of Artificial Sequence: Synthetic oligonucleotide"
tttactaattcgagtagtccg

SEQ ID NO: 16585 - DNA, 21 bp, Artificial Sequence
  source: /note="Description of Artificial Sequence: Synthetic oligonucleotide"
tttactccgctgatttctcat

SEQ ID NO: 16586 - DNA, 21 bp, Artificial Sequence
  source: /note="Description of Artificial Sequence: Synthetic oligonucleotide"
tttactcaggcgctgtttcct

SEQ ID NO: 16587 - DNA, 21 bp, Artificial Sequence
  source: /note="Description of Artificial Sequence: Synthetic oligonucleotide"
tttactcagttgcctagtctt

SEQ ID NO: 16588 - DNA, 21 bp, Artificial Sequence
  source: /note="Description of Artificial Sequence: Synthetic oligonucleotide"
tttactcagatgtctctgtct

SEQ ID NO: 16589 - DNA, 21 bp, Artificial Sequence
  source: /note="Description of Artificial Sequence: Synthetic oligonucleotide"
tttacgcagaataagccgatg

SEQ ID NO: 16590 - DNA, 21 bp, Artificial Sequence
  source: /note="Description of Artificial Sequence: Synthetic oligonucleotide"
tttacgcagtcgttgccgact

SEQ ID NO: 16591 - DNA, 21 bp, Artificial Sequence
  source: /note="Description of Artificial Sequence: Synthetic oligonucleotide"
tttactaggcttgagcctcag

SEQ ID NO: 16592 - DNA, 21 bp, Artificial Sequence
  source: /note="Description of Artificial Sequence: Synthetic oligonucleotide"
tttacgcgtccgagtttggct

SEQ ID NO: 16593 - DNA, 21 bp, Artificial Sequence
  source: /note="Description of Artificial Sequence: Synthetic oligonucleotide"
tttacgcggtctgtggcggcg

SEQ ID NO: 16594 - DNA, 21 bp, Artificial Sequence
  source: /note="Description of Artificial Sequence: Synthetic oligonucleotide"
tttacgagtgcgccgctgctt

SEQ ID NO: 16595 - DNA, 21 bp, Artificial Sequence
  source: /note="Description of Artificial Sequence: Synthetic oligonucleotide"
tttacttctgctcctaatatg

SEQ ID NO: 16596 - DNA, 21 bp, Artificial Sequence
  source: /note="Description of Artificial Sequence: Synthetic oligonucleotide"
tttacgagtgatggtacggag

SEQ ID NO: 16597 - DNA, 21 bp, Artificial Sequence
  source: /note="Description of Artificial Sequence: Synthetic oligonucleotide"
tttacgtcgaaggggccgttt

SEQ ID NO: 16598 - DNA, 21 bp, Artificial Sequence
  source: /note="Description of Artificial Sequence: Synthetic oligonucleotide"
tttacttcgaagcatcttggg

SEQ ID NO: 16599 - DNA, 21 bp, Artificial Sequence
  source: /note="Description of Artificial Sequence: Synthetic oligonucleotide"
tttacgagtagggaggatgcg

SEQ ID NO: 16600 - DNA, 21 bp, Artificial Sequence
  source: /note="Description of Artificial Sequence: Synthetic oligonucleotide"
tttacttcgacgtttcctagt

SEQ ID NO: 16601 - DNA, 21 bp, Artificial Sequence
  source: /note="Description of Artificial Sequence: Synthetic oligonucleotide"
tttacgactgcgccgattctg

SEQ ID NO: 16602 - DNA, 21 bp, Artificial Sequence
  source: /note="Description of Artificial Sequence: Synthetic oligonucleotide"
tttacgactgatagggtgtcg

SEQ ID NO: 16603 - DNA, 21 bp, Artificial Sequence
  source: /note="Description of Artificial Sequence: Synthetic oligonucleotide"
tttacgacgaaggcggcgttt

SEQ ID NO: 16604 - DNA, 21 bp, Artificial Sequence
  source: /note="Description of Artificial Sequence: Synthetic oligonucleotide"
tttacggttaatcttcttggg

SEQ ID NO: 16605 - DNA, 21 bp, Artificial Sequence
  source: /note="Description of Artificial Sequence: Synthetic oligonucleotide"
tttgttgcgaatgttaggcct

SEQ ID NO: 16606 - DNA, 21 bp, Artificial Sequence
  source: /note="Description of Artificial Sequence: Synthetic oligonucleotide"
tttgttgctagtgcgtctcat

SEQ ID NO: 16607 - DNA, 21 bp, Artificial Sequence
  source: /note="Description of Artificial Sequence: Synthetic oligonucleotide"
tttgtggataataatctttct

SEQ ID NO: 16608 - DNA, 21 bp, Artificial Sequence
  source: /note="Description of Artificial Sequence: Synthetic oligonucleotide"
tttgtggatccgtattatgag

SEQ ID NO: 16609 - DNA, 21 bp, Artificial Sequence
  source: /note="Description of Artificial Sequence: Synthetic oligonucleotide"
tttgttgagcggtcgtcgagt

SEQ ID NO: 16610 - DNA, 21 bp, Artificial Sequence
  source: /note="Description of Artificial Sequence: Synthetic oligonucleotide"
tttgttggtgcgactatgagt

SEQ ID NO: 16611 - DNA, 21 bp, Artificial Sequence
  source: /note="Description of Artificial Sequence: Synthetic oligonucleotide"
tttgtggggaagccggagtct

SEQ ID NO: 16612 - DNA, 21 bp, Artificial Sequence
  source: /note="Description of Artificial Sequence: Synthetic oligonucleotide"
tttgttgggaattctcgtttg

SEQ ID NO: 16613 - DNA, 21 bp, Artificial Sequence
  source: /note="Description of Artificial Sequence: Synthetic oligonucleotide"
tttgtgcatagtgggcggcag

SEQ ID NO: 16614 - DNA, 21 bp, Artificial Sequence
  source: /note="Description of Artificial Sequence: Synthetic oligonucleotide"
tttgttatgcatacgcgtgat

SEQ ID NO: 16615 - DNA, 21 bp, Artificial Sequence
  source: /note="Description of Artificial Sequence: Synthetic oligonucleotide"
tttgttaatgcgcgggtgccg

SEQ ID NO: 16616 - DNA, 21 bp, Artificial Sequence
  source: /note="Description of Artificial Sequence: Synthetic oligonucleotide"
tttgttaatccgcatccttct

SEQ ID NO: 16617 - DNA, 21 bp, Artificial Sequence
  source: /note="Description of Artificial Sequence: Synthetic oligonucleotide"
tttgtgaatcagacgactgtg

SEQ ID NO: 16618 - DNA, 21 bp, Artificial Sequence
  source: /note="Description of Artificial Sequence: Synthetic oligonucleotide"
tttgtgccgcatgctaatcag

SEQ ID NO: 16619 - DNA, 21 bp, Artificial Sequence
  source: /note="Description of Artificial Sequence: Synthetic oligonucleotide"
tttgtgcagcagtctaagcct

SEQ ID NO: 16620 - DNA, 21 bp, Artificial Sequence
  source: /note="Description of Artificial Sequence: Synthetic oligonucleotide"
tttgtttcgcatagtcagtct

SEQ ID NO: 16621 - DNA, 21 bp, Artificial Sequence
  source: /note="Description of Artificial Sequence: Synthetic oligonucleotide"
tttgttagtcgggatcgggcg

SEQ ID NO: 16622 - DNA, 21 bp, Artificial Sequence
  source: /note="Description of Artificial Sequence: Synthetic oligonucleotide"
tttgtttcttcgattcatgcg

SEQ ID NO: 16623 - DNA, 21 bp, Artificial Sequence
  source: /note="Description of Artificial Sequence: Synthetic oligonucleotide"
tttgttagtacgccggggatg

SEQ ID NO: 16624 - DNA, 21 bp, Artificial Sequence
  source: /note="Description of Artificial Sequence: Synthetic oligonucleotide"
tttgtttcgactactagtcct

SEQ ID NO: 16625 - DNA, 21 bp, Artificial Sequence
  source: /note="Description of Artificial Sequence: Synthetic oligonucleotide"
tttgttagtactgttgctcct

SEQ ID NO: 16626 - DNA, 21 bp, Artificial Sequence
  source: /note="Description of Artificial Sequence: Synthetic oligonucleotide"
tttgttactgctactttgcct

SEQ ID NO: 16627 - DNA, 21 bp, Artificial Sequence
  source: /note="Description of Artificial Sequence: Synthetic oligonucleotide"
tttgttacggagtctatgctg

SEQ ID NO: 16628 - DNA, 21 bp, Artificial Sequence
  source: /note="Description of Artificial Sequence: Synthetic oligonucleotide"
tttgtggttgggtctgatggt

SEQ ID NO: 16629 - DNA, 21 bp, Artificial Sequence
  source: /note="Description of Artificial Sequence: Synthetic oligonucleotide"
ttttggaaggagggttcgccg

SEQ ID NO: 16630 - DNA, 21 bp, Artificial Sequence
  source: /note="Description of Artificial Sequence: Synthetic oligonucleotide"
ttttatccgggtccgaagatt

SEQ ID NO: 16631 - DNA, 21 bp, Artificial Sequence
  source: /note="Description of Artificial Sequence: Synthetic oligonucleotide"
ttttatccgtcgatgaaggat

SEQ ID NO: 16632 - DNA, 21 bp, Artificial Sequence
  source: /note="Description of Artificial Sequence: Synthetic oligonucleotide"
ttttatccgactgagctgaag

SEQ ID NO: 16633 - DNA, 21 bp, Artificial Sequence
  source: /note="Description of Artificial Sequence: Synthetic oligonucleotide"
ttttattcggctactatgcct

SEQ ID NO: 16634 - DNA, 21 bp, Artificial Sequence
  source: /note="Description of Artificial Sequence: Synthetic oligonucleotide"
ggggcggctgcgcagtatacg

SEQ ID NO: 16635 - DNA, 21 bp, Artificial Sequence
  source: /note="Description of Artificial Sequence: Synthetic oligonucleotide"
ggggcggctccgcagtctatt

SEQ ID NO: 16636 - DNA, 21 bp, Artificial Sequence
  source: /note="Description of Artificial Sequence: Synthetic oligonucleotide"
ggggcggctagtggtcttggt

SEQ ID NO: 16637 - DNA, 21 bp, Artificial Sequence
  source: /note="Description of Artificial Sequence: Synthetic oligonucleotide"
ggggctgctactcttatttcg

SEQ ID NO: 16638 - DNA, 21 bp, Artificial Sequence
  source: /note="Description of Artificial Sequence: Synthetic oligonucleotide"
ggtgctgcgacgcggaatccg

SEQ ID NO: 16639 - DNA, 21 bp, Artificial Sequence
  source: /note="Description of Artificial Sequence: Synthetic oligonucleotide"
ggtgctgatgagcctgggggt

SEQ ID NO: 16640 - DNA, 21 bp, Artificial Sequence
  source: /note="Description of Artificial Sequence: Synthetic oligonucleotide"
ggtgctgatctgagtgggcgg

SEQ ID NO: 16641 - DNA, 21 bp, Artificial Sequence
  source: /note="Description of Artificial Sequence: Synthetic oligonucleotide"
ggggcggatcgtaatgttccg

SEQ ID NO: 16642 - DNA, 21 bp, Artificial Sequence
  source: /note="Description of Artificial Sequence: Synthetic oligonucleotide"
ggggctgattcgagtcggtat

SEQ ID NO: 16643 - DNA, 21 bp, Artificial Sequence
  source: /note="Description of Artificial Sequence: Synthetic oligonucleotide"
ggggctgaggggggtggtaat

SEQ ID NO: 16644 - DNA, 21 bp, Artificial Sequence
  source: /note="Description of Artificial Sequence: Synthetic oligonucleotide"
ggtgctgagaagcatttgcct

SEQ ID NO: 16645 - DNA, 21 bp, Artificial Sequence
  source: /note="Description of Artificial Sequence: Synthetic oligonucleotide"
ggggctgagccgatgttggcg

SEQ ID NO: 16646 - DNA, 21 bp, Artificial Sequence
  source: /note="Description of Artificial Sequence: Synthetic oligonucleotide"
ggtgctgagtcgctgtctgtg

SEQ ID NO: 16647 - DNA, 21 bp, Artificial Sequence
  source: /note="Description of Artificial Sequence: Synthetic oligonucleotide"
ggggcttttgctttgagtggt

SEQ ID NO: 16648 - DNA, 21 bp, Artificial Sequence
  source: /note="Description of Artificial Sequence: Synthetic oligonucleotide"
ggtgcttttggtcctacgtcg

SEQ ID NO: 16649 - DNA, 21 bp, Artificial Sequence
  source: /note="Description of Artificial Sequence: Synthetic oligonucleotide"
ggtgcgggtgctgggtcgcgt

SEQ ID NO: 16650 - DNA, 21 bp, Artificial Sequence
  source: /note="Description of Artificial Sequence: Synthetic oligonucleotide"
ggtgctggtgagctgcctccg

SEQ ID NO: 16651 - DNA, 21 bp, Artificial Sequence
  source: /note="Description of Artificial Sequence: Synthetic oligonucleotide"
ggtgctggtcttaagggtagt

SEQ ID NO: 16652 - DNA, 21 bp, Artificial Sequence
  source: /note="Description of Artificial Sequence: Synthetic oligonucleotide"
ggtgcggggttgccggtgact

SEQ ID NO: 16653 - DNA, 21 bp, Artificial Sequence
  source: /note="Description of Artificial Sequence: Synthetic oligonucleotide"
ggggcgggtatgaatactgct

SEQ ID NO: 16654 - DNA, 21 bp, Artificial Sequence
  source: /note="Description of Artificial Sequence: Synthetic oligonucleotide"
ggggctggtactgctatgctt

SEQ ID NO: 16655 - DNA, 21 bp, Artificial Sequence
  source: /note="Description of Artificial Sequence: Synthetic oligonucleotide"
ggggcgcatgatactgtgact

SEQ ID NO: 16656 - DNA, 21 bp, Artificial Sequence
  source: /note="Description of Artificial Sequence: Synthetic oligonucleotide"
ggggctcatgagtgtcttagt

SEQ ID NO: 16657 - DNA, 21 bp, Artificial Sequence
  source: /note="Description of Artificial Sequence: Synthetic oligonucleotide"
ggggcgcatggtgcttatcag

SEQ ID NO: 16658 - DNA, 21 bp, Artificial Sequence
  source: /note="Description of Artificial Sequence: Synthetic oligonucleotide"
ggggctcattcttataatgtg

SEQ ID NO: 16659 - DNA, 21 bp, Artificial Sequence
  source: /note="Description of Artificial Sequence: Synthetic oligonucleotide"
ggtgcgcatactgggttgtct

SEQ ID NO: 16660 - DNA, 21 bp, Artificial Sequence
  source: /note="Description of Artificial Sequence: Synthetic oligonucleotide"
ggtgcgcatactgttcggctt

SEQ ID NO: 16661 - DNA, 21 bp, Artificial Sequence
  source: /note="Description of Artificial Sequence: Synthetic oligonucleotide"
ggggcgcatgtggcgccggtt

SEQ ID NO: 16662 - DNA, 21 bp, Artificial Sequence
  source: /note="Description of Artificial Sequence: Synthetic oligonucleotide"
ggggctttggctactgctacg

SEQ ID NO: 16663 - DNA, 21 bp, Artificial Sequence
  source: /note="Description of Artificial Sequence: Synthetic oligonucleotide"
ggggctttggatggtactgct

SEQ ID NO: 16664 - DNA, 21 bp, Artificial Sequence
  source: /note="Description of Artificial Sequence: Synthetic oligonucleotide"
ggtgctcttgggtttcctcag

SEQ ID NO: 16665 - DNA, 21 bp, Artificial Sequence
  source: /note="Description of Artificial Sequence: Synthetic oligonucleotide"
ggtgcgctgggggtggctcat

SEQ ID NO: 16666 - DNA, 21 bp, Artificial Sequence
  source: /note="Description of Artificial Sequence: Synthetic oligonucleotide"
ggtgcgctgatgcagaagaat

SEQ ID NO: 16667 - DNA, 21 bp, Artificial Sequence
  source: /note="Description of Artificial Sequence: Synthetic oligonucleotide"
ggtgcgctgatggtgtcgcgg

SEQ ID NO: 16668 - DNA, 21 bp, Artificial Sequence
  source: /note="Description of Artificial Sequence: Synthetic oligonucleotide"
ggggcgcttagtgctaatcag

SEQ ID NO: 16669 - DNA, 21 bp, Artificial Sequence
  source: /note="Description of Artificial Sequence: Synthetic oligonucleotide"
ggggctcttgttattacgtct

SEQ ID NO: 16670 - DNA, 21 bp, Artificial Sequence
  source: /note="Description of Artificial Sequence: Synthetic oligonucleotide"
ggtgcgatgtctattaatgcg

SEQ ID NO: 16671 - DNA, 21 bp, Artificial Sequence
  source: /note="Description of Artificial Sequence: Synthetic oligonucleotide"
ggggctaatggtgcgctgagg

SEQ ID NO: 16672 - DNA, 21 bp, Artificial Sequence
  source: /note="Description of Artificial Sequence: Synthetic oligonucleotide"
ggtgctaatattcgtattgct

SEQ ID NO: 16673 - DNA, 21 bp, Artificial Sequence
  source: /note="Description of Artificial Sequence: Synthetic oligonucleotide"
ggtgcgaatcggttggataat

SEQ ID NO: 16674 - DNA, 21 bp, Artificial Sequence
  source: /note="Description of Artificial Sequence: Synthetic oligonucleotide"
ggtgctcctcctctgccgcgt

SEQ ID NO: 16675 - DNA, 21 bp, Artificial Sequence
  source: /note="Description of Artificial Sequence: Synthetic oligonucleotide"
ggggcgcagttgacgcgtatg

SEQ ID NO: 16676 - DNA, 21 bp, Artificial Sequence
  source: /note="Description of Artificial Sequence: Synthetic oligonucleotide"
ggtgcgcagcgtcagcttaat

SEQ ID NO: 16677 - DNA, 21 bp, Artificial Sequence
  source: /note="Description of Artificial Sequence: Synthetic oligonucleotide"
ggggctcgggcgcttggtctt

SEQ ID NO: 16678 - DNA, 21 bp, Artificial Sequence
  source: /note="Description of Artificial Sequence: Synthetic oligonucleotide"
ggtgctcgtgcgaatggtggt

SEQ ID NO: 16679 - DNA, 21 bp, Artificial Sequence
  source: /note="Description of Artificial Sequence: Synthetic oligonucleotide"
ggggcgagggagattccgagt

SEQ ID NO: 16680 - DNA, 21 bp, Artificial Sequence
  source: /note="Description of Artificial Sequence: Synthetic oligonucleotide"
ggtgctcgtcctgatctgggt

SEQ ID NO: 16681 - DNA, 21 bp, Artificial Sequence
  source: /note="Description of Artificial Sequence: Synthetic oligonucleotide"
ggtgctcgggttcttggttct

SEQ ID NO: 16682 - DNA, 21 bp, Artificial Sequence
  source: /note="Description of Artificial Sequence: Synthetic oligonucleotide"
ggggcgtcggatactgattgg

SEQ ID NO: 16683 - DNA, 21 bp, Artificial Sequence
  source: /note="Description of Artificial Sequence: Synthetic oligonucleotide"
ggtgcttctgggactagtact

SEQ ID NO: 16684 - DNA, 21 bp, Artificial Sequence
  source: /note="Description of Artificial Sequence: Synthetic oligonucleotide"
ggggctagtattaagtcttct

SEQ ID NO: 16685 - DNA, 21 bp, Artificial Sequence
  source: /note="Description of Artificial Sequence: Synthetic oligonucleotide"
ggtgctagtaagaatcctacg

SEQ ID NO: 16686 - DNA, 21 bp, Artificial Sequence
  source: /note="Description of Artificial Sequence: Synthetic oligonucleotide"
ggtgcttctttggctgatgat

SEQ ID NO: 16687 - DNA, 21 bp, Artificial Sequence
  source: /note="Description of Artificial Sequence: Synthetic oligonucleotide"
ggtgcgtcgttgaagccggtg

SEQ ID NO: 16688 - DNA, 21 bp, Artificial Sequence
  source: /note="Description of Artificial Sequence: Synthetic oligonucleotide"
ggtgcgtcgagtgctagtggt

SEQ ID NO: 16689 - DNA, 21 bp, Artificial Sequence
  source: /note="Description of Artificial Sequence: Synthetic oligonucleotide"
ggtgcgtcgagtttgaagccg

SEQ ID NO: 16690 - DNA, 21 bp, Artificial Sequence
  source: /note="Description of Artificial Sequence: Synthetic oligonucleotide"
ggggcttctagtcgtcctgtt

SEQ ID NO: 16691 - DNA, 21 bp, Artificial Sequence
  source: /note="Description of Artificial Sequence: Synthetic oligonucleotide"
ggggctagtacgcgtaatatt

SEQ ID NO: 16692 - DNA, 21 bp, Artificial Sequence
  source: /note="Description of Artificial Sequence: Synthetic oligonucleotide"
ggtgcttcggtgaatcctacg

SEQ ID NO: 16693 - DNA, 21 bp, Artificial Sequence
  source: /note="Description of Artificial Sequence: Synthetic oligonucleotide"
ggtgctactccgaagactttg

SEQ ID NO: 16694 - DNA, 21 bp, Artificial Sequence
  source: /note="Description of Artificial Sequence: Synthetic oligonucleotide"
ggggctacgccgccttcgacg

SEQ ID NO: 16695 - DNA, 21 bp, Artificial Sequence
  source: /note="Description of Artificial Sequence: Synthetic oligonucleotide"
ggggctacgcagtttagggag

SEQ ID NO: 16696 - DNA, 21 bp, Artificial Sequence
  source: /note="Description of Artificial Sequence: Synthetic oligonucleotide"
ggggcgactagtcagattatg

SEQ ID NO: 16697 - DNA, 21 bp, Artificial Sequence
  source: /note="Description of Artificial Sequence: Synthetic oligonucleotide"
ggggctgttaggccgctgatg

SEQ ID NO: 16698 - DNA, 21 bp, Artificial Sequence
  source: /note="Description of Artificial Sequence: Synthetic oligonucleotide"
ggggcttggaaggctgagact

SEQ ID NO: 16699 - DNA, 21 bp, Artificial Sequence
  source: /note="Description of Artificial Sequence: Synthetic oligonucleotide"
ggggcttggctgccgaatgct

SEQ ID NO: 16700 - DNA, 21 bp, Artificial Sequence
  source: /note="Description of Artificial Sequence: Synthetic oligonucleotide"
ggtgcttggtctttgccggat

SEQ ID NO: 16701 - DNA, 21 bp, Artificial Sequence
  source: /note="Description of Artificial Sequence: Synthetic oligonucleotide"
ggggcttatgcgagggctacg

SEQ ID NO: 16702 - DNA, 21 bp, Artificial Sequence
  source: /note="Description of Artificial Sequence: Synthetic oligonucleotide"
ggggcgtatgcttataatggg

SEQ ID NO: 16703 - DNA, 21 bp, Artificial Sequence
  source: /note="Description of Artificial Sequence: Synthetic oligonucleotide"
ggtgcgtatggtatgtctgag

SEQ ID NO: 16704 - DNA, 21 bp, Artificial Sequence
  source: /note="Description of Artificial Sequence: Synthetic oligonucleotide"
ggtgcttatcggccggatctg

SEQ ID NO: 16705 - DNA, 21 bp, Artificial Sequence
  source: /note="Description of Artificial Sequence: Synthetic oligonucleotide"
ggttgttcggggcagcagtcg

SEQ ID NO: 16706 - DNA, 21 bp, Artificial Sequence
  source: /note="Description of Artificial Sequence: Synthetic oligonucleotide"
ggttgttcgtctcttccggag

SEQ ID NO: 16707 - DNA, 21 bp, Artificial Sequence
  source: /note="Description of Artificial Sequence: Synthetic oligonucleotide"
gggtgtacggggtatcaggcg

SEQ ID NO: 16708 - DNA, 21 bp, Artificial Sequence
  source: /note="Description of Artificial Sequence: Synthetic oligonucleotide"
gggtgtgttggtccttttagt

SEQ ID NO: 16709 - DNA, 21 bp, Artificial Sequence
  source: /note="Description of Artificial Sequence: Synthetic oligonucleotide"
ggtgatgcggcgtataagaat

SEQ ID NO: 16710 - DNA, 21 bp, Artificial Sequence
  source: /note="Description of Artificial Sequence: Synthetic oligonucleotide"
ggtgatgcgtttgtggtgggt

SEQ ID NO: 16711 - DNA, 21 bp, Artificial Sequence
  source: /note="Description of Artificial Sequence: Synthetic oligonucleotide"
ggggatgctactgatcggatg

SEQ ID NO: 16712 - DNA, 21 bp, Artificial Sequence
  source: /note="Description of Artificial Sequence: Synthetic oligonucleotide"
ggtgattttggtatgaagttg

SEQ ID NO: 16713 - DNA, 21 bp, Artificial Sequence
  source: /note="Description of Artificial Sequence: Synthetic oligonucleotide"
ggtgatggtacgcggggtgcg

SEQ ID NO: 16714 - DNA, 21 bp, Artificial Sequence
  source: /note="Description of Artificial Sequence: Synthetic oligonucleotide"
ggtgatggtgtttatccggct

SEQ ID NO: 16715 - DNA, 21 bp, Artificial Sequence
  source: /note="Description of Artificial Sequence: Synthetic oligonucleotide"
ggtgatcataagagtggtgcg

SEQ ID NO: 16716 - DNA, 21 bp, Artificial Sequence
  source: /note="Description of Artificial Sequence: Synthetic oligonucleotide"
ggggataaggttaggacgctt

SEQ ID NO: 16717 - DNA, 21 bp, Artificial Sequence
  source: /note="Description of Artificial Sequence: Synthetic oligonucleotide"
ggtgatcttcatattccggtg

SEQ ID NO: 16718 - DNA, 21 bp, Artificial Sequence
  source: /note="Description of Artificial Sequence: Synthetic oligonucleotide"
ggggatttgaatccggtgccg

SEQ ID NO: 16719 - DNA, 21 bp, Artificial Sequence
  source: /note="Description of Artificial Sequence: Synthetic oligonucleotide"
ggtgatctttattataaggcg

SEQ ID NO: 16720 - DNA, 21 bp, Artificial Sequence
  source: /note="Description of Artificial Sequence: Synthetic oligonucleotide"
ggtgatatgcttaatgtgatt

SEQ ID NO: 16721 - DNA, 21 bp, Artificial Sequence
  source: /note="Description of Artificial Sequence: Synthetic oligonucleotide"
ggggatccgaatcctgctgag

SEQ ID NO: 16722 - DNA, 21 bp, Artificial Sequence
  source: /note="Description of Artificial Sequence: Synthetic oligonucleotide"
ggtgatcctgttcatcagtcg

SEQ ID NO: 16723 - DNA, 21 bp, Artificial Sequence
  source: /note="Description of Artificial Sequence: Synthetic oligonucleotide"
ggtgatcgtgatggttcttgg

SEQ ID NO: 16724 - DNA, 21 bp, Artificial Sequence
  source: /note="Description of Artificial Sequence: Synthetic oligonucleotide"
ggtgataggatgccgaggtcg

SEQ ID NO: 16725 - DNA, 21 bp, Artificial Sequence
  source: /note="Description of Artificial Sequence: Synthetic oligonucleotide"
ggggataggagtacttcgcat

SEQ ID NO: 16726 - DNA, 21 bp, Artificial Sequence
  source: /note="Description of Artificial Sequence: Synthetic oligonucleotide"
ggggatcgtacgtcgctgcgt

SEQ ID NO: 16727 - DNA, 21 bp, Artificial Sequence
  source: /note="Description of Artificial Sequence: Synthetic oligonucleotide"
ggtgatcgggttgttggtgtg

SEQ ID NO: 16728 - DNA, 21 bp, Artificial Sequence
  source: /note="Description of Artificial Sequence: Synthetic oligonucleotide"
ggggattcttttccgatgagt

SEQ ID NO: 16729 - DNA, 21 bp, Artificial Sequence
  source: /note="Description of Artificial Sequence: Synthetic oligonucleotide"
ggtgattctcagctgtattat

SEQ ID NO: 16730 - DNA, 21 bp, Artificial Sequence
  source: /note="Description of Artificial Sequence: Synthetic oligonucleotide"
ggtgattcgtcgcttcatagt

SEQ ID NO: 16731 - DNA, 21 bp, Artificial Sequence
  source: /note="Description of Artificial Sequence: Synthetic oligonucleotide"
ggtgatacgcatctgattggt

SEQ ID NO: 16732 - DNA, 21 bp, Artificial Sequence
  source: /note="Description of Artificial Sequence: Synthetic oligonucleotide"
ggtgatacgctgaaggctcct

SEQ ID NO: 16733 - DNA, 21 bp, Artificial Sequence
  source: /note="Description of Artificial Sequence: Synthetic oligonucleotide"
ggggatactcgtcctagtttg

SEQ ID NO: 16734 - DNA, 21 bp, Artificial Sequence
  source: /note="Description of Artificial Sequence: Synthetic oligonucleotide"
ggggatgtgattacgactcat

SEQ ID NO: 16735 - DNA, 21 bp, Artificial Sequence
  source: /note="Description of Artificial Sequence: Synthetic oligonucleotide"
ggtgatgtgtcggtttatgat

SEQ ID NO: 16736 - DNA, 21 bp, Artificial Sequence
  source: /note="Description of Artificial Sequence: Synthetic oligonucleotide"
ggtgaggatgcttttttgcgt

SEQ ID NO: 16737 - DNA, 21 bp, Artificial Sequence
  source: /note="Description of Artificial Sequence: Synthetic oligonucleotide"
ggtgaggatggtttttcttat

SEQ ID NO: 16738 - DNA, 21 bp, Artificial Sequence
  source: /note="Description of Artificial Sequence: Synthetic oligonucleotide"
ggggaggatcattcgccgcat

SEQ ID NO: 16739 - DNA, 21 bp, Artificial Sequence
  source: /note="Description of Artificial Sequence: Synthetic oligonucleotide"
ggggaggggtcttatcctcgg

SEQ ID NO: 16740 - DNA, 21 bp, Artificial Sequence
  source: /note="Description of Artificial Sequence: Synthetic oligonucleotide"
ggtgagggtacttatcaggcg

SEQ ID NO: 16741 - DNA, 21 bp, Artificial Sequence
  source: /note="Description of Artificial Sequence: Synthetic oligonucleotide"
ggtgagcataaggcgaattct

SEQ ID NO: 16742 - DNA, 21 bp, Artificial Sequence
  source: /note="Description of Artificial Sequence: Synthetic oligonucleotide"
ggggagaagcttcgtgcgtat

SEQ ID NO: 16743 - DNA, 21 bp, Artificial Sequence
  source: /note="Description of Artificial Sequence: Synthetic oligonucleotide"
ggggagaagtctattccgcct

SEQ ID NO: 16744 - DNA, 21 bp, Artificial Sequence
  source: /note="Description of Artificial Sequence: Synthetic oligonucleotide"
ggtgagaagagtctggttgtt

SEQ ID NO: 16745 - DNA, 21 bp, Artificial Sequence
  source: /note="Description of Artificial Sequence: Synthetic oligonucleotide"
ggtgagctgtttctgtcgtcg

SEQ ID NO: 16746 - DNA, 21 bp, Artificial Sequence
  source: /note="Description of Artificial Sequence: Synthetic oligonucleotide"
ggtgagaatccgctgccggtt

SEQ ID NO: 16747 - DNA, 21 bp, Artificial Sequence
  source: /note="Description of Artificial Sequence: Synthetic oligonucleotide"
ggggagccgtttatgcgggcg

SEQ ID NO: 16748 - DNA, 21 bp, Artificial Sequence
  source: /note="Description of Artificial Sequence: Synthetic oligonucleotide"
ggggagcctaagcatcattct

SEQ ID NO: 16749 - DNA, 21 bp, Artificial Sequence
  source: /note="Description of Artificial Sequence: Synthetic oligonucleotide"
ggggagcctgtggatacttgg

SEQ ID NO: 16750 - DNA, 21 bp, Artificial Sequence
  source: /note="Description of Artificial Sequence: Synthetic oligonucleotide"
ggtgagccggtgctgggggcg

SEQ ID NO: 16751 - DNA, 21 bp, Artificial Sequence
  source: /note="Description of Artificial Sequence: Synthetic oligonucleotide"
ggggagcgttttcgtgagtgg

SEQ ID NO: 16752 - DNA, 21 bp, Artificial Sequence
  source: /note="Description of Artificial Sequence: Synthetic oligonucleotide"
ggtgagcggatgaagattgat

SEQ ID NO: 16753 - DNA, 21 bp, Artificial Sequence
  source: /note="Description of Artificial Sequence: Synthetic oligonucleotide"
ggggagaggtcgttgaatatg

SEQ ID NO: 16754 - DNA, 21 bp, Artificial Sequence
  source: /note="Description of Artificial Sequence: Synthetic oligonucleotide"
ggggagcggtcgcctcctgag

SEQ ID NO: 16755 - DNA, 21 bp, Artificial Sequence
  source: /note="Description of Artificial Sequence: Synthetic oligonucleotide"
ggggagtcgcctgcgaatctg

SEQ ID NO: 16756 - DNA, 21 bp, Artificial Sequence
  source: /note="Description of Artificial Sequence: Synthetic oligonucleotide"
ggggagacgcctgctcatgct

SEQ ID NO: 16757 - DNA, 21 bp, Artificial Sequence
  source: /note="Description of Artificial Sequence: Synthetic oligonucleotide"
ggggagactaggcatgtgggg

SEQ ID NO: 16758 - DNA, 21 bp, Artificial Sequence
  source: /note="Description of Artificial Sequence: Synthetic oligonucleotide"
ggtgagactagtgcgatgcag

SEQ ID NO: 16759 - DNA, 21 bp, Artificial Sequence
  source: /note="Description of Artificial Sequence: Synthetic oligonucleotide"
ggggagacgacgaagatgcgt

SEQ ID NO: 16760 - DNA, 21 bp, Artificial Sequence
  source: /note="Description of Artificial Sequence: Synthetic oligonucleotide"
ggtgaggttgcgatgctgtat

SEQ ID NO: 16761 - DNA, 21 bp, Artificial Sequence
  source: /note="Description of Artificial Sequence: Synthetic oligonucleotide"
ggtgaggtgacgattatgtct

SEQ ID NO: 16762 - DNA, 21 bp, Artificial Sequence
  source: /note="Description of Artificial Sequence: Synthetic oligonucleotide"
ggtgaggttgttaatacgatg

SEQ ID NO: 16763 - DNA, 21 bp, Artificial Sequence
  source: /note="Description of Artificial Sequence: Synthetic oligonucleotide"
ggttttgatgctggtaagtcg

SEQ ID NO: 16764 - DNA, 21 bp, Artificial Sequence
  source: /note="Description of Artificial Sequence: Synthetic oligonucleotide"
gggtttgatattgcgagtggg

SEQ ID NO: 16765 - DNA, 21 bp, Artificial Sequence
  source: /note="Description of Artificial Sequence: Synthetic oligonucleotide"
gggtttgatgtgaagatgagt

SEQ ID NO: 16766 - DNA, 21 bp, Artificial Sequence
  source: /note="Description of Artificial Sequence: Synthetic oligonucleotide"
gggtttgaggtgcagttgatt

SEQ ID NO: 16767 - DNA, 21 bp, Artificial Sequence
  source: /note="Description of Artificial Sequence: Synthetic oligonucleotide"
ggtttttttgcgcaggtgccg

SEQ ID NO: 16768 - DNA, 21 bp, Artificial Sequence
  source: /note="Description of Artificial Sequence: Synthetic oligonucleotide"
gggtttcataatgcggcgcct

SEQ ID NO: 16769 - DNA, 21 bp, Artificial Sequence
  source: /note="Description of Artificial Sequence: Synthetic oligonucleotide"
ggttttattagtccttctgct

SEQ ID NO: 16770 - DNA, 21 bp, Artificial Sequence
  source: /note="Description of Artificial Sequence: Synthetic oligonucleotide"
gggtttaagaatgctcttccg

SEQ ID NO: 16771 - DNA, 21 bp, Artificial Sequence
  source: /note="Description of Artificial Sequence: Synthetic oligonucleotide"
gggtttaatgcgttgactggt

SEQ ID NO: 16772 - DNA, 21 bp, Artificial Sequence
  source: /note="Description of Artificial Sequence: Synthetic oligonucleotide"
gggtttaatcctagtttggtt

SEQ ID NO: 16773 - DNA, 21 bp, Artificial Sequence
  source: /note="Description of Artificial Sequence: Synthetic oligonucleotide"
gggtttaatgtggctagtggg

SEQ ID NO: 16774 - DNA, 21 bp, Artificial Sequence
  source: /note="Description of Artificial Sequence: Synthetic oligonucleotide"
ggttttaatgtgggtgggcct

SEQ ID NO: 16775 - DNA, 21 bp, Artificial Sequence
  source: /note="Description of Artificial Sequence: Synthetic oligonucleotide"
gggtttcctggtcctcagttt

SEQ ID NO: 16776 - DNA, 21 bp, Artificial Sequence
  source: /note="Description of Artificial Sequence: Synthetic oligonucleotide"
ggttttagtgggactccgtat

SEQ ID NO: 16777 - DNA, 21 bp, Artificial Sequence
  source: /note="Description of Artificial Sequence: Synthetic oligonucleotide"
gggttttcgcatatttcgttg

SEQ ID NO: 16778 - DNA, 21 bp, Artificial Sequence
  source: /note="Description of Artificial Sequence: Synthetic oligonucleotide"
ggtttttctattcgttcgacg

SEQ ID NO: 16779 - DNA, 21 bp, Artificial Sequence
  source: /note="Description of Artificial Sequence: Synthetic oligonucleotide"
ggtttttcttcgcttagtagt

SEQ ID NO: 16780 - DNA, 21 bp, Artificial Sequence
  source: /note="Description of Artificial Sequence: Synthetic oligonucleotide"
ggttttactcagtcgcagatg

SEQ ID NO: 16781 - DNA, 21 bp, Artificial Sequence
  source: /note="Description of Artificial Sequence: Synthetic oligonucleotide"
gggggtgcggctcgggagctg

SEQ ID NO: 16782 - DNA, 21 bp, Artificial Sequence
  source: /note="Description of Artificial Sequence: Synthetic oligonucleotide"
gggggtgcggctacttcggtg

SEQ ID NO: 16783 - DNA, 21 bp, Artificial Sequence
  source: /note="Description of Artificial Sequence: Synthetic oligonucleotide"
gggggtgctggtgctcgtact

SEQ ID NO: 16784 - DNA, 21 bp, Artificial Sequence
  source: /note="Description of Artificial Sequence: Synthetic oligonucleotide"
ggtggtgctcggtctagtatg

SEQ ID NO: 16785 - DNA, 21 bp, Artificial Sequence
  source: /note="Description of Artificial Sequence: Synthetic oligonucleotide"
ggtggggctgttcatacggtt

SEQ ID NO: 16786 - DNA, 21 bp, Artificial Sequence
  source: /note="Description of Artificial Sequence: Synthetic oligonucleotide"
gggggtgatagtggtgcggag

SEQ ID NO: 16787 - DNA, 21 bp, Artificial Sequence
  source: /note="Description of Artificial Sequence: Synthetic oligonucleotide"
ggtggggagaatgtgtatatt

SEQ ID NO: 16788 - DNA, 21 bp, Artificial Sequence
  source: /note="Description of Artificial Sequence: Synthetic oligonucleotide"
gggggttttgctcatcagtct

SEQ ID NO: 16789 - DNA, 21 bp, Artificial Sequence
  source: /note="Description of Artificial Sequence: Synthetic oligonucleotide"
ggtgggtttaatggggcgaat

SEQ ID NO: 16790 - DNA, 21 bp, Artificial Sequence
  source: /note="Description of Artificial Sequence: Synthetic oligonucleotide"
ggtggtgggcttactatgacg

SEQ ID NO: 16791 - DNA, 21 bp, Artificial Sequence
  source: /note="Description of Artificial Sequence: Synthetic oligonucleotide"
gggggtggtcctgctttgcct

SEQ ID NO: 16792 - DNA, 21 bp, Artificial Sequence
  source: /note="Description of Artificial Sequence: Synthetic oligonucleotide"
ggtggtggtgtgaataagccg

SEQ ID NO: 16793 - DNA, 21 bp, Artificial Sequence
  source: /note="Description of Artificial Sequence: Synthetic oligonucleotide"
ggtgggcatatgagggatggt

SEQ ID NO: 16794 - DNA, 21 bp, Artificial Sequence
  source: /note="Description of Artificial Sequence: Synthetic oligonucleotide"
gggggtattgagagtgctgtg

SEQ ID NO: 16795 - DNA, 21 bp, Artificial Sequence
  source: /note="Description of Artificial Sequence: Synthetic oligonucleotide"
ggtgggattcagtcgacgggt

SEQ ID NO: 16796 - DNA, 21 bp, Artificial Sequence
  source: /note="Description of Artificial Sequence: Synthetic oligonucleotide"
ggtggtaaggatcggcctgag

SEQ ID NO: 16797 - DNA, 21 bp, Artificial Sequence
  source: /note="Description of Artificial Sequence: Synthetic oligonucleotide"
ggtgggaagcagcctcaggct

SEQ ID NO: 16798 - DNA, 21 bp, Artificial Sequence
  source: /note="Description of Artificial Sequence: Synthetic oligonucleotide"
ggtgggaaggttgctacgggg

SEQ ID NO: 16799 - DNA, 21 bp, Artificial Sequence
  source: /note="Description of Artificial Sequence: Synthetic oligonucleotide"
gggggtctgaatcggaatccg

SEQ ID NO: 16800 - DNA, 21 bp, Artificial Sequence
  source: /note="Description of Artificial Sequence: Synthetic oligonucleotide"
ggggggttgccgagtcctgcg

SEQ ID NO: 16801 - DNA, 21 bp, Artificial Sequence
  source: /note="Description of Artificial Sequence: Synthetic oligonucleotide"
ggtggtctttctaagtctttg

SEQ ID NO: 16802 - DNA, 21 bp, Artificial Sequence
  source: /note="Description of Artificial Sequence: Synthetic oligonucleotide"
ggtggtatggcgcctgggcct

SEQ ID NO: 16803 - DNA, 21 bp, Artificial Sequence
  source: /note="Description of Artificial Sequence: Synthetic oligonucleotide"
ggtgggcctgcttatgtgggg

SEQ ID NO: 16804 - DNA, 21 bp, Artificial Sequence
  source: /note="Description of Artificial Sequence: Synthetic oligonucleotide"
ggtggtccgggtaataatccg

SEQ ID NO: 16805 - DNA, 21 bp, Artificial Sequence
  source: /note="Description of Artificial Sequence: Synthetic oligonucleotide"
ggtgggccgttgcctaagtct

SEQ ID NO: 16806 - DNA, 21 bp, Artificial Sequence
  source: /note="Description of Artificial Sequence: Synthetic oligonucleotide"
gggggtccgcttactggtccg

SEQ ID NO: 16807 - DNA, 21 bp, Artificial Sequence
  source: /note="Description of Artificial Sequence: Synthetic oligonucleotide"
ggtggtccgagggttgctcct

SEQ ID NO: 16808 - DNA, 21 bp, Artificial Sequence
  source: /note="Description of Artificial Sequence: Synthetic oligonucleotide"
ggtggtccgtatggtccggcg

SEQ ID NO: 16809 - DNA, 21 bp, Artificial Sequence
  source: /note="Description of Artificial Sequence: Synthetic oligonucleotide"
ggtgggcaggctggtaagacg

SEQ ID NO: 16810 - DNA, 21 bp, Artificial Sequence
  source: /note="Description of Artificial Sequence: Synthetic oligonucleotide"
gggggtcagcatctggcgccg

SEQ ID NO: 16811 - DNA, 21 bp, Artificial Sequence
  source: /note="Description of Artificial Sequence: Synthetic oligonucleotide"
ggggggcagtcgtgtagggag

SEQ ID NO: 16812 - DNA, 21 bp, Artificial Sequence
  source: /note="Description of Artificial Sequence: Synthetic oligonucleotide"
ggtggtcgtttggcggttgag

SEQ ID NO: 16813 - DNA, 21 bp, Artificial Sequence
  source: /note="Description of Artificial Sequence: Synthetic oligonucleotide"
ggggggcggttgcagcagggt

SEQ ID NO: 16814 - DNA, 21 bp, Artificial Sequence
  source: /note="Description of Artificial Sequence: Synthetic oligonucleotide"
ggtggtcggccggatcctgag

SEQ ID NO: 16815 - DNA, 21 bp, Artificial Sequence
  source: /note="Description of Artificial Sequence: Synthetic oligonucleotide"
ggtggtaggcctacgattact

SEQ ID NO: 16816 - DNA, 21 bp, Artificial Sequence
  source: /note="Description of Artificial Sequence: Synthetic oligonucleotide"
ggtggtcgggtggtgtattcg

SEQ ID NO: 16817 - DNA, 21 bp, Artificial Sequence
  source: /note="Description of Artificial Sequence: Synthetic oligonucleotide"
ggtggtcgttatagtgagctg

SEQ ID NO: 16818 - DNA, 21 bp, Artificial Sequence
  source: /note="Description of Artificial Sequence: Synthetic oligonucleotide"
ggtggttcggggttggcgggg

SEQ ID NO: 16819 - DNA, 21 bp, Artificial Sequence
  source: /note="Description of Artificial Sequence: Synthetic oligonucleotide"
gggggttcgatggattcgctt

SEQ ID NO: 16820 - DNA, 21 bp, Artificial Sequence
  source: /note="Description of Artificial Sequence: Synthetic oligonucleotide"
ggtggttcggtgaggactctg

SEQ ID NO: 16821 - DNA, 21 bp, Artificial Sequence
  source: /note="Description of Artificial Sequence: Synthetic oligonucleotide"
ggtgggacgagtcggagtccg

SEQ ID NO: 16822 - DNA, 21 bp, Artificial Sequence
  source: /note="Description of Artificial Sequence: Synthetic oligonucleotide"
ggtgggactacgaatctgttt

SEQ ID NO: 16823 - DNA, 21 bp, Artificial Sequence
  source: /note="Description of Artificial Sequence: Synthetic oligonucleotide"
gggggtgttgcgtatattgcg

SEQ ID NO: 16824 - DNA, 21 bp, Artificial Sequence
  source: /note="Description of Artificial Sequence: Synthetic oligonucleotide"
gggggggttggtaagcctgcg

SEQ ID NO: 16825 - DNA, 21 bp, Artificial Sequence
  source: /note="Description of Artificial Sequence: Synthetic oligonucleotide"
ggtggtgttaatgctatgagg

SEQ ID NO: 16826 - DNA, 21 bp, Artificial Sequence
  source: /note="Description of Artificial Sequence: Synthetic oligonucleotide"
gggggttggagttctgcgccg

SEQ ID NO: 16827 - DNA, 21 bp, Artificial Sequence
  source: /note="Description of Artificial Sequence: Synthetic oligonucleotide"
gggggttatgagtctaataat

SEQ ID NO: 16828 - DNA, 21 bp, Artificial Sequence
  source: /note="Description of Artificial Sequence: Synthetic oligonucleotide"
ggtggttattcgatgggtcat

SEQ ID NO: 16829 - DNA, 21 bp, Artificial Sequence
  source: /note="Description of Artificial Sequence: Synthetic oligonucleotide"
gggcatgctattcagctgctg

SEQ ID NO: 16830 - DNA, 21 bp, Artificial Sequence
  source: /note="Description of Artificial Sequence: Synthetic oligonucleotide"
ggtcatgcgaagcataatgtg

SEQ ID NO: 16831 - DNA, 21 bp, Artificial Sequence
  source: /note="Description of Artificial Sequence: Synthetic oligonucleotide"
ggtcatgctccgcatatgatt

SEQ ID NO: 16832 - DNA, 21 bp, Artificial Sequence
  source: /note="Description of Artificial Sequence: Synthetic oligonucleotide"
gggcattgtacgagtaagaat

SEQ ID NO: 16833 - DNA, 21 bp, Artificial Sequence
  source: /note="Description of Artificial Sequence: Synthetic oligonucleotide"
ggtcatgatcttaagccggtg

SEQ ID NO: 16834 - DNA, 21 bp, Artificial Sequence
  source: /note="Description of Artificial Sequence: Synthetic oligonucleotide"
ggtcatgagactcgtcaggag

SEQ ID NO: 16835 - DNA, 21 bp, Artificial Sequence
  source: /note="Description of Artificial Sequence: Synthetic oligonucleotide"
gggcatgggcttcctaggctg

SEQ ID NO: 16836 - DNA, 21 bp, Artificial Sequence
  source: /note="Description of Artificial Sequence: Synthetic oligonucleotide"
gggcatgggccttttgttggg

SEQ ID NO: 16837 - DNA, 21 bp, Artificial Sequence
  source: /note="Description of Artificial Sequence: Synthetic oligonucleotide"
gggcatggtcagaatcctggg

SEQ ID NO: 16838 - DNA, 21 bp, Artificial Sequence
  source: /note="Description of Artificial Sequence: Synthetic oligonucleotide"
ggtcatcatcagccggatcag

SEQ ID NO: 16839 - DNA, 21 bp, Artificial Sequence
  source: /note="Description of Artificial Sequence: Synthetic oligonucleotide"
ggtcataaggctaggcctgat

SEQ ID NO: 16840 - DNA, 21 bp, Artificial Sequence
  source: /note="Description of Artificial Sequence: Synthetic oligonucleotide"
ggtcataaggatgagtctctg

SEQ ID NO: 16841 - DNA, 21 bp, Artificial Sequence
  source: /note="Description of Artificial Sequence: Synthetic oligonucleotide"
gggcatttggctctgcattct

SEQ ID NO: 16842 - DNA, 21 bp, Artificial Sequence
  source: /note="Description of Artificial Sequence: Synthetic oligonucleotide"
ggtcatttgcaggtgaatact

SEQ ID NO: 16843 - DNA, 21 bp, Artificial Sequence
  source: /note="Description of Artificial Sequence: Synthetic oligonucleotide"
gggcatctttcgcctagtatg

SEQ ID NO: 16844 - DNA, 21 bp, Artificial Sequence
  source: /note="Description of Artificial Sequence: Synthetic oligonucleotide"
ggtcatatggctcctgtgcat

SEQ ID NO: 16845 - DNA, 21 bp, Artificial Sequence
  source: /note="Description of Artificial Sequence: Synthetic oligonucleotide"
gggcatatgtctaagacggcg

SEQ ID NO: 16846 - DNA, 21 bp, Artificial Sequence
  source: /note="Description of Artificial Sequence: Synthetic oligonucleotide"
gggcatcaggggtctgatcat

SEQ ID NO: 16847 - DNA, 21 bp, Artificial Sequence
  source: /note="Description of Artificial Sequence: Synthetic oligonucleotide"
gggcatcagggggttcttctg

SEQ ID NO: 16848 - DNA, 21 bp, Artificial Sequence
  source: /note="Description of Artificial Sequence: Synthetic oligonucleotide"
gggcatcagacgtatccttct

SEQ ID NO: 16849 - DNA, 21 bp, Artificial Sequence
  source: /note="Description of Artificial Sequence: Synthetic oligonucleotide"
gggcatcgttcggatcagtct

SEQ ID NO: 16850 - DNA, 21 bp, Artificial Sequence
  source: /note="Description of Artificial Sequence: Synthetic oligonucleotide"
ggtcattcggctggggcgtct

SEQ ID NO: 16851 - DNA, 21 bp, Artificial Sequence
  source: /note="Description of Artificial Sequence: Synthetic oligonucleotide"
ggtcattcgggggatcgggct

SEQ ID NO: 16852 - DNA, 21 bp, Artificial Sequence
  source: /note="Description of Artificial Sequence: Synthetic oligonucleotide"
ggtcattctcataatgcgtat

SEQ ID NO: 16853 - DNA, 21 bp, Artificial Sequence
  source: /note="Description of Artificial Sequence: Synthetic oligonucleotide"
ggtcatagttctgcttctaat

SEQ ID NO: 16854 - DNA, 21 bp, Artificial Sequence
  source: /note="Description of Artificial Sequence: Synthetic oligonucleotide"
gggcattcggttactcatccg

SEQ ID NO: 16855 - DNA, 21 bp, Artificial Sequence
  source: /note="Description of Artificial Sequence: Synthetic oligonucleotide"
ggtcattctgttgtgaagtcg

SEQ ID NO: 16856 - DNA, 21 bp, Artificial Sequence
  source: /note="Description of Artificial Sequence: Synthetic oligonucleotide"
ggtcattcgtatccgcaggcg

SEQ ID NO: 16857 - DNA, 21 bp, Artificial Sequence
  source: /note="Description of Artificial Sequence: Synthetic oligonucleotide"
ggtcatactctgaagcctcct

SEQ ID NO: 16858 - DNA, 21 bp, Artificial Sequence
  source: /note="Description of Artificial Sequence: Synthetic oligonucleotide"
ggtcatgttgagcctcggtat

SEQ ID NO: 16859 - DNA, 21 bp, Artificial Sequence
  source: /note="Description of Artificial Sequence: Synthetic oligonucleotide"
ggtcatgtgggtagtcgtgtt

SEQ ID NO: 16860 - DNA, 21 bp, Artificial Sequence
  source: /note="Description of Artificial Sequence: Synthetic oligonucleotide"
ggtcatgttcttgttactccg

SEQ ID NO: 16861 - DNA, 21 bp, Artificial Sequence
  source: /note="Description of Artificial Sequence: Synthetic oligonucleotide"
gggcatgtttctgttaatact

SEQ ID NO: 16862 - DNA, 21 bp, Artificial Sequence
  source: /note="Description of Artificial Sequence: Synthetic oligonucleotide"
ggtattgcggatttggctgtt

SEQ ID NO: 16863 - DNA, 21 bp, Artificial Sequence
  source: /note="Description of Artificial Sequence: Synthetic oligonucleotide"
ggtattgctggggggaggcct

SEQ ID NO: 16864 - DNA, 21 bp, Artificial Sequence
  source: /note="Description of Artificial Sequence: Synthetic oligonucleotide"
gggattgctgggcgtgcgacg

SEQ ID NO: 16865 - DNA, 21 bp, Artificial Sequence
  source: /note="Description of Artificial Sequence: Synthetic oligonucleotide"
gggattgctagtgagctgccg

SEQ ID NO: 16866 - DNA, 21 bp, Artificial Sequence
  source: /note="Description of Artificial Sequence: Synthetic oligonucleotide"
ggtattgcttatatgacgcct

SEQ ID NO: 16867 - DNA, 21 bp, Artificial Sequence
  source: /note="Description of Artificial Sequence: Synthetic oligonucleotide"
ggtattgatcttcatactgcg

SEQ ID NO: 16868 - DNA, 21 bp, Artificial Sequence
  source: /note="Description of Artificial Sequence: Synthetic oligonucleotide"
ggtattgataatgggactgtt

SEQ ID NO: 16869 - DNA, 21 bp, Artificial Sequence
  source: /note="Description of Artificial Sequence: Synthetic oligonucleotide"
gggattgagattgatacgcag

SEQ ID NO: 16870 - DNA, 21 bp, Artificial Sequence
  source: /note="Description of Artificial Sequence: Synthetic oligonucleotide"
ggtattgagaggaattctatt

SEQ ID NO: 16871 - DNA, 21 bp, Artificial Sequence
  source: /note="Description of Artificial Sequence: Synthetic oligonucleotide"
gggatttttgctgctacttct

SEQ ID NO: 16872 - DNA, 21 bp, Artificial Sequence
  source: /note="Description of Artificial Sequence: Synthetic oligonucleotide"
ggtattggttcggatcgtgat

SEQ ID NO: 16873 - DNA, 21 bp, Artificial Sequence
  source: /note="Description of Artificial Sequence: Synthetic oligonucleotide"
ggtattggtacgcataatccg

SEQ ID NO: 16874 - DNA, 21 bp, Artificial Sequence
  source: /note="Description of Artificial Sequence: Synthetic oligonucleotide"
ggtattcatattaagtatgcg

SEQ ID NO: 16875 - DNA, 21 bp, Artificial Sequence
  source: /note="Description of Artificial Sequence: Synthetic oligonucleotide"
gggattaagatgactattagt

SEQ ID NO: 16876 - DNA, 21 bp, Artificial Sequence
  source: /note="Description of Artificial Sequence: Synthetic oligonucleotide"
ggtattaattggcagtctcct

SEQ ID NO: 16877 - DNA, 21 bp, Artificial Sequence
  source: /note="Description of Artificial Sequence: Synthetic oligonucleotide"
ggtattcctaggggggcgact

SEQ ID NO: 16878 - DNA, 21 bp, Artificial Sequence
  source: /note="Description of Artificial Sequence: Synthetic oligonucleotide"
gggattccttctaattctcgt

SEQ ID NO: 16879 - DNA, 21 bp, Artificial Sequence
  source: /note="Description of Artificial Sequence: Synthetic oligonucleotide"
gggattccggttaggggggag

SEQ ID NO: 16880 - DNA, 21 bp, Artificial Sequence
  source: /note="Description of Artificial Sequence: Synthetic oligonucleotide"
gggattcagacgtttgcgcct

SEQ ID NO: 16881 - DNA, 21 bp, Artificial Sequence
  source: /note="Description of Artificial Sequence: Synthetic oligonucleotide"
ggtattcagactgtgatgtcg

SEQ ID NO: 16882 - DNA, 21 bp, Artificial Sequence
  source: /note="Description of Artificial Sequence: Synthetic oligonucleotide"
ggtattcgtgagcatccgtat

SEQ ID NO: 16883 - DNA, 21 bp, Artificial Sequence
  source: /note="Description of Artificial Sequence: Synthetic oligonucleotide"
ggtattcggattctggaggcg

SEQ ID NO: 16884 - DNA, 21 bp, Artificial Sequence
  source: /note="Description of Artificial Sequence: Synthetic oligonucleotide"
ggtattcgtatgccggctaat

SEQ ID NO: 16885 - DNA, 21 bp, Artificial Sequence
  source: /note="Description of Artificial Sequence: Synthetic oligonucleotide"
gggatttctgctggtattctg

SEQ ID NO: 16886 - DNA, 21 bp, Artificial Sequence
  source: /note="Description of Artificial Sequence: Synthetic oligonucleotide"
gggatttctgggtcgacggtg

SEQ ID NO: 16887 - DNA, 21 bp, Artificial Sequence
  source: /note="Description of Artificial Sequence: Synthetic oligonucleotide"
gggatttctttgtcgagtgct

SEQ ID NO: 16888 - DNA, 21 bp, Artificial Sequence
  source: /note="Description of Artificial Sequence: Synthetic oligonucleotide"
gggatttctcggacggttgat

SEQ ID NO: 16889 - DNA, 21 bp, Artificial Sequence
  source: /note="Description of Artificial Sequence: Synthetic oligonucleotide"
ggtatttctgttgatgcgctt

SEQ ID NO: 16890 - DNA, 21 bp, Artificial Sequence
  source: /note="Description of Artificial Sequence: Synthetic oligonucleotide"
gggattactacgagtcagcgt

SEQ ID NO: 16891 - DNA, 21 bp, Artificial Sequence
  source: /note="Description of Artificial Sequence: Synthetic oligonucleotide"
ggtattgtgactaataatact

SEQ ID NO: 16892 - DNA, 21 bp, Artificial Sequence
  source: /note="Description of Artificial Sequence: Synthetic oligonucleotide"
ggtattgtggttacgggtccg

SEQ ID NO: 16893 - DNA, 21 bp, Artificial Sequence
  source: /note="Description of Artificial Sequence: Synthetic oligonucleotide"
gggaaggataggttgttggct

SEQ ID NO: 16894 - DNA, 21 bp, Artificial Sequence
  source: /note="Description of Artificial Sequence: Synthetic oligonucleotide"
ggtaaggagttttcttatacg

SEQ ID NO: 16895 - DNA, 21 bp, Artificial Sequence
  source: /note="Description of Artificial Sequence: Synthetic oligonucleotide"
ggtaagtttttgcctcagact

SEQ ID NO: 16896 - DNA, 21 bp, Artificial Sequence
  source: /note="Description of Artificial Sequence: Synthetic oligonucleotide"
ggtaaggggtttgatagtccg

SEQ ID NO: 16897 - DNA, 21 bp, Artificial Sequence
  source: /note="Description of Artificial Sequence: Synthetic oligonucleotide"
gggaagggtctgactgctact

SEQ ID NO: 16898 - DNA, 21 bp, Artificial Sequence
  source: /note="Description of Artificial Sequence: Synthetic oligonucleotide"
gggaagcatgtgaaggagatg

SEQ ID NO: 16899 - DNA, 21 bp, Artificial Sequence
  source: /note="Description of Artificial Sequence: Synthetic oligonucleotide"
ggtaagatttcgtcgagtctg

SEQ ID NO: 16900 - DNA, 21 bp, Artificial Sequence
  source: /note="Description of Artificial Sequence: Synthetic oligonucleotide"
ggtaagcttgagcttgcgccg

SEQ ID NO: 16901 - DNA, 21 bp, Artificial Sequence
  source: /note="Description of Artificial Sequence: Synthetic oligonucleotide"
gggaagctgcttatgcctcag

SEQ ID NO: 16902 - DNA, 21 bp, Artificial Sequence
  source: /note="Description of Artificial Sequence: Synthetic oligonucleotide"
gggaagctgacgtcgactctt

SEQ ID NO: 16903 - DNA, 21 bp, Artificial Sequence
  source: /note="Description of Artificial Sequence: Synthetic oligonucleotide"
gggaagttggtttcttatgat

SEQ ID NO: 16904 - DNA, 21 bp, Artificial Sequence
  source: /note="Description of Artificial Sequence: Synthetic oligonucleotide"
gggaagatgtcggttgggaat

SEQ ID NO: 16905 - DNA, 21 bp, Artificial Sequence
  source: /note="Description of Artificial Sequence: Synthetic oligonucleotide"
ggtaagaatgcgacttttcct

SEQ ID NO: 16906 - DNA, 21 bp, Artificial Sequence
  source: /note="Description of Artificial Sequence: Synthetic oligonucleotide"
ggtaagaatggggatcgtact

SEQ ID NO: 16907 - DNA, 21 bp, Artificial Sequence
  source: /note="Description of Artificial Sequence: Synthetic oligonucleotide"
ggtaagcctgctggtgctatt

SEQ ID NO: 16908 - DNA, 21 bp, Artificial Sequence
  source: /note="Description of Artificial Sequence: Synthetic oligonucleotide"
ggtaagcctgcttctccttat

SEQ ID NO: 16909 - DNA, 21 bp, Artificial Sequence
  source: /note="Description of Artificial Sequence: Synthetic oligonucleotide"
ggtaagcagaatcagtatact

SEQ ID NO: 16910 - DNA, 21 bp, Artificial Sequence
  source: /note="Description of Artificial Sequence: Synthetic oligonucleotide"
ggtaagcagacgcctccgtct

SEQ ID NO: 16911 - DNA, 21 bp, Artificial Sequence
  source: /note="Description of Artificial Sequence: Synthetic oligonucleotide"
gggaagcgtgctcctgttgat

SEQ ID NO: 16912 - DNA, 21 bp, Artificial Sequence
  source: /note="Description of Artificial Sequence: Synthetic oligonucleotide"
ggtaagtcgcctgggccgttg

SEQ ID NO: 16913 - DNA, 21 bp, Artificial Sequence
  source: /note="Description of Artificial Sequence: Synthetic oligonucleotide"
gggaagtctcagtctggtctg

SEQ ID NO: 16914 - DNA, 21 bp, Artificial Sequence
  source: /note="Description of Artificial Sequence: Synthetic oligonucleotide"
ggtaagtctgttacggtgtcg

SEQ ID NO: 16915 - DNA, 21 bp, Artificial Sequence
  source: /note="Description of Artificial Sequence: Synthetic oligonucleotide"
gggaagactgaggagcgtccg

SEQ ID NO: 16916 - DNA, 21 bp, Artificial Sequence
  source: /note="Description of Artificial Sequence: Synthetic oligonucleotide"
gggaagactaagccggattat

SEQ ID NO: 16917 - DNA, 21 bp, Artificial Sequence
  source: /note="Description of Artificial Sequence: Synthetic oligonucleotide"
gggaagactgttgattggggt

SEQ ID NO: 16918 - DNA, 21 bp, Artificial Sequence
  source: /note="Description of Artificial Sequence: Synthetic oligonucleotide"
ggtaagactgtgaatattgtt

SEQ ID NO: 16919 - DNA, 21 bp, Artificial Sequence
  source: /note="Description of Artificial Sequence: Synthetic oligonucleotide"
ggtaagacggtggtgagtgtg

SEQ ID NO: 16920 - DNA, 21 bp, Artificial Sequence
  source: /note="Description of Artificial Sequence: Synthetic oligonucleotide"
ggtaaggttgagtttgcgatt

SEQ ID NO: 16921 - DNA, 21 bp, Artificial Sequence
  source: /note="Description of Artificial Sequence: Synthetic oligonucleotide"
ggtaaggtgcatgagggtatg

SEQ ID NO: 16922 - DNA, 21 bp, Artificial Sequence
  source: /note="Description of Artificial Sequence: Synthetic oligonucleotide"
gggaaggtgccgacgattagt

SEQ ID NO: 16923 - DNA, 21 bp, Artificial Sequence
  source: /note="Description of Artificial Sequence: Synthetic oligonucleotide"
ggtaaggttgttcagacgccg

SEQ ID NO: 16924 - DNA, 21 bp, Artificial Sequence
  source: /note="Description of Artificial Sequence: Synthetic oligonucleotide"
ggtcttgcggctaaggcggat

SEQ ID NO: 16925 - DNA, 21 bp, Artificial Sequence
  source: /note="Description of Artificial Sequence: Synthetic oligonucleotide"
gggttggctgcgactgttccg

SEQ ID NO: 16926 - DNA, 21 bp, Artificial Sequence
  source: /note="Description of Artificial Sequence: Synthetic oligonucleotide"
gggcttgctcatcagggtact

SEQ ID NO: 16927 - DNA, 21 bp, Artificial Sequence
  source: /note="Description of Artificial Sequence: Synthetic oligonucleotide"
ggtttggctaagtatgcggag

SEQ ID NO: 16928 - DNA, 21 bp, Artificial Sequence
  source: /note="Description of Artificial Sequence: Synthetic oligonucleotide"
gggcttgctctttcttctccg

SEQ ID NO: 16929 - DNA, 21 bp, Artificial Sequence
  source: /note="Description of Artificial Sequence: Synthetic oligonucleotide"
ggtctggcgaattctccgtct

SEQ ID NO: 16930 - DNA, 21 bp, Artificial Sequence
  source: /note="Description of Artificial Sequence: Synthetic oligonucleotide"
gggttggcggttggtacgcgt

SEQ ID NO: 16931 - DNA, 21 bp, Artificial Sequence
  source: /note="Description of Artificial Sequence: Synthetic oligonucleotide"
ggtcttgagcatcatgttacg

SEQ ID NO: 16932 - DNA, 21 bp, Artificial Sequence
  source: /note="Description of Artificial Sequence: Synthetic oligonucleotide"
ggtttgggtgctcctgagcgt

SEQ ID NO: 16933 - DNA, 21 bp, Artificial Sequence
  source: /note="Description of Artificial Sequence: Synthetic oligonucleotide"
gggctgggtcttgtgacgggg

SEQ ID NO: 16934 - DNA, 21 bp, Artificial Sequence
  source: /note="Description of Artificial Sequence: Synthetic oligonucleotide"
ggtttgggtatgccgcagtct

SEQ ID NO: 16935 - DNA, 21 bp, Artificial Sequence
  source: /note="Description of Artificial Sequence: Synthetic oligonucleotide"
gggttgggttctactctgggt

SEQ ID NO: 16936 - DNA, 21 bp, Artificial Sequence
  source: /note="Description of Artificial Sequence: Synthetic oligonucleotide"
gggttgggtacggcttcggcg

SEQ ID NO: 16937 - DNA, 21 bp, Artificial Sequence
  source: /note="Description of Artificial Sequence: Synthetic oligonucleotide"
ggtctggggactatggttatt

SEQ ID NO: 16938 - DNA, 21 bp, Artificial Sequence
  source: /note="Description of Artificial Sequence: Synthetic oligonucleotide"
ggtttgggtacgccgagtccg

SEQ ID NO: 16939 - DNA, 21 bp, Artificial Sequence
  source: /note="Description of Artificial Sequence: Synthetic oligonucleotide"
gggctggggacgacgggtcgg

SEQ ID NO: 16940 - DNA, 21 bp, Artificial Sequence
  source: /note="Description of Artificial Sequence: Synthetic oligonucleotide"
ggtcttcatgatccgcctgtg

SEQ ID NO: 16941 - DNA, 21 bp, Artificial Sequence
  source: /note="Description of Artificial Sequence: Synthetic oligonucleotide"
ggtcttcatctgatggatgtg

SEQ ID NO: 16942 - DNA, 21 bp, Artificial Sequence
  source: /note="Description of Artificial Sequence: Synthetic oligonucleotide"
ggtcttatttcgcagactgat

SEQ ID NO: 16943 - DNA, 21 bp, Artificial Sequence
  source: /note="Description of Artificial Sequence: Synthetic oligonucleotide"
ggtcttaaggctgttgatggg

SEQ ID NO: 16944 - DNA, 21 bp, Artificial Sequence
  source: /note="Description of Artificial Sequence: Synthetic oligonucleotide"
gggctgaagattactacggag

SEQ ID NO: 16945 - DNA, 21 bp, Artificial Sequence
  source: /note="Description of Artificial Sequence: Synthetic oligonucleotide"
gggttgaagaatcctcagatg

SEQ ID NO: 16946 - DNA, 21 bp, Artificial Sequence
  source: /note="Description of Artificial Sequence: Synthetic oligonucleotide"
ggtctgaagagtactattaat

SEQ ID NO: 16947 - DNA, 21 bp, Artificial Sequence
  source: /note="Description of Artificial Sequence: Synthetic oligonucleotide"
ggtttgctgggtgagaagtct

SEQ ID NO: 16948 - DNA, 21 bp, Artificial Sequence
  source: /note="Description of Artificial Sequence: Synthetic oligonucleotide"
gggctgcttggtaggtatgag

SEQ ID NO: 16949 - DNA, 21 bp, Artificial Sequence
  source: /note="Description of Artificial Sequence: Synthetic oligonucleotide"
gggcttcttgggacgaagctg

SEQ ID NO: 16950 - DNA, 21 bp, Artificial Sequence
  source: /note="Description of Artificial Sequence: Synthetic oligonucleotide"
gggttgctgtcgcgggcggag

SEQ ID NO: 16951 - DNA, 21 bp, Artificial Sequence
  source: /note="Description of Artificial Sequence: Synthetic oligonucleotide"
ggtcttttggttctttatcct

SEQ ID NO: 16952 - DNA, 21 bp, Artificial Sequence
  source: /note="Description of Artificial Sequence: Synthetic oligonucleotide"
ggtttgatggctcatcgtaat

SEQ ID NO: 16953 - DNA, 21 bp, Artificial Sequence
  source: /note="Description of Artificial Sequence: Synthetic oligonucleotide"
gggcttatgctgatgaatggt

SEQ ID NO: 16954 - DNA, 21 bp, Artificial Sequence
  source: /note="Description of Artificial Sequence: Synthetic oligonucleotide"
gggcttaatccggggacgcat

SEQ ID NO: 16955 - DNA, 21 bp, Artificial Sequence
  source: /note="Description of Artificial Sequence: Synthetic oligonucleotide"
gggttgaatcggttttctggt

SEQ ID NO: 16956 - DNA, 21 bp, Artificial Sequence
  source: /note="Description of Artificial Sequence: Synthetic oligonucleotide"
gggttgaatgttacgaagttt

SEQ ID NO: 16957 - DNA, 21 bp, Artificial Sequence
  source: /note="Description of Artificial Sequence: Synthetic oligonucleotide"
ggtcttcctggggagcttgcg

SEQ ID NO: 16958 - DNA, 21 bp, Artificial Sequence
  source: /note="Description of Artificial Sequence: Synthetic oligonucleotide"
gggctgccgggtgggcggtcg

SEQ ID NO: 16959 - DNA, 21 bp, Artificial Sequence
  source: /note="Description of Artificial Sequence: Synthetic oligonucleotide"
ggtttgcctgggcggcatgcg

SEQ ID NO: 16960 - DNA, 21 bp, Artificial Sequence
  source: /note="Description of Artificial Sequence: Synthetic oligonucleotide"
ggtttgcctcataggtatgag

SEQ ID NO: 16961 - DNA, 21 bp, Artificial Sequence
  source: /note="Description of Artificial Sequence: Synthetic oligonucleotide"
gggttgcctattccgagtctt

SEQ ID NO: 16962 - DNA, 21 bp, Artificial Sequence
  source: /note="Description of Artificial Sequence: Synthetic oligonucleotide"
gggttgccgaagcatcctcct

SEQ ID NO: 16963 - DNA, 21 bp, Artificial Sequence
  source: /note="Description of Artificial Sequence: Synthetic oligonucleotide"
gggttgccgatggctacggcg

SEQ ID NO: 16964 - DNA, 21 bp, Artificial Sequence
  source: /note="Description of Artificial Sequence: Synthetic oligonucleotide"
ggtttgcctaatcgggagccg

SEQ ID NO: 16965 - DNA, 21 bp, Artificial Sequence
  source: /note="Description of Artificial Sequence: Synthetic oligonucleotide"
gggttgcctcctgcgtctaag

SEQ ID NO: 16966 - DNA, 21 bp, Artificial Sequence
  source: /note="Description of Artificial Sequence: Synthetic oligonucleotide"
ggtcttccgcaggcgtctcat

SEQ ID NO: 16967 - DNA, 21 bp, Artificial Sequence
  source: /note="Description of Artificial Sequence: Synthetic oligonucleotide"
ggtttgccgcagcataagcag

SEQ ID NO: 16968 - DNA, 21 bp, Artificial Sequence
  source: /note="Description of Artificial Sequence: Synthetic oligonucleotide"
ggtctgccgagtaatttgacg

SEQ ID NO: 16969 - DNA, 21 bp, Artificial Sequence
  source: /note="Description of Artificial Sequence: Synthetic oligonucleotide"
gggttgccgactgaggatcgg

SEQ ID NO: 16970 - DNA, 21 bp, Artificial Sequence
  source: /note="Description of Artificial Sequence: Synthetic oligonucleotide"
gggcttccttatgggaatagt

SEQ ID NO: 16971 - DNA, 21 bp, Artificial Sequence
  source: /note="Description of Artificial Sequence: Synthetic oligonucleotide"
ggtttgcagcaggaggttcgt

SEQ ID NO: 16972 - DNA, 21 bp, Artificial Sequence
  source: /note="Description of Artificial Sequence: Synthetic oligonucleotide"
gggctgcagtctacggggctt

SEQ ID NO: 16973 - DNA, 21 bp, Artificial Sequence
  source: /note="Description of Artificial Sequence: Synthetic oligonucleotide"
ggtttgagggagccggttgct

SEQ ID NO: 16974 - DNA, 21 bp, Artificial Sequence
  source: /note="Description of Artificial Sequence: Synthetic oligonucleotide"
ggtctgaggtttactgttgag

SEQ ID NO: 16975 - DNA, 21 bp, Artificial Sequence
  source: /note="Description of Artificial Sequence: Synthetic oligonucleotide"
gggttgcgtaatttggggtct

SEQ ID NO: 16976 - DNA, 21 bp, Artificial Sequence
  source: /note="Description of Artificial Sequence: Synthetic oligonucleotide"
gggttgaggaatcaggagttg

SEQ ID NO: 16977 - DNA, 21 bp, Artificial Sequence
  source: /note="Description of Artificial Sequence: Synthetic oligonucleotide"
ggtctgcgtcctggtcaggat

SEQ ID NO: 16978 - DNA, 21 bp, Artificial Sequence
  source: /note="Description of Artificial Sequence: Synthetic oligonucleotide"
gggcttcgttctctgtcggcg

SEQ ID NO: 16979 - DNA, 21 bp, Artificial Sequence
  source: /note="Description of Artificial Sequence: Synthetic oligonucleotide"
gggcttcgttcgatgccggag

SEQ ID NO: 16980 - DNA, 21 bp, Artificial Sequence
  source: /note="Description of Artificial Sequence: Synthetic oligonucleotide"
ggtttgcggtcgagttatgct

SEQ ID NO: 16981 - DNA, 21 bp, Artificial Sequence
  source: /note="Description of Artificial Sequence: Synthetic oligonucleotide"
gggttgcggactgcgtcgaat

SEQ ID NO: 16982 - DNA, 21 bp, Artificial Sequence
  source: /note="Description of Artificial Sequence: Synthetic oligonucleotide"
gggttgcggacggatatgctt

SEQ ID NO: 16983 - DNA, 21 bp, Artificial Sequence
  source: /note="Description of Artificial Sequence: Synthetic oligonucleotide"
gggcttagtgctgcggcgacg

SEQ ID NO: 16984 - DNA, 21 bp, Artificial Sequence
  source: /note="Description of Artificial Sequence: Synthetic oligonucleotide"
gggctgtcggcgttggcgtcg

SEQ ID NO: 16985 - DNA, 21 bp, Artificial Sequence
  source: /note="Description of Artificial Sequence: Synthetic oligonucleotide"
gggctttcggcgtatattcct

SEQ ID NO: 16986 - DNA, 21 bp, Artificial Sequence
  source: /note="Description of Artificial Sequence: Synthetic oligonucleotide"
gggctttcgcattctgcgttg

SEQ ID NO: 16987 - DNA, 21 bp, Artificial Sequence
  source: /note="Description of Artificial Sequence: Synthetic oligonucleotide"
gggttgtctcttgatgattat

SEQ ID NO: 16988 - DNA, 21 bp, Artificial Sequence
  source: /note="Description of Artificial Sequence: Synthetic oligonucleotide"
gggctgtctcttaagtatggg

SEQ ID NO: 16989 - DNA, 21 bp, Artificial Sequence
  source: /note="Description of Artificial Sequence: Synthetic oligonucleotide"
ggtctttcgctgctgcgtaat

SEQ ID NO: 16990 - DNA, 21 bp, Artificial Sequence
  source: /note="Description of Artificial Sequence: Synthetic oligonucleotide"
gggctgtctatgccgctgcct

SEQ ID NO: 16991 - DNA, 21 bp, Artificial Sequence
  source: /note="Description of Artificial Sequence: Synthetic oligonucleotide"
ggtcttagtcctcgtcagacg

SEQ ID NO: 16992 - DNA, 21 bp, Artificial Sequence
  source: /note="Description of Artificial Sequence: Synthetic oligonucleotide"
ggtctttcgcgtgctcctcct

SEQ ID NO: 16993 - DNA, 21 bp, Artificial Sequence
  source: /note="Description of Artificial Sequence: Synthetic oligonucleotide"
ggtttgagttcgcatcatcct

SEQ ID NO: 16994 - DNA, 21 bp, Artificial Sequence
  source: /note="Description of Artificial Sequence: Synthetic oligonucleotide"
gggctttctacgaagacgtcg

SEQ ID NO: 16995 - DNA, 21 bp, Artificial Sequence
  source: /note="Description of Artificial Sequence: Synthetic oligonucleotide"
ggtttgtctacggtgcttatg

SEQ ID NO: 16996 - DNA, 21 bp, Artificial Sequence
  source: /note="Description of Artificial Sequence: Synthetic oligonucleotide"
ggtctgtctgttacgcgtgtt

SEQ ID NO: 16997 - DNA, 21 bp, Artificial Sequence
  source: /note="Description of Artificial Sequence: Synthetic oligonucleotide"
ggtttgactcatgttgtgcag

SEQ ID NO: 16998 - DNA, 21 bp, Artificial Sequence
  source: /note="Description of Artificial Sequence: Synthetic oligonucleotide"
gggctgactttggatttgagg

SEQ ID NO: 16999 - DNA, 21 bp, Artificial Sequence
  source: /note="Description of Artificial Sequence: Synthetic oligonucleotide"
ggtttgactttggttccggct

SEQ ID NO: 17000 - DNA, 21 bp, Artificial Sequence
  source: /note="Description of Artificial Sequence: Synthetic oligonucleotide"
ggtcttactaatacggggagt

SEQ ID NO: 17001 - DNA, 21 bp, Artificial Sequence
  source: /note="Description of Artificial Sequence: Synthetic oligonucleotide"
ggtctgactccggatcatggg

SEQ ID NO: 17002 - DNA, 21 bp, Artificial Sequence
  source: /note="Description of Artificial Sequence: Synthetic oligonucleotide"
gggcttactcagcctgggcct

SEQ ID NO: 17003 - DNA, 21 bp, Artificial Sequence
  source: /note="Description of Artificial Sequence: Synthetic oligonucleotide"
ggtttgacgtcgcatcctatt

SEQ ID NO: 17004 - DNA, 21 bp, Artificial Sequence
  source: /note="Description of Artificial Sequence: Synthetic oligonucleotide"
ggtctgacttatgctttgacg

SEQ ID NO: 17005 - DNA, 21 bp, Artificial Sequence
  source: /note="Description of Artificial Sequence: Synthetic oligonucleotide"
ggtctggttgcgcatactatt

SEQ ID NO: 17006 - DNA, 21 bp, Artificial Sequence
  source: /note="Description of Artificial Sequence: Synthetic oligonucleotide"
ggtctggtgggtagggtgcag

SEQ ID NO: 17007 - DNA, 21 bp, Artificial Sequence
  source: /note="Description of Artificial Sequence: Synthetic oligonucleotide"
ggtttggttattggtgtggct

SEQ ID NO: 17008 - DNA, 21 bp, Artificial Sequence
  source: /note="Description of Artificial Sequence: Synthetic oligonucleotide"
gggttggtgcctacggatgcg

SEQ ID NO: 17009 - DNA, 21 bp, Artificial Sequence
  source: /note="Description of Artificial Sequence: Synthetic oligonucleotide"
gggcttgtttctactcatgat

SEQ ID NO: 17010 - DNA, 21 bp, Artificial Sequence
  source: /note="Description of Artificial Sequence: Synthetic oligonucleotide"
ggtttgtatgatactcggtcg

SEQ ID NO: 17011 - DNA, 21 bp, Artificial Sequence
  source: /note="Description of Artificial Sequence: Synthetic oligonucleotide"
gggttgtatcatcttaatgcg

SEQ ID NO: 17012 - DNA, 21 bp, Artificial Sequence
  source: /note="Description of Artificial Sequence: Synthetic oligonucleotide"
gggctttataatacgagtact

SEQ ID NO: 17013 - DNA, 21 bp, Artificial Sequence
  source: /note="Description of Artificial Sequence: Synthetic oligonucleotide"
ggtctttatccgaattttact

SEQ ID NO: 17014 - DNA, 21 bp, Artificial Sequence
  source: /note="Description of Artificial Sequence: Synthetic oligonucleotide"
ggtatggctgcgggtcattct

SEQ ID NO: 17015 - DNA, 21 bp, Artificial Sequence
  source: /note="Description of Artificial Sequence: Synthetic oligonucleotide"
gggatggcggctactgctagt

SEQ ID NO: 17016 - DNA, 21 bp, Artificial Sequence
  source: /note="Description of Artificial Sequence: Synthetic oligonucleotide"
gggatggctggtattcgtgat

SEQ ID NO: 17017 - DNA, 21 bp, Artificial Sequence
  source: /note="Description of Artificial Sequence: Synthetic oligonucleotide"
gggatggctatgactttgtct

SEQ ID NO: 17018 - DNA, 21 bp, Artificial Sequence
  source: /note="Description of Artificial Sequence: Synthetic oligonucleotide"
gggatggcgactggtgttgat

SEQ ID NO: 17019 - DNA, 21 bp, Artificial Sequence
  source: /note="Description of Artificial Sequence: Synthetic oligonucleotide"
ggtatggatcaggttttgagg

SEQ ID NO: 17020 - DNA, 21 bp, Artificial Sequence
  source: /note="Description of Artificial Sequence: Synthetic oligonucleotide"
gggatgggtactgcttatggt

SEQ ID NO: 17021 - DNA, 21 bp, Artificial Sequence
  source: /note="Description of Artificial Sequence: Synthetic oligonucleotide"
ggtatgaagcctcctgttgat

SEQ ID NO: 17022 - DNA, 21 bp, Artificial Sequence
  source: /note="Description of Artificial Sequence: Synthetic oligonucleotide"
gggatgcttcgggcggtttcg

SEQ ID NO: 17023 - DNA, 21 bp, Artificial Sequence
  source: /note="Description of Artificial Sequence: Synthetic oligonucleotide"
ggtatgaataatactgtgcgt

SEQ ID NO: 17024 - DNA, 21 bp, Artificial Sequence
  source: /note="Description of Artificial Sequence: Synthetic oligonucleotide"
ggtatgaattcgtcgttggtt

SEQ ID NO: 17025 - DNA, 21 bp, Artificial Sequence
  source: /note="Description of Artificial Sequence: Synthetic oligonucleotide"
gggatgccgcatctgcctcct

SEQ ID NO: 17026 - DNA, 21 bp, Artificial Sequence
  source: /note="Description of Artificial Sequence: Synthetic oligonucleotide"
gggatgcctattcctagtaat

SEQ ID NO: 17027 - DNA, 21 bp, Artificial Sequence
  source: /note="Description of Artificial Sequence: Synthetic oligonucleotide"
ggtatgagggatctgcagcct

SEQ ID NO: 17028 - DNA, 21 bp, Artificial Sequence
  source: /note="Description of Artificial Sequence: Synthetic oligonucleotide"
ggtatgaggcagactcaggcg

SEQ ID NO: 17029 - DNA, 21 bp, Artificial Sequence
  source: /note="Description of Artificial Sequence: Synthetic oligonucleotide"
ggtatgtctatgattacgcgg

SEQ ID NO: 17030 - DNA, 21 bp, Artificial Sequence
  source: /note="Description of Artificial Sequence: Synthetic oligonucleotide"
gggatgtctcagggttcttat

SEQ ID NO: 17031 - DNA, 21 bp, Artificial Sequence
  source: /note="Description of Artificial Sequence: Synthetic oligonucleotide"
gggatgtctaggtcgtttagt

SEQ ID NO: 17032 - DNA, 21 bp, Artificial Sequence
  source: /note="Description of Artificial Sequence: Synthetic oligonucleotide"
ggtatgagttcggcgctgtcg

SEQ ID NO: 17033 - DNA, 21 bp, Artificial Sequence
  source: /note="Description of Artificial Sequence: Synthetic oligonucleotide"
ggtatgtcggttccgatggat

SEQ ID NO: 17034 - DNA, 21 bp, Artificial Sequence
  source: /note="Description of Artificial Sequence: Synthetic oligonucleotide"
gggatgactcgtcctcaggtt

SEQ ID NO: 17035 - DNA, 21 bp, Artificial Sequence
  source: /note="Description of Artificial Sequence: Synthetic oligonucleotide"
gggaatgctgctactcttagg

SEQ ID NO: 17036 - DNA, 21 bp, Artificial Sequence
  source: /note="Description of Artificial Sequence: Synthetic oligonucleotide"
gggaatgcgcggcctattact

SEQ ID NO: 17037 - DNA, 21 bp, Artificial Sequence
  source: /note="Description of Artificial Sequence: Synthetic oligonucleotide"
ggtaatgctagtcctcagatg

SEQ ID NO: 17038 - DNA, 21 bp, Artificial Sequence
  source: /note="Description of Artificial Sequence: Synthetic oligonucleotide"
gggaatgctgttgggggtgat

SEQ ID NO: 17039 - DNA, 21 bp, Artificial Sequence
  source: /note="Description of Artificial Sequence: Synthetic oligonucleotide"
ggtaatgatgattctaagtat

SEQ ID NO: 17040 - DNA, 21 bp, Artificial Sequence
  source: /note="Description of Artificial Sequence: Synthetic oligonucleotide"
gggaattttcagaagaatgcg

SEQ ID NO: 17041 - DNA, 21 bp, Artificial Sequence
  source: /note="Description of Artificial Sequence: Synthetic oligonucleotide"
gggaatgggcgtggttttcag

SEQ ID NO: 17042 - DNA, 21 bp, Artificial Sequence
  source: /note="Description of Artificial Sequence: Synthetic oligonucleotide"
ggtaatgggactcctgagcat

SEQ ID NO: 17043 - DNA, 21 bp, Artificial Sequence
  source: /note="Description of Artificial Sequence: Synthetic oligonucleotide"
ggtaatcatgcttttcatgct

SEQ ID NO: 17044 - DNA, 21 bp, Artificial Sequence
  source: /note="Description of Artificial Sequence: Synthetic oligonucleotide"
gggaatcatcttcatctgtgt

SEQ ID NO: 17045 - DNA, 21 bp, Artificial Sequence
  source: /note="Description of Artificial Sequence: Synthetic oligonucleotide"
gggaatcatgtgcttcagccg

SEQ ID NO: 17046 - DNA, 21 bp, Artificial Sequence
  source: /note="Description of Artificial Sequence: Synthetic oligonucleotide"
gggaatcttcttactatttcg

SEQ ID NO: 17047 - DNA, 21 bp, Artificial Sequence
  source: /note="Description of Artificial Sequence: Synthetic oligonucleotide"
ggtaatctttcgcagcgtttt

SEQ ID NO: 17048 - DNA, 21 bp, Artificial Sequence
  source: /note="Description of Artificial Sequence: Synthetic oligonucleotide"
ggtaatatgcatacgttgact

SEQ ID NO: 17049 - DNA, 21 bp, Artificial Sequence
  source: /note="Description of Artificial Sequence: Synthetic oligonucleotide"
gggaatcctttgaagcctcag

SEQ ID NO: 17050 - DNA, 21 bp, Artificial Sequence
  source: /note="Description of Artificial Sequence: Synthetic oligonucleotide"
ggtaatagggaggctcttgcg

SEQ ID NO: 17051 - DNA, 21 bp, Artificial Sequence
  source: /note="Description of Artificial Sequence: Synthetic oligonucleotide"
ggtaatcggaattctaatgtt

SEQ ID NO: 17052 - DNA, 21 bp, Artificial Sequence
  source: /note="Description of Artificial Sequence: Synthetic oligonucleotide"
gggaatagtgcgatgaattcg

SEQ ID NO: 17053 - DNA, 21 bp, Artificial Sequence
  source: /note="Description of Artificial Sequence: Synthetic oligonucleotide"
gggaattctgatcagacgcgt

SEQ ID NO: 17054 - DNA, 21 bp, Artificial Sequence
  source: /note="Description of Artificial Sequence: Synthetic oligonucleotide"
gggaattctttggctccgcag

SEQ ID NO: 17055 - DNA, 21 bp, Artificial Sequence
  source: /note="Description of Artificial Sequence: Synthetic oligonucleotide"
ggtaatagttcggcggggaat

SEQ ID NO: 17056 - DNA, 21 bp, Artificial Sequence
  source: /note="Description of Artificial Sequence: Synthetic oligonucleotide"
gggaattcgtcgcatagtgat

SEQ ID NO: 17057 - DNA, 21 bp, Artificial Sequence
  source: /note="Description of Artificial Sequence: Synthetic oligonucleotide"
gggaatagtacggtggatccg

SEQ ID NO: 17058 - DNA, 21 bp, Artificial Sequence
  source: /note="Description of Artificial Sequence: Synthetic oligonucleotide"
ggtaattcggttcctcataat

SEQ ID NO: 17059 - DNA, 21 bp, Artificial Sequence
  source: /note="Description of Artificial Sequence: Synthetic oligonucleotide"
gggaattctgttcagcatcgt

SEQ ID NO: 17060 - DNA, 21 bp, Artificial Sequence
  source: /note="Description of Artificial Sequence: Synthetic oligonucleotide"
gggaatactgcgcctcagtct

SEQ ID NO: 17061 - DNA, 21 bp, Artificial Sequence
  source: /note="Description of Artificial Sequence: Synthetic oligonucleotide"
ggtaatactcataatatgcag

SEQ ID NO: 17062 - DNA, 21 bp, Artificial Sequence
  source: /note="Description of Artificial Sequence: Synthetic oligonucleotide"
gggaatactaagtctcctggg

SEQ ID NO: 17063 - DNA, 21 bp, Artificial Sequence
  source: /note="Description of Artificial Sequence: Synthetic oligonucleotide"
gggaatactaatcggaatggt

SEQ ID NO: 17064 - DNA, 21 bp, Artificial Sequence
  source: /note="Description of Artificial Sequence: Synthetic oligonucleotide"
gggaatacgtcgtctcgggct

SEQ ID NO: 17065 - DNA, 21 bp, Artificial Sequence
  source: /note="Description of Artificial Sequence: Synthetic oligonucleotide"
ggtaatactgtgcggattccg

SEQ ID NO: 17066 - DNA, 21 bp, Artificial Sequence
  source: /note="Description of Artificial Sequence: Synthetic oligonucleotide"
ggtaatgttcttagggttgtt

SEQ ID NO: 17067 - DNA, 21 bp, Artificial Sequence
  source: /note="Description of Artificial Sequence: Synthetic oligonucleotide"
gggaatgttactaaggggctt

SEQ ID NO: 17068 - DNA, 21 bp, Artificial Sequence
  source: /note="Description of Artificial Sequence: Synthetic oligonucleotide"
ggtaattatattttgaagcct

SEQ ID NO: 17069 - DNA, 21 bp, Artificial Sequence
  source: /note="Description of Artificial Sequence: Synthetic oligonucleotide"
ggtaattatatttcggcttct

SEQ ID NO: 17070 - DNA, 21 bp, Artificial Sequence
  source: /note="Description of Artificial Sequence: Synthetic oligonucleotide"
ggtaattataatttggatctg

SEQ ID NO: 17071 - DNA, 21 bp, Artificial Sequence
  source: /note="Description of Artificial Sequence: Synthetic oligonucleotide"
gggaattattcgtcggaggtg

SEQ ID NO: 17072 - DNA, 21 bp, Artificial Sequence
  source: /note="Description of Artificial Sequence: Synthetic oligonucleotide"
ggtccggctgcggatgtgcgg

SEQ ID NO: 17073 - DNA, 21 bp, Artificial Sequence
  source: /note="Description of Artificial Sequence: Synthetic oligonucleotide"
gggccggcgcttcttatggat

SEQ ID NO: 17074 - DNA, 21 bp, Artificial Sequence
  source: /note="Description of Artificial Sequence: Synthetic oligonucleotide"
gggcctgctttgccgattgcg

SEQ ID NO: 17075 - DNA, 21 bp, Artificial Sequence
  source: /note="Description of Artificial Sequence: Synthetic oligonucleotide"
gggccggcgatggggagtctt

SEQ ID NO: 17076 - DNA, 21 bp, Artificial Sequence
  source: /note="Description of Artificial Sequence: Synthetic oligonucleotide"
gggccggcgccttctatttct

SEQ ID NO: 17077 - DNA, 21 bp, Artificial Sequence
  source: /note="Description of Artificial Sequence: Synthetic oligonucleotide"
gggccggctcagcgtcttcag

SEQ ID NO: 17078 - DNA, 21 bp, Artificial Sequence
  source: /note="Description of Artificial Sequence: Synthetic oligonucleotide"
gggcctgcttctattgtttct

SEQ ID NO: 17079 - DNA, 21 bp, Artificial Sequence
  source: /note="Description of Artificial Sequence: Synthetic oligonucleotide"
gggccggcgacgcatcttacg

SEQ ID NO: 17080 - DNA, 21 bp, Artificial Sequence
  source: /note="Description of Artificial Sequence: Synthetic oligonucleotide"
ggtcctgatttgacgacgggt

SEQ ID NO: 17081 - DNA, 21 bp, Artificial Sequence
  source: /note="Description of Artificial Sequence: Synthetic oligonucleotide"
gggcctgatcaggaggagcat

SEQ ID NO: 17082 - DNA, 21 bp, Artificial Sequence
  source: /note="Description of Artificial Sequence: Synthetic oligonucleotide"
ggtccggaggcgatgtataag

SEQ ID NO: 17083 - DNA, 21 bp, Artificial Sequence
  source: /note="Description of Artificial Sequence: Synthetic oligonucleotide"
ggtcctgagcaggatattatg

SEQ ID NO: 17084 - DNA, 21 bp, Artificial Sequence
  source: /note="Description of Artificial Sequence: Synthetic oligonucleotide"
gggccggagtgggtgacgggt

SEQ ID NO: 17085 - DNA, 21 bp, Artificial Sequence
  source: /note="Description of Artificial Sequence: Synthetic oligonucleotide"
gggccttttgagcagacggat

SEQ ID NO: 17086 - DNA, 21 bp, Artificial Sequence
  source: /note="Description of Artificial Sequence: Synthetic oligonucleotide"
ggtccgggggcgattcattat

SEQ ID NO: 17087 - DNA, 21 bp, Artificial Sequence
  source: /note="Description of Artificial Sequence: Synthetic oligonucleotide"
ggtccggggattgctagtttt

SEQ ID NO: 17088 - DNA, 21 bp, Artificial Sequence
  source: /note="Description of Artificial Sequence: Synthetic oligonucleotide"
gggccggggaaggagacgcgt

SEQ ID NO: 17089 - DNA, 21 bp, Artificial Sequence
  source: /note="Description of Artificial Sequence: Synthetic oligonucleotide"
ggtcctggtatgctgtgtgcg

SEQ ID NO: 17090 - DNA, 21 bp, Artificial Sequence
  source: /note="Description of Artificial Sequence: Synthetic oligonucleotide"
ggtcctggtcctattgggtct

SEQ ID NO: 17091 - DNA, 21 bp, Artificial Sequence
  source: /note="Description of Artificial Sequence: Synthetic oligonucleotide"
ggtccgggttcgtttcgtcct

SEQ ID NO: 17092 - DNA, 21 bp, Artificial Sequence
  source: /note="Description of Artificial Sequence: Synthetic oligonucleotide"
gggcctgggtcgtcgtctatg

SEQ ID NO: 17093 - DNA, 21 bp, Artificial Sequence
  source: /note="Description of Artificial Sequence: Synthetic oligonucleotide"
ggtccgcatattcggattgct

SEQ ID NO: 17094 - DNA, 21 bp, Artificial Sequence
  source: /note="Description of Artificial Sequence: Synthetic oligonucleotide"
gggcctcatcttgtgcagcat

SEQ ID NO: 17095 - DNA, 21 bp, Artificial Sequence
  source: /note="Description of Artificial Sequence: Synthetic oligonucleotide"
gggccgcatactagtatgatt

SEQ ID NO: 17096 - DNA, 21 bp, Artificial Sequence
  source: /note="Description of Artificial Sequence: Synthetic oligonucleotide"
gggccgcattataatgatcct

SEQ ID NO: 17097 - DNA, 21 bp, Artificial Sequence
  source: /note="Description of Artificial Sequence: Synthetic oligonucleotide"
gggccgattgagcttacgttg

SEQ ID NO: 17098 - DNA, 21 bp, Artificial Sequence
  source: /note="Description of Artificial Sequence: Synthetic oligonucleotide"
gggcctaagcttacgccggtg

SEQ ID NO: 17099 - DNA, 21 bp, Artificial Sequence
  source: /note="Description of Artificial Sequence: Synthetic oligonucleotide"
gggcctaagatggagccgcat

SEQ ID NO: 17100 - DNA, 21 bp, Artificial Sequence
  source: /note="Description of Artificial Sequence: Synthetic oligonucleotide"
ggtcctttgctggtgcgtggt

SEQ ID NO: 17101 - DNA, 21 bp, Artificial Sequence
  source: /note="Description of Artificial Sequence: Synthetic oligonucleotide"
gggccgcttaattctgtgatg

SEQ ID NO: 17102 - DNA, 21 bp, Artificial Sequence
  source: /note="Description of Artificial Sequence: Synthetic oligonucleotide"
gggcctttgcctgagggtcat

SEQ ID NO: 17103 - DNA, 21 bp, Artificial Sequence
  source: /note="Description of Artificial Sequence: Synthetic oligonucleotide"
ggtccgcttccgcctacgacg

SEQ ID NO: 17104 - DNA, 21 bp, Artificial Sequence
  source: /note="Description of Artificial Sequence: Synthetic oligonucleotide"
ggtccgctgccggtggcgact

SEQ ID NO: 17105 - DNA, 21 bp, Artificial Sequence
  source: /note="Description of Artificial Sequence: Synthetic oligonucleotide"
ggtccgttgtctgcgatgcct

SEQ ID NO: 17106 - DNA, 21 bp, Artificial Sequence
  source: /note="Description of Artificial Sequence: Synthetic oligonucleotide"
gggccgttgagtaatgtgaag

SEQ ID NO: 17107 - DNA, 21 bp, Artificial Sequence
  source: /note="Description of Artificial Sequence: Synthetic oligonucleotide"
ggtcctttggtttatgctgat

SEQ ID NO: 17108 - DNA, 21 bp, Artificial Sequence
  source: /note="Description of Artificial Sequence: Synthetic oligonucleotide"
gggcctatgcagatgccgagt

SEQ ID NO: 17109 - DNA, 21 bp, Artificial Sequence
  source: /note="Description of Artificial Sequence: Synthetic oligonucleotide"
gggccgatgcgggagatggag

SEQ ID NO: 17110 - DNA, 21 bp, Artificial Sequence
  source: /note="Description of Artificial Sequence: Synthetic oligonucleotide"
ggtcctatgtatgcgaatcct

SEQ ID NO: 17111 - DNA, 21 bp, Artificial Sequence
  source: /note="Description of Artificial Sequence: Synthetic oligonucleotide"
ggtccgaatgatgtgcagaag

SEQ ID NO: 17112 - DNA, 21 bp, Artificial Sequence
  source: /note="Description of Artificial Sequence: Synthetic oligonucleotide"
ggtcctaattttcttttgcct

SEQ ID NO: 17113 - DNA, 21 bp, Artificial Sequence
  source: /note="Description of Artificial Sequence: Synthetic oligonucleotide"
ggtccgaatggtgctgttggg

SEQ ID NO: 17114 - DNA, 21 bp, Artificial Sequence
  source: /note="Description of Artificial Sequence: Synthetic oligonucleotide"
ggtccgaatatgcgtaatggt

SEQ ID NO: 17115 - DNA, 21 bp, Artificial Sequence
  source: /note="Description of Artificial Sequence: Synthetic oligonucleotide"
gggccgaatcgtgggtcgttg

SEQ ID NO: 17116 - DNA, 21 bp, Artificial Sequence
  source: /note="Description of Artificial Sequence: Synthetic oligonucleotide"
ggtccgaatcggctgactgtg

SEQ ID NO: 17117 - DNA, 21 bp, Artificial Sequence
  source: /note="Description of Artificial Sequence: Synthetic oligonucleotide"
ggtcctaatgttctttcgcct

SEQ ID NO: 17118 - DNA, 21 bp, Artificial Sequence
  source: /note="Description of Artificial Sequence: Synthetic oligonucleotide"
gggcctccggctgttaaggtg

SEQ ID NO: 17119 - DNA, 21 bp, Artificial Sequence
  source: /note="Description of Artificial Sequence: Synthetic oligonucleotide"
gggcctcctcatggtcattcg

SEQ ID NO: 17120 - DNA, 21 bp, Artificial Sequence
  source: /note="Description of Artificial Sequence: Synthetic oligonucleotide"
ggtccgcctaaggctaatcct

SEQ ID NO: 17121 - DNA, 21 bp, Artificial Sequence
  source: /note="Description of Artificial Sequence: Synthetic oligonucleotide"
ggtcctccgcttcttgcgccg

SEQ ID NO: 17122 - DNA, 21 bp, Artificial Sequence
  source: /note="Description of Artificial Sequence: Synthetic oligonucleotide"
gggcctcctatgaggccttct

SEQ ID NO: 17123 - DNA, 21 bp, Artificial Sequence
  source: /note="Description of Artificial Sequence: Synthetic oligonucleotide"
gggccgccgccgcagccgtct

SEQ ID NO: 17124 - DNA, 21 bp, Artificial Sequence
  source: /note="Description of Artificial Sequence: Synthetic oligonucleotide"
ggtcctcctccgactaattgg

SEQ ID NO: 17125 - DNA, 21 bp, Artificial Sequence
  source: /note="Description of Artificial Sequence: Synthetic oligonucleotide"
gggccgcagacggttacgggt

SEQ ID NO: 17126 - DNA, 21 bp, Artificial Sequence
  source: /note="Description of Artificial Sequence: Synthetic oligonucleotide"
ggtcctagggatcctcgtaat

SEQ ID NO: 17127 - DNA, 21 bp, Artificial Sequence
  source: /note="Description of Artificial Sequence: Synthetic oligonucleotide"
gggcctcgtgggtttttgaat

SEQ ID NO: 17128 - DNA, 21 bp, Artificial Sequence
  source: /note="Description of Artificial Sequence: Synthetic oligonucleotide"
ggtcctcggccgcagcatttg

SEQ ID NO: 17129 - DNA, 21 bp, Artificial Sequence
  source: /note="Description of Artificial Sequence: Synthetic oligonucleotide"
gggccgagggttactaatgat

SEQ ID NO: 17130 - DNA, 21 bp, Artificial Sequence
  source: /note="Description of Artificial Sequence: Synthetic oligonucleotide"
ggtccgagtgatcatgggtcg

SEQ ID NO: 17131 - DNA, 21 bp, Artificial Sequence
  source: /note="Description of Artificial Sequence: Synthetic oligonucleotide"
ggtccgtctaaggcgttggct

SEQ ID NO: 17132 - DNA, 21 bp, Artificial Sequence
  source: /note="Description of Artificial Sequence: Synthetic oligonucleotide"
ggtccgagtttgaatacgacg

SEQ ID NO: 17133 - DNA, 21 bp, Artificial Sequence
  source: /note="Description of Artificial Sequence: Synthetic oligonucleotide"
gggccttctcctgagtcttct

SEQ ID NO: 17134 - DNA, 21 bp, Artificial Sequence
  source: /note="Description of Artificial Sequence: Synthetic oligonucleotide"
ggtcctagtcggaatgctccg

SEQ ID NO: 17135 - DNA, 21 bp, Artificial Sequence
  source: /note="Description of Artificial Sequence: Synthetic oligonucleotide"
gggcctagttcggcgaagctg

SEQ ID NO: 17136 - DNA, 21 bp, Artificial Sequence
  source: /note="Description of Artificial Sequence: Synthetic oligonucleotide"
ggtccttcgagttctgcgtat

SEQ ID NO: 17137 - DNA, 21 bp, Artificial Sequence
  source: /note="Description of Artificial Sequence: Synthetic oligonucleotide"
ggtccttcttctgtgcctgat

SEQ ID NO: 17138 - DNA, 21 bp, Artificial Sequence
  source: /note="Description of Artificial Sequence: Synthetic oligonucleotide"
gggccgagtacttctctgatt

SEQ ID NO: 17139 - DNA, 21 bp, Artificial Sequence
  source: /note="Description of Artificial Sequence: Synthetic oligonucleotide"
ggtccgagtgtgcatccggcg

SEQ ID NO: 17140 - DNA, 21 bp, Artificial Sequence
  source: /note="Description of Artificial Sequence: Synthetic oligonucleotide"
ggtcctagtgtgcatactgat

SEQ ID NO: 17141 - DNA, 21 bp, Artificial Sequence
  source: /note="Description of Artificial Sequence: Synthetic oligonucleotide"
ggtccgtcttatattgatagt

SEQ ID NO: 17142 - DNA, 21 bp, Artificial Sequence
  source: /note="Description of Artificial Sequence: Synthetic oligonucleotide"
ggtcctacggagacgcctttg

SEQ ID NO: 17143 - DNA, 21 bp, Artificial Sequence
  source: /note="Description of Artificial Sequence: Synthetic oligonucleotide"
gggccgactggtgatcttgtt

SEQ ID NO: 17144 - DNA, 21 bp, Artificial Sequence
  source: /note="Description of Artificial Sequence: Synthetic oligonucleotide"
gggccgacggggtcgtcggag

SEQ ID NO: 17145 - DNA, 21 bp, Artificial Sequence
  source: /note="Description of Artificial Sequence: Synthetic oligonucleotide"
ggtccgacgcatccgcggatt

SEQ ID NO: 17146 - DNA, 21 bp, Artificial Sequence
  source: /note="Description of Artificial Sequence: Synthetic oligonucleotide"
gggcctactatgtctatgacg

SEQ ID NO: 17147 - DNA, 21 bp, Artificial Sequence
  source: /note="Description of Artificial Sequence: Synthetic oligonucleotide"
gggcctacgagtcttgctatt

SEQ ID NO: 17148 - DNA, 21 bp, Artificial Sequence
  source: /note="Description of Artificial Sequence: Synthetic oligonucleotide"
gggccgacgtatccgcatgcg

SEQ ID NO: 17149 - DNA, 21 bp, Artificial Sequence
  source: /note="Description of Artificial Sequence: Synthetic oligonucleotide"
gggccggttaagcctcgtgat

SEQ ID NO: 17150 - DNA, 21 bp, Artificial Sequence
  source: /note="Description of Artificial Sequence: Synthetic oligonucleotide"
gggccggttaatgcgcctgat

SEQ ID NO: 17151 - DNA, 21 bp, Artificial Sequence
  source: /note="Description of Artificial Sequence: Synthetic oligonucleotide"
gggccggtttcgggtgtttcg

SEQ ID NO: 17152 - DNA, 21 bp, Artificial Sequence
  source: /note="Description of Artificial Sequence: Synthetic oligonucleotide"
gggccttataatgttgatgtg

SEQ ID NO: 17153 - DNA, 21 bp, Artificial Sequence
  source: /note="Description of Artificial Sequence: Synthetic oligonucleotide"
gggccgtattcggctcctggt

SEQ ID NO: 17154 - DNA, 21 bp, Artificial Sequence
  source: /note="Description of Artificial Sequence: Synthetic oligonucleotide"
ggtcaggcgattgggcatccg

SEQ ID NO: 17155 - DNA, 21 bp, Artificial Sequence
  source: /note="Description of Artificial Sequence: Synthetic oligonucleotide"
gggcaggctcgtaatgagact

SEQ ID NO: 17156 - DNA, 21 bp, Artificial Sequence
  source: /note="Description of Artificial Sequence: Synthetic oligonucleotide"
gggcaggcgtcggctcctttt

SEQ ID NO: 17157 - DNA, 21 bp, Artificial Sequence
  source: /note="Description of Artificial Sequence: Synthetic oligonucleotide"
ggtcaggctagtattagttct

SEQ ID NO: 17158 - DNA, 21 bp, Artificial Sequence
  source: /note="Description of Artificial Sequence: Synthetic oligonucleotide"
gggcaggcgtcgcgtcagtct

SEQ ID NO: 17159 - DNA, 21 bp, Artificial Sequence
  source: /note="Description of Artificial Sequence: Synthetic oligonucleotide"
ggtcaggcggtgaaggttaat

SEQ ID NO: 17160 - DNA, 21 bp, Artificial Sequence
  source: /note="Description of Artificial Sequence: Synthetic oligonucleotide"
gggcaggatgatgtgaatatt

SEQ ID NO: 17161 - DNA, 21 bp, Artificial Sequence
  source: /note="Description of Artificial Sequence: Synthetic oligonucleotide"
gggcaggatatgcatgattct

SEQ ID NO: 17162 - DNA, 21 bp, Artificial Sequence
  source: /note="Description of Artificial Sequence: Synthetic oligonucleotide"
gggcaggagtggcaggctggg

SEQ ID NO: 17163 - DNA, 21 bp, Artificial Sequence
  source: /note="Description of Artificial Sequence: Synthetic oligonucleotide"
ggtcagtttgtggtgcggcag

SEQ ID NO: 17164 - DNA, 21 bp, Artificial Sequence
  source: /note="Description of Artificial Sequence: Synthetic oligonucleotide"
ggtcaggggcatccgcctaat

SEQ ID NO: 17165 - DNA, 21 bp, Artificial Sequence
  source: /note="Description of Artificial Sequence: Synthetic oligonucleotide"
ggtcagggttcgactcctttg

SEQ ID NO: 17166 - DNA, 21 bp, Artificial Sequence
  source: /note="Description of Artificial Sequence: Synthetic oligonucleotide"
ggtcagcatgctcggctgcag

SEQ ID NO: 17167 - DNA, 21 bp, Artificial Sequence
  source: /note="Description of Artificial Sequence: Synthetic oligonucleotide"
ggtcagcatgggaagcctgct

SEQ ID NO: 17168 - DNA, 21 bp, Artificial Sequence
  source: /note="Description of Artificial Sequence: Synthetic oligonucleotide"
ggtcagcatttgtctcctaat

SEQ ID NO: 17169 - DNA, 21 bp, Artificial Sequence
  source: /note="Description of Artificial Sequence: Synthetic oligonucleotide"
ggtcagattgtggctcctact

SEQ ID NO: 17170 - DNA, 21 bp, Artificial Sequence
  source: /note="Description of Artificial Sequence: Synthetic oligonucleotide"
ggtcagattgttacgtcgggt

SEQ ID NO: 17171 - DNA, 21 bp, Artificial Sequence
  source: /note="Description of Artificial Sequence: Synthetic oligonucleotide"
gggcagcttgatatgactact

SEQ ID NO: 17172 - DNA, 21 bp, Artificial Sequence
  source: /note="Description of Artificial Sequence: Synthetic oligonucleotide"
gggcagctgaatcttaggccg

SEQ ID NO: 17173 - DNA, 21 bp, Artificial Sequence
  source: /note="Description of Artificial Sequence: Synthetic oligonucleotide"
gggcagctgcagagtggttcg

SEQ ID NO: 17174 - DNA, 21 bp, Artificial Sequence
  source: /note="Description of Artificial Sequence: Synthetic oligonucleotide"
gggcagatggcgcgtcctgat

SEQ ID NO: 17175 - DNA, 21 bp, Artificial Sequence
  source: /note="Description of Artificial Sequence: Synthetic oligonucleotide"
ggtcagatgatttctgctcag

SEQ ID NO: 17176 - DNA, 21 bp, Artificial Sequence
  source: /note="Description of Artificial Sequence: Synthetic oligonucleotide"
ggtcagcctagtccgtggccg

SEQ ID NO: 17177 - DNA, 21 bp, Artificial Sequence
  source: /note="Description of Artificial Sequence: Synthetic oligonucleotide"
ggtcagcaggataatcgggat

SEQ ID NO: 17178 - DNA, 21 bp, Artificial Sequence
  source: /note="Description of Artificial Sequence: Synthetic oligonucleotide"
gggcagcagcagggttttatt

SEQ ID NO: 17179 - DNA, 21 bp, Artificial Sequence
  source: /note="Description of Artificial Sequence: Synthetic oligonucleotide"
ggtcagaggaagcttgagggg

SEQ ID NO: 17180 - DNA, 21 bp, Artificial Sequence
  source: /note="Description of Artificial Sequence: Synthetic oligonucleotide"
gggcagaggatgtcgatgacg

SEQ ID NO: 17181 - DNA, 21 bp, Artificial Sequence
  source: /note="Description of Artificial Sequence: Synthetic oligonucleotide"
gggcagaggactacttatgtt

SEQ ID NO: 17182 - DNA, 21 bp, Artificial Sequence
  source: /note="Description of Artificial Sequence: Synthetic oligonucleotide"
gggcagtcttttgagcggacg

SEQ ID NO: 17183 - DNA, 21 bp, Artificial Sequence
  source: /note="Description of Artificial Sequence: Synthetic oligonucleotide"
ggtcagtctcttgctattcgg

SEQ ID NO: 17184 - DNA, 21 bp, Artificial Sequence
  source: /note="Description of Artificial Sequence: Synthetic oligonucleotide"
gggcagtctttgacgcatccg

SEQ ID NO: 17185 - DNA, 21 bp, Artificial Sequence
  source: /note="Description of Artificial Sequence: Synthetic oligonucleotide"
ggtcagtctactcggcaggat

SEQ ID NO: 17186 - DNA, 21 bp, Artificial Sequence
  source: /note="Description of Artificial Sequence: Synthetic oligonucleotide"
gggcagacttgtacgtcgctg

SEQ ID NO: 17187 - DNA, 21 bp, Artificial Sequence
  source: /note="Description of Artificial Sequence: Synthetic oligonucleotide"
gggcagacgttggctcttgat

SEQ ID NO: 17188 - DNA, 21 bp, Artificial Sequence
  source: /note="Description of Artificial Sequence: Synthetic oligonucleotide"
ggtcagacgtatccgactctg

SEQ ID NO: 17189 - DNA, 21 bp, Artificial Sequence
  source: /note="Description of Artificial Sequence: Synthetic oligonucleotide"
ggtcaggttcatcttaatccg

SEQ ID NO: 17190 - DNA, 21 bp, Artificial Sequence
  source: /note="Description of Artificial Sequence: Synthetic oligonucleotide"
gggcagtatgggcgtcagcct

SEQ ID NO: 17191 - DNA, 21 bp, Artificial Sequence
  source: /note="Description of Artificial Sequence: Synthetic oligonucleotide"
gggcagtatcatagggatact

SEQ ID NO: 17192 - DNA, 21 bp, Artificial Sequence
  source: /note="Description of Artificial Sequence: Synthetic oligonucleotide"
ggtcagtattctgcttctact

SEQ ID NO: 17193 - DNA, 21 bp, Artificial Sequence
  source: /note="Description of Artificial Sequence: Synthetic oligonucleotide"
ggtcgtgctgctcctatttcg

SEQ ID NO: 17194 - DNA, 21 bp, Artificial Sequence
  source: /note="Description of Artificial Sequence: Synthetic oligonucleotide"
gggagggctaatactggtttt

SEQ ID NO: 17195 - DNA, 21 bp, Artificial Sequence
  source: /note="Description of Artificial Sequence: Synthetic oligonucleotide"
gggcgtgctcgtccgctgccg

SEQ ID NO: 17196 - DNA, 21 bp, Artificial Sequence
  source: /note="Description of Artificial Sequence: Synthetic oligonucleotide"
ggtcgggcttctacttatgtt

SEQ ID NO: 17197 - DNA, 21 bp, Artificial Sequence
  source: /note="Description of Artificial Sequence: Synthetic oligonucleotide"
ggtcgggatgaggttccgctg

SEQ ID NO: 17198 - DNA, 21 bp, Artificial Sequence
  source: /note="Description of Artificial Sequence: Synthetic oligonucleotide"
gggagggatgggatgccttct

SEQ ID NO: 17199 - DNA, 21 bp, Artificial Sequence
  source: /note="Description of Artificial Sequence: Synthetic oligonucleotide"
gggagggatccgactccggtt

SEQ ID NO: 17200 - DNA, 21 bp, Artificial Sequence
  source: /note="Description of Artificial Sequence: Synthetic oligonucleotide"
gggagggatcctgttcgtcat

SEQ ID NO: 17201 - DNA, 21 bp, Artificial Sequence
  source: /note="Description of Artificial Sequence: Synthetic oligonucleotide"
gggcgtgagcatatgcatacg

SEQ ID NO: 17202 - DNA, 21 bp, Artificial Sequence
  source: /note="Description of Artificial Sequence: Synthetic oligonucleotide"
gggagggagcttttgcattct

SEQ ID NO: 17203 - DNA, 21 bp, Artificial Sequence
  source: /note="Description of Artificial Sequence: Synthetic oligonucleotide"
ggtcgtgagtcgcagattccg

SEQ ID NO: 17204 - DNA, 21 bp, Artificial Sequence
  source: /note="Description of Artificial Sequence: Synthetic oligonucleotide"
gggcgtgagtctgtgacgtct

SEQ ID NO: 17205 - DNA, 21 bp, Artificial Sequence
  source: /note="Description of Artificial Sequence: Synthetic oligonucleotide"
ggtcgtgagtatgttggtaat

SEQ ID NO: 17206 - DNA, 21 bp, Artificial Sequence
  source: /note="Description of Artificial Sequence: Synthetic oligonucleotide"
gggcgttttgggactagtgat

SEQ ID NO: 17207 - DNA, 21 bp, Artificial Sequence
  source: /note="Description of Artificial Sequence: Synthetic oligonucleotide"
gggcggggtgctcagcctggg

SEQ ID NO: 17208 - DNA, 21 bp, Artificial Sequence
  source: /note="Description of Artificial Sequence: Synthetic oligonucleotide"
ggtaggggtgataatccggct

SEQ ID NO: 17209 - DNA, 21 bp, Artificial Sequence
  source: /note="Description of Artificial Sequence: Synthetic oligonucleotide"
ggtcggggtgaggctggtctt

SEQ ID NO: 17210 - DNA, 21 bp, Artificial Sequence
  source: /note="Description of Artificial Sequence: Synthetic oligonucleotide"
ggtagggggggggagagtgtg

SEQ ID NO: 17211 - DNA, 21 bp, Artificial Sequence
  source: /note="Description of Artificial Sequence: Synthetic oligonucleotide"
ggtcgtggtctgcctatgagt

SEQ ID NO: 17212 - DNA, 21 bp, Artificial Sequence
  source: /note="Description of Artificial Sequence: Synthetic oligonucleotide"
ggtcgggggcctcctccgcct

SEQ ID NO: 17213 - DNA, 21 bp, Artificial Sequence
  source: /note="Description of Artificial Sequence: Synthetic oligonucleotide"
gggcgtgggcagtctgcttct

SEQ ID NO: 17214 - DNA, 21 bp, Artificial Sequence
  source: /note="Description of Artificial Sequence: Synthetic oligonucleotide"
gggaggggtactcctccggat

SEQ ID NO: 17215 - DNA, 21 bp, Artificial Sequence
  source: /note="Description of Artificial Sequence: Synthetic oligonucleotide"
gggcgtattgcgcctgttcct

SEQ ID NO: 17216 - DNA, 21 bp, Artificial Sequence
  source: /note="Description of Artificial Sequence: Synthetic oligonucleotide"
ggtcgtatttatacggcggag

SEQ ID NO: 17217 - DNA, 21 bp, Artificial Sequence
  source: /note="Description of Artificial Sequence: Synthetic oligonucleotide"
ggtcgtttgttgccggaggtg

SEQ ID NO: 17218 - DNA, 21 bp, Artificial Sequence
  source: /note="Description of Artificial Sequence: Synthetic oligonucleotide"
ggtaggcttcctgcgtcgttg

SEQ ID NO: 17219 - DNA, 21 bp, Artificial Sequence
  source: /note="Description of Artificial Sequence: Synthetic oligonucleotide"
ggtaggatggagggtgggggt

SEQ ID NO: 17220 - DNA, 21 bp, Artificial Sequence
  source: /note="Description of Artificial Sequence: Synthetic oligonucleotide"
ggtcgtatggagaatactgtt

SEQ ID NO: 17221 - DNA, 21 bp, Artificial Sequence
  source: /note="Description of Artificial Sequence: Synthetic oligonucleotide"
gggcggatgatgaatagtagt

SEQ ID NO: 17222 - DNA, 21 bp, Artificial Sequence
  source: /note="Description of Artificial Sequence: Synthetic oligonucleotide"
ggtaggatggttactggtgag

SEQ ID NO: 17223 - DNA, 21 bp, Artificial Sequence
  source: /note="Description of Artificial Sequence: Synthetic oligonucleotide"
ggtaggaatgatgcttatgcg

SEQ ID NO: 17224 - DNA, 21 bp, Artificial Sequence
  source: /note="Description of Artificial Sequence: Synthetic oligonucleotide"
ggtcggaatgagccttggtcg

SEQ ID NO: 17225 - DNA, 21 bp, Artificial Sequence
  source: /note="Description of Artificial Sequence: Synthetic oligonucleotide"
gggcggaatccgcctctgtat

SEQ ID NO: 17226 - DNA, 21 bp, Artificial Sequence
  source: /note="Description of Artificial Sequence: Synthetic oligonucleotide"
ggtcggaatccgccgagtgcg

SEQ ID NO: 17227 - DNA, 21 bp, Artificial Sequence
  source: /note="Description of Artificial Sequence: Synthetic oligonucleotide"
gggaggaattcgaattatgat

SEQ ID NO: 17228 - DNA, 21 bp, Artificial Sequence
  source: /note="Description of Artificial Sequence: Synthetic oligonucleotide"
gggaggaatgttgcgggtctt

SEQ ID NO: 17229 - DNA, 21 bp, Artificial Sequence
  source: /note="Description of Artificial Sequence: Synthetic oligonucleotide"
ggtcggcctgatacggagcat

SEQ ID NO: 17230 - DNA, 21 bp, Artificial Sequence
  source: /note="Description of Artificial Sequence: Synthetic oligonucleotide"
gggcgtcctcttcctacgagt

SEQ ID NO: 17231 - DNA, 21 bp, Artificial Sequence
  source: /note="Description of Artificial Sequence: Synthetic oligonucleotide"
ggtaggcctttgcaggctcct

SEQ ID NO: 17232 - DNA, 21 bp, Artificial Sequence
  source: /note="Description of Artificial Sequence: Synthetic oligonucleotide"
ggtaggccgcctcttcttcct

SEQ ID NO: 17233 - DNA, 21 bp, Artificial Sequence
  source: /note="Description of Artificial Sequence: Synthetic oligonucleotide"
gggaggcctcctagtatgtcg

SEQ ID NO: 17234 - DNA, 21 bp, Artificial Sequence
  source: /note="Description of Artificial Sequence: Synthetic oligonucleotide"
ggtcggccgcctactgataag

SEQ ID NO: 17235 - DNA, 21 bp, Artificial Sequence
  source: /note="Description of Artificial Sequence: Synthetic oligonucleotide"
ggtaggcaggatcatccgggt

SEQ ID NO: 17236 - DNA, 21 bp, Artificial Sequence
  source: /note="Description of Artificial Sequence: Synthetic oligonucleotide"
ggtcggcagcttgcgtgtaat

SEQ ID NO: 17237 - DNA, 21 bp, Artificial Sequence
  source: /note="Description of Artificial Sequence: Synthetic oligonucleotide"
ggtcggcagatgggtattacg

SEQ ID NO: 17238 - DNA, 21 bp, Artificial Sequence
  source: /note="Description of Artificial Sequence: Synthetic oligonucleotide"
gggcggcagccgagtggggag

SEQ ID NO: 17239 - DNA, 21 bp, Artificial Sequence
  source: /note="Description of Artificial Sequence: Synthetic oligonucleotide"
ggtaggcagagtgtttcgaat

SEQ ID NO: 17240 - DNA, 21 bp, Artificial Sequence
  source: /note="Description of Artificial Sequence: Synthetic oligonucleotide"
gggcgtcaggttgattttgtt

SEQ ID NO: 17241 - DNA, 21 bp, Artificial Sequence
  source: /note="Description of Artificial Sequence: Synthetic oligonucleotide"
gggcgttcggatttgagtaat

SEQ ID NO: 17242 - DNA, 21 bp, Artificial Sequence
  source: /note="Description of Artificial Sequence: Synthetic oligonucleotide"
ggtaggtctgagtataatcag

SEQ ID NO: 17243 - DNA, 21 bp, Artificial Sequence
  source: /note="Description of Artificial Sequence: Synthetic oligonucleotide"
gggaggagtattatgtctgag

SEQ ID NO: 17244 - DNA, 21 bp, Artificial Sequence
  source: /note="Description of Artificial Sequence: Synthetic oligonucleotide"
ggtaggagtctgttgcgtgag

SEQ ID NO: 17245 - DNA, 21 bp, Artificial Sequence
  source: /note="Description of Artificial Sequence: Synthetic oligonucleotide"
ggtcggtctcctattcagagt

SEQ ID NO: 17246 - DNA, 21 bp, Artificial Sequence
  source: /note="Description of Artificial Sequence: Synthetic oligonucleotide"
ggtcgttcgtctgtggcgact

SEQ ID NO: 17247 - DNA, 21 bp, Artificial Sequence
  source: /note="Description of Artificial Sequence: Synthetic oligonucleotide"
ggtcgtagtgtgcagcatctg

SEQ ID NO: 17248 - DNA, 21 bp, Artificial Sequence
  source: /note="Description of Artificial Sequence: Synthetic oligonucleotide"
ggtcgtactggttcgcctggg

SEQ ID NO: 17249 - DNA, 21 bp, Artificial Sequence
  source: /note="Description of Artificial Sequence: Synthetic oligonucleotide"
gggcgtacttctggttcgtcg

SEQ ID NO: 17250 - DNA, 21 bp, Artificial Sequence
  source: /note="Description of Artificial Sequence: Synthetic oligonucleotide"
ggtcggactagtatggcgact

SEQ ID NO: 17251 - DNA, 21 bp, Artificial Sequence
  source: /note="Description of Artificial Sequence: Synthetic oligonucleotide"
ggtcggacgtctcgtgctgag

SEQ ID NO: 17252 - DNA, 21 bp, Artificial Sequence
  source: /note="Description of Artificial Sequence: Synthetic oligonucleotide"
ggtaggacgtatcagattcct

SEQ ID NO: 17253 - DNA, 21 bp, Artificial Sequence
  source: /note="Description of Artificial Sequence: Synthetic oligonucleotide"
ggtcgggttctgctgttggat

SEQ ID NO: 17254 - DNA, 21 bp, Artificial Sequence
  source: /note="Description of Artificial Sequence: Synthetic oligonucleotide"
ggtcgggttcaggttcctcct

SEQ ID NO: 17255 - DNA, 21 bp, Artificial Sequence
  source: /note="Description of Artificial Sequence: Synthetic oligonucleotide"
ggtcgtgttgtttatattgat

SEQ ID NO: 17256 - DNA, 21 bp, Artificial Sequence
  source: /note="Description of Artificial Sequence: Synthetic oligonucleotide"
gggcgttatatggctccgctg

SEQ ID NO: 17257 - DNA, 21 bp, Artificial Sequence
  source: /note="Description of Artificial Sequence: Synthetic oligonucleotide"
ggtcgttatagggcgggtcag

SEQ ID NO: 17258 - DNA, 21 bp, Artificial Sequence
  source: /note="Description of Artificial Sequence: Synthetic oligonucleotide"
ggttcggcgattagtgagctt

SEQ ID NO: 17259 - DNA, 21 bp, Artificial Sequence
  source: /note="Description of Artificial Sequence: Synthetic oligonucleotide"
gggagtgctctgcctacgcgt

SEQ ID NO: 17260 - DNA, 21 bp, Artificial Sequence
  source: /note="Description of Artificial Sequence: Synthetic oligonucleotide"
ggtagtgcgcctgtggtgctt

SEQ ID NO: 17261 - DNA, 21 bp, Artificial Sequence
  source: /note="Description of Artificial Sequence: Synthetic oligonucleotide"
gggtcggcgcagggtgctcgg

SEQ ID NO: 17262 - DNA, 21 bp, Artificial Sequence
  source: /note="Description of Artificial Sequence: Synthetic oligonucleotide"
gggtctgcgcggactcatcct

SEQ ID NO: 17263 - DNA, 21 bp, Artificial Sequence
  source: /note="Description of Artificial Sequence: Synthetic oligonucleotide"
gggtcggcgagtcctatgatg

SEQ ID NO: 17264 - DNA, 21 bp, Artificial Sequence
  source: /note="Description of Artificial Sequence: Synthetic oligonucleotide"
ggttcggcttctagtgggttt

SEQ ID NO: 17265 - DNA, 21 bp, Artificial Sequence
  source: /note="Description of Artificial Sequence: Synthetic oligonucleotide"
gggtctgatgggttttctaat

SEQ ID NO: 17266 - DNA, 21 bp, Artificial Sequence
  source: /note="Description of Artificial Sequence: Synthetic oligonucleotide"
ggttctgatgggcagaagggt

SEQ ID NO: 17267 - DNA, 21 bp, Artificial Sequence
  source: /note="Description of Artificial Sequence: Synthetic oligonucleotide"
gggtctgatcggattgtttcg

SEQ ID NO: 17268 - DNA, 21 bp, Artificial Sequence
  source: /note="Description of Artificial Sequence: Synthetic oligonucleotide"
gggtcggatactccttcgcct

SEQ ID NO: 17269 - DNA, 21 bp, Artificial Sequence
  source: /note="Description of Artificial Sequence: Synthetic oligonucleotide"
gggtctgatactactgagatt

SEQ ID NO: 17270 - DNA, 21 bp, Artificial Sequence
  source: /note="Description of Artificial Sequence: Synthetic oligonucleotide"
ggtagtgatgttattcatgag

SEQ ID NO: 17271 - DNA, 21 bp, Artificial Sequence
  source: /note="Description of Artificial Sequence: Synthetic oligonucleotide"
ggttcggaggttgtggcgtgt

SEQ ID NO: 17272 - DNA, 21 bp, Artificial Sequence
  source: /note="Description of Artificial Sequence: Synthetic oligonucleotide"
gggtcttttacttctcagatt

SEQ ID NO: 17273 - DNA, 21 bp, Artificial Sequence
  source: /note="Description of Artificial Sequence: Synthetic oligonucleotide"
ggtagtgggcttattaggggg

SEQ ID NO: 17274 - DNA, 21 bp, Artificial Sequence
  source: /note="Description of Artificial Sequence: Synthetic oligonucleotide"
ggttcggggaatgatgtgctg

SEQ ID NO: 17275 - DNA, 21 bp, Artificial Sequence
  source: /note="Description of Artificial Sequence: Synthetic oligonucleotide"
ggttcgggtccgaataagtct

SEQ ID NO: 17276 - DNA, 21 bp, Artificial Sequence
  source: /note="Description of Artificial Sequence: Synthetic oligonucleotide"
gggtctggtccgactattcgt

SEQ ID NO: 17277 - DNA, 21 bp, Artificial Sequence
  source: /note="Description of Artificial Sequence: Synthetic oligonucleotide"
gggtctggtccggttgagcat

SEQ ID NO: 17278 - DNA, 21 bp, Artificial Sequence
  source: /note="Description of Artificial Sequence: Synthetic oligonucleotide"
gggtctgggtcttcgcagact

SEQ ID NO: 17279 - DNA, 21 bp, Artificial Sequence
  source: /note="Description of Artificial Sequence: Synthetic oligonucleotide"
ggttctggttcgacgtcgggg

SEQ ID NO: 17280 - DNA, 21 bp, Artificial Sequence
  source: /note="Description of Artificial Sequence: Synthetic oligonucleotide"
ggtagtggtacgtatactgtg

SEQ ID NO: 17281 - DNA, 21 bp, Artificial Sequence
  source: /note="Description of Artificial Sequence: Synthetic oligonucleotide"
gggagtcatgcggttacttct

SEQ ID NO: 17282 - DNA, 21 bp, Artificial Sequence
  source: /note="Description of Artificial Sequence: Synthetic oligonucleotide"
gggtctcatcattctcctcat

SEQ ID NO: 17283 - DNA, 21 bp, Artificial Sequence
  source: /note="Description of Artificial Sequence: Synthetic oligonucleotide"
ggtagtcatattacgccgctg

SEQ ID NO: 17284 - DNA, 21 bp, Artificial Sequence
  source: /note="Description of Artificial Sequence: Synthetic oligonucleotide"
ggttctcatcctattgtgcgt

SEQ ID NO: 17285 - DNA, 21 bp, Artificial Sequence
  source: /note="Description of Artificial Sequence: Synthetic oligonucleotide"
gggtctcatcctaggggggag

SEQ ID NO: 17286 - DNA, 21 bp, Artificial Sequence
  source: /note="Description of Artificial Sequence: Synthetic oligonucleotide"
ggttcgcatcagggtcagtct

SEQ ID NO: 17287 - DNA, 21 bp, Artificial Sequence
  source: /note="Description of Artificial Sequence: Synthetic oligonucleotide"
ggttcgcattctgggggtcct

SEQ ID NO: 17288 - DNA, 21 bp, Artificial Sequence
  source: /note="Description of Artificial Sequence: Synthetic oligonucleotide"
ggttcgcattcgcctgctatg

SEQ ID NO: 17289 - DNA, 21 bp, Artificial Sequence
  source: /note="Description of Artificial Sequence: Synthetic oligonucleotide"
ggttctcatacgtggacggag

SEQ ID NO: 17290 - DNA, 21 bp, Artificial Sequence
  source: /note="Description of Artificial Sequence: Synthetic oligonucleotide"
gggtcgattggggagcaggtt

SEQ ID NO: 17291 - DNA, 21 bp, Artificial Sequence
  source: /note="Description of Artificial Sequence: Synthetic oligonucleotide"
gggagtattcaggttacggct

SEQ ID NO: 17292 - DNA, 21 bp, Artificial Sequence
  source: /note="Description of Artificial Sequence: Synthetic oligonucleotide"
ggttcgattgttcttcatgag

SEQ ID NO: 17293 - DNA, 21 bp, Artificial Sequence
  source: /note="Description of Artificial Sequence: Synthetic oligonucleotide"
gggtctaagaatcaggagaag

SEQ ID NO: 17294 - DNA, 21 bp, Artificial Sequence
  source: /note="Description of Artificial Sequence: Synthetic oligonucleotide"
gggtcgaagccttttttgtcg

SEQ ID NO: 17295 - DNA, 21 bp, Artificial Sequence
  source: /note="Description of Artificial Sequence: Synthetic oligonucleotide"
gggtcgaagcgtcaggatcag

SEQ ID NO: 17296 - DNA, 21 bp, Artificial Sequence
  source: /note="Description of Artificial Sequence: Synthetic oligonucleotide"
ggttctaagtcttttgggtcg

SEQ ID NO: 17297 - DNA, 21 bp, Artificial Sequence
  source: /note="Description of Artificial Sequence: Synthetic oligonucleotide"
ggttcgaagacgtttttgtct

SEQ ID NO: 17298 - DNA, 21 bp, Artificial Sequence
  source: /note="Description of Artificial Sequence: Synthetic oligonucleotide"
ggttcgaaggtggctggtctg

SEQ ID NO: 17299 - DNA, 21 bp, Artificial Sequence
  source: /note="Description of Artificial Sequence: Synthetic oligonucleotide"
ggttctaaggttgggcctttg

SEQ ID NO: 17300 - DNA, 21 bp, Artificial Sequence
  source: /note="Description of Artificial Sequence: Synthetic oligonucleotide"
ggtagtttggagcagcgttat

SEQ ID NO: 17301 - DNA, 21 bp, Artificial Sequence
  source: /note="Description of Artificial Sequence: Synthetic oligonucleotide"
ggtagtttgggtcatatgagg

SEQ ID NO: 17302 - DNA, 21 bp, Artificial Sequence
  source: /note="Description of Artificial Sequence: Synthetic oligonucleotide"
ggttcgcttggtactcattct

SEQ ID NO: 17303 - DNA, 21 bp, Artificial Sequence
  source: /note="Description of Artificial Sequence: Synthetic oligonucleotide"
gggtcgttgattgctgcgcag

SEQ ID NO: 17304 - DNA, 21 bp, Artificial Sequence
  source: /note="Description of Artificial Sequence: Synthetic oligonucleotide"
gggtcgctgaatcctgttccg

SEQ ID NO: 17305 - DNA, 21 bp, Artificial Sequence
  source: /note="Description of Artificial Sequence: Synthetic oligonucleotide"
gggtctttgccttattcgtct

SEQ ID NO: 17306 - DNA, 21 bp, Artificial Sequence
  source: /note="Description of Artificial Sequence: Synthetic oligonucleotide"
gggtcgttgtataggacggag

SEQ ID NO: 17307 - DNA, 21 bp, Artificial Sequence
  source: /note="Description of Artificial Sequence: Synthetic oligonucleotide"
ggttcgatggcttatcttggt

SEQ ID NO: 17308 - DNA, 21 bp, Artificial Sequence
  source: /note="Description of Artificial Sequence: Synthetic oligonucleotide"
gggtcgatgcttgctcatcct

SEQ ID NO: 17309 - DNA, 21 bp, Artificial Sequence
  source: /note="Description of Artificial Sequence: Synthetic oligonucleotide"
gggtcgatgaatcctccttct

SEQ ID NO: 17310 - DNA, 21 bp, Artificial Sequence
  source: /note="Description of Artificial Sequence: Synthetic oligonucleotide"
gggagtatgccggttattgtt

SEQ ID NO: 17311 - DNA, 21 bp, Artificial Sequence
  source: /note="Description of Artificial Sequence: Synthetic oligonucleotide"
ggtagtatgcggcctggtgag

SEQ ID NO: 17312 - DNA, 21 bp, Artificial Sequence
  source: /note="Description of Artificial Sequence: Synthetic oligonucleotide"
ggttcgatgtctagtgctaat

SEQ ID NO: 17313 - DNA, 21 bp, Artificial Sequence
  source: /note="Description of Artificial Sequence: Synthetic oligonucleotide"
ggttctatgacttctttgatt

SEQ ID NO: 17314 - DNA, 21 bp, Artificial Sequence
  source: /note="Description of Artificial Sequence: Synthetic oligonucleotide"
gggagtatgtatgctgttccg

SEQ ID NO: 17315 - DNA, 21 bp, Artificial Sequence
  source: /note="Description of Artificial Sequence: Synthetic oligonucleotide"
ggttctaatggtggtattagt

SEQ ID NO: 17316 - DNA, 21 bp, Artificial Sequence
  source: /note="Description of Artificial Sequence: Synthetic oligonucleotide"
gggtcgaatcctatgtcgttg

SEQ ID NO: 17317 - DNA, 21 bp, Artificial Sequence
  source: /note="Description of Artificial Sequence: Synthetic oligonucleotide"
ggtagtcctgcgatggctcat

SEQ ID NO: 17318 - DNA, 21 bp, Artificial Sequence
  source: /note="Description of Artificial Sequence: Synthetic oligonucleotide"
ggtagtcctgggagggtggcg

SEQ ID NO: 17319 - DNA, 21 bp, Artificial Sequence
  source: /note="Description of Artificial Sequence: Synthetic oligonucleotide"
ggttctccgattggggggatg

SEQ ID NO: 17320 - DNA, 21 bp, Artificial Sequence
  source: /note="Description of Artificial Sequence: Synthetic oligonucleotide"
gggtctcctaagccgcatgtt

SEQ ID NO: 17321 - DNA, 21 bp, Artificial Sequence
  source: /note="Description of Artificial Sequence: Synthetic oligonucleotide"
gggagtccgatgggttatacg

SEQ ID NO: 17322 - DNA, 21 bp, Artificial Sequence
  source: /note="Description of Artificial Sequence: Synthetic oligonucleotide"
gggagtccgatgcctattatt

SEQ ID NO: 17323 - DNA, 21 bp, Artificial Sequence
  source: /note="Description of Artificial Sequence: Synthetic oligonucleotide"
ggttctcctaattcttgtatg

SEQ ID NO: 17324 - DNA, 21 bp, Artificial Sequence
  source: /note="Description of Artificial Sequence: Synthetic oligonucleotide"
ggttctccgcctacgctgagg

SEQ ID NO: 17325 - DNA, 21 bp, Artificial Sequence
  source: /note="Description of Artificial Sequence: Synthetic oligonucleotide"
gggtcgccgcggtcgctttct

SEQ ID NO: 17326 - DNA, 21 bp, Artificial Sequence
  source: /note="Description of Artificial Sequence: Synthetic oligonucleotide"
gggtctccgcgggtggggact

SEQ ID NO: 17327 - DNA, 21 bp, Artificial Sequence
  source: /note="Description of Artificial Sequence: Synthetic oligonucleotide"
ggttcgccttcgccgatgcgg

SEQ ID NO: 17328 - DNA, 21 bp, Artificial Sequence
  source: /note="Description of Artificial Sequence: Synthetic oligonucleotide"
ggttctcctactacgggtagt

SEQ ID NO: 17329 - DNA, 21 bp, Artificial Sequence
  source: /note="Description of Artificial Sequence: Synthetic oligonucleotide"
ggttcgccgtattctcaggct

SEQ ID NO: 17330 - DNA, 21 bp, Artificial Sequence
  source: /note="Description of Artificial Sequence: Synthetic oligonucleotide"
gggtctcagcttcatccggtt

SEQ ID NO: 17331 - DNA, 21 bp, Artificial Sequence
  source: /note="Description of Artificial Sequence: Synthetic oligonucleotide"
gggtctcagcctattcggacg

SEQ ID NO: 17332 - DNA, 21 bp, Artificial Sequence
  source: /note="Description of Artificial Sequence: Synthetic oligonucleotide"
ggtagtcagcagttggcggcg

SEQ ID NO: 17333 - DNA, 21 bp, Artificial Sequence
  source: /note="Description of Artificial Sequence: Synthetic oligonucleotide"
gggtctcgggcgtctgatcct

SEQ ID NO: 17334 - DNA, 21 bp, Artificial Sequence
  source: /note="Description of Artificial Sequence: Synthetic oligonucleotide"
ggtagtcgtctgcagcatgat

SEQ ID NO: 17335 - DNA, 21 bp, Artificial Sequence
  source: /note="Description of Artificial Sequence: Synthetic oligonucleotide"
gggagtaggaattttcctact

SEQ ID NO: 17336 - DNA, 21 bp, Artificial Sequence
  source: /note="Description of Artificial Sequence: Synthetic oligonucleotide"
gggagtcgtaattatattgct

SEQ ID NO: 17337 - DNA, 21 bp, Artificial Sequence
  source: /note="Description of Artificial Sequence: Synthetic oligonucleotide"
ggttcgcgtcctgggagtttg

SEQ ID NO: 17338 - DNA, 21 bp, Artificial Sequence
  source: /note="Description of Artificial Sequence: Synthetic oligonucleotide"
ggttcgaggcagcctgctgat

SEQ ID NO: 17339 - DNA, 21 bp, Artificial Sequence
  source: /note="Description of Artificial Sequence: Synthetic oligonucleotide"
gggagtcgtacgtttactggg

SEQ ID NO: 17340 - DNA, 21 bp, Artificial Sequence
  source: /note="Description of Artificial Sequence: Synthetic oligonucleotide"
ggttctcggactgggccgact

SEQ ID NO: 17341 - DNA, 21 bp, Artificial Sequence
  source: /note="Description of Artificial Sequence: Synthetic oligonucleotide"
gggtcgcgtgttagtggggag

SEQ ID NO: 17342 - DNA, 21 bp, Artificial Sequence
  source: /note="Description of Artificial Sequence: Synthetic oligonucleotide"
gggtcgtcggcgacggtgttt

SEQ ID NO: 17343 - DNA, 21 bp, Artificial Sequence
  source: /note="Description of Artificial Sequence: Synthetic oligonucleotide"
ggtagttcggatacttgtgtt

SEQ ID NO: 17344 - DNA, 21 bp, Artificial Sequence
  source: /note="Description of Artificial Sequence: Synthetic oligonucleotide"
gggagttcgggtattgcgcgg

SEQ ID NO: 17345 - DNA, 21 bp, Artificial Sequence
  source: /note="Description of Artificial Sequence: Synthetic oligonucleotide"
gggtcttctcatgggattctt

SEQ ID NO: 17346 - DNA, 21 bp, Artificial Sequence
  source: /note="Description of Artificial Sequence: Synthetic oligonucleotide"
gggtcttctatgcctccgccg

SEQ ID NO: 17347 - DNA, 21 bp, Artificial Sequence
  source: /note="Description of Artificial Sequence: Synthetic oligonucleotide"
gggagtagtcctgctcggacg

SEQ ID NO: 17348 - DNA, 21 bp, Artificial Sequence
  source: /note="Description of Artificial Sequence: Synthetic oligonucleotide"
ggttcgtcgcctctgcataag

SEQ ID NO: 17349 - DNA, 21 bp, Artificial Sequence
  source: /note="Description of Artificial Sequence: Synthetic oligonucleotide"
ggttctagtcctgtgggtgct

SEQ ID NO: 17350 - DNA, 21 bp, Artificial Sequence
  source: /note="Description of Artificial Sequence: Synthetic oligonucleotide"
gggagttctcagttgtttctt

SEQ ID NO: 17351 - DNA, 21 bp, Artificial Sequence
  source: /note="Description of Artificial Sequence: Synthetic oligonucleotide"
ggttctagtagggctgatgcg

SEQ ID NO: 17352 - DNA, 21 bp, Artificial Sequence
  source: /note="Description of Artificial Sequence: Synthetic oligonucleotide"
gggtcttcttctcatgtgtcg

SEQ ID NO: 17353 - DNA, 21 bp, Artificial Sequence
  source: /note="Description of Artificial Sequence: Synthetic oligonucleotide"
ggtagttcgtctattgcgtct

SEQ ID NO: 17354 - DNA, 21 bp, Artificial Sequence
  source: /note="Description of Artificial Sequence: Synthetic oligonucleotide"
gggtcgtcgtctttgcattcg

SEQ ID NO: 17355 - DNA, 21 bp, Artificial Sequence
  source: /note="Description of Artificial Sequence: Synthetic oligonucleotide"
ggttctagttcgaatgctcgg

SEQ ID NO: 17356 - DNA, 21 bp, Artificial Sequence
  source: /note="Description of Artificial Sequence: Synthetic oligonucleotide"
ggtagttcttatcattcgcct

SEQ ID NO: 17357 - DNA, 21 bp, Artificial Sequence
  source: /note="Description of Artificial Sequence: Synthetic oligonucleotide"
gggagtacgggtgataggcag

SEQ ID NO: 17358 - DNA, 21 bp, Artificial Sequence
  source: /note="Description of Artificial Sequence: Synthetic oligonucleotide"
gggtctacgggtaatactgtg

SEQ ID NO: 17359 - DNA, 21 bp, Artificial Sequence
  source: /note="Description of Artificial Sequence: Synthetic oligonucleotide"
ggtagtactggtagtgctgct

SEQ ID NO: 17360 - DNA, 21 bp, Artificial Sequence
  source: /note="Description of Artificial Sequence: Synthetic oligonucleotide"
ggttcgacgggttctgggcat

SEQ ID NO: 17361 - DNA, 21 bp, Artificial Sequence
  source: /note="Description of Artificial Sequence: Synthetic oligonucleotide"
ggtagtacgatgacgattgcg

SEQ ID NO: 17362 - DNA, 21 bp, Artificial Sequence
  source: /note="Description of Artificial Sequence: Synthetic oligonucleotide"
ggttcgacgaatgagttggtg

SEQ ID NO: 17363 - DNA, 21 bp, Artificial Sequence
  source: /note="Description of Artificial Sequence: Synthetic oligonucleotide"
ggttcgactaatcctctggct

SEQ ID NO: 17364 - DNA, 21 bp, Artificial Sequence
  source: /note="Description of Artificial Sequence: Synthetic oligonucleotide"
ggtagtactaatcggctggcg

SEQ ID NO: 17365 - DNA, 21 bp, Artificial Sequence
  source: /note="Description of Artificial Sequence: Synthetic oligonucleotide"
gggtctactaattcgcctgcg

SEQ ID NO: 17366 - DNA, 21 bp, Artificial Sequence
  source: /note="Description of Artificial Sequence: Synthetic oligonucleotide"
gggtcgactccgcttccgctg

SEQ ID NO: 17367 - DNA, 21 bp, Artificial Sequence
  source: /note="Description of Artificial Sequence: Synthetic oligonucleotide"
ggtagtactcaggggtctggt

SEQ ID NO: 17368 - DNA, 21 bp, Artificial Sequence
  source: /note="Description of Artificial Sequence: Synthetic oligonucleotide"
ggttcgacgtctaaggatagg

SEQ ID NO: 17369 - DNA, 21 bp, Artificial Sequence
  source: /note="Description of Artificial Sequence: Synthetic oligonucleotide"
ggttctacttcttctcgtacg

SEQ ID NO: 17370 - DNA, 21 bp, Artificial Sequence
  source: /note="Description of Artificial Sequence: Synthetic oligonucleotide"
ggttcgactacgcggccgcag

SEQ ID NO: 17371 - DNA, 21 bp, Artificial Sequence
  source: /note="Description of Artificial Sequence: Synthetic oligonucleotide"
ggttcgacgtggtcgagtccg

SEQ ID NO: 17372 - DNA, 21 bp, Artificial Sequence
  source: /note="Description of Artificial Sequence: Synthetic oligonucleotide"
ggttctacgtatgcttctatg

SEQ ID NO: 17373 - DNA, 21 bp, Artificial Sequence
  source: /note="Description of Artificial Sequence: Synthetic oligonucleotide"
gggtctgtggcggatcgggtg

SEQ ID NO: 17374 - DNA, 21 bp, Artificial Sequence
  source: /note="Description of Artificial Sequence: Synthetic oligonucleotide"
ggttctgttgcgactaatccg

SEQ ID NO: 17375 - DNA, 21 bp, Artificial Sequence
  source: /note="Description of Artificial Sequence: Synthetic oligonucleotide"
gggagtgttgaggagtctcgg

SEQ ID NO: 17376 - DNA, 21 bp, Artificial Sequence
  source: /note="Description of Artificial Sequence: Synthetic oligonucleotide"
gggtctgtgaatccgaggtcg

SEQ ID NO: 17377 - DNA, 21 bp, Artificial Sequence
  source: /note="Description of Artificial Sequence: Synthetic oligonucleotide"
gggagtgttccggatagtcgg

SEQ ID NO: 17378 - DNA, 21 bp, Artificial Sequence
  source: /note="Description of Artificial Sequence: Synthetic oligonucleotide"
gggagtgtgccgaatgtgatt

SEQ ID NO: 17379 - DNA, 21 bp, Artificial Sequence
  source: /note="Description of Artificial Sequence: Synthetic oligonucleotide"
ggttctgtgcagattcggcct

SEQ ID NO: 17380 - DNA, 21 bp, Artificial Sequence
  source: /note="Description of Artificial Sequence: Synthetic oligonucleotide"
ggttcttatgctaatgctgcg

SEQ ID NO: 17381 - DNA, 21 bp, Artificial Sequence
  source: /note="Description of Artificial Sequence: Synthetic oligonucleotide"
ggtactgctgatctggttccg

SEQ ID NO: 17382 - DNA, 21 bp, Artificial Sequence
  source: /note="Description of Artificial Sequence: Synthetic oligonucleotide"
ggtacggctcatctgaagcct

SEQ ID NO: 17383 - DNA, 21 bp, Artificial Sequence
  source: /note="Description of Artificial Sequence: Synthetic oligonucleotide"
gggacggcgaatcgtaatgct

SEQ ID NO: 17384 - DNA, 21 bp, Artificial Sequence
  source: /note="Description of Artificial Sequence: Synthetic oligonucleotide"
ggtactgctccttctgttatg

SEQ ID NO: 17385 - DNA, 21 bp, Artificial Sequence
  source: /note="Description of Artificial Sequence: Synthetic oligonucleotide"
ggtactgcggttcagcgtctt

SEQ ID NO: 17386 - DNA, 21 bp, Artificial Sequence
  source: /note="Description of Artificial Sequence: Synthetic oligonucleotide"
gggactgattttgtgccgagt

SEQ ID NO: 17387 - DNA, 21 bp, Artificial Sequence
  source: /note="Description of Artificial Sequence: Synthetic oligonucleotide"
gggacggatattcggatgcct

SEQ ID NO: 17388 - DNA, 21 bp, Artificial Sequence
  source: /note="Description of Artificial Sequence: Synthetic oligonucleotide"
ggtactgaggagtttgggtat

SEQ ID NO: 17389 - DNA, 21 bp, Artificial Sequence
  source: /note="Description of Artificial Sequence: Synthetic oligonucleotide"
ggtactgagcatactacggcg

SEQ ID NO: 17390 - DNA, 21 bp, Artificial Sequence
  source: /note="Description of Artificial Sequence: Synthetic oligonucleotide"
gggacggagtcgaatgggcgg

SEQ ID NO: 17391 - DNA, 21 bp, Artificial Sequence
  source: /note="Description of Artificial Sequence: Synthetic oligonucleotide"
gggacggagtataatacttgt

SEQ ID NO: 17392 - DNA, 21 bp, Artificial Sequence
  source: /note="Description of Artificial Sequence: Synthetic oligonucleotide"
ggtacgtttggtacgacggcg

SEQ ID NO: 17393 - DNA, 21 bp, Artificial Sequence
  source: /note="Description of Artificial Sequence: Synthetic oligonucleotide"
ggtacttttaaggctagtcat

SEQ ID NO: 17394 - DNA, 21 bp, Artificial Sequence
  source: /note="Description of Artificial Sequence: Synthetic oligonucleotide"
ggtactgggggggtgaagatt

SEQ ID NO: 17395 - DNA, 21 bp, Artificial Sequence
  source: /note="Description of Artificial Sequence: Synthetic oligonucleotide"
gggacgggtattaatcatttg

SEQ ID NO: 17396 - DNA, 21 bp, Artificial Sequence
  source: /note="Description of Artificial Sequence: Synthetic oligonucleotide"
ggtactggtaagcctatgggt

SEQ ID NO: 17397 - DNA, 21 bp, Artificial Sequence
  source: /note="Description of Artificial Sequence: Synthetic oligonucleotide"
ggtacggggaatgttggtgct

SEQ ID NO: 17398 - DNA, 21 bp, Artificial Sequence
  source: /note="Description of Artificial Sequence: Synthetic oligonucleotide"
gggactggtccgtctgttcct

SEQ ID NO: 17399 - DNA, 21 bp, Artificial Sequence
  source: /note="Description of Artificial Sequence: Synthetic oligonucleotide"
ggtacgggtcgggatggtagt

SEQ ID NO: 17400 - DNA, 21 bp, Artificial Sequence
  source: /note="Description of Artificial Sequence: Synthetic oligonucleotide"
ggtacgggttcgagggtggtg

SEQ ID NO: 17401 - DNA, 21 bp, Artificial Sequence
  source: /note="Description of Artificial Sequence: Synthetic oligonucleotide"
ggtacgatttatgggccggtg

SEQ ID NO: 17402 - DNA, 21 bp, Artificial Sequence
  source: /note="Description of Artificial Sequence: Synthetic oligonucleotide"
gggactaagctttatactact

SEQ ID NO: 17403 - DNA, 21 bp, Artificial Sequence
  source: /note="Description of Artificial Sequence: Synthetic oligonucleotide"
ggtactaagtatgctgcttct

SEQ ID NO: 17404 - DNA, 21 bp, Artificial Sequence
  source: /note="Description of Artificial Sequence: Synthetic oligonucleotide"
gggacgctggatactgtgatt

SEQ ID NO: 17405 - DNA, 21 bp, Artificial Sequence
  source: /note="Description of Artificial Sequence: Synthetic oligonucleotide"
gggactcttgagtattctatg

SEQ ID NO: 17406 - DNA, 21 bp, Artificial Sequence
  source: /note="Description of Artificial Sequence: Synthetic oligonucleotide"
ggtacgcttggttgtcgggag

SEQ ID NO: 17407 - DNA, 21 bp, Artificial Sequence
  source: /note="Description of Artificial Sequence: Synthetic oligonucleotide"
gggacgctgggtcttcgtcag

SEQ ID NO: 17408 - DNA, 21 bp, Artificial Sequence
  source: /note="Description of Artificial Sequence: Synthetic oligonucleotide"
ggtacgttgcatgggagtgag

SEQ ID NO: 17409 - DNA, 21 bp, Artificial Sequence
  source: /note="Description of Artificial Sequence: Synthetic oligonucleotide"
ggtactcttaattatgcttcg

SEQ ID NO: 17410 - DNA, 21 bp, Artificial Sequence
  source: /note="Description of Artificial Sequence: Synthetic oligonucleotide"
ggtactttgtctggtcttgag

SEQ ID NO: 17411 - DNA, 21 bp, Artificial Sequence
  source: /note="Description of Artificial Sequence: Synthetic oligonucleotide"
gggacgcttactcctactatg

SEQ ID NO: 17412 - DNA, 21 bp, Artificial Sequence
  source: /note="Description of Artificial Sequence: Synthetic oligonucleotide"
gggacgatgaatgtggttatt

SEQ ID NO: 17413 - DNA, 21 bp, Artificial Sequence
  source: /note="Description of Artificial Sequence: Synthetic oligonucleotide"
gggactatgagtcttggtccg

SEQ ID NO: 17414 - DNA, 21 bp, Artificial Sequence
  source: /note="Description of Artificial Sequence: Synthetic oligonucleotide"
gggacgatgactaattctgcg

SEQ ID NO: 17415 - DNA, 21 bp, Artificial Sequence
  source: /note="Description of Artificial Sequence: Synthetic oligonucleotide"
ggtacgaatggtctgatgctg

SEQ ID NO: 17416 - DNA, 21 bp, Artificial Sequence
  source: /note="Description of Artificial Sequence: Synthetic oligonucleotide"
ggtacgaatgggctgccggcg

SEQ ID NO: 17417 - DNA, 21 bp, Artificial Sequence
  source: /note="Description of Artificial Sequence: Synthetic oligonucleotide"
ggtacgaatcatgcgcagaag

SEQ ID NO: 17418 - DNA, 21 bp, Artificial Sequence
  source: /note="Description of Artificial Sequence: Synthetic oligonucleotide"
gggacgaatccggttcttact

SEQ ID NO: 17419 - DNA, 21 bp, Artificial Sequence
  source: /note="Description of Artificial Sequence: Synthetic oligonucleotide"
ggtactccggctcatgctgcg

SEQ ID NO: 17420 - DNA, 21 bp, Artificial Sequence
  source: /note="Description of Artificial Sequence: Synthetic oligonucleotide"
gggactccggagaggcttccg

SEQ ID NO: 17421 - DNA, 21 bp, Artificial Sequence
  source: /note="Description of Artificial Sequence: Synthetic oligonucleotide"
gggacgcctatgactcagggg

SEQ ID NO: 17422 - DNA, 21 bp, Artificial Sequence
  source: /note="Description of Artificial Sequence: Synthetic oligonucleotide"
ggtactccgaataatcgtaat

SEQ ID NO: 17423 - DNA, 21 bp, Artificial Sequence
  source: /note="Description of Artificial Sequence: Synthetic oligonucleotide"
ggtacgccgaatgttcatggg

SEQ ID NO: 17424 - DNA, 21 bp, Artificial Sequence
  source: /note="Description of Artificial Sequence: Synthetic oligonucleotide"
ggtactccgccgggtccttct

SEQ ID NO: 17425 - DNA, 21 bp, Artificial Sequence
  source: /note="Description of Artificial Sequence: Synthetic oligonucleotide"
ggtacgccgcctacgcgtttg

SEQ ID NO: 17426 - DNA, 21 bp, Artificial Sequence
  source: /note="Description of Artificial Sequence: Synthetic oligonucleotide"
gggactcctgttgttgattgt

SEQ ID NO: 17427 - DNA, 21 bp, Artificial Sequence
  source: /note="Description of Artificial Sequence: Synthetic oligonucleotide"
gggactcaggcggagaggcag

SEQ ID NO: 17428 - DNA, 21 bp, Artificial Sequence
  source: /note="Description of Artificial Sequence: Synthetic oligonucleotide"
gggactcaggctcgtatttgt

SEQ ID NO: 17429 - DNA, 21 bp, Artificial Sequence
  source: /note="Description of Artificial Sequence: Synthetic oligonucleotide"
ggtacgcagatggcgagggct

SEQ ID NO: 17430 - DNA, 21 bp, Artificial Sequence
  source: /note="Description of Artificial Sequence: Synthetic oligonucleotide"
ggtacgcagagtacttatgat

SEQ ID NO: 17431 - DNA, 21 bp, Artificial Sequence
  source: /note="Description of Artificial Sequence: Synthetic oligonucleotide"
ggtacgcgtccggcgcatgtg

SEQ ID NO: 17432 - DNA, 21 bp, Artificial Sequence
  source: /note="Description of Artificial Sequence: Synthetic oligonucleotide"
gggacgaggagtacttttgcg

SEQ ID NO: 17433 - DNA, 21 bp, Artificial Sequence
  source: /note="Description of Artificial Sequence: Synthetic oligonucleotide"
gggactcgtactgttgttctg

SEQ ID NO: 17434 - DNA, 21 bp, Artificial Sequence
  source: /note="Description of Artificial Sequence: Synthetic oligonucleotide"
ggtactcgtgttcttagttat

SEQ ID NO: 17435 - DNA, 21 bp, Artificial Sequence
  source: /note="Description of Artificial Sequence: Synthetic oligonucleotide"
ggtacttctgggtattcgcct

SEQ ID NO: 17436 - DNA, 21 bp, Artificial Sequence
  source: /note="Description of Artificial Sequence: Synthetic oligonucleotide"
gggacttcgaatttgagtccg

SEQ ID NO: 17437 - DNA, 21 bp, Artificial Sequence
  source: /note="Description of Artificial Sequence: Synthetic oligonucleotide"
ggtacgtctccggatcagaag

SEQ ID NO: 17438 - DNA, 21 bp, Artificial Sequence
  source: /note="Description of Artificial Sequence: Synthetic oligonucleotide"
ggtactagtccggtgatgtgt

SEQ ID NO: 17439 - DNA, 21 bp, Artificial Sequence
  source: /note="Description of Artificial Sequence: Synthetic oligonucleotide"
ggtactagtcagaagctgcct

SEQ ID NO: 17440 - DNA, 21 bp, Artificial Sequence
  source: /note="Description of Artificial Sequence: Synthetic oligonucleotide"
gggacgtctcagaagacgagt

SEQ ID NO: 17441 - DNA, 21 bp, Artificial Sequence
  source: /note="Description of Artificial Sequence: Synthetic oligonucleotide"
gggacttcgtcgcgtgctcct

SEQ ID NO: 17442 - DNA, 21 bp, Artificial Sequence
  source: /note="Description of Artificial Sequence: Synthetic oligonucleotide"
gggactagttcgtcggggctg

SEQ ID NO: 17443 - DNA, 21 bp, Artificial Sequence
  source: /note="Description of Artificial Sequence: Synthetic oligonucleotide"
gggacgacggagattcattcg

SEQ ID NO: 17444 - DNA, 21 bp, Artificial Sequence
  source: /note="Description of Artificial Sequence: Synthetic oligonucleotide"
ggtacgactcatactaatatt

SEQ ID NO: 17445 - DNA, 21 bp, Artificial Sequence
  source: /note="Description of Artificial Sequence: Synthetic oligonucleotide"
ggtactactaagctggggcct

SEQ ID NO: 17446 - DNA, 21 bp, Artificial Sequence
  source: /note="Description of Artificial Sequence: Synthetic oligonucleotide"
gggactactatggtgcctgct

SEQ ID NO: 17447 - DNA, 21 bp, Artificial Sequence
  source: /note="Description of Artificial Sequence: Synthetic oligonucleotide"
ggtacgactaatcttgcgggt

SEQ ID NO: 17448 - DNA, 21 bp, Artificial Sequence
  source: /note="Description of Artificial Sequence: Synthetic oligonucleotide"
ggtacgacgaataatatgttt

SEQ ID NO: 17449 - DNA, 21 bp, Artificial Sequence
  source: /note="Description of Artificial Sequence: Synthetic oligonucleotide"
ggtacgactaataataatgct

SEQ ID NO: 17450 - DNA, 21 bp, Artificial Sequence
  source: /note="Description of Artificial Sequence: Synthetic oligonucleotide"
ggtacgacttctgctgagagt

SEQ ID NO: 17451 - DNA, 21 bp, Artificial Sequence
  source: /note="Description of Artificial Sequence: Synthetic oligonucleotide"
gggactactagtcctaagtcg

SEQ ID NO: 17452 - DNA, 21 bp, Artificial Sequence
  source: /note="Description of Artificial Sequence: Synthetic oligonucleotide"
gggactacgtcttcgcatgag

SEQ ID NO: 17453 - DNA, 21 bp, Artificial Sequence
  source: /note="Description of Artificial Sequence: Synthetic oligonucleotide"
ggtacgactactgggcattct

SEQ ID NO: 17454 - DNA, 21 bp, Artificial Sequence
  source: /note="Description of Artificial Sequence: Synthetic oligonucleotide"
ggtactgttgatcgggggcag

SEQ ID NO: 17455 - DNA, 21 bp, Artificial Sequence
  source: /note="Description of Artificial Sequence: Synthetic oligonucleotide"
ggtacggtgggtcttaatgtg

SEQ ID NO: 17456 - DNA, 21 bp, Artificial Sequence
  source: /note="Description of Artificial Sequence: Synthetic oligonucleotide"
ggtacggtggggtctgatcgt

SEQ ID NO: 17457 - DNA, 21 bp, Artificial Sequence
  source: /note="Description of Artificial Sequence: Synthetic oligonucleotide"
gggactgttcataataatttg

SEQ ID NO: 17458 - DNA, 21 bp, Artificial Sequence
  source: /note="Description of Artificial Sequence: Synthetic oligonucleotide"
ggtactgtgcatacgaatgct

SEQ ID NO: 17459 - DNA, 21 bp, Artificial Sequence
  source: /note="Description of Artificial Sequence: Synthetic oligonucleotide"
ggtactgttccggagggtccg

SEQ ID NO: 17460 - DNA, 21 bp, Artificial Sequence
  source: /note="Description of Artificial Sequence: Synthetic oligonucleotide"
gggacggttcagaagtcggat

SEQ ID NO: 17461 - DNA, 21 bp, Artificial Sequence
  source: /note="Description of Artificial Sequence: Synthetic oligonucleotide"
gggactgttaggagtgctgtg

SEQ ID NO: 17462 - DNA, 21 bp, Artificial Sequence
  source: /note="Description of Artificial Sequence: Synthetic oligonucleotide"
gggacttatgcgaatgctgtt

SEQ ID NO: 17463 - DNA, 21 bp, Artificial Sequence
  source: /note="Description of Artificial Sequence: Synthetic oligonucleotide"
ggtacgtatgtggagtctact

SEQ ID NO: 17464 - DNA, 21 bp, Artificial Sequence
  source: /note="Description of Artificial Sequence: Synthetic oligonucleotide"
ggggtggctcatgagaagaat

SEQ ID NO: 17465 - DNA, 21 bp, Artificial Sequence
  source: /note="Description of Artificial Sequence: Synthetic oligonucleotide"
ggggttgcgaagttgctggcg

SEQ ID NO: 17466 - DNA, 21 bp, Artificial Sequence
  source: /note="Description of Artificial Sequence: Synthetic oligonucleotide"
ggtgtggcgtcgtctcctggg

SEQ ID NO: 17467 - DNA, 21 bp, Artificial Sequence
  source: /note="Description of Artificial Sequence: Synthetic oligonucleotide"
ggggtggcttctactcgtgct

SEQ ID NO: 17468 - DNA, 21 bp, Artificial Sequence
  source: /note="Description of Artificial Sequence: Synthetic oligonucleotide"
ggtgttgcgacgcttacgctg

SEQ ID NO: 17469 - DNA, 21 bp, Artificial Sequence
  source: /note="Description of Artificial Sequence: Synthetic oligonucleotide"
ggtgtggctgttacggagcgg

SEQ ID NO: 17470 - DNA, 21 bp, Artificial Sequence
  source: /note="Description of Artificial Sequence: Synthetic oligonucleotide"
ggtgtttgtgctgagtcttgg

SEQ ID NO: 17471 - DNA, 21 bp, Artificial Sequence
  source: /note="Description of Artificial Sequence: Synthetic oligonucleotide"
ggtgttgatgtgaagtggagt

SEQ ID NO: 17472 - DNA, 21 bp, Artificial Sequence
  source: /note="Description of Artificial Sequence: Synthetic oligonucleotide"
ggggtggaggctatgcgtgcg

SEQ ID NO: 17473 - DNA, 21 bp, Artificial Sequence
  source: /note="Description of Artificial Sequence: Synthetic oligonucleotide"
ggggttgagcataatgattcg

SEQ ID NO: 17474 - DNA, 21 bp, Artificial Sequence
  source: /note="Description of Artificial Sequence: Synthetic oligonucleotide"
ggggtttttaaggagactggt

SEQ ID NO: 17475 - DNA, 21 bp, Artificial Sequence
  source: /note="Description of Artificial Sequence: Synthetic oligonucleotide"
ggggtgggtgctagtcatatt

SEQ ID NO: 17476 - DNA, 21 bp, Artificial Sequence
  source: /note="Description of Artificial Sequence: Synthetic oligonucleotide"
ggtgtgggggcttcgcgtagt

SEQ ID NO: 17477 - DNA, 21 bp, Artificial Sequence
  source: /note="Description of Artificial Sequence: Synthetic oligonucleotide"
ggggtgggtaatatgcctgat

SEQ ID NO: 17478 - DNA, 21 bp, Artificial Sequence
  source: /note="Description of Artificial Sequence: Synthetic oligonucleotide"
ggggtgggtcaggtgcggtct

SEQ ID NO: 17479 - DNA, 21 bp, Artificial Sequence
  source: /note="Description of Artificial Sequence: Synthetic oligonucleotide"
ggtgtgcatttgagttctcct

SEQ ID NO: 17480 - DNA, 21 bp, Artificial Sequence
  source: /note="Description of Artificial Sequence: Synthetic oligonucleotide"
ggtgtgcattcgatggttgag

SEQ ID NO: 17481 - DNA, 21 bp, Artificial Sequence
  source: /note="Description of Artificial Sequence: Synthetic oligonucleotide"
ggggtgcatgttaagccggag

SEQ ID NO: 17482 - DNA, 21 bp, Artificial Sequence
  source: /note="Description of Artificial Sequence: Synthetic oligonucleotide"
ggtgtgattgctcatcattcg

SEQ ID NO: 17483 - DNA, 21 bp, Artificial Sequence
  source: /note="Description of Artificial Sequence: Synthetic oligonucleotide"
ggggtgattcttgctcggatg

SEQ ID NO: 17484 - DNA, 21 bp, Artificial Sequence
  source: /note="Description of Artificial Sequence: Synthetic oligonucleotide"
ggggtgattaatccgacgctg

SEQ ID NO: 17485 - DNA, 21 bp, Artificial Sequence
  source: /note="Description of Artificial Sequence: Synthetic oligonucleotide"
ggtgttaaggcttcgattctg

SEQ ID NO: 17486 - DNA, 21 bp, Artificial Sequence
  source: /note="Description of Artificial Sequence: Synthetic oligonucleotide"
ggtgttaagtttgggggttct

SEQ ID NO: 17487 - DNA, 21 bp, Artificial Sequence
  source: /note="Description of Artificial Sequence: Synthetic oligonucleotide"
ggggtgaagcatgggcattat

SEQ ID NO: 17488 - DNA, 21 bp, Artificial Sequence
  source: /note="Description of Artificial Sequence: Synthetic oligonucleotide"
ggggttaagctgtcgccgtct

SEQ ID NO: 17489 - DNA, 21 bp, Artificial Sequence
  source: /note="Description of Artificial Sequence: Synthetic oligonucleotide"
ggtgttaagcctgatcctgtt

SEQ ID NO: 17490 - DNA, 21 bp, Artificial Sequence
  source: /note="Description of Artificial Sequence: Synthetic oligonucleotide"
ggtgtgcttggtccgcctctg

SEQ ID NO: 17491 - DNA, 21 bp, Artificial Sequence
  source: /note="Description of Artificial Sequence: Synthetic oligonucleotide"
ggtgtgcttcggatgtcgagt

SEQ ID NO: 17492 - DNA, 21 bp, Artificial Sequence
  source: /note="Description of Artificial Sequence: Synthetic oligonucleotide"
ggtgtgctgactaatattttg

SEQ ID NO: 17493 - DNA, 21 bp, Artificial Sequence
  source: /note="Description of Artificial Sequence: Synthetic oligonucleotide"
ggggttaatgagcggaatgtg

SEQ ID NO: 17494 - DNA, 21 bp, Artificial Sequence
  source: /note="Description of Artificial Sequence: Synthetic oligonucleotide"
ggtgtgaatattacgagtttg

SEQ ID NO: 17495 - DNA, 21 bp, Artificial Sequence
  source: /note="Description of Artificial Sequence: Synthetic oligonucleotide"
ggggtgaatccttctcgtctt

SEQ ID NO: 17496 - DNA, 21 bp, Artificial Sequence
  source: /note="Description of Artificial Sequence: Synthetic oligonucleotide"
ggtgtgccggctacttcgtat

SEQ ID NO: 17497 - DNA, 21 bp, Artificial Sequence
  source: /note="Description of Artificial Sequence: Synthetic oligonucleotide"
ggtgttccgggtatttcggcg

SEQ ID NO: 17498 - DNA, 21 bp, Artificial Sequence
  source: /note="Description of Artificial Sequence: Synthetic oligonucleotide"
ggtgttccgattcagactcct

SEQ ID NO: 17499 - DNA, 21 bp, Artificial Sequence
  source: /note="Description of Artificial Sequence: Synthetic oligonucleotide"
ggggtgcgtgatatgggtctt

SEQ ID NO: 17500 - DNA, 21 bp, Artificial Sequence
  source: /note="Description of Artificial Sequence: Synthetic oligonucleotide"
ggtgtgaggggggcgcctctg

SEQ ID NO: 17501 - DNA, 21 bp, Artificial Sequence
  source: /note="Description of Artificial Sequence: Synthetic oligonucleotide"
ggtgtgcggttggatgctact

SEQ ID NO: 17502 - DNA, 21 bp, Artificial Sequence
  source: /note="Description of Artificial Sequence: Synthetic oligonucleotide"
ggggttaggctgaatgagact

SEQ ID NO: 17503 - DNA, 21 bp, Artificial Sequence
  source: /note="Description of Artificial Sequence: Synthetic oligonucleotide"
ggtgtgaggttgcagaatgcg

SEQ ID NO: 17504 - DNA, 21 bp, Artificial Sequence
  source: /note="Description of Artificial Sequence: Synthetic oligonucleotide"
ggtgttcgtagtcatactatg

SEQ ID NO: 17505 - DNA, 21 bp, Artificial Sequence
  source: /note="Description of Artificial Sequence: Synthetic oligonucleotide"
ggggtttcgtttcagtctatg

SEQ ID NO: 17506 - DNA, 21 bp, Artificial Sequence
  source: /note="Description of Artificial Sequence: Synthetic oligonucleotide"
ggggtttctaagattgattcg

SEQ ID NO: 17507 - DNA, 21 bp, Artificial Sequence
  source: /note="Description of Artificial Sequence: Synthetic oligonucleotide"
ggggttagtaggtctgctaat

SEQ ID NO: 17508 - DNA, 21 bp, Artificial Sequence
  source: /note="Description of Artificial Sequence: Synthetic oligonucleotide"
ggtgtttcgtcttctcagcgg

SEQ ID NO: 17509 - DNA, 21 bp, Artificial Sequence
  source: /note="Description of Artificial Sequence: Synthetic oligonucleotide"
ggtgtgtcttctgtgcagagt

SEQ ID NO: 17510 - DNA, 21 bp, Artificial Sequence
  source: /note="Description of Artificial Sequence: Synthetic oligonucleotide"
ggtgttagtactgcgaggatt

SEQ ID NO: 17511 - DNA, 21 bp, Artificial Sequence
  source: /note="Description of Artificial Sequence: Synthetic oligonucleotide"
ggtgttagtgtttcgcgtccg

SEQ ID NO: 17512 - DNA, 21 bp, Artificial Sequence
  source: /note="Description of Artificial Sequence: Synthetic oligonucleotide"
ggggttactaaggctgtgtcg

SEQ ID NO: 17513 - DNA, 21 bp, Artificial Sequence
  source: /note="Description of Artificial Sequence: Synthetic oligonucleotide"
ggtgtgactccttcttatagt

SEQ ID NO: 17514 - DNA, 21 bp, Artificial Sequence
  source: /note="Description of Artificial Sequence: Synthetic oligonucleotide"
ggggtgactcaggctacggcg

SEQ ID NO: 17515 - DNA, 21 bp, Artificial Sequence
  source: /note="Description of Artificial Sequence: Synthetic oligonucleotide"
ggggtgacgagtggtgggggt

SEQ ID NO: 17516 - DNA, 21 bp, Artificial Sequence
  source: /note="Description of Artificial Sequence: Synthetic oligonucleotide"
ggtgttactagtacgtctagt

SEQ ID NO: 17517 - DNA, 21 bp, Artificial Sequence
  source: /note="Description of Artificial Sequence: Synthetic oligonucleotide"
ggggttacgacgtctattcat

SEQ ID NO: 17518 - DNA, 21 bp, Artificial Sequence
  source: /note="Description of Artificial Sequence: Synthetic oligonucleotide"
ggtgtgacgacttattctgcg

SEQ ID NO: 17519 - DNA, 21 bp, Artificial Sequence
  source: /note="Description of Artificial Sequence: Synthetic oligonucleotide"
ggggttgtgggttctcatcat

SEQ ID NO: 17520 - DNA, 21 bp, Artificial Sequence
  source: /note="Description of Artificial Sequence: Synthetic oligonucleotide"
ggggtggtgcatactcgtact

SEQ ID NO: 17521 - DNA, 21 bp, Artificial Sequence
  source: /note="Description of Artificial Sequence: Synthetic oligonucleotide"
gggtgggctttgacgaatggg

SEQ ID NO: 17522 - DNA, 21 bp, Artificial Sequence
  source: /note="Description of Artificial Sequence: Synthetic oligonucleotide"
ggttgggagccgacgagtgat

SEQ ID NO: 17523 - DNA, 21 bp, Artificial Sequence
  source: /note="Description of Artificial Sequence: Synthetic oligonucleotide"
gggtggggtgcggagactatt

SEQ ID NO: 17524 - DNA, 21 bp, Artificial Sequence
  source: /note="Description of Artificial Sequence: Synthetic oligonucleotide"
ggttggggtcttgtgaatgat

SEQ ID NO: 17525 - DNA, 21 bp, Artificial Sequence
  source: /note="Description of Artificial Sequence: Synthetic oligonucleotide"
ggttggcatcctgcgctgccg

SEQ ID NO: 17526 - DNA, 21 bp, Artificial Sequence
  source: /note="Description of Artificial Sequence: Synthetic oligonucleotide"
gggtggaagggtcatgctgat

SEQ ID NO: 17527 - DNA, 21 bp, Artificial Sequence
  source: /note="Description of Artificial Sequence: Synthetic oligonucleotide"
gggtggaatgctgatgcttcg

SEQ ID NO: 17528 - DNA, 21 bp, Artificial Sequence
  source: /note="Description of Artificial Sequence: Synthetic oligonucleotide"
gggtggaatgtggatggtctg

SEQ ID NO: 17529 - DNA, 21 bp, Artificial Sequence
  source: /note="Description of Artificial Sequence: Synthetic oligonucleotide"
gggtggccgccgaagtatgag

SEQ ID NO: 17530 - DNA, 21 bp, Artificial Sequence
  source: /note="Description of Artificial Sequence: Synthetic oligonucleotide"
gggtggcagggtcataatctg

SEQ ID NO: 17531 - DNA, 21 bp, Artificial Sequence
  source: /note="Description of Artificial Sequence: Synthetic oligonucleotide"
ggttggcgtgaggttgtggat

SEQ ID NO: 17532 - DNA, 21 bp, Artificial Sequence
  source: /note="Description of Artificial Sequence: Synthetic oligonucleotide"
gggtggcgttctgagcttgag

SEQ ID NO: 17533 - DNA, 21 bp, Artificial Sequence
  source: /note="Description of Artificial Sequence: Synthetic oligonucleotide"
gggtggtctagtgcgggtcat

SEQ ID NO: 17534 - DNA, 21 bp, Artificial Sequence
  source: /note="Description of Artificial Sequence: Synthetic oligonucleotide"
gggtatgcgatgcctgttcct

SEQ ID NO: 17535 - DNA, 21 bp, Artificial Sequence
  source: /note="Description of Artificial Sequence: Synthetic oligonucleotide"
gggtatgctatgtcttctagt

SEQ ID NO: 17536 - DNA, 21 bp, Artificial Sequence
  source: /note="Description of Artificial Sequence: Synthetic oligonucleotide"
gggtatgctactactgttcat

SEQ ID NO: 17537 - DNA, 21 bp, Artificial Sequence
  source: /note="Description of Artificial Sequence: Synthetic oligonucleotide"
ggttatgattttaatccgggg

SEQ ID NO: 17538 - DNA, 21 bp, Artificial Sequence
  source: /note="Description of Artificial Sequence: Synthetic oligonucleotide"
gggtatggtcctatgcgtcag

SEQ ID NO: 17539 - DNA, 21 bp, Artificial Sequence
  source: /note="Description of Artificial Sequence: Synthetic oligonucleotide"
ggttatgggcaggcgtatact

SEQ ID NO: 17540 - DNA, 21 bp, Artificial Sequence
  source: /note="Description of Artificial Sequence: Synthetic oligonucleotide"
ggttatattcatgtgtctggt

SEQ ID NO: 17541 - DNA, 21 bp, Artificial Sequence
  source: /note="Description of Artificial Sequence: Synthetic oligonucleotide"
ggttataagacggcgacgcag

SEQ ID NO: 17542 - DNA, 21 bp, Artificial Sequence
  source: /note="Description of Artificial Sequence: Synthetic oligonucleotide"
gggtatttgcctgtggatcat

SEQ ID NO: 17543 - DNA, 21 bp, Artificial Sequence
  source: /note="Description of Artificial Sequence: Synthetic oligonucleotide"
ggttatctgtcggagactcat

SEQ ID NO: 17544 - DNA, 21 bp, Artificial Sequence
  source: /note="Description of Artificial Sequence: Synthetic oligonucleotide"
gggtatctttctaagatgcct

SEQ ID NO: 17545 - DNA, 21 bp, Artificial Sequence
  source: /note="Description of Artificial Sequence: Synthetic oligonucleotide"
gggtatctgactgagaggctg

SEQ ID NO: 17546 - DNA, 21 bp, Artificial Sequence
  source: /note="Description of Artificial Sequence: Synthetic oligonucleotide"
gggtatatgattaagatgcct

SEQ ID NO: 17547 - DNA, 21 bp, Artificial Sequence
  source: /note="Description of Artificial Sequence: Synthetic oligonucleotide"
gggtatccttctcatgctgcg

SEQ ID NO: 17548 - DNA, 21 bp, Artificial Sequence
  source: /note="Description of Artificial Sequence: Synthetic oligonucleotide"
gggtatcctagtaaggggcct

SEQ ID NO: 17549 - DNA, 21 bp, Artificial Sequence
  source: /note="Description of Artificial Sequence: Synthetic oligonucleotide"
gggtatccgactgcgtcggcg

SEQ ID NO: 17550 - DNA, 21 bp, Artificial Sequence
  source: /note="Description of Artificial Sequence: Synthetic oligonucleotide"
ggttatccggttgggccggcg

SEQ ID NO: 17551 - DNA, 21 bp, Artificial Sequence
  source: /note="Description of Artificial Sequence: Synthetic oligonucleotide"
gggtatcagtcgcgttgtgcg

SEQ ID NO: 17552 - DNA, 21 bp, Artificial Sequence
  source: /note="Description of Artificial Sequence: Synthetic oligonucleotide"
ggttatcgggctacggagacg

SEQ ID NO: 17553 - DNA, 21 bp, Artificial Sequence
  source: /note="Description of Artificial Sequence: Synthetic oligonucleotide"
ggttatcgtttgatgcctgag

SEQ ID NO: 17554 - DNA, 21 bp, Artificial Sequence
  source: /note="Description of Artificial Sequence: Synthetic oligonucleotide"
gggtatcgttcgaatgagacg

SEQ ID NO: 17555 - DNA, 21 bp, Artificial Sequence
  source: /note="Description of Artificial Sequence: Synthetic oligonucleotide"
ggttattctctgccggttact

SEQ ID NO: 17556 - DNA, 21 bp, Artificial Sequence
  source: /note="Description of Artificial Sequence: Synthetic oligonucleotide"
ggttattcgaataataagcct

SEQ ID NO: 17557 - DNA, 21 bp, Artificial Sequence
  source: /note="Description of Artificial Sequence: Synthetic oligonucleotide"
gggtatacttcggggcagccg

SEQ ID NO: 17558 - DNA, 21 bp, Artificial Sequence
  source: /note="Description of Artificial Sequence: Synthetic oligonucleotide"
ggttatgttccggtttcgcag

SEQ ID NO: 17559 - DNA, 21 bp, Artificial Sequence
  source: /note="Description of Artificial Sequence: Synthetic oligonucleotide"
gggtattgggcttcgtctaat

SEQ ID NO: 17560 - DNA, 21 bp, Artificial Sequence
  source: /note="Description of Artificial Sequence: Synthetic oligonucleotide"
catgctgcggctcagccgtcg

SEQ ID NO: 17561 - DNA, 21 bp, Artificial Sequence
  source: /note="Description of Artificial Sequence: Synthetic oligonucleotide"
catgcggctcatcagagtctg

SEQ ID NO: 17562 - DNA, 21 bp, Artificial Sequence
  source: /note="Description of Artificial Sequence: Synthetic oligonucleotide"
catgctgcgtcgcctatggtt

SEQ ID NO: 17563 - DNA, 21 bp, Artificial Sequence
  source: /note="Description of Artificial Sequence: Synthetic oligonucleotide"
catgcggcgtcttctgtgccg

SEQ ID NO: 17564 - DNA, 21 bp, Artificial Sequence
  source: /note="Description of Artificial Sequence: Synthetic oligonucleotide"
catgctgagtctgcgcatccg

SEQ ID NO: 17565 - DNA, 21 bp, Artificial Sequence
  source: /note="Description of Artificial Sequence: Synthetic oligonucleotide"
catgctgggactgtgaagatg

SEQ ID NO: 17566 - DNA, 21 bp, Artificial Sequence
  source: /note="Description of Artificial Sequence: Synthetic oligonucleotide"
catgcgcatttgacgccttcg

SEQ ID NO: 17567 - DNA, 21 bp, Artificial Sequence
  source: /note="Description of Artificial Sequence: Synthetic oligonucleotide"
catgcgattcctactctgctt

SEQ ID NO: 17568 - DNA, 21 bp, Artificial Sequence
  source: /note="Description of Artificial Sequence: Synthetic oligonucleotide"
catgcgaagtcgcggaatgag

SEQ ID NO: 17569 - DNA, 21 bp, Artificial Sequence
  source: /note="Description of Artificial Sequence: Synthetic oligonucleotide"
catgcgaagtctgtttctgct

SEQ ID NO: 17570 - DNA, 21 bp, Artificial Sequence
  source: /note="Description of Artificial Sequence: Synthetic oligonucleotide"
catgcgaagactgctctgacg

SEQ ID NO: 17571 - DNA, 21 bp, Artificial Sequence
  source: /note="Description of Artificial Sequence: Synthetic oligonucleotide"
catgcgaaggttatgcgtgat

SEQ ID NO: 17572 - DNA, 21 bp, Artificial Sequence
  source: /note="Description of Artificial Sequence: Synthetic oligonucleotide"
catgctcttgagcattttccg

SEQ ID NO: 17573 - DNA, 21 bp, Artificial Sequence
  source: /note="Description of Artificial Sequence: Synthetic oligonucleotide"
catgctctgaggaatacgatg

SEQ ID NO: 17574 - DNA, 21 bp, Artificial Sequence
  source: /note="Description of Artificial Sequence: Synthetic oligonucleotide"
catgcgctgtctgattcgcct

SEQ ID NO: 17575 - DNA, 21 bp, Artificial Sequence
  source: /note="Description of Artificial Sequence: Synthetic oligonucleotide"
catgcgatgagttcgaatgtg

SEQ ID NO: 17576 - DNA, 21 bp, Artificial Sequence
  source: /note="Description of Artificial Sequence: Synthetic oligonucleotide"
catgcgaataagcatacgcag

SEQ ID NO: 17577 - DNA, 21 bp, Artificial Sequence
  source: /note="Description of Artificial Sequence: Synthetic oligonucleotide"
catgcgaataatgatccgcat

SEQ ID NO: 17578 - DNA, 21 bp, Artificial Sequence
  source: /note="Description of Artificial Sequence: Synthetic oligonucleotide"
catgctaatcctttgaatggt

SEQ ID NO: 17579 - DNA, 21 bp, Artificial Sequence
  source: /note="Description of Artificial Sequence: Synthetic oligonucleotide"
catgctaatcctgtggttggg

SEQ ID NO: 17580 - DNA, 21 bp, Artificial Sequence
  source: /note="Description of Artificial Sequence: Synthetic oligonucleotide"
catgctaatagtactactagg

SEQ ID NO: 17581 - DNA, 21 bp, Artificial Sequence
  source: /note="Description of Artificial Sequence: Synthetic oligonucleotide"
catgctaatactacgaatact

SEQ ID NO: 17582 - DNA, 21 bp, Artificial Sequence
  source: /note="Description of Artificial Sequence: Synthetic oligonucleotide"
catgctccgcctaattatgcg

SEQ ID NO: 17583 - DNA, 21 bp, Artificial Sequence
  source: /note="Description of Artificial Sequence: Synthetic oligonucleotide"
catgctcagctttctgggacg

SEQ ID NO: 17584 - DNA, 21 bp, Artificial Sequence
  source: /note="Description of Artificial Sequence: Synthetic oligonucleotide"
catgcgcagcagggtgggttg

SEQ ID NO: 17585 - DNA, 21 bp, Artificial Sequence
  source: /note="Description of Artificial Sequence: Synthetic oligonucleotide"
catgctcaggtggagactctg

SEQ ID NO: 17586 - DNA, 21 bp, Artificial Sequence
  source: /note="Description of Artificial Sequence: Synthetic oligonucleotide"
catgcgcgtgatagttcgcct

SEQ ID NO: 17587 - DNA, 21 bp, Artificial Sequence
  source: /note="Description of Artificial Sequence: Synthetic oligonucleotide"
catgctcgggatacttttcct

SEQ ID NO: 17588 - DNA, 21 bp, Artificial Sequence
  source: /note="Description of Artificial Sequence: Synthetic oligonucleotide"
catgcgcgtattgattcgtct

SEQ ID NO: 17589 - DNA, 21 bp, Artificial Sequence
  source: /note="Description of Artificial Sequence: Synthetic oligonucleotide"
catgctcggcctgggggtctg

SEQ ID NO: 17590 - DNA, 21 bp, Artificial Sequence
  source: /note="Description of Artificial Sequence: Synthetic oligonucleotide"
catgctcgggtggaggctact

SEQ ID NO: 17591 - DNA, 21 bp, Artificial Sequence
  source: /note="Description of Artificial Sequence: Synthetic oligonucleotide"
catgcttcgggtcctgatcat

SEQ ID NO: 17592 - DNA, 21 bp, Artificial Sequence
  source: /note="Description of Artificial Sequence: Synthetic oligonucleotide"
catgcttcgctttcgctttct

SEQ ID NO: 17593 - DNA, 21 bp, Artificial Sequence
  source: /note="Description of Artificial Sequence: Synthetic oligonucleotide"
catgcttctaattcgcagcat

SEQ ID NO: 17594 - DNA, 21 bp, Artificial Sequence
  source: /note="Description of Artificial Sequence: Synthetic oligonucleotide"
catgcttcgccgggtcagacg

SEQ ID NO: 17595 - DNA, 21 bp, Artificial Sequence
  source: /note="Description of Artificial Sequence: Synthetic oligonucleotide"
catgctagtcgtattggggtg

SEQ ID NO: 17596 - DNA, 21 bp, Artificial Sequence
  source: /note="Description of Artificial Sequence: Synthetic oligonucleotide"
catgcgtctagtaagcctgat

SEQ ID NO: 17597 - DNA, 21 bp, Artificial Sequence
  source: /note="Description of Artificial Sequence: Synthetic oligonucleotide"
catgcttcttcgacgcgtcag

SEQ ID NO: 17598 - DNA, 21 bp, Artificial Sequence
  source: /note="Description of Artificial Sequence: Synthetic oligonucleotide"
catgcttctacggtgcggact

SEQ ID NO: 17599 - DNA, 21 bp, Artificial Sequence
  source: /note="Description of Artificial Sequence: Synthetic oligonucleotide"
catgctactgatcagccgcat

SEQ ID NO: 17600 - DNA, 21 bp, Artificial Sequence
  source: /note="Description of Artificial Sequence: Synthetic oligonucleotide"
catgcgactgagatggttagg

SEQ ID NO: 17601 - DNA, 21 bp, Artificial Sequence
  source: /note="Description of Artificial Sequence: Synthetic oligonucleotide"
catgcgactattcggacgcat

SEQ ID NO: 17602 - DNA, 21 bp, Artificial Sequence
  source: /note="Description of Artificial Sequence: Synthetic oligonucleotide"
catgctacgtctaagctgacg

SEQ ID NO: 17603 - DNA, 21 bp, Artificial Sequence
  source: /note="Description of Artificial Sequence: Synthetic oligonucleotide"
catgctgttgatcataagtcg

SEQ ID NO: 17604 - DNA, 21 bp, Artificial Sequence
  source: /note="Description of Artificial Sequence: Synthetic oligonucleotide"
catgctgtggagcttgctgat

SEQ ID NO: 17605 - DNA, 21 bp, Artificial Sequence
  source: /note="Description of Artificial Sequence: Synthetic oligonucleotide"
catgcttatactttggatggt

SEQ ID NO: 17606 - DNA, 21 bp, Artificial Sequence
  source: /note="Description of Artificial Sequence: Synthetic oligonucleotide"
catgatgcgagtgtgcatagg

SEQ ID NO: 17607 - DNA, 21 bp, Artificial Sequence
  source: /note="Description of Artificial Sequence: Synthetic oligonucleotide"
catgatgatgcttggacggct

SEQ ID NO: 17608 - DNA, 21 bp, Artificial Sequence
  source: /note="Description of Artificial Sequence: Synthetic oligonucleotide"
catgatggtcgtgtgaatctt

SEQ ID NO: 17609 - DNA, 21 bp, Artificial Sequence
  source: /note="Description of Artificial Sequence: Synthetic oligonucleotide"
catgatgggagtcgttctacg

SEQ ID NO: 17610 - DNA, 21 bp, Artificial Sequence
  source: /note="Description of Artificial Sequence: Synthetic oligonucleotide"
catgatcatctggggacgcct

SEQ ID NO: 17611 - DNA, 21 bp, Artificial Sequence
  source: /note="Description of Artificial Sequence: Synthetic oligonucleotide"
catgatattgcgaagactaat

SEQ ID NO: 17612 - DNA, 21 bp, Artificial Sequence
  source: /note="Description of Artificial Sequence: Synthetic oligonucleotide"
catgatattgagtttaatact

SEQ ID NO: 17613 - DNA, 21 bp, Artificial Sequence
  source: /note="Description of Artificial Sequence: Synthetic oligonucleotide"
catgatctggcttataggcct

SEQ ID NO: 17614 - DNA, 21 bp, Artificial Sequence
  source: /note="Description of Artificial Sequence: Synthetic oligonucleotide"
catgatcttaatcctgagaat

SEQ ID NO: 17615 - DNA, 21 bp, Artificial Sequence
  source: /note="Description of Artificial Sequence: Synthetic oligonucleotide"
catgataatcggattaatgat

SEQ ID NO: 17616 - DNA, 21 bp, Artificial Sequence
  source: /note="Description of Artificial Sequence: Synthetic oligonucleotide"
catgatcctcatgcggttact

SEQ ID NO: 17617 - DNA, 21 bp, Artificial Sequence
  source: /note="Description of Artificial Sequence: Synthetic oligonucleotide"
catgatccgattcgtcttggt

SEQ ID NO: 17618 - DNA, 21 bp, Artificial Sequence
  source: /note="Description of Artificial Sequence: Synthetic oligonucleotide"
catgatccgatgatgttgttg

SEQ ID NO: 17619 - DNA, 21 bp, Artificial Sequence
  source: /note="Description of Artificial Sequence: Synthetic oligonucleotide"
catgatccttcggatggggcg

SEQ ID NO: 17620 - DNA, 21 bp, Artificial Sequence
  source: /note="Description of Artificial Sequence: Synthetic oligonucleotide"
catgatcgtattgctgggctt

SEQ ID NO: 17621 - DNA, 21 bp, Artificial Sequence
  source: /note="Description of Artificial Sequence: Synthetic oligonucleotide"
catgatcgggttagttctggt

SEQ ID NO: 17622 - DNA, 21 bp, Artificial Sequence
  source: /note="Description of Artificial Sequence: Synthetic oligonucleotide"
catgattctgcgaggcatccg

SEQ ID NO: 17623 - DNA, 21 bp, Artificial Sequence
  source: /note="Description of Artificial Sequence: Synthetic oligonucleotide"
catgattcgttgtcggagaag

SEQ ID NO: 17624 - DNA, 21 bp, Artificial Sequence
  source: /note="Description of Artificial Sequence: Synthetic oligonucleotide"
catgattctcggtttgctaat

SEQ ID NO: 17625 - DNA, 21 bp, Artificial Sequence
  source: /note="Description of Artificial Sequence: Synthetic oligonucleotide"
catgattcgactttgggttcg

SEQ ID NO: 17626 - DNA, 21 bp, Artificial Sequence
  source: /note="Description of Artificial Sequence: Synthetic oligonucleotide"
catgatactattcatgggatt

SEQ ID NO: 17627 - DNA, 21 bp, Artificial Sequence
  source: /note="Description of Artificial Sequence: Synthetic oligonucleotide"
catgatgtgccgaagaatccg

SEQ ID NO: 17628 - DNA, 21 bp, Artificial Sequence
  source: /note="Description of Artificial Sequence: Synthetic oligonucleotide"
catgattatccgcgtcagctt

SEQ ID NO: 17629 - DNA, 21 bp, Artificial Sequence
  source: /note="Description of Artificial Sequence: Synthetic oligonucleotide"
catgaggcgcttcttccgaat

SEQ ID NO: 17630 - DNA, 21 bp, Artificial Sequence
  source: /note="Description of Artificial Sequence: Synthetic oligonucleotide"
catgaggcgcttacgggtctg

SEQ ID NO: 17631 - DNA, 21 bp, Artificial Sequence
  source: /note="Description of Artificial Sequence: Synthetic oligonucleotide"
catgaggatggtagtgctatg

SEQ ID NO: 17632 - DNA, 21 bp, Artificial Sequence
  source: /note="Description of Artificial Sequence: Synthetic oligonucleotide"
catgagtttggtgtggcgttt

SEQ ID NO: 17633 - DNA, 21 bp, Artificial Sequence
  source: /note="Description of Artificial Sequence: Synthetic oligonucleotide"
catgagggggggcatccgtat

SEQ ID NO: 17634 - DNA, 21 bp, Artificial Sequence
  source: /note="Description of Artificial Sequence: Synthetic oligonucleotide"
catgagggtcatcgtggggtg

SEQ ID NO: 17635 - DNA, 21 bp, Artificial Sequence
  source: /note="Description of Artificial Sequence: Synthetic oligonucleotide"
catgagaaggtgcgggttcat

SEQ ID NO: 17636 - DNA, 21 bp, Artificial Sequence
  source: /note="Description of Artificial Sequence: Synthetic oligonucleotide"
catgagcaggctcggtctatt

SEQ ID NO: 17637 - DNA, 21 bp, Artificial Sequence
  source: /note="Description of Artificial Sequence: Synthetic oligonucleotide"
catgagcagtgtgaggcttat

SEQ ID NO: 17638 - DNA, 21 bp, Artificial Sequence
  source: /note="Description of Artificial Sequence: Synthetic oligonucleotide"
catgagcaggttgagaggcct

SEQ ID NO: 17639 - DNA, 21 bp, Artificial Sequence
  source: /note="Description of Artificial Sequence: Synthetic oligonucleotide"
catgagtctgatcagtttccg

SEQ ID NO: 17640 - DNA, 21 bp, Artificial Sequence
  source: /note="Description of Artificial Sequence: Synthetic oligonucleotide"
catgagacgagggttatgtcg

SEQ ID NO: 17641 - DNA, 21 bp, Artificial Sequence
  source: /note="Description of Artificial Sequence: Synthetic oligonucleotide"
catgaggttgggtttatgggt

SEQ ID NO: 17642 - DNA, 21 bp, Artificial Sequence
  source: /note="Description of Artificial Sequence: Synthetic oligonucleotide"
catgaggttaatcataatacg

SEQ ID NO: 17643 - DNA, 21 bp, Artificial Sequence
  source: /note="Description of Artificial Sequence: Synthetic oligonucleotide"
catgaggtgaggttttcgcag

SEQ ID NO: 17644 - DNA, 21 bp, Artificial Sequence
  source: /note="Description of Artificial Sequence: Synthetic oligonucleotide"
catgaggtttcggtgaagtgt

SEQ ID NO: 17645 - DNA, 21 bp, Artificial Sequence
  source: /note="Description of Artificial Sequence: Synthetic oligonucleotide"
catgaggtgtatcggaatatg

SEQ ID NO: 17646 - DNA, 21 bp, Artificial Sequence
  source: /note="Description of Artificial Sequence: Synthetic oligonucleotide"
cattttgcgcaggcgccttcg

SEQ ID NO: 17647 - DNA, 21 bp, Artificial Sequence
  source: /note="Description of Artificial Sequence: Synthetic oligonucleotide"
cattttggtagtagtattccg

SEQ ID NO: 17648 - DNA, 21 bp, Artificial Sequence
  source: /note="Description of Artificial Sequence: Synthetic oligonucleotide"
cattttgggactaatggtgat

SEQ ID NO: 17649 - DNA, 21 bp, Artificial Sequence
  source: /note="Description of Artificial Sequence: Synthetic oligonucleotide"
cattttaatgatgctacggtg

SEQ ID NO: 17650 - DNA, 21 bp, Artificial Sequence
  source: /note="Description of Artificial Sequence: Synthetic oligonucleotide"
cattttaatagttcgtctcgt

SEQ ID NO: 17651 - DNA, 21 bp, Artificial Sequence
  source: /note="Description of Artificial Sequence: Synthetic oligonucleotide"
cattttaggggtgcgatgttg

SEQ ID NO: 17652 - DNA, 21 bp, Artificial Sequence
  source: /note="Description of Artificial Sequence: Synthetic oligonucleotide"
catttttctcatgagaggtct

SEQ ID NO: 17653 - DNA, 21 bp, Artificial Sequence
  source: /note="Description of Artificial Sequence: Synthetic oligonucleotide"
catttttcgccgaaggggact

SEQ ID NO: 17654 - DNA, 21 bp, Artificial Sequence
  source: /note="Description of Artificial Sequence: Synthetic oligonucleotide"
catttttcgtcgactacgatt

SEQ ID NO: 17655 - DNA, 21 bp, Artificial Sequence
  source: /note="Description of Artificial Sequence: Synthetic oligonucleotide"
cattttacgtctcgtgagctt

SEQ ID NO: 17656 - DNA, 21 bp, Artificial Sequence
  source: /note="Description of Artificial Sequence: Synthetic oligonucleotide"
cattttacgtctacgccgtct

SEQ ID NO: 17657 - DNA, 21 bp, Artificial Sequence
  source: /note="Description of Artificial Sequence: Synthetic oligonucleotide"
cattttgttccgtcttctgct

SEQ ID NO: 17658 - DNA, 21 bp, Artificial Sequence
  source: /note="Description of Artificial Sequence: Synthetic oligonucleotide"
catggtgctgcggctcttgtt

SEQ ID NO: 17659 - DNA, 21 bp, Artificial Sequence
  source: /note="Description of Artificial Sequence: Synthetic oligonucleotide"
catggtgctaagctgcttagt

SEQ ID NO: 17660 - DNA, 21 bp, Artificial Sequence
  source: /note="Description of Artificial Sequence: Synthetic oligonucleotide"
catggtgctctgtcggaggct

SEQ ID NO: 17661 - DNA, 21 bp, Artificial Sequence
  source: /note="Description of Artificial Sequence: Synthetic oligonucleotide"
catggtgctaatcggctgacg

SEQ ID NO: 17662 - DNA, 21 bp, Artificial Sequence
  source: /note="Description of Artificial Sequence: Synthetic oligonucleotide"
catggtgatgggcattcgact

SEQ ID NO: 17663 - DNA, 21 bp, Artificial Sequence
  source: /note="Description of Artificial Sequence: Synthetic oligonucleotide"
catggggatcgtgctctgatg

SEQ ID NO: 17664 - DNA, 21 bp, Artificial Sequence
  source: /note="Description of Artificial Sequence: Synthetic oligonucleotide"
catggggatgtgaatcggacg

SEQ ID NO: 17665 - DNA, 21 bp, Artificial Sequence
  source: /note="Description of Artificial Sequence: Synthetic oligonucleotide"
catggtgagatgatggagtcg

SEQ ID NO: 17666 - DNA, 21 bp, Artificial Sequence
  source: /note="Description of Artificial Sequence: Synthetic oligonucleotide"
catggttttcatactggtagt

SEQ ID NO: 17667 - DNA, 21 bp, Artificial Sequence
  source: /note="Description of Artificial Sequence: Synthetic oligonucleotide"
catgggtttcagaatgtggat

SEQ ID NO: 17668 - DNA, 21 bp, Artificial Sequence
  source: /note="Description of Artificial Sequence: Synthetic oligonucleotide"
catggtggggaggtgacgttt

SEQ ID NO: 17669 - DNA, 21 bp, Artificial Sequence
  source: /note="Description of Artificial Sequence: Synthetic oligonucleotide"
catggtgggtttcggggtgag

SEQ ID NO: 17670 - DNA, 21 bp, Artificial Sequence
  source: /note="Description of Artificial Sequence: Synthetic oligonucleotide"
catggtcatttttctatggct

SEQ ID NO: 17671 - DNA, 21 bp, Artificial Sequence
  source: /note="Description of Artificial Sequence: Synthetic oligonucleotide"
catgggaagcatgtttttgtt

SEQ ID NO: 17672 - DNA, 21 bp, Artificial Sequence
  source: /note="Description of Artificial Sequence: Synthetic oligonucleotide"
catggtcttattgcggttgcg

SEQ ID NO: 17673 - DNA, 21 bp, Artificial Sequence
  source: /note="Description of Artificial Sequence: Synthetic oligonucleotide"
catggtcttaattcgatgcct

SEQ ID NO: 17674 - DNA, 21 bp, Artificial Sequence
  source: /note="Description of Artificial Sequence: Synthetic oligonucleotide"
catggtctgagtgaggattat

SEQ ID NO: 17675 - DNA, 21 bp, Artificial Sequence
  source: /note="Description of Artificial Sequence: Synthetic oligonucleotide"
catgggttgtcgttgaaggat

SEQ ID NO: 17676 - DNA, 21 bp, Artificial Sequence
  source: /note="Description of Artificial Sequence: Synthetic oligonucleotide"
catggtatggaggatgggctt

SEQ ID NO: 17677 - DNA, 21 bp, Artificial Sequence
  source: /note="Description of Artificial Sequence: Synthetic oligonucleotide"
catgggaatttgaattatcat

SEQ ID NO: 17678 - DNA, 21 bp, Artificial Sequence
  source: /note="Description of Artificial Sequence: Synthetic oligonucleotide"
catggtccgaatgcgtctgat

SEQ ID NO: 17679 - DNA, 21 bp, Artificial Sequence
  source: /note="Description of Artificial Sequence: Synthetic oligonucleotide"
catggtagggaggttcatcag

SEQ ID NO: 17680 - DNA, 21 bp, Artificial Sequence
  source: /note="Description of Artificial Sequence: Synthetic oligonucleotide"
catggtagtggtagttgttgt

SEQ ID NO: 17681 - DNA, 21 bp, Artificial Sequence
  source: /note="Description of Artificial Sequence: Synthetic oligonucleotide"
catggttcgattgagtcgcag

SEQ ID NO: 17682 - DNA, 21 bp, Artificial Sequence
  source: /note="Description of Artificial Sequence: Synthetic oligonucleotide"
catgggtcgaagacgatgtct

SEQ ID NO: 17683 - DNA, 21 bp, Artificial Sequence
  source: /note="Description of Artificial Sequence: Synthetic oligonucleotide"
catggttcgatgtggcctgag

SEQ ID NO: 17684 - DNA, 21 bp, Artificial Sequence
  source: /note="Description of Artificial Sequence: Synthetic oligonucleotide"
catggttctagtactcgtaat

SEQ ID NO: 17685 - DNA, 21 bp, Artificial Sequence
  source: /note="Description of Artificial Sequence: Synthetic oligonucleotide"
catggtagtacggagaattct

SEQ ID NO: 17686 - DNA, 21 bp, Artificial Sequence
  source: /note="Description of Artificial Sequence: Synthetic oligonucleotide"
catgggagtactaagttgccg

SEQ ID NO: 17687 - DNA, 21 bp, Artificial Sequence
  source: /note="Description of Artificial Sequence: Synthetic oligonucleotide"
catggtacgggggtttttggt

SEQ ID NO: 17688 - DNA, 21 bp, Artificial Sequence
  source: /note="Description of Artificial Sequence: Synthetic oligonucleotide"
catggtacgaatcggacgcat

SEQ ID NO: 17689 - DNA, 21 bp, Artificial Sequence
  source: /note="Description of Artificial Sequence: Synthetic oligonucleotide"
catggtacgtcgaagcatagt

SEQ ID NO: 17690 - DNA, 21 bp, Artificial Sequence
  source: /note="Description of Artificial Sequence: Synthetic oligonucleotide"
catggtacttcgtcgcggcct

SEQ ID NO: 17691 - DNA, 21 bp, Artificial Sequence
  source: /note="Description of Artificial Sequence: Synthetic oligonucleotide"
catggtgtgcatcatcaggtt

SEQ ID NO: 17692 - DNA, 21 bp, Artificial Sequence
  source: /note="Description of Artificial Sequence: Synthetic oligonucleotide"
catggggtttatcctcatctt

SEQ ID NO: 17693 - DNA, 21 bp, Artificial Sequence
  source: /note="Description of Artificial Sequence: Synthetic oligonucleotide"
catcatgcggctggtgctgtt

SEQ ID NO: 17694 - DNA, 21 bp, Artificial Sequence
  source: /note="Description of Artificial Sequence: Synthetic oligonucleotide"
catcatgctaaggctaatctt

SEQ ID NO: 17695 - DNA, 21 bp, Artificial Sequence
  source: /note="Description of Artificial Sequence: Synthetic oligonucleotide"
catcatgctcttccgcctgat

SEQ ID NO: 17696 - DNA, 21 bp, Artificial Sequence
  source: /note="Description of Artificial Sequence: Synthetic oligonucleotide"
catcatgcgcctaatactccg

SEQ ID NO: 17697 - DNA, 21 bp, Artificial Sequence
  source: /note="Description of Artificial Sequence: Synthetic oligonucleotide"
catcatgctcagggggaggct

SEQ ID NO: 17698 - DNA, 21 bp, Artificial Sequence
  source: /note="Description of Artificial Sequence: Synthetic oligonucleotide"
catcatgatgatcgtttgcag

SEQ ID NO: 17699 - DNA, 21 bp, Artificial Sequence
  source: /note="Description of Artificial Sequence: Synthetic oligonucleotide"
catcatgatctgtctattcct

SEQ ID NO: 17700 - DNA, 21 bp, Artificial Sequence
  source: /note="Description of Artificial Sequence: Synthetic oligonucleotide"
catcatgatccgacgactcgt

SEQ ID NO: 17701 - DNA, 21 bp, Artificial Sequence
  source: /note="Description of Artificial Sequence: Synthetic oligonucleotide"
catcatggtactgatcgtccg

SEQ ID NO: 17702 - DNA, 21 bp, Artificial Sequence
  source: /note="Description of Artificial Sequence: Synthetic oligonucleotide"
catcatctggcgtttttggat

SEQ ID NO: 17703 - DNA, 21 bp, Artificial Sequence
  source: /note="Description of Artificial Sequence: Synthetic oligonucleotide"
catcatatgtcgacggcttct

SEQ ID NO: 17704 - DNA, 21 bp, Artificial Sequence
  source: /note="Description of Artificial Sequence: Synthetic oligonucleotide"
catcataatgttaatagtctt

SEQ ID NO: 17705 - DNA, 21 bp, Artificial Sequence
  source: /note="Description of Artificial Sequence: Synthetic oligonucleotide"
catcatcctaggctggatact

SEQ ID NO: 17706 - DNA, 21 bp, Artificial Sequence
  source: /note="Description of Artificial Sequence: Synthetic oligonucleotide"
catcatagggttgagactggt

SEQ ID NO: 17707 - DNA, 21 bp, Artificial Sequence
  source: /note="Description of Artificial Sequence: Synthetic oligonucleotide"
catcatagtcctgctattacg

SEQ ID NO: 17708 - DNA, 21 bp, Artificial Sequence
  source: /note="Description of Artificial Sequence: Synthetic oligonucleotide"
catcatacgaatcctgatccg

SEQ ID NO: 17709 - DNA, 21 bp, Artificial Sequence
  source: /note="Description of Artificial Sequence: Synthetic oligonucleotide"
catattgcgcttacgagtcct

SEQ ID NO: 17710 - DNA, 21 bp, Artificial Sequence
  source: /note="Description of Artificial Sequence: Synthetic oligonucleotide"
catattctgacttctgcgccg

SEQ ID NO: 17711 - DNA, 21 bp, Artificial Sequence
  source: /note="Description of Artificial Sequence: Synthetic oligonucleotide"
catattcctttgaagcaggct

SEQ ID NO: 17712 - DNA, 21 bp, Artificial Sequence
  source: /note="Description of Artificial Sequence: Synthetic oligonucleotide"
catattccgagtagttctggg

SEQ ID NO: 17713 - DNA, 21 bp, Artificial Sequence
  source: /note="Description of Artificial Sequence: Synthetic oligonucleotide"
catattcctgtgatgactcct

SEQ ID NO: 17714 - DNA, 21 bp, Artificial Sequence
  source: /note="Description of Artificial Sequence: Synthetic oligonucleotide"
catattaggcatgatccgaag

SEQ ID NO: 17715 - DNA, 21 bp, Artificial Sequence
  source: /note="Description of Artificial Sequence: Synthetic oligonucleotide"
catattcggacgggtatgcct

SEQ ID NO: 17716 - DNA, 21 bp, Artificial Sequence
  source: /note="Description of Artificial Sequence: Synthetic oligonucleotide"
catatttctccgatgccggtg

SEQ ID NO: 17717 - DNA, 21 bp, Artificial Sequence
  source: /note="Description of Artificial Sequence: Synthetic oligonucleotide"
catatttcgagtagtactgtg

SEQ ID NO: 17718 - DNA, 21 bp, Artificial Sequence
  source: /note="Description of Artificial Sequence: Synthetic oligonucleotide"
catattactcagcagcttact

SEQ ID NO: 17719 - DNA, 21 bp, Artificial Sequence
  source: /note="Description of Artificial Sequence: Synthetic oligonucleotide"
cataaggcggattctgtttct

SEQ ID NO: 17720 - DNA, 21 bp, Artificial Sequence
  source: /note="Description of Artificial Sequence: Synthetic oligonucleotide"
cataagttttctagtccgctg

SEQ ID NO: 17721 - DNA, 21 bp, Artificial Sequence
  source: /note="Description of Artificial Sequence: Synthetic oligonucleotide"
cataaggggctttcgcctctt

SEQ ID NO: 17722 - DNA, 21 bp, Artificial Sequence
  source: /note="Description of Artificial Sequence: Synthetic oligonucleotide"
cataagctgggtgggtctttt

SEQ ID NO: 17723 - DNA, 21 bp, Artificial Sequence
  source: /note="Description of Artificial Sequence: Synthetic oligonucleotide"
cataagctgcctggtcatcat

SEQ ID NO: 17724 - DNA, 21 bp, Artificial Sequence
  source: /note="Description of Artificial Sequence: Synthetic oligonucleotide"
cataagctgacttcgaatggt

SEQ ID NO: 17725 - DNA, 21 bp, Artificial Sequence
  source: /note="Description of Artificial Sequence: Synthetic oligonucleotide"
cataagaatattggggtggtg

SEQ ID NO: 17726 - DNA, 21 bp, Artificial Sequence
  source: /note="Description of Artificial Sequence: Synthetic oligonucleotide"
cataagcctccgattgttcct

SEQ ID NO: 17727 - DNA, 21 bp, Artificial Sequence
  source: /note="Description of Artificial Sequence: Synthetic oligonucleotide"
cataagccgcaggttggtgtg

SEQ ID NO: 17728 - DNA, 21 bp, Artificial Sequence
  source: /note="Description of Artificial Sequence: Synthetic oligonucleotide"
cataagccgcgtccggaggtg

SEQ ID NO: 17729 - DNA, 21 bp, Artificial Sequence
  source: /note="Description of Artificial Sequence: Synthetic oligonucleotide"
cataagcagtctcaggctggg

SEQ ID NO: 17730 - DNA, 21 bp, Artificial Sequence
  source: /note="Description of Artificial Sequence: Synthetic oligonucleotide"
cataagcagacgatggagcgg

SEQ ID NO: 17731 - DNA, 21 bp, Artificial Sequence
  source: /note="Description of Artificial Sequence: Synthetic oligonucleotide"
cataagtcttcggataggctg

SEQ ID NO: 17732 - DNA, 21 bp, Artificial Sequence
  source: /note="Description of Artificial Sequence: Synthetic oligonucleotide"
cataagagtgtgctggttcct

SEQ ID NO: 17733 - DNA, 21 bp, Artificial Sequence
  source: /note="Description of Artificial Sequence: Synthetic oligonucleotide"
cataagacttcggtgccgatt

SEQ ID NO: 17734 - DNA, 21 bp, Artificial Sequence
  source: /note="Description of Artificial Sequence: Synthetic oligonucleotide"
cataaggttcctgcgcagaat

SEQ ID NO: 17735 - DNA, 21 bp, Artificial Sequence
  source: /note="Description of Artificial Sequence: Synthetic oligonucleotide"
cataaggtgcctggtctgggt

SEQ ID NO: 17736 - DNA, 21 bp, Artificial Sequence
  source: /note="Description of Artificial Sequence: Synthetic oligonucleotide"
cataagtataatctgggtgct

SEQ ID NO: 17737 - DNA, 21 bp, Artificial Sequence
  source: /note="Description of Artificial Sequence: Synthetic oligonucleotide"
catcttgcggcgctttctcat

SEQ ID NO: 17738 - DNA, 21 bp, Artificial Sequence
  source: /note="Description of Artificial Sequence: Synthetic oligonucleotide"
catttggctgaggttagggag

SEQ ID NO: 17739 - DNA, 21 bp, Artificial Sequence
  source: /note="Description of Artificial Sequence: Synthetic oligonucleotide"
catttggctggtactggtgct

SEQ ID NO: 17740 - DNA, 21 bp, Artificial Sequence
  source: /note="Description of Artificial Sequence: Synthetic oligonucleotide"
catttggctctggctccgtct

SEQ ID NO: 17741 - DNA, 21 bp, Artificial Sequence
  source: /note="Description of Artificial Sequence: Synthetic oligonucleotide"
catctggcgccggctattaat

SEQ ID NO: 17742 - DNA, 21 bp, Artificial Sequence
  source: /note="Description of Artificial Sequence: Synthetic oligonucleotide"
catttggagcttggtactcgg

SEQ ID NO: 17743 - DNA, 21 bp, Artificial Sequence
  source: /note="Description of Artificial Sequence: Synthetic oligonucleotide"
catctggagcggcctttgtcg

SEQ ID NO: 17744 - DNA, 21 bp, Artificial Sequence
  source: /note="Description of Artificial Sequence: Synthetic oligonucleotide"
catttggggccggatgctatt

SEQ ID NO: 17745 - DNA, 21 bp, Artificial Sequence
  source: /note="Description of Artificial Sequence: Synthetic oligonucleotide"
catcttggtagttcgaattgg

SEQ ID NO: 17746 - DNA, 21 bp, Artificial Sequence
  source: /note="Description of Artificial Sequence: Synthetic oligonucleotide"
catttgcattcggattctggg

SEQ ID NO: 17747 - DNA, 21 bp, Artificial Sequence
  source: /note="Description of Artificial Sequence: Synthetic oligonucleotide"
catttgcattcgcatgagagt

SEQ ID NO: 17748 - DNA, 21 bp, Artificial Sequence
  source: /note="Description of Artificial Sequence: Synthetic oligonucleotide"
catcttcattatccggtggcg

SEQ ID NO: 17749 - DNA, 21 bp, Artificial Sequence
  source: /note="Description of Artificial Sequence: Synthetic oligonucleotide"
catctgaatgcgaagtttgct

SEQ ID NO: 17750 - DNA, 21 bp, Artificial Sequence
  source: /note="Description of Artificial Sequence: Synthetic oligonucleotide"
catcttaatgctcctgcgacg

SEQ ID NO: 17751 - DNA, 21 bp, Artificial Sequence
  source: /note="Description of Artificial Sequence: Synthetic oligonucleotide"
catctgaatcttgaggggcgt

SEQ ID NO: 17752 - DNA, 21 bp, Artificial Sequence
  source: /note="Description of Artificial Sequence: Synthetic oligonucleotide"
catttgcctgcgcatccgctg

SEQ ID NO: 17753 - DNA, 21 bp, Artificial Sequence
  source: /note="Description of Artificial Sequence: Synthetic oligonucleotide"
catctgccgaagaatccttcg

SEQ ID NO: 17754 - DNA, 21 bp, Artificial Sequence
  source: /note="Description of Artificial Sequence: Synthetic oligonucleotide"
catttgcctagtggtcttact

SEQ ID NO: 17755 - DNA, 21 bp, Artificial Sequence
  source: /note="Description of Artificial Sequence: Synthetic oligonucleotide"
catttgcctactagtgatgcg

SEQ ID NO: 17756 - DNA, 21 bp, Artificial Sequence
  source: /note="Description of Artificial Sequence: Synthetic oligonucleotide"
catttgccgtataatgtgcct

SEQ ID NO: 17757 - DNA, 21 bp, Artificial Sequence
  source: /note="Description of Artificial Sequence: Synthetic oligonucleotide"
catcttcagattcttgaggcg

SEQ ID NO: 17758 - DNA, 21 bp, Artificial Sequence
  source: /note="Description of Artificial Sequence: Synthetic oligonucleotide"
catctgagggagctgatttcg

SEQ ID NO: 17759 - DNA, 21 bp, Artificial Sequence
  source: /note="Description of Artificial Sequence: Synthetic oligonucleotide"
catcttaggtctggtgttggt

SEQ ID NO: 17760 - DNA, 21 bp, Artificial Sequence
  source: /note="Description of Artificial Sequence: Synthetic oligonucleotide"
catttgtctgattggccgatt

SEQ ID NO: 17761 - DNA, 21 bp, Artificial Sequence
  source: /note="Description of Artificial Sequence: Synthetic oligonucleotide"
catctgtctggtatgcatgct

SEQ ID NO: 17762 - DNA, 21 bp, Artificial Sequence
  source: /note="Description of Artificial Sequence: Synthetic oligonucleotide"
catctgtctattgctgcttct

SEQ ID NO: 17763 - DNA, 21 bp, Artificial Sequence
  source: /note="Description of Artificial Sequence: Synthetic oligonucleotide"
catctgtcgccttttactgat

SEQ ID NO: 17764 - DNA, 21 bp, Artificial Sequence
  source: /note="Description of Artificial Sequence: Synthetic oligonucleotide"
catctgagtcctttggttcgt

SEQ ID NO: 17765 - DNA, 21 bp, Artificial Sequence
  source: /note="Description of Artificial Sequence: Synthetic oligonucleotide"
catttgtctcctcgtcctcct

SEQ ID NO: 17766 - DNA, 21 bp, Artificial Sequence
  source: /note="Description of Artificial Sequence: Synthetic oligonucleotide"
catctttctgtgcgtttgagt

SEQ ID NO: 17767 - DNA, 21 bp, Artificial Sequence
  source: /note="Description of Artificial Sequence: Synthetic oligonucleotide"
catctttctgtttctgggtct

SEQ ID NO: 17768 - DNA, 21 bp, Artificial Sequence
  source: /note="Description of Artificial Sequence: Synthetic oligonucleotide"
catttgactgctttgactggt

SEQ ID NO: 17769 - DNA, 21 bp, Artificial Sequence
  source: /note="Description of Artificial Sequence: Synthetic oligonucleotide"
catttgacggatacgcgtcgg

SEQ ID NO: 17770 - DNA, 21 bp, Artificial Sequence
  source: /note="Description of Artificial Sequence: Synthetic oligonucleotide"
catcttacgtctggtgctgct

SEQ ID NO: 17771 - DNA, 21 bp, Artificial Sequence
  source: /note="Description of Artificial Sequence: Synthetic oligonucleotide"
catttgacgtcgaattcgctt

SEQ ID NO: 17772 - DNA, 21 bp, Artificial Sequence
  source: /note="Description of Artificial Sequence: Synthetic oligonucleotide"
catctgacgtcgcgggcgggt

SEQ ID NO: 17773 - DNA, 21 bp, Artificial Sequence
  source: /note="Description of Artificial Sequence: Synthetic oligonucleotide"
catcttgttaggggtgagccg

SEQ ID NO: 17774 - DNA, 21 bp, Artificial Sequence
  source: /note="Description of Artificial Sequence: Synthetic oligonucleotide"
catcttgttagtaatcggtcg

SEQ ID NO: 17775 - DNA, 21 bp, Artificial Sequence
  source: /note="Description of Artificial Sequence: Synthetic oligonucleotide"
catttggtgtctacgacttcg

SEQ ID NO: 17776 - DNA, 21 bp, Artificial Sequence
  source: /note="Description of Artificial Sequence: Synthetic oligonucleotide"
catctggtgtctacggtggct

SEQ ID NO: 17777 - DNA, 21 bp, Artificial Sequence
  source: /note="Description of Artificial Sequence: Synthetic oligonucleotide"
catatggctgggggtgattat

SEQ ID NO: 17778 - DNA, 21 bp, Artificial Sequence
  source: /note="Description of Artificial Sequence: Synthetic oligonucleotide"
catatggattcgacgatttcg

SEQ ID NO: 17779 - DNA, 21 bp, Artificial Sequence
  source: /note="Description of Artificial Sequence: Synthetic oligonucleotide"
catatgggtgatatgaatcgt

SEQ ID NO: 17780 - DNA, 21 bp, Artificial Sequence
  source: /note="Description of Artificial Sequence: Synthetic oligonucleotide"
catatgattattgtggatagt

SEQ ID NO: 17781 - DNA, 21 bp, Artificial Sequence
  source: /note="Description of Artificial Sequence: Synthetic oligonucleotide"
catatgaagccgcagtcggat

SEQ ID NO: 17782 - DNA, 21 bp, Artificial Sequence
  source: /note="Description of Artificial Sequence: Synthetic oligonucleotide"
catatgttgacgcatactcat

SEQ ID NO: 17783 - DNA, 21 bp, Artificial Sequence
  source: /note="Description of Artificial Sequence: Synthetic oligonucleotide"
catatgatgaagttggggagt

SEQ ID NO: 17784 - DNA, 21 bp, Artificial Sequence
  source: /note="Description of Artificial Sequence: Synthetic oligonucleotide"
catatgatgtcgcatggtccg

SEQ ID NO: 17785 - DNA, 21 bp, Artificial Sequence
  source: /note="Description of Artificial Sequence: Synthetic oligonucleotide"
catatgaatgctgatcataag

SEQ ID NO: 17786 - DNA, 21 bp, Artificial Sequence
  source: /note="Description of Artificial Sequence: Synthetic oligonucleotide"
catatgaatcttaaggatgcg

SEQ ID NO: 17787 - DNA, 21 bp, Artificial Sequence
  source: /note="Description of Artificial Sequence: Synthetic oligonucleotide"
catatgcctgatgatccgagt

SEQ ID NO: 17788 - DNA, 21 bp, Artificial Sequence
  source: /note="Description of Artificial Sequence: Synthetic oligonucleotide"
catatgcctaatatgtattcg

SEQ ID NO: 17789 - DNA, 21 bp, Artificial Sequence
  source: /note="Description of Artificial Sequence: Synthetic oligonucleotide"
catatgtctaatcctagtttt

SEQ ID NO: 17790 - DNA, 21 bp, Artificial Sequence
  source: /note="Description of Artificial Sequence: Synthetic oligonucleotide"
catatgagtgtgctgcagaag

SEQ ID NO: 17791 - DNA, 21 bp, Artificial Sequence
  source: /note="Description of Artificial Sequence: Synthetic oligonucleotide"
catatgtctgttcgtgatcct

SEQ ID NO: 17792 - DNA, 21 bp, Artificial Sequence
  source: /note="Description of Artificial Sequence: Synthetic oligonucleotide"
catatgactggtactaatctt

SEQ ID NO: 17793 - DNA, 21 bp, Artificial Sequence
  source: /note="Description of Artificial Sequence: Synthetic oligonucleotide"
catatggttgctaatcctgct

SEQ ID NO: 17794 - DNA, 21 bp, Artificial Sequence
  source: /note="Description of Artificial Sequence: Synthetic oligonucleotide"
cataatgcggctcagaatcag

SEQ ID NO: 17795 - DNA, 21 bp, Artificial Sequence
  source: /note="Description of Artificial Sequence: Synthetic oligonucleotide"
cataatgctggttatatgccg

SEQ ID NO: 17796 - DNA, 21 bp, Artificial Sequence
  source: /note="Description of Artificial Sequence: Synthetic oligonucleotide"
cataatgcttcggctgtgaat

SEQ ID NO: 17797 - DNA, 21 bp, Artificial Sequence
  source: /note="Description of Artificial Sequence: Synthetic oligonucleotide"
cataatgagttgccgcctccg

SEQ ID NO: 17798 - DNA, 21 bp, Artificial Sequence
  source: /note="Description of Artificial Sequence: Synthetic oligonucleotide"
cataatgagcctgataagggt

SEQ ID NO: 17799 - DNA, 21 bp, Artificial Sequence
  source: /note="Description of Artificial Sequence: Synthetic oligonucleotide"
cataatcatgatacggtgctt

SEQ ID NO: 17800 - DNA, 21 bp, Artificial Sequence
  source: /note="Description of Artificial Sequence: Synthetic oligonucleotide"
cataatcatattgtgcatgcg

SEQ ID NO: 17801 - DNA, 21 bp, Artificial Sequence
  source: /note="Description of Artificial Sequence: Synthetic oligonucleotide"
cataataagtcgtcttatgtt

SEQ ID NO: 17802 - DNA, 21 bp, Artificial Sequence
  source: /note="Description of Artificial Sequence: Synthetic oligonucleotide"
cataatatgcggattccttct

SEQ ID NO: 17803 - DNA, 21 bp, Artificial Sequence
  source: /note="Description of Artificial Sequence: Synthetic oligonucleotide"
cataataatactgtgaatcag

SEQ ID NO: 17804 - DNA, 21 bp, Artificial Sequence
  source: /note="Description of Artificial Sequence: Synthetic oligonucleotide"
cataatccgcctaagctgact

SEQ ID NO: 17805 - DNA, 21 bp, Artificial Sequence
  source: /note="Description of Artificial Sequence: Synthetic oligonucleotide"
cataatcctcgggagttgggg

SEQ ID NO: 17806 - DNA, 21 bp, Artificial Sequence
  source: /note="Description of Artificial Sequence: Synthetic oligonucleotide"
cataatccgtctcttcgtact

SEQ ID NO: 17807 - DNA, 21 bp, Artificial Sequence
  source: /note="Description of Artificial Sequence: Synthetic oligonucleotide"
cataatcagactctggggtct

SEQ ID NO: 17808 - DNA, 21 bp, Artificial Sequence
  source: /note="Description of Artificial Sequence: Synthetic oligonucleotide"
cataataggaatgatggtttt

SEQ ID NO: 17809 - DNA, 21 bp, Artificial Sequence
  source: /note="Description of Artificial Sequence: Synthetic oligonucleotide"
cataatagtcatcattatgct

SEQ ID NO: 17810 - DNA, 21 bp, Artificial Sequence
  source: /note="Description of Artificial Sequence: Synthetic oligonucleotide"
cataattctcatagtatgagg

SEQ ID NO: 17811 - DNA, 21 bp, Artificial Sequence
  source: /note="Description of Artificial Sequence: Synthetic oligonucleotide"
cataattcgcctggtgttggg

SEQ ID NO: 17812 - DNA, 21 bp, Artificial Sequence
  source: /note="Description of Artificial Sequence: Synthetic oligonucleotide"
cataattcgtcttttgatatg

SEQ ID NO: 17813 - DNA, 21 bp, Artificial Sequence
  source: /note="Description of Artificial Sequence: Synthetic oligonucleotide"
catcctgctattctgcagctg

SEQ ID NO: 17814 - DNA, 21 bp, Artificial Sequence
  source: /note="Description of Artificial Sequence: Synthetic oligonucleotide"
catcctgcgacgaagcttggg

SEQ ID NO: 17815 - DNA, 21 bp, Artificial Sequence
  source: /note="Description of Artificial Sequence: Synthetic oligonucleotide"
catcctgatccgcattctacg

SEQ ID NO: 17816 - DNA, 21 bp, Artificial Sequence
  source: /note="Description of Artificial Sequence: Synthetic oligonucleotide"
catccggagaagcggaatccg

SEQ ID NO: 17817 - DNA, 21 bp, Artificial Sequence
  source: /note="Description of Artificial Sequence: Synthetic oligonucleotide"
catcctgagctgccgctgcat

SEQ ID NO: 17818 - DNA, 21 bp, Artificial Sequence
  source: /note="Description of Artificial Sequence: Synthetic oligonucleotide"
catcctgagatgcttgttacg

SEQ ID NO: 17819 - DNA, 21 bp, Artificial Sequence
  source: /note="Description of Artificial Sequence: Synthetic oligonucleotide"
catccgtttggtacggcgtct

SEQ ID NO: 17820 - DNA, 21 bp, Artificial Sequence
  source: /note="Description of Artificial Sequence: Synthetic oligonucleotide"
catccggggtttaatcatgat

SEQ ID NO: 17821 - DNA, 21 bp, Artificial Sequence
  source: /note="Description of Artificial Sequence: Synthetic oligonucleotide"
catccggggccgttggtggct

SEQ ID NO: 17822 - DNA, 21 bp, Artificial Sequence
  source: /note="Description of Artificial Sequence: Synthetic oligonucleotide"
catcctggtcagagtccggtt

SEQ ID NO: 17823 - DNA, 21 bp, Artificial Sequence
  source: /note="Description of Artificial Sequence: Synthetic oligonucleotide"
catcctggttatagttctaat

SEQ ID NO: 17824 - DNA, 21 bp, Artificial Sequence
  source: /note="Description of Artificial Sequence: Synthetic oligonucleotide"
catccgattattcctatttcg

SEQ ID NO: 17825 - DNA, 21 bp, Artificial Sequence
  source: /note="Description of Artificial Sequence: Synthetic oligonucleotide"
catccgattaatactaggtct

SEQ ID NO: 17826 - DNA, 21 bp, Artificial Sequence
  source: /note="Description of Artificial Sequence: Synthetic oligonucleotide"
catcctattccgtttcctggt

SEQ ID NO: 17827 - DNA, 21 bp, Artificial Sequence
  source: /note="Description of Artificial Sequence: Synthetic oligonucleotide"
catcctaagggggagccgccg

SEQ ID NO: 17828 - DNA, 21 bp, Artificial Sequence
  source: /note="Description of Artificial Sequence: Synthetic oligonucleotide"
catcctaagttggtttcggtt

SEQ ID NO: 17829 - DNA, 21 bp, Artificial Sequence
  source: /note="Description of Artificial Sequence: Synthetic oligonucleotide"
catcctttggaggatcagctt

SEQ ID NO: 17830 - DNA, 21 bp, Artificial Sequence
  source: /note="Description of Artificial Sequence: Synthetic oligonucleotide"
catcctcttaatgcgcggccg

SEQ ID NO: 17831 - DNA, 21 bp, Artificial Sequence
  source: /note="Description of Artificial Sequence: Synthetic oligonucleotide"
catcctatgacgtcgaattct

SEQ ID NO: 17832 - DNA, 21 bp, Artificial Sequence
  source: /note="Description of Artificial Sequence: Synthetic oligonucleotide"
catcctcctaagtatgtgacg

SEQ ID NO: 17833 - DNA, 21 bp, Artificial Sequence
  source: /note="Description of Artificial Sequence: Synthetic oligonucleotide"
catcctcctccgtctcatatg

SEQ ID NO: 17834 - DNA, 21 bp, Artificial Sequence
  source: /note="Description of Artificial Sequence: Synthetic oligonucleotide"
catccgccgcctactgattct

SEQ ID NO: 17835 - DNA, 21 bp, Artificial Sequence
  source: /note="Description of Artificial Sequence: Synthetic oligonucleotide"
catcctccgaggactcctgcg

SEQ ID NO: 17836 - DNA, 21 bp, Artificial Sequence
  source: /note="Description of Artificial Sequence: Synthetic oligonucleotide"
catcctcagcggcaggcttct

SEQ ID NO: 17837 - DNA, 21 bp, Artificial Sequence
  source: /note="Description of Artificial Sequence: Synthetic oligonucleotide"
catcctcagtcgagtcattgg

SEQ ID NO: 17838 - DNA, 21 bp, Artificial Sequence
  source: /note="Description of Artificial Sequence: Synthetic oligonucleotide"
catccgtctttttcgcctctt

SEQ ID NO: 17839 - DNA, 21 bp, Artificial Sequence
  source: /note="Description of Artificial Sequence: Synthetic oligonucleotide"
catcctagtggttattctaat

SEQ ID NO: 17840 - DNA, 21 bp, Artificial Sequence
  source: /note="Description of Artificial Sequence: Synthetic oligonucleotide"
catccgagtattgctgggatg

SEQ ID NO: 17841 - DNA, 21 bp, Artificial Sequence
  source: /note="Description of Artificial Sequence: Synthetic oligonucleotide"
catccttctattgtgcgtgat

SEQ ID NO: 17842 - DNA, 21 bp, Artificial Sequence
  source: /note="Description of Artificial Sequence: Synthetic oligonucleotide"
catccgagtcttgcgattggt

SEQ ID NO: 17843 - DNA, 21 bp, Artificial Sequence
  source: /note="Description of Artificial Sequence: Synthetic oligonucleotide"
catccttctcgggtgattatg

SEQ ID NO: 17844 - DNA, 21 bp, Artificial Sequence
  source: /note="Description of Artificial Sequence: Synthetic oligonucleotide"
catccttcttctcagttgcat

SEQ ID NO: 17845 - DNA, 21 bp, Artificial Sequence
  source: /note="Description of Artificial Sequence: Synthetic oligonucleotide"
catccgtcgtattcgtcgggg

SEQ ID NO: 17846 - DNA, 21 bp, Artificial Sequence
  source: /note="Description of Artificial Sequence: Synthetic oligonucleotide"
catcctacggctaagctgccg

SEQ ID NO: 17847 - DNA, 21 bp, Artificial Sequence
  source: /note="Description of Artificial Sequence: Synthetic oligonucleotide"
catcctactgagactactgag

SEQ ID NO: 17848 - DNA, 21 bp, Artificial Sequence
  source: /note="Description of Artificial Sequence: Synthetic oligonucleotide"
catccgacgggtacgaaggat

SEQ ID NO: 17849 - DNA, 21 bp, Artificial Sequence
  source: /note="Description of Artificial Sequence: Synthetic oligonucleotide"
catcctacgctgtctcattat

SEQ ID NO: 17850 - DNA, 21 bp, Artificial Sequence
  source: /note="Description of Artificial Sequence: Synthetic oligonucleotide"
catccgacgaataatagtaat

SEQ ID NO: 17851 - DNA, 21 bp, Artificial Sequence
  source: /note="Description of Artificial Sequence: Synthetic oligonucleotide"
catccgacgtcgattattctg

SEQ ID NO: 17852 - DNA, 21 bp, Artificial Sequence
  source: /note="Description of Artificial Sequence: Synthetic oligonucleotide"
catcctactactcggtttggt

SEQ ID NO: 17853 - DNA, 21 bp, Artificial Sequence
  source: /note="Description of Artificial Sequence: Synthetic oligonucleotide"
catcctgtttcgagtcggcag

SEQ ID NO: 17854 - DNA, 21 bp, Artificial Sequence
  source: /note="Description of Artificial Sequence: Synthetic oligonucleotide"
catccgtatcagaattcgctg

SEQ ID NO: 17855 - DNA, 21 bp, Artificial Sequence
  source: /note="Description of Artificial Sequence: Synthetic oligonucleotide"
catcaggcggaggcttattcg

SEQ ID NO: 17856 - DNA, 21 bp, Artificial Sequence
  source: /note="Description of Artificial Sequence: Synthetic oligonucleotide"
catcaggctcctggtcttcag

SEQ ID NO: 17857 - DNA, 21 bp, Artificial Sequence
  source: /note="Description of Artificial Sequence: Synthetic oligonucleotide"
catcaggatattgctcatttg

SEQ ID NO: 17858 - DNA, 21 bp, Artificial Sequence
  source: /note="Description of Artificial Sequence: Synthetic oligonucleotide"
catcagtttaatagggagcct

SEQ ID NO: 17859 - DNA, 21 bp, Artificial Sequence
  source: /note="Description of Artificial Sequence: Synthetic oligonucleotide"
catcagggtgatcagaatatt

SEQ ID NO: 17860 - DNA, 21 bp, Artificial Sequence
  source: /note="Description of Artificial Sequence: Synthetic oligonucleotide"
catcagggtcatcctcgtgat

SEQ ID NO: 17861 - DNA, 21 bp, Artificial Sequence
  source: /note="Description of Artificial Sequence: Synthetic oligonucleotide"
catcaggggtctcctacgttt

SEQ ID NO: 17862 - DNA, 21 bp, Artificial Sequence
  source: /note="Description of Artificial Sequence: Synthetic oligonucleotide"
catcagttgggttcgcagatg

SEQ ID NO: 17863 - DNA, 21 bp, Artificial Sequence
  source: /note="Description of Artificial Sequence: Synthetic oligonucleotide"
catcagccgcatattgtgcag

SEQ ID NO: 17864 - DNA, 21 bp, Artificial Sequence
  source: /note="Description of Artificial Sequence: Synthetic oligonucleotide"
catcagccgcattcttcgttg

SEQ ID NO: 17865 - DNA, 21 bp, Artificial Sequence
  source: /note="Description of Artificial Sequence: Synthetic oligonucleotide"
catcagcagtcgacgaataat

SEQ ID NO: 17866 - DNA, 21 bp, Artificial Sequence
  source: /note="Description of Artificial Sequence: Synthetic oligonucleotide"
catcagaggactgttggtgtg

SEQ ID NO: 17867 - DNA, 21 bp, Artificial Sequence
  source: /note="Description of Artificial Sequence: Synthetic oligonucleotide"
catcagagtccttcggatagg

SEQ ID NO: 17868 - DNA, 21 bp, Artificial Sequence
  source: /note="Description of Artificial Sequence: Synthetic oligonucleotide"
catcagactgcttctgttttg

SEQ ID NO: 17869 - DNA, 21 bp, Artificial Sequence
  source: /note="Description of Artificial Sequence: Synthetic oligonucleotide"
catcagacggtgggtcagaat

SEQ ID NO: 17870 - DNA, 21 bp, Artificial Sequence
  source: /note="Description of Artificial Sequence: Synthetic oligonucleotide"
catcgggctagttatgtggat

SEQ ID NO: 17871 - DNA, 21 bp, Artificial Sequence
  source: /note="Description of Artificial Sequence: Synthetic oligonucleotide"
catagggatgctttgcagcag

SEQ ID NO: 17872 - DNA, 21 bp, Artificial Sequence
  source: /note="Description of Artificial Sequence: Synthetic oligonucleotide"
catagggatatttcgacgggt

SEQ ID NO: 17873 - DNA, 21 bp, Artificial Sequence
  source: /note="Description of Artificial Sequence: Synthetic oligonucleotide"
catcgggaggagaaggcttcg

SEQ ID NO: 17874 - DNA, 21 bp, Artificial Sequence
  source: /note="Description of Artificial Sequence: Synthetic oligonucleotide"
catcgtgagggtttggagcat

SEQ ID NO: 17875 - DNA, 21 bp, Artificial Sequence
  source: /note="Description of Artificial Sequence: Synthetic oligonucleotide"
catcgtgagcatggttatcct

SEQ ID NO: 17876 - DNA, 21 bp, Artificial Sequence
  source: /note="Description of Artificial Sequence: Synthetic oligonucleotide"
catcgtgagaataaggtggcg

SEQ ID NO: 17877 - DNA, 21 bp, Artificial Sequence
  source: /note="Description of Artificial Sequence: Synthetic oligonucleotide"
catcggattggggatgtgccg

SEQ ID NO: 17878 - DNA, 21 bp, Artificial Sequence
  source: /note="Description of Artificial Sequence: Synthetic oligonucleotide"
catcggttgccgaatgtggcg

SEQ ID NO: 17879 - DNA, 21 bp, Artificial Sequence
  source: /note="Description of Artificial Sequence: Synthetic oligonucleotide"
catcgtccggagatgctgtct

SEQ ID NO: 17880 - DNA, 21 bp, Artificial Sequence
  source: /note="Description of Artificial Sequence: Synthetic oligonucleotide"
catcggcctattgctacgtat

SEQ ID NO: 17881 - DNA, 21 bp, Artificial Sequence
  source: /note="Description of Artificial Sequence: Synthetic oligonucleotide"
catcgtactggtcttccggag

SEQ ID NO: 17882 - DNA, 21 bp, Artificial Sequence
  source: /note="Description of Artificial Sequence: Synthetic oligonucleotide"
catcgtacgtctatgcctctt

SEQ ID NO: 17883 - DNA, 21 bp, Artificial Sequence
  source: /note="Description of Artificial Sequence: Synthetic oligonucleotide"
cataggactacgaataatttt

SEQ ID NO: 17884 - DNA, 21 bp, Artificial Sequence
  source: /note="Description of Artificial Sequence: Synthetic oligonucleotide"
catcgggtggggggtctgtct

SEQ ID NO: 17885 - DNA, 21 bp, Artificial Sequence
  source: /note="Description of Artificial Sequence: Synthetic oligonucleotide"
catcgtgttgttgctattccg

SEQ ID NO: 17886 - DNA, 21 bp, Artificial Sequence
  source: /note="Description of Artificial Sequence: Synthetic oligonucleotide"
catagtgctgctctttgtatg

SEQ ID NO: 17887 - DNA, 21 bp, Artificial Sequence
  source: /note="Description of Artificial Sequence: Synthetic oligonucleotide"
cattcggctgcgatgccttct

SEQ ID NO: 17888 - DNA, 21 bp, Artificial Sequence
  source: /note="Description of Artificial Sequence: Synthetic oligonucleotide"
cattcggcggggacggagact

SEQ ID NO: 17889 - DNA, 21 bp, Artificial Sequence
  source: /note="Description of Artificial Sequence: Synthetic oligonucleotide"
cattcggctaagatgtctggg

SEQ ID NO: 17890 - DNA, 21 bp, Artificial Sequence
  source: /note="Description of Artificial Sequence: Synthetic oligonucleotide"
catagtgctaagtctatgcat

SEQ ID NO: 17891 - DNA, 21 bp, Artificial Sequence
  source: /note="Description of Artificial Sequence: Synthetic oligonucleotide"
cattcggcgttgttgcatatg

SEQ ID NO: 17892 - DNA, 21 bp, Artificial Sequence
  source: /note="Description of Artificial Sequence: Synthetic oligonucleotide"
catagtgctcagattactatt

SEQ ID NO: 17893 - DNA, 21 bp, Artificial Sequence
  source: /note="Description of Artificial Sequence: Synthetic oligonucleotide"
cattcggctactatgtgtagt

SEQ ID NO: 17894 - DNA, 21 bp, Artificial Sequence
  source: /note="Description of Artificial Sequence: Synthetic oligonucleotide"
catagtgatcgttcttctgct

SEQ ID NO: 17895 - DNA, 21 bp, Artificial Sequence
  source: /note="Description of Artificial Sequence: Synthetic oligonucleotide"
catagtgagaagtctggtttt

SEQ ID NO: 17896 - DNA, 21 bp, Artificial Sequence
  source: /note="Description of Artificial Sequence: Synthetic oligonucleotide"
catagtgagtatcctacgaag

SEQ ID NO: 17897 - DNA, 21 bp, Artificial Sequence
  source: /note="Description of Artificial Sequence: Synthetic oligonucleotide"
catagttttcttgatttggag

SEQ ID NO: 17898 - DNA, 21 bp, Artificial Sequence
  source: /note="Description of Artificial Sequence: Synthetic oligonucleotide"
cattctttttctatgatggag

SEQ ID NO: 17899 - DNA, 21 bp, Artificial Sequence
  source: /note="Description of Artificial Sequence: Synthetic oligonucleotide"
catagtggtcatagtcagggt

SEQ ID NO: 17900 - DNA, 21 bp, Artificial Sequence
  source: /note="Description of Artificial Sequence: Synthetic oligonucleotide"
cattctggtaagattttgcat

SEQ ID NO: 17901 - DNA, 21 bp, Artificial Sequence
  source: /note="Description of Artificial Sequence: Synthetic oligonucleotide"
catagtggtcgtgcttattct

SEQ ID NO: 17902 - DNA, 21 bp, Artificial Sequence
  source: /note="Description of Artificial Sequence: Synthetic oligonucleotide"
catagtgggtcttcggagact

SEQ ID NO: 17903 - DNA, 21 bp, Artificial Sequence
  source: /note="Description of Artificial Sequence: Synthetic oligonucleotide"
cattcgcatggggtgccttct

SEQ ID NO: 17904 - DNA, 21 bp, Artificial Sequence
  source: /note="Description of Artificial Sequence: Synthetic oligonucleotide"
catagtcatgttaatagttcg

SEQ ID NO: 17905 - DNA, 21 bp, Artificial Sequence
  source: /note="Description of Artificial Sequence: Synthetic oligonucleotide"
cattctattcatagtagggag

SEQ ID NO: 17906 - DNA, 21 bp, Artificial Sequence
  source: /note="Description of Artificial Sequence: Synthetic oligonucleotide"
catagtattcagcatattcct

SEQ ID NO: 17907 - DNA, 21 bp, Artificial Sequence
  source: /note="Description of Artificial Sequence: Synthetic oligonucleotide"
cattctaaggcgtctgtgatt

SEQ ID NO: 17908 - DNA, 21 bp, Artificial Sequence
  source: /note="Description of Artificial Sequence: Synthetic oligonucleotide"
cattctaagcctgcgcagatt

SEQ ID NO: 17909 - DNA, 21 bp, Artificial Sequence
  source: /note="Description of Artificial Sequence: Synthetic oligonucleotide"
cattcgaagagtgttgtgact

SEQ ID NO: 17910 - DNA, 21 bp, Artificial Sequence
  source: /note="Description of Artificial Sequence: Synthetic oligonucleotide"
cattctctgggtgcgattcct

SEQ ID NO: 17911 - DNA, 21 bp, Artificial Sequence
  source: /note="Description of Artificial Sequence: Synthetic oligonucleotide"
cattcgttgggtacgagtggg

SEQ ID NO: 17912 - DNA, 21 bp, Artificial Sequence
  source: /note="Description of Artificial Sequence: Synthetic oligonucleotide"
catagtcttttgaatagtact

SEQ ID NO: 17913 - DNA, 21 bp, Artificial Sequence
  source: /note="Description of Artificial Sequence: Synthetic oligonucleotide"
cattcgcttcctgggctgaag

SEQ ID NO: 17914 - DNA, 21 bp, Artificial Sequence
  source: /note="Description of Artificial Sequence: Synthetic oligonucleotide"
cattctcttcgtacgcctcag

SEQ ID NO: 17915 - DNA, 21 bp, Artificial Sequence
  source: /note="Description of Artificial Sequence: Synthetic oligonucleotide"
catagtatggaggaggcgctg

SEQ ID NO: 17916 - DNA, 21 bp, Artificial Sequence
  source: /note="Description of Artificial Sequence: Synthetic oligonucleotide"
cattcgatgccggatcagatt

SEQ ID NO: 17917 - DNA, 21 bp, Artificial Sequence
  source: /note="Description of Artificial Sequence: Synthetic oligonucleotide"
cattctatgtcggaggctaag

SEQ ID NO: 17918 - DNA, 21 bp, Artificial Sequence
  source: /note="Description of Artificial Sequence: Synthetic oligonucleotide"
cattctaataagcagccgaat

SEQ ID NO: 17919 - DNA, 21 bp, Artificial Sequence
  source: /note="Description of Artificial Sequence: Synthetic oligonucleotide"
cattcgaataagacgtcgctg

SEQ ID NO: 17920 - DNA, 21 bp, Artificial Sequence
  source: /note="Description of Artificial Sequence: Synthetic oligonucleotide"
catagtaatcttagggcgatg

SEQ ID NO: 17921 - DNA, 21 bp, Artificial Sequence
  source: /note="Description of Artificial Sequence: Synthetic oligonucleotide"
cattctaatacgatttcttct

SEQ ID NO: 17922 - DNA, 21 bp, Artificial Sequence
  source: /note="Description of Artificial Sequence: Synthetic oligonucleotide"
cattctccggctcggactgct

SEQ ID NO: 17923 - DNA, 21 bp, Artificial Sequence
  source: /note="Description of Artificial Sequence: Synthetic oligonucleotide"
cattcgcctgctagtcctccg

SEQ ID NO: 17924 - DNA, 21 bp, Artificial Sequence
  source: /note="Description of Artificial Sequence: Synthetic oligonucleotide"
cattctccgggtcagatttcg

SEQ ID NO: 17925 - DNA, 21 bp, Artificial Sequence
  source: /note="Description of Artificial Sequence: Synthetic oligonucleotide"
catagtccgatggcggttcct

SEQ ID NO: 17926 - DNA, 21 bp, Artificial Sequence
  source: /note="Description of Artificial Sequence: Synthetic oligonucleotide"
cattctcctaatggttatgct

SEQ ID NO: 17927 - DNA, 21 bp, Artificial Sequence
  source: /note="Description of Artificial Sequence: Synthetic oligonucleotide"
cattcgcaggcgcagatgtcg

SEQ ID NO: 17928 - DNA, 21 bp, Artificial Sequence
  source: /note="Description of Artificial Sequence: Synthetic oligonucleotide"
cattcgcagaatcagtatagt

SEQ ID NO: 17929 - DNA, 21 bp, Artificial Sequence
  source: /note="Description of Artificial Sequence: Synthetic oligonucleotide"
catagtcagagggctgttcct

SEQ ID NO: 17930 - DNA, 21 bp, Artificial Sequence
  source: /note="Description of Artificial Sequence: Synthetic oligonucleotide"
catagtagggcgagtccggag

SEQ ID NO: 17931 - DNA, 21 bp, Artificial Sequence
  source: /note="Description of Artificial Sequence: Synthetic oligonucleotide"
cattctagggataatcggaat

SEQ ID NO: 17932 - DNA, 21 bp, Artificial Sequence
  source: /note="Description of Artificial Sequence: Synthetic oligonucleotide"
cattctagggagcttagtccg

SEQ ID NO: 17933 - DNA, 21 bp, Artificial Sequence
  source: /note="Description of Artificial Sequence: Synthetic oligonucleotide"
cattcgcggggtactatgctt

SEQ ID NO: 17934 - DNA, 21 bp, Artificial Sequence
  source: /note="Description of Artificial Sequence: Synthetic oligonucleotide"
cattcgaggcatgatatgttg

SEQ ID NO: 17935 - DNA, 21 bp, Artificial Sequence
  source: /note="Description of Artificial Sequence: Synthetic oligonucleotide"
catagtaggcctcagcctcag

SEQ ID NO: 17936 - DNA, 21 bp, Artificial Sequence
  source: /note="Description of Artificial Sequence: Synthetic oligonucleotide"
cattctcggccgagtggttgt

SEQ ID NO: 17937 - DNA, 21 bp, Artificial Sequence
  source: /note="Description of Artificial Sequence: Synthetic oligonucleotide"
cattctcggtctacgtttgct

SEQ ID NO: 17938 - DNA, 21 bp, Artificial Sequence
  source: /note="Description of Artificial Sequence: Synthetic oligonucleotide"
catagttctattcctggtcct

SEQ ID NO: 17939 - DNA, 21 bp, Artificial Sequence
  source: /note="Description of Artificial Sequence: Synthetic oligonucleotide"
cattcttctatggctacgatg

SEQ ID NO: 17940 - DNA, 21 bp, Artificial Sequence
  source: /note="Description of Artificial Sequence: Synthetic oligonucleotide"
cattcttcgaatcttggtgtt

SEQ ID NO: 17941 - DNA, 21 bp, Artificial Sequence
  source: /note="Description of Artificial Sequence: Synthetic oligonucleotide"
cattcttcgtcggtgaatcct

SEQ ID NO: 17942 - DNA, 21 bp, Artificial Sequence
  source: /note="Description of Artificial Sequence: Synthetic oligonucleotide"
cattcgagtacgggtgcgaat

SEQ ID NO: 17943 - DNA, 21 bp, Artificial Sequence
  source: /note="Description of Artificial Sequence: Synthetic oligonucleotide"
cattcttcggttcctggtgcg

SEQ ID NO: 17944 - DNA, 21 bp, Artificial Sequence
  source: /note="Description of Artificial Sequence: Synthetic oligonucleotide"
cattctacggattcgttgccg

SEQ ID NO: 17945 - DNA, 21 bp, Artificial Sequence
  source: /note="Description of Artificial Sequence: Synthetic oligonucleotide"
cattctactcatagggagctg

SEQ ID NO: 17946 - DNA, 21 bp, Artificial Sequence
  source: /note="Description of Artificial Sequence: Synthetic oligonucleotide"
cattctactctgatttcgcat

SEQ ID NO: 17947 - DNA, 21 bp, Artificial Sequence
  source: /note="Description of Artificial Sequence: Synthetic oligonucleotide"
catagtacgccgttgaattct

SEQ ID NO: 17948 - DNA, 21 bp, Artificial Sequence
  source: /note="Description of Artificial Sequence: Synthetic oligonucleotide"
cattctactcgtgagggtttt

SEQ ID NO: 17949 - DNA, 21 bp, Artificial Sequence
  source: /note="Description of Artificial Sequence: Synthetic oligonucleotide"
cattctactacggatcctctg

SEQ ID NO: 17950 - DNA, 21 bp, Artificial Sequence
  source: /note="Description of Artificial Sequence: Synthetic oligonucleotide"
catagtgttgcgtctgtgact

SEQ ID NO: 17951 - DNA, 21 bp, Artificial Sequence
  source: /note="Description of Artificial Sequence: Synthetic oligonucleotide"
catagtgtggattcgcggggg

SEQ ID NO: 17952 - DNA, 21 bp, Artificial Sequence
  source: /note="Description of Artificial Sequence: Synthetic oligonucleotide"
cattcggtggagcgggatcat

SEQ ID NO: 17953 - DNA, 21 bp, Artificial Sequence
  source: /note="Description of Artificial Sequence: Synthetic oligonucleotide"
cattcttatgtggatagtttt

SEQ ID NO: 17954 - DNA, 21 bp, Artificial Sequence
  source: /note="Description of Artificial Sequence: Synthetic oligonucleotide"
catacggcgggtgatgcggag

SEQ ID NO: 17955 - DNA, 21 bp, Artificial Sequence
  source: /note="Description of Artificial Sequence: Synthetic oligonucleotide"
catacggcgcttttgtctaat

SEQ ID NO: 17956 - DNA, 21 bp, Artificial Sequence
  source: /note="Description of Artificial Sequence: Synthetic oligonucleotide"
catacggctcggactactccg

SEQ ID NO: 17957 - DNA, 21 bp, Artificial Sequence
  source: /note="Description of Artificial Sequence: Synthetic oligonucleotide"
catactgcttcgttgccggcg

SEQ ID NO: 17958 - DNA, 21 bp, Artificial Sequence
  source: /note="Description of Artificial Sequence: Synthetic oligonucleotide"
catacggatcggtatgcggtt

SEQ ID NO: 17959 - DNA, 21 bp, Artificial Sequence
  source: /note="Description of Artificial Sequence: Synthetic oligonucleotide"
catactgaggctgggagggtg

SEQ ID NO: 17960 - DNA, 21 bp, Artificial Sequence
  source: /note="Description of Artificial Sequence: Synthetic oligonucleotide"
catacggagacgtttggggag

SEQ ID NO: 17961 - DNA, 21 bp, Artificial Sequence
  source: /note="Description of Artificial Sequence: Synthetic oligonucleotide"
catacgggtcttgttcggggg

SEQ ID NO: 17962 - DNA, 21 bp, Artificial Sequence
  source: /note="Description of Artificial Sequence: Synthetic oligonucleotide"
catacggggtctctgtcttct

SEQ ID NO: 17963 - DNA, 21 bp, Artificial Sequence
  source: /note="Description of Artificial Sequence: Synthetic oligonucleotide"
catacgcatctggctagtctt

SEQ ID NO: 17964 - DNA, 21 bp, Artificial Sequence
  source: /note="Description of Artificial Sequence: Synthetic oligonucleotide"
catactattaaggatgcttat

SEQ ID NO: 17965 - DNA, 21 bp, Artificial Sequence
  source: /note="Description of Artificial Sequence: Synthetic oligonucleotide"
catactaagtctcctcatccg

SEQ ID NO: 17966 - DNA, 21 bp, Artificial Sequence
  source: /note="Description of Artificial Sequence: Synthetic oligonucleotide"
catactcttaagccggatgtg

SEQ ID NO: 17967 - DNA, 21 bp, Artificial Sequence
  source: /note="Description of Artificial Sequence: Synthetic oligonucleotide"
catactttgccgagtacgtcg

SEQ ID NO: 17968 - DNA, 21 bp, Artificial Sequence
  source: /note="Description of Artificial Sequence: Synthetic oligonucleotide"
catacgttgcctactacggct

SEQ ID NO: 17969 - DNA, 21 bp, Artificial Sequence
  source: /note="Description of Artificial Sequence: Synthetic oligonucleotide"
catacgatggcttcggggtcg

SEQ ID NO: 17970 - DNA, 21 bp, Artificial Sequence
  source: /note="Description of Artificial Sequence: Synthetic oligonucleotide"
catacgaattctaatacgggg

SEQ ID NO: 17971 - DNA, 21 bp, Artificial Sequence
  source: /note="Description of Artificial Sequence: Synthetic oligonucleotide"
catactcctgctgtgaatttt

SEQ ID NO: 17972 - DNA, 21 bp, Artificial Sequence
  source: /note="Description of Artificial Sequence: Synthetic oligonucleotide"
catacgcctgggttgcatact

SEQ ID NO: 17973 - DNA, 21 bp, Artificial Sequence
  source: /note="Description of Artificial Sequence: Synthetic oligonucleotide"
catactcctttgacgtcgcat

SEQ ID NO: 17974 - DNA, 21 bp, Artificial Sequence
  source: /note="Description of Artificial Sequence: Synthetic oligonucleotide"
catacgccgaatattctttat

SEQ ID NO: 17975 - DNA, 21 bp, Artificial Sequence
  source: /note="Description of Artificial Sequence: Synthetic oligonucleotide"
catacgccgcagcctaatgct

SEQ ID NO: 17976 - DNA, 21 bp, Artificial Sequence
  source: /note="Description of Artificial Sequence: Synthetic oligonucleotide"
catacgcagttgaggactccg

SEQ ID NO: 17977 - DNA, 21 bp, Artificial Sequence
  source: /note="Description of Artificial Sequence: Synthetic oligonucleotide"
catactcagcggctgagttcg

SEQ ID NO: 17978 - DNA, 21 bp, Artificial Sequence
  source: /note="Description of Artificial Sequence: Synthetic oligonucleotide"
catacgcaggtgacgcgttgt

SEQ ID NO: 17979 - DNA, 21 bp, Artificial Sequence
  source: /note="Description of Artificial Sequence: Synthetic oligonucleotide"
catactagggattctgatcct

SEQ ID NO: 17980 - DNA, 21 bp, Artificial Sequence
  source: /note="Description of Artificial Sequence: Synthetic oligonucleotide"
catacgcgtgggaaggcggag

SEQ ID NO: 17981 - DNA, 21 bp, Artificial Sequence
  source: /note="Description of Artificial Sequence: Synthetic oligonucleotide"
catacgagtggtgagtcgtat

SEQ ID NO: 17982 - DNA, 21 bp, Artificial Sequence
  source: /note="Description of Artificial Sequence: Synthetic oligonucleotide"
catactagtcatcagttgccg

SEQ ID NO: 17983 - DNA, 21 bp, Artificial Sequence
  source: /note="Description of Artificial Sequence: Synthetic oligonucleotide"
catacttctattgattatgtt

SEQ ID NO: 17984 - DNA, 21 bp, Artificial Sequence
  source: /note="Description of Artificial Sequence: Synthetic oligonucleotide"
catacgtctaagtctgctctg

SEQ ID NO: 17985 - DNA, 21 bp, Artificial Sequence
  source: /note="Description of Artificial Sequence: Synthetic oligonucleotide"
catacttcgcctccgatttcg

SEQ ID NO: 17986 - DNA, 21 bp, Artificial Sequence
  source: /note="Description of Artificial Sequence: Synthetic oligonucleotide"
catacgagtcctgtttatgat

SEQ ID NO: 17987 - DNA, 21 bp, Artificial Sequence
  source: /note="Description of Artificial Sequence: Synthetic oligonucleotide"
catacgtctcagcagaggcag

SEQ ID NO: 17988 - DNA, 21 bp, Artificial Sequence
  source: /note="Description of Artificial Sequence: Synthetic oligonucleotide"
catacgtcgactacgaagtgg

SEQ ID NO: 17989 - DNA, 21 bp, Artificial Sequence
  source: /note="Description of Artificial Sequence: Synthetic oligonucleotide"
catacgtcttgggatggtctg

SEQ ID NO: 17990 - DNA, 21 bp, Artificial Sequence
  source: /note="Description of Artificial Sequence: Synthetic oligonucleotide"
catactactgcggcgcctcct

SEQ ID NO: 17991 - DNA, 21 bp, Artificial Sequence
  source: /note="Description of Artificial Sequence: Synthetic oligonucleotide"
catacgacgaaggtggatccg

SEQ ID NO: 17992 - DNA, 21 bp, Artificial Sequence
  source: /note="Description of Artificial Sequence: Synthetic oligonucleotide"
catacgactccgactcatacg

SEQ ID NO: 17993 - DNA, 21 bp, Artificial Sequence
  source: /note="Description of Artificial Sequence: Synthetic oligonucleotide"
catacgacgcagtgtacgatg

SEQ ID NO: 17994 - DNA, 21 bp, Artificial Sequence
  source: /note="Description of Artificial Sequence: Synthetic oligonucleotide"
catactacgactattcatggg

SEQ ID NO: 17995 - DNA, 21 bp, Artificial Sequence
  source: /note="Description of Artificial Sequence: Synthetic oligonucleotide"
catacggtgaggtctgggctt

SEQ ID NO: 17996 - DNA, 21 bp, Artificial Sequence
  source: /note="Description of Artificial Sequence: Synthetic oligonucleotide"
catactgttacgtcggcgggg

SEQ ID NO: 17997 - DNA, 21 bp, Artificial Sequence
  source: /note="Description of Artificial Sequence: Synthetic oligonucleotide"
catacggtggttcagagttct

SEQ ID NO: 17998 - DNA, 21 bp, Artificial Sequence
  source: /note="Description of Artificial Sequence: Synthetic oligonucleotide"
catacttattcttctgaggat

SEQ ID NO: 17999 - DNA, 21 bp, Artificial Sequence
  source: /note="Description of Artificial Sequence: Synthetic oligonucleotide"
catgtggatcggagtggggcg

SEQ ID NO: 18000 - DNA, 21 bp, Artificial Sequence
  source: /note="Description of Artificial Sequence: Synthetic oligonucleotide"
catgttgataggacgcagttt

SEQ ID NO: 18001 - DNA, 21 bp, Artificial Sequence
  source: /note="Description of Artificial Sequence: Synthetic oligonucleotide"
catgtggggattacttcggcg

SEQ ID NO: 18002 - DNA, 21 bp, Artificial Sequence
  source: /note="Description of Artificial Sequence: Synthetic oligonucleotide"
catgtggggtatggtccttcg

SEQ ID NO: 18003 - DNA, 21 bp, Artificial Sequence
  source: /note="Description of Artificial Sequence: Synthetic oligonucleotide"
catgttgggtataaggcggat

SEQ ID NO: 18004 - DNA, 21 bp, Artificial Sequence
  source: /note="Description of Artificial Sequence: Synthetic oligonucleotide"
catgtgcatactaattcttcg

SEQ ID NO: 18005 - DNA, 21 bp, Artificial Sequence
  source: /note="Description of Artificial Sequence: Synthetic oligonucleotide"
catgtgattgattctgcgggg

SEQ ID NO: 18006 - DNA, 21 bp, Artificial Sequence
  source: /note="Description of Artificial Sequence: Synthetic oligonucleotide"
catgtgaaggcgcttgggtct

SEQ ID NO: 18007 - DNA, 21 bp, Artificial Sequence
  source: /note="Description of Artificial Sequence: Synthetic oligonucleotide"
catgtgaagctgagtagtaat

SEQ ID NO: 18008 - DNA, 21 bp, Artificial Sequence
  source: /note="Description of Artificial Sequence: Synthetic oligonucleotide"
catgttcttaagaatcctacg

SEQ ID NO: 18009 - DNA, 21 bp, Artificial Sequence
  source: /note="Description of Artificial Sequence: Synthetic oligonucleotide"
catgtgcttcctactcgtcct

SEQ ID NO: 18010 - DNA, 21 bp, Artificial Sequence
  source: /note="Description of Artificial Sequence: Synthetic oligonucleotide"
catgttttgtcgccgactcgg

SEQ ID NO: 18011 - DNA, 21 bp, Artificial Sequence
  source: /note="Description of Artificial Sequence: Synthetic oligonucleotide"
catgttatggaggcgtcgtct

SEQ ID NO: 18012 - DNA, 21 bp, Artificial Sequence
  source: /note="Description of Artificial Sequence: Synthetic oligonucleotide"
catgtgccgatgtcgatgcct

SEQ ID NO: 18013 - DNA, 21 bp, Artificial Sequence
  source: /note="Description of Artificial Sequence: Synthetic oligonucleotide"
catgttcagaattcgcagacg

SEQ ID NO: 18014 - DNA, 21 bp, Artificial Sequence
  source: /note="Description of Artificial Sequence: Synthetic oligonucleotide"
catgtgcgtgggacgggttct

SEQ ID NO: 18015 - DNA, 21 bp, Artificial Sequence
  source: /note="Description of Artificial Sequence: Synthetic oligonucleotide"
catgttcgtcctgggtttacg

SEQ ID NO: 18016 - DNA, 21 bp, Artificial Sequence
  source: /note="Description of Artificial Sequence: Synthetic oligonucleotide"
catgttagtgagcatacgtat

SEQ ID NO: 18017 - DNA, 21 bp, Artificial Sequence
  source: /note="Description of Artificial Sequence: Synthetic oligonucleotide"
catgtttcggggccgcgtgcg

SEQ ID NO: 18018 - DNA, 21 bp, Artificial Sequence
  source: /note="Description of Artificial Sequence: Synthetic oligonucleotide"
catgtgagtcatgctatgcag

SEQ ID NO: 18019 - DNA, 21 bp, Artificial Sequence
  source: /note="Description of Artificial Sequence: Synthetic oligonucleotide"
catgtttctcattcggtgatt

SEQ ID NO: 18020 - DNA, 21 bp, Artificial Sequence
  source: /note="Description of Artificial Sequence: Synthetic oligonucleotide"
catgtgagtaagctggatact

SEQ ID NO: 18021 - DNA, 21 bp, Artificial Sequence
  source: /note="Description of Artificial Sequence: Synthetic oligonucleotide"
catgtgagtatgtctgttcct

SEQ ID NO: 18022 - DNA, 21 bp, Artificial Sequence
  source: /note="Description of Artificial Sequence: Synthetic oligonucleotide"
catgtttcgaatattatttct

SEQ ID NO: 18023 - DNA, 21 bp, Artificial Sequence
  source: /note="Description of Artificial Sequence: Synthetic oligonucleotide"
catgtgtcgaatcagcttaat

SEQ ID NO: 18024 - DNA, 21 bp, Artificial Sequence
  source: /note="Description of Artificial Sequence: Synthetic oligonucleotide"
catgtgtctcctcctgcgaat

SEQ ID NO: 18025 - DNA, 21 bp, Artificial Sequence
  source: /note="Description of Artificial Sequence: Synthetic oligonucleotide"
catgtgtcgtctgcttctttg

SEQ ID NO: 18026 - DNA, 21 bp, Artificial Sequence
  source: /note="Description of Artificial Sequence: Synthetic oligonucleotide"
catgtgagttctgattctcgt

SEQ ID NO: 18027 - DNA, 21 bp, Artificial Sequence
  source: /note="Description of Artificial Sequence: Synthetic oligonucleotide"
catgtttcttctccgtcgctg

SEQ ID NO: 18028 - DNA, 21 bp, Artificial Sequence
  source: /note="Description of Artificial Sequence: Synthetic oligonucleotide"
catgtgagtactgagccgagt

SEQ ID NO: 18029 - DNA, 21 bp, Artificial Sequence
  source: /note="Description of Artificial Sequence: Synthetic oligonucleotide"
catgtttcttatgatcttact

SEQ ID NO: 18030 - DNA, 21 bp, Artificial Sequence
  source: /note="Description of Artificial Sequence: Synthetic oligonucleotide"
catgttacgcctggttttgag

SEQ ID NO: 18031 - DNA, 21 bp, Artificial Sequence
  source: /note="Description of Artificial Sequence: Synthetic oligonucleotide"
catgttacttcgccttatctg

SEQ ID NO: 18032 - DNA, 21 bp, Artificial Sequence
  source: /note="Description of Artificial Sequence: Synthetic oligonucleotide"
catgttgttggtgggtcttct

SEQ ID NO: 18033 - DNA, 21 bp, Artificial Sequence
  source: /note="Description of Artificial Sequence: Synthetic oligonucleotide"
catgttgtgtcgcgttttgtg

SEQ ID NO: 18034 - DNA, 21 bp, Artificial Sequence
  source: /note="Description of Artificial Sequence: Synthetic oligonucleotide"
cattatgctcctatttgtgag

SEQ ID NO: 18035 - DNA, 21 bp, Artificial Sequence
  source: /note="Description of Artificial Sequence: Synthetic oligonucleotide"
cattatgatagtaatgcgccg

SEQ ID NO: 18036 - DNA, 21 bp, Artificial Sequence
  source: /note="Description of Artificial Sequence: Synthetic oligonucleotide"
cattatgagtttgtggataag

SEQ ID NO: 18037 - DNA, 21 bp, Artificial Sequence
  source: /note="Description of Artificial Sequence: Synthetic oligonucleotide"
cattatgagagttgtaatccg

SEQ ID NO: 18038 - DNA, 21 bp, Artificial Sequence
  source: /note="Description of Artificial Sequence: Synthetic oligonucleotide"
cattatgagtcgaatgatgtg

SEQ ID NO: 18039 - DNA, 21 bp, Artificial Sequence
  source: /note="Description of Artificial Sequence: Synthetic oligonucleotide"
cattattttgatatgggtcct

SEQ ID NO: 18040 - DNA, 21 bp, Artificial Sequence
  source: /note="Description of Artificial Sequence: Synthetic oligonucleotide"
cattatggtatggtgtcggct

SEQ ID NO: 18041 - DNA, 21 bp, Artificial Sequence
  source: /note="Description of Artificial Sequence: Synthetic oligonucleotide"
cattatggtagtacgagggag

SEQ ID NO: 18042 - DNA, 21 bp, Artificial Sequence
  source: /note="Description of Artificial Sequence: Synthetic oligonucleotide"
cattatattaatcctactaat

SEQ ID NO: 18043 - DNA, 21 bp, Artificial Sequence
  source: /note="Description of Artificial Sequence: Synthetic oligonucleotide"
cattatccgccgacttatgat

SEQ ID NO: 18044 - DNA, 21 bp, Artificial Sequence
  source: /note="Description of Artificial Sequence: Synthetic oligonucleotide"
cattatccttctacttctagt

SEQ ID NO: 18045 - DNA, 21 bp, Artificial Sequence
  source: /note="Description of Artificial Sequence: Synthetic oligonucleotide"
cattatcagatttcgacgact

SEQ ID NO: 18046 - DNA, 21 bp, Artificial Sequence
  source: /note="Description of Artificial Sequence: Synthetic oligonucleotide"
cattatagtatttcgggggct

SEQ ID NO: 18047 - DNA, 21 bp, Artificial Sequence
  source: /note="Description of Artificial Sequence: Synthetic oligonucleotide"
cattatagtcctaagccgagt

SEQ ID NO: 18048 - DNA, 21 bp, Artificial Sequence
  source: /note="Description of Artificial Sequence: Synthetic oligonucleotide"
cattatgttgagcatcgtcag

SEQ ID NO: 18049 - DNA, 21 bp, Artificial Sequence
  source: /note="Description of Artificial Sequence: Synthetic oligonucleotide"
attgcggcggctgctatgacg

SEQ ID NO: 18050 - DNA, 21 bp, Artificial Sequence
  source: /note="Description of Artificial Sequence: Synthetic oligonucleotide"
attgcggcgaatatgcataat

SEQ ID NO: 18051 - DNA, 21 bp, Artificial Sequence
  source: /note="Description of Artificial Sequence: Synthetic oligonucleotide"
attgcggctactcctgagcag

SEQ ID NO: 18052 - DNA, 21 bp, Artificial Sequence
  source: /note="Description of Artificial Sequence: Synthetic oligonucleotide"
attgcttgttcgagtgagctg

SEQ ID NO: 18053 - DNA, 21 bp, Artificial Sequence
  source: /note="Description of Artificial Sequence: Synthetic oligonucleotide"
attgctgatgttttggggtat

SEQ ID NO: 18054 - DNA, 21 bp, Artificial Sequence
  source: /note="Description of Artificial Sequence: Synthetic oligonucleotide"
attgctgggatttcggatatt

SEQ ID NO: 18055 - DNA, 21 bp, Artificial Sequence
  source: /note="Description of Artificial Sequence: Synthetic oligonucleotide"
attgctcatgagaggagtgat

SEQ ID NO: 18056 - DNA, 21 bp, Artificial Sequence
  source: /note="Description of Artificial Sequence: Synthetic oligonucleotide"
attgctcatagggctagtgcg

SEQ ID NO: 18057 - DNA, 21 bp, Artificial Sequence
  source: /note="Description of Artificial Sequence: Synthetic oligonucleotide"
attgctttgcctaaggttgcg

SEQ ID NO: 18058 - DNA, 21 bp, Artificial Sequence
  source: /note="Description of Artificial Sequence: Synthetic oligonucleotide"
attgctaatttgacgcagtcg

SEQ ID NO: 18059 - DNA, 21 bp, Artificial Sequence
  source: /note="Description of Artificial Sequence: Synthetic oligonucleotide"
attgcgcctggtgtgtctagt

SEQ ID NO: 18060 - DNA, 21 bp, Artificial Sequence
  source: /note="Description of Artificial Sequence: Synthetic oligonucleotide"
attgcgcctctgactgtgtct

SEQ ID NO: 18061 - DNA, 21 bp, Artificial Sequence
  source: /note="Description of Artificial Sequence: Synthetic oligonucleotide"
attgcgcctaataagcttacg

SEQ ID NO: 18062 - DNA, 21 bp, Artificial Sequence
  source: /note="Description of Artificial Sequence: Synthetic oligonucleotide"
attgcgcagcagcatcagatt

SEQ ID NO: 18063 - DNA, 21 bp, Artificial Sequence
  source: /note="Description of Artificial Sequence: Synthetic oligonucleotide"
attgctcgtgcggctaatttt

SEQ ID NO: 18064 - DNA, 21 bp, Artificial Sequence
  source: /note="Description of Artificial Sequence: Synthetic oligonucleotide"
attgcgcgtgggcagcctttt

SEQ ID NO: 18065 - DNA, 21 bp, Artificial Sequence
  source: /note="Description of Artificial Sequence: Synthetic oligonucleotide"
attgctcggggttatgataat

SEQ ID NO: 18066 - DNA, 21 bp, Artificial Sequence
  source: /note="Description of Artificial Sequence: Synthetic oligonucleotide"
attgcgcgtcatccgacgcag

SEQ ID NO: 18067 - DNA, 21 bp, Artificial Sequence
  source: /note="Description of Artificial Sequence: Synthetic oligonucleotide"
attgcgtcggagtatcgtcag

SEQ ID NO: 18068 - DNA, 21 bp, Artificial Sequence
  source: /note="Description of Artificial Sequence: Synthetic oligonucleotide"
attgctagttctcagctgcgt

SEQ ID NO: 18069 - DNA, 21 bp, Artificial Sequence
  source: /note="Description of Artificial Sequence: Synthetic oligonucleotide"
attgctactcctgagtcgctg

SEQ ID NO: 18070 - DNA, 21 bp, Artificial Sequence
  source: /note="Description of Artificial Sequence: Synthetic oligonucleotide"
attgcggttcatgggcgtggt

SEQ ID NO: 18071 - DNA, 21 bp, Artificial Sequence
  source: /note="Description of Artificial Sequence: Synthetic oligonucleotide"
attgatgcgagtaagcgtttt

SEQ ID NO: 18072 - DNA, 21 bp, Artificial Sequence
  source: /note="Description of Artificial Sequence: Synthetic oligonucleotide"
attgatggtgggagttctgat

SEQ ID NO: 18073 - DNA, 21 bp, Artificial Sequence
  source: /note="Description of Artificial Sequence: Synthetic oligonucleotide"
attgatggtcgtgtgattggt

SEQ ID NO: 18074 - DNA, 21 bp, Artificial Sequence
  source: /note="Description of Artificial Sequence: Synthetic oligonucleotide"
attgataagcttctgacgttt

SEQ ID NO: 18075 - DNA, 21 bp, Artificial Sequence
  source: /note="Description of Artificial Sequence: Synthetic oligonucleotide"
attgatctgttggttcggtcg

SEQ ID NO: 18076 - DNA, 21 bp, Artificial Sequence
  source: /note="Description of Artificial Sequence: Synthetic oligonucleotide"
attgataatcttcatgcgggt

SEQ ID NO: 18077 - DNA, 21 bp, Artificial Sequence
  source: /note="Description of Artificial Sequence: Synthetic oligonucleotide"
attgataatccggtgcgtcct

SEQ ID NO: 18078 - DNA, 21 bp, Artificial Sequence
  source: /note="Description of Artificial Sequence: Synthetic oligonucleotide"
attgataatgttaagcctgtg

SEQ ID NO: 18079 - DNA, 21 bp, Artificial Sequence
  source: /note="Description of Artificial Sequence: Synthetic oligonucleotide"
attgatagtgcgactacggat

SEQ ID NO: 18080 - DNA, 21 bp, Artificial Sequence
  source: /note="Description of Artificial Sequence: Synthetic oligonucleotide"
attgatagtcatccgtcttct

SEQ ID NO: 18081 - DNA, 21 bp, Artificial Sequence
  source: /note="Description of Artificial Sequence: Synthetic oligonucleotide"
attgatagttcgacgaattgt

SEQ ID NO: 18082 - DNA, 21 bp, Artificial Sequence
  source: /note="Description of Artificial Sequence: Synthetic oligonucleotide"
attgattcttatacgcctccg

SEQ ID NO: 18083 - DNA, 21 bp, Artificial Sequence
  source: /note="Description of Artificial Sequence: Synthetic oligonucleotide"
attgatacgatttcgactagt

SEQ ID NO: 18084 - DNA, 21 bp, Artificial Sequence
  source: /note="Description of Artificial Sequence: Synthetic oligonucleotide"
attgatactcctcgtgggact

SEQ ID NO: 18085 - DNA, 21 bp, Artificial Sequence
  source: /note="Description of Artificial Sequence: Synthetic oligonucleotide"
attgatactgttcctagtcgt

SEQ ID NO: 18086 - DNA, 21 bp, Artificial Sequence
  source: /note="Description of Artificial Sequence: Synthetic oligonucleotide"
attgatgtttttactaatgcg

SEQ ID NO: 18087 - DNA, 21 bp, Artificial Sequence
  source: /note="Description of Artificial Sequence: Synthetic oligonucleotide"
attgattataagtctagttcg

SEQ ID NO: 18088 - DNA, 21 bp, Artificial Sequence
  source: /note="Description of Artificial Sequence: Synthetic oligonucleotide"
attgattatcgggctgctgcg

SEQ ID NO: 18089 - DNA, 21 bp, Artificial Sequence
  source: /note="Description of Artificial Sequence: Synthetic oligonucleotide"
attgaggcgagtcgggtgcag

SEQ ID NO: 18090 - DNA, 21 bp, Artificial Sequence
  source: /note="Description of Artificial Sequence: Synthetic oligonucleotide"
attgagaagaatctgacgctg

SEQ ID NO: 18091 - DNA, 21 bp, Artificial Sequence
  source: /note="Description of Artificial Sequence: Synthetic oligonucleotide"
attgagaaggtgaatagggtt

SEQ ID NO: 18092 - DNA, 21 bp, Artificial Sequence
  source: /note="Description of Artificial Sequence: Synthetic oligonucleotide"
attgagctggcttcttcgtgt

SEQ ID NO: 18093 - DNA, 21 bp, Artificial Sequence
  source: /note="Description of Artificial Sequence: Synthetic oligonucleotide"
attgagcttaagatgacgtct

SEQ ID NO: 18094 - DNA, 21 bp, Artificial Sequence
  source: /note="Description of Artificial Sequence: Synthetic oligonucleotide"
attgagatgcttaagactgcg

SEQ ID NO: 18095 - DNA, 21 bp, Artificial Sequence
  source: /note="Description of Artificial Sequence: Synthetic oligonucleotide"
attgagccgaagacgcatctt

SEQ ID NO: 18096 - DNA, 21 bp, Artificial Sequence
  source: /note="Description of Artificial Sequence: Synthetic oligonucleotide"
attgagccgtctcattatcct

SEQ ID NO: 18097 - DNA, 21 bp, Artificial Sequence
  source: /note="Description of Artificial Sequence: Synthetic oligonucleotide"
attgagaggccgacgtcgcct

SEQ ID NO: 18098 - DNA, 21 bp, Artificial Sequence
  source: /note="Description of Artificial Sequence: Synthetic oligonucleotide"
attgagcgtacgtcgagtatg

SEQ ID NO: 18099 - DNA, 21 bp, Artificial Sequence
  source: /note="Description of Artificial Sequence: Synthetic oligonucleotide"
attgagtctgctaatctgaat

SEQ ID NO: 18100 - DNA, 21 bp, Artificial Sequence
  source: /note="Description of Artificial Sequence: Synthetic oligonucleotide"
attgagtctcatttgcctagg

SEQ ID NO: 18101 - DNA, 21 bp, Artificial Sequence
  source: /note="Description of Artificial Sequence: Synthetic oligonucleotide"
attgagacggcgccggatcat

SEQ ID NO: 18102 - DNA, 21 bp, Artificial Sequence
  source: /note="Description of Artificial Sequence: Synthetic oligonucleotide"
attgagacggtgaataagact

SEQ ID NO: 18103 - DNA, 21 bp, Artificial Sequence
  source: /note="Description of Artificial Sequence: Synthetic oligonucleotide"
attgaggtgcggacgtcgatt

SEQ ID NO: 18104 - DNA, 21 bp, Artificial Sequence
  source: /note="Description of Artificial Sequence: Synthetic oligonucleotide"
attgagtggggttgggaggat

SEQ ID NO: 18105 - DNA, 21 bp, Artificial Sequence
  source: /note="Description of Artificial Sequence: Synthetic oligonucleotide"
atttttgcggggactggtgag

SEQ ID NO: 18106 - DNA, 21 bp, Artificial Sequence
  source: /note="Description of Artificial Sequence: Synthetic oligonucleotide"
atttttgctggggttcttcat

SEQ ID NO: 18107 - DNA, 21 bp, Artificial Sequence
  source: /note="Description of Artificial Sequence: Synthetic oligonucleotide"
atttttgctgttgcggctgag

SEQ ID NO: 18108 - DNA, 21 bp, Artificial Sequence
  source: /note="Description of Artificial Sequence: Synthetic oligonucleotide"
atttttaagcctgcgatgact

SEQ ID NO: 18109 - DNA, 21 bp, Artificial Sequence
  source: /note="Description of Artificial Sequence: Synthetic oligonucleotide"
atttttaataatgctgctcct

SEQ ID NO: 18110 - DNA, 21 bp, Artificial Sequence
  source: /note="Description of Artificial Sequence: Synthetic oligonucleotide"
atttttccgctgacggggtcg

SEQ ID NO: 18111 - DNA, 21 bp, Artificial Sequence
  source: /note="Description of Artificial Sequence: Synthetic oligonucleotide"
atttttcgtgatggtgtttct

SEQ ID NO: 18112 - DNA, 21 bp, Artificial Sequence
  source: /note="Description of Artificial Sequence: Synthetic oligonucleotide"
attttttctgctgggccgttg

SEQ ID NO: 18113 - DNA, 21 bp, Artificial Sequence
  source: /note="Description of Artificial Sequence: Synthetic oligonucleotide"
attttttctcatgttgggtcg

SEQ ID NO: 18114 - DNA, 21 bp, Artificial Sequence
  source: /note="Description of Artificial Sequence: Synthetic oligonucleotide"
atttttgttcctgagcctggt

SEQ ID NO: 18115 - DNA, 21 bp, Artificial Sequence
  source: /note="Description of Artificial Sequence: Synthetic oligonucleotide"
attggggctggggcgtctatg

SEQ ID NO: 18116 - DNA, 21 bp, Artificial Sequence
  source: /note="Description of Artificial Sequence: Synthetic oligonucleotide"
attggtgctattgcggatgtg

SEQ ID NO: 18117 - DNA, 21 bp, Artificial Sequence
  source: /note="Description of Artificial Sequence: Synthetic oligonucleotide"
attggggcgttggtgtctcct

SEQ ID NO: 18118 - DNA, 21 bp, Artificial Sequence
  source: /note="Description of Artificial Sequence: Synthetic oligonucleotide"
attggtgcgatgtcttctgct

SEQ ID NO: 18119 - DNA, 21 bp, Artificial Sequence
  source: /note="Description of Artificial Sequence: Synthetic oligonucleotide"
attggtgctccttataatagt

SEQ ID NO: 18120 - DNA, 21 bp, Artificial Sequence
  source: /note="Description of Artificial Sequence: Synthetic oligonucleotide"
attggggcgagtttgctgggt

SEQ ID NO: 18121 - DNA, 21 bp, Artificial Sequence
  source: /note="Description of Artificial Sequence: Synthetic oligonucleotide"
attggtgagcgtaggccggtg

SEQ ID NO: 18122 - DNA, 21 bp, Artificial Sequence
  source: /note="Description of Artificial Sequence: Synthetic oligonucleotide"
attggtgggtttgtgaaggcg

SEQ ID NO: 18123 - DNA, 21 bp, Artificial Sequence
  source: /note="Description of Artificial Sequence: Synthetic oligonucleotide"
attgggggtactatgactcat

SEQ ID NO: 18124 - DNA, 21 bp, Artificial Sequence
  source: /note="Description of Artificial Sequence: Synthetic oligonucleotide"
attgggcatgggcatcctaat

SEQ ID NO: 18125 - DNA, 21 bp, Artificial Sequence
  source: /note="Description of Artificial Sequence: Synthetic oligonucleotide"
attggtcattctgataatacg

SEQ ID NO: 18126 - DNA, 21 bp, Artificial Sequence
  source: /note="Description of Artificial Sequence: Synthetic oligonucleotide"
attgggaagctgcttaatact

SEQ ID NO: 18127 - DNA, 21 bp, Artificial Sequence
  source: /note="Description of Artificial Sequence: Synthetic oligonucleotide"
attggtaagaatcattcgtcg

SEQ ID NO: 18128 - DNA, 21 bp, Artificial Sequence
  source: /note="Description of Artificial Sequence: Synthetic oligonucleotide"
attggtaagccgggttatttg

SEQ ID NO: 18129 - DNA, 21 bp, Artificial Sequence
  source: /note="Description of Artificial Sequence: Synthetic oligonucleotide"
attggtcttgcgaagactttg

SEQ ID NO: 18130 - DNA, 21 bp, Artificial Sequence
  source: /note="Description of Artificial Sequence: Synthetic oligonucleotide"
attggtcttactagtcaggtt

SEQ ID NO: 18131 - DNA, 21 bp, Artificial Sequence
  source: /note="Description of Artificial Sequence: Synthetic oligonucleotide"
attggtatgcattctcagtct

SEQ ID NO: 18132 - DNA, 21 bp, Artificial Sequence
  source: /note="Description of Artificial Sequence: Synthetic oligonucleotide"
attggtaattcgcggcttggg

SEQ ID NO: 18133 - DNA, 21 bp, Artificial Sequence
  source: /note="Description of Artificial Sequence: Synthetic oligonucleotide"
attgggcagttttcgcgtgtt

SEQ ID NO: 18134 - DNA, 21 bp, Artificial Sequence
  source: /note="Description of Artificial Sequence: Synthetic oligonucleotide"
attgggagggatatgcatgct

SEQ ID NO: 18135 - DNA, 21 bp, Artificial Sequence
  source: /note="Description of Artificial Sequence: Synthetic oligonucleotide"
attgggcggcctagttatgag

SEQ ID NO: 18136 - DNA, 21 bp, Artificial Sequence
  source: /note="Description of Artificial Sequence: Synthetic oligonucleotide"
attggtcgtcagactgggatt

SEQ ID NO: 18137 - DNA, 21 bp, Artificial Sequence
  source: /note="Description of Artificial Sequence: Synthetic oligonucleotide"
attggtcggtctgagggtact

SEQ ID NO: 18138 - DNA, 21 bp, Artificial Sequence
  source: /note="Description of Artificial Sequence: Synthetic oligonucleotide"
attgggaggtcgcctagtccg

SEQ ID NO: 18139 - DNA, 21 bp, Artificial Sequence
  source: /note="Description of Artificial Sequence: Synthetic oligonucleotide"
attgggtctcatcattcgaat

SEQ ID NO: 18140 - DNA, 21 bp, Artificial Sequence
  source: /note="Description of Artificial Sequence: Synthetic oligonucleotide"
attggttcgaatgctttgtcg

SEQ ID NO: 18141 - DNA, 21 bp, Artificial Sequence
  source: /note="Description of Artificial Sequence: Synthetic oligonucleotide"
attgggtcgacgatgtatcag

SEQ ID NO: 18142 - DNA, 21 bp, Artificial Sequence
  source: /note="Description of Artificial Sequence: Synthetic oligonucleotide"
attgggacgagtacttatgtt

SEQ ID NO: 18143 - DNA, 21 bp, Artificial Sequence
  source: /note="Description of Artificial Sequence: Synthetic oligonucleotide"
attgggacgactatgaagggt

SEQ ID NO: 18144 - DNA, 21 bp, Artificial Sequence
  source: /note="Description of Artificial Sequence: Synthetic oligonucleotide"
attggtgtgaagactctgccg

SEQ ID NO: 18145 - DNA, 21 bp, Artificial Sequence
  source: /note="Description of Artificial Sequence: Synthetic oligonucleotide"
attggtgtgctgcatctgccg

SEQ ID NO: 18146 - DNA, 21 bp, Artificial Sequence
  source: /note="Description of Artificial Sequence: Synthetic oligonucleotide"
attcatgctgctagtactgat

SEQ ID NO: 18147 - DNA, 21 bp, Artificial Sequence
  source: /note="Description of Artificial Sequence: Synthetic oligonucleotide"
attcatgcgaattggattgat

SEQ ID NO: 18148 - DNA, 21 bp, Artificial Sequence
  source: /note="Description of Artificial Sequence: Synthetic oligonucleotide"
attcatgattttacttctgtg

SEQ ID NO: 18149 - DNA, 21 bp, Artificial Sequence
  source: /note="Description of Artificial Sequence: Synthetic oligonucleotide"
attcatgagctgtcggggctg

SEQ ID NO: 18150 - DNA, 21 bp, Artificial Sequence
  source: /note="Description of Artificial Sequence: Synthetic oligonucleotide"
attcattttcagtcttctcag

SEQ ID NO: 18151 - DNA, 21 bp, Artificial Sequence
  source: /note="Description of Artificial Sequence: Synthetic oligonucleotide"
attcatggtggttcgtatact

SEQ ID NO: 18152 - DNA, 21 bp, Artificial Sequence
  source: /note="Description of Artificial Sequence: Synthetic oligonucleotide"
attcatgggagtacggatagg

SEQ ID NO: 18153 - DNA, 21 bp, Artificial Sequence
  source: /note="Description of Artificial Sequence: Synthetic oligonucleotide"
attcatcatgatccggcgtct

SEQ ID NO: 18154 - DNA, 21 bp, Artificial Sequence
  source: /note="Description of Artificial Sequence: Synthetic oligonucleotide"
attcatcttccgacttcgttg

SEQ ID NO: 18155 - DNA, 21 bp, Artificial Sequence
  source: /note="Description of Artificial Sequence: Synthetic oligonucleotide"
attcataataggccgttgatg

SEQ ID NO: 18156 - DNA, 21 bp, Artificial Sequence
  source: /note="Description of Artificial Sequence: Synthetic oligonucleotide"
attcataatactttggcggct

SEQ ID NO: 18157 - DNA, 21 bp, Artificial Sequence
  source: /note="Description of Artificial Sequence: Synthetic oligonucleotide"
attcataatgttgttgttcag

SEQ ID NO: 18158 - DNA, 21 bp, Artificial Sequence
  source: /note="Description of Artificial Sequence: Synthetic oligonucleotide"
attcatccgggtcgtgttgct

SEQ ID NO: 18159 - DNA, 21 bp, Artificial Sequence
  source: /note="Description of Artificial Sequence: Synthetic oligonucleotide"
attcatcctacgaggcagggg

SEQ ID NO: 18160 - DNA, 21 bp, Artificial Sequence
  source: /note="Description of Artificial Sequence: Synthetic oligonucleotide"
attcatcaggctgggcagccg

SEQ ID NO: 18161 - DNA, 21 bp, Artificial Sequence
  source: /note="Description of Artificial Sequence: Synthetic oligonucleotide"
attcatcagtcgtcggagtct

SEQ ID NO: 18162 - DNA, 21 bp, Artificial Sequence
  source: /note="Description of Artificial Sequence: Synthetic oligonucleotide"
attcatcgggtgattacttct

SEQ ID NO: 18163 - DNA, 21 bp, Artificial Sequence
  source: /note="Description of Artificial Sequence: Synthetic oligonucleotide"
attcattcggagggttctctt

SEQ ID NO: 18164 - DNA, 21 bp, Artificial Sequence
  source: /note="Description of Artificial Sequence: Synthetic oligonucleotide"
attcattctctgcagcaggag

SEQ ID NO: 18165 - DNA, 21 bp, Artificial Sequence
  source: /note="Description of Artificial Sequence: Synthetic oligonucleotide"
attcatagttcgattgatttt

SEQ ID NO: 18166 - DNA, 21 bp, Artificial Sequence
  source: /note="Description of Artificial Sequence: Synthetic oligonucleotide"
attcatagttcgcctgctgcg

SEQ ID NO: 18167 - DNA, 21 bp, Artificial Sequence
  source: /note="Description of Artificial Sequence: Synthetic oligonucleotide"
attcatagttatgatcggagt

SEQ ID NO: 18168 - DNA, 21 bp, Artificial Sequence
  source: /note="Description of Artificial Sequence: Synthetic oligonucleotide"
attcatactgcggttgagttg

SEQ ID NO: 18169 - DNA, 21 bp, Artificial Sequence
  source: /note="Description of Artificial Sequence: Synthetic oligonucleotide"
attcatactgggaattatatg

SEQ ID NO: 18170 - DNA, 21 bp, Artificial Sequence
  source: /note="Description of Artificial Sequence: Synthetic oligonucleotide"
attcatacgaatgcgccgcct

SEQ ID NO: 18171 - DNA, 21 bp, Artificial Sequence
  source: /note="Description of Artificial Sequence: Synthetic oligonucleotide"
attcatactacgcagcggact

SEQ ID NO: 18172 - DNA, 21 bp, Artificial Sequence
  source: /note="Description of Artificial Sequence: Synthetic oligonucleotide"
attattgcggagcatccggcg

SEQ ID NO: 18173 - DNA, 21 bp, Artificial Sequence
  source: /note="Description of Artificial Sequence: Synthetic oligonucleotide"
attattgctaggcttcctccg

SEQ ID NO: 18174 - DNA, 21 bp, Artificial Sequence
  source: /note="Description of Artificial Sequence: Synthetic oligonucleotide"
attattgataatcatattcgt

SEQ ID NO: 18175 - DNA, 21 bp, Artificial Sequence
  source: /note="Description of Artificial Sequence: Synthetic oligonucleotide"
attatttttcaggatatgcct

SEQ ID NO: 18176 - DNA, 21 bp, Artificial Sequence
  source: /note="Description of Artificial Sequence: Synthetic oligonucleotide"
attattggtgctaatgagcct

SEQ ID NO: 18177 - DNA, 21 bp, Artificial Sequence
  source: /note="Description of Artificial Sequence: Synthetic oligonucleotide"
attattgggaaggggactggg

SEQ ID NO: 18178 - DNA, 21 bp, Artificial Sequence
  source: /note="Description of Artificial Sequence: Synthetic oligonucleotide"
attattcatgatactcataat

SEQ ID NO: 18179 - DNA, 21 bp, Artificial Sequence
  source: /note="Description of Artificial Sequence: Synthetic oligonucleotide"
attattcatgaggcgcgtcct

SEQ ID NO: 18180 - DNA, 21 bp, Artificial Sequence
  source: /note="Description of Artificial Sequence: Synthetic oligonucleotide"
attattcgtgatagtcagctg

SEQ ID NO: 18181 - DNA, 21 bp, Artificial Sequence
  source: /note="Description of Artificial Sequence: Synthetic oligonucleotide"
attatttctcttacgacttct

SEQ ID NO: 18182 - DNA, 21 bp, Artificial Sequence
  source: /note="Description of Artificial Sequence: Synthetic oligonucleotide"
attaaggatgcgggttctcct

SEQ ID NO: 18183 - DNA, 21 bp, Artificial Sequence
  source: /note="Description of Artificial Sequence: Synthetic oligonucleotide"
attaaggatgcgcagccttgg

SEQ ID NO: 18184 - DNA, 21 bp, Artificial Sequence
  source: /note="Description of Artificial Sequence: Synthetic oligonucleotide"
attaaggatcagtggaatatg

SEQ ID NO: 18185 - DNA, 21 bp, Artificial Sequence
  source: /note="Description of Artificial Sequence: Synthetic oligonucleotide"
attaagtttcctactgcggat

SEQ ID NO: 18186 - DNA, 21 bp, Artificial Sequence
  source: /note="Description of Artificial Sequence: Synthetic oligonucleotide"
attaagattgaggatcctcgg

SEQ ID NO: 18187 - DNA, 21 bp, Artificial Sequence
  source: /note="Description of Artificial Sequence: Synthetic oligonucleotide"
attaagatggcgcagggtttt

SEQ ID NO: 18188 - DNA, 21 bp, Artificial Sequence
  source: /note="Description of Artificial Sequence: Synthetic oligonucleotide"
attaagaatctggcgtctcat

SEQ ID NO: 18189 - DNA, 21 bp, Artificial Sequence
  source: /note="Description of Artificial Sequence: Synthetic oligonucleotide"
attaagcctattggtggggtg

SEQ ID NO: 18190 - DNA, 21 bp, Artificial Sequence
  source: /note="Description of Artificial Sequence: Synthetic oligonucleotide"
attaagcctatgtctgggacg

SEQ ID NO: 18191 - DNA, 21 bp, Artificial Sequence
  source: /note="Description of Artificial Sequence: Synthetic oligonucleotide"
attaagcagccgcttcataat

SEQ ID NO: 18192 - DNA, 21 bp, Artificial Sequence
  source: /note="Description of Artificial Sequence: Synthetic oligonucleotide"
attaagcgtactctgagtgat

SEQ ID NO: 18193 - DNA, 21 bp, Artificial Sequence
  source: /note="Description of Artificial Sequence: Synthetic oligonucleotide"
attaagtctgatgatggttct

SEQ ID NO: 18194 - DNA, 21 bp, Artificial Sequence
  source: /note="Description of Artificial Sequence: Synthetic oligonucleotide"
attaagagtgagggtagtctg

SEQ ID NO: 18195 - DNA, 21 bp, Artificial Sequence
  source: /note="Description of Artificial Sequence: Synthetic oligonucleotide"
attaagacggagtggtcgcat

SEQ ID NO: 18196 - DNA, 21 bp, Artificial Sequence
  source: /note="Description of Artificial Sequence: Synthetic oligonucleotide"
attaagacgtttacgtcgtcg

SEQ ID NO: 18197 - DNA, 21 bp, Artificial Sequence
  source: /note="Description of Artificial Sequence: Synthetic oligonucleotide"
attctggattttctgcctgat

SEQ ID NO: 18198 - DNA, 21 bp, Artificial Sequence
  source: /note="Description of Artificial Sequence: Synthetic oligonucleotide"
attctggggggtcttgatcgg

SEQ ID NO: 18199 - DNA, 21 bp, Artificial Sequence
  source: /note="Description of Artificial Sequence: Synthetic oligonucleotide"
attctggggaatacgcgggag

SEQ ID NO: 18200 - DNA, 21 bp, Artificial Sequence
  source: /note="Description of Artificial Sequence: Synthetic oligonucleotide"
attttgggtcgttcggcggcg

SEQ ID NO: 18201 - DNA, 21 bp, Artificial Sequence
  source: /note="Description of Artificial Sequence: Synthetic oligonucleotide"
attctgggtacgcgtccgttg

SEQ ID NO: 18202 - DNA, 21 bp, Artificial Sequence
  source: /note="Description of Artificial Sequence: Synthetic oligonucleotide"
attctggggacgtctgtgcag

SEQ ID NO: 18203 - DNA, 21 bp, Artificial Sequence
  source: /note="Description of Artificial Sequence: Synthetic oligonucleotide"
attttgcatggtcggggggcg

SEQ ID NO: 18204 - DNA, 21 bp, Artificial Sequence
  source: /note="Description of Artificial Sequence: Synthetic oligonucleotide"
attcttcatctggtgcgtctt

SEQ ID NO: 18205 - DNA, 21 bp, Artificial Sequence
  source: /note="Description of Artificial Sequence: Synthetic oligonucleotide"
attcttcattctcctacggtt

SEQ ID NO: 18206 - DNA, 21 bp, Artificial Sequence
  source: /note="Description of Artificial Sequence: Synthetic oligonucleotide"
attttgcatgttgagatgagg

SEQ ID NO: 18207 - DNA, 21 bp, Artificial Sequence
  source: /note="Description of Artificial Sequence: Synthetic oligonucleotide"
attcttaagcatattgggctt

SEQ ID NO: 18208 - DNA, 21 bp, Artificial Sequence
  source: /note="Description of Artificial Sequence: Synthetic oligonucleotide"
attttgaagcagcaggctaat

SEQ ID NO: 18209 - DNA, 21 bp, Artificial Sequence
  source: /note="Description of Artificial Sequence: Synthetic oligonucleotide"
attctgttggatgatgagagt

SEQ ID NO: 18210 - DNA, 21 bp, Artificial Sequence
  source: /note="Description of Artificial Sequence: Synthetic oligonucleotide"
attttgctgcatccgcgtggg

SEQ ID NO: 18211 - DNA, 21 bp, Artificial Sequence
  source: /note="Description of Artificial Sequence: Synthetic oligonucleotide"
attttgctgatgggtacttct

SEQ ID NO: 18212 - DNA, 21 bp, Artificial Sequence
  source: /note="Description of Artificial Sequence: Synthetic oligonucleotide"
attcttcttcggaaggatcct

SEQ ID NO: 18213 - DNA, 21 bp, Artificial Sequence
  source: /note="Description of Artificial Sequence: Synthetic oligonucleotide"
attcttctgtcggaggggcat

SEQ ID NO: 18214 - DNA, 21 bp, Artificial Sequence
  source: /note="Description of Artificial Sequence: Synthetic oligonucleotide"
attttgcttagtattcgggat

SEQ ID NO: 18215 - DNA, 21 bp, Artificial Sequence
  source: /note="Description of Artificial Sequence: Synthetic oligonucleotide"
attcttatgtctgcgcagtct

SEQ ID NO: 18216 - DNA, 21 bp, Artificial Sequence
  source: /note="Description of Artificial Sequence: Synthetic oligonucleotide"
attcttatggtggatgatact

SEQ ID NO: 18217 - DNA, 21 bp, Artificial Sequence
  source: /note="Description of Artificial Sequence: Synthetic oligonucleotide"
attctgaatgatcgtagtgct

SEQ ID NO: 18218 - DNA, 21 bp, Artificial Sequence
  source: /note="Description of Artificial Sequence: Synthetic oligonucleotide"
attcttaatcatggtaagggg

SEQ ID NO: 18219 - DNA, 21 bp, Artificial Sequence
  source: /note="Description of Artificial Sequence: Synthetic oligonucleotide"
attcttaataagccgttgtcg

SEQ ID NO: 18220 - DNA, 21 bp, Artificial Sequence
  source: /note="Description of Artificial Sequence: Synthetic oligonucleotide"
attctgccgcatacgactact

SEQ ID NO: 18221 - DNA, 21 bp, Artificial Sequence
  source: /note="Description of Artificial Sequence: Synthetic oligonucleotide"
attcttcctaattctatgcct

SEQ ID NO: 18222 - DNA, 21 bp, Artificial Sequence
  source: /note="Description of Artificial Sequence: Synthetic oligonucleotide"
attctgcctaatacggggccg

SEQ ID NO: 18223 - DNA, 21 bp, Artificial Sequence
  source: /note="Description of Artificial Sequence: Synthetic oligonucleotide"
attttgccgccgattacggat

SEQ ID NO: 18224 - DNA, 21 bp, Artificial Sequence
  source: /note="Description of Artificial Sequence: Synthetic oligonucleotide"
attctgccttcgcttactgct

SEQ ID NO: 18225 - DNA, 21 bp, Artificial Sequence
  source: /note="Description of Artificial Sequence: Synthetic oligonucleotide"
attcttccgtcttcgttttcg

SEQ ID NO: 18226 - DNA, 21 bp, Artificial Sequence
  source: /note="Description of Artificial Sequence: Synthetic oligonucleotide"
attcttccttattcttctccg

SEQ ID NO: 18227 - DNA, 21 bp, Artificial Sequence
  source: /note="Description of Artificial Sequence: Synthetic oligonucleotide"
attttgcaggcgcatcagact

SEQ ID NO: 18228 - DNA, 21 bp, Artificial Sequence
  source: /note="Description of Artificial Sequence: Synthetic oligonucleotide"
attcttcagtcggagtttacg

SEQ ID NO: 18229 - DNA, 21 bp, Artificial Sequence
  source: /note="Description of Artificial Sequence: Synthetic oligonucleotide"
attctgaggggggatggtccg

SEQ ID NO: 18230 - DNA, 21 bp, Artificial Sequence
  source: /note="Description of Artificial Sequence: Synthetic oligonucleotide"
attctgaggggtaatgggagt

SEQ ID NO: 18231 - DNA, 21 bp, Artificial Sequence
  source: /note="Description of Artificial Sequence: Synthetic oligonucleotide"
attcttcgtactgagtataag

SEQ ID NO: 18232 - DNA, 21 bp, Artificial Sequence
  source: /note="Description of Artificial Sequence: Synthetic oligonucleotide"
attctgcgggtgcatactcct

SEQ ID NO: 18233 - DNA, 21 bp, Artificial Sequence
  source: /note="Description of Artificial Sequence: Synthetic oligonucleotide"
attttgagtgagaggactcct

SEQ ID NO: 18234 - DNA, 21 bp, Artificial Sequence
  source: /note="Description of Artificial Sequence: Synthetic oligonucleotide"
attctttctatggatacggct

SEQ ID NO: 18235 - DNA, 21 bp, Artificial Sequence
  source: /note="Description of Artificial Sequence: Synthetic oligonucleotide"
attctgactggttctcatgct

SEQ ID NO: 18236 - DNA, 21 bp, Artificial Sequence
  source: /note="Description of Artificial Sequence: Synthetic oligonucleotide"
attctgactaaggatgtgagt

SEQ ID NO: 18237 - DNA, 21 bp, Artificial Sequence
  source: /note="Description of Artificial Sequence: Synthetic oligonucleotide"
attcttacgaagtcgccgacg

SEQ ID NO: 18238 - DNA, 21 bp, Artificial Sequence
  source: /note="Description of Artificial Sequence: Synthetic oligonucleotide"
attttgactcgtgttagtcct

SEQ ID NO: 18239 - DNA, 21 bp, Artificial Sequence
  source: /note="Description of Artificial Sequence: Synthetic oligonucleotide"
attctgacgtctgtgacgaag

SEQ ID NO: 18240 - DNA, 21 bp, Artificial Sequence
  source: /note="Description of Artificial Sequence: Synthetic oligonucleotide"
attttggtttcggagctgcgg

SEQ ID NO: 18241 - DNA, 21 bp, Artificial Sequence
  source: /note="Description of Artificial Sequence: Synthetic oligonucleotide"
attatggcgccgactacgcag

SEQ ID NO: 18242 - DNA, 21 bp, Artificial Sequence
  source: /note="Description of Artificial Sequence: Synthetic oligonucleotide"
attatggatgcgcatattgcg

SEQ ID NO: 18243 - DNA, 21 bp, Artificial Sequence
  source: /note="Description of Artificial Sequence: Synthetic oligonucleotide"
attatggatgttaagtttcat

SEQ ID NO: 18244 - DNA, 21 bp, Artificial Sequence
  source: /note="Description of Artificial Sequence: Synthetic oligonucleotide"
attatggaggtgcgggggccg

SEQ ID NO: 18245 - DNA, 21 bp, Artificial Sequence
  source: /note="Description of Artificial Sequence: Synthetic oligonucleotide"
attatgggtgagcctcgtaag

SEQ ID NO: 18246 - DNA, 21 bp, Artificial Sequence
  source: /note="Description of Artificial Sequence: Synthetic oligonucleotide"
attatggggtctgctccttct

SEQ ID NO: 18247 - DNA, 21 bp, Artificial Sequence
  source: /note="Description of Artificial Sequence: Synthetic oligonucleotide"
attatgggtagtgcgccttat

SEQ ID NO: 18248 - DNA, 21 bp, Artificial Sequence
  source: /note="Description of Artificial Sequence: Synthetic oligonucleotide"
attatgttgcctgatgctgat

SEQ ID NO: 18249 - DNA, 21 bp, Artificial Sequence
  source: /note="Description of Artificial Sequence: Synthetic oligonucleotide"
attatgaatgctaatcgtgct

SEQ ID NO: 18250 - DNA, 21 bp, Artificial Sequence
  source: /note="Description of Artificial Sequence: Synthetic oligonucleotide"
attatgaatcggatttctgcg

SEQ ID NO: 18251 - DNA, 21 bp, Artificial Sequence
  source: /note="Description of Artificial Sequence: Synthetic oligonucleotide"
attatgcctaatagttcggat

SEQ ID NO: 18252 - DNA, 21 bp, Artificial Sequence
  source: /note="Description of Artificial Sequence: Synthetic oligonucleotide"
attatgcctagttcgactaat

SEQ ID NO: 18253 - DNA, 21 bp, Artificial Sequence
  source: /note="Description of Artificial Sequence: Synthetic oligonucleotide"
attatgcggccttctgatcct

SEQ ID NO: 18254 - DNA, 21 bp, Artificial Sequence
  source: /note="Description of Artificial Sequence: Synthetic oligonucleotide"
attatgtctactactactctg

SEQ ID NO: 18255 - DNA, 21 bp, Artificial Sequence
  source: /note="Description of Artificial Sequence: Synthetic oligonucleotide"
attatgactatgactccgagt

SEQ ID NO: 18256 - DNA, 21 bp, Artificial Sequence
  source: /note="Description of Artificial Sequence: Synthetic oligonucleotide"
attaatgcgcagactcatctt

SEQ ID NO: 18257 - DNA, 21 bp, Artificial Sequence
  source: /note="Description of Artificial Sequence: Synthetic oligonucleotide"
attaatgcgtatcatgttccg

SEQ ID NO: 18258 - DNA, 21 bp, Artificial Sequence
  source: /note="Description of Artificial Sequence: Synthetic oligonucleotide"
attaatgagcatgtgcgtttg

SEQ ID NO: 18259 - DNA, 21 bp, Artificial Sequence
  source: /note="Description of Artificial Sequence: Synthetic oligonucleotide"
attaatgagtctaatcggggt

SEQ ID NO: 18260 - DNA, 21 bp, Artificial Sequence
  source: /note="Description of Artificial Sequence: Synthetic oligonucleotide"
attaatggttcggatcggcag

SEQ ID NO: 18261 - DNA, 21 bp, Artificial Sequence
  source: /note="Description of Artificial Sequence: Synthetic oligonucleotide"
attaatgggacggctaagcat

SEQ ID NO: 18262 - DNA, 21 bp, Artificial Sequence
  source: /note="Description of Artificial Sequence: Synthetic oligonucleotide"
attaatcatagttctatgggt

SEQ ID NO: 18263 - DNA, 21 bp, Artificial Sequence
  source: /note="Description of Artificial Sequence: Synthetic oligonucleotide"
attaatattgcgagtgcgggt

SEQ ID NO: 18264 - DNA, 21 bp, Artificial Sequence
  source: /note="Description of Artificial Sequence: Synthetic oligonucleotide"
attaataagccgtcgaatggg

SEQ ID NO: 18265 - DNA, 21 bp, Artificial Sequence
  source: /note="Description of Artificial Sequence: Synthetic oligonucleotide"
attaatctgcatgttaagagt

SEQ ID NO: 18266 - DNA, 21 bp, Artificial Sequence
  source: /note="Description of Artificial Sequence: Synthetic oligonucleotide"
attaatttgcgtccggctgcg

SEQ ID NO: 18267 - DNA, 21 bp, Artificial Sequence
  source: /note="Description of Artificial Sequence: Synthetic oligonucleotide"
attaatctgacgcctcgtttt

SEQ ID NO: 18268 - DNA, 21 bp, Artificial Sequence
  source: /note="Description of Artificial Sequence: Synthetic oligonucleotide"
attaatatggctggggtgcat

SEQ ID NO: 18269 - DNA, 21 bp, Artificial Sequence
  source: /note="Description of Artificial Sequence: Synthetic oligonucleotide"
attaatatgagtactgggtct

SEQ ID NO: 18270 - DNA, 21 bp, Artificial Sequence
  source: /note="Description of Artificial Sequence: Synthetic oligonucleotide"
attaatcctcagaatcgtacg

SEQ ID NO: 18271 - DNA, 21 bp, Artificial Sequence
  source: /note="Description of Artificial Sequence: Synthetic oligonucleotide"
attaataggggggtgaatagt

SEQ ID NO: 18272 - DNA, 21 bp, Artificial Sequence
  source: /note="Description of Artificial Sequence: Synthetic oligonucleotide"
attaatcgtactacgatggag

SEQ ID NO: 18273 - DNA, 21 bp, Artificial Sequence
  source: /note="Description of Artificial Sequence: Synthetic oligonucleotide"
attaatcgtgtgactgcggag

SEQ ID NO: 18274 - DNA, 21 bp, Artificial Sequence
  source: /note="Description of Artificial Sequence: Synthetic oligonucleotide"
attaattcggcggctgttctt

SEQ ID NO: 18275 - DNA, 21 bp, Artificial Sequence
  source: /note="Description of Artificial Sequence: Synthetic oligonucleotide"
attaatagtgggaggtctaat

SEQ ID NO: 18276 - DNA, 21 bp, Artificial Sequence
  source: /note="Description of Artificial Sequence: Synthetic oligonucleotide"
attaattcgcatactcttcag

SEQ ID NO: 18277 - DNA, 21 bp, Artificial Sequence
  source: /note="Description of Artificial Sequence: Synthetic oligonucleotide"
attaattcgcagaagcctccg

SEQ ID NO: 18278 - DNA, 21 bp, Artificial Sequence
  source: /note="Description of Artificial Sequence: Synthetic oligonucleotide"
attaattctcggaatggtgtt

SEQ ID NO: 18279 - DNA, 21 bp, Artificial Sequence
  source: /note="Description of Artificial Sequence: Synthetic oligonucleotide"
attaatactcttggtaattcg

SEQ ID NO: 18280 - DNA, 21 bp, Artificial Sequence
  source: /note="Description of Artificial Sequence: Synthetic oligonucleotide"
attaatacgccggggtatacg

SEQ ID NO: 18281 - DNA, 21 bp, Artificial Sequence
  source: /note="Description of Artificial Sequence: Synthetic oligonucleotide"
attaatgttcttcgttcggcg

SEQ ID NO: 18282 - DNA, 21 bp, Artificial Sequence
  source: /note="Description of Artificial Sequence: Synthetic oligonucleotide"
attccggctaattctcaggtt

SEQ ID NO: 18283 - DNA, 21 bp, Artificial Sequence
  source: /note="Description of Artificial Sequence: Synthetic oligonucleotide"
attcctgcttcgtctagttgg

SEQ ID NO: 18284 - DNA, 21 bp, Artificial Sequence
  source: /note="Description of Artificial Sequence: Synthetic oligonucleotide"
attccggatttgaagcgtacg

SEQ ID NO: 18285 - DNA, 21 bp, Artificial Sequence
  source: /note="Description of Artificial Sequence: Synthetic oligonucleotide"
attcctgaggggctgccgctg

SEQ ID NO: 18286 - DNA, 21 bp, Artificial Sequence
  source: /note="Description of Artificial Sequence: Synthetic oligonucleotide"
attccggggtttccgaagagt

SEQ ID NO: 18287 - DNA, 21 bp, Artificial Sequence
  source: /note="Description of Artificial Sequence: Synthetic oligonucleotide"
attcctgggacggagctgcag

SEQ ID NO: 18288 - DNA, 21 bp, Artificial Sequence
  source: /note="Description of Artificial Sequence: Synthetic oligonucleotide"
attcctcataatcaggcttat

SEQ ID NO: 18289 - DNA, 21 bp, Artificial Sequence
  source: /note="Description of Artificial Sequence: Synthetic oligonucleotide"
attccgcatccggctaattct

SEQ ID NO: 18290 - DNA, 21 bp, Artificial Sequence
  source: /note="Description of Artificial Sequence: Synthetic oligonucleotide"
attcctcatactcagactcag

SEQ ID NO: 18291 - DNA, 21 bp, Artificial Sequence
  source: /note="Description of Artificial Sequence: Synthetic oligonucleotide"
attcctattggttataagacg

SEQ ID NO: 18292 - DNA, 21 bp, Artificial Sequence
  source: /note="Description of Artificial Sequence: Synthetic oligonucleotide"
attccgattaagaatgggatg

SEQ ID NO: 18293 - DNA, 21 bp, Artificial Sequence
  source: /note="Description of Artificial Sequence: Synthetic oligonucleotide"
attcctattcctgttgcgatg

SEQ ID NO: 18294 - DNA, 21 bp, Artificial Sequence
  source: /note="Description of Artificial Sequence: Synthetic oligonucleotide"
attcctaagacgcggccggag

SEQ ID NO: 18295 - DNA, 21 bp, Artificial Sequence
  source: /note="Description of Artificial Sequence: Synthetic oligonucleotide"
attccgcttaaggcttatggt

SEQ ID NO: 18296 - DNA, 21 bp, Artificial Sequence
  source: /note="Description of Artificial Sequence: Synthetic oligonucleotide"
attcctcttcctaatgatggt

SEQ ID NO: 18297 - DNA, 21 bp, Artificial Sequence
  source: /note="Description of Artificial Sequence: Synthetic oligonucleotide"
attcctctgacgagtcatact

SEQ ID NO: 18298 - DNA, 21 bp, Artificial Sequence
  source: /note="Description of Artificial Sequence: Synthetic oligonucleotide"
attccgatgagtgctgctaag

SEQ ID NO: 18299 - DNA, 21 bp, Artificial Sequence
  source: /note="Description of Artificial Sequence: Synthetic oligonucleotide"
attcctaattttgtgcattct

SEQ ID NO: 18300 - DNA, 21 bp, Artificial Sequence
  source: /note="Description of Artificial Sequence: Synthetic oligonucleotide"
attcctaatcataagagtatt

SEQ ID NO: 18301 - DNA, 21 bp, Artificial Sequence
  source: /note="Description of Artificial Sequence: Synthetic oligonucleotide"
attccgaataagacgccgttt

SEQ ID NO: 18302 - DNA, 21 bp, Artificial Sequence
  source: /note="Description of Artificial Sequence: Synthetic oligonucleotide"
attcctaatctgaagatttcg

SEQ ID NO: 18303 - DNA, 21 bp, Artificial Sequence
  source: /note="Description of Artificial Sequence: Synthetic oligonucleotide"
attcctaatcctcctatggct

SEQ ID NO: 18304 - DNA, 21 bp, Artificial Sequence
  source: /note="Description of Artificial Sequence: Synthetic oligonucleotide"
attccgaatcggcatctgtcg

SEQ ID NO: 18305 - DNA, 21 bp, Artificial Sequence
  source: /note="Description of Artificial Sequence: Synthetic oligonucleotide"
attcctaatgtttcgcatcag

SEQ ID NO: 18306 - DNA, 21 bp, Artificial Sequence
  source: /note="Description of Artificial Sequence: Synthetic oligonucleotide"
attcctaattatgcggttagt

SEQ ID NO: 18307 - DNA, 21 bp, Artificial Sequence
  source: /note="Description of Artificial Sequence: Synthetic oligonucleotide"
attcctccgaggtcgaattct

SEQ ID NO: 18308 - DNA, 21 bp, Artificial Sequence
  source: /note="Description of Artificial Sequence: Synthetic oligonucleotide"
attccgcaggcgagtcttatg

SEQ ID NO: 18309 - DNA, 21 bp, Artificial Sequence
  source: /note="Description of Artificial Sequence: Synthetic oligonucleotide"
attccgcagaatcgtattttg

SEQ ID NO: 18310 - DNA, 21 bp, Artificial Sequence
  source: /note="Description of Artificial Sequence: Synthetic oligonucleotide"
attccgcagccggttcatttg

SEQ ID NO: 18311 - DNA, 21 bp, Artificial Sequence
  source: /note="Description of Artificial Sequence: Synthetic oligonucleotide"
attccgcgtgcggatgctcgg

SEQ ID NO: 18312 - DNA, 21 bp, Artificial Sequence
  source: /note="Description of Artificial Sequence: Synthetic oligonucleotide"
attcctcggttttcgacgatg

SEQ ID NO: 18313 - DNA, 21 bp, Artificial Sequence
  source: /note="Description of Artificial Sequence: Synthetic oligonucleotide"
attccgcggccgtctgtgcat

SEQ ID NO: 18314 - DNA, 21 bp, Artificial Sequence
  source: /note="Description of Artificial Sequence: Synthetic oligonucleotide"
attcctaggtcgaatatttct

SEQ ID NO: 18315 - DNA, 21 bp, Artificial Sequence
  source: /note="Description of Artificial Sequence: Synthetic oligonucleotide"
attcctcggactgctttgcag

SEQ ID NO: 18316 - DNA, 21 bp, Artificial Sequence
  source: /note="Description of Artificial Sequence: Synthetic oligonucleotide"
attccgagttttaagcgtgag

SEQ ID NO: 18317 - DNA, 21 bp, Artificial Sequence
  source: /note="Description of Artificial Sequence: Synthetic oligonucleotide"
attccttcgttttctaagcct

SEQ ID NO: 18318 - DNA, 21 bp, Artificial Sequence
  source: /note="Description of Artificial Sequence: Synthetic oligonucleotide"
attccttctaattgtaagcct

SEQ ID NO: 18319 - DNA, 21 bp, Artificial Sequence
  source: /note="Description of Artificial Sequence: Synthetic oligonucleotide"
attccgagtccttctcatgag

SEQ ID NO: 18320 - DNA, 21 bp, Artificial Sequence
  source: /note="Description of Artificial Sequence: Synthetic oligonucleotide"
attccgtctcgttatgctatg

SEQ ID NO: 18321 - DNA, 21 bp, Artificial Sequence
  source: /note="Description of Artificial Sequence: Synthetic oligonucleotide"
attccgtctgtgccggtgtct

SEQ ID NO: 18322 - DNA, 21 bp, Artificial Sequence
  source: /note="Description of Artificial Sequence: Synthetic oligonucleotide"
attccgactatttcgcatggg

SEQ ID NO: 18323 - DNA, 21 bp, Artificial Sequence
  source: /note="Description of Artificial Sequence: Synthetic oligonucleotide"
attcctactctgcctgctatg

SEQ ID NO: 18324 - DNA, 21 bp, Artificial Sequence
  source: /note="Description of Artificial Sequence: Synthetic oligonucleotide"
attccgacgcctaataatgtt

SEQ ID NO: 18325 - DNA, 21 bp, Artificial Sequence
  source: /note="Description of Artificial Sequence: Synthetic oligonucleotide"
attcctactactgctttgggg

SEQ ID NO: 18326 - DNA, 21 bp, Artificial Sequence
  source: /note="Description of Artificial Sequence: Synthetic oligonucleotide"
attccggtttttcgttctgag

SEQ ID NO: 18327 - DNA, 21 bp, Artificial Sequence
  source: /note="Description of Artificial Sequence: Synthetic oligonucleotide"
attccggttggtcagtataat

SEQ ID NO: 18328 - DNA, 21 bp, Artificial Sequence
  source: /note="Description of Artificial Sequence: Synthetic oligonucleotide"
attcctgttaggctgacgcag

SEQ ID NO: 18329 - DNA, 21 bp, Artificial Sequence
  source: /note="Description of Artificial Sequence: Synthetic oligonucleotide"
attccttatatgcttgatcct

SEQ ID NO: 18330 - DNA, 21 bp, Artificial Sequence
  source: /note="Description of Artificial Sequence: Synthetic oligonucleotide"
attcaggctgtgtcgagtttg

SEQ ID NO: 18331 - DNA, 21 bp, Artificial Sequence
  source: /note="Description of Artificial Sequence: Synthetic oligonucleotide"
attcaggatgagacggtgtct

SEQ ID NO: 18332 - DNA, 21 bp, Artificial Sequence
  source: /note="Description of Artificial Sequence: Synthetic oligonucleotide"
attcaggagtcggctaggatg

SEQ ID NO: 18333 - DNA, 21 bp, Artificial Sequence
  source: /note="Description of Artificial Sequence: Synthetic oligonucleotide"
attcagtttaggtcggctacg

SEQ ID NO: 18334 - DNA, 21 bp, Artificial Sequence
  source: /note="Description of Artificial Sequence: Synthetic oligonucleotide"
attcagtttgtgcctgttgat

SEQ ID NO: 18335 - DNA, 21 bp, Artificial Sequence
  source: /note="Description of Artificial Sequence: Synthetic oligonucleotide"
attcagggtttgagtgcgctg

SEQ ID NO: 18336 - DNA, 21 bp, Artificial Sequence
  source: /note="Description of Artificial Sequence: Synthetic oligonucleotide"
attcaggggcgtcttacgact

SEQ ID NO: 18337 - DNA, 21 bp, Artificial Sequence
  source: /note="Description of Artificial Sequence: Synthetic oligonucleotide"
attcagcatcagccgctgact

SEQ ID NO: 18338 - DNA, 21 bp, Artificial Sequence
  source: /note="Description of Artificial Sequence: Synthetic oligonucleotide"
attcagattaagtctcttaat

SEQ ID NO: 18339 - DNA, 21 bp, Artificial Sequence
  source: /note="Description of Artificial Sequence: Synthetic oligonucleotide"
attcagattcaggagaggcgt

SEQ ID NO: 18340 - DNA, 21 bp, Artificial Sequence
  source: /note="Description of Artificial Sequence: Synthetic oligonucleotide"
attcagttgaagagtactgtt

SEQ ID NO: 18341 - DNA, 21 bp, Artificial Sequence
  source: /note="Description of Artificial Sequence: Synthetic oligonucleotide"
attcagcttaggattaatgct

SEQ ID NO: 18342 - DNA, 21 bp, Artificial Sequence
  source: /note="Description of Artificial Sequence: Synthetic oligonucleotide"
attcagctttcggctgcttcg

SEQ ID NO: 18343 - DNA, 21 bp, Artificial Sequence
  source: /note="Description of Artificial Sequence: Synthetic oligonucleotide"
attcagaatggttatcagttt

SEQ ID NO: 18344 - DNA, 21 bp, Artificial Sequence
  source: /note="Description of Artificial Sequence: Synthetic oligonucleotide"
attcagaatcatcatcagttg

SEQ ID NO: 18345 - DNA, 21 bp, Artificial Sequence
  source: /note="Description of Artificial Sequence: Synthetic oligonucleotide"
attcagaatactcctccgact

SEQ ID NO: 18346 - DNA, 21 bp, Artificial Sequence
  source: /note="Description of Artificial Sequence: Synthetic oligonucleotide"
attcagaatgtgcctttgcat

SEQ ID NO: 18347 - DNA, 21 bp, Artificial Sequence
  source: /note="Description of Artificial Sequence: Synthetic oligonucleotide"
attcagcggccgagtgatatt

SEQ ID NO: 18348 - DNA, 21 bp, Artificial Sequence
  source: /note="Description of Artificial Sequence: Synthetic oligonucleotide"
attcagcgttcggttgaggcg

SEQ ID NO: 18349 - DNA, 21 bp, Artificial Sequence
  source: /note="Description of Artificial Sequence: Synthetic oligonucleotide"
attcagcgggtggctcagggg

SEQ ID NO: 18350 - DNA, 21 bp, Artificial Sequence
  source: /note="Description of Artificial Sequence: Synthetic oligonucleotide"
attcagagtattaatcttccg

SEQ ID NO: 18351 - DNA, 21 bp, Artificial Sequence
  source: /note="Description of Artificial Sequence: Synthetic oligonucleotide"
attcagagtccgctgttggcg

SEQ ID NO: 18352 - DNA, 21 bp, Artificial Sequence
  source: /note="Description of Artificial Sequence: Synthetic oligonucleotide"
attcagtctactaggctggtg

SEQ ID NO: 18353 - DNA, 21 bp, Artificial Sequence
  source: /note="Description of Artificial Sequence: Synthetic oligonucleotide"
attcagtcgtataatactttg

SEQ ID NO: 18354 - DNA, 21 bp, Artificial Sequence
  source: /note="Description of Artificial Sequence: Synthetic oligonucleotide"
attcagactcgtagtgatatg

SEQ ID NO: 18355 - DNA, 21 bp, Artificial Sequence
  source: /note="Description of Artificial Sequence: Synthetic oligonucleotide"
attcagacggtttcggctgtg

SEQ ID NO: 18356 - DNA, 21 bp, Artificial Sequence
  source: /note="Description of Artificial Sequence: Synthetic oligonucleotide"
attcgtgctctggctgggcat

SEQ ID NO: 18357 - DNA, 21 bp, Artificial Sequence
  source: /note="Description of Artificial Sequence: Synthetic oligonucleotide"
attagggcttctcagactatt

SEQ ID NO: 18358 - DNA, 21 bp, Artificial Sequence
  source: /note="Description of Artificial Sequence: Synthetic oligonucleotide"
attcgggcgacgtcttcggag

SEQ ID NO: 18359 - DNA, 21 bp, Artificial Sequence
  source: /note="Description of Artificial Sequence: Synthetic oligonucleotide"
attcgggatgtgcatgtggtt

SEQ ID NO: 18360 - DNA, 21 bp, Artificial Sequence
  source: /note="Description of Artificial Sequence: Synthetic oligonucleotide"
attagggagccgacggctatg

SEQ ID NO: 18361 - DNA, 21 bp, Artificial Sequence
  source: /note="Description of Artificial Sequence: Synthetic oligonucleotide"
attaggggggcgttgggtatt

SEQ ID NO: 18362 - DNA, 21 bp, Artificial Sequence
  source: /note="Description of Artificial Sequence: Synthetic oligonucleotide"
attcggggtaattttctgtct

SEQ ID NO: 18363 - DNA, 21 bp, Artificial Sequence
  source: /note="Description of Artificial Sequence: Synthetic oligonucleotide"
attcgtggtactcctgcgttt

SEQ ID NO: 18364 - DNA, 21 bp, Artificial Sequence
  source: /note="Description of Artificial Sequence: Synthetic oligonucleotide"
attaggcatgggattgctgct

SEQ ID NO: 18365 - DNA, 21 bp, Artificial Sequence
  source: /note="Description of Artificial Sequence: Synthetic oligonucleotide"
attaggattcctgagctgccg

SEQ ID NO: 18366 - DNA, 21 bp, Artificial Sequence
  source: /note="Description of Artificial Sequence: Synthetic oligonucleotide"
attcgtattccgatgactcct

SEQ ID NO: 18367 - DNA, 21 bp, Artificial Sequence
  source: /note="Description of Artificial Sequence: Synthetic oligonucleotide"
attaggaagtcgccgaatgag

SEQ ID NO: 18368 - DNA, 21 bp, Artificial Sequence
  source: /note="Description of Artificial Sequence: Synthetic oligonucleotide"
attcgtctggagtattcggcg

SEQ ID NO: 18369 - DNA, 21 bp, Artificial Sequence
  source: /note="Description of Artificial Sequence: Synthetic oligonucleotide"
attcgtttggggtcttttgct

SEQ ID NO: 18370 - DNA, 21 bp, Artificial Sequence
  source: /note="Description of Artificial Sequence: Synthetic oligonucleotide"
attcggcttcagaattctatt

SEQ ID NO: 18371 - DNA, 21 bp, Artificial Sequence
  source: /note="Description of Artificial Sequence: Synthetic oligonucleotide"
attcgtctttctgataaggct

SEQ ID NO: 18372 - DNA, 21 bp, Artificial Sequence
  source: /note="Description of Artificial Sequence: Synthetic oligonucleotide"
attcggatgagtacgcagctt

SEQ ID NO: 18373 - DNA, 21 bp, Artificial Sequence
  source: /note="Description of Artificial Sequence: Synthetic oligonucleotide"
attcggaatggtagtgatgat

SEQ ID NO: 18374 - DNA, 21 bp, Artificial Sequence
  source: /note="Description of Artificial Sequence: Synthetic oligonucleotide"
attcgtaatattattgatttt

SEQ ID NO: 18375 - DNA, 21 bp, Artificial Sequence
  source: /note="Description of Artificial Sequence: Synthetic oligonucleotide"
attaggcctctgaatatgcct

SEQ ID NO: 18376 - DNA, 21 bp, Artificial Sequence
  source: /note="Description of Artificial Sequence: Synthetic oligonucleotide"
attcgtcctactgaggggatg

SEQ ID NO: 18377 - DNA, 21 bp, Artificial Sequence
  source: /note="Description of Artificial Sequence: Synthetic oligonucleotide"
attaggcaggagtgtcgtatt

SEQ ID NO: 18378 - DNA, 21 bp, Artificial Sequence
  source: /note="Description of Artificial Sequence: Synthetic oligonucleotide"
attaggcagattccgtatgct

SEQ ID NO: 18379 - DNA, 21 bp, Artificial Sequence
  source: /note="Description of Artificial Sequence: Synthetic oligonucleotide"
attcgtcagagttcggttaat

SEQ ID NO: 18380 - DNA, 21 bp, Artificial Sequence
  source: /note="Description of Artificial Sequence: Synthetic oligonucleotide"
attcggagtggtcagccgctg

SEQ ID NO: 18381 - DNA, 21 bp, Artificial Sequence
  source: /note="Description of Artificial Sequence: Synthetic oligonucleotide"
attcgttctattactgatacg

SEQ ID NO: 18382 - DNA, 21 bp, Artificial Sequence
  source: /note="Description of Artificial Sequence: Synthetic oligonucleotide"
attcggagtcttgcgactgcg

SEQ ID NO: 18383 - DNA, 21 bp, Artificial Sequence
  source: /note="Description of Artificial Sequence: Synthetic oligonucleotide"
attcggagtcctcttcctagt

SEQ ID NO: 18384 - DNA, 21 bp, Artificial Sequence
  source: /note="Description of Artificial Sequence: Synthetic oligonucleotide"
attcgtagtagtggtatgatg

SEQ ID NO: 18385 - DNA, 21 bp, Artificial Sequence
  source: /note="Description of Artificial Sequence: Synthetic oligonucleotide"
attaggtcttctcctccgacg

SEQ ID NO: 18386 - DNA, 21 bp, Artificial Sequence
  source: /note="Description of Artificial Sequence: Synthetic oligonucleotide"
attaggtcggttagtgaggtt

SEQ ID NO: 18387 - DNA, 21 bp, Artificial Sequence
  source: /note="Description of Artificial Sequence: Synthetic oligonucleotide"
attaggacgcttggtagtact

SEQ ID NO: 18388 - DNA, 21 bp, Artificial Sequence
  source: /note="Description of Artificial Sequence: Synthetic oligonucleotide"
attcgtacgacggcggctttt

SEQ ID NO: 18389 - DNA, 21 bp, Artificial Sequence
  source: /note="Description of Artificial Sequence: Synthetic oligonucleotide"
attagggtggagaatgagctg

SEQ ID NO: 18390 - DNA, 21 bp, Artificial Sequence
  source: /note="Description of Artificial Sequence: Synthetic oligonucleotide"
attcgggttaatgatactggg

SEQ ID NO: 18391 - DNA, 21 bp, Artificial Sequence
  source: /note="Description of Artificial Sequence: Synthetic oligonucleotide"
attcgggtgccgacgagttcg

SEQ ID NO: 18392 - DNA, 21 bp, Artificial Sequence
  source: /note="Description of Artificial Sequence: Synthetic oligonucleotide"
attcgggtttctgcgattcat

SEQ ID NO: 18393 - DNA, 21 bp, Artificial Sequence
  source: /note="Description of Artificial Sequence: Synthetic oligonucleotide"
atttctgctgctagtcgtgcg

SEQ ID NO: 18394 - DNA, 21 bp, Artificial Sequence
  source: /note="Description of Artificial Sequence: Synthetic oligonucleotide"
attagtgctgcggttatggct

SEQ ID NO: 18395 - DNA, 21 bp, Artificial Sequence
  source: /note="Description of Artificial Sequence: Synthetic oligonucleotide"
attagtgctgggccgatgccg

SEQ ID NO: 18396 - DNA, 21 bp, Artificial Sequence
  source: /note="Description of Artificial Sequence: Synthetic oligonucleotide"
atttctgcgatttctgctcag

SEQ ID NO: 18397 - DNA, 21 bp, Artificial Sequence
  source: /note="Description of Artificial Sequence: Synthetic oligonucleotide"
atttctgctaatatgtttagt

SEQ ID NO: 18398 - DNA, 21 bp, Artificial Sequence
  source: /note="Description of Artificial Sequence: Synthetic oligonucleotide"
atttctgctcgtcctacgatt

SEQ ID NO: 18399 - DNA, 21 bp, Artificial Sequence
  source: /note="Description of Artificial Sequence: Synthetic oligonucleotide"
attagtgcgtcgcatagtagt

SEQ ID NO: 18400 - DNA, 21 bp, Artificial Sequence
  source: /note="Description of Artificial Sequence: Synthetic oligonucleotide"
atttctgctactacgtcgtct

SEQ ID NO: 18401 - DNA, 21 bp, Artificial Sequence
  source: /note="Description of Artificial Sequence: Synthetic oligonucleotide"
atttcggatcagcagtatacg

SEQ ID NO: 18402 - DNA, 21 bp, Artificial Sequence
  source: /note="Description of Artificial Sequence: Synthetic oligonucleotide"
atttcggagtgtgttgggggt

SEQ ID NO: 18403 - DNA, 21 bp, Artificial Sequence
  source: /note="Description of Artificial Sequence: Synthetic oligonucleotide"
atttctgagcatattatgagt

SEQ ID NO: 18404 - DNA, 21 bp, Artificial Sequence
  source: /note="Description of Artificial Sequence: Synthetic oligonucleotide"
attagtgagcctactagtgtg

SEQ ID NO: 18405 - DNA, 21 bp, Artificial Sequence
  source: /note="Description of Artificial Sequence: Synthetic oligonucleotide"
attagtgagagttctcgttat

SEQ ID NO: 18406 - DNA, 21 bp, Artificial Sequence
  source: /note="Description of Artificial Sequence: Synthetic oligonucleotide"
atttcttttcggattgagaat

SEQ ID NO: 18407 - DNA, 21 bp, Artificial Sequence
  source: /note="Description of Artificial Sequence: Synthetic oligonucleotide"
atttctggtgcggttgatcgt

SEQ ID NO: 18408 - DNA, 21 bp, Artificial Sequence
  source: /note="Description of Artificial Sequence: Synthetic oligonucleotide"
attagtggtaagttggcgact

SEQ ID NO: 18409 - DNA, 21 bp, Artificial Sequence
  source: /note="Description of Artificial Sequence: Synthetic oligonucleotide"
attagtggtaatccgaatgct

SEQ ID NO: 18410 - DNA, 21 bp, Artificial Sequence
  source: /note="Description of Artificial Sequence: Synthetic oligonucleotide"
atttctgggccgcctactccg

SEQ ID NO: 18411 - DNA, 21 bp, Artificial Sequence
  source: /note="Description of Artificial Sequence: Synthetic oligonucleotide"
atttcgggtcggaatgcgact

SEQ ID NO: 18412 - DNA, 21 bp, Artificial Sequence
  source: /note="Description of Artificial Sequence: Synthetic oligonucleotide"
atttcgcattcggataatgcg

SEQ ID NO: 18413 - DNA, 21 bp, Artificial Sequence
  source: /note="Description of Artificial Sequence: Synthetic oligonucleotide"
atttctattcagctgcgtgat

SEQ ID NO: 18414 - DNA, 21 bp, Artificial Sequence
  source: /note="Description of Artificial Sequence: Synthetic oligonucleotide"
attagtattaggacggggcct

SEQ ID NO: 18415 - DNA, 21 bp, Artificial Sequence
  source: /note="Description of Artificial Sequence: Synthetic oligonucleotide"
attagtaaggcggaggcgatt

SEQ ID NO: 18416 - DNA, 21 bp, Artificial Sequence
  source: /note="Description of Artificial Sequence: Synthetic oligonucleotide"
atttcgaaggcgtatcctaat

SEQ ID NO: 18417 - DNA, 21 bp, Artificial Sequence
  source: /note="Description of Artificial Sequence: Synthetic oligonucleotide"
attagtaaggatggtgctgtg

SEQ ID NO: 18418 - DNA, 21 bp, Artificial Sequence
  source: /note="Description of Artificial Sequence: Synthetic oligonucleotide"
atttcgaaggataatgctctg

SEQ ID NO: 18419 - DNA, 21 bp, Artificial Sequence
  source: /note="Description of Artificial Sequence: Synthetic oligonucleotide"
atttctaagcttaatggtccg

SEQ ID NO: 18420 - DNA, 21 bp, Artificial Sequence
  source: /note="Description of Artificial Sequence: Synthetic oligonucleotide"
atttcgaagtcttataatggg

SEQ ID NO: 18421 - DNA, 21 bp, Artificial Sequence
  source: /note="Description of Artificial Sequence: Synthetic oligonucleotide"
atttcgttggatcggcattct

SEQ ID NO: 18422 - DNA, 21 bp, Artificial Sequence
  source: /note="Description of Artificial Sequence: Synthetic oligonucleotide"
attagtcttttgcgtaatact

SEQ ID NO: 18423 - DNA, 21 bp, Artificial Sequence
  source: /note="Description of Artificial Sequence: Synthetic oligonucleotide"
atttctttgcagacttcgctg

SEQ ID NO: 18424 - DNA, 21 bp, Artificial Sequence
  source: /note="Description of Artificial Sequence: Synthetic oligonucleotide"
attagtcttcggtttaatgat

SEQ ID NO: 18425 - DNA, 21 bp, Artificial Sequence
  source: /note="Description of Artificial Sequence: Synthetic oligonucleotide"
attagtctgtctgctctggct

SEQ ID NO: 18426 - DNA, 21 bp, Artificial Sequence
  source: /note="Description of Artificial Sequence: Synthetic oligonucleotide"
atttcgatgaagccgatttct

SEQ ID NO: 18427 - DNA, 21 bp, Artificial Sequence
  source: /note="Description of Artificial Sequence: Synthetic oligonucleotide"
atttctatgcttcgtccgact

SEQ ID NO: 18428 - DNA, 21 bp, Artificial Sequence
  source: /note="Description of Artificial Sequence: Synthetic oligonucleotide"
attagtatgactgttcattct

SEQ ID NO: 18429 - DNA, 21 bp, Artificial Sequence
  source: /note="Description of Artificial Sequence: Synthetic oligonucleotide"
atttcgatggttcggcagggg

SEQ ID NO: 18430 - DNA, 21 bp, Artificial Sequence
  source: /note="Description of Artificial Sequence: Synthetic oligonucleotide"
atttctaatgcgatgactcag

SEQ ID NO: 18431 - DNA, 21 bp, Artificial Sequence
  source: /note="Description of Artificial Sequence: Synthetic oligonucleotide"
atttcgaatgggcgtgctgtt

SEQ ID NO: 18432 - DNA, 21 bp, Artificial Sequence
  source: /note="Description of Artificial Sequence: Synthetic oligonucleotide"
attagtaatagtcggtcgacg

SEQ ID NO: 18433 - DNA, 21 bp, Artificial Sequence
  source: /note="Description of Artificial Sequence: Synthetic oligonucleotide"
atttcgaattcgagtccgtct

SEQ ID NO: 18434 - DNA, 21 bp, Artificial Sequence
  source: /note="Description of Artificial Sequence: Synthetic oligonucleotide"
attagtaatgtgcagcttgcg

SEQ ID NO: 18435 - DNA, 21 bp, Artificial Sequence
  source: /note="Description of Artificial Sequence: Synthetic oligonucleotide"
atttctccggcgccttttccg

SEQ ID NO: 18436 - DNA, 21 bp, Artificial Sequence
  source: /note="Description of Artificial Sequence: Synthetic oligonucleotide"
attagtccggatccgatgttg

SEQ ID NO: 18437 - DNA, 21 bp, Artificial Sequence
  source: /note="Description of Artificial Sequence: Synthetic oligonucleotide"
atttcgccgtttacggttgag

SEQ ID NO: 18438 - DNA, 21 bp, Artificial Sequence
  source: /note="Description of Artificial Sequence: Synthetic oligonucleotide"
atttctccgcgtgatgttagt

SEQ ID NO: 18439 - DNA, 21 bp, Artificial Sequence
  source: /note="Description of Artificial Sequence: Synthetic oligonucleotide"
atttctcctaggaaggctacg

SEQ ID NO: 18440 - DNA, 21 bp, Artificial Sequence
  source: /note="Description of Artificial Sequence: Synthetic oligonucleotide"
attagtccgaggaataattct

SEQ ID NO: 18441 - DNA, 21 bp, Artificial Sequence
  source: /note="Description of Artificial Sequence: Synthetic oligonucleotide"
attagtcctcggtatcctcat

SEQ ID NO: 18442 - DNA, 21 bp, Artificial Sequence
  source: /note="Description of Artificial Sequence: Synthetic oligonucleotide"
atttcgccgtctggtccggct

SEQ ID NO: 18443 - DNA, 21 bp, Artificial Sequence
  source: /note="Description of Artificial Sequence: Synthetic oligonucleotide"
atttcgccggtgcggaatgtg

SEQ ID NO: 18444 - DNA, 21 bp, Artificial Sequence
  source: /note="Description of Artificial Sequence: Synthetic oligonucleotide"
attagtccttatgagaatgcg

SEQ ID NO: 18445 - DNA, 21 bp, Artificial Sequence
  source: /note="Description of Artificial Sequence: Synthetic oligonucleotide"
atttcgccttatcgggttagt

SEQ ID NO: 18446 - DNA, 21 bp, Artificial Sequence
  source: /note="Description of Artificial Sequence: Synthetic oligonucleotide"
atttctcagcagcggcttaag

SEQ ID NO: 18447 - DNA, 21 bp, Artificial Sequence
  source: /note="Description of Artificial Sequence: Synthetic oligonucleotide"
atttcgcagcgttggcctgat

SEQ ID NO: 18448 - DNA, 21 bp, Artificial Sequence
  source: /note="Description of Artificial Sequence: Synthetic oligonucleotide"
attagtcagacgaggtatgat

SEQ ID NO: 18449 - DNA, 21 bp, Artificial Sequence
  source: /note="Description of Artificial Sequence: Synthetic oligonucleotide"
atttctcgtgatactgttatg

SEQ ID NO: 18450 - DNA, 21 bp, Artificial Sequence
  source: /note="Description of Artificial Sequence: Synthetic oligonucleotide"
attagtaggctggtttcttcg

SEQ ID NO: 18451 - DNA, 21 bp, Artificial Sequence
  source: /note="Description of Artificial Sequence: Synthetic oligonucleotide"
attagtcgtagtaatattatt

SEQ ID NO: 18452 - DNA, 21 bp, Artificial Sequence
  source: /note="Description of Artificial Sequence: Synthetic oligonucleotide"
atttcgcgggtggttacgatg

SEQ ID NO: 18453 - DNA, 21 bp, Artificial Sequence
  source: /note="Description of Artificial Sequence: Synthetic oligonucleotide"
atttcgtcggcttttgctccg

SEQ ID NO: 18454 - DNA, 21 bp, Artificial Sequence
  source: /note="Description of Artificial Sequence: Synthetic oligonucleotide"
atttctagtcattgtatggct

SEQ ID NO: 18455 - DNA, 21 bp, Artificial Sequence
  source: /note="Description of Artificial Sequence: Synthetic oligonucleotide"
atttctagtaagcttgttagt

SEQ ID NO: 18456 - DNA, 21 bp, Artificial Sequence
  source: /note="Description of Artificial Sequence: Synthetic oligonucleotide"
atttcgtcgaatccgactgtt

SEQ ID NO: 18457 - DNA, 21 bp, Artificial Sequence
  source: /note="Description of Artificial Sequence: Synthetic oligonucleotide"
atttcgtcttcggctactttg

SEQ ID NO: 18458 - DNA, 21 bp, Artificial Sequence
  source: /note="Description of Artificial Sequence: Synthetic oligonucleotide"
attagttctactaatacggct

SEQ ID NO: 18459 - DNA, 21 bp, Artificial Sequence
  source: /note="Description of Artificial Sequence: Synthetic oligonucleotide"
attagtagtacggttgagatt

SEQ ID NO: 18460 - DNA, 21 bp, Artificial Sequence
  source: /note="Description of Artificial Sequence: Synthetic oligonucleotide"
atttcgtcggtgcagaatcct

SEQ ID NO: 18461 - DNA, 21 bp, Artificial Sequence
  source: /note="Description of Artificial Sequence: Synthetic oligonucleotide"
atttcgacgcatctgaagagt

SEQ ID NO: 18462 - DNA, 21 bp, Artificial Sequence
  source: /note="Description of Artificial Sequence: Synthetic oligonucleotide"
atttctactcatacgaagagt

SEQ ID NO: 18463 - DNA, 21 bp, Artificial Sequence
  source: /note="Description of Artificial Sequence: Synthetic oligonucleotide"
atttctactaatgtgaggtct

SEQ ID NO: 18464 - DNA, 21 bp, Artificial Sequence
  source: /note="Description of Artificial Sequence: Synthetic oligonucleotide"
atttcgacgcgtaatcctgag

SEQ ID NO: 18465 - DNA, 21 bp, Artificial Sequence
  source: /note="Description of Artificial Sequence: Synthetic oligonucleotide"
atttctacgagtcagcagcat

SEQ ID NO: 18466 - DNA, 21 bp, Artificial Sequence
  source: /note="Description of Artificial Sequence: Synthetic oligonucleotide"
atttctacgacgacggtgccg

SEQ ID NO: 18467 - DNA, 21 bp, Artificial Sequence
  source: /note="Description of Artificial Sequence: Synthetic oligonucleotide"
atttctacggttttggtggat

SEQ ID NO: 18468 - DNA, 21 bp, Artificial Sequence
  source: /note="Description of Artificial Sequence: Synthetic oligonucleotide"
attagtacgtgggagtatgag

SEQ ID NO: 18469 - DNA, 21 bp, Artificial Sequence
  source: /note="Description of Artificial Sequence: Synthetic oligonucleotide"
atttctacgtggcgtcctact

SEQ ID NO: 18470 - DNA, 21 bp, Artificial Sequence
  source: /note="Description of Artificial Sequence: Synthetic oligonucleotide"
atttcggttaagggtcagcct

SEQ ID NO: 18471 - DNA, 21 bp, Artificial Sequence
  source: /note="Description of Artificial Sequence: Synthetic oligonucleotide"
atttcggtgtcgcagacggat

SEQ ID NO: 18472 - DNA, 21 bp, Artificial Sequence
  source: /note="Description of Artificial Sequence: Synthetic oligonucleotide"
atttcggttacttcttctagt

SEQ ID NO: 18473 - DNA, 21 bp, Artificial Sequence
  source: /note="Description of Artificial Sequence: Synthetic oligonucleotide"
atttcgtatggtacgaggagt

SEQ ID NO: 18474 - DNA, 21 bp, Artificial Sequence
  source: /note="Description of Artificial Sequence: Synthetic oligonucleotide"
atttcttataatgctaaggtt

SEQ ID NO: 18475 - DNA, 21 bp, Artificial Sequence
  source: /note="Description of Artificial Sequence: Synthetic oligonucleotide"
attagttatccgaagccggtt

SEQ ID NO: 18476 - DNA, 21 bp, Artificial Sequence
  source: /note="Description of Artificial Sequence: Synthetic oligonucleotide"
attactgctcctcattcgatg

SEQ ID NO: 18477 - DNA, 21 bp, Artificial Sequence
  source: /note="Description of Artificial Sequence: Synthetic oligonucleotide"
attactgctcgtgtgaatgct

SEQ ID NO: 18478 - DNA, 21 bp, Artificial Sequence
  source: /note="Description of Artificial Sequence: Synthetic oligonucleotide"
attacggctcgttatccgacg

SEQ ID NO: 18479 - DNA, 21 bp, Artificial Sequence
  source: /note="Description of Artificial Sequence: Synthetic oligonucleotide"
attacggcgtcgggtttggtt

SEQ ID NO: 18480 - DNA, 21 bp, Artificial Sequence
  source: /note="Description of Artificial Sequence: Synthetic oligonucleotide"
attactgctactcagcgtatg

SEQ ID NO: 18481 - DNA, 21 bp, Artificial Sequence
  source: /note="Description of Artificial Sequence: Synthetic oligonucleotide"
attacggatgctgcgaatcct

SEQ ID NO: 18482 - DNA, 21 bp, Artificial Sequence
  source: /note="Description of Artificial Sequence: Synthetic oligonucleotide"
attactgatagggttgcgatt

SEQ ID NO: 18483 - DNA, 21 bp, Artificial Sequence
  source: /note="Description of Artificial Sequence: Synthetic oligonucleotide"
attactgagaggtcttgtact

SEQ ID NO: 18484 - DNA, 21 bp, Artificial Sequence
  source: /note="Description of Artificial Sequence: Synthetic oligonucleotide"
attacggaggttaagcgtggg

SEQ ID NO: 18485 - DNA, 21 bp, Artificial Sequence
  source: /note="Description of Artificial Sequence: Synthetic oligonucleotide"
attacgtttgatcatgttact

SEQ ID NO: 18486 - DNA, 21 bp, Artificial Sequence
  source: /note="Description of Artificial Sequence: Synthetic oligonucleotide"
attactttttctggttcttcg

SEQ ID NO: 18487 - DNA, 21 bp, Artificial Sequence
  source: /note="Description of Artificial Sequence: Synthetic oligonucleotide"
attactggtgatcttaatggg

SEQ ID NO: 18488 - DNA, 21 bp, Artificial Sequence
  source: /note="Description of Artificial Sequence: Synthetic oligonucleotide"
attacgggtgggcggccgggt

SEQ ID NO: 18489 - DNA, 21 bp, Artificial Sequence
  source: /note="Description of Artificial Sequence: Synthetic oligonucleotide"
attactggtaatcggactcct

SEQ ID NO: 18490 - DNA, 21 bp, Artificial Sequence
  source: /note="Description of Artificial Sequence: Synthetic oligonucleotide"
attactgggtctaatcgtgat

SEQ ID NO: 18491 - DNA, 21 bp, Artificial Sequence
  source: /note="Description of Artificial Sequence: Synthetic oligonucleotide"
attacgcatgcgtcgtcggat

SEQ ID NO: 18492 - DNA, 21 bp, Artificial Sequence
  source: /note="Description of Artificial Sequence: Synthetic oligonucleotide"
attactcatattcgtcttgat

SEQ ID NO: 18493 - DNA, 21 bp, Artificial Sequence
  source: /note="Description of Artificial Sequence: Synthetic oligonucleotide"
attacgcatagtattcagcgg

SEQ ID NO: 18494 - DNA, 21 bp, Artificial Sequence
  source: /note="Description of Artificial Sequence: Synthetic oligonucleotide"
attactcttgggtctactggg

SEQ ID NO: 18495 - DNA, 21 bp, Artificial Sequence
  source: /note="Description of Artificial Sequence: Synthetic oligonucleotide"
attactcttagtagtcagggg

SEQ ID NO: 18496 - DNA, 21 bp, Artificial Sequence
  source: /note="Description of Artificial Sequence: Synthetic oligonucleotide"
attactctgtatcctaatagt

SEQ ID NO: 18497 - DNA, 21 bp, Artificial Sequence
  source: /note="Description of Artificial Sequence: Synthetic oligonucleotide"
attactatgttggctggtgat

SEQ ID NO: 18498 - DNA, 21 bp, Artificial Sequence
  source: /note="Description of Artificial Sequence: Synthetic oligonucleotide"
attactaatgatcgtacggtg

SEQ ID NO: 18499 - DNA, 21 bp, Artificial Sequence
  source: /note="Description of Artificial Sequence: Synthetic oligonucleotide"
attacgaatgagcctcctcgt

SEQ ID NO: 18500 - DNA, 21 bp, Artificial Sequence
  source: /note="Description of Artificial Sequence: Synthetic oligonucleotide"
attactcctcttacggcgggt

SEQ ID NO: 18501 - DNA, 21 bp, Artificial Sequence
  source: /note="Description of Artificial Sequence: Synthetic oligonucleotide"
attactcctatgtctattgtg

SEQ ID NO: 18502 - DNA, 21 bp, Artificial Sequence
  source: /note="Description of Artificial Sequence: Synthetic oligonucleotide"
attacgccgtcgcatgggtct

SEQ ID NO: 18503 - DNA, 21 bp, Artificial Sequence
  source: /note="Description of Artificial Sequence: Synthetic oligonucleotide"
attactcctgttcatgcggag

SEQ ID NO: 18504 - DNA, 21 bp, Artificial Sequence
  source: /note="Description of Artificial Sequence: Synthetic oligonucleotide"
attacgccgtatgtgaggggg

SEQ ID NO: 18505 - DNA, 21 bp, Artificial Sequence
  source: /note="Description of Artificial Sequence: Synthetic oligonucleotide"
attactcagcctcatgcgaag

SEQ ID NO: 18506 - DNA, 21 bp, Artificial Sequence
  source: /note="Description of Artificial Sequence: Synthetic oligonucleotide"
attactaggctgaagcttgat

SEQ ID NO: 18507 - DNA, 21 bp, Artificial Sequence
  source: /note="Description of Artificial Sequence: Synthetic oligonucleotide"
attacgcggtcggtggctcct

SEQ ID NO: 18508 - DNA, 21 bp, Artificial Sequence
  source: /note="Description of Artificial Sequence: Synthetic oligonucleotide"
attacgagtgcggatcctcag

SEQ ID NO: 18509 - DNA, 21 bp, Artificial Sequence
  source: /note="Description of Artificial Sequence: Synthetic oligonucleotide"
attacttctaagactcaggct

SEQ ID NO: 18510 - DNA, 21 bp, Artificial Sequence
  source: /note="Description of Artificial Sequence: Synthetic oligonucleotide"
attacgtctcctaggttgcag

SEQ ID NO: 18511 - DNA, 21 bp, Artificial Sequence
  source: /note="Description of Artificial Sequence: Synthetic oligonucleotide"
attacttcgacgctgccgccg

SEQ ID NO: 18512 - DNA, 21 bp, Artificial Sequence
  source: /note="Description of Artificial Sequence: Synthetic oligonucleotide"
attacttctacgcgtgcgtcg

SEQ ID NO: 18513 - DNA, 21 bp, Artificial Sequence
  source: /note="Description of Artificial Sequence: Synthetic oligonucleotide"
attactagtgtggataggctt

SEQ ID NO: 18514 - DNA, 21 bp, Artificial Sequence
  source: /note="Description of Artificial Sequence: Synthetic oligonucleotide"
attacgagtgttcctgtttct

SEQ ID NO: 18515 - DNA, 21 bp, Artificial Sequence
  source: /note="Description of Artificial Sequence: Synthetic oligonucleotide"
attacgactaagtattctcag

SEQ ID NO: 18516 - DNA, 21 bp, Artificial Sequence
  source: /note="Description of Artificial Sequence: Synthetic oligonucleotide"
attacgactctggggcctact

SEQ ID NO: 18517 - DNA, 21 bp, Artificial Sequence
  source: /note="Description of Artificial Sequence: Synthetic oligonucleotide"
attacgacgaattctgggagg

SEQ ID NO: 18518 - DNA, 21 bp, Artificial Sequence
  source: /note="Description of Artificial Sequence: Synthetic oligonucleotide"
attactactcctgcggagcag

SEQ ID NO: 18519 - DNA, 21 bp, Artificial Sequence
  source: /note="Description of Artificial Sequence: Synthetic oligonucleotide"
attacgactcgtgagactacg

SEQ ID NO: 18520 - DNA, 21 bp, Artificial Sequence
  source: /note="Description of Artificial Sequence: Synthetic oligonucleotide"
attactacttctgatagggcg

SEQ ID NO: 18521 - DNA, 21 bp, Artificial Sequence
  source: /note="Description of Artificial Sequence: Synthetic oligonucleotide"
attacgacttataatgagaat

SEQ ID NO: 18522 - DNA, 21 bp, Artificial Sequence
  source: /note="Description of Artificial Sequence: Synthetic oligonucleotide"
attactgtgccgcatcattat

SEQ ID NO: 18523 - DNA, 21 bp, Artificial Sequence
  source: /note="Description of Artificial Sequence: Synthetic oligonucleotide"
attactgtttctcgggcggat

SEQ ID NO: 18524 - DNA, 21 bp, Artificial Sequence
  source: /note="Description of Artificial Sequence: Synthetic oligonucleotide"
attacgtatcagaatgcggag

SEQ ID NO: 18525 - DNA, 21 bp, Artificial Sequence
  source: /note="Description of Artificial Sequence: Synthetic oligonucleotide"
attgttgctacttgtactgcg

SEQ ID NO: 18526 - DNA, 21 bp, Artificial Sequence
  source: /note="Description of Artificial Sequence: Synthetic oligonucleotide"
attgttgaggctagtattatt

SEQ ID NO: 18527 - DNA, 21 bp, Artificial Sequence
  source: /note="Description of Artificial Sequence: Synthetic oligonucleotide"
attgttgaggggcttggggat

SEQ ID NO: 18528 - DNA, 21 bp, Artificial Sequence
  source: /note="Description of Artificial Sequence: Synthetic oligonucleotide"
attgttgagacttatcttacg

SEQ ID NO: 18529 - DNA, 21 bp, Artificial Sequence
  source: /note="Description of Artificial Sequence: Synthetic oligonucleotide"
attgttggttcgaagttggat

SEQ ID NO: 18530 - DNA, 21 bp, Artificial Sequence
  source: /note="Description of Artificial Sequence: Synthetic oligonucleotide"
attgttaaggggattcctatg

SEQ ID NO: 18531 - DNA, 21 bp, Artificial Sequence
  source: /note="Description of Artificial Sequence: Synthetic oligonucleotide"
attgttttggagtctatgtct

SEQ ID NO: 18532 - DNA, 21 bp, Artificial Sequence
  source: /note="Description of Artificial Sequence: Synthetic oligonucleotide"
attgtgttgcatttggatggg

SEQ ID NO: 18533 - DNA, 21 bp, Artificial Sequence
  source: /note="Description of Artificial Sequence: Synthetic oligonucleotide"
attgtgaatctttctacgtat

SEQ ID NO: 18534 - DNA, 21 bp, Artificial Sequence
  source: /note="Description of Artificial Sequence: Synthetic oligonucleotide"
attgttcaggtggcgacgtct

SEQ ID NO: 18535 - DNA, 21 bp, Artificial Sequence
  source: /note="Description of Artificial Sequence: Synthetic oligonucleotide"
attgtgaggcagacgattagt

SEQ ID NO: 18536 - DNA, 21 bp, Artificial Sequence
  source: /note="Description of Artificial Sequence: Synthetic oligonucleotide"
attgttcggtctcggcctgag

SEQ ID NO: 18537 - DNA, 21 bp, Artificial Sequence
  source: /note="Description of Artificial Sequence: Synthetic oligonucleotide"
attgtttcgcatgattttgag

SEQ ID NO: 18538 - DNA, 21 bp, Artificial Sequence
  source: /note="Description of Artificial Sequence: Synthetic oligonucleotide"
attgtgtctcggattaattcg

SEQ ID NO: 18539 - DNA, 21 bp, Artificial Sequence
  source: /note="Description of Artificial Sequence: Synthetic oligonucleotide"
attgtgtcgtcgtatactgat

SEQ ID NO: 18540 - DNA, 21 bp, Artificial Sequence
  source: /note="Description of Artificial Sequence: Synthetic oligonucleotide"
attgttactgggtcgggtggg

SEQ ID NO: 18541 - DNA, 21 bp, Artificial Sequence
  source: /note="Description of Artificial Sequence: Synthetic oligonucleotide"
attgtgactggtagtcgtgag

SEQ ID NO: 18542 - DNA, 21 bp, Artificial Sequence
  source: /note="Description of Artificial Sequence: Synthetic oligonucleotide"
attgtgactaagtgtccgggg

SEQ ID NO: 18543 - DNA, 21 bp, Artificial Sequence
  source: /note="Description of Artificial Sequence: Synthetic oligonucleotide"
attgtgacttcgaatgttact

SEQ ID NO: 18544 - DNA, 21 bp, Artificial Sequence
  source: /note="Description of Artificial Sequence: Synthetic oligonucleotide"
attgttacgtctacgcagcct

SEQ ID NO: 18545 - DNA, 21 bp, Artificial Sequence
  source: /note="Description of Artificial Sequence: Synthetic oligonucleotide"
atttgggattcttgtagggat

SEQ ID NO: 18546 - DNA, 21 bp, Artificial Sequence
  source: /note="Description of Artificial Sequence: Synthetic oligonucleotide"
atttataaggttgattcgtct

SEQ ID NO: 18547 - DNA, 21 bp, Artificial Sequence
  source: /note="Description of Artificial Sequence: Synthetic oligonucleotide"
atttatcttcggaatgatcag

SEQ ID NO: 18548 - DNA, 21 bp, Artificial Sequence
  source: /note="Description of Artificial Sequence: Synthetic oligonucleotide"
atttatcagtctgagagtcat

SEQ ID NO: 18549 - DNA, 21 bp, Artificial Sequence
  source: /note="Description of Artificial Sequence: Synthetic oligonucleotide"
atttatcagtcgcagcatcat

SEQ ID NO: 18550 - DNA, 21 bp, Artificial Sequence
  source: /note="Description of Artificial Sequence: Synthetic oligonucleotide"
atttatagtgctaagcagcct

SEQ ID NO: 18551 - DNA, 21 bp, Artificial Sequence
  source: /note="Description of Artificial Sequence: Synthetic oligonucleotide"
atttatagtgtgggggctact

SEQ ID NO: 18552 - DNA, 21 bp, Artificial Sequence
  source: /note="Description of Artificial Sequence: Synthetic oligonucleotide"
atttatactgggcaggttcat

SEQ ID NO: 18553 - DNA, 21 bp, Artificial Sequence
  source: /note="Description of Artificial Sequence: Synthetic oligonucleotide"
aaggcggctaagctgttggat

SEQ ID NO: 18554 - DNA, 21 bp, Artificial Sequence
  source: /note="Description of Artificial Sequence: Synthetic oligonucleotide"
aaggcggctaatcagagttct

SEQ ID NO: 18555 - DNA, 21 bp, Artificial Sequence
  source: /note="Description of Artificial Sequence: Synthetic oligonucleotide"
aaggctgatcattctaaggag

SEQ ID NO: 18556 - DNA, 21 bp, Artificial Sequence
  source: /note="Description of Artificial Sequence: Synthetic oligonucleotide"
aaggctgatattcaggtgcgt

SEQ ID NO: 18557 - DNA, 21 bp, Artificial Sequence
  source: /note="Description of Artificial Sequence: Synthetic oligonucleotide"
aaggcggagactgtggcgcct

SEQ ID NO: 18558 - DNA, 21 bp, Artificial Sequence
  source: /note="Description of Artificial Sequence: Synthetic oligonucleotide"
aaggcttttattgggattgat

SEQ ID NO: 18559 - DNA, 21 bp, Artificial Sequence
  source: /note="Description of Artificial Sequence: Synthetic oligonucleotide"
aaggcttttagtccggcgctt

SEQ ID NO: 18560 - DNA, 21 bp, Artificial Sequence
  source: /note="Description of Artificial Sequence: Synthetic oligonucleotide"
aaggcgggttgttcgattagt

SEQ ID NO: 18561 - DNA, 21 bp, Artificial Sequence
  source: /note="Description of Artificial Sequence: Synthetic oligonucleotide"
aaggctggtgttcctgttccg

SEQ ID NO: 18562 - DNA, 21 bp, Artificial Sequence
  source: /note="Description of Artificial Sequence: Synthetic oligonucleotide"
aaggctcattctactcagact

SEQ ID NO: 18563 - DNA, 21 bp, Artificial Sequence
  source: /note="Description of Artificial Sequence: Synthetic oligonucleotide"
aaggcgatttctcagcctttt

SEQ ID NO: 18564 - DNA, 21 bp, Artificial Sequence
  source: /note="Description of Artificial Sequence: Synthetic oligonucleotide"
aaggctcttcctaattatagt

SEQ ID NO: 18565 - DNA, 21 bp, Artificial Sequence
  source: /note="Description of Artificial Sequence: Synthetic oligonucleotide"
aaggctttgcagaggtatgat

SEQ ID NO: 18566 - DNA, 21 bp, Artificial Sequence
  source: /note="Description of Artificial Sequence: Synthetic oligonucleotide"
aaggcgatgtcgatggattcg

SEQ ID NO: 18567 - DNA, 21 bp, Artificial Sequence
  source: /note="Description of Artificial Sequence: Synthetic oligonucleotide"
aaggcgaatcagcttgatact

SEQ ID NO: 18568 - DNA, 21 bp, Artificial Sequence
  source: /note="Description of Artificial Sequence: Synthetic oligonucleotide"
aaggcgccgcttccggatttt

SEQ ID NO: 18569 - DNA, 21 bp, Artificial Sequence
  source: /note="Description of Artificial Sequence: Synthetic oligonucleotide"
aaggctcctacgccgtctgtg

SEQ ID NO: 18570 - DNA, 21 bp, Artificial Sequence
  source: /note="Description of Artificial Sequence: Synthetic oligonucleotide"
aaggctcaggagcgggcgact

SEQ ID NO: 18571 - DNA, 21 bp, Artificial Sequence
  source: /note="Description of Artificial Sequence: Synthetic oligonucleotide"
aaggctcagtcggctaatttt

SEQ ID NO: 18572 - DNA, 21 bp, Artificial Sequence
  source: /note="Description of Artificial Sequence: Synthetic oligonucleotide"
aaggcgagtgcgagtattgcg

SEQ ID NO: 18573 - DNA, 21 bp, Artificial Sequence
  source: /note="Description of Artificial Sequence: Synthetic oligonucleotide"
aaggcgagtttttcgcctgat

SEQ ID NO: 18574 - DNA, 21 bp, Artificial Sequence
  source: /note="Description of Artificial Sequence: Synthetic oligonucleotide"
aaggcgtctcaggcttgtatg

SEQ ID NO: 18575 - DNA, 21 bp, Artificial Sequence
  source: /note="Description of Artificial Sequence: Synthetic oligonucleotide"
aaggcgtcgcagttttctccg

SEQ ID NO: 18576 - DNA, 21 bp, Artificial Sequence
  source: /note="Description of Artificial Sequence: Synthetic oligonucleotide"
aaggcgtcgcagtctggtacg

SEQ ID NO: 18577 - DNA, 21 bp, Artificial Sequence
  source: /note="Description of Artificial Sequence: Synthetic oligonucleotide"
aaggctactcctggggttcat

SEQ ID NO: 18578 - DNA, 21 bp, Artificial Sequence
  source: /note="Description of Artificial Sequence: Synthetic oligonucleotide"
aaggctactccgaatgttggt

SEQ ID NO: 18579 - DNA, 21 bp, Artificial Sequence
  source: /note="Description of Artificial Sequence: Synthetic oligonucleotide"
aaggctgtggcgtctactttt

SEQ ID NO: 18580 - DNA, 21 bp, Artificial Sequence
  source: /note="Description of Artificial Sequence: Synthetic oligonucleotide"
aaggcggttatttctcctact

SEQ ID NO: 18581 - DNA, 21 bp, Artificial Sequence
  source: /note="Description of Artificial Sequence: Synthetic oligonucleotide"
aaggctgtgaatggtctgtcg

SEQ ID NO: 18582 - DNA, 21 bp, Artificial Sequence
  source: /note="Description of Artificial Sequence: Synthetic oligonucleotide"
aaggctgtgtcttgggggcct

SEQ ID NO: 18583 - DNA, 21 bp, Artificial Sequence
  source: /note="Description of Artificial Sequence: Synthetic oligonucleotide"
aagtgtcggacgtgtagtgtt

SEQ ID NO: 18584 - DNA, 21 bp, Artificial Sequence
  source: /note="Description of Artificial Sequence: Synthetic oligonucleotide"
aaggatgagcctaattatggg

SEQ ID NO: 18585 - DNA, 21 bp, Artificial Sequence
  source: /note="Description of Artificial Sequence: Synthetic oligonucleotide"
aaggatttttcgaatactttg

SEQ ID NO: 18586 - DNA, 21 bp, Artificial Sequence
  source: /note="Description of Artificial Sequence: Synthetic oligonucleotide"
aaggatgggccttttcctatg

SEQ ID NO: 18587 - DNA, 21 bp, Artificial Sequence
  source: /note="Description of Artificial Sequence: Synthetic oligonucleotide"
aaggataagaatccttcggat

SEQ ID NO: 18588 - DNA, 21 bp, Artificial Sequence
  source: /note="Description of Artificial Sequence: Synthetic oligonucleotide"
aaggataaggttgagatgaat

SEQ ID NO: 18589 - DNA, 21 bp, Artificial Sequence
  source: /note="Description of Artificial Sequence: Synthetic oligonucleotide"
aaggatttgacgcgtcatgcg

SEQ ID NO: 18590 - DNA, 21 bp, Artificial Sequence
  source: /note="Description of Artificial Sequence: Synthetic oligonucleotide"
aaggatatgcggtctaaggat

SEQ ID NO: 18591 - DNA, 21 bp, Artificial Sequence
  source: /note="Description of Artificial Sequence: Synthetic oligonucleotide"
aaggataataagattcagagt

SEQ ID NO: 18592 - DNA, 21 bp, Artificial Sequence
  source: /note="Description of Artificial Sequence: Synthetic oligonucleotide"
aaggatcctggtcgtatttcg

SEQ ID NO: 18593 - DNA, 21 bp, Artificial Sequence
  source: /note="Description of Artificial Sequence: Synthetic oligonucleotide"
aaggatcctatttcttcggtt

SEQ ID NO: 18594 - DNA, 21 bp, Artificial Sequence
  source: /note="Description of Artificial Sequence: Synthetic oligonucleotide"
aaggatcctcttaattgtgcg

SEQ ID NO: 18595 - DNA, 21 bp, Artificial Sequence
  source: /note="Description of Artificial Sequence: Synthetic oligonucleotide"
aaggatcctccgcagctgcat

SEQ ID NO: 18596 - DNA, 21 bp, Artificial Sequence
  source: /note="Description of Artificial Sequence: Synthetic oligonucleotide"
aaggatcctcagactactgat

SEQ ID NO: 18597 - DNA, 21 bp, Artificial Sequence
  source: /note="Description of Artificial Sequence: Synthetic oligonucleotide"
aaggataggtcggctcctcct

SEQ ID NO: 18598 - DNA, 21 bp, Artificial Sequence
  source: /note="Description of Artificial Sequence: Synthetic oligonucleotide"
aaggatcggtcgctggatccg

SEQ ID NO: 18599 - DNA, 21 bp, Artificial Sequence
  source: /note="Description of Artificial Sequence: Synthetic oligonucleotide"
aaggattctgctgcgaatttt

SEQ ID NO: 18600 - DNA, 21 bp, Artificial Sequence
  source: /note="Description of Artificial Sequence: Synthetic oligonucleotide"
aaggattcgacgttgctgagt

SEQ ID NO: 18601 - DNA, 21 bp, Artificial Sequence
  source: /note="Description of Artificial Sequence: Synthetic oligonucleotide"
aaggatacggatcctttgtcg

SEQ ID NO: 18602 - DNA, 21 bp, Artificial Sequence
  source: /note="Description of Artificial Sequence: Synthetic oligonucleotide"
aaggatacgattcatgttagt

SEQ ID NO: 18603 - DNA, 21 bp, Artificial Sequence
  source: /note="Description of Artificial Sequence: Synthetic oligonucleotide"
aaggatacgcttacttttagg

SEQ ID NO: 18604 - DNA, 21 bp, Artificial Sequence
  source: /note="Description of Artificial Sequence: Synthetic oligonucleotide"
aaggatactccgaatacggtt

SEQ ID NO: 18605 - DNA, 21 bp, Artificial Sequence
  source: /note="Description of Artificial Sequence: Synthetic oligonucleotide"
aaggatactgtgttttatcct

SEQ ID NO: 18606 - DNA, 21 bp, Artificial Sequence
  source: /note="Description of Artificial Sequence: Synthetic oligonucleotide"
aaggaggattcgtatcatccg

SEQ ID NO: 18607 - DNA, 21 bp, Artificial Sequence
  source: /note="Description of Artificial Sequence: Synthetic oligonucleotide"
aaggaggatactaatcggacg

SEQ ID NO: 18608 - DNA, 21 bp, Artificial Sequence
  source: /note="Description of Artificial Sequence: Synthetic oligonucleotide"
aaggagggtggggagcctcgg

SEQ ID NO: 18609 - DNA, 21 bp, Artificial Sequence
  source: /note="Description of Artificial Sequence: Synthetic oligonucleotide"
aaggagggttctaatcggggt

SEQ ID NO: 18610 - DNA, 21 bp, Artificial Sequence
  source: /note="Description of Artificial Sequence: Synthetic oligonucleotide"
aaggagcatggtgttattttt

SEQ ID NO: 18611 - DNA, 21 bp, Artificial Sequence
  source: /note="Description of Artificial Sequence: Synthetic oligonucleotide"
aaggagattggttttgcgact

SEQ ID NO: 18612 - DNA, 21 bp, Artificial Sequence
  source: /note="Description of Artificial Sequence: Synthetic oligonucleotide"
aaggagaagccgttgaattct

SEQ ID NO: 18613 - DNA, 21 bp, Artificial Sequence
  source: /note="Description of Artificial Sequence: Synthetic oligonucleotide"
aaggagttggcggttgggttg

SEQ ID NO: 18614 - DNA, 21 bp, Artificial Sequence
  source: /note="Description of Artificial Sequence: Synthetic oligonucleotide"
aaggagcttgagttgcatcct

SEQ ID NO: 18615 - DNA, 21 bp, Artificial Sequence
  source: /note="Description of Artificial Sequence: Synthetic oligonucleotide"
aaggagatggatattcattgg

SEQ ID NO: 18616 - DNA, 21 bp, Artificial Sequence
  source: /note="Description of Artificial Sequence: Synthetic oligonucleotide"
aaggagatgtctccgactcgg

SEQ ID NO: 18617 - DNA, 21 bp, Artificial Sequence
  source: /note="Description of Artificial Sequence: Synthetic oligonucleotide"
aaggagaatcctgctattgtt

SEQ ID NO: 18618 - DNA, 21 bp, Artificial Sequence
  source: /note="Description of Artificial Sequence: Synthetic oligonucleotide"
aaggagccgaaggtttggctg

SEQ ID NO: 18619 - DNA, 21 bp, Artificial Sequence
  source: /note="Description of Artificial Sequence: Synthetic oligonucleotide"
aaggagccgtcgacgacgagt

SEQ ID NO: 18620 - DNA, 21 bp, Artificial Sequence
  source: /note="Description of Artificial Sequence: Synthetic oligonucleotide"
aaggagtctattcggcagagt

SEQ ID NO: 18621 - DNA, 21 bp, Artificial Sequence
  source: /note="Description of Artificial Sequence: Synthetic oligonucleotide"
aaggagtcttcttcttatctg

SEQ ID NO: 18622 - DNA, 21 bp, Artificial Sequence
  source: /note="Description of Artificial Sequence: Synthetic oligonucleotide"
aaggagacgcagaatatgccg

SEQ ID NO: 18623 - DNA, 21 bp, Artificial Sequence
  source: /note="Description of Artificial Sequence: Synthetic oligonucleotide"
aaggaggttaagacttctggt

SEQ ID NO: 18624 - DNA, 21 bp, Artificial Sequence
  source: /note="Description of Artificial Sequence: Synthetic oligonucleotide"
aaggagtggactaattcgggt

SEQ ID NO: 18625 - DNA, 21 bp, Artificial Sequence
  source: /note="Description of Artificial Sequence: Synthetic oligonucleotide"
aagtttgcggcgatgcttaat

SEQ ID NO: 18626 - DNA, 21 bp, Artificial Sequence
  source: /note="Description of Artificial Sequence: Synthetic oligonucleotide"
aagtttgatttggcgtcggat

SEQ ID NO: 18627 - DNA, 21 bp, Artificial Sequence
  source: /note="Description of Artificial Sequence: Synthetic oligonucleotide"
aagtttgatagtgagttgtct

SEQ ID NO: 18628 - DNA, 21 bp, Artificial Sequence
  source: /note="Description of Artificial Sequence: Synthetic oligonucleotide"
aagtttggggataatgtgctt

SEQ ID NO: 18629 - DNA, 21 bp, Artificial Sequence
  source: /note="Description of Artificial Sequence: Synthetic oligonucleotide"
aagtttaattctgcgtctgat

SEQ ID NO: 18630 - DNA, 21 bp, Artificial Sequence
  source: /note="Description of Artificial Sequence: Synthetic oligonucleotide"
aagtttccggaggctcagggt

SEQ ID NO: 18631 - DNA, 21 bp, Artificial Sequence
  source: /note="Description of Artificial Sequence: Synthetic oligonucleotide"
aagtttcctcatccgcctgcg

SEQ ID NO: 18632 - DNA, 21 bp, Artificial Sequence
  source: /note="Description of Artificial Sequence: Synthetic oligonucleotide"
aagtttcagcgtgatcaggtt

SEQ ID NO: 18633 - DNA, 21 bp, Artificial Sequence
  source: /note="Description of Artificial Sequence: Synthetic oligonucleotide"
aagtttcagtcggtggggatt

SEQ ID NO: 18634 - DNA, 21 bp, Artificial Sequence
  source: /note="Description of Artificial Sequence: Synthetic oligonucleotide"
aagttttctcagacggtgccg

SEQ ID NO: 18635 - DNA, 21 bp, Artificial Sequence
  source: /note="Description of Artificial Sequence: Synthetic oligonucleotide"
aagttttcgtctaatattgat

SEQ ID NO: 18636 - DNA, 21 bp, Artificial Sequence
  source: /note="Description of Artificial Sequence: Synthetic oligonucleotide"
aagggtgctttgggtgttcct

SEQ ID NO: 18637 - DNA, 21 bp, Artificial Sequence
  source: /note="Description of Artificial Sequence: Synthetic oligonucleotide"
aagggggatcatgttacggat

SEQ ID NO: 18638 - DNA, 21 bp, Artificial Sequence
  source: /note="Description of Artificial Sequence: Synthetic oligonucleotide"
aagggtgatattatttcggag

SEQ ID NO: 18639 - DNA, 21 bp, Artificial Sequence
  source: /note="Description of Artificial Sequence: Synthetic oligonucleotide"
aagggtgatattcaggtgtcg

SEQ ID NO: 18640 - DNA, 21 bp, Artificial Sequence
  source: /note="Description of Artificial Sequence: Synthetic oligonucleotide"
aagggggagattcctattgag

SEQ ID NO: 18641 - DNA, 21 bp, Artificial Sequence
  source: /note="Description of Artificial Sequence: Synthetic oligonucleotide"
aagggtgaggtgcagagtatg

SEQ ID NO: 18642 - DNA, 21 bp, Artificial Sequence
  source: /note="Description of Artificial Sequence: Synthetic oligonucleotide"
aagggggagtggcctcgggag

SEQ ID NO: 18643 - DNA, 21 bp, Artificial Sequence
  source: /note="Description of Artificial Sequence: Synthetic oligonucleotide"
aagggttttgatgagaggagt

SEQ ID NO: 18644 - DNA, 21 bp, Artificial Sequence
  source: /note="Description of Artificial Sequence: Synthetic oligonucleotide"
aaggggggtgttgcgcagtat

SEQ ID NO: 18645 - DNA, 21 bp, Artificial Sequence
  source: /note="Description of Artificial Sequence: Synthetic oligonucleotide"
aagggtttgggtgtggtgccg

SEQ ID NO: 18646 - DNA, 21 bp, Artificial Sequence
  source: /note="Description of Artificial Sequence: Synthetic oligonucleotide"
aaggggcctagtattgcttgg

SEQ ID NO: 18647 - DNA, 21 bp, Artificial Sequence
  source: /note="Description of Artificial Sequence: Synthetic oligonucleotide"
aagggtccttctccggggttg

SEQ ID NO: 18648 - DNA, 21 bp, Artificial Sequence
  source: /note="Description of Artificial Sequence: Synthetic oligonucleotide"
aagggtcaggggcagttgaat

SEQ ID NO: 18649 - DNA, 21 bp, Artificial Sequence
  source: /note="Description of Artificial Sequence: Synthetic oligonucleotide"
aaggggcagtcgtcgaattcg

SEQ ID NO: 18650 - DNA, 21 bp, Artificial Sequence
  source: /note="Description of Artificial Sequence: Synthetic oligonucleotide"
aagggtcgtgatgcgacgtcg

SEQ ID NO: 18651 - DNA, 21 bp, Artificial Sequence
  source: /note="Description of Artificial Sequence: Synthetic oligonucleotide"
aagggttcgggggtgattgtg

SEQ ID NO: 18652 - DNA, 21 bp, Artificial Sequence
  source: /note="Description of Artificial Sequence: Synthetic oligonucleotide"
aagggttcgtcttctatgcat

SEQ ID NO: 18653 - DNA, 21 bp, Artificial Sequence
  source: /note="Description of Artificial Sequence: Synthetic oligonucleotide"
aaggggactgatttgcttgct

SEQ ID NO: 18654 - DNA, 21 bp, Artificial Sequence
  source: /note="Description of Artificial Sequence: Synthetic oligonucleotide"
aaggggactactgtgtcgaat

SEQ ID NO: 18655 - DNA, 21 bp, Artificial Sequence
  source: /note="Description of Artificial Sequence: Synthetic oligonucleotide"
aaggggacgacggttgttgtt

SEQ ID NO: 18656 - DNA, 21 bp, Artificial Sequence
  source: /note="Description of Artificial Sequence: Synthetic oligonucleotide"
aagggtacttatgctaatacg

SEQ ID NO: 18657 - DNA, 21 bp, Artificial Sequence
  source: /note="Description of Artificial Sequence: Synthetic oligonucleotide"
aagggtacttataatgctcat

SEQ ID NO: 18658 - DNA, 21 bp, Artificial Sequence
  source: /note="Description of Artificial Sequence: Synthetic oligonucleotide"
aagggtgtgattcctgagaag

SEQ ID NO: 18659 - DNA, 21 bp, Artificial Sequence
  source: /note="Description of Artificial Sequence: Synthetic oligonucleotide"
aagggggttctgacggctgtt

SEQ ID NO: 18660 - DNA, 21 bp, Artificial Sequence
  source: /note="Description of Artificial Sequence: Synthetic oligonucleotide"
aagggggttaattttctggat

SEQ ID NO: 18661 - DNA, 21 bp, Artificial Sequence
  source: /note="Description of Artificial Sequence: Synthetic oligonucleotide"
aagcatgctcagactattcct

SEQ ID NO: 18662 - DNA, 21 bp, Artificial Sequence
  source: /note="Description of Artificial Sequence: Synthetic oligonucleotide"
aagcatgatgattctgggatg

SEQ ID NO: 18663 - DNA, 21 bp, Artificial Sequence
  source: /note="Description of Artificial Sequence: Synthetic oligonucleotide"
aagcatgagaattggatgact

SEQ ID NO: 18664 - DNA, 21 bp, Artificial Sequence
  source: /note="Description of Artificial Sequence: Synthetic oligonucleotide"
aagcatgagcctcatgggtcg

SEQ ID NO: 18665 - DNA, 21 bp, Artificial Sequence
  source: /note="Description of Artificial Sequence: Synthetic oligonucleotide"
aagcatggggttgagattctt

SEQ ID NO: 18666 - DNA, 21 bp, Artificial Sequence
  source: /note="Description of Artificial Sequence: Synthetic oligonucleotide"
aagcatcatactgtggagatg

SEQ ID NO: 18667 - DNA, 21 bp, Artificial Sequence
  source: /note="Description of Artificial Sequence: Synthetic oligonucleotide"
aagcatattccggggcctgat

SEQ ID NO: 18668 - DNA, 21 bp, Artificial Sequence
  source: /note="Description of Artificial Sequence: Synthetic oligonucleotide"
aagcatattccttcggatagg

SEQ ID NO: 18669 - DNA, 21 bp, Artificial Sequence
  source: /note="Description of Artificial Sequence: Synthetic oligonucleotide"
aagcatcctaatgttccgacg

SEQ ID NO: 18670 - DNA, 21 bp, Artificial Sequence
  source: /note="Description of Artificial Sequence: Synthetic oligonucleotide"
aagcatcctcctgcgttgact

SEQ ID NO: 18671 - DNA, 21 bp, Artificial Sequence
  source: /note="Description of Artificial Sequence: Synthetic oligonucleotide"
aagcatcctcctgctgttctt

SEQ ID NO: 18672 - DNA, 21 bp, Artificial Sequence
  source: /note="Description of Artificial Sequence: Synthetic oligonucleotide"
aagcatcagagtacgattatt

SEQ ID NO: 18673 - DNA, 21 bp, Artificial Sequence
  source: /note="Description of Artificial Sequence: Synthetic oligonucleotide"
aagcattctgctgagctgggg

SEQ ID NO: 18674 - DNA, 21 bp, Artificial Sequence
  source: /note="Description of Artificial Sequence: Synthetic oligonucleotide"
aagcattctatggcgactaat

SEQ ID NO: 18675 - DNA, 21 bp, Artificial Sequence
  source: /note="Description of Artificial Sequence: Synthetic oligonucleotide"
aagcattcgaatactccgaat

SEQ ID NO: 18676 - DNA, 21 bp, Artificial Sequence
  source: /note="Description of Artificial Sequence: Synthetic oligonucleotide"
aagcattcttatatggagact

SEQ ID NO: 18677 - DNA, 21 bp, Artificial Sequence
  source: /note="Description of Artificial Sequence: Synthetic oligonucleotide"
aagcatacggcgttggtgcct

SEQ ID NO: 18678 - DNA, 21 bp, Artificial Sequence
  source: /note="Description of Artificial Sequence: Synthetic oligonucleotide"
aagcatactgcttcgatggcg

SEQ ID NO: 18679 - DNA, 21 bp, Artificial Sequence
  source: /note="Description of Artificial Sequence: Synthetic oligonucleotide"
aagcatactcagaatgatggg

SEQ ID NO: 18680 - DNA, 21 bp, Artificial Sequence
  source: /note="Description of Artificial Sequence: Synthetic oligonucleotide"
aagcatactagttttgctcag

SEQ ID NO: 18681 - DNA, 21 bp, Artificial Sequence
  source: /note="Description of Artificial Sequence: Synthetic oligonucleotide"
aagcatacgacgacgatgttt

SEQ ID NO: 18682 - DNA, 21 bp, Artificial Sequence
  source: /note="Description of Artificial Sequence: Synthetic oligonucleotide"
aagattgctcctatgcctcat

SEQ ID NO: 18683 - DNA, 21 bp, Artificial Sequence
  source: /note="Description of Artificial Sequence: Synthetic oligonucleotide"
aagattgctcgttctgagggg

SEQ ID NO: 18684 - DNA, 21 bp, Artificial Sequence
  source: /note="Description of Artificial Sequence: Synthetic oligonucleotide"
aagattgcttcttcgcttggt

SEQ ID NO: 18685 - DNA, 21 bp, Artificial Sequence
  source: /note="Description of Artificial Sequence: Synthetic oligonucleotide"
aagattgcgacgacgccgctg

SEQ ID NO: 18686 - DNA, 21 bp, Artificial Sequence
  source: /note="Description of Artificial Sequence: Synthetic oligonucleotide"
aagattcataatttgaattcg

SEQ ID NO: 18687 - DNA, 21 bp, Artificial Sequence
  source: /note="Description of Artificial Sequence: Synthetic oligonucleotide"
aagattaatactgctcttact

SEQ ID NO: 18688 - DNA, 21 bp, Artificial Sequence
  source: /note="Description of Artificial Sequence: Synthetic oligonucleotide"
aagattccgatgcagtcggcg

SEQ ID NO: 18689 - DNA, 21 bp, Artificial Sequence
  source: /note="Description of Artificial Sequence: Synthetic oligonucleotide"
aagattacggcgactgttacg

SEQ ID NO: 18690 - DNA, 21 bp, Artificial Sequence
  source: /note="Description of Artificial Sequence: Synthetic oligonucleotide"
aagaaggatctttctatgtat

SEQ ID NO: 18691 - DNA, 21 bp, Artificial Sequence
  source: /note="Description of Artificial Sequence: Synthetic oligonucleotide"
aagaaggatacgggtattaat

SEQ ID NO: 18692 - DNA, 21 bp, Artificial Sequence
  source: /note="Description of Artificial Sequence: Synthetic oligonucleotide"
aagaagcctgaggattggagg

SEQ ID NO: 18693 - DNA, 21 bp, Artificial Sequence
  source: /note="Description of Artificial Sequence: Synthetic oligonucleotide"
aagaagcagagtgttgagccg

SEQ ID NO: 18694 - DNA, 21 bp, Artificial Sequence
  source: /note="Description of Artificial Sequence: Synthetic oligonucleotide"
aagaaggtgtcggatgctttg

SEQ ID NO: 18695 - DNA, 21 bp, Artificial Sequence
  source: /note="Description of Artificial Sequence: Synthetic oligonucleotide"
aagctggcgggtaagagtgat

SEQ ID NO: 18696 - DNA, 21 bp, Artificial Sequence
  source: /note="Description of Artificial Sequence: Synthetic oligonucleotide"
aagttggcgcctagtgttacg

SEQ ID NO: 18697 - DNA, 21 bp, Artificial Sequence
  source: /note="Description of Artificial Sequence: Synthetic oligonucleotide"
aagttggcgtctgggttgcct

SEQ ID NO: 18698 - DNA, 21 bp, Artificial Sequence
  source: /note="Description of Artificial Sequence: Synthetic oligonucleotide"
aagcttgctagtccttctccg

SEQ ID NO: 18699 - DNA, 21 bp, Artificial Sequence
  source: /note="Description of Artificial Sequence: Synthetic oligonucleotide"
aagctggcgtctgtgagtgtt

SEQ ID NO: 18700 - DNA, 21 bp, Artificial Sequence
  source: /note="Description of Artificial Sequence: Synthetic oligonucleotide"
aagttggcgactacgcgggat

SEQ ID NO: 18701 - DNA, 21 bp, Artificial Sequence
  source: /note="Description of Artificial Sequence: Synthetic oligonucleotide"
aagcttgatattaattatccg

SEQ ID NO: 18702 - DNA, 21 bp, Artificial Sequence
  source: /note="Description of Artificial Sequence: Synthetic oligonucleotide"
aagctggagaatggttcgtgg

SEQ ID NO: 18703 - DNA, 21 bp, Artificial Sequence
  source: /note="Description of Artificial Sequence: Synthetic oligonucleotide"
aagttgggtgctgtttcgctt

SEQ ID NO: 18704 - DNA, 21 bp, Artificial Sequence
  source: /note="Description of Artificial Sequence: Synthetic oligonucleotide"
aagctgggtgagaatacggat

SEQ ID NO: 18705 - DNA, 21 bp, Artificial Sequence
  source: /note="Description of Artificial Sequence: Synthetic oligonucleotide"
aagttggggcatcttcattct

SEQ ID NO: 18706 - DNA, 21 bp, Artificial Sequence
  source: /note="Description of Artificial Sequence: Synthetic oligonucleotide"
aagttggggactacgtcgtcg

SEQ ID NO: 18707 - DNA, 21 bp, Artificial Sequence
  source: /note="Description of Artificial Sequence: Synthetic oligonucleotide"
aagcttcatgtgaatacgccg

SEQ ID NO: 18708 - DNA, 21 bp, Artificial Sequence
  source: /note="Description of Artificial Sequence: Synthetic oligonucleotide"
aagttgctgggtgctgtgggg

SEQ ID NO: 18709 - DNA, 21 bp, Artificial Sequence
  source: /note="Description of Artificial Sequence: Synthetic oligonucleotide"
aagcttctgaaggcgcctctg

SEQ ID NO: 18710 - DNA, 21 bp, Artificial Sequence
  source: /note="Description of Artificial Sequence: Synthetic oligonucleotide"
aagttgcttccggagccgggg

SEQ ID NO: 18711 - DNA, 21 bp, Artificial Sequence
  source: /note="Description of Artificial Sequence: Synthetic oligonucleotide"
aagcttcttccggggcagcct

SEQ ID NO: 18712 - DNA, 21 bp, Artificial Sequence
  source: /note="Description of Artificial Sequence: Synthetic oligonucleotide"
aagctgctgccgaatcctcct

SEQ ID NO: 18713 - DNA, 21 bp, Artificial Sequence
  source: /note="Description of Artificial Sequence: Synthetic oligonucleotide"
aagcttctttcgattatgggg

SEQ ID NO: 18714 - DNA, 21 bp, Artificial Sequence
  source: /note="Description of Artificial Sequence: Synthetic oligonucleotide"
aagctgttgtctactggtacg

SEQ ID NO: 18715 - DNA, 21 bp, Artificial Sequence
  source: /note="Description of Artificial Sequence: Synthetic oligonucleotide"
aagctgaatagtccggatgat

SEQ ID NO: 18716 - DNA, 21 bp, Artificial Sequence
  source: /note="Description of Artificial Sequence: Synthetic oligonucleotide"
aagcttcctaatgttactcct

SEQ ID NO: 18717 - DNA, 21 bp, Artificial Sequence
  source: /note="Description of Artificial Sequence: Synthetic oligonucleotide"
aagcttccttcggagttgatt

SEQ ID NO: 18718 - DNA, 21 bp, Artificial Sequence
  source: /note="Description of Artificial Sequence: Synthetic oligonucleotide"
aagcttcaggttcctttttct

SEQ ID NO: 18719 - DNA, 21 bp, Artificial Sequence
  source: /note="Description of Artificial Sequence: Synthetic oligonucleotide"
aagttgcgggatatttatcct

SEQ ID NO: 18720 - DNA, 21 bp, Artificial Sequence
  source: /note="Description of Artificial Sequence: Synthetic oligonucleotide"
aagctgtctggtgagattgtg

SEQ ID NO: 18721 - DNA, 21 bp, Artificial Sequence
  source: /note="Description of Artificial Sequence: Synthetic oligonucleotide"
aagcttagtcatcagcagttt

SEQ ID NO: 18722 - DNA, 21 bp, Artificial Sequence
  source: /note="Description of Artificial Sequence: Synthetic oligonucleotide"
aagcttagtccgactctgtct

SEQ ID NO: 18723 - DNA, 21 bp, Artificial Sequence
  source: /note="Description of Artificial Sequence: Synthetic oligonucleotide"
aagcttagttctcctgcgctg

SEQ ID NO: 18724 - DNA, 21 bp, Artificial Sequence
  source: /note="Description of Artificial Sequence: Synthetic oligonucleotide"
aagttgtcttcttcgtcttgg

SEQ ID NO: 18725 - DNA, 21 bp, Artificial Sequence
  source: /note="Description of Artificial Sequence: Synthetic oligonucleotide"
aagctttcgactgagtcttgg

SEQ ID NO: 18726 - DNA, 21 bp, Artificial Sequence
  source: /note="Description of Artificial Sequence: Synthetic oligonucleotide"
aagcttagttattcgacgctg

SEQ ID NO: 18727 - DNA, 21 bp, Artificial Sequence
  source: /note="Description of Artificial Sequence: Synthetic oligonucleotide"
aagcttactgagattgttgcg

SEQ ID NO: 18728 - DNA, 21 bp, Artificial Sequence
  source: /note="Description of Artificial Sequence: Synthetic oligonucleotide"
aagttgacgggttgtaatgat

SEQ ID NO: 18729 - DNA, 21 bp, Artificial Sequence
  source: /note="Description of Artificial Sequence: Synthetic oligonucleotide"
aagctgacgatgacggctcct

SEQ ID NO: 18730 - DNA, 21 bp, Artificial Sequence
  source: /note="Description of Artificial Sequence: Synthetic oligonucleotide"
aagcttacttcgccttatgcg

SEQ ID NO: 18731 - DNA, 21 bp, Artificial Sequence
  source: /note="Description of Artificial Sequence: Synthetic oligonucleotide"
aagctgacgtcttctcctact

SEQ ID NO: 18732 - DNA, 21 bp, Artificial Sequence
  source: /note="Description of Artificial Sequence: Synthetic oligonucleotide"
aagcttacttcgagtacggtt

SEQ ID NO: 18733 - DNA, 21 bp, Artificial Sequence
  source: /note="Description of Artificial Sequence: Synthetic oligonucleotide"
aagatggctgaggataaggtt

SEQ ID NO: 18734 - DNA, 21 bp, Artificial Sequence
  source: /note="Description of Artificial Sequence: Synthetic oligonucleotide"
aagatggatagtgtgcttccg

SEQ ID NO: 18735 - DNA, 21 bp, Artificial Sequence
  source: /note="Description of Artificial Sequence: Synthetic oligonucleotide"
aagatggagcatcggatgctg

SEQ ID NO: 18736 - DNA, 21 bp, Artificial Sequence
  source: /note="Description of Artificial Sequence: Synthetic oligonucleotide"
aagatggggactactcttggg

SEQ ID NO: 18737 - DNA, 21 bp, Artificial Sequence
  source: /note="Description of Artificial Sequence: Synthetic oligonucleotide"
aagatgctttctccgcaggtg

SEQ ID NO: 18738 - DNA, 21 bp, Artificial Sequence
  source: /note="Description of Artificial Sequence: Synthetic oligonucleotide"
aagatgaatagtgctgcgggt

SEQ ID NO: 18739 - DNA, 21 bp, Artificial Sequence
  source: /note="Description of Artificial Sequence: Synthetic oligonucleotide"
aagatgcctgaggcgttgcgg

SEQ ID NO: 18740 - DNA, 21 bp, Artificial Sequence
  source: /note="Description of Artificial Sequence: Synthetic oligonucleotide"
aagatgcctattccggtgccg

SEQ ID NO: 18741 - DNA, 21 bp, Artificial Sequence
  source: /note="Description of Artificial Sequence: Synthetic oligonucleotide"
aagatgtctcattctttggat

SEQ ID NO: 18742 - DNA, 21 bp, Artificial Sequence
  source: /note="Description of Artificial Sequence: Synthetic oligonucleotide"
aagaatgcgattaatatgatt

SEQ ID NO: 18743 - DNA, 21 bp, Artificial Sequence
  source: /note="Description of Artificial Sequence: Synthetic oligonucleotide"
aagaatgcgaagactattcct

SEQ ID NO: 18744 - DNA, 21 bp, Artificial Sequence
  source: /note="Description of Artificial Sequence: Synthetic oligonucleotide"
aagaatgctctgccgacgagt

SEQ ID NO: 18745 - DNA, 21 bp, Artificial Sequence
  source: /note="Description of Artificial Sequence: Synthetic oligonucleotide"
aagaatgcggtgtctggttct

SEQ ID NO: 18746 - DNA, 21 bp, Artificial Sequence
  source: /note="Description of Artificial Sequence: Synthetic oligonucleotide"
aagaatgctgtgactagtgtt

SEQ ID NO: 18747 - DNA, 21 bp, Artificial Sequence
  source: /note="Description of Artificial Sequence: Synthetic oligonucleotide"
aagaatgagcgtctgccgatg

SEQ ID NO: 18748 - DNA, 21 bp, Artificial Sequence
  source: /note="Description of Artificial Sequence: Synthetic oligonucleotide"
aagaatgagacttcgtctcct

SEQ ID NO: 18749 - DNA, 21 bp, Artificial Sequence
  source: /note="Description of Artificial Sequence: Synthetic oligonucleotide"
aagaatggggatattcattgt

SEQ ID NO: 18750 - DNA, 21 bp, Artificial Sequence
  source: /note="Description of Artificial Sequence: Synthetic oligonucleotide"
aagaatggtattactcctaat

SEQ ID NO: 18751 - DNA, 21 bp, Artificial Sequence
  source: /note="Description of Artificial Sequence: Synthetic oligonucleotide"
aagaatggtctgagtcctgcg

SEQ ID NO: 18752 - DNA, 21 bp, Artificial Sequence
  source: /note="Description of Artificial Sequence: Synthetic oligonucleotide"
aagaatggtacggctcagtct

SEQ ID NO: 18753 - DNA, 21 bp, Artificial Sequence
  source: /note="Description of Artificial Sequence: Synthetic oligonucleotide"
aagaatcatcagtatgcggcg

SEQ ID NO: 18754 - DNA, 21 bp, Artificial Sequence
  source: /note="Description of Artificial Sequence: Synthetic oligonucleotide"
aagaatctgccgttggtttcg

SEQ ID NO: 18755 - DNA, 21 bp, Artificial Sequence
  source: /note="Description of Artificial Sequence: Synthetic oligonucleotide"
aagaatctgtctttgggtggt

SEQ ID NO: 18756 - DNA, 21 bp, Artificial Sequence
  source: /note="Description of Artificial Sequence: Synthetic oligonucleotide"
aagaatcctctgttgtcgccg

SEQ ID NO: 18757 - DNA, 21 bp, Artificial Sequence
  source: /note="Description of Artificial Sequence: Synthetic oligonucleotide"
aagaatcctatgactgcgccg

SEQ ID NO: 18758 - DNA, 21 bp, Artificial Sequence
  source: /note="Description of Artificial Sequence: Synthetic oligonucleotide"
aagaatcctcaggagccgact

SEQ ID NO: 18759 - DNA, 21 bp, Artificial Sequence
  source: /note="Description of Artificial Sequence: Synthetic oligonucleotide"
aagaatcctagggatttgggg

SEQ ID NO: 18760 - DNA, 21 bp, Artificial Sequence
  source: /note="Description of Artificial Sequence: Synthetic oligonucleotide"
aagaatcagcctctgggttat

SEQ ID NO: 18761 - DNA, 21 bp, Artificial Sequence
  source: /note="Description of Artificial Sequence: Synthetic oligonucleotide"
aagaattctacgagtcagctg

SEQ ID NO: 18762 - DNA, 21 bp, Artificial Sequence
  source: /note="Description of Artificial Sequence: Synthetic oligonucleotide"
aagaatgttatgtctggtgct

SEQ ID NO: 18763 - DNA, 21 bp, Artificial Sequence
  source: /note="Description of Artificial Sequence: Synthetic oligonucleotide"
aagaattatagtgcggctgtt

SEQ ID NO: 18764 - DNA, 21 bp, Artificial Sequence
  source: /note="Description of Artificial Sequence: Synthetic oligonucleotide"
aagcctgctggtacggatagt

SEQ ID NO: 18765 - DNA, 21 bp, Artificial Sequence
  source: /note="Description of Artificial Sequence: Synthetic oligonucleotide"
aagcctgcgtctaattatgat

SEQ ID NO: 18766 - DNA, 21 bp, Artificial Sequence
  source: /note="Description of Artificial Sequence: Synthetic oligonucleotide"
aagcctgctacgagtccgggt

SEQ ID NO: 18767 - DNA, 21 bp, Artificial Sequence
  source: /note="Description of Artificial Sequence: Synthetic oligonucleotide"
aagccggctgtgcctgtttat

SEQ ID NO: 18768 - DNA, 21 bp, Artificial Sequence
  source: /note="Description of Artificial Sequence: Synthetic oligonucleotide"
aagcctgatcggcctcctgat

SEQ ID NO: 18769 - DNA, 21 bp, Artificial Sequence
  source: /note="Description of Artificial Sequence: Synthetic oligonucleotide"
aagccggagaatagtcatagt

SEQ ID NO: 18770 - DNA, 21 bp, Artificial Sequence
  source: /note="Description of Artificial Sequence: Synthetic oligonucleotide"
aagccgtttgagactgggcgt

SEQ ID NO: 18771 - DNA, 21 bp, Artificial Sequence
  source: /note="Description of Artificial Sequence: Synthetic oligonucleotide"
aagcctcatccgccgtctttt

SEQ ID NO: 18772 - DNA, 21 bp, Artificial Sequence
  source: /note="Description of Artificial Sequence: Synthetic oligonucleotide"
aagccgattctgcagagttcg

SEQ ID NO: 18773 - DNA, 21 bp, Artificial Sequence
  source: /note="Description of Artificial Sequence: Synthetic oligonucleotide"
aagccgttggcgcagctttct

SEQ ID NO: 18774 - DNA, 21 bp, Artificial Sequence
  source: /note="Description of Artificial Sequence: Synthetic oligonucleotide"
aagccgttggatcatcttacg

SEQ ID NO: 18775 - DNA, 21 bp, Artificial Sequence
  source: /note="Description of Artificial Sequence: Synthetic oligonucleotide"
aagcctttggaggttgagggg

SEQ ID NO: 18776 - DNA, 21 bp, Artificial Sequence
  source: /note="Description of Artificial Sequence: Synthetic oligonucleotide"
aagcctttgcaggtggatcct

SEQ ID NO: 18777 - DNA, 21 bp, Artificial Sequence
  source: /note="Description of Artificial Sequence: Synthetic oligonucleotide"
aagccgatggcgcatcttgag

SEQ ID NO: 18778 - DNA, 21 bp, Artificial Sequence
  source: /note="Description of Artificial Sequence: Synthetic oligonucleotide"
aagccgatggatcctactctt

SEQ ID NO: 18779 - DNA, 21 bp, Artificial Sequence
  source: /note="Description of Artificial Sequence: Synthetic oligonucleotide"
aagccgatgtcgattactcct

SEQ ID NO: 18780 - DNA, 21 bp, Artificial Sequence
  source: /note="Description of Artificial Sequence: Synthetic oligonucleotide"
aagcctaatgcggtgagtatg

SEQ ID NO: 18781 - DNA, 21 bp, Artificial Sequence
  source: /note="Description of Artificial Sequence: Synthetic oligonucleotide"
aagccgcctattcttactagt

SEQ ID NO: 18782 - DNA, 21 bp, Artificial Sequence
  source: /note="Description of Artificial Sequence: Synthetic oligonucleotide"
aagccgccgttggcgcaggat

SEQ ID NO: 18783 - DNA, 21 bp, Artificial Sequence
  source: /note="Description of Artificial Sequence: Synthetic oligonucleotide"
aagcctccgcgggaggctgat

SEQ ID NO: 18784 - DNA, 21 bp, Artificial Sequence
  source: /note="Description of Artificial Sequence: Synthetic oligonucleotide"
aagcctagggcgccttctgat

SEQ ID NO: 18785 - DNA, 21 bp, Artificial Sequence
  source: /note="Description of Artificial Sequence: Synthetic oligonucleotide"
aagccttcgggtcattcgtct

SEQ ID NO: 18786 - DNA, 21 bp, Artificial Sequence
  source: /note="Description of Artificial Sequence: Synthetic oligonucleotide"
aagccgtctgggccgccgact

SEQ ID NO: 18787 - DNA, 21 bp, Artificial Sequence
  source: /note="Description of Artificial Sequence: Synthetic oligonucleotide"
aagccgagtgtgccgactgtt

SEQ ID NO: 18788 - DNA, 21 bp, Artificial Sequence
  source: /note="Description of Artificial Sequence: Synthetic oligonucleotide"
aagccgacgggtatgcatctt

SEQ ID NO: 18789 - DNA, 21 bp, Artificial Sequence
  source: /note="Description of Artificial Sequence: Synthetic oligonucleotide"
aagccgactccgacgctgatg

SEQ ID NO: 18790 - DNA, 21 bp, Artificial Sequence
  source: /note="Description of Artificial Sequence: Synthetic oligonucleotide"
aagccgacggtgattccggct

SEQ ID NO: 18791 - DNA, 21 bp, Artificial Sequence
  source: /note="Description of Artificial Sequence: Synthetic oligonucleotide"
aagcctgttggtgagtttacg

SEQ ID NO: 18792 - DNA, 21 bp, Artificial Sequence
  source: /note="Description of Artificial Sequence: Synthetic oligonucleotide"
aagccggttcctcagcctgat

SEQ ID NO: 18793 - DNA, 21 bp, Artificial Sequence
  source: /note="Description of Artificial Sequence: Synthetic oligonucleotide"
aagcctgtgacgcttgataat

SEQ ID NO: 18794 - DNA, 21 bp, Artificial Sequence
  source: /note="Description of Artificial Sequence: Synthetic oligonucleotide"
aagcctgtgacgcctcattcg

SEQ ID NO: 18795 - DNA, 21 bp, Artificial Sequence
  source: /note="Description of Artificial Sequence: Synthetic oligonucleotide"
aagccttatttgccggagaat

SEQ ID NO: 18796 - DNA, 21 bp, Artificial Sequence
  source: /note="Description of Artificial Sequence: Synthetic oligonucleotide"
aagcaggcggatattccgcgt

SEQ ID NO: 18797 - DNA, 21 bp, Artificial Sequence
  source: /note="Description of Artificial Sequence: Synthetic oligonucleotide"
aagcaggcgctgacgatgact

SEQ ID NO: 18798 - DNA, 21 bp, Artificial Sequence
  source: /note="Description of Artificial Sequence: Synthetic oligonucleotide"
aagcaggatagggatcgtctt

SEQ ID NO: 18799 - DNA, 21 bp, Artificial Sequence
  source: /note="Description of Artificial Sequence: Synthetic oligonucleotide"
aagcagggtctgacgccgtct

SEQ ID NO: 18800 - DNA, 21 bp, Artificial Sequence
  source: /note="Description of Artificial Sequence: Synthetic oligonucleotide"
aagcagggtgtttggccgaat

SEQ ID NO: 18801 - DNA, 21 bp, Artificial Sequence
  source: /note="Description of Artificial Sequence: Synthetic oligonucleotide"
aagcagattcagcctaagaat

SEQ ID NO: 18802 - DNA, 21 bp, Artificial Sequence
  source: /note="Description of Artificial Sequence: Synthetic oligonucleotide"
aagcagaagcatcagtttgag

SEQ ID NO: 18803 - DNA, 21 bp, Artificial Sequence
  source: /note="Description of Artificial Sequence: Synthetic oligonucleotide"
aagcagctgccgattaatgtg

SEQ ID NO: 18804 - DNA, 21 bp, Artificial Sequence
  source: /note="Description of Artificial Sequence: Synthetic oligonucleotide"
aagcagatgcttgatccgacg

SEQ ID NO: 18805 - DNA, 21 bp, Artificial Sequence
  source: /note="Description of Artificial Sequence: Synthetic oligonucleotide"
aagcagatgaatgatctggct

SEQ ID NO: 18806 - DNA, 21 bp, Artificial Sequence
  source: /note="Description of Artificial Sequence: Synthetic oligonucleotide"
aagcagaatgttattaatact

SEQ ID NO: 18807 - DNA, 21 bp, Artificial Sequence
  source: /note="Description of Artificial Sequence: Synthetic oligonucleotide"
aagcagccgccgcagccgcct

SEQ ID NO: 18808 - DNA, 21 bp, Artificial Sequence
  source: /note="Description of Artificial Sequence: Synthetic oligonucleotide"
aagcagagggagcagcctatg

SEQ ID NO: 18809 - DNA, 21 bp, Artificial Sequence
  source: /note="Description of Artificial Sequence: Synthetic oligonucleotide"
aagcagagttctcatactacg

SEQ ID NO: 18810 - DNA, 21 bp, Artificial Sequence
  source: /note="Description of Artificial Sequence: Synthetic oligonucleotide"
aagcagtcttcgacgtcgatt

SEQ ID NO: 18811 - DNA, 21 bp, Artificial Sequence
  source: /note="Description of Artificial Sequence: Synthetic oligonucleotide"
aagcagactagtgttactggt

SEQ ID NO: 18812 - DNA, 21 bp, Artificial Sequence
  source: /note="Description of Artificial Sequence: Synthetic oligonucleotide"
aagcagacgactcctgtgttg

SEQ ID NO: 18813 - DNA, 21 bp, Artificial Sequence
  source: /note="Description of Artificial Sequence: Synthetic oligonucleotide"
aagcaggtgggttctatgcct

SEQ ID NO: 18814 - DNA, 21 bp, Artificial Sequence
  source: /note="Description of Artificial Sequence: Synthetic oligonucleotide"
aagcaggtttcttcggagagg

SEQ ID NO: 18815 - DNA, 21 bp, Artificial Sequence
  source: /note="Description of Artificial Sequence: Synthetic oligonucleotide"
aagcaggttgtttcggtgact

SEQ ID NO: 18816 - DNA, 21 bp, Artificial Sequence
  source: /note="Description of Artificial Sequence: Synthetic oligonucleotide"
aagcagtattcgtctagtgtt

SEQ ID NO: 18817 - DNA, 21 bp, Artificial Sequence
  source: /note="Description of Artificial Sequence: Synthetic oligonucleotide"
aagagggctaatgctattcct

SEQ ID NO: 18818 - DNA, 21 bp, Artificial Sequence
  source: /note="Description of Artificial Sequence: Synthetic oligonucleotide"
aagagggcggtggctgcggag

SEQ ID NO: 18819 - DNA, 21 bp, Artificial Sequence
  source: /note="Description of Artificial Sequence: Synthetic oligonucleotide"
aagagggatgctgctatgcct

SEQ ID NO: 18820 - DNA, 21 bp, Artificial Sequence
  source: /note="Description of Artificial Sequence: Synthetic oligonucleotide"
aagcgtgatgatatgaatgtg

SEQ ID NO: 18821 - DNA, 21 bp, Artificial Sequence
  source: /note="Description of Artificial Sequence: Synthetic oligonucleotide"
aagagggatatgggtgctggt

SEQ ID NO: 18822 - DNA, 21 bp, Artificial Sequence
  source: /note="Description of Artificial Sequence: Synthetic oligonucleotide"
aagcgggattcgacttctcct

SEQ ID NO: 18823 - DNA, 21 bp, Artificial Sequence
  source: /note="Description of Artificial Sequence: Synthetic oligonucleotide"
aagcgggagtttgagaatatt

SEQ ID NO: 18824 - DNA, 21 bp, Artificial Sequence
  source: /note="Description of Artificial Sequence: Synthetic oligonucleotide"
aagagggagtcgatgcctatt

SEQ ID NO: 18825 - DNA, 21 bp, Artificial Sequence
  source: /note="Description of Artificial Sequence: Synthetic oligonucleotide"
aagcgtgaggttcttcctacg

SEQ ID NO: 18826 - DNA, 21 bp, Artificial Sequence
  source: /note="Description of Artificial Sequence: Synthetic oligonucleotide"
aagcgtttttcgggtgtggag

SEQ ID NO: 18827 - DNA, 21 bp, Artificial Sequence
  source: /note="Description of Artificial Sequence: Synthetic oligonucleotide"
aagcgtcatgagtctatgtct

SEQ ID NO: 18828 - DNA, 21 bp, Artificial Sequence
  source: /note="Description of Artificial Sequence: Synthetic oligonucleotide"
aagaggaatagtctgaatgag

SEQ ID NO: 18829 - DNA, 21 bp, Artificial Sequence
  source: /note="Description of Artificial Sequence: Synthetic oligonucleotide"
aagaggccggcggagcatgat

SEQ ID NO: 18830 - DNA, 21 bp, Artificial Sequence
  source: /note="Description of Artificial Sequence: Synthetic oligonucleotide"
aagaggcagcatcctgagatt

SEQ ID NO: 18831 - DNA, 21 bp, Artificial Sequence
  source: /note="Description of Artificial Sequence: Synthetic oligonucleotide"
aagaggtctctggatagtccg

SEQ ID NO: 18832 - DNA, 21 bp, Artificial Sequence
  source: /note="Description of Artificial Sequence: Synthetic oligonucleotide"
aagcgttctctgactgagacg

SEQ ID NO: 18833 - DNA, 21 bp, Artificial Sequence
  source: /note="Description of Artificial Sequence: Synthetic oligonucleotide"
aagaggacggatgggttgggt

SEQ ID NO: 18834 - DNA, 21 bp, Artificial Sequence
  source: /note="Description of Artificial Sequence: Synthetic oligonucleotide"
aagcgtacgagtgagggggtg

SEQ ID NO: 18835 - DNA, 21 bp, Artificial Sequence
  source: /note="Description of Artificial Sequence: Synthetic oligonucleotide"
aagagtgcggcgattgcttat

SEQ ID NO: 18836 - DNA, 21 bp, Artificial Sequence
  source: /note="Description of Artificial Sequence: Synthetic oligonucleotide"
aagtctgctgaggagacgtcg

SEQ ID NO: 18837 - DNA, 21 bp, Artificial Sequence
  source: /note="Description of Artificial Sequence: Synthetic oligonucleotide"
aagtctgctcttatgggtccg

SEQ ID NO: 18838 - DNA, 21 bp, Artificial Sequence
  source: /note="Description of Artificial Sequence: Synthetic oligonucleotide"
aagtctgcgtctctttctatg

SEQ ID NO: 18839 - DNA, 21 bp, Artificial Sequence
  source: /note="Description of Artificial Sequence: Synthetic oligonucleotide"
aagagtgctagttggagtgag

SEQ ID NO: 18840 - DNA, 21 bp, Artificial Sequence
  source: /note="Description of Artificial Sequence: Synthetic oligonucleotide"
aagtcggatatgccttttaat

SEQ ID NO: 18841 - DNA, 21 bp, Artificial Sequence
  source: /note="Description of Artificial Sequence: Synthetic oligonucleotide"
aagagtgatccggagtggccg

SEQ ID NO: 18842 - DNA, 21 bp, Artificial Sequence
  source: /note="Description of Artificial Sequence: Synthetic oligonucleotide"
aagtctgatgtgatgtttcag

SEQ ID NO: 18843 - DNA, 21 bp, Artificial Sequence
  source: /note="Description of Artificial Sequence: Synthetic oligonucleotide"
aagtctgagcgttatgctgtg

SEQ ID NO: 18844 - DNA, 21 bp, Artificial Sequence
  source: /note="Description of Artificial Sequence: Synthetic oligonucleotide"
aagtcgtttccggttgttcag

SEQ ID NO: 18845 - DNA, 21 bp, Artificial Sequence
  source: /note="Description of Artificial Sequence: Synthetic oligonucleotide"
aagagttttcagtctactcct

SEQ ID NO: 18846 - DNA, 21 bp, Artificial Sequence
  source: /note="Description of Artificial Sequence: Synthetic oligonucleotide"
aagtctggtcctgttactctt

SEQ ID NO: 18847 - DNA, 21 bp, Artificial Sequence
  source: /note="Description of Artificial Sequence: Synthetic oligonucleotide"
aagagtggtacggcgttttcg

SEQ ID NO: 18848 - DNA, 21 bp, Artificial Sequence
  source: /note="Description of Artificial Sequence: Synthetic oligonucleotide"
aagagtggtgttcagtcgccg

SEQ ID NO: 18849 - DNA, 21 bp, Artificial Sequence
  source: /note="Description of Artificial Sequence: Synthetic oligonucleotide"
aagtcgattgctactagtggt

SEQ ID NO: 18850 - DNA, 21 bp, Artificial Sequence
  source: /note="Description of Artificial Sequence: Synthetic oligonucleotide"
aagtctattgagttttttgcg

SEQ ID NO: 18851 - DNA, 21 bp, Artificial Sequence
  source: /note="Description of Artificial Sequence: Synthetic oligonucleotide"
aagagtattcgtgaggatcct

SEQ ID NO: 18852 - DNA, 21 bp, Artificial Sequence
  source: /note="Description of Artificial Sequence: Synthetic oligonucleotide"
aagtcgaaggatgtgaggtat

SEQ ID NO: 18853 - DNA, 21 bp, Artificial Sequence
  source: /note="Description of Artificial Sequence: Synthetic oligonucleotide"
aagtcgatggatactacgggt

SEQ ID NO: 18854 - DNA, 21 bp, Artificial Sequence
  source: /note="Description of Artificial Sequence: Synthetic oligonucleotide"
aagtcgaatgcttgtttgcat

SEQ ID NO: 18855 - DNA, 21 bp, Artificial Sequence
  source: /note="Description of Artificial Sequence: Synthetic oligonucleotide"
aagagtaatgatcgtacggat

SEQ ID NO: 18856 - DNA, 21 bp, Artificial Sequence
  source: /note="Description of Artificial Sequence: Synthetic oligonucleotide"
aagtctaatactcctgcggcg

SEQ ID NO: 18857 - DNA, 21 bp, Artificial Sequence
  source: /note="Description of Artificial Sequence: Synthetic oligonucleotide"
aagtcgaatacgactgctgat

SEQ ID NO: 18858 - DNA, 21 bp, Artificial Sequence
  source: /note="Description of Artificial Sequence: Synthetic oligonucleotide"
aagagtcctgctgagattgcg

SEQ ID NO: 18859 - DNA, 21 bp, Artificial Sequence
  source: /note="Description of Artificial Sequence: Synthetic oligonucleotide"
aagagtccggatggtatggtg

SEQ ID NO: 18860 - DNA, 21 bp, Artificial Sequence
  source: /note="Description of Artificial Sequence: Synthetic oligonucleotide"
aagtcgcctgataggtatcat

SEQ ID NO: 18861 - DNA, 21 bp, Artificial Sequence
  source: /note="Description of Artificial Sequence: Synthetic oligonucleotide"
aagtctccgggtgtgatggtg

SEQ ID NO: 18862 - DNA, 21 bp, Artificial Sequence
  source: /note="Description of Artificial Sequence: Synthetic oligonucleotide"
aagtcgccgcggactccggag

SEQ ID NO: 18863 - DNA, 21 bp, Artificial Sequence
  source: /note="Description of Artificial Sequence: Synthetic oligonucleotide"
aagtctccttcgcatgcggcg

SEQ ID NO: 18864 - DNA, 21 bp, Artificial Sequence
  source: /note="Description of Artificial Sequence: Synthetic oligonucleotide"
aagtctccgtctacttttcat

SEQ ID NO: 18865 - DNA, 21 bp, Artificial Sequence
  source: /note="Description of Artificial Sequence: Synthetic oligonucleotide"
aagtctcctactctggcgtct

SEQ ID NO: 18866 - DNA, 21 bp, Artificial Sequence
  source: /note="Description of Artificial Sequence: Synthetic oligonucleotide"
aagtcgcctgttcgtgatacg

SEQ ID NO: 18867 - DNA, 21 bp, Artificial Sequence
  source: /note="Description of Artificial Sequence: Synthetic oligonucleotide"
aagtctcctgttagtggtaat

SEQ ID NO: 18868 - DNA, 21 bp, Artificial Sequence
  source: /note="Description of Artificial Sequence: Synthetic oligonucleotide"
aagtctcctgtttcgtcgtat

SEQ ID NO: 18869 - DNA, 21 bp, Artificial Sequence
  source: /note="Description of Artificial Sequence: Synthetic oligonucleotide"
aagtctcaggctgagtttggg

SEQ ID NO: 18870 - DNA, 21 bp, Artificial Sequence
  source: /note="Description of Artificial Sequence: Synthetic oligonucleotide"
aagtcgcaggctctgactgat

SEQ ID NO: 18871 - DNA, 21 bp, Artificial Sequence
  source: /note="Description of Artificial Sequence: Synthetic oligonucleotide"
aagagtcaggggagtcattat

SEQ ID NO: 18872 - DNA, 21 bp, Artificial Sequence
  source: /note="Description of Artificial Sequence: Synthetic oligonucleotide"
aagagtcagcattatccgtct

SEQ ID NO: 18873 - DNA, 21 bp, Artificial Sequence
  source: /note="Description of Artificial Sequence: Synthetic oligonucleotide"
aagtcgcagtcggataaggtt

SEQ ID NO: 18874 - DNA, 21 bp, Artificial Sequence
  source: /note="Description of Artificial Sequence: Synthetic oligonucleotide"
aagagtcagtcgggtaatatg

SEQ ID NO: 18875 - DNA, 21 bp, Artificial Sequence
  source: /note="Description of Artificial Sequence: Synthetic oligonucleotide"
aagtctcgggataatttgaat

SEQ ID NO: 18876 - DNA, 21 bp, Artificial Sequence
  source: /note="Description of Artificial Sequence: Synthetic oligonucleotide"
aagtctcggaatcttgagcct

SEQ ID NO: 18877 - DNA, 21 bp, Artificial Sequence
  source: /note="Description of Artificial Sequence: Synthetic oligonucleotide"
aagagtcggactgggacggag

SEQ ID NO: 18878 - DNA, 21 bp, Artificial Sequence
  source: /note="Description of Artificial Sequence: Synthetic oligonucleotide"
aagtcttctgcgcatgcttgg

SEQ ID NO: 18879 - DNA, 21 bp, Artificial Sequence
  source: /note="Description of Artificial Sequence: Synthetic oligonucleotide"
aagtcgtcggatatggttgtg

SEQ ID NO: 18880 - DNA, 21 bp, Artificial Sequence
  source: /note="Description of Artificial Sequence: Synthetic oligonucleotide"
aagtcgagtcatcctcctgtt

SEQ ID NO: 18881 - DNA, 21 bp, Artificial Sequence
  source: /note="Description of Artificial Sequence: Synthetic oligonucleotide"
aagagtagtccgttgacttcg

SEQ ID NO: 18882 - DNA, 21 bp, Artificial Sequence
  source: /note="Description of Artificial Sequence: Synthetic oligonucleotide"
aagtcgagtcagcagtctatt

SEQ ID NO: 18883 - DNA, 21 bp, Artificial Sequence
  source: /note="Description of Artificial Sequence: Synthetic oligonucleotide"
aagtcttcgtcgggtgataag

SEQ ID NO: 18884 - DNA, 21 bp, Artificial Sequence
  source: /note="Description of Artificial Sequence: Synthetic oligonucleotide"
aagtctagttctggtttggag

SEQ ID NO: 18885 - DNA, 21 bp, Artificial Sequence
  source: /note="Description of Artificial Sequence: Synthetic oligonucleotide"
aagagttcgacggcgggtgtt

SEQ ID NO: 18886 - DNA, 21 bp, Artificial Sequence
  source: /note="Description of Artificial Sequence: Synthetic oligonucleotide"
aagtcttcgacgtcgggtaat

SEQ ID NO: 18887 - DNA, 21 bp, Artificial Sequence
  source: /note="Description of Artificial Sequence: Synthetic oligonucleotide"
aagtcgtcttattatcctgcg

SEQ ID NO: 18888 - DNA, 21 bp, Artificial Sequence
  source: /note="Description of Artificial Sequence: Synthetic oligonucleotide"
aagtcgacgcatgatgtgcct

SEQ ID NO: 18889 - DNA, 21 bp, Artificial Sequence
  source: /note="Description of Artificial Sequence: Synthetic oligonucleotide"
aagagtacgccgcgggagggt

SEQ ID NO: 18890 - DNA, 21 bp, Artificial Sequence
  source: /note="Description of Artificial Sequence: Synthetic oligonucleotide"
aagagtacttcggggatgcct

SEQ ID NO: 18891 - DNA, 21 bp, Artificial Sequence
  source: /note="Description of Artificial Sequence: Synthetic oligonucleotide"
aagagtactgttcctgatctt

SEQ ID NO: 18892 - DNA, 21 bp, Artificial Sequence
  source: /note="Description of Artificial Sequence: Synthetic oligonucleotide"
aagtctactgtgactcatttt

SEQ ID NO: 18893 - DNA, 21 bp, Artificial Sequence
  source: /note="Description of Artificial Sequence: Synthetic oligonucleotide"
aagtctgtggcgatttcggtt

SEQ ID NO: 18894 - DNA, 21 bp, Artificial Sequence
  source: /note="Description of Artificial Sequence: Synthetic oligonucleotide"
aagtctgttggtctgtctagt

SEQ ID NO: 18895 - DNA, 21 bp, Artificial Sequence
  source: /note="Description of Artificial Sequence: Synthetic oligonucleotide"
aagagtgtgctggtggagagt

SEQ ID NO: 18896 - DNA, 21 bp, Artificial Sequence
  source: /note="Description of Artificial Sequence: Synthetic oligonucleotide"
aagtcgtataattctccttat

SEQ ID NO: 18897 - DNA, 21 bp, Artificial Sequence
  source: /note="Description of Artificial Sequence: Synthetic oligonucleotide"
aagtcttatccgaatgatcat

SEQ ID NO: 18898 - DNA, 21 bp, Artificial Sequence
  source: /note="Description of Artificial Sequence: Synthetic oligonucleotide"
aagagttatcctccggcgctt

SEQ ID NO: 18899 - DNA, 21 bp, Artificial Sequence
  source: /note="Description of Artificial Sequence: Synthetic oligonucleotide"
aagacggcggatgcgcctcgt

SEQ ID NO: 18900 - DNA, 21 bp, Artificial Sequence
  source: /note="Description of Artificial Sequence: Synthetic oligonucleotide"
aagacggcgtcgttgggtccg

SEQ ID NO: 18901 - DNA, 21 bp, Artificial Sequence
  source: /note="Description of Artificial Sequence: Synthetic oligonucleotide"
aagactgcgtctatgcctacg

SEQ ID NO: 18902 - DNA, 21 bp, Artificial Sequence
  source: /note="Description of Artificial Sequence: Synthetic oligonucleotide"
aagacggatcgtactcttcag

SEQ ID NO: 18903 - DNA, 21 bp, Artificial Sequence
  source: /note="Description of Artificial Sequence: Synthetic oligonucleotide"
aagacggatagtagggtgccg

SEQ ID NO: 18904 - DNA, 21 bp, Artificial Sequence
  source: /note="Description of Artificial Sequence: Synthetic oligonucleotide"
aagacggagtttcggaatccg

SEQ ID NO: 18905 - DNA, 21 bp, Artificial Sequence
  source: /note="Description of Artificial Sequence: Synthetic oligonucleotide"
aagacggagggttctgggtgg

SEQ ID NO: 18906 - DNA, 21 bp, Artificial Sequence
  source: /note="Description of Artificial Sequence: Synthetic oligonucleotide"
aagactgagaggacgcttatt

SEQ ID NO: 18907 - DNA, 21 bp, Artificial Sequence
  source: /note="Description of Artificial Sequence: Synthetic oligonucleotide"
aagacgtttactgagaagacg

SEQ ID NO: 18908 - DNA, 21 bp, Artificial Sequence
  source: /note="Description of Artificial Sequence: Synthetic oligonucleotide"
aagacggggccgcctccggtt

SEQ ID NO: 18909 - DNA, 21 bp, Artificial Sequence
  source: /note="Description of Artificial Sequence: Synthetic oligonucleotide"
aagactggtgtttcttcggat

SEQ ID NO: 18910 - DNA, 21 bp, Artificial Sequence
  source: /note="Description of Artificial Sequence: Synthetic oligonucleotide"
aagacgcatgggctttgtctt

SEQ ID NO: 18911 - DNA, 21 bp, Artificial Sequence
  source: /note="Description of Artificial Sequence: Synthetic oligonucleotide"
aagacgattattactgatttg

SEQ ID NO: 18912 - DNA, 21 bp, Artificial Sequence
  source: /note="Description of Artificial Sequence: Synthetic oligonucleotide"
aagacgcttcctcttcctgag

SEQ ID NO: 18913 - DNA, 21 bp, Artificial Sequence
  source: /note="Description of Artificial Sequence: Synthetic oligonucleotide"
aagacgatgacgacggttcct

SEQ ID NO: 18914 - DNA, 21 bp, Artificial Sequence
  source: /note="Description of Artificial Sequence: Synthetic oligonucleotide"
aagacgatggtgcctgttgtt

SEQ ID NO: 18915 - DNA, 21 bp, Artificial Sequence
  source: /note="Description of Artificial Sequence: Synthetic oligonucleotide"
aagactaatggtcataattat

SEQ ID NO: 18916 - DNA, 21 bp, Artificial Sequence
  source: /note="Description of Artificial Sequence: Synthetic oligonucleotide"
aagactaatcctctggcgcag

SEQ ID NO: 18917 - DNA, 21 bp, Artificial Sequence
  source: /note="Description of Artificial Sequence: Synthetic oligonucleotide"
aagacgaattctgagattatt

SEQ ID NO: 18918 - DNA, 21 bp, Artificial Sequence
  source: /note="Description of Artificial Sequence: Synthetic oligonucleotide"
aagactcctgatccgaagaag

SEQ ID NO: 18919 - DNA, 21 bp, Artificial Sequence
  source: /note="Description of Artificial Sequence: Synthetic oligonucleotide"
aagacgcctatggttgagctg

SEQ ID NO: 18920 - DNA, 21 bp, Artificial Sequence
  source: /note="Description of Artificial Sequence: Synthetic oligonucleotide"
aagactcagctgatgacttcg

SEQ ID NO: 18921 - DNA, 21 bp, Artificial Sequence
  source: /note="Description of Artificial Sequence: Synthetic oligonucleotide"
aagactcagcctgggtcggtg

SEQ ID NO: 18922 - DNA, 21 bp, Artificial Sequence
  source: /note="Description of Artificial Sequence: Synthetic oligonucleotide"
aagacgcagagtattctttcg

SEQ ID NO: 18923 - DNA, 21 bp, Artificial Sequence
  source: /note="Description of Artificial Sequence: Synthetic oligonucleotide"
aagacgtctgaggtgaggtgg

SEQ ID NO: 18924 - DNA, 21 bp, Artificial Sequence
  source: /note="Description of Artificial Sequence: Synthetic oligonucleotide"
aagacttcgcagagtcatacg

SEQ ID NO: 18925 - DNA, 21 bp, Artificial Sequence
  source: /note="Description of Artificial Sequence: Synthetic oligonucleotide"
aagacttctgttacgcgtgat

SEQ ID NO: 18926 - DNA, 21 bp, Artificial Sequence
  source: /note="Description of Artificial Sequence: Synthetic oligonucleotide"
aagactactgctccgcatatt

SEQ ID NO: 18927 - DNA, 21 bp, Artificial Sequence
  source: /note="Description of Artificial Sequence: Synthetic oligonucleotide"
aagacgacggataggattccg

SEQ ID NO: 18928 - DNA, 21 bp, Artificial Sequence
  source: /note="Description of Artificial Sequence: Synthetic oligonucleotide"
aagacgactcttatgacttct

SEQ ID NO: 18929 - DNA, 21 bp, Artificial Sequence
  source: /note="Description of Artificial Sequence: Synthetic oligonucleotide"
aagacgacgccggttttggtg

SEQ ID NO: 18930 - DNA, 21 bp, Artificial Sequence
  source: /note="Description of Artificial Sequence: Synthetic oligonucleotide"
aagactacgcagaattctaat

SEQ ID NO: 18931 - DNA, 21 bp, Artificial Sequence
  source: /note="Description of Artificial Sequence: Synthetic oligonucleotide"
aagactacgtctaagcctcct

SEQ ID NO: 18932 - DNA, 21 bp, Artificial Sequence
  source: /note="Description of Artificial Sequence: Synthetic oligonucleotide"
aagactgtggctatggagagg

SEQ ID NO: 18933 - DNA, 21 bp, Artificial Sequence
  source: /note="Description of Artificial Sequence: Synthetic oligonucleotide"
aagacggttcgggagactagt

SEQ ID NO: 18934 - DNA, 21 bp, Artificial Sequence
  source: /note="Description of Artificial Sequence: Synthetic oligonucleotide"
aagactgtgacgaatgttctg

SEQ ID NO: 18935 - DNA, 21 bp, Artificial Sequence
  source: /note="Description of Artificial Sequence: Synthetic oligonucleotide"
aagactgtggtggctaatccg

SEQ ID NO: 18936 - DNA, 21 bp, Artificial Sequence
  source: /note="Description of Artificial Sequence: Synthetic oligonucleotide"
aagacttatgggacgcatgct

SEQ ID NO: 18937 - DNA, 21 bp, Artificial Sequence
  source: /note="Description of Artificial Sequence: Synthetic oligonucleotide"
aaggttgctcttgcgacgctt

SEQ ID NO: 18938 - DNA, 21 bp, Artificial Sequence
  source: /note="Description of Artificial Sequence: Synthetic oligonucleotide"
aaggttgcgatgccggttctt

SEQ ID NO: 18939 - DNA, 21 bp, Artificial Sequence
  source: /note="Description of Artificial Sequence: Synthetic oligonucleotide"
aaggttgctacttctacgatt

SEQ ID NO: 18940 - DNA, 21 bp, Artificial Sequence
  source: /note="Description of Artificial Sequence: Synthetic oligonucleotide"
aaggtggattctcgggagccg

SEQ ID NO: 18941 - DNA, 21 bp, Artificial Sequence
  source: /note="Description of Artificial Sequence: Synthetic oligonucleotide"
aaggttgatgttttgtataat

SEQ ID NO: 18942 - DNA, 21 bp, Artificial Sequence
  source: /note="Description of Artificial Sequence: Synthetic oligonucleotide"
aaggtggagtcgatggatagt

SEQ ID NO: 18943 - DNA, 21 bp, Artificial Sequence
  source: /note="Description of Artificial Sequence: Synthetic oligonucleotide"
aaggttggggcgggtaatact

SEQ ID NO: 18944 - DNA, 21 bp, Artificial Sequence
  source: /note="Description of Artificial Sequence: Synthetic oligonucleotide"
aaggtgggtaataatgcgtat

SEQ ID NO: 18945 - DNA, 21 bp, Artificial Sequence
  source: /note="Description of Artificial Sequence: Synthetic oligonucleotide"
aaggttgggtcggtttatact

SEQ ID NO: 18946 - DNA, 21 bp, Artificial Sequence
  source: /note="Description of Artificial Sequence: Synthetic oligonucleotide"
aaggtgcttcagccgcatcct

SEQ ID NO: 18947 - DNA, 21 bp, Artificial Sequence
  source: /note="Description of Artificial Sequence: Synthetic oligonucleotide"
aaggttaatattactgcgttt

SEQ ID NO: 18948 - DNA, 21 bp, Artificial Sequence
  source: /note="Description of Artificial Sequence: Synthetic oligonucleotide"
aaggtgaatttgtttgctggg

SEQ ID NO: 18949 - DNA, 21 bp, Artificial Sequence
  source: /note="Description of Artificial Sequence: Synthetic oligonucleotide"
aaggtgaattctgtggcgttt

SEQ ID NO: 18950 - DNA, 21 bp, Artificial Sequence
  source: /note="Description of Artificial Sequence: Synthetic oligonucleotide"
aaggttcaggagcgtagtcag

SEQ ID NO: 18951 - DNA, 21 bp, Artificial Sequence
  source: /note="Description of Artificial Sequence: Synthetic oligonucleotide"
aaggtgtctgctgcgctgtct

SEQ ID NO: 18952 - DNA, 21 bp, Artificial Sequence
  source: /note="Description of Artificial Sequence: Synthetic oligonucleotide"
aaggtgtcgggtttgtctatg

SEQ ID NO: 18953 - DNA, 21 bp, Artificial Sequence
  source: /note="Description of Artificial Sequence: Synthetic oligonucleotide"
aaggtgtcgaggattagtgat

SEQ ID NO: 18954 - DNA, 21 bp, Artificial Sequence
  source: /note="Description of Artificial Sequence: Synthetic oligonucleotide"
aaggtttcttctacggttgag

SEQ ID NO: 18955 - DNA, 21 bp, Artificial Sequence
  source: /note="Description of Artificial Sequence: Synthetic oligonucleotide"
aaggttactgcgcctaatgct

SEQ ID NO: 18956 - DNA, 21 bp, Artificial Sequence
  source: /note="Description of Artificial Sequence: Synthetic oligonucleotide"
aaggtgactgggatgccggtt

SEQ ID NO: 18957 - DNA, 21 bp, Artificial Sequence
  source: /note="Description of Artificial Sequence: Synthetic oligonucleotide"
aaggttactgggtattctgag

SEQ ID NO: 18958 - DNA, 21 bp, Artificial Sequence
  source: /note="Description of Artificial Sequence: Synthetic oligonucleotide"
aaggttacgacgccgcttcct

SEQ ID NO: 18959 - DNA, 21 bp, Artificial Sequence
  source: /note="Description of Artificial Sequence: Synthetic oligonucleotide"
aaggttgtggcgccggctttg

SEQ ID NO: 18960 - DNA, 21 bp, Artificial Sequence
  source: /note="Description of Artificial Sequence: Synthetic oligonucleotide"
aaggtggtgttgcgtgagggt

SEQ ID NO: 18961 - DNA, 21 bp, Artificial Sequence
  source: /note="Description of Artificial Sequence: Synthetic oligonucleotide"
aaggtggttacggcgccggag

SEQ ID NO: 18962 - DNA, 21 bp, Artificial Sequence
  source: /note="Description of Artificial Sequence: Synthetic oligonucleotide"
aagtggactgatggtccggct

SEQ ID NO: 18963 - DNA, 21 bp, Artificial Sequence
  source: /note="Description of Artificial Sequence: Synthetic oligonucleotide"
aagtgggttccggagtctcct

SEQ ID NO: 18964 - DNA, 21 bp, Artificial Sequence
  source: /note="Description of Artificial Sequence: Synthetic oligonucleotide"
aagtatgctcatagtcctact

SEQ ID NO: 18965 - DNA, 21 bp, Artificial Sequence
  source: /note="Description of Artificial Sequence: Synthetic oligonucleotide"
aagtatgcgacgaatgcggcg

SEQ ID NO: 18966 - DNA, 21 bp, Artificial Sequence
  source: /note="Description of Artificial Sequence: Synthetic oligonucleotide"
aagtatgatggggggcagcat

SEQ ID NO: 18967 - DNA, 21 bp, Artificial Sequence
  source: /note="Description of Artificial Sequence: Synthetic oligonucleotide"
aagtatggttcgacggtggtg

SEQ ID NO: 18968 - DNA, 21 bp, Artificial Sequence
  source: /note="Description of Artificial Sequence: Synthetic oligonucleotide"
aagtataaggatttgcctgcg

SEQ ID NO: 18969 - DNA, 21 bp, Artificial Sequence
  source: /note="Description of Artificial Sequence: Synthetic oligonucleotide"
aagtatccggctttgtctgct

SEQ ID NO: 18970 - DNA, 21 bp, Artificial Sequence
  source: /note="Description of Artificial Sequence: Synthetic oligonucleotide"
aagtatcgtgagaataatgtt

SEQ ID NO: 18971 - DNA, 21 bp, Artificial Sequence
  source: /note="Description of Artificial Sequence: Synthetic oligonucleotide"
aagtatagtaagccggatacg

SEQ ID NO: 18972 - DNA, 21 bp, Artificial Sequence
  source: /note="Description of Artificial Sequence: Synthetic oligonucleotide"
aagtatactgggcgtcaggag

SEQ ID NO: 18973 - DNA, 21 bp, Artificial Sequence
  source: /note="Description of Artificial Sequence: Synthetic oligonucleotide"
aagtatactctgacgcctaat

SEQ ID NO: 18974 - DNA, 21 bp, Artificial Sequence
  source: /note="Description of Artificial Sequence: Synthetic oligonucleotide"
aagtatgtttgtggtcctaat

SEQ ID NO: 18975 - DNA, 21 bp, Artificial Sequence
  source: /note="Description of Artificial Sequence: Synthetic oligonucleotide"
aagtatgttggtggtcctaat

SEQ ID NO: 18976 - DNA, 21 bp, Artificial Sequence
  source: /note="Description of Artificial Sequence: Synthetic oligonucleotide"
aagtatgtgaatggtgttgat

SEQ ID NO: 18977 - DNA, 21 bp, Artificial Sequence
  source: /note="Description of Artificial Sequence: Synthetic oligonucleotide"
aagtatgttactacttctccg

SEQ ID NO: 18978 - DNA, 21 bp, Artificial Sequence
  source: /note="Description of Artificial Sequence: Synthetic oligonucleotide"
ttggctgctgatgttcgtttt

SEQ ID NO: 18979 - DNA, 21 bp, Artificial Sequence
  source: /note="Description of Artificial Sequence: Synthetic oligonucleotide"
ttggcggcgggttgtcctgtt

SEQ ID NO: 18980 - DNA, 21 bp, Artificial Sequence
  source: /note="Description of Artificial Sequence: Synthetic oligonucleotide"
ctggctgcggggattcgtttt

SEQ ID NO: 18981 - DNA, 21 bp, Artificial Sequence
  source: /note="Description of Artificial Sequence: Synthetic oligonucleotide"
ctggcggcgaagcctcttatt

SEQ ID NO: 18982 - DNA, 21 bp, Artificial Sequence
  source: /note="Description of Artificial Sequence: Synthetic oligonucleotide"
cttgcggcgaatggggctcat

SEQ ID NO: 18983 - DNA, 21 bp, Artificial Sequence
  source: /note="Description of Artificial Sequence: Synthetic oligonucleotide"
ctggctgctccgacttcgtct

SEQ ID NO: 18984 - DNA, 21 bp, Artificial Sequence
  source: /note="Description of Artificial Sequence: Synthetic oligonucleotide"
ctggcggcgcaggataaggag

SEQ ID NO: 18985 - DNA, 21 bp, Artificial Sequence
  source: /note="Description of Artificial Sequence: Synthetic oligonucleotide"
ttggctgcgcggatgcagcct

SEQ ID NO: 18986 - DNA, 21 bp, Artificial Sequence
  source: /note="Description of Artificial Sequence: Synthetic oligonucleotide"
ctggcggcgcgtaggccggat

SEQ ID NO: 18987 - DNA, 21 bp, Artificial Sequence
  source: /note="Description of Artificial Sequence: Synthetic oligonucleotide"
cttgctgcgagtagtaggcct

SEQ ID NO: 18988 - DNA, 21 bp, Artificial Sequence
  source: /note="Description of Artificial Sequence: Synthetic oligonucleotide"
cttgcggataagccggctatg

SEQ ID NO: 18989 - DNA, 21 bp, Artificial Sequence
  source: /note="Description of Artificial Sequence: Synthetic oligonucleotide"
ctggcggatatgctgaagtct

SEQ ID NO: 18990 - DNA, 21 bp, Artificial Sequence
  source: /note="Description of Artificial Sequence: Synthetic oligonucleotide"
ctggcggatagggagaatacg

SEQ ID NO: 18991 - DNA, 21 bp, Artificial Sequence
  source: /note="Description of Artificial Sequence: Synthetic oligonucleotide"
cttgctgatcggaggattgag

SEQ ID NO: 18992 - DNA, 21 bp, Artificial Sequence
  source: /note="Description of Artificial Sequence: Synthetic oligonucleotide"
cttgctgaggctgtgacttcg

SEQ ID NO: 18993 - DNA, 21 bp, Artificial Sequence
  source: /note="Description of Artificial Sequence: Synthetic oligonucleotide"
ctggctgaggagttgggtcgg

SEQ ID NO: 18994 - DNA, 21 bp, Artificial Sequence
  source: /note="Description of Artificial Sequence: Synthetic oligonucleotide"
ctggctgagaattcgaggacg

SEQ ID NO: 18995 - DNA, 21 bp, Artificial Sequence
  source: /note="Description of Artificial Sequence: Synthetic oligonucleotide"
cttgctgagtcgaggggttat

SEQ ID NO: 18996 - DNA, 21 bp, Artificial Sequence
  source: /note="Description of Artificial Sequence: Synthetic oligonucleotide"
ttggctgaggttatttatgat

SEQ ID NO: 18997 - DNA, 21 bp, Artificial Sequence
  source: /note="Description of Artificial Sequence: Synthetic oligonucleotide"
ttggctggggcgctgcaggag

SEQ ID NO: 18998 - DNA, 21 bp, Artificial Sequence
  source: /note="Description of Artificial Sequence: Synthetic oligonucleotide"
cttgcgggtgataggcagtgg

SEQ ID NO: 18999 - DNA, 21 bp, Artificial Sequence
  source: /note="Description of Artificial Sequence: Synthetic oligonucleotide"
cttgcgggtcatttgatgccg

SEQ ID NO: 19000 - DNA, 21 bp, Artificial Sequence
  source: /note="Description of Artificial Sequence: Synthetic oligonucleotide"
cttgcgggtaagggtctgttg

SEQ ID NO: 19001 - DNA, 21 bp, Artificial Sequence
  source: /note="Description of Artificial Sequence: Synthetic oligonucleotide"
ttggcggggaagaatattgct

SEQ ID NO: 19002 - DNA, 21 bp, Artificial Sequence
  source: /note="Description of Artificial Sequence: Synthetic oligonucleotide"
ctggcgggtctgggtcatctt

SEQ ID NO: 19003 - DNA, 21 bp, Artificial Sequence
  source: /note="Description of Artificial Sequence: Synthetic oligonucleotide"
ttggcgggtctggttcggaat

SEQ ID NO: 19004 - DNA, 21 bp, Artificial Sequence
  source: /note="Description of Artificial Sequence: Synthetic oligonucleotide"
cttgcgcatggtactggtctg

SEQ ID NO: 19005 - DNA, 21 bp, Artificial Sequence
  source: /note="Description of Artificial Sequence: Synthetic oligonucleotide"
ttggctcataaggctaattct

SEQ ID NO: 19006 - DNA, 21 bp, Artificial Sequence
  source: /note="Description of Artificial Sequence: Synthetic oligonucleotide"
ctggctcataaggggattgtt

SEQ ID NO: 19007 - DNA, 21 bp, Artificial Sequence
  source: /note="Description of Artificial Sequence: Synthetic oligonucleotide"
ttggcgcatcctgtgcagttt

SEQ ID NO: 19008 - DNA, 21 bp, Artificial Sequence
  source: /note="Description of Artificial Sequence: Synthetic oligonucleotide"
cttgctcatagtacttctgtg

SEQ ID NO: 19009 - DNA, 21 bp, Artificial Sequence
  source: /note="Description of Artificial Sequence: Synthetic oligonucleotide"
ttggctattgatcctgctgat

SEQ ID NO: 19010 - DNA, 21 bp, Artificial Sequence
  source: /note="Description of Artificial Sequence: Synthetic oligonucleotide"
cttgctattggtcctcttcgg

SEQ ID NO: 19011 - DNA, 21 bp, Artificial Sequence
  source: /note="Description of Artificial Sequence: Synthetic oligonucleotide"
ttggcgaagtttgctccggat

SEQ ID NO: 19012 - DNA, 21 bp, Artificial Sequence
  source: /note="Description of Artificial Sequence: Synthetic oligonucleotide"
ctggcgaagtcgttgcaggcg

SEQ ID NO: 19013 - DNA, 21 bp, Artificial Sequence
  source: /note="Description of Artificial Sequence: Synthetic oligonucleotide"
ttggcgcttgcgggttctgat

SEQ ID NO: 19014 - DNA, 21 bp, Artificial Sequence
  source: /note="Description of Artificial Sequence: Synthetic oligonucleotide"
cttgcgctgggggttcttcgt

SEQ ID NO: 19015 - DNA, 21 bp, Artificial Sequence
  source: /note="Description of Artificial Sequence: Synthetic oligonucleotide"
ctggcgctgggtgtgccgtat

SEQ ID NO: 19016 - DNA, 21 bp, Artificial Sequence
  source: /note="Description of Artificial Sequence: Synthetic oligonucleotide"
ctggcgctgaagatttcgagt

SEQ ID NO: 19017 - DNA, 21 bp, Artificial Sequence
  source: /note="Description of Artificial Sequence: Synthetic oligonucleotide"
ttggcgcttaagtcgcatcct

SEQ ID NO: 19018 - DNA, 21 bp, Artificial Sequence
  source: /note="Description of Artificial Sequence: Synthetic oligonucleotide"
cttgcgcttaagagtcgggat

SEQ ID NO: 19019 - DNA, 21 bp, Artificial Sequence
  source: /note="Description of Artificial Sequence: Synthetic oligonucleotide"
ttggctttgcctgcgcatgct

SEQ ID NO: 19020 - DNA, 21 bp, Artificial Sequence
  source: /note="Description of Artificial Sequence: Synthetic oligonucleotide"
cttgctttgcgggggccgggg

SEQ ID NO: 19021 - DNA, 21 bp, Artificial Sequence
  source: /note="Description of Artificial Sequence: Synthetic oligonucleotide"
cttgctttgtctgggaatact

SEQ ID NO: 19022 - DNA, 21 bp, Artificial Sequence
  source: /note="Description of Artificial Sequence: Synthetic oligonucleotide"
ttggctttggttactgatagg

SEQ ID NO: 19023 - DNA, 21 bp, Artificial Sequence
  source: /note="Description of Artificial Sequence: Synthetic oligonucleotide"
ttggcgatgggtggtattagg

SEQ ID NO: 19024 - DNA, 21 bp, Artificial Sequence
  source: /note="Description of Artificial Sequence: Synthetic oligonucleotide"
ctggcgatgcagtcgcgtaat

SEQ ID NO: 19025 - DNA, 21 bp, Artificial Sequence
  source: /note="Description of Artificial Sequence: Synthetic oligonucleotide"
ctggcgaatggtaatcctgcg

SEQ ID NO: 19026 - DNA, 21 bp, Artificial Sequence
  source: /note="Description of Artificial Sequence: Synthetic oligonucleotide"
cttgcgaatattgcgacgaag

SEQ ID NO: 19027 - DNA, 21 bp, Artificial Sequence
  source: /note="Description of Artificial Sequence: Synthetic oligonucleotide"
cttgctaataagattccgcct

SEQ ID NO: 19028 - DNA, 21 bp, Artificial Sequence
  source: /note="Description of Artificial Sequence: Synthetic oligonucleotide"
ttggctaataagtctatgagt

SEQ ID NO: 19029 - DNA, 21 bp, Artificial Sequence
  source: /note="Description of Artificial Sequence: Synthetic oligonucleotide"
ttggctaatcctgcgaatggt

SEQ ID NO: 19030 - DNA, 21 bp, Artificial Sequence
  source: /note="Description of Artificial Sequence: Synthetic oligonucleotide"
cttgctaatccgcttgggagg

SEQ ID NO: 19031 - DNA, 21 bp, Artificial Sequence
  source: /note="Description of Artificial Sequence: Synthetic oligonucleotide"
ctggctaatcctatgagtgct

SEQ ID NO: 19032 - DNA, 21 bp, Artificial Sequence
  source: /note="Description of Artificial Sequence: Synthetic oligonucleotide"
cttgctaattcttttgttgcg

SEQ ID NO: 19033 - DNA, 21 bp, Artificial Sequence
  source: /note="Description of Artificial Sequence: Synthetic oligonucleotide"
cttgctaattcgaagtctttg

SEQ ID NO: 19034 - DNA, 21 bp, Artificial Sequence
  source: /note="Description of Artificial Sequence: Synthetic oligonucleotide"
cttgctaatgttagggcgagt

SEQ ID NO: 19035 - DNA, 21 bp, Artificial Sequence
  source: /note="Description of Artificial Sequence: Synthetic oligonucleotide"
ttggctccggggctggcgatg

SEQ ID NO: 19036 - DNA, 21 bp, Artificial Sequence
  source: /note="Description of Artificial Sequence: Synthetic oligonucleotide"
ttggcgccgcatacttcgagt

SEQ ID NO: 19037 - DNA, 21 bp, Artificial Sequence
  source: /note="Description of Artificial Sequence: Synthetic oligonucleotide"
ttggctcctttgtcgaaggtg

SEQ ID NO: 19038 - DNA, 21 bp, Artificial Sequence
  source: /note="Description of Artificial Sequence: Synthetic oligonucleotide"
ctggcgcctcctctgaggcag

SEQ ID NO: 19039 - DNA, 21 bp, Artificial Sequence
  source: /note="Description of Artificial Sequence: Synthetic oligonucleotide"
cttgcgccgtcgtatttgccg

SEQ ID NO: 19040 - DNA, 21 bp, Artificial Sequence
  source: /note="Description of Artificial Sequence: Synthetic oligonucleotide"
ttggcgccgactcttacgccg

SEQ ID NO: 19041 - DNA, 21 bp, Artificial Sequence
  source: /note="Description of Artificial Sequence: Synthetic oligonucleotide"
ctggcgcaggggtctatttcg

SEQ ID NO: 19042 - DNA, 21 bp, Artificial Sequence
  source: /note="Description of Artificial Sequence: Synthetic oligonucleotide"
ctggcgcagcagaaggatacg

SEQ ID NO: 19043 - DNA, 21 bp, Artificial Sequence
  source: /note="Description of Artificial Sequence: Synthetic oligonucleotide"
cttgcgcagaggcctcatcag

SEQ ID NO: 19044 - DNA, 21 bp, Artificial Sequence
  source: /note="Description of Artificial Sequence: Synthetic oligonucleotide"
ctggcgcagagtagttctcgt

SEQ ID NO: 19045 - DNA, 21 bp, Artificial Sequence
  source: /note="Description of Artificial Sequence: Synthetic oligonucleotide"
ctggctcaggtttcggctagt

SEQ ID NO: 19046 - DNA, 21 bp, Artificial Sequence
  source: /note="Description of Artificial Sequence: Synthetic oligonucleotide"
cttgctcgtggtccgggtgat

SEQ ID NO: 19047 - DNA, 21 bp, Artificial Sequence
  source: /note="Description of Artificial Sequence: Synthetic oligonucleotide"
cttgcgcgtcttagtcctact

SEQ ID NO: 19048 - DNA, 21 bp, Artificial Sequence
  source: /note="Description of Artificial Sequence: Synthetic oligonucleotide"
ttggctcggcagtcgccggag

SEQ ID NO: 19049 - DNA, 21 bp, Artificial Sequence
  source: /note="Description of Artificial Sequence: Synthetic oligonucleotide"
ctggcgcggcagacgtcgtct

SEQ ID NO: 19050 - DNA, 21 bp, Artificial Sequence
  source: /note="Description of Artificial Sequence: Synthetic oligonucleotide"
ttggcgaggtctcctacgctt

SEQ ID NO: 19051 - DNA, 21 bp, Artificial Sequence
  source: /note="Description of Artificial Sequence: Synthetic oligonucleotide"
ctggctcgtgtgaattctagt

SEQ ID NO: 19052 - DNA, 21 bp, Artificial Sequence
  source: /note="Description of Artificial Sequence: Synthetic oligonucleotide"
ttggcgagggtttctcagacg

SEQ ID NO: 19053 - DNA, 21 bp, Artificial Sequence
  source: /note="Description of Artificial Sequence: Synthetic oligonucleotide"
cttgcgtctgcgatgaagact

SEQ ID NO: 19054 - DNA, 21 bp, Artificial Sequence
  source: /note="Description of Artificial Sequence: Synthetic oligonucleotide"
ttggcgtctgctgttcagagt

SEQ ID NO: 19055 - DNA, 21 bp, Artificial Sequence
  source: /note="Description of Artificial Sequence: Synthetic oligonucleotide"
ttggcgtcggattctagggct

SEQ ID NO: 19056 - DNA, 21 bp, Artificial Sequence
  source: /note="Description of Artificial Sequence: Synthetic oligonucleotide"
cttgcgtctgagtttattgcg

SEQ ID NO: 19057 - DNA, 21 bp, Artificial Sequence
  source: /note="Description of Artificial Sequence: Synthetic oligonucleotide"
ctggcgtctgagaaggttagt

SEQ ID NO: 19058 - DNA, 21 bp, Artificial Sequence
  source: /note="Description of Artificial Sequence: Synthetic oligonucleotide"
cttgctagtttggtttctgtt

SEQ ID NO: 19059 - DNA, 21 bp, Artificial Sequence
  source: /note="Description of Artificial Sequence: Synthetic oligonucleotide"
cttgcttctcctactgattat

SEQ ID NO: 19060 - DNA, 21 bp, Artificial Sequence
  source: /note="Description of Artificial Sequence: Synthetic oligonucleotide"
ttggcttcgcagggttttaat

SEQ ID NO: 19061 - DNA, 21 bp, Artificial Sequence
  source: /note="Description of Artificial Sequence: Synthetic oligonucleotide"
ctggcgtctcaggggcctggt

SEQ ID NO: 19062 - DNA, 21 bp, Artificial Sequence
  source: /note="Description of Artificial Sequence: Synthetic oligonucleotide"
ctggcttcgaggccggctcat

SEQ ID NO: 19063 - DNA, 21 bp, Artificial Sequence
  source: /note="Description of Artificial Sequence: Synthetic oligonucleotide"
ttggcgtctgtgaatacgtcg

SEQ ID NO: 19064 - DNA, 21 bp, Artificial Sequence
  source: /note="Description of Artificial Sequence: Synthetic oligonucleotide"
cttgcgacggcgcatcgtcct

SEQ ID NO: 19065 - DNA, 21 bp, Artificial Sequence
  source: /note="Description of Artificial Sequence: Synthetic oligonucleotide"
ctggctactgcggttgttgat

SEQ ID NO: 19066 - DNA, 21 bp, Artificial Sequence
  source: /note="Description of Artificial Sequence: Synthetic oligonucleotide"
ttggctactaagtcttatacg

SEQ ID NO: 19067 - DNA, 21 bp, Artificial Sequence
  source: /note="Description of Artificial Sequence: Synthetic oligonucleotide"
ttggcgactcctccgattatt

SEQ ID NO: 19068 - DNA, 21 bp, Artificial Sequence
  source: /note="Description of Artificial Sequence: Synthetic oligonucleotide"
ttggcgactcggcaggttggg

SEQ ID NO: 19069 - DNA, 21 bp, Artificial Sequence
  source: /note="Description of Artificial Sequence: Synthetic oligonucleotide"
cttgcgacgcgggttcgtgag

SEQ ID NO: 19070 - DNA, 21 bp, Artificial Sequence
  source: /note="Description of Artificial Sequence: Synthetic oligonucleotide"
cttgcgacttctccgttgcat

SEQ ID NO: 19071 - DNA, 21 bp, Artificial Sequence
  source: /note="Description of Artificial Sequence: Synthetic oligonucleotide"
ctggctacgagtcctaatcat

SEQ ID NO: 19072 - DNA, 21 bp, Artificial Sequence
  source: /note="Description of Artificial Sequence: Synthetic oligonucleotide"
ctggcgacgagtcggagtctg

SEQ ID NO: 19073 - DNA, 21 bp, Artificial Sequence
  source: /note="Description of Artificial Sequence: Synthetic oligonucleotide"
ttggcgacgacttctggggct

SEQ ID NO: 19074 - DNA, 21 bp, Artificial Sequence
  source: /note="Description of Artificial Sequence: Synthetic oligonucleotide"
cttgctgtggagaagttgcct

SEQ ID NO: 19075 - DNA, 21 bp, Artificial Sequence
  source: /note="Description of Artificial Sequence: Synthetic oligonucleotide"
cttgcggttgggactaagggg

SEQ ID NO: 19076 - DNA, 21 bp, Artificial Sequence
  source: /note="Description of Artificial Sequence: Synthetic oligonucleotide"
ctggcggtgagtccgatgcct

SEQ ID NO: 19077 - DNA, 21 bp, Artificial Sequence
  source: /note="Description of Artificial Sequence: Synthetic oligonucleotide"
ttggcggtggtggagagtctg

SEQ ID NO: 19078 - DNA, 21 bp, Artificial Sequence
  source: /note="Description of Artificial Sequence: Synthetic oligonucleotide"
ctttgtaggaattcgcattct

SEQ ID NO: 19079 - DNA, 21 bp, Artificial Sequence
  source: /note="Description of Artificial Sequence: Synthetic oligonucleotide"
ctggatgctaggcgttttttt

SEQ ID NO: 19080 - DNA, 21 bp, Artificial Sequence
  source: /note="Description of Artificial Sequence: Synthetic oligonucleotide"
cttgatgatccgggtggttgt

SEQ ID NO: 19081 - DNA, 21 bp, Artificial Sequence
  source: /note="Description of Artificial Sequence: Synthetic oligonucleotide"
ctggatgattcttcgctgttg

SEQ ID NO: 19082 - DNA, 21 bp, Artificial Sequence
  source: /note="Description of Artificial Sequence: Synthetic oligonucleotide"
ttggatgatgttatgccgggt

SEQ ID NO: 19083 - DNA, 21 bp, Artificial Sequence
  source: /note="Description of Artificial Sequence: Synthetic oligonucleotide"
ctggatgagaggtggccgacg

SEQ ID NO: 19084 - DNA, 21 bp, Artificial Sequence
  source: /note="Description of Artificial Sequence: Synthetic oligonucleotide"
cttgattttcctgcgtcttct

SEQ ID NO: 19085 - DNA, 21 bp, Artificial Sequence
  source: /note="Description of Artificial Sequence: Synthetic oligonucleotide"
cttgattttagggaggattct

SEQ ID NO: 19086 - DNA, 21 bp, Artificial Sequence
  source: /note="Description of Artificial Sequence: Synthetic oligonucleotide"
ctggatggtgggagtactcgg

SEQ ID NO: 19087 - DNA, 21 bp, Artificial Sequence
  source: /note="Description of Artificial Sequence: Synthetic oligonucleotide"
cttgatgggcagatgcttgct

SEQ ID NO: 19088 - DNA, 21 bp, Artificial Sequence
  source: /note="Description of Artificial Sequence: Synthetic oligonucleotide"
ctggatggtaggcctttggtt

SEQ ID NO: 19089 - DNA, 21 bp, Artificial Sequence
  source: /note="Description of Artificial Sequence: Synthetic oligonucleotide"
ttggatattgagcggcattcg

SEQ ID NO: 19090 - DNA, 21 bp, Artificial Sequence
  source: /note="Description of Artificial Sequence: Synthetic oligonucleotide"
ttggatattacgaatgttaag

SEQ ID NO: 19091 - DNA, 21 bp, Artificial Sequence
  source: /note="Description of Artificial Sequence: Synthetic oligonucleotide"
ctggataagtttaattcgaag

SEQ ID NO: 19092 - DNA, 21 bp, Artificial Sequence
  source: /note="Description of Artificial Sequence: Synthetic oligonucleotide"
ttggataagaagcatcagtct

SEQ ID NO: 19093 - DNA, 21 bp, Artificial Sequence
  source: /note="Description of Artificial Sequence: Synthetic oligonucleotide"
cttgataagatgcggactact

SEQ ID NO: 19094 - DNA, 21 bp, Artificial Sequence
  source: /note="Description of Artificial Sequence: Synthetic oligonucleotide"
cttgataagagggatattctg

SEQ ID NO: 19095 - DNA, 21 bp, Artificial Sequence
  source: /note="Description of Artificial Sequence: Synthetic oligonucleotide"
ctggataagacgtctcgtttg

SEQ ID NO: 19096 - DNA, 21 bp, Artificial Sequence
  source: /note="Description of Artificial Sequence: Synthetic oligonucleotide"
cttgatttggcgaatagtatg

SEQ ID NO: 19097 - DNA, 21 bp, Artificial Sequence
  source: /note="Description of Artificial Sequence: Synthetic oligonucleotide"
ttggatctgcatttgcaggcg

SEQ ID NO: 19098 - DNA, 21 bp, Artificial Sequence
  source: /note="Description of Artificial Sequence: Synthetic oligonucleotide"
ttggatcttaagagtgtgatg

SEQ ID NO: 19099 - DNA, 21 bp, Artificial Sequence
  source: /note="Description of Artificial Sequence: Synthetic oligonucleotide"
ctggatttgcagacgactaag

SEQ ID NO: 19100 - DNA, 21 bp, Artificial Sequence
  source: /note="Description of Artificial Sequence: Synthetic oligonucleotide"
ttggatttggtggcttttgag

SEQ ID NO: 19101 - DNA, 21 bp, Artificial Sequence
  source: /note="Description of Artificial Sequence: Synthetic oligonucleotide"
cttgatatgcgtgattcgggg

SEQ ID NO: 19102 - DNA, 21 bp, Artificial Sequence
  source: /note="Description of Artificial Sequence: Synthetic oligonucleotide"
cttgatatgcgtactcagggg

SEQ ID NO: 19103 - DNA, 21 bp, Artificial Sequence
  source: /note="Description of Artificial Sequence: Synthetic oligonucleotide"
cttgataatcctcatcatgtt

SEQ ID NO: 19104 - DNA, 21 bp, Artificial Sequence
  source: /note="Description of Artificial Sequence: Synthetic oligonucleotide"
cttgataatcctgtttcggct

SEQ ID NO: 19105 - DNA, 21 bp, Artificial Sequence
  source: /note="Description of Artificial Sequence: Synthetic oligonucleotide"
ctggatcctgatgctcgtcgg

SEQ ID NO: 19106 - DNA, 21 bp, Artificial Sequence
  source: /note="Description of Artificial Sequence: Synthetic oligonucleotide"
ctggatccggggcttaagagt

SEQ ID NO: 19107 - DNA, 21 bp, Artificial Sequence
  source: /note="Description of Artificial Sequence: Synthetic oligonucleotide"
ttggatcgtcttagttctatt

SEQ ID NO: 19108 - DNA, 21 bp, Artificial Sequence
  source: /note="Description of Artificial Sequence: Synthetic oligonucleotide"
cttgatcggcttgttacgggt

SEQ ID NO: 19109 - DNA, 21 bp, Artificial Sequence
  source: /note="Description of Artificial Sequence: Synthetic oligonucleotide"
ctggatcgtatggttgttggt

SEQ ID NO: 19110 - DNA, 21 bp, Artificial Sequence
  source: /note="Description of Artificial Sequence: Synthetic oligonucleotide"
ctggatcggccgtcggcttgg

SEQ ID NO: 19111 - DNA, 21 bp, Artificial Sequence
  source: /note="Description of Artificial Sequence: Synthetic oligonucleotide"
ttggatcgtaggcctattcag

SEQ ID NO: 19112 - DNA, 21 bp, Artificial Sequence
  source: /note="Description of Artificial Sequence: Synthetic oligonucleotide"
cttgatcgtcgtccgatgctt

SEQ ID NO: 19113 - DNA, 21 bp, Artificial Sequence
  source: /note="Description of Artificial Sequence: Synthetic oligonucleotide"
ctggatcgttatactcctccg

SEQ ID NO: 19114 - DNA, 21 bp, Artificial Sequence
  source: /note="Description of Artificial Sequence: Synthetic oligonucleotide"
ttggatagtggtcggcctagt

SEQ ID NO: 19115 - DNA, 21 bp, Artificial Sequence
  source: /note="Description of Artificial Sequence: Synthetic oligonucleotide"
ttggatagtctgcatattcct

SEQ ID NO: 19116 - DNA, 21 bp, Artificial Sequence
  source: /note="Description of Artificial Sequence: Synthetic oligonucleotide"
ttggatagtaatgttacttcg

SEQ ID NO: 19117 - DNA, 21 bp, Artificial Sequence
  source: /note="Description of Artificial Sequence: Synthetic oligonucleotide"
ctggatagtccggctatggcg

SEQ ID NO: 19118 - DNA, 21 bp, Artificial Sequence
  source: /note="Description of Artificial Sequence: Synthetic oligonucleotide"
ttggattcgcctcctaataat

SEQ ID NO: 19119 - DNA, 21 bp, Artificial Sequence
  source: /note="Description of Artificial Sequence: Synthetic oligonucleotide"
ttggattcgtctcatggtcat

SEQ ID NO: 19120 - DNA, 21 bp, Artificial Sequence
  source: /note="Description of Artificial Sequence: Synthetic oligonucleotide"
ttggattcgagtcgttctagt

SEQ ID NO: 19121 - DNA, 21 bp, Artificial Sequence
  source: /note="Description of Artificial Sequence: Synthetic oligonucleotide"
ttggattcttcttggacgccg

SEQ ID NO: 19122 - DNA, 21 bp, Artificial Sequence
  source: /note="Description of Artificial Sequence: Synthetic oligonucleotide"
ttggatagtactccgcggcct

SEQ ID NO: 19123 - DNA, 21 bp, Artificial Sequence
  source: /note="Description of Artificial Sequence: Synthetic oligonucleotide"
cttgatacgcaggcgggtcgt

SEQ ID NO: 19124 - DNA, 21 bp, Artificial Sequence
  source: /note="Description of Artificial Sequence: Synthetic oligonucleotide"
ttggatactcagtctaggctg

SEQ ID NO: 19125 - DNA, 21 bp, Artificial Sequence
  source: /note="Description of Artificial Sequence: Synthetic oligonucleotide"
ctggatactaggggtattagt

SEQ ID NO: 19126 - DNA, 21 bp, Artificial Sequence
  source: /note="Description of Artificial Sequence: Synthetic oligonucleotide"
ttggatacgcgttatcgttat

SEQ ID NO: 19127 - DNA, 21 bp, Artificial Sequence
  source: /note="Description of Artificial Sequence: Synthetic oligonucleotide"
ctggatactgttcagtcgaag

SEQ ID NO: 19128 - DNA, 21 bp, Artificial Sequence
  source: /note="Description of Artificial Sequence: Synthetic oligonucleotide"
ctggatgttgcgactagtagg

SEQ ID NO: 19129 - DNA, 21 bp, Artificial Sequence
  source: /note="Description of Artificial Sequence: Synthetic oligonucleotide"
ctggatgtgaagtgtgatcct

SEQ ID NO: 19130 - DNA, 21 bp, Artificial Sequence
  source: /note="Description of Artificial Sequence: Synthetic oligonucleotide"
ttggatgttcttgattgtaag

SEQ ID NO: 19131 - DNA, 21 bp, Artificial Sequence
  source: /note="Description of Artificial Sequence: Synthetic oligonucleotide"
ctggatgttaatggtttgcgt

SEQ ID NO: 19132 - DNA, 21 bp, Artificial Sequence
  source: /note="Description of Artificial Sequence: Synthetic oligonucleotide"
cttgatgtgtcgcagcggctt

SEQ ID NO: 19133 - DNA, 21 bp, Artificial Sequence
  source: /note="Description of Artificial Sequence: Synthetic oligonucleotide"
ctggatgtggttacgcgtgtt

SEQ ID NO: 19134 - DNA, 21 bp, Artificial Sequence
  source: /note="Description of Artificial Sequence: Synthetic oligonucleotide"
ctggatgtgtatagtcgggag

SEQ ID NO: 19135 - DNA, 21 bp, Artificial Sequence
  source: /note="Description of Artificial Sequence: Synthetic oligonucleotide"
cttgaggctaatctgaaggtt

SEQ ID NO: 19136 - DNA, 21 bp, Artificial Sequence
  source: /note="Description of Artificial Sequence: Synthetic oligonucleotide"
cttgaggctccgagggctact

SEQ ID NO: 19137 - DNA, 21 bp, Artificial Sequence
  source: /note="Description of Artificial Sequence: Synthetic oligonucleotide"
ttggaggaggataaggttaag

SEQ ID NO: 19138 - DNA, 21 bp, Artificial Sequence
  source: /note="Description of Artificial Sequence: Synthetic oligonucleotide"
ctggagtttgatagtaaggag

SEQ ID NO: 19139 - DNA, 21 bp, Artificial Sequence
  source: /note="Description of Artificial Sequence: Synthetic oligonucleotide"
cttgagtttggttctgatcag

SEQ ID NO: 19140 - DNA, 21 bp, Artificial Sequence
  source: /note="Description of Artificial Sequence: Synthetic oligonucleotide"
cttgagtttactcggattggt

SEQ ID NO: 19141 - DNA, 21 bp, Artificial Sequence
  source: /note="Description of Artificial Sequence: Synthetic oligonucleotide"
cttgagggtacgaggcgggat

SEQ ID NO: 19142 - DNA, 21 bp, Artificial Sequence
  source: /note="Description of Artificial Sequence: Synthetic oligonucleotide"
cttgagggtgttaggggttcg

SEQ ID NO: 19143 - DNA, 21 bp, Artificial Sequence
  source: /note="Description of Artificial Sequence: Synthetic oligonucleotide"
ctggagcatcttcgttctgcg

SEQ ID NO: 19144 - DNA, 21 bp, Artificial Sequence
  source: /note="Description of Artificial Sequence: Synthetic oligonucleotide"
ttggagcatagtgcgcatgtt

SEQ ID NO: 19145 - DNA, 21 bp, Artificial Sequence
  source: /note="Description of Artificial Sequence: Synthetic oligonucleotide"
ctggagcatagtgtgagtctt

SEQ ID NO: 19146 - DNA, 21 bp, Artificial Sequence
  source: /note="Description of Artificial Sequence: Synthetic oligonucleotide"
ctggagattacgggtccgggt

SEQ ID NO: 19147 - DNA, 21 bp, Artificial Sequence
  source: /note="Description of Artificial Sequence: Synthetic oligonucleotide"
ctggagaagatggggctttat

SEQ ID NO: 19148 - DNA, 21 bp, Artificial Sequence
  source: /note="Description of Artificial Sequence: Synthetic oligonucleotide"
ctggagaagcagactggtgat

SEQ ID NO: 19149 - DNA, 21 bp, Artificial Sequence
  source: /note="Description of Artificial Sequence: Synthetic oligonucleotide"
ttggagcttaagcctgcgaat

SEQ ID NO: 19150 - DNA, 21 bp, Artificial Sequence
  source: /note="Description of Artificial Sequence: Synthetic oligonucleotide"
cttgagatgagggggctggct

SEQ ID NO: 19151 - DNA, 21 bp, Artificial Sequence
  source: /note="Description of Artificial Sequence: Synthetic oligonucleotide"
ctggagaatgctcagactcct

SEQ ID NO: 19152 - DNA, 21 bp, Artificial Sequence
  source: /note="Description of Artificial Sequence: Synthetic oligonucleotide"
ctggagaatgattggcgtgtt

SEQ ID NO: 19153 - DNA, 21 bp, Artificial Sequence
  source: /note="Description of Artificial Sequence: Synthetic oligonucleotide"
ttggagaatcatccggatagg

SEQ ID NO: 19154 - DNA, 21 bp, Artificial Sequence
  source: /note="Description of Artificial Sequence: Synthetic oligonucleotide"
ttggagaataatcctgctttg

SEQ ID NO: 19155 - DNA, 21 bp, Artificial Sequence
  source: /note="Description of Artificial Sequence: Synthetic oligonucleotide"
ctggagaatagtcatttggtg

SEQ ID NO: 19156 - DNA, 21 bp, Artificial Sequence
  source: /note="Description of Artificial Sequence: Synthetic oligonucleotide"
cttgagccgattgttcgtaat

SEQ ID NO: 19157 - DNA, 21 bp, Artificial Sequence
  source: /note="Description of Artificial Sequence: Synthetic oligonucleotide"
ttggagccgcagacgcattcg

SEQ ID NO: 19158 - DNA, 21 bp, Artificial Sequence
  source: /note="Description of Artificial Sequence: Synthetic oligonucleotide"
ctggagccgtcgcatacgatt

SEQ ID NO: 19159 - DNA, 21 bp, Artificial Sequence
  source: /note="Description of Artificial Sequence: Synthetic oligonucleotide"
ctggagccgtataagcatttt

SEQ ID NO: 19160 - DNA, 21 bp, Artificial Sequence
  source: /note="Description of Artificial Sequence: Synthetic oligonucleotide"
cttgagcagttttcgacggcg

SEQ ID NO: 19161 - DNA, 21 bp, Artificial Sequence
  source: /note="Description of Artificial Sequence: Synthetic oligonucleotide"
ttggagcagcctcctgagcat

SEQ ID NO: 19162 - DNA, 21 bp, Artificial Sequence
  source: /note="Description of Artificial Sequence: Synthetic oligonucleotide"
cttgagcagtataataaggag

SEQ ID NO: 19163 - DNA, 21 bp, Artificial Sequence
  source: /note="Description of Artificial Sequence: Synthetic oligonucleotide"
ttggagcggggttcgagtgag

SEQ ID NO: 19164 - DNA, 21 bp, Artificial Sequence
  source: /note="Description of Artificial Sequence: Synthetic oligonucleotide"
ttggagaggattagttcggtg

SEQ ID NO: 19165 - DNA, 21 bp, Artificial Sequence
  source: /note="Description of Artificial Sequence: Synthetic oligonucleotide"
ttggagtcggctctgtcttct

SEQ ID NO: 19166 - DNA, 21 bp, Artificial Sequence
  source: /note="Description of Artificial Sequence: Synthetic oligonucleotide"
ctggagtcggcgtggattggg

SEQ ID NO: 19167 - DNA, 21 bp, Artificial Sequence
  source: /note="Description of Artificial Sequence: Synthetic oligonucleotide"
ctggagtcgaagcctagtccg

SEQ ID NO: 19168 - DNA, 21 bp, Artificial Sequence
  source: /note="Description of Artificial Sequence: Synthetic oligonucleotide"
ctggagagtaataattatctg

SEQ ID NO: 19169 - DNA, 21 bp, Artificial Sequence
  source: /note="Description of Artificial Sequence: Synthetic oligonucleotide"
ttggagtctcagactaggaat

SEQ ID NO: 19170 - DNA, 21 bp, Artificial Sequence
  source: /note="Description of Artificial Sequence: Synthetic oligonucleotide"
ctggagtcgaggtctggtatg

SEQ ID NO: 19171 - DNA, 21 bp, Artificial Sequence
  source: /note="Description of Artificial Sequence: Synthetic oligonucleotide"
cttgagtcttctcatacgcgg

SEQ ID NO: 19172 - DNA, 21 bp, Artificial Sequence
  source: /note="Description of Artificial Sequence: Synthetic oligonucleotide"
cttgagtcgagtgtgcgtgtt

SEQ ID NO: 19173 - DNA, 21 bp, Artificial Sequence
  source: /note="Description of Artificial Sequence: Synthetic oligonucleotide"
ttggagacggcttcgacgaag

SEQ ID NO: 19174 - DNA, 21 bp, Artificial Sequence
  source: /note="Description of Artificial Sequence: Synthetic oligonucleotide"
cttgagactcggcagattggg

SEQ ID NO: 19175 - DNA, 21 bp, Artificial Sequence
  source: /note="Description of Artificial Sequence: Synthetic oligonucleotide"
ttggagacttcggattctgtt

SEQ ID NO: 19176 - DNA, 21 bp, Artificial Sequence
  source: /note="Description of Artificial Sequence: Synthetic oligonucleotide"
ttggaggtggcgttgaggact

SEQ ID NO: 19177 - DNA, 21 bp, Artificial Sequence
  source: /note="Description of Artificial Sequence: Synthetic oligonucleotide"
cttgaggtggctagtaatcct

SEQ ID NO: 19178 - DNA, 21 bp, Artificial Sequence
  source: /note="Description of Artificial Sequence: Synthetic oligonucleotide"
cttgaggtgacggagccgtgg

SEQ ID NO: 19179 - DNA, 21 bp, Artificial Sequence
  source: /note="Description of Artificial Sequence: Synthetic oligonucleotide"
ctttttgctatttcggtgccg

SEQ ID NO: 19180 - DNA, 21 bp, Artificial Sequence
  source: /note="Description of Artificial Sequence: Synthetic oligonucleotide"
ctgtttgctaatacgattagt

SEQ ID NO: 19181 - DNA, 21 bp, Artificial Sequence
  source: /note="Description of Artificial Sequence: Synthetic oligonucleotide"
ttgtttgatgcggcgcttccg

SEQ ID NO: 19182 - DNA, 21 bp, Artificial Sequence
  source: /note="Description of Artificial Sequence: Synthetic oligonucleotide"
ctgtttgattttacgaaggag

SEQ ID NO: 19183 - DNA, 21 bp, Artificial Sequence
  source: /note="Description of Artificial Sequence: Synthetic oligonucleotide"
ctttttgatccgaatcggggg

SEQ ID NO: 19184 - DNA, 21 bp, Artificial Sequence
  source: /note="Description of Artificial Sequence: Synthetic oligonucleotide"
ctgtttgataggacggctttg

SEQ ID NO: 19185 - DNA, 21 bp, Artificial Sequence
  source: /note="Description of Artificial Sequence: Synthetic oligonucleotide"
ctttttgattcgtctactacg

SEQ ID NO: 19186 - DNA, 21 bp, Artificial Sequence
  source: /note="Description of Artificial Sequence: Synthetic oligonucleotide"
ttgtttgagctgcagcatcgg

SEQ ID NO: 19187 - DNA, 21 bp, Artificial Sequence
  source: /note="Description of Artificial Sequence: Synthetic oligonucleotide"
cttttttttacggcggctccg

SEQ ID NO: 19188 - DNA, 21 bp, Artificial Sequence
  source: /note="Description of Artificial Sequence: Synthetic oligonucleotide"
ctgtttggtaaggtgagtggt

SEQ ID NO: 19189 - DNA, 21 bp, Artificial Sequence
  source: /note="Description of Artificial Sequence: Synthetic oligonucleotide"
ttgtttgggtcgcgtccgact

SEQ ID NO: 19190 - DNA, 21 bp, Artificial Sequence
  source: /note="Description of Artificial Sequence: Synthetic oligonucleotide"
ttgtttgggacgaatcggagt

SEQ ID NO: 19191 - DNA, 21 bp, Artificial Sequence
  source: /note="Description of Artificial Sequence: Synthetic oligonucleotide"
ttgtttcatgagtcgacttat

SEQ ID NO: 19192 - DNA, 21 bp, Artificial Sequence
  source: /note="Description of Artificial Sequence: Synthetic oligonucleotide"
ctgtttcattcgaatgatgat

SEQ ID NO: 19193 - DNA, 21 bp, Artificial Sequence
  source: /note="Description of Artificial Sequence: Synthetic oligonucleotide"
ctttttattaatcatgggtct

SEQ ID NO: 19194 - DNA, 21 bp, Artificial Sequence
  source: /note="Description of Artificial Sequence: Synthetic oligonucleotide"
ctgtttattactacgactagt

SEQ ID NO: 19195 - DNA, 21 bp, Artificial Sequence
  source: /note="Description of Artificial Sequence: Synthetic oligonucleotide"
ctttttaagcatagtcgtgag

SEQ ID NO: 19196 - DNA, 21 bp, Artificial Sequence
  source: /note="Description of Artificial Sequence: Synthetic oligonucleotide"
ctgtttctgtcgcaggtgcct

SEQ ID NO: 19197 - DNA, 21 bp, Artificial Sequence
  source: /note="Description of Artificial Sequence: Synthetic oligonucleotide"
ttgtttaatcagcaggttctt

SEQ ID NO: 19198 - DNA, 21 bp, Artificial Sequence
  source: /note="Description of Artificial Sequence: Synthetic oligonucleotide"
ctttttaattcttcgcctgag

SEQ ID NO: 19199 - DNA, 21 bp, Artificial Sequence
  source: /note="Description of Artificial Sequence: Synthetic oligonucleotide"
ctttttccggggtcgattgat

SEQ ID NO: 19200 - DNA, 21 bp, Artificial Sequence
  source: /note="Description of Artificial Sequence: Synthetic oligonucleotide"
ttgtttccgactggttctctt

SEQ ID NO: 19201 - DNA, 21 bp, Artificial Sequence
  source: /note="Description of Artificial Sequence: Synthetic oligonucleotide"
ttgtttcgtgcttcggatagg

SEQ ID NO: 19202 - DNA, 21 bp, Artificial Sequence
  source: /note="Description of Artificial Sequence: Synthetic oligonucleotide"
ctgtttagtgagtctaggtcg

SEQ ID NO: 19203 - DNA, 21 bp, Artificial Sequence
  source: /note="Description of Artificial Sequence: Synthetic oligonucleotide"
ttgttttcgggtgctgagagt

SEQ ID NO: 19204 - DNA, 21 bp, Artificial Sequence
  source: /note="Description of Artificial Sequence: Synthetic oligonucleotide"
cttttttcgatgccggtgtct

SEQ ID NO: 19205 - DNA, 21 bp, Artificial Sequence
  source: /note="Description of Artificial Sequence: Synthetic oligonucleotide"
ttgtttacttcggctgatctt

SEQ ID NO: 19206 - DNA, 21 bp, Artificial Sequence
  source: /note="Description of Artificial Sequence: Synthetic oligonucleotide"
ttgtttacttctgagtcgatt

SEQ ID NO: 19207 - DNA, 21 bp, Artificial Sequence
  source: /note="Description of Artificial Sequence: Synthetic oligonucleotide"
ctttttacttctcctagtatg

SEQ ID NO: 19208 - DNA, 21 bp, Artificial Sequence
  source: /note="Description of Artificial Sequence: Synthetic oligonucleotide"
ctgtttactacgatggtgcct

SEQ ID NO: 19209 - DNA, 21 bp, Artificial Sequence
  source: /note="Description of Artificial Sequence: Synthetic oligonucleotide"
ttgggggctgctgtgaatttg

SEQ ID NO: 19210 - DNA, 21 bp, Artificial Sequence
  source: /note="Description of Artificial Sequence: Synthetic oligonucleotide"
cttggtgctggtagtagtgtg

SEQ ID NO: 19211 - DNA, 21 bp, Artificial Sequence
  source: /note="Description of Artificial Sequence: Synthetic oligonucleotide"
cttggtgcgttgtctggtcct

SEQ ID NO: 19212 - DNA, 21 bp, Artificial Sequence
  source: /note="Description of Artificial Sequence: Synthetic oligonucleotide"
ttgggggctctgactcatgct

SEQ ID NO: 19213 - DNA, 21 bp, Artificial Sequence
  source: /note="Description of Artificial Sequence: Synthetic oligonucleotide"
ctgggtgctaggattcagttg

SEQ ID NO: 19214 - DNA, 21 bp, Artificial Sequence
  source: /note="Description of Artificial Sequence: Synthetic oligonucleotide"
ttgggtgcgcggacggctgct

SEQ ID NO: 19215 - DNA, 21 bp, Artificial Sequence
  source: /note="Description of Artificial Sequence: Synthetic oligonucleotide"
cttggtgcttcttcgtctttg

SEQ ID NO: 19216 - DNA, 21 bp, Artificial Sequence
  source: /note="Description of Artificial Sequence: Synthetic oligonucleotide"
ttgggggcttatttggggccg

SEQ ID NO: 19217 - DNA, 21 bp, Artificial Sequence
  source: /note="Description of Artificial Sequence: Synthetic oligonucleotide"
ttgggtgcttataatgctcag

SEQ ID NO: 19218 - DNA, 21 bp, Artificial Sequence
  source: /note="Description of Artificial Sequence: Synthetic oligonucleotide"
cttggtgatgctgggttttcg

SEQ ID NO: 19219 - DNA, 21 bp, Artificial Sequence
  source: /note="Description of Artificial Sequence: Synthetic oligonucleotide"
ttgggtgatcattataggcat

SEQ ID NO: 19220 - DNA, 21 bp, Artificial Sequence
  source: /note="Description of Artificial Sequence: Synthetic oligonucleotide"
cttggggatccttttcctcct

SEQ ID NO: 19221 - DNA, 21 bp, Artificial Sequence
  source: /note="Description of Artificial Sequence: Synthetic oligonucleotide"
cttggtgataggactgatttt

SEQ ID NO: 19222 - DNA, 21 bp, Artificial Sequence
  source: /note="Description of Artificial Sequence: Synthetic oligonucleotide"
cttggtgataggacgcatatt

SEQ ID NO: 19223 - DNA, 21 bp, Artificial Sequence
  source: /note="Description of Artificial Sequence: Synthetic oligonucleotide"
cttggggatactgctcatcat

SEQ ID NO: 19224 - DNA, 21 bp, Artificial Sequence
  source: /note="Description of Artificial Sequence: Synthetic oligonucleotide"
cttggttttggggcgacgcag

SEQ ID NO: 19225 - DNA, 21 bp, Artificial Sequence
  source: /note="Description of Artificial Sequence: Synthetic oligonucleotide"
ctgggttttaatgttgtggtt

SEQ ID NO: 19226 - DNA, 21 bp, Artificial Sequence
  source: /note="Description of Artificial Sequence: Synthetic oligonucleotide"
ttggggtttaattatcaggat

SEQ ID NO: 19227 - DNA, 21 bp, Artificial Sequence
  source: /note="Description of Artificial Sequence: Synthetic oligonucleotide"
ctggggtttccttctactgag

SEQ ID NO: 19228 - DNA, 21 bp, Artificial Sequence
  source: /note="Description of Artificial Sequence: Synthetic oligonucleotide"
ctgggtggtgatgctcagatt

SEQ ID NO: 19229 - DNA, 21 bp, Artificial Sequence
  source: /note="Description of Artificial Sequence: Synthetic oligonucleotide"
ttggggggggggaggtcgctg

SEQ ID NO: 19230 - DNA, 21 bp, Artificial Sequence
  source: /note="Description of Artificial Sequence: Synthetic oligonucleotide"
ctggggggttcgctgtcgatg

SEQ ID NO: 19231 - DNA, 21 bp, Artificial Sequence
  source: /note="Description of Artificial Sequence: Synthetic oligonucleotide"
ctgggggggtcttatccgctt

SEQ ID NO: 19232 - DNA, 21 bp, Artificial Sequence
  source: /note="Description of Artificial Sequence: Synthetic oligonucleotide"
ttggggcatgcgacttcggcg

SEQ ID NO: 19233 - DNA, 21 bp, Artificial Sequence
  source: /note="Description of Artificial Sequence: Synthetic oligonucleotide"
ttggggcatgggccggggcat

SEQ ID NO: 19234 - DNA, 21 bp, Artificial Sequence
  source: /note="Description of Artificial Sequence: Synthetic oligonucleotide"
ttggggcatagtaagcctcct

SEQ ID NO: 19235 - DNA, 21 bp, Artificial Sequence
  source: /note="Description of Artificial Sequence: Synthetic oligonucleotide"
ctgggtattattacgcatgct

SEQ ID NO: 19236 - DNA, 21 bp, Artificial Sequence
  source: /note="Description of Artificial Sequence: Synthetic oligonucleotide"
cttggtattatgaagactgct

SEQ ID NO: 19237 - DNA, 21 bp, Artificial Sequence
  source: /note="Description of Artificial Sequence: Synthetic oligonucleotide"
ttgggtaagcttacgactgtg

SEQ ID NO: 19238 - DNA, 21 bp, Artificial Sequence
  source: /note="Description of Artificial Sequence: Synthetic oligonucleotide"
ttgggtaagagtcttctgact

SEQ ID NO: 19239 - DNA, 21 bp, Artificial Sequence
  source: /note="Description of Artificial Sequence: Synthetic oligonucleotide"
ttggggaagtatgggattgtg

SEQ ID NO: 19240 - DNA, 21 bp, Artificial Sequence
  source: /note="Description of Artificial Sequence: Synthetic oligonucleotide"
cttgggttgaatcatcagact

SEQ ID NO: 19241 - DNA, 21 bp, Artificial Sequence
  source: /note="Description of Artificial Sequence: Synthetic oligonucleotide"
cttggtttgccgtcgaagggt

SEQ ID NO: 19242 - DNA, 21 bp, Artificial Sequence
  source: /note="Description of Artificial Sequence: Synthetic oligonucleotide"
cttggtcttagggataaggat

SEQ ID NO: 19243 - DNA, 21 bp, Artificial Sequence
  source: /note="Description of Artificial Sequence: Synthetic oligonucleotide"
ttgggtcttagggagtcttcg

SEQ ID NO: 19244 - DNA, 21 bp, Artificial Sequence
  source: /note="Description of Artificial Sequence: Synthetic oligonucleotide"
cttgggctttcgacggttcat

SEQ ID NO: 19245 - DNA, 21 bp, Artificial Sequence
  source: /note="Description of Artificial Sequence: Synthetic oligonucleotide"
ctgggtcttgttcttaatcag

SEQ ID NO: 19246 - DNA, 21 bp, Artificial Sequence
  source: /note="Description of Artificial Sequence: Synthetic oligonucleotide"
cttgggatgttgaagactgag

SEQ ID NO: 19247 - DNA, 21 bp, Artificial Sequence
  source: /note="Description of Artificial Sequence: Synthetic oligonucleotide"
ttggggatgatgcctgcttct

SEQ ID NO: 19248 - DNA, 21 bp, Artificial Sequence
  source: /note="Description of Artificial Sequence: Synthetic oligonucleotide"
cttgggaatcatccgagtgtg

SEQ ID NO: 19249 - DNA, 21 bp, Artificial Sequence
  source: /note="Description of Artificial Sequence: Synthetic oligonucleotide"
ctgggtaatccggataagatg

SEQ ID NO: 19250 - DNA, 21 bp, Artificial Sequence
  source: /note="Description of Artificial Sequence: Synthetic oligonucleotide"
ctggggaatccgtcgccttgt

SEQ ID NO: 19251 - DNA, 21 bp, Artificial Sequence
  source: /note="Description of Artificial Sequence: Synthetic oligonucleotide"
ttgggtaatccggtgactgtt

SEQ ID NO: 19252 - DNA, 21 bp, Artificial Sequence
  source: /note="Description of Artificial Sequence: Synthetic oligonucleotide"
ttgggtaatcagcggtcggat

SEQ ID NO: 19253 - DNA, 21 bp, Artificial Sequence
  source: /note="Description of Artificial Sequence: Synthetic oligonucleotide"
cttggtccggcggggatgcct

SEQ ID NO: 19254 - DNA, 21 bp, Artificial Sequence
  source: /note="Description of Artificial Sequence: Synthetic oligonucleotide"
ttgggtcctgcggggccttat

SEQ ID NO: 19255 - DNA, 21 bp, Artificial Sequence
  source: /note="Description of Artificial Sequence: Synthetic oligonucleotide"
cttgggccttttcatggtgag

SEQ ID NO: 19256 - DNA, 21 bp, Artificial Sequence
  source: /note="Description of Artificial Sequence: Synthetic oligonucleotide"
cttgggccgggttcttatccg

SEQ ID NO: 19257 - DNA, 21 bp, Artificial Sequence
  source: /note="Description of Artificial Sequence: Synthetic oligonucleotide"
ctgggtccttcttctaaggtt

SEQ ID NO: 19258 - DNA, 21 bp, Artificial Sequence
  source: /note="Description of Artificial Sequence: Synthetic oligonucleotide"
cttgggcctagttatacgaat

SEQ ID NO: 19259 - DNA, 21 bp, Artificial Sequence
  source: /note="Description of Artificial Sequence: Synthetic oligonucleotide"
cttggtcctactattaggtcg

SEQ ID NO: 19260 - DNA, 21 bp, Artificial Sequence
  source: /note="Description of Artificial Sequence: Synthetic oligonucleotide"
ctgggtccgactaagctgccg

SEQ ID NO: 19261 - DNA, 21 bp, Artificial Sequence
  source: /note="Description of Artificial Sequence: Synthetic oligonucleotide"
ttggggcaggcgctgcgggtt

SEQ ID NO: 19262 - DNA, 21 bp, Artificial Sequence
  source: /note="Description of Artificial Sequence: Synthetic oligonucleotide"
cttgggcagaagcctaatgag

SEQ ID NO: 19263 - DNA, 21 bp, Artificial Sequence
  source: /note="Description of Artificial Sequence: Synthetic oligonucleotide"
ttgggtcagtctggttgtcgt

SEQ ID NO: 19264 - DNA, 21 bp, Artificial Sequence
  source: /note="Description of Artificial Sequence: Synthetic oligonucleotide"
cttggtcagtctggtacgaag

SEQ ID NO: 19265 - DNA, 21 bp, Artificial Sequence
  source: /note="Description of Artificial Sequence: Synthetic oligonucleotide"
ttgggtcgtgcgctggagcat

SEQ ID NO: 19266 - DNA, 21 bp, Artificial Sequence
  source: /note="Description of Artificial Sequence: Synthetic oligonucleotide"
ttggggcgggcgtatagtcag

SEQ ID NO: 19267 - DNA, 21 bp, Artificial Sequence
  source: /note="Description of Artificial Sequence: Synthetic oligonucleotide"
cttggtagggagaggcctact

SEQ ID NO: 19268 - DNA, 21 bp, Artificial Sequence
  source: /note="Description of Artificial Sequence: Synthetic oligonucleotide"
cttggtcgtattgcggtgaat

SEQ ID NO: 19269 - DNA, 21 bp, Artificial Sequence
  source: /note="Description of Artificial Sequence: Synthetic oligonucleotide"
cttggtcggctgaattctggg

SEQ ID NO: 19270 - DNA, 21 bp, Artificial Sequence
  source: /note="Description of Artificial Sequence: Synthetic oligonucleotide"
cttggtcggcctcagatggat

SEQ ID NO: 19271 - DNA, 21 bp, Artificial Sequence
  source: /note="Description of Artificial Sequence: Synthetic oligonucleotide"
ttggggaggtcgggtgcgctg

SEQ ID NO: 19272 - DNA, 21 bp, Artificial Sequence
  source: /note="Description of Artificial Sequence: Synthetic oligonucleotide"
cttggttctgctggtccgcct

SEQ ID NO: 19273 - DNA, 21 bp, Artificial Sequence
  source: /note="Description of Artificial Sequence: Synthetic oligonucleotide"
ctgggtagtgcggggtattct

SEQ ID NO: 19274 - DNA, 21 bp, Artificial Sequence
  source: /note="Description of Artificial Sequence: Synthetic oligonucleotide"
cttgggtctgcgcattctcct

SEQ ID NO: 19275 - DNA, 21 bp, Artificial Sequence
  source: /note="Description of Artificial Sequence: Synthetic oligonucleotide"
ctggggtcggcgacttctggg

SEQ ID NO: 19276 - DNA, 21 bp, Artificial Sequence
  source: /note="Description of Artificial Sequence: Synthetic oligonucleotide"
cttggttctcattatagtaat

SEQ ID NO: 19277 - DNA, 21 bp, Artificial Sequence
  source: /note="Description of Artificial Sequence: Synthetic oligonucleotide"
cttggttctcttactgtggct

SEQ ID NO: 19278 - DNA, 21 bp, Artificial Sequence
  source: /note="Description of Artificial Sequence: Synthetic oligonucleotide"
ttgggttcgatgcctcttctt

SEQ ID NO: 19279 - DNA, 21 bp, Artificial Sequence
  source: /note="Description of Artificial Sequence: Synthetic oligonucleotide"
ttggggtctaatcataagccg

SEQ ID NO: 19280 - DNA, 21 bp, Artificial Sequence
  source: /note="Description of Artificial Sequence: Synthetic oligonucleotide"
cttggttctccttctccggat

SEQ ID NO: 19281 - DNA, 21 bp, Artificial Sequence
  source: /note="Description of Artificial Sequence: Synthetic oligonucleotide"
ttgggtagtcaggttattgcg

SEQ ID NO: 19282 - DNA, 21 bp, Artificial Sequence
  source: /note="Description of Artificial Sequence: Synthetic oligonucleotide"
ttgggttctcagtatgctgtt

SEQ ID NO: 19283 - DNA, 21 bp, Artificial Sequence
  source: /note="Description of Artificial Sequence: Synthetic oligonucleotide"
ttggggagtcggtcggatctt

SEQ ID NO: 19284 - DNA, 21 bp, Artificial Sequence
  source: /note="Description of Artificial Sequence: Synthetic oligonucleotide"
cttgggtcttcgttgcgggct

SEQ ID NO: 19285 - DNA, 21 bp, Artificial Sequence
  source: /note="Description of Artificial Sequence: Synthetic oligonucleotide"
ttgggttcttcgctgcggaat

SEQ ID NO: 19286 - DNA, 21 bp, Artificial Sequence
  source: /note="Description of Artificial Sequence: Synthetic oligonucleotide"
ttggggtcttctcagtctagg

SEQ ID NO: 19287 - DNA, 21 bp, Artificial Sequence
  source: /note="Description of Artificial Sequence: Synthetic oligonucleotide"
cttggttcgacgagtgctgtt

SEQ ID NO: 19288 - DNA, 21 bp, Artificial Sequence
  source: /note="Description of Artificial Sequence: Synthetic oligonucleotide"
ctgggttcggttaagttttct

SEQ ID NO: 19289 - DNA, 21 bp, Artificial Sequence
  source: /note="Description of Artificial Sequence: Synthetic oligonucleotide"
ttggggacggctttgcatctt

SEQ ID NO: 19290 - DNA, 21 bp, Artificial Sequence
  source: /note="Description of Artificial Sequence: Synthetic oligonucleotide"
ttggggacggggaggttgtat

SEQ ID NO: 19291 - DNA, 21 bp, Artificial Sequence
  source: /note="Description of Artificial Sequence: Synthetic oligonucleotide"
ctgggtactcttaatactgtg

SEQ ID NO: 19292 - DNA, 21 bp, Artificial Sequence
  source: /note="Description of Artificial Sequence: Synthetic oligonucleotide"
ctggggacgagggcttctggg

SEQ ID NO: 19293 - DNA, 21 bp, Artificial Sequence
  source: /note="Description of Artificial Sequence: Synthetic oligonucleotide"
ctgggtacgcggccgatgttg

SEQ ID NO: 19294 - DNA, 21 bp, Artificial Sequence
  source: /note="Description of Artificial Sequence: Synthetic oligonucleotide"
cttggtacttcggatgtgctt

SEQ ID NO: 19295 - DNA, 21 bp, Artificial Sequence
  source: /note="Description of Artificial Sequence: Synthetic oligonucleotide"
ttgggtacgagtcatgtggct

SEQ ID NO: 19296 - DNA, 21 bp, Artificial Sequence
  source: /note="Description of Artificial Sequence: Synthetic oligonucleotide"
ttgggtacgtctcagacgggt

SEQ ID NO: 19297 - DNA, 21 bp, Artificial Sequence
  source: /note="Description of Artificial Sequence: Synthetic oligonucleotide"
cttggtacggttcgtgtgtat

SEQ ID NO: 19298 - DNA, 21 bp, Artificial Sequence
  source: /note="Description of Artificial Sequence: Synthetic oligonucleotide"
ttgggggtggcgaagcctgcg

SEQ ID NO: 19299 - DNA, 21 bp, Artificial Sequence
  source: /note="Description of Artificial Sequence: Synthetic oligonucleotide"
ttgggtgtggataagaatgcg

SEQ ID NO: 19300 - DNA, 21 bp, Artificial Sequence
  source: /note="Description of Artificial Sequence: Synthetic oligonucleotide"
ctgggtgttgaggtgttgaag

SEQ ID NO: 19301 - DNA, 21 bp, Artificial Sequence
  source: /note="Description of Artificial Sequence: Synthetic oligonucleotide"
cttggtgtgaaggctgcgggg

SEQ ID NO: 19302 - DNA, 21 bp, Artificial Sequence
  source: /note="Description of Artificial Sequence: Synthetic oligonucleotide"
cttggggtgaagtctgttgat

SEQ ID NO: 19303 - DNA, 21 bp, Artificial Sequence
  source: /note="Description of Artificial Sequence: Synthetic oligonucleotide"
ctgggggttctgcggagtagt

SEQ ID NO: 19304 - DNA, 21 bp, Artificial Sequence
  source: /note="Description of Artificial Sequence: Synthetic oligonucleotide"
ttgggggttaatacttcgcag

SEQ ID NO: 19305 - DNA, 21 bp, Artificial Sequence
  source: /note="Description of Artificial Sequence: Synthetic oligonucleotide"
cttggggtgccgcctcagagt

SEQ ID NO: 19306 - DNA, 21 bp, Artificial Sequence
  source: /note="Description of Artificial Sequence: Synthetic oligonucleotide"
ctgggggtttcgagggagctt

SEQ ID NO: 19307 - DNA, 21 bp, Artificial Sequence
  source: /note="Description of Artificial Sequence: Synthetic oligonucleotide"
ttgggtgtgagtacgcatatg

SEQ ID NO: 19308 - DNA, 21 bp, Artificial Sequence
  source: /note="Description of Artificial Sequence: Synthetic oligonucleotide"
ttggggtataatttgggggag

SEQ ID NO: 19309 - DNA, 21 bp, Artificial Sequence
  source: /note="Description of Artificial Sequence: Synthetic oligonucleotide"
cttgggtatccgccgcgggag

SEQ ID NO: 19310 - DNA, 21 bp, Artificial Sequence
  source: /note="Description of Artificial Sequence: Synthetic oligonucleotide"
cttgggtattcgactggtgcg

SEQ ID NO: 19311 - DNA, 21 bp, Artificial Sequence
  source: /note="Description of Artificial Sequence: Synthetic oligonucleotide"
cttcatgctgctccggcgtct

SEQ ID NO: 19312 - DNA, 21 bp, Artificial Sequence
  source: /note="Description of Artificial Sequence: Synthetic oligonucleotide"
cttcatgcgaatcggactgag

SEQ ID NO: 19313 - DNA, 21 bp, Artificial Sequence
  source: /note="Description of Artificial Sequence: Synthetic oligonucleotide"
ctgcatgcgccggaggttgct

SEQ ID NO: 19314 - DNA, 21 bp, Artificial Sequence
  source: /note="Description of Artificial Sequence: Synthetic oligonucleotide"
ttgcatgcgacttcttctacg

SEQ ID NO: 19315 - DNA, 21 bp, Artificial Sequence
  source: /note="Description of Artificial Sequence: Synthetic oligonucleotide"
cttcatgcgacgactgggcct

SEQ ID NO: 19316 - DNA, 21 bp, Artificial Sequence
  source: /note="Description of Artificial Sequence: Synthetic oligonucleotide"
ttgcatgagtatcgttctcct

SEQ ID NO: 19317 - DNA, 21 bp, Artificial Sequence
  source: /note="Description of Artificial Sequence: Synthetic oligonucleotide"
ttgcattttggtcctgagggg

SEQ ID NO: 19318 - DNA, 21 bp, Artificial Sequence
  source: /note="Description of Artificial Sequence: Synthetic oligonucleotide"
ttgcatgggttggggtctggg

SEQ ID NO: 19319 - DNA, 21 bp, Artificial Sequence
  source: /note="Description of Artificial Sequence: Synthetic oligonucleotide"
cttcatgggatgccggagcgg

SEQ ID NO: 19320 - DNA, 21 bp, Artificial Sequence
  source: /note="Description of Artificial Sequence: Synthetic oligonucleotide"
cttcatattcgggagatggct

SEQ ID NO: 19321 - DNA, 21 bp, Artificial Sequence
  source: /note="Description of Artificial Sequence: Synthetic oligonucleotide"
ctgcataagtcgggttttaat

SEQ ID NO: 19322 - DNA, 21 bp, Artificial Sequence
  source: /note="Description of Artificial Sequence: Synthetic oligonucleotide"
ctgcatcttcagggtaatagt

SEQ ID NO: 19323 - DNA, 21 bp, Artificial Sequence
  source: /note="Description of Artificial Sequence: Synthetic oligonucleotide"
cttcatttgtcgcggcctttg

SEQ ID NO: 19324 - DNA, 21 bp, Artificial Sequence
  source: /note="Description of Artificial Sequence: Synthetic oligonucleotide"
ttgcatctgtctactgctccg

SEQ ID NO: 19325 - DNA, 21 bp, Artificial Sequence
  source: /note="Description of Artificial Sequence: Synthetic oligonucleotide"
ttgcatatgactactactcgt

SEQ ID NO: 19326 - DNA, 21 bp, Artificial Sequence
  source: /note="Description of Artificial Sequence: Synthetic oligonucleotide"
ttgcataatgatctgattcgt

SEQ ID NO: 19327 - DNA, 21 bp, Artificial Sequence
  source: /note="Description of Artificial Sequence: Synthetic oligonucleotide"
ttgcataatattcgtcagcag

SEQ ID NO: 19328 - DNA, 21 bp, Artificial Sequence
  source: /note="Description of Artificial Sequence: Synthetic oligonucleotide"
ttgcataataagatgtatgat

SEQ ID NO: 19329 - DNA, 21 bp, Artificial Sequence
  source: /note="Description of Artificial Sequence: Synthetic oligonucleotide"
ctgcataatcaggcggctagg

SEQ ID NO: 19330 - DNA, 21 bp, Artificial Sequence
  source: /note="Description of Artificial Sequence: Synthetic oligonucleotide"
ctgcataatactgctgctgct

SEQ ID NO: 19331 - DNA, 21 bp, Artificial Sequence
  source: /note="Description of Artificial Sequence: Synthetic oligonucleotide"
cttcataatacgcggaatatg

SEQ ID NO: 19332 - DNA, 21 bp, Artificial Sequence
  source: /note="Description of Artificial Sequence: Synthetic oligonucleotide"
ctgcataatacgcggactgtg

SEQ ID NO: 19333 - DNA, 21 bp, Artificial Sequence
  source: /note="Description of Artificial Sequence: Synthetic oligonucleotide"
ctgcatcctgggtcgactgct

SEQ ID NO: 19334 - DNA, 21 bp, Artificial Sequence
  source: /note="Description of Artificial Sequence: Synthetic oligonucleotide"
cttcatccgctttcgccgcgg

SEQ ID NO: 19335 - DNA, 21 bp, Artificial Sequence
  source: /note="Description of Artificial Sequence: Synthetic oligonucleotide"
cttcatccggtgcatgcgcct

SEQ ID NO: 19336 - DNA, 21 bp, Artificial Sequence
  source: /note="Description of Artificial Sequence: Synthetic oligonucleotide"
ttgcatcaggataggcttgct

SEQ ID NO: 19337 - DNA, 21 bp, Artificial Sequence
  source: /note="Description of Artificial Sequence: Synthetic oligonucleotide"
cttcatcagatggggaattcg

SEQ ID NO: 19338 - DNA, 21 bp, Artificial Sequence
  source: /note="Description of Artificial Sequence: Synthetic oligonucleotide"
ctgcatcagtcgtataatcag

SEQ ID NO: 19339 - DNA, 21 bp, Artificial Sequence
  source: /note="Description of Artificial Sequence: Synthetic oligonucleotide"
cttcatcgggatcttcctgtg

SEQ ID NO: 19340 - DNA, 21 bp, Artificial Sequence
  source: /note="Description of Artificial Sequence: Synthetic oligonucleotide"
ttgcataggcgtccgtctgag

SEQ ID NO: 19341 - DNA, 21 bp, Artificial Sequence
  source: /note="Description of Artificial Sequence: Synthetic oligonucleotide"
ttgcattctgctctgacgcgt

SEQ ID NO: 19342 - DNA, 21 bp, Artificial Sequence
  source: /note="Description of Artificial Sequence: Synthetic oligonucleotide"
ttgcattctgctagtcctcag

SEQ ID NO: 19343 - DNA, 21 bp, Artificial Sequence
  source: /note="Description of Artificial Sequence: Synthetic oligonucleotide"
ctgcattcggatactcgtggt

SEQ ID NO: 19344 - DNA, 21 bp, Artificial Sequence
  source: /note="Description of Artificial Sequence: Synthetic oligonucleotide"
ttgcattctgagttgacttcg

SEQ ID NO: 19345 - DNA, 21 bp, Artificial Sequence
  source: /note="Description of Artificial Sequence: Synthetic oligonucleotide"
ctgcattctggggagcgtcag

SEQ ID NO: 19346 - DNA, 21 bp, Artificial Sequence
  source: /note="Description of Artificial Sequence: Synthetic oligonucleotide"
ttgcattcgaatgtgacgaag

SEQ ID NO: 19347 - DNA, 21 bp, Artificial Sequence
  source: /note="Description of Artificial Sequence: Synthetic oligonucleotide"
ctgcattcgagggcggattcg

SEQ ID NO: 19348 - DNA, 21 bp, Artificial Sequence
  source: /note="Description of Artificial Sequence: Synthetic oligonucleotide"
cttcattctagggctattagt

SEQ ID NO: 19349 - DNA, 21 bp, Artificial Sequence
  source: /note="Description of Artificial Sequence: Synthetic oligonucleotide"
ttgcattctcgtgggactgct

SEQ ID NO: 19350 - DNA, 21 bp, Artificial Sequence
  source: /note="Description of Artificial Sequence: Synthetic oligonucleotide"
ctgcattctagtccgcaggat

SEQ ID NO: 19351 - DNA, 21 bp, Artificial Sequence
  source: /note="Description of Artificial Sequence: Synthetic oligonucleotide"
cttcatacggctaaggcgggt

SEQ ID NO: 19352 - DNA, 21 bp, Artificial Sequence
  source: /note="Description of Artificial Sequence: Synthetic oligonucleotide"
cttcatacggattggcttcgg

SEQ ID NO: 19353 - DNA, 21 bp, Artificial Sequence
  source: /note="Description of Artificial Sequence: Synthetic oligonucleotide"
ttgcatacgccgcagctgagt

SEQ ID NO: 19354 - DNA, 21 bp, Artificial Sequence
  source: /note="Description of Artificial Sequence: Synthetic oligonucleotide"
ctgcatacttcggctcggcct

SEQ ID NO: 19355 - DNA, 21 bp, Artificial Sequence
  source: /note="Description of Artificial Sequence: Synthetic oligonucleotide"
ttgcatgttcctcagcctccg

SEQ ID NO: 19356 - DNA, 21 bp, Artificial Sequence
  source: /note="Description of Artificial Sequence: Synthetic oligonucleotide"
cttattgcgagtcatcgtctg

SEQ ID NO: 19357 - DNA, 21 bp, Artificial Sequence
  source: /note="Description of Artificial Sequence: Synthetic oligonucleotide"
cttattgcttcgtctggtgtg

SEQ ID NO: 19358 - DNA, 21 bp, Artificial Sequence
  source: /note="Description of Artificial Sequence: Synthetic oligonucleotide"
ctgattgctagtactacgtcg

SEQ ID NO: 19359 - DNA, 21 bp, Artificial Sequence
  source: /note="Description of Artificial Sequence: Synthetic oligonucleotide"
ttgattgggaatgttgtgatg

SEQ ID NO: 19360 - DNA, 21 bp, Artificial Sequence
  source: /note="Description of Artificial Sequence: Synthetic oligonucleotide"
cttattgggcggcctatggag

SEQ ID NO: 19361 - DNA, 21 bp, Artificial Sequence
  source: /note="Description of Artificial Sequence: Synthetic oligonucleotide"
cttattgggcggactatttct

SEQ ID NO: 19362 - DNA, 21 bp, Artificial Sequence
  source: /note="Description of Artificial Sequence: Synthetic oligonucleotide"
ttgattggtacggcgtcgctg

SEQ ID NO: 19363 - DNA, 21 bp, Artificial Sequence
  source: /note="Description of Artificial Sequence: Synthetic oligonucleotide"
cttattgggacgcctgttgtg

SEQ ID NO: 19364 - DNA, 21 bp, Artificial Sequence
  source: /note="Description of Artificial Sequence: Synthetic oligonucleotide"
ttgattcatgctagtgggggt

SEQ ID NO: 19365 - DNA, 21 bp, Artificial Sequence
  source: /note="Description of Artificial Sequence: Synthetic oligonucleotide"
ctgattcatctgtcgggtgcg

SEQ ID NO: 19366 - DNA, 21 bp, Artificial Sequence
  source: /note="Description of Artificial Sequence: Synthetic oligonucleotide"
ctgattaaggagaatgttctg

SEQ ID NO: 19367 - DNA, 21 bp, Artificial Sequence
  source: /note="Description of Artificial Sequence: Synthetic oligonucleotide"
ttgattaagggggcggctagt

SEQ ID NO: 19368 - DNA, 21 bp, Artificial Sequence
  source: /note="Description of Artificial Sequence: Synthetic oligonucleotide"
ctgattaaggggtctctggat

SEQ ID NO: 19369 - DNA, 21 bp, Artificial Sequence
  source: /note="Description of Artificial Sequence: Synthetic oligonucleotide"
ttgattaagccgtctgttccg

SEQ ID NO: 19370 - DNA, 21 bp, Artificial Sequence
  source: /note="Description of Artificial Sequence: Synthetic oligonucleotide"
cttattaagtcttcggagcct

SEQ ID NO: 19371 - DNA, 21 bp, Artificial Sequence
  source: /note="Description of Artificial Sequence: Synthetic oligonucleotide"
cttattaagagtacgcttgtt

SEQ ID NO: 19372 - DNA, 21 bp, Artificial Sequence
  source: /note="Description of Artificial Sequence: Synthetic oligonucleotide"
cttattaagactacgcatggt

SEQ ID NO: 19373 - DNA, 21 bp, Artificial Sequence
  source: /note="Description of Artificial Sequence: Synthetic oligonucleotide"
ctgattctgcctaatcattcg

SEQ ID NO: 19374 - DNA, 21 bp, Artificial Sequence
  source: /note="Description of Artificial Sequence: Synthetic oligonucleotide"
ttgattatgcggcatgattgt

SEQ ID NO: 19375 - DNA, 21 bp, Artificial Sequence
  source: /note="Description of Artificial Sequence: Synthetic oligonucleotide"
ttgattaatgagaatccgcat

SEQ ID NO: 19376 - DNA, 21 bp, Artificial Sequence
  source: /note="Description of Artificial Sequence: Synthetic oligonucleotide"
ttgattaataagatttctccg

SEQ ID NO: 19377 - DNA, 21 bp, Artificial Sequence
  source: /note="Description of Artificial Sequence: Synthetic oligonucleotide"
cttattaatccggagatgtat

SEQ ID NO: 19378 - DNA, 21 bp, Artificial Sequence
  source: /note="Description of Artificial Sequence: Synthetic oligonucleotide"
cttattccgcctcatcatgat

SEQ ID NO: 19379 - DNA, 21 bp, Artificial Sequence
  source: /note="Description of Artificial Sequence: Synthetic oligonucleotide"
ctgattccgactgtgatgaat

SEQ ID NO: 19380 - DNA, 21 bp, Artificial Sequence
  source: /note="Description of Artificial Sequence: Synthetic oligonucleotide"
ctgattcaggaggttcttcag

SEQ ID NO: 19381 - DNA, 21 bp, Artificial Sequence
  source: /note="Description of Artificial Sequence: Synthetic oligonucleotide"
cttattcagattagtcagcag

SEQ ID NO: 19382 - DNA, 21 bp, Artificial Sequence
  source: /note="Description of Artificial Sequence: Synthetic oligonucleotide"
ctgattcagaatcagggtacg

SEQ ID NO: 19383 - DNA, 21 bp, Artificial Sequence
  source: /note="Description of Artificial Sequence: Synthetic oligonucleotide"
ttgattcgggagcagaatcct

SEQ ID NO: 19384 - DNA, 21 bp, Artificial Sequence
  source: /note="Description of Artificial Sequence: Synthetic oligonucleotide"
ctgattcgtttgagtgataat

SEQ ID NO: 19385 - DNA, 21 bp, Artificial Sequence
  source: /note="Description of Artificial Sequence: Synthetic oligonucleotide"
ttgattcggtctgatactatt

SEQ ID NO: 19386 - DNA, 21 bp, Artificial Sequence
  source: /note="Description of Artificial Sequence: Synthetic oligonucleotide"
ttgattcgttcgattccgccg

SEQ ID NO: 19387 - DNA, 21 bp, Artificial Sequence
  source: /note="Description of Artificial Sequence: Synthetic oligonucleotide"
ttgatttcggctagtcatatt

SEQ ID NO: 19388 - DNA, 21 bp, Artificial Sequence
  source: /note="Description of Artificial Sequence: Synthetic oligonucleotide"
cttatttcggatgcgagttct

SEQ ID NO: 19389 - DNA, 21 bp, Artificial Sequence
  source: /note="Description of Artificial Sequence: Synthetic oligonucleotide"
ttgatttcgccgactgttacg

SEQ ID NO: 19390 - DNA, 21 bp, Artificial Sequence
  source: /note="Description of Artificial Sequence: Synthetic oligonucleotide"
ctgatttcgcgtgaggttact

SEQ ID NO: 19391 - DNA, 21 bp, Artificial Sequence
  source: /note="Description of Artificial Sequence: Synthetic oligonucleotide"
ctgatttctcgtgtgccggat

SEQ ID NO: 19392 - DNA, 21 bp, Artificial Sequence
  source: /note="Description of Artificial Sequence: Synthetic oligonucleotide"
ttgattactgctgcgctggcg

SEQ ID NO: 19393 - DNA, 21 bp, Artificial Sequence
  source: /note="Description of Artificial Sequence: Synthetic oligonucleotide"
ctgattacggggcatagtact

SEQ ID NO: 19394 - DNA, 21 bp, Artificial Sequence
  source: /note="Description of Artificial Sequence: Synthetic oligonucleotide"
ttgattacgcctggtgcgagt

SEQ ID NO: 19395 - DNA, 21 bp, Artificial Sequence
  source: /note="Description of Artificial Sequence: Synthetic oligonucleotide"
ttgattacgcctctgcctagt

SEQ ID NO: 19396 - DNA, 21 bp, Artificial Sequence
  source: /note="Description of Artificial Sequence: Synthetic oligonucleotide"
ttgattacgtctgcggctggt

SEQ ID NO: 19397 - DNA, 21 bp, Artificial Sequence
  source: /note="Description of Artificial Sequence: Synthetic oligonucleotide"
ctgattgtggctttgaagggt

SEQ ID NO: 19398 - DNA, 21 bp, Artificial Sequence
  source: /note="Description of Artificial Sequence: Synthetic oligonucleotide"
ttgattgttgagcaggcgcgg

SEQ ID NO: 19399 - DNA, 21 bp, Artificial Sequence
  source: /note="Description of Artificial Sequence: Synthetic oligonucleotide"
ctgattgtgactgagaataag

SEQ ID NO: 19400 - DNA, 21 bp, Artificial Sequence
  source: /note="Description of Artificial Sequence: Synthetic oligonucleotide"
ctgaaggctggtagttcgtct

SEQ ID NO: 19401 - DNA, 21 bp, Artificial Sequence
  source: /note="Description of Artificial Sequence: Synthetic oligonucleotide"
ttgaaggctggtacgtatggg

SEQ ID NO: 19402 - DNA, 21 bp, Artificial Sequence
  source: /note="Description of Artificial Sequence: Synthetic oligonucleotide"
ctgaaggcgattccttatggg

SEQ ID NO: 19403 - DNA, 21 bp, Artificial Sequence
  source: /note="Description of Artificial Sequence: Synthetic oligonucleotide"
cttaaggcgcaggttgagctt

SEQ ID NO: 19404 - DNA, 21 bp, Artificial Sequence
  source: /note="Description of Artificial Sequence: Synthetic oligonucleotide"
ttgaaggcgactattacgtct

SEQ ID NO: 19405 - DNA, 21 bp, Artificial Sequence
  source: /note="Description of Artificial Sequence: Synthetic oligonucleotide"
ctgaaggatggtagggcttcg

SEQ ID NO: 19406 - DNA, 21 bp, Artificial Sequence
  source: /note="Description of Artificial Sequence: Synthetic oligonucleotide"
cttaaggatatgcgtttgacg

SEQ ID NO: 19407 - DNA, 21 bp, Artificial Sequence
  source: /note="Description of Artificial Sequence: Synthetic oligonucleotide"
ctgaaggatccggcgcgtctt

SEQ ID NO: 19408 - DNA, 21 bp, Artificial Sequence
  source: /note="Description of Artificial Sequence: Synthetic oligonucleotide"
ttgaaggatccgactgcttgg

SEQ ID NO: 19409 - DNA, 21 bp, Artificial Sequence
  source: /note="Description of Artificial Sequence: Synthetic oligonucleotide"
ctgaaggattctctgacttgt

SEQ ID NO: 19410 - DNA, 21 bp, Artificial Sequence
  source: /note="Description of Artificial Sequence: Synthetic oligonucleotide"
ctgaaggattatgggggtgct

SEQ ID NO: 19411 - DNA, 21 bp, Artificial Sequence
  source: /note="Description of Artificial Sequence: Synthetic oligonucleotide"
ctgaaggagattgctggtctg

SEQ ID NO: 19412 - DNA, 21 bp, Artificial Sequence
  source: /note="Description of Artificial Sequence: Synthetic oligonucleotide"
ctgaagttttctgagtctaag

SEQ ID NO: 19413 - DNA, 21 bp, Artificial Sequence
  source: /note="Description of Artificial Sequence: Synthetic oligonucleotide"
ctgaagggggctgtggttgtt

SEQ ID NO: 19414 - DNA, 21 bp, Artificial Sequence
  source: /note="Description of Artificial Sequence: Synthetic oligonucleotide"
cttaagggtgatgctgggtat

SEQ ID NO: 19415 - DNA, 21 bp, Artificial Sequence
  source: /note="Description of Artificial Sequence: Synthetic oligonucleotide"
cttaaggggggtgctgatacg

SEQ ID NO: 19416 - DNA, 21 bp, Artificial Sequence
  source: /note="Description of Artificial Sequence: Synthetic oligonucleotide"
ctgaagggtatgactgggctg

SEQ ID NO: 19417 - DNA, 21 bp, Artificial Sequence
  source: /note="Description of Artificial Sequence: Synthetic oligonucleotide"
ctgaagggtccgaatgctgtt

SEQ ID NO: 19418 - DNA, 21 bp, Artificial Sequence
  source: /note="Description of Artificial Sequence: Synthetic oligonucleotide"
ctgaaggggtatattgattct

SEQ ID NO: 19419 - DNA, 21 bp, Artificial Sequence
  source: /note="Description of Artificial Sequence: Synthetic oligonucleotide"
ctgaagcatcagctgcttgct

SEQ ID NO: 19420 - DNA, 21 bp, Artificial Sequence
  source: /note="Description of Artificial Sequence: Synthetic oligonucleotide"
cttaagcattctctgcctgat

SEQ ID NO: 19421 - DNA, 21 bp, Artificial Sequence
  source: /note="Description of Artificial Sequence: Synthetic oligonucleotide"
ttgaagattggtactgttacg

SEQ ID NO: 19422 - DNA, 21 bp, Artificial Sequence
  source: /note="Description of Artificial Sequence: Synthetic oligonucleotide"
ttgaagcttgctcctaatgtg

SEQ ID NO: 19423 - DNA, 21 bp, Artificial Sequence
  source: /note="Description of Artificial Sequence: Synthetic oligonucleotide"
ctgaagttggatgagggtctg

SEQ ID NO: 19424 - DNA, 21 bp, Artificial Sequence
  source: /note="Description of Artificial Sequence: Synthetic oligonucleotide"
cttaagttgcgtgcgtcggag

SEQ ID NO: 19425 - DNA, 21 bp, Artificial Sequence
  source: /note="Description of Artificial Sequence: Synthetic oligonucleotide"
ttgaagatgtcgtctacgccg

SEQ ID NO: 19426 - DNA, 21 bp, Artificial Sequence
  source: /note="Description of Artificial Sequence: Synthetic oligonucleotide"
ctgaagatggttgataatgtt

SEQ ID NO: 19427 - DNA, 21 bp, Artificial Sequence
  source: /note="Description of Artificial Sequence: Synthetic oligonucleotide"
cttaagaatggtagtatggtg

SEQ ID NO: 19428 - DNA, 21 bp, Artificial Sequence
  source: /note="Description of Artificial Sequence: Synthetic oligonucleotide"
ttgaagaatcctcttccgtct

SEQ ID NO: 19429 - DNA, 21 bp, Artificial Sequence
  source: /note="Description of Artificial Sequence: Synthetic oligonucleotide"
ttgaagaatcctagtaatgtt

SEQ ID NO: 19430 - DNA, 21 bp, Artificial Sequence
  source: /note="Description of Artificial Sequence: Synthetic oligonucleotide"
ctgaagcctgatatgacgcgg

SEQ ID NO: 19431 - DNA, 21 bp, Artificial Sequence
  source: /note="Description of Artificial Sequence: Synthetic oligonucleotide"
ttgaagcctgatcgtcctgat

SEQ ID NO: 19432 - DNA, 21 bp, Artificial Sequence
  source: /note="Description of Artificial Sequence: Synthetic oligonucleotide"
ctgaagccgaatgagatttct

SEQ ID NO: 19433 - DNA, 21 bp, Artificial Sequence
  source: /note="Description of Artificial Sequence: Synthetic oligonucleotide"
ctgaagccttcgcctattcct

SEQ ID NO: 19434 - DNA, 21 bp, Artificial Sequence
  source: /note="Description of Artificial Sequence: Synthetic oligonucleotide"
ctgaagccgagttcgtatgtt

SEQ ID NO: 19435 - DNA, 21 bp, Artificial Sequence
  source: /note="Description of Artificial Sequence: Synthetic oligonucleotide"
cttaagccggtgcctagtctg

SEQ ID NO: 19436 - DNA, 21 bp, Artificial Sequence
  source: /note="Description of Artificial Sequence: Synthetic oligonucleotide"
ctgaagcagattgatcttggg

SEQ ID NO: 19437 - DNA, 21 bp, Artificial Sequence
  source: /note="Description of Artificial Sequence: Synthetic oligonucleotide"
ttgaagcagcctacgcagtgt

SEQ ID NO: 19438 - DNA, 21 bp, Artificial Sequence
  source: /note="Description of Artificial Sequence: Synthetic oligonucleotide"
ttgaagcgggagtttgattat

SEQ ID NO: 19439 - DNA, 21 bp, Artificial Sequence
  source: /note="Description of Artificial Sequence: Synthetic oligonucleotide"
cttaagtctgcgacgactatt

SEQ ID NO: 19440 - DNA, 21 bp, Artificial Sequence
  source: /note="Description of Artificial Sequence: Synthetic oligonucleotide"
ctgaagtctggtgtgtcgccg

SEQ ID NO: 19441 - DNA, 21 bp, Artificial Sequence
  source: /note="Description of Artificial Sequence: Synthetic oligonucleotide"
ctgaagtctccgagtacgcct

SEQ ID NO: 19442 - DNA, 21 bp, Artificial Sequence
  source: /note="Description of Artificial Sequence: Synthetic oligonucleotide"
ctgaagtcgcagctgagtgat

SEQ ID NO: 19443 - DNA, 21 bp, Artificial Sequence
  source: /note="Description of Artificial Sequence: Synthetic oligonucleotide"
ttgaagtcgcagtcgtttact

SEQ ID NO: 19444 - DNA, 21 bp, Artificial Sequence
  source: /note="Description of Artificial Sequence: Synthetic oligonucleotide"
cttaagtctacgcttatgcct

SEQ ID NO: 19445 - DNA, 21 bp, Artificial Sequence
  source: /note="Description of Artificial Sequence: Synthetic oligonucleotide"
ctgaagtcgactcctccgggg

SEQ ID NO: 19446 - DNA, 21 bp, Artificial Sequence
  source: /note="Description of Artificial Sequence: Synthetic oligonucleotide"
ctgaagagtacgagtcaggtt

SEQ ID NO: 19447 - DNA, 21 bp, Artificial Sequence
  source: /note="Description of Artificial Sequence: Synthetic oligonucleotide"
cttaagacggggcgtgattct

SEQ ID NO: 19448 - DNA, 21 bp, Artificial Sequence
  source: /note="Description of Artificial Sequence: Synthetic oligonucleotide"
ctgaagacgggttatatgccg

SEQ ID NO: 19449 - DNA, 21 bp, Artificial Sequence
  source: /note="Description of Artificial Sequence: Synthetic oligonucleotide"
ctgaagacgctgcttaagacg

SEQ ID NO: 19450 - DNA, 21 bp, Artificial Sequence
  source: /note="Description of Artificial Sequence: Synthetic oligonucleotide"
ctgaagacgaatgagcgggtt

SEQ ID NO: 19451 - DNA, 21 bp, Artificial Sequence
  source: /note="Description of Artificial Sequence: Synthetic oligonucleotide"
cttaagactagtggtgtgatt

SEQ ID NO: 19452 - DNA, 21 bp, Artificial Sequence
  source: /note="Description of Artificial Sequence: Synthetic oligonucleotide"
cttaagactagtaatcgtgat

SEQ ID NO: 19453 - DNA, 21 bp, Artificial Sequence
  source: /note="Description of Artificial Sequence: Synthetic oligonucleotide"
ttgaagacgactaatcctccg

SEQ ID NO: 19454 - DNA, 21 bp, Artificial Sequence
  source: /note="Description of Artificial Sequence: Synthetic oligonucleotide"
cttaagactgttcattcggat

SEQ ID NO: 19455 - DNA, 21 bp, Artificial Sequence
  source: /note="Description of Artificial Sequence: Synthetic oligonucleotide"
ctgaaggtggagatgagtccg

SEQ ID NO: 19456 - DNA, 21 bp, Artificial Sequence
  source: /note="Description of Artificial Sequence: Synthetic oligonucleotide"
ttgaagtgggagcatacttct

SEQ ID NO: 19457 - DNA, 21 bp, Artificial Sequence
  source: /note="Description of Artificial Sequence: Synthetic oligonucleotide"
ctgaagtggggtccgcctgat

SEQ ID NO: 19458 - DNA, 21 bp, Artificial Sequence
  source: /note="Description of Artificial Sequence: Synthetic oligonucleotide"
ctgaagtataatattcctgtt

SEQ ID NO: 19459 - DNA, 21 bp, Artificial Sequence
  source: /note="Description of Artificial Sequence: Synthetic oligonucleotide"
ttgcttgctgcgatgggtccg

SEQ ID NO: 19460 - DNA, 21 bp, Artificial Sequence
  source: /note="Description of Artificial Sequence: Synthetic oligonucleotide"
ttgttggcttttgagaagcag

SEQ ID NO: 19461 - DNA, 21 bp, Artificial Sequence
  source: /note="Description of Artificial Sequence: Synthetic oligonucleotide"
cttctggcgggtcatcatggt

SEQ ID NO: 19462 - DNA, 21 bp, Artificial Sequence
  source: /note="Description of Artificial Sequence: Synthetic oligonucleotide"
ctgctggctcgtggtgttaat

SEQ ID NO: 19463 - DNA, 21 bp, Artificial Sequence
  source: /note="Description of Artificial Sequence: Synthetic oligonucleotide"
ttgcttgcgacttcgctgact

SEQ ID NO: 19464 - DNA, 21 bp, Artificial Sequence
  source: /note="Description of Artificial Sequence: Synthetic oligonucleotide"
ctgcttgatggtcgtgcgagg

SEQ ID NO: 19465 - DNA, 21 bp, Artificial Sequence
  source: /note="Description of Artificial Sequence: Synthetic oligonucleotide"
cttttggataaggagcgtgag

SEQ ID NO: 19466 - DNA, 21 bp, Artificial Sequence
  source: /note="Description of Artificial Sequence: Synthetic oligonucleotide"
cttttggatcaggattttttt

SEQ ID NO: 19467 - DNA, 21 bp, Artificial Sequence
  source: /note="Description of Artificial Sequence: Synthetic oligonucleotide"
ctgctggatacgggtgttcct

SEQ ID NO: 19468 - DNA, 21 bp, Artificial Sequence
  source: /note="Description of Artificial Sequence: Synthetic oligonucleotide"
ttgctggagaagggtcagagt

SEQ ID NO: 19469 - DNA, 21 bp, Artificial Sequence
  source: /note="Description of Artificial Sequence: Synthetic oligonucleotide"
cttttggagcgtagttatccg

SEQ ID NO: 19470 - DNA, 21 bp, Artificial Sequence
  source: /note="Description of Artificial Sequence: Synthetic oligonucleotide"
ctgctggaggtgccgattcgg

SEQ ID NO: 19471 - DNA, 21 bp, Artificial Sequence
  source: /note="Description of Artificial Sequence: Synthetic oligonucleotide"
ctgttgtttaagtcttcgtcg

SEQ ID NO: 19472 - DNA, 21 bp, Artificial Sequence
  source: /note="Description of Artificial Sequence: Synthetic oligonucleotide"
cttctgggggctcggcatctt

SEQ ID NO: 19473 - DNA, 21 bp, Artificial Sequence
  source: /note="Description of Artificial Sequence: Synthetic oligonucleotide"
ctgcttggtgcgagttctgcg

SEQ ID NO: 19474 - DNA, 21 bp, Artificial Sequence
  source: /note="Description of Artificial Sequence: Synthetic oligonucleotide"
cttcttggtcatgcggcgagt

SEQ ID NO: 19475 - DNA, 21 bp, Artificial Sequence
  source: /note="Description of Artificial Sequence: Synthetic oligonucleotide"
ctgttgggtcctgatccgtct

SEQ ID NO: 19476 - DNA, 21 bp, Artificial Sequence
  source: /note="Description of Artificial Sequence: Synthetic oligonucleotide"
ctgctggggcctttgcagggg

SEQ ID NO: 19477 - DNA, 21 bp, Artificial Sequence
  source: /note="Description of Artificial Sequence: Synthetic oligonucleotide"
ttgttgggtcgtctgcagcct

SEQ ID NO: 19478 - DNA, 21 bp, Artificial Sequence
  source: /note="Description of Artificial Sequence: Synthetic oligonucleotide"
ctgttgggtcgttctacgggg

SEQ ID NO: 19479 - DNA, 21 bp, Artificial Sequence
  source: /note="Description of Artificial Sequence: Synthetic oligonucleotide"
ttgcttggtagtcgtccgagt

SEQ ID NO: 19480 - DNA, 21 bp, Artificial Sequence
  source: /note="Description of Artificial Sequence: Synthetic oligonucleotide"
cttctgggggttttgcatccg

SEQ ID NO: 19481 - DNA, 21 bp, Artificial Sequence
  source: /note="Description of Artificial Sequence: Synthetic oligonucleotide"
ttgcttggggtgactaatcct

SEQ ID NO: 19482 - DNA, 21 bp, Artificial Sequence
  source: /note="Description of Artificial Sequence: Synthetic oligonucleotide"
cttcttcatctgggtcagacg

SEQ ID NO: 19483 - DNA, 21 bp, Artificial Sequence
  source: /note="Description of Artificial Sequence: Synthetic oligonucleotide"
ttgctgcatcctgctccgcgt

SEQ ID NO: 19484 - DNA, 21 bp, Artificial Sequence
  source: /note="Description of Artificial Sequence: Synthetic oligonucleotide"
ttgcttcatccggaggctatt

SEQ ID NO: 19485 - DNA, 21 bp, Artificial Sequence
  source: /note="Description of Artificial Sequence: Synthetic oligonucleotide"
ttgcttcattcgtcgtctcag

SEQ ID NO: 19486 - DNA, 21 bp, Artificial Sequence
  source: /note="Description of Artificial Sequence: Synthetic oligonucleotide"
cttctgcatactcaggggaat

SEQ ID NO: 19487 - DNA, 21 bp, Artificial Sequence
  source: /note="Description of Artificial Sequence: Synthetic oligonucleotide"
cttcttcatacggtgagtgag

SEQ ID NO: 19488 - DNA, 21 bp, Artificial Sequence
  source: /note="Description of Artificial Sequence: Synthetic oligonucleotide"
ctgctgcatgttccgcgtgag

SEQ ID NO: 19489 - DNA, 21 bp, Artificial Sequence
  source: /note="Description of Artificial Sequence: Synthetic oligonucleotide"
ctgcttatttgtggggagcat

SEQ ID NO: 19490 - DNA, 21 bp, Artificial Sequence
  source: /note="Description of Artificial Sequence: Synthetic oligonucleotide"
ttgttgaagggtttttcggtt

SEQ ID NO: 19491 - DNA, 21 bp, Artificial Sequence
  source: /note="Description of Artificial Sequence: Synthetic oligonucleotide"
ctgttgaagccggctgctcct

SEQ ID NO: 19492 - DNA, 21 bp, Artificial Sequence
  source: /note="Description of Artificial Sequence: Synthetic oligonucleotide"
cttctgaagagtcctgtgcct

SEQ ID NO: 19493 - DNA, 21 bp, Artificial Sequence
  source: /note="Description of Artificial Sequence: Synthetic oligonucleotide"
ttgttgctggctccgacttcg

SEQ ID NO: 19494 - DNA, 21 bp, Artificial Sequence
  source: /note="Description of Artificial Sequence: Synthetic oligonucleotide"
ctgcttcttgcgcggacggtt

SEQ ID NO: 19495 - DNA, 21 bp, Artificial Sequence
  source: /note="Description of Artificial Sequence: Synthetic oligonucleotide"
ctgcttcttgatgatcatacg

SEQ ID NO: 19496 - DNA, 21 bp, Artificial Sequence
  source: /note="Description of Artificial Sequence: Synthetic oligonucleotide"
cttttgttgccggctcgtggt

SEQ ID NO: 19497 - DNA, 21 bp, Artificial Sequence
  source: /note="Description of Artificial Sequence: Synthetic oligonucleotide"
cttttgcttcaggctcgtgcg

SEQ ID NO: 19498 - DNA, 21 bp, Artificial Sequence
  source: /note="Description of Artificial Sequence: Synthetic oligonucleotide"
ttgttgttgcagaagggtcct

SEQ ID NO: 19499 - DNA, 21 bp, Artificial Sequence
  source: /note="Description of Artificial Sequence: Synthetic oligonucleotide"
cttcttttgcgggctgatggt

SEQ ID NO: 19500 - DNA, 21 bp, Artificial Sequence
  source: /note="Description of Artificial Sequence: Synthetic oligonucleotide"
ctgctgctgtctgttggtact

SEQ ID NO: 19501 - DNA, 21 bp, Artificial Sequence
  source: /note="Description of Artificial Sequence: Synthetic oligonucleotide"
cttctgcttacgggggttgcg

SEQ ID NO: 19502 - DNA, 21 bp, Artificial Sequence
  source: /note="Description of Artificial Sequence: Synthetic oligonucleotide"
cttttgatgccgtcggggctt

SEQ ID NO: 19503 - DNA, 21 bp, Artificial Sequence
  source: /note="Description of Artificial Sequence: Synthetic oligonucleotide"
ttgcttaatgatgcttatgtg

SEQ ID NO: 19504 - DNA, 21 bp, Artificial Sequence
  source: /note="Description of Artificial Sequence: Synthetic oligonucleotide"
ttgttgaatgggcatgaggct

SEQ ID NO: 19505 - DNA, 21 bp, Artificial Sequence
  source: /note="Description of Artificial Sequence: Synthetic oligonucleotide"
ctgttgaatatggctaggact

SEQ ID NO: 19506 - DNA, 21 bp, Artificial Sequence
  source: /note="Description of Artificial Sequence: Synthetic oligonucleotide"
ctgttgaatacgagtagtgct

SEQ ID NO: 19507 - DNA, 21 bp, Artificial Sequence
  source: /note="Description of Artificial Sequence: Synthetic oligonucleotide"
ttgttgccggctgagagggct

SEQ ID NO: 19508 - DNA, 21 bp, Artificial Sequence
  source: /note="Description of Artificial Sequence: Synthetic oligonucleotide"
cttcttcctgagtattcgcgt

SEQ ID NO: 19509 - DNA, 21 bp, Artificial Sequence
  source: /note="Description of Artificial Sequence: Synthetic oligonucleotide"
ttgttgccggggcgtactgat

SEQ ID NO: 19510 - DNA, 21 bp, Artificial Sequence
  source: /note="Description of Artificial Sequence: Synthetic oligonucleotide"
ttgttgccgcatgaggggacg

SEQ ID NO: 19511 - DNA, 21 bp, Artificial Sequence
  source: /note="Description of Artificial Sequence: Synthetic oligonucleotide"
ctgttgcctaaggcgtcgtcg

SEQ ID NO: 19512 - DNA, 21 bp, Artificial Sequence
  source: /note="Description of Artificial Sequence: Synthetic oligonucleotide"
cttttgcctctggctccgagg

SEQ ID NO: 19513 - DNA, 21 bp, Artificial Sequence
  source: /note="Description of Artificial Sequence: Synthetic oligonucleotide"
ctgttgccgaatccgcctacg

SEQ ID NO: 19514 - DNA, 21 bp, Artificial Sequence
  source: /note="Description of Artificial Sequence: Synthetic oligonucleotide"
cttctgcctaatcagagtttt

SEQ ID NO: 19515 - DNA, 21 bp, Artificial Sequence
  source: /note="Description of Artificial Sequence: Synthetic oligonucleotide"
cttttgcctaatacgcctccg

SEQ ID NO: 19516 - DNA, 21 bp, Artificial Sequence
  source: /note="Description of Artificial Sequence: Synthetic oligonucleotide"
ctgcttcctccgcgtgatccg

SEQ ID NO: 19517 - DNA, 21 bp, Artificial Sequence
  source: /note="Description of Artificial Sequence: Synthetic oligonucleotide"
ttgctgccgccgtcgagttcg

SEQ ID NO: 19518 - DNA, 21 bp, Artificial Sequence
  source: /note="Description of Artificial Sequence: Synthetic oligonucleotide"
ttgcttccgcagtttaggagt

SEQ ID NO: 19519 - DNA, 21 bp, Artificial Sequence
  source: /note="Description of Artificial Sequence: Synthetic oligonucleotide"
ttgttgccgcgtacgcattat

SEQ ID NO: 19520 - DNA, 21 bp, Artificial Sequence
  source: /note="Description of Artificial Sequence: Synthetic oligonucleotide"
cttctgccttcgttggcgtct

SEQ ID NO: 19521 - DNA, 21 bp, Artificial Sequence
  source: /note="Description of Artificial Sequence: Synthetic oligonucleotide"
ttgctgccgtcgcgtggggct

SEQ ID NO: 19522 - DNA, 21 bp, Artificial Sequence
  source: /note="Description of Artificial Sequence: Synthetic oligonucleotide"
ttgctgcctactagtaagctg

SEQ ID NO: 19523 - DNA, 21 bp, Artificial Sequence
  source: /note="Description of Artificial Sequence: Synthetic oligonucleotide"
cttctgcctgtgttgtctgag

SEQ ID NO: 19524 - DNA, 21 bp, Artificial Sequence
  source: /note="Description of Artificial Sequence: Synthetic oligonucleotide"
cttcttcagccgtcggttcct

SEQ ID NO: 19525 - DNA, 21 bp, Artificial Sequence
  source: /note="Description of Artificial Sequence: Synthetic oligonucleotide"
ctgcttcagcagcctgagtgg

SEQ ID NO: 19526 - DNA, 21 bp, Artificial Sequence
  source: /note="Description of Artificial Sequence: Synthetic oligonucleotide"
cttcttcagcgttctctttct

SEQ ID NO: 19527 - DNA, 21 bp, Artificial Sequence
  source: /note="Description of Artificial Sequence: Synthetic oligonucleotide"
cttctgcagacgcttaagccg

SEQ ID NO: 19528 - DNA, 21 bp, Artificial Sequence
  source: /note="Description of Artificial Sequence: Synthetic oligonucleotide"
cttctgcgtggggcggtggcg

SEQ ID NO: 19529 - DNA, 21 bp, Artificial Sequence
  source: /note="Description of Artificial Sequence: Synthetic oligonucleotide"
ctgctgaggggtgatgcggcg

SEQ ID NO: 19530 - DNA, 21 bp, Artificial Sequence
  source: /note="Description of Artificial Sequence: Synthetic oligonucleotide"
ttgttgcgtaaggatgaggct

SEQ ID NO: 19531 - DNA, 21 bp, Artificial Sequence
  source: /note="Description of Artificial Sequence: Synthetic oligonucleotide"
ctgcttcggaataatccgcat

SEQ ID NO: 19532 - DNA, 21 bp, Artificial Sequence
  source: /note="Description of Artificial Sequence: Synthetic oligonucleotide"
cttttgcgtaatgtgctgcct

SEQ ID NO: 19533 - DNA, 21 bp, Artificial Sequence
  source: /note="Description of Artificial Sequence: Synthetic oligonucleotide"
ttgcttaggtcgcagagtgcg

SEQ ID NO: 19534 - DNA, 21 bp, Artificial Sequence
  source: /note="Description of Artificial Sequence: Synthetic oligonucleotide"
cttcttaggactccttcttct

SEQ ID NO: 19535 - DNA, 21 bp, Artificial Sequence
  source: /note="Description of Artificial Sequence: Synthetic oligonucleotide"
ctgttgcgggttccgaatccg

SEQ ID NO: 19536 - DNA, 21 bp, Artificial Sequence
  source: /note="Description of Artificial Sequence: Synthetic oligonucleotide"
cttcttagtgctgcggatcgg

SEQ ID NO: 19537 - DNA, 21 bp, Artificial Sequence
  source: /note="Description of Artificial Sequence: Synthetic oligonucleotide"
ctgctgtcggcgccgtatact

SEQ ID NO: 19538 - DNA, 21 bp, Artificial Sequence
  source: /note="Description of Artificial Sequence: Synthetic oligonucleotide"
ctgctgagtgcttctacttcg

SEQ ID NO: 19539 - DNA, 21 bp, Artificial Sequence
  source: /note="Description of Artificial Sequence: Synthetic oligonucleotide"
cttttgtctgatagtgctagg

SEQ ID NO: 19540 - DNA, 21 bp, Artificial Sequence
  source: /note="Description of Artificial Sequence: Synthetic oligonucleotide"
ctgttgtcgtttactacggat

SEQ ID NO: 19541 - DNA, 21 bp, Artificial Sequence
  source: /note="Description of Artificial Sequence: Synthetic oligonucleotide"
ctgttgtcgggtgcgcttcag

SEQ ID NO: 19542 - DNA, 21 bp, Artificial Sequence
  source: /note="Description of Artificial Sequence: Synthetic oligonucleotide"
cttttgagtgggcgggttact

SEQ ID NO: 19543 - DNA, 21 bp, Artificial Sequence
  source: /note="Description of Artificial Sequence: Synthetic oligonucleotide"
cttctttctaagggtcattcg

SEQ ID NO: 19544 - DNA, 21 bp, Artificial Sequence
  source: /note="Description of Artificial Sequence: Synthetic oligonucleotide"
ttgctgagtatgcgtacgcct

SEQ ID NO: 19545 - DNA, 21 bp, Artificial Sequence
  source: /note="Description of Artificial Sequence: Synthetic oligonucleotide"
cttttgtctcctgatgagtat

SEQ ID NO: 19546 - DNA, 21 bp, Artificial Sequence
  source: /note="Description of Artificial Sequence: Synthetic oligonucleotide"
ctgcttagtcctggtcctctt

SEQ ID NO: 19547 - DNA, 21 bp, Artificial Sequence
  source: /note="Description of Artificial Sequence: Synthetic oligonucleotide"
ctgctgagtcgtgtgcatgat

SEQ ID NO: 19548 - DNA, 21 bp, Artificial Sequence
  source: /note="Description of Artificial Sequence: Synthetic oligonucleotide"
cttctttctacggctgttagt

SEQ ID NO: 19549 - DNA, 21 bp, Artificial Sequence
  source: /note="Description of Artificial Sequence: Synthetic oligonucleotide"
ctgctgtctactgatgggtcg

SEQ ID NO: 19550 - DNA, 21 bp, Artificial Sequence
  source: /note="Description of Artificial Sequence: Synthetic oligonucleotide"
ctgctttctgttcatgagatg

SEQ ID NO: 19551 - DNA, 21 bp, Artificial Sequence
  source: /note="Description of Artificial Sequence: Synthetic oligonucleotide"
cttcttactgatgagtgtacg

SEQ ID NO: 19552 - DNA, 21 bp, Artificial Sequence
  source: /note="Description of Artificial Sequence: Synthetic oligonucleotide"
cttctgactgatcggcgtctg

SEQ ID NO: 19553 - DNA, 21 bp, Artificial Sequence
  source: /note="Description of Artificial Sequence: Synthetic oligonucleotide"
ttgctgacgcatttttcttcg

SEQ ID NO: 19554 - DNA, 21 bp, Artificial Sequence
  source: /note="Description of Artificial Sequence: Synthetic oligonucleotide"
ttgttgactattgggaagccg

SEQ ID NO: 19555 - DNA, 21 bp, Artificial Sequence
  source: /note="Description of Artificial Sequence: Synthetic oligonucleotide"
ctgttgactctgtctgaggtg

SEQ ID NO: 19556 - DNA, 21 bp, Artificial Sequence
  source: /note="Description of Artificial Sequence: Synthetic oligonucleotide"
ctgctgacgctgagtactccg

SEQ ID NO: 19557 - DNA, 21 bp, Artificial Sequence
  source: /note="Description of Artificial Sequence: Synthetic oligonucleotide"
cttcttactaatgctattccg

SEQ ID NO: 19558 - DNA, 21 bp, Artificial Sequence
  source: /note="Description of Artificial Sequence: Synthetic oligonucleotide"
ctgttgactccgtataatcct

SEQ ID NO: 19559 - DNA, 21 bp, Artificial Sequence
  source: /note="Description of Artificial Sequence: Synthetic oligonucleotide"
ctgttgactcgttctactgag

SEQ ID NO: 19560 - DNA, 21 bp, Artificial Sequence
  source: /note="Description of Artificial Sequence: Synthetic oligonucleotide"
ttgctggttcataaggttgtt

SEQ ID NO: 19561 - DNA, 21 bp, Artificial Sequence
  source: /note="Description of Artificial Sequence: Synthetic oligonucleotide"
cttctggtgaggcatcgtgat

SEQ ID NO: 19562 - DNA, 21 bp, Artificial Sequence
  source: /note="Description of Artificial Sequence: Synthetic oligonucleotide"
cttctggtgcgtaatactgat

SEQ ID NO: 19563 - DNA, 21 bp, Artificial Sequence
  source: /note="Description of Artificial Sequence: Synthetic oligonucleotide"
cttttggtttctgagaattct

SEQ ID NO: 19564 - DNA, 21 bp, Artificial Sequence
  source: /note="Description of Artificial Sequence: Synthetic oligonucleotide"
ttgctggttactgataagatg

SEQ ID NO: 19565 - DNA, 21 bp, Artificial Sequence
  source: /note="Description of Artificial Sequence: Synthetic oligonucleotide"
ttgttggtggtgccttcgcgt

SEQ ID NO: 19566 - DNA, 21 bp, Artificial Sequence
  source: /note="Description of Artificial Sequence: Synthetic oligonucleotide"
ttgctttatgcggagcgtcct

SEQ ID NO: 19567 - DNA, 21 bp, Artificial Sequence
  source: /note="Description of Artificial Sequence: Synthetic oligonucleotide"
ttgttgtatcagaattcgtcg

SEQ ID NO: 19568 - DNA, 21 bp, Artificial Sequence
  source: /note="Description of Artificial Sequence: Synthetic oligonucleotide"
cttctttatagtactgataag

SEQ ID NO: 19569 - DNA, 21 bp, Artificial Sequence
  source: /note="Description of Artificial Sequence: Synthetic oligonucleotide"
ctgatggctcattctcagctt

SEQ ID NO: 19570 - DNA, 21 bp, Artificial Sequence
  source: /note="Description of Artificial Sequence: Synthetic oligonucleotide"
cttatggctattcataagccg

SEQ ID NO: 19571 - DNA, 21 bp, Artificial Sequence
  source: /note="Description of Artificial Sequence: Synthetic oligonucleotide"
ttgatggctactcgtgtgcct

SEQ ID NO: 19572 - DNA, 21 bp, Artificial Sequence
  source: /note="Description of Artificial Sequence: Synthetic oligonucleotide"
ttgatggattctcgtaagtat

SEQ ID NO: 19573 - DNA, 21 bp, Artificial Sequence
  source: /note="Description of Artificial Sequence: Synthetic oligonucleotide"
ttgatggaggctacttttaag

SEQ ID NO: 19574 - DNA, 21 bp, Artificial Sequence
  source: /note="Description of Artificial Sequence: Synthetic oligonucleotide"
ctgatggagcatattattgag

SEQ ID NO: 19575 - DNA, 21 bp, Artificial Sequence
  source: /note="Description of Artificial Sequence: Synthetic oligonucleotide"
ttgatggagaatcatatggct

SEQ ID NO: 19576 - DNA, 21 bp, Artificial Sequence
  source: /note="Description of Artificial Sequence: Synthetic oligonucleotide"
ttgatggggcagggtaggacg

SEQ ID NO: 19577 - DNA, 21 bp, Artificial Sequence
  source: /note="Description of Artificial Sequence: Synthetic oligonucleotide"
ctgatggggcaggttgctggg

SEQ ID NO: 19578 - DNA, 21 bp, Artificial Sequence
  source: /note="Description of Artificial Sequence: Synthetic oligonucleotide"
cttatgaagcctagtgctggt

SEQ ID NO: 19579 - DNA, 21 bp, Artificial Sequence
  source: /note="Description of Artificial Sequence: Synthetic oligonucleotide"
ttgatgaagcgtgtggagact

SEQ ID NO: 19580 - DNA, 21 bp, Artificial Sequence
  source: /note="Description of Artificial Sequence: Synthetic oligonucleotide"
ctgatgcttgctcgtaatgat

SEQ ID NO: 19581 - DNA, 21 bp, Artificial Sequence
  source: /note="Description of Artificial Sequence: Synthetic oligonucleotide"
ctgatgctgcgttcttcgcag

SEQ ID NO: 19582 - DNA, 21 bp, Artificial Sequence
  source: /note="Description of Artificial Sequence: Synthetic oligonucleotide"
ctgatgaatggtgggtcgact

SEQ ID NO: 19583 - DNA, 21 bp, Artificial Sequence
  source: /note="Description of Artificial Sequence: Synthetic oligonucleotide"
ttgatgaattcggcgattgct

SEQ ID NO: 19584 - DNA, 21 bp, Artificial Sequence
  source: /note="Description of Artificial Sequence: Synthetic oligonucleotide"
cttatgccttcgatgcgtcct

SEQ ID NO: 19585 - DNA, 21 bp, Artificial Sequence
  source: /note="Description of Artificial Sequence: Synthetic oligonucleotide"
ttgatgcagccgaagtctgct

SEQ ID NO: 19586 - DNA, 21 bp, Artificial Sequence
  source: /note="Description of Artificial Sequence: Synthetic oligonucleotide"
ctgatgaggatttctactgcg

SEQ ID NO: 19587 - DNA, 21 bp, Artificial Sequence
  source: /note="Description of Artificial Sequence: Synthetic oligonucleotide"
ttgatgcggccggcggagctt

SEQ ID NO: 19588 - DNA, 21 bp, Artificial Sequence
  source: /note="Description of Artificial Sequence: Synthetic oligonucleotide"
ttgatgcgtactaatccggat

SEQ ID NO: 19589 - DNA, 21 bp, Artificial Sequence
  source: /note="Description of Artificial Sequence: Synthetic oligonucleotide"
ttgatgtcgctgacgactgtt

SEQ ID NO: 19590 - DNA, 21 bp, Artificial Sequence
  source: /note="Description of Artificial Sequence: Synthetic oligonucleotide"
cttatgtcgcctcagagtccg

SEQ ID NO: 19591 - DNA, 21 bp, Artificial Sequence
  source: /note="Description of Artificial Sequence: Synthetic oligonucleotide"
cttatgtcgcaggagctgcgt

SEQ ID NO: 19592 - DNA, 21 bp, Artificial Sequence
  source: /note="Description of Artificial Sequence: Synthetic oligonucleotide"
ctgatgtctcagactcagcgt

SEQ ID NO: 19593 - DNA, 21 bp, Artificial Sequence
  source: /note="Description of Artificial Sequence: Synthetic oligonucleotide"
cttatgtcttctaagcctcct

SEQ ID NO: 19594 - DNA, 21 bp, Artificial Sequence
  source: /note="Description of Artificial Sequence: Synthetic oligonucleotide"
ctgatgtctacggctgagcct

SEQ ID NO: 19595 - DNA, 21 bp, Artificial Sequence
  source: /note="Description of Artificial Sequence: Synthetic oligonucleotide"
ttgatgtcgacggcttcgcct

SEQ ID NO: 19596 - DNA, 21 bp, Artificial Sequence
  source: /note="Description of Artificial Sequence: Synthetic oligonucleotide"
ttgatgactggtattacgatt

SEQ ID NO: 19597 - DNA, 21 bp, Artificial Sequence
  source: /note="Description of Artificial Sequence: Synthetic oligonucleotide"
ttgatgactggtgttcctttg

SEQ ID NO: 19598 - DNA, 21 bp, Artificial Sequence
  source: /note="Description of Artificial Sequence: Synthetic oligonucleotide"
ttgatgactaatgctcagctg

SEQ ID NO: 19599 - DNA, 21 bp, Artificial Sequence
  source: /note="Description of Artificial Sequence: Synthetic oligonucleotide"
ttgatgactaatcctgttccg

SEQ ID NO: 19600 - DNA, 21 bp, Artificial Sequence
  source: /note="Description of Artificial Sequence: Synthetic oligonucleotide"
ctgatgacttcgggtcataag

SEQ ID NO: 19601 - DNA, 21 bp, Artificial Sequence
  source: /note="Description of Artificial Sequence: Synthetic oligonucleotide"
ttgatgacttctaatggggcg

SEQ ID NO: 19602 - DNA, 21 bp, Artificial Sequence
  source: /note="Description of Artificial Sequence: Synthetic oligonucleotide"
cttatgactacgcatgttgat

SEQ ID NO: 19603 - DNA, 21 bp, Artificial Sequence
  source: /note="Description of Artificial Sequence: Synthetic oligonucleotide"
ctgatggttgagtctcatgtt

SEQ ID NO: 19604 - DNA, 21 bp, Artificial Sequence
  source: /note="Description of Artificial Sequence: Synthetic oligonucleotide"
cttatggtgggtcgtaagttg

SEQ ID NO: 19605 - DNA, 21 bp, Artificial Sequence
  source: /note="Description of Artificial Sequence: Synthetic oligonucleotide"
ctgaatgcgaatgcgttggct

SEQ ID NO: 19606 - DNA, 21 bp, Artificial Sequence
  source: /note="Description of Artificial Sequence: Synthetic oligonucleotide"
ctgaatgcgccgggtcgtact

SEQ ID NO: 19607 - DNA, 21 bp, Artificial Sequence
  source: /note="Description of Artificial Sequence: Synthetic oligonucleotide"
cttaatgcgcctaatcctatg

SEQ ID NO: 19608 - DNA, 21 bp, Artificial Sequence
  source: /note="Description of Artificial Sequence: Synthetic oligonucleotide"
ctgaatgctcaggtgagtacg

SEQ ID NO: 19609 - DNA, 21 bp, Artificial Sequence
  source: /note="Description of Artificial Sequence: Synthetic oligonucleotide"
cttaatgcttcgactaagact

SEQ ID NO: 19610 - DNA, 21 bp, Artificial Sequence
  source: /note="Description of Artificial Sequence: Synthetic oligonucleotide"
cttaatgctacggatgggaag

SEQ ID NO: 19611 - DNA, 21 bp, Artificial Sequence
  source: /note="Description of Artificial Sequence: Synthetic oligonucleotide"
cttaatgatgatgcgtggtcg

SEQ ID NO: 19612 - DNA, 21 bp, Artificial Sequence
  source: /note="Description of Artificial Sequence: Synthetic oligonucleotide"
cttaatgatgttttgacgcag

SEQ ID NO: 19613 - DNA, 21 bp, Artificial Sequence
  source: /note="Description of Artificial Sequence: Synthetic oligonucleotide"
cttaatgagattacgcggagt

SEQ ID NO: 19614 - DNA, 21 bp, Artificial Sequence
  source: /note="Description of Artificial Sequence: Synthetic oligonucleotide"
cttaatgagttgcagtttcag

SEQ ID NO: 19615 - DNA, 21 bp, Artificial Sequence
  source: /note="Description of Artificial Sequence: Synthetic oligonucleotide"
ctgaatgagaggccgcgtagt

SEQ ID NO: 19616 - DNA, 21 bp, Artificial Sequence
  source: /note="Description of Artificial Sequence: Synthetic oligonucleotide"
ttgaatggtgagtatttgaag

SEQ ID NO: 19617 - DNA, 21 bp, Artificial Sequence
  source: /note="Description of Artificial Sequence: Synthetic oligonucleotide"
ctgaatggttttactgcgacg

SEQ ID NO: 19618 - DNA, 21 bp, Artificial Sequence
  source: /note="Description of Artificial Sequence: Synthetic oligonucleotide"
ttgaatggtcgtagggctgag

SEQ ID NO: 19619 - DNA, 21 bp, Artificial Sequence
  source: /note="Description of Artificial Sequence: Synthetic oligonucleotide"
ttgaatgggtcttatattcag

SEQ ID NO: 19620 - DNA, 21 bp, Artificial Sequence
  source: /note="Description of Artificial Sequence: Synthetic oligonucleotide"
cttaatcatgagaaggatggt

SEQ ID NO: 19621 - DNA, 21 bp, Artificial Sequence
  source: /note="Description of Artificial Sequence: Synthetic oligonucleotide"
ctgaatcataatcctggtttg

SEQ ID NO: 19622 - DNA, 21 bp, Artificial Sequence
  source: /note="Description of Artificial Sequence: Synthetic oligonucleotide"
ctgaatcataatagtttgcgt

SEQ ID NO: 19623 - DNA, 21 bp, Artificial Sequence
  source: /note="Description of Artificial Sequence: Synthetic oligonucleotide"
ttgaatcatacgaggccgttg

SEQ ID NO: 19624 - DNA, 21 bp, Artificial Sequence
  source: /note="Description of Artificial Sequence: Synthetic oligonucleotide"
ttgaatattcctagtgatcct

SEQ ID NO: 19625 - DNA, 21 bp, Artificial Sequence
  source: /note="Description of Artificial Sequence: Synthetic oligonucleotide"
cttaatattacgacttcgggt

SEQ ID NO: 19626 - DNA, 21 bp, Artificial Sequence
  source: /note="Description of Artificial Sequence: Synthetic oligonucleotide"
ttgaataaggagtttgcgagt

SEQ ID NO: 19627 - DNA, 21 bp, Artificial Sequence
  source: /note="Description of Artificial Sequence: Synthetic oligonucleotide"
ttgaataagaattcgccggtg

SEQ ID NO: 19628 - DNA, 21 bp, Artificial Sequence
  source: /note="Description of Artificial Sequence: Synthetic oligonucleotide"
cttaataagcagccgtttgtg

SEQ ID NO: 19629 - DNA, 21 bp, Artificial Sequence
  source: /note="Description of Artificial Sequence: Synthetic oligonucleotide"
ttgaataagcgtgctcctgat

SEQ ID NO: 19630 - DNA, 21 bp, Artificial Sequence
  source: /note="Description of Artificial Sequence: Synthetic oligonucleotide"
cttaataagtcttcgacgggt

SEQ ID NO: 19631 - DNA, 21 bp, Artificial Sequence
  source: /note="Description of Artificial Sequence: Synthetic oligonucleotide"
cttaatctggcgaggccggcg

SEQ ID NO: 19632 - DNA, 21 bp, Artificial Sequence
  source: /note="Description of Artificial Sequence: Synthetic oligonucleotide"
ctgaatttggagttgtatgat

SEQ ID NO: 19633 - DNA, 21 bp, Artificial Sequence
  source: /note="Description of Artificial Sequence: Synthetic oligonucleotide"
ctgaatctggggaggccggat

SEQ ID NO: 19634 - DNA, 21 bp, Artificial Sequence
  source: /note="Description of Artificial Sequence: Synthetic oligonucleotide"
cttaatctgcatgcgccgacg

SEQ ID NO: 19635 - DNA, 21 bp, Artificial Sequence
  source: /note="Description of Artificial Sequence: Synthetic oligonucleotide"
ttgaatcttccgaatcatggt

SEQ ID NO: 19636 - DNA, 21 bp, Artificial Sequence
  source: /note="Description of Artificial Sequence: Synthetic oligonucleotide"
ctgaatcttcagtctcagagt

SEQ ID NO: 19637 - DNA, 21 bp, Artificial Sequence
  source: /note="Description of Artificial Sequence: Synthetic oligonucleotide"
cttaatcttagtgggcttgtt

SEQ ID NO: 19638 - DNA, 21 bp, Artificial Sequence
  source: /note="Description of Artificial Sequence: Synthetic oligonucleotide"
ttgaatcttacgtcggttagt

SEQ ID NO: 19639 - DNA, 21 bp, Artificial Sequence
  source: /note="Description of Artificial Sequence: Synthetic oligonucleotide"
ctgaatatgtctgagccgcgt

SEQ ID NO: 19640 - DNA, 21 bp, Artificial Sequence
  source: /note="Description of Artificial Sequence: Synthetic oligonucleotide"
ttgaatatgagtcctacgggt

SEQ ID NO: 19641 - DNA, 21 bp, Artificial Sequence
  source: /note="Description of Artificial Sequence: Synthetic oligonucleotide"
ttgaataatcatcagtttagt

SEQ ID NO: 19642 - DNA, 21 bp, Artificial Sequence
  source: /note="Description of Artificial Sequence: Synthetic oligonucleotide"
ttgaataatctgccgagtcgt

SEQ ID NO: 19643 - DNA, 21 bp, Artificial Sequence
  source: /note="Description of Artificial Sequence: Synthetic oligonucleotide"
cttaatccggctgcgcgtatt

SEQ ID NO: 19644 - DNA, 21 bp, Artificial Sequence
  source: /note="Description of Artificial Sequence: Synthetic oligonucleotide"
cttaatcctgcgaaggctagt

SEQ ID NO: 19645 - DNA, 21 bp, Artificial Sequence
  source: /note="Description of Artificial Sequence: Synthetic oligonucleotide"
cttaatcctcatgagaatggg

SEQ ID NO: 19646 - DNA, 21 bp, Artificial Sequence
  source: /note="Description of Artificial Sequence: Synthetic oligonucleotide"
cttaatccttctagggtgccg

SEQ ID NO: 19647 - DNA, 21 bp, Artificial Sequence
  source: /note="Description of Artificial Sequence: Synthetic oligonucleotide"
ttgaatcctgttaatgtgatg

SEQ ID NO: 19648 - DNA, 21 bp, Artificial Sequence
  source: /note="Description of Artificial Sequence: Synthetic oligonucleotide"
ttgaatcagggtaatatgacg

SEQ ID NO: 19649 - DNA, 21 bp, Artificial Sequence
  source: /note="Description of Artificial Sequence: Synthetic oligonucleotide"
ttgaatcagcatgttcctgtt

SEQ ID NO: 19650 - DNA, 21 bp, Artificial Sequence
  source: /note="Description of Artificial Sequence: Synthetic oligonucleotide"
ttgaatcagtcgcggtctact

SEQ ID NO: 19651 - DNA, 21 bp, Artificial Sequence
  source: /note="Description of Artificial Sequence: Synthetic oligonucleotide"
ctgaatcagtcggtgagggtt

SEQ ID NO: 19652 - DNA, 21 bp, Artificial Sequence
  source: /note="Description of Artificial Sequence: Synthetic oligonucleotide"
ttgaatcgtgctgatgttgat

SEQ ID NO: 19653 - DNA, 21 bp, Artificial Sequence
  source: /note="Description of Artificial Sequence: Synthetic oligonucleotide"
ctgaatagggatatgtcttat

SEQ ID NO: 19654 - DNA, 21 bp, Artificial Sequence
  source: /note="Description of Artificial Sequence: Synthetic oligonucleotide"
cttaatcgggagcaggcgtct

SEQ ID NO: 19655 - DNA, 21 bp, Artificial Sequence
  source: /note="Description of Artificial Sequence: Synthetic oligonucleotide"
ctgaataggtcgagtatgccg

SEQ ID NO: 19656 - DNA, 21 bp, Artificial Sequence
  source: /note="Description of Artificial Sequence: Synthetic oligonucleotide"
cttaatcggacgaatccggat

SEQ ID NO: 19657 - DNA, 21 bp, Artificial Sequence
  source: /note="Description of Artificial Sequence: Synthetic oligonucleotide"
cttaatcgggttactccgtcg

SEQ ID NO: 19658 - DNA, 21 bp, Artificial Sequence
  source: /note="Description of Artificial Sequence: Synthetic oligonucleotide"
ctgaattcggatgctccgtat

SEQ ID NO: 19659 - DNA, 21 bp, Artificial Sequence
  source: /note="Description of Artificial Sequence: Synthetic oligonucleotide"
ttgaatagtctgggtacgttt

SEQ ID NO: 19660 - DNA, 21 bp, Artificial Sequence
  source: /note="Description of Artificial Sequence: Synthetic oligonucleotide"
ctgaattcgcctcttattgcg

SEQ ID NO: 19661 - DNA, 21 bp, Artificial Sequence
  source: /note="Description of Artificial Sequence: Synthetic oligonucleotide"
cttaatagtcagcctggtttg

SEQ ID NO: 19662 - DNA, 21 bp, Artificial Sequence
  source: /note="Description of Artificial Sequence: Synthetic oligonucleotide"
ttgaatagtcagcggtttggt

SEQ ID NO: 19663 - DNA, 21 bp, Artificial Sequence
  source: /note="Description of Artificial Sequence: Synthetic oligonucleotide"
ctgaattcttcgcatgatgct

SEQ ID NO: 19664 - DNA, 21 bp, Artificial Sequence
  source: /note="Description of Artificial Sequence: Synthetic oligonucleotide"
ctgaatagttctcgttctgct

SEQ ID NO: 19665 - DNA, 21 bp, Artificial Sequence
  source: /note="Description of Artificial Sequence: Synthetic oligonucleotide"
ctgaattcgtcttcgcatggg

SEQ ID NO: 19666 - DNA, 21 bp, Artificial Sequence
  source: /note="Description of Artificial Sequence: Synthetic oligonucleotide"
ttgaattcgacgaatccgcat

SEQ ID NO: 19667 - DNA, 21 bp, Artificial Sequence
  source: /note="Description of Artificial Sequence: Synthetic oligonucleotide"
cttaattcggttaggaataat

SEQ ID NO: 19668 - DNA, 21 bp, Artificial Sequence
  source: /note="Description of Artificial Sequence: Synthetic oligonucleotide"
cttaatacggctgctttgccg

SEQ ID NO: 19669 - DNA, 21 bp, Artificial Sequence
  source: /note="Description of Artificial Sequence: Synthetic oligonucleotide"
ctgaatactcattcttatgtg

SEQ ID NO: 19670 - DNA, 21 bp, Artificial Sequence
  source: /note="Description of Artificial Sequence: Synthetic oligonucleotide"
ctgaatactaagccgttttcg

SEQ ID NO: 19671 - DNA, 21 bp, Artificial Sequence
  source: /note="Description of Artificial Sequence: Synthetic oligonucleotide"
cttaatacgaggcagcagact

SEQ ID NO: 19672 - DNA, 21 bp, Artificial Sequence
  source: /note="Description of Artificial Sequence: Synthetic oligonucleotide"
ttgaatacgcggtctctttct

SEQ ID NO: 19673 - DNA, 21 bp, Artificial Sequence
  source: /note="Description of Artificial Sequence: Synthetic oligonucleotide"
cttaatgtggaggtggagcgg

SEQ ID NO: 19674 - DNA, 21 bp, Artificial Sequence
  source: /note="Description of Artificial Sequence: Synthetic oligonucleotide"
cttaatgttaagtctgggctg

SEQ ID NO: 19675 - DNA, 21 bp, Artificial Sequence
  source: /note="Description of Artificial Sequence: Synthetic oligonucleotide"
ttgaatgttaatattgcgccg

SEQ ID NO: 19676 - DNA, 21 bp, Artificial Sequence
  source: /note="Description of Artificial Sequence: Synthetic oligonucleotide"
ttgaatgtgcgtgagagtgtg

SEQ ID NO: 19677 - DNA, 21 bp, Artificial Sequence
  source: /note="Description of Artificial Sequence: Synthetic oligonucleotide"
ctgaatgtgcggagggtggct

SEQ ID NO: 19678 - DNA, 21 bp, Artificial Sequence
  source: /note="Description of Artificial Sequence: Synthetic oligonucleotide"
cttaatgtgcgtacggatcgt

SEQ ID NO: 19679 - DNA, 21 bp, Artificial Sequence
  source: /note="Description of Artificial Sequence: Synthetic oligonucleotide"
cttaatgtgtcggggaatgcg

SEQ ID NO: 19680 - DNA, 21 bp, Artificial Sequence
  source: /note="Description of Artificial Sequence: Synthetic oligonucleotide"
cttaatgtgtctagtacgggt

SEQ ID NO: 19681 - DNA, 21 bp, Artificial Sequence
  source: /note="Description of Artificial Sequence: Synthetic oligonucleotide"
ttgaatgttgttagtacttat

SEQ ID NO: 19682 - DNA, 21 bp, Artificial Sequence
  source: /note="Description of Artificial Sequence: Synthetic oligonucleotide"
cttaattatgatccgatgacg

SEQ ID NO: 19683 - DNA, 21 bp, Artificial Sequence
  source: /note="Description of Artificial Sequence: Synthetic oligonucleotide"
ctgaattatgggccggctctg

SEQ ID NO: 19684 - DNA, 21 bp, Artificial Sequence
  source: /note="Description of Artificial Sequence: Synthetic oligonucleotide"
cttaattatcatgcgagtgtg

SEQ ID NO: 19685 - DNA, 21 bp, Artificial Sequence
  source: /note="Description of Artificial Sequence: Synthetic oligonucleotide"
ttgcctgcgggtaatacgtct

SEQ ID NO: 19686 - DNA, 21 bp, Artificial Sequence
  source: /note="Description of Artificial Sequence: Synthetic oligonucleotide"
cttcctgcgggtaattatcat

SEQ ID NO: 19687 - DNA, 21 bp, Artificial Sequence
  source: /note="Description of Artificial Sequence: Synthetic oligonucleotide"
ctgcctgctaataattcgatt

SEQ ID NO: 19688 - DNA, 21 bp, Artificial Sequence
  source: /note="Description of Artificial Sequence: Synthetic oligonucleotide"
ttgcctgctcctaagcctgcg

SEQ ID NO: 19689 - DNA, 21 bp, Artificial Sequence
  source: /note="Description of Artificial Sequence: Synthetic oligonucleotide"
cttcctgcgcgtttggctact

SEQ ID NO: 19690 - DNA, 21 bp, Artificial Sequence
  source: /note="Description of Artificial Sequence: Synthetic oligonucleotide"
ttgcctgcgtctggggctgcg

SEQ ID NO: 19691 - DNA, 21 bp, Artificial Sequence
  source: /note="Description of Artificial Sequence: Synthetic oligonucleotide"
ttgccggcgacgaggtctatt

SEQ ID NO: 19692 - DNA, 21 bp, Artificial Sequence
  source: /note="Description of Artificial Sequence: Synthetic oligonucleotide"
ctgccggctgtgtgtggtccg

SEQ ID NO: 19693 - DNA, 21 bp, Artificial Sequence
  source: /note="Description of Artificial Sequence: Synthetic oligonucleotide"
ctgcctgataagtcgcttatg

SEQ ID NO: 19694 - DNA, 21 bp, Artificial Sequence
  source: /note="Description of Artificial Sequence: Synthetic oligonucleotide"
ctgccggatatgtctcgtgag

SEQ ID NO: 19695 - DNA, 21 bp, Artificial Sequence
  source: /note="Description of Artificial Sequence: Synthetic oligonucleotide"
ctgccggatcctaggcctgat

SEQ ID NO: 19696 - DNA, 21 bp, Artificial Sequence
  source: /note="Description of Artificial Sequence: Synthetic oligonucleotide"
cttccggatacgattcgtagt

SEQ ID NO: 19697 - DNA, 21 bp, Artificial Sequence
  source: /note="Description of Artificial Sequence: Synthetic oligonucleotide"
cttcctgatacgaggacgctt

SEQ ID NO: 19698 - DNA, 21 bp, Artificial Sequence
  source: /note="Description of Artificial Sequence: Synthetic oligonucleotide"
ttgccggatgtggctaggtat

SEQ ID NO: 19699 - DNA, 21 bp, Artificial Sequence
  source: /note="Description of Artificial Sequence: Synthetic oligonucleotide"
ttgcctgaggctggggttccg

SEQ ID NO: 19700 - DNA, 21 bp, Artificial Sequence
  source: /note="Description of Artificial Sequence: Synthetic oligonucleotide"
ttgcctgagatttcgccgcat

SEQ ID NO: 19701 - DNA, 21 bp, Artificial Sequence
  source: /note="Description of Artificial Sequence: Synthetic oligonucleotide"
ctgccggagaatacgccttat

SEQ ID NO: 19702 - DNA, 21 bp, Artificial Sequence
  source: /note="Description of Artificial Sequence: Synthetic oligonucleotide"
cttccggagcagacggttatt

SEQ ID NO: 19703 - DNA, 21 bp, Artificial Sequence
  source: /note="Description of Artificial Sequence: Synthetic oligonucleotide"
ctgccggagcgggttggtctg

SEQ ID NO: 19704 - DNA, 21 bp, Artificial Sequence
  source: /note="Description of Artificial Sequence: Synthetic oligonucleotide"
ctgcctgagactggtatgagt

SEQ ID NO: 19705 - DNA, 21 bp, Artificial Sequence
  source: /note="Description of Artificial Sequence: Synthetic oligonucleotide"
cttccgtttgctacttctcct

SEQ ID NO: 19706 - DNA, 21 bp, Artificial Sequence
  source: /note="Description of Artificial Sequence: Synthetic oligonucleotide"
ttgccgggggcgactattgag

SEQ ID NO: 19707 - DNA, 21 bp, Artificial Sequence
  source: /note="Description of Artificial Sequence: Synthetic oligonucleotide"
cttccgggtaaggttacgacg

SEQ ID NO: 19708 - DNA, 21 bp, Artificial Sequence
  source: /note="Description of Artificial Sequence: Synthetic oligonucleotide"
ttgccgggtcgtgctgcgcct

SEQ ID NO: 19709 - DNA, 21 bp, Artificial Sequence
  source: /note="Description of Artificial Sequence: Synthetic oligonucleotide"
cttccggggactccgcggggt

SEQ ID NO: 19710 - DNA, 21 bp, Artificial Sequence
  source: /note="Description of Artificial Sequence: Synthetic oligonucleotide"
cttcctggtactgtgggtgtt

SEQ ID NO: 19711 - DNA, 21 bp, Artificial Sequence
  source: /note="Description of Artificial Sequence: Synthetic oligonucleotide"
ttgccgggttggcctctggat

SEQ ID NO: 19712 - DNA, 21 bp, Artificial Sequence
  source: /note="Description of Artificial Sequence: Synthetic oligonucleotide"
ctgccgcatccttcgcagaat

SEQ ID NO: 19713 - DNA, 21 bp, Artificial Sequence
  source: /note="Description of Artificial Sequence: Synthetic oligonucleotide"
cttcctcatcgtccgaatagt

SEQ ID NO: 19714 - DNA, 21 bp, Artificial Sequence
  source: /note="Description of Artificial Sequence: Synthetic oligonucleotide"
ttgcctcattctactccgatg

SEQ ID NO: 19715 - DNA, 21 bp, Artificial Sequence
  source: /note="Description of Artificial Sequence: Synthetic oligonucleotide"
ttgcctattgctacgtctaag

SEQ ID NO: 19716 - DNA, 21 bp, Artificial Sequence
  source: /note="Description of Artificial Sequence: Synthetic oligonucleotide"
ttgcctattggtaagcaggtg

SEQ ID NO: 19717 - DNA, 21 bp, Artificial Sequence
  source: /note="Description of Artificial Sequence: Synthetic oligonucleotide"
ctgcctattttgacgtctcat

SEQ ID NO: 19718 - DNA, 21 bp, Artificial Sequence
  source: /note="Description of Artificial Sequence: Synthetic oligonucleotide"
ctgcctattcttactagtagt

SEQ ID NO: 19719 - DNA, 21 bp, Artificial Sequence
  source: /note="Description of Artificial Sequence: Synthetic oligonucleotide"
ctgcctattaatcataagttt

SEQ ID NO: 19720 - DNA, 21 bp, Artificial Sequence
  source: /note="Description of Artificial Sequence: Synthetic oligonucleotide"
ttgcctattccggttgatgcg

SEQ ID NO: 19721 - DNA, 21 bp, Artificial Sequence
  source: /note="Description of Artificial Sequence: Synthetic oligonucleotide"
ttgccgatttctcttcagcct

SEQ ID NO: 19722 - DNA, 21 bp, Artificial Sequence
  source: /note="Description of Artificial Sequence: Synthetic oligonucleotide"
ttgcctattacttatgcggat

SEQ ID NO: 19723 - DNA, 21 bp, Artificial Sequence
  source: /note="Description of Artificial Sequence: Synthetic oligonucleotide"
ctgccgaaggcgtcgacgtcg

SEQ ID NO: 19724 - DNA, 21 bp, Artificial Sequence
  source: /note="Description of Artificial Sequence: Synthetic oligonucleotide"
cttcctaagtttcgtgatcag

SEQ ID NO: 19725 - DNA, 21 bp, Artificial Sequence
  source: /note="Description of Artificial Sequence: Synthetic oligonucleotide"
cttcctaagattgataatact

SEQ ID NO: 19726 - DNA, 21 bp, Artificial Sequence
  source: /note="Description of Artificial Sequence: Synthetic oligonucleotide"
ctgcctaagaattatgatgct

SEQ ID NO: 19727 - DNA, 21 bp, Artificial Sequence
  source: /note="Description of Artificial Sequence: Synthetic oligonucleotide"
ctgcctaagtctagtgatgct

SEQ ID NO: 19728 - DNA, 21 bp, Artificial Sequence
  source: /note="Description of Artificial Sequence: Synthetic oligonucleotide"
cttcctaaggtggttgctacg

SEQ ID NO: 19729 - DNA, 21 bp, Artificial Sequence
  source: /note="Description of Artificial Sequence: Synthetic oligonucleotide"
ctgccgttggctcagcagcct

SEQ ID NO: 19730 - DNA, 21 bp, Artificial Sequence
  source: /note="Description of Artificial Sequence: Synthetic oligonucleotide"
ttgcctcttgctgtgtatgat

SEQ ID NO: 19731 - DNA, 21 bp, Artificial Sequence
  source: /note="Description of Artificial Sequence: Synthetic oligonucleotide"
ttgccgcttggtaatcgtatg

SEQ ID NO: 19732 - DNA, 21 bp, Artificial Sequence
  source: /note="Description of Artificial Sequence: Synthetic oligonucleotide"
ctgcctcttcataggagttct

SEQ ID NO: 19733 - DNA, 21 bp, Artificial Sequence
  source: /note="Description of Artificial Sequence: Synthetic oligonucleotide"
ttgcctttgcatagtcctagg

SEQ ID NO: 19734 - DNA, 21 bp, Artificial Sequence
  source: /note="Description of Artificial Sequence: Synthetic oligonucleotide"
ctgccgctgatttttactgag

SEQ ID NO: 19735 - DNA, 21 bp, Artificial Sequence
  source: /note="Description of Artificial Sequence: Synthetic oligonucleotide"
cttccgttgaagggggcggat

SEQ ID NO: 19736 - DNA, 21 bp, Artificial Sequence
  source: /note="Description of Artificial Sequence: Synthetic oligonucleotide"
cttcctctgatgaagccgggg

SEQ ID NO: 19737 - DNA, 21 bp, Artificial Sequence
  source: /note="Description of Artificial Sequence: Synthetic oligonucleotide"
ctgccgttgaattttgatcgt

SEQ ID NO: 19738 - DNA, 21 bp, Artificial Sequence
  source: /note="Description of Artificial Sequence: Synthetic oligonucleotide"
cttccgctgaataagtctcat

SEQ ID NO: 19739 - DNA, 21 bp, Artificial Sequence
  source: /note="Description of Artificial Sequence: Synthetic oligonucleotide"
ttgccgttgaatacttatact

SEQ ID NO: 19740 - DNA, 21 bp, Artificial Sequence
  source: /note="Description of Artificial Sequence: Synthetic oligonucleotide"
ttgcctcttcctccgtatgtt

SEQ ID NO: 19741 - DNA, 21 bp, Artificial Sequence
  source: /note="Description of Artificial Sequence: Synthetic oligonucleotide"
ctgcctttgccgacgagtggt

SEQ ID NO: 19742 - DNA, 21 bp, Artificial Sequence
  source: /note="Description of Artificial Sequence: Synthetic oligonucleotide"
ctgcctctgcgggagcctaag

SEQ ID NO: 19743 - DNA, 21 bp, Artificial Sequence
  source: /note="Description of Artificial Sequence: Synthetic oligonucleotide"
ctgccgcttcggatgtctgat

SEQ ID NO: 19744 - DNA, 21 bp, Artificial Sequence
  source: /note="Description of Artificial Sequence: Synthetic oligonucleotide"
ttgccgttgtcgccgatgcat

SEQ ID NO: 19745 - DNA, 21 bp, Artificial Sequence
  source: /note="Description of Artificial Sequence: Synthetic oligonucleotide"
ctgcctatggatcttgtggcg

SEQ ID NO: 19746 - DNA, 21 bp, Artificial Sequence
  source: /note="Description of Artificial Sequence: Synthetic oligonucleotide"
ttgcctatgatggctcatctt

SEQ ID NO: 19747 - DNA, 21 bp, Artificial Sequence
  source: /note="Description of Artificial Sequence: Synthetic oligonucleotide"
cttccgatgagtcatctgccg

SEQ ID NO: 19748 - DNA, 21 bp, Artificial Sequence
  source: /note="Description of Artificial Sequence: Synthetic oligonucleotide"
ttgcctaatgcttatatgcat

SEQ ID NO: 19749 - DNA, 21 bp, Artificial Sequence
  source: /note="Description of Artificial Sequence: Synthetic oligonucleotide"
ttgccgaatgagccgagtgat

SEQ ID NO: 19750 - DNA, 21 bp, Artificial Sequence
  source: /note="Description of Artificial Sequence: Synthetic oligonucleotide"
ttgccgaatcatatttcgccg

SEQ ID NO: 19751 - DNA, 21 bp, Artificial Sequence
  source: /note="Description of Artificial Sequence: Synthetic oligonucleotide"
ctgccgaatctgcgtgatcag

SEQ ID NO: 19752 - DNA, 21 bp, Artificial Sequence
  source: /note="Description of Artificial Sequence: Synthetic oligonucleotide"
ttgccgaataattcgagggat

SEQ ID NO: 19753 - DNA, 21 bp, Artificial Sequence
  source: /note="Description of Artificial Sequence: Synthetic oligonucleotide"
cttccgaatccgcgtagtgat

SEQ ID NO: 19754 - DNA, 21 bp, Artificial Sequence
  source: /note="Description of Artificial Sequence: Synthetic oligonucleotide"
cttccgaattctgtttttacg

SEQ ID NO: 19755 - DNA, 21 bp, Artificial Sequence
  source: /note="Description of Artificial Sequence: Synthetic oligonucleotide"
cttcctcctgctgcgcatagg

SEQ ID NO: 19756 - DNA, 21 bp, Artificial Sequence
  source: /note="Description of Artificial Sequence: Synthetic oligonucleotide"
ctgcctccggctcatgctcat

SEQ ID NO: 19757 - DNA, 21 bp, Artificial Sequence
  source: /note="Description of Artificial Sequence: Synthetic oligonucleotide"
cttccgccgtgtcttacgaat

SEQ ID NO: 19758 - DNA, 21 bp, Artificial Sequence
  source: /note="Description of Artificial Sequence: Synthetic oligonucleotide"
ctgcctccggagcatcggggt

SEQ ID NO: 19759 - DNA, 21 bp, Artificial Sequence
  source: /note="Description of Artificial Sequence: Synthetic oligonucleotide"
cttcctccggagacgtttcct

SEQ ID NO: 19760 - DNA, 21 bp, Artificial Sequence
  source: /note="Description of Artificial Sequence: Synthetic oligonucleotide"
ttgccgcctgggcctgctacg

SEQ ID NO: 19761 - DNA, 21 bp, Artificial Sequence
  source: /note="Description of Artificial Sequence: Synthetic oligonucleotide"
ctgccgccgcatgggaatgtg

SEQ ID NO: 19762 - DNA, 21 bp, Artificial Sequence
  source: /note="Description of Artificial Sequence: Synthetic oligonucleotide"
ttgccgcctcatggttcggct

SEQ ID NO: 19763 - DNA, 21 bp, Artificial Sequence
  source: /note="Description of Artificial Sequence: Synthetic oligonucleotide"
cttcctccgcatggttatgct

SEQ ID NO: 19764 - DNA, 21 bp, Artificial Sequence
  source: /note="Description of Artificial Sequence: Synthetic oligonucleotide"
ttgcctccgcttgttcagtat

SEQ ID NO: 19765 - DNA, 21 bp, Artificial Sequence
  source: /note="Description of Artificial Sequence: Synthetic oligonucleotide"
cttccgcctaatgggcatcgg

SEQ ID NO: 19766 - DNA, 21 bp, Artificial Sequence
  source: /note="Description of Artificial Sequence: Synthetic oligonucleotide"
ttgccgcctaataagtttatg

SEQ ID NO: 19767 - DNA, 21 bp, Artificial Sequence
  source: /note="Description of Artificial Sequence: Synthetic oligonucleotide"
ttgccgccgcgggatgatcgt

SEQ ID NO: 19768 - DNA, 21 bp, Artificial Sequence
  source: /note="Description of Artificial Sequence: Synthetic oligonucleotide"
ctgcctcctaggtcttcgtat

SEQ ID NO: 19769 - DNA, 21 bp, Artificial Sequence
  source: /note="Description of Artificial Sequence: Synthetic oligonucleotide"
ctgccgcctagtcatgctatg

SEQ ID NO: 19770 - DNA, 21 bp, Artificial Sequence
  source: /note="Description of Artificial Sequence: Synthetic oligonucleotide"
ttgcctccgtcgattgataat

SEQ ID NO: 19771 - DNA, 21 bp, Artificial Sequence
  source: /note="Description of Artificial Sequence: Synthetic oligonucleotide"
ctgccgccttatcgggggcct

SEQ ID NO: 19772 - DNA, 21 bp, Artificial Sequence
  source: /note="Description of Artificial Sequence: Synthetic oligonucleotide"
ctgccgccgtattctcctgcg

SEQ ID NO: 19773 - DNA, 21 bp, Artificial Sequence
  source: /note="Description of Artificial Sequence: Synthetic oligonucleotide"
ttgccgcagcctggggctgct

SEQ ID NO: 19774 - DNA, 21 bp, Artificial Sequence
  source: /note="Description of Artificial Sequence: Synthetic oligonucleotide"
ttgccgcagcgtacgtctcat

SEQ ID NO: 19775 - DNA, 21 bp, Artificial Sequence
  source: /note="Description of Artificial Sequence: Synthetic oligonucleotide"
ttgccgcgggagccgttgact

SEQ ID NO: 19776 - DNA, 21 bp, Artificial Sequence
  source: /note="Description of Artificial Sequence: Synthetic oligonucleotide"
ttgccgaggtttcctgtggat

SEQ ID NO: 19777 - DNA, 21 bp, Artificial Sequence
  source: /note="Description of Artificial Sequence: Synthetic oligonucleotide"
cttccgaggggtatgacttct

SEQ ID NO: 19778 - DNA, 21 bp, Artificial Sequence
  source: /note="Description of Artificial Sequence: Synthetic oligonucleotide"
ctgccgcgtcatcagcagacg

SEQ ID NO: 19779 - DNA, 21 bp, Artificial Sequence
  source: /note="Description of Artificial Sequence: Synthetic oligonucleotide"
ttgccgaggattcctactggt

SEQ ID NO: 19780 - DNA, 21 bp, Artificial Sequence
  source: /note="Description of Artificial Sequence: Synthetic oligonucleotide"
ttgcctcggctgatggcgcct

SEQ ID NO: 19781 - DNA, 21 bp, Artificial Sequence
  source: /note="Description of Artificial Sequence: Synthetic oligonucleotide"
cttccgcgtcaggctgcgctg

SEQ ID NO: 19782 - DNA, 21 bp, Artificial Sequence
  source: /note="Description of Artificial Sequence: Synthetic oligonucleotide"
ctgcctcgttctcagtttatt

SEQ ID NO: 19783 - DNA, 21 bp, Artificial Sequence
  source: /note="Description of Artificial Sequence: Synthetic oligonucleotide"
ctgccgcgtgttaatgctggg

SEQ ID NO: 19784 - DNA, 21 bp, Artificial Sequence
  source: /note="Description of Artificial Sequence: Synthetic oligonucleotide"
cttccgagtgctgatcgtgtt

SEQ ID NO: 19785 - DNA, 21 bp, Artificial Sequence
  source: /note="Description of Artificial Sequence: Synthetic oligonucleotide"
cttccttcttgtattggtcct

SEQ ID NO: 19786 - DNA, 21 bp, Artificial Sequence
  source: /note="Description of Artificial Sequence: Synthetic oligonucleotide"
ctgccttcgtttaatgggtcg

SEQ ID NO: 19787 - DNA, 21 bp, Artificial Sequence
  source: /note="Description of Artificial Sequence: Synthetic oligonucleotide"
cttcctagtattttgttgccg

SEQ ID NO: 19788 - DNA, 21 bp, Artificial Sequence
  source: /note="Description of Artificial Sequence: Synthetic oligonucleotide"
cttccgtctattcctcggact

SEQ ID NO: 19789 - DNA, 21 bp, Artificial Sequence
  source: /note="Description of Artificial Sequence: Synthetic oligonucleotide"
ttgccgagtatgtctttgtct

SEQ ID NO: 19790 - DNA, 21 bp, Artificial Sequence
  source: /note="Description of Artificial Sequence: Synthetic oligonucleotide"
ctgcctagtaatgctgtttcg

SEQ ID NO: 19791 - DNA, 21 bp, Artificial Sequence
  source: /note="Description of Artificial Sequence: Synthetic oligonucleotide"
ttgccttctaatacgaggctg

SEQ ID NO: 19792 - DNA, 21 bp, Artificial Sequence
  source: /note="Description of Artificial Sequence: Synthetic oligonucleotide"
cttcctagtcctccgggtgtg

SEQ ID NO: 19793 - DNA, 21 bp, Artificial Sequence
  source: /note="Description of Artificial Sequence: Synthetic oligonucleotide"
ttgccgtcgcctcctatttct

SEQ ID NO: 19794 - DNA, 21 bp, Artificial Sequence
  source: /note="Description of Artificial Sequence: Synthetic oligonucleotide"
ttgccttctcagcttattggt

SEQ ID NO: 19795 - DNA, 21 bp, Artificial Sequence
  source: /note="Description of Artificial Sequence: Synthetic oligonucleotide"
cttccttctcgggctttttcg

SEQ ID NO: 19796 - DNA, 21 bp, Artificial Sequence
  source: /note="Description of Artificial Sequence: Synthetic oligonucleotide"
ctgccgagtagtacgccgaat

SEQ ID NO: 19797 - DNA, 21 bp, Artificial Sequence
  source: /note="Description of Artificial Sequence: Synthetic oligonucleotide"
ttgccttcttctgtttatacg

SEQ ID NO: 19798 - DNA, 21 bp, Artificial Sequence
  source: /note="Description of Artificial Sequence: Synthetic oligonucleotide"
cttcctagtacgtgtgggaag

SEQ ID NO: 19799 - DNA, 21 bp, Artificial Sequence
  source: /note="Description of Artificial Sequence: Synthetic oligonucleotide"
cttccttcgactgggggtctg

SEQ ID NO: 19800 - DNA, 21 bp, Artificial Sequence
  source: /note="Description of Artificial Sequence: Synthetic oligonucleotide"
ttgcctagtactcctccgagg

SEQ ID NO: 19801 - DNA, 21 bp, Artificial Sequence
  source: /note="Description of Artificial Sequence: Synthetic oligonucleotide"
ctgccttcgtataatgcgtct

SEQ ID NO: 19802 - DNA, 21 bp, Artificial Sequence
  source: /note="Description of Artificial Sequence: Synthetic oligonucleotide"
cttccgacgcatttggaggcg

SEQ ID NO: 19803 - DNA, 21 bp, Artificial Sequence
  source: /note="Description of Artificial Sequence: Synthetic oligonucleotide"
ttgccgactattaatgctgtg

SEQ ID NO: 19804 - DNA, 21 bp, Artificial Sequence
  source: /note="Description of Artificial Sequence: Synthetic oligonucleotide"
ctgcctactaaggaggctgtg

SEQ ID NO: 19805 - DNA, 21 bp, Artificial Sequence
  source: /note="Description of Artificial Sequence: Synthetic oligonucleotide"
ctgcctactctgcggattcct

SEQ ID NO: 19806 - DNA, 21 bp, Artificial Sequence
  source: /note="Description of Artificial Sequence: Synthetic oligonucleotide"
ttgcctactctttcgtatgtt

SEQ ID NO: 19807 - DNA, 21 bp, Artificial Sequence
  source: /note="Description of Artificial Sequence: Synthetic oligonucleotide"
ctgccgactatgcataatact

SEQ ID NO: 19808 - DNA, 21 bp, Artificial Sequence
  source: /note="Description of Artificial Sequence: Synthetic oligonucleotide"
ttgccgacgaataagggtatt

SEQ ID NO: 19809 - DNA, 21 bp, Artificial Sequence
  source: /note="Description of Artificial Sequence: Synthetic oligonucleotide"
ctgcctactaattatgctgcg

SEQ ID NO: 19810 - DNA, 21 bp, Artificial Sequence
  source: /note="Description of Artificial Sequence: Synthetic oligonucleotide"
ctgccgacgccgtttagttct

SEQ ID NO: 19811 - DNA, 21 bp, Artificial Sequence
  source: /note="Description of Artificial Sequence: Synthetic oligonucleotide"
cttcctacgccgttgactagt

SEQ ID NO: 19812 - DNA, 21 bp, Artificial Sequence
  source: /note="Description of Artificial Sequence: Synthetic oligonucleotide"
ttgccgacgagtccgagtgcg

SEQ ID NO: 19813 - DNA, 21 bp, Artificial Sequence
  source: /note="Description of Artificial Sequence: Synthetic oligonucleotide"
ctgcctacttctacttctatt

SEQ ID NO: 19814 - DNA, 21 bp, Artificial Sequence
  source: /note="Description of Artificial Sequence: Synthetic oligonucleotide"
ctgcctactagtgttgttctg

SEQ ID NO: 19815 - DNA, 21 bp, Artificial Sequence
  source: /note="Description of Artificial Sequence: Synthetic oligonucleotide"
ctgccggtgggggatcctctg

SEQ ID NO: 19816 - DNA, 21 bp, Artificial Sequence
  source: /note="Description of Artificial Sequence: Synthetic oligonucleotide"
ttgcctgttaatattgtgggt

SEQ ID NO: 19817 - DNA, 21 bp, Artificial Sequence
  source: /note="Description of Artificial Sequence: Synthetic oligonucleotide"
cttcctgtgagtgataggtat

SEQ ID NO: 19818 - DNA, 21 bp, Artificial Sequence
  source: /note="Description of Artificial Sequence: Synthetic oligonucleotide"
ctgcctgtgagttctcgtcat

SEQ ID NO: 19819 - DNA, 21 bp, Artificial Sequence
  source: /note="Description of Artificial Sequence: Synthetic oligonucleotide"
ctgccggtttctacgcggcat

SEQ ID NO: 19820 - DNA, 21 bp, Artificial Sequence
  source: /note="Description of Artificial Sequence: Synthetic oligonucleotide"
ctgcctgttgttaatgctagt

SEQ ID NO: 19821 - DNA, 21 bp, Artificial Sequence
  source: /note="Description of Artificial Sequence: Synthetic oligonucleotide"
ttgccttatactgttggtacg

SEQ ID NO: 19822 - DNA, 21 bp, Artificial Sequence
  source: /note="Description of Artificial Sequence: Synthetic oligonucleotide"
ctgcaggctcgtacgcttaat

SEQ ID NO: 19823 - DNA, 21 bp, Artificial Sequence
  source: /note="Description of Artificial Sequence: Synthetic oligonucleotide"
cttcaggcgtctaaggctgat

SEQ ID NO: 19824 - DNA, 21 bp, Artificial Sequence
  source: /note="Description of Artificial Sequence: Synthetic oligonucleotide"
cttcaggcttctaatgatatt

SEQ ID NO: 19825 - DNA, 21 bp, Artificial Sequence
  source: /note="Description of Artificial Sequence: Synthetic oligonucleotide"
cttcaggcgactcggggggct

SEQ ID NO: 19826 - DNA, 21 bp, Artificial Sequence
  source: /note="Description of Artificial Sequence: Synthetic oligonucleotide"
cttcaggatgcggtgtgtaat

SEQ ID NO: 19827 - DNA, 21 bp, Artificial Sequence
  source: /note="Description of Artificial Sequence: Synthetic oligonucleotide"
cttcaggatcctcgtagtccg

SEQ ID NO: 19828 - DNA, 21 bp, Artificial Sequence
  source: /note="Description of Artificial Sequence: Synthetic oligonucleotide"
ttgcaggatgtttcgatgggg

SEQ ID NO: 19829 - DNA, 21 bp, Artificial Sequence
  source: /note="Description of Artificial Sequence: Synthetic oligonucleotide"
ttgcaggagaagagttgggag

SEQ ID NO: 19830 - DNA, 21 bp, Artificial Sequence
  source: /note="Description of Artificial Sequence: Synthetic oligonucleotide"
ttgcaggagccgggtaatttg

SEQ ID NO: 19831 - DNA, 21 bp, Artificial Sequence
  source: /note="Description of Artificial Sequence: Synthetic oligonucleotide"
cttcagtttagtccgcctagt

SEQ ID NO: 19832 - DNA, 21 bp, Artificial Sequence
  source: /note="Description of Artificial Sequence: Synthetic oligonucleotide"
ttgcagggggcgtttgcttcg

SEQ ID NO: 19833 - DNA, 21 bp, Artificial Sequence
  source: /note="Description of Artificial Sequence: Synthetic oligonucleotide"
ttgcaggggtcgcgtcagatt

SEQ ID NO: 19834 - DNA, 21 bp, Artificial Sequence
  source: /note="Description of Artificial Sequence: Synthetic oligonucleotide"
cttcaggggtggcatgctcag

SEQ ID NO: 19835 - DNA, 21 bp, Artificial Sequence
  source: /note="Description of Artificial Sequence: Synthetic oligonucleotide"
ttgcagcatcattctaatggg

SEQ ID NO: 19836 - DNA, 21 bp, Artificial Sequence
  source: /note="Description of Artificial Sequence: Synthetic oligonucleotide"
ctgcagcatctgcagccgtcg

SEQ ID NO: 19837 - DNA, 21 bp, Artificial Sequence
  source: /note="Description of Artificial Sequence: Synthetic oligonucleotide"
ttgcagaagatggttccgttg

SEQ ID NO: 19838 - DNA, 21 bp, Artificial Sequence
  source: /note="Description of Artificial Sequence: Synthetic oligonucleotide"
ttgcagaagccgacgatgtct

SEQ ID NO: 19839 - DNA, 21 bp, Artificial Sequence
  source: /note="Description of Artificial Sequence: Synthetic oligonucleotide"
ctgcagaagcctacttctgct

SEQ ID NO: 19840 - DNA, 21 bp, Artificial Sequence
  source: /note="Description of Artificial Sequence: Synthetic oligonucleotide"
cttcagttgaatcagcagaag

SEQ ID NO: 19841 - DNA, 21 bp, Artificial Sequence
  source: /note="Description of Artificial Sequence: Synthetic oligonucleotide"
ttgcagttgcggcagactagt

SEQ ID NO: 19842 - DNA, 21 bp, Artificial Sequence
  source: /note="Description of Artificial Sequence: Synthetic oligonucleotide"
cttcagttgactcgtggtgag

SEQ ID NO: 19843 - DNA, 21 bp, Artificial Sequence
  source: /note="Description of Artificial Sequence: Synthetic oligonucleotide"
ttgcagatggcgagggggggt

SEQ ID NO: 19844 - DNA, 21 bp, Artificial Sequence
  source: /note="Description of Artificial Sequence: Synthetic oligonucleotide"
ctgcagatgcgtcctatgact

SEQ ID NO: 19845 - DNA, 21 bp, Artificial Sequence
  source: /note="Description of Artificial Sequence: Synthetic oligonucleotide"
cttcagaatggttgtaagtct

SEQ ID NO: 19846 - DNA, 21 bp, Artificial Sequence
  source: /note="Description of Artificial Sequence: Synthetic oligonucleotide"
cttcagaatacgagtagttcg

SEQ ID NO: 19847 - DNA, 21 bp, Artificial Sequence
  source: /note="Description of Artificial Sequence: Synthetic oligonucleotide"
cttcagccttttaagcatcag

SEQ ID NO: 19848 - DNA, 21 bp, Artificial Sequence
  source: /note="Description of Artificial Sequence: Synthetic oligonucleotide"
ttgcagcctcgtgagcctgtt

SEQ ID NO: 19849 - DNA, 21 bp, Artificial Sequence
  source: /note="Description of Artificial Sequence: Synthetic oligonucleotide"
ttgcagcctagttcgcgtacg

SEQ ID NO: 19850 - DNA, 21 bp, Artificial Sequence
  source: /note="Description of Artificial Sequence: Synthetic oligonucleotide"
cttcagccgactggtgaggct

SEQ ID NO: 19851 - DNA, 21 bp, Artificial Sequence
  source: /note="Description of Artificial Sequence: Synthetic oligonucleotide"
ctgcagcagacggggttgcgt

SEQ ID NO: 19852 - DNA, 21 bp, Artificial Sequence
  source: /note="Description of Artificial Sequence: Synthetic oligonucleotide"
cttcagcgtgcgaatatggtg

SEQ ID NO: 19853 - DNA, 21 bp, Artificial Sequence
  source: /note="Description of Artificial Sequence: Synthetic oligonucleotide"
cttcagcgtgaggctcatacg

SEQ ID NO: 19854 - DNA, 21 bp, Artificial Sequence
  source: /note="Description of Artificial Sequence: Synthetic oligonucleotide"
ttgcagcgttcgagggggccg

SEQ ID NO: 19855 - DNA, 21 bp, Artificial Sequence
  source: /note="Description of Artificial Sequence: Synthetic oligonucleotide"
cttcagtctgctcgtgctcct

SEQ ID NO: 19856 - DNA, 21 bp, Artificial Sequence
  source: /note="Description of Artificial Sequence: Synthetic oligonucleotide"
ttgcagtctttttcgtctccg

SEQ ID NO: 19857 - DNA, 21 bp, Artificial Sequence
  source: /note="Description of Artificial Sequence: Synthetic oligonucleotide"
ctgcagagtggtcctcagccg

SEQ ID NO: 19858 - DNA, 21 bp, Artificial Sequence
  source: /note="Description of Artificial Sequence: Synthetic oligonucleotide"
cttcagtctcctgagaatgag

SEQ ID NO: 19859 - DNA, 21 bp, Artificial Sequence
  source: /note="Description of Artificial Sequence: Synthetic oligonucleotide"
ctgcagagttatacgccgccg

SEQ ID NO: 19860 - DNA, 21 bp, Artificial Sequence
  source: /note="Description of Artificial Sequence: Synthetic oligonucleotide"
ttgcagactgggcgtttttct

SEQ ID NO: 19861 - DNA, 21 bp, Artificial Sequence
  source: /note="Description of Artificial Sequence: Synthetic oligonucleotide"
ttgcagactaagtcgtcttct

SEQ ID NO: 19862 - DNA, 21 bp, Artificial Sequence
  source: /note="Description of Artificial Sequence: Synthetic oligonucleotide"
ttgcagacggtggatattgat

SEQ ID NO: 19863 - DNA, 21 bp, Artificial Sequence
  source: /note="Description of Artificial Sequence: Synthetic oligonucleotide"
ttgcaggtggattctaatgtg

SEQ ID NO: 19864 - DNA, 21 bp, Artificial Sequence
  source: /note="Description of Artificial Sequence: Synthetic oligonucleotide"
ttgcaggttccttcttctctg

SEQ ID NO: 19865 - DNA, 21 bp, Artificial Sequence
  source: /note="Description of Artificial Sequence: Synthetic oligonucleotide"
ttgcaggtgtcggggctggat

SEQ ID NO: 19866 - DNA, 21 bp, Artificial Sequence
  source: /note="Description of Artificial Sequence: Synthetic oligonucleotide"
ctgcagtatgctacttcggat

SEQ ID NO: 19867 - DNA, 21 bp, Artificial Sequence
  source: /note="Description of Artificial Sequence: Synthetic oligonucleotide"
ctgcgtgcggctgagatttcg

SEQ ID NO: 19868 - DNA, 21 bp, Artificial Sequence
  source: /note="Description of Artificial Sequence: Synthetic oligonucleotide"
cttcgtgcggcgaatgctctt

SEQ ID NO: 19869 - DNA, 21 bp, Artificial Sequence
  source: /note="Description of Artificial Sequence: Synthetic oligonucleotide"
ctgcgtgctgatgggaaggcg

SEQ ID NO: 19870 - DNA, 21 bp, Artificial Sequence
  source: /note="Description of Artificial Sequence: Synthetic oligonucleotide"
cttcgtgcggggacggcgcag

SEQ ID NO: 19871 - DNA, 21 bp, Artificial Sequence
  source: /note="Description of Artificial Sequence: Synthetic oligonucleotide"
ttgcgtgctggtacgtctagt

SEQ ID NO: 19872 - DNA, 21 bp, Artificial Sequence
  source: /note="Description of Artificial Sequence: Synthetic oligonucleotide"
cttcgggcgattcttgaggag

SEQ ID NO: 19873 - DNA, 21 bp, Artificial Sequence
  source: /note="Description of Artificial Sequence: Synthetic oligonucleotide"
cttcgtgctctgacggggagt

SEQ ID NO: 19874 - DNA, 21 bp, Artificial Sequence
  source: /note="Description of Artificial Sequence: Synthetic oligonucleotide"
ttgcgtgctcagaatgatgct

SEQ ID NO: 19875 - DNA, 21 bp, Artificial Sequence
  source: /note="Description of Artificial Sequence: Synthetic oligonucleotide"
ctgcgggcgacgaattctttg

SEQ ID NO: 19876 - DNA, 21 bp, Artificial Sequence
  source: /note="Description of Artificial Sequence: Synthetic oligonucleotide"
cttagggatggtcagcgtcct

SEQ ID NO: 19877 - DNA, 21 bp, Artificial Sequence
  source: /note="Description of Artificial Sequence: Synthetic oligonucleotide"
cttcgggatgggcgtgcttct

SEQ ID NO: 19878 - DNA, 21 bp, Artificial Sequence
  source: /note="Description of Artificial Sequence: Synthetic oligonucleotide"
ttgcgggatcatggtggtcat

SEQ ID NO: 19879 - DNA, 21 bp, Artificial Sequence
  source: /note="Description of Artificial Sequence: Synthetic oligonucleotide"
cttcgggatcgggattttaag

SEQ ID NO: 19880 - DNA, 21 bp, Artificial Sequence
  source: /note="Description of Artificial Sequence: Synthetic oligonucleotide"
ctgagggatcgtgatgtgctt

SEQ ID NO: 19881 - DNA, 21 bp, Artificial Sequence
  source: /note="Description of Artificial Sequence: Synthetic oligonucleotide"
cttcgggattcgaataagaat

SEQ ID NO: 19882 - DNA, 21 bp, Artificial Sequence
  source: /note="Description of Artificial Sequence: Synthetic oligonucleotide"
ttgcgggatagtgtgcaggtg

SEQ ID NO: 19883 - DNA, 21 bp, Artificial Sequence
  source: /note="Description of Artificial Sequence: Synthetic oligonucleotide"
ttgagggagcatgggcctgtt

SEQ ID NO: 19884 - DNA, 21 bp, Artificial Sequence
  source: /note="Description of Artificial Sequence: Synthetic oligonucleotide"
ttgagggagatgcctctgcct

SEQ ID NO: 19885 - DNA, 21 bp, Artificial Sequence
  source: /note="Description of Artificial Sequence: Synthetic oligonucleotide"
ttgagggagaatatgtcgaat

SEQ ID NO: 19886 - DNA, 21 bp, Artificial Sequence
  source: /note="Description of Artificial Sequence: Synthetic oligonucleotide"
cttcgtgagcctactgggttt

SEQ ID NO: 19887 - DNA, 21 bp, Artificial Sequence
  source: /note="Description of Artificial Sequence: Synthetic oligonucleotide"
cttcgtgagccggtgattcag

SEQ ID NO: 19888 - DNA, 21 bp, Artificial Sequence
  source: /note="Description of Artificial Sequence: Synthetic oligonucleotide"
ttgcgtgagtctcagcggatt

SEQ ID NO: 19889 - DNA, 21 bp, Artificial Sequence
  source: /note="Description of Artificial Sequence: Synthetic oligonucleotide"
ttgaggtttcctggtacgcct

SEQ ID NO: 19890 - DNA, 21 bp, Artificial Sequence
  source: /note="Description of Artificial Sequence: Synthetic oligonucleotide"
cttcgttttcagtctactccg

SEQ ID NO: 19891 - DNA, 21 bp, Artificial Sequence
  source: /note="Description of Artificial Sequence: Synthetic oligonucleotide"
ctgaggggtgcgattgctccg

SEQ ID NO: 19892 - DNA, 21 bp, Artificial Sequence
  source: /note="Description of Artificial Sequence: Synthetic oligonucleotide"
ttgcggggtgatgcgagtgag

SEQ ID NO: 19893 - DNA, 21 bp, Artificial Sequence
  source: /note="Description of Artificial Sequence: Synthetic oligonucleotide"
cttaggggggagagtagtccg

SEQ ID NO: 19894 - DNA, 21 bp, Artificial Sequence
  source: /note="Description of Artificial Sequence: Synthetic oligonucleotide"
ctgcgtgggggtatggatccg

SEQ ID NO: 19895 - DNA, 21 bp, Artificial Sequence
  source: /note="Description of Artificial Sequence: Synthetic oligonucleotide"
ttgaggggtaatgtggaggcg

SEQ ID NO: 19896 - DNA, 21 bp, Artificial Sequence
  source: /note="Description of Artificial Sequence: Synthetic oligonucleotide"
ctgagggggcctactacggtg

SEQ ID NO: 19897 - DNA, 21 bp, Artificial Sequence
  source: /note="Description of Artificial Sequence: Synthetic oligonucleotide"
ctgaggggtcagctttcgaat

SEQ ID NO: 19898 - DNA, 21 bp, Artificial Sequence
  source: /note="Description of Artificial Sequence: Synthetic oligonucleotide"
ttgcgtgggcgttcgagtgag

SEQ ID NO: 19899 - DNA, 21 bp, Artificial Sequence
  source: /note="Description of Artificial Sequence: Synthetic oligonucleotide"
ctgagggggtcgcttgagcat

SEQ ID NO: 19900 - DNA, 21 bp, Artificial Sequence
  source: /note="Description of Artificial Sequence: Synthetic oligonucleotide"
ttgcgtgggactatggagagt

SEQ ID NO: 19901 - DNA, 21 bp, Artificial Sequence
  source: /note="Description of Artificial Sequence: Synthetic oligonucleotide"
ttgcggcatgattctaatgcg

SEQ ID NO: 19902 - DNA, 21 bp, Artificial Sequence
  source: /note="Description of Artificial Sequence: Synthetic oligonucleotide"
cttcgtatttcgactagtgat

SEQ ID NO: 19903 - DNA, 21 bp, Artificial Sequence
  source: /note="Description of Artificial Sequence: Synthetic oligonucleotide"
ttgcgtaaggagtatcttggt

SEQ ID NO: 19904 - DNA, 21 bp, Artificial Sequence
  source: /note="Description of Artificial Sequence: Synthetic oligonucleotide"
ttgcggttggatgatcaggct

SEQ ID NO: 19905 - DNA, 21 bp, Artificial Sequence
  source: /note="Description of Artificial Sequence: Synthetic oligonucleotide"
ctgcggctgcatcaggagtcg

SEQ ID NO: 19906 - DNA, 21 bp, Artificial Sequence
  source: /note="Description of Artificial Sequence: Synthetic oligonucleotide"
ttgcggttgaagaatgatgct

SEQ ID NO: 19907 - DNA, 21 bp, Artificial Sequence
  source: /note="Description of Artificial Sequence: Synthetic oligonucleotide"
ttgcgtctgcctcctgctgag

SEQ ID NO: 19908 - DNA, 21 bp, Artificial Sequence
  source: /note="Description of Artificial Sequence: Synthetic oligonucleotide"
ttgcggctttctgataatcgg

SEQ ID NO: 19909 - DNA, 21 bp, Artificial Sequence
  source: /note="Description of Artificial Sequence: Synthetic oligonucleotide"
ttgaggcttacggggcgtcct

SEQ ID NO: 19910 - DNA, 21 bp, Artificial Sequence
  source: /note="Description of Artificial Sequence: Synthetic oligonucleotide"
ttgcgtctggttcgtgagccg

SEQ ID NO: 19911 - DNA, 21 bp, Artificial Sequence
  source: /note="Description of Artificial Sequence: Synthetic oligonucleotide"
cttaggaatgctgcgtctgtg

SEQ ID NO: 19912 - DNA, 21 bp, Artificial Sequence
  source: /note="Description of Artificial Sequence: Synthetic oligonucleotide"
cttaggaatgctgatggtgcg

SEQ ID NO: 19913 - DNA, 21 bp, Artificial Sequence
  source: /note="Description of Artificial Sequence: Synthetic oligonucleotide"
ctgaggaatctgaattcgtat

SEQ ID NO: 19914 - DNA, 21 bp, Artificial Sequence
  source: /note="Description of Artificial Sequence: Synthetic oligonucleotide"
ttgcgtaataatcctttggcg

SEQ ID NO: 19915 - DNA, 21 bp, Artificial Sequence
  source: /note="Description of Artificial Sequence: Synthetic oligonucleotide"
ttgaggaatcggcctagtgag

SEQ ID NO: 19916 - DNA, 21 bp, Artificial Sequence
  source: /note="Description of Artificial Sequence: Synthetic oligonucleotide"
ttgaggaattcttcggttgtg

SEQ ID NO: 19917 - DNA, 21 bp, Artificial Sequence
  source: /note="Description of Artificial Sequence: Synthetic oligonucleotide"
ctgcgtaatactcctatgtct

SEQ ID NO: 19918 - DNA, 21 bp, Artificial Sequence
  source: /note="Description of Artificial Sequence: Synthetic oligonucleotide"
ttgcggaatactgttttgggt

SEQ ID NO: 19919 - DNA, 21 bp, Artificial Sequence
  source: /note="Description of Artificial Sequence: Synthetic oligonucleotide"
ttgcgtaatgtggcggagcat

SEQ ID NO: 19920 - DNA, 21 bp, Artificial Sequence
  source: /note="Description of Artificial Sequence: Synthetic oligonucleotide"
ttgcgtccgaatggttatact

SEQ ID NO: 19921 - DNA, 21 bp, Artificial Sequence
  source: /note="Description of Artificial Sequence: Synthetic oligonucleotide"
ttgcgtccgcctgcgtttccg

SEQ ID NO: 19922 - DNA, 21 bp, Artificial Sequence
  source: /note="Description of Artificial Sequence: Synthetic oligonucleotide"
ttgaggccgccggctgggttg

SEQ ID NO: 19923 - DNA, 21 bp, Artificial Sequence
  source: /note="Description of Artificial Sequence: Synthetic oligonucleotide"
ctgcgtcctcctcagaataat

SEQ ID NO: 19924 - DNA, 21 bp, Artificial Sequence
  source: /note="Description of Artificial Sequence: Synthetic oligonucleotide"
ttgcgtccgcgtccgagtgat

SEQ ID NO: 19925 - DNA, 21 bp, Artificial Sequence
  source: /note="Description of Artificial Sequence: Synthetic oligonucleotide"
ttgcggcctagttttagtccg

SEQ ID NO: 19926 - DNA, 21 bp, Artificial Sequence
  source: /note="Description of Artificial Sequence: Synthetic oligonucleotide"
cttcgtccttctagtattagt

SEQ ID NO: 19927 - DNA, 21 bp, Artificial Sequence
  source: /note="Description of Artificial Sequence: Synthetic oligonucleotide"
ctgaggccttcttctcagact

SEQ ID NO: 19928 - DNA, 21 bp, Artificial Sequence
  source: /note="Description of Artificial Sequence: Synthetic oligonucleotide"
ttgcgtccttctgttcgggag

SEQ ID NO: 19929 - DNA, 21 bp, Artificial Sequence
  source: /note="Description of Artificial Sequence: Synthetic oligonucleotide"
ctgcggccgacgactatgcct

SEQ ID NO: 19930 - DNA, 21 bp, Artificial Sequence
  source: /note="Description of Artificial Sequence: Synthetic oligonucleotide"
ttgcggcagggttatagtcag

SEQ ID NO: 19931 - DNA, 21 bp, Artificial Sequence
  source: /note="Description of Artificial Sequence: Synthetic oligonucleotide"
ttgaggcagtctactccgcct

SEQ ID NO: 19932 - DNA, 21 bp, Artificial Sequence
  source: /note="Description of Artificial Sequence: Synthetic oligonucleotide"
ctgcgtaggcctgaggagctt

SEQ ID NO: 19933 - DNA, 21 bp, Artificial Sequence
  source: /note="Description of Artificial Sequence: Synthetic oligonucleotide"
cttcggagtgatacgaagtat

SEQ ID NO: 19934 - DNA, 21 bp, Artificial Sequence
  source: /note="Description of Artificial Sequence: Synthetic oligonucleotide"
ctgaggtcggatgtgcagttt

SEQ ID NO: 19935 - DNA, 21 bp, Artificial Sequence
  source: /note="Description of Artificial Sequence: Synthetic oligonucleotide"
ttgcgttctgattgggttgag

SEQ ID NO: 19936 - DNA, 21 bp, Artificial Sequence
  source: /note="Description of Artificial Sequence: Synthetic oligonucleotide"
ctgaggtctgagtcgtgtgcg

SEQ ID NO: 19937 - DNA, 21 bp, Artificial Sequence
  source: /note="Description of Artificial Sequence: Synthetic oligonucleotide"
ctgcggtcgggtgctattcag

SEQ ID NO: 19938 - DNA, 21 bp, Artificial Sequence
  source: /note="Description of Artificial Sequence: Synthetic oligonucleotide"
ttgaggtctgggacgctggct

SEQ ID NO: 19939 - DNA, 21 bp, Artificial Sequence
  source: /note="Description of Artificial Sequence: Synthetic oligonucleotide"
ctgcggtcgctgactgatgcg

SEQ ID NO: 19940 - DNA, 21 bp, Artificial Sequence
  source: /note="Description of Artificial Sequence: Synthetic oligonucleotide"
cttcggtcgatgcagactccg

SEQ ID NO: 19941 - DNA, 21 bp, Artificial Sequence
  source: /note="Description of Artificial Sequence: Synthetic oligonucleotide"
ttgaggtctccgcattttgat

SEQ ID NO: 19942 - DNA, 21 bp, Artificial Sequence
  source: /note="Description of Artificial Sequence: Synthetic oligonucleotide"
ctgaggagtccgctgtctccg

SEQ ID NO: 19943 - DNA, 21 bp, Artificial Sequence
  source: /note="Description of Artificial Sequence: Synthetic oligonucleotide"
ctgcggtctcctcctactgcg

SEQ ID NO: 19944 - DNA, 21 bp, Artificial Sequence
  source: /note="Description of Artificial Sequence: Synthetic oligonucleotide"
ttgcggtctcaggagcggcat

SEQ ID NO: 19945 - DNA, 21 bp, Artificial Sequence
  source: /note="Description of Artificial Sequence: Synthetic oligonucleotide"
ttgcgttctcaggggccgctg

SEQ ID NO: 19946 - DNA, 21 bp, Artificial Sequence
  source: /note="Description of Artificial Sequence: Synthetic oligonucleotide"
ctgaggagttcgctggattgg

SEQ ID NO: 19947 - DNA, 21 bp, Artificial Sequence
  source: /note="Description of Artificial Sequence: Synthetic oligonucleotide"
ctgcggagttcttcgcctggg

SEQ ID NO: 19948 - DNA, 21 bp, Artificial Sequence
  source: /note="Description of Artificial Sequence: Synthetic oligonucleotide"
cttcggtcttcgactactcct

SEQ ID NO: 19949 - DNA, 21 bp, Artificial Sequence
  source: /note="Description of Artificial Sequence: Synthetic oligonucleotide"
ttgcgttctacttcggcgtat

SEQ ID NO: 19950 - DNA, 21 bp, Artificial Sequence
  source: /note="Description of Artificial Sequence: Synthetic oligonucleotide"
ttgcggtctgttaatgattcg

SEQ ID NO: 19951 - DNA, 21 bp, Artificial Sequence
  source: /note="Description of Artificial Sequence: Synthetic oligonucleotide"
ttgcggacggctgatgttgcg

SEQ ID NO: 19952 - DNA, 21 bp, Artificial Sequence
  source: /note="Description of Artificial Sequence: Synthetic oligonucleotide"
cttaggactgcttcgcctcct

SEQ ID NO: 19953 - DNA, 21 bp, Artificial Sequence
  source: /note="Description of Artificial Sequence: Synthetic oligonucleotide"
ttgcgtacggcttcgtcgact

SEQ ID NO: 19954 - DNA, 21 bp, Artificial Sequence
  source: /note="Description of Artificial Sequence: Synthetic oligonucleotide"
cttaggacggatattctgtct

SEQ ID NO: 19955 - DNA, 21 bp, Artificial Sequence
  source: /note="Description of Artificial Sequence: Synthetic oligonucleotide"
ctgaggactgggtatcttgat

SEQ ID NO: 19956 - DNA, 21 bp, Artificial Sequence
  source: /note="Description of Artificial Sequence: Synthetic oligonucleotide"
cttaggacgcttaatgcggcg

SEQ ID NO: 19957 - DNA, 21 bp, Artificial Sequence
  source: /note="Description of Artificial Sequence: Synthetic oligonucleotide"
cttcgtacgaatgatagtcag

SEQ ID NO: 19958 - DNA, 21 bp, Artificial Sequence
  source: /note="Description of Artificial Sequence: Synthetic oligonucleotide"
ctgaggacgccggagaggttg

SEQ ID NO: 19959 - DNA, 21 bp, Artificial Sequence
  source: /note="Description of Artificial Sequence: Synthetic oligonucleotide"
ttgcggactccgaatggtcct

SEQ ID NO: 19960 - DNA, 21 bp, Artificial Sequence
  source: /note="Description of Artificial Sequence: Synthetic oligonucleotide"
cttcgtacgcgtgaggcgggt

SEQ ID NO: 19961 - DNA, 21 bp, Artificial Sequence
  source: /note="Description of Artificial Sequence: Synthetic oligonucleotide"
ctgcgtacttctcaggatcgt

SEQ ID NO: 19962 - DNA, 21 bp, Artificial Sequence
  source: /note="Description of Artificial Sequence: Synthetic oligonucleotide"
cttcggactactcttccgttg

SEQ ID NO: 19963 - DNA, 21 bp, Artificial Sequence
  source: /note="Description of Artificial Sequence: Synthetic oligonucleotide"
ctgcgtacggtgaatagtgcg

SEQ ID NO: 19964 - DNA, 21 bp, Artificial Sequence
  source: /note="Description of Artificial Sequence: Synthetic oligonucleotide"
cttcgtgttgatcttctgcag

SEQ ID NO: 19965 - DNA, 21 bp, Artificial Sequence
  source: /note="Description of Artificial Sequence: Synthetic oligonucleotide"
cttcgggttgattcgccggtt

SEQ ID NO: 19966 - DNA, 21 bp, Artificial Sequence
  source: /note="Description of Artificial Sequence: Synthetic oligonucleotide"
cttagggttgatgttgctact

SEQ ID NO: 19967 - DNA, 21 bp, Artificial Sequence
  source: /note="Description of Artificial Sequence: Synthetic oligonucleotide"
cttcgtgtgggtgggtcgtat

SEQ ID NO: 19968 - DNA, 21 bp, Artificial Sequence
  source: /note="Description of Artificial Sequence: Synthetic oligonucleotide"
ttgcgtgtgggtactgagcag

SEQ ID NO: 19969 - DNA, 21 bp, Artificial Sequence
  source: /note="Description of Artificial Sequence: Synthetic oligonucleotide"
ctgagggtgctggatgctagt

SEQ ID NO: 19970 - DNA, 21 bp, Artificial Sequence
  source: /note="Description of Artificial Sequence: Synthetic oligonucleotide"
ctgcgtgtgaatccgatggtt

SEQ ID NO: 19971 - DNA, 21 bp, Artificial Sequence
  source: /note="Description of Artificial Sequence: Synthetic oligonucleotide"
cttcgtgttaatgtggaggtt

SEQ ID NO: 19972 - DNA, 21 bp, Artificial Sequence
  source: /note="Description of Artificial Sequence: Synthetic oligonucleotide"
ttgcgtgttccgcctatgtct

SEQ ID NO: 19973 - DNA, 21 bp, Artificial Sequence
  source: /note="Description of Artificial Sequence: Synthetic oligonucleotide"
ttgcgggtgccgcctaataat

SEQ ID NO: 19974 - DNA, 21 bp, Artificial Sequence
  source: /note="Description of Artificial Sequence: Synthetic oligonucleotide"
ttgagggttacttctcatccg

SEQ ID NO: 19975 - DNA, 21 bp, Artificial Sequence
  source: /note="Description of Artificial Sequence: Synthetic oligonucleotide"
cttagtgcggctcctagtaat

SEQ ID NO: 19976 - DNA, 21 bp, Artificial Sequence
  source: /note="Description of Artificial Sequence: Synthetic oligonucleotide"
cttagtgcggcgactactaag

SEQ ID NO: 19977 - DNA, 21 bp, Artificial Sequence
  source: /note="Description of Artificial Sequence: Synthetic oligonucleotide"
cttagtgcgtttgttaaggag

SEQ ID NO: 19978 - DNA, 21 bp, Artificial Sequence
  source: /note="Description of Artificial Sequence: Synthetic oligonucleotide"
ttgagtgcgggtgctcgggct

SEQ ID NO: 19979 - DNA, 21 bp, Artificial Sequence
  source: /note="Description of Artificial Sequence: Synthetic oligonucleotide"
ttgtctgctctgaatgtgaag

SEQ ID NO: 19980 - DNA, 21 bp, Artificial Sequence
  source: /note="Description of Artificial Sequence: Synthetic oligonucleotide"
ctgtcggctcagcggggggct

SEQ ID NO: 19981 - DNA, 21 bp, Artificial Sequence
  source: /note="Description of Artificial Sequence: Synthetic oligonucleotide"
ctgtcggctaggcatatgccg

SEQ ID NO: 19982 - DNA, 21 bp, Artificial Sequence
  source: /note="Description of Artificial Sequence: Synthetic oligonucleotide"
ctgtcggcgcggccggatttg

SEQ ID NO: 19983 - DNA, 21 bp, Artificial Sequence
  source: /note="Description of Artificial Sequence: Synthetic oligonucleotide"
ctgtctgcgaggccgcatttg

SEQ ID NO: 19984 - DNA, 21 bp, Artificial Sequence
  source: /note="Description of Artificial Sequence: Synthetic oligonucleotide"
ttgtcggcttctgcgaatagt

SEQ ID NO: 19985 - DNA, 21 bp, Artificial Sequence
  source: /note="Description of Artificial Sequence: Synthetic oligonucleotide"
ttgtctgcgagtcatgtggtg

SEQ ID NO: 19986 - DNA, 21 bp, Artificial Sequence
  source: /note="Description of Artificial Sequence: Synthetic oligonucleotide"
ctttcggcgtcttggactagt

SEQ ID NO: 19987 - DNA, 21 bp, Artificial Sequence
  source: /note="Description of Artificial Sequence: Synthetic oligonucleotide"
ttgtcggcgtatgctcagggt

SEQ ID NO: 19988 - DNA, 21 bp, Artificial Sequence
  source: /note="Description of Artificial Sequence: Synthetic oligonucleotide"
ttgtcttgtgggtcgatggag

SEQ ID NO: 19989 - DNA, 21 bp, Artificial Sequence
  source: /note="Description of Artificial Sequence: Synthetic oligonucleotide"
ctttcggatgctcattcgtgg

SEQ ID NO: 19990 - DNA, 21 bp, Artificial Sequence
  source: /note="Description of Artificial Sequence: Synthetic oligonucleotide"
ttgtcggatgcggttgcggag

SEQ ID NO: 19991 - DNA, 21 bp, Artificial Sequence
  source: /note="Description of Artificial Sequence: Synthetic oligonucleotide"
ctgtctgatgagcgtactcat

SEQ ID NO: 19992 - DNA, 21 bp, Artificial Sequence
  source: /note="Description of Artificial Sequence: Synthetic oligonucleotide"
ctgagtgattttcagaatccg

SEQ ID NO: 19993 - DNA, 21 bp, Artificial Sequence
  source: /note="Description of Artificial Sequence: Synthetic oligonucleotide"
ctgtctgatcatcatgggttg

SEQ ID NO: 19994 - DNA, 21 bp, Artificial Sequence
  source: /note="Description of Artificial Sequence: Synthetic oligonucleotide"
ctgtcggataagggtcatccg

SEQ ID NO: 19995 - DNA, 21 bp, Artificial Sequence
  source: /note="Description of Artificial Sequence: Synthetic oligonucleotide"
cttagtgatttgcaggggaat

SEQ ID NO: 19996 - DNA, 21 bp, Artificial Sequence
  source: /note="Description of Artificial Sequence: Synthetic oligonucleotide"
ctgtctgatttgacttcgtgg

SEQ ID NO: 19997 - DNA, 21 bp, Artificial Sequence
  source: /note="Description of Artificial Sequence: Synthetic oligonucleotide"
ctttctgatcctactgagatt

SEQ ID NO: 19998 - DNA, 21 bp, Artificial Sequence
  source: /note="Description of Artificial Sequence: Synthetic oligonucleotide"
ttgtctgatcggtctgttttg

SEQ ID NO: 19999 - DNA, 21 bp, Artificial Sequence
  source: /note="Description of Artificial Sequence: Synthetic oligonucleotide"
ctttctgaggctccggtgcat

SEQ ID NO: 20000 - DNA, 21 bp, Artificial Sequence
  source: /note="Description of Artificial Sequence: Synthetic oligonucleotide"
ctttctgagttttctcgggcg

SEQ ID NO: 20001 - DNA, 21 bp, Artificial Sequence
  source: /note="Description of Artificial Sequence: Synthetic oligonucleotide"
cttagtgaggggtgtattttg

SEQ ID NO: 20002 - DNA, 21 bp, Artificial Sequence
  source: /note="Description of Artificial Sequence: Synthetic oligonucleotide"
ctttcggaggggttgcagaag

SEQ ID NO: 20003 - DNA, 21 bp, Artificial Sequence
  source: /note="Description of Artificial Sequence: Synthetic oligonucleotide"
ttgtctgagccgatgcctttt

SEQ ID NO: 20004 - DNA, 21 bp, Artificial Sequence
  source: /note="Description of Artificial Sequence: Synthetic oligonucleotide"
ctgtctgagcagacgcggtat

SEQ ID NO: 20005 - DNA, 21 bp, Artificial Sequence
  source: /note="Description of Artificial Sequence: Synthetic oligonucleotide"
ttgtctgagcggggggatatg

SEQ ID NO: 20006 - DNA, 21 bp, Artificial Sequence
  source: /note="Description of Artificial Sequence: Synthetic oligonucleotide"
ctttcggagcggccggttctg

SEQ ID NO: 20007 - DNA, 21 bp, Artificial Sequence
  source: /note="Description of Artificial Sequence: Synthetic oligonucleotide"
ctgtctgagtctaatcaggtt

SEQ ID NO: 20008 - DNA, 21 bp, Artificial Sequence
  source: /note="Description of Artificial Sequence: Synthetic oligonucleotide"
ctttctgagagttatgttgtg

SEQ ID NO: 20009 - DNA, 21 bp, Artificial Sequence
  source: /note="Description of Artificial Sequence: Synthetic oligonucleotide"
ttgagttttgggacgactacg

SEQ ID NO: 20010 - DNA, 21 bp, Artificial Sequence
  source: /note="Description of Artificial Sequence: Synthetic oligonucleotide"
ttgagttttaagacgcagctg

SEQ ID NO: 20011 - DNA, 21 bp, Artificial Sequence
  source: /note="Description of Artificial Sequence: Synthetic oligonucleotide"
ttgtcgtttagtgctgagtcg

SEQ ID NO: 20012 - DNA, 21 bp, Artificial Sequence
  source: /note="Description of Artificial Sequence: Synthetic oligonucleotide"
ctgagtttttcgacgtctggg

SEQ ID NO: 20013 - DNA, 21 bp, Artificial Sequence
  source: /note="Description of Artificial Sequence: Synthetic oligonucleotide"
ctttctggggcggctggtctt

SEQ ID NO: 20014 - DNA, 21 bp, Artificial Sequence
  source: /note="Description of Artificial Sequence: Synthetic oligonucleotide"
ttgtctggtgctattccgccg

SEQ ID NO: 20015 - DNA, 21 bp, Artificial Sequence
  source: /note="Description of Artificial Sequence: Synthetic oligonucleotide"
ttgtcgggggctaattcgggt

SEQ ID NO: 20016 - DNA, 21 bp, Artificial Sequence
  source: /note="Description of Artificial Sequence: Synthetic oligonucleotide"
ctttcgggggagcaggcgttg

SEQ ID NO: 20017 - DNA, 21 bp, Artificial Sequence
  source: /note="Description of Artificial Sequence: Synthetic oligonucleotide"
ttgagtgggggtgagcctccg

SEQ ID NO: 20018 - DNA, 21 bp, Artificial Sequence
  source: /note="Description of Artificial Sequence: Synthetic oligonucleotide"
ctttcggggggtcagatttct

SEQ ID NO: 20019 - DNA, 21 bp, Artificial Sequence
  source: /note="Description of Artificial Sequence: Synthetic oligonucleotide"
ctgtctggtcatcatattgtg

SEQ ID NO: 20020 - DNA, 21 bp, Artificial Sequence
  source: /note="Description of Artificial Sequence: Synthetic oligonucleotide"
ttgtcgggtattgctggtatt

SEQ ID NO: 20021 - DNA, 21 bp, Artificial Sequence
  source: /note="Description of Artificial Sequence: Synthetic oligonucleotide"
ctgagtggtccttcgtctctg

SEQ ID NO: 20022 - DNA, 21 bp, Artificial Sequence
  source: /note="Description of Artificial Sequence: Synthetic oligonucleotide"
ctgtctggtacgccggggatt

SEQ ID NO: 20023 - DNA, 21 bp, Artificial Sequence
  source: /note="Description of Artificial Sequence: Synthetic oligonucleotide"
ttgtctggtgttgctattcag

SEQ ID NO: 20024 - DNA, 21 bp, Artificial Sequence
  source: /note="Description of Artificial Sequence: Synthetic oligonucleotide"
ttgtcgcatgatgtgcttacg

SEQ ID NO: 20025 - DNA, 21 bp, Artificial Sequence
  source: /note="Description of Artificial Sequence: Synthetic oligonucleotide"
ttgagtcatgggatgcttggg

SEQ ID NO: 20026 - DNA, 21 bp, Artificial Sequence
  source: /note="Description of Artificial Sequence: Synthetic oligonucleotide"
ttgtcgcataagctgacggag

SEQ ID NO: 20027 - DNA, 21 bp, Artificial Sequence
  source: /note="Description of Artificial Sequence: Synthetic oligonucleotide"
ctgtcgcatctgggttttcct

SEQ ID NO: 20028 - DNA, 21 bp, Artificial Sequence
  source: /note="Description of Artificial Sequence: Synthetic oligonucleotide"
ctgtctcatcctatggggtat

SEQ ID NO: 20029 - DNA, 21 bp, Artificial Sequence
  source: /note="Description of Artificial Sequence: Synthetic oligonucleotide"
ttgtctcattctattcctcgg

SEQ ID NO: 20030 - DNA, 21 bp, Artificial Sequence
  source: /note="Description of Artificial Sequence: Synthetic oligonucleotide"
ttgtcgcatacgactaatggt

SEQ ID NO: 20031 - DNA, 21 bp, Artificial Sequence
  source: /note="Description of Artificial Sequence: Synthetic oligonucleotide"
ttgtctcatgtgacgacggcg

SEQ ID NO: 20032 - DNA, 21 bp, Artificial Sequence
  source: /note="Description of Artificial Sequence: Synthetic oligonucleotide"
ctttctattttgtcggggatt

SEQ ID NO: 20033 - DNA, 21 bp, Artificial Sequence
  source: /note="Description of Artificial Sequence: Synthetic oligonucleotide"
ctttcgattcctagtggtcct

SEQ ID NO: 20034 - DNA, 21 bp, Artificial Sequence
  source: /note="Description of Artificial Sequence: Synthetic oligonucleotide"
ttgtctaaggagccttttatg

SEQ ID NO: 20035 - DNA, 21 bp, Artificial Sequence
  source: /note="Description of Artificial Sequence: Synthetic oligonucleotide"
ctttcgaaggggtttatgggg

SEQ ID NO: 20036 - DNA, 21 bp, Artificial Sequence
  source: /note="Description of Artificial Sequence: Synthetic oligonucleotide"
ctgtcgaagggtaatgctgct

SEQ ID NO: 20037 - DNA, 21 bp, Artificial Sequence
  source: /note="Description of Artificial Sequence: Synthetic oligonucleotide"
cttagtaagacgttggaggag

SEQ ID NO: 20038 - DNA, 21 bp, Artificial Sequence
  source: /note="Description of Artificial Sequence: Synthetic oligonucleotide"
ctgtcgctgggggcttctgct

SEQ ID NO: 20039 - DNA, 21 bp, Artificial Sequence
  source: /note="Description of Artificial Sequence: Synthetic oligonucleotide"
ttgtctcttgggccgcatagt

SEQ ID NO: 20040 - DNA, 21 bp, Artificial Sequence
  source: /note="Description of Artificial Sequence: Synthetic oligonucleotide"
ctgtctcttggggtggatagt

SEQ ID NO: 20041 - DNA, 21 bp, Artificial Sequence
  source: /note="Description of Artificial Sequence: Synthetic oligonucleotide"
cttagtttgcatccggcgcct

SEQ ID NO: 20042 - DNA, 21 bp, Artificial Sequence
  source: /note="Description of Artificial Sequence: Synthetic oligonucleotide"
ttgtctcttaagcatctgaag

SEQ ID NO: 20043 - DNA, 21 bp, Artificial Sequence
  source: /note="Description of Artificial Sequence: Synthetic oligonucleotide"
cttagtctgccgcagtcgatg

SEQ ID NO: 20044 - DNA, 21 bp, Artificial Sequence
  source: /note="Description of Artificial Sequence: Synthetic oligonucleotide"
ctttcgcttcctcgttcggat

SEQ ID NO: 20045 - DNA, 21 bp, Artificial Sequence
  source: /note="Description of Artificial Sequence: Synthetic oligonucleotide"
ctttcgttgccttataatcgt

SEQ ID NO: 20046 - DNA, 21 bp, Artificial Sequence
  source: /note="Description of Artificial Sequence: Synthetic oligonucleotide"
ctttctcttcagacggttcct

SEQ ID NO: 20047 - DNA, 21 bp, Artificial Sequence
  source: /note="Description of Artificial Sequence: Synthetic oligonucleotide"
ttgtctttgtctaagggttcg

SEQ ID NO: 20048 - DNA, 21 bp, Artificial Sequence
  source: /note="Description of Artificial Sequence: Synthetic oligonucleotide"
ttgtctctgagtcctgttgtt

SEQ ID NO: 20049 - DNA, 21 bp, Artificial Sequence
  source: /note="Description of Artificial Sequence: Synthetic oligonucleotide"
ctgtcgcttgtgaagcatgat

SEQ ID NO: 20050 - DNA, 21 bp, Artificial Sequence
  source: /note="Description of Artificial Sequence: Synthetic oligonucleotide"
ctttctatggctaggactcct

SEQ ID NO: 20051 - DNA, 21 bp, Artificial Sequence
  source: /note="Description of Artificial Sequence: Synthetic oligonucleotide"
ctgtcgatgaatcctaatggt

SEQ ID NO: 20052 - DNA, 21 bp, Artificial Sequence
  source: /note="Description of Artificial Sequence: Synthetic oligonucleotide"
ttgtcgatgaatgttcagtat

SEQ ID NO: 20053 - DNA, 21 bp, Artificial Sequence
  source: /note="Description of Artificial Sequence: Synthetic oligonucleotide"
ctgagtatgcagaggactgtg

SEQ ID NO: 20054 - DNA, 21 bp, Artificial Sequence
  source: /note="Description of Artificial Sequence: Synthetic oligonucleotide"
ttgtctatgcgttcggagacg

SEQ ID NO: 20055 - DNA, 21 bp, Artificial Sequence
  source: /note="Description of Artificial Sequence: Synthetic oligonucleotide"
ttgagtatgtctaagacgcct

SEQ ID NO: 20056 - DNA, 21 bp, Artificial Sequence
  source: /note="Description of Artificial Sequence: Synthetic oligonucleotide"
ctgtcgaatgagggtagttat

SEQ ID NO: 20057 - DNA, 21 bp, Artificial Sequence
  source: /note="Description of Artificial Sequence: Synthetic oligonucleotide"
ctttctaatgggcggtattcg

SEQ ID NO: 20058 - DNA, 21 bp, Artificial Sequence
  source: /note="Description of Artificial Sequence: Synthetic oligonucleotide"
ctgagtaatcatccgtttagt

SEQ ID NO: 20059 - DNA, 21 bp, Artificial Sequence
  source: /note="Description of Artificial Sequence: Synthetic oligonucleotide"
ctgtctaatcatgtgattacg

SEQ ID NO: 20060 - DNA, 21 bp, Artificial Sequence
  source: /note="Description of Artificial Sequence: Synthetic oligonucleotide"
ctttcgaatatgcagcagaag

SEQ ID NO: 20061 - DNA, 21 bp, Artificial Sequence
  source: /note="Description of Artificial Sequence: Synthetic oligonucleotide"
ctgtctaatccggcgaagact

SEQ ID NO: 20062 - DNA, 21 bp, Artificial Sequence
  source: /note="Description of Artificial Sequence: Synthetic oligonucleotide"
ctttcgaatccgacgaggagt

SEQ ID NO: 20063 - DNA, 21 bp, Artificial Sequence
  source: /note="Description of Artificial Sequence: Synthetic oligonucleotide"
ctgtctaatcgtaagggtgag

SEQ ID NO: 20064 - DNA, 21 bp, Artificial Sequence
  source: /note="Description of Artificial Sequence: Synthetic oligonucleotide"
ttgtcgaatcgtcagattact

SEQ ID NO: 20065 - DNA, 21 bp, Artificial Sequence
  source: /note="Description of Artificial Sequence: Synthetic oligonucleotide"
ctgtcgaattctgcgattctg

SEQ ID NO: 20066 - DNA, 21 bp, Artificial Sequence
  source: /note="Description of Artificial Sequence: Synthetic oligonucleotide"
ctttctaattcgaaggggcct

SEQ ID NO: 20067 - DNA, 21 bp, Artificial Sequence
  source: /note="Description of Artificial Sequence: Synthetic oligonucleotide"
ctttctaattctcgtcatgat

SEQ ID NO: 20068 - DNA, 21 bp, Artificial Sequence
  source: /note="Description of Artificial Sequence: Synthetic oligonucleotide"
ctgagtaattctagtaggatg

SEQ ID NO: 20069 - DNA, 21 bp, Artificial Sequence
  source: /note="Description of Artificial Sequence: Synthetic oligonucleotide"
ctgtctcctgctgttacgcgt

SEQ ID NO: 20070 - DNA, 21 bp, Artificial Sequence
  source: /note="Description of Artificial Sequence: Synthetic oligonucleotide"
ttgagtccttgtccgagtaat

SEQ ID NO: 20071 - DNA, 21 bp, Artificial Sequence
  source: /note="Description of Artificial Sequence: Synthetic oligonucleotide"
ctgtctccgttttcggttgtt

SEQ ID NO: 20072 - DNA, 21 bp, Artificial Sequence
  source: /note="Description of Artificial Sequence: Synthetic oligonucleotide"
ctgagtccggggattgcgcag

SEQ ID NO: 20073 - DNA, 21 bp, Artificial Sequence
  source: /note="Description of Artificial Sequence: Synthetic oligonucleotide"
ctttctccgcataggacgtct

SEQ ID NO: 20074 - DNA, 21 bp, Artificial Sequence
  source: /note="Description of Artificial Sequence: Synthetic oligonucleotide"
cttagtcctaagtttgtgctg

SEQ ID NO: 20075 - DNA, 21 bp, Artificial Sequence
  source: /note="Description of Artificial Sequence: Synthetic oligonucleotide"
ctttctccgaatgggccgaat

SEQ ID NO: 20076 - DNA, 21 bp, Artificial Sequence
  source: /note="Description of Artificial Sequence: Synthetic oligonucleotide"
ctttcgcctccggataggttg

SEQ ID NO: 20077 - DNA, 21 bp, Artificial Sequence
  source: /note="Description of Artificial Sequence: Synthetic oligonucleotide"
ctgtctccgcctcctgttgat

SEQ ID NO: 20078 - DNA, 21 bp, Artificial Sequence
  source: /note="Description of Artificial Sequence: Synthetic oligonucleotide"
ctgtctcctcctacgcctcat

SEQ ID NO: 20079 - DNA, 21 bp, Artificial Sequence
  source: /note="Description of Artificial Sequence: Synthetic oligonucleotide"
ttgagtcctaggactgtgcat

SEQ ID NO: 20080 - DNA, 21 bp, Artificial Sequence
  source: /note="Description of Artificial Sequence: Synthetic oligonucleotide"
ttgagtccgtcgtttacgagt

SEQ ID NO: 20081 - DNA, 21 bp, Artificial Sequence
  source: /note="Description of Artificial Sequence: Synthetic oligonucleotide"
ttgtcgccttcgtcgcttttt

SEQ ID NO: 20082 - DNA, 21 bp, Artificial Sequence
  source: /note="Description of Artificial Sequence: Synthetic oligonucleotide"
ttgtcgccgtctagtctgggg

SEQ ID NO: 20083 - DNA, 21 bp, Artificial Sequence
  source: /note="Description of Artificial Sequence: Synthetic oligonucleotide"
ctttctccgagttctcgtggt

SEQ ID NO: 20084 - DNA, 21 bp, Artificial Sequence
  source: /note="Description of Artificial Sequence: Synthetic oligonucleotide"
ctgtcgccgagtactgatttt

SEQ ID NO: 20085 - DNA, 21 bp, Artificial Sequence
  source: /note="Description of Artificial Sequence: Synthetic oligonucleotide"
ctgtctccttctgttacgaag

SEQ ID NO: 20086 - DNA, 21 bp, Artificial Sequence
  source: /note="Description of Artificial Sequence: Synthetic oligonucleotide"
ttgagtcctacgcgtactcag

SEQ ID NO: 20087 - DNA, 21 bp, Artificial Sequence
  source: /note="Description of Artificial Sequence: Synthetic oligonucleotide"
ctgtctccgactgttgcttat

SEQ ID NO: 20088 - DNA, 21 bp, Artificial Sequence
  source: /note="Description of Artificial Sequence: Synthetic oligonucleotide"
ttgagtcctgttcctgtggcg

SEQ ID NO: 20089 - DNA, 21 bp, Artificial Sequence
  source: /note="Description of Artificial Sequence: Synthetic oligonucleotide"
cttagtcctgttcaggcggcg

SEQ ID NO: 20090 - DNA, 21 bp, Artificial Sequence
  source: /note="Description of Artificial Sequence: Synthetic oligonucleotide"
ctgtcgcaggcgattcagtct

SEQ ID NO: 20091 - DNA, 21 bp, Artificial Sequence
  source: /note="Description of Artificial Sequence: Synthetic oligonucleotide"
ttgagtcaggcgaagaatgtt

SEQ ID NO: 20092 - DNA, 21 bp, Artificial Sequence
  source: /note="Description of Artificial Sequence: Synthetic oligonucleotide"
ctttctcaggctctgcttgat

SEQ ID NO: 20093 - DNA, 21 bp, Artificial Sequence
  source: /note="Description of Artificial Sequence: Synthetic oligonucleotide"
ttgagtcaggcgaatgagagg

SEQ ID NO: 20094 - DNA, 21 bp, Artificial Sequence
  source: /note="Description of Artificial Sequence: Synthetic oligonucleotide"
ctgtcgcaggatctgactgtg

SEQ ID NO: 20095 - DNA, 21 bp, Artificial Sequence
  source: /note="Description of Artificial Sequence: Synthetic oligonucleotide"
ctttctcaggggtctgctcct

SEQ ID NO: 20096 - DNA, 21 bp, Artificial Sequence
  source: /note="Description of Artificial Sequence: Synthetic oligonucleotide"
cttagtcagcatgctagtact

SEQ ID NO: 20097 - DNA, 21 bp, Artificial Sequence
  source: /note="Description of Artificial Sequence: Synthetic oligonucleotide"
ctttcgcagcatatgcgtcct

SEQ ID NO: 20098 - DNA, 21 bp, Artificial Sequence
  source: /note="Description of Artificial Sequence: Synthetic oligonucleotide"
ctgtctcagaagactggtatt

SEQ ID NO: 20099 - DNA, 21 bp, Artificial Sequence
  source: /note="Description of Artificial Sequence: Synthetic oligonucleotide"
ctttctcagcttattcagggt

SEQ ID NO: 20100 - DNA, 21 bp, Artificial Sequence
  source: /note="Description of Artificial Sequence: Synthetic oligonucleotide"
ctttcgcagttgactccgtct

SEQ ID NO: 20101 - DNA, 21 bp, Artificial Sequence
  source: /note="Description of Artificial Sequence: Synthetic oligonucleotide"
ttgtctcagctgacttctcag

SEQ ID NO: 20102 - DNA, 21 bp, Artificial Sequence
  source: /note="Description of Artificial Sequence: Synthetic oligonucleotide"
ctgtcgcagcttgtttcgagt

SEQ ID NO: 20103 - DNA, 21 bp, Artificial Sequence
  source: /note="Description of Artificial Sequence: Synthetic oligonucleotide"
ttgtctcagccgctgaatatg

SEQ ID NO: 20104 - DNA, 21 bp, Artificial Sequence
  source: /note="Description of Artificial Sequence: Synthetic oligonucleotide"
cttagtcagtcttttgcgagt

SEQ ID NO: 20105 - DNA, 21 bp, Artificial Sequence
  source: /note="Description of Artificial Sequence: Synthetic oligonucleotide"
ctgtctcagactgctcgtgct

SEQ ID NO: 20106 - DNA, 21 bp, Artificial Sequence
  source: /note="Description of Artificial Sequence: Synthetic oligonucleotide"
ctttctcaggttcataagttt

SEQ ID NO: 20107 - DNA, 21 bp, Artificial Sequence
  source: /note="Description of Artificial Sequence: Synthetic oligonucleotide"
ttgtctcaggtgcaggctggt

SEQ ID NO: 20108 - DNA, 21 bp, Artificial Sequence
  source: /note="Description of Artificial Sequence: Synthetic oligonucleotide"
ttgtcgcgtgatttggagctg

SEQ ID NO: 20109 - DNA, 21 bp, Artificial Sequence
  source: /note="Description of Artificial Sequence: Synthetic oligonucleotide"
ttgagtcgggggccgactccg

SEQ ID NO: 20110 - DNA, 21 bp, Artificial Sequence
  source: /note="Description of Artificial Sequence: Synthetic oligonucleotide"
ctgtctcgggggcaggttcct

SEQ ID NO: 20111 - DNA, 21 bp, Artificial Sequence
  source: /note="Description of Artificial Sequence: Synthetic oligonucleotide"
ctttcgaggcttggtccgtct

SEQ ID NO: 20112 - DNA, 21 bp, Artificial Sequence
  source: /note="Description of Artificial Sequence: Synthetic oligonucleotide"
cttagtaggcttcctagttct

SEQ ID NO: 20113 - DNA, 21 bp, Artificial Sequence
  source: /note="Description of Artificial Sequence: Synthetic oligonucleotide"
ttgagtaggctttctactgat

SEQ ID NO: 20114 - DNA, 21 bp, Artificial Sequence
  source: /note="Description of Artificial Sequence: Synthetic oligonucleotide"
ttgtcgcgtaatgtgacggag

SEQ ID NO: 20115 - DNA, 21 bp, Artificial Sequence
  source: /note="Description of Artificial Sequence: Synthetic oligonucleotide"
ttgagtcgtcagacgggttat

SEQ ID NO: 20116 - DNA, 21 bp, Artificial Sequence
  source: /note="Description of Artificial Sequence: Synthetic oligonucleotide"
ttgagtaggagttctgcggct

SEQ ID NO: 20117 - DNA, 21 bp, Artificial Sequence
  source: /note="Description of Artificial Sequence: Synthetic oligonucleotide"
ttgagtcgttctgtgagtact

SEQ ID NO: 20118 - DNA, 21 bp, Artificial Sequence
  source: /note="Description of Artificial Sequence: Synthetic oligonucleotide"
ctgtcgcgtactactgctgat

SEQ ID NO: 20119 - DNA, 21 bp, Artificial Sequence
  source: /note="Description of Artificial Sequence: Synthetic oligonucleotide"
ctgtctagggtggcggttctt

SEQ ID NO: 20120 - DNA, 21 bp, Artificial Sequence
  source: /note="Description of Artificial Sequence: Synthetic oligonucleotide"
ctgtcgagtgcgaattcgacg

SEQ ID NO: 20121 - DNA, 21 bp, Artificial Sequence
  source: /note="Description of Artificial Sequence: Synthetic oligonucleotide"
ttgtcttcggcgcagagggct

SEQ ID NO: 20122 - DNA, 21 bp, Artificial Sequence
  source: /note="Description of Artificial Sequence: Synthetic oligonucleotide"
ctgtcgtctgatagtcctgtg

SEQ ID NO: 20123 - DNA, 21 bp, Artificial Sequence
  source: /note="Description of Artificial Sequence: Synthetic oligonucleotide"
ttgtcgagtgagtgtgctcct

SEQ ID NO: 20124 - DNA, 21 bp, Artificial Sequence
  source: /note="Description of Artificial Sequence: Synthetic oligonucleotide"
ctttcgagtggtatgtcgcgt

SEQ ID NO: 20125 - DNA, 21 bp, Artificial Sequence
  source: /note="Description of Artificial Sequence: Synthetic oligonucleotide"
cttagttctgggcgtcctcct

SEQ ID NO: 20126 - DNA, 21 bp, Artificial Sequence
  source: /note="Description of Artificial Sequence: Synthetic oligonucleotide"
ctttcttctcatagtacgtct

SEQ ID NO: 20127 - DNA, 21 bp, Artificial Sequence
  source: /note="Description of Artificial Sequence: Synthetic oligonucleotide"
ttgtcgtctattcagacttat

SEQ ID NO: 20128 - DNA, 21 bp, Artificial Sequence
  source: /note="Description of Artificial Sequence: Synthetic oligonucleotide"
cttagttcgatttcgcataat

SEQ ID NO: 20129 - DNA, 21 bp, Artificial Sequence
  source: /note="Description of Artificial Sequence: Synthetic oligonucleotide"
ttgtcgagtaagccgtatgcg

SEQ ID NO: 20130 - DNA, 21 bp, Artificial Sequence
  source: /note="Description of Artificial Sequence: Synthetic oligonucleotide"
cttagtagtcttgcgatggtt

SEQ ID NO: 20131 - DNA, 21 bp, Artificial Sequence
  source: /note="Description of Artificial Sequence: Synthetic oligonucleotide"
ctgtcttcgctgaagggtaat

SEQ ID NO: 20132 - DNA, 21 bp, Artificial Sequence
  source: /note="Description of Artificial Sequence: Synthetic oligonucleotide"
ctttcttctctgaagcttgct

SEQ ID NO: 20133 - DNA, 21 bp, Artificial Sequence
  source: /note="Description of Artificial Sequence: Synthetic oligonucleotide"
ctgtcgtcgcttatgcatagt

SEQ ID NO: 20134 - DNA, 21 bp, Artificial Sequence
  source: /note="Description of Artificial Sequence: Synthetic oligonucleotide"
cttagttctttgaatcctagt

SEQ ID NO: 20135 - DNA, 21 bp, Artificial Sequence
  source: /note="Description of Artificial Sequence: Synthetic oligonucleotide"
ctgtcgtctcttccgaagatt

SEQ ID NO: 20136 - DNA, 21 bp, Artificial Sequence
  source: /note="Description of Artificial Sequence: Synthetic oligonucleotide"
ctgtcgtctatgcgttctact

SEQ ID NO: 20137 - DNA, 21 bp, Artificial Sequence
  source: /note="Description of Artificial Sequence: Synthetic oligonucleotide"
ctgagtagtatgactaatgat

SEQ ID NO: 20138 - DNA, 21 bp, Artificial Sequence
  source: /note="Description of Artificial Sequence: Synthetic oligonucleotide"
ctgtctagtaattcgctggat

SEQ ID NO: 20139 - DNA, 21 bp, Artificial Sequence
  source: /note="Description of Artificial Sequence: Synthetic oligonucleotide"
ttgagtagtcctgcggggtcg

SEQ ID NO: 20140 - DNA, 21 bp, Artificial Sequence
  source: /note="Description of Artificial Sequence: Synthetic oligonucleotide"
ctttcgagtcctgggtctatg

SEQ ID NO: 20141 - DNA, 21 bp, Artificial Sequence
  source: /note="Description of Artificial Sequence: Synthetic oligonucleotide"
ttgtctagtcctatggattcg

SEQ ID NO: 20142 - DNA, 21 bp, Artificial Sequence
  source: /note="Description of Artificial Sequence: Synthetic oligonucleotide"
ctgtcttctcagtgtattaat

SEQ ID NO: 20143 - DNA, 21 bp, Artificial Sequence
  source: /note="Description of Artificial Sequence: Synthetic oligonucleotide"
ttgtcgtctcagcatacgagt

SEQ ID NO: 20144 - DNA, 21 bp, Artificial Sequence
  source: /note="Description of Artificial Sequence: Synthetic oligonucleotide"
ctgtcgtcgcagcctaagttt

SEQ ID NO: 20145 - DNA, 21 bp, Artificial Sequence
  source: /note="Description of Artificial Sequence: Synthetic oligonucleotide"
ttgagtagtaggagtacgacg

SEQ ID NO: 20146 - DNA, 21 bp, Artificial Sequence
  source: /note="Description of Artificial Sequence: Synthetic oligonucleotide"
ctttcgtcgtcgtgtgagcgt

SEQ ID NO: 20147 - DNA, 21 bp, Artificial Sequence
  source: /note="Description of Artificial Sequence: Synthetic oligonucleotide"
ctgagttcttctcttgagtat

SEQ ID NO: 20148 - DNA, 21 bp, Artificial Sequence
  source: /note="Description of Artificial Sequence: Synthetic oligonucleotide"
ctgtcttcgagtaggccgtcg

SEQ ID NO: 20149 - DNA, 21 bp, Artificial Sequence
  source: /note="Description of Artificial Sequence: Synthetic oligonucleotide"
ctttcgagttcggttgtgttt

SEQ ID NO: 20150 - DNA, 21 bp, Artificial Sequence
  source: /note="Description of Artificial Sequence: Synthetic oligonucleotide"
ctgtcgtctacgtctaaggcg

SEQ ID NO: 20151 - DNA, 21 bp, Artificial Sequence
  source: /note="Description of Artificial Sequence: Synthetic oligonucleotide"
ctgagttcggttgcgactccg

SEQ ID NO: 20152 - DNA, 21 bp, Artificial Sequence
  source: /note="Description of Artificial Sequence: Synthetic oligonucleotide"
ctttcgtctgtttttcggact

SEQ ID NO: 20153 - DNA, 21 bp, Artificial Sequence
  source: /note="Description of Artificial Sequence: Synthetic oligonucleotide"
ctgtctagtgtgcatgcggtt

SEQ ID NO: 20154 - DNA, 21 bp, Artificial Sequence
  source: /note="Description of Artificial Sequence: Synthetic oligonucleotide"
ctttcttcggtgcgtctgtcg

SEQ ID NO: 20155 - DNA, 21 bp, Artificial Sequence
  source: /note="Description of Artificial Sequence: Synthetic oligonucleotide"
ttgtctactgctgtgactagg

SEQ ID NO: 20156 - DNA, 21 bp, Artificial Sequence
  source: /note="Description of Artificial Sequence: Synthetic oligonucleotide"
ttgagtactgaggatcttctt

SEQ ID NO: 20157 - DNA, 21 bp, Artificial Sequence
  source: /note="Description of Artificial Sequence: Synthetic oligonucleotide"
ctgtcgacttttcctgttgct

SEQ ID NO: 20158 - DNA, 21 bp, Artificial Sequence
  source: /note="Description of Artificial Sequence: Synthetic oligonucleotide"
ctttcgacttttcagggtggg

SEQ ID NO: 20159 - DNA, 21 bp, Artificial Sequence
  source: /note="Description of Artificial Sequence: Synthetic oligonucleotide"
ctgtctacggggtcgaggcag

SEQ ID NO: 20160 - DNA, 21 bp, Artificial Sequence
  source: /note="Description of Artificial Sequence: Synthetic oligonucleotide"
ttgagtacgggtactatggat

SEQ ID NO: 20161 - DNA, 21 bp, Artificial Sequence
  source: /note="Description of Artificial Sequence: Synthetic oligonucleotide"
ttgtctacgattcatccttcg

SEQ ID NO: 20162 - DNA, 21 bp, Artificial Sequence
  source: /note="Description of Artificial Sequence: Synthetic oligonucleotide"
ctgtcgactaaggggactatg

SEQ ID NO: 20163 - DNA, 21 bp, Artificial Sequence
  source: /note="Description of Artificial Sequence: Synthetic oligonucleotide"
ctgagtacgcttgagaatgag

SEQ ID NO: 20164 - DNA, 21 bp, Artificial Sequence
  source: /note="Description of Artificial Sequence: Synthetic oligonucleotide"
ctttcgactcttttgacggct

SEQ ID NO: 20165 - DNA, 21 bp, Artificial Sequence
  source: /note="Description of Artificial Sequence: Synthetic oligonucleotide"
ctgtctactctgcctaaggat

SEQ ID NO: 20166 - DNA, 21 bp, Artificial Sequence
  source: /note="Description of Artificial Sequence: Synthetic oligonucleotide"
ttgagtacgatgtcttctctg

SEQ ID NO: 20167 - DNA, 21 bp, Artificial Sequence
  source: /note="Description of Artificial Sequence: Synthetic oligonucleotide"
cttagtacgatgactgcttat

SEQ ID NO: 20168 - DNA, 21 bp, Artificial Sequence
  source: /note="Description of Artificial Sequence: Synthetic oligonucleotide"
ttgtctacgaatatgccgccg

SEQ ID NO: 20169 - DNA, 21 bp, Artificial Sequence
  source: /note="Description of Artificial Sequence: Synthetic oligonucleotide"
ctttcgactcctcatctgacg

SEQ ID NO: 20170 - DNA, 21 bp, Artificial Sequence
  source: /note="Description of Artificial Sequence: Synthetic oligonucleotide"
ttgtctacgccgcatatggcg

SEQ ID NO: 20171 - DNA, 21 bp, Artificial Sequence
  source: /note="Description of Artificial Sequence: Synthetic oligonucleotide"
cttagtactccttcgcagcct

SEQ ID NO: 20172 - DNA, 21 bp, Artificial Sequence
  source: /note="Description of Artificial Sequence: Synthetic oligonucleotide"
cttagtacgaggtctctgcct

SEQ ID NO: 20173 - DNA, 21 bp, Artificial Sequence
  source: /note="Description of Artificial Sequence: Synthetic oligonucleotide"
cttagtacgaggtctccgctg

SEQ ID NO: 20174 - DNA, 21 bp, Artificial Sequence
  source: /note="Description of Artificial Sequence: Synthetic oligonucleotide"
ctttcgacttcgcattcggtt

SEQ ID NO: 20175 - DNA, 21 bp, Artificial Sequence
  source: /note="Description of Artificial Sequence: Synthetic oligonucleotide"
ctttctacggtgaggatggtt

SEQ ID NO: 20176 - DNA, 21 bp, Artificial Sequence
  source: /note="Description of Artificial Sequence: Synthetic oligonucleotide"
ttgagtgttgatgagatggtt

SEQ ID NO: 20177 - DNA, 21 bp, Artificial Sequence
  source: /note="Description of Artificial Sequence: Synthetic oligonucleotide"
ctgagtgtgggtcggacggag

SEQ ID NO: 20178 - DNA, 21 bp, Artificial Sequence
  source: /note="Description of Artificial Sequence: Synthetic oligonucleotide"
ctttctgttcatgggctgaag

SEQ ID NO: 20179 - DNA, 21 bp, Artificial Sequence
  source: /note="Description of Artificial Sequence: Synthetic oligonucleotide"
ctttcggtgaatagttctttg

SEQ ID NO: 20180 - DNA, 21 bp, Artificial Sequence
  source: /note="Description of Artificial Sequence: Synthetic oligonucleotide"
cttagtgtgcctatgcctgat

SEQ ID NO: 20181 - DNA, 21 bp, Artificial Sequence
  source: /note="Description of Artificial Sequence: Synthetic oligonucleotide"
ttgtctgtgcctcgggctcct

SEQ ID NO: 20182 - DNA, 21 bp, Artificial Sequence
  source: /note="Description of Artificial Sequence: Synthetic oligonucleotide"
ctgtcggttagggggcatatt

SEQ ID NO: 20183 - DNA, 21 bp, Artificial Sequence
  source: /note="Description of Artificial Sequence: Synthetic oligonucleotide"
ctgtctgtgcggtctattggg

SEQ ID NO: 20184 - DNA, 21 bp, Artificial Sequence
  source: /note="Description of Artificial Sequence: Synthetic oligonucleotide"
ttgagtgtttctcttacggcg

SEQ ID NO: 20185 - DNA, 21 bp, Artificial Sequence
  source: /note="Description of Artificial Sequence: Synthetic oligonucleotide"
ttgagtgtttctcctttgagt

SEQ ID NO: 20186 - DNA, 21 bp, Artificial Sequence
  source: /note="Description of Artificial Sequence: Synthetic oligonucleotide"
ctgagtgtgtatactgcggat

SEQ ID NO: 20187 - DNA, 21 bp, Artificial Sequence
  source: /note="Description of Artificial Sequence: Synthetic oligonucleotide"
ctttcttatggtcgtcctgtg

SEQ ID NO: 20188 - DNA, 21 bp, Artificial Sequence
  source: /note="Description of Artificial Sequence: Synthetic oligonucleotide"
ttgtcttatccgaggaatgat

SEQ ID NO: 20189 - DNA, 21 bp, Artificial Sequence
  source: /note="Description of Artificial Sequence: Synthetic oligonucleotide"
ctgactgctcctaggcaggcg

SEQ ID NO: 20190 - DNA, 21 bp, Artificial Sequence
  source: /note="Description of Artificial Sequence: Synthetic oligonucleotide"
cttacggcgcctacgagtcag

SEQ ID NO: 20191 - DNA, 21 bp, Artificial Sequence
  source: /note="Description of Artificial Sequence: Synthetic oligonucleotide"
ttgactgcgagtattgggaat

SEQ ID NO: 20192 - DNA, 21 bp, Artificial Sequence
  source: /note="Description of Artificial Sequence: Synthetic oligonucleotide"
ctgacggcgagtattaaggct

SEQ ID NO: 20193 - DNA, 21 bp, Artificial Sequence
  source: /note="Description of Artificial Sequence: Synthetic oligonucleotide"
cttactgcggtgccgctgtcg

SEQ ID NO: 20194 - DNA, 21 bp, Artificial Sequence
  source: /note="Description of Artificial Sequence: Synthetic oligonucleotide"
cttacggatgagaatgtgtgt

SEQ ID NO: 20195 - DNA, 21 bp, Artificial Sequence
  source: /note="Description of Artificial Sequence: Synthetic oligonucleotide"
cttacggatattacgaatcgg

SEQ ID NO: 20196 - DNA, 21 bp, Artificial Sequence
  source: /note="Description of Artificial Sequence: Synthetic oligonucleotide"
ttgacggatttggatcagatg

SEQ ID NO: 20197 - DNA, 21 bp, Artificial Sequence
  source: /note="Description of Artificial Sequence: Synthetic oligonucleotide"
ctgacggatcttcgtctggtg

SEQ ID NO: 20198 - DNA, 21 bp, Artificial Sequence
  source: /note="Description of Artificial Sequence: Synthetic oligonucleotide"
cttactgatctgagtgctagt

SEQ ID NO: 20199 - DNA, 21 bp, Artificial Sequence
  source: /note="Description of Artificial Sequence: Synthetic oligonucleotide"
cttacggattcgcttcgtacg

SEQ ID NO: 20200 - DNA, 21 bp, Artificial Sequence
  source: /note="Description of Artificial Sequence: Synthetic oligonucleotide"
cttactgatactagggttacg

SEQ ID NO: 20201 - DNA, 21 bp, Artificial Sequence
  source: /note="Description of Artificial Sequence: Synthetic oligonucleotide"
cttactgagatgcgtccgggg

SEQ ID NO: 20202 - DNA, 21 bp, Artificial Sequence
  source: /note="Description of Artificial Sequence: Synthetic oligonucleotide"
cttactgagactcgtgctggg

SEQ ID NO: 20203 - DNA, 21 bp, Artificial Sequence
  source: /note="Description of Artificial Sequence: Synthetic oligonucleotide"
cttactgaggtgcggacgtat

SEQ ID NO: 20204 - DNA, 21 bp, Artificial Sequence
  source: /note="Description of Artificial Sequence: Synthetic oligonucleotide"
cttactgagtggtctaaggag

SEQ ID NO: 20205 - DNA, 21 bp, Artificial Sequence
  source: /note="Description of Artificial Sequence: Synthetic oligonucleotide"
cttacttttggtgctacttcg

SEQ ID NO: 20206 - DNA, 21 bp, Artificial Sequence
  source: /note="Description of Artificial Sequence: Synthetic oligonucleotide"
ttgacgttttcggctggtttg

SEQ ID NO: 20207 - DNA, 21 bp, Artificial Sequence
  source: /note="Description of Artificial Sequence: Synthetic oligonucleotide"
ctgactggggcgtttaagagt

SEQ ID NO: 20208 - DNA, 21 bp, Artificial Sequence
  source: /note="Description of Artificial Sequence: Synthetic oligonucleotide"
ttgacgggtgagtttcgtgat

SEQ ID NO: 20209 - DNA, 21 bp, Artificial Sequence
  source: /note="Description of Artificial Sequence: Synthetic oligonucleotide"
ctgactggtttttctaatcag

SEQ ID NO: 20210 - DNA, 21 bp, Artificial Sequence
  source: /note="Description of Artificial Sequence: Synthetic oligonucleotide"
cttactggggggttgtatggg

SEQ ID NO: 20211 - DNA, 21 bp, Artificial Sequence
  source: /note="Description of Artificial Sequence: Synthetic oligonucleotide"
ctgactggtggtcaggtggct

SEQ ID NO: 20212 - DNA, 21 bp, Artificial Sequence
  source: /note="Description of Artificial Sequence: Synthetic oligonucleotide"
cttacggggatgattaagtat

SEQ ID NO: 20213 - DNA, 21 bp, Artificial Sequence
  source: /note="Description of Artificial Sequence: Synthetic oligonucleotide"
cttactggtaatcgtcctgct

SEQ ID NO: 20214 - DNA, 21 bp, Artificial Sequence
  source: /note="Description of Artificial Sequence: Synthetic oligonucleotide"
cttacgggtccttgtacgtct

SEQ ID NO: 20215 - DNA, 21 bp, Artificial Sequence
  source: /note="Description of Artificial Sequence: Synthetic oligonucleotide"
ttgactggtcagattagggtt

SEQ ID NO: 20216 - DNA, 21 bp, Artificial Sequence
  source: /note="Description of Artificial Sequence: Synthetic oligonucleotide"
ttgactgggcgtgggggttcg

SEQ ID NO: 20217 - DNA, 21 bp, Artificial Sequence
  source: /note="Description of Artificial Sequence: Synthetic oligonucleotide"
ctgactggtagtagtcatgtg

SEQ ID NO: 20218 - DNA, 21 bp, Artificial Sequence
  source: /note="Description of Artificial Sequence: Synthetic oligonucleotide"
cttactgggacgcttaggatg

SEQ ID NO: 20219 - DNA, 21 bp, Artificial Sequence
  source: /note="Description of Artificial Sequence: Synthetic oligonucleotide"
cttactcatgctgtgcctacg

SEQ ID NO: 20220 - DNA, 21 bp, Artificial Sequence
  source: /note="Description of Artificial Sequence: Synthetic oligonucleotide"
ttgactcataagctggatgct

SEQ ID NO: 20221 - DNA, 21 bp, Artificial Sequence
  source: /note="Description of Artificial Sequence: Synthetic oligonucleotide"
cttactcatccggctgtgcat

SEQ ID NO: 20222 - DNA, 21 bp, Artificial Sequence
  source: /note="Description of Artificial Sequence: Synthetic oligonucleotide"
ttgactcatgttcctacggcg

SEQ ID NO: 20223 - DNA, 21 bp, Artificial Sequence
  source: /note="Description of Artificial Sequence: Synthetic oligonucleotide"
ttgactattggtcatgtgcct

SEQ ID NO: 20224 - DNA, 21 bp, Artificial Sequence
  source: /note="Description of Artificial Sequence: Synthetic oligonucleotide"
cttacgattccgtctgcgcag

SEQ ID NO: 20225 - DNA, 21 bp, Artificial Sequence
  source: /note="Description of Artificial Sequence: Synthetic oligonucleotide"
cttacgaagggtagtgttcag

SEQ ID NO: 20226 - DNA, 21 bp, Artificial Sequence
  source: /note="Description of Artificial Sequence: Synthetic oligonucleotide"
ttgactaagtcgagtcatgct

SEQ ID NO: 20227 - DNA, 21 bp, Artificial Sequence
  source: /note="Description of Artificial Sequence: Synthetic oligonucleotide"
ctgactaagactgtggggtcg

SEQ ID NO: 20228 - DNA, 21 bp, Artificial Sequence
  source: /note="Description of Artificial Sequence: Synthetic oligonucleotide"
ctgactctggctattggggct

SEQ ID NO: 20229 - DNA, 21 bp, Artificial Sequence
  source: /note="Description of Artificial Sequence: Synthetic oligonucleotide"
ttgactctgggtcctcgttct

SEQ ID NO: 20230 - DNA, 21 bp, Artificial Sequence
  source: /note="Description of Artificial Sequence: Synthetic oligonucleotide"
ttgactctgcagaagggtacg

SEQ ID NO: 20231 - DNA, 21 bp, Artificial Sequence
  source: /note="Description of Artificial Sequence: Synthetic oligonucleotide"
cttacgttgcagccgattgct

SEQ ID NO: 20232 - DNA, 21 bp, Artificial Sequence
  source: /note="Description of Artificial Sequence: Synthetic oligonucleotide"
ctgacgctgactggttcttct

SEQ ID NO: 20233 - DNA, 21 bp, Artificial Sequence
  source: /note="Description of Artificial Sequence: Synthetic oligonucleotide"
ttgactctgacgtcggctcat

SEQ ID NO: 20234 - DNA, 21 bp, Artificial Sequence
  source: /note="Description of Artificial Sequence: Synthetic oligonucleotide"
ctgacgttggttcatgctgag

SEQ ID NO: 20235 - DNA, 21 bp, Artificial Sequence
  source: /note="Description of Artificial Sequence: Synthetic oligonucleotide"
ttgactatgggttcggcgtct

SEQ ID NO: 20236 - DNA, 21 bp, Artificial Sequence
  source: /note="Description of Artificial Sequence: Synthetic oligonucleotide"
cttacgatgattcagcgggat

SEQ ID NO: 20237 - DNA, 21 bp, Artificial Sequence
  source: /note="Description of Artificial Sequence: Synthetic oligonucleotide"
ttgactatgaggccgccgagt

SEQ ID NO: 20238 - DNA, 21 bp, Artificial Sequence
  source: /note="Description of Artificial Sequence: Synthetic oligonucleotide"
ttgacgatgtcgagggctctt

SEQ ID NO: 20239 - DNA, 21 bp, Artificial Sequence
  source: /note="Description of Artificial Sequence: Synthetic oligonucleotide"
cttacgaatgctcatcatctt

SEQ ID NO: 20240 - DNA, 21 bp, Artificial Sequence
  source: /note="Description of Artificial Sequence: Synthetic oligonucleotide"
ttgacgaatgcgcgtccggcg

SEQ ID NO: 20241 - DNA, 21 bp, Artificial Sequence
  source: /note="Description of Artificial Sequence: Synthetic oligonucleotide"
cttactaatgaggctcatcgg

SEQ ID NO: 20242 - DNA, 21 bp, Artificial Sequence
  source: /note="Description of Artificial Sequence: Synthetic oligonucleotide"
ttgactaataagccgatttgt

SEQ ID NO: 20243 - DNA, 21 bp, Artificial Sequence
  source: /note="Description of Artificial Sequence: Synthetic oligonucleotide"
cttacgaatatgcgtactact

SEQ ID NO: 20244 - DNA, 21 bp, Artificial Sequence
  source: /note="Description of Artificial Sequence: Synthetic oligonucleotide"
ctgacgaataatgagcaggtt

SEQ ID NO: 20245 - DNA, 21 bp, Artificial Sequence
  source: /note="Description of Artificial Sequence: Synthetic oligonucleotide"
ttgactaatcgtcagaatcag

SEQ ID NO: 20246 - DNA, 21 bp, Artificial Sequence
  source: /note="Description of Artificial Sequence: Synthetic oligonucleotide"
ttgacgcctgcgttgggtcct

SEQ ID NO: 20247 - DNA, 21 bp, Artificial Sequence
  source: /note="Description of Artificial Sequence: Synthetic oligonucleotide"
cttactccggctaggacgtat

SEQ ID NO: 20248 - DNA, 21 bp, Artificial Sequence
  source: /note="Description of Artificial Sequence: Synthetic oligonucleotide"
ctgactcctggtcggggggtg

SEQ ID NO: 20249 - DNA, 21 bp, Artificial Sequence
  source: /note="Description of Artificial Sequence: Synthetic oligonucleotide"
ctgacgccgcatgttatggat

SEQ ID NO: 20250 - DNA, 21 bp, Artificial Sequence
  source: /note="Description of Artificial Sequence: Synthetic oligonucleotide"
ttgactccgattaattctgct

SEQ ID NO: 20251 - DNA, 21 bp, Artificial Sequence
  source: /note="Description of Artificial Sequence: Synthetic oligonucleotide"
cttacgccgaagtcgatttct

SEQ ID NO: 20252 - DNA, 21 bp, Artificial Sequence
  source: /note="Description of Artificial Sequence: Synthetic oligonucleotide"
ttgacgccgcttcttggtagt

SEQ ID NO: 20253 - DNA, 21 bp, Artificial Sequence
  source: /note="Description of Artificial Sequence: Synthetic oligonucleotide"
ttgacgccgctgatgtctgat

SEQ ID NO: 20254 - DNA, 21 bp, Artificial Sequence
  source: /note="Description of Artificial Sequence: Synthetic oligonucleotide"
ttgactcctcggttgcctgct

SEQ ID NO: 20255 - DNA, 21 bp, Artificial Sequence
  source: /note="Description of Artificial Sequence: Synthetic oligonucleotide"
cttacgccttctggtcattgg

SEQ ID NO: 20256 - DNA, 21 bp, Artificial Sequence
  source: /note="Description of Artificial Sequence: Synthetic oligonucleotide"
ctgacgccttcggggtataat

SEQ ID NO: 20257 - DNA, 21 bp, Artificial Sequence
  source: /note="Description of Artificial Sequence: Synthetic oligonucleotide"
ctgactccgtcgcagccttat

SEQ ID NO: 20258 - DNA, 21 bp, Artificial Sequence
  source: /note="Description of Artificial Sequence: Synthetic oligonucleotide"
ctgacgccttcggttaagggt

SEQ ID NO: 20259 - DNA, 21 bp, Artificial Sequence
  source: /note="Description of Artificial Sequence: Synthetic oligonucleotide"
ttgactcctagtgttccgcat

SEQ ID NO: 20260 - DNA, 21 bp, Artificial Sequence
  source: /note="Description of Artificial Sequence: Synthetic oligonucleotide"
ctgactcctacgaagatggag

SEQ ID NO: 20261 - DNA, 21 bp, Artificial Sequence
  source: /note="Description of Artificial Sequence: Synthetic oligonucleotide"
cttactcctgtttcgccggat

SEQ ID NO: 20262 - DNA, 21 bp, Artificial Sequence
  source: /note="Description of Artificial Sequence: Synthetic oligonucleotide"
cttacgcagaagactccgtat

SEQ ID NO: 20263 - DNA, 21 bp, Artificial Sequence
  source: /note="Description of Artificial Sequence: Synthetic oligonucleotide"
cttactcagttgagggttact

SEQ ID NO: 20264 - DNA, 21 bp, Artificial Sequence
  source: /note="Description of Artificial Sequence: Synthetic oligonucleotide"
ctgactcagtctcatccggct

SEQ ID NO: 20265 - DNA, 21 bp, Artificial Sequence
  source: /note="Description of Artificial Sequence: Synthetic oligonucleotide"
cttactcggaaggagactgat

SEQ ID NO: 20266 - DNA, 21 bp, Artificial Sequence
  source: /note="Description of Artificial Sequence: Synthetic oligonucleotide"
ctgactaggcctgatgatacg

SEQ ID NO: 20267 - DNA, 21 bp, Artificial Sequence
  source: /note="Description of Artificial Sequence: Synthetic oligonucleotide"
cttactcggcagcattctgat

SEQ ID NO: 20268 - DNA, 21 bp, Artificial Sequence
  source: /note="Description of Artificial Sequence: Synthetic oligonucleotide"
ctgactcggtctccgcctgct

SEQ ID NO: 20269 - DNA, 21 bp, Artificial Sequence
  source: /note="Description of Artificial Sequence: Synthetic oligonucleotide"
ttgacgagtgctccggggcgt

SEQ ID NO: 20270 - DNA, 21 bp, Artificial Sequence
  source: /note="Description of Artificial Sequence: Synthetic oligonucleotide"
ctgacttctggtaagtcgcag

SEQ ID NO: 20271 - DNA, 21 bp, Artificial Sequence
  source: /note="Description of Artificial Sequence: Synthetic oligonucleotide"
ctgacgtctgggccgcttcgg

SEQ ID NO: 20272 - DNA, 21 bp, Artificial Sequence
  source: /note="Description of Artificial Sequence: Synthetic oligonucleotide"
cttacgtcgcatgcgcagtat

SEQ ID NO: 20273 - DNA, 21 bp, Artificial Sequence
  source: /note="Description of Artificial Sequence: Synthetic oligonucleotide"
ttgactagtaagcatttgccg

SEQ ID NO: 20274 - DNA, 21 bp, Artificial Sequence
  source: /note="Description of Artificial Sequence: Synthetic oligonucleotide"
ttgactagtaagcagggttcg

SEQ ID NO: 20275 - DNA, 21 bp, Artificial Sequence
  source: /note="Description of Artificial Sequence: Synthetic oligonucleotide"
ttgacttctctgaagagtgct

SEQ ID NO: 20276 - DNA, 21 bp, Artificial Sequence
  source: /note="Description of Artificial Sequence: Synthetic oligonucleotide"
ttgacttctcttcgtacggag

SEQ ID NO: 20277 - DNA, 21 bp, Artificial Sequence
  source: /note="Description of Artificial Sequence: Synthetic oligonucleotide"
ctgacttcgctttatggtgtt

SEQ ID NO: 20278 - DNA, 21 bp, Artificial Sequence
  source: /note="Description of Artificial Sequence: Synthetic oligonucleotide"
cttactagtaatgagatgagt

SEQ ID NO: 20279 - DNA, 21 bp, Artificial Sequence
  source: /note="Description of Artificial Sequence: Synthetic oligonucleotide"
ctgacgtcgaatagggctttg

SEQ ID NO: 20280 - DNA, 21 bp, Artificial Sequence
  source: /note="Description of Artificial Sequence: Synthetic oligonucleotide"
cttactagtcggacggtgcct

SEQ ID NO: 20281 - DNA, 21 bp, Artificial Sequence
  source: /note="Description of Artificial Sequence: Synthetic oligonucleotide"
ttgacgtctacggctcagagt

SEQ ID NO: 20282 - DNA, 21 bp, Artificial Sequence
  source: /note="Description of Artificial Sequence: Synthetic oligonucleotide"
ttgactagtactaatgggatg

SEQ ID NO: 20283 - DNA, 21 bp, Artificial Sequence
  source: /note="Description of Artificial Sequence: Synthetic oligonucleotide"
ttgactagtactcgtcttagt

SEQ ID NO: 20284 - DNA, 21 bp, Artificial Sequence
  source: /note="Description of Artificial Sequence: Synthetic oligonucleotide"
cttacgactgcgcggcctctt

SEQ ID NO: 20285 - DNA, 21 bp, Artificial Sequence
  source: /note="Description of Artificial Sequence: Synthetic oligonucleotide"
cttacgacgggtgcttatggg

SEQ ID NO: 20286 - DNA, 21 bp, Artificial Sequence
  source: /note="Description of Artificial Sequence: Synthetic oligonucleotide"
cttacgactattagggatgtg

SEQ ID NO: 20287 - DNA, 21 bp, Artificial Sequence
  source: /note="Description of Artificial Sequence: Synthetic oligonucleotide"
ttgacgactaaggctgcgaat

SEQ ID NO: 20288 - DNA, 21 bp, Artificial Sequence
  source: /note="Description of Artificial Sequence: Synthetic oligonucleotide"
cttactacgaagaatatggcg

SEQ ID NO: 20289 - DNA, 21 bp, Artificial Sequence
  source: /note="Description of Artificial Sequence: Synthetic oligonucleotide"
ctgacgactaagcggcttgat

SEQ ID NO: 20290 - DNA, 21 bp, Artificial Sequence
  source: /note="Description of Artificial Sequence: Synthetic oligonucleotide"
cttacgactaagagtcaggat

SEQ ID NO: 20291 - DNA, 21 bp, Artificial Sequence
  source: /note="Description of Artificial Sequence: Synthetic oligonucleotide"
ttgactacgcttcattctaag

SEQ ID NO: 20292 - DNA, 21 bp, Artificial Sequence
  source: /note="Description of Artificial Sequence: Synthetic oligonucleotide"
ctgacgacgatgaatgcgttt

SEQ ID NO: 20293 - DNA, 21 bp, Artificial Sequence
  source: /note="Description of Artificial Sequence: Synthetic oligonucleotide"
ttgactacgatgaggtcgaat

SEQ ID NO: 20294 - DNA, 21 bp, Artificial Sequence
  source: /note="Description of Artificial Sequence: Synthetic oligonucleotide"
ttgactactatgtcgaaggcg

SEQ ID NO: 20295 - DNA, 21 bp, Artificial Sequence
  source: /note="Description of Artificial Sequence: Synthetic oligonucleotide"
cttacgactcctcttccgcat

SEQ ID NO: 20296 - DNA, 21 bp, Artificial Sequence
  source: /note="Description of Artificial Sequence: Synthetic oligonucleotide"
ttgactacgcaggagcattgg

SEQ ID NO: 20297 - DNA, 21 bp, Artificial Sequence
  source: /note="Description of Artificial Sequence: Synthetic oligonucleotide"
ctgactactaggcctgctttt

SEQ ID NO: 20298 - DNA, 21 bp, Artificial Sequence
  source: /note="Description of Artificial Sequence: Synthetic oligonucleotide"
ctgacgacgcggtcgagtccg

SEQ ID NO: 20299 - DNA, 21 bp, Artificial Sequence
  source: /note="Description of Artificial Sequence: Synthetic oligonucleotide"
ttgactacgtcgcttaagcct

SEQ ID NO: 20300 - DNA, 21 bp, Artificial Sequence
  source: /note="Description of Artificial Sequence: Synthetic oligonucleotide"
ttgactacgagttcttttacg

SEQ ID NO: 20301 - DNA, 21 bp, Artificial Sequence
  source: /note="Description of Artificial Sequence: Synthetic oligonucleotide"
ttgactactactattaataat

SEQ ID NO: 20302 - DNA, 21 bp, Artificial Sequence
  source: /note="Description of Artificial Sequence: Synthetic oligonucleotide"
ttgactacgacgccggctaag

SEQ ID NO: 20303 - DNA, 21 bp, Artificial Sequence
  source: /note="Description of Artificial Sequence: Synthetic oligonucleotide"
cttacggtgggggctacgatt

SEQ ID NO: 20304 - DNA, 21 bp, Artificial Sequence
  source: /note="Description of Artificial Sequence: Synthetic oligonucleotide"
ttgactgtgcaggagactcag

SEQ ID NO: 20305 - DNA, 21 bp, Artificial Sequence
  source: /note="Description of Artificial Sequence: Synthetic oligonucleotide"
cttacggtgtcggctgtgaag

SEQ ID NO: 20306 - DNA, 21 bp, Artificial Sequence
  source: /note="Description of Artificial Sequence: Synthetic oligonucleotide"
cttactgtgtctaatctgcct

SEQ ID NO: 20307 - DNA, 21 bp, Artificial Sequence
  source: /note="Description of Artificial Sequence: Synthetic oligonucleotide"
cttactgttacttgggctgag

SEQ ID NO: 20308 - DNA, 21 bp, Artificial Sequence
  source: /note="Description of Artificial Sequence: Synthetic oligonucleotide"
ttgacggtggttcctagtggt

SEQ ID NO: 20309 - DNA, 21 bp, Artificial Sequence
  source: /note="Description of Artificial Sequence: Synthetic oligonucleotide"
ctgacgtattttgtggaggag

SEQ ID NO: 20310 - DNA, 21 bp, Artificial Sequence
  source: /note="Description of Artificial Sequence: Synthetic oligonucleotide"
cttacgtatcctggtagtcag

SEQ ID NO: 20311 - DNA, 21 bp, Artificial Sequence
  source: /note="Description of Artificial Sequence: Synthetic oligonucleotide"
ttgacttatcgtggtggggag

SEQ ID NO: 20312 - DNA, 21 bp, Artificial Sequence
  source: /note="Description of Artificial Sequence: Synthetic oligonucleotide"
cttacttatagtccgcagacg

SEQ ID NO: 20313 - DNA, 21 bp, Artificial Sequence
  source: /note="Description of Artificial Sequence: Synthetic oligonucleotide"
ttgacgtattctcggagtgat

SEQ ID NO: 20314 - DNA, 21 bp, Artificial Sequence
  source: /note="Description of Artificial Sequence: Synthetic oligonucleotide"
ttggttgctaagatgactccg

SEQ ID NO: 20315 - DNA, 21 bp, Artificial Sequence
  source: /note="Description of Artificial Sequence: Synthetic oligonucleotide"
ttggtggcgcgtgggggtgct

SEQ ID NO: 20316 - DNA, 21 bp, Artificial Sequence
  source: /note="Description of Artificial Sequence: Synthetic oligonucleotide"
ctggttgcgacgcaggcgcct

SEQ ID NO: 20317 - DNA, 21 bp, Artificial Sequence
  source: /note="Description of Artificial Sequence: Synthetic oligonucleotide"
cttgtggctgttagtacgact

SEQ ID NO: 20318 - DNA, 21 bp, Artificial Sequence
  source: /note="Description of Artificial Sequence: Synthetic oligonucleotide"
cttgtggattcgcggactatg

SEQ ID NO: 20319 - DNA, 21 bp, Artificial Sequence
  source: /note="Description of Artificial Sequence: Synthetic oligonucleotide"
ctggttgaggggctgattgat

SEQ ID NO: 20320 - DNA, 21 bp, Artificial Sequence
  source: /note="Description of Artificial Sequence: Synthetic oligonucleotide"
ttggttgagaatcgtcgtgag

SEQ ID NO: 20321 - DNA, 21 bp, Artificial Sequence
  source: /note="Description of Artificial Sequence: Synthetic oligonucleotide"
ctggtggagcctatgaagcat

SEQ ID NO: 20322 - DNA, 21 bp, Artificial Sequence
  source: /note="Description of Artificial Sequence: Synthetic oligonucleotide"
cttgtggagacgaagggtagt

SEQ ID NO: 20323 - DNA, 21 bp, Artificial Sequence
  source: /note="Description of Artificial Sequence: Synthetic oligonucleotide"
ttggttgagacgttgactcat

SEQ ID NO: 20324 - DNA, 21 bp, Artificial Sequence
  source: /note="Description of Artificial Sequence: Synthetic oligonucleotide"
ctggttggtgagtcgcatatt

SEQ ID NO: 20325 - DNA, 21 bp, Artificial Sequence
  source: /note="Description of Artificial Sequence: Synthetic oligonucleotide"
ctggtgggtcatcctacgcct

SEQ ID NO: 20326 - DNA, 21 bp, Artificial Sequence
  source: /note="Description of Artificial Sequence: Synthetic oligonucleotide"
ctggtgggtcatactggttct

SEQ ID NO: 20327 - DNA, 21 bp, Artificial Sequence
  source: /note="Description of Artificial Sequence: Synthetic oligonucleotide"
ttggtgggtcaggttgcggtt

SEQ ID NO: 20328 - DNA, 21 bp, Artificial Sequence
  source: /note="Description of Artificial Sequence: Synthetic oligonucleotide"
ttggttgggcgtgcttgttgt

SEQ ID NO: 20329 - DNA, 21 bp, Artificial Sequence
  source: /note="Description of Artificial Sequence: Synthetic oligonucleotide"
ttggttggtcggctgtctacg

SEQ ID NO: 20330 - DNA, 21 bp, Artificial Sequence
  source: /note="Description of Artificial Sequence: Synthetic oligonucleotide"
ctggttggttctcctccttct

SEQ ID NO: 20331 - DNA, 21 bp, Artificial Sequence
  source: /note="Description of Artificial Sequence: Synthetic oligonucleotide"
ctggtgcatttgatgactgat

SEQ ID NO: 20332 - DNA, 21 bp, Artificial Sequence
  source: /note="Description of Artificial Sequence: Synthetic oligonucleotide"
ttggttcataatcggacgtct

SEQ ID NO: 20333 - DNA, 21 bp, Artificial Sequence
  source: /note="Description of Artificial Sequence: Synthetic oligonucleotide"
cttgttcattattctccggat

SEQ ID NO: 20334 - DNA, 21 bp, Artificial Sequence
  source: /note="Description of Artificial Sequence: Synthetic oligonucleotide"
ctggttattccggggcctggt

SEQ ID NO: 20335 - DNA, 21 bp, Artificial Sequence
  source: /note="Description of Artificial Sequence: Synthetic oligonucleotide"
cttgtgaaggagagtcctacg

SEQ ID NO: 20336 - DNA, 21 bp, Artificial Sequence
  source: /note="Description of Artificial Sequence: Synthetic oligonucleotide"
cttgttaagggtgggcctaat

SEQ ID NO: 20337 - DNA, 21 bp, Artificial Sequence
  source: /note="Description of Artificial Sequence: Synthetic oligonucleotide"
cttgtgaagcagactacgctg

SEQ ID NO: 20338 - DNA, 21 bp, Artificial Sequence
  source: /note="Description of Artificial Sequence: Synthetic oligonucleotide"
ctggtgaagtcggttgatcag

SEQ ID NO: 20339 - DNA, 21 bp, Artificial Sequence
  source: /note="Description of Artificial Sequence: Synthetic oligonucleotide"
ctggttcttgggcctcctgcg

SEQ ID NO: 20340 - DNA, 21 bp, Artificial Sequence
  source: /note="Description of Artificial Sequence: Synthetic oligonucleotide"
cttgttttgggtagtaagtct

SEQ ID NO: 20341 - DNA, 21 bp, Artificial Sequence
  source: /note="Description of Artificial Sequence: Synthetic oligonucleotide"
ttggttctgaataatgatggg

SEQ ID NO: 20342 - DNA, 21 bp, Artificial Sequence
  source: /note="Description of Artificial Sequence: Synthetic oligonucleotide"
cttgtgcttccggcgaggcag

SEQ ID NO: 20343 - DNA, 21 bp, Artificial Sequence
  source: /note="Description of Artificial Sequence: Synthetic oligonucleotide"
ttggtgctgccgcagaagagt

SEQ ID NO: 20344 - DNA, 21 bp, Artificial Sequence
  source: /note="Description of Artificial Sequence: Synthetic oligonucleotide"
ctggttttgtcgaatgcgtcg

SEQ ID NO: 20345 - DNA, 21 bp, Artificial Sequence
  source: /note="Description of Artificial Sequence: Synthetic oligonucleotide"
ctggtgatgagtccggctcct

SEQ ID NO: 20346 - DNA, 21 bp, Artificial Sequence
  source: /note="Description of Artificial Sequence: Synthetic oligonucleotide"
ttggttatgtctacgagggcg

SEQ ID NO: 20347 - DNA, 21 bp, Artificial Sequence
  source: /note="Description of Artificial Sequence: Synthetic oligonucleotide"
cttgttatgacgtcggggagt

SEQ ID NO: 20348 - DNA, 21 bp, Artificial Sequence
  source: /note="Description of Artificial Sequence: Synthetic oligonucleotide"
ctggtgaatgattgttgtact

SEQ ID NO: 20349 - DNA, 21 bp, Artificial Sequence
  source: /note="Description of Artificial Sequence: Synthetic oligonucleotide"
ctggtgaatgagacgactcgt

SEQ ID NO: 20350 - DNA, 21 bp, Artificial Sequence
  source: /note="Description of Artificial Sequence: Synthetic oligonucleotide"
cttgttaataagttggggcct

SEQ ID NO: 20351 - DNA, 21 bp, Artificial Sequence
  source: /note="Description of Artificial Sequence: Synthetic oligonucleotide"
ctggttaataagagttataat

SEQ ID NO: 20352 - DNA, 21 bp, Artificial Sequence
  source: /note="Description of Artificial Sequence: Synthetic oligonucleotide"
cttgtgaatcctgggacgcgg

SEQ ID NO: 20353 - DNA, 21 bp, Artificial Sequence
  source: /note="Description of Artificial Sequence: Synthetic oligonucleotide"
ttggttaattctaaggattcg

SEQ ID NO: 20354 - DNA, 21 bp, Artificial Sequence
  source: /note="Description of Artificial Sequence: Synthetic oligonucleotide"
ttggtgaatactcctacggag

SEQ ID NO: 20355 - DNA, 21 bp, Artificial Sequence
  source: /note="Description of Artificial Sequence: Synthetic oligonucleotide"
ctggtgcctgcgcggtctggt

SEQ ID NO: 20356 - DNA, 21 bp, Artificial Sequence
  source: /note="Description of Artificial Sequence: Synthetic oligonucleotide"
ctggttcctgggctgacgggg

SEQ ID NO: 20357 - DNA, 21 bp, Artificial Sequence
  source: /note="Description of Artificial Sequence: Synthetic oligonucleotide"
ttggttcctggtatgattact

SEQ ID NO: 20358 - DNA, 21 bp, Artificial Sequence
  source: /note="Description of Artificial Sequence: Synthetic oligonucleotide"
ctggtgccgggtgttcattct

SEQ ID NO: 20359 - DNA, 21 bp, Artificial Sequence
  source: /note="Description of Artificial Sequence: Synthetic oligonucleotide"
ttggttcctcatagtaatttt

SEQ ID NO: 20360 - DNA, 21 bp, Artificial Sequence
  source: /note="Description of Artificial Sequence: Synthetic oligonucleotide"
cttgtgcctaagcatatgaat

SEQ ID NO: 20361 - DNA, 21 bp, Artificial Sequence
  source: /note="Description of Artificial Sequence: Synthetic oligonucleotide"
ttggttccgttgcttccggct

SEQ ID NO: 20362 - DNA, 21 bp, Artificial Sequence
  source: /note="Description of Artificial Sequence: Synthetic oligonucleotide"
ttggttccgcttcctcattcg

SEQ ID NO: 20363 - DNA, 21 bp, Artificial Sequence
  source: /note="Description of Artificial Sequence: Synthetic oligonucleotide"
cttgttccgctgtatactgag

SEQ ID NO: 20364 - DNA, 21 bp, Artificial Sequence
  source: /note="Description of Artificial Sequence: Synthetic oligonucleotide"
ttggttccgaattttcagcct

SEQ ID NO: 20365 - DNA, 21 bp, Artificial Sequence
  source: /note="Description of Artificial Sequence: Synthetic oligonucleotide"
ctggtgccgaatagtgcggag

SEQ ID NO: 20366 - DNA, 21 bp, Artificial Sequence
  source: /note="Description of Artificial Sequence: Synthetic oligonucleotide"
cttgttccgcgggctgcggat

SEQ ID NO: 20367 - DNA, 21 bp, Artificial Sequence
  source: /note="Description of Artificial Sequence: Synthetic oligonucleotide"
cttgtgccgcgtaatagtctt

SEQ ID NO: 20368 - DNA, 21 bp, Artificial Sequence
  source: /note="Description of Artificial Sequence: Synthetic oligonucleotide"
ttggttccttcgattcagact

SEQ ID NO: 20369 - DNA, 21 bp, Artificial Sequence
  source: /note="Description of Artificial Sequence: Synthetic oligonucleotide"
ttggttccgagtttggagcag

SEQ ID NO: 20370 - DNA, 21 bp, Artificial Sequence
  source: /note="Description of Artificial Sequence: Synthetic oligonucleotide"
cttgtgcctgtgagtttgagt

SEQ ID NO: 20371 - DNA, 21 bp, Artificial Sequence
  source: /note="Description of Artificial Sequence: Synthetic oligonucleotide"
ttggttcagttggatgtggcg

SEQ ID NO: 20372 - DNA, 21 bp, Artificial Sequence
  source: /note="Description of Artificial Sequence: Synthetic oligonucleotide"
ctggtgcagtcgctggggatg

SEQ ID NO: 20373 - DNA, 21 bp, Artificial Sequence
  source: /note="Description of Artificial Sequence: Synthetic oligonucleotide"
cttgtgagggctatggatacg

SEQ ID NO: 20374 - DNA, 21 bp, Artificial Sequence
  source: /note="Description of Artificial Sequence: Synthetic oligonucleotide"
cttgtgcgtggggctagtcat

SEQ ID NO: 20375 - DNA, 21 bp, Artificial Sequence
  source: /note="Description of Artificial Sequence: Synthetic oligonucleotide"
cttgttcggcatgataatttg

SEQ ID NO: 20376 - DNA, 21 bp, Artificial Sequence
  source: /note="Description of Artificial Sequence: Synthetic oligonucleotide"
cttgttcgtaatgggctttcg

SEQ ID NO: 20377 - DNA, 21 bp, Artificial Sequence
  source: /note="Description of Artificial Sequence: Synthetic oligonucleotide"
ctggtgcgtccgtctcctgct

SEQ ID NO: 20378 - DNA, 21 bp, Artificial Sequence
  source: /note="Description of Artificial Sequence: Synthetic oligonucleotide"
cttgtttcgggtcatcatatg

SEQ ID NO: 20379 - DNA, 21 bp, Artificial Sequence
  source: /note="Description of Artificial Sequence: Synthetic oligonucleotide"
cttgtgtcgggtaatcgtgtg

SEQ ID NO: 20380 - DNA, 21 bp, Artificial Sequence
  source: /note="Description of Artificial Sequence: Synthetic oligonucleotide"
cttgttagtgggactgatagg

SEQ ID NO: 20381 - DNA, 21 bp, Artificial Sequence
  source: /note="Description of Artificial Sequence: Synthetic oligonucleotide"
ttggtttctcatcctcggcct

SEQ ID NO: 20382 - DNA, 21 bp, Artificial Sequence
  source: /note="Description of Artificial Sequence: Synthetic oligonucleotide"
ttggtttctcatcggtcggct

SEQ ID NO: 20383 - DNA, 21 bp, Artificial Sequence
  source: /note="Description of Artificial Sequence: Synthetic oligonucleotide"
ctggttagtaaggatgagagt

SEQ ID NO: 20384 - DNA, 21 bp, Artificial Sequence
  source: /note="Description of Artificial Sequence: Synthetic oligonucleotide"
cttgttagtccggctcggccg

SEQ ID NO: 20385 - DNA, 21 bp, Artificial Sequence
  source: /note="Description of Artificial Sequence: Synthetic oligonucleotide"
ctggtttctcctgaggagggg

SEQ ID NO: 20386 - DNA, 21 bp, Artificial Sequence
  source: /note="Description of Artificial Sequence: Synthetic oligonucleotide"
ctggtttcgccttctttgact

SEQ ID NO: 20387 - DNA, 21 bp, Artificial Sequence
  source: /note="Description of Artificial Sequence: Synthetic oligonucleotide"
ctggtgtcgtctaagcatccg

SEQ ID NO: 20388 - DNA, 21 bp, Artificial Sequence
  source: /note="Description of Artificial Sequence: Synthetic oligonucleotide"
cttgtgtcgtcgcctcggact

SEQ ID NO: 20389 - DNA, 21 bp, Artificial Sequence
  source: /note="Description of Artificial Sequence: Synthetic oligonucleotide"
cttgtttcgacgatgactgag

SEQ ID NO: 20390 - DNA, 21 bp, Artificial Sequence
  source: /note="Description of Artificial Sequence: Synthetic oligonucleotide"
cttgtgactgcgggtccgttg

SEQ ID NO: 20391 - DNA, 21 bp, Artificial Sequence
  source: /note="Description of Artificial Sequence: Synthetic oligonucleotide"
cttgttactgcgccgactcct

SEQ ID NO: 20392 - DNA, 21 bp, Artificial Sequence
  source: /note="Description of Artificial Sequence: Synthetic oligonucleotide"
ttggttactgctcagcatccg

SEQ ID NO: 20393 - DNA, 21 bp, Artificial Sequence
  source: /note="Description of Artificial Sequence: Synthetic oligonucleotide"
ctggttacgggggatgctagt

SEQ ID NO: 20394 - DNA, 21 bp, Artificial Sequence
  source: /note="Description of Artificial Sequence: Synthetic oligonucleotide"
ctggtgacgcataattatgct

SEQ ID NO: 20395 - DNA, 21 bp, Artificial Sequence
  source: /note="Description of Artificial Sequence: Synthetic oligonucleotide"
cttgtgacgatgaggccggtt

SEQ ID NO: 20396 - DNA, 21 bp, Artificial Sequence
  source: /note="Description of Artificial Sequence: Synthetic oligonucleotide"
ttggtgacgaatgcgcatagt

SEQ ID NO: 20397 - DNA, 21 bp, Artificial Sequence
  source: /note="Description of Artificial Sequence: Synthetic oligonucleotide"
cttgtgactcctggggatagg

SEQ ID NO: 20398 - DNA, 21 bp, Artificial Sequence
  source: /note="Description of Artificial Sequence: Synthetic oligonucleotide"
ctggttactcagtctaatgag

SEQ ID NO: 20399 - DNA, 21 bp, Artificial Sequence
  source: /note="Description of Artificial Sequence: Synthetic oligonucleotide"
cttgtgacttatactcctatg

SEQ ID NO: 20400 - DNA, 21 bp, Artificial Sequence
  source: /note="Description of Artificial Sequence: Synthetic oligonucleotide"
ttggtggtggctgcgcatttg

SEQ ID NO: 20401 - DNA, 21 bp, Artificial Sequence
  source: /note="Description of Artificial Sequence: Synthetic oligonucleotide"
ttggtggtggcggagaggatt

SEQ ID NO: 20402 - DNA, 21 bp, Artificial Sequence
  source: /note="Description of Artificial Sequence: Synthetic oligonucleotide"
ttggttgttgatgagatgacg

SEQ ID NO: 20403 - DNA, 21 bp, Artificial Sequence
  source: /note="Description of Artificial Sequence: Synthetic oligonucleotide"
cttgttgttaatcgtatggat

SEQ ID NO: 20404 - DNA, 21 bp, Artificial Sequence
  source: /note="Description of Artificial Sequence: Synthetic oligonucleotide"
cttgtggttcctggtaatggt

SEQ ID NO: 20405 - DNA, 21 bp, Artificial Sequence
  source: /note="Description of Artificial Sequence: Synthetic oligonucleotide"
ctggtgtatggtcatgatcat

SEQ ID NO: 20406 - DNA, 21 bp, Artificial Sequence
  source: /note="Description of Artificial Sequence: Synthetic oligonucleotide"
ttggtttatacttcgacgtcg

SEQ ID NO: 20407 - DNA, 21 bp, Artificial Sequence
  source: /note="Description of Artificial Sequence: Synthetic oligonucleotide"
ctgtgggatcttggtaatccg

SEQ ID NO: 20408 - DNA, 21 bp, Artificial Sequence
  source: /note="Description of Artificial Sequence: Synthetic oligonucleotide"
ttgtgggagacttctactgat

SEQ ID NO: 20409 - DNA, 21 bp, Artificial Sequence
  source: /note="Description of Artificial Sequence: Synthetic oligonucleotide"
ctgtggggggatggtacgttg

SEQ ID NO: 20410 - DNA, 21 bp, Artificial Sequence
  source: /note="Description of Artificial Sequence: Synthetic oligonucleotide"
ctgtggaataagcctgatgat

SEQ ID NO: 20411 - DNA, 21 bp, Artificial Sequence
  source: /note="Description of Artificial Sequence: Synthetic oligonucleotide"
ttgtggaattctaatactgct

SEQ ID NO: 20412 - DNA, 21 bp, Artificial Sequence
  source: /note="Description of Artificial Sequence: Synthetic oligonucleotide"
ctgtggcagtctgaggtggat

SEQ ID NO: 20413 - DNA, 21 bp, Artificial Sequence
  source: /note="Description of Artificial Sequence: Synthetic oligonucleotide"
ctgtggcgtgcggatgatgct

SEQ ID NO: 20414 - DNA, 21 bp, Artificial Sequence
  source: /note="Description of Artificial Sequence: Synthetic oligonucleotide"
ttgtggaggtcgtctacgacg

SEQ ID NO: 20415 - DNA, 21 bp, Artificial Sequence
  source: /note="Description of Artificial Sequence: Synthetic oligonucleotide"
ctttggacggctgagcgtgat

SEQ ID NO: 20416 - DNA, 21 bp, Artificial Sequence
  source: /note="Description of Artificial Sequence: Synthetic oligonucleotide"
ttgtggactggttcgggtcct

SEQ ID NO: 20417 - DNA, 21 bp, Artificial Sequence
  source: /note="Description of Artificial Sequence: Synthetic oligonucleotide"
ctttggacgaatcagccgagt

SEQ ID NO: 20418 - DNA, 21 bp, Artificial Sequence
  source: /note="Description of Artificial Sequence: Synthetic oligonucleotide"
ctttatgctaattctaagcct

SEQ ID NO: 20419 - DNA, 21 bp, Artificial Sequence
  source: /note="Description of Artificial Sequence: Synthetic oligonucleotide"
ttgtatgatttgcggggggcg

SEQ ID NO: 20420 - DNA, 21 bp, Artificial Sequence
  source: /note="Description of Artificial Sequence: Synthetic oligonucleotide"
ctgtatgattcgcaggatact

SEQ ID NO: 20421 - DNA, 21 bp, Artificial Sequence
  source: /note="Description of Artificial Sequence: Synthetic oligonucleotide"
ttgtatgatactagtctgctt

SEQ ID NO: 20422 - DNA, 21 bp, Artificial Sequence
  source: /note="Description of Artificial Sequence: Synthetic oligonucleotide"
ctgtatgagcattctagtcct

SEQ ID NO: 20423 - DNA, 21 bp, Artificial Sequence
  source: /note="Description of Artificial Sequence: Synthetic oligonucleotide"
ctttatgagtatcctagtggg

SEQ ID NO: 20424 - DNA, 21 bp, Artificial Sequence
  source: /note="Description of Artificial Sequence: Synthetic oligonucleotide"
ttgtatggtagtttggtgccg

SEQ ID NO: 20425 - DNA, 21 bp, Artificial Sequence
  source: /note="Description of Artificial Sequence: Synthetic oligonucleotide"
ttgtatggtacgtctgcgatt

SEQ ID NO: 20426 - DNA, 21 bp, Artificial Sequence
  source: /note="Description of Artificial Sequence: Synthetic oligonucleotide"
ctgtataagtcgcctgagact

SEQ ID NO: 20427 - DNA, 21 bp, Artificial Sequence
  source: /note="Description of Artificial Sequence: Synthetic oligonucleotide"
ctttatctgggtagtaaggat

SEQ ID NO: 20428 - DNA, 21 bp, Artificial Sequence
  source: /note="Description of Artificial Sequence: Synthetic oligonucleotide"
ttgtatctgcagaatgataag

SEQ ID NO: 20429 - DNA, 21 bp, Artificial Sequence
  source: /note="Description of Artificial Sequence: Synthetic oligonucleotide"
ctgtatcttacgtctcttgat

SEQ ID NO: 20430 - DNA, 21 bp, Artificial Sequence
  source: /note="Description of Artificial Sequence: Synthetic oligonucleotide"
ctgtataatgattttagtttt

SEQ ID NO: 20431 - DNA, 21 bp, Artificial Sequence
  source: /note="Description of Artificial Sequence: Synthetic oligonucleotide"
ttgtataattcttctgattcg

SEQ ID NO: 20432 - DNA, 21 bp, Artificial Sequence
  source: /note="Description of Artificial Sequence: Synthetic oligonucleotide"
ctttatcctcatgctccttct

SEQ ID NO: 20433 - DNA, 21 bp, Artificial Sequence
  source: /note="Description of Artificial Sequence: Synthetic oligonucleotide"
ctttatcctcttcagactgct

SEQ ID NO: 20434 - DNA, 21 bp, Artificial Sequence
  source: /note="Description of Artificial Sequence: Synthetic oligonucleotide"
ttgtatcagggtagtaattct

SEQ ID NO: 20435 - DNA, 21 bp, Artificial Sequence
  source: /note="Description of Artificial Sequence: Synthetic oligonucleotide"
ctttatcagggttatagtgct

SEQ ID NO: 20436 - DNA, 21 bp, Artificial Sequence
  source: /note="Description of Artificial Sequence: Synthetic oligonucleotide"
ctgtattctgctgcgagtaag

SEQ ID NO: 20437 - DNA, 21 bp, Artificial Sequence
  source: /note="Description of Artificial Sequence: Synthetic oligonucleotide"
ctgtatagtgaggttggtttg

SEQ ID NO: 20438 - DNA, 21 bp, Artificial Sequence
  source: /note="Description of Artificial Sequence: Synthetic oligonucleotide"
ctgtattcggggactattcct

SEQ ID NO: 20439 - DNA, 21 bp, Artificial Sequence
  source: /note="Description of Artificial Sequence: Synthetic oligonucleotide"
ctgtattctaatcctaatgtg

SEQ ID NO: 20440 - DNA, 21 bp, Artificial Sequence
  source: /note="Description of Artificial Sequence: Synthetic oligonucleotide"
ttgtattctcctctgtctaat

SEQ ID NO: 20441 - DNA, 21 bp, Artificial Sequence
  source: /note="Description of Artificial Sequence: Synthetic oligonucleotide"
ctgtatactgcgacggcgaag

SEQ ID NO: 20442 - DNA, 21 bp, Artificial Sequence
  source: /note="Description of Artificial Sequence: Synthetic oligonucleotide"
ttgtatacggattctgctttt

SEQ ID NO: 20443 - DNA, 21 bp, Artificial Sequence
  source: /note="Description of Artificial Sequence: Synthetic oligonucleotide"
ttgtatactgggcttgggact

SEQ ID NO: 20444 - DNA, 21 bp, Artificial Sequence
  source: /note="Description of Artificial Sequence: Synthetic oligonucleotide"
ttgtatacgaagaatgagggt

SEQ ID NO: 20445 - DNA, 21 bp, Artificial Sequence
  source: /note="Description of Artificial Sequence: Synthetic oligonucleotide"
ctgtatactaagtcggtgcct

SEQ ID NO: 20446 - DNA, 21 bp, Artificial Sequence
  source: /note="Description of Artificial Sequence: Synthetic oligonucleotide"
ctttatactccgaatggtgct

SEQ ID NO: 20447 - DNA, 21 bp, Artificial Sequence
  source: /note="Description of Artificial Sequence: Synthetic oligonucleotide"
ctttatactagtctgcctcag

SEQ ID NO: 20448 - DNA, 21 bp, Artificial Sequence
  source: /note="Description of Artificial Sequence: Synthetic oligonucleotide"
ctgtatacttctagtgggtcg

SEQ ID NO: 20449 - DNA, 21 bp, Artificial Sequence
  source: /note="Description of Artificial Sequence: Synthetic oligonucleotide"
ttgtatacggttacttcgggg

SEQ ID NO: 20450 - DNA, 21 bp, Artificial Sequence
  source: /note="Description of Artificial Sequence: Synthetic oligonucleotide"
ctgtatgtgtctgagaagcct

SEQ ID NO: 20451 - DNA, 21 bp, Artificial Sequence
  source: /note="Description of Artificial Sequence: Synthetic oligonucleotide"
ttgtattatccgagtacggag

SEQ ID NO: 20452 - DNA, 21 bp, Artificial Sequence
  source: /note="Description of Artificial Sequence: Synthetic oligonucleotide"
atggcggcgttgaatgatttt

SEQ ID NO: 20453 - DNA, 21 bp, Artificial Sequence
  source: /note="Description of Artificial Sequence: Synthetic oligonucleotide"
atggcggcgcaggattatgcg

SEQ ID NO: 20454 - DNA, 21 bp, Artificial Sequence
  source: /note="Description of Artificial Sequence: Synthetic oligonucleotide"
atggcggcgaggactagtaat

SEQ ID NO: 20455 - DNA, 21 bp, Artificial Sequence
  source: /note="Description of Artificial Sequence: Synthetic oligonucleotide"
atggctgctagtaagacgttt

SEQ ID NO: 20456 - DNA, 21 bp, Artificial Sequence
  source: /note="Description of Artificial Sequence: Synthetic oligonucleotide"
atggcggagtttgttcatcgt

SEQ ID NO: 20457 - DNA, 21 bp, Artificial Sequence
  source: /note="Description of Artificial Sequence: Synthetic oligonucleotide"
atggctgggaaggcttctcat

SEQ ID NO: 20458 - DNA, 21 bp, Artificial Sequence
  source: /note="Description of Artificial Sequence: Synthetic oligonucleotide"
atggcggggaatcttgttact

SEQ ID NO: 20459 - DNA, 21 bp, Artificial Sequence
  source: /note="Description of Artificial Sequence: Synthetic oligonucleotide"
atggctaagcttactgtgtct

SEQ ID NO: 20460 - DNA, 21 bp, Artificial Sequence
  source: /note="Description of Artificial Sequence: Synthetic oligonucleotide"
atggcgttgcagggttctctg

SEQ ID NO: 20461 - DNA, 21 bp, Artificial Sequence
  source: /note="Description of Artificial Sequence: Synthetic oligonucleotide"
atggcgcttcggcttgttaat

SEQ ID NO: 20462 - DNA, 21 bp, Artificial Sequence
  source: /note="Description of Artificial Sequence: Synthetic oligonucleotide"
atggctaatatgtcgtcgccg

SEQ ID NO: 20463 - DNA, 21 bp, Artificial Sequence
  source: /note="Description of Artificial Sequence: Synthetic oligonucleotide"
atggctccggtgcgggttcct

SEQ ID NO: 20464 - DNA, 21 bp, Artificial Sequence
  source: /note="Description of Artificial Sequence: Synthetic oligonucleotide"
atggctcgggctcttccgccg

SEQ ID NO: 20465 - DNA, 21 bp, Artificial Sequence
  source: /note="Description of Artificial Sequence: Synthetic oligonucleotide"
atggctcgggatgtggatcgg

SEQ ID NO: 20466 - DNA, 21 bp, Artificial Sequence
  source: /note="Description of Artificial Sequence: Synthetic oligonucleotide"
atggcgcgtgagacgacttat

SEQ ID NO: 20467 - DNA, 21 bp, Artificial Sequence
  source: /note="Description of Artificial Sequence: Synthetic oligonucleotide"
atggcgagtgctacgccggtt

SEQ ID NO: 20468 - DNA, 21 bp, Artificial Sequence
  source: /note="Description of Artificial Sequence: Synthetic oligonucleotide"
atggcgtcggggcagtcgctg

SEQ ID NO: 20469 - DNA, 21 bp, Artificial Sequence
  source: /note="Description of Artificial Sequence: Synthetic oligonucleotide"
atggcgtcgcatgttcctgtg

SEQ ID NO: 20470 - DNA, 21 bp, Artificial Sequence
  source: /note="Description of Artificial Sequence: Synthetic oligonucleotide"
atggcgtctccttattcgagt

SEQ ID NO: 20471 - DNA, 21 bp, Artificial Sequence
  source: /note="Description of Artificial Sequence: Synthetic oligonucleotide"
atggcttctcagattaggcct

SEQ ID NO: 20472 - DNA, 21 bp, Artificial Sequence
  source: /note="Description of Artificial Sequence: Synthetic oligonucleotide"
atggcgtcttcgtataatgat

SEQ ID NO: 20473 - DNA, 21 bp, Artificial Sequence
  source: /note="Description of Artificial Sequence: Synthetic oligonucleotide"
atggcttctactgagtcgcgt

SEQ ID NO: 20474 - DNA, 21 bp, Artificial Sequence
  source: /note="Description of Artificial Sequence: Synthetic oligonucleotide"
atggcgacggcgcctcttcat

SEQ ID NO: 20475 - DNA, 21 bp, Artificial Sequence
  source: /note="Description of Artificial Sequence: Synthetic oligonucleotide"
atggctactgatcggaggtat

SEQ ID NO: 20476 - DNA, 21 bp, Artificial Sequence
  source: /note="Description of Artificial Sequence: Synthetic oligonucleotide"
atggctactcatgtgatgggg

SEQ ID NO: 20477 - DNA, 21 bp, Artificial Sequence
  source: /note="Description of Artificial Sequence: Synthetic oligonucleotide"
atggctgttaaggttggtgag

SEQ ID NO: 20478 - DNA, 21 bp, Artificial Sequence
  source: /note="Description of Artificial Sequence: Synthetic oligonucleotide"
atggcgtatcagccgacgctg

SEQ ID NO: 20479 - DNA, 21 bp, Artificial Sequence
  source: /note="Description of Artificial Sequence: Synthetic oligonucleotide"
atggcgtatcagcagattcct

SEQ ID NO: 20480 - DNA, 21 bp, Artificial Sequence
  source: /note="Description of Artificial Sequence: Synthetic oligonucleotide"
atgtgtgattctgatcgtcct

SEQ ID NO: 20481 - DNA, 21 bp, Artificial Sequence
  source: /note="Description of Artificial Sequence: Synthetic oligonucleotide"
atggatgatagggcggggttt

SEQ ID NO: 20482 - DNA, 21 bp, Artificial Sequence
  source: /note="Description of Artificial Sequence: Synthetic oligonucleotide"
atggatgagcctgagccttct

SEQ ID NO: 20483 - DNA, 21 bp, Artificial Sequence
  source: /note="Description of Artificial Sequence: Synthetic oligonucleotide"
atggataagattcttacttct

SEQ ID NO: 20484 - DNA, 21 bp, Artificial Sequence
  source: /note="Description of Artificial Sequence: Synthetic oligonucleotide"
atggatttgactgggccggtg

SEQ ID NO: 20485 - DNA, 21 bp, Artificial Sequence
  source: /note="Description of Artificial Sequence: Synthetic oligonucleotide"
atggatatgggtggtagtcct

SEQ ID NO: 20486 - DNA, 21 bp, Artificial Sequence
  source: /note="Description of Artificial Sequence: Synthetic oligonucleotide"
atggataatttgaggcagtcg

SEQ ID NO: 20487 - DNA, 21 bp, Artificial Sequence
  source: /note="Description of Artificial Sequence: Synthetic oligonucleotide"
atggatcgggcgttgcatggg

SEQ ID NO: 20488 - DNA, 21 bp, Artificial Sequence
  source: /note="Description of Artificial Sequence: Synthetic oligonucleotide"
atggataggatgactttgatg

SEQ ID NO: 20489 - DNA, 21 bp, Artificial Sequence
  source: /note="Description of Artificial Sequence: Synthetic oligonucleotide"
atggatcgtaattttgtgatg

SEQ ID NO: 20490 - DNA, 21 bp, Artificial Sequence
  source: /note="Description of Artificial Sequence: Synthetic oligonucleotide"
atggatcggccttcgacttcg

SEQ ID NO: 20491 - DNA, 21 bp, Artificial Sequence
  source: /note="Description of Artificial Sequence: Synthetic oligonucleotide"
atggattcggctgattatgag

SEQ ID NO: 20492 - DNA, 21 bp, Artificial Sequence
  source: /note="Description of Artificial Sequence: Synthetic oligonucleotide"
atggattcgcttccgccgccg

SEQ ID NO: 20493 - DNA, 21 bp, Artificial Sequence
  source: /note="Description of Artificial Sequence: Synthetic oligonucleotide"
atggatagtaggacgcttctt

SEQ ID NO: 20494 - DNA, 21 bp, Artificial Sequence
  source: /note="Description of Artificial Sequence: Synthetic oligonucleotide"
atggatagtacttcgccgccg

SEQ ID NO: 20495 - DNA, 21 bp, Artificial Sequence
  source: /note="Description of Artificial Sequence: Synthetic oligonucleotide"
atggatgtttcgcatgggagt

SEQ ID NO: 20496 - DNA, 21 bp, Artificial Sequence
  source: /note="Description of Artificial Sequence: Synthetic oligonucleotide"
atggagtttggtacgacgcct

SEQ ID NO: 20497 - DNA, 21 bp, Artificial Sequence
  source: /note="Description of Artificial Sequence: Synthetic oligonucleotide"
atggagtttgtttcgacgttt

SEQ ID NO: 20498 - DNA, 21 bp, Artificial Sequence
  source: /note="Description of Artificial Sequence: Synthetic oligonucleotide"
atggagggttctggtcgtaat

SEQ ID NO: 20499 - DNA, 21 bp, Artificial Sequence
  source: /note="Description of Artificial Sequence: Synthetic oligonucleotide"
atggagattgagtcgctgaat

SEQ ID NO: 20500 - DNA, 21 bp, Artificial Sequence
  source: /note="Description of Artificial Sequence: Synthetic oligonucleotide"
atggagattacgcgtgcgcct

SEQ ID NO: 20501 - DNA, 21 bp, Artificial Sequence
  source: /note="Description of Artificial Sequence: Synthetic oligonucleotide"
atggagaaggctacgccgtct

SEQ ID NO: 20502 - DNA, 21 bp, Artificial Sequence
  source: /note="Description of Artificial Sequence: Synthetic oligonucleotide"
atggagaagctgaagcagaat

SEQ ID NO: 20503 - DNA, 21 bp, Artificial Sequence
  source: /note="Description of Artificial Sequence: Synthetic oligonucleotide"
atggagttgattgagggtcct

SEQ ID NO: 20504 - DNA, 21 bp, Artificial Sequence
  source: /note="Description of Artificial Sequence: Synthetic oligonucleotide"
atggagaatacgacgcggagt

SEQ ID NO: 20505 - DNA, 21 bp, Artificial Sequence
  source: /note="Description of Artificial Sequence: Synthetic oligonucleotide"
atggagccgaagcgttcttat

SEQ ID NO: 20506 - DNA, 21 bp, Artificial Sequence
  source: /note="Description of Artificial Sequence: Synthetic oligonucleotide"
atggagcctccgattaatccg

SEQ ID NO: 20507 - DNA, 21 bp, Artificial Sequence
  source: /note="Description of Artificial Sequence: Synthetic oligonucleotide"
atggagaggactctttgtaat

SEQ ID NO: 20508 - DNA, 21 bp, Artificial Sequence
  source: /note="Description of Artificial Sequence: Synthetic oligonucleotide"
atggagagtcttggtctggcg

SEQ ID NO: 20509 - DNA, 21 bp, Artificial Sequence
  source: /note="Description of Artificial Sequence: Synthetic oligonucleotide"
atggagtcgaatcattctcgt

SEQ ID NO: 20510 - DNA, 21 bp, Artificial Sequence
  source: /note="Description of Artificial Sequence: Synthetic oligonucleotide"
atggagagtcgtcctagttat

SEQ ID NO: 20511 - DNA, 21 bp, Artificial Sequence
  source: /note="Description of Artificial Sequence: Synthetic oligonucleotide"
atggagacgaagtctatttct

SEQ ID NO: 20512 - DNA, 21 bp, Artificial Sequence
  source: /note="Description of Artificial Sequence: Synthetic oligonucleotide"
atggagactaattggcctgcg

SEQ ID NO: 20513 - DNA, 21 bp, Artificial Sequence
  source: /note="Description of Artificial Sequence: Synthetic oligonucleotide"
atggagacgtcgcatcgtatg

SEQ ID NO: 20514 - DNA, 21 bp, Artificial Sequence
  source: /note="Description of Artificial Sequence: Synthetic oligonucleotide"
atgtttgggaatgctgagtat

SEQ ID NO: 20515 - DNA, 21 bp, Artificial Sequence
  source: /note="Description of Artificial Sequence: Synthetic oligonucleotide"
atgtttgggacgtcgcaggat

SEQ ID NO: 20516 - DNA, 21 bp, Artificial Sequence
  source: /note="Description of Artificial Sequence: Synthetic oligonucleotide"
atgtttctgaaggtgtcgcct

SEQ ID NO: 20517 - DNA, 21 bp, Artificial Sequence
  source: /note="Description of Artificial Sequence: Synthetic oligonucleotide"
atgtttcgggtggtttcggat

SEQ ID NO: 20518 - DNA, 21 bp, Artificial Sequence
  source: /note="Description of Artificial Sequence: Synthetic oligonucleotide"
atgttttcgtctactaagcct

SEQ ID NO: 20519 - DNA, 21 bp, Artificial Sequence
  source: /note="Description of Artificial Sequence: Synthetic oligonucleotide"
atgtttactgattctcgttct

SEQ ID NO: 20520 - DNA, 21 bp, Artificial Sequence
  source: /note="Description of Artificial Sequence: Synthetic oligonucleotide"
atgtttgtgaatgagctgaag

SEQ ID NO: 20521 - DNA, 21 bp, Artificial Sequence
  source: /note="Description of Artificial Sequence: Synthetic oligonucleotide"
atgggggctacgcatcctcgg

SEQ ID NO: 20522 - DNA, 21 bp, Artificial Sequence
  source: /note="Description of Artificial Sequence: Synthetic oligonucleotide"
atgggggatcgtagtcgtaat

SEQ ID NO: 20523 - DNA, 21 bp, Artificial Sequence
  source: /note="Description of Artificial Sequence: Synthetic oligonucleotide"
atgggtgattatactactaag

SEQ ID NO: 20524 - DNA, 21 bp, Artificial Sequence
  source: /note="Description of Artificial Sequence: Synthetic oligonucleotide"
atgggtgagaggcttttttct

SEQ ID NO: 20525 - DNA, 21 bp, Artificial Sequence
  source: /note="Description of Artificial Sequence: Synthetic oligonucleotide"
atgggtggtcatggtcgtact

SEQ ID NO: 20526 - DNA, 21 bp, Artificial Sequence
  source: /note="Description of Artificial Sequence: Synthetic oligonucleotide"
atgggtggtaattcgccgttt

SEQ ID NO: 20527 - DNA, 21 bp, Artificial Sequence
  source: /note="Description of Artificial Sequence: Synthetic oligonucleotide"
atggggggtacgagggggact

SEQ ID NO: 20528 - DNA, 21 bp, Artificial Sequence
  source: /note="Description of Artificial Sequence: Synthetic oligonucleotide"
atgggtggtacgtattgtcgt

SEQ ID NO: 20529 - DNA, 21 bp, Artificial Sequence
  source: /note="Description of Artificial Sequence: Synthetic oligonucleotide"
atggggcattcggatacgccg

SEQ ID NO: 20530 - DNA, 21 bp, Artificial Sequence
  source: /note="Description of Artificial Sequence: Synthetic oligonucleotide"
atgggtcatactcctagggag

SEQ ID NO: 20531 - DNA, 21 bp, Artificial Sequence
  source: /note="Description of Artificial Sequence: Synthetic oligonucleotide"
atgggtaagactgctgagcgt

SEQ ID NO: 20532 - DNA, 21 bp, Artificial Sequence
  source: /note="Description of Artificial Sequence: Synthetic oligonucleotide"
atgggtcttgggtcgtctaat

SEQ ID NO: 20533 - DNA, 21 bp, Artificial Sequence
  source: /note="Description of Artificial Sequence: Synthetic oligonucleotide"
atggggttgcggccggagggt

SEQ ID NO: 20534 - DNA, 21 bp, Artificial Sequence
  source: /note="Description of Artificial Sequence: Synthetic oligonucleotide"
atggggatgcatgggacgagt

SEQ ID NO: 20535 - DNA, 21 bp, Artificial Sequence
  source: /note="Description of Artificial Sequence: Synthetic oligonucleotide"
atgggtaatcatgcgggttcg

SEQ ID NO: 20536 - DNA, 21 bp, Artificial Sequence
  source: /note="Description of Artificial Sequence: Synthetic oligonucleotide"
atggggaattcgcttaagcag

SEQ ID NO: 20537 - DNA, 21 bp, Artificial Sequence
  source: /note="Description of Artificial Sequence: Synthetic oligonucleotide"
atggggccggatggttcgatt

SEQ ID NO: 20538 - DNA, 21 bp, Artificial Sequence
  source: /note="Description of Artificial Sequence: Synthetic oligonucleotide"
atgggtccgattacgcctcag

SEQ ID NO: 20539 - DNA, 21 bp, Artificial Sequence
  source: /note="Description of Artificial Sequence: Synthetic oligonucleotide"
atggggcagaatatggcgttg

SEQ ID NO: 20540 - DNA, 21 bp, Artificial Sequence
  source: /note="Description of Artificial Sequence: Synthetic oligonucleotide"
atggggcgtgatgagcctggt

SEQ ID NO: 20541 - DNA, 21 bp, Artificial Sequence
  source: /note="Description of Artificial Sequence: Synthetic oligonucleotide"
atgggtagtggttatactatg

SEQ ID NO: 20542 - DNA, 21 bp, Artificial Sequence
  source: /note="Description of Artificial Sequence: Synthetic oligonucleotide"
atgggttctacgattgctttg

SEQ ID NO: 20543 - DNA, 21 bp, Artificial Sequence
  source: /note="Description of Artificial Sequence: Synthetic oligonucleotide"
atgggttctgttcataatctg

SEQ ID NO: 20544 - DNA, 21 bp, Artificial Sequence
  source: /note="Description of Artificial Sequence: Synthetic oligonucleotide"
atggggagtgttattggtact

SEQ ID NO: 20545 - DNA, 21 bp, Artificial Sequence
  source: /note="Description of Artificial Sequence: Synthetic oligonucleotide"
atgggtacgacgcatacttct

SEQ ID NO: 20546 - DNA, 21 bp, Artificial Sequence
  source: /note="Description of Artificial Sequence: Synthetic oligonucleotide"
atgggtactactcctacgctt

SEQ ID NO: 20547 - DNA, 21 bp, Artificial Sequence
  source: /note="Description of Artificial Sequence: Synthetic oligonucleotide"
atgggtgtgcggaatgcggcg

SEQ ID NO: 20548 - DNA, 21 bp, Artificial Sequence
  source: /note="Description of Artificial Sequence: Synthetic oligonucleotide"
atgggttatcttacgggtgag

SEQ ID NO: 20549 - DNA, 21 bp, Artificial Sequence
  source: /note="Description of Artificial Sequence: Synthetic oligonucleotide"
atgcatgatgctgataagccg

SEQ ID NO: 20550 - DNA, 21 bp, Artificial Sequence
  source: /note="Description of Artificial Sequence: Synthetic oligonucleotide"
atgcatgattttcctgagctt

SEQ ID NO: 20551 - DNA, 21 bp, Artificial Sequence
  source: /note="Description of Artificial Sequence: Synthetic oligonucleotide"
atgcatgatagtccgcaggct

SEQ ID NO: 20552 - DNA, 21 bp, Artificial Sequence
  source: /note="Description of Artificial Sequence: Synthetic oligonucleotide"
atgcatgagtctctgtatccg

SEQ ID NO: 20553 - DNA, 21 bp, Artificial Sequence
  source: /note="Description of Artificial Sequence: Synthetic oligonucleotide"
atgcatttttcggctgagccg

SEQ ID NO: 20554 - DNA, 21 bp, Artificial Sequence
  source: /note="Description of Artificial Sequence: Synthetic oligonucleotide"
atgcatcatgcgacggcgccg

SEQ ID NO: 20555 - DNA, 21 bp, Artificial Sequence
  source: /note="Description of Artificial Sequence: Synthetic oligonucleotide"
atgcatcctgcgcctctgcgg

SEQ ID NO: 20556 - DNA, 21 bp, Artificial Sequence
  source: /note="Description of Artificial Sequence: Synthetic oligonucleotide"
atgcatcctggtggtgggtct

SEQ ID NO: 20557 - DNA, 21 bp, Artificial Sequence
  source: /note="Description of Artificial Sequence: Synthetic oligonucleotide"
atgcatcagcgggatggtgct

SEQ ID NO: 20558 - DNA, 21 bp, Artificial Sequence
  source: /note="Description of Artificial Sequence: Synthetic oligonucleotide"
atgcatcagacttcgatgggg

SEQ ID NO: 20559 - DNA, 21 bp, Artificial Sequence
  source: /note="Description of Artificial Sequence: Synthetic oligonucleotide"
atgcattctaagggtgcgaat

SEQ ID NO: 20560 - DNA, 21 bp, Artificial Sequence
  source: /note="Description of Artificial Sequence: Synthetic oligonucleotide"
atgcatagtccgcagactcat

SEQ ID NO: 20561 - DNA, 21 bp, Artificial Sequence
  source: /note="Description of Artificial Sequence: Synthetic oligonucleotide"
atgcattcttctcctctggat

SEQ ID NO: 20562 - DNA, 21 bp, Artificial Sequence
  source: /note="Description of Artificial Sequence: Synthetic oligonucleotide"
atgcattctactgttcctgcg

SEQ ID NO: 20563 - DNA, 21 bp, Artificial Sequence
  source: /note="Description of Artificial Sequence: Synthetic oligonucleotide"
atgattgatcgtgttcgtact

SEQ ID NO: 20564 - DNA, 21 bp, Artificial Sequence
  source: /note="Description of Artificial Sequence: Synthetic oligonucleotide"
atgattgagattaaggagctt

SEQ ID NO: 20565 - DNA, 21 bp, Artificial Sequence
  source: /note="Description of Artificial Sequence: Synthetic oligonucleotide"
atgattgaggtgctgccgtcg

SEQ ID NO: 20566 - DNA, 21 bp, Artificial Sequence
  source: /note="Description of Artificial Sequence: Synthetic oligonucleotide"
atgattggtgatgctccggct

SEQ ID NO: 20567 - DNA, 21 bp, Artificial Sequence
  source: /note="Description of Artificial Sequence: Synthetic oligonucleotide"
atgattggtaagagtacggat

SEQ ID NO: 20568 - DNA, 21 bp, Artificial Sequence
  source: /note="Description of Artificial Sequence: Synthetic oligonucleotide"
atgattaagaaggattatgcg

SEQ ID NO: 20569 - DNA, 21 bp, Artificial Sequence
  source: /note="Description of Artificial Sequence: Synthetic oligonucleotide"
atgattaagacgaatagtgtt

SEQ ID NO: 20570 - DNA, 21 bp, Artificial Sequence
  source: /note="Description of Artificial Sequence: Synthetic oligonucleotide"
atgattaatgctaatacgaat

SEQ ID NO: 20571 - DNA, 21 bp, Artificial Sequence
  source: /note="Description of Artificial Sequence: Synthetic oligonucleotide"
atgattcctgttaggccggat

SEQ ID NO: 20572 - DNA, 21 bp, Artificial Sequence
  source: /note="Description of Artificial Sequence: Synthetic oligonucleotide"
atgatttctgagccgttgact

SEQ ID NO: 20573 - DNA, 21 bp, Artificial Sequence
  source: /note="Description of Artificial Sequence: Synthetic oligonucleotide"
atgattagtggtcggacgact

SEQ ID NO: 20574 - DNA, 21 bp, Artificial Sequence
  source: /note="Description of Artificial Sequence: Synthetic oligonucleotide"
atgatttcgcatcagcctccg

SEQ ID NO: 20575 - DNA, 21 bp, Artificial Sequence
  source: /note="Description of Artificial Sequence: Synthetic oligonucleotide"
atgatttctattcagcagacg

SEQ ID NO: 20576 - DNA, 21 bp, Artificial Sequence
  source: /note="Description of Artificial Sequence: Synthetic oligonucleotide"
atgattagttctatgttgggg

SEQ ID NO: 20577 - DNA, 21 bp, Artificial Sequence
  source: /note="Description of Artificial Sequence: Synthetic oligonucleotide"
atgattgttactactcctgag

SEQ ID NO: 20578 - DNA, 21 bp, Artificial Sequence
  source: /note="Description of Artificial Sequence: Synthetic oligonucleotide"
atgaaggcggcggttagggag

SEQ ID NO: 20579 - DNA, 21 bp, Artificial Sequence
  source: /note="Description of Artificial Sequence: Synthetic oligonucleotide"
atgaaggcggatccggagtgg

SEQ ID NO: 20580 - DNA, 21 bp, Artificial Sequence
  source: /note="Description of Artificial Sequence: Synthetic oligonucleotide"
atgaaggataataatgttact

SEQ ID NO: 20581 - DNA, 21 bp, Artificial Sequence
  source: /note="Description of Artificial Sequence: Synthetic oligonucleotide"
atgaagcatgctgcgcagctg

SEQ ID NO: 20582 - DNA, 21 bp, Artificial Sequence
  source: /note="Description of Artificial Sequence: Synthetic oligonucleotide"
atgaagcatcctcagtataat

SEQ ID NO: 20583 - DNA, 21 bp, Artificial Sequence
  source: /note="Description of Artificial Sequence: Synthetic oligonucleotide"
atgaagatgaatcggaatgag

SEQ ID NO: 20584 - DNA, 21 bp, Artificial Sequence
  source: /note="Description of Artificial Sequence: Synthetic oligonucleotide"
atgaagccgggtttgcctatg

SEQ ID NO: 20585 - DNA, 21 bp, Artificial Sequence
  source: /note="Description of Artificial Sequence: Synthetic oligonucleotide"
atgaagccgcttgctgcgtct

SEQ ID NO: 20586 - DNA, 21 bp, Artificial Sequence
  source: /note="Description of Artificial Sequence: Synthetic oligonucleotide"
atgaagcctacgagtcaggtt

SEQ ID NO: 20587 - DNA, 21 bp, Artificial Sequence
  source: /note="Description of Artificial Sequence: Synthetic oligonucleotide"
atgaagagtgggctgacgatg

SEQ ID NO: 20588 - DNA, 21 bp, Artificial Sequence
  source: /note="Description of Artificial Sequence: Synthetic oligonucleotide"
atgaagagtattattccgtcg

SEQ ID NO: 20589 - DNA, 21 bp, Artificial Sequence
  source: /note="Description of Artificial Sequence: Synthetic oligonucleotide"
atgaagagtccttatgggctg

SEQ ID NO: 20590 - DNA, 21 bp, Artificial Sequence
  source: /note="Description of Artificial Sequence: Synthetic oligonucleotide"
atgaagtcgcagtcggatcct

SEQ ID NO: 20591 - DNA, 21 bp, Artificial Sequence
  source: /note="Description of Artificial Sequence: Synthetic oligonucleotide"
atgaagtcttctgagtcgcgt

SEQ ID NO: 20592 - DNA, 21 bp, Artificial Sequence
  source: /note="Description of Artificial Sequence: Synthetic oligonucleotide"
atgaagactgagcttcctgcg

SEQ ID NO: 20593 - DNA, 21 bp, Artificial Sequence
  source: /note="Description of Artificial Sequence: Synthetic oligonucleotide"
atgaagacgcctcctcagagt

SEQ ID NO: 20594 - DNA, 21 bp, Artificial Sequence
  source: /note="Description of Artificial Sequence: Synthetic oligonucleotide"
atgaagtgggatggtaaggcg

SEQ ID NO: 20595 - DNA, 21 bp, Artificial Sequence
  source: /note="Description of Artificial Sequence: Synthetic oligonucleotide"
atgaagtattcggatattggg

SEQ ID NO: 20596 - DNA, 21 bp, Artificial Sequence
  source: /note="Description of Artificial Sequence: Synthetic oligonucleotide"
atgcttgatgatattaatgag

SEQ ID NO: 20597 - DNA, 21 bp, Artificial Sequence
  source: /note="Description of Artificial Sequence: Synthetic oligonucleotide"
atgctggatactactaagcgg

SEQ ID NO: 20598 - DNA, 21 bp, Artificial Sequence
  source: /note="Description of Artificial Sequence: Synthetic oligonucleotide"
atgcttgagatgaatcagact

SEQ ID NO: 20599 - DNA, 21 bp, Artificial Sequence
  source: /note="Description of Artificial Sequence: Synthetic oligonucleotide"
atgctggggcatctgacggct

SEQ ID NO: 20600 - DNA, 21 bp, Artificial Sequence
  source: /note="Description of Artificial Sequence: Synthetic oligonucleotide"
atgcttggtcttagtcatacg

SEQ ID NO: 20601 - DNA, 21 bp, Artificial Sequence
  source: /note="Description of Artificial Sequence: Synthetic oligonucleotide"
atgctgcatccgactgcgacg

SEQ ID NO: 20602 - DNA, 21 bp, Artificial Sequence
  source: /note="Description of Artificial Sequence: Synthetic oligonucleotide"
atgcttcatagtagtggggcg

SEQ ID NO: 20603 - DNA, 21 bp, Artificial Sequence
  source: /note="Description of Artificial Sequence: Synthetic oligonucleotide"
atgcttaagtatacggagcat

SEQ ID NO: 20604 - DNA, 21 bp, Artificial Sequence
  source: /note="Description of Artificial Sequence: Synthetic oligonucleotide"
atgctgttgcctactactaag

SEQ ID NO: 20605 - DNA, 21 bp, Artificial Sequence
  source: /note="Description of Artificial Sequence: Synthetic oligonucleotide"
atgttgccggattctaatgct

SEQ ID NO: 20606 - DNA, 21 bp, Artificial Sequence
  source: /note="Description of Artificial Sequence: Synthetic oligonucleotide"
atgctgccgtttgatactgat

SEQ ID NO: 20607 - DNA, 21 bp, Artificial Sequence
  source: /note="Description of Artificial Sequence: Synthetic oligonucleotide"
atgttgccgggggattcggct

SEQ ID NO: 20608 - DNA, 21 bp, Artificial Sequence
  source: /note="Description of Artificial Sequence: Synthetic oligonucleotide"
atgcttcctgggactcctcat

SEQ ID NO: 20609 - DNA, 21 bp, Artificial Sequence
  source: /note="Description of Artificial Sequence: Synthetic oligonucleotide"
atgttgcaggggcagttgagt

SEQ ID NO: 20610 - DNA, 21 bp, Artificial Sequence
  source: /note="Description of Artificial Sequence: Synthetic oligonucleotide"
atgttgcagaatgggcagcgt

SEQ ID NO: 20611 - DNA, 21 bp, Artificial Sequence
  source: /note="Description of Artificial Sequence: Synthetic oligonucleotide"
atgttgcggattgcgggtgat

SEQ ID NO: 20612 - DNA, 21 bp, Artificial Sequence
  source: /note="Description of Artificial Sequence: Synthetic oligonucleotide"
atgttgcggcagggtcttcag

SEQ ID NO: 20613 - DNA, 21 bp, Artificial Sequence
  source: /note="Description of Artificial Sequence: Synthetic oligonucleotide"
atgcttaggacgtcgcaggat

SEQ ID NO: 20614 - DNA, 21 bp, Artificial Sequence
  source: /note="Description of Artificial Sequence: Synthetic oligonucleotide"
atgctttctggtgagatgcat

SEQ ID NO: 20615 - DNA, 21 bp, Artificial Sequence
  source: /note="Description of Artificial Sequence: Synthetic oligonucleotide"
atgctttctaatgaggttatt

SEQ ID NO: 20616 - DNA, 21 bp, Artificial Sequence
  source: /note="Description of Artificial Sequence: Synthetic oligonucleotide"
atgcttagtcgtgatgatcag

SEQ ID NO: 20617 - DNA, 21 bp, Artificial Sequence
  source: /note="Description of Artificial Sequence: Synthetic oligonucleotide"
atgctgtctaggcttgcgcag

SEQ ID NO: 20618 - DNA, 21 bp, Artificial Sequence
  source: /note="Description of Artificial Sequence: Synthetic oligonucleotide"
atgatggatcggattgagggg

SEQ ID NO: 20619 - DNA, 21 bp, Artificial Sequence
  source: /note="Description of Artificial Sequence: Synthetic oligonucleotide"
atgatggagttgcagcttcct

SEQ ID NO: 20620 - DNA, 21 bp, Artificial Sequence
  source: /note="Description of Artificial Sequence: Synthetic oligonucleotide"
atgatggggaattctaagggg

SEQ ID NO: 20621 - DNA, 21 bp, Artificial Sequence
  source: /note="Description of Artificial Sequence: Synthetic oligonucleotide"
atgatgcatgcgggtgctcag

SEQ ID NO: 20622 - DNA, 21 bp, Artificial Sequence
  source: /note="Description of Artificial Sequence: Synthetic oligonucleotide"
atgatgcatcaggaggatagt

SEQ ID NO: 20623 - DNA, 21 bp, Artificial Sequence
  source: /note="Description of Artificial Sequence: Synthetic oligonucleotide"
atgatgaatatgaggggtggg

SEQ ID NO: 20624 - DNA, 21 bp, Artificial Sequence
  source: /note="Description of Artificial Sequence: Synthetic oligonucleotide"
atgatgccgcaggagattgtg

SEQ ID NO: 20625 - DNA, 21 bp, Artificial Sequence
  source: /note="Description of Artificial Sequence: Synthetic oligonucleotide"
atgatgtcggataatgcgaag

SEQ ID NO: 20626 - DNA, 21 bp, Artificial Sequence
  source: /note="Description of Artificial Sequence: Synthetic oligonucleotide"
atgatgactgattctcagcgt

SEQ ID NO: 20627 - DNA, 21 bp, Artificial Sequence
  source: /note="Description of Artificial Sequence: Synthetic oligonucleotide"
atgatgacgggggcgtcggat

SEQ ID NO: 20628 - DNA, 21 bp, Artificial Sequence
  source: /note="Description of Artificial Sequence: Synthetic oligonucleotide"
atgatgacgaagactggtact

SEQ ID NO: 20629 - DNA, 21 bp, Artificial Sequence
  source: /note="Description of Artificial Sequence: Synthetic oligonucleotide"
atgatgacgtctgctgggcct

SEQ ID NO: 20630 - DNA, 21 bp, Artificial Sequence
  source: /note="Description of Artificial Sequence: Synthetic oligonucleotide"
atgaatgcgtttaagcaggag

SEQ ID NO: 20631 - DNA, 21 bp, Artificial Sequence
  source: /note="Description of Artificial Sequence: Synthetic oligonucleotide"
atgaatgcgaagtgttgtagt

SEQ ID NO: 20632 - DNA, 21 bp, Artificial Sequence
  source: /note="Description of Artificial Sequence: Synthetic oligonucleotide"
atgaatgcgcggttgattgat

SEQ ID NO: 20633 - DNA, 21 bp, Artificial Sequence
  source: /note="Description of Artificial Sequence: Synthetic oligonucleotide"
atgaatgcttcggcgaatagt

SEQ ID NO: 20634 - DNA, 21 bp, Artificial Sequence
  source: /note="Description of Artificial Sequence: Synthetic oligonucleotide"
atgaatgcgtctacgatgatt

SEQ ID NO: 20635 - DNA, 21 bp, Artificial Sequence
  source: /note="Description of Artificial Sequence: Synthetic oligonucleotide"
atgaatggtagtcttcctatg

SEQ ID NO: 20636 - DNA, 21 bp, Artificial Sequence
  source: /note="Description of Artificial Sequence: Synthetic oligonucleotide"
atgaatgggagtcgtcagatg

SEQ ID NO: 20637 - DNA, 21 bp, Artificial Sequence
  source: /note="Description of Artificial Sequence: Synthetic oligonucleotide"
atgaatcatggtgcgaattat

SEQ ID NO: 20638 - DNA, 21 bp, Artificial Sequence
  source: /note="Description of Artificial Sequence: Synthetic oligonucleotide"
atgaataaggcttcgtttgct

SEQ ID NO: 20639 - DNA, 21 bp, Artificial Sequence
  source: /note="Description of Artificial Sequence: Synthetic oligonucleotide"
atgaataagggtacggttgcg

SEQ ID NO: 20640 - DNA, 21 bp, Artificial Sequence
  source: /note="Description of Artificial Sequence: Synthetic oligonucleotide"
atgaataagcttaaggttgag

SEQ ID NO: 20641 - DNA, 21 bp, Artificial Sequence
  source: /note="Description of Artificial Sequence: Synthetic oligonucleotide"
atgaatttgcataatcctgct

SEQ ID NO: 20642 - DNA, 21 bp, Artificial Sequence
  source: /note="Description of Artificial Sequence: Synthetic oligonucleotide"
atgaatcttaagcttagtccg

SEQ ID NO: 20643 - DNA, 21 bp, Artificial Sequence
  source: /note="Description of Artificial Sequence: Synthetic oligonucleotide"
atgaatttgcggatggctccg

SEQ ID NO: 20644 - DNA, 21 bp, Artificial Sequence
  source: /note="Description of Artificial Sequence: Synthetic oligonucleotide"
atgaatctgtctacgaagcct

SEQ ID NO: 20645 - DNA, 21 bp, Artificial Sequence
  source: /note="Description of Artificial Sequence: Synthetic oligonucleotide"
atgaataatctttctgggcgg

SEQ ID NO: 20646 - DNA, 21 bp, Artificial Sequence
  source: /note="Description of Artificial Sequence: Synthetic oligonucleotide"
atgaatccgatttcgaagtgt

SEQ ID NO: 20647 - DNA, 21 bp, Artificial Sequence
  source: /note="Description of Artificial Sequence: Synthetic oligonucleotide"
atgaatcctcttccgtatcct

SEQ ID NO: 20648 - DNA, 21 bp, Artificial Sequence
  source: /note="Description of Artificial Sequence: Synthetic oligonucleotide"
atgaatccttctgttgagctt

SEQ ID NO: 20649 - DNA, 21 bp, Artificial Sequence
  source: /note="Description of Artificial Sequence: Synthetic oligonucleotide"
atgaatcagacgaagccttat

SEQ ID NO: 20650 - DNA, 21 bp, Artificial Sequence
  source: /note="Description of Artificial Sequence: Synthetic oligonucleotide"
atgaatcaggtgaggagtctt

SEQ ID NO: 20651 - DNA, 21 bp, Artificial Sequence
  source: /note="Description of Artificial Sequence: Synthetic oligonucleotide"
atgaatcggattgttatgtct

SEQ ID NO: 20652 - DNA, 21 bp, Artificial Sequence
  source: /note="Description of Artificial Sequence: Synthetic oligonucleotide"
atgaatagtggttgtgaggat

SEQ ID NO: 20653 - DNA, 21 bp, Artificial Sequence
  source: /note="Description of Artificial Sequence: Synthetic oligonucleotide"
atgaattctggtatgccgttt

SEQ ID NO: 20654 - DNA, 21 bp, Artificial Sequence
  source: /note="Description of Artificial Sequence: Synthetic oligonucleotide"
atgaattctaagggtgagccg

SEQ ID NO: 20655 - DNA, 21 bp, Artificial Sequence
  source: /note="Description of Artificial Sequence: Synthetic oligonucleotide"
atgaatagtaagatgtatcct

SEQ ID NO: 20656 - DNA, 21 bp, Artificial Sequence
  source: /note="Description of Artificial Sequence: Synthetic oligonucleotide"
atgaattctcttcctcgttcg

SEQ ID NO: 20657 - DNA, 21 bp, Artificial Sequence
  source: /note="Description of Artificial Sequence: Synthetic oligonucleotide"
atgaattctcgtaatgggtat

SEQ ID NO: 20658 - DNA, 21 bp, Artificial Sequence
  source: /note="Description of Artificial Sequence: Synthetic oligonucleotide"
atgaattctacgttggctgct

SEQ ID NO: 20659 - DNA, 21 bp, Artificial Sequence
  source: /note="Description of Artificial Sequence: Synthetic oligonucleotide"
atgaattctacgactacgcct

SEQ ID NO: 20660 - DNA, 21 bp, Artificial Sequence
  source: /note="Description of Artificial Sequence: Synthetic oligonucleotide"
atgaatactaagacgtttccg

SEQ ID NO: 20661 - DNA, 21 bp, Artificial Sequence
  source: /note="Description of Artificial Sequence: Synthetic oligonucleotide"
atgaatacttcggtggtgtat

SEQ ID NO: 20662 - DNA, 21 bp, Artificial Sequence
  source: /note="Description of Artificial Sequence: Synthetic oligonucleotide"
atgaatgttgttgggcagtct

SEQ ID NO: 20663 - DNA, 21 bp, Artificial Sequence
  source: /note="Description of Artificial Sequence: Synthetic oligonucleotide"
atgccggctcatgttctgcct

SEQ ID NO: 20664 - DNA, 21 bp, Artificial Sequence
  source: /note="Description of Artificial Sequence: Synthetic oligonucleotide"
atgccggcgtcttcggtttcg

SEQ ID NO: 20665 - DNA, 21 bp, Artificial Sequence
  source: /note="Description of Artificial Sequence: Synthetic oligonucleotide"
atgcctgctacgtttacggat

SEQ ID NO: 20666 - DNA, 21 bp, Artificial Sequence
  source: /note="Description of Artificial Sequence: Synthetic oligonucleotide"
atgcctgatgctaagatttcg

SEQ ID NO: 20667 - DNA, 21 bp, Artificial Sequence
  source: /note="Description of Artificial Sequence: Synthetic oligonucleotide"
atgcctgatcatcctcttcgg

SEQ ID NO: 20668 - DNA, 21 bp, Artificial Sequence
  source: /note="Description of Artificial Sequence: Synthetic oligonucleotide"
atgccggagagtatgaatacg

SEQ ID NO: 20669 - DNA, 21 bp, Artificial Sequence
  source: /note="Description of Artificial Sequence: Synthetic oligonucleotide"
atgccttttaatgataatgtt

SEQ ID NO: 20670 - DNA, 21 bp, Artificial Sequence
  source: /note="Description of Artificial Sequence: Synthetic oligonucleotide"
atgccgcatgggagttttgct

SEQ ID NO: 20671 - DNA, 21 bp, Artificial Sequence
  source: /note="Description of Artificial Sequence: Synthetic oligonucleotide"
atgccgcatttggagatgaat

SEQ ID NO: 20672 - DNA, 21 bp, Artificial Sequence
  source: /note="Description of Artificial Sequence: Synthetic oligonucleotide"
atgcctcatcttattacgagt

SEQ ID NO: 20673 - DNA, 21 bp, Artificial Sequence
  source: /note="Description of Artificial Sequence: Synthetic oligonucleotide"
atgcctcatatgggtctgacg

SEQ ID NO: 20674 - DNA, 21 bp, Artificial Sequence
  source: /note="Description of Artificial Sequence: Synthetic oligonucleotide"
atgccgatttcgccgttggcg

SEQ ID NO: 20675 - DNA, 21 bp, Artificial Sequence
  source: /note="Description of Artificial Sequence: Synthetic oligonucleotide"
atgccgattgttcgtattagt

SEQ ID NO: 20676 - DNA, 21 bp, Artificial Sequence
  source: /note="Description of Artificial Sequence: Synthetic oligonucleotide"
atgcctaagcaggagttgatt

SEQ ID NO: 20677 - DNA, 21 bp, Artificial Sequence
  source: /note="Description of Artificial Sequence: Synthetic oligonucleotide"
atgcctttggatagtgtggcg

SEQ ID NO: 20678 - DNA, 21 bp, Artificial Sequence
  source: /note="Description of Artificial Sequence: Synthetic oligonucleotide"
atgccgcttggtggtgcgtat

SEQ ID NO: 20679 - DNA, 21 bp, Artificial Sequence
  source: /note="Description of Artificial Sequence: Synthetic oligonucleotide"
atgcctttgcggaatactatg

SEQ ID NO: 20680 - DNA, 21 bp, Artificial Sequence
  source: /note="Description of Artificial Sequence: Synthetic oligonucleotide"
atgccgcttagtaatagttcg

SEQ ID NO: 20681 - DNA, 21 bp, Artificial Sequence
  source: /note="Description of Artificial Sequence: Synthetic oligonucleotide"
atgccgatgggggatccgatt

SEQ ID NO: 20682 - DNA, 21 bp, Artificial Sequence
  source: /note="Description of Artificial Sequence: Synthetic oligonucleotide"
atgcctatgatgctgcgtctt

SEQ ID NO: 20683 - DNA, 21 bp, Artificial Sequence
  source: /note="Description of Artificial Sequence: Synthetic oligonucleotide"
atgcctatgaatcggactcct

SEQ ID NO: 20684 - DNA, 21 bp, Artificial Sequence
  source: /note="Description of Artificial Sequence: Synthetic oligonucleotide"
atgccgatgcgtgctaatggg

SEQ ID NO: 20685 - DNA, 21 bp, Artificial Sequence
  source: /note="Description of Artificial Sequence: Synthetic oligonucleotide"
atgccgaatgttcctcctacg

SEQ ID NO: 20686 - DNA, 21 bp, Artificial Sequence
  source: /note="Description of Artificial Sequence: Synthetic oligonucleotide"
atgccgcctgctcttctgacg

SEQ ID NO: 20687 - DNA, 21 bp, Artificial Sequence
  source: /note="Description of Artificial Sequence: Synthetic oligonucleotide"
atgccgcctgaggttcctgtt

SEQ ID NO: 20688 - DNA, 21 bp, Artificial Sequence
  source: /note="Description of Artificial Sequence: Synthetic oligonucleotide"
atgcctccgccgaatcttaat

SEQ ID NO: 20689 - DNA, 21 bp, Artificial Sequence
  source: /note="Description of Artificial Sequence: Synthetic oligonucleotide"
atgcctccgcagaatgcgatg

SEQ ID NO: 20690 - DNA, 21 bp, Artificial Sequence
  source: /note="Description of Artificial Sequence: Synthetic oligonucleotide"
atgcctccttcgaatcggcct

SEQ ID NO: 20691 - DNA, 21 bp, Artificial Sequence
  source: /note="Description of Artificial Sequence: Synthetic oligonucleotide"
atgcctccttctacgtatgcg

SEQ ID NO: 20692 - DNA, 21 bp, Artificial Sequence
  source: /note="Description of Artificial Sequence: Synthetic oligonucleotide"
atgcctcagttgcatgagact

SEQ ID NO: 20693 - DNA, 21 bp, Artificial Sequence
  source: /note="Description of Artificial Sequence: Synthetic oligonucleotide"
atgccgcagtcgcgtgatgag

SEQ ID NO: 20694 - DNA, 21 bp, Artificial Sequence
  source: /note="Description of Artificial Sequence: Synthetic oligonucleotide"
atgcctagggatgcgtatggt

SEQ ID NO: 20695 - DNA, 21 bp, Artificial Sequence
  source: /note="Description of Artificial Sequence: Synthetic oligonucleotide"
atgccgcgtggggagattccg

SEQ ID NO: 20696 - DNA, 21 bp, Artificial Sequence
  source: /note="Description of Artificial Sequence: Synthetic oligonucleotide"
atgccgaggaatggtccgcct

SEQ ID NO: 20697 - DNA, 21 bp, Artificial Sequence
  source: /note="Description of Artificial Sequence: Synthetic oligonucleotide"
atgcctcgtgtggcgtctaat

SEQ ID NO: 20698 - DNA, 21 bp, Artificial Sequence
  source: /note="Description of Artificial Sequence: Synthetic oligonucleotide"
atgcctagtgcttctgaggtt

SEQ ID NO: 20699 - DNA, 21 bp, Artificial Sequence
  source: /note="Description of Artificial Sequence: Synthetic oligonucleotide"
atgccttcgggtagggttcat

SEQ ID NO: 20700 - DNA, 21 bp, Artificial Sequence
  source: /note="Description of Artificial Sequence: Synthetic oligonucleotide"
atgccgtcgggtcgtgttcct

SEQ ID NO: 20701 - DNA, 21 bp, Artificial Sequence
  source: /note="Description of Artificial Sequence: Synthetic oligonucleotide"
atgccgtcgatttctctgcct

SEQ ID NO: 20702 - DNA, 21 bp, Artificial Sequence
  source: /note="Description of Artificial Sequence: Synthetic oligonucleotide"
atgccgtctaatagtatttct

SEQ ID NO: 20703 - DNA, 21 bp, Artificial Sequence
  source: /note="Description of Artificial Sequence: Synthetic oligonucleotide"
atgccgtctccggaggtgtat

SEQ ID NO: 20704 - DNA, 21 bp, Artificial Sequence
  source: /note="Description of Artificial Sequence: Synthetic oligonucleotide"
atgcctacggatcctaagatg

SEQ ID NO: 20705 - DNA, 21 bp, Artificial Sequence
  source: /note="Description of Artificial Sequence: Synthetic oligonucleotide"
atgccgacgggtactgatctt

SEQ ID NO: 20706 - DNA, 21 bp, Artificial Sequence
  source: /note="Description of Artificial Sequence: Synthetic oligonucleotide"
atgcctacgcctcggactggt

SEQ ID NO: 20707 - DNA, 21 bp, Artificial Sequence
  source: /note="Description of Artificial Sequence: Synthetic oligonucleotide"
atgcctacgtctgggcctccg

SEQ ID NO: 20708 - DNA, 21 bp, Artificial Sequence
  source: /note="Description of Artificial Sequence: Synthetic oligonucleotide"
atgcctacttatgataagcgt

SEQ ID NO: 20709 - DNA, 21 bp, Artificial Sequence
  source: /note="Description of Artificial Sequence: Synthetic oligonucleotide"
atgcctgtgccggagaggcct

SEQ ID NO: 20710 - DNA, 21 bp, Artificial Sequence
  source: /note="Description of Artificial Sequence: Synthetic oligonucleotide"
atgccggtgagtggtcatgtt

SEQ ID NO: 20711 - DNA, 21 bp, Artificial Sequence
  source: /note="Description of Artificial Sequence: Synthetic oligonucleotide"
atgcctgtgtcgcgtctggag

SEQ ID NO: 20712 - DNA, 21 bp, Artificial Sequence
  source: /note="Description of Artificial Sequence: Synthetic oligonucleotide"
atgcctgttagtagtactcgt

SEQ ID NO: 20713 - DNA, 21 bp, Artificial Sequence
  source: /note="Description of Artificial Sequence: Synthetic oligonucleotide"
atgccgtggaaggatgcggct

SEQ ID NO: 20714 - DNA, 21 bp, Artificial Sequence
  source: /note="Description of Artificial Sequence: Synthetic oligonucleotide"
atgcaggcggcttcttctcct

SEQ ID NO: 20715 - DNA, 21 bp, Artificial Sequence
  source: /note="Description of Artificial Sequence: Synthetic oligonucleotide"
atgcaggctggtagtatgcgt

SEQ ID NO: 20716 - DNA, 21 bp, Artificial Sequence
  source: /note="Description of Artificial Sequence: Synthetic oligonucleotide"
atgcaggctagtcattctccg

SEQ ID NO: 20717 - DNA, 21 bp, Artificial Sequence
  source: /note="Description of Artificial Sequence: Synthetic oligonucleotide"
atgcaggatgggtatacgaat

SEQ ID NO: 20718 - DNA, 21 bp, Artificial Sequence
  source: /note="Description of Artificial Sequence: Synthetic oligonucleotide"
atgcaggggaagttgttggct

SEQ ID NO: 20719 - DNA, 21 bp, Artificial Sequence
  source: /note="Description of Artificial Sequence: Synthetic oligonucleotide"
atgcagcatggtgctcatcct

SEQ ID NO: 20720 - DNA, 21 bp, Artificial Sequence
  source: /note="Description of Artificial Sequence: Synthetic oligonucleotide"
atgcagcttgagcattctcct

SEQ ID NO: 20721 - DNA, 21 bp, Artificial Sequence
  source: /note="Description of Artificial Sequence: Synthetic oligonucleotide"
atgcagcttggtaatgtttcg

SEQ ID NO: 20722 - DNA, 21 bp, Artificial Sequence
  source: /note="Description of Artificial Sequence: Synthetic oligonucleotide"
atgcagcttggtcctgtgatg

SEQ ID NO: 20723 - DNA, 21 bp, Artificial Sequence
  source: /note="Description of Artificial Sequence: Synthetic oligonucleotide"
atgcagaatatgcctccgccg

SEQ ID NO: 20724 - DNA, 21 bp, Artificial Sequence
  source: /note="Description of Artificial Sequence: Synthetic oligonucleotide"
atgcagccgaatacgtcgttt

SEQ ID NO: 20725 - DNA, 21 bp, Artificial Sequence
  source: /note="Description of Artificial Sequence: Synthetic oligonucleotide"
atgcagcgtaggcttgatatt

SEQ ID NO: 20726 - DNA, 21 bp, Artificial Sequence
  source: /note="Description of Artificial Sequence: Synthetic oligonucleotide"
atgcagaggacgactcatgtt

SEQ ID NO: 20727 - DNA, 21 bp, Artificial Sequence
  source: /note="Description of Artificial Sequence: Synthetic oligonucleotide"
atgcagtcgcgtgttcctttg

SEQ ID NO: 20728 - DNA, 21 bp, Artificial Sequence
  source: /note="Description of Artificial Sequence: Synthetic oligonucleotide"
atgcagtcttcgcctgatggg

SEQ ID NO: 20729 - DNA, 21 bp, Artificial Sequence
  source: /note="Description of Artificial Sequence: Synthetic oligonucleotide"
atgcagacggcgacgcagggt

SEQ ID NO: 20730 - DNA, 21 bp, Artificial Sequence
  source: /note="Description of Artificial Sequence: Synthetic oligonucleotide"
atgcagactcagtctcttcct

SEQ ID NO: 20731 - DNA, 21 bp, Artificial Sequence
  source: /note="Description of Artificial Sequence: Synthetic oligonucleotide"
atgcaggtgtctgagaggcct

SEQ ID NO: 20732 - DNA, 21 bp, Artificial Sequence
  source: /note="Description of Artificial Sequence: Synthetic oligonucleotide"
atgcaggtttctgggccgcct

SEQ ID NO: 20733 - DNA, 21 bp, Artificial Sequence
  source: /note="Description of Artificial Sequence: Synthetic oligonucleotide"
atgcaggtgactgaggggctt

SEQ ID NO: 20734 - DNA, 21 bp, Artificial Sequence
  source: /note="Description of Artificial Sequence: Synthetic oligonucleotide"
atgcgggctggggcggcgggt

SEQ ID NO: 20735 - DNA, 21 bp, Artificial Sequence
  source: /note="Description of Artificial Sequence: Synthetic oligonucleotide"
atgcgggcttctgcggggatg

SEQ ID NO: 20736 - DNA, 21 bp, Artificial Sequence
  source: /note="Description of Artificial Sequence: Synthetic oligonucleotide"
atgcgggatgatgcggctgtt

SEQ ID NO: 20737 - DNA, 21 bp, Artificial Sequence
  source: /note="Description of Artificial Sequence: Synthetic oligonucleotide"
atgcgtgatggtcctccgaat

SEQ ID NO: 20738 - DNA, 21 bp, Artificial Sequence
  source: /note="Description of Artificial Sequence: Synthetic oligonucleotide"
atgcgggagcggtcgagtgct

SEQ ID NO: 20739 - DNA, 21 bp, Artificial Sequence
  source: /note="Description of Artificial Sequence: Synthetic oligonucleotide"
atgaggggtgattcggcgcct

SEQ ID NO: 20740 - DNA, 21 bp, Artificial Sequence
  source: /note="Description of Artificial Sequence: Synthetic oligonucleotide"
atgaggggttttgatgagttg

SEQ ID NO: 20741 - DNA, 21 bp, Artificial Sequence
  source: /note="Description of Artificial Sequence: Synthetic oligonucleotide"
atgcggggtacgccggttggt

SEQ ID NO: 20742 - DNA, 21 bp, Artificial Sequence
  source: /note="Description of Artificial Sequence: Synthetic oligonucleotide"
atgcggcatgggaatcctgcg

SEQ ID NO: 20743 - DNA, 21 bp, Artificial Sequence
  source: /note="Description of Artificial Sequence: Synthetic oligonucleotide"
atgcggcatgttaatacgccg

SEQ ID NO: 20744 - DNA, 21 bp, Artificial Sequence
  source: /note="Description of Artificial Sequence: Synthetic oligonucleotide"
atgcggattggggataggcat

SEQ ID NO: 20745 - DNA, 21 bp, Artificial Sequence
  source: /note="Description of Artificial Sequence: Synthetic oligonucleotide"
atgcgtttgagtacgccggag

SEQ ID NO: 20746 - DNA, 21 bp, Artificial Sequence
  source: /note="Description of Artificial Sequence: Synthetic oligonucleotide"
atgaggttggtgtcggcggag

SEQ ID NO: 20747 - DNA, 21 bp, Artificial Sequence
  source: /note="Description of Artificial Sequence: Synthetic oligonucleotide"
atgcggatggcggtgagtgct

SEQ ID NO: 20748 - DNA, 21 bp, Artificial Sequence
  source: /note="Description of Artificial Sequence: Synthetic oligonucleotide"
atgaggatggggggtgtgcct

SEQ ID NO: 20749 - DNA, 21 bp, Artificial Sequence
  source: /note="Description of Artificial Sequence: Synthetic oligonucleotide"
atgaggaatgcggctaagagg

SEQ ID NO: 20750 - DNA, 21 bp, Artificial Sequence
  source: /note="Description of Artificial Sequence: Synthetic oligonucleotide"
atgaggaattcggtgtatccg

SEQ ID NO: 20751 - DNA, 21 bp, Artificial Sequence
  source: /note="Description of Artificial Sequence: Synthetic oligonucleotide"
atgcggaatacgacgtttgag

SEQ ID NO: 20752 - DNA, 21 bp, Artificial Sequence
  source: /note="Description of Artificial Sequence: Synthetic oligonucleotide"
atgcgtccggctaatgagtcg

SEQ ID NO: 20753 - DNA, 21 bp, Artificial Sequence
  source: /note="Description of Artificial Sequence: Synthetic oligonucleotide"
atgcggccggcggtgggggtt

SEQ ID NO: 20754 - DNA, 21 bp, Artificial Sequence
  source: /note="Description of Artificial Sequence: Synthetic oligonucleotide"
atgaggccgggtttggagggt

SEQ ID NO: 20755 - DNA, 21 bp, Artificial Sequence
  source: /note="Description of Artificial Sequence: Synthetic oligonucleotide"
atgaggccgacgcatgcgtgt

SEQ ID NO: 20756 - DNA, 21 bp, Artificial Sequence
  source: /note="Description of Artificial Sequence: Synthetic oligonucleotide"
atgcggcctactaatgctact

SEQ ID NO: 20757 - DNA, 21 bp, Artificial Sequence
  source: /note="Description of Artificial Sequence: Synthetic oligonucleotide"
atgcggcagattggttatcat

SEQ ID NO: 20758 - DNA, 21 bp, Artificial Sequence
  source: /note="Description of Artificial Sequence: Synthetic oligonucleotide"
atgcgtcaggttgggcgtgag

SEQ ID NO: 20759 - DNA, 21 bp, Artificial Sequence
  source: /note="Description of Artificial Sequence: Synthetic oligonucleotide"
atgaggtcgttttcttatgag

SEQ ID NO: 20760 - DNA, 21 bp, Artificial Sequence
  source: /note="Description of Artificial Sequence: Synthetic oligonucleotide"
atgaggagtaatgatgtggtt

SEQ ID NO: 20761 - DNA, 21 bp, Artificial Sequence
  source: /note="Description of Artificial Sequence: Synthetic oligonucleotide"
atgcggagtccgccgttgtat

SEQ ID NO: 20762 - DNA, 21 bp, Artificial Sequence
  source: /note="Description of Artificial Sequence: Synthetic oligonucleotide"
atgcggtctcagagttttagt

SEQ ID NO: 20763 - DNA, 21 bp, Artificial Sequence
  source: /note="Description of Artificial Sequence: Synthetic oligonucleotide"
atgcggtctcgtgtggatact

SEQ ID NO: 20764 - DNA, 21 bp, Artificial Sequence
  source: /note="Description of Artificial Sequence: Synthetic oligonucleotide"
atgaggtctgtgattgcgcag

SEQ ID NO: 20765 - DNA, 21 bp, Artificial Sequence
  source: /note="Description of Artificial Sequence: Synthetic oligonucleotide"
atgcgtacggagtcgactttg

SEQ ID NO: 20766 - DNA, 21 bp, Artificial Sequence
  source: /note="Description of Artificial Sequence: Synthetic oligonucleotide"
atgcgtacgaatagtagtact

SEQ ID NO: 20767 - DNA, 21 bp, Artificial Sequence
  source: /note="Description of Artificial Sequence: Synthetic oligonucleotide"
atgcgtacttctaatactgct

SEQ ID NO: 20768 - DNA, 21 bp, Artificial Sequence
  source: /note="Description of Artificial Sequence: Synthetic oligonucleotide"
atgcgtgttaatactgatcct

SEQ ID NO: 20769 - DNA, 21 bp, Artificial Sequence
  source: /note="Description of Artificial Sequence: Synthetic oligonucleotide"
atgcgtgtgtcgactgcggcg

SEQ ID NO: 20770 - DNA, 21 bp, Artificial Sequence
  source: /note="Description of Artificial Sequence: Synthetic oligonucleotide"
atgcgttatgctccgggtacg

SEQ ID NO: 20771 - DNA, 21 bp, Artificial Sequence
  source: /note="Description of Artificial Sequence: Synthetic oligonucleotide"
atgagtgctgataggttttcg

SEQ ID NO: 20772 - DNA, 21 bp, Artificial Sequence
  source: /note="Description of Artificial Sequence: Synthetic oligonucleotide"
atgagtgctaagacttatctt

SEQ ID NO: 20773 - DNA, 21 bp, Artificial Sequence
  source: /note="Description of Artificial Sequence: Synthetic oligonucleotide"
atgagtgcttcgattggttct

SEQ ID NO: 20774 - DNA, 21 bp, Artificial Sequence
  source: /note="Description of Artificial Sequence: Synthetic oligonucleotide"
atgtctgctgtgttgccgcat

SEQ ID NO: 20775 - DNA, 21 bp, Artificial Sequence
  source: /note="Description of Artificial Sequence: Synthetic oligonucleotide"
atgtctgatcagctgcggttt

SEQ ID NO: 20776 - DNA, 21 bp, Artificial Sequence
  source: /note="Description of Artificial Sequence: Synthetic oligonucleotide"
atgtcggattcgcattcgcgt

SEQ ID NO: 20777 - DNA, 21 bp, Artificial Sequence
  source: /note="Description of Artificial Sequence: Synthetic oligonucleotide"
atgtcggattggaatggtatt

SEQ ID NO: 20778 - DNA, 21 bp, Artificial Sequence
  source: /note="Description of Artificial Sequence: Synthetic oligonucleotide"
atgtctgagatgagtactcat

SEQ ID NO: 20779 - DNA, 21 bp, Artificial Sequence
  source: /note="Description of Artificial Sequence: Synthetic oligonucleotide"
atgagtggtgggtcgtcttat

SEQ ID NO: 20780 - DNA, 21 bp, Artificial Sequence
  source: /note="Description of Artificial Sequence: Synthetic oligonucleotide"
atgtctgggaatcatgctact

SEQ ID NO: 20781 - DNA, 21 bp, Artificial Sequence
  source: /note="Description of Artificial Sequence: Synthetic oligonucleotide"
atgtcgggtccgcagttgagt

SEQ ID NO: 20782 - DNA, 21 bp, Artificial Sequence
  source: /note="Description of Artificial Sequence: Synthetic oligonucleotide"
atgagtgggcgtggtcagatt

SEQ ID NO: 20783 - DNA, 21 bp, Artificial Sequence
  source: /note="Description of Artificial Sequence: Synthetic oligonucleotide"
atgtctcatcatagtactacg

SEQ ID NO: 20784 - DNA, 21 bp, Artificial Sequence
  source: /note="Description of Artificial Sequence: Synthetic oligonucleotide"
atgtctcatccgtataagccg

SEQ ID NO: 20785 - DNA, 21 bp, Artificial Sequence
  source: /note="Description of Artificial Sequence: Synthetic oligonucleotide"
atgtctcattatctgaaggct

SEQ ID NO: 20786 - DNA, 21 bp, Artificial Sequence
  source: /note="Description of Artificial Sequence: Synthetic oligonucleotide"
atgtcgattgatgaggctgag

SEQ ID NO: 20787 - DNA, 21 bp, Artificial Sequence
  source: /note="Description of Artificial Sequence: Synthetic oligonucleotide"
atgtctattggtacgtcggag

SEQ ID NO: 20788 - DNA, 21 bp, Artificial Sequence
  source: /note="Description of Artificial Sequence: Synthetic oligonucleotide"
atgtctattattggtggtgtt

SEQ ID NO: 20789 - DNA, 21 bp, Artificial Sequence
  source: /note="Description of Artificial Sequence: Synthetic oligonucleotide"
atgtctatttctcatactacg

SEQ ID NO: 20790 - DNA, 21 bp, Artificial Sequence
  source: /note="Description of Artificial Sequence: Synthetic oligonucleotide"
atgtcgattactcatcattct

SEQ ID NO: 20791 - DNA, 21 bp, Artificial Sequence
  source: /note="Description of Artificial Sequence: Synthetic oligonucleotide"
atgtcgaagatttggccgtct

SEQ ID NO: 20792 - DNA, 21 bp, Artificial Sequence
  source: /note="Description of Artificial Sequence: Synthetic oligonucleotide"
atgtctaagaatttgtcggct

SEQ ID NO: 20793 - DNA, 21 bp, Artificial Sequence
  source: /note="Description of Artificial Sequence: Synthetic oligonucleotide"
atgagtaagaggactgattcg

SEQ ID NO: 20794 - DNA, 21 bp, Artificial Sequence
  source: /note="Description of Artificial Sequence: Synthetic oligonucleotide"
atgagtaagactattgcgcag

SEQ ID NO: 20795 - DNA, 21 bp, Artificial Sequence
  source: /note="Description of Artificial Sequence: Synthetic oligonucleotide"
atgtcgaaggtgccttttaat

SEQ ID NO: 20796 - DNA, 21 bp, Artificial Sequence
  source: /note="Description of Artificial Sequence: Synthetic oligonucleotide"
atgtcgttggcgaataagagt

SEQ ID NO: 20797 - DNA, 21 bp, Artificial Sequence
  source: /note="Description of Artificial Sequence: Synthetic oligonucleotide"
atgtctctgaagctgtctggt

SEQ ID NO: 20798 - DNA, 21 bp, Artificial Sequence
  source: /note="Description of Artificial Sequence: Synthetic oligonucleotide"
atgtctttgccgtcgactcag

SEQ ID NO: 20799 - DNA, 21 bp, Artificial Sequence
  source: /note="Description of Artificial Sequence: Synthetic oligonucleotide"
atgtctttgacggttacggct

SEQ ID NO: 20800 - DNA, 21 bp, Artificial Sequence
  source: /note="Description of Artificial Sequence: Synthetic oligonucleotide"
atgtctatgcatgggggttct

SEQ ID NO: 20801 - DNA, 21 bp, Artificial Sequence
  source: /note="Description of Artificial Sequence: Synthetic oligonucleotide"
atgtcgaatgggtggcaggat

SEQ ID NO: 20802 - DNA, 21 bp, Artificial Sequence
  source: /note="Description of Artificial Sequence: Synthetic oligonucleotide"
atgagtaatattggtctgggt

SEQ ID NO: 20803 - DNA, 21 bp, Artificial Sequence
  source: /note="Description of Artificial Sequence: Synthetic oligonucleotide"
atgtctaataatcatggtctt

SEQ ID NO: 20804 - DNA, 21 bp, Artificial Sequence
  source: /note="Description of Artificial Sequence: Synthetic oligonucleotide"
atgtctaattcggagtttggt

SEQ ID NO: 20805 - DNA, 21 bp, Artificial Sequence
  source: /note="Description of Artificial Sequence: Synthetic oligonucleotide"
atgagtcctgctatgcagacg

SEQ ID NO: 20806 - DNA, 21 bp, Artificial Sequence
  source: /note="Description of Artificial Sequence: Synthetic oligonucleotide"
atgagtcctgatcagaggtat

SEQ ID NO: 20807 - DNA, 21 bp, Artificial Sequence
  source: /note="Description of Artificial Sequence: Synthetic oligonucleotide"
atgtctcctggtgttaatgct

SEQ ID NO: 20808 - DNA, 21 bp, Artificial Sequence
  source: /note="Description of Artificial Sequence: Synthetic oligonucleotide"
atgtctccgcattttaatacg

SEQ ID NO: 20809 - DNA, 21 bp, Artificial Sequence
  source: /note="Description of Artificial Sequence: Synthetic oligonucleotide"
atgagtccgatggtgactgcg

SEQ ID NO: 20810 - DNA, 21 bp, Artificial Sequence
  source: /note="Description of Artificial Sequence: Synthetic oligonucleotide"
atgtctccgtctgattttggt

SEQ ID NO: 20811 - DNA, 21 bp, Artificial Sequence
  source: /note="Description of Artificial Sequence: Synthetic oligonucleotide"
atgagtccttctagtcctatg

SEQ ID NO: 20812 - DNA, 21 bp, Artificial Sequence
  source: /note="Description of Artificial Sequence: Synthetic oligonucleotide"
atgtctcagcagtcgagtggt

SEQ ID NO: 20813 - DNA, 21 bp, Artificial Sequence
  source: /note="Description of Artificial Sequence: Synthetic oligonucleotide"
atgtctcagcgtagggatcct

SEQ ID NO: 20814 - DNA, 21 bp, Artificial Sequence
  source: /note="Description of Artificial Sequence: Synthetic oligonucleotide"
atgagtcgggatgtgtcgcat

SEQ ID NO: 20815 - DNA, 21 bp, Artificial Sequence
  source: /note="Description of Artificial Sequence: Synthetic oligonucleotide"
atgtctcgtgagtcgggtggg

SEQ ID NO: 20816 - DNA, 21 bp, Artificial Sequence
  source: /note="Description of Artificial Sequence: Synthetic oligonucleotide"
atgtcgaggttggattctccg

SEQ ID NO: 20817 - DNA, 21 bp, Artificial Sequence
  source: /note="Description of Artificial Sequence: Synthetic oligonucleotide"
atgagtcggcttggtgcgacg

SEQ ID NO: 20818 - DNA, 21 bp, Artificial Sequence
  source: /note="Description of Artificial Sequence: Synthetic oligonucleotide"
atgtctcgtaatttgtgttgt

SEQ ID NO: 20819 - DNA, 21 bp, Artificial Sequence
  source: /note="Description of Artificial Sequence: Synthetic oligonucleotide"
atgagttcggcgtctagtcct

SEQ ID NO: 20820 - DNA, 21 bp, Artificial Sequence
  source: /note="Description of Artificial Sequence: Synthetic oligonucleotide"
atgtctagtgagccggttaag

SEQ ID NO: 20821 - DNA, 21 bp, Artificial Sequence
  source: /note="Description of Artificial Sequence: Synthetic oligonucleotide"
atgtcgtctcatggtgtggct

SEQ ID NO: 20822 - DNA, 21 bp, Artificial Sequence
  source: /note="Description of Artificial Sequence: Synthetic oligonucleotide"
atgtcgagtcttaattctctt

SEQ ID NO: 20823 - DNA, 21 bp, Artificial Sequence
  source: /note="Description of Artificial Sequence: Synthetic oligonucleotide"
atgtcgtcgcttaatgttcat

SEQ ID NO: 20824 - DNA, 21 bp, Artificial Sequence
  source: /note="Description of Artificial Sequence: Synthetic oligonucleotide"
atgtctagtctgcggcaggcg

SEQ ID NO: 20825 - DNA, 21 bp, Artificial Sequence
  source: /note="Description of Artificial Sequence: Synthetic oligonucleotide"
atgtcgtcgcctcagttgagt

SEQ ID NO: 20826 - DNA, 21 bp, Artificial Sequence
  source: /note="Description of Artificial Sequence: Synthetic oligonucleotide"
atgagttctcagacttctaag

SEQ ID NO: 20827 - DNA, 21 bp, Artificial Sequence
  source: /note="Description of Artificial Sequence: Synthetic oligonucleotide"
atgtcgagtcgttgggcggcg

SEQ ID NO: 20828 - DNA, 21 bp, Artificial Sequence
  source: /note="Description of Artificial Sequence: Synthetic oligonucleotide"
atgagttcttctgtgcatact

SEQ ID NO: 20829 - DNA, 21 bp, Artificial Sequence
  source: /note="Description of Artificial Sequence: Synthetic oligonucleotide"
atgtcgagtactcgtactgat

SEQ ID NO: 20830 - DNA, 21 bp, Artificial Sequence
  source: /note="Description of Artificial Sequence: Synthetic oligonucleotide"
atgtcgagtacttcgtatagt

SEQ ID NO: 20831 - DNA, 21 bp, Artificial Sequence
  source: /note="Description of Artificial Sequence: Synthetic oligonucleotide"
atgtctactgaggatcatgcg

SEQ ID NO: 20832 - DNA, 21 bp, Artificial Sequence
  source: /note="Description of Artificial Sequence: Synthetic oligonucleotide"
atgtcgactgagcgtaatgcg

SEQ ID NO: 20833 - DNA, 21 bp, Artificial Sequence
  source: /note="Description of Artificial Sequence: Synthetic oligonucleotide"
atgagtacttttccgcctcct

SEQ ID NO: 20834 - DNA, 21 bp, Artificial Sequence
  source: /note="Description of Artificial Sequence: Synthetic oligonucleotide"
atgagtactgggaggcttatt

SEQ ID NO: 20835 - DNA, 21 bp, Artificial Sequence
  source: /note="Description of Artificial Sequence: Synthetic oligonucleotide"
atgtctacgcatgtggtgagt

SEQ ID NO: 20836 - DNA, 21 bp, Artificial Sequence
  source: /note="Description of Artificial Sequence: Synthetic oligonucleotide"
atgagtactctgcctcatgct

SEQ ID NO: 20837 - DNA, 21 bp, Artificial Sequence
  source: /note="Description of Artificial Sequence: Synthetic oligonucleotide"
atgtctacgatgcagaggagt

SEQ ID NO: 20838 - DNA, 21 bp, Artificial Sequence
  source: /note="Description of Artificial Sequence: Synthetic oligonucleotide"
atgtctactaattttaagggt

SEQ ID NO: 20839 - DNA, 21 bp, Artificial Sequence
  source: /note="Description of Artificial Sequence: Synthetic oligonucleotide"
atgtcgactaatacgcatttg

SEQ ID NO: 20840 - DNA, 21 bp, Artificial Sequence
  source: /note="Description of Artificial Sequence: Synthetic oligonucleotide"
atgtcgacgaggattgcgaat

SEQ ID NO: 20841 - DNA, 21 bp, Artificial Sequence
  source: /note="Description of Artificial Sequence: Synthetic oligonucleotide"
atgtctacgaggcctatgccg

SEQ ID NO: 20842 - DNA, 21 bp, Artificial Sequence
  source: /note="Description of Artificial Sequence: Synthetic oligonucleotide"
atgagtacgcggagtccgtcg

SEQ ID NO: 20843 - DNA, 21 bp, Artificial Sequence
  source: /note="Description of Artificial Sequence: Synthetic oligonucleotide"
atgtctgtgcctcatggtgat

SEQ ID NO: 20844 - DNA, 21 bp, Artificial Sequence
  source: /note="Description of Artificial Sequence: Synthetic oligonucleotide"
atgtcttatccttatcagaat

SEQ ID NO: 20845 - DNA, 21 bp, Artificial Sequence
  source: /note="Description of Artificial Sequence: Synthetic oligonucleotide"
atgtcttatcagaagccttcg

SEQ ID NO: 20846 - DNA, 21 bp, Artificial Sequence
  source: /note="Description of Artificial Sequence: Synthetic oligonucleotide"
atgtcttatacttctgattct

SEQ ID NO: 20847 - DNA, 21 bp, Artificial Sequence
  source: /note="Description of Artificial Sequence: Synthetic oligonucleotide"
atgacggctaatactgctctt

SEQ ID NO: 20848 - DNA, 21 bp, Artificial Sequence
  source: /note="Description of Artificial Sequence: Synthetic oligonucleotide"
atgacggatattacgggtagg

SEQ ID NO: 20849 - DNA, 21 bp, Artificial Sequence
  source: /note="Description of Artificial Sequence: Synthetic oligonucleotide"
atgacggattcgcagccgggt

SEQ ID NO: 20850 - DNA, 21 bp, Artificial Sequence
  source: /note="Description of Artificial Sequence: Synthetic oligonucleotide"
atgactgatactcggcggctg

SEQ ID NO: 20851 - DNA, 21 bp, Artificial Sequence
  source: /note="Description of Artificial Sequence: Synthetic oligonucleotide"
atgacggatgtgggtgtgcgt

SEQ ID NO: 20852 - DNA, 21 bp, Artificial Sequence
  source: /note="Description of Artificial Sequence: Synthetic oligonucleotide"
atgacggattattcgaagggg

SEQ ID NO: 20853 - DNA, 21 bp, Artificial Sequence
  source: /note="Description of Artificial Sequence: Synthetic oligonucleotide"
atgactgagccgatggtggat

SEQ ID NO: 20854 - DNA, 21 bp, Artificial Sequence
  source: /note="Description of Artificial Sequence: Synthetic oligonucleotide"
atgacggagtctttgacggcg

SEQ ID NO: 20855 - DNA, 21 bp, Artificial Sequence
  source: /note="Description of Artificial Sequence: Synthetic oligonucleotide"
atgacggaggttacgacgttt

SEQ ID NO: 20856 - DNA, 21 bp, Artificial Sequence
  source: /note="Description of Artificial Sequence: Synthetic oligonucleotide"
atgacttttccgaagctgaat

SEQ ID NO: 20857 - DNA, 21 bp, Artificial Sequence
  source: /note="Description of Artificial Sequence: Synthetic oligonucleotide"
atgactggtatgactagtgcg

SEQ ID NO: 20858 - DNA, 21 bp, Artificial Sequence
  source: /note="Description of Artificial Sequence: Synthetic oligonucleotide"
atgactggtaatcatcggatt

SEQ ID NO: 20859 - DNA, 21 bp, Artificial Sequence
  source: /note="Description of Artificial Sequence: Synthetic oligonucleotide"
atgactggtacgtcgcagcct

SEQ ID NO: 20860 - DNA, 21 bp, Artificial Sequence
  source: /note="Description of Artificial Sequence: Synthetic oligonucleotide"
atgactcatcctccttcggat

SEQ ID NO: 20861 - DNA, 21 bp, Artificial Sequence
  source: /note="Description of Artificial Sequence: Synthetic oligonucleotide"
atgactcatacgggtactttg

SEQ ID NO: 20862 - DNA, 21 bp, Artificial Sequence
  source: /note="Description of Artificial Sequence: Synthetic oligonucleotide"
atgacgaagcctcatattgtg

SEQ ID NO: 20863 - DNA, 21 bp, Artificial Sequence
  source: /note="Description of Artificial Sequence: Synthetic oligonucleotide"
atgactcttggttctgttgtt

SEQ ID NO: 20864 - DNA, 21 bp, Artificial Sequence
  source: /note="Description of Artificial Sequence: Synthetic oligonucleotide"
atgactttgcatcagcagttt

SEQ ID NO: 20865 - DNA, 21 bp, Artificial Sequence
  source: /note="Description of Artificial Sequence: Synthetic oligonucleotide"
atgacgctgtcgactggtgct

SEQ ID NO: 20866 - DNA, 21 bp, Artificial Sequence
  source: /note="Description of Artificial Sequence: Synthetic oligonucleotide"
atgacgcttgtggctagtccg

SEQ ID NO: 20867 - DNA, 21 bp, Artificial Sequence
  source: /note="Description of Artificial Sequence: Synthetic oligonucleotide"
atgactatggaggcggctaag

SEQ ID NO: 20868 - DNA, 21 bp, Artificial Sequence
  source: /note="Description of Artificial Sequence: Synthetic oligonucleotide"
atgacgatgggtgagtttaag

SEQ ID NO: 20869 - DNA, 21 bp, Artificial Sequence
  source: /note="Description of Artificial Sequence: Synthetic oligonucleotide"
atgacgatgacgcatcgtggg

SEQ ID NO: 20870 - DNA, 21 bp, Artificial Sequence
  source: /note="Description of Artificial Sequence: Synthetic oligonucleotide"
atgactaatgctgttgttgat

SEQ ID NO: 20871 - DNA, 21 bp, Artificial Sequence
  source: /note="Description of Artificial Sequence: Synthetic oligonucleotide"
atgacgaatggtcatggtatg

SEQ ID NO: 20872 - DNA, 21 bp, Artificial Sequence
  source: /note="Description of Artificial Sequence: Synthetic oligonucleotide"
atgactaatcttcagtctttg

SEQ ID NO: 20873 - DNA, 21 bp, Artificial Sequence
  source: /note="Description of Artificial Sequence: Synthetic oligonucleotide"
atgactaatcgtgctacggcg

SEQ ID NO: 20874 - DNA, 21 bp, Artificial Sequence
  source: /note="Description of Artificial Sequence: Synthetic oligonucleotide"
atgacgccgcataatagtagg

SEQ ID NO: 20875 - DNA, 21 bp, Artificial Sequence
  source: /note="Description of Artificial Sequence: Synthetic oligonucleotide"
atgacgccgcctcatggggcg

SEQ ID NO: 20876 - DNA, 21 bp, Artificial Sequence
  source: /note="Description of Artificial Sequence: Synthetic oligonucleotide"
atgactcctacgtcgtataat

SEQ ID NO: 20877 - DNA, 21 bp, Artificial Sequence
  source: /note="Description of Artificial Sequence: Synthetic oligonucleotide"
atgacgcagactgatgttacg

SEQ ID NO: 20878 - DNA, 21 bp, Artificial Sequence
  source: /note="Description of Artificial Sequence: Synthetic oligonucleotide"
atgacgcgttctgagtggtct

SEQ ID NO: 20879 - DNA, 21 bp, Artificial Sequence
  source: /note="Description of Artificial Sequence: Synthetic oligonucleotide"
atgactagtttggcggctctt

SEQ ID NO: 20880 - DNA, 21 bp, Artificial Sequence
  source: /note="Description of Artificial Sequence: Synthetic oligonucleotide"
atgacgagtaatacgaggatg

SEQ ID NO: 20881 - DNA, 21 bp, Artificial Sequence
  source: /note="Description of Artificial Sequence: Synthetic oligonucleotide"
atgacttcggttcggatgtcg

SEQ ID NO: 20882 - DNA, 21 bp, Artificial Sequence
  source: /note="Description of Artificial Sequence: Synthetic oligonucleotide"
atgacgacggggattgatagt

SEQ ID NO: 20883 - DNA, 21 bp, Artificial Sequence
  source: /note="Description of Artificial Sequence: Synthetic oligonucleotide"
atgacgacgagtccttttgct

SEQ ID NO: 20884 - DNA, 21 bp, Artificial Sequence
  source: /note="Description of Artificial Sequence: Synthetic oligonucleotide"
atgacgacttcgagtgatttg

SEQ ID NO: 20885 - DNA, 21 bp, Artificial Sequence
  source: /note="Description of Artificial Sequence: Synthetic oligonucleotide"
atgacggtgggggatagtgct

SEQ ID NO: 20886 - DNA, 21 bp, Artificial Sequence
  source: /note="Description of Artificial Sequence: Synthetic oligonucleotide"
atgactgttggtattcctgcg

SEQ ID NO: 20887 - DNA, 21 bp, Artificial Sequence
  source: /note="Description of Artificial Sequence: Synthetic oligonucleotide"
atgactgttagtaataagtat

SEQ ID NO: 20888 - DNA, 21 bp, Artificial Sequence
  source: /note="Description of Artificial Sequence: Synthetic oligonucleotide"
atgactgtttctcctggtact

SEQ ID NO: 20889 - DNA, 21 bp, Artificial Sequence
  source: /note="Description of Artificial Sequence: Synthetic oligonucleotide"
atggttgcgtctgataatagt

SEQ ID NO: 20890 - DNA, 21 bp, Artificial Sequence
  source: /note="Description of Artificial Sequence: Synthetic oligonucleotide"
atggtggatcgtgtgcttgat

SEQ ID NO: 20891 - DNA, 21 bp, Artificial Sequence
  source: /note="Description of Artificial Sequence: Synthetic oligonucleotide"
atggttgagctgacgtgggag

SEQ ID NO: 20892 - DNA, 21 bp, Artificial Sequence
  source: /note="Description of Artificial Sequence: Synthetic oligonucleotide"
atggttggttttggtgcggcg

SEQ ID NO: 20893 - DNA, 21 bp, Artificial Sequence
  source: /note="Description of Artificial Sequence: Synthetic oligonucleotide"
atggttgggcaggtgaagaat

SEQ ID NO: 20894 - DNA, 21 bp, Artificial Sequence
  source: /note="Description of Artificial Sequence: Synthetic oligonucleotide"
atggtgggtaggccgattgtt

SEQ ID NO: 20895 - DNA, 21 bp, Artificial Sequence
  source: /note="Description of Artificial Sequence: Synthetic oligonucleotide"
atggttggtaggacgggtggg

SEQ ID NO: 20896 - DNA, 21 bp, Artificial Sequence
  source: /note="Description of Artificial Sequence: Synthetic oligonucleotide"
atggttggtcgtgtgcctagt

SEQ ID NO: 20897 - DNA, 21 bp, Artificial Sequence
  source: /note="Description of Artificial Sequence: Synthetic oligonucleotide"
atggtgcattcgtcggcgcat

SEQ ID NO: 20898 - DNA, 21 bp, Artificial Sequence
  source: /note="Description of Artificial Sequence: Synthetic oligonucleotide"
atggtgcattcttctgagtcg

SEQ ID NO: 20899 - DNA, 21 bp, Artificial Sequence
  source: /note="Description of Artificial Sequence: Synthetic oligonucleotide"
atggtgattcatccggatcat

SEQ ID NO: 20900 - DNA, 21 bp, Artificial Sequence
  source: /note="Description of Artificial Sequence: Synthetic oligonucleotide"
atggtgttgaagctggctgct

SEQ ID NO: 20901 - DNA, 21 bp, Artificial Sequence
  source: /note="Description of Artificial Sequence: Synthetic oligonucleotide"
atggttaatgtgattatgccg

SEQ ID NO: 20902 - DNA, 21 bp, Artificial Sequence
  source: /note="Description of Artificial Sequence: Synthetic oligonucleotide"
atggtgaattatctggatgtt

SEQ ID NO: 20903 - DNA, 21 bp, Artificial Sequence
  source: /note="Description of Artificial Sequence: Synthetic oligonucleotide"
atggtgcctggtaatagtggt

SEQ ID NO: 20904 - DNA, 21 bp, Artificial Sequence
  source: /note="Description of Artificial Sequence: Synthetic oligonucleotide"
atggttcctcgtgagaatctt

SEQ ID NO: 20905 - DNA, 21 bp, Artificial Sequence
  source: /note="Description of Artificial Sequence: Synthetic oligonucleotide"
atggtgccgagtcagcattct

SEQ ID NO: 20906 - DNA, 21 bp, Artificial Sequence
  source: /note="Description of Artificial Sequence: Synthetic oligonucleotide"
atggtgccgagtagtgagatg

SEQ ID NO: 20907 - DNA, 21 bp, Artificial Sequence
  source: /note="Description of Artificial Sequence: Synthetic oligonucleotide"
atggttcagcggacgacgacg

SEQ ID NO: 20908 - DNA, 21 bp, Artificial Sequence
  source: /note="Description of Artificial Sequence: Synthetic oligonucleotide"
atggttcgggcgctgccgtgt

SEQ ID NO: 20909 - DNA, 21 bp, Artificial Sequence
  source: /note="Description of Artificial Sequence: Synthetic oligonucleotide"
atggtgtcgaatcgtcagacg

SEQ ID NO: 20910 - DNA, 21 bp, Artificial Sequence
  source: /note="Description of Artificial Sequence: Synthetic oligonucleotide"
atggtgtctcctagtccgact

SEQ ID NO: 20911 - DNA, 21 bp, Artificial Sequence
  source: /note="Description of Artificial Sequence: Synthetic oligonucleotide"
atggtgtcggttgatagggat

SEQ ID NO: 20912 - DNA, 21 bp, Artificial Sequence
  source: /note="Description of Artificial Sequence: Synthetic oligonucleotide"
atggttactctgactccgggt

SEQ ID NO: 20913 - DNA, 21 bp, Artificial Sequence
  source: /note="Description of Artificial Sequence: Synthetic oligonucleotide"
atggttactaatgttactaag

SEQ ID NO: 20914 - DNA, 21 bp, Artificial Sequence
  source: /note="Description of Artificial Sequence: Synthetic oligonucleotide"
atggttacgcgtccggagagt

SEQ ID NO: 20915 - DNA, 21 bp, Artificial Sequence
  source: /note="Description of Artificial Sequence: Synthetic oligonucleotide"
atggtgacgtcttcgacttct

SEQ ID NO: 20916 - DNA, 21 bp, Artificial Sequence
  source: /note="Description of Artificial Sequence: Synthetic oligonucleotide"
atggttacgtatgggcagcag

SEQ ID NO: 20917 - DNA, 21 bp, Artificial Sequence
  source: /note="Description of Artificial Sequence: Synthetic oligonucleotide"
atggttgtgcatcataataat

SEQ ID NO: 20918 - DNA, 21 bp, Artificial Sequence
  source: /note="Description of Artificial Sequence: Synthetic oligonucleotide"
atggtggtgaagatggtgtcg

SEQ ID NO: 20919 - DNA, 21 bp, Artificial Sequence
  source: /note="Description of Artificial Sequence: Synthetic oligonucleotide"
atgtggaataaggagcatgat

SEQ ID NO: 20920 - DNA, 21 bp, Artificial Sequence
  source: /note="Description of Artificial Sequence: Synthetic oligonucleotide"
atgtatgataatgatgtgtgg

SEQ ID NO: 20921 - DNA, 21 bp, Artificial Sequence
  source: /note="Description of Artificial Sequence: Synthetic oligonucleotide"
atgtatgataggagtgggctg

SEQ ID NO: 20922 - DNA, 21 bp, Artificial Sequence
  source: /note="Description of Artificial Sequence: Synthetic oligonucleotide"
atgtatgagtctcggggggtt

SEQ ID NO: 20923 - DNA, 21 bp, Artificial Sequence
  source: /note="Description of Artificial Sequence: Synthetic oligonucleotide"
atgtatccggggatgatgatg

SEQ ID NO: 20924 - DNA, 21 bp, Artificial Sequence
  source: /note="Description of Artificial Sequence: Synthetic oligonucleotide"
atgtatcctagtgggattgtt

SEQ ID NO: 20925 - DNA, 21 bp, Artificial Sequence
  source: /note="Description of Artificial Sequence: Synthetic oligonucleotide"
atgtatccgactcatacgggg

SEQ ID NO: 20926 - DNA, 21 bp, Artificial Sequence
  source: /note="Description of Artificial Sequence: Synthetic oligonucleotide"
atgtatcctgtgaggcttgat

SEQ ID NO: 20927 - DNA, 21 bp, Artificial Sequence
  source: /note="Description of Artificial Sequence: Synthetic oligonucleotide"
atgtatcaggagcatacggag

SEQ ID NO: 20928 - DNA, 21 bp, Artificial Sequence
  source: /note="Description of Artificial Sequence: Synthetic oligonucleotide"
atgtatcagcaggctcatagt

SEQ ID NO: 20929 - DNA, 21 bp, Artificial Sequence
  source: /note="Description of Artificial Sequence: Synthetic oligonucleotide"
atgtatagggatgagcttact

SEQ ID NO: 20930 - DNA, 21 bp, Artificial Sequence
  source: /note="Description of Artificial Sequence: Synthetic oligonucleotide"
atgtattcgatgtctaatgtt

SEQ ID NO: 20931 - DNA, 21 bp, Artificial Sequence
  source: /note="Description of Artificial Sequence: Synthetic oligonucleotide"
atgtattcgacgcagtcttcg

SEQ ID NO: 20932 - DNA, 21 bp, Artificial Sequence
  source: /note="Description of Artificial Sequence: Synthetic oligonucleotide"
atgtatacgtcgatggcgggt

SEQ ID NO: 20933 - DNA, 21 bp, Artificial Sequence
  source: /note="Description of Artificial Sequence: Synthetic oligonucleotide"
atgtatgttgctgcttctcct

SEQ ID NO: 20934 - DNA, 21 bp, Artificial Sequence
  source: /note="Description of Artificial Sequence: Synthetic oligonucleotide"
aatgcggctccgtcgactatt

SEQ ID NO: 20935 - DNA, 21 bp, Artificial Sequence
  source: /note="Description of Artificial Sequence: Synthetic oligonucleotide"
aatgctgctcggttgacgtct

SEQ ID NO: 20936 - DNA, 21 bp, Artificial Sequence
  source: /note="Description of Artificial Sequence: Synthetic oligonucleotide"
aatgcggctagtcctggtttt

SEQ ID NO: 20937 - DNA, 21 bp, Artificial Sequence
  source: /note="Description of Artificial Sequence: Synthetic oligonucleotide"
aatgcggcgtctcagtcgcct

SEQ ID NO: 20938 - DNA, 21 bp, Artificial Sequence
  source: /note="Description of Artificial Sequence: Synthetic oligonucleotide"
aatgcggatgcgctgggttcg

SEQ ID NO: 20939 - DNA, 21 bp, Artificial Sequence
  source: /note="Description of Artificial Sequence: Synthetic oligonucleotide"
aatgcggatcctcgtgatcgg

SEQ ID NO: 20940 - DNA, 21 bp, Artificial Sequence
  source: /note="Description of Artificial Sequence: Synthetic oligonucleotide"
aatgcggatcgtcgttctgag

SEQ ID NO: 20941 - DNA, 21 bp, Artificial Sequence
  source: /note="Description of Artificial Sequence: Synthetic oligonucleotide"
aatgctgaggcgtttttggat

SEQ ID NO: 20942 - DNA, 21 bp, Artificial Sequence
  source: /note="Description of Artificial Sequence: Synthetic oligonucleotide"
aatgcggaggataggactgtg

SEQ ID NO: 20943 - DNA, 21 bp, Artificial Sequence
  source: /note="Description of Artificial Sequence: Synthetic oligonucleotide"
aatgcttttagtacgtcgacg

SEQ ID NO: 20944 - DNA, 21 bp, Artificial Sequence
  source: /note="Description of Artificial Sequence: Synthetic oligonucleotide"
aatgctggtggtacgtgggat

SEQ ID NO: 20945 - DNA, 21 bp, Artificial Sequence
  source: /note="Description of Artificial Sequence: Synthetic oligonucleotide"
aatgctgggacgcggcaggct

SEQ ID NO: 20946 - DNA, 21 bp, Artificial Sequence
  source: /note="Description of Artificial Sequence: Synthetic oligonucleotide"
aatgctcatcttagtttgaat

SEQ ID NO: 20947 - DNA, 21 bp, Artificial Sequence
  source: /note="Description of Artificial Sequence: Synthetic oligonucleotide"
aatgctcatagtacgctggtt

SEQ ID NO: 20948 - DNA, 21 bp, Artificial Sequence
  source: /note="Description of Artificial Sequence: Synthetic oligonucleotide"
aatgcgcatacggatcgtcag

SEQ ID NO: 20949 - DNA, 21 bp, Artificial Sequence
  source: /note="Description of Artificial Sequence: Synthetic oligonucleotide"
aatgctcatactcagattcag

SEQ ID NO: 20950 - DNA, 21 bp, Artificial Sequence
  source: /note="Description of Artificial Sequence: Synthetic oligonucleotide"
aatgcgaaggctctggcgatg

SEQ ID NO: 20951 - DNA, 21 bp, Artificial Sequence
  source: /note="Description of Artificial Sequence: Synthetic oligonucleotide"
aatgctaagagtacgattggg

SEQ ID NO: 20952 - DNA, 21 bp, Artificial Sequence
  source: /note="Description of Artificial Sequence: Synthetic oligonucleotide"
aatgcgcttgctcgttctggg

SEQ ID NO: 20953 - DNA, 21 bp, Artificial Sequence
  source: /note="Description of Artificial Sequence: Synthetic oligonucleotide"
aatgcgttggatgataatgtg

SEQ ID NO: 20954 - DNA, 21 bp, Artificial Sequence
  source: /note="Description of Artificial Sequence: Synthetic oligonucleotide"
aatgcgctggatcggtctatg

SEQ ID NO: 20955 - DNA, 21 bp, Artificial Sequence
  source: /note="Description of Artificial Sequence: Synthetic oligonucleotide"
aatgctcttgaggcgtctggt

SEQ ID NO: 20956 - DNA, 21 bp, Artificial Sequence
  source: /note="Description of Artificial Sequence: Synthetic oligonucleotide"
aatgcgcttaatccgaatttt

SEQ ID NO: 20957 - DNA, 21 bp, Artificial Sequence
  source: /note="Description of Artificial Sequence: Synthetic oligonucleotide"
aatgctctgcgttcttattcg

SEQ ID NO: 20958 - DNA, 21 bp, Artificial Sequence
  source: /note="Description of Artificial Sequence: Synthetic oligonucleotide"
aatgctttgtcgcatgttacg

SEQ ID NO: 20959 - DNA, 21 bp, Artificial Sequence
  source: /note="Description of Artificial Sequence: Synthetic oligonucleotide"
aatgctcttgtgtctgagtct

SEQ ID NO: 20960 - DNA, 21 bp, Artificial Sequence
  source: /note="Description of Artificial Sequence: Synthetic oligonucleotide"
aatgctaatgggtctcgggtt

SEQ ID NO: 20961 - DNA, 21 bp, Artificial Sequence
  source: /note="Description of Artificial Sequence: Synthetic oligonucleotide"
aatgcgaatcatcagaatgtg

SEQ ID NO: 20962 - DNA, 21 bp, Artificial Sequence
  source: /note="Description of Artificial Sequence: Synthetic oligonucleotide"
aatgctaatttgaatagtgcg

SEQ ID NO: 20963 - DNA, 21 bp, Artificial Sequence
  source: /note="Description of Artificial Sequence: Synthetic oligonucleotide"
aatgctaatacggggaggctg

SEQ ID NO: 20964 - DNA, 21 bp, Artificial Sequence
  source: /note="Description of Artificial Sequence: Synthetic oligonucleotide"
aatgctaatgtgcctaatcgg

SEQ ID NO: 20965 - DNA, 21 bp, Artificial Sequence
  source: /note="Description of Artificial Sequence: Synthetic oligonucleotide"
aatgcgccgcgttcggctgtt

SEQ ID NO: 20966 - DNA, 21 bp, Artificial Sequence
  source: /note="Description of Artificial Sequence: Synthetic oligonucleotide"
aatgcgccgagtgagtcgcgt

SEQ ID NO: 20967 - DNA, 21 bp, Artificial Sequence
  source: /note="Description of Artificial Sequence: Synthetic oligonucleotide"
aatgctcagattcgtcctatg

SEQ ID NO: 20968 - DNA, 21 bp, Artificial Sequence
  source: /note="Description of Artificial Sequence: Synthetic oligonucleotide"
aatgctcgtctttctacgagt

SEQ ID NO: 20969 - DNA, 21 bp, Artificial Sequence
  source: /note="Description of Artificial Sequence: Synthetic oligonucleotide"
aatgcgcggatgctggctagt

SEQ ID NO: 20970 - DNA, 21 bp, Artificial Sequence
  source: /note="Description of Artificial Sequence: Synthetic oligonucleotide"
aatgcgcggcctcatgatccg

SEQ ID NO: 20971 - DNA, 21 bp, Artificial Sequence
  source: /note="Description of Artificial Sequence: Synthetic oligonucleotide"
aatgcgaggcctagtgatatg

SEQ ID NO: 20972 - DNA, 21 bp, Artificial Sequence
  source: /note="Description of Artificial Sequence: Synthetic oligonucleotide"
aatgctaggagtattgattat

SEQ ID NO: 20973 - DNA, 21 bp, Artificial Sequence
  source: /note="Description of Artificial Sequence: Synthetic oligonucleotide"
aatgcgaggagttctagttat

SEQ ID NO: 20974 - DNA, 21 bp, Artificial Sequence
  source: /note="Description of Artificial Sequence: Synthetic oligonucleotide"
aatgcgcgggttgaggctcct

SEQ ID NO: 20975 - DNA, 21 bp, Artificial Sequence
  source: /note="Description of Artificial Sequence: Synthetic oligonucleotide"
aatgctcggtatactcattct

SEQ ID NO: 20976 - DNA, 21 bp, Artificial Sequence
  source: /note="Description of Artificial Sequence: Synthetic oligonucleotide"
aatgcttctgggctgccgcgt

SEQ ID NO: 20977 - DNA, 21 bp, Artificial Sequence
  source: /note="Description of Artificial Sequence: Synthetic oligonucleotide"
aatgcgtctattcatagtcat

SEQ ID NO: 20978 - DNA, 21 bp, Artificial Sequence
  source: /note="Description of Artificial Sequence: Synthetic oligonucleotide"
aatgctagtcttccgttgagt

SEQ ID NO: 20979 - DNA, 21 bp, Artificial Sequence
  source: /note="Description of Artificial Sequence: Synthetic oligonucleotide"
aatgcttctaattcggagaag

SEQ ID NO: 20980 - DNA, 21 bp, Artificial Sequence
  source: /note="Description of Artificial Sequence: Synthetic oligonucleotide"
aatgcgtcgcctattaggctg

SEQ ID NO: 20981 - DNA, 21 bp, Artificial Sequence
  source: /note="Description of Artificial Sequence: Synthetic oligonucleotide"
aatgcttcgtctaggtcgctt

SEQ ID NO: 20982 - DNA, 21 bp, Artificial Sequence
  source: /note="Description of Artificial Sequence: Synthetic oligonucleotide"
aatgcgtctacggtgcctgag

SEQ ID NO: 20983 - DNA, 21 bp, Artificial Sequence
  source: /note="Description of Artificial Sequence: Synthetic oligonucleotide"
aatgctacggctgatgggttt

SEQ ID NO: 20984 - DNA, 21 bp, Artificial Sequence
  source: /note="Description of Artificial Sequence: Synthetic oligonucleotide"
aatgcgacgcatcctaatttt

SEQ ID NO: 20985 - DNA, 21 bp, Artificial Sequence
  source: /note="Description of Artificial Sequence: Synthetic oligonucleotide"
aatgcgacgcatacgtcgact

SEQ ID NO: 20986 - DNA, 21 bp, Artificial Sequence
  source: /note="Description of Artificial Sequence: Synthetic oligonucleotide"
aatgcgactccggttgcggtt

SEQ ID NO: 20987 - DNA, 21 bp, Artificial Sequence
  source: /note="Description of Artificial Sequence: Synthetic oligonucleotide"
aatgcgacgtctggttctcat

SEQ ID NO: 20988 - DNA, 21 bp, Artificial Sequence
  source: /note="Description of Artificial Sequence: Synthetic oligonucleotide"
aatgcgactagtacgctttgt

SEQ ID NO: 20989 - DNA, 21 bp, Artificial Sequence
  source: /note="Description of Artificial Sequence: Synthetic oligonucleotide"
aatgctacgagttatactatg

SEQ ID NO: 20990 - DNA, 21 bp, Artificial Sequence
  source: /note="Description of Artificial Sequence: Synthetic oligonucleotide"
aatgctacggtgtctccgagg

SEQ ID NO: 20991 - DNA, 21 bp, Artificial Sequence
  source: /note="Description of Artificial Sequence: Synthetic oligonucleotide"
aatgctgtgcctggtcggagt

SEQ ID NO: 20992 - DNA, 21 bp, Artificial Sequence
  source: /note="Description of Artificial Sequence: Synthetic oligonucleotide"
aatgcggttcctattcctccg

SEQ ID NO: 20993 - DNA, 21 bp, Artificial Sequence
  source: /note="Description of Artificial Sequence: Synthetic oligonucleotide"
aatgctgttcagagtcttatg

SEQ ID NO: 20994 - DNA, 21 bp, Artificial Sequence
  source: /note="Description of Artificial Sequence: Synthetic oligonucleotide"
aatgcggtgtcggtgaattct

SEQ ID NO: 20995 - DNA, 21 bp, Artificial Sequence
  source: /note="Description of Artificial Sequence: Synthetic oligonucleotide"
aatgcttggaagactcctgtg

SEQ ID NO: 20996 - DNA, 21 bp, Artificial Sequence
  source: /note="Description of Artificial Sequence: Synthetic oligonucleotide"
aatgcttatactacgggtccg

SEQ ID NO: 20997 - DNA, 21 bp, Artificial Sequence
  source: /note="Description of Artificial Sequence: Synthetic oligonucleotide"
aattgtgatgctgttgcgtgg

SEQ ID NO: 20998 - DNA, 21 bp, Artificial Sequence
  source: /note="Description of Artificial Sequence: Synthetic oligonucleotide"
aatgatgatattcagcgtaag

SEQ ID NO: 20999 - DNA, 21 bp, Artificial Sequence
  source: /note="Description of Artificial Sequence: Synthetic oligonucleotide"
aatgatgggcatcggaatttt

SEQ ID NO: 21000 - DNA, 21 bp, Artificial Sequence
  source: /note="Description of Artificial Sequence: Synthetic oligonucleotide"
aatgatattctgctgctgagt

SEQ ID NO: 21001 - DNA, 21 bp, Artificial Sequence
  source: /note="Description of Artificial Sequence: Synthetic oligonucleotide"
aatgatattactgaggtgcct

SEQ ID NO: 21002 - DNA, 21 bp, Artificial Sequence
  source: /note="Description of Artificial Sequence: Synthetic oligonucleotide"
aatgataagtttaggttgtct

SEQ ID NO: 21003 - DNA, 21 bp, Artificial Sequence
  source: /note="Description of Artificial Sequence: Synthetic oligonucleotide"
aatgataagatgttgcagcgt

SEQ ID NO: 21004 - DNA, 21 bp, Artificial Sequence
  source: /note="Description of Artificial Sequence: Synthetic oligonucleotide"
aatgatccgaaggtgcctcag

SEQ ID NO: 21005 - DNA, 21 bp, Artificial Sequence
  source: /note="Description of Artificial Sequence: Synthetic oligonucleotide"
aatgatccgatgacgtctcag

SEQ ID NO: 21006 - DNA, 21 bp, Artificial Sequence
  source: /note="Description of Artificial Sequence: Synthetic oligonucleotide"
aatgatcggatgaagaattct

SEQ ID NO: 21007 - DNA, 21 bp, Artificial Sequence
  source: /note="Description of Artificial Sequence: Synthetic oligonucleotide"
aatgatcggtctaagtatcct

SEQ ID NO: 21008 - DNA, 21 bp, Artificial Sequence
  source: /note="Description of Artificial Sequence: Synthetic oligonucleotide"
aatgattctagtcttggtgcg

SEQ ID NO: 21009 - DNA, 21 bp, Artificial Sequence
  source: /note="Description of Artificial Sequence: Synthetic oligonucleotide"
aatgatagtagtagtacgatg

SEQ ID NO: 21010 - DNA, 21 bp, Artificial Sequence
  source: /note="Description of Artificial Sequence: Synthetic oligonucleotide"
aatgatacgttttcgtctctg

SEQ ID NO: 21011 - DNA, 21 bp, Artificial Sequence
  source: /note="Description of Artificial Sequence: Synthetic oligonucleotide"
aatgatactggggctttgatg

SEQ ID NO: 21012 - DNA, 21 bp, Artificial Sequence
  source: /note="Description of Artificial Sequence: Synthetic oligonucleotide"
aatgatacttatcgtacttct

SEQ ID NO: 21013 - DNA, 21 bp, Artificial Sequence
  source: /note="Description of Artificial Sequence: Synthetic oligonucleotide"
aatgatgtgccgaatactcct

SEQ ID NO: 21014 - DNA, 21 bp, Artificial Sequence
  source: /note="Description of Artificial Sequence: Synthetic oligonucleotide"
aatgatgttacgacgcataag

SEQ ID NO: 21015 - DNA, 21 bp, Artificial Sequence
  source: /note="Description of Artificial Sequence: Synthetic oligonucleotide"
aatgattggttgattgcgggg

SEQ ID NO: 21016 - DNA, 21 bp, Artificial Sequence
  source: /note="Description of Artificial Sequence: Synthetic oligonucleotide"
aatgaggctctttcgcagttg

SEQ ID NO: 21017 - DNA, 21 bp, Artificial Sequence
  source: /note="Description of Artificial Sequence: Synthetic oligonucleotide"
aatgaggctgttgcgtctatg

SEQ ID NO: 21018 - DNA, 21 bp, Artificial Sequence
  source: /note="Description of Artificial Sequence: Synthetic oligonucleotide"
aatgagtgtgatgatctgatg

SEQ ID NO: 21019 - DNA, 21 bp, Artificial Sequence
  source: /note="Description of Artificial Sequence: Synthetic oligonucleotide"
aatgagggttttctgcttggg

SEQ ID NO: 21020 - DNA, 21 bp, Artificial Sequence
  source: /note="Description of Artificial Sequence: Synthetic oligonucleotide"
aatgagcatcataagactgag

SEQ ID NO: 21021 - DNA, 21 bp, Artificial Sequence
  source: /note="Description of Artificial Sequence: Synthetic oligonucleotide"
aatgagatttttacgccgatg

SEQ ID NO: 21022 - DNA, 21 bp, Artificial Sequence
  source: /note="Description of Artificial Sequence: Synthetic oligonucleotide"
aatgagctggcttcgagggcg

SEQ ID NO: 21023 - DNA, 21 bp, Artificial Sequence
  source: /note="Description of Artificial Sequence: Synthetic oligonucleotide"
aatgagttgggggggcatcat

SEQ ID NO: 21024 - DNA, 21 bp, Artificial Sequence
  source: /note="Description of Artificial Sequence: Synthetic oligonucleotide"
aatgagttggtgtctaagacg

SEQ ID NO: 21025 - DNA, 21 bp, Artificial Sequence
  source: /note="Description of Artificial Sequence: Synthetic oligonucleotide"
aatgagatgtctgggcagcgg

SEQ ID NO: 21026 - DNA, 21 bp, Artificial Sequence
  source: /note="Description of Artificial Sequence: Synthetic oligonucleotide"
aatgagccgcttgggatgcgt

SEQ ID NO: 21027 - DNA, 21 bp, Artificial Sequence
  source: /note="Description of Artificial Sequence: Synthetic oligonucleotide"
aatgagcagcatgcgactcat

SEQ ID NO: 21028 - DNA, 21 bp, Artificial Sequence
  source: /note="Description of Artificial Sequence: Synthetic oligonucleotide"
aatgagcggggttcgagttgg

SEQ ID NO: 21029 - DNA, 21 bp, Artificial Sequence
  source: /note="Description of Artificial Sequence: Synthetic oligonucleotide"
aatgagcgtcatcatcaggtt

SEQ ID NO: 21030 - DNA, 21 bp, Artificial Sequence
  source: /note="Description of Artificial Sequence: Synthetic oligonucleotide"
aatgagcggaatgtgcagctg

SEQ ID NO: 21031 - DNA, 21 bp, Artificial Sequence
  source: /note="Description of Artificial Sequence: Synthetic oligonucleotide"
aatgagcgtagggttgtgctg

SEQ ID NO: 21032 - DNA, 21 bp, Artificial Sequence
  source: /note="Description of Artificial Sequence: Synthetic oligonucleotide"
aatgagtcgcataagaatgtg

SEQ ID NO: 21033 - DNA, 21 bp, Artificial Sequence
  source: /note="Description of Artificial Sequence: Synthetic oligonucleotide"
aatgagtcgctgaggactgcg

SEQ ID NO: 21034 - DNA, 21 bp, Artificial Sequence
  source: /note="Description of Artificial Sequence: Synthetic oligonucleotide"
aatgagagtttgacgtctgct

SEQ ID NO: 21035 - DNA, 21 bp, Artificial Sequence
  source: /note="Description of Artificial Sequence: Synthetic oligonucleotide"
aatgagagtgttcgtagttat

SEQ ID NO: 21036 - DNA, 21 bp, Artificial Sequence
  source: /note="Description of Artificial Sequence: Synthetic oligonucleotide"
aatgagtatgtgcttgggctt

SEQ ID NO: 21037 - DNA, 21 bp, Artificial Sequence
  source: /note="Description of Artificial Sequence: Synthetic oligonucleotide"
aattttgcggcgaggagttat

SEQ ID NO: 21038 - DNA, 21 bp, Artificial Sequence
  source: /note="Description of Artificial Sequence: Synthetic oligonucleotide"
aattttgatcgtcatggtgcg

SEQ ID NO: 21039 - DNA, 21 bp, Artificial Sequence
  source: /note="Description of Artificial Sequence: Synthetic oligonucleotide"
aattttgatcggcctaggact

SEQ ID NO: 21040 - DNA, 21 bp, Artificial Sequence
  source: /note="Description of Artificial Sequence: Synthetic oligonucleotide"
aattttaatactagggtggct

SEQ ID NO: 21041 - DNA, 21 bp, Artificial Sequence
  source: /note="Description of Artificial Sequence: Synthetic oligonucleotide"
aattttcgtgtgtctagtggt

SEQ ID NO: 21042 - DNA, 21 bp, Artificial Sequence
  source: /note="Description of Artificial Sequence: Synthetic oligonucleotide"
aattttagtcctactagtcct

SEQ ID NO: 21043 - DNA, 21 bp, Artificial Sequence
  source: /note="Description of Artificial Sequence: Synthetic oligonucleotide"
aattttactaaggctggggct

SEQ ID NO: 21044 - DNA, 21 bp, Artificial Sequence
  source: /note="Description of Artificial Sequence: Synthetic oligonucleotide"
aattttactaagagtgcgggg

SEQ ID NO: 21045 - DNA, 21 bp, Artificial Sequence
  source: /note="Description of Artificial Sequence: Synthetic oligonucleotide"
aattttacgctgaagccgatt

SEQ ID NO: 21046 - DNA, 21 bp, Artificial Sequence
  source: /note="Description of Artificial Sequence: Synthetic oligonucleotide"
aattttgtgggggtgccgacg

SEQ ID NO: 21047 - DNA, 21 bp, Artificial Sequence
  source: /note="Description of Artificial Sequence: Synthetic oligonucleotide"
aattttgttgtgcctagtgat

SEQ ID NO: 21048 - DNA, 21 bp, Artificial Sequence
  source: /note="Description of Artificial Sequence: Synthetic oligonucleotide"
aatggtgctgcggaggttgcg

SEQ ID NO: 21049 - DNA, 21 bp, Artificial Sequence
  source: /note="Description of Artificial Sequence: Synthetic oligonucleotide"
aatggtgcggatcgtgcgtcg

SEQ ID NO: 21050 - DNA, 21 bp, Artificial Sequence
  source: /note="Description of Artificial Sequence: Synthetic oligonucleotide"
aatggtgcgggtctgactatt

SEQ ID NO: 21051 - DNA, 21 bp, Artificial Sequence
  source: /note="Description of Artificial Sequence: Synthetic oligonucleotide"
aatggggctctgcgtctgcct

SEQ ID NO: 21052 - DNA, 21 bp, Artificial Sequence
  source: /note="Description of Artificial Sequence: Synthetic oligonucleotide"
aatggtgatgcttgtccgagt

SEQ ID NO: 21053 - DNA, 21 bp, Artificial Sequence
  source: /note="Description of Artificial Sequence: Synthetic oligonucleotide"
aatggggaggctcaggctcgt

SEQ ID NO: 21054 - DNA, 21 bp, Artificial Sequence
  source: /note="Description of Artificial Sequence: Synthetic oligonucleotide"
aatggtgagccgtttagtatt

SEQ ID NO: 21055 - DNA, 21 bp, Artificial Sequence
  source: /note="Description of Artificial Sequence: Synthetic oligonucleotide"
aatggtggtgcgtatacgctg

SEQ ID NO: 21056 - DNA, 21 bp, Artificial Sequence
  source: /note="Description of Artificial Sequence: Synthetic oligonucleotide"
aatggggggattagtaggacg

SEQ ID NO: 21057 - DNA, 21 bp, Artificial Sequence
  source: /note="Description of Artificial Sequence: Synthetic oligonucleotide"
aatggtgggaatttgcttttg

SEQ ID NO: 21058 - DNA, 21 bp, Artificial Sequence
  source: /note="Description of Artificial Sequence: Synthetic oligonucleotide"
aatggtcattttgttgatgct

SEQ ID NO: 21059 - DNA, 21 bp, Artificial Sequence
  source: /note="Description of Artificial Sequence: Synthetic oligonucleotide"
aatgggcataatcatatgttg

SEQ ID NO: 21060 - DNA, 21 bp, Artificial Sequence
  source: /note="Description of Artificial Sequence: Synthetic oligonucleotide"
aatggtcatagtgtgtctgag

SEQ ID NO: 21061 - DNA, 21 bp, Artificial Sequence
  source: /note="Description of Artificial Sequence: Synthetic oligonucleotide"
aatggtaagaatggttcgacg

SEQ ID NO: 21062 - DNA, 21 bp, Artificial Sequence
  source: /note="Description of Artificial Sequence: Synthetic oligonucleotide"
aatgggcttcagacgggggtt

SEQ ID NO: 21063 - DNA, 21 bp, Artificial Sequence
  source: /note="Description of Artificial Sequence: Synthetic oligonucleotide"
aatgggatgggggctgtggtg

SEQ ID NO: 21064 - DNA, 21 bp, Artificial Sequence
  source: /note="Description of Artificial Sequence: Synthetic oligonucleotide"
aatggtatgcagcctttgaat

SEQ ID NO: 21065 - DNA, 21 bp, Artificial Sequence
  source: /note="Description of Artificial Sequence: Synthetic oligonucleotide"
aatgggatgtatccgtatcct

SEQ ID NO: 21066 - DNA, 21 bp, Artificial Sequence
  source: /note="Description of Artificial Sequence: Synthetic oligonucleotide"
aatgggaatgaggttttgtct

SEQ ID NO: 21067 - DNA, 21 bp, Artificial Sequence
  source: /note="Description of Artificial Sequence: Synthetic oligonucleotide"
aatggtcctcatcgtatggtt

SEQ ID NO: 21068 - DNA, 21 bp, Artificial Sequence
  source: /note="Description of Artificial Sequence: Synthetic oligonucleotide"
aatgggccgccggctgttggg

SEQ ID NO: 21069 - DNA, 21 bp, Artificial Sequence
  source: /note="Description of Artificial Sequence: Synthetic oligonucleotide"
aatggtcctccgaagggtatt

SEQ ID NO: 21070 - DNA, 21 bp, Artificial Sequence
  source: /note="Description of Artificial Sequence: Synthetic oligonucleotide"
aatgggcctagtgcgcagcag

SEQ ID NO: 21071 - DNA, 21 bp, Artificial Sequence
  source: /note="Description of Artificial Sequence: Synthetic oligonucleotide"
aatgggcaggctgagcctgct

SEQ ID NO: 21072 - DNA, 21 bp, Artificial Sequence
  source: /note="Description of Artificial Sequence: Synthetic oligonucleotide"
aatgggtctcatattgatcgg

SEQ ID NO: 21073 - DNA, 21 bp, Artificial Sequence
  source: /note="Description of Artificial Sequence: Synthetic oligonucleotide"
aatgggtcgtgggtgccggct

SEQ ID NO: 21074 - DNA, 21 bp, Artificial Sequence
  source: /note="Description of Artificial Sequence: Synthetic oligonucleotide"
aatggttcttatcagcctccg

SEQ ID NO: 21075 - DNA, 21 bp, Artificial Sequence
  source: /note="Description of Artificial Sequence: Synthetic oligonucleotide"
aatggtactcagcttctgagt

SEQ ID NO: 21076 - DNA, 21 bp, Artificial Sequence
  source: /note="Description of Artificial Sequence: Synthetic oligonucleotide"
aatgggactactgcgcttttt

SEQ ID NO: 21077 - DNA, 21 bp, Artificial Sequence
  source: /note="Description of Artificial Sequence: Synthetic oligonucleotide"
aatgggacgtatagtgtggag

SEQ ID NO: 21078 - DNA, 21 bp, Artificial Sequence
  source: /note="Description of Artificial Sequence: Synthetic oligonucleotide"
aatggtgtgctgcttcatgcg

SEQ ID NO: 21079 - DNA, 21 bp, Artificial Sequence
  source: /note="Description of Artificial Sequence: Synthetic oligonucleotide"
aatggtgtgccgagtttgggt

SEQ ID NO: 21080 - DNA, 21 bp, Artificial Sequence
  source: /note="Description of Artificial Sequence: Synthetic oligonucleotide"
aatgggtatgcggtttctgcg

SEQ ID NO: 21081 - DNA, 21 bp, Artificial Sequence
  source: /note="Description of Artificial Sequence: Synthetic oligonucleotide"
aatggttatactcgggatgag

SEQ ID NO: 21082 - DNA, 21 bp, Artificial Sequence
  source: /note="Description of Artificial Sequence: Synthetic oligonucleotide"
aatcatgcgagtaatacgacg

SEQ ID NO: 21083 - DNA, 21 bp, Artificial Sequence
  source: /note="Description of Artificial Sequence: Synthetic oligonucleotide"
aatcatcataatgcgtattct

SEQ ID NO: 21084 - DNA, 21 bp, Artificial Sequence
  source: /note="Description of Artificial Sequence: Synthetic oligonucleotide"
aatcatattacgtatgagaat

SEQ ID NO: 21085 - DNA, 21 bp, Artificial Sequence
  source: /note="Description of Artificial Sequence: Synthetic oligonucleotide"
aatcataagtgtgctgatgag

SEQ ID NO: 21086 - DNA, 21 bp, Artificial Sequence
  source: /note="Description of Artificial Sequence: Synthetic oligonucleotide"
aatcataagggtttgaatttg

SEQ ID NO: 21087 - DNA, 21 bp, Artificial Sequence
  source: /note="Description of Artificial Sequence: Synthetic oligonucleotide"
aatcatatgccttcggtgtat

SEQ ID NO: 21088 - DNA, 21 bp, Artificial Sequence
  source: /note="Description of Artificial Sequence: Synthetic oligonucleotide"
aatcataatggtcttcagatg

SEQ ID NO: 21089 - DNA, 21 bp, Artificial Sequence
  source: /note="Description of Artificial Sequence: Synthetic oligonucleotide"
aatcataataggccggctaat

SEQ ID NO: 21090 - DNA, 21 bp, Artificial Sequence
  source: /note="Description of Artificial Sequence: Synthetic oligonucleotide"
aatcatccttctgctagtact

SEQ ID NO: 21091 - DNA, 21 bp, Artificial Sequence
  source: /note="Description of Artificial Sequence: Synthetic oligonucleotide"
aatcatcctgttccgtcgtct

SEQ ID NO: 21092 - DNA, 21 bp, Artificial Sequence
  source: /note="Description of Artificial Sequence: Synthetic oligonucleotide"
aatcatccgtatcctaagatg

SEQ ID NO: 21093 - DNA, 21 bp, Artificial Sequence
  source: /note="Description of Artificial Sequence: Synthetic oligonucleotide"
aatcatcagttggtttcggag

SEQ ID NO: 21094 - DNA, 21 bp, Artificial Sequence
  source: /note="Description of Artificial Sequence: Synthetic oligonucleotide"
aatcatcgggcgagtccttat

SEQ ID NO: 21095 - DNA, 21 bp, Artificial Sequence
  source: /note="Description of Artificial Sequence: Synthetic oligonucleotide"
aatcatcggactggtaatgct

SEQ ID NO: 21096 - DNA, 21 bp, Artificial Sequence
  source: /note="Description of Artificial Sequence: Synthetic oligonucleotide"
aatcataggacgagtggttcg

SEQ ID NO: 21097 - DNA, 21 bp, Artificial Sequence
  source: /note="Description of Artificial Sequence: Synthetic oligonucleotide"
aatcattctgcggagatgagt

SEQ ID NO: 21098 - DNA, 21 bp, Artificial Sequence
  source: /note="Description of Artificial Sequence: Synthetic oligonucleotide"
aatcatagtgagactttgatg

SEQ ID NO: 21099 - DNA, 21 bp, Artificial Sequence
  source: /note="Description of Artificial Sequence: Synthetic oligonucleotide"
aatcattcgggtacgattgtt

SEQ ID NO: 21100 - DNA, 21 bp, Artificial Sequence
  source: /note="Description of Artificial Sequence: Synthetic oligonucleotide"
aatcattctccggtgcctctg

SEQ ID NO: 21101 - DNA, 21 bp, Artificial Sequence
  source: /note="Description of Artificial Sequence: Synthetic oligonucleotide"
aatcatagttcggatggtgct

SEQ ID NO: 21102 - DNA, 21 bp, Artificial Sequence
  source: /note="Description of Artificial Sequence: Synthetic oligonucleotide"
aatcatactggttctactctg

SEQ ID NO: 21103 - DNA, 21 bp, Artificial Sequence
  source: /note="Description of Artificial Sequence: Synthetic oligonucleotide"
aatcatactccgtcgattcct

SEQ ID NO: 21104 - DNA, 21 bp, Artificial Sequence
  source: /note="Description of Artificial Sequence: Synthetic oligonucleotide"
aatcatgttgcgaagagttgg

SEQ ID NO: 21105 - DNA, 21 bp, Artificial Sequence
  source: /note="Description of Artificial Sequence: Synthetic oligonucleotide"
aatcattataatgtgaatgag

SEQ ID NO: 21106 - DNA, 21 bp, Artificial Sequence
  source: /note="Description of Artificial Sequence: Synthetic oligonucleotide"
aatattgctaatgctttgaat

SEQ ID NO: 21107 - DNA, 21 bp, Artificial Sequence
  source: /note="Description of Artificial Sequence: Synthetic oligonucleotide"
aatatttttgatgatgctgat

SEQ ID NO: 21108 - DNA, 21 bp, Artificial Sequence
  source: /note="Description of Artificial Sequence: Synthetic oligonucleotide"
aatattggtgcgactccgagt

SEQ ID NO: 21109 - DNA, 21 bp, Artificial Sequence
  source: /note="Description of Artificial Sequence: Synthetic oligonucleotide"
aatattgggggtatgatgtcg

SEQ ID NO: 21110 - DNA, 21 bp, Artificial Sequence
  source: /note="Description of Artificial Sequence: Synthetic oligonucleotide"
aatattgggatgactacgggg

SEQ ID NO: 21111 - DNA, 21 bp, Artificial Sequence
  source: /note="Description of Artificial Sequence: Synthetic oligonucleotide"
aatattaagcatgggccgcat

SEQ ID NO: 21112 - DNA, 21 bp, Artificial Sequence
  source: /note="Description of Artificial Sequence: Synthetic oligonucleotide"
aatattaagctggggcatgat

SEQ ID NO: 21113 - DNA, 21 bp, Artificial Sequence
  source: /note="Description of Artificial Sequence: Synthetic oligonucleotide"
aatattctgcagtatacttct

SEQ ID NO: 21114 - DNA, 21 bp, Artificial Sequence
  source: /note="Description of Artificial Sequence: Synthetic oligonucleotide"
aatattttgcgtacggatgag

SEQ ID NO: 21115 - DNA, 21 bp, Artificial Sequence
  source: /note="Description of Artificial Sequence: Synthetic oligonucleotide"
aatattccggatcgttttatt

SEQ ID NO: 21116 - DNA, 21 bp, Artificial Sequence
  source: /note="Description of Artificial Sequence: Synthetic oligonucleotide"
aatattccgctgggtgcggcg

SEQ ID NO: 21117 - DNA, 21 bp, Artificial Sequence
  source: /note="Description of Artificial Sequence: Synthetic oligonucleotide"
aatattcctccgcggcctctt

SEQ ID NO: 21118 - DNA, 21 bp, Artificial Sequence
  source: /note="Description of Artificial Sequence: Synthetic oligonucleotide"
aatattcaggttaggagtggg

SEQ ID NO: 21119 - DNA, 21 bp, Artificial Sequence
  source: /note="Description of Artificial Sequence: Synthetic oligonucleotide"
aatattcgtgatcttgttcat

SEQ ID NO: 21120 - DNA, 21 bp, Artificial Sequence
  source: /note="Description of Artificial Sequence: Synthetic oligonucleotide"
aatattcgtacgaataatatt

SEQ ID NO: 21121 - DNA, 21 bp, Artificial Sequence
  source: /note="Description of Artificial Sequence: Synthetic oligonucleotide"
aatatttcgttgccgttgttg

SEQ ID NO: 21122 - DNA, 21 bp, Artificial Sequence
  source: /note="Description of Artificial Sequence: Synthetic oligonucleotide"
aatattagttatacgattgag

SEQ ID NO: 21123 - DNA, 21 bp, Artificial Sequence
  source: /note="Description of Artificial Sequence: Synthetic oligonucleotide"
aatattacgctggctcatctg

SEQ ID NO: 21124 - DNA, 21 bp, Artificial Sequence
  source: /note="Description of Artificial Sequence: Synthetic oligonucleotide"
aatattacttctaatgagagt

SEQ ID NO: 21125 - DNA, 21 bp, Artificial Sequence
  source: /note="Description of Artificial Sequence: Synthetic oligonucleotide"
aatattactactcgtgggacg

SEQ ID NO: 21126 - DNA, 21 bp, Artificial Sequence
  source: /note="Description of Artificial Sequence: Synthetic oligonucleotide"
aatattgtggagcgttcgagg

SEQ ID NO: 21127 - DNA, 21 bp, Artificial Sequence
  source: /note="Description of Artificial Sequence: Synthetic oligonucleotide"
aataaggcgcttactcatatg

SEQ ID NO: 21128 - DNA, 21 bp, Artificial Sequence
  source: /note="Description of Artificial Sequence: Synthetic oligonucleotide"
aataaggagcatgttcagggg

SEQ ID NO: 21129 - DNA, 21 bp, Artificial Sequence
  source: /note="Description of Artificial Sequence: Synthetic oligonucleotide"
aataaggagccgactgattct

SEQ ID NO: 21130 - DNA, 21 bp, Artificial Sequence
  source: /note="Description of Artificial Sequence: Synthetic oligonucleotide"
aataaggaggtgcataattcg

SEQ ID NO: 21131 - DNA, 21 bp, Artificial Sequence
  source: /note="Description of Artificial Sequence: Synthetic oligonucleotide"
aataagggtgtgtattcgggt

SEQ ID NO: 21132 - DNA, 21 bp, Artificial Sequence
  source: /note="Description of Artificial Sequence: Synthetic oligonucleotide"
aataagcattttcaggcgcat

SEQ ID NO: 21133 - DNA, 21 bp, Artificial Sequence
  source: /note="Description of Artificial Sequence: Synthetic oligonucleotide"
aataagattgatccttatact

SEQ ID NO: 21134 - DNA, 21 bp, Artificial Sequence
  source: /note="Description of Artificial Sequence: Synthetic oligonucleotide"
aataagatgactacttatgct

SEQ ID NO: 21135 - DNA, 21 bp, Artificial Sequence
  source: /note="Description of Artificial Sequence: Synthetic oligonucleotide"
aataagcagtttacgcctgag

SEQ ID NO: 21136 - DNA, 21 bp, Artificial Sequence
  source: /note="Description of Artificial Sequence: Synthetic oligonucleotide"
aataagagtattaatactgat

SEQ ID NO: 21137 - DNA, 21 bp, Artificial Sequence
  source: /note="Description of Artificial Sequence: Synthetic oligonucleotide"
aataagtctttgacgacgggt

SEQ ID NO: 21138 - DNA, 21 bp, Artificial Sequence
  source: /note="Description of Artificial Sequence: Synthetic oligonucleotide"
aataagagtatgaatgttccg

SEQ ID NO: 21139 - DNA, 21 bp, Artificial Sequence
  source: /note="Description of Artificial Sequence: Synthetic oligonucleotide"
aataagactgataatgtttct

SEQ ID NO: 21140 - DNA, 21 bp, Artificial Sequence
  source: /note="Description of Artificial Sequence: Synthetic oligonucleotide"
aataagacgcagagtaggcat

SEQ ID NO: 21141 - DNA, 21 bp, Artificial Sequence
  source: /note="Description of Artificial Sequence: Synthetic oligonucleotide"
aataaggtgttgcatgctccg

SEQ ID NO: 21142 - DNA, 21 bp, Artificial Sequence
  source: /note="Description of Artificial Sequence: Synthetic oligonucleotide"
aataaggtgtctggtccgatg

SEQ ID NO: 21143 - DNA, 21 bp, Artificial Sequence
  source: /note="Description of Artificial Sequence: Synthetic oligonucleotide"
aataagtatcaggatttgcgt

SEQ ID NO: 21144 - DNA, 21 bp, Artificial Sequence
  source: /note="Description of Artificial Sequence: Synthetic oligonucleotide"
aatttggctcatactaagttt

SEQ ID NO: 21145 - DNA, 21 bp, Artificial Sequence
  source: /note="Description of Artificial Sequence: Synthetic oligonucleotide"
aatcttgcgctggatgctcgt

SEQ ID NO: 21146 - DNA, 21 bp, Artificial Sequence
  source: /note="Description of Artificial Sequence: Synthetic oligonucleotide"
aatcttgctcctattcagcgg

SEQ ID NO: 21147 - DNA, 21 bp, Artificial Sequence
  source: /note="Description of Artificial Sequence: Synthetic oligonucleotide"
aatttggatcgtccggtgacg

SEQ ID NO: 21148 - DNA, 21 bp, Artificial Sequence
  source: /note="Description of Artificial Sequence: Synthetic oligonucleotide"
aatcttgagactattcctagg

SEQ ID NO: 21149 - DNA, 21 bp, Artificial Sequence
  source: /note="Description of Artificial Sequence: Synthetic oligonucleotide"
aatttgggtggttcggtggag

SEQ ID NO: 21150 - DNA, 21 bp, Artificial Sequence
  source: /note="Description of Artificial Sequence: Synthetic oligonucleotide"
aatctgggtaagaaggagctt

SEQ ID NO: 21151 - DNA, 21 bp, Artificial Sequence
  source: /note="Description of Artificial Sequence: Synthetic oligonucleotide"
aatttggggcctacgctgccg

SEQ ID NO: 21152 - DNA, 21 bp, Artificial Sequence
  source: /note="Description of Artificial Sequence: Synthetic oligonucleotide"
aatttgggtccttatcctctt

SEQ ID NO: 21153 - DNA, 21 bp, Artificial Sequence
  source: /note="Description of Artificial Sequence: Synthetic oligonucleotide"
aatttgcatcttattagtgcg

SEQ ID NO: 21154 - DNA, 21 bp, Artificial Sequence
  source: /note="Description of Artificial Sequence: Synthetic oligonucleotide"
aatctgcatttgccgtcgagt

SEQ ID NO: 21155 - DNA, 21 bp, Artificial Sequence
  source: /note="Description of Artificial Sequence: Synthetic oligonucleotide"
aatttgcatcggacgcctgat

SEQ ID NO: 21156 - DNA, 21 bp, Artificial Sequence
  source: /note="Description of Artificial Sequence: Synthetic oligonucleotide"
aatttgcattcgactacggcg

SEQ ID NO: 21157 - DNA, 21 bp, Artificial Sequence
  source: /note="Description of Artificial Sequence: Synthetic oligonucleotide"
aatctgattgctatgggttct

SEQ ID NO: 21158 - DNA, 21 bp, Artificial Sequence
  source: /note="Description of Artificial Sequence: Synthetic oligonucleotide"
aatttgattccgacgaaggcg

SEQ ID NO: 21159 - DNA, 21 bp, Artificial Sequence
  source: /note="Description of Artificial Sequence: Synthetic oligonucleotide"
aatctgaagcttatgtctggt

SEQ ID NO: 21160 - DNA, 21 bp, Artificial Sequence
  source: /note="Description of Artificial Sequence: Synthetic oligonucleotide"
aatttgaaggtgctggttacg

SEQ ID NO: 21161 - DNA, 21 bp, Artificial Sequence
  source: /note="Description of Artificial Sequence: Synthetic oligonucleotide"
aatttgaaggtgacgagggat

SEQ ID NO: 21162 - DNA, 21 bp, Artificial Sequence
  source: /note="Description of Artificial Sequence: Synthetic oligonucleotide"
aatctgcttgatgtgcatttg

SEQ ID NO: 21163 - DNA, 21 bp, Artificial Sequence
  source: /note="Description of Artificial Sequence: Synthetic oligonucleotide"
aatctgttgggtcatgctgtg

SEQ ID NO: 21164 - DNA, 21 bp, Artificial Sequence
  source: /note="Description of Artificial Sequence: Synthetic oligonucleotide"
aatcttctgactaatgctgtt

SEQ ID NO: 21165 - DNA, 21 bp, Artificial Sequence
  source: /note="Description of Artificial Sequence: Synthetic oligonucleotide"
aatctgaatgcgacgtcggtg

SEQ ID NO: 21166 - DNA, 21 bp, Artificial Sequence
  source: /note="Description of Artificial Sequence: Synthetic oligonucleotide"
aatttgccgccgagttcgcct

SEQ ID NO: 21167 - DNA, 21 bp, Artificial Sequence
  source: /note="Description of Artificial Sequence: Synthetic oligonucleotide"
aatttgccgcggccttctttg

SEQ ID NO: 21168 - DNA, 21 bp, Artificial Sequence
  source: /note="Description of Artificial Sequence: Synthetic oligonucleotide"
aatttgcctaggcggactgat

SEQ ID NO: 21169 - DNA, 21 bp, Artificial Sequence
  source: /note="Description of Artificial Sequence: Synthetic oligonucleotide"
aatttgccttattcgttggtt

SEQ ID NO: 21170 - DNA, 21 bp, Artificial Sequence
  source: /note="Description of Artificial Sequence: Synthetic oligonucleotide"
aatcttccttatacgcaggct

SEQ ID NO: 21171 - DNA, 21 bp, Artificial Sequence
  source: /note="Description of Artificial Sequence: Synthetic oligonucleotide"
aatctgcagcttacgaatggt

SEQ ID NO: 21172 - DNA, 21 bp, Artificial Sequence
  source: /note="Description of Artificial Sequence: Synthetic oligonucleotide"
aatttgagggatggtgggact

SEQ ID NO: 21173 - DNA, 21 bp, Artificial Sequence
  source: /note="Description of Artificial Sequence: Synthetic oligonucleotide"
aatttgcgtgggaatccggct

SEQ ID NO: 21174 - DNA, 21 bp, Artificial Sequence
  source: /note="Description of Artificial Sequence: Synthetic oligonucleotide"
aatctgcggatgcagattcct

SEQ ID NO: 21175 - DNA, 21 bp, Artificial Sequence
  source: /note="Description of Artificial Sequence: Synthetic oligonucleotide"
aatttgcgtcctatgtcgtcg

SEQ ID NO: 21176 - DNA, 21 bp, Artificial Sequence
  source: /note="Description of Artificial Sequence: Synthetic oligonucleotide"
aatctttctgatgatagggag

SEQ ID NO: 21177 - DNA, 21 bp, Artificial Sequence
  source: /note="Description of Artificial Sequence: Synthetic oligonucleotide"
aatctgtcggatagtaggagt

SEQ ID NO: 21178 - DNA, 21 bp, Artificial Sequence
  source: /note="Description of Artificial Sequence: Synthetic oligonucleotide"
aatttgagtcatggtgtgttg

SEQ ID NO: 21179 - DNA, 21 bp, Artificial Sequence
  source: /note="Description of Artificial Sequence: Synthetic oligonucleotide"
aatctttcgcataggcctatg

SEQ ID NO: 21180 - DNA, 21 bp, Artificial Sequence
  source: /note="Description of Artificial Sequence: Synthetic oligonucleotide"
aatttgtctatgggttcgccg

SEQ ID NO: 21181 - DNA, 21 bp, Artificial Sequence
  source: /note="Description of Artificial Sequence: Synthetic oligonucleotide"
aatctgagtaattcggtgaag

SEQ ID NO: 21182 - DNA, 21 bp, Artificial Sequence
  source: /note="Description of Artificial Sequence: Synthetic oligonucleotide"
aatctttctccttatcctatg

SEQ ID NO: 21183 - DNA, 21 bp, Artificial Sequence
  source: /note="Description of Artificial Sequence: Synthetic oligonucleotide"
aatctttctccttatactatg

SEQ ID NO: 21184 - DNA, 21 bp, Artificial Sequence
  source: /note="Description of Artificial Sequence: Synthetic oligonucleotide"
aatctgagtcgggattctact

SEQ ID NO: 21185 - DNA, 21 bp, Artificial Sequence
  source: /note="Description of Artificial Sequence: Synthetic oligonucleotide"
aatctttcttcgggtcaggtt

SEQ ID NO: 21186 - DNA, 21 bp, Artificial Sequence
  source: /note="Description of Artificial Sequence: Synthetic oligonucleotide"
aatttgtcgtatacgcagcag

SEQ ID NO: 21187 - DNA, 21 bp, Artificial Sequence
  source: /note="Description of Artificial Sequence: Synthetic oligonucleotide"
aatttgactgcgggtcctcct

SEQ ID NO: 21188 - DNA, 21 bp, Artificial Sequence
  source: /note="Description of Artificial Sequence: Synthetic oligonucleotide"
aatttgacgggtggtagttct

SEQ ID NO: 21189 - DNA, 21 bp, Artificial Sequence
  source: /note="Description of Artificial Sequence: Synthetic oligonucleotide"
aatcttactcatactgttatg

SEQ ID NO: 21190 - DNA, 21 bp, Artificial Sequence
  source: /note="Description of Artificial Sequence: Synthetic oligonucleotide"
aatctgactaattcgagtatg

SEQ ID NO: 21191 - DNA, 21 bp, Artificial Sequence
  source: /note="Description of Artificial Sequence: Synthetic oligonucleotide"
aatctgacgcgtatgattcat

SEQ ID NO: 21192 - DNA, 21 bp, Artificial Sequence
  source: /note="Description of Artificial Sequence: Synthetic oligonucleotide"
aatctgacggttaaggttcag

SEQ ID NO: 21193 - DNA, 21 bp, Artificial Sequence
  source: /note="Description of Artificial Sequence: Synthetic oligonucleotide"
aatttggttcagtttgttcat

SEQ ID NO: 21194 - DNA, 21 bp, Artificial Sequence
  source: /note="Description of Artificial Sequence: Synthetic oligonucleotide"
aatttggttcagaataagccg

SEQ ID NO: 21195 - DNA, 21 bp, Artificial Sequence
  source: /note="Description of Artificial Sequence: Synthetic oligonucleotide"
aatctttatgcgtatgatccg

SEQ ID NO: 21196 - DNA, 21 bp, Artificial Sequence
  source: /note="Description of Artificial Sequence: Synthetic oligonucleotide"
aatttgtatactccttatcct

SEQ ID NO: 21197 - DNA, 21 bp, Artificial Sequence
  source: /note="Description of Artificial Sequence: Synthetic oligonucleotide"
aatatggcgcattctccgccg

SEQ ID NO: 21198 - DNA, 21 bp, Artificial Sequence
  source: /note="Description of Artificial Sequence: Synthetic oligonucleotide"
aatatggcgcatgtgcagtat

SEQ ID NO: 21199 - DNA, 21 bp, Artificial Sequence
  source: /note="Description of Artificial Sequence: Synthetic oligonucleotide"
aatatggctattgttgagcag

SEQ ID NO: 21200 - DNA, 21 bp, Artificial Sequence
  source: /note="Description of Artificial Sequence: Synthetic oligonucleotide"
aatatggctacgattagggtt

SEQ ID NO: 21201 - DNA, 21 bp, Artificial Sequence
  source: /note="Description of Artificial Sequence: Synthetic oligonucleotide"
aatatgcatattcgttctact

SEQ ID NO: 21202 - DNA, 21 bp, Artificial Sequence
  source: /note="Description of Artificial Sequence: Synthetic oligonucleotide"
aatatgcatactcggacttct

SEQ ID NO: 21203 - DNA, 21 bp, Artificial Sequence
  source: /note="Description of Artificial Sequence: Synthetic oligonucleotide"
aatatgattgctctgcagacg

SEQ ID NO: 21204 - DNA, 21 bp, Artificial Sequence
  source: /note="Description of Artificial Sequence: Synthetic oligonucleotide"
aatatgaaggcttcgtctgtt

SEQ ID NO: 21205 - DNA, 21 bp, Artificial Sequence
  source: /note="Description of Artificial Sequence: Synthetic oligonucleotide"
aatatgctgacggatcgtgtg

SEQ ID NO: 21206 - DNA, 21 bp, Artificial Sequence
  source: /note="Description of Artificial Sequence: Synthetic oligonucleotide"
aatatgccgaatacttctcat

SEQ ID NO: 21207 - DNA, 21 bp, Artificial Sequence
  source: /note="Description of Artificial Sequence: Synthetic oligonucleotide"
aatatgcctaggcatgggctt

SEQ ID NO: 21208 - DNA, 21 bp, Artificial Sequence
  source: /note="Description of Artificial Sequence: Synthetic oligonucleotide"
aatatgccggttggttcgacg

SEQ ID NO: 21209 - DNA, 21 bp, Artificial Sequence
  source: /note="Description of Artificial Sequence: Synthetic oligonucleotide"
aatatgcaggggactaatcct

SEQ ID NO: 21210 - DNA, 21 bp, Artificial Sequence
  source: /note="Description of Artificial Sequence: Synthetic oligonucleotide"
aatatgcgggatacggcgagt

SEQ ID NO: 21211 - DNA, 21 bp, Artificial Sequence
  source: /note="Description of Artificial Sequence: Synthetic oligonucleotide"
aatatgcggctggatcagggt

SEQ ID NO: 21212 - DNA, 21 bp, Artificial Sequence
  source: /note="Description of Artificial Sequence: Synthetic oligonucleotide"
aatatgcggcctcatactggt

SEQ ID NO: 21213 - DNA, 21 bp, Artificial Sequence
  source: /note="Description of Artificial Sequence: Synthetic oligonucleotide"
aatatgcgggttactccgcag

SEQ ID NO: 21214 - DNA, 21 bp, Artificial Sequence
  source: /note="Description of Artificial Sequence: Synthetic oligonucleotide"
aatatgtctgctaatattaat

SEQ ID NO: 21215 - DNA, 21 bp, Artificial Sequence
  source: /note="Description of Artificial Sequence: Synthetic oligonucleotide"
aatatgtcgaagagtcctggt

SEQ ID NO: 21216 - DNA, 21 bp, Artificial Sequence
  source: /note="Description of Artificial Sequence: Synthetic oligonucleotide"
aatatgagtaatgtgcatacg

SEQ ID NO: 21217 - DNA, 21 bp, Artificial Sequence
  source: /note="Description of Artificial Sequence: Synthetic oligonucleotide"
aatatgtcgcggggtgcgatg

SEQ ID NO: 21218 - DNA, 21 bp, Artificial Sequence
  source: /note="Description of Artificial Sequence: Synthetic oligonucleotide"
aatatgtatccggtgcctcct

SEQ ID NO: 21219 - DNA, 21 bp, Artificial Sequence
  source: /note="Description of Artificial Sequence: Synthetic oligonucleotide"
aataatgctaaggcgatgact

SEQ ID NO: 21220 - DNA, 21 bp, Artificial Sequence
  source: /note="Description of Artificial Sequence: Synthetic oligonucleotide"
aataatgcttcgagttctgat

SEQ ID NO: 21221 - DNA, 21 bp, Artificial Sequence
  source: /note="Description of Artificial Sequence: Synthetic oligonucleotide"
aataatgatcggctggtgcat

SEQ ID NO: 21222 - DNA, 21 bp, Artificial Sequence
  source: /note="Description of Artificial Sequence: Synthetic oligonucleotide"
aataatgagttgaggtcgtct

SEQ ID NO: 21223 - DNA, 21 bp, Artificial Sequence
  source: /note="Description of Artificial Sequence: Synthetic oligonucleotide"
aataattttggtaatacttat

SEQ ID NO: 21224 - DNA, 21 bp, Artificial Sequence
  source: /note="Description of Artificial Sequence: Synthetic oligonucleotide"
aataatgggaagggtcctgtg

SEQ ID NO: 21225 - DNA, 21 bp, Artificial Sequence
  source: /note="Description of Artificial Sequence: Synthetic oligonucleotide"
aataatgggttgccttctcgg

SEQ ID NO: 21226 - DNA, 21 bp, Artificial Sequence
  source: /note="Description of Artificial Sequence: Synthetic oligonucleotide"
aataatgggcgtgctcagctt

SEQ ID NO: 21227 - DNA, 21 bp, Artificial Sequence
  source: /note="Description of Artificial Sequence: Synthetic oligonucleotide"
aataatgggaggttgccgaat

SEQ ID NO: 21228 - DNA, 21 bp, Artificial Sequence
  source: /note="Description of Artificial Sequence: Synthetic oligonucleotide"
aataatcataagattcagtct

SEQ ID NO: 21229 - DNA, 21 bp, Artificial Sequence
  source: /note="Description of Artificial Sequence: Synthetic oligonucleotide"
aataatctgaggttgaatctt

SEQ ID NO: 21230 - DNA, 21 bp, Artificial Sequence
  source: /note="Description of Artificial Sequence: Synthetic oligonucleotide"
aataatcttaggacgtctttg

SEQ ID NO: 21231 - DNA, 21 bp, Artificial Sequence
  source: /note="Description of Artificial Sequence: Synthetic oligonucleotide"
aataatatgaatactatgccg

SEQ ID NO: 21232 - DNA, 21 bp, Artificial Sequence
  source: /note="Description of Artificial Sequence: Synthetic oligonucleotide"
aataataatgagcattatgtt

SEQ ID NO: 21233 - DNA, 21 bp, Artificial Sequence
  source: /note="Description of Artificial Sequence: Synthetic oligonucleotide"
aataataatcttgagacgatg

SEQ ID NO: 21234 - DNA, 21 bp, Artificial Sequence
  source: /note="Description of Artificial Sequence: Synthetic oligonucleotide"
aataataatcctaagtatggg

SEQ ID NO: 21235 - DNA, 21 bp, Artificial Sequence
  source: /note="Description of Artificial Sequence: Synthetic oligonucleotide"
aataataatacgactccgttg

SEQ ID NO: 21236 - DNA, 21 bp, Artificial Sequence
  source: /note="Description of Artificial Sequence: Synthetic oligonucleotide"
aataatccggctcctccgtcg

SEQ ID NO: 21237 - DNA, 21 bp, Artificial Sequence
  source: /note="Description of Artificial Sequence: Synthetic oligonucleotide"
aataatccggatgcgtatagt

SEQ ID NO: 21238 - DNA, 21 bp, Artificial Sequence
  source: /note="Description of Artificial Sequence: Synthetic oligonucleotide"
aataatcgtccggcgcgggag

SEQ ID NO: 21239 - DNA, 21 bp, Artificial Sequence
  source: /note="Description of Artificial Sequence: Synthetic oligonucleotide"
aataatagtatggctctgatg

SEQ ID NO: 21240 - DNA, 21 bp, Artificial Sequence
  source: /note="Description of Artificial Sequence: Synthetic oligonucleotide"
aataattcgcggattagttct

SEQ ID NO: 21241 - DNA, 21 bp, Artificial Sequence
  source: /note="Description of Artificial Sequence: Synthetic oligonucleotide"
aataattcgcgggttgggacg

SEQ ID NO: 21242 - DNA, 21 bp, Artificial Sequence
  source: /note="Description of Artificial Sequence: Synthetic oligonucleotide"
aataattctagttattctgag

SEQ ID NO: 21243 - DNA, 21 bp, Artificial Sequence
  source: /note="Description of Artificial Sequence: Synthetic oligonucleotide"
aataatgtgaatcctattgcg

SEQ ID NO: 21244 - DNA, 21 bp, Artificial Sequence
  source: /note="Description of Artificial Sequence: Synthetic oligonucleotide"
aataatgtttctacgattatt

SEQ ID NO: 21245 - DNA, 21 bp, Artificial Sequence
  source: /note="Description of Artificial Sequence: Synthetic oligonucleotide"
aataattggcataatacgccg

SEQ ID NO: 21246 - DNA, 21 bp, Artificial Sequence
  source: /note="Description of Artificial Sequence: Synthetic oligonucleotide"
aataattataatcctcctact

SEQ ID NO: 21247 - DNA, 21 bp, Artificial Sequence
  source: /note="Description of Artificial Sequence: Synthetic oligonucleotide"
aatccggctgcttcgactcat

SEQ ID NO: 21248 - DNA, 21 bp, Artificial Sequence
  source: /note="Description of Artificial Sequence: Synthetic oligonucleotide"
aatccggctcttcctggtcat

SEQ ID NO: 21249 - DNA, 21 bp, Artificial Sequence
  source: /note="Description of Artificial Sequence: Synthetic oligonucleotide"
aatccggagggttgggggctt

SEQ ID NO: 21250 - DNA, 21 bp, Artificial Sequence
  source: /note="Description of Artificial Sequence: Synthetic oligonucleotide"
aatcctgagacgctgattagg

SEQ ID NO: 21251 - DNA, 21 bp, Artificial Sequence
  source: /note="Description of Artificial Sequence: Synthetic oligonucleotide"
aatcctgaggtttctccgtct

SEQ ID NO: 21252 - DNA, 21 bp, Artificial Sequence
  source: /note="Description of Artificial Sequence: Synthetic oligonucleotide"
aatcctggtgcgaatatgtcg

SEQ ID NO: 21253 - DNA, 21 bp, Artificial Sequence
  source: /note="Description of Artificial Sequence: Synthetic oligonucleotide"
aatccgggttctcagatggtt

SEQ ID NO: 21254 - DNA, 21 bp, Artificial Sequence
  source: /note="Description of Artificial Sequence: Synthetic oligonucleotide"
aatccgggtactactacgact

SEQ ID NO: 21255 - DNA, 21 bp, Artificial Sequence
  source: /note="Description of Artificial Sequence: Synthetic oligonucleotide"
aatcctggtgtgaagagtgct

SEQ ID NO: 21256 - DNA, 21 bp, Artificial Sequence
  source: /note="Description of Artificial Sequence: Synthetic oligonucleotide"
aatcctggtgtgactcatctt

SEQ ID NO: 21257 - DNA, 21 bp, Artificial Sequence
  source: /note="Description of Artificial Sequence: Synthetic oligonucleotide"
aatcctcatatttcggtttct

SEQ ID NO: 21258 - DNA, 21 bp, Artificial Sequence
  source: /note="Description of Artificial Sequence: Synthetic oligonucleotide"
aatcctcatatgcagaatatt

SEQ ID NO: 21259 - DNA, 21 bp, Artificial Sequence
  source: /note="Description of Artificial Sequence: Synthetic oligonucleotide"
aatccgcataatgatacgggt

SEQ ID NO: 21260 - DNA, 21 bp, Artificial Sequence
  source: /note="Description of Artificial Sequence: Synthetic oligonucleotide"
aatccgattctgaagactcag

SEQ ID NO: 21261 - DNA, 21 bp, Artificial Sequence
  source: /note="Description of Artificial Sequence: Synthetic oligonucleotide"
aatcctattagttcggggcct

SEQ ID NO: 21262 - DNA, 21 bp, Artificial Sequence
  source: /note="Description of Artificial Sequence: Synthetic oligonucleotide"
aatccgaagttgatgaaggag

SEQ ID NO: 21263 - DNA, 21 bp, Artificial Sequence
  source: /note="Description of Artificial Sequence: Synthetic oligonucleotide"
aatccgctttcgaatgatggt

SEQ ID NO: 21264 - DNA, 21 bp, Artificial Sequence
  source: /note="Description of Artificial Sequence: Synthetic oligonucleotide"
aatcctcttacgactcatgat

SEQ ID NO: 21265 - DNA, 21 bp, Artificial Sequence
  source: /note="Description of Artificial Sequence: Synthetic oligonucleotide"
aatcctatgatgcatgggtcg

SEQ ID NO: 21266 - DNA, 21 bp, Artificial Sequence
  source: /note="Description of Artificial Sequence: Synthetic oligonucleotide"
aatccgatgacgcctgatcct

SEQ ID NO: 21267 - DNA, 21 bp, Artificial Sequence
  source: /note="Description of Artificial Sequence: Synthetic oligonucleotide"
aatccgaatcaggttgcggag

SEQ ID NO: 21268 - DNA, 21 bp, Artificial Sequence
  source: /note="Description of Artificial Sequence: Synthetic oligonucleotide"
aatcctaatacgcgtaattgt

SEQ ID NO: 21269 - DNA, 21 bp, Artificial Sequence
  source: /note="Description of Artificial Sequence: Synthetic oligonucleotide"
aatccgcctgcgctgttgcct

SEQ ID NO: 21270 - DNA, 21 bp, Artificial Sequence
  source: /note="Description of Artificial Sequence: Synthetic oligonucleotide"
aatccgcctcctccgagtcct

SEQ ID NO: 21271 - DNA, 21 bp, Artificial Sequence
  source: /note="Description of Artificial Sequence: Synthetic oligonucleotide"
aatccgccgaggtatggtagt

SEQ ID NO: 21272 - DNA, 21 bp, Artificial Sequence
  source: /note="Description of Artificial Sequence: Synthetic oligonucleotide"
aatcctcctagtctgtcttcg

SEQ ID NO: 21273 - DNA, 21 bp, Artificial Sequence
  source: /note="Description of Artificial Sequence: Synthetic oligonucleotide"
aatcctccttcgcggggtaat

SEQ ID NO: 21274 - DNA, 21 bp, Artificial Sequence
  source: /note="Description of Artificial Sequence: Synthetic oligonucleotide"
aatcctccttatgcgctggct

SEQ ID NO: 21275 - DNA, 21 bp, Artificial Sequence
  source: /note="Description of Artificial Sequence: Synthetic oligonucleotide"
aatccgcagatgcctagtccg

SEQ ID NO: 21276 - DNA, 21 bp, Artificial Sequence
  source: /note="Description of Artificial Sequence: Synthetic oligonucleotide"
aatccgcagaggcttgggcag

SEQ ID NO: 21277 - DNA, 21 bp, Artificial Sequence
  source: /note="Description of Artificial Sequence: Synthetic oligonucleotide"
aatcctcagagtgtgacgcat

SEQ ID NO: 21278 - DNA, 21 bp, Artificial Sequence
  source: /note="Description of Artificial Sequence: Synthetic oligonucleotide"
aatcctagggcgcagatgagt

SEQ ID NO: 21279 - DNA, 21 bp, Artificial Sequence
  source: /note="Description of Artificial Sequence: Synthetic oligonucleotide"
aatccgcgtgcttcgtcttgg

SEQ ID NO: 21280 - DNA, 21 bp, Artificial Sequence
  source: /note="Description of Artificial Sequence: Synthetic oligonucleotide"
aatcctcggaatccgactctg

SEQ ID NO: 21281 - DNA, 21 bp, Artificial Sequence
  source: /note="Description of Artificial Sequence: Synthetic oligonucleotide"
aatccgaggcctgggcaggtg

SEQ ID NO: 21282 - DNA, 21 bp, Artificial Sequence
  source: /note="Description of Artificial Sequence: Synthetic oligonucleotide"
aatccgagtggtaaggttgcg

SEQ ID NO: 21283 - DNA, 21 bp, Artificial Sequence
  source: /note="Description of Artificial Sequence: Synthetic oligonucleotide"
aatccgtcgcttcagactacg

SEQ ID NO: 21284 - DNA, 21 bp, Artificial Sequence
  source: /note="Description of Artificial Sequence: Synthetic oligonucleotide"
aatccgtctttgcggattggt

SEQ ID NO: 21285 - DNA, 21 bp, Artificial Sequence
  source: /note="Description of Artificial Sequence: Synthetic oligonucleotide"
aatccttcgaatcatgcgctt

SEQ ID NO: 21286 - DNA, 21 bp, Artificial Sequence
  source: /note="Description of Artificial Sequence: Synthetic oligonucleotide"
aatccttctcagtttgatttt

SEQ ID NO: 21287 - DNA, 21 bp, Artificial Sequence
  source: /note="Description of Artificial Sequence: Synthetic oligonucleotide"
aatccttcgcggctgccgcag

SEQ ID NO: 21288 - DNA, 21 bp, Artificial Sequence
  source: /note="Description of Artificial Sequence: Synthetic oligonucleotide"
aatcctagtaggcaggcgccg

SEQ ID NO: 21289 - DNA, 21 bp, Artificial Sequence
  source: /note="Description of Artificial Sequence: Synthetic oligonucleotide"
aatccttcgtcttcgggttgt

SEQ ID NO: 21290 - DNA, 21 bp, Artificial Sequence
  source: /note="Description of Artificial Sequence: Synthetic oligonucleotide"
aatccgtctgtggttactgct

SEQ ID NO: 21291 - DNA, 21 bp, Artificial Sequence
  source: /note="Description of Artificial Sequence: Synthetic oligonucleotide"
aatcctactgcgtcgaatgct

SEQ ID NO: 21292 - DNA, 21 bp, Artificial Sequence
  source: /note="Description of Artificial Sequence: Synthetic oligonucleotide"
aatcctacgtttcatgggtct

SEQ ID NO: 21293 - DNA, 21 bp, Artificial Sequence
  source: /note="Description of Artificial Sequence: Synthetic oligonucleotide"
aatcctactcagccgattaag

SEQ ID NO: 21294 - DNA, 21 bp, Artificial Sequence
  source: /note="Description of Artificial Sequence: Synthetic oligonucleotide"
aatccgacgtcgttgccgtct

SEQ ID NO: 21295 - DNA, 21 bp, Artificial Sequence
  source: /note="Description of Artificial Sequence: Synthetic oligonucleotide"
aatccgacgactcgttatatg

SEQ ID NO: 21296 - DNA, 21 bp, Artificial Sequence
  source: /note="Description of Artificial Sequence: Synthetic oligonucleotide"
aatccgactgttacggggtcg

SEQ ID NO: 21297 - DNA, 21 bp, Artificial Sequence
  source: /note="Description of Artificial Sequence: Synthetic oligonucleotide"
aatccttataatactgaggcg

SEQ ID NO: 21298 - DNA, 21 bp, Artificial Sequence
  source: /note="Description of Artificial Sequence: Synthetic oligonucleotide"
aatccgtatgtgcttcgtgct

SEQ ID NO: 21299 - DNA, 21 bp, Artificial Sequence
  source: /note="Description of Artificial Sequence: Synthetic oligonucleotide"
aatcaggataaggctactcat

SEQ ID NO: 21300 - DNA, 21 bp, Artificial Sequence
  source: /note="Description of Artificial Sequence: Synthetic oligonucleotide"
aatcaggatccttatatgtat

SEQ ID NO: 21301 - DNA, 21 bp, Artificial Sequence
  source: /note="Description of Artificial Sequence: Synthetic oligonucleotide"
aatcaggagggttctcctatt

SEQ ID NO: 21302 - DNA, 21 bp, Artificial Sequence
  source: /note="Description of Artificial Sequence: Synthetic oligonucleotide"
aatcaggagaataagattggg

SEQ ID NO: 21303 - DNA, 21 bp, Artificial Sequence
  source: /note="Description of Artificial Sequence: Synthetic oligonucleotide"
aatcagggtcagaatcctgtg

SEQ ID NO: 21304 - DNA, 21 bp, Artificial Sequence
  source: /note="Description of Artificial Sequence: Synthetic oligonucleotide"
aatcagattgctgtgtcgagg

SEQ ID NO: 21305 - DNA, 21 bp, Artificial Sequence
  source: /note="Description of Artificial Sequence: Synthetic oligonucleotide"
aatcagctgcatcctgtgcgt

SEQ ID NO: 21306 - DNA, 21 bp, Artificial Sequence
  source: /note="Description of Artificial Sequence: Synthetic oligonucleotide"
aatcagcttgtggctcatgct

SEQ ID NO: 21307 - DNA, 21 bp, Artificial Sequence
  source: /note="Description of Artificial Sequence: Synthetic oligonucleotide"
aatcagaattatcagattgtg

SEQ ID NO: 21308 - DNA, 21 bp, Artificial Sequence
  source: /note="Description of Artificial Sequence: Synthetic oligonucleotide"
aatcagcagggttcgatggct

SEQ ID NO: 21309 - DNA, 21 bp, Artificial Sequence
  source: /note="Description of Artificial Sequence: Synthetic oligonucleotide"
aatcagcgggatactatgact

SEQ ID NO: 21310 - DNA, 21 bp, Artificial Sequence
  source: /note="Description of Artificial Sequence: Synthetic oligonucleotide"
aatcagcgtccggttaatttt

SEQ ID NO: 21311 - DNA, 21 bp, Artificial Sequence
  source: /note="Description of Artificial Sequence: Synthetic oligonucleotide"
aatcagaggtcgactagtatg

SEQ ID NO: 21312 - DNA, 21 bp, Artificial Sequence
  source: /note="Description of Artificial Sequence: Synthetic oligonucleotide"
aatcagagtattcatcagact

SEQ ID NO: 21313 - DNA, 21 bp, Artificial Sequence
  source: /note="Description of Artificial Sequence: Synthetic oligonucleotide"
aatcagacggcgtgtgaggtt

SEQ ID NO: 21314 - DNA, 21 bp, Artificial Sequence
  source: /note="Description of Artificial Sequence: Synthetic oligonucleotide"
aatcagacgttgatggctagt

SEQ ID NO: 21315 - DNA, 21 bp, Artificial Sequence
  source: /note="Description of Artificial Sequence: Synthetic oligonucleotide"
aatcagactaatgggcgggct

SEQ ID NO: 21316 - DNA, 21 bp, Artificial Sequence
  source: /note="Description of Artificial Sequence: Synthetic oligonucleotide"
aatcagactcgggtggttccg

SEQ ID NO: 21317 - DNA, 21 bp, Artificial Sequence
  source: /note="Description of Artificial Sequence: Synthetic oligonucleotide"
aatcagtatccgagggatcct

SEQ ID NO: 21318 - DNA, 21 bp, Artificial Sequence
  source: /note="Description of Artificial Sequence: Synthetic oligonucleotide"
aatcgtgctgagtcgctgctg

SEQ ID NO: 21319 - DNA, 21 bp, Artificial Sequence
  source: /note="Description of Artificial Sequence: Synthetic oligonucleotide"
aatcgggctcctcctctgtcg

SEQ ID NO: 21320 - DNA, 21 bp, Artificial Sequence
  source: /note="Description of Artificial Sequence: Synthetic oligonucleotide"
aatcgggatattgcgggtagg

SEQ ID NO: 21321 - DNA, 21 bp, Artificial Sequence
  source: /note="Description of Artificial Sequence: Synthetic oligonucleotide"
aatcgggatattttgagttcg

SEQ ID NO: 21322 - DNA, 21 bp, Artificial Sequence
  source: /note="Description of Artificial Sequence: Synthetic oligonucleotide"
aatcgtgatgttccggagtcg

SEQ ID NO: 21323 - DNA, 21 bp, Artificial Sequence
  source: /note="Description of Artificial Sequence: Synthetic oligonucleotide"
aatcgtgattatagtacggct

SEQ ID NO: 21324 - DNA, 21 bp, Artificial Sequence
  source: /note="Description of Artificial Sequence: Synthetic oligonucleotide"
aatcgtgattatagtgttgat

SEQ ID NO: 21325 - DNA, 21 bp, Artificial Sequence
  source: /note="Description of Artificial Sequence: Synthetic oligonucleotide"
aatcgtgattatacttctcct

SEQ ID NO: 21326 - DNA, 21 bp, Artificial Sequence
  source: /note="Description of Artificial Sequence: Synthetic oligonucleotide"
aatcgtgagccggggcttaat

SEQ ID NO: 21327 - DNA, 21 bp, Artificial Sequence
  source: /note="Description of Artificial Sequence: Synthetic oligonucleotide"
aatcgggagcgggcgatgact

SEQ ID NO: 21328 - DNA, 21 bp, Artificial Sequence
  source: /note="Description of Artificial Sequence: Synthetic oligonucleotide"
aatagggagagttattctctg

SEQ ID NO: 21329 - DNA, 21 bp, Artificial Sequence
  source: /note="Description of Artificial Sequence: Synthetic oligonucleotide"
aatcgttttcctcatgttgat

SEQ ID NO: 21330 - DNA, 21 bp, Artificial Sequence
  source: /note="Description of Artificial Sequence: Synthetic oligonucleotide"
aatcgtggtcatttggattct

SEQ ID NO: 21331 - DNA, 21 bp, Artificial Sequence
  source: /note="Description of Artificial Sequence: Synthetic oligonucleotide"
aatcggggtctggttgctgcg

SEQ ID NO: 21332 - DNA, 21 bp, Artificial Sequence
  source: /note="Description of Artificial Sequence: Synthetic oligonucleotide"
aatcgtggtaattttgatcgt

SEQ ID NO: 21333 - DNA, 21 bp, Artificial Sequence
  source: /note="Description of Artificial Sequence: Synthetic oligonucleotide"
aatcgtggtccttctaatacg

SEQ ID NO: 21334 - DNA, 21 bp, Artificial Sequence
  source: /note="Description of Artificial Sequence: Synthetic oligonucleotide"
aatagggggcagactgcgcag

SEQ ID NO: 21335 - DNA, 21 bp, Artificial Sequence
  source: /note="Description of Artificial Sequence: Synthetic oligonucleotide"
aatcgtgggacgcttctgtct

SEQ ID NO: 21336 - DNA, 21 bp, Artificial Sequence
  source: /note="Description of Artificial Sequence: Synthetic oligonucleotide"
aatcggattgctgcggaggct

SEQ ID NO: 21337 - DNA, 21 bp, Artificial Sequence
  source: /note="Description of Artificial Sequence: Synthetic oligonucleotide"
aatcggattatgccgatttct

SEQ ID NO: 21338 - DNA, 21 bp, Artificial Sequence
  source: /note="Description of Artificial Sequence: Synthetic oligonucleotide"
aataggatttcggcgcagcat

SEQ ID NO: 21339 - DNA, 21 bp, Artificial Sequence
  source: /note="Description of Artificial Sequence: Synthetic oligonucleotide"
aataggatttcgtcgtttccg

SEQ ID NO: 21340 - DNA, 21 bp, Artificial Sequence
  source: /note="Description of Artificial Sequence: Synthetic oligonucleotide"
aatcgtaaggctctttctgag

SEQ ID NO: 21341 - DNA, 21 bp, Artificial Sequence
  source: /note="Description of Artificial Sequence: Synthetic oligonucleotide"
aatcgtaagcctacgatggat

SEQ ID NO: 21342 - DNA, 21 bp, Artificial Sequence
  source: /note="Description of Artificial Sequence: Synthetic oligonucleotide"
aatcgtttgcttgggtatggt

SEQ ID NO: 21343 - DNA, 21 bp, Artificial Sequence
  source: /note="Description of Artificial Sequence: Synthetic oligonucleotide"
aatcgtatgccttcggcggct

SEQ ID NO: 21344 - DNA, 21 bp, Artificial Sequence
  source: /note="Description of Artificial Sequence: Synthetic oligonucleotide"
aataggatgtcggggtcggat

SEQ ID NO: 21345 - DNA, 21 bp, Artificial Sequence
  source: /note="Description of Artificial Sequence: Synthetic oligonucleotide"
aatcgtaatttggataatggt

SEQ ID NO: 21346 - DNA, 21 bp, Artificial Sequence
  source: /note="Description of Artificial Sequence: Synthetic oligonucleotide"
aatcgtcctatggagctgctg

SEQ ID NO: 21347 - DNA, 21 bp, Artificial Sequence
  source: /note="Description of Artificial Sequence: Synthetic oligonucleotide"
aatcggccgcagcatgcggtt

SEQ ID NO: 21348 - DNA, 21 bp, Artificial Sequence
  source: /note="Description of Artificial Sequence: Synthetic oligonucleotide"
aatcgtcaggatgtgccgagt

SEQ ID NO: 21349 - DNA, 21 bp, Artificial Sequence
  source: /note="Description of Artificial Sequence: Synthetic oligonucleotide"
aatcggcagggtaatgagctt

SEQ ID NO: 21350 - DNA, 21 bp, Artificial Sequence
  source: /note="Description of Artificial Sequence: Synthetic oligonucleotide"
aataggcagcctttgatgact

SEQ ID NO: 21351 - DNA, 21 bp, Artificial Sequence
  source: /note="Description of Artificial Sequence: Synthetic oligonucleotide"
aatcgtcagcctccgcgggag

SEQ ID NO: 21352 - DNA, 21 bp, Artificial Sequence
  source: /note="Description of Artificial Sequence: Synthetic oligonucleotide"
aataggcagtcgctgccgctg

SEQ ID NO: 21353 - DNA, 21 bp, Artificial Sequence
  source: /note="Description of Artificial Sequence: Synthetic oligonucleotide"
aatcgtcagactattgcgttg

SEQ ID NO: 21354 - DNA, 21 bp, Artificial Sequence
  source: /note="Description of Artificial Sequence: Synthetic oligonucleotide"
aataggaggactaatgaggat

SEQ ID NO: 21355 - DNA, 21 bp, Artificial Sequence
  source: /note="Description of Artificial Sequence: Synthetic oligonucleotide"
aataggtctgctgagtgttgg

SEQ ID NO: 21356 - DNA, 21 bp, Artificial Sequence
  source: /note="Description of Artificial Sequence: Synthetic oligonucleotide"
aatcgtagtgcgctgacgcct

SEQ ID NO: 21357 - DNA, 21 bp, Artificial Sequence
  source: /note="Description of Artificial Sequence: Synthetic oligonucleotide"
aataggtcggcgcgtgatccg

SEQ ID NO: 21358 - DNA, 21 bp, Artificial Sequence
  source: /note="Description of Artificial Sequence: Synthetic oligonucleotide"
aatcgttcggagatggtggag

SEQ ID NO: 21359 - DNA, 21 bp, Artificial Sequence
  source: /note="Description of Artificial Sequence: Synthetic oligonucleotide"
aatcgttcgggtttggtttcg

SEQ ID NO: 21360 - DNA, 21 bp, Artificial Sequence
  source: /note="Description of Artificial Sequence: Synthetic oligonucleotide"
aataggtcgattacgcatgat

SEQ ID NO: 21361 - DNA, 21 bp, Artificial Sequence
  source: /note="Description of Artificial Sequence: Synthetic oligonucleotide"
aataggagtttggcgacggtg

SEQ ID NO: 21362 - DNA, 21 bp, Artificial Sequence
  source: /note="Description of Artificial Sequence: Synthetic oligonucleotide"
aatcgttctgtgctttcggat

SEQ ID NO: 21363 - DNA, 21 bp, Artificial Sequence
  source: /note="Description of Artificial Sequence: Synthetic oligonucleotide"
aatcggagttatgattctccg

SEQ ID NO: 21364 - DNA, 21 bp, Artificial Sequence
  source: /note="Description of Artificial Sequence: Synthetic oligonucleotide"
aataggacgttggatatgagt

SEQ ID NO: 21365 - DNA, 21 bp, Artificial Sequence
  source: /note="Description of Artificial Sequence: Synthetic oligonucleotide"
aatcgtacgctgccgacttct

SEQ ID NO: 21366 - DNA, 21 bp, Artificial Sequence
  source: /note="Description of Artificial Sequence: Synthetic oligonucleotide"
aatcgtactctttatcctgcg

SEQ ID NO: 21367 - DNA, 21 bp, Artificial Sequence
  source: /note="Description of Artificial Sequence: Synthetic oligonucleotide"
aatcgtacgcagcagagtagt

SEQ ID NO: 21368 - DNA, 21 bp, Artificial Sequence
  source: /note="Description of Artificial Sequence: Synthetic oligonucleotide"
aatcgtactcagtctattagt

SEQ ID NO: 21369 - DNA, 21 bp, Artificial Sequence
  source: /note="Description of Artificial Sequence: Synthetic oligonucleotide"
aatcgtactacgcttatgagt

SEQ ID NO: 21370 - DNA, 21 bp, Artificial Sequence
  source: /note="Description of Artificial Sequence: Synthetic oligonucleotide"
aatcgggtgggtgagacgcgt

SEQ ID NO: 21371 - DNA, 21 bp, Artificial Sequence
  source: /note="Description of Artificial Sequence: Synthetic oligonucleotide"
aatagggttgggattgctcct

SEQ ID NO: 21372 - DNA, 21 bp, Artificial Sequence
  source: /note="Description of Artificial Sequence: Synthetic oligonucleotide"
aatcgtgttgtgtttgagggg

SEQ ID NO: 21373 - DNA, 21 bp, Artificial Sequence
  source: /note="Description of Artificial Sequence: Synthetic oligonucleotide"
aatcgttatgatgcgtctgat

SEQ ID NO: 21374 - DNA, 21 bp, Artificial Sequence
  source: /note="Description of Artificial Sequence: Synthetic oligonucleotide"
aattcggcggctcggattcat

SEQ ID NO: 21375 - DNA, 21 bp, Artificial Sequence
  source: /note="Description of Artificial Sequence: Synthetic oligonucleotide"
aattctgcggattctagtccg

SEQ ID NO: 21376 - DNA, 21 bp, Artificial Sequence
  source: /note="Description of Artificial Sequence: Synthetic oligonucleotide"
aatagtgcgatgcatggtact

SEQ ID NO: 21377 - DNA, 21 bp, Artificial Sequence
  source: /note="Description of Artificial Sequence: Synthetic oligonucleotide"
aatagtgcgtctgagtttgtg

SEQ ID NO: 21378 - DNA, 21 bp, Artificial Sequence
  source: /note="Description of Artificial Sequence: Synthetic oligonucleotide"
aatagtgcttcggagatgacg

SEQ ID NO: 21379 - DNA, 21 bp, Artificial Sequence
  source: /note="Description of Artificial Sequence: Synthetic oligonucleotide"
aattctgcttcgacgtttcag

SEQ ID NO: 21380 - DNA, 21 bp, Artificial Sequence
  source: /note="Description of Artificial Sequence: Synthetic oligonucleotide"
aattctgctagtacttttacg

SEQ ID NO: 21381 - DNA, 21 bp, Artificial Sequence
  source: /note="Description of Artificial Sequence: Synthetic oligonucleotide"
aattctgctgtgatgactcgt

SEQ ID NO: 21382 - DNA, 21 bp, Artificial Sequence
  source: /note="Description of Artificial Sequence: Synthetic oligonucleotide"
aattctgcttatccggtgcat

SEQ ID NO: 21383 - DNA, 21 bp, Artificial Sequence
  source: /note="Description of Artificial Sequence: Synthetic oligonucleotide"
aatagtgatttttcgcttgct

SEQ ID NO: 21384 - DNA, 21 bp, Artificial Sequence
  source: /note="Description of Artificial Sequence: Synthetic oligonucleotide"
aatagtgatcttcataagccg

SEQ ID NO: 21385 - DNA, 21 bp, Artificial Sequence
  source: /note="Description of Artificial Sequence: Synthetic oligonucleotide"
aattctgattctcgtacgcct

SEQ ID NO: 21386 - DNA, 21 bp, Artificial Sequence
  source: /note="Description of Artificial Sequence: Synthetic oligonucleotide"
aattcggattcttctattcgt

SEQ ID NO: 21387 - DNA, 21 bp, Artificial Sequence
  source: /note="Description of Artificial Sequence: Synthetic oligonucleotide"
aattcgggtctggagctgctt

SEQ ID NO: 21388 - DNA, 21 bp, Artificial Sequence
  source: /note="Description of Artificial Sequence: Synthetic oligonucleotide"
aattctgggaattcgactcct

SEQ ID NO: 21389 - DNA, 21 bp, Artificial Sequence
  source: /note="Description of Artificial Sequence: Synthetic oligonucleotide"
aatagtggtcgggctcatatt

SEQ ID NO: 21390 - DNA, 21 bp, Artificial Sequence
  source: /note="Description of Artificial Sequence: Synthetic oligonucleotide"
aattcgcatgcgcatcatgat

SEQ ID NO: 21391 - DNA, 21 bp, Artificial Sequence
  source: /note="Description of Artificial Sequence: Synthetic oligonucleotide"
aattctcataatttgacgctt

SEQ ID NO: 21392 - DNA, 21 bp, Artificial Sequence
  source: /note="Description of Artificial Sequence: Synthetic oligonucleotide"
aattcgcatccgcagacgagg

SEQ ID NO: 21393 - DNA, 21 bp, Artificial Sequence
  source: /note="Description of Artificial Sequence: Synthetic oligonucleotide"
aattctcatagttctccggct

SEQ ID NO: 21394 - DNA, 21 bp, Artificial Sequence
  source: /note="Description of Artificial Sequence: Synthetic oligonucleotide"
aattcgcattctgtgagtacg

SEQ ID NO: 21395 - DNA, 21 bp, Artificial Sequence
  source: /note="Description of Artificial Sequence: Synthetic oligonucleotide"
aattcgattccggagcggttt

SEQ ID NO: 21396 - DNA, 21 bp, Artificial Sequence
  source: /note="Description of Artificial Sequence: Synthetic oligonucleotide"
aatagtattaggttgtcgggg

SEQ ID NO: 21397 - DNA, 21 bp, Artificial Sequence
  source: /note="Description of Artificial Sequence: Synthetic oligonucleotide"
aatagtaagatgcctcgtgcg

SEQ ID NO: 21398 - DNA, 21 bp, Artificial Sequence
  source: /note="Description of Artificial Sequence: Synthetic oligonucleotide"
aattcgaagtatacgcctatg

SEQ ID NO: 21399 - DNA, 21 bp, Artificial Sequence
  source: /note="Description of Artificial Sequence: Synthetic oligonucleotide"
aattcgttggctgcgaggaat

SEQ ID NO: 21400 - DNA, 21 bp, Artificial Sequence
  source: /note="Description of Artificial Sequence: Synthetic oligonucleotide"
aattctctggctcggaaggag

SEQ ID NO: 21401 - DNA, 21 bp, Artificial Sequence
  source: /note="Description of Artificial Sequence: Synthetic oligonucleotide"
aattcgctgaatgatcgggct

SEQ ID NO: 21402 - DNA, 21 bp, Artificial Sequence
  source: /note="Description of Artificial Sequence: Synthetic oligonucleotide"
aattctttgaatcctggtttg

SEQ ID NO: 21403 - DNA, 21 bp, Artificial Sequence
  source: /note="Description of Artificial Sequence: Synthetic oligonucleotide"
aatagtcttccggattctgtg

SEQ ID NO: 21404 - DNA, 21 bp, Artificial Sequence
  source: /note="Description of Artificial Sequence: Synthetic oligonucleotide"
aatagtcttccgatggcttcg

SEQ ID NO: 21405 - DNA, 21 bp, Artificial Sequence
  source: /note="Description of Artificial Sequence: Synthetic oligonucleotide"
aattcgatgcagtatagtgcg

SEQ ID NO: 21406 - DNA, 21 bp, Artificial Sequence
  source: /note="Description of Artificial Sequence: Synthetic oligonucleotide"
aattcgaatgcggcgagtggg

SEQ ID NO: 21407 - DNA, 21 bp, Artificial Sequence
  source: /note="Description of Artificial Sequence: Synthetic oligonucleotide"
aattctaatcatgagcggtat

SEQ ID NO: 21408 - DNA, 21 bp, Artificial Sequence
  source: /note="Description of Artificial Sequence: Synthetic oligonucleotide"
aattcgaatactcctgggatg

SEQ ID NO: 21409 - DNA, 21 bp, Artificial Sequence
  source: /note="Description of Artificial Sequence: Synthetic oligonucleotide"
aattcgaatgttagtcctggt

SEQ ID NO: 21410 - DNA, 21 bp, Artificial Sequence
  source: /note="Description of Artificial Sequence: Synthetic oligonucleotide"
aattcgccgatttttgtgggg

SEQ ID NO: 21411 - DNA, 21 bp, Artificial Sequence
  source: /note="Description of Artificial Sequence: Synthetic oligonucleotide"
aattctcctaatgagcgtacg

SEQ ID NO: 21412 - DNA, 21 bp, Artificial Sequence
  source: /note="Description of Artificial Sequence: Synthetic oligonucleotide"
aatagtcctaatcagctgggt

SEQ ID NO: 21413 - DNA, 21 bp, Artificial Sequence
  source: /note="Description of Artificial Sequence: Synthetic oligonucleotide"
aattcgcctaggcatgtggcg

SEQ ID NO: 21414 - DNA, 21 bp, Artificial Sequence
  source: /note="Description of Artificial Sequence: Synthetic oligonucleotide"
aatagtccgtcgcattcgccg

SEQ ID NO: 21415 - DNA, 21 bp, Artificial Sequence
  source: /note="Description of Artificial Sequence: Synthetic oligonucleotide"
aatagtccgacggttcagctg

SEQ ID NO: 21416 - DNA, 21 bp, Artificial Sequence
  source: /note="Description of Artificial Sequence: Synthetic oligonucleotide"
aatagtcctgttgttagtcgg

SEQ ID NO: 21417 - DNA, 21 bp, Artificial Sequence
  source: /note="Description of Artificial Sequence: Synthetic oligonucleotide"
aattcgcagcattctacgact

SEQ ID NO: 21418 - DNA, 21 bp, Artificial Sequence
  source: /note="Description of Artificial Sequence: Synthetic oligonucleotide"
aatagtcagttgcagtcgtcg

SEQ ID NO: 21419 - DNA, 21 bp, Artificial Sequence
  source: /note="Description of Artificial Sequence: Synthetic oligonucleotide"
aatagtcagcgttatttgagt

SEQ ID NO: 21420 - DNA, 21 bp, Artificial Sequence
  source: /note="Description of Artificial Sequence: Synthetic oligonucleotide"
aatagtcagtctgctactccg

SEQ ID NO: 21421 - DNA, 21 bp, Artificial Sequence
  source: /note="Description of Artificial Sequence: Synthetic oligonucleotide"
aatagtcgtgctgtgctggtt

SEQ ID NO: 21422 - DNA, 21 bp, Artificial Sequence
  source: /note="Description of Artificial Sequence: Synthetic oligonucleotide"
aattctcgtgatttgctgact

SEQ ID NO: 21423 - DNA, 21 bp, Artificial Sequence
  source: /note="Description of Artificial Sequence: Synthetic oligonucleotide"
aatagtcgtggtgcttcgttg

SEQ ID NO: 21424 - DNA, 21 bp, Artificial Sequence
  source: /note="Description of Artificial Sequence: Synthetic oligonucleotide"
aattcgcggggtttggggcat

SEQ ID NO: 21425 - DNA, 21 bp, Artificial Sequence
  source: /note="Description of Artificial Sequence: Synthetic oligonucleotide"
aatagtagggggatgcctgat

SEQ ID NO: 21426 - DNA, 21 bp, Artificial Sequence
  source: /note="Description of Artificial Sequence: Synthetic oligonucleotide"
aattcgcgtgggccggttgcg

SEQ ID NO: 21427 - DNA, 21 bp, Artificial Sequence
  source: /note="Description of Artificial Sequence: Synthetic oligonucleotide"
aatagtcggctggttacttcg

SEQ ID NO: 21428 - DNA, 21 bp, Artificial Sequence
  source: /note="Description of Artificial Sequence: Synthetic oligonucleotide"
aattcgcgttctaatgagagt

SEQ ID NO: 21429 - DNA, 21 bp, Artificial Sequence
  source: /note="Description of Artificial Sequence: Synthetic oligonucleotide"
aatagtcggtcgactccgaat

SEQ ID NO: 21430 - DNA, 21 bp, Artificial Sequence
  source: /note="Description of Artificial Sequence: Synthetic oligonucleotide"
aattctaggactgcgcatgag

SEQ ID NO: 21431 - DNA, 21 bp, Artificial Sequence
  source: /note="Description of Artificial Sequence: Synthetic oligonucleotide"
aattctcggactgtgcagatt

SEQ ID NO: 21432 - DNA, 21 bp, Artificial Sequence
  source: /note="Description of Artificial Sequence: Synthetic oligonucleotide"
aattctcgtgttgtgggtttt

SEQ ID NO: 21433 - DNA, 21 bp, Artificial Sequence
  source: /note="Description of Artificial Sequence: Synthetic oligonucleotide"
aattctagtgagtggcctgat

SEQ ID NO: 21434 - DNA, 21 bp, Artificial Sequence
  source: /note="Description of Artificial Sequence: Synthetic oligonucleotide"
aattcgagtggtaagactccg

SEQ ID NO: 21435 - DNA, 21 bp, Artificial Sequence
  source: /note="Description of Artificial Sequence: Synthetic oligonucleotide"
aatagtagtattcgtaatgct

SEQ ID NO: 21436 - DNA, 21 bp, Artificial Sequence
  source: /note="Description of Artificial Sequence: Synthetic oligonucleotide"
aatagttcgcttaagctgaat

SEQ ID NO: 21437 - DNA, 21 bp, Artificial Sequence
  source: /note="Description of Artificial Sequence: Synthetic oligonucleotide"
aattcttcgatgcgtattaat

SEQ ID NO: 21438 - DNA, 21 bp, Artificial Sequence
  source: /note="Description of Artificial Sequence: Synthetic oligonucleotide"
aatagttcgatgtcttcgggt

SEQ ID NO: 21439 - DNA, 21 bp, Artificial Sequence
  source: /note="Description of Artificial Sequence: Synthetic oligonucleotide"
aatagttctccgtcgctggct

SEQ ID NO: 21440 - DNA, 21 bp, Artificial Sequence
  source: /note="Description of Artificial Sequence: Synthetic oligonucleotide"
aatagttctcaggttcatttg

SEQ ID NO: 21441 - DNA, 21 bp, Artificial Sequence
  source: /note="Description of Artificial Sequence: Synthetic oligonucleotide"
aatagttcgtcgactcctatt

SEQ ID NO: 21442 - DNA, 21 bp, Artificial Sequence
  source: /note="Description of Artificial Sequence: Synthetic oligonucleotide"
aattctactaagctgctggat

SEQ ID NO: 21443 - DNA, 21 bp, Artificial Sequence
  source: /note="Description of Artificial Sequence: Synthetic oligonucleotide"
aattcgacgctggagggtagg

SEQ ID NO: 21444 - DNA, 21 bp, Artificial Sequence
  source: /note="Description of Artificial Sequence: Synthetic oligonucleotide"
aattctactttgactgtgcat

SEQ ID NO: 21445 - DNA, 21 bp, Artificial Sequence
  source: /note="Description of Artificial Sequence: Synthetic oligonucleotide"
aattcgacgaattttcgtact

SEQ ID NO: 21446 - DNA, 21 bp, Artificial Sequence
  source: /note="Description of Artificial Sequence: Synthetic oligonucleotide"
aatagtactcctcagcctcag

SEQ ID NO: 21447 - DNA, 21 bp, Artificial Sequence
  source: /note="Description of Artificial Sequence: Synthetic oligonucleotide"
aattctacgtcgacttatggt

SEQ ID NO: 21448 - DNA, 21 bp, Artificial Sequence
  source: /note="Description of Artificial Sequence: Synthetic oligonucleotide"
aattctgtgaagggtgtggtg

SEQ ID NO: 21449 - DNA, 21 bp, Artificial Sequence
  source: /note="Description of Artificial Sequence: Synthetic oligonucleotide"
aattcggttcgtcataattcg

SEQ ID NO: 21450 - DNA, 21 bp, Artificial Sequence
  source: /note="Description of Artificial Sequence: Synthetic oligonucleotide"
aattcggtgtctggtgttacg

SEQ ID NO: 21451 - DNA, 21 bp, Artificial Sequence
  source: /note="Description of Artificial Sequence: Synthetic oligonucleotide"
aattcggtttcgcagatgtat

SEQ ID NO: 21452 - DNA, 21 bp, Artificial Sequence
  source: /note="Description of Artificial Sequence: Synthetic oligonucleotide"
aatagtgtgtatgatcgttct

SEQ ID NO: 21453 - DNA, 21 bp, Artificial Sequence
  source: /note="Description of Artificial Sequence: Synthetic oligonucleotide"
aattcgtatcaggtgagtcgt

SEQ ID NO: 21454 - DNA, 21 bp, Artificial Sequence
  source: /note="Description of Artificial Sequence: Synthetic oligonucleotide"
aatacggcggggaagcctagt

SEQ ID NO: 21455 - DNA, 21 bp, Artificial Sequence
  source: /note="Description of Artificial Sequence: Synthetic oligonucleotide"
aatacggcgagggagcgttcg

SEQ ID NO: 21456 - DNA, 21 bp, Artificial Sequence
  source: /note="Description of Artificial Sequence: Synthetic oligonucleotide"
aatactgcgaggacgtctttg

SEQ ID NO: 21457 - DNA, 21 bp, Artificial Sequence
  source: /note="Description of Artificial Sequence: Synthetic oligonucleotide"
aatacggatggggataggctg

SEQ ID NO: 21458 - DNA, 21 bp, Artificial Sequence
  source: /note="Description of Artificial Sequence: Synthetic oligonucleotide"
aatactgaggatgttcatatg

SEQ ID NO: 21459 - DNA, 21 bp, Artificial Sequence
  source: /note="Description of Artificial Sequence: Synthetic oligonucleotide"
aatacggagcataataggagt

SEQ ID NO: 21460 - DNA, 21 bp, Artificial Sequence
  source: /note="Description of Artificial Sequence: Synthetic oligonucleotide"
aatactgagactccgttggct

SEQ ID NO: 21461 - DNA, 21 bp, Artificial Sequence
  source: /note="Description of Artificial Sequence: Synthetic oligonucleotide"
aatacgtttagtaattcgtct

SEQ ID NO: 21462 - DNA, 21 bp, Artificial Sequence
  source: /note="Description of Artificial Sequence: Synthetic oligonucleotide"
aatacgggtcctggtatggct

SEQ ID NO: 21463 - DNA, 21 bp, Artificial Sequence
  source: /note="Description of Artificial Sequence: Synthetic oligonucleotide"
aatacgcatggtgcggctcag

SEQ ID NO: 21464 - DNA, 21 bp, Artificial Sequence
  source: /note="Description of Artificial Sequence: Synthetic oligonucleotide"
aatactcatccgactccgttt

SEQ ID NO: 21465 - DNA, 21 bp, Artificial Sequence
  source: /note="Description of Artificial Sequence: Synthetic oligonucleotide"
aatacgcatactaagatgtcg

SEQ ID NO: 21466 - DNA, 21 bp, Artificial Sequence
  source: /note="Description of Artificial Sequence: Synthetic oligonucleotide"
aatactcatgttgaggattgg

SEQ ID NO: 21467 - DNA, 21 bp, Artificial Sequence
  source: /note="Description of Artificial Sequence: Synthetic oligonucleotide"
aatacgattcctaatgtgaag

SEQ ID NO: 21468 - DNA, 21 bp, Artificial Sequence
  source: /note="Description of Artificial Sequence: Synthetic oligonucleotide"
aatactattcgtgattctatt

SEQ ID NO: 21469 - DNA, 21 bp, Artificial Sequence
  source: /note="Description of Artificial Sequence: Synthetic oligonucleotide"
aatactatttcggggagtcgt

SEQ ID NO: 21470 - DNA, 21 bp, Artificial Sequence
  source: /note="Description of Artificial Sequence: Synthetic oligonucleotide"
aatacgaagctgacgaataat

SEQ ID NO: 21471 - DNA, 21 bp, Artificial Sequence
  source: /note="Description of Artificial Sequence: Synthetic oligonucleotide"
aatactaagaataataatctt

SEQ ID NO: 21472 - DNA, 21 bp, Artificial Sequence
  source: /note="Description of Artificial Sequence: Synthetic oligonucleotide"
aatactaagtcggatcctgct

SEQ ID NO: 21473 - DNA, 21 bp, Artificial Sequence
  source: /note="Description of Artificial Sequence: Synthetic oligonucleotide"
aatactaagagtcctttttct

SEQ ID NO: 21474 - DNA, 21 bp, Artificial Sequence
  source: /note="Description of Artificial Sequence: Synthetic oligonucleotide"
aatactttgggggagacgttg

SEQ ID NO: 21475 - DNA, 21 bp, Artificial Sequence
  source: /note="Description of Artificial Sequence: Synthetic oligonucleotide"
aatactctgaagctgagtcag

SEQ ID NO: 21476 - DNA, 21 bp, Artificial Sequence
  source: /note="Description of Artificial Sequence: Synthetic oligonucleotide"
aatactttgcagtcttatcct

SEQ ID NO: 21477 - DNA, 21 bp, Artificial Sequence
  source: /note="Description of Artificial Sequence: Synthetic oligonucleotide"
aatacgaatattccgaggtct

SEQ ID NO: 21478 - DNA, 21 bp, Artificial Sequence
  source: /note="Description of Artificial Sequence: Synthetic oligonucleotide"
aatactaatgttgagagtcgt

SEQ ID NO: 21479 - DNA, 21 bp, Artificial Sequence
  source: /note="Description of Artificial Sequence: Synthetic oligonucleotide"
aatacgaatgtttcggttagt

SEQ ID NO: 21480 - DNA, 21 bp, Artificial Sequence
  source: /note="Description of Artificial Sequence: Synthetic oligonucleotide"
aatactcctcgggtgctgtcg

SEQ ID NO: 21481 - DNA, 21 bp, Artificial Sequence
  source: /note="Description of Artificial Sequence: Synthetic oligonucleotide"
aatactccgtctactcggcag

SEQ ID NO: 21482 - DNA, 21 bp, Artificial Sequence
  source: /note="Description of Artificial Sequence: Synthetic oligonucleotide"
aatacgcgtgggggttcttct

SEQ ID NO: 21483 - DNA, 21 bp, Artificial Sequence
  source: /note="Description of Artificial Sequence: Synthetic oligonucleotide"
aatactcgtcatgatgtttct

SEQ ID NO: 21484 - DNA, 21 bp, Artificial Sequence
  source: /note="Description of Artificial Sequence: Synthetic oligonucleotide"
aatacgcggaatgatccgccg

SEQ ID NO: 21485 - DNA, 21 bp, Artificial Sequence
  source: /note="Description of Artificial Sequence: Synthetic oligonucleotide"
aatactcgtcagttggtgtcg

SEQ ID NO: 21486 - DNA, 21 bp, Artificial Sequence
  source: /note="Description of Artificial Sequence: Synthetic oligonucleotide"
aatacgcggcgtactgatggt

SEQ ID NO: 21487 - DNA, 21 bp, Artificial Sequence
  source: /note="Description of Artificial Sequence: Synthetic oligonucleotide"
aatacgcggacgttgtcgaat

SEQ ID NO: 21488 - DNA, 21 bp, Artificial Sequence
  source: /note="Description of Artificial Sequence: Synthetic oligonucleotide"
aatactcggacgtattctagt

SEQ ID NO: 21489 - DNA, 21 bp, Artificial Sequence
  source: /note="Description of Artificial Sequence: Synthetic oligonucleotide"
aatacgtctgataatgcgcgt

SEQ ID NO: 21490 - DNA, 21 bp, Artificial Sequence
  source: /note="Description of Artificial Sequence: Synthetic oligonucleotide"
aatacgtcttttagtagttcg

SEQ ID NO: 21491 - DNA, 21 bp, Artificial Sequence
  source: /note="Description of Artificial Sequence: Synthetic oligonucleotide"
aatacgagtaaggatctgccg

SEQ ID NO: 21492 - DNA, 21 bp, Artificial Sequence
  source: /note="Description of Artificial Sequence: Synthetic oligonucleotide"
aatacgagtcagtttgcttct

SEQ ID NO: 21493 - DNA, 21 bp, Artificial Sequence
  source: /note="Description of Artificial Sequence: Synthetic oligonucleotide"
aatacgtcgagttctgataag

SEQ ID NO: 21494 - DNA, 21 bp, Artificial Sequence
  source: /note="Description of Artificial Sequence: Synthetic oligonucleotide"
aatacttctgttatgatggtg

SEQ ID NO: 21495 - DNA, 21 bp, Artificial Sequence
  source: /note="Description of Artificial Sequence: Synthetic oligonucleotide"
aatacttcggtgagggtggtg

SEQ ID NO: 21496 - DNA, 21 bp, Artificial Sequence
  source: /note="Description of Artificial Sequence: Synthetic oligonucleotide"
aatacttcttggaatgggtct

SEQ ID NO: 21497 - DNA, 21 bp, Artificial Sequence
  source: /note="Description of Artificial Sequence: Synthetic oligonucleotide"
aatacgacgaattctcagttg

SEQ ID NO: 21498 - DNA, 21 bp, Artificial Sequence
  source: /note="Description of Artificial Sequence: Synthetic oligonucleotide"
aatacgacgccgattacgaat

SEQ ID NO: 21499 - DNA, 21 bp, Artificial Sequence
  source: /note="Description of Artificial Sequence: Synthetic oligonucleotide"
aatactactgttctgcctaag

SEQ ID NO: 21500 - DNA, 21 bp, Artificial Sequence
  source: /note="Description of Artificial Sequence: Synthetic oligonucleotide"
aatactgttcctattaaggct

SEQ ID NO: 21501 - DNA, 21 bp, Artificial Sequence
  source: /note="Description of Artificial Sequence: Synthetic oligonucleotide"
aatacttataggagggatggt

SEQ ID NO: 21502 - DNA, 21 bp, Artificial Sequence
  source: /note="Description of Artificial Sequence: Synthetic oligonucleotide"
aatgtggcggctcgtgcgcat

SEQ ID NO: 21503 - DNA, 21 bp, Artificial Sequence
  source: /note="Description of Artificial Sequence: Synthetic oligonucleotide"
aatgttgctattaatttttcg

SEQ ID NO: 21504 - DNA, 21 bp, Artificial Sequence
  source: /note="Description of Artificial Sequence: Synthetic oligonucleotide"
aatgttgcgcgtaattttgtg

SEQ ID NO: 21505 - DNA, 21 bp, Artificial Sequence
  source: /note="Description of Artificial Sequence: Synthetic oligonucleotide"
aatgttgctgttgggtatcag

SEQ ID NO: 21506 - DNA, 21 bp, Artificial Sequence
  source: /note="Description of Artificial Sequence: Synthetic oligonucleotide"
aatgttgcggtggtgttgtct

SEQ ID NO: 21507 - DNA, 21 bp, Artificial Sequence
  source: /note="Description of Artificial Sequence: Synthetic oligonucleotide"
aatgttgcgtgggtgacggag

SEQ ID NO: 21508 - DNA, 21 bp, Artificial Sequence
  source: /note="Description of Artificial Sequence: Synthetic oligonucleotide"
aatgtggatgcgaatgttctg

SEQ ID NO: 21509 - DNA, 21 bp, Artificial Sequence
  source: /note="Description of Artificial Sequence: Synthetic oligonucleotide"
aatgttgatacttcgacggat

SEQ ID NO: 21510 - DNA, 21 bp, Artificial Sequence
  source: /note="Description of Artificial Sequence: Synthetic oligonucleotide"
aatgttgagcagccttcgtgt

SEQ ID NO: 21511 - DNA, 21 bp, Artificial Sequence
  source: /note="Description of Artificial Sequence: Synthetic oligonucleotide"
aatgtggagtcgaatcctttg

SEQ ID NO: 21512 - DNA, 21 bp, Artificial Sequence
  source: /note="Description of Artificial Sequence: Synthetic oligonucleotide"
aatgtttttgcggtgtgtgag

SEQ ID NO: 21513 - DNA, 21 bp, Artificial Sequence
  source: /note="Description of Artificial Sequence: Synthetic oligonucleotide"
aatgtttttagtgctacgcct

SEQ ID NO: 21514 - DNA, 21 bp, Artificial Sequence
  source: /note="Description of Artificial Sequence: Synthetic oligonucleotide"
aatgtgtttgttgcggttaat

SEQ ID NO: 21515 - DNA, 21 bp, Artificial Sequence
  source: /note="Description of Artificial Sequence: Synthetic oligonucleotide"
aatgtgggggcgacggaggtg

SEQ ID NO: 21516 - DNA, 21 bp, Artificial Sequence
  source: /note="Description of Artificial Sequence: Synthetic oligonucleotide"
aatgtgcatgctctggagtct

SEQ ID NO: 21517 - DNA, 21 bp, Artificial Sequence
  source: /note="Description of Artificial Sequence: Synthetic oligonucleotide"
aatgtgcatacgccttcgcag

SEQ ID NO: 21518 - DNA, 21 bp, Artificial Sequence
  source: /note="Description of Artificial Sequence: Synthetic oligonucleotide"
aatgttattaatacgcctcag

SEQ ID NO: 21519 - DNA, 21 bp, Artificial Sequence
  source: /note="Description of Artificial Sequence: Synthetic oligonucleotide"
aatgtgaagcttaattcgttt

SEQ ID NO: 21520 - DNA, 21 bp, Artificial Sequence
  source: /note="Description of Artificial Sequence: Synthetic oligonucleotide"
aatgtgctgggggcgcagcag

SEQ ID NO: 21521 - DNA, 21 bp, Artificial Sequence
  source: /note="Description of Artificial Sequence: Synthetic oligonucleotide"
aatgtgctgattaagtatagt

SEQ ID NO: 21522 - DNA, 21 bp, Artificial Sequence
  source: /note="Description of Artificial Sequence: Synthetic oligonucleotide"
aatgttttgcgtccgcaggtg

SEQ ID NO: 21523 - DNA, 21 bp, Artificial Sequence
  source: /note="Description of Artificial Sequence: Synthetic oligonucleotide"
aatgttatgatggctaggatg

SEQ ID NO: 21524 - DNA, 21 bp, Artificial Sequence
  source: /note="Description of Artificial Sequence: Synthetic oligonucleotide"
aatgtgatggtgcggctgcct

SEQ ID NO: 21525 - DNA, 21 bp, Artificial Sequence
  source: /note="Description of Artificial Sequence: Synthetic oligonucleotide"
aatgttatggtgaggatgggt

SEQ ID NO: 21526 - DNA, 21 bp, Artificial Sequence
  source: /note="Description of Artificial Sequence: Synthetic oligonucleotide"
aatgttaatcagccggatact

SEQ ID NO: 21527 - DNA, 21 bp, Artificial Sequence
  source: /note="Description of Artificial Sequence: Synthetic oligonucleotide"
aatgtgaatcagtattcgggt

SEQ ID NO: 21528 - DNA, 21 bp, Artificial Sequence
  source: /note="Description of Artificial Sequence: Synthetic oligonucleotide"
aatgtgccggcggcttcttat

SEQ ID NO: 21529 - DNA, 21 bp, Artificial Sequence
  source: /note="Description of Artificial Sequence: Synthetic oligonucleotide"
aatgttccggcggcgacgttt

SEQ ID NO: 21530 - DNA, 21 bp, Artificial Sequence
  source: /note="Description of Artificial Sequence: Synthetic oligonucleotide"
aatgttcctgagtcgtcggat

SEQ ID NO: 21531 - DNA, 21 bp, Artificial Sequence
  source: /note="Description of Artificial Sequence: Synthetic oligonucleotide"
aatgttccgtcgacgaaggag

SEQ ID NO: 21532 - DNA, 21 bp, Artificial Sequence
  source: /note="Description of Artificial Sequence: Synthetic oligonucleotide"
aatgttcaggcgacgggttat

SEQ ID NO: 21533 - DNA, 21 bp, Artificial Sequence
  source: /note="Description of Artificial Sequence: Synthetic oligonucleotide"
aatgtgcagtttagttctggt

SEQ ID NO: 21534 - DNA, 21 bp, Artificial Sequence
  source: /note="Description of Artificial Sequence: Synthetic oligonucleotide"
aatgtgcggcttcaggcgatt

SEQ ID NO: 21535 - DNA, 21 bp, Artificial Sequence
  source: /note="Description of Artificial Sequence: Synthetic oligonucleotide"
aatgtgcggctgtctattgat

SEQ ID NO: 21536 - DNA, 21 bp, Artificial Sequence
  source: /note="Description of Artificial Sequence: Synthetic oligonucleotide"
aatgtgcggccgcagtcgacg

SEQ ID NO: 21537 - DNA, 21 bp, Artificial Sequence
  source: /note="Description of Artificial Sequence: Synthetic oligonucleotide"
aatgttcggcctgtgctttct

SEQ ID NO: 21538 - DNA, 21 bp, Artificial Sequence
  source: /note="Description of Artificial Sequence: Synthetic oligonucleotide"
aatgtgaggcagcagtctgct

SEQ ID NO: 21539 - DNA, 21 bp, Artificial Sequence
  source: /note="Description of Artificial Sequence: Synthetic oligonucleotide"
aatgtgcgttcggttactaat

SEQ ID NO: 21540 - DNA, 21 bp, Artificial Sequence
  source: /note="Description of Artificial Sequence: Synthetic oligonucleotide"
aatgtgcggtcttatgctgcg

SEQ ID NO: 21541 - DNA, 21 bp, Artificial Sequence
  source: /note="Description of Artificial Sequence: Synthetic oligonucleotide"
aatgtgaggacggttgctgag

SEQ ID NO: 21542 - DNA, 21 bp, Artificial Sequence
  source: /note="Description of Artificial Sequence: Synthetic oligonucleotide"
aatgtttcgtttcctagtctg

SEQ ID NO: 21543 - DNA, 21 bp, Artificial Sequence
  source: /note="Description of Artificial Sequence: Synthetic oligonucleotide"
aatgtttcgaatgttccttct

SEQ ID NO: 21544 - DNA, 21 bp, Artificial Sequence
  source: /note="Description of Artificial Sequence: Synthetic oligonucleotide"
aatgtgagtccgctttttctg

SEQ ID NO: 21545 - DNA, 21 bp, Artificial Sequence
  source: /note="Description of Artificial Sequence: Synthetic oligonucleotide"
aatgtttctaggactacgctg

SEQ ID NO: 21546 - DNA, 21 bp, Artificial Sequence
  source: /note="Description of Artificial Sequence: Synthetic oligonucleotide"
aatgtgagtcgtacggtttct

SEQ ID NO: 21547 - DNA, 21 bp, Artificial Sequence
  source: /note="Description of Artificial Sequence: Synthetic oligonucleotide"
aatgtttcttcggctccgaag

SEQ ID NO: 21548 - DNA, 21 bp, Artificial Sequence
  source: /note="Description of Artificial Sequence: Synthetic oligonucleotide"
aatgtttcgactgctctgagt

SEQ ID NO: 21549 - DNA, 21 bp, Artificial Sequence
  source: /note="Description of Artificial Sequence: Synthetic oligonucleotide"
aatgtgacggctattggtctg

SEQ ID NO: 21550 - DNA, 21 bp, Artificial Sequence
  source: /note="Description of Artificial Sequence: Synthetic oligonucleotide"
aatgttactcctcctgataat

SEQ ID NO: 21551 - DNA, 21 bp, Artificial Sequence
  source: /note="Description of Artificial Sequence: Synthetic oligonucleotide"
aatgttacgacgtctgaggct

SEQ ID NO: 21552 - DNA, 21 bp, Artificial Sequence
  source: /note="Description of Artificial Sequence: Synthetic oligonucleotide"
aatgtggtgcctcctcttact

SEQ ID NO: 21553 - DNA, 21 bp, Artificial Sequence
  source: /note="Description of Artificial Sequence: Synthetic oligonucleotide"
aatgtggtgagtaggtctccg

SEQ ID NO: 21554 - DNA, 21 bp, Artificial Sequence
  source: /note="Description of Artificial Sequence: Synthetic oligonucleotide"
aatgttgttactaagccgatg

SEQ ID NO: 21555 - DNA, 21 bp, Artificial Sequence
  source: /note="Description of Artificial Sequence: Synthetic oligonucleotide"
aatgttgtggttcctgttggt

SEQ ID NO: 21556 - DNA, 21 bp, Artificial Sequence
  source: /note="Description of Artificial Sequence: Synthetic oligonucleotide"
aattgggcttctgatcatgtg

SEQ ID NO: 21557 - DNA, 21 bp, Artificial Sequence
  source: /note="Description of Artificial Sequence: Synthetic oligonucleotide"
aattgggggcaggagaagttg

SEQ ID NO: 21558 - DNA, 21 bp, Artificial Sequence
  source: /note="Description of Artificial Sequence: Synthetic oligonucleotide"
aattggcctgatcctgagtct

SEQ ID NO: 21559 - DNA, 21 bp, Artificial Sequence
  source: /note="Description of Artificial Sequence: Synthetic oligonucleotide"
aattggactgcggcgactcct

SEQ ID NO: 21560 - DNA, 21 bp, Artificial Sequence
  source: /note="Description of Artificial Sequence: Synthetic oligonucleotide"
aattatgctggttctgatggt

SEQ ID NO: 21561 - DNA, 21 bp, Artificial Sequence
  source: /note="Description of Artificial Sequence: Synthetic oligonucleotide"
aattatgcgaaggttcatacg

SEQ ID NO: 21562 - DNA, 21 bp, Artificial Sequence
  source: /note="Description of Artificial Sequence: Synthetic oligonucleotide"
aattatgcgtcgcagattgtt

SEQ ID NO: 21563 - DNA, 21 bp, Artificial Sequence
  source: /note="Description of Artificial Sequence: Synthetic oligonucleotide"
aattatgatcgtgagcagatg

SEQ ID NO: 21564 - DNA, 21 bp, Artificial Sequence
  source: /note="Description of Artificial Sequence: Synthetic oligonucleotide"
aattatgagcctacttctgat

SEQ ID NO: 21565 - DNA, 21 bp, Artificial Sequence
  source: /note="Description of Artificial Sequence: Synthetic oligonucleotide"
aattatgggaatagtattccg

SEQ ID NO: 21566 - DNA, 21 bp, Artificial Sequence
  source: /note="Description of Artificial Sequence: Synthetic oligonucleotide"
aattatcatacttctcttgtg

SEQ ID NO: 21567 - DNA, 21 bp, Artificial Sequence
  source: /note="Description of Artificial Sequence: Synthetic oligonucleotide"
aattataatactccgaatcct

SEQ ID NO: 21568 - DNA, 21 bp, Artificial Sequence
  source: /note="Description of Artificial Sequence: Synthetic oligonucleotide"
aattatcctgatactcctaat

SEQ ID NO: 21569 - DNA, 21 bp, Artificial Sequence
  source: /note="Description of Artificial Sequence: Synthetic oligonucleotide"
aattatccggatgttcgtagt

SEQ ID NO: 21570 - DNA, 21 bp, Artificial Sequence
  source: /note="Description of Artificial Sequence: Synthetic oligonucleotide"
aattatcctcctagtcggctg

SEQ ID NO: 21571 - DNA, 21 bp, Artificial Sequence
  source: /note="Description of Artificial Sequence: Synthetic oligonucleotide"
aattatcgtcagacgctttcg

SEQ ID NO: 21572 - DNA, 21 bp, Artificial Sequence
  source: /note="Description of Artificial Sequence: Synthetic oligonucleotide"
cctgcggctgatcggaatctg

SEQ ID NO: 21573 - DNA, 21 bp, Artificial Sequence
  source: /note="Description of Artificial Sequence: Synthetic oligonucleotide"
cctgcggctgagtttgcgtcg

SEQ ID NO: 21574 - DNA, 21 bp, Artificial Sequence
  source: /note="Description of Artificial Sequence: Synthetic oligonucleotide"
cctgctgctcgggagcggctg

SEQ ID NO: 21575 - DNA, 21 bp, Artificial Sequence
  source: /note="Description of Artificial Sequence: Synthetic oligonucleotide"
ccggcggatttggggtctatg

SEQ ID NO: 21576 - DNA, 21 bp, Artificial Sequence
  source: /note="Description of Artificial Sequence: Synthetic oligonucleotide"
cctgctgataatggtccgtgg

SEQ ID NO: 21577 - DNA, 21 bp, Artificial Sequence
  source: /note="Description of Artificial Sequence: Synthetic oligonucleotide"
ccggctgatcctcctagtgtg

SEQ ID NO: 21578 - DNA, 21 bp, Artificial Sequence
  source: /note="Description of Artificial Sequence: Synthetic oligonucleotide"
cctgctgataggtctccgact

SEQ ID NO: 21579 - DNA, 21 bp, Artificial Sequence
  source: /note="Description of Artificial Sequence: Synthetic oligonucleotide"
ccggcggattatcagaaggat

SEQ ID NO: 21580 - DNA, 21 bp, Artificial Sequence
  source: /note="Description of Artificial Sequence: Synthetic oligonucleotide"
ccggctgagaaggttcgtact

SEQ ID NO: 21581 - DNA, 21 bp, Artificial Sequence
  source: /note="Description of Artificial Sequence: Synthetic oligonucleotide"
cctgcgttttctgggcgggat

SEQ ID NO: 21582 - DNA, 21 bp, Artificial Sequence
  source: /note="Description of Artificial Sequence: Synthetic oligonucleotide"
cctgctttttctatgtctatt

SEQ ID NO: 21583 - DNA, 21 bp, Artificial Sequence
  source: /note="Description of Artificial Sequence: Synthetic oligonucleotide"
ccggctgggcttcctgatcgt

SEQ ID NO: 21584 - DNA, 21 bp, Artificial Sequence
  source: /note="Description of Artificial Sequence: Synthetic oligonucleotide"
cctgcggggtctcagcctccg

SEQ ID NO: 21585 - DNA, 21 bp, Artificial Sequence
  source: /note="Description of Artificial Sequence: Synthetic oligonucleotide"
cctgctgggagtacgatgcct

SEQ ID NO: 21586 - DNA, 21 bp, Artificial Sequence
  source: /note="Description of Artificial Sequence: Synthetic oligonucleotide"
ccggctcatgctctgactatg

SEQ ID NO: 21587 - DNA, 21 bp, Artificial Sequence
  source: /note="Description of Artificial Sequence: Synthetic oligonucleotide"
ccggcgcattttactactggg

SEQ ID NO: 21588 - DNA, 21 bp, Artificial Sequence
  source: /note="Description of Artificial Sequence: Synthetic oligonucleotide"
cctgcgattggggttcatagg

SEQ ID NO: 21589 - DNA, 21 bp, Artificial Sequence
  source: /note="Description of Artificial Sequence: Synthetic oligonucleotide"
cctgctattaagtctcagctt

SEQ ID NO: 21590 - DNA, 21 bp, Artificial Sequence
  source: /note="Description of Artificial Sequence: Synthetic oligonucleotide"
cctgctattctgcgtacttct

SEQ ID NO: 21591 - DNA, 21 bp, Artificial Sequence
  source: /note="Description of Artificial Sequence: Synthetic oligonucleotide"
ccggctatttcggggacgatt

SEQ ID NO: 21592 - DNA, 21 bp, Artificial Sequence
  source: /note="Description of Artificial Sequence: Synthetic oligonucleotide"
cctgctaagccgattgatttt

SEQ ID NO: 21593 - DNA, 21 bp, Artificial Sequence
  source: /note="Description of Artificial Sequence: Synthetic oligonucleotide"
cctgctttggcgccgatttat

SEQ ID NO: 21594 - DNA, 21 bp, Artificial Sequence
  source: /note="Description of Artificial Sequence: Synthetic oligonucleotide"
cctgcgctgatggcgccggct

SEQ ID NO: 21595 - DNA, 21 bp, Artificial Sequence
  source: /note="Description of Artificial Sequence: Synthetic oligonucleotide"
cctgcgatgggtcagtctgat

SEQ ID NO: 21596 - DNA, 21 bp, Artificial Sequence
  source: /note="Description of Artificial Sequence: Synthetic oligonucleotide"
cctgcgatgtctgatcggtcg

SEQ ID NO: 21597 - DNA, 21 bp, Artificial Sequence
  source: /note="Description of Artificial Sequence: Synthetic oligonucleotide"
ccggctatgagtaatactatt

SEQ ID NO: 21598 - DNA, 21 bp, Artificial Sequence
  source: /note="Description of Artificial Sequence: Synthetic oligonucleotide"
ccggcgaatgatgcggatcgt

SEQ ID NO: 21599 - DNA, 21 bp, Artificial Sequence
  source: /note="Description of Artificial Sequence: Synthetic oligonucleotide"
cctgctaatttgacgtctccg

SEQ ID NO: 21600 - DNA, 21 bp, Artificial Sequence
  source: /note="Description of Artificial Sequence: Synthetic oligonucleotide"
cctgcgaatcctcctgattct

SEQ ID NO: 21601 - DNA, 21 bp, Artificial Sequence
  source: /note="Description of Artificial Sequence: Synthetic oligonucleotide"
ccggctaatcctccgaagtcg

SEQ ID NO: 21602 - DNA, 21 bp, Artificial Sequence
  source: /note="Description of Artificial Sequence: Synthetic oligonucleotide"
cctgcgaatcgtgtggggacg

SEQ ID NO: 21603 - DNA, 21 bp, Artificial Sequence
  source: /note="Description of Artificial Sequence: Synthetic oligonucleotide"
ccggcgaattatttgtctgtt

SEQ ID NO: 21604 - DNA, 21 bp, Artificial Sequence
  source: /note="Description of Artificial Sequence: Synthetic oligonucleotide"
ccggcgccgatgaattttcag

SEQ ID NO: 21605 - DNA, 21 bp, Artificial Sequence
  source: /note="Description of Artificial Sequence: Synthetic oligonucleotide"
cctgctcctagtcatcagtcg

SEQ ID NO: 21606 - DNA, 21 bp, Artificial Sequence
  source: /note="Description of Artificial Sequence: Synthetic oligonucleotide"
cctgctccgactagtattgcg

SEQ ID NO: 21607 - DNA, 21 bp, Artificial Sequence
  source: /note="Description of Artificial Sequence: Synthetic oligonucleotide"
cctgctcagaggacgatggcg

SEQ ID NO: 21608 - DNA, 21 bp, Artificial Sequence
  source: /note="Description of Artificial Sequence: Synthetic oligonucleotide"
ccggcgcagtcgactggtcct

SEQ ID NO: 21609 - DNA, 21 bp, Artificial Sequence
  source: /note="Description of Artificial Sequence: Synthetic oligonucleotide"
cctgctcgggcggatccggcg

SEQ ID NO: 21610 - DNA, 21 bp, Artificial Sequence
  source: /note="Description of Artificial Sequence: Synthetic oligonucleotide"
ccggcgcgtgcgtttgatgcg

SEQ ID NO: 21611 - DNA, 21 bp, Artificial Sequence
  source: /note="Description of Artificial Sequence: Synthetic oligonucleotide"
cctgctcggattactgggatg

SEQ ID NO: 21612 - DNA, 21 bp, Artificial Sequence
  source: /note="Description of Artificial Sequence: Synthetic oligonucleotide"
cctgctcgtcttgctactaat

SEQ ID NO: 21613 - DNA, 21 bp, Artificial Sequence
  source: /note="Description of Artificial Sequence: Synthetic oligonucleotide"
cctgcgcggcggcctgatgat

SEQ ID NO: 21614 - DNA, 21 bp, Artificial Sequence
  source: /note="Description of Artificial Sequence: Synthetic oligonucleotide"
cctgcgcgtacgcttattcat

SEQ ID NO: 21615 - DNA, 21 bp, Artificial Sequence
  source: /note="Description of Artificial Sequence: Synthetic oligonucleotide"
ccggcgaggactaatcctacg

SEQ ID NO: 21616 - DNA, 21 bp, Artificial Sequence
  source: /note="Description of Artificial Sequence: Synthetic oligonucleotide"
ccggcgcgtacgcaggtggat

SEQ ID NO: 21617 - DNA, 21 bp, Artificial Sequence
  source: /note="Description of Artificial Sequence: Synthetic oligonucleotide"
ccggcttcggagcggtcgctt

SEQ ID NO: 21618 - DNA, 21 bp, Artificial Sequence
  source: /note="Description of Artificial Sequence: Synthetic oligonucleotide"
cctgcgagttttgggattaat

SEQ ID NO: 21619 - DNA, 21 bp, Artificial Sequence
  source: /note="Description of Artificial Sequence: Synthetic oligonucleotide"
cctgcttcgcatatgaatccg

SEQ ID NO: 21620 - DNA, 21 bp, Artificial Sequence
  source: /note="Description of Artificial Sequence: Synthetic oligonucleotide"
cctgcgagtcctttgcattct

SEQ ID NO: 21621 - DNA, 21 bp, Artificial Sequence
  source: /note="Description of Artificial Sequence: Synthetic oligonucleotide"
ccggcgagtcctgttacgtct

SEQ ID NO: 21622 - DNA, 21 bp, Artificial Sequence
  source: /note="Description of Artificial Sequence: Synthetic oligonucleotide"
ccggctagtgttatggcgggg

SEQ ID NO: 21623 - DNA, 21 bp, Artificial Sequence
  source: /note="Description of Artificial Sequence: Synthetic oligonucleotide"
ccggctactgcgttgagtcgt

SEQ ID NO: 21624 - DNA, 21 bp, Artificial Sequence
  source: /note="Description of Artificial Sequence: Synthetic oligonucleotide"
cctgcgacggggctgccgtat

SEQ ID NO: 21625 - DNA, 21 bp, Artificial Sequence
  source: /note="Description of Artificial Sequence: Synthetic oligonucleotide"
ccggcgacgatgattcggcat

SEQ ID NO: 21626 - DNA, 21 bp, Artificial Sequence
  source: /note="Description of Artificial Sequence: Synthetic oligonucleotide"
cctgcgactaatgtgcggggt

SEQ ID NO: 21627 - DNA, 21 bp, Artificial Sequence
  source: /note="Description of Artificial Sequence: Synthetic oligonucleotide"
ccggctactccgagtgttgtg

SEQ ID NO: 21628 - DNA, 21 bp, Artificial Sequence
  source: /note="Description of Artificial Sequence: Synthetic oligonucleotide"
cctgcgacgtcgtcggtgtcg

SEQ ID NO: 21629 - DNA, 21 bp, Artificial Sequence
  source: /note="Description of Artificial Sequence: Synthetic oligonucleotide"
ccggctgtggaggcggatggt

SEQ ID NO: 21630 - DNA, 21 bp, Artificial Sequence
  source: /note="Description of Artificial Sequence: Synthetic oligonucleotide"
cctgctgttaagccgagtttt

SEQ ID NO: 21631 - DNA, 21 bp, Artificial Sequence
  source: /note="Description of Artificial Sequence: Synthetic oligonucleotide"
cctgcttatcctcatgctccg

SEQ ID NO: 21632 - DNA, 21 bp, Artificial Sequence
  source: /note="Description of Artificial Sequence: Synthetic oligonucleotide"
cctgatgcggagattcggcgt

SEQ ID NO: 21633 - DNA, 21 bp, Artificial Sequence
  source: /note="Description of Artificial Sequence: Synthetic oligonucleotide"
cctgatgattttcggcatcat

SEQ ID NO: 21634 - DNA, 21 bp, Artificial Sequence
  source: /note="Description of Artificial Sequence: Synthetic oligonucleotide"
cctgatgagcttaaggttagg

SEQ ID NO: 21635 - DNA, 21 bp, Artificial Sequence
  source: /note="Description of Artificial Sequence: Synthetic oligonucleotide"
ccggatggtgatactgcgctg

SEQ ID NO: 21636 - DNA, 21 bp, Artificial Sequence
  source: /note="Description of Artificial Sequence: Synthetic oligonucleotide"
ccggatgggtcttcgaggcat

SEQ ID NO: 21637 - DNA, 21 bp, Artificial Sequence
  source: /note="Description of Artificial Sequence: Synthetic oligonucleotide"
cctgatcatgcgtctattagt

SEQ ID NO: 21638 - DNA, 21 bp, Artificial Sequence
  source: /note="Description of Artificial Sequence: Synthetic oligonucleotide"
cctgatcatgggggtattgct

SEQ ID NO: 21639 - DNA, 21 bp, Artificial Sequence
  source: /note="Description of Artificial Sequence: Synthetic oligonucleotide"
ccggatcatcgtagtcctaat

SEQ ID NO: 21640 - DNA, 21 bp, Artificial Sequence
  source: /note="Description of Artificial Sequence: Synthetic oligonucleotide"
ccggatcattctaatgatcag

SEQ ID NO: 21641 - DNA, 21 bp, Artificial Sequence
  source: /note="Description of Artificial Sequence: Synthetic oligonucleotide"
ccggatattgcttttgcggag

SEQ ID NO: 21642 - DNA, 21 bp, Artificial Sequence
  source: /note="Description of Artificial Sequence: Synthetic oligonucleotide"
ccggatttggaggtggttaag

SEQ ID NO: 21643 - DNA, 21 bp, Artificial Sequence
  source: /note="Description of Artificial Sequence: Synthetic oligonucleotide"
ccggatctgatttctgatgcg

SEQ ID NO: 21644 - DNA, 21 bp, Artificial Sequence
  source: /note="Description of Artificial Sequence: Synthetic oligonucleotide"
ccggatcttcctgggattagg

SEQ ID NO: 21645 - DNA, 21 bp, Artificial Sequence
  source: /note="Description of Artificial Sequence: Synthetic oligonucleotide"
cctgataatcttcaggtgagt

SEQ ID NO: 21646 - DNA, 21 bp, Artificial Sequence
  source: /note="Description of Artificial Sequence: Synthetic oligonucleotide"
cctgataatgttaggactttt

SEQ ID NO: 21647 - DNA, 21 bp, Artificial Sequence
  source: /note="Description of Artificial Sequence: Synthetic oligonucleotide"
cctgataatgtgtataatgat

SEQ ID NO: 21648 - DNA, 21 bp, Artificial Sequence
  source: /note="Description of Artificial Sequence: Synthetic oligonucleotide"
cctgatccggcttatttgcat

SEQ ID NO: 21649 - DNA, 21 bp, Artificial Sequence
  source: /note="Description of Artificial Sequence: Synthetic oligonucleotide"
ccggatccgattgatcggcct

SEQ ID NO: 21650 - DNA, 21 bp, Artificial Sequence
  source: /note="Description of Artificial Sequence: Synthetic oligonucleotide"
cctgatcctcctacttcgccg

SEQ ID NO: 21651 - DNA, 21 bp, Artificial Sequence
  source: /note="Description of Artificial Sequence: Synthetic oligonucleotide"
cctgatcaggcttcggggcgg

SEQ ID NO: 21652 - DNA, 21 bp, Artificial Sequence
  source: /note="Description of Artificial Sequence: Synthetic oligonucleotide"
ccggatcagatggtgcggatt

SEQ ID NO: 21653 - DNA, 21 bp, Artificial Sequence
  source: /note="Description of Artificial Sequence: Synthetic oligonucleotide"
ccggatcagaggggtaatcat

SEQ ID NO: 21654 - DNA, 21 bp, Artificial Sequence
  source: /note="Description of Artificial Sequence: Synthetic oligonucleotide"
ccggatcagagtttgactggt

SEQ ID NO: 21655 - DNA, 21 bp, Artificial Sequence
  source: /note="Description of Artificial Sequence: Synthetic oligonucleotide"
ccggatcggctgcttgatagg

SEQ ID NO: 21656 - DNA, 21 bp, Artificial Sequence
  source: /note="Description of Artificial Sequence: Synthetic oligonucleotide"
ccggataggctttctgagttt

SEQ ID NO: 21657 - DNA, 21 bp, Artificial Sequence
  source: /note="Description of Artificial Sequence: Synthetic oligonucleotide"
cctgataggatgcagaatcgt

SEQ ID NO: 21658 - DNA, 21 bp, Artificial Sequence
  source: /note="Description of Artificial Sequence: Synthetic oligonucleotide"
cctgatcggcagcagcagttg

SEQ ID NO: 21659 - DNA, 21 bp, Artificial Sequence
  source: /note="Description of Artificial Sequence: Synthetic oligonucleotide"
ccggatcgtgttccgacggtt

SEQ ID NO: 21660 - DNA, 21 bp, Artificial Sequence
  source: /note="Description of Artificial Sequence: Synthetic oligonucleotide"
ccggattctgctcctcttcct

SEQ ID NO: 21661 - DNA, 21 bp, Artificial Sequence
  source: /note="Description of Artificial Sequence: Synthetic oligonucleotide"
ccggattcggatccgccgcat

SEQ ID NO: 21662 - DNA, 21 bp, Artificial Sequence
  source: /note="Description of Artificial Sequence: Synthetic oligonucleotide"
cctgattctatgtatcggtct

SEQ ID NO: 21663 - DNA, 21 bp, Artificial Sequence
  source: /note="Description of Artificial Sequence: Synthetic oligonucleotide"
cctgattctactcttcagttt

SEQ ID NO: 21664 - DNA, 21 bp, Artificial Sequence
  source: /note="Description of Artificial Sequence: Synthetic oligonucleotide"
ccggatactgatccgcctctt

SEQ ID NO: 21665 - DNA, 21 bp, Artificial Sequence
  source: /note="Description of Artificial Sequence: Synthetic oligonucleotide"
cctgatactaagtggtgtcat

SEQ ID NO: 21666 - DNA, 21 bp, Artificial Sequence
  source: /note="Description of Artificial Sequence: Synthetic oligonucleotide"
cctgatacttcgcatgatttg

SEQ ID NO: 21667 - DNA, 21 bp, Artificial Sequence
  source: /note="Description of Artificial Sequence: Synthetic oligonucleotide"
ccggatgtgaaggctggtagg

SEQ ID NO: 21668 - DNA, 21 bp, Artificial Sequence
  source: /note="Description of Artificial Sequence: Synthetic oligonucleotide"
ccggattatgcgaagttgtcg

SEQ ID NO: 21669 - DNA, 21 bp, Artificial Sequence
  source: /note="Description of Artificial Sequence: Synthetic oligonucleotide"
ccggattatgagaagaagcag

SEQ ID NO: 21670 - DNA, 21 bp, Artificial Sequence
  source: /note="Description of Artificial Sequence: Synthetic oligonucleotide"
cctgattattcggcggttctg

SEQ ID NO: 21671 - DNA, 21 bp, Artificial Sequence
  source: /note="Description of Artificial Sequence: Synthetic oligonucleotide"
cctgaggctgaggatgatatt

SEQ ID NO: 21672 - DNA, 21 bp, Artificial Sequence
  source: /note="Description of Artificial Sequence: Synthetic oligonucleotide"
cctgaggcgttgcggacgggg

SEQ ID NO: 21673 - DNA, 21 bp, Artificial Sequence
  source: /note="Description of Artificial Sequence: Synthetic oligonucleotide"
ccggaggagcctcgtctttct

SEQ ID NO: 21674 - DNA, 21 bp, Artificial Sequence
  source: /note="Description of Artificial Sequence: Synthetic oligonucleotide"
cctgaggaggtgtgtcggatt

SEQ ID NO: 21675 - DNA, 21 bp, Artificial Sequence
  source: /note="Description of Artificial Sequence: Synthetic oligonucleotide"
ccggagtttgcgattgatgcg

SEQ ID NO: 21676 - DNA, 21 bp, Artificial Sequence
  source: /note="Description of Artificial Sequence: Synthetic oligonucleotide"
cctgagtttaagactcgtaat

SEQ ID NO: 21677 - DNA, 21 bp, Artificial Sequence
  source: /note="Description of Artificial Sequence: Synthetic oligonucleotide"
ccggagggtaggttgcatgcg

SEQ ID NO: 21678 - DNA, 21 bp, Artificial Sequence
  source: /note="Description of Artificial Sequence: Synthetic oligonucleotide"
cctgagaaggatactcatcgt

SEQ ID NO: 21679 - DNA, 21 bp, Artificial Sequence
  source: /note="Description of Artificial Sequence: Synthetic oligonucleotide"
ccggagaagtattcgcagaat

SEQ ID NO: 21680 - DNA, 21 bp, Artificial Sequence
  source: /note="Description of Artificial Sequence: Synthetic oligonucleotide"
ccggagatggggaggctgggt

SEQ ID NO: 21681 - DNA, 21 bp, Artificial Sequence
  source: /note="Description of Artificial Sequence: Synthetic oligonucleotide"
cctgagatgaagccgggtcag

SEQ ID NO: 21682 - DNA, 21 bp, Artificial Sequence
  source: /note="Description of Artificial Sequence: Synthetic oligonucleotide"
cctgagaattcgaaggtggat

SEQ ID NO: 21683 - DNA, 21 bp, Artificial Sequence
  source: /note="Description of Artificial Sequence: Synthetic oligonucleotide"
ccggagaattctcagcgtggt

SEQ ID NO: 21684 - DNA, 21 bp, Artificial Sequence
  source: /note="Description of Artificial Sequence: Synthetic oligonucleotide"
ccggagaatacgacgtatgct

SEQ ID NO: 21685 - DNA, 21 bp, Artificial Sequence
  source: /note="Description of Artificial Sequence: Synthetic oligonucleotide"
cctgagccgtcgaatacgcgt

SEQ ID NO: 21686 - DNA, 21 bp, Artificial Sequence
  source: /note="Description of Artificial Sequence: Synthetic oligonucleotide"
cctgagcctacgcttaatctg

SEQ ID NO: 21687 - DNA, 21 bp, Artificial Sequence
  source: /note="Description of Artificial Sequence: Synthetic oligonucleotide"
ccggagcgggggttgcatgtg

SEQ ID NO: 21688 - DNA, 21 bp, Artificial Sequence
  source: /note="Description of Artificial Sequence: Synthetic oligonucleotide"
cctgagcggaaggcgcatact

SEQ ID NO: 21689 - DNA, 21 bp, Artificial Sequence
  source: /note="Description of Artificial Sequence: Synthetic oligonucleotide"
cctgagaggccggctttgagt

SEQ ID NO: 21690 - DNA, 21 bp, Artificial Sequence
  source: /note="Description of Artificial Sequence: Synthetic oligonucleotide"
ccggagcggtctcaggcgggg

SEQ ID NO: 21691 - DNA, 21 bp, Artificial Sequence
  source: /note="Description of Artificial Sequence: Synthetic oligonucleotide"
cctgagcggtcgacttgggtt

SEQ ID NO: 21692 - DNA, 21 bp, Artificial Sequence
  source: /note="Description of Artificial Sequence: Synthetic oligonucleotide"
cctgagtctaaggatgcgcat

SEQ ID NO: 21693 - DNA, 21 bp, Artificial Sequence
  source: /note="Description of Artificial Sequence: Synthetic oligonucleotide"
ccggagtctcctcgtacgctg

SEQ ID NO: 21694 - DNA, 21 bp, Artificial Sequence
  source: /note="Description of Artificial Sequence: Synthetic oligonucleotide"
cctgagtctgttctgcgtcgg

SEQ ID NO: 21695 - DNA, 21 bp, Artificial Sequence
  source: /note="Description of Artificial Sequence: Synthetic oligonucleotide"
ccggagtcttggccgagtccg

SEQ ID NO: 21696 - DNA, 21 bp, Artificial Sequence
  source: /note="Description of Artificial Sequence: Synthetic oligonucleotide"
cctgagacttctcctcgtcct

SEQ ID NO: 21697 - DNA, 21 bp, Artificial Sequence
  source: /note="Description of Artificial Sequence: Synthetic oligonucleotide"
ccgtttgctgaggctggtatt

SEQ ID NO: 21698 - DNA, 21 bp, Artificial Sequence
  source: /note="Description of Artificial Sequence: Synthetic oligonucleotide"
ccttttgctgggcatgcgctt

SEQ ID NO: 21699 - DNA, 21 bp, Artificial Sequence
  source: /note="Description of Artificial Sequence: Synthetic oligonucleotide"
ccttttgcgcagactcttacg

SEQ ID NO: 21700 - DNA, 21 bp, Artificial Sequence
  source: /note="Description of Artificial Sequence: Synthetic oligonucleotide"
ccttttgcttcgagtacgtct

SEQ ID NO: 21701 - DNA, 21 bp, Artificial Sequence
  source: /note="Description of Artificial Sequence: Synthetic oligonucleotide"
ccgtttgatcatttgacggat

SEQ ID NO: 21702 - DNA, 21 bp, Artificial Sequence
  source: /note="Description of Artificial Sequence: Synthetic oligonucleotide"
ccgtttggtgtttcggtggat

SEQ ID NO: 21703 - DNA, 21 bp, Artificial Sequence
  source: /note="Description of Artificial Sequence: Synthetic oligonucleotide"
ccttttccgcatgataggcct

SEQ ID NO: 21704 - DNA, 21 bp, Artificial Sequence
  source: /note="Description of Artificial Sequence: Synthetic oligonucleotide"
ccttttcagactggttctggg

SEQ ID NO: 21705 - DNA, 21 bp, Artificial Sequence
  source: /note="Description of Artificial Sequence: Synthetic oligonucleotide"
ccgtttcggattcagactgat

SEQ ID NO: 21706 - DNA, 21 bp, Artificial Sequence
  source: /note="Description of Artificial Sequence: Synthetic oligonucleotide"
ccgtttcggcctgttgttgat

SEQ ID NO: 21707 - DNA, 21 bp, Artificial Sequence
  source: /note="Description of Artificial Sequence: Synthetic oligonucleotide"
ccgtttagtgatcttaggatg

SEQ ID NO: 21708 - DNA, 21 bp, Artificial Sequence
  source: /note="Description of Artificial Sequence: Synthetic oligonucleotide"
ccgttttcgggtctgactggt

SEQ ID NO: 21709 - DNA, 21 bp, Artificial Sequence
  source: /note="Description of Artificial Sequence: Synthetic oligonucleotide"
cctttttcgaatattcagatg

SEQ ID NO: 21710 - DNA, 21 bp, Artificial Sequence
  source: /note="Description of Artificial Sequence: Synthetic oligonucleotide"
cctttttcgtcggcggttatt

SEQ ID NO: 21711 - DNA, 21 bp, Artificial Sequence
  source: /note="Description of Artificial Sequence: Synthetic oligonucleotide"
ccttttagtagtccttctccg

SEQ ID NO: 21712 - DNA, 21 bp, Artificial Sequence
  source: /note="Description of Artificial Sequence: Synthetic oligonucleotide"
cctttttctactcctgatatg

SEQ ID NO: 21713 - DNA, 21 bp, Artificial Sequence
  source: /note="Description of Artificial Sequence: Synthetic oligonucleotide"
ccgtttactgctggtttttcg

SEQ ID NO: 21714 - DNA, 21 bp, Artificial Sequence
  source: /note="Description of Artificial Sequence: Synthetic oligonucleotide"
ccttttacggctactgatcgt

SEQ ID NO: 21715 - DNA, 21 bp, Artificial Sequence
  source: /note="Description of Artificial Sequence: Synthetic oligonucleotide"
ccgtttactgatgagttgatg

SEQ ID NO: 21716 - DNA, 21 bp, Artificial Sequence
  source: /note="Description of Artificial Sequence: Synthetic oligonucleotide"
ccttttacgggggcgccgcag

SEQ ID NO: 21717 - DNA, 21 bp, Artificial Sequence
  source: /note="Description of Artificial Sequence: Synthetic oligonucleotide"
cctggtgctaggcgggagctt

SEQ ID NO: 21718 - DNA, 21 bp, Artificial Sequence
  source: /note="Description of Artificial Sequence: Synthetic oligonucleotide"
cctggggctgtgccgccttct

SEQ ID NO: 21719 - DNA, 21 bp, Artificial Sequence
  source: /note="Description of Artificial Sequence: Synthetic oligonucleotide"
cctggttgttcgtctgttgtt

SEQ ID NO: 21720 - DNA, 21 bp, Artificial Sequence
  source: /note="Description of Artificial Sequence: Synthetic oligonucleotide"
ccgggtgatgcgaagcctcgt

SEQ ID NO: 21721 - DNA, 21 bp, Artificial Sequence
  source: /note="Description of Artificial Sequence: Synthetic oligonucleotide"
cctggtgatccgactcatgat

SEQ ID NO: 21722 - DNA, 21 bp, Artificial Sequence
  source: /note="Description of Artificial Sequence: Synthetic oligonucleotide"
cctggtgaggctactaagctg

SEQ ID NO: 21723 - DNA, 21 bp, Artificial Sequence
  source: /note="Description of Artificial Sequence: Synthetic oligonucleotide"
cctggggagaagctttggtgt

SEQ ID NO: 21724 - DNA, 21 bp, Artificial Sequence
  source: /note="Description of Artificial Sequence: Synthetic oligonucleotide"
cctggggagacgcaggaggtg

SEQ ID NO: 21725 - DNA, 21 bp, Artificial Sequence
  source: /note="Description of Artificial Sequence: Synthetic oligonucleotide"
ccgggttttgatccgtctggg

SEQ ID NO: 21726 - DNA, 21 bp, Artificial Sequence
  source: /note="Description of Artificial Sequence: Synthetic oligonucleotide"
ccgggtggttcggatcattct

SEQ ID NO: 21727 - DNA, 21 bp, Artificial Sequence
  source: /note="Description of Artificial Sequence: Synthetic oligonucleotide"
cctggtgggtcgctgggggag

SEQ ID NO: 21728 - DNA, 21 bp, Artificial Sequence
  source: /note="Description of Artificial Sequence: Synthetic oligonucleotide"
cctgggcatgatgtggctcgt

SEQ ID NO: 21729 - DNA, 21 bp, Artificial Sequence
  source: /note="Description of Artificial Sequence: Synthetic oligonucleotide"
ccggggcatatgcctgctagt

SEQ ID NO: 21730 - DNA, 21 bp, Artificial Sequence
  source: /note="Description of Artificial Sequence: Synthetic oligonucleotide"
cctgggattgatgctcgtatt

SEQ ID NO: 21731 - DNA, 21 bp, Artificial Sequence
  source: /note="Description of Artificial Sequence: Synthetic oligonucleotide"
cctgggattgatcgtaagtcg

SEQ ID NO: 21732 - DNA, 21 bp, Artificial Sequence
  source: /note="Description of Artificial Sequence: Synthetic oligonucleotide"
ccgggtattcaggctccgatt

SEQ ID NO: 21733 - DNA, 21 bp, Artificial Sequence
  source: /note="Description of Artificial Sequence: Synthetic oligonucleotide"
ccggggaagattcatgcggct

SEQ ID NO: 21734 - DNA, 21 bp, Artificial Sequence
  source: /note="Description of Artificial Sequence: Synthetic oligonucleotide"
ccggggaagcttttgaatccg

SEQ ID NO: 21735 - DNA, 21 bp, Artificial Sequence
  source: /note="Description of Artificial Sequence: Synthetic oligonucleotide"
cctgggaagtctcttgaggcg

SEQ ID NO: 21736 - DNA, 21 bp, Artificial Sequence
  source: /note="Description of Artificial Sequence: Synthetic oligonucleotide"
cctgggaagtatagtccttcg

SEQ ID NO: 21737 - DNA, 21 bp, Artificial Sequence
  source: /note="Description of Artificial Sequence: Synthetic oligonucleotide"
cctggtcttgctgattatggt

SEQ ID NO: 21738 - DNA, 21 bp, Artificial Sequence
  source: /note="Description of Artificial Sequence: Synthetic oligonucleotide"
ccggggcttctggatcatgtg

SEQ ID NO: 21739 - DNA, 21 bp, Artificial Sequence
  source: /note="Description of Artificial Sequence: Synthetic oligonucleotide"
cctgggttgcagtcgatgaag

SEQ ID NO: 21740 - DNA, 21 bp, Artificial Sequence
  source: /note="Description of Artificial Sequence: Synthetic oligonucleotide"
cctgggctgcggtcggattct

SEQ ID NO: 21741 - DNA, 21 bp, Artificial Sequence
  source: /note="Description of Artificial Sequence: Synthetic oligonucleotide"
cctggtctgactgctaatccg

SEQ ID NO: 21742 - DNA, 21 bp, Artificial Sequence
  source: /note="Description of Artificial Sequence: Synthetic oligonucleotide"
cctggtctgacgaaggctatt

SEQ ID NO: 21743 - DNA, 21 bp, Artificial Sequence
  source: /note="Description of Artificial Sequence: Synthetic oligonucleotide"
cctgggatgaggatgggtcag

SEQ ID NO: 21744 - DNA, 21 bp, Artificial Sequence
  source: /note="Description of Artificial Sequence: Synthetic oligonucleotide"
ccgggtaatcatgttacgcgg

SEQ ID NO: 21745 - DNA, 21 bp, Artificial Sequence
  source: /note="Description of Artificial Sequence: Synthetic oligonucleotide"
ccgggtaattatgagtatcgg

SEQ ID NO: 21746 - DNA, 21 bp, Artificial Sequence
  source: /note="Description of Artificial Sequence: Synthetic oligonucleotide"
ccggggccggggcagccgcgt

SEQ ID NO: 21747 - DNA, 21 bp, Artificial Sequence
  source: /note="Description of Artificial Sequence: Synthetic oligonucleotide"
ccggggcctatgaattcgagt

SEQ ID NO: 21748 - DNA, 21 bp, Artificial Sequence
  source: /note="Description of Artificial Sequence: Synthetic oligonucleotide"
cctggtccgcggagggatatt

SEQ ID NO: 21749 - DNA, 21 bp, Artificial Sequence
  source: /note="Description of Artificial Sequence: Synthetic oligonucleotide"
cctgggcctacgggtgcgtat

SEQ ID NO: 21750 - DNA, 21 bp, Artificial Sequence
  source: /note="Description of Artificial Sequence: Synthetic oligonucleotide"
cctgggcaggagacttcgtat

SEQ ID NO: 21751 - DNA, 21 bp, Artificial Sequence
  source: /note="Description of Artificial Sequence: Synthetic oligonucleotide"
ccgggtcagcagaagaatatg

SEQ ID NO: 21752 - DNA, 21 bp, Artificial Sequence
  source: /note="Description of Artificial Sequence: Synthetic oligonucleotide"
ccgggtcagcggggtactcct

SEQ ID NO: 21753 - DNA, 21 bp, Artificial Sequence
  source: /note="Description of Artificial Sequence: Synthetic oligonucleotide"
ccggggcagacgcagcataat

SEQ ID NO: 21754 - DNA, 21 bp, Artificial Sequence
  source: /note="Description of Artificial Sequence: Synthetic oligonucleotide"
cctgggagggatgcggagggt

SEQ ID NO: 21755 - DNA, 21 bp, Artificial Sequence
  source: /note="Description of Artificial Sequence: Synthetic oligonucleotide"
ccggggagggagggggtgact

SEQ ID NO: 21756 - DNA, 21 bp, Artificial Sequence
  source: /note="Description of Artificial Sequence: Synthetic oligonucleotide"
cctggtcgtccgcagccttct

SEQ ID NO: 21757 - DNA, 21 bp, Artificial Sequence
  source: /note="Description of Artificial Sequence: Synthetic oligonucleotide"
cctgggagggtggggccgttg

SEQ ID NO: 21758 - DNA, 21 bp, Artificial Sequence
  source: /note="Description of Artificial Sequence: Synthetic oligonucleotide"
ccggggagttttccgaggggg

SEQ ID NO: 21759 - DNA, 21 bp, Artificial Sequence
  source: /note="Description of Artificial Sequence: Synthetic oligonucleotide"
cctggtagtaattctgggcat

SEQ ID NO: 21760 - DNA, 21 bp, Artificial Sequence
  source: /note="Description of Artificial Sequence: Synthetic oligonucleotide"
cctgggtcgcaggctgttcat

SEQ ID NO: 21761 - DNA, 21 bp, Artificial Sequence
  source: /note="Description of Artificial Sequence: Synthetic oligonucleotide"
cctggttcgcagcgtaatagt

SEQ ID NO: 21762 - DNA, 21 bp, Artificial Sequence
  source: /note="Description of Artificial Sequence: Synthetic oligonucleotide"
cctgggtcgcgggctccgggt

SEQ ID NO: 21763 - DNA, 21 bp, Artificial Sequence
  source: /note="Description of Artificial Sequence: Synthetic oligonucleotide"
ccgggtactgctcggactaat

SEQ ID NO: 21764 - DNA, 21 bp, Artificial Sequence
  source: /note="Description of Artificial Sequence: Synthetic oligonucleotide"
ccgggtacgggtaggtatgtt

SEQ ID NO: 21765 - DNA, 21 bp, Artificial Sequence
  source: /note="Description of Artificial Sequence: Synthetic oligonucleotide"
cctgggactcctctgcagtcg

SEQ ID NO: 21766 - DNA, 21 bp, Artificial Sequence
  source: /note="Description of Artificial Sequence: Synthetic oligonucleotide"
ccggggactagttcgacgggg

SEQ ID NO: 21767 - DNA, 21 bp, Artificial Sequence
  source: /note="Description of Artificial Sequence: Synthetic oligonucleotide"
cctggtgttaatcctgcgatt

SEQ ID NO: 21768 - DNA, 21 bp, Artificial Sequence
  source: /note="Description of Artificial Sequence: Synthetic oligonucleotide"
ccgggggttaggggttctccg

SEQ ID NO: 21769 - DNA, 21 bp, Artificial Sequence
  source: /note="Description of Artificial Sequence: Synthetic oligonucleotide"
cctggggtgactgatcggggt

SEQ ID NO: 21770 - DNA, 21 bp, Artificial Sequence
  source: /note="Description of Artificial Sequence: Synthetic oligonucleotide"
ccgggttatcctgcggtgacg

SEQ ID NO: 21771 - DNA, 21 bp, Artificial Sequence
  source: /note="Description of Artificial Sequence: Synthetic oligonucleotide"
ccgcatgctaatagttcgttg

SEQ ID NO: 21772 - DNA, 21 bp, Artificial Sequence
  source: /note="Description of Artificial Sequence: Synthetic oligonucleotide"
cctcatgattctccgactcct

SEQ ID NO: 21773 - DNA, 21 bp, Artificial Sequence
  source: /note="Description of Artificial Sequence: Synthetic oligonucleotide"
ccgcatggggttggtgatgcg

SEQ ID NO: 21774 - DNA, 21 bp, Artificial Sequence
  source: /note="Description of Artificial Sequence: Synthetic oligonucleotide"
cctcatcatgatgatgagaat

SEQ ID NO: 21775 - DNA, 21 bp, Artificial Sequence
  source: /note="Description of Artificial Sequence: Synthetic oligonucleotide"
cctcatcttgagtgtggtatg

SEQ ID NO: 21776 - DNA, 21 bp, Artificial Sequence
  source: /note="Description of Artificial Sequence: Synthetic oligonucleotide"
ccgcatttgggtgtgtcgacg

SEQ ID NO: 21777 - DNA, 21 bp, Artificial Sequence
  source: /note="Description of Artificial Sequence: Synthetic oligonucleotide"
cctcatttgcataatggtctg

SEQ ID NO: 21778 - DNA, 21 bp, Artificial Sequence
  source: /note="Description of Artificial Sequence: Synthetic oligonucleotide"
ccgcatttgaagattgctgcg

SEQ ID NO: 21779 - DNA, 21 bp, Artificial Sequence
  source: /note="Description of Artificial Sequence: Synthetic oligonucleotide"
ccgcatttgcctgatcatgcg

SEQ ID NO: 21780 - DNA, 21 bp, Artificial Sequence
  source: /note="Description of Artificial Sequence: Synthetic oligonucleotide"
cctcatcttccgccggcgaat

SEQ ID NO: 21781 - DNA, 21 bp, Artificial Sequence
  source: /note="Description of Artificial Sequence: Synthetic oligonucleotide"
cctcatctgcctcagaatatg

SEQ ID NO: 21782 - DNA, 21 bp, Artificial Sequence
  source: /note="Description of Artificial Sequence: Synthetic oligonucleotide"
cctcatctgtcggcgaatgcg

SEQ ID NO: 21783 - DNA, 21 bp, Artificial Sequence
  source: /note="Description of Artificial Sequence: Synthetic oligonucleotide"
ccgcatatggggcgtgctgat

SEQ ID NO: 21784 - DNA, 21 bp, Artificial Sequence
  source: /note="Description of Artificial Sequence: Synthetic oligonucleotide"
cctcataatagtacggatact

SEQ ID NO: 21785 - DNA, 21 bp, Artificial Sequence
  source: /note="Description of Artificial Sequence: Synthetic oligonucleotide"
cctcatcctaattcttctccg

SEQ ID NO: 21786 - DNA, 21 bp, Artificial Sequence
  source: /note="Description of Artificial Sequence: Synthetic oligonucleotide"
ccgcatcctcctgagcagtcg

SEQ ID NO: 21787 - DNA, 21 bp, Artificial Sequence
  source: /note="Description of Artificial Sequence: Synthetic oligonucleotide"
ccgcatcctccttctaatcgt

SEQ ID NO: 21788 - DNA, 21 bp, Artificial Sequence
  source: /note="Description of Artificial Sequence: Synthetic oligonucleotide"
ccgcatccgtctgctcagggg

SEQ ID NO: 21789 - DNA, 21 bp, Artificial Sequence
  source: /note="Description of Artificial Sequence: Synthetic oligonucleotide"
ccgcatccttcgtcgattccg

SEQ ID NO: 21790 - DNA, 21 bp, Artificial Sequence
  source: /note="Description of Artificial Sequence: Synthetic oligonucleotide"
cctcatcagtctattcctccg

SEQ ID NO: 21791 - DNA, 21 bp, Artificial Sequence
  source: /note="Description of Artificial Sequence: Synthetic oligonucleotide"
ccgcatcgggagtatgttgtt

SEQ ID NO: 21792 - DNA, 21 bp, Artificial Sequence
  source: /note="Description of Artificial Sequence: Synthetic oligonucleotide"
cctcatcgtccgtctaattct

SEQ ID NO: 21793 - DNA, 21 bp, Artificial Sequence
  source: /note="Description of Artificial Sequence: Synthetic oligonucleotide"
ccgcatcggcctacggttgtg

SEQ ID NO: 21794 - DNA, 21 bp, Artificial Sequence
  source: /note="Description of Artificial Sequence: Synthetic oligonucleotide"
cctcatcgtgtgtcggtttcg

SEQ ID NO: 21795 - DNA, 21 bp, Artificial Sequence
  source: /note="Description of Artificial Sequence: Synthetic oligonucleotide"
cctcattctaatatgaattcg

SEQ ID NO: 21796 - DNA, 21 bp, Artificial Sequence
  source: /note="Description of Artificial Sequence: Synthetic oligonucleotide"
ccgcattcgtcgaaggagatg

SEQ ID NO: 21797 - DNA, 21 bp, Artificial Sequence
  source: /note="Description of Artificial Sequence: Synthetic oligonucleotide"
cctcattcttctatgcttttg

SEQ ID NO: 21798 - DNA, 21 bp, Artificial Sequence
  source: /note="Description of Artificial Sequence: Synthetic oligonucleotide"
ccgcatactgggtatacggat

SEQ ID NO: 21799 - DNA, 21 bp, Artificial Sequence
  source: /note="Description of Artificial Sequence: Synthetic oligonucleotide"
ccgcatactttggtgacgagg

SEQ ID NO: 21800 - DNA, 21 bp, Artificial Sequence
  source: /note="Description of Artificial Sequence: Synthetic oligonucleotide"
cctcatactagtccgccgtct

SEQ ID NO: 21801 - DNA, 21 bp, Artificial Sequence
  source: /note="Description of Artificial Sequence: Synthetic oligonucleotide"
cctattgcgcgtgagtatggg

SEQ ID NO: 21802 - DNA, 21 bp, Artificial Sequence
  source: /note="Description of Artificial Sequence: Synthetic oligonucleotide"
cctattgcgcggggtgatttt

SEQ ID NO: 21803 - DNA, 21 bp, Artificial Sequence
  source: /note="Description of Artificial Sequence: Synthetic oligonucleotide"
ccgattgatcgggagtatgcg

SEQ ID NO: 21804 - DNA, 21 bp, Artificial Sequence
  source: /note="Description of Artificial Sequence: Synthetic oligonucleotide"
ccgattgatactggtagggag

SEQ ID NO: 21805 - DNA, 21 bp, Artificial Sequence
  source: /note="Description of Artificial Sequence: Synthetic oligonucleotide"
ccgattgattatggggttgag

SEQ ID NO: 21806 - DNA, 21 bp, Artificial Sequence
  source: /note="Description of Artificial Sequence: Synthetic oligonucleotide"
ccgattgagggtaggcgggtg

SEQ ID NO: 21807 - DNA, 21 bp, Artificial Sequence
  source: /note="Description of Artificial Sequence: Synthetic oligonucleotide"
cctattgagcgtacgcttcct

SEQ ID NO: 21808 - DNA, 21 bp, Artificial Sequence
  source: /note="Description of Artificial Sequence: Synthetic oligonucleotide"
cctattggtcctcctaattcg

SEQ ID NO: 21809 - DNA, 21 bp, Artificial Sequence
  source: /note="Description of Artificial Sequence: Synthetic oligonucleotide"
ccgattgggtctatgctgagt

SEQ ID NO: 21810 - DNA, 21 bp, Artificial Sequence
  source: /note="Description of Artificial Sequence: Synthetic oligonucleotide"
ccgattggtagtaatgggaag

SEQ ID NO: 21811 - DNA, 21 bp, Artificial Sequence
  source: /note="Description of Artificial Sequence: Synthetic oligonucleotide"
cctattggggttcaggagaag

SEQ ID NO: 21812 - DNA, 21 bp, Artificial Sequence
  source: /note="Description of Artificial Sequence: Synthetic oligonucleotide"
cctattcatattagttctgtt

SEQ ID NO: 21813 - DNA, 21 bp, Artificial Sequence
  source: /note="Description of Artificial Sequence: Synthetic oligonucleotide"
ccgattcattattctcaggat

SEQ ID NO: 21814 - DNA, 21 bp, Artificial Sequence
  source: /note="Description of Artificial Sequence: Synthetic oligonucleotide"
cctattatggggcagaagtct

SEQ ID NO: 21815 - DNA, 21 bp, Artificial Sequence
  source: /note="Description of Artificial Sequence: Synthetic oligonucleotide"
cctattaatgattcgtcttcg

SEQ ID NO: 21816 - DNA, 21 bp, Artificial Sequence
  source: /note="Description of Artificial Sequence: Synthetic oligonucleotide"
ccgattaatatgcgggggcct

SEQ ID NO: 21817 - DNA, 21 bp, Artificial Sequence
  source: /note="Description of Artificial Sequence: Synthetic oligonucleotide"
ccgattcctgataagagttct

SEQ ID NO: 21818 - DNA, 21 bp, Artificial Sequence
  source: /note="Description of Artificial Sequence: Synthetic oligonucleotide"
cctattccgggtccgggtaag

SEQ ID NO: 21819 - DNA, 21 bp, Artificial Sequence
  source: /note="Description of Artificial Sequence: Synthetic oligonucleotide"
ccgattccgaataagggtggt

SEQ ID NO: 21820 - DNA, 21 bp, Artificial Sequence
  source: /note="Description of Artificial Sequence: Synthetic oligonucleotide"
ccgattcagacgcgtacgtat

SEQ ID NO: 21821 - DNA, 21 bp, Artificial Sequence
  source: /note="Description of Artificial Sequence: Synthetic oligonucleotide"
cctattcgtgcggctgcgtcg

SEQ ID NO: 21822 - DNA, 21 bp, Artificial Sequence
  source: /note="Description of Artificial Sequence: Synthetic oligonucleotide"
cctattcgggcggaggctgtg

SEQ ID NO: 21823 - DNA, 21 bp, Artificial Sequence
  source: /note="Description of Artificial Sequence: Synthetic oligonucleotide"
cctattagtgagtttaatgcg

SEQ ID NO: 21824 - DNA, 21 bp, Artificial Sequence
  source: /note="Description of Artificial Sequence: Synthetic oligonucleotide"
ccgatttcgttgtcgatgccg

SEQ ID NO: 21825 - DNA, 21 bp, Artificial Sequence
  source: /note="Description of Artificial Sequence: Synthetic oligonucleotide"
cctatttctcctttgtcgtat

SEQ ID NO: 21826 - DNA, 21 bp, Artificial Sequence
  source: /note="Description of Artificial Sequence: Synthetic oligonucleotide"
cctattagtcagggtcgtttg

SEQ ID NO: 21827 - DNA, 21 bp, Artificial Sequence
  source: /note="Description of Artificial Sequence: Synthetic oligonucleotide"
ccgattagttctaagtcgtcg

SEQ ID NO: 21828 - DNA, 21 bp, Artificial Sequence
  source: /note="Description of Artificial Sequence: Synthetic oligonucleotide"
ccgattagtactttgcttgct

SEQ ID NO: 21829 - DNA, 21 bp, Artificial Sequence
  source: /note="Description of Artificial Sequence: Synthetic oligonucleotide"
cctattactaatcctaggatt

SEQ ID NO: 21830 - DNA, 21 bp, Artificial Sequence
  source: /note="Description of Artificial Sequence: Synthetic oligonucleotide"
ccgattacgaatagtaatatt

SEQ ID NO: 21831 - DNA, 21 bp, Artificial Sequence
  source: /note="Description of Artificial Sequence: Synthetic oligonucleotide"
ccgattactaattatagtagt

SEQ ID NO: 21832 - DNA, 21 bp, Artificial Sequence
  source: /note="Description of Artificial Sequence: Synthetic oligonucleotide"
ccgattactccggggaatgag

SEQ ID NO: 21833 - DNA, 21 bp, Artificial Sequence
  source: /note="Description of Artificial Sequence: Synthetic oligonucleotide"
cctattactacggtgcctgcg

SEQ ID NO: 21834 - DNA, 21 bp, Artificial Sequence
  source: /note="Description of Artificial Sequence: Synthetic oligonucleotide"
cctattgtggggagtcatgag

SEQ ID NO: 21835 - DNA, 21 bp, Artificial Sequence
  source: /note="Description of Artificial Sequence: Synthetic oligonucleotide"
ccgattgtgccggtgtcggct

SEQ ID NO: 21836 - DNA, 21 bp, Artificial Sequence
  source: /note="Description of Artificial Sequence: Synthetic oligonucleotide"
ccgattgttacgcatgcgctg

SEQ ID NO: 21837 - DNA, 21 bp, Artificial Sequence
  source: /note="Description of Artificial Sequence: Synthetic oligonucleotide"
ccgatttataaggggacgggt

SEQ ID NO: 21838 - DNA, 21 bp, Artificial Sequence
  source: /note="Description of Artificial Sequence: Synthetic oligonucleotide"
cctaaggcggcgcctaatttt

SEQ ID NO: 21839 - DNA, 21 bp, Artificial Sequence
  source: /note="Description of Artificial Sequence: Synthetic oligonucleotide"
cctaaggcgattttgccttct

SEQ ID NO: 21840 - DNA, 21 bp, Artificial Sequence
  source: /note="Description of Artificial Sequence: Synthetic oligonucleotide"
cctaaggcgtcggattggcat

SEQ ID NO: 21841 - DNA, 21 bp, Artificial Sequence
  source: /note="Description of Artificial Sequence: Synthetic oligonucleotide"
cctaaggatgatggtcagaat

SEQ ID NO: 21842 - DNA, 21 bp, Artificial Sequence
  source: /note="Description of Artificial Sequence: Synthetic oligonucleotide"
cctaaggatattagggagttt

SEQ ID NO: 21843 - DNA, 21 bp, Artificial Sequence
  source: /note="Description of Artificial Sequence: Synthetic oligonucleotide"
ccgaaggataggaatccggtg

SEQ ID NO: 21844 - DNA, 21 bp, Artificial Sequence
  source: /note="Description of Artificial Sequence: Synthetic oligonucleotide"
cctaaggatagttcgcggacg

SEQ ID NO: 21845 - DNA, 21 bp, Artificial Sequence
  source: /note="Description of Artificial Sequence: Synthetic oligonucleotide"
ccgaaggagcggacgcatttg

SEQ ID NO: 21846 - DNA, 21 bp, Artificial Sequence
  source: /note="Description of Artificial Sequence: Synthetic oligonucleotide"
ccgaagtttgggggtgtgagt

SEQ ID NO: 21847 - DNA, 21 bp, Artificial Sequence
  source: /note="Description of Artificial Sequence: Synthetic oligonucleotide"
ccgaagggggctgcgacgatg

SEQ ID NO: 21848 - DNA, 21 bp, Artificial Sequence
  source: /note="Description of Artificial Sequence: Synthetic oligonucleotide"
cctaagggggagactggtcgt

SEQ ID NO: 21849 - DNA, 21 bp, Artificial Sequence
  source: /note="Description of Artificial Sequence: Synthetic oligonucleotide"
cctaagggtacgcattttggg

SEQ ID NO: 21850 - DNA, 21 bp, Artificial Sequence
  source: /note="Description of Artificial Sequence: Synthetic oligonucleotide"
cctaaggggtatggtgcgtct

SEQ ID NO: 21851 - DNA, 21 bp, Artificial Sequence
  source: /note="Description of Artificial Sequence: Synthetic oligonucleotide"
ccgaagattagtactctgggt

SEQ ID NO: 21852 - DNA, 21 bp, Artificial Sequence
  source: /note="Description of Artificial Sequence: Synthetic oligonucleotide"
ccgaagaaggatccggtgcct

SEQ ID NO: 21853 - DNA, 21 bp, Artificial Sequence
  source: /note="Description of Artificial Sequence: Synthetic oligonucleotide"
ccgaagctgaaggatgttact

SEQ ID NO: 21854 - DNA, 21 bp, Artificial Sequence
  source: /note="Description of Artificial Sequence: Synthetic oligonucleotide"
ccgaagcttagttcttctact

SEQ ID NO: 21855 - DNA, 21 bp, Artificial Sequence
  source: /note="Description of Artificial Sequence: Synthetic oligonucleotide"
ccgaagctgtatgatatgatg

SEQ ID NO: 21856 - DNA, 21 bp, Artificial Sequence
  source: /note="Description of Artificial Sequence: Synthetic oligonucleotide"
cctaagatggatgataagaat

SEQ ID NO: 21857 - DNA, 21 bp, Artificial Sequence
  source: /note="Description of Artificial Sequence: Synthetic oligonucleotide"
cctaagatgcttgttactggt

SEQ ID NO: 21858 - DNA, 21 bp, Artificial Sequence
  source: /note="Description of Artificial Sequence: Synthetic oligonucleotide"
ccgaagatgactggggctcgt

SEQ ID NO: 21859 - DNA, 21 bp, Artificial Sequence
  source: /note="Description of Artificial Sequence: Synthetic oligonucleotide"
ccgaagaatatggttcctccg

SEQ ID NO: 21860 - DNA, 21 bp, Artificial Sequence
  source: /note="Description of Artificial Sequence: Synthetic oligonucleotide"
ccgaagcctgagtttgcgtct

SEQ ID NO: 21861 - DNA, 21 bp, Artificial Sequence
  source: /note="Description of Artificial Sequence: Synthetic oligonucleotide"
cctaagcctgagtttcttgct

SEQ ID NO: 21862 - DNA, 21 bp, Artificial Sequence
  source: /note="Description of Artificial Sequence: Synthetic oligonucleotide"
ccgaagccggagccgcatgct

SEQ ID NO: 21863 - DNA, 21 bp, Artificial Sequence
  source: /note="Description of Artificial Sequence: Synthetic oligonucleotide"
ccgaagcctattactgtgacg

SEQ ID NO: 21864 - DNA, 21 bp, Artificial Sequence
  source: /note="Description of Artificial Sequence: Synthetic oligonucleotide"
ccgaagcctcctaatctgttg

SEQ ID NO: 21865 - DNA, 21 bp, Artificial Sequence
  source: /note="Description of Artificial Sequence: Synthetic oligonucleotide"
cctaagcctccgtctttgggg

SEQ ID NO: 21866 - DNA, 21 bp, Artificial Sequence
  source: /note="Description of Artificial Sequence: Synthetic oligonucleotide"
ccgaagcaggagtcttatgcg

SEQ ID NO: 21867 - DNA, 21 bp, Artificial Sequence
  source: /note="Description of Artificial Sequence: Synthetic oligonucleotide"
ccgaagtcgatggatggttat

SEQ ID NO: 21868 - DNA, 21 bp, Artificial Sequence
  source: /note="Description of Artificial Sequence: Synthetic oligonucleotide"
ccgaagtcgaattattatcct

SEQ ID NO: 21869 - DNA, 21 bp, Artificial Sequence
  source: /note="Description of Artificial Sequence: Synthetic oligonucleotide"
cctaagacgcatgtgctgtcg

SEQ ID NO: 21870 - DNA, 21 bp, Artificial Sequence
  source: /note="Description of Artificial Sequence: Synthetic oligonucleotide"
cctaagacttatgagactgtg

SEQ ID NO: 21871 - DNA, 21 bp, Artificial Sequence
  source: /note="Description of Artificial Sequence: Synthetic oligonucleotide"
ccgcttgcggctgggtctgtt

SEQ ID NO: 21872 - DNA, 21 bp, Artificial Sequence
  source: /note="Description of Artificial Sequence: Synthetic oligonucleotide"
cctctggcgggtcctcttact

SEQ ID NO: 21873 - DNA, 21 bp, Artificial Sequence
  source: /note="Description of Artificial Sequence: Synthetic oligonucleotide"
cctttggctcatactacttcg

SEQ ID NO: 21874 - DNA, 21 bp, Artificial Sequence
  source: /note="Description of Artificial Sequence: Synthetic oligonucleotide"
ccgcttgctcgtgaggagctg

SEQ ID NO: 21875 - DNA, 21 bp, Artificial Sequence
  source: /note="Description of Artificial Sequence: Synthetic oligonucleotide"
ccgcttgcttcgcctattcct

SEQ ID NO: 21876 - DNA, 21 bp, Artificial Sequence
  source: /note="Description of Artificial Sequence: Synthetic oligonucleotide"
cctcttgcgagtacgtatccg

SEQ ID NO: 21877 - DNA, 21 bp, Artificial Sequence
  source: /note="Description of Artificial Sequence: Synthetic oligonucleotide"
cctcttgatgcgaagatgtat

SEQ ID NO: 21878 - DNA, 21 bp, Artificial Sequence
  source: /note="Description of Artificial Sequence: Synthetic oligonucleotide"
cctcttgatgataagcctttt

SEQ ID NO: 21879 - DNA, 21 bp, Artificial Sequence
  source: /note="Description of Artificial Sequence: Synthetic oligonucleotide"
ccgctggatcctgggattttg

SEQ ID NO: 21880 - DNA, 21 bp, Artificial Sequence
  source: /note="Description of Artificial Sequence: Synthetic oligonucleotide"
ccgttggattctaatgttgtg

SEQ ID NO: 21881 - DNA, 21 bp, Artificial Sequence
  source: /note="Description of Artificial Sequence: Synthetic oligonucleotide"
cctctggatacgcgtttttct

SEQ ID NO: 21882 - DNA, 21 bp, Artificial Sequence
  source: /note="Description of Artificial Sequence: Synthetic oligonucleotide"
ccgctggattatcggaagggg

SEQ ID NO: 21883 - DNA, 21 bp, Artificial Sequence
  source: /note="Description of Artificial Sequence: Synthetic oligonucleotide"
cctctggagaagtcgtctttt

SEQ ID NO: 21884 - DNA, 21 bp, Artificial Sequence
  source: /note="Description of Artificial Sequence: Synthetic oligonucleotide"
cctttggagagtgtggatatt

SEQ ID NO: 21885 - DNA, 21 bp, Artificial Sequence
  source: /note="Description of Artificial Sequence: Synthetic oligonucleotide"
ccgttgtttaatgggtctgcg

SEQ ID NO: 21886 - DNA, 21 bp, Artificial Sequence
  source: /note="Description of Artificial Sequence: Synthetic oligonucleotide"
ccgttgggtgctgggaagagt

SEQ ID NO: 21887 - DNA, 21 bp, Artificial Sequence
  source: /note="Description of Artificial Sequence: Synthetic oligonucleotide"
cctttgggtgctcagcatctg

SEQ ID NO: 21888 - DNA, 21 bp, Artificial Sequence
  source: /note="Description of Artificial Sequence: Synthetic oligonucleotide"
cctttgggtgatgcgtggggg

SEQ ID NO: 21889 - DNA, 21 bp, Artificial Sequence
  source: /note="Description of Artificial Sequence: Synthetic oligonucleotide"
ccgctggggatggtgcatacg

SEQ ID NO: 21890 - DNA, 21 bp, Artificial Sequence
  source: /note="Description of Artificial Sequence: Synthetic oligonucleotide"
ccgctgcatatgacgactatg

SEQ ID NO: 21891 - DNA, 21 bp, Artificial Sequence
  source: /note="Description of Artificial Sequence: Synthetic oligonucleotide"
ccgctgcataatcgggttcct

SEQ ID NO: 21892 - DNA, 21 bp, Artificial Sequence
  source: /note="Description of Artificial Sequence: Synthetic oligonucleotide"
ccgcttcatcgggctaatact

SEQ ID NO: 21893 - DNA, 21 bp, Artificial Sequence
  source: /note="Description of Artificial Sequence: Synthetic oligonucleotide"
ccgttgcatcggacgcttgat

SEQ ID NO: 21894 - DNA, 21 bp, Artificial Sequence
  source: /note="Description of Artificial Sequence: Synthetic oligonucleotide"
cctcttattgcggtgccgact

SEQ ID NO: 21895 - DNA, 21 bp, Artificial Sequence
  source: /note="Description of Artificial Sequence: Synthetic oligonucleotide"
cctttgattggtaagccgaat

SEQ ID NO: 21896 - DNA, 21 bp, Artificial Sequence
  source: /note="Description of Artificial Sequence: Synthetic oligonucleotide"
cctcttattactccggatctt

SEQ ID NO: 21897 - DNA, 21 bp, Artificial Sequence
  source: /note="Description of Artificial Sequence: Synthetic oligonucleotide"
ccgctgaaggctcatatgatg

SEQ ID NO: 21898 - DNA, 21 bp, Artificial Sequence
  source: /note="Description of Artificial Sequence: Synthetic oligonucleotide"
ccgttgaaggcgtcgggtatg

SEQ ID NO: 21899 - DNA, 21 bp, Artificial Sequence
  source: /note="Description of Artificial Sequence: Synthetic oligonucleotide"
ccgttgaagcttagttatggg

SEQ ID NO: 21900 - DNA, 21 bp, Artificial Sequence
  source: /note="Description of Artificial Sequence: Synthetic oligonucleotide"
cctttgaaggtgagtgcttcg

SEQ ID NO: 21901 - DNA, 21 bp, Artificial Sequence
  source: /note="Description of Artificial Sequence: Synthetic oligonucleotide"
cctttgttggatagtcatagt

SEQ ID NO: 21902 - DNA, 21 bp, Artificial Sequence
  source: /note="Description of Artificial Sequence: Synthetic oligonucleotide"
cctctgcttgagcatcgtggt

SEQ ID NO: 21903 - DNA, 21 bp, Artificial Sequence
  source: /note="Description of Artificial Sequence: Synthetic oligonucleotide"
ccgttgttgcatgataagatt

SEQ ID NO: 21904 - DNA, 21 bp, Artificial Sequence
  source: /note="Description of Artificial Sequence: Synthetic oligonucleotide"
ccgcttaatgctgcgcctttt

SEQ ID NO: 21905 - DNA, 21 bp, Artificial Sequence
  source: /note="Description of Artificial Sequence: Synthetic oligonucleotide"
cctctgaatggtgatgcgcct

SEQ ID NO: 21906 - DNA, 21 bp, Artificial Sequence
  source: /note="Description of Artificial Sequence: Synthetic oligonucleotide"
ccgctgaatcctagtacgggt

SEQ ID NO: 21907 - DNA, 21 bp, Artificial Sequence
  source: /note="Description of Artificial Sequence: Synthetic oligonucleotide"
cctctgaatgtgaggactgtt

SEQ ID NO: 21908 - DNA, 21 bp, Artificial Sequence
  source: /note="Description of Artificial Sequence: Synthetic oligonucleotide"
cctcttcctgattatcttgtg

SEQ ID NO: 21909 - DNA, 21 bp, Artificial Sequence
  source: /note="Description of Artificial Sequence: Synthetic oligonucleotide"
cctctgcctggtaatgttggg

SEQ ID NO: 21910 - DNA, 21 bp, Artificial Sequence
  source: /note="Description of Artificial Sequence: Synthetic oligonucleotide"
ccgttgccgctgaggacgggg

SEQ ID NO: 21911 - DNA, 21 bp, Artificial Sequence
  source: /note="Description of Artificial Sequence: Synthetic oligonucleotide"
ccgcttcctcctccggaggcg

SEQ ID NO: 21912 - DNA, 21 bp, Artificial Sequence
  source: /note="Description of Artificial Sequence: Synthetic oligonucleotide"
ccgcttccgaggctggcttct

SEQ ID NO: 21913 - DNA, 21 bp, Artificial Sequence
  source: /note="Description of Artificial Sequence: Synthetic oligonucleotide"
ccgctgcctagtgatgggcat

SEQ ID NO: 21914 - DNA, 21 bp, Artificial Sequence
  source: /note="Description of Artificial Sequence: Synthetic oligonucleotide"
ccgttgccggtttctaggtct

SEQ ID NO: 21915 - DNA, 21 bp, Artificial Sequence
  source: /note="Description of Artificial Sequence: Synthetic oligonucleotide"
cctctgcagagtcagactgtt

SEQ ID NO: 21916 - DNA, 21 bp, Artificial Sequence
  source: /note="Description of Artificial Sequence: Synthetic oligonucleotide"
cctcttcagtcgtcgcagttt

SEQ ID NO: 21917 - DNA, 21 bp, Artificial Sequence
  source: /note="Description of Artificial Sequence: Synthetic oligonucleotide"
cctctgcagacgatgactctg

SEQ ID NO: 21918 - DNA, 21 bp, Artificial Sequence
  source: /note="Description of Artificial Sequence: Synthetic oligonucleotide"
cctttgcaggtgcggctgtcg

SEQ ID NO: 21919 - DNA, 21 bp, Artificial Sequence
  source: /note="Description of Artificial Sequence: Synthetic oligonucleotide"
ccgcttagggatgggttggtt

SEQ ID NO: 21920 - DNA, 21 bp, Artificial Sequence
  source: /note="Description of Artificial Sequence: Synthetic oligonucleotide"
ccgctgaggttgacttctgat

SEQ ID NO: 21921 - DNA, 21 bp, Artificial Sequence
  source: /note="Description of Artificial Sequence: Synthetic oligonucleotide"
ccgctgcgtccggggcagttg

SEQ ID NO: 21922 - DNA, 21 bp, Artificial Sequence
  source: /note="Description of Artificial Sequence: Synthetic oligonucleotide"
cctttgcgggtttcgacgcct

SEQ ID NO: 21923 - DNA, 21 bp, Artificial Sequence
  source: /note="Description of Artificial Sequence: Synthetic oligonucleotide"
cctctgtcggcgattaattcg

SEQ ID NO: 21924 - DNA, 21 bp, Artificial Sequence
  source: /note="Description of Artificial Sequence: Synthetic oligonucleotide"
ccgttgtctgatgctatgtct

SEQ ID NO: 21925 - DNA, 21 bp, Artificial Sequence
  source: /note="Description of Artificial Sequence: Synthetic oligonucleotide"
cctttgtctgatcctaatatt

SEQ ID NO: 21926 - DNA, 21 bp, Artificial Sequence
  source: /note="Description of Artificial Sequence: Synthetic oligonucleotide"
cctttgtctgaggataagagg

SEQ ID NO: 21927 - DNA, 21 bp, Artificial Sequence
  source: /note="Description of Artificial Sequence: Synthetic oligonucleotide"
cctcttagttttacggttgcg

SEQ ID NO: 21928 - DNA, 21 bp, Artificial Sequence
  source: /note="Description of Artificial Sequence: Synthetic oligonucleotide"
cctttgagtatgatggagccg

SEQ ID NO: 21929 - DNA, 21 bp, Artificial Sequence
  source: /note="Description of Artificial Sequence: Synthetic oligonucleotide"
cctctttctatgcggccggat

SEQ ID NO: 21930 - DNA, 21 bp, Artificial Sequence
  source: /note="Description of Artificial Sequence: Synthetic oligonucleotide"
cctctttcgaatcttcagcct

SEQ ID NO: 21931 - DNA, 21 bp, Artificial Sequence
  source: /note="Description of Artificial Sequence: Synthetic oligonucleotide"
cctctgtctcctgcgggtgcg

SEQ ID NO: 21932 - DNA, 21 bp, Artificial Sequence
  source: /note="Description of Artificial Sequence: Synthetic oligonucleotide"
cctttgtcgcctattaggaat

SEQ ID NO: 21933 - DNA, 21 bp, Artificial Sequence
  source: /note="Description of Artificial Sequence: Synthetic oligonucleotide"
cctctgtctccgacttggaag

SEQ ID NO: 21934 - DNA, 21 bp, Artificial Sequence
  source: /note="Description of Artificial Sequence: Synthetic oligonucleotide"
cctctttctcgtaatcagatt

SEQ ID NO: 21935 - DNA, 21 bp, Artificial Sequence
  source: /note="Description of Artificial Sequence: Synthetic oligonucleotide"
cctctttcttctgctgcgggt

SEQ ID NO: 21936 - DNA, 21 bp, Artificial Sequence
  source: /note="Description of Artificial Sequence: Synthetic oligonucleotide"
cctcttagttcgggtggtatg

SEQ ID NO: 21937 - DNA, 21 bp, Artificial Sequence
  source: /note="Description of Artificial Sequence: Synthetic oligonucleotide"
cctctgtctagtccggctcgg

SEQ ID NO: 21938 - DNA, 21 bp, Artificial Sequence
  source: /note="Description of Artificial Sequence: Synthetic oligonucleotide"
ccgttgtcgtctccgaatggg

SEQ ID NO: 21939 - DNA, 21 bp, Artificial Sequence
  source: /note="Description of Artificial Sequence: Synthetic oligonucleotide"
ccgttgtcttctacgcttggg

SEQ ID NO: 21940 - DNA, 21 bp, Artificial Sequence
  source: /note="Description of Artificial Sequence: Synthetic oligonucleotide"
cctctgagtacgaatagtacg

SEQ ID NO: 21941 - DNA, 21 bp, Artificial Sequence
  source: /note="Description of Artificial Sequence: Synthetic oligonucleotide"
ccgctttcgtatcagaagaat

SEQ ID NO: 21942 - DNA, 21 bp, Artificial Sequence
  source: /note="Description of Artificial Sequence: Synthetic oligonucleotide"
cctctgacggcgggtttggcg

SEQ ID NO: 21943 - DNA, 21 bp, Artificial Sequence
  source: /note="Description of Artificial Sequence: Synthetic oligonucleotide"
ccgctgactgctcatgtgagt

SEQ ID NO: 21944 - DNA, 21 bp, Artificial Sequence
  source: /note="Description of Artificial Sequence: Synthetic oligonucleotide"
ccgttgactcaggcggtgcct

SEQ ID NO: 21945 - DNA, 21 bp, Artificial Sequence
  source: /note="Description of Artificial Sequence: Synthetic oligonucleotide"
cctcttacgtctttgaagttg

SEQ ID NO: 21946 - DNA, 21 bp, Artificial Sequence
  source: /note="Description of Artificial Sequence: Synthetic oligonucleotide"
cctcttacgagtgtggcgcct

SEQ ID NO: 21947 - DNA, 21 bp, Artificial Sequence
  source: /note="Description of Artificial Sequence: Synthetic oligonucleotide"
cctctgactactcgtaatcag

SEQ ID NO: 21948 - DNA, 21 bp, Artificial Sequence
  source: /note="Description of Artificial Sequence: Synthetic oligonucleotide"
ccgttggtggcgatttctacg

SEQ ID NO: 21949 - DNA, 21 bp, Artificial Sequence
  source: /note="Description of Artificial Sequence: Synthetic oligonucleotide"
ccgttggtgttgtcgtctcat

SEQ ID NO: 21950 - DNA, 21 bp, Artificial Sequence
  source: /note="Description of Artificial Sequence: Synthetic oligonucleotide"
ccgcttgtgcgtggggattcg

SEQ ID NO: 21951 - DNA, 21 bp, Artificial Sequence
  source: /note="Description of Artificial Sequence: Synthetic oligonucleotide"
cctttggttagtacggggatt

SEQ ID NO: 21952 - DNA, 21 bp, Artificial Sequence
  source: /note="Description of Artificial Sequence: Synthetic oligonucleotide"
cctttggttacgatggcgagt

SEQ ID NO: 21953 - DNA, 21 bp, Artificial Sequence
  source: /note="Description of Artificial Sequence: Synthetic oligonucleotide"
cctatggctcctcctgttcag

SEQ ID NO: 21954 - DNA, 21 bp, Artificial Sequence
  source: /note="Description of Artificial Sequence: Synthetic oligonucleotide"
ccgatggcgcaggtggctccg

SEQ ID NO: 21955 - DNA, 21 bp, Artificial Sequence
  source: /note="Description of Artificial Sequence: Synthetic oligonucleotide"
ccgatggagcggactcatatg

SEQ ID NO: 21956 - DNA, 21 bp, Artificial Sequence
  source: /note="Description of Artificial Sequence: Synthetic oligonucleotide"
cctatgggtcatcagtcggct

SEQ ID NO: 21957 - DNA, 21 bp, Artificial Sequence
  source: /note="Description of Artificial Sequence: Synthetic oligonucleotide"
ccgatgattaattcgtcgatg

SEQ ID NO: 21958 - DNA, 21 bp, Artificial Sequence
  source: /note="Description of Artificial Sequence: Synthetic oligonucleotide"
cctatgaaggcgtcgagtcct

SEQ ID NO: 21959 - DNA, 21 bp, Artificial Sequence
  source: /note="Description of Artificial Sequence: Synthetic oligonucleotide"
ccgatgaagggttctgtttat

SEQ ID NO: 21960 - DNA, 21 bp, Artificial Sequence
  source: /note="Description of Artificial Sequence: Synthetic oligonucleotide"
cctatgaagatgggtccgggg

SEQ ID NO: 21961 - DNA, 21 bp, Artificial Sequence
  source: /note="Description of Artificial Sequence: Synthetic oligonucleotide"
cctatgatgcagactccgaag

SEQ ID NO: 21962 - DNA, 21 bp, Artificial Sequence
  source: /note="Description of Artificial Sequence: Synthetic oligonucleotide"
ccgatgaatcgtggtaaggag

SEQ ID NO: 21963 - DNA, 21 bp, Artificial Sequence
  source: /note="Description of Artificial Sequence: Synthetic oligonucleotide"
cctatgaatactaatgtttct

SEQ ID NO: 21964 - DNA, 21 bp, Artificial Sequence
  source: /note="Description of Artificial Sequence: Synthetic oligonucleotide"
ccgatgccggcgagtgatttt

SEQ ID NO: 21965 - DNA, 21 bp, Artificial Sequence
  source: /note="Description of Artificial Sequence: Synthetic oligonucleotide"
ccgatgcctgagtttaatggg

SEQ ID NO: 21966 - DNA, 21 bp, Artificial Sequence
  source: /note="Description of Artificial Sequence: Synthetic oligonucleotide"
cctatgccggagatggctggt

SEQ ID NO: 21967 - DNA, 21 bp, Artificial Sequence
  source: /note="Description of Artificial Sequence: Synthetic oligonucleotide"
cctatgcctgttcgggcggtt

SEQ ID NO: 21968 - DNA, 21 bp, Artificial Sequence
  source: /note="Description of Artificial Sequence: Synthetic oligonucleotide"
cctatgcgtgggtcgactctt

SEQ ID NO: 21969 - DNA, 21 bp, Artificial Sequence
  source: /note="Description of Artificial Sequence: Synthetic oligonucleotide"
cctatgcggaatcaggtggat

SEQ ID NO: 21970 - DNA, 21 bp, Artificial Sequence
  source: /note="Description of Artificial Sequence: Synthetic oligonucleotide"
ccgatgcggcagattaatgat

SEQ ID NO: 21971 - DNA, 21 bp, Artificial Sequence
  source: /note="Description of Artificial Sequence: Synthetic oligonucleotide"
ccgatgtcggagcttactcct

SEQ ID NO: 21972 - DNA, 21 bp, Artificial Sequence
  source: /note="Description of Artificial Sequence: Synthetic oligonucleotide"
cctatgagtggtccgtcgatg

SEQ ID NO: 21973 - DNA, 21 bp, Artificial Sequence
  source: /note="Description of Artificial Sequence: Synthetic oligonucleotide"
ccgatgagtggttctaatgcg

SEQ ID NO: 21974 - DNA, 21 bp, Artificial Sequence
  source: /note="Description of Artificial Sequence: Synthetic oligonucleotide"
cctatgtctcatatggctccg

SEQ ID NO: 21975 - DNA, 21 bp, Artificial Sequence
  source: /note="Description of Artificial Sequence: Synthetic oligonucleotide"
cctatgagtctgcctctgagt

SEQ ID NO: 21976 - DNA, 21 bp, Artificial Sequence
  source: /note="Description of Artificial Sequence: Synthetic oligonucleotide"
cctatgtctatgaaggagcct

SEQ ID NO: 21977 - DNA, 21 bp, Artificial Sequence
  source: /note="Description of Artificial Sequence: Synthetic oligonucleotide"
ccgatgtctcagacgcctggg

SEQ ID NO: 21978 - DNA, 21 bp, Artificial Sequence
  source: /note="Description of Artificial Sequence: Synthetic oligonucleotide"
cctatgtcgcagactacgagt

SEQ ID NO: 21979 - DNA, 21 bp, Artificial Sequence
  source: /note="Description of Artificial Sequence: Synthetic oligonucleotide"
cctatgtcttcgccgcttaag

SEQ ID NO: 21980 - DNA, 21 bp, Artificial Sequence
  source: /note="Description of Artificial Sequence: Synthetic oligonucleotide"
ccgatgtcttcgcgtgttgtg

SEQ ID NO: 21981 - DNA, 21 bp, Artificial Sequence
  source: /note="Description of Artificial Sequence: Synthetic oligonucleotide"
ccgatgtctactagtactccg

SEQ ID NO: 21982 - DNA, 21 bp, Artificial Sequence
  source: /note="Description of Artificial Sequence: Synthetic oligonucleotide"
ccgatggttaaggggacgtct

SEQ ID NO: 21983 - DNA, 21 bp, Artificial Sequence
  source: /note="Description of Artificial Sequence: Synthetic oligonucleotide"
cctatggtgacggttcggacg

SEQ ID NO: 21984 - DNA, 21 bp, Artificial Sequence
  source: /note="Description of Artificial Sequence: Synthetic oligonucleotide"
ccgaatgctaagacgattcct

SEQ ID NO: 21985 - DNA, 21 bp, Artificial Sequence
  source: /note="Description of Artificial Sequence: Synthetic oligonucleotide"
ccgaatgctcagactgtgtat

SEQ ID NO: 21986 - DNA, 21 bp, Artificial Sequence
  source: /note="Description of Artificial Sequence: Synthetic oligonucleotide"
cctaatgctcgtatgctggtt

SEQ ID NO: 21987 - DNA, 21 bp, Artificial Sequence
  source: /note="Description of Artificial Sequence: Synthetic oligonucleotide"
ccgaatgatggggcgcttcct

SEQ ID NO: 21988 - DNA, 21 bp, Artificial Sequence
  source: /note="Description of Artificial Sequence: Synthetic oligonucleotide"
cctaatgatcgggctgtggtt

SEQ ID NO: 21989 - DNA, 21 bp, Artificial Sequence
  source: /note="Description of Artificial Sequence: Synthetic oligonucleotide"
cctaatgataggactcgtatt

SEQ ID NO: 21990 - DNA, 21 bp, Artificial Sequence
  source: /note="Description of Artificial Sequence: Synthetic oligonucleotide"
ccgaatgagcaggctcttggt

SEQ ID NO: 21991 - DNA, 21 bp, Artificial Sequence
  source: /note="Description of Artificial Sequence: Synthetic oligonucleotide"
ccgaatgagtctcttgttact

SEQ ID NO: 21992 - DNA, 21 bp, Artificial Sequence
  source: /note="Description of Artificial Sequence: Synthetic oligonucleotide"
cctaattttcatcgtgctgag

SEQ ID NO: 21993 - DNA, 21 bp, Artificial Sequence
  source: /note="Description of Artificial Sequence: Synthetic oligonucleotide"
ccgaatggtccttataatgct

SEQ ID NO: 21994 - DNA, 21 bp, Artificial Sequence
  source: /note="Description of Artificial Sequence: Synthetic oligonucleotide"
ccgaatggttctgctaagtct

SEQ ID NO: 21995 - DNA, 21 bp, Artificial Sequence
  source: /note="Description of Artificial Sequence: Synthetic oligonucleotide"
ccgaatcatgatgtgccgcct

SEQ ID NO: 21996 - DNA, 21 bp, Artificial Sequence
  source: /note="Description of Artificial Sequence: Synthetic oligonucleotide"
ccgaatcataagggttttggg

SEQ ID NO: 21997 - DNA, 21 bp, Artificial Sequence
  source: /note="Description of Artificial Sequence: Synthetic oligonucleotide"
ccgaatcataatagtgataag

SEQ ID NO: 21998 - DNA, 21 bp, Artificial Sequence
  source: /note="Description of Artificial Sequence: Synthetic oligonucleotide"
ccgaatcattctcagcttctg

SEQ ID NO: 21999 - DNA, 21 bp, Artificial Sequence
  source: /note="Description of Artificial Sequence: Synthetic oligonucleotide"
cctaatattaagaatccttct

SEQ ID NO: 22000 - DNA, 21 bp, Artificial Sequence
  source: /note="Description of Artificial Sequence: Synthetic oligonucleotide"
ccgaatattcctatgcggggt

SEQ ID NO: 22001 - DNA, 21 bp, Artificial Sequence
  source: /note="Description of Artificial Sequence: Synthetic oligonucleotide"
ccgaatattacttcgactctt

SEQ ID NO: 22002 - DNA, 21 bp, Artificial Sequence
  source: /note="Description of Artificial Sequence: Synthetic oligonucleotide"
cctaatctgattctgggtccg

SEQ ID NO: 22003 - DNA, 21 bp, Artificial Sequence
  source: /note="Description of Artificial Sequence: Synthetic oligonucleotide"
cctaatctgcagaggagtcct

SEQ ID NO: 22004 - DNA, 21 bp, Artificial Sequence
  source: /note="Description of Artificial Sequence: Synthetic oligonucleotide"
cctaatctttcggatgagtct

SEQ ID NO: 22005 - DNA, 21 bp, Artificial Sequence
  source: /note="Description of Artificial Sequence: Synthetic oligonucleotide"
ccgaatcttactatggcttct

SEQ ID NO: 22006 - DNA, 21 bp, Artificial Sequence
  source: /note="Description of Artificial Sequence: Synthetic oligonucleotide"
cctaatcttgtgacggctgct

SEQ ID NO: 22007 - DNA, 21 bp, Artificial Sequence
  source: /note="Description of Artificial Sequence: Synthetic oligonucleotide"
cctaataataatgttcctagt

SEQ ID NO: 22008 - DNA, 21 bp, Artificial Sequence
  source: /note="Description of Artificial Sequence: Synthetic oligonucleotide"
cctaataatagggatagtacg

SEQ ID NO: 22009 - DNA, 21 bp, Artificial Sequence
  source: /note="Description of Artificial Sequence: Synthetic oligonucleotide"
cctaataatgttatttcggag

SEQ ID NO: 22010 - DNA, 21 bp, Artificial Sequence
  source: /note="Description of Artificial Sequence: Synthetic oligonucleotide"
ccgaataatgttccgcttgcg

SEQ ID NO: 22011 - DNA, 21 bp, Artificial Sequence
  source: /note="Description of Artificial Sequence: Synthetic oligonucleotide"
ccgaatccggctgctgcggct

SEQ ID NO: 22012 - DNA, 21 bp, Artificial Sequence
  source: /note="Description of Artificial Sequence: Synthetic oligonucleotide"
cctaatcctgcgcgtcttact

SEQ ID NO: 22013 - DNA, 21 bp, Artificial Sequence
  source: /note="Description of Artificial Sequence: Synthetic oligonucleotide"
ccgaatccgatttttagtagt

SEQ ID NO: 22014 - DNA, 21 bp, Artificial Sequence
  source: /note="Description of Artificial Sequence: Synthetic oligonucleotide"
ccgaatcctacttggtcgtcg

SEQ ID NO: 22015 - DNA, 21 bp, Artificial Sequence
  source: /note="Description of Artificial Sequence: Synthetic oligonucleotide"
ccgaatccggtgactcgtggt

SEQ ID NO: 22016 - DNA, 21 bp, Artificial Sequence
  source: /note="Description of Artificial Sequence: Synthetic oligonucleotide"
cctaatcaggatactcttgat

SEQ ID NO: 22017 - DNA, 21 bp, Artificial Sequence
  source: /note="Description of Artificial Sequence: Synthetic oligonucleotide"
cctaatcagtctgtgaagccg

SEQ ID NO: 22018 - DNA, 21 bp, Artificial Sequence
  source: /note="Description of Artificial Sequence: Synthetic oligonucleotide"
ccgaataggggtcatccgtcg

SEQ ID NO: 22019 - DNA, 21 bp, Artificial Sequence
  source: /note="Description of Artificial Sequence: Synthetic oligonucleotide"
cctaataggattgctcctatt

SEQ ID NO: 22020 - DNA, 21 bp, Artificial Sequence
  source: /note="Description of Artificial Sequence: Synthetic oligonucleotide"
cctaattcgggggttgtgact

SEQ ID NO: 22021 - DNA, 21 bp, Artificial Sequence
  source: /note="Description of Artificial Sequence: Synthetic oligonucleotide"
ccgaattctcttaatgcggcg

SEQ ID NO: 22022 - DNA, 21 bp, Artificial Sequence
  source: /note="Description of Artificial Sequence: Synthetic oligonucleotide"
ccgaatagtcggacgccgtat

SEQ ID NO: 22023 - DNA, 21 bp, Artificial Sequence
  source: /note="Description of Artificial Sequence: Synthetic oligonucleotide"
cctaattcttcgccgaggttg

SEQ ID NO: 22024 - DNA, 21 bp, Artificial Sequence
  source: /note="Description of Artificial Sequence: Synthetic oligonucleotide"
cctaatagtacgagggtggtt

SEQ ID NO: 22025 - DNA, 21 bp, Artificial Sequence
  source: /note="Description of Artificial Sequence: Synthetic oligonucleotide"
ccgaatactatgacgaggttg

SEQ ID NO: 22026 - DNA, 21 bp, Artificial Sequence
  source: /note="Description of Artificial Sequence: Synthetic oligonucleotide"
ccgaatgttcatcctaatatt

SEQ ID NO: 22027 - DNA, 21 bp, Artificial Sequence
  source: /note="Description of Artificial Sequence: Synthetic oligonucleotide"
ccgaatgtgaatgtgtctacg

SEQ ID NO: 22028 - DNA, 21 bp, Artificial Sequence
  source: /note="Description of Artificial Sequence: Synthetic oligonucleotide"
cctaatgttgttgatatgtcg

SEQ ID NO: 22029 - DNA, 21 bp, Artificial Sequence
  source: /note="Description of Artificial Sequence: Synthetic oligonucleotide"
cctcctgctgatcttaggacg

SEQ ID NO: 22030 - DNA, 21 bp, Artificial Sequence
  source: /note="Description of Artificial Sequence: Synthetic oligonucleotide"
ccgccggctcttagtccggtg

SEQ ID NO: 22031 - DNA, 21 bp, Artificial Sequence
  source: /note="Description of Artificial Sequence: Synthetic oligonucleotide"
cctccggctaattcgtcgtct

SEQ ID NO: 22032 - DNA, 21 bp, Artificial Sequence
  source: /note="Description of Artificial Sequence: Synthetic oligonucleotide"
ccgccggatgctaggtcttct

SEQ ID NO: 22033 - DNA, 21 bp, Artificial Sequence
  source: /note="Description of Artificial Sequence: Synthetic oligonucleotide"
cctccggatggggcgtctcgg

SEQ ID NO: 22034 - DNA, 21 bp, Artificial Sequence
  source: /note="Description of Artificial Sequence: Synthetic oligonucleotide"
cctcctgataagatgcattcg

SEQ ID NO: 22035 - DNA, 21 bp, Artificial Sequence
  source: /note="Description of Artificial Sequence: Synthetic oligonucleotide"
cctccggataatctgcataag

SEQ ID NO: 22036 - DNA, 21 bp, Artificial Sequence
  source: /note="Description of Artificial Sequence: Synthetic oligonucleotide"
cctccggagatgattttgggt

SEQ ID NO: 22037 - DNA, 21 bp, Artificial Sequence
  source: /note="Description of Artificial Sequence: Synthetic oligonucleotide"
cctccgtttaataagtcggat

SEQ ID NO: 22038 - DNA, 21 bp, Artificial Sequence
  source: /note="Description of Artificial Sequence: Synthetic oligonucleotide"
cctccttttccggagaggctt

SEQ ID NO: 22039 - DNA, 21 bp, Artificial Sequence
  source: /note="Description of Artificial Sequence: Synthetic oligonucleotide"
cctcctgggcatgatgcttct

SEQ ID NO: 22040 - DNA, 21 bp, Artificial Sequence
  source: /note="Description of Artificial Sequence: Synthetic oligonucleotide"
ccgcctggtattacgacgagt

SEQ ID NO: 22041 - DNA, 21 bp, Artificial Sequence
  source: /note="Description of Artificial Sequence: Synthetic oligonucleotide"
ccgcctgggcagtctcttacg

SEQ ID NO: 22042 - DNA, 21 bp, Artificial Sequence
  source: /note="Description of Artificial Sequence: Synthetic oligonucleotide"
cctccgggtagggtggttgcg

SEQ ID NO: 22043 - DNA, 21 bp, Artificial Sequence
  source: /note="Description of Artificial Sequence: Synthetic oligonucleotide"
cctcctggtagtcatagttcg

SEQ ID NO: 22044 - DNA, 21 bp, Artificial Sequence
  source: /note="Description of Artificial Sequence: Synthetic oligonucleotide"
ccgccggggtcttcgtctcgg

SEQ ID NO: 22045 - DNA, 21 bp, Artificial Sequence
  source: /note="Description of Artificial Sequence: Synthetic oligonucleotide"
cctccggggtatagggctagt

SEQ ID NO: 22046 - DNA, 21 bp, Artificial Sequence
  source: /note="Description of Artificial Sequence: Synthetic oligonucleotide"
cctcctcatcagcatctgctg

SEQ ID NO: 22047 - DNA, 21 bp, Artificial Sequence
  source: /note="Description of Artificial Sequence: Synthetic oligonucleotide"
cctcctcataggacgtttccg

SEQ ID NO: 22048 - DNA, 21 bp, Artificial Sequence
  source: /note="Description of Artificial Sequence: Synthetic oligonucleotide"
ccgcctcatactacgtttctt

SEQ ID NO: 22049 - DNA, 21 bp, Artificial Sequence
  source: /note="Description of Artificial Sequence: Synthetic oligonucleotide"
cctccgattgataatcggact

SEQ ID NO: 22050 - DNA, 21 bp, Artificial Sequence
  source: /note="Description of Artificial Sequence: Synthetic oligonucleotide"
ccgcctaaggcgatgccgact

SEQ ID NO: 22051 - DNA, 21 bp, Artificial Sequence
  source: /note="Description of Artificial Sequence: Synthetic oligonucleotide"
ccgcctttggaggttaagcag

SEQ ID NO: 22052 - DNA, 21 bp, Artificial Sequence
  source: /note="Description of Artificial Sequence: Synthetic oligonucleotide"
ccgcctttgcatactggggag

SEQ ID NO: 22053 - DNA, 21 bp, Artificial Sequence
  source: /note="Description of Artificial Sequence: Synthetic oligonucleotide"
cctccgcttaagtctcctcct

SEQ ID NO: 22054 - DNA, 21 bp, Artificial Sequence
  source: /note="Description of Artificial Sequence: Synthetic oligonucleotide"
ccgcctcttccttcgaatgcg

SEQ ID NO: 22055 - DNA, 21 bp, Artificial Sequence
  source: /note="Description of Artificial Sequence: Synthetic oligonucleotide"
cctcctatgcatggtactcgt

SEQ ID NO: 22056 - DNA, 21 bp, Artificial Sequence
  source: /note="Description of Artificial Sequence: Synthetic oligonucleotide"
cctcctatgtctcctcatgtg

SEQ ID NO: 22057 - DNA, 21 bp, Artificial Sequence
  source: /note="Description of Artificial Sequence: Synthetic oligonucleotide"
cctcctatggttacgaataat

SEQ ID NO: 22058 - DNA, 21 bp, Artificial Sequence
  source: /note="Description of Artificial Sequence: Synthetic oligonucleotide"
cctcctaataatcatgctggt

SEQ ID NO: 22059 - DNA, 21 bp, Artificial Sequence
  source: /note="Description of Artificial Sequence: Synthetic oligonucleotide"
ccgcctaattatctgaatgcg

SEQ ID NO: 22060 - DNA, 21 bp, Artificial Sequence
  source: /note="Description of Artificial Sequence: Synthetic oligonucleotide"
cctccgcctgcggctctttct

SEQ ID NO: 22061 - DNA, 21 bp, Artificial Sequence
  source: /note="Description of Artificial Sequence: Synthetic oligonucleotide"
ccgccgccgaagtcgcagtcg

SEQ ID NO: 22062 - DNA, 21 bp, Artificial Sequence
  source: /note="Description of Artificial Sequence: Synthetic oligonucleotide"
cctcctcctaataataatctt

SEQ ID NO: 22063 - DNA, 21 bp, Artificial Sequence
  source: /note="Description of Artificial Sequence: Synthetic oligonucleotide"
cctcctcctcgtgaggtgcat

SEQ ID NO: 22064 - DNA, 21 bp, Artificial Sequence
  source: /note="Description of Artificial Sequence: Synthetic oligonucleotide"
ccgccgccttcttgtatggtt

SEQ ID NO: 22065 - DNA, 21 bp, Artificial Sequence
  source: /note="Description of Artificial Sequence: Synthetic oligonucleotide"
ccgcctccgtctcggatgggg

SEQ ID NO: 22066 - DNA, 21 bp, Artificial Sequence
  source: /note="Description of Artificial Sequence: Synthetic oligonucleotide"
cctccgcaggagatgaggtat

SEQ ID NO: 22067 - DNA, 21 bp, Artificial Sequence
  source: /note="Description of Artificial Sequence: Synthetic oligonucleotide"
cctcctcagagtgctgctgtg

SEQ ID NO: 22068 - DNA, 21 bp, Artificial Sequence
  source: /note="Description of Artificial Sequence: Synthetic oligonucleotide"
cctcctcagtctaataggaat

SEQ ID NO: 22069 - DNA, 21 bp, Artificial Sequence
  source: /note="Description of Artificial Sequence: Synthetic oligonucleotide"
ccgcctcggattagtgatgct

SEQ ID NO: 22070 - DNA, 21 bp, Artificial Sequence
  source: /note="Description of Artificial Sequence: Synthetic oligonucleotide"
cctccgcggcttcctagttgt

SEQ ID NO: 22071 - DNA, 21 bp, Artificial Sequence
  source: /note="Description of Artificial Sequence: Synthetic oligonucleotide"
ccgcctaggcttgtttctact

SEQ ID NO: 22072 - DNA, 21 bp, Artificial Sequence
  source: /note="Description of Artificial Sequence: Synthetic oligonucleotide"
ccgcctcggcctaatggtatt

SEQ ID NO: 22073 - DNA, 21 bp, Artificial Sequence
  source: /note="Description of Artificial Sequence: Synthetic oligonucleotide"
ccgcctcggaggccgatggag

SEQ ID NO: 22074 - DNA, 21 bp, Artificial Sequence
  source: /note="Description of Artificial Sequence: Synthetic oligonucleotide"
cctcctcgtagtaatgtggag

SEQ ID NO: 22075 - DNA, 21 bp, Artificial Sequence
  source: /note="Description of Artificial Sequence: Synthetic oligonucleotide"
ccgcctcggacgccgtcttcg

SEQ ID NO: 22076 - DNA, 21 bp, Artificial Sequence
  source: /note="Description of Artificial Sequence: Synthetic oligonucleotide"
cctcctcgggtttcggcggtt

SEQ ID NO: 22077 - DNA, 21 bp, Artificial Sequence
  source: /note="Description of Artificial Sequence: Synthetic oligonucleotide"
ccgcctagtccttctgtgacg

SEQ ID NO: 22078 - DNA, 21 bp, Artificial Sequence
  source: /note="Description of Artificial Sequence: Synthetic oligonucleotide"
cctcctagtccgacttatatg

SEQ ID NO: 22079 - DNA, 21 bp, Artificial Sequence
  source: /note="Description of Artificial Sequence: Synthetic oligonucleotide"
ccgccgtctactgagatttct

SEQ ID NO: 22080 - DNA, 21 bp, Artificial Sequence
  source: /note="Description of Artificial Sequence: Synthetic oligonucleotide"
cctccgtctacgaagcttgtg

SEQ ID NO: 22081 - DNA, 21 bp, Artificial Sequence
  source: /note="Description of Artificial Sequence: Synthetic oligonucleotide"
cctcctagtactaatccgaag

SEQ ID NO: 22082 - DNA, 21 bp, Artificial Sequence
  source: /note="Description of Artificial Sequence: Synthetic oligonucleotide"
cctccttctgtgcctagggag

SEQ ID NO: 22083 - DNA, 21 bp, Artificial Sequence
  source: /note="Description of Artificial Sequence: Synthetic oligonucleotide"
ccgccgacggagccgagggcg

SEQ ID NO: 22084 - DNA, 21 bp, Artificial Sequence
  source: /note="Description of Artificial Sequence: Synthetic oligonucleotide"
ccgccgacgggggcgtctttt

SEQ ID NO: 22085 - DNA, 21 bp, Artificial Sequence
  source: /note="Description of Artificial Sequence: Synthetic oligonucleotide"
cctcctacgattacttcgagt

SEQ ID NO: 22086 - DNA, 21 bp, Artificial Sequence
  source: /note="Description of Artificial Sequence: Synthetic oligonucleotide"
ccgcctactaaggttgatatg

SEQ ID NO: 22087 - DNA, 21 bp, Artificial Sequence
  source: /note="Description of Artificial Sequence: Synthetic oligonucleotide"
cctccgactcttcagagtgat

SEQ ID NO: 22088 - DNA, 21 bp, Artificial Sequence
  source: /note="Description of Artificial Sequence: Synthetic oligonucleotide"
cctcctactaatccgacggtg

SEQ ID NO: 22089 - DNA, 21 bp, Artificial Sequence
  source: /note="Description of Artificial Sequence: Synthetic oligonucleotide"
cctcctacgcctgctgcgcat

SEQ ID NO: 22090 - DNA, 21 bp, Artificial Sequence
  source: /note="Description of Artificial Sequence: Synthetic oligonucleotide"
ccgcctacgccggttagttgg

SEQ ID NO: 22091 - DNA, 21 bp, Artificial Sequence
  source: /note="Description of Artificial Sequence: Synthetic oligonucleotide"
cctcctacgcgtgagtcgcct

SEQ ID NO: 22092 - DNA, 21 bp, Artificial Sequence
  source: /note="Description of Artificial Sequence: Synthetic oligonucleotide"
ccgcctactacgaatttgaat

SEQ ID NO: 22093 - DNA, 21 bp, Artificial Sequence
  source: /note="Description of Artificial Sequence: Synthetic oligonucleotide"
ccgcctgtgggtacggttttg

SEQ ID NO: 22094 - DNA, 21 bp, Artificial Sequence
  source: /note="Description of Artificial Sequence: Synthetic oligonucleotide"
cctccttatggtgcggttact

SEQ ID NO: 22095 - DNA, 21 bp, Artificial Sequence
  source: /note="Description of Artificial Sequence: Synthetic oligonucleotide"
cctccgtatactgtgtcgccg

SEQ ID NO: 22096 - DNA, 21 bp, Artificial Sequence
  source: /note="Description of Artificial Sequence: Synthetic oligonucleotide"
ccgcaggcgaggcagcctttt

SEQ ID NO: 22097 - DNA, 21 bp, Artificial Sequence
  source: /note="Description of Artificial Sequence: Synthetic oligonucleotide"
cctcaggagccgggttttgat

SEQ ID NO: 22098 - DNA, 21 bp, Artificial Sequence
  source: /note="Description of Artificial Sequence: Synthetic oligonucleotide"
ccgcaggagcgtgctaggagt

SEQ ID NO: 22099 - DNA, 21 bp, Artificial Sequence
  source: /note="Description of Artificial Sequence: Synthetic oligonucleotide"
ccgcagcatccgagtcggaat

SEQ ID NO: 22100 - DNA, 21 bp, Artificial Sequence
  source: /note="Description of Artificial Sequence: Synthetic oligonucleotide"
cctcagattcatattatggct

SEQ ID NO: 22101 - DNA, 21 bp, Artificial Sequence
  source: /note="Description of Artificial Sequence: Synthetic oligonucleotide"
cctcagattcttcctagtgct

SEQ ID NO: 22102 - DNA, 21 bp, Artificial Sequence
  source: /note="Description of Artificial Sequence: Synthetic oligonucleotide"
cctcagcttagtcagaatgtt

SEQ ID NO: 22103 - DNA, 21 bp, Artificial Sequence
  source: /note="Description of Artificial Sequence: Synthetic oligonucleotide"
cctcagaatgctagttatcgt

SEQ ID NO: 22104 - DNA, 21 bp, Artificial Sequence
  source: /note="Description of Artificial Sequence: Synthetic oligonucleotide"
ccgcagaataatccgccgggg

SEQ ID NO: 22105 - DNA, 21 bp, Artificial Sequence
  source: /note="Description of Artificial Sequence: Synthetic oligonucleotide"
ccgcagaataggcctcctgtg

SEQ ID NO: 22106 - DNA, 21 bp, Artificial Sequence
  source: /note="Description of Artificial Sequence: Synthetic oligonucleotide"
ccgcagcctcgtaatgttatt

SEQ ID NO: 22107 - DNA, 21 bp, Artificial Sequence
  source: /note="Description of Artificial Sequence: Synthetic oligonucleotide"
ccgcagcctactgagacgccg

SEQ ID NO: 22108 - DNA, 21 bp, Artificial Sequence
  source: /note="Description of Artificial Sequence: Synthetic oligonucleotide"
ccgcagccgacttatacgctg

SEQ ID NO: 22109 - DNA, 21 bp, Artificial Sequence
  source: /note="Description of Artificial Sequence: Synthetic oligonucleotide"
cctcagcgtaatgctggtgct

SEQ ID NO: 22110 - DNA, 21 bp, Artificial Sequence
  source: /note="Description of Artificial Sequence: Synthetic oligonucleotide"
cctcagcggcagggtttgttg

SEQ ID NO: 22111 - DNA, 21 bp, Artificial Sequence
  source: /note="Description of Artificial Sequence: Synthetic oligonucleotide"
cctcagaggagtgctatgccg

SEQ ID NO: 22112 - DNA, 21 bp, Artificial Sequence
  source: /note="Description of Artificial Sequence: Synthetic oligonucleotide"
ccgcagaggacgcagcaggag

SEQ ID NO: 22113 - DNA, 21 bp, Artificial Sequence
  source: /note="Description of Artificial Sequence: Synthetic oligonucleotide"
cctcagagggttcatgcggcg

SEQ ID NO: 22114 - DNA, 21 bp, Artificial Sequence
  source: /note="Description of Artificial Sequence: Synthetic oligonucleotide"
cctcagagtttgcatgtgagg

SEQ ID NO: 22115 - DNA, 21 bp, Artificial Sequence
  source: /note="Description of Artificial Sequence: Synthetic oligonucleotide"
cctcagtcgcctaatcattcg

SEQ ID NO: 22116 - DNA, 21 bp, Artificial Sequence
  source: /note="Description of Artificial Sequence: Synthetic oligonucleotide"
ccgcagtcgcgtgatacttat

SEQ ID NO: 22117 - DNA, 21 bp, Artificial Sequence
  source: /note="Description of Artificial Sequence: Synthetic oligonucleotide"
ccgcagtcgaggaatactaat

SEQ ID NO: 22118 - DNA, 21 bp, Artificial Sequence
  source: /note="Description of Artificial Sequence: Synthetic oligonucleotide"
ccgcagactctgacttcggtg

SEQ ID NO: 22119 - DNA, 21 bp, Artificial Sequence
  source: /note="Description of Artificial Sequence: Synthetic oligonucleotide"
cctcagacgaggagtccgtcg

SEQ ID NO: 22120 - DNA, 21 bp, Artificial Sequence
  source: /note="Description of Artificial Sequence: Synthetic oligonucleotide"
cctcagacggtgactaaggtg

SEQ ID NO: 22121 - DNA, 21 bp, Artificial Sequence
  source: /note="Description of Artificial Sequence: Synthetic oligonucleotide"
ccgcaggttagggcgtctcag

SEQ ID NO: 22122 - DNA, 21 bp, Artificial Sequence
  source: /note="Description of Artificial Sequence: Synthetic oligonucleotide"
ccgcaggttcgtcaggggccg

SEQ ID NO: 22123 - DNA, 21 bp, Artificial Sequence
  source: /note="Description of Artificial Sequence: Synthetic oligonucleotide"
cctcaggttacgacgtcggct

SEQ ID NO: 22124 - DNA, 21 bp, Artificial Sequence
  source: /note="Description of Artificial Sequence: Synthetic oligonucleotide"
cctcgggcgaattctggtatg

SEQ ID NO: 22125 - DNA, 21 bp, Artificial Sequence
  source: /note="Description of Artificial Sequence: Synthetic oligonucleotide"
cctcgtgctaatacgttttcg

SEQ ID NO: 22126 - DNA, 21 bp, Artificial Sequence
  source: /note="Description of Artificial Sequence: Synthetic oligonucleotide"
cctagggctccggctgtgtct

SEQ ID NO: 22127 - DNA, 21 bp, Artificial Sequence
  source: /note="Description of Artificial Sequence: Synthetic oligonucleotide"
cctcgtgcgtcgggtccgtat

SEQ ID NO: 22128 - DNA, 21 bp, Artificial Sequence
  source: /note="Description of Artificial Sequence: Synthetic oligonucleotide"
cctcgtgctacgacttattct

SEQ ID NO: 22129 - DNA, 21 bp, Artificial Sequence
  source: /note="Description of Artificial Sequence: Synthetic oligonucleotide"
cctcgggatgctactcggttg

SEQ ID NO: 22130 - DNA, 21 bp, Artificial Sequence
  source: /note="Description of Artificial Sequence: Synthetic oligonucleotide"
ccgcgggataagaatcctgct

SEQ ID NO: 22131 - DNA, 21 bp, Artificial Sequence
  source: /note="Description of Artificial Sequence: Synthetic oligonucleotide"
cctcgtgatcggttggtgatt

SEQ ID NO: 22132 - DNA, 21 bp, Artificial Sequence
  source: /note="Description of Artificial Sequence: Synthetic oligonucleotide"
cctcgtgattatcagacttcg

SEQ ID NO: 22133 - DNA, 21 bp, Artificial Sequence
  source: /note="Description of Artificial Sequence: Synthetic oligonucleotide"
cctcgtgagaaggctgcgacg

SEQ ID NO: 22134 - DNA, 21 bp, Artificial Sequence
  source: /note="Description of Artificial Sequence: Synthetic oligonucleotide"
ccgcgggagccttatgctgag

SEQ ID NO: 22135 - DNA, 21 bp, Artificial Sequence
  source: /note="Description of Artificial Sequence: Synthetic oligonucleotide"
ccgcgtggggagggtacgaat

SEQ ID NO: 22136 - DNA, 21 bp, Artificial Sequence
  source: /note="Description of Artificial Sequence: Synthetic oligonucleotide"
cctaggggttttgagactgct

SEQ ID NO: 22137 - DNA, 21 bp, Artificial Sequence
  source: /note="Description of Artificial Sequence: Synthetic oligonucleotide"
cctcgtgggctttcttctgct

SEQ ID NO: 22138 - DNA, 21 bp, Artificial Sequence
  source: /note="Description of Artificial Sequence: Synthetic oligonucleotide"
ccgcggggtcagattgcgagt

SEQ ID NO: 22139 - DNA, 21 bp, Artificial Sequence
  source: /note="Description of Artificial Sequence: Synthetic oligonucleotide"
cctcgtggtagtgggtctagt

SEQ ID NO: 22140 - DNA, 21 bp, Artificial Sequence
  source: /note="Description of Artificial Sequence: Synthetic oligonucleotide"
ccgcgtgggtcgtctgattat

SEQ ID NO: 22141 - DNA, 21 bp, Artificial Sequence
  source: /note="Description of Artificial Sequence: Synthetic oligonucleotide"
cctcggcatacggtgtatgct

SEQ ID NO: 22142 - DNA, 21 bp, Artificial Sequence
  source: /note="Description of Artificial Sequence: Synthetic oligonucleotide"
cctcggattgaggctcggaat

SEQ ID NO: 22143 - DNA, 21 bp, Artificial Sequence
  source: /note="Description of Artificial Sequence: Synthetic oligonucleotide"
cctaggattattaatactatt

SEQ ID NO: 22144 - DNA, 21 bp, Artificial Sequence
  source: /note="Description of Artificial Sequence: Synthetic oligonucleotide"
cctcgtattcctcagactcat

SEQ ID NO: 22145 - DNA, 21 bp, Artificial Sequence
  source: /note="Description of Artificial Sequence: Synthetic oligonucleotide"
ccgcgtaagttgccgggtgat

SEQ ID NO: 22146 - DNA, 21 bp, Artificial Sequence
  source: /note="Description of Artificial Sequence: Synthetic oligonucleotide"
ccgcggaaggttgggctgtcg

SEQ ID NO: 22147 - DNA, 21 bp, Artificial Sequence
  source: /note="Description of Artificial Sequence: Synthetic oligonucleotide"
ccgaggttggcgggtggtatt

SEQ ID NO: 22148 - DNA, 21 bp, Artificial Sequence
  source: /note="Description of Artificial Sequence: Synthetic oligonucleotide"
ccgcgtttgggtggtgtggtt

SEQ ID NO: 22149 - DNA, 21 bp, Artificial Sequence
  source: /note="Description of Artificial Sequence: Synthetic oligonucleotide"
cctcggcttgggttggataat

SEQ ID NO: 22150 - DNA, 21 bp, Artificial Sequence
  source: /note="Description of Artificial Sequence: Synthetic oligonucleotide"
cctcgtctgaatgagatgcct

SEQ ID NO: 22151 - DNA, 21 bp, Artificial Sequence
  source: /note="Description of Artificial Sequence: Synthetic oligonucleotide"
cctcgtcttactgcttcgatt

SEQ ID NO: 22152 - DNA, 21 bp, Artificial Sequence
  source: /note="Description of Artificial Sequence: Synthetic oligonucleotide"
cctcggatgagtgcgagtgtg

SEQ ID NO: 22153 - DNA, 21 bp, Artificial Sequence
  source: /note="Description of Artificial Sequence: Synthetic oligonucleotide"
cctcggaatgcgtcgacgccg

SEQ ID NO: 22154 - DNA, 21 bp, Artificial Sequence
  source: /note="Description of Artificial Sequence: Synthetic oligonucleotide"
ccgaggaatccggagtttggg

SEQ ID NO: 22155 - DNA, 21 bp, Artificial Sequence
  source: /note="Description of Artificial Sequence: Synthetic oligonucleotide"
ccgcggaatcagtatgctgct

SEQ ID NO: 22156 - DNA, 21 bp, Artificial Sequence
  source: /note="Description of Artificial Sequence: Synthetic oligonucleotide"
ccgaggaatcggctttctgat

SEQ ID NO: 22157 - DNA, 21 bp, Artificial Sequence
  source: /note="Description of Artificial Sequence: Synthetic oligonucleotide"
ccgaggcctgctccggtgcat

SEQ ID NO: 22158 - DNA, 21 bp, Artificial Sequence
  source: /note="Description of Artificial Sequence: Synthetic oligonucleotide"
ccgcggccggctgtgccggct

SEQ ID NO: 22159 - DNA, 21 bp, Artificial Sequence
  source: /note="Description of Artificial Sequence: Synthetic oligonucleotide"
ccgcgtccgggtatggataag

SEQ ID NO: 22160 - DNA, 21 bp, Artificial Sequence
  source: /note="Description of Artificial Sequence: Synthetic oligonucleotide"
cctaggcctcaggctaattct

SEQ ID NO: 22161 - DNA, 21 bp, Artificial Sequence
  source: /note="Description of Artificial Sequence: Synthetic oligonucleotide"
ccgcgtcctcagtcgctgact

SEQ ID NO: 22162 - DNA, 21 bp, Artificial Sequence
  source: /note="Description of Artificial Sequence: Synthetic oligonucleotide"
cctcggccgtcgcttgatttg

SEQ ID NO: 22163 - DNA, 21 bp, Artificial Sequence
  source: /note="Description of Artificial Sequence: Synthetic oligonucleotide"
cctaggcctacgcatgcggtt

SEQ ID NO: 22164 - DNA, 21 bp, Artificial Sequence
  source: /note="Description of Artificial Sequence: Synthetic oligonucleotide"
cctcgtcagactgagggtatg

SEQ ID NO: 22165 - DNA, 21 bp, Artificial Sequence
  source: /note="Description of Artificial Sequence: Synthetic oligonucleotide"
ccgcggcagactacgaatggt

SEQ ID NO: 22166 - DNA, 21 bp, Artificial Sequence
  source: /note="Description of Artificial Sequence: Synthetic oligonucleotide"
ccgaggcgtgatcaggagact

SEQ ID NO: 22167 - DNA, 21 bp, Artificial Sequence
  source: /note="Description of Artificial Sequence: Synthetic oligonucleotide"
ccgcggcggattgagtttccg

SEQ ID NO: 22168 - DNA, 21 bp, Artificial Sequence
  source: /note="Description of Artificial Sequence: Synthetic oligonucleotide"
ccgcgtagtgcggatttggag

SEQ ID NO: 22169 - DNA, 21 bp, Artificial Sequence
  source: /note="Description of Artificial Sequence: Synthetic oligonucleotide"
ccgcgtagtggtacggcttct

SEQ ID NO: 22170 - DNA, 21 bp, Artificial Sequence
  source: /note="Description of Artificial Sequence: Synthetic oligonucleotide"
cctaggagtcatccgacgtcg

SEQ ID NO: 22171 - DNA, 21 bp, Artificial Sequence
  source: /note="Description of Artificial Sequence: Synthetic oligonucleotide"
cctaggtcgattcctgggctt

SEQ ID NO: 22172 - DNA, 21 bp, Artificial Sequence
  source: /note="Description of Artificial Sequence: Synthetic oligonucleotide"
cctcggtctctgcctctgact

SEQ ID NO: 22173 - DNA, 21 bp, Artificial Sequence
  source: /note="Description of Artificial Sequence: Synthetic oligonucleotide"
cctaggtctatgaatcagacg

SEQ ID NO: 22174 - DNA, 21 bp, Artificial Sequence
  source: /note="Description of Artificial Sequence: Synthetic oligonucleotide"
cctcgttctaattctgatact

SEQ ID NO: 22175 - DNA, 21 bp, Artificial Sequence
  source: /note="Description of Artificial Sequence: Synthetic oligonucleotide"
cctcgtagtccgaatccgcct

SEQ ID NO: 22176 - DNA, 21 bp, Artificial Sequence
  source: /note="Description of Artificial Sequence: Synthetic oligonucleotide"
cctaggtcgcctagtgataag

SEQ ID NO: 22177 - DNA, 21 bp, Artificial Sequence
  source: /note="Description of Artificial Sequence: Synthetic oligonucleotide"
ccgaggagtagttttactgag

SEQ ID NO: 22178 - DNA, 21 bp, Artificial Sequence
  source: /note="Description of Artificial Sequence: Synthetic oligonucleotide"
cctaggtcttcttcttcgttg

SEQ ID NO: 22179 - DNA, 21 bp, Artificial Sequence
  source: /note="Description of Artificial Sequence: Synthetic oligonucleotide"
cctcggacggagccttttctt

SEQ ID NO: 22180 - DNA, 21 bp, Artificial Sequence
  source: /note="Description of Artificial Sequence: Synthetic oligonucleotide"
ccgcggactcatacggatgct

SEQ ID NO: 22181 - DNA, 21 bp, Artificial Sequence
  source: /note="Description of Artificial Sequence: Synthetic oligonucleotide"
cctcgtacttctgggactatg

SEQ ID NO: 22182 - DNA, 21 bp, Artificial Sequence
  source: /note="Description of Artificial Sequence: Synthetic oligonucleotide"
cctcgtactagttctactcat

SEQ ID NO: 22183 - DNA, 21 bp, Artificial Sequence
  source: /note="Description of Artificial Sequence: Synthetic oligonucleotide"
ccgcggactactatgactgag

SEQ ID NO: 22184 - DNA, 21 bp, Artificial Sequence
  source: /note="Description of Artificial Sequence: Synthetic oligonucleotide"
cctaggacgacgtatagtgat

SEQ ID NO: 22185 - DNA, 21 bp, Artificial Sequence
  source: /note="Description of Artificial Sequence: Synthetic oligonucleotide"
ccgcgggtgggtagtccgcag

SEQ ID NO: 22186 - DNA, 21 bp, Artificial Sequence
  source: /note="Description of Artificial Sequence: Synthetic oligonucleotide"
cctagggtgctgtcgagtggg

SEQ ID NO: 22187 - DNA, 21 bp, Artificial Sequence
  source: /note="Description of Artificial Sequence: Synthetic oligonucleotide"
ccgcgggtgcctactcatgat

SEQ ID NO: 22188 - DNA, 21 bp, Artificial Sequence
  source: /note="Description of Artificial Sequence: Synthetic oligonucleotide"
ccgcgtgtttctattgcgaat

SEQ ID NO: 22189 - DNA, 21 bp, Artificial Sequence
  source: /note="Description of Artificial Sequence: Synthetic oligonucleotide"
ccgagggtgtcggttgcgccg

SEQ ID NO: 22190 - DNA, 21 bp, Artificial Sequence
  source: /note="Description of Artificial Sequence: Synthetic oligonucleotide"
ccgcgttatgatgctgctggt

SEQ ID NO: 22191 - DNA, 21 bp, Artificial Sequence
  source: /note="Description of Artificial Sequence: Synthetic oligonucleotide"
ccgtcggcggctcatcctcct

SEQ ID NO: 22192 - DNA, 21 bp, Artificial Sequence
  source: /note="Description of Artificial Sequence: Synthetic oligonucleotide"
ccgagtgcgaatatgcggtcg

SEQ ID NO: 22193 - DNA, 21 bp, Artificial Sequence
  source: /note="Description of Artificial Sequence: Synthetic oligonucleotide"
ccgagtgcgaatcgtttgtct

SEQ ID NO: 22194 - DNA, 21 bp, Artificial Sequence
  source: /note="Description of Artificial Sequence: Synthetic oligonucleotide"
ccttctgcgcagtctcatagt

SEQ ID NO: 22195 - DNA, 21 bp, Artificial Sequence
  source: /note="Description of Artificial Sequence: Synthetic oligonucleotide"
ccttcggctagtaatagtatg

SEQ ID NO: 22196 - DNA, 21 bp, Artificial Sequence
  source: /note="Description of Artificial Sequence: Synthetic oligonucleotide"
cctagtgcgactggggtgaag

SEQ ID NO: 22197 - DNA, 21 bp, Artificial Sequence
  source: /note="Description of Artificial Sequence: Synthetic oligonucleotide"
ccttcttgtgataataatacg

SEQ ID NO: 22198 - DNA, 21 bp, Artificial Sequence
  source: /note="Description of Artificial Sequence: Synthetic oligonucleotide"
cctagtgatgatgctgggggt

SEQ ID NO: 22199 - DNA, 21 bp, Artificial Sequence
  source: /note="Description of Artificial Sequence: Synthetic oligonucleotide"
cctagtgataagaatactggg

SEQ ID NO: 22200 - DNA, 21 bp, Artificial Sequence
  source: /note="Description of Artificial Sequence: Synthetic oligonucleotide"
ccttctgataagagttttcgt

SEQ ID NO: 22201 - DNA, 21 bp, Artificial Sequence
  source: /note="Description of Artificial Sequence: Synthetic oligonucleotide"
ccgtcggatatgccttcgtcg

SEQ ID NO: 22202 - DNA, 21 bp, Artificial Sequence
  source: /note="Description of Artificial Sequence: Synthetic oligonucleotide"
ccgtcggatccttcggctggt

SEQ ID NO: 22203 - DNA, 21 bp, Artificial Sequence
  source: /note="Description of Artificial Sequence: Synthetic oligonucleotide"
ccttcggatccggtgacgagg

SEQ ID NO: 22204 - DNA, 21 bp, Artificial Sequence
  source: /note="Description of Artificial Sequence: Synthetic oligonucleotide"
ccttcggatcgtgtgcatacg

SEQ ID NO: 22205 - DNA, 21 bp, Artificial Sequence
  source: /note="Description of Artificial Sequence: Synthetic oligonucleotide"
ccttctgattctgcgtatcct

SEQ ID NO: 22206 - DNA, 21 bp, Artificial Sequence
  source: /note="Description of Artificial Sequence: Synthetic oligonucleotide"
ccgtctgattcggttcattcg

SEQ ID NO: 22207 - DNA, 21 bp, Artificial Sequence
  source: /note="Description of Artificial Sequence: Synthetic oligonucleotide"
ccttcggatacgcataggagt

SEQ ID NO: 22208 - DNA, 21 bp, Artificial Sequence
  source: /note="Description of Artificial Sequence: Synthetic oligonucleotide"
ccgagtgatactcctacgagg

SEQ ID NO: 22209 - DNA, 21 bp, Artificial Sequence
  source: /note="Description of Artificial Sequence: Synthetic oligonucleotide"
ccgtcggagcttaattctcgg

SEQ ID NO: 22210 - DNA, 21 bp, Artificial Sequence
  source: /note="Description of Artificial Sequence: Synthetic oligonucleotide"
ccgtctgagcagccggtgagg

SEQ ID NO: 22211 - DNA, 21 bp, Artificial Sequence
  source: /note="Description of Artificial Sequence: Synthetic oligonucleotide"
ccgtcggagtctactattgtt

SEQ ID NO: 22212 - DNA, 21 bp, Artificial Sequence
  source: /note="Description of Artificial Sequence: Synthetic oligonucleotide"
ccgagtgagtatactctggat

SEQ ID NO: 22213 - DNA, 21 bp, Artificial Sequence
  source: /note="Description of Artificial Sequence: Synthetic oligonucleotide"
ccgtcgtttttggaggggatt

SEQ ID NO: 22214 - DNA, 21 bp, Artificial Sequence
  source: /note="Description of Artificial Sequence: Synthetic oligonucleotide"
ccttcttttaatcctatgact

SEQ ID NO: 22215 - DNA, 21 bp, Artificial Sequence
  source: /note="Description of Artificial Sequence: Synthetic oligonucleotide"
ccttcgtttccgtctatgact

SEQ ID NO: 22216 - DNA, 21 bp, Artificial Sequence
  source: /note="Description of Artificial Sequence: Synthetic oligonucleotide"
ccgtctgggaagtctccttat

SEQ ID NO: 22217 - DNA, 21 bp, Artificial Sequence
  source: /note="Description of Artificial Sequence: Synthetic oligonucleotide"
cctagtgggatgaagcctact

SEQ ID NO: 22218 - DNA, 21 bp, Artificial Sequence
  source: /note="Description of Artificial Sequence: Synthetic oligonucleotide"
cctagtggtatgcctagttcg

SEQ ID NO: 22219 - DNA, 21 bp, Artificial Sequence
  source: /note="Description of Artificial Sequence: Synthetic oligonucleotide"
ccgtctgggcaggtgactggt

SEQ ID NO: 22220 - DNA, 21 bp, Artificial Sequence
  source: /note="Description of Artificial Sequence: Synthetic oligonucleotide"
ccgtcgggtagtgataatctg

SEQ ID NO: 22221 - DNA, 21 bp, Artificial Sequence
  source: /note="Description of Artificial Sequence: Synthetic oligonucleotide"
ccgagtgggactcttactatg

SEQ ID NO: 22222 - DNA, 21 bp, Artificial Sequence
  source: /note="Description of Artificial Sequence: Synthetic oligonucleotide"
ccttcgcatgattcttttctg

SEQ ID NO: 22223 - DNA, 21 bp, Artificial Sequence
  source: /note="Description of Artificial Sequence: Synthetic oligonucleotide"
ccgtctcatgggcttgataag

SEQ ID NO: 22224 - DNA, 21 bp, Artificial Sequence
  source: /note="Description of Artificial Sequence: Synthetic oligonucleotide"
ccttctcataaggcggttttt

SEQ ID NO: 22225 - DNA, 21 bp, Artificial Sequence
  source: /note="Description of Artificial Sequence: Synthetic oligonucleotide"
ccttctcatcctcatgagcgt

SEQ ID NO: 22226 - DNA, 21 bp, Artificial Sequence
  source: /note="Description of Artificial Sequence: Synthetic oligonucleotide"
ccttctcataggactagtctt

SEQ ID NO: 22227 - DNA, 21 bp, Artificial Sequence
  source: /note="Description of Artificial Sequence: Synthetic oligonucleotide"
ccgtctcatagtggtactact

SEQ ID NO: 22228 - DNA, 21 bp, Artificial Sequence
  source: /note="Description of Artificial Sequence: Synthetic oligonucleotide"
ccgtcgcatactaggccggtt

SEQ ID NO: 22229 - DNA, 21 bp, Artificial Sequence
  source: /note="Description of Artificial Sequence: Synthetic oligonucleotide"
ccgtcgattgctcagccgcct

SEQ ID NO: 22230 - DNA, 21 bp, Artificial Sequence
  source: /note="Description of Artificial Sequence: Synthetic oligonucleotide"
ccttcgattaagttgagtgag

SEQ ID NO: 22231 - DNA, 21 bp, Artificial Sequence
  source: /note="Description of Artificial Sequence: Synthetic oligonucleotide"
ccgagtattagtaagcctatg

SEQ ID NO: 22232 - DNA, 21 bp, Artificial Sequence
  source: /note="Description of Artificial Sequence: Synthetic oligonucleotide"
ccttctaaggcttcgacggag

SEQ ID NO: 22233 - DNA, 21 bp, Artificial Sequence
  source: /note="Description of Artificial Sequence: Synthetic oligonucleotide"
ccgagtaagtctcctagtact

SEQ ID NO: 22234 - DNA, 21 bp, Artificial Sequence
  source: /note="Description of Artificial Sequence: Synthetic oligonucleotide"
ccgagtaagtcgtctgctgct

SEQ ID NO: 22235 - DNA, 21 bp, Artificial Sequence
  source: /note="Description of Artificial Sequence: Synthetic oligonucleotide"
ccgtcgaaggtggggcgggag

SEQ ID NO: 22236 - DNA, 21 bp, Artificial Sequence
  source: /note="Description of Artificial Sequence: Synthetic oligonucleotide"
ccttctttggagggtgctcct

SEQ ID NO: 22237 - DNA, 21 bp, Artificial Sequence
  source: /note="Description of Artificial Sequence: Synthetic oligonucleotide"
ccgagtcttcgggctgctctt

SEQ ID NO: 22238 - DNA, 21 bp, Artificial Sequence
  source: /note="Description of Artificial Sequence: Synthetic oligonucleotide"
cctagtctgtcgaataaggtg

SEQ ID NO: 22239 - DNA, 21 bp, Artificial Sequence
  source: /note="Description of Artificial Sequence: Synthetic oligonucleotide"
ccttcgctttcgagtagtccg

SEQ ID NO: 22240 - DNA, 21 bp, Artificial Sequence
  source: /note="Description of Artificial Sequence: Synthetic oligonucleotide"
ccgtcgatgagtccgcatacg

SEQ ID NO: 22241 - DNA, 21 bp, Artificial Sequence
  source: /note="Description of Artificial Sequence: Synthetic oligonucleotide"
ccgtctatgacggcgcaggag

SEQ ID NO: 22242 - DNA, 21 bp, Artificial Sequence
  source: /note="Description of Artificial Sequence: Synthetic oligonucleotide"
ccgtctaatgcggggcggttt

SEQ ID NO: 22243 - DNA, 21 bp, Artificial Sequence
  source: /note="Description of Artificial Sequence: Synthetic oligonucleotide"
ccttctaatggtaagtctatt

SEQ ID NO: 22244 - DNA, 21 bp, Artificial Sequence
  source: /note="Description of Artificial Sequence: Synthetic oligonucleotide"
cctagtaatcatttgaagagt

SEQ ID NO: 22245 - DNA, 21 bp, Artificial Sequence
  source: /note="Description of Artificial Sequence: Synthetic oligonucleotide"
ccgtcgaataatactgagggt

SEQ ID NO: 22246 - DNA, 21 bp, Artificial Sequence
  source: /note="Description of Artificial Sequence: Synthetic oligonucleotide"
ccttcgaatccttcttttcgt

SEQ ID NO: 22247 - DNA, 21 bp, Artificial Sequence
  source: /note="Description of Artificial Sequence: Synthetic oligonucleotide"
ccgtctaatcagttggttcgt

SEQ ID NO: 22248 - DNA, 21 bp, Artificial Sequence
  source: /note="Description of Artificial Sequence: Synthetic oligonucleotide"
cctagtccggcggttaagagt

SEQ ID NO: 22249 - DNA, 21 bp, Artificial Sequence
  source: /note="Description of Artificial Sequence: Synthetic oligonucleotide"
ccgtctcctgatgttaggggg

SEQ ID NO: 22250 - DNA, 21 bp, Artificial Sequence
  source: /note="Description of Artificial Sequence: Synthetic oligonucleotide"
cctagtcctaagacttgtcct

SEQ ID NO: 22251 - DNA, 21 bp, Artificial Sequence
  source: /note="Description of Artificial Sequence: Synthetic oligonucleotide"
ccttctccgcttcgtcttggg

SEQ ID NO: 22252 - DNA, 21 bp, Artificial Sequence
  source: /note="Description of Artificial Sequence: Synthetic oligonucleotide"
ccgagtccggttaaggggggt

SEQ ID NO: 22253 - DNA, 21 bp, Artificial Sequence
  source: /note="Description of Artificial Sequence: Synthetic oligonucleotide"
ccttctcaggatcctcatctt

SEQ ID NO: 22254 - DNA, 21 bp, Artificial Sequence
  source: /note="Description of Artificial Sequence: Synthetic oligonucleotide"
ccttctcaggatcggcaggct

SEQ ID NO: 22255 - DNA, 21 bp, Artificial Sequence
  source: /note="Description of Artificial Sequence: Synthetic oligonucleotide"
cctagtcagtttaaggagaat

SEQ ID NO: 22256 - DNA, 21 bp, Artificial Sequence
  source: /note="Description of Artificial Sequence: Synthetic oligonucleotide"
ccttctcagggtcattcgatg

SEQ ID NO: 22257 - DNA, 21 bp, Artificial Sequence
  source: /note="Description of Artificial Sequence: Synthetic oligonucleotide"
ccgagtcagggtccgtggact

SEQ ID NO: 22258 - DNA, 21 bp, Artificial Sequence
  source: /note="Description of Artificial Sequence: Synthetic oligonucleotide"
ccgtctcagcttgcgtcgaat

SEQ ID NO: 22259 - DNA, 21 bp, Artificial Sequence
  source: /note="Description of Artificial Sequence: Synthetic oligonucleotide"
ccgtcgcagcttgttgttgct

SEQ ID NO: 22260 - DNA, 21 bp, Artificial Sequence
  source: /note="Description of Artificial Sequence: Synthetic oligonucleotide"
ccttctcagccgggggcgatt

SEQ ID NO: 22261 - DNA, 21 bp, Artificial Sequence
  source: /note="Description of Artificial Sequence: Synthetic oligonucleotide"
cctagtcagagggagatgaag

SEQ ID NO: 22262 - DNA, 21 bp, Artificial Sequence
  source: /note="Description of Artificial Sequence: Synthetic oligonucleotide"
ccgtctcagtcgaatcttcgt

SEQ ID NO: 22263 - DNA, 21 bp, Artificial Sequence
  source: /note="Description of Artificial Sequence: Synthetic oligonucleotide"
ccgtctcagtcgtctaagctt

SEQ ID NO: 22264 - DNA, 21 bp, Artificial Sequence
  source: /note="Description of Artificial Sequence: Synthetic oligonucleotide"
ccgtcgcagacggcgacgcct

SEQ ID NO: 22265 - DNA, 21 bp, Artificial Sequence
  source: /note="Description of Artificial Sequence: Synthetic oligonucleotide"
ccttcgcagactcattctcct

SEQ ID NO: 22266 - DNA, 21 bp, Artificial Sequence
  source: /note="Description of Artificial Sequence: Synthetic oligonucleotide"
ccgtcgagggagatttcgctg

SEQ ID NO: 22267 - DNA, 21 bp, Artificial Sequence
  source: /note="Description of Artificial Sequence: Synthetic oligonucleotide"
ccttcgcgtgagcgttcgaat

SEQ ID NO: 22268 - DNA, 21 bp, Artificial Sequence
  source: /note="Description of Artificial Sequence: Synthetic oligonucleotide"
cctagtcgttttagtacgcct

SEQ ID NO: 22269 - DNA, 21 bp, Artificial Sequence
  source: /note="Description of Artificial Sequence: Synthetic oligonucleotide"
ccttcgaggggggatattggt

SEQ ID NO: 22270 - DNA, 21 bp, Artificial Sequence
  source: /note="Description of Artificial Sequence: Synthetic oligonucleotide"
ccttcgcgtggggtgcttcct

SEQ ID NO: 22271 - DNA, 21 bp, Artificial Sequence
  source: /note="Description of Artificial Sequence: Synthetic oligonucleotide"
ccttctcgtttggggagtgct

SEQ ID NO: 22272 - DNA, 21 bp, Artificial Sequence
  source: /note="Description of Artificial Sequence: Synthetic oligonucleotide"
ccttcgcggttgactaatgat

SEQ ID NO: 22273 - DNA, 21 bp, Artificial Sequence
  source: /note="Description of Artificial Sequence: Synthetic oligonucleotide"
ccttctaggctggtgtcggag

SEQ ID NO: 22274 - DNA, 21 bp, Artificial Sequence
  source: /note="Description of Artificial Sequence: Synthetic oligonucleotide"
cctagtcgtccgatgatgagt

SEQ ID NO: 22275 - DNA, 21 bp, Artificial Sequence
  source: /note="Description of Artificial Sequence: Synthetic oligonucleotide"
ccttcgaggagtatgtcggag

SEQ ID NO: 22276 - DNA, 21 bp, Artificial Sequence
  source: /note="Description of Artificial Sequence: Synthetic oligonucleotide"
ccttctaggactgagcctccg

SEQ ID NO: 22277 - DNA, 21 bp, Artificial Sequence
  source: /note="Description of Artificial Sequence: Synthetic oligonucleotide"
cctagtcggactcatctgcat

SEQ ID NO: 22278 - DNA, 21 bp, Artificial Sequence
  source: /note="Description of Artificial Sequence: Synthetic oligonucleotide"
ccttctcgggtggttgaggct

SEQ ID NO: 22279 - DNA, 21 bp, Artificial Sequence
  source: /note="Description of Artificial Sequence: Synthetic oligonucleotide"
ccttcgagtgagtctgatttt

SEQ ID NO: 22280 - DNA, 21 bp, Artificial Sequence
  source: /note="Description of Artificial Sequence: Synthetic oligonucleotide"
ccttcttcgggtgggctggtt

SEQ ID NO: 22281 - DNA, 21 bp, Artificial Sequence
  source: /note="Description of Artificial Sequence: Synthetic oligonucleotide"
cctagttcgggtcttcatttg

SEQ ID NO: 22282 - DNA, 21 bp, Artificial Sequence
  source: /note="Description of Artificial Sequence: Synthetic oligonucleotide"
ccgtcttcgaagggtttgctt

SEQ ID NO: 22283 - DNA, 21 bp, Artificial Sequence
  source: /note="Description of Artificial Sequence: Synthetic oligonucleotide"
ccgagttctaaggttggtgat

SEQ ID NO: 22284 - DNA, 21 bp, Artificial Sequence
  source: /note="Description of Artificial Sequence: Synthetic oligonucleotide"
ccttctagtttggatgatggt

SEQ ID NO: 22285 - DNA, 21 bp, Artificial Sequence
  source: /note="Description of Artificial Sequence: Synthetic oligonucleotide"
ccttctagtcttaatcggctt

SEQ ID NO: 22286 - DNA, 21 bp, Artificial Sequence
  source: /note="Description of Artificial Sequence: Synthetic oligonucleotide"
ccgagtagtttgtctgcgggg

SEQ ID NO: 22287 - DNA, 21 bp, Artificial Sequence
  source: /note="Description of Artificial Sequence: Synthetic oligonucleotide"
ccttcttcgatggctcatcct

SEQ ID NO: 22288 - DNA, 21 bp, Artificial Sequence
  source: /note="Description of Artificial Sequence: Synthetic oligonucleotide"
ccttcttcgatgattgctgag

SEQ ID NO: 22289 - DNA, 21 bp, Artificial Sequence
  source: /note="Description of Artificial Sequence: Synthetic oligonucleotide"
ccttcgtcgccggctgttcgg

SEQ ID NO: 22290 - DNA, 21 bp, Artificial Sequence
  source: /note="Description of Artificial Sequence: Synthetic oligonucleotide"
ccttcgtctcctttgatgact

SEQ ID NO: 22291 - DNA, 21 bp, Artificial Sequence
  source: /note="Description of Artificial Sequence: Synthetic oligonucleotide"
ccgtcgagtcctccttttttt

SEQ ID NO: 22292 - DNA, 21 bp, Artificial Sequence
  source: /note="Description of Artificial Sequence: Synthetic oligonucleotide"
cctagttctcctgtgtttatt

SEQ ID NO: 22293 - DNA, 21 bp, Artificial Sequence
  source: /note="Description of Artificial Sequence: Synthetic oligonucleotide"
ccttcgtcgcggggggctctt

SEQ ID NO: 22294 - DNA, 21 bp, Artificial Sequence
  source: /note="Description of Artificial Sequence: Synthetic oligonucleotide"
cctagtagtagtattaatcgt

SEQ ID NO: 22295 - DNA, 21 bp, Artificial Sequence
  source: /note="Description of Artificial Sequence: Synthetic oligonucleotide"
ccgtcttcgagtagtgggaat

SEQ ID NO: 22296 - DNA, 21 bp, Artificial Sequence
  source: /note="Description of Artificial Sequence: Synthetic oligonucleotide"
ccgtcttcgtcgtatccgctg

SEQ ID NO: 22297 - DNA, 21 bp, Artificial Sequence
  source: /note="Description of Artificial Sequence: Synthetic oligonucleotide"
ccttcgtctactcctgggcag

SEQ ID NO: 22298 - DNA, 21 bp, Artificial Sequence
  source: /note="Description of Artificial Sequence: Synthetic oligonucleotide"
ccttctactgctgggtcgaag

SEQ ID NO: 22299 - DNA, 21 bp, Artificial Sequence
  source: /note="Description of Artificial Sequence: Synthetic oligonucleotide"
cctagtacggctcatagtact

SEQ ID NO: 22300 - DNA, 21 bp, Artificial Sequence
  source: /note="Description of Artificial Sequence: Synthetic oligonucleotide"
ccttctacggctattaagact

SEQ ID NO: 22301 - DNA, 21 bp, Artificial Sequence
  source: /note="Description of Artificial Sequence: Synthetic oligonucleotide"
cctagtactgcgcggacgtct

SEQ ID NO: 22302 - DNA, 21 bp, Artificial Sequence
  source: /note="Description of Artificial Sequence: Synthetic oligonucleotide"
ccgtctacggggccttttcat

SEQ ID NO: 22303 - DNA, 21 bp, Artificial Sequence
  source: /note="Description of Artificial Sequence: Synthetic oligonucleotide"
ccgtcgacgggtcgtccgttg

SEQ ID NO: 22304 - DNA, 21 bp, Artificial Sequence
  source: /note="Description of Artificial Sequence: Synthetic oligonucleotide"
ccgtctactaaggagtttatt

SEQ ID NO: 22305 - DNA, 21 bp, Artificial Sequence
  source: /note="Description of Artificial Sequence: Synthetic oligonucleotide"
ccgtcgactaatgcttatgct

SEQ ID NO: 22306 - DNA, 21 bp, Artificial Sequence
  source: /note="Description of Artificial Sequence: Synthetic oligonucleotide"
ccgtctacgaatgggtcgcat

SEQ ID NO: 22307 - DNA, 21 bp, Artificial Sequence
  source: /note="Description of Artificial Sequence: Synthetic oligonucleotide"
ccttctactccggcggcgaat

SEQ ID NO: 22308 - DNA, 21 bp, Artificial Sequence
  source: /note="Description of Artificial Sequence: Synthetic oligonucleotide"
ccgtctactcctgctgcgagt

SEQ ID NO: 22309 - DNA, 21 bp, Artificial Sequence
  source: /note="Description of Artificial Sequence: Synthetic oligonucleotide"
ccttctactagtctttcggag

SEQ ID NO: 22310 - DNA, 21 bp, Artificial Sequence
  source: /note="Description of Artificial Sequence: Synthetic oligonucleotide"
ccttctgtggattcttggagt

SEQ ID NO: 22311 - DNA, 21 bp, Artificial Sequence
  source: /note="Description of Artificial Sequence: Synthetic oligonucleotide"
ccttctgtggatagttatctt

SEQ ID NO: 22312 - DNA, 21 bp, Artificial Sequence
  source: /note="Description of Artificial Sequence: Synthetic oligonucleotide"
ccgagtgttgagcatgtgccg

SEQ ID NO: 22313 - DNA, 21 bp, Artificial Sequence
  source: /note="Description of Artificial Sequence: Synthetic oligonucleotide"
ccttctgtggagtcttggagt

SEQ ID NO: 22314 - DNA, 21 bp, Artificial Sequence
  source: /note="Description of Artificial Sequence: Synthetic oligonucleotide"
ccgagtgtgttgcatccgtcg

SEQ ID NO: 22315 - DNA, 21 bp, Artificial Sequence
  source: /note="Description of Artificial Sequence: Synthetic oligonucleotide"
ccttcggtgccgttgatgact

SEQ ID NO: 22316 - DNA, 21 bp, Artificial Sequence
  source: /note="Description of Artificial Sequence: Synthetic oligonucleotide"
ccttctgttccgcgtgggccg

SEQ ID NO: 22317 - DNA, 21 bp, Artificial Sequence
  source: /note="Description of Artificial Sequence: Synthetic oligonucleotide"
ccgtcggtgcagcattttcct

SEQ ID NO: 22318 - DNA, 21 bp, Artificial Sequence
  source: /note="Description of Artificial Sequence: Synthetic oligonucleotide"
ccgagtgtgcgggatcctgct

SEQ ID NO: 22319 - DNA, 21 bp, Artificial Sequence
  source: /note="Description of Artificial Sequence: Synthetic oligonucleotide"
ccgtcggtgacggggactatg

SEQ ID NO: 22320 - DNA, 21 bp, Artificial Sequence
  source: /note="Description of Artificial Sequence: Synthetic oligonucleotide"
ccttcttatgataagctgaag

SEQ ID NO: 22321 - DNA, 21 bp, Artificial Sequence
  source: /note="Description of Artificial Sequence: Synthetic oligonucleotide"
ccttcgtatcctggtttggat

SEQ ID NO: 22322 - DNA, 21 bp, Artificial Sequence
  source: /note="Description of Artificial Sequence: Synthetic oligonucleotide"
ccgtcgtattctcatatggag

SEQ ID NO: 22323 - DNA, 21 bp, Artificial Sequence
  source: /note="Description of Artificial Sequence: Synthetic oligonucleotide"
ccgtcttattctgttactgag

SEQ ID NO: 22324 - DNA, 21 bp, Artificial Sequence
  source: /note="Description of Artificial Sequence: Synthetic oligonucleotide"
cctactgctgctaggcctccg

SEQ ID NO: 22325 - DNA, 21 bp, Artificial Sequence
  source: /note="Description of Artificial Sequence: Synthetic oligonucleotide"
ccgacggctcttgcgagtttt

SEQ ID NO: 22326 - DNA, 21 bp, Artificial Sequence
  source: /note="Description of Artificial Sequence: Synthetic oligonucleotide"
cctacggcgcttgggaagtcg

SEQ ID NO: 22327 - DNA, 21 bp, Artificial Sequence
  source: /note="Description of Artificial Sequence: Synthetic oligonucleotide"
cctactgctcctacgattcct

SEQ ID NO: 22328 - DNA, 21 bp, Artificial Sequence
  source: /note="Description of Artificial Sequence: Synthetic oligonucleotide"
ccgacggcgagtcctaatacg

SEQ ID NO: 22329 - DNA, 21 bp, Artificial Sequence
  source: /note="Description of Artificial Sequence: Synthetic oligonucleotide"
ccgactgataatactagtccg

SEQ ID NO: 22330 - DNA, 21 bp, Artificial Sequence
  source: /note="Description of Artificial Sequence: Synthetic oligonucleotide"
cctactgatccgcgtgcgcct

SEQ ID NO: 22331 - DNA, 21 bp, Artificial Sequence
  source: /note="Description of Artificial Sequence: Synthetic oligonucleotide"
cctactgatcgtcattctatt

SEQ ID NO: 22332 - DNA, 21 bp, Artificial Sequence
  source: /note="Description of Artificial Sequence: Synthetic oligonucleotide"
cctactgataggcgtgagatg

SEQ ID NO: 22333 - DNA, 21 bp, Artificial Sequence
  source: /note="Description of Artificial Sequence: Synthetic oligonucleotide"
cctacggatacggttccgcct

SEQ ID NO: 22334 - DNA, 21 bp, Artificial Sequence
  source: /note="Description of Artificial Sequence: Synthetic oligonucleotide"
cctactgatgtgaatcgtggt

SEQ ID NO: 22335 - DNA, 21 bp, Artificial Sequence
  source: /note="Description of Artificial Sequence: Synthetic oligonucleotide"
cctactgattatgctaggggt

SEQ ID NO: 22336 - DNA, 21 bp, Artificial Sequence
  source: /note="Description of Artificial Sequence: Synthetic oligonucleotide"
cctactgaggctgctggggtt

SEQ ID NO: 22337 - DNA, 21 bp, Artificial Sequence
  source: /note="Description of Artificial Sequence: Synthetic oligonucleotide"
cctactgagacgaatggttat

SEQ ID NO: 22338 - DNA, 21 bp, Artificial Sequence
  source: /note="Description of Artificial Sequence: Synthetic oligonucleotide"
ccgacgtttttgacgacgaat

SEQ ID NO: 22339 - DNA, 21 bp, Artificial Sequence
  source: /note="Description of Artificial Sequence: Synthetic oligonucleotide"
ccgacgtttactaggtcgact

SEQ ID NO: 22340 - DNA, 21 bp, Artificial Sequence
  source: /note="Description of Artificial Sequence: Synthetic oligonucleotide"
ccgactggggcgacttcttcg

SEQ ID NO: 22341 - DNA, 21 bp, Artificial Sequence
  source: /note="Description of Artificial Sequence: Synthetic oligonucleotide"
ccgacggggggtgctcatact

SEQ ID NO: 22342 - DNA, 21 bp, Artificial Sequence
  source: /note="Description of Artificial Sequence: Synthetic oligonucleotide"
cctactggtcctgggtcgccg

SEQ ID NO: 22343 - DNA, 21 bp, Artificial Sequence
  source: /note="Description of Artificial Sequence: Synthetic oligonucleotide"
ccgactgggccgcatgatttg

SEQ ID NO: 22344 - DNA, 21 bp, Artificial Sequence
  source: /note="Description of Artificial Sequence: Synthetic oligonucleotide"
cctacggggcagccgcggcct

SEQ ID NO: 22345 - DNA, 21 bp, Artificial Sequence
  source: /note="Description of Artificial Sequence: Synthetic oligonucleotide"
ccgacggggagggctttggct

SEQ ID NO: 22346 - DNA, 21 bp, Artificial Sequence
  source: /note="Description of Artificial Sequence: Synthetic oligonucleotide"
cctacgggttctattcagatt

SEQ ID NO: 22347 - DNA, 21 bp, Artificial Sequence
  source: /note="Description of Artificial Sequence: Synthetic oligonucleotide"
ccgactgggactcctgagatt

SEQ ID NO: 22348 - DNA, 21 bp, Artificial Sequence
  source: /note="Description of Artificial Sequence: Synthetic oligonucleotide"
cctactgggacgtcgcctttg

SEQ ID NO: 22349 - DNA, 21 bp, Artificial Sequence
  source: /note="Description of Artificial Sequence: Synthetic oligonucleotide"
cctacgggtgtggggtctctg

SEQ ID NO: 22350 - DNA, 21 bp, Artificial Sequence
  source: /note="Description of Artificial Sequence: Synthetic oligonucleotide"
cctactcatcctaattctttt

SEQ ID NO: 22351 - DNA, 21 bp, Artificial Sequence
  source: /note="Description of Artificial Sequence: Synthetic oligonucleotide"
cctacgcattcggggattacg

SEQ ID NO: 22352 - DNA, 21 bp, Artificial Sequence
  source: /note="Description of Artificial Sequence: Synthetic oligonucleotide"
cctactcattcgctgatttct

SEQ ID NO: 22353 - DNA, 21 bp, Artificial Sequence
  source: /note="Description of Artificial Sequence: Synthetic oligonucleotide"
cctactcatagtacgaataag

SEQ ID NO: 22354 - DNA, 21 bp, Artificial Sequence
  source: /note="Description of Artificial Sequence: Synthetic oligonucleotide"
cctacgattcctaagaaggat

SEQ ID NO: 22355 - DNA, 21 bp, Artificial Sequence
  source: /note="Description of Artificial Sequence: Synthetic oligonucleotide"
ccgacgattcctttggatagg

SEQ ID NO: 22356 - DNA, 21 bp, Artificial Sequence
  source: /note="Description of Artificial Sequence: Synthetic oligonucleotide"
cctactaagcctttgggtgat

SEQ ID NO: 22357 - DNA, 21 bp, Artificial Sequence
  source: /note="Description of Artificial Sequence: Synthetic oligonucleotide"
ccgacgctggatgatccgaag

SEQ ID NO: 22358 - DNA, 21 bp, Artificial Sequence
  source: /note="Description of Artificial Sequence: Synthetic oligonucleotide"
ccgactcttgatgggaagccg

SEQ ID NO: 22359 - DNA, 21 bp, Artificial Sequence
  source: /note="Description of Artificial Sequence: Synthetic oligonucleotide"
cctacgttgaagagtgatatg

SEQ ID NO: 22360 - DNA, 21 bp, Artificial Sequence
  source: /note="Description of Artificial Sequence: Synthetic oligonucleotide"
cctactcttccgagtactgtt

SEQ ID NO: 22361 - DNA, 21 bp, Artificial Sequence
  source: /note="Description of Artificial Sequence: Synthetic oligonucleotide"
cctactttgagtatggctcat

SEQ ID NO: 22362 - DNA, 21 bp, Artificial Sequence
  source: /note="Description of Artificial Sequence: Synthetic oligonucleotide"
ccgacgttgtctcggacgcat

SEQ ID NO: 22363 - DNA, 21 bp, Artificial Sequence
  source: /note="Description of Artificial Sequence: Synthetic oligonucleotide"
cctactctttcgactttgttg

SEQ ID NO: 22364 - DNA, 21 bp, Artificial Sequence
  source: /note="Description of Artificial Sequence: Synthetic oligonucleotide"
ccgactatgcatatgctgtct

SEQ ID NO: 22365 - DNA, 21 bp, Artificial Sequence
  source: /note="Description of Artificial Sequence: Synthetic oligonucleotide"
cctactatgaatcggaatgag

SEQ ID NO: 22366 - DNA, 21 bp, Artificial Sequence
  source: /note="Description of Artificial Sequence: Synthetic oligonucleotide"
cctacgatgtctgatagtagg

SEQ ID NO: 22367 - DNA, 21 bp, Artificial Sequence
  source: /note="Description of Artificial Sequence: Synthetic oligonucleotide"
ccgacgaatgctcttcatttg

SEQ ID NO: 22368 - DNA, 21 bp, Artificial Sequence
  source: /note="Description of Artificial Sequence: Synthetic oligonucleotide"
cctactaatgctgtggataat

SEQ ID NO: 22369 - DNA, 21 bp, Artificial Sequence
  source: /note="Description of Artificial Sequence: Synthetic oligonucleotide"
cctactaatcttggtcgtgcg

SEQ ID NO: 22370 - DNA, 21 bp, Artificial Sequence
  source: /note="Description of Artificial Sequence: Synthetic oligonucleotide"
cctactaatcctcgtttgatg

SEQ ID NO: 22371 - DNA, 21 bp, Artificial Sequence
  source: /note="Description of Artificial Sequence: Synthetic oligonucleotide"
cctactaataggccgtcgtcg

SEQ ID NO: 22372 - DNA, 21 bp, Artificial Sequence
  source: /note="Description of Artificial Sequence: Synthetic oligonucleotide"
cctactccggcggcgcatggt

SEQ ID NO: 22373 - DNA, 21 bp, Artificial Sequence
  source: /note="Description of Artificial Sequence: Synthetic oligonucleotide"
ccgacgcctcctacggtgacg

SEQ ID NO: 22374 - DNA, 21 bp, Artificial Sequence
  source: /note="Description of Artificial Sequence: Synthetic oligonucleotide"
ccgacgccgcaggggtctgcg

SEQ ID NO: 22375 - DNA, 21 bp, Artificial Sequence
  source: /note="Description of Artificial Sequence: Synthetic oligonucleotide"
cctacgcctaggccgtcgccg

SEQ ID NO: 22376 - DNA, 21 bp, Artificial Sequence
  source: /note="Description of Artificial Sequence: Synthetic oligonucleotide"
cctacgccgaggtctgttcct

SEQ ID NO: 22377 - DNA, 21 bp, Artificial Sequence
  source: /note="Description of Artificial Sequence: Synthetic oligonucleotide"
ccgactcagtctggtgtgagt

SEQ ID NO: 22378 - DNA, 21 bp, Artificial Sequence
  source: /note="Description of Artificial Sequence: Synthetic oligonucleotide"
cctactcgggctgagttttat

SEQ ID NO: 22379 - DNA, 21 bp, Artificial Sequence
  source: /note="Description of Artificial Sequence: Synthetic oligonucleotide"
cctacgcgtcagccggttctg

SEQ ID NO: 22380 - DNA, 21 bp, Artificial Sequence
  source: /note="Description of Artificial Sequence: Synthetic oligonucleotide"
cctactcgtacgattaatgct

SEQ ID NO: 22381 - DNA, 21 bp, Artificial Sequence
  source: /note="Description of Artificial Sequence: Synthetic oligonucleotide"
cctacgcggactccggcgagt

SEQ ID NO: 22382 - DNA, 21 bp, Artificial Sequence
  source: /note="Description of Artificial Sequence: Synthetic oligonucleotide"
ccgacgagtgattttaagtgt

SEQ ID NO: 22383 - DNA, 21 bp, Artificial Sequence
  source: /note="Description of Artificial Sequence: Synthetic oligonucleotide"
cctacttctgaggcgcttagg

SEQ ID NO: 22384 - DNA, 21 bp, Artificial Sequence
  source: /note="Description of Artificial Sequence: Synthetic oligonucleotide"
ccgacttcgattcataggaat

SEQ ID NO: 22385 - DNA, 21 bp, Artificial Sequence
  source: /note="Description of Artificial Sequence: Synthetic oligonucleotide"
cctacttcgattgtgcgttct

SEQ ID NO: 22386 - DNA, 21 bp, Artificial Sequence
  source: /note="Description of Artificial Sequence: Synthetic oligonucleotide"
ccgacgtcgaagggtccgttg

SEQ ID NO: 22387 - DNA, 21 bp, Artificial Sequence
  source: /note="Description of Artificial Sequence: Synthetic oligonucleotide"
cctacgtctcctacggatatg

SEQ ID NO: 22388 - DNA, 21 bp, Artificial Sequence
  source: /note="Description of Artificial Sequence: Synthetic oligonucleotide"
ccgacgtcgcctactacttgt

SEQ ID NO: 22389 - DNA, 21 bp, Artificial Sequence
  source: /note="Description of Artificial Sequence: Synthetic oligonucleotide"
cctacgagtcgtccttcgctg

SEQ ID NO: 22390 - DNA, 21 bp, Artificial Sequence
  source: /note="Description of Artificial Sequence: Synthetic oligonucleotide"
cctacttcgtctattgggggt

SEQ ID NO: 22391 - DNA, 21 bp, Artificial Sequence
  source: /note="Description of Artificial Sequence: Synthetic oligonucleotide"
cctactagtacgaatcctctg

SEQ ID NO: 22392 - DNA, 21 bp, Artificial Sequence
  source: /note="Description of Artificial Sequence: Synthetic oligonucleotide"
ccgacttcggtgggtactggg

SEQ ID NO: 22393 - DNA, 21 bp, Artificial Sequence
  source: /note="Description of Artificial Sequence: Synthetic oligonucleotide"
cctacgtctgtgccgaagacg

SEQ ID NO: 22394 - DNA, 21 bp, Artificial Sequence
  source: /note="Description of Artificial Sequence: Synthetic oligonucleotide"
ccgacgacgcatctttctgat

SEQ ID NO: 22395 - DNA, 21 bp, Artificial Sequence
  source: /note="Description of Artificial Sequence: Synthetic oligonucleotide"
ccgactacgcattctgctcgt

SEQ ID NO: 22396 - DNA, 21 bp, Artificial Sequence
  source: /note="Description of Artificial Sequence: Synthetic oligonucleotide"
cctactactctggctgtggct

SEQ ID NO: 22397 - DNA, 21 bp, Artificial Sequence
  source: /note="Description of Artificial Sequence: Synthetic oligonucleotide"
ccgacgacgaatggttctacg

SEQ ID NO: 22398 - DNA, 21 bp, Artificial Sequence
  source: /note="Description of Artificial Sequence: Synthetic oligonucleotide"
cctactactcctgttgcgatt

SEQ ID NO: 22399 - DNA, 21 bp, Artificial Sequence
  source: /note="Description of Artificial Sequence: Synthetic oligonucleotide"
ccgacgactaggggtccgccg

SEQ ID NO: 22400 - DNA, 21 bp, Artificial Sequence
  source: /note="Description of Artificial Sequence: Synthetic oligonucleotide"
cctactgtgaagttgttgggt

SEQ ID NO: 22401 - DNA, 21 bp, Artificial Sequence
  source: /note="Description of Artificial Sequence: Synthetic oligonucleotide"
cctactgtgccggatctgaat

SEQ ID NO: 22402 - DNA, 21 bp, Artificial Sequence
  source: /note="Description of Artificial Sequence: Synthetic oligonucleotide"
ccgactgtgcctcgtccgggg

SEQ ID NO: 22403 - DNA, 21 bp, Artificial Sequence
  source: /note="Description of Artificial Sequence: Synthetic oligonucleotide"
cctactgttccggttggtttg

SEQ ID NO: 22404 - DNA, 21 bp, Artificial Sequence
  source: /note="Description of Artificial Sequence: Synthetic oligonucleotide"
cctactgtgcgggggcagtat

SEQ ID NO: 22405 - DNA, 21 bp, Artificial Sequence
  source: /note="Description of Artificial Sequence: Synthetic oligonucleotide"
cctacttatcctaaggctact

SEQ ID NO: 22406 - DNA, 21 bp, Artificial Sequence
  source: /note="Description of Artificial Sequence: Synthetic oligonucleotide"
cctacgtatagggatactgct

SEQ ID NO: 22407 - DNA, 21 bp, Artificial Sequence
  source: /note="Description of Artificial Sequence: Synthetic oligonucleotide"
cctgttgctaggtcgatgagt

SEQ ID NO: 22408 - DNA, 21 bp, Artificial Sequence
  source: /note="Description of Artificial Sequence: Synthetic oligonucleotide"
ccggttgctacttgtcgtgtt

SEQ ID NO: 22409 - DNA, 21 bp, Artificial Sequence
  source: /note="Description of Artificial Sequence: Synthetic oligonucleotide"
cctgttgctacttcttatgat

SEQ ID NO: 22410 - DNA, 21 bp, Artificial Sequence
  source: /note="Description of Artificial Sequence: Synthetic oligonucleotide"
ccggttgatgctcttccgcgt

SEQ ID NO: 22411 - DNA, 21 bp, Artificial Sequence
  source: /note="Description of Artificial Sequence: Synthetic oligonucleotide"
cctgtggatcatgctaggagt

SEQ ID NO: 22412 - DNA, 21 bp, Artificial Sequence
  source: /note="Description of Artificial Sequence: Synthetic oligonucleotide"
cctgttgatcttgggcgtggt

SEQ ID NO: 22413 - DNA, 21 bp, Artificial Sequence
  source: /note="Description of Artificial Sequence: Synthetic oligonucleotide"
ccggttgaggctacggtgctg

SEQ ID NO: 22414 - DNA, 21 bp, Artificial Sequence
  source: /note="Description of Artificial Sequence: Synthetic oligonucleotide"
ccggttgagaagtatgataag

SEQ ID NO: 22415 - DNA, 21 bp, Artificial Sequence
  source: /note="Description of Artificial Sequence: Synthetic oligonucleotide"
cctgttgagccgggtatgtcg

SEQ ID NO: 22416 - DNA, 21 bp, Artificial Sequence
  source: /note="Description of Artificial Sequence: Synthetic oligonucleotide"
cctgtggagtctcatcgtttg

SEQ ID NO: 22417 - DNA, 21 bp, Artificial Sequence
  source: /note="Description of Artificial Sequence: Synthetic oligonucleotide"
ccggtttttcatgaggcttcg

SEQ ID NO: 22418 - DNA, 21 bp, Artificial Sequence
  source: /note="Description of Artificial Sequence: Synthetic oligonucleotide"
ccggtgtttcctcagagttct

SEQ ID NO: 22419 - DNA, 21 bp, Artificial Sequence
  source: /note="Description of Artificial Sequence: Synthetic oligonucleotide"
cctgtgggttttactgagaat

SEQ ID NO: 22420 - DNA, 21 bp, Artificial Sequence
  source: /note="Description of Artificial Sequence: Synthetic oligonucleotide"
cctgtggggtcgaattctgcg

SEQ ID NO: 22421 - DNA, 21 bp, Artificial Sequence
  source: /note="Description of Artificial Sequence: Synthetic oligonucleotide"
cctgttcatattcatacttcg

SEQ ID NO: 22422 - DNA, 21 bp, Artificial Sequence
  source: /note="Description of Artificial Sequence: Synthetic oligonucleotide"
ccggttcatagtgggcgtcct

SEQ ID NO: 22423 - DNA, 21 bp, Artificial Sequence
  source: /note="Description of Artificial Sequence: Synthetic oligonucleotide"
ccggttatttcgacgattgcg

SEQ ID NO: 22424 - DNA, 21 bp, Artificial Sequence
  source: /note="Description of Artificial Sequence: Synthetic oligonucleotide"
ccggttaaggaggtgggtgat

SEQ ID NO: 22425 - DNA, 21 bp, Artificial Sequence
  source: /note="Description of Artificial Sequence: Synthetic oligonucleotide"
cctgttaagtctgcggcgccg

SEQ ID NO: 22426 - DNA, 21 bp, Artificial Sequence
  source: /note="Description of Artificial Sequence: Synthetic oligonucleotide"
cctgtgctgccgtctgatcat

SEQ ID NO: 22427 - DNA, 21 bp, Artificial Sequence
  source: /note="Description of Artificial Sequence: Synthetic oligonucleotide"
cctgttatgggtacgagtgtt

SEQ ID NO: 22428 - DNA, 21 bp, Artificial Sequence
  source: /note="Description of Artificial Sequence: Synthetic oligonucleotide"
cctgtgatgagtggggcgtcg

SEQ ID NO: 22429 - DNA, 21 bp, Artificial Sequence
  source: /note="Description of Artificial Sequence: Synthetic oligonucleotide"
cctgtgaatagtgagcgtatg

SEQ ID NO: 22430 - DNA, 21 bp, Artificial Sequence
  source: /note="Description of Artificial Sequence: Synthetic oligonucleotide"
ccggtgccgggtaagctggct

SEQ ID NO: 22431 - DNA, 21 bp, Artificial Sequence
  source: /note="Description of Artificial Sequence: Synthetic oligonucleotide"
ccggttccgcctcctttgcgt

SEQ ID NO: 22432 - DNA, 21 bp, Artificial Sequence
  source: /note="Description of Artificial Sequence: Synthetic oligonucleotide"
ccggtgcctaggtctgttaat

SEQ ID NO: 22433 - DNA, 21 bp, Artificial Sequence
  source: /note="Description of Artificial Sequence: Synthetic oligonucleotide"
cctgtgcagatgactgcttct

SEQ ID NO: 22434 - DNA, 21 bp, Artificial Sequence
  source: /note="Description of Artificial Sequence: Synthetic oligonucleotide"
cctgttcaggtgtcgttgggt

SEQ ID NO: 22435 - DNA, 21 bp, Artificial Sequence
  source: /note="Description of Artificial Sequence: Synthetic oligonucleotide"
ccggttcgtgcgattgagcat

SEQ ID NO: 22436 - DNA, 21 bp, Artificial Sequence
  source: /note="Description of Artificial Sequence: Synthetic oligonucleotide"
ccggtgagggcgatggatggt

SEQ ID NO: 22437 - DNA, 21 bp, Artificial Sequence
  source: /note="Description of Artificial Sequence: Synthetic oligonucleotide"
ccggttagtgggaattttacg

SEQ ID NO: 22438 - DNA, 21 bp, Artificial Sequence
  source: /note="Description of Artificial Sequence: Synthetic oligonucleotide"
cctgtttctaaggatcggcct

SEQ ID NO: 22439 - DNA, 21 bp, Artificial Sequence
  source: /note="Description of Artificial Sequence: Synthetic oligonucleotide"
ccggtgtctatggcggctagg

SEQ ID NO: 22440 - DNA, 21 bp, Artificial Sequence
  source: /note="Description of Artificial Sequence: Synthetic oligonucleotide"
cctgtgtctatgccgcgggag

SEQ ID NO: 22441 - DNA, 21 bp, Artificial Sequence
  source: /note="Description of Artificial Sequence: Synthetic oligonucleotide"
cctgtgtcgccggctattcct

SEQ ID NO: 22442 - DNA, 21 bp, Artificial Sequence
  source: /note="Description of Artificial Sequence: Synthetic oligonucleotide"
ccggtgtcgccggttcctgct

SEQ ID NO: 22443 - DNA, 21 bp, Artificial Sequence
  source: /note="Description of Artificial Sequence: Synthetic oligonucleotide"
ccggtgtctcagcatagtaag

SEQ ID NO: 22444 - DNA, 21 bp, Artificial Sequence
  source: /note="Description of Artificial Sequence: Synthetic oligonucleotide"
ccggtgtcttctccgactatg

SEQ ID NO: 22445 - DNA, 21 bp, Artificial Sequence
  source: /note="Description of Artificial Sequence: Synthetic oligonucleotide"
cctgtgtcgactagtgcggat

SEQ ID NO: 22446 - DNA, 21 bp, Artificial Sequence
  source: /note="Description of Artificial Sequence: Synthetic oligonucleotide"
cctgttactgcgggggagcgg

SEQ ID NO: 22447 - DNA, 21 bp, Artificial Sequence
  source: /note="Description of Artificial Sequence: Synthetic oligonucleotide"
cctgtgacggggccggggcag

SEQ ID NO: 22448 - DNA, 21 bp, Artificial Sequence
  source: /note="Description of Artificial Sequence: Synthetic oligonucleotide"
cctgtgactaagagtcttctg

SEQ ID NO: 22449 - DNA, 21 bp, Artificial Sequence
  source: /note="Description of Artificial Sequence: Synthetic oligonucleotide"
ccggtgactaagagtgttctt

SEQ ID NO: 22450 - DNA, 21 bp, Artificial Sequence
  source: /note="Description of Artificial Sequence: Synthetic oligonucleotide"
cctgttactaatgatcggcat

SEQ ID NO: 22451 - DNA, 21 bp, Artificial Sequence
  source: /note="Description of Artificial Sequence: Synthetic oligonucleotide"
ccggttactacgaatgctggt

SEQ ID NO: 22452 - DNA, 21 bp, Artificial Sequence
  source: /note="Description of Artificial Sequence: Synthetic oligonucleotide"
ccggttgttaatgtgtggtcg

SEQ ID NO: 22453 - DNA, 21 bp, Artificial Sequence
  source: /note="Description of Artificial Sequence: Synthetic oligonucleotide"
cctgtggtgtcggatacgctt

SEQ ID NO: 22454 - DNA, 21 bp, Artificial Sequence
  source: /note="Description of Artificial Sequence: Synthetic oligonucleotide"
ccggttgtgacgactactctt

SEQ ID NO: 22455 - DNA, 21 bp, Artificial Sequence
  source: /note="Description of Artificial Sequence: Synthetic oligonucleotide"
cctgtgtatgttggtgagatt

SEQ ID NO: 22456 - DNA, 21 bp, Artificial Sequence
  source: /note="Description of Artificial Sequence: Synthetic oligonucleotide"
ccttgggctactatgcagggt

SEQ ID NO: 22457 - DNA, 21 bp, Artificial Sequence
  source: /note="Description of Artificial Sequence: Synthetic oligonucleotide"
ccttggaaggataatcgtggg

SEQ ID NO: 22458 - DNA, 21 bp, Artificial Sequence
  source: /note="Description of Artificial Sequence: Synthetic oligonucleotide"
ccttggagtgaggatgggatg

SEQ ID NO: 22459 - DNA, 21 bp, Artificial Sequence
  source: /note="Description of Artificial Sequence: Synthetic oligonucleotide"
ccttatgctactgctctgacg

SEQ ID NO: 22460 - DNA, 21 bp, Artificial Sequence
  source: /note="Description of Artificial Sequence: Synthetic oligonucleotide"
ccgtatgataggccgtctgct

SEQ ID NO: 22461 - DNA, 21 bp, Artificial Sequence
  source: /note="Description of Artificial Sequence: Synthetic oligonucleotide"
ccttatgaggctcgggctttg

SEQ ID NO: 22462 - DNA, 21 bp, Artificial Sequence
  source: /note="Description of Artificial Sequence: Synthetic oligonucleotide"
ccgtatgagatggtggctatg

SEQ ID NO: 22463 - DNA, 21 bp, Artificial Sequence
  source: /note="Description of Artificial Sequence: Synthetic oligonucleotide"
ccttatggtacgcgggagacg

SEQ ID NO: 22464 - DNA, 21 bp, Artificial Sequence
  source: /note="Description of Artificial Sequence: Synthetic oligonucleotide"
ccgtatcataatcattcggct

SEQ ID NO: 22465 - DNA, 21 bp, Artificial Sequence
  source: /note="Description of Artificial Sequence: Synthetic oligonucleotide"
ccttatattgggggtatgtcg

SEQ ID NO: 22466 - DNA, 21 bp, Artificial Sequence
  source: /note="Description of Artificial Sequence: Synthetic oligonucleotide"
ccgtatttggatcctctgagg

SEQ ID NO: 22467 - DNA, 21 bp, Artificial Sequence
  source: /note="Description of Artificial Sequence: Synthetic oligonucleotide"
ccgtatctgtctaatcgtccg

SEQ ID NO: 22468 - DNA, 21 bp, Artificial Sequence
  source: /note="Description of Artificial Sequence: Synthetic oligonucleotide"
ccgtatctgtatccggaggag

SEQ ID NO: 22469 - DNA, 21 bp, Artificial Sequence
  source: /note="Description of Artificial Sequence: Synthetic oligonucleotide"
ccttatcctgatccgtcgaag

SEQ ID NO: 22470 - DNA, 21 bp, Artificial Sequence
  source: /note="Description of Artificial Sequence: Synthetic oligonucleotide"
ccgtatcctgagacttcgcat

SEQ ID NO: 22471 - DNA, 21 bp, Artificial Sequence
  source: /note="Description of Artificial Sequence: Synthetic oligonucleotide"
ccttatcctagtgataagttt

SEQ ID NO: 22472 - DNA, 21 bp, Artificial Sequence
  source: /note="Description of Artificial Sequence: Synthetic oligonucleotide"
ccgtatccgacgtctaatgag

SEQ ID NO: 22473 - DNA, 21 bp, Artificial Sequence
  source: /note="Description of Artificial Sequence: Synthetic oligonucleotide"
ccttatcagcgtaattcggtg

SEQ ID NO: 22474 - DNA, 21 bp, Artificial Sequence
  source: /note="Description of Artificial Sequence: Synthetic oligonucleotide"
ccgtatagggagcatactgtt

SEQ ID NO: 22475 - DNA, 21 bp, Artificial Sequence
  source: /note="Description of Artificial Sequence: Synthetic oligonucleotide"
ccgtatcgggagagtagtccg

SEQ ID NO: 22476 - DNA, 21 bp, Artificial Sequence
  source: /note="Description of Artificial Sequence: Synthetic oligonucleotide"
ccttatcgtagtgagccggcg

SEQ ID NO: 22477 - DNA, 21 bp, Artificial Sequence
  source: /note="Description of Artificial Sequence: Synthetic oligonucleotide"
ccttatagtgctggttatcat

SEQ ID NO: 22478 - DNA, 21 bp, Artificial Sequence
  source: /note="Description of Artificial Sequence: Synthetic oligonucleotide"
ccttatagtgggatgactttg

SEQ ID NO: 22479 - DNA, 21 bp, Artificial Sequence
  source: /note="Description of Artificial Sequence: Synthetic oligonucleotide"
ccgtattctgttgcggtgtct

SEQ ID NO: 22480 - DNA, 21 bp, Artificial Sequence
  source: /note="Description of Artificial Sequence: Synthetic oligonucleotide"
ccttatactagtgctttgctg

SEQ ID NO: 22481 - DNA, 21 bp, Artificial Sequence
  source: /note="Description of Artificial Sequence: Synthetic oligonucleotide"
ccttatgttactgatcgtgtt

SEQ ID NO: 22482 - DNA, 21 bp, Artificial Sequence
  source: /note="Description of Artificial Sequence: Synthetic oligonucleotide"
ccttatgttacggaggtttat

SEQ ID NO: 22483 - DNA, 21 bp, Artificial Sequence
  source: /note="Description of Artificial Sequence: Synthetic oligonucleotide"
caggcggcgtctcttctggcg

SEQ ID NO: 22484 - DNA, 21 bp, Artificial Sequence
  source: /note="Description of Artificial Sequence: Synthetic oligonucleotide"
caggcggagttgccttatggg

SEQ ID NO: 22485 - DNA, 21 bp, Artificial Sequence
  source: /note="Description of Artificial Sequence: Synthetic oligonucleotide"
caggcttttgatgttgagatg

SEQ ID NO: 22486 - DNA, 21 bp, Artificial Sequence
  source: /note="Description of Artificial Sequence: Synthetic oligonucleotide"
caggctgggatgcagggtgct

SEQ ID NO: 22487 - DNA, 21 bp, Artificial Sequence
  source: /note="Description of Artificial Sequence: Synthetic oligonucleotide"
caggcgggtaatctgcgtgat

SEQ ID NO: 22488 - DNA, 21 bp, Artificial Sequence
  source: /note="Description of Artificial Sequence: Synthetic oligonucleotide"
caggctggtaataatggtgct

SEQ ID NO: 22489 - DNA, 21 bp, Artificial Sequence
  source: /note="Description of Artificial Sequence: Synthetic oligonucleotide"
caggctggtgtgacgaattcg

SEQ ID NO: 22490 - DNA, 21 bp, Artificial Sequence
  source: /note="Description of Artificial Sequence: Synthetic oligonucleotide"
caggcgcatgggggggcgttg

SEQ ID NO: 22491 - DNA, 21 bp, Artificial Sequence
  source: /note="Description of Artificial Sequence: Synthetic oligonucleotide"
caggcgattcagcagcgtcag

SEQ ID NO: 22492 - DNA, 21 bp, Artificial Sequence
  source: /note="Description of Artificial Sequence: Synthetic oligonucleotide"
caggcgattcgtaatgagcct

SEQ ID NO: 22493 - DNA, 21 bp, Artificial Sequence
  source: /note="Description of Artificial Sequence: Synthetic oligonucleotide"
caggctaaggcgtatgcgact

SEQ ID NO: 22494 - DNA, 21 bp, Artificial Sequence
  source: /note="Description of Artificial Sequence: Synthetic oligonucleotide"
caggcgaagtctccttctttg

SEQ ID NO: 22495 - DNA, 21 bp, Artificial Sequence
  source: /note="Description of Artificial Sequence: Synthetic oligonucleotide"
caggcgctggcgccgactaat

SEQ ID NO: 22496 - DNA, 21 bp, Artificial Sequence
  source: /note="Description of Artificial Sequence: Synthetic oligonucleotide"
caggctttgcctactatgcat

SEQ ID NO: 22497 - DNA, 21 bp, Artificial Sequence
  source: /note="Description of Artificial Sequence: Synthetic oligonucleotide"
caggctaatggtagtgttggg

SEQ ID NO: 22498 - DNA, 21 bp, Artificial Sequence
  source: /note="Description of Artificial Sequence: Synthetic oligonucleotide"
caggcgaatgttagtcagccg

SEQ ID NO: 22499 - DNA, 21 bp, Artificial Sequence
  source: /note="Description of Artificial Sequence: Synthetic oligonucleotide"
caggctccgggtcatcgggag

SEQ ID NO: 22500 - DNA, 21 bp, Artificial Sequence
  source: /note="Description of Artificial Sequence: Synthetic oligonucleotide"
caggctcctggtattcttctt

SEQ ID NO: 22501 - DNA, 21 bp, Artificial Sequence
  source: /note="Description of Artificial Sequence: Synthetic oligonucleotide"
caggcgccggggctgctggtt

SEQ ID NO: 22502 - DNA, 21 bp, Artificial Sequence
  source: /note="Description of Artificial Sequence: Synthetic oligonucleotide"
caggcgccgcttgcttctttg

SEQ ID NO: 22503 - DNA, 21 bp, Artificial Sequence
  source: /note="Description of Artificial Sequence: Synthetic oligonucleotide"
caggcgccgcgtagtgatgtg

SEQ ID NO: 22504 - DNA, 21 bp, Artificial Sequence
  source: /note="Description of Artificial Sequence: Synthetic oligonucleotide"
caggctcagctgcagggtcgg

SEQ ID NO: 22505 - DNA, 21 bp, Artificial Sequence
  source: /note="Description of Artificial Sequence: Synthetic oligonucleotide"
caggcgcagcgggctttgagt

SEQ ID NO: 22506 - DNA, 21 bp, Artificial Sequence
  source: /note="Description of Artificial Sequence: Synthetic oligonucleotide"
caggcgcagtatccggctatg

SEQ ID NO: 22507 - DNA, 21 bp, Artificial Sequence
  source: /note="Description of Artificial Sequence: Synthetic oligonucleotide"
caggctcgggctgttacgtcg

SEQ ID NO: 22508 - DNA, 21 bp, Artificial Sequence
  source: /note="Description of Artificial Sequence: Synthetic oligonucleotide"
caggcgcgtgatccgtctttg

SEQ ID NO: 22509 - DNA, 21 bp, Artificial Sequence
  source: /note="Description of Artificial Sequence: Synthetic oligonucleotide"
caggctcgtgaggttagtcct

SEQ ID NO: 22510 - DNA, 21 bp, Artificial Sequence
  source: /note="Description of Artificial Sequence: Synthetic oligonucleotide"
caggcgaggggtaatgtttct

SEQ ID NO: 22511 - DNA, 21 bp, Artificial Sequence
  source: /note="Description of Artificial Sequence: Synthetic oligonucleotide"
caggcgcggaatacttctttg

SEQ ID NO: 22512 - DNA, 21 bp, Artificial Sequence
  source: /note="Description of Artificial Sequence: Synthetic oligonucleotide"
caggctaggccgggtattctt

SEQ ID NO: 22513 - DNA, 21 bp, Artificial Sequence
  source: /note="Description of Artificial Sequence: Synthetic oligonucleotide"
caggctcgtgtgtttgattct

SEQ ID NO: 22514 - DNA, 21 bp, Artificial Sequence
  source: /note="Description of Artificial Sequence: Synthetic oligonucleotide"
caggctagtgcgaatcgggcg

SEQ ID NO: 22515 - DNA, 21 bp, Artificial Sequence
  source: /note="Description of Artificial Sequence: Synthetic oligonucleotide"
caggcgtcgattattagggcg

SEQ ID NO: 22516 - DNA, 21 bp, Artificial Sequence
  source: /note="Description of Artificial Sequence: Synthetic oligonucleotide"
caggcgtcgaagctgccttct

SEQ ID NO: 22517 - DNA, 21 bp, Artificial Sequence
  source: /note="Description of Artificial Sequence: Synthetic oligonucleotide"
caggctagtcctgcttatggt

SEQ ID NO: 22518 - DNA, 21 bp, Artificial Sequence
  source: /note="Description of Artificial Sequence: Synthetic oligonucleotide"
caggctagtcagtctctttcg

SEQ ID NO: 22519 - DNA, 21 bp, Artificial Sequence
  source: /note="Description of Artificial Sequence: Synthetic oligonucleotide"
caggcgactgctaattctttg

SEQ ID NO: 22520 - DNA, 21 bp, Artificial Sequence
  source: /note="Description of Artificial Sequence: Synthetic oligonucleotide"
caggctacttttggggatgat

SEQ ID NO: 22521 - DNA, 21 bp, Artificial Sequence
  source: /note="Description of Artificial Sequence: Synthetic oligonucleotide"
caggcgactaatcagtctttg

SEQ ID NO: 22522 - DNA, 21 bp, Artificial Sequence
  source: /note="Description of Artificial Sequence: Synthetic oligonucleotide"
caggctactccgcttacgact

SEQ ID NO: 22523 - DNA, 21 bp, Artificial Sequence
  source: /note="Description of Artificial Sequence: Synthetic oligonucleotide"
caggcgacgcagctggggcat

SEQ ID NO: 22524 - DNA, 21 bp, Artificial Sequence
  source: /note="Description of Artificial Sequence: Synthetic oligonucleotide"
caggcggttagggataaggat

SEQ ID NO: 22525 - DNA, 21 bp, Artificial Sequence
  source: /note="Description of Artificial Sequence: Synthetic oligonucleotide"
caggcggttaggcctgattct

SEQ ID NO: 22526 - DNA, 21 bp, Artificial Sequence
  source: /note="Description of Artificial Sequence: Synthetic oligonucleotide"
caggcgtatcataattctttg

SEQ ID NO: 22527 - DNA, 21 bp, Artificial Sequence
  source: /note="Description of Artificial Sequence: Synthetic oligonucleotide"
caggcgtatgttaattctttg

SEQ ID NO: 22528 - DNA, 21 bp, Artificial Sequence
  source: /note="Description of Artificial Sequence: Synthetic oligonucleotide"
cagtgttcggatcgtagggct

SEQ ID NO: 22529 - DNA, 21 bp, Artificial Sequence
  source: /note="Description of Artificial Sequence: Synthetic oligonucleotide"
caggatgctgatccggcgcat

SEQ ID NO: 22530 - DNA, 21 bp, Artificial Sequence
  source: /note="Description of Artificial Sequence: Synthetic oligonucleotide"
caggatgattttcggtcgaag

SEQ ID NO: 22531 - DNA, 21 bp, Artificial Sequence
  source: /note="Description of Artificial Sequence: Synthetic oligonucleotide"
caggatgatgtgcagaagttg

SEQ ID NO: 22532 - DNA, 21 bp, Artificial Sequence
  source: /note="Description of Artificial Sequence: Synthetic oligonucleotide"
caggattttgatgatgttcat

SEQ ID NO: 22533 - DNA, 21 bp, Artificial Sequence
  source: /note="Description of Artificial Sequence: Synthetic oligonucleotide"
caggatggtattcggattatg

SEQ ID NO: 22534 - DNA, 21 bp, Artificial Sequence
  source: /note="Description of Artificial Sequence: Synthetic oligonucleotide"
caggatattcgggcttttgcg

SEQ ID NO: 22535 - DNA, 21 bp, Artificial Sequence
  source: /note="Description of Artificial Sequence: Synthetic oligonucleotide"
caggatcgtgctcttcagccg

SEQ ID NO: 22536 - DNA, 21 bp, Artificial Sequence
  source: /note="Description of Artificial Sequence: Synthetic oligonucleotide"
caggatcggctggcggatact

SEQ ID NO: 22537 - DNA, 21 bp, Artificial Sequence
  source: /note="Description of Artificial Sequence: Synthetic oligonucleotide"
caggatcgtatgagtctgagg

SEQ ID NO: 22538 - DNA, 21 bp, Artificial Sequence
  source: /note="Description of Artificial Sequence: Synthetic oligonucleotide"
caggatcgttctacgaatttt

SEQ ID NO: 22539 - DNA, 21 bp, Artificial Sequence
  source: /note="Description of Artificial Sequence: Synthetic oligonucleotide"
caggatagttgtcttttgcct

SEQ ID NO: 22540 - DNA, 21 bp, Artificial Sequence
  source: /note="Description of Artificial Sequence: Synthetic oligonucleotide"
caggatagttatctgggttat

SEQ ID NO: 22541 - DNA, 21 bp, Artificial Sequence
  source: /note="Description of Artificial Sequence: Synthetic oligonucleotide"
caggatactttgactaggttt

SEQ ID NO: 22542 - DNA, 21 bp, Artificial Sequence
  source: /note="Description of Artificial Sequence: Synthetic oligonucleotide"
caggatacgacgtcgctggat

SEQ ID NO: 22543 - DNA, 21 bp, Artificial Sequence
  source: /note="Description of Artificial Sequence: Synthetic oligonucleotide"
caggatacttatactcataag

SEQ ID NO: 22544 - DNA, 21 bp, Artificial Sequence
  source: /note="Description of Artificial Sequence: Synthetic oligonucleotide"
caggatgttggtcttactgtg

SEQ ID NO: 22545 - DNA, 21 bp, Artificial Sequence
  source: /note="Description of Artificial Sequence: Synthetic oligonucleotide"
caggatgttccgagttgtggg

SEQ ID NO: 22546 - DNA, 21 bp, Artificial Sequence
  source: /note="Description of Artificial Sequence: Synthetic oligonucleotide"
caggattataagaagccttct

SEQ ID NO: 22547 - DNA, 21 bp, Artificial Sequence
  source: /note="Description of Artificial Sequence: Synthetic oligonucleotide"
caggattatcggctgcctgag

SEQ ID NO: 22548 - DNA, 21 bp, Artificial Sequence
  source: /note="Description of Artificial Sequence: Synthetic oligonucleotide"
caggaggctgctagggtggag

SEQ ID NO: 22549 - DNA, 21 bp, Artificial Sequence
  source: /note="Description of Artificial Sequence: Synthetic oligonucleotide"
caggaggatacgtggtcgggg

SEQ ID NO: 22550 - DNA, 21 bp, Artificial Sequence
  source: /note="Description of Artificial Sequence: Synthetic oligonucleotide"
caggagggtgcggtgatgaat

SEQ ID NO: 22551 - DNA, 21 bp, Artificial Sequence
  source: /note="Description of Artificial Sequence: Synthetic oligonucleotide"
caggagttgctgaagggttat

SEQ ID NO: 22552 - DNA, 21 bp, Artificial Sequence
  source: /note="Description of Artificial Sequence: Synthetic oligonucleotide"
caggagttggtgttgactcgg

SEQ ID NO: 22553 - DNA, 21 bp, Artificial Sequence
  source: /note="Description of Artificial Sequence: Synthetic oligonucleotide"
caggagcctgctgtttctatt

SEQ ID NO: 22554 - DNA, 21 bp, Artificial Sequence
  source: /note="Description of Artificial Sequence: Synthetic oligonucleotide"
caggagccgatgtctggtgcg

SEQ ID NO: 22555 - DNA, 21 bp, Artificial Sequence
  source: /note="Description of Artificial Sequence: Synthetic oligonucleotide"
caggagccgcgggggatgcat

SEQ ID NO: 22556 - DNA, 21 bp, Artificial Sequence
  source: /note="Description of Artificial Sequence: Synthetic oligonucleotide"
caggagaggaggatgggtccg

SEQ ID NO: 22557 - DNA, 21 bp, Artificial Sequence
  source: /note="Description of Artificial Sequence: Synthetic oligonucleotide"
caggagtcgagtcatggtcct

SEQ ID NO: 22558 - DNA, 21 bp, Artificial Sequence
  source: /note="Description of Artificial Sequence: Synthetic oligonucleotide"
caggagtcgacgggggtttgg

SEQ ID NO: 22559 - DNA, 21 bp, Artificial Sequence
  source: /note="Description of Artificial Sequence: Synthetic oligonucleotide"
caggaggtggctaataatccg

SEQ ID NO: 22560 - DNA, 21 bp, Artificial Sequence
  source: /note="Description of Artificial Sequence: Synthetic oligonucleotide"
caggaggttcatattacgggg

SEQ ID NO: 22561 - DNA, 21 bp, Artificial Sequence
  source: /note="Description of Artificial Sequence: Synthetic oligonucleotide"
caggaggttccgggtaggatt

SEQ ID NO: 22562 - DNA, 21 bp, Artificial Sequence
  source: /note="Description of Artificial Sequence: Synthetic oligonucleotide"
caggagtggaatgctacggct

SEQ ID NO: 22563 - DNA, 21 bp, Artificial Sequence
  source: /note="Description of Artificial Sequence: Synthetic oligonucleotide"
caggagtatgtttctaagtcg

SEQ ID NO: 22564 - DNA, 21 bp, Artificial Sequence
  source: /note="Description of Artificial Sequence: Synthetic oligonucleotide"
cagtttgataagatgatgcct

SEQ ID NO: 22565 - DNA, 21 bp, Artificial Sequence
  source: /note="Description of Artificial Sequence: Synthetic oligonucleotide"
cagtttgatctgtctcctgct

SEQ ID NO: 22566 - DNA, 21 bp, Artificial Sequence
  source: /note="Description of Artificial Sequence: Synthetic oligonucleotide"
cagtttgagaatgcttgtgtg

SEQ ID NO: 22567 - DNA, 21 bp, Artificial Sequence
  source: /note="Description of Artificial Sequence: Synthetic oligonucleotide"
cagtttgggatgccgcgggat

SEQ ID NO: 22568 - DNA, 21 bp, Artificial Sequence
  source: /note="Description of Artificial Sequence: Synthetic oligonucleotide"
cagtttcttaagcatgaggag

SEQ ID NO: 22569 - DNA, 21 bp, Artificial Sequence
  source: /note="Description of Artificial Sequence: Synthetic oligonucleotide"
cagtttatgggtggtgtgaat

SEQ ID NO: 22570 - DNA, 21 bp, Artificial Sequence
  source: /note="Description of Artificial Sequence: Synthetic oligonucleotide"
cagtttaatgagactttgacg

SEQ ID NO: 22571 - DNA, 21 bp, Artificial Sequence
  source: /note="Description of Artificial Sequence: Synthetic oligonucleotide"
cagtttaatccgagtattcgt

SEQ ID NO: 22572 - DNA, 21 bp, Artificial Sequence
  source: /note="Description of Artificial Sequence: Synthetic oligonucleotide"
cagtttaattctccgatgccg

SEQ ID NO: 22573 - DNA, 21 bp, Artificial Sequence
  source: /note="Description of Artificial Sequence: Synthetic oligonucleotide"
cagtttcctgggtctatgcct

SEQ ID NO: 22574 - DNA, 21 bp, Artificial Sequence
  source: /note="Description of Artificial Sequence: Synthetic oligonucleotide"
cagtttcctcctgcgaattct

SEQ ID NO: 22575 - DNA, 21 bp, Artificial Sequence
  source: /note="Description of Artificial Sequence: Synthetic oligonucleotide"
cagtttcagtcttcgcaggct

SEQ ID NO: 22576 - DNA, 21 bp, Artificial Sequence
  source: /note="Description of Artificial Sequence: Synthetic oligonucleotide"
cagtttcgtgctgagattact

SEQ ID NO: 22577 - DNA, 21 bp, Artificial Sequence
  source: /note="Description of Artificial Sequence: Synthetic oligonucleotide"
cagttttcgttgaatgcggag

SEQ ID NO: 22578 - DNA, 21 bp, Artificial Sequence
  source: /note="Description of Artificial Sequence: Synthetic oligonucleotide"
cagtttagtccgacgtcgcgg

SEQ ID NO: 22579 - DNA, 21 bp, Artificial Sequence
  source: /note="Description of Artificial Sequence: Synthetic oligonucleotide"
cagttttcgtcggggtcgccg

SEQ ID NO: 22580 - DNA, 21 bp, Artificial Sequence
  source: /note="Description of Artificial Sequence: Synthetic oligonucleotide"
cagggggctgatagtcggttg

SEQ ID NO: 22581 - DNA, 21 bp, Artificial Sequence
  source: /note="Description of Artificial Sequence: Synthetic oligonucleotide"
cagggggagcattttgcggtt

SEQ ID NO: 22582 - DNA, 21 bp, Artificial Sequence
  source: /note="Description of Artificial Sequence: Synthetic oligonucleotide"
cagggggagaagcctgatgcg

SEQ ID NO: 22583 - DNA, 21 bp, Artificial Sequence
  source: /note="Description of Artificial Sequence: Synthetic oligonucleotide"
cagggtggttctggtccgtat

SEQ ID NO: 22584 - DNA, 21 bp, Artificial Sequence
  source: /note="Description of Artificial Sequence: Synthetic oligonucleotide"
cagggtcatgatgatgatatt

SEQ ID NO: 22585 - DNA, 21 bp, Artificial Sequence
  source: /note="Description of Artificial Sequence: Synthetic oligonucleotide"
cagggtattgagcataggccg

SEQ ID NO: 22586 - DNA, 21 bp, Artificial Sequence
  source: /note="Description of Artificial Sequence: Synthetic oligonucleotide"
caggggattacttgttcgcct

SEQ ID NO: 22587 - DNA, 21 bp, Artificial Sequence
  source: /note="Description of Artificial Sequence: Synthetic oligonucleotide"
cagggtaagcagctgacggct

SEQ ID NO: 22588 - DNA, 21 bp, Artificial Sequence
  source: /note="Description of Artificial Sequence: Synthetic oligonucleotide"
cagggtaaggttgatcagcgt

SEQ ID NO: 22589 - DNA, 21 bp, Artificial Sequence
  source: /note="Description of Artificial Sequence: Synthetic oligonucleotide"
cagggtctggttgcgaatttt

SEQ ID NO: 22590 - DNA, 21 bp, Artificial Sequence
  source: /note="Description of Artificial Sequence: Synthetic oligonucleotide"
cagggtatgtcgtttggtcct

SEQ ID NO: 22591 - DNA, 21 bp, Artificial Sequence
  source: /note="Description of Artificial Sequence: Synthetic oligonucleotide"
caggggaataggagtcctcat

SEQ ID NO: 22592 - DNA, 21 bp, Artificial Sequence
  source: /note="Description of Artificial Sequence: Synthetic oligonucleotide"
cagggtccggcgaatgttgtg

SEQ ID NO: 22593 - DNA, 21 bp, Artificial Sequence
  source: /note="Description of Artificial Sequence: Synthetic oligonucleotide"
cagggtccgcctgttacgaat

SEQ ID NO: 22594 - DNA, 21 bp, Artificial Sequence
  source: /note="Description of Artificial Sequence: Synthetic oligonucleotide"
caggggccgcgggctgctcct

SEQ ID NO: 22595 - DNA, 21 bp, Artificial Sequence
  source: /note="Description of Artificial Sequence: Synthetic oligonucleotide"
cagggtccttctatgttgact

SEQ ID NO: 22596 - DNA, 21 bp, Artificial Sequence
  source: /note="Description of Artificial Sequence: Synthetic oligonucleotide"
cagggtcagcatcctatgact

SEQ ID NO: 22597 - DNA, 21 bp, Artificial Sequence
  source: /note="Description of Artificial Sequence: Synthetic oligonucleotide"
cagggtcagccgattgatagg

SEQ ID NO: 22598 - DNA, 21 bp, Artificial Sequence
  source: /note="Description of Artificial Sequence: Synthetic oligonucleotide"
cagggtagggagtgggtgcag

SEQ ID NO: 22599 - DNA, 21 bp, Artificial Sequence
  source: /note="Description of Artificial Sequence: Synthetic oligonucleotide"
cagggtcgttcgttgccggcg

SEQ ID NO: 22600 - DNA, 21 bp, Artificial Sequence
  source: /note="Description of Artificial Sequence: Synthetic oligonucleotide"
caggggcggactcctcaggcg

SEQ ID NO: 22601 - DNA, 21 bp, Artificial Sequence
  source: /note="Description of Artificial Sequence: Synthetic oligonucleotide"
caggggtctcattcgagtact

SEQ ID NO: 22602 - DNA, 21 bp, Artificial Sequence
  source: /note="Description of Artificial Sequence: Synthetic oligonucleotide"
cagggttcgcgtacgaatccg

SEQ ID NO: 22603 - DNA, 21 bp, Artificial Sequence
  source: /note="Description of Artificial Sequence: Synthetic oligonucleotide"
caggggtctactgcggtgacg

SEQ ID NO: 22604 - DNA, 21 bp, Artificial Sequence
  source: /note="Description of Artificial Sequence: Synthetic oligonucleotide"
caggggagtacttggagtccg

SEQ ID NO: 22605 - DNA, 21 bp, Artificial Sequence
  source: /note="Description of Artificial Sequence: Synthetic oligonucleotide"
caggggactcttaagaatatt

SEQ ID NO: 22606 - DNA, 21 bp, Artificial Sequence
  source: /note="Description of Artificial Sequence: Synthetic oligonucleotide"
cagggggttgcggggcatgct

SEQ ID NO: 22607 - DNA, 21 bp, Artificial Sequence
  source: /note="Description of Artificial Sequence: Synthetic oligonucleotide"
cagggtgttttgctggttact

SEQ ID NO: 22608 - DNA, 21 bp, Artificial Sequence
  source: /note="Description of Artificial Sequence: Synthetic oligonucleotide"
cagggtgttcgtcaggctgtt

SEQ ID NO: 22609 - DNA, 21 bp, Artificial Sequence
  source: /note="Description of Artificial Sequence: Synthetic oligonucleotide"
cagggtgtgcgtacgacgtct

SEQ ID NO: 22610 - DNA, 21 bp, Artificial Sequence
  source: /note="Description of Artificial Sequence: Synthetic oligonucleotide"
cagcatgagcggatgccttcg

SEQ ID NO: 22611 - DNA, 21 bp, Artificial Sequence
  source: /note="Description of Artificial Sequence: Synthetic oligonucleotide"
cagcattttaatcaggctgag

SEQ ID NO: 22612 - DNA, 21 bp, Artificial Sequence
  source: /note="Description of Artificial Sequence: Synthetic oligonucleotide"
cagcatggtgctccgacttgg

SEQ ID NO: 22613 - DNA, 21 bp, Artificial Sequence
  source: /note="Description of Artificial Sequence: Synthetic oligonucleotide"
cagcatctgcatacgctgaag

SEQ ID NO: 22614 - DNA, 21 bp, Artificial Sequence
  source: /note="Description of Artificial Sequence: Synthetic oligonucleotide"
cagcatttgaattcgtatgtg

SEQ ID NO: 22615 - DNA, 21 bp, Artificial Sequence
  source: /note="Description of Artificial Sequence: Synthetic oligonucleotide"
cagcatttgccgaggactacg

SEQ ID NO: 22616 - DNA, 21 bp, Artificial Sequence
  source: /note="Description of Artificial Sequence: Synthetic oligonucleotide"
cagcatcttgttcatgatgct

SEQ ID NO: 22617 - DNA, 21 bp, Artificial Sequence
  source: /note="Description of Artificial Sequence: Synthetic oligonucleotide"
cagcattctcttgctgttact

SEQ ID NO: 22618 - DNA, 21 bp, Artificial Sequence
  source: /note="Description of Artificial Sequence: Synthetic oligonucleotide"
cagcattcgtcgctggggatt

SEQ ID NO: 22619 - DNA, 21 bp, Artificial Sequence
  source: /note="Description of Artificial Sequence: Synthetic oligonucleotide"
cagcattcgagtatggcgagg

SEQ ID NO: 22620 - DNA, 21 bp, Artificial Sequence
  source: /note="Description of Artificial Sequence: Synthetic oligonucleotide"
cagcatactgctgctgcgctt

SEQ ID NO: 22621 - DNA, 21 bp, Artificial Sequence
  source: /note="Description of Artificial Sequence: Synthetic oligonucleotide"
cagcatactttgactattagt

SEQ ID NO: 22622 - DNA, 21 bp, Artificial Sequence
  source: /note="Description of Artificial Sequence: Synthetic oligonucleotide"
cagcatactagggtggttttt

SEQ ID NO: 22623 - DNA, 21 bp, Artificial Sequence
  source: /note="Description of Artificial Sequence: Synthetic oligonucleotide"
cagcatacgactaagcagtct

SEQ ID NO: 22624 - DNA, 21 bp, Artificial Sequence
  source: /note="Description of Artificial Sequence: Synthetic oligonucleotide"
cagcatgtgtcttcgactggt

SEQ ID NO: 22625 - DNA, 21 bp, Artificial Sequence
  source: /note="Description of Artificial Sequence: Synthetic oligonucleotide"
cagattgctcgtagttctatt

SEQ ID NO: 22626 - DNA, 21 bp, Artificial Sequence
  source: /note="Description of Artificial Sequence: Synthetic oligonucleotide"
cagattgattatcgggcgccg

SEQ ID NO: 22627 - DNA, 21 bp, Artificial Sequence
  source: /note="Description of Artificial Sequence: Synthetic oligonucleotide"
cagattgagactctggctcat

SEQ ID NO: 22628 - DNA, 21 bp, Artificial Sequence
  source: /note="Description of Artificial Sequence: Synthetic oligonucleotide"
cagatttttgggaggactcct

SEQ ID NO: 22629 - DNA, 21 bp, Artificial Sequence
  source: /note="Description of Artificial Sequence: Synthetic oligonucleotide"
cagattgggtttgggactagt

SEQ ID NO: 22630 - DNA, 21 bp, Artificial Sequence
  source: /note="Description of Artificial Sequence: Synthetic oligonucleotide"
cagattggtacgtatttggct

SEQ ID NO: 22631 - DNA, 21 bp, Artificial Sequence
  source: /note="Description of Artificial Sequence: Synthetic oligonucleotide"
cagattcatgagtctggtgag

SEQ ID NO: 22632 - DNA, 21 bp, Artificial Sequence
  source: /note="Description of Artificial Sequence: Synthetic oligonucleotide"
cagattatggcggatactcgg

SEQ ID NO: 22633 - DNA, 21 bp, Artificial Sequence
  source: /note="Description of Artificial Sequence: Synthetic oligonucleotide"
cagattaattttccgatggat

SEQ ID NO: 22634 - DNA, 21 bp, Artificial Sequence
  source: /note="Description of Artificial Sequence: Synthetic oligonucleotide"
cagattaattcgaataagact

SEQ ID NO: 22635 - DNA, 21 bp, Artificial Sequence
  source: /note="Description of Artificial Sequence: Synthetic oligonucleotide"
cagattaattcgacgacgggt

SEQ ID NO: 22636 - DNA, 21 bp, Artificial Sequence
  source: /note="Description of Artificial Sequence: Synthetic oligonucleotide"
cagattccgattattgagtcg

SEQ ID NO: 22637 - DNA, 21 bp, Artificial Sequence
  source: /note="Description of Artificial Sequence: Synthetic oligonucleotide"
cagattcctaaggcgccgggt

SEQ ID NO: 22638 - DNA, 21 bp, Artificial Sequence
  source: /note="Description of Artificial Sequence: Synthetic oligonucleotide"
cagattcctaattcttttagt

SEQ ID NO: 22639 - DNA, 21 bp, Artificial Sequence
  source: /note="Description of Artificial Sequence: Synthetic oligonucleotide"
cagattcctactactttggct

SEQ ID NO: 22640 - DNA, 21 bp, Artificial Sequence
  source: /note="Description of Artificial Sequence: Synthetic oligonucleotide"
cagattcggaattctacggag

SEQ ID NO: 22641 - DNA, 21 bp, Artificial Sequence
  source: /note="Description of Artificial Sequence: Synthetic oligonucleotide"
cagattagtcagccgaagatt

SEQ ID NO: 22642 - DNA, 21 bp, Artificial Sequence
  source: /note="Description of Artificial Sequence: Synthetic oligonucleotide"
cagatttctacgttgactttt

SEQ ID NO: 22643 - DNA, 21 bp, Artificial Sequence
  source: /note="Description of Artificial Sequence: Synthetic oligonucleotide"
cagattgtgccgcagggtcct

SEQ ID NO: 22644 - DNA, 21 bp, Artificial Sequence
  source: /note="Description of Artificial Sequence: Synthetic oligonucleotide"
cagattgttactgggcttagt

SEQ ID NO: 22645 - DNA, 21 bp, Artificial Sequence
  source: /note="Description of Artificial Sequence: Synthetic oligonucleotide"
cagatttatgggtctgagtcg

SEQ ID NO: 22646 - DNA, 21 bp, Artificial Sequence
  source: /note="Description of Artificial Sequence: Synthetic oligonucleotide"
cagaaggcggcttcggctgat

SEQ ID NO: 22647 - DNA, 21 bp, Artificial Sequence
  source: /note="Description of Artificial Sequence: Synthetic oligonucleotide"
cagaaggcgattgattcgttg

SEQ ID NO: 22648 - DNA, 21 bp, Artificial Sequence
  source: /note="Description of Artificial Sequence: Synthetic oligonucleotide"
cagaaggagctgattgttgat

SEQ ID NO: 22649 - DNA, 21 bp, Artificial Sequence
  source: /note="Description of Artificial Sequence: Synthetic oligonucleotide"
cagaaggagccgggtccttct

SEQ ID NO: 22650 - DNA, 21 bp, Artificial Sequence
  source: /note="Description of Artificial Sequence: Synthetic oligonucleotide"
cagaagtttgctgataagggt

SEQ ID NO: 22651 - DNA, 21 bp, Artificial Sequence
  source: /note="Description of Artificial Sequence: Synthetic oligonucleotide"
cagaagcatgatattaggagt

SEQ ID NO: 22652 - DNA, 21 bp, Artificial Sequence
  source: /note="Description of Artificial Sequence: Synthetic oligonucleotide"
cagaagcataattgtcctgtg

SEQ ID NO: 22653 - DNA, 21 bp, Artificial Sequence
  source: /note="Description of Artificial Sequence: Synthetic oligonucleotide"
cagaagaaggatccgattcct

SEQ ID NO: 22654 - DNA, 21 bp, Artificial Sequence
  source: /note="Description of Artificial Sequence: Synthetic oligonucleotide"
cagaagatgcagcattatgat

SEQ ID NO: 22655 - DNA, 21 bp, Artificial Sequence
  source: /note="Description of Artificial Sequence: Synthetic oligonucleotide"
cagaagcctgctacgcgggat

SEQ ID NO: 22656 - DNA, 21 bp, Artificial Sequence
  source: /note="Description of Artificial Sequence: Synthetic oligonucleotide"
cagaagtcgaataatgcgctt

SEQ ID NO: 22657 - DNA, 21 bp, Artificial Sequence
  source: /note="Description of Artificial Sequence: Synthetic oligonucleotide"
cagaaggttattgcggaggtg

SEQ ID NO: 22658 - DNA, 21 bp, Artificial Sequence
  source: /note="Description of Artificial Sequence: Synthetic oligonucleotide"
cagaaggttatgcagccgggg

SEQ ID NO: 22659 - DNA, 21 bp, Artificial Sequence
  source: /note="Description of Artificial Sequence: Synthetic oligonucleotide"
cagttggcgaatcatgtgggt

SEQ ID NO: 22660 - DNA, 21 bp, Artificial Sequence
  source: /note="Description of Artificial Sequence: Synthetic oligonucleotide"
cagttggcgccgccgaagact

SEQ ID NO: 22661 - DNA, 21 bp, Artificial Sequence
  source: /note="Description of Artificial Sequence: Synthetic oligonucleotide"
cagctggcgtctaatgcgttt

SEQ ID NO: 22662 - DNA, 21 bp, Artificial Sequence
  source: /note="Description of Artificial Sequence: Synthetic oligonucleotide"
cagcttgcgagtgtgaggatt

SEQ ID NO: 22663 - DNA, 21 bp, Artificial Sequence
  source: /note="Description of Artificial Sequence: Synthetic oligonucleotide"
cagctggattttgatttggtg

SEQ ID NO: 22664 - DNA, 21 bp, Artificial Sequence
  source: /note="Description of Artificial Sequence: Synthetic oligonucleotide"
cagctggattctctttcggtt

SEQ ID NO: 22665 - DNA, 21 bp, Artificial Sequence
  source: /note="Description of Artificial Sequence: Synthetic oligonucleotide"
cagctggggccttcggttccg

SEQ ID NO: 22666 - DNA, 21 bp, Artificial Sequence
  source: /note="Description of Artificial Sequence: Synthetic oligonucleotide"
cagctggggtcgttggatggt

SEQ ID NO: 22667 - DNA, 21 bp, Artificial Sequence
  source: /note="Description of Artificial Sequence: Synthetic oligonucleotide"
cagctgggggtgcgttcgcag

SEQ ID NO: 22668 - DNA, 21 bp, Artificial Sequence
  source: /note="Description of Artificial Sequence: Synthetic oligonucleotide"
cagctgcattatgctaatgag

SEQ ID NO: 22669 - DNA, 21 bp, Artificial Sequence
  source: /note="Description of Artificial Sequence: Synthetic oligonucleotide"
cagcttattaagactcctggt

SEQ ID NO: 22670 - DNA, 21 bp, Artificial Sequence
  source: /note="Description of Artificial Sequence: Synthetic oligonucleotide"
cagctgaaggctgttgagttt

SEQ ID NO: 22671 - DNA, 21 bp, Artificial Sequence
  source: /note="Description of Artificial Sequence: Synthetic oligonucleotide"
cagttgaagcctctgtatttt

SEQ ID NO: 22672 - DNA, 21 bp, Artificial Sequence
  source: /note="Description of Artificial Sequence: Synthetic oligonucleotide"
cagttgaagactgagatgctg

SEQ ID NO: 22673 - DNA, 21 bp, Artificial Sequence
  source: /note="Description of Artificial Sequence: Synthetic oligonucleotide"
cagttgaagacgtcgctgtcg

SEQ ID NO: 22674 - DNA, 21 bp, Artificial Sequence
  source: /note="Description of Artificial Sequence: Synthetic oligonucleotide"
cagctgcttcggacgggtgat

SEQ ID NO: 22675 - DNA, 21 bp, Artificial Sequence
  source: /note="Description of Artificial Sequence: Synthetic oligonucleotide"
cagcttttgcgtgtgacgggt

SEQ ID NO: 22676 - DNA, 21 bp, Artificial Sequence
  source: /note="Description of Artificial Sequence: Synthetic oligonucleotide"
cagttgatgaggctgggggtg

SEQ ID NO: 22677 - DNA, 21 bp, Artificial Sequence
  source: /note="Description of Artificial Sequence: Synthetic oligonucleotide"
cagttgaatgatcttgcgcgg

SEQ ID NO: 22678 - DNA, 21 bp, Artificial Sequence
  source: /note="Description of Artificial Sequence: Synthetic oligonucleotide"
cagctgaatcgtccgccttct

SEQ ID NO: 22679 - DNA, 21 bp, Artificial Sequence
  source: /note="Description of Artificial Sequence: Synthetic oligonucleotide"
cagcttccggcggataatgct

SEQ ID NO: 22680 - DNA, 21 bp, Artificial Sequence
  source: /note="Description of Artificial Sequence: Synthetic oligonucleotide"
cagttgccgcatgattctgct

SEQ ID NO: 22681 - DNA, 21 bp, Artificial Sequence
  source: /note="Description of Artificial Sequence: Synthetic oligonucleotide"
cagttgcctcatgtgaaggtt

SEQ ID NO: 22682 - DNA, 21 bp, Artificial Sequence
  source: /note="Description of Artificial Sequence: Synthetic oligonucleotide"
cagctgccgcatgtttctatg

SEQ ID NO: 22683 - DNA, 21 bp, Artificial Sequence
  source: /note="Description of Artificial Sequence: Synthetic oligonucleotide"
cagctgccgttgactccgcat

SEQ ID NO: 22684 - DNA, 21 bp, Artificial Sequence
  source: /note="Description of Artificial Sequence: Synthetic oligonucleotide"
cagcttcctagtacgcggtct

SEQ ID NO: 22685 - DNA, 21 bp, Artificial Sequence
  source: /note="Description of Artificial Sequence: Synthetic oligonucleotide"
cagcttcctactaagctggat

SEQ ID NO: 22686 - DNA, 21 bp, Artificial Sequence
  source: /note="Description of Artificial Sequence: Synthetic oligonucleotide"
cagttgccggttaattctagt

SEQ ID NO: 22687 - DNA, 21 bp, Artificial Sequence
  source: /note="Description of Artificial Sequence: Synthetic oligonucleotide"
cagctgcagattactactggt

SEQ ID NO: 22688 - DNA, 21 bp, Artificial Sequence
  source: /note="Description of Artificial Sequence: Synthetic oligonucleotide"
cagcttcagcttaagactgct

SEQ ID NO: 22689 - DNA, 21 bp, Artificial Sequence
  source: /note="Description of Artificial Sequence: Synthetic oligonucleotide"
cagttgcagactgataagacg

SEQ ID NO: 22690 - DNA, 21 bp, Artificial Sequence
  source: /note="Description of Artificial Sequence: Synthetic oligonucleotide"
cagttgcgtgggtcttatccg

SEQ ID NO: 22691 - DNA, 21 bp, Artificial Sequence
  source: /note="Description of Artificial Sequence: Synthetic oligonucleotide"
cagttgcgtcatactgatttt

SEQ ID NO: 22692 - DNA, 21 bp, Artificial Sequence
  source: /note="Description of Artificial Sequence: Synthetic oligonucleotide"
cagctgaggccggctaattct

SEQ ID NO: 22693 - DNA, 21 bp, Artificial Sequence
  source: /note="Description of Artificial Sequence: Synthetic oligonucleotide"
cagctgaggcctgagggtctg

SEQ ID NO: 22694 - DNA, 21 bp, Artificial Sequence
  source: /note="Description of Artificial Sequence: Synthetic oligonucleotide"
cagctgtctgctcctgcggct

SEQ ID NO: 22695 - DNA, 21 bp, Artificial Sequence
  source: /note="Description of Artificial Sequence: Synthetic oligonucleotide"
cagctttctgcttcgacgcgt

SEQ ID NO: 22696 - DNA, 21 bp, Artificial Sequence
  source: /note="Description of Artificial Sequence: Synthetic oligonucleotide"
cagctttcgaaggatgtttct

SEQ ID NO: 22697 - DNA, 21 bp, Artificial Sequence
  source: /note="Description of Artificial Sequence: Synthetic oligonucleotide"
cagctttctctggagcctttt

SEQ ID NO: 22698 - DNA, 21 bp, Artificial Sequence
  source: /note="Description of Artificial Sequence: Synthetic oligonucleotide"
cagttgagtcgggaggagcct

SEQ ID NO: 22699 - DNA, 21 bp, Artificial Sequence
  source: /note="Description of Artificial Sequence: Synthetic oligonucleotide"
cagttgtcgcggcctgttccg

SEQ ID NO: 22700 - DNA, 21 bp, Artificial Sequence
  source: /note="Description of Artificial Sequence: Synthetic oligonucleotide"
cagctgtcttcggctcctact

SEQ ID NO: 22701 - DNA, 21 bp, Artificial Sequence
  source: /note="Description of Artificial Sequence: Synthetic oligonucleotide"
cagttgtcgacgactcagggt

SEQ ID NO: 22702 - DNA, 21 bp, Artificial Sequence
  source: /note="Description of Artificial Sequence: Synthetic oligonucleotide"
cagttgactgcgggtgtgccg

SEQ ID NO: 22703 - DNA, 21 bp, Artificial Sequence
  source: /note="Description of Artificial Sequence: Synthetic oligonucleotide"
cagcttacgccggttcatcat

SEQ ID NO: 22704 - DNA, 21 bp, Artificial Sequence
  source: /note="Description of Artificial Sequence: Synthetic oligonucleotide"
cagcttactcggggtaattat

SEQ ID NO: 22705 - DNA, 21 bp, Artificial Sequence
  source: /note="Description of Artificial Sequence: Synthetic oligonucleotide"
cagttgactgtgcatacgctt

SEQ ID NO: 22706 - DNA, 21 bp, Artificial Sequence
  source: /note="Description of Artificial Sequence: Synthetic oligonucleotide"
cagctggtgcagcagcatttg

SEQ ID NO: 22707 - DNA, 21 bp, Artificial Sequence
  source: /note="Description of Artificial Sequence: Synthetic oligonucleotide"
cagatggcggagactagtagg

SEQ ID NO: 22708 - DNA, 21 bp, Artificial Sequence
  source: /note="Description of Artificial Sequence: Synthetic oligonucleotide"
cagatggctcgtactatgtct

SEQ ID NO: 22709 - DNA, 21 bp, Artificial Sequence
  source: /note="Description of Artificial Sequence: Synthetic oligonucleotide"
cagatggcgtcgattccgtcg

SEQ ID NO: 22710 - DNA, 21 bp, Artificial Sequence
  source: /note="Description of Artificial Sequence: Synthetic oligonucleotide"
cagatggatgatgctccgtcg

SEQ ID NO: 22711 - DNA, 21 bp, Artificial Sequence
  source: /note="Description of Artificial Sequence: Synthetic oligonucleotide"
cagatggataatcggaatcct

SEQ ID NO: 22712 - DNA, 21 bp, Artificial Sequence
  source: /note="Description of Artificial Sequence: Synthetic oligonucleotide"
cagatggatcgttcgcgtgtg

SEQ ID NO: 22713 - DNA, 21 bp, Artificial Sequence
  source: /note="Description of Artificial Sequence: Synthetic oligonucleotide"
cagatggaggcggcgctttat

SEQ ID NO: 22714 - DNA, 21 bp, Artificial Sequence
  source: /note="Description of Artificial Sequence: Synthetic oligonucleotide"
cagatgcatagttctcttcat

SEQ ID NO: 22715 - DNA, 21 bp, Artificial Sequence
  source: /note="Description of Artificial Sequence: Synthetic oligonucleotide"
cagatgaagaatcaggcgact

SEQ ID NO: 22716 - DNA, 21 bp, Artificial Sequence
  source: /note="Description of Artificial Sequence: Synthetic oligonucleotide"
cagatgcttgataagaatcat

SEQ ID NO: 22717 - DNA, 21 bp, Artificial Sequence
  source: /note="Description of Artificial Sequence: Synthetic oligonucleotide"
cagatgaatgctcttcctatg

SEQ ID NO: 22718 - DNA, 21 bp, Artificial Sequence
  source: /note="Description of Artificial Sequence: Synthetic oligonucleotide"
cagatgaatatgccgaatgat

SEQ ID NO: 22719 - DNA, 21 bp, Artificial Sequence
  source: /note="Description of Artificial Sequence: Synthetic oligonucleotide"
cagatgcctgctacggcgaag

SEQ ID NO: 22720 - DNA, 21 bp, Artificial Sequence
  source: /note="Description of Artificial Sequence: Synthetic oligonucleotide"
cagatgcctgaggggactagt

SEQ ID NO: 22721 - DNA, 21 bp, Artificial Sequence
  source: /note="Description of Artificial Sequence: Synthetic oligonucleotide"
cagatgccgcctaattctaat

SEQ ID NO: 22722 - DNA, 21 bp, Artificial Sequence
  source: /note="Description of Artificial Sequence: Synthetic oligonucleotide"
cagatgccttcttttggtgag

SEQ ID NO: 22723 - DNA, 21 bp, Artificial Sequence
  source: /note="Description of Artificial Sequence: Synthetic oligonucleotide"
cagatgccgtcgatgtcgggt

SEQ ID NO: 22724 - DNA, 21 bp, Artificial Sequence
  source: /note="Description of Artificial Sequence: Synthetic oligonucleotide"
cagatgccgtcgagtcgttct

SEQ ID NO: 22725 - DNA, 21 bp, Artificial Sequence
  source: /note="Description of Artificial Sequence: Synthetic oligonucleotide"
cagatgcctacgaggactact

SEQ ID NO: 22726 - DNA, 21 bp, Artificial Sequence
  source: /note="Description of Artificial Sequence: Synthetic oligonucleotide"
cagatgcagcgtcctctgatt

SEQ ID NO: 22727 - DNA, 21 bp, Artificial Sequence
  source: /note="Description of Artificial Sequence: Synthetic oligonucleotide"
cagatgagtattgttgtgcct

SEQ ID NO: 22728 - DNA, 21 bp, Artificial Sequence
  source: /note="Description of Artificial Sequence: Synthetic oligonucleotide"
cagatgacgattttgaagcag

SEQ ID NO: 22729 - DNA, 21 bp, Artificial Sequence
  source: /note="Description of Artificial Sequence: Synthetic oligonucleotide"
cagaatgaggcgttggtgggg

SEQ ID NO: 22730 - DNA, 21 bp, Artificial Sequence
  source: /note="Description of Artificial Sequence: Synthetic oligonucleotide"
cagaatgagctgtttcgggcg

SEQ ID NO: 22731 - DNA, 21 bp, Artificial Sequence
  source: /note="Description of Artificial Sequence: Synthetic oligonucleotide"
cagaatgggctgcctcagacg

SEQ ID NO: 22732 - DNA, 21 bp, Artificial Sequence
  source: /note="Description of Artificial Sequence: Synthetic oligonucleotide"
cagaatcatccggtgacgaag

SEQ ID NO: 22733 - DNA, 21 bp, Artificial Sequence
  source: /note="Description of Artificial Sequence: Synthetic oligonucleotide"
cagaatattcttgcgcattgg

SEQ ID NO: 22734 - DNA, 21 bp, Artificial Sequence
  source: /note="Description of Artificial Sequence: Synthetic oligonucleotide"
cagaataagtcgaattcgtat

SEQ ID NO: 22735 - DNA, 21 bp, Artificial Sequence
  source: /note="Description of Artificial Sequence: Synthetic oligonucleotide"
cagaatctgcctagtgcttat

SEQ ID NO: 22736 - DNA, 21 bp, Artificial Sequence
  source: /note="Description of Artificial Sequence: Synthetic oligonucleotide"
cagaatctgacttttgggatg

SEQ ID NO: 22737 - DNA, 21 bp, Artificial Sequence
  source: /note="Description of Artificial Sequence: Synthetic oligonucleotide"
cagaatctgacgggtaagtcg

SEQ ID NO: 22738 - DNA, 21 bp, Artificial Sequence
  source: /note="Description of Artificial Sequence: Synthetic oligonucleotide"
cagaatatggtttgtgttgct

SEQ ID NO: 22739 - DNA, 21 bp, Artificial Sequence
  source: /note="Description of Artificial Sequence: Synthetic oligonucleotide"
cagaatccgaatatttcgggg

SEQ ID NO: 22740 - DNA, 21 bp, Artificial Sequence
  source: /note="Description of Artificial Sequence: Synthetic oligonucleotide"
cagaatcctcctcatattcag

SEQ ID NO: 22741 - DNA, 21 bp, Artificial Sequence
  source: /note="Description of Artificial Sequence: Synthetic oligonucleotide"
cagaatcctcggcttccgctt

SEQ ID NO: 22742 - DNA, 21 bp, Artificial Sequence
  source: /note="Description of Artificial Sequence: Synthetic oligonucleotide"
cagaatcctcggactggtcag

SEQ ID NO: 22743 - DNA, 21 bp, Artificial Sequence
  source: /note="Description of Artificial Sequence: Synthetic oligonucleotide"
cagaatccgacgtataagctt

SEQ ID NO: 22744 - DNA, 21 bp, Artificial Sequence
  source: /note="Description of Artificial Sequence: Synthetic oligonucleotide"
cagaatcggattgtggagccg

SEQ ID NO: 22745 - DNA, 21 bp, Artificial Sequence
  source: /note="Description of Artificial Sequence: Synthetic oligonucleotide"
cagaattctgctcctgcgatt

SEQ ID NO: 22746 - DNA, 21 bp, Artificial Sequence
  source: /note="Description of Artificial Sequence: Synthetic oligonucleotide"
cagaatacttctagtggtctt

SEQ ID NO: 22747 - DNA, 21 bp, Artificial Sequence
  source: /note="Description of Artificial Sequence: Synthetic oligonucleotide"
cagaatgttatgcatatgagt

SEQ ID NO: 22748 - DNA, 21 bp, Artificial Sequence
  source: /note="Description of Artificial Sequence: Synthetic oligonucleotide"
cagaatgttcagcgttatccg

SEQ ID NO: 22749 - DNA, 21 bp, Artificial Sequence
  source: /note="Description of Artificial Sequence: Synthetic oligonucleotide"
cagaatgttcggtcgcagacg

SEQ ID NO: 22750 - DNA, 21 bp, Artificial Sequence
  source: /note="Description of Artificial Sequence: Synthetic oligonucleotide"
cagaattatttgaagactgag

SEQ ID NO: 22751 - DNA, 21 bp, Artificial Sequence
  source: /note="Description of Artificial Sequence: Synthetic oligonucleotide"
cagcctgcggcgggtcatttt

SEQ ID NO: 22752 - DNA, 21 bp, Artificial Sequence
  source: /note="Description of Artificial Sequence: Synthetic oligonucleotide"
cagcctgcgcattgttctgat

SEQ ID NO: 22753 - DNA, 21 bp, Artificial Sequence
  source: /note="Description of Artificial Sequence: Synthetic oligonucleotide"
cagccggcgaagggttatcct

SEQ ID NO: 22754 - DNA, 21 bp, Artificial Sequence
  source: /note="Description of Artificial Sequence: Synthetic oligonucleotide"
cagcctgctccgacgctgagg

SEQ ID NO: 22755 - DNA, 21 bp, Artificial Sequence
  source: /note="Description of Artificial Sequence: Synthetic oligonucleotide"
cagcctgctactgaggttctt

SEQ ID NO: 22756 - DNA, 21 bp, Artificial Sequence
  source: /note="Description of Artificial Sequence: Synthetic oligonucleotide"
cagcctgctgtgatggagtcg

SEQ ID NO: 22757 - DNA, 21 bp, Artificial Sequence
  source: /note="Description of Artificial Sequence: Synthetic oligonucleotide"
cagccggatccttctccgccg

SEQ ID NO: 22758 - DNA, 21 bp, Artificial Sequence
  source: /note="Description of Artificial Sequence: Synthetic oligonucleotide"
cagcctttttattctgatgag

SEQ ID NO: 22759 - DNA, 21 bp, Artificial Sequence
  source: /note="Description of Artificial Sequence: Synthetic oligonucleotide"
cagccgggggtgagtcatact

SEQ ID NO: 22760 - DNA, 21 bp, Artificial Sequence
  source: /note="Description of Artificial Sequence: Synthetic oligonucleotide"
cagccgcatggggatcctatg

SEQ ID NO: 22761 - DNA, 21 bp, Artificial Sequence
  source: /note="Description of Artificial Sequence: Synthetic oligonucleotide"
cagccgattgctcatacggat

SEQ ID NO: 22762 - DNA, 21 bp, Artificial Sequence
  source: /note="Description of Artificial Sequence: Synthetic oligonucleotide"
cagccgattcagactcgtgcg

SEQ ID NO: 22763 - DNA, 21 bp, Artificial Sequence
  source: /note="Description of Artificial Sequence: Synthetic oligonucleotide"
cagcctatttcggctacgctg

SEQ ID NO: 22764 - DNA, 21 bp, Artificial Sequence
  source: /note="Description of Artificial Sequence: Synthetic oligonucleotide"
cagcctaagttttgtggggct

SEQ ID NO: 22765 - DNA, 21 bp, Artificial Sequence
  source: /note="Description of Artificial Sequence: Synthetic oligonucleotide"
cagcctaagctgagtgcgtcg

SEQ ID NO: 22766 - DNA, 21 bp, Artificial Sequence
  source: /note="Description of Artificial Sequence: Synthetic oligonucleotide"
cagccgaagtcttcgggggtg

SEQ ID NO: 22767 - DNA, 21 bp, Artificial Sequence
  source: /note="Description of Artificial Sequence: Synthetic oligonucleotide"
cagccgctggcgcgggcgagt

SEQ ID NO: 22768 - DNA, 21 bp, Artificial Sequence
  source: /note="Description of Artificial Sequence: Synthetic oligonucleotide"
cagcctctggcttcgaagacg

SEQ ID NO: 22769 - DNA, 21 bp, Artificial Sequence
  source: /note="Description of Artificial Sequence: Synthetic oligonucleotide"
cagcctctgttgagtgcttcg

SEQ ID NO: 22770 - DNA, 21 bp, Artificial Sequence
  source: /note="Description of Artificial Sequence: Synthetic oligonucleotide"
cagccgttgactatgcgtagt

SEQ ID NO: 22771 - DNA, 21 bp, Artificial Sequence
  source: /note="Description of Artificial Sequence: Synthetic oligonucleotide"
cagccgctgacttctgatacg

SEQ ID NO: 22772 - DNA, 21 bp, Artificial Sequence
  source: /note="Description of Artificial Sequence: Synthetic oligonucleotide"
cagcctatgcttgttgtgagt

SEQ ID NO: 22773 - DNA, 21 bp, Artificial Sequence
  source: /note="Description of Artificial Sequence: Synthetic oligonucleotide"
cagccgaatccggttgcgcat

SEQ ID NO: 22774 - DNA, 21 bp, Artificial Sequence
  source: /note="Description of Artificial Sequence: Synthetic oligonucleotide"
cagcctaattatccgtgtgct

SEQ ID NO: 22775 - DNA, 21 bp, Artificial Sequence
  source: /note="Description of Artificial Sequence: Synthetic oligonucleotide"
cagcctcctggtatgtctagt

SEQ ID NO: 22776 - DNA, 21 bp, Artificial Sequence
  source: /note="Description of Artificial Sequence: Synthetic oligonucleotide"
cagcctcctaatactgaggat

SEQ ID NO: 22777 - DNA, 21 bp, Artificial Sequence
  source: /note="Description of Artificial Sequence: Synthetic oligonucleotide"
cagcctccgcgtagtcagctg

SEQ ID NO: 22778 - DNA, 21 bp, Artificial Sequence
  source: /note="Description of Artificial Sequence: Synthetic oligonucleotide"
cagccgccttcgccgattagt

SEQ ID NO: 22779 - DNA, 21 bp, Artificial Sequence
  source: /note="Description of Artificial Sequence: Synthetic oligonucleotide"
cagccgccgtatcttagtggt

SEQ ID NO: 22780 - DNA, 21 bp, Artificial Sequence
  source: /note="Description of Artificial Sequence: Synthetic oligonucleotide"
cagccgcagggtcgggagccg

SEQ ID NO: 22781 - DNA, 21 bp, Artificial Sequence
  source: /note="Description of Artificial Sequence: Synthetic oligonucleotide"
cagccgcgtgcggaggtgcct

SEQ ID NO: 22782 - DNA, 21 bp, Artificial Sequence
  source: /note="Description of Artificial Sequence: Synthetic oligonucleotide"
cagccgcgggatgctgggagt

SEQ ID NO: 22783 - DNA, 21 bp, Artificial Sequence
  source: /note="Description of Artificial Sequence: Synthetic oligonucleotide"
cagcctcggcttttggataat

SEQ ID NO: 22784 - DNA, 21 bp, Artificial Sequence
  source: /note="Description of Artificial Sequence: Synthetic oligonucleotide"
cagcctaggactctgtcgact

SEQ ID NO: 22785 - DNA, 21 bp, Artificial Sequence
  source: /note="Description of Artificial Sequence: Synthetic oligonucleotide"
cagccgtcggctgctgctcgg

SEQ ID NO: 22786 - DNA, 21 bp, Artificial Sequence
  source: /note="Description of Artificial Sequence: Synthetic oligonucleotide"
cagcctagtcatgggacgcct

SEQ ID NO: 22787 - DNA, 21 bp, Artificial Sequence
  source: /note="Description of Artificial Sequence: Synthetic oligonucleotide"
cagccgagtcttgtgacgctt

SEQ ID NO: 22788 - DNA, 21 bp, Artificial Sequence
  source: /note="Description of Artificial Sequence: Synthetic oligonucleotide"
cagccgagtatggagcctcag

SEQ ID NO: 22789 - DNA, 21 bp, Artificial Sequence
  source: /note="Description of Artificial Sequence: Synthetic oligonucleotide"
cagccttctatgcagtctgag

SEQ ID NO: 22790 - DNA, 21 bp, Artificial Sequence
  source: /note="Description of Artificial Sequence: Synthetic oligonucleotide"
cagccttcgaatatggggcat

SEQ ID NO: 22791 - DNA, 21 bp, Artificial Sequence
  source: /note="Description of Artificial Sequence: Synthetic oligonucleotide"
cagccttctcctgggtttcat

SEQ ID NO: 22792 - DNA, 21 bp, Artificial Sequence
  source: /note="Description of Artificial Sequence: Synthetic oligonucleotide"
cagcctagttctcatcctgtg

SEQ ID NO: 22793 - DNA, 21 bp, Artificial Sequence
  source: /note="Description of Artificial Sequence: Synthetic oligonucleotide"
cagcctactgatactctgtcg

SEQ ID NO: 22794 - DNA, 21 bp, Artificial Sequence
  source: /note="Description of Artificial Sequence: Synthetic oligonucleotide"
cagcctacgcctactcctcat

SEQ ID NO: 22795 - DNA, 21 bp, Artificial Sequence
  source: /note="Description of Artificial Sequence: Synthetic oligonucleotide"
cagcctgtgaatccgatgcat

SEQ ID NO: 22796 - DNA, 21 bp, Artificial Sequence
  source: /note="Description of Artificial Sequence: Synthetic oligonucleotide"
cagcctgtgaatcctcgggtg

SEQ ID NO: 22797 - DNA, 21 bp, Artificial Sequence
  source: /note="Description of Artificial Sequence: Synthetic oligonucleotide"
cagccggttgtgacgccgaag

SEQ ID NO: 22798 - DNA, 21 bp, Artificial Sequence
  source: /note="Description of Artificial Sequence: Synthetic oligonucleotide"
cagccttattcgagtagtctt

SEQ ID NO: 22799 - DNA, 21 bp, Artificial Sequence
  source: /note="Description of Artificial Sequence: Synthetic oligonucleotide"
cagcaggctgatgcgactatt

SEQ ID NO: 22800 - DNA, 21 bp, Artificial Sequence
  source: /note="Description of Artificial Sequence: Synthetic oligonucleotide"
cagcaggcgcttagtatggct

SEQ ID NO: 22801 - DNA, 21 bp, Artificial Sequence
  source: /note="Description of Artificial Sequence: Synthetic oligonucleotide"
cagcaggctccttatcggcct

SEQ ID NO: 22802 - DNA, 21 bp, Artificial Sequence
  source: /note="Description of Artificial Sequence: Synthetic oligonucleotide"
cagcaggaggtggctcgtttg

SEQ ID NO: 22803 - DNA, 21 bp, Artificial Sequence
  source: /note="Description of Artificial Sequence: Synthetic oligonucleotide"
cagcagggtcgttgtcctgat

SEQ ID NO: 22804 - DNA, 21 bp, Artificial Sequence
  source: /note="Description of Artificial Sequence: Synthetic oligonucleotide"
cagcagattattgagtcgttg

SEQ ID NO: 22805 - DNA, 21 bp, Artificial Sequence
  source: /note="Description of Artificial Sequence: Synthetic oligonucleotide"
cagcagaagatgagttatgat

SEQ ID NO: 22806 - DNA, 21 bp, Artificial Sequence
  source: /note="Description of Artificial Sequence: Synthetic oligonucleotide"
cagcagcgtttgatgggggag

SEQ ID NO: 22807 - DNA, 21 bp, Artificial Sequence
  source: /note="Description of Artificial Sequence: Synthetic oligonucleotide"
cagcagaggcttcagatgatg

SEQ ID NO: 22808 - DNA, 21 bp, Artificial Sequence
  source: /note="Description of Artificial Sequence: Synthetic oligonucleotide"
cagcagcgtagttctctgctg

SEQ ID NO: 22809 - DNA, 21 bp, Artificial Sequence
  source: /note="Description of Artificial Sequence: Synthetic oligonucleotide"
cagcagcgtgttaatcctgag

SEQ ID NO: 22810 - DNA, 21 bp, Artificial Sequence
  source: /note="Description of Artificial Sequence: Synthetic oligonucleotide"
cagcagtctaatcagacgaag

SEQ ID NO: 22811 - DNA, 21 bp, Artificial Sequence
  source: /note="Description of Artificial Sequence: Synthetic oligonucleotide"
cagcagacggctggttcggat

SEQ ID NO: 22812 - DNA, 21 bp, Artificial Sequence
  source: /note="Description of Artificial Sequence: Synthetic oligonucleotide"
cagcagactggttatttgcct

SEQ ID NO: 22813 - DNA, 21 bp, Artificial Sequence
  source: /note="Description of Artificial Sequence: Synthetic oligonucleotide"
cagcagactcatatgggttct

SEQ ID NO: 22814 - DNA, 21 bp, Artificial Sequence
  source: /note="Description of Artificial Sequence: Synthetic oligonucleotide"
cagcagacgaagcagctgcag

SEQ ID NO: 22815 - DNA, 21 bp, Artificial Sequence
  source: /note="Description of Artificial Sequence: Synthetic oligonucleotide"
cagcagacgaagtctacggct

SEQ ID NO: 22816 - DNA, 21 bp, Artificial Sequence
  source: /note="Description of Artificial Sequence: Synthetic oligonucleotide"
cagcagacgaatgatcggaat

SEQ ID NO: 22817 - DNA, 21 bp, Artificial Sequence
  source: /note="Description of Artificial Sequence: Synthetic oligonucleotide"
cagcagacgcgtacgtcgttg

SEQ ID NO: 22818 - DNA, 21 bp, Artificial Sequence
  source: /note="Description of Artificial Sequence: Synthetic oligonucleotide"
cagcagacttcggctcgggag

SEQ ID NO: 22819 - DNA, 21 bp, Artificial Sequence
  source: /note="Description of Artificial Sequence: Synthetic oligonucleotide"
cagcaggtgaagtctggggat

SEQ ID NO: 22820 - DNA, 21 bp, Artificial Sequence
  source: /note="Description of Artificial Sequence: Synthetic oligonucleotide"
cagcgtgctccggatgggtgg

SEQ ID NO: 22821 - DNA, 21 bp, Artificial Sequence
  source: /note="Description of Artificial Sequence: Synthetic oligonucleotide"
cagcgtgcgcctgagtcgatg

SEQ ID NO: 22822 - DNA, 21 bp, Artificial Sequence
  source: /note="Description of Artificial Sequence: Synthetic oligonucleotide"
cagagggctcagcttaattcg

SEQ ID NO: 22823 - DNA, 21 bp, Artificial Sequence
  source: /note="Description of Artificial Sequence: Synthetic oligonucleotide"
cagcgtgctgttgcgcctacg

SEQ ID NO: 22824 - DNA, 21 bp, Artificial Sequence
  source: /note="Description of Artificial Sequence: Synthetic oligonucleotide"
cagcgtgctgttcaggtgtat

SEQ ID NO: 22825 - DNA, 21 bp, Artificial Sequence
  source: /note="Description of Artificial Sequence: Synthetic oligonucleotide"
cagagggatgctcgtttggat

SEQ ID NO: 22826 - DNA, 21 bp, Artificial Sequence
  source: /note="Description of Artificial Sequence: Synthetic oligonucleotide"
cagcggggtaaggaggctcat

SEQ ID NO: 22827 - DNA, 21 bp, Artificial Sequence
  source: /note="Description of Artificial Sequence: Synthetic oligonucleotide"
cagcgggggcctgggaatcag

SEQ ID NO: 22828 - DNA, 21 bp, Artificial Sequence
  source: /note="Description of Artificial Sequence: Synthetic oligonucleotide"
cagagggggccgatggagctt

SEQ ID NO: 22829 - DNA, 21 bp, Artificial Sequence
  source: /note="Description of Artificial Sequence: Synthetic oligonucleotide"
cagcggattgggccggcgttg

SEQ ID NO: 22830 - DNA, 21 bp, Artificial Sequence
  source: /note="Description of Artificial Sequence: Synthetic oligonucleotide"
cagcggattccggttgatgtt

SEQ ID NO: 22831 - DNA, 21 bp, Artificial Sequence
  source: /note="Description of Artificial Sequence: Synthetic oligonucleotide"
cagcgtttggcttcgccttct

SEQ ID NO: 22832 - DNA, 21 bp, Artificial Sequence
  source: /note="Description of Artificial Sequence: Synthetic oligonucleotide"
cagcgtttgactgctcaggag

SEQ ID NO: 22833 - DNA, 21 bp, Artificial Sequence
  source: /note="Description of Artificial Sequence: Synthetic oligonucleotide"
cagaggatggctaatatgtcg

SEQ ID NO: 22834 - DNA, 21 bp, Artificial Sequence
  source: /note="Description of Artificial Sequence: Synthetic oligonucleotide"
cagaggatgacgcaggatatg

SEQ ID NO: 22835 - DNA, 21 bp, Artificial Sequence
  source: /note="Description of Artificial Sequence: Synthetic oligonucleotide"
cagcgtaattcgaatacgttt

SEQ ID NO: 22836 - DNA, 21 bp, Artificial Sequence
  source: /note="Description of Artificial Sequence: Synthetic oligonucleotide"
cagcggccggggctgcatatg

SEQ ID NO: 22837 - DNA, 21 bp, Artificial Sequence
  source: /note="Description of Artificial Sequence: Synthetic oligonucleotide"
cagcgtccgttggggggtttg

SEQ ID NO: 22838 - DNA, 21 bp, Artificial Sequence
  source: /note="Description of Artificial Sequence: Synthetic oligonucleotide"
cagcgtcctcctagtgttgat

SEQ ID NO: 22839 - DNA, 21 bp, Artificial Sequence
  source: /note="Description of Artificial Sequence: Synthetic oligonucleotide"
cagcgtccgactgatcggacg

SEQ ID NO: 22840 - DNA, 21 bp, Artificial Sequence
  source: /note="Description of Artificial Sequence: Synthetic oligonucleotide"
cagcgtcagcctgttttggat

SEQ ID NO: 22841 - DNA, 21 bp, Artificial Sequence
  source: /note="Description of Artificial Sequence: Synthetic oligonucleotide"
cagaggcagagggatcttcct

SEQ ID NO: 22842 - DNA, 21 bp, Artificial Sequence
  source: /note="Description of Artificial Sequence: Synthetic oligonucleotide"
cagaggtcggcgaatgtggcg

SEQ ID NO: 22843 - DNA, 21 bp, Artificial Sequence
  source: /note="Description of Artificial Sequence: Synthetic oligonucleotide"
cagcgttcgcatatgaatccg

SEQ ID NO: 22844 - DNA, 21 bp, Artificial Sequence
  source: /note="Description of Artificial Sequence: Synthetic oligonucleotide"
cagcggtcttctggtacgcct

SEQ ID NO: 22845 - DNA, 21 bp, Artificial Sequence
  source: /note="Description of Artificial Sequence: Synthetic oligonucleotide"
cagcggtcgactaatttgaat

SEQ ID NO: 22846 - DNA, 21 bp, Artificial Sequence
  source: /note="Description of Artificial Sequence: Synthetic oligonucleotide"
cagcggactgtgcatcagggt

SEQ ID NO: 22847 - DNA, 21 bp, Artificial Sequence
  source: /note="Description of Artificial Sequence: Synthetic oligonucleotide"
cagaggactgttcggggtgag

SEQ ID NO: 22848 - DNA, 21 bp, Artificial Sequence
  source: /note="Description of Artificial Sequence: Synthetic oligonucleotide"
cagcgtgtgaattctagtggt

SEQ ID NO: 22849 - DNA, 21 bp, Artificial Sequence
  source: /note="Description of Artificial Sequence: Synthetic oligonucleotide"
cagtcggctgatcttgattat

SEQ ID NO: 22850 - DNA, 21 bp, Artificial Sequence
  source: /note="Description of Artificial Sequence: Synthetic oligonucleotide"
cagtcggcggaggcggaggcg

SEQ ID NO: 22851 - DNA, 21 bp, Artificial Sequence
  source: /note="Description of Artificial Sequence: Synthetic oligonucleotide"
cagagtgctcatccggctacg

SEQ ID NO: 22852 - DNA, 21 bp, Artificial Sequence
  source: /note="Description of Artificial Sequence: Synthetic oligonucleotide"
cagtctgctccggttcgtgtt

SEQ ID NO: 22853 - DNA, 21 bp, Artificial Sequence
  source: /note="Description of Artificial Sequence: Synthetic oligonucleotide"
cagagtgcttcggctcttcag

SEQ ID NO: 22854 - DNA, 21 bp, Artificial Sequence
  source: /note="Description of Artificial Sequence: Synthetic oligonucleotide"
cagtcggcgtctgtgatgaat

SEQ ID NO: 22855 - DNA, 21 bp, Artificial Sequence
  source: /note="Description of Artificial Sequence: Synthetic oligonucleotide"
cagtcggctgttttggagtat

SEQ ID NO: 22856 - DNA, 21 bp, Artificial Sequence
  source: /note="Description of Artificial Sequence: Synthetic oligonucleotide"
cagtctgatgattggccggtg

SEQ ID NO: 22857 - DNA, 21 bp, Artificial Sequence
  source: /note="Description of Artificial Sequence: Synthetic oligonucleotide"
cagagtgatattcgtaatccg

SEQ ID NO: 22858 - DNA, 21 bp, Artificial Sequence
  source: /note="Description of Artificial Sequence: Synthetic oligonucleotide"
cagtctgattgggtgccggtt

SEQ ID NO: 22859 - DNA, 21 bp, Artificial Sequence
  source: /note="Description of Artificial Sequence: Synthetic oligonucleotide"
cagtctgagaaggggacttat

SEQ ID NO: 22860 - DNA, 21 bp, Artificial Sequence
  source: /note="Description of Artificial Sequence: Synthetic oligonucleotide"
cagtctgagatgatggatgcg

SEQ ID NO: 22861 - DNA, 21 bp, Artificial Sequence
  source: /note="Description of Artificial Sequence: Synthetic oligonucleotide"
cagtctgagcgtgcgactgtg

SEQ ID NO: 22862 - DNA, 21 bp, Artificial Sequence
  source: /note="Description of Artificial Sequence: Synthetic oligonucleotide"
cagtcgtttcatcatgagcgg

SEQ ID NO: 22863 - DNA, 21 bp, Artificial Sequence
  source: /note="Description of Artificial Sequence: Synthetic oligonucleotide"
cagtcgtttccgctgcaggcg

SEQ ID NO: 22864 - DNA, 21 bp, Artificial Sequence
  source: /note="Description of Artificial Sequence: Synthetic oligonucleotide"
cagtcggggcaggggatgtat

SEQ ID NO: 22865 - DNA, 21 bp, Artificial Sequence
  source: /note="Description of Artificial Sequence: Synthetic oligonucleotide"
cagagtgggcggtggcattgg

SEQ ID NO: 22866 - DNA, 21 bp, Artificial Sequence
  source: /note="Description of Artificial Sequence: Synthetic oligonucleotide"
cagtctggttcgtctgcgcgt

SEQ ID NO: 22867 - DNA, 21 bp, Artificial Sequence
  source: /note="Description of Artificial Sequence: Synthetic oligonucleotide"
cagagtcatccttttaatgat

SEQ ID NO: 22868 - DNA, 21 bp, Artificial Sequence
  source: /note="Description of Artificial Sequence: Synthetic oligonucleotide"
cagagtcatacgcagggtagt

SEQ ID NO: 22869 - DNA, 21 bp, Artificial Sequence
  source: /note="Description of Artificial Sequence: Synthetic oligonucleotide"
cagtctattgcggttacgatt

SEQ ID NO: 22870 - DNA, 21 bp, Artificial Sequence
  source: /note="Description of Artificial Sequence: Synthetic oligonucleotide"
cagtctattgtgattgcgcat

SEQ ID NO: 22871 - DNA, 21 bp, Artificial Sequence
  source: /note="Description of Artificial Sequence: Synthetic oligonucleotide"
cagagtaagctggcgagtctt

SEQ ID NO: 22872 - DNA, 21 bp, Artificial Sequence
  source: /note="Description of Artificial Sequence: Synthetic oligonucleotide"
cagagtaagctttatttggag

SEQ ID NO: 22873 - DNA, 21 bp, Artificial Sequence
  source: /note="Description of Artificial Sequence: Synthetic oligonucleotide"
cagtcgaagatgccgaattgg

SEQ ID NO: 22874 - DNA, 21 bp, Artificial Sequence
  source: /note="Description of Artificial Sequence: Synthetic oligonucleotide"
cagagtctgaatgatctgaag

SEQ ID NO: 22875 - DNA, 21 bp, Artificial Sequence
  source: /note="Description of Artificial Sequence: Synthetic oligonucleotide"
cagagtatgtcgtctacgttg

SEQ ID NO: 22876 - DNA, 21 bp, Artificial Sequence
  source: /note="Description of Artificial Sequence: Synthetic oligonucleotide"
cagtctaatcaggatcgtcag

SEQ ID NO: 22877 - DNA, 21 bp, Artificial Sequence
  source: /note="Description of Artificial Sequence: Synthetic oligonucleotide"
cagagtaattcgagtaatact

SEQ ID NO: 22878 - DNA, 21 bp, Artificial Sequence
  source: /note="Description of Artificial Sequence: Synthetic oligonucleotide"
cagtctcctggtcatccgagt

SEQ ID NO: 22879 - DNA, 21 bp, Artificial Sequence
  source: /note="Description of Artificial Sequence: Synthetic oligonucleotide"
cagagtcctaaggagtgttat

SEQ ID NO: 22880 - DNA, 21 bp, Artificial Sequence
  source: /note="Description of Artificial Sequence: Synthetic oligonucleotide"
cagtcgccgctttatgcgtcg

SEQ ID NO: 22881 - DNA, 21 bp, Artificial Sequence
  source: /note="Description of Artificial Sequence: Synthetic oligonucleotide"
cagtctccgaatttgccgctg

SEQ ID NO: 22882 - DNA, 21 bp, Artificial Sequence
  source: /note="Description of Artificial Sequence: Synthetic oligonucleotide"
cagagtccgcctagtactgat

SEQ ID NO: 22883 - DNA, 21 bp, Artificial Sequence
  source: /note="Description of Artificial Sequence: Synthetic oligonucleotide"
cagtcgccgcggaattatgtt

SEQ ID NO: 22884 - DNA, 21 bp, Artificial Sequence
  source: /note="Description of Artificial Sequence: Synthetic oligonucleotide"
cagtctcctactaatgatatg

SEQ ID NO: 22885 - DNA, 21 bp, Artificial Sequence
  source: /note="Description of Artificial Sequence: Synthetic oligonucleotide"
cagagtcaggcgccgcatggt

SEQ ID NO: 22886 - DNA, 21 bp, Artificial Sequence
  source: /note="Description of Artificial Sequence: Synthetic oligonucleotide"
cagtctcgtgatattcctacg

SEQ ID NO: 22887 - DNA, 21 bp, Artificial Sequence
  source: /note="Description of Artificial Sequence: Synthetic oligonucleotide"
cagagtcgtggggcgttgcct

SEQ ID NO: 22888 - DNA, 21 bp, Artificial Sequence
  source: /note="Description of Artificial Sequence: Synthetic oligonucleotide"
cagagtcggcttgggagtttt

SEQ ID NO: 22889 - DNA, 21 bp, Artificial Sequence
  source: /note="Description of Artificial Sequence: Synthetic oligonucleotide"
cagagtcgtacgatgacgccg

SEQ ID NO: 22890 - DNA, 21 bp, Artificial Sequence
  source: /note="Description of Artificial Sequence: Synthetic oligonucleotide"
cagtctcgtactccttctcct

SEQ ID NO: 22891 - DNA, 21 bp, Artificial Sequence
  source: /note="Description of Artificial Sequence: Synthetic oligonucleotide"
cagtcgtctgcgatttcttat

SEQ ID NO: 22892 - DNA, 21 bp, Artificial Sequence
  source: /note="Description of Artificial Sequence: Synthetic oligonucleotide"
cagtcgagtgcgcgtggtatg

SEQ ID NO: 22893 - DNA, 21 bp, Artificial Sequence
  source: /note="Description of Artificial Sequence: Synthetic oligonucleotide"
cagtcgagtgcgactcgtaat

SEQ ID NO: 22894 - DNA, 21 bp, Artificial Sequence
  source: /note="Description of Artificial Sequence: Synthetic oligonucleotide"
cagtctagtgctgttttgact

SEQ ID NO: 22895 - DNA, 21 bp, Artificial Sequence
  source: /note="Description of Artificial Sequence: Synthetic oligonucleotide"
cagtcgtcggatacgggggag

SEQ ID NO: 22896 - DNA, 21 bp, Artificial Sequence
  source: /note="Description of Artificial Sequence: Synthetic oligonucleotide"
cagagttctggtcagacggtt

SEQ ID NO: 22897 - DNA, 21 bp, Artificial Sequence
  source: /note="Description of Artificial Sequence: Synthetic oligonucleotide"
cagagtagtaagattgtgtat

SEQ ID NO: 22898 - DNA, 21 bp, Artificial Sequence
  source: /note="Description of Artificial Sequence: Synthetic oligonucleotide"
cagtcttctctttcgttgtcg

SEQ ID NO: 22899 - DNA, 21 bp, Artificial Sequence
  source: /note="Description of Artificial Sequence: Synthetic oligonucleotide"
cagtcgtctatgccgcagact

SEQ ID NO: 22900 - DNA, 21 bp, Artificial Sequence
  source: /note="Description of Artificial Sequence: Synthetic oligonucleotide"
cagtcttcgaattttcagtcg

SEQ ID NO: 22901 - DNA, 21 bp, Artificial Sequence
  source: /note="Description of Artificial Sequence: Synthetic oligonucleotide"
cagtcttctagggctatgggt

SEQ ID NO: 22902 - DNA, 21 bp, Artificial Sequence
  source: /note="Description of Artificial Sequence: Synthetic oligonucleotide"
cagtcgagtaggccgtcgcct

SEQ ID NO: 22903 - DNA, 21 bp, Artificial Sequence
  source: /note="Description of Artificial Sequence: Synthetic oligonucleotide"
cagtcgagtactttgcagtcg

SEQ ID NO: 22904 - DNA, 21 bp, Artificial Sequence
  source: /note="Description of Artificial Sequence: Synthetic oligonucleotide"
cagagtacggatcagaaggat

SEQ ID NO: 22905 - DNA, 21 bp, Artificial Sequence
  source: /note="Description of Artificial Sequence: Synthetic oligonucleotide"
cagtctacgggtgctttgcgt

SEQ ID NO: 22906 - DNA, 21 bp, Artificial Sequence
  source: /note="Description of Artificial Sequence: Synthetic oligonucleotide"
cagtctactaatgagagttcg

SEQ ID NO: 22907 - DNA, 21 bp, Artificial Sequence
  source: /note="Description of Artificial Sequence: Synthetic oligonucleotide"
cagagtacgcagctggatcat

SEQ ID NO: 22908 - DNA, 21 bp, Artificial Sequence
  source: /note="Description of Artificial Sequence: Synthetic oligonucleotide"
cagagtacgcagagtgataag

SEQ ID NO: 22909 - DNA, 21 bp, Artificial Sequence
  source: /note="Description of Artificial Sequence: Synthetic oligonucleotide"
cagtctactactaggcatcct

SEQ ID NO: 22910 - DNA, 21 bp, Artificial Sequence
  source: /note="Description of Artificial Sequence: Synthetic oligonucleotide"
cagtcgactgtgacggttcgg

SEQ ID NO: 22911 - DNA, 21 bp, Artificial Sequence
  source: /note="Description of Artificial Sequence: Synthetic oligonucleotide"
cagagtgtgcatagtcctctt

SEQ ID NO: 22912 - DNA, 21 bp, Artificial Sequence
  source: /note="Description of Artificial Sequence: Synthetic oligonucleotide"
cagtcggtgaagtatgatcgt

SEQ ID NO: 22913 - DNA, 21 bp, Artificial Sequence
  source: /note="Description of Artificial Sequence: Synthetic oligonucleotide"
cagtctgtgatgacggctccg

SEQ ID NO: 22914 - DNA, 21 bp, Artificial Sequence
  source: /note="Description of Artificial Sequence: Synthetic oligonucleotide"
cagagtgttaatgcggagctt

SEQ ID NO: 22915 - DNA, 21 bp, Artificial Sequence
  source: /note="Description of Artificial Sequence: Synthetic oligonucleotide"
cagtcggttccgctggctagt

SEQ ID NO: 22916 - DNA, 21 bp, Artificial Sequence
  source: /note="Description of Artificial Sequence: Synthetic oligonucleotide"
cagtcttatgaggcgcggggg

SEQ ID NO: 22917 - DNA, 21 bp, Artificial Sequence
  source: /note="Description of Artificial Sequence: Synthetic oligonucleotide"
cagagttataatgggctgggt

SEQ ID NO: 22918 - DNA, 21 bp, Artificial Sequence
  source: /note="Description of Artificial Sequence: Synthetic oligonucleotide"
cagacggcggggaggcttgct

SEQ ID NO: 22919 - DNA, 21 bp, Artificial Sequence
  source: /note="Description of Artificial Sequence: Synthetic oligonucleotide"
cagactgctaataagccggtg

SEQ ID NO: 22920 - DNA, 21 bp, Artificial Sequence
  source: /note="Description of Artificial Sequence: Synthetic oligonucleotide"
cagacggatggtgctaaggat

SEQ ID NO: 22921 - DNA, 21 bp, Artificial Sequence
  source: /note="Description of Artificial Sequence: Synthetic oligonucleotide"
cagacggatagggcgtatgtt

SEQ ID NO: 22922 - DNA, 21 bp, Artificial Sequence
  source: /note="Description of Artificial Sequence: Synthetic oligonucleotide"
cagactgatgtggatgatatg

SEQ ID NO: 22923 - DNA, 21 bp, Artificial Sequence
  source: /note="Description of Artificial Sequence: Synthetic oligonucleotide"
cagacttttgggggtccgggt

SEQ ID NO: 22924 - DNA, 21 bp, Artificial Sequence
  source: /note="Description of Artificial Sequence: Synthetic oligonucleotide"
cagacgggtgggcgttcgcct

SEQ ID NO: 22925 - DNA, 21 bp, Artificial Sequence
  source: /note="Description of Artificial Sequence: Synthetic oligonucleotide"
cagacgggtcttaatcaggat

SEQ ID NO: 22926 - DNA, 21 bp, Artificial Sequence
  source: /note="Description of Artificial Sequence: Synthetic oligonucleotide"
cagacgggtcctactcgtgat

SEQ ID NO: 22927 - DNA, 21 bp, Artificial Sequence
  source: /note="Description of Artificial Sequence: Synthetic oligonucleotide"
cagacggggcgtgagcctatg

SEQ ID NO: 22928 - DNA, 21 bp, Artificial Sequence
  source: /note="Description of Artificial Sequence: Synthetic oligonucleotide"
cagactggttcttcttatagt

SEQ ID NO: 22929 - DNA, 21 bp, Artificial Sequence
  source: /note="Description of Artificial Sequence: Synthetic oligonucleotide"
cagacgattcggacggaggat

SEQ ID NO: 22930 - DNA, 21 bp, Artificial Sequence
  source: /note="Description of Artificial Sequence: Synthetic oligonucleotide"
cagacgatttctaaggatccg

SEQ ID NO: 22931 - DNA, 21 bp, Artificial Sequence
  source: /note="Description of Artificial Sequence: Synthetic oligonucleotide"
cagacgaagcatggtgagagt

SEQ ID NO: 22932 - DNA, 21 bp, Artificial Sequence
  source: /note="Description of Artificial Sequence: Synthetic oligonucleotide"
cagacgaagaatacgcatcct

SEQ ID NO: 22933 - DNA, 21 bp, Artificial Sequence
  source: /note="Description of Artificial Sequence: Synthetic oligonucleotide"
cagactaagtctctgattcct

SEQ ID NO: 22934 - DNA, 21 bp, Artificial Sequence
  source: /note="Description of Artificial Sequence: Synthetic oligonucleotide"
cagacgctgcagcatgcgact

SEQ ID NO: 22935 - DNA, 21 bp, Artificial Sequence
  source: /note="Description of Artificial Sequence: Synthetic oligonucleotide"
cagacgctttcggggatgcgt

SEQ ID NO: 22936 - DNA, 21 bp, Artificial Sequence
  source: /note="Description of Artificial Sequence: Synthetic oligonucleotide"
cagactatgatgcctgtgccg

SEQ ID NO: 22937 - DNA, 21 bp, Artificial Sequence
  source: /note="Description of Artificial Sequence: Synthetic oligonucleotide"
cagactatgcggtctgctggt

SEQ ID NO: 22938 - DNA, 21 bp, Artificial Sequence
  source: /note="Description of Artificial Sequence: Synthetic oligonucleotide"
cagactaatatgcagtctcct

SEQ ID NO: 22939 - DNA, 21 bp, Artificial Sequence
  source: /note="Description of Artificial Sequence: Synthetic oligonucleotide"
cagactaatcctaatatggtt

SEQ ID NO: 22940 - DNA, 21 bp, Artificial Sequence
  source: /note="Description of Artificial Sequence: Synthetic oligonucleotide"
cagacgaatactgcgacgaag

SEQ ID NO: 22941 - DNA, 21 bp, Artificial Sequence
  source: /note="Description of Artificial Sequence: Synthetic oligonucleotide"
cagactcctccttcggcggcg

SEQ ID NO: 22942 - DNA, 21 bp, Artificial Sequence
  source: /note="Description of Artificial Sequence: Synthetic oligonucleotide"
cagactcctcctacgaatcgt

SEQ ID NO: 22943 - DNA, 21 bp, Artificial Sequence
  source: /note="Description of Artificial Sequence: Synthetic oligonucleotide"
cagacgccgcgtgttattcag

SEQ ID NO: 22944 - DNA, 21 bp, Artificial Sequence
  source: /note="Description of Artificial Sequence: Synthetic oligonucleotide"
cagacgccttcgatgactcgt

SEQ ID NO: 22945 - DNA, 21 bp, Artificial Sequence
  source: /note="Description of Artificial Sequence: Synthetic oligonucleotide"
cagactccgtcttatcttggt

SEQ ID NO: 22946 - DNA, 21 bp, Artificial Sequence
  source: /note="Description of Artificial Sequence: Synthetic oligonucleotide"
cagactcagattagggtgggt

SEQ ID NO: 22947 - DNA, 21 bp, Artificial Sequence
  source: /note="Description of Artificial Sequence: Synthetic oligonucleotide"
cagactcagcctcagtcgtct

SEQ ID NO: 22948 - DNA, 21 bp, Artificial Sequence
  source: /note="Description of Artificial Sequence: Synthetic oligonucleotide"
cagacgcagagtttgtatcct

SEQ ID NO: 22949 - DNA, 21 bp, Artificial Sequence
  source: /note="Description of Artificial Sequence: Synthetic oligonucleotide"
cagactcagtcgcctgttcct

SEQ ID NO: 22950 - DNA, 21 bp, Artificial Sequence
  source: /note="Description of Artificial Sequence: Synthetic oligonucleotide"
cagactcaggttagttatggt

SEQ ID NO: 22951 - DNA, 21 bp, Artificial Sequence
  source: /note="Description of Artificial Sequence: Synthetic oligonucleotide"
cagactaggcatgatctgctt

SEQ ID NO: 22952 - DNA, 21 bp, Artificial Sequence
  source: /note="Description of Artificial Sequence: Synthetic oligonucleotide"
cagacgaggttggctcagcat

SEQ ID NO: 22953 - DNA, 21 bp, Artificial Sequence
  source: /note="Description of Artificial Sequence: Synthetic oligonucleotide"
cagacgcggctgccggcttcg

SEQ ID NO: 22954 - DNA, 21 bp, Artificial Sequence
  source: /note="Description of Artificial Sequence: Synthetic oligonucleotide"
cagacttcggctgcgcgggtg

SEQ ID NO: 22955 - DNA, 21 bp, Artificial Sequence
  source: /note="Description of Artificial Sequence: Synthetic oligonucleotide"
cagacttctcctggggttatg

SEQ ID NO: 22956 - DNA, 21 bp, Artificial Sequence
  source: /note="Description of Artificial Sequence: Synthetic oligonucleotide"
cagacgagtacggataatgct

SEQ ID NO: 22957 - DNA, 21 bp, Artificial Sequence
  source: /note="Description of Artificial Sequence: Synthetic oligonucleotide"
cagactagtgttcatcttaag

SEQ ID NO: 22958 - DNA, 21 bp, Artificial Sequence
  source: /note="Description of Artificial Sequence: Synthetic oligonucleotide"
cagactacggctagggcgcag

SEQ ID NO: 22959 - DNA, 21 bp, Artificial Sequence
  source: /note="Description of Artificial Sequence: Synthetic oligonucleotide"
cagactgtgcatgcgtttggt

SEQ ID NO: 22960 - DNA, 21 bp, Artificial Sequence
  source: /note="Description of Artificial Sequence: Synthetic oligonucleotide"
cagactgtgcggcttacttcg

SEQ ID NO: 22961 - DNA, 21 bp, Artificial Sequence
  source: /note="Description of Artificial Sequence: Synthetic oligonucleotide"
cagactgtttctgcgcttggt

SEQ ID NO: 22962 - DNA, 21 bp, Artificial Sequence
  source: /note="Description of Artificial Sequence: Synthetic oligonucleotide"
cagacttatgatcctgctagt

SEQ ID NO: 22963 - DNA, 21 bp, Artificial Sequence
  source: /note="Description of Artificial Sequence: Synthetic oligonucleotide"
cagacttatcatacgctggag

SEQ ID NO: 22964 - DNA, 21 bp, Artificial Sequence
  source: /note="Description of Artificial Sequence: Synthetic oligonucleotide"
cagacttatccgacgatggag

SEQ ID NO: 22965 - DNA, 21 bp, Artificial Sequence
  source: /note="Description of Artificial Sequence: Synthetic oligonucleotide"
caggttgctggtatgaagttt

SEQ ID NO: 22966 - DNA, 21 bp, Artificial Sequence
  source: /note="Description of Artificial Sequence: Synthetic oligonucleotide"
caggttgcttctccttatcgg

SEQ ID NO: 22967 - DNA, 21 bp, Artificial Sequence
  source: /note="Description of Artificial Sequence: Synthetic oligonucleotide"
caggttgatcgttctcctcat

SEQ ID NO: 22968 - DNA, 21 bp, Artificial Sequence
  source: /note="Description of Artificial Sequence: Synthetic oligonucleotide"
caggttgagcatgggcagact

SEQ ID NO: 22969 - DNA, 21 bp, Artificial Sequence
  source: /note="Description of Artificial Sequence: Synthetic oligonucleotide"
caggtggagcgtgaggcttgg

SEQ ID NO: 22970 - DNA, 21 bp, Artificial Sequence
  source: /note="Description of Artificial Sequence: Synthetic oligonucleotide"
caggttggtggtcgtgctttt

SEQ ID NO: 22971 - DNA, 21 bp, Artificial Sequence
  source: /note="Description of Artificial Sequence: Synthetic oligonucleotide"
caggtgggtaaggttacgttg

SEQ ID NO: 22972 - DNA, 21 bp, Artificial Sequence
  source: /note="Description of Artificial Sequence: Synthetic oligonucleotide"
caggtgggtgtgaagaatggg

SEQ ID NO: 22973 - DNA, 21 bp, Artificial Sequence
  source: /note="Description of Artificial Sequence: Synthetic oligonucleotide"
caggttctgaatgggagggag

SEQ ID NO: 22974 - DNA, 21 bp, Artificial Sequence
  source: /note="Description of Artificial Sequence: Synthetic oligonucleotide"
caggtgatgccgaatgtgtcg

SEQ ID NO: 22975 - DNA, 21 bp, Artificial Sequence
  source: /note="Description of Artificial Sequence: Synthetic oligonucleotide"
caggttccgtttccggcggat

SEQ ID NO: 22976 - DNA, 21 bp, Artificial Sequence
  source: /note="Description of Artificial Sequence: Synthetic oligonucleotide"
caggttcctctgtctttggag

SEQ ID NO: 22977 - DNA, 21 bp, Artificial Sequence
  source: /note="Description of Artificial Sequence: Synthetic oligonucleotide"
caggttccgtatgctccggcg

SEQ ID NO: 22978 - DNA, 21 bp, Artificial Sequence
  source: /note="Description of Artificial Sequence: Synthetic oligonucleotide"
caggtgcagcctgtgcatatt

SEQ ID NO: 22979 - DNA, 21 bp, Artificial Sequence
  source: /note="Description of Artificial Sequence: Synthetic oligonucleotide"
caggttcgtgctgctgtgact

SEQ ID NO: 22980 - DNA, 21 bp, Artificial Sequence
  source: /note="Description of Artificial Sequence: Synthetic oligonucleotide"
caggtgagggattcttattcg

SEQ ID NO: 22981 - DNA, 21 bp, Artificial Sequence
  source: /note="Description of Artificial Sequence: Synthetic oligonucleotide"
caggtgcgtgagcctgctatt

SEQ ID NO: 22982 - DNA, 21 bp, Artificial Sequence
  source: /note="Description of Artificial Sequence: Synthetic oligonucleotide"
caggtgcgtgagtcgtcttcg

SEQ ID NO: 22983 - DNA, 21 bp, Artificial Sequence
  source: /note="Description of Artificial Sequence: Synthetic oligonucleotide"
caggttcgtctggagccgagt

SEQ ID NO: 22984 - DNA, 21 bp, Artificial Sequence
  source: /note="Description of Artificial Sequence: Synthetic oligonucleotide"
caggttcggccggggcttctt

SEQ ID NO: 22985 - DNA, 21 bp, Artificial Sequence
  source: /note="Description of Artificial Sequence: Synthetic oligonucleotide"
caggtgtctcatcgggatagt

SEQ ID NO: 22986 - DNA, 21 bp, Artificial Sequence
  source: /note="Description of Artificial Sequence: Synthetic oligonucleotide"
caggtgtcgcttggtagtgtt

SEQ ID NO: 22987 - DNA, 21 bp, Artificial Sequence
  source: /note="Description of Artificial Sequence: Synthetic oligonucleotide"
caggtgtctccgagtcttaat

SEQ ID NO: 22988 - DNA, 21 bp, Artificial Sequence
  source: /note="Description of Artificial Sequence: Synthetic oligonucleotide"
caggtgtcttctcctgttcct

SEQ ID NO: 22989 - DNA, 21 bp, Artificial Sequence
  source: /note="Description of Artificial Sequence: Synthetic oligonucleotide"
caggtgactaagtctcatact

SEQ ID NO: 22990 - DNA, 21 bp, Artificial Sequence
  source: /note="Description of Artificial Sequence: Synthetic oligonucleotide"
caggttgtggcgtcgttgggg

SEQ ID NO: 22991 - DNA, 21 bp, Artificial Sequence
  source: /note="Description of Artificial Sequence: Synthetic oligonucleotide"
caggttgttcctcatcaggag

SEQ ID NO: 22992 - DNA, 21 bp, Artificial Sequence
  source: /note="Description of Artificial Sequence: Synthetic oligonucleotide"
caggttgtgcggtcgagttcg

SEQ ID NO: 22993 - DNA, 21 bp, Artificial Sequence
  source: /note="Description of Artificial Sequence: Synthetic oligonucleotide"
caggtttatactaatcagtat

SEQ ID NO: 22994 - DNA, 21 bp, Artificial Sequence
  source: /note="Description of Artificial Sequence: Synthetic oligonucleotide"
cagtgggcgaatactggtgag

SEQ ID NO: 22995 - DNA, 21 bp, Artificial Sequence
  source: /note="Description of Artificial Sequence: Synthetic oligonucleotide"
cagtgggaggatcattcgacg

SEQ ID NO: 22996 - DNA, 21 bp, Artificial Sequence
  source: /note="Description of Artificial Sequence: Synthetic oligonucleotide"
cagtatggggatgggcctaag

SEQ ID NO: 22997 - DNA, 21 bp, Artificial Sequence
  source: /note="Description of Artificial Sequence: Synthetic oligonucleotide"
cagtatggtcagcagcattct

SEQ ID NO: 22998 - DNA, 21 bp, Artificial Sequence
  source: /note="Description of Artificial Sequence: Synthetic oligonucleotide"
cagtatggtagtgttcatggg

SEQ ID NO: 22999 - DNA, 21 bp, Artificial Sequence
  source: /note="Description of Artificial Sequence: Synthetic oligonucleotide"
cagtatcatgctagtgggaag

SEQ ID NO: 23000 - DNA, 21 bp, Artificial Sequence
  source: /note="Description of Artificial Sequence: Synthetic oligonucleotide"
cagtataagcgggcggagctt

SEQ ID NO: 23001 - DNA, 21 bp, Artificial Sequence
  source: /note="Description of Artificial Sequence: Synthetic oligonucleotide"
cagtataagactgatatgact

SEQ ID NO: 23002 - DNA, 21 bp, Artificial Sequence
  source: /note="Description of Artificial Sequence: Synthetic oligonucleotide"
cagtataagactggggcgcag

SEQ ID NO: 23003 - DNA, 21 bp, Artificial Sequence
  source: /note="Description of Artificial Sequence: Synthetic oligonucleotide"
cagtatctggcgactcatggg

SEQ ID NO: 23004 - DNA, 21 bp, Artificial Sequence
  source: /note="Description of Artificial Sequence: Synthetic oligonucleotide"
cagtatcctaattctgatacg

SEQ ID NO: 23005 - DNA, 21 bp, Artificial Sequence
  source: /note="Description of Artificial Sequence: Synthetic oligonucleotide"
cagtatccggtttcgccgtcg

SEQ ID NO: 23006 - DNA, 21 bp, Artificial Sequence
  source: /note="Description of Artificial Sequence: Synthetic oligonucleotide"
cagtatactgcttcgaattct

SEQ ID NO: 23007 - DNA, 21 bp, Artificial Sequence
  source: /note="Description of Artificial Sequence: Synthetic oligonucleotide"
cagtatactgggactcagaag

SEQ ID NO: 23008 - DNA, 21 bp, Artificial Sequence
  source: /note="Description of Artificial Sequence: Synthetic oligonucleotide"
cagtatactgttctgacggag

SEQ ID NO: 23009 - DNA, 21 bp, Artificial Sequence
  source: /note="Description of Artificial Sequence: Synthetic oligonucleotide"
cagtatgttggtattgggact

SEQ ID NO: 23010 - DNA, 21 bp, Artificial Sequence
  source: /note="Description of Artificial Sequence: Synthetic oligonucleotide"
agggctgcggcttatggggct

SEQ ID NO: 23011 - DNA, 21 bp, Artificial Sequence
  source: /note="Description of Artificial Sequence: Synthetic oligonucleotide"
cgtgcggctatgatgaatcct

SEQ ID NO: 23012 - DNA, 21 bp, Artificial Sequence
  source: /note="Description of Artificial Sequence: Synthetic oligonucleotide"
agggctgctatggttgcggtt

SEQ ID NO: 23013 - DNA, 21 bp, Artificial Sequence
  source: /note="Description of Artificial Sequence: Synthetic oligonucleotide"
cgggcggcgaatgattttccg

SEQ ID NO: 23014 - DNA, 21 bp, Artificial Sequence
  source: /note="Description of Artificial Sequence: Synthetic oligonucleotide"
agggctgcgcctacgtcgagt

SEQ ID NO: 23015 - DNA, 21 bp, Artificial Sequence
  source: /note="Description of Artificial Sequence: Synthetic oligonucleotide"
cgtgctgctactgtgcctaat

SEQ ID NO: 23016 - DNA, 21 bp, Artificial Sequence
  source: /note="Description of Artificial Sequence: Synthetic oligonucleotide"
cgggcggataagggtccgtct

SEQ ID NO: 23017 - DNA, 21 bp, Artificial Sequence
  source: /note="Description of Artificial Sequence: Synthetic oligonucleotide"
agggcggatccgaggcctggg

SEQ ID NO: 23018 - DNA, 21 bp, Artificial Sequence
  source: /note="Description of Artificial Sequence: Synthetic oligonucleotide"
cgggctgatagggcgacgtat

SEQ ID NO: 23019 - DNA, 21 bp, Artificial Sequence
  source: /note="Description of Artificial Sequence: Synthetic oligonucleotide"
cgtgctgatgttcctcctgtt

SEQ ID NO: 23020 - DNA, 21 bp, Artificial Sequence
  source: /note="Description of Artificial Sequence: Synthetic oligonucleotide"
agggctgattatcatcataat

SEQ ID NO: 23021 - DNA, 21 bp, Artificial Sequence
  source: /note="Description of Artificial Sequence: Synthetic oligonucleotide"
cgtgctgaggcggtttgggat

SEQ ID NO: 23022 - DNA, 21 bp, Artificial Sequence
  source: /note="Description of Artificial Sequence: Synthetic oligonucleotide"
cgggcggagaatatttcgagg

SEQ ID NO: 23023 - DNA, 21 bp, Artificial Sequence
  source: /note="Description of Artificial Sequence: Synthetic oligonucleotide"
agggctgagagtttgcttggt

SEQ ID NO: 23024 - DNA, 21 bp, Artificial Sequence
  source: /note="Description of Artificial Sequence: Synthetic oligonucleotide"
cgtgctgaggtgttgtatacg

SEQ ID NO: 23025 - DNA, 21 bp, Artificial Sequence
  source: /note="Description of Artificial Sequence: Synthetic oligonucleotide"
cgtgcggagtatcagtctccg

SEQ ID NO: 23026 - DNA, 21 bp, Artificial Sequence
  source: /note="Description of Artificial Sequence: Synthetic oligonucleotide"
cgtgcttttggtcagtcgcct

SEQ ID NO: 23027 - DNA, 21 bp, Artificial Sequence
  source: /note="Description of Artificial Sequence: Synthetic oligonucleotide"
cgggcgtttccgaatgatagt

SEQ ID NO: 23028 - DNA, 21 bp, Artificial Sequence
  source: /note="Description of Artificial Sequence: Synthetic oligonucleotide"
cgtgctttttctcaggcggag

SEQ ID NO: 23029 - DNA, 21 bp, Artificial Sequence
  source: /note="Description of Artificial Sequence: Synthetic oligonucleotide"
cgtgctgggctgtctccgaat

SEQ ID NO: 23030 - DNA, 21 bp, Artificial Sequence
  source: /note="Description of Artificial Sequence: Synthetic oligonucleotide"
agggctgggcctgtgagtact

SEQ ID NO: 23031 - DNA, 21 bp, Artificial Sequence
  source: /note="Description of Artificial Sequence: Synthetic oligonucleotide"
cgggctggttcttatgagtct

SEQ ID NO: 23032 - DNA, 21 bp, Artificial Sequence
  source: /note="Description of Artificial Sequence: Synthetic oligonucleotide"
agggctggtgttcagtgtatt

SEQ ID NO: 23033 - DNA, 21 bp, Artificial Sequence
  source: /note="Description of Artificial Sequence: Synthetic oligonucleotide"
agggcgcatgggagtggtgct

SEQ ID NO: 23034 - DNA, 21 bp, Artificial Sequence
  source: /note="Description of Artificial Sequence: Synthetic oligonucleotide"
agggcgattgcgcaggcggtg

SEQ ID NO: 23035 - DNA, 21 bp, Artificial Sequence
  source: /note="Description of Artificial Sequence: Synthetic oligonucleotide"
cgtgctattgatttgcctaag

SEQ ID NO: 23036 - DNA, 21 bp, Artificial Sequence
  source: /note="Description of Artificial Sequence: Synthetic oligonucleotide"
cgtgcgattgattctgtgcct

SEQ ID NO: 23037 - DNA, 21 bp, Artificial Sequence
  source: /note="Description of Artificial Sequence: Synthetic oligonucleotide"
cgggctattaagagtgatcct

SEQ ID NO: 23038 - DNA, 21 bp, Artificial Sequence
  source: /note="Description of Artificial Sequence: Synthetic oligonucleotide"
agggctattcctacgccgggt

SEQ ID NO: 23039 - DNA, 21 bp, Artificial Sequence
  source: /note="Description of Artificial Sequence: Synthetic oligonucleotide"
cgtgcgttggatgttaatgcg

SEQ ID NO: 23040 - DNA, 21 bp, Artificial Sequence
  source: /note="Description of Artificial Sequence: Synthetic oligonucleotide"
cgtgctctgcttaatttgcag

SEQ ID NO: 23041 - DNA, 21 bp, Artificial Sequence
  source: /note="Description of Artificial Sequence: Synthetic oligonucleotide"
cgtgctctgcagactacgagt

SEQ ID NO: 23042 - DNA, 21 bp, Artificial Sequence
  source: /note="Description of Artificial Sequence: Synthetic oligonucleotide"
agggcgctttctgcgaatgtt

SEQ ID NO: 23043 - DNA, 21 bp, Artificial Sequence
  source: /note="Description of Artificial Sequence: Synthetic oligonucleotide"
cgtgctctgtcttcgcttccg

SEQ ID NO: 23044 - DNA, 21 bp, Artificial Sequence
  source: /note="Description of Artificial Sequence: Synthetic oligonucleotide"
cgtgctcttacggatcttgtt

SEQ ID NO: 23045 - DNA, 21 bp, Artificial Sequence
  source: /note="Description of Artificial Sequence: Synthetic oligonucleotide"
cgggcgatgggtaatgttttg

SEQ ID NO: 23046 - DNA, 21 bp, Artificial Sequence
  source: /note="Description of Artificial Sequence: Synthetic oligonucleotide"
cgtgcgatgcttgatcgtgct

SEQ ID NO: 23047 - DNA, 21 bp, Artificial Sequence
  source: /note="Description of Artificial Sequence: Synthetic oligonucleotide"
agggcgatgccgggtgaggtt

SEQ ID NO: 23048 - DNA, 21 bp, Artificial Sequence
  source: /note="Description of Artificial Sequence: Synthetic oligonucleotide"
cgggcgatgcctccttcttcg

SEQ ID NO: 23049 - DNA, 21 bp, Artificial Sequence
  source: /note="Description of Artificial Sequence: Synthetic oligonucleotide"
agggctaatgatcctcctccg

SEQ ID NO: 23050 - DNA, 21 bp, Artificial Sequence
  source: /note="Description of Artificial Sequence: Synthetic oligonucleotide"
cgtgctaatctgaatattcct

SEQ ID NO: 23051 - DNA, 21 bp, Artificial Sequence
  source: /note="Description of Artificial Sequence: Synthetic oligonucleotide"
agggcgccggagacggagttg

SEQ ID NO: 23052 - DNA, 21 bp, Artificial Sequence
  source: /note="Description of Artificial Sequence: Synthetic oligonucleotide"
cgtgcgcctcctagtcctaag

SEQ ID NO: 23053 - DNA, 21 bp, Artificial Sequence
  source: /note="Description of Artificial Sequence: Synthetic oligonucleotide"
cgtgctccgcaggggtctacg

SEQ ID NO: 23054 - DNA, 21 bp, Artificial Sequence
  source: /note="Description of Artificial Sequence: Synthetic oligonucleotide"
cgtgctccgcagggttatggt

SEQ ID NO: 23055 - DNA, 21 bp, Artificial Sequence
  source: /note="Description of Artificial Sequence: Synthetic oligonucleotide"
cgggctccgcgtcctattgag

SEQ ID NO: 23056 - DNA, 21 bp, Artificial Sequence
  source: /note="Description of Artificial Sequence: Synthetic oligonucleotide"
cgtgctcctgttagtcctatg

SEQ ID NO: 23057 - DNA, 21 bp, Artificial Sequence
  source: /note="Description of Artificial Sequence: Synthetic oligonucleotide"
cgggcgcagccgtctctgcat

SEQ ID NO: 23058 - DNA, 21 bp, Artificial Sequence
  source: /note="Description of Artificial Sequence: Synthetic oligonucleotide"
agggcgcagtcgccgttgtcg

SEQ ID NO: 23059 - DNA, 21 bp, Artificial Sequence
  source: /note="Description of Artificial Sequence: Synthetic oligonucleotide"
cgtgctcagactactctttct

SEQ ID NO: 23060 - DNA, 21 bp, Artificial Sequence
  source: /note="Description of Artificial Sequence: Synthetic oligonucleotide"
cgtgcgcagtattcgcaggat

SEQ ID NO: 23061 - DNA, 21 bp, Artificial Sequence
  source: /note="Description of Artificial Sequence: Synthetic oligonucleotide"
cgtgcgcagtatacgggtaat

SEQ ID NO: 23062 - DNA, 21 bp, Artificial Sequence
  source: /note="Description of Artificial Sequence: Synthetic oligonucleotide"
cgggcttcgtttccgcctgat

SEQ ID NO: 23063 - DNA, 21 bp, Artificial Sequence
  source: /note="Description of Artificial Sequence: Synthetic oligonucleotide"
cgggcgagtcatgatacgaat

SEQ ID NO: 23064 - DNA, 21 bp, Artificial Sequence
  source: /note="Description of Artificial Sequence: Synthetic oligonucleotide"
cgtgcttcgcttcgtgtggag

SEQ ID NO: 23065 - DNA, 21 bp, Artificial Sequence
  source: /note="Description of Artificial Sequence: Synthetic oligonucleotide"
agggcgtctaatcggccggat

SEQ ID NO: 23066 - DNA, 21 bp, Artificial Sequence
  source: /note="Description of Artificial Sequence: Synthetic oligonucleotide"
cgtgcgagtccgacgactagt

SEQ ID NO: 23067 - DNA, 21 bp, Artificial Sequence
  source: /note="Description of Artificial Sequence: Synthetic oligonucleotide"
cgggcttcttcggagttgccg

SEQ ID NO: 23068 - DNA, 21 bp, Artificial Sequence
  source: /note="Description of Artificial Sequence: Synthetic oligonucleotide"
agggcttcttctagtgaggat

SEQ ID NO: 23069 - DNA, 21 bp, Artificial Sequence
  source: /note="Description of Artificial Sequence: Synthetic oligonucleotide"
cgggcgagttctgttgatatg

SEQ ID NO: 23070 - DNA, 21 bp, Artificial Sequence
  source: /note="Description of Artificial Sequence: Synthetic oligonucleotide"
cgggcttctacgggtatggct

SEQ ID NO: 23071 - DNA, 21 bp, Artificial Sequence
  source: /note="Description of Artificial Sequence: Synthetic oligonucleotide"
agggctagtacgcatacgctt

SEQ ID NO: 23072 - DNA, 21 bp, Artificial Sequence
  source: /note="Description of Artificial Sequence: Synthetic oligonucleotide"
agggctacggagcattcgttt

SEQ ID NO: 23073 - DNA, 21 bp, Artificial Sequence
  source: /note="Description of Artificial Sequence: Synthetic oligonucleotide"
agggctacggagccggcgttt

SEQ ID NO: 23074 - DNA, 21 bp, Artificial Sequence
  source: /note="Description of Artificial Sequence: Synthetic oligonucleotide"
cgtgcgactctgccgaagact

SEQ ID NO: 23075 - DNA, 21 bp, Artificial Sequence
  source: /note="Description of Artificial Sequence: Synthetic oligonucleotide"
cgtgcgacgaatgatcgtgct

SEQ ID NO: 23076 - DNA, 21 bp, Artificial Sequence
  source: /note="Description of Artificial Sequence: Synthetic oligonucleotide"
cgggctactaatgatagtact

SEQ ID NO: 23077 - DNA, 21 bp, Artificial Sequence
  source: /note="Description of Artificial Sequence: Synthetic oligonucleotide"
cgggctacgaatactattctt

SEQ ID NO: 23078 - DNA, 21 bp, Artificial Sequence
  source: /note="Description of Artificial Sequence: Synthetic oligonucleotide"
cgtgctacgacgtcgacgttt

SEQ ID NO: 23079 - DNA, 21 bp, Artificial Sequence
  source: /note="Description of Artificial Sequence: Synthetic oligonucleotide"
cgtgctgtggaggataggcat

SEQ ID NO: 23080 - DNA, 21 bp, Artificial Sequence
  source: /note="Description of Artificial Sequence: Synthetic oligonucleotide"
cgggcggtgcttaatattggt

SEQ ID NO: 23081 - DNA, 21 bp, Artificial Sequence
  source: /note="Description of Artificial Sequence: Synthetic oligonucleotide"
cgggcggttcagcctatgctt

SEQ ID NO: 23082 - DNA, 21 bp, Artificial Sequence
  source: /note="Description of Artificial Sequence: Synthetic oligonucleotide"
agggctgtgagtcttcaggct

SEQ ID NO: 23083 - DNA, 21 bp, Artificial Sequence
  source: /note="Description of Artificial Sequence: Synthetic oligonucleotide"
cgggctgtgtatcagacgcag

SEQ ID NO: 23084 - DNA, 21 bp, Artificial Sequence
  source: /note="Description of Artificial Sequence: Synthetic oligonucleotide"
agggcgtatgggccgacgaat

SEQ ID NO: 23085 - DNA, 21 bp, Artificial Sequence
  source: /note="Description of Artificial Sequence: Synthetic oligonucleotide"
cgggcgtatatgactgatcct

SEQ ID NO: 23086 - DNA, 21 bp, Artificial Sequence
  source: /note="Description of Artificial Sequence: Synthetic oligonucleotide"
agggcgtataatgctgttgtt

SEQ ID NO: 23087 - DNA, 21 bp, Artificial Sequence
  source: /note="Description of Artificial Sequence: Synthetic oligonucleotide"
cgggcttatcctgtggatgat

SEQ ID NO: 23088 - DNA, 21 bp, Artificial Sequence
  source: /note="Description of Artificial Sequence: Synthetic oligonucleotide"
cgggatgctgcgtcttcttgt

SEQ ID NO: 23089 - DNA, 21 bp, Artificial Sequence
  source: /note="Description of Artificial Sequence: Synthetic oligonucleotide"
cgtgatgattcttcgcttctg

SEQ ID NO: 23090 - DNA, 21 bp, Artificial Sequence
  source: /note="Description of Artificial Sequence: Synthetic oligonucleotide"
cgggatgatgtgcgtacttat

SEQ ID NO: 23091 - DNA, 21 bp, Artificial Sequence
  source: /note="Description of Artificial Sequence: Synthetic oligonucleotide"
cgggatggggagatggatccg

SEQ ID NO: 23092 - DNA, 21 bp, Artificial Sequence
  source: /note="Description of Artificial Sequence: Synthetic oligonucleotide"
cgggatgggaagtgggtggct

SEQ ID NO: 23093 - DNA, 21 bp, Artificial Sequence
  source: /note="Description of Artificial Sequence: Synthetic oligonucleotide"
cgggatgggcagcatacgtcg

SEQ ID NO: 23094 - DNA, 21 bp, Artificial Sequence
  source: /note="Description of Artificial Sequence: Synthetic oligonucleotide"
agggatcatttgactgttgct

SEQ ID NO: 23095 - DNA, 21 bp, Artificial Sequence
  source: /note="Description of Artificial Sequence: Synthetic oligonucleotide"
agggatattgcggctaagact

SEQ ID NO: 23096 - DNA, 21 bp, Artificial Sequence
  source: /note="Description of Artificial Sequence: Synthetic oligonucleotide"
cgtgataagtctgatcatgct

SEQ ID NO: 23097 - DNA, 21 bp, Artificial Sequence
  source: /note="Description of Artificial Sequence: Synthetic oligonucleotide"
cgtgatctgaagacgcagtcg

SEQ ID NO: 23098 - DNA, 21 bp, Artificial Sequence
  source: /note="Description of Artificial Sequence: Synthetic oligonucleotide"
agggatctgcagcatctttct

SEQ ID NO: 23099 - DNA, 21 bp, Artificial Sequence
  source: /note="Description of Artificial Sequence: Synthetic oligonucleotide"
cgtgatctgtctagtgagtct

SEQ ID NO: 23100 - DNA, 21 bp, Artificial Sequence
  source: /note="Description of Artificial Sequence: Synthetic oligonucleotide"
agggataataaggcgaatatt

SEQ ID NO: 23101 - DNA, 21 bp, Artificial Sequence
  source: /note="Description of Artificial Sequence: Synthetic oligonucleotide"
cgtgataattcgagtgtggtg

SEQ ID NO: 23102 - DNA, 21 bp, Artificial Sequence
  source: /note="Description of Artificial Sequence: Synthetic oligonucleotide"
cgtgatcctaatattaatcct

SEQ ID NO: 23103 - DNA, 21 bp, Artificial Sequence
  source: /note="Description of Artificial Sequence: Synthetic oligonucleotide"
cgtgatcctcgggcggggttt

SEQ ID NO: 23104 - DNA, 21 bp, Artificial Sequence
  source: /note="Description of Artificial Sequence: Synthetic oligonucleotide"
cgtgatcctagggctcatctt

SEQ ID NO: 23105 - DNA, 21 bp, Artificial Sequence
  source: /note="Description of Artificial Sequence: Synthetic oligonucleotide"
agggatccgcggggtcagggg

SEQ ID NO: 23106 - DNA, 21 bp, Artificial Sequence
  source: /note="Description of Artificial Sequence: Synthetic oligonucleotide"
cgggatcaggctagtaagaat

SEQ ID NO: 23107 - DNA, 21 bp, Artificial Sequence
  source: /note="Description of Artificial Sequence: Synthetic oligonucleotide"
cgtgatcagggtcttgagtcg

SEQ ID NO: 23108 - DNA, 21 bp, Artificial Sequence
  source: /note="Description of Artificial Sequence: Synthetic oligonucleotide"
agggatcaggttgctacgcct

SEQ ID NO: 23109 - DNA, 21 bp, Artificial Sequence
  source: /note="Description of Artificial Sequence: Synthetic oligonucleotide"
cgggatcgggatccgacgtcg

SEQ ID NO: 23110 - DNA, 21 bp, Artificial Sequence
  source: /note="Description of Artificial Sequence: Synthetic oligonucleotide"
cgtgatcgggagccggcgctt

SEQ ID NO: 23111 - DNA, 21 bp, Artificial Sequence
  source: /note="Description of Artificial Sequence: Synthetic oligonucleotide"
cgggatcgtgaggtgtcgtgg

SEQ ID NO: 23112 - DNA, 21 bp, Artificial Sequence
  source: /note="Description of Artificial Sequence: Synthetic oligonucleotide"
cgtgattcggcgtttgctgtg

SEQ ID NO: 23113 - DNA, 21 bp, Artificial Sequence
  source: /note="Description of Artificial Sequence: Synthetic oligonucleotide"
agggatagtaagagtaattct

SEQ ID NO: 23114 - DNA, 21 bp, Artificial Sequence
  source: /note="Description of Artificial Sequence: Synthetic oligonucleotide"
cgggattctaaggtttctcat

SEQ ID NO: 23115 - DNA, 21 bp, Artificial Sequence
  source: /note="Description of Artificial Sequence: Synthetic oligonucleotide"
cgggattctcttgagactcag

SEQ ID NO: 23116 - DNA, 21 bp, Artificial Sequence
  source: /note="Description of Artificial Sequence: Synthetic oligonucleotide"
cgtgatagtatgttggttgcg

SEQ ID NO: 23117 - DNA, 21 bp, Artificial Sequence
  source: /note="Description of Artificial Sequence: Synthetic oligonucleotide"
cgtgatagtatgcctgctgct

SEQ ID NO: 23118 - DNA, 21 bp, Artificial Sequence
  source: /note="Description of Artificial Sequence: Synthetic oligonucleotide"
agggatagtcgtatgctgtct

SEQ ID NO: 23119 - DNA, 21 bp, Artificial Sequence
  source: /note="Description of Artificial Sequence: Synthetic oligonucleotide"
agggatagttctcattttccg

SEQ ID NO: 23120 - DNA, 21 bp, Artificial Sequence
  source: /note="Description of Artificial Sequence: Synthetic oligonucleotide"
agggattctagtctgtatttg

SEQ ID NO: 23121 - DNA, 21 bp, Artificial Sequence
  source: /note="Description of Artificial Sequence: Synthetic oligonucleotide"
cgggatagttcgtatactgat

SEQ ID NO: 23122 - DNA, 21 bp, Artificial Sequence
  source: /note="Description of Artificial Sequence: Synthetic oligonucleotide"
agggatacgattatttctgct

SEQ ID NO: 23123 - DNA, 21 bp, Artificial Sequence
  source: /note="Description of Artificial Sequence: Synthetic oligonucleotide"
agggatacgtcgttgcctgtt

SEQ ID NO: 23124 - DNA, 21 bp, Artificial Sequence
  source: /note="Description of Artificial Sequence: Synthetic oligonucleotide"
agggatacgagttctattggg

SEQ ID NO: 23125 - DNA, 21 bp, Artificial Sequence
  source: /note="Description of Artificial Sequence: Synthetic oligonucleotide"
cgggatgtggctgcgcgttct

SEQ ID NO: 23126 - DNA, 21 bp, Artificial Sequence
  source: /note="Description of Artificial Sequence: Synthetic oligonucleotide"
agggatgttgctatgcaggat

SEQ ID NO: 23127 - DNA, 21 bp, Artificial Sequence
  source: /note="Description of Artificial Sequence: Synthetic oligonucleotide"
cgtgatgtgccgcaggctgtg

SEQ ID NO: 23128 - DNA, 21 bp, Artificial Sequence
  source: /note="Description of Artificial Sequence: Synthetic oligonucleotide"
cgggatgtgagtggtccggtt

SEQ ID NO: 23129 - DNA, 21 bp, Artificial Sequence
  source: /note="Description of Artificial Sequence: Synthetic oligonucleotide"
cgtgatgttagtattccttct

SEQ ID NO: 23130 - DNA, 21 bp, Artificial Sequence
  source: /note="Description of Artificial Sequence: Synthetic oligonucleotide"
cgggatgtttctaggcttcct

SEQ ID NO: 23131 - DNA, 21 bp, Artificial Sequence
  source: /note="Description of Artificial Sequence: Synthetic oligonucleotide"
cgggatgttactcgtcttcct

SEQ ID NO: 23132 - DNA, 21 bp, Artificial Sequence
  source: /note="Description of Artificial Sequence: Synthetic oligonucleotide"
cgtgaggcggcgtttgctgat

SEQ ID NO: 23133 - DNA, 21 bp, Artificial Sequence
  source: /note="Description of Artificial Sequence: Synthetic oligonucleotide"
cgtgaggcggggggtgctagt

SEQ ID NO: 23134 - DNA, 21 bp, Artificial Sequence
  source: /note="Description of Artificial Sequence: Synthetic oligonucleotide"
cgtgaggcgggggggcttgcg

SEQ ID NO: 23135 - DNA, 21 bp, Artificial Sequence
  source: /note="Description of Artificial Sequence: Synthetic oligonucleotide"
agggaggctaagcctgcgtgg

SEQ ID NO: 23136 - DNA, 21 bp, Artificial Sequence
  source: /note="Description of Artificial Sequence: Synthetic oligonucleotide"
cgtgaggctgtgacgaaggcg

SEQ ID NO: 23137 - DNA, 21 bp, Artificial Sequence
  source: /note="Description of Artificial Sequence: Synthetic oligonucleotide"
cgggaggcttatgagacgccg

SEQ ID NO: 23138 - DNA, 21 bp, Artificial Sequence
  source: /note="Description of Artificial Sequence: Synthetic oligonucleotide"
cgggaggataatagtaatgat

SEQ ID NO: 23139 - DNA, 21 bp, Artificial Sequence
  source: /note="Description of Artificial Sequence: Synthetic oligonucleotide"
agggaggggggtcagtcgcgg

SEQ ID NO: 23140 - DNA, 21 bp, Artificial Sequence
  source: /note="Description of Artificial Sequence: Synthetic oligonucleotide"
cgtgaggggctgtattctcat

SEQ ID NO: 23141 - DNA, 21 bp, Artificial Sequence
  source: /note="Description of Artificial Sequence: Synthetic oligonucleotide"
cgtgagattgggtgtacgggt

SEQ ID NO: 23142 - DNA, 21 bp, Artificial Sequence
  source: /note="Description of Artificial Sequence: Synthetic oligonucleotide"
cgggagaagacggataggttt

SEQ ID NO: 23143 - DNA, 21 bp, Artificial Sequence
  source: /note="Description of Artificial Sequence: Synthetic oligonucleotide"
cgggagctggagggttttact

SEQ ID NO: 23144 - DNA, 21 bp, Artificial Sequence
  source: /note="Description of Artificial Sequence: Synthetic oligonucleotide"
cgtgagttgtctcctatgtat

SEQ ID NO: 23145 - DNA, 21 bp, Artificial Sequence
  source: /note="Description of Artificial Sequence: Synthetic oligonucleotide"
cgtgagctgtcgtatgcgtct

SEQ ID NO: 23146 - DNA, 21 bp, Artificial Sequence
  source: /note="Description of Artificial Sequence: Synthetic oligonucleotide"
cgtgagatgctgcctagttcg

SEQ ID NO: 23147 - DNA, 21 bp, Artificial Sequence
  source: /note="Description of Artificial Sequence: Synthetic oligonucleotide"
agggagaatgggctgagtctt

SEQ ID NO: 23148 - DNA, 21 bp, Artificial Sequence
  source: /note="Description of Artificial Sequence: Synthetic oligonucleotide"
agggagaatctggctgctggg

SEQ ID NO: 23149 - DNA, 21 bp, Artificial Sequence
  source: /note="Description of Artificial Sequence: Synthetic oligonucleotide"
cgggagaataatacggttaag

SEQ ID NO: 23150 - DNA, 21 bp, Artificial Sequence
  source: /note="Description of Artificial Sequence: Synthetic oligonucleotide"
cgggagcctcatacttcgaat

SEQ ID NO: 23151 - DNA, 21 bp, Artificial Sequence
  source: /note="Description of Artificial Sequence: Synthetic oligonucleotide"
cgtgagcctccgacgttgtcg

SEQ ID NO: 23152 - DNA, 21 bp, Artificial Sequence
  source: /note="Description of Artificial Sequence: Synthetic oligonucleotide"
cgggagcagtttcgtaatctg

SEQ ID NO: 23153 - DNA, 21 bp, Artificial Sequence
  source: /note="Description of Artificial Sequence: Synthetic oligonucleotide"
cgtgagcgttctgcgttgact

SEQ ID NO: 23154 - DNA, 21 bp, Artificial Sequence
  source: /note="Description of Artificial Sequence: Synthetic oligonucleotide"
cgggagcggagtccgatgccg

SEQ ID NO: 23155 - DNA, 21 bp, Artificial Sequence
  source: /note="Description of Artificial Sequence: Synthetic oligonucleotide"
cgtgagtcgtgtcctgatgct

SEQ ID NO: 23156 - DNA, 21 bp, Artificial Sequence
  source: /note="Description of Artificial Sequence: Synthetic oligonucleotide"
cgtgagtctcataaggggcct

SEQ ID NO: 23157 - DNA, 21 bp, Artificial Sequence
  source: /note="Description of Artificial Sequence: Synthetic oligonucleotide"
cgtgagagtcttaataatatg

SEQ ID NO: 23158 - DNA, 21 bp, Artificial Sequence
  source: /note="Description of Artificial Sequence: Synthetic oligonucleotide"
agggagtcgacgacgcatggt

SEQ ID NO: 23159 - DNA, 21 bp, Artificial Sequence
  source: /note="Description of Artificial Sequence: Synthetic oligonucleotide"
cgggagtcggtttcgattaat

SEQ ID NO: 23160 - DNA, 21 bp, Artificial Sequence
  source: /note="Description of Artificial Sequence: Synthetic oligonucleotide"
cgggagtcgtatgagagtggt

SEQ ID NO: 23161 - DNA, 21 bp, Artificial Sequence
  source: /note="Description of Artificial Sequence: Synthetic oligonucleotide"
cgggagacgcttgggagtcct

SEQ ID NO: 23162 - DNA, 21 bp, Artificial Sequence
  source: /note="Description of Artificial Sequence: Synthetic oligonucleotide"
cgggagactatggcttcgact

SEQ ID NO: 23163 - DNA, 21 bp, Artificial Sequence
  source: /note="Description of Artificial Sequence: Synthetic oligonucleotide"
cgggagacgcctaatattcct

SEQ ID NO: 23164 - DNA, 21 bp, Artificial Sequence
  source: /note="Description of Artificial Sequence: Synthetic oligonucleotide"
cgggagacgagttctagtcag

SEQ ID NO: 23165 - DNA, 21 bp, Artificial Sequence
  source: /note="Description of Artificial Sequence: Synthetic oligonucleotide"
cgggagactgttcggaatgtg

SEQ ID NO: 23166 - DNA, 21 bp, Artificial Sequence
  source: /note="Description of Artificial Sequence: Synthetic oligonucleotide"
cgtgaggtgctgtctacttgt

SEQ ID NO: 23167 - DNA, 21 bp, Artificial Sequence
  source: /note="Description of Artificial Sequence: Synthetic oligonucleotide"
cgggaggtgagtgcttctcct

SEQ ID NO: 23168 - DNA, 21 bp, Artificial Sequence
  source: /note="Description of Artificial Sequence: Synthetic oligonucleotide"
cgggaggtgtcgtttgattgg

SEQ ID NO: 23169 - DNA, 21 bp, Artificial Sequence
  source: /note="Description of Artificial Sequence: Synthetic oligonucleotide"
cgggagtatcctagtgggtcg

SEQ ID NO: 23170 - DNA, 21 bp, Artificial Sequence
  source: /note="Description of Artificial Sequence: Synthetic oligonucleotide"
aggtttgcggagactcggcct

SEQ ID NO: 23171 - DNA, 21 bp, Artificial Sequence
  source: /note="Description of Artificial Sequence: Synthetic oligonucleotide"
aggtttgctggtgcgggtgtg

SEQ ID NO: 23172 - DNA, 21 bp, Artificial Sequence
  source: /note="Description of Artificial Sequence: Synthetic oligonucleotide"
cgttttgctgggtctctgatt

SEQ ID NO: 23173 - DNA, 21 bp, Artificial Sequence
  source: /note="Description of Artificial Sequence: Synthetic oligonucleotide"
cgttttgcgaattcgggtgtg

SEQ ID NO: 23174 - DNA, 21 bp, Artificial Sequence
  source: /note="Description of Artificial Sequence: Synthetic oligonucleotide"
cggtttgagcttgctcataat

SEQ ID NO: 23175 - DNA, 21 bp, Artificial Sequence
  source: /note="Description of Artificial Sequence: Synthetic oligonucleotide"
cgttttgagtcttctgtgccg

SEQ ID NO: 23176 - DNA, 21 bp, Artificial Sequence
  source: /note="Description of Artificial Sequence: Synthetic oligonucleotide"
aggtttcatgctgctacttct

SEQ ID NO: 23177 - DNA, 21 bp, Artificial Sequence
  source: /note="Description of Artificial Sequence: Synthetic oligonucleotide"
cgttttaaggagatgccgatg

SEQ ID NO: 23178 - DNA, 21 bp, Artificial Sequence
  source: /note="Description of Artificial Sequence: Synthetic oligonucleotide"
cggtttaagactacgggtgag

SEQ ID NO: 23179 - DNA, 21 bp, Artificial Sequence
  source: /note="Description of Artificial Sequence: Synthetic oligonucleotide"
aggtttcctcagcctgatcct

SEQ ID NO: 23180 - DNA, 21 bp, Artificial Sequence
  source: /note="Description of Artificial Sequence: Synthetic oligonucleotide"
cgttttccggttgatggtgtg

SEQ ID NO: 23181 - DNA, 21 bp, Artificial Sequence
  source: /note="Description of Artificial Sequence: Synthetic oligonucleotide"
cgtttttcggattcgaggatg

SEQ ID NO: 23182 - DNA, 21 bp, Artificial Sequence
  source: /note="Description of Artificial Sequence: Synthetic oligonucleotide"
cgtttttctggtatggtggag

SEQ ID NO: 23183 - DNA, 21 bp, Artificial Sequence
  source: /note="Description of Artificial Sequence: Synthetic oligonucleotide"
aggttttcgcagtctcctgcg

SEQ ID NO: 23184 - DNA, 21 bp, Artificial Sequence
  source: /note="Description of Artificial Sequence: Synthetic oligonucleotide"
cgtttttctacgggtccttct

SEQ ID NO: 23185 - DNA, 21 bp, Artificial Sequence
  source: /note="Description of Artificial Sequence: Synthetic oligonucleotide"
cgtttttctactcagcagagt

SEQ ID NO: 23186 - DNA, 21 bp, Artificial Sequence
  source: /note="Description of Artificial Sequence: Synthetic oligonucleotide"
cggtttgtgccggataggcct

SEQ ID NO: 23187 - DNA, 21 bp, Artificial Sequence
  source: /note="Description of Artificial Sequence: Synthetic oligonucleotide"
aggggtgctgcgccggtgacg

SEQ ID NO: 23188 - DNA, 21 bp, Artificial Sequence
  source: /note="Description of Artificial Sequence: Synthetic oligonucleotide"
cgtggggctgagttggggggg

SEQ ID NO: 23189 - DNA, 21 bp, Artificial Sequence
  source: /note="Description of Artificial Sequence: Synthetic oligonucleotide"
aggggtgcgggggatgcgcat

SEQ ID NO: 23190 - DNA, 21 bp, Artificial Sequence
  source: /note="Description of Artificial Sequence: Synthetic oligonucleotide"
aggggggcggggccttcgact

SEQ ID NO: 23191 - DNA, 21 bp, Artificial Sequence
  source: /note="Description of Artificial Sequence: Synthetic oligonucleotide"
cgtggtgctattgctacgtcg

SEQ ID NO: 23192 - DNA, 21 bp, Artificial Sequence
  source: /note="Description of Artificial Sequence: Synthetic oligonucleotide"
cgtggggctattgggaatggt

SEQ ID NO: 23193 - DNA, 21 bp, Artificial Sequence
  source: /note="Description of Artificial Sequence: Synthetic oligonucleotide"
cgtggggcgattccgttgccg

SEQ ID NO: 23194 - DNA, 21 bp, Artificial Sequence
  source: /note="Description of Artificial Sequence: Synthetic oligonucleotide"
cgtggggctactgtggcgcct

SEQ ID NO: 23195 - DNA, 21 bp, Artificial Sequence
  source: /note="Description of Artificial Sequence: Synthetic oligonucleotide"
cgtggtgatggtgtttctttg

SEQ ID NO: 23196 - DNA, 21 bp, Artificial Sequence
  source: /note="Description of Artificial Sequence: Synthetic oligonucleotide"
cgtggggatcctggtctgggt

SEQ ID NO: 23197 - DNA, 21 bp, Artificial Sequence
  source: /note="Description of Artificial Sequence: Synthetic oligonucleotide"
cggggtgagaattctaatcct

SEQ ID NO: 23198 - DNA, 21 bp, Artificial Sequence
  source: /note="Description of Artificial Sequence: Synthetic oligonucleotide"
aggggtgagcgtagtgtgttt

SEQ ID NO: 23199 - DNA, 21 bp, Artificial Sequence
  source: /note="Description of Artificial Sequence: Synthetic oligonucleotide"
cgtggtgagtcggcttctact

SEQ ID NO: 23200 - DNA, 21 bp, Artificial Sequence
  source: /note="Description of Artificial Sequence: Synthetic oligonucleotide"
cggggtggtgggctgtctatg

SEQ ID NO: 23201 - DNA, 21 bp, Artificial Sequence
  source: /note="Description of Artificial Sequence: Synthetic oligonucleotide"
cggggtgggactatgacgatt

SEQ ID NO: 23202 - DNA, 21 bp, Artificial Sequence
  source: /note="Description of Artificial Sequence: Synthetic oligonucleotide"
cgtggtggtacgaatgttgag

SEQ ID NO: 23203 - DNA, 21 bp, Artificial Sequence
  source: /note="Description of Artificial Sequence: Synthetic oligonucleotide"
cgtgggcatcatgataatgag

SEQ ID NO: 23204 - DNA, 21 bp, Artificial Sequence
  source: /note="Description of Artificial Sequence: Synthetic oligonucleotide"
cgtggtcatctttctgatcct

SEQ ID NO: 23205 - DNA, 21 bp, Artificial Sequence
  source: /note="Description of Artificial Sequence: Synthetic oligonucleotide"
aggggtattgagttgcggggt

SEQ ID NO: 23206 - DNA, 21 bp, Artificial Sequence
  source: /note="Description of Artificial Sequence: Synthetic oligonucleotide"
cgtgggattgagctgactgtt

SEQ ID NO: 23207 - DNA, 21 bp, Artificial Sequence
  source: /note="Description of Artificial Sequence: Synthetic oligonucleotide"
cgtggtattccggcgattgct

SEQ ID NO: 23208 - DNA, 21 bp, Artificial Sequence
  source: /note="Description of Artificial Sequence: Synthetic oligonucleotide"
cggggtaaggagccttttccg

SEQ ID NO: 23209 - DNA, 21 bp, Artificial Sequence
  source: /note="Description of Artificial Sequence: Synthetic oligonucleotide"
cgtggtcttggtaatggtact

SEQ ID NO: 23210 - DNA, 21 bp, Artificial Sequence
  source: /note="Description of Artificial Sequence: Synthetic oligonucleotide"
cgtgggatggcggttccgggg

SEQ ID NO: 23211 - DNA, 21 bp, Artificial Sequence
  source: /note="Description of Artificial Sequence: Synthetic oligonucleotide"
cggggtaatgagtggtcgttg

SEQ ID NO: 23212 - DNA, 21 bp, Artificial Sequence
  source: /note="Description of Artificial Sequence: Synthetic oligonucleotide"
agggggccggctacggcgagt

SEQ ID NO: 23213 - DNA, 21 bp, Artificial Sequence
  source: /note="Description of Artificial Sequence: Synthetic oligonucleotide"
cggggtccggatacgggggct

SEQ ID NO: 23214 - DNA, 21 bp, Artificial Sequence
  source: /note="Description of Artificial Sequence: Synthetic oligonucleotide"
cgtgggccgggggagcctaat

SEQ ID NO: 23215 - DNA, 21 bp, Artificial Sequence
  source: /note="Description of Artificial Sequence: Synthetic oligonucleotide"
cgtgggcctttgacgagtgag

SEQ ID NO: 23216 - DNA, 21 bp, Artificial Sequence
  source: /note="Description of Artificial Sequence: Synthetic oligonucleotide"
cgtgggccgccgcctgcgact

SEQ ID NO: 23217 - DNA, 21 bp, Artificial Sequence
  source: /note="Description of Artificial Sequence: Synthetic oligonucleotide"
aggggtcctagtacttcggat

SEQ ID NO: 23218 - DNA, 21 bp, Artificial Sequence
  source: /note="Description of Artificial Sequence: Synthetic oligonucleotide"
cgtgggcctgttacgcgtgat

SEQ ID NO: 23219 - DNA, 21 bp, Artificial Sequence
  source: /note="Description of Artificial Sequence: Synthetic oligonucleotide"
cgtggtcagcataatctttcg

SEQ ID NO: 23220 - DNA, 21 bp, Artificial Sequence
  source: /note="Description of Artificial Sequence: Synthetic oligonucleotide"
cggggtcagacgattcgtgag

SEQ ID NO: 23221 - DNA, 21 bp, Artificial Sequence
  source: /note="Description of Artificial Sequence: Synthetic oligonucleotide"
cgggggagtgcgggtgtggcg

SEQ ID NO: 23222 - DNA, 21 bp, Artificial Sequence
  source: /note="Description of Artificial Sequence: Synthetic oligonucleotide"
cgtggttcggatgcttctgcg

SEQ ID NO: 23223 - DNA, 21 bp, Artificial Sequence
  source: /note="Description of Artificial Sequence: Synthetic oligonucleotide"
cgtgggtcgggtacgttgact

SEQ ID NO: 23224 - DNA, 21 bp, Artificial Sequence
  source: /note="Description of Artificial Sequence: Synthetic oligonucleotide"
cggggtagtatgctgggtgat

SEQ ID NO: 23225 - DNA, 21 bp, Artificial Sequence
  source: /note="Description of Artificial Sequence: Synthetic oligonucleotide"
cgtggttcgaatgcgtctggg

SEQ ID NO: 23226 - DNA, 21 bp, Artificial Sequence
  source: /note="Description of Artificial Sequence: Synthetic oligonucleotide"
aggggttctcctgctgcgact

SEQ ID NO: 23227 - DNA, 21 bp, Artificial Sequence
  source: /note="Description of Artificial Sequence: Synthetic oligonucleotide"
cgtgggtcgccgcagtcttcg

SEQ ID NO: 23228 - DNA, 21 bp, Artificial Sequence
  source: /note="Description of Artificial Sequence: Synthetic oligonucleotide"
cggggttcgcagactgggaat

SEQ ID NO: 23229 - DNA, 21 bp, Artificial Sequence
  source: /note="Description of Artificial Sequence: Synthetic oligonucleotide"
cgggggtctcagacttctttt

SEQ ID NO: 23230 - DNA, 21 bp, Artificial Sequence
  source: /note="Description of Artificial Sequence: Synthetic oligonucleotide"
aggggtagttcgacgattgag

SEQ ID NO: 23231 - DNA, 21 bp, Artificial Sequence
  source: /note="Description of Artificial Sequence: Synthetic oligonucleotide"
cgtggttctactgcgaatgcg

SEQ ID NO: 23232 - DNA, 21 bp, Artificial Sequence
  source: /note="Description of Artificial Sequence: Synthetic oligonucleotide"
cggggttctacggtgatgttt

SEQ ID NO: 23233 - DNA, 21 bp, Artificial Sequence
  source: /note="Description of Artificial Sequence: Synthetic oligonucleotide"
aggggtacggcgcatcttttg

SEQ ID NO: 23234 - DNA, 21 bp, Artificial Sequence
  source: /note="Description of Artificial Sequence: Synthetic oligonucleotide"
agggggactgagtcgccgtcg

SEQ ID NO: 23235 - DNA, 21 bp, Artificial Sequence
  source: /note="Description of Artificial Sequence: Synthetic oligonucleotide"
cggggtactgggaatcttaat

SEQ ID NO: 23236 - DNA, 21 bp, Artificial Sequence
  source: /note="Description of Artificial Sequence: Synthetic oligonucleotide"
agggggacgggtacggcgtgg

SEQ ID NO: 23237 - DNA, 21 bp, Artificial Sequence
  source: /note="Description of Artificial Sequence: Synthetic oligonucleotide"
cggggtactatgatggcggct

SEQ ID NO: 23238 - DNA, 21 bp, Artificial Sequence
  source: /note="Description of Artificial Sequence: Synthetic oligonucleotide"
aggggtactaatactctgcag

SEQ ID NO: 23239 - DNA, 21 bp, Artificial Sequence
  source: /note="Description of Artificial Sequence: Synthetic oligonucleotide"
cgtggtgttgctgtgccgcct

SEQ ID NO: 23240 - DNA, 21 bp, Artificial Sequence
  source: /note="Description of Artificial Sequence: Synthetic oligonucleotide"
aggggtgttcattcgcctgat

SEQ ID NO: 23241 - DNA, 21 bp, Artificial Sequence
  source: /note="Description of Artificial Sequence: Synthetic oligonucleotide"
aggggggtgatgtatggtgat

SEQ ID NO: 23242 - DNA, 21 bp, Artificial Sequence
  source: /note="Description of Artificial Sequence: Synthetic oligonucleotide"
aggcatgcgggtcaggataat

SEQ ID NO: 23243 - DNA, 21 bp, Artificial Sequence
  source: /note="Description of Artificial Sequence: Synthetic oligonucleotide"
cgtcatgctccggtggcgtct

SEQ ID NO: 23244 - DNA, 21 bp, Artificial Sequence
  source: /note="Description of Artificial Sequence: Synthetic oligonucleotide"
cggcatgcggtttcgaatttt

SEQ ID NO: 23245 - DNA, 21 bp, Artificial Sequence
  source: /note="Description of Artificial Sequence: Synthetic oligonucleotide"
cggcatgatcggatggataat

SEQ ID NO: 23246 - DNA, 21 bp, Artificial Sequence
  source: /note="Description of Artificial Sequence: Synthetic oligonucleotide"
cgtcatgagttgcattctacg

SEQ ID NO: 23247 - DNA, 21 bp, Artificial Sequence
  source: /note="Description of Artificial Sequence: Synthetic oligonucleotide"
cggcatgagaatattcgggat

SEQ ID NO: 23248 - DNA, 21 bp, Artificial Sequence
  source: /note="Description of Artificial Sequence: Synthetic oligonucleotide"
cgtcatgagaggcctatggcg

SEQ ID NO: 23249 - DNA, 21 bp, Artificial Sequence
  source: /note="Description of Artificial Sequence: Synthetic oligonucleotide"
cggcatggtagttcgatgacg

SEQ ID NO: 23250 - DNA, 21 bp, Artificial Sequence
  source: /note="Description of Artificial Sequence: Synthetic oligonucleotide"
cggcatgggacgcatccttcg

SEQ ID NO: 23251 - DNA, 21 bp, Artificial Sequence
  source: /note="Description of Artificial Sequence: Synthetic oligonucleotide"
aggcatcattctgcgccgaat

SEQ ID NO: 23252 - DNA, 21 bp, Artificial Sequence
  source: /note="Description of Artificial Sequence: Synthetic oligonucleotide"
cgtcatttggggtcgctgccg

SEQ ID NO: 23253 - DNA, 21 bp, Artificial Sequence
  source: /note="Description of Artificial Sequence: Synthetic oligonucleotide"
cggcatcctgctgctcatgct

SEQ ID NO: 23254 - DNA, 21 bp, Artificial Sequence
  source: /note="Description of Artificial Sequence: Synthetic oligonucleotide"
cggcatcctgctactatttct

SEQ ID NO: 23255 - DNA, 21 bp, Artificial Sequence
  source: /note="Description of Artificial Sequence: Synthetic oligonucleotide"
aggcatccgatgcttactggg

SEQ ID NO: 23256 - DNA, 21 bp, Artificial Sequence
  source: /note="Description of Artificial Sequence: Synthetic oligonucleotide"
cgtcatcctccgaattctttt

SEQ ID NO: 23257 - DNA, 21 bp, Artificial Sequence
  source: /note="Description of Artificial Sequence: Synthetic oligonucleotide"
cggcatccgagtactccgaat

SEQ ID NO: 23258 - DNA, 21 bp, Artificial Sequence
  source: /note="Description of Artificial Sequence: Synthetic oligonucleotide"
cggcatccggtgactgagccg

SEQ ID NO: 23259 - DNA, 21 bp, Artificial Sequence
  source: /note="Description of Artificial Sequence: Synthetic oligonucleotide"
aggcatcagacgattattgct

SEQ ID NO: 23260 - DNA, 21 bp, Artificial Sequence
  source: /note="Description of Artificial Sequence: Synthetic oligonucleotide"
aggcataggcctgcgccggag

SEQ ID NO: 23261 - DNA, 21 bp, Artificial Sequence
  source: /note="Description of Artificial Sequence: Synthetic oligonucleotide"
cgtcatagtgaggtgacgttt

SEQ ID NO: 23262 - DNA, 21 bp, Artificial Sequence
  source: /note="Description of Artificial Sequence: Synthetic oligonucleotide"
aggcattctcatactatttcg

SEQ ID NO: 23263 - DNA, 21 bp, Artificial Sequence
  source: /note="Description of Artificial Sequence: Synthetic oligonucleotide"
cggcattctctgagtttggat

SEQ ID NO: 23264 - DNA, 21 bp, Artificial Sequence
  source: /note="Description of Artificial Sequence: Synthetic oligonucleotide"
aggcattctaatcagacgttg

SEQ ID NO: 23265 - DNA, 21 bp, Artificial Sequence
  source: /note="Description of Artificial Sequence: Synthetic oligonucleotide"
cgtcattctcctttgactggt

SEQ ID NO: 23266 - DNA, 21 bp, Artificial Sequence
  source: /note="Description of Artificial Sequence: Synthetic oligonucleotide"
aggcatagtcagggtcctttt

SEQ ID NO: 23267 - DNA, 21 bp, Artificial Sequence
  source: /note="Description of Artificial Sequence: Synthetic oligonucleotide"
cgtcatacgatggagacttcg

SEQ ID NO: 23268 - DNA, 21 bp, Artificial Sequence
  source: /note="Description of Artificial Sequence: Synthetic oligonucleotide"
cgtcatacgcctgatcagggt

SEQ ID NO: 23269 - DNA, 21 bp, Artificial Sequence
  source: /note="Description of Artificial Sequence: Synthetic oligonucleotide"
cggattgcgccgactggtaat

SEQ ID NO: 23270 - DNA, 21 bp, Artificial Sequence
  source: /note="Description of Artificial Sequence: Synthetic oligonucleotide"
cgtattgatgctgagcttgag

SEQ ID NO: 23271 - DNA, 21 bp, Artificial Sequence
  source: /note="Description of Artificial Sequence: Synthetic oligonucleotide"
cgtattgatgggattctgtct

SEQ ID NO: 23272 - DNA, 21 bp, Artificial Sequence
  source: /note="Description of Artificial Sequence: Synthetic oligonucleotide"
cgtattgagaatgaggttgtg

SEQ ID NO: 23273 - DNA, 21 bp, Artificial Sequence
  source: /note="Description of Artificial Sequence: Synthetic oligonucleotide"
cggattggtgatcatattcgt

SEQ ID NO: 23274 - DNA, 21 bp, Artificial Sequence
  source: /note="Description of Artificial Sequence: Synthetic oligonucleotide"
cgtattggtaagaatgattct

SEQ ID NO: 23275 - DNA, 21 bp, Artificial Sequence
  source: /note="Description of Artificial Sequence: Synthetic oligonucleotide"
cggattggtcagaatttggct

SEQ ID NO: 23276 - DNA, 21 bp, Artificial Sequence
  source: /note="Description of Artificial Sequence: Synthetic oligonucleotide"
cggattgggcagacgtttgcg

SEQ ID NO: 23277 - DNA, 21 bp, Artificial Sequence
  source: /note="Description of Artificial Sequence: Synthetic oligonucleotide"
aggattggttcgggtactggt

SEQ ID NO: 23278 - DNA, 21 bp, Artificial Sequence
  source: /note="Description of Artificial Sequence: Synthetic oligonucleotide"
cgtattggttggacgattgat

SEQ ID NO: 23279 - DNA, 21 bp, Artificial Sequence
  source: /note="Description of Artificial Sequence: Synthetic oligonucleotide"
cgtattcattatgaggggatg

SEQ ID NO: 23280 - DNA, 21 bp, Artificial Sequence
  source: /note="Description of Artificial Sequence: Synthetic oligonucleotide"
cgtattaatattgctgagact

SEQ ID NO: 23281 - DNA, 21 bp, Artificial Sequence
  source: /note="Description of Artificial Sequence: Synthetic oligonucleotide"
cgtattccggctttgtctggt

SEQ ID NO: 23282 - DNA, 21 bp, Artificial Sequence
  source: /note="Description of Artificial Sequence: Synthetic oligonucleotide"
cggattcctacgagtcctccg

SEQ ID NO: 23283 - DNA, 21 bp, Artificial Sequence
  source: /note="Description of Artificial Sequence: Synthetic oligonucleotide"
cgtattcctgttcgggttgat

SEQ ID NO: 23284 - DNA, 21 bp, Artificial Sequence
  source: /note="Description of Artificial Sequence: Synthetic oligonucleotide"
cggattaggtatccggagggt

SEQ ID NO: 23285 - DNA, 21 bp, Artificial Sequence
  source: /note="Description of Artificial Sequence: Synthetic oligonucleotide"
cgtatttctgctttgcagcct

SEQ ID NO: 23286 - DNA, 21 bp, Artificial Sequence
  source: /note="Description of Artificial Sequence: Synthetic oligonucleotide"
cggattagtgattatcctcct

SEQ ID NO: 23287 - DNA, 21 bp, Artificial Sequence
  source: /note="Description of Artificial Sequence: Synthetic oligonucleotide"
aggattagtgggcatgctagt

SEQ ID NO: 23288 - DNA, 21 bp, Artificial Sequence
  source: /note="Description of Artificial Sequence: Synthetic oligonucleotide"
cggatttctccgactccgatt

SEQ ID NO: 23289 - DNA, 21 bp, Artificial Sequence
  source: /note="Description of Artificial Sequence: Synthetic oligonucleotide"
cggatttcgagtgggattgat

SEQ ID NO: 23290 - DNA, 21 bp, Artificial Sequence
  source: /note="Description of Artificial Sequence: Synthetic oligonucleotide"
cgtatttctagttctcctgat

SEQ ID NO: 23291 - DNA, 21 bp, Artificial Sequence
  source: /note="Description of Artificial Sequence: Synthetic oligonucleotide"
cgtatttatgatcagtctatt

SEQ ID NO: 23292 - DNA, 21 bp, Artificial Sequence
  source: /note="Description of Artificial Sequence: Synthetic oligonucleotide"
aggatttatagtccggatggg

SEQ ID NO: 23293 - DNA, 21 bp, Artificial Sequence
  source: /note="Description of Artificial Sequence: Synthetic oligonucleotide"
aggatttatactacgtcgcct

SEQ ID NO: 23294 - DNA, 21 bp, Artificial Sequence
  source: /note="Description of Artificial Sequence: Synthetic oligonucleotide"
cggaaggatgatactacgtgg

SEQ ID NO: 23295 - DNA, 21 bp, Artificial Sequence
  source: /note="Description of Artificial Sequence: Synthetic oligonucleotide"
cgtaaggatctttcgtgggat

SEQ ID NO: 23296 - DNA, 21 bp, Artificial Sequence
  source: /note="Description of Artificial Sequence: Synthetic oligonucleotide"
aggaaggatcgtagtcctgag

SEQ ID NO: 23297 - DNA, 21 bp, Artificial Sequence
  source: /note="Description of Artificial Sequence: Synthetic oligonucleotide"
cggaaggatacgccgatgcat

SEQ ID NO: 23298 - DNA, 21 bp, Artificial Sequence
  source: /note="Description of Artificial Sequence: Synthetic oligonucleotide"
cgtaaggatactgttccgaat

SEQ ID NO: 23299 - DNA, 21 bp, Artificial Sequence
  source: /note="Description of Artificial Sequence: Synthetic oligonucleotide"
cgtaagggtttggatgatgcg

SEQ ID NO: 23300 - DNA, 21 bp, Artificial Sequence
  source: /note="Description of Artificial Sequence: Synthetic oligonucleotide"
cgtaagcttcctcttgttgat

SEQ ID NO: 23301 - DNA, 21 bp, Artificial Sequence
  source: /note="Description of Artificial Sequence: Synthetic oligonucleotide"
aggaagatgaatcaggatcag

SEQ ID NO: 23302 - DNA, 21 bp, Artificial Sequence
  source: /note="Description of Artificial Sequence: Synthetic oligonucleotide"
cgtaagaattatcagctggat

SEQ ID NO: 23303 - DNA, 21 bp, Artificial Sequence
  source: /note="Description of Artificial Sequence: Synthetic oligonucleotide"
aggaagcctttgacggctcct

SEQ ID NO: 23304 - DNA, 21 bp, Artificial Sequence
  source: /note="Description of Artificial Sequence: Synthetic oligonucleotide"
cgtaagtcgccgcaggaggcg

SEQ ID NO: 23305 - DNA, 21 bp, Artificial Sequence
  source: /note="Description of Artificial Sequence: Synthetic oligonucleotide"
cgtaagtctacgttggatact

SEQ ID NO: 23306 - DNA, 21 bp, Artificial Sequence
  source: /note="Description of Artificial Sequence: Synthetic oligonucleotide"
cgtaaggtggagtcgaggagg

SEQ ID NO: 23307 - DNA, 21 bp, Artificial Sequence
  source: /note="Description of Artificial Sequence: Synthetic oligonucleotide"
cgtaaggttactcctgatact

SEQ ID NO: 23308 - DNA, 21 bp, Artificial Sequence
  source: /note="Description of Artificial Sequence: Synthetic oligonucleotide"
aggcttgctgcggagactctg

SEQ ID NO: 23309 - DNA, 21 bp, Artificial Sequence
  source: /note="Description of Artificial Sequence: Synthetic oligonucleotide"
cgtttggcggcgaatcatctt

SEQ ID NO: 23310 - DNA, 21 bp, Artificial Sequence
  source: /note="Description of Artificial Sequence: Synthetic oligonucleotide"
aggttggcggagacgtctcat

SEQ ID NO: 23311 - DNA, 21 bp, Artificial Sequence
  source: /note="Description of Artificial Sequence: Synthetic oligonucleotide"
cggttggcgcttgagtctaat

SEQ ID NO: 23312 - DNA, 21 bp, Artificial Sequence
  source: /note="Description of Artificial Sequence: Synthetic oligonucleotide"
aggctggctatgcaggcggct

SEQ ID NO: 23313 - DNA, 21 bp, Artificial Sequence
  source: /note="Description of Artificial Sequence: Synthetic oligonucleotide"
cggcttgctcagattaattcg

SEQ ID NO: 23314 - DNA, 21 bp, Artificial Sequence
  source: /note="Description of Artificial Sequence: Synthetic oligonucleotide"
cggcttgctactgaggatcct

SEQ ID NO: 23315 - DNA, 21 bp, Artificial Sequence
  source: /note="Description of Artificial Sequence: Synthetic oligonucleotide"
cggcttgatgcgaatagtcgg

SEQ ID NO: 23316 - DNA, 21 bp, Artificial Sequence
  source: /note="Description of Artificial Sequence: Synthetic oligonucleotide"
cgtcttgatgatgttgggctt

SEQ ID NO: 23317 - DNA, 21 bp, Artificial Sequence
  source: /note="Description of Artificial Sequence: Synthetic oligonucleotide"
cggttggattttgatacgccg

SEQ ID NO: 23318 - DNA, 21 bp, Artificial Sequence
  source: /note="Description of Artificial Sequence: Synthetic oligonucleotide"
cggttggatatgcgtattgag

SEQ ID NO: 23319 - DNA, 21 bp, Artificial Sequence
  source: /note="Description of Artificial Sequence: Synthetic oligonucleotide"
cgtctggatcctggggagccg

SEQ ID NO: 23320 - DNA, 21 bp, Artificial Sequence
  source: /note="Description of Artificial Sequence: Synthetic oligonucleotide"
aggcttgatcctcattcttct

SEQ ID NO: 23321 - DNA, 21 bp, Artificial Sequence
  source: /note="Description of Artificial Sequence: Synthetic oligonucleotide"
cggttggattcgttggctctg

SEQ ID NO: 23322 - DNA, 21 bp, Artificial Sequence
  source: /note="Description of Artificial Sequence: Synthetic oligonucleotide"
cggcttgatagtatgttttct

SEQ ID NO: 23323 - DNA, 21 bp, Artificial Sequence
  source: /note="Description of Artificial Sequence: Synthetic oligonucleotide"
cggcttgatactacgatgcag

SEQ ID NO: 23324 - DNA, 21 bp, Artificial Sequence
  source: /note="Description of Artificial Sequence: Synthetic oligonucleotide"
aggcttgatacggtttcgtct

SEQ ID NO: 23325 - DNA, 21 bp, Artificial Sequence
  source: /note="Description of Artificial Sequence: Synthetic oligonucleotide"
cgtcttgaggctcaggtggcg

SEQ ID NO: 23326 - DNA, 21 bp, Artificial Sequence
  source: /note="Description of Artificial Sequence: Synthetic oligonucleotide"
aggcttgagcctatgcagaat

SEQ ID NO: 23327 - DNA, 21 bp, Artificial Sequence
  source: /note="Description of Artificial Sequence: Synthetic oligonucleotide"
cgtcttgagtcttctcggccg

SEQ ID NO: 23328 - DNA, 21 bp, Artificial Sequence
  source: /note="Description of Artificial Sequence: Synthetic oligonucleotide"
cgtctttttggtgatgattat

SEQ ID NO: 23329 - DNA, 21 bp, Artificial Sequence
  source: /note="Description of Artificial Sequence: Synthetic oligonucleotide"
cggctgggggatggggcggat

SEQ ID NO: 23330 - DNA, 21 bp, Artificial Sequence
  source: /note="Description of Artificial Sequence: Synthetic oligonucleotide"
cgtctgggggatgtttgggct

SEQ ID NO: 23331 - DNA, 21 bp, Artificial Sequence
  source: /note="Description of Artificial Sequence: Synthetic oligonucleotide"
cggttgggtatggtttctgag

SEQ ID NO: 23332 - DNA, 21 bp, Artificial Sequence
  source: /note="Description of Artificial Sequence: Synthetic oligonucleotide"
aggttggggcctgggtatcct

SEQ ID NO: 23333 - DNA, 21 bp, Artificial Sequence
  source: /note="Description of Artificial Sequence: Synthetic oligonucleotide"
cggctgggtccggttagtggt

SEQ ID NO: 23334 - DNA, 21 bp, Artificial Sequence
  source: /note="Description of Artificial Sequence: Synthetic oligonucleotide"
aggctgggttcgcagacttct

SEQ ID NO: 23335 - DNA, 21 bp, Artificial Sequence
  source: /note="Description of Artificial Sequence: Synthetic oligonucleotide"
cggctggggactcattcggag

SEQ ID NO: 23336 - DNA, 21 bp, Artificial Sequence
  source: /note="Description of Artificial Sequence: Synthetic oligonucleotide"
cgtcttgggacttgggctgag

SEQ ID NO: 23337 - DNA, 21 bp, Artificial Sequence
  source: /note="Description of Artificial Sequence: Synthetic oligonucleotide"
aggcttggggtgtgtccgtct

SEQ ID NO: 23338 - DNA, 21 bp, Artificial Sequence
  source: /note="Description of Artificial Sequence: Synthetic oligonucleotide"
cgtctgcatattgggtctggg

SEQ ID NO: 23339 - DNA, 21 bp, Artificial Sequence
  source: /note="Description of Artificial Sequence: Synthetic oligonucleotide"
cgtctgcatattaatagtgag

SEQ ID NO: 23340 - DNA, 21 bp, Artificial Sequence
  source: /note="Description of Artificial Sequence: Synthetic oligonucleotide"
cggcttcatacggatttgggt

SEQ ID NO: 23341 - DNA, 21 bp, Artificial Sequence
  source: /note="Description of Artificial Sequence: Synthetic oligonucleotide"
cggctgattcattcgggtttt

SEQ ID NO: 23342 - DNA, 21 bp, Artificial Sequence
  source: /note="Description of Artificial Sequence: Synthetic oligonucleotide"
aggctgattaataattctgct

SEQ ID NO: 23343 - DNA, 21 bp, Artificial Sequence
  source: /note="Description of Artificial Sequence: Synthetic oligonucleotide"
cggttgttgaagactccgagt

SEQ ID NO: 23344 - DNA, 21 bp, Artificial Sequence
  source: /note="Description of Artificial Sequence: Synthetic oligonucleotide"
cgtcttctgtcggcgactggt

SEQ ID NO: 23345 - DNA, 21 bp, Artificial Sequence
  source: /note="Description of Artificial Sequence: Synthetic oligonucleotide"
cgtttgatggatcgtgcgggt

SEQ ID NO: 23346 - DNA, 21 bp, Artificial Sequence
  source: /note="Description of Artificial Sequence: Synthetic oligonucleotide"
cggttgatgaatccgaagggt

SEQ ID NO: 23347 - DNA, 21 bp, Artificial Sequence
  source: /note="Description of Artificial Sequence: Synthetic oligonucleotide"
aggctgaatgatctgactctt

SEQ ID NO: 23348 - DNA, 21 bp, Artificial Sequence
  source: /note="Description of Artificial Sequence: Synthetic oligonucleotide"
cggttgaatttgtcgactact

SEQ ID NO: 23349 - DNA, 21 bp, Artificial Sequence
  source: /note="Description of Artificial Sequence: Synthetic oligonucleotide"
aggctgaataataatactctg

SEQ ID NO: 23350 - DNA, 21 bp, Artificial Sequence
  source: /note="Description of Artificial Sequence: Synthetic oligonucleotide"
cgtctgaatcaggttccggcg

SEQ ID NO: 23351 - DNA, 21 bp, Artificial Sequence
  source: /note="Description of Artificial Sequence: Synthetic oligonucleotide"
aggcttaatacttcgatgatg

SEQ ID NO: 23352 - DNA, 21 bp, Artificial Sequence
  source: /note="Description of Artificial Sequence: Synthetic oligonucleotide"
aggttgcctgatcctagttcg

SEQ ID NO: 23353 - DNA, 21 bp, Artificial Sequence
  source: /note="Description of Artificial Sequence: Synthetic oligonucleotide"
aggctgccggggcctgagcgt

SEQ ID NO: 23354 - DNA, 21 bp, Artificial Sequence
  source: /note="Description of Artificial Sequence: Synthetic oligonucleotide"
cgtctgccgttggagaatttg

SEQ ID NO: 23355 - DNA, 21 bp, Artificial Sequence
  source: /note="Description of Artificial Sequence: Synthetic oligonucleotide"
cgtttgccgctgtcggctcat

SEQ ID NO: 23356 - DNA, 21 bp, Artificial Sequence
  source: /note="Description of Artificial Sequence: Synthetic oligonucleotide"
cgtcttcctccgtcggggatt

SEQ ID NO: 23357 - DNA, 21 bp, Artificial Sequence
  source: /note="Description of Artificial Sequence: Synthetic oligonucleotide"
aggctgccgcctacggatgtg

SEQ ID NO: 23358 - DNA, 21 bp, Artificial Sequence
  source: /note="Description of Artificial Sequence: Synthetic oligonucleotide"
cggttgcctcagagggatatt

SEQ ID NO: 23359 - DNA, 21 bp, Artificial Sequence
  source: /note="Description of Artificial Sequence: Synthetic oligonucleotide"
cgtctgccgtctgagaagcag

SEQ ID NO: 23360 - DNA, 21 bp, Artificial Sequence
  source: /note="Description of Artificial Sequence: Synthetic oligonucleotide"
cggcttccttctttggttgat

SEQ ID NO: 23361 - DNA, 21 bp, Artificial Sequence
  source: /note="Description of Artificial Sequence: Synthetic oligonucleotide"
aggctgcctacgcggcttgat

SEQ ID NO: 23362 - DNA, 21 bp, Artificial Sequence
  source: /note="Description of Artificial Sequence: Synthetic oligonucleotide"
cgtcttcctacttctcatttt

SEQ ID NO: 23363 - DNA, 21 bp, Artificial Sequence
  source: /note="Description of Artificial Sequence: Synthetic oligonucleotide"
aggctgccgactgttactggg

SEQ ID NO: 23364 - DNA, 21 bp, Artificial Sequence
  source: /note="Description of Artificial Sequence: Synthetic oligonucleotide"
cggcttccggtgcagccgtcg

SEQ ID NO: 23365 - DNA, 21 bp, Artificial Sequence
  source: /note="Description of Artificial Sequence: Synthetic oligonucleotide"
aggctgcaggataatggttcg

SEQ ID NO: 23366 - DNA, 21 bp, Artificial Sequence
  source: /note="Description of Artificial Sequence: Synthetic oligonucleotide"
cgtcttcaggggtttccgaat

SEQ ID NO: 23367 - DNA, 21 bp, Artificial Sequence
  source: /note="Description of Artificial Sequence: Synthetic oligonucleotide"
cgtctgcagcttcaggatcat

SEQ ID NO: 23368 - DNA, 21 bp, Artificial Sequence
  source: /note="Description of Artificial Sequence: Synthetic oligonucleotide"
cgtttgcagaatacggggacg

SEQ ID NO: 23369 - DNA, 21 bp, Artificial Sequence
  source: /note="Description of Artificial Sequence: Synthetic oligonucleotide"
cgtcttcagcctgctgaggag

SEQ ID NO: 23370 - DNA, 21 bp, Artificial Sequence
  source: /note="Description of Artificial Sequence: Synthetic oligonucleotide"
cggcttcagcaggttggggtg

SEQ ID NO: 23371 - DNA, 21 bp, Artificial Sequence
  source: /note="Description of Artificial Sequence: Synthetic oligonucleotide"
cgtctgcagtcttctattgag

SEQ ID NO: 23372 - DNA, 21 bp, Artificial Sequence
  source: /note="Description of Artificial Sequence: Synthetic oligonucleotide"
cggcttcgtccgggtcttgat

SEQ ID NO: 23373 - DNA, 21 bp, Artificial Sequence
  source: /note="Description of Artificial Sequence: Synthetic oligonucleotide"
aggctgagtgcggatacgcat

SEQ ID NO: 23374 - DNA, 21 bp, Artificial Sequence
  source: /note="Description of Artificial Sequence: Synthetic oligonucleotide"
cgtctttctcatgctggggtg

SEQ ID NO: 23375 - DNA, 21 bp, Artificial Sequence
  source: /note="Description of Artificial Sequence: Synthetic oligonucleotide"
aggctgagtattggtagtgtt

SEQ ID NO: 23376 - DNA, 21 bp, Artificial Sequence
  source: /note="Description of Artificial Sequence: Synthetic oligonucleotide"
cgtctgtctttggataggttt

SEQ ID NO: 23377 - DNA, 21 bp, Artificial Sequence
  source: /note="Description of Artificial Sequence: Synthetic oligonucleotide"
aggttgtcgttgccttctacg

SEQ ID NO: 23378 - DNA, 21 bp, Artificial Sequence
  source: /note="Description of Artificial Sequence: Synthetic oligonucleotide"
aggctttcgaattcggagcct

SEQ ID NO: 23379 - DNA, 21 bp, Artificial Sequence
  source: /note="Description of Artificial Sequence: Synthetic oligonucleotide"
cgtctgtctccgccgcctagt

SEQ ID NO: 23380 - DNA, 21 bp, Artificial Sequence
  source: /note="Description of Artificial Sequence: Synthetic oligonucleotide"
aggttgtcgcctcagccggct

SEQ ID NO: 23381 - DNA, 21 bp, Artificial Sequence
  source: /note="Description of Artificial Sequence: Synthetic oligonucleotide"
cgtctgagtcagtcgaataat

SEQ ID NO: 23382 - DNA, 21 bp, Artificial Sequence
  source: /note="Description of Artificial Sequence: Synthetic oligonucleotide"
cggctgtcgtctggtcctatt

SEQ ID NO: 23383 - DNA, 21 bp, Artificial Sequence
  source: /note="Description of Artificial Sequence: Synthetic oligonucleotide"
cggctttctagtaatctggag

SEQ ID NO: 23384 - DNA, 21 bp, Artificial Sequence
  source: /note="Description of Artificial Sequence: Synthetic oligonucleotide"
aggcttacggctacgtctaat

SEQ ID NO: 23385 - DNA, 21 bp, Artificial Sequence
  source: /note="Description of Artificial Sequence: Synthetic oligonucleotide"
cggctgactgataggtctacg

SEQ ID NO: 23386 - DNA, 21 bp, Artificial Sequence
  source: /note="Description of Artificial Sequence: Synthetic oligonucleotide"
cgtttgacggagcctcatcgt

SEQ ID NO: 23387 - DNA, 21 bp, Artificial Sequence
  source: /note="Description of Artificial Sequence: Synthetic oligonucleotide"
cggctgacgcatgagtctccg

SEQ ID NO: 23388 - DNA, 21 bp, Artificial Sequence
  source: /note="Description of Artificial Sequence: Synthetic oligonucleotide"
cggcttactcatactggtcat

SEQ ID NO: 23389 - DNA, 21 bp, Artificial Sequence
  source: /note="Description of Artificial Sequence: Synthetic oligonucleotide"
aggcttactatggttcgggat

SEQ ID NO: 23390 - DNA, 21 bp, Artificial Sequence
  source: /note="Description of Artificial Sequence: Synthetic oligonucleotide"
cgtctgactccggagggtcag

SEQ ID NO: 23391 - DNA, 21 bp, Artificial Sequence
  source: /note="Description of Artificial Sequence: Synthetic oligonucleotide"
aggcttgttgataatttgccg

SEQ ID NO: 23392 - DNA, 21 bp, Artificial Sequence
  source: /note="Description of Artificial Sequence: Synthetic oligonucleotide"
cgtctggttaatcagatgtcg

SEQ ID NO: 23393 - DNA, 21 bp, Artificial Sequence
  source: /note="Description of Artificial Sequence: Synthetic oligonucleotide"
cggctggtgcaggcgtttgcg

SEQ ID NO: 23394 - DNA, 21 bp, Artificial Sequence
  source: /note="Description of Artificial Sequence: Synthetic oligonucleotide"
aggctttattctgggattgag

SEQ ID NO: 23395 - DNA, 21 bp, Artificial Sequence
  source: /note="Description of Artificial Sequence: Synthetic oligonucleotide"
cgtctgtattcgaattcgcct

SEQ ID NO: 23396 - DNA, 21 bp, Artificial Sequence
  source: /note="Description of Artificial Sequence: Synthetic oligonucleotide"
cggatggctaaggagacttct

SEQ ID NO: 23397 - DNA, 21 bp, Artificial Sequence
  source: /note="Description of Artificial Sequence: Synthetic oligonucleotide"
cggatggagcctcctatttcg

SEQ ID NO: 23398 - DNA, 21 bp, Artificial Sequence
  source: /note="Description of Artificial Sequence: Synthetic oligonucleotide"
aggatggagccttctgctgtt

SEQ ID NO: 23399 - DNA, 21 bp, Artificial Sequence
  source: /note="Description of Artificial Sequence: Synthetic oligonucleotide"
aggatgggggctgctgtgtat

SEQ ID NO: 23400 - DNA, 21 bp, Artificial Sequence
  source: /note="Description of Artificial Sequence: Synthetic oligonucleotide"
cggatgggtgttcatccgact

SEQ ID NO: 23401 - DNA, 21 bp, Artificial Sequence
  source: /note="Description of Artificial Sequence: Synthetic oligonucleotide"
aggatgggttatgttgaggct

SEQ ID NO: 23402 - DNA, 21 bp, Artificial Sequence
  source: /note="Description of Artificial Sequence: Synthetic oligonucleotide"
aggatgcatgtgactgaggct

SEQ ID NO: 23403 - DNA, 21 bp, Artificial Sequence
  source: /note="Description of Artificial Sequence: Synthetic oligonucleotide"
cggatgattcagtcgggtcat

SEQ ID NO: 23404 - DNA, 21 bp, Artificial Sequence
  source: /note="Description of Artificial Sequence: Synthetic oligonucleotide"
cgtatgttggcgccgtctggg

SEQ ID NO: 23405 - DNA, 21 bp, Artificial Sequence
  source: /note="Description of Artificial Sequence: Synthetic oligonucleotide"
aggatgctggatcagttgaat

SEQ ID NO: 23406 - DNA, 21 bp, Artificial Sequence
  source: /note="Description of Artificial Sequence: Synthetic oligonucleotide"
aggatgttgccggatgtgtat

SEQ ID NO: 23407 - DNA, 21 bp, Artificial Sequence
  source: /note="Description of Artificial Sequence: Synthetic oligonucleotide"
cggatgatgcctgatcttcct

SEQ ID NO: 23408 - DNA, 21 bp, Artificial Sequence
  source: /note="Description of Artificial Sequence: Synthetic oligonucleotide"
aggatgaatgaggcgctgggg

SEQ ID NO: 23409 - DNA, 21 bp, Artificial Sequence
  source: /note="Description of Artificial Sequence: Synthetic oligonucleotide"
cgtatgaatattcaggttggt

SEQ ID NO: 23410 - DNA, 21 bp, Artificial Sequence
  source: /note="Description of Artificial Sequence: Synthetic oligonucleotide"
cggatgaattatgggactgag

SEQ ID NO: 23411 - DNA, 21 bp, Artificial Sequence
  source: /note="Description of Artificial Sequence: Synthetic oligonucleotide"
aggatgccggctatggctgtt

SEQ ID NO: 23412 - DNA, 21 bp, Artificial Sequence
  source: /note="Description of Artificial Sequence: Synthetic oligonucleotide"
aggatgccggcgtcgaatgcg

SEQ ID NO: 23413 - DNA, 21 bp, Artificial Sequence
  source: /note="Description of Artificial Sequence: Synthetic oligonucleotide"
cgtatgcctagggagcagtcg

SEQ ID NO: 23414 - DNA, 21 bp, Artificial Sequence
  source: /note="Description of Artificial Sequence: Synthetic oligonucleotide"
cggatgcagtcggcgtatgtg

SEQ ID NO: 23415 - DNA, 21 bp, Artificial Sequence
  source: /note="Description of Artificial Sequence: Synthetic oligonucleotide"
cgtatgcagtcgcagggtttt

SEQ ID NO: 23416 - DNA, 21 bp, Artificial Sequence
  source: /note="Description of Artificial Sequence: Synthetic oligonucleotide"
cgtatgtctgattcgtttgtg

SEQ ID NO: 23417 - DNA, 21 bp, Artificial Sequence
  source: /note="Description of Artificial Sequence: Synthetic oligonucleotide"
aggatgtctgaggttacgatt

SEQ ID NO: 23418 - DNA, 21 bp, Artificial Sequence
  source: /note="Description of Artificial Sequence: Synthetic oligonucleotide"
cgtatgagtattcctaatgat

SEQ ID NO: 23419 - DNA, 21 bp, Artificial Sequence
  source: /note="Description of Artificial Sequence: Synthetic oligonucleotide"
cggatgtcgttggctagtgag

SEQ ID NO: 23420 - DNA, 21 bp, Artificial Sequence
  source: /note="Description of Artificial Sequence: Synthetic oligonucleotide"
cggatgtctaatagtcctcag

SEQ ID NO: 23421 - DNA, 21 bp, Artificial Sequence
  source: /note="Description of Artificial Sequence: Synthetic oligonucleotide"
cgtatgtctagtgatcttcct

SEQ ID NO: 23422 - DNA, 21 bp, Artificial Sequence
  source: /note="Description of Artificial Sequence: Synthetic oligonucleotide"
cggatgacggcggctatttgt

SEQ ID NO: 23423 - DNA, 21 bp, Artificial Sequence
  source: /note="Description of Artificial Sequence: Synthetic oligonucleotide"
cgtatgactcatactgcgcct

SEQ ID NO: 23424 - DNA, 21 bp, Artificial Sequence
  source: /note="Description of Artificial Sequence: Synthetic oligonucleotide"
cggatgactattggtactacg

SEQ ID NO: 23425 - DNA, 21 bp, Artificial Sequence
  source: /note="Description of Artificial Sequence: Synthetic oligonucleotide"
cgtatggttggtggtggtgat

SEQ ID NO: 23426 - DNA, 21 bp, Artificial Sequence
  source: /note="Description of Artificial Sequence: Synthetic oligonucleotide"
aggatggttaatcttgggcat

SEQ ID NO: 23427 - DNA, 21 bp, Artificial Sequence
  source: /note="Description of Artificial Sequence: Synthetic oligonucleotide"
cgtatggtttctagttcggcg

SEQ ID NO: 23428 - DNA, 21 bp, Artificial Sequence
  source: /note="Description of Artificial Sequence: Synthetic oligonucleotide"
cgtatgtatggttcgtcttct

SEQ ID NO: 23429 - DNA, 21 bp, Artificial Sequence
  source: /note="Description of Artificial Sequence: Synthetic oligonucleotide"
aggaatgcggctgtggatccg

SEQ ID NO: 23430 - DNA, 21 bp, Artificial Sequence
  source: /note="Description of Artificial Sequence: Synthetic oligonucleotide"
aggaatgcgggggagactcat

SEQ ID NO: 23431 - DNA, 21 bp, Artificial Sequence
  source: /note="Description of Artificial Sequence: Synthetic oligonucleotide"
cgtaatgctgggacggatcgg

SEQ ID NO: 23432 - DNA, 21 bp, Artificial Sequence
  source: /note="Description of Artificial Sequence: Synthetic oligonucleotide"
aggaatgctaatatgcctacg

SEQ ID NO: 23433 - DNA, 21 bp, Artificial Sequence
  source: /note="Description of Artificial Sequence: Synthetic oligonucleotide"
cgtaatgcgccttctgcggat

SEQ ID NO: 23434 - DNA, 21 bp, Artificial Sequence
  source: /note="Description of Artificial Sequence: Synthetic oligonucleotide"
aggaatgctactgcgatggtt

SEQ ID NO: 23435 - DNA, 21 bp, Artificial Sequence
  source: /note="Description of Artificial Sequence: Synthetic oligonucleotide"
aggaatgatttgacgggtgtt

SEQ ID NO: 23436 - DNA, 21 bp, Artificial Sequence
  source: /note="Description of Artificial Sequence: Synthetic oligonucleotide"
cggaatgatatggtgcagtct

SEQ ID NO: 23437 - DNA, 21 bp, Artificial Sequence
  source: /note="Description of Artificial Sequence: Synthetic oligonucleotide"
cggaatgataatagggttact

SEQ ID NO: 23438 - DNA, 21 bp, Artificial Sequence
  source: /note="Description of Artificial Sequence: Synthetic oligonucleotide"
cgtaatgataggtcgtttgct

SEQ ID NO: 23439 - DNA, 21 bp, Artificial Sequence
  source: /note="Description of Artificial Sequence: Synthetic oligonucleotide"
cgtaatgatactagtgatttg

SEQ ID NO: 23440 - DNA, 21 bp, Artificial Sequence
  source: /note="Description of Artificial Sequence: Synthetic oligonucleotide"
cgtaatgatgtttcggatatt

SEQ ID NO: 23441 - DNA, 21 bp, Artificial Sequence
  source: /note="Description of Artificial Sequence: Synthetic oligonucleotide"
cgtaatgagcatcatttgcct

SEQ ID NO: 23442 - DNA, 21 bp, Artificial Sequence
  source: /note="Description of Artificial Sequence: Synthetic oligonucleotide"
cgtaatgagccgaatggtggg

SEQ ID NO: 23443 - DNA, 21 bp, Artificial Sequence
  source: /note="Description of Artificial Sequence: Synthetic oligonucleotide"
cggaattttgctgattctatg

SEQ ID NO: 23444 - DNA, 21 bp, Artificial Sequence
  source: /note="Description of Artificial Sequence: Synthetic oligonucleotide"
cggaattttactggtcctgag

SEQ ID NO: 23445 - DNA, 21 bp, Artificial Sequence
  source: /note="Description of Artificial Sequence: Synthetic oligonucleotide"
cgtaatggtgctattcaggct

SEQ ID NO: 23446 - DNA, 21 bp, Artificial Sequence
  source: /note="Description of Artificial Sequence: Synthetic oligonucleotide"
cggaatggtcgtgatgcgggg

SEQ ID NO: 23447 - DNA, 21 bp, Artificial Sequence
  source: /note="Description of Artificial Sequence: Synthetic oligonucleotide"
cgtaatggtgtgacggcggcg

SEQ ID NO: 23448 - DNA, 21 bp, Artificial Sequence
  source: /note="Description of Artificial Sequence: Synthetic oligonucleotide"
cggaatcatggttttgctgag

SEQ ID NO: 23449 - DNA, 21 bp, Artificial Sequence
  source: /note="Description of Artificial Sequence: Synthetic oligonucleotide"
cggaatattgatgatgcgaat

SEQ ID NO: 23450 - DNA, 21 bp, Artificial Sequence
  source: /note="Description of Artificial Sequence: Synthetic oligonucleotide"
cgtaataaggagaatgttggg

SEQ ID NO: 23451 - DNA, 21 bp, Artificial Sequence
  source: /note="Description of Artificial Sequence: Synthetic oligonucleotide"
cgtaatcttccgcctcgtgat

SEQ ID NO: 23452 - DNA, 21 bp, Artificial Sequence
  source: /note="Description of Artificial Sequence: Synthetic oligonucleotide"
cggaatctgactattcctgag

SEQ ID NO: 23453 - DNA, 21 bp, Artificial Sequence
  source: /note="Description of Artificial Sequence: Synthetic oligonucleotide"
aggaatatggcgctgactagt

SEQ ID NO: 23454 - DNA, 21 bp, Artificial Sequence
  source: /note="Description of Artificial Sequence: Synthetic oligonucleotide"
aggaataatgctctgccggat

SEQ ID NO: 23455 - DNA, 21 bp, Artificial Sequence
  source: /note="Description of Artificial Sequence: Synthetic oligonucleotide"
cgtaataattctcatgggttt

SEQ ID NO: 23456 - DNA, 21 bp, Artificial Sequence
  source: /note="Description of Artificial Sequence: Synthetic oligonucleotide"
aggaatcctgatatgcatcat

SEQ ID NO: 23457 - DNA, 21 bp, Artificial Sequence
  source: /note="Description of Artificial Sequence: Synthetic oligonucleotide"
aggaatccgcttagtgctcag

SEQ ID NO: 23458 - DNA, 21 bp, Artificial Sequence
  source: /note="Description of Artificial Sequence: Synthetic oligonucleotide"
aggaatcaggggcttttggct

SEQ ID NO: 23459 - DNA, 21 bp, Artificial Sequence
  source: /note="Description of Artificial Sequence: Synthetic oligonucleotide"
cggaatcagactagtacgtct

SEQ ID NO: 23460 - DNA, 21 bp, Artificial Sequence
  source: /note="Description of Artificial Sequence: Synthetic oligonucleotide"
aggaatcgggatccgcagttt

SEQ ID NO: 23461 - DNA, 21 bp, Artificial Sequence
  source: /note="Description of Artificial Sequence: Synthetic oligonucleotide"
aggaatagtgctgctttgcag

SEQ ID NO: 23462 - DNA, 21 bp, Artificial Sequence
  source: /note="Description of Artificial Sequence: Synthetic oligonucleotide"
cggaattcggattattcggtt

SEQ ID NO: 23463 - DNA, 21 bp, Artificial Sequence
  source: /note="Description of Artificial Sequence: Synthetic oligonucleotide"
aggaattctcttggttttggg

SEQ ID NO: 23464 - DNA, 21 bp, Artificial Sequence
  source: /note="Description of Artificial Sequence: Synthetic oligonucleotide"
cgtaatagtcaggttcctatt

SEQ ID NO: 23465 - DNA, 21 bp, Artificial Sequence
  source: /note="Description of Artificial Sequence: Synthetic oligonucleotide"
cgtaattcttcttcgttgggg

SEQ ID NO: 23466 - DNA, 21 bp, Artificial Sequence
  source: /note="Description of Artificial Sequence: Synthetic oligonucleotide"
cgtaattctacgtctatgacg

SEQ ID NO: 23467 - DNA, 21 bp, Artificial Sequence
  source: /note="Description of Artificial Sequence: Synthetic oligonucleotide"
cggaattcggtgactactcct

SEQ ID NO: 23468 - DNA, 21 bp, Artificial Sequence
  source: /note="Description of Artificial Sequence: Synthetic oligonucleotide"
cggaatagttatcctagtgat

SEQ ID NO: 23469 - DNA, 21 bp, Artificial Sequence
  source: /note="Description of Artificial Sequence: Synthetic oligonucleotide"
cgtaatacggatgttgattcg

SEQ ID NO: 23470 - DNA, 21 bp, Artificial Sequence
  source: /note="Description of Artificial Sequence: Synthetic oligonucleotide"
aggaatactcttctgatggat

SEQ ID NO: 23471 - DNA, 21 bp, Artificial Sequence
  source: /note="Description of Artificial Sequence: Synthetic oligonucleotide"
cgtaatacgctggttattcct

SEQ ID NO: 23472 - DNA, 21 bp, Artificial Sequence
  source: /note="Description of Artificial Sequence: Synthetic oligonucleotide"
aggaatactcctaatcgggat

SEQ ID NO: 23473 - DNA, 21 bp, Artificial Sequence
  source: /note="Description of Artificial Sequence: Synthetic oligonucleotide"
cggaatacttcgcagctggat

SEQ ID NO: 23474 - DNA, 21 bp, Artificial Sequence
  source: /note="Description of Artificial Sequence: Synthetic oligonucleotide"
cgtaatgtggagactgctggt

SEQ ID NO: 23475 - DNA, 21 bp, Artificial Sequence
  source: /note="Description of Artificial Sequence: Synthetic oligonucleotide"
cgtaatgttggtcatggtgat

SEQ ID NO: 23476 - DNA, 21 bp, Artificial Sequence
  source: /note="Description of Artificial Sequence: Synthetic oligonucleotide"
cgtaatgttggtcctcctact

SEQ ID NO: 23477 - DNA, 21 bp, Artificial Sequence
  source: /note="Description of Artificial Sequence: Synthetic oligonucleotide"
aggaatgttcctgagcatcgg

SEQ ID NO: 23478 - DNA, 21 bp, Artificial Sequence
  source: /note="Description of Artificial Sequence: Synthetic oligonucleotide"
cggaatgttcagttttcgccg

SEQ ID NO: 23479 - DNA, 21 bp, Artificial Sequence
  source: /note="Description of Artificial Sequence: Synthetic oligonucleotide"
cggaatgtgcgtgatactccg

SEQ ID NO: 23480 - DNA, 21 bp, Artificial Sequence
  source: /note="Description of Artificial Sequence: Synthetic oligonucleotide"
cgtaatgtgtctgatagttct

SEQ ID NO: 23481 - DNA, 21 bp, Artificial Sequence
  source: /note="Description of Artificial Sequence: Synthetic oligonucleotide"
cgtaattatgcgggtaaggat

SEQ ID NO: 23482 - DNA, 21 bp, Artificial Sequence
  source: /note="Description of Artificial Sequence: Synthetic oligonucleotide"
cggcctgctgcggtttctaat

SEQ ID NO: 23483 - DNA, 21 bp, Artificial Sequence
  source: /note="Description of Artificial Sequence: Synthetic oligonucleotide"
cgtccggctgataagtgtacg

SEQ ID NO: 23484 - DNA, 21 bp, Artificial Sequence
  source: /note="Description of Artificial Sequence: Synthetic oligonucleotide"
cggcctgcgaagctggagttg

SEQ ID NO: 23485 - DNA, 21 bp, Artificial Sequence
  source: /note="Description of Artificial Sequence: Synthetic oligonucleotide"
cggccggctatgctggctact

SEQ ID NO: 23486 - DNA, 21 bp, Artificial Sequence
  source: /note="Description of Artificial Sequence: Synthetic oligonucleotide"
cggccggcgtcgggtcatgtg

SEQ ID NO: 23487 - DNA, 21 bp, Artificial Sequence
  source: /note="Description of Artificial Sequence: Synthetic oligonucleotide"
cggcctgcgacggtgggtgct

SEQ ID NO: 23488 - DNA, 21 bp, Artificial Sequence
  source: /note="Description of Artificial Sequence: Synthetic oligonucleotide"
cgtcctgctgtgatgaagggg

SEQ ID NO: 23489 - DNA, 21 bp, Artificial Sequence
  source: /note="Description of Artificial Sequence: Synthetic oligonucleotide"
cgtcctgatgcttctgagtct

SEQ ID NO: 23490 - DNA, 21 bp, Artificial Sequence
  source: /note="Description of Artificial Sequence: Synthetic oligonucleotide"
aggcctgatgatcctgcgaat

SEQ ID NO: 23491 - DNA, 21 bp, Artificial Sequence
  source: /note="Description of Artificial Sequence: Synthetic oligonucleotide"
cgtcctgatggtatggcttct

SEQ ID NO: 23492 - DNA, 21 bp, Artificial Sequence
  source: /note="Description of Artificial Sequence: Synthetic oligonucleotide"
cgtcctgatcattctaatgtt

SEQ ID NO: 23493 - DNA, 21 bp, Artificial Sequence
  source: /note="Description of Artificial Sequence: Synthetic oligonucleotide"
aggccggataattctaaggcg

SEQ ID NO: 23494 - DNA, 21 bp, Artificial Sequence
  source: /note="Description of Artificial Sequence: Synthetic oligonucleotide"
aggccggattcgctgaagctt

SEQ ID NO: 23495 - DNA, 21 bp, Artificial Sequence
  source: /note="Description of Artificial Sequence: Synthetic oligonucleotide"
cggccggattcgccttttact

SEQ ID NO: 23496 - DNA, 21 bp, Artificial Sequence
  source: /note="Description of Artificial Sequence: Synthetic oligonucleotide"
cggccggatactcgggctgct

SEQ ID NO: 23497 - DNA, 21 bp, Artificial Sequence
  source: /note="Description of Artificial Sequence: Synthetic oligonucleotide"
aggcctgaggaggctacgtcg

SEQ ID NO: 23498 - DNA, 21 bp, Artificial Sequence
  source: /note="Description of Artificial Sequence: Synthetic oligonucleotide"
cgtcctgaggggtctatgggt

SEQ ID NO: 23499 - DNA, 21 bp, Artificial Sequence
  source: /note="Description of Artificial Sequence: Synthetic oligonucleotide"
aggcctgagcttggtcttctg

SEQ ID NO: 23500 - DNA, 21 bp, Artificial Sequence
  source: /note="Description of Artificial Sequence: Synthetic oligonucleotide"
cgtcctgagttgaagcagagt

SEQ ID NO: 23501 - DNA, 21 bp, Artificial Sequence
  source: /note="Description of Artificial Sequence: Synthetic oligonucleotide"
aggcctgagctgtcttcgagg

SEQ ID NO: 23502 - DNA, 21 bp, Artificial Sequence
  source: /note="Description of Artificial Sequence: Synthetic oligonucleotide"
cggcctgagtcggtgtatggg

SEQ ID NO: 23503 - DNA, 21 bp, Artificial Sequence
  source: /note="Description of Artificial Sequence: Synthetic oligonucleotide"
aggccgtttgctcctcaggag

SEQ ID NO: 23504 - DNA, 21 bp, Artificial Sequence
  source: /note="Description of Artificial Sequence: Synthetic oligonucleotide"
cgtccgtttagtccgacgccg

SEQ ID NO: 23505 - DNA, 21 bp, Artificial Sequence
  source: /note="Description of Artificial Sequence: Synthetic oligonucleotide"
aggcctggtgctgatgctagg

SEQ ID NO: 23506 - DNA, 21 bp, Artificial Sequence
  source: /note="Description of Artificial Sequence: Synthetic oligonucleotide"
aggccggggggtggtacggag

SEQ ID NO: 23507 - DNA, 21 bp, Artificial Sequence
  source: /note="Description of Artificial Sequence: Synthetic oligonucleotide"
cggccggggttgtcgacgctt

SEQ ID NO: 23508 - DNA, 21 bp, Artificial Sequence
  source: /note="Description of Artificial Sequence: Synthetic oligonucleotide"
aggcctgggaatacgttgcct

SEQ ID NO: 23509 - DNA, 21 bp, Artificial Sequence
  source: /note="Description of Artificial Sequence: Synthetic oligonucleotide"
cggccggggagggagccgctt

SEQ ID NO: 23510 - DNA, 21 bp, Artificial Sequence
  source: /note="Description of Artificial Sequence: Synthetic oligonucleotide"
aggccgggttcgagtactgag

SEQ ID NO: 23511 - DNA, 21 bp, Artificial Sequence
  source: /note="Description of Artificial Sequence: Synthetic oligonucleotide"
cgtccgggtacgtcgacggtt

SEQ ID NO: 23512 - DNA, 21 bp, Artificial Sequence
  source: /note="Description of Artificial Sequence: Synthetic oligonucleotide"
cgtccgcatagtgataagttt

SEQ ID NO: 23513 - DNA, 21 bp, Artificial Sequence
  source: /note="Description of Artificial Sequence: Synthetic oligonucleotide"
cggcctattgcttctacgaat

SEQ ID NO: 23514 - DNA, 21 bp, Artificial Sequence
  source: /note="Description of Artificial Sequence: Synthetic oligonucleotide"
cggcctaaggagtcgtctgtt

SEQ ID NO: 23515 - DNA, 21 bp, Artificial Sequence
  source: /note="Description of Artificial Sequence: Synthetic oligonucleotide"
aggcctcttgatgcgcctgat

SEQ ID NO: 23516 - DNA, 21 bp, Artificial Sequence
  source: /note="Description of Artificial Sequence: Synthetic oligonucleotide"
cgtcctcttgatcaggagagt

SEQ ID NO: 23517 - DNA, 21 bp, Artificial Sequence
  source: /note="Description of Artificial Sequence: Synthetic oligonucleotide"
cggccgctggagtctcgggat

SEQ ID NO: 23518 - DNA, 21 bp, Artificial Sequence
  source: /note="Description of Artificial Sequence: Synthetic oligonucleotide"
cgtcctcttggtccgcatatt

SEQ ID NO: 23519 - DNA, 21 bp, Artificial Sequence
  source: /note="Description of Artificial Sequence: Synthetic oligonucleotide"
cgtcctctgggtcctaatgat

SEQ ID NO: 23520 - DNA, 21 bp, Artificial Sequence
  source: /note="Description of Artificial Sequence: Synthetic oligonucleotide"
cgtccgctggggtctgatact

SEQ ID NO: 23521 - DNA, 21 bp, Artificial Sequence
  source: /note="Description of Artificial Sequence: Synthetic oligonucleotide"
cggcctctgattcctaataat

SEQ ID NO: 23522 - DNA, 21 bp, Artificial Sequence
  source: /note="Description of Artificial Sequence: Synthetic oligonucleotide"
aggccgttgaagcatgatcct

SEQ ID NO: 23523 - DNA, 21 bp, Artificial Sequence
  source: /note="Description of Artificial Sequence: Synthetic oligonucleotide"
cgtccgctgactgagtatgtg

SEQ ID NO: 23524 - DNA, 21 bp, Artificial Sequence
  source: /note="Description of Artificial Sequence: Synthetic oligonucleotide"
aggccgcttgttatgggggtt

SEQ ID NO: 23525 - DNA, 21 bp, Artificial Sequence
  source: /note="Description of Artificial Sequence: Synthetic oligonucleotide"
aggccgatggctactttgtct

SEQ ID NO: 23526 - DNA, 21 bp, Artificial Sequence
  source: /note="Description of Artificial Sequence: Synthetic oligonucleotide"
aggccgatgattacgtctgcg

SEQ ID NO: 23527 - DNA, 21 bp, Artificial Sequence
  source: /note="Description of Artificial Sequence: Synthetic oligonucleotide"
cggccgatgaatcttaaggag

SEQ ID NO: 23528 - DNA, 21 bp, Artificial Sequence
  source: /note="Description of Artificial Sequence: Synthetic oligonucleotide"
cgtccgatgccgaattcgcct

SEQ ID NO: 23529 - DNA, 21 bp, Artificial Sequence
  source: /note="Description of Artificial Sequence: Synthetic oligonucleotide"
cgtccgatgtctcttgagtcg

SEQ ID NO: 23530 - DNA, 21 bp, Artificial Sequence
  source: /note="Description of Artificial Sequence: Synthetic oligonucleotide"
aggccgatgactccgcagctt

SEQ ID NO: 23531 - DNA, 21 bp, Artificial Sequence
  source: /note="Description of Artificial Sequence: Synthetic oligonucleotide"
aggccgaatgctgttactgtg

SEQ ID NO: 23532 - DNA, 21 bp, Artificial Sequence
  source: /note="Description of Artificial Sequence: Synthetic oligonucleotide"
cgtccgcctgagattcatttt

SEQ ID NO: 23533 - DNA, 21 bp, Artificial Sequence
  source: /note="Description of Artificial Sequence: Synthetic oligonucleotide"
cgtcctccgggtcctatgtct

SEQ ID NO: 23534 - DNA, 21 bp, Artificial Sequence
  source: /note="Description of Artificial Sequence: Synthetic oligonucleotide"
cggccgcctttgggtgagggt

SEQ ID NO: 23535 - DNA, 21 bp, Artificial Sequence
  source: /note="Description of Artificial Sequence: Synthetic oligonucleotide"
cggcctccgaatgctactcct

SEQ ID NO: 23536 - DNA, 21 bp, Artificial Sequence
  source: /note="Description of Artificial Sequence: Synthetic oligonucleotide"
aggcctcctaatggggatatg

SEQ ID NO: 23537 - DNA, 21 bp, Artificial Sequence
  source: /note="Description of Artificial Sequence: Synthetic oligonucleotide"
cggccgccttcgacggttaat

SEQ ID NO: 23538 - DNA, 21 bp, Artificial Sequence
  source: /note="Description of Artificial Sequence: Synthetic oligonucleotide"
aggccgcctagtgttcagcct

SEQ ID NO: 23539 - DNA, 21 bp, Artificial Sequence
  source: /note="Description of Artificial Sequence: Synthetic oligonucleotide"
cgtccgcctgttcagacgggg

SEQ ID NO: 23540 - DNA, 21 bp, Artificial Sequence
  source: /note="Description of Artificial Sequence: Synthetic oligonucleotide"
cgtccgcagcatattatgcct

SEQ ID NO: 23541 - DNA, 21 bp, Artificial Sequence
  source: /note="Description of Artificial Sequence: Synthetic oligonucleotide"
cgtccgcagaaggcgtctgag

SEQ ID NO: 23542 - DNA, 21 bp, Artificial Sequence
  source: /note="Description of Artificial Sequence: Synthetic oligonucleotide"
cgtcctcagcctacgccgtgt

SEQ ID NO: 23543 - DNA, 21 bp, Artificial Sequence
  source: /note="Description of Artificial Sequence: Synthetic oligonucleotide"
cgtccgcgggagatttcgccg

SEQ ID NO: 23544 - DNA, 21 bp, Artificial Sequence
  source: /note="Description of Artificial Sequence: Synthetic oligonucleotide"
cggccgcgttttgctagtgat

SEQ ID NO: 23545 - DNA, 21 bp, Artificial Sequence
  source: /note="Description of Artificial Sequence: Synthetic oligonucleotide"
cggccgtcggcggctactccg

SEQ ID NO: 23546 - DNA, 21 bp, Artificial Sequence
  source: /note="Description of Artificial Sequence: Synthetic oligonucleotide"
cgtccgagtgatctgaagaat

SEQ ID NO: 23547 - DNA, 21 bp, Artificial Sequence
  source: /note="Description of Artificial Sequence: Synthetic oligonucleotide"
aggccttctggtatggctcat

SEQ ID NO: 23548 - DNA, 21 bp, Artificial Sequence
  source: /note="Description of Artificial Sequence: Synthetic oligonucleotide"
cggccgtcgcttgcggtgggt

SEQ ID NO: 23549 - DNA, 21 bp, Artificial Sequence
  source: /note="Description of Artificial Sequence: Synthetic oligonucleotide"
cgtccgagtttgccggatttt

SEQ ID NO: 23550 - DNA, 21 bp, Artificial Sequence
  source: /note="Description of Artificial Sequence: Synthetic oligonucleotide"
cgtccttctcttagtggtacg

SEQ ID NO: 23551 - DNA, 21 bp, Artificial Sequence
  source: /note="Description of Artificial Sequence: Synthetic oligonucleotide"
cgtccgtcgctttctccgact

SEQ ID NO: 23552 - DNA, 21 bp, Artificial Sequence
  source: /note="Description of Artificial Sequence: Synthetic oligonucleotide"
aggccttcgaatgctatggcg

SEQ ID NO: 23553 - DNA, 21 bp, Artificial Sequence
  source: /note="Description of Artificial Sequence: Synthetic oligonucleotide"
cgtcctagtaatcagagttct

SEQ ID NO: 23554 - DNA, 21 bp, Artificial Sequence
  source: /note="Description of Artificial Sequence: Synthetic oligonucleotide"
aggccttcgactgattcttat

SEQ ID NO: 23555 - DNA, 21 bp, Artificial Sequence
  source: /note="Description of Artificial Sequence: Synthetic oligonucleotide"
cgtccgtcgacgtatccgtct

SEQ ID NO: 23556 - DNA, 21 bp, Artificial Sequence
  source: /note="Description of Artificial Sequence: Synthetic oligonucleotide"
aggccgtctgtgaatgagcat

SEQ ID NO: 23557 - DNA, 21 bp, Artificial Sequence
  source: /note="Description of Artificial Sequence: Synthetic oligonucleotide"
cgtcctacgctgccgatggct

SEQ ID NO: 23558 - DNA, 21 bp, Artificial Sequence
  source: /note="Description of Artificial Sequence: Synthetic oligonucleotide"
aggcctactcagattcttggt

SEQ ID NO: 23559 - DNA, 21 bp, Artificial Sequence
  source: /note="Description of Artificial Sequence: Synthetic oligonucleotide"
cggcctacttctccgccggcg

SEQ ID NO: 23560 - DNA, 21 bp, Artificial Sequence
  source: /note="Description of Artificial Sequence: Synthetic oligonucleotide"
cggccgacttctactacttct

SEQ ID NO: 23561 - DNA, 21 bp, Artificial Sequence
  source: /note="Description of Artificial Sequence: Synthetic oligonucleotide"
aggccgactacgtctaatggt

SEQ ID NO: 23562 - DNA, 21 bp, Artificial Sequence
  source: /note="Description of Artificial Sequence: Synthetic oligonucleotide"
aggcctactacgacgcaggag

SEQ ID NO: 23563 - DNA, 21 bp, Artificial Sequence
  source: /note="Description of Artificial Sequence: Synthetic oligonucleotide"
aggccgactactacgtctgtt

SEQ ID NO: 23564 - DNA, 21 bp, Artificial Sequence
  source: /note="Description of Artificial Sequence: Synthetic oligonucleotide"
cgtcctgtttgtgatggtact

SEQ ID NO: 23565 - DNA, 21 bp, Artificial Sequence
  source: /note="Description of Artificial Sequence: Synthetic oligonucleotide"
cgtcctgttgattgggatctt

SEQ ID NO: 23566 - DNA, 21 bp, Artificial Sequence
  source: /note="Description of Artificial Sequence: Synthetic oligonucleotide"
cggcctgtgaaggagtatgtg

SEQ ID NO: 23567 - DNA, 21 bp, Artificial Sequence
  source: /note="Description of Artificial Sequence: Synthetic oligonucleotide"
cgtcctgtgttgtctactggg

SEQ ID NO: 23568 - DNA, 21 bp, Artificial Sequence
  source: /note="Description of Artificial Sequence: Synthetic oligonucleotide"
cggcctgttccggatcagatt

SEQ ID NO: 23569 - DNA, 21 bp, Artificial Sequence
  source: /note="Description of Artificial Sequence: Synthetic oligonucleotide"
cgtccttatccgccgcctatt

SEQ ID NO: 23570 - DNA, 21 bp, Artificial Sequence
  source: /note="Description of Artificial Sequence: Synthetic oligonucleotide"
aggcaggctctgattagtggt

SEQ ID NO: 23571 - DNA, 21 bp, Artificial Sequence
  source: /note="Description of Artificial Sequence: Synthetic oligonucleotide"
aggcaggatgctgctatttct

SEQ ID NO: 23572 - DNA, 21 bp, Artificial Sequence
  source: /note="Description of Artificial Sequence: Synthetic oligonucleotide"
cggcaggatgatcataagatt

SEQ ID NO: 23573 - DNA, 21 bp, Artificial Sequence
  source: /note="Description of Artificial Sequence: Synthetic oligonucleotide"
aggcagtttacggagaatgct

SEQ ID NO: 23574 - DNA, 21 bp, Artificial Sequence
  source: /note="Description of Artificial Sequence: Synthetic oligonucleotide"
cgtcagggtgttactcctact

SEQ ID NO: 23575 - DNA, 21 bp, Artificial Sequence
  source: /note="Description of Artificial Sequence: Synthetic oligonucleotide"
cggcagcatcagcttccgcat

SEQ ID NO: 23576 - DNA, 21 bp, Artificial Sequence
  source: /note="Description of Artificial Sequence: Synthetic oligonucleotide"
cgtcagattccgcatacggag

SEQ ID NO: 23577 - DNA, 21 bp, Artificial Sequence
  source: /note="Description of Artificial Sequence: Synthetic oligonucleotide"
cgtcagaaggagcataatctt

SEQ ID NO: 23578 - DNA, 21 bp, Artificial Sequence
  source: /note="Description of Artificial Sequence: Synthetic oligonucleotide"
cggcagctggaggcggatcct

SEQ ID NO: 23579 - DNA, 21 bp, Artificial Sequence
  source: /note="Description of Artificial Sequence: Synthetic oligonucleotide"
aggcagaatgatgtttgttct

SEQ ID NO: 23580 - DNA, 21 bp, Artificial Sequence
  source: /note="Description of Artificial Sequence: Synthetic oligonucleotide"
aggcagaatcatatgcctgct

SEQ ID NO: 23581 - DNA, 21 bp, Artificial Sequence
  source: /note="Description of Artificial Sequence: Synthetic oligonucleotide"
cgtcagaataggtgtattgat

SEQ ID NO: 23582 - DNA, 21 bp, Artificial Sequence
  source: /note="Description of Artificial Sequence: Synthetic oligonucleotide"
cgtcagcctttgtatacggat

SEQ ID NO: 23583 - DNA, 21 bp, Artificial Sequence
  source: /note="Description of Artificial Sequence: Synthetic oligonucleotide"
aggcagcctccgaagcttgct

SEQ ID NO: 23584 - DNA, 21 bp, Artificial Sequence
  source: /note="Description of Artificial Sequence: Synthetic oligonucleotide"
cggcagcaggcgcatttggtt

SEQ ID NO: 23585 - DNA, 21 bp, Artificial Sequence
  source: /note="Description of Artificial Sequence: Synthetic oligonucleotide"
cgtcagtcggatctttatagt

SEQ ID NO: 23586 - DNA, 21 bp, Artificial Sequence
  source: /note="Description of Artificial Sequence: Synthetic oligonucleotide"
aggcagtctaattttgcgact

SEQ ID NO: 23587 - DNA, 21 bp, Artificial Sequence
  source: /note="Description of Artificial Sequence: Synthetic oligonucleotide"
cgtcagtctaatactttgaat

SEQ ID NO: 23588 - DNA, 21 bp, Artificial Sequence
  source: /note="Description of Artificial Sequence: Synthetic oligonucleotide"
aggcagtctcagtgtcctatg

SEQ ID NO: 23589 - DNA, 21 bp, Artificial Sequence
  source: /note="Description of Artificial Sequence: Synthetic oligonucleotide"
aggcagagttcgtatgatgtg

SEQ ID NO: 23590 - DNA, 21 bp, Artificial Sequence
  source: /note="Description of Artificial Sequence: Synthetic oligonucleotide"
cggcagtcgacgcagctgctt

SEQ ID NO: 23591 - DNA, 21 bp, Artificial Sequence
  source: /note="Description of Artificial Sequence: Synthetic oligonucleotide"
cgtcagtcggttccgacgtcg

SEQ ID NO: 23592 - DNA, 21 bp, Artificial Sequence
  source: /note="Description of Artificial Sequence: Synthetic oligonucleotide"
cgtcagtcggtgtctaatttg

SEQ ID NO: 23593 - DNA, 21 bp, Artificial Sequence
  source: /note="Description of Artificial Sequence: Synthetic oligonucleotide"
cggcagactcatactctgcag

SEQ ID NO: 23594 - DNA, 21 bp, Artificial Sequence
  source: /note="Description of Artificial Sequence: Synthetic oligonucleotide"
aggcagacgcagcagatgtat

SEQ ID NO: 23595 - DNA, 21 bp, Artificial Sequence
  source: /note="Description of Artificial Sequence: Synthetic oligonucleotide"
aggcaggttgagactatgagt

SEQ ID NO: 23596 - DNA, 21 bp, Artificial Sequence
  source: /note="Description of Artificial Sequence: Synthetic oligonucleotide"
cggcaggtggggatgctgtcg

SEQ ID NO: 23597 - DNA, 21 bp, Artificial Sequence
  source: /note="Description of Artificial Sequence: Synthetic oligonucleotide"
aggcaggttccgtctgcggag

SEQ ID NO: 23598 - DNA, 21 bp, Artificial Sequence
  source: /note="Description of Artificial Sequence: Synthetic oligonucleotide"
cggcgggatgatggtagttct

SEQ ID NO: 23599 - DNA, 21 bp, Artificial Sequence
  source: /note="Description of Artificial Sequence: Synthetic oligonucleotide"
cgtcgggatgagttgactttg

SEQ ID NO: 23600 - DNA, 21 bp, Artificial Sequence
  source: /note="Description of Artificial Sequence: Synthetic oligonucleotide"
aggagggatgggatgcttatg

SEQ ID NO: 23601 - DNA, 21 bp, Artificial Sequence
  source: /note="Description of Artificial Sequence: Synthetic oligonucleotide"
cggcgtgatcatgctcctatt

SEQ ID NO: 23602 - DNA, 21 bp, Artificial Sequence
  source: /note="Description of Artificial Sequence: Synthetic oligonucleotide"
cggcgtgatccttcgacggtt

SEQ ID NO: 23603 - DNA, 21 bp, Artificial Sequence
  source: /note="Description of Artificial Sequence: Synthetic oligonucleotide"
cggcgtgatcagcctgtgcct

SEQ ID NO: 23604 - DNA, 21 bp, Artificial Sequence
  source: /note="Description of Artificial Sequence: Synthetic oligonucleotide"
cggagggatgtgtctggtccg

SEQ ID NO: 23605 - DNA, 21 bp, Artificial Sequence
  source: /note="Description of Artificial Sequence: Synthetic oligonucleotide"
aggcgggagtcgggtattggt

SEQ ID NO: 23606 - DNA, 21 bp, Artificial Sequence
  source: /note="Description of Artificial Sequence: Synthetic oligonucleotide"
aggcgtgggacttctgagcct

SEQ ID NO: 23607 - DNA, 21 bp, Artificial Sequence
  source: /note="Description of Artificial Sequence: Synthetic oligonucleotide"
aggcgtctgcctggtgatgtt

SEQ ID NO: 23608 - DNA, 21 bp, Artificial Sequence
  source: /note="Description of Artificial Sequence: Synthetic oligonucleotide"
aggcggaatgatgctcttcct

SEQ ID NO: 23609 - DNA, 21 bp, Artificial Sequence
  source: /note="Description of Artificial Sequence: Synthetic oligonucleotide"
cgtaggccggagattgagagg

SEQ ID NO: 23610 - DNA, 21 bp, Artificial Sequence
  source: /note="Description of Artificial Sequence: Synthetic oligonucleotide"
aggcggccttcgttgagtgat

SEQ ID NO: 23611 - DNA, 21 bp, Artificial Sequence
  source: /note="Description of Artificial Sequence: Synthetic oligonucleotide"
aggcggccgtctcctgatgtt

SEQ ID NO: 23612 - DNA, 21 bp, Artificial Sequence
  source: /note="Description of Artificial Sequence: Synthetic oligonucleotide"
cggcggagtgatctgtatgtg

SEQ ID NO: 23613 - DNA, 21 bp, Artificial Sequence
  source: /note="Description of Artificial Sequence: Synthetic oligonucleotide"
cgtcgtacggatacgctgtat

SEQ ID NO: 23614 - DNA, 21 bp, Artificial Sequence
  source: /note="Description of Artificial Sequence: Synthetic oligonucleotide"
aggcgtgttggtactggtgat

SEQ ID NO: 23615 - DNA, 21 bp, Artificial Sequence
  source: /note="Description of Artificial Sequence: Synthetic oligonucleotide"
aggtctgcggcggcggtgtat

SEQ ID NO: 23616 - DNA, 21 bp, Artificial Sequence
  source: /note="Description of Artificial Sequence: Synthetic oligonucleotide"
cggagtgcggcgatgagtgag

SEQ ID NO: 23617 - DNA, 21 bp, Artificial Sequence
  source: /note="Description of Artificial Sequence: Synthetic oligonucleotide"
aggagtgcggcgacgtcgact

SEQ ID NO: 23618 - DNA, 21 bp, Artificial Sequence
  source: /note="Description of Artificial Sequence: Synthetic oligonucleotide"
aggagtgctgcggttacgtat

SEQ ID NO: 23619 - DNA, 21 bp, Artificial Sequence
  source: /note="Description of Artificial Sequence: Synthetic oligonucleotide"
aggtctgcgggtcctaatgag

SEQ ID NO: 23620 - DNA, 21 bp, Artificial Sequence
  source: /note="Description of Artificial Sequence: Synthetic oligonucleotide"
cgttctgctttgaatacgagt

SEQ ID NO: 23621 - DNA, 21 bp, Artificial Sequence
  source: /note="Description of Artificial Sequence: Synthetic oligonucleotide"
cgttctgcgttgcctaatttg

SEQ ID NO: 23622 - DNA, 21 bp, Artificial Sequence
  source: /note="Description of Artificial Sequence: Synthetic oligonucleotide"
aggtctgctatggcggggccg

SEQ ID NO: 23623 - DNA, 21 bp, Artificial Sequence
  source: /note="Description of Artificial Sequence: Synthetic oligonucleotide"
cgtagtgctaatcagagtgtg

SEQ ID NO: 23624 - DNA, 21 bp, Artificial Sequence
  source: /note="Description of Artificial Sequence: Synthetic oligonucleotide"
cgtagtgctcctgcggtgatt

SEQ ID NO: 23625 - DNA, 21 bp, Artificial Sequence
  source: /note="Description of Artificial Sequence: Synthetic oligonucleotide"
cgttcggctccggagctgact

SEQ ID NO: 23626 - DNA, 21 bp, Artificial Sequence
  source: /note="Description of Artificial Sequence: Synthetic oligonucleotide"
cgtagtgctcagctgacggcg

SEQ ID NO: 23627 - DNA, 21 bp, Artificial Sequence
  source: /note="Description of Artificial Sequence: Synthetic oligonucleotide"
cgtagtgctcagaattcgttg

SEQ ID NO: 23628 - DNA, 21 bp, Artificial Sequence
  source: /note="Description of Artificial Sequence: Synthetic oligonucleotide"
aggtctgctagtttgcagtct

SEQ ID NO: 23629 - DNA, 21 bp, Artificial Sequence
  source: /note="Description of Artificial Sequence: Synthetic oligonucleotide"
cgttctgctgttcctgattcg

SEQ ID NO: 23630 - DNA, 21 bp, Artificial Sequence
  source: /note="Description of Artificial Sequence: Synthetic oligonucleotide"
cgttcggatgagcttaggact

SEQ ID NO: 23631 - DNA, 21 bp, Artificial Sequence
  source: /note="Description of Artificial Sequence: Synthetic oligonucleotide"
cgttctgatgggcgtagtatt

SEQ ID NO: 23632 - DNA, 21 bp, Artificial Sequence
  source: /note="Description of Artificial Sequence: Synthetic oligonucleotide"
cggagtgatccggcgcgtacg

SEQ ID NO: 23633 - DNA, 21 bp, Artificial Sequence
  source: /note="Description of Artificial Sequence: Synthetic oligonucleotide"
aggtcggattctaggcctctt

SEQ ID NO: 23634 - DNA, 21 bp, Artificial Sequence
  source: /note="Description of Artificial Sequence: Synthetic oligonucleotide"
aggagtgatagtgttacgcat

SEQ ID NO: 23635 - DNA, 21 bp, Artificial Sequence
  source: /note="Description of Artificial Sequence: Synthetic oligonucleotide"
aggtcggatgtgaggcttgct

SEQ ID NO: 23636 - DNA, 21 bp, Artificial Sequence
  source: /note="Description of Artificial Sequence: Synthetic oligonucleotide"
cggagtgaggagattcgggat

SEQ ID NO: 23637 - DNA, 21 bp, Artificial Sequence
  source: /note="Description of Artificial Sequence: Synthetic oligonucleotide"
aggtctgagattcttgttact

SEQ ID NO: 23638 - DNA, 21 bp, Artificial Sequence
  source: /note="Description of Artificial Sequence: Synthetic oligonucleotide"
cgttcggagaaggtggctcct

SEQ ID NO: 23639 - DNA, 21 bp, Artificial Sequence
  source: /note="Description of Artificial Sequence: Synthetic oligonucleotide"
aggtcggagccggatgagtat

SEQ ID NO: 23640 - DNA, 21 bp, Artificial Sequence
  source: /note="Description of Artificial Sequence: Synthetic oligonucleotide"
cggtctgagtatgcgcctcag

SEQ ID NO: 23641 - DNA, 21 bp, Artificial Sequence
  source: /note="Description of Artificial Sequence: Synthetic oligonucleotide"
cgttctgggcatagtgggtat

SEQ ID NO: 23642 - DNA, 21 bp, Artificial Sequence
  source: /note="Description of Artificial Sequence: Synthetic oligonucleotide"
cgttctgggctggcttcgggg

SEQ ID NO: 23643 - DNA, 21 bp, Artificial Sequence
  source: /note="Description of Artificial Sequence: Synthetic oligonucleotide"
cggtctgggcttgataagact

SEQ ID NO: 23644 - DNA, 21 bp, Artificial Sequence
  source: /note="Description of Artificial Sequence: Synthetic oligonucleotide"
cggtctggtctgaaggagctg

SEQ ID NO: 23645 - DNA, 21 bp, Artificial Sequence
  source: /note="Description of Artificial Sequence: Synthetic oligonucleotide"
cgttctggtatggtgtctgct

SEQ ID NO: 23646 - DNA, 21 bp, Artificial Sequence
  source: /note="Description of Artificial Sequence: Synthetic oligonucleotide"
cgttcgggtcaggatgcgctg

SEQ ID NO: 23647 - DNA, 21 bp, Artificial Sequence
  source: /note="Description of Artificial Sequence: Synthetic oligonucleotide"
cggtctggttctggtcttgag

SEQ ID NO: 23648 - DNA, 21 bp, Artificial Sequence
  source: /note="Description of Artificial Sequence: Synthetic oligonucleotide"
cggagtcataatgaggaggag

SEQ ID NO: 23649 - DNA, 21 bp, Artificial Sequence
  source: /note="Description of Artificial Sequence: Synthetic oligonucleotide"
cggtctcatagtacggattcg

SEQ ID NO: 23650 - DNA, 21 bp, Artificial Sequence
  source: /note="Description of Artificial Sequence: Synthetic oligonucleotide"
cggtcgattgcggcggatgcg

SEQ ID NO: 23651 - DNA, 21 bp, Artificial Sequence
  source: /note="Description of Artificial Sequence: Synthetic oligonucleotide"
cggagtattgcttggagtgag

SEQ ID NO: 23652 - DNA, 21 bp, Artificial Sequence
  source: /note="Description of Artificial Sequence: Synthetic oligonucleotide"
cggtcgattgagaatgcggat

SEQ ID NO: 23653 - DNA, 21 bp, Artificial Sequence
  source: /note="Description of Artificial Sequence: Synthetic oligonucleotide"
cgttctattcctgatcctact

SEQ ID NO: 23654 - DNA, 21 bp, Artificial Sequence
  source: /note="Description of Artificial Sequence: Synthetic oligonucleotide"
cggagtattcagcctacgaat

SEQ ID NO: 23655 - DNA, 21 bp, Artificial Sequence
  source: /note="Description of Artificial Sequence: Synthetic oligonucleotide"
cgttcgattcagacgaatccg

SEQ ID NO: 23656 - DNA, 21 bp, Artificial Sequence
  source: /note="Description of Artificial Sequence: Synthetic oligonucleotide"
cgttcgaaggaggctactagt

SEQ ID NO: 23657 - DNA, 21 bp, Artificial Sequence
  source: /note="Description of Artificial Sequence: Synthetic oligonucleotide"
cggagtaagcaggcttcggag

SEQ ID NO: 23658 - DNA, 21 bp, Artificial Sequence
  source: /note="Description of Artificial Sequence: Synthetic oligonucleotide"
cggagtaagagtagtgatccg

SEQ ID NO: 23659 - DNA, 21 bp, Artificial Sequence
  source: /note="Description of Artificial Sequence: Synthetic oligonucleotide"
aggtcgttggattttcctgat

SEQ ID NO: 23660 - DNA, 21 bp, Artificial Sequence
  source: /note="Description of Artificial Sequence: Synthetic oligonucleotide"
cgtagtctggagcattctaat

SEQ ID NO: 23661 - DNA, 21 bp, Artificial Sequence
  source: /note="Description of Artificial Sequence: Synthetic oligonucleotide"
aggtcgcttcatgggagtcag

SEQ ID NO: 23662 - DNA, 21 bp, Artificial Sequence
  source: /note="Description of Artificial Sequence: Synthetic oligonucleotide"
aggagtttgaatgcgctgcct

SEQ ID NO: 23663 - DNA, 21 bp, Artificial Sequence
  source: /note="Description of Artificial Sequence: Synthetic oligonucleotide"
aggagtctgaattctacggct

SEQ ID NO: 23664 - DNA, 21 bp, Artificial Sequence
  source: /note="Description of Artificial Sequence: Synthetic oligonucleotide"
cgttctcttcctgctgagact

SEQ ID NO: 23665 - DNA, 21 bp, Artificial Sequence
  source: /note="Description of Artificial Sequence: Synthetic oligonucleotide"
cggtcgttgccgagtccgcat

SEQ ID NO: 23666 - DNA, 21 bp, Artificial Sequence
  source: /note="Description of Artificial Sequence: Synthetic oligonucleotide"
cgttctcttcagcttagtgat

SEQ ID NO: 23667 - DNA, 21 bp, Artificial Sequence
  source: /note="Description of Artificial Sequence: Synthetic oligonucleotide"
cgttctctttcttttgctgct

SEQ ID NO: 23668 - DNA, 21 bp, Artificial Sequence
  source: /note="Description of Artificial Sequence: Synthetic oligonucleotide"
aggtcgttgtcgttgcttggg

SEQ ID NO: 23669 - DNA, 21 bp, Artificial Sequence
  source: /note="Description of Artificial Sequence: Synthetic oligonucleotide"
cgtagtcttagtcttccgccg

SEQ ID NO: 23670 - DNA, 21 bp, Artificial Sequence
  source: /note="Description of Artificial Sequence: Synthetic oligonucleotide"
cgttctttgtcgcctacgagg

SEQ ID NO: 23671 - DNA, 21 bp, Artificial Sequence
  source: /note="Description of Artificial Sequence: Synthetic oligonucleotide"
aggtctttgacggttactgcg

SEQ ID NO: 23672 - DNA, 21 bp, Artificial Sequence
  source: /note="Description of Artificial Sequence: Synthetic oligonucleotide"
aggtcgatggctgagtcggtg

SEQ ID NO: 23673 - DNA, 21 bp, Artificial Sequence
  source: /note="Description of Artificial Sequence: Synthetic oligonucleotide"
cggagtatgcatgctggtgcg

SEQ ID NO: 23674 - DNA, 21 bp, Artificial Sequence
  source: /note="Description of Artificial Sequence: Synthetic oligonucleotide"
cgttcgatgatgctgagtccg

SEQ ID NO: 23675 - DNA, 21 bp, Artificial Sequence
  source: /note="Description of Artificial Sequence: Synthetic oligonucleotide"
aggagtatgccgtctggggcg

SEQ ID NO: 23676 - DNA, 21 bp, Artificial Sequence
  source: /note="Description of Artificial Sequence: Synthetic oligonucleotide"
cgtagtatgccgactactact

SEQ ID NO: 23677 - DNA, 21 bp, Artificial Sequence
  source: /note="Description of Artificial Sequence: Synthetic oligonucleotide"
cgtagtatgactggtgcgctt

SEQ ID NO: 23678 - DNA, 21 bp, Artificial Sequence
  source: /note="Description of Artificial Sequence: Synthetic oligonucleotide"
cggtctaataaggagactagt

SEQ ID NO: 23679 - DNA, 21 bp, Artificial Sequence
  source: /note="Description of Artificial Sequence: Synthetic oligonucleotide"
aggtcgaatctggaggggctg

SEQ ID NO: 23680 - DNA, 21 bp, Artificial Sequence
  source: /note="Description of Artificial Sequence: Synthetic oligonucleotide"
aggtcgaatatgcctatgggg

SEQ ID NO: 23681 - DNA, 21 bp, Artificial Sequence
  source: /note="Description of Artificial Sequence: Synthetic oligonucleotide"
cgttctaatcctgcgccgttt

SEQ ID NO: 23682 - DNA, 21 bp, Artificial Sequence
  source: /note="Description of Artificial Sequence: Synthetic oligonucleotide"
cggagtaatcctgtgggtacg

SEQ ID NO: 23683 - DNA, 21 bp, Artificial Sequence
  source: /note="Description of Artificial Sequence: Synthetic oligonucleotide"
aggagtaattcggatgctgtt

SEQ ID NO: 23684 - DNA, 21 bp, Artificial Sequence
  source: /note="Description of Artificial Sequence: Synthetic oligonucleotide"
aggagtaatgttgagtcgaag

SEQ ID NO: 23685 - DNA, 21 bp, Artificial Sequence
  source: /note="Description of Artificial Sequence: Synthetic oligonucleotide"
cgtagtaatgttttggctcag

SEQ ID NO: 23686 - DNA, 21 bp, Artificial Sequence
  source: /note="Description of Artificial Sequence: Synthetic oligonucleotide"
cggtctcctgatactacgggg

SEQ ID NO: 23687 - DNA, 21 bp, Artificial Sequence
  source: /note="Description of Artificial Sequence: Synthetic oligonucleotide"
cggtctcctgagaaggctttg

SEQ ID NO: 23688 - DNA, 21 bp, Artificial Sequence
  source: /note="Description of Artificial Sequence: Synthetic oligonucleotide"
cgttctccgtttggtagtgcg

SEQ ID NO: 23689 - DNA, 21 bp, Artificial Sequence
  source: /note="Description of Artificial Sequence: Synthetic oligonucleotide"
aggagtccgggtaatgttggt

SEQ ID NO: 23690 - DNA, 21 bp, Artificial Sequence
  source: /note="Description of Artificial Sequence: Synthetic oligonucleotide"
cgttctcctccgcaggatatg

SEQ ID NO: 23691 - DNA, 21 bp, Artificial Sequence
  source: /note="Description of Artificial Sequence: Synthetic oligonucleotide"
cgtagtcctcctactattgcg

SEQ ID NO: 23692 - DNA, 21 bp, Artificial Sequence
  source: /note="Description of Artificial Sequence: Synthetic oligonucleotide"
cgttcgcctcagctttatgct

SEQ ID NO: 23693 - DNA, 21 bp, Artificial Sequence
  source: /note="Description of Artificial Sequence: Synthetic oligonucleotide"
cgttcgccgcaggttatgctt

SEQ ID NO: 23694 - DNA, 21 bp, Artificial Sequence
  source: /note="Description of Artificial Sequence: Synthetic oligonucleotide"
aggtcgccttctgggactact

SEQ ID NO: 23695 - DNA, 21 bp, Artificial Sequence
  source: /note="Description of Artificial Sequence: Synthetic oligonucleotide"
cgttctccttctacgtcgaat

SEQ ID NO: 23696 - DNA, 21 bp, Artificial Sequence
  source: /note="Description of Artificial Sequence: Synthetic oligonucleotide"
cggtcgcctagtgttcttcct

SEQ ID NO: 23697 - DNA, 21 bp, Artificial Sequence
  source: /note="Description of Artificial Sequence: Synthetic oligonucleotide"
cgttctccgacttttgctccg

SEQ ID NO: 23698 - DNA, 21 bp, Artificial Sequence
  source: /note="Description of Artificial Sequence: Synthetic oligonucleotide"
aggtctccgacttcggtggct

SEQ ID NO: 23699 - DNA, 21 bp, Artificial Sequence
  source: /note="Description of Artificial Sequence: Synthetic oligonucleotide"
cggtcgccggttaagggtctg

SEQ ID NO: 23700 - DNA, 21 bp, Artificial Sequence
  source: /note="Description of Artificial Sequence: Synthetic oligonucleotide"
aggtcgcaggcgcaggttatt

SEQ ID NO: 23701 - DNA, 21 bp, Artificial Sequence
  source: /note="Description of Artificial Sequence: Synthetic oligonucleotide"
cgttcgcagattagtgatagt

SEQ ID NO: 23702 - DNA, 21 bp, Artificial Sequence
  source: /note="Description of Artificial Sequence: Synthetic oligonucleotide"
aggtcgcagctgatgggtgcg

SEQ ID NO: 23703 - DNA, 21 bp, Artificial Sequence
  source: /note="Description of Artificial Sequence: Synthetic oligonucleotide"
cgtagtcagaatcaggggctg

SEQ ID NO: 23704 - DNA, 21 bp, Artificial Sequence
  source: /note="Description of Artificial Sequence: Synthetic oligonucleotide"
aggtctcagccgctttctctt

SEQ ID NO: 23705 - DNA, 21 bp, Artificial Sequence
  source: /note="Description of Artificial Sequence: Synthetic oligonucleotide"
cggtcgcagcctagtacgggg

SEQ ID NO: 23706 - DNA, 21 bp, Artificial Sequence
  source: /note="Description of Artificial Sequence: Synthetic oligonucleotide"
aggagtcagcagccttatgag

SEQ ID NO: 23707 - DNA, 21 bp, Artificial Sequence
  source: /note="Description of Artificial Sequence: Synthetic oligonucleotide"
cgttcgcagtcggctacgttg

SEQ ID NO: 23708 - DNA, 21 bp, Artificial Sequence
  source: /note="Description of Artificial Sequence: Synthetic oligonucleotide"
cgttcgcagactaatatgtat

SEQ ID NO: 23709 - DNA, 21 bp, Artificial Sequence
  source: /note="Description of Artificial Sequence: Synthetic oligonucleotide"
cgttcgcgtgattcggagcat

SEQ ID NO: 23710 - DNA, 21 bp, Artificial Sequence
  source: /note="Description of Artificial Sequence: Synthetic oligonucleotide"
cggtctagtgcttttgggcct

SEQ ID NO: 23711 - DNA, 21 bp, Artificial Sequence
  source: /note="Description of Artificial Sequence: Synthetic oligonucleotide"
cggtcgagtgagtatggtagt

SEQ ID NO: 23712 - DNA, 21 bp, Artificial Sequence
  source: /note="Description of Artificial Sequence: Synthetic oligonucleotide"
cggtcttcgtttaataaggat

SEQ ID NO: 23713 - DNA, 21 bp, Artificial Sequence
  source: /note="Description of Artificial Sequence: Synthetic oligonucleotide"
cgtagtagtcatggtggggag

SEQ ID NO: 23714 - DNA, 21 bp, Artificial Sequence
  source: /note="Description of Artificial Sequence: Synthetic oligonucleotide"
cgtagttctttgaatctgcat

SEQ ID NO: 23715 - DNA, 21 bp, Artificial Sequence
  source: /note="Description of Artificial Sequence: Synthetic oligonucleotide"
cgtagtagtaatcttaatgct

SEQ ID NO: 23716 - DNA, 21 bp, Artificial Sequence
  source: /note="Description of Artificial Sequence: Synthetic oligonucleotide"
cggtcgagtccgaattttcag

SEQ ID NO: 23717 - DNA, 21 bp, Artificial Sequence
  source: /note="Description of Artificial Sequence: Synthetic oligonucleotide"
cggagttctcctaatagtcct

SEQ ID NO: 23718 - DNA, 21 bp, Artificial Sequence
  source: /note="Description of Artificial Sequence: Synthetic oligonucleotide"
aggtcttctccgtcggataag

SEQ ID NO: 23719 - DNA, 21 bp, Artificial Sequence
  source: /note="Description of Artificial Sequence: Synthetic oligonucleotide"
cgtagttctccttatttggag

SEQ ID NO: 23720 - DNA, 21 bp, Artificial Sequence
  source: /note="Description of Artificial Sequence: Synthetic oligonucleotide"
cgttcttcgtcggctgttgtt

SEQ ID NO: 23721 - DNA, 21 bp, Artificial Sequence
  source: /note="Description of Artificial Sequence: Synthetic oligonucleotide"
cggtcttcgtcgcttacgccg

SEQ ID NO: 23722 - DNA, 21 bp, Artificial Sequence
  source: /note="Description of Artificial Sequence: Synthetic oligonucleotide"
cgttcgtcgagtaatccgctg

SEQ ID NO: 23723 - DNA, 21 bp, Artificial Sequence
  source: /note="Description of Artificial Sequence: Synthetic oligonucleotide"
cggtcgagttcgcctacgacg

SEQ ID NO: 23724 - DNA, 21 bp, Artificial Sequence
  source: /note="Description of Artificial Sequence: Synthetic oligonucleotide"
cggtcgtctagtacgcagtct

SEQ ID NO: 23725 - DNA, 21 bp, Artificial Sequence
  source: /note="Description of Artificial Sequence: Synthetic oligonucleotide"
cgtagttctacgcattcgggt

SEQ ID NO: 23726 - DNA, 21 bp, Artificial Sequence
  source: /note="Description of Artificial Sequence: Synthetic oligonucleotide"
cgtagtagtacgcagattcct

SEQ ID NO: 23727 - DNA, 21 bp, Artificial Sequence
  source: /note="Description of Artificial Sequence: Synthetic oligonucleotide"
aggagttctacgacgcttccg

SEQ ID NO: 23728 - DNA, 21 bp, Artificial Sequence
  source: /note="Description of Artificial Sequence: Synthetic oligonucleotide"
cgttcgtcgtatacggagcat

SEQ ID NO: 23729 - DNA, 21 bp, Artificial Sequence
  source: /note="Description of Artificial Sequence: Synthetic oligonucleotide"
aggagtactgctgatcgggat

SEQ ID NO: 23730 - DNA, 21 bp, Artificial Sequence
  source: /note="Description of Artificial Sequence: Synthetic oligonucleotide"
cgttctactgcgattgatttt

SEQ ID NO: 23731 - DNA, 21 bp, Artificial Sequence
  source: /note="Description of Artificial Sequence: Synthetic oligonucleotide"
aggagtactgctctgcctgat

SEQ ID NO: 23732 - DNA, 21 bp, Artificial Sequence
  source: /note="Description of Artificial Sequence: Synthetic oligonucleotide"
aggtcgactggtccgtctgtg

SEQ ID NO: 23733 - DNA, 21 bp, Artificial Sequence
  source: /note="Description of Artificial Sequence: Synthetic oligonucleotide"
aggtctactctgaattcgcct

SEQ ID NO: 23734 - DNA, 21 bp, Artificial Sequence
  source: /note="Description of Artificial Sequence: Synthetic oligonucleotide"
aggtctactatgagtaatagt

SEQ ID NO: 23735 - DNA, 21 bp, Artificial Sequence
  source: /note="Description of Artificial Sequence: Synthetic oligonucleotide"
aggtcgactaataatcttacg

SEQ ID NO: 23736 - DNA, 21 bp, Artificial Sequence
  source: /note="Description of Artificial Sequence: Synthetic oligonucleotide"
cggtctactagtcctcttccg

SEQ ID NO: 23737 - DNA, 21 bp, Artificial Sequence
  source: /note="Description of Artificial Sequence: Synthetic oligonucleotide"
cgttcgactacgagtcatcct

SEQ ID NO: 23738 - DNA, 21 bp, Artificial Sequence
  source: /note="Description of Artificial Sequence: Synthetic oligonucleotide"
cggagtgttgctactggtgtg

SEQ ID NO: 23739 - DNA, 21 bp, Artificial Sequence
  source: /note="Description of Artificial Sequence: Synthetic oligonucleotide"
cgttcggttgagcctcttgct

SEQ ID NO: 23740 - DNA, 21 bp, Artificial Sequence
  source: /note="Description of Artificial Sequence: Synthetic oligonucleotide"
aggagtgtgaagtttccgatg

SEQ ID NO: 23741 - DNA, 21 bp, Artificial Sequence
  source: /note="Description of Artificial Sequence: Synthetic oligonucleotide"
cgtagtgtgcctgagagtcgt

SEQ ID NO: 23742 - DNA, 21 bp, Artificial Sequence
  source: /note="Description of Artificial Sequence: Synthetic oligonucleotide"
cggagtgttcagacgccgtct

SEQ ID NO: 23743 - DNA, 21 bp, Artificial Sequence
  source: /note="Description of Artificial Sequence: Synthetic oligonucleotide"
cgttctgttaggcagaatgat

SEQ ID NO: 23744 - DNA, 21 bp, Artificial Sequence
  source: /note="Description of Artificial Sequence: Synthetic oligonucleotide"
cggagtgttacggctaataat

SEQ ID NO: 23745 - DNA, 21 bp, Artificial Sequence
  source: /note="Description of Artificial Sequence: Synthetic oligonucleotide"
cggagtgttactcctggtatt

SEQ ID NO: 23746 - DNA, 21 bp, Artificial Sequence
  source: /note="Description of Artificial Sequence: Synthetic oligonucleotide"
aggtctgtggttgctcagacg

SEQ ID NO: 23747 - DNA, 21 bp, Artificial Sequence
  source: /note="Description of Artificial Sequence: Synthetic oligonucleotide"
cggtcgtatggtctgcctgag

SEQ ID NO: 23748 - DNA, 21 bp, Artificial Sequence
  source: /note="Description of Artificial Sequence: Synthetic oligonucleotide"
cgtagttataatcctgagagt

SEQ ID NO: 23749 - DNA, 21 bp, Artificial Sequence
  source: /note="Description of Artificial Sequence: Synthetic oligonucleotide"
cgttcgtattcgccgccgacg

SEQ ID NO: 23750 - DNA, 21 bp, Artificial Sequence
  source: /note="Description of Artificial Sequence: Synthetic oligonucleotide"
cgtacggcggctacgtgtgcg

SEQ ID NO: 23751 - DNA, 21 bp, Artificial Sequence
  source: /note="Description of Artificial Sequence: Synthetic oligonucleotide"
cgtacggcggatatgagtggt

SEQ ID NO: 23752 - DNA, 21 bp, Artificial Sequence
  source: /note="Description of Artificial Sequence: Synthetic oligonucleotide"
cgtactgcgattggtaatttg

SEQ ID NO: 23753 - DNA, 21 bp, Artificial Sequence
  source: /note="Description of Artificial Sequence: Synthetic oligonucleotide"
cggacggcgaatccgactccg

SEQ ID NO: 23754 - DNA, 21 bp, Artificial Sequence
  source: /note="Description of Artificial Sequence: Synthetic oligonucleotide"
cgtacggcgtctcttgttcct

SEQ ID NO: 23755 - DNA, 21 bp, Artificial Sequence
  source: /note="Description of Artificial Sequence: Synthetic oligonucleotide"
cggactgcttcggtggcggct

SEQ ID NO: 23756 - DNA, 21 bp, Artificial Sequence
  source: /note="Description of Artificial Sequence: Synthetic oligonucleotide"
cggacggcggtgactgatacg

SEQ ID NO: 23757 - DNA, 21 bp, Artificial Sequence
  source: /note="Description of Artificial Sequence: Synthetic oligonucleotide"
cggactgatggtgatgtgaag

SEQ ID NO: 23758 - DNA, 21 bp, Artificial Sequence
  source: /note="Description of Artificial Sequence: Synthetic oligonucleotide"
cggacggagtttaatatgcct

SEQ ID NO: 23759 - DNA, 21 bp, Artificial Sequence
  source: /note="Description of Artificial Sequence: Synthetic oligonucleotide"
aggactgagggttgtgctgct

SEQ ID NO: 23760 - DNA, 21 bp, Artificial Sequence
  source: /note="Description of Artificial Sequence: Synthetic oligonucleotide"
cgtactgagccgggtccttcg

SEQ ID NO: 23761 - DNA, 21 bp, Artificial Sequence
  source: /note="Description of Artificial Sequence: Synthetic oligonucleotide"
cgtacggagagtcctccgcag

SEQ ID NO: 23762 - DNA, 21 bp, Artificial Sequence
  source: /note="Description of Artificial Sequence: Synthetic oligonucleotide"
cggacggagactgggaagctt

SEQ ID NO: 23763 - DNA, 21 bp, Artificial Sequence
  source: /note="Description of Artificial Sequence: Synthetic oligonucleotide"
cgtacgttttctggtgctgat

SEQ ID NO: 23764 - DNA, 21 bp, Artificial Sequence
  source: /note="Description of Artificial Sequence: Synthetic oligonucleotide"
aggacgggtgcgttgtcggag

SEQ ID NO: 23765 - DNA, 21 bp, Artificial Sequence
  source: /note="Description of Artificial Sequence: Synthetic oligonucleotide"
cgtacgggtgaggttacgttt

SEQ ID NO: 23766 - DNA, 21 bp, Artificial Sequence
  source: /note="Description of Artificial Sequence: Synthetic oligonucleotide"
cggacgggtaatgcggcttcg

SEQ ID NO: 23767 - DNA, 21 bp, Artificial Sequence
  source: /note="Description of Artificial Sequence: Synthetic oligonucleotide"
cgtacggggccgggttctgag

SEQ ID NO: 23768 - DNA, 21 bp, Artificial Sequence
  source: /note="Description of Artificial Sequence: Synthetic oligonucleotide"
cgtacggggccgactccgtct

SEQ ID NO: 23769 - DNA, 21 bp, Artificial Sequence
  source: /note="Description of Artificial Sequence: Synthetic oligonucleotide"
cggactgggtcttatcctcag

SEQ ID NO: 23770 - DNA, 21 bp, Artificial Sequence
  source: /note="Description of Artificial Sequence: Synthetic oligonucleotide"
cggactggtgtgtgtggtaat

SEQ ID NO: 23771 - DNA, 21 bp, Artificial Sequence
  source: /note="Description of Artificial Sequence: Synthetic oligonucleotide"
aggacgcattcgcctgctggg

SEQ ID NO: 23772 - DNA, 21 bp, Artificial Sequence
  source: /note="Description of Artificial Sequence: Synthetic oligonucleotide"
cgtactcttggtcctgtgggg

SEQ ID NO: 23773 - DNA, 21 bp, Artificial Sequence
  source: /note="Description of Artificial Sequence: Synthetic oligonucleotide"
cgtactttgatgccgcatcct

SEQ ID NO: 23774 - DNA, 21 bp, Artificial Sequence
  source: /note="Description of Artificial Sequence: Synthetic oligonucleotide"
cgtactcttaattctgttgct

SEQ ID NO: 23775 - DNA, 21 bp, Artificial Sequence
  source: /note="Description of Artificial Sequence: Synthetic oligonucleotide"
cgtacgatggatgctccggtg

SEQ ID NO: 23776 - DNA, 21 bp, Artificial Sequence
  source: /note="Description of Artificial Sequence: Synthetic oligonucleotide"
cggactaatggtgatgtgaag

SEQ ID NO: 23777 - DNA, 21 bp, Artificial Sequence
  source: /note="Description of Artificial Sequence: Synthetic oligonucleotide"
cgtactaatgggctttcgccg

SEQ ID NO: 23778 - DNA, 21 bp, Artificial Sequence
  source: /note="Description of Artificial Sequence: Synthetic oligonucleotide"
cgtactaataatgatgtgacg

SEQ ID NO: 23779 - DNA, 21 bp, Artificial Sequence
  source: /note="Description of Artificial Sequence: Synthetic oligonucleotide"
cggacgaattctcagttggat

SEQ ID NO: 23780 - DNA, 21 bp, Artificial Sequence
  source: /note="Description of Artificial Sequence: Synthetic oligonucleotide"
aggactaatagtacttcgatg

SEQ ID NO: 23781 - DNA, 21 bp, Artificial Sequence
  source: /note="Description of Artificial Sequence: Synthetic oligonucleotide"
aggactcctgctctttctaat

SEQ ID NO: 23782 - DNA, 21 bp, Artificial Sequence
  source: /note="Description of Artificial Sequence: Synthetic oligonucleotide"
cgtactccggattctctgggg

SEQ ID NO: 23783 - DNA, 21 bp, Artificial Sequence
  source: /note="Description of Artificial Sequence: Synthetic oligonucleotide"
cggacgcctgaggcgatttcg

SEQ ID NO: 23784 - DNA, 21 bp, Artificial Sequence
  source: /note="Description of Artificial Sequence: Synthetic oligonucleotide"
cggactcctcattcttcgttt

SEQ ID NO: 23785 - DNA, 21 bp, Artificial Sequence
  source: /note="Description of Artificial Sequence: Synthetic oligonucleotide"
cggactccgaagctgcctatg

SEQ ID NO: 23786 - DNA, 21 bp, Artificial Sequence
  source: /note="Description of Artificial Sequence: Synthetic oligonucleotide"
aggacgcctatgctggagcct

SEQ ID NO: 23787 - DNA, 21 bp, Artificial Sequence
  source: /note="Description of Artificial Sequence: Synthetic oligonucleotide"
aggacgcctgtttcgggtgag

SEQ ID NO: 23788 - DNA, 21 bp, Artificial Sequence
  source: /note="Description of Artificial Sequence: Synthetic oligonucleotide"
cgtacgcagattggtgtgaat

SEQ ID NO: 23789 - DNA, 21 bp, Artificial Sequence
  source: /note="Description of Artificial Sequence: Synthetic oligonucleotide"
cgtactagtgcggtgggtctg

SEQ ID NO: 23790 - DNA, 21 bp, Artificial Sequence
  source: /note="Description of Artificial Sequence: Synthetic oligonucleotide"
cgtacgtcgtgtagtcctggt

SEQ ID NO: 23791 - DNA, 21 bp, Artificial Sequence
  source: /note="Description of Artificial Sequence: Synthetic oligonucleotide"
aggactagtgatgcttctttt

SEQ ID NO: 23792 - DNA, 21 bp, Artificial Sequence
  source: /note="Description of Artificial Sequence: Synthetic oligonucleotide"
aggacttcggatctgtctgcg

SEQ ID NO: 23793 - DNA, 21 bp, Artificial Sequence
  source: /note="Description of Artificial Sequence: Synthetic oligonucleotide"
cgtactagtggtcctactgat

SEQ ID NO: 23794 - DNA, 21 bp, Artificial Sequence
  source: /note="Description of Artificial Sequence: Synthetic oligonucleotide"
cggacgtcgatgggtcaggct

SEQ ID NO: 23795 - DNA, 21 bp, Artificial Sequence
  source: /note="Description of Artificial Sequence: Synthetic oligonucleotide"
cgtacgagtatggtgagtaat

SEQ ID NO: 23796 - DNA, 21 bp, Artificial Sequence
  source: /note="Description of Artificial Sequence: Synthetic oligonucleotide"
aggactagtcctgagtcgcgg

SEQ ID NO: 23797 - DNA, 21 bp, Artificial Sequence
  source: /note="Description of Artificial Sequence: Synthetic oligonucleotide"
cggacttcgcctcttgctgtt

SEQ ID NO: 23798 - DNA, 21 bp, Artificial Sequence
  source: /note="Description of Artificial Sequence: Synthetic oligonucleotide"
cggactagtccgcagtctagt

SEQ ID NO: 23799 - DNA, 21 bp, Artificial Sequence
  source: /note="Description of Artificial Sequence: Synthetic oligonucleotide"
aggacttcgccgagttttcat

SEQ ID NO: 23800 - DNA, 21 bp, Artificial Sequence
  source: /note="Description of Artificial Sequence: Synthetic oligonucleotide"
cgtacgtctcagactgagccg

SEQ ID NO: 23801 - DNA, 21 bp, Artificial Sequence
  source: /note="Description of Artificial Sequence: Synthetic oligonucleotide"
cgtacgtcgacggaggggtcg

SEQ ID NO: 23802 - DNA, 21 bp, Artificial Sequence
  source: /note="Description of Artificial Sequence: Synthetic oligonucleotide"
cggacgtctacttatggtggt

SEQ ID NO: 23803 - DNA, 21 bp, Artificial Sequence
  source: /note="Description of Artificial Sequence: Synthetic oligonucleotide"
cgtacgtctgttgctgttgcg

SEQ ID NO: 23804 - DNA, 21 bp, Artificial Sequence
  source: /note="Description of Artificial Sequence: Synthetic oligonucleotide"
aggactactgataagcagggt

SEQ ID NO: 23805 - DNA, 21 bp, Artificial Sequence
  source: /note="Description of Artificial Sequence: Synthetic oligonucleotide"
aggacgacggagcatagtatg

SEQ ID NO: 23806 - DNA, 21 bp, Artificial Sequence
  source: /note="Description of Artificial Sequence: Synthetic oligonucleotide"
cgtactactcagagtgttatg

SEQ ID NO: 23807 - DNA, 21 bp, Artificial Sequence
  source: /note="Description of Artificial Sequence: Synthetic oligonucleotide"
cggacgacttctgatacgttt

SEQ ID NO: 23808 - DNA, 21 bp, Artificial Sequence
  source: /note="Description of Artificial Sequence: Synthetic oligonucleotide"
aggactacgtatcagtcgagt

SEQ ID NO: 23809 - DNA, 21 bp, Artificial Sequence
  source: /note="Description of Artificial Sequence: Synthetic oligonucleotide"
aggacggttgggtctttgaat

SEQ ID NO: 23810 - DNA, 21 bp, Artificial Sequence
  source: /note="Description of Artificial Sequence: Synthetic oligonucleotide"
aggactgtgaaggcggaggcg

SEQ ID NO: 23811 - DNA, 21 bp, Artificial Sequence
  source: /note="Description of Artificial Sequence: Synthetic oligonucleotide"
cgtacttatcatgtgccggat

SEQ ID NO: 23812 - DNA, 21 bp, Artificial Sequence
  source: /note="Description of Artificial Sequence: Synthetic oligonucleotide"
cgtgtggcggctagttctatt

SEQ ID NO: 23813 - DNA, 21 bp, Artificial Sequence
  source: /note="Description of Artificial Sequence: Synthetic oligonucleotide"
agggttgcgggttctaatggg

SEQ ID NO: 23814 - DNA, 21 bp, Artificial Sequence
  source: /note="Description of Artificial Sequence: Synthetic oligonucleotide"
cgggttgcgatgggggaggat

SEQ ID NO: 23815 - DNA, 21 bp, Artificial Sequence
  source: /note="Description of Artificial Sequence: Synthetic oligonucleotide"
agggttgcttctccgacggct

SEQ ID NO: 23816 - DNA, 21 bp, Artificial Sequence
  source: /note="Description of Artificial Sequence: Synthetic oligonucleotide"
cgtgttgatgcttcgcatagg

SEQ ID NO: 23817 - DNA, 21 bp, Artificial Sequence
  source: /note="Description of Artificial Sequence: Synthetic oligonucleotide"
agggtggatagtgttaggtct

SEQ ID NO: 23818 - DNA, 21 bp, Artificial Sequence
  source: /note="Description of Artificial Sequence: Synthetic oligonucleotide"
agggttgatacgcggatgcag

SEQ ID NO: 23819 - DNA, 21 bp, Artificial Sequence
  source: /note="Description of Artificial Sequence: Synthetic oligonucleotide"
cgtgttgaggagtgtgttatt

SEQ ID NO: 23820 - DNA, 21 bp, Artificial Sequence
  source: /note="Description of Artificial Sequence: Synthetic oligonucleotide"
cgtgttggtgatgggaagcat

SEQ ID NO: 23821 - DNA, 21 bp, Artificial Sequence
  source: /note="Description of Artificial Sequence: Synthetic oligonucleotide"
agggttggtgataagctgcag

SEQ ID NO: 23822 - DNA, 21 bp, Artificial Sequence
  source: /note="Description of Artificial Sequence: Synthetic oligonucleotide"
cgggttggggatagtgctttt

SEQ ID NO: 23823 - DNA, 21 bp, Artificial Sequence
  source: /note="Description of Artificial Sequence: Synthetic oligonucleotide"
cgtgttgggggttcttcttct

SEQ ID NO: 23824 - DNA, 21 bp, Artificial Sequence
  source: /note="Description of Artificial Sequence: Synthetic oligonucleotide"
agggttgggcattgtctgggt

SEQ ID NO: 23825 - DNA, 21 bp, Artificial Sequence
  source: /note="Description of Artificial Sequence: Synthetic oligonucleotide"
agggttggtcttgcttcgact

SEQ ID NO: 23826 - DNA, 21 bp, Artificial Sequence
  source: /note="Description of Artificial Sequence: Synthetic oligonucleotide"
cgtgttgggaatgtggatact

SEQ ID NO: 23827 - DNA, 21 bp, Artificial Sequence
  source: /note="Description of Artificial Sequence: Synthetic oligonucleotide"
cgggttggtcgtcctagtgag

SEQ ID NO: 23828 - DNA, 21 bp, Artificial Sequence
  source: /note="Description of Artificial Sequence: Synthetic oligonucleotide"
cgggttattcctgcgtgtcag

SEQ ID NO: 23829 - DNA, 21 bp, Artificial Sequence
  source: /note="Description of Artificial Sequence: Synthetic oligonucleotide"
cgggtgcttgatctggagaat

SEQ ID NO: 23830 - DNA, 21 bp, Artificial Sequence
  source: /note="Description of Artificial Sequence: Synthetic oligonucleotide"
agggttttgattgagcctgtt

SEQ ID NO: 23831 - DNA, 21 bp, Artificial Sequence
  source: /note="Description of Artificial Sequence: Synthetic oligonucleotide"
agggtgctgaatcatctgggg

SEQ ID NO: 23832 - DNA, 21 bp, Artificial Sequence
  source: /note="Description of Artificial Sequence: Synthetic oligonucleotide"
cgtgtgatggatcgtgcggct

SEQ ID NO: 23833 - DNA, 21 bp, Artificial Sequence
  source: /note="Description of Artificial Sequence: Synthetic oligonucleotide"
cgtgttaatgcgcctggtgtt

SEQ ID NO: 23834 - DNA, 21 bp, Artificial Sequence
  source: /note="Description of Artificial Sequence: Synthetic oligonucleotide"
cgtgtgaatcatgatgagacg

SEQ ID NO: 23835 - DNA, 21 bp, Artificial Sequence
  source: /note="Description of Artificial Sequence: Synthetic oligonucleotide"
cgggtgaatattttggcggag

SEQ ID NO: 23836 - DNA, 21 bp, Artificial Sequence
  source: /note="Description of Artificial Sequence: Synthetic oligonucleotide"
cgtgttaatcctgatcgttat

SEQ ID NO: 23837 - DNA, 21 bp, Artificial Sequence
  source: /note="Description of Artificial Sequence: Synthetic oligonucleotide"
cgtgtgaatagtattgctagt

SEQ ID NO: 23838 - DNA, 21 bp, Artificial Sequence
  source: /note="Description of Artificial Sequence: Synthetic oligonucleotide"
cgtgttccggatattgcgcgg

SEQ ID NO: 23839 - DNA, 21 bp, Artificial Sequence
  source: /note="Description of Artificial Sequence: Synthetic oligonucleotide"
cgtgttccggattcgactagg

SEQ ID NO: 23840 - DNA, 21 bp, Artificial Sequence
  source: /note="Description of Artificial Sequence: Synthetic oligonucleotide"
cgtgtgccggggattctgcat

SEQ ID NO: 23841 - DNA, 21 bp, Artificial Sequence
  source: /note="Description of Artificial Sequence: Synthetic oligonucleotide"
cgtgtgcctaatacgcttcct

SEQ ID NO: 23842 - DNA, 21 bp, Artificial Sequence
  source: /note="Description of Artificial Sequence: Synthetic oligonucleotide"
cgggtgccgaattggcctggg

SEQ ID NO: 23843 - DNA, 21 bp, Artificial Sequence
  source: /note="Description of Artificial Sequence: Synthetic oligonucleotide"
cgggtgccttctcagagtagt

SEQ ID NO: 23844 - DNA, 21 bp, Artificial Sequence
  source: /note="Description of Artificial Sequence: Synthetic oligonucleotide"
cgggttcagaatgggctgaat

SEQ ID NO: 23845 - DNA, 21 bp, Artificial Sequence
  source: /note="Description of Artificial Sequence: Synthetic oligonucleotide"
cgtgttcagcaggcttcgctt

SEQ ID NO: 23846 - DNA, 21 bp, Artificial Sequence
  source: /note="Description of Artificial Sequence: Synthetic oligonucleotide"
cgggttcagtctaatgtgcct

SEQ ID NO: 23847 - DNA, 21 bp, Artificial Sequence
  source: /note="Description of Artificial Sequence: Synthetic oligonucleotide"
agggtgcagactattcctagt

SEQ ID NO: 23848 - DNA, 21 bp, Artificial Sequence
  source: /note="Description of Artificial Sequence: Synthetic oligonucleotide"
cgtgttagtcagcctgatatg

SEQ ID NO: 23849 - DNA, 21 bp, Artificial Sequence
  source: /note="Description of Artificial Sequence: Synthetic oligonucleotide"
agggtttcgcaggttacgatg

SEQ ID NO: 23850 - DNA, 21 bp, Artificial Sequence
  source: /note="Description of Artificial Sequence: Synthetic oligonucleotide"
agggtttcgactatttctacg

SEQ ID NO: 23851 - DNA, 21 bp, Artificial Sequence
  source: /note="Description of Artificial Sequence: Synthetic oligonucleotide"
cgggtgtctactacgtctgat

SEQ ID NO: 23852 - DNA, 21 bp, Artificial Sequence
  source: /note="Description of Artificial Sequence: Synthetic oligonucleotide"
cgtgtgtcgtatgatacggag

SEQ ID NO: 23853 - DNA, 21 bp, Artificial Sequence
  source: /note="Description of Artificial Sequence: Synthetic oligonucleotide"
cgtgtgacgattggtacgtcg

SEQ ID NO: 23854 - DNA, 21 bp, Artificial Sequence
  source: /note="Description of Artificial Sequence: Synthetic oligonucleotide"
agggttactcctgagcttttt

SEQ ID NO: 23855 - DNA, 21 bp, Artificial Sequence
  source: /note="Description of Artificial Sequence: Synthetic oligonucleotide"
cgtgttacgagtacgttgagt

SEQ ID NO: 23856 - DNA, 21 bp, Artificial Sequence
  source: /note="Description of Artificial Sequence: Synthetic oligonucleotide"
agggttacgacggcggagttg

SEQ ID NO: 23857 - DNA, 21 bp, Artificial Sequence
  source: /note="Description of Artificial Sequence: Synthetic oligonucleotide"
cgtgttacgacggagttgccg

SEQ ID NO: 23858 - DNA, 21 bp, Artificial Sequence
  source: /note="Description of Artificial Sequence: Synthetic oligonucleotide"
cgggtggttgggggttctact

SEQ ID NO: 23859 - DNA, 21 bp, Artificial Sequence
  source: /note="Description of Artificial Sequence: Synthetic oligonucleotide"
agggtggtggggccggtgaat

SEQ ID NO: 23860 - DNA, 21 bp, Artificial Sequence
  source: /note="Description of Artificial Sequence: Synthetic oligonucleotide"
agggttgttacggttttggag

SEQ ID NO: 23861 - DNA, 21 bp, Artificial Sequence
  source: /note="Description of Artificial Sequence: Synthetic oligonucleotide"
cgggtgtataatatggatggt

SEQ ID NO: 23862 - DNA, 21 bp, Artificial Sequence
  source: /note="Description of Artificial Sequence: Synthetic oligonucleotide"
cggtgggcggatactgttact

SEQ ID NO: 23863 - DNA, 21 bp, Artificial Sequence
  source: /note="Description of Artificial Sequence: Synthetic oligonucleotide"
cggtgggatgatggggcgcgg

SEQ ID NO: 23864 - DNA, 21 bp, Artificial Sequence
  source: /note="Description of Artificial Sequence: Synthetic oligonucleotide"
cggtgggatgtgaaggcggat

SEQ ID NO: 23865 - DNA, 21 bp, Artificial Sequence
  source: /note="Description of Artificial Sequence: Synthetic oligonucleotide"
aggtggaaggctgagcctccg

SEQ ID NO: 23866 - DNA, 21 bp, Artificial Sequence
  source: /note="Description of Artificial Sequence: Synthetic oligonucleotide"
cggtggagtgaggatgggggg

SEQ ID NO: 23867 - DNA, 21 bp, Artificial Sequence
  source: /note="Description of Artificial Sequence: Synthetic oligonucleotide"
aggtggtcgccggctgttccg

SEQ ID NO: 23868 - DNA, 21 bp, Artificial Sequence
  source: /note="Description of Artificial Sequence: Synthetic oligonucleotide"
cgttatgctgagccttatatt

SEQ ID NO: 23869 - DNA, 21 bp, Artificial Sequence
  source: /note="Description of Artificial Sequence: Synthetic oligonucleotide"
cgttatgatttgactgcgccg

SEQ ID NO: 23870 - DNA, 21 bp, Artificial Sequence
  source: /note="Description of Artificial Sequence: Synthetic oligonucleotide"
cgttatgagtcgaatgcgcat

SEQ ID NO: 23871 - DNA, 21 bp, Artificial Sequence
  source: /note="Description of Artificial Sequence: Synthetic oligonucleotide"
cggtatggggctagtaatccg

SEQ ID NO: 23872 - DNA, 21 bp, Artificial Sequence
  source: /note="Description of Artificial Sequence: Synthetic oligonucleotide"
cggtatggggggtctatttct

SEQ ID NO: 23873 - DNA, 21 bp, Artificial Sequence
  source: /note="Description of Artificial Sequence: Synthetic oligonucleotide"
aggtatcatgatacgggtgat

SEQ ID NO: 23874 - DNA, 21 bp, Artificial Sequence
  source: /note="Description of Artificial Sequence: Synthetic oligonucleotide"
cgttatcttgatcggactgag

SEQ ID NO: 23875 - DNA, 21 bp, Artificial Sequence
  source: /note="Description of Artificial Sequence: Synthetic oligonucleotide"
cggtatatggagccttcgcct

SEQ ID NO: 23876 - DNA, 21 bp, Artificial Sequence
  source: /note="Description of Artificial Sequence: Synthetic oligonucleotide"
aggtataatgaggatgaggcg

SEQ ID NO: 23877 - DNA, 21 bp, Artificial Sequence
  source: /note="Description of Artificial Sequence: Synthetic oligonucleotide"
aggtataatgagactgtgtct

SEQ ID NO: 23878 - DNA, 21 bp, Artificial Sequence
  source: /note="Description of Artificial Sequence: Synthetic oligonucleotide"
aggtataataatcaggttccg

SEQ ID NO: 23879 - DNA, 21 bp, Artificial Sequence
  source: /note="Description of Artificial Sequence: Synthetic oligonucleotide"
cgttataatacggcgattagt

SEQ ID NO: 23880 - DNA, 21 bp, Artificial Sequence
  source: /note="Description of Artificial Sequence: Synthetic oligonucleotide"
aggtatccgtcgcagactagt

SEQ ID NO: 23881 - DNA, 21 bp, Artificial Sequence
  source: /note="Description of Artificial Sequence: Synthetic oligonucleotide"
cgttattcgaataatcttccg

SEQ ID NO: 23882 - DNA, 21 bp, Artificial Sequence
  source: /note="Description of Artificial Sequence: Synthetic oligonucleotide"
aggtattcgcctggttctcct

SEQ ID NO: 23883 - DNA, 21 bp, Artificial Sequence
  source: /note="Description of Artificial Sequence: Synthetic oligonucleotide"
aggtatactgttgctgatgct

SEQ ID NO: 23884 - DNA, 21 bp, Artificial Sequence
  source: /note="Description of Artificial Sequence: Synthetic oligonucleotide"
cggtatgtggatccgcttatg

SEQ ID NO: 23885 - DNA, 21 bp, Artificial Sequence
  source: /note="Description of Artificial Sequence: Synthetic oligonucleotide"
tctgctgctcatattgatctg

SEQ ID NO: 23886 - DNA, 21 bp, Artificial Sequence
  source: /note="Description of Artificial Sequence: Synthetic oligonucleotide"
agtgcggctcttcttgagcct

SEQ ID NO: 23887 - DNA, 21 bp, Artificial Sequence
  source: /note="Description of Artificial Sequence: Synthetic oligonucleotide"
agtgctgctcttagggagggg

SEQ ID NO: 23888 - DNA, 21 bp, Artificial Sequence
  source: /note="Description of Artificial Sequence: Synthetic oligonucleotide"
tctgctgctcgtgatacggat

SEQ ID NO: 23889 - DNA, 21 bp, Artificial Sequence
  source: /note="Description of Artificial Sequence: Synthetic oligonucleotide"
tctgctgcgaggatgactgcg

SEQ ID NO: 23890 - DNA, 21 bp, Artificial Sequence
  source: /note="Description of Artificial Sequence: Synthetic oligonucleotide"
tcggcggcttctggtcatcat

SEQ ID NO: 23891 - DNA, 21 bp, Artificial Sequence
  source: /note="Description of Artificial Sequence: Synthetic oligonucleotide"
agtgcggcttctaagttgttg

SEQ ID NO: 23892 - DNA, 21 bp, Artificial Sequence
  source: /note="Description of Artificial Sequence: Synthetic oligonucleotide"
tcggctgcgtcttctatgcgg

SEQ ID NO: 23893 - DNA, 21 bp, Artificial Sequence
  source: /note="Description of Artificial Sequence: Synthetic oligonucleotide"
agtgcggcttcgacggttttt

SEQ ID NO: 23894 - DNA, 21 bp, Artificial Sequence
  source: /note="Description of Artificial Sequence: Synthetic oligonucleotide"
tctgcggcttatgatcctaag

SEQ ID NO: 23895 - DNA, 21 bp, Artificial Sequence
  source: /note="Description of Artificial Sequence: Synthetic oligonucleotide"
tctgctgattttcagcgtggt

SEQ ID NO: 23896 - DNA, 21 bp, Artificial Sequence
  source: /note="Description of Artificial Sequence: Synthetic oligonucleotide"
agtgctgatacgatgttgatt

SEQ ID NO: 23897 - DNA, 21 bp, Artificial Sequence
  source: /note="Description of Artificial Sequence: Synthetic oligonucleotide"
tcggcggaggcgcatattacg

SEQ ID NO: 23898 - DNA, 21 bp, Artificial Sequence
  source: /note="Description of Artificial Sequence: Synthetic oligonucleotide"
agtgctgagattgagtttctt

SEQ ID NO: 23899 - DNA, 21 bp, Artificial Sequence
  source: /note="Description of Artificial Sequence: Synthetic oligonucleotide"
agtgctgagagtgtgccgcat

SEQ ID NO: 23900 - DNA, 21 bp, Artificial Sequence
  source: /note="Description of Artificial Sequence: Synthetic oligonucleotide"
agtgcggagtatcggagtgtt

SEQ ID NO: 23901 - DNA, 21 bp, Artificial Sequence
  source: /note="Description of Artificial Sequence: Synthetic oligonucleotide"
tcggcttttgggcagcatggg

SEQ ID NO: 23902 - DNA, 21 bp, Artificial Sequence
  source: /note="Description of Artificial Sequence: Synthetic oligonucleotide"
tcggcttttctgcctcatgct

SEQ ID NO: 23903 - DNA, 21 bp, Artificial Sequence
  source: /note="Description of Artificial Sequence: Synthetic oligonucleotide"
tcggcgtttcttcctacgccg

SEQ ID NO: 23904 - DNA, 21 bp, Artificial Sequence
  source: /note="Description of Artificial Sequence: Synthetic oligonucleotide"
tctgctttttctgcgggggct

SEQ ID NO: 23905 - DNA, 21 bp, Artificial Sequence
  source: /note="Description of Artificial Sequence: Synthetic oligonucleotide"
tcggcttttacgaattatccg

SEQ ID NO: 23906 - DNA, 21 bp, Artificial Sequence
  source: /note="Description of Artificial Sequence: Synthetic oligonucleotide"
agtgctggggagcgttcgctg

SEQ ID NO: 23907 - DNA, 21 bp, Artificial Sequence
  source: /note="Description of Artificial Sequence: Synthetic oligonucleotide"
tctgcgggtggtgagcgtacg

SEQ ID NO: 23908 - DNA, 21 bp, Artificial Sequence
  source: /note="Description of Artificial Sequence: Synthetic oligonucleotide"
tcggctgggggtgggatgaat

SEQ ID NO: 23909 - DNA, 21 bp, Artificial Sequence
  source: /note="Description of Artificial Sequence: Synthetic oligonucleotide"
agtgcggggaagctgcctatg

SEQ ID NO: 23910 - DNA, 21 bp, Artificial Sequence
  source: /note="Description of Artificial Sequence: Synthetic oligonucleotide"
tctgctgggcttcatgctgtg

SEQ ID NO: 23911 - DNA, 21 bp, Artificial Sequence
  source: /note="Description of Artificial Sequence: Synthetic oligonucleotide"
agtgctggtccggctcctcgt

SEQ ID NO: 23912 - DNA, 21 bp, Artificial Sequence
  source: /note="Description of Artificial Sequence: Synthetic oligonucleotide"
tctgcgggtcagtcgcagcgt

SEQ ID NO: 23913 - DNA, 21 bp, Artificial Sequence
  source: /note="Description of Artificial Sequence: Synthetic oligonucleotide"
tctgcggggaggtttgagact

SEQ ID NO: 23914 - DNA, 21 bp, Artificial Sequence
  source: /note="Description of Artificial Sequence: Synthetic oligonucleotide"
tcggctgggacggctatgatt

SEQ ID NO: 23915 - DNA, 21 bp, Artificial Sequence
  source: /note="Description of Artificial Sequence: Synthetic oligonucleotide"
tcggctggggttcataagagt

SEQ ID NO: 23916 - DNA, 21 bp, Artificial Sequence
  source: /note="Description of Artificial Sequence: Synthetic oligonucleotide"
tctgcgcattgtcctacgccg

SEQ ID NO: 23917 - DNA, 21 bp, Artificial Sequence
  source: /note="Description of Artificial Sequence: Synthetic oligonucleotide"
tctgctcatcattctcatatg

SEQ ID NO: 23918 - DNA, 21 bp, Artificial Sequence
  source: /note="Description of Artificial Sequence: Synthetic oligonucleotide"
tctgctcatatgtcgcgtgct

SEQ ID NO: 23919 - DNA, 21 bp, Artificial Sequence
  source: /note="Description of Artificial Sequence: Synthetic oligonucleotide"
agtgctcatcagttgcagact

SEQ ID NO: 23920 - DNA, 21 bp, Artificial Sequence
  source: /note="Description of Artificial Sequence: Synthetic oligonucleotide"
agtgctcatagtccgcagatg

SEQ ID NO: 23921 - DNA, 21 bp, Artificial Sequence
  source: /note="Description of Artificial Sequence: Synthetic oligonucleotide"
agtgctcatagtactccgcat

SEQ ID NO: 23922 - DNA, 21 bp, Artificial Sequence
  source: /note="Description of Artificial Sequence: Synthetic oligonucleotide"
tcggctatttgtcagtctgtt

SEQ ID NO: 23923 - DNA, 21 bp, Artificial Sequence
  source: /note="Description of Artificial Sequence: Synthetic oligonucleotide"
agtgctattatgccgtcgcct

SEQ ID NO: 23924 - DNA, 21 bp, Artificial Sequence
  source: /note="Description of Artificial Sequence: Synthetic oligonucleotide"
tctgctattatgagtcggtct

SEQ ID NO: 23925 - DNA, 21 bp, Artificial Sequence
  source: /note="Description of Artificial Sequence: Synthetic oligonucleotide"
tctgctattaatcgtctgccg

SEQ ID NO: 23926 - DNA, 21 bp, Artificial Sequence
  source: /note="Description of Artificial Sequence: Synthetic oligonucleotide"
agtgctatttcgtcgatgagt

SEQ ID NO: 23927 - DNA, 21 bp, Artificial Sequence
  source: /note="Description of Artificial Sequence: Synthetic oligonucleotide"
tctgcgaagtgtgttcaggcg

SEQ ID NO: 23928 - DNA, 21 bp, Artificial Sequence
  source: /note="Description of Artificial Sequence: Synthetic oligonucleotide"
tcggctaagcattctgcgatg

SEQ ID NO: 23929 - DNA, 21 bp, Artificial Sequence
  source: /note="Description of Artificial Sequence: Synthetic oligonucleotide"
tcggctaagtctgcgttttct

SEQ ID NO: 23930 - DNA, 21 bp, Artificial Sequence
  source: /note="Description of Artificial Sequence: Synthetic oligonucleotide"
agtgctaagagtatggttgtt

SEQ ID NO: 23931 - DNA, 21 bp, Artificial Sequence
  source: /note="Description of Artificial Sequence: Synthetic oligonucleotide"
tcggctaagactatgattccg

SEQ ID NO: 23932 - DNA, 21 bp, Artificial Sequence
  source: /note="Description of Artificial Sequence: Synthetic oligonucleotide"
tcggcgaagacgtctgagtcg

SEQ ID NO: 23933 - DNA, 21 bp, Artificial Sequence
  source: /note="Description of Artificial Sequence: Synthetic oligonucleotide"
tctgcgcttgctgggcttagt

SEQ ID NO: 23934 - DNA, 21 bp, Artificial Sequence
  source: /note="Description of Artificial Sequence: Synthetic oligonucleotide"
agtgctttggatcttaatcat

SEQ ID NO: 23935 - DNA, 21 bp, Artificial Sequence
  source: /note="Description of Artificial Sequence: Synthetic oligonucleotide"
agtgctttggataatattcgg

SEQ ID NO: 23936 - DNA, 21 bp, Artificial Sequence
  source: /note="Description of Artificial Sequence: Synthetic oligonucleotide"
agtgcgcttgggctgagtgtt

SEQ ID NO: 23937 - DNA, 21 bp, Artificial Sequence
  source: /note="Description of Artificial Sequence: Synthetic oligonucleotide"
tctgctctgggttcgcgggtt

SEQ ID NO: 23938 - DNA, 21 bp, Artificial Sequence
  source: /note="Description of Artificial Sequence: Synthetic oligonucleotide"
tcggctctgcatctggctgct

SEQ ID NO: 23939 - DNA, 21 bp, Artificial Sequence
  source: /note="Description of Artificial Sequence: Synthetic oligonucleotide"
tcggctttgaagacggattcg

SEQ ID NO: 23940 - DNA, 21 bp, Artificial Sequence
  source: /note="Description of Artificial Sequence: Synthetic oligonucleotide"
agtgcgcttaataagcggatt

SEQ ID NO: 23941 - DNA, 21 bp, Artificial Sequence
  source: /note="Description of Artificial Sequence: Synthetic oligonucleotide"
tctgcgttgcctaagcctgag

SEQ ID NO: 23942 - DNA, 21 bp, Artificial Sequence
  source: /note="Description of Artificial Sequence: Synthetic oligonucleotide"
tcggcgttgaggctggtgtct

SEQ ID NO: 23943 - DNA, 21 bp, Artificial Sequence
  source: /note="Description of Artificial Sequence: Synthetic oligonucleotide"
agtgcgcttcgtccggatagt

SEQ ID NO: 23944 - DNA, 21 bp, Artificial Sequence
  source: /note="Description of Artificial Sequence: Synthetic oligonucleotide"
agtgctttgaggagtgttact

SEQ ID NO: 23945 - DNA, 21 bp, Artificial Sequence
  source: /note="Description of Artificial Sequence: Synthetic oligonucleotide"
tctgcgttgcgtgtgcctgcg

SEQ ID NO: 23946 - DNA, 21 bp, Artificial Sequence
  source: /note="Description of Artificial Sequence: Synthetic oligonucleotide"
tcggcgctgtcgacgacgggt

SEQ ID NO: 23947 - DNA, 21 bp, Artificial Sequence
  source: /note="Description of Artificial Sequence: Synthetic oligonucleotide"
tctgcgcttacggataagctg

SEQ ID NO: 23948 - DNA, 21 bp, Artificial Sequence
  source: /note="Description of Artificial Sequence: Synthetic oligonucleotide"
tcggctcttacgcatgtgtcg

SEQ ID NO: 23949 - DNA, 21 bp, Artificial Sequence
  source: /note="Description of Artificial Sequence: Synthetic oligonucleotide"
agtgctttgacgtcttctctg

SEQ ID NO: 23950 - DNA, 21 bp, Artificial Sequence
  source: /note="Description of Artificial Sequence: Synthetic oligonucleotide"
agtgcgatgcatcctatgctg

SEQ ID NO: 23951 - DNA, 21 bp, Artificial Sequence
  source: /note="Description of Artificial Sequence: Synthetic oligonucleotide"
agtgcgatgaagcatccgtct

SEQ ID NO: 23952 - DNA, 21 bp, Artificial Sequence
  source: /note="Description of Artificial Sequence: Synthetic oligonucleotide"
tcggcgatgaggcctggttcg

SEQ ID NO: 23953 - DNA, 21 bp, Artificial Sequence
  source: /note="Description of Artificial Sequence: Synthetic oligonucleotide"
tcggcgatgactaagaatctt

SEQ ID NO: 23954 - DNA, 21 bp, Artificial Sequence
  source: /note="Description of Artificial Sequence: Synthetic oligonucleotide"
tctgcgaatgggagttcgtcg

SEQ ID NO: 23955 - DNA, 21 bp, Artificial Sequence
  source: /note="Description of Artificial Sequence: Synthetic oligonucleotide"
tctgctaatattactgtgaag

SEQ ID NO: 23956 - DNA, 21 bp, Artificial Sequence
  source: /note="Description of Artificial Sequence: Synthetic oligonucleotide"
agtgctaatccgcatattact

SEQ ID NO: 23957 - DNA, 21 bp, Artificial Sequence
  source: /note="Description of Artificial Sequence: Synthetic oligonucleotide"
agtgcgaatagtctgcctgcg

SEQ ID NO: 23958 - DNA, 21 bp, Artificial Sequence
  source: /note="Description of Artificial Sequence: Synthetic oligonucleotide"
tctgcgaatactgcgaggtcg

SEQ ID NO: 23959 - DNA, 21 bp, Artificial Sequence
  source: /note="Description of Artificial Sequence: Synthetic oligonucleotide"
tcggctccggagtggatgcct

SEQ ID NO: 23960 - DNA, 21 bp, Artificial Sequence
  source: /note="Description of Artificial Sequence: Synthetic oligonucleotide"
tctgctccttttgctacggag

SEQ ID NO: 23961 - DNA, 21 bp, Artificial Sequence
  source: /note="Description of Artificial Sequence: Synthetic oligonucleotide"
tctgcgccgggtgcttctttt

SEQ ID NO: 23962 - DNA, 21 bp, Artificial Sequence
  source: /note="Description of Artificial Sequence: Synthetic oligonucleotide"
agtgcgcctcatactcatctt

SEQ ID NO: 23963 - DNA, 21 bp, Artificial Sequence
  source: /note="Description of Artificial Sequence: Synthetic oligonucleotide"
tctgctcctcatacgattcct

SEQ ID NO: 23964 - DNA, 21 bp, Artificial Sequence
  source: /note="Description of Artificial Sequence: Synthetic oligonucleotide"
agtgcgcctttgattggttct

SEQ ID NO: 23965 - DNA, 21 bp, Artificial Sequence
  source: /note="Description of Artificial Sequence: Synthetic oligonucleotide"
tcggcgcctatgacttgtgcg

SEQ ID NO: 23966 - DNA, 21 bp, Artificial Sequence
  source: /note="Description of Artificial Sequence: Synthetic oligonucleotide"
agtgcgccgaattcttcgtcg

SEQ ID NO: 23967 - DNA, 21 bp, Artificial Sequence
  source: /note="Description of Artificial Sequence: Synthetic oligonucleotide"
tctgcgccggttcggtctcct

SEQ ID NO: 23968 - DNA, 21 bp, Artificial Sequence
  source: /note="Description of Artificial Sequence: Synthetic oligonucleotide"
tcggcgcagggtgcgaggcct

SEQ ID NO: 23969 - DNA, 21 bp, Artificial Sequence
  source: /note="Description of Artificial Sequence: Synthetic oligonucleotide"
tcggcgcagctttcgttgccg

SEQ ID NO: 23970 - DNA, 21 bp, Artificial Sequence
  source: /note="Description of Artificial Sequence: Synthetic oligonucleotide"
tctgctagggatgctcattcg

SEQ ID NO: 23971 - DNA, 21 bp, Artificial Sequence
  source: /note="Description of Artificial Sequence: Synthetic oligonucleotide"
tcggcgcgtgatcatcggcct

SEQ ID NO: 23972 - DNA, 21 bp, Artificial Sequence
  source: /note="Description of Artificial Sequence: Synthetic oligonucleotide"
agtgcgaggggttctgatcct

SEQ ID NO: 23973 - DNA, 21 bp, Artificial Sequence
  source: /note="Description of Artificial Sequence: Synthetic oligonucleotide"
tcggcgcgtggtgtggctacg

SEQ ID NO: 23974 - DNA, 21 bp, Artificial Sequence
  source: /note="Description of Artificial Sequence: Synthetic oligonucleotide"
tcggcgcgtatttttaaggat

SEQ ID NO: 23975 - DNA, 21 bp, Artificial Sequence
  source: /note="Description of Artificial Sequence: Synthetic oligonucleotide"
agtgctcgtatggcgctgggt

SEQ ID NO: 23976 - DNA, 21 bp, Artificial Sequence
  source: /note="Description of Artificial Sequence: Synthetic oligonucleotide"
tctgctcgtcaggtgtcgggg

SEQ ID NO: 23977 - DNA, 21 bp, Artificial Sequence
  source: /note="Description of Artificial Sequence: Synthetic oligonucleotide"
agtgcgcggtctgatccggct

SEQ ID NO: 23978 - DNA, 21 bp, Artificial Sequence
  source: /note="Description of Artificial Sequence: Synthetic oligonucleotide"
agtgcgcgtacggctggtcct

SEQ ID NO: 23979 - DNA, 21 bp, Artificial Sequence
  source: /note="Description of Artificial Sequence: Synthetic oligonucleotide"
agtgcgcggacggataggacg

SEQ ID NO: 23980 - DNA, 21 bp, Artificial Sequence
  source: /note="Description of Artificial Sequence: Synthetic oligonucleotide"
agtgcgcgtactgttgatatg

SEQ ID NO: 23981 - DNA, 21 bp, Artificial Sequence
  source: /note="Description of Artificial Sequence: Synthetic oligonucleotide"
agtgctcgtgtgtttcctgcg

SEQ ID NO: 23982 - DNA, 21 bp, Artificial Sequence
  source: /note="Description of Artificial Sequence: Synthetic oligonucleotide"
tctgctcgtgtgaatattggg

SEQ ID NO: 23983 - DNA, 21 bp, Artificial Sequence
  source: /note="Description of Artificial Sequence: Synthetic oligonucleotide"
agtgctcgtgtttctaattct

SEQ ID NO: 23984 - DNA, 21 bp, Artificial Sequence
  source: /note="Description of Artificial Sequence: Synthetic oligonucleotide"
tctgcgtcggcgttggtgctg

SEQ ID NO: 23985 - DNA, 21 bp, Artificial Sequence
  source: /note="Description of Artificial Sequence: Synthetic oligonucleotide"
agtgcgagtgagcgttttcgg

SEQ ID NO: 23986 - DNA, 21 bp, Artificial Sequence
  source: /note="Description of Artificial Sequence: Synthetic oligonucleotide"
tcggcttcggagtcgtctatg

SEQ ID NO: 23987 - DNA, 21 bp, Artificial Sequence
  source: /note="Description of Artificial Sequence: Synthetic oligonucleotide"
agtgcttcgattcaggtgatg

SEQ ID NO: 23988 - DNA, 21 bp, Artificial Sequence
  source: /note="Description of Artificial Sequence: Synthetic oligonucleotide"
agtgcgtctaagcctactagt

SEQ ID NO: 23989 - DNA, 21 bp, Artificial Sequence
  source: /note="Description of Artificial Sequence: Synthetic oligonucleotide"
agtgcttcgcttcgtttgccg

SEQ ID NO: 23990 - DNA, 21 bp, Artificial Sequence
  source: /note="Description of Artificial Sequence: Synthetic oligonucleotide"
tctgcgtcgatgcgtgcgttg

SEQ ID NO: 23991 - DNA, 21 bp, Artificial Sequence
  source: /note="Description of Artificial Sequence: Synthetic oligonucleotide"
agtgcttctaattctgttggt

SEQ ID NO: 23992 - DNA, 21 bp, Artificial Sequence
  source: /note="Description of Artificial Sequence: Synthetic oligonucleotide"
agtgcttctcctgctggtcat

SEQ ID NO: 23993 - DNA, 21 bp, Artificial Sequence
  source: /note="Description of Artificial Sequence: Synthetic oligonucleotide"
tctgcgtctcctcagaggacg

SEQ ID NO: 23994 - DNA, 21 bp, Artificial Sequence
  source: /note="Description of Artificial Sequence: Synthetic oligonucleotide"
tcggcttcgcggcagattccg

SEQ ID NO: 23995 - DNA, 21 bp, Artificial Sequence
  source: /note="Description of Artificial Sequence: Synthetic oligonucleotide"
tcggcttcttctgctgcgcag

SEQ ID NO: 23996 - DNA, 21 bp, Artificial Sequence
  source: /note="Description of Artificial Sequence: Synthetic oligonucleotide"
agtgcttcgtctaagacgggg

SEQ ID NO: 23997 - DNA, 21 bp, Artificial Sequence
  source: /note="Description of Artificial Sequence: Synthetic oligonucleotide"
agtgcttctacgccgaagcat

SEQ ID NO: 23998 - DNA, 21 bp, Artificial Sequence
  source: /note="Description of Artificial Sequence: Synthetic oligonucleotide"
agtgcttctacgcagatttct

SEQ ID NO: 23999 - DNA, 21 bp, Artificial Sequence
  source: /note="Description of Artificial Sequence: Synthetic oligonucleotide"
tcggcgtctgtgcggggtaat

SEQ ID NO: 24000 - DNA, 21 bp, Artificial Sequence
  source: /note="Description of Artificial Sequence: Synthetic oligonucleotide"
agtgcgagtgttacttattcg

SEQ ID NO: 24001 - DNA, 21 bp, Artificial Sequence
  source: /note="Description of Artificial Sequence: Synthetic oligonucleotide"
agtgctacgtttgatacgact

SEQ ID NO: 24002 - DNA, 21 bp, Artificial Sequence
  source: /note="Description of Artificial Sequence: Synthetic oligonucleotide"
agtgctactctttctgctctt

SEQ ID NO: 24003 - DNA, 21 bp, Artificial Sequence
  source: /note="Description of Artificial Sequence: Synthetic oligonucleotide"
agtgctacgccgcatagggct

SEQ ID NO: 24004 - DNA, 21 bp, Artificial Sequence
  source: /note="Description of Artificial Sequence: Synthetic oligonucleotide"
tctgctactcctatttcgcgg

SEQ ID NO: 24005 - DNA, 21 bp, Artificial Sequence
  source: /note="Description of Artificial Sequence: Synthetic oligonucleotide"
tcggctacgcagcatactggt

SEQ ID NO: 24006 - DNA, 21 bp, Artificial Sequence
  source: /note="Description of Artificial Sequence: Synthetic oligonucleotide"
agtgctacgcagcgtattgtg

SEQ ID NO: 24007 - DNA, 21 bp, Artificial Sequence
  source: /note="Description of Artificial Sequence: Synthetic oligonucleotide"
tctgcgacttctccggatcgt

SEQ ID NO: 24008 - DNA, 21 bp, Artificial Sequence
  source: /note="Description of Artificial Sequence: Synthetic oligonucleotide"
tcggcgacggtgcctcgtcct

SEQ ID NO: 24009 - DNA, 21 bp, Artificial Sequence
  source: /note="Description of Artificial Sequence: Synthetic oligonucleotide"
tcggctgtggcgattttgact

SEQ ID NO: 24010 - DNA, 21 bp, Artificial Sequence
  source: /note="Description of Artificial Sequence: Synthetic oligonucleotide"
tcggctgtgggggcgcatagt

SEQ ID NO: 24011 - DNA, 21 bp, Artificial Sequence
  source: /note="Description of Artificial Sequence: Synthetic oligonucleotide"
agtgctgtgggtaatgcgcgt

SEQ ID NO: 24012 - DNA, 21 bp, Artificial Sequence
  source: /note="Description of Artificial Sequence: Synthetic oligonucleotide"
agtgcggttggtcgtagtact

SEQ ID NO: 24013 - DNA, 21 bp, Artificial Sequence
  source: /note="Description of Artificial Sequence: Synthetic oligonucleotide"
tcggctgttggtacgtcgtat

SEQ ID NO: 24014 - DNA, 21 bp, Artificial Sequence
  source: /note="Description of Artificial Sequence: Synthetic oligonucleotide"
tctgcggttcataggatggat

SEQ ID NO: 24015 - DNA, 21 bp, Artificial Sequence
  source: /note="Description of Artificial Sequence: Synthetic oligonucleotide"
tctgcggtgattcgtgcttct

SEQ ID NO: 24016 - DNA, 21 bp, Artificial Sequence
  source: /note="Description of Artificial Sequence: Synthetic oligonucleotide"
tcggctgtgttgccgcagcgt

SEQ ID NO: 24017 - DNA, 21 bp, Artificial Sequence
  source: /note="Description of Artificial Sequence: Synthetic oligonucleotide"
agtgcggtgaatgaggctcgg

SEQ ID NO: 24018 - DNA, 21 bp, Artificial Sequence
  source: /note="Description of Artificial Sequence: Synthetic oligonucleotide"
tcggcggtgaattctaggatg

SEQ ID NO: 24019 - DNA, 21 bp, Artificial Sequence
  source: /note="Description of Artificial Sequence: Synthetic oligonucleotide"
agtgcggttcgtatggctacg

SEQ ID NO: 24020 - DNA, 21 bp, Artificial Sequence
  source: /note="Description of Artificial Sequence: Synthetic oligonucleotide"
agtgctgtgcgtccgttgccg

SEQ ID NO: 24021 - DNA, 21 bp, Artificial Sequence
  source: /note="Description of Artificial Sequence: Synthetic oligonucleotide"
tcggctgttactggggcgtgg

SEQ ID NO: 24022 - DNA, 21 bp, Artificial Sequence
  source: /note="Description of Artificial Sequence: Synthetic oligonucleotide"
tctgctgtgacgtctcatatg

SEQ ID NO: 24023 - DNA, 21 bp, Artificial Sequence
  source: /note="Description of Artificial Sequence: Synthetic oligonucleotide"
tctgcggtgtatcagggtcat

SEQ ID NO: 24024 - DNA, 21 bp, Artificial Sequence
  source: /note="Description of Artificial Sequence: Synthetic oligonucleotide"
tcggcttggtcgagtactggt

SEQ ID NO: 24025 - DNA, 21 bp, Artificial Sequence
  source: /note="Description of Artificial Sequence: Synthetic oligonucleotide"
agtgcttatgcttcgtctagt

SEQ ID NO: 24026 - DNA, 21 bp, Artificial Sequence
  source: /note="Description of Artificial Sequence: Synthetic oligonucleotide"
tctgcttatcagaatatggcg

SEQ ID NO: 24027 - DNA, 21 bp, Artificial Sequence
  source: /note="Description of Artificial Sequence: Synthetic oligonucleotide"
tctgcttatgtggatactagg

SEQ ID NO: 24028 - DNA, 21 bp, Artificial Sequence
  source: /note="Description of Artificial Sequence: Synthetic oligonucleotide"
tcttgtgagctgcttccggct

SEQ ID NO: 24029 - DNA, 21 bp, Artificial Sequence
  source: /note="Description of Artificial Sequence: Synthetic oligonucleotide"
agttgtttgaatggtgttccg

SEQ ID NO: 24030 - DNA, 21 bp, Artificial Sequence
  source: /note="Description of Artificial Sequence: Synthetic oligonucleotide"
tctgatgcgatgacgattgct

SEQ ID NO: 24031 - DNA, 21 bp, Artificial Sequence
  source: /note="Description of Artificial Sequence: Synthetic oligonucleotide"
tcggatgcgaatggtagttct

(The sequence listing continues in the following parts.)
